United States Patent Application Publication US 2023/0026259 A1 - sequence listing, part 66

SEQ ID NO: 165104 - DNA, 584 bp, Homo sapiens
  Payload ID: 12511
  Gene Symbol: PIGS
  Gene Name: phosphatidylinositol glycan anchor biosynthesis, class S
  ENST ID: ENST00000584080
  CDS Start-End: 45-170
acgaagctctgcccccacggtggccggagcagccggaagctagcatggcggccgccggggctgcggctacacacctagctccgcctcatggtgcctgtcactgtcgtgtttacgcgggagtcagtgcccctggacgaccaggagaagctgcccttcaccgttgtgcatgaaagagagattcctctgaaatacaaaatgaaaatcaaatgccgtttccagaaggcctatcggagggctttggaccatgaggaggaggccctgtcatcgggcagtgtgcaagaggcagaagccatgttagatgagcctcaggaacaagcggagggctccctgactgtgtacgtgatatctgaacactcctcacttcttccccaggctatgagatcaccttcagtttactcaacccagaccccaagtcccatgatgtctactgggacattgagggggctgtccggcgctatgtgcaacctttcctgaatgccctcggtgccgctggcaacttctctgtggactctcagattctttactatgcaatgttgggggtgaatccccgctttgactcagcttcctccagctactatttggac

SEQ ID NO: 165105 - DNA, 594 bp, Homo sapiens
  Payload ID: 12511
  Gene Symbol: PIGS
  Gene Name: phosphatidylinositol glycan anchor biosynthesis, class S
  ENST ID: ENST00000582721
  CDS Start-End: 43-393
gaagctctgcccccacggtggccggagcagccggaagctagcatggcggccgccggggctgcggctacacacctagaggtggcccggggcaagcgcgccgccctcttcttcgctgcggtggccatcgtgctggggctaccgctctggtggaagaccacggagacctaccgggcctcgttgccttactcccagatcagtggcctgaatgcccttcaggtgagactgctgtgcgggagggtcgggggacagcccccccggcaaggtggagactcagtgacggccctgatgctccttcctgtagctccgcctcatggtgcctgtcactgtcgtgtttacgcgggagtcagtgcccctggacgaccaggagaagctgcccttcaccgttgtgcatgaaagagagattcctctgaaatacaaaatgaaaatcaaatgccgtttccagaaggcctatcggagggctttggaccatgaggaggaggccctgtcatcgggcagtgtgcaagaggcagaagccatgttagatgagcctcaggaacaagcggagggctccctgactgtgtacgtgatatctgaacactcctcacttcttcccca

SEQ ID NO: 165106 - DNA, 1694 bp, Homo sapiens
  Payload ID: 12512
  Gene Symbol: PIGT
  Gene Name: phosphatidylinositol glycan anchor biosynthesis, class T
  Uniprot ID: Q969N2
  ENST ID: ENST00000279035
  CDS Start-End: 48-1478
ttttcatggggccgagcgccgctgggtaggcggaagtagccgcaggcatggcggcggctatgccgcttgctctgctcgtcctgttgctcctggggcccggcggctggtgccttgcagaacccccacgcgacagcctgcgggaggaacttgtcatcaccccgctgccttccggggacgtagccgccacattccagttccgcacgcgctgggattcggagcttcagcgggaaggagacactgaccactactttctgcgctatgctgtgctgccgcgggaggtggtctgcaccgaaaacctcaccccctggaagaagctcttgccctgtagttccaaggcaggcctctctgtgctgctgaaggcagatcgcttgttccacaccagctaccactcccaggcagtgcatatccgccctgtttgcagaaatgcacgctgtactagcatctcctgggagctgaggcagaccctgtcagttgtatttgatgccttcatcacggggcagggaaagaaagactggtccctcttccggatgttctcccgaaccctcacggagccctgccccctggcttcagagagccgagtctatgtggacatcaccacctacaaccaggacaacgagacattagaggtgcacccacccccgaccactacatatcaggacgtcatcctaggcactcggaagacctatgccatctatgacttgcttgacaccgccatgatcaacaactctcgaaacctcaacatccagctcaagtggaagagacccccagagaatgaggcccccccagtgcccttcctgcatgcccagcggtacgtgagtggctatgggctgcagaagggggagctgagcacactgctgtacaacacccacccataccgggccttcccggtgctgctgctggacaccgtaccctggtatctgcggctgtatgtgcacaccctcaccatcacctccaagggcaaggagaacaaaccaagttacatccactaccagcctgcccaggaccggctgcaaccccacctcctggagatgctgattcagctgccggccaactcagtcaccaaggtttccatccagtttgagcgggcgctgctgaagtggaccgagtacacgccagatcctaaccatggcttctatgtcagcccatctgtcctcagcgcccttgtgcccagcatggtagcagccaagccagtggactgggaagagagtcccctcttcaacagcctgttcccagtctctgatggctctaactactttgtgcggctctacacggagccgctgctggtgaacctgccgacaccggacttcagcatgccctacaacgtgatctgcctcacgtgcactgtggtggccgtgtgctatggctccttctacaatctcctcacccgaaccttccacatcgaggagccccgcacaggtggcctggccaagcggctggccaaccttatccggcgcgcccgaggtgtccccccactctgattcttgccctttccagcagctgcagctgccgtttctctctggggaggggagcccaagggctgtttctgccacttgctctcctcagagttggcttttgaaccaaagtgccctggaccaggtcagggcctacagctgtgttgtccagtacaggagccacgagccaaatgtggcatttgaatttgaattaacttagaaattcatttcctcacctgtagt

SEQ ID NO: 165107 - DNA, 2235 bp, Homo sapiens
  Payload ID: 12512
  Gene Symbol: PIGT
  Gene Name: phosphatidylinositol glycan anchor biosynthesis, class T
  Uniprot ID: Q969N2
  ENST ID: ENST00000279036
  CDS Start-End: 81-1817
acttctcacacgcctttcttattggataccggcttttcatggggccgagcgccgctgggtaggcggaagtagccgcaggcatggcggcggctatgccgcttgctctgctcgtcctgttgctcctggggcccggcggctggtgccttgcagaacccccacgcgacagcctgcgggaggaacttgtcatcaccccgctgccttccggggacgtagccgccacattccagttccgcacgcgctgggattcggagcttcagcgggaaggagtgtcccattacaggctctttcccaaagccctggggcagctgatctccaagtattctctacgggagctgcacctgtcattcacacaaggcttttggaggacccgatactgggggccacccttcctgcaggccccatcaggtgcagagctgtgggtctggttccaagacactgtcactgatgtggataaatcttggaaggagctcagtaatgtcctctcagggatcttctgcgcctctctcaacttcatcgactccaccaacacagtcactcccactgcctccttcaaacccctgggtctggccaatgacactgaccactactttctgcgctatgctgtgctgccgcgggaggtggtctgcaccgaaaacctcaccccctggaagaagctcttgccctgtagttccaaggcaggcctctctgtgctgctgaaggcagatcgcttgttccacaccagctaccactcccaggcagtgcatatccgccctgtttgcagaaatgcacgctgtactagcatctcctgggagctgaggcagaccctgtcagttgtatttgatgccttcatcacggggcagggaaagaaagactggtccctcttccggatgttctcccgaaccctcacggagccctgccccctggcttcagagagccgagtctatgtggacatcaccacctacaaccaggacaacgagacattagaggtgcacccacccccgaccactacatatcaggacgtcatcctaggcactcggaagacctatgccatctatgacttgcttgacaccgccatgatcaacaactctcgaaacctcaacatccagctcaagtggaagagacccccagagaatgaggcccccccagtgcccttcctgcatgcccagcggtacgtgagtggctatgggctgcagaagggggagctgagcacactgctgtacaacacccacccataccgggccttcccggtgctgctgctggacaccgtaccctggtatctgcggctgtatgtgcacaccctcaccatcacctccaagggcaaggagaacaaaccaagttacatccactaccagcctgcccaggaccggctgcaaccccacctcctggagatgctgattcagctgccggccaactcagtcaccaaggtttccatccagtttgagcgggcgctgctgaagtggaccgagtacacgccagatcctaaccatggcttctatgtcagcccatctgtcctcagcgcccttgtgcccagcatggtagcagccaagccagtggactgggaagagagtcccctcttcaacagcctgttcccagtctctgatggctctaactactttgtgcggctctacacggagccgctgctggtgaacctgccgacaccggacttcagcatgccctacaacgtgatctgcctcacgtgcactgtggtggccgtgtgctatggctccttctacaatctcctcacccgaaccttccacatcgaggagccccgcacaggtggcctggccaagcggctggccaaccttatccggcgcgcccgaggtgtccccccactctgattcttgccctttccagcagctgcagctgccgtttctctctggggaggggagcccaagggctgtttctgccacttgctctcctcagagttggcttttgaaccaaagtgccctggaccaggtcagggcctacagctgtgttgtccagtacaggagccacgagccaaatgtggcatttgaatttgaattaacttagaaattcatttcctcacctgtagtggccacctctatattgaggtgctcaataagcaaaagtggtcggtggctgctgtattggacagcacagaaaaagatttccatcaccacagaaaggtcggctggcagcactggccaaggtgatggggtgtgctacacagtgtatgtcactgtgtagtggatggagtttactgtttgtggaataaaaacggctgtttccgtggtt

SEQ ID NO: 165108 - DNA, 1971 bp, Homo sapiens
  Payload ID: 12512
  Gene Symbol: PIGT
  Gene Name: phosphatidylinositol glycan anchor biosynthesis, class T
  Uniprot ID: Q969N2
  ENST ID: ENST00000372689
  CDS Start-End: 21-1556
aggcggaagtagccgcaggcatggcggcggctatgccgcttgctctgctcgtcctgttgctcctggggcccggcggctggtgccttgcagaacccccacgcgacagcctgcgggaggaacttgtcatcaccccgctgccttccggggacgtagccgccacattccagttccgcacgcgctgggattcggagcttcagcgggaaggagtgtcccattacaggctctttcccaaagccctggggcagctgatctccaagtattctctacgggagctgcacctgtcattcacacaaggcttttggaggacccgatactgggggccacccttcctgcaggccccatcaggtgcagagctgtgggtctggttccaagacactgtcactgatgtggataaatcttggaaggagctcagtaatgtcctctcagggatcttctgcgcctctctcaacttcatcgactccaccaacacagtcactcccactgcctccttcaaacccctgggtctggccaatgacactgaccactactttctgcgctatgctgtgctgccgcgggaggtggtctgcaccgaaaacctcaccccctggaagaagctcttgccctgtagttccaaggcaggcctctctgtgctgctgaaggcagatcgcttgttccacaccagctaccactcccaggcagtgcatatccgccctgtttgcagaaatgcacgctgtactagcatctcctgggagctgaggcagaccctgtcagttgtatttgatgccttcatcacggggcagggaaagaaagactggtccctcttccggatgttctcccgaaccctcacggagccctgccccctggcttcagagagccgagtctatgtggacatcaccacctacaaccaggacaacgagacattagaggtgcacccacccccgaccactacatatcaggacgtcatcctaggcactcggaagacctatgccatctatgacttgcttgacaccgccatgatcaacaactctcgaaacctcaacatccagctcaagtggaagagacccccagagaatggttacatccactaccagcctgcccaggaccggctgcaaccccacctcctggagatgctgattcagctgccggccaactcagtcaccaaggtttccatccagtttgagcgggcgctgctgaagtggaccgagtacacgccagatcctaaccatggcttctatgtcagcccatctgtcctcagcgcccttgtgcccagcatggtagcagccaagccagtggactgggaagagagtcccctcttcaacagcctgttcccagtctctgatggctctaactactttgtgcggctctacacggagccgctgctggtgaacctgccgacaccggacttcagcatgccctacaacgtgatctgcctcacgtgcactgtggtggccgtgtgctatggctccttctacaatctcctcacccgaaccttccacatcgaggagccccgcacaggtggcctggccaagcggctggccaaccttatccggcgcgcccgaggtgtccccccactctgattcttgccctttccagcagctgcagctgccgtttctctctggggaggggagcccaagggctgtttctgccacttgctctcctcagagttggcttttgaaccaaagtgccctggaccaggtcagggcctacagctgtgttgtccagtacaggagccacgagccaaatgtggcatttgaatttgaattaacttagaaattcatttcctcacctgtagtggccacctctatattgaggtgctcaataagcaaaagtggtcggtggctgctgtattggacagcacagaaaaagatttccatcaccacagaaaggtcggctggcagcactggccaaggtgatggggtgtgctacacagtgtatgtcactgtgtagtggatggagtttactgtttgtggaataaaaacggctgtttccgtg

SEQ ID NO: 165109 - DNA, 1807 bp, Homo sapiens
  Payload ID: 12512
  Gene Symbol: PIGT
  Gene Name: phosphatidylinositol glycan anchor biosynthesis, class T
  ENST ID: ENST00000455050
  CDS Start-End: 17-388
ggaagtagccgcaggcatggcggcggctatgccgcttgctctgctcgtcctgttgctcctggggcccggcggctggtgccttgcagaacccccacgcgacagcctgcgggaggaacttgtcatcaccccgctgccttccggggacgtagccgccacattccagttccgcacgcgctgggattcggagcttcagcgggaaggagtgtcccattacaggctctttcccaaagccctggggcagctgatctccaagtattctctacgggagctgcacctgtcattcacacaaggcttttggaggacccgatactgggggccacccttcctgcaggccccatcaggtgcagagctgtgggtctggttccaagacactgtcactgaacactgaccactactttctgcgctatgctgtgctgccgcgggaggtggtctgcaccgaaaacctcaccccctggaagaagctcttgccctgtagttccaagggcttctcttatctctttccatctcctccaggcaggcctctctgtgctgctgaaggcagatcgcttgttccacaccagctaccactcccaggcagtgcatatccgccctgtttgcagaaatgcacgctgtactagcatctcctgggagctgaggcagaccctgtcagttgtatttgatgccttcatcacggggcagggaaagaaagactggtccctcttccggatgttctcccgaaccctcacggagccctgccccctggcttcagagagccgagtctatgtggacatcaccacctacaaccaggacaacgagacattagaggtgcacccacccccgaccactacatatcaggacgtcatcctaggcactcggaagacctatgccatctatgacttgcttgacaccgccatgatcaacaactctcgaaacctcaacatccagctcaagtggaagagacccccagagaatgaggcccccccagtgcccttcctgcatgcccagcggtacgtgagtggctatgggctgcagaagggggagctgagcacactgctgtacaacacccacccataccgggccttcccggtgctgctgctggacaccgtaccctggtatctgcggctgtatgtgcacaccctcaccatcacctccaagggcaaggagaacaaaccaagttacatccactaccagcctgcccaggaccggctgcaaccccacctcctggagatgctgattcagctgccggccaactcagtcaccaaggtttccatccagtttgagcgggcgctgctgaagtggaccgagtacacgccagatcctaaccatggcttctatgtcagcccatctgtcctcagcgcccttgtgcccagcatggtagcagccaagccagtggactgggaagagagtcccctcttcaacagcctgttcccagtctctgatggctctaactactttgtgcggctctacacggagccgctgctggtgaacctgccgacaccggacttcagcatgccctacaacgtgatctgcctcacgtgcactgtggtggccgtgtgctatggctccttctacaatctcctcacccgaaccttccacatcgaggagccccgcacaggtggcctggccaagcggctggccaaccttatccggcgcgcccgaggtgtccccccactctgattcttgccctttccagcagctgcagctgccgtttctctctggggaggggagcccaagggctgtttctgccacttgctctcctcagagttggcttttgaaccaaagtgccctggaccaggtcagggcctacagctgtgttgtccagtacagg

SEQ ID NO: 165110 - DNA, 326 bp, Homo sapiens
  Payload ID: 12512
  Gene Symbol: PIGT
  Gene Name: phosphatidylinositol glycan anchor biosynthesis, class T
  ENST ID: ENST00000432270
  CDS Start-End: 1-326
gctcgtcctgttgctcctggggcccggcggctggtgccttgcagaacccccacgcgacagcctgcgggaggaacttgtcatcaccccgctgccttccggggacgtagccgccacattccagttccgcacgcgctgggattcggagcttcagcgggaaggagactggtccctcttccggatgttctcccgaaccctcacggagccctgccccctggcttcagagagccgagtctatgtggacatcaccacctacaaccaggacaacgagacattagaggtgcacccacccccgaccactacatatcaggacgtcatcctaggcactc

SEQ ID NO: 165111 - DNA, 2000 bp, Homo sapiens
  Payload ID: 12512
  Gene Symbol: PIGT
  Gene Name: phosphatidylinositol glycan anchor biosynthesis, class T
  Uniprot ID: Q969N2
  ENST ID: ENST00000543458
  CDS Start-End: 14-1582
agtagccgcaggcatggcggcggctatgccgcttgctctgctcgtcctgttgctcctggggcccggcggctggtgccttgcagaacccccacgcgacagcctgcgggaggaacttgtcatcaccccgctgccttccggggacgtagccgccacattccagttccgcacgcgctgggattcggagcttcagcgggaaggagtgtcccattacaggctctttcccaaagccctggggcagctgatctccaagtattctctacgggagctgcacctgtcattcacacaaggcttttggaggacccgatactgggggccacccttcctgcaggccccatcagacactgaccactactttctgcgctatgctgtgctgccgcgggaggtggtctgcaccgaaaacctcaccccctggaagaagctcttgccctgtagttccaaggcaggcctctctgtgctgctgaaggcagatcgcttgttccacaccagctaccactcccaggcagtgcatatccgccctgtttgcagaaatgcacgctgtactagcatctcctgggagctgaggcagaccctgtcagttgtatttgatgccttcatcacggggcagggaaagaaagactggtccctcttccggatgttctcccgaaccctcacggagccctgccccctggcttcagagagccgagtctatgtggacatcaccacctacaaccaggacaacgagacattagaggtgcacccacccccgaccactacatatcaggacgtcatcctaggcactcggaagacctatgccatctatgacttgcttgacaccgccatgatcaacaactctcgaaacctcaacatccagctcaagtggaagagacccccagagaatgaggcccccccagtgcccttcctgcatgcccagcggtacgtgagtggctatgggctgcagaagggggagctgagcacactgctgtacaacacccacccataccgggccttcccggtgctgctgctggacaccgtaccctggtatctgcggctgtatgtgcacaccctcaccatcacctccaagggcaaggagaacaaaccaagttacatccactaccagcctgcccaggaccggctgcaaccccacctcctggagatgctgattcagctgccggccaactcagtcaccaaggtttccatccagtttgagcgggcgctgctgaagtggaccgagtacacgccagatcctaaccatggcttctatgtcagcccatctgtcctcagcgcccttgtgcccagcatggtagcagccaagccagtggactgggaagagagtcccctcttcaacagcctgttcccagtctctgatggctctaactactttgtgcggctctacacggagccgctgctggtgaacctgccgacaccggacttcagcatgccctacaacgtgatctgcctcacgtgcactgtggtggccgtgtgctatggctccttctacaatctcctcacccgaaccttccacatcgaggagccccgcacaggtggcctggccaagcggctggccaaccttatccggcgcgcccgaggtgtccccccactctgattcttgccctttccagcagctgcagctgccgtttctctctggggaggggagcccaagggctgtttctgccacttgctctcctcagagttggcttttgaaccaaagtgccctggaccaggtcagggcctacagctgtgttgtccagtacaggagccacgagccaaatgtggcatttgaatttgaattaacttagaaattcatttcctcacctgtagtggccacctctatattgaggtgctcaataagcaaaagtggtcggtggctgctgtattggacagcacagaaaaagatttccatcaccacagaaaggtcggctggcagcactggccaaggtgatggggtgtgctacacagtgtatgtcactgtgtagtggatggagtttactgtttgtggaataaaaacggctgtttccgtggtt

SEQ ID NO: 165112 - DNA, 675 bp, Homo sapiens
  Payload ID: 12512
  Gene Symbol: PIGT
  Gene Name: phosphatidylinositol glycan anchor biosynthesis, class T
  ENST ID: ENST00000545755
  CDS Start-End: 1-517
catgatcaacaactctcgaaacctcaacatccagctcaagtggaagagacccccagagaatgaggcccccccagtgcccttcctgcatgcccagcggtacgtgagtggctatgggctgcagaagggggagctgagcacactgctgtacaacacccacccataccgggccttcccggtgctgctgctggacaccgtaccctggtatctgcggctgtatgtgcacaccctcaccatcacctccaagggcaaggagaacaaaccaagttacatccactaccagcctgcccaggaccggctgcaaccccacctcctggagatgctgattcagctgccggccaactcagtcaccaaggtttccatccagtttgagcgggcgctgctgaagtggaccgagtacacgccagatcctaaccatggcttctatgtcagcccatctgtcctcagcgcccttgtgcccagcatggtagcagccaagccagtggactgggaagagagtcccctcttcaacagcctgtaagtgtgaccacactcactgataacacatcctcagctgcctgctgggccttaacacaggtgaccaggctcctgcaggggagttcagggtagatgttacatcttccaaagagatgtgtagatttaattcaatcctaataaaaatcctggcagtctgtggaa

SEQ ID NO: 165113 - DNA, 1632 bp, Homo sapiens
  Payload ID: 12513
  Gene Symbol: PIGU
  Gene Name: phosphatidylinositol glycan anchor biosynthesis, class U
  Uniprot ID: Q9H490
  ENST ID: ENST00000217446
  CDS Start-End: 1-1308
atggcggctcccttggtcctggtgctggtggtggctgtgacagtgcgggcggccttgttccgctccagtctggccgagttcatttccgagcgggtggaggtggtgtccccactgagctcttggaagagagtggttgaaggcctttcactgttggacttgggagtatctccgtattctggagcagtatttcatgaaactccattaataatatacctctttcatttcctaattgactatgctgaattggtgtttatgataactgatgcactcactgctattgccctgtattttgcaatccaggacttcaataaagttgtgtttaaaaagcagaaactcctcctagaactggaccagtatgccccagatgtggccgaactcatccggacccctatggaaatgcgttacatccctttgaaagtggccctgttctatctcttaaatccttacacgattttgtcttgtgttgccaagtctacctgtgccatcaacaacaccctcattgctttcttcattttgactacgataaaaggcagtgctttcctcagtgctatttttcttgccttagcgacataccagtctctgtacccactcaccttgtttgtcccaggactcctctatctcctccagcggcagtacatacctgtgaaaatgaagagcaaagccttctggatcttttcttgggagtatgccatgatgtatgtgggaagcctagtggtaatcatttgcctctccttcttccttctcagctcttgggatttcatccccgcagtctatggctttatactttctgttccagatctcactccaaacattggtcttttctggtacttctttgcagagatgtttgagcacttcagcctcttctttgtatgtgtgtttcagatcaacgtcttcttctacaccatccccttagccataaagctaaaggagcaccccatcttcttcatgtttatccagatcgctgtcatcgccatctttaagtcctacccgacagtgggggacgtggcgctctacatggccttcttccccgtgtggaaccatctctacagattcctgagaaacatctttgtcctcacctgcatcatcatcgtctgttccctgctcttccctgtcctgtggcacctctggatttatgcaggaagtgccaactctaatttcttttatgccatcacactgaccttcaacgttgggcagatcctgctcatctctgattacttctatgccttcctgcggcgggagtactacctcacacatggcctctacttgaccgccaaggatggcacagaggccatgctcgtgctcaagtaggcctggctggcacagggctgcatggacctcagggggctgtggggccagaagctgggccaagccctccagccagagttgccagcaggcgagtgcttgggcagaagaggttcgagtccagggtcacaagtctctggtaccaaaagggacccatggctgactgacagcaaggcctatggggaagaactgggagctccccaacttggacccccaccttgtggctctgcacaccaaggagccccctcccagacaggaaggagaagaggcaggtgagcagggcttgttagattgtggctacttaataaatgttttttgttatgaagtcta

SEQ ID NO: 165114 - DNA, 1248 bp, Homo sapiens
  Payload ID: 12513
  Gene Symbol: PIGU
  Gene Name: phosphatidylinositol glycan anchor biosynthesis, class U
  Uniprot ID: Q9H490
  ENST ID: ENST00000374820
  CDS Start-End: 1-1248
atggcggctcccttggtcctggtgctggtggtggctgtgacagtgcgggcggccttgttccgctccagtctggccgagttcatttccgagcgggtggaggtggtgtccccactgagctcttggaagagagtggttgaaggcctttcactgttggacttgggagtatctccgtattctggagcagtatttcatgaaataactgatgcactcactgctattgccctgtattttgcaatccaggacttcaataaagttgtgtttaaaaagcagaaactcctcctagaactggaccagtatgccccagatgtggccgaactcatccggacccctatggaaatgcgttacatccctttgaaagtggccctgttctatctcttaaatccttacacgattttgtcttgtgttgccaagtctacctgtgccatcaacaacaccctcattgctttcttcattttgactacgataaaaggcagtgctttcctcagtgctatttttcttgccttagcgacataccagtctctgtacccactcaccttgtttgtcccaggactcctctatctcctccagcggcagtacatacctgtgaaaatgaagagcaaagccttctggatcttttcttgggagtatgccatgatgtatgtgggaagcctagtggtaatcatttgcctctccttcttccttctcagctcttgggatttcatccccgcagtctatggctttatactttctgttccagatctcactccaaacattggtcttttctggtacttctttgcagagatgtttgagcacttcagcctcttctttgtatgtgtgtttcagatcaacgtcttcttctacaccatccccttagccataaagctaaaggagcaccccatcttcttcatgtttatccagatcgctgtcatcgccatctttaagtcctacccgacagtgggggacgtggcgctctacatggccttcttccccgtgtggaaccatctctacagattcctgagaaacatctttgtcctcacctgcatcatcatcgtctgttccctgctcttccctgtcctgtggcacctctggatttatgcaggaagtgccaactctaatttcttttatgccatcacactgaccttcaacgttgggcagatcctgctcatctctgattacttctatgccttcctgcggcgggagtactacctcacacatggcctctacttgaccgccaaggatggcacagaggccatgctcgtgctcaagtag

SEQ ID NO: 165115 - DNA, 509 bp, Homo sapiens
  Payload ID: 12513
  Gene Symbol: PIGU
  Gene Name: phosphatidylinositol glycan anchor biosynthesis, class U
  ENST ID: ENST00000438215
  CDS Start-End: 1-509
gtctctgtacccactcaccttgtttgtcccaggactcctctatctcctccagcggcagtacatacctgtgaaaatgaagagcaaagccttctggatcttttcttgggagtatgccatgatatcaacgtcttcttctacaccatccccttagccataaagctaaaggagcaccccatcttcttcatgtttatccagatcgctgtcatcgccatctttaagtcctacccgacagtgggggacgtggcgctctacatggccttcttccccgtgtggaaccatctctacagattcctgagaaacatctttgtcctcacctgcatcatcatcgtctgttccctgctcttccctgtcctgtggcacctctggatttatgcaggaagtgccaactctaatttcttttatgccatcacactgaccttcaacgttgggcagatcctgctcatctctgattacttctatgccttcctgcggcgggagtactacctcacacatggcctctacttgaccgc

SEQ ID NO: 165116 - DNA, 2367 bp, Homo sapiens
  Payload ID: 12514
  Gene Symbol: PIGV
  Gene Name: phosphatidylinositol glycan anchor biosynthesis, class V
  Uniprot ID: Q9NUD9
  ENST ID: ENST00000078527
  CDS Start-End: 332-1813
gtccccgccggggaggtcgggacgggcaggggctgaggaccccgcgccagcttgggagccctggagttctggcgggagggaagctgtcaaatggaagccggtagaaatgagacagacgcccggagaagcggggagccccgcccctccgccatagcagcctcgggcgccgcctcttcctttccagcctcccgccctcgtctgcttccggccctgtggcctggtggggctctgcaggctccctcgggagtggtccttgggccgtggcccctctgggaggcctgagggagctcaatcctggtagcaacacccctgaattcctggtggtgaaaggatgtggccccaggacccatcccggaaggaggtgctgaggtttgcagtcagctgccgtatcctgactctgatgctgcaggccctcttcaatgccatcatcccagatcaccatgcagaagccttctctcctcctcgcctggccccctcaggctttgtggaccaactcgtggaaggtcttctgggcggcctgtctcactgggatgctgaacacttcttgttcattgctgagcatggctacctgtatgagcacaactttgccttctttcctggtttccccttggccctgctggtggggactgaactgttgagacccttacgggggttactgagtctacgcagttgcctgctgatttcggtagcatcactcaatttcttgttcttcatgttggctgcagttgcacttcatgacctgggttgtctggttttgcactgtccccaccagtccttttatgcagctctgcttttctgtctcagccctgccaatgtcttcctggcagctggttactcagaagctttgtttgccctcctgacattcagtgccatggggcagctggagaggggccgagtctggactagtgtactcctctttgcctttgccactggggtacgctccaacgggctggtcagtgttggcttcctcatgcattctcaatgccaaggctttttctcttctctaacgatgctgaatcctctgagacagctctttaagctgatggcctctctgtttctgtcggtgttcacacttggccttccctttgccctctttcagtattatgcctacacccaattctgtctgccaggctcagcccgccccattcctgagcctttggtacagttagctgtagacaagggctaccggattgcagagggaaatgaaccgccttggtgcttctgggatgttccactaatatacagctatatccaggatgtctactggaatgttggctttttgaaatactatgagctcaagcaggtgcccaattttctactggctgcaccagtggctatactggttgcctgggcaacttggacatacgtgaccactcacccttggctctgccttacacttgggctgcaaaggagcaagaacaataagaccctagagaagcccgatcttggattcctcagtcctcaggtgtttgtgtacgtggtccacgctgcagtgctgctgctgtttggaggtctgtgcatgcatgttcaggttctcaccaggtttttgggctcctccactcctattatgtactggtttccagctcacttgcttcaggatcaagagccgctgttgagatccttaaagactgtgccttggaagcctcttgcagaggactccccaccaggacaaaaggtccccagaaatcctatcatgggacttttgtatcactggaaaacctgttctccagtcacacgatacattctaggctacttcctgacttactggctcctgggactactcctacattgcaacttcctgccttggacatgacctggactctccagggacaggttggaagccaacttaacccaggggtctgaaagtaaaaatacacattggaactgcctctgctgccctgggatcattactgtgtccattataatctttctctttctctttgaaagctggtcaggaatgggagaagtgtcagacactagagagccccttctggtcctggctagggcaaattttagacaactattttctctgtaagtgaagattgtcgtattccaagtctaaaatacacctggatctgtctagtcaatcaacatagcagagacagtcttaaacctaccattgacctgtgtgtaaatttaaatgtcaatttattgaagtgtaaatttcatcaaaggcattagctgacaggctggtaacagtccacacaagatggtataggcctgaacagtgtagtggcagtaataaagtgggaccattttttccaaatgcgacattgtttctgatgtttttttttatgatttgtgcatgtatttttatatgaaaaaaacttacaaagatatgcaaattaaacttctttcagttataca

SEQ ID NO: 165117 - DNA, 2713 bp, Homo sapiens
  Payload ID: 12514
  Gene Symbol: PIGV
  Gene Name: phosphatidylinositol glycan anchor biosynthesis, class V
  Uniprot ID: Q9NUD9
  ENST ID: ENST00000374145
  CDS Start-End: 683-2164
gcttccggccctgtggcctggtggggctctgcaggctccctcgggagtggtccttgggccgtggcccctctggggtgagcgtggatgattagtacccagaagggactgtgtccaaaaggagccggccagaaacgggttgcggacacggctgggctgacagaaggcagcccccacgaggcctttggctctgaggaccctgggtcagagcgacttctccagcctgcgcagggggtgttagtcttacccagagggtccagagctgccgttcaacaggatgtcccagattctcagatagggcccaactaccctaagcatacctagcaagggcaggctgcggcatggaagtactgggctaggcgtttgggtgacctgggtcataatcctggctcggaaagggcgcgtaccctttggcgagggatgcgggctggtaccgtgaggtttaagaagcagaaaacatgacagcctctttaagtagccctgggtacgtcacttgaccccagtgagcctcagtttccatatccataaaatggcgatggtaattatactagcctcacagtgtctgatgagatctctggagcctatttatctcacgggaaaatttttgaagagtgaaactagttgatctaggcctgagggagctcaatcctggtagcaacacccctgaattcctggtggtgaaaggatgtggccccaggacccatcccggaaggaggtgctgaggtttgcagtcagctgccgtatcctgactctgatgctgcaggccctcttcaatgccatcatcccagatcaccatgcagaagccttctctcctcctcgcctggccccctcaggctttgtggaccaactcgtggaaggtcttctgggcggcctgtctcactgggatgctgaacacttcttgttcattgctgagcatggctacctgtatgagcacaactttgccttctttcctggtttccccttggccctgctggtggggactgaactgttgagacccttacgggggttactgagtctacgcagttgcctgctgatttcggtagcatcactcaatttcttgttcttcatgttggctgcagttgcacttcatgacctgggttgtctggttttgcactgtccccaccagtccttttatgcagctctgcttttctgtctcagccctgccaatgtcttcctggcagctggttactcagaagctttgtttgccctcctgacattcagtgccatggggcagctggagaggggccgagtctggactagtgtactcctctttgcctttgccactggggtacgctccaacgggctggtcagtgttggcttcctcatgcattctcaatgccaaggctttttctcttctctaacgatgctgaatcctctgagacagctctttaagctgatggcctctctgtttctgtcggtgttcacacttggccttccctttgccctctttcagtattatgcctacacccaattctgtctgccaggctcagcccgccccattcctgagcctttggtacagttagctgtagacaagggctaccggattgcagagggaaatgaaccgccttggtgcttctgggatgttccactaatatacagctatatccaggatgtctactggaatgttggctttttgaaatactatgagctcaagcaggtgcccaattttctactggctgcaccagtggctatactggttgcctgggcaacttggacatacgtgaccactcacccttggctctgccttacacttgggctgcaaaggagcaagaacaataagaccctagagaagcccgatcttggattcctcagtcctcaggtgtttgtgtacgtggtccacgctgcagtgctgctgctgtttggaggtctgtgcatgcatgttcaggttctcaccaggtttttgggctcctccactcctattatgtactggtttccagctcacttgcttcaggatcaagagccgctgttgagatccttaaagactgtgccttggaagcctcttgcagaggactccccaccaggacaaaaggtccccagaaatcctatcatgggacttttgtatcactggaaaacctgttctccagtcacacgatacattctaggctacttcctgacttactggctcctgggactactcctacattgcaacttcctgccttggacatgacctggactctccagggacaggttggaagccaacttaacccaggggtctgaaagtaaaaatacacattggaactgcctctgctgccctgggatcattactgtgtccattataatctttctctttctctttgaaagctggtcaggaatgggagaagtgtcagacactagagagccccttctggtcctggctagggcaaattttagacaactattttctctgtaagtgaagattgtcgtattccaagtctaaaatacacctggatctgtctagtcaatcaacatagcagagacagtcttaaacctaccattgacctgtgtgtaaatttaaatgtcaatttattgaagtgtaaatttcatcaaaggcattagctgacaggctggtaacagtccacacaagatggtataggcctgaacagtgtagtggcagtaataaagtgggaccattttttccaaatgcgacattgtttctgatgtttttttttatgatttgtgcatgtatttttatatgaaaaaaacttacaaagatatgcaaattaaacttctttcagtt

SEQ ID NO: 165118 - DNA, 716 bp, Homo sapiens
  Payload ID: 12514
  Gene Symbol: PIGV
  Gene Name: phosphatidylinositol glycan anchor biosynthesis, class V
  ENST ID: ENST00000431541
  CDS Start-End: 355-716
gaaatgagacagacgcccggagaagcggggagccccgcccctccgccatagcagcctcgggcgccgcctcttcctttccagcctcccgccctcgtctgcttccggccctgtggcctggtggggctctgcaggctccctcgggagtggtccttgggccgtggcccctctggggtgagcgtggatgattagtacccagaagggactgtgtccaaaaggagccggccagaaacgggttgcggacacggctgggctgacagaaggcagcccccacgaggcctttggctctgaggaccctggaggcctgagggagctcaatcctggtagcaacacccctgaattcctggtggtgaaaggatgtggccccaggacccatcccggaaggaggtgctgaggtttgcagtcagctgccgtatcctgactctgatgctgcaggccctcttcaatgccatcatcccagatcaccatgcagaagccttctctcctcctcgcctggccccctcaggctttgtggaccaactcgtggaaggtcttctgggcggcctgtctcactgggatgctgaacacttcttgttcattgctgagcatggctacctgtatgagcacaactttgccttctttcctggtttccccttggccctgctggtggggactgaactgttgagacccttacgggggttactgagtctacgcagttgcctgctgatttcggtagcatc

SEQ ID NO: 165119 - DNA, 608 bp, Homo sapiens
  Payload ID: 12514
  Gene Symbol: PIGV
  Gene Name: phosphatidylinositol glycan anchor biosynthesis, class V
  ENST ID: ENST00000430292
  CDS Start-End: 393-608
acacccaggacgcagggtgccgctgccggccacagaaaccccaagaatgtttttctttggctattcagaggacatctattgtgtgtcaggccctgtgctgagctgttgttgcctgacagcaggaagagcgcggctctggtttctgtgaagaggctgcgggtcagcctccgactacaagagcctcggcccacaccgggaactcagtgaacgtcagcgggagctggggcaagagcactgactctgagacagcagcctccgctcactatttgaaggcggggtggcggggggccttgaaggagagcgaagtgcgagagaactcttcaggtgtcaccaagaggcctgagggagctcaatcctggtagcaacacccctgaattcctggtggtgaaaggatgtggccccaggacccatcccggaaggaggtgctgaggtttgcagtcagctgccgtatcctgactctgatgctgcaggccctcttcaatgccatcatcccagatcaccatgcagaagccttctctcctcctcgcctggccccctcaggctttgtggaccaactcgtggaaggtcttctgggcggcctgtctcactgggatgctgaacacttcttg

SEQ ID NO: 165120 - DNA, 707 bp, Homo sapiens
  Payload ID: 12514
  Gene Symbol: PIGV
  Gene Name: phosphatidylinositol glycan anchor biosynthesis, class V
  ENST ID: ENST00000455364
  CDS Start-End: 161-707
ttacctgtaagcaaagtgtgggctacacacatctgtagtcgctgaggctagagcttgactcgagagaggaaaggaagaatgcaagcatggtcaagtggcagagaggcctgagggagctcaatcctggtagcaacacccctgaattcctggtggtgaaaggatgtggccccaggacccatcccggaaggaggtgctgaggtttgcagtcagctgccgtatcctgactctgatgctgcaggccctcttcaatgccatcatcccagatcaccatgcagaagccttctctcctcctcgcctggccccctcaggctttgtggaccaactcgtggaaggtcttctgggcggcctgtctcactgggatgctgaacacttcttgttcattgctgagcatggctacctgtatgagcacaactttgccttctttcctggtttccccttggccctgctggtggggactgaactgttgagacccttacgggggttactgagtctacgcagttgcctgctgatttcggtagcatcactcaatttcttgttcttcatgttggctgcagttgcacttcatgacctgggttgtctggttttgcactgtccccaccagtccttttatgcagctctgcttttctgtctcagccctgccaatgtcttcctggcagctggttactcagaagctttgtttgccctcctgacattcagtgccatggggc

SEQ ID NO: 165121 - DNA, 932 bp, Homo sapiens
  Payload ID: 12514
  Gene Symbol: PIGV
  Gene Name: phosphatidylinositol glycan anchor biosynthesis, class V
  ENST ID: ENST00000472757
  CDS Start-End: 84-308
cgtgggccccggatggaggagctgagaggcctgagggagctcaatcctggtagcaacacccctgaattcctggtggtgaaaggatgtggccccaggacccatcccggaaggaggtgctgaggtttgcagtcagctgccgtatcctgactctgatgctgcaggccctcttcaatgccatcatcccagatcaccatgcagaagccttctctcctcctcgcctggccccctcaggctttgtggaccaactcgtggaagtattatgcctacacccaattctgtctgccaggctcagcccgccccattcctgagcctttggtacagttagctgtagacaagggctaccggattgcagagggaaatgaaccgccttggtgcttctgggatgttccactaatatacagctatatccaggatgtctactggaatgttggctttttgaaatactatgagctcaagcaggtgcccaattttctactggctgcaccagtggctatactggttgcctgggcaacttggacatacgtgaccactcacccttggctctgccttacacttgggctgcaaaggagcaagaacaataagaccctagagaagcccgatcttggattcctcagtcctcaggtgtttgtgtacgtggtccacgctgcagtgctgctgctgtttggaggtctgtgcatgcatgttcaggttctcaccaggtttttgggctcctccactcctattatgtactggtttccagctcacttgcttcaggatcaagagccgctgttgagatccttaaagactgtgccttggaagcctcttgcagaggactccccaccaggacaaaaggtccccagaaatcctatcatgggacttttgtatcactggaaaacctgttctccagtcacacgatacattctaggctacttcctgacttactggctcctggg

SEQ ID NO: 165122 - DNA, 2264 bp, Homo sapiens
  Payload ID: 12515
  Gene Symbol: PIGW
  Gene Name: phosphatidylinositol glycan anchor biosynthesis, class W
  Uniprot ID: Q7Z7B1
  ENST ID: ENST00000620233
  CDS Start-End: 56-1570
acgtagaccgtctgctgggggcgccggcaccatttggagtacgtgaggaagaaaaatgtctgaaaagcagatgaaggaagcttttgtcagtaacctcaatggaaccaccgtgctggaaatcacccagggattgtgctttcctgcattctgtatcctgtgcagagggttcctgatcattttctcacagtacttgtgttctttttcacctacctggaaaactagattcctcactgactttgttgtcctaatagttcccatggtagccactttgaccatttgggcttcatttatcctccttgagcttctcggtgtaattatctttggggcagggctgttgtatcaaatataccgaaggaggacctgctatgccagactgcctttcctaaaaatccttgaaaaattcttgaacatcagtctagaatcagaatacaatccagccatctcctgtttccgtgtaattaccagtgcgtttactgctattgctattttggctgtggacttcccactttttcccagaagatttgccaaaactgagctctatgggacaggagcaatggattttggagtaggtggctttgtttttgggtctgcaatggtttgtctagaggtcaggaggagaaaatatatggaagggtccaaattgcattactttacaaactcattgtactctgtttggccattagtcttcctaggaatcggacgattagccattataaaatcaataggctatcaggaacatttaacagagtatggagttcactggaactttttctttaccataatagttgtgaaattgataacaccactgctgttgattatttttcccctaaataagtcctggattattgccctcggcattactgtattataccagctagcccttgactttacctcactgaagaggttaatattatatggcactgatggtagtggcacacgggttggtctattaaatgccaaccgcgaaggaataatctctaccctggggtatgtggcaatacacatggctggtgtgcaaacagggttatatatgcataagaaccgatcacatatcaaagacttgataaaagtagcctgttttcttttactggcagctattagcctcttcatatctctttacgtagttcaagtaaatgtagaagcagtatctcgaagaatggcaaatttagccttttgtatttggatagttgcttctagcctgatccttcttagtagtttattactgggtgatataattttgagttttgccaaatttctaattaaaggagctctagtaccatgttcttggaaacttatccagtcacctgttacaaataaaaagcattcagaatctctagtccctgaagccgaaagaatggaacccagtctttgtttaatcacagctctaaacagaaaacagttaatatttttcttgctgtcaaatataacaactggcctgatcaacctgatggtagatacattacacagcagtaccttgtgggccttatttgtggtcaatctctatatgttttccaactgtttaattgtatatgtactatatttgcaagataagactgtacaattttggtgatcagcaggagtaggatatataagtatttgggcaatatttaatgaggaatattaattgtaaagaaattgtgcttttggcaacagtgttaaccatattttattataaaatagtttcagtcatctaaacagcagtgatgcttaattatttttttttttgagacagagtcttgctctgttacccaggctggagtgtagtggtgccatctcagctcactgcaacctccacctcccgggttcaagcaattctcctgcctcagcctcctgagtagctggcactgtaggcatgtaccaccatgcccagctaatttttatatttttagtagagatggggttttgccatattggccaggctggtctcaaactcctgaactcaagtgataacacccaccttggcctcccaaagtgctgggattacaggtgtgagccaccacactgggccaatgcttaatattttaatgtatctcaacaataaaaccaagaagaaacaaagccttttgacttgttagaatgtattaagtagtattttaaagaaactttatagttgtgacattgaaagactgttggggtggggggaggaaaatttttactttccatcttaatgtaaccttatgctattctgtatttttactgtatattgcttttacaataaatataaaatgaaatgtttatgttgacatttcagtgtgaactgtgga

SEQ ID NO: 165123 - DNA, 876 bp, Homo sapiens
  Payload ID: 12515
  Gene Symbol: PIGW
  Gene Name: phosphatidylinositol glycan anchor biosynthesis, class W
  ENST ID: ENST00000619326
  CDS Start-End: 44-876
gggacgcctggtccggcttgctggcttcaactacggaagaaaaatgtctgaaaagcagatgaaggaagcttttgtcagtaacctcaatggaaccaccgtgctggaaatcacccagggattgtgctttcctgcattctgtatcctgtgcagagggttcctgatcattttctcacagtacttgtgttctttttcacctacctggaaaactagattcctcactgactttgttgtcctaatagttcccatggtagccactttgaccatttgggcttcatttatcctccttgagcttctcggtgtaattatctttggggcagggctgttgtatcaaatataccgaaggaggacctgctatgccagactgcctttcctaaaaatccttgaaaaattcttgaacatcagtctagaatcagaatacaatccagccatctcctgtttccgtgtaattaccagtgcgtttactgctattgctattttggctgtggacttcccactttttcccagaagatttgccaaaactgagctctatgggacaggagcaatggattttggagtaggtggctttgtttttgggtctgcaatggtttgtctagaggtcaggaggagaaaatatatggaagggtccaaattgcattactttacaaactcattgtactctgtttggccattagtcttcctaggaatcggacgattagccattataaaatcaataggctatcaggaacatttaacagagtatggagttcactggaactttttctttaccataatagttgtgaaattgataacaccactgctgttgattatttttcccctaaataagtcctggattattgccctcggcattactgtattataccagctagcccttgactt

SEQ ID NO: 165124 - DNA, 2264 bp, Homo sapiens; identical to SEQ ID NO: 165122
  Payload ID: 12515
  Gene Symbol: PIGW
  Gene Name: phosphatidylinositol glycan anchor biosynthesis, class W
  Uniprot ID: Q7Z7B1
  ENST ID: ENST00000616581
  CDS Start-End: 56-1570

SEQ ID NO: 165125 - DNA, 2312 bp, Homo sapiens
  Payload ID: 12515
  Gene Symbol: PIGW
  Gene Name: phosphatidylinositol glycan anchor biosynthesis, class W
  Uniprot ID: Q7Z7B1
  ENST ID: ENST00000614443
  CDS Start-End: 560-2074
ggcttcaactacggtgagatgttttgcgaccctggggtaaaatgagggtaaagcggcagcttcccacgttctgggggagaagcgcggaagcacggtttcctgggccttcgggcgacaccaggactgggggtctttcagtagaggtcgccgcggcggagtcttgtgcgagtgcggcggagtgttgtgcgaggccggcggacaccattaccctgatagggcctcgccgtgaggtctgaggggccgtgtgaggtgcatggcgcgccgtttcctctccaggcgctcctctcagggctacggccctagaagatctggcctgcaccagcccaaaggacatgacaggagtgggtagcccacgggacactggcacgagcgccatgatgggcggagacgcgcggaatcggccggcccggaagtgccagctgcctgcgtcggccggaagtgccgcgcgggaggcggaagcggctggttcccgcgtggtttggcgggtgcagcggcagtccggctgcccttcccacgtagaccgtctgctgggggcgccggcaccatttggagaagaaaaatgtctgaaaagcagatgaaggaagcttttgtcagtaacctcaatggaaccaccgtgctggaaatcacccagggattgtgctttcctgcattctgtatcctgtgcagagggttcctgatcattttctcacagtacttgtgttctttttcacctacctggaaaactagattcctcactgactttgttgtcctaatagttcccatggtagccactttgaccatttgggcttcatttatcctccttgagcttctcggtgtaattatctttggggcagggctgttgtatcaaatataccgaaggaggacctgctatgccagactgcctttcctaaaaatccttgaaaaattcttgaacatcagtctagaatcagaatacaatccagccatctcctgtttccgtgtaattaccagtgcgtttactgctattgctattttggctgtggacttcccactttttcccagaagatttgccaaaactgagctctatgggacaggagcaatggattttggagtaggtggctttgtttttgggtctgcaatggtttgtctagaggtcaggaggagaaaatatatggaagggtccaaattgcattactttacaaactcattgtactctgtttggccattagtcttcctaggaatcggacgattagccattataaaatcaataggctatcaggaacatttaacagagtatggagttcactggaactttttctttaccataatagttgtgaaattgataacaccactgctgttgattatttttcccctaaataagtcctggattattgccctcggcattactgtattataccagctagcccttgactttacctcactgaagaggttaatattatatggcactgatggtagtggcacacgggttggtctattaaatgccaaccgcgaaggaataatctctaccctggggtatgtggcaatacacatggctggtgtgcaaacagggttatatatgcataagaaccgatcacatatcaaagacttgataaaagtagcctgttttcttttactggcagctattagcctcttcatatctctttacgtagttcaagtaaatgtagaagcagtatctcgaagaatggcaaatttagccttttgtatttggatagttgcttctagcctgatccttcttagtagtttattactgggtgatataattttgagttttgccaaatttctaattaaaggagctctagtaccatgttcttggaaacttatccagtcacctgttacaaataaaaagcattcagaatctctagtccctgaagccgaaagaatggaacccagtctttgtttaatcacagctctaaacagaaaacagttaatatttttcttgctgtcaaatataacaactggcctgatcaacctgatggtagatacattacacagcagtaccttgtgggccttatttgtggtcaatctctatatgttttccaactgtttaattgtatatgtactatatttgcaagataagactgtacaattttggtgatcagcaggagtaggatatataagtatttgggcaatatttaatgaggaatattaattgtaaagaaattgtgcttttggcaacagtgttaaccatattttattataaaatagtttcagtcatctaaacagcagtgatgcttaattatttttttttttgagacagagtcttgctctgttacccaggctggagtgtagtggtgccatctcagctcactgcaacctccacctcccgggttcaa

SEQ ID NO: 165126 - DNA, 2312 bp, Homo sapiens; identical to SEQ ID NO: 165125
  Payload ID: 12515
  Gene Symbol: PIGW
  Gene Name: phosphatidylinositol glycan anchor biosynthesis, class W
  Uniprot ID: Q7Z7B1
  ENST ID: ENST00000631508
  CDS Start-End: 560-2074

SEQ ID NO: 165127 - DNA, 876 bp, Homo sapiens; identical to SEQ ID NO: 165123
  Payload ID: 12515
  Gene Symbol: PIGW
  Gene Name: phosphatidylinositol glycan anchor biosynthesis, class W
  ENST ID: ENST00000632789
  CDS Start-End: 44-876

SEQ ID NO: 165128 - DNA, 953 bp, Homo sapiens
  Payload ID: 12516
  Gene Symbol: PIGX
  Gene Name: phosphatidylinositol glycan anchor biosynthesis, class X
  ENST ID: ENST00000296333
  CDS Start-End: 123-953
agcactcggtcccagccgataaatctggggcagcgcgcggtaggagctgcgggcggccaggccccttcctgcgtccgcacctggccccgcgcgcccctctcgggcgtccggcttccggcgtcctggcggctcgggtggcggcggttcgggcggccgcctggctgctcctcggggcggcgaccgggctcacgcgcgggcccgccgcggccttcaccgccgcgcgctctgacgccggcataagggccatgtgttctgaaattattttgaggcaagaagttttgaaagatggtttccacagagaccttttaatcaaagtgaagtttggggaaagcattgaggacttgcacacctgccgtctcttaattaaacaggacattcctgcaggactttatgtggatccgtatgagttggcttcattacgagagagaaacataacagaggcagtgatggtttcagaaaattttgatatagaggcccctaactatttgtccaaggagtctgaagttctcatttatgccagacgagattcacagtgcattgactgttttcaagcctttttgcctgtgcactgccgctatcatcggccgcacagtgaagatggagaagcctcgattgtggtcaataacccagatttgttgatgttttgtgaccaagctggctccagaagaatgatcagattccggtttgattcctttgacaaaactatagagttcccgattttgaaatgctgggctcactcagaagtggcagccccttgtgctttggagaatgaggatatctgccaatggaacaagatgaagtataaatcagtatataagaatgtgattctacaagttccagtgggactgactgtacatacctctctagtatgttctgtgactctgctcattacaatcctgtgctctacattgatccttgtagcagttttcaaatatggccatttttccctataa

SEQ ID NO: 165129 - DNA, 3057 bp, Homo sapiens
  Payload ID: 12516
  Gene Symbol: PIGX
  Gene Name: phosphatidylinositol glycan anchor biosynthesis, class X
  Uniprot ID: Q8TBF5
  ENST ID: ENST00000392391
  CDS Start-End: 176-952
gggggccggggctgcaggcagctgggaaccgcgggcgctaggcgcgcgcacccagcactcggtcccagccgataaatctggggcagcgcgcggtaggagctgcgggcggccaggccccttcctgcgtccgcacctggccccgcgcgcccctctcgggcgtccggcttccggcgtcctggcggctcgggtggcggcggttcgggcggccgcctggctgctcctcggggcggcgaccgggctcacgcgcgggcccgccgcggccttcaccgccgcgcgctctgacgccggcataagggccatgtgttctgaaattattttgaggcaagaagttttgaaagatggtttccacagagaccttttaatcaaagtgaagtttggggaaagcattgaggacttgcacacctgccgtctcttaattaaacaggacattcctgcaggactttatgtggatccgtatgagttggcttcattacgagagagaaacataacagaggcagtgatggtttcagaaaattttgatatagaggcccctaactatttgtccaaggagtctgaagttctcatttatgccagacgagattcacagtgcattgactgttttcaagcctttttgcctgtgcactgccgctatcatcggccgcacagtgaagatggagaagcctcgattgtggtcaataacccagatttgttgatgttttgtgaccaagagttcccgattttgaaatgctgggctcactcagaagtggcagccccttgtgctttggagaatgaggatatctgccaatggaacaagatgaagtataaatcagtatataagaatgtgattctacaagttccagtgggactgactgtacatacctctctagtatgttctgtgactctgctcattacaatcctgtgctctacattgatccttgtagcagttttcaaatatggccatttttccctataagttttatgtagttaaatgcttcctagaaacctaaataagatctattaatttctgacgagaggtgttcttctagaattaattacttttatcttttgtcttcatttgtggccaaaattatgtttactagaggaaatttgggatcattctcagctaattccaaaatgtagtgctctattgcatggatccttggtaatcctcaagcatcagatgccataaggggaaacttaattctgctaaattaatgtttattttgtgagaagtgactttatcttcatttggggtagaaaaattatttctttatgtagtagagacaaattattctcattttgcaagtactttcaatttaagctacaaattgagaaaaccgttataaataagaataaaataggccaggcacagtggctcacacctgtaatcccagcactttgggaggccgaggtgggcggatcaccagaggtcaagagtttgagaccagcttggtgaaaccctgtctctactaaaaatacaaaagttagctggggctggtggtgggcatctgtagtcccagctaattggaagggtgaggcgggaggatcgcttgaacctgggaggcggaggttccagagagccaagatcgcaccactgcactacagcctgggcgacagaacgagaccctgtctccaaaggaaaaacaaaaaagaagaataaaataatttggatgaaaatcatgtttatttaaatagtaatgtcatgagactattaaagatgtgccagagtttcaatgaaaatcattaaagtaggacagctaagaaattaatattaatatcaaaattattgataatcttaaattattgattattccttaacgcactccattctccttttacattttatcatgtttcttttgaatatatgaattggcaaaggacttgatgaaactgagtactaagatttggtacagagtatgtcaggaagacaactcagattgccattttaaataaagttgtacatgaacaataattggaatcatcaggtaatttttttaaacaaaggttcttcatttactgttatgattggaaaaaaattagaaaataaagtaagtgccataggctaattaaaaaataaaaccttggccgggcgcggtggcttacgcctataatcccagcactttgggaggccgagacgggcagatcacgaggtcaggagattgagaccatcctggctaacacggtgaaaccccatctctactaaaaatacaaaaaaatgagccgggtatggtggtgcatacctgtagtcccagctactcgggaggctgaggcaggagaatggcatgaacccggaaggcagagcttgcagtgagccgagatcacgccactgcactccagcctgggcgacagagtgagactctgtctcaaaaaaaaaaaaaaaaaaaaaaaaaaaaaagtaaataaaaccttagggcaagcatgttccaaaacagaagacatcaaaccagggtgtgttggcattatttattttatgtagagtattgagatgtgataaacctttgtatatgccatcactgctccatttcctaaagtattttggtgttttcatgggactacatcttgtataatttgacatgtatgacctgactagtcctaacagttctttttaaacgtgtatttgagacttaaatattggaaaaggtaacccagtgccataaagcagaaacagtgacctttaaaatgactaaaatttcaacccagtatagtttcatacctatttcatgctttctcgtaagaaagaatttcatgttttagaaacatttctttcactatgggattaataatatgacactgaaatggaattatatatgtcagctacaattcaggcattgttttgggatatggttagattgacaggcaacgttttggaatatggttagacggggagggaacacggtactgtttaacatcttaagagtatgtgggggtatgtgtatacagaatgtttttgtttttgctcatcacaaccaggtttcatcagtatttaaaatatttaagattgtggcttggaatgtggttcagccatttactcacttatacaaatattcagaagtgtaataaaaatgtgaatgaagaaaa

SEQ ID NO: 165130 - DNA, 838 bp, Homo sapiens
  Payload ID: 12516
  Gene Symbol: PIGX
  Gene Name: phosphatidylinositol glycan anchor biosynthesis, class X
  ENST ID: ENST00000451319
  CDS Start-End: 456-838
agcggtcccggctcccgggcctctcggcgggttgcggggatgtggggacccggcgcgggacctagatcagtagggcgagccggaggaggtcagacactagagccgtgtgccctccttccctcccgtgcgctttgctctgcggcggatcccgggtctccgggagagtcgggctcgggccctgcggttcccaggctggactggccgccctgttactaaagttctgagaaggaaagtcagccgtcaagcgtcttgggatgctcttgagctgcacgaagcttctgatcaccaaggggccaggcaaggccttagcgccctgtgaggcctgagaatccccaaactgaatgtaggactccgtggcaaactgctagttgttcgtgcaagtagtagttggcaaactgcttgtactactgagacgggcaagtgcgggaataattacaataaagggcataagggccatgtgttctgaaattattttgaggcaagaagttttgaaagatggtttccacagagaccttttaatcaaagtgaagtttggggaaagcattgaggacttgcacacctgccgtctcttaattaaacaggacattcctgcaggactttatgtggatccgtatgagttggcttcattacgagagagaaacataacagaggcagtgatggtttcagaaaattttgatatagaggcccctaactatttgtccaaggagtctgaagttctcatttatgccagacgagattcacagtgcattgactgttttcaagcctttttgcctgtgcactgccgctatcatcggccgcacagtgaagatggagaagcctcgattgtggtcaataaccc

SEQ ID NO: 165131 - DNA, 1068 bp, Homo sapiens
  Payload ID: 12516
  Gene Symbol: PIGX
  Gene Name: phosphatidylinositol glycan anchor biosynthesis, class X
  ENST ID: ENST00000453218
  CDS Start-End: 1-192
gcggccgcctggctgctcctcggggcggcgaccgggctcacgcgcgggcccgccgcggccttcaccgccgcgcgctctgacgccggcataagggccatgtgttctgaaattattttgaggcaagaagttttgaaagatggtttccacaggaactccaaatatatgtatactagactacttgatattgtttaaaggccatggaggcggttccttttttctccctggtcttttttcctctctgtgcttcagtgtgggtagtttctgttgctgtgtctccaagtcactgatcttttcttcttcagcatctaatggcttttaattacatctggagaccttttaatcaaagtgaagtttggggaaagcattgaggacttgcacacctgccgtctcttaattaaacaggacattcctgcaggactttatgtggatccgtatgagttggcttcattacgagagagaaacataacagaggcagtgatggtttcagaaaattttgatatagaggcccctaactatttgtccaaggagtctgaagttctcatttatgccagacgagattcacagtgcattgactgttttcaagcctttttgcctgtgcactgccgctatcatcggccgcacagtgaagatggagaagcctcgattgtggtcaataacccagatttgttgatgttttgtgaccaagagttcccgattttgaaatgctgggctcactcagaagtggcagccccttgtgctttggagaatgaggatatctgccaatggaacaagatgaagtataaatcagtatataagaatgtgattctacaagttccagtgggactgactgtacatacctctctagtatgttctgtgactctgctcattacaatcctgtgctctacattgatccttgtagcagttttcaaatatggccatttttccctataagttttatgtagttaaatgcttcctagaaacctaaataagatctattaatttctgacgagaggtgttcttctagaattaattacttttatcttttgtcttcatttgtggccaaaattatgtttactagaggaaatttgg

SEQ ID NO: 165132 - DNA, 523 bp, Homo sapiens
  Payload ID: 12516
  Gene Symbol: PIGX
  Gene Name: phosphatidylinositol glycan anchor biosynthesis, class X
  ENST ID: ENST00000457284
  CDS Start-End: 1-336
gcggccgcctggctgctcctcggggcggcgaccgggctcacgcgcgggcccgccgcggccttcaccgccgcgcgctctgacgccggcataagggccatgtgttctgaaattattttgaggcaagaagttttgaaagatggtttccacagagaccttttaatcaaagtgaagtttggggaaagcattgaggacttgcacacctgccgtctcttaattaaacaggacattcctgcaggactttatgtggatccgtatgagttggcttcattacgagagagaaacataacagaggagaagacttcatggcggcggctatggttgccttctgataattgaaggatccctagtggaataaggaacgaatttattgcagacattgtaagcaagaacaactggtaaatgttataggcagtgatggtttcagaaaattttgatatagaggcccctaactatttgtccaaggagtctgaagttctcatttatgccagacgagattcacagtgcattgactgttttcaagcct

SEQ ID NO: 165133 - DNA, 744 bp, Homo sapiens
  Payload ID: 12516
  Gene Symbol: PIGX
  Gene Name: phosphatidylinositol glycan anchor biosynthesis, class X
  ENST ID: ENST00000426755
  CDS Start-End: 234-744
acagcaaggaggtagcccagccccgcgttcggctgctctcgaggaggccggagcccccggagacgatgcgccccgcgcagccgcctgcgcctgcgggagccggctgcccttgagatggagttgctgcctctttggctctgcctgggttttcacttcctgaccgtgggctggaggaacagaagcggaacagccacagcagcctcccaaggagtctgcaagttggcataagggccatgtgttctgaaattattttgaggcaagaagttttgaaagatggtttccacagagaccttttaatcaaagtgaagtttggggaaagcattgaggacttgcacacctgccgtctcttaattaaacaggacattcctgcaggactttatgtggatccgtatgagttggcttcattacgagagagaaacataacagaggcagtgatggtttcagaaaattttgatatagaggcccctaactatttgtccaaggagtctgaagttctcatttatgccagacgagattcacagtgcattgactgttttcaagcctttttgcctgtgcactgccgctatcatcggccgcacagtgaagatggagaagcctcgattgtggtcaataacccagatttgttgatgttttgtgaccaagagttcccgattttgaaatgctgggctcactcagaagtggcagccccttgtgctttggagaatgaggatatctgccaatggaacaagatgaagtataaatcag

SEQ ID NO: 165134 - DNA, 1677 bp, Homo sapiens
  Payload ID: 12516
  Gene Symbol: PIGX
  Gene Name: phosphatidylinositol glycan anchor biosynthesis, class X
  ENST ID: ENST00000415832
  CDS Start-End: 466-705
agagcgtgggagcggtcccggctcccgggcctctcggcgggttgcggggatgtggggacccggcgcgggacctagatcagtagggcgagccggaggaggtcagacactagagccgtgtgccctccttccctcccgtgcgctttgctctgcggcggatcccgggtctccgggagagtcgggctcgggccctgcggttcccaggctggactggccgccctgttactaaagttctgagaaggaaagtcagccgtcaagcgtcttgggatgctcttgagctgcacgaagcttctgatcaccaaggggccaggcaaggccttagcgccctgtgaggcctgagaatccccaaactgaatgtaggactccgtggcaaactgctagttgttcgtgcaagtagtagttggcaaactgcttgtactactgagacgggcaagtgcgggaataattacaataaagggcataagggccatgtgttctgaaattattttgaggcaagaagttttgaaagatggtttccacagagaccttttaatcaaagtgaagtttggggaaagcattgaggacttgcacacctgccgtctcttaattaaacaggacattcctgcaggactttatgtggatccgtatgagttggcttcattacgagagagaaacataacagaggagaagacttcatggcggcggctatggttgccttctgataattgaaggatccctagtggaataaggaacgaatttattgcagacattgtaagcaagaacaactggtaaatgttataggcagtgatggtttcagaaaattttgatatagaggcccctaactatttgtccaaggagtctgaagttctcatttatgccagacgagattcacagtgcattgactgttttcaagcctttttgcctgtgcactgccgctatcatcggccgcacagtgaagatggagaagcctcgattgtggtcaataacccagatttgttgatgttttgtgaccaagctggctccagaagaatgatcagattccggtttgattcctttgacaaaactatagagttcccgattttgaaatgctgggctcactcagaagtggcagccccttgtgctttggagaatgaggatatctgccaatggaacaagatgaagtataaatcagtatataagaatgtgattctacaagttccagtgggactgactgtacatacctctctagtatgttctgtgactctgctcattacaatcctgtgctctacattgatccttgtagcagttttcaaatatggccatttttccctataagttttatgtagttaaatgcttcctagaaacctaaataagatctattaatttctgacgagaggtgttcttctagaattaattacttttatcttttgtcttcatttgtggccaaaattatgtttactagaggaaatttgggatcattctcagctaattccaaaatgtagtgctctattgcatggatccttggtaatcctcaagcatcagatgccataaggggaaacttaattctgctaaattaatgtttattttgtgagaagtgactttatcttcatttggggtagaaaaattatttctttatgtagtagagacaaattattctcattttgcaagtactttcaatttaagctacaaattgagaaaaccgttataaataagaataaaata

SEQ ID NO: 165135 - DNA, 677 bp, Homo sapiens
  Payload ID: 12516
  Gene Symbol: PIGX
  Gene Name: phosphatidylinositol glycan anchor biosynthesis, class X
  ENST ID: ENST00000421265
  CDS Start-End: 54-506
gcgggcccgccgcggccttcaccgccgcgcgctctgacgccggcataagggccatgtgttctgaaattattttgaggcaagaagttttgaaagatggtttccacagagaccttttaatcaaagtgaagtttggggaaagcattgaggacttgcacacctgccgtctcttaattaaacaggacattcctgcaggactttatgtggatccgtatgagttggcttcattacgagagagaaacataacagaggcagtgatggtttcagaaaattttgatatagaggcccctaactatttgtccaaggagtctgaagttctcatttatgccagacgagattcacagtgcattgactgttttcaagcctttttgcctgtgcactgccgctatcatcggccgcacagtgaagatggagaagcctcgattgtggtcaataacccagatttgttgatgttttgtgaccaaggtgagggctgcaagtgttttctaagggttgaaacatcagaataaaggtatggtggcaagtcctccttctgctaggctggctggcaaggccctatgtcttgacctaggtggtagttacaagggtatttatttgccttataataattcactaaactatgtatttgagtagatttttatgtgtgtgctttaatttacaataaaaaagttaaaaagaaa

SEQ ID NO: 165136 - DNA, 217 bp, Homo sapiens
  Payload ID: 12517
  Gene Symbol: PIGY
  Gene Name: phosphatidylinositol glycan anchor biosynthesis, class Y
  Uniprot ID: Q3MUY2
  ENST ID: ENST00000527353
  CDS Start-End: 1-216
atgtttctgtctcttcctacgttgactgttcttattccactggtttctttagcaggactgttctactcagcctctgtggaagaaaacttcccacagggctgcactagcacagccagcctttgcttttacagcctgctcttgcctattaccataccagtgtatgtattcttccacctttggacttggatgggtattaaactcttcaggcataattgat

SEQ ID NO: 165137 - DNA, 675 bp, Homo sapiens
  Payload ID: 12518
  Gene Symbol: PIGZ
  Gene Name: phosphatidylinositol glycan anchor biosynthesis, class Z
  ENST ID: ENST00000443835
  CDS Start-End: 186-464
tccctcccggcccgccctgcgccggcggcggcggccccagtctccgcgctgctgaggcgcgcccggccgctcccacggcctcccctccgccctgcggtcccgccgcctccggggcctcctgggaccctggccctcgccgggcaggacgccgccagcgctgaaggcgcagcccggaggccgcgcggatgcagatctgtggatccagcgtagcatctgtagcagctgggacatcattccaggttttgggcccggtgtgttggcaacaactggatctgaagatggcagtcagggtgctttggggtggtctcagcctgctccgagtgctgtggtgtctccttccgcagacgggctatgtgcacccagatgagttcttccagtcccctgaggtgatggcaggaccttctccaacaccattgagggactcctcttcacgtggctgctggtgctggtatcctcccatgtaacgtggggccctacacgcaaggagccggcgccgggtccacggtggcgcagctggcttcttggaggcattgtggctgctggcttcttcaaccggcccacctttctggcctttgctgtggtccccctctacctctggggcactcgtggagccacaaaccctggtttgaagtctctgacccgggaggccctggtgctgctccctggggcagccct

SEQ ID NO: 165138 - DNA, 1947 bp, Homo sapiens
  Payload ID: 12518
  Gene Symbol: PIGZ
  Gene Name: phosphatidylinositol glycan anchor biosynthesis, class Z
  ENST ID: ENST00000413127
  CDS Start-End: 1-148
cagggtgctttggggtggtctcagcctgctccgagtgctgtggtgtctccttccgcagacgggctatgtgcacccagatgagttcttccagtcccctgaggtgatggcaggctctgggaggagctggggccgtggcctggcctggtgagcggctatgcgctgctggtggggcctcgactcctcctcactgccctttcctttgctctggacggggccgtgtaccacctggccccgccgatgggggcggatcgctggaacgccctggccctgctgtctggttcctacgtcaccctggtcttctacacaaggaccttctccaacaccattgagggactcctcttcacgtggctgctggtgctggtatcctcccatgtaacgtggggccctacacgcaaggagccggcgccgggtccacggtggcgcagctggcttcttggaggcattgtggctgctggcttcttcaaccggcccacctttctggcctttgctgtggtccccctctacctctggggcactcgtggagccacaaaccctggtttgaagtctctgacccgggaggccctggtgctgctccctggggcagccctcacagcagcggtgtttgtggccacggacagctggtatttctccagccccgctacatccaggaaccttgtcctgacacctgtcaacttcttgcactacaacctgaatccccaaaacctggcgagacatggcacgcacgcgcggctcactcacctggcagtcaacggcttcctgctcttcggggtgctgcatgcccaggccctgcaggctgcgtggcaacggctgcaagtcggcctccaggcctctgcacaaatgggcctcctgagggcactgggtgcccggagcctgctgtccagccccaggtcctatctccttctcctctacttcatgcctctggccctgctatctgcctttagccaccaggaggctcggttcctgattcccctcctggtccccctggtcctgctttgtagtccacagacgcagcctgtgccttggaagggcactgtggtcctcttcaacgccctcggtgccctcctcttcggctgcctgcatcaggggggcctggtgcctggcctggagtacctggagcaggtggtccatgcccctgtgctcccaagcacacccacccactacacactcctcttcactcacacctacatgcccccccggcacctcctacacctcccaggcctgggggcaccagtggaggtggtggacatgggggggactgaggactgggccctgtgccaaaccctgaaaagcttcaccagacaaccagcctgccaagtggctggtgggccatggctctgccgcctctttgtggtaacccctggcaccaccaggcgtgccgtggagaagtgcagcttccccttcaagaatgaaacacttttatttccccatctgaccctggaggatccaccagccctgtcctccttgctgagtggggcttggagggaccacctcagtcttcacattgtggagctgggggaagaaacctgacaatatgacagagcacccactgcccaagactcagccatagaagatgccgccccaccttctacttgggtagctgggctgggacgctgggacaggaccccgtcctccttcatgactcccactgctgcctctcctgggcatggctgttagctgttctgccttctgggtgagctggcactcttctccctgagaccaaagatttgacctgtcggtcttgatgtcaaggtccccaaagaccaggttaagtgacgacacctgtctgttcctgccctgttgcttccagccactgtgatgtttgaaatatgtgatagtacctggttgtgaaaaaagacaatgaactgctagtgacattcctcaatgacctctcccaaacctcccatgatgccttacccttgctgtcatgacaaccctctggcttcctaa

SEQ ID NO: 165139 - DNA, 2701 bp, Homo sapiens
  Payload ID: 12518
  Gene Symbol: PIGZ
  Gene Name: phosphatidylinositol glycan anchor biosynthesis, class Z
  Uniprot ID: Q86VD9
  ENST ID: ENST00000412723
  CDS Start-End: 148-1887
agtctccgcgctgctgaggcgcgcccggccgctcccacggcctcccctccgccctgcggtcccgccgcctccggggcctcctgggaccctggccctcgccgggcaggacgccgccagcgctgaaggcgcagcccggaggccgcgcggatgcagatctgtggatccagcgtagcatctgtagcagctgggacatcattccaggttttgggcccggtgtgttggcaacaactggatctgaagatggcagtcagggtgctttggggtggtctcagcctgctccgagtgctgtggtgtctccttccgcagacgggctatgtgcacccagatgagttcttccagtcccctgaggtgatggcagaggacatcctgggcgttcaggccgcgcggccctgggagttttaccccagcagctcctgccgctcggtgctcttccccctgctgatctctggttccaccttctggctgctcaggctctgggaggagctggggccgtggcctggcctggtgagcggctatgcgctgctggtggggcctcgactcctcctcactgccctttcctttgctctggacggggccgtgtaccacctggccccgccgatgggggcggatcgctggaacgccctggccctgctgtctggttcctacgtcaccctggtcttctacacaaggaccttctccaacaccattgagggactcctcttcacgtggctgctggtgctggtatcctcccatgtaacgtggggccctacacgcaaggagccggcgccgggtccacggtggcgcagctggcttcttggaggcattgtggctgctggcttcttcaaccggcccacctttctggcctttgctgtggtccccctctacctctggggcactcgtggagccacaaaccctggtttgaagtctctgacccgggaggccctggtgctgctccctggggcagccctcacagcagcggtgtttgtggccacggacagctggtatttctccagccccgctacatccaggaaccttgtcctgacacctgtcaacttcttgcactacaacctgaatccccaaaacctggcgagacatggcacgcacgcgcggctcactcacctggcagtcaacggcttcctgctcttcggggtgctgcatgcccaggccctgcaggctgcgtggcaacggctgcaagtcggcctccaggcctctgcacaaatgggcctcctgagggcactgggtgcccggagcctgctgtccagccccaggtcctatctccttctcctctacttcatgcctctggccctgctatctgcctttagccaccaggaggctcggttcctgattcccctcctggtccccctggtcctgctttgtagtccacagacgcagcctgtgccttggaagggcactgtggtcctcttcaacgccctcggtgccctcctcttcggctgcctgcatcaggggggcctggtgcctggcctggagtacctggagcaggtggtccatgcccctgtgctcccaagcacacccacccactacacactcctcttcactcacacctacatgcccccccggcacctcctacacctcccaggcctgggggcaccagtggaggtggtggacatgggggggactgaggactgggccctgtgccaaaccctgaaaagcttcaccagacaaccagcctgccaagtggctggtgggccatggctctgccgcctctttgtggtaacccctggcaccaccaggcgtgccgtggagaagtgcagcttccccttcaagaatgaaacacttttatttccccatctgaccctggaggatccaccagccctgtcctccttgctgagtggggcttggagggaccacctcagtcttcacattgtggagctgggggaagaaacctgacaatatgacagagcacccactgcccaagactcagccatagaagatgccgccccaccttctacttgggtagctgggctgggacgctgggacaggaccccgtcctccttcatgactcccactgctgcctctcctgggcatggctgttagctgttctgccttctgggtgagctggcactcttctccctgagaccaaagatttgacctgtcggtcttgatgtcaaggtccccaaagaccaggttaagtgacgacacctgtctgttcctgccctgttgcttccagccactgtgatgtttgaaatatgtgatagtacctggttgtgaaaaaagacaatgaactgctagtgacattcctcaatgacctctcccaaacctcccatgatgccttacccttgctgtcatgacaaccctctggcttcctaagacccatctgcctatcgaaatatgtgcaagtcagtgagacgaagtatagagaacaggtggcccagatccaggggacccaacttctggccccttggtctgtcacctcctcgctgtgtgatcttgagaaagctccttccactcacccaccccacttcccagtctgttgggatcagaggaactttgaggtgtctgccggctaacattgtgtcattcctggagtccacagtacacgtcccctgcctcaacaggcacagctctcacaaagctcttcaagcatggaagtgggagttgtgttgtacttcatggcactctgatgcctgctgtctcagtgtttggttattatgcaaacaagtaatgtttgaaatatataatagcactggagattttctcccta

SEQ ID NO: 165140 - DNA, 3912 bp, Homo sapiens
  Payload ID: 12519
  Gene Symbol: PITPNA
  Gene Name: phosphatidylinositol transfer protein, alpha
  Uniprot ID: Q00169
  ENST ID: ENST00000313486
  CDS Start-End: 257-1069
ttgccgcagagacgccccgcccccgcgcggcgctgcggaaccggagctccgggcggcgtcggcagcggcgcgagaggcgacgaggcccgggcggcaggagccggcgcggcgaccgcggcgagggcggcggggacggagcagagcacgacgaagacgcacaggcagccgggccgggccgggccacggggagagcggccggcgggcagcgggcgggaggccgggcgggccgcgggcagccaccgagccgcgaagcgacatggtgctgctcaaggagtatcgagtaatcctgcctgtgtctgtagatgagtatcaagtggggcagctgtattctgtggctgaggccagtaaaaatgaaacgggtggtggcgaaggcgtggaggtcctggtgaatgagccctacgagaaggacggtgagaaaggccagtacacacacaagatctaccacctgcagagcaaagtacccacgtttgttcgaatgctggccccagagggagccctgaatatacacgagaaagcctggaatgcttacccctactgcagaaccgttattacaaatgagtacatgaaagaagactttctgattaaaattgaaacctggcacaaaccagatcttggcacgcaggagaatgtgcataagctggagcctgaggcgtggaaacacgtggaagccgtatatatagacattgcagatcgaagccaagtgctcagcaaggattacaaggcagaggaagacccagcaaaatttaaatctatcaaaacaggccgaggacccttgggccccaattggaagcaagagcttgtaaaccagaaggactgcccatatatgtgtgcatacaaactggtgaccgtcaagttcaagtggtggggcctgcagaacaaagtggagaacttcatccataagcaagagaggcgtctgtttacaaacttccacaggcagctgttctgttggctcgataagtgggttgacctgaccatggacgacattcgaaggatggaagaagagacgaagagacagctggatgaaatgagacaaaaggacccagtgaaaggaatgacagcagatgactaaagccgcctttcccctctgcactttttgcaagacagtggtcaacaggaagacccagcagctccaccctcccaagtgacaggccattttcggacgcagccgttctgtgcccattcttcaggcaactttcgattccttactgtagctaattctagatgcccttcagtattgtgaacaaatagaccgtctggtgtcacagagcccgcgtgtgcaggagcctgctcctccgagatacgtggcgtgtaggttgctgtagttacagcgcctccgtctctctccattgtgttccgatccatttctgtgtgttcccccaacctttatttccaagtgacattttcagtctttcaaatagctgccttttgtgatgtggtgatttaaatgatttaagttcatttgttctcaaccttggggtaaactgaggtattttgcttcctgggaagatcttcgcaattttgagtgctcctgtggggagcggggatgagctaaagatacaatgtttccctgccccgcaccgcttccacaaaatagcaatgtggttttgcagctctgacttctgctcccagtaacccatcgttagggcactctagcactatggaggtacccaaggctcagccagtctctatttaagaaaatttaacaaatacgagtaaccctgtcccaatcactgaatctctagttactactcttagaaacacctgtggcttcttggccctcctgttgcccgctctgaatctctctgcagtctacaaaatcgccccagtcaactctccacttggagggaattgtccagtgtggcccctagaattgagtcaccccctagataccaactgtctgaccccgaggagctctgtaagtccctgctcctcctcttccctttggggctggtgctgccactcagcaataatcctcttttctctgtgctttcttaggtccctgtcctctgtctttgaggctggttaggaagcaagagtcctgatctttcatgctgcacaatatgagcatgcaaaaagctttttccagcagaacatgttccctcgtctccagttgccggaaaggaatttggggatcaagaacttagctcgtcctacccccatgttgagttctgccctggaaaacccaaagcaagtagtgatcatagtacagaacccgaccaaagtaggctggtgaggaagtccaggctccaggggaacagacgctgcccagtgttcatagcttcctgcaacttgacagagcctgagtttgcctcttagtgggagaatgagagagagctgtagtgtcacctgacattccccaaaccttgtgaagcacgttggcctaagtgtgccgtgatcccagcccacactagcctgggtgcatctgctaatgggagaccaaatctttgtccgggaagcaagaagtgggtgggagaatgtatcctgtttttgtcagtttgtttgccttactcatttctaagtgcaataagggagtgtctcacaggattgcacctgtgacatcctgatggatgcttccctgtggccctcctggggcaagggtggacagactcagacccccagcatggttagcgctgaccttcattgaggtccctttggaaccagatgtcttgttacagacaccttcctctgtgtaagtctcctcaccttgaggggtctttagtaatgcatctgggtagcatctcaactgctggtagcatttatctgacttggaaagttggagaagaggcattcctactggagaaaaatgtcagtgttttcctataagctctgtgttagctattcattatatttgtgcttaaagatgttccttcattcatcaactaggggaagtccagatgcgggttatcttgaaagaaacaaactgacattctaggcagacagttgtctatgtggtctgagggtcagcagctgttagtctccttcctttggctcttgagacccacacatatcactttagccctaacaagggctcctcccacctccacctgttgccccagttgaaaagcatccattatgagctgaggtcagcctggatctggaattgcagcccacataaacataaaggaggatgtccctggtctgttccatccccacggatggtgttgctgctgggcaacagtgttggcttcttttaagtaccccctttcctcctcacccacctccaaactgactagcactcagagggacttatgataaaggttcagctccaggggtagtacctgagtgtgtgccatgccccttcagaccagctgcttccatcagaattccagggtcacagccccaacagaagcagcagtgcctctgtaggaggggtgctgggctctggccttctcatgcagagaggtccgggacagggtcagtatcgtgggcatgtgtatagcttcccaagttcttttacagtccctgctgggactccctgacttactttggttggttcctagtgctacttgttttacaaactacactttgtagaattgattagattaccttgtttatttaatgtgagtttgtgcctttttgtctcaatcttccaatacaggtatattgagaaaaaaagcagtctaataaaatcctagacagaactttctggagtccagtttggtgatgtccattttccagctgtatgtatcctcaaacttgcactgataaccgccattttaccagggcaggattaggaagaggtacaaaggtgtgtctgaaaatttttgcacgtggatttctgcatataatagtcccgtgtcagtttacttatgcaaacattgcacatctgaattgtaattcggccgtttcctactgacaggatgtccttttgcttttgtctgcctcctcttcacatcttcctctttatccacc

SEQ ID NO: 165141 - DNA, 3612 bp, Homo sapiens
  Payload ID: 12519
  Gene Symbol: PITPNA
  Gene Name: phosphatidylinositol transfer protein, alpha
  ENST ID: ENST00000539476
  CDS Start-End: 232-1044
cgcggcgctgcggaaccggagctccgggcggcgtcggcagcggcgcgagaggcgacgaggcccgggcggcaggagccggcgcggcgaccgcggcgagggcggcggggacggagcagagcacgacgaagacgcacaggcagccgggccgggccgggccacggggagagcggccggcgggcagcgggcgggaggccgggcgggccgcgggcagccaccgagccgcgaagcgacatggtgctgctcaaggagtatcgagtaatcctgcctgtgtctgtagatgagtatcaagtggggcagctgtattctgtggctgaggccagtaaaaatgaaacgggtggtggcgaaggcgtggaggtcctggtgaatgagccctacgagaaggacggtgagaaaggccagtacacacacaagatctaccacctgcagagcaaagtacccacgtttgttcgaatgctggccccagagggagccctgaatatacacgagaaagcctggaatgcttacccctactgcagaaccgttcttccaaatgagtacatgaaagaagactttctgattaaaattgaaacctggcacaaaccagatcttggcacgcaggagaatgtgcataagctggagcctgaggcgtggaaacacgtggaagccgtatatatagacattgcagatcgaagccaagtgctcagcaaggattacaaggcagaggaagacccagcaaaatttaaatctatcaaaacaggccgaggacccttgggccccaattggaagcaagagcttgtaaaccagaaggactgcccatatatgtgtgcatacaaactggtgaccgtcaagttcaagtggtggggcctgcagaacaaagtggagaacttcatccataagcaagagaggcgtctgtttacaaacttccacaggcagctgttctgttggctcgataagtgggttgacctgaccatggacgacattcgaaggatggaagaagagacgaagagacagctggatgaaatgagacaaaaggacccagtgaaaggaatgacagcagatgactaaagccgcctttcccctctgcactttttgcaagacagtggtcaacaggaagacccagcagctccaccctcccaagtgacaggccattttcggacgcagccgttctgtgcccattcttcaggcaactttcgattccttactgtagctaattctagatgcccttcagtattgtgaacaaatagaccgtctggtgtcacagagcccgcgtgtgcaggagcctgctcctccgagatacgtggcgtgtaggttgctgtagttacagcgcctccgtctctctccattgtgttccgatccatttctgtgtgttcccccaacctttatttccaagtgacattttcagtctttcaaatagctgccttttgtgatgtggtgatttaaatgatttaagttcatttgttctcaaccttggggtaaactgaggtattttgcttcctgggaagatcttcgcaattttgagtgctcctgtggggagcggggatgagctaaagatacaatgtttccctgccccgcaccgcttccacaaaatagcaatgtggttttgcagctctgacttctgctcccagtaacccatcgttagggcactctagcactatggaggtacccaaggctcagccagtctctatttaagaaaatttaacaaatacgagtaaccctgtcccaatcactgaatctctagttactactcttagaaacacctgtggcttcttggccctcctgttgcccgctctgaatctctctgcagtctacaaaatcgccccagtcaactctccacttggagggaattgtccagtgtggcccctagaattgagtcaccccctagataccaactgtctgaccccgaggagctctgtaagtccctgctcctcctcttccctttggggctggtgctgccactcagcaataatcctcttttctctgtgctttcttaggtccctgtcctctgtctttgaggctggttaggaagcaagagtcctgatctttcatgctgcacaatatgagcatgcaaaaagctttttccagcagaacatgttccctcgtctccagttgccggaaaggaatttggggatcaagaacttagctcgtcctacccccatgttgagttctgccctggaaaacccaaagcaagtagtgatcatagtacagaacccgaccaaagtaggctggtgaggaagtccaggctccaggggaacagacgctgcccagtgttcatagcttcctgcaacttgacagagcctgagtttgcctcttagtgggagaatgagagagagctgtagtgtcacctgacattccccaaaccttgtgaagcacgttggcctaagtgtgccgtgatcccagcccacactagcctgggtgcatctgctaatgggagaccaaatctttgtccgggaagcaagaagtgggtgggagaatgtatcctgtttttgtcagtttgtttgccttactcatttctaagtgcaataagggagtgtctcacaggattgcacctgtgacatcctgatggatgcttccctgtggccctcctggggcaagggtggacagactcagacccccagcatggttagcgctgaccttcattgaggtccctttggaaccagatgtcttgttacagacaccttcctctgtgtaagtctcctcaccttgaggggtctttagtaatgcatctgggtagcatctcaactgctggtagcatttatctgacttggaaagttggagaagaggcattcctactggagaaaaatgtcagtgttttcctataagctctgtgttagctattcattatatttgtgcttaaagatgttccttcattcatcaactaggggaagtccagatgcgggttatcttgaaagaaacaaactgacattctaggcagacagttgtctatgtggtctgagggtcagcagctgttagtctccttcctttggctcttgagacccacacatatcactttagccctaacaagggctcctcccacctccacctgttgccccagttgaaaagcatccattatgagctgaggtcagcctggatctggaattgcagcccacataaacataaaggaggatgtccctggtctgttccatccccacggatggtgttgctgctgggcaacagtgttggcttcttttaagtaccccctttcctcctcacccacctccaaactgactagcactcagagggacttatgataaaggttcagctccaggggtagtacctgagtgtgtgccatgccccttcagaccagctgcttccatcagaattccagggtcacagccccaacagaagcagcagtgcctctgtaggaggggtgctgggctctggccttctcatgcagagaggtccgggacagggtcagtatcgtgggcatgtgtatagcttcccaagttcttttacagtccctgctgggactccctgacttactttggttggttcctagtgctacttgttttacaaactacactttgtagaattgattagattaccttgtttatttaatgtgagtttgtgcctttttgtctcaatcttccaatacaggtatattgagaaaaaaagcagtctaataaaatcctagac

SEQ ID NO: 165142 - DNA, 573 bp, Homo sapiens
  Payload ID: 12519
  Gene Symbol: PITPNA
  Gene Name: phosphatidylinositol transfer protein, alpha
  ENST ID: ENST00000576010
  CDS Start-End: 325-573
ggaaccggagctccgggcggcgtcggcagcggcgcgagaggcgacgaggcccgggcggcaggagccggcgcggcgaccgcggcgagggcggcggggacggagcagagcacgacgaagacgcacagtcgagtaatcctgcctgtgtctgtagatgagtatcaagtggggcagctgtattctgtggctgaggccagtaaaaatgaaacgggtggtggcgaaggcgtggaggtcctggtgaatgagccctacgagaaggacggtgagaaaggccagtacacacacaagatctaccacctgcagagcaaagtacccacgtttgttcgaatgctggccccagagggagccctgaatatacacgagaaagcctggaatgcttacccctactgcagaaccgttattacaaatgagtacatgaaagaagactttctgattaaaattgaaacctggcacaaaccagatcttggcacgcaggagaatgtgcataagctggagcctgaggcgtggaaacacgtggaagccgtatatatagacattgcagatcgaagccaagtgctcagcaaggattacaaggca

SEQ ID NO: 165143 - DNA, 504 bp, Homo sapiens
  Payload ID: 12519
  Gene Symbol: PITPNA
  Gene Name: phosphatidylinositol transfer protein, alpha
  ENST ID: ENST00000573231
  CDS Start-End: 373-504
ggagagcggccggcgggcagcgggcgggaggccgggcgggccgcgggcagccaccgagccgcgaagcgacatggtgctgctcaaggagtagggactgggggacaggtggagatgtttggtgtgctaaatctttcaagtacaagatgagccatcgttgaagctcagggttccaatcgagtaatcctgcctgtgtctgtagatgagtatcaagtggggcagctgtattctgtggctgaggccagtaaaaatgaaacgggtggtggcgaaggcgtggaggtcctggtgaatgagccctacgagaaggacggtgagaaaggccagtacacacacaagatctaccacctgcagagcaaagtacccacgtttgttcgaatgctggccccagagggagccctgaatatacacgagaaagcctggaatgcttacccctactgcagaaccgttattacaaatgagtacatgaaagaagactttctgattaaaattgaaacctggcacaaacca

SEQ ID NO: 165144 - DNA, 793 bp, Homo sapiens
  Payload ID: 12519
  Gene Symbol: PITPNA
  Gene Name: phosphatidylinositol transfer protein, alpha
  ENST ID: ENST00000576722
  CDS Start-End: 368-793
cgacgaggcccgggcggcaggagccggcgcggcgaccgcggcgagggcggcggggacggagcagagcacgacgaagacgcacaggcagccgggccgggccgggccacggggagagcggccggcgggcagcgggcgggaggccgggcgggccgcgggcagccaccgagccgcgaagcgacatggtgctgctcaaggagtatatcaagtggggcagctgtattctgtggctgaggccagtaaaaatgaaacgggtggtggcgaaggcgtggaggtcctggtgaatgagccctacgagaaggacggtgagaaaggccagtacacacacaagatctaccacctgcagagcaaagtacccacgtttgttcgaatgctggccccagagggagccctgaatatacacgagaaagcctggaatgcttacccctactgcagaaccgttattacaaatgagtacatgaaagaagactttctgattaaaattgaaacctggcacaaaccagatcttggcacgcaggagaatgtgcataagctggagcctgaggcgtggaaacacgtggaagccgtatatatagacattgcagatcgaagccaagtgctcagcaaggattacaaggcagaggaagacccagcaaaatttaaatctatcaaaacaggccgaggacccttgggccccaattggaagcaagagcttgtaaaccagaaggactgcccatatatgtgtgcatacaaactggtgaccgtcaagttcaagtggtggggcctgcagaacaaagtggagaacttcatccataag

SEQ ID NO: 165145 - DNA, 1264 bp, Homo sapiens
  Payload ID: 12519
  Gene Symbol: PITPNA
  Gene Name: phosphatidylinositol transfer protein, alpha
  ENST ID: ENST00000575288
  CDS Start-End: 187-483
cgagaggcgacgaggcccgggcggcaggagccggcgcggcgaccgcggcgagggcggcggggacggagcagagcacgacgaagacgcacaggcagccgggccgggccgggccacggggagagcggccggcgggcagcgggcgggaggccgggcgggccgcgggcagccaccgagccgcgaagcgacatggtgctgctcaaggagtatcgagtaatcctgcctgtgtctgtagatgagtatcaagtggggcagctgtattctgtggctgaggccagtaaaaatgaaacgggtggtggcgaaggcgtggaggtcctggtgaatgagccctacgagaaggacggtgagaaaggccagtacacacacaagatctaccacctgcagagcaaagtacccacgtttgttcgaatgctggccccagagggagccctgaatatacacgagaaagcctggaatgcttacccctactgcagaaccggtgcataagctggagcctgaggcgtggaaacacgtggaagccgtatatatagacattgcagatcgaagccaagtgctcagcaaggattacaaggcagaggaagacccagcaaaatttaaatctatcaaaacaggccgaggacccttgggccccaattggaagcaagagcttgtaaaccagaaggactgcccatatatgtgtgcatacaaactggtgaccgtcaagttcaagtggtggggcctgcagaacaaagtggagaacttcatccataagcaagagaggcgtctgtttacaaacttccacaggcagctgttctgttggctcgataagtgggttgacctgaccatggacgacattcgaaggatggaagaagagacgaagagacagctggatgaaatgagacaaaaggacccagtgaaaggaatgacagcagatgactaaagccgcctttcccctctgcactttttgcaagacagtggtcaacaggaagacccagcagctccaccctcccaagtgacaggccattttcggacgcagccgttctgtgcccattcttcaggcaactttcgattccttactgtagctaattctagatgcccttcagtattgtgaacaaatagaccgtctggtgtcacagagcccgcgtgtgcaggagcctgctcctccgagatacgtggcgtgtaggttgctgtagttacagcgcctccgtctctctccattgtgttccgatccatttctgtgtgttcccccaacctttatttccaagtgacattttcagtctttcaaata

SEQ ID NO: 165146 - DNA, 591 bp, Homo sapiens
  Payload ID: 12519
  Gene Symbol: PITPNA
  Gene Name: phosphatidylinositol transfer protein, alpha
  ENST ID: ENST00000575895
  CDS Start-End: 246-591
attttgtttttcctgctactttcctgcttggtgtcttgcctttgagtcgagtaatcctgcctgtgtctgtagatgagtatcaagtggggcagctgtattctgtggctgaggccagtaaaaatgaaacgggtggtggcgaaggcgtggaggtcctggtgaatgagccctacgagaaggacggtgagaaaggccagtacacacacaagatctaccacctgcagagcaaagtacccacgtttgttcgaatgctggccccagagggagccctgaatatacacgagaaagcctggaatgcttacccctactgcagaaccgttattacaaatgagtacatgaaagaagactttctgattaaaattgaaacctggcacaaaccagatcttggcacgcaggagaatgtgcataagctggagcctgaggcgtggaaacacgtggaagccgtatatatagacattgcagatcgaagccaagtgctcagcaaggattacaaggcagaggaagacccagcaaaatttaaatctatcaaaacaggccgaggacccttgggccccaattggaagcaagagcttgtaaaccagaaggactgcccat

SEQ ID NO: 165147 - DNA, 627 bp, Homo sapiens
  Payload ID: 12519
  Gene Symbol: PITPNA
  Gene Name: phosphatidylinositol transfer protein, alpha
  ENST ID: ENST00000574991
  CDS Start-End: 1-627
ggtgaatgagccctacgagaaggacggtgagaaaggccagtacacacacaagatctaccacctgcagagcaaagtacccacgtttgttcgaatgctggccccagagggagccctgaatatacacgagaaagcctggaatgcttacccctactgcagaaccgttattacaaatgagtacatgaaagaagactttctgattaaaattgaaacctggcacaaaccagatcttggcacgcaggagaatgtgcataagctggagcctgaggcgtggaaacacgtggaagccgtatatatagacattgcagatcgaagccaagtgctcagcaaggtcttccctggtgatctggatgctcaccccaggttgaaagtctctgtcttcaacacggattacaaggcagaggaagacccagcaaaatttaaatctatcaaaacaggccgaggacccttgggccccaattggaagcaagagcttgtaaaccagaaggactgcccatatatgtgtgcatacaaactggtgaccgtcaagttcaagtggtggggcctgcagaacaaagtggagaacttcatccataagcaagagaggcgtctgtttacaaacttccacaggcagctgttctgttggctcga

SEQ ID NO: 165148 - DNA, 571 bp, Homo sapiens
  Payload ID: 12519
  Gene Symbol: PITPNA
  Gene Name: phosphatidylinositol transfer protein, alpha
  ENST ID: ENST00000573056
  CDS Start-End: 209-571
attttgtttttcctgctactttcctgcttggtgtcttgcctttgaggtgatgttttcctcagacccctctgtgtccttcttgcttcctgggggacctttgtggaactagaaaatagctgtttactagcctggagcaaggagcctgagtggtgagccggctgcataaggaaggcacagcagctcatgcttccctaatgcttcactaaacatgcaagacacaaaaggacccagagggctccagcaagggtctggggaccgaacgtctaagcttggaaactggctggacttgtatggtcgagtaatcctgcctgtgtctgtagatgagtatcaagtggggcagctgtattctgtggctgaggccagtaaaaatgaaacgggtggtggcgaaggcgtggaggtcctggtgaatgagccctacgagaaggacggtgagaaaggccagtacacacacaagatctaccacctgcagagcaaagtacccacgtttgttcgaatgctggccccagagggagccctgaatatacacgagaaagcctggaatgcttacccctactgcagaaccgttattaca

SEQ ID NO: 165149 - DNA, 589 bp, Homo sapiens
  Payload ID: 12519
  Gene Symbol: PITPNA
  Gene Name: phosphatidylinositol transfer protein, alpha
  ENST ID: ENST00000576761
  CDS Start-End: 392-589
ccgggcggcgtcggcagcggcgcgagaggcgacgaggcccgggcggcaggagccggcgcggcgaccgcggcgagggcggcggggacggagcagagcacgacgaagacgcacagtcgagtaatcctgcctgtgtctgtagatgagtatcaagtggggcagctgtattctgtggctgaggccagtaaaaatgaaacgggtggtggcgaaggcgtggaggtcctggtgaatgagccctacgagaaggacggtgagaaaggccagtacacacacaagatctaccacctgcagagcaaagtacccacgtttgttcgaatgctggccccagagggagccctgaatatacacgagaaagcctggaatgcttacccctactgcagaaccgaatgagtacatgaaagaagactttctgattaaaattgaaacctggcacaaaccagatcttggcacgcaggagaatgtgcataagctggagcctgaggcgtggaaacacgtggaagccgtatatatagacattgcagatcgaagccaagtgctcagcaaggattacaaggcagaggaagacccagcaaaatttaaatctatcaaaaca

SEQ ID NO: 165150 - DNA, 2826 bp, Homo sapiens
  Payload ID: 12520
  Gene Symbol: PITPNB
  Gene Name: phosphatidylinositol transfer protein, beta
  Uniprot ID: P48739
  ENST ID: ENST00000320996
  CDS Start-End: 65-883
tgagaggcggtagcggcggcggcggcggtggtatcggcggcagctgtgagggggttccgggaagatggtgctgatcaaggaattccgtgtggttttgccatgttctgttcaggagtatcaggttgggcagctttactctgttgcagaagctagtaagaatgagactggtggtggagaaggaattgaagtcttaaagaatgaaccttatgagaaggatggagaaaagggacagtatacgcacaaaatttatcacctaaagagcaaagtgcctgcattcgtgaggatgattgctcccgagggctccttggtgtttcatgagaaagcctggaatgcgtacccctactgtagaacaattgtaacgaatgaatatatgaaagatgatttcttcattaaaatcgaaacatggcacaaaccagacttgggaacattagaaaatgtacatggtttagatccaaacacatggaaaactgttgaaattgtccatatagatattgcagatagaagtcaagttgaaccagcagactacaaagctgatgaagacccagcattattccagtcagtcaagaccaagagaggccctttgggacccaactggaagaaggagctggcaaacagccctgactgtccccagatgtgtgcctataagctggtgaccatcaaattcaagtggtggggactgcaaagcaaagtagaaaacttcattcaaaagcaagaaaaacggatatttacaaacttccatcgccagcttttttgttggattgacaagtggatcgatctcacgatggaagacattaggagaatggaagacgagactcagaaagaactagaaacattacgtaatcaaggtcaagtgaggggaacaagcgcagccagtgatgagtgaagaagaatctgaccagtatcttgcagtgttgacgtttcccagatgtgtgcttgtgatgatacacacacatgcacaggttctcaaccacgtgtgtatatatgtatgtgtgcatatgtctgtagctgtatataaagcgcatgtagagctacagatccagatacacacacttgtgtatatatgtacatacagacatactgaagggattagtacaatttctccaaagtactgtacctatcttcagcaagaatgcaaaagaaaatattttcaatatatatacctggaacagattttaataattatcagagtaataccattaatggacaaattgactgcaatgtaatactagctggtatgtttcataaatgtcaagctgtggaccaacatatatagccttttattatttttctcttcttttaagtcagtctgttataaatttttttttagtcccataagcagtagactcccacagaaaatttcttcaaaattttttggtgttccaatgaatctgggatgtaaactctgaatgtatttataactatttatttctggatggtcattatcttgtagccaaatttgacaatataaagtaaggagcaaagttacaggccagtttttacttgtttgccctgagggaaaaatccttttaaaaaaaatttctggtttttattggatttttgtattttaaatttcaaatatttttctacatcaaacctagcaaaaatggagatgacggtttctgatttataataaatactagacagttttcaggctcctgttagacaaacacattgatgaagaaattagtcttaataggattgtaggctgtgtagaaaagttggaaatatagcacttcatggagtcttgttttgaagatgacagttttctgtaactacagcttggaaactatgcaaatggtctagattcctcagagctcacatgataggatatagttagtgatgacattttgctcttcttgtgggaacacacacttcaaggaggagatagtgactttgagataggaacagtttaagatgcagtgtgagtctggcctgcgtgcggtgaggaggccccgccaagagactggtggacatctgactgtgggatgtgctctcaagtaggacgtcatcaggacagattctgaataggcatcatgagagtgctggtcagaaacggctgccactttttttaatttaattttattttttatttaaaggaaggaacaatagctaggtaagatttttatcagctttctctgtctgaatccagtttttcctctgtcagtcctggaagcttgaatagaattatattgttgaagccttcaggtcacaaactgtcttttgtaacctcctgtccctcctaaaacacgccaacccctgcagtcaaatcacattagtaatctgatttgctgacagtcctgccctgcctgctcctcgttttcccacatgtcctgcatccctcccccactggagtgatttcagtgaatcagacaaggaaggatgtgtaggatcactactgcattgcaataccctgttatcctcagcaacaaaacccacatttcatacatcctttgtgtactcaggataaagactgatgtttactctctgggcactgttgtaagataggttttgtcagagcataatcattgtctgcaaagtgtttggtgcgaggaagattattgctaattttgtgaaataaagagtctagccctctccttttaatgaacttaactctcgctggcatctgtagtatcattgggagcttaggcgcacatggaaatgagagcccggcgcatggattttaatgtttttctaacaactgtggagatttgagggaatgtgtggtgaatgtaaaatacctagtttacttgccagtctcttgtgtaaattacagtaaaacaaagtaaatgaaatttaaacaaaaaataaatttgatcacaaaatgcc

SEQ ID NO: 165151 - DNA, 2926 bp, Homo sapiens
  Payload ID: 12520
  Gene Symbol: PITPNB
  Gene Name: phosphatidylinositol transfer protein, beta
  Uniprot ID: P48739
  ENST ID: ENST00000335272
  CDS Start-End: 78-893
cgcgcaggcgctgtgagaggcggtagcggcggcggcggcggtggtatcggcggcagctgtgagggggttccgggaagatggtgctgatcaaggaattccgtgtggttttgccatgttctgttcaggagtatcaggttgggcagctttactctgttgcagaagctagtaagaatgagactggtggtggagaaggaattgaagtcttaaagaatgaaccttatgagaaggatggagaaaagggacagtatacgcacaaaatttatcacctaaagagcaaagtgcctgcattcgtgaggatgattgctcccgagggctccttggtgtttcatgagaaagcctggaatgcgtacccctactgtagaacaattgtaacgaatgaatatatgaaagatgatttcttcattaaaatcgaaacatggcacaaaccagacttgggaacattagaaaatgtacatggtttagatccaaacacatggaaaactgttgaaattgtccatatagatattgcagatagaagtcaagttgaaccagcagactacaaagctgatgaagacccagcattattccagtcagtcaagaccaagagaggccctttgggacccaactggaagaaggagctggcaaacagccctgactgtccccagatgtgtgcctataagctggtgaccatcaaattcaagtggtggggactgcaaagcaaagtagaaaacttcattcaaaagcaagaaaaacggatatttacaaacttccatcgccagcttttttgttggattgacaagtggatcgatctcacgatggaagacattaggagaatggaagacgagactcagaaagaactagaaacaatgcgtaagaggggttccgttcgaggcacgtcggctgctgatgtctagatgagtcccctgtagggtcagagacaatgtcaaactgtttacgtaatcaaggtcaagtgaggggaacaagcgcagccagtgatgagtgaagaagaatctgaccagtatcttgcagtgttgacgtttcccagatgtgtgcttgtgatgatacacacacatgcacaggttctcaaccacgtgtgtatatatgtatgtgtgcatatgtctgtagctgtatataaagcgcatgtagagctacagatccagatacacacacttgtgtatatatgtacatacagacatactgaagggattagtacaatttctccaaagtactgtacctatcttcagcaagaatgcaaaagaaaatattttcaatatatatacctggaacagattttaataattatcagagtaataccattaatggacaaattgactgcaatgtaatactagctggtatgtttcataaatgtcaagctgtggaccaacatatatagccttttattatttttctcttcttttaagtcagtctgttataaatttttttttagtcccataagcagtagactcccacagaaaatttcttcaaaattttttggtgttccaatgaatctgggatgtaaactctgaatgtatttataactatttatttctggatggtcattatcttgtagccaaatttgacaatataaagtaaggagcaaagttacaggccagtttttacttgtttgccctgagggaaaaatccttttaaaaaaaatttctggtttttattggatttttgtattttaaatttcaaatatttttctacatcaaacctagcaaaaatggagatgacggtttctgatttataataaatactagacagttttcaggctcctgttagacaaacacattgatgaagaaattagtcttaataggattgtaggctgtgtagaaaagttggaaatatagcacttcatggagtcttgttttgaagatgacagttttctgtaactacagcttggaaactatgcaaatggtctagattcctcagagctcacatgataggatatagttagtgatgacattttgctcttcttgtgggaacacacacttcaaggaggagatagtgactttgagataggaacagtttaagatgcagtgtgagtctggcctgcgtgcggtgaggaggccccgccaagagactggtggacatctgactgtgggatgtgctctcaagtaggacgtcatcaggacagattctgaataggcatcatgagagtgctggtcagaaacggctgccactttttttaatttaattttattttttatttaaaggaaggaacaatagctaggtaagatttttatcagctttctctgtctgaatccagtttttcctctgtcagtcctggaagcttgaatagaattatattgttgaagccttcaggtcacaaactgtcttttgtaacctcctgtccctcctaaaacacgccaacccctgcagtcaaatcacattagtaatctgatttgctgacagtcctgccctgcctgctcctcgttttcccacatgtcctgcatccctcccccactggagtgatttcagtgaatcagacaaggaaggatgtgtaggatcactactgcattgcaataccctgttatcctcagcaacaaaacccacatttcatacatcctttgtgtactcaggataaagactgatgtttactctctgggcactgttgtaagataggttttgtcagagcataatcattgtctgcaaagtgtttggtgcgaggaagattattgctaattttgtgaaataaagagtctagccctctccttttaatgaacttaactctcgctggcatctgtagtatcattgggagcttaggcgcacatggaaatgagagcccggcgcatggattttaatgtttttctaacaactgtggagatttgagggaatgtgtggtgaatgtaaaatacctagtttacttgccagtctcttgtgtaaattacagtaaaacaaagtaaatgaaatttaaacaaaaaataaatttgatcacaaaatgcca

SEQ ID NO: 165152 - DNA, 590 bp, Homo sapiens
  Payload ID: 12520
  Gene Symbol: PITPNB
  Gene Name: phosphatidylinositol transfer protein, beta
  ENST ID: ENST00000436663
  CDS Start-End: 88-590
agctgtgagggggttccgggaagatggtgctgatcaaggaattgtgagtgggtctgtgggcgcgagcgaggccgtgggacggcagtgatgggagatttgttgatggagaagtgccgtgtggttttgccatgttctgttcaggagtatcaggttgggcagctttactctgttgcagaagctagtaagaatgagactggtggtggagaaggaattgaagtcttaaagaatgaaccttatgagaaggatggagaaaagggacagtatacgcacaaaatttatcacctaaagagcaaagtgcctgcattcgtgaggatgattgctcccgagggctccttggtgtttcatgagaaagcctggaatgcgtacccctactgtagaacaattgtaacgaatgaatatatgaaagatgatttcttcattaaaatcgaaacatggcacaaaccagacttgggaacattagaaaatgtacatggtttagatccaaacacatggaaaactgttgaaattgtccatatagatattgcagatagaagtcaagttgaaccagcagactacaaagctgatgaagacccagcattattccagtcagt

SEQ ID NO: 165153 - DNA, 2963 bp, Homo sapiens
  Payload ID: 12520
  Gene Symbol: PITPNB
  Gene Name: phosphatidylinositol transfer protein, beta
  ENST ID: ENST00000455418
  CDS Start-End: 116-931
aggcgcgatggtggctcgggggggcagggaggcggggccgcgcaggcgctgtgagaggcggtagcggcggcggcggcggtggtatcggcggcagctgtgagggggttccgggaagatggtgctgatcaaggaattccgtgtggttttgccatgttctgttcaggagtatcaggttgggcagctttactctgttgcagaagctagtaagaatgagactggtggtggagaaggaattgaagtcttaaagaatgaaccttatgagaaggatggagaaaagggacagtatacgcacaaaatttatcacctaaagagcaaagtgcctgcattcgtgaggatgattgctcccgagggctccttggtgtttcatgagaaagcctggaatgcgtacccctactgtagaacaattctgcagaatgaatatatgaaagatgatttcttcattaaaatcgaaacatggcacaaaccagacttgggaacattagaaaatgtacatggtttagatccaaacacatggaaaactgttgaaattgtccatatagatattgcagatagaagtcaagttgaaccagcagactacaaagctgatgaagacccagcattattccagtcagtcaagaccaagagaggccctttgggacccaactggaagaaggagctggcaaacagccctgactgtccccagatgtgtgcctataagctggtgaccatcaaattcaagtggtggggactgcaaagcaaagtagaaaacttcattcaaaagcaagaaaaacggatatttacaaacttccatcgccagcttttttgttggattgacaagtggatcgatctcacgatggaagacattaggagaatggaagacgagactcagaaagaactagaaacaatgcgtaagaggggttccgttcgaggcacgtcggctgctgatgtctagatgagtcccctgtagggtcagagacaatgtcaaactgtttacgtaatcaaggtcaagtgaggggaacaagcgcagccagtgatgagtgaagaagaatctgaccagtatcttgcagtgttgacgtttcccagatgtgtgcttgtgatgatacacacacatgcacaggttctcaaccacgtgtgtatatatgtatgtgtgcatatgtctgtagctgtatataaagcgcatgtagagctacagatccagatacacacacttgtgtatatatgtacatacagacatactgaagggattagtacaatttctccaaagtactgtacctatcttcagcaagaatgcaaaagaaaatattttcaatatatatacctggaacagattttaataattatcagagtaataccattaatggacaaattgactgcaatgtaatactagctggtatgtttcataaatgtcaagctgtggaccaacatatatagccttttattatttttctcttcttttaagtcagtctgttataaatttttttttagtcccataagcagtagactcccacagaaaatttcttcaaaattttttggtgttccaatgaatctgggatgtaaactctgaatgtatttataactatttatttctggatggtcattatcttgtagccaaatttgacaatataaagtaaggagcaaagttacaggccagtttttacttgtttgccctgagggaaaaatccttttaaaaaaaatttctggtttttattggatttttgtattttaaatttcaaatatttttctacatcaaacctagcaaaaatggagatgacggtttctgatttataataaatactagacagttttcaggctcctgttagacaaacacattgatgaagaaattagtcttaataggattgtaggctgtgtagaaaagttggaaatatagcacttcatggagtcttgttttgaagatgacagttttctgtaactacagcttggaaactatgcaaatggtctagattcctcagagctcacatgataggatatagttagtgatgacattttgctcttcttgtgggaacacacacttcaaggaggagatagtgactttgagataggaacagtttaagatgcagtgtgagtctggcctgcgtgcggtgaggaggccccgccaagagactggtggacatctgactgtgggatgtgctctcaagtaggacgtcatcaggacagattctgaataggcatcatgagagtgctggtcagaaacggctgccactttttttaatttaattttattttttatttaaaggaaggaacaatagctaggtaagatttttatcagctttctctgtctgaatccagtttttcctctgtcagtcctggaagcttgaatagaattatattgttgaagccttcaggtcacaaactgtcttttgtaacctcctgtccctcctaaaacacgccaacccctgcagtcaaatcacattagtaatctgatttgctgacagtcctgccctgcctgctcctcgttttcccacatgtcctgcatccctcccccactggagtgatttcagtgaatcagacaaggaaggatgtgtaggatcactactgcattgcaataccctgttatcctcagcaacaaaacccacatttcatacatcctttgtgtactcaggataaagactgatgtttactctctgggcactgttgtaagataggttttgtcagagcataatcattgtctgcaaagtgtttggtgcgaggaagattattgctaattttgtgaaataaagagtctagccctctccttttaatgaacttaactctcgctggcatctgtagtatcattgggagcttaggcgcacatggaaatgagagcccggcgcatggattttaatgtttttctaacaactgtggagatttgagggaatgtgtggtgaatgtaaaatacctagtttacttgccagtctcttgtgtaaattacagtaaaacaaagtaaatgaaatttaaacaaaaaataaatttgatcacaaaatgcc

SEQ ID NO: 165154 - DNA, 884 bp, Homo sapiens
  Payload ID: 12520
  Gene Symbol: PITPNB
  Gene Name: phosphatidylinositol transfer protein, beta
  ENST ID: ENST00000415296
  CDS Start-End: 524-884
actgtattcatagcatagcacttccccaccaccccaaattctccctgctttctttccaagtgagttgtctcctctagactgtgagcttcttgagaacagggactgtgtctgcttctagatgcatccccactgcctagaaccgtgtctgacacagagcaagccagcgacctccgggctgcggctttgaggcccacggcgctttcggtgtaactgcgcgaaccaactcctgaacagcccgctttcctgggtctcgaggccaagggcctcttttctcccagagggcctccgtcgggagtgctggccgctcatcctgccgagtcacagccgtgtggttttgccatgttctgttcaggagtatcaggttgggcagctttactctgttgcagaagctagtaagaatgagactggtggtggagaaggaattgaagtcttaaagaatgaaccttatgagaaggatggagaaaagggacagtatacgcacaaaatttatcacctaaagagcaaagtgcctgcattcgtgaggatgattgctcccgagggctccttggtgtttcatgagaaagcctggaatgcgtacccctactgtagaacaattgtaacgaatgaatatatgaaagatgatttcttcattaaaatcgaaacatggcacaaaccagacttgggaacattagaaaatgtacatggtttagatccaaacacatggaaaactgttgaaattgtccatatagatattgcagatagaagtcaagttgaaccagcagactacaaagctgatgaagacccagcattattccagtcagtcaagaccaagagaggccctttgggacccaactggaagaaggagctggcaaacagccctgactgtccccagatgtgtgcctata

SEQ ID NO: 165155 - DNA, 1017 bp, Homo sapiens
  Payload ID: 12520
  Gene Symbol: PITPNB
  Gene Name: phosphatidylinositol transfer protein, beta
  Uniprot ID: P48739
  ENST ID: ENST00000634017
  CDS Start-End: 73-894
ccgggaagatggtgctgatcaaggaattgtgagtgggtctgtgggcgcgagcgaggccgtgggacggcagtgatgggagatttgttgatggagaagtgccgtgtggttttgccatgttctgttcaggagtatcaggttgggcagctttactctgttgcagaagctagtaagaatgagactggtggtggagaaggaattgaagtcttaaagaatgaaccttatgagaaggatggagaaaagggacagtatacgcacaaaatttatcacctaaagagcaaagtgcctgcattcgtgaggatgattgctcccgagggctccttggtgtttcatgagaaagcctggaatgcgtacccctactgtagaacaattgtaacgaatgaatatatgaaagatgatttcttcattaaaatcgaaacatggcacaaaccagacttgggaacattagaaaatgtacatggtttagatccaaacacatggaaaactgttgaaattgtccatatagatattgcagatagaagtcaagttgaaccagcagactacaaagctgatgaagacccagcattattccagtcagtcaagaccaagagaggccctttgggacccaactggaagaaggagctggcaaacagccctgactgtccccagatgtgtgcctataagctggtgaccatcaaattcaagtggtggggactgcaaagcaaagtagaaaacttcattcaaaagcaagaaaaacggatatttacaaacttccatcgccagcttttttgttggattgacaagtggatcgatctcacgatggaagacattaggagaatggaagacgagactcagaaagaactagaaacaatgcgtaagaggggttccgttcgaggcacgtcggctgctgatgtctagatgagtcccctgtagggtcagagacaatgtcaaactgtttacgtaatcaaggtcaagtgaggggaacaagcgcagccagtgatgagtgaagaagaatctgaccagtatcttgcagtgttgacg

SEQ ID NO: 165156 - DNA, 6359 bp, Homo sapiens
  Payload ID: 12521
  Gene Symbol: PITPNC1
  Gene Name: phosphatidylinositol transfer protein, cytoplasmic 1
  ENST ID: ENST00000299954
  CDS Start-End: 875-1675
cccgcacccacctcccggccccaggcacactgcatcggcgcggacgctccggccccggcgaggtggctgcaaactcgcgggcacgcacggcgcccggggagccgagggactcgggggaggggacgcgcgcggaaggcgccagcttcctcccgcccgcccctggcagccgcgagccgaggttggaggcgcccggggccccagccgggcagagccgagcggcggcggcggcggcggcttcccttttctccccgagccgagccccggagcggcgcggggaccggccctaaaaagagcaggaaatcttgtttaccgcccgcggagagaagccgatcgagcctttgtctggaaagtcagcatctccggctccggctgcaatgtgttcctggtgacattagcatcgggcagacccgccggaggaggggggtcgccaggttcccgtctgctttcggaggcggatcgagcgggtgacttttgtgcattcgttttaatttttggaaatctctcttttttcctccctcgctcgctgccgggcatgtcctgatctggcggccgctcctaccaccctgggcagccgagcagagtcgtccccagcgggtctccctccctgcctccctgactttgcaacaccgcgttccgggaggaccggcctcggcgagggaggaggcgggggagctgcgaacacccagacccaaaccctgacatgctctggggcggagaggaggaagccaggagctgagcgcgccgcgggggctgcttcgccctccggctccgagcgccgggctccgggcgccctgccctgcgcctgggcagcagccttgctggtcttgggggcgccccccgcttcccgccccgggggtccgcggccggcaggaccatgctgctgaaagagtaccggatctgcatgccgctcaccgtagacgagtacaaaattggacagctgtacatgatcagcaaacacagccatgaacagagtgaccggggagaaggggtggaggtcgtccagaatgagccctttgaggaccctcaccatggcaatgggcagttcaccgagaagcgggtgtatctcaacagcaaactgcctagttgggctagagctgttgtccccaaaatattttatgtgacagagaaggcttggaactattatccctacacaattacagagtgttcctttctgccgaaattctccattcatatagaaaccaagtatgaggacaacaaaggaagcaatgacaccattttcgacaatgaagccaaagacgtggagagagaagtttgctttattgatattgcctgcgatgaaattccagagcgctactacaaagaatctgaggatcctaagcacttcaagtcagagaagacaggacggggacagttgagggaaggctggagagatagtcatcagcctatcatgtgctcctacaagctggtgactgtgaagtttgaggtctgggggcttcagaccagagtggaacaatttgtacacaaggtggtccgagacattctgctgattggacatagacaggcttttgcatgggttgatgagtggtatgatatgacaatggatgatgttcgggaatacgagaaaaacatgcatgaacaaaccaacataaaagtttgcaatcagcattcctcccctgtggatgacatagagagtcatgcccaaacaagtacatgacaatggatgaagtccgagaatttgaacgagccactcaggaagccaccaacaagaaaatcggcattttcccacctgcaatttctatctccagcatccccctgctgccttcttccgtccgcagtgcgccttctagtgctccatccacccctctctccacagacgcacccgaatttctgtccgttcccaaagatcggccccggaaaaagtctgccccagaaactctcacacttccagaccctgagaaaaaagccaccctgaatttacccggcatgcactcttcagataagccatgtcggcccaaatctgagtaactttatataaatatctcatggggttttatattttcatttgttgttgttgtttttttttaagaatcttctgatagagaaaaagactgctttgtcactcaaacatgttccttcgacctttcagtgtgcatgtgactcagtaacttcacatagaatatgattccctaagtatgctacacagcatcatattagatgtaagatgtaagacttgcaaaggacagaaggaatcttctgtaaccacatagctgtatgccagagaggaagccttgttattgggcatttgatgaggtttggcatggacttcaaggataaatgaatgaaaactttgcaccacttttgttacaaggtacggtagaaaatagtgaagtcagtttcctctcatcaaatctaaaattctccaaaatactctcaggcataacatacttagctgttaaattttgaactgctaattactaatacttgaataccaatagttactgagattcctattttgtggttagtctgactcaggatttggagcctaattaactctaaacttttgaaaattttaatcatcaagctatagaggctccaagtgcaattaataataactcatttataccttccacagaatttaataaagattctacttgtttctgtcttttaataactttccccttttgtgcccttgtggcctcagaaatccttaagaattgcatggatgaatgtgaccataactgattttggaatggttcagtttaggaaccaagaggcccaggtgaggcaacatcttttttctctacaggtaccaacaaaccttgacttgtcagcttccatcatcaattaagattctcagaatttgcaattaattgaatagaattcatttactatctgcccactcaaagaagtacaagggtagagtaagctaactgggctttaacatggtcagaatgtctggtgcatgaactataaaaaagagaactgtctcccatccccttccttgttttactcttagtaacatccagaattccctggaacagattgcctaccaccagaccttagaaaagactgtcattctcttgctccttacttgaaatacaaatattgggaatgtcacagacatcaagcaactactgtcaagtgggaggagagaatgagcagaattgctgactcctatttgtagagtgaaaaggaggagtgataatagatgcccttctgtctagctttcctttcttcaactagtggtaatgcaagattagaatcaaggttgacaggaggcaaggtcactcactgaagtgacagaaagacaattctcctttgctccaaagagagaaatctgtcacctttgcacctcactgcctttaaacacagacgggagggcaggccaaatctcagcattgacttttgtcctccaagagaggaagagaagaagtaattgggcaacttggaggcccacgccccagctagccttcctgatcgtaacctccaacctcaggaaagggaccttcccaaaacacagatcccaaaggaaacaaaatagaccaaggagcataatctgcttctctcacacagcctctctgccagtggaccctgcctgcttccctctcagtgctcagcactctgtgtagtgtctttcaggttgatacactctcccaaggtgcaggcgctggccccatgagcccagcaccaaagttttctaagtcataggtcagactgtcaagatcatttctttatctataggttgatatttagcttaaaaaaaaagaataaacctagaactcaaaggaaacctgttgcaaatagcttagatcaacagtgtatctcttccctaagaatgatagtatcttagtaagacaccttctatgcatggtatggaagcatgatttttgcttgtgggaaaacctaatattttatcagacccctcggacttctcaatccctccctctccacacagtagtacttaatgaaaatgttttgctttagagagcaaaatgctactttcagaagacactgaaatagtatatgtatttgcttaccatttgcaagctaaaatcaaggtgggatggggtcattattttcacatagaatgtatttattttgtgcaggctgttaaacacatctggcacctagtttttccattaagagcattgctattttccctttttataaagtagcttctgctgtcaaggttaacaattctatatgctttaggaagctaagttctaatttccttttgtgagtttcatttcttttataaccagtatgttaccacagacatcagttgcaaagctacgatgatagtgtgattcttagccgaaaaaaaagcgtgtgctcttaaagtatgttcagtttttctgtctacatatgctttgtgtgagttaaaaagggggtgggtggtgtaaatattcctttagctgctttgcatatttaacccagtcatcaaaaggcataaatgacttcaatattttatatatcttggttttcaagtatcatttcacattctctatacatgactttgttattgtggaatacaagcctgcaatggatgtatatatacagaacattaataattcttagaaggatggaagccaaatggctgcatgatggaaattagaagaaaaaaaaagcagaaacttgaatttgctaagcatgtttggggggaaatagaatccttaactcagtgcctctgtctgcgatatggaaaccttcaactttgttcaccaaaattgtattatacctgtgtatatatatatatatatatatatataaatataaatatagtatagtgaatcagacaccatcagttttaagtctctggtagccaaacttaaataaataatccatagaatatcacatacgttcactccatcttcatctctgaagttagtggagaccatcaaaatgactgtacatttcataactctgggaagatttcaaatgtgaagtgcccctgtgcattttcttggccatagcacggcattcttgctttagctgtgctttcctgggatgagaagatcttggtgtatttaacacataagctttgttagaaatcacctctgaagatcatttcattttctcactttgggttgttgcaagacaaagcaaaggaaaaggaacacaatgaaggaggccgtgacatttttagttgccaccgttgtaactcaaacaatatgggtttgttggtgaactgatttatcaaggcttctgttacggttttgcatctgtgtgtgaggaaaattttaatttatttggaagtatttattagccatgttgttggtcctgaaaataaatctctaagtagcacagttgtgggtatattatgcagacacttaccacaatacctgcaaaagtaactgtggttttctttcaagacactgtaataaacagtgaactaagagaatagattctgatacatctcgataaatcattctctgcaaaagtttcagggctaatgtatttatgtgtatttttaaattctactttctttggcatctcttcatggctcagcgacaacaaagtaataggtcattggctggcttacgtcgataggaattttactcttaagaagggccagtgtatagctgactctacatataatgtgtaatcagataatccaatagagaggaattgtccaaatagttttagtacctttctgatcatctgactcagtaggctaggagacaatctgtcatctgagccatagttcttgagatttaaaaagtctgtccagtgactgcaatctgattatgaataaactattttaactattcattcttgctgaaactgaagtgtacacaatagcacactgttggcatgctgaggcaaaacattgggttcttttgtgttctaccttcaaaacaatctgtttgcatttgaaatataagtgtttaagctttttaggagttagtgtaataagagaatgtgaatatgttgggaaattttcagatgccattaataattgtaattttgttgttaaattaacaaggactttaggataagcctcttgatgttttttgctttaaattgaaagcatgtctgtcaaattgcaagtctcccttcagtttctatatatcacccaggagagggtctctgagttggtgttgtacctgtaccactcacatgtagctcaagtgtaatttgtagtgtttacattcaagctgggatcttgattggttaaattaatccacataccactgccactgctgaaggaccaggtgttggaatacacagcattacagactataagcaaagcaaacaaaagttgatccttacatatgccatccttctgtgtcattttgtggctgttctgtgtttttcttcctagttatttattattgttaataacttactttttcttacattctgttgtaaataaaatacaaagcaatcttctttgc

SEQ ID NO: 165157 - DNA, 6182 bp, Homo sapiens
  Payload ID: 12521
  Gene Symbol: PITPNC1
  Gene Name: phosphatidylinositol transfer protein, cytoplasmic 1
  ENST ID: ENST00000580974
  CDS Start-End: 697-1503
gttggaggcgcccggggccccagccgggcagagccgagcggcggcggcggcggcggcttcccttttctccccgagccgagccccggagcggcgcggggaccggccctaaaaagagcaggaaatcttgtttaccgcccgcggagagaagccgatcgagcctttgtctggaaagtcagcatctccggctccggctgcaatgtgttcctggtgacattagcatcgggcagacccgccggaggaggggggtcgccaggttcccgtctgctttcggaggcggatcgagcgggtgacttttgtgcattcgttttaatttttggaaatctctcttttttcctccctcgctcgctgccgggcatgtcctgatctggcggccgctcctaccaccctgggcagccgagcagagtcgtccccagcgggtctccctccctgcctccctgactttgcaacaccgcgttccgggaggaccggcctcggcgagggaggaggcgggggagctgcgaacacccagacccaaaccctgacatgctctggggcggagaggaggaagccaggagctgagcgcgccgcgggggctgcttcgccctccggctccgagcgccgggctccgggcgccctgccctgcgcctgggcagcagccttgctggtcttgggggcgccccccgcttcccgccccgggggtccgcggccggcaggaccatgctgctgaaagagtaccggatctgcatgccgctcaccgtagacgagtacaaaattggacagctgtacatgatcagcaaacacagccatgaacagagtgaccggggagaaggggtggaggtcgtccagaatgagccctttgaggaccctcaccatggcaatgggcagttcaccgagaagcgggtgtatctcaacagcaaactgcctagttgggctagagctgttgtccccaaaatattttatgtgacagagaaggcttggaactattatccctacacaattacagaatacacatgttcctttctgccgaaattctccattcatatagaaaccaagtatgaggacaacaaaggaagcaatgacaccattttcgacaatgaagccaaagacgtggagagagaagtttgctttattgatattgcctgcgatgaaattccagagcgctactacaaagaatctgaggatcctaagcacttcaagtcagagaagacaggacggggacagttgagggaaggctggagagatagtcatcagcctatcatgtgctcctacaagctggtgactgtgaagtttgaggtctgggggcttcagaccagagtggaacaatttgtacacaaggtggtccgagacattctgctgattggacatagacaggcttttgcatgggttgatgagtggtatgatatgacaatggatgatgttcgggaatacgagaaaaacatgcatgaacaaaccaacataaaagtttgcaatcagcattcctcccctgtggatgacatagagagtcatgcccaaacaagtacatgacaatggatgaagtccgagaatttgaacgagccactcaggaagccaccaacaagaaaatcggcattttcccacctgcaatttctatctccagcatccccctgctgccttcttccgtccgcagtgcgccttctagtgctccatccacccctctctccacagacgcacccgaatttctgtccgttcccaaagatcggccccggaaaaagtctgccccagaaactctcacacttccagaccctgagaaaaaagccaccctgaatttacccggcatgcactcttcagataagccatgtcggcccaaatctgagtaactttatataaatatctcatggggttttatattttcatttgttgttgttgtttttttttaagaatcttctgatagagaaaaagactgctttgtcactcaaacatgttccttcgacctttcagtgtgcatgtgactcagtaacttcacatagaatatgattccctaagtatgctacacagcatcatattagatgtaagatgtaagacttgcaaaggacagaaggaatcttctgtaaccacatagctgtatgccagagaggaagccttgttattgggcatttgatgaggtttggcatggacttcaaggataaatgaatgaaaactttgcaccacttttgttacaaggtacggtagaaaatagtgaagtcagtttcctctcatcaaatctaaaattctccaaaatactctcaggcataacatacttagctgttaaattttgaactgctaattactaatacttgaataccaatagttactgagattcctattttgtggttagtctgactcaggatttggagcctaattaactctaaacttttgaaaattttaatcatcaagctatagaggctccaagtgcaattaataataactcatttataccttccacagaatttaataaagattctacttgtttctgtcttttaataactttccccttttgtgcccttgtggcctcagaaatccttaagaattgcatggatgaatgtgaccataactgattttggaatggttcagtttaggaaccaagaggcccaggtgaggcaacatcttttttctctacaggtaccaacaaaccttgacttgtcagcttccatcatcaattaagattctcagaatttgcaattaattgaatagaattcatttactatctgcccactcaaagaagtacaagggtagagtaagctaactgggctttaacatggtcagaatgtctggtgcatgaactataaaaaagagaactgtctcccatccccttccttgttttactcttagtaacatccagaattccctggaacagattgcctaccaccagaccttagaaaagactgtcattctcttgctccttacttgaaatacaaatattgggaatgtcacagacatcaagcaactactgtcaagtgggaggagagaatgagcagaattgctgactcctatttgtagagtgaaaaggaggagtgataatagatgcccttctgtctagctttcctttcttcaactagtggtaatgcaagattagaatcaaggttgacaggaggcaaggtcactcactgaagtgacagaaagacaattctcctttgctccaaagagagaaatctgtcacctttgcacctcactgcctttaaacacagacgggagggcaggccaaatctcagcattgacttttgtcctccaagagaggaagagaagaagtaattgggcaacttggaggcccacgccccagctagccttcctgatcgtaacctccaacctcaggaaagggaccttcccaaaacacagatcccaaaggaaacaaaatagaccaaggagcataatctgcttctctcacacagcctctctgccagtggaccctgcctgcttccctctcagtgctcagcactctgtgtagtgtctttcaggttgatacactctcccaaggtgcaggcgctggccccatgagcccagcaccaaagttttctaagtcataggtcagactgtcaagatcatttctttatctataggttgatatttagcttaaaaaaaaagaataaacctagaactcaaaggaaacctgttgcaaatagcttagatcaacagtgtatctcttccctaagaatgatagtatcttagtaagacaccttctatgcatggtatggaagcatgatttttgcttgtgggaaaacctaatattttatcagacccctcggacttctcaatccctccctctccacacagtagtacttaatgaaaatgttttgctttagagagcaaaatgctactttcagaagacactgaaatagtatatgtatttgcttaccatttgcaagctaaaatcaaggtgggatggggtcattattttcacatagaatgtatttattttgtgcaggctgttaaacacatctggcacctagtttttccattaagagcattgctattttccctttttataaagtagcttctgctgtcaaggttaacaattctatatgctttaggaagctaagttctaatttccttttgtgagtttcatttcttttataaccagtatgttaccacagacatcagttgcaaagctacgatgatagtgtgattcttagccgaaaaaaaagcgtgtgctcttaaagtatgttcagtttttctgtctacatatgctttgtgtgagttaaaaagggggtgggtggtgtaaatattcctttagctgctttgcatatttaacccagtcatcaaaaggcataaatgacttcaatattttatatatcttggttttcaagtatcatttcacattctctatacatgactttgttattgtggaatacaagcctgcaatggatgtatatatacagaacattaataattcttagaaggatggaagccaaatggctgcatgatggaaattagaagaaaaaaaaagcagaaacttgaatttgctaagcatgtttggggggaaatagaatccttaactcagtgcctctgtctgcgatatggaaaccttcaactttgttcaccaaaattgtattatacctgtgtatatatatatatatatatatatataaatataaatatagtatagtgaatcagacaccatcagttttaagtctctggtagccaaacttaaataaataatccatagaatatcacatacgttcactccatcttcatctctgaagttagtggagaccatcaaaatgactgtacatttcataactctgggaagatttcaaatgtgaagtgcccctgtgcattttcttggccatagcacggcattcttgctttagctgtgctttcctgggatgagaagatcttggtgtatttaacacataagctttgttagaaatcacctctgaagatcatttcattttctcactttgggttgttgcaagacaaagcaaaggaaaaggaacacaatgaaggaggccgtgacatttttagttgccaccgttgtaactcaaacaatatgggtttgttggtgaactgatttatcaaggcttctgttacggttttgcatctgtgtgtgaggaaaattttaatttatttggaagtatttattagccatgttgttggtcctgaaaataaatctctaagtagcacagttgtgggtatattatgcagacacttaccacaatacctgcaaaagtaactgtggttttctttcaagacactgtaataaacagtgaactaagagaatagattctgatacatctcgataaatcattctctgcaaaagtttcagggctaatgtatttatgtgtatttttaaattctactttctttggcatctcttcatggctcagcgacaacaaagtaataggtcattggctggcttacgtcgataggaattttactcttaagaagggccagtgtatagctgactctacatataatgtgtaatcagataatccaatagagaggaattgtccaaatagttttagtacctttctgatcatctgactcagtaggctaggagacaatctgtcatctgagccatagttcttgagatttaaaaagtctgtccagtgactgcaatctgattatgaataaactattttaactattcattcttgctgaaactgaagtgtacacaatagcacactgttggcatgctgaggcaaaacattgggttcttttgtgttctaccttcaaaacaatctgtttgcatttgaaatataagtgtttaagctttttaggagttagtgtaataagagaatgtgaatatgttgggaaattttcagatgccattaataattgtaattttgttgttaaattaacaaggactttaggataagcctcttgatgttttttgctttaaattgaaagcatgtctgtcaaattgcaagtctcccttcagtttctatatatcacccaggagagggtctctgagttggtgttgtacctgtaccactcacatgtagctcaagtgtaatttgtagtgtttacattcaagctgggatcttgattggttaaattaatccacataccactgccactgctgaaggaccaggtgttggaatacacagcattacagactataagcaaagcaaacaaaagttgatccttacatatgccatccttctgtgtcattttgtggctgttctgtgtttttcttcctagttatttattattgttaataacttactttttcttacattctgttgtaaataaaatacaaagcaatcttc

SEQ ID NO: 165158 - DNA, 1124 bp, Homo sapiens
  Payload ID: 12521
  Gene Symbol: PITPNC1
  Gene Name: phosphatidylinositol transfer protein, cytoplasmic 1
  Uniprot ID: Q9UKF7
  ENST ID: ENST00000581322
  CDS Start-End: 1-999
atgctgctgaaagagtaccggatctgcatgccgctcaccgtagacgagtacaaaattggacagctgtacatgatcagcaaacacagccatgaacagagtgaccggggagaaggggtggaggtcgtccagaatgagccctttgaggaccctcaccatggcaatgggcagttcaccgagaagcgggtgtatctcaacagcaaactgcctagttgggctagagctgttgtccccaaaatattttatgtgacagagaaggcttggaactattatccctacacaattacagaatacacatgttcctttctgccgaaattctccattcatatagaaaccaagtatgaggacaacaaaggaagcaatgacaccattttcgacaatgaagccaaagacgtggagagagaagtttgctttattgatattgcctgcgatgaaattccagagcgctactacaaagaatctgaggatcctaagcacttcaagtcagagaagacaggacggggacagttgagggaaggctggagagatagtcatcagcctatcatgtgctcctacaagctggtgactgtgaagtttgaggtctgggggcttcagaccagagtggaacaatttgtacacaaggtggtccgagacattctgctgattggacatagacaggcttttgcatgggttgatgagtggtatgacatgacaatggatgaagtccgagaatttgaacgagccactcaggaagccaccaacaagaaaatcggcattttcccacctgcaatttctatctccagcatccccctgctgccttcttccgtccgcagtgcgccttctagtgctccatccacccctctctccacagacgcacccgaatttctgtccgttcccaaagatcggccccggaaaaagtctgccccagaaactctcacacttccagaccctgagaaaaaagccaccctgaatttacccggcatgcactcttcagataagccatgtcggcccaaatctgagtaactttatataaatatctcatggggttttatattttcatttgttgttgttgtttttttttaagaatcttctgatagagaaaaagactgctttgtcactcaaacatgttccttcgacctttcagtgtg

SEQ ID NO: 165159 - DNA, 735 bp, Homo sapiens
  Payload ID: 12521
  Gene Symbol: PITPNC1
  Gene Name: phosphatidylinositol transfer protein, cytoplasmic 1
  ENST ID: ENST00000584554
  CDS Start-End: 440-735
caccaggcccagctaattttttttgtatttttagtagagacggggtttcaccgtgttagccaggatggtcttgatctcctgacctcatgatccgcccgcctgggcctcctaaagtgctgcgattacaggcaggagccaccacgctggctatctggctgttctttaggcttcctctttgtctttgaaattctggagcctcagtcctgtgtgcatggattcatttttatttattctgcttagaacttggtattctttacacggagaattcatgacttttacaattctggaatcccatttaccacattgagttctggacatcaaggttctccgggcatcactttctatgctgtgtcatcagtgaagcccataaacttacccgttatcagaaaagcgaagatttcgagatcttgttgagacgtacaaaattggacagctgtacatgatcagcaaacacagccatgaacagagtgaccggggagaaggggtggaggtcgtccagaatgagccctttgaggaccctcaccatggcaatgggcagttcaccgagaagcgggtgtatctcaacagcaaactgcctagttgggctagagctgttgtccccaaaatattttatgtgacagagaaggcttggaactattatccctacacaattacagaatacacatgttcctttctgccgaaattctccattcatatagaaaccaagtatgaggacaacaaaggaagcaatgacac

SEQ ID NO: 165160 - DNA, 713 bp, Homo sapiens
  Payload ID: 12521
  Gene Symbol: PITPNC1
  Gene Name: phosphatidylinositol transfer protein, cytoplasmic 1
  ENST ID: ENST00000584471
  CDS Start-End: 449-713
gtcctccaagcgcggctctgctgtccttctcccgatcctgcgaagccgcgagctccagtattcaggaagtggtgactcagataggattattccggccccggcttccctttcttccccttcttcctccccacctttgtggtgattccacgactgctgagcgtctctgtccagggacagcgagggagcccaaagccaagcaaggcaacgtgaaactcactagtgtggtttggtgtggcaacacacatgaaatcagccacccagaccgtctttatatttaaatctggtgcctcgaaactatcagatatgtttttgagccactacttggtgagaggggcgatgtgctttgggagagaaaaagatgcataactgagaacatggctgagctcacaggggctgtccgtatttgccatctggaccaagggttaagtacaaaattggacagctgtacatgatcagcaaacacagccatgaacagagtgaccggggagaaggggtggaggtcgtccagaatgagccctttgaggaccctcaccatggcaatgggcagttcaccgagaagcgggtgtatctcaacagcaaactgcctagttgggctagagctgttgtccccaaaatattttatgtgacagagaaggcttggaactattatccctacacaattacagaatacacatgttcctttctgccgaaattctccattcatatagaaacca

SEQ ID NO: 165161 - DNA, 4225 bp, Homo sapiens
  Payload ID: 12522
  Gene Symbol: PITPNM1
  Gene Name: phosphatidylinositol transfer protein, membrane-associated 1
  Uniprot ID: O00562
  ENST ID: ENST00000356404
  CDS Start-End: 227-3961
agggactgcaggggcgccggcgggcggatcgagaggaaggtcggggccatgggccggcactgcgcctcgggagggtccggccaccgctggaacccgaggccggggctgggggcgctccgggctccgacccacgggccggccggccctgcccgggctgggtgaggggcgcccgcctcaagctagaggaggagcggaggccgcgcgcggcccgccgagcgccttcaggatgctcatcaaggaataccacattctgctgcccatgagcctggacgagtaccaggtggcccagctctacatgatccagaaaaagagccgggaggagtctagtggtgagggcagcggcgtggagatcctggccaaccggccctacacggatgggcccgggggcagcgggcaatacacacacaaggtgtaccacgtgggctcccacatcccaggctggttccgggcactgctgcccaaggctgccctgcaggtagaagaggaatcctggaatgcctacccctacacccgaacccggtacacctgccctttcgtggagaaattctccattgaaattgagacctattacctgcctgatggggggcagcagccaaacgtcttcaacctgagcggggccgagaggagacagcgcatcctggacaccatcgacatcgtgcgggatgcagtggccccaggcgagtacaaagcagaagaggacccccggctttatcactcggtcaagacgggccgagggccactgtctgatgactgggcacggacggcggcacagacggggccccttatgtgtgcctataagctgtgcaaggttgagttccgctactggggcatgcaagccaagatcgagcagttcatccatgatgtaggtctgcgtcgggtgatgctgcgggcccaccgccaggcctggtgctggcaggatgagtggacagagctgagcatggctgacatccgggcactggaagaggagactgctcgcatgctggcccagcgcatggccaagtgcaacacaggcagtgaggggtccgaggcccagccccccgggaaaccgagcaccgaggcccggtctgcggccagcaacactggcacccccgatgggcctgaggcccccccaggcccagatgcctcccccgatgccagctttgggaagcagtggtcctcatcctcccgttcctcctactcatcccaacatggaggggctgtgtctccccagagcttgtctgagtggcgcatgcagaacattgcccgagactctgagaacagctccgaggaagagttctttgatgcccacgaaggcttctcggacagtgaggaggtcttccccaaggagatgaccaagtggaactccaatgacttcattgatgcctttgcctccccagtggaggcagagggaacgccagagcctggagccgaggcagctaaaggcattgaggatggggcccaagcacccagggactcagagggcctggatggagccggggagctgggggctgaggcatgcgcagtccacgccctcttccttatcctgcacagcggcaacatcctggactcaggccctggagacgccaactccaagcaggcggatgtgcagacgctgagctccgccttcgaggccgtcacccgcatccacttccctgaggccttgggccacgtggcgctgcgactggtgccctgtccacccatctgcgccgccgcctatgcccttgtctccaacctgagcccttacagccacgatggggacagcctgtctcgctcccaagaccacattccactggctgccctgccactgctggccacctcatcctcccgctaccagggcgccgtggccaccgtcattgcccgcaccaaccaggcctactcagccttcctgcgctcacctgagggtgccggcttctgtgggcaggtcgcactgattggagatggtgttggtggcatcctgggctttgatgcactctgccacagtgctaacgcgggcaccgggagtcggggcagcagccgccgtgggagcatgaacaatgagctgctctctccggagtttggcccagtgcgggaccccctggcagatggtgtggaaggcctgggtcggggcagcccagaaccctcggccttgcctccccagcgcatccccagcgacatggccagtcctgagcccgagggctctcagaacagccttcaggcagcccccgcaaccacctcctcctgggagccccggcgggcaagcacggccttctgcccacccgctgccagttccgaggcacctgacggccccagcagcactgcccgccttgacttcaaggtctctggcttcttcctcttcggctccccactgggcctggtgctggctctgcgcaaaactgtgatgcccgccctggaggcagcccagatgcgcccagcctgtgaacagatctacaacctcttccacgcggctgacccctgcgcctcacgcctcgagcccctgctggccccgaagttccaggccatcgccccactgaccgtgccccgctaccagaagttccccctgggagatggctcatccctgctgctggccgacactctgcagacgcactccagcctctttctggaggagctggagatgctggtgccctcaacacccacctctactagcggtgccttctggaagggcagtgagttggccactgaccccccggcccagccagccgcccccagcaccaccagtgaggtggttaagatcctggagcgctggtgggggaccaagcggatcgactactcgctgtactgccccgaggcgctcaccgcctttcccaccgtcacgctgccccacctcttccacgccagctactgggagtccgccgacgtggtggcgttcatcctgcgccaggtgatcgagaaggagcggccacagctggcggaatgcgaggagccgtccatctacagcccggccttccccagggagaagtggcagcgaaaacgcacgcaggtcaagatccggaacgtcacttccaaccaccgggcgagcgacacggtggtgtgcgagggccgcccccaggtgctaagcgggcgcttcatgtacgggcccctggacgtcgtcacgctcactggagagaaggtggatgtctacatcatgacgcagccgctgtcgggcaagtggatccactttggcaccgaagtcaccaatagctcgggccgcctcaccttcccagttcccccagaacgcgcgctgggcattggtgtctaccccgtgcgcatggtggtcaggggcgaccacacctatgccgaatgctgcctgactgtggtggcccgcggcacggaggctgtggtcttcagcatcgacggctccttcaccgccagcgtctccatcatgggcagcgaccccaaggtgcgagctggcgccgtggacgtggtcaggcactggcaggactccggctacctgatcgtgtatgtcacaggccggccggatatgcagaagcaccgcgtggtggcatggctgtcgcagcacaacttcccccacggcgtcgtctccttctgcgacggcctcacccacgacccactacgccagaaggcaatgtttctgcagagcctggtgcaggaggtagaactgaacatcgtggccggttatgggtctcccaaagatgtggctgtatacgcggcgctggggctgtccccgagccagacctacatcgtgggccgtgccgtgcggaagctacaggcgcagtgccagttcctgtcagacggctatgtggcccacctgggccagctggaagcgggctcgcactcgcatgcctcctcgggacccccgagagctgccttgggcaagagcagctatggtgtggctgcccccgtggacttcctgcgcaaacagagccagctgcttcgctcgaggggccccagccaggcggagcgtgagggcccgggaacaccacccaccaccctggcacggggcaaagcacggagcatcagcctgaagctggacagcgaggagtgaggcccacaccagcctggacctgggttatttattgacacacccaaggggcccgaggggctgcgtgtgggaggctggggacccagacttttggccccagcgctggcccccccagccccacaccctatatctccgtgtgctcctcggtgttacttccctttcatatgaggggacccagcgccggggggagggaggagggcgtgggcatgggcgcagaggcttttccagtgtgtataaatccatgaaaataaacgccacctgcacccc

SEQ ID NO: 165162 - DNA, 4216 bp, Homo sapiens
  Payload ID: 12522
  Gene Symbol: PITPNM1
  Gene Name: phosphatidylinositol transfer protein, membrane-associated 1
  Uniprot ID: O00562
  ENST ID: ENST00000436757
  CDS Start-End: 220-3951
gcaggggcgccggcgggcggatcgagaggaaggtcggggccatgggccggcactgcgcctcgggagggtccggccaccgctggaacccgaggccggggctgggggcgctccgggctccgacccacgggccggccggccctgcccgggctgggtgaggggcgcccgcctcaagctagaggaggagcggaggccgcgcgcggcccgccgagcgccttcaggatgctcatcaaggaataccacattctgctgcccatgagcctggacgagtaccaggtggcccagctctacatgatccagaaaaagagccgggaggagtctagtggtgagggcagcggcgtggagatcctggccaaccggccctacacggatgggcccgggggcagcgggcaatacacacacaaggtgtaccacgtgggctcccacatcccaggctggttccgggcactgctgcccaaggctgccctgcaggtagaagaggaatcctggaatgcctacccctacacccgaacccggtacacctgccctttcgtggagaaattctccattgaaattgagacctattacctgcctgatggggggcagcagccaaacgtcttcaacctgagcggggccgagaggagacagcgcatcctggacaccatcgacatcgtgcgggatgcagtggccccaggcgagtacaaagcagaagaggacccccggctttatcactcggtcaagacgggccgagggccactgtctgatgactgggcacggacggcggcacagacggggccccttatgtgtgcctataagctgtgcaaggttgagttccgctactggggcatgcaagccaagatcgagcagttcatccatgatgtaggtctgcgtcgggtgatgctgcgggcccaccgccaggcctggtgctggcaggatgagtggacagagctgagcatggctgacatccgggcactggaagaggagactgctcgcatgctggcccagcgcatggccaagtgcaacacaggcagtgaggggtccgaggcccagccccccgggaaaccgagcaccgaggcccggtctgcggccagcaacactggcacccccgatgggcctgaggcccccccaggcccagatgcctcccccgatgccagctttgggaagcagtggtcctcatcctcccgttcctcctactcatcccaacatggaggggctgtgtctccccagagcttgtctgagtggcgcatgcagaacattgcccgagactctgagaacagctccgaggaagagttctttgatgcccacgaaggcttctcggacagtgaggaggtcttccccaaggagatgaccaagtggaactccaatgacttcattgatgcctttgcctccccagtggaggcagagggaacgccagagcctggagccgaggcagctaaaggcattgaggatggggcccaagcacccagggactcagagggcctggatggagccggggagctgggggctgaggcatgcgcagtccacgccctcttccttatcctgcacagcggcaacatcctggactcaggccctggagacgccaactccaagcaggcggatgtgcagacgctgagctccgccttcgaggccgtcacccgcatccacttccctgaggccttgggccacgtggcgctgcgactggtgccctgtccacccatctgcgccgccgcctatgcccttgtctccaacctgagcccttacagccacgatggggacagcctgtctcgctcccaagaccacattccactggctgccctgccactgctggccacctcatcctcccgctaccagggcgccgtggccaccgtcattgcccgcaccaaccaggcctactcagccttcctgcgctcacctgagggtgccggcttctgtgggcaggtcgcactgattggagatggtgttggtggcatcctgggctttgatgcactctgccacagtgctaacgcgggcaccgggagtcggggcagcagccgccgtgggagcatgaacaatgagctgctctctccggagtttggcccagtgcgggaccccctggcagatggtgtggaaggcctgggtcggggcagcccagaaccctcggccttgcctccccagcgcatccccagcgacatggccagtcctgagcccgagggctctcagaacagccttcaggcagcccccgcaaccacctcctcctgggagccccggcgggcaagcacggccttctgcccacccgctgccagttccgaggcacctgacggccccagcagcactgcccgccttgacttcaaggtctctggcttcttcctcttcggctccccactgggcctggtgctggctctgcgcaaaactgtgatgcccgccctggaggcccagatgcgcccagcctgtgaacagatctacaacctcttccacgcggctgacccctgcgcctcacgcctcgagcccctgctggccccgaagttccaggccatcgccccactgaccgtgccccgctaccagaagttccccctgggagatggctcatccctgctgctggccgacactctgcagacgcactccagcctctttctggaggagctggagatgctggtgccctcaacacccacctctactagcggtgccttctggaagggcagtgagttggccactgaccccccggcccagccagccgcccccagcaccaccagtgaggtggttaagatcctggagcgctggtgggggaccaagcggatcgactactcgctgtactgccccgaggcgctcaccgcctttcccaccgtcacgctgccccacctcttccacgccagctactgggagtccgccgacgtggtggcgttcatcctgcgccaggtgatcgagaaggagcggccacagctggcggaatgcgaggagccgtccatctacagcccggccttccccagggagaagtggcagcgaaaacgcacgcaggtcaagatccggaacgtcacttccaaccaccgggcgagcgacacggtggtgtgcgagggccgcccccaggtgctaagcgggcgcttcatgtacgggcccctggacgtcgtcacgctcactggagagaaggtggatgtctacatcatgacgcagccgctgtcgggcaagtggatccactttggcaccgaagtcaccaatagctcgggccgcctcaccttcccagttcccccagaacgcgcgctgggcattggtgtctaccccgtgcgcatggtggtcaggggcgaccacacctatgccgaatgctgcctgactgtggtggcccgcggcacggaggctgtggtcttcagcatcgacggctccttcaccgccagcgtctccatcatgggcagcgaccccaaggtgcgagctggcgccgtggacgtggtcaggcactggcaggactccggctacctgatcgtgtatgtcacaggccggccggatatgcagaagcaccgcgtggtggcatggctgtcgcagcacaacttcccccacggcgtcgtctccttctgcgacggcctcacccacgacccactacgccagaaggcaatgtttctgcagagcctggtgcaggaggtagaactgaacatcgtggccggttatgggtctcccaaagatgtggctgtatacgcggcgctggggctgtccccgagccagacctacatcgtgggccgtgccgtgcggaagctacaggcgcagtgccagttcctgtcagacggctatgtggcccacctgggccagctggaagcgggctcgcactcgcatgcctcctcgggacccccgagagctgccttgggcaagagcagctatggtgtggctgcccccgtggacttcctgcgcaaacagagccagctgcttcgctcgaggggccccagccaggcggagcgtgagggcccgggaacaccacccaccaccctggcacggggcaaagcacggagcatcagcctgaagctggacagcgaggagtgaggcccacaccagcctggacctgggttatttattgacacacccaaggggcccgaggggctgcgtgtgggaggctggggacccagacttttggccccagcgctggcccccccagccccacaccctatatctccgtgtgctcctcggtgttacttccctttcatatgaggggacccagcgccggggggagggaggagggcgtgggcatgggcgcagaggcttttccagtgtgtataaatccatgaaaataaacgccacctgcacccca

SEQ ID NO: 165163 - DNA, 550 bp, Homo sapiens
  Payload ID: 12522
  Gene Symbol: PITPNM1
  Gene Name: phosphatidylinositol transfer protein, membrane-associated 1
  ENST ID: ENST00000524901
  CDS Start-End: 287-550
agtctggggcgcaggtggacggagcgggtctccagggccatggcccgtgggataccaagtggagccactctggcctcagcctgaggagggctcaccccctgggaagaggacggagtggctgcctaggcgcgtggagagccggcgagggccaggggtccaggaaggatgctgggagggggaggtcgaggacccggctgcccaagaaggcagatctggagggcggaggagattaccggtcccggaaggaggagcggaggccgcgcgcggcccgccgagcgccttcaggatgctcatcaaggaataccacattctgctgcccatgagcctggacgagtaccaggtggcccagctctacatgatccagaaaaagagccgggaggagtctagtggtgagggcagcggcgtggagatcctggccaaccggccctacacggatgggcccgggggcagcgggcaatacacacacaaggtgtaccacgtgggctcccacatcccaggctggttccgggcactgctgcccaaggctgccctgcaggtagaagaggaatcc

SEQ ID NO: 165164 - DNA, 540 bp, Homo sapiens
  Payload ID: 12522
  Gene Symbol: PITPNM1
  Gene Name: phosphatidylinositol transfer protein, membrane-associated 1
  ENST ID: ENST00000532703
  CDS Start-End: 78-540
gtttcccggggttaggacgcggtcgcagcgggagaggaggagcggaggccgcgcgcggcccgccgagcgccttcaggatgctcatcaaggaataccacattctgctgcccatgagcctggacgagtaccaggtggcccagctctacatgatccagaaaaagagccgggaggagtctagtggtgagggcagcggcgtggagatcctggccaaccggccctacacggatgggcccgggggcagcgggcaatacacacacaaggtgtaccacgtgggctcccacatcccaggctggttccgggcactgctgcccaaggctgccctgcaggtagaagaggaatcctggaatgcctacccctacacccgaacccggtacacctgccctttcgtggagaaattctccattgaaattgagacctattacctgcctgatggggggcagcagccaaacgtcttcaacctgagcggggccgagaggagacagcgcatcctggacaccatcgacatcgtgcgggatgcagtggccccaggcgagtacaaag

SEQ ID NO: 165165 - DNA, 561 bp, Homo sapiens
  Payload ID: 12522
  Gene Symbol: PITPNM1
  Gene Name: phosphatidylinositol transfer protein, membrane-associated 1
  ENST ID: ENST00000533391
  CDS Start-End: 73-561
gcactgactgtcgcgccgtgccctgcgccaggaggagcggaggccgcgcgcggcccgccgagcgccttcaggatgctcatcaaggaataccacattctgctgcccatgagcctggacgagtaccaggtggcccagctctacatgatccagaaaaagagccgggaggagtctagtggtgagggcagcggcgtggagatcctggccaaccggccctacacggatgggcccgggggcagcgggcaatacacacacaaggtgtaccacgtgggctcccacatcccaggctggttccgggcactgctgcccaaggctgccctgcaggtagaagaggaatcctggaatgcctacccctacacccgaacccggtacacctgccctttcgtggagaaattctccattgaaattgagacctattacctgcctgatggggggcagcagccaaacgtcttcaacctgagcggggccgagaggagacagcgcatcctggacaccatcgacatcgtgcgggatgcagtggccccaggcgagtacaaagcagaagaggacccccggctttatcac

SEQ ID NO: 165166 - DNA, 584 bp, Homo sapiens
  Payload ID: 12522
  Gene Symbol: PITPNM1
  Gene Name: phosphatidylinositol transfer protein, membrane-associated 1
  ENST ID: ENST00000528559
  CDS Start-End: 130-584
agcccttggcgctgtgggcagcctgggcctggagggcgcttcctctggattggcggtgatgcctggcagcatggaaatgccagttcacgaggagcggaggccgcgcgcggcccgccgagcgccttcaggatgctcatcaaggaataccacattctgctgcccatgagcctggacgagtaccaggtggcccagctctacatgatccagaaaaagagccgggaggagtctagtggtgagggcagcggcgtggagatcctggccaaccggccctacacggatgggcccgggggcagcgggcaatacacacacaaggtgtaccacgtgggctcccacatcccaggctggttccgggcactgctgcccaaggctgccctgcaggtagaagaggaatcctggaatgcctacccctacacccgaacccggtacacctgccctttcgtggagaaattctccattgaaattgagacctattacctgcctgatggggggcagcagccaaacgtcttcaacctgagcggggccgagaggagacagcgcatcctggacaccatcgacatcgtgcgggatgcagtggccccaggcga

SEQ ID NO: 165167 - DNA, 4189 bp, Homo sapiens
  Payload ID: 12522
  Gene Symbol: PITPNM1
  Gene Name: phosphatidylinositol transfer protein, membrane-associated 1
  Uniprot ID: O00562
  ENST ID: ENST00000534749
  CDS Start-End: 190-3924
cgcgggcggcggtgctaggctcgcctctgcctccctcgtggcgggcccggacatggggtcccgtggcctgagtccctcggccggcgcgcagggctcggggccgcgcgcagcctccccgcactgactgtcgcgccgtgccctgcgccaggaggagcggaggccgcgcgcggcccgccgagcgccttcaggatgctcatcaaggaataccacattctgctgcccatgagcctggacgagtaccaggtggcccagctctacatgatccagaaaaagagccgggaggagtctagtggtgagggcagcggcgtggagatcctggccaaccggccctacacggatgggcccgggggcagcgggcaatacacacacaaggtgtaccacgtgggctcccacatcccaggctggttccgggcactgctgcccaaggctgccctgcaggtagaagaggaatcctggaatgcctacccctacacccgaacccggtacacctgccctttcgtggagaaattctccattgaaattgagacctattacctgcctgatggggggcagcagccaaacgtcttcaacctgagcggggccgagaggagacagcgcatcctggacaccatcgacatcgtgcgggatgcagtggccccaggcgagtacaaagcagaagaggacccccggctttatcactcggtcaagacgggccgagggccactgtctgatgactgggcacggacggcggcacagacggggccccttatgtgtgcctataagctgtgcaaggttgagttccgctactggggcatgcaagccaagatcgagcagttcatccatgatgtaggtctgcgtcgggtgatgctgcgggcccaccgccaggcctggtgctggcaggatgagtggacagagctgagcatggctgacatccgggcactggaagaggagactgctcgcatgctggcccagcgcatggccaagtgcaacacaggcagtgaggggtccgaggcccagccccccgggaaaccgagcaccgaggcccggtctgcggccagcaacactggcacccccgatgggcctgaggcccccccaggcccagatgcctcccccgatgccagctttgggaagcagtggtcctcatcctcccgttcctcctactcatcccaacatggaggggctgtgtctccccagagcttgtctgagtggcgcatgcagaacattgcccgagactctgagaacagctccgaggaagagttctttgatgcccacgaaggcttctcggacagtgaggaggtcttccccaaggagatgaccaagtggaactccaatgacttcattgatgcctttgcctccccagtggaggcagagggaacgccagagcctggagccgaggcagctaaaggcattgaggatggggcccaagcacccagggactcagagggcctggatggagccggggagctgggggctgaggcatgcgcagtccacgccctcttccttatcctgcacagcggcaacatcctggactcaggccctggagacgccaactccaagcaggcggatgtgcagacgctgagctccgccttcgaggccgtcacccgcatccacttccctgaggccttgggccacgtggcgctgcgactggtgccctgtccacccatctgcgccgccgcctatgcccttgtctccaacctgagcccttacagccacgatggggacagcctgtctcgctcccaagaccacattccactggctgccctgccactgctggccacctcatcctcccgctaccagggcgccgtggccaccgtcattgcccgcaccaaccaggcctactcagccttcctgcgctcacctgagggtgccggcttctgtgggcaggtcgcactgattggagatggtgttggtggcatcctgggctttgatgcactctgccacagtgctaacgcgggcaccgggagtcggggcagcagccgccgtgggagcatgaacaatgagctgctctctccggagtttggcccagtgcgggaccccctggcagatggtgtggaaggcctgggtcggggcagcccagaaccctcggccttgcctccccagcgcatccccagcgacatggccagtcctgagcccgagggctctcagaacagccttcaggcagcccccgcaaccacctcctcctgggagccccggcgggcaagcacggccttctgcccacccgctgccagttccgaggcacctgacggccccagcagcactgcccgccttgacttcaaggtctctggcttcttcctcttcggctccccactgggcctggtgctggctctgcgcaaaactgtgatgcccgccctggaggcagcccagatgcgcccagcctgtgaacagatctacaacctcttccacgcggctgacccctgcgcctcacgcctcgagcccctgctggccccgaagttccaggccatcgccccactgaccgtgccccgctaccagaagttccccctgggagatggctcatccctgctgctggccgacactctgcagacgcactccagcctctttctggaggagctggagatgctggtgccctcaacacccacctctactagcggtgccttctggaagggcagtgagttggccactgaccccccggcccagccagccgcccccagcaccaccagtgaggtggttaagatcctggagcgctggtgggggaccaagcggatcgactactcgctgtactgccccgaggcgctcaccgcctttcccaccgtcacgctgccccacctcttccacgccagctactgggagtccgccgacgtggtggcgttcatcctgcgccaggtgatcgagaaggagcggccacagctggcggaatgcgaggagccgtccatctacagcccggccttccccagggagaagtggcagcgaaaacgcacgcaggtcaagatccggaacgtcacttccaaccaccgggcgagcgacacggtggtgtgcgagggccgcccccaggtgctaagcgggcgcttcatgtacgggcccctggacgtcgtcacgctcactggagagaaggtggatgtctacatcatgacgcagccgctgtcgggcaagtggatccactttggcaccgaagtcaccaatagctcgggccgcctcaccttcccagttcccccagaacgcgcgctgggcattggtgtctaccccgtgcgcatggtggtcaggggcgaccacacctatgccgaatgctgcctgactgtggtggcccgcggcacggaggctgtggtcttcagcatcgacggctccttcaccgccagcgtctccatcatgggcagcgaccccaaggtgcgagctggcgccgtggacgtggtcaggcactggcaggactccggctacctgatcgtgtatgtcacaggccggccggatatgcagaagcaccgcgtggtggcatggctgtcgcagcacaacttcccccacggcgtcgtctccttctgcgacggcctcacccacgacccactacgccagaaggcaatgtttctgcagagcctggtgcaggaggtagaactgaacatcgtggccggttatgggtctcccaaagatgtggctgtatacgcggcgctggggctgtccccgagccagacctacatcgtgggccgtgccgtgcggaagctacaggcgcagtgccagttcctgtcagacggctatgtggcccacctgggccagctggaagcgggctcgcactcgcatgcctcctcgggacccccgagagctgccttgggcaagagcagctatggtgtggctgcccccgtggacttcctgcgcaaacagagccagctgcttcgctcgaggggccccagccaggcggagcgtgagggcccgggaacaccacccaccaccctggcacggggcaaagcacggagcatcagcctgaagctggacagcgaggagtgaggcccacaccagcctggacctgggttatttattgacacacccaaggggcccgaggggctgcgtgtgggaggctggggacccagacttttggccccagcgctggcccccccagccccacaccctatatctccgtgtgctcctcggtgttacttccctttcatatgaggggacccagcgccggggggagggaggagggcgtgggcatgggcgcagaggcttttccagtgtgtataaatccatgaaaataaacgccacctgcacccca

SEQ ID NO: 165168 - DNA, 6785 bp, Homo sapiens
  Payload ID: 12523
  Gene Symbol: PITPNM2
  Gene Name: phosphatidylinositol transfer protein, membrane-associated 2
  Uniprot ID: Q9BZ72
  ENST ID: ENST00000280562
  CDS Start-End: 207-4238
cctgcaggatgctggcacgtgtgtcctggtcctcaacaaccttctgtgagcctagggacccatttctcctcctttgacagggacatcagtggagccttctcagacccacaggggtccttggtgaattttgtcatggttatttaaggaaccttgcctagaagtcccaacttgcagttccccatcgacgggaaggcttggactccaagatgattataaaggaatatcggattcctctgccaatgaccgtggaggagtaccgcatcgcccagctgtacatgatacagaagaagagccgtaacgagacatatggcgaaggcagcggcgtggagatcctggagaaccggccgtacacagatggcccaggcggctctgggcagtacacacacaaggtgtatcatgtgggcatgcacattcccagctggttccgctccatcctgcccaaggcagccctgcgggtggtggaggagtcttggaatgcctacccctacacccgaaccaggttcacctgtcctttcgtggagaaattctccatcgacattgaaaccttttataaaactgatgctggagaaaaccccgacgtgttcaacctctctcctgtggaaaagaaccagctgacaatcgacttcatcgacattgtcaaagaccctgtgccccacaacgagtataagacagaagaggaccccaagctgttccagtcaaccaagacccagcgggggcccctgtccgagaactggatcgaggagtacaagaagcaggtcttccccatcatgtgcgcatacaagctctgcaaggtggagttccgctactggggcatgcagtccaagatcgagaggttcatccacgacaccggactacggagggtgatggtgcgggctcaccggcaggcctggtgctggcaggacgagtggtatgggctgagcatggagaacatccgggagctggagaaggaggcacagctcatgctttcccgtaagatggcccagttcaatgaggatggtgaggaggccactgagctcgtcaagcacgaagccgtctcggaccagacctctggggagcccccggagcccagcagcagcaatggggagcccctagtggggcgcggcctcaagaaacagtggtccacatcctccaagtcgtctcggtcgtccaagcggggagcgagtccttcccgccacagcatctcagagtggaggatgcagagtattgccagggactcggatgagagctcagatgatgagttcttcgatgcgcacgaggacctgtccgacacagaggaaatgttccccaaggacatcaccaagtggagctccaatgacctcatggacaagatcgagagcccagagccggaagacacacaagatggtctgtaccgccagggtgcccctgagttcagggtggcctccagtgtggagcagctgaacatcatagaggacgaggttagccagccgctggctgcaccgccctccaagatccacgtgctgctactggtgctgcacggaggcaccatcctggacacaggcgccggggaccccagctccaagaagggcgatgctaacaccatcgccaacgtgttcgacaccgtcatgcgcgtgcactaccccagcgccctgggccgccttgccatccgcctggtgccctgcccgcccgtctgctctgacgcctttgccctggtctccaacctcagcccctacagccatgacgaaggctgtctgtccagcagtcaggaccacattcccctggctgccctccccctgctggccacctcctccccccagtaccaggaggcagttgccacagtgattcagcgagccaaccttgcctatggggacttcatcaagtcccaggagggcatgaccttcaatgggcaggtctgcctgattggggactgcgtcgggggcatcctggcatttgatgccctgtgctacagtaaccagccggtgtctgagagtcagagcagcagccgccggggcagcgtggtcagcatgcaggacaatgacctgctgtccccgggcatcctgatgaatgcagcacactgctgcggtggtggcggtggcggcggtggcggtggtggcagcagtggtggtggtggcagtagtggtggctccagcctggagagcagtcggcacctgagccgaagcaacgtcgacatcccccgcagcaacggcactgaggaccccaaaaggcaactgccccgcaagaggagcgactcatccacctacgagctggataccatccagcagcaccaggccttcctgtccagcctccatgccagcgtgctgaggactgagccctgctcacgccattccagcagctccaccatgctggatggcacaggtgccctgggcaggtttgactttgagatcaccgacctcttcctcttcgggtgcccgctggggctggtcctggccttgaggaagactgtcatcccagccctggatgttttccagctgcggccggcctgccagcaagtctacaacctcttccaccccgcggacccgtcagcttcacgcctggagccgctgctggaacggcgctttcacgccctgccgcctttcagcgtcccccgctaccaacgctacccgctgggggatggctgctccacgctgctggtcgagaccgtgcagagaaaccctgagctggtcctggagggcggccccctggcccctctcccccacggggacggcttcctggaaaccagtatgcctgttcccgcgcccacctggcaagacgggccccgcccgggctgtgccgagtcggatgtgctccagacccacaatgcagccttccaagagcatggcgccccctcctcgccgggcactgcccctgccagtcgtggcttccgccgagccagtgagatcagcatcgccagccaggtgtcaggcatggctgagagctacacggcatccagcatcgcccagatcgctgcaaagtggtggggccagaagcggatcgactacgccctgtactgccctgacgccctcacggccttccccacggtggctctgcctcacctcttccacgccagctactgggagtcaacagacgtggtctcctttctgctgagacaggtcatgaggcatgacaactccagcatcttggagctggatggcaaggaagtgtcggtgttcaccccctcaaagccaagggagaagtggcagcgcaagcggacccacgtgaagctgcggaacgtgacggccaaccaccggatcaatgatgcccttgccaatgaggacggcccccaggttctgacgggcaggttcatgtatgggcccctggacatggtcaccctgactggggagaaggtggatgtgcacatcatgacccagccgccctcaggcgagtggctctacctggatacgctggtgaccaacaacagtgggcgtgtctcctacaccatccctgagtcgcaccgcctgggcgtgggtgtctaccctatcaagatggtggtcaggggagaccacacgtttgccgacagctacatcaccgtgctgcccaagggcacagagttcgtggtcttcagcatcgacggttcctttgccgctagcgtgtccatcatgggcagcgaccccaaggtgcgggccggggccgtggacgtggtgcggcactggcaggacctgggctacctcatcatctacgtgacgggccggcccgacatgcagaagcagcgggtggtggcgtggctggcccagcacaacttcccccatggcgtggtgtccttctgtgacggcctggtgcatgacccgctgcggcacaaggccaacttcctgaagctgctcatctccgagctgcacctgcgcgtgcacgcggcctatggctccaccaaggacgtggcggtgtacagcgccattagcctgtcccccatgcagatctacatcgtgggccggcccaccaagaagctgcagcagcagtgccagttcatcacggatggctacgcggcccacctggcgcagctgaagtacagccaccgggcgcggcccgctcgcaacacggccacccgcatggcgctgcgcaagggcagcttcggcctgcccggccagggcgactttctgcgctcccggaaccacctgcttcgcaccatctcggcccagcccagcgggcccagccaccggcacgagcggacacagagccaggcggatggcgagcagcggggccagcgcagcatgagtgtggcggccggctgctggggccgcgccatgactggccgcctggagccgggggcagccgcgggccccaagtagggcaccgtgagtgcagcgcggggtctccatggtgctaggccagggtggccagccccgccaggaggcctggcctgggcacacgcactgacgtgggcctgggagattgtcccagggccttgtggaggacacgggccgcaccacacagtgctccctgccctgcctcacgtcctcgggcctgacgggtccggcttgtcatggaagctggcagggaccaccagccccaggatggcagagggaccagaacctcccactcagactggcccgggaggttctcccagacattttgccctgtgtggatctccaagtgtcctggtgccaggtgtgggcccaggcgcagcctgccacctccccatccactggccaccctcactcccaggtcccctcccatttggtagcagctccaacaggggtccagcctgcatcttgttaactcgagtttctcaactgttcaacctcactggttttgcactgatttttgagagcggagacccattaccacctcctatggctacagccccgttgacatgcatgaaactcagtacctgctgacccaggacctacaaccacactgaaggctccagtgcggcagagcctcgtgcaagcaggagagaaaggctgtatcttaatttctgcaccccggaccctgcccacctgtctgcctgccccgcctggagcccaggccagtgttgtttccagcctcaggccacgggctggacgggcctggccgcctcttccgctccctgccatcagtcaaggccgcccgcccacgtttctacgcctttctacttctcaatctgatttctatgaggtttttttaaacgagcaatccttggctgcttccttttcttaactctttcagtactgagagcagcccctccacactgaaaacacccagcactgtgacggagtccagcctggttctgggtcccgtgggccctgctcctgcccacttagcgaggcatgggctccttgcctcacctggccccggcaatcccactgaatttctactctggggtgggtggggcacacacttcggtttttttaatgccaattccgttttcatgccgaatctaagaagccacaacttgctttgtcagcttcagggcaggcagccatgacttcatttctcgcctgaacaaggaccatgctgtcctgcacgctgggtctgaccgtctgccctctctccccagcaccaagcgtgaccttggctgtggcgctcaacggccagctccggcggcccctctgctgctcctcggctttcccggaagtgggagagcctgcctggcctcggcctttgtccagcgaccaggctctgtccccgagaagctacggccgacctgggtctggtgttgggacgcatggaccgggctggggaggtgcacagagtgatgttaactttttcccgtgtgtagatatgtacagccaaagggtcgtgtaaatgttctgcaaaagtgggtctatacagagtgaaagctatttattttgtgcagagaaaaaagtctggagggatggaaccttcagggtttattcatatttaagatgtagctttttgttgtttcaggcattatgtataaagcaacgattattttatggaccaagttttcatgtaactgttgcagtgaaagtgcaatatctgacccccctgctcccagcaggaagttgcttggcccgacaatcacagcccctgtcaggggccctgtggccagtgcctcctcctctcttggccccaccttatcctgtcttgcctgctgcctgggagaccagccatccagagaagcacctggaagagtctcgggccctcctgcaataaaggccgggaggccctgtgggcagtgggctcagcctctccccaggggggcagctcccccacggctcctcactccccgcctgcctgcccagccgccagccatgccaaggacaacagcaatagtcccctggggctctcccagcggccctcagccatagatggcaaggtgggcagcctgcccccccatgggaagtctcttctgtatccaggtctgctttccacctcccttcagattccttttggcacattctcctcttgaggaagtaccagtctttctgaaactaagagagggagggcagcgtcctttaaaaataccaaaaatgtttacagagttgggtgctgagctgcagggctcaggcctgaccagtcataaccaaagggtgaggcaggccttgctgactgccaccccccaggcctgttagaatagaagccttagtcccactcccaccacacccccacgccccaccacctgccttctctttgatttctaaagagggattcagcagagaccccccacccctccctggctcggtctgagtcccactgcccaccccatcacagccttcacgtctcagcccctcccgtctggtctgtccgtgtgccgtctgtttctctgggccatgtgtgagcagtgtccccatctccccatccgtccctgctgtccccgcatcattgggcctgagtgtgctctgtatacaacgtcatgtctgttacaccaattaaagaagcgggaaggcttc

SEQ ID NO: 165169 - DNA, 6736 bp, Homo sapiens
  Payload ID: 12523
  Gene Symbol: PITPNM2
  Gene Name: phosphatidylinositol transfer protein, membrane-associated 2
  Uniprot ID: Q9BZ72
  ENST ID: ENST00000320201
  CDS Start-End: 140-4189
cctcctttgacagggacatcagtggagccttctcagacccacaggggtccttggtgaattttgtcatggttatttaaggaaccttgcctagaagtcccaacttgcagttccccatcgacgggaaggcttggactccaagatgattataaaggaatatcggattcctctgccaatgaccgtggaggagtaccgcatcgcccagctgtacatgatacagaagaagagccgtaacgagacatatggcgaaggcagcggcgtggagatcctggagaaccggccgtacacagatggcccaggcggctctgggcagtacacacacaaggtgtatcatgtgggcatgcacattcccagctggttccgctccatcctgcccaaggcagccctgcgggtggtggaggagtcttggaatgcctacccctacacccgaaccaggttcacctgtcctttcgtggagaaattctccatcgacattgaaaccttttataaaactgatgctggagaaaaccccgacgtgttcaacctctctcctgtggaaaagaaccagctgacaatcgacttcatcgacattgtcaaagaccctgtgccccacaacgagtataagacagaagaggaccccaagctgttccagtcaaccaagacccagcgggggcccctgtccgagaactggatcgaggagtacaagaagcaggtcttccccatcatgtgcgcatacaagctctgcaaggtggagttccgctactggggcatgcagtccaagatcgagaggttcatccacgacaccggactacggagggtgatggtgcgggctcaccggcaggcctggtgctggcaggacgagtggtatgggctgagcatggagaacatccgggagctggagaaggaggcacagctcatgctttcccgtaagatggcccagttcaatgaggatggtgaggaggccactgagctcgtcaagcacgaagccgtctcggaccagacctctggggagcccccggagcccagcagcagcaatggggagcccctagtggggcgcggcctcaagaaacagtggtccacatcctccaagtcgtctcggtcgtccaagcggggagcgagtccttcccgccacagcatctcagagtggaggatgcagagtattgccagggactcggatgagagctcagatgatgagttcttcgatgcgcacgaggacctgtccgacacagaggaaatgttccccaaggacatcaccaagtggagctccaatgacctcatggacaagatcgagagcccagagccggaagacacacaagatggtctgtaccgccagggtgcccctgagttcagggtggcctccagtgtggagcagctgaacatcatagaggacgaggttagccagccgctggctgcaccgccctccaagatccacgtgctgctactggtgctgcacggaggcaccatcctggacacaggcgccggggaccccagctccaagaagggcgatgctaacaccatcgccaacgtgttcgacaccgtcatgcgcgtgcactaccccagcgccctgggccgccttgccatccgcctggtgccctgcccgcccgtctgctctgacgcctttgccctggtctccaacctcagcccctacagccatgacgaaggctgtctgtccagcagtcaggaccacattcccctggctgccctccccctgctggccacctcctccccccagtaccaggaggcagttgccacagtgattcagcgagccaaccttgcctatggggacttcatcaagtcccaggagggcatgaccttcaatgggcaggtctgcctgattggggactgcgtcgggggcatcctggcatttgatgccctgtgctacagtaaccagccggtgtctgagagtcagagcagcagccgccggggcagcgtggtcagcatgcaggacaatgacctgctgtccccgggcatcctgatgaatgcagcacactgctgcggtggtggcggtggcggcggtggcggtggtggcagcagtggtggtggtggcagtagtggtggctccagcctggagagcagtcggcacctgagccgaagcaacgtcgacatcccccgcagcaacggcactgaggaccccaaaaggcaactgccccgcaagaggagcgactcatccacctacgagctggataccatccagcagcaccaggccttcctgtccagcctccatgccagcgtgctgaggactgagccctgctcacgccattccagcagctccaccatgctggatggcacaggtgccctgggcaggtttgactttgagatcaccgacctcttcctcttcgggtgcccgctggggctggtcctggccttgaggaagactgtcatcccagccctggatgttttccagctgcggccggcctgccagcaagtctacaacctcttccaccccgcggacccgtcagcttcacgcctggagccgctgctggaacggcgctttcacgccctgccgcctttcagcgtcccccgctaccaacgctacccgctgggggatggctgctccacgctgctggcggatgtgctccagacccacaatgcagccttccaagagcatggcgccccctcctcgccgggcactgcccctgccagtcgtggcttccgccgagccagtgagatcagcatcgccagccaggtgtcaggcatggctgagagctacacggcatccagcatcgcccagaaggcccccgatgcgctcagccatacccccagcgtcaggcgtctgtccctgctcgccctgcccgcccccagccccaccacccctggcccccaccctccagccaggaaggcaagccctggcctggagagggcccctggcctccctgagctggacattggagaagtcgctgcaaagtggtggggccagaagcggatcgactacgccctgtactgccctgacgccctcacggccttccccacggtggctctgcctcacctcttccacgccagctactgggagtcaacagacgtggtctcctttctgctgagacaggtcatgaggcatgacaactccagcatcttggagctggatggcaaggaagtgtcggtgttcaccccctcaaagccaagggagaagtggcagcgcaagcggacccacgtgaagctgcggaacgtgacggccaaccaccggatcaatgatgcccttgccaatgaggacggcccccaggttctgacgggcaggttcatgtatgggcccctggacatggtcaccctgactggggagaaggtggatgtgcacatcatgacccagccgccctcaggcgagtggctctacctggatacgctggtgaccaacaacagtgggcgtgtctcctacaccatccctgagtcgcaccgcctgggcgtgggtgtctaccctatcaagatggtggtcaggggagaccacacgtttgccgacagctacatcaccgtgctgcccaagggcacagagttcgtggtcttcagcatcgacggttcctttgccgctagcgtgtccatcatgggcagcgaccccaaggtgcgggccggggccgtggacgtggtgcggcactggcaggacctgggctacctcatcatctacgtgacgggccggcccgacatgcagaagcagcgggtggtggcgtggctggcccagcacaacttcccccatggcgtggtgtccttctgtgacggcctggtgcatgacccgctgcggcacaaggccaacttcctgaagctgctcatctccgagctgcacctgcgcgtgcacgcggcctatggctccaccaaggacgtggcggtgtacagcgccattagcctgtcccccatgcagatctacatcgtgggccggcccaccaagaagctgcagcagcagtgccagttcatcacggatggctacgcggcccacctggcgcagctgaagtacagccaccgggcgcggcccgctcgcaacacggccacccgcatggcgctgcgcaagggcagcttcggcctgcccggccagggcgactttctgcgctcccggaaccacctgcttcgcaccatctcggcccagcccagcgggcccagccaccggcacgagcggacacagagccaggcggatggcgagcagcggggccagcgcagcatgagtgtggcggccggctgctggggccgcgccatgactggccgcctggagccgggggcagccgcgggccccaagtagggcaccgtgagtgcagcgcggggtctccatggtgctaggccagggtggccagccccgccaggaggcctggcctgggcacacgcactgacgtgggcctgggagattgtcccagggccttgtggaggacacgggccgcaccacacagtgctccctgccctgcctcacgtcctcgggcctgacgggtccggcttgtcatggaagctggcagggaccaccagccccaggatggcagagggaccagaacctcccactcagactggcccgggaggttctcccagacattttgccctgtgtggatctccaagtgtcctggtgccaggtgtgggcccaggcgcagcctgccacctccccatccactggccaccctcactcccaggtcccctcccatttggtagcagctccaacaggggtccagcctgcatcttgttaactcgagtttctcaactgttcaacctcactggttttgcactgatttttgagagcggagacccattaccacctcctatggctacagccccgttgacatgcatgaaactcagtacctgctgacccaggacctacaaccacactgaaggctccagtgcggcagagcctcgtgcaagcaggagagaaaggctgtatcttaatttctgcaccccggaccctgcccacctgtctgcctgccccgcctggagcccaggccagtgttgtttccagcctcaggccacgggctggacgggcctggccgcctcttccgctccctgccatcagtcaaggccgcccgcccacgtttctacgcctttctacttctcaatctgatttctatgaggtttttttaaacgagcaatccttggctgcttccttttcttaactctttcagtactgagagcagcccctccacactgaaaacacccagcactgtgacggagtccagcctggttctgggtcccgtgggccctgctcctgcccacttagcgaggcatgggctccttgcctcacctggccccggcaatcccactgaatttctactctggggtgggtggggcacacacttcggtttttttaatgccaattccgttttcatgccgaatctaagaagccacaacttgctttgtcagcttcagggcaggcagccatgacttcatttctcgcctgaacaaggaccatgctgtcctgcacgctgggtctgaccgtctgccctctctccccagcaccaagcgtgaccttggctgtggcgctcaacggccagctccggcggcccctctgctgctcctcggctttcccggaagtgggagagcctgcctggcctcggcctttgtccagcgaccaggctctgtccccgagaagctacggccgacctgggtctggtgttgggacgcatggaccgggctggggaggtgcacagagtgatgttaactttttcccgtgtgtagatatgtacagccaaagggtcgtgtaaatgttctgcaaaagtgggtctatacagagtgaaagctatttattttgtgcagagaaaaaagtctggagggatggaaccttcagggtttattcatatttaagatgtagctttttgttgtttcaggcattatgtataaagcaacgattattttatggaccaagttttcatgtaactgttgcagtgaaagtgcaatatctgacccccctgctcccagcaggaagttgcttggcccgacaatcacagcccctgtcaggggccctgtggccagtgcctcctcctctcttggccccaccttatcctgtcttgcctgctgcctgggagaccagccatccagagaagcacctggaagagtctcgggccctcctgcaataaaggccgggaggccctgtgggcagtgggctcagcctctccccaggggggcagctcccccacggctcctcactccccgcctgcctgcccagccgccagccatgccaaggacaacagcaatagtcccctggggctctcccagcggccctcagccatagatggcaaggtgggcagcctgcccccccatgggaagtctcttctgtatccaggtctgctttccacctcccttcagattccttttggcacattctcctcttgaggaagtaccagtctttctgaaactaagagagggagggcagcgtcctttaaaaataccaaaaatgtttacagagttgggtgctgagctgcagggctcaggcctgaccagtcataaccaaagggtgaggcaggccttgctgactgccaccccccaggcctgttagaatagaagccttagtcccactcccaccacacccccacgccccaccacctgccttctctttgatttctaaagagggattcagcagagaccccccacccctccctggctcggtctgagtcccactgcccaccccatcacagccttcacgtctcagcccctcccgtctggtctgtccgtgtgccgtctgtttctctgggccatgtgtgagcagtgtccccatctccccatccgtccctgctgtccccgcatcattgggcctgagtgtgctctgtatacaacgtcatgtctgttacaccaattaaagaagcgggaaggcttc

SEQ ID NO: 165170 - DNA, 6660 bp, Homo sapiens
  Payload ID: 12523
  Gene Symbol: PITPNM2
  Gene Name: phosphatidylinositol transfer protein, membrane-associated 2
  Uniprot ID: Q9BZ72
  ENST ID: ENST00000542749
  CDS Start-End: 65-4114
aaggaaccttgcctagaagtcccaacttgcagttccccatcgacgggaaggcttggactccaagatgattataaaggaatatcggattcctctgccaatgaccgtggaggagtaccgcatcgcccagctgtacatgatacagaagaagagccgtaacgagacatatggcgaaggcagcggcgtggagatcctggagaaccggccgtacacagatggcccaggcggctctgggcagtacacacacaaggtgtatcatgtgggcatgcacattcccagctggttccgctccatcctgcccaaggcagccctgcgggtggtggaggagtcttggaatgcctacccctacacccgaaccaggttcacctgtcctttcgtggagaaattctccatcgacattgaaaccttttataaaactgatgctggagaaaaccccgacgtgttcaacctctctcctgtggaaaagaaccagctgacaatcgacttcatcgacattgtcaaagaccctgtgccccacaacgagtataagacagaagaggaccccaagctgttccagtcaaccaagacccagcgggggcccctgtccgagaactggatcgaggagtacaagaagcaggtcttccccatcatgtgcgcatacaagctctgcaaggtggagttccgctactggggcatgcagtccaagatcgagaggttcatccacgacaccggactacggagggtgatggtgcgggctcaccggcaggcctggtgctggcaggacgagtggtatgggctgagcatggagaacatccgggagctggagaaggaggcacagctcatgctttcccgtaagatggcccagttcaatgaggatggtgaggaggccactgagctcgtcaagcacgaagccgtctcggaccagacctctggggagcccccggagcccagcagcagcaatggggagcccctagtggggcgcggcctcaagaaacagtggtccacatcctccaagtcgtctcggtcgtccaagcggggagcgagtccttcccgccacagcatctcagagtggaggatgcagagtattgccagggactcggatgagagctcagatgatgagttcttcgatgcgcacgaggacctgtccgacacagaggaaatgttccccaaggacatcaccaagtggagctccaatgacctcatggacaagatcgagagcccagagccggaagacacacaagatggtctgtaccgccagggtgcccctgagttcagggtggcctccagtgtggagcagctgaacatcatagaggacgaggttagccagccgctggctgcaccgccctccaagatccacgtgctgctactggtgctgcacggaggcaccatcctggacacaggcgccggggaccccagctccaagaagggcgatgctaacaccatcgccaacgtgttcgacaccgtcatgcgcgtgcactaccccagcgccctgggccgccttgccatccgcctggtgccctgcccgcccgtctgctctgacgcctttgccctggtctccaacctcagcccctacagccatgacgaaggctgtctgtccagcagtcaggaccacattcccctggctgccctccccctgctggccacctcctccccccagtaccaggaggcagttgccacagtgattcagcgagccaaccttgcctatggggacttcatcaagtcccaggagggcatgaccttcaatgggcaggtctgcctgattggggactgcgtcgggggcatcctggcatttgatgccctgtgctacagtaaccagccggtgtctgagagtcagagcagcagccgccggggcagcgtggtcagcatgcaggacaatgacctgctgtccccgggcatcctgatgaatgcagcacactgctgcggtggtggcggtggcggcggtggcggtggtggcagcagtggtggtggtggcagtagtggtggctccagcctggagagcagtcggcacctgagccgaagcaacgtcgacatcccccgcagcaacggcactgaggaccccaaaaggcaactgccccgcaagaggagcgactcatccacctacgagctggataccatccagcagcaccaggccttcctgtccagcctccatgccagcgtgctgaggactgagccctgctcacgccattccagcagctccaccatgctggatggcacaggtgccctgggcaggtttgactttgagatcaccgacctcttcctcttcgggtgcccgctggggctggtcctggccttgaggaagactgtcatcccagccctggatgttttccagctgcggccggcctgccagcaagtctacaacctcttccaccccgcggacccgtcagcttcacgcctggagccgctgctggaacggcgctttcacgccctgccgcctttcagcgtcccccgctaccaacgctacccgctgggggatggctgctccacgctgctggcggatgtgctccagacccacaatgcagccttccaagagcatggcgccccctcctcgccgggcactgcccctgccagtcgtggcttccgccgagccagtgagatcagcatcgccagccaggtgtcaggcatggctgagagctacacggcatccagcatcgcccagaaggcccccgatgcgctcagccatacccccagcgtcaggcgtctgtccctgctcgccctgcccgcccccagccccaccacccctggcccccaccctccagccaggaaggcaagccctggcctggagagggcccctggcctccctgagctggacattggagaagtcgctgcaaagtggtggggccagaagcggatcgactacgccctgtactgccctgacgccctcacggccttccccacggtggctctgcctcacctcttccacgccagctactgggagtcaacagacgtggtctcctttctgctgagacaggtcatgaggcatgacaactccagcatcttggagctggatggcaaggaagtgtcggtgttcaccccctcaaagccaagggagaagtggcagcgcaagcggacccacgtgaagctgcggaacgtgacggccaaccaccggatcaatgatgcccttgccaatgaggacggcccccaggttctgacgggcaggttcatgtatgggcccctggacatggtcaccctgactggggagaaggtggatgtgcacatcatgacccagccgccctcaggcgagtggctctacctggatacgctggtgaccaacaacagtgggcgtgtctcctacaccatccctgagtcgcaccgcctgggcgtgggtgtctaccctatcaagatggtggtcaggggagaccacacgtttgccgacagctacatcaccgtgctgcccaagggcacagagttcgtggtcttcagcatcgacggttcctttgccgctagcgtgtccatcatgggcagcgaccccaaggtgcgggccggggccgtggacgtggtgcggcactggcaggacctgggctacctcatcatctacgtgacgggccggcccgacatgcagaagcagcgggtggtggcgtggctggcccagcacaacttcccccatggcgtggtgtccttctgtgacggcctggtgcatgacccgctgcggcacaaggccaacttcctgaagctgctcatctccgagctgcacctgcgcgtgcacgcggcctatggctccaccaaggacgtggcggtgtacagcgccattagcctgtcccccatgcagatctacatcgtgggccggcccaccaagaagctgcagcagcagtgccagttcatcacggatggctacgcggcccacctggcgcagctgaagtacagccaccgggcgcggcccgctcgcaacacggccacccgcatggcgctgcgcaagggcagcttcggcctgcccggccagggcgactttctgcgctcccggaaccacctgcttcgcaccatctcggcccagcccagcgggcccagccaccggcacgagcggacacagagccaggcggatggcgagcagcggggccagcgcagcatgagtgtggcggccggctgctggggccgcgccatgactggccgcctggagccgggggcagccgcgggccccaagtagggcaccgtgagtgcagcgcggggtctccatggtgctaggccagggtggccagccccgccaggaggcctggcctgggcacacgcactgacgtgggcctgggagattgtcccagggccttgtggaggacacgggccgcaccacacagtgctccctgccctgcctcacgtcctcgggcctgacgggtccggcttgtcatggaagctggcagggaccaccagccccaggatggcagagggaccagaacctcccactcagactggcccgggaggttctcccagacattttgccctgtgtggatctccaagtgtcctggtgccaggtgtgggcccaggcgcagcctgccacctccccatccactggccaccctcactcccaggtcccctcccatttggtagcagctccaacaggggtccagcctgcatcttgttaactcgagtttctcaactgttcaacctcactggttttgcactgatttttgagagcggagacccattaccacctcctatggctacagccccgttgacatgcatgaaactcagtacctgctgacccaggacctacaaccacactgaaggctccagtgcggcagagcctcgtgcaagcaggagagaaaggctgtatcttaatttctgcaccccggaccctgcccacctgtctgcctgccccgcctggagcccaggccagtgttgtttccagcctcaggccacgggctggacgggcctggccgcctcttccgctccctgccatcagtcaaggccgcccgcccacgtttctacgcctttctacttctcaatctgatttctatgaggtttttttaaacgagcaatccttggctgcttccttttcttaactctttcagtactgagagcagcccctccacactgaaaacacccagcactgtgacggagtccagcctggttctgggtcccgtgggccctgctcctgcccacttagcgaggcatgggctccttgcctcacctggccccggcaatcccactgaatttctactctggggtgggtggggcacacacttcggtttttttaatgccaattccgttttcatgccgaatctaagaagccacaacttgctttgtcagcttcagggcaggcagccatgacttcatttctcgcctgaacaaggaccatgctgtcctgcacgctgggtctgaccgtctgccctctctccccagcaccaagcgtgaccttggctgtggcgctcaacggccagctccggcggcccctctgctgctcctcggctttcccggaagtgggagagcctgcctggcctcggcctttgtccagcgaccaggctctgtccccgagaagctacggccgacctgggtctggtgttgggacgcatggaccgggctggggaggtgcacagagtgatgttaactttttcccgtgtgtagatatgtacagccaaagggtcgtgtaaatgttctgcaaaagtgggtctatacagagtgaaagctatttattttgtgcagagaaaaaagtctggagggatggaaccttcagggtttattcatatttaagatgtagctttttgttgtttcaggcattatgtataaagcaacgattattttatggaccaagttttcatgtaactgttgcagtgaaagtgcaatatctgacccccctgctcccagcaggaagttgcttggcccgacaatcacagcccctgtcaggggccctgtggccagtgcctcctcctctcttggccccaccttatcctgtcttgcctgctgcctgggagaccagccatccagagaagcacctggaagagtctcgggccctcctgcaataaaggccgggaggccctgtgggcagtgggctcagcctctccccaggggggcagctcccccacggctcctcactccccgcctgcctgcccagccgccagccatgccaaggacaacagcaatagtcccctggggctctcccagcggccctcagccatagatggcaaggtgggcagcctgcccccccatgggaagtctcttctgtatccaggtctgctttccacctcccttcagattccttttggcacattctcctcttgaggaagtaccagtctttctgaaactaagagagggagggcagcgtcctttaaaaataccaaaaatgtttacagagttgggtgctgagctgcagggctcaggcctgaccagtcataaccaaagggtgaggcaggccttgctgactgccaccccccaggcctgttagaatagaagccttagtcccactcccaccacacccccacgccccaccacctgccttctctttgatttctaaagagggattcagcagagaccccccacccctccctggctcggtctgagtcccactgcccaccccatcacagccttcacgtctcagcccctcccgtctggtctgtccgtgtgccgtctgtttctctgggccatgtgtgagcagtgtccccatctccccatccgtccctgctgtccccgcatcattgggcctgagtgtgctctgtatacaacgtcatgtctgttacaccaattaaagaagcgggaaggctt

SEQ ID NO: 165171 - DNA, 564 bp, Homo sapiens
  Payload ID: 12523
  Gene Symbol: PITPNM2
  Gene Name: phosphatidylinositol transfer protein, membrane-associated 2
  ENST ID: ENST00000542210
  CDS Start-End: 440-564
ccctttccaccgacttgctcctgcagagacatcctgcactcctctccctcccactgaagtgtgggctgggtgcctctccaaacaccccggcctacctgcctcccccacccagagtcgggattcttcaaaggagacctcactggaacatctgtctttgtccacaaccagctctctccccggcctccacctgggagtgaccagagctgctaggatagaccccccacttctggagggaaggcagatgctggcacgtgtgtcctggtcctcaacaaccttctgtgagcctagggacccatttctcctcctttgacagggacatcagtggagccttctcagacccacaggggtccttggtgaattttgtcatggttatttaaggaaccttgcctagaagtcccaacttgcagttccccatcgacgggaaggcttggactccaagatgattataaaggaatatcggattcctctgccaatgaccgtggaggagtaccgcatcgcccagctgtacatgatacagaagaagagccgtaacgagacatatggcgaaggcagcggcgtggagat

SEQ ID NO: 165172 - DNA, 663 bp, Homo sapiens
  Payload ID: 12523
  Gene Symbol: PITPNM2
  Gene Name: phosphatidylinositol transfer protein, membrane-associated 2
  ENST ID: ENST00000541244
  CDS Start-End: 618-663
gtttagtttggttttggtttgctagtgagcggaaaatctgatgtgacaccttaaaggccagcccacaagtggcagcacctgatcgtcatctctgctctcagcctctatgggaggcacccggccctgccgttgctgctgggcttcctctgccctgagggctttcgtgtgagctcagggcaatgcaagtgtgtgttcagttaccaagcccaaaagtcaaaagaacagccagagccaagctggcttttgaggagagaggccggctcctccagcctggctgcatttgcctgaggtagatcgtgagtgctctgccccagcctctccgccctcctgtgtcctttctcagcggctgctctaaagtataacttcacgtagtggtgacttaacttgaaaggagccgcagggggcgtgagagcagcttggagaggtgggagcctgggccgccgatggctccagcctgtgaaagtgtggaaagctcgttccaggaaaattggaataatcacctcattggctggctttcaggcggggtccttggtgaattttgtcatggttatttaaggaaccttgcctagaagtcccaacttgcagttccccatcgacgggaaggcttggactccaagatgattataaaggaatatcggattcctctgccaatgaccgtggagg

SEQ ID NO: 165173 - DNA, 1793 bp, Homo sapiens
  Payload ID: 12523
  Gene Symbol: PITPNM2
  Gene Name: phosphatidylinositol transfer protein, membrane-associated 2
  ENST ID: ENST00000546049
  CDS Start-End: 280-1716
agaacagggcagaggagaggcctgcagttccagacccacgtcattatggagtctatggtgcccactccccagttggtatctatgctgttccctgagagccccaccatccaccttctctccttttagaggtgcctctggagctaggctgtggacagagcctgctcccctgcccagacactgtggggggtccttggtgaattttgtcatggttatttaaggaaccttgcctagaagtcccaacttgcagttccccatcgacgggaaggcttggactccaagatgattataaaggaatatcggattcctctgccaatgaccgtggaggagtaccgcatcgcccagctgtacatgatacagaagaagagccgtaacgagacatatggcgaaggcagcggcgtggagatcctggagaaccggccgtacacagatggcccaggcggctctgggcagtacacacacaaggtgtatcatgtgggcatgcacattcccagctggttccgctccatcctgcccaaggcagccctgcgggtggtggaggagtcttggaatgcctacccctacacccgaaccaggttcacctgtcctttcgtggagaaattctccatcgacattgaaaccttttataaaactgatgctggagaaaaccccgacgtgttcaacctctctcctgtggaaaagaaccagctgacaatcgacttcatcgacattgtcaaagaccctgtgccccacaacgagtataagacagaagaggaccccaagctgttccagtcaaccaagacccagcgggggcccctgtccgagaactggatcgaggagtacaagaagcaggtcttccccatcatgtgcgcatacaagctctgcaaggtggagttccgctactggggcatgcagtccaagatcgagaggttcatccacgacaccggactacggagggtgatggtgcgggctcaccggcaggcctggtgctggcaggacgagtggtatgggctgagcatggagaacatccgggagctggagaaggaggcacagctcatgctttcccgtaagatggcccagttcaatgaggatggtgaggaggccactgagctcgtcaagcacgaagccgtctcggaccagacctctggggagcccccggagcccagcagcagcaatggggagcccctagtggggcgcggcctcaagaaacagtggtccacatcctccaagtcgtctcggtcgtccaagcggggagcctctgtgatgcctgtcaggcctgtgggtggccctccctgcctcctgccggctcagggcagcctctgggcccttcctctccagttggcggtcaatctggggttttgccttccagcgagtccttcccgccacagcatctcagagtggaggatgcagagtattgccagggactcggatgagagctcagatgatgagttcttcgatgcgcacgaggacctgtccgacacagaggaaatgttccccaaggacatcaccaagtggagctccaatgacctcatggacaagatcgagagcccagagccggaagacacacaagatggtctgtaccgccagggtgcccctgagttcagggtggcctccagtgtggagcagctgaacatcatagagatcaaaaataagatcttcaccttgtgcccagcctgtctgctgtccctgaagataaaaagacgaaaagggaggaagcgacagtcgtctaggcagaagtgatgtggccgtggccgacaagatggccccgcgggaggcaggcggagctcagtgtgtccaataaaactgtcttggtagag

SEQ ID NO: 165174 - DNA, 6636 bp, Homo sapiens
  Payload ID: 12524
  Gene Symbol: PREX1
  Gene Name: phosphatidylinositol-3,4,5-trisphosphate-dependent Rac exchange factor 1
  Uniprot ID: Q8TCU6
  ENST ID: ENST00000371941
  CDS Start-End: 24-5003
cggcgccgcgcggccgcgctagaatggaggcgcccagcggcagcgagcccggcggcgacggggccggggactgcgcccacccggacccccgggcccctggcgccgcggcgcccagctccggccccggcccgtgcgcggccgcccgggagtccgagcgccagctgcgcctccgcctctgcgtcctcaacgagatcttgggcaccgagagggactacgtgggcaccttgcgcttcttgcagtcggcattcctgcatcgcatccggcagaacgtggccgactcagtggagaagggcctcacggaggagaatgtcaaggtcctgttctcgaacatcgaagacatcctggaagttcataaggatttcttggccgccttggagtattgtttacacccggagccgcagtctcagcatgaacttgggaatgttttcttaaaattcaaggacaagttctgcgtgtacgaggagtattgcagcaaccatgagaaagccctgaggctgctggtggagctgaacaagatccctaccgtgcgcgccttccttttgagctgcatgcttctgggaggccggaagaccacggacatccctttggaaggctacctgttgtctccgatccagaggatctgcaagtacccgctcctccttaaggagctggccaagaggactcccggcaagcacccagaccaccccgcggtccagagtgccctgcaggccatgaagaccgtttgctccaacatcaatgagaccaagcggcagatggagaagctggaagccctggagcagctgcagtcccacatcgaaggctgggagggttccaacctcacagacatctgcactcagctcctcctgcaagggactttgttaaagatctctgcgggcaacatccaggaaagggccttcttcctcttcgacaaccttctcgtctactgcaagcggaaatccagggtcaccgggagcaagaagtccaccaagaggaccaaatccatcaacggctccctctacatcttcaggggtcgaatcaacactgaagtcatggaggtggagaatgtggaagatgggacagcggattaccatagcaacggctataccgtcaccaacggctggaagatccacaacacggccaagaataagtggtttgtctgcatggccaagacggcagaggagaagcagaagtggctggatgccatcatccgcgagcgggagcagcgcgagagcctgaagctgggcatggagcgtgatgcctacgtcatgattgcggagaagggggagaagctgtaccacatgatgatgaacaagaaggtgaacctcatcaaggaccgccggagaaagctgagcactgtccccaagtgctttcttggcaatgagttcgttgcctggctcctagaaattggtgaaatcagcaagacggaagaaggagtcaacttgggccaagccctgttggagaatggcatcatccaccatgtttccgacaagcaccagttcaagaatgagcaggtgatgtatcgcttccgctacgacgatggcacctacaaggcccgaagtgagctggaggacatcatgtccaagggtgtgaggctttactgccgtcttcacagcctctacaccccggtgatcaaagaccgtgattaccacctgaagacctacaagtcagtgcttcccgggagcaagctggtggactggctgctggctcagggagactgccagactcgggaggaggcagtggcgctcggcgtgggtctgtgcaacaatggcttcatgcaccacgtgctggagaagagcgagttcagggatgagtcccagtacttccgctttcatgctgacgaggagatggaggggaccagcagcaagaacaaacagcttcgcaacgacttcaagctggtggagaacattctggccaagcgcctgctgatcctgccccaggaggaggactatggctttgacatcgaggagaagaacaaggctgtggtggtgaagtccgtccagaggggctcgctggctgaggtggctggcctgcaggtggggaggaagatctactccatcaatgaggacctggtgttcctgcggccgttttcagaggtggagtccatcctcaaccagtccttctgctcccgccgccctctgcgcctcctggtggccacgaaggccaaagagatcatcaaaatccccgaccagccggacacactgtgcttccagattcgtggagctgccccaccgtacgtctatgctgtggggagaggctctgaggccatggctgcagggctctgtgctggtcagtgcattctgaaggtcaatggcagcaacgtgatgaacgatggtgcccctgaggtcctggagcacttccaggcattccggagtcggcgcgaagaggccctgggcctgtaccagtggatctaccacacccatgaggatgcccaggaagcacgagccagtcaggaggcctccactgaggaccccagtggcgagcaggcccaggaggaagaccaggctgattcagccttcccactgctgtccctgggtccccggctgagcctgtgtgaggacagccccatggtcaccctgactgtggacaacgtgcacctggaacacggcgtggtgtatgagtatgtgagcacggcaggcgtcaggtgccatgtgctggagaagatcgtggagccccgcggctgcttcggcctcaccgccaagatcctcgaggcctttgctgccaatgacagcgtcttcgtggagaactgcaggcggctcatggccctgagcagcgccatcgtgaccatgccccactttgagttccgcaacatctgtgacaccaagctggagagcattggccagaggattgcctgctaccaggagtttgcagcccaactgaagagcagggtcagcccacccttcaaacaagcccccctggagccccacccgctgtgtggcctggacttctgccccaccaattgccacatcaacctcatggaagtgtcctaccccaagaccaccccctcagtgggcaggtccttcagcatccgctttggacgcaaaccctccctcatcggccttgacccggagcaaggccacctgaaccccatgtcgtacacccagcactgcatcaccaccatggctgctccctcctggaagtgcttgcctgctgcagagggtgatccccaaggccagggtctccatgatggcagcttcgggccagccagtgggacccttggtcaggaagaccggggcctcagcttcctactcaagcaggaggaccgtgagatccaggatgcctacctgcagctcttcaccaagctggatgtggccctgaaggagatgaagcaatatgtcacccagatcaacaggctgctgtccaccatcacagagcccacctcgggtgggtcctgcgacgcatccttggctgaggaggcctcctccctgcccctggtcagtgaagagagcgagatggacaggagtgaccatgggggcatcaagaaggtgtgcttcaaggtggccgaggaggaccaggaggactcaggccacgacaccatgagttatcgcgactcctacagcgagtgtaacagcaatcgagactcggtcctgtcctacaccagcgtgagaagtaacagctcctacttgggcagcgacgagatggggtctggagatgagctgccctgtgacatgcggatcccatctgacaagcaggacaagcttcatggctgcctggagcacctctttaaccaggtggactccatcaatgctctcctcaaggggccagtcatgagccgggctttcgaagagaccaagcatttccctatgaaccacagcttacaagagtttaaacagaaagaagagtgtacaatccgtggccggagcctgatccagattagcatccaggaggacccctggaacctccccaactccatcaagaccctggtggacaacattcagagatatgtggaagatgggaagaaccagctgctcctggccttgctgaagtgcacagacacggagctgcagctgcgcagagacgcgatcttctgccaggccctggtggccgccgtgtgcaccttctccaagcagctgctggcggccctgggctaccgctacaacaacaatggcgagtacgaggagagcagccgcgacgccagccgcaagtggctggagcaggtggcggccacgggcgtcctgctgcactgccagtccctgctctcgccagccacagtgaaggaggaacggaccatgctggaggacatctgggtgacgctgtcagagctggacaatgtcaccttctcctttaagcagctggacgagaactatgtggccaacaccaacgtcttctaccacattgagggcagccggcaggcgctgaaggtcatcttctacctcgacagctaccacttctccaagctgccctcccgcctggagggtggggccagcctgaggctgcacacagcgctgttcacgaaagtgctggagaacgtggaggggctgccttctccaggcagccaggccgcggaggatttgcagcaggacatcaacgcgcagtccctggagaaagttcagcagtattaccgcaaactcagggcattttacctggagcggtctaacctgcccacggatgccagcaccacggcggtaaagatagaccagctgatccgccccatcaatgccctggatgagctctgccgcctcatgaagtcctttgtccacccaaagcctggtgctgctgggagtgtgggcgccggcctcatccccatctcctcggagctctgctaccgcctgggggcctgccagatggtcatgtgtggcacaggcatgcagaggagcaccctgagcgtgtccctggagcaggcggccatcttggcacggagccacgggttgctgcccaagtgcatcatgcaggccacggacatcatgcggaagcagggcccaagggtggagattctggccaaaaacctgcgagtcaaggaccagatgccccagggtgctccgcgcctctaccgcctctgccagccgccggtggatggggacctctgaacacccaaatgccccacgctgggccgcggcctctggagctgggatttgggaggacacagcaggcagcgctggccttctccagggatggcccaaggcttccgcagccgcccgttccgggacctgcccagcgtcctccctgcctccttccgggacaagcctggccaccctcgctgtgatgacgagctggctgattggccctgggccggcccattcttcacacgcctgccagaagctggaggggtgctggagacccatagagctgatgggagcagctggtgcctggccttcggctcctgcgtccccagaacccaagggaacgtcatggaggccacatggggccacccggctccctcgggatggctccgcctgcacttttgaaaccccggtttccttcaacgtccacattccaggtgaccacacgtgtctcctcctcctcatcttagcttccaggttcaccctaaccctgtactaacctgcttggtggacttggaaaagacttggctctgtcgggaaaggagagacggggcctccatcacgcctgttaccagaggatccccgagagccacaccagctctggacatcaccgcccctggaactggggccaccagccctgggcacgagatttgctctgactttatttatatggcatgaaatctctggtttattttgggattttttgttgttggtgttgtcaaagtttgttttttctaaagttgtgtgattatatatttgacattttacatttcaaagaaaggtatgttgtctaacaggggaccaacagaaggtagtattgacaactgttcctgcttctactaaaaaaaaaagagcacaaaagaaaaactaaattattgaaaaattaaaaaatgtcattgtttcctgtttgttaatattagggttgtaaggtgtcgttttgaggtatcgactgtgattccttcccccaccctccattctccagcggttggccggtgttagaactcgctctctttgagtgactggctacaagggcctgagaggtggccagccagggttggagctggaggggatggagccccacctgaggtgccgtgtcacacgggttagagggtcactgggaaacaccgggcggtggcttctgtgatttattttcttgatggtaacttctcagagcagggcgattgggacatcaccagccagagcacaggaagccaccctgcctgctggggaggagggacccacacaagccccctcggcagtttgtccccccagcttcggtatgccttcagggaaaggtcacagctggggaggaagcggggggacgcctgtcacccctggcaggtggtgagttcaggtgggggctccctgctgcccccaggcctgggagcttgaagccctcccggcatctggcatccgagcctcccgccctccagggtgcgcttccctctcttgccgcagcatacacgagggcaggcagtggccttgtcactgtatcttgcatcagagacaaaggaggacccgctttagccctgctgcgggaaatgggggagggcccagggccagcgcattgtgcactggtttactttaaaatgtacagattcttctcgttaaattcttgatagattttttattattattaaaagtcagtttataatacaaa

SEQ ID NO: 165175 - DNA, 4682 bp, Homo sapiens
  Payload ID: 12524
  Gene Symbol: PREX1
  Gene Name: phosphatidylinositol-3,4,5-trisphosphate-dependent Rac exchange factor 1
  ENST ID: ENST00000482556
  CDS Start-End: 1-2651
ggccgttttcagaggtggagtccatcctcaaccagtccttctgctcccgccgccctctgcgcctcctggtggccacgaaggccaaagagatcatcaaaatccccgaccagccggacacactgtgcttccagattcgtggagctgccccaccgtacgtctatgctgtggggagaggctctgaggccatggctgcagggctctgtgctggtcagtgcattctgaaggtcaatggcagcaacgtgatgaacgatggtgcccctgaggtcctggagcacttccaggcattccggagtcggcgcgaagaggccctgggcctgtaccagtggatctaccacacccatgaggatgcccaggaagcacgagccagtcaggaggcctccactgaggaccccagtggcgagcaggcccaggaggaagaccaggctgattcagccttcccactgctgtccctgggtccccggctgagcctgtgtgaggacagccccatggtcaccctgactgtggacaacgtgcacctggaacacggcgtggtgtatgagtatgtgagcacggcaggcgtcaggtgccatgtgctggagaagatcgtggagccccgcggctgcttcggcctcaccgccaagatcctcgaggcctttgctgccaatgacagcgtcttcgtggagaactgcaggcggctcatggccctgagcagcgccatcgtgaccatgccccactttgagttccgcaacatctgtgacaccaagctggagagcattggccagaggattgcctgctaccaggagtttgcagcccaactgaagagcagggtcagcccacccttcaaacaagcccccctggagccccacccgctgtgtggcctggacttctgccccaccaattgccacatcaacctcatggaagtgtcctaccccaagaccaccccctcagtgggcaggtccttcagcatccgctttggacgcaaaccctccctcatcggccttgacccggagcaaggccacctgaaccccatgtcgtacacccagcactgcatcaccaccatggctgctccctcctggaagtgcttgcctgctgcagagggtgatccccaaggccagggtctccatgatggcagcttcgggccagccagtgggacccttggtcaggaagaccggggcctcagcttcctactcaagcaggaggaccgtgagatccaggatgcctacctgcagctcttcaccaagctggatgtggccctgaaggagatgaagcaatatgtcacccagatcaacaggctgctgtccaccatcacagagcccacctcgggtgggtcctgcgacgcatccttggctgaggaggcctcctccctgcccctggtcagtgaagagagcgagatggacaggagtgaccatgggggcatcaagaaggtgtgcttcaaggtggccgaggaggaccaggaggactcaggccacgacaccatgagttatcgcgactcctacagcgagtgtaacagcaatcgagactcggtcctgtcctacaccagcgtgagaagtaacagctcctacttgggcagcgacgagatggggtctggagatgagctgccctgtgacatgcggatcccatctgacaagcaggacaagcttcatggctgcctggagcacctctttaaccaggtggactccatcaatgctctcctcaaggggccagtcatgagccgggctttcgaagagaccaagcatttccctatgaaccacagcttacaagagtttaaacagaaagaagagtgtacaatccgtggccggagcctgatccagattagcatccaggaggacccctggaacctccccaactccatcaagaccctggtggacaacattcagagatatgtggaagatgggaagaaccagctgctcctggccttgctgaagtgcacagacacggagctgcagctgcgcagagacgcgatcttctgccaggccctggtggccgccgtgtgcaccttctccaagcagctgctggcggccctgggctaccgctacaacaacaatggcgagtacgaggagagcagccgcgacgccagccgcaagtggctggagcaggtggcggccacgggcgtcctgctgcactgccagtccctgctctcgccagccacagtgaaggaggaacggaccatgctggaggacatctgggtgacgctgtcagagctggacaatgtcaccttctcctttaagcagctggacgagaactatgtggccaacaccaacgtcttctaccacattgagggcagccggcaggcgctgaaggtcatcttctacctcgacagctaccacttctccaagctgccctcccgcctggagggtggggccagcctgaggctgcacacagcgctgttcacgaaaggtgagcttcaggcctggggcagggaggaccacgggggccgggccaaggccaccaagcacaccggctcccaaccgcctgcccgcccccgacatctcccctcccagtgctggagaacgtggaggggctgccttctccaggcagccaggccgcggaggatttgcagcaggacatcaacgcgcagtccctggagaaagttcagcagtattaccgcaaactcagggcattttacctggagcggtctaacctgcccacggatgccagcaccacggcggtaaagatagaccagctgatccgccccatcaatgccctggatgagctctgccgcctcatgaagtcctttgtccacccaaagcctggtgctgctgggagtgtgggcgccggcctcatccccatctcctcggagctctgctaccgcctgggggcctgccagatggtcatgtgtggcacaggcatgcagaggagcaccctgagcgtgtccctggagcaggcggccatcttggcacggagccacgggttgctgcccaagtgcatcatgcaggccacggacatcatgcggaagcagggcccaagggtggagattctggccaaaaacctgcgagtcaaggaccagatgccccagggtgctccgcgcctctaccgcctctgccagccgccggtggatggggacctctgaacacccaaatgccccacgctgggccgcggcctctggagctgggatttgggaggacacagcaggcagcgctggccttctccagggatggcccaaggcttccgcagccgcccgttccgggacctgcccagcgtcctccctgcctccttccgggacaagcctggccaccctcgctgtgatgacgagctggctgattggccctgggccggcccattcttcacacgcctgccagaagctggaggggtgctggagacccatagagctgatgggagcagctggtgcctggccttcggctcctgcgtccccagaacccaagggaacgtcatggaggccacatggggccacccggctccctcgggatggctccgcctgcacttttgaaaccccggtttccttcaacgtccacattccaggtgaccacacgtgtctcctcctcctcatcttagcttccaggttcaccctaaccctgtactaacctgcttggtggacttggaaaagacttggctctgtcgggaaaggagagacggggcctccatcacgcctgttaccagaggatccccgagagccacaccagctctggacatcaccgcccctggaactggggccaccagccctgggcacgagatttgctctgactttatttatatggcatgaaatctctggtttattttgggattttttgttgttggtgttgtcaaagtttgttttttctaaagttgtgtgattatatatttgacattttacatttcaaagaaaggtatgttgtctaacaggggaccaacagaaggtagtattgacaactgttcctgcttctactaaaaaaaaaagagcacaaaagaaaaactaaattattgaaaaattaaaaaatgtcattgtttcctgtttgttaatattagggttgtaaggtgtcgttttgaggtatcgactgtgattccttcccccaccctccattctccagcggttggccggtgttagaactcgctctctttgagtgactggctacaagggcctgagaggtggccagccagggttggagctggaggggatggagccccacctgaggtgccgtgtcacacgggttagagggtcactgggaaacaccgggcggtggcttctgtgatttattttcttgatggtaacttctcagagcagggcgattgggacatcaccagccagagcacaggaagccaccctgcctgctggggaggagggacccacacaagccccctcggcagtttgtccccccagcttcggtatgccttcagggaaaggtcacagctggggaggaagcggggggacgcctgtcacccctggcaggtggtgagttcaggtgggggctccctgctgcccccaggcctgggagcttgaagccctcccggcatctggcatccgagcctcccgccctccagggtgcgcttccctctcttgccgcagcatacacgagggcaggcagtggccttgtcactgtatcttgcatcagagacaaaggaggacccgctttagccctgctgcgggaaatgggggagggcccagggccagcgcattgtgcactggtttactttaaaatgtacagattcttctcgttaaattcttgatagattttttattattattaaaagtcagtttataatacaaa

SEQ ID NO: 165176 - DNA, 362 bp, Homo sapiens
  Payload ID: 12524
  Gene Symbol: PREX1
  Gene Name: phosphatidylinositol-3,4,5-trisphosphate-dependent Rac exchange factor 1
  ENST ID: ENST00000620554
  CDS Start-End: 1-39
gaagatgggacaggtagcccctcccccagccttgcctgagccctgcctgagccctgcctgctccctggcactctctctgtttcatttaaatatatttttttcttttatcatgagatgtaatctacctacagaaaagtgcccagagcatagatgcatgaagcgaacatctgggtggttagcattcaagttaagaaataaaacactgcaccccaaatccttcctccttgcaatgccttcttccccctagaagtaaccactgtctgaattttgtgatgatcattttcttgctttttaaagacatttttacctcctaagcatttatgactaaacattttaattaaaatttctatttttgagcctta

SEQ ID NO: 165177 - DNA, 10750 bp, Homo sapiens
  Payload ID: 12525
  Gene Symbol: PREX2
  Gene Name: phosphatidylinositol-3,4,5-trisphosphate-dependent Rac exchange factor 2
  Uniprot ID: Q70Z35
  ENST ID: ENST00000288368
  CDS Start-End: 278-5098
gccagagcagcggggccgggcgcgcagggcctggccggagcccccactcccaggagtttcctctgcagagccccgcgccccccgcgccgggatttcagcccgatcccctcctctccctgcgcccagcctctccccagcatgtaaagtcttctgtctctcctcggagttggcggaggcggcaactttccattctcgccgccgggggccgggcagcagcgggcgcgcgggtcagcgctcagcacggcgggcagcgccgcgctgcgcaccgccgccgaccatgagcgaggacagccgcggagacagccgcgccgagagcgccaaggacctggagaagcagcttcgcctgcgcgtgtgcgtgctcagcgagctccagaagaccgagcgggactatgtgggcacgctggagttcctggtgtcggcattcttacacagaatgaaccagtgtgcagcatcaaaagttgacaaaaatgtgacagaagaaacagtgaagatgttgttctcaaacattgaagacatccttgcagtacataaagaattcttaaaagtcgtggaagaatgcttacaccccgaacctaatgctcaacaagaagtgggaacctgctttcttcactttaaagacaagtttcgtatctatgatgaatattgtagtaaccatgagaaggcacaaaaattacttcttgaactcaacaaaataagaacaatccggacatttcttttgaactgcatgctgcttggaggacggaagaacacagatgttcccttggaaggatatttagtaacaccaatacaaagaatatgcaagtaccctcttattttgaaggagttgctgaagcggactccacggaaacacagtgactatgcagcagtgatggaagccctccaagccatgaaagctgtctgttccaacataaacgaggccaagagacagatggagaagttagaagttttagaggaatggcagtctcacattgaaggctgggaggggtccaacatcactgacacctgcactgaaatgctaatgtgtggagtcttactgaaaatttcttctggaaatattcaagaacgggtgttttttcttttcgataatcttttggtgtactgcaaaagaaaacacagacggttgaagaacagcaaggcatctacagatggacatcggtacctttttcgtggccggatcaacacggaggtgatggaagtggagaatgtggatgatggcaccgctgatttccatagcagtggacacattgttgttaatggatggaagatacataacacagcaaaaaataaatggtttgtttgtatggcaaaaacacctgaagagaagcatgaatggtttgaagctattttgaaagaaagagaacggcggaaaggtttaaaattaggaatggagcaagatacctgggtcatgatctctgaacagggtgagaaactttataaaatgatgtgcagacaaggaaatctgatcaaagaccgaaagagaaaactgactacgttccctaaatgctttcttggaagcgaatttgtgtcatggctgttggaaattggagagattcacaggcctgaggaaggcgtgcacttgggacaagcattattagaaaatggaatcattcaccatgttactgataaacatcaattcaaaccagaacagatgttatatagatttcgctatgatgatggaacattttatccaagaaatgagatgcaggacgtgatttcaaagggtgtaagattatattgtcgtcttcatagcctttttactccagtgataagagataaagattaccatttaaggacctacaaatctgtggtcatggccaacaaactgatagactggttaattgcacagggagattgccgcaccagagaagaggcaatgatatttggcgttggactctgtgacaatggatttatgcaccatgtccttgaaaaaagcgaattcaaagatgaacccctacttttccgttttttttcggatgaggaaatggagggatcaaatatgaaacatcgacttatgaaacatgacttaaaagttgtggaaaatgttatagctaagtcattattgattaaatccaatgaaggcagctatggctttggattagaagacaaaaataaagttccaataataaagttggtagaaaagggatctaatgctgagatggctggcatggaagtcgggaaaaagatttttgctattaatggtgacctagtttttatgagacctttcaatgaagtggattgcttcctgaaatcgtgtttaaacagcagaaaacctctaagagttcttgtgagcacaaagccaagagagacagtgaaaattccagattcagctgatggacttggcttccagatccggggatttggcccttctgttgtgcatgctgtaggaagaggaactgtggctgcagcagctggtcttcaccctggacagtgcattatcaaggtgaatggaatcaatgtcagcaaagagacacatgccagtgtcattgcacacgttacagcctgcaggaagtacaggcggccaacgaagcaagattccatacaatgggtttataatagcattgagagtgctcaagaagaccttcaaaaatctcactccaagccccctggagatgaagcaggggatgcttttgactgtaaagtagaagaggttattgacaaattcaacactatggccatcattgatgggaagaaggagcatgtgagtctgacagtggacaatgtccacctggaatatggtgtcgtgtatgagtacgacagcacagctggcatcaagtgcaatgtggtggaaaagatgattgagcccaaaggtttcttcagcttaactgccaagattcttgaagccctggctaaaagtgatgagcattttgtacaaaactgtaccagcctaaattctctaaatgaagtgattcctactgaccttcagagtaaattcagtgccctttgcagtgaaagaattgaacacctatgtcagagaatatccagttataaaaagttttctcgtgtactgaagaatagggcctggcctacttttaaacaggccaaatctaaaatctccccactgcacagcagtgatttctgccctaccaactgccatgtcaatgtgatggaagtttcttatcccaaaacatcaacctctttgggaagtgcatttggtgttcagttggatagcaggaagcataattctcatgataaagaaaacaaatcttcggagcaagggaaactgagccctatggtgtacattcagcacaccatcacaaccatggcggccccttcaggtctgtctctgggacagcaggatggccatggtctcaggtatctgctaaaagaagaagacttagaaacccaagacatctatcagaaactgctgggcaaacttcagactgcactgaaagaggtggagatgtgtgtttgtcaaatagatgaccttctgtcttcaataacatattctcctaaattagaacgtaagacatcagagggcataataccaacagacagtgacaatgagaagggagaaagaaacagcaaacgggtatgttttaatgtagcaggagatgaacaggaagattctggtcatgacaccatcagcaacagagactcttacagtgactgcaacagcaataggaattccatcgcctccttcaccagcatctgcagcagccagtgcagctcgtatttccacagtgatgaaatggactcaggtgatgaacttcccttaagtgttcgcatatctcatgataaacaggacaagatacatagttgccttgagcatcttttcagccaggtggattcaattaccaatctcctaaaagggcaggctgttgtgagggcctttgaccaaaccaagtatctcactccaggccgaggattgcaagaatttcaacaggaaatggaaccaaagctgagttgtccaaaaaggctacggcttcatatcaagcaagatccttggaatcttcccagcagcgtccggactcttgctcagaacatcaggaaatttgttgaagaggtaaagtgtaggctactcctggctcttcttgaatattcagatagtgagacacagctccgtagagacatggttttctgccagactcttgtggccactgtctgtgccttctctgagcagctcatggcggccttgaaccagatgtttgacaacagcaaggaaaatgagatggaaacttgggaagccagcaggaggtggctggaccagatagcgaatgcaggtgttctttttcactttcagtcacttctgtcaccaaacttgacagatgaacaagccatgttagaagatacactggttgcactatttgatttggaaaaggtttccttttactttaaaccatcagaagaggaacctctggttgcaaatgttcctcttacatatcaagcagaaggaagtcggcaagctctgaaagtttacttctacattgatagttatcattttgaacaacttcctcaacggctgaaaaatggaggagggtttaaaattcatcctgttctttttgcacaagcactagagagcatggaaggatattattacagagacaatgtttctgtggaagaatttcaagctcagataaatgcagcctcactggaaaaggtcaaacagtacaaccagaagctcagggcattctacttggacaagtcaaattcaccaccaaactccacatccaaagctgcctatgtagataagctaatgaggcctctcaacgctttggatgaactttaccgactggtagcctcgtttatcagatccaagcgcacagctgcctgtgcaaacacagcttgcagtgcttctggggttggactgctgtcagtttcctcggagctgtgcaacaggctgggcgcctgccacatcatcatgtgcagcagcggtgtgcatcggtgcaccctgagcgtgacgctggagcaagccatcattctggccagaagccacggactgccacctcgttacatcatgcaggctacagatgtgatgcggaagcagggagcaagagttcagaacacagcgaagaatttgggagtcagagaccggactccacagtctgcaccaaggctgtacaagctgtgcgagccacctcccccagctggagaagaatgaaaagaactcccaagaaaccaggcaggcagaagctcctgaatgctggactagacaaactacatgctggctaaacattctccactgaagatacatcaatgcttttttttttttttttttctgtaaatctttcttcccattgcaaacaagtagtgatcagtttatactttgatatttatgctggaaatggatagaagttcaatcagacagttcagcttcacgaactgatgtctctctgtattgacattaagtattcacttttagagtaaaatccatccctgggacataaagaaaaaaatattagagatttaaaaattaaccaccatgcctcctctcccattcattaaaatggttttattatgcttgttttcatctttcccaagtggacacatgtaataatggagagttcctcttgaagaaggccattattgaagaaacctggcgacatcttgcaaatcatcatgagaaatgttaaggacaatatagactgtgtgctatacattttcagtcccccatttgcaagagagaaagtcattaatgtgtaaaaggtggaaaagcatgctttactctttctcctaagggcttatttcttattagaggagaagaaagctgactaaggcctccagcaggactcactttcttctagctgcctttgggcatcctttattcttgtggacagctctagcaaatcaatgctatttttggtgtctgcaatgggcatggcttccttgggccatgaatactgggtgctgtgccataatggccctggggatcagggaagtgccctggggatcagggaggggaaccaggatgaagaaggggactgtaagcctattttaaaactaaacctttaagttagatacctaaaactcttaattttatgaaggctctcatatgagaggtcagactcttcaaagaatacaccatcatgagaatttttctgttaagatatatgtataagatatgaaaataaggctttatttgtactttaaaaggaccattaggggacttgtaatttatggatgcacaaggtgtattctatccttattctaaagtatatgtaatgtttatcatttctacattgatgcaataacattgtttttagcatagtaaatacagtaatatttattttaaatccataattttcaaacaaaacactcatgattgtgataattatatgggtttacactaatttagtatgtgaaatgcttttcatatctaaattatgtgcaaactattattaattttttttttattttttgaaactgagtctcactctgttacccagactggagtgcggtggtgcaatcttggctcactgcaacctccacctcctgggttcaagccattctcttgcctcagcctcccaggagctgggactacaggtgtgcaccaccatgctcagctaatttttgtatttttagtagagacgtgttttcaccatgttggccaggctggtcttgaactcctgacatcaagtgatccacccacctcagcctcccaaagtgctaggattacaggcgtgagccgctgctcccggcccattattaaattttaatttatgaaatttgatcatggttttcaaactattattaaaacctttatcattaaccattatgtattgaataacaaaaataccatgttacatgtgtaggcaatatgtgtatactactaggtaaggtaataataattgttatttggcacagaagctctagagacttttgtgagaagtccatatacaatgaaaaacaaggaacctaacatcagagttttcaagaaaaagttgaacattttgaatttaataaagatatctttacaaaaataaccttcaaggatttaacatttgtaggactaataaaggaacacagctgattagctagcaagtcctttcatattgtcatgactgttttctcatcaccatcctggaagcagtaatcctcattagaggcatgcaagggtcattaaaatgatttcagttgtactttgccatatttcatggggcaaattatcagctatattgtggtatttataagctaacatattttatatttttaaggatctactttcttcataatagaatgtgcttcatattatttttagggttaaacataagtgtgtcgtctatcatgcttggtacttactaaatgctcaaaaattagtaatggtttatattaacatcagtcactctaacttctgatcgtaataaaaattgtagctaacacttattaagggattactacatgcccagtaatacctccaaatgctttgcctgtattctgttgttattgcttcacttaatcctcataataatgacgtgacatggtactctttttatcgcgcccatttttagagttgaggaaccaaagcaaagaataacccagtgacttgcacaaagtcacatgattgacaaggggtagaaccaaaatttgaacccaggaagtctgccttcttaatgcattatgctacttttccttatcaatataagaactattgtaatattacgatgatttgtaagtaaatttggagttatgcggcatgtgttgtcattaaattatacatcttgtattaaaaaacggtgaatggaaatatgtaaatgctttaattatatgaaaattatagtgtttcctggacattttacaactctggatgcacattttgaggtaactcaacagtgttgcaatctgaaaaactattttgtatcatgttcctcctcatcaaaaataacagttttagatagtacatctcatacaactttattataattccaacacagtggtaagagtaaaaaacatacctaatggatgaatgaataatgacaattttttcaatgccatatgtacctccatgtgacattgggcattaaatggccttgaggttttaggatgtgtttaccttaatgctacatgctcctctataaccagtgcaccttcaaatactgctaaaacctgctaacttcttccaggttctgagcatggacaactcccaccgccccccaacctaaaagggaaggtcatgcatagaaagtttggattttaacttagagcctgactcaaaaataattgtgaactaaaaattcatagtcaatactttttaagcattctattatctcctataattttttctaatattaattccaaatattacaaaatttaatgtgatattaaagtatgaaaaatttgagaagattagaattttacatgtatttccattcctatttaaagagagaaaatggggagataatttctgtgctagttttacttatattggatatataatattgaatttatagtataagctttattttatcagttcgcaaatctgaagtctcatactgttttctgtctctttaaaacacattcttctggtggcttgggttcattgtgcattcattggccactcttcttgcagcaaattttaaatcaatttaaaattaggtaaactttttatgatactataatatatatgacgttgaaatgacattggttctgagtctattaatttaaattttgggatcattacattcagaatgaaatgaaattgaccttgatactaactttgagagccaaaaaaatgaatgggtaaacaaagcctaagggtcatgttaattaatttaacaaaacacactattttcagtcctttgggcttgtacattttatagacaaaattagcatttattgatttggaagtgttcaattgagagtaaatgactctgtgttttgaaactaatacctttgcatttaaaatactgaagtattattttgttagttgaagtagatcttttcctgtgtagcatgatttaatgcagagcagttattcacttatacttctgaaaagccataatattgaaatttaaaatgaatagtcttactttaaggtcacttttactttacattttactttaaaggtcgtttttagactttatgcactagtggtattgaaactaacctttaatatttgactaaattgcttgtgaatttttggaaactatgtttaatttttaaagacattgttatgtgaattatcttactaaattatcacttaagaactctctcatagcagtaatttcattaacacatatatatactaaccaatttgctaaatgaattgtcggttgtcctgcttaagtactagggccaagctttgaaatgacttaaagtgatctgaattttgattgagaaaaataatctgtcttctatcgaatgtttgaacttttagtgatgagcctcagcaaagtttcaccctgcatgaagcagaacaggtgggggaaaattacaagaggggtctgtaccaaaaatggccccaggatattccattgaacaaatattgaccattatcttcctaggtgctacaactccatactagtcattacagttagtctttggtttcacaaaaatgttactgcttcaaaggcttggcattaacagtgatgtcagcattcatactgccaacagtctgctggtcatacatggaagactgttaaagtgtggtctgtgcatcattgagcaattgttatgtagacacaaggcctgcttcactcaggatagcttgctcctctcgctgagaagagatacctgaagtctactaagtctactaaatgagatatatatgtgtatgtatatgcctatatatattattatatttactagtgtttgtgataatgttataaaaattaataagattgttttgttttgtatgaatgtacgacaaatcgagttgttcaatgtattgaatgaatgtcttactgtaagcatcagagctgtccaaccatgtgtaaatgtacctggtcttttgatcactgacactactttgctgttcaatctggaatcaactgacctggctctgccattgagaaataactaatttagaacaaaattgttaaattttaaaattgcatttctactagaaatagctttggagagttaattttaggtgcgaataacaggataaatgctatctgatcaagcattcatccgaaaaatgtttttgagaattcactttgtgcaaggcacagctgttggggctggtatatgtgtggacatgtttgatttgaaaaccttcgtggtgtctctgtgtgttattgatcatctgtgtcttttgcttaaaatggcattatttgtaacacaaacctaatatcatatatacaaatatactgtatgtagccaagaacactaaattggtaagacgctttagaaaatatgcatttgaatttgaatatctaatgcctcaagcaaatttattagagtttcagatgaatatatatttttgtaactggcaagtaaatgagtagaacagagctttttgcctaaaaatatttttataagtactcatttacatagtattcattattttaaatgacaaaatatcaaattggttctataaatagtaattgttttgaatatatccatacttaacatcatatgaaatccaaaatttaatgataaatttcatctggatgtgttattataaaagtcatctttttttcctttgtaaaatatccatgtaacatagcttccattactccatattttatgtatggttaaaattatcaaagtgcattatgtattttatattgtttatttttgtctgcatgaaagattggaatagtaaccgtgtatgataaatgttaataataataaagtgaaatgtagtatgacc

SEQ ID NO: 165178 - DNA, 9093 bp, Homo sapiens
  Payload ID: 12526
  Gene Symbol: PIK3CA
  Gene Name: phosphatidylinositol-4,5-bisphosphate 3-kinase, catalytic subunit alpha
  Uniprot ID: P42336
  ENST ID: ENST00000263967
  CDS Start-End: 158-3364
tctccctcggcgccgccgccgccgcccgcggggctgggacccgatgcggttagagccgcggagcctggaagagccccgagcgtttctgctttgggacaaccatacatctaattccttaaagtagttttatatgtaaaacttgcaaagaatcagaacaatgcctccacgaccatcatcaggtgaactgtggggcatccacttgatgcccccaagaatcctagtagaatgtttactaccaaatggaatgatagtgactttagaatgcctccgtgaggctacattaataaccataaagcatgaactatttaaagaagcaagaaaataccccctccatcaacttcttcaagatgaatcttcttacattttcgtaagtgttactcaagaagcagaaagggaagaattttttgatgaaacaagacgactttgtgaccttcggctttttcaaccctttttaaaagtaattgaaccagtaggcaaccgtgaagaaaagatcctcaatcgagaaattggttttgctatcggcatgccagtgtgtgaatttgatatggttaaagatccagaagtacaggacttccgaagaaatattctgaacgtttgtaaagaagctgtggatcttagggacctcaattcacctcatagtagagcaatgtatgtctatcctccaaatgtagaatcttcaccagaattgccaaagcacatatataataaattagataaagggcaaataatagtggtgatctgggtaatagtttctccaaataatgacaagcagaagtatactctgaaaatcaaccatgactgtgtaccagaacaagtaattgctgaagcaatcaggaaaaaaactcgaagtatgttgctatcctctgaacaactaaaactctgtgttttagaatatcagggcaagtatattttaaaagtgtgtggatgtgatgaatacttcctagaaaaatatcctctgagtcagtataagtatataagaagctgtataatgcttgggaggatgcccaatttgatgttgatggctaaagaaagcctttattctcaactgccaatggactgttttacaatgccatcttattccagacgcatttccacagctacaccatatatgaatggagaaacatctacaaaatccctttgggttataaatagtgcactcagaataaaaattctttgtgcaacctacgtgaatgtaaatattcgagacattgataagatctatgttcgaacaggtatctaccatggaggagaacccttatgtgacaatgtgaacactcaaagagtaccttgttccaatcccaggtggaatgaatggctgaattatgatatatacattcctgatcttcctcgtgctgctcgactttgcctttccatttgctctgttaaaggccgaaagggtgctaaagaggaacactgtccattggcatggggaaatataaacttgtttgattacacagacactctagtatctggaaaaatggctttgaatctttggccagtacctcatggattagaagatttgctgaaccctattggtgttactggatcaaatccaaataaagaaactccatgcttagagttggagtttgactggttcagcagtgtggtaaagttcccagatatgtcagtgattgaagagcatgccaattggtctgtatcccgagaagcaggatttagctattcccacgcaggactgagtaacagactagctagagacaatgaattaagggaaaatgacaaagaacagctcaaagcaatttctacacgagatcctctctctgaaatcactgagcaggagaaagattttctatggagtcacagacactattgtgtaactatccccgaaattctacccaaattgcttctgtctgttaaatggaattctagagatgaagtagcccagatgtattgcttggtaaaagattggcctccaatcaaacctgaacaggctatggaacttctggactgtaattacccagatcctatggttcgaggttttgctgttcggtgcttggaaaaatatttaacagatgacaaactttctcagtatttaattcagctagtacaggtcctaaaatatgaacaatatttggataacttgcttgtgagatttttactgaagaaagcattgactaatcaaaggattgggcactttttcttttggcatttaaaatctgagatgcacaataaaacagttagccagaggtttggcctgcttttggagtcctattgtcgtgcatgtgggatgtatttgaagcacctgaataggcaagtcgaggcaatggaaaagctcattaacttaactgacattctcaaacaggagaagaaggatgaaacacaaaaggtacagatgaagtttttagttgagcaaatgaggcgaccagatttcatggatgctctacagggctttctgtctcctctaaaccctgctcatcaactaggaaacctcaggcttgaagagtgtcgaattatgtcctctgcaaaaaggccactgtggttgaattgggagaacccagacatcatgtcagagttactgtttcagaacaatgagatcatctttaaaaatggggatgatttacggcaagatatgctaacacttcaaattattcgtattatggaaaatatctggcaaaatcaaggtcttgatcttcgaatgttaccttatggttgtctgtcaatcggtgactgtgtgggacttattgaggtggtgcgaaattctcacactattatgcaaattcagtgcaaaggcggcttgaaaggtgcactgcagttcaacagccacacactacatcagtggctcaaagacaagaacaaaggagaaatatatgatgcagccattgacctgtttacacgttcatgtgctggatactgtgtagctaccttcattttgggaattggagatcgtcacaatagtaacatcatggtgaaagacgatggacaactgtttcatatagattttggacactttttggatcacaagaagaaaaaatttggttataaacgagaacgtgtgccatttgttttgacacaggatttcttaatagtgattagtaaaggagcccaagaatgcacaaagacaagagaatttgagaggtttcaggagatgtgttacaaggcttatctagctattcgacagcatgccaatctcttcataaatcttttctcaatgatgcttggctctggaatgccagaactacaatcttttgatgacattgcatacattcgaaagaccctagccttagataaaactgagcaagaggctttggagtatttcatgaaacaaatgaatgatgcacatcatggtggctggacaacaaaaatggattggatcttccacacaattaaacagcatgcattgaactgaaaagataactgagaaaatgaaagctcactctggattccacactgcactgttaataactctcagcaggcaaagaccgattgcataggaattgcacaatccatgaacagcattagaatttacagcaagaacagaaataaaatactatataatttaaataatgtaaacgcaaacagggtttgatagcacttaaactagttcatttcaaaattaagctttagaataatgcgcaatttcatgttatgccttaagtccaaaaaggtaaactttgaagattgtttgtatctttttttaaaaaacaaaacaaaacaaaaatccccaaaatatatagaaatgatggagaaggaaaaagtgatggttttttttgtcttgcaaatgttctatgttttgaaatgtggacacaacaaaggctgttattgcattaggtgtaagtaaactggagtttatgttaaattacattgattggaaaagaatgaaaatttcttatttttccattgctgttcaatttatagtttgaagtgggtttttgactgcttgtttaatgaagaaaaatgcttggggtggaagggactcttgagatttcaccagagactttttctttttaataaatcaaaccttttgatgatttgaggttttatctgcagttttggaagcagtcacaaatgagacctgttataaggtggtatttttttttttcttctggacagtatttaaaggatcttattcttatttcccagggaaattctgggctcccacaaagtaaaaaaaaaaaaaaatcatagaaaaagaatgagcaggaatagttcttattccagaattgtacagtattcaccttaagttgattttttttctccttctgcaattgaactgaatacatttttcatgcatgttttccagaaaatagaagtattaatgttattaaaaagattattttttttattaaaggctatttatattatagaaactatcattaatatatattctttatttacatgatctgtcccatagtcatgcattgttttgcaccccaaattttttattgttcatagcagcatggtcagctttcttcttgatctatagatgaggctcaggcactatcccatttataccaataaccagtgtataactacttaaggaaaacataaaaacttcatcttctttccttttatttcttatgtgaatctcccgtcttccattctcttttataattgagaatgtctcaatcatatgaaattagttaccagaattaacacaatttagactatcttcctgattccttaaacccctttactgaagtatactcatgaataatactttaaaatatgggggaatagaaaccatgaactttttacctttttaaactatttatccatatctccaaagtagaacattaaaccattttaagatatgtctcattcccaagtagtcagagctcactctccaactttattaaatactatttgagcacaggacacattcttaaacattttgaaaaacattaacccaagatgtagaggctactgctagtcgtcattctagaatctgatattttactctgtatttgaaatgaatgattaatgtcctaggaaattagctttagcagatgtccaggtgccacatcaaaaaagtgcaataattattgacagttttttagattaggcatattattggaaaacaactttataaagagtgaacattgtatactctagtaaaacagcatcactttaaaaatattcatttatgaaatctgttacctatagttgaagtcttgagtagtgaacaagggactctaataccaatactcttaatatctggctattttagatcccttaaagggcataattattggaaatttaggtatttcactaaagcatgtatataatattgccaacaagaaaagtaaatttgaagattaagggaacttacttctgcaaactgtcttgcgatagttaagcagaatttaaactctgttttaagcaggaaaccagaaagattattttgcagttgtagaagatttcataacttattaaaacttattaacattttgtgttgtttagatataggcagttgatacatactaacatcccagccttttcaatatcagggttaaattataggaaaactcagtaaaatggtacaaatctgaaagtttgatggtagaaactgaagatttaacagagaactgtgttttacccgagtgccaaaaatgctgtgagcctccttgcacaaaatttataccacttttgcatttttatctatcagtccagatagttgtctcccctccttctcccaggacctctccaccattaaaatgcacaaaccacatggccgatttcaccatttacatttattttcaaaagttactacaaccaaattaattctattagaagaaatgtagacaaattctataaagactatagattgtgacctaagaaagaaatgaggcaaagaaccaaacattgaattaaatgctacatgggtgactaagatctgtttcaagtcagtgataatatagccacttctgggtacttcagtatcagagatcagttctcgtggtttagacagttcctatctatagctgactatccttgtccttgaatatggtgtaactgactattggctctacagttttattgggccacttaagaaatatttccttgaataattattttgagaaaaagtctaaaagtaataaaaataattttaaacacactgtagtaagaaatgactgttggaaaattatgctttcactttctaccatattctcagctatacaaaaccatttattttgaagatttttagactactgttaatttgaaatctgttactcttattgtggaatttgtttttttaaaaaagatgtttctaattggatttttaaaagaagaatggaatttggttgctattttacaatagaacctaagctttttgtggttcttagtgtcctatgtaaaacttagtgtcaaagtaatcaactttgagattttcccttctattctgctttatattaaaagcccattagaaaatgggaacctggtgaatatataatgaattgtaaaatattttaatgtgtaactttttcaactgtgaaactgacttgattttttgatgaaaacagctgctgataaagtattttgtgtaaagtgtagttcttattaatcaggaaaatgatgacttgattagactgtatatgccctcttggattttattttaaatggattggtgactttcacataggtaaaacacagtccatctgtattcttttttccatcaaaaatcgagtgatttggaattataaaaaaattgtgagcagcctatttgaaaggcatcatggaaatttcacagcacaataacacggatttgttttttcttaatgatgtaaatccgtttaattcatactttgatcaatagcccatgcttgccaactctgaagaaatttaatttccagcagtattttaaagctagcctgttaactttttctgaatatttaaagttcctcttttttctatgtctgcacaaactgcagacctgggctggacccacatactcaagagtccaccttaagaaattattttgatgtccaagacatcactaaaatatttaagtttaaagataatatgtggtgttaatagattgtggtgcttttactatttaaagacaactttcatacttcagatgtttttgagaagaggggaatgtgaggggagggggcagaacagggaggagttgtttgaatgaattacattctttatatccatcctgctcatttggggcatgtctttaagagaaggctgaaagttgtgagagtatattgtataccgtaagagaatcaactcttcatcatggatgggattgtgaaggctgaactataaaattcagcattgacagcatcctcaattaataattcttggtgacagaataatacagctgggctgttttttaaaatataaacaataccatttttaattattacattaaaaattgtaaatatatctatgtgccatggcctgggaagcctgctttcttttttcataaaaattatttttactgtatgaaaagatcatggggtttagctcaaaatatctgtggtcctgataaaattggattggtaactctacctcagaaggaaaatgggaaaaaaaaatagatgagtcacaattcaatacttcaagctcagaaactgtgcagatcactgaattttagatttataaagtcagagttggcatgccttgtttttaatgatatggaagaccttaagaaaaaaacttggctgaagtttaatcgttggtccagccatttgaaaaaggcaatagtttgaggaggttcccgaattcggcatttgaaattcattttgttctctcttcttcattattagtgcatttggtgtgtgtatacttgcacacaattctgtttgtgtacacactgcttgcttagccctagtcaagaggcatcttttataaaaggtgtaaagaaatatcaaggttctaaaattcggaagagtttagaatttattaggagtttcccaagttgggatgttagtctttaaataaacttcatgcacctattccacttaaggttttgcacctcctttttattagtgcagtgccatttcttctgcttgattttaggtatgttaatattccagccttgctagttagcataaagtgacaggtgtgagccatgaggaaattttctgacttaatttgtacacaactacatataagagttttagtggaggaaaaaaattagtcccttgtgcgtatacagtagttaggtaaatgatttttctaccaacagtatactccattcctcatgtaggtaagtacagaaaaggtttttaaatgtatttttttagccagttaaagtctatgaatctatctgcaaccttatttaatctgtcactataataattttgtggttatgctaagaaccatgtatacttttaggtattcttatttttgtcaatttttctaggttggcaaggaggcagaaaaccttcattgtttcatattaaaatataattagactaaacttaattctagtatgaatttccaaaatcattatctatttatttcatttttatttaattttgtttttatttcatttttaaaagtcccttgttcaatttaacttatgttcctaagagaggttggagaacttggccttcatctgatttcaaaaatgttttgagtttcaaatgaagttaatggtttcagtgtgattcagtcctcagacctaattgggttgaataaaatctaaaagaatatacccttttggagcataacattttaataccttggggaatgtggcactaccaaaagaagactactaacacgtcagatgttcacctggaagctttatcaagaaattcgaaccacccttttggccccattaattgtagcaagtttatttctctatattttgtcattcagtgaattgaagtcctgtggtatactgcattcattagaagaaaaacgtttttaatgtccttttaatgatggcccagaaagcatttgacacagcaagatgcatgtgttactatattgagaatatagaataataacagtatcactaaatttaagacctcttcccagtcttgctgttcctagcaagaagtttggcctgtgactgcacttactgtttatgctcatcagaaactgtcaatgtctgcttttctttaactctgcagtctgtaacatcacgctgtttattaaaaaaaaaaagaaaaatta

SEQ ID NO: 165179 - DNA, 620 bp, Homo sapiens
  Payload ID: 12526
  Gene Symbol: PIK3CA
  Gene Name: phosphatidylinositol-4,5-bisphosphate 3-kinase, catalytic subunit alpha
  ENST ID: ENST00000468036
  CDS Start-End: 267-620
ggagcgcaacaagagggtctttctagaaaacagtctgcatattctttaatgaattagagttgtgatttcatcttggtgaagcttcctcattccagcactgcgcctttgtgcacatgcaggacctgggttttcggaacgatgttttgaatcatagtttgtgtggccggggagaaccccttagaatacttgggtttctgctttgggacaaccatacatctaattccttaaagtagttttatatgtaaaacttgcaaagaatcagaacaatgcctccacgaccatcatcaggtgaactgtggggcatccacttgatgcccccaagaatcctagtagaatgtttactaccaaatggaatgatagtgactttagaatgcctccgtgaggctacattaataaccataaagcatgaactatttaaagaagcaagaaaataccccctccatcaacttcttcaagatgaatcttcttacattttcgtaagtgttactcaagaagcagaaagggaagaattttttgatgaaacaagacgactttgtgaccttcggctttttcaaccctttttaaaagtaattgaaccagtaggcaaccgtgaagaaaagatcctcaatcgagaaattggt

SEQ ID NO: 165180 - DNA, 245 bp, Homo sapiens
  Payload ID: 12526
  Gene Symbol: PIK3CA
  Gene Name: phosphatidylinositol-4,5-bisphosphate 3-kinase, catalytic subunit alpha
  ENST ID: ENST00000477735
  CDS Start-End: 183-245
ttccgggggattgtaggctctgcccctcctcagctcttaccctcttctgccggaggagggggggggccgagggggtggggaagagttcgttgtttgtttacacgatgtttctgctttgggacaaccatacatctaattccttaaagtagttttatatgtaaaacttgcaaagaatcagaacaatgcctccacgaccatcatcaggtgaactgtggggcatccacttgatgcccccaagaatccta

SEQ ID NO: 165181 - DNA, 5919 bp, Homo sapiens
  Payload ID: 12527
  Gene Symbol: PIK3CB
  Gene Name: phosphatidylinositol-4,5-bisphosphate 3-kinase, catalytic subunit beta
  Uniprot ID: P42338
  ENST ID: ENST00000289153
  CDS Start-End: 17-3229
ggccccgtggttatgaatgtgcttcagtttcataatgcctcctgctatggcagacatccttgacatctgggcggtggattcacagatagcatctgatggctccatacctgtggatttccttttgcccactgggatttatatccagttggaggtacctcgggaagctaccatttcttatattaagcagatgttatggaagcaagttcacaattacccaatgttcaacctccttatggatattgactcctatatgtttgcatgtgtgaatcagactgctgtatatgaggagcttgaagatgaaacacgaagactctgtgatgtcagaccttttcttccagttctcaaattagtgacaagaagttgtgacccaggggaaaaattagactcaaaaattggagtccttataggaaaaggtctgcatgaatttgattccttgaaggatcctgaagtaaatgaatttcgaagaaaaatgcgcaaattcagcgaggaaaaaatcctgtcacttgtgggattgtcttggatggactggctaaaacaaacatatccaccagagcatgaaccatccatccctgaaaacttagaagataaactttatgggggaaagctcatcgtagctgttcattttgaaaactgccaggacgtgtttagctttcaagtgtctcctaatatgaatcctatcaaagtaaatgaattggcaatccaaaaacgtttgactattcatgggaaggaagatgaagttagcccctatgattatgtgttgcaagtcagcgggagagtagaatatgtttttggtgatcatccactaattcagttccagtatatccggaactgtgtgatgaacagagccctgccccattttatacttgtggaatgctgcaagatcaagaaaatgtatgaacaagaaatgattgccatagaggctgccataaatcgaaattcatctaatcttcctcttccattaccaccaaagaaaacacgaattatttctcatgtttgggaaaataacaaccctttccaaattgtcttggttaagggaaataaacttaacacagaggaaactgtaaaagttcatgtcagggctggtctttttcatggtactgagctcctgtgtaaaaccatcgtaagctcagaggtatcagggaaaaatgatcatatttggaatgaaccactggaatttgatattaatatttgtgacttaccaagaatggctcgattatgttttgctgtttatgcagttttggataaagtaaaaacgaagaaatcaacgaaaactattaatccctctaaatatcagaccatcaggaaagctggaaaagtgcattatcctgtagcgtgggtaaatacgatggtttttgactttaaaggacaattgagaactggagacataatattacacagctggtcttcatttcctgatgaactcgaagaaatgttgaatccaatgggaactgttcaaacaaatccatatactgaaaatgcaacagctttgcatgttaaatttccagagaataaaaaacaaccttattattaccctcccttcgataagattattgaaaaggcagctgagattgcaagcagtgatagtgctaatgtgtcaagtcgaggtggaaaaaagtttcttcctgtattgaaagaaatcttggacagggatcccttgtctcaactgtgtgaaaatgaaatggatcttatttggactttgcgacaagactgccgagagattttcccacaatcactgccaaaattactgctgtcaatcaagtggaataaacttgaggatgttgctcagcttcaggcgctgcttcagatttggcctaaactgcccccccgggaggccctagagcttctggatttcaactatccagaccagtacgttcgagaatatgctgtaggctgcctgcgacagatgagtgatgaagaactttctcaatatcttttacaactggtgcaagtgttaaaatatgagccttttcttgattgtgccctctctagattcctattagaaagagcacttggtaatcggaggatagggcagtttctattttggcatcttaggtcagaagtgcacattcctgctgtctcagtacaatttggtgtcatccttgaagcatactgccggggaagtgtggggcacatgaaagtgctttctaagcaggttgaagcactcaataagttaaaaactttaaatagtttaatcaaactgaatgccgtgaagttaaacagagccaaagggaaggaggccatgcatacctgtttaaaacagagtgcttaccgggaagccctctctgacctgcagtcacccctgaacccatgtgttatcctctcagaactctatgttgaaaagtgcaaatacatggattccaaaatgaagcctttgtggctggtatacaataacaaggtatttggtgaggattcagttggagtgatttttaaaaatggtgatgatttacgacaggatatgttgacactccaaatgttgcgcttgatggatttactctggaaagaagctggtttggatcttcggatgttgccttatggctgtttagcaacaggagatcgctctggcctcattgaagttgtgagcacctctgaaacaattgctgacattcagctgaacagtagcaatgtggctgctgcagcagccttcaacaaagatgcccttctgaactggcttaaagaatacaactctggggatgacctggaccgagccattgaggaatttacactgtcctgtgctggctactgtgtagcttcttatgtccttgggattggtgacagacatagtgacaacatcatggtcaaaaaaactggccagctcttccacattgactttggacatattcttggaaatttcaaatctaagtttggcattaaaagggagcgagtgccttttattcttacctatgatttcatccatgtcattcaacaaggaaaaacaggaaatacagaaaagtttggccggttccgccagtgttgtgaggatgcatatctgattttacgacggcatgggaatctcttcatcactctctttgcgctgatgttgactgcagggcttcctgaactcacatcagtcaaagatatacagtatcttaaggactctcttgcattagggaagagtgaagaagaagcactcaaacagtttaagcaaaaatttgatgaggcgctcagggaaagctggactactaaagtgaactggatggcccacacagttcggaaagactacagatcttaacgatcagccttcgctcctaatgtatttgttggtttcatttcattttcattttgcacttgcactaaattgaacatgaccctgttagagatgttataaagggaatgaaatcctggaactcagagttaaattaagaacaaggcatcccacagaacctaatctgaacaatccccgatgattccctctgctttttgaatgcttccaagacttatcatgaaaactgtcaatggataatcatttcctgctgactttgcacgccaaggaatgctactagggattgtttccgtttttgtttgttttttctaatatttggtacttcccagaatggtgtaaatacttcttttcaatgttgtgaccaagtattgtcactcagccaacaacttttccacacctgggggttggtggctgttcttactgtccaaatgaagctaaaaagaaaggcatctttcttcccttttaaaattgtgtaaactgcaaattataatataatttgaatttatgattattttccagaagaaatcttgtaaacctgtggatactcattaattcttttgttaatatttatttccatgatagcatcattccagccagacttgctgaaaatctactggtgaggcaaatataatatatataaatatgctacatatatatttataaaatttctagtgggagttctatataaatgtttctttggtattcttcagcctgtgatttaaagttttacaaaaagcagagctttttcctaagttacttttcagttaggtaactgtgtgatccagttcttccagctgcttctataatgaggcacatattaatacagtttttatatggtatctatgaaagagttcacttcatagagaataatacttgagcaaatgtatccaagaaagcaagcaaatgaaaagaaacctatttatggaataaactccagatctgaaattcagtattttagaaaaatgccagctcttcttactgtatttattaaaacttgtaataatgtgatttttttcaaggatattagttcaaattgaaatggtttcacgccacacggaaatctttaagttatttgttgaggtaccatatatttagggtgctaggggcaagtaatgttaatatgtgcaataggaactactggtttgaatgtgtaaatgggtgatctctctgagtcctggcaacatccagcaaaactactgcttattctccaaagaatattgggagctctcaatcctcggtgatatgggaaagagaactgagtatttgccctatgactgagctttctataggaattttattaaagaatgtttaattttgttgtccttcttaatgttctcagtcaaataaatgagtgagctggtttcggctgctcttggaatgggtgagcctcttctttatgggtagactgggcctttggaacttggcactggaactccaagaaatggccaagtcagtagacaaaccaacctcaggaataggctaaggcttattatggcctcttccctgacttctccccttgtttcccagcctcatcaggcatggtataggaggccccctggactttggtgggagcctgaggtaaggagccatgcatatgggaggtgtcctgaagtctgggtagttacttggcactgagccaaggccagactctgctgctttggagctcttgttcatggggcagatgctggagcagtccagttccttggaaataactcagctgaggatgggagttggcccctgaattcctcatttccagggctggtgtagactcactgagacttccaggaatagaactatggaaggacaggtttgttcagagatctttgtctagtagccacccaccatttcatgaaccaggccgcaggtcagtggtttggagaatggtgaacactgccaggaagaaatggataccattctttccagaggggtctcctcagccaaaaggagggccttgataaatacatgccaaatcagtgaagttcaagtcaactgtttttcccatatgggcaccaaattgtatctttcctgttttctttgaagggttaagtaacgtgaccatagtcacagagtagttgatggagccagtattcaaacccagaaagtaagaagcctattttaattatctgtgctctttactcacaatgcctcagtatacatttcagatttattgggttccacaaatagaaatctatggaaattttgaatcaaattgcattaagctatagacaaggttgagacaaattgacatctccagaatattgagttttccaaaatatgtaagtggagtacccatttatttagattatctttcatttatatccgcaatgatttatagtattctgtgtttacatattatgcatcgtttgttagattcctgggtaagtgactttattgtaagtttcattgttgttaatctatagcaatcattctccaagtgtggtcccctgatgaggagcatcagcatcaccagagagaactggttaaaaatgcaaattcttaatttttaatttttgtgagtacatagtagatatatatatggggtacatggaatattttgatacaggcatataacatgtaattatcgcatcagggtaattggggtatccattacctcaagcatttatcctttgtattagaaacaatccagttatactcttttagttattttaagatctataattaaattatcgactatagtt

SEQ ID NO: 165182 - DNA, 690 bp, Homo sapiens
  Payload ID: 12527
  Gene Symbol: PIK3CB
  Gene Name: phosphatidylinositol-4,5-bisphosphate 3-kinase, catalytic subunit beta
  ENST ID: ENST00000465581
  CDS Start-End: 522-690
tgtattttttagtagagatggggtttcactgtgttagccaggatggtcacgatctcctgacctcgtgatccgtccacctcagccccccagagtgctgggattacaggcatgagccactgtgcccggccaaaaaaaatctctttttaaatatctcctatgattttggttgaatttgttcacctatagaacaaatttatgttgttttctgcttatcattagatgtaaaggagtaaagtccagtgggttctgctggcacattggtggggaagctgagaacttttaaactctttcccctttctccagtgaacaatcgacaggatatgggttatagttacagttaaagggtttattgaactaattgtcactgctgaagttcctgtgccctctgatagcttccttgaaaagttttcatagtttaaaaactctgcttgtccttagcctttgatctcttgctttgatgctcaaacagaagaatgatacaagactgaggatcttgccaggcaagggccccgtggttatgaatgtgcttcagtttcataatgcctcctgctatggcagacatccttgacatctgggcggtggattcacagatagcatctgatggctccatacctgtggatttccttttgcccactgggatttatatccagttggaggtacctcgggaagctaccatttcttatattaagc

SEQ ID NO: 165183 - DNA, 2347 bp, Homo sapiens
  Payload ID: 12527
  Gene Symbol: PIK3CB
  Gene Name: phosphatidylinositol-4,5-bisphosphate 3-kinase, catalytic subunit beta
  ENST ID: ENST00000493568
  CDS Start-End: 1-2108
atgtcagggctggtctttttcatggtactgagctcctgtgtaaaaccatcgtaagctcagaggtatcagggaaaaatgatcatatttggaatgaaccactggaatttgatattaatatttgtgacttaccaagaatggctcgattatgttttgctgtttatgcagttttggataaagtaaaaacgaagaaatcaacgaaaactattaatccctctaaatatcagaccatcaggaaagctggaaaagtgcattatcctgtagcgtgggtaaatacgatggtttttgactttaaaggacaattgagaactggagacataatattacacagctggtcttcatttcctgatgaactcgaagaaatgttgaatccaatgggaactgttcaaacaaatccatatactgaaaatgcaacagctttgcatgttaaatttccagagaataaaaaacaaccttattattaccctcccttcgataagagtcgaggtggaaaaaagtttcttcctgtattgaaagaaatcttggacagggatcccttgtctcaactgtgtgaaaatgaaatggatcttatttggactttgcgacaagactgccgagagattttcccacaatcactgccaaaattactgctgtcaatcaagtggaataaacttgaggatgttgctcagcttcaggcgctgcttcagatttggcctaaactgcccccccgggaggccctagagcttctggatttcaactatccagaccagtacgttcgagaatatgctgtaggctgcctgcgacagatgagtgatgaagaactttctcaatatcttttacaactggtgcaagtgttaaaatatgagccttttcttgattgtgccctctctagattcctattagaaagagcacttggtaatcggaggatagggcagtttctattttggcatcttaggtcagaagtgcacattcctgctgtctcagtacaatttggtgtcatccttgaagcatactgccggggaagtgtggggcacatgaaagtgctttctaagcaggttgaagcactcaataagttaaaaactttaaatagtttaatcaaactgaatgccgtgaagttaaacagagccaaagggaaggaggccatgcatacctgtttaaaacagagtgcttaccgggaagccctctctgacctgcagtcacccctgaacccatgtgttatcctctcagaactctatgttgaaaagtgcaaatacatggattccaaaatgaagcctttgtggctggtatacaataacaaggtatttggtgaggattcagttggagtgatttttaaaaatggtgatgatttacgacaggatatgttgacactccaaatgttgcgcttgatggatttactctggaaagaagctggtttggatcttcggatgttgccttatggctgtttagcaacaggagatcgctctggcctcattgaagttgtgagcacctctgaaacaattgctgacattcagctgaacagtagcaatgtggctgctgcagcagccttcaacaaagatgcccttctgaactggcttaaagaatacaactctggggatgacctggaccgagccattgaggaatttacactgtcctgtgctggctactgtgtagcttcttatgtccttgggattggtgacagacatagtgacaacatcatggtcaaaaaaactggccagctcttccacattgactttggacatattcttggaaatttcaaatctaagtttggcattaaaagggagcgagtgccttttattcttacctatgatttcatccatgtcattcaacaaggaaaaacaggaaatacagaaaagtttggccggttccgccagtgttgtgaggatgcatatctgattttacgacggcatgggaatctcttcatcactctctttgcgctgatgttgactgcagggcttcctgaactcacatcagtcaaagatatacagtatcttaaggactctcttgcattagggaagagtgaagaagaagcactcaaacagtttaagcaaaaatttgatgaggcgctcagggaaagctggactactaaagtgaactggatggcccacacagttcggaaagactacagatcttaacgatcagccttcgctcctaatgtatttgttggtttcatttcattttcattttgcacttgcactaaattgaacatgaccctgttagagatgttataaagggaatgaaatcctggaactcagagttaaattaagaacaaggcatcccacagaacctaatctgaacaatccccgatgattccctctgctttttgaatgcttccaagacttatcatgaaaactgtcaatggataatcatttcc

SEQ ID NO: 165184 - DNA, 4658 bp, Homo sapiens
  Payload ID: 12527
  Gene Symbol: PIK3CB
  Gene Name: phosphatidylinositol-4,5-bisphosphate 3-kinase, catalytic subunit beta
  Uniprot ID: P42338
  ENST ID: ENST00000477593
  CDS Start-End: 75-3287
gggctgctgactgcgcacttggaatagtagcaggcggcggcggcggaacgccaggcagggccccgtggttatgaatgtgcttcagtttcataatgcctcctgctatggcagacatccttgacatctgggcggtggattcacagatagcatctgatggctccatacctgtggatttccttttgcccactgggatttatatccagttggaggtacctcgggaagctaccatttcttatattaagcagatgttatggaagcaagttcacaattacccaatgttcaacctccttatggatattgactcctatatgtttgcatgtgtgaatcagactgctgtatatgaggagcttgaagatgaaacacgaagactctgtgatgtcagaccttttcttccagttctcaaattagtgacaagaagttgtgacccaggggaaaaattagactcaaaaattggagtccttataggaaaaggtctgcatgaatttgattccttgaaggatcctgaagtaaatgaatttcgaagaaaaatgcgcaaattcagcgaggaaaaaatcctgtcacttgtgggattgtcttggatggactggctaaaacaaacatatccaccagagcatgaaccatccatccctgaaaacttagaagataaactttatgggggaaagctcatcgtagctgttcattttgaaaactgccaggacgtgtttagctttcaagtgtctcctaatatgaatcctatcaaagtaaatgaattggcaatccaaaaacgtttgactattcatgggaaggaagatgaagttagcccctatgattatgtgttgcaagtcagcgggagagtagaatatgtttttggtgatcatccactaattcagttccagtatatccggaactgtgtgatgaacagagccctgccccattttatacttgtggaatgctgcaagatcaagaaaatgtatgaacaagaaatgattgccatagaggctgccataaatcgaaattcatctaatcttcctcttccattaccaccaaagaaaacacgaattatttctcatgtttgggaaaataacaaccctttccaaattgtcttggttaagggaaataaacttaacacagaggaaactgtaaaagttcatgtcagggctggtctttttcatggtactgagctcctgtgtaaaaccatcgtaagctcagaggtatcagggaaaaatgatcatatttggaatgaaccactggaatttgatattaatatttgtgacttaccaagaatggctcgattatgttttgctgtttatgcagttttggataaagtaaaaacgaagaaatcaacgaaaactattaatccctctaaatatcagaccatcaggaaagctggaaaagtgcattatcctgtagcgtgggtaaatacgatggtttttgactttaaaggacaattgagaactggagacataatattacacagctggtcttcatttcctgatgaactcgaagaaatgttgaatccaatgggaactgttcaaacaaatccatatactgaaaatgcaacagctttgcatgttaaatttccagagaataaaaaacaaccttattattaccctcccttcgataagattattgaaaaggcagctgagattgcaagcagtgatagtgctaatgtgtcaagtcgaggtggaaaaaagtttcttcctgtattgaaagaaatcttggacagggatcccttgtctcaactgtgtgaaaatgaaatggatcttatttggactttgcgacaagactgccgagagattttcccacaatcactgccaaaattactgctgtcaatcaagtggaataaacttgaggatgttgctcagcttcaggcgctgcttcagatttggcctaaactgcccccccgggaggccctagagcttctggatttcaactatccagaccagtacgttcgagaatatgctgtaggctgcctgcgacagatgagtgatgaagaactttctcaatatcttttacaactggtgcaagtgttaaaatatgagccttttcttgattgtgccctctctagattcctattagaaagagcacttggtaatcggaggatagggcagtttctattttggcatcttaggtcagaagtgcacattcctgctgtctcagtacaatttggtgtcatccttgaagcatactgccggggaagtgtggggcacatgaaagtgctttctaagcaggttgaagcactcaataagttaaaaactttaaatagtttaatcaaactgaatgccgtgaagttaaacagagccaaagggaaggaggccatgcatacctgtttaaaacagagtgcttaccgggaagccctctctgacctgcagtcacccctgaacccatgtgttatcctctcagaactctatgttgaaaagtgcaaatacatggattccaaaatgaagcctttgtggctggtatacaataacaaggtatttggtgaggattcagttggagtgatttttaaaaatggtgatgatttacgacaggatatgttgacactccaaatgttgcgcttgatggatttactctggaaagaagctggtttggatcttcggatgttgccttatggctgtttagcaacaggagatcgctctggcctcattgaagttgtgagcacctctgaaacaattgctgacattcagctgaacagtagcaatgtggctgctgcagcagccttcaacaaagatgcccttctgaactggcttaaagaatacaactctggggatgacctggaccgagccattgaggaatttacactgtcctgtgctggctactgtgtagcttcttatgtccttgggattggtgacagacatagtgacaacatcatggtcaaaaaaactggccagctcttccacattgactttggacatattcttggaaatttcaaatctaagtttggcattaaaagggagcgagtgccttttattcttacctatgatttcatccatgtcattcaacaaggaaaaacaggaaatacagaaaagtttggccggttccgccagtgttgtgaggatgcatatctgattttacgacggcatgggaatctcttcatcactctctttgcgctgatgttgactgcagggcttcctgaactcacatcagtcaaagatatacagtatcttaaggactctcttgcattagggaagagtgaagaagaagcactcaaacagtttaagcaaaaatttgatgaggcgctcagggaaagctggactactaaagtgaactggatggcccacacagttcggaaagactacagatcttaacgatcagccttcgctcctaatgtatttgttggtttcatttcattttcattttgcacttgcactaaattgaacatgaccctgttagagatgttataaagggaatgaaatcctggaactcagagttaaattaagaacaaggcatcccacagaacctaatctgaacaatccccgatgattccctctgctttttgaatgcttccaagacttatcatgaaaactgtcaatggataatcatttcctgctgactttgcacgccaaggaatgctactagggattgtttccgtttttgtttgttttttctaatatttggtacttcccagaatggtgtaaatacttcttttcaatgttgtgaccaagtattgtcactcagccaacaacttttccacacctgggggttggtggctgttcttactgtccaaatgaagctaaaaagaaaggcatctttcttcccttttaaaattgtgtaaactgcaaattataatataatttgaatttatgattattttccagaagaaatcttgtaaacctgtggatactcattaattcttttgttaatatttatttccatgatagcatcattccagccagacttgctgaaaatctactggtgaggcaaatataatatatataaatatgctacatatatatttataaaatttctagtgggagttctatataaatgtttctttggtattcttcagcctgtgatttaaagttttacaaaaagcagagctttttcctaagttacttttcagttaggtaactgtgtgatccagttcttccagctgcttctataatgaggcacatattaatacagtttttatatggtatctatgaaagagttcacttcatagagaataatacttgagcaaatgtatccaagaaagcaagcaaatgaaaagaaacctatttatggaataaactccagatctgaaattcagtattttagaaaaatgccagctcttcttactgtatttattaaaacttgtaataatgtgatttttttcaaggatattagttcaaattgaaatggtttcacgccacacggaaatctttaagttatttgttgaggtaccatatatttagggtgctaggggcaagtaatgttaatatgtgcaataggaactactggtttgaatgtgtaaatgggtgatctctctgagtcctggcaacatccagcaaaactactgcttattctccaaagaatattgggagctctcaatcctcggtgatatgggaaagagaactgagtatttgccctatgactgagctttctataggaattttattaaagaatgtttaattttgttgtccttcttaatgttctcagtcaaataaatgagtgagctggtttcggctgctcttggaatg

SEQ ID NO: 165185 - DNA, 542 bp, Homo sapiens
  Payload ID: 12527
  Gene Symbol: PIK3CB
  Gene Name: phosphatidylinositol-4,5-bisphosphate 3-kinase, catalytic subunit beta
  ENST ID: ENST00000462294
  CDS Start-End: 1-542
gtctgcatgaatttgattccttgaaggatcctgaagtaaatgaatttcgaagaaaaatgcgcaaattcagcgaggaaaaaatcctgtcacttgtgggattgtcttggatggactggctaaaacaaacatatccaccagagcatgaaccatccatccctgaaaacttagaagataaactttatgggggaaagctcatcgtagctgttcattttgaaaactgccaggacgtgtttagctttcaagtgtctcctaatatgaatcctatcaaagtaaatgaattggcaatccaaaaacgtttgactattcatgggaaggaagatgaagttagcccctatgattatgtgttgcaagtcagcgggagagtagaatatgtttttggtgatcatccactaattcagttccagcatgtttgggaaaataacaaccctttccaaattgtcttggttaagggaaataaacttaacacagaggaaactgtaaaagttcatgtcagggctggtctttttcatggtactgagctcctgtgtaaaaccatcgtaagc

SEQ ID NO: 165186 - DNA, 904 bp, Homo sapiens
  Payload ID: 12527
  Gene Symbol: PIK3CB
  Gene Name: phosphatidylinositol-4,5-bisphosphate 3-kinase, catalytic subunit beta
  ENST ID: ENST00000473435
  CDS Start-End: 1-738
ttgagaactggagacataatattacacagctggtcttcatttcctgatgaactcgaagaaatgttgaatccaatgggaactgttcaaacaaatccatatactgaaaatgcaacagctttgcatgttaaatttccagagaataaaaaacaaccttattattaccctcccttcgataagagtcgaggtggaaaaaagtttcttcctgtattgaaagaaatcttggacagggatcccttgtctcaactgtgtgaaaatgaaatggatcttatttggactttgcgacaagactgccgagagattttcccacaatcactgccaaaattactgctgtcaatcaagtggaataaacttgaggatgttgctcagcttcaggcgctgcttcagatttggcctaaactgcccccccgggaggccctagagcttctggatttcaactatccagaccagtacgttcgagaatatgctgtaggctgcctgcgacagatgagtgatgaagaactttctcaatatcttttacaactggtgcaagtgttaaaatatgagccttttcttgattgtgccctctctagattcctattagaaagagcacttggtaatcggaggatagggcagtttctattttggcatcttaggtcagaagtgcacattcctgctgtctcagtacaatttggtgtcatccttgaagcatactgccggggaagtgtggggcacatgaaagtgctttctaagcagtgttgaaaagtgcaaatacatggattccaaaatgaagcctttgtggctggtatacaataacaaggtatttggtgaggattcagttggagtgatttttaaaaatggtgatgatttacgacaggatatgttgacactccaaatgttgcgcttgatggatttactctggaaagaa

SEQ ID NO: 165187 - DNA, 3164 bp, Homo sapiens
  Payload ID: 12527
  Gene Symbol: PIK3CB
  Gene Name: phosphatidylinositol-4,5-bisphosphate 3-kinase, catalytic subunit beta
  ENST ID: ENST00000469284
  CDS Start-End: 1-105
cattatcctgtagcgtgggtaaatacgatggtttttgactttaaaggacaattgagaactggagacataatattacacagctggtcttcatttcctgattattgaaaaggcagctgagattgcaagcagtgatagtgctaatgtgtcaagtcgaggtggaaaaaagtttcttcctgtattgaaagaaatcttggacagggatcccttgtctcaactgtgtgaaaatgaaatggatcttatttggactttgcgacaagactgccgagagattttcccacaatcactgccaaaattactgctgtcaatcaagtggaataaacttgaggatgttgctcagcttcaggcgctgcttcagatttggcctaaactgcccccccgggaggccctagagcttctggatttcaactatccagaccagtacgttcgagaatatgctgtaggctgcctgcgacagatgagtgatgaagaactttctcaatatcttttacaactggtgcaagtgttaaaatatgagccttttcttgattgtgccctctctagattcctattagaaagagcacttggtaatcggaggatagggcagtttctattttggcatcttaggtcagaagtgcacattcctgctgtctcagtacaatttggtgtcatccttgaagcatactgccggggaagtgtggggcacatgaaagtgctttctaagcaggttgaagcactcaataagttaaaaactttaaatagtttaatcaaactgaatgccgtgaagttaaacagagccaaagggaaggaggccatgcatacctgtttaaaacagagtgcttaccgggaagccctctctgacctgcagtcacccctgaacccatgtgttatcctctcagaactctatgttgaaaagtgcaaatacatggattccaaaatgaagcctttgtggctggtatacaataacaaggtatttggtgaggattcagttggagtgatttttaaaaatggtgatgtttgttttcccttagatttacgacaggatatgttgacactccaaatgttgcgcttgatggatttactctggaaagaagctggtttggatcttcggatgttgccttatggctgtttagcaacaggagatcgctctggcctcattgaagttgtgagcacctctgaaacaattgctgacattcagctgaacagtagcaatgtggctgctgcagcagccttcaacaaagatgcccttctgaactggcttaaagaatacaactctggggatgacctggaccgagccattgaggaatttacactgtcctgtgctggctactgtgtagcttcttatgtccttgggattggtgacagacatagtgacaacatcatggtcaaaaaaactggccagctcttccacattgactttggacatattcttggaaatttcaaatctaagtttggcattaaaagggagcgagtgccttttattcttacctatgatttcatccatgtcattcaacaaggaaaaacaggaaatacagaaaagtttggccggttccgccagtgttgtgaggatgcatatctgattttacgacggcatgggaatctcttcatcactctctttgcgctgatgttgactgcagggcttcctgaactcacatcagtcaaagatatacagtatcttaaggactctcttgcattagggaagagtgaagaagaagcactcaaacagtttaagcaaaaatttgatgaggcgctcagggaaagctggactactaaagtgaactggatggcccacacagttcggaaagactacagatcttaacgatcagccttcgctcctaatgtatttgttggtttcatttcattttcattttgcacttgcactaaattgaacatgaccctgttagagatgttataaagggaatgaaatcctggaactcagagttaaattaagaacaaggcatcccacagaacctaatctgaacaatccccgatgattccctctgctttttgaatgcttccaagacttatcatgaaaactgtcaatggataatcatttcctgctgactttgcacgccaaggaatgctactagggattgtttccgtttttgtttgttttttctaatatttggtacttcccagaatggtgtaaatacttcttttcaatgttgtgaccaagtattgtcactcagccaacaacttttccacacctgggggttggtggctgttcttactgtccaaatgaagctaaaaagaaaggcatctttcttcccttttaaaattgtgtaaactgcaaattataatataatttgaatttatgattattttccagaagaaatcttgtaaacctgtggatactcattaattcttttgttaatatttatttccatgatagcatcattccagccagacttgctgaaaatctactggtgaggcaaatataatatatataaatatgctacatatatatttataaaatttctagtgggagttctatataaatgtttctttggtattcttcagcctgtgatttaaagttttacaaaaagcagagctttttcctaagttacttttcagttaggtaactgtgtgatccagttcttccagctgcttctataatgaggcacatattaatacagtttttatatggtatctatgaaagagttcacttcatagagaataatacttgagcaaatgtatccaagaaagcaagcaaatgaaaagaaacctatttatggaataaactccagatctgaaattcagtattttagaaaaatgccagctcttcttactgtatttattaaaacttgtaataatgtgatttttttcaaggatattagttcaaattgaaatggtttcacgccacacggaaatctttaagttatttgttgaggtaccatatatttagggtgctaggggcaagtaatgttaatatgtgcaataggaactactggtttgaatgtgtaaatgggtgatctctctgagtcctggcaacatccagcaaaactactgcttattctccaaagaatattgggagctctcaatcctcggtgatatgggaaagagaactgagtatttgccctatgactgagctttctataggaattttattaaagaatgtttaattttgttgtccttcttaatgttctcagtcaaataaatgagtgagctggtttcggctgctcttggaa

SEQ ID NO: 165188 - DNA, 721 bp, Homo sapiens
  Payload ID: 12527
  Gene Symbol: PIK3CB
  Gene Name: phosphatidylinositol-4,5-bisphosphate 3-kinase, catalytic subunit beta
  ENST ID: ENST00000483968
  CDS Start-End: 328-721
tgtagtgctgcgcggggcaggcgggaggtgatcgagagaggcagggatgggggcgccggagtggagcggttgcggcggcctgggctgctgactgcgcacttggaatagtagcaggcggcggcggcggaacgccaggcagtgtatgttttaactggaaaaagtcttccatgaaaacgtcacttttaaaaaataagtaatgccatctgttttcctaaaagactgaaatgggggcgaccattcttagcctttgatctcttgctttgatgctcaaacagaagaatgatacaagactgaggatcttgccaggcaagggccccgtggttatgaatgtgcttcagtttcataatgcctcctgctatggcagacatccttgacatctgggcggtggattcacagatagcatctgatggctccatacctgtggatttccttttgcccactgggatttatatccagttggaggtacctcgggaagctaccatttcttatattaagcagatgttatggaagcaagttcacaattacccaatgttcaacctccttatggatattgactcctatatgtttgcatgtgtgaatcagactgctgtatatgaggagcttgaagatgaaacacgaagactctgtgatgtcagaccttttcttccagttctcaaattagtgacaagaagttgtgacccaggggaaaaattagactcaaaaattggagtccttataggaa

SEQ ID NO: 165189 - DNA, 4747 bp, Homo sapiens
  Payload ID: 12527
  Gene Symbol: PIK3CB
  Gene Name: phosphatidylinositol-4,5-bisphosphate 3-kinase, catalytic subunit beta
  ENST ID: ENST00000462898
  CDS Start-End: 240-644
cgggttcggcggcggcgcgcgcgtgctctgtcggcctgtgcggcgctgcggcggagcgggccatggcagtggggagggggcgagtgtagtgctgcgcggggcaggcgggaggtgatcgagagaggcagggatgggggcgccggagtggagcggttgcggcggcctgggctgctgactgcgcacttggaatagtagcaggcggcggcggcggaacgccaggcagggccccgtggttatgaatgtgcttcagtttcataatgcctcctgctatggcagacatccttgacatctgggcggtggattcacagatagcatctgatggctccatacctgtggatttccttttgcccactgggatttatatccagttggaggtacctcgggaagctaccatttcttatattaagcagatgttatggaagcaagttcacaattacccaatgttcaacctccttatggatattgactcctatatgtttgcatgtgtgaatcagactgctgtatatgaggagcttgaagatgaaacacgaagactctgtgatgtcagaccttttcttccagttctcaaattagtgacaagaagttgtgacccaggggaaaaattagactcaaaaattggagtccttataggaaaaggatcctgaagtaaatgaatttcgaagaaaaatgcgcaaattcagcgaggaaaaaatcctgtcacttgtgggattgtcttggatggactggctaaaacaaacatatccaccagagcatgaaccatccatccctgaaaacttagaagataaactttatgggggaaagctcatcgtagctgttcattttgaaaactgccaggacgtgtttagctttcaagtgtctcctaatatgaatcctatcaaagtaaatgaattggcaatccaaaaacgtttgactattcatgggaaggaagatgaagttagcccctatgattatgtgttgcaagtcagcgggagagtagaatatgtttttggtgatcatccactaattcagttccagtatatccggaactgtgtgatgaacagagccctgccccattttatacttgtggaatgctgcaagatcaagaaaatgtatgaacaagaaatgattgccatagaggctgccataaatcgaaattcatctaatcttcctcttccattaccaccaaagaaaacacgaattatttctcatgtttgggaaaataacaaccctttccaaattgtcttggttaagggaaataaacttaacacagaggaaactgtaaaagttcatgtcagggctggtctttttcatggtactgagctcctgtgtaaaaccatcgtaagctcagaggtatcagggaaaaatgatcatatttggaatgaaccactggaatttgatattaatatttgtgacttaccaagaatggctcgattatgttttgctgtttatgcagttttggataaagtaaaaacgaagaaatcaacgaaaactattaatccctctaaatatcagaccatcaggaaagctggaaaagtgcattatcctgtagcgtgggtaaatacgatggtttttgactttaaaggacaattgagaactggagacataatattacacagctggtcttcatttcctgatgaactcgaagaaatgttgaatccaatgggaactgttcaaacaaatccatatactgaaaatgcaacagctttgcatgttaaatttccagagaataaaaaacaaccttattattaccctcccttcgataagattattgaaaaggcagctgagattgcaagcagtgatagtgctaatgtgtcaagtcgaggtggaaaaaagtttcttcctgtattgaaagaaatcttggacagggatcccttgtctcaactgtgtgaaaatgaaatggatcttatttggactttgcgacaagactgccgagagattttcccacaatcactgccaaaattactgctgtcaatcaagtggaataaacttgaggatgttgctcagcttcaggcgctgcttcagatttggcctaaactgcccccccgggaggccctagagcttctggatttcaactatccagaccagtacgttcgagaatatgctgtaggctgcctgcgacagatgagtgatgaagaactttctcaatatcttttacaactggtgcaagtgttaaaatatgagccttttcttgattgtgccctctctagattcctattagaaagagcacttggtaatcggaggatagggcagtttctattttggcatcttaggtcagaagtgcacattcctgctgtctcagtacaatttggtgtcatccttgaagcatactgccggggaagtgtggggcacatgaaagtgctttctaagcaggttgaagcactcaataagttaaaaactttaaatagtttaatcaaactgaatgccgtgaagttaaacagagccaaagggaaggaggccatgcatacctgtttaaaacagagtgcttaccgggaagccctctctgacctgcagtcacccctgaacccatgtgttatcctctcagaactctatgttgaaaagtgcaaatacatggattccaaaatgaagcctttgtggctggtatacaataacaaggtatttggtgaggattcagttggagtgatttttaaaaatggtgatgatttacgacaggatatgttgacactccaaatgttgcgcttgatggatttactctggaaagaagctggtttggatcttcggatgttgccttatggctgtttagcaacaggagatcgctctggcctcattgaagttgtgagcacctctgaaacaattgctgacattcagctgaacagtagcaatgtggctgctgcagcagccttcaacaaagatgcccttctgaactggcttaaagaatacaactctggggatgacctggaccgagccattgaggaatttacactgtcctgtgctggctactgtgtagcttcttatgtccttgggattggtgacagacatagtgacaacatcatggtcaaaaaaactggccagctcttccacattgactttggacatattcttggaaatttcaaatctaagtttggcattaaaagggagcgagtgccttttattcttacctatgatttcatccatgtcattcaacaaggaaaaacaggaaatacagaaaagtttggccggttccgccagtgttgtgaggatgcatatctgattttacgacggcatgggaatctcttcatcactctctttgcgctgatgttgactgcagggcttcctgaactcacatcagtcaaagatatacagtatcttaaggactctcttgcattagggaagagtgaagaagaagcactcaaacagtttaagcaaaaatttgatgaggcgctcagggaaagctggactactaaagtgaactggatggcccacacagttcggaaagactacagatcttaacgatcagccttcgctcctaatgtatttgttggtttcatttcattttcattttgcacttgcactaaattgaacatgaccctgttagagatgttataaagggaatgaaatcctggaactcagagttaaattaagaacaaggcatcccacagaacctaatctgaacaatccccgatgattccctctgctttttgaatgcttccaagacttatcatgaaaactgtcaatggataatcatttcctgctgactttgcacgccaaggaatgctactagggattgtttccgtttttgtttgttttttctaatatttggtacttcccagaatggtgtaaatacttcttttcaatgttgtgaccaagtattgtcactcagccaacaacttttccacacctgggggttggtggctgttcttactgtccaaatgaagctaaaaagaaaggcatctttcttcccttttaaaattgtgtaaactgcaaattataatataatttgaatttatgattattttccagaagaaatcttgtaaacctgtggatactcattaattcttttgttaatatttatttccatgatagcatcattccagccagacttgctgaaaatctactggtgaggcaaatataatatatataaatatgctacatatatatttataaaatttctagtgggagttctatataaatgtttctttggtattcttcagcctgtgatttaaagttttacaaaaagcagagctttttcctaagttacttttcagttaggtaactgtgtgatccagttcttccagctgcttctataatgaggcacatattaatacagtttttatatggtatctatgaaagagttcacttcatagagaataatacttgagcaaatgtatccaagaaagcaagcaaatgaaaagaaacctatttatggaataaactccagatctgaaattcagtattttagaaaaatgccagctcttcttactgtatttattaaaacttgtaataatgtgatttttttcaaggatattagttcaaattgaaatggtttcacgccacacggaaatctttaagttatttgttgaggtaccatatatttagggtgctaggggcaagtaatgttaatatgtgcaataggaactactggtttgaatgtgtaaatgggtgatctctctgagtcctggcaacatccagcaaaactactgcttattctccaaagaatattgggagctctcaatcctcggtgatatgggaaagagaactgagtatttgccctatgactgagctttctataggaattttattaaagaatgtttaattttgttgtccttcttaa

SEQ ID NO: 165190 - DNA, 667 bp, Homo sapiens
  Payload ID: 12527
  Gene Symbol: PIK3CB
  Gene Name: phosphatidylinositol-4,5-bisphosphate 3-kinase, catalytic subunit beta
  ENST ID: ENST00000461451
  CDS Start-End: 366-667
tggcgcgcgcgcacacgggcgcgggttcggcggcggcgcgcgcgtgctctgtcggcctgtgcggcgctgcggcggagcgggccatggcagtggggagggggcgagtgtagtgctgcgcggggcaggcgggaggtgatcgagagaggcagggatgggggcgccggagtggagcggttgcggcggcctgggctgctgactgcgcacttggaatagtagcaggcggcggcggcggaacgccaggcagtgtatgttttaactggaaaaagtcttccatgaaaacgtcacttttaaaaaataagtaatgccatctgttttcctaaaagactgaaatgggggcgaccattcttagggccccgtggttatgaatgtgcttcagtttcataatgcctcctgctatggcagacatccttgacatctgggcggtggattcacagatagcatctgatggctccatacctgtggatttccttttgcccactgggatttatatccagttggaggtacctcgggaagctaccatttcttatattaagcagatgttatggaagcaagttcacaattacccaatgttcaacctccttatggatattgactcctatatgtttgcatgtgtgaatcagactgctgtatatgaggagcttgaagatgaaacacgaagactctgtga

SEQ ID NO: 165191 - DNA, 3181 bp, Homo sapiens
  Payload ID: 12527
  Gene Symbol: PIK3CB
  Gene Name: phosphatidylinositol-4,5-bisphosphate 3-kinase, catalytic subunit beta
  ENST ID: ENST00000544716
  CDS Start-End: 249-1814
caggaaagctggaaaagtgcattatcctgtagcgtgggtaaatacgatggtttttgactttaaaggacaattgagaactggagacataatattacacagctggtcttcatttcctgattattgaaaaggcagctgagattgcaagcagtgatagtgctaatgtgtcaagtcgaggtggaaaaaagtttcttcctgtattgaaagaaatcttggacagggatcccttgtctcaactgtgtgaaaatgaaatggatcttatttggactttgcgacaagactgccgagagattttcccacaatcactgccaaaattactgctgtcaatcaagtggaataaacttgaggatgttgctcagcttcaggcgctgcttcagatttggcctaaactgcccccccgggaggccctagagcttctggatttcaactatccagaccagtacgttcgagaatatgctgtaggctgcctgcgacagatgagtgatgaagaactttctcaatatcttttacaactggtgcaagtgttaaaatatgagccttttcttgattgtgccctctctagattcctattagaaagagcacttggtaatcggaggatagggcagtttctattttggcatcttaggtcagaagtgcacattcctgctgtctcagtacaatttggtgtcatccttgaagcatactgccggggaagtgtggggcacatgaaagtgctttctaagcaggttgaagcactcaataagttaaaaactttaaatagtttaatcaaactgaatgccgtgaagttaaacagagccaaagggaaggaggccatgcatacctgtttaaaacagagtgcttaccgggaagccctctctgacctgcagtcacccctgaacccatgtgttatcctctcagaactctatgttgaaaagtgcaaatacatggattccaaaatgaagcctttgtggctggtatacaataacaaggtatttggtgaggattcagttggagtgatttttaaaaatggtgatgtttgttttcccttagatttacgacaggatatgttgacactccaaatgttgcgcttgatggatttactctggaaagaagctggtttggatcttcggatgttgccttatggctgtttagcaacaggagatcgctctggcctcattgaagttgtgagcacctctgaaacaattgctgacattcagctgaacagtagcaatgtggctgctgcagcagccttcaacaaagatgcccttctgaactggcttaaagaatacaactctggggatgacctggaccgagccattgaggaatttacactgtcctgtgctggctactgtgtagcttcttatgtccttgggattggtgacagacatagtgacaacatcatggtcaaaaaaactggccagctcttccacattgactttggacatattcttggaaatttcaaatctaagtttggcattaaaagggagcgagtgccttttattcttacctatgatttcatccatgtcattcaacaaggaaaaacaggaaatacagaaaagtttggccggttccgccagtgttgtgaggatgcatatctgattttacgacggcatgggaatctcttcatcactctctttgcgctgatgttgactgcagggcttcctgaactcacatcagtcaaagatatacagtatcttaaggactctcttgcattagggaagagtgaagaagaagcactcaaacagtttaagcaaaaatttgatgaggcgctcagggaaagctggactactaaagtgaactggatggcccacacagttcggaaagactacagatcttaacgatcagccttcgctcctaatgtatttgttggtttcatttcattttcattttgcacttgcactaaattgaacatgaccctgttagagatgttataaagggaatgaaatcctggaactcagagttaaattaagaacaaggcatcccacagaacctaatctgaacaatccccgatgattccctctgctttttgaatgcttccaagacttatcatgaaaactgtcaatggataatcatttcctgctgactttgcacgccaaggaatgctactagggattgtttccgtttttgtttgttttttctaatatttggtacttcccagaatggtgtaaatacttcttttcaatgttgtgaccaagtattgtcactcagccaacaacttttccacacctgggggttggtggctgttcttactgtccaaatgaagctaaaaagaaaggcatctttcttcccttttaaaattgtgtaaactgcaaattataatataatttgaatttatgattattttccagaagaaatcttgtaaacctgtggatactcattaattcttttgttaatatttatttccatgatagcatcattccagccagacttgctgaaaatctactggtgaggcaaatataatatatataaatatgctacatatatatttataaaatttctagtgggagttctatataaatgtttctttggtattcttcagcctgtgatttaaagttttacaaaaagcagagctttttcctaagttacttttcagttaggtaactgtgtgatccagttcttccagctgcttctataatgaggcacatattaatacagtttttatatggtatctatgaaagagttcacttcatagagaataatacttgagcaaatgtatccaagaaagcaagcaaatgaaaagaaacctatttatggaataaactccagatctgaaattcagtattttagaaaaatgccagctcttcttactgtatttattaaaacttgtaataatgtgatttttttcaaggatattagttcaaattgaaatggtttcacgccacacggaaatctttaagttatttgttgaggtaccatatatttagggtgctaggggcaagtaatgttaatatgtgcaataggaactactggtttgaatgtgtaaatgggtgatctctctgagtcctggcaacatccagcaaaactactgcttattctccaaagaatattgggagctctcaatcctcggtgatatgggaaagagaactgagtatttgccctatgactgagctttctataggaattttattaaagaatgtttaattttgttgtccttcttaatgttctcagtcaaataaatgagtgagctggtttcggctgctcttgg

SEQ ID NO: 165192 - DNA, 3508 bp, Homo sapiens
  Payload ID: 12528
  Gene Symbol: PIK3CD
  Gene Name: phosphatidylinositol-4,5-bisphosphate 3-kinase, catalytic subunit delta
  ENST ID: ENST00000361110
  CDS Start-End: 116-3322
cctgggagaagaggcagctgaggccgtggcccggagtagtaggagccacaagccaccctgggcaggacgaggccctgagggaggacaactgtcatctgggaagtaacaacgcaggatgccccctggggtggactgccccatggaattctggaccaaggaggagaatcagagcgttgtggttgacttcctgctgcccacaggggtctacctgaacttccctgtgtcccgcaatgccaacctcagcaccatcaagcagctgctgtggcaccgcgcccagtatgagccgctcttccacatgctcagtggccccgaggcctatgtgttcacctgcatcaaccagacagcggagcagcaagagctggaggacgagcaacggcgtctgtgtgacgtgcagcccttcctgcccgtcctgcgcctggtggcccgtgagggcgaccgcgtgaagaagctcatcaactcacagatcagcctcctcatcggcaaaggcctccacgagtttgactccttgtgcgacccagaagtgaacgactttcgcgccaagatgtgccaattctgcgaggaggcggccgcccgccggcagcagctgggctgggaggcctggctgcagtacagtttccccctgcagctggagccctcggctcaaacctgggggcctggtaccctgcggctcccgaaccgggcccttctggtcaacgttaagtttgagggcagcgaggagagcttcaccttccaggtgtccaccaaggacgtgccgctggcgctgatggcctgtgccctgcggaagaaggccacagtgttccggcagccgctggtggagcagccggaagactacacgctgcaggtgaacggcaggcatgagtacctgtatggcagctacccgctctgccagttccaggtccagaaaccgcgtgccaaaccacctcccattcctgcgaagaagccttcctctgtgtccctgtggtccctggagcagccgttccgcatcgagctcatccagggcagcaaagtgaacgccgacgagcggatgaagctggtggtgcaggccgggcttttccacggcaacgagatgctgtgcaagacggtgtccagctcggaggtgagcgtgtgctcggagcccgtgtggaagcagcggctggagttcgacatcaacatctgcgacctgccccgcatggcccgtctctgctttgcgctgtacgccgtgatcgagaaagccaagaaggctcgctccaccaagaagaagtccaagaaggcggactgccccattgcctgggccaacctcatgctgtttgactacaaggaccagcttaagaccggggaacgctgcctctacatgtggccctccgtcccagatgagaagggcgagctgctgaaccccacgggcactgtgcgcagtaaccccaacacggatagcgccgctgccctgctcatctgcctgcccgaggtggccccgcaccccgtgtactaccccgccctggagaagctgccaggagggatgctcttggcatctcgtgagtggaggccagagctgctgtggatgcgcctccatgcagaggacagcgccccctcaaggatgattggggtggcaatgcccggcctgggggtcctgcccgggctggtccaggcccctggggacgctgagtgcagccgtttgttgcagatcttggagctggggcgacacagcgagtgtgtgcatgtcaccgaggaggagcagctgcagctgcgggaaatcctggagcggcgggggtctggggagctgtatgagcacgagaaggacctggtgtggaagctgcggcatgaagtccaggagcacttcccggaggcgctagcccggctgctgctggtcaccaagtggaacaagcatgaggatgtggcccagatgctctacctgctgtgctcctggccggagctgcccgtcctgagcgccctggagctgctagacttcagcttccccgattgccacgtaggctccttcgccatcaagtcgctgcggaaactgacggacgatgagctgttccagtacctgctgcagctggtgcaggtgctcaagtacgagtcctacctggactgcgagctgaccaaattcctgctggaccgggccctggccaaccgcaagatcggccacttccttttctggcacctccgctccgagatgcacgtgccgtcggtggccctgcgcttcggcctcatcctggaggcctactgcaggggcagcacccaccacatgaaggtgctgatgaagcagggggaagcactgagcaaactgaaggccctgaatgacttcgtcaagctgagctctcagaagacccccaagccccagaccaaggagctgatgcacttgtgcatgcggcaggaggcctacctagaggccctctcccacctgcagtccccactcgaccccagcaccctgctggctgaagtctgcgtggagcagtgcaccttcatggactccaagatgaagcccctgtggatcatgtacagcaacgaggaggcaggcagcggcggcagcgtgggcatcatctttaagaacggggatgacctccggcaggacatgctgaccctgcagatgatccagctcatggacgtcctgtggaagcaggaggggctggacctgaggatgaccccctatggctgcctccccaccggggaccgcacaggcctcattgaggtggtactccgttcagacaccatcgccaacatccaactcaacaagagcaacatggcagccacagccgccttcaacaaggatgccctgctcaactggctgaagtccaagaacccgggggaggccctggatcgagccattgaggagttcaccctctcctgtgctggctattgtgtggccacatatgtgctgggcattggcgatcggcacagcgacaacatcatgatccgagagagtgggcagctgttccacattgattttggccactttctggggaatttcaagaccaagtttggaatcaaccgcgagcgtgtcccattcatcctcacctacgactttgtccatgtgattcagcaggggaagactaataatagtgagaaatttgaacggttccggggctactgtgaaagggcctacaccatcctgcggcgccacgggcttctcttcctccacctctttgccctgatgcgggcggcaggcctgcctgagctcagctgctccaaagacatccagtatctcaaggactccctggcactggggaaaacagaggaggaggcactgaagcacttccgagtgaagtttaacgaagccctccgtgagagctggaaaaccaaagtgaactggctggcccacaacgtgtccaaagacaacaggcagtagtggctcctcccagccctgggcccaagaggaggcggctgcgggtcgtggggaccaagcacattggtcctaaaggggctgaagagcctgaactgcacctaacgggaaagaaccgacatggctgccttttgtttacactggttatttatttatgacttgaaatagtttaaggagctaaacagccataaa

SEQ ID NO: 165193 - DNA, 5203 bp, Homo sapiens
  Payload ID: 12528
  Gene Symbol: PIK3CD
  Gene Name: phosphatidylinositol-4,5-bisphosphate 3-kinase, catalytic subunit delta
  Uniprot ID: O00329
  ENST ID: ENST00000377346
  CDS Start-End: 196-3330
cagtcgctccgagcggccgcgagcagagccgcccagccctgccagctgcgccgggacgataaggagtcaggccagggcgggatgacactcattgattctaaagcatctttaatctgccaggcggagggggctttgctggtctttcttggactattccagagaggacaactgtcatctgggaagtaacaacgcaggatgccccctggggtggactgccccatggaattctggaccaaggaggagaatcagagcgttgtggttgacttcctgctgcccacaggggtctacctgaacttccctgtgtcccgcaatgccaacctcagcaccatcaagcagctgctgtggcaccgcgcccagtatgagccgctcttccacatgctcagtggccccgaggcctatgtgttcacctgcatcaaccagacagcggagcagcaagagctggaggacgagcaacggcgtctgtgtgacgtgcagcccttcctgcccgtcctgcgcctggtggcccgtgagggcgaccgcgtgaagaagctcatcaactcacagatcagcctcctcatcggcaaaggcctccacgagtttgactccttgtgcgacccagaagtgaacgactttcgcgccaagatgtgccaattctgcgaggaggcggccgcccgccggcagcagctgggctgggaggcctggctgcagtacagtttccccctgcagctggagccctcggctcaaacctgggggcctggtaccctgcggctcccgaaccgggcccttctggtcaacgttaagtttgagggcagcgaggagagcttcaccttccaggtgtccaccaaggacgtgccgctggcgctgatggcctgtgccctgcggaagaaggccacagtgttccggcagccgctggtggagcagccggaagactacacgctgcaggtgaacggcaggcatgagtacctgtatggcagctacccgctctgccagttccagtacatctgcagctgcctgcacagtgggttgacccctcacctgaccatggtccattcctcctccatcctcgccatgcgggatgagcagagcaaccctgccccccaggtccagaaaccgcgtgccaaaccacctcccattcctgcgaagaagccttcctctgtgtccctgtggtccctggagcagccgttccgcatcgagctcatccagggcagcaaagtgaacgccgacgagcggatgaagctggtggtgcaggccgggcttttccacggcaacgagatgctgtgcaagacggtgtccagctcggaggtgagcgtgtgctcggagcccgtgtggaagcagcggctggagttcgacatcaacatctgcgacctgccccgcatggcccgtctctgctttgcgctgtacgccgtgatcgagaaagccaagaaggctcgctccaccaagaagaagtccaagaaggcggactgccccattgcctgggccaacctcatgctgtttgactacaaggaccagcttaagaccggggaacgctgcctctacatgtggccctccgtcccagatgagaagggcgagctgctgaaccccacgggcactgtgcgcagtaaccccaacacggatagcgccgctgccctgctcatctgcctgcccgaggtggccccgcaccccgtgtactaccccgccctggagaagatcttggagctggggcgacacagcgagtgtgtgcatgtcaccgaggaggagcagctgcagctgcgggaaatcctggagcggcgggggtctggggagctgtatgagcacgagaaggacctggtgtggaagctgcggcatgaagtccaggagcacttcccggaggcgctagcccggctgctgctggtcaccaagtggaacaagcatgaggatgtggcccagatgctctacctgctgtgctcctggccggagctgcccgtcctgagcgccctggagctgctagacttcagcttccccgattgccacgtaggctccttcgccatcaagtcgctgcggaaactgacggacgatgagctgttccagtacctgctgcagctggtgcaggtgctcaagtacgagtcctacctggactgcgagctgaccaaattcctgctggaccgggccctggccaaccgcaagatcggccacttccttttctggcacctccgctccgagatgcacgtgccgtcggtggccctgcgcttcggcctcatcctggaggcctactgcaggggcagcacccaccacatgaaggtgctgatgaagcagggggaagcactgagcaaactgaaggccctgaatgacttcgtcaagctgagctctcagaagacccccaagccccagaccaaggagctgatgcacttgtgcatgcggcaggaggcctacctagaggccctctcccacctgcagtccccactcgaccccagcaccctgctggctgaagtctgcgtggagcagtgcaccttcatggactccaagatgaagcccctgtggatcatgtacagcaacgaggaggcaggcagcggcggcagcgtgggcatcatctttaagaacggggatgacctccggcaggacatgctgaccctgcagatgatccagctcatggacgtcctgtggaagcaggaggggctggacctgaggatgaccccctatggctgcctccccaccggggaccgcacaggcctcattgaggtggtactccgttcagacaccatcgccaacatccaactcaacaagagcaacatggcagccacagccgccttcaacaaggatgccctgctcaactggctgaagtccaagaacccgggggaggccctggatcgagccattgaggagttcaccctctcctgtgctggctattgtgtggccacatatgtgctgggcattggcgatcggcacagcgacaacatcatgatccgagagagtgggcagctgttccacattgattttggccactttctggggaatttcaagaccaagtttggaatcaaccgcgagcgtgtcccattcatcctcacctacgactttgtccatgtgattcagcaggggaagactaataatagtgagaaatttgaacggttccggggctactgtgaaagggcctacaccatcctgcggcgccacgggcttctcttcctccacctctttgccctgatgcgggcggcaggcctgcctgagctcagctgctccaaagacatccagtatctcaaggactccctggcactggggaaaacagaggaggaggcactgaagcacttccgagtgaagtttaacgaagccctccgtgagagctggaaaaccaaagtgaactggctggcccacaacgtgtccaaagacaacaggcagtagtggctcctcccagccctgggcccaagaggaggcggctgcgggtcgtggggaccaagcacattggtcctaaaggggctgaagagcctgaactgcacctaacgggaaagaaccgacatggctgccttttgtttacactggttatttatttatgacttgaaatagtttaaggagctaaacagccataaacggaaacgcctccttcatgcagcggcggtgctgggccccccgaggctgcacctggctctcggctgaggattgtcaccccaagtcttccagctggtggatctgggcccagcaaagactgttctcctcccgagggaaccttcttcccaggcctcccgccagactgcctgggtcctggcgcctggcggtcacctggtgcctactgtccgacaggatgccttgatcctcgtgcgacccaccctgtgtatcctccctagactgagttctggcagctccccgaggcagccggggtaccctctagattcagggatgcttgctctccacttttcaagtgggtcttgggtacgagaattccctcatctttctctactgtaaagtgattttgtttgcaggtaagaaaataatagatgactcaccacacctctacggctggggagatcaggcccagccccataaaggagaatctacgctggtcctcaggacgtgttaaagagatctgggcctcatgtagctcaccccggtcacgcatgaaggcaaaagcaggtcagaagcgaatactctgccattatctcaaaaatcttttttttttttttgagatggggtcttcctctgttgcccaggctggagtgcagtggtgcaatcttggctcactgtaacctccgcctcccaggttcaagtgattcttctgcctcagcctcctgagtagctgggattacaggtgtgcaccaccgtacccagctaatttttgtattttagtagagacgggggtttcaccatgttggctgggctggtctcgaactcctgacctcaggtgatccacccgcctgagcctcccaaagtgctgggattacaggcatgagccaccgcgcccggcccactctgccattgtctaagccacctctgaaagcaggttttaacaaaaggatgaggccagaactcttccagaaccatcacctttgggaacctgctgtgagagtgctgaggtaccagaagtgtgagaacgagggggcgtgctgggatctttctctctgactatacttagtttgaaatggtgcaggcttagtcttaagcctccaaaggcctggatttgagcagctttagaaatgcaggttctagggcttctcccagccttcagaagccaactaactctgcagatggggctaggactgtgggcttttagcagcccacaggtgatcctaacatatcaggccatggactcaggacctgcccggtgatgctgttgatttctcaaaggtcttccaaaactcaacagagccagaagtagccgcccgctcagcggctcaggtgccagctctgttctgattcaccaggggtccgtcagtagtcattgccacccgcggggcacctccctggccacacgcctgttcccagcaagtgctgaaactcactagaccgtctgcctgtttcgaaatggggaaagccgtgcgtgcgcgttatttatttaagtgcgcctgtgtgcgcgggtgtgggagcacactttgcaaagccacagcgtttctggttttgggtgtacagtcttgtgtgcctggcgagaagaatattttctatttttttaagtcatttcatgtttctgtctggggaaggcaagttagttaagtatcactgatgtgggttgagaccagcactctgtgaaaccttgaaatgagaagtaaaggcagatgaaaagaaa

SEQ ID NO: 165194 - DNA, 3503 bp, Homo sapiens
  Payload ID: 12528
  Gene Symbol: PIK3CD
  Gene Name: phosphatidylinositol-4,5-bisphosphate 3-kinase, catalytic subunit delta
  ENST ID: ENST00000543390
  CDS Start-End: 116-3322
cctgggagaagaggcagctgaggccgtggcccggagtagtaggagccacaagccaccctgggcaggacgaggccctgagggaggacaactgtcatctgggaagtaacaacgcaggatgccccctggggtggactgccccatggaattctggaccaaggaggagaatcagagcgttgtggttgacttcctgctgcccacaggggtctacctgaacttccctgtgtcccgcaatgccaacctcagcaccatcaagcagctgctgtggcaccgcgcccagtatgagccgctcttccacatgctcagtggccccgaggcctatgtgttcacctgcatcaaccagacagcggagcagcaagagctggaggacgagcaacggcgtctgtgtgacgtgcagcccttcctgcccgtcctgcgcctggtggcccgtgagggcgaccgcgtgaagaagctcatcaactcacagatcagcctcctcatcggcaaaggcctccacgagtttgactccttgtgcgacccagaagtgaacgactttcgcgccaagatgtgccaattctgcgaggaggcggccgcccgccggcagcagctgggctgggaggcctggctgcagtacagtttccccctgcagctggagccctcggctcaaacctgggggcctggtaccctgcggctcccgaaccgggcccttctggtcaacgttaagtttgagggcagcgaggagagcttcaccttccaggtgtccaccaaggacgtgccgctggcgctgatggcctgtgccctgcggaagaaggccacagtgttccggcagccgctggtggagcagccggaagactacacgctgcaggtgaacggcaggcatgagtacctgtatggcagctacccgctctgccagttccaggtccagaaaccgcgtgccaaaccacctcccattcctgcgaagaagccttcctctgtgtccctgtggtccctggagcagccgttccgcatcgagctcatccagggcagcaaagtgaacgccgacgagcggatgaagctggtggtgcaggccgggcttttccacggcaacgagatgctgtgcaagacggtgtccagctcggaggtgagcgtgtgctcggagcccgtgtggaagcagcggctggagttcgacatcaacatctgcgacctgccccgcatggcccgtctctgctttgcgctgtacgccgtgatcgagaaagccaagaaggctcgctccaccaagaagaagtccaagaaggcggactgccccattgcctgggccaacctcatgctgtttgactacaaggaccagcttaagaccggggaacgctgcctctacatgtggccctccgtcccagatgagaagggcgagctgctgaaccccacgggcactgtgcgcagtaaccccaacacggatagcgccgctgccctgctcatctgcctgcccgaggtggccccgcaccccgtgtactaccccgccctggagaagctgccaggagggatgctcttggcatctcgtgagtggaggccagagctgctgtggatgcgcctccatgcagaggacagcgccccctcaaggatgattggggtggcaatgcccggcctgggggtcctgcccgggctggtccaggcccctggggacgctgagtgcagccgtttgttgcagatcttggagctggggcgacacagcgagtgtgtgcatgtcaccgaggaggagcagctgcagctgcgggaaatcctggagcggcgggggtctggggagctgtatgagcacgagaaggacctggtgtggaagctgcggcatgaagtccaggagcacttcccggaggcgctagcccggctgctgctggtcaccaagtggaacaagcatgaggatgtggcccaagatgctctacctgctgtgtcctggccggagctgcccgtcctgagcgccctggagctgctagacttcagcttccccgattgccacgtaggctccttcgccatcaagtcgctgcggaaactgacggacgatgagctgttccagtacctgctgcagctggtgcaggtgctcaagtacgagtcctacctggactgcgagctgaccaaattcctgctggaccgggccctggccaaccgcaagatcggccacttccttttctggcacctccgctccgagatgcacgtgccgtcggtggccctgcgcttcggcctcatcctggaggcctactgcaggggcagcacccaccacatgaaggtgctgatgaagcagggggaagcactgagcaaactgaaggccctgaatgacttcgtcaagctgagctctcagaagacccccaagccccagaccaaggagctgatgcacttgtgcatgcggcaggaggcctacctagaggccctctcccacctgcagtccccactcgaccccagcaccctgctggctgaagtctgcgtggagcagtgcaccttcatggactccaagatgaagcccctgtggatcatgtacagcaacgaggaggcaggcagcggcggcagcgtgggcatcatctttaagaacggggatgacctccggcaggacatgctgaccctgcagatgatccagctcatggacgtcctgtggaagcaggaggggctggacctgaggatgaccccctatggctgcctccccaccggggaccgcacaggcctcattgaggtggtactccgttcagacaccatcgccaacatccaactcaacaagagcaacatggcagccacagccgccttcaacaaggatgccctgctcaactggctgaagtccaagaacccgggggaggccctggatcgagccattgaggagttcaccctctcctgtgctggctattgtgtggccacatatgtgctgggcattggcgatcggcacagcgacaacatcatgatccgagagagtgggcagctgttccacattgattttggccactttctggggaatttcaagaccaagtttggaatcaaccgcgagcgtgtcccattcatcctcacctacgactttgtccatgtgattcagcaggggaagactaataatagtgagaaatttgaacggttccggggctactgtgaaagggcctacaccatcctgcggcgccacgggcttctcttcctccacctctttgccctgatgcgggcggcaggcctgcctgagctcagctgctccaaagacatccagtatctcaaggactccctggcactggggaaaacagaggaggaggcactgaagcacttccgagtgaagtttaacgaagccctccgtgagagctggaaaaccaaagtgaactggctggcccacaacgtgtccaaagacaacaggcagtagtggctcctcccagccctgggcccaagaggaggcggctgcgggtcgtggggaccaagcacattggtcctaaaggggctgaagagcctgaactgcacctaacgggaaagaaccgacatggctgccttttgtttacactggttatttatttatgacttgaaatagtttaaggagctaaacagcc

SEQ ID NO: 165195 - DNA, 5483 bp, Homo sapiens
  Payload ID: 12528
  Gene Symbol: PIK3CD
  Gene Name: phosphatidylinositol-4,5-bisphosphate 3-kinase, catalytic subunit delta
  ENST ID: ENST00000536656
  CDS Start-End: 209-3415
ctcgcgcccagcgcagtcgctccgagcggccgcgagcagagccgcccagccctgccagctgcgccgggacgataaggagtcaggccagggcgggatgacactcattgattctaaagcatctttaatctgccaggcggagggggctttgctggtctttcttggactattccagagaggacaactgtcatctgggaagtaacaacgcaggatgccccctggggtggactgccccatggaattctggaccaaggaggagaatcagagcgttgtggttgacttcctgctgcccacaggggtctacctgaacttccctgtgtcccgcaatgccaacctcagcaccatcaagcagctgctgtggcaccgcgcccagtatgagccgctcttccacatgctcagtggccccgaggcctatgtgttcacctgcatcaaccagacagcggagcagcaagagctggaggacgagcaacggcgtctgtgtgacgtgcagcccttcctgcccgtcctgcgcctggtggcccgtgagggcgaccgcgtgaagaagctcatcaactcacagatcagcctcctcatcggcaaaggcctccacgagtttgactccttgtgcgacccagaagtgaacgactttcgcgccaagatgtgccaattctgcgaggaggcggccgcccgccggcagcagctgggctgggaggcctggctgcagtacagtttccccctgcagctggagccctcggctcaaacctgggggcctggtaccctgcggctcccgaaccgggcccttctggtcaacgttaagtttgagggcagcgaggagagcttcaccttccaggtgtccaccaaggacgtgccgctggcgctgatggcctgtgccctgcggaagaaggccacagtgttccggcagccgctggtggagcagccggaagactacacgctgcaggtgaacggcaggcatgagtacctgtatggcagctacccgctctgccagttccaggtccagaaaccgcgtgccaaaccacctcccattcctgcgaagaagccttcctctgtgtccctgtggtccctggagcagccgttccgcatcgagctcatccagggcagcaaagtgaacgccgacgagcggatgaagctggtggtgcaggccgggcttttccacggcaacgagatgctgtgcaagacggtgtccagctcggaggtgagcgtgtgctcggagcccgtgtggaagcagcggctggagttcgacatcaacatctgcgacctgccccgcatggcccgtctctgctttgcgctgtacgccgtgatcgagaaagccaagaaggctcgctccaccaagaagaagtccaagaaggcggactgccccattgcctgggccaacctcatgctgtttgactacaaggaccagcttaagaccggggaacgctgcctctacatgtggccctccgtcccagatgagaagggcgagctgctgaaccccacgggcactgtgcgcagtaaccccaacacggatagcgccgctgccctgctcatctgcctgcccgaggtggccccgcaccccgtgtactaccccgccctggagaagctgccaggagggatgctcttggcatctcgtgagtggaggccagagctgctgtggatgcgcctccatgcagaggacagcgccccctcaaggatgattggggtggcaatgcccggcctgggggtcctgcccgggctggtccaggcccctggggacgctgagtgcagccgtttgttgcagatcttggagctggggcgacacagcgagtgtgtgcatgtcaccgaggaggagcagctgcagctgcgggaaatcctggagcggcgggggtctggggagctgtatgagcacgagaaggacctggtgtggaagctgcggcatgaagtccaggagcacttcccggaggcgctagcccggctgctgctggtcaccaagtggaacaagcatgaggatgtggcccaggatgctctacctgctgtgtcctggccggagctgcccgtcctgagcgccctggagctgctagacttcagcttccccgattgccacgtaggctccttcgccatcaagtcgctgcggaaactgacggacgatgagctgttccagtacctgctgcagctggtgcaggtgctcaagtacgagtcctacctggactgcgagctgaccaaattcctgctggaccgggccctggccaaccgcaagatcggccacttccttttctggcacctccgctccgagatgcacgtgccgtcggtggccctgcgcttcggcctcatcctggaggcctactgcaggggcagcacccaccacatgaaggtgctgatgaagcagggggaagcactgagcaaactgaaggccctgaatgacttcgtcaagctgagctctcagaagacccccaagccccagaccaaggagctgatgcacttgtgcatgcggcaggaggcctacctagaggccctctcccacctgcagtccccactcgaccccagcaccctgctggctgaagtctgcgtggagcagtgcaccttcatggactccaagatgaagcccctgtggatcatgtacagcaacgaggaggcaggcagcggcggcagcgtgggcatcatctttaagaacggggatgacctccggcaggacatgctgaccctgcagatgatccagctcatggacgtcctgtggaagcaggaggggctggacctgaggatgaccccctatggctgcctccccaccggggaccgcacaggcctcattgaggtggtactccgttcagacaccatcgccaacatccaactcaacaagagcaacatggcagccacagccgccttcaacaaggatgccctgctcaactggctgaagtccaagaacccgggggaggccctggatcgagccattgaggagttcaccctctcctgtgctggctattgtgtggccacatatgtgctgggcattggcgatcggcacagcgacaacatcatgatccgagagagtgggcagctgttccacattgattttggccactttctggggaatttcaagaccaagtttggaatcaaccgcgagcgtgtcccattcatcctcacctacgactttgtccatgtgattcagcaggggaagactaataatagtgagaaatttgaacggttccggggctactgtgaaagggcctacaccatcctgcggcgccacgggcttctcttcctccacctctttgccctgatgcgggcggcaggcctgcctgagctcagctgctccaaagacatccagtatctcaaggactccctggcactggggaaaacagaggaggaggcactgaagcacttccgagtgaagtttaacgaagccctccgtgagagctggaaaaccaaagtgaactggctggcccacaacgtgtccaaagacaacaggcagtagtggctcctcccagccctgggcccaagaggaggcggctgcgggtcgtggggaccaagcacattggtcctaaaggggctgaagagcctgaactgcacctaacgggaaagaaccgacatggctgccttttgtttacactggttatttatttatgacttgaaatagtttaaggagctaaacagccataaacggaaacgcctccttcatgcagcggcggtgctgggccccccgaggctgcacctggctctcggctgaggattgtcaccccaagtcttccagctggtggatctgggcccagcaaagactgttctcctcccgagggaaccttcttcccaggcctcccgccagactgcctgggtcctggcgcctggcggtcacctggtgcctactgtccgacaggatgccttgatcctcgtgcgacccaccctgtgtatcctccctagactgagttctggcagctccccgaggcagccggggtaccctctagattcagggatgcttgctctccacttttcaagtgggtcttgggtacgagaattccctcatctttctctactgtaaagtgattttgtttgcaggtaagaaaataatagatgactcaccacacctctacggctggggagatcaggcccagccccataaaggagaatctacgctggtcctcaggacgtgttaaagagatctgggcctcatgtagctcaccccggtcacgcatgaaggcaaaagcaggtcagaagcgaatactctgccattatctcaaaaatcttttttttttttttgagatggggtcttcctctgttgcccaggctggagtgcagtggtgcaatcttggctcactgtaacctccgcctcccaggttcaagtgattcttctgcctcagcctcctgagtagctgggattacaggtgtgcaccaccgtacccagctaatttttgtattttagtagagacgggggtttcaccatgttggctgggctggtctcgaactcctgacctcaggtgatccacccgcctgagcctcccaaagtgctgggattacaggcatgagccaccgcgcccggcccactctgccattgtctaagccacctctgaaagcaggttttaacaaaaggatgaggccagaactcttccagaaccatcacctttgggaacctgctgtgagagtgctgaggtaccagaagtgtgagaacgagggggcgtgctgggatctttctctctgactatacttagtttgaaatggtgcaggcttagtcttaagcctccaaaggcctggatttgagcagctttagaaatgcaggttctagggcttctcccagccttcagaagccaactaactctgcagatggggctaggactgtgggcttttagcagcccacaggtgatcctaacatatcaggccatggactcaggacctgcccggtgatgctgttgatttctcaaaggtcttccaaaactcaacagagccagaagtagccgcccgctcagcggctcaggtgccagctctgttctgattcaccaggggtccgtcagtagtcattgccacccgcggggcacctccctggccacacgcctgttcccagcaagtgctgaaactcactagaccgtctgcctgtttcgaaatggggaaagccgtgcgtgcgcgttatttatttaagtgcgcctgtgtgcgcgggtgtgggagcacactttgcaaagccacagcgtttctggttttgggtgtacagtcttgtgtgcctggcgagaagaatattttctatttttttaagtcatttcatgtttctgtctggggaaggcaagttagttaagtatcactgatgtgggttgagaccagcactctgtgaaaccttgaaatgagaagtaaaggcagatgaaaagaaagaaaaagcctttttatgttcttttatgttctcggctcaaaaagaaacaagggagtgtaggtttaaaaccaaaacaggagagaagacaaaccccgctccggctggagttagttagaaccagaactttattgtagcggatacactttctgacctatcatgagtatacacatctgcgaagggaaaccgcgcggcgaca

SEQ ID NO: 165196 - DNA, 5483 bp, Homo sapiens
  Payload ID: 12528
  Gene Symbol: PIK3CD
  Gene Name: phosphatidylinositol-4,5-bisphosphate 3-kinase, catalytic subunit delta
  ENST ID: ENST00000628140
  CDS Start-End: 209-3415
ctcgcgcccagcgcagtcgctccgagcggccgcgagcagagccgcccagccctgccagctgcgccgggacgataaggagtcaggccagggcgggatgacactcattgattctaaagcatctttaatctgccaggcggagggggctttgctggtctttcttggactattccagagaggacaactgtcatctgggaagtaacaacgcaggatgccccctggggtggactgccccatggaattctggaccaaggaggagaatcagagcgttgtggttgacttcctgctgcccacaggggtctacctgaacttccctgtgtcccgcaatgccaacctcagcaccatcaagcagctgctgtggcaccgcgcccagtatgagccgctcttccacatgctcagtggccccgaggcctatgtgttcacctgcatcaaccagacagcggagcagcaagagctggaggacgagcaacggcgtctgtgtgacgtgcagcccttcctgcccgtcctgcgcctggtggcccgtgagggcgaccgcgtgaagaagctcatcaactcacagatcagcctcctcatcggcaaaggcctccacgagtttgactccttgtgcgacccagaagtgaacgactttcgcgccaagatgtgccaattctgcgaggaggcggccgcccgccggcagcagctgggctgggaggcctggctgcagtacagtttccccctgcagctggagccctcggctcaaacctgggggcctggtaccctgcggctcccgaaccgggcccttctggtcaacgttaagtttgagggcagcgaggagagcttcaccttccaggtgtccaccaaggacgtgccgctggcgctgatggcctgtgccctgcggaagaaggccacagtgttccggcagccgctggtggagcagccggaagactacacgctgcaggtgaacggcaggcatgagtacctgtatggcagctacccgctctgccagttccaggtccagaaaccgcgtgccaaaccacctcccattcctgcgaagaagccttcctctgtgtccctgtggtccctggagcagccgttccgcatcgagctcatccagggcagcaaagtgaacgccgacgagcggatgaagctggtggtgcaggccgggcttttccacggcaacgagatgctgtgcaagacggtgtccagctcggaggtgagcgtgtgctcggagcccgtgtggaagcagcggctggagttcgacatcaacatctgcgacctgccccgcatggcccgtctctgctttgcgctgtacgccgtgatcgagaaagccaagaaggctcgctccaccaagaagaagtccaagaaggcggactgccccattgcctgggccaacctcatgctgtttgactacaaggaccagcttaagaccggggaacgctgcctctacatgtggccctccgtcccagatgagaagggcgagctgctgaaccccacgggcactgtgcgcagtaaccccaacacggatagcgccgctgccctgctcatctgcctgcccgaggtggccccgcaccccgtgtactaccccgccctggagaagctgccaggagggatgctcttggcatctcgtgagtggaggccagagctgctgtggatgcgcctccatgcagaggacagcgccccctcaaggatgattggggtggcaatgcccggcctgggggtcctgcccgggctggtccaggcccctggggacgctgagtgcagccgtttgttgcagatcttggagctggggcgacacagcgagtgtgtgcatgtcaccgaggaggagcagctgcagctgcgggaaatcctggagcggcgggggtctggggagctgtatgagcacgagaaggacctggtgtggaagctgcggcatgaagtccaggagcacttcccggaggcgctagcccggctgctgctggtcaccaagtggaacaagcatgaggatgtggcccagatgctctacctgctgtgctcctggccggagctgcccgtcctgagcgccctggagctgctagacttcagcttccccgattgccacgtaggctccttcgccatcaagtcgctgcggaaactgacggacgatgagctgttccagtacctgctgcagctggtgcaggtgctcaagtacgagtcctacctggactgcgagctgaccaaattcctgctggaccgggccctggccaaccgcaagatcggccacttccttttctggcacctccgctccgagatgcacgtgccgtcggtggccctgcgcttcggcctcatcctggaggcctactgcaggggcagcacccaccacatgaaggtgctgatgaagcagggggaagcactgagcaaactgaaggccctgaatgacttcgtcaagctgagctctcagaagacccccaagccccagaccaaggagctgatgcacttgtgcatgcggcaggaggcctacctagaggccctctcccacctgcagtccccactcgaccccagcaccctgctggctgaagtctgcgtggagcagtgcaccttcatggactccaagatgaagcccctgtggatcatgtacagcaacgaggaggcaggcagcggcggcagcgtgggcatcatctttaagaacggggatgacctccggcaggacatgctgaccctgcagatgatccagctcatggacgtcctgtggaagcaggaggggctggacctgaggatgaccccctatggctgcctccccaccggggaccgcacaggcctcattgaggtggtactccgttcagacaccatcgccaacatccaactcaacaagagcaacatggcagccacagccgccttcaacaaggatgccctgctcaactggctgaagtccaagaacccgggggaggccctggatcgagccattgaggagttcaccctctcctgtgctggctattgtgtggccacatatgtgctgggcattggcgatcggcacagcgacaacatcatgatccgagagagtgggcagctgttccacattgattttggccactttctggggaatttcaagaccaagtttggaatcaaccgcgagcgtgtcccattcatcctcacctacgactttgtccatgtgattcagcaggggaagactaataatagtgagaaatttgaacggttccggggctactgtgaaagggcctacaccatcctgcggcgccacgggcttctcttcctccacctctttgccctgatgcgggcggcaggcctgcctgagctcagctgctccaaagacatccagtatctcaaggactccctggcactggggaaaacagaggaggaggcactgaagcacttccgagtgaagtttaacgaagccctccgtgagagctggaaaaccaaagtgaactggctggcccacaacgtgtccaaagacaacaggcagtagtggctcctcccagccctgggcccaagaggaggcggctgcgggtcgtggggaccaagcacattggtcctaaaggggctgaagagcctgaactgcacctaacgggaaagaaccgacatggctgccttttgtttacactggttatttatttatgacttgaaatagtttaaggagctaaacagccataaacggaaacgcctccttcatgcagcggcggtgctgggccccccgaggctgcacctggctctcggctgaggattgtcaccccaagtcttccagctggtggatctgggcccagcaaagactgttctcctcccgagggaaccttcttcccaggcctcccgccagactgcctgggtcctggcgcctggcggtcacctggtgcctactgtccgacaggatgccttgatcctcgtgcgacccaccctgtgtatcctccctagactgagttctggcagctccccgaggcagccggggtaccctctagattcagggatgcttgctctccacttttcaagtgggtcttgggtacgagaattccctcatctttctctactgtaaagtgattttgtttgcaggtaagaaaataatagatgactcaccacacctctacggctggggagatcaggcccagccccataaaggagaatctacgctggtcctcaggacgtgttaaagagatctgggcctcatgtagctcaccccggtcacgcatgaaggcaaaagcaggtcagaagcgaatactctgccattatctcaaaaatcttttttttttttttgagatggggtcttcctctgttgcccaggctggagtgcagtggtgcaatcttggctcactgtaacctccgcctcccaggttcaagtgattcttctgcctcagcctcctgagtagctgggattacaggtgtgcaccaccgtacccagctaatttttgtattttagtagagacgggggtttcaccatgttggctgggctggtctcgaactcctgacctcaggtgatccacccgcctgagcctcccaaagtgctgggattacaggcatgagccaccgcgcccggcccactctgccattgtctaagccacctctgaaagcaggttttaacaaaaggatgaggccagaactcttccagaaccatcacctttgggaacctgctgtgagagtgctgaggtaccagaagtgtgagaacgagggggcgtgctgggatctttctctctgactatacttagtttgaaatggtgcaggcttagtcttaagcctccaaaggcctggatttgagcagctttagaaatgcaggttctagggcttctcccagccttcagaagccaactaactctgcagatggggctaggactgtgggcttttagcagcccacaggtgatcctaacatatcaggccatggactcaggacctgcccggtgatgctgttgatttctcaaaggtcttccaaaactcaacagagccagaagtagccgcccgctcagcggctcaggtgccagctctgttctgattcaccaggggtccgtcagtagtcattgccacccgcggggcacctccctggccacacgcctgttcccagcaagtgctgaaactcactagaccgtctgcctgtttcgaaatggggaaagccgtgcgtgcgcgttatttatttaagtgcgcctgtgtgcgcgggtgtgggagcacactttgcaaagccacagcgtttctggttttgggtgtacagtcttgtgtgcctggcgagaagaatattttctatttttttaagtcatttcatgtttctgtctggggaaggcaagttagttaagtatcactgatgtgggttgagaccagcactctgtgaaaccttgaaatgagaagtaaaggcagatgaaaagaaagaaaaagcctttttatgttcttttatgttctcggctcaaaaagaaacaagggagtgtaggtttaaaaccaaaacaggagagaagacaaaccccgctccggctggagttagttagaaccagaactttattgtagcggatacactttctgacctatcatgagtatacacatctgcgaagggaaaccgcgcggcgaca

SEQ ID NO: 165197 - DNA, 5377 bp, Homo sapiens
  Payload ID: 12529
  Gene Symbol: PIK3CG
  Gene Name: phosphatidylinositol-4,5-bisphosphate 3-kinase, catalytic subunit gamma
  Uniprot ID: P48736
  ENST ID: ENST00000359195
  CDS Start-End: 311-3619
gcacttccttctcggctagattatctgaaactgttgtcggttcttgagatgatactaccaccgaatgtctgtgtttcattgtctagtccaacctgtattgtggatatctacaacgttccggcaatagttttgcaggtgcatcacatttttgtttttgttttgggaggaaaagggagggcacggcagccaggcttcatattcctacaagtgcatgcttcaagattactgtacttacagtgtttccaacatcttctcataaaaggggaaagcttcatagcctcaaccatgaaggaaaccagtcgcatagggcatggagctggagaactataaacagcccgtggtgctgagagaggacaactgccgaaggcgccggaggatgaagccgcgcagtgctgcggccagcctgtcctccatggagctcatccccatcgagttcgtgctgcccaccagccagcgcaaatgcaagagccccgaaacggcgctgctgcacgtggccggccacggcaacgtggagcagatgaaggcccaggtgtggctgcgagcgctggagaccagcgtggcggcggacttctaccaccggctgggaccgcatcacttcctcctgctctatcagaagaaggggcagtggtacgagatctacgacaagtaccaggtggtgcagactctggactgcctgcgctactggaaggccacgcaccggagcccgggccagatccacctggtgcagcggcacccgccctccgaggagtcccaagccttccagcggcagctcacggcgctgattggctatgacgtcactgacgtcagcaacgtgcacgacgatgagctggagttcacgcgccgtggcttggtgaccccgcgcatggcggaggtggccagccgcgaccccaagctctacgccatgcacccgtgggtgacgtccaagcccctcccggagtacctgtggaagaagattgccaacaactgcatcttcatcgtcattcaccgcagcaccaccagccagaccattaaggtctcacccgacgacacccccggcgccatcctgcagagcttcttcaccaagatggccaagaagaaatctctgatggatattcccgaaagccaaagcgaacaggattttgtgctgcgcgtctgtggccgggatgagtacctggtgggcgaaacgcccatcaaaaacttccagtgggtgaggcactgcctcaagaacggagaagagattcacgtggtactggacacgcctccagacccggccctagacgaggtgaggaaggaagagtggccactggtggatgactgcacgggagtcaccggctaccatgagcagcttaccatccacggcaaggaccacgagagtgtgttcaccgtgtccctgtgggactgcgaccgcaagttcagggtcaagatcagaggcattgatatccccgtcctgcctcggaacaccgacctcacagtttttgtagaggcaaacatccagcatgggcaacaagtcctttgccaaaggagaaccagccccaaacccttcacagaggaggtgctgtggaatgtgtggcttgagttcagtatcaaaatcaaagacttgcccaaaggggctctactgaacctccagatctactgcggtaaagctccagcactgtccagcaaggcctctgcagagtcccccagttctgagtccaagggcaaagttcagcttctctattatgtgaacctgctgctgatagaccaccgtttcctcctgcgccgtggagaatacgtcctccacatgtggcagatatctgggaagggagaagaccaaggaagcttcaatgctgacaaactcacgtctgcaactaacccagacaaggagaactcaatgtccatctccattcttctggacaattactgccacccgatagccctgcctaagcatcagcccacccctgacccggaaggggaccgggttcgagcagaaatgcccaaccagcttcgcaagcaattggaggcgatcatagccactgatccacttaaccctctcacagcagaggacaaagaattgctctggcattttagatacgaaagccttaagcacccaaaagcatatcctaagctatttagttcagtgaaatggggacagcaagaaattgtggccaaaacataccaattgttggccagaagggaagtctgggatcaaagtgctttggatgttgggttaacaatgcagctcctggactgcaacttctcagatgaaaatgtaagagccattgcagttcagaaactggagagcttggaggacgatgatgttctgcattaccttctacaattggtccaggctgtgaaatttgaaccataccatgatagcgcccttgccagatttctgctgaagcgtggtttaagaaacaaaagaattggtcactttttgttttggttcttgagaagtgagatagcccagtccagacactatcagcagaggttcgctgtgattctggaagcctatctgaggggctgtggcacagccatgctgcacgactttacccaacaagtccaagtaatcgagatgttacaaaaagtcacccttgatattaaatcgctctctgctgaaaagtatgacgtcagttcccaagttatttcacaacttaaacaaaagcttgaaaacctgcagaattctcaactccccgaaagctttagagttccatatgatcctggactgaaagcaggagcgctggcaattgaaaaatgtaaagtaatggcctccaagaaaaaaccactatggcttgagtttaaatgtgccgatcctacagccctatcaaatgaaacaattggaattatctttaaacatggtgatgatctgcgccaagacatgcttattttacagattctacgaatcatggagtctatttgggagactgaatctttggatctatgcctcctgccatatggttgcatttcaactggtgacaaaataggaatgatcgagattgtgaaagacgccacgacaattgccaaaattcagcaaagcacagtgggcaacacgggagcatttaaagatgaagtcctgaatcactggctcaaagaaaaatcccctactgaagaaaagtttcaggcagcagtggagagatttgtttattcctgtgcaggctactgtgtggcaacctttgttcttggaataggcgacagacacaatgacaatattatgatcaccgagacaggaaacctatttcatattgacttcgggcacattcttgggaattacaaaagtttcctgggcattaataaagagagagtgccatttgtgctaacccctgacttcctctttgtgatgggaacttctggaaagaagacaagcccacacttccagaaatttcaggacatctgtgttaaggcttatctagcccttcgtcatcacacaaacctactgatcatcctgttctccatgatgctgatgacaggaatgccccagttaacaagcaaagaagacattgaatatatccgggatgccctcacagtggggaaaaatgaggaggatgctaaaaagtattttcttgatcagatcgaagtttgcagagacaaaggatggactgtgcagtttaattggtttctacatcttgttcttggcatcaaacaaggagagaaacattcagcctaatactttaggctagaatcaaaaacaagttagtgttctatggtttaaattagcatagcaatcatcgaacttggatttcaaatgcaatagacattgtgaaagctggcatttcagaagtatagctcttttcctacctgaactcttccctggagaaaagatgttggcattgctgattgtttggttaagcaatgtccagtgctaggattatttgcaggtttggttttttctcatttgtctgtggcattggagaatattctcggtttaaacagactaatgacttccttattgtccctgatattttgactatcttactattgagtgcttctggaaattctttggaataattgatgacatctattttcatctgggtttagtctcaattttggttatctttgtgttcctcaagctctttaaagaaaaagatgtaatcgttgtaacctttgtctcattccttaaatgatgcttccaaacatctccttagtgtctgcaggtgttagtggtgtgctaaaagcaaggaaagcgagttagtcttttcagtgtcttttgcaattcaattcttttgtcatgtataactgagacacacaaacacagcaggagaaatctaaaccgttgtgccttgaccttcctctgctggtcttgttccagggttatgaatatgaaaaaatagagatgagactttttgtgtcaactctgtccacaagagtgagttatctagtatgattagtatagctttctccagcatggcagcaggaagtaactacagggcctcttttatgcctgacatttcttcccttcctttttccctgcctccctttttcatcaattgcgatgctcccacaactctttacagacttgtgaaatcttcaagaacacctttactctataactcaaaaattagttgaaaaataattacttctcaaggattattagaatcttaggtacttatttgtaaagatgtttagtgacttttttttcaagtatcttattaaaggaggcattctagaaaatatgaattagtttccaaatgccttaattttaaactttggcctgaacagttttttctttttcttaatggaagaagatatttaatatcttaaaaatattccaagttaggaagaacactacttgccttatccatttcccatttaaaggacttttaaactttgacacatccttcagatttcctgaaaataattgaaatatcttactttaaaaatattttcatctctgaaatatctcgttatttattggaggtattgtttaaccttagagagaccattaaattatttataaaatattttgtaattacctgtagctaatacattacatagaaaaaaactatgttaacagtgtctctgtttaagtataatcagatataaatatatacttaattttttaattttaaaaatagatacctgtttgactttgaggtagtccagaccttttctttttttttttttttttaatgtgtgcaaaagcccaaaggttcctaagcctggctgcaaagaagaatcaacagggacactttttaaaaacactcttatcagcctgggcaacacagtgagactccatctcttaaaaaaaaaattagctgggtatagtggtatgtgcctgtagtcccaggtactcaggaggctgaggcaggaggattgcctgagcccaggaggtggaaactgcagagagtcatgatcatgtccttacactccagcctggataacagagcgagaccctgtctcaaaaaaataaaataaaaaataaaaa

SEQ ID NO: 165198 - DNA, 3828 bp, Homo sapiens
  Payload ID: 12529
  Gene Symbol: PIK3CG
  Gene Name: phosphatidylinositol-4,5-bisphosphate 3-kinase, catalytic subunit gamma
  Uniprot ID: P48736
  ENST ID: ENST00000440650
  CDS Start-End: 86-3394
aactgcaacacttcctctgcatctggatatgaagggagccccagaaaagcggaagaatttagacgcacactgggtcgcatagggcatggagctggagaactataaacagcccgtggtgctgagagaggacaactgccgaaggcgccggaggatgaagccgcgcagtgctgcggccagcctgtcctccatggagctcatccccatcgagttcgtgctgcccaccagccagcgcaaatgcaagagccccgaaacggcgctgctgcacgtggccggccacggcaacgtggagcagatgaaggcccaggtgtggctgcgagcgctggagaccagcgtggcggcggacttctaccaccggctgggaccgcatcacttcctcctgctctatcagaagaaggggcagtggtacgagatctacgacaagtaccaggtggtgcagactctggactgcctgcgctactggaaggccacgcaccggagcccgggccagatccacctggtgcagcggcacccgccctccgaggagtcccaagccttccagcggcagctcacggcgctgattggctatgacgtcactgacgtcagcaacgtgcacgacgatgagctggagttcacgcgccgtggcttggtgaccccgcgcatggcggaggtggccagccgcgaccccaagctctacgccatgcacccgtgggtgacgtccaagcccctcccggagtacctgtggaagaagattgccaacaactgcatcttcatcgtcattcaccgcagcaccaccagccagaccattaaggtctcacccgacgacacccccggcgccatcctgcagagcttcttcaccaagatggccaagaagaaatctctgatggatattcccgaaagccaaagcgaacaggattttgtgctgcgcgtctgtggccgggatgagtacctggtgggcgaaacgcccatcaaaaacttccagtgggtgaggcactgcctcaagaacggagaagagattcacgtggtactggacacgcctccagacccggccctagacgaggtgaggaaggaagagtggccactggtggatgactgcacgggagtcaccggctaccatgagcagcttaccatccacggcaaggaccacgagagtgtgttcaccgtgtccctgtgggactgcgaccgcaagttcagggtcaagatcagaggcattgatatccccgtcctgcctcggaacaccgacctcacagtttttgtagaggcaaacatccagcatgggcaacaagtcctttgccaaaggagaaccagccccaaacccttcacagaggaggtgctgtggaatgtgtggcttgagttcagtatcaaaatcaaagacttgcccaaaggggctctactgaacctccagatctactgcggtaaagctccagcactgtccagcaaggcctctgcagagtcccccagttctgagtccaagggcaaagttcagcttctctattatgtgaacctgctgctgatagaccaccgtttcctcctgcgccgtggagaatacgtcctccacatgtggcagatatctgggaagggagaagaccaaggaagcttcaatgctgacaaactcacgtctgcaactaacccagacaaggagaactcaatgtccatctccattcttctggacaattactgccacccgatagccctgcctaagcatcagcccacccctgacccggaaggggaccgggttcgagcagaaatgcccaaccagcttcgcaagcaattggaggcgatcatagccactgatccacttaaccctctcacagcagaggacaaagaattgctctggcattttagatacgaaagccttaagcacccaaaagcatatcctaagctatttagttcagtgaaatggggacagcaagaaattgtggccaaaacataccaattgttggccagaagggaagtctgggatcaaagtgctttggatgttgggttaacaatgcagctcctggactgcaacttctcagatgaaaatgtaagagccattgcagttcagaaactggagagcttggaggacgatgatgttctgcattaccttctacaattggtccaggctgtgaaatttgaaccataccatgatagcgcccttgccagatttctgctgaagcgtggtttaagaaacaaaagaattggtcactttttgttttggttcttgagaagtgagatagcccagtccagacactatcagcagaggttcgctgtgattctggaagcctatctgaggggctgtggcacagccatgctgcacgactttacccaacaagtccaagtaatcgagatgttacaaaaagtcacccttgatattaaatcgctctctgctgaaaagtatgacgtcagttcccaagttatttcacaacttaaacaaaagcttgaaaacctgcagaattctcaactccccgaaagctttagagttccatatgatcctggactgaaagcaggagcgctggcaattgaaaaatgtaaagtaatggcctccaagaaaaaaccactatggcttgagtttaaatgtgccgatcctacagccctatcaaatgaaacaattggaattatctttaaacatggtgatgatctgcgccaagacatgcttattttacagattctacgaatcatggagtctatttgggagactgaatctttggatctatgcctcctgccatatggttgcatttcaactggtgacaaaataggaatgatcgagattgtgaaagacgccacgacaattgccaaaattcagcaaagcacagtgggcaacacgggagcatttaaagatgaagtcctgaatcactggctcaaagaaaaatcccctactgaagaaaagtttcaggcagcagtggagagatttgtttattcctgtgcaggctactgtgtggcaacctttgttcttggaataggcgacagacacaatgacaatattatgatcaccgagacaggaaacctatttcatattgacttcgggcacattcttgggaattacaaaagtttcctgggcattaataaagagagagtgccatttgtgctaacccctgacttcctctttgtgatgggaacttctggaaagaagacaagcccacacttccagaaatttcaggacatctgtgttaaggcttatctagcccttcgtcatcacacaaacctactgatcatcctgttctccatgatgctgatgacaggaatgccccagttaacaagcaaagaagacattgaatatatccgggatgccctcacagtggggaaaaatgaggaggatgctaaaaagtattttcttgatcagatcgaagtttgcagagacaaaggatggactgtgcagtttaattggtttctacatcttgttcttggcatcaaacaaggagagaaacattcagcctaatactttaggctagaatcaaaaacaagttagtgttctatggtttaaattagcatagcaatcatcgaacttggatttcaaatgcaatagacattgtgaaagctggcatttcagaagtatagctcttttcctacctgaactcttccctggagaaaagatgttggcattgctgattgtttggttaagcaatgtccagtgctaggattatttgcaggtttggttttttctcatttgtctgtggcattggagaatattctcggtttaaacagactaatgacttccttattgtccctgatattttgactatcttactattgagtgcttctggaaattctttggaataattgatgacatctattttcatctgggtttagtctcaattttggttatctttgtgttcctcaagctctttaaagaaaaagatgtaatcgttgtaa

SEQ ID NO: 165199 - DNA, 821 bp, Homo sapiens
  Payload ID: 12529
  Gene Symbol: PIK3CG
  Gene Name: phosphatidylinositol-4,5-bisphosphate 3-kinase, catalytic subunit gamma
  ENST ID: ENST00000473541
  CDS Start-End: 275-821
gacgcacactgggtaggtttgaatttgttttgttttcaaaaattaaacaaatgatccttcagcatcatcgcctccgctgctttatcaggctgtgaaatttgaaccataccatgatagcgcccttgccagatttctgctgaagcgtggtttaagaaacaaaagaattggtcactttttgttttggttcttgagaagtgagatagcccagtccagacactatcagcagaggttcgctgtgattctggaagcctatctgaggggctgtggcacagccatgctgcacgactttacccaacaagtccaagtaatcgagatgttacaaaaagtcacccttgatattaaatcgctctctgctgaaaagtatgacgtcagttcccaagttatttcacaacttaaacaaaagcttgaaaacctgcagaattctcaactccccgaaagctttagagttccatatgatcctggactgaaagcaggagcgctggcaattgaaaaatgtaaagtaatggcctccaagaaaaaaccactatggcttgagtttaaatgtgccgatcctacagccctatcaaatgaaacaattggaattatctttaaacatggtgatgatctgcgccaagacatgcttattttacagattctacgaatcatggagtctatttgggagactgaatctttggatctatgcctcctgccatatggttgcatttcaactggtgacaaaataggaatgatcgagattgtgaaagacgccacgacaattgccaaaattcagcaaagcacagtgggcaacacgggagcatttaaagatgaagtcctgaatcact

SEQ ID NO: 165200 - DNA, 5197 bp, Homo sapiens
  Payload ID: 12529
  Gene Symbol: PIK3CG
  Gene Name: phosphatidylinositol-4,5-bisphosphate 3-kinase, catalytic subunit gamma
  Uniprot ID: P48736
  ENST ID: ENST00000496166
  CDS Start-End: 144-3452
gcatctggatatgaagggagccccagaaaagcggaagaatttagacgcacactgggtaggtttgaatttgttttgttttcaaaaattaaacaaatgatccttcagcatcatcgcctccgctgctttatcaggtcgcatagggcatggagctggagaactataaacagcccgtggtgctgagagaggacaactgccgaaggcgccggaggatgaagccgcgcagtgctgcggccagcctgtcctccatggagctcatccccatcgagttcgtgctgcccaccagccagcgcaaatgcaagagccccgaaacggcgctgctgcacgtggccggccacggcaacgtggagcagatgaaggcccaggtgtggctgcgagcgctggagaccagcgtggcggcggacttctaccaccggctgggaccgcatcacttcctcctgctctatcagaagaaggggcagtggtacgagatctacgacaagtaccaggtggtgcagactctggactgcctgcgctactggaaggccacgcaccggagcccgggccagatccacctggtgcagcggcacccgccctccgaggagtcccaagccttccagcggcagctcacggcgctgattggctatgacgtcactgacgtcagcaacgtgcacgacgatgagctggagttcacgcgccgtggcttggtgaccccgcgcatggcggaggtggccagccgcgaccccaagctctacgccatgcacccgtgggtgacgtccaagcccctcccggagtacctgtggaagaagattgccaacaactgcatcttcatcgtcattcaccgcagcaccaccagccagaccattaaggtctcacccgacgacacccccggcgccatcctgcagagcttcttcaccaagatggccaagaagaaatctctgatggatattcccgaaagccaaagcgaacaggattttgtgctgcgcgtctgtggccgggatgagtacctggtgggcgaaacgcccatcaaaaacttccagtgggtgaggcactgcctcaagaacggagaagagattcacgtggtactggacacgcctccagacccggccctagacgaggtgaggaaggaagagtggccactggtggatgactgcacgggagtcaccggctaccatgagcagcttaccatccacggcaaggaccacgagagtgtgttcaccgtgtccctgtgggactgcgaccgcaagttcagggtcaagatcagaggcattgatatccccgtcctgcctcggaacaccgacctcacagtttttgtagaggcaaacatccagcatgggcaacaagtcctttgccaaaggagaaccagccccaaacccttcacagaggaggtgctgtggaatgtgtggcttgagttcagtatcaaaatcaaagacttgcccaaaggggctctactgaacctccagatctactgcggtaaagctccagcactgtccagcaaggcctctgcagagtcccccagttctgagtccaagggcaaagttcagcttctctattatgtgaacctgctgctgatagaccaccgtttcctcctgcgccgtggagaatacgtcctccacatgtggcagatatctgggaagggagaagaccaaggaagcttcaatgctgacaaactcacgtctgcaactaacccagacaaggagaactcaatgtccatctccattcttctggacaattactgccacccgatagccctgcctaagcatcagcccacccctgacccggaaggggaccgggttcgagcagaaatgcccaaccagcttcgcaagcaattggaggcgatcatagccactgatccacttaaccctctcacagcagaggacaaagaattgctctggcattttagatacgaaagccttaagcacccaaaagcatatcctaagctatttagttcagtgaaatggggacagcaagaaattgtggccaaaacataccaattgttggccagaagggaagtctgggatcaaagtgctttggatgttgggttaacaatgcagctcctggactgcaacttctcagatgaaaatgtaagagccattgcagttcagaaactggagagcttggaggacgatgatgttctgcattaccttctacaattggtccaggctgtgaaatttgaaccataccatgatagcgcccttgccagatttctgctgaagcgtggtttaagaaacaaaagaattggtcactttttgttttggttcttgagaagtgagatagcccagtccagacactatcagcagaggttcgctgtgattctggaagcctatctgaggggctgtggcacagccatgctgcacgactttacccaacaagtccaagtaatcgagatgttacaaaaagtcacccttgatattaaatcgctctctgctgaaaagtatgacgtcagttcccaagttatttcacaacttaaacaaaagcttgaaaacctgcagaattctcaactccccgaaagctttagagttccatatgatcctggactgaaagcaggagcgctggcaattgaaaaatgtaaagtaatggcctccaagaaaaaaccactatggcttgagtttaaatgtgccgatcctacagccctatcaaatgaaacaattggaattatctttaaacatggtgatgatctgcgccaagacatgcttattttacagattctacgaatcatggagtctatttgggagactgaatctttggatctatgcctcctgccatatggttgcatttcaactggtgacaaaataggaatgatcgagattgtgaaagacgccacgacaattgccaaaattcagcaaagcacagtgggcaacacgggagcatttaaagatgaagtcctgaatcactggctcaaagaaaaatcccctactgaagaaaagtttcaggcagcagtggagagatttgtttattcctgtgcaggctactgtgtggcaacctttgttcttggaataggcgacagacacaatgacaatattatgatcaccgagacaggaaacctatttcatattgacttcgggcacattcttgggaattacaaaagtttcctgggcattaataaagagagagtgccatttgtgctaacccctgacttcctctttgtgatgggaacttctggaaagaagacaagcccacacttccagaaatttcaggacatctgtgttaaggcttatctagcccttcgtcatcacacaaacctactgatcatcctgttctccatgatgctgatgacaggaatgccccagttaacaagcaaagaagacattgaatatatccgggatgccctcacagtggggaaaaatgaggaggatgctaaaaagtattttcttgatcagatcgaagtttgcagagacaaaggatggactgtgcagtttaattggtttctacatcttgttcttggcatcaaacaaggagagaaacattcagcctaatactttaggctagaatcaaaaacaagttagtgttctatggtttaaattagcatagcaatcatcgaacttggatttcaaatgcaatagacattgtgaaagctggcatttcagaagtatagctcttttcctacctgaactcttccctggagaaaagatgttggcattgctgattgtttggttaagcaatgtccagtgctaggattatttgcaggtttggttttttctcatttgtctgtggcattggagaatattctcggtttaaacagactaatgacttccttattgtccctgatattttgactatcttactattgagtgcttctggaaattctttggaataattgatgacatctattttcatctgggtttagtctcaattttggttatctttgtgttcctcaagctctttaaagaaaaagatgtaatcgttgtaacctttgtctcattccttaaatgatgcttccaaacatctccttagtgtctgcaggtgttagtggtgtgctaaaagcaaggaaagcgagttagtcttttcagtgtcttttgcaattcaattcttttgtcatgtataactgagacacacaaacacagcaggagaaatctaaaccgttgtgccttgaccttcctctgctggtcttgttccagggttatgaatatgaaaaaatagagatgagactttttgtgtcaactctgtccacaagagtgagttatctagtatgattagtatagctttctccagcatggcagcaggaagtaactacagggcctcttttatgcctgacatttcttcccttcctttttccctgcctccctttttcatcaattgcgatgctcccacaactctttacagacttgtgaaatcttcaagaacacctttactctataactcaaaaattagttgaaaaataattacttctcaaggattattagaatcttaggtacttatttgtaaagatgtttagtgacttttttttcaagtatcttattaaaggaggcattctagaaaatatgaattagtttccaaatgccttaattttaaactttggcctgaacagttttttctttttcttaatggaagaagatatttaatatcttaaaaatattccaagttaggaagaacactacttgccttatccatttcccatttaaaggacttttaaactttgacacatccttcagatttcctgaaaataattgaaatatcttactttaaaaatattttcatctctgaaatatctcgttatttattggaggtattgtttaaccttagagagaccattaaattatttataaaatattttgtaattacctgtagctaatacattacatagaaaaaaactatgttaacagtgtctctgtttaagtataatcagatataaatatatacttaattttttaattttaaaaatagatacctgtttgactttgaggtagtccagaccttttctttttttttttttttttaatgtgtgcaaaagcccaaaggttcctaagcctggctgcaaagaagaatcaacagggacactttttaaaaacactcttatcagcctgggcaacacagtgagactccatctcttaaaaaaaaaattagctgggtatagtggtatgtgcctgtagtcccaggtactcaggaggctgaggcaggaggattgcctgagcccaggaggtggaaactgcagagagtcatgatcatgtccttacactccagcctggataacagagcgagaccctgtctcaaaaaaataaaa

SEQ ID NO: 165201 - DNA, 8227 bp, Homo sapiens
  Payload ID: 12530
  Gene Symbol: PIK3C2A
  Gene Name: phosphatidylinositol-4-phosphate 3-kinase, catalytic subunit type 2 alpha
  Uniprot ID: O00443
  ENST ID: ENST00000265970
  CDS Start-End: 1-5061
atggctcagatatctagcaacagcggatttaaagaatgtccatcttcacatccggaaccaacaagagcaaaagatgtggacaaagaagaagcattacagatggaagcagaggctttagcaaaactgcaaaaggatagacaagtgactgacaatcagagaggctttgagttgtcaagcagcaccagaaaaaaagcacaggtttataacaagcaggattatgatctcatggtgtttcctgaatcagattcccaaaaaagagcattagatattgatgtagaaaagctcacccaagctgaacttgagaaactattgctggatgacagtttcgagactaaaaaaacacctgtattaccagttactcctattctgagcccttccttttcagcacagctctattttagacctactattcagagaggacagtggccacctggattacctgggccttccacttatgctttaccttctatttatccttctacttacagtaaacaggctgcattccaaaatggcttcaatccaagaatgcccacttttccatctacagaacctatatatttaagtcttccgggacaatctccatatttctcatatcctttgacacctgccacaccctttcatccacaaggaagcttacctatctatcgtccagtagtcagtactgacatggcaaaactatttgacaaaatagctagtacatcagaatttttaaaaaatgggaaagcaaggactgatttggagataacagattcaaaagtcagcaatctacaggtatctccaaagtctgaggatatcagtaaatttgactggttagacttggatcctctaagtaagcctaaggtggataatgtggaggtattagaccatgaggaagagaaaaatgtttcaagtttgctagcaaaggatccttgggatgctgttcttcttgaagagagatcgacagcaaattgtcatcttgaaagaaaggtgaatggaaaatccctttctgtggcaactgttacaagaagccagtctttaaatattcgaacaactcagcttgcaaaagcccagggccatatatctcagaaagacccaaatgggaccagtagtttgccaactggaagttctcttcttcaagaagttgaagtacagaatgaggagatggcagctttttgtcgatccattacaaaattgaagaccaaatttccatataccaatcaccgcacaaacccaggctatttgttaagtccagtcacagcacaaagaaacatatgcggagaaaatgctagtgtgaaggtctccattgacattgaaggatttcagctaccagttacttttacgtgtgatgtgagttctactgtagaaatcattataatgcaagccctttgctgggtacatgatgacttgaatcaagtagatgttggcagctatgttctaaaagtttgtggtcaagaggaagtgctgcagaataatcattgccttggaagtcatgagcatattcaaaactgtcgaaaatgggacacagaaattagactacaactcttgaccttcagtgcaatgtgtcaaaatctggcccgaacagcagaagatgatgaaacacccgtggatttaaacaaacacctgtatcaaatagaaaaaccttgcaaagaagccatgacgagacaccctgttgaagaactcttagattcttatcacaaccaagtagaactggctcttcaaattgaaaaccaacaccgagcagtagatcaagtaattaaagctgtaagaaaaatctgtagtgctttagatggtgtcgagactcttgccattacagaatcagtaaagaagctaaagagagcagttaatcttccaaggagtaaaactgctgatgtgacttctttgtttggaggagaagacactagcaggagttcaactaggggctcacttaatcctgaaaatcctgttcaagtaagcataaaccaattaactgcagcaatttatgatcttctcagactccatgcaaattctggtaggagtcctacagactgtgcccaaagtagcaagagtgtcaaggaagcatggactacaacagagcagctccagtttactatttttgctgctcatggaatttcaagtaattgggtatcaaattatgaaaaatactacttgatatgttcactgtctcacaatggaaaggatctttttaaacctattcaatcaaagaaggttggcacttacaagaatttcttctatcttattaaatgggatgaactaatcatttttcctatccagatatcacaattgccattagaatcagttcttcaccttactctttttggaattttaaatcagagcagtggaagttcccctgattctaataagcagagaaagggaccagaagctttgggcaaagtttctttacctctttttgactttaaacggtttttaacatgtggaactaaacttctatatctttggacttcatcacatacaaattctgttcctggaacagttaccaaaaaaggatatgtcatggaaagaatagtgctacaggttgattttccttctcctgcatttgatattatttatacaactcctcaagttgacagaagcattatacagcaacataacttagaaacactagagaatgatataaaagggaaacttcttgatattcttcataaagactcatcacttggactttctaaagaagataaagcttttttatgggagaaacgttattattgcttcaaacacccaaattgtcttcctaaaatattagcaagcgccccaaactggaaatgggttaatcttgccaaaacttactcattgcttcaccagtggcctgcattgtacccactaattgcattggaacttcttgattcaaaatttgctgatcaggaagtaagatccctagctgtgacctggattgaggccattagtgatgatgagctaacagatcttcttccacagtttgtacaagctttgaaatatgaaatttacttgaatagttcattagtgcaattccttttgtccagggcattgggaaatatccagatagcacacaatttatattggcttctcaaagatgccctgcatgatgtacagtttagtacccgatacgaacatgttttgggtgctctcctgtcagtaggaggaaaacgacttagagaagaacttctaaaacagacgaaacttgtacagcttttaggaggagtagcagaaaaagtaaggcaggctagtggatcagccagacaggttgttctccaaagaagtatggaacgagtacagtccttttttcagaaaaataaatgccgtctccctctcaagccaagtctagtggcaaaagaattaaatattaagtcgtgttccttcttcagttctaatgctgtccccctaaaagtcacaatggtgaatgctgaccctatgggagaagaaattaatgtcatgtttaaggttggtgaagatcttcggcaagatatgttagctttacagatgataaagattatggataagatctggcttaaagaaggactagatctgaggatggtaattttcaaatgtctctcaactggcagagatcgaggcatggtggagctggttcctgcttccgataccctcaggaaaatccaagtggaatatggtgtgacaggatcctttaaagataaaccacttgcagagtggctaaggaaatacaatccctctgaagaagaatatgaaaaggcttcagagaactttatctattcctgtgctggatgctgtgtagccacctatgttttaggcatctgtgatcgacacaatgacaatataatgcttcgaagcacgggacacatgtttcacattgactttggaaagtttttgggacatgcacagatgtttggcagcttcaaaagggatcgggctccttttgtgctgacctctgatatggcatatgtcattaatgggggtgaaaagcccaccattcgttttcagttgtttgtggacctctgctgtcaggcctacaacttgataagaaagcagacaaacctttttcttaacctcctttcactgatgattccttcagggttaccagaacttacaagtattcaagatttgaaatacgttagagatgcacttcaaccccaaactacagacgcagaagctacaattttctttactaggcttattgaatcaagtttgggaagcattgccacaaagtttaacttcttcattcacaaccttgctcagcttcgtttttctggtcttccttctaatgatgagcccatcctttcattttcacctaaaacatactcctttagacaagatggtcgaatcaaggaagtctctgtttttacatatcataagaaatacaacccagataaacattatatttatgtagtccgaattttgagggaaggacagattgaaccatcatttgtcttccgaacatttgacgaatttcaggaacttcacaataagctcagtattatttttccactttggaagttaccaggctttcctaataggatggttctaggaagaacacacataaaagatgtagcagccaaaaggaaaattgagttaaacagttacttacagagtttgatgaatgcttcaacggatgtagcagagtgtgatcttgtttgtactttcttccaccctttacttcgtgatgagaaagctgaagggatagctaggtctgcagatgcaggttccttcagtcctactccaggccaaataggaggagctgtgaaattatccatctcttaccgaaatggtactcttttcatcatggtgatgcatatcaaagatcttgttactgaagatggagctgacccaaatccatatgtcaaaacatacctacttccagataaccacaaaacatccaaacgtaaaaccaaaatttcacgaaaaacgaggaatccgacattcaatgaaatgcttgtatacagtggatatagcaaagaaaccctaagacagcgagaacttcaactaagtgtactcagtgcagaatctctgcgggagaattttttcttgggtggagtaaccctgcctttgaaagatttcaacttgagcaaagagacggttaaatggtatcagctgactgcggcaacatacttgtaaactagtgaatgtttgagctttggaagcatgaacagttataaacgtgcatgcatacatgcacacacacacagacacacacacacacacttgttaattttgtatagtatttttatacttggacagaacttataaagttaaatatacttgctgcatttcaacacatctgttggaccaacagtcacataactaacctttttgaatttttggaagccattgctgttttaaagtcattatgtagaatgctacaaaccctaaacttaatatatactaattcctgaaaaagactttgagacagtactatgtcagttcagccacctattttgcattgttttctataaggaggcaaagcatatgtgttttcctgttatgcaccttttatagcctttaccactgtgtaatgttcacaaacaccaaagtaaaggaaaaatgcaggatgttaccgtaaaatccagctgctattcatggagctgaaaaacaaagcacaaataatagatagctaagttaagaactactaagtagtttatagaagtagggaaaaacgtaatactgctttttattcatgtctttaaagcctttttcagaataagtgccaatcactgatgttgtaaataatggtgccttaactttatatgcttccctggcacttcgtttctgatttttttcctgatttgataaataattagtacatagttttcactcacttgcagcttactaaagacaagaaattatgtacatgtactaatgtttttcccacaaaaaaatcctttacttctgatgtatgaattagttatctaaatagttaagcctaatacctgaataagactcaccaatgtgattgtacaataaattctatcattccattaaaatcctacatttattcccaggaatggtaatttcacctccctacatctatactccactccctcagtaaataagtgaaaattgttaacccatgtgcccattcctgagtagggcagactcttcacaagaggcccatgacaagaattctagggtccagattgaactttaatatagacctttgtctgtgtagaccagtttgtcttgtaaactgtcttacttatgtgtgtaaacattttacattcacatgaaaagttattttcctttatataattggattcagaatcataagggacaggactgaaattattctacagtaaccagtaagaataagattcggccgggcacggtggctcctgcctgtaatcccaacactttgggaggccaaggtgggcggatcacctgaggtcaggagtttgagaccagcctggccaacatggtgaaaccccgtctctacacaaaaattagccaggcgtggtagcgggcatctgtaatcccagctacttggggggctgaggcaggagaatcgcttgaacccaggaggcggaggttgcagtgagccgagatcacgccactgcactcccgcctgggtgacaagagcaaaactccatcttaaaaaaaaagaaaaaaagagtaagattcatttttattagttactcaacttcagacacaattttgttaatttggatatatacatatatataataagaactcatggttagaatagaaatacagatactttaaaaatggtaatagaaattgtaccaatcaggttgctgtgagaaaactgacaaaatatgcaataaagaataccaagagagaaaggacaatcgccaattcagtttcccagaacagaatttttatgaactgcacaaatgtttaatgtaaatggtgatacctacagggaagaaatagaagagttgataatatatcactgggacggggtgggggaaagacttgaaatttttggtgcctaacactaatggtccatatgtagttaaacccatgagtatggtatatgaatgtcttttttaaatgttaaaatgtgttgtctatttaatgttaattaaaatgcagatcaaagcaccaccatttgctttttccacagatcattaacatttccttaaagtatgtaagtacctttgcaaatgcaaatgtactagtaattttcacttaagcttttgagaccgaattccattccaccagttatcacttagccactgtaatttaaaaacaaacaaacaaacaaaaactgtcttggtagaggtcgttaattagactcaacatgtactgcctttttgcagtctattatgacagtgtcttttagcacaaataatagagctaaaaaatgtcctgtcacttccattataagaaatctggattcatatctaagtgtatattataatactgtacagttaagagttcagaacaagtggtaatgttttctcttaatttaactcattttgtgccttctttactcattcaaacacacatacattttacatatagtttatttctttatgaaatgctaatcttcagcccgtaccaaaaagtagagtggagcctctttgcactactactatcaataaattttaaatcagttggatttttaagcattttttaaaagctgacattaaagtaaatctaaaaaaagtttaacaaactggccaagacactaatttttatgtataatcacaatattttatactcacctttattgactaaaaataattatgctacatgttgtcctgcatcagaagaattatttcttcttgccagtgttttgggatttgaagataatggttcactcaaagaacctattattttctctactgaggaacccaatgtagaacttgcactgatatttttattactgcctttatatgaatctataggtatctaaatgttaaggcatgtatgatctttgatcatttcttttttcaaattaaagttgtataaaagtttcaatatcttgccttaaattagttgcctattctttctaggattcaaatattgtgacatttaaaaaagaaaacattcacttttgaaacttagacttcagatcaaaaaggactgaacccccactatcataatccatacattcatttccatgttgtttgactagcagtgcatatatgaatgaatatggtaattaatcttacctataagaaccaaatactttaattatattaagatagtgaataaagatgtataatatttttattaataccttgaatatattcagtggattgaatgtgacttcataactgtactacgattgtattaaaatatttctggaataaaagaa

SEQ ID NO: 165202 - DNA, 2101 bp, Homo sapiens
  Payload ID: 12530
  Gene Symbol: PIK3C2A
  Gene Name: phosphatidylinositol-4-phosphate 3-kinase, catalytic subunit type 2 alpha
  ENST ID: ENST00000533645
  CDS Start-End: 166-1617
tttcggcggcggctgagccagctgaggggaaaaatggctcggactgtggcggcttcggcggctcaggttgtggtagaggcggaggctcaggcagcttgaggccttgctattttggaagctacaagaaaaaaatagaggaaggaaggtttggtctttttagtggacatggctcagatatctagcaacagcggatttaaagaatgtccatcttcacatccggaaccaacaagagcaaaagatgtggacaaagaagaagcattacagatggaagcagaggctttagcaaaactgcaaaaggatagacaagtgactgacaatcagagaggctttgagttgtcaagcagcaccagaaaaaaagcacaggtttataacaagcaggattatgatctcatggtgtttcctgaatcagattcccaaaaaagagcattagatattgatgtagaaaagctcacccaagctgaacttgagaaactattgctggatgacagtttcgagactaaaaaaacacctgtattaccagttactcctattctgagcccttccttttcagcacagctctattttagacctactattcagagaggacagtggccacctggattacctgggccttccacttatgctttaccttctatttatccttctacttacagtaaacaggctgcattccaaaatggcttcaatccaagaatgcccacttttccatctacagaacctatatatttaagtcttccgggacaatctccatatttctcatatcctttgacacctgccacaccctttcatccacaaggaagcttacctatctatcgtccagtagtcagtactgacatggcaaaactatttgacaaaatagctagtacatcagaatttttaaaaaatgggaaagcaaggactgatttggagataacagattcaaaagtcagcaatctacaggtatctccaaagtctgaggatatcagtaaatttgactggttagacttggatcctctaagtaagcctaaggtggataatgtggaggtattagaccatgaggaagagaaaaatgtttcaagtttgctagcaaaggatccttgggatgctgttcttcttgaagagagatcgacagcaaattgtcatcttgaaagaaaggtgaatggaaaatccctttctgtggcaactgttacaagaagccagtctttaaatattcgaacaactcagcttgcaaaagcccagggccatatatctcagaaagacccaaatgggaccagtagtttgccaactggaagttctcttcttcaagaagttgaagtacagaatgaggagatggcagctttttgtcgatccattacaaaattgaagaccaaatttccatataccaatcaccgcacaaacccaggctatttgttaagtccagtcacagcacaaagaaacatatgcggagaaaatgctagtgtgaaggtctccattgacattgaaggatttcagctaccagttacttttacgtgtgatgtgagttctactgtagaaatcattataatgcaagccctttgctgggtacatgatgacttgaatcaagtagatgttggcagctatgttctaaaagtttgtggtcaagaggaagtgctgcagaagtaagtttatttaactactgagcaacatccttggaaatttcatttttaatggtttaatctagaaaaatttcaagttaaatttataatgcagaaatacattggatcctattgaattgatttattgaatcaataaacttttattgaaatatataatgtctaagatgtcatgtctaagacagtggtggggtttcagagataagtgagacattgtattcccttaaggagcttgtagtctttacaggaagagtttcaggcagttggttaataagtgatataatgggtctttcttactgtaaagagtcaatagtcacatcattatagactatattcctcttgcaacatgcactgttactttatgcacagtagtcagctgtgatttccttttagttgcctgaaataatcattatatgaatctttttcttacccaggagaattggttgaaaccgggaggcagaggttgcagtgagctgagatcacactgctgcagt

SEQ ID NO: 165203 - DNA, 584 bp, Homo sapiens
  Payload ID: 12530
  Gene Symbol: PIK3C2A
  Gene Name: phosphatidylinositol-4-phosphate 3-kinase, catalytic subunit type 2 alpha
  ENST ID: ENST00000532035
  CDS Start-End: 195-584
agctttcggcggcggctgagccagctgaggggaaaaatggctcggactgtggcggcttcggcggctcaggttgtggtagaggcggaggctcaggcagcttgaggtttatttgtacaaatagcacaggaggccttgctattttggaagctacaagaaaaaaatagaggaaggaaggtttggtctttttagtggacatggctcagatatctagcaacagcggatttaaagaatgtccatcttcacatccggaaccaacaagagcaaaagatgtggacaaagaagaagcattacagatggaagcagaggctttagcaaaactgcaaaaggatagacaagtgactgacaatcagagaggctttgagttgtcaagcagcaccagaaaaaaagcacaggtttataacaagcaggattatgatctcatggtgtttcctgaatcagattcccaaaaaagagcattagatattgatgtagaaaagctcacccaagctgaacttgagaaactattgctggatgacagtttcgagactaaaaaaacacctgtattaccagttactcctattctgagcccttccttttcagcacag

SEQ ID NO: 165204 - DNA, 830 bp, Homo sapiens
  Payload ID: 12531
  Gene Symbol: PIK3C2B
  Gene Name: phosphatidylinositol-4-phosphate 3-kinase, catalytic subunit type 2 beta
  ENST ID: ENST00000367184
  CDS Start-End: 310-830
acatccctagagctcagggatttttaaaggccctgctctgagaggtggggctgttcccgctatttatagggactgggagattcctgttcccagctctgagttcctcacacccagctgggcctgctcactgagtcagggcaccctggtaggtggtcacctctgtcactccttctctctcctgcctcccctactccctcacccttccccatcccctgcatgtcatcagagttctgagacagagctcagcccagaatctccttgaagaagcggacacaaagcaaaaagctcttgccagttctgagtggggaaatgcggccttggtcctccccggctcagcttgttgcaggggctcagcctgctgggaggggggaccccttgggccctcggcctataccaccgccccgctttcgtcgggcttccagccagagggaacctccttatcccaggccagcggagccagctctggaactggctggctccaaatgccagcctgatacccctgctgccagcctctgcccggcagactcccccagccagcatcgggtgatgccaccagggcctgccagctgggcaaacgtgggctcccggccccacactgttgccaatggccatgagttgtttgaggtctcagaagagagagatgaggaggttgctgcattttgccacatgctggatatccttcgatctggctctgacatccaagactacttcctcactggctatgtctggagtgctgtcacccctagcccagagcacctcggggatgaggtcaacctgaaggtgactgtgttgtgtgacaggcttcaagaggcactcactttcacctgcaa

SEQ ID NO: 165205 - DNA, 7686 bp, Homo sapiens
  Payload ID: 12531
  Gene Symbol: PIK3C2B
  Gene Name: phosphatidylinositol-4-phosphate 3-kinase, catalytic subunit type 2 beta
  Uniprot ID: O00750
  ENST ID: ENST00000367187
  CDS Start-End: 558-5462
aaatttacttccccaaaacactgggacattgggatggaattcactcaccccaaatcatcaccctggttaaggagactaaagaatcagaagacatttgtgctttggggagcagaggccctcagggtatagagaaggaagaagagagaggttcactgtagtcctgaagcagaaataagacctgtggctgaaggaagccttagcaattcactccttcctcttcctgagaactctctgtaggaagtctcacctagcagaggcttcacagtatttcagagaagccaaagattgtttgcctctttggaaactgttatccttccatcatgactgtgtcactcctgccactgttccaccatagagatggcgtcctttgcagcaaaccgtaagttataaggatgagggaagaagagtagagggccaaaaggattccattttgaggaaaaactacagtttgccttgccaggtagaagaatcaggcgcccagacaccatgtcacaaccctccagaactgacgttggcaggaagtagagactttgttgcctgtgtcccccatcctcaccatgtcttcgactcagggcaatggggaacactggaagtccctggagtcagtgggcatcagccgcaaagagctagcgatggccgaagccctgcagatggagtatgatgccctgtcccggctccggcatgacaaggaggagaacagagccaagcagaacgcagacccctctctcatcagctgggatgagcctggggtagacttttacagcaagccagcaggaaggcggaccgacctcaagctgttacgcggtctctctggctctgatcctacccttaactacaactcactctccccacaggaagggccgcccaaccactctacctcccaagggccacagcctggctcagatccctggcccaaaggctccctgtctggagactatctctacatttttgatggttcagatgggggagtctcttcgtccccaggaccaggggacatagagggctcttgcaagaaactatccccacctcctctgcctccccgagcttctatctgggatacccctcccctgcctcccagaaaggggtccccctcatcctccaagatctcccagcccagtgacatcaacactttctctttggtcgaacaattgccgggcaaactgctagagcatcggatcctagaagaggaagaggtgctgggaggtgggggtcaggggcgcctactggggtctgtggactatgatggtatcaatgatgcaattactaggctcaacttgaaatcgacctatgatgcggagatgttgcgggatgccaccaggggctggaaggagggccgagggccgctggacttcagcaaagacacctctggaaaacccgtggccaggagcaagactatgccccctcaggtgcccccccgcacctatgcctcccgctatggcaaccgaaagaatgcgacgcctggcaagaaccgccggatttctgcagccccggtgggctcccggccccacactgttgccaatggccatgagttgtttgaggtctcagaagagagagatgaggaggttgctgcattttgccacatgctggatatccttcgatctggctctgacatccaagactacttcctcactggctatgtctggagtgctgtcacccctagcccagagcacctcggggatgaggtcaacctgaaggtgactgtgttgtgtgacaggcttcaagaggcactcactttcacctgcaactgttcctccactgtagacttgcttatctaccagaccctgtgctacacccatgatgacctgaggaatgtggacgtgggtgactttgtgctaaagccctgcgggctggaggagttcctgcagaacaagcatgccttgggcagtcatgagtacatccaatactgccgcaagtttgacattgacattcggctacagctgatggagcagaaggttgtgcgcagtgacctggcccggacggtgaatgatgaccagagcccctccaccttgaactacctcgtccatctccaagagaggcctgtcaagcagaccatcagcaggcaggccctgagtcttctgttcgacacttaccacaatgaggtggatgccttcctgctggctgatggagacttcccactgaaggctgacagggtggtccagtccgtcaaggccatctgcaacgccctggccgccgtggaaacccctgagatcaccagtgctctcaaccagctgcccccctgcccctcccgcatgcagcctaaaattcagaaggatcccagtgtcttggctgtgagggaaaaccgagagaaggtcgtggaagccctgaccgctgccatcttggacctggtggagctgtactgcaacacattcaacgcagacttccagacggcagtgcccgggagccgcaagcatgacctggtccaggaggcctgccatttcgccaggtccctggccttcactgtctatgccacccaccgcatccccatcatctgggctaccagctatgaagatttctacctctcctgctccctcagccatggcggcaaggagctgtgcagccccctgcagacccgaagagctcacttctccaagtacctcttccacctcatcgtctgggaccagcagatctgcttcccagtgcaggtgaaccggctgcctcgggagacactgctgtgtgccactctctatgctctgcccatccccccaccggggagctcctcagaggccaataagcagcggcgggtgcctgaagccctgggctgggtcactaccccactcttcaacttcaggcaggtcctgacctgtggccggaagcttctgggtttgtggccagcaacacaggaaaatcccagcgcccgttggagtgcacctaatttccaccagccagacagtgtcatcctgcagattgacttccccacctcggcctttgacatcaagttcaccagcccccctggagacaagttcagcccccgctatgagtttggcagcctccgggaagaagaccagcgcaagcttaaagacatcatgcagaaagagtccttgtactggctcactgatgctgacaagaagcgcctgtgggagaagcgatattactgccactcggaggtgagctcgctccccctggtgctcgccagcgcccccagctgggagtgggcttgcctgcctgacatctatgttctcctgaagcagtggacccacatgaaccaccaggatgccctggggctcctgcatgccaccttcccggaccaggaggtgcgtcgtatggctgtgcagtggattggctcactctcagatgctgagctgctagactacctgccccagctggtacaggccctgaagtatgaatgctacctggacagcccgttggtgcgcttcctcctgaaacgagctgtgtctgacttgagagtgactcactacttcttctggttactgaaggacggcctcaaggactctcagttcagcatccgctaccagtatctgctggcagccttactgtgctgctgtggcaaggggctgagagaagagtttaaccgccagtgctggcttgtcaatgccctggccaaactggcccagcaggtccgggaggcagccccatctgcaaggcagggaatcctccgcacgggcctggaggaggtgaagcagttctttgccctcaatggctcgtgccgcttgccactcagccccagtctgctggttaagggaattgtgcccagggactgttcctacttcaactccaatgctgtccccctcaaactctccttccaaaatgtggatcccctgggtgagaacatccgtgtcatcttcaagtgtggggacgaccttcgccaggacatgctaacgctgcagatgattcgcatcatgagcaagatctgggtccaggaggggctggacatgcgcatggtcatcttccgctgcttctccaccggccggggcagagggatggtggagatgatccctaatgctgagaccctgcgtaagatccaggtggagcatggggtgaccggctcgttcaaggaccggcccctggcagactggctgcagaaacacaaccctggggaggacgagtatgagaaggctgtggagaactttatctactcctgcgctggctgctgcgtggccacgtacgtcttgggcatctgtgaccgacataatgacaacatcatgctgaagaccactggtcacatgttccacattgattttggccgcttcctgggccatgcccagatgtttggcaacatcaagcgggaccgtgccccctttgtcttcacctcggacatggcgtatgtcatcaacgggggtgacaagccttccagccgcttccatgattttgttgacctttgctgccaagcctacaacctcattcgcaagcacacccacctcttcctcaaccttctgggcctgatgttgtcctgtgggatccctgaactctcagacctggaggacctcaagtatgtgtacgatgccctgaggcctcaggatacagaggccaatgccactacctacttcactaggttgattgagtccagcctgggcagtgtagccacaaagctcaattttttcatccataatctggctcagatgaagttcacgggctcagatgaccggctgaccctctcctttgcctcccgaacacacactctcaagagctctggccgaatcagtgatgttttcctctgccgccatgagaagatcttccaccccaacaaaggctatatatatgtggtaaaggtgatgcgagagaacactcacgaggccacctacatccagcggacctttgaggagttccaggaattacacaataagttgcggctgctcttcccttcttcccacttgcccagcttccctagtcgcttcgtgatcggccgctcccggggagaggcggtggccgagcggcggagggaggagctaaacggttacatctggcacttgatccacgcaccccctgaggtggccgagtgtgatttggtgtacaccttcttccacccactgccccgggatgagaaggctatgggcaccagcccagctcctaagtcctcagatggcacatgggcccggcccgtcggaaaggtgggaggggaggtgaagctgtccatctcctacaaaaacaataaactcttcatcatggtgatgcatattcggggcttgcaactgctccaggatggaaatgaccctgacccctatgtgaaaatttacctccttcctgaccctcagaaaaccactaagaggaaaaccaaagtggcccggaaaacctgcaatcctacctacaatgagatgttggtatatgatgggatccccaagggtgacctgcagcagcgggagctccagctgagcgtgctgagtgagcagggattctgggagaacgtcctcctcggtgaggtgaacatccgcctgcgagagctggacctggctcaggagaagaccggctggttcgccctgggatctcgaagtcatggcaccttgtgagcccagcagagccaccacccagcatcccaggctggtggcaggagctgggggagaggactctcccctgtgagactcctccttgtgaagggccagggccctgggcaggcctccagctcggtccaggtgattctggcctctgtggtaggaggcagggagagtaagacatgctctgctgtctcttcctctggagactgaacttgggttggttgtgatgagcagccccttggaggctgtgaggttgcagcaaagttttaagtttaccttgtgtcaagggagcaatgcttggtttggggagtgtgtggggtgggctgtatgaagtagcattttgggggtgggtgggtggatatcttaatttttatttttaaaaaatgaaatagtgatgttgtcctaactgggacaggaagccttgcgagaagggacgtacctatgccccagaaggcaagagaggaagactatttggactttttgtatgattaaggttcttattggacttttccctaggttttttttttttgttattgttgttgttgtttcgttttctagctataggaactatctggggaggggcccagtgggtcctcggccagagccctctctaaggacaggttggggagggttggggagggctgcctgtgctggactgaggcttgtgccactgggcctttctgattttgcctccaaaggagagcgctgtgatacctacatgtgtaaggaagggccttccgtattggggttctgccaaggacccgtattcagggacccatgctcttttggggggacttttcctcttgtcttccctactttattaggacttgccctgaataccattttctaccccttgcccctccattctcctggcccttctgggggtcagctggtctctatgaatatgctgggggtgcttccccataggtctctcccttcatttgtctctggtgggacaaaatactgactcagtccttagatgtagtttcacccaagagcatcttggccctgggaagaggtccctaggctgcagatgctactgactgcttgctaggtagcctctggaaagcattccccatccatcactccccacttctttctgctgtgctgcttccctcccaaactccatttctgtcaccctttttataagacttttcctcattctgtggggccataaacctatttagtctggagccaaagggatgccctatctgaaggaaaggggcatggggtgggggattccatcaaaactgttgttttttgccccatgatttttctttggtcagtaggaggctggattggagtggtgattattcccctggagctaagctcaggagcccgaagggagagactgagactgactcccttatctcttcatattctttattccctaccagatggatttttttttttttttttggagacggagtctcgccctgtcgccaggctggagtgtagtggcatgatctcgactcactgcaaaatctgcctcccgggttcaagcgattctcctacctcagcctcccgagtagctgggattacaggcatgtgccaccacgccaagctaatttttgtatttttagtagagacggggtttcaccatgttggccaggatggtctcgatctcttgacctcgtgatctgcctgccttggcctcccaaagtgctgggattacaggcgtgagccaccatgccccgccccagatggattttacatttgctcttttgtgtttcgctccaaagggttgtcttcctcgccaaaaggagggagggactttgaatttgatatgaatctttaaaaccagaattggctggatatttcccatgattgggaaaagagtgaaatgaggacattctgtaaactgtccctccctaattccaaggatcagaaactccccgttttgctgactcattccataactggagaaagaagctccattgaccgaagccacagggcagcatggaagtttaaattttctctaaaattaaaatgccaaggataaagctggctgcttccaggagggggaagaggagtggggagtgggcggtgaaacttttccagatgaacggaccataaatgtgttactggctttgtgcctgtagctcattttattatgacctatatgctcctgatttaaagagatctgtgtactgtttacttcccacttcccagaatcccttgtatctcctttctcgggaattgtattttctaataaatgacatttgagaaaaaaatgaaa

SEQ ID NO: 165206 - DNA, 7522 bp, Homo sapiens
  Payload ID: 12531
  Gene Symbol: PIK3C2B
  Gene Name: phosphatidylinositol-4-phosphate 3-kinase, catalytic subunit type 2 beta
  ENST ID: ENST00000424712
  CDS Start-End: 480-5300
aagaatcagaagacatttgtgctttggggagcagaggccctcagggtatagagaaggaagaagagagaggttcactgtagtcctgaagcagaaataagacctgtggctgaaggaagccttagcaattcactccttcctcttcctgagaactctctgtaggaagtctcacctagcagaggcttcacagtatttcagagaagccaaagattgtttgcctctttggaaactgttatccttccatcatgactgtgtcactcctgccactgttccaccatagagatggcgtcctttgcagcaaaccgtaagttataaggatgagggaagaagagtagagggccaaaaggattccattttgaggaaaaactacagtttgccttgccaggtagaagaatcaggcgcccagacaccatgtcacaaccctccagaactgacgttggcaggaagtagagactttgttgcctgtgtcccccatcctcaccatgtcttcgactcagggcaatggggaacactggaagtccctggagtcagtgggcatcagccgcaaagagctagcgatggccgaagccctgcagatggagtatgatgccctgtcccggctccggcatgacaaggaggagaacagagccaagcagaacgcagacccctctctcatcagctgggatgagcctggggtagacttttacagcaagccagcaggaaggcggaccgacctcaagctgttacgcggtctctctggctctgatcctacccttaactacaactcactctccccacaggaagggccgcccaaccactctacctcccaagggccacagcctggctcagatccctggcccaaaggctccctgtctggagactatctctacatttttgatggttcagatgggggagtctcttcgtccccaggaccaggggacatagagggctcttgcaagaaactatccccacctcctctgcctccccgagcttctatctgggatacccctcccctgcctcccagaaaggggtccccctcatcctccaagatctcccagcccagtgacatcaacactttctctttggtcgaacaattgccgggcaaactgctagagcatcggatcctagaagaggaagaggtgctgggaggtgggggtcaggggcgcctactggggtctgtggactatgatggtatcaatgatgcaattactaggctcaacttgaaatcgacctatgatgcggagatgttgcgggatgccaccaggggctggaaggagggccgagggccgctggacttcagcaaagacacctctggaaaacccgtggccaggagcaagactatgccccctcaggtgcccccccgcacctatgcctcccgctatggcaaccgaaagaatgcgacgcctggcaagaaccgccggatttctgcagccccggtgggctcccggccccacactgttgccaatggccatgagttgtttgaggtctcagaagagagagatgaggaggttgctgcattttgccacatgctggatatccttcgatctggctctgacatccaagactacttcctcactggctatgtctggagtgctgtcacccctagcccagagcacctcggggatgaggtcaacctgaaggtgactgtgttgtgtgacaggcttcaagaggcactcactttcacctgcaactgttcctccactgtagacttgcttatctaccagaccctgtgctacacccatgatgacctgaggaatgtggacgtgggtgactttgtgctaaagccctgcgggctggaggagttcctgcagaacaagcatgccttgggcagtcatgagtacatccaatactgccgcaagtttgacattgacattcggctacagctgatggagcagaaggttgtgcgcagtgacctggcccggacggtgaatgatgaccagagcccctccaccttgaactacctcgtccatctccaagagaggcctgtcaagcagaccatcagcaggcaggccctgagtcttctgttcgacacttaccacaatgaggtggatgccttcctgctggctgatggagacttcccactgaaggctgacagggtggtccagtccgtcaaggccatctgcaacgccctggccgccgtggaaacccctgagatcaccagtgctctcaaccagctgcccccctgcccctcccgcatgcagcctaaaattcagaaggatcccagtgtcttggctgtgagggaaaaccgagagaaggtcgtggaagccctgaccgctgccatcttggacctggtggagctgtactgcaacacattcaacgcagacttccagacggcagtgcccgggagccgcaagcatgacctggtccaggaggcctgccatttcgccaggtccctggccttcactgtctatgccacccaccgcatccccatcatctgggctaccagctatgaagatttctacctctcctgctccctcagccatggcggcaaggagctgtgcagccccctgcagacccgaagagctcacttctccaagtacctcttccacctcatcgtctgggaccagcagatctgcttcccagtgcaggtgaaccggctgcctcgggagacactgctgtgtgccactctctatgctctgcccatccccccaccggggagctcctcagaggccaataagcagcggcgggtgcctgaagccctgggctgggtcactaccccactcttcaacttcaggcaggtcctgacctgtggccggaagcttctgggtttgtggccagcaacacaggaaaatcccagcgcccgttggagtgcacctaatttccaccagccagacagtgtcatcctgcagattgacttccccacctcggcctttgacatcaagttcaccagcccccctggagacaagttcagcccccgctatgagtttggcagcctccgggaagaagaccagcgcaagcttaaagacatcatgcagaaagagtccttgtactggctcactgatgctgacaagaagcgcctgtgggagaagcgatattactgccactcggagtggacccacatgaaccaccaggatgccctggggctcctgcatgccaccttcccggaccaggaggtgcgtcgtatggctgtgcagtggattggctcactctcagatgctgagctgctagactacctgccccagctggtacaggccctgaagtatgaatgctacctggacagcccgttggtgcgcttcctcctgaaacgagctgtgtctgacttgagagtgactcactacttcttctggttactgaaggacggcctcaaggactctcagttcagcatccgctaccagtatctgctggcagccttactgtgctgctgtggcaaggggctgagagaagagtttaaccgccagtgctggcttgtcaatgccctggccaaactggcccagcaggtccgggaggcagccccatctgcaaggcagggaatcctccgcacgggcctggaggaggtgaagcagttctttgccctcaatggctcgtgccgcttgccactcagccccagtctgctggttaagggaattgtgcccagggactgttcctacttcaactccaatgctgtccccctcaaactctccttccaaaatgtggatcccctgggtgagaacatccgtgtcatcttcaagtgtggggacgaccttcgccaggacatgctaacgctgcagatgattcgcatcatgagcaagatctgggtccaggaggggctggacatgcgcatggtcatcttccgctgcttctccaccggccggggcagagggatggtggagatgatccctaatgctgagaccctgcgtaagatccaggtggagcatggggtgaccggctcgttcaaggaccggcccctggcagactggctgcagaaacacaaccctggggaggacgagtatgagaaggctgtggagaactttatctactcctgcgctggctgctgcgtggccacgtacgtcttgggcatctgtgaccgacataatgacaacatcatgctgaagaccactggtcacatgttccacattgattttggccgcttcctgggccatgcccagatgtttggcaacatcaagcgggaccgtgccccctttgtcttcacctcggacatggcgtatgtcatcaacgggggtgacaagccttccagccgcttccatgattttgttgacctttgctgccaagcctacaacctcattcgcaagcacacccacctcttcctcaaccttctgggcctgatgttgtcctgtgggatccctgaactctcagacctggaggacctcaagtatgtgtacgatgccctgaggcctcaggatacagaggccaatgccactacctacttcactaggttgattgagtccagcctgggcagtgtagccacaaagctcaattttttcatccataatctggctcagatgaagttcacgggctcagatgaccggctgaccctctcctttgcctcccgaacacacactctcaagagctctggccgaatcagtgatgttttcctctgccgccatgagaagatcttccaccccaacaaaggctatatatatgtggtaaaggtgatgcgagagaacactcacgaggccacctacatccagcggacctttgaggagttccaggaattacacaataagttgcggctgctcttcccttcttcccacttgcccagcttccctagtcgcttcgtgatcggccgctcccggggagaggcggtggccgagcggcggagggaggagctaaacggttacatctggcacttgatccacgcaccccctgaggtggccgagtgtgatttggtgtacaccttcttccacccactgccccgggatgagaaggctatgggcaccagcccagctcctaagtcctcagatggcacatgggcccggcccgtcggaaaggtgggaggggaggtgaagctgtccatctcctacaaaaacaataaactcttcatcatggtgatgcatattcggggcttgcaactgctccaggatggaaatgaccctgacccctatgtgaaaatttacctccttcctgaccctcagaaaaccactaagaggaaaaccaaagtggcccggaaaacctgcaatcctacctacaatgagatgttggtatatgatgggatccccaagggtgacctgcagcagcgggagctccagctgagcgtgctgagtgagcagggattctgggagaacgtcctcctcggtgaggtgaacatccgcctgcgagagctggacctggctcaggagaagaccggctggttcgccctgggatctcgaagtcatggcaccttgtgagcccagcagagccaccacccagcatcccaggctggtggcaggagctgggggagaggactctcccctgtgagactcctccttgtgaagggccagggccctgggcaggcctccagctcggtccaggtgattctggcctctgtggtaggaggcagggagagtaagacatgctctgctgtctcttcctctggagactgaacttgggttggttgtgatgagcagccccttggaggctgtgaggttgcagcaaagttttaagtttaccttgtgtcaagggagcaatgcttggtttggggagtgtgtggggtgggctgtatgaagtagcattttgggggtgggtgggtggatatcttaatttttatttttaaaaaatgaaatagtgatgttgtcctaactgggacaggaagccttgcgagaagggacgtacctatgccccagaaggcaagagaggaagactatttggactttttgtatgattaaggttcttattggacttttccctaggttttttttttttgttattgttgttgttgtttcgttttctagctataggaactatctggggaggggcccagtgggtcctcggccagagccctctctaaggacaggttggggagggttggggagggctgcctgtgctggactgaggcttgtgccactgggcctttctgattttgcctccaaaggagagcgctgtgatacctacatgtgtaaggaagggccttccgtattggggttctgccaaggacccgtattcagggacccatgctcttttggggggacttttcctcttgtcttccctactttattaggacttgccctgaataccattttctaccccttgcccctccattctcctggcccttctgggggtcagctggtctctatgaatatgctgggggtgcttccccataggtctctcccttcatttgtctctggtgggacaaaatactgactcagtccttagatgtagtttcacccaagagcatcttggccctgggaagaggtccctaggctgcagatgctactgactgcttgctaggtagcctctggaaagcattccccatccatcactccccacttctttctgctgtgctgcttccctcccaaactccatttctgtcaccctttttataagacttttcctcattctgtggggccataaacctatttagtctggagccaaagggatgccctatctgaaggaaaggggcatggggtgggggattccatcaaaactgttgttttttgccccatgatttttctttggtcagtaggaggctggattggagtggtgattattcccctggagctaagctcaggagcccgaagggagagactgagactgactcccttatctcttcatattctttattccctaccagatggatttttttttttttttttggagacggagtctcgccctgtcgccaggctggagtgtagtggcatgatctcgactcactgcaaaatctgcctcccgggttcaagcgattctcctacctcagcctcccgagtagctgggattacaggcatgtgccaccacgccaagctaatttttgtatttttagtagagacggggtttcaccatgttggccaggatggtctcgatctcttgacctcgtgatctgcctgccttggcctcccaaagtgctgggattacaggcgtgagccaccatgccccgccccagatggattttacatttgctcttttgtgtttcgctccaaagggttgtcttcctcgccaaaaggagggagggactttgaatttgatatgaatctttaaaaccagaattggctggatatttcccatgattgggaaaagagtgaaatgaggacattctgtaaactgtccctccctaattccaaggatcagaaactccccgttttgctgactcattccataactggagaaagaagctccattgaccgaagccacagggcagcatggaagtttaaattttctctaaaattaaaatgccaaggataaagctggctgcttccaggagggggaagaggagtggggagtgggcggtgaaacttttccagatgaacggaccataaatgtgttactggctttgtgcctgtagctcattttattatgacctatatgctcctgatttaaagagatctgtgtactgtttacttcccacttcccagaatcccttgtatctcctttctcgggaattgtattttctaataaatgacatttgagaaaaaaatga

SEQ ID NO: 165207 - DNA, 846 bp, Homo sapiens
  Payload ID: 12531
  Gene Symbol: PIK3C2B
  Gene Name: phosphatidylinositol-4-phosphate 3-kinase, catalytic subunit type 2 beta
  ENST ID: ENST00000415899
  CDS Start-End: 454-846
agtgcgccgggtgtccgggagatggcttcccctctctcgcccgctgctgccgctattgtctcacccggggtggcctgactctgcgagctcgcgcacgctctcggcggagagcacccctccccacccccacaagctggtccttgcgccctttgctgcctctccctctgccccttggagcctagggtctgtgcggagcctggagaggggagcggcccgggagcaggcggcgtgcggccggccagctcctctcgcgctggtgcaagaggcgcctggagccgcagagcgagcccgggaggcgcggagcgagcagcccacgtcgccaggcacaagacacgtcggatgttgcagcagagccagcagctagcgcaggcgcccagacaccatgtcacaaccctccagaactgacgttggcaggaagtagagactttgttgcctgtgtcccccatcctcaccatgtcttcgactcagggcaatggggaacactggaagtccctggagtcagtgggcatcagccgcaaagagctagcgatggccgaagccctgcagatggagtatgatgccctgtcccggctccggcatgacaaggaggagaacagagccaagcagaacgcagacccctctctcatcagctgggatgagcctggggtagacttttacagcaagccagcaggaaggcggaccgacctcaagctgttacgcggtctctctggctctgatcctacccttaactacaactcactctccccacaggaagggccgcccaaccactctacctcccaagggccacagcctggctcagatccctggcccaaaggctccctgtctggagactatctctacattttt

SEQ ID NO: 165208 - DNA, 727 bp, Homo sapiens
  Payload ID: 12531
  Gene Symbol: PIK3C2B
  Gene Name: phosphatidylinositol-4-phosphate 3-kinase, catalytic subunit type 2 beta
  ENST ID: ENST00000429009
  CDS Start-End: 547-727
ggcttcccctctctcgcccgctgctgccgctattgtctcacccggggtggcctgactctgcgagctcgcgcacgctctcggcggagagcacccctccccacccccacaagctggtccttgcgccctttgctgcctctccctctgccccttggagcctagggtctgtgcggagcctggagaggggagcggcccgggagcaggcggcgtgcggccggccagctcctctcgcgctggtgcaagaggcgcctggagccgcagagcgagcccgggaggcgcggagcgagcagcccacgtcgccaggcacaagacacgtcggatgttgcagcagagccagcagctagcgcagatggcgtcctttgcagcaaaccgtaagttataaggatgagggaagaagagtagagggccaaaaggattccattttgaggaaaaactacagtttgccttgccaggtagaagaatcaggcgcccagacaccatgtcacaaccctccagaactgacgttggcaggaagtagagactttgttgcctgtgtcccccatcctcaccatgtcttcgactcagggcaatggggaacactggaagtccctggagtcagtgggcatcagccgcaaagagctagcgatggccgaagccctgcagatggagtatgatgccctgtcccggctccggcatgacaaggaggagaacagagccaagcagaacgcagacccctctctcatcagctggg

SEQ ID NO: 165209 - DNA, 4764 bp, Homo sapiens
  Payload ID: 12532
  Gene Symbol: PIK3C2G
  Gene Name: phosphatidylinositol-4-phosphate 3-kinase, catalytic subunit type 2 gamma
  Uniprot ID: O75747
  ENST ID: ENST00000266497
  CDS Start-End: 39-4376
ggagcagagtcaaccctctcagttacataaaataaaaaatggcatattcttggcaaacggatccaaatcctaatgaatcacacgaaaagcagtatgaacaccaagaatttctctttgtaaatcaaccccattcttctagccaagtcagtctgggttttgatcagatagtagatgagatcagtggcaaaattccacactacgagagtgaaattgatgaaaacaccttttttgtgcccactgcaccaaaatgggactcaacagggcattcattaaatgaagcacaccaaatatccttgaatgaattcacttctaaaagccgtgaactctcctggcatcaagttagcaaagcaccagcaattggttttagtccttctgtgttaccaaaacctcaaaatacgaataaagaatgctcctggggaagccccataggaaaacatcatggtgctgatgattccagattcagtattttagctccatcattcacaagtttggataaaattaatctagagaaagaattagaaaatgaaaatcataactaccatataggatttgaaagtagcattcctccaacaaattcatccttctcaagtgacttcatgccgaaagaagagaataaaaggagtggacatgtgaacattgtggaaccatctttgatgcttttgaaaggctctcttcaacccggaatgtgggaaagtacatggcagaagaatatagagtcaataggttgttccattcagctagtggaagtacctcaaagcagcaatacgagtctggcctctttttgcaacaaagtaaaaaaaatcagagaaagatatcatgcagctgatgttaatttcaattctgggaagatctggagcactactacagcatttccgtatcagctcttttctaagaccaagtttaatatacatatttttattgataactcaacacaacctcttcattttatgccatgtgctaattatcttgtcaaagatctaattgcagaaattctgcatttttgcacaaatgaccagctactccccaaagatcatattctaagtgtatgtggctctgaagaatttttacaaaacgaccactgtttggggagccacaaaatgtttcaaaaagataaatctgttattcagctccacctgcagaaaagtagggaagctccaggaaagctatctcgaaagcatgaagaggaccacagtcagttttatctgaatcaacttctagaatttatgcatatttggaaagtatccagacaatgtctcttaacactcatcagaaaatatgacttccacctgaaatacctattgaaaacccaggaaaacgtgtataatattattgaagaagttaaaaaaatatgcagtgttctagggtgtgtggaaaccaaacaaattacagatgcagtaaatgaactaagtctaattcttcagagaaaaggagagaatttttatcaaagttcagagacttcagcaaaaggcttgatagagaaggtaacaactgaactatccacatccatctaccagctaatcaatgtctactgtaacagcttttatgcagattttcagcctgtaaatgtacctagatgcacttcctatctaaatcccgggcttccttcccacctcagcttcacagtgtatgcagcacacaacattccagaaacctgggtgcacaggatcaattttccccttgaaataaagtcacttccaagggaatccatgctcactgtaaaactgtttgggattgcctgtgcaaccaacaatgcaaatttactggcgtggacttgtcttccactgtttccaaaagaaaaatccattctcgggtctatgctgttcagcatgacattacagagtgagcctcccgtagaaatgataactccaggagtgtgggatgtaagtcagccatccccggtgaccctgcagattgattttccagctactgggtgggagtatatgaaacctgattctgaagagaatagaagtaatcttgaagagccactaaaggagtgtataaaacatattgccagactttcacagaaacagactcccctactactctctgaagaaaagaaaagatatttatggttttatcgcttctactgcaataatgaaaactgctcccttcctttagtcctgggtagtgcccctggatgggatgaaaggactgtttcagaaatgcataccattttgagaagatggacattttctcaacctttagaggctcttgggcttttgacttccagttttccagatcaagaaattcgtaaagtggcagttcaacaattagacaacctcttgaatgatgaactactggaatatctcccacagctagttcaggctgtcaagtttgaatggaaccttgagagtcctttagtgcaacttctactccaccgctccttgcagagcatccaggttgcccatcgtctttactggctgctaaaaaatgcagaaaatgaagcttattttaaaagctggtatcagaagctactagctgctctccaattctgtgcaggtaaagccttgaatgatgagttttccaaggagcagaaacttatcaaaattctgggagatattggggaaagagtcaagtctgccagtgaccatcaaagacaggaggtactgaagaaagaaattggcagactagaagagttctttcaagatgtaaatacttgtcatcttcctctgaaccctgccctatgtataaaagggattgatcacgatgcatgttcatattttacatctaatgctttgccattgaagattactttcatcaatgctaatccgatgggcaaaaacatcagcattatttttaaggctggagatgatcttcgtcaggatatgcttgttctgcagcttattcaagtgatggacaatatttggctgcaggaaggcttggatatgcaaatgatcatttatagatgtctatccacaggaaaagaccaaggattggtgcagatggtacctgatgctgtgaccctagcaaagattcatcgccattctggactgataggaccattgaaagaaaatacaattaaaaagtggttcagtcagcacaaccacttaaaggcagattatgaaaaggccttgaggaactttttctactcctgtgctggctggtgtgtggtaacattcatcctgggagtatgtgaccgtcacaatgataatatcatgctgacaaagtcgggccacatgtttcatattgactttggaaaattcttaggtcatgcacaaacatttggagggataaaaagggaccgagctcctttcatttttacttcagagatggaatactttattacagagggtgggaaaaacccacagcattttcaagattttgtggaactttgctgtcgtgcttataatattatcagaaagcacagccaactgctcttgaacctgctggaaatgatgctgtatgcaggactgcctgagctaagtggaattcaagacctgaaatatgtgtataataatcttcgtccacaagacacagacctggaagcaacaagtcattttaccaagaaaataaaggaaagtctggagtgtttccctgttaaattgaataacttgatccacacacttgcacaaatgtcagccataagccctgccaaatctacttcacagacttttcctcaggaatcctgtttgctgagtacaactaggtcgattgaaagagcaacaattttagggttcagcaagaaatccagtaatctgtatctgatccaggtgacacacagcaacaacgaaacaagcctgacagaaaaatcatttgagcagttttcaaaacttcacagccaacttcagaagcagtttgcatcactgactctcccagagtttcctcattggtggcacctaccttttacaaattcagatcacagaagattcagagatctaaatcattacatggaacagatattaaatgtatcacatgaagttacaaacagtgattgtgtacttagctttttcctctctgaggctgtgcaacaaacagttgaagaatcatcacctgtgtacctaggtgagaagtttccagacaagaagcctaaggtgcagttagtcatatcctacgaggatgtgaagctgaccatactagtgaaacacatgaaaaacattcatctcccagatggctctgcgcccagtgcacatgttgaattttatcttttaccatatcccagtgaagttcgtaggaggaaaacaaaatctgttccaaaatgtacggaccccacttacaatgaaattgtagtatatgatgaagtcacagagctccaaggacatgtcttaatgcttattgtgaagagtaaaactgtatttgtgggagcaattaacatccgactctgtagtgtcccactcgataaagaaaaatggtatccattaggaaacagtataatttgaccattgctatgaacatatgcattattcattaactacttgtatttttttcacttctgggcctctgaatcacataagtaaggcatctttgttgtcaaagacagcacagggtattaaggacacagaaaaaaaatcagaattagtcttttgtgttgtttattttctacctgtgctttcattgttttttcataatcttttctccttcagtggagtactgattgcatgaaatttgatgtgtaaaataataaaagacctttattaaatcattttaatatattttaaattaaacataggtttacatttgttttaattgtgtgcctacagttaaaagcagtatttttaatgtattttataagaaagacaatcaaataaacctcatcaattaattcaa

SEQ ID NO: 165210 - DNA, 4840 bp, Homo sapiens
  Payload ID: 12532
  Gene Symbol: PIK3C2G
  Gene Name: phosphatidylinositol-4-phosphate 3-kinase, catalytic subunit type 2 gamma
  Uniprot ID: O75747
  ENST ID: ENST00000433979
  CDS Start-End: 117-4454
tgagatcgtgtttcatttcaggaagatatatgcgtcaggaaaatttctatcttcttttgtattatcaaggagatatttggagcagagtcaaccctctcagttacataaaataaaaaatggcatattcttggcaaacggatccaaatcctaatgaatcacacgaaaagcagtatgaacaccaagaatttctctttgtaaatcaaccccattcttctagccaagtcagtctgggttttgatcagatagtagatgagatcagtggcaaaattccacactacgagagtgaaattgatgaaaacaccttttttgtgcccactgcaccaaaatgggactcaacagggcattcattaaatgaagcacaccaaatatccttgaatgaattcacttctaaaagccgtgaactctcctggcatcaagttagcaaagcaccagcaattggttttagtccttctgtgttaccaaaacctcaaaatacgaataaagaatgctcctggggaagccccataggaaaacatcatggtgctgatgattccagattcagtattttagctccatcattcacaagtttggataaaattaatctagagaaagaattagaaaatgaaaatcataactaccatataggatttgaaagtagcattcctccaacaaattcatccttctcaagtgacttcatgccgaaagaagagaataaaaggagtggacatgtgaacattgtggaaccatctttgatgcttttgaaaggctctcttcaacccggaatgtgggaaagtacatggcagaagaatatagagtcaataggttgttccattcagctagtggaagtacctcaaagcagcaatacgagtctggcctctttttgcaacaaagtaaaaaaaatcagagaaagatatcatgcagctgatgttaatttcaattctgggaagatctggagcactactacagcatttccgtatcagctcttttctaagaccaagtttaatatacatatttttattgataactcaacacaacctcttcattttatgccatgtgctaattatcttgtcaaagatctaattgcagaaattctgcatttttgcacaaatgaccagctactccccaaagatcatattctaagtgtatgtggctctgaagaatttttacaaaacgaccactgtttggggagccacaaaatgtttcaaaaagataaatctgttattcagctccacctgcagaaaagtagggaagctccaggaaagctatctcgaaagcatgaagaggaccacagtcagttttatctgaatcaacttctagaatttatgcatatttggaaagtatccagacaatgtctcttaacactcatcagaaaatatgacttccacctgaaatacctattgaaaacccaggaaaacgtgtataatattattgaagaagttaaaaaaatatgcagtgttctagggtgtgtggaaaccaaacaaattacagatgcagtaaatgaactaagtctaattcttcagagaaaaggagagaatttttatcaaagttcagagacttcagcaaaaggcttgatagagaaggtaacaactgaactatccacatccatctaccagctaatcaatgtctactgtaacagcttttatgcagattttcagcctgtaaatgtacctagatgcacttcctatctaaatcccgggcttccttcccacctcagcttcacagtgtatgcagcacacaacattccagaaacctgggtgcacaggatcaattttccccttgaaataaagtcacttccaagggaatccatgctcactgtaaaactgtttgggattgcctgtgcaaccaacaatgcaaatttactggcgtggacttgtcttccactgtttccaaaagaaaaatccattctcgggtctatgctgttcagcatgacattacagagtgagcctcccgtagaaatgataactccaggagtgtgggatgtaagtcagccatccccggtgaccctgcagattgattttccagctactgggtgggagtatatgaaacctgattctgaagagaatagaagtaatcttgaagagccactaaaggagtgtataaaacatattgccagactttcacagaaacagactcccctactactctctgaagaaaagaaaagatatttatggttttatcgcttctactgcaataatgaaaactgctcccttcctttagtcctgggtagtgcccctggatgggatgaaaggactgtttcagaaatgcataccattttgagaagatggacattttctcaacctttagaggctcttgggcttttgacttccagttttccagatcaagaaattcgtaaagtggcagttcaacaattagacaacctcttgaatgatgaactactggaatatctcccacagctagttcaggctgtcaagtttgaatggaaccttgagagtcctttagtgcaacttctactccaccgctccttgcagagcatccaggttgcccatcgtctttactggctgctaaaaaatgcagaaaatgaagcttattttaaaagctggtatcagaagctactagctgctctccaattctgtgcaggtaaagccttgaatgatgagttttccaaggagcagaaacttatcaaaattctgggagatattggggaaagagtcaagtctgccagtgaccatcaaagacaggaggtactgaagaaagaaattggcagactagaagagttctttcaagatgtaaatacttgtcatcttcctctgaaccctgccctatgtataaaagggattgatcacgatgcatgttcatattttacatctaatgctttgccattgaagattactttcatcaatgctaatccgatgggcaaaaacatcagcattatttttaaggctggagatgatcttcgtcaggatatgcttgttctgcagcttattcaagtgatggacaatatttggctgcaggaaggcttggatatgcaaatgatcatttatagatgtctatccacaggaaaagaccaaggattggtgcagatggtacctgatgctgtgaccctagcaaagattcatcgccattctggactgataggaccattgaaagaaaatacaattaaaaagtggttcagtcagcacaaccacttaaaggcagattatgaaaaggccttgaggaactttttctactcctgtgctggctggtgtgtggtaacattcatcctgggagtatgtgaccgtcacaatgataatatcatgctgacaaagtcgggccacatgtttcatattgactttggaaaattcttaggtcatgcacaaacatttggagggataaaaagggaccgagctcctttcatttttacttcagagatggaatactttattacagagggtgggaaaaacccacagcattttcaagattttgtggaactttgctgtcgtgcttataatattatcagaaagcacagccaactgctcttgaacctgctggaaatgatgctgtatgcaggactgcctgagctaagtggaattcaagacctgaaatatgtgtataataatcttcgtccacaagacacagacctggaagcaacaagtcattttaccaagaaaataaaggaaagtctggagtgtttccctgttaaattgaataacttgatccacacacttgcacaaatgtcagccataagccctgccaaatctacttcacagacttttcctcaggaatcctgtttgctgagtacaactaggtcgattgaaagagcaacaattttagggttcagcaagaaatccagtaatctgtatctgatccaggtgacacacagcaacaacgaaacaagcctgacagaaaaatcatttgagcagttttcaaaacttcacagccaacttcagaagcagtttgcatcactgactctcccagagtttcctcattggtggcacctaccttttacaaattcagatcacagaagattcagagatctaaatcattacatggaacagatattaaatgtatcacatgaagttacaaacagtgattgtgtacttagctttttcctctctgaggctgtgcaacaaacagttgaagaatcatcacctgtgtacctaggtgagaagtttccagacaagaagcctaaggtgcagttagtcatatcctacgaggatgtgaagctgaccatactagtgaaacacatgaaaaacattcatctcccagatggctctgcgcccagtgcacatgttgaattttatcttttaccatatcccagtgaagttcgtaggaggaaaacaaaatctgttccaaaatgtacggaccccacttacaatgaaattgtagtatatgatgaagtcacagagctccaaggacatgtcttaatgcttattgtgaagagtaaaactgtatttgtgggagcaattaacatccgactctgtagtgtcccactcgataaagaaaaatggtatccattaggaaacagtataatttgaccattgctatgaacatatgcattattcattaactacttgtatttttttcacttctgggcctctgaatcacataagtaaggcatctttgttgtcaaagacagcacagggtattaaggacacagaaaaaaaatcagaattagtcttttgtgttgtttattttctacctgtgctttcattgttttttcataatcttttctccttcagtggagtactgattgcatgaaatttgatgtgtaaaataataaaagacctttattaaatcattttaatatattttaaattaaacataggtttacatttgttttaattgtgtgcctacagttaaaagcagtatttttaatgtattttataagaaagacaatcaaataaacctcatcaattaattc

SEQ ID NO: 165211 - DNA, 4559 bp, Homo sapiens
  Payload ID: 12532
  Gene Symbol: PIK3C2G
  Gene Name: phosphatidylinositol-4-phosphate 3-kinase, catalytic subunit type 2 gamma
  ENST ID: ENST00000546003
  CDS Start-End: 39-734
ggagcagagtcaaccctctcagttacataaaataaaaaatggcatattcttggcaaacggatccaaatcctaatgaatcacacgaaaagcagtatgaacaccaagaatttctctttgtaaatcaaccccattcttctagccaagtcagtctgggttttgatcagatagtagatgagatcagtggcaaaattccacactacgagagtgaaattgatgaaaacaccttttttgtgcccactgcaccaaaatgggactcaacagggcattcattaaatgaagcacaccaaatatccttgaatgaattcacttctaaaagccgtgaactctcctggcatcaagttagcaaagcaccagcaattggttttagtccttctgtgttaccaaaacctcaaaatacgaataaagaatgctcctggggaagccccataggaaaacatcatggtgctgatgattccagattcagtattttagctccatcattcacaagtttggataaaattaatctagagaaagaattagaaaatgaaaatcataactaccatataggatttgaaagtagcattcctccaacaaattcatccttctcaagtgacttcatgccgaaagaagagaataaaaggagtggacatgtgaacattgtggaaccatctttgatgcttttgaaaggctctcttcaacccggaatgtgggaaagtacatggcagaagaatatagaggttgttccattcagctagtggaagtacctcaaagcagcaatacgagtctggcctctttttgcaacaaagtaaaaaaaatcagagaaagatatcatgcagctgatgttaatttcaattctgggaagatctggagcactactacagcatttccgtatcagctcttttctaagaccaagtttaatatacatatttttattgataactcaacacaacctcttcattttatgccatgtgctaattatcttgtcaaagatctaattgcagaaattctgcatttttgcacaaatgaccagctactccccaaagatcatattctaagtgtatgtggctctgaagaatttttacaaaacgaccactgtttggggagccacaaaatgtttcaaaaagataaatctgttattcagctccacctgcagaaaagtagggaagctccaggaaagctatctcgaaagcatgaagaggaccacagtcagttttatctgaatcaacttctagaatttatgcatatttggaaagtatccagacaatgtctcttaacactcatcagaaaatatgacttccacctgaaatacctattgaaaacccaggaaaacgtgtataatattattgaagaagttaaaaaaatatgcagtgttctagggtgtgtggaaaccaaacaaattacagatgcagtaaatgaactaagtctaattcttcagagaaaaggagagaatttttatcaaagttcagagacttcagcaaaaggcttgatagagaaggtaacaactgaactatccacatccatctaccagctaatcaatgtctactgtaacagcttttatgcagattttcagcctgtaaatgtacctagatgcacttcctatctaaatcccgggcttccttcccacctcagcttcacagtgtatgcagcacacaacattccagaaacctgggtgcacagctacaaagcgttttcttttacctgttggcttacatatgctggaaagaagctgtgccaagtgagaaactacagaaatattccagacaagaaattattttttttcttggtcaactggaatgaaacgatcaattttccccttgaaataaagtcacttccaagggaatccatgctcactgtaaaactgtttgggattgcctgtgcaaccaacaatgcaaatttactggcgtggacttgtcttccactgtttccaaaagaaaaatccattctcgggtctatgctgttcagcatgacattacagagtgagcctcccgtagaaatgataactccaggagtgtgggatgtaagtcagccatccccggtgaccctgcagattgattttccagctactgggtgggagtatatgaaacctgattctgaagagaatagaagtaatcttgaagagccactaaaggagtgtataaaacatattgccagactttcacagaaacagactcccctactactctctgaagaaaagaaaagatatttatggttttatcgcttctactgcaataatgaaaactgctcccttcctttagtcctgggtagtgcccctggatgggatgaaaggactgtttcagaaatgcataccattttgagaagatggacattttctcaacctttagaggctcttgggcttttgacttccagttttccagatcaagaaattcgtaaagtggcagttcaacaattagacaacctcttgaatgatgaactactggaatatctcccacagctagttcaggctgtcaagtttgaatggaaccttgagagtcctttagtgcaacttctactccaccgctccttgcagagcatccaggttgcccatcgtctttactggctgctaaaaaatgcagaaaatgaagcttattttaaaagctggtatcagaagctactagctgctctccaattctgtgcaggtaaagccttgaatgatgagttttccaaggagcagaaacttatcaaaattctgggagatattggggaaagagtcaagtctgccagtgaccatcaaagacaggaggtactgaagaaagaaattggcagactagaagagttctttcaagatgtaaatacttgtcatcttcctctgaaccctgccctatgtataaaagggattgatcacgatgcatgttcatattttacatctaatgctttgccattgaagattactttcatcaatgctaatccgatgggcaaaaacatcagcattatttttaaggctggagatgatcttcgtcaggatatgcttgttctgcagcttattcaagtgatggacaatatttggctgcaggaaggcttggatatgcaaatgatcatttatagatgtctatccacaggaaaagaccaaggattggtgcagatggtacctgatgctgtgaccctagcaaagattcatcgccattctggactgataggaccattgaaagaaaatacaattaaaaagtggttcagtcagcacaaccacttaaaggcagattatgaaaaggccttgaggaactttttctactcctgtgctggctggtgtgtggtaacattcatcctgggagtatgtgaccgtcacaatgataatatcatgctgacaaagtcgggccacatgtttcatattgactttggaaaattcttaggtcatgcacaaacatttggagggataaaaagggaccgagctcctttcatttttacttcagagatggaatactttattacagagggtgggaaaaacccacagcattttcaagattttgtggaactttgctgtcgtgcttataatattatcagaaagcacagccaactgctcttgaacctgctggaaatgatgctgtatgcaggactgcctgagctaagtggaattcaagacctgaaatatgtgtataataatcttcgtccacaagacacagacctggaagcaacaagtcattttaccaagaaaataaaggaaagtctggagtgtttccctgttaaattgaataacttgatccacacacttgcacaaatgtcagccataagccctgccaaatctacttcacagacttttcctcaggaatcctgtttgctgagtacaactaggtcgattgaaagagcaacaattttagggttcagcaagaaatccagtaatctgtatctgatccaggtgacacacagcaacaacgaaacaagcctgacagaaaaatcatttgagcagttttcaaaacttcacagccaacttcagaagcagtttgcatcactgactctcccagagtttcctcattggtggcacctaccttttacaaattcagatcacagaagattcagagatctaaatcattacatggaacagatattaaatgtatcacatgaagttacaaacagtgattgtgtacttagctttttcctctctgaggctgtgcaacaaacagttgaagaatcatcacctgtgtacctaggtgagaagtttccagacaagaagcctaaggtgcagttagtcatatcctacgaggatgtgaagctgaccatactagtgaaacacatgaaaaacattcatctcccagatggctctgcgcccagtgcacatgttgaattttatcttttaccatatcccagtgaagttcgtaggaggaaaacaaaatctgttccaaaatgtacggaccccacttacaatgaaattgtagtatatgatgaagtcacagagctccaaggacatgtcttaatgcttattgtgaagagtaaaactgtatttgtgggagcaattaacatccgactctgtagtgtcccactcgataaagaaaaatggtatccattaggaaacagtataatttgaccattgctatgaacatatgcattattcattaactacttgtatttttttcacttctgggcctctgaat

SEQ ID NO: 165212 - DNA, 2497 bp, Homo sapiens
  Payload ID: 12532
  Gene Symbol: PIK3C2G
  Gene Name: phosphatidylinositol-4-phosphate 3-kinase, catalytic subunit type 2 gamma
  ENST ID: ENST00000535651
  CDS Start-End: 548-2299
atagggcaggcaaggggaaggctggtcactccaccctaatcttacaatgcaaatggactttccagttgatcagcaccatcttgtctgcttcttattgtacatatgcctgacaaaaggaagggaagatggagccgccatcttgaacatgtctagtccttagttcctgccacattcacacgtgcaagctcccagcttgcttctctgtgtctgcccctcaactttacaggctgctctttgttagaaaatgatttgggactgcttttcattaaaaaggaaagccttaccgaggactcccatacccttactatctgcctaagtaatttattcttaactcctgtaccagtgagaatcaaattattgagaattgttgagaagcagaaactaactacctggattgtaaaccaaggaaatggtacctgaaaactgccaacggtacctgagaatggagctgacacagagaaaagcacaggaaaatttctatcttcttttgtattatcaaggagatatttggagcagagtcaaccctctcagttacataaaataaaaaatggcatattcttggcaaacggatccaaatcctaatgaatcacacgaaaagcagtatgaacaccaagaatttctctttgtaaatcaaccccattcttctagccaagtcagtctgggttttgatcagatagtagatgagatcagtggcaaaattccacactacgagagtgaaattgatgaaaacaccttttttgtgcccactgcaccaaaatgggactcaacagggcattcattaaatgaagcacaccaaatatccttgaatgaattcacttctaaaagccgtgaactctcctggcatcaagttagcaaagcaccagcaattggttttagtccttctgtgttaccaaaacctcaaaatacgaataaagaatgctcctggggaagccccataggaaaacatcatggtgctgatgattccagattcagtattttagctccatcattcacaagtttggataaaattaatctagagaaagaattagaaaatgaaaatcataactaccatataggatttgaaagtagcattcctccaacaaattcatccttctcaagtgacttcatgccgaaagaagagaataaaaggagtggacatgtgaacattgtggaaccatctttgatgcttttgaaaggctctcttcaacccggaatgtgggaaagtacatggcagaagaatatagagtcaataggttgttccattcagctagtggaagtacctcaaagcagcaatacgagtctggcctctttttgcaacaaagtaaaaaaaatcagagaaagatatcatgcagctgatgttaatttcaattctgggaagatctggagcactactacagcatttccgtatcagctcttttctaagaccaagtttaatatacatatttttattgataactcaacacaacctcttcattttatgccatgtgctaattatcttgtcaaagatctaattgcagaaattctgcatttttgcacaaatgaccagctactccccaaagatcatattctaagtgtatgtggctctgaagaatttttacaaaacgaccactgtttggggagccacaaaatgtttcaaaaagataaatctgttattcagctccacctgcagaaaagtagggaagctccaggaaagctatctcgaaagcatgaagaggaccacagtcagttttatctgaatcaacttctagaatttatgcatatttggaaagtatccagacaatgtctcttaacactcatcagaaaatatgacttccacctgaaatacctattgaaaacccaggaaaacgtgtataatattattgaagaagttaaaaaaatatgcagtgttctagggtgtgtggaaaccaaacaaattacagatgcagtaaatgaactaagtctaattcttcagagaaaaggagagaatttttatcaaagttcagagacttcagcaaaaggcttgatagagaaggtaacaactgaactatccacatccatctaccagctaatcaatgtctactgtaacagcttttatgcagattttcagcctgtaaatgtacctagatgcacttcctatctaaatcccgggcttccttcccacctcagcttcacagtgtatgcagcacacaacattccagaaacctgggtgcacagctacaaagcgttttcttttacctgttggcttacatatgctggaaagaagctgtgccaagtgagaaactacagaaatattccagacaagaaattattttttttcttggtcaactggaatgaaacgtaagtttaatctttactgtatctggatcatttatgtaataaatgtcagctttttccccctttttttaaaagcaagggatgtaatttaaaaaaaatatgctgccagttgatttgattcagtggtatgataagtacactagggctaatagataactgattgttcaattcaacagattaaaagtccatttagaaacctagacaa

SEQ ID NO: 165213 - DNA, 4963 bp, Homo sapiens
  Payload ID: 12532
  Gene Symbol: PIK3C2G
  Gene Name: phosphatidylinositol-4-phosphate 3-kinase, catalytic subunit type 2 gamma
  ENST ID: ENST00000538779
  CDS Start-End: 117-4577
tgagatcgtgtttcatttcaggaagatatatgcgtcaggaaaatttctatcttcttttgtattatcaaggagatatttggagcagagtcaaccctctcagttacataaaataaaaaatggcatattcttggcaaacggatccaaatcctaatgaatcacacgaaaagcagtatgaacaccaagaatttctctttgtaaatcaaccccattcttctagccaagtcagtctgggttttgatcagatagtagatgagatcagtggcaaaattccacactacgagagtgaaattgatgaaaacaccttttttgtgcccactgcaccaaaatgggactcaacagggcattcattaaatgaagcacaccaaatatccttgaatgaattcacttctaaaagccgtgaactctcctggcatcaagttagcaaagcaccagcaattggttttagtccttctgtgttaccaaaacctcaaaatacgaataaagaatgctcctggggaagccccataggaaaacatcatggtgctgatgattccagattcagtattttagctccatcattcacaagtttggataaaattaatctagagaaagaattagaaaatgaaaatcataactaccatataggatttgaaagtagcattcctccaacaaattcatccttctcaagtgacttcatgccgaaagaagagaataaaaggagtggacatgtgaacattgtggaaccatctttgatgcttttgaaaggctctcttcaacccggaatgtgggaaagtacatggcagaagaatatagagtcaataggttgttccattcagctagtggaagtacctcaaagcagcaatacgagtctggcctctttttgcaacaaagtaaaaaaaatcagagaaagatatcatgcagctgatgttaatttcaattctgggaagatctggagcactactacagcatttccgtatcagctcttttctaagaccaagtttaatatacatatttttattgataactcaacacaacctcttcattttatgccatgtgctaattatcttgtcaaagatctaattgcagaaattctgcatttttgcacaaatgaccagctactccccaaagatcatattctaagtgtatgtggctctgaagaatttttacaaaacgaccactgtttggggagccacaaaatgtttcaaaaagataaatctgttattcagctccacctgcagaaaagtagggaagctccaggaaagctatctcgaaagcatgaagaggaccacagtcagttttatctgaatcaacttctagaatttatgcatatttggaaagtatccagacaatgtctcttaacactcatcagaaaatatgacttccacctgaaatacctattgaaaacccaggaaaacgtgtataatattattgaagaagttaaaaaaatatgcagtgttctagggtgtgtggaaaccaaacaaattacagatgcagtaaatgaactaagtctaattcttcagagaaaaggagagaatttttatcaaagttcagagacttcagcaaaaggcttgatagagaaggtaacaactgaactatccacatccatctaccagctaatcaatgtctactgtaacagcttttatgcagattttcagcctgtaaatgtacctagatgcacttcctatctaaatcccgggcttccttcccacctcagcttcacagtgtatgcagcacacaacattccagaaacctgggtgcacagctacaaagcgttttcttttacctgttggcttacatatgctggaaagaagctgtgccaagtgagaaactacagaaatattccagacaagaaattattttttttcttggtcaactggaatgaaacgatcaattttccccttgaaataaagtcacttccaagggaatccatgctcactgtaaaactgtttgggattgcctgtgcaaccaacaatgcaaatttactggcgtggacttgtcttccactgtttccaaaagaaaaatccattctcgggtctatgctgttcagcatgacattacagagtgagcctcccgtagaaatgataactccaggagtgtgggatgtaagtcagccatccccggtgaccctgcagattgattttccagctactgggtgggagtatatgaaacctgattctgaagagaatagaagtaatcttgaagagccactaaaggagtgtataaaacatattgccagactttcacagaaacagactcccctactactctctgaagaaaagaaaagatatttatggttttatcgcttctactgcaataatgaaaactgctcccttcctttagtcctgggtagtgcccctggatgggatgaaaggactgtttcagaaatgcataccattttgagaagatggacattttctcaacctttagaggctcttgggcttttgacttccagttttccagatcaagaaattcgtaaagtggcagttcaacaattagacaacctcttgaatgatgaactactggaatatctcccacagctagttcaggctgtcaagtttgaatggaaccttgagagtcctttagtgcaacttctactccaccgctccttgcagagcatccaggttgcccatcgtctttactggctgctaaaaaatgcagaaaatgaagcttattttaaaagctggtatcagaagctactagctgctctccaattctgtgcaggtaaagccttgaatgatgagttttccaaggagcagaaacttatcaaaattctgggagatattggggaaagagtcaagtctgccagtgaccatcaaagacaggaggtactgaagaaagaaattggcagactagaagagttctttcaagatgtaaatacttgtcatcttcctctgaaccctgccctatgtataaaagggattgatcacgatgcatgttcatattttacatctaatgctttgccattgaagattactttcatcaatgctaatccgatgggcaaaaacatcagcattatttttaaggctggagatgatcttcgtcaggatatgcttgttctgcagcttattcaagtgatggacaatatttggctgcaggaaggcttggatatgcaaatgatcatttatagatgtctatccacaggaaaagaccaaggattggtgcagatggtacctgatgctgtgaccctagcaaagattcatcgccattctggactgataggaccattgaaagaaaatacaattaaaaagtggttcagtcagcacaaccacttaaaggcagattatgaaaaggccttgaggaactttttctactcctgtgctggctggtgtgtggtaacattcatcctgggagtatgtgaccgtcacaatgataatatcatgctgacaaagtcgggccacatgtttcatattgactttggaaaattcttaggtcatgcacaaacatttggagggataaaaagggaccgagctcctttcatttttacttcagagatggaatactttattacagagggtgggaaaaacccacagcattttcaagattttgtggaactttgctgtcgtgcttataatattatcagaaagcacagccaactgctcttgaacctgctggaaatgatgctgtatgcaggactgcctgagctaagtggaattcaagacctgaaatatgtgtataataatcttcgtccacaagacacagacctggaagcaacaagtcattttaccaagaaaataaaggaaagtctggagtgtttccctgttaaattgaataacttgatccacacacttgcacaaatgtcagccataagccctgccaaatctacttcacagacttttcctcaggaatcctgtttgctgagtacaactaggtcgattgaaagagcaacaattttagggttcagcaagaaatccagtaatctgtatctgatccaggtgacacacagcaacaacgaaacaagcctgacagaaaaatcatttgagcagttttcaaaacttcacagccaacttcagaagcagtttgcatcactgactctcccagagtttcctcattggtggcacctaccttttacaaattcagatcacagaagattcagagatctaaatcattacatggaacagatattaaatgtatcacatgaagttacaaacagtgattgtgtacttagctttttcctctctgaggctgtgcaacaaacagttgaagaatcatcacctgtgtacctaggtgagaagtttccagacaagaagcctaaggtgcagttagtcatatcctacgaggatgtgaagctgaccatactagtgaaacacatgaaaaacattcatctcccagatggctctgcgcccagtgcacatgttgaattttatcttttaccatatcccagtgaagttcgtaggaggaaaacaaaatctgttccaaaatgtacggaccccacttacaatgaaattgtagtatatgatgaagtcacagagctccaaggacatgtcttaatgcttattgtgaagagtaaaactgtatttgtgggagcaattaacatccgactctgtagtgtcccactcgataaagaaaaatggtatccattaggaaacagtataatttgaccattgctatgaacatatgcattattcattaactacttgtatttttttcacttctgggcctctgaatcacataagtaaggcatctttgttgtcaaagacagcacagggtattaaggacacagaaaaaaaatcagaattagtcttttgtgttgtttattttctacctgtgctttcattgttttttcataatcttttctccttcagtggagtactgattgcatgaaatttgatgtgtaaaataataaaagacctttattaaatcattttaatatattttaaattaaacataggtttacatttgttttaattgtgtgcctacagttaaaagcagtatttttaatgtattttataagaaagacaatcaaataaacctcatcaattaattc

SEQ ID NO: 165214 - DNA, 625 bp, Homo sapiens
  Payload ID: 12532
  Gene Symbol: PIK3C2G
  Gene Name: phosphatidylinositol-4-phosphate 3-kinase, catalytic subunit type 2 gamma
  ENST ID: ENST00000536967
  CDS Start-End: 1-563
aaggctctcttcaacccggaatgtgggaaagtacatggcagaagaatatagagtcaataggttgttccattcagctagtggaagtacctcaaagcagcaatacgagtctggcctctttttgcaacaaagtaaaaaaaatcagagaaagatatcatgcagctgatgttaatttcaattctgggaagatctggagcactactacagcatttccgtatcagctcttttctaagaccaagtttaatatacatatttttattgataactcaacacaacctcttcattttatgccatgtgctaattatcttgtcaaagatctaattgcagaaattctgcatttttgcacaaatgaccagctactccccaaagatcatattctaagtgtatgtggctctgaagaatttttacaaaacgaccactgtttggggagccacaaaatgtttcaaaaagataaatctgttattcagctccacctgcagaaaagtagggaagctccaggaaagctatctcgaaaggttaggacacagcaagaaggaagctgtctgcacacaggaaaagggctctgaccctgattataaactttgcagcctatagaacgaagagaaataaatgtatgttgtttaagcca

SEQ ID NO: 165215 - DNA, 3767 bp, Homo sapiens
  Payload ID: 12533
  Gene Symbol: PIP5K1A
  Gene Name: phosphatidylinositol-4-phosphate 5-kinase, type I, alpha
  Uniprot ID: Q99755
  ENST ID: ENST00000349792
  CDS Start-End: 447-2096
ggattttttgcttggctacccggagtgaagcggccgggttgggcgattaacaggccgtggttaggaaggacggagaaggggcgttcgctcctttgggacttttcatgcctcgtttttttttcagatgtggcttggtctgggcgcaaggtcccagcagccagcttaagcttactcttctgtgaaaggggaaagtatcccctgtggaaagcggttaaacttgtggagggggtgcgggacgtgagttcttccccatgccaggcgaatggtgtggccttgagctggtccaggagccggctcgacgtgtctgagggaggccccggagggggcggggaggtggcccacagaacgcgggttctgtaaagagacgttgggaagattcgattccgagaagaggaagaaccggattgaaagagagccaggccgctgagggggagggggctgctaagatggcgtcggcctcctccgggccgtcgtcttcggtcggtttttcatcctttgatcccgcggtcccttcctgtaccttgtcctcagcatctggaatcaagagacccatggcatctgaggtgccttatgcctctggcatgcccatcaagaaaataggccatagaagtgttgattcctcaggagagacaacatataaaaagacaacctcatcagccttgaaaggtgccatccagttaggcattacccacactgtggggagcctgagtaccaaaccagagcgtgatgtcctcatgcaagatttctacgtggttgagagtatcttctttcccagtgaagggagcaacctgacccctgctcatcactacaatgactttcgtttcaagacctatgcacctgttgccttccgctacttccgggagctatttggtatccggcccgatgattacttgtattccctctgcagtgagccgctgattgaactctgtagctctggagctagtggttccctattctatgtgtccagcgacgatgagttcattattaagacagtccaacataaagaggcggaatttctgcagaagctgcttccaggatactacatgaacctcaaccagaaccctcggactttgctgcctaaattctatggactgtactgtgtgcaggcaggtggcaagaacattcggattgtggtgatgaacaatcttttaccaagatcggtaaaaatgcatatcaaatatgacctcaaaggctcaacctacaaacggcgggcttcccagaaagagcgagagaagcctcttcccacatttaaagacctagacttcttacaagacatccctgatggtctttttttggatgctgacatgtacaacgctctctgtaagaccctgcagcgtgactgtttggtgctgcagagcttcaagataatggattacagcctcttgatgtcaatccataatatagatcatgcacaacgagagcccttaagcagtgaaacacagtactcagttgatactcgaagaccggccccccaaaaggctctgtattccacagccatggaatccatccagggagaggctcgacggggtggtaccatggagactgatgaccatatgggtggcatccctgcccggaatagtaaaggggaaaggcttctgctttatattggcatcattgacattctacagtcttacaggtttgttaagaagttggagcactcttggaaagccctggtacatgacggagacactgtctcagtgcatcgcccaggcttctacgctgaacggttccagcgcttcatgtgcaacacagtatttaagaagattcccttgaagccttctccttccaaaaagtttcggtctggctcatctttctctcggcgagcaggctccagtggcaactcctgcattacttaccagccatcggtctctggggaacacaaggcacaagtgacaacaaaggcagaagtggagccaggcgttcaccttggtcgtcctgatgttttacctcagactccacctttggaggaaatcagtgagggctcgcctattcctgaccccagtttctcacctctagttggagagactttgcaaatgctaactacaagtacaaccttggaaaagcttgaagttgcagagtcagagttcacccattaagcgcaaagcctcagaagacctggaacaagattctgccatctctgtgatcccaagatgtcagcccttgccccagcaatgctgaattttcttctacttggtcatcaaaaaaggagtgtaatagaagtgaggggagctgctcctccatcttcttcctgaagaagaaccttctctccttcctcttcctcatgaatgggccttagtgcctcagagagttgaggaccgcagcatcccctccactccagagttgggtggtatggattttcaactggccaaccctttgcctccactattgaatttttttcagacccccattcttcatgctggaaatgggattgctggacttggcagctttctttcccctcgtctttgactaggaaccggactcttaatttcctcaggacagactagctggcacattatccctaccttagttctttctctctgactcctggaagaatactcctgtaatctctgtaaaggtttttgggggataagggtgtttaaccacctcccagctttcttcttctttttttttttctgaaaaaaggaaaaagcacacagcacacaatttcaagccattttcagatcagaactccagaagtgttgacaagatgcctattcgtagagttccctcagaagagccatggtgtttatgaagagaagagtagtgattgctctgccagaagcagctcctctttaaactcctcctctcttgatgaatttcttaaggctgaaggaatgaagagagtgggacatggggtaatctttatcccttttgttaaaacaggaggcagccatgggctgggagatcatagcccttcctaggcagaatcctgttcactgccaggctatagtaattattactattttgcaatttgaaatatattctggttgtttttctaaatgtgaagacttaccaaatgaattttagatcattctccagaggagattttttttgctcttctcatcttttccaacagtgttctcctgtttgtggagctaaggtaaagaggggacacttctgtctgtttaacagacagtccatatctgtgaggccagcaaatattttcttaaactcatggggagacagcagattcttgccttggtgaggtcattgctgtgccatatgtcctacccccctgtcttcatgcagggaagttggaaatgggggctacatatgccctctcctccccgtctacaagagttgtggttttccatctgatccttccactcttgtcaggggaagaagggggcctggtatctcaggcagattgttgaattcctgttctatcccttctctatcccaccctgccttgataatatgttagcccataccccaaataactgtctatattagacacccccagccagtttctggctgcctgtctttgctgccatgttttttacaagaaggaaagaattcttgctatttttttttcataatttactatttatgatgtatttaagtgttttattaaggacagagttctgttaggggtgggagggaatatttgagggagggctgggtcttagggaaaggaatggggaagcaacatttttattaagtgttactatttgcctctactttgtattgttcagaaatggcaaatacaatataaaagtgatatatggttttaatgtaataaactttaatgagttatttagacctct

SEQ ID NO: 165216 - DNA, 2134 bp, Homo sapiens
  Payload ID: 12533
  Gene Symbol: PIP5K1A
  Gene Name: phosphatidylinositol-4-phosphate 5-kinase, type I, alpha
  Uniprot ID: Q99755
  ENST ID: ENST00000368888
  CDS Start-End: 423-2111
gtgaagcggccgggttgggcgattaacaggccgtggttaggaaggacggagaaggggcgttcgctcctttgggacttttcatgcctcgtttttttttcagatgtggcttggtctgggcgcaaggtcccagcagccagcttaagcttactcttctgtgaaaggggaaagtatcccctgtggaaagcggttaaacttgtggagggggtgcgggacgtgagttcttccccatgccaggcgaatggtgtggccttgagctggtccaggagccggctcgacgtgtctgagggaggccccggagggggcggggaggtggcccacagaacgcgggttctgtaaagagacgttgggaagattcgattccgagaagaggaagaaccggattgaaagagagccaggccgctgagggggagggggctgctaagatggcgtcggcctcctccgggccgtcgtcttcggtcggtttttcatcctttgatcccgcggtcccttcctgtaccttgtcctcagcagcatctggaatcaagagacccatggcatctgaggtcttggaagctagacaggattcttacatctcattggtgccttatgcctctggcatgcccatcaagaaaataggccatagaagtgttgattcctcaggagagacaacatataaaaagacaacctcatcagccttgaaaggtgccatccagttaggcattacccacactgtggggagcctgagtaccaaaccagagcgtgatgtcctcatgcaagatttctacgtggttgagagtatcttctttcccagtgaagggagcaacctgacccctgctcatcactacaatgactttcgtttcaagacctatgcacctgttgccttccgctacttccgggagctatttggtatccggcccgatgattacttgtattccctctgcagtgagccgctgattgaactctgtagctctggagctagtggttccctattctatgtgtccagcgacgatgagttcattattaagacagtccaacataaagaggcggaatttctgcagaagctgcttccaggatactacatgaacctcaaccagaaccctcggactttgctgcctaaattctatggactgtactgtgtgcaggcaggtggcaagaacattcggattgtggtgatgaacaatcttttaccaagatcggtaaaaatgcatatcaaatatgacctcaaaggctcaacctacaaacggcgggcttcccagaaagagcgagagaagcctcttcccacatttaaagacctagacttcttacaagacatccctgatggtctttttttggatgctgacatgtacaacgctctctgtaagaccctgcagcgtgactgtttggtgctgcagagcttcaagataatggattacagcctcttgatgtcaatccataatatagatcatgcacaacgagagcccttaagcagtgaaacacagtactcagttgatactcgaagaccggccccccaaaaggctctgtattccacagccatggaatccatccagggagaggctcgacggggtggtaccatggagactgatgaccatatgggtggcatccctgcccggaatagtaaaggggaaaggcttctgctttatattggcatcattgacattctacagtcttacaggtttgttaagaagttggagcactcttggaaagccctggtacatgacggagacactgtctcagtgcatcgcccaggcttctacgctgaacggttccagcgcttcatgtgcaacacagtatttaagaagattcccttgaagccttctccttccaaaaagtttcggtctggctcatctttctctcggcgagcaggctccagtggcaactcctgcattacttaccagccatcggtctctggggaacacaaggcacaagtgacaacaaaggcagaagtggagccaggcgttcaccttggtcgtcctgatgttttacctcagactccacctttggaggaaatcagtgagggctcgcctattcctgaccccagtttctcacctctagttggagagactttgcaaatgctaactacaagtacaaccttggaaaagcttgaagttgcagagtcagagttcacccattaagcgcaaagcctcagaagacctgg

SEQ ID NO: 165217 - DNA, 3613 bp, Homo sapiens
  Payload ID: 12533
  Gene Symbol: PIP5K1A
  Gene Name: phosphatidylinositol-4-phosphate 5-kinase, type I, alpha
  Uniprot ID: Q99755
  ENST ID: ENST00000368890
  CDS Start-End: 445-1947
attttttgcttggctacccggagtgaagcggccgggttgggcgattaacaggccgtggttaggaaggacggagaaggggcgttcgctcctttgggacttttcatgcctcgtttttttttcagatgtggcttggtctgggcgcaaggtcccagcagccagcttaagcttactcttctgtgaaaggggaaagtatcccctgtggaaagcggttaaacttgtggagggggtgcgggacgtgagttcttccccatgccaggcgaatggtgtggccttgagctggtccaggagccggctcgacgtgtctgagggaggccccggagggggcggggaggtggcccacagaacgcgggttctgtaaagagacgttgggaagattcgattccgagaagaggaagaaccggattgaaagagagccaggccgctgagggggagggggctgctaagatggcgtcggcctcctccgggccgtcgtcttcggtcggtttttcatcctttgatcccgcggtcccttcctgtaccttgtcctcagcatctggaatcaagagacccatggcatctgaggtgccttatgcctctggcatgcccatcaagaaaataggccatagaagtgttgattcctcaggagagacaacatataaaaagacaacctcatcagccttgaaaggtgccatccagttaggcattacccacactgtggggagcctgagtaccaaaccagagcgtgatgtcctcatgcaagatttctacgtggttgagagtatcttctttcccagtgaagggagcaacctgacccctgctcatcactacaatgactttcgtttcaagacctatgcacctgttgccttccgctacttccgggagctatttggtatccggcccgatgattacttgtattccctctgcagtgagccgctgattgaactctgtagctctggagctagtggttccctattctatgtgtccagcgacgatgagttcattattaagacagtccaacataaagaggcggaatttctgcagaagctgcttccaggatactacatgaacctcaaccagaaccctcggactttgctgcctaaattctatggactgtactgtgtgcaggcaggtggcaagaacattcggattgtggtgatgaacaatcttttaccaagatcggtaaaaatgcatatcaaatatgacctcaaaggctcaacctacaaacggcgggcttcccagaaagagcgagagaagcctcttcccacatttaaagacctagacttcttacaagacatccctgatggtctttttttggatgctgacatgtacaacgctctctgtaagaccctgcagcgtgactgtttggtgctgcagagcttcaagataatggattacagcctcttgatgtcaatccataatatagatcatgcacaacgagagcccttaagcagtgaaacacagtactcagttgatactcgaagaccggccccccaaaaggctctgtattccacagccatggaatccatccagggagaggctcgacggggtggtaccatggagactgatgaccatatgggtggcatccctgcccggaatagtaaaggggaaaggcttctgctttatattggcatcattgacattctacagtcttacaggtttgttaagaagttggagcactcttggaaagccctggtacatgacggagacactgtctcagtgcatcgcccaggcttctacgctgaacggttccagcgcttcatgtgcaacacagtatttaagaagattccctgcgttcaccttggtcgtcctgatgttttacctcagactccacctttggaggaaatcagtgagggctcgcctattcctgaccccagtttctcacctctagttggagagactttgcaaatgctaactacaagtacaaccttggaaaagcttgaagttgcagagtcagagttcacccattaagcgcaaagcctcagaagacctggaacaagattctgccatctctgtgatcccaagatgtcagcccttgccccagcaatgctgaattttcttctacttggtcatcaaaaaaggagtgtaatagaagtgaggggagctgctcctccatcttcttcctgaagaagaaccttctctccttcctcttcctcatgaatgggccttagtgcctcagagagttgaggaccgcagcatcccctccactccagagttgggtggtatggattttcaactggccaaccctttgcctccactattgaatttttttcagacccccattcttcatgctggaaatgggattgctggacttggcagctttctttcccctcgtctttgactaggaaccggactcttaatttcctcaggacagactagctggcacattatccctaccttagttctttctctctgactcctggaagaatactcctgtaatctctgtaaaggtttttgggggataagggtgtttaaccacctcccagctttcttcttctttttttttttctgaaaaaaggaaaaagcacacagcacacaatttcaagccattttcagatcagaactccagaagtgttgacaagatgcctattcgtagagttccctcagaagagccatggtgtttatgaagagaagagtagtgattgctctgccagaagcagctcctctttaaactcctcctctcttgatgaatttcttaaggctgaaggaatgaagagagtgggacatggggtaatctttatcccttttgttaaaacaggaggcagccatgggctgggagatcatagcccttcctaggcagaatcctgttcactgccaggctatagtaattattactattttgcaatttgaaatatattctggttgtttttctaaatgtgaagacttaccaaatgaattttagatcattctccagaggagattttttttgctcttctcatcttttccaacagtgttctcctgtttgtggagctaaggtaaagaggggacacttctgtctgtttaacagacagtccatatctgtgaggccagcaaatattttcttaaactcatggggagacagcagattcttgccttggtgaggtcattgctgtgccatatgtcctacccccctgtcttcatgcagggaagttggaaatgggggctacatatgccctctcctccccgtctacaagagttgtggttttccatctgatccttccactcttgtcaggggaagaagggggcctggtatctcaggcagattgttgaattcctgttctatcccttctctatcccaccctgccttgataatatgttagcccataccccaaataactgtctatattagacacccccagccagtttctggctgcctgtctttgctgccatgttttttacaagaaggaaagaattcttgctatttttttttcataatttactatttatgatgtatttaagtgttttattaaggacagagttctgttaggggtgggagggaatatttgagggagggctgggtcttagggaaaggaatggggaagcaacatttttattaagtgttactatttgcctctactttgtattgttcagaaatggcaaatacaatataaaagtgatatatggttttaatgtaataaactttaatgagttatttaga

SEQ ID NO: 165218 - DNA, 3737 bp, Homo sapiens
  Payload ID: 12533
  Gene Symbol: PIP5K1A
  Gene Name: phosphatidylinositol-4-phosphate 5-kinase, type I, alpha
  ENST ID: ENST00000409426
  CDS Start-End: 446-2098
gattttttgcttggctacccggagtgaagcggccgggttgggcgattaacaggccgtggttaggaaggacggagaaggggcgttcgctcctttgggacttttcatgcctcgtttttttttcagatgtggcttggtctgggcgcaaggtcccagcagccagcttaagcttactcttctgtgaaaggggaaagtatcccctgtggaaagcggttaaacttgtggagggggtgcgggacgtgagttcttccccatgccaggcgaatggtgtggccttgagctggtccaggagccggctcgacgtgtctgagggaggccccggagggggcggggaggtggcccacagaacgcgggttctgtaaagagacgttgggaagattcgattccgagaagaggaagaaccggattgaaagagagccaggccgctgagggggagggggctgctaagatggcgtcggcctcctccgggccgtcgtcttcggtcggtttttcatcctttgatcccgcggtcccttcctgtaccttgtcctcagcagcatctggaatcaagagacccatggcatctgaggtgccttatgcctctggcatgcccatcaagaaaataggccatagaagtgttgattcctcaggagagacaacatataaaaagacaacctcatcagccttgaaaggtgccatccagttaggcattacccacactgtggggagcctgagtaccaaaccagagcgtgatgtcctcatgcaagatttctacgtggttgagagtatcttctttcccagtgaagggagcaacctgacccctgctcatcactacaatgactttcgtttcaagacctatgcacctgttgccttccgctacttccgggagctatttggtatccggcccgatgattacttgtattccctctgcagtgagccgctgattgaactctgtagctctggagctagtggttccctattctatgtgtccagcgacgatgagttcattattaagacagtccaacataaagaggcggaatttctgcagaagctgcttccaggatactacatgaacctcaaccagaaccctcggactttgctgcctaaattctatggactgtactgtgtgcaggcaggtggcaagaacattcggattgtggtgatgaacaatcttttaccaagatcggtaaaaatgcatatcaaatatgacctcaaaggctcaacctacaaacggcgggcttcccagaaagagcgagagaagcctcttcccacatttaaagacctagacttcttacaagacatccctgatggtctttttttggatgctgacatgtacaacgctctctgtaagaccctgcagcgtgactgtttggtgctgcagagcttcaagataatggattacagcctcttgatgtcaatccataatatagatcatgcacaacgagagcccttaagcagtgaaacacagtactcagttgatactcgaagaccggccccccaaaaggctctgtattccacagccatggaatccatccagggagaggctcgacggggtggtaccatggagactgatgaccatatgggtggcatccctgcccggaatagtaaaggggaaaggcttctgctttatattggcatcattgacattctacagtcttacaggtttgttaagaagttggagcactcttggaaagccctggtacatgacggagacactgtctcagtgcatcgcccaggcttctacgctgaacggttccagcgcttcatgtgcaacacagtatttaagaagattcccttgaagccttctccttccaaaaagtttcggtctggctcatctttctctcggcgagcaggctccagtggcaactcctgcattacttaccagccatcggtctctggggaacacaaggcacaagtgacaacaaaggcagaagtggagccaggcgttcaccttggtcgtcctgatgttttacctcagactccacctttggaggaaatcagtgagggctcgcctattcctgaccccagtttctcacctctagttggagagactttgcaaatgctaactacaagtacaaccttggaaaagcttgaagttgcagagtcagagttcacccattaagcgcaaagcctcagaagacctggaacaagattctgccatctctgtgatcccaagatgtcagcccttgccccagcaatgctgaattttcttctacttggtcatcaaaaaaggagtgtaatagaagtgaggggagctgctcctccatcttcttcctgaagaagaaccttctctccttcctcttcctcatgaatgggccttagtgcctcagagagttgaggaccgcagcatcccctccactccagagttgggtggtatggattttcaactggccaaccctttgcctccactattgaatttttttcagacccccattcttcatgctggaaatgggattgctggacttggcagctttctttcccctcgtctttgactaggaaccggactcttaatttcctcaggacagactagctggcacattatccctaccttagttctttctctctgactcctggaagaatactcctgtaatctctgtaaaggtttttgggggataagggtgtttaaccacctcccagctttcttcttctttttttttttctgaaaaaaggaaaaagcacacagcacacaatttcaagccattttcagatcagaactccagaagtgttgacaagatgcctattcgtagagttccctcagaagagccatggtgtttatgaagagaagagtagtgattgctctgccagaagcagctcctctttaaactcctcctctcttgatgaatttcttaaggctgaaggaatgaagagagtgggacatggggtaatctttatcccttttgttaaaacaggaggcagccatgggctgggagatcatagcccttcctaggcagaatcctgttcactgccaggctatagtaattattactattttgcaatttgaaatatattctggttgtttttctaaatgtgaagacttaccaaatgaattttagatcattctccagaggagattttttttgctcttctcatcttttccaacagtgttctcctgtttgtggagctaaggtaaagaggggacacttctgtctgtttaacagacagtccatatctgtgaggccagcaaatattttcttaaactcatggggagacagcagattcttgccttggtgaggtcattgctgtgccatatgtcctacccccctgtcttcatgcagggaagttggaaatgggggctacatatgccctctcctccccgtctacaagagttgtggttttccatctgatccttccactcttgtcaggggaagaagggggcctggtatctcaggcagattgttgaattcctgttctatcccttctctatcccaccctgccttgataatatgttagcccataccccaaataactgtctatattagacacccccagccagtttctggctgcctgtctttgctgccatgttttttacaagaaggaaagaattcttgctatttttttttcataatttactatttatgatgtatttaagtgttttattaaggacagagttctgttaggggtgggagggaatatttgagggagggctgggtcttagggaaaggaatggggaagcaacatttttattaagtgttactatttgcctctactttgtattgttcagaaatggcaaatacaatataaaagtgatatatggttttaat

SEQ ID NO: 165219 - DNA, 567 bp, Homo sapiens
  Payload ID: 12533
  Gene Symbol: PIP5K1A
  Gene Name: phosphatidylinositol-4-phosphate 5-kinase, type I, alpha
  ENST ID: ENST00000424999
  CDS Start-End: 444-567
ttttttgcttggctacccggagtgaagcggccgggttgggcgattaacaggccgtggttaggaaggacggagaaggggcgttcgctcctttgggacttttcatgcctcgtttttttttcagatgtggcttggtctgggcgcaaggtcccagcagccagcttaagcttactcttctgtgaaaggggaaagtatcccctgtggaaagcggttaaacttgtggagggggtgcgggacgtgagttcttccccatgccaggcgaatggtgtggccttgagctggtccaggagccggctcgacgtgtctgagggaggccccggagggggcggggaggtggcccacagaacgcgggttctgtaaagagacgttgggaagattcgattccgagaagaggaagaaccggattgaaagagagccaggccgctgagggggagggggctgctaagatggcgtcggcctcctccgggccgtcgtcttcggtcggtttttcatcctttgatcccgcggtcccttcctgtaccttgtcctcaggtttcaactttctgtgctgtggggtcagtggtaagagag

SEQ ID NO: 165220 - DNA, 373 bp, Homo sapiens
  Payload ID: 12533
  Gene Symbol: PIP5K1A
  Gene Name: phosphatidylinositol-4-phosphate 5-kinase, type I, alpha
  ENST ID: ENST00000447555
  CDS Start-End: 70-373
gtcgcgggaaggttgtgataagtccctgatagcctcccgtgcccttttttgacaggtcttcactgattcatgcatcaaatatttactgaactccgtcactgtgcagtgcctaactttgtgcttgaggcaaacaaaacacagatctatttcgaatgccattccgaggaagcatctggaatcaagagacccatggcatctgaggtgccttatgcctctggcatgcccatcaagaaaataggccatagaagtgttgattcctcaggagagacaacatataaaaagacaacctcatcagccttgaaaggtgccatccagttaggcattacccacactgtggggagcctgagtaccaaaccagagcgtgatgtcctca

SEQ ID NO: 165221 - DNA, 353 bp, Homo sapiens
  Payload ID: 12533
  Gene Symbol: PIP5K1A
  Gene Name: phosphatidylinositol-4-phosphate 5-kinase, type I, alpha
  ENST ID: ENST00000418435
  CDS Start-End: 94-353
aagagagaatctcttatatgtgctgatacaggtttcaactttctgtgctgtggggtcagtggtaagagagcagcatctggaatcaagagacccatggcatctgaggtcttggaagctagacaggattcttacatctcattggtgccttatgcctctggcatgcccatcaagaaaataggccatagaagtgttgattcctcaggagagacaacatataaaaagacaacctcatcagccttgaaaggtgccatccagttaggcattacccacactgtggggagcctgagtaccaaaccagagcgtgatgtcctcatgcaagatttctacgtggttgagagtatcttctttcccag

SEQ ID NO: 165222 - DNA, 2297 bp, Homo sapiens
  Payload ID: 12533
  Gene Symbol: PIP5K1A
  Gene Name: phosphatidylinositol-4-phosphate 5-kinase, type I, alpha
  Uniprot ID: Q99755
  ENST ID: ENST00000441902
  CDS Start-End: 445-2013
attttttgcttggctacccggagtgaagcggccgggttgggcgattaacaggccgtggttaggaaggacggagaaggggcgttcgctcctttgggacttttcatgcctcgtttttttttcagatgtggcttggtctgggcgcaaggtcccagcagccagcttaagcttactcttctgtgaaaggggaaagtatcccctgtggaaagcggttaaacttgtggagggggtgcgggacgtgagttcttccccatgccaggcgaatggtgtggccttgagctggtccaggagccggctcgacgtgtctgagggaggccccggagggggcggggaggtggcccacagaacgcgggttctgtaaagagacgttgggaagattcgattccgagaagaggaagaaccggattgaaagagagccaggccgctgagggggagggggctgctaagatggcgtcggcctcctccgggccgtcgtcttcggtcggtttttcatcctttgatcccgcggtcccttcctgtaccttgtcctcagcagcatctggaatcaagagacccatggcatctgaggtgccttatgcctctggcatgcccatcaagaaaataggccatagaagtgttgattcctcaggagagacaacatataaaaagacaacctcatcagccttgaaaggtgccatccagttaggcattacccacactgtggggagcctgagtaccaaaccagagcgtgatgtcctcatgcaagatttctacgtggttgagagtatcttctttcccagtgaagggagcaacctgacccctgctcatcactacaatgactttcgtttcaagacctatgcacctgttgccttccgctacttccgggagctatttggtatccggcccgatgattacttgtattccctctgcagtgagccgctgattgaactctgtagctctggagctagtggttccctattctatgtgtccagcgacgatgagttcattattaagacagtccaacataaagaggcggaatttctgcagaagctgcttccaggatactacatgaacctcaaccagaaccctcggactttgctgcctaaattctatggactgtactgtgtgcaggcaggtggcaagaacattcggattgtggtgatgaacaatcttttaccaagatcggtaaaaatgcatatcaaatatgacctcaaaggctcaacctacaaacggcgggcttcccagaaagagcgagagaagcctcttcccacatttaaagacctagacttcttacaagacatccctgatggtctttttttggatgctgacatgtacaacgctctctgtaagaccctgcagcgtgactgtttggtgctgcagagcttcaagataatggattacagcctcttgatgtcaatccataatatagatcatgcacaacgagagcccttaagcagtgaaacacagtactcagttgatactcgaagaccggccccccaaaaggctctgtattccacagccatggaatccatccagggagaggctcgacggggtggtaccatggagactgatgaccagtttgttaagaagttggagcactcttggaaagccctggtacatgacggagacactgtctcagtgcatcgcccaggcttctacgctgaacggttccagcgcttcatgtgcaacacagtatttaagaagattcccttgaagccttctccttccaaaaagtttcggtctggctcatctttctctcggcgagcaggctccagtggcaactcctgcattacttaccagccatcggtctctggggaacacaaggcacaagtgacaacaaaggcagaagtggagccaggcgttcaccttggtcgtcctgatgttttacctcagactccacctttggaggaaatcagtgagggctcgcctattcctgaccccagtttctcacctctagttggagagactttgcaaatgctaactacaagtacaaccttggaaaagcttgaagttgcagagtcagagttcacccattaagcgcaaagcctcagaagacctggaacaagattctgccatctctgtgatcccaagatgtcagcccttgccccagcaatgctgaattttcttctacttggtcatcaaaaaaggagtgtaatagaagtgaggggagctgctcctccatcttcttcctgaagaagaaccttctctccttcctcttcctcatgaatgggccttagtgcctcagagagttgaggaccgcagcatcccctccactccagagttgggtggtatggattttcaactggccaaccctttgcctc

SEQ ID NO: 165223 - DNA, 540 bp, Homo sapiens
  Payload ID: 12533
  Gene Symbol: PIP5K1A
  Gene Name: phosphatidylinositol-4-phosphate 5-kinase, type I, alpha
  ENST ID: ENST00000454769
  CDS Start-End: 273-392
ttctgtgaaaggggaaagtatcccctgtggaaagcggttaaacttgtggagggggtgcgggacgtgagttcttccccatgccaggcgaatggtgtggccttgagctggtccaggagccggctcgacgtgtctgagggaggccccggagggggcggggaggtggcccacagaacgcgggttctgtaaagagacgttgggaagattcgattccgagaagaggaagaaccggattgaaagagagccaggccgctgagggggagggggctgctaagatggcgtcggcctcctccgggccgtcgtcttcggtcggtttttcatcctttgatcccgcggtcccttcctgtaccttgtcctcaggtaagcccggcagggcgtgggtagggagctggtgaggaatatgcgatgggaggaagagcgagacctaagagggtacctgtagctgggaatgtcctacgtgttaccgcagcatctggaatcaagagacccatggcatctgaggtgccttatgcctctggcatgcccatcaagaaaataggccat

SEQ ID NO: 165224 - DNA, 2654 bp, Homo sapiens
  Payload ID: 12534
  Gene Symbol: PIP5K1B
  Gene Name: phosphatidylinositol-4-phosphate 5-kinase, type I, beta
  Uniprot ID: O14986
  ENST ID: ENST00000265382
  CDS Start-End: 306-1928
aacttgcagactgtggcgcaactggtcttggtagcggaggcacccgaatgctgcccgggtgagatgaggaagccaaggcccagcagagctgagatgtgactgcagagccgtccaaccccagtcctgtgacctttctctggtgcctgatacctctcagcatttgagggccttttctcttcctgcttcatctctaaaggtccttctaggagagaggtgaaagaaacctggcaaagaaaacggtctcgacaatgagtaggccacccatcactactaactacagatgacttgccatttcatttacaaagatgtcttctgctgctgaaaatggagaggcagcacctggaaaacaaaatgaagaaaaaacctataaaaagactgcatcatctgctattaaaggtgctattcagctgggaataggatacacagtgggtaatctcacttccaagccagaacgagatgttcttatgcaagacttttatgtggtggaaagtgtgttcctacccagcgaagggagcaatctgaccccagcacatcactacccagactttagatttaagacatacgctccattagcattccgatatttcagagaactttttggtatcaagcctgatgattacttgtattccatctgcagtgaacctctaatagaactgtctaaccctggagccagtggatccttgttttttgtgaccagtgatgatgaatttatcatcaaaacagttcagcacaaagaagctgagtttcttcagaagctactgccaggctattacatgaatttaaaccagaatccaaggactcttttgccaaaattttacggactgtattgtatgcaatcaggaggcattaatatcaggattgtggtgatgaacaacgttttgccacgctccatgagaatgcactttacatatgacttgaaaggctcaacgtataagcgaagagcatcccgtaaagagagagagaaatccaaccccacatttaaggacttagatttcctgcaagacatgcacgaagggttgtattttgatacggaaacatacaacgcgcttatgaaaacacttcagagagactgccgggtgctagaaagcttcaagatcatggattatagccttctgttgggaattcatttcctggaccattccctcaaagagaaagaggaggagaccccacaaaatgtgcctgatgctaagcggactgggatgcagaaggttctctactcaacagccatggaatctatccagggtccagggaaatctggagatgggataatcacagagaacccagacacaatgggaggcattccagctaaaagccataggggagaaaaactacttttatttatgggcattattgacattctgcaatcatataggttaatgaagaagttagaacattcctggaaagctcttgtttatgatggggacactgtttctgttcatagaccaagcttttatgcagacagatttcttaagttcatgaattccagagttttcaagaaaattcaagctttgaaggcttcaccgtctaagaaacggtgcaattcaatcgccgccctaaaggccacttcacaggagattgtgtcctcaattagccaggaatggaaggatgagaagcgggatttgctgactgaaggacaaagttttagcagccttgatgaagaagccctgggatcccgacacaggccagacctggtccctagcactccatcactgtttgaagctgcttccttggcaaccacaatttcatcttcttccttatacgtcaatgagcactatccacacgacaggcctacactctattcaaacagcaaagggttaccttccagttcaacatttaccttggaagaggggaccatctacttgaccgctgagcccaacactctggaagtgcaggatgacaatgcttctgtgcttgacgtctatttataagtgaaaatggtgatcacctaagcacatggatgagacgtgagcacagttatggcagagaagtttctccgcaccagaattatccacagcaacttggctgagccccactacacacagagaaatcatcaacctgacttaagagttttcaagatgtcaacttcaggctgatcagcagatgggatgtgaaaaatactaccctattctatcatttgctgttgcttgctgaactgtgaagaactgcatgaactatatttaagctgctttctgtaccattgccaatcacctttttggagttggaagtgctattttcctatggacttttgcattatttcattgtgcatgcatccagtgattatacataagcaacatatgtaatctgcttatatatttttaaaaatccatccacacacatggtaaattaagtataaattcttttgcaaaattatagttcatgtcattgaaagtttaaattggtttcatttaaagatcaatatactaggtctgccttcactttatagaaaactagcttctataaagattttttcactgtttactagtgaaatgagaaaagcaaagctatttataaaaggccttatgtcgtgtacatacattgtctttgaaatatttgtgatctagtttattgcttgtaaaagagaaattatataatttatttagtaaatactactgtaaactatagttttgtgagagaaataaaatattttgttctca

SEQ ID NO: 165225 - DNA, 612 bp, Homo sapiens
  Payload ID: 12534
  Gene Symbol: PIP5K1B
  Gene Name: phosphatidylinositol-4-phosphate 5-kinase, type I, beta
  ENST ID: ENST00000377284
  CDS Start-End: 302-612
gctgaacccaagagactgatgtattgcccagactcctgcacgctgtctgccagccacagatgaggaagccaaggcccagcagagctgagatgtgactgcagagccgtccaaccccagtcctgtgacctttctctggtgcctgatacctctcagcatttgagggccttttctcttcctgcttcatctctaaaggtccttctaggagagaggtgaaagaaacctggcaaagaaaacggtctcgacaatgagtaggccacccatcactactaactacagatgacttgccatttcatttacaaagatgtcttctgctgctgaaaatggagaggcagcacctggaaaacaaaatgaagaaaaaacctataaaaagactgcatcatctgctattaaaggtgctattcagctgggaataggatacacagtgggtaatctcacttccaagccagaacgagatgttcttatgcaagacttttatgtggtggaaagtgtgttcctacccagcgaagggagcaatctgaccccagcacatcactacccagactttagatttaagacatacgctccattagcattccgatatttcagagaactttttggtatcaagcctgatga

SEQ ID NO: 165226 - DNA, 791 bp, Homo sapiens
  Payload ID: 12534
  Gene Symbol: PIP5K1B
  Gene Name: phosphatidylinositol-4-phosphate 5-kinase, type I, beta
  ENST ID: ENST00000437200
  CDS Start-End: 305-791
cgaaagcccaccaatccattgtggaatgacctctacaaatagttttgcttctgcacaaccagatgaggaagccaaggcccagcagagctgagatgtgactgcagagccgtccaaccccagtcctgtgacctttctctggtgcctgatacctctcagcatttgagggccttttctcttcctgcttcatctctaaaggtccttctaggagagaggtgaaagaaacctggcaaagaaaacggtctcgacaatgagtaggccacccatcactactaactacagatgacttgccatttcatttacaaagatgtcttctgctgctgaaaatggagaggcagcacctggaaaacaaaatgaagaaaaaacctataaaaagactgcatcatctgctattaaaggtgctattcagctgggaataggatacacagtgggtaatctcacttccaagccagaacgagatgttcttatgcaagacttttatgtggtggaaagtgtgttcctacccagcgaagggagcaatctgaccccagcacatcactacccagactttagatttaagacatacgctccattagcattccgatatttcagagaactttttggtatcaagcctgatgattacttgtattccatctgcagtgaacctctaatagaactgtctaaccctggagccagtggatccttgttttttgtgaccagtgatgatgaatttatcatcaaaacagttcagcacaaagaagctgagtttcttcagaagctactgccaggctattacatgaatttaaaccagaatc

SEQ ID NO: 165227 - DNA, 813 bp, Homo sapiens
  Payload ID: 12534
  Gene Symbol: PIP5K1B
  Gene Name: phosphatidylinositol-4-phosphate 5-kinase, type I, beta
  ENST ID: ENST00000440050
  CDS Start-End: 343-813
agtgcattccaagttctaaacagctgagttttggatctcagctcctttgagagttgtggaccagtcagacacaaaattatctttaaatatacagatagggatgaggaagccaaggcccagcagagctgagatgtgactgcagagccgtccaaccccagtcctgtgacctttctctggtgcctgatacctctcagcatttgagggccttttctcttcctgcttcatctctaaaggtccttctaggagagaggtgaaagaaacctggcaaagaaaacggtctcgacaatgagtaggccacccatcactactaactacagatgacttgccatttcatttacaaagatgtcttctgctgctgaaaatggagaggcagcacctggaaaacaaaatgaagaaaaaacctataaaaagactgcatcatctgctattaaaggtgctattcagctgggaataggatacacagtgggtaatctcacttccaagccagaacgagatgttcttatgcaagacttttatgtggtggaaagtgtgttcctacccagcgaagggagcaatctgaccccagcacatcactacccagactttagatttaagacatacgctccattagcattccgatatttcagagaactttttggtatcaagcctgatgattacttgtattccatctgcagtgaacctctaatagaactgtctaaccctggagccagtggatccttgttttttgtgaccagtgatgatgaatttatcatcaaaacagttcagcacaaagaagctgagtttcttcagaagctactgccaggctattacatg

SEQ ID NO: 165228 - DNA, 3335 bp, Homo sapiens
  Payload ID: 12534
  Gene Symbol: PIP5K1B
  Gene Name: phosphatidylinositol-4-phosphate 5-kinase, type I, beta
  Uniprot ID: O14986
  ENST ID: ENST00000478500
  CDS Start-End: 343-1992
agtgcattccaagttctaaacagctgagttttggatctcagctcctttgagagttgtggaccagtcagacacaaaattatctttaaatatacagatagggatgaggaagccaaggcccagcagagctgagatgtgactgcagagccgtccaaccccagtcctgtgacctttctctggtgcctgatacctctcagcatttgagggccttttctcttcctgcttcatctctaaaggtccttctaggagagaggtgaaagaaacctggcaaagaaaacggtctcgacaatgagtaggccacccatcactactaactacagatgacttgccatttcatttacaaagatgtcttctgctgctgaaaatggagaggcagcacctggaaaacaaaatgaagaaaaaacctataaaaagacacaagtgaaaaaccaaatcctgtctcgtttacccaagattccgtgtacattcattcaagcatggaccaacacagagatgattacgttgctagcctgttattacttcagatcagtttcaactgcatcatctgctattaaaggtgctattcagctgggaataggatacacagtgggtaatctcacttccaagccagaacgagatgttcttatgcaagacttttatgtggtggaaagtgtgttcctacccagcgaagggagcaatctgaccccagcacatcactacccagactttagatttaagacatacgctccattagcattccgatatttcagagaactttttggtatcaagcctgatgattacttgtattccatctgcagtgaacctctaatagaactgtctaaccctggagccagtggatccttgttttttgtgaccagtgatgatgaatttatcatcaaaacagttcagcacaaagaagctgagtttcttcagaagctactgccaggctattacatgaatttaaaccagaatccaaggactcttttgccaaaattttacggactgtattgtatgcaatcaggaggcattaatatcaggattgtggtgatgaacaacgttttgccacgctccatgagaatgcactttacatatgacttgaaaggctcaacgtataagcgaagagcatcccgtaaagagagagagaaatccaaccccacatttaaggacttagatttcctgcaagacatgcacgaagggttgtattttgatacggaaacatacaacgcgcttatgaaaacacttcagagagactgccgggtgctagaaagcttcaagatcatggattatagccttctgttgggaattcatttcctggaccattccctcaaagagaaagaggaggagaccccacaaaatgtgcctgatgctaagcggactgggatgcagaaggttctctactcaacagccatggaatctatccagggtccagggaaatctggagatgggataatcacagagaacccagacacaatgggaggcattccagctaaaagccataggggagaaaaactacttttatttatgggcattattgacattctgcaatcatataggttaatgaagaagttagaacattcctggaaagctcttgtttatgatggggacactgtttctgttcatagaccaagcttttatgcagacagatttcttaagttcatgaattccagagttttcaagaaaattcaagctttgaaggcttcaccgtctaagaaacggtgcaattcaatcgccgccctaaaggccacttcacaggagattgtgtcctcaattagccaggaatggaaggatgagaagcgggatttgctgactgaaggacaaagttttagcagccttgatgaagaagccctgggatcccgacacaggccagacctggtccctagcactccatcactgtttgaagctgcttccttggcaaccacaatttcatcttcttccttatacgtcaatgagcactatccacacgacaggcctacactctattcaaacaggttcaagatggcaacatcagagcattaaactaagcaagcagtcctgtgtgtggctcacacctgtaatcccagcactttgcgaggccgaggcagactgatctcttgagtccggaagttcaagaccagcctgggcaatatgctcaatccatctgagcacctgttattcatatcagaaggaaatgaaatcaatagcattttcttccccagtggcagtctttaaacttccttctcttttgccagatgagaaggttcagcctagttcttcagtggttccatacttaaaccatccaaaaatacagaaaaacatcaagcaacccaaatcatgtgggacattctgcagtatacctgatgagtactcttcagaactgtcaaggtcatcaaaaacaagaagtctaaaaaaccatcacagtctatgagagcctaaggagatgtgacacctaaatgtcacatggtatccagagtgggactctggaacggaaaaaggcattaaggaaaatgaacaaaatctggatatagtatggagcaaagggttaccttccagttcaacatttaccttggaagaggggaccatctacttgaccgctgagcccaacactctggaagtgcaggatgacaatgcttctgtgcttgacgtctatttataagtgaaaatggtgatcacctaagcacatggatgagacgtgagcacagttatggcagagaagtttctccgcaccagaattatccacagcaacttggctgagccccactacacacagagaaatcatcaacctgacttaagagttttcaagatgtcaacttcaggctgatcagcagatgggatgtgaaaaatactaccctattctatcatttgctgttgcttgctgaactgtgaagaactgcatgaactatatttaagctgctttctgtaccattgccaatcacctttttggagttggaagtgctattttcctatggacttttgcattatttcattgtgcatgcatccagtgattatacataagcaacatatgtaatctgcttatatatttttaaaaatccatccacacacatggtaaattaagtataaattcttttgcaaaattatagttcatgtcattgaaagtttaaattggtttcatttaaagatcaatatactaggtctgccttcactttatagaaaactagcttctataaagattttttcactgtttactagtgaaatgagaaaagcaaagctatttataaaaggccttatgtcgtgtacatacattgtctttgaaatatttgtgatctagtttattgcttgtaaaagagaaattatataatttatttagtaaatactactgtaaactatagttttgtgagagaaataaaatattttgttctcaa

SEQ ID NO: 165229 - DNA, 2664 bp, Homo sapiens
  Payload ID: 12534
  Gene Symbol: PIP5K1B
  Gene Name: phosphatidylinositol-4-phosphate 5-kinase, type I, beta
  Uniprot ID: O14986
  ENST ID: ENST00000541509
  CDS Start-End: 435-1943
ctgctccgtctggccggaggaccggcggggaaggaaggggaaagcggggacacacacactcgccgcggcgcgcgcgcactgcacactcgtagccgcgcgcccccgccaaggcgcgtccggagcgagtttggccccgcggctccagccccggcacctgcccgccctcagcgttgcccccggccccggccccgcccgccgccccctccgccctcccgcccctcccgcccctcccgcccctcgcctgcactgctctcccttcgctgtggggaagcgacaacgtcccgataacttgcagactgtggcgcaactggtcttggtagcggaggcacccgaatgctgcccgggtgagaaacctggcaaagaaaacggtctcgacaatgagtaggccacccatcactactaactacagatgacttgccatttcatttacaaagatgtcttctgctgctgaaaatggagaggcagcacctggaaaacaaaatgaagaaaaaacctataaaaagactgcatcatctgctattaaaggtgctattcagctgggaataggatacacagtgggtaatctcacttccaagccagaacgagatgttcttatgcaagacttttatgtggtggaaagtgtgttcctacccagcgaagggagcaatctgaccccagcacatcactacccagactttagatttaagacatacgctccattagcattccgatatttcagagaactttttggtatcaagcctgatgattacttgtattccatctgcagtgaacctctaatagaactgtctaaccctggagccagtggatccttgttttttgtgaccagtgatgatgaatttatcatcaaaacagttcagcacaaagaagctgagtttcttcagaagctactgccaggctattacatgaatttaaaccagaatccaaggactcttttgccaaaattttacggactgtattgtatgcaatcaggaggcattaatatcaggattgtggtgatgaacaacgttttgccacgctccatgagaatgcactttacatatgacttgaaaggctcaacgtataagcgaagagcatcccgtaaagagagagagaaatccaaccccacatttaaggacttagatttcctgcaagacatgcacgaagggttgtattttgatacggaaacatacaacgcgcttatgaaaacacttcagagagactgccgggtgctagaaagcttcaagatcatggattatagccttctgttgggaattcatttcctggaccattccctcaaagagaaagaggaggagaccccacaaaatgtgcctgatgctaagcggactgggatgcagaaggttctctactcaacagccatggaatctatccagggtccagggaaatctggagatgggataatcacagagaacccagacacaatgggaggcattccagctaaaagccataggggagaaaaactacttttatttatgggcattattgacattctgcaatcatataggttaatgaagaagttagaacattcctggaaagctcttgtttatgatggggacactgtttctgttcatagaccaagcttttatgcagacagatttcttaagttcatgaattccagagttttcaagaaaattcaagctttgaaggcttcaccgtctaagaaacggtgcaattcaatcgccgccctaaaggccacttcacaggagattgtgtcctcaattagccaggaatggaaggatgagaagcgggatttgctgactgaaggacaaagttttagcagccttgatgaagaagccctgggatcccgacacaggccagacctggtccctagcactccatcactgtttgaagctgcttccttggcaaccacaatttcatcttcttccttatacgtcaatgagcactatccacacgacaggcctacactctattcaaacagtaagtgaaaatggtgatcacctaagcacatggatgagacgtgagcacagttatggcagagaagtttctccgcaccagaattatccacagcaacttggctgagccccactacacacagagaaatcatcaacctgacttaagagttttcaagatgtcaacttcaggctgatcagcagatgggatgtgaaaaatactaccctattctatcatttgctgttgcttgctgaactgtgaagaactgcatgaactatatttaagctgctttctgtaccattgccaatcacctttttggagttggaagtgctattttcctatggacttttgcattatttcattgtgcatgcatccagtgattatacataagcaacatatgtaatctgcttatatatttttaaaaatccatccacacacatggtaaattaagtataaattcttttgcaaaattatagttcatgtcattgaaagtttaaattggtttcatttaaagatcaatatactaggtctgccttcactttatagaaaactagcttctataaagattttttcactgtttactagtgaaatgagaaaagcaaagctatttataaaaggccttatgtcgtgtacatacattgtctttgaaatatttgtgatctagtttattgcttgtaaaagagaaattatataatttatttagtaaatactactgtaaactatagttttgtgagagaaataaaatattttgttctc

SEQ ID NO: 165230 - DNA, 5080 bp, Homo sapiens
  Payload ID: 12535
  Gene Symbol: PIP5K1C
  Gene Name: phosphatidylinositol-4-phosphate 5-kinase, type I, gamma
  Uniprot ID: O60331
  ENST ID: ENST00000335312
  CDS Start-End: 90-2096
ctcccttggccggcggcgcttgttgttcggcggcggcggtcgcagctcgggtccccctcgggcgcccccgccgccgtccgcgcgcggccatggagctggaggtaccggacgaggcggagagcgctgaggcgggggccgtgccctcggaggcggcgtgggcggcagagagcggggcggcggcaggtttggctcagaagaaggcggccccaacagaggttctgtccatgacggcacagccgggccctggccatgggaagaagttgggccatcgaggtgtggacgcatccggcgaaaccacctacaagaagaccacctcctccaccctgaagggtgccatccagctgggcatcggctacaccgtgggccacctgagctccaagcccgaacgcgacgtgctcatgcaggacttctacgtggtggagagcatcttcttccccagcgaaggcagcaacctcacccccgcccaccacttccaggacttccgcttcaagacctatgcacctgtcgccttccgctacttccgggagctctttgggatccggccagatgattacttgtactccctgtgcaatgagccgctgatcgagctgtccaacccgggcgccagtggctccctcttctacgtcaccagcgacgacgagttcatcatcaagaccgtcatgcacaaggaggccgagttcctgcagaagctgctccctggctactacatgaacctcaaccagaacccgcggacgctgctgcccaagttctatgggctgtactgcgtgcagtcggggggcaagaacatccgcgtcgtggtcatgaacaacatcctgccccgcgtggtcaagatgcacctcaagttcgacctcaagggctccacctacaagcggcgcgccagcaagaaggagaaggagaagagcttccccacctacaaggacctggacttcatgcaggacatgcccgaggggctcctgctggacgccgacaccttcagcgccctggtcaagacgctgcagcgggactgcctggtcctggaaagtttcaagatcatggactacagcctgctgctgggcgtgcacaacatcgaccagcacgagcgcgagcggcaggcgcagggcgcccagagcacctcagatgagaagcggcctgtgggccagaaggcgctctactccacggccatggagtccatccagggtggcgccgcgcgcggggaggccatcgaatcggatgacacgatgggcgggatccccgctgtgaacggccgcggggagcggctgctgctgcacattggcatcatcgacatcctgcagtcctacaggttcatcaagaaactggagcacacctggaaggccctcgtccacgatggggacacggtgtccgtccaccgccccagcttctatgccgagcgctttttcaagttcatgagcaacacggtctttcggaagaactcctccctgaagtcctcgccctccaagaaggggcgcggcggagccttgctagctgtgaaaccgctggggcccaccgctgccttctcggccagccagatccctagcgagcgggaggaggcccagtacgacctgcggggggcccgcagctaccccacgctggaggacgaaggccggcccgacctcctgccctgcacgccaccttctttcgaagaagccactacagcctccattgccacgactctgtcatccacatccctctccattcctgagcggtccccctcggagacgtcggagcagccgcggtacaggcggcgcacacagtcgtctggacaggatggcaggccgcaggaggagccacccgcggaagaggatctgcagcagattacagtgcaggtggagcctgcgtgcagcgtggagattgtggtccccaaagaggaggacgcaggggtggaggcttccccggccggtgcctctgctgctgttgaagtagaaactgccagccaggcctcagacgaggagggcgcacctgccagccaggcctcggacgaggaggacgcgcccgccaccgacatctactttcccaccgatgagaggagctgggtgtactccccgctccactatagcgcccaggcccccccggcctccgacggcgagagcgacacataatttctatgcagcccccgacccagagccgagctccacttctgctccggctgcccccgaaggcgctgcccaccccgctgaggcccagagctcgggagatgcccgcctcgccgccccaccggacctcgtcctccccctgcacggatgccgacggccgggcccctccccgacaagcctcccagggccccggcaccccggtcggcagcctgcccctgtgagacccaccctcccgagcggccaatcgcatttgagtccttatttggcacagagacggaagcacgtgtgtgccgttttaggaaaagaacaaaaaagacacaaacaaaccaaccagagggagaagagcccctgcccactgcactctttggttctctgctgtgcctgcctgtgtcctgaggaagaagccaggctgttcgcggtggcctctggggacctgagccccgggggccccatcggcctgcagaggggacggctggggtcccgagcaactctgcctccatccacgtgggaagcggaccctcctgccctcagcttgggtttgggggcctcagtgcaggacatctggcctgaacatcgactgtggggacagccctcgccctgccaagcactgcggccactcagcagctatgttcccgccgcagtggggccctgacgcccacctcccaggtgcccctcgagcaaaaacctctggcgcctccaatccagacccaccacagctggagggccaggcctcctcttccccaggctgccacccacgctggcggagctcagggctggggacttgtccttctcttccaacgtaggccactcagcaactggcatggagggcccaggcaacggagacgttttctccatggcaggacagagcgggaggccgggccttgggccacaggagaccagctcagggcggaaggtcaggctccccgccccctccacgtggagacatggcctagggggccaggcccggctccacaggagtctccttcaggactggtgtggatgtccgccgcctctttcttgtttaagtgatgtgatgtctccgaggaggggagagaagactttgtttccgactcatcaccctccaagagggcagcgctcccagtggtgggactcagcccagactgccctggggcagcttcctgggcccgctgcgctcagagggtgctggttggaggccagagctcggcagagtcacccaccctgcccttccccaggacccctgagaggggcttattggtgatggctgtgggaatcccccacttccaagatgtgcccaggatgtgaggagctggagtggaagctgcacctttgggaagaattcctctccagacctggcagagcctggtgtggggtctgagacggccggagaacctcccaggcagggctctgtgttttgtctgttacaacctccgtatgacgccacgccacccgctgttcacgtcccgtcggcctcctgcacagcccacacgctgcgcccggaaggcccctgctgtggagaagccggacccatccccgaggtccccagcgaggacacacactccacgagagcagcccctccactctgcccaggagaggggccgaccctcctcgggaaccggccagccgcgtggctcccagcatccatcaggacaagcccacgtggggtcctccctgcgtgctcagagggtctgtccagccctgggaagcgaccttggcctcagttcacagcctggtgctcatctgctggcaccgggcatccacccatcagcccccgccctgtccctccgaaggacacccagcaggcaccccccggggaggcaggggcagaggtcagaaggggtgtctgggacctggatggccagcagggacaggggcattgtcatctcaaaggcccaacccccagaggccacaccagtcctcccagggagtcctcgagtcgccctgcccagagccctggcaccagagacgccaagagcctgtggggtgactcggagcagcaggtgtggccccgggcgggcggcaccgcgtccagggcagcctccctccgctgagtgacacgggacaccagtgcccggccgacgcgcctttgcaggagaaatgtgcaaacctctgtggataccatttcatttccattcttgtgttgtctccaaggcccttttggagatatacttggtgttggttgtgttttttggttccttttcagagaactgtaaaccgaggctgacgtgctccactgactgtgccgaggggcgggggcaggaggacggcaagacctatttataatatttagcgaactcggtctccctcagatcccccgcgagggaggctgctggacccaccccgctgtcccccatgatagaagtctgtaaataccttggtgaccaatgcccacttcccctcctgggtcacctctgatggctgctgtccactgagaacgtgggcagtgtccaaattcctgtactgtaaagactaaaaggcgtttgctctgagactgacaaggcggaaacttccatgtgtctcctgccaggctctgtccccctacgccatcccgacacgtccccgttcccccgaaacctggctcagtgcaatactcccattgccatggggtccttcaccatggtactgtctccacagccctcagtccccaccccaggagaggcgcctgccacctcctcctcatctccggtggttcaatcgctccgcctgtccccaacccagtcccatttttatggccaaactgattctgaaacaaaatgaaactgcaaacctcgtgtgtcttaactccccccagggatgccactccattcctccgccccgtggtctggtgcgtgacaatccaaagcgccgagacgagggtgctgtgtccctcaaacccagagtggtgggcgcctctgaaaccatacagccactcctggccccaaacactggtttgcatcccaggttcctcgcccacctacccccgccacaccccgtctttttagagatctctctaataaatcgggtaataagca

SEQ ID NO: 165231 - DNA, 3326 bp, Homo sapiens
  Payload ID: 12535
  Gene Symbol: PIP5K1C
  Gene Name: phosphatidylinositol-4-phosphate 5-kinase, type I, gamma
  Uniprot ID: O60331
  ENST ID: ENST00000537021
  CDS Start-End: 1-2103
atggagctggaggtaccggacgaggcggagagcgctgaggcgggggccgtgccctcggaggcggcgtgggcggcagagagcggggcggcggcaggtttggctcagaagaaggcggccccaacagaggttctgtccatgacggcacagccgggccctggccatgggaagaagttgggccatcgaggtgtggacgcatccggcgaaaccacctacaagaagaccacctcctccaccctgaagggtgccatccagctgggcatcggctacaccgtgggccacctgagctccaagcccgaacgcgacgtgctcatgcaggacttctacgtggtggagagcatcttcttccccagcgaaggcagcaacctcacccccgcccaccacttccaggacttccgcttcaagacctatgcacctgtcgccttccgctacttccgggagctctttgggatccggccagatgattacttgtactccctgtgcaatgagccgctgatcgagctgtccaacccgggcgccagtggctccctcttctacgtcaccagcgacgacgagttcatcatcaagaccgtcatgcacaaggaggccgagttcctgcagaagctgctccctggctactacatgaacctcaaccagaacccgcggacgctgctgcccaagttctatgggctgtactgcgtgcagtcggggggcaagaacatccgcgtcgtggtcatgaacaacatcctgccccgcgtggtcaagatgcacctcaagttcgacctcaagggctccacctacaagcggcgcgccagcaagaaggagaaggagaagagcttccccacctacaaggacctggacttcatgcaggacatgcccgaggggctcctgctggacgccgacaccttcagcgccctggtcaagacgctgcagcgggactgcctggtcctggaaagtttcaagatcatggactacagcctgctgctgggcgtgcacaacatcgaccagcacgagcgcgagcggcaggcgcagggcgcccagagcacctcagatgagaagcggcctgtgggccagaaggcgctctactccacggccatggagtccatccagggtggcgccgcgcgcggggaggccatcgaatcggatgacacgatgggcgggatccccgctgtgaacggccgcggggagcggctgctgctgcacattggcatcatcgacatcctgcagtcctacaggttcatcaagaaactggagcacacctggaaggccctcgtccacgatggggacacggtgtccgtccaccgccccagcttctatgccgagcgctttttcaagttcatgagcaacacggtctttcggaagaactcctccctgaagtcctcgccctccaagaaggggcgcggcggagccttgctagctgtgaaaccgctggggcccaccgctgccttctcggccagccagatccctagcgagcgggaggaggcccagtacgacctgcggggggcccgcagctaccccacgctggaggacgaaggccggcccgacctcctgccctgcacgccaccttctttcgaagaagccactacagcctccattgccacgactctgtcatccacatccctctccattcctgagcggtccccctcggagacgtcggagcagccgcggtacaggcggcgcacacagtcgtctggacaggatggcaggccgcaggaggagccacccgcggaagaggatctgcagcagattacagtgcaggtggagcctgcgtgcagcgtggagattgtggtccccaaagaggaggacgcaggggtggaggcttccccggccggtgcctctgctgctgttgaagtagaaactgccagccaggcctcagacgaggagggcgcacctgccagccaggcctcggacgaggaggacgcgcccgccaccgacatctacttttggcgcctctggggtccccatgcacccacctggccctggagaagggagggacgggccgcgtgcctgtgcccctacccaccgcacgtcgtcaccccttttcctgggactggtttgtgcgcgtcctggtctccggatggtacggggggcctgggggccatgtcgtgctgtgtgtctgtgtcctgatgccctgccaggtgggcagcagagaagggagaagggtcctcggtcctgcccctgccccggcaccccccaccttctgcttggcagtcagctgtccccacctgctccccgccacctccctccgcctctcccacccgaccacgggggtggccgcctcatccgctgtcctctgttttccttcctcctccggcccacccggcccgccccgtccagttcacggatgggaggtactggatttactctccccgccatcgccgactgcgggccgtgacgctgagcgcctcggggactgtaagtgaccgcagccggccaccctggggagaaggggcagtgcccctcgggcagcagggagccgcaggtccccggccggaagctcagtgtctgacgtcagttgttttccagaagggctttgggtaaatcacggctgcaattgaggtcagccacgctggccccggaccaggcgctgggctgcatgcgtcactgggaatgtcattcggtcccacgtcgaaccgggcgctccatagggcagcaccatcaccaggtgcacagctgaggcccagggtctgcttcggaccccggccagaccccagcgagcccctctctgcccctggacccagccctctcgtgtcagggtgtcttgggtggacgcttctcactcgtgcagacctggctgcccgtggccccgctggctgcacaggggaggttgcacaggtcagcagagtggctgcagggccgggctctgaaccgcagggccatggagacggggaggagatggtctctccacacccacctcacagatggaggcgctgaggcctcggctcccctgggagcctgggagaccacacggtttagtcaaaatccagatccccaagctctcaaggaggtccccctgggacgccacatgggccccacgtagctgtgagatcctcagggcctgctgttgtcattatgaccaataagcaaggggcccagagagcctaagagacctgcccagcaccgcacagccagaacggggcgcagacccaaagcaggagtgtcccctcgagacaaagcctccgccgaggccgccgtgactccccgcccatcagcaaacctctccgagcacctctgtgtgccaggcactgtggagtgaccccaagaggtggagaccacttccccggctgctctaggcagctccgtcccacggagccagcgggaagccagccaccgcgaagccgtgccccgga

SEQ ID NO: 165232 - DNA, 2289 bp, Homo sapiens
  Payload ID: 12535
  Gene Symbol: PIP5K1C
  Gene Name: phosphatidylinositol-4-phosphate 5-kinase, type I, gamma
  Uniprot ID: O60331
  ENST ID: ENST00000539785
  CDS Start-End: 76-1998
ggcgcttgttgttcggcggcggcggtcgcagctcgggtccccctcgggcgcccccgccgccgtccgcgcgcggccatggagctggaggtaccggacgaggcggagagcgctgaggcgggggccgtgccctcggaggcggcgtgggcggcagagagcggggcggcggcaggtttggctcagaagaaggcggccccaacagaggttctgtccatgacggcacagccgggccctggccatgggaagaagttgggccatcgaggtgtggacgcatccggcgaaaccacctacaagaagaccacctcctccaccctgaagggtgccatccagctgggcatcggctacaccgtgggccacctgagctccaagcccgaacgcgacgtgctcatgcaggacttctacgtggtggagagcatcttcttccccagcgaaggcagcaacctcacccccgcccaccacttccaggacttccgcttcaagacctatgcacctgtcgccttccgctacttccgggagctctttgggatccggccagatgattacttgtactccctgtgcaatgagccgctgatcgagctgtccaacccgggcgccagtggctccctcttctacgtcaccagcgacgacgagttcatcatcaagaccgtcatgcacaaggaggccgagttcctgcagaagctgctccctggctactacatgaacctcaaccagaacccgcggacgctgctgcccaagttctatgggctgtactgcgtgcagtcggggggcaagaacatccgcgtcgtggtcatgaacaacatcctgccccgcgtggtcaagatgcacctcaagttcgacctcaagggctccacctacaagcggcgcgccagcaagaaggagaaggagaagagcttccccacctacaaggacctggacttcatgcaggacatgcccgaggggctcctgctggacgccgacaccttcagcgccctggtcaagacgctgcagcgggactgcctggtcctggaaagtttcaagatcatggactacagcctgctgctgggcgtgcacaacatcgaccagcacgagcgcgagcggcaggcgcagggcgcccagagcacctcagatgagaagcggcctgtgggccagaaggcgctctactccacggccatggagtccatccagggtggcgccgcgcgcggggaggccatcgaatcggatgacacgatgggcgggatccccgctgtgaacggccgcggggagcggctgctgctgcacattggcatcatcgacatcctgcagtcctacaggttcatcaagaaactggagcacacctggaaggccctcgtccacgatggggacacggtgtccgtccaccgccccagcttctatgccgagcgctttttcaagttcatgagcaacacggtctttcggaagaactcctccctgaagtcctcgccctccaagaaggggcgcggcggagccttgctagctgtgaaaccgctggggcccaccgctgccttctcggccagccagatccctagcgagcgggaggaggcccagtacgacctgcggggggcccgcagctaccccacgctggaggacgaaggccggcccgacctcctgccctgcacgccaccttctttcgaagaagccactacagcctccattgccacgactctgtcatccacatccctctccattcctgagcggtccccctcggagacgtcggagcagccgcggtacaggcggcgcacacagtcgtctggacaggatggcaggccgcaggaggagccacccgcggaagaggatctgcagcagattacagtgcaggtggagcctgcgtgcagcgtggagattgtggtccccaaagaggaggacgcaggggtggaggcttccccggccggtgcctctgctgctgttgaagtagaaactgccagccaggcctcagacgaggagggcgcacctgccagccaggcctcggacgaggaggacgcgcccgccaccgacatctacttttaatttctatgcagcccccgacccagagccgagctccacttctgctccggctgcccccgaaggcgctgcccaccccgctgaggcccagagctcgggagatgcccgcctcgccgccccaccggacctcgtcctccccctgcacggatgccgacggccgggcccctccccgacaagcctcccagggccccggcaccccggtcggcagcctgcccctgtgagacccaccctcccgagcggccaatcgcatttgagtccttatttggcacagagacggaagcacgtgtgtgccgtttt

SEQ ID NO: 165233 - DNA, 2933 bp, Homo sapiens
  Payload ID: 12535
  Gene Symbol: PIP5K1C
  Gene Name: phosphatidylinositol-4-phosphate 5-kinase, type I, gamma
  Uniprot ID: O60331
  ENST ID: ENST00000589578
  CDS Start-End: 1-2124
atggagctggaggtaccggacgaggcggagagcgctgaggcgggggccgtgccctcggaggcggcgtgggcggcagagagcggggcggcggcaggtttggctcagaagaaggcggccccaacagaggttctgtccatgacggcacagccgggccctggccatgggaagaagttgggccatcgaggtgtggacgcatccggcgaaaccacctacaagaagaccacctcctccaccctgaagggtgccatccagctgggcatcggctacaccgtgggccacctgagctccaagcccgaacgcgacgtgctcatgcaggacttctacgtggtggagagcatcttcttccccagcgaaggcagcaacctcacccccgcccaccacttccaggacttccgcttcaagacctatgcacctgtcgccttccgctacttccgggagctctttgggatccggccagatgattacttgtactccctgtgcaatgagccgctgatcgagctgtccaacccgggcgccagtggctccctcttctacgtcaccagcgacgacgagttcatcatcaagaccgtcatgcacaaggaggccgagttcctgcagaagctgctccctggctactacatgaacctcaaccagaacccgcggacgctgctgcccaagttctatgggctgtactgcgtgcagtcggggggcaagaacatccgcgtcgtggtcatgaacaacatcctgccccgcgtggtcaagatgcacctcaagttcgacctcaagggctccacctacaagcggcgcgccagcaagaaggagaaggagaagagcttccccacctacaaggacctggacttcatgcaggacatgcccgaggggctcctgctggacgccgacaccttcagcgccctggtcaagacgctgcagcgggactgcctggtcctggaaagtttcaagatcatggactacagcctgctgctgggcgtgcacaacatcgaccagcacgagcgcgagcggcaggcgcagggcgcccagagcacctcagatgagaagcggcctgtgggccagaaggcgctctactccacggccatggagtccatccagggtggcgccgcgcgcggggaggccatcgaatcggatgacacgatgggcgggatccccgctgtgaacggccgcggggagcggctgctgctgcacattggcatcatcgacatcctgcagtcctacaggttcatcaagaaactggagcacacctggaaggccctcgtccacgatggggacacggtgtccgtccaccgccccagcttctatgccgagcgctttttcaagttcatgagcaacacggtctttcggaagaactcctccctgaagtcctcgccctccaagaaggggcgcggcggagccttgctagctgtgaaaccgctggggcccaccgctgccttctcggccagccagatccctagcgagcgggaggaggcccagtacgacctgcggggggcccgcagctaccccacgctggaggacgaaggccggcccgacctcctgccctgcacgccaccttctttcgaagaagccactacagcctccattgccacgactctgtcatccacatccctctccattcctgagcggtccccctcggagacgtcggagcagccgcggtacaggcggcgcacacagtcgtctggacaggatggcaggccgcaggaggagccacccgcggaagaggatctgcagcagattacagtgcaggtggagcctgcgtgcagcgtggagattgtggtccccaaagaggaggacgcaggggtggaggcttccccggccggtgcctctgctgctgttgaagtagaaactgccagccaggcctcagacgaggagggcgcacctgccagccaggcctcggacgaggaggacgcgcccgccaccgacatctactttttcacggatgggaggtactggatttactctccccgccatcgccgactgcgggccgtgacgctgagcgcctcggggactgtaagtgaccgcagccggccaccctggggagaaggggcagtgcccctcgggcagcagggagccgcaggtccccggccggaagctcagtgtctgacgtcagttgttttccagaagggctttgggtaaatcacggctgcaattgaggtcagccacgctggccccggaccaggcgctgggctgcatgcgtcactgggaatgtcattcggtcccacgtcgaaccgggcgctccatagggcagcaccatcaccaggtgcacagctgaggcccagggtctgcttcggaccccggccagaccccagcgagcccctctctgcccctggacccagccctctcgtgtcagggtgtcttgggtggacgcttctcactcgtgcagacctggctgcccgtggccccgctggctgcacaggggaggttgcacaggtcagcagagtggctgcagggccgggctctgaaccgcagggccatggagacggggaggagatggtctctccacacccacctcacagatggaggcgctgaggcctcggctcccctgggagcctgggagaccacacggtttagtcaaaatccagatccccaagctctcaaggaggtccccctgggacgccacatgggccccacgtagctgtgagatcctcagggcctgctgttgtcattatgaccaataagcaaggggcccagagagcctaagagacctgcccagcaccgcacagccagaacggggcgcagacccaaagcaggagtgtcccctcgagacaaagcctccgccgaggccgccgtgactccccgcccatcagcaaacctctccgagcacctctgtgtgccaggcactgtggagtgaccccaagaggtggagaccacttccccggctgctctaggcagctccgtcccacggagccagcgggaagccagccaccgcgaagccgtgccccgga

SEQ ID NO: 165234 - DNA, 1104 bp, Homo sapiens
  Payload ID: 12536
  Gene Symbol: PIP5KL1
  Gene Name: phosphatidylinositol-4-phosphate 5-kinase-like 1
  Uniprot ID: Q5T9C9
  ENST ID: ENST00000300432
  CDS Start-End: 211-786
gtttaggggtgggatcgggtcgggatccggaccagccaaggaagggtccaggtgccgcggatcttgagaaggaggcgtggcctggcgctgggattggcgccggatgcaccccgggttgtggagtttggggatcctcatccggcgccctctccccttccaggagtgcacagtctgcgggtggaccggggaaagaagacgtacttcatcgtcatgcagagcgtcttctaccccgccggccgcatctccgagaggtatgacatcaaaggctgcgaggtgagccgctgggtggatcccgcccctgagggcagcccccttgttctggtgctgaaggacctcaactttcagggcaagaccatcaacctggggccccagcggagctggttcctccgccagatggaactggataccaccttcctccgggagctcaacgtgctggattacagcctcctgatagccttccaacgtctccacgaggatgagaggggcccgggcagcagcctcatcttccgcacggccaggtctgtgcaaggggcacagagcccggaagagtcgagagcccaaaaccgccggctgctgcccgacgcccccaacgccctacacatcctggacgggcccgagcagcgctatttcctgggcgtcgtggatctcgccacagtctacgggctccgcaagcggctggagcacctgtggaagacactgcgctacccaggccggaccttctccactgtcagcccggctcgctacgcccgtcgcctctgccagtgggtggaggcgcacacggagtgacgggcgcccggccccactctccggatctggacgatgggctcacgccaggaacgccggttcccccgggcccgggcatctcgcctgcgcttcctcctgatggtcgccagagggcagcatcccctaactaataccgtaaccgcgcagtcccgtttgacggtggtgccgtgcccagcatcgtgccaaggactcccctactttagctcatttaatcctcaaaaaatgctattattctctttttacagaccatgaaatggaggctcagggggtgaagggactgatcaagatcattcagcaataaatgctggaaccaggactcaa

SEQ ID NO: 165235 - DNA, 2198 bp, Homo sapiens
  Payload ID: 12536
  Gene Symbol: PIP5KL1
  Gene Name: phosphatidylinositol-4-phosphate 5-kinase-like 1
  Uniprot ID: Q5T9C9
  ENST ID: ENST00000388747
  CDS Start-End: 46-1230
gcggcggggaatgcggccaaagcccgggaagctgctgcgggggcgatggctgcgccgagcccggggccccgcgaggtcctggccccctcccctgaggctggatgcagagcagtcacctccagccggcgggggcttctctggcgcctccgagacaagcagtctcgcctgggcctgtttgagatcagcccggggcatgaactgcatgggatgacgtgcatgatgcaggcagggctgtgggctgccacccaggtctccatggaccacccacccacggggccgccctcccgggacgatttctcggaggtcctaacccaggttcacgagggcttcgagctgggcacgctggccggccccgcctttgcctggctgcgccgctccctgggcctggcggaggaggactatcaggctgccctgggccccggcggcccctacctgcagttcctcagcacctccaagagcaaggccagcttcttcctgtcccacgaccagcgcttcttcctgaagacccaggggcgccgagaggtgcaggctctgctcgcccacctgccccgctacgtgcagcacctgcagcggcacccgcactcgctgctggcgcggttgctgggagtgcacagtctgcgggtggaccggggaaagaagacgtacttcatcgtcatgcagagcgtcttctaccccgccggccgcatctccgagaggtatgacatcaaaggctgcgaggtgagccgctgggtggatcccgcccctgagggcagcccccttgttctggtgctgaaggacctcaactttcagggcaagaccatcaacctggggccccagcggagctggttcctccgccagatggaactggataccaccttcctccgggagctcaacgtgctggattacagcctcctgatagccttccaacgtctccacgaggatgagaggggcccgggcagcagcctcatcttccgcacggccaggtctgtgcaaggggcacagagcccggaagagtcgagagcccaaaaccgccggctgctgcccgacgcccccaacgccctacacatcctggacgggcccgagcagcgctatttcctgggcgtcgtggatctcgccacagtctacgggctccgcaagcggctggagcacctgtggaagacactgcgctacccaggccggaccttctccactgtcagcccggctcgctacgcccgtcgcctctgccagtgggtggaggcgcacacggagtgacgggcgcccggccccactctccggatctggacgatgggctcacgccaggaacgccggttcccccgggcccgggcatctcgcctgcgcttcctcctgatggtcgccagagggcagcatcccctaactaataccgtaaccgcgcagtcccgtttgacggtggtgccgtgcccagcatcgtgccaaggactcccctactttagctcatttaatcctcaaaaaatgctattattctctttttacagaccatgaaatggaggctcagggggtgaagggactgatcaagatcattcagcaataaatgctggaaccaggactcaaccatggcttttggattccggagcctgtattcttaaccaccagctcctgcagcttggtcctcatgatctgggcaaggggggaggctgaaggctgcagccctcttgtcatccagatggggaaactgaggcccagagactttaaggggcgtaagcacgggtaagtggcaaggtcggccctgagtacccaggcctcccggccccctgctcctggcctgatactctagggatgcaggtgggagaagcaggggtcctgggggctgcctggagctctgggaggcattctgaacggggtctactactgatctcaggtgagctctgccctcctctgaaagtcacttttctcatcagttaaatgggggcaagggtccgtggtccgaccaaggtcttggcttcacagacatcaccaggagcctgcatgcccctgatcactccttctccttcctccaggaaactccagcctggcctctgaccccagttcaatccgaccatgcccaagcccaagcgggcctttcctccagaactgctccggggcctggctgtgtgactggagcaaggtgctaaacctctctgtgcctcgctggtctaatctgtaaaatgaaggaatggaaacagacctcattaactcattaaatatttgttgagcacctgcca

SEQ ID NO: 165236 - DNA, 1319 bp, Homo sapiens
  Payload ID: 12537
  Gene Symbol: PIP4K2A
  Gene Name: phosphatidylinositol-5-phosphate 4-kinase, type II, alpha
  ENST ID: ENST00000323883
  CDS Start-End: 56-856
ttcctacgacaaaagatacatcatcaagactattaccagtgaagacgtggccgaaatgcacaacatcctgaagaaataccaccagtacatagtggaatgtcatgggatcacccttcttccccagttcttgggcatgtaccggcttaatgttgatggagttgaaatatatgtgatagttacaagaaatgtattcagccaccgtttgtctgtgtataggaaatacgacttaaagatggccaatctaaaagccactttcacttttcccaagccaactggctctacagtggctagagaagctagtgacaaagaaaaggccaaagaactgccaactctgaaagataatgatttcattaatgagggccaaaagatttatattgatgacaacaacaagaaggtcttcctggaaaaactaaaaaaggatgttgagtttctggcccagctgaagctcatggactacagtctgctggtgggaattcatgatgtggagagagccgaacaggaggaagtggagtgtgaggagaacgatggggaggaggagggcgagagcgatggcacccacccggtgggaacccccccagatagccccgggaatacactgaacagctcaccacccctggctcccggggagttcgatccgaacatcgacgtctatggaattaagtgccatgaaaactcgcctaggaaggaggtgtacttcatggcaattattgacatccttactcattatgatgcaaaaaagaaagctgcccatgctgcaaaaactgttaaacatggcgctggcgcggagatctccaccgtgaacccagaacagtattcaaagcgctttttggactttattggccacatcttgacgtaacctcctgcgcagcctcggacagacatgaacattggatggacagaggtggcttcggtgtaggaaaaatgaaaaccaaactcagtgaagtactcatcttgcaggaagcaaacctccttgtttacatcttcaggccaagatgactgatttgggggctactcgctttacagctacctgattttcccagcatcgttctagctatttctgactttgtgtatatgtgtgtgtgtgtgtgttgggggggggtgagtgtgtgcgcgcgtgtgcattttaaaagtcataaattaattaaaacagatccacttcggtcagtatgtgtcccaacaaagaccctttgattccagctatggccgaatgaatgagtgagtgagtgagtgagtgaatgaacacacgtgtgggggaggggagaaggaagtgcatgatgtcaggcaccgtgttggcatcacacaacaaactgtggatcagt

SEQ ID NO: 165237 - DNA, 3802 bp, Homo sapiens
  Payload ID: 12537
  Gene Symbol: PIP4K2A
  Gene Name: phosphatidylinositol-5-phosphate 4-kinase, type II, alpha
  Uniprot ID: P48426
  ENST ID: ENST00000376573
  CDS Start-End: 230-1450
gcggcgggcgcaggatacgggccggggcgcgagccgagcgcagtctgccgggccgagcgggcggagcgagccgagtggggctgagcgcgccggcggcggcgggcggagcggagcgcggcgcgccggggccgccgccggggggatgcggctgcctccccgggccggggtgtagagagggcgggtccccggcctcgggagcacggcggtggaggggacataggaggcggccatggcgacccccggcaacctagggtcctctgtcctggcgagcaagaccaagaccaagaagaagcacttcgtagcgcagaaagtgaagctgtttcgggccagcgacccgctgctcagcgtcctcatgtggggggtaaaccactcgatcaatgaactgagccatgttcaaatccctgttatgttgatgccagatgacttcaaagcctattcaaaaataaaggtggacaatcacctttttaacaaagaaaacatgccgagccatttcaagtttaaggaatactgcccgatggtcttccgtaacctgcgggagaggtttggaattgatgatcaagatttccagaattccctgaccaggagcgcacccctccccaacgactcccaggcccgcagtggagctcgttttcacacttcctacgacaaaagatacatcatcaagactattaccagtgaagacgtggccgaaatgcacaacatcctgaagaaataccaccagtacatagtggaatgtcatgggatcacccttcttccccagttcttgggcatgtaccggcttaatgttgatggagttgaaatatatgtgatagttacaagaaatgtattcagccaccgtttgtctgtgtataggaaatacgacttaaagggctctacagtggctagagaagctagtgacaaagaaaaggccaaagaactgccaactctgaaagataatgatttcattaatgagggccaaaagatttatattgatgacaacaacaagaaggtcttcctggaaaaactaaaaaaggatgttgagtttctggcccagctgaagctcatggactacagtctgctggtgggaattcatgatgtggagagagccgaacaggaggaagtggagtgtgaggagaacgatggggaggaggagggcgagagcgatggcacccacccggtgggaacccccccagatagccccgggaatacactgaacagctcaccacccctggctcccggggagttcgatccgaacatcgacgtctatggaattaagtgccatgaaaactcgcctaggaaggaggtgtacttcatggcaattattgacatccttactcattatgatgcaaaaaagaaagctgcccatgctgcaaaaactgttaaacatggcgctggcgcggagatctccaccgtgaacccagaacagtattcaaagcgctttttggactttattggccacatcttgacgtaacctcctgcgcagcctcggacagacatgaacattggatggacagaggtggcttcggtgtaggaaaaatgaaaaccaaactcagtgaagtactcatcttgcaggaagcaaacctccttgtttacatcttcaggccaagatgactgatttgggggctactcgctttacagctacctgattttcccagcatcgttctagctatttctgactttgtgtatatgtgtgtgtgtgtgtgttgggggggggtgagtgtgtgcgcgcgtgtgcattttaaaagtcataaattaattaaaacagatccacttcggtcagtatgtgtcccaacaaagaccctttgattccagctatggccgaatgaatgagtgagtgagtgagtgagtgaatgaacacacgtgtgggggaggggagaaggaagtgcatgatgtcaggcaccgtgttggcatcacacaacaaactgtggatcagttttttttttttttttttttttttggagttgaaagatgtgagacagtattcagaataatgaagataataatgatgattattataataatgatgatgattccaaggaaaaaacctacagcgaatgttccatttctaccccgcacgcagacactctccctaacactgataacctgagcccccagcactggacggaagaatgctggcgtctccgtgtgtactggttcagggttctggccccagccttgtcaggaccccctggtgtccagagcccccacccctcccgcaacaagcagctgatgccccagtgattctctatacatttttcacctcggccaatatgtccaggaaaactgcttacttctcttttcttgcctggagccttcattgttcacccttacgttgcaatataggaattaatgctacaaaataaaagtaaagcttacctgaaaagtgcatagtttggggcaatggtatctacatctcccactgtgggaaaaccagcaaagcatcaaaactctcaattctcctgttaccaaatgcagatctgaattataagatgtttatgtttgaccattgtttcaacaatgggattttgttacgaattatccctttaactgaaaccctcagttttactgtttacattattaggaaaacagggatatcttttgaatctaaaaatttgatgtacagcatgtgatttttgaagtttacatgtaaagtcacagtataggtgaaataacgtttgtcatattttgagacgtatcctgcagccatgtttttacgtgagtgttttagtcaaagtacatggtagacagtctttcacaataaaaggaaaaggatttttttttcctccaaatgtacatttatcaacctaatgattgatttttttaaaaagagatttcgccccagtctggtttatgaaagttcattgccctaaactgtgctgattgtttttaatcaagttataaatttccaacctagatcatgtatctaccaactctcctgcattttccaaaaggcattgagcttaaatattagtcttgcttagagtaggttatccacttacatgctgcgctaaagccatgcctttgaaactccttgtttaaaacatgatatgatttttgtgggcagtttcagaaaagaaaacaaacaaacaaaaatcgaccctttaattattacttgcaactcaacagatctccctgccgtactgccttttccaggaactttacttcagggctgtccagattgcagctgtgccccgtgtatgtggatctagttcacagagtctttggaagccagcagtcgtgccctccgtatactgtccactcattttatgtagatttggtatcctcagcagccagtgttaacaccactgtcacgtagtgtacagattcatcttttatgtatttaaagtaatccatactatgatttggtttttccctgcaccattaattctggcatcagatcagtttttgtgttgtgaagttctactgtggtttgacccaagaccacaaccatgagaccctgaagtaaagataaggtacacatacattatttgagtaactgtttccttgggggccaatctgtgtatgcttttagaagtttacagaatgcttttatttttgtctataacaaacagtctgtcatttatttctgttgataaaccatttggacagagtgaggacgtttgccctgttatctcctagtgctaacaatacactccagtcatgagccgggctttacaaataaagcacttttgatgactcacaagatgaatccttttttcctctgtcccaattgtgtgtctctgttccaaacacattttaaatactcggtcctgacagtgtctttagctaatccttgaagaaatgaaagtggaattgaatcttt

SEQ ID NO: 165238 - DNA, 1436 bp, Homo sapiens
  Payload ID: 12537
  Gene Symbol: PIP4K2A
  Gene Name: phosphatidylinositol-5-phosphate 4-kinase, type II, alpha
  Uniprot ID: P48426
  ENST ID: ENST00000545335
  CDS Start-End: 207-1250
gcagctgctgcggggcggggagccggagtcagccctggacctccggctgctcgcccgcctcgaagcccccagccccgcggcgcgtgcccccagccctctgggccgcccaggcaccaccacttgcgtcccctttagatctatggcccggtgcgggtcgggggtcccgtgtgcatatcaatgaactgagccatgttcaaatccctgttatgttgatgccagatgacttcaaagcctattcaaaaataaaggtggacaatcacctttttaacaaagaaaacatgccgagccatttcaagtttaaggaatactgcccgatggtcttccgtaacctgcgggagaggtttggaattgatgatcaagatttccagaattccctgaccaggagcgcacccctccccaacgactcccaggcccgcagtggagctcgttttcacacttcctacgacaaaagatacatcatcaagactattaccagtgaagacgtggccgaaatgcacaacatcctgaagaaataccaccagtacatagtggaatgtcatgggatcacccttcttccccagttcttgggcatgtaccggcttaatgttgatggagttgaaatatatgtgatagttacaagaaatgtattcagccaccgtttgtctgtgtataggaaatacgacttaaagggctctacagtggctagagaagctagtgacaaagaaaaggccaaagaactgccaactctgaaagataatgatttcattaatgagggccaaaagatttatattgatgacaacaacaagaaggtcttcctggaaaaactaaaaaaggatgttgagtttctggcccagctgaagctcatggactacagtctgctggtgggaattcatgatgtggagagagccgaacaggaggaagtggagtgtgaggagaacgatggggaggaggagggcgagagcgatggcacccacccggtgggaacccccccagatagccccgggaatacactgaacagctcaccacccctggctcccggggagttcgatccgaacatcgacgtctatggaattaagtgccatgaaaactcgcctaggaaggaggtgtacttcatggcaattattgacatccttactcattatgatgcaaaaaagaaagctgcccatgctgcaaaaactgttaaacatggcgctggcgcggagatctccaccgtgaacccagaacagtattcaaagcgctttttggactttattggccacatcttgacgtaacctcctgcgcagcctcggacagacatgaacattggatggacagaggtggcttcggtgtaggaaaaatgaaaaccaaactcagtgaagtactcatcttgcaggaagcaaacctccttgtttacatcttcaggccaagatgactgatttgggggctactcgctttacagctacctgattttcccagca

SEQ ID NO: 165239 - DNA, 443 bp, Homo sapiens
  Payload ID: 12537
  Gene Symbol: PIP4K2A
  Gene Name: phosphatidylinositol-5-phosphate 4-kinase, type II, alpha
  ENST ID: ENST00000604912
  CDS Start-End: 18-443
gtgaagacgtggccgaaatgcacaacatcctgaagaaataccaccagtacatagtggaatgtcatgggatcacccttcttccccagttcttgggcatgtaccggcttaatgttgatggagttgaaatatatgtgatagttacaagaaatgtattcagccaccgtttgtctgtgtataggaaatacgacttaaagggctctacagtggctagagaagctagtgacaaagaaaaggccaaagaactgccaactctgaaagataatgatttcattaatgagggccaaaagatttatattgatgacaacaacaagaaggtcttcctggaaaaactaaaaaaggatgttgagtttctggcccagctgaagctcatggactacagtctgctggtgggaattcatgatgtggagagagccgaacaggaggaagtggagtgtgaggagaac

SEQ ID NO: 165240 - DNA, 547 bp, Homo sapiens
  Payload ID: 12538
  Gene Symbol: PIP4K2B
  Gene Name: phosphatidylinositol-5-phosphate 4-kinase, type II, beta
  ENST ID: ENST00000617499
  CDS Start-End: 334-547
gtgccccgcgggtggagcgcgcccggggcccagcagagtgggcagatccacgcttaggtggagcgagggggcgttccttggctttctaggctggactttctcttccccttgctgcgtccctcctctcccccggggtgggcatggccttcccacctcacagggagcagtgggactcaaacagcaggagaaggagaaagcaagatatggaaaggaggagtaaacaccggtagatttattggctcctgtggccctctcttcctctctggagttgcagttcttgctttggacctcctcggtcctatcaatgagctgagcaatgttcctgttcctgtcatgctaatgccagatgacttcaaagcctacagcaagatcaaggtggacaatcatctcttcaataaggagaacctgcccagccgctttaagtttaaggagtattgccccatggtgttccgaaaccttcgggagaggtttggaattgatgatcaggattaccagaattcagtgacgcgcagcgcccccatcaacagtgacagccagggtcggtgtg

SEQ ID NO: 165241 - DNA, 5734 bp, Homo sapiens
  Payload ID: 12538
  Gene Symbol: PIP4K2B
  Gene Name: phosphatidylinositol-5-phosphate 4-kinase, type II, beta
  Uniprot ID: P78356
  ENST ID: ENST00000613180
  CDS Start-End: 482-1732
ttgcgggaaagagccaaaccctggcgttggggggcccgggcggggagcccctcccgcggtccacagcgacgcctgcccagccctcctccccttccggctccggcacggggccccgaggcgttcggaggccaggcgggtttctgtcaggcccggggaggaggggcgggcggggcggccgctgcctccccgggacgggccgtaccacgcggacggggaggacggggccaggggactgcagggcggctgcaccgcccgggggcggggtgcggagcgggccggcgggctccccggggcggggcgggagggcggggcgtggggcggacggaaccaccggggcggggtgggaggtaacgggacgggcgcgaccatggcgcggtgagggagcgggggtggggatcggtccgggggaggcctgaggccgctggcttgtgcgctgtctccgccgcccccctctttcgccgccgccgccgccgccccgggcatgtcgtccaactgcaccagcaccacggcggtggcggtggcgccgctcagcgccagcaagaccaagaccaagaagaagcatttcgtgtgccagaaagtgaagctattccgggccagcgagccgatcctcagcgtcctgatgtggggggtgaaccacacgatcaatgagctgagcaatgttcctgttcctgtcatgctaatgccagatgacttcaaagcctacagcaagatcaaggtggacaatcatctcttcaataaggagaacctgcccagccgctttaagtttaaggagtattgccccatggtgttccgaaaccttcgggagaggtttggaattgatgatcaggattaccagaattcagtgacgcgcagcgcccccatcaacagtgacagccagggtcggtgtggcacgcgtttcctcaccacctacgaccggcgctttgtcatcaagactgtgtccagcgaggacgtggcggagatgcacaacatcttaaagaaataccaccagtttatagtggagtgtcatggcaacacgcttttgccacagttcctgggcatgtaccgcctgaccgtggatggtgtggaaacctacatggtggttaccaggaacgtgttcagccatcggctcactgtgcatcgcaagtatgacctcaagggttctacggttgccagagaagcgagcgacaaggagaaggccaaggacttgccaacattcaaagacaatgacttcctcaatgaagggcagaagctgcatgtgggagaggagagtaaaaagaacttcctggagaaactgaagcgggacgttgagttcttggcacagctgaagatcatggactacagcctgctggtgggcatccacgacgtggaccgggcagagcaggaggagatggaggtggaggagcgggcagaggacgaggagtgtgagaatgatggggtgggtggcaacctactctgctcctatggcacacctccggacagccctggcaacctcctcagctttcctcggttctttggtcctggggaattcgacccctctgttgacgtctatgccatgaaaagccatgaaagttcccccaagaaggaggtgtatttcatggccatcattgatatcctcacgccatacgatacaaagaagaaagctgcacatgctgccaaaacggtgaaacacggggcaggggccgagatctcgactgtgaaccctgagcagtactccaaacgcttcaacgagtttatgtccaacatcctgacgtagttctcttctaccttcagccagagccagagagctggatatggggtcggggatcgggagttagggagaagggtgtatttgggctagatgggagggtgggagcagagtcgggtttgggagggctttagcaatgagactgcagcctgtgacaccgaaagagactttagctgaagaggagggggatgtgctgtgtgtgcacctgctcacaggatgtaaccccaccttctgcttacccttgattttttctccccatttgacacccaggttaaaaaggggttccctttttggtaccttgtaaccttttaagataccttggggctagagatgacttcgtgggtttatttgggttttgtttctgaaatttcattgctccaggtttgctatttataatcatatttcatcagcctacccaccctccccatctttgctgagctctcagttcccttcaattaaagagatacccggtagacccagcacaagggtccttccagaaccaagtgctatggatgccagattggagaggtcagacacctcgccctgctgcatttgctcttgtctggattaactttgtaatttatggagtattgtgcacaacttcctccacctttcccttggattcaagtgaaaactgttgcattattcctccatcctgtctggaatacaccaggtcaacaccagagatctcagatcagaatcagagatctcagaggggaataagttcatcctcatgggatggtgaggggcaggaaagcggctgggctcttggacacctggttctcagagaaccctgtgatgatcacccaagccccaggctgtcttagcccctggagttcagaagtcctctctgtaaagcctgcctcccactaggtcaagaggaactagagtacctttggatttatcaggaccctcatgtttaaatggttatttccctttgggaaaacttcagaaactgatgtatcaaatgaggccctgtgccctcgatctatttccttcttccttctgacctcctcccaggcactcttacttctagccgaactcttagctctgggcagatctccaagcgcctggagtgctttttagcagagacacctcgttaagctccgggatgaccttgtaggagatctgtctccctgtgcctggagagttacagccagcaaggtgcccccatcttagagtgtggtgtccaaacgtgaggtggcttcctagttacatgaggatgtgatccaggaaatccagtttggaggcttgatgtgggttttgacctggcctcagccttggggctgtttttccttgttgccccgctctagacttttagcagatctgcagcccacaggcttttttggaaggagtggcttcctgcaggtgttccacctgccttcggagcctgccacccaggccctcagaactgagccacaggctgctctggccaggagagaaacagctctgttgttctgcattgggggaggtacattcctgcatcttctcaccccctcaaccaggaactggggatttgggatgagatatggtcagacttgtagataaccccaaagatgtgaagatcgcttgtgaaaccattttgaatgaatagattggtttcctgtggctccctccaaacctggccaagcccagcttccgaagcaggaaccagcactgtctctgtgcctgactcacagcatataggtcaggaaagaatggagacggcattcttggacttcactggggctgctggattggatgggaaaccttctggaagaggcagatgggggtcaaaccactgccttggccccaggaaggggccataggtaggtctgaacaactgccgcaagaccactacatgacttagggaacttgaaaccaactggctcatggagaaaacaaatttgacttgggaaagggattatgtaggaataatgtttggacttgatttccccacgtcataatgaagaatggaagtttggatctgctcctcgtcaggcgcagcatctctgaagcttggaaagctgtcttccagcagcctccgtggcctcgggttcctaccggcttctctgcatttggtctgctgatcatgttgccataatgtgtatggaaagtgtaacacattcttactggttaaagacgactaccaggtatctaacttgtttaacattgagtttgtgtgtgtgtgtgtatgtttgtgtgttttgtatattgtttacattttgagaggtagcattctgtttcaaatgctttttgtttttctgacagtattgttgactgggtcataacattttgagctgtggtttggtggattttcaatttttttttttaaaggtcattcgctgtgctatcttcaaaaccttgagtttggcccccaatttttggcattcaaatgtttaaaagctatttatcttggtttatacaagtttcctttctcttctttttgtcatggtattctatttggtctgcagtttgaatgtagagaaagtggactgatcccccaagcgttgtctgcccccactctttcctccttgggtcccgccattcttttactgggcagtcgagggcattggaggggaagtgactgccctcagcctcactccctggggccatgaagaaaagctaaacagtctcatggcatctcagaataatgttgggtctcccaagaagaaaggtgtaagaataacgacatggctgattaggcgaggccaggatagggctaaggccaggattcctggctggcatccagtcaccccttctcccatccttccccctcttcttccacaagtccgcagccgagacactgtagtctcccagccacagtgatgagtgccctggagactccactgacctctagatgaaggcccctggccctggttcctgttaattaacctctgggtctttgagtcccccagcacaaacttctttcctgtaccctgcggcttggggtcacagggcatgccgggaagccacagctgaggggcgcagactgaagcagtgctccacctctccttctttagctcaggggttgctggtctgtggcaggcgccacgagtggcccctgtggctgttctcagtggcagtctcttaagttcccaccacaggcagctctttatcccctctccctacttgactctttctcttgcctgtgcttttggcctcaaacaggcctgctggtagcgctcagggcgtgaggctacactcctgccctgcctttcctgtcttcatggtctgccagggcataccttggggaggtggaccaaagacccaggactttttgcagtagccagtcctaccccccagttgtctttttaccaattcagggtgggagagaaaactgcagcaccccagcatgtgagttactcaggtgttgggggctagaagggacagtgcgtttaaacaacactcagagctctggccttaaacctgtggccccccaagtctaggagcctcatctcttcctggcagtcatgcgggcaggaggtcctgaaagggaaaacccattcagacaactgttccccaatctaccagccatctgcaggggtcagtgaccgtggccctctccctcctctagaatgtgccacttatgaagagtgccccatggggaaaaggagactcagctgtcccttggcagcttgtgccagtatcccagggcagaagtttccacaggagcctcttgcccttgcgcagagccactgtgagaggcggtgggagccaacacccttgggggagggggcagtactgctcggcacatcccagcatcaggtcagatcattgaaattaaaaaatgtgaattaagttcatatccaccttttggggaagcaggacaaaccaccaccccaccaagtgtgtgacttctccatatcccactgcagtttccattttttaaatgggaattttcaatcccctgtgcttgtctaacgtctgctttaaaaagtttgagaccctgttactgtttgaaaatgcatgcatgttacgatgaatctccaacctgaggaaaaaaataaaactcaaaaagctttgtgtaca

SEQ ID NO: 165242 - DNA, 5734 bp, Homo sapiens; identical to SEQ ID NO: 165241
  Payload ID: 12538
  Gene Symbol: PIP4K2B
  Gene Name: phosphatidylinositol-5-phosphate 4-kinase, type II, beta
  Uniprot ID: P78356
  ENST ID: ENST00000619039
  CDS Start-End: 482-1732

SEQ ID NO: 165243 - DNA, 547 bp, Homo sapiens; identical to SEQ ID NO: 165240
  Payload ID: 12538
  Gene Symbol: PIP4K2B
  Gene Name: phosphatidylinositol-5-phosphate 4-kinase, type II, beta
  ENST ID: ENST00000631946
  CDS Start-End: 334-547

SEQ ID NO: 165244 - DNA, 2924 bp, Homo sapiens
  Payload ID: 12539
  Gene Symbol: PIP4K2C
  Gene Name: phosphatidylinositol-5-phosphate 4-kinase, type II, gamma
  Uniprot ID: Q8TBX8
  ENST ID: ENST00000354947
  CDS Start-End: 17-1282
ggttgcgcgggagactatggcgtcctcctcggtcccaccagccacggtatcggcggcgacagcaggccccggcccaggtttcggcttcgcctccaagaccaagaagaagcatttcgtgcagcagaaggtgaaggtgttccgggcggccgacccgctggtgggtgtgttcctgtggggcgtagcccactcgatcaatgagctcagccaggtgcctcccccggtgatgctgctgccagatgactttaaggccagctccaagatcaaggtcaacaatcaccttttccacagggaaaatctgcccagtcatttcaagttcaaggagtattgtccccaggtcttcaggaacctccgtgatcgatttggcattgatgaccaagattacttggtgtcccttacccgaaacccccccagcgaaagtgaaggcagtgatggtcgcttccttatctcctacgatcggactctggtcatcaaagaagtatccagtgaggacattgctgacatgcatagcaacctctccaactatcaccagtacattgtgaagtgccatggcaacacgcttctgccccagttcctggggatgtaccgagtcagtgtggacaacgaagacagctacatgcttgtgatgcgcaatatgtttagccaccgtcttcctgtgcacaggaagtatgacctcaagggttccctagtgtcccgggaagccagcgataaggaaaaggttaaagaattgcccacccttaaggatatggactttctcaacaagaaccagaaagtatatattggtgaagaggagaagaaaatatttctggagaagctgaagagagatgtggagtttctagtgcagctgaagatcatggactacagccttctgctaggcatccacgacatcattcggggctctgaaccagaggaggaagcgcccgtgcgggaggatgagtcagaggtggatggggactgcagcctgactggacctcctgctctggtgggctcctatggcacctccccagagggtatcggaggctacatccattcccatcggcccctgggcccaggagagtttgagtccttcattgatgtctatgccatccggagtgctgaaggagccccccagaaggaggtctacttcatgggcctcattgatatccttacacagtatgatgctaagaagaaagcagctcatgcagccaaaactgtcaagcatggggctggggcagagatctctactgtccatccggagcagtatgctaagcgattcctggattttattaccaacatctttgcctaagagactgcctggttctctctgatgttcaaggtggtggggttctgagacacttgggggaattgtggggatattctagccaccagttctcttcttcctttgctaaattcaggctgcaggctccttccatccagataactccatcctgtcgagtaggctctttctgaccctcagaaatacattgtcctttttcctctttgcccatttttcttccctctcttcctccccatgagaagtctgcttgtagtattagaatgttattgttgactctctcccaagtgccttgatctttgtaatatctcctgttgtttctatgatataggagctaggggaagggggttgtttgccttcttcaggacctgactggacagatggacctggctcaagcaactactctggatgcactttgctgtgtgggatgaactaaaagtgtctgaattttgctgataactttataaaactcactatggcatgcttccctcctggtgggccctaggatggatgacactcaagatactacagatgtgggtgcaggcatgcacacacacgatggaatatggccattcctacacaggtggggtagagagtgggtcagcagcctggcacctcacagaggtgggacctaagaggactcatgattatgcagagaattggattgggtctctgtcatagattgagtaatctcttcccttacctcaattccatctccacccatctctacatctgggcacagcaacccagagatggccaaaagcattcaagcctgggggaagatgtttgactattgctgctcttcaccagaacctcacacctctcctgggactggaacccttcagtgggtgtgtggccagttttggaggctggaatgatgggccagggtgtaggattcattctccatgtaaagtttcctttcatcctgcctagccatccccaaggtttatttccagaagaaaggaatatctctacttggatcaattctggtcatttcaagaggatggaggcctcaagtgtgggaacttcccctactccctggatgtgtgtacctagcacacttccttctcccacccctttttccagttggatttgtttttctgttctcttctgtcctgtcttatactgcaactgtgtctcctaggggacagatggccttctttgtcatcttcactctccacccccagagaggagtcagagccataactcaatcactcagcccctccaaagatagttgatgtgtgataatctcataatgttgagaaccctgatgagatacattgtcttcctctccctacaatgcctctggggccaaggcacccattcttcttgctatcctccatcccccttgaggcttccactttttttttttttagacataaagctgggcatcagcaactggcctgtggtgatgcaaagctgctttgctctgtatctggctggactgatctgtctcacaagaagccatgaggccatagggagaagctccctctccccttcatcttctgctccaaaggtggtagcaagaggagtacccagttaggggttggagcccccatataacatcttcctgtcagaagactgatggatctttttcattccaaccatctccctttcccccgatgaatgcaataaaactctgtgacaccagcaa

SEQ ID NO: 165245 - DNA, 1558 bp, Homo sapiens
  Payload ID: 12539
  Gene Symbol: PIP4K2C
  Gene Name: phosphatidylinositol-5-phosphate 4-kinase, type II, gamma
  Uniprot ID: Q8TBX8
  ENST ID: ENST00000422156
  CDS Start-End: 117-1238
gtccgctgtccggcctccggtcacgtgacagcagcgcaggtgagcgccgcttccggggtcgggcgcctggatagctgccggctccggcttccacttggtcggttgcgcgggagactatggcgtcctcctcggtcccaccagccacggtatcggcggcgacagcaggccccggcccaggtttcggcttcgcctccaagaccaagaagaagcatttcgtgcagcagaaggtgaaggtgttccgggcggccgacccgctggtgggtgtgttcctgtggggcgtagcccactcgatcaatgagctcagccaggtgcctcccccggtgatgctgctgccagatgactttaaggccagctccaagatcaaggtcaacaatcaccttttccacagggaaaatctgcccagtcatttcaagttcaaggagtattgtccccaggtcttcaggaacctccgtgatcgatttggcattgatgaccaagattacttgtacattgtgaagtgccatggcaacacgcttctgccccagttcctggggatgtaccgagtcagtgtggacaacgaagacagctacatgcttgtgatgcgcaatatgtttagccaccgtcttcctgtgcacaggaagtatgacctcaagggttccctagtgtcccgggaagccagcgataaggaaaaggttaaagaattgcccacccttaaggatatggactttctcaacaagaaccagaaagtatatattggtgaagaggagaagaaaatatttctggagaagctgaagagagatgtggagtttctagtgcagctgaagatcatggactacagccttctgctaggcatccacgacatcattcggggctctgaaccagaggaggaagcgcccgtgcgggaggatgagtcagaggtggatggggactgcagcctgactggacctcctgctctggtgggctcctatggcacctccccagagggtatcggaggctacatccattcccatcggcccctgggcccaggagagtttgagtccttcattgatgtctatgccatccggagtgctgaaggagccccccagaaggaggtctacttcatgggcctcattgatatccttacacagtatgatgctaagaagaaagcagctcatgcagccaaaactgtcaagcatggggctggggcagagatctctactgtccatccggagcagtatgctaagcgattcctggattttattaccaacatctttgcctaagagactgcctggttctctctgatgttcaaggtggtggggttctgagacacttgggggaattgtggggatattctagccaccagttctcttcttcctttgctaaattcaggctgcaggctccttccatccagataactccatcctgtcgagtaggctctttctgaccctcagaaatacattgtcctttttcctctttgcccatttttcttccctctcttcctccccatgagaagtctgcttgtagtattagaatgttattgttgactctctcccaagtgccttgatctttgtaatatctcctgttgtttctatgatatagg

SEQ ID NO: 165246 - DNA, 2876 bp, Homo sapiens
  Payload ID: 12539
  Gene Symbol: PIP4K2C
  Gene Name: phosphatidylinositol-5-phosphate 4-kinase, type II, gamma
  Uniprot ID: Q8TBX8
  ENST ID: ENST00000540759
  CDS Start-End: 88-1353
agcagcgcaggtgagcgccgcttccggggtcgggcgcctggatagctgccggctccggcttccacttggtcggttgcgcgggagactatggcgtcctcctcggtcccaccagccacggtatcggcggcgacagcaggccccggcccaggtttcggcttcgcctccaagaccaagaagaagcatttcgtgcagcagaaggtgaaggtgttccgggcggccgacccgctggtgggtgtgttcctgtggggcgtagcccactcgatcaatgagctcagccaggtgcctcccccggtgatgctgctgccagatgactttaaggccagctccaagatcaaggtcaacaatcaccttttccacagggaaaatctgcccagtcatttcaagttcaaggagtattgtccccaggtcttcaggaacctccgtgatcgatttggcattgatgaccaagattacttggtgtcccttacccgaaacccccccagcgaaagtgaaggcagtgatggtcgcttccttatctcctacgatcggactctggtcatcaaagaagtatccagtgaggacattgctgacatgcatagcaacctctccaactatcaccagtacattgtgaagtgccatggcaacacgcttctgccccagttcctggggatgtaccgagtcagtgtggacaacgaagacagctacatgcttgtgatgcgcaatatgtttagccaccgtcttcctgtgcacaggaagtatgacctcaagggttccctagtgtcccgggaagccagcgataaggaaaaggttaaagaattgcccacccttaaggatatggactttctcaacaagaaccagaaagtatatattggtgaagaggagaagaaaatatttctggagaagctgaagagagatgtggagtttctagtgcagctgaagatcatggactacagccttctgctaggcatccacgacatcattcggggctctgaaccagaggaggaagcgcccgtgcgggaggatgagtcagaggtggatggggactgcagcctgactggacctcctgctctggtgggctcctatggcacctccccagagggtatcggaggctacatccattcccatcggcccctgggcccaggagagtttgagtccttcattgatgtctatgccatccggagtgctgaaggagccccccagaaggaggtctacttcatgggcctcattgatatccttacacagtatgatgctaagaagaaagcagctcatgcagccaaaactgtcaagcatggggctggggcagagatctctactgtccatccggagcagtatgctaagcgattcctggattttattaccaacatctttgcctaagagactgcctggttctctctgatgttcaaggagctaggggaagggggttgtttgccttcttcaggacctgactggacagatggacctggctcaagcaactactctggatgcactttgctgtgtgggatgaactaaaagtgtctgaattttgctgataactttataaaactcactatggcatgcttccctcctggtgggccctaggatggatgacactcaagatactacagatgtgggtgcaggcatgcacacacacgatggaatatggccattcctacacaggtggggtagagagtgggtcagcagcctggcacctcacagaggtgggacctaagaggactcatgattatgcagagaattggattgggtctctgtcatagattgagtaatctcttcccttacctcaattccatctccacccatctctacatctgggcacagcaacccagagatggccaaaagcattcaagcctgggggaagatgtttgactattgctgctcttcaccagaacctcacacctctcctgggactggaacccttcagtgggtgtgtggccagttttggaggctggaatgatgggccagggtgtaggattcattctccatgtaaagtttcctttcatcctgcctagccatccccaaggtttatttccagaagaaaggaatatctctacttggatcaattctggtcatttcaagaggatggaggcctcaagtgtgggaacttcccctactccctggatgtgtgtacctagcacacttccttctcccacccctttttccagttggatttgtttttctgttctcttctgtcctgtcttatactgcaactgtgtctcctaggggacagatggccttctttgtcatcttcactctccacccccagagaggagtcagagccataactcaatcactcagcccctccaaagatagttgatgtgtgataatctcataatgttgagaaccctgatgagatacattgtcttcctctccctacaatgcctctggggccaaggcacccattcttcttgctatcctccatcccccttgaggcttccactttttttttttttagacataaagctgggcatcagcaactggcctgtggtgatgcaaagctgctttgctctgtatctggctggactgatctgtctcacaagaagccatgaggccatagggagaagctccctctccccttcatcttctgctccaaaggtggtagcaagaggagtacccagttaggggttggagcccccatataacatcttcctgtcagaagactgatggatctttttcattccaaccatctccctttcccccgatgaatgcaataaaactctgtgacaccagcaaccattgctctttagaaatgggttttctgatcatatggctgatgtgttatgggcagtatggatgtcttcatttgttgcttctgtttttcatcttttttgttttattaataaaaatttatgtatttgctcctgttactataataatacagggaataaattattcaatccaaa

SEQ ID NO: 165247 - DNA, 1532 bp, Homo sapiens
  Payload ID: 12539
  Gene Symbol: PIP4K2C
  Gene Name: phosphatidylinositol-5-phosphate 4-kinase, type II, gamma
  Uniprot ID: Q8TBX8
  ENST ID: ENST00000550465
  CDS Start-End: 48-1259
gatagctgccggctccggcttccacttggtcggttgcgcgggagactatggcgtcctcctcggtcccaccagccacggtatcggcggcgacagcaggccccggcccaggtttcggcttcgcctccaagaccaagaagaagcatttcgtgcagcagaaggtgaaggtgttccgggcggccgacccgctggtgggtgtgttcctgtggggcgtagcccactcgatcaatgagctcagccaggtgcctcccccggtgatgctgctgccagatgactttaaggccagctccaagatcaaggagtattgtccccaggtcttcaggaacctccgtgatcgatttggcattgatgaccaagattacttggtgtcccttacccgaaacccccccagcgaaagtgaaggcagtgatggtcgcttccttatctcctacgatcggactctggtcatcaaagaagtatccagtgaggacattgctgacatgcatagcaacctctccaactatcaccagtacattgtgaagtgccatggcaacacgcttctgccccagttcctggggatgtaccgagtcagtgtggacaacgaagacagctacatgcttgtgatgcgcaatatgtttagccaccgtcttcctgtgcacaggaagtatgacctcaagggttccctagtgtcccgggaagccagcgataaggaaaaggttaaagaattgcccacccttaaggatatggactttctcaacaagaaccagaaagtatatattggtgaagaggagaagaaaatatttctggagaagctgaagagagatgtggagtttctagtgcagctgaagatcatggactacagccttctgctaggcatccacgacatcattcggggctctgaaccagaggaggaagcgcccgtgcgggaggatgagtcagaggtggatggggactgcagcctgactggacctcctgctctggtgggctcctatggcacctccccagagggtatcggaggctacatccattcccatcggcccctgggcccaggagagtttgagtccttcattgatgtctatgccatccggagtgctgaaggagccccccagaaggaggtctacttcatgggcctcattgatatccttacacagtatgatgctaagaagaaagcagctcatgcagccaaaactgtcaagcatggggctggggcagagatctctactgtccatccggagcagtatgctaagcgattcctggattttattaccaacatctttgcctaagagactgcctggttctctctgatgttcaaggtggtggggttctgagacacttgggggaattgtggggatattctagccaccagttctcttcttcctttgctaaattcaggctgcaggctccttccatccagataactccatcctgtcgagtaggctctttctgaccctcagaaatacattgtcctttttcctctttgcccatttttcttccctctcttcctccccatgagaagtctgcttgtagtattagaatgttattgttgactctctccc

SEQ ID NO: 165248 - DNA, 941 bp, Homo sapiens
  Payload ID: 12539
  Gene Symbol: PIP4K2C
  Gene Name: phosphatidylinositol-5-phosphate 4-kinase, type II, gamma
  ENST ID: ENST00000550095
  CDS Start-End: 25-540
acttggtcggttgcgcgggagactatggcgtcctcctcggtcccaccagccacggtatcggcggcgacagcaggccccggcccaggtttcggcttcgcctccaagaccaagaagaagcatttcgtgcagcagaaggtgaaggtgttccgggcggccgacccgctggtgggtgtgttcctgtggggcgtagcccactcgatcaatgagctcagccaggtgcctcccccggtgatgctgctgccagatgactttaaggccagctccaagatcaaggtcaacaatcaccttttccacagggaaaatctgcccagtcatttcaagttcaaggagtattgtccccaggtcttcaggaacctccgtgatcgatttggcattgatgaccaagattacttggtgtcccttacccgaaacccccccagcgaaagtgaaggcagtgatggtcgcttccttatctcctacgatcggactctggtcatcaaagaagtatccagtgaggacattgctgacatgcatagcaacctctccaactatcaccagtgattcaacgtgtgaatgagagacaggaaatggatttcttgctgattactttcctgagaaggttggctgtgaagagaaagaggcagcaacacagaaagagagatgtacattgtgaagtgccatggcaacacgcttctgccccagttcctggggatgtaccgagtcagtgtggacaacgaagacagctacatgcttgtgatgcgcaatatgtttagccaccgtcttcctgtgcacaggaagtatgacctcaagggttccctagtgtcccgggaagccagcgataaggaaaaggttaaagaattgcccacccttaaggatatggactttctcaacaagaaccagaaagtatatattggtgaagaggagaagaaaatatttctggagaagctgaagagagatgtgga

SEQ ID NO: 165249 - DNA, 608 bp, Homo sapiens
  Payload ID: 12539
  Gene Symbol: PIP4K2C
  Gene Name: phosphatidylinositol-5-phosphate 4-kinase, type II, gamma
  ENST ID: ENST00000550360
  CDS Start-End: 45-197
agctgccggctccggcttccacttggtcggttgcgcgggagactatggcgtcctcctcggtcccaccagccacggtatcggcggcgacagcaggccccggcccaggtttcggcttcgcctccaagaccaagaagaagcatttcgtgcagcagaaggtgaaggtgttccgggcggccgacccgctggtggatcaatgagctcagccaggtgcctcccccggtgatgctgctgccagatgactttaaggccagctccaagatcaaggtcaacaatcaccttttccacagggaaaatctgcccagtcatttcaagttcaaggagtattgtccccaggtcttcaggaacctccgtgatcgatttggcattgatgaccaagattacttggtgtcccttacccgaaacccccccagcgaaagtgaaggcagtgatggtcgcttccttatctcctacgatcggactctggtcatcaaagaagtatccagtgaggacattgctgacatgcatagcaacctctccaactatcaccagtacattgtgaagtgccatggcaacacgcttctgccccagttcctggggatgtaccgagtcagtgtggacaacgaagacag

SEQ ID NO: 165250 - DNA, 403 bp, Homo sapiens
  Payload ID: 12539
  Gene Symbol: PIP4K2C
  Gene Name: phosphatidylinositol-5-phosphate 4-kinase, type II, gamma
  ENST ID: ENST00000548264
  CDS Start-End: 1-403
cgcttctgccccagttcctggggatgtaccgagtcagtgtggacaacgaagacagctacatgcttgtgatgcgcaatatgtttagccaccgtcttcctgtgcacaggaagtatgacctcaaggttaaagaattgcccacccttaaggatatggactttctcaacaagaaccagaaagtatatattggtgaagaggagaagaaaatatttctggagaagctgaagagagatgtggagtttctagtgcagctgaagatcatggactacagccttctgctaggcatccacgacatcattcggggctctgaaccagaggaggaagcgcccgtgcgggaggatgagtcagaggtggatggggactgcagcctgactggacctcctgctctggtgggctcctatggcac

SEQ ID NO: 165251 - DNA, 548 bp, Homo sapiens
  Payload ID: 12539
  Gene Symbol: PIP4K2C
  Gene Name: phosphatidylinositol-5-phosphate 4-kinase, type II, gamma
  ENST ID: ENST00000551772
  CDS Start-End: 69-548
gcttccggggtcgggcgcctggatagctgccggctccggcttccacttggtcggttgcgcgggagactatggcgtcctcctcggtcccaccagccacggtatcggcggcgacagcaggccccggcccaggtttcggcttcgcctccaagaccaagaagaagcatttcgtgcagcagaagatcaatgagctcagccaggtgcctcccccggtgatgctgctgccagatgactttaaggccagctccaagatcaaggtcaacaatcaccttttccacagggaaaatctgcccagtcatttcaagttcaaggagtattgtccccaggtcttcaggaacctccgtgatcgatttggcattgatgaccaagattacttggtgtcccttacccgaaacccccccagcgaaagtgaaggcagtgatggtcgcttccttatctcctacgatcggactctggtcatcaaagaagtatccagtgaggacattgctgacatgcatagcaacctctccaactatcaccagtacattgtgaagtgccatggcaacacgctt

SEQ ID NO: 165252 - DNA, 5507 bp, Homo sapiens
  Payload ID: 12540
  Gene Symbol: PLCXD1
  Gene Name: phosphatidylinositol-specific phospholipase C, X domain containing 1
  Uniprot ID: Q9NUJ7
  ENST ID: ENST00000381657
  CDS Start-End: 515-1486
gccttttccagctggctgcagagaaggggccagctccctcctggggacccggagccgcggtacaggtgtggttgcttctcttggagaaagaggctgagctgacatcccccgggctgataaagaatgggctcctcctcctgggcccagcaggctcccgggaccctccctccctccctccctccctccctccttccgggcagcagggaagatctgagttcatgtagctggtgttggcttagggtctgggaggaaggcttttgggaagatgtaaataagaacaaaatctgcagccacctgggaagcctggcctcagtgtggaagagaaggcagcaggattattacagaaccttgtgaagccaacgcgggcagccgccaggagctgcagaccgagaggatctcgtcctttcttgcggcccagggagaccaggcctttcattctgggctcgagaccaacaattcgaattccgaactccccctgcgtgtgggactcaaggttgcccagggctcacctctgatgggtgggcaggtgagcgcttccaacagcttctcgaggctgcactgcagaaatgccaacgaggactggatgtcggcactgtgtccccggctctgggatgtgcccctccaccacctctccatcccagggagccacgacacgatgacgtactgcctgaacaagaagtcccccatttcgcacgaggagtcccggctgctgcagctgctgaacaaggccttgccctgcatcacgcgccctgtcgtgctgaaatggtccgtcacccaggcactggacgtcacagagcagctggatgccggggtgcggtacctggacctgcggatagcccacatgctggagggctcggagaagaacctgcactttgtccatatggtgtacacaacggcgctggtggaggacacactcacggaaatctcggagtggctggagcggcatccacgcgaggtggtcatcctggcctgcagaaacttcgaggggctgagcgaggacctgcacgagtacctggtcgcctgtatcaagaacatcttcggggacatgctgtgtcctcgtggggaggtgccgacactgcggcagctgtggtcccggggccaacaggtcatcgtctcctatgaagacgagagctccttgcgccggcaccacgagctgtggccaggagtcccctactggtggggaaacagggtgaagaccgaggccctcatccgatacctggagaccatgaagagctgcggccgcccaggagggttgttcgtggccggcatcaacctcacggagaacctgcagtacgttctggcgcacccgtccgagtccctggagaagatgacgctgcccaaccttccgcggctgagcgcgtgggtccgagagcagtgcccggggccgggttcacggtgcaccaacatcatcgcgggggacttcatcggcgcagacggcttcgtcagtgacgtcatcgcgctcaatcagaagctgctgtggtgctgacgggacccttctgaagttcgggacgcggcggctgcagtttcacccccgaatttccaagtattgtgactttgtttgggccaaatgttggtgatcataggaccgatgataatacgttttcattttctttaaaatagagatggggtggctgggcgtggtgacttcgcctgtcttcccagcactttgggaggccgaggtgggtggatcatgaggtcaggagcttgagagcagcctgaccaacatggtgaaatcccatctctactaaaaatacaaaacttagctgggtgtgtggcaggcgcctgtagtcccagttactcgggaggctcaggcaggagaactgcttgaagccgggagatggaggttgcattgagctgacatcgtgccactgcactccagtctgaatgatagaccgagactccatctcaaaagaaaaaaaaacagccgagtgtgcagtgactcacgcctgtcatcccagcactttgggaggcgaaggcgggtggaacatgaggtcaggagttcgagaccagcctgaccaacatggtgaaaccccgtctctattaaaaacacaaaaactacctgggtgcgtgatgggcacctgtagtgccagctactcaggaggctgaggcaggagaatggcgtgaacccgggaggtggaggttgcattgagctgagatcgtgccactgcactccagcctgggcgacagagcgagactccatctcaaaaaaaaaaaaaaaaaaaaagatggggtctctctatgttggccaggttggtcttgaactcctggcctcaagtgatcctcccacctcagcctcccagagtgctgggatgacagtcaagaaccaccatggcagcccataatatgttttcttatttctgtattctccttgctgtggcgtctggagcccttacagacccagggagacactatcctcccacagctcactaattactaaacacagtgacagcccacttaggagccggcctcccctgtcagccaacccctcagctagttctcacaccaagcctatagatatatatgtgtgtgtatatatgtgtgtttatgtgtctgtgtgtatatatgtgtatatatcggtgtgtatatatgtatgtatgtttatacatgtgtatatgtgtgtgtgtgtgtgtatatgtgtgtatgtgtgtatatatgtatatgtgtgcatatgtgtatacgtgtatgcatacatgtatatgtgtatgcatgtatatgtgtatgtgtacatgtatatgtgtttatacatgtatatgtgtgtatgcgtgtatacgtgtatgtatacatgtatatgtgtgtatgcgtgtatatacacacgtatacatatatacgtgcgtgtgtatgtgtatatatatatatgtgtatatatatattttttgaggagtctcactctgtcacccaggctggagtgcaacggcgagatctcggctcaccgcaacctccgcctccctggttcaagcaattctcctgcctccgcctcccgagtagctgggatgacaggcatgtgccaccacacccgactaatttcatatatttagtagagacggggtttctccgcgttggtcaggccgttctcaaacttctgacctcaggtgatctgcccgcctcgacctcccaaagtgctgggatgacaggcatgagccactgtgcccagccgccgatatttctttaaattatgtttagggacagggtctttttctgtcacccaggctggagggcagtggtacagtcatagctcactgcagcctcaacctcctgggctcaagcgatcctctcagctcagcctcccgtgtagctggggctccagggacacacccccactgctggctaatttttgtatttttggtagagtcagggtttcaccacatggcacagtctggtctcaaattcctgggctccagtgatcctcccaccttagcttccagagtggccaggatcacaggcaggcaccaccatgcccaggtaattttatttttttgtagagacgtggtctggctatgttgtccagggtggtctcaaactcctgggctcaactgatcctcccacctcaacctctgccatagccaggacctcaggtgtcagccaccacacccacagctaattttttttgtagagatggggtctggctctgttgctcaggctggtgtgtagtaggggcacagtcatagctcactgtaaccttcaacgcctgggctgaagcaattctcccgcctcagcttcccaagtaactgggagtataggtgtacaccaccatgcccagctaattatttagtagtagtaggaggagtattatgtttgagatggagtctcgctctgtcgcccaggctggagtgcagtggcgcagtctcagctcactgcaacctctgcctcccaggttcaagcaattcttgtgcctcagcctcctgagtagctgggattacaggcgcccgccaccgcgcctggctaacttttgtatttttagcagagatggggtttcaccatgttgcccaggctggtcttgaactcccgacctcaggtgatccatccgcattggcctcccaaagtgctgggatcacaggcgtgagccaccgcacctggcctcaagccagtatttccctggccctaaatcattcctggctgggtcccagcccagtagagccagccccccagcccggagtgctactgaagtgttcaaaagttgtcaatcctcagccgttccctagtcctgttgcccggttctgccgaagccccttgaaggctgtggcctgggctgttccctcattcattcctgcctcccgagccaaacccaggtatccgcttgtgccctgcgtggtgtggcagcgtcttctctcgggaagggtcaggagtaatttcttctttcagtggcctctctgtgctagtcccggtcacctccgtgaattaaagtcctacaggtacaagggagaccccccccccacggaaggcgcccccagtccgtgtgggagactcgcacaccggttttctgcacaggtttctttctgcctctgaagcgtgaacggtcctagtttcagacgcagatcctgcaaatacttttttttgtttttttgagatggattttccctcttgttgttcaggctggagtgcaatggcacgatctcagctcactgcaacctctgcctcccgggttcaagtgattctcctgcctcagcctcccgaggagctgagattacaggcgcgtgccaccgtgcctggttaattttgtatttgtatttttatttatgttttgagacggagtttcgctctcgttgccgaggctggagtgtagtagtgtgatcctggctcactgcaacctccacctcccgggttccagcaaattctcctgcctcagcctcccaagtagctgggattgcaggcgcccgccaccacgcccggataatttttgtgtgtttagcagagacggggtttcaccatgttggccaggctggtctcgatctcctgacctcaggtgatccacccgcctcggcctcccaaagtgctgggatgacaggcgtgagccaccgcgcccggcctatacctcattttctacatgtcgcttgttggagctgctggttcaagttcccagccagccaatggatgccagcaccatttttactcccctttcccaagcaaatcgtgcatttttgtctaacgagagacatcagtttctcaggatgatcctcaagaacgttatggagtccatgttgcaataggttctctttgggacctaatgactcattttccaaaaatccgcttctacttttggtacccggttgctacggtgaaatgaaggtgccccgcatccagaaagacgcactcctggaccacaaccggcggctacctcagccccacggctctgcaggatcagggctcgggcaggccccgcggagatgaagaatttgcagggagcctccctgacttccgtcggctgtgaatccttgtctgtcaggggcgtatccacaaaatcaccgaattcatacagatcgtttaaataaatgaacatcattaaagtcaaa

SEQ ID NO: 165253 - DNA, 1863 bp, Homo sapiens
  Payload ID: 12540
  Gene Symbol: PLCXD1
  Gene Name: phosphatidylinositol-specific phospholipase C, X domain containing 1
  Uniprot ID: Q9NUJ7
  ENST ID: ENST00000381663
  CDS Start-End: 245-1216
aataagaacaaaatctgcagccacctgggaagcctggcctcagtgtggaagagaaggcagcaggattattacagaaccttgtgaagccaacgcgggcagccgccaggagctgcagaccgagaggatctcgtcctttcttgcggcccagggagaccaggcctttcattctgggctcgagaccaacaattcgaattccgaactccccctgcgtgtgggactcaaggttgcccagggctcacctctgatgggtgggcaggtgagcgcttccaacagcttctcgaggctgcactgcagaaatgccaacgaggactggatgtcggcactgtgtccccggctctgggatgtgcccctccaccacctctccatcccagggagccacgacacgatgacgtactgcctgaacaagaagtcccccatttcgcacgaggagtcccggctgctgcagctgctgaacaaggccttgccctgcatcacgcgccctgtcgtgctgaaatggtccgtcacccaggcactggacgtcacagagcagctggatgccggggtgcggtacctggacctgcggatagcccacatgctggagggctcggagaagaacctgcactttgtccatatggtgtacacaacggcgctggtggaggacacactcacggaaatctcggagtggctggagcggcatccacgcgaggtggtcatcctggcctgcagaaacttcgaggggctgagcgaggacctgcacgagtacctggtcgcctgtatcaagaacatcttcggggacatgctgtgtcctcgtggggaggtgccgacactgcggcagctgtggtcccggggccaacaggtcatcgtctcctatgaagacgagagctccttgcgccggcaccacgagctgtggccaggagtcccctactggtggggaaacagggtgaagaccgaggccctcatccgatacctggagaccatgaagagctgcggccgcccaggagggttgttcgtggccggcatcaacctcacggagaacctgcagtacgttctggcgcacccgtccgagtccctggagaagatgacgctgcccaaccttccgcggctgagcgcgtgggtccgagagcagtgcccggggccgggttcacggtgcaccaacatcatcgcgggggacttcatcggcgcagacggcttcgtcagtgacgtcatcgcgctcaatcagaagctgctgtggtgctgacgggacccttctgaagttcgggacgcggcggctgcagtttcacccccgaatttccaagtattgtgactttgtttgggccaaatgttggtgatcataggaccgatgataatacgttttcattttctttaaagtgctgggatgacaggcgtgagccaccgcgcccggcctatacctcattttctacatgtcgcttgttggagctgctggttcaagttcccagccagccaatggatgccagcaccatttttactcccctttcccaagcaaatcgtgcatttttgtctaacgagagacatcagtttctcaggatgatcctcaagaacgttatggagtccatgttgcaataggttctctttgggacctaatgactcattttccaaaaatccgcttctacttttggtacccggttgctacggtgaaatgaaggtgccccgcatccagaaagacgcactcctggaccacaaccggcggctacctcagccccacggctctgcaggatcagggctcgggcaggccccgcggagatgaagaatttgcagggagcctccctgacttccgtcggctgtgaatccttgtctgtcaggggcgtatccacaaaatcaccgaattcatacagatcgtttaaataaatgaacatcattaaagtc

SEQ ID NO: 165254 - DNA, 5287 bp, Homo sapiens
  Payload ID: 12540
  Gene Symbol: PLCXD1
  Gene Name: phosphatidylinositol-specific phospholipase C, X domain containing 1
  Uniprot ID: Q9NUJ7
  ENST ID: ENST00000399012
  CDS Start-End: 298-1269
gtgttttaggaagagtgtcccgcagagacccggcgggagctgccaggagctctgggattccagcggctggaagccacctgggaagcctggcctcagtgtggaagagaaggcagcaggattattacagaaccttgtgaagccaacgcgggcagccgccaggagctgcagaccgagaggatctcgtcctttcttgcggcccagggagaccaggcctttcattctgggctcgagaccaacaattcgaattccgaactccccctgcgtgtgggactcaaggttgcccagggctcacctctgatgggtgggcaggtgagcgcttccaacagcttctcgaggctgcactgcagaaatgccaacgaggactggatgtcggcactgtgtccccggctctgggatgtgcccctccaccacctctccatcccagggagccacgacacgatgacgtactgcctgaacaagaagtcccccatttcgcacgaggagtcccggctgctgcagctgctgaacaaggccttgccctgcatcacgcgccctgtcgtgctgaaatggtccgtcacccaggcactggacgtcacagagcagctggatgccggggtgcggtacctggacctgcggatagcccacatgctggagggctcggagaagaacctgcactttgtccatatggtgtacacaacggcgctggtggaggacacactcacggaaatctcggagtggctggagcggcatccacgcgaggtggtcatcctggcctgcagaaacttcgaggggctgagcgaggacctgcacgagtacctggtcgcctgtatcaagaacatcttcggggacatgctgtgtcctcgtggggaggtgccgacactgcggcagctgtggtcccggggccaacaggtcatcgtctcctatgaagacgagagctccttgcgccggcaccacgagctgtggccaggagtcccctactggtggggaaacagggtgaagaccgaggccctcatccgatacctggagaccatgaagagctgcggccgcccaggagggttgttcgtggccggcatcaacctcacggagaacctgcagtacgttctggcgcacccgtccgagtccctggagaagatgacgctgcccaaccttccgcggctgagcgcgtgggtccgagagcagtgcccggggccgggttcacggtgcaccaacatcatcgcgggggacttcatcggcgcagacggcttcgtcagtgacgtcatcgcgctcaatcagaagctgctgtggtgctgacgggacccttctgaagttcgggacgcggcggctgcagtttcacccccgaatttccaagtattgtgactttgtttgggccaaatgttggtgatcataggaccgatgataatacgttttcattttctttaaaatagagatggggtggctgggcgtggtgacttcgcctgtcttcccagcactttgggaggccgaggtgggtggatcatgaggtcaggagcttgagagcagcctgaccaacatggtgaaatcccatctctactaaaaatacaaaacttagctgggtgtgtggcaggcgcctgtagtcccagttactcgggaggctcaggcaggagaactgcttgaagccgggagatggaggttgcattgagctgacatcgtgccactgcactccagtctgaatgatagaccgagactccatctcaaaagaaaaaaaaacagccgagtgtgcagtgactcacgcctgtcatcccagcactttgggaggcgaaggcgggtggaacatgaggtcaggagttcgagaccagcctgaccaacatggtgaaaccccgtctctattaaaaacacaaaaactacctgggtgcgtgatgggcacctgtagtgccagctactcaggaggctgaggcaggagaatggcgtgaacccgggaggtggaggttgcattgagctgagatcgtgccactgcactccagcctgggcgacagagcgagactccatctcaaaaaaaaaaaaaaaaaaaaagatggggtctctctatgttggccaggttggtcttgaactcctggcctcaagtgatcctcccacctcagcctcccagagtgctgggatgacagtcaagaaccaccatggcagcccataatatgttttcttatttctgtattctccttgctgtggcgtctggagcccttacagacccagggagacactatcctcccacagctcactaattactaaacacagtgacagcccacttaggagccggcctcccctgtcagccaacccctcagctagttctcacaccaagcctatagatatatatgtgtgtgtatatatgtgtgtttatgtgtctgtgtgtatatatgtgtatatatcggtgtgtatatatgtatgtatgtttatacatgtgtatatgtgtgtgtgtgtgtgtatatgtgtgtatgtgtgtatatatgtatatgtgtgcatatgtgtatacgtgtatgcatacatgtatatgtgtatgcatgtatatgtgtatgtgtacatgtatatgtgtttatacatgtatatgtgtgtatgcgtgtatacgtgtatgtatacatgtatatgtgtgtatgcgtgtatatacacacgtatacatatatacgtgcgtgtgtatgtgtatatatatatatgtgtatatatatattttttgaggagtctcactctgtcacccaggctggagtgcaacggcgagatctcggctcaccgcaacctccgcctccctggttcaagcaattctcctgcctccgcctcccgagtagctgggatgacaggcatgtgccaccacacccgactaatttcatatatttagtagagacggggtttctccgcgttggtcaggccgttctcaaacttctgacctcaggtgatctgcccgcctcgacctcccaaagtgctgggatgacaggcatgagccactgtgcccagccgccgatatttctttaaattatgtttagggacagggtctttttctgtcacccaggctggagggcagtggtacagtcatagctcactgcagcctcaacctcctgggctcaagcgatcctctcagctcagcctcccgtgtagctggggctccagggacacacccccactgctggctaatttttgtatttttggtagagtcagggtttcaccacatggcacagtctggtctcaaattcctgggctccagtgatcctcccaccttagcttccagagtggccaggatcacaggcaggcaccaccatgcccaggtaattttatttttttgtagagacgtggtctggctatgttgtccagggtggtctcaaactcctgggctcaactgatcctcccacctcaacctctgccatagccaggacctcaggtgtcagccaccacacccacagctaattttttttgtagagatggggtctggctctgttgctcaggctggtgtgtagtaggggcacagtcatagctcactgtaaccttcaacgcctgggctgaagcaattctcccgcctcagcttcccaagtaactgggagtataggtgtacaccaccatgcccagctaattatttagtagtagtaggaggagtattatgtttgagatggagtctcgctctgtcgcccaggctggagtgcagtggcgcagtctcagctcactgcaacctctgcctcccaggttcaagcaattcttgtgcctcagcctcctgagtagctgggattacaggcgcccgccaccgcgcctggctaacttttgtatttttagcagagatggggtttcaccatgttgcccaggctggtcttgaactcccgacctcaggtgatccatccgcattggcctcccaaagtgctgggatcacaggcgtgagccaccgcacctggcctcaagccagtatttccctggccctaaatcattcctggctgggtcccagcccagtagagccagccccccagcccggagtgctactgaagtgttcaaaagttgtcaatcctcagccgttccctagtcctgttgcccggttctgccgaagccccttgaaggctgtggcctgggctgttccctcattcattcctgcctcccgagccaaacccaggtatccgcttgtgccctgcgtggtgtggcagcgtcttctctcgggaagggtcaggagtaatttcttctttcagtggcctctctgtgctagtcccggtcacctccgtgaattaaagtcctacaggtacaagggagaccccccccccacggaaggcgcccccagtccgtgtgggagactcgcacaccggttttctgcacaggtttctttctgcctctgaagcgtgaacggtcctagtttcagacgcagatcctgcaaatacttttttttgtttttttgagatggattttccctcttgttgttcaggctggagtgcaatggcacgatctcagctcactgcaacctctgcctcccgggttcaagtgattctcctgcctcagcctcccgaggagctgagattacaggcgcgtgccaccgtgcctggttaattttgtatttgtatttttatttatgttttgagacggagtttcgctctcgttgccgaggctggagtgtagtagtgtgatcctggctcactgcaacctccacctcccgggttccagcaaattctcctgcctcagcctcccaagtagctgggattgcaggcgcccgccaccacgcccggataatttttgtgtgtttagcagagacggggtttcaccatgttggccaggctggtctcgatctcctgacctcaggtgatccacccgcctcggcctcccaaagtgctgggatgacaggcgtgagccaccgcgcccggcctatacctcattttctacatgtcgcttgttggagctgctggttcaagttcccagccagccaatggatgccagcaccatttttactcccctttcccaagcaaatcgtgcatttttgtctaacgagagacatcagtttctcaggatgatcctcaagaacgttatggagtccatgttgcaataggttctctttgggacctaatgactcattttccaaaaatccgcttctacttttggtacccggttgctacggtgaaatgaaggtgccccgcatccagaaagacgcactcctggaccacaaccggcggctacctcagccccacggctctgcaggatcagggctcgggcaggccccgcggagatgaagaatttgcagggagcctccctgacttccgtcggctgtgaatccttgtctgtcaggggcgtatccacaaaatcaccgaattcatacagatcgtttaaataaatgaacatcattaaagtc

SEQ ID NO: 165255 - DNA, 587 bp, Homo sapiens
  Payload ID: 12540
  Gene Symbol: PLCXD1
  Gene Name: phosphatidylinositol-specific phospholipase C, X domain containing 1
  ENST ID: ENST00000430923
  CDS Start-End: 64-587
ggcgggagctgccaggagctctgggattccagcggctggaaggttgcccagggctcacctctgatgggtgggcaggtgagcgcttccaacagcttctcgaggctgcactgcagaaatgccaacgaggactggatgtcggcactgtgtccccggctctgggatgtgcccctccaccacctctccatcccagggagccacgacacgatgacgtactgcctgaacaagaagtcccccatttcgcacgaggagtcccggctgctgcagctgctgaacaaggccttgccctgcatcacgcgccctgtcgtgctgaaatggtccgtcacccaggcactggacgtcacagagcagctggatgccggggtgcggtacctggacctgcggatagcccacatgctggagggctcggagaagaacctgcactttgtccatatggtgtacacaacggcgctggtggaggacacactcacggaaatctcggagtggctggagcggcatccacgcgaggtggtcatcctggcctgcagaaacttcgaggggctgagcgaggacctgcacgagtacctggtcgcctgtatcaagaacatctt

SEQ ID NO: 165256 - DNA, 579 bp, Homo sapiens
  Payload ID: 12540
  Gene Symbol: PLCXD1
  Gene Name: phosphatidylinositol-specific phospholipase C, X domain containing 1
  ENST ID: ENST00000415337
  CDS Start-End: 46-579
accccagttccgtaatatgcaaatgttgcccagggctcacctctgatgggtgggcaggtgagcgcttccaacagcttctcgaggctgcactgcagaaatgccaacgaggactggatgtcggcactgtgtccccggctctgggatgtgcccctccaccacctctccatcccagggagccacgacacgatgacgtactgcctgaacaagaagtcccccatttcgcacgaggagtcccggctgctgcagctgctgaacaaggccttgccctgcatcacgcgccctgtcgtgctgaaatggtccgtcacccaggcactggacgtcacagagcagctggatgccggggtgcggtacctggacctgcggatagcccacatgctggagggctcggagaagaacctgcactttgtccatatggtgtacacaacggcgctggtggaggacacactcacggaaatctcggagtggctggagcggcatccacgcgaggtggtcatcctggcctgcagaaacttcgaggggctgagcgaggacctgcacgagtacctggtcgcctgtatcaagaacatcttcggggacatg

SEQ ID NO: 165257 - DNA, 469 bp, Homo sapiens
  Payload ID: 12540
  Gene Symbol: PLCXD1
  Gene Name: phosphatidylinositol-specific phospholipase C, X domain containing 1
  ENST ID: ENST00000429181
  CDS Start-End: 288-469
cttttccagctggctgcagagaaggggccagctccctcctggggacccggagccgcggtacagccacctgggaagcctggcctcagtgtggaagagaaggcagcaggattattacagaaccttgtgaagccaacgcgggcagccgccaggagctgcagaccgagaggatctcgtcctttcttgcggcccagggagaccaggcctttcattctgggctcgagaccaacaattcgaattccgaactccccctgcgtgtgggactcaaggttgcccagggctcacctctgatgggtgggcaggtgagcgcttccaacagcttctcgaggctgcactgcagaaatgccaacgaggactggatgtcggcactgtgtccccggctctgggatgtgcccctccaccacctctccatcccagggagccacgacacgatgacgtactgcctgaacaagaagtcccccatttcgcacga

SEQ ID NO: 165258 - DNA, 587 bp, Homo sapiens
  Payload ID: 12540
  Gene Symbol: PLCXD1
  Gene Name: phosphatidylinositol-specific phospholipase C, X domain containing 1
  ENST ID: ENST00000447472
  CDS Start-End: 64-587
atatgcaaatgtagggcgccatgatgttccacacgcctgagggttgcccagggctcacctctgatgggtgggcaggtgagcgcttccaacagcttctcgaggctgcactgcagaaatgccaacgaggactggatgtcggcactgtgtccccggctctgggatgtgcccctccaccacctctccatcccagggagccacgacacgatgacgtactgcctgaacaagaagtcccccatttcgcacgaggagtcccggctgctgcagctgctgaacaaggccttgccctgcatcacgcgccctgtcgtgctgaaatggtccgtcacccaggcactggacgtcacagagcagctggatgccggggtgcggtacctggacctgcggatagcccacatgctggagggctcggagaagaacctgcactttgtccatatggtgtacacaacggcgctggtggaggacacactcacggaaatctcggagtggctggagcggcatccacgcgaggtggtcatcctggcctgcagaaacttcgaggggctgagcgaggacctgcacgagtacctggtcgcctgtatcaagaacatctt

SEQ ID NO: 165259 - DNA, 284 bp, Homo sapiens
  Payload ID: 12540
  Gene Symbol: PLCXD1
  Gene Name: phosphatidylinositol-specific phospholipase C, X domain containing 1
  ENST ID: ENST00000443019
  CDS Start-End: 61-284
gtggctcacgcctgtaatcccagcaccgcggaggttgcggttgcccagggctcacctctgatgggtgggcaggtgagcgcttccaacagcttctcgaggctgcactgcagaaatgccaacgaggactggatgtcggcactgtgtccccggctctgggatgtgcccctccaccacctctccatcccagggagccacgacacgatgacgtactgcctgaacaagaagtcccccatttcgcacgaggagtcccggctgctgcagctgctgaacaaggccttgccctg

SEQ ID NO: 165260 - DNA, 555 bp, Homo sapiens
  Payload ID: 12540
  Gene Symbol: PLCXD1
  Gene Name: phosphatidylinositol-specific phospholipase C, X domain containing 1
  ENST ID: ENST00000445062
  CDS Start-End: 292-555
gaagggaggccgtgcagggggaggggaggccgtgcagggggagggggggccgtgcaggcggagggggccacctgggaagcctggcctcagtgtggaagagaaggcagcaggattattacagaaccttgtgaagccaacgcgggcagccgccaggagctgcagaccgagaggatctcgtcctttcttgcggcccagggagaccaggcctttcattctgggctcgagaccaacaattcgaattccgaactccccctgcgtgtgggactcaaggttgcccagggctcacctctgatgggtgggcaggtgagcgcttccaacagcttctcgaggctgcactgcagaaatgccaacgaggactggatgtcggcactgtgtccccggctctgggatgtgcccctccaccacctctccatcccagggagccacgacacgatgacgtactgcctgaacaagaagtcccccatttcgcacgaggagtcccggctgctgcagctgctgaacaaggccttgccctgcatcacgcgccctgtcgtgctgaaatggtccgtcacccag

SEQ ID NO: 165261 - DNA, 828 bp, Homo sapiens
  Payload ID: 12540
  Gene Symbol: PLCXD1
  Gene Name: phosphatidylinositol-specific phospholipase C, X domain containing 1
  ENST ID: ENST00000448477
  CDS Start-End: 455-828
gggctggaccagctaaaggctcgcatttgcatattaaaggttgccaagccgggtctaagagccagggctttcacgctagacaagaaacattttttggagctgcaaaaaatgcttccaaggaccccttttcctctctctctctctcttttttttttttcttttttggatatggagtttcactcttgttgcccagcctggagtgcagtggcgggatctccgctcactgtaacctccacctcccgggttcaagcgattctcctgcctcagcctcccgagtagctgggatgacaggtgccacaggtgcccaccaccacgcccagctaatttttgtatttttagtagagatggggttttgtcaagttggccaggctggtctcgaactcctgacctgaagtcaccgtaaaaaacctcttttcctcttctccttcctcaggttgcccagggctcacctctgatgggtgggcaggtgagcgcttccaacagcttctcgaggctgcactgcagaaatgccaacgaggactggatgtcggcactgtgtccccggctctgggatgtgcccctccaccacctctccatcccagggagccacgacacgatgacgtactgcctgaacaagaagtcccccatttcgcacgaggagtcccggctgctgcagctgctgaacaaggccttgccctgcatcacgcgccctgtcgtgctgaaatggtccgtcacccaggcactggacgtcacagagcagctggatgccggggtgcggtacctggacctgcggatagcccacatgctggagggctcggagaagaacctgcactttgtccatatggtgta

SEQ ID NO: 165262 - DNA, 2063 bp, Homo sapiens
  Payload ID: 12541
  Gene Symbol: PLCXD2
  Gene Name: phosphatidylinositol-specific phospholipase C, X domain containing 2
  Uniprot ID: Q0VAA5
  ENST ID: ENST00000393934
  CDS Start-End: 571-1485
gctgggagtcctggtgccgccggctgcacttctgtgtgtctttcaggaagccacagggcagggggcgtctgtgcagagaagcgggggagtgagtagcaggcaggcccagcttgtgtaccagcccagtgacatatatagaaacataaatcaggctagagccggcgcgcccgggcgcgcacctgtgtatggacccgcaggcatgtctgtacactgggtgggcacctgtcttgtgagtggctccgggtgtggctgctcctcggactttcagtttatgtaagatttatctctaggggcctaccttcccccatctccagaggggaacataagaagtttaacggagctgggactgagcagattaagggagtggagcggaggctgggccggagagagtggggactgtgagtgctagtgggtaaggatccatctgtttgccccgtcccccagccagaaaggcattttggaaagactggcgtggcaagcgtcgccctgaaacgtccacagagcccaagaagtgatgatcactgagtgagtggcactgggctgagactggccagtttgttaacaacagggatgctagcagttaggaaggccaggaggaaactcaggatggggaccatctgctcccccaaccccagcgggacaaagacatcatcggaggtctgcaatgccgactggatggcctcgctcccccctcacctccacaacctccccctttccaatctggcaatcccaggctcacatgattcattcagctactgggtggatgaaaagtccccagtggggcctgaccaaacccaagctatcaaacgcctcgccaggatctccttggtgaagaagctaatgaagaagtggtctgtgactcagaacctgacatttcgagaacagctggaagctgggatccgctactttgacctgcgtgtgtcttccaaaccaggggatgccgaccaggagatctacttcatccatgggctttttggcatcaaggtctgggatgggctgatggaaattgactcgtttcttacacagcacccccaggagattatcttcctggatttcaaccacttctatgccatggatgagacccatcacaaatgcctggttctgcggatccaggaggcctttggaaacaagctgtgcccagcctgcagtgtggaaagtttgacgctgcgaactctgtgggagaagaactgccaggttcttattttctaccactgtcccttctacaagcagtaccccttcctgtggccaggaaagaagattccagcgccctgggcaaacaccacaagtgtgcgcaaactaatcctcttcttggagaccactctgagtgagcgggcctcacggggctccttccatgtctcccaagcgatcctcacccccagagtgaagaccattgcccggggcttggttgggggcctcaagaacacgctggttcataggctggcactgatcccagtttatcctttgagattcagcagaagatcctgatggaggaggaggataccaagagagaggtgcccaaggaagatggagttggtgatgtgcaacatttcggtgagaactttattgtcagaggttttcagtacatatttacaagttcttactccatcatacatattgggaatgagctggcattttcaagcatatacccaggagtccagcaatcattggggaagagagcctgaggctggcaatccttgcccagaactttggtcacctgcttgttcacaggccaccatatcttacttcactgaagtcatatgctgaggttttatttagtccagatgctgaaggatgggaagacccaagcagctggtgtggaggtctttcccagtgactcatcagtcattcagaaatcaaagcctgcacaagaaagggtgggatgggatgtatagagaaagacaccaagcctttagactccagcagagtagctgatattgacatatctgaggagggaggaggctccaatacgactactcccaattcacagggtttgtggttctggatgaaatctttgcaaagggtttccctggcactcaaacagaataaataggcttataaagtgt

SEQ ID NO: 165263 - DNA, 529 bp, Homo sapiens
  Payload ID: 12541
  Gene Symbol: PLCXD2
  Gene Name: phosphatidylinositol-specific phospholipase C, X domain containing 2
  ENST ID: ENST00000468174
  CDS Start-End: 311-529
tcctaagtttgcaaatgaagaaacagaattccaagtacaagtttggaagcccaggttcacagaagtaatcacagcagaaccagcactgggattcaggctcagctgtggaattacagactgtttcttcaactgagagaagatggggaaatttaaatgaacctaagccacatggcttgaccacagatagaagctctctctcaaaggctcacatgattcattcagctactgggtggatgaaaagtccccagtggggcctgaccaaacccaagctatcaaacgcctcgccaggatctccttggtgaagaagctaatgaagaagtggtctgtgactcagaacctgacatttcgagaacagctggaagctgggatccgctactttgacctgcgtgtgtcttccaaaccaggggatgccgaccaggagatctacttcatccatgggctttttggcatcaaggtctgggatgggctgatggaaattgactcgtttcttacacagcacccccaggagattatcttcctggatttcaac

SEQ ID NO: 165264 - DNA, 1721 bp, Homo sapiens
  Payload ID: 12541
  Gene Symbol: PLCXD2
  Gene Name: phosphatidylinositol-specific phospholipase C, X domain containing 2
  Uniprot ID: Q0VAA5
  ENST ID: ENST00000477665
  CDS Start-End: 325-1242
tggctgctcctcggactttcagtttatgtaagatttatctctaggggcctaccttcccccatctccagaggggaacataagaagtttaacggagctgggactgagcagattaagggagtggagcggaggctgggccggagagagtggggactgtgagtgctagtgggtaaggatccatctgtttgccccgtcccccagccagaaaggcattttggaaagactggcgtggcaagcgtcgccctgaaacgtccacagagcccaagaagtgatgatcactgagtgagtggcactgggctgagactggccagtttgttaacaacagggatgctagcagttaggaaggccaggaggaaactcaggatggggaccatctgctcccccaaccccagcgggacaaagacatcatcggaggtctgcaatgccgactggatggcctcgctcccccctcacctccacaacctccccctttccaatctggcaatcccaggctcacatgattcattcagctactgggtggatgaaaagtccccagtggggcctgaccaaacccaagctatcaaacgcctcgccaggatctccttggtgaagaagctaatgaagaagtggtctgtgactcagaacctgacatttcgagaacagctggaagctgggatccgctactttgacctgcgtgtgtcttccaaaccaggggatgccgaccaggagatctacttcatccatgggctttttggcatcaaggtctgggatgggctgatggaaattgactcgtttcttacacagcacccccaggagattatcttcctggatttcaaccacttctatgccatggatgagacccatcacaaatgcctggttctgcggatccaggaggcctttggaaacaagctgtgcccagcctgcagtgtggaaagtttgacgctgcgaactctgtgggagaagaactgccaggttcttattttctaccactgtcccttctacaagcagtaccccttcctgtggccaggaaagaagattccagcgccctgggcaaacaccacaagtgtgcgcaaactaatcctcttcttggagaccactctgagtgagcgggcctcacggggctccttccatgtctcccaagcgatcctcacccccagagtgaagaccattgcccggggcttggttgggggcctcaagaacacgctggttcatagcaatcgctggaacagccatgggccatccctgctgagtcaggaaagaagctgagggaagagtcgggattgaaaagcagcagacaaggctggcactgatcccagtttatcctttgagattcagcagaagatcctgatggaggaggaggataccaagagagaggtgcccaaggaagatggagttggtgatgtgcaacatttcggtgagaactttattgtcagaggttttcagtacatatttacaagttcttactccatcatacatattgggaatgagctggcattttcaagcatatacccaggagtccagcaatcattggggaagagagcctgaggctggcaatccttgcccagaactttggtcacctgcttgttcacaggccaccatatcttacttcactgaagtcatatgctgaggttttatttagtccagatgctgaaggatgggaagacccaagcagctggtgtggaggtctttcccagtgactcatcagtcattcagaaatcaaagcctgcacaagaaagggtgggatg

SEQ ID NO: 165265 - DNA, 7538 bp, Homo sapiens
  Payload ID: 12542
  Gene Symbol: PLCXD3
  Gene Name: phosphatidylinositol-specific phospholipase C, X domain containing 3
  Uniprot ID: Q63HM9
  ENST ID: ENST00000328457
  CDS Start-End: 103-1068
gtaaactctagcggggctagagcaaacattggattagcggcagcagcctgccagcctgcccgaggagtgctgggaccagcgcgctgcacgccgactggcacgatggcctcgtctcaggggaaaaacgagctgaaattagccgactggatggcaactctgccggagagcatgcacagcatccccctcaccaatttagccattccagggtctcatgattccttcagcttctacattgatgaagcctctccagtaggtcctgagcagccagaaactgtccagaattttgtctctgtgtttggaactgtggccaaaaagctcatgcggaaatggttagccactcagacaatgaattttactggccagctaggagctggaattcgttattttgatcttcgaatttccaccaagcccagagaccccgacaatgaactctattttgctcatggtttgttcagtgccaaagtcaatgaaggccttgaggagatcaatgcattcctcacagatcaccataaggaggtagtgttcttggacttcaaccacttttatgggatgcagaaatatcaccatgaaaaactggtccaaatgctgaaagacatctatggaaataaaatgtgcccagcgatttttgcccaggaagttagtttaaagtacctgtgggagaaggactatcaagtgctggtcttctaccatagtccagtggctctggaagtgccctttctctggcctgggcagatgatgccagcaccctgggccaacaccacagaccccgagaaactgatccagtttcttcaagcatccatcactgagagaagaaagaagggatcgttttttatatctcaggtggtgctgacccccaaagctagcactgtggtcaaaggggtggcaagtggcctcagagaaacaatcacagaaagagctcttcctgccatgatgcagtgggtccgcacgcagaagccaggagagagtggcatcaatattgtcactgccgattttgtagaacttggtgactttatcagcactgtcataaagctcaactatgtctttgatgaaggagaagccaacacttgatagcactacttggagtttccatgaataagatggagaaagctcattgtattagggcatactatctgtaaacactctgatcttcctattccactgagtctctgaagggaatagggctggtagtgggtgggaaaaggggaaaaactgtttcttcagtgattacaatcatactcttcattactataaatatttcatttcccatttgatgagcaaaatctacttctagtgttaggaataaaaaaaaaagaccagtaactttgtttttcaaaattagtctttgtaacatagaattcatgagtgtttacttgattaggttctctatttccagcctatgactcctacgctgtctataccctgcaacctttctgctccctctcttgctcgctctttttaatcagatgctgtatgggaatcaaaacaattgaatgcccaacattttgtgtattacattgttgtcttaaaacttactagttttgtgggacttgttataatgctctatagtcatccacagttgggcaatcatagctaatttttggtcatagaaaatctgcatcaaatcagtttccatgcatcagtaatattgaaggtcataatcagtgatttttgttatatgaaaataatagtgtttcacagtatttctatttaaggcagctataaatataggagaaaaatgtttttggagagctgtgaatgccaatttcagagggaaaaatggttgaggggtgaaagagatgtatggcattttaatttggcaatctcttaaataatattgccctgcaagtacccagtaaatggtaaggtacaagtgtgttaaaattgaaaactctgaaaataactctttaaaaagccctcttaatgatgctcttgatgaaagaaaaagacagaaggaaggaagaagaaaaagactgcaagctttcctgccaatttgggattttcaaatatttaattctaaattccagattttaaggaagatttttcaagaaactgcaagtttttgacttgaaggaaagaaagaggaaggctggtagaagcagttagagcaatgtgtttgaaattatgtccatgaaatcacagggatctctgaaatatctttaggaaacttgaaatttatgaggtctgaatggacttgtttaaaattggctctgactcctcacttctgagtttcatcctatccgagggatgagattaaggcagaggcaaaagtttcacacaaagtttctgcaacctaacgtttaatagtccgggtctacagggaagaacaatgacacagcttgagcgttacttcctccttcgtgtcattgtgatatttgacaactctaaaaaataaaaaaaaaaaacttagagcacaataatccttgcctatgtacttcacaggaatattgtgaggtgtttataaaattataaaatttgatgaaattcttacaattattaattattttattttcatgtttagaaataatcacaccccaatagtttcctaggataatacagtccatgcaaagtagggtcatagagaaataaaagcatgccctcagcttttaatgaacttaaatgtagcacatatggcttaatctcttagacttagataagggagttcaattcaaaaccatatatgtcaagaccacaaataatcaagagttgatttcaagattataaatactcatgatcagaaaatagtacttattagcaattaaagggaggaaaagaaattgtttatactgaagagaatgtttatgaggagtgtgtatgtacctgtggtataccaaatagcatacatgtacacacaaaaatgtgtgtatacatttgggttgtgtgtatacatcttgccatatacaatatacaaacatatgcccattcctgtgatagcatacaaattcaaacatacagaaacacacacagatatggacacagtacaattcttcttttcaaatgaagacattgataatattaaataatttaattttaagactgaaacccttaatattgtgtgaaaaagagtaataaaacctttgaaagtagagtagatgatcacatcaaagtatttttgtaaaagaattctagtgtaggacttaattatttttaaaatatatttcttctcttctttccattttcccttcccttgtagttttattatctttctgtcttttacacctgctctttatgtgaaaatgtatatgaatccttttaaaatgattaggattattgaaatgtatgtcccgtaaatttggtttttgggcagactttctctctaactggctattcattcatccttcaggaggatcttagccaagaatatttgcaatgacacatgaatttaattttataaatataatggaaaacagatttttcatcatatcatgaataaaatatagaggtaactatgttgtattttcttgaacctagatactttctcatagtgtttgcttagaattaactttgtcctatttgtcaactgggttctggaaaaaaacaaacatgatgaagcttttgaataattgtgcagttttttaactagggaaagctttgtactgctgctaatgatatgcacccagaaaccttgttagacaaaaggcagtttcaagccaatgctatggtttccatgtggacatacagtgcctatgtagcaggcacttagagtaaatggacttgccttaatttataaaggagggaagaggtagaagggaaccatgggtcctccagctagagggggagtttactaaaagggagtccttggaaaggggaatggagagaaggtgcctttgactgtcttctatccattagttctgccctggagcacactggggaagcaggctgcgggccttccaaaagtaaaaaatggtgatatgcaatcgaagcttatccttagcctatgcacatttgtctcagctgggcattgtcttttcagagagcttgtagcacaagggctacacatgggcgccaagatggtggtagatacaccttggtgcactttttgttttacttgtttcttaagactatttcacaagtcctgtgaggcaaaaaaacaaaacaaaacaaaacaaccaaacaaatacaatctaacttttacccaatctacagcaggaaatcaaaggagtgggtggaatgagagaaaatatgcaaagagatcatttttaagtttgatttcctgtctgtaattttcaaggactaatatagcaaatttttcttctgccattatcatttatgtctccctatttaccacacaataatgtaaatgcagagaatgaggaggcatcttttaaaagccttaggatattctatatgatgacctcaatattgactttcagccatactgggaaaacttacttttcatggagtgccacctaacagtgaatgtattagagtataaaatgtttgccatgtatacacctgtatgtgcacatacacacattacacacacacacagaatgcacatttcacacacatatacttattattcaagttgaaactgcactctaatcaatctgagtctattgctgtttcaactcttaaaatcaatatctcctacattagtagatataaacataattcaaatatttaaatatttaagaggagaaaagtaactagaaaaccaatgaaaagtgaggccatcagaaatagaaaatgcctggcacgaacagtctatctaaattctcaatttcacttcaaattagagaatccataatggactagaatataaattacaaacacatacacacatcttcacttaaagttgttttaagttctttgaagttctgacatgtttttagccagggttatttgttcaggttcttccttgttaggattccagactggaaagttggaagtctcaggaaatgcatgtttccatgagttttttagtttcacagttttacagatccaacgacacaatcttttaatctttggtcactcaaccaaacaggagttccgtaggcagagtgctcactttgaattgctaatagaaaataatgcacagtgtcctcaggatatgctaaacaaggtttttaagagcattttattttacagcactttagtcttttcagctagatttcagtgacactatggtgtaaatgctatatctgccataacttattggtggctcctgtgttacatacagttttaaataatgctctaaattgtttgttttcccaatgataatgataaagtgttctgtagaatttgtaaaacatgtcaattgaatctgttgaaaattgtgtaattgttatttcaattgtgatactattttgtaggtaatagttttaaacgtatatttgtatgagtcaaaagtatgtgcttgtatgtggtatgtgtgtgtaagtatataatatcttatcaaaaatcaaacttatcctaaagaaaaagggcacattgtgaccagccttaatttattaacacttttttgttgtttttgcaatttggatttaaaattgaaacagaaattaagtttttgttaaaaatggtgtcttttaattttgtgaggaatgggctttagaacctatctgagttcccacaagcaaactgtccaccttgtgaggtaccccattgcttttcgtaataatcaaacatcaattcatatattaacttcattttcatacagactaatttgttttcatcaacaatagaaccagtacacctttaaagttgaccttcccaacatggcacccatttttctttaatgataaattttccatgaaaaattgtttctccaaaccattactttttaaaattcaatcttcccaagtaagatgaactgccttggtgttaggagagcttttaaaggcccatccatactaggtggttccaacatggttctcttctcgagaaaacaagcatgcaacccacacacttttctggtctgccccacgtgtagaattagtctagcaatagaaaactcatgactgacaaggatctacacatgtggtcatgcttgaagcaaaaattctgtgaccttctttgggcttggatctgattacagaatattaattaactttcttatttcctttctttctccatccttagttattccttttcaatatttagagttgccaggtaaaatacaggatatccagtgaaatttaaatttcagataaacagtatttctttagcatatttctcatatatttaatcagacatactttcactttaaaaaaagtttatctgaaattcaaatgtaactgggtatgtcctatatattttttcctaaatctcacaattctatccacactgcctttctatctttttcagctgggctatctataaggggcgagatctacctccctccatacccttgtgttcagacaccttatgaatatctgcagtcataatgtccttcaagaaagaaaacattggtcagctctaggtcctgcaaatgctttttgaaggacgaactcaaatacagatgggataatcaagtaaatatcttcataggatcaatgccaccatgttcaacacttccctttgccagcctgttgtgaggtccaagtttccccattaatcccttatatagcatttcccagtaactgggacaaccaaaaacacaccgacatattagaaatgctcctgaaaagtggcaacaccgcctaactcagtaccaggacctcttttaaattcaatttcttttttctttcagagagataacaaacgaattcattatttcccccattcacatcttaccacaaattatttttatcaggttaaaactggtcatctacggaattgtagaaaggtgacataggaactgtcttcactgctggaagaataaaagagtctgaggtatagacactgccctggtgacaccttctcagaacattgttgggggacaggggaggcaggcgcaagtaggggatagaatctgaccctgacatgcagctatcacctggcagagagactcgtcaaagcaaattataacgaccagtactatttttttttggaattgaaaacccaagaagccctaaaataagaacagtgagatcaaaggctggtttctaaaacaatgcagaaaatagaaccatgttggaattcctaaattctagctttcaaatactactgtttccaacagtgaatccttgacagagactgaatgcagatggaattttgaaacattttcagtagctacctcctctcctgaaattcctataagtggcagaggaaaatccaaatcctttaatataacatgtccatctcatgactcctgcttacacacatttgtgttgatttgcttcatttctggaggatgggaatttgcagagctggtgacatttccttcattagacaccagaaattcaccagagagagacagatctgtgccttctctttttaggatctggttattgatactttaataaatgtggtgtaaagaaaatccatggctacagtctgtatagaaaatgtgaattttttaaataagattgtgttcttaatgtaaaaaataaaagtttatttgtattcagtgaaatgcctaataaagtcctggtacc

SEQ ID NO: 165266 - DNA, 7704 bp, Homo sapiens
  Payload ID: 12542
  Gene Symbol: PLCXD3
  Gene Name: phosphatidylinositol-specific phospholipase C, X domain containing 3
  Uniprot ID: Q63HM9
  ENST ID: ENST00000377801
  CDS Start-End: 76-1041
attggattagcggcagcagcctgccagcctgcccgaggagtgctgggaccagcgcgctgcacgccgactggcacgatggcctcgtctcaggggaaaaacgagctgaaattagccgactggatggcaactctgccggagagcatgcacagcatccccctcaccaatttagccattccagggtctcatgattccttcagcttctacattgatgaagcctctccagtaggtcctgagcagccagaaactgtccagaattttgtctctgtgtttggaactgtggccaaaaagctcatgcggaaatggttagccactcagacaatgaattttactggccagctaggagctggaattcgttattttgatcttcgaatttccaccaagcccagagaccccgacaatgaactctattttgctcatggtttgttcagtgccaaagtcaatgaaggccttgaggagatcaatgcattcctcacagatcaccataaggaggtagtgttcttggacttcaaccacttttatgggatgcagaaatatcaccatgaaaaactggtccaaatgctgaaagacatctatggaaataaaatgtgcccagcgatttttgcccaggaagttagtttaaagtacctgtgggagaaggactatcaagtgctggtcttctaccatagtccagtggctctggaagtgccctttctctggcctgggcagatgatgccagcaccctgggccaacaccacagaccccgagaaactgatccagtttcttcaagcatccatcactgagagaagaaagaagggatcgttttttatatctcaggtggtgctgacccccaaagctagcactgtggtcaaaggggtggcaagtggcctcagagaaacaatcacagaaagagctcttcctgccatgatgcagtgggtccgcacgcagaagccaggagagagtggcatcaatattgtcactgccgattttgtagaacttggtgactttatcagcactgtcataaagctcaactatgtctttgatgaaggagaagccaacacttgatagcactacttggagtttccatgaataagatggagaaagctcattgtattagggcatactatctgtaaacactctgatcttcctattccactgagtctctgaagggaatagggctggtagtgggtgggaaaaggggaaaaactgtttcttcagtgattacaatcatactcttcattactataaatatttcatttcccatttgatgagcaaaatctacttctagtgttaggaataaaaaaaaaagaccagtaactttgtttttcaaaattagtctttgtaacatagaattcatgagtgtttacttgattaggttctctatttccagcctatgactcctacgctgtctataccctgcaacctttctgctccctctcttgctcgctctttttaatcagatgctgtatgggaatcaaaacaattgaatgcccaacattttgtgtattacattgttgtcttaaaacttactagttttgtgggacttgttataatgctctatagtcatccacagttgggcaatcatagctaatttttggtcatagaaaatctgcatcaaatcagtttccatgcatcagtaatattgaaggtcataatcagtgatttttgttatatgaaaataatagtgtttcacagtatttctatttaaggcagctataaatataggagaaaaatgtttttggagagctgtgaatgccaatttcagagggaaaaatggttgaggggtgaaagagatgtatggcattttaatttggcaatctcttaaataatattgccctgcaagtacccagtaaatggtaaggtacaagtgtgttaaaattgaaaactctgaaaataactctttaaaaagccctcttaatgatgctcttgatgaaagaaaaagacagaaggaaggaaggaaggaaggaaggaaggaaggaaggaaggaaggaaggaaaggaagaaaggaagggagggaggaagggagggaagaagggagggaaggacagaaggaaggacgggaggaaggaaggaagggaggaaggaaggaaggaagagagggagggagggaggaagagagggagggagggaggaagagaggaaggaagaagaaaaagactgcaagctttcctgccaatttgggattttcaaatatttaattctaaattccagattttaaggaagatttttcaagaaactgcaagtttttgacttgaaggaaagaaagaggaaggctggtagaagcagttagagcaatgtgtttgaaattatgtccatgaaatcacagggatctctgaaatatctttaggaaacttgaaatttatgaggtctgaatggacttgtttaaaattggctctgactcctcacttctgagtttcatcctatccgagggatgagattaaggcagaggcaaaagtttcacacaaagtttctgcaacctaacgtttaatagtccgggtctacagggaagaacaatgacacagcttgagcgttacttcctccttcgtgtcattgtgatatttgacaactctaaaaaataaaaaaaaaaaacttagagcacaataatccttgcctatgtacttcacaggaatattgtgaggtgtttataaaattataaaatttgatgaaattcttacaattattaattattttattttcatgtttagaaataatcacaccccaatagtttcctaggataatacagtccatgcaaagtagggtcatagagaaataaaagcatgccctcagcttttaatgaacttaaatgtagcacatatggcttaatctcttagacttagataagggagttcaattcaaaaccatatatgtcaagaccacaaataatcaagagttgatttcaagattataaatactcatgatcagaaaatagtacttattagcaattaaagggaggaaaagaaattgtttatactgaagagaatgtttatgaggagtgtgtatgtacctgtggtataccaaatagcatacatgtacacacaaaaatgtgtgtatacatttgggttgtgtgtatacatcttgccatatacaatatacaaacatatgcccattcctgtgatagcatacaaattcaaacatacagaaacacacacagatatggacacagtacaattcttcttttcaaatgaagacattgataatattaaataatttaattttaagactgaaacccttaatattgtgtgaaaaagagtaataaaacctttgaaagtagagtagatgatcacatcaaagtatttttgtaaaagaattctagtgtaggacttaattatttttaaaatatatttcttctcttctttccattttcccttcccttgtagttttattatctttctgtcttttacacctgctctttatgtgaaaatgtatatgaatccttttaaaatgattaggattattgaaatgtatgtcccgtaaatttggtttttgggcagactttctctctaactggctattcattcatccttcaggaggatcttagccaagaatatttgcaatgacacatgaatttaattttataaatataatggaaaacagatttttcatcatatcatgaataaaatatagaggtaactatgttgtattttcttgaacctagatactttctcatagtgtttgcttagaattaactttgtcctatttgtcaactgggttctggaaaaaaacaaacatgatgaagcttttgaataattgtgcagttttttaactagggaaagctttgtactgctgctaatgatatgcacccagaaaccttgttagacaaaaggcagtttcaagccaatgctatggtttccatgtggacatacagtgcctatgtagcaggcacttagagtaaatggacttgccttaatttataaaggagggaagaggtagaagggaaccatgggtcctccagctagagggggagtttactaaaagggagtccttggaaaggggaatggagagaaggtgcctttgactgtcttctatccattagttctgccctggagcacactggggaagcaggctgcgggccttccaaaagtaaaaaatggtgatatgcaatcgaagcttatccttagcctatgcacatttgtctcagctgggcattgtcttttcagagagcttgtagcacaagggctacacatgggcgccaagatggtggtagatacaccttggtgcactttttgttttacttgtttcttaagactatttcacaagtcctgtgaggcaaaaaaacaaaacaaaacaaaacaaccaaacaaatacaatctaacttttacccaatctacagcaggaaatcaaaggagtgggtggaatgagagaaaatatgcaaagagatcatttttaagtttgatttcctgtctgtaattttcaaggactaatatagcaaatttttcttctgccattatcatttatgtctccctatttaccacacaataatgtaaatgcagagaatgaggaggcatcttttaaaagccttaggatattctatatgatgacctcaatattgactttcagccatactgggaaaacttacttttcatggagtgccacctaacagtgaatgtattagagtataaaatgtttgccatgtatacacctgtatgtgcacatacacacattacacacacacacagaatgcacatttcacacacatatacttattattcaagttgaaactgcactctaatcaatctgagtctattgctgtttcaactcttaaaatcaatatctcctacattagtagatataaacataattcaaatatttaaatatttaagaggagaaaagtaactagaaaaccaatgaaaagtgaggccatcagaaatagaaaatgcctggcacgaacagtctatctaaattctcaatttcacttcaaattagagaatccataatggactagaatataaattacaaacacatacacacatcttcacttaaagttgttttaagttctttgaagttctgacatgtttttagccagggttatttgttcaggttcttccttgttaggattccagactggaaagttggaagtctcaggaaatgcatgtttccatgagttttttagtttcacagttttacagatccaacgacacaatcttttaatctttggtcactcaaccaaacaggagttccgtaggcagagtgctcactttgaattgctaatagaaaataatgcacagtgtcctcaggatatgctaaacaaggtttttaagagcattttattttacagcactttagtcttttcagctagatttcagtgacactatggtgtaaatgctatatctgccataacttattggtggctcctgtgttacatacagttttaaataatgctctaaattgtttgttttcccaatgataatgataaagtgttctgtagaatttgtaaaacatgtcaattgaatctgttgaaaattgtgtaattgttatttcaattgtgatactattttgtaggtaatagttttaaacgtatatttgtatgagtcaaaagtatgtgcttgtatgtggtatgtgtgtgtaagtatataatatcttatcaaaaatcaaacttatcctaaagaaaaagggcacattgtgaccagccttaatttattaacacttttttgttgtttttgcaatttggatttaaaattgaaacagaaattaagtttttgttaaaaatggtgtcttttaattttgtgaggaatgggctttagaacctatctgagttcccacaagcaaactgtccaccttgtgaggtaccccattgcttttcgtaataatcaaacatcaattcatatattaacttcattttcatacagactaatttgttttcatcaacaatagaaccagtacacctttaaagttgaccttcccaacatggcacccatttttctttaatgataaattttccatgaaaaattgtttctccaaaccattactttttaaaattcaatcttcccaagtaagatgaactgccttggtgttaggagagcttttaaaggcccatccatactaggtggttccaacatggttctcttctcgagaaaacaagcatgcaacccacacacttttctggtctgccccacgtgtagaattagtctagcaatagaaaactcatgactgacaaggatctacacatgtggtcatgcttgaagcaaaaattctgtgaccttctttgggcttggatctgattacagaatattaattaactttcttatttcctttctttctccatccttagttattccttttcaatatttagagttgccaggtaaaatacaggatatccagtgaaatttaaatttcagataaacagtatttctttagcatatttctcatatatttaatcagacatactttcactttaaaaaaagtttatctgaaattcaaatgtaactgggtatgtcctatatattttttcctaaatctcacaattctatccacactgcctttctatctttttcagctgggctatctataaggggcgagatctacctccctccatacccttgtgttcagacaccttatgaatatctgcagtcataatgtccttcaagaaagaaaacattggtcagctctaggtcctgcaaatgctttttgaaggacgaactcaaatacagatgggataatcaagtaaatatcttcataggatcaatgccaccatgttcaacacttccctttgccagcctgttgtgaggtccaagtttccccattaatcccttatatagcatttcccagtaactgggacaaccaaaaacacaccgacatattagaaatgctcctgaaaagtggcaacaccgcctaactcagtaccaggacctcttttaaattcaatttcttttttctttcagagagataacaaacgaattcattatttcccccattcacatcttaccacaaattatttttatcaggttaaaactggtcatctacggaattgtagaaaggtgacataggaactgtcttcactgctggaagaataaaagagtctgaggtatagacactgccctggtgacaccttctcagaacattgttgggggacaggggaggcaggcgcaagtaggggatagaatctgaccctgacatgcagctatcacctggcagagagactcgtcaaagcaaattataacgaccagtactatttttttttggaattgaaaacccaagaagccctaaaataagaacagtgagatcaaaggctggtttctaaaacaatgcagaaaatagaaccatgttggaattcctaaattctagctttcaaatactactgtttccaacagtgaatccttgacagagactgaatgcagatggaattttgaaacattttcagtagctacctcctctcctgaaattcctataagtggcagaggaaaatccaaatcctttaatataacatgtccatctcatgactcctgcttacacacatttgtgttgatttgcttcatttctggaggatgggaatttgcagagctggtgacatttccttcattagacaccagaaattcaccagagagagacagatctgtgccttctctttttaggatctggttattgatactttaataaatgtggtgtaaagaaaatccatggctacagtctgtatagaaaatgtgaattttttaaataagattgtgttcttaatgtaaaaaataaaagtttatttgtattcagtgaaatgcctaataaagtcctggtaccaat

SEQ ID NO: 165267 - DNA, 2655 bp, Homo sapiens
  Payload ID: 12543
  Gene Symbol: PISD
  Gene Name: phosphatidylserine decarboxylase
  Uniprot ID: Q9UG56
  ENST ID: ENST00000266095
  CDS Start-End: 431-1558
ggaagctggagccacctgcggctctgagagggacagacggtgctcagcctgtgtcctggggcaaagctggattcattttcctccctggcgatcttctggggcccacagctggtgatatggaggcactgacaccctggtctcggcgcttgttttagaagaggcagaacagtgataaagacaaggatctaaatgggcaaggacgccctgccctcactgggctcactggcagccctgaccctctattctgcaccctgtgagccaccgagactgaaccaaacccaggaagcggcgccaccaaccagcctcgcagaggcagaggccctggagcagtgacagcacaggagatctgctggctcgggggaaggggaggaaagaggaaaacaaagggagtgatcgagtgagcctcgccccgccctccctgcgccggcccatgatgtgtcagtcagaggcgcggcaaggaccagagctccgcgcggcgaaatggttgcacttcccccagctggccctgaggcggaggctggggcagctgagctgcatgtccagacccgctctgaaactgcgctcctggcccttgaccgtcctctactacctcctgcccttcggcgccctcagaccgctcagccgggtgggatggaggcccgtaagcagggtggctttgtacaagtcagtgccaacgcgcttgctgtcacgggcctggggtcgcctcaatcaggtggagctgccacactggctgcgcaggcccgtctacagcctgtacatctggacgtttggggtgaacatgaaagaggccgctgtggaggacctgcatcactaccgcaacctcagcgagttcttccggcgcaagctgaagccgcaggcccggcctgtctgtggcctgcacagcgtgattagcccatcggatggaaggatcctcaactttgggcaggtgaagaactgtgaggtggagcaggtaaagggggtcacctactccctggagtcgttcctgggcccgcgtatgtgcacagaggacctgcccttcccaccagccgcgtcgtgtgactccttcaagaaccagctggtcacccgggaagggaatgagctctatcactgtgtcatctacctggcccctggggactaccactgcttccactcccccaccgactggactgtgtcccaccggcgccacttcccaggctccctgatgtcagtgaaccctggcatggctcgctggatcaaagagctcttctgccataacgagcgggtggtcctgacgggggactggaaacatggcttcttctcactgacagctgtgggggccaccaacgtgggctccattcgcatctactttgaccgggacctgcacacaaacagcccaaggcacagcaagggctcctacaatgacttcagcttcgtgacgcacaccaatagagagggcgtccccatgcgtaagggcgagcacctgggcgagttcaacctgggctccaccatcgtgctcatcttcgaggcccccaaggacttcaatttccagctgaaaacaggacagaaaatccgctttggggaagccctgggctcgctctagagtctctttcctgattatggctgctaagggatcttttccaaacagagtgagggtcttttcaagagggaggcccatgaggccatccaggtaagggcctgcctcagcgtggttgggagtctgaccaggtaggacttgaatgattcggctaccacctgttccagaggtgcagacaagaggtggcgagagcccccatcatgcccctcaacctatcccgttccttctgcctacaaataaaaagtgcaggctggaatgatctcagtcacatttggatctttttaaacactgtatagacggaagagcctgcattcctgaccgaaccttcagttggtctcggttgtcgttttttcttgctgctcctccccccatcacctgagctgttttctgttggccccttttgttttttggccttaacgctcctgctgcacagggtgaggtgcctccttggcacagactgtggatgcctctcccccagcagagccacacagccttcgtgacaactgctttccgttcccacattcacctcatcctgctctttagaaaaagcagtctttgtgcttgtggctgaacgcatcaccctggactctgctagtgtcttctgaggacactgatgacactgattaatgatacagacctttgcaggacctgatgagtgacccttctggagctggccaggtcctctgcagcaggcaagaccaatcaatcactgaacctgcctcatggcaccagagtgaacagggcaggcaggtagtaggcccagctggggaaatgggagagttcctgtccccctccacatatccctacatgaaatatgggaaagttgctgctattgattcagggtctgtcttggaggcagaggacccttggtggatagttggtcagtgcctggaaaacctgtcccagtttatcaggaacgcaggcctggggagcccccagtggcggggacagggccagatttcatgttgaccctggggatgctgtgaatttctcctgcaggagagacatcattgaattttttcaactgtatcagtagcacagtatttttgtatgaaaagtgggagacttctgaacagtaattcatttaattgcaaagcattttg

SEQ ID NO: 165268 - DNA, 2669 bp, Homo sapiens
  Payload ID: 12543
  Gene Symbol: PISD
  Gene Name: phosphatidylserine decarboxylase
  Uniprot ID: Q9UG56
  ENST ID: ENST00000382151
  CDS Start-End: 421-1548
ccatcctgcagctctgagagggacagacggtgctcagcctgtgtcctggggcaaagctggattcattttcctccctggcgatcttctggggcccacagctggtgatatggaggcactgacaccctggtctcggcgcttgttttagaagaggcagaacagtgataaagacaaggatctaaatgggcaaggacgccctgccctcactgggctcactggcagccctgaccctctattctgcaccctgtgagccaccgagactgaaccaaacccaggaagcggcgccaccaaccagcctcgcagaggcagaggccctggagcagtgacagcacaggagatctgctggctcgggggaaggggaggaaagaggaaaacaaagggagtgatcgagtgagcctcgccccgccctccctgcgccggcccatgatgtgtcagtcagaggcgcggcaaggaccagagctccgcgcggcgaaatggttgcacttcccccagctggccctgaggcggaggctggggcagctgagctgcatgtccagacccgctctgaaactgcgctcctggcccttgaccgtcctctactacctcctgcccttcggcgccctcagaccgctcagccgggtgggatggaggcccgtaagcagggtggctttgtacaagtcagtgccaacgcgcttgctgtcacgggcctggggtcgcctcaatcaggtggagctgccacactggctgcgcaggcccgtctacagcctgtacatctggacgtttggggtgaacatgaaagaggccgctgtggaggacctgcatcactaccgcaacctcagcgagttcttccggcgcaagctgaagccgcaggcccggcctgtctgtggcctgcacagcgtgattagcccatcggatggaaggatcctcaactttgggcaggtgaagaactgtgaggtggagcaggtaaagggggtcacctactccctggagtcgttcctgggcccgcgtatgtgcacagaggacctgcccttcccaccagccgcgtcgtgtgactccttcaagaaccagctggtcacccgggaagggaatgagctctatcactgtgtcatctacctggcccctggggactaccactgcttccactcccccaccgactggactgtgtcccaccggcgccacttcccaggctccctgatgtcagtgaaccctggcatggctcgctggatcaaagagctcttctgccataacgagcgggtggtcctgacgggggactggaaacatggcttcttctcactgacagctgtgggggccaccaacgtgggctccattcgcatctactttgaccgggacctgcacacaaacagcccaaggcacagcaagggctcctacaatgacttcagcttcgtgacgcacaccaatagagagggcgtccccatgcgtaagggcgagcacctgggcgagttcaacctgggctccaccatcgtgctcatcttcgaggcccccaaggacttcaatttccagctgaaaacaggacagaaaatccgctttggggaagccctgggctcgctctagagtctctttcctgattatggctgctaagggatcttttccaaacagagtgagggtcttttcaagagggaggcccatgaggccatccaggtaagggcctgcctcagcgtggttgggagtctgaccaggtaggacttgaatgattcggctaccacctgttccagaggtgcagacaagaggtggcgagagcccccatcatgcccctcaacctatcccgttccttctgcctacaaataaaaagtgcaggctggaatgatctcagtcacatttggatctttttaaacactgtatagacggaagagcctgcattcctgaccgaaccttcagttggtctcggttgtcgttttttcttgctgctcctccccccatcacctgagctgttttctgttggccccttttgttttttggccttaacgctcctgctgcacagggtgaggtgcctccttggcacagactgtggatgcctctcccccagcagagccacacagccttcgtgacaactgctttccgttcccacattcacctcatcctgctctttagaaaaagcagtctttgtgcttgtggctgaacgcatcaccctggactctgctagtgtcttctgaggacactgatgacactgattaatgatacagacctttgcaggacctgatgagtgacccttctggagctggccaggtcctctgcagcaggcaagaccaatcaatcactgaacctgcctcatggcaccagagtgaacagggcaggcaggtagtaggcccagctggggaaatgggagagttcctgtccccctccacatatccctacatgaaatatgggaaagttgctgctattgattcagggtctgtcttggaggcagaggacccttggtggatagttggtcagtgcctggaaaacctgtcccagtttatcaggaacgcaggcctggggagcccccagtggcggggacagggccagatttcatgttgaccctggggatgctgtgaatttctcctgcaggagagacatcattgaattttttcaactgtatcagtagcacagtatttttgtatgaaaagtgggagacttctgaacagtaattcatttaattgcaaagcattttgaaataaaaaaaatcaaacttaaaa

SEQ ID NO: 165269 - DNA, 2194 bp, Homo sapiens
  Payload ID: 12543
  Gene Symbol: PISD
  Gene Name: phosphatidylserine decarboxylase
  ENST ID: ENST00000397500
  CDS Start-End: 230-1018
ggagcccggaagctggagccacctgcggccctgaccctctattctgcaccctgtgagccaccgagactgaaccaaacccaggaagcggcgccaccaaccagcctcgcagaggcagaggccctggagcagtgacagcacaggagatctgctggctcgggggaaggggaggaaagaggaaaacaaagggagtgatcgagtgagcctcgccccgccctccctgcgccggcccatgatgtgtcagtcagaggcgcggcaaggaccagagctccgcgcggcgaaatggttgcacttcccccagctggccctgaggcggaggctggggcagctgagctgcatgtccagacccgctctgaaactgcgctcctggcccttgaccgtcctctactacctcctgcccttcggcgccctcagaccgctcagccgggtgggatggaggcccgtaagcagggtggctttgtacaagtcagtgccaacgcgcttgctgtcacgggcctggggtcgcctcaatcaggtggagctgccacactggctgcgcaggcccgtctacagcctgtacatctggacgtttggggtgaacatgaaagaggccgctgtggaggacctgcatcactaccgcaacctcagcgagttcttccggcgcaagctgaagccgcaggcccggcctgtctgtggcctgcacagcgtgattagcccatcggatggaaggatcctcaactttgggcaggtgaagaactgtgaggtggagcaggtaaagggggtcacctactccctggagtcgttcctgggcccgcgtatgtgcacagaggacctgcccttcccaccagccgcgtcgtgtgactccttcaagaaccagctggtcacccgggaagggaatgagctctatcactgtgtcatctacctggcccctggggactaccactgcttccactcccccaccgactggactgtgtcccaccggcgccacttcccaggacctgcacacaaacagcccaaggcacagcaagggctcctacaatgacttcagcttcgtgacgcacaccaatagagagggcgtccccatgcgtaagggcgagcacctgggcgagttcaacctgggctccaccatcgtgctcatcttcgaggcccccaaggacttcaatttccagctgaaaacaggacagaaaatccgctttggggaagccctgggctcgctctagagtctctttcctgattatggctgctaagggatcttttccaaacagagtgagggtcttttcaagagggaggcccatgaggccatccaggtaagggcctgcctcagcgtggttgggagtctgaccaggtaggacttgaatgattcggctaccacctgttccagaggtgcagacaagaggtggcgagagcccccatcatgcccctcaacctatcccgttccttctgcctacaaataaaaagtgcaggctggaatgatctcagtcacatttggatctttttaaacactgtatagacggaagagcctgcattcctgaccgaaccttcagttggtctcggttgtcgttttttcttgctgctcctccccccatcacctgagctgttttctgttggccccttttgttttttggccttaacgctcctgctgcacagggtgaggtgcctccttggcacagactgtggatgcctctcccccagcagagccacacagccttcgtgacaactgctttccgttcccacattcacctcatcctgctctttagaaaaagcagtctttgtgcttgtggctgaacgcatcaccctggactctgctagtgtcttctgaggacactgatgacactgattaatgatacagacctttgcaggacctgatgagtgacccttctggagctggccaggtcctctgcagcaggcaagaccaatcaatcactgaacctgcctcatggcaccagagtgaacagggcaggcaggtagtaggcccagctggggaaatgggagagttcctgtccccctccacatatccctacatgaaatatgggaaagttgctgctattgattcagggtctgtcttggaggcagaggacccttggtggatagttggtcagtgcctggaaaacctgtcccagtttatcaggaacgcaggcctggggagcccccagtggcggggacagggccagatttcatgttgaccctggggatgctgtgaatttctcctgcaggagag

SEQ ID NO: 165270 - DNA, 1963 bp, Homo sapiens
  Payload ID: 12543
  Gene Symbol: PISD
  Gene Name: phosphatidylserine decarboxylase
  Uniprot ID: Q9UG56
  ENST ID: ENST00000439502
  CDS Start-End: 225-1454
ctgcgaccaagcccaggtttagcgaaacctacagctccactagttcccctacctccgcaggtgccaagcgggttaggtggggagtagccacagggcggagcttagtcggctccgcccccaacccgcgcttttctcattggcccactgaactcgagactcgtgacgccttaagcgtgcgcccagcgtgtgaagggggcgtggcacgctgagaaggagcagacaagatggcgacgtccgtggggcaccgatgtctgggattactgcacggggtcgcgccgtggcggagcagcctccatccctgtgagatcactgccctgagccaatccctacagcccttacggaagctgccttttagagcctttcgcacagatgccagaaaaatccacactgcccctgcccgaaccatgttcctgctgcgtcccctgcccattctgttggtgacaggcggcgggtatgcagggtaccggcagtatgagaagtacagggagcgagagctggagaagctgggattggagattccacccaaacttgctggtcactgggaggtggctttgtacaagtcagtgccaacgcgcttgctgtcacgggcctggggtcgcctcaatcaggtggagctgccacactggctgcgcaggcccgtctacagcctgtacatctggacgtttggggtgaacatgaaagaggccgctgtggaggacctgcatcactaccgcaacctcagcgagttcttccggcgcaagctgaagccgcaggcccggcctgtctgtggcctgcacagcgtgattagcccatcggatggaaggatcctcaactttgggcaggtgaagaactgtgaggtggagcaggtaaagggggtcacctactccctggagtcgttcctgggcccgcgtatgtgcacagaggacctgcccttcccaccagccgcgtcgtgtgactccttcaagaaccagctggtcacccgggaagggaatgagctctatcactgtgtcatctacctggcccctggggactaccactgcttccactcccccaccgactggactgtgtcccaccggcgccacttcccaggctccctgatgtcagtgaaccctggcatggctcgctggatcaaagagctcttctgccataacgagcgggtggtcctgacgggggactggaaacatggcttcttctcactgacagctgtgggggccaccaacgtgggctccattcgcatctactttgaccgggacctgcacacaaacagcccaaggcacagcaagggctcctacaatgacttcagcttcgtgacgcacaccaatagagagggcgtccccatgcgtaagggcgagcacctgggcgagttcaacctgggctccaccatcgtgctcatcttcgaggcccccaaggacttcaatttccagctgaaaacaggacagaaaatccgctttggggaagccctgggctcgctctagagtctctttcctgattatggctgctaagggatcttttccaaacagagtgagggtcttttcaagagggaggcccatgaggccatccaggtaagggcctgcctcagcgtggttgggagtctgaccaggtaggacttgaatgattcggctaccacctgttccagaggtgcagacaagaggtggcgagagcccccatcatgcccctcaacctatcccgttccttctgcctacaaataaaaagtgcaggctggaatgatctcagtcacatttggatctttttaaacactgtatagacggaagagcctgcattcctgaccgaaccttcagttggtctcggttgtcgttttttcttgctgctcctccccccatcacctgagctgttttctgttggccccttttgttttttggccttaacgctcctgctgcacagggtgaggtgcctccttggcacagactgtggatgcctctcccccagcagagccacacagccttcgtgacaactgctttccgtt

SEQ ID NO: 165271 - DNA, 609 bp, Homo sapiens
  Payload ID: 12543
  Gene Symbol: PISD
  Gene Name: phosphatidylserine decarboxylase
  ENST ID: ENST00000429683
  CDS Start-End: 391-609
ccttcatccccccttcctcgcccctccacagacccagggcatttggtggacacttttgcttgcagttaggtcaagtggaggtatggaagaacatggaaatccatggaggaggaccctatctgtcttcttccccctgccgcatcccagggctgtggcttgtcatgtggcacttgcttgggctggatccagccctgaccctctattctgcaccctgtgagccaccgagactgaaccaaacccaggaagcggcgccaccaaccagcctcgcagaggcagaggccctggagcagtgacagcacaggagatctgctggctcgggggaaggggaggaaagaggaaaacaaagggagtgatcgagtgagcctcgccccgccctccctgcgccggcccatgatgtgtcagtcagaggcgcggcaaggaccagagctccgcgcggcgaaatggttgcacttcccccagctggccctgaggcggaggctggggcagctgagctgcatgtccagacccgctctgaaactgcgctcctggcccttgaccgtcctctactacctcctgcccttcggcgccctcagaccgctcagccgggtgggatggaggcccgtaagcagg

SEQ ID NO: 165272 - DNA, 2264 bp, Homo sapiens
  Payload ID: 12543
  Gene Symbol: PISD
  Gene Name: phosphatidylserine decarboxylase
  ENST ID: ENST00000437808
  CDS Start-End: 14-184
aggagcagacaagatggcgacgtccgtggggcaccgatgtctgggattactgcacggggtcgcgccgtggcggagcagatgccagaaaaatccacactgcccctgcccgaaccatgttcctgctgcgtcccctgcccattctgttggtgacaggcggcgggtatgcagggtaccggcagtatgagaagtacagggagcgagagctggagaagctgggattggagattccacccaaacttgctggtcactgggaggtggctttgtacaagtcagtgccaacgcgcttgctgtcacgggcctggggtcgcctcaatcaggtggagctgccacactggctgcgcaggcccgtctacagcctgtacatctggacgtttggggtgaacatgaaagaggccgctgtggaggacctgcatcactaccgcaacctcagcgagttcttccggcgcaagctgaagccgcaggcccggcctgtctgtggcctgcacagcgtgattagcccatcggatggaaggatcctcaactttgggcaggtgaagaactgtgaggtggagcaggtaaagggggtcacctactccctggagtcgttcctgggcccgcgtatgtgcacagaggacctgcccttcccaccagccgcgtcgtgtgactccttcaagaaccagctggtcacccgggaagggaatgagctctatcactgtgtcatctacctggcccctggggactaccactgcttccactcccccaccgactggactgtgtcccaccggcgccacttcccaggctccctgatgtcagtgaaccctggcatggctcgctggatcaaagagctcttctgccataacgagcgggtggtcctgacgggggactggaaacatggcttcttctcactgacagctgtgggggccaccaacgtgggctccattcgcatctactttgaccgggacctgcacacaaacagcccaaggcacagcaagggctcctacaatgacttcagcttcgtgacgcacaccaatagagagggcgtccccatgcgtaagggcgagcacctgggcgagttcaacctgggctccaccatcgtgctcatcttcgaggcccccaaggacttcaatttccagctgaaaacaggacagaaaatccgctttggggaagccctgggctcgctctagagtctctttcctgattatggctgctaagggatcttttccaaacagagtgagggtcttttcaagagggaggcccatgaggccatccaggtaagggcctgcctcagcgtggttgggagtctgaccaggtaggacttgaatgattcggctaccacctgttccagaggtgcagacaagaggtggcgagagcccccatcatgcccctcaacctatcccgttccttctgcctacaaataaaaagtgcaggctggaatgatctcagtcacatttggatctttttaaacactgtatagacggaagagcctgcattcctgaccgaaccttcagttggtctcggttgtcgttttttcttgctgctcctccccccatcacctgagctgttttctgttggccccttttgttttttggccttaacgctcctgctgcacagggtgaggtgcctccttggcacagactgtggatgcctctcccccagcagagccacacagccttcgtgacaactgctttccgttcccacattcacctcatcctgctctttagaaaaagcagtctttgtgcttgtggctgaacgcatcaccctggactctgctagtgtcttctgaggacactgatgacactgattaatgatacagacctttgcaggacctgatgagtgacccttctggagctggccaggtcctctgcagcaggcaagaccaatcaatcactgaacctgcctcatggcaccagagtgaacagggcaggcaggtagtaggcccagctggggaaatgggagagttcctgtccccctccacatatccctacatgaaatatgggaaagttgctgctattgattcagggtctgtcttggaggcagaggacccttggtggatagttggtcagtgcctggaaaacctgtcccagtttatcaggaacgcaggcctggggagcccccagtggcggggacagggccagatttcatgttgaccctggggatgctgtgaatttctcctgcaggagagacatcattgaattttttcaactgtatcagtagcacagtatttttgtatgaaaagtgggagacttctgaacagtaattcatttaattgcaaagcattttgaaat

SEQ ID NO: 165273 - DNA, 722 bp, Homo sapiens
  Payload ID: 12543
  Gene Symbol: PISD
  Gene Name: phosphatidylserine decarboxylase
  ENST ID: ENST00000442379
  CDS Start-End: 480-722
aagtggggcctgaaagccctggcagcagtggctggtcccctccctgtcatggcttactggaccgggcagccctagggccttgccccctactgcctccccaggccagctgaggaagaggatgagcagtgcaggctggctcagccctgggtagcagggacagagcaggtggccaggactggggacagtgggctttagtgcaggggcttttgcactggactgcaagccctgagcaggtgacctgagcaggtgtgtgaccagtgcctgtctgtctgcaatagccctgaccctctattctgcaccctgtgagccaccgagactgaaccaaacccaggaagcggcgccaccaaccagcctcgcagaggcagaggccctggagcagtgacagcacaggagatctgctggctcgggggaaggggaggaaagaggaaaacaaagggagtgatcgagtgagcctcgccccgccctccctgcgccggcccatgatgtgtcagtcagaggcgcggcaaggaccagagctccgcgcggcgaaatggttgcacttcccccagctggccctgaggcggaggctggggcagctgagctgcatgtccagacccgctctgaaactgcgctcctggcccttgaccgtcctctactacctcctgcccttcggcgccctcagaccgctcagccgggtgggatggaggcccgtaagcagggtggctttgtacaagtcagtgcca

SEQ ID NO: 165274 - DNA, 460 bp, Homo sapiens
  Payload ID: 12543
  Gene Symbol: PISD
  Gene Name: phosphatidylserine decarboxylase
  ENST ID: ENST00000431201
  CDS Start-End: 242-460
atttggtggacacttttgcttgcagttaggtcaagtggagccctgaccctctattctgcaccctgtgagccaccgagactgaaccaaacccaggaagcggcgccaccaaccagcctcgcagaggcagaggccctggagcagtgacagcacaggagatctgctggctcgggggaaggggaggaaagaggaaaacaaagggagtgatcgagtgagcctcgccccgccctccctgcgccggcccatgatgtgtcagtcagaggcgcggcaaggaccagagctccgcgcggcgaaatggttgcacttcccccagctggccctgaggcggaggctggggcagctgagctgcatgtccagacccgctctgaaactgcgctcctggcccttgaccgtcctctactacctcctgcccttcggcgccctcagaccgctcagccgggtgggatggaggcccgtaagcagg

SEQ ID NO: 165275 - DNA, 1015 bp, Homo sapiens
  Payload ID: 12543
  Gene Symbol: PISD
  Gene Name: phosphatidylserine decarboxylase
  ENST ID: ENST00000422020
  CDS Start-End: 332-1015
gggccggtcactccgcgcaagtttgggttcctgttttagaactgccacctaagcccctcttatttcatctttcctgtggtggaaacccctgcccccaccggagtgtgaggttgactttttggaaagagagccctgaccctctattctgcaccctgtgagccaccgagactgaaccaaacccaggaagcggcgccaccaaccagcctcgcagaggcagaggccctggagcagtgacagcacaggagatctgctggctcgggggaaggggaggaaagaggaaaacaaagggagtgatcgagtgagcctcgccccgccctccctgcgccggcccatgatgtgtcagtcagaggcgcggcaaggaccagagctccgcgcggcgaaatggttgcacttcccccagctggccctgaggcggaggctggggcagctgagctgcatgtccagacccgctctgaaactgcgctcctggcccttgaccgtcctctactacctcctgcccttcggcgccctcagaccgctcagccgggtgggatggaggcccgtaagcagggtggctttgtacaagtcagtgccaacgcgcttgctgtcacgggcctggggtcgcctcaatcaggtggagctgccacactggctgcgcaggcccgtctacagcctgtacatctggacgtttggggtgaacatgaaagaggccgctgtggaggacctgcatcactaccgcaacctcagcgagttcttccggcgcaagctgaagccgcaggcccggcctgtctgtggcctgcacagcgtgattagcccatcggatggaaggatcctcaactttgggcaggtgaagaactgtgaggtggagcaggtaaagggggtcacctactccctggagtcgttcctgggcccgcgtatgtgcacagaggacctgcccttcccaccagccgcgtcgtgtgactccttcaagaaccagctggtcacccgggaagggaatgagctctatcactgtgtcatctacctggcccctggggac

SEQ ID NO: 165276 - DNA, 1723 bp, Homo sapiens
  Payload ID: 12543
  Gene Symbol: PISD
  Gene Name: phosphatidylserine decarboxylase
  ENST ID: ENST00000435900
  CDS Start-End: 1-1088
tgggattactgcacggggtcgcgccgtggcggagcagcctccatccctgtgagatcactgccctgagccaatccctacagcccttacggaagctgccttttagagcctttcgcacagatgccagaaaaatccacactgcccctgcccgaaccatgttcctgctgcgtcccctgcccattctgttggtgacaggcggcgggtatgcagggtaccggcagtatgagaagtacagggagcgagagctggagaagctgggattggagattccacccaaacttgctggtcactgggaggtggctttgtacaagtcagtgccaacgcgcttgctgtcacgggcctggggtcgcctcaatcaggtggagctgccacactggctgcgcaggcccgtctacagcctgtacatctggacgtttggggtgaacatgaaagaggccgctgtggaggacctgcatcactaccgcaacctcagcgagttcttccggcgcaagctgaagccgcaggcccggcctgtctgtggcctgcacagcgtgattagcccatcggatggaaggatcctcaactttgggcaggtgaagaactgtgaggtggagcaggtaaagggggtcacctactccctggagtcgttcctgggcccgcgtatgtgcacagaggacctgcccttcccaccagccgcgtcgtgtgactccttcaagaaccagctggtcacccgggaagggaatgagctctatcactgtgtcatctacctggcccctggggactaccactgcttccactcccccaccgactggactgtgtcccaccggcgccacttcccagctgtgggggccaccaacgtgggctccattcgcatctactttgaccgggacctgcacacaaacagcccaaggcacagcaagggctcctacaatgacttcagcttcgtgacgcacaccaatagagagggcgtccccatgcgtaagggcgagcacctgggcgagttcaacctgggctccaccatcgtgctcatcttcgaggcccccaaggacttcaatttccagctgaaaacaggacagaaaatccgctttggggaagccctgggctcgctctagagtctctttcctgattatggctgctaagggatcttttccaaacagagtgagggtcttttcaagagggaggcccatgaggccatccaggtaagggcctgcctcagcgtggttgggagtctgaccaggtaggacttgaatgattcggctaccacctgttccagaggtgcagacaagaggtggcgagagcccccatcatgcccctcaacctatcccgttccttctgcctacaaataaaaagtgcaggctggaatgatctcagtcacatttggatctttttaaacactgtatagacggaagagcctgcattcctgaccgaaccttcagttggtctcggttgtcgttttttcttgctgctcctccccccatcacctgagctgttttctgttggccccttttgttttttggccttaacgctcctgctgcacagggtgaggtgcctccttggcacagactgtggatgcctctcccccagcagagccacacagccttcgtgacaactgctttccgttcccacattcacctcatcctgctctttagaaaaagcagtctttgtgcttgtggctgaacgcatcaccctggactctgctagtgtcttctgaggacactgatgacactgattaatgatacagaccttt

SEQ ID NO: 165277 - DNA, 2366 bp, Homo sapiens
  Payload ID: 12544
  Gene Symbol: PTDSS1
  Gene Name: phosphatidylserine synthase 1
  ENST ID: ENST00000337004
  CDS Start-End: 129-455
cagcctttgctgggcgccagacccggctttgccgtccggctattagcctactgtggctagtcacccccggggtcccggccttctcgggctggggccgccgccaccgcggcaggacggggaggcgggccatggcgtcctgcgtggggagccggaccctaagcaaggatgatgtgaactacaaaatgcatttccggatgatcaacgagcagcaagtggaggacatcaccattgacttcttctaccggccgcataccatcaccctgctcagcttcaccatcgtcagcctcatgtacttcgcctttaccagggatgactctgttccagaagacaacatctggagaggcatcctctctgttattttcttctttcttatcatcagtgtgttagctttccccaatggagtatgctgtgaactgccatgtgatcacctgggagaggattatcagccactttgatatttttgcatttggacatttctggggctgggccatgaaggccttgctgatccgtagttacggtctctgctggacaatcagtattacctgggagctgactgagctcttcttcatgcatctcctccccaattttgccgagtgctggtgggatcaagtcattctggacatcctgttgtgcaatggcggtggcatttggctgggcatggtcgtttgccggtttttagagatgaggacttaccactgggcaagcttcaaggacattcataccaccaccgggaagatcaagagagctgttctgcagttcactcctgctagctggacctatgttcgatggtttgaccccaaatcttcttttcagagagtagctggagtgtaccttttcatgatcatctggcagctgactgagttgaataccttcttcttgaagcatatctttgtgttccaagccagtcatccattaagttggggtagaattctctttattggtggcatcacagctcccacagtgagacagtactacgcttacctcaccgacacacagtgcaagcgcgtaggaacacaatgctgggtgtttggggtcattggtttcctggaggccattgtttgcataaaatttggacaagatctcttctctaagacccaaatactctatgttgtgctttggcttctttgcgtggctttcaccactttcctctgtctgtacggcatgatttggtatgcagaacactatggtcaccgagaaaagacctactcggagtgtgaagatggcacctacagtccagagatctcctggcatcacaggaaagggacaaaaggttctgaagacagcccacccaagcatgcaggcaacaacgaaagccattcttccaggagaaggaatcggcattccaagtcaaaagtcaccaatggcgttggaaagaaatgaaaaaccctggttaatcaaagatgttccagagtgcctagaactgagagggaaatggaactcatttggaactccccgtgaggaggtcgaggcgcacagggcaagcaggaagaggcgagggcacttgggggtcattatttgagatcgtaagtcttgtttcccacagacctggccgcgtcaggcagatcatcgcctggggggcctttgccaacgtggggtctcttctaacttcagcacttgacatgcggtcaccggtggcagcgcggtgtgttgaagggaaacggtagctattcattcacagttgccaagagcagctccgcgcctgctggatcgtggatgcagcgtaaacatcttccttcagacgaggcattaaccccatggttaatggactggtcaccagtttttattttatttttatgaatctacctttccattgattgatttaagttcaggccacttttctgtcttttatttggttactgttgttatttgtttttaagttaggatgctttttaacagcctttagaagccgctgctgaaattgatactgggggaagggttccccttccttctagagcagaaaagggagagaggtgttgtattcctgtttggtaacctcagtctcctgtaagacctcctaccacatggcgagtatacaccaatcaggagagggtagctgcctgcataggagcctcgcttccgattattcccttcccaatattattcatccagacttagccacagtgcacaaaagcaaacctgctagagaggcagtgaacaccacagcttctccccagctaggtgccttttacatcgggtttgttctccttccatggtgtgttgctgacattgtcactgagtcccatgtgaggtgctggtgagtattacctttcatctgtgccatgctctagaaccttgaccttgatagttcaccacctctgatggatccctgttttaaataaaaacgattcactttaaagcctatcaaa

SEQ ID NO: 165278 - DNA, 5177 bp, Homo sapiens
  Payload ID: 12544
  Gene Symbol: PTDSS1
  Gene Name: phosphatidylserine synthase 1
  Uniprot ID: P48651
  ENST ID: ENST00000517309
  CDS Start-End: 327-1748
agccaggggccccggctacccttctccggctcgctattcctctgaagtcctgtggacttggagtctgaaaattcctcgagtggtagagatgcctcagctaggatgacagcgtggggacggccggcggcgtcccctgccccaggccgcggtggcggcgccgcgaccccgccctctcgcgcctgtccttccctctgctcccagcctttgctgggcgccagacccggctttgccgtccggctattagcctactgtggctagtcacccccggggtcccggccttctcgggctggggccgccgccaccgcggcaggacggggaggcgggccatggcgtcctgcgtggggagccggaccctaagcaaggatgatgtgaactacaaaatgcatttccggatgatcaacgagcagcaagtggaggacatcaccattgacttcttctaccggccgcataccatcaccctgctcagcttcaccatcgtcagcctcatgtacttcgcctttaccagggatgactctgttccagaagacaacatctggagaggcatcctctctgttattttcttctttcttatcatcagtgtgttagctttccccaatggtccgttcactcgacctcatccagccttatggcgaatggtttttggactcagtgtgctctacttcctgttcctggtattcctactcttcctgaatttcgagcaggttaaatctctaatgtattggctagatccaaatcttcgatacgccacaagggaagcagatgtcatggagtatgctgtgaactgccatgtgatcacctgggagaggattatcagccactttgatatttttgcatttggacatttctggggctgggccatgaaggccttgctgatccgtagttacggtctctgctggacaatcagtattacctgggagctgactgagctcttcttcatgcatctcctccccaattttgccgagtgctggtgggatcaagtcattctggacatcctgttgtgcaatggcggtggcatttggctgggcatggtcgtttgccggtttttagagatgaggacttaccactgggcaagcttcaaggacattcataccaccaccgggaagatcaagagagctgttctgcagttcactcctgctagctggacctatgttcgatggtttgaccccaaatcttcttttcagagagtagctggagtgtaccttttcatgatcatctggcagctgactgagttgaataccttcttcttgaagcatatctttgtgttccaagccagtcatccattaagttggggtagaattctctttattggtggcatcacagctcccacagtgagacagtactacgcttacctcaccgacacacagtgcaagcgcgtaggaacacaatgctgggtgtttggggtcattggtttcctggaggccattgtttgcataaaatttggacaagatctcttctctaagacccaaatactctatgttgtgctttggcttctttgcgtggctttcaccactttcctctgtctgtacggcatgatttggtatgcagaacactatggtcaccgagaaaagacctactcggagtgtgaagatggcacctacagtccagagatctcctggcatcacaggaaagggacaaaaggttctgaagacagcccacccaagcatgcaggcaacaacgaaagccattcttccaggagaaggaatcggcattccaagtcaaaagtcaccaatggcgttggaaagaaatgaaaaaccctggttaatcaaagatgttccagagtgcctagaactgagagggaaatggaactcatttggaactccccgtgaggaggtcgaggcgcacagggcaagcaggaagaggcgagggcacttgggggtcattatttgagatcgtaagtcttgtttcccacagacctggccgcgtcaggcagatcatcgcctggggggcctttgccaacgtggggtctcttctaacttcagcacttgacatgcggtcaccggtggcagcgcggtgtgttgaagggaaacggtagctattcattcacagttgccaagagcagctccgcgcctgctggatcgtggatgcagcgtaaacatcttccttcagacgaggcattaaccccatggttaatggactggtcaccagtttttattttatttttatgaatctacctttccattgattgatttaagttcaggccacttttctgtcttttatttggttactgttgttatttgtttttaagttaggatgctttttaacagcctttagaagccgctgctgaaattgatactgggggaagggttccccttccttctagagcagaaaagggagagaggtgttgtattcctgtttggtaacctcagtctcctgtaagacctcctaccacatggcgagtatacaccaatcaggagagggtagctgcctgcataggagcctcgcttccgattattcccttcccaatattattcatccagacttagccacagtgcacaaaagcaaacctgctagagaggcagtgaacaccacagcttctccccagctaggtgccttttacatcgggtttgttctccttccatggtgtgttgctgacattgtcactgagtcccatgtgaggtgctggtgagtattacctttcatctgtgccatgctctagaaccttgaccttgatagttcaccacctctgatggatccctgttttaaataaaaacgattcactttaaagcctatcaaaggtctgtctgtaaaatgctcattttcttgcatcttactggtatcttctattgattgtaagcagtctgtgtttttcaagtgactttaggataatatatatgtgttttacatagtgagaagaaaaaagaaaagatgtgtattttaaagggcttacagacatatatgtcctacttcttagactacccaagtgaccaacaggaatgaacaacatagtcattgttttttcctgtggtaatggtttccaagttggacttttttttcctctaacaagaggccagtacccagttgattagcttacagatatcaactcactgaaagtaatcttttgttccctcatttcacacagcacaaaggttcgttctgatgtttcttcttctttaaggaaatctttagccatagaagtgtcactttttttttttctgcaaaagaattccaagatgaacgggttgaatgaatcatgccagccagggtcacatcctgtcctcagggggcccagtgctcaatagtagattctgcgggagtggagaagcgtcagtggcagctccgctcacttggtgagtgagggatttggctgtgatgagcctcagctccgagctctcaaatgtcctccagccagcatctgcctgcttcccacaaaaggatagaagagaggcaaagtgcgtgtttcataaaacctgcctgcacttttataacccatcaaagaggccatttttaaacacaggtacaatttaaacatgatctttctttgcaaataaatatgttttgtttcatcctgtgttctgcttttctaagcatgacatacttgtgcccattggagaagacacctgtctcttctttctcacaccggtggtgcctcactgagtgtttccgggttcattttccgggagcactgggcctgacactttcacactcttctgactttcgccttgttgcaactgatggagcatgtgtgcttcctctgaggccagcctacaggaggcagctgtttcgcaggtggtgaattcgactttactgtggcattgtgaagagcagggtgcacaggagatgattttttctccatggctttgtaagaaacagccaggaaagttctcagatactttccatgccctttctttgagttgaaactttctatttcccttcagtcagagctctttactatagtagttacaaaaccagtgctttccatggctggccagaaccacagctgctattccttttagaagccatactgctgggtttggcctacttttttcaccgtttctatggaaataaacctcacattgatggaaatagaatgcgtgtttcagaatcatcattcaatatctgaaatgatttgattgtaaattatctcatggtccctgtttgcaaaccaccctcttaagagagaacattgttttggacctaaagcttgaagaacggtttatgtatttttctccttaagtagcattgcattgagtgttaggttcttttccctttttttcattcttggtcttcccaaagcttcttcccacatttcgtttgtgtctgtttccaccattcatagaaaccttggaaccactctcacagcaatgctaggatgtttcatggacctgttaagcattttgatgatacaagacatcctatcaatgccagtcttattttcgctaggactctgcttccacagtaagctcctaaggtgctcacccaacccaggagaaaacaaaattcattaccaaatacaacaggttcagccttcttggtcttccctcagaagccaccgtgtagcaccctggaatgatgcctctttatgccaaggcccaccctttggaattgggagggttttgggtagaatcctgcacttacagaggcccttggggtcattgagaagtggaggaggttggacacagaaggggaggctaaacacaaggtggggaagaaaaaatgtaaccattggcagccagactgaagctagccctttaaaatacggggttggggggttaacatccgctctttggaatgtgctcagtgactgctgcagagttcctgggccaccctaatgtttaccaggtgggcgttgtttatatggttcttattgttatgacaactagaaatcccacagtagactagacagtgctccctaccatttcccatttataggattgaaatcaagatgtaaggagagctggccgggcgcagggctcacgcctgtaatcccagcactttgggaggctgaggtgggtggatcgcctgaggtcaggagtttgagaccagcctgaccaatatggtgaaaccctgtctctgctgaaaatacttaaattagccgggcatggtggcaggcacctgtagtcccagctactcgggagacagagacagaagaaatgcttgaacccaggaggtggaggttccagtgagccgagatcacgccaccgcactctctaacctgggcgacagagcgagactatctc

SEQ ID NO: 165279 - DNA, 1112 bp, Homo sapiens
  Payload ID: 12544
  Gene Symbol: PTDSS1
  Gene Name: phosphatidylserine synthase 1
  Uniprot ID: P48651
  ENST ID: ENST00000522072
  CDS Start-End: 75-980
aggccttgctgatccgtagttacggtctctgctggacaatcagtattacctgggagctgactgagctcttcttcatgcatctcctccccaattttgccgagtgctggtgggatcaagtcattctggacatcctgttgtgcaatggcggtggcatttggctgggcatggtcgtttgccggtttttagagatgaggacttaccactgggcaagcttcaaggacattcataccaccaccgggaagatcaagagagctgttctgcagttcactcctgctagctggacctatgttcgatggtttgaccccaaatcttcttttcagagagtagctggagtgtaccttttcatgatcatctggcagctgactgagttgaataccttcttcttgaagcatatctttgtgttccaagccagtcatccattaagttggggtagaattctctttattggtggcatcacagctcccacagtgagacagtactacgcttacctcaccgacacacagtgcaagcgcgtaggaacacaatgctgggtgtttggggtcattggtttcctggaggccattgtttgcataaaatttggacaagatctcttctctaagacccaaatactctatgttgtgctttggcttctttgcgtggctttcaccactttcctctgtctgtacggcatgatttggtatgcagaacactatggtcaccgagaaaagacctactcggagtgtgaagatggcacctacagtccagagatctcctggcatcacaggaaagggacaaaaggttctgaagacagcccacccaagcatgcaggcgagggcacttgggggtcattatttgagatcgtaagtcttgtttcccacagacctggccgcgtcaggcagatcatcgcctggggggcctttgccaacgtggggtctcttctaacttcagcacttgacatgcggtcaccggtggcagcgcggtgtgttgaagggaaacggtagctattcattcacagttgccaagagcagctccgcgcctgctggatcgtggatgcagcgtaaacatcttccttcagacgaggcattaaccccatggttaatggactggtcaccagtttttattttatttttatg

SEQ ID NO: 165280 - DNA, 2445 bp, Homo sapiens
  Payload ID: 12545
  Gene Symbol: PTDSS2
  Gene Name: phosphatidylserine synthase 2
  Uniprot ID: Q9BVG9
  ENST ID: ENST00000308020
  CDS Start-End: 177-1640
caatgcaccgcacaccctttactggccggccccgcgctgctctcctaagaccccgcgggccagcgccgcgaccccttcccagcgctcctcgcgctgtgtgcggcgcgtcctctcgccggtgacccggtgtgcgtggggtcgaggcgccgggcggagtggctccgggccgaaacgccatgcggaggggcgagcgcagggacgccggaggtccgcggcccgagtccccggtgcccgcgggcagggcctcgctggaggagccgcctgacgggccgtctgccggccaagccaccgggccgggcgagggccgccgcagcaccgagtccgaggtctacgacgacggcaccaacaccttcttctggcgagcccacaccttaaccgtgctcttcatcctcacctgtacgcttggctatgtgacgctgctggaggaaacacctcaggacacggcctacaacaccaagagaggtattgtggccagtattttggttttcttatgttttggagtcacacaagctaaagacgggccattttccagacctcatccagcttactggaggttttggctctgcgtgagtgtggtctacgagctgtttctcatctttatactcttccagactgtccaggacggccggcagtttctaaagtatgttgaccccaagctgggagtcccactgccagagagagactacgggggaaactgcctcatctacgacccagacaatgagactgacccctttcacaacatctgggacaagttggatggctttgttcccgcgcactttcttggctggtacctgaagaccctgatgatccgagactggtggatgtgcatgatcatcagcgtgatgttcgagttcctggagtacagcctggagcaccagctgcccaacttcagcgagtgctggtgggatcactggatcatggacgtgctcgtctgcaacgggctgggcatctactgcggcatgaagacccttgagtggctgtccctgaagacgtacaagtggcagggcctctggaacattccgacctacaagggcaagatgaagaggatcgccttccagttcacgccgtacagctgggttcgcttcgagtggaagccggcctccagcctgcgtcgctggctggccgtgtgcggcatcatcctggtgttcctgttggcagaactgaacacgttctacctgaagtttgtgctgtggatgcccccggagcactacctggtcctcctgcggctcgtcttcttcgtgaacgtgggtggcgtggccatgcgtgagatctacgacttcatggatgacccgaagccccacaagaagctgggcccgcaggcctggctggtggcggccatcacggccacggagctgctcatcgtggtgaagtacgacccccacacgctcaccctgtccctgcccttctacatctcccagtgctggaccctcggctccgtcctggcgctcacctggaccgtctggcgcttcttcctgcgggacatcacattgaggtacaaggagacccggtggcagaagtggcagaacaaggatgaccagggcagcaccgtcggcaacggggaccagcacccactggggctggacgaagacctgctggggcctggggtggccgagggcgagggagcaccaactccaaactgacctgggccgtggctgcctcgtgagcctcccagagcccaggcctccgtggcctcctcctgtgtgagtcccaccaggagccacgtgcccggccttgccctcaaggttttttgcttttctcctgtgcacctggcgaggctgaaggcgaggggtggaggaggccccagcacagcctcatctccatgtgtacacgtgtgtacgtgtgtatgcgtgtgtgtacgcgtgtgtacgcgcgtgtgtacacatgcgtggccgcctgtggtgtgcacgtgtgctctgggctccgaggcttctccagagctgggagctggctggcgtggcaagggcatgctctggggcagtgtgtccctcaggaaccagggtcctccctcccctttctgcctggtcagccccgtggcctctggcccaccaagctccctgtcacccagccatggtgtggtccaggcagggacatctcggtaccctttctgcactccgtgggccctgggtgcgctgaggcctggaggcgtctacactggctccacatccacttcccccgcagctcgtgtgggcgctcgtccacaaacactccgtggctgagaggcagcggatccaggcagcgatgctgagccacctcctccgagccttcctttcacacagaccaccccggaggacacgtggatgatggggtcagagatcactgagctgcccctcaagggggcctggaacccgggtgctggggtcatgctgcctccgtggctccaaggtgagggtcatcttcacgagcaaagagaaccaataaagtgacaacgaacgtctgaggcttcca

SEQ ID NO: 165281 - DNA, 520 bp, Homo sapiens
  Payload ID: 12545
  Gene Symbol: PTDSS2
  Gene Name: phosphatidylserine synthase 2
  ENST ID: ENST00000527479
  CDS Start-End: 6-188
acgccatgcggaggggcgagcgcagggacgccggaggtccgcggcccgagtccccggtgcccgcgggcagggcctcgctggaggagccgcctgacgggccgtctgccggccaagccaccgggccgggcgagggccgccgcagcaccgagtccgaggtctacgacgacggcaccaacaccttcttctgacaggctccaggtgccgctcctactcccgacagctgcgaccctgggctggccctttgccgatgctcctctgtgagaaggatcaagccgtcgacctgaaagcaggcttcgtgagaggagggtttggctcttcttgactgcaaggcgagcccacaccttaaccgtgctcttcatcctcacctgtacgcttggctatgtgacgctgctggaggaaacacctcaggacacggcctacaacaccaagagaggtattgtggccagtattttggttttcttatgttttggagtcacacaagctaaagacgggccattttccagacctcatccagcttact

SEQ ID NO: 165282 - DNA, 890 bp, Homo sapiens
  Payload ID: 12545
  Gene Symbol: PTDSS2
  Gene Name: phosphatidylserine synthase 2
  ENST ID: ENST00000531520
  CDS Start-End: 161-406
ctttactggccggccccgcgctgctctcctaagaccccgcgggccagcgccgcgaccccttcccagcgctcctcgcgctgtgtgcggcgcgtcctctcgccggtgacccggtgtgcgtggggtcgaggcgccgggcggagtggctccgggccgaaacgccatgcggaggggcgagcgcagggacgccggaggtccgcggcccgagtccccggtgcccgcgggcagggcctcgctggaggagccgcctgacgggccgtctgccggccaagccaccgggccgggcgagggccgccgcagcaccgagtccgaggtctacgacgacggcaccaacaccttcttctgctgcgaccctgggctggccctttgccgatgctcctctgtgagaaggatcaagccgtcgacctgaaagcaggcttcgtgagaggagggtttggctcttcttgactgcaaggcgagcccacaccttaaccgtgctcttcatcctcacctgtacgcttggctatgtgacgctgctggaggaaacacctcaggacacggcctacaacaccaagagaggtattgtggccagtattttggttttcttatgttttggagtcacacaagctaaagacgggccattttccagacctcatccagcttactggaggttttggctctgcgtgagtgtggtctacgagctgtttctcatctttatactcttccagactgtccaggacggccggcagtttctaaagtatgttgaccccaagctgggagtcccactgccagagagagactacgggggaaactgcctcatctacgacccagacaatgagactgacccctttcacaacatctgggacaagttggatggctttgttcccgcgcactttcttggctggtacctgaag

SEQ ID NO: 165283 - DNA, 1985 bp, Homo sapiens
  Payload ID: 12545
  Gene Symbol: PTDSS2
  Gene Name: phosphatidylserine synthase 2
  ENST ID: ENST00000633628
  CDS Start-End: 1-1180
aggtattgtggccagtattttggttttcttatgttttggagtcacacaagctaaagacgggccattttccagacctcatccagcttactggaggttttggctctgcgtgagtgtggtctacgagctgtttctcatctttatactcttccagactgtccaggacggccggcagtttctaaagtatgttgaccccaagctgggagtcccactgccagagagagactacgggggaaactgcctcatctacgacccagacaatgagactgacccctttcacaacatctgggacaagttggatggctttgttcccgcgcactttcttggctggtacctgaagaccctgatgatccgagactggtggatgtgcatgatcatcagcgtgatgttcgagttcctggagtacagcctggagcaccagctgcccaacttcagcgagtgctggtgggatcactggatcatggacgtgctcgtctgcaacgggctgggcatctactgcggcatgaagacccttgagtggctgtccctgaagacgtacaagtggcagggcctctggaacattccgacctacaagggcaagatgaagaggatcgccttccagttcacgccgtacagctgggttcgcttcgagtggaagccggcctccagcctgcgtcgctggctggccgtgtgcggcatcatcctggtgttcctgttggcagaactgaacacgttctacctgaagtttgtgctgtggatgcccccggagcactacctggtcctcctgcggctcgtcttcttcgtgaacgtgggtggcgtggccatgcgtgagatctacgacttcatggatgacccgaagccccacaagaagctgggcccgcaggcctggctggtggcggccatcacggccacggagctgctcatcgtggtgaagtacgacccccacacgctcaccctgtccctgcccttctacatctcccagtgctggaccctcggctccgtcctggcgctcacctggaccgtctggcgcttcttcctgcgggacatcacattgaggtacaaggagacccggtggcagaagtggcagaacaaggatgaccagggcagcaccgtcggcaacggggaccagcacccactggggctggacgaagacctgctggggcctggggtggccgagggcgagggagcaccaactccaaactgacctgggccgtggctgcctcgtgagcctcccagagcccaggcctccgtggcctcctcctgtgtgagtcccaccaggagccacgtgcccggccttgccctcaaggttttttgcttttctcctgtgcacctggcgaggctgaaggcgaggggtggaggaggccccagcacagcctcatctccatgtgtacacgtgtgtacgtgtgtatgcgtgtgtgtacgcgtgtgtacgcgcgtgtgtacacatgcgtggccgcctgtggtgtgcacgtgtgctctgggctccgaggcttctccagagctgggagctggctggcgtggcaagggcatgctctggggcagtgtgtccctcaggaaccagggtcctccctcccctttctgcctggtcagccccgtggcctctggcccaccaagctccctgtcacccagccatggtgtggtccaggcagggacatctcggtaccctttctgcactccgtgggccctgggtgcgctgaggcctggaggcgtctacactggctccacatccacttcccccgcagctcgtgtgggcgctcgtccacaaacactccgtggctgagaggcagcggatccaggcagcgatgctgagccacctcctccgagccttcctttcacacagaccaccccggaggacacgtggatgatggggtcagagatcactgagctgcccctcaagggggcctggaacccgggtgctggggtcatgctgcctccgtggctccaaggtgagggtcatcttcacgagcaaagagaaccaataaagtgacaacgaacgtctgaggcttcca

SEQ ID NO: 165284 - DNA, 8233 bp, Homo sapiens
  Payload ID: 12546
  Gene Symbol: PDE10A
  Gene Name: phosphodiesterase 10A
  Uniprot ID: Q9Y233
  ENST ID: ENST00000366882
  CDS Start-End: 156-2495
ccaggcggcggcggccaaactccgcggcgtccccagggcgccagcttcgccctcgccgccgcggccgcgctgctcttcggctccgacatggaagatggaccttctaataatgcgagctgcttccgaaggctgaccgagtgcttcctgagccccaaatgaggatagaagagaggaaatcccaacatttaacaggtttgacagatgaaaaagtgaaggcatatctttctcttcacccccaggtattagatgaatttgtatctgaaagtgttagtgcagagacagtagagaaatggctgaagaggaagaacaacaaatcagaagatgaatcagctcctaaggaagtcagcaggtaccaagatacgaatatgcagggagttgtatatgaactaaacagctatatagaacaacggttggacacaggaggagacaaccagctactcctctatgaactgagcagcatcattaaaatagccacaaaagccgatggatttgcactgtatttccttggagagtgcaataatagcctgtgtatattcacgccacctgggataaaggaaggaaaaccccgcctcatccctgctgggcccatcactcagggcaccaccgtctctgcttatgtggccaagtccaggaaaacactgctagtagaagacatccttggagatgaacgatttccaagaggtactggactggaatcagggactcgtatccagtctgttctttgcttaccaattgtcactgcaattggtgacttgattggtattctcgagctgtatcggcactggggcaaagaagccttctgtcttagtcaccaggaggttgcaacagcaaatcttgcctgggcttcagtagcaatacatcaggtgcaggtatgcagaggccttgccaaacagacagaattgaatgacttcctactcgacgtatcaaaaacatattttgataacatagttgcaatagattctctacttgaacacataatgatatatgcaaaaaacctggtgaatgccgatcgttgtgcgcttttccaggtggaccataagaacaaggagttatattcagacctttttgatattggagaggaaaaggaaggaaaacctgtcttcaagaagaccaaagagataagattttcaattgagaaaggaattgctggccaagtagcaagaacaggggaagtcctgaacattccagatgcctatgcagacccacgctttaacagagaagtagacttgtacacaggctacaccacgcggaacatcctgtgcatgcccatcgtcagccgaggcagcgtgataggtgtggtgcagatggtcaacaaaatcagtggcagtgccttctctaaaacagatgaaaacaacttcaaaatgtttgccgtcttttgtgctttagccttacactgtgctaatatgtatcatagaattcgccactcagagtgcatttaccgggtaacgatggaaaagctgtcctaccatagcatttgtacttcagaagagtggcaaggtctcatgcaattcacccttcccgtgcgtctctgcaaagaaattgaattattccactttgacattggtccttttgaaaacatgtggcctggaatttttgtctacatggttcatcggtcctgtgggacatcctgctttgagcttgaaaagttgtgtcgttttattatgtctgtgaagaagaactatcggcgggttccttatcacaactggaagcatgcggtcactgtagcacactgcatgtatgccatacttcagaacaatcacacgcttttcacagaccttgagcgcaaaggactgctgattgcgtgtctgtgtcatgacctggaccacaggggcttcagtaacagctacctgcagaagttcgaccaccctctggccgctctctactccacttccaccatggagcagcaccacttctcccagactgtgtccatcctccagttggaagggcacaatatcttctccactctgagctccagtgaatatgagcaggtgcttgagatcatccgcaaagccatcattgccacagaccttgctttatactttggaaacaggaagcagttggaagagatgtaccagaccggatcactaaaccttaataatcaatcacatagagaccgtgtaattggtttgatgatgactgcctgtgacctttgttctgtgacaaaactgtggcccgttacaaaattgacggcaaatgatatatatgcagaattctgggctgagggtgatgaaatgaagaaattgggaatacagcctattcctatgatggacagagacaagaaggatgaagtcccccaaggccagcttgggttctacaatgccgtggccattccctgctatacaacccttacccagatcctccctcccacggagcctcttctgaaagcatgcagggataatctcagtcagtgggagaaggtgattcgaggggaggagactgcaacctggatttcatccccatccgtggctcagaaggcagctgcatctgaagattgagcactggtcaccctgacacgctgtcccacctacagatcctcatcttgcttctttgacattcttttcctttttttggggggggtggggggaacctgcacctggtaactggggtgcaaacctcttcaagaaggtaacatcaaataaataagtcaagcagaggacttcctgccaatctcttctgtgaggcatcatagacactgagcaaccaggaccacccccacgttcagaaatcagctggccaagtgactccatttgacttgcaaaccagccttttctaataggctaatattgctgaggccttaaaggaaatggacaaaaattatccagaaggggtacttttccattgtatctttctaataagggtttaaaatggtactattatggtattgtacttgggctttaacatcaatgttgctttgatgttgttggatataaataggaatttttacacattactattgtgaatggtgaatgttcatgtatgacctacttgtaattaacttgagttgtagtccacagcctcaggacaaatgtcgttgaggttacagagtaagaaatgatggcaaaacgtcaaactcttatttcagagcttcatgaatttagttagactaaacataattctttaagttcaacctaaagggctgagatcaataaatttaacactagacgaagtagacttcctgtctttttgagaagagatgaggtatatgttacaataaatctcagaacttcaagtagcagttcaaaagatgtcagtttttaaaattgtttttgttgttgtcttggcagttttactgaaccctttgcataaagaacaaaataaaagctcggcattgtaatttttttaatggacaagtcttatggatacgaagggtacatttttcataatgattcctttatattttcactttgtgtcattgcagaattttagactctcattcacaatgaaaagtttattttaaacattgtttaattaaaataccatacagttctcttttaaacatcaaaccataaaaagtgtattttgtaattttactctgacctgccgcagtcacctctcacttatctcttccacgtactgcacggtcgtatttcatgagctttctgtccatagcacagaaacagagcagaaagtagtacaatcatgttggaccttctttctgttctctttactcttctcacagatcagatcactccatagaagcctgtgggtttcgatggtttcttctatacacctttttggttgaccagtattactatacaatgtaagtgttttaaaaaatacgaaagtaatactctgcaccccttcctacaaagatgataaagcagtcacttctggcgcattttaataatttaaagatttttagtgcaatggcacggtaacctccaaacctgaattagacagagactcactcaggaagtgacaggcccatcatatcaaataacttattcacttttcatgtggcaggaaactggaatatcgcttttaataaaatggaaaaatatgcttctacatatttaccaccataggcgttttgttcatatgagcctggtttgtgcaaaattaaatcagaggcttctacaacatggtttatttatgttgtagcaaagttggctctacataaacattgttcttattttaaaattaacactatgtgttcagttttcttgtgggcttctgaaagttgccatcttccctccgtggagctccatttgctattttcattatacactatgaggtaaaatgtaataacaaaagagagagaagtaccactgtggctagatatatacacacacatatatatatggatggatgtaatatatgtagaacacacacatagatgtatataggatacacactcatgtatgtaaacgtatacatatgtgtatatatgatacatacacatacacacacacgagagacagaaggaaagagaggaagagagaagcaaacatgtaggaaaaaatataaatcagccccattctcccattctttaagaacaatgatttttcttgatggaaaatgcatatcacttgacagttgacaagaaagtgtcatttttgtgttagtgtatcatataattgaatttgaacaagatacatatttttctgcatacaaatttatgaagctggagtctaccaaacacagctttagtcacaaaagttagtttagttatctcatttcgcttggagatggaatttcaggaagggatatattatttaagattattgtttaattacaagaattttaaaagaatgtatgaattctgttttttaatatagaaaataattatggagttaggaatctcatggctacatttacatttttaggttattacagaaaattctcttaatttattatagtcaagtgtattatgtaatctctatttagaacagtttcccaaaggaatgtgattggatttactggttggttaatttcttgtgaaatattgtcataatagaagcacagcttgaacaaaagactgaattctgatataaactgtcaatattgcttttaccatgtgtaagatttacttagtaatcacagatttacctaaaataaaaggacccgggttgcagtgatatttagttaatgatttgttttggaaaacatgcagttaggagtatttttgtattttgtcagatgtttaggagacagactttcgggtcatgtttcttgtcttgttcccagatcttttcttaaaagaacagtgtgacaccagaagccaagagatggtttttactaacaacagctttgatgagttcctattaaggtcgtattgtgtattgtgccaaattttccacccagtataaatttagtaacccgctatgagcatatgtaggatattcaatttgcagatacttttgttggttatgttggtttataatagacaagttttatggtcatatgcaattattccattatctttttggacacagtgaatatgttttttagctaaaaatgtccttggaaacataaatgcctgccaataacatggaatattgaattcgggcaatgtgaattgattaattagaaaagggtcaaaagaaatacaatggatgtggaaactaattctaaaaaatagccctattaatagggcagagactctggtccatttcccagctgtacttctctctaagaggtgtatgaaaaacccatcttgcaaaagagaccaaaatattagacacaatcgttcccattcctgactcttcaatggaaaaggaaggtacagatgtttacagtggtgccccaggtgactcgttctcaccacaacaaaagcaactaattggaaactagatgtgttcaataatagatttcctcttttttggcatgctttttagattttttttcattttgtaaaatctcagttaatttttctttattggtatatttgtgtatgcgagacaaatcctgtattgtacaggatataaatagatgcataaatccttagatacctgggttttttaataggtttaggtttgggtattgtgtttctggtcttttaactcaaaattaaggtttgagctttaataggactaaattattcacctgccttggcctgtgcctttattttaaatactgcaattttacttcttcattcatgtatttattattttgcttttcttgcttaagtataattgaaaatatttgcaggaacgcacaattcattttatcaagttgaatgaataggaccattctctcctcatcagatttctgttctttatttgacttcattgacatataccctggtgactataaccagtgaactgttcagagtcagtcttttcggcaagaacttcagagaactgtgacactggttatgatgtgattttggggggtttcaggtacctaagcatgatttttaaaatcacttctctctttacatatttcgaacatatgtttgctttctacactttgcagattttatttaggatttaattctttaaagactatattcatttagtcactatagtggatctcttctactgcaagtattcatctgatttttaaattatgtaaaatgtaaatcagccaagtatgtcatccgttatagtttccccatgctttcagcgcatggccatgagatttttacatgtgcataagtatttagccaatacacattttgctgacttctttaaccatttatattgtttaaattagtaatatccaatgcagtgcacacttttttgtcttttttccaacggaatattttggttgtctgtagcgttggaagcattttatatgataaaaatagcaagaaaaaattaaaaagtgtcaacggtgtgctggttctaaattaagaagatagaacaaagagaaagacattaatgttacctaagaaacacatttaacatccgaagaagcaatgctgtcctcacttgatgtttctcttctcaacccagcaatggagagcagggcttgcaaagccgtacagagcctacgtgctctttcctgcaagtgggagaaaactaatcaatggcacacagggccaggtgtggccctgtgaggcaaaggataatgtcacctcaggaccaaggtggaaacttacagctgaatccagggcttactaagtagggaagtcagtttacatatttcagttttcctctgatgtttttgaggtactgtgtatttgcagaagtttaagcagaagggttttgtttctattgtaagttaggttctaaaagtgtataatctgatactctagcccaactgaaatattatatcttgggcgttacagcctttgtctttttctttagtcaccttaatacccagtcctatgctgtatctctgatagcctatataaatgacatataggaatattattttccatatgatctgttgtatggtgtatatgctatgtgttcatttcgtgtgcaagttcagagtgtaatagatttacccagagaaggtgtttctatacaatgcccctacctatttgaaattacatgcttgcccaacacactgtgaaatagttaccaaaatttgtacaaatgcagcatcttcattctttctgagaagacaagatggttttctttacatgaacaaatgaacaaaagagatcctagatccataacgtagctaaggcatctaagagtttgctgttgataatcttgctgaccaaaaactactggagagtaacacaggttatatgccatcacaaatacaatgctcatgaagaactgatttgtagagtcaatgaacctgtgtccagaattttaataggctctctattggaaggagaaagaatttcaagttaacagtatctaactttatcatagttgatgttagtaaattttaaaaaatgattttatatgtatgacaaaaatctttgtaaaatgcgcaagtgcaataatttaaagaggtcttaactttgcatttataaattataaatattgtacatgtgtgtaattttttcatgtattcatttgcagtctttgtatttaaaaaacatttactgttatgtttgtataatagaacagtaatcatttattataatctaggcaagttgtaaataaattcataattcaaacagccagtatatatgcatatatgagtgttatattgcaaaatctttgttttacttacatggttaaagcagcaagaattcttttgttgatatgtaattatacacataaaatatatatatgtatgatacatgaaatatatttagaaatgttcataattttaatggatatcctttggtgtgaataattgaatacagagtttttaaaatatc

SEQ ID NO: 165285 - DNA, 4401 bp, Homo sapiens
  Payload ID: 12546
  Gene Symbol: PDE10A
  Gene Name: phosphodiesterase 10A
  Uniprot ID: Q9Y233
  ENST ID: ENST00000539869
  CDS Start-End: 57-2426
cccagggcgccagcttcgccctcgccgccgcggccgcgctgctcttcggctccgacatggaagatggaccttctaataatgcgagctgcttccgaaggctgaccgagtgcttcctgagccccagtttgacagatgaaaaagtgaaggcatatctttctcttcacccccaggtattagatgaatttgtatctgaaagtgttagtgcagagacagtagagaaatggctgaagaggaagaacaacaaatcagaagatgaatcagctcctaaggaagtcagcaggtaccaagatacgaatatgcagggagttgtatatgaactaaacagctatatagaacaacggttggacacaggaggagacaaccagctactcctctatgaactgagcagcatcattaaaatagccacaaaagccgatggatttgcactgtatttccttggagagtgcaataatagcctgtgtatattcacgccacctgggataaaggaaggaaaaccccgcctcatccctgctgggcccatcactcagggcaccaccgtctctgcttatgtggccaagtccaggaaaacactgctagtagaagacatccttggagatgaacgatttccaagaggtactggactggaatcagggactcgtatccagtctgttctttgcttaccaattgtcactgcaattggtgacttgattggtattctcgagctgtatcggcactggggcaaagaagccttctgtcttagtcaccaggaggttgcaacagcaaatcttgcctgggcttcagtagcaatacatcaggtgcaggtatgcagaggccttgccaaacagacagaattgaatgacttcctactcgacgtatcaaaaacatattttgataacatagttgcaatagattctctacttgaacacataatgatatatgcaaaaaacctggtgaatgccgatcgttgtgcgcttttccaggtggaccataagaacaaggagttatattcagacctttttgatattggagaggaaaaggaaggaaaacctgtcttcaagaagaccaaagagataagattttcaattgagaaaggaattgctggccaagtagcaagaacaggggaagtcctgaacattccagatgcctatgcagacccacgctttaacagagaagtagacttgtacacaggctacaccacgcggaacatcctgtgcatgcccatcgtcagccgaggcagcgtgataggtgtggtgcagatggtcaacaaaatcagtggcagtgccttctctaaaacagatgaaaacaacttcaaaatgtttgccgtcttttgtgctttagccttacactgtgctaatatgtatcatagaattcgccactcagagtgcatttaccgggtaacgatggaaaagctgtcctaccatagcatttgtacttcagaagagtggcaaggtctcatgcaattcacccttcccgtgcgtctctgcaaagaaattgaattattccactttgacattggtccttttgaaaacatgtggcctggaatttttgtctacatggttcatcggtcctgtgggacatcctgctttgagcttgaaaagttgtgtcgttttattatgtctgtgaagaagaactatcggcgggttccttatcacaactggaagcatgcggtcactgtagcacactgcatgtatgccatacttcagaacaatcacacgcttttcacagaccttgagcgcaaaggactgctgattgcgtgtctgtgtcatgacctggaccacaggggcttcagtaacagctacctgcagaagttcgaccaccctctggccgctctctactccacttccaccatggagcagcaccacttctcccagactgtgtccatcctccagttggaagggcacaatatcttctccactctgagctccagtgaatatgagcaggtgcttgagatcatccgcaaagccatcattgccacagaccttgctttatactttggaaacaggaagcagttggaagagatgtaccagaccggatcactaaaccttaataatcaatcacatagagaccgtgtaattggtttgatgatgactgcctgtgacctttgttctgtgacaaaactgtggcccgttacaaaattgacggcaaatgatatatatgcagaattctgggctgagggtgatgaaatgaagaaattgggaatacagcctattcctatgatggacagagacaagaaggatgaagtcccccaaggccagcttgggttctacaatgccgtggccattccctgctatacaacccttacccagatcctccctcccacggagcctcttctgaaagcatgcagggataatctcagtcagtgggagaaggtgattcgaggggaggagactgcaacctggatttcatccccatccgtggctcagaaggcagctgcatctgaagattgagcactggtcaccctgacacgctgtcccacctacagatcctcatcttgcttctttgacattcttttcctttttttggggggggtggggggaacctgcacctggtaactggggtgcaaacctcttcaagaaggtaacatcaaataaataagtcaagcagaggacttcctgccaatctcttctgtgaggcatcatagacactgagcaaccaggaccacccccacgttcagaaatcagctggccaagtgactccatttgacttgcaaaccagccttttctaataggctaatattgctgaggccttaaaggaaatggacaaaaattatccagaaggggtacttttccattgtatctttctaataagggtttaaaatggtactattatggtattgtacttgggctttaacatcaatgttgctttgatgttgttggatataaataggaatttttacacattactattgtgaatggtgaatgttcatgtatgacctacttgtaattaacttgagttgtagtccacagcctcaggacaaatgtcgttgaggttacagagtaagaaatgatggcaaaacgtcaaactcttatttcagagcttcatgaatttagttagactaaacataattctttaagttcaacctaaagggctgagatcaataaatttaacactagacgaagtagacttcctgtctttttgagaagagatgaggtatatgttacaataaatctcagaacttcaagtagcagttcaaaagatgtcagtttttaaaattgtttttgttgttgtcttggcagttttactgaaccctttgcataaagaacaaaataaaagctcggcattgtaatttttttaatggacaagtcttatggatacgaagggtacatttttcataatgattcctttatattttcactttgtgtcattgcagaattttagactctcattcacaatgaaaagtttattttaaacattgtttaattaaaataccatacagttctcttttaaacatcaaaccataaaaagtgtattttgtaattttactctgacctgccgcagtcacctctcacttatctcttccacgtactgcacggtcgtatttcatgagctttctgtccatagcacagaaacagagcagaaagtagtacaatcatgttggaccttctttctgttctctttactcttctcacagatcagatcactccatagaagcctgtgggtttcgatggtttcttctatacacctttttggttgaccagtattactatacaatgtaagtgttttaaaaaatacgaaagtaatactctgcaccccttcctacaaagatgataaagcagtcacttctggcgcattttaataatttaaagatttttagtgcaatggcacggtaacctccaaacctgaattagacagagactcactcaggaagtgacaggcccatcatatcaaataacttattcacttttcatgtggcaggaaactggaatatcgcttttaataaaatggaaaaatatgcttctacatatttaccaccataggcgttttgttcatatgagcctggtttgtgcaaaattaaatcagaggcttctacaacatggtttatttatgttgtagcaaagttggctctacataaacattgttcttattttaaaattaacactatgtgttcagttttcttgtgggcttctgaaagttgccatcttccctccgtggagctccatttgctattttcattatacactatgaggtaaaatgtaataacaaaagagagagaagtaccactgtggctagatatatacacacacatatatatatggatggatgtaatatatgtagaacacacacatagatgtatataggatacacactcatgtatgtaaacgtatacatatgtgtatatatgatacatacacatacacacacacgagagacagaaggaaagagaggaagagagaagcaaacatgtaggaaaaaatataaatc

SEQ ID NO: 165286 - DNA, 2118 bp, Homo sapiens
  Payload ID: 12546
  Gene Symbol: PDE10A
  Gene Name: phosphodiesterase 10A
  ENST ID: ENST00000616273
  CDS Start-End: 1217-1768
gcgcggcggcggctgcggctgggtcgcggcccgcgctcccttggcgctcgccttctcgtcccgggtcccctcctcctctccatctttcttttacttctggccgccgccccccccgccccctccctcttttctcccctcctcatctgcctttcacctccccgtgcgtctcccaggaagggagggcgcagcggcggcggcggcggcgggaggaggcggcgatgctggcggaggaggaggaggaggacaagaggcagctcccttgagcgtccccaccagcagtagtcaccgcggcggcggtggcagcggcggcgggcggcggcggctcttcctctcgcctgcgctccagggcttgctgcttccagcccgtgccggtccccggccgccgccgccgccccggctcccccttggccaggccgcccgccgcgcgggctcccccggcttccccggcgccggcccaggcggcggcggccaaactccgcggcgtccccagggcgccagcttcgccctcgccgccgcggccgcgctgctcttcggctccgacatggaagatggaccttctaataatgcgagctgcttccgaaggctgaccgagtgcttcctgagccccagttcctccctcttgagcctgtggccacttggctggagcagatgcgcttccttccacttgggggtccagcccaccgggtccctgtagccggggtgagggaggccagggcctcagaaccccgcgcttccaactgtgatggcaccgccgttctccaggactcggagtgggcgcccggcctcccaccccgcgcagtgaccggcatccagagcatggactggcggggtggaaacggttgcacctccacccaggggacgcacccccaccccgggccgcgtcctgttggtcccgggcttctctggggtccggggtggtagagaaaagggaaggacaataggtcgctagggtggaagagaaaggcgccgccgcctccgactcgcaggatgcgcccccgggcccactgtggcgtggccactcctcctcgccacccgcgggcgcggggccgagagcgcgctgaggcagaggtggcagaaaggcatgtcacgggggtgggggacaagattgagcagaaaagtcaaggcaggggttcgctagaaggaagcaggcaggcgggagacagtgaggaaagaggaggcgcccggtgcgcagaggaggggggcgtcgcggtcgcggatggagggggagcagggtgaggacgggaagaccgcggcggggccgggtaggagcacctccgggtgcaggaggtcgcgcccatgggcccccgcccgactccggcgccagtcggggcgggtgcggcttcccgcggcccagagcgcggctccggagccaccgtccaccgcgtgtgcacccgagcctttgtctgcgcctcgctcaggagccgcgtttccgcggcgccttctctgggccgacgctcttccaggattgctgtttcggtttcccgctcccaactgcggctcattcccaggctttggccgacccgggtctccagggcacccgaggttgagcccctccctgcggccgaagctgctccgggctcaccgcccgctcaggcacctttggggtgcagcccccgggctggcgagcgtattcgcgccgggatcggccgctccttgcaaccccgcttcccgggcacgggcgagtccacggcggccgcgtggtcagcggcctctcgtacacccgtgcgggctccggctagcgagtcgctgcttgcgcttgattggctagcggggcgcgggcccaatgctcccgaagtcctctgacccctaagtcctcccccccggtgtctgcctcccacccccgctgcagtctaggtggggaaggggtgtggagatgggtgtgcatggacagagcatgtggccttctctgttggccagagatgtggtcagtagaagcacttttccctactgaagtgccctttggccatgcattgaaggtggtagaggatggggccccaccagctctcccggggtgttggcatcagcctataggcctggtctaggactggggttcctcctggtcccctatctggtgggcttgtgaattctttcttaagaaaataaacatctgcttttctc

SEQ ID NO: 165287 - DNA, 9275 bp, Homo sapiens
  Payload ID: 12547
  Gene Symbol: PDE11A
  Gene Name: phosphodiesterase 11A
  Uniprot ID: Q9HCR9
  ENST ID: ENST00000286063
  CDS Start-End: 319-3120
gcagcggcggcagccagaacaggagcagcgatagctcgggtttccggaacaggagccggggcagcggcggcagctcagtgctgggcacctgtgcggagcaggagtagcaggaccacggggtggggtcggcgccagccactctgagccagagaaggaaggggcatctcccagattccactgctgggaataatctccaggggaggtggcgctgaactgggaatactggtgggggtgaacatgtgcaggaacagctagaggcctcggggcaggaaaacatttggttcacgtgtaaacaggcaaggaaagctgtctgggaccatggcagcctcccgcctggactttggggaggtggaaactttcctggacaggcacccagagttgtttgaagattacttgatgcggaaggggaagcaggagatggttgaaaagtggctgcagaggcacagtcagggtcagggggctttaggtccaaggccctctttggctggtaccagcagcttggctcacagcacctgcagaggtggcagcagcgttggtggtggcactggaccaaatggctctgcccacagccagccccttcccggtggcggggactgtggtggggttcccttgagtcccagctgggccggtggcagcaggggcgatgggaacctgcagcggagagcttctcagaaagagctaaggaagagttttgcccgctccaaggccatccacgtgaacaggacctacgatgaacaggtgacctcccgggctcaggaacccctgagtagtgtacgacggagggcacttctccggaaggcaagctccctgccccccaccacagcccatattctcagtgcgctgctggaatcgagagtgaatctgcctcggtatccccctacagccatcgactacaagtgccatctgaaaaagcataatgagcgtcagttctttctggaattggtcaaagatatctccaatgaccttgacctcaccagcctgagctacaagattctcatctttgtctgccttatggtggatgctgaccgctgctctcttttcctggtggaaggggcagctgctggcaagaagaccttggtctccaaattctttgatgtgcatgcaggaacacctctgctgccttgcagcagcacagagaactcaaatgaggtgcaggtcccctggggcaaaggtatcattggctatgtcggggagcatggagaaacggtcaacattcctgatgcctaccaggatcgacgattcaatgatgaaatcgacaagctaactggatacaagacaaaatcattattgtgcatgcctatccgaagcagtgatggtgagattattggtgtggcccaagcgataaataagattcctgaaggagctccatttactgaagatgatgaaaaagttatgcagatgtatcttccattttgtggaatcgccatatctaacgctcagctctttgctgcctcaaggaaagaatatgaaagaagcagagctttgctagaggtggttaatgacctctttgaagaacagactgacctggagaaaattgtcaagaaaataatgcatcgggcccaaactctgctgaaatgtgaacgctgttctgttttactcctagaggacatcgaatcaccagtggtgaaatttaccaaatcctttgaattgatgtccccaaagtgcagtgctgatgctgagaacagtttcaaagaaagcatggagaaatcatcatactccgactggctaataaataacagcattgctgagctggttgcttcaacaggccttccagtgaacatcagtgatgcctaccaggatccgcgctttgatgcagaggcagaccagatatctggttttcacataagatctgttctttgtgtccctatttggaatagcaaccaccaaataattggagtggctcaagtgttaaacagacttgatgggaaaccttttgatgatgcagatcaacgactttttgaggcttttgtcatcttttgtggacttggcatcaacaacacaattatgtatgatcaagtgaagaagtcctgggccaagcagtctgtggctcttgatgtgctatcataccatgcaacatgttcaaaagctgaagttgacaagtttaaggcagccaacatccctctggtgtcagaacttgccatcgatgacattcattttgatgacttttctctcgacgttgatgccatgatcacagctgctctccggatgttcatggagctggggatggtacagaaatttaaaattgactatgagacactgtgtaggtggcttttgacagtgaggaaaaactatcggatggttctataccacaactggagacatgccttcaacgtgtgtcagctgatgttcgcgatgttaaccactgctgggtttcaagacattctgaccgaggtggaaattttagcggtgattgtgggatgcctgtgtcatgacctcgaccacaggggaaccaacaatgccttccaagctaagagtggctctgccctggcccaactctatggaacctctgctaccttggagcatcaccatttcaaccacgccgtgatgatccttcaaagtgagggtcacaatatctttgctaacctgtcctccaaggaatatagtgaccttatgcagcttttgaagcagtcaatattggcaacagacctcacgctgtactttgagaggagaactgaattctttgaacttgtcagtaaaggagaatacgattggaacatcaaaaaccatcgtgatatatttcgatcaatgttaatgacagcctgtgaccttggagccgtgaccaaaccgtgggagatctccagacaggtggcagaacttgtaaccagtgagttcttcgaacaaggagatcgggagagattagagctcaaactcactccttcagcaatttttgatcggaaccggaaggatgaactgcctcggttgcaactggagtggattgatagcatctgcatgcctttgtatcaggcactggtgaaggtcaacgtgaaactgaagccgatgctagattcagtagctacaaacagaagtaagtgggaagagctacaccaaaaacgactgctggcctcaactgcctcatcctcccctgccagtgttatggtagccaaggaagacaggaactaaacctccaggtcagctgcagctgcaaaatgactacagcctgaagggccattttcagtccagcaatgtcatccttttgttcttttagctcagaaagacctaacatctcaaggatgcactgggaagcatgcctgggctttcaccttgaagcatggtcagcagcagagagagcaacgggaaggacaaagaaagaggtggggcagggagcacaccccaggaccctcacttttccctaatgaacacgcatgggctgaaatgaaggctctgggtaggggactgttttggatccaaggacctgtggacagtcggcctacttactctgagctgagggaacactgaacagtaaaagcgtcattagcgctgcttcgttttgtatagggcttttctgtttgttacaagccaaacactgcctgtctttgcttcctgtccctgaatgcctttttgtgccagactgtcccaagaatcctaatttgtattccatagaggtattttatttttaatcctagagcttcttattgatggatcctttagaattgcctacctaaaaggtaaactatactatccttataaatactgatcaatcccagttctccccctaaaaatgaatacatagtaggactatagcaaatgtgtttgatgggtaattctagactgggactatggtacccttttccagagttttaaaattcaaccttcattacagacaaagttttctcccagaaggaatggattgatagattttgattaaagtaagggtggaaggaaatctgtagctggatttaccacaagtgacatctagaaactatagttcacaggacagagcagagccatggagactaagcattgactaccttgagttctcctagtgaggagttctggtataaaatttaagattactaccagtaaccaacttaaagcaaactataggggtccctaattttggatttttccttaagtgtaagaaacaatgcttcaaatgttaagaaataacagtctgggcaaagaacgcatattctataggaagccaggtttacaataggtaagaataaactgtattaagtagatgtaatgactagaaagctgctttgctccctatattgagaaattgtggacatggtatgtgttatccaaagaacattgggctagaagatagatttctatccttagctttggcattattgactggattgacttgaacaagtcacttaacttctacaagcttgtttccttatttgtcaaattagattacactaggaaacgattctcgaacatgttttaaccttacaactctttgttcaaataaatctttcaatgaatccccaacatataaaacgtcaaaaagctgaattcctatgtgaattataagcagggtttggacatccagagcacctacaaaccttcatctctttgattacgtacatgggggtccacagggactctgaagagtttgaaaatccctggcctagattaaacctgagagccattctagctcttaaaaaaatctgaaatttacaaaccatttttcttgttattgtttttgtttctttgtttgtttgttttttgagactgagttttcactcttgttgcccaggctggagtgcaatggcgtgatctcggcttactgcaacctctgcttcctgggttcaagcaattctccagcctcaacctcctgagaagctgggattacaggtgcctgccaccacgcctggctaatttttgtacttttagtagacacagggtttcaccatgtttgccaggctgatctcaaactcctgacctcaggtgagccacccacctctgcctccgaaagtgctgggattacaggcgtgagccaccgtacccggcccttgttattgttattaatcattatcaatcattaactttacagatattaaagaaataggggccatgttctacatgcgacattgttttcctggcacacagtagacaattcaggaaatgtctgaagaaggaatgggtaaaattaagataccaaaatggaattgaggggagagcaggtaattgtagagaaaaagactctttatggcaagaaacaaagtaaaagaaatgtatagaccgggcgcggtggctcacgcctgtaatcccagcaatttggaaggccgaggcgggcggatcacgaggtcaggagatcgagaccgtcctggctaacacggtgaaaccctgtctctactaaaaaacacaaaacaaattagccaggcgcggtggcaggcgtctgtagtcccagctactggggaggctgaggcaagagaatggcgggaacccgcgaggcggagcttgcagtgagtcgagatcacgtcactgccctccagcctgggcgaccagcgagactccgtctcaaaaaaaaaaaaaaaaaaaaaaaaaaaaaaaaaaagtataaaccagactaagaggggaataaaagcaagaagaaaaagaaacgtaagaacaccagtaaaggaaagacagggaccgagacaggtggttaagggaaatgaaaaaaaaaaaaaaaaggtgaaagtcaatccaaacaaagaaaaatggcacttccaaccaaaaaaaatgaaggtgtagaaccctgtcatcaattgctcagaaaagagagacacttgagcagggaggggtttgagaaaggggagaaggaaggagtgagagccctaaaaaataatgttcctagctaccctttacagctgtctctgcagggaagactggagaaagtagagggggaaatgaatgcaggaagaaactgcctctgcagagcaggtaagaggaggttgttcagatttatggattttattaagccagttttctgtatcactctgctataaaggaaaatagcttctgcagggctgtctctcctccttcaggtggggaacaaagggtgggtggagtcagggacagagtctggtctgcgagatcgtgacgtgtctgcagctccgaagcactgcaggtgtttctgggtaatgtgccacatcatgtttatatcacgaacgggaattgaaaatcagtctgtgtgaggcagagatgagcccacatctgttatcctccccaacaataaataaataaatagcccagacaaatggatgccagtccatctacagcaacattttaaagcatgtgctttatgacaaaactggacccagggtctgacagagactgcaggctgccgtgagcactgtagctatcctgaacattgatgctacatattgctaaggggaacataatttatagcataaaccctacaagcttccactaaggttgagttttcctctcattttcttgccgttttattggcttcactgcatggttgccaatagcaacatccactggtagcaaggggagttcaacaccattgcaatctgccatacagtggagccctgacaatgtcaaccatcaatctagtagctgtttgtaattgcctccatctatttctcctgtcttgaggtatctttcctattgtgggtcaagatttagaaactgctgactaatgccatgggtctgtgtctccatgactatgaagcagtggacaggaaggtagcagcttcctggtgccaacaaccccagaggttagaggttgaactcttgcgggtttcaggcgtttttaatcccttttctaaacaatttataattttgcaagaatgtgaggcatatgcagttatccatataatctgcttttccaaaaaagagaaaggaagtttcccagtccttattattaatgtttatttcctattggagaaagacatttgaaatatgagccttcttgtaaaaactcaaactgaccagattatgtttgcttcctcaggtctcttggcattaattgttgaaataacttcatcctactttttcgatgagatgtatttttttcagacatatttattcttactagtcactatgtagctattatgtgcacaatctacaatgtagtggcaatcctggtgggtagggacagcttcacatactgcaaagggtgccattcagtgcatagcagactggaactccctcctagcttggccaccagctgaacctgtaatcttaggactctccaagtcttagaatctccatctattacataaaagcactgacttttattcagtccccacaccaaaggaccaagacgtgtttagctttaaagaaattttccagataattttcttttttattcttctcaaataaaatagcaacaaacctaaagcagtcatcttcttaataaagacataataaaacttacatatatggggtagatgtaagcacaatcatactacagatgtatcttgagcctgtctctaattatgatgaaagatgtagtcatcaatacaatttaaaaaaagatatgtcctttttttgagacagggtcttgctctgtcacccaggctggagggcagtggcacaatcacagccactgcagccttgacctctccaacttaagtgatctttcctgcctcagcctcatgagtagctgggaccacaggtgtgcaccaccacacccagctaaattttgtattgtttgtaaagacgaggcctcactatgctgaccacactggtctcgaactcctgggctcaagcaatcctcctgccttggcctcccaaagtgttagggttagagatatgaaccaccacacccaccttatatgtccttttatttcataaaaaacaattttagattatctgatatcacacatatcccataaatggtagtcattaatttagaagtgaatttataaagttaagagaagttaaaattgcacatgcattttgtttctaaaatctgagatgtctatgcatttccaggtattgtatatttgcaaatacattgggttagaaatcatctttaacattttgtgttagtgtaataacaatattatctaatattaatgctgccagaatccagttgctttttctgtgtatcaaaatttatcataactttttccacttaacactaggtaattaaacagaatctgcccaatttattctgcagtaaaattattttaaaatctatttttcctgctgactcttagaaattgcagaaagacaaaaaccagtttcatctccagtaatagtgtgaaacaatttccttccagtgggacagaaacctagacatactagggaaagatttaaatataaagaaaaatgccttggctgaaaaaaaaaaaaaccaccaaaacacaaaaaggattcattaaagcaacagaacaaaacctaatttgggaccctaaaaactctggcaatgccactgtaatgaagtttcattatctgcttcagagtaacagtctctgaaattgttattctgctacatgctgtaaagaactcccaaaactcaaatgtatcaggaaatgtaaaggttaagtctgactacaagaaggccaaaattgcaccagcttcctaagtgaagaataatagaataaaacatatagagggcagaaataaaatgaggtgtatctggagaatttcatgatgagcatttagatttagcaatgcccaatgtcatgctgacactgtttgtcatgaccttgtcttcagctagtaatttggggttgtacttttttaaatttaattttgaatgttcttgcatgtttggtacctctctcctcactgctaaagataaattgtttatctgtataacataactacaccaatgtcatttttgtatacgctagtacacaaatgtgtttttttattaagtaatgaagtatttgctgtgaaaaatgtattatttgtgccaccgtttatatctgtgttcattttctgtgtgtatatgcgtgtgtattcgaatctcaatttttcttttactctagtttagattaagacatatttagatgaaattttaaaaataacattggaaataggaggctaagttttgttgagtctcattcccttggggggaaattgcttttgccattttattttcatgtacaataacctaaaaaggatctcctactgacttccttcctaattattattgttttacacgaaagaaaggaaatacgttttcaattgagttgtttgaaatcattcactttgtgtagatttcccagactgatgtttcattgtaagaatattacattatagacaggttggccatttcacaagcaactaatccatagttttggaagcccgctttaagagacctgaatatctttgtttttaataaaatacttagagtt

SEQ ID NO: 165288 - DNA, 3489 bp, Homo sapiens
  Payload ID: 12547
  Gene Symbol: PDE11A
  Gene Name: phosphodiesterase 11A
  Uniprot ID: Q9HCR9
  ENST ID: ENST00000358450
  CDS Start-End: 100-2151
cgcttgcagcccagggcgtgaggtgctctttctggatcgccagcctcgaagttgaggcgtggactctggccaggtggctgttccagagcaacatgggagatgctgaagcaggcaagaagacctttattcagaaatgtgctcagtgccacacagtggaaaaaggtgaaaatcacaagactggtccaaatctctggggcctctttggctgaaaaacaggaaaagcaccaggattttcttatacagaggcaaacaaaaacaaaggatcgacgattcaatgatgaaatcgacaagctaactggatacaagacaaaatcattattgtgcatgcctatccgaagcagtgatggtgagattattggtgtggcccaagcgataaataagattcctgaaggagctccatttactgaagatgatgaaaaagttatgcagatgtatcttccattttgtggaatcgccatatctaacgctcagctctttgctgcctcaaggaaagaatatgaaagaagcagagctttgctagaggtggttaatgacctctttgaagaacagactgacctggagaaaattgtcaagaaaataatgcatcgggcccaaactctgctgaaatgtgaacgctgttctgttttactcctagaggacatcgaatcaccagtggtgaaatttaccaaatcctttgaattgatgtccccaaagtgcagtgctgatgctgagaacagtttcaaagaaagcatggagaaatcatcatactccgactggctaataaataacagcattgctgagctggttgcttcaacaggccttccagtgaacatcagtgatgcctaccaggatccgcgctttgatgcagaggcagaccagatatctggttttcacataagatctgttctttgtgtccctatttggaatagcaaccaccaaataattggagtggctcaagtgttaaacagacttgatgggaaaccttttgatgatgcagatcaacgactttttgaggcttttgtcatcttttgtggacttggcatcaacaacacaattatgtatgatcaagtgaagaagtcctgggccaagcagtctgtggctcttgatgtgctatcataccatgcaacatgttcaaaagctgaagttgacaagtttaaggcagccaacatccctctggtgtcagaacttgccatcgatgacattcattttgatgacttttctctcgacgttgatgccatgatcacagctgctctccggatgttcatggagctggggatggtacagaaatttaaaattgactatgagacactgtgtaggtggcttttgacagtgaggaaaaactatcggatggttctataccacaactggagacatgccttcaacgtgtgtcagctgatgttcgcgatgttaaccactgctgggtttcaagacattctgaccgaggtggaaattttagcggtgattgtgggatgcctgtgtcatgacctcgaccacaggggaaccaacaatgccttccaagctaagagtggctctgccctggcccaactctatggaacctctgctaccttggagcatcaccatttcaaccacgccgtgatgatccttcaaagtgagggtcacaatatctttgctaacctgtcctccaaggaatatagtgaccttatgcagcttttgaagcagtcaatattggcaacagacctcacgctgtactttgagaggagaactgaattctttgaacttgtcagtaaaggagaatacgattggaacatcaaaaaccatcgtgatatatttcgatcaatgttaatgacagcctgtgaccttggagccgtgaccaaaccgtgggagatctccagacaggtggcagaacttgtaaccagtgagttcttcgaacaaggagatcgggagagattagagctcaaactcactccttcagcaatttttgatcggaaccggaaggatgaactgcctcggttgcaactggagtggattgatagcatctgcatgcctttgtatcaggcactggtgaaggtcaacgtgaaactgaagccgatgctagattcagtagctacaaacagaagtaagtgggaagagctacaccaaaaacgactgctggcctcaactgcctcatcctcccctgccagtgttatggtagccaaggaagacaggaactaaacctccaggtcagctgcagctgcaaaatgactacagcctgaagggccattttcagtccagcaatgtcatccttttgttcttttagctcagaaagacctaacatctcaaggatgcactgggaagcatgcctgggctttcaccttgaagcatggtcagcagcagagagagcaacgggaaggacaaagaaagaggtggggcagggagcacaccccaggaccctcacttttccctaatgaacacgcatgggctgaaatgaaggctctgggtaggggactgttttggatccaaggacctgtggacagtcggcctacttactctgagctgagggaacactgaacagtaaaagcgtcattagcgctgcttcgttttgtatagggcttttctgtttgttacaagccaaacactgcctgtctttgcttcctgtccctgaatgcctttttgtgccagactgtcccaagaatcctaatttgtattccatagaggtattttatttttaatcctagagcttcttattgatggatcctttagaattgcctacctaaaaggtaaactatactatccttataaatactgatcaatcccagttctccccctaaaaatgaatacatagtaggactatagcaaatgtgtttgatgggtaattctagactgggactatggtacccttttccagagttttaaaattcaaccttcattacagacaaagttttctcccagaaggaatggattgatagattttgattaaagtaagggtggaaggaaatctgtagctggatttaccacaagtgacatctagaaactatagttcacaggacagagcagagccatggagactaagcattgactaccttgagttctcctagtgaggagttctggtataaaatttaagattactaccagtaaccaacttaaagcaaactataggggtccctaattttggatttttccttaagtgtaagaaacaatgcttcaaatgttaagaaataacagtctgggcaaagaacgcatattctataggaagccaggtttacaataggtaagaataaactgtattaagtagatgtaatgactagaaagctgctttgctccctatattgagaaattgtggacatggtatgtgttatccaaagaacattgggctagaagatagatttctatccttagctttggcattattgactggattgacttgaacaagtcacttaacttctacaagcttgtttccttatttgtcaaattagattacactaggaaacgattctcgaacatgttttaaccttacaactctttgttcaaataaatctttcaatgaatccccaacatataaaacgtcaaaaa

SEQ ID NO: 165289 - DNA, 1781 bp, Homo sapiens
  Payload ID: 12547
  Gene Symbol: PDE11A
  Gene Name: phosphodiesterase 11A
  Uniprot ID: Q9HCR9
  ENST ID: ENST00000389683
  CDS Start-End: 151-1620
tggaaagatgttacttcatctcccaggtttgctcactgcaaatacaatcctgagaactgaactagggccttaaagtcctgacatgcatggcttggttttgtggattgcctctctcaacaggtggtgaaatttaccaaatcctttgaattgatgtccccaaagtgcagtgctgatgctgagaacagtttcaaagaaagcatggagaaatcatcatactccgactggctaataaataacagcattgctgagctggttgcttcaacaggccttccagtgaacatcagtgatgcctaccaggatccgcgctttgatgcagaggcagaccagatatctggttttcacataagatctgttctttgtgtccctatttggaatagcaaccaccaaataattggagtggctcaagtgttaaacagacttgatgggaaaccttttgatgatgcagatcaacgactttttgaggcttttgtcatcttttgtggacttggcatcaacaacacaattatgtatgatcaagtgaagaagtcctgggccaagcagtctgtggctcttgatgtgctatcataccatgcaacatgttcaaaagctgaagttgacaagtttaaggcagccaacatccctctggtgtcagaacttgccatcgatgacattcattttgatgacttttctctcgacgttgatgccatgatcacagctgctctccggatgttcatggagctggggatggtacagaaatttaaaattgactatgagacactgtgtaggtggcttttgacagtgaggaaaaactatcggatggttctataccacaactggagacatgccttcaacgtgtgtcagctgatgttcgcgatgttaaccactgctgggtttcaagacattctgaccgaggtggaaattttagcggtgattgtgggatgcctgtgtcatgacctcgaccacaggggaaccaacaatgccttccaagctaagagtggctctgccctggcccaactctatggaacctctgctaccttggagcatcaccatttcaaccacgccgtgatgatccttcaaagtgagggtcacaatatctttgctaacctgtcctccaaggaatatagtgaccttatgcagcttttgaagcagtcaatattggcaacagacctcacgctgtactttgagaggagaactgaattctttgaacttgtcagtaaaggagaatacgattggaacatcaaaaaccatcgtgatatatttcgatcaatgttaatgacagcctgtgaccttggagccgtgaccaaaccgtgggagatctccagacaggtggcagaacttgtaaccagtgagttcttcgaacaaggagatcgggagagattagagctcaaactcactccttcagcaatttttgatcggaaccggaaggatgaactgcctcggttgcaactggagtggattgatagcatctgcatgcctttgtatcaggcactggtgaaggtcaacgtgaaactgaagccgatgctagattcagtagctacaaacagaagtaagtgggaagagctacaccaaaaacgactgctggcctcaactgcctcatcctcccctgccagtgttatggtagccaaggaagacaggaactaaacctccaggtcagctgcagctgcaaaatgactacagcctgaagggccattttcagtccagcaatgtcatccttttgttcttttagctcagaaagacctaacatctcaaggatgcactgggaagcatgcctgggctttcaccttgaagcatggtcagcagca

SEQ ID NO: 165290 - DNA, 2102 bp, Homo sapiens
  Payload ID: 12547
  Gene Symbol: PDE11A
  Gene Name: phosphodiesterase 11A
  Uniprot ID: Q9HCR9
  ENST ID: ENST00000409504
  CDS Start-End: 92-1819
aaaagtccactgtgtgttgggaatagattatgaagggctttgagtgtaggccctgtaagcaataggaagccatggaacagccagaaaggttatgcagatgtatcttccattttgtggaatcgccatatctaacgctcagctctttgctgcctcaaggaaagaatatgaaagaagcagagctttgctagaggtggttaatgacctctttgaagaacagactgacctggagaaaattgtcaagaaaataatgcatcgggcccaaactctgctgaaatgtgaacgctgttctgttttactcctagaggacatcgaatcaccagtggtgaaatttaccaaatcctttgaattgatgtccccaaagtgcagtgctgatgctgagaacagtttcaaagaaagcatggagaaatcatcatactccgactggctaataaataacagcattgctgagctggttgcttcaacaggccttccagtgaacatcagtgatgcctaccaggatccgcgctttgatgcagaggcagaccagatatctggttttcacataagatctgttctttgtgtccctatttggaatagcaaccaccaaataattggagtggctcaagtgttaaacagacttgatgggaaaccttttgatgatgcagatcaacgactttttgaggcttttgtcatcttttgtggacttggcatcaacaacacaattatgtatgatcaagtgaagaagtcctgggccaagcagtctgtggctcttgatgtgctatcataccatgcaacatgttcaaaagctgaagttgacaagtttaaggcagccaacatccctctggtgtcagaacttgccatcgatgacattcattttgatgacttttctctcgacgttgatgccatgatcacagctgctctccggatgttcatggagctggggatggtacagaaatttaaaattgactatgagacactgtgtaggtggcttttgacagtgaggaaaaactatcggatggttctataccacaactggagacatgccttcaacgtgtgtcagctgatgttcgcgatgttaaccactgctgggtttcaagacattctgaccgaggtggaaattttagcggtgattgtgggatgcctgtgtcatgacctcgaccacaggggaaccaacaatgccttccaagctaagagtggctctgccctggcccaactctatggaacctctgctaccttggagcatcaccatttcaaccacgccgtgatgatccttcaaagtgagggtcacaatatctttgctaacctgtcctccaaggaatatagtgaccttatgcagcttttgaagcagtcaatattggcaacagacctcacgctgtactttgagaggagaactgaattctttgaacttgtcagtaaaggagaatacgattggaacatcaaaaaccatcgtgatatatttcgatcaatgttaatgacagcctgtgaccttggagccgtgaccaaaccgtgggagatctccagacaggtggcagaacttgtaaccagtgagttcttcgaacaaggagatcgggagagattagagctcaaactcactccttcagcaatttttgatcggaaccggaaggatgaactgcctcggttgcaactggagtggattgatagcatctgcatgcctttgtatcaggcactggtgaaggtcaacgtgaaactgaagccgatgctagattcagtagctacaaacagaagtaagtgggaagagctacaccaaaaacgactgctggcctcaactgcctcatcctcccctgccagtgttatggtagccaaggaagacaggaactaaacctccagctcagaaagacctaacatctcaaggatgcactgggaagcatgcctgggctttcaccttgaagcatggtcagcagcagagagagcaacgggaaggacaaagaaagaggtggggcagggagcacaccccaggaccctcacttttccctaatgaacacgcatgggctgaaatgaaggctctgggtaggggactgttttggatccaaggacctgtggacagtcggcctacttactctgagctgagggaacactgaacagtaaaagcgtcattagcgctg

SEQ ID NO: 165291 - DNA, 619 bp, Homo sapiens
  Payload ID: 12547
  Gene Symbol: PDE11A
  Gene Name: phosphodiesterase 11A
  ENST ID: ENST00000427127
  CDS Start-End: 362-472
caagaaatgtagagggagaagagtgctggaagatgagtcaagaaaagtccactgtgtgttgggaatagattatgaagggctttgagtgtaggccctgtaagcaataggaagccatggaacagccagaaagcttcctgtctgtcagatttccccattcatcaggccacagacattcttgggatgtagctagggaagaagtccagctgtagatacttttgagtttagtaggataatttttatggttcccaatcccttttgtggaaagttgttgctagctttatgctgtaggaacggcttttctgaatattcttttgctcaccatcccagttcactcaacatcttgatgcagatatacaaggttatgcagatgtatcttccattttgtggaatcgccatatctaacgctcagctctttgctgcctcaaggaaagaatatgaaagaagcagaagttatgtaagggatgtgtattagtgaaaatgtctcaagtttgaccaagaacctgtttcttcctgatagtgaggaaaagctgctttgctttgctagaggtggttaatgacctctttgaagaacagactgacctggagaaaattgtcaagaaaataatgcatcgggcccaaa

SEQ ID NO: 165292 - DNA, 1204 bp, Homo sapiens
  Payload ID: 12547
  Gene Symbol: PDE11A
  Gene Name: phosphodiesterase 11A
  ENST ID: ENST00000436700
  CDS Start-End: 1-409
agtgctgccccttgttgaggaaaggaagatatcaatgttaatgacagcctgtgaccttggagccgtgaccaaaccgtgggagatctccagacaggtggcagaacttgtaaccagtgagttcttcgaacaaggagatcgggagagattagagctcaaactcactccttcagcaatttttgatcggaaccggaaggatgaactgcctcggttgcaactggagtggattgatagcatctgcatgcctttgtatcaggcactggtgaaggtcaacgtgaaactgaagccgatgctagattcagtagctacaaacagaagtaagtgggaagagctacaccaaaaacgactgctggcctcaactgcctcatcctcccctgccagtgttatggtagccaaggaagacaggaactaaacctccaggtcagctgcagctgcaaaatgactacagcctgaagggccattttcagtccagcaatgtcatccttttgttcttttagctcagaaagacctaacatctcaaggatgcactgggaagcatgcctgggctttcaccttgaagcatggtcagcagcagagagagcaacgggaaggacaaagaaagaggtggggcagggagcacaccccaggaccctcacttttccctaatgaacacgcatgggctgaaatgaaggctctgggtaggggactgttttggatccaaggacctgtggacagtcggcctacttactctgagctgagggaacactgaacagtaaaagcgtcattagcgctgcttcgttttgtatagggcttttctgtttgttacaagccaaacactgcctgtctttgcttcctgtccctgaatgcctttttgtgccagactgtcccaagaatcctaatttgtattccatagaggtattttatttttaatcctagagcttcttattgatggatcctttagaattgcctacctaaaaggtaaactatactatccttataaatactgatcaatcccagttctccccctaaaaatgaatacatagtaggactatagcaaatgtgtttgatgggtaattctagactgggactatggtacccttttccagagttttaaaattcaaccttcattacagacaaagttttctcccagaaggaatggattgatagattttgattaaagtaagggtggaaggaaatctgtagctggatttaccacaagtgacatcta

SEQ ID NO: 165293 - DNA, 1310 bp, Homo sapiens
  Payload ID: 12547
  Gene Symbol: PDE11A
  Gene Name: phosphodiesterase 11A
  ENST ID: ENST00000433879
  CDS Start-End: 1-1310
atcttccattttgtggaatcgccatatctaacgctcagctctttgctgcctcaaggaaagaatatgaaagaagcagagctttgctagaggtggttaatgacctctttgaagaacagactgacctggagaaaattgtcaagaaaataatgcatcgggcccaaactctgctgaaatgtgaacgctgttctgttttactcctagaggacatcgaatcaccagtggtgaaatttaccaaatcctttgaattgatgtccccaaagtgcagtgctgatgctgagaacagtttcaaagaaagcatggagaaatcatcatactccgactggctaataaataacagcattgctgagctggttgcttcaacaggccttccagtgaacatcagtgatgcctaccaggatccgcgctttgatgcagaggcagaccagatatctggttttcacataagatctgttctttgtgtccctatttggaatagcaaccaccaaataattggagtggctcaagtgttaaacagacttgatgggaaaccttttgatgatgcagatcaacgactttttgaggtgctatcataccatgcaacatgttcaaaagctgaagttgacaagtttaaggcagccaacatccctctggtgtcagaacttgccatcgatgacattcattttgatgacttttctctcgacgttgatgccatgatcacagctgctctccggatgttcatggagctggggatggtacagaaatttaaaattgactatgagacactgtgtaggtggcttttgacagtgaggaaaaactatcggatggttctataccacaactggagacatgccttcaacgtgtgtcagctgatgttcgcgatgttaaccactgctgggtttcaagacattctgaccgaggtggaaattttagcggtgattgtgggatgcctgtgtcatgacctcgaccacaggggaaccaacaatgccttccaagctaagagtggctctgccctggcccaactctatggaacctctgctaccttggagcatcaccatttcaaccacgccgtgatgatccttcaaagtgagggtcacaatatctttgctaacctgtcctccaaggaatatagtgaccttatgcagcttttgaagcagtcaatattggcaacagacctcacgctgtactttgagaggagaactgaattctttgaacttgtcagtaaaggagaatacgattggaacatcaaaaaccatcgtgatatatttcgatcaatgttaatgacagcctgtgaccttggagccgtgaccaaaccgtgggagatctccagacag

SEQ ID NO: 165294 - DNA, 8773 bp, Homo sapiens
  Payload ID: 12548
  Gene Symbol: PDE12
  Gene Name: phosphodiesterase 12
  Uniprot ID: Q6L8Q7
  ENST ID: ENST00000311180
  CDS Start-End: 104-1933
agatctgaatgagtcaaagccggcggcctcggctcctcagctccacctgacagtaggccgctgatcggccgcgggtcttgtcgaccgctaggccaccaggttcatgtggaggctcccaggcgcccgcgccgcgcttcgggtgatccggacggcggtggagaagctgagccgggctgaagcggggagccagacagcggcgggagcgatggagcgcgctgtagtgcgctgcgtaccttcggaacccaagctgagcctgtcattcgctttggctgatggtagccacaagaacatgcagcgcgaccagagcgagccgctgggtcgagtcctcagccgcatcgctaccaatgccctaaagggtcacgctaaggcggccgccgccaagaagagcaggaagagccggccgaatgctagcggcggtgcggcctgttcagggccggggcctgagccggctgtgttctgcgagcccgtggtgaagctgtactaccgggaagaggcagtggctgaggacgtgctcaacgtggatgcctggcaagacggcgcggtgctgcagatcggcgatgttaagtacaaggtggagcgcaacccgcccgccttcaccgaactgcagttgccgcgctacatcatggccgggttccctgtgtgccccaaactcagcctcgaatttggggatcccgccagctcccttttccgctggtataaggaagccaagcccggagcggcggagcccgaggtcggtgtcccctcgtcattgtctccctcctcaccttcttcttcttggactgagactgatgtggaggagcgtgtctacaccccgtccaatgccgacatcgggctaaggctcaagcttcactgcaccccaggcgatgggcagcgctttgggcacagccgggagttggaaagtgtgtgtgtggtagaggctgggcctggcacctgcacttttgaccaccggcatctctacacgaagaaggtgactgaggacgctctcatccgcactgtctcttacaacatcctggcagacacgtacgcgcagactgagttctcgcgaacggttctgtacccatactgtgccccctacgccctggagctcgactaccgccagaaccttatccagaaggaactcaccggctacaacgccgatgtcatctgtttgcaggaggttgaccgcgcagtgttttctgacagcttggtacccgccctagaggccttcgggctcgagggggtgtttcgaatcaagcagcacgaaggcctggccactttctaccgaaagtctaagttcagccttcttagccagcatgacatttcattctacgaagccctcgagtccgacccacttcacaaagaactgctggagaaactagttttgtacccatcagcgcaggagaaggtgctccagagatcttctgttcttcaggtttcagttcttcagtctacaaaggactcttctaaaaggatatgtgttgctaatacccatctttactggcatcctaaaggtgggtatattcgcctcattcaaatggcagtagccttggctcacataagacatgtttcatgtgatctgtatcctggcataccagttatattttgtggggactttaatagtacaccatcaacaggaatgtatcattttgtcatcaatggcagcattccagaggatcatgaagactgggcttccaatggggaggaggaaagatgcaatatgtctcttacacatttcttcaagctgaaaagtgcttgtggtgaacctgcttacacaaattatgttggtggctttcatggatgtctagattacattttcattgacttaaatgctttagaggttgaacaggtgattccattacctagtcatgaagaagttaccacccaccaggccttacctagtgtttcccatccctctgatcacatagcacttgtatgtgatttaaaatggaaatagatgtgtgtttaatggaattgaagtctgaaaaggaagtagttattttagcagaaaatttaatatgaatcaaagcttatatgtaaacttcaaggaggaatggtaaaatgttcagccctcctagttatgttcctgatgtcttcgttatgaaactgttgatgtttgcatcatacatcttctctttccttgttttcctctacaattggaggagaaacaaatatatttcttactagcaaaatagaaaattgaattatttttctccaaattgagactctcagaaaaggaagattgaattagcgtgttttttgtttgtttgtttttgtttttgtttttgtttttttgagatggagtttcactcttgttgcccaggctggagtgcaatggcacaatctcggctcactgcaacctccgccccctgggtttaagcgattctcctgcctcagcttcccgagtagctgggattacaggcgtgcgccaacatgtctggctaatttttgtatttttagtagaaatggggtttcgccacgttggccaggctggtcttgaactcctgacctcaggtgatccacccacctcggcctcccaaagtgttgggattacaggcgtgagccaccgcacccggcccttgtgtacatttttataagagaatttttttagctaggagttcagaatttttaaagtaccatttgaatgatcttaatttttctttcatgacaacacattccaaaatgaatcatgcttatgtactaagagggaaaatgtatttaagttaagggtgagagacttaagttataggtgaccttagagacctaaggtgagagacttgacacatggaaggagtaacattagggtctacctctacctcaatttagttagcgatttactacaatttcagagctttaacaaaagataaaaataaatcgtcaccaattgttattgcttctcatctttcatttttcaatgaacaagtaaggtattttcattcttatttttaggattttagtttttagtgtatggtacaaatgaacacagtttatattctaattcttactgcagctcattttaatttttaggatgcaagcacaatttagtattcaaagtgagtagcaacatattcaacttgatcccattgtcttcagttactcttgcccatgaaaaatgttcataaatgaacagggtatttgaccatatgatattagaaaatacagcacattactttatgagaaactacctactgatatgggcttgaaattttggatgaatcattgagcatttctacactagaagtaatttcaaaattgttggtttttataaacaggaaaaaggttgagtagtgggacttttaagcatctctgaaataaaaaacttctttttacagacaagcattatagtttgagttacagacaacagtgtgtatatatgtaatatatatatagtaaaatgaaatttaaatatgaagccaaactttttaaaattagaaactacaaatggttatactgattagtgtctagcctagagtggtaaccatgctttactaattcagttatgaaatacattatttataatgcattagctgtattagctgttgcttttttgatgttcaggataactatgttatctcatttctgcatttaattaatagctcgagtattaaaagcccactcccttcaagaaaagctttgattttccccagtcatgaaagcccttgtttcaaattctttaatctctgaacctagtatcataagaatttcctcttttgataacatctgtactttcatattctgctcactatcaaatgtattgttaacacttagtaagtttgaaaatgaaggggttttatctgcatttgacattgaaccttgaagtactttaagtactccaaggggaaaattaaagtggaagtttcttcggatcttgtttagaaaaaactataaataaaaaattgatgctaccaaattgtgccttcctaaataacatttttgagagcattttaacagcagtttacaaatatgtaaataatagattaaaaccaaatcttgattctcttgtgaatttttttttcattttaaaaatatgtttttgggctgttttcaaagaaagatgttgatagaacccttagagtgacttgggagaaaacaaagtgtcacatcaaaaagttgagaaacattttgaaagaaaaaattcgaacatgcccatgaaaaaagcatacagcttccacattaacactggctagattaaactctagtcagaaaaactcagcacttaacagacattccatgtcctatatccttaattttgatgttttctgactaaacaatatactcagattgtatacaggcatttcacattattaggacatggaatgttattgtgaagtgccatatactgtgatcaaatctccagtatacggatacgttaaaatgattggagtccaaaggtagggaacactaagaaaatgtataaatagcatacacatttctttgtactcatgagttagaatgcagtgttattcagaaatgtctgtttaaagcacctatgtgattgcatttttctattacatttggattttttagtacatttaattttaagaaaacatgggaaatctagcgactttctatggtaaaccacattttataatgtcacaagttcttgctataggaattaacattctagaattttatattgattataaaagagtatttcagaacatattattctgttaaaatgaactcttgcacagttgccgctacagcaaatgtgtctgccaataatcaaaattcatgagcaaacaatcgtttctggctgtaatgtatgttctttttgaaattctgtatgctaaaatcagttgtttcaaaatttcaagaattccactgagtagtgatttttctgagtactaagctatgatctcatcagaatgtgctggtttcagtctggagatagatttctgaggagcctaatacaagggagagaatgtccaaagaacactactgtggaaagttcttacgatggaaattgacatcttttgtatctcattctccagccgtgaaataaaggcagaggttccctgcaaactagtttggttgggataaatccaatatttatatataatgaaaaataaaagtttgcattattagtttatcacaagacccatgtgacaactcagaaaatattctcagcataatttttttaagagatagagtctcactgttacccaggctggagtgcagtggtgcagtcataacttactacagcctcaaactgcggggctcaaatgatcctcctgcctcagcgtcccaagtagttgagattacaagcccaaccttccataactgaaaactaactttctttttttctttttttattattatactttaagttctagtgtacatgtgcccaacgtgcagatttgttacataggtatacatgtgccatgttggtttgctgcacccgttaactcgtcatttacattaggtatttctcctaatgctatccctcccccagccctgaaaatgaattttttaaacacaaataaaaaatatttcagtgttttgagaattttaataatttgcttaatatagtacaggaaggcaacactatctagagggccaggcatagtggctcttgactgtaatcacaacattttgggaggctgaggcaggaggatcacttgagctgaggagttcaagaccagccttggcaacattgtgagaccctatctctgcaaaaaataaaattaaccaggcatggtggtgcatgcctgtagtcccagctgctcaggaggctgaggccagaggatcacttgagcccatgaggtcaagcctgcagtgagttgtgatcaaggtgcgctgcactccagcctgggtaatagagcaagaccctgtcttcaaaaaaccactctagatttcatgttgtagggggtagggaggacaatttttaacagctttaactgacatgggtaatatataagttctgtgttctcactttatatgaaagtacttttttaaatgttaaaaatactagagctgtattaacttcgtgattttatttttcttcttagcactaacttcaaaataaccatacagtactgcttgtaatttttgtatttttagtagagacagggtttcaccatattggccaggctggtcttgaactcctgaactcaagtgatctgcctgcctcagcctctgaaagtgctgggattacaggcatgagccacggtacccggcctaaattttaattttatatataaatggcaaaataatcttaaatatagtaaatctgttcacctatctgctatgctagcaaattctgggttgtcaaaaatccatgttcatactgtcagtgttagatttttactcataatttaaaatttccccgcaaaatttcacagaaaactgaattattcatctctatcttctgtccaatttatgtaatgaatgtatgtcaaagcatttatataacacagtccattttgcccagtaattcactttaatgatgttatcatgaagtattgatgtactttttttttagtgtattgaagtattcctaggttgcatttgtgctagtttcataccatttgtgttccttatatattgaagatggttcagtaggggaaatggataggctttatttagttggctttcttatactggataatataaacactttttttttcttttttgagacagggtctggctttgtcacccaggcttggagggcactggtgccatcacggcttactgcaacctccacctcctgggcttatgcaatcctcccaccacagcctccccaaatagctgggactacaggtgcgcaccgccacacctggctaatttttgtatattttataggcaaaaaaaaaaaaaaaaatggtttcaccatgttgcccaggctggtcttgaaattctcagttcaagcagtccacccacctcggcctcccaaagtgctgatattacagacatgagccaccccacccagtcagcacacattttttttttttttaaataagacagggtgttgctgttgcccaggctggagcgcagtggcatgatcatagctcactgcagcatcaaactccagggcttaagcgatcctcccacctcagcctcctgagtagctgggactataggtgcatgccaccatgcctggctaattttttaaattgtttgtagagatgggggtctctctatgttgcccagactggtcttaaactcctgggctcaaatgactctcccgcttcagcctcccaaagtactgggattataggtgtgagccagcacacatagccctttttttaaaaaaattaaaaacaaattttttctccagaaaaaaacatatttatcaacttttaaaaacattttatgggtacatagtaggtgtatatatttatgtgggacatatttcttttgatagagtaaattgagtattcatcacatcaagcattcatttgtgttacgaacattccaattgtactctctcagttattctaaaatgtgatatacacacttttaaaaggatttattgcgctgggcgcggtggctcacgcctgtaatcccagcactctgggaggctgaggccggtggatcatgaggtcagatcgagaccatcctggccaacatggtgaaaccctgtctctactaaaaatacaaaaattagctgggcatggtggcgcgcgcctgtagtctcagctgcttggggaggctgaggcaggagaatcacttgaacccgggaggcagaggttgcagtgagccgagatcacgccattgcactccagcctggcaacaaagcgggactctgtctcaaaaataaaataaaataaaattttaaaaaaaggatttattgcatataattcttatatcccctgtggaatagtttggagaaatggtacatccaaagataaaatcagttagaaataaacagtggccttcctcagaaaagctgggctatagtgttttgggtatcttaaaccaagaaagggtatttctatcccagctgtagagtttttaataattctattataaataatggaatcaggccagcacagtggctcacgtcacataatcccactctccttaagagctttttttgtcactgcatatcaactcagttgacaaggactggcccccaaaagaagctgcatactcacttggcagtcactccccattctccctagctcctggcaacaacttaacctgtctctgtggatttgcctattctggacatttcatataaattgaatcataatttatgtagtcttttgtgactggcttcttttacttaggatgtttttaaggttcttactgttgtaggatgtatcaggagtttgtttttatgatgaatgttccatcttatggacgtaccacatttgtccattcattagttgacagacatttgaattgcttccacttcctggcttctatgaataatgctgccataaacatttgtgataagtttttgagtgaatatgtgtttttgtttctcttgggcacatacagggaatggaattgttgggtgctgtgataaccttttgaggaactgccagacttacggaaagcagttgcactattttgcattcccaccaagcaatatgagggttccagtttccctccatcctcattaacactttattatctttttgattataggcatcctagtgtcaagtggcatcttattgtggttttgatttgcatttccatgatggttaacgatgttaagcatcttttcatgtgctcgttggccatctatatatctctggagaaatgtcttttgaaatactttgcccatttaaaaatgttatttgttgtttagccacccctccttaaaaaataaataatataataatcc

SEQ ID NO: 165295 - DNA, 3040 bp, Homo sapiens
  Payload ID: 12548
  Gene Symbol: PDE12
  Gene Name: phosphodiesterase 12
  ENST ID: ENST00000487257
  CDS Start-End: 105-1523
gagatctgaatgagtcaaagccggcggcctcggctcctcagctccacctgacagtaggccgctgatcggccgcgggtcttgtcgaccgctaggccaccaggttcatgtggaggctcccaggcgcccgcgccgcgcttcgggtgatccggacggcggtggagaagctgagccgggctgaagcggggagccagacagcggcgggagcgatggagcgcgctgtagtgcgctgcgtaccttcggaacccaagctgagcctgtcattcgctttggctgatggtagccacaagaacatgcagcgcgaccagagcgagccgctgggtcgagtcctcagccgcatcgctaccaatgccctaaagggtcacgctaaggcggccgccgccaagaagagcaggaagagccggccgaatgctagcggcggtgcggcctgttcagggccggggcctgagccggctgtgttctgcgagcccgtggtgaagctgtactaccgggaagaggcagtggctgaggacgtgctcaacgtggatgcctggcaagacggcgcggtgctgcagatcggcgatgttaagtacaaggtggagcgcaacccgcccgccttcaccgaactgcagttgccgcgctacatcatggccgggttccctgtgtgccccaaactcagcctcgaatttggggatcccgccagctcccttttccgctggtataaggaagccaagcccggagcggcggagcccgaggtcggtgtcccctcgtcattgtctccctcctcaccttcttcttcttggactgagactgatgtggaggagcgtgtctacaccccgtccaatgccgacatcgggctaaggctcaagcttcactgcaccccaggcgatgggcagcgctttgggcacagccgggagttggaaagtgtgtgtgtggtagaggctgggcctggcacctgcacttttgaccaccggcatctctacacgaagaaggtgactgaggacgctctcatccgcactgtctcttacaacatcctggcagacacgtacgcgcagactgagttctcgcgaacggttctgtacccatactgtgccccctacgccctggagctcgactaccgccagaaccttatccagaaggaactcaccggctacaacgccgatgtcatctgtttgcaggaggttgaccgcgcagtgttttctgacagcttggtacccgccctagaggccttcgggctcgagggggtgtttcgaatcaagcagcacgaaggcctggccactttctaccgaaagtctaagttcagccttcttagccagcatgacatttcattctacgaagccctcgagtccgacccacttcacaaagaactgctggagaaactagttttgtacccatcagcgcaggagaaggtgctccagagatcttctgttcttcaggtttcagttcttcagtctacaaaggactcttctaaaaggatatgtgttgctaatacccatctttactggcatcctaaaggtaggttttatttggtatcacaagtgacttaaacacgcttaaagttgtttaaagtgttttacacaaatgcatatcttgaacgtcacccagagactgtaatttgtgtagtttttcttttttaacttaaagacaactttaaaaaatacttacattaatgttttttatattcataggtgggtatattcgcctcattcaaatggcagtagccttggctcacataagacatgtttcatgtgatctgtatcctggcataccagttatattttgtggggactttaatagtacaccatcaacaggaatgtatcattttgtcatcaatggcagcattccagaggatcatgaagactgggcttccaatggggaggaggaaagatgcaatatgtctcttacacatttcttcaagctgaaaagtgcttgtggtgaacctgcttacacaaattatgttggtggctttcatggatgtctagattacattttcattgacttaaatgctttagaggttgaacaggtgattccattacctagtcatgaagaagttaccacccaccaggccttacctagtgtttcccatccctctgatcacatagcacttgtatgtgatttaaaatggaaatagatgtgtgtttaatggaattgaagtctgaaaaggaagtagttattttagcagaaaatttaatatgaatcaaagcttatatgtaaacttcaaggaggaatggtaaaatgttcagccctcctagttatgttcctgatgtcttcgttatgaaactgttgatgtttgcatcatacatcttctctttccttgttttcctctacaattggaggagaaacaaatatatttcttactagcaaaatagaaaattgaattatttttctccaaattgagactctcagaaaaggaagattgaattagcgtgttttttgtttgtttgtttttgtttttgtttttgtttttttgagatggagtttcactcttgttgcccaggctggagtgcaatggcacaatctcggctcactgcaacctccgccccctgggtttaagcgattctcctgcctcagcttcccgagtagctgggattacaggcgtgcgccaacatgtctggctaatttttgtatttttagtagaaatggggtttcgccacgttggccaggctggtcttgaactcctgacctcaggtgatccacccacctcggcctcccaaagtgttgggattacaggcgtgagccaccgcacccggcccttgtgtacatttttataagagaatttttttagctaggagttcagaatttttaaagtaccatttgaatgatcttaatttttctttcatgacaacacattccaaaatgaatcatgcttatgtactaagagggaaaatgtatttaagttaagggtgagagacttaagttataggtgaccttagagacctaaggtgagagacttgacacatggaaggagtaacattagggtctacctctacctcaatttagttagcgatttactacaatttcagagctttaacaaaagataaaaataaatcgtcaccaattgtta

SEQ ID NO: 165296 - DNA, 2338 bp, Homo sapiens
  Payload ID: 12549
  Gene Symbol: PDE1A
  Gene Name: phosphodiesterase 1A, calmodulin-dependent
  Uniprot ID: P54750
  ENST ID: ENST00000351439
  CDS Start-End: 419-1978
gagggacttagcctttcggagcttgaccagcatgtggaaggagagctctcatggctgcaataacttagggagttcctacctggatgacactggggtaggaagttttctgtttgttttgttctgtttcggagggtcccgtgcacttctcttgcctggatcaacgtgactcttggtggtttttgcacaccctgctctgtgggggagtgccccaacgtgcctgtcttatgtggcctctatggacacactgctcagctggcagagaacagggaagttttctcccagcacccaaaaagagaaagaggaaactactttttctttctgggctccttgcagcacaatagatcaggataagcttccacatttcctctctggagtttctggagtggtttccaggaagaagttaaaccttcacctttaaatggatgaccatgtcacaatcaggaagaaacatctccaaagacccatctttagactaagatgcttggtgaagcagctggaaagaggtgatgttaacgtcgtcgacttaaagaagaatattgaatatgcggcatctgtgctggaagcagtttatatcgatgaaacaagaagacttctggatactgaagatgagctcagtgacattcagactgactcagtcccatctgaagtccgggactggttggcttctacctttacacggaaaatggggatgacaaaaaagaaacctgaggaaaaaccaaaatttcggagcattgtgcatgctgttcaagctggaatttttgtggaaagaatgtaccgaaaaacatatcatatggttggtttggcatatccagcagctgtcatcgtaacattaaaggatgttgataaatggtctttcgatgtatttgccctaaatgaagcaagtggagagcatagtctgaagtttatgatttatgaactgtttaccagatatgatcttatcaaccgtttcaagattcctgtttcttgcctaatcacctttgcagaagctttagaagttggttacagcaagtacaaaaatccatatcacaatttgattcatgcagctgatgtcactcaaactgtgcattacataatgcttcatacaggtatcatgcactggctcactgaactggaaattttagcaatggtctttgctgctgccattcatgattatgagcatacagggacaacaaacaactttcacattcagacaaggtcagatgttgccattttgtataatgatcgctctgtccttgagaatcaccacgtgagtgcagcttatcgacttatgcaagaagaagaaatgaatatcttgataaatttatccaaagatgactggagggatcttcggaacctagtgattgaaatggttttatctacagacatgtcaggtcacttccagcaaattaaaaatataagaaacagtttgcagcagcctgaagggattgacagagccaaaaccatgtccctgattctccacgcagcagacatcagccacccagccaaatcctggaagctgcattatcggtggaccatggccctaatggaggagtttttcctgcagggagataaagaagctgaattagggcttccattttccccactttgtgatcggaagtcaaccatggtggcccagtcacaaataggtttcatcgatttcatagtagagccaacattttctcttctgacagactcaacagagaaaattgttattcctcttatagaggaagcctcaaaagccgaaacttcttcctatgtggcaagcagctcaaccaccattgtggggttacacattgctgatgcactaagacgatcaaatacaaaaggctccatgagtgatgggtcctattccccagactactcccttgcagcagtggacctgaagagtttcaagaacaacctggtggacatcattcagcagaacaaagagaggtggaaagagttagctgcacaagaagcaagaaccagttcacagaagtgtgagtttattcatcagtaaacacctttaagtaaaacctcgtgcatggtggcagctctaatttgaccaaaagacttggagattttgattatgcttgctggaaatctaccctgtcctgtgtgagacaggaaatctatttttgcagattgctcaataagcatcatgagccacataaataacagctgtaaactccttaattcaccgggctcaactgctaccgaacagattcatctagtggctacatcagcaccttgtgctttcagatatctgtttcaatggcattttgtggcatttgtctttaccgagtgccaataaattttctttgagcagctaattgctaattttgtcatttctacaataaagcttggtccacctgttttc

SEQ ID NO: 165297 - DNA, 2015 bp, Homo sapiens
  Payload ID: 12549
  Gene Symbol: PDE1A
  Gene Name: phosphodiesterase 1A, calmodulin-dependent
  Uniprot ID: P54750
  ENST ID: ENST00000358139
  CDS Start-End: 150-1655
acaatgattcctattccacttgttctacctacactgtatctgatcactgcataagagatagtagaaatggcattatctttaaagtagtgatattttcaagccatgaagtttagtgacttgctgaaatgggctagggaatctaatttcaaatgggcaaaaagataaacaaactattttgctttaattttctagttcagtgttttaggggtaaatcaaaaccatccaaatgtcagatcagaaagaaagttaaaaatcatatagaaagacttctggatactgaagatgagctcagtgacattcagactgactcagtcccatctgaagtccgggactggttggcttctacctttacacggaaaatggggatgacaaaaaagaaacctgaggaaaaaccaaaatttcggagcattgtgcatgctgttcaagctggaatttttgtggaaagaatgtaccgaaaaacatatcatatggttggtttggcatatccagcagctgtcatcgtaacattaaaggatgttgataaatggtctttcgatgtatttgccctaaatgaagcaagtggagagcatagtctgaagtttatgatttatgaactgtttaccagatatgatcttatcaaccgtttcaagattcctgtttcttgcctaatcacctttgcagaagctttagaagttggttacagcaagtacaaaaatccatatcacaatttgattcatgcagctgatgtcactcaaactgtgcattacataatgcttcatacaggtatcatgcactggctcactgaactggaaattttagcaatggtctttgctgctgccattcatgattatgagcatacagggacaacaaacaactttcacattcagacaaggtcagatgttgccattttgtataatgatcgctctgtccttgagaatcaccacgtgagtgcagcttatcgacttatgcaagaagaagaaatgaatatcttgataaatttatccaaagatgactggagggatcttcggaacctagtgattgaaatggttttatctacagacatgtcaggtcacttccagcaaattaaaaatataagaaacagtttgcagcagcctgaagggattgacagagccaaaaccatgtccctgattctccacgcagcagacatcagccacccagccaaatcctggaagctgcattatcggtggaccatggccctaatggaggagtttttcctgcagggagataaagaagctgaattagggcttccattttccccactttgtgatcggaagtcaaccatggtggcccagtcacaaataggtttcatcgatttcatagtagagccaacattttctcttctgacagactcaacagagaaaattgttattcctcttatagaggaagcctcaaaagccgaaacttcttcctatgtggcaagcagctcaaccaccattgtggggttacacattgctgatgcactaagacgatcaaatacaaaaggctccatgagtgatgggtcctattccccagactactcccttgcagcagtggacctgaagagtttcaagaacaacctggtggacatcattcagcagaacaaagagaggtggaaagagttagctgcacaagaagcaagaaccagttcacagaagtgtgagtttattcatcagtaaacacctttaagtaaaacctcgtgcatggtggcagctctaatttgaccaaaagacttggagattttgattatgcttgctggaaatctaccctgtcctgtgtgagacaggaaatctatttttgcagattgctcaataagcatcatgagccacataaataacagctgtaaactccttaattcaccgggctcaactgctaccgaacagattcatctagtggctacatcagcaccttgtgctttcagatatctgtttcaatggcattttgtggcatttgtctttaccgagtgccaataaattttctttgagcagctaattgctaattttgtcatttctacaataaagcttggtccacctgttttc

SEQ ID NO: 165298 - DNA, 2034 bp, Homo sapiens
  Payload ID: 12549
  Gene Symbol: PDE1A
  Gene Name: phosphodiesterase 1A, calmodulin-dependent
  Uniprot ID: P54750
  ENST ID: ENST00000409365
  CDS Start-End: 402-1991
ggagcttgaccagcatgtggaaggagagctctcatggctgcaataacttagggagttcctacctggatgacactggggtaggaagttttctgtttgttttgttctgtttcggagggtcccgtgcacttctcttgcctggatcaacgtgactcttggtggtttttgcacaccctgctctgtgggggagtgccccaacgtgcctgtcttatgtggcctctatggacacactgctcagctggcagagaacagggaagttttctcccagcacccaaaaagagaaagaggaaactactttttctttctgggctccttgcagcacaatagatcaggataagcttccacatttcctctctggagtttctggagtggtttccaggaagaagttaaaccttcacctttaaatggatgaccatgtcacaatcaggaagaaacatctccaaagacccatctttagactaagatgcttggtgaagcagctggaaagaggtgatgttaacgtcgtcgacttaaagaagaatattgaatatgcggcatctgtgctggaagcagtttatatcgatgaaacaagaagacttctggatactgaagatgagctcagtgacattcagactgactcagtcccatctgaagtccgggactggttggcttctacctttacacggaaaatggggatgacaaaaaagaaacctgaggaaaaaccaaaatttcggagcattgtgcatgctgttcaagctggaatttttgtggaaagaatgtaccgaaaaacatatcatatggttggtttggcatatccagcagctgtcatcgtaacattaaaggatgttgataaatggtctttcgatgtatttgccctaaatgaagcaagtggagagcatagtctgaagtttatgatttatgaactgtttaccagatatgatcttatcaaccgtttcaagattcctgtttcttgcctaatcacctttgcagaagctttagaagttggttacagcaagtacaaaaatccatatcacaatttgattcatgcagctgatgtcactcaaactgtgcattacataatgcttcatacaggtatcatgcactggctcactgaactggaaattttagcaatggtctttgctgctgccattcatgattatgagcatacagggacaacaaacaactttcacattcagacaaggtcagatgttgccattttgtataatgatcgctctgtccttgagaatcaccacgtgagtgcagcttatcgacttatgcaagaagaagaaatgaatatcttgataaatttatccaaagatgactggagggatcttcggaacctagtgattgaaatggttttatctacagacatgtcaggtcacttccagcaaattaaaaatataagaaacagtttgcagcagcctgaagggattgacagagccaaaaccatgtccctgattctccacgcagcagacatcagccacccagccaaatcctggaagctgcattatcggtggaccatggccctaatggaggagtttttcctgcagggagataaagaagctgaattagggcttccattttccccactttgtgatcggaagtcaaccatggtggcccagtcacaaataggtttcatcgatttcatagtagagccaacattttctcttctgacagactcaacagagaaaattgttattcctcttatagaggaagcctcaaaagccgaaacttcttcctatgtggcaagcagctcaaccaccattgtggggttacacattgctgatgcactaagacgatcaaatacaaaaggctccatgagtgatgggtcctattccccagactactcccttgcagcagtggacctgaagagtttcaagaacaacctggtggacatcattcagcagaacaaagagaggtggaaagagttagctgcacaaggtgaatctgatcttcataagaactcagaagacttagtaaatgctgaagaaaaacatgatgagacacattcataggcccgaaacaccttaaagacttctgtcattttaaacatgagag

SEQ ID NO: 165299 - DNA, 2000 bp, Homo sapiens
  Payload ID: 12549
  Gene Symbol: PDE1A
  Gene Name: phosphodiesterase 1A, calmodulin-dependent
  Uniprot ID: P54750
  ENST ID: ENST00000410103
  CDS Start-End: 85-1692
gaattctgatgtgcttcagtgcacagaacagtaacagatgagctgcttttggggagagcttgagtactcagtcggagcatcatcatggggtctagtgccacagagattgaagaattggaaaacaccacttttaagtatcttacaggagaacagactgaaaaaatgtggcagcgcctgaaaggaatactaagatgcttggtgaagcagctggaaagaggtgatgttaacgtcgtcgacttaaagaagaatattgaatatgcggcatctgtgctggaagcagtttatatcgatgaaacaagaagacttctggatactgaagatgagctcagtgacattcagactgactcagtcccatctgaagtccgggactggttggcttctacctttacacggaaaatggggatgacaaaaaagaaacctgaggaaaaaccaaaatttcggagcattgtgcatgctgttcaagctggaatttttgtggaaagaatgtaccgaaaaacatatcatatggttggtttggcatatccagcagctgtcatcgtaacattaaaggatgttgataaatggtctttcgatgtatttgccctaaatgaagcaagtggagagcatagtctgaagtttatgatttatgaactgtttaccagatatgatcttatcaaccgtttcaagattcctgtttcttgcctaatcacctttgcagaagctttagaagttggttacagcaagtacaaaaatccatatcacaatttgattcatgcagctgatgtcactcaaactgtgcattacataatgcttcatacaggtatcatgcactggctcactgaactggaaattttagcaatggtctttgctgctgccattcatgattatgagcatacagggacaacaaacaactttcacattcagacaaggtcagatgttgccattttgtataatgatcgctctgtccttgagaatcaccacgtgagtgcagcttatcgacttatgcaagaagaagaaatgaatatcttgataaatttatccaaagatgactggagggatcttcggaacctagtgattgaaatggttttatctacagacatgtcaggtcacttccagcaaattaaaaatataagaaacagtttgcagcagcctgaagggattgacagagccaaaaccatgtccctgattctccacgcagcagacatcagccacccagccaaatcctggaagctgcattatcggtggaccatggccctaatggaggagtttttcctgcagggagataaagaagctgaattagggcttccattttccccactttgtgatcggaagtcaaccatggtggcccagtcacaaataggtttcatcgatttcatagtagagccaacattttctcttctgacagactcaacagagaaaattgttattcctcttatagaggaagcctcaaaagccgaaacttcttcctatgtggcaagcagctcaaccaccattgtggggttacacattgctgatgcactaagacgatcaaatacaaaaggctccatgagtgatgggtcctattccccagactactcccttgcagcagtggacctgaagagtttcaagaacaacctggtggacatcattcagcagaacaaagagaggtggaaagagttagctgcacaagaagcaagaaccagttcacagaagtgtgagtttattcatcagtaaacacctttaagtaaaacctcgtgcatggtggcagctctaatttgaccaaaagacttggagattttgattatgcttgctggaaatctaccctgtcctgtgtgagacaggaaatctatttttgcagattgctcaataagcatcatgagccacataaataacagctgtaaactccttaattcaccgggctcaactgctaccgaacagattcatctagtggctacatcagcaccttgtgctttcagatatctgtttcaatggcattttgtggcatttgtctttaccgagtgccaataaattttctttgagca

SEQ ID NO: 165300 - DNA, 4885 bp, Homo sapiens
  Payload ID: 12549
  Gene Symbol: PDE1A
  Gene Name: phosphodiesterase 1A, calmodulin-dependent
  Uniprot ID: P54750
  ENST ID: ENST00000435564
  CDS Start-End: 202-1839
ggtgaggtggtgagcagtggatatatgcctgtcaaagtcaatagcaaatctgtcagagtcttccctcagctttgtacatcagcactgttttgatagataagagaggctactgtataagtgtgtaagatttgtaatggactgaggaatgcttgttctagctgctgaaactgactgtaactgtattgtcttaggagcatcatcatggggtctagtgccacagagattgaagaattggaaaacaccacttttaagtatcttacaggagaacagactgaaaaaatgtggcagcgcctgaaaggaatactaagatgcttggtgaagcagctggaaagaggtgatgttaacgtcgtcgacttaaagaagaatattgaatatgcggcatctgtgctggaagcagtttatatcgatgaaacaagaagacttctggatactgaagatgagctcagtgacattcagactgactcagtcccatctgaagtccgggactggttggcttctacctttacacggaaaatggggatgacaaaaaagaaacctgaggaaaaaccaaaatttcggagcattgtgcatgctgttcaagctggaatttttgtggaaagaatgtaccgaaaaacatatcatatggttggtttggcatatccagcagctgtcatcgtaacattaaaggatgttgataaatggtctttcgatgtatttgccctaaatgaagcaagtggagagcatagtctgaagtttatgatttatgaactgtttaccagatatgatcttatcaaccgtttcaagattcctgtttcttgcctaatcacctttgcagaagctttagaagttggttacagcaagtacaaaaatccatatcacaatttgattcatgcagctgatgtcactcaaactgtgcattacataatgcttcatacaggtatcatgcactggctcactgaactggaaattttagcaatggtctttgctgctgccattcatgattatgagcatacagggacaacaaacaactttcacattcagacaaggtcagatgttgccattttgtataatgatcgctctgtccttgagaatcaccacgtgagtgcagcttatcgacttatgcaagaagaagaaatgaatatcttgataaatttatccaaagatgactggagggatcttcggaacctagtgattgaaatggttttatctacagacatgtcaggtcacttccagcaaattaaaaatataagaaacagtttgcagcagcctgaagggattgacagagccaaaaccatgtccctgattctccacgcagcagacatcagccacccagccaaatcctggaagctgcattatcggtggaccatggccctaatggaggagtttttcctgcagggagataaagaagctgaattagggcttccattttccccactttgtgatcggaagtcaaccatggtggcccagtcacaaataggtttcatcgatttcatagtagagccaacattttctcttctgacagactcaacagagaaaattgttattcctcttatagaggaagcctcaaaagccgaaacttcttcctatgtggcaagcagctcaaccaccattgtggggttacacattgctgatgcactaagacgatcaaatacaaaaggctccatgagtgatgggtcctattccccagactactcccttgcagcagtggacctgaagagtttcaagaacaacctggtggacatcattcagcagaacaaagagaggtggaaagagttagctgcacaaggtgaatctgatcttcataagaactcagaagacttagtaaatgctgaagaaaaacatgatgagacacattcataggcccgaaacaccttaaagacttctgtcattttaaacatgagaggacaatgaaatcagcatgaaaacatcctaaattctcaactttccacaaagctatggctcttctttcaacatagaattggattgggccattttaattgactcctatacaaggaattaagaagaacataaattttgagctagtaactctggccaaataaatacactcaagtttttatcagagtttttggccagtgcttctgccatttttttccctccacaatttggccttcttcaatcaagccagataaatttttgagacaaaagtcagacagtttttaatttttcttgctttgaaccctgtcataatgactgtgcaatacatgtgcagaagatgaggtattttaaaatttacttccttgcactgtcttacacagagtgctataactataaatttttcaaggtcttaaataaaaggaagcaaaaacaaaattattgaaaaattttttttgttgtgctggggaatatactatttagattgtccttcttattttaaatgcatgggaacagaatgacaggtgggatgctgaggagctggttgaagcatcagagcaatgctacagtccaacaatggagcattagatccccagctaggtgacctgatgaacacctttgtaaactctcatactgggaaatggcagtgaaacctttttctgaacccgtggaccagcctgcgtccgtccccatggtttcaaagcacgaatgcattacctccatggttgtggttacaagcaagtcacatgctatctacagttcatgataacaagaccgtcaaccattgctggagacagacactagaatggaaaatgaaatttgccagcgggatgtttatcccatcagaatgtaacaaaatatattaccagccaagagataagagacaagaatgtgtgtgtgtgtgtgtgtgtgtgtgtgtgtgtgttcaaaaatgtctatgaaaatgaaaacccacacttttctgtacagataacattatttgatgtgacttttatattttactacacagaaacaaactgcagccctcagaggccctgcttccttgtcatgttttgcctgagcatgtgcaaagtctttcctttgcttaaagctgaaaaactacctttatgcattgttagctgacaagaaagatcaagcacaattagatgttgtaacttttcactgtacaagcattgcaatgattgtgagcttcagtgaatttatctttgtgaaaggtaaaaattggctggaaagaatcaggagtagccataaattaaatcatgcaaaggaggatccatgcatcctaacaagttttctgctgcatctgcttccttcctgggctccacaatgttaagcaatattttagaaaagggtacaattggaagcttttaagcctgagtggtgagattttataactcacaacttagatctcttttaatgtgtaagccatattctatatgcatatttattatgcatcattgtaatttaagatatatttggatgtaggctgtataaatgcttttaattgttctgtgaatagatccttagctttagtttcacctgaatcttgtgcaaaacacagctaaataattgaattgtattatagacattatgaggtaattgatcttttaaatgtaaggagtaagattgatctataataatgtgctggggaaaacatttatagatatgtacatcatggttactttttgtcctttcaaatggactttttatttctatttatggagagactgtaactactgcttttaatgtctttttaaagcaagctatttaccagcttgaaaatatcatgcatttaaaatagaatctatctggggagtctaattactattgttcctatttgagccagttgtctttcagtaaagctatagaatctctcaaagaagtaaatagaaatactacttcttaaatgtcataggaagcatatccactttgtttctattagtactttaagatctataagaccttattactaaaaagtagaggaatataaagaattcatcaatttctgtatatgggctttaacctaattttccaggttatgcgacttataaagcactgtgaccaaacttccagagacagtaaaaaaaaaaaaaagaaaaaaaagttttactccttcagaagtattgtcatgctactgctgtacttattttcctaatctctctctatctgctatactccctccttttctttctttttcttttaagcttttatatttattccttcctttgttttcctctctgtaagacagctactactgagcactaattagtagaaagtcagagtggaggttatctgtgcatgtctttctgcaaacattactgttgaggccatctgaagagagggattgataggttaggctgttgcaccgtgaatgtcctgctttgcatttttaacctcagctccccaacatatatatcttgcagtttatatgccttttcatttaaccgaaacctcttttatttaatttttaacataacaacctacaattcttgtgtttttattatgctgtatttttctgtgtttcttattacatgtgattgctaaataaatcatatttgagggaaaacattgtgaaacatttggtgttttatgcaattcaatttagtgaggcattgaaaagttggagaaattgggggaaacccaaaggagaccaacttaaaaattgatatgagtttggtaagaaagtgctttttgttccattaaataaatactgattgaattacttattattatacctattattcataagctcctggctggaagcatggtgcatatatgcatatggcaatatttcctctagaaatttcaagtcttataaaggagataatctacacagactgtaatttatacctaataactagaatgccacataaaaaagtaaccagttgcaaataaaatgcacctatgtatatttgaggaggtaaaaaactgcttctgtcttcagagctttcaggactaagtggtgcatcagttggcatttagtaaataaaaacaagtttataaacattgccta

SEQ ID NO: 165301 - DNA, 3444 bp, Homo sapiens
  Payload ID: 12550
  Gene Symbol: PDE1B
  Gene Name: phosphodiesterase 1B, calmodulin-dependent
  Uniprot ID: Q01064
  ENST ID: ENST00000243052
  CDS Start-End: 437-2047
gtaaacacgcactcacatccgccagtacagggcacacgcagccactcgtccccggcgcctgtgtgcgtgcgctcgcccttgggcgcttctgtctgtgtgtgcccccggcttccaatcgttcctttgggagggggaggagtggctgtgaggagtgagagactggcgggcaggctgaggagaagggagggagagcagagggaggggggaacccggccgggggaggaggagagaggcgaggaggcggctctggcagcgcgcggcggcggcggcggtagcggcagcagcagcggcggtgcggagagcttggactgggagcccaaagctcggctgggcagcgggagaggaggagccgcaggagctgcagctctgccagcttgggccgagcctagagacaccggcctggctggtccacgccagccgcagaccgtggctgagcatggagctgtccccccgcagtcctccggagatgctggaggagtcggattgcccgtcacccctggagctgaagtcagcccccagcaagaagatgtggattaagcttcggtctctgctgcgctacatggtgaagcagttggagaatggggagataaacattgaggagctgaagaaaaatctggagtacacagcttctctgctggaagccgtctacatagatgagacacggcaaatcttggacacggaggacgagctgcaggagctgcggtcagatgccgtgccttcggaggtgcgggactggctggcctccaccttcacccagcaggcccgggccaaaggccgccgagcagaggagaagcccaagttccgaagcattgtgcacgctgtgcaggctgggatcttcgtggaacggatgttccggagaacatacacctctgtgggccccacttactctactgcggttctcaactgtctcaagaacctggatctctggtgctttgatgtcttttccttgaaccaggcagcagatgaccatgccctgaggaccattgtttttgagttgctgactcggcataacctcatcagccgcttcaagattcccactgtgtttttgatgagtttcctggatgccttggagacaggctatgggaagtacaagaatccttaccacaaccagatccacgcagccgatgttacccagacagtccattgcttcttgctccgcacagggatggtgcactgcctgtcggagattgagctcctggccatcatctttgctgcagctatccatgattatgagcacacgggcactaccaacagcttccacatccagaccaagtcagaatgtgccatcgtgtacaatgatcgttcagtgctggagaatcaccacatcagctctgttttccgattgatgcaggatgatgagatgaacattttcatcaacctcaccaaggatgagtttgtagaactccgagccctggtcattgagatggtgttggccacagacatgtcctgccatttccagcaagtgaagaccatgaagacagccttgcaacagctggagaggattgacaagcccaaggccctgtctctactgctccatgctgctgacatcagccacccaaccaagcagtggttggtccacagccgttggaccaaggccctcatggaggaattcttccgtcagggtgacaaggaggcagagttgggcctgcccttttctccactctgtgaccgcacttccactctagtggcacagtctcagatagggttcatcgacttcattgtggagcccacattctctgtgctgactgacgtggcagagaagagtgttcagcccctggcggatgaggactccaagtctaaaaaccagcccagctttcagtggcgccagccctctctggatgtggaagtgggagaccccaaccctgatgtggtcagctttcgttccacctgggtcaagcgcattcaggagaataagcagaaatggaaggaacgggcagcaagtggcatcaccaaccagatgtccattgacgagctgtccccctgtgaagaagaggcccccccatcccctgccgaagatgaacacaaccagaatgggaatctggattagccctggggctggcccaggtcttcattgagtccaaagtgtttgatgtcatcagcaccatccatcaggactggctcccccatctgctccaagggagcgtggtcgtggaagaaacaacccacctgaaggccaaatgccagagatttggggttggggaaagggcccctccccacctgacacccactggggtgcactttaatgttccggcagcaagactggggaacttcaggctcccagtggtcactgtgcccatccctcagcctctggattctcttcatggccaggtggctgccagggagcggggagcttcctggaggcttcccagggccttggggaagggtcagagatgccagccccctgggacctcccccatcctttttgcctccaagtttctaagcaatacattttgggggttccctcagccccccaccccagatcttagctggcaggtctgggtgccccttttcctcccctgggaagggctggaataggatagaaagctgggggttttcagagccctatgtgtggggaggggagtggattccttcagggcatggtacctttctaggacctgggaatggggtggagaggacatcctcttcaccccagaattgcgctgcttcagccccatctccagcctgatcctctgaatcttccttccctccctttctgatacagtgactggggcaaaaggagccattgtgaccaggggctgcgggaggcctttcctgggaccttccttgggactggtctgggcccctggggcttgtcgcctgccctgagtccggagccctttgcctccttcctctcccctggggctgggaggctccatccgaccaatgtctgtaaagtgctttgaggatctccccagcaaagcaccttcagaatgtatcgacaccagctgggttagggtcaagggtgcctggggagggtgagtaatcctgcattgctaaaagagagggtctgtcccctcctctccacgtcccagaactggcccagctgcaggcactaagaagctcctcccctgagacaagtgaggggtagtcggtgaaaggcagatggacaaggggctcagggctgctgccttcctgtcctctggagagaacccagccaggcgcggtgccccttcctctcctcaggctcctccttgcccccaccttgccccaggaaaggccaaagtccaggtgactgccctccttctttcttgtaaataccaaccatgcatttgtacagtgggccctgttcatgcgaaatccacatccatggtctcctagacctgctaccctggtacttccaccctaccccaccccgagaagggcagagacgcatgtgactcacccctgcccttggtttcccagacccctgctatagccagagaacaataaagaagggagaccagg

SEQ ID NO: 165302 - DNA, 1711 bp, Homo sapiens
  Payload ID: 12550
  Gene Symbol: PDE1B
  Gene Name: phosphodiesterase 1B, calmodulin-dependent
  ENST ID: ENST00000538346
  CDS Start-End: 137-1624
gattctctttggcacagatgttggcaggtgcgaggaagcacggccctgacacgcgtggccaggccacatgtgcaaggcatgtgcggagcaagctggccagttggagcgggcttaggagttgcaaaggctgcgctacatggtgaagcagttggagaatggggagataaacattgaggagctgaagaaaaatctggagtacacagcttctctgctggaagccgtctacatagatgagacacggcaaatcttggacacggaggacgagctgcaggagctgcggtcagatgccgtgccttcggaggtgcgggactggctggcctccaccttcacccagcaggcccgggccaaaggccgccgagcagaggagaagcccaagttccgaagcattgtgcacgctgtgcaggctgggatcttcgtggaacggatgttccggagaacatacacctctgtgggccccacttactctactgcggttctcaactgtctcaagaacctggatctctggtgctttgatgtcttttccttgaaccaggcagcagatgaccatgccctgaggaccattgtttttgagttgctgactcggcataacctcatcagccgcttcaagattcccactgtgtttttgatgagtttcctggatgccttggagacaggctatgggaagtacaagaatccttaccacaaccagatccacgcagccgatgttacccagacagtccattgcttcttgctccgcacagggatggtgcactgcctgtcggagattgagctcctggccatcatctttgctgcagctatccatgattatgagcacacgggcactaccaacagcttccacatccagaccaagtcagaatgtgccatcgtgtacaatgatcgttcagtgctggagaatcaccacatcagctctgttttccgattgatgcaggatgatgagatgaacattttcatcaacctcaccaaggatgagtttgtagaactccgagccctggtcattgagatggtgttggccacagacatgtcctgccatttccagcaagtgaagaccatgaagacagccttgcaacagctggagaggattgacaagcccaaggccctgtctctactgctccatgctgctgacatcagccacccaaccaagcagtggttggtccacagccgttggaccaaggccctcatggaggaattcttccgtcagggtgacaaggaggcagagttgggcctgcccttttctccactctgtgaccgcacttccactctagtggcacagtctcagatagggttcatcgacttcattgtggagcccacattctctgtgctgactgacgtggcagagaagagtgttcagcccctggcggatgaggactccaagtctaaaaaccagcccagctttcagtggcgccagccctctctggatgtggaagtgggagaccccaaccctgatgtggtcagctttcgttccacctgggtcaagcgcattcaggagaataagcagaaatggaaggaacgggcagcaagtggcatcaccaaccagatgtccattgacgagctgtccccctgtgaagaagaggcccccccatcccctgccgaagatgaacacaaccagaatgggaatctggattagccctggggctggcccaggtcttcattgagtccaaagtgtttgatgtcatcagcaccatccatcaggactggctcccccatctgctcc

SEQ ID NO: 165303 - DNA, 2209 bp, Homo sapiens
  Payload ID: 12550
  Gene Symbol: PDE1B
  Gene Name: phosphodiesterase 1B, calmodulin-dependent
  ENST ID: ENST00000550285
  CDS Start-End: 119-694
aaagctcggctgggcagcgggagaggaggagccgcaggagctgcagctctgccagcttgggccgagcctagagacaccggcctggctggtccacgccagccgcagaccgtggctgagcatggagctgtccccccgcagtcctccggagatgctggaggagtcggattgcccgtcacccctggagctgaagtcagcccccagcaagaagatgtggattaagcttcggtctctgctgcgctacatggtgaagcagttggagaatggggagataaacattgaggagctgaagaaaaatctggagtacacagcttctctgctggaagccgtctacatagatgagacacgggtctctaggctgtggaagcacctgctgtctttcctctgtgactccccttctggggtctcaggcaaatcttggacacggaggacgagctgcaggagctgcggtcagatgccgtgccttcggaggtgcgggactggctggcctccaccttcacccagcaggcccgggccaaaggccgccgagcagaggagaagcccaagttccgaagcattgtgcacgctgtgcaggctgggatcttcgtggaacggatgttccggagaacatacacctctgtgggccccacttactctactgcggttctcaactgtctcaagaacctggatctctggtgctttgatgtcttttccttgaaccaggcagcagatgaccatgccctgaggaccattgtttttgagttgctgactcggcataacctcatcagccgcttcaagattcccactgtgtttttgatgagtttcctggatgccttggagacaggctatgggaagtacaagaatccttaccacaaccagatccacgcagccgatgttacccagacagtccattgcttcttgctccgcacagggatggtgcactgcctgtcggagattgagctcctggccatcatctttgctgcagctatccatgattatgagcacacgggcactaccaacagcttccacatccagaccaagtcagaatgtgccatcgtgtacaatgatcgttcagtgctggagaatcaccacatcagctctgttttccgattgatgcaggatgatgagatgaacattttcatcaacctcaccaaggatgagtttgtagaactccgagccctggtcattgagatggtgttggccacagacatgtcctgccatttccagcaagtgaagaccatgaagacagccttgcaacagctggagaggattgacaagcccaaggccctgtctctactgctccatgctgctgacatcagccacccaaccaagcagtggttggtccacagccgttggaccaaggccctcatggaggaattcttccgtcagggtgacaaggaggcagagttgggcctgcccttttctccactctgtgaccgcacttccactctagtggcacagtctcagatagggttcatcgacttcattgtggagcccacattctctgtgctgactgacgtggcagagaagagtgttcagcccctggcggatgaggactccaagtctaaaaaccagcccagctttcagtggcgccagccctctctggatgtggaagtgggagaccccaaccctgatgtggtcagctttcgttccacctgggtcaagcgcattcaggagaataagcagaaatggaaggaacgggcagcaagtggcatcaccaaccagatgtccattgacgagctgtccccctgtgaagaagaggcccccccatcccctgccgaagatgaacacaaccagaatgggaatctggattagccctggggctggcccaggtcttcattgagtccaaagtgtttgatgtcatcagcaccatccatcaggactggctcccccatctgctccaagggagcgtggtcgtggaagaaacaacccacctgaaggccaaatgccagagatttggggttggggaaagggcccctccccacctgacacccactggggtgcactttaatgttccggcagcaagactggggaacttcaggctcccagtggtcactgtgcccatccctcagcctctggattctcttcatggccaggtggctgccagggagcggggagcttcctggaggcttcccagggccttggggaagggtcagagatgccagccccctgggacctcccccatcctttttgcctccaagtttctaagcaatacattttgggggttccctca

SEQ ID NO: 165304 - DNA, 2150 bp, Homo sapiens
  Payload ID: 12550
  Gene Symbol: PDE1B
  Gene Name: phosphodiesterase 1B, calmodulin-dependent
  Uniprot ID: Q01064
  ENST ID: ENST00000550620
  CDS Start-End: 129-1679
agttgctcagttctactgggacctggaggaggaaggcaggggccaaagaggaagttgtcccctcttgggggccctggggctcctggggtcaggattttgatactctgaagcaggaaactttgattcccatggcaaaccctgttcctgttcagaggagccacctccagggccccattctcaggctgcgctacatggtgaagcagttggagaatggggagataaacattgaggagctgaagaaaaatctggagtacacagcttctctgctggaagccgtctacatagatgagacacggcaaatcttggacacggaggacgagctgcaggagctgcggtcagatgccgtgccttcggaggtgcgggactggctggcctccaccttcacccagcaggcccgggccaaaggccgccgagcagaggagaagcccaagttccgaagcattgtgcacgctgtgcaggctgggatcttcgtggaacggatgttccggagaacatacacctctgtgggccccacttactctactgcggttctcaactgtctcaagaacctggatctctggtgctttgatgtcttttccttgaaccaggcagcagatgaccatgccctgaggaccattgtttttgagttgctgactcggcataacctcatcagccgcttcaagattcccactgtgtttttgatgagtttcctggatgccttggagacaggctatgggaagtacaagaatccttaccacaaccagatccacgcagccgatgttacccagacagtccattgcttcttgctccgcacagggatggtgcactgcctgtcggagattgagctcctggccatcatctttgctgcagctatccatgattatgagcacacgggcactaccaacagcttccacatccagaccaagtcagaatgtgccatcgtgtacaatgatcgttcagtgctggagaatcaccacatcagctctgttttccgattgatgcaggatgatgagatgaacattttcatcaacctcaccaaggatgagtttgtagaactccgagccctggtcattgagatggtgttggccacagacatgtcctgccatttccagcaagtgaagaccatgaagacagccttgcaacagctggagaggattgacaagcccaaggccctgtctctactgctccatgctgctgacatcagccacccaaccaagcagtggttggtccacagccgttggaccaaggccctcatggaggaattcttccgtcagggtgacaaggaggcagagttgggcctgcccttttctccactctgtgaccgcacttccactctagtggcacagtctcagatagggttcatcgacttcattgtggagcccacattctctgtgctgactgacgtggcagagaagagtgttcagcccctggcggatgaggactccaagtctaaaaaccagcccagctttcagtggcgccagccctctctggatgtggaagtgggagaccccaaccctgatgtggtcagctttcgttccacctgggtcaagcgcattcaggagaataagcagaaatggaaggaacgggcagcaagtggcatcaccaaccagatgtccattgacgagctgtccccctgtgaagaagaggcccccccatcccctgccgaagatgaacacaaccagaatgggaatctggattagccctggggctggcccaggtcttcattgagtccaaagtgtttgatgtcatcagcaccatccatcaggactggctcccccatctgctccaagggagcgtggtcgtggaagaaacaacccacctgaaggccaaatgccagagatttggggttggggaaagggcccctccccacctgacacccactggggtgcactttaatgttccggcagcaagactggggaacttcaggctcccagtggtcactgtgcccatccctcagcctctggattctcttcatggccaggtggctgccagggagcggggagcttcctggaggcttcccagggccttggggaagggtcagagatgccagccccctgggacctcccccatcctttttgcctccaagtttctaagcaatacattttgggggttccctcagccccccaccccagatcttagctggcaggtctgggtgccccttttcctcccct

SEQ ID NO: 165305 - DNA, 628 bp, Homo sapiens
  Payload ID: 12550
  Gene Symbol: PDE1B
  Gene Name: phosphodiesterase 1B, calmodulin-dependent
  ENST ID: ENST00000611899
  CDS Start-End: 183-335
gcgcggcggcggcggcggtagcggcagcagcagcggcggtgcggagagcttggactgggagcccaaagctcggctgggcagcgggagaggaggagccgcaggagctgcagctctgccagcttgggccgagcctagagacaccggcctggctggtccacgccagccgcagaccgtggctgagcatggagctgtccccccgcagtcctccggagatgctggaggagtcggattgcccgtcacccctggagctgaagtcagcccccagcaagaagatgtggattaagcttcggtctctgccccatggagtgatcttctatggttcttaccagttttgaaaatcatgctgccattctcctttttctgtctatggatgtggagctgctgtgaagattgcagcataaactatggttccctggacctctggagaaaaaggagtgtcatttttctcatgccttggctgcgctacatggtgaagcagttggagaatggggagataaacattgaggagctgaagaaaaatctggagtacacagcttctctgctggaagccgtctacatagatgagacacggcaaatcttggacacggaggacgagctgcaggagctgcggtcagatgccgtgccttcg

SEQ ID NO: 165306 - DNA, 2898 bp, Homo sapiens
  Payload ID: 12551
  Gene Symbol: PDE1C
  Gene Name: phosphodiesterase 1C, calmodulin-dependent 70kDa
  Uniprot ID: Q14123
  ENST ID: ENST00000321453
  CDS Start-End: 461-2590
agcaagaaaacatcaagagtttttgagtgtggtgtgtggttcccttcgtccccatcagtcgcttcaatatttcaaaatggatccggttctgtggcgggtgcgagagtgaggctgtgggggacctccaggcccaacctccgcgaagcctcgcggcttctgcgtgccctggccccgggaggataaggatttcccttccctcctacttgcgcgcggagccgagctcttgttgaggtgagggttccggaagcccacgcagctccgcaggtcggtggtggccgcggctgccctgcgggggtgagtgtgcccggccggggtcggagcccagcgtgtgcccggcagacggcggtgcccgcgcgcccctccctccgcgcccgcggtgacagcccagacaccagcccgggcgctgacagacgacttttctcacttgtcagttttctcgcttgtcagcagagctgctgctatggagtcgccaaccaaggagattgaagaatttgagagcaactctctgaaatacctgcaaccggaacagatcgagaaaatctggcttcggctccgcgggctgaggaaatataagaaaacgtcccagagattacggtctttggtcaaacaattagagagaggggaagcttcagtggtagatcttaagaagaatttggaatatgcagccacagtgcttgaatctgtgtatattgatgaaacaaggagactcctggatacagaggatgagctcagtgacattcagtcagatgctgtgccttctgaggtccgagactggctggcctccaccttcacgcggcagatggggatgatgctcaggaggagcgacgagaagccccggttcaagagcatcgttcacgcagtgcaggctgggatatttgtggagagaatgtatagacggacatcaaacatggttggactgagctatccaccagctgttattgaggcattaaaggatgtggacaagtggtcctttgacgtcttttccctcaatgaggccagtggggatcatgcactgaaatttattttctatgaactactcacacgttatgatctgatcagccgtttcaagatccccatttctgcacttgtctcatttgtggaggccctggaagtgggatacagcaagcacaaaaatccttaccataacttaatgcacgctgccgatgttacacagacagtgcattacctcctctataagacaggagtggcgaactggctgacggagctggagatctttgctataatcttctcagctgccatccatgactacgagcataccggaaccaccaacaatttccacattcagactcggtctgatccagctattctgtataatgacagatctgtactggagaatcaccatttaagtgcagcttatcgccttctgcaagatgacgaggaaatgaatattttgattaacctctcaaaggatgactggagggagtttcgaaccttggtaattgaaatggtgatggccacagatatgtcttgtcacttccaacaaatcaaagcaatgaagactgctctgcagcagccagaagccattgaaaagccaaaagccttatcccttatgctgcatacagcagatattagccatccagcaaaagcatgggacctccatcatcgctggacaatgtcactcctggaggagttcttcagacagggtgacagagaagcagagctggggctgcctttttctcctctgtgtgaccgaaagtccactatggttgctcagtcacaagtaggtttcattgatttcatcgtggaacccaccttcactgtgcttacggacatgaccgagaagattgtgagtccattaatcgatgaaacctctcaaactggtgggacaggacagaggcgttcgagtttgaatagcatcagctcgtcagatgccaagcgatcaggtgtcaagacctctggttcagagggaagtgccccgatcaacaattctgtcatctccgttgactataagagctttaaagctacttggacggaagtggtgcacatcaatcgggagagatggagggccaaggtacccaaagaggagaaggccaagaaggaagcagaggaaaaggctcgcctggccgcagaggagcagcaaaaggaaatggaagccaaaagccaggctgaagaaggcgcatctggcaaagctgagaaaaagacgtctggagaaactaagaatcaagtcaatggaacacgggcaaacaaaagtgacaaccctcgtgggaaaaactccaaagccgagaagtcatcaggagaacagcaacagaatggtgacttcaaagatggtaaaaataagacagacaagaaggatcactctaacatcggaaatgattcaaagaaaacagatggcacaaaacagcgttctcacggctcaccagccccaagcaccagctccacgtgtcgccttacgttgccagtcatcaagcctcctttgcgtcattttaaacgccctgcttacgcatctagctcctatgcaccttcagtctcaaagaaaactgatgagcatcctgcaaggtacaagatgctggatcagaggatcaaaatgaaaaagattcagaacatctcacataactggaacagaaaataggccgaggggaagaagagagggagtgaaggagggtctacctatctgcttctcagcacccactggccacagcaggacacacctccaagacccttggaggctgttggagcaggtactatcctggttgactccaccaaggtgaaatgaaagttgtatgtgattttcctctttgttgttcttgtatagacttttcaattgctgtatgtgggatcagcccagacgccagcaacaaactagcaagaggggtgtttttatggtataagtctctaaaagtctaaattggaccaaaattaaaatgacacaaacttaaa

SEQ ID NO: 165307 - DNA, 2420 bp, Homo sapiens
  Payload ID: 12551
  Gene Symbol: PDE1C
  Gene Name: phosphodiesterase 1C, calmodulin-dependent 70kDa
  Uniprot ID: Q14123
  ENST ID: ENST00000396182
  CDS Start-End: 470-2374
cggctcccgctttgctcagccgccgcttttctctcccttctcactttctctcctccccacccagccctccttttcacctccaaaccctttagctgcgcgctgatcgcttctgtggctttgtttgggggtagggggagaatacgaatagacccgaggtgctttctcttggagctggagtccaatcccaatccctatctctatccctatccctgtgcttatccctgggcattagcccgggaccatggctggttcccgcagctgcctccggagcgcacctggggccatggtttgccgcgatcggagtccgctctaagtcggagtctgggggcgcagaagggggagcgcgccgagaaagtgccgggcaaacgcgcgccgcgcctggctgggcatcgcgagctgggcgaggagacggggaggggacagcccaaactatctcagcttcaccgccagtggtcacctacctgcagctatggagtcgccaaccaaggagattgaagaatttgagagcaactctctgaaatacctgcaaccggaacagatcgagaaaatctggcttcggctccgcgggctgaggaaatataagaaaacgtcccagagattacggtctttggtcaaacaattagagagaggggaagcttcagtggtagatcttaagaagaatttggaatatgcagccacagtgcttgaatctgtgtatattgatgaaacaaggagactcctggatacagaggatgagctcagtgacattcagtcagatgctgtgccttctgaggtccgagactggctggcctccaccttcacgcggcagatggggatgatgctcaggaggagcgacgagaagccccggttcaagagcatcgttcacgcagtgcaggctgggatatttgtggagagaatgtatagacggacatcaaacatggttggactgagctatccaccagctgttattgaggcattaaaggatgtggacaagtggtcctttgacgtcttttccctcaatgaggccagtggggatcatgcactgaaatttattttctatgaactactcacacgttatgatctgatcagccgtttcaagatccccatttctgcacttgtctcatttgtggaggccctggaagtgggatacagcaagcacaaaaatccttaccataacttaatgcacgctgccgatgttacacagacagtgcattacctcctctataagacaggagtggcgaactggctgacggagctggagatctttgctataatcttctcagctgccatccatgactacgagcataccggaaccaccaacaatttccacattcagactcggtctgatccagctattctgtataatgacagatctgtactggagaatcaccatttaagtgcagcttatcgccttctgcaagatgacgaggaaatgaatattttgattaacctctcaaaggatgactggagggagtttcgaaccttggtaattgaaatggtgatggccacagatatgtcttgtcacttccaacaaatcaaagcaatgaagactgctctgcagcagccagaagccattgaaaagccaaaagccttatcccttatgctgcatacagcagatattagccatccagcaaaagcatgggacctccatcatcgctggacaatgtcactcctggaggagttcttcagacagggtgacagagaagcagagctggggctgcctttttctcctctgtgtgaccgaaagtccactatggttgctcagtcacaagtaggtttcattgatttcatcgtggaacccaccttcactgtgcttacggacatgaccgagaagattgtgagtccattaatcgatgaaacctctcaaactggtgggacaggacagaggcgttcgagtttgaatagcatcagctcgtcagatgccaagcgatcaggtgtcaagacctctggttcagagggaagtgccccgatcaacaattctgtcatctccgttgactataagagctttaaagctacttggacggaagtggtgcacatcaatcgggagagatggagggccaaggtacccaaagaggagaaggccaagaaggaagcagaggaaaaggctcgcctggccgcagaggagcagcaaaaggaaatggaagccaaaagccaggctgaagaaggcgcatctggcaaagctgagaaaaagacgtctggagaaactaagaatcaagtcaatggaacacgggcaaacaaaagtgacaaccctcgtgggaaaaactccaaagccgagaagtcatcaggagaacagcaacagaatggtgacttcaaagatggtaaaaataagacagacaagaaggatcactctaacatcggaaatgattcaaagaaaacagatgattcacaagagtaaaaaagacctcatagacaataaaagaggctgccagtgtcttgcatca

SEQ ID NO: 165308 - DNA, 8852 bp, Homo sapiens
  Payload ID: 12551
  Gene Symbol: PDE1C
  Gene Name: phosphodiesterase 1C, calmodulin-dependent 70kDa
  Uniprot ID: Q14123
  ENST ID: ENST00000396184
  CDS Start-End: 206-2110
gtggtgtgtggttcccttcgtccccatcagtcgcttcaatatttcaaaatggatccggttctgtggcgggtgcgagagtgaggctgtgggggacctccaggcccaacctccgcgaagcctcgcggcttctgcgtgccctggccccgggaggataaggatttcccttccctcctacttgcgcgcggagccgagctcttgttgagctatggagtcgccaaccaaggagattgaagaatttgagagcaactctctgaaatacctgcaaccggaacagatcgagaaaatctggcttcggctccgcgggctgaggaaatataagaaaacgtcccagagattacggtctttggtcaaacaattagagagaggggaagcttcagtggtagatcttaagaagaatttggaatatgcagccacagtgcttgaatctgtgtatattgatgaaacaaggagactcctggatacagaggatgagctcagtgacattcagtcagatgctgtgccttctgaggtccgagactggctggcctccaccttcacgcggcagatggggatgatgctcaggaggagcgacgagaagccccggttcaagagcatcgttcacgcagtgcaggctgggatatttgtggagagaatgtatagacggacatcaaacatggttggactgagctatccaccagctgttattgaggcattaaaggatgtggacaagtggtcctttgacgtcttttccctcaatgaggccagtggggatcatgcactgaaatttattttctatgaactactcacacgttatgatctgatcagccgtttcaagatccccatttctgcacttgtctcatttgtggaggccctggaagtgggatacagcaagcacaaaaatccttaccataacttaatgcacgctgccgatgttacacagacagtgcattacctcctctataagacaggagtggcgaactggctgacggagctggagatctttgctataatcttctcagctgccatccatgactacgagcataccggaaccaccaacaatttccacattcagactcggtctgatccagctattctgtataatgacagatctgtactggagaatcaccatttaagtgcagcttatcgccttctgcaagatgacgaggaaatgaatattttgattaacctctcaaaggatgactggagggagtttcgaaccttggtaattgaaatggtgatggccacagatatgtcttgtcacttccaacaaatcaaagcaatgaagactgctctgcagcagccagaagccattgaaaagccaaaagccttatcccttatgctgcatacagcagatattagccatccagcaaaagcatgggacctccatcatcgctggacaatgtcactcctggaggagttcttcagacagggtgacagagaagcagagctggggctgcctttttctcctctgtgtgaccgaaagtccactatggttgctcagtcacaagtaggtttcattgatttcatcgtggaacccaccttcactgtgcttacggacatgaccgagaagattgtgagtccattaatcgatgaaacctctcaaactggtgggacaggacagaggcgttcgagtttgaatagcatcagctcgtcagatgccaagcgatcaggtgtcaagacctctggttcagagggaagtgccccgatcaacaattctgtcatctccgttgactataagagctttaaagctacttggacggaagtggtgcacatcaatcgggagagatggagggccaaggtacccaaagaggagaaggccaagaaggaagcagaggaaaaggctcgcctggccgcagaggagcagcaaaaggaaatggaagccaaaagccaggctgaagaaggcgcatctggcaaagctgagaaaaagacgtctggagaaactaagaatcaagtcaatggaacacgggcaaacaaaagtgacaaccctcgtgggaaaaactccaaagccgagaagtcatcaggagaacagcaacagaatggtgacttcaaagatggtaaaaataagacagacaagaaggatcactctaacatcggaaatgattcaaagaaaacagatgattcacaagagtaaaaaagacctcatagacaataaaagaggctgccagtgtcttgcatcattctagctgagcttcttcattctccttcttctccttcttccacaaagacccatatctggagaaggtgtacaactttcaaacacaagccccccaccccctgacccttggccttccctcacaccatctccttccaggggatgaatctttgggggttggtttgaggtcttagaactctgggggatattcccctgagcaaaacaaacaacgtgagatttttactcaaacagaaacaaaacatgaaggggcatcctcaaaatcctttgctaatgacctggctttcaaggcatctgtctggcctgatgagaatggacatcctggatatgctgggagaggcctgaaaaaagccacacacacagtaattgccattttatgactgtcaatgccgttactttaaatgttgtcatttttgcactggctactgatgatacagccatgctgacattcatcaccgcaaagatgatgattccagtctctggttcctttcctgagtcaggaacatttgttttctccaatttcctttcagacttaaaattgttcttatgctttttttcccacttctgtaatacagaattctgtttgttttctaaaaaagattattctataggaatctttatttgatggctaatttattttctctgtgcattcattagtataaacctgaatgttcagctggtgactgtactgttgagtgggaacccattgtttccactggtagcattgataactaagtggttactgaaatttttaccactggctggacatcttcttttggatatctgtggttttatttcatcactcttctttttattcagtaaagtgctaagggaattagtatcagggagatatggcagataattctttgcattttagtgagtttttaaaaatacaagatagaagtggattaatagcacgaataaaaaataagaatagtagatgtagcatggaaagagaataacattgcagcccccttgagaccaaattacaggtgggatctaagggagtgcaagtaaagtgggattttatgagtctaaatgatgtgatttagataaaagtgattcttaaaatgtggttattggtcacacaggaatctctgagtccttcccaagagtgaagcacatgaatatgctgatgatgaagtggggattagtaatagaaagagagctaggcaataggtttaagtgtattccccactacagatttaatttctacatgaaaaagcacgagaacagatatttaaacgtccttttattactaaggtgaaatattggcattttttcaggcagaaagaaagagactgtatgtggtcttcctggacctttgccttgccaaaatgttccccaacagaaagatctgaagaactttgtagtatcgaatgcacaacagcatgctgatatttgaacagatttcttctgtcagctttacattttgccttggagaaacacttagatttttctgttgtgctccctgtgttcataacaatgacctcaccacataatgtggccagaaattcaaatgacttcaggggcctagcaggtcaagtaaatgaataaagcaagccatgtaatatcacagtcattgtggtaaatggcaattcatagtgggcctttgtatcagcaagacaggaaggagcaatggggactgtgagaaattggagagggtgggtgctgtcaaaacagggtagttggtaggcagcaactgaatttgagctgtgtggggatgggggtcctagatacctaggatttgatataagctctctccaaatttttacatattgacaactaactcaaaaacttacaaacactgtgctaatcaaatgaaacatgcctgtgagctgcattcaatccatggggcattggtttgcaagctatgttcttagaggtggtatgattttgtattgaaattaaatataaccaagagtatgtcaatttttgaccttggaacctggaccttttacctcatttatattctgtatttttgtatgtggggctttttggccagtcaaaatagaaagtctacagcttccattttataatctaacaagcaacaagaaacaacatttgaaaaagaaacaggaatatagccattttttctagcaccaataaaaatggaaatgtttttcatttgctttaagtcattaatcagctgaaaaagaatagaaagagaatttcattccataaagaacttcacctaaaactctcagtgaagcaaaacaaaactccatgtaactcactcttagctttaaatctttaaaaagtgtttcgaagggatattgagtaaaaatgcagttatctattaaaaatacaaaatgctatattatatgatgctatgaattgatactggagctgataaaacattaaagtaattattccaaatcagtgctgactgcaaaagcaatatttccaaagctctagcttattttctgcggtcttttaattcccttgaaatagctttcttcaagttgagcagcaatttgggacaaacattattctattgcacagattatggcatcttactctggtttacacacacagagcaagggcttacacacctgaattaagaattaactagcatgtggggacagcaatagggatagtcctaccacagacgaaaccatgcgctctacacgtccctggataaaatgtgacaagttagcccttgaatttgggtccccatgtcaccaaatagctctatatttaagttgtgttaatgtggtacgtttcagtggcataatgacccattcttatcgaggcctttgttccatattttatttgtgccaatctttcttaggttatgagccctaatagtttatggcagcagacaagagactcatttctaacccattaaattcaaatggactttcttccactgtccatttcatttttggagctgttataaactaccgaaaacatttgacaggatcccattgtggatctgatacacttaaacagtaaaatgatatctaaacatctgaaagccaaagaataacctagtgcacgtgttcattcatttgtagaatttaagccattgtattatattttccacttggaaccatgcctttagatacaaaagtgtaaagtaaaaagcaacattatcatgggatgtgagacggtaatccaaaagttgaagaccaatttttgttatccatattttggaagtatggatactgtttattttaatatcacttctctcatgggtcacttttccttagataggtaggtaggtagatagatagatagatagatgatagatagatagatagatagatagatagatagatagatagatagatagatagatagatagataatataatatattttcttctttcttaacctatgagcagagactttgatgatggaaattactttgtaacattccccatggagcctaggaaaaacaatagaaaaaaagcatgaaatctttttctcatagtgaaatagagaagattctaagattggaaatctgtgtatgtggtgttctatcccaaataaagagaatttagggaattcaggcaacaatttttttcctaattggaaactttgttctgatcctgagatgcccacacaccccacaggagacgcagtgctggcccaccacagtgtttggaacacggtcagcattcaggaaacacattcaaaatcgtctaactgaattccactatccacttgtgaatgcaaacaaaattcaaatttccctgaaaatttattcaacttctatatgccaagcacactgctaaaggcttatcttctaagtatatgcaggcataccctactcacacaaatagcttattaccagagataggaaattgcaggtaatttgggagaaattgtcatagccaaatttatggaaaaaataaaataaaaacttctctatggcctcttgatttaagaaaaaaacagaacaatacaaaaaaaaaaaagcactaaaacaggatttatctgagaatgtctttccaaaagggaagatgacaccaatctatataaaacgtcagtggatttactgagaatccgagtggaaacttttaaaaccttaaacagactctcctacagcaaatagattctctatgtgcagcatgaggaatcactgcatagttctgctccaccaataatatgattggtacagcaccaaaccatggcaaagttagatgttaaagaacataatgttgcaataatgatgttatattggatcttatgcatgaacaaatggaaagtaataatttatcaactgtgatccatgattaaaggcctcattatcactaagaaaatgaacttaatgaaaaaaattataatgagcaatgacaatattcctataaaacctccctctgggtatcaagagacatattacctgccaaggccagattttactttttaaggtttcctctctctcaccaaagacactagtgggcacagaggtgacactagagttagaatgttaccagagtcatttgcattagacagtttatctgatcatgaacatgttcccagggagattagaaaaatgggaagcaggcctctaaagatcctccttggacatttgtaaaaaggctggctgcttctccaggaatgtctgaattaagcaagaattgtgccactgaaatagcttcttgtttttatattaaacaaggaacgattgtgcagtggatgacctggactgaaagatgtatgatggtcaagtttaaacatattaattcctgattgttttcttaaatacccaccctagtcattttttggaaaatattgccagacatatttgacatgaattcatgtttattctggcttctgttcccaagcagaagtggattaaccctggcaatggctggcttcactaactgtacttgcacccagcctgggctgccatctgctcagccaggagaagcagggagtggggtgtgggccctttaagttcgctcagggcacactcattcagtctcccctgaggagaccttgtccccctttgtggggtgaatgctggctgttgcaggccagaggcagtgccaactggagactcatcctctcagctttggtcagcttcagccacgtattcttcatgagtgctggcttctgaacctgcaggatcatttctcagtcagtttatggtgcagggtaattcatttaaaataaagcccattaaaaccccatggctatagaatgggttttaaatagattgtcctggagacacatcattgtatagtctttgcttccctctcatgacctatcttggagtagaatttgtgtactactgtccttgtctttgagtgggtatatgtgtgatggtacagaaatacagtcacatattatattaatatatatagatggataggaaaaacctacagccataggtattgtccaataactgattctagaggtagaactatagagtatacatttccttttttcttgctttgatgatatttttatacaattttatatgctataaaattttcaaaaatatatttgctattttcatttgtagagcttggttaggtttttatcagctcttgtgcccactgtacaaccagattcccctcatctaatttaaatgtcttccctttttcaaactctcctttatgttttcctttttttttcctcccatttttctacccttcacaaattccttcttttgcttctgtccaggtaacccattctgcttgcagtatcattttagcacgtacaaacacaaaataatgggaaaaataaaagcaccttgttccatgcaattcgtatgggaaagttttgggtgtcaaaggtcgctggggatagatggggaggcagaaatagcttgggaaaaggaagcaggaaaaaaggaaatctttatgggaaatcaattacccaaagcaaggtgagtcacctagaggtgaatatgatgttgttattgtcctcccttagtgtacagcacagtttttgctctcacagggtttttctctttaggatgcgtagcaccctatgcattaaatacatagcatcctaaagacaccctactcaccttgagtctgtaggctctttcctgatgagggcactggccatatatgaatggaaaactcaactcatctcctcagctttagatgttgctgctgttcagctggatttgtgagaaatatctggattactatcaagaacatttagcaagactcaaaagagagaggcaagcagaaccaaaacccaaacctcaaccaatgactagctgaataaacaattctttggaggaataaggaaggtatttctggatgtattctgagaatgctcttccaaaagggaagatggtaataatggacttgttttgatttcatggttgtgatagaatgtacttccatgatgtgaaatacacttctggcagataaaatgcaggttgtaatttgcatttgtacatcacagggtaaaagaatggccatccattctgaggaagagtgttctgttctctaagatgctgcttaaccaatgttatccaaatgccatagcatcatatctccaaatacaagattaaatcataaggattcatgtaaaacagagtatactgagctgttctcagaaaaattaatgatgtgtttattgtaaatctttattgcacagatgagcctgacagtccttcaatgtataattttcccccagcatctagtaatgcataagtacttgtatgttcttctgattaccaaataaaaacaatgagttaacctcttaattggaattggaaaaatgaaaa

SEQ ID NO: 165309 - DNA, 605 bp, Homo sapiens
  Payload ID: 12551
  Gene Symbol: PDE1C
  Gene Name: phosphodiesterase 1C, calmodulin-dependent 70kDa
  ENST ID: ENST00000396189
  CDS Start-End: 466-605
aagaaaacatcaagagtttttgagtgtggtgtgtggttcccttcgtccccatcagtcgcttcaatatttcaaaatggatccggttctgtggcgggtgcgagagtgaggctgtgggggacctccaggcccaacctccgcgaagcctcgcggcttctgcgtgccctggccccgggaggataaggatttcccttccctcctacttgcgcgcggagccgagctcttgttgagcccgggaccatggctggttcccgcagctgcctccggagcgcacctggggccatggtttgccgcgatcggagtccgctctaagtcggagtctgggggcgcagaagggggagcgcgccgagaaagtgccgggcaaacgcgcgccgcgcctggctgggcatcgcgagctgggcgaggagacggggaggggacagcccaaactatctcagcttcaccgccagtggtcacctacctgcagctatggagtcgccaaccaaggagattgaagaatttgagagcaactctctgaaatacctgcaaccggaacagatcgagaaaatctggcttcggctccgcgggctgaggaaatataagaaaacgtcccagagattacggtcttt

SEQ ID NO: 165310 - DNA, 2952 bp, Homo sapiens
  Payload ID: 12551
  Gene Symbol: PDE1C
  Gene Name: phosphodiesterase 1C, calmodulin-dependent 70kDa
  Uniprot ID: Q14123
  ENST ID: ENST00000396191
  CDS Start-End: 457-2586
gctcagccgccgcttttctctcccttctcactttctctcctccccacccagccctccttttcacctccaaaccctttagctgcgcgctgatcgcttctgtggctttgtttgggggtagggggagaatacgaatagacccgaggtgctttctcttggagctggagtccaatcccaatccctatctctatccctatccctgtgcttatccctgggcattagcccgggaccatggctggttcccgcagctgcctccggagcgcacctggggccatggtttgccgcgatcggagtccgctctaagtcggagtctgggggcgcagaagggggagcgcgccgagaaagtgccgggcaaacgcgcgccgcgcctggctgggcatcgcgagctgggcgaggagacggggaggggacagcccaaactatctcagcttcaccgccagtggtcacctacctgcagctatggagtcgccaaccaaggagattgaagaatttgagagcaactctctgaaatacctgcaaccggaacagatcgagaaaatctggcttcggctccgcgggctgaggaaatataagaaaacgtcccagagattacggtctttggtcaaacaattagagagaggggaagcttcagtggtagatcttaagaagaatttggaatatgcagccacagtgcttgaatctgtgtatattgatgaaacaaggagactcctggatacagaggatgagctcagtgacattcagtcagatgctgtgccttctgaggtccgagactggctggcctccaccttcacgcggcagatggggatgatgctcaggaggagcgacgagaagccccggttcaagagcatcgttcacgcagtgcaggctgggatatttgtggagagaatgtatagacggacatcaaacatggttggactgagctatccaccagctgttattgaggcattaaaggatgtggacaagtggtcctttgacgtcttttccctcaatgaggccagtggggatcatgcactgaaatttattttctatgaactactcacacgttatgatctgatcagccgtttcaagatccccatttctgcacttgtctcatttgtggaggccctggaagtgggatacagcaagcacaaaaatccttaccataacttaatgcacgctgccgatgttacacagacagtgcattacctcctctataagacaggagtggcgaactggctgacggagctggagatctttgctataatcttctcagctgccatccatgactacgagcataccggaaccaccaacaatttccacattcagactcggtctgatccagctattctgtataatgacagatctgtactggagaatcaccatttaagtgcagcttatcgccttctgcaagatgacgaggaaatgaatattttgattaacctctcaaaggatgactggagggagtttcgaaccttggtaattgaaatggtgatggccacagatatgtcttgtcacttccaacaaatcaaagcaatgaagactgctctgcagcagccagaagccattgaaaagccaaaagccttatcccttatgctgcatacagcagatattagccatccagcaaaagcatgggacctccatcatcgctggacaatgtcactcctggaggagttcttcagacagggtgacagagaagcagagctggggctgcctttttctcctctgtgtgaccgaaagtccactatggttgctcagtcacaagtaggtttcattgatttcatcgtggaacccaccttcactgtgcttacggacatgaccgagaagattgtgagtccattaatcgatgaaacctctcaaactggtgggacaggacagaggcgttcgagtttgaatagcatcagctcgtcagatgccaagcgatcaggtgtcaagacctctggttcagagggaagtgccccgatcaacaattctgtcatctccgttgactataagagctttaaagctacttggacggaagtggtgcacatcaatcgggagagatggagggccaaggtacccaaagaggagaaggccaagaaggaagcagaggaaaaggctcgcctggccgcagaggagcagcaaaaggaaatggaagccaaaagccaggctgaagaaggcgcatctggcaaagctgagaaaaagacgtctggagaaactaagaatcaagtcaatggaacacgggcaaacaaaagtgacaaccctcgtgggaaaaactccaaagccgagaagtcatcaggagaacagcaacagaatggtgacttcaaagatggtaaaaataagacagacaagaaggatcactctaacatcggaaatgattcaaagaaaacagatggcacaaaacagcgttctcacggctcaccagccccaagcaccagctccacgtgtcgccttacgttgccagtcatcaagcctcctttgcgtcattttaaacgccctgcttacgcatctagctcctatgcaccttcagtctcaaagaaaactgatgagcatcctgcaaggtacaagatgctggatcagaggatcaaaatgaaaaagattcagaacatctcacataactggaacagaaaataggccgaggggaagaagagagggagtgaaggagggtctacctatctgcttctcagcacccactggccacagcaggacacacctccaagacccttggaggctgttggagcaggtactatcctggttgactccaccaaggtgaaatgaaagttgtatgtgattttcctctttgttgttcttgtatagacttttcaattgctgtatgtgggatcagcccagacgccagcaacaaactagcaagaggggtgtttttatggtataagtctctaaaagtctaaattggaccaaaattaaaatgacacaaacttaaaaaaaaataaaattcctctcattgccacttttttcaatctctaaaagttagttgccccc

SEQ ID NO: 165311 - DNA, 5109 bp, Homo sapiens
  Payload ID: 12551
  Gene Symbol: PDE1C
  Gene Name: phosphodiesterase 1C, calmodulin-dependent 70kDa
  ENST ID: ENST00000396193
  CDS Start-End: 595-2904
gacttccttgtttggagtaaacttcggcaacatctcatggctgaggggtttgcctttccatctgttgatgtgctttctggaagctccccggtctgccagagaaaacatatctagaagacgcacgacgccaattcagccattcccttgggtccccaaatccccccagccaccagagacggaaggagaaggtgaagtagaaaacagactttcctgtggcgcgcgggatccgcggctgacagagagtagcgtggccaggcagggatctccgcgcccaccggtcagccccgtccacgcgctcgggcgcgcgtcctcccttcctgacactcctctcgccgcctctggaactcggcttggagatggggcagtcgcgacggctcctgcctccgccgagctcctagcgctttagctgttgacattgggtccccgctgttgtctccaggcgctcagctgccagcgcgcggcggggctgagagtgacagcgcggcgcggccgggggaggattcgccgccgagccccgggctgctcactccgccgtgggggggaccgcagacgccgctggtctcgctgcgaggcccctgcccggccggccgagccatgacggacgccggcaacaggaaggagggcttcaaaaaatgccggagcgccactttcagcatcgatggctacagcttcaccatagttgcaaatgaagctggagacaagaatgccagaccactggcccgcttctctcggtctaagtcacagaactgtctgtggaactccctcatcgatgggctcacagggaatgtcaaggagaagccaaggccaacaattgtccatgaccctcgacccccagaggagatcctagctgatgaattgccacagctggatagcccagaagtcttggtgaagacatccttcagattacggtctttggtcaaacaattagagagaggggaagcttcagtggtagatcttaagaagaatttggaatatgcagccacagtgcttgaatctgtgtatattgatgaaacaaggagactcctggatacagaggatgagctcagtgacattcagtcagatgctgtgccttctgaggtccgagactggctggcctccaccttcacgcggcagatggggatgatgctcaggaggagcgacgagaagccccggttcaagagcatcgttcacgcagtgcaggctgggatatttgtggagagaatgtatagacggacatcaaacatggttggactgagctatccaccagctgttattgaggcattaaaggatgtggacaagtggtcctttgacgtcttttccctcaatgaggccagtggggatcatgcactgaaatttattttctatgaactactcacacgttatgatctgatcagccgtttcaagatccccatttctgcacttgtctcatttgtggaggccctggaagtgggatacagcaagcacaaaaatccttaccataacttaatgcacgctgccgatgttacacagacagtgcattacctcctctataagacaggagtggcgaactggctgacggagctggagatctttgctataatcttctcagctgccatccatgactacgagcataccggaaccaccaacaatttccacattcagactcggtctgatccagctattctgtataatgacagatctgtactggagaatcaccatttaagtgcagcttatcgccttctgcaagatgacgaggaaatgaatattttgattaacctctcaaaggatgactggagggagtttcgaaccttggtaattgaaatggtgatggccacagatatgtcttgtcacttccaacaaatcaaagcaatgaagactgctctgcagcagccagaagccattgaaaagccaaaagccttatcccttatgctgcatacagcagatattagccatccagcaaaagcatgggacctccatcatcgctggacaatgtcactcctggaggagttcttcagacagggtgacagagaagcagagctggggctgcctttttctcctctgtgtgaccgaaagtccactatggttgctcagtcacaagtaggtttcattgatttcatcgtggaacccaccttcactgtgcttacggacatgaccgagaagattgtgagtccattaatcgatgaaacctctcaaactggtgggacaggacagaggcgttcgagtttgaatagcatcagctcgtcagatgccaagcgatcaggtgtcaagacctctggttcagagggaagtgccccgatcaacaattctgtcatctccgttgactataagagctttaaagctacttggacggaagtggtgcacatcaatcgggagagatggagggccaaggtacccaaagaggagaaggccaagaaggaagcagaggaaaaggctcgcctggccgcagaggagcagcaaaaggaaatggaagccaaaagccaggctgaagaaggcgcatctggcaaagctgagaaaaagacgtctggagaaactaagaatcaagtcaatggaacacgggcaaacaaaagtgacaaccctcgtgggaaaaactccaaagccgagaagtcatcaggagaacagcaacagaatggtgacttcaaagatggtaaaaataagacagacaagaaggatcactctaacatcggaaatgattcaaagaaaacagatggcacaaaacagcgttctcacggctcaccagccccaagcaccagctccacgtgtcgccttacgttgccagtcatcaagcctcctttgcgtcattttaaacgccctgcttacgcatctagctcctatgcaccttcagtctcaaagaaaactgatgagcatcctgcaaggtacaagatgctggatcagaggatcaaaatgaaaaagattcagaacatctcacataactggaacagaaaataggccgaggggaagaagagagggagtgaaggagggtctacctatctgcttctcagcacccactggccacagcaggacacacctccaagacccttggaggctgttggagcaggtactatcctggttgactccaccaaggtgaaatgaaagttgtatgtgattttcctctttgttgttcttgtatagacttttcaattgctgtatgtgggatcagcccagacgccagcaacaaactagcaagaggggtgtttttatggtataagtctctaaaagtctaaattggaccaaaattaaaatgacacaaacttaaaaaaaaataaaattcctctcattgccacttttttcaatctctaaaagttagttgcccccaaaagaatattggtttaataatcatcatatttaagaaatgcactgataaaaacatattttccaattttaaatacacctatttaaaatgtaaatacacttatttaaaattcaagtaaatatgtaactatcaaagtaaatgtattcaaaacagaagttgtgcttctgaatgtaaaaatattaaaaggaagagaagacggatgaattgttgtattcatggacatttcagaattcacgcttataaagcaaatccaagttaaaaaacaaaaaaagatttttgtgcctcatgaagattgtgcctcatgcccaataacctcatgtactttgaaggatgtgaaggtttgcaagagatgcatttggcttcattttcctctaatcttttacttctacccacagtagatgatacaaaaaatcttgccttaaagactgcaggtttaagagtcattgcaaaagatgtcagtttgattttgtggtcctaggccaagagggtgtaaaattctgagcctagtttaaattctttattttcagattgttctggactgaaaataaagaatttaaactaggctagagatgcctttaagttacatttcagatcctcttcacagcacgctacatatctaaagcccttgagatcctgattgttctcacagttgttggtggaatccatagttttataactcacctctttttatggtggcattgttagcccttctgtgtctctccctaggatttttaattcaggactaaaatcacagaagtagcaaggaaaggctcaagactagagatagctttcaatctcttcagaaatagcctggtgcagtgagaaaactaggtttgttttcaggccagtctgatcttcatcctattctgtctataactagttgcaggtccttgctcggatggcataattttttgatgcctccatttgcttaactagaaactaggattcatatacacactctgcactttgtattgaagattaatgataatgtaggttttggttgctgtggctgagcctggccagtaataggtgcataacagaagtagctaagagcatttcataatcaggatgaactctccaggacagccctacaaagaaggagctgtttgttcccggatggcctcgaccttccaggcttgattgtaaagagtttagtgtcctctccttctctcattccctgcagttcatttccaataaactgcagttattcaagttgagcaagttccggaatttagtgcctaccatgctattgggcagtttatttataatgtgctttatgatgatacttcagagaaatttaattgctatacaaaaagacgaatcattgtgacttttcgttaaggaggcgattgcaattctttgctccctgcctggtgtctgggttagaaggcccttctgcaggctggtagtgtctgttccacctggattaggttaactcaacaggtaattcctatctgtttatacacagatgctttagcgcttgctgtacaaagtcatttggctacacactgaggaggcccatgggagtagtagcctcctcaaataatgttccctacctatctgtcaataccttccatcttaggtattgagaatttaatgaggctgtgttttcttggctgtgcttcttgatgttggaagccatgttcctggggaacaaatctgtattcttttctcctaagatgtgagtttttttcaacctttgctaatattttaatggagcaaatgtacagatgttgagattttgcactgcttataaaatgcctaccatgttttttgcataatggattgtatagaaatgcagattatattcttacagcaaataaaaagatgcttttaacaga

SEQ ID NO: 165312 - DNA, 4315 bp, Homo sapiens
  Payload ID: 12552
  Gene Symbol: PDE2A
  Gene Name: phosphodiesterase 2A, cGMP-stimulated
  Uniprot ID: O00408
  ENST ID: ENST00000334456
  CDS Start-End: 247-3072
tgcattatcagacctgctccaacctcctcccagagccagccgagcagcagaggcagtggcagcgggagaggcgggagcagcggggcagcagagctggattggggtgttgagtccaggctgagtagggggcagcccactgctcttggtccctgtgcctgctgggggtgccctgccctgaactccaggcagcggggacagggcgaggtgccaccttagtctggctggggaggcggacgatgaggagtgatggggcaggcatgcggccactccatcctctgcaggagccagcagtacccggcagcgcgaccggctgagccgcggggccagcaggtcttcctcaagccggacgagccgccgccgccgccgcagccatgcgccgacagcctgcaggacgccttgctgagtctgggctctgtcatcgacatttcaggcctgcaacgtgctgtcaaggaggccctgtcagctgtgctcccccgagtggaaactgtctacacctacctactggatggtgagtcccagctggtgtgtgaggaccccccacatgagctgccccaggaggggaaagtccgggaggctatcatctcccagaagcggctgggctgcaatgggctgggcttctcagacctgccagggaagcccttggccaggctggtggctccactggctcctgatacccaagtgctggtcatgccgctagcggacaaggaggctggggccgtggcagctgtcatcttggtgcactgtggccagctgagtgataatgaggaatggagcctgcaggcggtggagaagcataccctggtcgccctgcggagggtgcaggtcctgcagcagcgcgggcccagggaggctccccgagccgtccagaaccccccggaggggacggcggaagaccagaagggcggggcggcgtacaccgaccgcgaccgcaagatcctccaactgtgcggggaactctacgacctggatgcctcttccctgcagctcaaagtgctccaatacctgcagcaggagacccgggcatcccgctgctgcctcctgctggtgtcggaggacaatctccagctttcttgcaaggtcatcggagacaaagtgctcggggaagaggtcagctttcccttgacaggatgcctgggccaggtggtggaagacaagaagtccatccagctgaaggacctcacctccgaggatgtacaacagctgcagagcatgttgggctgtgagctgcaggccatgctctgtgtccctgtcatcagccgggccactgaccaggtggtggccttggcctgcgccttcaacaagctagaaggagacttgttcaccgacgaggacgagcatgtgatccagcactgcttccactacaccagcaccgtgctcaccagcaccctggccttccagaaggaacagaaactcaagtgtgagtgccaggctcttctccaagtggcaaagaacctcttcacccacctggatgacgtctctgtcctgctccaggagatcatcacggaggccagaaacctcagcaacgcagagatctgctctgtgttcctgctggatcagaatgagctggtggccaaggtgttcgacgggggcgtggtggatgatgagagctatgagatccgcatcccggccgatcagggcatcgcgggacacgtggcgaccacgggccagatcctgaacatccctgacgcatatgcccatccgcttttctaccgcggcgtggacgacagcaccggcttccgcacgcgcaacatcctctgcttccccatcaagaacgagaaccaggaggtcatcggtgtggccgagctggtgaacaagatcaatgggccatggttcagcaagttcgacgaggacctggcgacggccttctccatctactgcggcatcagcatcgcccattctctcctatacaaaaaagtgaatgaggctcagtatcgcagccacctggccaatgagatgatgatgtaccacatgaaggtctccgatgatgagtataccaaacttctccatgatgggatccagcctgtggctgccattgactccaattttgcaagtttcacctatacccctcgttccctgcccgaggatgacacgtccatggccatcctgagcatgctgcaggacatgaatttcatcaacaactacaaaattgactgcccgaccctggcccggttctgtttgatggtgaagaagggctaccgggatcccccctaccacaactggatgcacgccttttctgtctcccacttctgctacctgctctacaagaacctggagctcaccaactacctcgaggacatcgagatctttgccttgtttatttcctgcatgtgtcatgacctggaccacagaggcacaaacaactctttccaggtggcctcgaaatctgtgctggctgcgctctacagctctgagggctccgtcatggagaggcaccactttgctcaggccatcgccatcctcaacacccacggctgcaacatctttgatcatttctcccggaaggactatcagcgcatgctggatctgatgcgggacatcatcttggccacagacctggcccaccatctccgcatcttcaaggacctccagaagatggctgaggtgggctacgaccgaaacaacaagcagcaccacagacttctcctctgcctcctcatgacctcctgtgacctctctgaccagaccaagggctggaagactacgagaaagatcgcggagctgatctacaaagaattcttctcccagggagacctggagaaggccatgggcaacaggccgatggagatgatggaccgggagaaggcctatatccctgagctgcaaatcagcttcatggagcacattgcaatgcccatctacaagctgttgcaggacctgttccccaaagcggcagagctgtacgagcgcgtggcctccaaccgtgagcactggaccaaggtgtcccacaagttcaccatccgcggcctcccaagtaacaactcgctggacttcctggatgaggagtacgaggtgcctgatctggatggcactagggcccccatcaatggctgctgcagccttgatgctgagtgatcccctccagggacacttccctgcccaggccacctcccacagccctccactggtctggccagatgcactgggaacagagccacgggtcctgggtcctagaccaggacttcctgtgtgaccctggacaagtactaccttcctgggcctcagctttctcgtctgtataatggaagcaagacttccaacctcacggagactttgtaatttgttttctgagagcacaggggtgaccaatgagcagtgggccctactctgcacctctgaccacaccttggcaagtctttcccaagccattctttgtctgagcagcttgatggtttctccttgccccatttctgccccaccagatctttgctcctttccctttgaggactcccaccctttggggtctccaggatcctcatggaaggggaaggtgagacatctgagtgagcagagtgtggcatcttggaaacagtccttagttctgtgggaggactagaaacagccgcggggcgaaggccccctgaggaccactactatactgatggtgggattgggacctgggggatacaggggccccaggaagaagctgccagaggggcagctcagtgctctgcagagaggggccctggggagaagcaggatgggattgatgggcaggagggatccccgcactgggagacaggcccaggtatgaatgagccagccatgcttcctcctgcctgtgtgacgctgggcgagtctcttcccctgtctgggccaaacagggagcgggtaagacaatccatgctctaagatccattttagatcaatgtctaaaatagctctatcgctctgcggagtcccagcagaggctatggaatgtttctgcaaccctaaggcacagagagcccaaccctgagtgtctcagaggccccctgagtgttccccttggcctgagccccttacccattcctgcagccagtgagagacctggcctcagccctggcagggctctctcttcaaggccatatccacctgtgccctggggcttgggagaccccatagggccgggactcttgggtcagcccggccactggcttctctctttttctctgtttcattctgtgtgcgttgtggggtgggggagggggtccacctgccttacctttctgagttgcctttagagagatgcgtttttctaggactctgtgcaactgtcgtatatggtcccgtgggctgaccgctttgtacatgagaataaatctatttctttctacca

SEQ ID NO: 165313 - DNA, 3355 bp, Homo sapiens
  Payload ID: 12552
  Gene Symbol: PDE2A
  Gene Name: phosphodiesterase 2A, cGMP-stimulated
  Uniprot ID: O00408
  ENST ID: ENST00000376450
  CDS Start-End: 56-2113
gacgcgctgaccgagcgcagcggccgggccggcgggcgggcgggcggctgcgagcatggtcctggtgctgcaccacatcctcatcgctgttgtccaattcctcaggcggggccagcaggtcttcctcaagccggacgagccgccgccgccgccgcagccatgcgccgacagcctgcaggacgccttgctgagtctgggctctgtcatcgacatttcaggcctgcaacgtgctgtcaaggaggccctgtcagctgtgctcccccgagtggaaactgtctacacctacctactggatggtgagtcccagctggtgtgtgaggaccccccacatgagctgccccaggaggggaaagtccggttcaccgacgaggacgagcatgtgatccagcactgcttccactacaccagcaccgtgctcaccagcaccctggccttccagaaggaacagaaactcaagtgtgagtgccaggctcttctccaagtggcaaagaacctcttcacccacctggatgacgtctctgtcctgctccaggagatcatcacggaggccagaaacctcagcaacgcagagatctgctctgtgttcctgctggatcagaatgagctggtggccaaggtgttcgacgggggcgtggtggatgatgagagctatgagatccgcatcccggccgatcagggcatcgcgggacacgtggcgaccacgggccagatcctgaacatccctgacgcatatgcccatccgcttttctaccgcggcgtggacgacagcaccggcttccgcacgcgcaacatcctctgcttccccatcaagaacgagaaccaggaggtcatcggtgtggccgagctggtgaacaagatcaatgggccatggttcagcaagttcgacgaggacctggcgacggccttctccatctactgcggcatcagcatcgcccattctctcctatacaaaaaagtgaatgaggctcagtatcgcagccacctggccaatgagatgatgatgtaccacatgaaggtctccgatgatgagtataccaaacttctccatgatgggatccagcctgtggctgccattgactccaattttgcaagtttcacctatacccctcgttccctgcccgaggatgacacgtccatggccatcctgagcatgctgcaggacatgaatttcatcaacaactacaaaattgactgcccgaccctggcccggttctgtttgatggtgaagaagggctaccgggatcccccctaccacaactggatgcacgccttttctgtctcccacttctgctacctgctctacaagaacctggagctcaccaactacctcgaggacatcgagatctttgccttgtttatttcctgcatgtgtcatgacctggaccacagaggcacaaacaactctttccaggtggcctcgaaatctgtgctggctgcgctctacagctctgagggctccgtcatggagaggcaccactttgctcaggccatcgccatcctcaacacccacggctgcaacatctttgatcatttctcccggaaggactatcagcgcatgctggatctgatgcgggacatcatcttggccacagacctggcccaccatctccgcatcttcaaggacctccagaagatggctgaggtgggctacgaccgaaacaacaagcagcaccacagacttctcctctgcctcctcatgacctcctgtgacctctctgaccagaccaagggctggaagactacgagaaagatcgcggagctgatctacaaagaattcttctcccagggagacctggagaaggccatgggcaacaggccgatggagatgatggaccgggagaaggcctatatccctgagctgcaaatcagcttcatggagcacattgcaatgcccatctacaagctgttgcaggacctgttccccaaagcggcagagctgtacgagcgcgtggcctccaaccgtgagcactggaccaaggtgtcccacaagttcaccatccgcggcctcccaagtaacaactcgctggacttcctggatgaggagtacgaggtgcctgatctggatggcactagggcccccatcaatggctgctgcagccttgatgctgagtgatcccctccagggacacttccctgcccaggccacctcccacagccctccactggtctggccagatgcactgggaacagagccacgggtcctgggtcctagaccaggacttcctgtgtgaccctggacaagtactaccttcctgggcctcagctttctcgtctgtataatggaagcaagacttccaacctcacggagactttgtaatttgttttctgagagcacaggggtgaccaatgagcagtgggccctactctgcacctctgaccacaccttggcaagtctttcccaagccattctttgtctgagcagcttgatggtttctccttgccccatttctgccccaccagatctttgctcctttccctttgaggactcccaccctttggggtctccaggatcctcatggaaggggaaggtgagacatctgagtgagcagagtgtggcatcttggaaacagtccttagttctgtgggaggactagaaacagccgcggggcgaaggccccctgaggaccactactatactgatggtgggattgggacctgggggatacaggggccccaggaagaagctgccagaggggcagctcagtgctctgcagagaggggccctggggagaagcaggatgggattgatgggcaggagggatccccgcactgggagacaggcccaggtatgaatgagccagccatgcttcctcctgcctgtgtgacgctgggcgagtctcttcccctgtctgggccaaacagggagcgggtaagacaatccatgctctaagatccattttagatcaatgtctaaaatagctctatcgctctgcggagtcccagcagaggctatggaatgtttctgcaaccctaaggcacagagagcccaaccctgagtgtctcagaggccccctgagtgttccccttggcctgagccccttacccattcctgcagccagtgagagacctggcctcagccctggcagggctctctcttcaaggccatatccacctgtgccctggggcttgggagaccccatagggccgggactcttgggtcagcccggccactggcttctctctttttctctgtttcattctgtgtgcgttgtggggtgggggagggggtccacctgccttacctttctgagttgcctttagagagatgcgtttttctaggactctgtgcaactgtcgtatatggtcccgtgggctgaccgctttgtacatgagaataaatctatttctttctacc

SEQ ID NO: 165314 - DNA, 1027 bp, Homo sapiens
  Payload ID: 12552
  Gene Symbol: PDE2A
  Gene Name: phosphodiesterase 2A, cGMP-stimulated
  ENST ID: ENST00000420501
  CDS Start-End: 435-1027
gaacttcctgggaagacagagtcatcaaggaaggctgtggagggtccctcagagatggaggggcttgtagtctgccatcaggaagccatagggcctgcccaggggctagaggctggactggatgatcccaagggctgctcttggaccaaccatgcccagggcatgtgacctcagggtttgcatccctcccaaccctgtttttctaacattttgtgtgggcttggtttcaagagttcttagttcttagatctctaaaaatgcatagctccgagaacggttgcttcaactattttgtggttctctagtttagatgtaagtttctaagactccagattttgagtgtggagcttgaagaaggacccaggcaagggccccgtcttgatactggcagcccctctgatacctccctctgccctctccaggccatcctgagcatgctgcaggacatgaatttcatcaacaactacaaaattgactgcccgaccctggcccggttctgtttgatggtgaagaagggctaccgggatcccccctaccacaactggatgcacgccttttctgtctcccacttctgctacctgctctacaagaacctggagctcaccaactacctcgaggacatcgagatctttgccttgtttatttcctgcatgtgtcatgacctggaccacagaggcacaaacaactctttccaggtggcctcgaaatctgtgctggctgcgctctacagctctgagggctccgtcatggagaggcaccactttgctcaggccatcgccatcctcaacacccacggctgcaacatctttgatcatttctcccggaaggactatcagcgcatgctggatctgatgcgggacatcatcttggccacagacctggcccaccatctccgcatcttcaaggacctccagaagatggctgaggtgggctacgaccgaaacaacaagcagcaccacagacttctcctctgcctcctcatgacctcctgtgacctctctgaccagaccaagggctggaagactac

SEQ ID NO: 165315 - DNA, 982 bp, Homo sapiens
  Payload ID: 12552
  Gene Symbol: PDE2A
  Gene Name: phosphodiesterase 2A, cGMP-stimulated
  ENST ID: ENST00000441209
  CDS Start-End: 1-982
ttccccaccgcctccagcgtcccggagcataagggagtcgggttccatgcctgggacgtacgtaacctgcggaaactgcgagggcaggtcccggccggatccctccctccaaccgatccctccctccaccggtggttccttgcccctctcccttccccagaggtcatcggtgtggccgagctggtgaacaagatcaatgggccatggttcagcaagttcgacgaggacctggcgacggccttctccatctactgcggcatcagcatcgcccattctctcctatacaaaaaagtgaatgaggctcagtatcgcagccacctggccaatgagatgatgatgtaccacatgaaggtctccgatgatgagtataccaaacttctccatgatgggatccagcctgtggctgccattgactccaattttgcaagtttcacctatacccctcgttccctgcccgaggatgacacgtccatggccatcctgagcatgctgcaggacatgaatttcatcaacaactacaaaattgactgcccgaccctggcccggttctgtttgatggtgaagaagggctaccgggatcccccctaccacaactggatgcacgccttttctgtctcccacttctgctacctgctctacaagaacctggagctcaccaactacctcgaggacatcgagatctttgccttgtttatttcctgcatgtgtcatgacctggaccacagaggcacaaacaactctttccaggtggcctcgaaatctgtgctggctgcgctctacagctctgagggctccgtcatggagaggcaccactttgctcaggccatcgccatcctcaacacccacggctgcaacatctttgatcatttctcccggaaggactatcagcgcatgctggatctgatgcgggacatcatcttggccacagacctggcccaccatctccgcatcttcaaggacctccagaagatggctgagggtg

SEQ ID NO: 165316 - DNA, 2855 bp, Homo sapiens
  Payload ID: 12552
  Gene Symbol: PDE2A
  Gene Name: phosphodiesterase 2A, cGMP-stimulated
  ENST ID: ENST00000418754
  CDS Start-End: 202-2682
agcagaggcagtggcagcgggagaggcgggagcagcggggcagcagagctggattggggtgttgagtccaggctgagtagggggcagcccactgctcttggtccctgtgcctgctgggggtgccctgccctgaactccaggcagcggggacagggcgaggtgccaccttagtctggctggggaggcggacgatgaggagtgatggggcaggcatgcggccactccatcctctgcaggagccagcagtacccggcagcgcgaccggctgagccgcggggccagcaggtcttcctcaagccggacgagccgccgccgccgccgcagccatgcgccgacagcctgcaggtgcactgtggccagctgagtgataatgaggaatggagcctgcaggcggtggagaagcataccctggtcgccctgcggagggtgcaggtcctgcagcagcgcgggcccagggaggctccccgagccgtccagaaccccccggaggggacggcggaagaccagaagggcggggcggcgtacaccgaccgcgaccgcaagatcctccaactgtgcggggaactctacgacctggatgcctcttccctgcagctcaaagtgctccaatacctgcagcaggagacccgggcatcccgctgctgcctcctgctggtgtcggaggacaatctccagctttcttgcaaggtcatcggagacaaagtgctcggggaagaggtcagctttcccttgacaggatgcctgggccaggtggtggaagacaagaagtccatccagctgaaggacctcacctccgaggatgtacaacagctgcagagcatgttgggctgtgagctgcaggccatgctctgtgtccctgtcatcagccgggccactgaccaggtggtggccttggcctgcgccttcaacaagctagaaggagacttgttcaccgacgaggacgagcatgtgatccagcactgcttccactacaccagcaccgtgctcaccagcaccctggccttccagaaggaacagaaactcaagtgtgagtgccaggctcttctccaagtggcaaagaacctcttcacccacctggatgacgtctctgtcctgctccaggagatcatcacggaggccagaaacctcagcaacgcagagatctgctctgtgttcctgctggatcagaatgagctggtggccaaggtgttcgacgggggcgtggtggatgatgagagctatgagatccgcatcccggccgatcagggcatcgcgggacacgtggcgaccacgggccagatcctgaacatccctgacgcatatgcccatccgcttttctaccgcggcgtggacgacagcaccggcttccgcacgcgcaacatcctctgcttccccatcaagaacgagaaccaggaggtcatcggtgtggccgagctggtgaacaagatcaatgggccatggttcagcaagttcgacgaggacctggcgacggccttctccatctactgcggcatcagcatcgcccattctctcctatacaaaaaagtgaatgaggctcagtatcgcagccacctggccaatgagatgatgatgtaccacatgaaggtctccgatgatgagtataccaaacttctccatgatgggatccagcctgtggctgccattgactccaattttgcaagtttcacctatacccctcgttccctgcccgaggatgacacgtccatggccatcctgagcatgctgcaggacatgaatttcatcaacaactacaaaattgactgcccgaccctggcccggttctgtttgatggtgaagaagggctaccgggatcccccctaccacaactggatgcacgccttttctgtctcccacttctgctacctgctctacaagaacctggagctcaccaactacctcgaggacatcgagatctttgccttgtttatttcctgcatgtgtcatgacctggaccacagaggcacaaacaactctttccaggtggcctcgaaatctgtgctggctgcgctctacagctctgagggctccgtcatggagaggcaccactttgctcaggccatcgccatcctcaacacccacggctgcaacatctttgatcatttctcccggaaggactatcagcgcatgctggatctgatgcgggacatcatcttggccacagacctggcccaccatctccgcatcttcaaggacctccagaagatggctgaggtgggctacgaccgaaacaacaagcagcaccacagacttctcctctgcctcctcatgacctcctgtgacctctctgaccagaccaagggctggaagactacgagaaagatcgcggagctgatctacaaagaattcttctcccagggagacctggagaaggccatgggcaacaggccgatggagatgatggaccgggagaaggcctatatccctgagctgcaaatcagcttcatggagcacattgcaatgcccatctacaagctgttgcaggacctgttccccaaagcggcagagctgtacgagcgcgtggcctccaaccgtgagcactggaccaaggtgtcccacaagttcaccatccgcggcctcccaagtaacaactcgctggacttcctggatgaggagtacgaggtgcctgatctggatggcactagggcccccatcaatggctgctgcagccttgatgctgagtgatcccctccagggacacttccctgcccaggccacctcccacagccctccactggtctggccagatgcactgggaacagagccacgggtcctgggtcctagaccaggacttcctgtgtgaccctggacaagtactaccttcctgggcctcagctttctcgtctgtataatggaag

SEQ ID NO: 165317 - DNA, 4193 bp, Homo sapiens
  Payload ID: 12552
  Gene Symbol: PDE2A
  Gene Name: phosphodiesterase 2A, cGMP-stimulated
  Uniprot ID: O00408
  ENST ID: ENST00000444035
  CDS Start-End: 189-2951
actcgggcggaccaggcgaagctgtcgcggacgcgctgaccgagcgcagcggccgggccggcgggcgggcgggcggctgcgagcatggtcctggtgctgcaccacatcctcatcgctgttgtccaattcctcaggcggggccagcaggtcttcctcaagccggacgagccgccgccgccgccgcagccatgcgccgacagcctgcagccagcctggacccccttgcaaaggagccaggacccccagggagtagagacgaccgactggaggacgccttgctgagtctgggctctgtcatcgacatttcaggcctgcaacgtgctgtcaaggaggccctgtcagctgtgctcccccgagtggaaactgtctacacctacctactggatggtgagtcccagctggtgtgtgaggaccccccacatgagctgccccaggaggggaaagtccgggaggctatcatctcccagaagcggctgggctgcaatgggctgggcttctcagacctgccagggaagcccttggccaggctggtggctccactggctcctgatacccaagtgctggtcatgccgctagcggacaaggaggctggggccgtggcagctgtcatcttggtgcactgtggccagctgagtgataatgaggaatggagcctgcaggcggtggagaagcataccctggtcgccctgcggagggtgcaggtcctgcagcagcgcgggcccagggaggctccccgagccgtccagaaccccccggaggggacggcggaagaccagaagggcggggcggcgtacaccgaccgcgaccgcaagatcctccaactgtgcggggaactctacgacctggatgcctcttccctgcagctcaaagtgctccaatacctgcagcaggagacccgggcatcccgctgctgcctcctgctggtgtcggaggacaatctccagctttcttgcaaggtcatcggagacaaagtgctcggggaagaggtcagctttcccttgacaggatgcctgggccaggtggtggaagacaagaagtccatccagctgaaggacctcacctccgaggatgtacaacagctgcagagcatgttgggctgtgagctgcaggccatgctctgtgtccctgtcatcagccgggccactgaccaggtggtggccttggcctgcgccttcaacaagctagaaggagacttgttcaccgacgaggacgagcatgtgatccagcactgcttccactacaccagcaccgtgctcaccagcaccctggccttccagaaggaacagaaactcaagtgtgagtgccaggctcttctccaagtggcaaagaacctcttcacccacctggatgacgtctctgtcctgctccaggagatcatcacggaggccagaaacctcagcaacgcagagatctgctctgtgttcctgctggatcagaatgagctggtggccaaggtgttcgacgggggcgtggtggatgatgagagctatgagatccgcatcccggccgatcagggcatcgcgggacacgtggcgaccacgggccagatcctgaacatccctgacgcatatgcccatccgcttttctaccgcggcgtggacgacagcaccggcttccgcacgcgcaacatcctctgcttccccatcaagaacgagaaccaggaggtcatcggtgtggccgagctggtgaacaagatcaatgggccatggttcagcaagttcgacgaggacctggcgacggccttctccatctactgcggcatcagcatcgcccattctctcctatacaaaaaagtgaatgaggctcagtatcgcagccacctggccaatgagatgatgatgtaccacatgaaggtctccgatgatgagtataccaaacttctccatgatgggatccagcctgtggctgccattgactccaattttgcaagtttcacctatacccctcgttccctgcccgaggatgacacgtccatggccatcctgagcatgctgcaggacatgaatttcatcaacaactacaaaattgactgcccgaccctggcccggttctgtttgatggtgaagaagggctaccgggatcccccctaccacaactggatgcacgccttttctgtctcccacttctgctacctgctctacaagaacctggagctcaccaactacctcgaggacatcgagatctttgccttgtttatttcctgcatgtgtcatgacctggaccacagaggcacaaacaactctttccaggtggcctcgaaatctgtgctggctgcgctctacagctctgagggctccgtcatggagaggcaccactttgctcaggccatcgccatcctcaacacccacggctgcaacatctttgatcatttctcccggaaggactatcagcgcatgctggatctgatgcgggacatcatcttggccacagacctggcccaccatctccgcatcttcaaggacctccagaagatggctgaggtgggctacgaccgaaacaacaagcagcaccacagacttctcctctgcctcctcatgacctcctgtgacctctctgaccagaccaagggctggaagactacgagaaagatcgcggagctgatctacaaagaattcttctcccagggagacctggagaaggccatgggcaacaggccgatggagatgatggaccgggagaaggcctatatccctgagctgcaaatcagcttcatggagcacattgcaatgcccatctacaagctgttgcaggacctgttccccaaagcggcagagctgtacgagcgcgtggcctccaaccgtgagcactggaccaaggtgtcccacaagttcaccatccgcggcctcccaagtaacaactcgctggacttcctggatgaggagtacgaggtgcctgatctggatggcactagggcccccatcaatggctgctgcagccttgatgctgagtgatcccctccagggacacttccctgcccaggccacctcccacagccctccactggtctggccagatgcactgggaacagagccacgggtcctgggtcctagaccaggacttcctgtgtgaccctggacaagtactaccttcctgggcctcagctttctcgtctgtataatggaagcaagacttccaacctcacggagactttgtaatttgttttctgagagcacaggggtgaccaatgagcagtgggccctactctgcacctctgaccacaccttggcaagtctttcccaagccattctttgtctgagcagcttgatggtttctccttgccccatttctgccccaccagatctttgctcctttccctttgaggactcccaccctttggggtctccaggatcctcatggaaggggaaggtgagacatctgagtgagcagagtgtggcatcttggaaacagtccttagttctgtgggaggactagaaacagccgcggggcgaaggccccctgaggaccactactatactgatggtgggattgggacctgggggatacaggggccccaggaagaagctgccagaggggcagctcagtgctctgcagagaggggccctggggagaagcaggatgggattgatgggcaggagggatccccgcactgggagacaggcccaggtatgaatgagccagccatgcttcctcctgcctgtgtgacgctgggcgagtctcttcccctgtctgggccaaacagggagcgggtaagacaatccatgctctaagatccattttagatcaatgtctaaaatagctctatcgctctgcggagtcccagcagaggctatggaatgtttctgcaaccctaaggcacagagagcccaaccctgagtgtctcagaggccccctgagtgttccccttggcctgagccccttacccattcctgcagccagtgagagacctggcctcagccctggcagggctctctcttcaaggccatatccacctgtgccctggggcttgggagaccccatagggccgggactcttgggtcagcccggccactggcttctctctttttctctgtttcattctgtgtgcgttgtggggtgggggagggggtccacctgccttacctttctgagttgcctttagagagatgcgtttttctaggactctgtgcaactgtcgtatatggtcccgtgggctgaccgctttgtacatgagaataaatctatttctttctacc

SEQ ID NO: 165318 - DNA, 563 bp, Homo sapiens
  Payload ID: 12552
  Gene Symbol: PDE2A
  Gene Name: phosphodiesterase 2A, cGMP-stimulated
  ENST ID: ENST00000543750
  CDS Start-End: 85-363
actcgggcggaccaggcgaagctgtcgcggacgcgctgaccgagcgcagcggccgggccggcgggcgggcgggcggctgcgagcatggtcctggtgctgcaccacatcctcatcgctgttgtccaattcctcaggcggggccagcaggtcttcctcaagccggacgagccgccgccgccgccgcagccatgcgccgacagcctgcaggaaactgtctacacctacctactggatgggaggctatcatctcccagaagcggctgggctgcaatgggctgggcttctcagacctgccagggaagcccttggccaggctggtggctccactggctcctgatacccaagtgctggtcatgccgctagcggacaaggaggctggggccgtggcagctgtcatcttggtgcactgtggccagctgagtgataatgaggaatggagcctgcaggcggtggagaagcataccctggtcgccctgcggagggtgcaggtcctgcagcagcgcgggcccagggaggctccccgagccgtccagaaccccccggaggggacggcggaagaccag

SEQ ID NO: 165319 - DNA, 574 bp, Homo sapiens
  Payload ID: 12552
  Gene Symbol: PDE2A
  Gene Name: phosphodiesterase 2A, cGMP-stimulated
  ENST ID: ENST00000546038
  CDS Start-End: 244-363
attatcagacctgctccaacctcctcccagagccagccgagcagcagaggcagtggcagcgggagaggcgggagcagcggggcagcagagctggattggggtgttgagtccaggctgagtagggggcagcccactgctcttggtccctgtgcctgctgggggtgccctgccctgaactccaggcagcggggacagggcgaggtgccaccttagtctggctggggaggcggacgatgaggagtgatggggcaggcatgcggccactccatcctctgcaggagccagcagtacccggcagcgcgaccggctgagccaagtttacagcttcctgagcactgtttccacacctgtgatctcatttaatcctcaccacaaacccaagagactgctgttttctggatgaagaaacagaggatccaggaggggaaatcgcttgcccacaggcggggccagcaggtcttcctcaagccggacgagccgccgccgccgccgcagccatgcgccgacagcctgcagccagcctggacccccttgcaaaggagccaggacccccagggagtagagacgaccgact

SEQ ID NO: 165320 - DNA, 597 bp, Homo sapiens
  Payload ID: 12552
  Gene Symbol: PDE2A
  Gene Name: phosphodiesterase 2A, cGMP-stimulated
  ENST ID: ENST00000536308
  CDS Start-End: 36-356
cggccgggccggcgggcgggcgggcggctgcgagcatggtcctggtgctgcaccacatcctcatcgctgttgtccaattcctcaggcggggccagcaggtcttcctcaagccggacgagccgccgccgccgccgcagccatgcgccgacagcctgcaggacgccttgctgagtctgggctctgtcatcgacatttcaggcctgcaacgtgctgtcaaggaggccctgtcagctgtgctcccccgagtggaaactgtctacacctacctactggatggtgagtcccagctggtgtgtgaggaccccccacatgagctgccccaggaggggaaagtccggtgcactgtggccagctgagtgataatgaggaatggagcctgcaggcggtggagaagcataccctggtcgccctgcggagggtgcaggtcctgcagcagcgcgggcccagggaggctccccgagccgtccagaaccccccggaggggacggcggaagaccagaagggcggggcggcgtacaccgaccgcgaccgcaagatcctccaactgtgcggggaactctacgacctggatgcctcttccctgcagctcaaagtgct

SEQ ID NO: 165321 - DNA, 593 bp, Homo sapiens
  Payload ID: 12552
  Gene Symbol: PDE2A
  Gene Name: phosphodiesterase 2A, cGMP-stimulated
  ENST ID: ENST00000541998
  CDS Start-End: 51-248
gctgaccgagcgcagcggccgggccggcgggcgggcgggcggctgcgagcatggtcctggtgctgcaccacatcctcatcgctgttgtccaattcctcaggcggggccagcaggtcttcctcaagccggacgagccgccgccgccgccgcagccatgcgccgacagcctgcagccagcctggacccccttgcaaaggagccaggacccccagggagtagagacgaccgactggaggacgccttgctgagtctgggctctgtcatcgacatttcaggcctgcaacgtgctgtcaaggaggccctgtcagctgtgctcccccgagtggaaactgtctacacctacctactggatggtgagtcccagctggtgtgtgaggaccccccacatgagctgccccaggaggggaaagtccggtgcactgtggccagctgagtgataatgaggaatggagcctgcaggcggtggagaagcatgtgagtgggagtggggccatgtgcaatgaggctgaagacccttatcacagctggtgggaagatggcctggccagggagctggacagacctgggtttcagcttcggctttgctgcttttg

SEQ ID NO: 165322 - DNA, 1009 bp, Homo sapiens
  Payload ID: 12552
  Gene Symbol: PDE2A
  Gene Name: phosphodiesterase 2A, cGMP-stimulated
  ENST ID: ENST00000475807
  CDS Start-End: 1-1009
cccggcctggacaggtcacgagggcggggccgggcagaacttggaggggaggtgggcgggttaggcgatcccgggagccggcggcgggcccggcgcggagctgagcggcgcctgagggacccggacacggaggtgcggaggggccctctctctgaccggcgcctggcccttgcaggggaactctacgacctggatgcctcttccctgcagctcaaagtgctccaatacctgcagcaggagacccgggcatcccgctgctgcctcctgctggtgtcggaggacaatctccagctttcttgcaaggtcatcggagacaaagtgctcggggaagaggtcagctttcccttgacaggatgcctgggccaggtggtggaagacaagaagtccatccagctgaaggacctcacctccgaggatgtacaacagctgcagagcatgttgggctgtgagctgcaggccatgctctgtgtccctgtcatcagccgggccactgaccaggtggtggccttggcctgcgccttcaacaagctagaaggagacttgttcaccgacgaggacgagcatgtgatccagcactgcttccactacaccagcaccgtgctcaccagcaccctggccttccagaaggaacagaaactcaagtgtgagtgccaggctcttctccaagtggcaaagaacctcttcacccacctggatgacgtctctgtcctgctccaggagatcatcacggaggccagaaacctcagcaacgcagagatctgctctgtgttcctgctggatcagaatgagctggtggccaaggtgttcgacgggggcgtggtggatgatgagagctatgagatccgcatcccggccgatcagggcatcgcgggacacgtggcgaccacgggccagatcctgaacatccctgacgcatatgcccatccgcttttctaccgcggcgtggacgacagcaccggcttccgcacgcgcaacatcctctgcttccccatcaagaacgagaaccagg

SEQ ID NO: 165323 - DNA, 543 bp, Homo sapiens
  Payload ID: 12552
  Gene Symbol: PDE2A
  Gene Name: phosphodiesterase 2A, cGMP-stimulated
  ENST ID: ENST00000535701
  CDS Start-End: 216-332
agagccagccgagcagcagaggcagtggcagcgggagaggcgggagcagcggggcagcagagctggattggggtgttgagtccaggctgagtagggggcagcccactgctcttggtccctgtgcctgctgggggtgccctgccctgaactccaggcagcggggacagggcgaggtgccaccttagtctggctggggaggcggacgatgaggagtgatggggcaggcatgcggccactccatcctctgcaggagccagcagtacccggcagcgcgaccggctgagccccagcctggacccccttgcaaaggagccaggacccccagggagtagagacgaccgactggaggacgccttgctgagtctgggctctgtcatcgacatttcaggcctgcaacgtgctgtcaaggaggccctgtcagctgtgctcccccgagtggaaactgtctacacctacctactggatggtgagtcccagctggtgtgtgaggaccccccacatgagctgccccaggaggggaaagtccgggaggctatcatctcc

SEQ ID NO: 165324 - DNA, 553 bp, Homo sapiens
  Payload ID: 12552
  Gene Symbol: PDE2A
  Gene Name: phosphodiesterase 2A, cGMP-stimulated
  ENST ID: ENST00000538749
  CDS Start-End: 120-553
aagagttggtgaggaggggagctgcagagagaggggccggcagtgcagttgacggggggattcaggcggggccagcaggtcttcctcaagccggacgagccgccgccgccgccgcagccatgcgccgacagcctgcagccagcctggacccccttgcaaaggagccaggacccccagggagtagagacgaccgactggaggacgccttgctgagtctgggctctgtcatcgacatttcaggcctgcaacgtgctgtcaaggaggccctgtcagctgtgctcccccgagtggaaactgtctacacctacctactggatggtgagtcccagctggtgtgtgaggaccccccacatgagctgccccaggaggggaaagtccgggaggctatcatctcccagaagcggctgggctgcaatgggctgggcttctcagacctgccagggaagcccttggccaggctggtggctccactggctcctgatacccaagtgctggtcatgccgctagcggacaaggaggctggggccgtggcagctgtcatcttggtgcactg

SEQ ID NO: 165325 - DNA, 639 bp, Homo sapiens
  Payload ID: 12552
  Gene Symbol: PDE2A
  Gene Name: phosphodiesterase 2A, cGMP-stimulated
  ENST ID: ENST00000542223
  CDS Start-End: 106-639
ttttcacagccaccttccttgagccccatctttccctctttcccctagtctctcctatacaaaaaagtgaatgaggctcagtatcgcagccacctggccaatgagatgatgatgtaccacatgaaggtctccgatgatgagtataccaaacttctccatgatgggatccagcctgtggctgccattgactccaattttgcaagtttcacctatacccctcgttccctgcccgaggatgacacgtccatggccatcctgagcatgctgcaggacatgaatttcatcaacaactacaaaattgactgcccgaccctggcccggttctgtttgatggtgaagaagggctaccgggatcccccctaccacaactggatgcacgccttttctgtctcccacttctgctacctgctctacaagaacctggagctcaccaactacctcgaggacatcgagatctttgccttgtttatttcctgcatgtgtcatgacctggaccacagaggcacaaacaactctttccaggtggcctcgaaatctgtgctggctgcgctctacagctctgagggctccgtcatggagaggcaccactttgctcaggccatcgccatcctcaacacccacggctgcaacatctttgat

SEQ ID NO: 165326 - DNA, 515 bp, Homo sapiens
  Payload ID: 12552
  Gene Symbol: PDE2A
  Gene Name: phosphodiesterase 2A, cGMP-stimulated
  ENST ID: ENST00000538299
  CDS Start-End: 1-515
atccgcggtcaccccctcgccctgcctgtccctctctcagctgcagcaggagacccgggcatcccgctgctgcctcctgctggtgtcggaggacaatctccagctttcttgcaaggtcatcggagacaaagtgctcggggaagaggtcagctttcccttgacaggatgcctgggccaggtggtggaagacaagaagtccatccagctgaaggacctcacctccgaggatgtacaacagctgcagagcatgttgggctgtgagctgcaggccatgctctgtgtccctgtcatcagccgggccactgaccaggtggtggccttggcctgcgccttcaacaagctagaaggagacttgttcaccgacgaggacgagcatgtgatccagcactgcttccactacaccagcaccgtgctcaccagcaccctggccttccagaaggaacagaaactcaagtgtgagtgccaggctcttctccaagtggcaaagaacctcttcacccacctggatgacgtct

SEQ ID NO: 165327 - DNA, 3119 bp, Homo sapiens
  Payload ID: 12552
  Gene Symbol: PDE2A
  Gene Name: phosphodiesterase 2A, cGMP-stimulated
  Uniprot ID: O00408
  ENST ID: ENST00000544570
  CDS Start-End: 85-2889
actcgggcggaccaggcgaagctgtcgcggacgcgctgaccgagcgcagcggccgggccggcgggcgggcgggcggctgcgagcatggtcctggtgctgcaccacatcctcatcgctgttgtccaattcctcaggcggggccagcaggtcttcctcaagccggacgagccgccgccgccgccgcagccatgcgccgacagcctgcaggacgccttgctgagtctgggctctgtcatcgacatttcaggcctgcaacgtgctgtcaaggaggccctgtcagctgtgctcccccgagtggaaactgtctacacctacctactggatggtgagtcccagctggtgtgtgaggaccccccacatgagctgccccaggaggggaaagtccgggaggctatcatctcccagaagcggctgggctgcaatgggctgggcttctcagacctgccagggaagcccttggccaggctggtggctccactggctcctgatacccaagtgctggtcatgccgctagcggacaaggaggctggggccgtggcagctgtcatcttggtgcactgtggccagctgagtgataatgaggaatggagcctgcaggcggtggagaagcataccctggtcgccctgcggagggtgcaggtcctgcagcagcgcgggcccagggaggctccccgagccgtccagaaccccccggaggggacggcggaagaccagaagggcggggcggcgtacaccgaccgcgaccgcaagatcctccaactgtgcggggaactctacgacctggatgcctcttccctgcagctcaaagtgctccaatacctgcagcaggagacccgggcatcccgctgctgcctcctgctggtgtcggaggacaatctccagctttcttgcaaggtcatcggagacaaagtgctcggggaagaggtcagctttcccttgacaggatgcctgggccaggtggtggaagacaagaagtccatccagctgaaggacctcacctccgaggatgtacaacagctgcagagcatgttgggctgtgagctgcaggccatgctctgtgtccctgtcatcagccgggccactgaccaggtggtggccttggcctgcgccttcaacaagctagaaggagacttgttcaccgacgaggacgagcatgtgatccagcactgcttccactacaccagcaccgtgctcaccagcaccctggccttccagaaggaacagaaactcaagtgtgagtgccaggctcttctccaagtggcaaagaacctcttcacccacctggatgacgtctctgtcctgctccaggagatcatcacggaggccagaaacctcagcaacgcagagatctgctctgtgttcctgctggatcagaatgagctggtggccaaggtgttcgacgggggcgtggtggatgatgagagctatgagatccgcatcccggccgatcagggcatcgcgggacacgtggcgaccacgggccagatcctgaacatccctgacgcatatgcccatccgcttttctaccgcggcgtggacgacagcaccggcttccgcacgcgcaacatcctctgcttccccatcaagaacgagaaccaggaggtcatcggtgtggccgagctggtgaacaagatcaatgggccatggttcagcaagttcgacgaggacctggcgacggccttctccatctactgcggcatcagcatcgcccattctctcctatacaaaaaagtgaatgaggctcagtatcgcagccacctggccaatgagatgatgatgtaccacatgaaggtctccgatgatgagtataccaaacttctccatgatgggatccagcctgtggctgccattgactccaattttgcaagtttcacctatacccctcgttccctgcccgaggatgacacgtccatggccatcctgagcatgctgcaggacatgaatttcatcaacaactacaaaattgactgcccgaccctggcccggttctgtttgatggtgaagaagggctaccgggatcccccctaccacaactggatgcacgccttttctgtctcccacttctgctacctgctctacaagaacctggagctcaccaactacctcgaggacatcgagatctttgccttgtttatttcctgcatgtgtcatgacctggaccacagaggcacaaacaactctttccaggtggcctcgaaatctgtgctggctgcgctctacagctctgagggctccgtcatggagaggcaccactttgctcaggccatcgccatcctcaacacccacggctgcaacatctttgatcatttctcccggaaggactatcagcgcatgctggatctgatgcgggacatcatcttggccacagacctggcccaccatctccgcatcttcaaggacctccagaagatggctgaggtgggctacgaccgaaacaacaagcagcaccacagacttctcctctgcctcctcatgacctcctgtgacctctctgaccagaccaagggctggaagactacgagaaagatcgcggagctgatctacaaagaattcttctcccagggagacctggagaaggccatgggcaacaggccgatggagatgatggaccgggagaaggcctatatccctgagctgcaaatcagcttcatggagcacattgcaatgcccatctacaagctgttgcaggacctgttccccaaagcggcagagctgtacgagcgcgtggcctccaaccgtgagcactggaccaaggtgtcccacaagttcaccatccgcggcctcccaagtaacaactcgctggacttcctggatgaggagtacgaggtgcctgatctggatggcactagggcccccatcaatggctgctgcagccttgatgctgagtgatcccctccagggacacttccctgcccaggccacctcccacagccctccactggtctggccagatgcactgggaacagagccacgggtcctgggtcctagaccaggacttcctgtgtgaccctggacaagtactaccttcctgggcctcagctttctcgtctgtataatggaagcaagacttccaacctcacggagactttgtaatttgttttctgagagcacaggggtga

SEQ ID NO: 165328 - DNA, 544 bp, Homo sapiens
  Payload ID: 12552
  Gene Symbol: PDE2A
  Gene Name: phosphodiesterase 2A, cGMP-stimulated
  ENST ID: ENST00000543575
  CDS Start-End: 47-244
accgagcgcagcggccgggccggcgggcgggcgggcggctgcgagcatggtcctggtgctgcaccacatcctcatcgctgttgtccaattcctcaggcggggccagcaggtcttcctcaagccggacgagccgccgccgccgccgcagccatgcgccgacagcctgcagccagcctggacccccttgcaaaggagccaggacccccagggagtagagacgaccgactggaggacgccttgctgagtctgggctctgtcatcgacatttcaggcctgcaacgtgctgtcaaggaggccctgtcagctgtgctcccccgagtggaaactgtctacacctacctactggatggtgagtcccagctggtgtgtgaggaccccccacatgagctgccccaggaggggaaagtccggtgcactgtggccagctgagtgataatgaggaatggagcctgcaggcggtggagaagcataccctggtcgccctgcggagggtgcaggtcctgcagcagcgcgggcccagggaggctccccgagccgtccagaa

SEQ ID NO: 165329 - DNA, 611 bp, Homo sapiens
  Payload ID: 12552
  Gene Symbol: PDE2A
  Gene Name: phosphodiesterase 2A, cGMP-stimulated
  ENST ID: ENST00000542969
  CDS Start-End: 352-611
aacctcctcccagagccagccgagcagcagaggcagtggcagcgggagaggcgggagcagcggggcagcagagctggattggggtgttgagtccaggctgagtagggggcagcccactgctcttggtccctgtgcctgctgggggtgccctgccctgaactccaggcagcggggacagggcgaggtgccaccttagtctggctggggaggcggacgatgaggagtgatggggcaggcatgcggccactccatcctctgcaggagccagcagtacccggcagcgcgaccggctgagccgcggggccagcaggtcttcctcaagccggacgagccgccgccgccgccgcagccatgcgccgacagcctgcagccagcctggacccccttgcaaaggagccaggacccccagggagtagagacgaccgactggaggacgccttgctgagtctgggctctgtcatcgacatttcaggcctgcaacgtgctgtcaaggaggccctgtcagctgtgctcccccgagtggaaactgtctacacctacctactggatggtgagtcccagctggtgtgtgaggaccccccacatgagctgccccaggaggggaaagtccg

SEQ ID NO: 165330 - DNA, 527 bp, Homo sapiens
  Payload ID: 12552
  Gene Symbol: PDE2A
  Gene Name: phosphodiesterase 2A, cGMP-stimulated
  ENST ID: ENST00000537631
  CDS Start-End: 1-226
actctggctggtggcttcagggggcaggcattctgcctttcctgtctcccaccctaagggagttggccttgcatgcctcccatccacggttgcctctactgggggctgccactgggagacaggaagggcatgggagtttcgggagctcaggccagcctggacccccttgcaaaggagccaggacccccagggagtagagacgaccgactggaggacgccttgctgagtctgggctctgtcatcgacatttcaggcctgcaacgtgctgtcaaggaggccctgtcagctgtgctcccccgagtggaaactgtctacacctacctactggatggtgagtcccagctggtgtgtgaggaccccccacatgagctgccccaggaggggaaagtccgggaggctatcatctcccagaagcggctgggctgcaatgggctgggcttctcagacctgccagggaagcccttggccaggctggtggctccactggctcctgatacccaagtgctggtcatgccgctagcggacaa

SEQ ID NO: 165331 - DNA, 3096 bp, Homo sapiens
  Payload ID: 12552
  Gene Symbol: PDE2A
  Gene Name: phosphodiesterase 2A, cGMP-stimulated
  ENST ID: ENST00000539367
  CDS Start-End: 68-265
gaagctgtcgcggacgcgctgaccgagcgcagcggccgggccggcgggcgggcgggcggctgcgagcatggtcctggtgctgcaccacatcctcatcgctgttgtccaattcctcaggcggggccagcaggtcttcctcaagccggacgagccgccgccgccgccgcagccatgcgccgacagcctgcagccagcctggacccccttgcaaaggagccaggacccccagggagtagagacgaccgactggaggacgccttgctgagtctgggctctgtcatcgacatttcaggcctgcaacgtgctgtcaaggaggccctgtcagctgtgctcccccgagtggaaactgtctacacctacctactggatggtgagtcccagctggtgtgtgaggaccccccacatgagctgccccaggaggggaaagtccgggaggctatcatctcccagaagcggctgggctgcaatgggctgggcttctcagacctgccagggaagcccttggccaggctggtggctccactggctcctgatacccaagtgctggtcatgccgctagcggacaaggaggctggggccgtggcagctgtcatcttggtgcactgtggccagctgagtgataatgaggaatggagcctgcaggcggtggagaagcataccctggtcgccctgcggagggtgcaggtcctgcagcagcgcgggcccagggaggctccccgagccgtccagaaccccccggaggggacggcggaagaccagaagggcggggcggcgtacaccgaccgcgaccgcaagatcctccaactgtgcggggaactctacgacctggatgcctcttccctgcagctcaaagtgctccaatacctgcagcaggagacccgggcatcccgctgctgcctcctgctggtgtcggaggacaatctccagctttcttgcaaggtcatcggagacaaagtgctcggggaagaggtcagctttcccttgacaggatgcctgggccaggtggtggaagacaagaagtccatccagctgaaggacctcacctccgaggatgtacaacagctgcagagcatgttgggctgtgagctgcaggccatgctctgtgtccctgtcatcagccgggccactgaccaggtggtggccttggcctgcgccttcaacaagctagaaggagacttgttcaccgacgaggacgagcatgtgatccagcactgcttccactacaccagcaccgtgctcaccagcaccctggccttccagaaggaacagaaactcaagtgtgagtgccaggctcttctccaagtggcaaagaacctcttcacccacctggatgacgtctctgtcctgctccaggagatcatcacggaggccagaaacctcagcaacgcagagatctgctctgtgttcctgctggatcagaatgagctggtggccaaggtgttcgacgggggcgtggtggatgatgagagctatgagatccgcatcccggccgatcagggcatcgcgggacacgtggcgaccacgggccagatcctgaacatccctgacgcatatgcccatccgcttttctaccgcggcgtggacgacagcaccggcttccgcacgcgcaacatcctctgcttccccatcaagaacgagaaccaggaggtcatcggtgtggccgagctggtgaacaagatcaatgggccatggttcagcaagttcgacgaggacctggcgacggccttctccatctactgcggcatcagcatcgcccattctctcctatacaaaaaagtgaatgaggctcagtatcgcagccacctggccaatgagatgatgatgtaccacatgaaggtctccgatgatgagtataccaaacttctccatgatgggatccagcctgtggctgccattgactccaattttgcaagtttcacctatacccctcgttccctgcccgaggatgacacgtccatggccatcctgagcatgctgcaggacatgaatttcatcaacaactacaaaattgactgcccgaccctggcccggttctgtttgatggtgaagaagggctaccgggatcccccctaccacaactggatgcacgccttttctgtctcccacttctgctacctgctctacaagaacctggagctcaccaactacctcgaggacatcgagatctttgccttgtttatttcctgcatgtgtcatgacctggaccacagaggcacaaacaactctttccaggtggcctcgaaatctgtgctggctgcgctctacagctctgagggctccgtcatggagaggcaccactttgctcaggccatcgccatcctcaacacccacggctgcaacatctttgatcatttctcccggaaggaccactactatactgatggtgggattgggacctgggggatacaggggccccaggaagaagctgccagaggggcagctcagtgctctgcagagaggggccctggggagaagcaggatgggattgatgggcaggagggatccccgcactgggagacaggcccaggtatgaatgagccagccatgcttcctcctgcctgtgtgacgctgggcgagtctcttcccctgtctgggccaaacagggagcgggtaagacaatccatgctctaagatccattttagatcaatgtctaaaatagctctatcgctctgcggagtcccagcagaggctatggaatgtttctgcaaccctaaggcacagagagcccaaccctgagtgtctcagaggccccctgagtgttccccttggcctgagccccttacccattcctgcagccagtgagagacctggcctcagccctggcagggctctctcttcaaggccatatccacctgtgccctggggcttgggagaccccatagggccgggactcttgggtcagcccggccactggcttctctctttttctctgtttcattctgtgtgcgttgtggggtgggggagggggtccacctgccttacctttctgagttgcctttagagagatgcgtttttctaggactctgtgcaactgtcgtatatggtcccgtgggctgaccgctttgtacatgagaataaatctatttctttctacc

SEQ ID NO: 165332 - DNA, 344 bp, Homo sapiens
  Payload ID: 12552
  Gene Symbol: PDE2A
  Gene Name: phosphodiesterase 2A, cGMP-stimulated
  ENST ID: ENST00000536458
  CDS Start-End: 67-344
gaagacatccggcatccgtaaaatggagtaatgattctgaccctgcaggttttctgggaggattaaatgagttacattttaaagatgcctggtacatgcctgccaggagaaggcacaacatatgaactccctccctcttccctccacccctcctcagctcctgtgacatcaggagggacatgccctgccctgctcacagaggctgggtgggaggctcccatcatggccttcactgaggctgcctctgcagttggaccaagctggacacacagcggggccagcaggtcttcctcaagccggacgagccgccgccgccgccgcagccatgcgccgacagcctgcag

SEQ ID NO: 165333 - DNA, 3027 bp, Homo sapiens
  Payload ID: 12552
  Gene Symbol: PDE2A
  Gene Name: phosphodiesterase 2A, cGMP-stimulated
  Uniprot ID: O00408
  ENST ID: ENST00000540345
  CDS Start-End: 141-2939
gaagaatctggaagtgcagagcttagcccctggcatgcggcaggtgctcacaaagaagtttacagcttcctgagcactgtttccacacctgtgatctcatttaatcctcaccacaaacccaagagactgctgttttctggatgaagaaacagaggatccaggaggggaaatcgcttgcccacaggcggggccagcaggtcttcctcaagccggacgagccgccgccgccgccgcagccatgcgccgacagcctgcaggacgccttgctgagtctgggctctgtcatcgacatttcaggcctgcaacgtgctgtcaaggaggccctgtcagctgtgctcccccgagtggaaactgtctacacctacctactggatggtgagtcccagctggtgtgtgaggaccccccacatgagctgccccaggaggggaaagtccgggaggctatcatctcccagaagcggctgggctgcaatgggctgggcttctcagacctgccagggaagcccttggccaggctggtggctccactggctcctgatacccaagtgctggtcatgccgctagcggacaaggaggctggggccgtggcagctgtcatcttggtgcactgtggccagctgagtgataatgaggaatggagcctgcaggcggtggagaagcataccctggtcgccctgcggagggtgcaggtcctgcagcagcgcgggcccagggaggctccccgagccgtccagaaccccccggaggggacggcggaagaccagaagggcggggcggcgtacaccgaccgcgaccgcaagatcctccaactgtgcggggaactctacgacctggatgcctcttccctgcagctcaaagtgctccaatacctgcagcaggagacccgggcatcccgctgctgcctcctgctggtgtcggaggacaatctccagctttcttgcaaggtcatcggagacaaagtgctcggggaagaggtcagctttcccttgacaggatgcctgggccaggtggtggaagacaagaagtccatccagctgaaggacctcacctccgaggatgtacaacagctgcagagcatgttgggctgtgagctgcaggccatgctctgtgtccctgtcatcagccgggccactgaccaggtggtggccttggcctgcgccttcaacaagctagaaggagacttgttcaccgacgaggacgagcatgtgatccagcactgcttccactacaccagcaccgtgctcaccagcaccctggccttccagaaggaacagaaactcaagtgtgagtgccaggctcttctccaagtggcaaagaacctcttcacccacctggatgacgtctctgtcctgctccaggagatcatcacggaggccagaaacctcagcaacgcagagatctgctctgtgttcctgctggatcagaatgagctggtggccaaggtgttcgacgggggcgtggtggatgatgagagctatgagatccgcatcccggccgatcagggcatcgcgggacacgtggcgaccacgggccagatcctgaacatccctgacgcatatgcccatccgcttttctaccgcggcgtggacgacagcaccggcttccgcacgcgcaacatcctctgcttccccatcaagaacgagaaccaggaggtcatcggtgtggccgagctggtgaacaagatcaatgggccatggttcagcaagttcgacgaggacctggcgacggccttctccatctactgcggcatcagcatcgcccattctctcctatacaaaaaagtgaatgaggctcagtatcgcagccacctggccaatgagatgatgatgtaccacatgaaggtctccgatgatgagtataccaaacttctccatgatgggatccagcctgtggctgccattgactccaattttgcaagtttcacctatacccctcgttccctgcccgaggatgacacgtccatggccatcctgagcatgctgcaggacatgaatttcatcaacaactacaaaattgactgcccgaccctggcccggttctgtttgatggtgaagaagggctaccgggatcccccctaccacaactggatgcacgccttttctgtctcccacttctgctacctgctctacaagaacctggagctcaccaactacctcgaggacatcgagatctttgccttgtttatttcctgcatgtgtcatgacctggaccacagaggcacaaacaactctttccaggtggcctcgaaatctgtgctggctgcgctctacagctctgagggctccgtcatggagaggcaccactttgctcaggccatcgccatcctcaacacccacggctgcaacatctttgatcatttctcccggaaggactatcagcgcatgctggatctgatgcgggacatcatcttggccacagacctggcccaccatctccgcatcttcaaggacctccagaagatggctgaggtgggctacgaccgaaacaacaagcagcaccacagacttctcctctgcctcctcatgacctcctgtgacctctctgaccagaccaagggctggaagactacgagaaagatcgcggagctgatctacaaagaattcttctcccagggagacctggagaaggccatgggcaacaggccgatggagatgatggaccgggagaaggcctatatccctgagctgcaaatcagcttcatggagcacattgcaatgcccatctacaagctgttgcaggacctgttccccaaagcggcagagctgtacgagcgcgtggcctccaaccgtgagcactggaccaaggtgtcccacaagttcaccatccgcggcctcccaagtaacaactcgctggacttcctggatgaggagtacgaggtgcctgatctggatggcactagggcccccatcaatggctgctgcagccttgatgctgagtgatcccctccagggacacttccctgcccaggccacctcccacagccctccactggtctggccagatgcactgggaacagagccacgggtc

SEQ ID NO: 165334 - DNA, 7576 bp, Homo sapiens
  Payload ID: 12553
  Gene Symbol: PDE3A
  Gene Name: phosphodiesterase 3A, cGMP-inhibited
  Uniprot ID: Q14432
  ENST ID: ENST00000359062
  CDS Start-End: 41-3466
gggggccactgggaattcagtgaagagggcaccctataccatggcagtgcccggcgacgctgcacgagtcagggacaagcccgtccacagtggggtgagtcaagcccccacggcgggccgggactgccaccatcgtgcggaccccgcatcgccgcgggactcgggctgccgtggctgctggggagacctggtgctgcagccgctccggagctctcggaaactttcctccgcgctgtgcgcgggctccctgtcctttctgctggcgctgctggtgaggctggtccgcggggaggtcggctgtgacctggagcagtgtaaggaggcggcggcggcggaggaggaggaagcagccccgggagcagaagggggcgtcttcccggggcctcggggaggtgctcccgggggcggtgcgcggctcagcccctggctgcagccctcggcgctgctcttcagtctcctgtgtgccttcttctggatgggcttgtacctcctgcgcgccggggtgcgcctgcctctggctgtcgcgctgctggccgcctgctgcgggggggaagcgctcgtccagattgggctgggcgtcggggaggatcacttactctcactccccgccgcgggggtggtgctcagctgcttggccgccgcgacatggctggtgctgaggctgaggctgggcgtcctcatgatcgccttgactagcgcggtcaggaccgtgtccctcatttccttagagaggttcaaggtcgcctggagaccttacctggcgtacctggccggcgtgctggggatcctcttggccaggtacgtggaacaaatcttgccgcagtccgcggaggcggctccaagggagcatttggggtcccagctgattgctgggaccaaggaagatatcccggtgtttaagaggaggaggcggtccagctccgtcgtgtccgccgagatgtccggctgcagcagcaagtcccatcggaggacctccctgccctgtataccgagggaacagctcatggggcattcagaatgggaccacaaacgagggccaagaggatcacagtcttcaggaaccagtattactgtggacatcgccgtcatgggcgaggcccacggcctcattaccgacctcctggcagacccttctcttccaccaaacgtgtgcacatccttgagagccgtgagcaacttgctcagcacacagctcaccttccaggccattcacaagcccagagtgaatcccgtcacttcgctcagtgaaaactatacctgttctgactctgaagagagctctgaaaaagacaagcttgctattccaaagcgcctgagaaggagtttgcctcctggcttgttgagacgagtttcttccacttggaccaccaccacctcggccacaggtctacccaccttggagcctgcaccagtacggagagaccgcagcaccagcatcaaactgcaggaagcaccttcatccagtcctgattcttggaataatccagtgatgatgaccctcaccaaaagcagatcctttacttcatcctatgctatttctgcagctaaccatgtaaaggctaaaaagcaaagtcgaccaggtgccctcgctaaaatttcacctctttcatcgccctgctcctcacctctccaagggactcctgccagcagcctggtcagcaaaatttctgcagtgcagtttccagaatctgctgacacaactgccaaacaaagcctaggttctcacagggccttaacttacactcagagtgccccagacctatcccctcaaatcctgactccacctgttatatgtagcagctgtggcagaccatattcccaagggaatcctgctgatgagcccctggagagaagtggggtagccactcggacaccaagtagaacagatgacactgctcaagttacctctgattatgaaaccaataacaacagtgacagcagtgacattgtacagaatgaagatgaaacagagtgcctgagagagcctctgaggaaagcatcggcttgcagcacctatgctcctgagaccatgatgtttctggacaaaccaattcttgctcccgaacctcttgtcatggataacctggactcaattatggagcagctaaatacttggaattttccaatttttgatttagtggaaaatataggaagaaaatgtggccgtattcttagtcaggtatcttacagactttttgaagacatgggcctctttgaagcttttaaaattccaattagggaatttatgaattattttcatgctttggagattggatatagggatattccttatcataacagaatccatgccactgatgttttacatgctgtttggtatcttactacacagcctattccaggcctctcaactgtgattaatgatcatggttcaaccagtgattcagattctgacagtggatttacacatggacatatgggatatgtattctcaaaaacgtataatgtgacagatgataaatacggatgtctgtctgggaatatccctgccttggagttgatggcgctgtatgtggctgcagccatgcacgattatgatcatccaggaaggactaatgctttcctggttgcaactagtgctcctcaggcggtgctatataacgatcgttcagttttggagaatcatcacgcagctgctgcatggaatcttttcatgtcccggccagagtataacttcttaattaaccttgaccatgtggaatttaagcatttccgtttccttgtcattgaagcaattttggccactgacctgaagaaacactttgacttcgtagccaaatttaatggcaaggtaaatgatgatgttggaatagattggaccaatgaaaatgatcgtctactggtttgtcaaatgtgtataaagttggctgatatcaatggtccagctaaatgtaaagaactccatcttcagtggacagatggtattgtcaatgaattttatgaacagggtgatgaagaggccagccttggattacccataagccccttcatggatcgttctgctcctcagctggccaaccttcaggaatccttcatctctcacattgtggggcctctgtgcaactcctatgattcagcaggactaatgcctggaaaatgggtggaagacagcgatgagtcaggagatactgatgacccagaagaagaggaggaagaagcaccagcaccaaatgaagaggaaacctgtgaaaataatgaatctccaaaaaagaagactttcaaaaggagaaaaatctactgccaaataactcagcacctcttacagaaccacaagatgtggaagaaagtcattgaagaggagcaacggttggcaggcatagaaaatcaatccctggaccagacccctcagtcgcactcttcagaacagatccaggctatcaaggaagaagaagaagagaaagggaaaccaagaggcgaggagataccaacccaaaagccagaccagtgacaatggatagaatgggctgtgtttccaaacagattgacttgtcaaagactctcttcaagccagcacaacatttagacacaacactgtagaaatttgagatgggcaaatggctattgcattttgggattcttcgcattttgtgtgtatatttttacagtgaggtacattgttaaaaactttttgctcaaagaagctttcacattgcaacaccagcttctaaggattttttaaggagggaatatatatgtgtgtgtgtatataagctcccacatagatacatgtaaaacatattcacacccatgcacgcacacacatacacactgaaggccacgattgctggctccacaatttagtaacatttatattaagatatatatatagtggtcactgtgatataataaatcataaaggaaaccaaatcacaaaggagatggtgtggcttagcaaggaaacagtgcaggaaatgtaggttaccaactaagcagcttttgctcttagtactgagggatgaaagttccagagcattatttgaattctgatacatcctgccaacactgtgtgtgtgtgtgtgtgtgtgtgtgtgtgtgtgtgtgtgtgtgaaagagagacagaagggaatggtttgagagggtgcttgtgtgcatgtgtgtgcatatgtaaagagatttttgtggtttaagtaactcagaatagctgtagcaaatgactgaatacatgtgaacaaacagaaggaagttcactctggagtgtctttgggaggcagccattccaaatgccctcctccatttagcttcaataaagggccttttgctgatggagggcactcaagggctgggtgagagggccacgtgtttggtattacattactgctatgcaccacttgaaggagctctatcaccagcctcaaacccgaaagactgaggcattttccagtctacttgcctaatgaatgtataggaactgtctatgagtatggatgtcactcaactaagatcaaatcaccatttaaggggatggcattctttatacctaaacacctaagagctgaagtcaggtcttttaatcaggttagaattctaaatgatgccagagaaggcttgggaaattgtacttcagcgtgatagcctgtgtcttcttaatttgctgcaaaatatgtggtagagaaagaaaaggaaacagaaaaatcactctgggttatatagcaagagatgaaggagaatatttcaacacagggtttttgtgttgacataggaaaagcctgattcttggcaactgttgtagtttgtctttcaggggtgaaggtcccactgacaacccctgttgtggtgttccacacgctgtttgttggggtagcttccatcggcagtctggcccattgtcagtcatgcttcttctggccggggagattatagagagattgtttgaagattgggttattattgaaagtctttttttttgtttgttttgttttggtttgtttgtttatctacacttgtttatgctgtgagccaaacctctatttaaaaagttgatactcactttcaatattttatttcatattattatatatgtcatgatagttatcttgatgtaaatatgaagatttttttgtttctgtagatagtaaactctttttttaaaaaaggaaaagggaaacatttttataaagttatattttaatcaccatttttatacattgtagttctctccaagcccagtaagagaatgatgattcatttgcatggaggtcgatggacaaccaatcatctaccttttctaatttaaatgataatctgatatagttttattgccagttaaatgaggatgctgcaaagcatgttttttcactagtaacttttgctaactgaatgaattctgggtccatatctcccagatgaaaaactgttaaccaataccatattttatagttggtgtccatttctttccaacactgtttgttatgattcttccttgagtacttatatacagacctgctcattatctaaacaatcttaccttctaagtaaaccttgattgtgatttccagtttttattttctctgacgtagtagaaaggaatgtttacattaaaaatacttttgtttctcataaatggatattgtactcccccctttcaaagcattattttacaataattcatggcattttaaaaaataaggcaaagataatacgacaaaaaatatacatggtttcaaggcaaattctccaataagttggaaaatgtaaaaaggatcaagtggatgcagcctctacctaaataattaaaatatatttcagtatatttctgaattaacaccaggtcttcattatttagaacttactaaattgttttcattttcttagttttacctgtgtatctccatgtttgcaaaaattactataagtcaaattttgccagtgaatttaactatttttctttccttgcaattaaggggaaaaaagcatttatcttatcttctcataccccttgcatctaagtacttagcaaagtcaatattttcccattttccaaatgcgtccatctctaacataaatattaattgaacatagagctatgtttggagtgagtggactggcaggacagttggaagtccatcacagtctattgacagtttcatcaaagctgtatagtccaactagtggggcagcttggctactatggtggaagtctcagcaaactgcctggttttgtttgtttgttttgttttaaggtacaggaaataagaggaataatagtggccaaagcaattagaacatcttcattccagaactgtgttcagcaatccaggcagattgatacatttttctttaaaaataaattgctattacagctagacgtcaattgggataaataaagggatgaagatccactaagtttgtgactttcatacacacccagtacatctcaaaggatgctaagggacattttctgccagtagagttctccccctttttggtgacagcaatattattatgttcacatctaactccagagcttacttcctgtggtgccaatgtatttgttgcaatttactacatttttatatgagcctatttataggtgccattaaactcaggtctttcaaatgaaagagtttctagcccacttagggaaaaagataattgtttagaaaaccataaaatcaatggtaggaaaagttggaactggttacctggatgccatggttctctgttaaataaagtaagagaccaggtgtattctgagtgtcatcagtgttattttcagcatgctaataaatgtctttccggttatatatctatctaaattaacctttaaaatattggtttccttgataaaagcaccacttttgcttttgttagctgtaatattttttgtcatttagataagacctggtttggctctcaataaaagatgaagacagtagctctgtacagggatatatctatattagtcttcatctgatgaatgaagaaattttctcatattatgttcaagaaagtatttacttcctaaaaatagaattcccgattctgtctattttggttgaataccagaacaaatctttccgttgcaatcccagtaaaacgaaagaaaaggaatatcttacagactgttcatattagatgtatgtagactgttaatttgcaatttccccatatttcctgcctatcttacccagataactttctttgaaggtaaaagctgtgcaaaaggcatgagactcaggcctactctttgtttaaatgatggaaaaatataaattattttctaagtaataaaagtataaaaattatcattataaataaagtctaaagtttgaaattattaatttataaaagtgaactaattgtgtgattatcaaatcctgattaatgagaagtgaataatctaaaaatcatttatattctactgtgggaggtattcttggtgcttccatgtcagtatcgggctctccattgtcctcatcatttatagtacttctaaaataataatggaaacctcaataagggtcttgtcctcttctgtcatcctaaccctgattctagtttaatgcctttcctgacttatatgccatttgtaaataaacttcctttcaaactgttagaa

SEQ ID NO: 165335 - DNA, 6076 bp, Homo sapiens
  Payload ID: 12554
  Gene Symbol: PDE3B
  Gene Name: phosphodiesterase 3B, cGMP-inhibited
  Uniprot ID: Q13370
  ENST ID: ENST00000282096
  CDS Start-End: 354-3692
gctcgcgcgcccaacggaccaggctggggccgtgaggtaactgttgcagccagcggaggtgggaggcgacactgagtctccagtcccgagaggtgcccgagggaaaaggaggcggcagctaaactggtcctggagagaagccccttccgcccctctcctcagccagcatgtcccggactccgccgctcctcagtccgcgcggtggggaccccgggccgtggcggccggcgcagccctgacgggttgcgaaccagggggcgccccgaacgcgggggttggggtctgggagcgcgagcggccgctacggtacgagcggggtgtgctgagtcccgtggccacccccggccccagccatgaggagggacgagcgagacgccaaagccatgcggtccctgcagccgccggatggggccggctcgccccccgagagtctgaggaacggctacgtgaagagctgcgtgagccccttgcggcaggaccctccgcgcggcttcttcttccacctctgccgcttctgcaacgtggagctgcggccgccgccggcctctccccagcagccgcggcgctgctcccccttctgccgggcgcgcctctcgctgggcgccctggctgcctttgtcctcgccctgctgctgggcgcggaacccgagagctgggctgccggggccgcctggctgcggacgctgctgagcgtgtgttcgcacagcttgagccccctcttcagcatcgcctgtgccttcttcttcctcacctgcttcctcacccggaccaagcggggacccggcccgggccggagctgcggctcctggtggctgctggcgctgcccgcctgctgttacctgggggacttcttggtgtggcagtggtggtcttggccttggggggatggcgacgcagggtccgcggccccgcacacgcccccggaggcggcagcgggcaggttgctgctggtgctgagctgcgtagggctgctgctgacgctcgcgcacccgctgcggctccggcactgcgttctggtgctgctcctggccagcttcgtctggtgggtctccttcaccagcctcgggtcgctgccctccgccctcaggccgctgctctccggcctggtggggggcgctggctgcctgctggccctggggttggatcacttctttcaaatcagggaagcgcctcttcatcctcgactgtccagtgccgccgaagaaaaagtgcctgtgatccgaccccggaggaggtccagctgcgtgtcgttaggagaaactgcagccagttactatggcagttgcaaaatattcaggagaccgtcgttgccttgtatttccagagaacagatgattctttgggattgggacttaaaacaatggtataagcctcattatcaaaattctggaggtggaaatggagttgatctttcagtgctaaatgaggctcgcaatatggtgtcagatcttctgactgatccaagccttccaccacaagtcatttcctctctacggagtattagtagcttaatgggtgctttctcaggttcctgtaggccaaagattaatcctctcacaccatttcctggattttacccctgttctgaaatagaggacccagctgagaaaggggatagaaaacttaacaagggactaaataggaatagtttgccaactccacagctgaggagaagctcaggaacttcaggattgctacctgttgaacagtcttcaaggtgggatcgtaataatggcaaaagacctcaccaagaatttggcatttcaagtcaaggatgctatctaaatgggccttttaattcaaatctactgactatcccgaagcaaaggtcatcttctgtatcactgactcaccatgtaggtctcagaagagctggtgttttgtccagtctgagtcctgtgaattcttccaaccatggaccagtgtctactggctctctaactaatcgatcacccatagaatttcctgatactgctgattttcttaataagccaagcgttatcttgcagagatctctgggcaatgcacctaatactccagatttttatcagcaacttagaaattctgatagcaatctgtgtaacagctgtggacatcaaatgctgaaatatgtttcaacatctgaatcagatggtacagattgctgcagtggaaaatcaggtgaagaagaaaacattttctcgaaagaatcattcaaacttatggaaactcaacaagaagaggaaacagagaagaaagacagcagaaaattatttcaggaaggtgataagtggctaacagaagaggcacagagtgaacagcaaacaaatattgaacaggaagtatcactggacctgattttagtagaagagtatgactcattaatagaaaagatgagcaactggaattttccaatttttgaacttgtagaaaagatgggagagaaatcaggaaggattctcagtcaggttatgtataccttatttcaagacactggtttattggaaatatttaaaattcccactcaacaatttatgaactattttcgtgcattagaaaatggctatcgagacattccttatcacaatcgtatacatgccacagatgtgctacatgcagtttggtatctgacaacacggccagttcctggcttacagcagatccacaatggttgtggaacaggaaatgaaacagattctgatggtagaattaaccatgggcgaattgcttatatttcttcgaagagctgctctaatcctgatgagagttatggctgcctgtcttcaaacattcctgcattagaattgatggctctatacgtggcagctgccatgcatgattatgatcacccagggaggacaaatgcatttctagtggctacaaatgcccctcaggcagttttatacaatgacagatctgttctggaaaatcatcatgctgcgtcagcttggaatctatatctttctcgcccagaatacaacttccttcttcatcttgatcatgtggaattcaagcgctttcgttttttagtcattgaagcaatccttgctacggatcttaaaaagcattttgattttctcgcagaattcaatgccaaggcaaatgatgtaaatagtaatggcatagaatggagtaatgaaaatgatcgcctcttggtatgccaggtgtgcatcaaactggcagatataaatggcccagcaaaagttcgagacttgcatttgaaatggacagaaggcattgtcaatgaattttatgagcagggagatgaagaagcaaatcttggtctgcccatcagtccattcatggatcgttcttctcctcaactagcaaaactccaagaatcttttatcacccacatagtgggtcccctgtgtaactcctatgatgctgctggtttgctaccaggtcagtggttagaagcagaagaggataatgatactgaaagtggtgatgatgaagacggtgaagaattagatacagaagatgaagaaatggaaaacaatctaaatccaaaaccaccaagaaggaaaagcagacggcgaatattttgtcagctaatgcaccacctcactgaaaaccacaagatatggaaggaaatcgtagaggaagaagaaaaatgtaaagctgatgggaataaactgcaggtggagaattcctccttacctcaagcagatgagattcaggtaattgaagaggcagatgaagaggaatagcgacagtttgagtaaaagaaaagtcatattgaagaagcccagagggttgtgcccaggggcagaaatcattgcctagtgttcaccggctgactctcaactgaccattcccatgtggacaggccttaatactgtgagaggatccttgctctgctggcagtttcccactcctatgcactttcacaggaactagaaaactattcttaaaccaaaaataccatccgtgttgacccatgttgcagagcccttacttaaatccttcactggtgtatgaatactttgtcataatgctgctttgctgggtagtgagctcttatttttcactgggggtcagctataactaaaaactcaagtgacatatttcagttaccaaagtggccaggaactttttgcttttatgaaaatagattcatattgtatttcccagtgtgtcttttatgtctttgaatgttttggagaaaagtctatgcctgtctaaaaatgaatccagtgttgcctttctgagggatttctgctcaatgcaatacactgttcagtgctattctcccagctaggtttatccatgaaggactgagtgacctttgttgtatttaacaaaatccaggtgcatcaatttctgatgctttttactattgtgtattatctactatgtgtgttttatttctgctgagagtattcaggtttgccatggacatcagaagtttgaattccagtcttatcttatgttccatggctgaattttaaagctgtttaggtttaacaatgaagggatttattctttagtcaaaattgttgtttttactctagctcaggattcgtatttttaaagatttagttaatatgaacacagcacagatttgttagaagaaaaaaaatttgctgtaataccaaaactaacctcatcaaagatacagaaaaaaagaaatatagtgagccctaaaggacacatacattgaataaataattggaacatgtggttatctttagatccacatcttagctgtcatttgttcactctaaaactgatgttcatctttctgttaatttccctctgcctaaagactacatgacagaaatgacctatcactacttattatttctgaagcctaactgcaagactgatttctgagaacaagtaaagaactggaatacttatttttcatataaaaatctaaatgtgttaataaatcatttcatacaaaagtacattattaaataaccacattattaaaataattgcaagaaaatggaccatatttacaatgttttgtaaacttgctagtgtgtggatatgtaccctacttgtgaaatacatttgaagatataaagagcagccaaaatgatggcaaaatggtaggctaatattttctattattattggagaacatatcatattttggaatcatgcaattttgcacacagtgaaaccattaattttccaaggtaattcctttagaatatggtattggcatgcagtttcttacttatctagaatatttggcttatctgaaagatatcaatttaagatctctggaagtgttagaatttttgatccttcacagtgtcaatatttaatgaatcactaagctttatttattagacgtgttgagtgagtgctgagttccttgctgccacttttgttaccattgtcacacactatgtgtaaaccagtcccaccacttattactaataaaattttgactgataatttatatttgcacttacaatatatatatcctgtccttatatttctctagagtacattttccatcatgtttaagtgtatttctgctattatttcctctcctgcagaatacatacaagtgtatgtgtataaagtcatacatgtacaagcatgcatattgagattgaatcacatttccatactgtctgttattttattgggttttatattgggtttctttagtttatgttgttttctcaaaagcagcattttaaattacgaatactggacttattggatttaattataaatccaattactactggaaactcatttttacataatatagtccttaaattatttaacccttgctaagtaattgacatatgtaacaataactagcctaaagaaacccaaaaaagtatctctcccgagctgaaacttaaaaattcgtaagtgtaagaaagaatgtgagaatatattaaatgcacactgtaccattagatgaaatcttacttgagaaattgccataagccatattacagatcttactttgttactgaatcagattaatttcttgttataataattttcatcataaattttctatttttaaagccgctggtactagaaatattcttttaatgctatatctatgtacctactgacacatttttctccataaaagtacttttaaaaatta

SEQ ID NO: 165336 - DNA, 3665 bp, Homo sapiens
  Payload ID: 12554
  Gene Symbol: PDE3B
  Gene Name: phosphodiesterase 3B, cGMP-inhibited
  Uniprot ID: Q13370
  ENST ID: ENST00000455098
  CDS Start-End: 246-3431
gaggcggcagctaaactggtcctggagagaagccccttccgcccctctcctcagccagcatgtcccggactccgccgctcctcagtccgcgcggtggggaccccgggccgtggcggccggcgcagccctgacgggttgcgaaccagggggcgccccgaacgcgggggttggggtctgggagcgcgagcggccgctacggtacgagcggggtgtgctgagtcccgtggccacccccggccccagccatgaggagggacgagcgagacgccaaagccatgcggtccctgcagccgccggatggggccggctcgccccccgagagtctgaggaacggctacgtgaagagctgcgtgagccccttgcggcaggaccctccgcgcggcttcttcttccacctctgccgcttctgcaacgtggagctgcggccgccgccggcctctccccagcagccgcggcgctgctcccccttctgccgggcgcgcctctcgctgggcgccctggctgcctttgtcctcgccctgctgctgggcgcggaacccgagagctgggctgccggggccgcctggctgcggacgctgctgagcgtgtgttcgcacagcttgagccccctcttcagcatcgcctgtgccttcttcttcctcacctgcttcctcacccggaccaagcggggacccggcccgggccggagctgcggctcctggtggctgctggcgctgcccgcctgctgttacctgggggacttcttggtgtggcagtggtggtcttggccttggggggatggcgacgcagggtccgcggccccgcacacgcccccggaggcggcagcgggcaggttgctgctggtgctgagctgcgtagggctgctgctgacgctcgcgcacccgctgcggctccggcactgcgttctggtgctgctcctggccagcttcgtctggtgggtctccttcaccagcctcgggtcgctgccctccgccctcaggccgctgctctccggcctggtggggggcgctggctgcctgctggccctggggttggatcacttctttcaaatcagggaagcgcctcttcatcctcgactgtccagtgccgccgaagaaaaagtgcctgtgatccgaccccggaggaggtccagctgcgtgtcgttaggagaaactgcagccagttactatggcagttgcaaaatattcaggagaccgtcgttgccttgtatttccagagaacagatgattctttgggattgggacttaaaacaatggtataagcctcattatcaaaattctggaggtggaaatggagttgatctttcagtgctaaatgaggctcgcaatatggtgtcagatcttctgactgatccaagccttccaccacaaggactaaataggaatagtttgccaactccacagctgaggagaagctcaggaacttcaggattgctacctgttgaacagtcttcaaggtgggatcgtaataatggcaaaagacctcaccaagaatttggcatttcaagtcaaggatgctatctaaatgggccttttaattcaaatctactgactatcccgaagcaaaggtcatcttctgtatcactgactcaccatgtaggtctcagaagagctggtgttttgtccagtctgagtcctgtgaattcttccaaccatggaccagtgtctactggctctctaactaatcgatcacccatagaatttcctgatactgctgattttcttaataagccaagcgttatcttgcagagatctctgggcaatgcacctaatactccagatttttatcagcaacttagaaattctgatagcaatctgtgtaacagctgtggacatcaaatgctgaaatatgtttcaacatctgaatcagatggtacagattgctgcagtggaaaatcaggtgaagaagaaaacattttctcgaaagaatcattcaaacttatggaaactcaacaagaagaggaaacagagaagaaagacagcagaaaattatttcaggaaggtgataagtggctaacagaagaggcacagagtgaacagcaaacaaatattgaacaggaagtatcactggacctgattttagtagaagagtatgactcattaatagaaaagatgagcaactggaattttccaatttttgaacttgtagaaaagatgggagagaaatcaggaaggattctcagtcaggttatgtataccttatttcaagacactggtttattggaaatatttaaaattcccactcaacaatttatgaactattttcgtgcattagaaaatggctatcgagacattccttatcacaatcgtatacatgccacagatgtgctacatgcagtttggtatctgacaacacggccagttcctggcttacagcagatccacaatggttgtggaacaggaaatgaaacagattctgatggtagaattaaccatgggcgaattgcttatatttcttcgaagagctgctctaatcctgatgagagttatggctgcctgtcttcaaacattcctgcattagaattgatggctctatacgtggcagctgccatgcatgattatgatcacccagggaggacaaatgcatttctagtggctacaaatgcccctcaggcagttttatacaatgacagatctgttctggaaaatcatcatgctgcgtcagcttggaatctatatctttctcgcccagaatacaacttccttcttcatcttgatcatgtggaattcaagcgctttcgttttttagtcattgaagcaatccttgctacggatcttaaaaagcattttgattttctcgcagaattcaatgccaaggcaaatgatgtaaatagtaatggcatagaatggagtaatgaaaatgatcgcctcttggtatgccaggtgtgcatcaaactggcagatataaatggcccagcaaaagttcgagacttgcatttgaaatggacagaaggcattgtcaatgaattttatgagcagggagatgaagaagcaaatcttggtctgcccatcagtccattcatggatcgttcttctcctcaactagcaaaactccaagaatcttttatcacccacatagtgggtcccctgtgtaactcctatgatgctgctggtttgctaccaggtcagtggttagaagcagaagaggataatgatactgaaagtggtgatgatgaagacggtgaagaattagatacagaagatgaagaaatggaaaacaatctaaatccaaaaccaccaagaaggaaaagcagacggcgaatattttgtcagctaatgcaccacctcactgaaaaccacaagatatggaaggaaatcgtagaggaagaagaaaaatgtaaagctgatgggaataaactgcaggtggagaattcctccttacctcaagcagatgagattcaggtaattgaagaggcagatgaagaggaatagcgacagtttgagtaaaagaaaagtcatattgaagaagcccagagggttgtgcccaggggcagaaatcattgcctagtgttcaccggctgactctcaactgaccattcccatgtggacaggccttaatactgtgagaggatccttgctctgctggcagtttcccactcctatgcactttcacaggaactagaaaactattcttaaaccaaaaataccatccgtgttgacccatgt

SEQ ID NO: 165337 - DNA, 2583 bp, Homo sapiens
  Payload ID: 12555
  Gene Symbol: PDE4A
  Gene Name: phosphodiesterase 4A, cAMP-specific
  Uniprot ID: P27815
  ENST ID: ENST00000293683
  CDS Start-End: 1-2583
atggcgcggccgcgcggcctaggccgcatcccggagctgcaactggtggccttcccggtggcggtggcggctgaggacgaggcgttcctgcccgagcccctggccccgcgcgcgccccgccgcccgcgttcgccgccctcctcgcccgtcttcttcgccagcccgtccccaactttccgcagacgccttcggcttctccgcagctgccaggatttgggccgccaggcttgggctggggctggcttcgaggcagagaatgggccgacaccatctcctggccgcagccccctggactcgcaggcgagcccaggactcgtgctgcacgccggggcggccaccagccagcgccgggagtccttcctgtaccgctcagacagcgactatgacatgtcacccaagaccatgtcccggaactcatcggtcaccagcgaggcgcacgctgaagacctcatcgtaacaccatttgctcaggtgctggccagcctccggagcgtccgtagcaacttctcactcctgaccaatgtgcccgttcccagtaacaagcggtccccgctgggcggccccacccctgtctgcaaggccacgctgtcagaagaaacgtgtcagcagttggcccgggagactctggaggagctggactggtgtctggagcagctggagaccatgcagacctatcgctctgtcagcgagatggcctcgcacaagttcaaaaggatgttgaaccgtgagctcacacacctgtcagaaatgagcaggtccggaaaccaggtctcagagtacatttccacaacattcctggacaaacagaatgaagtggagatcccatcacccacgatgaaggaacgagaaaaacagcaagcgccgcgaccaagaccctcccagccgcccccgccccctgtaccacacttacagcccatgtcccaaatcacagggttgaaaaagttgatgcatagtaacagcctgaacaactctaacattccccgatttggggtgaagaccgatcaagaagagctcctggcccaagaactggagaacctgaacaagtggggcctgaacatcttttgcgtgtcggattacgctggaggccgctcactcacctgcatcatgtacatgatattccaggagcgggacctgctgaagaaattccgcatccctgtggacacgatggtgacatacatgctgacgctggaggatcactaccacgctgacgtggcctaccataacagcctgcacgcagctgacgtgctgcagtccacccacgtactgctggccacgcctgcactagatgcagtgttcacggacctggagattctcgccgccctcttcgcggctgccatccacgatgtggatcaccctggggtctccaaccagttcctcatcaacaccaattcggagctggcgctcatgtacaacgatgagtcggtgctcgagaatcaccacctggccgtgggcttcaagctgctgcaggaggacaactgcgacatcttccagaacctcagcaagcgccagcggcagagcctacgcaagatggtcatcgacatggtgctggccacggacatgtccaagcacatgaccctcctggctgacctgaagaccatggtggagaccaagaaagtgaccagctcaggggtcctcctgctagataactactccgaccgcatccaggtcctccggaacatggtgcactgtgccgacctcagcaaccccaccaagccgctggagctgtaccgccagtggacagaccgcatcatggccgagttcttccagcagggtgaccgagagcgcgagcgtggcatggaaatcagccccatgtgtgacaagcacactgcctccgtggagaagtctcaggtgggttttattgactacattgtgcacccattgtgggagacctgggcggaccttgtccacccagatgcccaggagatcttggacactttggaggacaaccgggactggtactacagcgccatccggcagagcccatctccgccacccgaggaggagtcaagggggccaggccacccacccctgcctgacaagttccagtttgagctgacgctggaggaggaagaggaggaagaaatatcaatggcccagataccgtgcacagcccaagaggcattgactgcgcagggattgtcaggagtcgaggaagctctggatgcaaccatagcctgggaggcatccccggcccaggagtcgttggaagttatggcacaggaagcatccctggaggccgagctggaggcagtgtatttgacacagcaggcacagtccacaggcagtgcacctgtggctccggatgagttctcgtcccgggaggaattcgtggttgctgtaagccacagcagcccctctgccctggctcttcaaagcccccttctccctgcttggaggaccctgtctgtttcagagcatgccccgggcctcccgggcctcccctccacggcggccgaggtggaggcccaacgagagcaccaggctgccaagagggcttgcagtgcctgcgcagggacatttggggaggacacatccgcactcccagctcctggtggcggggggtcaggtggagaccctacctga

SEQ ID NO: 165338 - DNA, 2579 bp, Homo sapiens
  Payload ID: 12555
  Gene Symbol: PDE4A
  Gene Name: phosphodiesterase 4A, cAMP-specific
  Uniprot ID: P27815
  ENST ID: ENST00000344979
  CDS Start-End: 326-2269
cgggtgcacacacagagctccgcagcctcctcctgggacccttgccctgcccccctcccatgggcacggaccccccaccgcctccacccactgccgcgggggggcccgttggggcccagggctggcgggccatgtaaccagggctgctgctgggagcgcggaggggaagggagcccccagccctgctgggccggcccaggcccctccgcggctcccccttccactacccacctgcccggcaccccctccccagtggttgttaaccccgggactccccaagcccagcctctgtgtgcagcagccccaggcgggctaagtctccaagatgcccttggtggatttcttctgcgagacctgctctaagccttggctggtgggctggtgggaccagttcaaaaggatgttgaaccgtgagctcacacacctgtcagaaatgagcaggtccggaaaccaggtctcagagtacatttccacaacattcctggacaaacagaatgaagtggagatcccatcacccacgatgaaggaacgagaaaaacagcaagcgccgcgaccaagaccctcccagccgcccccgccccctgtaccacacttacagcccatgtcccaaatcacagggttgaaaaagttgatgcatagtaacagcctgaacaactctaacattccccgatttggggtgaagaccgatcaagaagagctcctggcccaagaactggagaacctgaacaagtggggcctgaacatcttttgcgtgtcggattacgctggaggccgctcactcacctgcatcatgtacatgatattccaggagcgggacctgctgaagaaattccgcatccctgtggacacgatggtgacatacatgctgacgctggaggatcactaccacgctgacgtggcctaccataacagcctgcacgcagctgacgtgctgcagtccacccacgtactgctggccacgcctgcactagatgcagtgttcacggacctggagattctcgccgccctcttcgcggctgccatccacgatgtggatcaccctggggtctccaaccagttcctcatcaacaccaattcggagctggcgctcatgtacaacgatgagtcggtgctcgagaatcaccacctggccgtgggcttcaagctgctgcaggaggacaactgcgacatcttccagaacctcagcaagcgccagcggcagagcctacgcaagatggtcatcgacatggtgctggccacggacatgtccaagcacatgaccctcctggctgacctgaagaccatggtggagaccaagaaagtgaccagctcaggggtcctcctgctagataactactccgaccgcatccaggtcctccggaacatggtgcactgtgccgacctcagcaaccccaccaagccgctggagctgtaccgccagtggacagaccgcatcatggccgagttcttccagcagggtgaccgagagcgcgagcgtggcatggaaatcagccccatgtgtgacaagcacactgcctccgtggagaagtctcaggtgggttttattgactacattgtgcacccattgtgggagacctgggcggaccttgtccacccagatgcccaggagatcttggacactttggaggacaaccgggactggtactacagcgccatccggcagagcccatctccgccacccgaggaggagtcaagggggccaggccacccacccctgcctgacaagttccagtttgagctgacgctggaggaggaagaggaggaagaaatatcaatggcccagataccgtgcacagcccaagaggcattgactgcgcagggattgtcaggagtcgaggaagctctggatgcaaccatagcctgggaggcatccccggcccaggagtcgttggaagttatggcacaggaagcatccctggaggccgagctggaggcagtgtatttgacacagcaggcacagtccacaggcagtgcacctgtggctccggatgagttctcgtcccgggaggaattcgtggttgctgtaagccacagcagcccctctgccctggctcttcaaagcccccttctccctgcttggaggaccctgtctgtttcagagcatgccccgggcctcccgggcctcccctccacggcggccgaggtggaggcccaacgagagcaccaggctgccaagagggcttgcagtgcctgcgcagggacatttggggaggacacatccgcactcccagctcctggtggcggggggtcaggtggagaccctacctgatccccagacctctgtccctgttcccctccactcctcccctcactcccctgctcccccgaccacctcctcctctgcctcaaagactcttgtcctcttgtccctcctgagaaaaaagaaaacgaaaagtggggtttttttctgttttctttttttcccctttccccctgcccccacccacggggcctttttttggaggtgggggctggggaatgaggggctgaggtcccggaagggattttatttttttgaattttaattgtaacatttttagaaaaagaacaaaaaaagaaaaaaaaaagaaagaaacaca

SEQ ID NO: 165339 - DNA, 4781 bp, Homo sapiens
  Payload ID: 12555
  Gene Symbol: PDE4A
  Gene Name: phosphodiesterase 4A, cAMP-specific
  Uniprot ID: P27815
  ENST ID: ENST00000380702
  CDS Start-End: 111-2771
cgcggccgggcgcacccgcggggccctgggctcgctggcttgcgcgcagctgagcggggtgtaggttggaagggccagggccccctggggcgcaagtgggggccggcgccatggaacccccgaccgtcccctcggaaaggagcctgtctctgtcactgcccgggccccgggagggccaggccaccctgaagcctcccccgcagcacctgtggcggcagcctcggacccccatccgtatccagcagcgcggctactccgacagcgcggagcgcgccgagcgggagcggcagccgcaccggcccatagagcgcgccgatgccatggacaccagcgaccggcccggcctgcgcacgacccgcatgtcctggccctcgtccttccatggcactggcaccggcagcggcggcgcgggcggaggcagcagcaggcgcttcgaggcagagaatgggccgacaccatctcctggccgcagccccctggactcgcaggcgagcccaggactcgtgctgcacgccggggcggccaccagccagcgccgggagtccttcctgtaccgctcagacagcgactatgacatgtcacccaagaccatgtcccggaactcatcggtcaccagcgaggcgcacgctgaagacctcatcgtaacaccatttgctcaggtgctggccagcctccggagcgtccgtagcaacttctcactcctgaccaatgtgcccgttcccagtaacaagcggtccccgctgggcggccccacccctgtctgcaaggccacgctgtcagaagaaacgtgtcagcagttggcccgggagactctggaggagctggactggtgtctggagcagctggagaccatgcagacctatcgctctgtcagcgagatggcctcgcacaagttcaaaaggatgttgaaccgtgagctcacacacctgtcagaaatgagcaggtccggaaaccaggtctcagagtacatttccacaacattcctggacaaacagaatgaagtggagatcccatcacccacgatgaaggaacgagaaaaacagcaagcgccgcgaccaagaccctcccagccgcccccgccccctgtaccacacttacagcccatgtcccaaatcacagggttgaaaaagttgatgcatagtaacagcctgaacaactctaacattccccgatttggggtgaagaccgatcaagaagagctcctggcccaagaactggagaacctgaacaagtggggcctgaacatcttttgcgtgtcggattacgctggaggccgctcactcacctgcatcatgtacatgatattccaggagcgggacctgctgaagaaattccgcatccctgtggacacgatggtgacatacatgctgacgctggaggatcactaccacgctgacgtggcctaccataacagcctgcacgcagctgacgtgctgcagtccacccacgtactgctggccacgcctgcactagatgcagtgttcacggacctggagattctcgccgccctcttcgcggctgccatccacgatgtggatcaccctggggtctccaaccagttcctcatcaacaccaattcggagctggcgctcatgtacaacgatgagtcggtgctcgagaatcaccacctggccgtgggcttcaagctgctgcaggaggacaactgcgacatcttccagaacctcagcaagcgccagcggcagagcctacgcaagatggtcatcgacatggtgctggccacggacatgtccaagcacatgaccctcctggctgacctgaagaccatggtggagaccaagaaagtgaccagctcaggggtcctcctgctagataactactccgaccgcatccaggtcctccggaacatggtgcactgtgccgacctcagcaaccccaccaagccgctggagctgtaccgccagtggacagaccgcatcatggccgagttcttccagcagggtgaccgagagcgcgagcgtggcatggaaatcagccccatgtgtgacaagcacactgcctccgtggagaagtctcaggtgggttttattgactacattgtgcacccattgtgggagacctgggcggaccttgtccacccagatgcccaggagatcttggacactttggaggacaaccgggactggtactacagcgccatccggcagagcccatctccgccacccgaggaggagtcaagggggccaggccacccacccctgcctgacaagttccagtttgagctgacgctggaggaggaagaggaggaagaaatatcaatggcccagataccgtgcacagcccaagaggcattgactgcgcagggattgtcaggagtcgaggaagctctggatgcaaccatagcctgggaggcatccccggcccaggagtcgttggaagttatggcacaggaagcatccctggaggccgagctggaggcagtgtatttgacacagcaggcacagtccacaggcagtgcacctgtggctccggatgagttctcgtcccgggaggaattcgtggttgctgtaagccacagcagcccctctgccctggctcttcaaagcccccttctccctgcttggaggaccctgtctgtttcagagcatgccccgggcctcccgggcctcccctccacggcggccgaggtggaggcccaacgagagcaccaggctgccaagagggcttgcagtgcctgcgcagggacatttggggaggacacatccgcactcccagctcctggtggcggggggtcaggtggagaccctacctgatccccagacctctgtccctgttcccctccactcctcccctcactcccctgctcccccgaccacctcctcctctgcctcaaagactcttgtcctcttgtccctcctgagaaaaaagaaaacgaaaagtggggtttttttctgttttctttttttcccctttccccctgcccccacccacggggcctttttttggaggtgggggctggggaatgaggggctgaggtcccggaagggattttatttttttgaattttaattgtaacatttttagaaaaagaacaaaaaaagaaaaaaaaaagaaagaaacacagcaactgtagatgctcctgttcctggttcccgctttccacttccaaatccctcccctcaccttcccccactgccccccaagttccaggctcagtcttccagccgcctggggagtctctacctgggcccaagcaggtgtggggcctccttctgggcttttcttctgaatttagaggatttctagaacgtggtcaggaatagccattctaggcggggctggggccagggtggggggcagtcactgtgggaggtcccagctccagcccccctctggtttgctgcctcctctcccctctaaaaaagtcttccgcttgattttgcacaatcccggcgatactcctggcgatactgactagaaagtcagggagctgggggagctgttcactttaggatacgggggtggtatggaagggagcgttcacaccgccagcctcgggcctgggatttgaggagggccctagacctcctccactctccatcccctttcccttccactttgggttcactttgaattttctccgttttttggggcagtggctctgatccactcacccccccgccccccgccccacttctagctgcttctcctcttgtttctgccttaataattcccacggccacaggcaagggggttgcagtggccgcctgcaccttggatgaggcagggccaggcgcccagaacccccatcctggccgcacccccctttccagggtcctccggaccccaccttccacactctgatcacagcccccctaccttttgccctaggaggaagcaataatggtgtataccctcattctcattcctgggcagcccttccttccaccctggcaccaaaataatttctcctccatccgtaccttgcctagcctctccctctcccccagctagtccctgagcaatacggcagacagatgcaagaccatttttctccaagccatgggggactgtttggaaggaaagccccctctctccctcctcccctcgccctcggcctggttctgcagctggaccgacctcattcatcgcctgccccctacccaattctgagcacacggtactgtagcccccagttcctccctagccttccatccctctgtccaccccagggggaggtaaccccgcactcacactcccttgatgctgtctgtacagggttcatattttgtagcgaaagtcgtttttgtcccagccggcgatcggagtgggccttttctttctttttgttcattctttacctttttttcttttctttctttcttttttgtacatactgtaaggttggtttgtaaattattctacggaggcaaaaagggaaaataaaaacttgcccttccctggctgacccagtcgggaaggtagggaaggaggtctcccgttgggagagtctctgttcctgctgtattatacaaactgtaccatagtcctgggaaaagggtggactcaccgctgttgttttatgggaagtcgtgtcatcctaggggttggggctgggcagagcctgtcccctccccccttctccaggagccagggggtgactggagagacagacccacccccaagcagggctcctctccccagggtgagcacaggacctctgtaagctgcttgtgtattgtccactttgacgatcagtcattcggtccgttgatcaataatccttcgatcttgtctccaattaaaccgaggctttcaccgat

SEQ ID NO: 165340 - DNA, 2478 bp, Homo sapiens
  Payload ID: 12555
  Gene Symbol: PDE4A
  Gene Name: phosphodiesterase 4A, cAMP-specific
  Uniprot ID: P27815
  ENST ID: ENST00000440014
  CDS Start-End: 1-2478
atgcgctccggtgcagcgccccgggcccggccccggccccctgccctggcactgccccccacgggccccgagtccctgacccacttccccttcagcgatgaggacacccgtcggcaccctccgggcagatctgtcagcttcgaggcagagaatgggccgacaccatctcctggccgcagccccctggactcgcaggcgagcccaggactcgtgctgcacgccggggcggccaccagccagcgccgggagtccttcctgtaccgctcagacagcgactatgacatgtcacccaagaccatgtcccggaactcatcggtcaccagcgaggcgcacgctgaagacctcatcgtaacaccatttgctcaggtgctggccagcctccggagcgtccgtagcaacttctcactcctgaccaatgtgcccgttcccagtaacaagcggtccccgctgggcggccccacccctgtctgcaaggccacgctgtcagaagaaacgtgtcagcagttggcccgggagactctggaggagctggactggtgtctggagcagctggagaccatgcagacctatcgctctgtcagcgagatggcctcgcacaagttcaaaaggatgttgaaccgtgagctcacacacctgtcagaaatgagcaggtccggaaaccaggtctcagagtacatttccacaacattcctggacaaacagaatgaagtggagatcccatcacccacgatgaaggaacgagaaaaacagcaagcgccgcgaccaagaccctcccagccgcccccgccccctgtaccacacttacagcccatgtcccaaatcacagggttgaaaaagttgatgcatagtaacagcctgaacaactctaacattccccgatttggggtgaagaccgatcaagaagagctcctggcccaagaactggagaacctgaacaagtggggcctgaacatcttttgcgtgtcggattacgctggaggccgctcactcacctgcatcatgtacatgatattccaggagcgggacctgctgaagaaattccgcatccctgtggacacgatggtgacatacatgctgacgctggaggatcactaccacgctgacgtggcctaccataacagcctgcacgcagctgacgtgctgcagtccacccacgtactgctggccacgcctgcactagatgcagtgttcacggacctggagattctcgccgccctcttcgcggctgccatccacgatgtggatcaccctggggtctccaaccagttcctcatcaacaccaattcggagctggcgctcatgtacaacgatgagtcggtgctcgagaatcaccacctggccgtgggcttcaagctgctgcaggaggacaactgcgacatcttccagaacctcagcaagcgccagcggcagagcctacgcaagatggtcatcgacatggtgctggccacggacatgtccaagcacatgaccctcctggctgacctgaagaccatggtggagaccaagaaagtgaccagctcaggggtcctcctgctagataactactccgaccgcatccaggtcctccggaacatggtgcactgtgccgacctcagcaaccccaccaagccgctggagctgtaccgccagtggacagaccgcatcatggccgagttcttccagcagggtgaccgagagcgcgagcgtggcatggaaatcagccccatgtgtgacaagcacactgcctccgtggagaagtctcaggtgggttttattgactacattgtgcacccattgtgggagacctgggcggaccttgtccacccagatgcccaggagatcttggacactttggaggacaaccgggactggtactacagcgccatccggcagagcccatctccgccacccgaggaggagtcaagggggccaggccacccacccctgcctgacaagttccagtttgagctgacgctggaggaggaagaggaggaagaaatatcaatggcccagataccgtgcacagcccaagaggcattgactgcgcagggattgtcaggagtcgaggaagctctggatgcaaccatagcctgggaggcatccccggcccaggagtcgttggaagttatggcacaggaagcatccctggaggccgagctggaggcagtgtatttgacacagcaggcacagtccacaggcagtgcacctgtggctccggatgagttctcgtcccgggaggaattcgtggttgctgtaagccacagcagcccctctgccctggctcttcaaagcccccttctccctgcttggaggaccctgtctgtttcagagcatgccccgggcctcccgggcctcccctccacggcggccgaggtggaggcccaacgagagcaccaggctgccaagagggcttgcagtgcctgcgcagggacatttggggaggacacatccgcactcccagctcctggtggcggggggtcaggtggagaccctacctga

SEQ ID NO: 165341 - DNA, 1703 bp, Homo sapiens
  Payload ID: 12555
  Gene Symbol: PDE4A
  Gene Name: phosphodiesterase 4A, cAMP-specific
  ENST ID: ENST00000589073
  CDS Start-End: 308-598
tccgcagcctcctcctgggacccttgccctgcccccctcccatgggcacggaccccccaccgcctccacccactgccgcgggggggcccgttggggcccagggctggcgggccatgtaaccagggctgctgctgggagcgcggaggggaagggagcccccagccctgctgggccggcccaggcccctccgcggctcccccttccactacccacctgcccggcaccccctccccagtggttgttaaccccgggactccccaagcccagcctctgtgtgcagcagccccaggcgggctaagtctccaagatgcccttggtggatttcttctgcgagacctgctctaagccttggctggtgggctggtgggaccagttcaaaaggatgttgaaccgtgagctcacacacctgtcagaaatgagcaggtccggaaaccaggtctcagagtacatttccacaacattcctgggcagtgttcacggacctggagattctcgccgccctcttcgcggctgccatccacgatgtggatcaccctggggtctccaaccagttcctcatcaacaccaattcggagctggcgctcatgtacaacgatgagtcggtgctcgagaatcaccacctggccgtgggcttcaagctgctgcaggaggacaactgcgacatcttccagaacctcagcaagcgccagcggcagagcctacgcaagatggtcatcgacatggtgggcggggctggggcgggacggagcgggaaaggaagcctaggagtcgagggctttggggaggagtgggtctgagtcccagaggaaccctcaacctggacagagcgggcggcttctacctggtgaaaacttcagaggcccgggtcagtctggggggcgggtgtcagcggccccagtgacgcccccttgcccgcaggtgctggccacggacatgtccaagcacatgaccctcctggctgacctgaagaccatggtggagaccaagaaagtgaccagctcaggggtcctcctgctagataactactccgaccgcatccaggtcctccggaacatggtgcactgtgccgacctcagcaaccccaccaagccgctggagctgtaccgccagtggacagaccgcatcatggccgagttcttccagcagggtgaccgagagcgcgagcgtggcatggaaatcagccccatgtgtgacaagcacactgcctccgtggagaagtctcaggtgggttttattgactacattgtgcacccattgtgggagacctgggcggaccttgtccacccagatgcccaggagatcttggacactttggaggacaaccgggactggtactacagcgccatccggcagagcccatctccgccacccgaggaggagtcaagggggccaggccacccacccctgcctgacaagttccagtttgagctgacgctggaggaggaagaggaggaagaaatatcaatggcccagataccgtgcacagcccaagaggcattgactgcgcagggattgtcaggagtcgaggaagctctggatgcaaccatagcctgggaggcatccccggcccaggagtcgttggaagttatggcacaggaagcatccctggaggccgagctggaggcagtgtatttgacacagcaggcacagtccacaggcagtgcacctgtggctccggatgagttctcgtcccgggaggaatt

SEQ ID NO: 165342 - DNA, 836 bp, Homo sapiens
  Payload ID: 12555
  Gene Symbol: PDE4A
  Gene Name: phosphodiesterase 4A, cAMP-specific
  ENST ID: ENST00000591971
  CDS Start-End: 1-836
gaaacgtgtcagcagttggcccgggagactctggaggagctggactggtgtctggagcagctggagaccatgcagacctatcgctctgtcagcgagatggcctcgcacaagttcaaaaggatgttgaaccgtgagctcacacacctgtcagaaatgagcaggtccggaaaccaggtctcagagtacatttccacaacattcctggacaaacagaatgaagtggagatcccatcacccacgatgaaggaacgagaaaaacagcaagcgccgcgaccaagaccctcccagccgcccccgccccctgtaccacacttacagcccatgtcccaaatcacagggttgaaaaagttgatgcatagtaacagcctgaacaactctaacattccccgatttggggtgaagaccgatcaagaagagctcctggcccaagaactggagaacctgaacaagtggggcctgaacatcttttgcgtgtcggattacgctggaggccgctcactcacctgcatcatgtacatgatattccaggcagtgttcacggacctggagattctcgccgccctcttcgcggctgccatccacgatgtggatcaccctggggtctccaaccagttcctcatcaacaccaattcggagctggcgctcatgtacaacgatgagtcggtgctcgagaatcaccacctggccgtgggcttcaagctgctgcaggaggacaactgcgacatcttccagaacctcagcaagcgccagcggcagagcctacgcaagatggtcatcgacatggtgctggccacggacatgtccaagcacatgaccctcctggctgacctgaagac

SEQ ID NO: 165343 - DNA, 2707 bp, Homo sapiens
  Payload ID: 12555
  Gene Symbol: PDE4A
  Gene Name: phosphodiesterase 4A, cAMP-specific
  Uniprot ID: P27815
  ENST ID: ENST00000592685
  CDS Start-End: 85-2679
cgtcacgccccaggagaggcaataggaggccctggccctgccgacatggccaccgcagtcccaacggcgcgctaggttggcgagatgaagaggagtcgcagtgccctgtccgtggcagggaccggggacgagaggtcgagggagacccccgaatccgaccgtgccaacatgctgggggccgacctgcgtcgccctcgccgccgcctctcgtccggtcctggcctgggctgggcccagcctgagccctcggaccctggggtccctctgccgccacggcccaccaccctgccgctgctgatcccaccgcggatttccatcaccagggccgagaacgacagcttcgaggcagagaatgggccgacaccatctcctggccgcagccccctggactcgcaggcgagcccaggactcgtgctgcacgccggggcggccaccagccagcgccgggagtccttcctgtaccgctcagacagcgactatgacatgtcacccaagaccatgtcccggaactcatcggtcaccagcgaggcgcacgctgaagacctcatcgtaacaccatttgctcaggtgctggccagcctccggagcgtccgtagcaacttctcactcctgaccaatgtgcccgttcccagtaacaagcggtccccgctgggcggccccacccctgtctgcaaggccacgctgtcagaagaaacgtgtcagcagttggcccgggagactctggaggagctggactggtgtctggagcagctggagaccatgcagacctatcgctctgtcagcgagatggcctcgcacaagttcaaaaggatgttgaaccgtgagctcacacacctgtcagaaatgagcaggtccggaaaccaggtctcagagtacatttccacaacattcctggacaaacagaatgaagtggagatcccatcacccacgatgaaggaacgagaaaaacagcaagcgccgcgaccaagaccctcccagccgcccccgccccctgtaccacacttacagcccatgtcccaaatcacagggttgaaaaagttgatgcatagtaacagcctgaacaactctaacattccccgatttggggtgaagaccgatcaagaagagctcctggcccaagaactggagaacctgaacaagtggggcctgaacatcttttgcgtgtcggattacgctggaggccgctcactcacctgcatcatgtacatgatattccaggagcgggacctgctgaagaaattccgcatccctgtggacacgatggtgacatacatgctgacgctggaggatcactaccacgctgacgtggcctaccataacagcctgcacgcagctgacgtgctgcagtccacccacgtactgctggccacgcctgcactagatgcagtgttcacggacctggagattctcgccgccctcttcgcggctgccatccacgatgtggatcaccctggggtctccaaccagttcctcatcaacaccaattcggagctggcgctcatgtacaacgatgagtcggtgctcgagaatcaccacctggccgtgggcttcaagctgctgcaggaggacaactgcgacatcttccagaacctcagcaagcgccagcggcagagcctacgcaagatggtcatcgacatggtgctggccacggacatgtccaagcacatgaccctcctggctgacctgaagaccatggtggagaccaagaaagtgaccagctcaggggtcctcctgctagataactactccgaccgcatccaggtcctccggaacatggtgcactgtgccgacctcagcaaccccaccaagccgctggagctgtaccgccagtggacagaccgcatcatggccgagttcttccagcagggtgaccgagagcgcgagcgtggcatggaaatcagccccatgtgtgacaagcacactgcctccgtggagaagtctcaggtgggttttattgactacattgtgcacccattgtgggagacctgggcggaccttgtccacccagatgcccaggagatcttggacactttggaggacaaccgggactggtactacagcgccatccggcagagcccatctccgccacccgaggaggagtcaagggggccaggccacccacccctgcctgacaagttccagtttgagctgacgctggaggaggaagaggaggaagaaatatcaatggcccagataccgtgcacagcccaagaggcattgactgcgcagggattgtcaggagtcgaggaagctctggatgcaaccatagcctgggaggcatccccggcccaggagtcgttggaagttatggcacaggaagcatccctggaggccgagctggaggcagtgtatttgacacagcaggcacagtccacaggcagtgcacctgtggctccggatgagttctcgtcccgggaggaattcgtggttgctgtaagccacagcagcccctctgccctggctcttcaaagcccccttctccctgcttggaggaccctgtctgtttcagagcatgccccgggcctcccgggcctcccctccacggcggccgaggtggaggcccaacgagagcaccaggctgccaagagggcttgcagtgcctgcgcagggacatttggggaggacacatccgcactcccagctcctggtggcggggggtcaggtggagaccctacctgatccccagacctctgtccctgttcccctc

SEQ ID NO: 165344 - DNA, 3998 bp, Homo sapiens
  Payload ID: 12556
  Gene Symbol: PDE4B
  Gene Name: phosphodiesterase 4B, cAMP-specific
  Uniprot ID: Q07343
  ENST ID: ENST00000329654
  CDS Start-End: 188-2398
gtaatccttcagctctggtggtaagggagatgcagtgagctcccggctgggagagagggttattttgcaaaactcccctggtaccgtgcccgcggaatattgcaggaggtctgtgaggtattaaaaagtgtcagcaaactgcattgaataacagacatcctaagaggggatattttccacctctataatgaagaaaagcaggagtgtgatgacggtgatggctgatgataatgttaaagattattttgaatgtagcttgagtaaatcctacagttcttccagtaacacacttgggatcgacctctggagagggagaaggtgttgctcaggaaacttacagttaccaccactgtctcaaagacagagtgaaagggcaaggactcctgagggagatggtatttccaggccgaccacactgcctttgacaacgcttccaagcattgctattacaactgtaagccaggagtgctttgatgtggaaaatggcccttccccaggtcggagtccactggatccccaggccagctcttccgctgggctggtacttcacgccacctttcctgggcacagccagcgcagagagtcatttctctacagatcagacagcgactatgacttgtcaccaaaggcgatgtcgagaaactcttctcttccaagcgagcaacacggcgatgacttgattgtaactccttttgcccaggtccttgccagcttgcgaagtgtgagaaacaacttcactatactgacaaaccttcatggtacatctaacaagaggtccccagctgctagtcagcctcctgtctccagagtcaacccacaagaagaatcttatcaaaaattagcaatggaaacgctggaggaattagactggtgtttagaccagctagagaccatacagacctaccggtctgtcagtgagatggcttctaacaagttcaaaagaatgctgaaccgggagctgacacacctctcagagatgagccgatcagggaaccaggtgtctgaatacatttcaaatactttcttagacaagcagaatgatgtggagatcccatctcctacccagaaagacagggagaaaaagaaaaagcagcagctcatgacccagataagtggagtgaagaaattaatgcatagttcaagcctaaacaatacaagcatctcacgctttggagtcaacactgaaaatgaagatcacctggccaaggagctggaagacctgaacaaatggggtcttaacatctttaatgtggctggatattctcacaatagacccctaacatgcatcatgtatgctatattccaggaaagagacctcctaaagacattcagaatctcatctgacacatttataacctacatgatgactttagaagaccattaccattctgacgtggcatatcacaacagcctgcacgctgctgatgtagcccagtcgacccatgttctcctttctacaccagcattagacgctgtcttcacagatttggagatcctggctgccatttttgcagctgccatccatgacgttgatcatcctggagtctccaatcagtttctcatcaacacaaattcagaacttgctttgatgtataatgatgaatctgtgttggaaaatcatcaccttgctgtgggtttcaaactgctgcaagaagaacactgtgacatcttcatgaatctcaccaagaagcagcgtcagacactcaggaagatggttattgacatggtgttagcaactgatatgtctaaacatatgagcctgctggcagacctgaagacaatggtagaaacgaagaaagttacaagttcaggcgttcttctcctagacaactataccgatcgcattcaggtccttcgcaacatggtacactgtgcagacctgagcaaccccaccaagtccttggaattgtatcggcaatggacagaccgcatcatggaggaatttttccagcagggagacaaagagcgggagaggggaatggaaattagcccaatgtgtgataaacacacagcttctgtggaaaaatcccaggttggtttcatcgactacattgtccatccattgtgggagacatgggcagatttggtacagcctgatgctcaggacattctcgataccttagaagataacaggaactggtatcagagcatgatacctcaaagtccctcaccaccactggacgagcagaacagggactgccagggtctgatggagaagtttcagtttgaactgactctcgatgaggaagattctgaaggacctgagaaggagggagagggacacagctatttcagcagcacaaagacgctttgtgtgattgatccagaaaacagagattccctgggagagactgacatagacattgcaacagaagacaagtcccccgtggatacataatccccctctccctgtggagatgaacattctatccttgatgagcatgccagctatgtggtagggccagcccaccatgggggccaagacctgcacaggacaagggccacctggcctttcagttacttgagtttggagtcagaaagcaagaccaggaagcaaatagcagctcaggaaatcccacggttgacttgccttgatggcaagcttggtggagagggctgaagctgttgctgggggccgattctgatcaagacacatggcttgaaaatggaagacacaaaactgagagatcattctgcactaagtttcgggaacttatccccgacagtgactgaactcactgactaataacttcatttatgaatcttctcacttgtccctttgtctgccaacctgtgtgccttttttgtaaaacattttcatgtctttaaaatgcctgttgaatacctggagtttagtatcaacttctacacagataagctttcaaagttgacaaacttttttgactctttctggaaaagggaaagaaaatagtcttccttctttcttgggcaatatccttcactttactacagttacttttgcaaacagacagaaaggatacacttctaaccacattttacttccttcccctgttgtccagtccaactccacagtcactcttaaaacttctctctgtttgcctgcctccaacagtacttttaactttttgctgtaaacagaataaaattgaacaaattagggggtagaaaggagcagtggtgtcgttcaccgtgagagtctgcatagaactcagcagtgtgccctgctgtgtcttggaccctgccccccacaggagttgtacagtccctggccctgttccctacctcctctcttcaccccgttaggctgttttcaatgtaatgctgccgtccttctcttgcactgccttctgcgctaacacctccattcctgtttataaccgtgtatttattacttaatgtatataatgtaatgttttgtaagttattaatttatatatctaacattgcctgccaatggtggtgttaaatttgtgtagaaaactctgcctaagagttacgactttttcttgtaatgttttgtattgtgtattatataacccaaacgtcacttagtagagacatatggcccccttggcagagaggacaggggtgggcttttgttcaaagggtctgccctttccctgcctgagttgctacttctgcacaacccctttatgaaccagttttggaaacaatattctcacattagatactaaatggtttatactgagcttttacttttgtatagcttgataggggcagggggcaatgggatgtagtttttacccaggttctatccaaatctatgtgggcatgagttgggttataactggatcctactatcattgtggctttggttcaaaaggaaacactacatttgctcacagatgattcttctgaatgctcccgaactactgactttgaagaggtagcctcctgcctgccattaagcaggaatgtcatgttccagttcattacaaaagaaaacaataaaacaatgtgaatttttataataaaatgtgaactgatgtagcaaa

SEQ ID NO: 165345 - DNA, 3175 bp, Homo sapiens
  Payload ID: 12556
  Gene Symbol: PDE4B
  Gene Name: phosphodiesterase 4B, cAMP-specific
  Uniprot ID: Q07343
  ENST ID: ENST00000341517
  CDS Start-End: 139-2349
gcggccgcggcggtgcagcagaggcgcctcgggcaggaggagggcggcttctgcgagggcagcctgaggtattaaaaagtgtcagcaaactgcattgaataacagacatcctaagaggggatattttccacctctataatgaagaaaagcaggagtgtgatgacggtgatggctgatgataatgttaaagattattttgaatgtagcttgagtaaatcctacagttcttccagtaacacacttgggatcgacctctggagagggagaaggtgttgctcaggaaacttacagttaccaccactgtctcaaagacagagtgaaagggcaaggactcctgagggagatggtatttccaggccgaccacactgcctttgacaacgcttccaagcattgctattacaactgtaagccaggagtgctttgatgtggaaaatggcccttccccaggtcggagtccactggatccccaggccagctcttccgctgggctggtacttcacgccacctttcctgggcacagccagcgcagagagtcatttctctacagatcagacagcgactatgacttgtcaccaaaggcgatgtcgagaaactcttctcttccaagcgagcaacacggcgatgacttgattgtaactccttttgcccaggtccttgccagcttgcgaagtgtgagaaacaacttcactatactgacaaaccttcatggtacatctaacaagaggtccccagctgctagtcagcctcctgtctccagagtcaacccacaagaagaatcttatcaaaaattagcaatggaaacgctggaggaattagactggtgtttagaccagctagagaccatacagacctaccggtctgtcagtgagatggcttctaacaagttcaaaagaatgctgaaccgggagctgacacacctctcagagatgagccgatcagggaaccaggtgtctgaatacatttcaaatactttcttagacaagcagaatgatgtggagatcccatctcctacccagaaagacagggagaaaaagaaaaagcagcagctcatgacccagataagtggagtgaagaaattaatgcatagttcaagcctaaacaatacaagcatctcacgctttggagtcaacactgaaaatgaagatcacctggccaaggagctggaagacctgaacaaatggggtcttaacatctttaatgtggctggatattctcacaatagacccctaacatgcatcatgtatgctatattccaggaaagagacctcctaaagacattcagaatctcatctgacacatttataacctacatgatgactttagaagaccattaccattctgacgtggcatatcacaacagcctgcacgctgctgatgtagcccagtcgacccatgttctcctttctacaccagcattagacgctgtcttcacagatttggagatcctggctgccatttttgcagctgccatccatgacgttgatcatcctggagtctccaatcagtttctcatcaacacaaattcagaacttgctttgatgtataatgatgaatctgtgttggaaaatcatcaccttgctgtgggtttcaaactgctgcaagaagaacactgtgacatcttcatgaatctcaccaagaagcagcgtcagacactcaggaagatggttattgacatggtgttagcaactgatatgtctaaacatatgagcctgctggcagacctgaagacaatggtagaaacgaagaaagttacaagttcaggcgttcttctcctagacaactataccgatcgcattcaggtccttcgcaacatggtacactgtgcagacctgagcaaccccaccaagtccttggaattgtatcggcaatggacagaccgcatcatggaggaatttttccagcagggagacaaagagcgggagaggggaatggaaattagcccaatgtgtgataaacacacagcttctgtggaaaaatcccaggttggtttcatcgactacattgtccatccattgtgggagacatgggcagatttggtacagcctgatgctcaggacattctcgataccttagaagataacaggaactggtatcagagcatgatacctcaaagtccctcaccaccactggacgagcagaacagggactgccagggtctgatggagaagtttcagtttgaactgactctcgatgaggaagattctgaaggacctgagaaggagggagagggacacagctatttcagcagcacaaagacgctttgtgtgattgatccagaaaacagagattccctgggagagactgacatagacattgcaacagaagacaagtcccccgtggatacataatccccctctccctgtggagatgaacattctatccttgatgagcatgccagctatgtggtagggccagcccaccatgggggccaagacctgcacaggacaagggccacctggcctttcagttacttgagtttggagtcagaaagcaagaccaggaagcaaatagcagctcaggaaatcccacggttgacttgccttgatggcaagcttggtggagagggctgaagctgttgctgggggccgattctgatcaagacacatggcttgaaaatggaagacacaaaactgagagatcattctgcactaagtttcgggaacttatccccgacagtgactgaactcactgactaataacttcatttatgaatcttctcacttgtccctttgtctgccaacctgtgtgccttttttgtaaaacattttcatgtctttaaaatgcctgttgaatacctggagtttagtatcaacttctacacagataagctttcaaagttgacaaacttttttgactctttctggaaaagggaaagaaaatagtcttccttctttcttgggcaatatccttcactttactacagttacttttgcaaacagacagaaaggatacacttctaaccacattttacttccttcccctgttgtccagtccaactccacagtcactcttaaaacttctctctgtttgcctgcctccaacagtacttttaactttttgctgtaaacagaataaaattgaacaaattagggggtagaaaggagcagtggtgtcgttcaccgtgagagtctgcatagaactcagcagtgtgccctgctgtgtcttggaccctgc

SEQ ID NO: 165346 - DNA, 3982 bp, Homo sapiens
  Payload ID: 12556
  Gene Symbol: PDE4B
  Gene Name: phosphodiesterase 4B, cAMP-specific
  Uniprot ID: Q07343
  ENST ID: ENST00000371045
  CDS Start-End: 387-2081
aaccagttttcacccgaattttgactgtttcatttagaagaaaagcaaaatgagaaaaagctttcctcatttctccttgagatggcaaagcactcagaaatgacatcacataccctaaagaaccctgggatgactaaggcagagagagtctgagaaaactctttggtgcttctgcctttagttttaggacacatttatgcagatgagcttataagagaccgttccctccgccttcttcctcagaggaagtttcttggtagatcaccgacacctcatccaggcggggggttggggggaaacttggcaccagccatcccaggcagagcaccactgtgatttgttctcctggtggagagagctggaaggaaggagccagcgtgcaaataatgaaggagcacgggggcaccttcagtagcaccggaatcagcggtggtagcggtgactctgctatggacagcctgcagccgctccagcctaactacatgcctgtgtgtttgtttgcagaagaatcttatcaaaaattagcaatggaaacgctggaggaattagactggtgtttagaccagctagagaccatacagacctaccggtctgtcagtgagatggcttctaacaagttcaaaagaatgctgaaccgggagctgacacacctctcagagatgagccgatcagggaaccaggtgtctgaatacatttcaaatactttcttagacaagcagaatgatgtggagatcccatctcctacccagaaagacagggagaaaaagaaaaagcagcagctcatgacccagataagtggagtgaagaaattaatgcatagttcaagcctaaacaatacaagcatctcacgctttggagtcaacactgaaaatgaagatcacctggccaaggagctggaagacctgaacaaatggggtcttaacatctttaatgtggctggatattctcacaatagacccctaacatgcatcatgtatgctatattccaggaaagagacctcctaaagacattcagaatctcatctgacacatttataacctacatgatgactttagaagaccattaccattctgacgtggcatatcacaacagcctgcacgctgctgatgtagcccagtcgacccatgttctcctttctacaccagcattagacgctgtcttcacagatttggagatcctggctgccatttttgcagctgccatccatgacgttgatcatcctggagtctccaatcagtttctcatcaacacaaattcagaacttgctttgatgtataatgatgaatctgtgttggaaaatcatcaccttgctgtgggtttcaaactgctgcaagaagaacactgtgacatcttcatgaatctcaccaagaagcagcgtcagacactcaggaagatggttattgacatggtgttagcaactgatatgtctaaacatatgagcctgctggcagacctgaagacaatggtagaaacgaagaaagttacaagttcaggcgttcttctcctagacaactataccgatcgcattcaggtccttcgcaacatggtacactgtgcagacctgagcaaccccaccaagtccttggaattgtatcggcaatggacagaccgcatcatggaggaatttttccagcagggagacaaagagcgggagaggggaatggaaattagcccaatgtgtgataaacacacagcttctgtggaaaaatcccaggttggtttcatcgactacattgtccatccattgtgggagacatgggcagatttggtacagcctgatgctcaggacattctcgataccttagaagataacaggaactggtatcagagcatgatacctcaaagtccctcaccaccactggacgagcagaacagggactgccagggtctgatggagaagtttcagtttgaactgactctcgatgaggaagattctgaaggacctgagaaggagggagagggacacagctatttcagcagcacaaagacgctttgtgtgattgatccagaaaacagagattccctgggagagactgacatagacattgcaacagaagacaagtcccccgtggatacataatccccctctccctgtggagatgaacattctatccttgatgagcatgccagctatgtggtagggccagcccaccatgggggccaagacctgcacaggacaagggccacctggcctttcagttacttgagtttggagtcagaaagcaagaccaggaagcaaatagcagctcaggaaatcccacggttgacttgccttgatggcaagcttggtggagagggctgaagctgttgctgggggccgattctgatcaagacacatggcttgaaaatggaagacacaaaactgagagatcattctgcactaagtttcgggaacttatccccgacagtgactgaactcactgactaataacttcatttatgaatcttctcacttgtccctttgtctgccaacctgtgtgccttttttgtaaaacattttcatgtctttaaaatgcctgttgaatacctggagtttagtatcaacttctacacagataagctttcaaagttgacaaacttttttgactctttctggaaaagggaaagaaaatagtcttccttctttcttgggcaatatccttcactttactacagttacttttgcaaacagacagaaaggatacacttctaaccacattttacttccttcccctgttgtccagtccaactccacagtcactcttaaaacttctctctgtttgcctgcctccaacagtacttttaactttttgctgtaaacagaataaaattgaacaaattagggggtagaaaggagcagtggtgtcgttcaccgtgagagtctgcatagaactcagcagtgtgccctgctgtgtcttggaccctgccccccacaggagttgtacagtccctggccctgttccctacctcctctcttcaccccgttaggctgttttcaatgtaatgctgccgtccttctcttgcactgccttctgcgctaacacctccattcctgtttataaccgtgtatttattacttaatgtatataatgtaatgttttgtaagttattaatttatatatctaacattgcctgccaatggtggtgttaaatttgtgtagaaaactctgcctaagagttacgactttttcttgtaatgttttgtattgtgtattatataacccaaacgtcacttagtagagacatatggcccccttggcagagaggacaggggtgggcttttgttcaaagggtctgccctttccctgcctgagttgctacttctgcacaacccctttatgaaccagttttggaaacaatattctcacattagatactaaatggtttatactgagcttttacttttgtatagcttgataggggcagggggcaatgggatgtagtttttacccaggttctatccaaatctatgtgggcatgagttgggttataactggatcctactatcattgtggctttggttcaaaaggaaacactacatttgctcacagatgattcttctgaatgctcccgaactactgactttgaagaggtagcctcctgcctgccattaagcaggaatgtcatgttccagttcattacaaaagaaaacaataaaacaatgtgaatttttataataaaatgtgaactgatgtagcaaattacgcaaatgtgaagcctcttctgataacacttgttaggcctcttactgatgtcagtttcagtttgtaaaatatgtttcatgctttcagttcagcattgtgactcagtaattacagaaaatggcacaaatgtgcatgaccaatgtatgtctatgaacactgcattgtttcaggtggacattttatcattttcaaatgtttctcacaatgtatgttatagtattattattatatattgtgttcaaatgcattctaaagagacttttatatgaggtgaataaagaaaagcatgattagatta

SEQ ID NO: 165347 - DNA, 4546 bp, Homo sapiens
  Payload ID: 12556
  Gene Symbol: PDE4B
  Gene Name: phosphodiesterase 4B, cAMP-specific
  Uniprot ID: Q07343
  ENST ID: ENST00000423207
  CDS Start-End: 486-2651
cacatgctggacggattctgggtctgctctttgtgcaaacaaaacaagtgactaggttttgcttactatccattagtgaatgcagcttgtttaataagattttttttaaaaaaatgcatgtaaaggatttatcaaaagcctttatgaatatttcatgagttgatatattcagctgaatgaattcagtgagtgtcagtgtgtagcttgcagacaaacctcatccacaaggaggctactgacattggaagcactttggcgcattttcagaggcaaagccagcctgataaagctccttgtgacagcctgacttgctattcttcgagtatgctgctcttgctctaagacgctcatacattggagtcacagcttcgtaaattaaactggaaatagtttgcagacttatcagtcttctgacctgcagcagtgtctctgctatgtttgagatttttgttttggatggtgaaagctagcactccttacaagacatgacagcaaaagattcttcaaaggaacttactgcttctgaacctgaggtttgcataaagactttcaaggagcaaatgcatttagaacttgagcttccgagattaccaggaaacagacctacatctcctaaaatttctccacgcagttcaccaaggaactcaccatgctttttcagaaagttgctggtgaataaaagcattcggcagcgtcgtcgcttcactgtggctcatacatgctttgatgtggaaaatggcccttccccaggtcggagtccactggatccccaggccagctcttccgctgggctggtacttcacgccacctttcctgggcacagccagcgcagagagtcatttctctacagatcagacagcgactatgacttgtcaccaaaggcgatgtcgagaaactcttctcttccaagcgagcaacacggcgatgacttgattgtaactccttttgcccaggtccttgccagcttgcgaagtgtgagaaacaacttcactatactgacaaaccttcatggtacatctaacaagaggtccccagctgctagtcagcctcctgtctccagagtcaacccacaagaagaatcttatcaaaaattagcaatggaaacgctggaggaattagactggtgtttagaccagctagagaccatacagacctaccggtctgtcagtgagatggcttctaacaagttcaaaagaatgctgaaccgggagctgacacacctctcagagatgagccgatcagggaaccaggtgtctgaatacatttcaaatactttcttagacaagcagaatgatgtggagatcccatctcctacccagaaagacagggagaaaaagaaaaagcagcagctcatgacccagataagtggagtgaagaaattaatgcatagttcaagcctaaacaatacaagcatctcacgctttggagtcaacactgaaaatgaagatcacctggccaaggagctggaagacctgaacaaatggggtcttaacatctttaatgtggctggatattctcacaatagacccctaacatgcatcatgtatgctatattccaggaaagagacctcctaaagacattcagaatctcatctgacacatttataacctacatgatgactttagaagaccattaccattctgacgtggcatatcacaacagcctgcacgctgctgatgtagcccagtcgacccatgttctcctttctacaccagcattagacgctgtcttcacagatttggagatcctggctgccatttttgcagctgccatccatgacgttgatcatcctggagtctccaatcagtttctcatcaacacaaattcagaacttgctttgatgtataatgatgaatctgtgttggaaaatcatcaccttgctgtgggtttcaaactgctgcaagaagaacactgtgacatcttcatgaatctcaccaagaagcagcgtcagacactcaggaagatggttattgacatggtgttagcaactgatatgtctaaacatatgagcctgctggcagacctgaagacaatggtagaaacgaagaaagttacaagttcaggcgttcttctcctagacaactataccgatcgcattcaggtccttcgcaacatggtacactgtgcagacctgagcaaccccaccaagtccttggaattgtatcggcaatggacagaccgcatcatggaggaatttttccagcagggagacaaagagcgggagaggggaatggaaattagcccaatgtgtgataaacacacagcttctgtggaaaaatcccaggttggtttcatcgactacattgtccatccattgtgggagacatgggcagatttggtacagcctgatgctcaggacattctcgataccttagaagataacaggaactggtatcagagcatgatacctcaaagtccctcaccaccactggacgagcagaacagggactgccagggtctgatggagaagtttcagtttgaactgactctcgatgaggaagattctgaaggacctgagaaggagggagagggacacagctatttcagcagcacaaagacgctttgtgtgattgatccagaaaacagagattccctgggagagactgacatagacattgcaacagaagacaagtcccccgtggatacataatccccctctccctgtggagatgaacattctatccttgatgagcatgccagctatgtggtagggccagcccaccatgggggccaagacctgcacaggacaagggccacctggcctttcagttacttgagtttggagtcagaaagcaagaccaggaagcaaatagcagctcaggaaatcccacggttgacttgccttgatggcaagcttggtggagagggctgaagctgttgctgggggccgattctgatcaagacacatggcttgaaaatggaagacacaaaactgagagatcattctgcactaagtttcgggaacttatccccgacagtgactgaactcactgactaataacttcatttatgaatcttctcacttgtccctttgtctgccaacctgtgtgccttttttgtaaaacattttcatgtctttaaaatgcctgttgaatacctggagtttagtatcaacttctacacagataagctttcaaagttgacaaacttttttgactctttctggaaaagggaaagaaaatagtcttccttctttcttgggcaatatccttcactttactacagttacttttgcaaacagacagaaaggatacacttctaaccacattttacttccttcccctgttgtccagtccaactccacagtcactcttaaaacttctctctgtttgcctgcctccaacagtacttttaactttttgctgtaaacagaataaaattgaacaaattagggggtagaaaggagcagtggtgtcgttcaccgtgagagtctgcatagaactcagcagtgtgccctgctgtgtcttggaccctgccccccacaggagttgtacagtccctggccctgttccctacctcctctcttcaccccgttaggctgttttcaatgtaatgctgccgtccttctcttgcactgccttctgcgctaacacctccattcctgtttataaccgtgtatttattacttaatgtatataatgtaatgttttgtaagttattaatttatatatctaacattgcctgccaatggtggtgttaaatttgtgtagaaaactctgcctaagagttacgactttttcttgtaatgttttgtattgtgtattatataacccaaacgtcacttagtagagacatatggcccccttggcagagaggacaggggtgggcttttgttcaaagggtctgccctttccctgcctgagttgctacttctgcacaacccctttatgaaccagttttggaaacaatattctcacattagatactaaatggtttatactgagcttttacttttgtatagcttgataggggcagggggcaatgggatgtagtttttacccaggttctatccaaatctatgtgggcatgagttgggttataactggatcctactatcattgtggctttggttcaaaaggaaacactacatttgctcacagatgattcttctgaatgctcccgaactactgactttgaagaggtagcctcctgcctgccattaagcaggaatgtcatgttccagttcattacaaaagaaaacaataaaacaatgtgaatttttataataaaatgtgaactgatgtagcaaattacgcaaatgtgaagcctcttctgataacacttgttaggcctcttactgatgtcagtttcagtttgtaaaatatgtttcatgctttcagttcagcattgtgactcagtaattacagaaaatggcacaaatgtgcatgaccaatgtatgtctatgaacactgcattgtttcaggtggacattttatcattttcaaatgtttctcacaatgtatgttatagtattattattatatattgtgttcaaatgcattctaaagagacttttatatgaggtgaataaagaaaagcatgatt

SEQ ID NO: 165348 - DNA, 579 bp, Homo sapiens
  Payload ID: 12556
  Gene Symbol: PDE4B
  Gene Name: phosphodiesterase 4B, cAMP-specific
  ENST ID: ENST00000412480
  CDS Start-End: 139-579
acaagatgaagatgagcaggcagggtggcagcactggctgtggcagcagcagcacaccaccacctatgcaaggtctgtactttttaacacagcattggaagccagtatcagtcatggttctccagagaaacagaactgatgagctttgatgtggaaaatggcccttccccaggtcggagtccactggatccccaggccagctcttccgctgggctggtacttcacgccacctttcctgggcacagccagcgcagagagtcatttctctacagatcagacagcgactatgacttgtcaccaaaggcgatgtcgagaaactcttctcttccaagcgagcaacacggcgatgacttgattgtaactccttttgcccaggtccttgccagcttgcgaagtgtgagaaacaacttcactatactgacaaaccttcatggtacatctaacaagaggtccccagctgctagtcagcctcctgtctccagagtcaacccacaagaagaatcttatcaaaaattagcaatggaaacgctggaggaattagactggtgtttagaccagctagagaccatacagacctac

SEQ ID NO: 165349 - DNA, 546 bp, Homo sapiens
  Payload ID: 12556
  Gene Symbol: PDE4B
  Gene Name: phosphodiesterase 4B, cAMP-specific
  ENST ID: ENST00000528771
  CDS Start-End: 136-546
ctggaagcaaacagaggaggcaaggggttgtttcggacacactagagagtaagtcagagaatcttcgtgttgaggcagcattgcaaaattgaagatgaagaaaggaaggaagaagaatcttatcaaaaattagcaatggaaacgctggaggaattagactggtgtttagaccagctagagaccatacagacctaccggtctgtcagtgagatggcttctaacaagttcaaaagaatgctgaaccgggagctgacacacctctcagagatgagccgatcagggaaccaggtgtctgaatacatttcaaatactttcttagacaagcagaatgatgtggagatcccatctcctacccagaaagacagggagaaaaagaaaaagcagcagctcatgacccagataagtggagtgaagaaattaatgcatagttcaagcctaaacaatacaagcatctcacgctttggagtcaacactgaaaatgaagatcacctggccaaggagctggaagacctgaacaaatggggtcttaacatctttaatgtggct

SEQ ID NO: 165350 - DNA, 226 bp, Homo sapiens
  Payload ID: 12556
  Gene Symbol: PDE4B
  Gene Name: phosphodiesterase 4B, cAMP-specific
  ENST ID: ENST00000491340
  CDS Start-End: 1-199
acacggcgatgacttgattgtaactccttttgcccaggtccttgccagcttgcgaagtgtgagaaacaacttcactatactgacaaaccttcatggtacatctaacaagaggtccccagctgctagtcagcctcctgtctccagagtcaacccacaaggtaggccatgtcataaggtctatctagatgtttcaagatagaataataaacatgcctcttattcagaa

SEQ ID NO: 165351 - DNA, 2037 bp, Homo sapiens
  Payload ID: 12556
  Gene Symbol: PDE4B
  Gene Name: phosphodiesterase 4B, cAMP-specific
  Uniprot ID: Q07343
  ENST ID: ENST00000480109
  CDS Start-End: 466-1977
attttaatcttctcctttttaaaagatggctgtgtttcctagtctggcaactcctcaggaaagaagaatttcttcttccttgcagagttcagctgagtaggactaatgtagaagagtggaaaccccttcggccaccagggctattcataattcataagtgcttcaaaccagccagctgaatacatttggacaggctcttgctccttcgtgcaattcctgatttcattactctcttctgccaggaaataagcagggagcataggcttcttgcaagaatggagtgcgaagatgggctttgtttggcttaggaaatgccatacattttggaggtttttgtcttttctaagttttgattattttatcactgaatctgcagggctttcctgatcctttcgggattgctctctcagaactgtgaattctttcaaagggatttgtggattgtggcaaggagagcattccaaaatgcctgaggcaaattatttgttatctgtatcttggggttacatcaagttcaaaagaatgctgaaccgggagctgacacacctctcagagatgagccgatcagggaaccaggtgtctgaatacatttcaaatactttcttagacaagcagaatgatgtggagatcccatctcctacccagaaagacagggagaaaaagaaaaagcagcagctcatgacccagataagtggagtgaagaaattaatgcatagttcaagcctaaacaatacaagcatctcacgctttggagtcaacactgaaaatgaagatcacctggccaaggagctggaagacctgaacaaatggggtcttaacatctttaatgtggctggatattctcacaatagacccctaacatgcatcatgtatgctatattccaggaaagagacctcctaaagacattcagaatctcatctgacacatttataacctacatgatgactttagaagaccattaccattctgacgtggcatatcacaacagcctgcacgctgctgatgtagcccagtcgacccatgttctcctttctacaccagcattagacgctgtcttcacagatttggagatcctggctgccatttttgcagctgccatccatgacgttgatcatcctggagtctccaatcagtttctcatcaacacaaattcagaacttgctttgatgtataatgatgaatctgtgttggaaaatcatcaccttgctgtgggtttcaaactgctgcaagaagaacactgtgacatcttcatgaatctcaccaagaagcagcgtcagacactcaggaagatggttattgacatggtgttagcaactgatatgtctaaacatatgagcctgctggcagacctgaagacaatggtagaaacgaagaaagttacaagttcaggcgttcttctcctagacaactataccgatcgcattcaggtccttcgcaacatggtacactgtgcagacctgagcaaccccaccaagtccttggaattgtatcggcaatggacagaccgcatcatggaggaatttttccagcagggagacaaagagcgggagaggggaatggaaattagcccaatgtgtgataaacacacagcttctgtggaaaaatcccaggttggtttcatcgactacattgtccatccattgtgggagacatgggcagatttggtacagcctgatgctcaggacattctcgataccttagaagataacaggaactggtatcagagcatgatacctcaaagtccctcaccaccactggacgagcagaacagggactgccagggtctgatggagaagtttcagtttgaactgactctcgatgaggaagattctgaaggacctgagaaggagggagagggacacagctatttcagcagcacaaagacgctttgtgtgattgatccagaaaacagagattccctgggagagactgacatagacattgcaacagaagacaagtcccccgtggatacataatccccctctccctgtggagatgaacattctatccttgatgagcatgccagctatgtggta

SEQ ID NO: 165352 - DNA, 550 bp, Homo sapiens
  Payload ID: 12556
  Gene Symbol: PDE4B
  Gene Name: phosphodiesterase 4B, cAMP-specific
  ENST ID: ENST00000526197
  CDS Start-End: 95-550
aggacacatttatgcagatgagcttataagagaccgttccctccgccttcttcctcagaggaagtttcttgaagaatcttatcaaaaattagcaatggaaacgctggaggaattagactggtgtttagaccagctagagaccatacagacctaccggtctgtcagtgagatggcttctaacaagttcaaaagaatgctgaaccgggagctgacacacctctcagagatgagccgatcagggaaccaggtgtctgaatacatttcaaatactttcttagacaagcagaatgatgtggagatcccatctcctacccagaaagacagggagaaaaagaaaaagcagcagctcatgacccagataagtggagtgaagaaattaatgcatagttcaagcctaaacaatacaagcatctcacgctttggagtcaacactgaaaatgaagatcacctggccaaggagctggaagacctgaacaaatggggtcttaacatctttaatgtggctggatattctcacaatagacccctaacatgcatcatgtatgctata

SEQ ID NO: 165353 - DNA, 561 bp, Homo sapiens
  Payload ID: 12556
  Gene Symbol: PDE4B
  Gene Name: phosphodiesterase 4B, cAMP-specific
  ENST ID: ENST00000531025
  CDS Start-End: 132-561
gagtctgagaaaactctttggtgcttctgcctttagttttaggacacatttatgcagatgagcttataagagaccgttccctccgccttcttcctcagaggaagtttcttgaatcttatcaaaaattagcaatggaaacgctggaggaattagactggtgtttagaccagctagagaccatacagacctaccggtctgtcagtgagatggcttctaacaagttcaaaagaatgctgaaccgggagctgacacacctctcagagatgagccgatcagggaaccaggtgtctgaatacatttcaaatactttcttagacaagcagaatgatgtggagatcccatctcctacccagaaagacagggagaaaaagaaaaagcagcagctcatgacccagataagtggagtgaagaaattaatgcatagttcaagcctaaacaatacaagcatctcacgctttggagtcaacactgaaaatgaagatcacctggccaaggagctggaagacctgaacaaatggggtcttaacatctttaatgtggctggatattctcacaatagac

SEQ ID NO: 165354 - DNA, 2472 bp, Homo sapiens
  Payload ID: 12557
  Gene Symbol: PDE4C
  Gene Name: phosphodiesterase 4C, cAMP-specific
  Uniprot ID: Q08493
  ENST ID: ENST00000262805
  CDS Start-End: 61-2103
gctgtccagaaaaggtcccgcgcagccggcgctcggtccagcctccacgcagtcctggcgatgcagggcccccccgcgcccgccccggtccccgggcccggctcccctcggggatccccgcgcggctcccccgggctcttcaggaagcttttggtgaatcagagcatccgcctgcagcggcgcttcacggtggcccatccgctgtgctttgacctggaaaatgggctctcgtgtgggaggagggccctggaccctcagtccagccctggcctgggccggattatgcaggctccagtcccgcacagccagcggcgcgagtccttcctgtaccgctcagatagcgactatgaactctcgcccaaggccatgtctcggaactcctctgtggccagcgacctacatggagaggacatgattgtgacgccctttgcccaggtcctggccagtctgcggaccgttcggagcaacgtggcggcccttgcccgccagcaatgcctaggagcagccaagcagggacccgtcggaaacccttcatccagcaatcagctccctcctgcagaggacacggggcagaagctggcattggagacgctagacgagctggactggtgcctggatcagttggagacgctgcagacccggcactcggtgggggagatggcctccaacaagttcaagcggatcctgaaccgggagttgacccacctgtccgaaaccagccgctccgggaaccaggtgtccgagtacatctcccggaccttcctggaccagcagaccgaggtggagctgcccaaggtgaccgctgaggaggccccacagcccatgtcccggatcagtggcctacatgggctctgccacagtgccagcctctcctcagccactgtcccacgctttggggtccagactgaccaggaggagcaactggccaaggagctagaagacaccaacaagtggggacttgatgtgttcaaggtggcggagctaagtgggaaccggcccctcacagctatcatattcagcatttttcaggagcgggacctgctgaagacattccagatcccagcagacacactggccacctacctgctgatgctggaaggtcactaccacgccaatgtggcctaccacaacagcctacatgccgccgacgtggcccagtccacgcatgtgctgctggctacgcccgccctcgaggctgtgttcacagacttggaaatcctggctgccctctttgcaagcgccatccacgacgtggaccatcctggggtctccaaccagtttctgattaacaccaactcagagctggcgcttatgtacaacgacgcctcggtgctggagaaccatcacctggctgtgggcttcaagctgctgcaggcagagaactgcgatatcttccagaacctcagcgccaagcagcgactgagtctgcgcaggatggtcattgacatggtgctggccacagacatgtccaaacacatgaacctcctggccgacctcaagaccatggtggagaccaagaaggtgacaagcctcggtgtcctcctcctggacaactattccgaccgaatccaggtcttgcagaacctggtgcactgtgctgatctgagcaaccccaccaagccgctgcccctgtaccgccagtggacggaccgcatcatggccgagttcttccagcagggagaccgcgagcgtgagtcgggcctggacatcagtcccatgtgtgacaagcatacggcctcagtggagaagtcccaggtgggtttcattgactacattgctcacccactgtgggagacttgggctgacctggtccacccagatgcacaggacctgctggacacgctggaggacaatcgagagtggtaccagagcaagatcccccgaagtccctcagacctcaccaaccccgagcgggacgggcctgacagattccagtttgaactgactctggaggaggcagaggaagaggatgaggaggaagaagaggagggggaagagacagctttagccaaagaggccttggagttgcctgacactgaactcctgtcccctgaagccggcccagaccctggggacttacccctcgacaaccagaggacttagggccagccctgcgtgaactgcaggggcaatggatggtaaagccctttggctcttggcaggcagactttccaggaagaggctccatgtggctcctgcttcactttcccacccatttagggagacaatcaagctcttagttataggtggctcccagggtctaattggaggcacctggctggggtccactctgaccctagacttgcctaaaagagctctctaaggggcagcctcttacgatgccctggtgtctttctcctgggcttctatccctgtgaggagaggtgctgtctgctggagcctctagtccaccctctccagtggtcactcttgagtcacatctgtcacttaattatttccttctttatcaaa

SEQ ID NO: 165355 - DNA, 5979 bp, Homo sapiens
  Payload ID: 12557
  Gene Symbol: PDE4C
  Gene Name: phosphodiesterase 4C, cAMP-specific
  Uniprot ID: Q08493
  ENST ID: ENST00000355502
  CDS Start-End: 873-3011
ccccgcgctccgccagcagggagcgcacacgcaggtgcaaggagctggcacctgggcacacacctggccacacacctgtgcagagccggtggcaggccctcccggcgcaggaatggcgtgcccccagctgccgccacttctgcttttggtgctggtggtgctgctgaaagctggtgtgaattacaatactccctttacagttccgaatccctgaccccgcactggagccccacttcccacagccccggaacggagcccttgacctccactgaccagaccttggagccccctggcccagctccaggtgacactgggccccgtgagttacacaggaacccgagtgtggtggtggtcgtgtgtttgctggtgtctcttttgctcatcgggtctgtggtcatggctgtgagattctgtcaccggaatgagtccaagtttgagaacctggacgaggtgtccatgtggttctgggagttggtggattctggcttggcccctgtgagcccccttggtggtggtatcatccggagaggcttctcgggtaccccattgctgccatcgctgccgagccgccttgtgttgcctggagaggtcgagcccagtacccatgtggtgttcaccattgaggcttaagggacagagaaaagacagcgtggtcccagatagcaccatctgggcatcgacagctcctcggtgtcggccccaccttgagccccagttccaccttctaccgcttcagcacctccggcgcggacagctcctcgctgtcgcctccactcccggccctgggccggacccgggagcagacgctcctcggcgcccgctcacggggacgagtcctgctccctgctatcccagacccctttctctggcgcatggagaacctgggggtcggcgaaggggcagaggcttgcagcaggttgagtcgctctcgcggccgccacagcatgaccagagccccgaagcacctgtggcggcaaccccggcgccccatccgcatccaacagcgcttctattcggatccggacaagtccgcgggctgccgcgagagggacctgagcccgcggccggagctcaggaagtcgcggctctcctggcccgtttcctcctgcaggcgctttgacctggaaaatgggctctcgtgtgggaggagggccctggaccctcagtccagccctggcctgggccggattatgcaggctccagtcccgcacagccagcggcgcgagtccttcctgtaccgctcagatagcgactatgaactctcgcccaaggccatgtctcggaactcctctgtggccagcgacctacatggagaggacatgattgtgacgccctttgcccaggtcctggccagtctgcggaccgttcggagcaacgtggcggcccttgcccgccagcaatgcctaggagcagccaagcagggacccgtcggaaacccttcatccagcaatcagctccctcctgcagaggacacggggcagaagctggcattggagacgctagacgagctggactggtgcctggatcagttggagacgctgcagacccggcactcggtgggggagatggcctccaacaagttcaagcggatcctgaaccgggagttgacccacctgtccgaaaccagccgctccgggaaccaggtgtccgagtacatctcccggaccttcctggaccagcagaccgaggtggagctgcccaaggtgaccgctgaggaggccccacagcccatgtcccggatcagtggcctacatgggctctgccacagtgccagcctctcctcagccactgtcccacgctttggggtccagactgaccaggaggagcaactggccaaggagctagaagacaccaacaagtggggacttgatgtgttcaaggtggcggagctaagtgggaaccggcccctcacagctatcatattcagcatttttcaggagcgggacctgctgaagacattccagatcccagcagacacactggccacctacctgctgatgctggaaggtcactaccacgccaatgtggcctaccacaacagcctacatgccgccgacgtggcccagtccacgcatgtgctgctggctacgcccgccctcgaggctgtgttcacagacttggaaatcctggctgccctctttgcaagcgccatccacgacgtggaccatcctggggtctccaaccagtttctgattaacaccaactcagagctggcgcttatgtacaacgacgcctcggtgctggagaaccatcacctggctgtgggcttcaagctgctgcaggcagagaactgcgatatcttccagaacctcagcgccaagcagcgactgagtctgcgcaggatggtcattgacatggtgctggccacagacatgtccaaacacatgaacctcctggccgacctcaagaccatggtggagaccaagaaggtgacaagcctcggtgtcctcctcctggacaactattccgaccgaatccaggtcttgcagaacctggtgcactgtgctgatctgagcaaccccaccaagccgctgcccctgtaccgccagtggacggaccgcatcatggccgagttcttccagcagggagaccgcgagcgtgagtcgggcctggacatcagtcccatgtgtgacaagcatacggcctcagtggagaagtcccaggtgggtttcattgactacattgctcacccactgtgggagacttgggctgacctggtccacccagatgcacaggacctgctggacacgctggaggacaatcgagagtggtaccagagcaagatcccccgaagtccctcagacctcaccaaccccgagcgggacgggcctgacagattccagtttgaactgactctggaggaggcagaggaagaggatgaggaggaagaagaggagggggaagagacagctttagccaaagaggccttggagttgcctgacactgaactcctgtcccctgaagccggcccagaccctggggacttacccctcgacaaccagaggacttagggccagccctgcgtgaactgcaggggcaatggatggtaaagccctttggctcttggcaggcagactttccaggaagaggctccatgtggctcctgcttcactttcccacccatttagggagacaatcaagctcttagttataggtggctcccagggtctaattggaggcacctggctggggtccactctgaccctagacttgcctaaaagagctctctaaggggcagcctcttacgatgccctggtgtctttctcctgggcttctatccctgtgaggagaggtgctgtctgctggagcctctagtccaccctctccagtggtcactcttgagtcacatctgtcacttaattatttccttctttatcaaatatttattgctcatctacttcgtgccagctttctgcctctgtagtagccctgcacaaagggtggggagtcaggagaccatcccaaaggcatctccctgtcttcctctaccaagcggctctctgcaagagcatggaaatgtgagtggggaaaattttcagcaccaaagcttcactcatacccagttttgtttctgaaactacggtagggggcaggaagaggagcagaaaagaagggctgggcaaggcatagtggcttatgcctgtaatcccggtactttgggaggctgaggtgggaggactgcttaagctcaggagtttgagaccagcctgggcaacatagcaagacccccaccatctctgaaaaaaaaaattagccaggcatggtggtgtgcacctgagaatcccagctactcagaaggttgagacaaaggggatcgcttgagcccaggagttggaggctgaagagagctatgactgcatcactgcactccagcctgggcaacacagcaagatcctgtctaaaaataaaaagaaaagagaaggaaaggaaagagacggggctctgaggccgagcacagtggcccatgcctataatcccagcactttgggaggctgaggcaggtggatcacctgaggttaggagttcgagaccagcctggccaacatggtgaaaccccatctctactaaaaatacaaaaattggctgggcatggtggcgggtgcctgtaatcccagctactggggaggctgaggcaggagaatcacttgaattcaggaggtggaggttgcagtgagccgacatcatgccactgcactccagcctgggcgacagagcaagacactgtctcaaaaaagaaaagaaaaaaaaaaaagccgggccaggtggctcacgcctgtaatcctagcactttgggaggctgagtgggggtggatcgcctgagatcaggagttcaaaatcagcctggccaacatagtgaaaccctgtctctactaaaaatacaaaaaattagaggctgggtgcggcggctcacacctgtaatcccagaactttgggaggccgaggcgggtggatcacgaggtcaggagttcaagaccagcctggccaacacggtgaaaccccatctctactaaaaatacacaaattagctgggcatggtgttgggtgcctgaatcccagctactcgggaggctgaggcaggagaatcgcttgaatccgggaggcggggcttgcagtgagccgagatcgtgccattgcactccagcctgggtgacagagcaagactccgtctcaaaaagaaaaaaaaaaaattagccaggcatggtggcaggtgcctgtaatcccagctacttgagaggctgaggcaggagaatcgcttgaacccgggaggtggaggttgtggtgagccgaggtcgcgccactgcactccagcctgggcaacgacaacaacaataaaaagagggggctctgtgcccggcatgtctctgaagactgattgaacctatgcaccagttgttgctttaagtcgctttattttctgtctttggtgtctctggatgtaggagccccctgctttctctgtccgcagaactccatactgggtcccctacgtgttcctccttccctaggacagcaacaaaaacacacaattttccctctctagcaggtctctaagtctcctgattcctgaaactgcctcagactccccctagagggagggaggcccctgaggctttcttgccatcatagcctcttctgggcctcagtttcccctctgtaacctgatcctagtacttggataaactccgacgaggtgtggggggttgttgtctgtgacctccctgaaatatcttagacatttggggtactgagcatttatctggggttaaataaaatctttacatcttaagacattcgattgaccaaattgagtgtcctggccatttcactgatgaggaaactgaggcgcagagaggtcctcttgccagctcaaagtcaagcatctgggcgcccaatgttagccagcggcaccccctggtggcgggcgtgggagacacggcggggcgcgcttgtcgggggttggggggtgggtcggaggggtggcatcctccagccctgatggtcccacttaccgcacctcgccgggaagagctcgtcctgctggtcgggcctccgagcggactgggcagcaccatgctcaagcctagggttcgatccccgcctccggaagcctcagtatccatccctcccctctgcctccctcttcgcgtgcctgaatatttatacaagatacaggcgtcatcacagccgccctcggcttccagagcagctggcttcgttcataaatattataaccactcagaattcatcatcatcacagttaatgataaaattccacagtgccagaactaaaagtcatccgggttcacgaacttggtgcatttccttccagacttttaaaaagaagatatttagggaatttttttttcaagatttttccccccagtccgcttacaaagtaataccatgttcgctgtaaaaaatttggaaataatggaaatgtataaagaaggaaataaaattctgctgtatctccaccca

SEQ ID NO: 165356 - DNA, 2542 bp, Homo sapiens
  Payload ID: 12557
  Gene Symbol: PDE4C
  Gene Name: phosphodiesterase 4C, cAMP-specific
  Uniprot ID: Q08493
  ENST ID: ENST00000447275
  CDS Start-End: 336-2156
ttcgacgtgatcagacccaactcagacccggtcatacttggaccgaatgctgccaaatcccccacctctacccagatctgagcctacgcggggtgccgacccagctcgtggacggggatacggtgacctttgacccaaaagtcttggccgggaccagccggacactggccctcggccgggagctccgagtctcaggcggtcccggttgtcttcctgtcggtgccgcttccgcctgcccttcttgaaaacccacccccagctttgacctggaaaatgggctctcgtgtgggaggagggccctggaccctcagtccagccctggcctgggccggattatgcaggctccagtcccgcacagccagcggcgcgagtccttcctgtaccgctcagatagcgactatgaactctcgcccaaggccatgtctcggaactcctctgtggccagcgacctacatggagaggacatgattgtgacgccctttgcccaggtcctggccagtctgcggaccgttcggagcaacgtggcggcccttgcccgccagcaatgcctaggagcagccaagcagggacccgtcggaaacccttcatccagcaatcagctccctcctgcagaggacacggggcagaagctggcattggagacgctagacgagctggactggtgcctggatcagttggagacgctgcagacccggcactcggtgggggagatggcctccaacaagttcaagcggatcctgaaccgggagttgacccacctgtccgaaaccagccgctccgggaaccaggtgtccgagtacatctcccggaccttcctggaccagcagaccgaggtggagctgcccaaggtgaccgctgaggaggccccacagcccatgtcccggatcagtggcctacatgggctctgccacagtgccagcctctcctcagccactgtcccacgctttggggtccagactgaccaggaggagcaactggccaaggagctagaagacaccaacaagtggggacttgatgtgttcaaggtggcggagctaagtgggaaccggcccctcacagctatcatattcagcatttttcaggagcgggacctgctgaagacattccagatcccagcagacacactggccacctacctgctgatgctggaaggtcactaccacgccaatgtggcctaccacaacagcctacatgccgccgacgtggcccagtccacgcatgtgctgctggctacgcccgccctcgaggctgtgttcacagacttggaaatcctggctgccctctttgcaagcgccatccacgacgtggaccatcctggggtctccaaccagtttctgattaacaccaactcagagctggcgcttatgtacaacgacgcctcggtgctggagaaccatcacctggctgtgggcttcaagctgctgcaggcagagaactgcgatatcttccagaacctcagcgccaagcagcgactgagtctgcgcaggatggtcattgacatggtgctggccacagacatgtccaaacacatgaacctcctggccgacctcaagaccatggtggagaccaagaaggtgacaagcctcggtgtcctcctcctggacaactattccgaccgaatccaggtcttgcagaacctggtgcactgtgctgatctgagcaaccccaccaagccgctgcccctgtaccgccagtggacggaccgcatcatggccgagttcttccagcagggagaccgcgagcgtgagtcgggcctggacatcagtcccatgtgtgacaagcatacggcctcagtggagaagtcccaggtgggtttcattgactacattgctcacccactgtgggagacttgggctgacctggtccacccagatgcacaggacctgctggacacgctggaggacaatcgagagtggtaccagagcaagatcccccgaagtccctcagacctcaccaaccccgagcgggacgggcctgacagattccagtttgaactgactctggaggaggcagaggaagaggatgaggaggaagaagaggagggggaagagacagctttagccaaagaggccttggagttgcctgacactgaactcctgtcccctgaagccggcccagaccctggggacttacccctcgacaaccagaggacttagggccagccctgcgtgaactgcaggggcaatggatggtaaagccctttggctcttggcaggcagactttccaggaagaggctccatgtggctcctgcttcactttcccacccatttagggagacaatcaagctcttagttataggtggctcccagggtctaattggaggcacctggctggggtccactctgaccctagacttgcctaaaagagctctctaaggggcagcctcttacgatgccctggtgtctttctcctgggcttctatccctgtgaggagaggtgctgtctgctggagcctctagtccaccctctccagtggtcactcttgagtcacatctgtcacttaattatttccttctttatcaaatatttattgctcatcta

SEQ ID NO: 165357 - DNA, 1699 bp, Homo sapiens
  Payload ID: 12557
  Gene Symbol: PDE4C
  Gene Name: phosphodiesterase 4C, cAMP-specific
  ENST ID: ENST00000539010
  CDS Start-End: 156-1601
gaccgttcggagcaacgtggcggcccttgcccgccagcaatgcctaggagcagccaaaggacacggggcagaagctggcattggagacgctagacgagctggactggtgcctggatcagttggagacgctgcagacccggcactcggtgggggagatggcctccaacaagttcaagcggatcctgaaccgggagttgacccacctgtccgaaaccagccgctccgggaaccaggtgtccgagtacatctcccggaccttcctggaccagcagaccgaggtggagctgcccaaggtgaccgctgaggaggccccacagcccatgtcccggatcagtggcctacatgggctctgccacagtgccagcctctcctcagccactgtcccacgctttggggtccagactgaccaggaggagcaactggccaaggagctagaagacaccaacaagtggggacttgatgtgttcaaggtggcggagctaagtgggaaccggcccctcacagctatcatattcagcatttttcaggagcgggacctgctgaagacattccagatcccagcagacacactggccacctacctgctgatgctggaaggtcactaccacgccaatgtggcctaccacaacagcctacatgccgccgacgtggcccagtccacgcatgtgctgctggctacgcccgccctcgaggctgtgttcacagacttggaaatcctggctgccctctttgcaagcgccatccacgacgtggaccatcctggggtctccaaccagtttctgattaacaccaactcagagctggcgcttatgtacaacgacgcctcggtgctggagaaccatcacctggctgtgggcttcaagctgctgcaggcagagaactgcgatatcttccagaacctcagcgccaagcagcgactgagtctgcgcaggatggtcattgacatggtgctggccacagacatgtccaaacacatgaacctcctggccgacctcaagaccatggtggagaccaagaaggtgacaagcctcggtgtcctcctcctggacaactattccgaccgaatccaggtcttgcagaacctggtgcactgtgctgatctgagcaaccccaccaagccgctgcccctgtaccgccagtggacggaccgcatcatggccgagttcttccagcagggagaccgcgagcgtgagtcgggcctggacatcagtcccatgtgtgacaagcatacggcctcagtggagaagtcccaggtgggtttcattgactacattgctcacccactgtgggagacttgggctgacctggtccacccagatgcacaggacctgctggacacgctggaggacaatcgagagtggtaccagagcaagatcccccgaagtccctcagacctcaccaaccccgagcgggacgggcctgacagattccagtttgaactgactctggaggaggcagaggaagaggatgaggaggaagaagaggagggggaagagacagctttagccaaagaggccttggagttgcctgacactgaactcctgtcccctgaagccggcccagaccctggggacttacccctcgacaaccagaggacttagggccagccctgcgtgaactgcaggggcaatggatggtaaagccctttggctcttggcaggcagactttccaggaagaggctccatgtggctcctgctt

SEQ ID NO: 165358 - DNA, 4655 bp, Homo sapiens
  Payload ID: 12557
  Gene Symbol: PDE4C
  Gene Name: phosphodiesterase 4C, cAMP-specific
  Uniprot ID: Q08493
  ENST ID: ENST00000594617
  CDS Start-End: 240-2378
atgggacccaggcaggactccgcagtggtgcaccatctgggcatcgacagctcctcggtgtcggccccaccttgagccccagttccaccttctaccgcttcagcacctccggcgcggacagctcctcgctgtcgcctccactcccggccctgggccggacccgggagcagacgctcctcggcgcccgctcacggggacgagtcctgctccctgctatcccagacccctttctctggcgcatggagaacctgggggtcggcgaaggggcagaggcttgcagcaggttgagtcgctctcgcggccgccacagcatgaccagagccccgaagcacctgtggcggcaaccccggcgccccatccgcatccaacagcgcttctattcggatccggacaagtccgcgggctgccgcgagagggacctgagcccgcggccggagctcaggaagtcgcggctctcctggcccgtttcctcctgcaggcgctttgacctggaaaatgggctctcgtgtgggaggagggccctggaccctcagtccagccctggcctgggccggattatgcaggctccagtcccgcacagccagcggcgcgagtccttcctgtaccgctcagatagcgactatgaactctcgcccaaggccatgtctcggaactcctctgtggccagcgacctacatggagaggacatgattgtgacgccctttgcccaggtcctggccagtctgcggaccgttcggagcaacgtggcggcccttgcccgccagcaatgcctaggagcagccaagcagggacccgtcggaaacccttcatccagcaatcagctccctcctgcagaggacacggggcagaagctggcattggagacgctagacgagctggactggtgcctggatcagttggagacgctgcagacccggcactcggtgggggagatggcctccaacaagttcaagcggatcctgaaccgggagttgacccacctgtccgaaaccagccgctccgggaaccaggtgtccgagtacatctcccggaccttcctggaccagcagaccgaggtggagctgcccaaggtgaccgctgaggaggccccacagcccatgtcccggatcagtggcctacatgggctctgccacagtgccagcctctcctcagccactgtcccacgctttggggtccagactgaccaggaggagcaactggccaaggagctagaagacaccaacaagtggggacttgatgtgttcaaggtggcggagctaagtgggaaccggcccctcacagctatcatattcagcatttttcaggagcgggacctgctgaagacattccagatcccagcagacacactggccacctacctgctgatgctggaaggtcactaccacgccaatgtggcctaccacaacagcctacatgccgccgacgtggcccagtccacgcatgtgctgctggctacgcccgccctcgaggctgtgttcacagacttggaaatcctggctgccctctttgcaagcgccatccacgacgtggaccatcctggggtctccaaccagtttctgattaacaccaactcagagctggcgcttatgtacaacgacgcctcggtgctggagaaccatcacctggctgtgggcttcaagctgctgcaggcagagaactgcgatatcttccagaacctcagcgccaagcagcgactgagtctgcgcaggatggtcattgacatggtgctggccacagacatgtccaaacacatgaacctcctggccgacctcaagaccatggtggagaccaagaaggtgacaagcctcggtgtcctcctcctggacaactattccgaccgaatccaggtcttgcagaacctggtgcactgtgctgatctgagcaaccccaccaagccgctgcccctgtaccgccagtggacggaccgcatcatggccgagttcttccagcagggagaccgcgagcgtgagtcgggcctggacatcagtcccatgtgtgacaagcatacggcctcagtggagaagtcccaggtgggtttcattgactacattgctcacccactgtgggagacttgggctgacctggtccacccagatgcacaggacctgctggacacgctggaggacaatcgagagtggtaccagagcaagatcccccgaagtccctcagacctcaccaaccccgagcgggacgggcctgacagattccagtttgaactgactctggaggaggcagaggaagaggatgaggaggaagaagaggagggggaagagacagctttagccaaagaggccttggagttgcctgacactgaactcctgtcccctgaagccggcccagaccctggggacttacccctcgacaaccagaggacttagggccagccctgcgtgaactgcaggggcaatggatggtaaagccctttggctcttggcaggcagactttccaggaagaggctccatgtggctcctgcttcactttcccacccatttagggagacaatcaagctcttagttataggtggctcccagggtctaattggaggcacctggctggggtccactctgaccctagacttgcctaaaagagctctctaaggggcagcctcttacgatgccctggtgtctttctcctgggcttctatccctgtgaggagaggtgctgtctgctggagcctctagtccaccctctccagtggtcactcttgagtcacatctgtcacttaattatttccttctttatcaaatatttattgctcatctacttcgtgccagctttctgcctctgtagtagccctgcacaaagggtggggagtcaggagaccatcccaaaggcatctccctgtcttcctctaccaagcggctctctgcaagagcatggaaatgtgagtggggaaaattttcagcaccaaagcttcactcatacccagttttgtttctgaaactacggtagggggcaggaagaggagcagaaaagaagggctgggcaaggcatagtggcttatgcctgtaatcccggtactttgggaggctgaggtgggaggactgcttaagctcaggagtttgagaccagcctgggcaacatagcaagacccccaccatctctgaaaaaaaaaattagccaggcatggtggtgtgcacctgagaatcccagctactcagaaggttgagacaaaggggatcgcttgagcccaggagttggaggctgaagagagctatgactgcatcactgcactccagcctgggcaacacagcaagatcctgtctaaaaataaaaagaaaagagaaggaaaggaaagagacggggctctgaggccgagcacagtggcccatgcctataatcccagcactttgggaggctgaggcaggtggatcacctgaggttaggagttcgagaccagcctggccaacatggtgaaaccccatctctactaaaaatacaaaaattggctgggcatggtggcgggtgcctgtaatcccagctactggggaggctgaggcaggagaatcacttgaattcaggaggtggaggttgcagtgagccgacatcatgccactgcactccagcctgggcgacagagcaagacactgtctcaaaaaagaaaagaaaaaaaaaaaagccgggccaggtggctcacgcctgtaatcctagcactttgggaggctgagtgggggtggatcgcctgagatcaggagttcaaaatcagcctggccaacatagtgaaaccctgtctctactaaaaatacaaaaaattagaggctgggtgcggcggctcacacctgtaatcccagaactttgggaggccgaggcgggtggatcacgaggtcaggagttcaagaccagcctggccaacacggtgaaaccccatctctactaaaaatacacaaattagctgggcatggtgttgggtgcctgaatcccagctactcgggaggctgaggcaggagaatcgcttgaatccgggaggcggggcttgcagtgagccgagatcgtgccattgcactccagcctgggtgacagagcaagactccgtctcaaaaagaaaaaaaaaaaattagccaggcatggtggcaggtgcctgtaatcccagctacttgagaggctgaggcaggagaatcgcttgaacccgggaggtggaggttgtggtgagccgaggtcgcgccactgcactccagcctgggcaacgacaacaacaataaaaagagggggctctgtgcccggcatgtctctgaagactgattgaacctatgcaccagttgttgctttaagtcgctttattttctgtctttggtgtctctggatgtaggagccccctgctttctctgtccgcagaactccatactgggtcccctacgtgttcctccttccctaggacagcaacaaaaacacacaattttccctctctagcaggtctctaagtctcctgattcctgaaactgcctcagactccccctagagggagggaggcccctgaggctttcttgccatcatagcctcttctgggcctcagtttcccctctgtaacctgatcctagtacttggataaactccgacgaggtgtggggggttgttgtctgtgacctccctgaaatatcttagacatttggggtactgagcatttatctggggttaaataaaatctttacatcttaag

SEQ ID NO: 165359 - DNA, 2988 bp, Homo sapiens
  Payload ID: 12557
  Gene Symbol: PDE4C
  Gene Name: phosphodiesterase 4C, cAMP-specific
  Uniprot ID: Q08493
  ENST ID: ENST00000594465
  CDS Start-End: 481-2619
aaagctacctttttctctttcaacacggtgcgagggacaccgtctcggccccgggggtctcctgagaccctgtctccctgccctccatttagcagcgatcagtggacaatttctgtcttctccactccaagtccttgtcttggttcttttccatgcagcgctataggggacggcagacggttttcggggctggtgtgttgggggggggtctcttcagcccctagcttcaacaccccctcaccacgttcttctcccctgttctacccttcagcaccatctgggcatcgacagctcctcggtgtcggccccaccttgagccccagttccaccttctaccgcttcagcacctccggcgcggacagctcctcgctgtcgcctccactcccggccctgggccggacccgggagcagacgctcctcggcgcccgctcacggggacgagtcctgctccctgctatcccagacccctttctctggcgcatggagaacctgggggtcggcgaaggggcagaggcttgcagcaggttgagtcgctctcgcggccgccacagcatgaccagagccccgaagcacctgtggcggcaaccccggcgccccatccgcatccaacagcgcttctattcggatccggacaagtccgcgggctgccgcgagagggacctgagcccgcggccggagctcaggaagtcgcggctctcctggcccgtttcctcctgcaggcgctttgacctggaaaatgggctctcgtgtgggaggagggccctggaccctcagtccagccctggcctgggccggattatgcaggctccagtcccgcacagccagcggcgcgagtccttcctgtaccgctcagatagcgactatgaactctcgcccaaggccatgtctcggaactcctctgtggccagcgacctacatggagaggacatgattgtgacgccctttgcccaggtcctggccagtctgcggaccgttcggagcaacgtggcggcccttgcccgccagcaatgcctaggagcagccaagcagggacccgtcggaaacccttcatccagcaatcagctccctcctgcagaggacacggggcagaagctggcattggagacgctagacgagctggactggtgcctggatcagttggagacgctgcagacccggcactcggtgggggagatggcctccaacaagttcaagcggatcctgaaccgggagttgacccacctgtccgaaaccagccgctccgggaaccaggtgtccgagtacatctcccggaccttcctggaccagcagaccgaggtggagctgcccaaggtgaccgctgaggaggccccacagcccatgtcccggatcagtggcctacatgggctctgccacagtgccagcctctcctcagccactgtcccacgctttggggtccagactgaccaggaggagcaactggccaaggagctagaagacaccaacaagtggggacttgatgtgttcaaggtggcggagctaagtgggaaccggcccctcacagctatcatattcagcatttttcaggagcgggacctgctgaagacattccagatcccagcagacacactggccacctacctgctgatgctggaaggtcactaccacgccaatgtggcctaccacaacagcctacatgccgccgacgtggcccagtccacgcatgtgctgctggctacgcccgccctcgaggctgtgttcacagacttggaaatcctggctgccctctttgcaagcgccatccacgacgtggaccatcctggggtctccaaccagtttctgattaacaccaactcagagctggcgcttatgtacaacgacgcctcggtgctggagaaccatcacctggctgtgggcttcaagctgctgcaggcagagaactgcgatatcttccagaacctcagcgccaagcagcgactgagtctgcgcaggatggtcattgacatggtgctggccacagacatgtccaaacacatgaacctcctggccgacctcaagaccatggtggagaccaagaaggtgacaagcctcggtgtcctcctcctggacaactattccgaccgaatccaggtcttgcagaacctggtgcactgtgctgatctgagcaaccccaccaagccgctgcccctgtaccgccagtggacggaccgcatcatggccgagttcttccagcagggagaccgcgagcgtgagtcgggcctggacatcagtcccatgtgtgacaagcatacggcctcagtggagaagtcccaggtgggtttcattgactacattgctcacccactgtgggagacttgggctgacctggtccacccagatgcacaggacctgctggacacgctggaggacaatcgagagtggtaccagagcaagatcccccgaagtccctcagacctcaccaaccccgagcgggacgggcctgacagattccagtttgaactgactctggaggaggcagaggaagaggatgaggaggaagaagaggagggggaagagacagctttagccaaagaggccttggagttgcctgacactgaactcctgtcccctgaagccggcccagaccctggggacttacccctcgacaaccagaggacttagggccagccctgcgtgaactgcaggggcaatggatggtaaagccctttggctcttggcaggcagactttccaggaagaggctccatgtggctcctgcttcactttcccacccatttagggagacaatcaagctcttagttataggtggctcccagggtctaattggaggcacctggctggggtccactctgaccctagacttgcctaaaagagctctctaaggggcagcctcttacgatgccctggtgtctttctcctgggcttctatccctgtgaggagaggtgctgtctgctggagcctctagtccaccctctccagtggtcactcttgagtcacatctgtcacttaattatttccttctttatcaaa

SEQ ID NO: 165360 - DNA, 528 bp, Homo sapiens
  Payload ID: 12557
  Gene Symbol: PDE4C
  Gene Name: phosphodiesterase 4C, cAMP-specific
  ENST ID: ENST00000599754
  CDS Start-End: 249-528
agagatactcctcctgcctgtcctgagcttccacaaaagcaccatctgggcatcgacagctcctcggtgtcggccccaccttgagccccagttccaccttctaccgcttcagcacctccggcgcggacagctcctcgctgtcgcctccactcccggccctgggccggacccgggagcagacgctcctcggcgcccgctcacggggacgagtcctgctccctgctatcccagacccctttctctggcgcatggagaacctgggggtcggcgaaggggcagaggcttgcagcaggttgagtcgctctcgcggccgccacagcatgaccagagccccgaagcacctgtggcggcaaccccggcgccccatccgcatccaacagcgcttctattcggatccggacaagtccgcgggctgccgcgagagggacctgagcccgcggccggagctcaggaagtcgcggctctcctggcccgtttcctcctgcaggcgctttgacctggaaaatgggctctcgtgtgggaggaggg

SEQ ID NO: 165361 - DNA, 2101 bp, Homo sapiens
  Payload ID: 12557
  Gene Symbol: PDE4C
  Gene Name: phosphodiesterase 4C, cAMP-specific
  ENST ID: ENST00000599188
  CDS Start-End: 11-706
agtcctggcgatgcagggcccccccgcgcccgccccggtccccgggcccggctcccctcggggatccccgcgcggctcccccgggctcttcaggaagcttttggtgaatcagagcatccgcctgcagcggcgcttcacggtggcccatccgctgtgctttgacctggaaaatgggctctcgtgtgggaggagggccctggaccctcagtccagccctggcctgggccggattatgcaggctccagtcccgcacagccagcggcgcgagtccttcctgtaccgctcagatagcgactatgaactctcgcccaaggccatgtctcggaactcctctgtggccagcgacctacatggagaggacatgattgtgacgccctttgcccaggtcctggccagtctgcggaccgttcggagcaacgtggcggcccttgcccgccagcaatgcctaggagcagccaaaggacacggggcagaagctggcattggagacgctagacgagctggactggtgcctggatcagttggagacgctgcagacccggcactcggtgggggagatggcctccaacaagttcaagcggatcctgaaccgggagttgacccacctgtccgaaaccagccgctccgggaaccaggtgtccgagtacatctcccggaccttcctggaccagcagaccgaggtggagctgcccaaggtgaccgctgaggaggccccacagcccatgtcccggatcagtggcctacatgggctctgccacagtgccagcctctcctcagccactgtcccacgctttggggtccagactgaccaggaggagcaactggccaaggagctagaagacaccaacaagtggggacttgatgtgttcaaggtggcggagctaagtgggaaccggcccctcacagctatcatattcagcatttttcaggagcgggacctgctgaagacattccagatcccagcagacacactggccacctacctgctgatgctggaaggtcactaccacgccaatgtggcctaccacaacagcctacatgccgccgacgtggcccagtccacgcatgtgctgctggctacgcccgccctcgaggctgtgttcacagacttggaaatcctggctgccctctttgcaagcgccatccacgacgtggaccatcctggggtctccaaccagtttctgattaacaccaactcagagctggcgcttatgtacaacgacgcctcggtgctggagaaccatcacctggctgtgggcttcaagctgctgcaggcagagaactgcgatatcttccagaacctcagcgccaagcagcgactgagtctgcgcaggatggtcattgacatggtgctggccacagacatgtccaaacacatgaacctcctggccgacctcaagaccatggtggagaccaagaaggtgacaagcctcggtgtcctcctcctggacaactattccgaccgaatccaggtcttgcagaacctggtgcactgtgctgatctgagcaaccccaccaagccgctgcccctgtaccgccagtggacggaccgcatcatggccgagttcttccagcagggagaccgcgagcgtgagtcgggcctggacatcagtcccatgtgtgacaagcatacggcctcagtggagaagtcccaggtgggtttcattgactacattgctcacccactgtgggagacttgggctgacctggtccacccagatgcacaggacctgctggacacgctggaggacaatcgagagtggtaccagagcaagatcccccgaagtccctcagacctcaccaaccccgagcgggacgggcctgacagattccagtttgaactgactctggaggaggcagaggaagaggatgaggaggaagaagaggagggggaagagacagctttagccaaagaggccttggagttgcctgacactgaactcctgtcccctgaagccggcccagaccctggggacttacccctcgacaaccagaggacttagggccagccctgcgtgaactgcaggggcaatggatggtaaagccctttggctcttggcaggcagactttccaggaagaggctccatgtggctcctgctt

SEQ ID NO: 165362 - DNA, 420 bp, Homo sapiens
  Payload ID: 12557
  Gene Symbol: PDE4C
  Gene Name: phosphodiesterase 4C, cAMP-specific
  ENST ID: ENST00000595343
  CDS Start-End: 1-35
ttgcccgccagcaatgcctaggagcagccaaatgaggaggctgaggcccagagatctcatggtcacacaggcactcggggaacagatctggaacttgggtccaggagtcctgggtggcccccgtgggaacagtttcagggtccagatgaagagacgaagtcgcgagaggcgtggggtccctgagcgggggggttgggcaggcccctgactgcctcggctcccagaggacacggggcagaagctggcattggagacgctagacgagctggactggtgcctggatcagttggagacgctgcagacccggcactcggtgggggagatggcctccaacaagttcaagcggatcctgaaccgggagttgacccacctgtccgaaaccagccgctccgggaaccaggtgtccgagtacatctcccg

SEQ ID NO: 165363 - DNA, 1284 bp, Homo sapiens
  Payload ID: 12557
  Gene Symbol: PDE4C
  Gene Name: phosphodiesterase 4C, cAMP-specific
  ENST ID: ENST00000598111
  CDS Start-End: 1-1284
atgcctaggagcagccaattcaagcggatcctgaaccgggagttgacccacctgtccgaaaccagccgctccgggaaccaggtgtccgagtacatctcccggaccttcctggaccagcagaccgaggtggagctgcccaaggtgaccgctgaggaggccccacagcccatgtcccggatcagtggcctacatgggctctgccacagtgccagcctctcctcagccactgtcccacgctttggggtccagactgaccaggaggagcaactggccaaggagctagaagacaccaacaagtggggacttgatgtgttcaaggtggcggagctaagtgggaaccggcccctcacagctatcatattcagcatttttcaggctgtgttcacagacttggaaatcctggctgccctctttgcaagcgccatccacgacgtggaccatcctggggtctccaaccagtttctgattaacaccaactcagagctggcgcttatgtacaacgacgcctcggtgctggagaaccatcacctggctgtgggcttcaagctgctgcaggcagagaactgcgatatcttccagaacctcagcgccaagcagcgactgagtctgcgcaggatggtcattgacatggtgctggccacagacatgtccaaacacatgaacctcctggccgacctcaagaccatggtggagaccaagaaggtgacaagcctcggtgtcctcctcctggacaactattccgaccgaatccaggtcttgcagaacctggtgcactgtgctgatctgagcaaccccaccaagccgctgcccctgtaccgccagtggacggaccgcatcatggccgagttcttccagcagggagaccgcgagcgtgagtcgggcctggacatcagtcccatgtgtgacaagcatacggcctcagtggagaagtcccaggtgggtttcattgactacattgctcacccactgtgggagacttgggctgacctggtccacccagatgcacaggacctgctggacacgctggaggacaatcgagagtggtaccagagcaagatcccccgaagtccctcagacctcaccaaccccgagcgggacgggcctgacagattccagtttgaactgactctggaggaggcagaggaagaggatgaggaggaagaagaggagggggaagagacagctttagccaaagaggccttggagttgcctgacactgaactcctgtcccctgaagccggcccagaccctggggacttacccctcgacaaccagaggacttag

SEQ ID NO: 165364 - DNA, 481 bp, Homo sapiens
  Payload ID: 12557
  Gene Symbol: PDE4C
  Gene Name: phosphodiesterase 4C, cAMP-specific
  ENST ID: ENST00000593594
  CDS Start-End: 1-269
ttgcccgccagcaatgcctaggagcagccaaccccgcccctgcaaaaacaataacgccctcggggatggaccccaccacactcatattacagatgaggaggctgaggcccagagatctcatggtcacacaggcactcggggaacagatctggaacttgggtccaggagtcctgggtggcccccgtgggaacagtttcagggtccagatgaagagacgaagtcgcgagaggcgtggggtccctgagcgggggggttgggcaggcccctgactgcctcggctcccagaggacacggggcagaagctggcattggagacgctagacgagctggactggtgcctggatcagttggagacgctgcagacccggcactcggtgggggagatggcctccaacaagttcaagcggatcctgaaccgggagttgacccacctgtccgaaaccagccgctccgggaaccaggtgtccgagtacatctcccg

SEQ ID NO: 165365 - DNA, 1559 bp, Homo sapiens
  Payload ID: 12557
  Gene Symbol: PDE4C
  Gene Name: phosphodiesterase 4C, cAMP-specific
  ENST ID: ENST00000597297
  CDS Start-End: 111-1559
accccctccggatccggcctctccttcccaccgcctaccacctcctcccaacaggtcctggccagtctgcggaccgttcggagcaacgtggcggcccttgcccgccagcaatgcctaggagcagccaattcaagcggatcctgaaccgggagttgacccacctgtccgaaaccagccgctccgggaaccaggtgtccgagtacatctcccggaccttcctggaccagcagaccgaggtggagctgcccaaggtgaccgctgaggaggccccacagcccatgtcccggatcagtggcctacatgggctctgccacagtgccagcctctcctcagccactgtcccacgctttggggtccagactgaccaggaggagcaactggccaaggagctagaagacaccaacaagtggggacttgatgtgttcaaggtggcggagctaagtgggaaccggcccctcacagctatcatattcagcatttttcaggagcgggacctgctgaagacattccagatcccagcagacacactggccacctacctgctgatgctggaaggtcactaccacgccaatgtggcctaccacaacagcctacatgccgccgacgtggcccagtccacgcatgtgctgctggctacgcccgccctcgaggctgtgttcacagacttggaaatcctggctgccctctttgcaagcgccatccacgacgtggaccatcctggggtctccaaccagtttctgattaacaccaactcagagctggcgcttatgtacaacgacgcctcggtgctggagaaccatcacctggctgtgggcttcaagctgctgcaggcagagaactgcgatatcttccagaacctcagcgccaagcagcgactgagtctgcgcaggatggtcattgacatggtgctggccacagacatgtccaaacacatgaacctcctggccgacctcaagaccatggtggagaccaagaaggtgacaagcctcggtgtcctcctcctggacaactattccgaccgaatccaggtcttgcagaacctggtgcactgtgctgatctgagcaaccccaccaagccgctgcccctgtaccgccagtggacggaccgcatcatggccgagttcttccagcagggagaccgcgagcgtgagtcgggcctggacatcagtcccatgtgtgacaagcatacggcctcagtggagaagtcccaggtgggtttcattgactacattgctcacccactgtgggagacttgggctgacctggtccacccagatgcacaggacctgctggacacgctggaggacaatcgagagtggtaccagagcaagatcccccgaagtccctcagacctcaccaaccccgagcgggacgggcctgacagattccagtttgaactgactctggaggaggcagaggaagaggatgaggaggaagaagaggagggggaagagacagctttagccaaagaggccttggagttgcctgacactgaactcctgtcccctgaagccggcccagaccctggggacttacccctcgacaaccagaggacttag

SEQ ID NO: 165366 - DNA, 583 bp, Homo sapiens
  Payload ID: 12557
  Gene Symbol: PDE4C
  Gene Name: phosphodiesterase 4C, cAMP-specific
  ENST ID: ENST00000610023
  CDS Start-End: 338-583
ggaagacctgaattgagggggttttcgaggcagggcgttcgggagtcccaggctgagcgcgcgcctgcgcccggcagctgcttgcgctgcatcctctaagcactcggtccacccctctgggttcgaatccctgcctttccagaaacgactgtgacctcgtggggagggatgggggcaaggctggggttcggagtggggcttgtgggcgccgactgtggctggcatcctgcgcttggtccgcgccgaattggcacccacttgctttgacctggaaaatgggctctcgtgtgggaggagggccctggaccctcagtccagccctggcctgggccggattatgcaggctccagtcccgcacagccagcggcgcgagtccttcctgtaccgctcagatagcgactatgaactctcgcccaaggccatgtctcggaactcctctgtggccagcgacctacatggagaggacatgattgtgacgccctttgcccaggtcctggccagtctgcggaccgttcggagcaacgtggcggcccttgcccgccagcaatgcctaggagcagccaagcagggacccgtcggaaac

SEQ ID NO: 165367 - DNA, 5676 bp, Homo sapiens
  Payload ID: 12558
  Gene Symbol: PDE4DIP
  Gene Name: phosphodiesterase 4D interacting protein
  ENST ID: ENST00000313431
  CDS Start-End: 658-4056
ggatccttgagggcactggtgcgactttcaggtgaggtcttagcagatgaaagcggctggctgtggcccgcgccagtagtgctttctgctccgcactcgccgtgagccaggtgtgcaaccggatttggggcgagggtcgcgctggctacctcgcatgcgcagagccggaagcccgctgaccggactacagctcccagaagagccttgtggaggccgcagacgcgaagccgctggcgccatcttgaaatctgatcctccatccccgaggctttgcgtctgcgcggccggccgctgctgctccgggagcccagtctgctaaaaggggaggacgttgaggacgcggcggctggcgggagagacagctggggagagacatggcagggtcggagcgcggcctgcgcctctgtcactcagcatcctcttaggcgtttccacgcccgccccctgcccgaggggcggggctgacggctctggtacccggagtcggcgcgcggggcaggggcgcgcccctgcagagtggggaccccactgggctgtgccatgctgaccggagaccaccgaggcgggagacagagcgcggcgaagagccattgagtggtcacccagtagccgccgccgccgccgcctcgggaagcttgccacccgctaggagggaagatgaaggagatttgcaggatctgtgcccgagagctgtgtggaaaccagcggcgctggatcttccacacggcgtccaagctcaatctccaggttctgctttcgcacgtcttgggcaaggatgtcccccgcgatggcaaagccgagttcgcttgcagcaagtgtgctttcatgcttgatcgaatctatcgattcgacacagttattgcccggattgaagcgctttctattgagcgcttgcaaaagctgctactggagaaggatcgcctcaagttctgcattgccagtatgtatcggaagaataacgatgactctggcgcggagatcaaggcggggaatgggacggttgacatgtccgtcttacccgatgcgagatactctgcactgctccaggaggacttcgcctattcagggtttgagtgctgggtggagaatgaggatcagatccaggagccacacagctgccatggttcagaaggccctggaaaccgacccaggagatgccgtggttgtgccgctttgcgggttgctgattctgactatgaagccatttgtaaggtacctcgaaaggtggccagaagtatctcctgcggcccttctagcaggtggtcgaccagcatttgcactgaagaaccagcgttgtctgaggttgggccacccgacttagcaagcacaaaggtacccccagatggagaaagcatggaggaagagacgcctggttcctctgtggaatctttggatgcaagcgtccaggctagccctccacaacagaaagatgaggagactgagagaagtgcaaaggaacttggaaagtgtgactgttgttcagatgatcaggctccgcagcatgggtgtaatcacaagctggaattagctcttagcatgattaaaggtcttgattataagcccatccagagcccccgagggagcaggcttccgattccagtgaaatccagcctacctggagccaagcctggccctagcatgacagatggagttagttccggtttccttaacaggtctttgaaacccctttacaagacacctgtgagttatcccttggagctttcagacctgcaggagctgtgggatgatctctgtgaagattatttgccgctccgggtccagcccatgactgaagagttgctgaaacaacaaaagctgaattcacatgagaccactataactcagcagtctgtatctgattcccacttggcagaactccaggaaaaaatccagcaaacagaggccaccaacaagattcttcaagagaaacttaatgaaatgagctatgaactaaagtgtgctcaggagtcgtctcaaaagcaagatggtacaattcagaacctcaaggaaactctgaaaagcagggaacgtgagactgaggagttgtaccaggtaattgaaggtcaaaatgacacaatggcaaagcttcgagaaatgctgcaccaaagccagcttggacaacttcacagctcagagggtacttctccagctcagcaacaggtagctctgcttgatcttcagagtgctttattctgcagccaacttgaaatacagaagctccagagggtggtacgacagaaagagcgccaactggctgatgccaaacaatgtgtgcaatttgtagaggctgcagcacacgagagtgaacagcagaaagaggcttcttggaaacataaccaggaattgcgaaaagccttgcagcagctacaagaagaattgcagaataagagccaacagcttcgtgcctgggaggctgaaaaatacaatgagattcgaacccaggaacaaaacatccagcacctaaaccatagtctgagtcacaaggagcagttgcttcaggaatttcgggagctcctacagtatcgagataactcagacaaaacccttgaagcaaatgaaatgttgcttgagaaacttcgccagcgaatacatgataaagctgttgctctggagcgggctatagatgaaaaattctctgctctagaagagaaagaaaaagaactgcgccagcttcgtcttgctgtgagagagcgagatcatgacttagagagactgcgcgatgtcctctcctccaatgaagctactatgcaaagtatggagagtctcctgagggccaaaggcctggaagtggaacagttatctactacctgtcaaaacctccagtggctgaaagaagaaatggaaaccaaatttagccgttggcagaaggaacaagagagtatcattcagcagttacagacgtctcttcatgataggaacaaagaagtggaggatcttagtgcaacactgctctgcaaacttggaccagggcagagtgagatagcagaggagctgtgccagcgtctacagcgaaaggaaaggatgctgcaggaccttctaagtgatcgaaataaacaagtgctggaacatgaaatggagattcaaggcctgcttcagtctgtgagcaccagggagcaggaaagccaagctgctgcagagaagttggtgcaagccttaatggaaagaaattcagaattacaggccctgcgccaatatttaggagggagagactccctgatgtcccaagcacccatctctaaccaacaagctgaagttacccccactggccgtcttggaaaacagactgatcaaggttcaatgcagataccttccagagatgatagcacttcattgactgccaaagaggatgtcagcatacccagatccacattaggagacttggacacagttgcagggctggaaaaagaactgagtaatgccaaagaggaacttgaactcatggctaaaaaagaaagagaaagtcagatggaactttctgctctacagtccatgatggctgtgcaggaagaagagctgcaggtgcaggctgctgatatggagtctctgaccaggaacatacagattaaagaagatctcataaaggacctgcaaatgcaactggttgatcctgaagacataccagctatggaacgcctgacccaggaagtcttacttcttcgggaaaaagttgcttcagtagaatcccagggtcaagaaatttcaggaaaccgaagacaacagttgctgctgatgctagaaggactagtagatgaacggagtcggctcaatgaggccttacaagcagagagacagctctatagcagtctggtgaagttccatgcccatccagagagctctgagagagaccgaactctgcaggtggaactggaaggggctcaggtgttacgcagtcggctagaagaagttcttggaagaagcttggagcgcttaaacaggctggagaccctggccgccattggaggtgcagctgcaggggatgacaccgaagatacaagcactgagttcactgacagtattgaggaggaggctgcacaccatagtcaccagcaactatagcttcagaagcatttttacttgcaagacgatggacacattccccttgggctttttgtaactgaaacgcaccacagaagacagggagtcatcgaagggctgctcggggaggtggcagggcggaggacctgcttgggaagaaactccaagaagattggaatgcttccaaagcaagaatctttctcagtgaaatctcattatacaaagagaaccttatgcaacctgacaaaccactgaggtcatggtgactcagtgatcagcagatggtacttcaacagcaatcccctgtcaaacctcagaacttgaggctgaaacattgcttccacccaccatcagtgaagatgtaactagcatgttacaagagtgaataatctggacttcagagattaagtcaccaatagtgatctcacaagcactcaccggaactcctataatgtctccactttgtccatgccatttagcaatctcatctcctaaatggactgtgcctatgattcttaaggagaaagtgaatcattggtagatatcctgcacaagcagctggactttccagtaatagctttcttggggctattaggaaaattaaacaagaaatgaggctttctgggtctgcctgtatgtcttctgcataagacaaagaagagacatcgaatcaaccaataagaagagcccaaataagcatcctcaaatcttttgggatttggcacttggggacatgagtagttgtctgggatacgtcatattctcaacagtttctttgtagtagtaggatcaccttcttataataggatcaccttcttgttgctatagctgtacccgaccttcccttctcccttgagtgcttgcatgagctccacttttccttttgcttgaacagcttctcctgagtcctccttaccgatggttgtgactttaattatatacatctctgtccctccagacagatccctctgtcctcactctctgatttcattgaggatcttgggtgagagagagggacctgcaggatgaacaaatgtctactctaagacagctagattgggaggttggctggtcactgatggttataatgactgtgggacaggattaacttcagaataaatgaacaggagacacagatatgaagaaagtttctgattgatatggtctgaagtactcctggtattgcaagtcatttgctctaattctcaattgtaggcaaactgatttgtaaatttgcttcttcagccttctttcctgtagcctagcatggagaatctgaccagaccccattttgagaaggtcagcctacactggaatgaactttttacattagggcatttgtatttccctcacaatacttgccacattacttggcataggagagatgcttagtgtaattataagttaacaagcctttggatcagggcttgactcatgatagacaaagtatatgcctgctggatggaagaatctcttgggcgagcaccatttttctttccatcacctttccttgaaaatatatcttcagctttgggtaggaggaatcttggtgtatgaaatcattgcaaatttacttcatcttttctggagtttgaagttgtgactctcctgctaccaattaaataaagcttactttgccat

SEQ ID NO: 165368 - DNA, 1137 bp, Homo sapiens
  Payload ID: 12558
  Gene Symbol: PDE4DIP
  Gene Name: phosphodiesterase 4D interacting protein
  Uniprot ID: Q5VU43
  ENST ID: ENST00000369347
  CDS Start-End: 179-700
ccagtcccgagtcccggagagagctccagcaataggggccatgtcgccgtagccccagcctctcggtccgcagcctcagcagcgtcccagccggctggcttcatgctgcggtgcagctgcaccatgttcctgggttgagggggcaatcgggcacgctcctccccatgggttgcccatcatgtctaatggatatcgcactctgtcccagcacctcaatgacctgaagaaggagaacttcagcctcaagctgcgcatctacttcctggaggagcgcatgcaacagaagtatgaggccagccgggaggacatctacaagcggaacattgagctgaaggttgaagtggagagcttgaaacgagaactccaggacaagaaacagcatctggataaaacatgggctgatgtggagaatctcaacagtcagaatgaagctgagctccgacgccagtttgaggagcgacagcaggagacggagcatgtttatgagctcttggagaataagatccagcttctgcaggaggaatccaggctagcaaagaatgaagctgcgcggatggcagctctggtggaagcagagaaggagtgtaacctggagctctcagagaaactgaagggagtcaccaaaaactgggaagatgtaccaggagaccaggtcaagcccgaccaatacactgaggccctggcccagagggacaagtaggtgccttcggtgctctttttgtcgcttgtcttttgcccattctcaaggcatacagcagctgtcctgttccctttcaaggactgacagtaggagcttcactatttctaagactttatgggcccacaaccgaagacattcttttcagggttgaattttcagtggtatccattatgaaaactcacttcatggattcagtgggcaaatagcggcaagcaagagacatagattcacttattcagcaaacatttactgggcatgccacatgccagataccgggctaagtatctggcatgtgttacagaaacaaaagacctaattcttgtcaccaagaaacatgttacatgattttaataagttccctgatagaagagcatggggtgctctggggaaatattggagggtcatccattccacattaaaagagcaagttgtctgct

SEQ ID NO: 165369 - DNA, 4677 bp, Homo sapiens
  Payload ID: 12558
  Gene Symbol: PDE4DIP
  Gene Name: phosphodiesterase 4D interacting protein
  ENST ID: ENST00000369349
  CDS Start-End: 146-3055
aggggccatgtcgccgtagccccagcctctcggtccgcagcctcagcagcgtcccagccggctggcttcatgctgcggtgcagctgcaccatgttcctgggttgagggggcaatcgggcacgctcctccccatgggttgcccatcatgtctaatggatatcgcactctgtcccagcacctcaatgacctgaagaaggagaacttcagcctcaagctgcgcatctacttcctggaggagcgcatgcaacagaagtatgaggccagccgggaggacatctacaagcggaacattgagctgaaggttgaagtggagagcttgaaacgagaactccaggacaagaaacagcatctggataaaacatgggctgatgtggagaatctcaacagtcagaatgaagctgagctccgacgccagtttgaggagcgacagcaggagacggagcatgtttatgagctcttggagaataagatccagcttctgcaggaggaatccaggctagcaaagaatgaagctgcgcggatggcagctctggtggaagcagagaaggagtgtaacctggagctctcagagaaactgaagggagtcaccaaaaactgggaagatgtaccaggagaccaggtcaagcccgaccaatacactgaggccctggcccagagggacaagagaattgaagaactgaatcagagcctggctgcccaggagaggcttgtagaacagctatctcgggagaaacaacaactgctacatctgttggaggagccaactagcatggaagtgcagcccatgactgaagagttgctgaaacaacaaaagctgaattcacatgagaccactataactcagcagtctgtatctgattcccacttggcagaactccaggaaaaaatccagcaaacagaggccaccaacaagattcttcaagagaaacttaatgaaatgagctatgaactaaagtgtgctcaggagtcgtctcaaaagcaagatggtacaattcagaacctcaaggaaactctgaaaagcagggaacgtgagactgaggagttgtaccaggtaattgaaggtcaaaatgacacaatggcaaagcttcgagaaatgctgcaccaaagccagcttggacaacttcacagctcagagggtacttctccagctcagcaacaggtagctctgcttgatcttcagagtgctttattctgcagccaacttgaaatacagaagctccagagggtggtacgacagaaagagcgccaactggctgatgccaaacaatgtgtgcaatttgtagaggctgcagcacacgagagtgaacagcagaaagaggcttcttggaaacataaccaggaattgcgaaaagccttgcagcagctacaagaagaattgcagaataagagccaacagcttcgtgcctgggaggctgaaaaatacaatgagattcgaacccaggaacaaaacatccagcacctaaaccatagtctgagtcacaaggagcagttgcttcaggaatttcgggagctcctacagtatcgagataactcagacaaaacccttgaagcaaatgaaatgttgcttgagaaacttcgccagcgaatacatgataaagctgttgctctggagcgggctatagatgaaaaattctctgctctagaagagaaagaaaaagaactgcgccagcttcgtcttgctgtgagagagcgagatcatgacttagagagactgcgcgatgtcctctcctccaatgaagctactatgcaaagtatggagagtctcctgagggccaaaggcctggaagtggaacagttatctactacctgtcaaaacctccagtggctgaaagaagaaatggaaaccaaatttagccgttggcagaaggaacaagagagtatcattcagcagttacagacgtctcttcatgataggaacaaagaagtggaggatcttagtgcaacactgctctgcaaacttggaccagggcagagtgagatagcagaggagctgtgccagcgtctacagcgaaaggaaaggatgctgcaggaccttctaagtgatcgaaataaacaagtgctggaacatgaaatggagattcaaggcctgcttcagtctgtgagcaccagggagcaggaaagccaagctgctgcagagaagttggtgcaagccttaatggaaagaaattcagaattacaggccctgcgccaatatttaggagggagagactccctgatgtcccaagcacccatctctaaccaacaagctgaagttacccccactggccgtcttggaaaacagactgatcaaggttcaatgcagataccttccagagatgatagcacttcattgactgccaaagaggatgtcagcatacccagatccacattaggagacttggacacagttgcagggctggaaaaagaactgagtaatgccaaagaggaacttgaactcatggctaaaaaagaaagagaaagtcagatggaactttctgctctacagtccatgatggctgtgcaggaagaagagctgcaggtgcaggctgctgatatggagtctctgaccaggaacatacagattaaagaagatctcataaaggacctgcaaatgcaactggttgatcctgaagacataccagctatggaacgcctgacccaggaagtcttacttcttcgggaaaaagttgcttcagtagaatcccagggtcaagaaatttcaggaaaccgaagacaacagttgctgctgatgctagaaggactagtagatgaacggagtcggctcaatgaggccttacaagcagagagacagctctatagcagtctggtgaagttccatgcccatccagagagctctgagagagaccgaactctgcaggtggaactggaaggggctcaggtgttacgcagtcggctagaagaagttcttggaagaagcttggagcgcttaaacaggctggagaccctggccgccattggaggtgcagctgcaggggatgacaccgaagatacaagcactgagttcactgacagtattgaggaggaggctgcacaccatagtcaccagcaactatagcttcagaagcatttttacttgcaagacgatggacacattccccttgggctttttgtaactgaaacgcaccacagaagacagggagtcatcgaagggctgctcggggaggtggcagggcggaggacctgcttgggaagaaactccaagaagattggaatgcttccaaagcaagaatctttctcagtgaaatctcattatacaaagagaaccttatgcaacctgacaaaccactgaggtcatggtgactcagtgatcagcagatggtacttcaacagcaatcccctgtcaaacctcagaacttgaggctgaaacattgcttccacccaccatcagtgaagatgtaactagcatgttacaagagtgaataatctggacttcagagattaagtcaccaatagtgatctcacaagcactcaccggaactcctataatgtctccactttgtccatgccatttagcaatctcatctcctaaatggactgtgcctatgattcttaaggagaaagtgaatcattggtagatatcctgcacaagcagctggactttccagtaatagctttcttggggctattaggaaaattaaacaagaaatgaggctttctgggtctgcctgtatgtcttctgcataagacaaagaagagacatcgaatcaaccaataagaagagcccaaataagcatcctcaaatcttttgggatttggcacttggggacatgagtagttgtctgggatacgtcatattctcaacagtttctttgtagtagtaggatcaccttcttataataggatcaccttcttgttgctatagctgtacccgaccttcccttctcccttgagtgcttgcatgagctccacttttccttttgcttgaacagcttctcctgagtcctccttaccgatggttgtgactttaattatatacatctctgtccctccagacagatccctctgtcctcactctctgatttcattgaggatcttgggtgagagagagggacctgcaggatgaacaaatgtctactctaagacagctagattgggaggttggctggtcactgatggttataatgactgtgggacaggattaacttcagaataaatgaacaggagacacagatatgaagaaagtttctgattgatatggtctgaagtactcctggtattgcaagtcatttgctctaattctcaattgtaggcaaactgatttgtaaatttgcttcttcagccttctttcctgtagcctagcatggagaatctgaccagaccccattttgagaaggtcagcctacactggaatgaactttttacattagggcatttgtatttccctcacaatacttgccacattacttggcataggagagatgcttagtgtaattataagttaacaagcctttggatcagggcttgactcatgatagacaaagtatatgcctgctggatggaagaatctcttgggcgagcaccatttttctttccatcacctttccttgaaaatatatcttcagctttgggtaggaggaatcttggtgtatgaaatcattgcaaatttacttcatcttttctggagtttgaagttgtgactctcctgctaccaattaaataaagcttactttgccataa

SEQ ID NO: 165370 - DNA, 4922 bp, Homo sapiens
  Payload ID: 12558
  Gene Symbol: PDE4DIP
  Gene Name: phosphodiesterase 4D interacting protein
  ENST ID: ENST00000369351
  CDS Start-End: 110-3076
gcagcctcagcagcgtcccagccggctggcttcatgctgcggtgcagctgcaccatgttcctgggttgagggggcaatcgggcacgctcctccccatgggttgcccatcatgtctaatggatatcgcactctgtcccagcacctcaatgacctgaagaaggagaacttcagcctcaagctgcgcatctacttcctggaggagcgcatgcaacagaagtatgaggccagccgggaggacatctacaagcggaacattgagctgaaggttgaagtggagagcttgaaacgagaactccaggacaagaaacagcatctggataaaacatgggctgatgtggagaatctcaacagtcagaatgaagctgagctccgacgccagtttgaggagcgacagcaggagacggagcatgtttatgagctcttggagaataagatccagcttctgcaggaggaatccaggctagcaaagaatgaagctgcgcggatggcagctctggtggaagcagagaaggagtgtaacctggagctctcagagaaactgaagggagtcaccaaaaactgggaagatgtaccaggagaccaggtcaagcccgaccaatacactgaggccctggcccagagggacaagagaattgaagaactgaatcagagcctggctgcccaggagaggcttgtagaacagctatctcgggagaaacaacaactgctacatctgttggaggagccaactagcatggaagtgcagcccatgactgaagagttgctgaaacaacaaaagctgaattcacatgagaccactataactcagcagtctgtatctgattcccacttggcagaactccaggaaaaaatccagcaaacagaggccaccaacaagattcttcaagagaaacttaatgaaatgagctatgaactaaagtgtgctcaggagtcgtctcaaaagcaagatggtacaattcagaacctcaaggaaactctgaaaagcagggaacgtgagactgaggagttgtaccaggtaattgaaggtcaaaatgacacaatggcaaagcttcgagaaatgctgcaccaaagccagcttggacaacttcacagctcagagggtacttctccagctcagcaacaggtagctctgcttgatcttcagagtgctttattctgcagccaacttgaaatacagaagctccagagggtggtacgacagaaagagcgccaactggctgatgccaaacaatgtgtgcaatttgtagaggctgcagcacacgagagtgaacagcagaaagaggcttcttggaaacataaccaggaattgcgaaaagccttgcagcagctacaagaagaattgcagaataagagccaacagcttcgtgcctgggaggctgaaaaatacaatgagattcgaacccaggaacaaaacatccagcacctaaaccatagtctgagtcacaaggagcagttgcttcaggaatttcgggagctcctacagtatcgagataactcagacaaaacccttgaagcaaatgaaatgttgcttgagaaacttcgccagcgaatacatgataaagctgttgctctggagcgggctatagatgaaaaattctctgctctagaagagaaagaaaaagaactgcgccagcttcgtcttgctgtgagagagcgagatcatgacttagagagactgcgcgatgtcctctcctccaatgaagctactatgcaaagtatggagagtctcctgagggccaaaggcctggaagtggaacagttatctactacctgtcaaaacctccagtggctgaaagaagaaatggaaaccaaatttagccgttggcagaaggaacaagagagtatcattcagcagttacagacgtctcttcatgataggaacaaagaagtggaggatcttagtgcaacactgctctgcaaacttggaccagggcagagtgagatagcagaggagctgtgccagcgtctacagcgaaaggaaaggatgctgcaggaccttctaagtgatcgaaataaacaagtgctggaacatgaaatggagattcaaggcctgcttcagtctgtgagcaccagggagcaggaaagccaagctgctgcagagaagttggtgcaagccttaatggaaagaaattcagaattacaggccctgcgccaatatttaggagggagagactccctgatgtcccaagcacccatctctaaccaacaagctgaagttacccccactggccgtcttggaaaacagactgatcaaggttcaatgcagataccttccagagatgatagcacttcattgactgccaaagaggatgtcagcatacccagatccacattaggagacttggacacagttgcagggctggaaaaagaactgagtaatgccaaagaggaacttgaactcatggctaaaaaagaaagagaaagtcagatggaactttctgctctacagtccatgatggctgtgcaggaagaagagctgcaggtgcaggctgctgatatggagtctctgaccaggaacatacagattaaagaagatctcataaaggacctgcaaatgcaactggttgatcctgaagacataccagctatggaacgcctgacccaggaagtcttacttcttcgggaaaaagttgcttcagtagaatcccagggtcaagaaatttcaggaaaccgaagacaacagttgctgctgatgctagaaggactagtagatgaacggagtcggctcaatgaggccttacaagcagagagacagctctatagcagtctggtgaagttccatgcccatccagagagctctgagagagaccgaactctgcaggtggaactggaaggggctcaggtgttacgcagtcggctagaagaagttcttggaagaagcttggagcgcttaaacaggctggagaccctggccgccattggaggtgcagctgcaggggatgacaccgaagatacaagcactgagttcactgacagtattgaggaggaggctgcacaccatagtcaccagcaagtaagtcagtgtcagggtctgggacttccagggtggacagcacacagcccttctgaggtctgatagtctcctgcagcccttgcggacttagtgagaagatatctttttacataaactacttctcagtcatcttcctgttctccttgaacttcccagctgcctttccaacccatatcttcactccatttttctctccaatccaccctttggtttgtattgtatctctttcttctgcttccttccccctcctacccacctttgcccctatttattctctgtagctatagcttcagaagcatttttacttgcaagacgatggacacattccccttgggctttttgtaactgaaacgcaccacagaagacagggagtcatcgaagggctgctcggggaggtggcagggcggaggacctgcttgggaagaaactccaagaagattggaatgcttccaaagcaagaatctttctcagtgaaatctcattatacaaagagaaccttatgcaacctgacaaaccactgaggtcatggtgactcagtgatcagcagatggtacttcaacagcaatcccctgtcaaacctcagaacttgaggctgaaacattgcttccacccaccatcagtgaagatgtaactagcatgttacaagagtgaataatctggacttcagagattaagtcaccaatagtgatctcacaagcactcaccggaactcctataatgtctccactttgtccatgccatttagcaatctcatctcctaaatggactgtgcctatgattcttaaggagaaagtgaatcattggtagatatcctgcacaagcagctggactttccagtaatagctttcttggggctattaggaaaattaaacaagaaatgaggctttctgggtctgcctgtatgtcttctgcataagacaaagaagagacatcgaatcaaccaataagaagagcccaaataagcatcctcaaatcttttgggatttggcacttggggacatgagtagttgtctgggatacgtcatattctcaacagtttctttgtagtagtaggatcaccttcttataataggatcaccttcttgttgctatagctgtacccgaccttcccttctcccttgagtgcttgcatgagctccacttttccttttgcttgaacagcttctcctgagtcctccttaccgatggttgtgactttaattatatacatctctgtccctccagacagatccctctgtcctcactctctgatttcattgaggatcttgggtgagagagagggacctgcaggatgaacaaatgtctactctaagacagctagattgggaggttggctggtcactgatggttataatgactgtgggacaggattaacttcagaataaatgaacaggagacacagatatgaagaaagtttctgattgatatggtctgaagtactcctggtattgcaagtcatttgctctaattctcaattgtaggcaaactgatttgtaaatttgcttcttcagccttctttcctgtagcctagcatggagaatctgaccagaccccattttgagaaggtcagcctacactggaatgaactttttacattagggcatttgtatttccctcacaatacttgccacattacttggcataggagagatgcttagtgtaattataagttaacaagcctttggatcagggcttgactcatgatagacaaagtatatgcctgctggatggaagaatctcttgggcgagcaccatttttctttccatcacctttccttgaaaatatatcttcagctttgggtaggaggaatcttggtgtatgaaatcattgcaaatttacttcatcttttctggagtttgaagttgtgactctcctgctaccaattaaataaagcttactttgccataa

SEQ ID NO: 165371 - DNA, 8262 bp, Homo sapiens
  Payload ID: 12558
  Gene Symbol: PDE4DIP
  Gene Name: phosphodiesterase 4D interacting protein
  ENST ID: ENST00000369354
  CDS Start-End: 191-7231
agagcagtgagcccagtcccgagtcccggagagagctccagcaataggggccatgtcgccgtagccccagcctctcggtccgcagcctcagcagcgtcccagccggctggcttcatgctgcggtgcagctgcaccatgttcctgggttgagggggcaatcgggcacgctcctccccatgggttgcccatcatgtctaatggatatcgcactctgtcccagcacctcaatgacctgaagaaggagaacttcagcctcaagctgcgcatctacttcctggaggagcgcatgcaacagaagtatgaggccagccgggaggacatctacaagcggaacattgagctgaaggttgaagtggagagcttgaaacgagaactccaggacaagaaacagcatctggataaaacatgggctgatgtggagaatctcaacagtcagaatgaagctgagctccgacgccagtttgaggagcgacagcaggagacggagcatgtttatgagctcttggagaataagatccagcttctgcaggaggaatccaggctagcaaagaatgaagctgcgcggatggcagctctggtggaagcagagaaggagtgtaacctggagctctcagagaaactgaagggagtcaccaaaaactgggaagatgtaccaggagaccaggtcaagcccgaccaatacactgaggccctggcccagagggacaagagaattgaagaactgaatcagagcctggctgcccaggagaggcttgtagaacagctatctcgggagaaacaacaactgctacatctgttggaggagccaactagcatggaagtgcagcccatgactgaagagttgctgaaacaacaaaagctgaattcacatgagaccactataactcagcagtctgtatctgattcccacttggcagaactccaggaaaaaatccagcaaacagaggccaccaacaagattcttcaagagaaacttaatgaaatgagctatgaactaaagtgtgctcaggagtcgtctcaaaagcaagatggtacaattcagaacctcaaggaaactctgaaaagcagggaacgtgagactgaggagttgtaccaggtaattgaaggtcaaaatgacacaatggcaaagcttcgagaaatgctgcaccaaagccagcttggacaacttcacagctcagagggtacttctccagctcagcaacaggtagctctgcttgatcttcagagtgctttattctgcagccaacttgaaatacagaagctccagagggtggtacgacagaaagagcgccaactggctgatgccaaacaatgtgtgcaatttgtagaggctgcagcacacgagagtgaacagcagaaagaggcttcttggaaacataaccaggaattgcgaaaagccttgcagcagctacaagaagaattgcagaataagagccaacagcttcgtgcctgggaggctgaaaaatacaatgagattcgaacccaggaacaaaacatccagcacctaaaccatagtctgagtcacaaggagcagttgcttcaggaatttcgggagctcctacagtatcgagataactcagacaaaacccttgaagcaaatgaaatgttgcttgagaaacttcgccagcgaatacatgataaagctgttgctctggagcgggctatagatgaaaaattctctgctctagaagagaaagaaaaagaactgcgccagcttcgtcttgctgtgagagagcgagatcatgacttagagagactgcgcgatgtcctctcctccaatgaagctactatgcaaagtatggagagtctcctgagggccaaaggcctggaagtggaacagttatctactacctgtcaaaacctccagtggctgaaagaagaaatggaaaccaaatttagccgttggcagaaggaacaagagagtatcattcagcagttacagacgtctcttcatgataggaacaaagaagtggaggatcttagtgcaacactgctctgcaaacttggaccagggcagagtgagatagcagaggagctgtgccagcgtctacagcgaaaggaaaggatgctgcaggaccttctaagtgatcgaaataaacaagtgctggaacatgaaatggagattcaaggcctgcttcagtctgtgagcaccagggagcaggaaagccaagctgctgcagagaagttggtgcaagccttaatggaaagaaattcagaattacaggccctgcgccaatatttaggagggagagactccctgatgtcccaagcacccatctctaaccaacaagctgaagttacccccactggccgtcttggaaaacagactgatcaaggttcaatgcagataccttccagagatgatagcacttcattgactgccaaagaggatgtcagcatacccagatccacattaggagacttggacacagttgcagggctggaaaaagaactgagtaatgccaaagaggaacttgaactcatggctaaaaaagaaagagaaagtcagatggaactttctgctctacagtccatgatggctgtgcaggaagaagagctgcaggtgcaggctgctgatatggagtctctgaccaggaacatacagattaaagaagatctcataaaggacctgcaaatgcaactggttgatcctgaagacataccagctatggaacgcctgacccaggaagtcttacttcttcgggaaaaagttgcttcagtagaatcccagggtcaagaaatttcaggaaaccgaagacaacagttgctgctgatgctagaaggactagtagatgaacggagtcggctcaatgaggccttacaagcagagagacagctctatagcagtctggtgaagttccatgcccatccagagagctctgagagagaccgaactctgcaggtggaactggaaggggctcaggtgttacgcagtcggctagaagaagttcttggaagaagcttggagcgcttaaacaggctggagaccctggccgccattggaggtgcagctgcaggggatgacaccgaagatacaagcactgagttcactgacagtattgaggaggaggctgcacaccatagtcaccagcaacttgtcaaggtggctttggagaaaagtctggcaactgtggagacccagaacccatctttttcccctccttctccgatgggaggggacagtaacaggtgtcttcaggaagaaatgctccacctgagggctgagttccaccagcacttagaagagaagaggaaagctgaggaggaactgaaggagctaaaggctcaaattgaggaagcaggattctcctcagtgtcccacatcaggaacaccatgctgagcctttgccttgagaatgcggagctgaaagagcagatgggagaagcaatgtctgatggatgggagatcgaggaagacaaggagaagggcgaggtgatggttgagactgtggtaaccaaagagggtctgagtgagagtagccttcaggctgagttcagaaagctccagggaaaactgaagaatgcccacaatatcatcaacctcctcaaagaacaacttgtgctgagtagcaaggaagggaatagtaaacttactccagagctccttgtgcatctgaccagcaccattgaaagaataaacacagaactggttggttcccctgggaagcaccaacaccaagaggaggggaatgtgactgtgaggcctttccccagaccccagagccttgaccttggggctaccttcacagtggatgcccaccaattggataaccagtcccagcctcgtgaccctgggcctcagtcagcgtttagcctaccagggtccacccagcacctgcgctcccagctgtcacaatgcaaacaacgctatcaagatctccaggagaagctgctgctatcagaagccactgtctttgctcaggctaacgagctggagaaatacagagttatgcttacaggtgaatccttggtgaagcaggacagcaagcagatccaggtggacctccaggacctgggctatgagacttgtggccgaagcgagaatgaggctgaacgggaggaaaccaccagtcctgagtgtgaggagcacaacagcctcaaggaaatggtcctgatggaggggctgtgctctgagcagggacgccggggctcaacactggctagttcctctgagaggaagcccttggagaaccagctagggaagcaggaagagttccgggtatatggaaagtcagaaaacatcttggtcctacgaaaggacatcaaagatctgaaggcccagctgcagaatgccaacaaggtcattcaaaacctcaagagccgggtccggtccctctcagttacaagtgattattcgtctagtctggaaagaccccggaagctgagagctgttggcaccttggaggggtcttcacctcatagtgtccctgatgaggatgaggggtggctgtctgatggcactggggctttctactctccagggcttcaggccaaaaaggacctggagagtctcatccagagagtatcccagctggaggcccagctcccaaaaaatggactagaagagaagctggctgaggagctgagatcagcctcgtggcctgggaaatatgattccctgattcaggatcaggcccgggaactgtcttacctacggcaaaaaatacgagaagggagaggtatttgttatcttatcacccggcatgcaaaagatacagtaaaatcttttgaggatctcctaaggagcaatgacattgactactacctgggacagagcttccgggagcaactcgcccagggaagccagctgacagagaggctcaccagcaaactcagcaccaaggatcataaaagtgagaaagatcaagctggacttgagccactggccctcaggctcagcagggagctgcaggagaaggagaaagtgattgaagtcctgcaggccaagctggatgctcggtccctcacaccctccagcagccatgccttgtctgactcccaccgctctcccagcagcacctctttcctgtctgatgaactggaagcctgctctgacatggacatagtcagcgagtacacacactatgaagagaagaaagcttctcccagtcactcagattccatccatcattcgagtcattctgctgtgttgtcttctaaaccatcatcaaccagtgcatctcagggggctaaggccgaatccaacagcaaccccatcagcttgccaactccccagaatacccccaaggaggccaaccaggcccattcaggctttcattttcactccatacccaagctggctagccttcctcaggcaccattgccctcagctccatccagcttcctgcctttcagccccactggccctctcctccttggctgctgtgagacaccagtggtctccttggctgaggctcagcaggagctacagatgctgcagaagcagttgggagaaagtgccagcactgttcctcctgcttccacagctacattgctgagcaacgacttggaagccgactcttcctactacctcaactctgcccagcctcactctcctccaaggggcaccatagaactgggaagaatcctagagcctgggtacctgggcagcagtggcaagtgggatgtgatgaggcctcagaaagggagtgtatctggggacctatcctcaggctcctctgtgtaccagcttaactccaaacccacaggggctgacctgctggaagagcatcttggtgaaatccggaacctgcgccagcgcctggaggaatccatctgcatcaatgaccgcctacgggagcaactggaacaccggctgacctctactgctcgtggaaggggatccacttctaacttctacagtcagggcctggagtccatacctcagctctgcaatgagaacagagtcctcagggaagacaatcgaagacttcaggctcaactgagtcatgtttccagagagcactcccaggaaacagaaagcctgagggaggctctgctgtcctctcgatcccaccttcaagagctggaaaaggagctggagcaccagaaggtggaaaggcagcagcttttggaagacttgagggagaagcagcaagaggtcttgcatttcagggaggaacgtctttccctccaggaaaacgactccagactgcagcacaagctggttctcctgcagcaacagtgtgaagagaaacagcagctctttgagtccctccagtcagagctacaaatctacgaggcactttatggcaattccaagaaggggctgaaagcttacagcctggatgcctgtcaccaaatccctttgagcagtgacctgagccacctggtggcagaggtacgagctctgagagggcagctggagcagagcattcaggggaacaattgtctgcgactgcagctgcaacagcagctggagagcggtgctggcaaagccagcctcagcccctcctccattaaccagaacttcccagccagcactgaccctggaaacaagcagctgctcctccaagattcagctgtgtcccctccagtccgggatgttggtatgaattccccagctctggtcttccccagctctgcttcctctactcctggctcagaaacgcccataatcaacagagcaaatggcttgggtttggatacttctccagtaatgaagacccctcccaagctagagggtgatgctactgatggctcctttgccaataagcatggccgccatgtcattggccacattgatgactacagtgccctaagacagcagattgcggagggcaagctgctggtcaaaaagatagtgtctcttgtgagatcagcgtgcagcttccctggccttgaagcccaaggcacagaggtgctaggcagcaaaggtattcatgagcttcggagcagcaccagtgccctgcaccatgccctagaggagtcagcttccctcctcaccatgttctggagagcggccctgccaagcacccacatccctgtgctgcctggcaaagtgggagaatcaacagaaagggaacttctggaactgagaaccaaagtatccaaacaggagcgactccttcagagcacaactgagcatctgaagaacgccaaccagcagaaggagagcatggagcagttcatcgtcagccagctaaccagaacacatgatgttttaaagaaggcaaggactaacttagaggtgaaatccctaagggctctgccatgtactccagccttgtgacccttgccttccaggaaccatgcaagaagcgcagccaccagaagtccttaaaacagcaggaaaggtgggcctgtcccccttttgtgcagctacctatctgctgaggagcatctgggcctcattcctccaagtccacgggagggtccagaagagggagtcagagatgtatcctggtggagctgggagaaaggcagaaagcctttctgacggctatggaatacgattagccaaggtccacttggcccagcactaagaaaaagatgcgtagtttgcacagaaggttttgtgatcctgcctctcaacagccccagcagcttgggaactagcaagagcacatttcttgcctcatcagctgtcctgagatggaaaactcagtgaatataggaccctgattccgatgaaaggggcacgtggtcccaatgctggagctcctctggcaggttctaaaagcacactactgagcagcggtgccctgccggacactgctggcgggggctcagtgagcactactcacagatccacacctgaccctgttgggtcgagtcaggctgggccttggtctgcactgtagcacctgtgttctttgagttcacatcatgaatgtggtgacttcccagataccatctcaggcttaacctagcacatcctatttcttttcttctatgatatccaaattggactgacctcacttcaaagttgctgtcccattttgtcaccctatcttatctcggggaaattgcagactgatggccagaccaactctgttgaaattcttgcatagagcaaacctgtgctcatttttaagtggcatgggagaggccccaagcctagtaaagcctagtctgtgtcttcacagtgctggtagaatgtgtttgtgtgtataaatatatgatatagatttatatatgttgctaacgccatatattgaaggccaacataactggtggacagggtgggtgacagaaaatgaaagtctttttggtgattgttaaagcaaaatgtgtataaagaaataaatagtttttctttca

SEQ ID NO: 165372 - DNA, 8307 bp, Homo sapiens
  Payload ID: 12558
  Gene Symbol: PDE4DIP
  Gene Name: phosphodiesterase 4D interacting protein
  ENST ID: ENST00000369356
  CDS Start-End: 292-7380
acaccacttgtgtctgagttcacgcagcatgttcctctgtcagggattccgcaaatatctccctgaggtaaaaaaggaaagtgtgctgcgctccagcacccagagcagtgagcccagtcccgagtcccggagagagctccagcaataggggccatgtcgccgtagccccagcctctcggtccgcagcctcagcagcgtcccagccggctggcttcatgctgcggtgcagctgcaccatgttcctgggttgagggggcaatcgggcacgctcctccccatgggttgcccatcatgtctaatggatatcgcactctgtcccagcacctcaatgacctgaagaaggagaacttcagcctcaagctgcgcatctacttcctggaggagcgcatgcaacagaagtatgaggccagccgggaggacatctacaagcggaacattgagctgaaggttgaagtggagagcttgaaacgagaactccaggacaagaaacagcatctggataaaacatgggctgatgtggagaatctcaacagtcagaatgaagctgagctccgacgccagtttgaggagcgacagcaggagacggagcatgtttatgagctcttggagaataagatccagcttctgcaggaggaatccaggctagcaaagaatgaagctgcgcggatggcagctctggtggaagcagagaaggagtgtaacctggagctctcagagaaactgaagggagtcaccaaaaactgggaagatgtaccaggagaccaggtcaagcccgaccaatacactgaggccctggcccagagggacaagagaattgaagaactgaatcagagcctggctgcccaggagaggcttgtagaacagctatctcgggagaaacaacaactgctacatctgttggaggagccaactagcatggaagtgcagcccatgactgaagagttgctgaaacaacaaaagctgaattcacatgagaccactataactcagcagtctgtatctgattcccacttggcagaactccaggaaaaaatccagcaaacagaggccaccaacaagattcttcaagagaaacttaatgaaatgagctatgaactaaagtgtgctcaggagtcgtctcaaaagcaagatggtacaattcagaacctcaaggaaactctgaaaagcagggaacgtgagactgaggagttgtaccaggtaattgaaggtcaaaatgacacaatggcaaagcttcgagaaatgctgcaccaaagccagcttggacaacttcacagctcagagggtacttctccagctcagcaacaggtagctctgcttgatcttcagagtgctttattctgcagccaacttgaaatacagaagctccagagggtggtacgacagaaagagcgccaactggctgatgccaaacaatgtgtgcaatttgtagaggctgcagcacacgagagtgaacagcagaaagaggcttcttggaaacataaccaggaattgcgaaaagccttgcagcagctacaagaagaattgcagaataagagccaacagcttcgtgcctgggaggctgaaaaatacaatgagattcgaacccaggaacaaaacatccagcacctaaaccatagtctgagtcacaaggagcagttgcttcaggaatttcgggagctcctacagtatcgagataactcagacaaaacccttgaagcaaatgaaatgttgcttgagaaacttcgccagcgaatacatgataaagctgttgctctggagcgggctatagatgaaaaattctctgctctagaagagaaagaaaaagaactgcgccagcttcgtcttgctgtgagagagcgagatcatgacttagagagactgcgcgatgtcctctcctccaatgaagctactatgcaaagtatggagagtctcctgagggccaaaggcctggaagtggaacagttatctactacctgtcaaaacctccagtggctgaaagaagaaatggaaaccaaatttagccgttggcagaaggaacaagagagtatcattcagcagttacagacgtctcttcatgataggaacaaagaagtggaggatcttagtgcaacactgctctgcaaacttggaccagggcagagtgagatagcagaggagctgtgccagcgtctacagcgaaaggaaaggatgctgcaggaccttctaagtgatcgaaataaacaagtgctggaacatgaaatggagattcaaggcctgcttcagtctgtgagcaccagggagcaggaaagccaagctgctgcagagaagttggtgcaagccttaatggaaagaaattcagaattacaggccctgcgccaatatttaggagggagagactccctgatgtcccaagcacccatctctaaccaacaagctgaagttacccccactggccgtcttggaaaacagactgatcaaggttcaatgcagataccttccagagatgatagcacttcattgactgccaaagaggatgtcagcatacccagatccacattaggagacttggacacagttgcagggctggaaaaagaactgagtaatgccaaagaggaacttgaactcatggctaaaaaagaaagagaaagtcagatggaactttctgctctacagtccatgatggctgtgcaggaagaagagctgcaggtgcaggctgctgatatggagtctctgaccaggaacatacagattaaagaagatctcataaaggacctgcaaatgcaactggttgatcctgaagacataccagctatggaacgcctgacccaggaagtcttacttcttcgggaaaaagttgcttcagtagaatcccagggtcaagaaatttcaggaaaccgaagacaacagttgctgctgatgctagaaggactagtagatgaacggagtcggctcaatgaggccttacaagcagagagacagctctatagcagtctggtgaagttccatgcccatccagagagctctgagagagaccgaactctgcaggtggaactggaaggggctcaggtgttacgcagtcggctagaagaagttcttggaagaagcttggagcgcttaaacaggctggagaccctggccgccattggaggtgcagctgcaggggatgacaccgaagatacaagcactgagttcactgacagtattgaggaggaggctgcacaccatagtcaccagcaacttgtcaaggtggctttggagaaaagtctggcaactgtggagacccagaacccatctttttcccctccttctccgatgggaggggacagtaacaggtgtcttcaggaagaaatgctccacctgagggctgagttccaccagcacttagaagagaagaggaaagctgaggaggaactgaaggagctaaaggctcaaattgaggaagcaggattctcctcagtgtcccacatcaggaacaccatgctgagcctttgccttgagaatgcggagctgaaagagcagatgggagaagcaatgtctgatggatgggagatcgaggaagacaaggagaagggcgaggtgatggttgagactgtggtaaccaaagagggtctgagtgagagtagccttcaggctgagttcagaaagctccagggaaaactgaagaatgcccacaatatcatcaacctcctcaaagaacaacttgtgctgagtagcaaggaagggaatagtaaacttactccagagctccttgtgcatctgaccagcaccattgaaagaataaacacagaactggttggttcccctgggaagcaccaacaccaagaggaggggaatgtgactgtgaggcctttccccagaccccagagccttgaccttggggctaccttcacagtggatgcccaccaattggataaccagtcccagcctcgtgaccctgggcctcagtcagcgtttagcctaccagggtccacccagcacctgcgctcccagctgtcacaatgcaaacaacgctatcaagatctccaggagaagctgctgctatcagaagccactgtctttgctcaggctaacgagctggagaaatacagagttatgcttacaggtgaatccttggtgaagcaggacagcaagcagatccaggtggacctccaggacctgggctatgagacttgtggccgaagcgagaatgaggctgaacgggaggaaaccaccagtcctgagtgtgaggagcacaacagcctcaaggaaatggtcctgatggaggggctgtgctctgagcagggacgccggggctcaacactggctagttcctctgagaggaagcccttggagaaccagctagggaagcaggaagagttccgggtatatggaaagtcagaaaacatcttggtcctacgaaaggacatcaaagatctgaaggcccagctgcagaatgccaacaaggtcattcaaaacctcaagagccgggtccggtccctctcagttacaagtgattattcgtctagtctggaaagaccccggaagctgagagctgttggcaccttggaggggtcttcacctcatagtgtccctgatgaggatgaggggtggctgtctgatggcactggggctttctactctccagggcttcaggccaaaaaggacctggagagtctcatccagagagtatcccagctggaggcccagctcccaaaaaatggactagaagagaagctggctgaggagctgagatcagcctcgtggcctgggaaatatgattccctgattcaggatcaggcccgggaactgtcttacctacggcaaaaaatacgagaagggagaggtatttgttatcttatcacccggcatgcaaaagatacagtaaaatcttttgaggatctcctaaggagcaatgacattgactactacctgggacagagcttccgggagcaactcgcccagggaagccagctgacagagaggctcaccagcaaactcagcaccaaggatcataaaagtgagaaagatcaagctggacttgagccactggccctcaggctcagcagggagctgcaggagaaggagaaagtgattgaagtcctgcaggccaagctggatgctcggtccctcacaccctccagcagccatgccttgtctgactcccaccgctctcccagcagcacctctttcctgtctgatgaactggaagcctgctctgacatggacatagtcagcgagtacacacactatgaagagaagaaagcttctcccagtcactcagattccatccatcattcgagtcattctgctgtgttgtcttctaaaccatcatcaaccagtgcatctcagggggctaaggccgaatccaacagcaaccccatcagcttgccaactccccagaatacccccaaggaggccaaccaggcccattcaggctttcattttcactccatacccaagctggctagccttcctcaggcaccattgccctcagctccatccagcttcctgcctttcagccccactggccctctcctccttggctgctgtgagacaccagtggtctccttggctgaggctcagcaggagctacagatgctgcagaagcagttgggagaaagtgccagcactgttcctcctgcttccacagctacattgctgagcaacgacttggaagccgactcttcctactacctcaactctgcccagcctcactctcctccaaggggcaccatagaactgggaagaatcctagagcctgggtacctgggcagcagtggcaagtgggatgtgatgaggcctcagaaagggagtgtatctggggacctatcctcaggctcctctgtgtaccagcttaactccaaacccacaggggctgacctgctggaagagcatcttggtgaaatccggaacctgcgccagcgcctggaggaatccatctgcatcaatgaccgcctacgggagcaactggaacaccggctgacctctactgctcgtggaaggggatccacttctaacttctacagtcagggcctggagtccatacctcagctctgcaatgagaacagagtcctcagggaagacaatcgaagacttcaggctcaactgagtcatgtttccagagagcactcccaggaaacagaaagcctgagggaggctctgctgtcctctcgatcccaccttcaagagctggaaaaggagctggagcaccagaaggtggaaaggcagcagcttttggaagacttgagggagaagcagcaagaggtcttgcatttcagggaggaacgtctttccctccaggaaaacgactccagactgcagcacaagctggttctcctgcagcaacagtgtgaagagaaacagcagctctttgagtccctccagtcagagctacaaatctacgaggcactttatggcaattccaagaaggggctgaaagcttacagcctggatgcctgtcaccaaatccctttgagcagtgacctgagccacctggtggcagaggtacgagctctgagagggcagctggagcagagcattcaggggaacaattgtctgcgactgcagctgcaacagcagctggagagcggtgctggcaaagccagcctcagcccctcctccattaaccagaacttcccagccagcactgaccctggaaacaagcagctgctcctccaagattcagctgtgtcccctccagtccgggatgttggtatgaattccccagctctggtcttccccagctctgcttcctctactcctggctcagaaacgcccataatcaacagagcaaatggcttgggtttggatacttctccagtaatgaagacccctcccaagctagagggtgatgctactgatggctcctttgccaataagcatggccgccatgtcattggccacattgatgactacagtgccctaagacagcagattgcggagggcaagctgctggtcaaaaagatagtgtctcttgtgagatcagcgtgcagcttccctggccttgaagcccaaggcacagaggtgctaggcagcaaaggtattcatgagcttcggagcagcaccagtgccctgcaccatgccctagaggagtcagcttccctcctcaccatgttctggagagcggccctgccaagcacccacatccctgtgctgcctggcaaagtgggagaatcaacagaaagggaacttctggaactgagaaccaaagtatccaaacaggagcgactccttcagagcacaactgagcatctgaagaacgccaaccagcagaaggagagcatggagcagttcatcgtcagccagctaaccagaacacatgatgttttaaagaaggcaaggactaacttagaggaaccatgcaagaagcgcagccaccagaagtccttaaaacagcaggaaaggtgggcctgtcccccttttgtgcagctacctatctgctgaggagcatctgggcctcattcctccaagtccacgggagggtccagaagagggagtcagagatgtatcctggtggagctgggagaaaggcagaaagcctttctgacggctatggaatacgattagccaaggtccacttggcccagcactaagaaaaagatgcgtagtttgcacagaaggttttgtgatcctgcctctcaacagccccagcagcttgggaactagcaagagcacatttcttgcctcatcagctgtcctgagatggaaaactcagtgaatataggaccctgattccgatgaaaggggcacgtggtcccaatgctggagctcctctggcaggttctaaaagcacactactgagcagcggtgccctgccggacactgctggcgggggctcagtgagcactactcacagatccacacctgaccctgttgggtcgagtcaggctgggccttggtctgcactgtagcacctgtgttctttgagttcacatcatgaatgtggtgacttcccagataccatctcaggcttaacctagcacatcctatttcttttcttctatgatatccaaattggactgacctcacttcaaagttgctgtcccattttgtcaccctatcttatctcggggaaattgcagactgatggccagaccaactctgttgaaattcttgcatagagcaaacctgtgctcatttttaagtggcatgggagaggccccaagcctagtaaagcctagtctgtgtcttcacagtgctggtagaatgtgtttgtgtgtataaatatatgatatagatttatatatgttgctaacgccatatattgaaggccaacataactggtggacagggtgggtgacagaaaatgaaagtctttttggtgattgttaaagcaaaatgtgtataaagaaataaatagtttttctttca

SEQ ID NO: 165373 - DNA, 670 bp, Homo sapiens
  Payload ID: 12558
  Gene Symbol: PDE4DIP
  Gene Name: phosphodiesterase 4D interacting protein
  ENST ID: ENST00000491426
  CDS Start-End: 1-287
aagcagagagacagctctatagcagtctggtgaagttccatgcccatccagagagctctgagagagaccgaactctgcaggtggaactggaaggggctcaggtgttacgcagtcggctagaagaagttcttggaagaagcttggagcgcttaaacaggctggagaccctggccgccattggaggtgcagctgcaggggatgacaccgaagatacaagcactgagttcactgacagtattgaggaggaggctgcacaccatagtcaccagcaaccttctttcctgtagcctagcatggagaatctgaccagaccccattttgagaaggtcagcctacactggaatgaactttttacattagggcatttgtatttccctcacaatacttgccacattacttggcataggagagatgcttagtgtaattataagttaacaagcctttggatcagggcttgactcatgatagacaaagtatatgcctgctggatggaagaatctcttgggcgagcaccatttttctttccatcacctttccttgaaaatatatcttcagctttgggtaggaggaatcttggtgtatgaaatcattgcaaatttacttcatcttttctggagtttgaagttgtgactctcctgctaccaattaaataaagcttactttgccataa

SEQ ID NO: 165374 - DNA, 597 bp, Homo sapiens
  Payload ID: 12558
  Gene Symbol: PDE4DIP
  Gene Name: phosphodiesterase 4D interacting protein
  ENST ID: ENST00000528129
  CDS Start-End: 56-211
agcagagtcctggcttggagtcgggttacaccacttgtgtctgagttcacgcagcatgttcctctgtcagggattccgcaaatatctccctgagcacctcaatgacctgaagaaggagaacttcagcctcaagctgcgcatctacttcctggaggagcgcatgcaacagaagtatgaggccagccgggaggacatctacaagcggggctgatgtggagaatctcaacagtcagaatgaagctgagctccgacgccagtttgaggagcgacagcaggagacggagcatgtttatgagctcttggagaataagatccagcttctgcaggaggaatccaggctagcaaagaatgaagctgcgcggatggcagctctggtggaagcagagaaggagtgtaacctggagctctcagagaaactgaagggagtcaccaaaaactgggaagatgtaccaggagaccaggtcaagcccgaccaatacactgaggccctggcccagagggacaagtaggtgccttcggtgctctttttgtcgcttgtcttttgcccattctcaaggcatacagcagctgtcctgttccctttcaaggactgacagt

SEQ ID NO: 165375 - DNA, 927 bp, Homo sapiens
  Payload ID: 12558
  Gene Symbol: PDE4DIP
  Gene Name: phosphodiesterase 4D interacting protein
  ENST ID: ENST00000530130
  CDS Start-End: 1-927
tggaagagcatcttggtgaaatccggaacctgcgccagcgcctggaggaatccatctgcatcaatgaccgcctacgggagcaactggaacaccggctgacctctactgctcgtggaaggggatccacttctaacttctacagtcagggcctggagtccatacctcagctctgcaatgagaacagagtcctcagggaagacaatcgaagacttcaggctcaactgagtcatgtttccagagagcactcccaggaaacagaaagcctgagggaggctctgctgtcctctcgatcccaccttcaagagctggaaaaggagctggagcaccagaaggtggaaaggcagcagcttttggaagacttgagggagaagcagcaagaggtcttgcatttcagggaggaacgtctttccctccaggaaaacgactccagactgcagcacaagctggttctcctgcagcaacagtgtgaagagaaacagcagctctttgagtccctccagtcagagctacaaatctacgaggcactttatggcaattccaagaaggggctgaaagattcagctgtgtcccctccagtccgggatgttggtatgaattccccagctctggtcttccccagctctgcttcctctactcctggctcagaaacgcccataatcaacagagcaaatggcttgggtttggatacttctccagtaatgaagacccctcccaagctagagggtgatgctactgatggctcctttgccaataagcatggccgccatgtcattggccacattgatgactacagtgccctaagacagcagattgcggagggcaagctgctggtcaaaaagatagtgtctcttgtgagatcagcgtgcagcttccctggccttgaagcccaaggcacagaggtgctaggcagcaaaggtattcatgagc

SEQ ID NO: 165376 - DNA, 8824 bp, Homo sapiens
  Payload ID: 12558
  Gene Symbol: PDE4DIP
  Gene Name: phosphodiesterase 4D interacting protein
  ENST ID: ENST00000529945
  CDS Start-End: 441-3791
agacgcgaagccgctggcgccatcttgaaatctgatcctccatccccgaggctttgcgtctgcgcggccggccgctgctgctccgggagcccagtctgctaaaaggggaggacgttgaggacgcggcggctggcgggagagacagctggggagagacatggcagggtcggagcgcggcctgcgcctctgtcactcagcatcctcttaggcgtttccacgcccgccccctgcccgaggggcggggctgacggctctggtacccggagtcggcgcgcggggcaggggcgcgcccctgcagagtggggaccccactgggctgtgccatgctgaccggagaccaccgaggcgggagacagagcgcggcgaagagccattgagtggtcacccagtagccgccgccgccgccgcctcgggaagcttgccacccgctaggagggaagatgaaggagatttgcaggatctgtgcccgagagctgtgtggaaaccagcggcgctggatcttccacacggcgtccaagctcaatctccaggttctgctttcgcacgtcttgggcaaggatgtcccccgcgatggcaaagccgagttcgcttgcagcaagtgtgctttcatgcttgatcgaatctatcgattcgacacagttattgcccggattgaagcgctttctattgagcgcttgcaaaagctgctactggagaaggatcgcctcaagttctgcattgccagtatgtatcggaagaataacgatgactctggcgcggagatcaaggcggggaatgggacggttgacatgtccgtcttacccgatgcgagatactctgcactgctccaggaggacttcgcctattcagggtttgagtgctgggtggagaatgaggatcagatccaggagccacacagctgccatggttcagaaggccctggaaaccgacccaggagatgccgtggttgtgccgctttgcgggttgctgattctgactatgaagccatttgtaaggtacctcgaaaggtggccagaagtatctcctgcggcccttctagcaggtggtcgaccagcatttgcactgaagaaccagcgttgtctgaggttgggccacccgacttagcaagcacaaaggtacccccagatggagaaagcatggaggaagagacgcctggttcctctgtggaatctttggatgcaagcgtccaggctagccctccacaacagaaagatgaggagactgagagaagtgcaaaggaacttggaaagtgtgactgttgttcagatgatcaggctccgcagcatgggtgtaatcacaagctggaattagctcttagcatgattaaaggtcttgattataagcccatccagagcccccgagggagcaggcttccgattccagtgaaatccagcctacctggagccaagcctggccctagcatgacagatggagttagttccggtttccttaacaggtctttgaaacccctttacaagacacctgtgagttatcccttggagctttcagacctgcaggagctgtgggatgatctctgtgaagattatttgccgctccgggtccagcccatgactgaagagttgctgaaacaacaaaagctgaattcacatgagaccactataactcagcagtctgtatctgattcccacttggcagaactccaggaaaaaatccagcaaacagaggccaccaacaagattcttcaagagaaacttaatgaaatgagctatgaactaaagtgtgctcaggagtcgtctcaaaagcaagatggtacaattcagaacctcaaggaaactctgaaaagcagggaacgtgagactgaggagttgtaccaggtaattgaaggtcaaaatgacacaatggcaaagcttcgagaaatgctgcaccaaagccagcttggacaacttcacagctcagagggtacttctccagctcagcaacaggtagctctgcttgatcttcagagtgctttattctgcagccaacttgaaatacagaagctccagagggtggtacgacagaaagagcgccaactggctgatgccaaacaatgtgtgcaatttgtagaggctgcagcacacgagagtgaacagcagaaagaggcttcttggaaacataaccaggaattgcgaaaagccttgcagcagctacaagaagaattgcagaataagagccaacagcttcgtgcctgggaggctgaaaaatacaatgagattcgaacccaggaacaaaacatccagcacctaaaccatagtctgagtcacaaggagcagttgcttcaggaatttcgggagctcctacagtatcgagataactcagacaaaacccttgaagcaaatgaaatgttgcttgagaaacttcgccagcgaatacatgataaagctgttgctctggagcgggctatagatgaaaaattctctgctctagaagagaaagaaaaagaactgcgccagcttcgtcttgctgtgagagagcgagatcatgacttagagagactgcgcgatgtcctctcctccaatgaagctactatgcaaagtatggagagtctcctgagggccaaaggcctggaagtggaacagttatctactacctgtcaaaacctccagtggctgaaagaagaaatggaaaccaaatttagccgttggcagaaggaacaagagagtatcattcagcagttacagacgtctcttcatgataggaacaaagaagtggaggatcttagtgcaacactgctctgcaaacttggaccagggcagagtgagatagcagaggagctgtgccagcgtctacagcgaaaggaaaggatgctgcaggaccttctaagtgatcgaaataaacaagtgctggaacatgaaatggagattcaaggcctgcttcagtctgtgagcaccagggagcaggaaagccaagctgctgcagagaagttggtgcaagccttaatggaaagaaattcagaattacaggccctgcgccaatatttaggagggagagactccctgatgtcccaagcacccatctctaaccaacaagctgaagttacccccactggccgtcttggaaaacagactgatcaaggttcaatgcagataccttccagagatgatagcacttcattgactgccaaagaggatgtcagcatacccagatccacattaggagacttggacacagttgcagggctggaaaaagaactgagtaatgccaaagaggaacttgaactcatggctaaaaaagaaagagaaagtcagatggaactttctgctctacagtccatgatggctgtgcaggaagaagagctgcaggtgcaggctgctgatatggagtctctgaccaggaacatacagattaaagaagatctcataaaggacctgcaaatgcaactggttgatcctgaagacataccagctatggaacgcctgacccaggaagtcttacttcttcgggaaaaagttgcttcagtagaatcccagggtcaagaaatttcaggaaaccgaagacaacagttgctgctgatgctagaaggactagtagatgaacggagtcggctcaatgaggccttacaagcagagagacagctctatagcagtctggtgaagttccatgcccatccagagagctctgagagagaccgaactctgcaggtggaactggaaggggctcaggtgttacgcagtcggctagaagaagttcttggaagaagcttggagcgcttaaacaggctggagaccctggccgccattggaggtggggaactggaaagtgtgcgaattcatcacaagcatgcctactgagcactggcgggtcagactgcagcccaggatggaaaaccttgtttgcactaaccagaaagatccttgtctgattttggcagaattaaacggtgacttactaatgatagaactggtacaagtagcatcaactacaaagtgaaactcactttagcctacatggatctcactgtacatacatatcaatccctaaattgaatggtggaggttgcaaagtgtatttgcacattttaaatcattctgttttagtttttccacttttattcattcttatccctagccccttctcgttccctcatcccttctgtgggccaataaagtttattcttccccaactttcacaatccatttcatatgttccatatcatatcataaatgcatgtgtgtgtattatttttgccattcagtcaactcctctttgagtgagagcattttttaaatcaaaagcatgcaagttttaagatgagagagcgggaaagagattgagagtctataagaatgactttgcaaaagtgatataatccttatcagaaggtaatcaaaaccaggagagtagtcttgtaatagtagactgcaagtattgggaaggccaagttaaagaacagaggcaagaactatgaaagtgatcatagtcaacttttatctccaatactgtctcagagttgactgttgtacacaagtgaaattagattaggtacagattaaattctacttaaaatttgttctttattgattcctttaggtttctttaaaccaagctcatgctatttagtcagaacatgacttctagaatggtcttccagagtcagaattctctgtttacaaagataatttcaaatgtagtatccctctttacattcagtgtttcaccaaataactcattatagccagaagagggtattgcttctttcatttgtggcactagatagggtcctatgtttttcactatttagtatgtatacatttctccatataacagtaataggcttcaggctttgaagtgctagaatagtttagaaagaaatgttacagatgtatgtttatagttttaatcattgcctcagtgctttcttgtggcagcgtgacaggtataaggagaggggcactggagattgtatttctgatgtcttgaatgtcaagtgtgaaaagtaaccaagattgctttgcagctttgtgagatcaacatcatgaatttgttttcatttcctctggttggaagtttcctaggttagaagctgaggtttcagttactttaaatatggaatttgggaacagggattgaggctttctagcacagtaaatgtgactgaataccctttctaaactaagtggggcacaatgattttttttccttccattttttttttacatgacactttatttctttcacatgttgacatggcttgtattacattctaaatttcatctgtttctgtaactttagctgtgtctataacagatagagcatcagtcaaactagagtggacagggagaaaatgctctactggggaagcactctggaatcttctgattaagtcatttgcaaaagattaatagccataagccttactcttaatggatctgccatttcagtttcaatggcttttgaggaaaaaggagtcatttaaggaaggagataggaagtgtaggccgatccatccacttttcttagtctcccaattttaagagaccctttcttgcacaaaattttttgtaactttccataagtaaagaggaaggtaatggagccgtagaaatgtcaacccatcaaagactagtttgtcgtgtcattacaacaaggcatttagggaacatctttccttaattttactaatagaccaaccaaggaagccttctgaatcgctagtaagattcagctctgggtgattcttcatttctaatggctcatagtgattacagtttatgttaataatcactcctacttctgtcaacctccagcaagagtaaattgatagcaggataaattaaaagtctgatcttaatgtcataaatgtgactagaatatggtactaactttttcgggtctagatagctggaatgaggcttgcaaacagtgttatctggagagagcttgctggtctaacaactttgtgtgataatttggcatctgattagagagcatgagtctgataaattttataatccacacagagatcatgctgtggttggacacatcatttaataatatttagcatgatataatattccattttctctacaggagcacagactctttctcatactggattattttacctttgacagtcatttttcaatgacagtaattttaaataaagcatcgtgtgcttatagaacctgtgcttgagtaaaaatagtcttcaaataaaaataatgaagtaaatttttacttaggccatgcttaattggaagcatagaacttaaattgagaaaaaaatccatatgatagattttgtttttctcatgcttcccttttgaataatagcaaataatgcagagtaatggttctaagagttcagggtagatgaagtctgtaggttttagaagtatagagttgaaaagaacctccaagaggacttatttaatgagtgaaataaatgtccttagatagatattgtccctaaactcttttctattgaaagtttatagtattgaaaatttgatgattattagtacctagtataaatcaacattcatctgatgttctctttttagatagccaagttataacttttttgaaaagacattattggactaagttagtaggtcagccttttcctttgatagtgtgtactcttatctgtcacccaaccttctccacaccctcttctcttcattcagttgtggacagcagtaattttttcaggacctttgcttcttagaggaaatacatttttccttatttatatttttaaaagatgtttctattacattatatatagcaagagatctattaaggatccagaaaatcttaacctgtagaggatatgagttcctcatcataagaattagtttccttgagggttctttagtatattctatttacacagtttatgcataagtaaactctgtggccgatgtacataaaaaaacctatcacttttatgctcattcatcctcctaattcagtgtctgggtcatgagatgtttggttcatagcttcaaaaactgttcaagaagactgatttcagttctctctatgttgatcttccagttgaatctggagtcttctgattgtggaaaggagtagcagatcacattatactgaaaattgtccttttcattgagaaataaaggttgactgagctacctaaagtcactttcctttggactgtaagccttagagagaacaataatacctttgcttttcttgaggtagtattagaaaactctagttcccattgataggataaacttgttttctcgtttcatggtctttttatagaaaacagtcacaaaatcttgacatttggcatccctgaaaagctcaagtggccttttcaagtagggtatcatgtagtattctgcaggtttacagtcagtatcctgcaaggaaaggtgacaaacttcctgtgaagttaggaagaaatattagtaacccacacacttgaagtgagttttccattttaccttgtagaaattgtactagagatagaacaaatgaaattagttttcttttccaggtatatcctgtgagataccagcacagagtattttctctgagttctctcagggttaaagctcagtgagcttttcttttctctttggtagtgtggaaccatttgtaccgtagaaagaatagctggaaatatggaactccaatgtggcaatacagtaataaacagaaggaatgagtcagtaggataatatattcgagtgatttctgtatatttcagttataatgttttttatatagtgtatatttcagttatttcagttataatgtgttttagaatgtggatttaagccaccttctcaccctttgcaccagtagctttgttaaaacattttattatgatcaaataacaagcctgttgcttttaagtaatctaagtattaacagaaggtaagtcttcaacttctccctgttctcacctgggccaagatcaattttctaaataaaaaatagctttgtaatttgtctccaacaaagaatgggaaatggaagggaacacaaaactgtggtcctgacaatactaattctacccgttttcaaataagaataattaaacttataaagtgatatactgattatttttgtgttactctcccttttttttgtttaaagtcaaattccagaagtaaaaatctttatcatactgttttcctcttactaaaactggaagggtaaaatagaaagttcagcaacatcagaaaatgttgtatttaaaataatatggagaataggggttttaagtacataaaccatattggcttccttgtaggtttacttttagtatataacatgaatatgtagtgcttctttttacaataatcaaagtcatagctccaagatattgacctctttctcaatctataacctttgtaggcatgcatttataccagcatgttttataaattatgagtttctatctgtgtccatgaagtcttactagttttcacttaaacttttgtgggttgttaagaagaattaaagtgattcataacttcacgcttgaacctgggaggtggaggttgcagtgagccgagatcatgccattgcactccagcctgggcaacaagagtgaaactctgtcttaaataaataaataaagtggttcataacatcagatgaagaaggaggtgagtgatatgttaaatgatcagaaacttggcattacattatttccaggaccatttccctaccaaagctgtgtatttttcatttcttcatggcactgtgctgttaatttctgttaacatttgtgctaaaatggagtgtaatttttacatataagtgttagaattttagctatcttagttgaaacacaaaaagttgttactgatccaataaaattatcaaaggccaacagaaa

SEQ ID NO: 165377 - DNA, 704 bp, Homo sapiens
  Payload ID: 12558
  Gene Symbol: PDE4DIP
  Gene Name: phosphodiesterase 4D interacting protein
  ENST ID: ENST00000526445
  CDS Start-End: 195-341
acccagagcagtgagcccagtcccgagtcccggagagagctccagcaataggggccatgtcgccgtagccccagcctctcggtccgcagcctcagcagcgtcccagccggctggcttcatgctgcggtgcagctgcaccatgttcctgggttgagggggcaatcgggcacgctcctccccatgggttgcccatcatgtctaatggatatcgcactctgtcccagcacctcaatgacctgaagaaggagaacttcagcctcaagctgcgcatctacttcctggaggagcgcatgcaacagaagtatgaggccagccgggaggacatctacaagcggggctgatgtggagaatctcaacagtcagaatgaagctgagctccgacgccagtttgaggagcgacagcaggagacggagcatgtttatgagctcttggagaataagatccagcttctgcaggaggaatccaggctagcaaagaatgaagctgcgcggatggcagctctggtggaagcagagaaggagtgtaacctggagctctcagagaaactgaagggagtcaccaaaaactgggaagatgtaccaggagaccaggtcaagcccgaccaatacactgaggccctggcccagagggacaagtaggtgccttcggtgctctttttgtcgcttgtcttttgcccattctcaaggcatacagcagctgtcct

SEQ ID NO: 165378 - DNA, 647 bp, Homo sapiens
  Payload ID: 12558
  Gene Symbol: PDE4DIP
  Gene Name: phosphodiesterase 4D interacting protein
  ENST ID: ENST00000534536
  CDS Start-End: 89-647
acagttgggcctgggaggctccaggagggtgacagcagagtcctggcttggagtcgggttacaccacttgtgtctgagttcacgcagcatgttcctctgtcagggattccgcaaatatctccctgagcacctcaatgacctgaagaaggagaacttcagcctcaagctgcgcatctacttcctggaggagcgcatgcaacagaagtatgaggccagccgggaggacatctacaagcggaacattgagctgaaggttgaagtggagagcttgaaacgagaactccaggacaagaaacagcatctggataaaacatgggctgatgtggagaatctcaacagtcagaatgaagctgagctccgacgccagtttgaggagcgacagcaggagacggagcatgtttatgagctcttggagaataagatccagcttctgcaggaggaatccaggctagcaaagaatgaagctgcgcggatggcagctctggtggaagcagagaaggagtgtaacctggagctctcagagaaactgaagggagtcaccaaaaactgggaagatgtaccaggagaccaggtcaagcccgaccaatacactgaggccctggcccagagggacaagagaattgaagaactgaatcagagcctggctg

SEQ ID NO: 165379 - DNA, 1076 bp, Homo sapiens
  Payload ID: 12558
  Gene Symbol: PDE4DIP
  Gene Name: phosphodiesterase 4D interacting protein
  ENST ID: ENST00000530062
  CDS Start-End: 1-262
agtagatgaacggagtcggctcaatgaggccttacaagcagagagacagctctatagcagtctggtgaagttccatgcccatccagagagattcagctgtgtcccctccagtccgggatgttggtatgaattccccagctctggtcttccccagctctgcttcctctactcctggctcagaaacgcccataatcaacagagcaaatggcttgggtttggatacttctccagtaatgaagacccctcccaagctagagggtgatgctactgatggctcctttgccaataagcatggccgccatgtcattggccacattgatgactacagtgccctaagacagcagattgcggagggcaagctgctggtcaaaaagatagtgtctcttgtgagatcagcgtgcagcttccctggccttgaagcccaaggcacagaggtgctaggcagcaaaggtattcatgagcttcggagcagcaccagtgccctgcaccatgccctagaggagtcagcttccctcctcaccatgttctggagagcggccctgccaagcacccacatccctgtgctgcctggcaaagtgggagaatcaacagaaagggaacttctggaactgagaaccaaagtatccaaacaggagcgactccttcagagcacaactgagcatctgaagaacgccaaccagcagaaggagagcatggagcagttcatcgtcagccagcgtgaaatccctaagggctctgccatgtactccagccttgtgacccttgccttccaggaaccatgcaagaagcgcagccaccagaagtccttaaaacagcaggaaaggtgggcctgtcccccttttgtgcagctacctatctgctgaggagcatctgggcctcattcctccaagtccacgggagggtccagaagagggagtcagagatgtatcctggtggagctgggagaaaggcagaaagcctttctgacggctatggaatacgattagccaaggtccacttggcccagcactaagaaaaagatgcgtagtttgcacagaaggttttgtgatcctgcctctcaacagccccagcagctt

SEQ ID NO: 165380 - DNA, 2746 bp, Homo sapiens
  Payload ID: 12558
  Gene Symbol: PDE4DIP
  Gene Name: phosphodiesterase 4D interacting protein
  ENST ID: ENST00000479408
  CDS Start-End: 222-2444
agaacccaggcggggcggggccgggaaaggtgaggctgctggcgggaagcgggggcggcgcgcagcggtacctagcggcgctgccccgctggcagccggaggacgtggcactgtccgagaatgcagggaggggattcgtctttctcctccccgcgaggaggagcctcgacatcctgcagaggcgggaggatccttgagggcactggtgcgactttcagcccatgactgaagagttgctgaaacaacaaaagctgaattcacatgagaccactataactcagcagtctgtatctgattcccacttggcagaactccaggaaaaaatccagcaaacagaggccaccaacaagattcttcaagagaaacttaatgaaatgagctatgaactaaagtgtgctcaggagtcgtctcaaaagcaagatggtacaattcagaacctcaaggaaactctgaaaagcagggaacgtgagactgaggagttgtaccaggtaattgaaggtcaaaatgacacaatggcaaagcttcgagaaatgctgcaccaaagccagcttggacaacttcacagctcagagggtacttctccagctcagcaacaggtagctctgcttgatcttcagagtgctttattctgcagccaacttgaaatacagaagctccagagggtggtacgacagaaagagcgccaactggctgatgccaaacaatgtgtgcaatttgtagaggctgcagcacacgagagtgaacagcagaaagaggcttcttggaaacataaccaggaattgcgaaaagccttgcagcagctacaagaagaattgcagaataagagccaacagcttcgtgcctgggaggctgaaaaatacaatgagattcgaacccaggaacaaaacatccagcacctaaaccatagtctgagtcacaaggagcagttgcttcaggaatttcgggagctcctacagtatcgagataactcagacaaaacccttgaagcaaatgaaatgttgcttgagaaacttcgccagcgaatacatgataaagctgttgctctggagcgggctatagatgaaaaattctctgctctagaagagaaagaaaaagaactgcgccagcttcgtcttgctgtgagagagcgagatcatgacttagagagactgcgcgatgtcctctcctccaatgaagctactatgcaaagtatggagagtctcctgagggccaaaggcctggaagtggaacagttatctactacctgtcaaaacctccagtggctgaaagaagaaatggaaaccaaatttagccgttggcagaaggaacaagagagtatcattcagcagttacagacgtctcttcatgataggaacaaagaagtggaggatcttagtgcaacactgctctgcaaacttggaccagggcagagtgagatagcagaggagctgtgccagcgtctacagcgaaaggaaaggatgctgcaggaccttctaagtgatcgaaataaacaagtgctggaacatgaaatggagattcaaggcctgcttcagtctgtgagcaccagggagcaggaaagccaagctgctgcagagaagttggtgcaagccttaatggaaagaaattcagaattacaggccctgcgccaatatttaggagggagagactccctgatgtcccaagcacccatctctaaccaacaagctgaagttacccccactggccgtcttggaaaacagactgatcaaggttcaatgcagataccttccagagatgatagcacttcattgactgccaaagaggatgtcagcatacccagatccacattaggagacttggacacagttgcagggctggaaaaagaactgagtaatgccaaagaggaacttgaactcatggctaaaaaagaaagagaaagtcagatggaactttctgctctacagtccatgatggctgtgcaggaagaagagctgcaggtgcaggctgctgatatggagtctctgaccaggaacatacagattaaagaagatctcataaaggacctgcaaatgcaactggttgatcctgaagacataccagctatggaacgcctgacccaggaagtcttacttcttcgggaaaaagttgcttcagtagaatcccagggtcaagaaatttcaggaaaccgaagacaacagttgctgctgatgctagaaggactagtagatgaacggagtcggctcaatgaggccttacaagcagagagacagctctatagcagtctggtgaagttccatgcccatccagagagctctgagagagaccgaactctgcaggtggaactggaaggggctcaggtgttacgcagtcggctagaagaagttcttggaagaagcttggagcgcttaaacaggctggagaccctggccgccattggaggtggggaactggaaagtgtgcgaattcatcacaagcatgcctactgagcactggcgggtcagactgcagcccaggatggaaaaccttgtttgcactaaccagaaagatccttgtctgattttggcagaattaaacggtgacttactaatgatagaactggtacaagtagcatcaactacaaagtgaaactcactttagcctacatggatctcactgtacatacatatcaatccctaaattgaatggtggaggttgcaaagtgtatttgcacattttaaatcattctgttttagtttttccacttttattcattcttatccctagccccttctcgttccctcatcccttc

SEQ ID NO: 165381 - DNA, 578 bp, Homo sapiens
  Payload ID: 12558
  Gene Symbol: PDE4DIP
  Gene Name: phosphodiesterase 4D interacting protein
  ENST ID: ENST00000533259
  CDS Start-End: 342-578
gagaacagtccctcccttgtgcgggtcgcacggctagccgcaggttcggccacgtcaaatccattttctaaaaaagcagggagcagagctctctcttcgccgccgacgcagaaaggagctggggaggaaaaagctgctgccttttgcgctggagattcgtgggcaaggcttctcattttcccaggctgcttcccctcccgggtgaggagcgtcctgagactaaggaaagagcctggaaaatggagcagacctggacgagaacattgagctgaaggttgaagtggagagcttgaaacgagaactccaggacaagaaacagcatctggataaaacatgggctgatgtggagaatctcaacagtcagaatgaagctgagctccgacgccagtttgaggagcgacagcaggagacggagcatgtttatgagctcttggagaataagatccagcttctgcaggaggctagcaaagaatgaagctgcgcggatggcagctctggtggaagcagagaaggagtgtaacctggagctctcagagaaactgaagggagtcaccaaaaactgggaagatgtaccagga

SEQ ID NO: 165382 - DNA, 8439 bp, Homo sapiens
  Payload ID: 12558
  Gene Symbol: PDE4DIP
  Gene Name: phosphodiesterase 4D interacting protein
  ENST ID: ENST00000585156
  CDS Start-End: 21-7469
tggccaggcccaggaaatccatgaagggcacagacagcgggtcctgctgccgccgccgatgcgactttggctgctgctgtcgcgcgtcccgccgggctcactacacgccttaccggtccggggacgcgacgcgaacccctcagtccccacggcagaccccgagccgggaaagacggcgcccggagccagccgggagctgggcagcagcggccgaggaggaagaagcagctgcggcggccacaccctggatgagagattattttgcagaggatgatggggagatggtacccagaacgagtcacacagcagcttttcttagtgacactaaagatcgaggccctccagtgcagtcacagatctggagaagtggtgaaaaggtcccgtttgtgcagacatattccttgagagcatttgagaaaccccctcaggtacagacccaggctcttcgagactttgagaagcacctcaatgacctgaagaaggagaacttcagcctcaagctgcgcatctacttcctggaggagcgcatgcaacagaagtatgaggccagccgggaggacatctacaagcggaacattgagctgaaggttgaagtggagagcttgaaacgagaactccaggacaagaaacagcatctggataaaacatgggctgatgtggagaatctcaacagtcagaatgaagctgagctccgacgccagtttgaggagcgacagcaggagacggagcatgtttatgagctcttggagaataagatccagcttctgcaggaggaatccaggctagcaaagaatgaagctgcgcggatggcagctctggtggaagcagagaaggagtgtaacctggagctctcagagaaactgaagggagtcaccaaaaactgggaagatgtaccaggagaccaggtcaagcccgaccaatacactgaggccctggcccagagggacaagagaattgaagaactgaatcagagcctggctgcccaggagaggcttgtagaacagctatctcgggagaaacaacaactgctacatctgttggaggagccaactagcatggaagtgcagcccatgactgaagagttgctgaaacaacaaaagctgaattcacatgagaccactataactcagcagtctgtatctgattcccacttggcagaactccaggaaaaaatccagcaaacagaggccaccaacaagattcttcaagagaaacttaatgaaatgagctatgaactaaagtgtgctcaggagtcgtctcaaaagcaagatggtacaattcagaacctcaaggaaactctgaaaagcagggaacgtgagactgaggagttgtaccaggtaattgaaggtcaaaatgacacaatggcaaagcttcgagaaatgctgcaccaaagccagcttggacaacttcacagctcagagggtacttctccagctcagcaacaggtagctctgcttgatcttcagagtgctttattctgcagccaacttgaaatacagaagctccagagggtggtacgacagaaagagcgccaactggctgatgccaaacaatgtgtgcaatttgtagaggctgcagcacacgagagtgaacagcagaaagaggcttcttggaaacataaccaggaattgcgaaaagccttgcagcagctacaagaagaattgcagaataagagccaacagcttcgtgcctgggaggctgaaaaatacaatgagattcgaacccaggaacaaaacatccagcacctaaaccatagtctgagtcacaaggagcagttgcttcaggaatttcgggagctcctacagtatcgagataactcagacaaaacccttgaagcaaatgaaatgttgcttgagaaacttcgccagcgaatacatgataaagctgttgctctggagcgggctatagatgaaaaattctctgctctagaagagaaagaaaaagaactgcgccagcttcgtcttgctgtgagagagcgagatcatgacttagagagactgcgcgatgtcctctcctccaatgaagctactatgcaaagtatggagagtctcctgagggccaaaggcctggaagtggaacagttatctactacctgtcaaaacctccagtggctgaaagaagaaatggaaaccaaatttagccgttggcagaaggaacaagagagtatcattcagcagttacagacgtctcttcatgataggaacaaagaagtggaggatcttagtgcaacactgctctgcaaacttggaccagggcagagtgagatagcagaggagctgtgccagcgtctacagcgaaaggaaaggatgctgcaggaccttctaagtgatcgaaataaacaagtgctggaacatgaaatggagattcaaggcctgcttcagtctgtgagcaccagggagcaggaaagccaagctgctgcagagaagttggtgcaagccttaatggaaagaaattcagaattacaggccctgcgccaatatttaggagggagagactccctgatgtcccaagcacccatctctaaccaacaagctgaagttacccccactggccgtcttggaaaacagactgatcaaggttcaatgcagataccttccagagatgatagcacttcattgactgccaaagaggatgtcagcatacccagatccacattaggagacttggacacagttgcagggctggaaaaagaactgagtaatgccaaagaggaacttgaactcatggctaaaaaagaaagagaaagtcagatggaactttctgctctacagtccatgatggctgtgcaggaagaagagctgcaggtgcaggctgctgatatggagtctctgaccaggaacatacagattaaagaagatctcataaaggacctgcaaatgcaactggttgatcctgaagacataccagctatggaacgcctgacccaggaagtcttacttcttcgggaaaaagttgcttcagtagaatcccagggtcaagaaatttcaggaaaccgaagacaacagttgctgctgatgctagaaggactagtagatgaacggagtcggctcaatgaggccttacaagcagagagacagctctatagcagtctggtgaagttccatgcccatccagagagctctgagagagaccgaactctgcaggtggaactggaaggggctcaggtgttacgcagtcggctagaagaagttcttggaagaagcttggagcgcttaaacaggctggagaccctggccgccattggaggtgcagctgcaggggatgacaccgaagatacaagcactgagttcactgacagtattgaggaggaggctgcacaccatagtcaccagcaacttgtcaaggtggctttggagaaaagtctggcaactgtggagacccagaacccatctttttcccctccttctccgatgggaggggacagtaacaggtgtcttcaggaagaaatgctccacctgagggctgagttccaccagcacttagaagagaagaggaaagctgaggaggaactgaaggagctaaaggctcaaattgaggaagcaggattctcctcagtgtcccacatcaggaacaccatgctgagcctttgccttgagaatgcggagctgaaagagcagatgggagaagcaatgtctgatggatgggagatcgaggaagacaaggagaagggcgaggtgatggttgagactgtggtaaccaaagagggtctgagtgagagtagccttcaggctgagttcagaaagctccagggaaaactgaagaatgcccacaatatcatcaacctcctcaaagaacaacttgtgctgagtagcaaggaagggaatagtaaacttactccagagctccttgtgcatctgaccagcaccattgaaagaataaacacagaactggttggttcccctgggaagcaccaacaccaagaggaggggaatgtgactgtgaggcctttccccagaccccagagccttgaccttggggctaccttcacagtggatgcccaccaattggataaccagtcccagcctcgtgaccctgggcctcagtcagcgtttagcctaccagggtccacccagcacctgcgctcccagctgtcacaatgcaaacaacgctatcaagatctccaggagaagctgctgctatcagaagccactgtctttgctcaggctaacgagctggagaaatacagagttatgcttagtgaatccttggtgaagcaggacagcaagcagatccaggtggacctccaggacctgggctatgagacttgtggccgaagcgagaatgaggctgaacgggaggaaaccaccagtcctgagtgtgaggagcacaacagcctcaaggaaatggtcctgatggaggggctgtgctctgagcagggacgccggggctcaacactggctagttcctctgagaggaagcccttggagaaccagctagggaagcaggaagagttccgggtatatggaaagtcagaaaacatcttggtcctacgaaaggacatcaaagatctgaaggcccagctgcagaatgccaacaaggtcattcaaaacctcaagagccgggtccggtccctctcagttacaagtgattattcgtctagtctggaaagaccccggaagctgagagctgttggcaccttggaggggtcttcacctcatagtgtccctgatgaggatgaggggtggctgtctgatggcactggggctttctactctccagggcttcaggccaaaaaggacctggagagtctcatccagagagtatcccagctggaggcccagctcccaaaaaatggactagaagagaagctggctgaggagctgagatcagcctcgtggcctgggaaatatgattccctgattcaggatcaggcccgggaactgtcttacctacggcaaaaaatacgagaagggagaggtatttgttatcttatcacccggcatgcaaaagatacagtaaaatcttttgaggatctcctaaggagcaatgacattgactactacctgggacagagcttccgggagcaactcgcccagggaagccagctgacagagaggctcaccagcaaactcagcaccaaggatcataaaagtgagaaagatcaagctggacttgagccactggccctcaggctcagcagggagctgcaggagaaggagaaagtgattgaagtcctgcaggccaagctggatgctcggtccctcacaccctccagcagccatgccttgtctgactcccaccgctctcccagcagcacctctttcctgtctgatgaactggaagcctgctctgacatggacatagtcagcgagtacacacactatgaagagaagaaagcttctcccagtcactcagattccatccatcattcgagtcattctgctgtgttgtcttctaaaccatcatcaaccagtgcatctcagggggctaaggccgaatccaacagcaaccccatcagcttgccaactccccagaatacccccaaggaggccaaccaggcccattcaggctttcattttcactccatacccaagctggctagccttcctcaggcaccattgccctcagctccatccagcttcctgcctttcagccccactggccctctcctccttggctgctgtgagacaccagtggtctccttggctgaggctcagcaggagctacagatgctgcagaagcagttgggagaaagtgccagcactgttcctcctgcttccacagctacattgctgagcaacgacttggaagccgactcttcctactacctcaactctgcccagcctcactctcctccaaggggcaccatagaactgggaagaatcctagagcctgggtacctgggcagcagtggcaagtgggatgtgatgaggcctcagaaagggagtgtatctggggacctatcctcaggctcctctgtgtaccagcttaactccaaacccacaggggctgacctgctggaagagcatcttggtgaaatccggaacctgcgccagcgcctggaggaatccatctgcatcaatgaccgcctacgggagcaactggaacaccggctgacctctactgctcgtggaaggggatccacttctaacttctacagtcagggcctggagtccatacctcagctctgcaatgagaacagagtcctcagggaagacaatcgaagacttcaggctcaactgagtcatgtttccagagagcactcccaggaaacagaaagcctgagggaggctctgctgtcctctcgatcccaccttcaagagctggaaaaggagctggagcaccagaaggtggaaaggcagcagcttttggaagacttgagggagaagcagcaagaggtcttgcatttcagggaggaacgtctttccctccaggaaaacgactccagactgcagcacaagctggttctcctgcagcaacagtgtgaagagaaacagcagctctttgagtccctccagtcagagctacaaatctacgaggcactttatggcaattccaagaaggggctgaaagcttacagcctggatgcctgtcaccaaatccctttgagcagtgacctgagccacctggtggcagaggtacgagctctgagagggcagctggagcagagcattcaggggaacaattgtctgcgactgcagctgcaacagcagctggagagcggtgctggcaaagccagcctcagcccctcctccattaaccagaacttcccagccagcactgaccctggaaacaagcagctgctcctccaagattcagctgtgtcccctccagtccgggatgttggtatgaattccccagctctggtcttccccagctctgcttcctctactcctggctcagaaacgcccataatcaacagagcaaatggcttgggtttggatacttctccagtaatgaagacccctcccaagctagagggtgatgctactgatggctcctttgccaataagcatggccgccatgtcattggccacattgatgactacagtgccctaagacagcagattgcggagggcaagctgctggtcaaaaagatagtgtctcttgtgagatcagcgtgcagcttccctggccttgaagcccaaggcacagaggtgctaggcagcaaaggtattcatgagcttcggagcagcaccagtgccctgcaccatgccctagaggagtcagcttccctcctcaccatgttctggagagcggccctgccaagcacccacatccctgtgctgcctggcaaagtgggagaatcaacagaaagggaacttctggaactgagaaccaaagtatccaaacaggagcgactccttcagagcacaactgagcatctgaagaacgccaaccagcagaaggagagcatggagcagttcatcgtcagccagctaaccagaacacatgatgttttaaagaaggcaaggactaacttagaggtgaaatccctaagggctctgccatgtactccagccttgtgacccttgccttccaggaaccatgcaagaagcgcagccaccagaagtccttaaaacagcaggaaaggtgggcctgtcccccttttgtgcagctacctatctgctgaggagcatctgggcctcattcctccaagtccacgggagggtccagaagagggagtcagagatgtatcctggtggagctgggagaaaggcagaaagcctttctgacggctatggaatacgattagccaaggtccacttggcccagcactaagaaaaagatgcgtagtttgcacagaaggttttgtgatcctgcctctcaacagccccagcagcttgggaactagcaagagcacatttcttgcctcatcagctgtcctgagatggaaaactcagtgaatataggaccctgattccgatgaaaggggcacgtggtcccaatgctggagctcctctggcaggttctaaaagcacactactgagcagcggtgccctgccggacactgctggcgggggctcagtgagcactactcacagatccacacctgaccctgttgggtcgagtcaggctgggccttggtctgcactgtagcacctgtgttctttgagttcacatcatgaatgtggtgacttcccagataccatctcaggcttaacctagcacatcctatttcttttcttctatgatatccaaattggactgacctcacttcaaagttgctgtcccattttgtcaccctatcttatctcggggaaattgcagactgatggccagaccaactctgttgaaattcttgcatagagcaaacctgtgctcatttttaagtggcatgggagaggccccaagcctagtaaagcctagtctgtgtcttcacagtgctggtagaatgtgtttgtgtgtataaatatatgatatagatttatatatgttgctaacgccatatattgaaggccaacataactggtggacagggtgggtgacagaaaatga

SEQ ID NO: 165383 - DNA, 8150 bp, Homo sapiens
  Payload ID: 12558
  Gene Symbol: PDE4DIP
  Gene Name: phosphodiesterase 4D interacting protein
  ENST ID: ENST00000618462
  CDS Start-End: 394-7116
gctcgcggttgacagctcagctggtgccgagcaactcgtgccagccagtcgtgtctcagcctggagagtgcgcgcaccgcggcccgggcagccgctggctccagctcacgaaacagccccgggcgccgcgccgctctgagtccagcctcctactgagaacagtccctcccttgtgcgggtcgcacggctagccgcaggttcggccacgtcaaatccattttctaaaaaagcagggagcagagctctctcttcgccgccgacgcagaaaggagctggggaggaaaaagctgctgccttttgcgctggagattcgtgggcaaggcttctcattttcccaggctgcttcccctcccgggtgaggagcgtcctgagactaaggaaagagcctggaaaatggagcagacctggacgagagattattttgcagaggatgatggggagatggtacccagaacgagtcacacagcagcttttcttagtgacactaaagatcgaggccctccagtgcagtcacagatctggagaagtggtgaaaaggtcccgtttgtgcagacatattccttgagagcatttgagaaaccccctcaggtacagacccaggctcttcgagactttgagaagcacctcaatgacctgaagaaggagaacttcagcctcaagctgcgcatctacttcctggaggagcgcatgcaacagaagtatgaggccagccgggaggacatctacaagcggaacattgagctgaaggttgaagtggagagcttgaaacgagaactccaggacaagaaacagcatctggataaaacatgggctgatgtggagaatctcaacagtcagaatgaagctgagctccgacgccagtttgaggagcgacagcaggagacggagcatgtttatgagctcttggagaataagatccagcttctgcaggaggaatccaggctagcaaagaatgaagctgcgcggatggcagctctggtggaagcagagaaggagtgtaacctggagctctcagagaaactgaagggagtcaccaaaaactgggaagatgtaccaggagaccaggtcaagcccgaccaatacactgaggccctggcccagagggacaagagaattgaagaactgaatcagagcctggctgcccaggagaggcttgtagaacagctatctcgggagaaacaacaactgctacatctgttggaggagccaactagcatggaagtgcagcccatgactgaagagttgctgaaacaacaaaagctgaattcacatgagaccactataactcagcagtctgtatctgattcccacttggcagaactccaggaaaaaatccagcaaacagaggccaccaacaagattcttcaagagaaacttaatgaaatgagctatgaactaaagtgtgctcaggagtcgtctcaaaagcaagatggtacaattcagaacctcaaggaaactctgaaaagcagggaacgtgagactgaggagttgtaccaggtaattgaaggtcaaaatgacacaatggcaaagcttcgagaaatgctgcaccaaagccagcttggacaacttcacagctcagagggtacttctccagctcagcaacaggtagctctgcttgatcttcagagtgctttattctgcagccaacttgaaatacagaagctccagagggtggtacgacagaaagagcgccaactggctgatgccaaacaatgtgtgcaatttgtagaggctgcagcacacgagagtgaacagcagaaagaggcttcttggaaacataaccaggaattgcgaaaagccttgcagcagctacaagaagaattgcagaataagagccaacagcttcgtgcctgggaggctgaaaaatacaatgagattcgaacccaggaacaaaacatccagcacctaaaccatagtctgagtcacaaggagcagttgcttcaggaatttcgggagctcctacagtatcgagataactcagacaaaacccttgaagcaaatgaaatgttgcttgagaaacttcgccagcgaatacatgataaagctgttgctctggagcgggctatagatgaaaaattctctgctctagaagagaaagaaaaagaactgcgccagcttcgtcttgctgtgagagagcgagatcatgacttagagagactgcgcgatgtcctctcctccaatgaagctactatgcaaagtatggagagtctcctgagggccaaaggcctggaagtggaacagttatctactacctgtcaaaacctccagtggctgaaagaagaaatggaaaccaaatttagccgttggcagaaggaacaagagagtatcattcagcagttacagacgtctcttcatgataggaacaaagaagtggaggatcttagtgcaacactgctctgcaaacttggaccagggcagagtgagatagcagaggagctgtgccagcgtctacagcgaaaggaaaggatgctgcaggaccttctaagtgatcgaaataaacaagtgctggaacatgaaatggagattcaaggcctgcttcagtctgtgagcaccagggagcaggaaagccaagctgctgcagagaagttggtgcaagccttaatggaaagaaattcagaattacaggccctgcgccaatatttaggagggagagactccctgatgtcccaagcacccatctctaaccaacaagctgaagttacccccactggccgtcttggaaaacagactgatcaaggttcaatgcagataccttccagagatgatagcacttcattgactgccaaagaggatgtcagcatacccagatccacattaggagacttggacacagttgcagggctggaaaaagaactgagtaatgccaaagaggaacttgaactcatggctaaaaaagaaagagaaagtcagatggaactttctgctctacagtccatgatggctgtgcaggaagaagagctgcaggtgcaggctgctgatatggagtctctgaccaggaacatacagattaaagaagatctcataaaggacctgcaaatgcaactggttgatcctgaagacataccagctatggaacgcctgacccaggaagtcttacttcttcgggaaaaagttgcttcagtagaatcccagggtcaagaaatttcaggaaaccgaagacaacagttgctgctgatgctagaaggactagtagatgaacggagtcggctcaatgaggccttacaagcagagagacagctctatagcagtctggtgaagttccatgcccatccagagagctctgagagagaccgaactctgcaggtggaactggaaggggctcaggtgttacgcagtcggctagaagaagttcttggaagaagcttggagcgcttaaacaggctggagaccctggccgccattggaggtgcagctgcaggggatgacaccgaagatacaagcactgagttcactgacagtattgaggaggaggctgcacaccatagtcaccagcaacttgtcaaggtggctttggagaaaagtctggcaactgtggagacccagaacccatctttttcccctccttctccgatgggaggggacagtaacaggtgtcttcaggaagaaatgctccacctgagggctgagttccaccagcacttagaagagaagaggaaagctgaggaggaactgaaggagctaaaggctcaaattgaggaagcaggattctcctcagtgtcccacatcaggaacaccatgctgagcctttgccttgagaatgcggagctgaaagagcagatgggagaagcaatgtctgatggatgggagatcgaggaagacaaggagaagggcgagttggataaccagtcccagcctcgtgaccctgggcctcagtcagcgtttagcctaccagggtccacccagcacctgcgctcccagctgtcacaatgcaaacaacgctatcaagatctccaggagaagctgctgctatcagaagccactgtctttgctcaggctaacgagctggagaaatacagagttatgcttacaggtgaatccttggtgaagcaggacagcaagcagatccaggtggacctccaggacctgggctatgagacttgtggccgaagcgagaatgaggctgaacgggaggaaaccaccagtcctgagtgtgaggagcacaacagcctcaaggaaatggtcctgatggaggggctgtgctctgagcagggacgccggggctcaacactggctagttcctctgagaggaagcccttggagaaccagctagggaagcaggaagagttccgggtatatggaaagtcagaaaacatcttggtcctacgaaaggacatcaaagatctgaaggcccagctgcagaatgccaacaaggtcattcaaaacctcaagagccgggtccggtccctctcagttacaagtgattattcgtctagtctggaaagaccccggaagctgagagctgttggcaccttggaggggtcttcacctcatagtgtccctgatgaggatgaggggtggctgtctgatggcactggggctttctactctccagggcttcaggccaaaaaggacctggagagtctcatccagagagtatcccagctggaggcccagctcccaaaaaatggactagaagagaagctggctgaggagctgagatcagcctcgtggcctgggaaatatgattccctgattcaggatcaggcccgggaactgtcttacctacggcaaaaaatacgagaagggagaggtatttgttatcttatcacccggcatgcaaaagatacagtaaaatcttttgaggatctcctaaggagcaatgacattgactactacctgggacagagcttccgggagcaactcgcccagggaagccagctgacagagaggctcaccagcaaactcagcaccaaggatcataaaagtgagaaagatcaagctggacttgagccactggccctcaggctcagcagggagctgcaggagaaggagaaagtgattgaagtcctgcaggccaagctggatgctcggtccctcacaccctccagcagccatgccttgtctgactcccaccgctctcccagcagcacctctttcctgtctgatgaactggaagcctgctctgacatggacatagtcagcgagtacacacactatgaagagaagaaagcttctcccagtcactcagattccatccatcattcgagtcattctgctgtgttgtcttctaaaccatcatcaaccagtgcatctcagggggctaaggccgaatccaacagcaaccccatcagcttgccaactccccagaatacccccaaggaggccaaccaggcccattcaggtgccagcactgttcctcctgcttccacagctacattgctgagcaacgacttggaagccgactcttcctactacctcaactctgcccagcctcactctcctccaaggggcaccatagaactgggaagaatcctagagcctgggtacctgggcagcagtggcaagtgggatgtgatgaggcctcagaaagggagtgtatctggggacctatcctcaggctcctctgtgtaccagcttaactccaaacccacaggggctgacctgctggaagagcatcttggtgaaatccggaacctgcgccagcgcctggaggaatccatctgcatcaatgaccgcctacgggagcaactggaacaccggctgacctctactgctcgtggaaggggatccacttctaacttctacagtcagggcctggagtccatacctcagctctgcaatgagaacagagtcctcagggaagacaatcgaagacttcaggctcaactgagtcatgtttccagagagcactcccaggaaacagaaagcctgagggaggctctgctgtcctctcgatcccaccttcaagagctggaaaaggagctggagcaccagaaggtggaaaggcagcagcttttggaagacttgagggagaagcagcaagaggtcttgcatttcagggaggaacgtctttccctccaggaaaacgactccagactgcagcacaagctggttctcctgcagcaacagtgtgaagagaaacagcagctctttgagtccctccagtcagagctacaaatctacgaggcactttatggcaattccaagaaggggctgaaagcttacagcctggatgcctgtcaccaaatccctttgagcagtgacctgagccacctggtggcagaggtacgagctctgagagggcagctggagcagagcattcaggggaacaattgtctgcgactgcagctgcaacagcagctggagagcggtgctggcaaagccagcctcagcccctcctccattaaccagaacttcccagccagcactgaccctggaaacaagcagctgctcctccaagattcagctgtgtcccctccagtccgggatgttggtatgaattccccagctctggtcttccccagctctgcttcctctactcctggctcagaaacgcccataatcaacagagcaaatggcttgggtttggatacttctccagtaatgaagacccctcccaagctagagggtgatgctactgatggctcctttgccaataagcatggccgccatgtcattggccacattgatgactacagtgccctaagacagcagattgcggagggcaagctgctggtcaaaaagatagtgtctcttgtgagatcagcgtgcagcttccctggccttgaagcccaaggcacagaggtgctaggcagcaaaggtattcatgagcttcggagcagcaccagtgccctgcaccatgccctagaggagtcagcttccctcctcaccatgttctggagagcggccctgccaagcacccacatccctgtgctgcctggcaaagtgggagaatcaacagaaagggaacttctggaactgagaaccaaagtatccaaacaggagcgactccttcagagcacaactgagcatctgaagaacgccaaccagcagaaggagagcatggagcagttcatcgtcagccagctaaccagaacacatgatgttttaaagaaggcaaggactaacttagaggtgaaatccctaagggctctgccatgtactccagccttgtgacccttgccttccaggaaccatgcaagaagcgcagccaccagaagtccttaaaacagcaggaaaggtgggcctgtcccccttttgtgcagctacctatctgctgaggagcatctgggcctcattcctccaagtccacgggagggtccagaagagggagtcagagatgtatcctggtggagctgggagaaaggcagaaagcctttctgacggctatggaatacgattagccaaggtccacttggcccagcactaagaaaaagatgcgtagtttgcacagaaggttttgtgatcctgcctctcaacagccccagcagcttgggaactagcaagagcacatttcttgcctcatcagctgtcctgagatggaaaactcagtgaatataggaccctgattccgatgaaaggggcacgtggtcccaatgctggagctcctctggcaggttctaaaagcacactactgagcagcggtgccctgccggacactgctggcgggggctcagtgagcactactcacagatccacacctgaccctgttgggtcgagtcaggctgggccttggtctgcactgtagcacctgtgttctttgagttcacatcatgaatgtggtgacttcccagataccatctcaggcttaacctagcacatcctatttcttttcttctatgatatccaaattggactgacctcacttcaaagttgctgtcccattttgtcaccctatcttatctcggggaaattgcagactgatggccagaccaactctgttgaaattcttgcatagagcaaacctgtgctcatttttaagtggcatgggagaggccccaagcctagtaaagcctagtctgtgtcttcacagtgctggtagaatgtgtttgtgtgtataaatatatgatatagatttatatatgttgctaacgccatatattgaaggccaacataactggtggacagggtgggtgacagaaaatgaaagtctttttggtgattgttaaagcaaaatgtgtataaagaaataaatagtttttctttcactg

SEQ ID NO: 165384 - DNA, 823 bp, Homo sapiens
  Payload ID: 12558
  Gene Symbol: PDE4DIP
  Gene Name: phosphodiesterase 4D interacting protein
  ENST ID: ENST00000620605
  CDS Start-End: 28-687
actggggtggccaggcccaggaaatccatgaagggcacagacagcgggtcctgctgccgccgccgatgcgactttggctgctgctgtcgcgcgtcccgccgggctcactacacgccttaccggtccggggacgcgacgcgaacccctcagtccccacggcagaccccgagccgggaaagacggcgcccggagccagccgggagctgggcagcagcggccgaggaggaagaagcagctgcggcggccacaccctggatgagagattattttgcagaggatgatggggagatggtacccagaacgagtcacacagcagcttttcttagtgacactaaagatcgaggccctccagtgcagtcacagatctggagaagtggtgaaaaggtcccgtttgtgcagacatattccttgagagcatttgagaaaccccctcaggtacagacccaggctcttcgagactttgagaagcacctcaatgacctgaagaaggagaacttcagcctcaagctgcgcatctacttcctggaggagcgcatgcaacagaagtatgaggccagccgggaggacatctacaagcggcaattgcctacccaaaccctaggcccagccgactttggaggtctccagttgaaccttcaccttttactggaatggagcagtctctgcaagaggggttggtggaagtaggaagcaaaaaaattgagaaaagaaacagtaagaagaggaagttcttgcagggagaattgtttttcaagagagctatatttttattttgaacagcatccatttgtttgataaatatatcattatcttctgtgtgtgg

SEQ ID NO: 165385 - DNA, 569 bp, Homo sapiens
  Payload ID: 12558
  Gene Symbol: PDE4DIP
  Gene Name: phosphodiesterase 4D interacting protein
  ENST ID: ENST00000613995
  CDS Start-End: 140-569
atggagaaggaaagagatcagggcaccacactgctcaggctttattgaggccaggcaacagttggcttttaggtcagattttggagatggcctgtgaaactgcgttttcttccagtccttcccccagacacactttaaaatgaagccccattcaaggaaaggagattattttgcagaggatgatggggagatggtacccagaacgagtcacacagcagcttttcttagtgacactaaagatcgaggccctccagtgcagtcacagatctggagaagtggtgaaaaggtcccgtttgtgcagacatattccttgagagcatttgagaaaccccctcaggtacagacccaggctcttcgagactttgagaagcacctcaatgacctgaagaaggagaacttcagcctcaagctgcgcatctacttcctggaggagcgcatgcaacagaagtatgaggccagccgggaggacatctacaagcggaacattgagctgaaggttgaagtggagagcttgaaacgagaactccaggacaagaaacagcatctggataaaacatgggctgatgtgg

SEQ ID NO: 165386 - DNA, 567 bp, Homo sapiens
  Payload ID: 12558
  Gene Symbol: PDE4DIP
  Gene Name: phosphodiesterase 4D interacting protein
  ENST ID: ENST00000618504
  CDS Start-End: 178-426
attttctaaaaaagcagggagcagagctctctcttcgccgccgacgcagaaaggagctggggaggaaaaagctgctgccttttgcgctggagattcgtgggcaaggcttctcattttcccaggctgcttcccctcccgggtgaggagcgtcctgagactaaggaaagagcctggaaaatggagcagacctggacgagagattattttgcagaggatgatggggagatggtacccagaacgagtcacacagcagcttttcttagtgacactaaagatcgaggccctccagtgcagtcacagatctggagaagtggtgaaaaggtcccgtttgtgcagacatattccttgagagcatttgagaaaccccctcaggtacagacccaggctcttcgagactttgagaaggtaagtcatgtgagtggataattgttatcccaattagaagcagtactatggaatagtgatgcctgataaaaatatgacccatggattggtccggattatggatggtattatcattatggtgtctctttcaagagcatgtcccaataaacatatgctctgtca

SEQ ID NO: 165387 - DNA, 685 bp, Homo sapiens
  Payload ID: 12558
  Gene Symbol: PDE4DIP
  Gene Name: phosphodiesterase 4D interacting protein
  ENST ID: ENST00000619981
  CDS Start-End: 184-528
aaatccattttctaaaaaagcagggagcagagctctctcttcgccgccgacgcagaaaggagctggggaggaaaaagctgctgccttttgcgctggagattcgtgggcaaggcttctcattttcccaggctgcttcccctcccgggtgaggagcgtcctgagactaaggaaagagcctggaaaatggagcagacctggacgagagattattttgcagaggatgatggggagatggtacccagaacgagtcacacagcagcttttcttagtgacactaaagatcgaggccctccagtgcagtcacagatctggagaagtggtgaaaaggtcccgtttgtgcagacatattccttgagagcatttgagaaaccccctcaggtacagacccaggctcttcgagactttgagaagcacctcaatgacctgaagaaggagaacttcagcctcaagctgcgcatctacttcctggaggagcgcatgcaacagaagtatgaggccagccgggaggacatctacaagcggggctgatgtggagaatctcaacagtcagaatgaagctgagctccgacgccagtttgaggagcgacagcaggagacggagcatgtttatgagctcttggagaataagatccagcttctgcaggaggaatccaggctagcaaagaatgaagctgcgcggatggca

SEQ ID NO: 165388 - DNA, 8305 bp, Homo sapiens
  Payload ID: 12558
  Gene Symbol: PDE4DIP
  Gene Name: phosphodiesterase 4D interacting protein
  ENST ID: ENST00000524974
  CDS Start-End: 40-7335
accgtagctaggactggggtggccaggcccaggaaatccatgaagggcacagacagcgggtcctgctgccgccgccgatgcgactttggctgctgctgtcgcgcgtcccgccgggctcactacacgccttaccggtccggggacgcgacgcgaacccctcagtccccacggcagaccccgagccgggaaagacggcgcccggagccagccgggagctgggcagcagcggccgaggaggaagaagcagctgcggcggccacaccctggatgagagattattttgcagaggatgatggggagatggtacccagaacgagtcacacagcagcttttcttagtgacactaaagatcgaggccctccagtgcagtcacagatctggagaagtggtgaaaaggtcccgtttgtgcagacatattccttgagagcatttgagaaaccccctcaggtacagacccaggctcttcgagactttgagaagcacctcaatgacctgaagaaggagaacttcagcctcaagctgcgcatctacttcctggaggagcgcatgcaacagaagtatgaggccagccgggaggacatctacaagcggaacattgagctgaaggttgaagtggagagcttgaaacgagaactccaggacaagaaacagcatctggataaaacatgggctgatgtggagaatctcaacagtcagaatgaagctgagctccgacgccagtttgaggagcgacagcaggagacggagcatgtttatgagctcttggagaataagatccagcttctgcaggaggaatccaggctagcaaagaatgaagctgcgcggatggcagctctggtggaagcagagaaggagtgtaacctggagctctcagagaaactgaagggagtcaccaaaaactgggaagatgtaccaggagaccaggtcaagcccgaccaatacactgaggccctggcccagagggacaagagaattgaagaactgaatcagagcctggctgcccaggagaggcttgtagaacagctatctcgggagaaacaacaactgctacatctgttggaggagccaactagcatggaagtgcagcccatgactgaagagttgctgaaacaacaaaagctgaattcacatgagaccactataactcagcagtctgtatctgattcccacttggcagaactccaggaaaaaatccagcaaacagaggccaccaacaagattcttcaagagaaacttaatgaaatgagctatgaactaaagtgtgctcaggagtcgtctcaaaagcaagatggtacaattcagaacctcaaggaaactctgaaaagcagggaacgtgagactgaggagttgtaccaggtaattgaaggtcaaaatgacacaatggcaaagcttcgagaaatgctgcaccaaagccagcttggacaacttcacagctcagagggtacttctccagctcagcaacaggtagctctgcttgatcttcagagtgctttattctgcagccaacttgaaatacagaagctccagagggtggtacgacagaaagagcgccaactggctgatgccaaacaatgtgtgcaatttgtagaggctgcagcacacgagagtgaacagcagaaagaggcttcttggaaacataaccaggaattgcgaaaagccttgcagcagctacaagaagaattgcagaataagagccaacagcttcgtgcctgggaggctgaaaaatacaatgagattcgaacccaggaacaaaacatccagcacctaaaccatagtctgagtcacaaggagcagttgcttcaggaatttcgggagctcctacagtatcgagataactcagacaaaacccttgaagcaaatgaaatgttgcttgagaaacttcgccagcgaatacatgataaagctgttgctctggagcgggctatagatgaaaaattctctgctctagaagagaaagaaaaagaactgcgccagcttcgtcttgctgtgagagagcgagatcatgacttagagagactgcgcgatgtcctctcctccaatgaagctactatgcaaagtatggagagtctcctgagggccaaaggcctggaagtggaacagttatctactacctgtcaaaacctccagtggctgaaagaagaaatggaaaccaaatttagccgttggcagaaggaacaagagagtatcattcagcagttacagacgtctcttcatgataggaacaaagaagtggaggatcttagtgcaacactgctctgcaaacttggaccagggcagagtgagatagcagaggagctgtgccagcgtctacagcgaaaggaaaggatgctgcaggaccttctaagtgatcgaaataaacaagtgctggaacatgaaatggagattcaaggcctgcttcagtctgtgagcaccagggagcaggaaagccaagctgctgcagagaagttggtgcaagccttaatggaaagaaattcagaattacaggccctgcgccaatatttaggagggagagactccctgatgtcccaagcacccatctctaaccaacaagctgaagttacccccactggccgtcttggaaaacagactgatcaaggttcaatgcagataccttccagagatgatagcacttcattgactgccaaagaggatgtcagcatacccagatccacattaggagacttggacacagttgcagggctggaaaaagaactgagtaatgccaaagaggaacttgaactcatggctaaaaaagaaagagaaagtcagatggaactttctgctctacagtccatgatggctgtgcaggaagaagagctgcaggtgcaggctgctgatatggagtctctgaccaggaacatacagattaaagaagatctcataaaggacctgcaaatgcaactggttgatcctgaagacataccagctatggaacgcctgacccaggaagtcttacttcttcgggaaaaagttgcttcagtagaatcccagggtcaagaaatttcaggaaaccgaagacaacagttgctgctgatgctagaaggactagtagatgaacggagtcggctcaatgaggccttacaagcagagagacagctctatagcagtctggtgaagttccatgcccatccagagagctctgagagagaccgaactctgcaggtggaactggaaggggctcaggtgttacgcagtcggctagaagaagttcttggaagaagcttggagcgcttaaacaggctggagaccctggccgccattggaggtgcagctgcaggggatgacaccgaagatacaagcactgagttcactgacagtattgaggaggaggctgcacaccatagtcaccagcaacttgtcaaggtggctttggagaaaagtctggcaactgtggagacccagaacccatctttttcccctccttctccgatgggaggggacagtaacaggtgtcttcaggaagaaatgctccacctgagggctgagttccaccagcacttagaagagaagaggaaagctgaggaggaactgaaggagctaaaggctcaaattgaggaagcaggattctcctcagtgtcccacatcaggaacaccatgctgagcctttgccttgagaatgcggagctgaaagagcagatgggagaagcaatgtctgatggatgggagatcgaggaagacaaggagaagggcgaggtgatggttgagactgtggtaaccaaagagggtctgagtgagagtagccttcaggctgagttcagaaagctccagggaaaactgaagaatgcccacaatatcatcaacctcctcaaagaacaacttgtgctgagtagcaaggaagggaatagtaaacttactccagagctccttgtgcatctgaccagcaccattgaaagaataaacacagaactggttggttcccctgggaagcaccaacaccaagaggaggggaatgtgactgtgaggcctttccccagaccccagagccttgaccttggggctaccttcacagtggatgcccaccaattggataaccagtcccagcctcgtgaccctgggcctcagtcagcgtttagcctaccagggtccacccagcacctgcgctcccagctgtcacaatgcaaacaacgctatcaagatctccaggagaagctgctgctatcagaagccactgtctttgctcaggctaacgagctggagaaatacagagttatgcttagtgaatccttggtgaagcaggacagcaagcagatccaggtggacctccaggacctgggctatgagacttgtggccgaagcgagaatgaggctgaacgggaggaaaccaccagtcctgagtgtgaggagcacaacagcctcaaggaaatggtcctgatggaggggctgtgctctgagcagggacgccggggctcaacactggctagttcctctgagaggaagcccttggagaaccagctagggaagcaggaagagttccgggtatatggaaagtcagaaaacatcttggtcctacgaaaggacatcaaagatctgaaggcccagctgcagaatgccaacaaggtcattcaaaacctcaagagccgggtccggtccctctcagttacaagtgattattcgtctagtctggaaagaccccggaagctgagagctgttggcaccttggaggggtcttcacctcatagtgtccctgatgaggatgaggggtggctgtctgatggcactggggctttctactctccagggcttcaggccaaaaaggacctggagagtctcatccagagagtatcccagctggaggcccagctcccaaaaaatggactagaagagaagctggctgaggagctgagatcagcctcgtggcctgggaaatatgattccctgattcaggatcaggcccgggaactgtcttacctacggcaaaaaatacgagaagggagaggtatttgttatcttatcacccggcatgcaaaagatacagtaaaatcttttgaggatctcctaaggagcaatgacattgactactacctgggacagagcttccgggagcaactcgcccagggaagccagctgacagagaggctcaccagcaaactcagcaccaaggatcataaaagtgagaaagatcaagctggacttgagccactggccctcaggctcagcagggagctgcaggagaaggagaaagtgattgaagtcctgcaggccaagctggatgctcggtccctcacaccctccagcagccatgccttgtctgactcccaccgctctcccagcagcacctctttcctgtctgatgaactggaagcctgctctgacatggacatagtcagcgagtacacacactatgaagagaagaaagcttctcccagtcactcaggctttcattttcactccatacccaagctggctagccttcctcaggcaccattgccctcagctccatccagcttcctgcctttcagccccactggccctctcctccttggctgctgtgagacaccagtggtctccttggctgaggctcagcaggagctacagatgctgcagaagcagttgggagaaagtgccagcactgttcctcctgcttccacagctacattgctgagcaacgacttggaagccgactcttcctactacctcaactctgcccagcctcactctcctccaaggggcaccatagaactgggaagaatcctagagcctgggtacctgggcagcagtggcaagtgggatgtgatgaggcctcagaaagggagtgtatctggggacctatcctcaggctcctctgtgtaccagcttaactccaaacccacaggggctgacctgctggaagagcatcttggtgaaatccggaacctgcgccagcgcctggaggaatccatctgcatcaatgaccgcctacgggagcaactggaacaccggctgacctctactgctcgtggaaggggatccacttctaacttctacagtcagggcctggagtccatacctcagctctgcaatgagaacagagtcctcagggaagacaatcgaagacttcaggctcaactgagtcatgtttccagagagcactcccaggaaacagaaagcctgagggaggctctgctgtcctctcgatcccaccttcaagagctggaaaaggagctggagcaccagaaggtggaaaggcagcagcttttggaagacttgagggagaagcagcaagaggtcttgcatttcagggaggaacgtctttccctccaggaaaacgactccagactgcagcacaagctggttctcctgcagcaacagtgtgaagagaaacagcagctctttgagtccctccagtcagagctacaaatctacgaggcactttatggcaattccaagaaggggctgaaagcttacagcctggatgcctgtcaccaaatccctttgagcagtgacctgagccacctggtggcagaggtacgagctctgagagggcagctggagcagagcattcaggggaacaattgtctgcgactgcagctgcaacagcagctggagagcggtgctggcaaagccagcctcagcccctcctccattaaccagaacttcccagccagcactgaccctggaaacaagcagctgctcctccaagattcagctgtgtcccctccagtccgggatgttggtatgaattccccagctctggtcttccccagctctgcttcctctactcctggctcagaaacgcccataatcaacagagcaaatggcttgggtttggatacttctccagtaatgaagacccctcccaagctagagggtgatgctactgatggctcctttgccaataagcatggccgccatgtcattggccacattgatgactacagtgccctaagacagcagattgcggagggcaagctgctggtcaaaaagatagtgtctcttgtgagatcagcgtgcagcttccctggccttgaagcccaaggcacagaggtgctaggcagcaaaggtattcatgagcttcggagcagcaccagtgccctgcaccatgccctagaggagtcagcttccctcctcaccatgttctggagagcggccctgccaagcacccacatccctgtgctgcctggcaaagtgggagaatcaacagaaagggaacttctggaactgagaaccaaagtatccaaacaggagcgactccttcagagcacaactgagcatctgaagaacgccaaccagcagaaggagagcatggagcagttcatcgtcagccagctaaccagaacacatgatgttttaaagaaggcaaggactaacttagaggtgaaatccctaagggctctgccatgtactccagccttgtgacccttgccttccaggaaccatgcaagaagcgcagccaccagaagtccttaaaacagcaggaaaggtgggcctgtcccccttttgtgcagctacctatctgctgaggagcatctgggcctcattcctccaagtccacgggagggtccagaagagggagtcagagatgtatcctggtggagctgggagaaaggcagaaagcctttctgacggctatggaatacgattagccaaggtccacttggcccagcactaagaaaaagatgcgtagtttgcacagaaggttttgtgatcctgcctctcaacagccccagcagcttgggaactagcaagagcacatttcttgcctcatcagctgtcctgagatggaaaactcagtgaatataggaccctgattccgatgaaaggggcacgtggtcccaatgctggagctcctctggcaggttctaaaagcacactactgagcagcggtgccctgccggacactgctggcgggggctcagtgagcactactcacagatccacacctgaccctgttgggtcgagtcaggctgggccttggtctgcactgtagcacctgtgttctttgagttcacatcatgaatgtggtgacttcccagataccatctcaggcttaacctagcacatcctatttcttttcttctatgatatccaaattggactgacctcacttcaaagttgctgtcccattttgtcaccctatcttatctcggggaaattgcagactgatggccagaccaactctgttgaaattcttgcatagagcaaacctgtgctcatttttaagtggcatgggagaggccccaagcctagtaaagcctagtctgtgtcttcacagtgctggtagaatgtgtttgtgtgtataaatatatgatatagatttatatatgttgctaacgccatatattgaaggccaacataactggtggacagggtgggtgacagaaaatga

SEQ ID NO: 165389 - DNA, 1055 bp, Homo sapiens
  Payload ID: 12558
  Gene Symbol: PDE4DIP
  Gene Name: phosphodiesterase 4D interacting protein
  ENST ID: ENST00000464103
  CDS Start-End: 89-619
acagttgggcctgggaggctccaggagggtgacagcagagtcctggcttggagtcgggttacaccacttgtgtctgagttcacgcagcatgttcctctgtcagggattccgcaaatatctccctgagcacctcaatgacctgaagaaggagaacttcagcctcaagctgcgcatctacttcctggaggagcgcatgcaacagaagtatgaggccagccgggaggacatctacaagcggaacattgagctgaaggttgaagtggagagcttgaaacgagaactccaggacaagaaacagcatctggataaaacatgggctgatgtggagaatctcaacagtcagaatgaagctgagctccgacgccagtttgaggagcgacagcaggagacggagcatgtttatgagctcttggagaataagatccagcttctgcaggaggaatccaggctagcaaagaatgaagctgcgcggatggcagctctggtggaagcagagaaggagtgtaacctggagctctcagagaaactgaagggagtcaccaaaaactgggaagatgtaccaggagaccaggtcaagcccgaccaatacactgaggccctggcccagagggacaagtaggtgccttcggtgctctttttgtcgcttgtcttttgcccattctcaaggcatacagcagctgtcctgttccctttcaaggactgacagtaggagcttcactatttctaagactttatgggcccacaaccgaagacattcttttcagggttgaattttcagtggtatccattatgaaaactcacttcatggattcagtgggcaaatagcggcaagcaagagacatagattcacttattcagcaaacatttactgggcatgccacatgccagataccgggctaagtatctggcatgtgttacagaaacaaaagacctaattcttgtcaccaagaaacatgttacatgattttaataagttccctgatagaagagcatggggtgctctggggaaatattggagggtcatccattccacattaaaagagcaagttgtctgc

SEQ ID NO: 165390 - DNA, 1690 bp, Homo sapiens
  Payload ID: 12558
  Gene Symbol: PDE4DIP
  Gene Name: phosphodiesterase 4D interacting protein
  Uniprot ID: Q5VU43
  ENST ID: ENST00000530472
  CDS Start-End: 325-1257
aaacttatctgaggttggaaataaagagaaggtgacattggagcggatagaaaggaagaaacggcgtgggatctgggaatgaggcagtgggtggagagagaatggggagacgacagaggatgaagggcagctgagtgtgtctgcgggagaaggaccaaagcaatctgggcggagcaggtggcagaggcagccgcggaggaggcccagggaactgacggggatgctcagccaggcccagaggatgcgccctggcagtcccggaaaacaccaggaaaacaagcaggaaccgtagctaggactggggtggccaggcccaggaaatccatgaagggcacagacagcgggtcctgctgccgccgccgatgcgactttggctgctgctgtcgcgcgtcccgccgggctcactacacgccttaccggtccggggacgcgacgcgaacccctcagtccccacggcagaccccgagccgggaaagacggcgcccggagccagccgggagctgggcagcagcggccgaggaggaagaagcagctgcggcggccacaccctggatgagagattattttgcagaggatgatggggagatggtacccagaacgagtcacacagcagcttttcttagtgacactaaagatcgaggccctccagtgcagtcacagatctggagaagtggtgaaaaggtcccgtttgtgcagacatattccttgagagcatttgagaaaccccctcaggtacagacccaggctcttcgagactttgagaagcacctcaatgacctgaagaaggagaacttcagcctcaagctgcgcatctacttcctggaggagcgcatgcaacagaagtatgaggccagccgggaggacatctacaagcggaacattgagctgaaggttgaagtggagagcttgaaacgagaactccaggacaagaaacagcatctggataaaacatgggctgatgtggagaatctcaacagtcagaatgaagctgagctccgacgccagtttgaggagcgacagcaggagacggagcatgtttatgagctcttggagaataagatccagcttctgcaggaggaatccaggctagcaaagaatgaagctgcgcggatggcagctctggtggaagcagagaaggagtgtaacctggagctctcagagaaactgaagggagtcaccaaaaactgggaagatgtaccaggagaccaggtcaagcccgaccaatacactgaggccctggcccagagggacaagtaggtgccttcggtgctctttttgtcgcttgtcttttgcccattctcaaggcatacagcagctgtcctgttccctttcaaggactgacagtaggagcttcactatttctaagactttatgggcccacaaccgaagacattcttttcagggttgaattttcagtggtatccattatgaaaactcacttcatggattcagtgggcaaatagcggcaagcaagagacatagattcacttattcagcaaacatttactgggcatgccacatgccagataccgggctaagtatctggcatgtgttacagaaacaaaagacctaattcttgtcaccaagaaacatgttacatgattttaataagttccctgatagaagagcatggggtgctctggggaaatattggagggtcatccattccacattaaaagagcaagttgtc

SEQ ID NO: 165391 - DNA, 874 bp, Homo sapiens
  Payload ID: 12558
  Gene Symbol: PDE4DIP
  Gene Name: phosphodiesterase 4D interacting protein
  ENST ID: ENST00000616206
  CDS Start-End: 163-636
agggagcagagctctctcttcgccgccgacgcagaaaggagctggggaggaaaaagctgctgccttttgcgctggagattcgtgggcaaggcttctcattttcccaggctgcttcccctcccgggtgaggagcgtcctgagactaaggaaagagcctggaaaatggagcagacctggacgagagattattttgcagaggatgatggggagatggtacccagaacgagtcacacagcagcttttcttagtgacactaaagatcgaggccctccagtgcagtcacagatctggagaagtggtgaaaaggtcccgtttgtgcagacatattccttgagagcatttgagaaaccccctcaggtacagacccaggctcttcgagactttgagaagacatggagagtttgcatggtaatcaagaggcttttgaagactaaacctccgaacagctgtgtggtgctggtgggggaagcaaggatgctaacaccccaaccccctcctttttttgttttttttttttcaccttttggatctgctgtgatgcagaaagggcaagcagagctgcagagctcctcaaaactgtgtggggtgctctccaaaggccagccagcctgcatgttccttttcattgagagatgactggaaatatagaagtgaggggtgtcacctccattgaaagaatgggtggcagatataaggcccaaagtccttttcttttagagtttagatctaatatgacagattagtccttatttctcgatgctgggaaacactgacagaaaccaagctaagacgcagggaaaaggccaataagagatagtttaaatctctctctgctatgtgtcaaataaaaagtaaataaagaggctacaaccca

SEQ ID NO: 165392 - DNA, 819 bp, Homo sapiens
  Payload ID: 12558
  Gene Symbol: PDE4DIP
  Gene Name: phosphodiesterase 4D interacting protein
  ENST ID: ENST00000621371
  CDS Start-End: 1-199
gtttgtgcagacatattccttgagagcatttgagaaaccccctcaggtacagacccaggctcttcgagactttgagaagcacctcaatgacctgaagaaggagaacttcagcctcaagctgcgcatctacttcctggaggagcgcatgcaacagaagtatgaggccagccgggaggacatctacaagcgggagaattgaagaactgaatcagagcctggctgcccaggagaggcttgtagaacagctatctcgggagaaacaacaactgctacatctgttggaggagccaactagcatggaagtgcagttatagttccactgtattctactcaaaccttgtctgccatgccaactgtcaccacagaagaaagacccttacaatgtggaaggtaaaagttcaatttctaagctctgggcctgttcttcagaggctaaagaatctcctcatctccagtgaagccatccctggaatccctcactgattcagctggagtatggaggagcttaagttctaaagacctattcacttcctttaattccacctatacttcacaactgagaataccacaaacagttgggccctagaagaaagaagagctcacagatcttgcacttctaggtctgaattgtccaagtgaagaacgctaatttactccacatcccacagataactatctctcaagtgatcccagtatgaaagtctggagtatgagtataatatactcactgtaatatctgagtacaggaagttcacttcagagtcttcattctctcaaataagacagacacttttgataaagattattttatttaattga

SEQ ID NO: 165393 - DNA, 582 bp, Homo sapiens
  Payload ID: 12558
  Gene Symbol: PDE4DIP
  Gene Name: phosphodiesterase 4D interacting protein
  ENST ID: ENST00000617454
  CDS Start-End: 171-582
aaaaaagcagggagcagagctctctcttcgccgccgacgcagaaaggagctggggaggaaaaagctgctgccttttgcgctggagattcgtgggcaaggcttctcattttcccaggctgcttcccctcccgggtgaggagcgtcctgagactaaggaaagagcctggaaaatggagcagacctggacgagagattattttgcagaggatgatggggagatggtacccagaacgagtcacacagcagcttttcttagtgacactaaagatcgaggccctccagtgcagtcacagatctggagaagtggtgaaaaggtcccgtttgtgcagacatattccttgagagcatttgagaaaccccctcagcaacaggtagctctgcttgatcttcagagtgctttattctgcagccaacttgaaatacagaagctccagagggtggtacgacagaaagagcgccaactggctgatgccaaacaatgtgtgcaatttgtagaggctgcagcacacgagagtgaacagcagaaagaggcttcttggaaacataaccaggaattgcgaaaagccttgcagcagctacaag

SEQ ID NO: 165394 - DNA, 2025 bp, Homo sapiens
  Payload ID: 12559
  Gene Symbol: PDE4D
  Gene Name: phosphodiesterase 4D, cAMP-specific
  Uniprot ID: Q08499
  ENST ID: ENST00000309641
  CDS Start-End: 1-648
atggctcagcagacaagcccggacactttaacagtacctgaagtggataatccgcattgtccaaacccgtggctgaacgaagaccttgtgaaatccttgcgagaaaacctgttgcagcatgagaagtccaagacagcgaggaaatcggtttctcccaagctctctccagtgatctctccgagaaattcccccaggcttctgcgcagaatgcttctcagcagcaacatccccaaacagcggcgtttcacggtggcacatacatgttttgatgtggacaatggcacatctgcgggacggagtcccttggatcccatgaccagcccaggatccgggctaattctccaagcaaattttgtccacagtcaacgacgggagtccttcctgtatcgatccgacagcgattatgacctctctccaaagtctatgtcccggaactcctccattgccagtgatatacacggagatgacttgattgtgactccatttgctcaggtcttggccagtctgcgaactgtacgaaacaactttgctgcattaactaatttgcaagatcgagcacctagcaaaagatcacccatgtgcaaccaaccatccatcaacaaagccaccataacagggctctataatgggatcattgcatttctctgattactaatgagaaggaggcctaccagaaactggccagcgagaccctggaggagctggactggtgtctggaccagctagagaccctacagaccaggcactccgtcagtgagatggcctccaacaagtttaaaaggatgcttaatcgggagctcacccatctctctgaaatgagtcggtctggaaatcaagtgtcagagtttatatcaaacacattcttagataagcaacatgaagtggaaattccttctccaactcagaaggaaaaggagaaaaagaaaagaccaatgtctcagatcagtggagtcaagaaattgatgcacagctctagtctgactaattcaagtatcccaaggtttggagttaaaactgaacaagaagatgtccttgccaaggaactagaagatgtgaacaaatggggtcttcatgttttcagaatagcagagttgtctggtaaccggcccttgactgttatcatgcacaccatttttcaggaacgggatttattaaaaacatttaaaattccagtagatactttaattacatatcttatgactctcgaagaccattaccatgctgatgtggcctatcacaacaatatccatgctgcagatgttgtccagtctactcatgtgctattatctacacctgctttggaggctgtgtttacagatttggagattcttgcagcaatttttgccagtgcaatacatgatgtagatcatcctggtgtgtccaatcaatttctgatcaatacaaactctgaacttgccttgatgtacaatgattcctcagtcttagagaaccatcatttggctgtgggctttaaattgcttcaggaagaaaactgtgacattttccagaatttgaccaaaaaacaaagacaatctttaaggaaaatggtcattgacatcgtacttgcaacagatatgtcaaaacacatgaatctactggctgatttgaagactatggttgaaactaagaaagtgacaagctctggagttcttcttcttgataattattccgataggattcaggttcttcagaatatggtgcactgtgcagatctgagcaacccaacaaagcctctccagctgtaccgccagtggacggaccggataatggaggagttcttccgccaaggagaccgagagagggaacgtggcatggagataagccccatgtgtgacaagcacaatgcttccgtggaaaaatcacaggtgggcttcatagactatattgttcatcccctctgggagacatgggcagacctcgtccaccctgacgcccaggatattttggacactttggaggacaatcgtgaatggtaccagagcacaatccctcagagcccctctcctgcacctgatgacccagagg

SEQ ID NO: 165395 - DNA, 2599 bp, Homo sapiens
  Payload ID: 12559
  Gene Symbol: PDE4D
  Gene Name: phosphodiesterase 4D, cAMP-specific
  Uniprot ID: Q08499
  ENST ID: ENST00000317118
  CDS Start-End: 397-1953
agttccttatttggtagcttttgacaggactagcctttcttgcaactaagcatcttgacatacattattcattaagccctggagctcgggagagaaagatgcagacccttagatctttagatattcctttatcacgtggattttctttattcagaatagttgctgaattttgtgccattctggagtcttacaaatggcatgtattcgatgggaagacggctggatgggatttaatgcgaggctttcttatgtatacttaattaccaaaaatctttaaaaactcatactctgcgtggcttgtggaggttgttaaagtgtcgagattttgaagctaaatacattttagagcttactatatatatacatatatatatatatacatataatcaatcaaaaatgcctgaagcaaactatttactgtcagtgtcttggggctacataaagtttaaaaggatgcttaatcgggagctcacccatctctctgaaatgagtcggtctggaaatcaagtgtcagagtttatatcaaacacattcttagataagcaacatgaagtggaaattccttctccaactcagaaggaaaaggagaaaaagaaaagaccaatgtctcagatcagtggagtcaagaaattgatgcacagctctagtctgactaattcaagtatcccaaggtttggagttaaaactgaacaagaagatgtccttgccaaggaactagaagatgtgaacaaatggggtcttcatgttttcagaatagcagagttgtctggtaaccggcccttgactgttatcatgcacaccatttttcaggaacgggatttattaaaaacatttaaaattccagtagatactttaattacatatcttatgactctcgaagaccattaccatgctgatgtggcctatcacaacaatatccatgctgcagatgttgtccagtctactcatgtgctattatctacacctgctttggaggctgtgtttacagatttggagattcttgcagcaatttttgccagtgcaatacatgatgtagatcatcctggtgtgtccaatcaatttctgatcaatacaaactctgaacttgccttgatgtacaatgattcctcagtcttagagaaccatcatttggctgtgggctttaaattgcttcaggaagaaaactgtgacattttccagaatttgaccaaaaaacaaagacaatctttaaggaaaatggtcattgacatcgtacttgcaacagatatgtcaaaacacatgaatctactggctgatttgaagactatggttgaaactaagaaagtgacaagctctggagttcttcttcttgataattattccgataggattcaggttcttcagaatatggtgcactgtgcagatctgagcaacccaacaaagcctctccagctgtaccgccagtggacggaccggataatggaggagttcttccgccaaggagaccgagagagggaacgtggcatggagataagccccatgtgtgacaagcacaatgcttccgtggaaaaatcacaggtgggcttcatagactatattgttcatcccctctgggagacatgggcagacctcgtccaccctgacgcccaggatattttggacactttggaggacaatcgtgaatggtaccagagcacaatccctcagagcccctctcctgcacctgatgacccagaggagggccggcagggtcaaactgagaaattccagtttgaactaactttagaggaagatggtgagtcagacacggaaaaggacagtggcagtcaagtggaagaagacactagctgcagtgactccaagactctttgtactcaagactcagagtctactgaaattccccttgatgaacaggttgaagaggaggcagtaggggaagaagaggaaagccagcctgaagcctgtgtcatagatgatcgttctcctgacacgtaacagtgcaaaaactttcatgccttttttttttttaagtagaaaaattgtttccaaagtgcatgtcacatgccacaaccacggtcacacctcactgtcatctgccaggacgtttgttgaacaaaactgaccttgactactcagtccagcgctcaggaatatcgtaaccagttttttcacctccatgtcatccgagcaaggtggacatcttcacgaacagcgtttttaacaagatttcagcttggtagagctgacaaagcagataaaatctactccaaattattttcaagagagtgtgactcatcaggcagcccaaaagtttattggacttggggtttctattcctttttatttgtttgcaatattttcagaagaaaggcattgcacagagtgaacttaatggacgaagcaacaaatatgtcaagaacaggacatagcacgaatctgttaccagtaggaggaggatgagccacagaaattgcataattttctaatttcaagtcttcctgatacatgactgaatagtgtggttcagtgagctgcactgacctctacattttgtatgatatgtaaaacagattttttgtagagcttacttttattattaaatgtattgaggtattatatttaaaaaaaactatgttcagaa

SEQ ID NO: 165396 - DNA, 8232 bp, Homo sapiens
  Payload ID: 12559
  Gene Symbol: PDE4D
  Gene Name: phosphodiesterase 4D, cAMP-specific
  Uniprot ID: Q08499
  ENST ID: ENST00000340635
  CDS Start-End: 177-2606
gggccccctctcggtagccctgaggctctggcgccttcaagtgagaagctaagcaccagcctctgctgggctgcagaagcggcggcggcggcagcagcagcagcagcatcaggaaggcgctcgggccagcgcggtgaacccgggctgggcagcaggtcgcggagccgcgagccaggatggaggcagagggcagcagcgcgccggcccgggcgggcagcggagagggcagcgacagcgccggcggggccacgctcaaagcccccaagcatctctggaggcacgagcagcaccaccagtacccgctccggcagccccagttccgcctcctgcatccccatcaccacctgcccccgccgccgccaccctcgccccagccccagccccagtgtccgctacagccgccgccgccgccccccctgccgccgcccccgccgccgcccggggctgcccgcggccgctacgcctcgagcggggccaccggccgcgtccggcatcgcggctactcggacaccgagcgctacctgtactgtcgcgccatggaccgcacctcctacgcggtggagaccggccaccggcccggcctgaagaaatccaggatgtcctggccctcctcgttccagggactcaggcgttttgatgtggacaatggcacatctgcgggacggagtcccttggatcccatgaccagcccaggatccgggctaattctccaagcaaattttgtccacagtcaacgacgggagtccttcctgtatcgatccgacagcgattatgacctctctccaaagtctatgtcccggaactcctccattgccagtgatatacacggagatgacttgattgtgactccatttgctcaggtcttggccagtctgcgaactgtacgaaacaactttgctgcattaactaatttgcaagatcgagcacctagcaaaagatcacccatgtgcaaccaaccatccatcaacaaagccaccataacagaggaggcctaccagaaactggccagcgagaccctggaggagctggactggtgtctggaccagctagagaccctacagaccaggcactccgtcagtgagatggcctccaacaagtttaaaaggatgcttaatcgggagctcacccatctctctgaaatgagtcggtctggaaatcaagtgtcagagtttatatcaaacacattcttagataagcaacatgaagtggaaattccttctccaactcagaaggaaaaggagaaaaagaaaagaccaatgtctcagatcagtggagtcaagaaattgatgcacagctctagtctgactaattcaagtatcccaaggtttggagttaaaactgaacaagaagatgtccttgccaaggaactagaagatgtgaacaaatggggtcttcatgttttcagaatagcagagttgtctggtaaccggcccttgactgttatcatgcacaccatttttcaggaacgggatttattaaaaacatttaaaattccagtagatactttaattacatatcttatgactctcgaagaccattaccatgctgatgtggcctatcacaacaatatccatgctgcagatgttgtccagtctactcatgtgctattatctacacctgctttggaggctgtgtttacagatttggagattcttgcagcaatttttgccagtgcaatacatgatgtagatcatcctggtgtgtccaatcaatttctgatcaatacaaactctgaacttgccttgatgtacaatgattcctcagtcttagagaaccatcatttggctgtgggctttaaattgcttcaggaagaaaactgtgacattttccagaatttgaccaaaaaacaaagacaatctttaaggaaaatggtcattgacatcgtacttgcaacagatatgtcaaaacacatgaatctactggctgatttgaagactatggttgaaactaagaaagtgacaagctctggagttcttcttcttgataattattccgataggattcaggttcttcagaatatggtgcactgtgcagatctgagcaacccaacaaagcctctccagctgtaccgccagtggacggaccggataatggaggagttcttccgccaaggagaccgagagagggaacgtggcatggagataagccccatgtgtgacaagcacaatgcttccgtggaaaaatcacaggtgggcttcatagactatattgttcatcccctctgggagacatgggcagacctcgtccaccctgacgcccaggatattttggacactttggaggacaatcgtgaatggtaccagagcacaatccctcagagcccctctcctgcacctgatgacccagaggagggccggcagggtcaaactgagaaattccagtttgaactaactttagaggaagatggtgagtcagacacggaaaaggacagtggcagtcaagtggaagaagacactagctgcagtgactccaagactctttgtactcaagactcagagtctactgaaattccccttgatgaacaggttgaagaggaggcagtaggggaagaagaggaaagccagcctgaagcctgtgtcatagatgatcgttctcctgacacgtaacagtgcaaaaactttcatgccttttttttttttaagtagaaaaattgtttccaaagtgcatgtcacatgccacaaccacggtcacacctcactgtcatctgccaggacgtttgttgaacaaaactgaccttgactactcagtccagcgctcaggaatatcgtaaccagttttttcacctccatgtcatccgagcaaggtggacatcttcacgaacagcgtttttaacaagatttcagcttggtagagctgacaaagcagataaaatctactccaaattattttcaagagagtgtgactcatcaggcagcccaaaagtttattggacttggggtttctattcctttttatttgtttgcaatattttcagaagaaaggcattgcacagagtgaacttaatggacgaagcaacaaatatgtcaagaacaggacatagcacgaatctgttaccagtaggaggaggatgagccacagaaattgcataattttctaatttcaagtcttcctgatacatgactgaatagtgtggttcagtgagctgcactgacctctacattttgtatgatatgtaaaacagattttttgtagagcttacttttattattaaatgtattgaggtattatatttaaaaaaaactatgttcagaacttcatctgccactggttatttttttctaaggagtaacttgcaagttttcagtacaaatctgtgctacactggataaaaatctaatttatgaattttacttgcaccttatagttcatagcaattaactgatttgtagtgattcattgtttgttttatataccaatgacttccatattttaaaagagaaaaacaactttatgttgcaggaaaccctttttgtaagtctttattatttactttgcattttgtttcactctttccagataagcagagttgctcttcaccagtgtttttcttcatgtgcaaagtgactatttgttctataatacttttatgtgtgttatatcaaatgtgtcttaagcttcatgcaaactcagtcatcagttcgtgttgtctgaagcaagtgggagatatataaatacccagtagctaaaatggtcagtcttttttagatgttttcctacttagtatctcctaataacgttttgctgtgtcactagatgttcatttcacaagtgcatgtctttctaataatccacacatttcatgctctaataatccacacatttcatgctcatttttattgtttttacagccagttatagtaagaaaaaggtttttccccttgtgctgctttataatttagcgtgtgtctgaaccttatccatgtttgctagatgaggtcttgtcaaatatatcactaccattgtcaccggtgaaaagaaacaggtagttaagttagggttaacattcatttcaaccacgaggttgtatatcatgactagcttttactcttggtttacagagaaaagttaaacagccaactaggcagtttttaagaatattaacaatatattaacaaacaccaatacaactaatcctatttggttttaatgatttcaccatgggattaagaactatatcaggaacatccctgagaaacggttttaagtgtagcaactactcttccttaatggacagccacataacgtgtaggaagtcctttatcacttatcctcgatccataagcatatcttgcagaggggaactacttctttaaacacatggagggaaagaagatgatgccactggcaccagagggttagtactgtgatgcatcctaaaatatttattatattggtaaaaattctggttaaataaaaaattagagatcactcttggctgatttcagcaccaggaactgtattacagttttagagattaattcctagtgtttacctgattatagcagttggcatcatggggcatttaattctgactttatccccacgtcagccttaataaagtcttctttaccttctctatgaagactttaaagcccaaataatcatttttcacattgatattcaagaattgagatagatagaagccaaagtgggtatctgacaagtggaaaatcaaacgtttaagaagaattacaactctgaaaagcatttatatgtggaacttctcaaggagcctcctggggactggaaagtaagtcatcagccaggcaaatgactcatgctgaagagagtccccatttcagtcccctgagatctagctgatgcttagatcctttgaaataaaaattatgtctttataactctgatcttttacataaagcagaagaggaatcaactagttaattgcaaggtttctactctgtttcctctgtaaagatcagatggtaatctttcaaataagaaaaaaataaagacgtatgtttgaccaagtagtttcacaagaatatttgggaacttgtttcttttaattttatttgtccctgagtgaagtctagaaagaaaggtaaagagtctagagtttattcctctttccaaaacattctcattcctctcctccctacacttagtatttcccccacagagtgcctagaatcttaataatgaataaaataaaaagcagcaatatgtcattaacaaatccagacctgaaagggtaaagggtttataactgcactaataaagagaggctctttttttttcttccagtttgttggtttttaatggtaccgtgttgtaaagatacccactaatggacaatcaaattgcagaaaaggctcaatatccaagagacagggactaatgcactgtacaatctgcttatccttgcccttctctcttgccaaagtgtgcttcagaaatatatactgctttaaaaaagaataaaagaatatccttttacaagtggctttacatttcctaaaatgccataagaaaatgcaatatctgggtactgtatggggaaaaaaatgtccaagtttgtgtaaaaccagtgcatttcagcttgcaagttactgaacacaataatgctgttttaattttgttttatatcagttaaaattcacaataatgtagatagaacaaattacagacaaggaaagaaaaaacttgaatgaaatggattttacagaaagctttatgataatttttgaatgcattatttattttttgtgccatgcattttttttctcaccaaatgaccttacctgtaatacagtcttgtttgtctgtttacaaccatgtatttattgcaatgtacatactgtaatgttaattgtaaattatctgttcttattaaaacatcatcccatgatgggatggtgttgatatatttggaaactcttggtgagagaatgaatggtgtgtatacatactctgtacatttttcttttctcctgtaatatagtcttgtcaccttagagcttgtttatggaagattcaagaaaactataaaatacttaaagatatataaatttaaaaaaacatagctgcaggtctttggtcccagggctgtgccttaactttaaccaatattttcttctgttttgctgcatttgaaaggtaacagtggagctagggctgggcattttacatccaggcttttaattgattagaattctgccaataggtggattttacaaaaccacagacaacctctgaaagattctgagacccttttgagacagaagctcttaagtacttcttgccagggagcagcactgcatgtgtgatggttgtttgccatctgttgatcaggaactacttcagctacttgcatttgattatttcctttttttttttttttaactcggaaacacaactggggaaatatattctttcccagtgattataaacaatctttttcttttttttaagtccttttggcttctagagctcataggaaaatggacttgatttgaaattggagccagagtttactcgtgttggttatctattcatcagcttcctgacatgttaagagaatacattaaagagaaaatactgttttttaatcctaaaatttttcttccactaagataaaccaaatgtccttacatatatgtaaacccatctatttaaacgcaaaggtgggttgatgtcagtttacatagcagaaagcattcactatcctctaagatttgtttctgcaaaactttcattgctttagaattttaaaatttcaccttgtacaatggccagcccctaaagcaggaaacatttataatggattatatggaaacatcctcccagtacttgcccagcccttgaatcatgtggcttttcagtgaaaggaaagattctttttctaggaaaaatgagcctattttattttattttattttattttttgacacaaactgtagattttagcagccctggcccaaaggaatttgattacttttgttttaaacagtacaaaggggacactataattacaaaaacatccttaactgatttgagttgtttttatttctttggatatattttcagagtggtaaattgtgtgtgagaattacaaatgattattcttttagtggtttcttagcctctcttacagcccacggggatagtactgtacatcaataccttcatatgaaatttttatatgcaatgaaaataaaagcatgggttgattctgcctatttatgactcaatcttttacaaataaaagattattcattttaaattatagttcaatcagcatgtctcttaggatactgaacgtggttgaaatgaaaggatagtgacatcataagttagtactgatattcataaccaaataaagccaacttgagtaattttgctacattaaaaattaccaaaattacttagatggcctataagattaagcatggtgttttctaagcaagctttgaaaggggccttccatacttacttaattgaatattctgggatattgaaaattattcagatacttgacaattatttttggttacctactccgcaaactacaaagttttaaggactcaacaataagttaatgagacacagtgtttgctttcatggagcttacagtctggaggggacaaaggcttaaacaatactcatataattatatatgtgatcagtacaatgaaggagctcagtggggtaaataagcaggaacctgaacttgatctgttccggagggccacagaaggcttccttgaggccttgagaaagtgatttgcatctgagttctgaaggattgtaagaggtaactagggaaaaagttgacaggaagaggaaggggatccagacaagaaacatttgcaaagatcttgaggcataaatgagcttgagacatctggagaaactgaggaaaagtgagagagtaggcagggcctggagccgcagagccattgctaaccatcctgtgtgagatatcccccattctgtagctttattctcataaccctgctcaattttctttataacacttctcacagatttatatacgtgtttgtttttgttatctgtctctcccaccagaccacagctccatgagagcaaggtctttgcttaccaatatatcactagcacttaaaactatgcctggtacacagtaggttcttaatatgtgttgaatatagccatcaaattgatattggatataattcaatctgataagatattttgagatattaaagagtttttaacttgataccataaaaa

SEQ ID NO: 165397 - DNA, 2969 bp, Homo sapiens
  Payload ID: 12559
  Gene Symbol: PDE4D
  Gene Name: phosphodiesterase 4D, cAMP-specific
  Uniprot ID: Q08499
  ENST ID: ENST00000358923
  CDS Start-End: 554-2077
gtggtggccgcgcacccggccgcggctgattcattcacttcaagtgccgtgcagaaggctcggcaggcggggcgggcgtggggccgcggctccgggttggggaccgaggagatccggctgtggaccagacgctcctctgcggggcgggcacccaagcgcgctcgccaccccctcgccatccgctagagccgggctcctggactgggactcgggcccgccgcacagttgaaaagtcgcatagtggtttttccgctcgcgtcgctgtgtgaaagttggctcgccgctctttgcacgccctccctggaggccgacccgagacgccaagctggagagaccgtgcctccccgaggccggccgccccgcgagcacagcctccgcccccgttgcactgccgggctgggcaatatgaaggagcagccctcatgtgccggcaccgggcatccgagcatggcgggaggaggcctaccagaaactggccagcgagaccctggaggagctggactggtgtctggaccagctagagaccctacagaccaggcactccgtcagtgagatggcctccaacaagtttaaaaggatgcttaatcgggagctcacccatctctctgaaatgagtcggtctggaaatcaagtgtcagagtttatatcaaacacattcttagataagcaacatgaagtggaaattccttctccaactcagaaggaaaaggagaaaaagaaaagaccaatgtctcagatcagtggagtcaagaaattgatgcacagctctagtctgactaattcaagtatcccaaggtttggagttaaaactgaacaagaagatgtccttgccaaggaactagaagatgtgaacaaatggggtcttcatgttttcagaatagcagagttgtctggtaaccggcccttgactgttatcatgcacaccatttttcaggaacgggatttattaaaaacatttaaaattccagtagatactttaattacatatcttatgactctcgaagaccattaccatgctgatgtggcctatcacaacaatatccatgctgcagatgttgtccagtctactcatgtgctattatctacacctgctttggaggctgtgtttacagatttggagattcttgcagcaatttttgccagtgcaatacatgatgtagatcatcctggtgtgtccaatcaatttctgatcaatacaaactctgaacttgccttgatgtacaatgattcctcagtcttagagaaccatcatttggctgtgggctttaaattgcttcaggaagaaaactgtgacattttccagaatttgaccaaaaaacaaagacaatctttaaggaaaatggtcattgacatcgtacttgcaacagatatgtcaaaacacatgaatctactggctgatttgaagactatggttgaaactaagaaagtgacaagctctggagttcttcttcttgataattattccgataggattcaggttcttcagaatatggtgcactgtgcagatctgagcaacccaacaaagcctctccagctgtaccgccagtggacggaccggataatggaggagttcttccgccaaggagaccgagagagggaacgtggcatggagataagccccatgtgtgacaagcacaatgcttccgtggaaaaatcacaggtgggcttcatagactatattgttcatcccctctgggagacatgggcagacctcgtccaccctgacgcccaggatattttggacactttggaggacaatcgtgaatggtaccagagcacaatccctcagagcccctctcctgcacctgatgacccagaggagggccggcagggtcaaactgagaaattccagtttgaactaactttagaggaagatggtgagtcagacacggaaaaggacagtggcagtcaagtggaagaagacactagctgcagtgactccaagactctttgtactcaagactcagagtctactgaaattccccttgatgaacaggttgaagaggaggcagtaggggaagaagaggaaagccagcctgaagcctgtgtcatagatgatcgttctcctgacacgtaacagtgcaaaaactttcatgccttttttttttttaagtagaaaaattgtttccaaagtgcatgtcacatgccacaaccacggtcacacctcactgtcatctgccaggacgtttgttgaacaaaactgaccttgactactcagtccagcgctcaggaatatcgtaaccagttttttcacctccatgtcatccgagcaaggtggacatcttcacgaacagcgtttttaacaagatttcagcttggtagagctgacaaagcagataaaatctactccaaattattttcaagagagtgtgactcatcaggcagcccaaaagtttattggacttggggtttctattcctttttatttgtttgcaatattttcagaagaaaggcattgcacagagtgaacttaatggacgaagcaacaaatatgtcaagaacaggacatagcacgaatctgttaccagtaggaggaggatgagccacagaaattgcataattttctaatttcaagtcttcctgatacatgactgaatagtgtggttcagtgagctgcactgacctctacattttgtatgatatgtaaaacagattttttgtagagcttacttttattattaaatgtattgaggtattatatttaaaaaaaactatgttcagaacttcatctgccactggttatttttttctaaggagtaacttgcaagttttcagtacaaatctgtgctacactggataaaaatctaatttatgaattttacttgcaccttatagttcatagcaattaactgatttgtagtgattcattgtttgttttatataccaatgacttccatattttaaaagagaaaaacaactttatgttgcaggaaaccctttttgtaagtctttattatttactttgcatt

SEQ ID NO: 165398 - DNA, 3122 bp, Homo sapiens
  Payload ID: 12559
  Gene Symbol: PDE4D
  Gene Name: phosphodiesterase 4D, cAMP-specific
  Uniprot ID: Q08499
  ENST ID: ENST00000360047
  CDS Start-End: 125-2146
caatacttgttgcaataattgcccacgatagctgctcaaacaagagagttggaattcatctgtaaaaatcactacatgtaacgtaggagacaagaaaaatattaatgacagaagatctgcgaacatgatgcacgtgaataattttccctttagaaggcattcctggatatgttttgatgtggacaatggcacatctgcgggacggagtcccttggatcccatgaccagcccaggatccgggctaattctccaagcaaattttgtccacagtcaacgacgggagtccttcctgtatcgatccgacagcgattatgacctctctccaaagtctatgtcccggaactcctccattgccagtgatatacacggagatgacttgattgtgactccatttgctcaggtcttggccagtctgcgaactgtacgaaacaactttgctgcattaactaatttgcaagatcgagcacctagcaaaagatcacccatgtgcaaccaaccatccatcaacaaagccaccataacagaggaggcctaccagaaactggccagcgagaccctggaggagctggactggtgtctggaccagctagagaccctacagaccaggcactccgtcagtgagatggcctccaacaagtttaaaaggatgcttaatcgggagctcacccatctctctgaaatgagtcggtctggaaatcaagtgtcagagtttatatcaaacacattcttagataagcaacatgaagtggaaattccttctccaactcagaaggaaaaggagaaaaagaaaagaccaatgtctcagatcagtggagtcaagaaattgatgcacagctctagtctgactaattcaagtatcccaaggtttggagttaaaactgaacaagaagatgtccttgccaaggaactagaagatgtgaacaaatggggtcttcatgttttcagaatagcagagttgtctggtaaccggcccttgactgttatcatgcacaccatttttcaggaacgggatttattaaaaacatttaaaattccagtagatactttaattacatatcttatgactctcgaagaccattaccatgctgatgtggcctatcacaacaatatccatgctgcagatgttgtccagtctactcatgtgctattatctacacctgctttggaggctgtgtttacagatttggagattcttgcagcaatttttgccagtgcaatacatgatgtagatcatcctggtgtgtccaatcaatttctgatcaatacaaactctgaacttgccttgatgtacaatgattcctcagtcttagagaaccatcatttggctgtgggctttaaattgcttcaggaagaaaactgtgacattttccagaatttgaccaaaaaacaaagacaatctttaaggaaaatggtcattgacatcgtacttgcaacagatatgtcaaaacacatgaatctactggctgatttgaagactatggttgaaactaagaaagtgacaagctctggagttcttcttcttgataattattccgataggattcaggttcttcagaatatggtgcactgtgcagatctgagcaacccaacaaagcctctccagctgtaccgccagtggacggaccggataatggaggagttcttccgccaaggagaccgagagagggaacgtggcatggagataagccccatgtgtgacaagcacaatgcttccgtggaaaaatcacaggtgggcttcatagactatattgttcatcccctctgggagacatgggcagacctcgtccaccctgacgcccaggatattttggacactttggaggacaatcgtgaatggtaccagagcacaatccctcagagcccctctcctgcacctgatgacccagaggagggccggcagggtcaaactgagaaattccagtttgaactaactttagaggaagatggtgagtcagacacggaaaaggacagtggcagtcaagtggaagaagacactagctgcagtgactccaagactctttgtactcaagactcagagtctactgaaattccccttgatgaacaggttgaagaggaggcagtaggggaagaagaggaaagccagcctgaagcctgtgtcatagatgatcgttctcctgacacgtaacagtgcaaaaactttcatgccttttttttttttaagtagaaaaattgtttccaaagtgcatgtcacatgccacaaccacggtcacacctcactgtcatctgccaggacgtttgttgaacaaaactgaccttgactactcagtccagcgctcaggaatatcgtaaccagttttttcacctccatgtcatccgagcaaggtggacatcttcacgaacagcgtttttaacaagatttcagcttggtagagctgacaaagcagataaaatctactccaaattattttcaagagagtgtgactcatcaggcagcccaaaagtttattggacttggggtttctattcctttttatttgtttgcaatattttcagaagaaaggcattgcacagagtgaacttaatggacgaagcaacaaatatgtcaagaacaggacatagcacgaatctgttaccagtaggaggaggatgagccacagaaattgcataattttctaatttcaagtcttcctgatacatgactgaatagtgtggttcagtgagctgcactgacctctacattttgtatgatatgtaaaacagattttttgtagagcttacttttattattaaatgtattgaggtattatatttaaaaaaaactatgttcagaacttcatctgccactggttatttttttctaaggagtaacttgcaagttttcagtacaaatctgtgctacactggataaaaatctaatttatgaattttacttgcaccttatagttcatagcaattaactgatttgtagtgattcattgtttgttttatataccaatgacttccatattttaaaagagaaaaacaactttatgttgcaggaaaccctttttgtaagtctttattatttactttgcattttgtttcactctttccagataagcagagttgctcttcaccagtgtttttcttcatgtgcaaagtgactatttgttctataatac

SEQ ID NO: 165399 - DNA, 2294 bp, Homo sapiens
  Payload ID: 12559
  Gene Symbol: PDE4D
  Gene Name: phosphodiesterase 4D, cAMP-specific
  Uniprot ID: Q08499
  ENST ID: ENST00000405755
  CDS Start-End: 130-2193
actgcacaaaggaaatgccctcactcagctacaagtgcctcctgctccgtgcggggcctcagggccccagagccccgcaccagctctgacttctcgtggttcctggggatcttggcatcgtccttaaaaatggcttttgtttgggatcctctgggagccacggtgccaggaccatctacaagagccaaatcaagattgcgtttctcaaagtcctacagttttgatgtggacaatggcacatctgcgggacggagtcccttggatcccatgaccagcccaggatccgggctaattctccaagcaaattttgtccacagtcaacgacgggagtccttcctgtatcgatccgacagcgattatgacctctctccaaagtctatgtcccggaactcctccattgccagtgatatacacggagatgacttgattgtgactccatttgctcaggtcttggccagtctgcgaactgtacgaaacaactttgctgcattaactaatttgcaagatcgagcacctagcaaaagatcacccatgtgcaaccaaccatccatcaacaaagccaccataacagaggaggcctaccagaaactggccagcgagaccctggaggagctggactggtgtctggaccagctagagaccctacagaccaggcactccgtcagtgagatggcctccaacaagtttaaaaggatgcttaatcgggagctcacccatctctctgaaatgagtcggtctggaaatcaagtgtcagagtttatatcaaacacattcttagataagcaacatgaagtggaaattccttctccaactcagaaggaaaaggagaaaaagaaaagaccaatgtctcagatcagtggagtcaagaaattgatgcacagctctagtctgactaattcaagtatcccaaggtttggagttaaaactgaacaagaagatgtccttgccaaggaactagaagatgtgaacaaatggggtcttcatgttttcagaatagcagagttgtctggtaaccggcccttgactgttatcatgcacaccatttttcaggaacgggatttattaaaaacatttaaaattccagtagatactttaattacatatcttatgactctcgaagaccattaccatgctgatgtggcctatcacaacaatatccatgctgcagatgttgtccagtctactcatgtgctattatctacacctgctttggaggctgtgtttacagatttggagattcttgcagcaatttttgccagtgcaatacatgatgtagatcatcctggtgtgtccaatcaatttctgatcaatacaaactctgaacttgccttgatgtacaatgattcctcagtcttagagaaccatcatttggctgtgggctttaaattgcttcaggaagaaaactgtgacattttccagaatttgaccaaaaaacaaagacaatctttaaggaaaatggtcattgacatcgtacttgcaacagatatgtcaaaacacatgaatctactggctgatttgaagactatggttgaaactaagaaagtgacaagctctggagttcttcttcttgataattattccgataggattcaggttcttcagaatatggtgcactgtgcagatctgagcaacccaacaaagcctctccagctgtaccgccagtggacggaccggataatggaggagttcttccgccaaggagaccgagagagggaacgtggcatggagataagccccatgtgtgacaagcacaatgcttccgtggaaaaatcacaggtgggcttcatagactatattgttcatcccctctgggagacatgggcagacctcgtccaccctgacgcccaggatattttggacactttggaggacaatcgtgaatggtaccagagcacaatccctcagagcccctctcctgcacctgatgacccagaggagggccggcagggtcaaactgagaaattccagtttgaactaactttagaggaagatggtgagtcagacacggaaaaggacagtggcagtcaagtggaagaagacactagctgcagtgactccaagactctttgtactcaagactcagagtctactgaaattccccttgatgaacaggttgaagaggaggcagtaggggaagaagaggaaagccagcctgaagcctgtgtcatagatgatcgttctcctgacacgtaacagtgcaaaaactttcatgccttttttttttttaagtagaaaaattgtttccaaagtgcatgtcacatgccacaaccacggtcacacctcactgtcatctg

SEQ ID NO: 165400 - DNA, 1430 bp, Homo sapiens
  Payload ID: 12559
  Gene Symbol: PDE4D
  Gene Name: phosphodiesterase 4D, cAMP-specific
  ENST ID: ENST00000505453
  CDS Start-End: 164-1430
gacagaagatctgcgaacatgatgcacgtgaataattttccctttagaaggcattcctggatatgaggaggcctaccagaaactggccagcgagaccctggaggagctggactggtgtctggaccagctagagaccctacagaccaggcactccgtcagtgagatggcctccaacaagtttaaaaggatgcttaatcgggagctcacccatctctctgaaatgagtcggtctggaaatcaagtgtcagagtttatatcaaacacattcttagataagcaacatgaagtggaaattccttctccaactcagaaggaaaaggagaaaaagaaaagaccaatgtctcagatcagtggagtcaagaaattgatgcacagctctagtctgactaattcaagtatcccaaggtttggagttaaaactgaacaagaagatgtccttgccaaggaactagaagatgtgaacaaatggggtcttcatgttttcagaatagcagagttgtctggtaaccggcccttgactgttatcatgcacaccatttttcaggaacgggatttattaaaaacatttaaaattccagtagatactttaattacatatcttatgactctcgaagaccattaccatgctgatgtggcctatcacaacaatatccatgctgcagatgttgtccagtctactcatgtgctattatctacacctgctttggaggctgtgtttacagatttggagattcttgcagcaatttttgccagtgcaatacatgatgtagatcatcctggtgtgtccaatcaatttctgatcaatacaaactctgaacttgccttgatgtacaatgattcctcagtcttagagaaccatcatttggctgtgggctttaaattgcttcaggaagaaaactgtgacattttccagaatttgaccaaaaaacaaagacaatctttaaggaaaatggtcattgacatcgtacttgcaacagatatgtcaaaacacatgaatctactggctgatttgaagactatggttgaaactaagaaagtgacaagctctggagttcttcttcttgataattattccgataggattcaggttcttcagaatatggtgcactgtgcagatctgagcaacccaacaaagcctctccagctgtaccgccagtggacggaccggataatggaggagttcttccgccaaggagaccgagagagggaacgtggcatggagataagccccatgtgtgacaagcacaatgcttccgtggaaaaatcacaggtgggcttcatagactatattgttcatcccctctgggagacatgggcagacctcgtccaccctgacgcccaggatattttggacactttggaggacaatcgtgaatggtaccagagcacaatccctcagagcccctctcctgcacctgatgacccagagg

SEQ ID NO: 165401 - DNA, 494 bp, Homo sapiens
  Payload ID: 12559
  Gene Symbol: PDE4D
  Gene Name: phosphodiesterase 4D, cAMP-specific
  ENST ID: ENST00000514552
  CDS Start-End: 271-494
ggtcacacagagagtacgtgtcaaaggaaactcaaaagaacacattttctcagtgattacaggttttagagaagaggaacaatgcttcctctgagcctgaagaaaagaatgaaataagggctgcaagggaacatgcaggtttcacactacaggagcttgtctgtcttggtgcaagtgggagcattccagttggcttttgagtggatacgtgcagtgagatcattgacactggaaacactagttcccattttaattacttaaaacaccacgatgaaaagaaatacctgtgatttgctttctcggagcaaaagtgcctctgaggaaacactacattccagtaatgaagaggaagaccctttccgcggaatggaaccctatcttgtccggagactttcatgtcgcaatattcagcttccccctctcgccttcagacagttggaacaagctgacttgaaaagtgaatcagagaacattcaacgaccaaccagcctccc

SEQ ID NO: 165402 - DNA, 2478 bp, Homo sapiens
  Payload ID: 12559
  Gene Symbol: PDE4D
  Gene Name: phosphodiesterase 4D, cAMP-specific
  Uniprot ID: Q08499
  ENST ID: ENST00000502484
  CDS Start-End: 225-2471
aagcacgagtcctatagttggcgtaccctgaggcctgccagttcctgccttaatgcatatgtagtcgtaattgagttctgacacggccttggatgtttctgtcctaaatagctgacattgcatcttcaagactgtcattccagttggcttttgagtggatacgtgcagtgagatcattgacactggaaacactagttcccattttaattacttaaaacaccacgatgaaaagaaatacctgtgatttgctttctcggagcaaaagtgcctctgaggaaacactacattccagtaatgaagaggaagaccctttccgcggaatggaaccctatcttgtccggagactttcatgtcgcaatattcagcttccccctctcgccttcagacagttggaacaagctgacttgaaaagtgaatcagagaacattcaacgaccaaccagcctccccctgaagattctgccgctgattgctatcacttctgcagaatccagtggttttgatgtggacaatggcacatctgcgggacggagtcccttggatcccatgaccagcccaggatccgggctaattctccaagcaaattttgtccacagtcaacgacgggagtccttcctgtatcgatccgacagcgattatgacctctctccaaagtctatgtcccggaactcctccattgccagtgatatacacggagatgacttgattgtgactccatttgctcaggtcttggccagtctgcgaactgtacgaaacaactttgctgcattaactaatttgcaagatcgagcacctagcaaaagatcacccatgtgcaaccaaccatccatcaacaaagccaccataacagaggaggcctaccagaaactggccagcgagaccctggaggagctggactggtgtctggaccagctagagaccctacagaccaggcactccgtcagtgagatggcctccaacaagtttaaaaggatgcttaatcgggagctcacccatctctctgaaatgagtcggtctggaaatcaagtgtcagagtttatatcaaacacattcttagataagcaacatgaagtggaaattccttctccaactcagaaggaaaaggagaaaaagaaaagaccaatgtctcagatcagtggagtcaagaaattgatgcacagctctagtctgactaattcaagtatcccaaggtttggagttaaaactgaacaagaagatgtccttgccaaggaactagaagatgtgaacaaatggggtcttcatgttttcagaatagcagagttgtctggtaaccggcccttgactgttatcatgcacaccatttttcaggaacgggatttattaaaaacatttaaaattccagtagatactttaattacatatcttatgactctcgaagaccattaccatgctgatgtggcctatcacaacaatatccatgctgcagatgttgtccagtctactcatgtgctattatctacacctgctttggaggctgtgtttacagatttggagattcttgcagcaatttttgccagtgcaatacatgatgtagatcatcctggtgtgtccaatcaatttctgatcaatacaaactctgaacttgccttgatgtacaatgattcctcagtcttagagaaccatcatttggctgtgggctttaaattgcttcaggaagaaaactgtgacattttccagaatttgaccaaaaaacaaagacaatctttaaggaaaatggtcattgacatcgtacttgcaacagatatgtcaaaacacatgaatctactggctgatttgaagactatggttgaaactaagaaagtgacaagctctggagttcttcttcttgataattattccgataggattcaggttcttcagaatatggtgcactgtgcagatctgagcaacccaacaaagcctctccagctgtaccgccagtggacggaccggataatggaggagttcttccgccaaggagaccgagagagggaacgtggcatggagataagccccatgtgtgacaagcacaatgcttccgtggaaaaatcacaggtgggcttcatagactatattgttcatcccctctgggagacatgggcagacctcgtccaccctgacgcccaggatattttggacactttggaggacaatcgtgaatggtaccagagcacaatccctcagagcccctctcctgcacctgatgacccagaggagggccggcagggtcaaactgagaaattccagtttgaactaactttagaggaagatggtgagtcagacacggaaaaggacagtggcagtcaagtggaagaagacactagctgcagtgactccaagactctttgtactcaagactcagagtctactgaaattccccttgatgaacaggttgaagaggaggcagtaggggaagaagaggaaagccagcctgaagcctgtgtcatagatgatcgttctcctgacacgtaacagtgca

SEQ ID NO: 165403 - DNA, 2809 bp, Homo sapiens
  Payload ID: 12559
  Gene Symbol: PDE4D
  Gene Name: phosphodiesterase 4D, cAMP-specific
  ENST ID: ENST00000509368
  CDS Start-End: 252-305
aaagagaggctttctgtgtcctgggaatgttctgctaagaagacagtgatgataatagttaccactgaataagtactgacatgtgaggaactaccaggatccctgctttacaggaagaagccgaggctcagaagtacacttgtctaaggtcccagaacaagtcattccagttggcttttgagtggatacgtgcagtgagatcattgacactggaaacactagttcccattttaattacttaaaacaccacgatgaaaagaaatacctgtgatttgctttctcggagcaaaagtgacaaaaagtaagagatgtggagaggaagacaggaatactagggaaaagtttctctttctccaatcactcactctggaggcagctagctgtcaactcacaaagacactcaagcagcctatggaagaaggccacatggtaaaatatggaggcctccagccaacagtcagcaaggaactgagacaagtcaacaaccatgcctctgaggaaacactacattccagtaatgaagaggaagaccctttccgcggaatggaaccctatcttgtccggagactttcatgtcgcaatattcagcttccccctctcgccttcagacagttggaacaagctgacttgaaaagtgaatcagagaacattcaacgaccaaccagcctccccctgaagattctgccgctgattgctatcacttctgcagaatccagtgggtgagtgccctcagatgtcatttccccattttatattttagatggtgattgttgtctgtggtcttttgagtttttgtggctcattgcttgatttgagtgggagaacaatggggtttctagagtcaaaaaaaaaaggatgaatttctcaggtgacatttctatatctgcaggagaagacattttagtgaaattgttttacatggaagagctgaaaatgtattggtgaatgctaataaacatttgccaaagggcagttgtacttggaaaattaatattggccatatgtgacttgatagaagacattttaacaaatgagaactaatggacaaattaccatgtagtgatacatgtctagaaacaataggaaatgttcactgatgcaaaatgaatttggaatcaagaataaattgtattgtaattagaatcaaaagaaatatgcaatggtattcatgagtctaaaaattttgcctttgacattttgaggtattgcttaccagaatactatttcagctcccagtataaggtgattttatttagcattagtacttatagaggagtcagccacagccacgtctccatcatgtaacatttttatttcctactttgcagggtataatttttgtttttattctttttcgtgttgtttaccaatggagttttacactttaaagcaatgtcaccagtttaaaaattgtgaaagaaagtaaggatattgggcacatcaattatttgttcttgtgaccagctgcatttttaagaagcctggatagaaaggaaagaggatgaagccagtgggccatacatagatagactcttgaacatttgctaaaactacaagaacaaaacaattactatgctacaaatgtgatggtcccacattctctgccaagttaaaggcatctctggggaaaatgtcttttggatcttgttaaagttaggaaggttgtgctcagaggaaatttggctagtaactcaactcaaagatactgaatttagctgttttacttgttattgaccagtctaagggacctgtgttagaaaaaggtatgaggaaaatactactagataaataataagaaaacaaatattcaccttgaagcaatgaaaagaggaaatatattttgtttctgttgttgtaattgaactatgtgtttaaagaagaatgcacacacattgatcagactcatactaaagcagatgggaattttatatgacagcttgacctgaacattttttgaaaaatgctgttcccctgaaactatttctcctttctttggaaataacattgctgccgttcattctgtgtagaagagattcacagatatcaggtgtatccagggatcccaagatcaccctcgggttcaatgatttgctagcagagctctcataattcagcaaatagtcatattcatggctctgatgtgttatagcaaaaggattcaatgcaaaataagcaaagggaaaggtagatggaacaaaatctggaggaaaccaaacataagcttccaagagtccccaagtgaagtaagacaagatacacttaattcctccagtaatgagttgagacaacacttgtgaaatgtgttcaccagggatgcctttaccagggaagcctattaaagactcagtacctagagtttttactggaggccagtcacttaggtaccctctgcctaggatatacaaacttccagatttccagaaggaaagtggatatgcagcataaaccacattatttgcacagacagtttaggcaaattgagccagtcttaccatttagagaatggtggatcactcctgaaagtcaggtctgctaaaggccaatgtttcaaacaggtcttcctatatttaattgacacagtcctgattaactgtttactacacaccaggttatcttagaatagttatcttactttcttcacacttgtggaagaagagattataattaaaattaaaatgcactaatttaaagccctgatatattcaattagctttggtatctcaaaaattttggttgctaaccatgatttctcattttgagttggtgttatatcatgtgcccttaaaataaaatgatgcaatatacctaa

SEQ ID NO: 165404 - DNA, 590 bp, Homo sapiens
  Payload ID: 12559
  Gene Symbol: PDE4D
  Gene Name: phosphodiesterase 4D, cAMP-specific
  ENST ID: ENST00000515835
  CDS Start-End: 335-424
atagttggcgtaccctgaggcctgccagttcctgccttaatgcatatgtagtcgtaattgagttctgacacggccttggatgtttctgtcctaaatagctgacattgcatcttcaagactgtggtctagctgtgtcccagagagcaacttcccttttcaaggcagcccactctgtgtgatgctttttcctaggtatgggcaacccatccctcctagggtgaaaacttcgctgttgctagttccagcattccagttggcttttgagtggatacgtgcagtgagatcattgacactggaaacactagttcccattttaattacttaaaacaccacgatgaaaagaaatacctgtgatttgctttctcggagcaaaagtcctgcttactgcgacctgatttttctcttgtggcccttaaaactatgaatatcaacagtcatccaattcttcaccttcatcttcctccctcagttgctgcctctgaggaaacactacattccagtaatgaagaggaagaccctttccgcggaatggaaccctatcttgtccggagactttcatgtcgcaatattcagcttccccctctcgcctt

SEQ ID NO: 165405 - DNA, 3350 bp, Homo sapiens
  Payload ID: 12559
  Gene Symbol: PDE4D
  Gene Name: phosphodiesterase 4D, cAMP-specific
  Uniprot ID: Q08499
  ENST ID: ENST00000507116
  CDS Start-End: 137-2374
agagagactgaggcaggcgactgaatgcactaacagcagcaggctcagacctgcttccctggacatttccgggaccgtgagcgagggaaccacgttgccctggattcttgccagctgtacaaagttgaccaggaaaatggctcagcagacaagcccggacactttaacagtacctgaagtggataatccgcattgtccaaacccgtggctgaacgaagaccttgtgaaatccttgcgagaaaacctgttgcagcatgagaagtccaagacagcgaggaaatcggtttctcccaagctctctccagtgatctctccgagaaattcccccaggcttctgcgcagaatgcttctcagcagcaacatccccaaacagcggcgtttcacggtggcacatacatgttttgatgtggacaatggcacatctgcgggacggagtcccttggatcccatgaccagcccaggatccgggctaattctccaagcaaattttgtccacagtcaacgacgggagtccttcctgtatcgatccgacagcgattatgacctctctccaaagtctatgtcccggaactcctccattgccagtgatatacacggagatgacttgattgtgactccatttgctcaggtcttggccagtctgcgaactgtacgaaacaactttgctgcattaactaatttgcaagatcgagcacctagcaaaagatcacccatgtgcaaccaaccatccatcaacaaagccaccataacagaggaggcctaccagaaactggccagcgagaccctggaggagctggactggtgtctggaccagctagagaccctacagaccaggcactccgtcagtgagatggcctccaacaagtttaaaaggatgcttaatcgggagctcacccatctctctgaaatgagtcggtctggaaatcaagtgtcagagtttatatcaaacacattcttagataagcaacatgaagtggaaattccttctccaactcagaaggaaaaggagaaaaagaaaagaccaatgtctcagatcagtggagtcaagaaattgatgcacagctctagtctgactaattcaagtatcccaaggtttggagttaaaactgaacaagaagatgtccttgccaaggaactagaagatgtgaacaaatggggtcttcatgttttcagaatagcagagttgtctggtaaccggcccttgactgttatcatgcacaccatttttcaggaacgggatttattaaaaacatttaaaattccagtagatactttaattacatatcttatgactctcgaagaccattaccatgctgatgtggcctatcacaacaatatccatgctgcagatgttgtccagtctactcatgtgctattatctacacctgctttggaggctgtgtttacagatttggagattcttgcagcaatttttgccagtgcaatacatgatgtagatcatcctggtgtgtccaatcaatttctgatcaatacaaactctgaacttgccttgatgtacaatgattcctcagtcttagagaaccatcatttggctgtgggctttaaattgcttcaggaagaaaactgtgacattttccagaatttgaccaaaaaacaaagacaatctttaaggaaaatggtcattgacatcgtacttgcaacagatatgtcaaaacacatgaatctactggctgatttgaagactatggttgaaactaagaaagtgacaagctctggagttcttcttcttgataattattccgataggattcaggttcttcagaatatggtgcactgtgcagatctgagcaacccaacaaagcctctccagctgtaccgccagtggacggaccggataatggaggagttcttccgccaaggagaccgagagagggaacgtggcatggagataagccccatgtgtgacaagcacaatgcttccgtggaaaaatcacaggtgggcttcatagactatattgttcatcccctctgggagacatgggcagacctcgtccaccctgacgcccaggatattttggacactttggaggacaatcgtgaatggtaccagagcacaatccctcagagcccctctcctgcacctgatgacccagaggagggccggcagggtcaaactgagaaattccagtttgaactaactttagaggaagatggtgagtcagacacggaaaaggacagtggcagtcaagtggaagaagacactagctgcagtgactccaagactctttgtactcaagactcagagtctactgaaattccccttgatgaacaggttgaagaggaggcagtaggggaagaagaggaaagccagcctgaagcctgtgtcatagatgatcgttctcctgacacgtaacagtgcaaaaactttcatgccttttttttttttaagtagaaaaattgtttccaaagtgcatgtcacatgccacaaccacggtcacacctcactgtcatctgccaggacgtttgttgaacaaaactgaccttgactactcagtccagcgctcaggaatatcgtaaccagttttttcacctccatgtcatccgagcaaggtggacatcttcacgaacagcgtttttaacaagatttcagcttggtagagctgacaaagcagataaaatctactccaaattattttcaagagagtgtgactcatcaggcagcccaaaagtttattggacttggggtttctattcctttttatttgtttgcaatattttcagaagaaaggcattgcacagagtgaacttaatggacgaagcaacaaatatgtcaagaacaggacatagcacgaatctgttaccagtaggaggaggatgagccacagaaattgcataattttctaatttcaagtcttcctgatacatgactgaatagtgtggttcagtgagctgcactgacctctacattttgtatgatatgtaaaacagattttttgtagagcttacttttattattaaatgtattgaggtattatatttaaaaaaaactatgttcagaacttcatctgccactggttatttttttctaaggagtaacttgcaagttttcagtacaaatctgtgctacactggataaaaatctaatttatgaattttacttgcaccttatagttcatagcaattaactgatttgtagtgattcattgtttgttttatataccaatgacttccatattttaaaagagaaaaacaactttatgttgcaggaaaccctttttgtaagtctttattatttactttgcattttgtttcactctttccagataagcagagttgctcttcaccagtgtttttcttcatgtgcaaagtgactatttgttctataatac

SEQ ID NO: 165406 - DNA, 2860 bp, Homo sapiens
  Payload ID: 12559
  Gene Symbol: PDE4D
  Gene Name: phosphodiesterase 4D, cAMP-specific
  Uniprot ID: Q08499
  ENST ID: ENST00000503258
  CDS Start-End: 718-2757
ttctcactgccctgcggtgttttgaactgccttcttacagacgtcatacagcccttgaggaatagtttctgcctggtgagattgaatgatagttctcattcacaaaaccctggattctaagcagggacacacagaaattactttcgcaggtaaatcagcccacccagccaaagtgtggagagatttgttccttggctgacttctttgctccacggagaggagtgttttcctgtgcttgccctgaaatggaacttccttgacagctctcccgtgttacagtacctcccggtcattttctttttctctctctctacctgcgctcttcgagtgtcagaaacctttaaagctgttactatggaattgcaaaaaagagatcaagtgactctttcactatgctggtttcccttgtgacccagatgaagaatcaattcagaattcagttcctcccttggcattgcaagacacagaagaaactgtcacttcctaacagcctagtactggagtaaattcagtatgaaggaagaaagcgctcctgcgtgttagaaccttgcccatgagctggaccgaggacaggagatggactccaggaaaattggatttcttcaagcagcctcccttggaaatggaatatctttaaaatcttctttgcagaaagacagttagaatgtattaatcagaatagttgaagacttattttcctttttattttttttcaaaatgagcattattatgaagccaagatcccgatctacaagttccctaaggactgcagaggcagtttgttttgatgtggacaatggcacatctgcgggacggagtcccttggatcccatgaccagcccaggatccgggctaattctccaagcaaattttgtccacagtcaacgacgggagtccttcctgtatcgatccgacagcgattatgacctctctccaaagtctatgtcccggaactcctccattgccagtgatatacacggagatgacttgattgtgactccatttgctcaggtcttggccagtctgcgaactgtacgaaacaactttgctgcattaactaatttgcaagatcgagcacctagcaaaagatcacccatgtgcaaccaaccatccatcaacaaagccaccataacagaggaggcctaccagaaactggccagcgagaccctggaggagctggactggtgtctggaccagctagagaccctacagaccaggcactccgtcagtgagatggcctccaacaagtttaaaaggatgcttaatcgggagctcacccatctctctgaaatgagtcggtctggaaatcaagtgtcagagtttatatcaaacacattcttagataagcaacatgaagtggaaattccttctccaactcagaaggaaaaggagaaaaagaaaagaccaatgtctcagatcagtggagtcaagaaattgatgcacagctctagtctgactaattcaagtatcccaaggtttggagttaaaactgaacaagaagatgtccttgccaaggaactagaagatgtgaacaaatggggtcttcatgttttcagaatagcagagttgtctggtaaccggcccttgactgttatcatgcacaccatttttcaggaacgggatttattaaaaacatttaaaattccagtagatactttaattacatatcttatgactctcgaagaccattaccatgctgatgtggcctatcacaacaatatccatgctgcagatgttgtccagtctactcatgtgctattatctacacctgctttggaggctgtgtttacagatttggagattcttgcagcaatttttgccagtgcaatacatgatgtagatcatcctggtgtgtccaatcaatttctgatcaatacaaactctgaacttgccttgatgtacaatgattcctcagtcttagagaaccatcatttggctgtgggctttaaattgcttcaggaagaaaactgtgacattttccagaatttgaccaaaaaacaaagacaatctttaaggaaaatggtcattgacatcgtacttgcaacagatatgtcaaaacacatgaatctactggctgatttgaagactatggttgaaactaagaaagtgacaagctctggagttcttcttcttgataattattccgataggattcaggttcttcagaatatggtgcactgtgcagatctgagcaacccaacaaagcctctccagctgtaccgccagtggacggaccggataatggaggagttcttccgccaaggagaccgagagagggaacgtggcatggagataagccccatgtgtgacaagcacaatgcttccgtggaaaaatcacaggtgggcttcatagactatattgttcatcccctctgggagacatgggcagacctcgtccaccctgacgcccaggatattttggacactttggaggacaatcgtgaatggtaccagagcacaatccctcagagcccctctcctgcacctgatgacccagaggagggccggcagggtcaaactgagaaattccagtttgaactaactttagaggaagatggtgagtcagacacggaaaaggacagtggcagtcaagtggaagaagacactagctgcagtgactccaagactctttgtactcaagactcagagtctactgaaattccccttgatgaacaggttgaagaggaggcagtaggggaagaagaggaaagccagcctgaagcctgtgtcatagatgatcgttctcctgacacgtaacagtgcaaaaactttcatgccttttttttttttaagtagaaaaattgtttccaaagtgcatgtcacatgccacaaccacggtcacacctcactgtcatctgcc

SEQ ID NO: 165407 - DNA, 577 bp, Homo sapiens
  Payload ID: 12559
  Gene Symbol: PDE4D
  Gene Name: phosphodiesterase 4D, cAMP-specific
  ENST ID: ENST00000505507
  CDS Start-End: 335-577
atagttggcgtaccctgaggcctgccagttcctgccttaatgcatatgtagtcgtaattgagttctgacacggccttggatgtttctgtcctaaatagctgacattgcatcttcaagactgtggtctagctgtgtcccagagagcaacttcccttttcaaggcagcccactctgtgtgatgctttttcctaggtatgggcaacccatccctcctagggtgaaaacttcgctgttgctagttccagcattccagttggcttttgagtggatacgtgcagtgagatcattgacactggaaacactagttcccattttaattacttaaaacaccacgatgaaaagaaatacctgtgatttgctttctcggagcaaaagtgcctctgaggaaacactacattccagtaatgaagaggaagaccctttccgcggaatggaaccctatcttgtccggagactttcatgtcgcaatattcagcttccccctctcgccttcagacagttggaacaagctgacttgaaaagtgaatcagagaacattcaacgaccaaccagcctccccctgaagattctgccgctg

SEQ ID NO: 165408 - DNA, 1040 bp, Homo sapiens
  Payload ID: 12559
  Gene Symbol: PDE4D
  Gene Name: phosphodiesterase 4D, cAMP-specific
  Uniprot ID: Q08499
  ENST ID: ENST00000502575
  CDS Start-End: 128-787
gaggcaggcgactgaatgcactaacagcagcaggctcagacctgcttccctggacatttccgggaccgtgagcgagggaaccacgttgccctggattcttgccagctgtacaaagttgaccaggaaaatggctcagcagacaagcccggacactttaacagtacctgaagtggataatccgcattgtccaaacccgtggctgaacgaagaccttgtgaaatccttgcgagaaaacctgttgcagcatgagaagtccaagacagcgaggaaatcggtttctcccaagctctctccagtgatctctccgagaaattcccccaggcttctgcgcagaatgcttctcagcagcaacatccccaaacagcggcgtttcacggtggcacatacatgttttgatgtggacaatggcacatctgcgggacggagtcccttggatcccatgaccagcccaggatccgggctaattctccaagcaaattttgtccacagtcaacgacgggagtccttcctgtatcgatccgacagcgattatgacctctctccaaagtctatgtcccggaactcctccattgccagtgatatacacggagatgacttgattgtgactccatttgctcaggtcttggccagtctgcgaactgtacgaaacaactttgctgcattaactaatttgcaagatcgagcacctagcaaaagatcacccatgtgcaaccaaccatccatcaacaaagccaccataacaggatcctggatggaattgaacccatatacgttacttgacatgtgaaacacgtgtgaccctggcagatgatttggctgaccttgaaaactacagctgtttagtcactttgaaaacaatgcaatacaagtgatttactaggcttcagttttaaccattttatgctgactggtggaaattctaacccttcagaaagaaaaaaaaattgtgaagcaatggaaatgtaccatcctgggtattaatgtcattaattttcaatacattttctcacaaaaagtataaagaagtctttgcttgacct

SEQ ID NO: 165409 - DNA, 7690 bp, Homo sapiens
  Payload ID: 12559
  Gene Symbol: PDE4D
  Gene Name: phosphodiesterase 4D, cAMP-specific
  ENST ID: ENST00000546160
  CDS Start-End: 35-2071
ggaaaatattaatgacagcaaaacttgaattcacatgtttatttattctttcaacaagtttttctttaaaaccacacactgctgggctatcataagttttgatgtggacaatggcacatctgcgggacggagtcccttggatcccatgaccagcccaggatccgggctaattctccaagcaaattttgtccacagtcaacgacgggagtccttcctgtatcgatccgacagcgattatgacctctctccaaagtctatgtcccggaactcctccattgccagtgatatacacggagatgacttgattgtgactccatttgctcaggtcttggccagtctgcgaactgtacgaaacaactttgctgcattaactaatttgcaagatcgagcacctagcaaaagatcacccatgtgcaaccaaccatccatcaacaaagccaccataacagaggaggcctaccagaaactggccagcgagaccctggaggagctggactggtgtctggaccagctagagaccctacagaccaggcactccgtcagtgagatggcctccaacaagtttaaaaggatgcttaatcgggagctcacccatctctctgaaatgagtcggtctggaaatcaagtgtcagagtttatatcaaacacattcttagataagcaacatgaagtggaaattccttctccaactcagaaggaaaaggagaaaaagaaaagaccaatgtctcagatcagtggagtcaagaaattgatgcacagctctagtctgactaattcaagtatcccaaggtttggagttaaaactgaacaagaagatgtccttgccaaggaactagaagatgtgaacaaatggggtcttcatgttttcagaatagcagagttgtctggtaaccggcccttgactgttatcatgcacaccatttttcaggaacgggatttattaaaaacatttaaaattccagtagatactttaattacatatcttatgactctcgaagaccattaccatgctgatgtggcctatcacaacaatatccatgctgcagatgttgtccagtctactcatgtgctattatctacacctgctttggaggctgtgtttacagatttggagattcttgcagcaatttttgccagtgcaatacatgatgtagatcatcctggtgtgtccaatcaatttctgatcaatacaaactctgaacttgccttgatgtacaatgattcctcagtcttagagaaccatcatttggctgtgggctttaaattgcttcaggaagaaaactgtgacattttccagaatttgaccaaaaaacaaagacaatctttaaggaaaatggtcattgacatcgtacttgcaacagatatgtcaaaacacatgaatctactggctgatttgaagactatggttgaaactaagaaagtgacaagctctggagttcttcttcttgataattattccgataggattcaggttcttcagaatatggtgcactgtgcagatctgagcaacccaacaaagcctctccagctgtaccgccagtggacggaccggataatggaggagttcttccgccaaggagaccgagagagggaacgtggcatggagataagccccatgtgtgacaagcacaatgcttccgtggaaaaatcacaggtgggcttcatagactatattgttcatcccctctgggagacatgggcagacctcgtccaccctgacgcccaggatattttggacactttggaggacaatcgtgaatggtaccagagcacaatccctcagagcccctctcctgcacctgatgacccagaggagggccggcagggtcaaactgagaaattccagtttgaactaactttagaggaagatggtgagtcagacacggaaaaggacagtggcagtcaagtggaagaagacactagctgcagtgactccaagactctttgtactcaagactcagagtctactgaaattccccttgatgaacaggttgaagaggaggcagtaggggaagaagaggaaagccagcctgaagcctgtgtcatagatgatcgttctcctgacacgtaacagtgcaaaaactttcatgccttttttttttttaagtagaaaaattgtttccaaagtgcatgtcacatgccacaaccacggtcacacctcactgtcatctgccaggacgtttgttgaacaaaactgaccttgactactcagtccagcgctcaggaatatcgtaaccagttttttcacctccatgtcatccgagcaaggtggacatcttcacgaacagcgtttttaacaagatttcagcttggtagagctgacaaagcagataaaatctactccaaattattttcaagagagtgtgactcatcaggcagcccaaaagtttattggacttggggtttctattcctttttatttgtttgcaatattttcagaagaaaggcattgcacagagtgaacttaatggacgaagcaacaaatatgtcaagaacaggacatagcacgaatctgttaccagtaggaggaggatgagccacagaaattgcataattttctaatttcaagtcttcctgatacatgactgaatagtgtggttcagtgagctgcactgacctctacattttgtatgatatgtaaaacagattttttgtagagcttacttttattattaaatgtattgaggtattatatttaaaaaaaactatgttcagaacttcatctgccactggttatttttttctaaggagtaacttgcaagttttcagtacaaatctgtgctacactggataaaaatctaatttatgaattttacttgcaccttatagttcatagcaattaactgatttgtagtgattcattgtttgttttatataccaatgacttccatattttaaaagagaaaaacaactttatgttgcaggaaaccctttttgtaagtctttattatttactttgcattttgtttcactctttccagataagcagagttgctcttcaccagtgtttttcttcatgtgcaaagtgactatttgttctataatacttttatgtgtgttatatcaaatgtgtcttaagcttcatgcaaactcagtcatcagttcgtgttgtctgaagcaagtgggagatatataaatacccagtagctaaaatggtcagtcttttttagatgttttcctacttagtatctcctaataacgttttgctgtgtcactagatgttcatttcacaagtgcatgtctttctaataatccacacatttcatgctctaataatccacacatttcatgctcatttttattgtttttacagccagttatagtaagaaaaaggtttttccccttgtgctgctttataatttagcgtgtgtctgaaccttatccatgtttgctagatgaggtcttgtcaaatatatcactaccattgtcaccggtgaaaagaaacaggtagttaagttagggttaacattcatttcaaccacgaggttgtatatcatgactagcttttactcttggtttacagagaaaagttaaacagccaactaggcagtttttaagaatattaacaatatattaacaaacaccaatacaactaatcctatttggttttaatgatttcaccatgggattaagaactatatcaggaacatccctgagaaacggttttaagtgtagcaactactcttccttaatggacagccacataacgtgtaggaagtcctttatcacttatcctcgatccataagcatatcttgcagaggggaactacttctttaaacacatggagggaaagaagatgatgccactggcaccagagggttagtactgtgatgcatcctaaaatatttattatattggtaaaaattctggttaaataaaaaattagagatcactcttggctgatttcagcaccaggaactgtattacagttttagagattaattcctagtgtttacctgattatagcagttggcatcatggggcatttaattctgactttatccccacgtcagccttaataaagtcttctttaccttctctatgaagactttaaagcccaaataatcatttttcacattgatattcaagaattgagatagatagaagccaaagtgggtatctgacaagtggaaaatcaaacgtttaagaagaattacaactctgaaaagcatttatatgtggaacttctcaaggagcctcctggggactggaaagtaagtcatcagccaggcaaatgactcatgctgaagagagtccccatttcagtcccctgagatctagctgatgcttagatcctttgaaataaaaattatgtctttataactctgatcttttacataaagcagaagaggaatcaactagttaattgcaaggtttctactctgtttcctctgtaaagatcagatggtaatctttcaaataagaaaaaaataaagacgtatgtttgaccaagtagtttcacaagaatatttgggaacttgtttcttttaattttatttgtccctgagtgaagtctagaaagaaaggtaaagagtctagagtttattcctctttccaaaacattctcattcctctcctccctacacttagtatttcccccacagagtgcctagaatcttaataatgaataaaataaaaagcagcaatatgtcattaacaaatccagacctgaaagggtaaagggtttataactgcactaataaagagaggctctttttttttcttccagtttgttggtttttaatggtaccgtgttgtaaagatacccactaatggacaatcaaattgcagaaaaggctcaatatccaagagacagggactaatgcactgtacaatctgcttatccttgcccttctctcttgccaaagtgtgcttcagaaatatatactgctttaaaaaagaataaaagaatatccttttacaagtggctttacatttcctaaaatgccataagaaaatgcaatatctgggtactgtatggggaaaaaaatgtccaagtttgtgtaaaaccagtgcatttcagcttgcaagttactgaacacaataatgctgttttaattttgttttatatcagttaaaattcacaataatgtagatagaacaaattacagacaaggaaagaaaaaacttgaatgaaatggattttacagaaagctttatgataatttttgaatgcattatttattttttgtgccatgcattttttttctcaccaaatgaccttacctgtaatacagtcttgtttgtctgtttacaaccatgtatttattgcaatgtacatactgtaatgttaattgtaaattatctgttcttattaaaacatcatcccatgatgggatggtgttgatatatttggaaactcttggtgagagaatgaatggtgtgtatacatactctgtacatttttcttttctcctgtaatatagtcttgtcaccttagagcttgtttatggaagattcaagaaaactataaaatacttaaagatatataaatttaaaaaaacatagctgcaggtctttggtcccagggctgtgccttaactttaaccaatattttcttctgttttgctgcatttgaaaggtaacagtggagctagggctgggcattttacatccaggcttttaattgattagaattctgccaataggtggattttacaaaaccacagacaacctctgaaagattctgagacccttttgagacagaagctcttaagtacttcttgccagggagcagcactgcatgtgtgatggttgtttgccatctgttgatcaggaactacttcagctacttgcatttgattatttcctttttttttttttttaactcggaaacacaactggggaaatatattctttcccagtgattataaacaatctttttcttttttttaagtccttttggcttctagagctcataggaaaatggacttgatttgaaattggagccagagtttactcgtgttggttatctattcatcagcttcctgacatgttaagagaatacattaaagagaaaatactgttttttaatcctaaaatttttcttccactaagataaaccaaatgtccttacatatatgtaaacccatctatttaaacgcaaaggtgggttgatgtcagtttacatagcagaaagcattcactatcctctaagatttgtttctgcaaaactttcattgctttagaattttaaaatttcaccttgtacaatggccagcccctaaagcaggaaacatttataatggattatatggaaacatcctcccagtacttgcccagcccttgaatcatgtggcttttcagtgaaaggaaagattctttttctaggaaaaatgagcctattttattttattttattttattttttgacacaaactgtagattttagcagccctggcccaaaggaatttgattacttttgttttaaacagtacaaaggggacactataattacaaaaacatccttaactgatttgagttgtttttatttctttggatatattttcagagtggtaaattgtgtgtgagaattacaaatgattattcttttagtggtttcttagcctctcttacagcccacggggatagtactgtacatcaataccttcatatgaaatttttatatgcaatgaaaataaaagcatgggttgattctgcctatttatgactcaatcttttacaaataaaagattattcattttaaattatagttcaatcagcatgtctcttaggatactgaacgtggttgaaatgaaaggatagtgacatcataagttagtactgatattcataaccaaataaagccaacttgagtaattttgctacattaaaaattaccaaaattacttagatggcctataagattaagcatggtgttttctaagcaagctttgaaaggggccttccatacttacttaattgaatattctgggatattgaaaattattcagatacttgacaattatttttggttacctactccgcaaactacaaagttttaaggactcaacaataagttaatgagacacagtgtttgctttcatggagcttacagtctggaggggacaaaggcttaaacaatactcatataattatatatgtgatcagtacaatgaaggagctcagtggggtaaataagcaggaacctgaacttgatctgttccggagggccacagaaggcttccttgaggccttgagaaagtgatttgcatctgagttctgaaggattgtaagaggtaactagggaaaaagttgacaggaagaggaaggggatccagacaagaaacatttgcaaagatcttgaggcataaatgagcttgagacatctggagaaactgaggaaaagtgagagagtaggcagggcctggagccgcagagccattgctaaccatcctgtgtgagatatcccccattctgtagctttattctcataaccctgctcaattttctttataacacttctcacagatttatatacgtgtttgtttttgttatctgtctctcccaccagaccacagctccatgagagcaaggtctttgcttaccaatatatcactagcacttaaaactatgcctggtacacagtaggttcttaatatgtgttgaatatagccatcaaattgatattggatataattcaatctgataagatattttgagatattaaagagtttttaacttgatacc

SEQ ID NO: 165410 - DNA, 3020 bp, Homo sapiens
  Payload ID: 12560
  Gene Symbol: PDE5A
  Gene Name: phosphodiesterase 5A, cGMP-specific
  Uniprot ID: O76074
  ENST ID: ENST00000264805
  CDS Start-End: 459-2960
gtggagcagagagtgcttggcgggcgggtgccccgaagcctgaggaattgatgcatagtcggggtgcgtggactccaggacgcgcccctttgcagaaagagtccgtgccccgctgccgcctgctctgggcagcggccgtcgggcagcgggtgctggccgtcttggccgggagggtgacacacgcccggcagtgatggtcgaggagcccgcccgggttcgacgcccgggtcccactcgccggcgcgcggccgcggctctgccggtcgctccccgccagggggcggcgcagcgcggggcgagcgggaggcgacgggcggcggcgcggaggccggggccgtgagggagctggttctgagtcgccgacctcacctcacctcacctgcgcgcgttgttgcccctacggagcctcctggagtccaggatcggcggagttcgaaaacgaacttcccacgtttgctatgttgccctttggagacaaaacaagagaaatggtcaatgcatggtttgctgagagagttcacaccatccctgtgtgcaaggaaggtatcagaggccacaccgaatcttgctcttgtcccttgcagcagagtcctcgtgcagataacagtgcccctggaacaccaaccaggaaaatctctgcctctgaatttgaccggcctcttagacccattgttgtcaaggattctgagggaactgtgagcttcctctctgactcagaaaagaaggaacagatgcctctaacccctccaaggtttgatcatgatgaaggggaccagtgctcaagactcttggaattagtgaaggatatttctagtcatttggatgtcacagccttatgtcacaaaattttcttgcatatccatggactgatatctgctgaccgctattccctgttccttgtctgtgaagacagctccaatgacaagtttcttatcagccgcctctttgatgttgctgaaggttcaacactggaagaagtttcaaataactgtatccgcttagaatggaacaaaggcattgtgggacatgtggcagcgcttggtgagcccttgaacatcaaagatgcatatgaggatcctcggttcaatgcagaagttgaccaaattacaggctacaagacacaaagcattctttgtatgccaattaagaatcatagggaagaggttgttggtgtagcccaggccatcaacaagaaatcaggaaacggtgggacatttactgaaaaagatgaaaaggactttgctgcttatttggcattttgtggtattgttcttcataatgctcagctctatgagacttcactgctggagaacaagagaaatcaggtgctgcttgaccttgctagtttaatttttgaagaacaacaatcattagaagtaattttgaagaaaatagctgccactattatctctttcatgcaagtgcagaaatgcaccattttcatagtggatgaagattgctccgattctttttctagtgtgtttcacatggagtgtgaggaattagaaaaatcatctgatacattaacaagggaacatgatgcaaacaaaatcaattacatgtatgctcagtatgtcaaaaatactatggaaccacttaatatcccagatgtcagtaaggataaaagatttccctggacaactgaaaatacaggaaatgtaaaccagcagtgcattagaagtttgctttgtacacctataaaaaatggaaagaagaataaagttataggggtttgccaacttgttaataagatggaggagaatactggcaaggttaagcctttcaaccgaaatgacgaacagtttctggaagcttttgtcatcttttgtggcttggggatccagaacacgcagatgtatgaagcagtggagagagccatggccaagcaaatggtcacattggaggttctgtcgtatcatgcttcagcagcagaggaagaaacaagagagctacagtcgttagcggctgctgtggtgccatctgcccagacccttaaaattactgactttagcttcagtgactttgagctgtctgatctggaaacagcactgtgtacaattcggatgtttactgacctcaaccttgtgcagaacttccagatgaaacatgaggttctttgcagatggattttaagtgttaagaagaattatcggaagaatgttgcctatcataattggagacatgcctttaatacagctcagtgcatgtttgctgctctaaaagcaggcaaaattcagaacaagctgactgacctggagatacttgcattgctgattgctgcactaagccacgatttggatcaccgtggtgtgaataactcttacatacagcgaagtgaacatccacttgcccagctttactgccattcaatcatggaacaccatcattttgaccagtgcctgatgattcttaatagtccaggcaatcagattctcagtggcctctccattgaagaatataagaccacgttgaaaataatcaagcaagctattttagctacagacctagcactgtacattaagaggcgaggagaattttttgaacttataagaaaaaatcaattcaatttggaagatcctcatcaaaaggagttgtttttggcaatgctgatgacagcttgtgatctttctgcaattacaaaaccctggcctattcaacaacggatagcagaacttgtagcaactgaattttttgatcaaggagacagagagagaaaagaactcaacatagaacccactgatctaatgaacagggagaagaaaaacaaaatcccaagtatgcaagttgggttcatagatgccatctgcttgcaactgtatgaggccctgacccacgtgtcagaggactgtttccctttgctagatggctgcagaaagaacaggcagaaatggcaggcccttgcagaacagcaggagaagatgctgattaatggggaaagcggccaggccaagcggaactgagtggcctatttcatgcagagttgaagtttacagagatggtgtgttctgcaatatgcctag

SEQ ID NO: 165411 - DNA, 7154 bp, Homo sapiens
  Payload ID: 12560
  Gene Symbol: PDE5A
  Gene Name: phosphodiesterase 5A, cGMP-specific
  Uniprot ID: O76074
  ENST ID: ENST00000354960
  CDS Start-End: 321-2948
gctgccgccgccgccgccgcctcctgggaaccaggggactgaagagcctgcgagagcggaacactgccggaccccgggtggggggggcgcagcagctgcgcctggccccgcccaccacacctgggcgcccgtagaaccgcgcggggcggggcggggcaggaggctggcctggcgctccggccgctttgtcgaaagccggcccgactggagcaggacgaagggggagggtctcgaggccgagtcctgttcttctgagggacggaccccagctggggtggaaaagcagtaccagagagcctccgaggcgcgcggtgccaaccatggagcgggccggccccagcttcgggcagcagcgacagcagcagcagccccagcagcagaagcagcagcagagggatcaggactcggtcgaagcatggctggacgatcactgggactttaccttctcatactttgttagaaaagccaccagagaaatggtcaatgcatggtttgctgagagagttcacaccatccctgtgtgcaaggaaggtatcagaggccacaccgaatcttgctcttgtcccttgcagcagagtcctcgtgcagataacagtgcccctggaacaccaaccaggaaaatctctgcctctgaatttgaccggcctcttagacccattgttgtcaaggattctgagggaactgtgagcttcctctctgactcagaaaagaaggaacagatgcctctaacccctccaaggtttgatcatgatgaaggggaccagtgctcaagactcttggaattagtgaaggatatttctagtcatttggatgtcacagccttatgtcacaaaattttcttgcatatccatggactgatatctgctgaccgctattccctgttccttgtctgtgaagacagctccaatgacaagtttcttatcagccgcctctttgatgttgctgaaggttcaacactggaagaagtttcaaataactgtatccgcttagaatggaacaaaggcattgtgggacatgtggcagcgcttggtgagcccttgaacatcaaagatgcatatgaggatcctcggttcaatgcagaagttgaccaaattacaggctacaagacacaaagcattctttgtatgccaattaagaatcatagggaagaggttgttggtgtagcccaggccatcaacaagaaatcaggaaacggtgggacatttactgaaaaagatgaaaaggactttgctgcttatttggcattttgtggtattgttcttcataatgctcagctctatgagacttcactgctggagaacaagagaaatcaggtgctgcttgaccttgctagtttaatttttgaagaacaacaatcattagaagtaattttgaagaaaatagctgccactattatctctttcatgcaagtgcagaaatgcaccattttcatagtggatgaagattgctccgattctttttctagtgtgtttcacatggagtgtgaggaattagaaaaatcatctgatacattaacaagggaacatgatgcaaacaaaatcaattacatgtatgctcagtatgtcaaaaatactatggaaccacttaatatcccagatgtcagtaaggataaaagatttccctggacaactgaaaatacaggaaatgtaaaccagcagtgcattagaagtttgctttgtacacctataaaaaatggaaagaagaataaagttataggggtttgccaacttgttaataagatggaggagaatactggcaaggttaagcctttcaaccgaaatgacgaacagtttctggaagcttttgtcatcttttgtggcttggggatccagaacacgcagatgtatgaagcagtggagagagccatggccaagcaaatggtcacattggaggttctgtcgtatcatgcttcagcagcagaggaagaaacaagagagctacagtcgttagcggctgctgtggtgccatctgcccagacccttaaaattactgactttagcttcagtgactttgagctgtctgatctggaaacagcactgtgtacaattcggatgtttactgacctcaaccttgtgcagaacttccagatgaaacatgaggttctttgcagatggattttaagtgttaagaagaattatcggaagaatgttgcctatcataattggagacatgcctttaatacagctcagtgcatgtttgctgctctaaaagcaggcaaaattcagaacaagctgactgacctggagatacttgcattgctgattgctgcactaagccacgatttggatcaccgtggtgtgaataactcttacatacagcgaagtgaacatccacttgcccagctttactgccattcaatcatggaacaccatcattttgaccagtgcctgatgattcttaatagtccaggcaatcagattctcagtggcctctccattgaagaatataagaccacgttgaaaataatcaagcaagctattttagctacagacctagcactgtacattaagaggcgaggagaattttttgaacttataagaaaaaatcaattcaatttggaagatcctcatcaaaaggagttgtttttggcaatgctgatgacagcttgtgatctttctgcaattacaaaaccctggcctattcaacaacggatagcagaacttgtagcaactgaattttttgatcaaggagacagagagagaaaagaactcaacatagaacccactgatctaatgaacagggagaagaaaaacaaaatcccaagtatgcaagttgggttcatagatgccatctgcttgcaactgtatgaggccctgacccacgtgtcagaggactgtttccctttgctagatggctgcagaaagaacaggcagaaatggcaggcccttgcagaacagcaggagaagatgctgattaatggggaaagcggccaggccaagcggaactgagtggcctatttcatgcagagttgaagtttacagagatggtgtgttctgcaatatgcctagtttcttacacactgtctgtatagtgtctgtatttggtatatactttgccactgctgtatttttatttttgcacaacttttgagagtatagcatgaatgtttttagaggactattacatattttttgtatatttgttttatgctactgaactgaaaggatcaacaacatccactgttagcacattgataaaagcattgtttgtgatatttcgtgtactgcaaagtgtatgcagtattcttgcactgaggtttttttgcttggggattattttaaataattggtttttgtgttttctgaattaccattttttcaagaatgtttggaatctttcctttttcaaaagtaggttaggagcaaattatcatacattctgtgacatttaaagcctttataggatagtgaaaaatgctggctgagtggattttaagagaaataattgtatttgttaacagtgtctttttttaaaaagttaaggcactctgaaacaaatggaaagtcctatgaaactgtattgtaaagaaaacattatttaattgatatgctgttttgtgagagaacaggcaagacagaactttgtcacttcagtgcagtacatttttctgaaagctacccataaaatcactttcatctcacctacctgatgcaaagcaggtgaaaccttaggagatgatccagtcactgacttgattgagggataagtgtgatttagaaatggaatggccttggatgtctatcagtgaagaaaaatgttctgttagaagatctctctaagagtttttttccttctgagcttccttttcaaaataaaagtgacaattgtagcattgacttgaagtgagacatggttatagataagagagtacaaaatgactctttttcctgtcaattgaaatttaaagaaaagttttaattatataaatagcaaagggctattgccaatactagggtcaaaaatgaatttgagggaacagtgggtaagaaactttatgcctgaataacatttagcagtattgtgattgaaaaattgccatattttgatgtataggacaagtcaactgagatccagagaatcctggatgtgaatgctaaacactggcccttaactcacattcaatgtattttcttcccataacatttagtatagttaatattttcttagaatttgagcccatttaagtggattaatattctacatgtgtgcccctaaagacacatttactcaatattggagaagtagataatgaattaagcaactggtctaggaaaggaaaatttgtttcaaatatgcaggaatgtttggatttggggagagtagaaggagagatttgcttgatttgttaacttctacctccaacccacaaaaaagatatttgatctgagtttctatcactaatttggatagaaaatttctaagggacatggtaatccagcattctcaaggacctttcgccaaaatgtgttttccatctatgtcccgattcccctaaattttgcctaaaattcagtatgttccttaagtttttaaaattctgagtgtgtacaaatatcttgacataatgcagttttatttttatcattctggtaaaaaaacaaaaaatagaagcaaaacacattgtattgccattattttgtatttggtaaaggttaatctaggaagttaccaactgtttaatgctatatgtattgtatacttgtattttcaggatattttattttttttgccatacagataaaatttgtaaggttgcccctttgtggcactggtgtgtaaaatacacagactatcactaaaataatagttatatatacatacaggtgtatacttatgcatgcatacataaatccttagtatagaaaaattgcataaagaatagcaatctttaataaacctttttattacattgtgatttagcagttatgctaaaatatgtacttatgctttagtagtttgtttggtcccctctagtatgtgtcactgagaaattttttaaagacatggtagatcgtgtttagaggctttgtatgtgtgtcattttaataagcaagaagatatatttagattagaaatggtttggtctgcctttgaatattgtttattttactttactagttgagacattaaaggaagctgggcaatgcctattttatttctttgttggatattttagttcatacaaagcagagtacttctttagggctggttaattggttcaaataatttttaatttcctttctagtatcttctcaagttggaaaaatatacatacagtcctccttcaccttactctgtatttatattacccataactagcaagaagttcttgttctagattttttgtttgtttagttataacagagtaacataccatttaattacaatttttagccagaaaagtccccactattttactaacttgttaaaagatatctatataattgcctggccttatatttttcagtagattagaccgtgccaatcacaatcctgggtggatttgtgtaagtcacttaacctctgtgtgcctaaacaagttgtgcttttttaaaaggagttatgtttgggcaaagcctttgtcttcaagcagaatgtcacagaaggcagctactttataagccccaatgggccatggagaccactgtcagaaatgggatattagtctagagagaaggtgatctattcccacatgtcatttctaatgttgagtttccatgactgaacaaagagaatatatttattcagcttcacttgcagatcactagtgaatgtgagatttagagctcattgagtatattgcttcaaggtacaaacccaggatgatgatgttgtcaccactgtctcttaattttgaataatagtttcctttaataggagtattagagataagaaagtatatgaaaatatactggaaatattggattcttggagaaaactgttcagtcacagatatattcttgcctagcagtgaagtgcctttattttcagcatagcaaataaatattagacctgttccaatttgatctacaatttttttctgtgtttttcaccagattgtactcctaaaacttaacaggccatcacaagcaattgtcttttgtttacaagattgatttaatatgagaggatacaaaatgtcatcgttatcctctcttatgaacaactgtagtcaaaataaggtggcacaatttaattgttttgtatcagaaatacactgacccaccttttattgagtcctgccacatgttaggtaccgtgctctgctgtggagacagagcagtgaccccaaggagctcacggtccctgaaggaggtgctagagaagagacttagcttctgatactgccaatttaatgtgagaacatggggtatactgcatcatttccattttcatcaataacatatgttttatgcaccttctttacctgaaacttactaagaatctaccagtaaacaaacatcctgtctttttgcaagtatgaatcacttaacctgctgatagttgaagaacactttaggagttttgtattcttgtatatagtttattttttccatgtgctagccaggtaaagattacacagttcttctggactgttaaattgtgcatggttttggaccccttctgctctactacagagagtgaagaagaaagtattaaagctcactttaccattccatatacttactaaaagcctgtgtaaacatgtcttaatgaatgttgttgaaagcaatgtaaatagttgaaaatataaatttatattacagtttaagaaaaccttatgaggcatcactagccactgttaatatctatttgtattcttataccttttcaatatatttgaacaaatatagtttctggcactatttttatactaggaaaaggagttactatgtatattatgcttagcttttaaggcattttaaataaccatgaatgttgatttcattactttcctttcctccatcacgagagtcatttcagatgactctttcatgacaaaatcactttaaaggaacacttacctccgattcctgtataaagtcatgagatggtcaaggtggttttccattgtgcaaattcttcacctgtcagtggtttcctcattttgccatgctttgtaaaaataaaaagaatgatcaagtaggtatgaa

SEQ ID NO: 165412 - DNA, 6770 bp, Homo sapiens
  Payload ID: 12560
  Gene Symbol: PDE5A
  Gene Name: phosphodiesterase 5A, cGMP-specific
  ENST ID: ENST00000394439
  CDS Start-End: 95-2566
cctcgccctggccctggctgggcggggaagctggggtgagggacgagtccacgggacagcccaaaggcaacatgacggaaccttgccaaaagaaatggtcaatgcatggtttgctgagagagttcacaccatccctgtgtgcaaggaaggtatcagaggccacaccgaatcttgctcttgtcccttgcagcagagtcctcgtgcagataacagtgcccctggaacaccaaccaggaaaatctctgcctctgaatttgaccggcctcttagacccattgttgtcaaggattctgagggaactgtgagcttcctctctgactcagaaaagaaggaacagatgcctctaacccctccaaggtttgatcatgatgaaggggaccagtgctcaagactcttggaattagtgaaggatatttctagtcatttggatgtcacagccttatgtcacaaaattttcttgcatatccatggactgatatctgctgaccgctattccctgttccttgtctgtgaagacagctccaatgacaagtttcttatcagccgcctctttgatgttgctgaaggttcaacactggaagaagtttcaaataactgtatccgcttagaatggaacaaaggcattgtgggacatgtggcagcgcttggtgagcccttgaacatcaaagatgcatatgaggatcctcggttcaatgcagaagttgaccaaattacaggctacaagacacaaagcattctttgtatgccaattaagaatcatagggaagaggttgttggtgtagcccaggccatcaacaagaaatcaggaaacggtgggacatttactgaaaaagatgaaaaggactttgctgcttatttggcattttgtggtattgttcttcataatgctcagctctatgagacttcactgctggagaacaagagaaatcaggtgctgcttgaccttgctagtttaatttttgaagaacaacaatcattagaagtaattttgaagaaaatagctgccactattatctctttcatgcaagtgcagaaatgcaccattttcatagtggatgaagattgctccgattctttttctagtgtgtttcacatggagtgtgaggaattagaaaaatcatctgatacattaacaagggaacatgatgcaaacaaaatcaattacatgtatgctcagtatgtcaaaaatactatggaaccacttaatatcccagatgtcagtaaggataaaagatttccctggacaactgaaaatacaggaaatgtaaaccagcagtgcattagaagtttgctttgtacacctataaaaaatggaaagaagaataaagttataggggtttgccaacttgttaataagatggaggagaatactggcaaggttaagcctttcaaccgaaatgacgaacagtttctggaagcttttgtcatcttttgtggcttggggatccagaacacgcagatgtatgaagcagtggagagagccatggccaagcaaatggtcacattggaggttctgtcgtatcatgcttcagcagcagaggaagaaacaagagagctacagtcgttagcggctgctgtggtgccatctgcccagacccttaaaattactgactttagcttcagtgactttgagctgtctgatctggaaacagcactgtgtacaattcggatgtttactgacctcaaccttgtgcagaacttccagatgaaacatgaggttctttgcagatggattttaagtgttaagaagaattatcggaagaatgttgcctatcataattggagacatgcctttaatacagctcagtgcatgtttgctgctctaaaagcaggcaaaattcagaacaagctgactgacctggagatacttgcattgctgattgctgcactaagccacgatttggatcaccgtggtgtgaataactcttacatacagcgaagtgaacatccacttgcccagctttactgccattcaatcatggaacaccatcattttgaccagtgcctgatgattcttaatagtccaggcaatcagattctcagtggcctctccattgaagaatataagaccacgttgaaaataatcaagcaagctattttagctacagacctagcactgtacattaagaggcgaggagaattttttgaacttataagaaaaaatcaattcaatttggaagatcctcatcaaaaggagttgtttttggcaatgctgatgacagcttgtgatctttctgcaattacaaaaccctggcctattcaacaacggatagcagaacttgtagcaactgaattttttgatcaaggagacagagagagaaaagaactcaacatagaacccactgatctaatgaacagggagaagaaaaacaaaatcccaagtatgcaagttgggttcatagatgccatctgcttgcaactgtatgaggccctgacccacgtgtcagaggactgtttccctttgctagatggctgcagaaagaacaggcagaaatggcaggcccttgcagaacagcaggagaagatgctgattaatggggaaagcggccaggccaagcggaactgagtggcctatttcatgcagagttgaagtttacagagatggtgtgttctgcaatatgcctagtttcttacacactgtctgtatagtgtctgtatttggtatatactttgccactgctgtatttttatttttgcacaacttttgagagtatagcatgaatgtttttagaggactattacatattttttgtatatttgttttatgctactgaactgaaaggatcaacaacatccactgttagcacattgataaaagcattgtttgtgatatttcgtgtactgcaaagtgtatgcagtattcttgcactgaggtttttttgcttggggattattttaaataattggtttttgtgttttctgaattaccattttttcaagaatgtttggaatctttcctttttcaaaagtaggttaggagcaaattatcatacattctgtgacatttaaagcctttataggatagtgaaaaatgctggctgagtggattttaagagaaataattgtatttgttaacagtgtctttttttaaaaagttaaggcactctgaaacaaatggaaagtcctatgaaactgtattgtaaagaaaacattatttaattgatatgctgttttgtgagagaacaggcaagacagaactttgtcacttcagtgcagtacatttttctgaaagctacccataaaatcactttcatctcacctacctgatgcaaagcaggtgaaaccttaggagatgatccagtcactgacttgattgagggataagtgtgatttagaaatggaatggccttggatgtctatcagtgaagaaaaatgttctgttagaagatctctctaagagtttttttccttctgagcttccttttcaaaataaaagtgacaattgtagcattgacttgaagtgagacatggttatagataagagagtacaaaatgactctttttcctgtcaattgaaatttaaagaaaagttttaattatataaatagcaaagggctattgccaatactagggtcaaaaatgaatttgagggaacagtgggtaagaaactttatgcctgaataacatttagcagtattgtgattgaaaaattgccatattttgatgtataggacaagtcaactgagatccagagaatcctggatgtgaatgctaaacactggcccttaactcacattcaatgtattttcttcccataacatttagtatagttaatattttcttagaatttgagcccatttaagtggattaatattctacatgtgtgcccctaaagacacatttactcaatattggagaagtagataatgaattaagcaactggtctaggaaaggaaaatttgtttcaaatatgcaggaatgtttggatttggggagagtagaaggagagatttgcttgatttgttaacttctacctccaacccacaaaaaagatatttgatctgagtttctatcactaatttggatagaaaatttctaagggacatggtaatccagcattctcaaggacctttcgccaaaatgtgttttccatctatgtcccgattcccctaaattttgcctaaaattcagtatgttccttaagtttttaaaattctgagtgtgtacaaatatcttgacataatgcagttttatttttatcattctggtaaaaaaacaaaaaatagaagcaaaacacattgtattgccattattttgtatttggtaaaggttaatctaggaagttaccaactgtttaatgctatatgtattgtatacttgtattttcaggatattttattttttttgccatacagataaaatttgtaaggttgcccctttgtggcactggtgtgtaaaatacacagactatcactaaaataatagttatatatacatacaggtgtatacttatgcatgcatacataaatccttagtatagaaaaattgcataaagaatagcaatctttaataaacctttttattacattgtgatttagcagttatgctaaaatatgtacttatgctttagtagtttgtttggtcccctctagtatgtgtcactgagaaattttttaaagacatggtagatcgtgtttagaggctttgtatgtgtgtcattttaataagcaagaagatatatttagattagaaatggtttggtctgcctttgaatattgtttattttactttactagttgagacattaaaggaagctgggcaatgcctattttatttctttgttggatattttagttcatacaaagcagagtacttctttagggctggttaattggttcaaataatttttaatttcctttctagtatcttctcaagttggaaaaatatacatacagtcctccttcaccttactctgtatttatattacccataactagcaagaagttcttgttctagattttttgtttgtttagttataacagagtaacataccatttaattacaatttttagccagaaaagtccccactattttactaacttgttaaaagatatctatataattgcctggccttatatttttcagtagattagaccgtgccaatcacaatcctgggtggatttgtgtaagtcacttaacctctgtgtgcctaaacaagttgtgcttttttaaaaggagttatgtttgggcaaagcctttgtcttcaagcagaatgtcacagaaggcagctactttataagccccaatgggccatggagaccactgtcagaaatgggatattagtctagagagaaggtgatctattcccacatgtcatttctaatgttgagtttccatgactgaacaaagagaatatatttattcagcttcacttgcagatcactagtgaatgtgagatttagagctcattgagtatattgcttcaaggtacaaacccaggatgatgatgttgtcaccactgtctcttaattttgaataatagtttcctttaataggagtattagagataagaaagtatatgaaaatatactggaaatattggattcttggagaaaactgttcagtcacagatatattcttgcctagcagtgaagtgcctttattttcagcatagcaaataaatattagacctgttccaatttgatctacaatttttttctgtgtttttcaccagattgtactcctaaaacttaacaggccatcacaagcaattgtcttttgtttacaagattgatttaatatgagaggatacaaaatgtcatcgttatcctctcttatgaacaactgtagtcaaaataaggtggcacaatttaattgttttgtatcagaaatacactgacccaccttttattgagtcctgccacatgttaggtaccgtgctctgctgtggagacagagcagtgaccccaaggagctcacggtccctgaaggaggtgctagagaagagacttagcttctgatactgccaatttaatgtgagaacatggggtatactgcatcatttccattttcatcaataacatatgttttatgcaccttctttacctgaaacttactaagaatctaccagtaaacaaacatcctgtctttttgcaagtatgaatcacttaacctgctgatagttgaagaacactttaggagttttgtattcttgtatatagtttattttttccatgtgctagccaggtaaagattacacagttcttctggactgttaaattgtgcatggttttggaccccttctgctctactacagagagtgaagaagaaagtattaaagctcactttaccattccatatacttactaaaagcctgtgtaaacatgtcttaatgaatgttgttgaaagcaatgtaaatagttgaaaatataaatttatattacagtttaagaaaaccttatgaggcatcactagccactgttaatatctatttgtattcttataccttttcaatatatttgaacaaatatagtttctggcactatttttatactaggaaaaggagttactatgtatattatgcttagcttttaaggcattttaaataaccatgaatgttgatttcattactttcctttcctccatcacgagagtcatttcagatgactctttcatgacaaaatcactttaaaggaacacttacctccgattcctgtataaagtcatgagatggtcaaggtggttttccattgtgcaaattcttcacctgtcagtggtttcctcattttgccatgctttgtaaaaataaaaagaatgatcaagtaggtatg

SEQ ID NO: 165413 - DNA, 747 bp, Homo sapiens
  Payload ID: 12560
  Gene Symbol: PDE5A
  Gene Name: phosphodiesterase 5A, cGMP-specific
  ENST ID: ENST00000420633
  CDS Start-End: 76-747
gggcggggaagctggggtgagggacgagtccacgggacagcccaaaggcaacatgacggaaccttgccaaaagaaatggtcaatgcatggtttgctgagagagttcacaccatccctgtgtgcaaggaaggtatcagaggccacaccgaatcttgctcttgtcccttgcagcagagtcctcgtgcagataacagtgcccctggaacaccaaccaggaaaatctctgcctctgaatttgaccggcctcttagacccattgttgtcaaggattctgagggaactgtgagcttcctctctgactcagaaaagaaggaacagatgcctctaacccctccaaggtttgatcatgatgaaggggaccagtgctcaagactcttggaattagtgaaggatatttctagtcatttggatgtcacagccttatgtcacaaaattttcttgcatatccatggactgatatctgctgaccgctattccctgttccttgtctgtgaagacagctccaatgacaagtttcttatcagccgcctctttgatgttgctgaaggttcaacactggaagaagtttcaaataactgtatccgcttagaatggaacaaaggcattgtgggacatgtggcagcgcttggtgagcccttgaacatcaaagatgcatatgaggatcctcggttcaatgcagaagttgaccaaattacaggctacaagacacaaagcattctttgtatgccaattaagaatcatagggaa

SEQ ID NO: 165414 - DNA, 892 bp, Homo sapiens
  Payload ID: 12560
  Gene Symbol: PDE5A
  Gene Name: phosphodiesterase 5A, cGMP-specific
  ENST ID: ENST00000503412
  CDS Start-End: 1-557
ctgcactaagccacgatttggatcaccgtggtgtgaataactcttacatacagcgaagtgaacatccacttgcccagctttactgccattcaatcatggaacaccatcattttgaccagtgcctgatgattcttaatagtccaggcaatcagattctcagtggcctctccattgaagaatataagaccacgttgaaaataatcaagcaagctattttagctacagacctagcactgtacattaagaggcgaggagaattttttgaacttataagaaaaaatcaattcaatttggaagatcctcatcaaaaggagttgtttttggcaatgctgatgacagcttgtgatctttctgcaattacaaaaccctggcctattcaacaacggatagcagaacttgtagcaactgaattttttgatcaaggagacagagagagaaaagaactcaacatagaacccactgatctaatgaacagggagaagaaaaacaaaatcccaagtatgcaagttgggttcatagatgccatctgcttgcaactgtatgaggtatttatatgaaaactactagacttgctaaacttggactgttgtgaattagaacctaaaattgaagagattaatattaggcgcctatattttgcttctaaatcaagaaataaaattattagcagtatggtttcttttactgatgaacatgtttgtattgaacaaggaacacatactaatatctattgagtgcctactatgtgctaatctccaacaaattgatttggggatgctaagaagaattatgtgccagtgttaccctcaaggagcaatactgtatatactatgcgttagcatattctttttttaagtctaaattttagcctaaataaagaaaagtaatccaa

SEQ ID NO: 165415 - DNA, 5642 bp, Homo sapiens
  Payload ID: 12561
  Gene Symbol: PDE6A
  Gene Name: phosphodiesterase 6A, cGMP-specific, rod, alpha
  Uniprot ID: P16499
  ENST ID: ENST00000255266
  CDS Start-End: 121-2703
agtatgttttgcagacaagacccagagaagtccagactggacttgttgcagactgcaaaactgccattggaaggcctccgtcccagtccttctacagagtagccagtgggattcccagccatgggcgaggtgacagcagaggaggtggagaagttcctggactcgaatattggctttgccaaacagtactacaacctccactaccgggccaagctcatctccgacctccttggggccaaggaggctgccgtggacttcagcaactaccactccccgagcagcatggaggagagcgaaatcatctttgatctcctgcgggactttcaggagaatttacagacagagaaatgcatcttcaatgtcatgaagaagctgtgcttcctcctgcaggcagaccgcatgagcctgttcatgtaccggacccgcaatggcatcgcagagctggccaccaggcttttcaatgtccacaaggatgctgtcctcgaggactgcctggtgatgcccgaccaagagatcgtcttccctttggacatgggcatcgtgggccatgtcgcacactctaagaagattgctaacgtccccaacacagaggaggatgagcatttctgtgactttgtggacatcctcacagagtacaagaccaagaacatcttggcttcccccataatgaatgggaaggatgtggtggccataatcatggctgtgaataaagtggatggatcccacttcaccaagagagatgaagagattcttctcaagtacctcaattttgcaaatctaatcatgaaggtgtaccacctgagttacctgcacaactgtgaaactcgacgtggccagatactgctgtggtctgggagcaaagtctttgaagaacttacggacatcgaacgacagttccacaaagccctgtacacagtccgtgctttcctcaactgtgacagatactctgtgggtctcttagacatgaccaagcagaaggaattttttgatgtgtggccggttctgatgggtgaagttccaccttactctggtcccaggactccggatggaagagaaattaacttttacaaggtcattgactacatcctgcatggcaaagaggacatcaaagtcatcccgaatccacctcctgaccattgggctttagtaagcggtctcccagcttatgttgcccagaatggcctgatttgcaacatcatgaatgcgcctgcggaggacttttttgcatttcagaaagaacctctggatgagtctggatggatgattaaaaatgtgctttcaatgccgattgtgaacaagaaggaagaaattgttggagtggccacattttacaatcgtaaagatgggaagccctttgatgaaatggatgagacgctcatggagtctttgactcaatttctgggctggtctgtcttaaatcctgacacctatgagtcaatgaataaacttgaaaataggaaggatattttccaggacatagtaaaatatcatgtgaagtgtgacaatgaagaaattcagaaaatcttgaaaaccagagaggtgtatgggaaggagccatgggagtgtgaggaagaggagctggctgagatcctgcaagcggagctgccagatgcagataaatacgaaattaataaatttcacttcagtgacttacccctaacagaactggagctggtaaaatgtggaatacagatgtattatgagctcaaagtggtggataaatttcacattccacaagaggccctggtgcggttcatgtactccctgagtaagggctaccgcaagatcacctaccacaactggcggcacggcttcaacgtggggcagaccatgttctccctgctggtgacgggaaagctgaagcgctacttcacggacctagaggccttggccatggtcactgctgctttctgccatgacattgaccacagaggcaccaataacctctaccagatgaaatcccagaacccactggccaagctccatgggtcctctatcttggaaagacaccacttggagtttggcaaaacactgctcagagacgagagcctgaatatctttcaaaacctcaatcgtcgacagcatgagcatgccatccacatgatggacattgcaatcattgccacagacctcgccctgtatttcaagaagaggacgatgttccaaaagatcgtggatcagtctaagacatatgagagtgaacaggagtggacacagtacatgatgctggagcagacacggaaggaaatcgttatggccatgatgatgaccgcctgtgatctctcagccatcaccaaaccctgggaggtgcagagccaggtagctctgctggtggctgctgaattctgggaacaaggtgacctggagcgcacggtgctgcaacagaatcccattcccatgatggacagaaacaaagcagatgaactccctaagcttcaagtcggcttcattgactttgtttgcaccttcgtctacaaggaattctcccgtttccacgaggagatcaccccaatgttggacgggatcaccaacaatcgcaaggagtggaaggcgcttgctgatgagtacgatgccaagatgaaggtgcaggaggagaagaagcagaaacagcagtcggccaagtcagcagccgcaggaaatcagccggggggaaaccccagcccagggggtgcaactacatccaagtcctgctgcatccagtaacaccactggggatgtgctggctggacggcaccaccctttcctgggaagagatgactcaagccagtggaagaccacacaccttgagaagtagaagagtcataggatttgaaagctgttagagaatttagcttccaggactgttcaatcttttggcttccctgggccacattggaagaattgtcttgggtcacacataaaatacagtaacactaatgatagctgttgaacttaaaaaaaaaaatcgccaaaaaaaaaaatttcataatgttttaagaaagtttatgaatttgtgttgggccgcattcaaagccgtcctgggctgcatgtggcccacgggccgtgggttgaacaagcttggcttataccttatccagtggcttttaaacattcttttagtcttgagaactgcctattgagctaaaaccaatattctagctttcatagacatcagttaaacatttaattacatttaattaatgccagattcactggcttgcttagaatcatttttgttcttatactttcagttaatgtattgtaaaaattttcaatcattttcaaaagtagagaattgtacgttgaatccccacatacccatcacccagattccaatatcaagattttgctacatgcatttcgtctgtcctttttacattttcttttcaattttttttcttacctgaagtgtttaaaggcaaatcctggccaggcgtggtggctcacacctgtaatcccagcacttcaggaggctgaggtgggcagactgcatgagcccaggagtctgagaccaacctgagcaaaatggcaaaaccctgtctctacaaaaaatacaaaaattagcactcacctgtagtctcagctacctgggaggcagaggtgagaggatctcttgaacccaggaggcggaagttgcagtgagctgagatcatgctactgcactccagcttgggcgaccgagcgagactctgactcaaacaaaagcaaaagaaaaggcaaatcccaaacatatcatttcacacctctactatctcatctttaaagaaataagtatgttttctaacataaccacatcactggcccatgcaaccaatgcctgcctaatacccagctgtgatctatgctttgatgggctgcacagaccccaagcttcagcaaaggacttgggaccccaccagctttgagtgctgttgacagacccttagtatcaaccccatcaggtgttactgcagccttccccagggtggcctacacccaatgactgatccatgccaggtggagaggcctggccatcttggctgagcatgggataactgtgcagggctgttccagctccacgactcctcgtggggtccactaaggctgtcgctgggctcacatcccaactcgacttctccctctgcccactcctatttccttcccttccccaagcatcggtccccagggcactgcttaataagcatcctgcagactaagtccattttagagtctgctttctgggacacccaacttgtgatgccagcccttaatcaaccttccttcattctcatgaacgttttcaatggttggcttgcctgaatctgatccaaacaaattcacatattgaatttagttgtttctttttgttggtttttagaaaaaagaagatgtactttttattcttggatttttcattgatttcacagagtataaattaagtcagattattctcaattccagaacttctgtttcttaaattagcaggcattctgttggtttaaaaagatagatgttggccgggcgcggtggctcacgcctgtaattccagcactttgggaggccaaggtgggtggatcacctgaggtcaggagttcaagaccagcctggccaacatggtgaaaccccatctctactaaaaatacaaaaattagctgggtgtggtggtgtgcacctgtaatcccagctactcaggaggctgaggcaggagaatcgcttgaacctgggaggcgaaggttgcagtgagctgagatcatgccactgcactccagcctgggcaacaagagcaagactccgtctcaaaaaaaaaaaaaagaaaaaaaaaagatgtggcagatagaatttctctctttctctatctttcatgacgaggtctcactctgtcgcccaggctggagtgcagtggtatgaccatagctcactggagccccagctgcccgggctcaagcaatcctccatctcagcttaccaagcagcggtgaccacaggcatgcaccaccatgcccagctaattttttaaaacctatctttgtagacatggggtctcattctgttgcccaggctggcctcaaactcctgacttcaagcaatcctcctgcctcagcctcccaaagtgttgggattacaggcgtgagccactgcacctggccaggacttatttcttttaaaccgaatctaagtatgttctggcaagtatgcaatacctagcggaatgcactggcctgatcagcattcataccatagtaactgatgttgaaaacagcacaaataaaccagaagttgaaaatggcaataacatgctaaaaatttgcaagtcaatttgttacacttgtccaaatcttgattttttttccttctctatcgttccccccccaccaccagctttatggaggtataattagcaaataaaaagtatacatatttaaggtatacactgtgatgttttgatatacattgtgaaatggttaccataattaagctaattaatatatccatcacctcacatagccatggttaagtttctgaagtctcttttaatctacaaagtactccttccttttttccattgtcatcaccttgcagaaacagagtcagttttcccacattctgtatttatctgtttgtttctttgtggccgcatgtaacacattcctctgtctcattctaataaatggacattagctcta

SEQ ID NO: 165416 - DNA, 5398 bp, Homo sapiens
  Payload ID: 12561
  Gene Symbol: PDE6A
  Gene Name: phosphodiesterase 6A, cGMP-specific, rod, alpha
  ENST ID: ENST00000613228
  CDS Start-End: 121-2460
agtatgttttgcagacaagacccagagaagtccagactggacttgttgcagactgcaaaactgccattggaaggcctccgtcccagtccttctacagagtagccagtgggattcccagccatgggcgaggtgacagcagaggaggtggagaagttcctggactcgaatattggctttgccaaacagtactacaacctccactaccgggccaagctcatctccgacctccttggggccaaggaggctgccgtggacttcagcaactaccactccccgagcagcatggaggagagcgaaatcatctttgatctcctgcgggactttcaggagaatttacagacagagaaatgcatcttcaatgtcatgaagaagctgtgcttcctcctgcaggcagaccgcatgagcctgttcatgtaccggacccgcaatggcatcgcagagctggccaccaggcttttcaatgtccacaaggatgctgtcctcgaggactgcctggtgatgcccgaccaagagatcgtcttccctttggacatgggcatcgtgggccatgtcgcacactctaagaagattgctaacgtccccaacacagaggagatactgctgtggtctgggagcaaagtctttgaagaacttacggacatcgaacgacagttccacaaagccctgtacacagtccgtgctttcctcaactgtgacagatactctgtgggtctcttagacatgaccaagcagaaggaattttttgatgtgtggccggttctgatgggtgaagttccaccttactctggtcccaggactccggatggaagagaaattaacttttacaaggtcattgactacatcctgcatggcaaagaggacatcaaagtcatcccgaatccacctcctgaccattgggctttagtaagcggtctcccagcttatgttgcccagaatggcctgatttgcaacatcatgaatgcgcctgcggaggacttttttgcatttcagaaagaacctctggatgagtctggatggatgattaaaaatgtgctttcaatgccgattgtgaacaagaaggaagaaattgttggagtggccacattttacaatcgtaaagatgggaagccctttgatgaaatggatgagacgctcatggagtctttgactcaatttctgggctggtctgtcttaaatcctgacacctatgagtcaatgaataaacttgaaaataggaaggatattttccaggacatagtaaaatatcatgtgaagtgtgacaatgaagaaattcagaaaatcttgaaaaccagagaggtgtatgggaaggagccatgggagtgtgaggaagaggagctggctgagatcctgcaagcggagctgccagatgcagataaatacgaaattaataaatttcacttcagtgacttacccctaacagaactggagctggtaaaatgtggaatacagatgtattatgagctcaaagtggtggataaatttcacattccacaagaggccctggtgcggttcatgtactccctgagtaagggctaccgcaagatcacctaccacaactggcggcacggcttcaacgtggggcagaccatgttctccctgctggtgacgggaaagctgaagcgctacttcacggacctagaggccttggccatggtcactgctgctttctgccatgacattgaccacagaggcaccaataacctctaccagatgaaatcccagaacccactggccaagctccatgggtcctctatcttggaaagacaccacttggagtttggcaaaacactgctcagagacgagagcctgaatatctttcaaaacctcaatcgtcgacagcatgagcatgccatccacatgatggacattgcaatcattgccacagacctcgccctgtatttcaagaagaggacgatgttccaaaagatcgtggatcagtctaagacatatgagagtgaacaggagtggacacagtacatgatgctggagcagacacggaaggaaatcgttatggccatgatgatgaccgcctgtgatctctcagccatcaccaaaccctgggaggtgcagagccaggtagctctgctggtggctgctgaattctgggaacaaggtgacctggagcgcacggtgctgcaacagaatcccattcccatgatggacagaaacaaagcagatgaactccctaagcttcaagtcggcttcattgactttgtttgcaccttcgtctacaaggaattctcccgtttccacgaggagatcaccccaatgttggacgggatcaccaacaatcgcaaggagtggaaggcgcttgctgatgagtacgatgccaagatgaaggtgcaggaggagaagaagcagaaacagcagtcggccaagtcagcagccgcaggaaatcagccggggggaaaccccagcccagggggtgcaactacatccaagtcctgctgcatccagtaacaccactggggatgtgctggctggacggcaccaccctttcctgggaagagatgactcaagccagtggaagaccacacaccttgagaagtagaagagtcataggatttgaaagctgttagagaatttagcttccaggactgttcaatcttttggcttccctgggccacattggaagaattgtcttgggtcacacataaaatacagtaacactaatgatagctgttgaacttaaaaaaaaaaatcgccaaaaaaaaaaatttcataatgttttaagaaagtttatgaatttgtgttgggccgcattcaaagccgtcctgggctgcatgtggcccacgggccgtgggttgaacaagcttggcttataccttatccagtggcttttaaacattcttttagtcttgagaactgcctattgagctaaaaccaatattctagctttcatagacatcagttaaacatttaattacatttaattaatgccagattcactggcttgcttagaatcatttttgttcttatactttcagttaatgtattgtaaaaattttcaatcattttcaaaagtagagaattgtacgttgaatccccacatacccatcacccagattccaatatcaagattttgctacatgcatttcgtctgtcctttttacattttcttttcaattttttttcttacctgaagtgtttaaaggcaaatcctggccaggcgtggtggctcacacctgtaatcccagcacttcaggaggctgaggtgggcagactgcatgagcccaggagtctgagaccaacctgagcaaaatggcaaaaccctgtctctacaaaaaatacaaaaattagcactcacctgtagtctcagctacctgggaggcagaggtgagaggatctcttgaacccaggaggcggaagttgcagtgagctgagatcatgctactgcactccagcttgggcgaccgagcgagactctgactcaaacaaaagcaaaagaaaaggcaaatcccaaacatatcatttcacacctctactatctcatctttaaagaaataagtatgttttctaacataaccacatcactggcccatgcaaccaatgcctgcctaatacccagctgtgatctatgctttgatgggctgcacagaccccaagcttcagcaaaggacttgggaccccaccagctttgagtgctgttgacagacccttagtatcaaccccatcaggtgttactgcagccttccccagggtggcctacacccaatgactgatccatgccaggtggagaggcctggccatcttggctgagcatgggataactgtgcagggctgttccagctccacgactcctcgtggggtccactaaggctgtcgctgggctcacatcccaactcgacttctccctctgcccactcctatttccttcccttccccaagcatcggtccccagggcactgcttaataagcatcctgcagactaagtccattttagagtctgctttctgggacacccaacttgtgatgccagcccttaatcaaccttccttcattctcatgaacgttttcaatggttggcttgcctgaatctgatccaaacaaattcacatattgaatttagttgtttctttttgttggtttttagaaaaaagaagatgtactttttattcttggatttttcattgatttcacagagtataaattaagtcagattattctcaattccagaacttctgtttcttaaattagcaggcattctgttggtttaaaaagatagatgttggccgggcgcggtggctcacgcctgtaattccagcactttgggaggccaaggtgggtggatcacctgaggtcaggagttcaagaccagcctggccaacatggtgaaaccccatctctactaaaaatacaaaaattagctgggtgtggtggtgtgcacctgtaatcccagctactcaggaggctgaggcaggagaatcgcttgaacctgggaggcgaaggttgcagtgagctgagatcatgccactgcactccagcctgggcaacaagagcaagactccgtctcaaaaaaaaaaaaaagaaaaaaaaaagatgtggcagatagaatttctctctttctctatctttcatgacgaggtctcactctgtcgcccaggctggagtgcagtggtatgaccatagctcactggagccccagctgcccgggctcaagcaatcctccatctcagcttaccaagcagcggtgaccacaggcatgcaccaccatgcccagctaattttttaaaacctatctttgtagacatggggtctcattctgttgcccaggctggcctcaaactcctgacttcaagcaatcctcctgcctcagcctcccaaagtgttgggattacaggcgtgagccactgcacctggccaggacttatttcttttaaaccgaatctaagtatgttctggcaagtatgcaatacctagcggaatgcactggcctgatcagcattcataccatagtaactgatgttgaaaacagcacaaataaaccagaagttgaaaatggcaataacatgctaaaaatttgcaagtcaatttgttacacttgtccaaatcttgattttttttccttctctatcgttccccccccaccaccagctttatggaggtataattagcaaataaaaagtatacatatttaaggtatacactgtgatgttttgatatacattgtgaaatggttaccataattaagctaattaatatatccatcacctcacatagccatggttaagtttctgaagtctcttttaatctacaaagtactccttccttttttccattgtcatcaccttgcagaaacagagtcagttttcccacattctgtatttatctgtttgtttctttgtggccgcatgtaacacattcctctgtctcattctaataaatggacattagctct

SEQ ID NO: 165417 - DNA, 4039 bp, Homo sapiens
  Payload ID: 12561
  Gene Symbol: PDE6A
  Gene Name: phosphodiesterase 6A, cGMP-specific, rod, alpha
  ENST ID: ENST00000617647
  CDS Start-End: 121-2460
agtatgttttgcagacaagacccagagaagtccagactggacttgttgcagactgcaaaactgccattggaaggcctccgtcccagtccttctacagagtagccagtgggattcccagccatgggcgaggtgacagcagaggaggtggagaagttcctggactcgaatattggctttgccaaacagtactacaacctccactaccgggccaagctcatctccgacctccttggggccaaggaggctgccgtggacttcagcaactaccactccccgagcagcatggaggagagcgaaatcatctttgatctcctgcgggactttcaggagaatttacagacagagaaatgcatcttcaatgtcatgaagaagctgtgcttcctcctgcaggcagaccgcatgagcctgttcatgtaccggacccgcaatggcatcgcagagctggccaccaggcttttcaatgtccacaaggatgctgtcctcgaggactgcctggtgatgcccgaccaagagatcgtcttccctttggacatgggcatcgtgggccatgtcgcacactctaagaagattgctaacgtccccaacacagaggagatactgctgtggtctgggagcaaagtctttgaagaacttacggacatcgaacgacagttccacaaagccctgtacacagtccgtgctttcctcaactgtgacagatactctgtgggtctcttagacatgaccaagcagaaggaattttttgatgtgtggccggttctgatgggtgaagttccaccttactctggtcccaggactccggatggaagagaaattaacttttacaaggtcattgactacatcctgcatggcaaagaggacatcaaagtcatcccgaatccacctcctgaccattgggctttagtaagcggtctcccagcttatgttgcccagaatggcctgatttgcaacatcatgaatgcgcctgcggaggacttttttgcatttcagaaagaacctctggatgagtctggatggatgattaaaaatgtgctttcaatgccgattgtgaacaagaaggaagaaattgttggagtggccacattttacaatcgtaaagatgggaagccctttgatgaaatggatgagacgctcatggagtctttgactcaatttctgggctggtctgtcttaaatcctgacacctatgagtcaatgaataaacttgaaaataggaaggatattttccaggacatagtaaaatatcatgtgaagtgtgacaatgaagaaattcagaaaatcttgaaaaccagagaggtgtatgggaaggagccatgggagtgtgaggaagaggagctggctgagatcctgcaagcggagctgccagatgcagataaatacgaaattaataaatttcacttcagtgacttacccctaacagaactggagctggtaaaatgtggaatacagatgtattatgagctcaaagtggtggataaatttcacattccacaagaggccctggtgcggttcatgtactccctgagtaagggctaccgcaagatcacctaccacaactggcggcacggcttcaacgtggggcagaccatgttctccctgctggtgacgggaaagctgaagcgctacttcacggacctagaggccttggccatggtcactgctgctttctgccatgacattgaccacagaggcaccaataacctctaccagatgaaatcccagaacccactggccaagctccatgggtcctctatcttggaaagacaccacttggagtttggcaaaacactgctcagagacgagagcctgaatatctttcaaaacctcaatcgtcgacagcatgagcatgccatccacatgatggacattgcaatcattgccacagacctcgccctgtatttcaagaagaggacgatgttccaaaagatcgtggatcagtctaagacatatgagagtgaacaggagtggacacagtacatgatgctggagcagacacggaaggaaatcgttatggccatgatgatgaccgcctgtgatctctcagccatcaccaaaccctgggaggtgcagagccaggtagctctgctggtggctgctgaattctgggaacaaggtgacctggagcgcacggtgctgcaacagaatcccattcccatgatggacagaaacaaagcagatgaactccctaagcttcaagtcggcttcattgactttgtttgcaccttcgtctacaaggaattctcccgtttccacgaggagatcaccccaatgttggacgggatcaccaacaatcgcaaggagtggaaggcgcttgctgatgagtacgatgccaagatgaaggtgcaggaggagaagaagcagaaacagcagtcggccaagtcagcagccgcaggaaatcagccggggggaaaccccagcccagggggtgcaactacatccaagtcctgctgcatccagtaacaccactggggatgtgctggctggacggcaccaccctttcctgggaagagatgactcaagccagtggaagaccacacaccttgagaagtagaagagtcataggatttgaaagctgttagagaatttagcttccaggactgttcaatcttttggcttccctgggccacattggaagaattgtcttgggtcacacataaaatacagtaacactaatgatagctgttgaacttaaaaaaaaaaatcgccaaaaaaaaaaatttcataatgttttaagaaagtttatgaatttgtgttgggccgcattcaaagccgtcctgggctgcatgtggcccacgggccgtgggttgaacaagcttggcttataccttatccagtggcttttaaacattcttttagtcttgagaactgcctattgagctaaaaccaatattctagctttcatagacatcagttaaacatttaattacatttaattaatgccagattcactggcttgcttagaatcatttttgttcttatactttcagttaatgtattgtaaaaattttcaatcattttcaaaagtagagaattgtacgttgaatccccacatacccatcacccagattccaatatcaagattttgctacatgcatttcgtctgtcctttttacattttcttttcaattttttttcttacctgaagtgtttaaaggcaaatcctggccaggcgtggtggctcacacctgtaatcccagcacttcaggaggctgaggtgggcagactgcatgagcccaggagtctgagaccaacctgagcaaaatggcaaaaccctgtctctacaaaaaatacaaaaattagcactcacctgtagtctcagctacctgggaggcagaggtgagaggatctcttgaacccaggaggcggaagttgcagtgagctgagatcatgctactgcactccagcttgggcgaccgagcgagactctgactcaaacaaaagcaaaagaaaaggcaaatcccaaagtgttgggattacaggcgtgagccactgcacctggccaggacttatttcttttaaaccgaatctaagtatgttctggcaagtatgcaatacctagcggaatgcactggcctgatcagcattcataccatagtaactgatgttgaaaacagcacaaataaaccagaagttgaaaatggcaataacatgctaaaaatttgcaagtcaatttgttacacttgtccaaatcttgattttttttccttctctatcgttccccccccaccaccagctttatggaggtataattagcaaataaaaagtatacatatttaaggtatacactgtgatgttttgatatacattgtgaaatggttaccataattaagctaattaatatatccatcacctcacatagccatggttaagtttctgaagtctcttttaatctacaaagtactccttccttttttccattgtcatcaccttgcagaaacagagtcagttttcccacattctgtatttatctgtttgtttctttgtggccgcatgtaacacattcctctgtctcattctaataaatggacattagctctag

SEQ ID NO: 165418 - DNA, 3280 bp, Homo sapiens
  Payload ID: 12562
  Gene Symbol: PDE6B
  Gene Name: phosphodiesterase 6B, cGMP-specific, rod, beta
  Uniprot ID: P35913
  ENST ID: ENST00000255622
  CDS Start-End: 44-2605
tgcgtgcctggagcagcagcgtctccagggacaggcagccaccatgagcctcagtgaggagcaggcccggagctttctggaccagaaccccgattttgcccgccagtactttgggaagaaactgagccctgagaatgtggccgcggcctgcgaggacgggtgcccgccggactgcgacagcctccgggacctctgccaggtggaggagagcacggcgctgctggagctggtgcaggatatgcaggagagcatcaacatggagcgcgtggtcttcaaggtcctgcggcgcctctgcaccctcctgcaggccgaccgctgcagcctcttcatgtaccgccagcgcaacggcgtggccgagctggccaccaggcttttcagcgtgcagccggacagcgtcctggaggactgcctggtgccccccgactccgagatcgtcttcccactggacatcggggtcgtgggccacgtggctcagaccaaaaagatggtgaacgtcgaggacgtggccgagtgccctcacttcagctcatttgctgacgagctcactgactacaagacaaagaatatgctggccacacccatcatgaatggcaaagacgtcgtggcggtgatcatggcagtgaacaagctcaacggcccattcttcaccagcgaagacgaagatgtgttcttgaagtacctgaattttgccacgttgtacctgaagatctatcacctgagctacctccacaactgcgagacgcgccgcggccaggtgctgctgtggtcggccaacaaggtgtttgaggagctgacggacatcgagaggcagttccacaaggccttctacacggtgcgggcctacctcaactgcgagcggtactccgtgggcctcctggacatgaccaaggagaaggaattttttgacgtgtggtctgtgctgatgggagagtcccagccgtactcgggcccacgcacgcctgatggccgggaaattgtcttctacaaagtgatcgactacgtcctccacggcaaggaggagatcaaggtcattcccacaccctcagccgatcactgggccctggccagcggccttccaagctacgtggcagaaagcggctttatttgtaacatcatgaatgcttccgctgacgaaatgttcaaatttcaggaaggggccctggacgactccgggtggctcatcaagaatgtgctgtccatgcccatcgtcaacaagaaggaggagattgtgggagtcgccacattttacaacaggaaagacgggaagccctttgacgaacaggacgaggttctcatggagtccctgacacagttcctgggctggtcagtgatgaacaccgacacctacgacaagatgaacaagctggagaaccgcaaggacatcgcacaggacatggtcctttaccacgtgaagtgcgacagggacgagatccagctcatcctgccaaccagagcgcgcctggggaaggagcctgctgactgcgatgaggacgagctgggcgaaatcctgaaggaggagctgccagggcccaccacatttgacatctacgaattccacttctctgacctggagtgcaccgaactggacctggtcaaatgtggcatccagatgtactacgagctgggcgtggtccgaaagttccagatcccccaggaggtcctggtgcggttcctgttctccatcagcaaagggtaccggagaatcacctaccacaactggcgccacggcttcaacgtggcccagacgatgttcacgctgctcatgaccggcaaactgaagagctactacacggacctggaggccttcgccatggtgacagccggcctgtgccatgacatcgaccaccgcggcaccaacaacctgtaccagatgaagtcccagaaccccttggctaagctccacggctcctcgattttggagcggcaccacctggagtttgggaagttcctgctctcggaggagaccctgaacatctaccagaacctgaaccggcggcagcacgagcacgtgatccacctgatggacatcgccatcatcgccacggacctggccctgtacttcaagaagagagcgatgtttcagaagatcgtggatgagtccaagaactaccaggacaagaagagctgggtggagtacctgtccctggagacgacccggaaggagatcgtcatggccatgatgatgacagcctgcgacctgtctgccatcaccaagccctgggaagtccagagcaaggtcgcacttctcgtggctgctgagttctgggagcaaggtgacttggaaaggacagtcttggatcagcagcccattcctatgatggaccggaacaaggcggccgagctccccaagctgcaagtgggcttcatcgacttcgtgtgcacattcgtgtacaaggagttctctcgtttccacgaagagatcctgcccatgttcgaccgactgcagaacaataggaaagagtggaaggcgctggctgatgagtatgaggccaaagtgaaggctctggaggagaaggaggaggaggagagggtggcagccaagaaaggcacagaaatttgcaatggcggcccagcacccaagtcttcaacctgctgtatcctgtgagcactggtcccatggggaccctatggctccctcaatcttcacccactaggatttgggttctgcctgtggctatttgctacaagaggttaggaagcccaagaaaatgactgaagatcattctggatattttaatttttttttttttttttttttgagatggagtcttgctctgtcacccaggctggagtgccgtggcacgatctcagctcactgcaacctccacctcccaggttcaagcgattctcgtgcctcagcctcctgagtagctgggactacaggcgcccaccaccacacatggctaatttttgtattttcagtacagatggggtttcaccatattgggcaggctggtctcgaactcctgacctcaggtgatcacccgcctcagcttcctgaagtgctgggattacaggcatgagccaccacgcccagcctgtttttataaactgaagccaactgtgaataaactgtagcctacattactcatccatttttggatagttaccactgggagacctttgaaaagggtccatgaactctgaaatcactgagaacatttgcagccacacatgtacatatgtgtacacaggtagacagatggacacaggccgtttctcatccagtttaggaaaacacacatgctcaggaattcagaataaaataaacagaaaacta

SEQ ID NO: 165419 - DNA, 2120 bp, Homo sapiens
  Payload ID: 12562
  Gene Symbol: PDE6B
  Gene Name: phosphodiesterase 6B, cGMP-specific, rod, beta
  Uniprot ID: P35913
  ENST ID: ENST00000429163
  CDS Start-End: 267-1994
gcagcggaggagagggagctggcaccatgcggtagaagacccagcggccgccgcgagtgtgaggaggcagggcctggtggggcctgggtctgggccttgaccaaggaggcagagaaaggtggcccaaggagggccctggggtgctgctgtggtcggccaacaaggtgtttgaggagctgacggacatcgagaggcagttccacaaggccttctacacggtgcgggcctacctcaactgcgagcggtactccgtgggcctcctggacatgaccaaggagaaggaattttttgacgtgtggtctgtgctgatgggagagtcccagccgtactcgggcccacgcacgcctgatggccgggaaattgtcttctacaaagtgatcgactacgtcctccacggcaaggaggagatcaaggtcattcccacaccctcagccgatcactgggccctggccagcggccttccaagctacgtggcagaaagcggctttatttgtaacatcatgaatgcttccgctgacgaaatgttcaaatttcaggaaggggccctggacgactccgggtggctcatcaagaatgtgctgtccatgcccatcgtcaacaagaaggaggagattgtgggagtcgccacattttacaacaggaaagacgggaagccctttgacgaacaggacgaggttctcatggagtccctgacacagttcctgggctggtcagtgatgaacaccgacacctacgacaagatgaacaagctggagaaccgcaaggacatcgcacaggacatggtcctttaccacgtgaagtgcgacagggacgagatccagctcatcctgccaaccagagcgcgcctggggaaggagcctgctgactgcgatgaggacgagctgggcgaaatcctgaaggaggagctgccagggcccaccacatttgacatctacgaattccacttctctgacctggagtgcaccgaactggacctggtcaaatgtggcatccagatgtactacgagctgggcgtggtccgaaagttccagatcccccaggaggtcctggtgcggttcctgttctccatcagcaaagggtaccggagaatcacctaccacaactggcgccacggcttcaacgtggcccagacgatgttcacgctgctcatgaccggcaaactgaagagctactacacggacctggaggccttcgccatggtgacagccggcctgtgccatgacatcgaccaccgcggcaccaacaacctgtaccagatgaagtcccagaaccccttggctaagctccacggctcctcgattttggagcggcaccacctggagtttgggaagttcctgctctcggaggagaccctgaacatctaccagaacctgaaccggcggcagcacgagcacgtgatccacctgatggacatcgccatcatcgccacggacctggccctgtacttcaagaagagagcgatgtttcagaagatcgtggatgagtccaagaactaccaggacaagaagagctgggtggagtacctgtccctggagacgacccggaaggagatcgtcatggccatgatgatgacagcctgcgacctgtctgccatcaccaagccctgggaagtccagagcaaggtcgcacttctcgtggctgctgagttctgggagcaaggtgacttggaaaggacagtcttggatcagcagcccattcctatgatggaccggaacaaggcggccgagctccccaagctgcaagtgggcttcatcgacttcgtgtgcacattcgtgtacaaggagttctctcgtttccacgaagagatcctgcccatgttcgaccgactgcagaacaataggaaagagtggaaggcgctggctgatgagtatgaggccaaagtgaaggctctggaggagaaggaggaggaggagagggtggcagccaagaaagtaggcacagaaatttgcaatggcggcccagcacccaagtcttcaacctgctgtatcctgtgagcactggtcccatggggaccctatggctccctcaatcttcacccactaggatttgggttctgcctgtggctatttgctacaagaggttaggaagcccaagaaaatgactgaagatcattctggata

SEQ ID NO: 165420 - DNA, 549 bp, Homo sapiens
  Payload ID: 12562
  Gene Symbol: PDE6B
  Gene Name: phosphodiesterase 6B, cGMP-specific, rod, beta
  ENST ID: ENST00000461490
  CDS Start-End: 1-449
ctgccatcaccaagccctgggaagtccagagcaaggtcgcacttctcgtggctgctgagttctgggagcaaggtgacttggaaaggacagtcttggatcagcagcccattcctatgatggaccggaacaaggcggccgagctccccaagctgcaagtgggcttcatcgacttcgtgtgcacattcgtgtacaaggagttctctcgtttccacgaagagatcctgcccatgttcgaccgactgcagaacaataggaaagagtggaaggcgctggctgatgataggcacagaaatttgcaatggcggcccagcacccaagtcttcaacctgctgtatcctgtgagcactggtcccatggggaccctatggctccctcaatcttcacccactaggatttgggttctgcctgtggctatttgctacaagaggttaggaagcccaagaaaatgactgaagatcattctggatattttaatttttttttttttttttttttgagatggagtcttgctctgtcacccaggctggagtgccgtggcacgatctcagc

SEQ ID NO: 165421 - DNA, 580 bp, Homo sapiens
  Payload ID: 12562
  Gene Symbol: PDE6B
  Gene Name: phosphodiesterase 6B, cGMP-specific, rod, beta
  ENST ID: ENST00000471824
  CDS Start-End: 1-435
accctgaacatctaccagaacctgaaccggcggcagcacgagcacgtgatccacctgatggacatcgccatcatcgccacggacctggccctgtacttcaagaagagagcgatgtttcagaagatcgtggatgagtccaagaactaccaggacaagaagagctgggtggagtacctgtccctggagacgacccggaaggagatcgtcatggccatgatgatgacagcctgcgacctgtctgccatcaccaagccctgggaagtccagagcaaggtcgcacttctcgtggctgctgagttctgggagcaaggtgacttggaaaggacagtcttggatcagcagcccattcctatgatggaccggaacaaggcggccgagctccccaagctgcaagtgggcttcatcgacttcgtgtgcacattcgtgtacaagtaggcacagaaatttgcaatggcggcccagcacccaagtcttcaacctgctgtatcctgtgagcactggtcccatggggaccctatggctccctcaatcttcacccactaggatttgggttctgcctgtggctatttgctacaagagg

SEQ ID NO: 165422 - DNA, 522 bp, Homo sapiens
  Payload ID: 12562
  Gene Symbol: PDE6B
  Gene Name: phosphodiesterase 6B, cGMP-specific, rod, beta
  ENST ID: ENST00000487902
  CDS Start-End: 231-522
gtgactgcggccagggcggctccacgacggtgactggggtcagggcaggagagtgtggaggccagtgaggagggtccacacccatcggtgaggcaggagtcagggtgctgctgtggtcggccaacaaggtgtttgaggagctgacggacatcgagaggcagttccacaaggccttctacacggtgcgggcctacctcaactgcgagcggtactccgtgggcctcctggacatgaccaaggagaaggaattttttgacgtgtggtctgtgctgatgggagagtcccagccgtactcgggcccacgcacgcctgatggccgggaaattgtcttctacaaagtgatcgactacgtcctccacggcaaggaggagatcaaggtcattcccacaccctcagccgatcactgggccctggccagcggccttccaagctacgtggcagaaagcggctttgaaggggccctggacgactccgggtggctcatcaagaatgtgctgtccatgcccatcgtcaacaagaagg

SEQ ID NO: 165423 - DNA, 450 bp, Homo sapiens
  Payload ID: 12562
  Gene Symbol: PDE6B
  Gene Name: phosphodiesterase 6B, cGMP-specific, rod, beta
  ENST ID: ENST00000465426
  CDS Start-End: 326-450
gaggagaatgcacctggcgattccacacatctacagcgagtctcctgagccgcaggcgccggggctgtggagagccgtctccattcagcaggcgccagggctatggggagccgtctccattcagcaggctctggagctatgaagagccgtctccattcagcaggcgccggggctatggggagccgtctccattcagcaggtgctgctgtggtcggccaacaaggtgtttgaggagctgacggacatcgagaggcagttccacaaggccttctacacggtgcgggcctacctcaactgcgagcggtactccgtgggcctcctggacatgaccaaggagaaggaattttttgacgtgtggtctgtgctgatgggagagtcccagccgtactcgggcccacgcacgcctgatggccgggaaattgtcttctacaaagtgatcgactacgtcct

SEQ ID NO: 165424 - DNA, 560 bp, Homo sapiens
  Payload ID: 12562
  Gene Symbol: PDE6B
  Gene Name: phosphodiesterase 6B, cGMP-specific, rod, beta
  ENST ID: ENST00000488061
  CDS Start-End: 541-560
accgcagcggaggagagggagctggcaccatgcggtagaagacccagcggccgccgcgagtgtgaggaggcagggcctggtggggcctgggtctgggccttgaccaaggaggcagagaaaggtggcccaaggagggccctgggacgcttggcggaggccacaggcggcctgacgtgcggaaaccacggcccgatgttctcaaagccctgctcgccgcaggtggttctggagcagccgggcggaggaagggctggtcggatgtttgcctgtcaagctcaaagcgacagattccactttccactcgtccactcctgagtgatcagggacacgaccgcagcctcgaggcctcaccgccagccagctcccgggccccacaagctcagatgaaacctggccacggagccaccaatcagggtgctgctgtggtcggccaacaaggtgtttgaggagctgacggacatcgagaggcagttccacaaggccttctacacggtgcgggcctacctcaactgcgagcggtactccgtgggcctcctggacatgaccaaggagaaggaatt

SEQ ID NO: 165425 - DNA, 3232 bp, Homo sapiens
  Payload ID: 12562
  Gene Symbol: PDE6B
  Gene Name: phosphodiesterase 6B, cGMP-specific, rod, beta
  Uniprot ID: P35913
  ENST ID: ENST00000496514
  CDS Start-End: 22-2586
ctccagggacaggcagccaccatgagcctcagtgaggagcaggcccggagctttctggaccagaaccccgattttgcccgccagtactttgggaagaaactgagccctgagaatgtggccgcggcctgcgaggacgggtgcccgccggactgcgacagcctccgggacctctgccaggtggaggagagcacggcgctgctggagctggtgcaggatatgcaggagagcatcaacatggagcgcgtggtcttcaaggtcctgcggcgcctctgcaccctcctgcaggccgaccgctgcagcctcttcatgtaccgccagcgcaacggcgtggccgagctggccaccaggcttttcagcgtgcagccggacagcgtcctggaggactgcctggtgccccccgactccgagatcgtcttcccactggacatcggggtcgtgggccacgtggctcagaccaaaaagatggtgaacgtcgaggacgtggccgagtgccctcacttcagctcatttgctgacgagctcactgactacaagacaaagaatatgctggccacacccatcatgaatggcaaagacgtcgtggcggtgatcatggcagtgaacaagctcaacggcccattcttcaccagcgaagacgaagatgtgttcttgaagtacctgaattttgccacgttgtacctgaagatctatcacctgagctacctccacaactgcgagacgcgccgcggccaggtgctgctgtggtcggccaacaaggtgtttgaggagctgacggacatcgagaggcagttccacaaggccttctacacggtgcgggcctacctcaactgcgagcggtactccgtgggcctcctggacatgaccaaggagaaggaattttttgacgtgtggtctgtgctgatgggagagtcccagccgtactcgggcccacgcacgcctgatggccgggaaattgtcttctacaaagtgatcgactacgtcctccacggcaaggaggagatcaaggtcattcccacaccctcagccgatcactgggccctggccagcggccttccaagctacgtggcagaaagcggctttatttgtaacatcatgaatgcttccgctgacgaaatgttcaaatttcaggaaggggccctggacgactccgggtggctcatcaagaatgtgctgtccatgcccatcgtcaacaagaaggaggagattgtgggagtcgccacattttacaacaggaaagacgggaagccctttgacgaacaggacgaggttctcatggagtccctgacacagttcctgggctggtcagtgatgaacaccgacacctacgacaagatgaacaagctggagaaccgcaaggacatcgcacaggacatggtcctttaccacgtgaagtgcgacagggacgagatccagctcatcctgccaaccagagcgcgcctggggaaggagcctgctgactgcgatgaggacgagctgggcgaaatcctgaaggaggagctgccagggcccaccacatttgacatctacgaattccacttctctgacctggagtgcaccgaactggacctggtcaaatgtggcatccagatgtactacgagctgggcgtggtccgaaagttccagatcccccaggaggtcctggtgcggttcctgttctccatcagcaaagggtaccggagaatcacctaccacaactggcgccacggcttcaacgtggcccagacgatgttcacgctgctcatgaccggcaaactgaagagctactacacggacctggaggccttcgccatggtgacagccggcctgtgccatgacatcgaccaccgcggcaccaacaacctgtaccagatgaagtcccagaaccccttggctaagctccacggctcctcgattttggagcggcaccacctggagtttgggaagttcctgctctcggaggagaccctgaacatctaccagaacctgaaccggcggcagcacgagcacgtgatccacctgatggacatcgccatcatcgccacggacctggccctgtacttcaagaagagagcgatgtttcagaagatcgtggatgagtccaagaactaccaggacaagaagagctgggtggagtacctgtccctggagacgacccggaaggagatcgtcatggccatgatgatgacagcctgcgacctgtctgccatcaccaagccctgggaagtccagagcaaggtcgcacttctcgtggctgctgagttctgggagcaaggtgacttggaaaggacagtcttggatcagcagcccattcctatgatggaccggaacaaggcggccgagctccccaagctgcaagtgggcttcatcgacttcgtgtgcacattcgtgtacaaggagttctctcgtttccacgaagagatcctgcccatgttcgaccgactgcagaacaataggaaagagtggaaggcgctggctgatgagtatgaggccaaagtgaaggctctggaggagaaggaggaggaggagagggtggcagccaagaaagtaggcacagaaatttgcaatggcggcccagcacccaagtcttcaacctgctgtatcctgtgagcactggtcccatggggaccctatggctccctcaatcttcacccactaggatttgggttctgcctgtggctatttgctacaagaggttaggaagcccaagaaaatgactgaagatcattctggatattttaatttttttttttttttttttttgagatggagtcttgctctgtcacccaggctggagtgccgtggcacgatctcagctcactgcaacctccacctcccaggttcaagcgattctcgtgcctcagcctcctgagtagctgggactacaggcgcccaccaccacacatggctaatttttgtattttcagtacagatggggtttcaccatattgggcaggctggtctcgaactcctgacctcaggtgatcacccgcctcagcttcctgaagtgctgggattacaggcatgagccaccacgcccagcctgtttttataaactgaagccaactgtgaataaactgtagcctacattactcatccatttttggatagttaccactgggagacctttgaaaagggtccatgaactctgaaatcactgagaacatttgcagccacacatgtacatatgtgtacacaggtagacagatggacacaggccgtttctcatccagtttaggaaaacacacatgctcag

SEQ ID NO: 165426 - DNA, 3307 bp, Homo sapiens
  Payload ID: 12563
  Gene Symbol: PDE6C
  Gene Name: phosphodiesterase 6C, cGMP-specific, cone, alpha prime
  Uniprot ID: P51160
  ENST ID: ENST00000371447
  CDS Start-End: 139-2715
ctttggaagtcctatgagggaccatttacggtttcctcagtaatttccaccaggatgaatttccttctcatcactctgcctcaggtagtgctctgaaggtcgtcctttctgaacaaacgcagcaaagcaagccacaccatgggtgagatcaaccaagttgccgtggagaaatacctggaggagaaccctcagtttgccaaggagtactttgacaggaagttgcgggtggaggtgctgggagaaatcttcaagaacagccaggtgccagtccagtccagcatgtccttctctgagctgacccaggtggaggagtcagccctgtgcttggagctgctgtggaccgtgcaggaggaggggggcaccccagagcagggggttcacagggccctgcagaggctggcccacctgctccaggctgaccgctgcagcatgttcctgtgccggtcccggaacggcatacctgaggtggcctctaggttgctggatgtcacccccacctccaagtttgaggacaacctggtgggccctgacaaagaagttgtgtttccattggacattgggatagtgggttgggctgctcacacgaagaaaactcataatgtcccagatgtgaaaaagaacagccatttttctgacttcatggacaagcaaactgggtatgtcactaagaacctgctggcaaccccgatcgtggtgggcaaggaggttcttgctgtgatcatggcagttaacaaagtaaatgcatctgaattttccaaacaggatgaagaggtcttttccaaatacctcaactttgtgtctatcatcctaaggcttcatcacaccagctacatgtacaatattgaatcccgaagaagccagatccttatgtggtcagccaataaagtatttgaagaactcacagatgttgagcgacagtttcacaaagcgctctacacggttagatcatatctgaactgtgaacgatactccattggactgctggacatgaccaaggagaaggaattctacgatgaatggccaatcaagcttggagaagtagagccttataaaggtccaaagacacctgatggcagggaagtcaacttttataaaatcattgattacattttacatggaaaagaagagatcaaagtgattccgacgcctcctgcagaccactggacactcattagtgggttgccaacatatgttgctgaaaatggatttatctgtaacatgatgaatgcccctgcggatgaatacttcacatttcagaaaggacctgtagacgaaactggttgggtcattaagaatgttttgtccctgcctattgtcaacaagaaagaagatattgtgggagtggctacattttacaacaggaaggatggaaaacctttcgatgagcatgatgaatacattaccgagactctcacacaatttcttggatggtctcttttaaatactgacacctacgataagatgaataagctagaaaacagaaaggacattgctcaggaaatgctcatgaaccaaaccaaagccactcctgaagaaattaagtccattttgaaatttcaagagaagttaaatgttgatgtaattgacgactgtgaagaaaaacaacttgttgcaattttgaaagaggacttgccagacccacgctcagcagaactgtacgaattccgcttcagtgacttcccccttacagagcacggattgattaaatgtggaatacgactgttttttgaaataaatgtggtggagaaattcaaagtacctgtagaggttcttaccagatggatgtacactgtgaggaaagggtaccgagctgtcacttaccacaattggcggcatgggttcaacgtggggcagaccatgtttactttgctgatgacaggaagattaaagaagtactacacagatctcgaagcctttgccatgcttgctgctgctttctgccatgatattgaccacagaggcaccaataatttgtaccagatgaaatccacgtctccattagcaagacttcatggttcttctattttggagaggcaccacctggagtacagtaagactctgttgcaggatgagagtttaaacatcttccagaacctaaataagcggcagtttgaaacagttattcatttgttcgaggtcgcaataatagcaactgacctggctttatatttcaagaagaggaccatgtttcaaaaaattgttgatgcctgtgaacaaatgcaaacggaagaagaagccatcaaatatgtaactgttgatccaaccaagaaagagattatcatggcaatgatgatgacggcatgtgacttgtctgctattaccaagccctgggaggtgcaaagtcaggtagcacttatggttgcaaatgaattttgggaacaaggagatctggagagaacagtgttgcagcaacaacccattcctatgatggacagaaacaaaagagatgaattacctaaacttcaagttggatttattgattttgtttgtacttttgtatataaggagttctcacggtttcacaaagaaatcacacctatgctgagtggtcttcagaataacagagtagaatggaaatcactagctgatgagtatgatgcaaagatgaaggtcattgaagaggaggcaaaaaagcaagaaggaggagccgaaaaagctgctgaagattcaggaggtggtgatgacaaaaagtccaaaacatgtttaatgttgtaatattatctaactggtctaaacttcaaatatcattttacctttgaagaaaaccagaaaacattcaaaagaacttcaacaaatcatcacgtaacaggatcttcagaaaaactaccctgtgactatgaagaaaatatatattgctagcccaaaaatcccaggggcaaaataaagttcaacaaaagtgcaaaatatgacaaaaataggtacatttttggtgccaatttattttaaattaaaaaatatgcaatcctgaaactagtcacaaattcttttttaaaacattaattgtatttatttgctaaggctgctataacaaagtaccacagactgggtgcttaaccaatagaaatgtattttctcaaagtcctgggggctggaagttcaagatcaaggagttggcagggttggtttcttgggaggcctctcaacttggtttgcagatggccatcttctccctgtgtcttcacatggtcttccctctgtgtgtctgtgtcctaatctccttttcttataaggactccagtaggactggattagggcctacccatgtgacctcattttagtcttaattacctcgttaatggccttatct

SEQ ID NO: 165427 - DNA, 1175 bp, Homo sapiens
  Payload ID: 12564
  Gene Symbol: PDE6D
  Gene Name: phosphodiesterase 6D, cGMP-specific, rod, delta
  Uniprot ID: O43924
  ENST ID: ENST00000287600
  CDS Start-End: 196-648
ctgcgaggctagggggaaggagaagggatcagaagcgggagctgaggggagagagaggccggtcctggtctggccgctgcggctgctagcccgaggtctccaagccgggctgcggctccatcctcggctcctgggcaccgtctgcgaggctccgccgaccagagtgagaaagccgcgggcggcgaccgccgcatcatgtcagccaaggacgagcgggccagggagatcctgaggggcttcaaactaaattggatgaaccttcgggatgctgagacagggaagatactctggcaaggaacagaagacctgtctgtccctggtgtggagcatgaagcccgtgttcccaagaaaatcctcaagtgcaaggcagtgtctcgagaacttaatttttcttcgacagaacaaatggaaaaattccgcctggaacaaaaagtttacttcaaagggcaatgcctagaagaatggttcttcgagtttggctttgtgatccctaactccacaaatacctggcagtccttgatagaggcagcacccgagtcccagatgatgccagcaagcgtcttaactgggaacgttatcatagaaacaaagttttttgacgacgatcttcttgtaagcacatccagagtgagacttttctatgtttgaaagaagaatgtgtgtacatttcaagaatttgggttttttggagggaggaggaaactgtttacttttttcctccacacgtttgatttttgacacatacacccctaattccctcaacagcagaacctacctgcagccaccaggggaccagctctgtgtaggtaaccagatggctctttttcccaagccaccatcttccagctgaccagactaaactcccaaccccagaccagggcaggggacaggtctcaagtccttcccagcatacacacagggaacaaacacataccacaaaccggtaactgtacctgtcaccctccttgtctcctccttgggccctacaggctacacatctacctttggcccctggttttggaaaaattccgtgttcctgacccatgtttagttttttcctaccatttctatttcatacattctcatacatttaacttgtaaaatagactgtgatattattacataatgtaattaaaaatatgaattaaaatattcctacagtctttagcatggca

SEQ ID NO: 165428 - DNA, 672 bp, Homo sapiens
  Payload ID: 12564
  Gene Symbol: PDE6D
  Gene Name: phosphodiesterase 6D, cGMP-specific, rod, delta
  ENST ID: ENST00000409772
  CDS Start-End: 178-459
ggagaagggatcagaagcgggagctgaggggagagagaggccggtcctggtctggccgctgcggctgctagcccgaggtctccaagccgggctgcggctccatcctcggctcctgggcaccgtctgcgaggctccgccgaccagagtgagaaagccgcgggcggcgaccgccgcatcatgtcagccaaggacgagcgggccagggagatcctgaggggcttcaaactaaattggatgaaccttcgggatgctgagacagggaagatactctggcaaggaacagaagacctgtctgtccctggtgtggagcatgaagcccgtgttcccaagaaaatcctcaagtgcaaggcagtgtctcgagaacttaatttttcttcgacagaacaaatggaaaaattccgcctggaacaaaaagtttacttcaaagggcaatgcctagaagtgggaacgttatcatagaaacaaagttttttgacgacgatcttcttgtaagcacatccagagtgagacttttctatgtttgaaagaagaatgtgtgtacatttcaagaatttgggttttttggagggaggaggaaactgtttacttttttcctccacacgtttgatttttgacacatacacccctaattccctcaacagcagaacctacctgcagccaccaggggaccag

SEQ ID NO: 165429 - DNA, 627 bp, Homo sapiens
  Payload ID: 12564
  Gene Symbol: PDE6D
  Gene Name: phosphodiesterase 6D, cGMP-specific, rod, delta
  ENST ID: ENST00000428104
  CDS Start-End: 314-627
ggcggggagggggtggctaggggcccaaggagaggaatgcggcctagacggtactgcagcccaaccgtcgccatcgccatcccgggccccaaatcctccccttaggctgtgctttctctctcaggagctccccatggctactgcgctacccctgggcaccgagatacattaagcctactaactaccacttattgagcgttttaccatgtgccagccttaccatgatttgcagatgtctgagttccatgtaaacagaagttaactctctgcgggctgtcatcttcttttgaggtcatatttgatcagaaattggatgaaccttcgggatgctgagacagggaagatactctggcaaggaacagaagacctgtctgtccctggtgtggagcatgaagcccgtgttcccaagaaaatcctcaagtgcaaggcagtgtctcgagaacttaatttttcttcgacagaacaaatggaaaaattccgcctggaacaaaaagtttacttcaaagggcaatgcctagaagaatggttcttcgagtttggctttgtgatccctaactccacaaatacctggcagtccttgatagaggcagcacccgagtcccagatgatgccagcaagcgtcttaac

SEQ ID NO: 165430 - DNA, 1029 bp, Homo sapiens
  Payload ID: 12565
  Gene Symbol: PDE6G
  Gene Name: phosphodiesterase 6G, cGMP-specific, rod, gamma
  Uniprot ID: P18545
  ENST ID: ENST00000331056
  CDS Start-End: 151-414
atgaagcagcgagataaaggccggggctggcaccctgcggagggaggcccagcactcacagcacagccccctgagacccgccctgcacttgaccgcagcaggagggagtccaggagccaaggttgccgcggtgtctccgtcagcctcaccatgaacctggaaccgcccaaggctgagttccggtcagccaccagggtggccgggggacctgtcacccccaggaaagggccccctaaatttaagcagcgacagaccaggcagttcaagagcaagcccccaaagaaaggcgttcaagggtttggggacgacatccctggaatggaaggcctgggaacagacatcacagtcatctgcccttgggaggccttcaaccacctggagctgcacgagctggcccaatatggcatcatctagcacgaggccctgctgaagtccagaccctccccctcctgcccactgtgctctaaaccctgctcaggattcctgttgaggagatgcctccctagcccagatggcacctggacaccaggatgggactgcaacctcaggtctccccctacatattaataccagtcaccaggagcccaccacctccctctaggatgccccctcaggggctggccaggccctgctcaacatctggagatacaggcccacccctcagtcctgcccacagagaggcttggtcggtctccactcccagggagaacgggaagtggaccccagcccgggagcctgctggaccccagatcgtcccctcctcccagctggaaagctagggcaggtctccccagagtgcttctgcaccccagccccctgtcctgcctgtaaggggatacagagaagctccccgtctctgcatcccttcccaggggggtgcccttagtttggacatgctgggtagcaggactccagggcgtgcacggtgagcagatgaggccccaagctcatcacaccagggggccatccttctcaatacagcctgcccttgcagtccctatttcaaaataaaattagtgtgtccttgcc

SEQ ID NO: 165431 - DNA, 526 bp, Homo sapiens
  Payload ID: 12565
  Gene Symbol: PDE6G
  Gene Name: phosphodiesterase 6G, cGMP-specific, rod, gamma
  Uniprot ID: P18545
  ENST ID: ENST00000571224
  CDS Start-End: 114-377
tcctctctgctgggcggccttgccgacgcacttttctcagcaagaattcccgaaaccgcagcaggagggagtccaggagccaaggttgccgcggtgtctccgtcagcctcaccatgaacctggaaccgcccaaggctgagttccggtcagccaccagggtggccgggggacctgtcacccccaggaaagggccccctaaatttaagcagcgacagaccaggcagttcaagagcaagcccccaaagaaaggcgttcaagggtttggggacgacatccctggaatggaaggcctgggaacagacatcacagtcatctgcccttgggaggccttcaaccacctggagctgcacgagctggcccaatatggcatcatctagcacgaggccctgctgaagtccagaccctccccctcctgcccactgtgctctaaaccctgctcaggattcctgttgaggagatgcctccctagcccagatggcacctggacaccaggatgggactgcaacctcaggtctccccctacata

SEQ ID NO: 165432 - DNA, 1505 bp, Homo sapiens
  Payload ID: 12565
  Gene Symbol: PDE6G
  Gene Name: phosphodiesterase 6G, cGMP-specific, rod, gamma
  ENST ID: ENST00000573076
  CDS Start-End: 477-890
ggcttgcccttgaaggaactcaacattgtccttgcttctgtgcttgggaagacccacaggcccctaagggcgggggggggtccttgtttggtttcaggagcagcaggtgcaaaggccctggggtgggaggggtgagatgtgaggccacagcagcgggtgagggccaggctgcagagggttttggggaccatgaaggtgggcccttcagagatcaggcagggtcaggaaaggcagtagggaggcccaagacagcagacactgtggttgcttccatctggaagatgggcagctgcaggagcctggctgttcagggtcacacttctctccctgtcccggccccatctgctgggtgtccttccttggagcccttgacagcacctgagcccctcctctccatcccctgaaccttggtggttgtgccccccctcggggcccaacaatctcattagggtggcactgagacgcctaatcagctcatgaagcagcgagataaaggccggggctggcaccctgcggagggaggcccagcactcacagcacagccccctgagacccgccctgcacttgaccgcagcaggagggagtccaggagccaaggttgccgcggtgtctccgtcagcctcaccatgaacctggaaccgcccaaggctgagttccggtcagccaccagggtggccgggggacctgtcacccccaggaaagggccccctaaatttaagcagcgacagaccaggcagttcaagagcaagcccccaaagaaaggcgttcaagggtttggggacgacatccctggaatggaaggcctgggaacagacatcacagtcatctgcccttgggaggccttcaaccacctggagctgcacgagctggcccaatatggcatcatctagcacgaggccctgctgaagtccagaccctccccctcctgcccactgtgctctaaaccctgctcaggattcctgttgaggagatgcctccctagcccagatggcacctggacaccaggatgggactgcaacctcaggtctccccctacatattaataccagtcaccaggagcccaccacctccctctaggatgccccctcaggggctggccaggccctgctcaacatctggagatacaggcccacccctcagtcctgcccacagagaggcttggtcggtctccactcccagggagaacgggaagtggaccccagcccgggagcctgctggaccccagatcgtcccctcctcccagctggaaagctagggcaggtctccccagagtgcttctgcaccccagccccctgtcctgcctgtaaggggatacagagaagctccccgtctctgcatcccttcccaggggggtgcccttagtttggacatgctgggtagcaggactccagggcgtgcacggtgagcagatgaggccccaagctcatcacaccagggggccatccttctcaatacagcctgcccttgcagtccctatttcaaaataaaattagtgtgtccttgcc

SEQ ID NO: 165433 - DNA, 812 bp, Homo sapiens
  Payload ID: 12565
  Gene Symbol: PDE6G
  Gene Name: phosphodiesterase 6G, cGMP-specific, rod, gamma
  ENST ID: ENST00000574024
  CDS Start-End: 1-213
gataaaggccggggctggcaccctgcggagggaggcccagcactcacagcacagccccctgagacccgccctgcacttggtttggggacgacatccctggaatggaaggcctgggaacagacatcacagtcatctgcccttgggaggccttcaaccacctggagctgcacgagctggcccaatatggcatcatctagcacgaggccctgctgaagtccagaccctccccctcctgcccactgtgctctaaaccctgctcaggattcctgttgaggagatgcctccctagcccagatggcacctggacaccaggatgggactgcaacctcaggtctccccctacatattaataccagtcaccaggagcccaccacctccctctaggatgccccctcaggggctggccaggccctgctcaacatctggagatacaggcccacccctcagtcctgcccacagagaggcttggtcggtctccactcccagggagaacgggaagtggaccccagcccgggagcctgctggaccccagatcgtcccctcctcccagctggaaagctagggcaggtctccccagagtgcttctgcaccccagccccctgtcctgcctgtaaggggatacagagaagctccccgtctctgcatcccttcccaggggggtgcccttagtttggacatgctgggtagcaggactccagggcgtgcacggtgagcagatgaggccccaagctcatcacaccagggggccatccttctcaatacagcctgcccttgcagtccctatttcaaaataaaattagtgtgtccttgcc

SEQ ID NO: 165434 - DNA, 458 bp, Homo sapiens
  Payload ID: 12565
  Gene Symbol: PDE6G
  Gene Name: phosphodiesterase 6G, cGMP-specific, rod, gamma
  Uniprot ID: P18545
  ENST ID: ENST00000571004
  CDS Start-End: 84-347
ctccaggctcaggacctgccacagaccgcagcaggagggagtccaggagccaaggttgccgcggtgtctccgtcagcctcaccatgaacctggaaccgcccaaggctgagttccggtcagccaccagggtggccgggggacctgtcacccccaggaaagggccccctaaatttaagcagcgacagaccaggcagttcaagagcaagcccccaaagaaaggcgttcaagggtttggggacgacatccctggaatggaaggcctgggaacagacatcacagtcatctgcccttgggaggccttcaaccacctggagctgcacgagctggcccaatatggcatcatctagcacgaggccctgctgaagtccagaccctccccctcctgcccactgtgctctaaaccctgctcaggattcctgttgaggagatgcctccctagcccagatggcacctggaca

SEQ ID NO: 165435 - DNA, 747 bp, Homo sapiens
  Payload ID: 12566
  Gene Symbol: PDE6H
  Gene Name: phosphodiesterase 6H, cGMP-specific, cone, gamma
  Uniprot ID: Q13956
  ENST ID: ENST00000266395
  CDS Start-End: 107-358
caaagatccttttgtcttttgcaaagaaggcagctgggcagctgataggaacaacattcagctccgaggctgaaagggaaacatcagccgcccggggggagttaaaatgagtgacaacactactctgcctgctccagcttcaaaccagggtcctaccaccccacgcaaaggccctcccaagttcaagcagaggcagactcgccaattcaagagtaaacctccaaagaaaggtgtgaaaggatttggagatgacattccaggaatggaggggctaggaacagatatcacagtgatttgtccatgggaggcattcagccacctggaattgcatgagctcgctcagtttgggattatctgaagtgccagaggttctgccactctcaatgacatctgctgtaattttggttgcttttgccctgttgatctgccggagtcttgaaattcagctgattggaagtggtttctttgactttcaaggtcattccctatcagttactactaagagttctcttactgtcagaatctctcttgcagtacagctcaaaatagtggatgcatttcaaacttgaccaccttttcctaccagctagttagaagtcatcaatatttctctacattttgtttatctgtaagtcctttaaatctatttttgctaggcattcattatgattaatagtagacttttaagacaacatttatgtcactccccacctcctcatatttaataaaggagatatttaccttgaa

SEQ ID NO: 165436 - DNA, 2425 bp, Homo sapiens
  Payload ID: 12567
  Gene Symbol: PDE7A
  Gene Name: phosphodiesterase 7A
  Uniprot ID: Q13946
  ENST ID: ENST00000379419
  CDS Start-End: 144-1514
ggaaggcagctgcttgaggtccaaggcagtcagtgtcccctctcttttgcctcgggacagctggtatttatcagactcctaagaagttttccttgctccctagtagaagagagagattatgcagcgggcttttgattgatccaatgggaattacattgatctggtgtctggccttggttcttatcaagtggatcacctctaagaggcgtggagctatttcctatgacagttctgatcagactgcattatacattcgtatgctaggagatgtacgtgtaaggagccgagcaggatttgaatcagaaagaagaggttctcacccatatattgattttcgtattttccactctcaatctgaaattgaagtgtctgtctctgcaaggaatatcagaaggctactaagtttccagcgatatcttagatcttcacgcttttttcgtggtactgcggtttcaaattccctaaacattttagatgatgattataatggacaagccaagtgtatgctggaaaaagttggaaattggaattttgatatctttctatttgatagactaacaaatggaaatagtctagtaagcttaacctttcatttatttagtcttcatggattaattgagtacttccatttagatatgatgaaacttcgtagatttttagttatgattcaagaagattaccacagtcaaaatccttaccataacgcagtccacgctgcggatgttactcaggccatgcactgttacttaaaggaacctaagcttgccaattctgtaactccttgggatatcttgctgagcttaattgcagctgccactcatgatctggatcatccaggtgttaatcaacctttccttattaaaactaaccattacttggcaactttatacaagaatacctcagtactggaaaatcaccactggagatctgcagtgggcttattgagagaatcaggcttattctcacatctgccattagaaagcaggcaacaaatggagacacagataggtgctctgatactagccacagacatcagtcgccagaatgagtatctgtctttgtttaggtcccatttggatagaggtgatttatgcctagaagacaccagacacagacatttggttttacagatggctttgaaatgtgctgatatttgtaacccatgtcggacgtgggaattaagcaagcagtggagtgaaaaagtaacggaggaattcttccatcaaggagatatagaaaaaaaatatcatttgggtgtgagtccactttgcgatcgtcacactgaatctattgccaacatccagattggttttatgacttacctagtggagcctttatttacagaatgggccaggttttccaatacaaggctatcccagacaatgcttggacacgtggggctgaataaagccagctggaagggactgcagagagaacagtcgagcagtgaggacactgatgctgcatttgagttgaactcacagttattacctcaggaaaatcggttatcataacccccagaaccagtgggacaaactgcctcctggaggtttttagaaatgtgaaatggggtcttgaggtgagagaacttaactcttgactgccaaggtttccaagtgagtgatgccagccagcattatttatttccaagatttcctctgttggatcatttgaacccacttgttaattgcaagacccgaacatacagcaatatgaatttggctttcatgtgaaaccttgaatatgcaaagcccagcaggagagaatccgaaaggagtaacaaaggaagttttgatatgtgccacgactttttcaaagcatctaatcttcaaaacgtgaaacttgaattgttcagcaacaatctcttggaatttaaccagtctgatgcaacaatgtgtatcttgtaccttccactaagttctctctgagaaaatggaaatgtgaagtgcccagcctctgctgcctctggcaagacaatgtttacaaatcaactctgaaaatattggttctaaattgccttggagcatgattgtgaaggaaccactcaaacaaatttaaagatcaaactttagactgcagctctttccccctggtttgcctttttcttctttggatgccaccaaagcctcccatttgctatagttttatttcatgcactggaaactgagcatttatcgtagagtaccgccaagctttcactccagtgccgtttggcaatgcaattttttttagcaattagtttttaatttggggtgggaggggaagaacaccaatgtcctagctgtattatgattctgcagtgaagacattgcatgttgttttcactactgtacacttgacctgcacatgcgagaaaaaggtggaatgtttaaaacaccataatcagctcagggtatttgccaatctgaaataaaagtgggatggg

SEQ ID NO: 165437 - DNA, 2986 bp, Homo sapiens
  Payload ID: 12567
  Gene Symbol: PDE7A
  Gene Name: phosphodiesterase 7A
  Uniprot ID: Q13946
  ENST ID: ENST00000396642
  CDS Start-End: 1-1275
atggaagtgtgttaccagctgccggtactgcccctggacaggccggtcccccagcacgtcctcagccgccgaggagccatcagcttcagctccagctccgctctcttcggctgccccaatccccggcagctctctcagaggcgtggagctatttcctatgacagttctgatcagactgcattatacattcgtatgctaggagatgtacgtgtaaggagccgagcaggatttgaatcagaaagaagaggttctcacccatatattgattttcgtattttccactctcaatctgaaattgaagtgtctgtctctgcaaggaatatcagaaggctactaagtttccagcgatatcttagatcttcacgcttttttcgtggtactgcggtttcaaattccctaaacattttagatgatgattataatggacaagccaagtgtatgctggaaaaagttggaaattggaattttgatatctttctatttgatagactaacaaatggaaatagtctagtaagcttaacctttcatttatttagtcttcatggattaattgagtacttccatttagatatgatgaaacttcgtagatttttagttatgattcaagaagattaccacagtcaaaatccttaccataacgcagtccacgctgcggatgttactcaggccatgcactgttacttaaaggaacctaagcttgccaattctgtaactccttgggatatcttgctgagcttaattgcagctgccactcatgatctggatcatccaggtgttaatcaacctttccttattaaaactaaccattacttggcaactttatacaagaatacctcagtactggaaaatcaccactggagatctgcagtgggcttattgagagaatcaggcttattctcacatctgccattagaaagcaggcaacaaatggagacacagataggtgctctgatactagccacagacatcagtcgccagaatgagtatctgtctttgtttaggtcccatttggatagaggtgatttatgcctagaagacaccagacacagacatttggttttacagatggctttgaaatgtgctgatatttgtaacccatgtcggacgtgggaattaagcaagcagtggagtgaaaaagtaacggaggaattcttccatcaaggagatatagaaaaaaaatatcatttgggtgtgagtccactttgcgatcgtcacactgaatctattgccaacatccagattggtaactatacatatttagatatagctggttagaaaaatgccactgtttttatcaagaagggaaatatatttgaaatataaaatattaaaattatgctcatttctatttttaaaaataatttaagaaattttacccttgttttcccttgttatggctcttctaattctcatttaattttaggatgtaaaaagtatatttttgcagaacaggcagcagcaataacttgtttctgttcttatgtaaataagaatccattattcgctcatgtggaagcttcttttgcatcatttgggactgccatttaaaaaaggataggtaaacaaagaaatgacaaaaataaaataaataaaataaaaatggataggtggtgacccactgagcctgatcataatacgaagaccagcttctgccactgcctttccagactcttaccactgcctgttgattaaatctaactcttcaacatcctagacaggcccttataatcttgcttcaaatgctgtgcagccatcttgcctcaacttccctctcatttgcctacagcatctcgggacgcttctgtgtttcccaagtatacgctgttctttcgctctttgtgcctcgccagtgctttccatgtgcctcgtagagttatttttcttgaagaggcagctcaaatgtcaccttctccagaagctgctctccacttgctttaggcagagtcagtcacttttcttctagattccaaagtgcctgatccacttggttgtggattcctggagcctagcaccacaccagaagcacgaggcccttgagaactgtgtgttgagtgaactaataactgtattatagaaagcataatgaaaatgtcctgtgactgaagtatgtgtagcttgttgcaggagttcacaggaaagttgactaggattgagtgtgttgggctttgggtataaaggagggggattctacgggggcagtagctcaacaaggaatagagggaggagtgtaattttggtagctggtgttgaatagggcctttgagaatcagactgaacacagtgaaatatgtgcccaaagttcagaaagatgaagtttccagaaactaagaaggtagcacaatatgtggcatcatactcagaaaggaagaccatgccatggggccagaaattcagaaacgtaattcttacattgtgattgcaatggatactcatggaagaaagtgggtagtggccgatttgacttcagagtgacaggtagagaagggaagagcgtgtagaactgtggccagactttaggagtgtgagggatgctgaatctcccagagagctcacactggccaggaatgctgagagtagcagatgcttttcttttgggaggatagtaaaacaatttagaaccagatatgctttgtcttgattctcaagtagaataatcttcaaatgcaaaagaatacattagaaatggacaaaagtggccaggagcggtagctcatacttgtaacccagcactttgggaagccgaggcgggctgatcgcttgaggtcaggagttcgagaccagcctggccaaaatagtgaaactcacgtttctactaaaaatacaaaaattagctgggtgtgatggccacttgggaggctgagataggagaatcgcttgaacctgggaggcagaggttgcagtgagccaatatcgtgccactgcattccagcctgggtgacagaatgaaactccatcactccatctcaaaaaaaaaaaaaaaaaaaaa

SEQ ID NO: 165438 - DNA, 3673 bp, Homo sapiens
  Payload ID: 12567
  Gene Symbol: PDE7A
  Gene Name: phosphodiesterase 7A
  Uniprot ID: Q13946
  ENST ID: ENST00000401827
  CDS Start-End: 445-1893
gctgctcctgagtcccgcgcgccctgggtctggccgctggctccagctgtcttttcttgcactgctttgctccgttcgtgctgcgctcgaactctgcagtccgggtacctgctcctctcggccgaggagccccagggcggcggggttccctttccgactttgcctgtgctggccccgcttgcaccccgtcccccctcgcctggagcgaggcgcgcgccggtcctggtaattggcgccgcggccgccgcggagccttcccgccggcggcccgagcggagggctggggttggggaggcgtgagcgcggcttcccagcccggggtcggtccccgcccgccctgcccccgtctcggcccggagcccccgagccgcggccccctcccactgcaggggccggcggccgcggcagggcgggcgccgcgcggaggcagggcgggcgtattcaatggaagtgtgttaccagctgccggtactgcccctggacaggccggtcccccagcacgtcctcagccgccgaggagccatcagcttcagctccagctccgctctcttcggctgccccaatccccggcagctctctcagaggcgtggagctatttcctatgacagttctgatcagactgcattatacattcgtatgctaggagatgtacgtgtaaggagccgagcaggatttgaatcagaaagaagaggttctcacccatatattgattttcgtattttccactctcaatctgaaattgaagtgtctgtctctgcaaggaatatcagaaggctactaagtttccagcgatatcttagatcttcacgcttttttcgtggtactgcggtttcaaattccctaaacattttagatgatgattataatggacaagccaagtgtatgctggaaaaagttggaaattggaattttgatatctttctatttgatagactaacaaatggaaatagtctagtaagcttaacctttcatttatttagtcttcatggattaattgagtacttccatttagatatgatgaaacttcgtagatttttagttatgattcaagaagattaccacagtcaaaatccttaccataacgcagtccacgctgcggatgttactcaggccatgcactgttacttaaaggaacctaagcttgccaattctgtaactccttgggatatcttgctgagcttaattgcagctgccactcatgatctggatcatccaggtgttaatcaacctttccttattaaaactaaccattacttggcaactttatacaagaatacctcagtactggaaaatcaccactggagatctgcagtgggcttattgagagaatcaggcttattctcacatctgccattagaaagcaggcaacaaatggagacacagataggtgctctgatactagccacagacatcagtcgccagaatgagtatctgtctttgtttaggtcccatttggatagaggtgatttatgcctagaagacaccagacacagacatttggttttacagatggctttgaaatgtgctgatatttgtaacccatgtcggacgtgggaattaagcaagcagtggagtgaaaaagtaacggaggaattcttccatcaaggagatatagaaaaaaaatatcatttgggtgtgagtccactttgcgatcgtcacactgaatctattgccaacatccagattggttttatgacttacctagtggagcctttatttacagaatgggccaggttttccaatacaaggctatcccagacaatgcttggacacgtggggctgaataaagccagctggaagggactgcagagagaacagtcgagcagtgaggacactgatgctgcatttgagttgaactcacagttattacctcaggaaaatcggttatcataacccccagaaccagtgggacaaactgcctcctggaggtttttagaaatgtgaaatggggtcttgaggtgagagaacttaactcttgactgccaaggtttccaagtgagtgatgccagccagcattatttatttccaagatttcctctgttggatcatttgaacccacttgttaattgcaagacccgaacatacagcaatatgaatttggctttcatgtgaaaccttgaatatgcaaagcccagcaggagagaatccgaaaggagtaacaaaggaagttttgatatgtgccacgactttttcaaagcatctaatcttcaaaacgtgaaacttgaattgttcagcaacaatctcttggaatttaaccagtctgatgcaacaatgtgtatcttgtaccttccactaagttctctctgagaaaatggaaatgtgaagtgcccagcctctgctgcctctggcaagacaatgtttacaaatcaactctgaaaatattggttctaaattgccttggagcatgattgtgaaggaaccactcaaacaaatttaaagatcaaactttagactgcagctctttccccctggtttgcctttttcttctttggatgccaccaaagcctcccatttgctatagttttatttcatgcactggaaactgagcatttatcgtagagtaccgccaagctttcactccagtgccgtttggcaatgcaattttttttagcaattagtttttaatttggggtgggaggggaagaacaccaatgtcctagctgtattatgattctgcagtgaagacattgcatgttgttttcactactgtacacttgacctgcacatgcgagaaaaaggtggaatgtttaaaacaccataatcagctcagggtatttgccaatctgaaataaaagtgggatgggagagtgtgtccttcagatcaagggtactaaagtccctttcgctgcagtgagtgagaggtatgttgtgtgtgaatgtacggatgtgtgtttgcgtgcatgtttgtgcatgtgtgactgtgcatgttatgtttctccatgtgggcaaagatttgaaatgtaagcttttatttattattttagaatgtgacataatgagcagccacactcgggggaggggaaggttggtaggtaagctgtaacagattgctccagttgccttaaactatgcacatagctaagtgaccaaacttcttgttttgatttgaaaaaagtgcattgttttcttgtccctccctttgatgaaacgttaccctttgacgggccttttgatgtgaacagatgttttctaggacaaactataaggactaattttaaacttcaaacattccacttttgtaatttgttttaaattgttttatgtatagtaagcacaactgtaatctagttttaagagaaaccggtgctttcttttagttcatttgtatttcccttgttactgtaaaagactgtttattaattgtttacagtttgttgcaacagccattttcttgggagaaagcttgagtgtaaagccatttgtaaaaggctttgccatactcattttaatatgtgcctgttgctgttaacttttgatgaataaaaacctatcttttcatatttttatctttgacatttaccttataactcaatcttttggaaaacacaatgctaaattacaaggaaatcaaagttagcttcttggctcttgtaattcatccctcagatgtttactcagtccgagcttatctactaatgactcaccttgcaagtgagtaagcagaagcccagtt

SEQ ID NO: 165439 - DNA, 572 bp, Homo sapiens
  Payload ID: 12567
  Gene Symbol: PDE7A
  Gene Name: phosphodiesterase 7A
  ENST ID: ENST00000523253
  CDS Start-End: 316-572
agaagaaaaactcttagaagccagcaacttttacaagcaccctgggacatttagttgaggggcttgagtgttgtataacacaataatttttagtcagaataatgttaatagagcctgtttttaaaagttgaaagattcgtactgtttttttgtttttaaaaagatttccatgccaaagagttttaagtattgatgctgaactgaaatggacaagcttgagttacctggaaaattcatttatgtggatggaacaccagctcttccaaggatgccaatagaagagagagattatgcagcgggcttttgattgatccaatgggaattacattgatctggtgtctggccttggttcttatcaagtggatcacctctaagaggcgtggagctatttcctatgacagttctgatcagactgcattatacattcgtatgctaggagatgtacgtgtaaggagccgagcaggatttgaatcagaaagaagaggttctcacccatatattgattttcgtattttccactctcaatctgaaattgaagtgtctgtctctgcaaggaatatcagaaggctact

SEQ ID NO: 165440 - DNA, 5390 bp, Homo sapiens
  Payload ID: 12568
  Gene Symbol: PDE7B
  Gene Name: phosphodiesterase 7B
  Uniprot ID: Q9NP56
  ENST ID: ENST00000308191
  CDS Start-End: 304-1656
cagtcagttggtctgggcactgcagcaggctcggctctgtcccagcacttgtctgggagaaaagtggtgttactcacccagggagagtctctctttctaccttccttctttctcgatctccttgtgtgcttttgtgtttctttatttcttttccttttttttctttttttttttttgttacttaattatattcctaatcctggatgaagttgctggattctgcagcacaagtcttcatgaacaagcagcaccgctcagagatttcacggcattcaaaggtcacagaactgccactatggttaaatgtcttgtttaatggttgagaggtgtggcgaaatcttgtttgagaaccccgatcagaatgccaaatgtgtttgcatgctgggagatatacgactaaggggtcagacgggggttcgtgctgaacgccgtggctcctacccattcattgacttccgcctacttaacagtacaacatactcaggggagattggcaccaagaaaaaggtgaaaagactattaagctttcaaagatacttccatgcatcaaggctgcttcgtggaattataccacaagcccctctgcacctgctggatgaagactaccttggacaagcaaggcatatgctctccaaagtgggaatgtgggattttgacattttcttgtttgatcgcttgacaaatggaaacagcctggtaacactgttgtgccacctcttcaatacccatggactcattcaccatttcaagttagatatggtgaccttacaccgatttttagtcatggttcaagaagattaccacagccaaaacccgtatcacaatgctgttcacgcagccgacgtcacccaggccatgcactgctacctgaaagagccaaagcttgccagcttcctcacgcctctggacatcatgcttggactgctggctgcagcagcacacgatgtggaccacccaggggtgaaccagccatttttgataaaaactaaccaccatcttgcaaacctatatcagaatatgtctgtgctggagaatcatcactggcgatctacaattggcatgcttcgagaatcaaggcttcttgctcatttgccaaaggaaatgacacaggatattgaacagcagctgggctccttgatcttggcaacagacatcaacaggcagaatgaatttttgaccagattgaaagctcacctccacaataaagacttaagactggaggatgcacaggacaggcactttatgcttcagatcgccttgaagtgtgctgacatttgcaatccttgtagaatctgggagatgagcaagcagtggagtgaaagggtctgtgaagaattctacaggcaaggtgaacttgaacagaaatttgaactggaaatcagtcctctttgtaatcaacagaaagattccatccctagtatacaaattggtttcatgagctacatcgtggagccgctcttccgggaatgggcccatttcacgggtaacagcaccctgtcggagaacatgctgggccacctcgcacacaacaaggcccagtggaagagcctgttgcccaggcagcacagaagcaggggcagcagtggcagcgggcctgaccacgaccacgcaggccaagggactgagagcgaggagcaggaaggcgacagcccctaggggccggcccaacttagacgcggctctcctccggcagggcccccagagggcagaagcagcgtggaggggccctcacgcagcagcccagccactttctgagtgttgtcctggggctctttggaacgccatcttcctcccacttacctgcctcccctccttttcgcaaatgtacagaagccatttgtcacctcagcattcgctgccgaaatgagcaactccattcagtaacgtgggagctgatcccacgggcaggctctccctgctccaggagaagactaggaggaagaatgaggtgctcctgccgtgtccgccttgttccgggtcgcactggaacaggcagcaattcctaagtccggagcgtttgagcgtttgctatctgactgctgatctgcgtgacagaaacaccagcatatttgcaacgccaaggatattggtcttaagtgcaagagcacaaatgagagtgtgagagaaagtaccttctattttaataataatattattataaaaataataaatctttttaacttttatattttatgcactagacaatggatctgcaactttggactaaggtcattcaatgtacccaaacttgaacagggggttcattgttttgctattgactttattatgccactttggggcagagacttggcatcttcgcagtttaagaaaccacgtttcctatccaatccgaagggaaggtgctgtacagttcattcctttgcaccattagccaatctgtcttttatggattctgtgacatgtttatattcacccatgtacattttctgtaaataccaaacgctactgattcccatgccaaaatacatgagtattatgggattgctacctgtataaacaatggcactgtgaaaatactgttagttttaatacaagagaatgcatttgtaaatatggtatagagtttattaatatactattgtttgcagataaaggccttaactttaaacatctttcatcttctgaaagctgcccaacttaaatcctcatagatgtctttctcaactgccttcccatgttcatctgtatgttttccagctaaggtcacaaaccaaaactgaataaagtctttgaggaaacattttggaaacttcacatgcattccgcttgagaccatagtgtttaatctatggcaccaagcatcgtttcctcagattaatgagacccttcaacaagcctgaatcagtcacttttcaacacagcgatgttttaacaagccagctgctaagcttgtgtttatgtgactcttgttacagatcatggcggtgcgtcagcctcacaggagacatagcaggtctcagaaaccttctatgaccctgtcatctaaccatcagggaattccctgctcccatgccacacatttgtctattatggctatagtaccaaagtacttttggtgtttggttggtgtgcatttctttagtgtcgatagtaactggatttttctttttccttaatctcatgtgaacaactacccaactgtttagctgaagttcatattatttaagtaaagaaaatatttcagttttataacagactttaccttcctggcaggtcattgtagttaattatgtctctagcttggagtgtcaccttggaatttcgttgccattttttctcagacacctggccgtaaaatcagtttgttacagcattcttctctaggctgctaaacgctgtgcattgaaccttttctttagaagtttcagcgtaactaatgttagatgaaaattgttgatgcccctttctttttactttaaacaatgtggtagtgggagaatgactgtttctgccactatcaacctgatcctcatgctgatagaatgacagctagcacttatttcctaagtgcaactgttttagagatttttctcctaacatgcaaaggaaatactgattggcctataataagttcctatagggagactgaggcttgcagaattaaggttcaggggaaattttggaaagttggttgtattttcattgaagtaggagagattatcagatggtgctaaagaaagtgtgaagatcttatgaaataggtggatggtaagttgaaattattgatgtgggtaagaagggaggttgtggaaagttaacactagctttgtatttttttttctgtaaaactgtgaactgatatattttcctttatcactttagtattctgcagttctcagcttggtgaggctccaaaagagaatatgtcagatgtattcctacttccaaacctgtcttactttggtttgatggtacacatagggcttttgaacagtctatttttaatgtatatgaggtcaaatcaaggaaggcaattgctggggacaagaaaagtagaggtaggaaagaagacactattttagctaatggggtttcttgggactaaaaaatggctttgtttaaattataattatataataatttaaataaatgagattggaggtattcttagtagttctgagttgatagtttacattacaattaggtcttgaagaagagctcacagagaaaaaactaccaaatatccaatgggtaagcccatgatgtagccactagtacaataaaaatctgaagtaaaatgaggcataaacttgatgcagctgcctccctcattcaactggggagttcttgagttcctcatttgttggtaaaaagaaaaagaatgtgaaaatgtctctttttttcttggctattagtggctgtcttgcaatatttcaataggagtccaattactagttaaaacactggcggggtgcggtggctcacgcctgtaatcctagcactttgggaggccaagttgggcagatcacaagttcaagagatcgagaccattctggccaacatggtgaaaccccgtctctactaaaaatacaaaaattagctgggcatggcagtgcgtgcctgcaatcccagctactcaggaagctgaggcaggagaatcgcttgaacctgggaggtggaagttgtagtgaactgagatcgcaccactgcactccagcctggcaacagagctagaatccgtctcaaacaaacaaacaaaaaatcccacagctattggatcatccacagattttttctttacaatcttgttctccttgtccatggaccatcaatagttgacttgccaggtttaattctttcattgcttgagaagaaaggaatcaaaggactgtgtgtagtaagctgacggtaaagttaagattaaattaagacagagagagaatacatatcactgccaggcctgataggaaaaatctgctcttccttttaataacagtgatgaattgtcaggaccttatttaggaaaccctgacctacccataactccctgctaggctaagtagaaaccaggttatttctccctgcttatggctccccgcaaagggacttgcagcgtgtcctgcaactttgtcttcagatagtgcttcctacaaaactaggtcttgttttgtaatcttttctcgtgttgaatcagatctgcttacttatttaggtttggttatgagcttgtatctcactgtatttctcatgctttgttcttttaaacaaatcctttaaactgtgtcattttgtatacacatgtgaggtttgaaaaaaaaaaaaaaaaaaaaaagaactaccttgtgagttttgctcaaaatgtggcctaagtagccattggcatgtctagatgaacaaataaaaataaagataatttctttaaaatatca

SEQ ID NO: 165441 - DNA, 711 bp, Homo sapiens
  Payload ID: 12568
  Gene Symbol: PDE7B
  Gene Name: phosphodiesterase 7B
  ENST ID: ENST00000446774
  CDS Start-End: 1-601
gcatatgctctccaaagtgggaatgtgggattttgacattttcttgtttgatcgcttgacaaatggaaacagcctggtaacactgttgtgccacctcttcaatacccatggactcattcaccatttcaagttagatatggtgaccttacaccgatttttagtcatggttcaagaagattaccacagccaaaacccgtatcacaatgctgttcacgcagccgacgtcacccaggccatgcactgctacctgaaagagccaaagcttgccagcttcctcacgcctctggacatcatgcttggactgctggctgcagcagcacacgatgtggaccacccaggggtgaaccagccatttttgataaaaactaaccaccatcttgcaaacctatatcaggtaagggagcccaacctggagccagccacagtatggtcaatcgccttaggcccggtgctcaagcctgaatcttgcccatggagaaagccttgttttagggtcctagaagttcaaagacgaatgaaacacaatctctgccctcaaaaatttgttcaaactcagatgctcaaaatgagcaaaatccaagcaaacttaatcccagtttgaaagaggtttgaggaattagctcatgtcgatacaattgttttttaaaatctctaaagagtaaatacttgtgctgttctttgtatccaaagaccttactagaataaagtgag

SEQ ID NO: 165442 - DNA, 5234 bp, Homo sapiens
  Payload ID: 12568
  Gene Symbol: PDE7B
  Gene Name: phosphodiesterase 7B
  ENST ID: ENST00000615259
  CDS Start-End: 1-1509
atgcctgtgctagagcgatatttccacccagcagagctaggcaggaggtggacaggcccagaaggtgtgctgccctcctccccgggaagccggccggggtgccagcaggggccgctgccctgggacttgccagagatgatcaggatggtaaagctggtttggaaatccaaaagtgagctgcaggcgaccaaacagagaggcattctggacaatgaagatgctctccgcagctttccaggagatatacgactaaggggtcagacgggggttcgtgctgaacgccgtggctcctacccattcattgacttccgcctacttaacagtacaacatactcaggggagattggcaccaagaaaaaggtgaaaagactattaagctttcaaagatacttccatgcatcaaggctgcttcgtggaattataccacaagcccctctgcacctgctggatgaagactaccttggacaagcaaggcatatgctctccaaagtgggaatgtgggattttgacattttcttgtttgatcgcttgacaaatggaaacagcctggtaacactgttgtgccacctcttcaatacccatggactcattcaccatttcaagttagatatggtgaccttacaccgatttttagtcatggttcaagaagattaccacagccaaaacccgtatcacaatgctgttcacgcagccgacgtcacccaggccatgcactgctacctgaaagagccaaagcttgccagcttcctcacgcctctggacatcatgcttggactgctggctgcagcagcacacgatgtggaccacccaggggtgaaccagccatttttgataaaaactaaccaccatcttgcaaacctatatcagaatatgtctgtgctggagaatcatcactggcgatctacaattggcatgcttcgagaatcaaggcttcttgctcatttgccaaaggaaatgacacaggatattgaacagcagctgggctccttgatcttggcaacagacatcaacaggcagaatgaatttttgaccagattgaaagctcacctccacaataaagacttaagactggaggatgcacaggacaggcactttatgcttcagatcgccttgaagtgtgctgacatttgcaatccttgtagaatctgggagatgagcaagcagtggagtgaaagggtctgtgaagaattctacaggcaaggtgaacttgaacagaaatttgaactggaaatcagtcctctttgtaatcaacagaaagattccatccctagtatacaaattggtttcatgagctacatcgtggagccgctcttccgggaatgggcccatttcacgggtaacagcaccctgtcggagaacatgctgggccacctcgcacacaacaaggcccagtggaagagcctgttgcccaggcagcacagaagcaggggcagcagtggcagcgggcctgaccacgaccacgcaggccaagggactgagagcgaggagcaggaaggcgacagcccctaggggccggcccaacttagacgcggctctcctccggcagggcccccagagggcagaagcagcgtggaggggccctcacgcagcagcccagccactttctgagtgttgtcctggggctctttggaacgccatcttcctcccacttacctgcctcccctccttttcgcaaatgtacagaagccatttgtcacctcagcattcgctgccgaaatgagcaactccattcagtaacgtgggagctgatcccacgggcaggctctccctgctccaggagaagactaggaggaagaatgaggtgctcctgccgtgtccgccttgttccgggtcgcactggaacaggcagcaattcctaagtccggagcgtttgagcgtttgctatctgactgctgatctgcgtgacagaaacaccagcatatttgcaacgccaaggatattggtcttaagtgcaagagcacaaatgagagtgtgagagaaagtaccttctattttaataataatattattataaaaataataaatctttttaacttttatattttatgcactagacaatggatctgcaactttggactaaggtcattcaatgtacccaaacttgaacagggggttcattgttttgctattgactttattatgccactttggggcagagacttggcatcttcgcagtttaagaaaccacgtttcctatccaatccgaagggaaggtgctgtacagttcattcctttgcaccattagccaatctgtcttttatggattctgtgacatgtttatattcacccatgtacattttctgtaaataccaaacgctactgattcccatgccaaaatacatgagtattatgggattgctacctgtataaacaatggcactgtgaaaatactgttagttttaatacaagagaatgcatttgtaaatatggtatagagtttattaatatactattgtttgcagataaaggccttaactttaaacatctttcatcttctgaaagctgcccaacttaaatcctcatagatgtctttctcaactgccttcccatgttcatctgtatgttttccagctaaggtcacaaaccaaaactgaataaagtctttgaggaaacattttggaaacttcacatgcattccgcttgagaccatagtgtttaatctatggcaccaagcatcgtttcctcagattaatgagacccttcaacaagcctgaatcagtcacttttcaacacagcgatgttttaacaagccagctgctaagcttgtgtttatgtgactcttgttacagatcatggcggtgcgtcagcctcacaggagacatagcaggtctcagaaaccttctatgaccctgtcatctaaccatcagggaattccctgctcccatgccacacatttgtctattatggctatagtaccaaagtacttttggtgtttggttggtgtgcatttctttagtgtcgatagtaactggatttttctttttccttaatctcatgtgaacaactacccaactgtttagctgaagttcatattatttaagtaaagaaaatatttcagttttataacagactttaccttcctggcaggtcattgtagttaattatgtctctagcttggagtgtcaccttggaatttcgttgccattttttctcagacacctggccgtaaaatcagtttgttacagcattcttctctaggctgctaaacgctgtgcattgaaccttttctttagaagtttcagcgtaactaatgttagatgaaaattgttgatgcccctttctttttactttaaacaatgtggtagtgggagaatgactgtttctgccactatcaacctgatcctcatgctgatagaatgacagctagcacttatttcctaagtgcaactgttttagagatttttctcctaacatgcaaaggaaatactgattggcctataataagttcctatagggagactgaggcttgcagaattaaggttcaggggaaattttggaaagttggttgtattttcattgaagtaggagagattatcagatggtgctaaagaaagtgtgaagatcttatgaaataggtggatggtaagttgaaattattgatgtgggtaagaagggaggttgtggaaagttaacactagctttgtatttttttttctgtaaaactgtgaactgatatattttcctttatcactttagtattctgcagttctcagcttggtgaggctccaaaagagaatatgtcagatgtattcctacttccaaacctgtcttactttggtttgatggtacacatagggcttttgaacagtctatttttaatgtatatgaggtcaaatcaaggaaggcaattgctggggacaagaaaagtagaggtaggaaagaagacactattttagctaatggggtttcttgggactaaaaaatggctttgtttaaattataattatataataatttaaataaatgagattggaggtattcttagtagttctgagttgatagtttacattacaattaggtcttgaagaagagctcacagagaaaaaactaccaaatatccaatgggtaagcccatgatgtagccactagtacaataaaaatctgaagtaaaatgaggcataaacttgatgcagctgcctccctcattcaactggggagttcttgagttcctcatttgttggtaaaaagaaaaagaatgtgaaaatgtctctttttttcttggctattagtggctgtcttgcaatatttcaataggagtccaattactagttaaaacactggcggggtgcggtggctcacgcctgtaatcctagcactttgggaggccaagttgggcagatcacaagttcaagagatcgagaccattctggccaacatggtgaaaccccgtctctactaaaaatacaaaaattagctgggcatggcagtgcgtgcctgcaatcccagctactcaggaagctgaggcaggagaatcgcttgaacctgggaggtggaagttgtagtgaactgagatcgcaccactgcactccagcctggcaacagagctagaatccgtctcaaacaaacaaacaaaaaatcccacagctattggatcatccacagattttttctttacaatcttgttctccttgtccatggaccatcaatagttgacttgccaggtttaattctttcattgcttgagaagaaaggaatcaaaggactgtgtgtagtaagctgacggtaaagttaagattaaattaagacagagagagaatacatatcactgccaggcctgataggaaaaatctgctcttccttttaataacagtgatgaattgtcaggaccttatttaggaaaccctgacctacccataactccctgctaggctaagtagaaaccaggttatttctccctgcttatggctccccgcaaagggacttgcagcgtgtcctgcaactttgtcttcagatagtgcttcctacaaaactaggtcttgttttgtaatcttttctcgtgttgaatcagatctgcttacttatttaggtttggttatgagcttgtatctcactgtatttctcatgctttgttcttttaaacaaatcctttaaactgtgtcattttgtatacacatgtgaggtttgaaaaaaaaaaaaaaaaaaaaaagaactaccttgtgagttttgctcaaaatgtggcctaagtagccattggcatgtctagatgaacaaataaaaataaagataatttcttt

SEQ ID NO: 165443 - DNA, 3984 bp, Homo sapiens
  Payload ID: 12569
  Gene Symbol: PDE8A
  Gene Name: phosphodiesterase 8A
  Uniprot ID: O60658
  ENST ID: ENST00000310298
  CDS Start-End: 253-2742
agtagccgggccaaggcgggagcggctgcctctcagggtcgctccagggccgcgctaggaaagccgccgccgccgcagcgcccgcaccgcgataaaaggggcggccgcgtttcctgacgcgagatccgcgctcgccgccgcccgcccaggcggcgatgacacggcgcccgcggcggcccggaggcgccgggtgggccgtttgctgaccggatcgcggctacccgccagcgtgtccgcggcgccgccgccagcatgggctgtgccccgagcatccacatttccgagcgcctggtggccgaggacgcgcctagccccgcggcaccgccgctgtcgtccggcgggccgcgcctcccgcagggccagaagacggccgccttgccccggacccgcggcgccggcctcttggagtcggagcttcgcgacggcagcggcaagaaggtagcagtagctgatgtgcagtttggccccatgagatttcatcaagatcaacttcaggtacttttagtgtttaccaaagaagataaccaatgtaatggattctgcagggcatgtgaaaaagcagggtttaagtgtacagttaccaaggaggctcaggctgtccttgcctgtttcctggacaaacatcatgacattatcatcatagaccacagaaatcctcgacagctggatgcagaggcactgtgcaggtctatcagatcatcaaaactctcagaaaacacagttattgttggtgtagtacgcagggtggatagagaagagttgtccgtaatgcctttcatttctgctggatttacaaggaggtatgtagaaaaccccaacatcatggcctgctacaatgaactgctccagctggagtttggagaggtgcgatcacaactgaaactcagggcttgtaactcagtattcactgcattagaaaacagtgaagatgcaattgaaattacaagcgaagaccgttttatacagtatgcaaatcctgcatttgaaacaacaatgggctatcagtcaggtgaattaatagggaaggagttaggagaagtgcctataaatgaaaaaaaggctgacttgctcgatactataaattcatgcatcaggataggcaaggagtggcaaggaatttactatgccaaaaagaaaaacggagataatatacaacaaaatgtgaagataatacctgtcattggacagggaggaaaaattagacactatgtgtccattatcagagtgtgcaatggcaacaataaggctgagaaaatatccgaatgtgttcagtctgacactcatacagataatcagacaggcaaacataaagacaggagaaaaggctcactagacgtcaaagctgttgcctcccgtgcaactgaagtttccagccagagacgacactcttccatggcccggatacattccatgacaattgaggcgcccatcaccaaggtaatcaatattatcaatgctgcccaggaaagtagtcccatgcctgtgacagaagccctagaccgtgtgctggaaattctaagaaccactgagttatattcaccacagtttggtgctaaagatgatgatccccatgccaatgaccttgttgggggcttaatgtctgatggtttgcgaagactatcagggaatgaatatgttctttcaacaaaaaacactcaaatggtttcaagcaatataatcactcccatctcccttgatgatgtcccaccacggatagctcgggccatggaaaatgaggaatactgggactttgatatttttgaactggaggctgccacccacaataggcctttgatttatcttggtctcaaaatgtttgctcgctttggaatctgtgaattcttacactgctccgagtcaacgctaagatcatggttacaaattatcgaagccaattatcattcctccaatccctaccacaattctacacattctgctgatgtgcttcatgccactgcctattttctctccaaggagaggataaaggaaactttagatccaattgatgaggtcgctgcactcatcgcagccaccattcatgatgtggatcaccctgggagaaccaactccttcctgtgtaatgctggaagtgagctggccattttgtacaatgacactgctgtgctggagagccaccatgcggccttggccttccagctgaccactggagatgataaatgcaatatatttaaaaacatggagaggaatgattatcggacactgcgccaggggattatcgacatggtcttagccacagaaatgacaaagcactttgagcatgtcaacaaatttgtcaacagcatcaacaaacccttggcaacactagaagaaaatggggaaactgataaaaaccaggaagtgataaacactatgcttaggactccagagaaccggaccctaatcaaacgaatgctgattaaatgtgctgatgtgtccaatccctgccgacccctgcagtactgcatcgagtgggctgcacgcatttcggaagaatatttttctcagactgatgaagagaagcagcagggcttacctgtggtgatgccagtgtttgacagaaatacctgcagcatccccaaatcccaaatctctttcattgattacttcatcacagacatgtttgatgcttgggatgcctttgtagacctgcctgatttaatgcagcatcttgacaacaactttaaatactggaaaggactggacgaaatgaagctgcggaacctccgaccacctcctgaatagtgggagacaccacccagagccctgaagctttgttccttcggtcatttggaattcctgagggcagccagagctccttggtcctttcagtactaggcagaacagcccccgatctgcatagcctgtgaaagcccacggggacatcagtaaccttctgcagccaccatccaatgccattactgtcaagtgagacttggccactgtagcctgggcctgctgcaggagctcttcagaaaggcacatgaggaccacggtttgcctcagtttctggtaaaacacaaggtctggagtgcccctgcaaagggtattgatggacttcctgccagtgacagagcatgtctattgcaaacaattctctcagttacgttcagcacttaagaacggctaatggcaataggatctttagcaactttttcacatcatagaaggtgcaatcgctcacttgggaacactactgagagtgacttctcttttaaaattgagtagcagatgaaaaattaaaatttgaacttgattattaatatcaattaaaatgttttatttattttattaaaagctcaatattttctatgaattcaaaaatacttcagagccaaagccaacttcaaataccgtgaccaaatttacatgattcatattcattatgcattacttggtatacagacttattttcataatgcaaattaataaaatgacacttttactgcactatagaaatattcatgtatgttaaacttttctgattgaggctaactggaaaaagctggggtcgtattctaagtgctaaagaaggctgcttctactgtatagaacccagggctctgaaacagctctagccgcctaatgcacttcacaggtaactccccaaggtaaaactagactctcttgttggttcgcaaagaaaagttaggacttaacacttttttctaaaattttataattcaatttccaaaagtctactctattttatactgtttctacaaaatattccttataaaaacaaagaacaaaaattgaatatttaatgaattgacattttataaccaacctgtttttatctacggtgggaatctttgatgccagaaatttataaagaggttctgtatcttcacaccttgaataagcataataccataaaaaatgacacttgacatgtcaatgtatttgtcatttcattttaaactcgtatttgtggtttttttcccagataaaaatgaaattaaaccatttctttttaagaaatca

SEQ ID NO: 165444 - DNA, 2663 bp, Homo sapiens
  Payload ID: 12569
  Gene Symbol: PDE8A
  Gene Name: phosphodiesterase 8A
  Uniprot ID: O60658
  ENST ID: ENST00000339708
  CDS Start-End: 183-2534
cgccgcagcgcccgcaccgcgataaaaggggcggccgcgtttcctgacgcgagatccgcgctcgccgccgcccgcccaggcggcgatgacacggcgcccgcggcggcccggaggcgccgggtgggccgtttgctgaccggatcgcggctacccgccagcgtgtccgcggcgccgccgccagcatgggctgtgccccgagcatccacatttccgagcgcctggtggccgaggacgcgcctagccccgcggcaccgccgctgtcgtccggcgggccgcgcctcccgcagggccagaagacggccgccttgccccggacccgcggcgccggcctcttggagtcggagcttcgcgacggcagcggcaagaaggtagcagtagctgatgtgcagtttggccccatgagatttcatcaagatcaacttcaggtacttttagtgtttaccaaagaagataaccaatgtaatggattctgcagggcatgtgaaaaagcagggtttaagtgtacagttaccaaggaggctcaggctgtccttgcctgtttcctggacaaacatcatgacattatcatcatagaccacagaaatcctcgacagctggatgcagaggcactgtgcaggtctatcagatcatcaaaactctcagaaaacacagttattgttggtgtagtacgcagggtggatagagaagagttgtccgtaatgcctttcatttctgctggatttacaaggaggtatgtagaaaaccccaacatcatggcctgctacaatgaactgctccagctggagtttggagaggtgcgatcacaactgaaactcagggcttgtaactcagtattcactgcattagaaaacagtgaagatgcaattgaaattacaagcgaagaccgttttatacaggagtggcaaggaatttactatgccaaaaagaaaaacggagataatatacaacaaaatgtgaagataatacctgtcattggacagggaggaaaaattagacactatgtgtccattatcagagtgtgcaatggcaacaataaggctgagaaaatatccgaatgtgttcagtctgacactcatacagataatcagacaggcaaacataaagacaggagaaaaggctcactagacgtcaaagctgttgcctcccgtgcaactgaagtttccagccagagacgacactcttccatggcccggatacattccatgacaattgaggcgcccatcaccaaggtaatcaatattatcaatgctgcccaggaaagtagtcccatgcctgtgacagaagccctagaccgtgtgctggaaattctaagaaccactgagttatattcaccacagtttggtgctaaagatgatgatccccatgccaatgaccttgttgggggcttaatgtctgatggtttgcgaagactatcagggaatgaatatgttctttcaacaaaaaacactcaaatggtttcaagcaatataatcactcccatctcccttgatgatgtcccaccacggatagctcgggccatggaaaatgaggaatactgggactttgatatttttgaactggaggctgccacccacaataggcctttgatttatcttggtctcaaaatgtttgctcgctttggaatctgtgaattcttacactgctccgagtcaacgctaagatcatggttacaaattatcgaagccaattatcattcctccaatccctaccacaattctacacattctgctgatgtgcttcatgccactgcctattttctctccaaggagaggataaaggaaactttagatccaattgatgaggtcgctgcactcatcgcagccaccattcatgatgtggatcaccctgggagaaccaactccttcctgtgtaatgctggaagtgagctggccattttgtacaatgacactgctgtgctggagagccaccatgcggccttggccttccagctgaccactggagatgataaatgcaatatatttaaaaacatggagaggaatgattatcggacactgcgccaggggattatcgacatggtcttagccacagaaatgacaaagcactttgagcatgtcaacaaatttgtcaacagcatcaacaaacccttggcaacactagaagaaaatggggaaactgataaaaaccaggaagtgataaacactatgcttaggactccagagaaccggaccctaatcaaacgaatgctgattaaatgtgctgatgtgtccaatccctgccgacccctgcagtactgcatcgagtgggctgcacgcatttcggaagaatatttttctcagactgatgaagagaagcagcagggcttacctgtggtgatgccagtgtttgacagaaatacctgcagcatccccaaatcccaaatctctttcattgattacttcatcacagacatgtttgatgcttgggatgcctttgtagacctgcctgatttaatgcagcatcttgacaacaactttaaatactggaaaggactggacgaaatgaagctgcggaacctccgaccacctcctgaatagtgggagacaccacccagagccctgaagctttgttccttcggtcatttggaattcctgagggcagccagagctccttggtcctttcagtactaggcagaacagcccccgatctgcatagcctgtgaaagc

SEQ ID NO: 165445 - DNA, 3912 bp, Homo sapiens
  Payload ID: 12569
  Gene Symbol: PDE8A
  Gene Name: phosphodiesterase 8A
  Uniprot ID: O60658
  ENST ID: ENST00000394553
  CDS Start-End: 190-2679
ccgccgccgccgcagcgcccgcaccgcgataaaaggggcggccgcgtttcctgacgcgagatccgcgctcgccgccgcccgcccaggcggcgatgacacggcgcccgcggcggcccggaggcgccgggtgggccgtttgctgaccggatcgcggctacccgccagcgtgtccgcggcgccgccgccagcatgggctgtgccccgagcatccacatttccgagcgcctggtggccgaggacgcgcctagccccgcggcaccgccgctgtcgtccggcgggccgcgcctcccgcagggccagaagacggccgccttgccccggacccgcggcgccggcctcttggagtcggagcttcgcgacggcagcggcaagaaggtagcagtagctgatgtgcagtttggccccatgagatttcatcaagatcaacttcaggtacttttagtgtttaccaaagaagataaccaatgtaatggattctgcagggcatgtgaaaaagcagggtttaagtgtacagttaccaaggaggctcaggctgtccttgcctgtttcctggacaaacatcatgacattatcatcatagaccacagaaatcctcgacagctggatgcagaggcactgtgcaggtctatcagatcatcaaaactctcagaaaacacagttattgttggtgtagtacgcagggtggatagagaagagttgtccgtaatgcctttcatttctgctggatttacaaggaggtatgtagaaaaccccaacatcatggcctgctacaatgaactgctccagctggagtttggagaggtgcgatcacaactgaaactcagggcttgtaactcagtattcactgcattagaaaacagtgaagatgcaattgaaattacaagcgaagaccgttttatacagtatgcaaatcctgcatttgaaacaacaatgggctatcagtcaggtgaattaatagggaaggagttaggagaagtgcctataaatgaaaaaaaggctgacttgctcgatactataaattcatgcatcaggataggcaaggagtggcaaggaatttactatgccaaaaagaaaaacggagataatatacaacaaaatgtgaagataatacctgtcattggacagggaggaaaaattagacactatgtgtccattatcagagtgtgcaatggcaacaataaggctgagaaaatatccgaatgtgttcagtctgacactcatacagataatcagacaggcaaacataaagacaggagaaaaggctcactagacgtcaaagctgttgcctcccgtgcaactgaagtttccagccagagacgacactcttccatggcccggatacattccatgacaattgaggcgcccatcaccaaggtaatcaatattatcaatgctgcccaggaaagtagtcccatgcctgtgacagaagccctagaccgtgtgctggaaattctaagaaccactgagttatattcaccacagtttggtgctaaagatgatgatccccatgccaatgaccttgttgggggcttaatgtctgatggtttgcgaagactatcagggaatgaatatgttctttcaacaaaaaacactcaaatggtttcaagcaatataatcactcccatctcccttgatgatgtcccaccacggatagctcgggccatggaaaatgaggaatactgggactttgatatttttgaactggaggctgccacccacaataggcctttgatttatcttggtctcaaaatgtttgctcgctttggaatctgtgaattcttacactgctccgagtcaacgctaagatcatggttacaaattatcgaagccaattatcattcctccaatccctaccacaattctacacattctgctgatgtgcttcatgccactgcctattttctctccaaggagaggataaaggaaactttagatccaattgatgaggtcgctgcactcatcgcagccaccattcatgatgtggatcaccctgggagaaccaactccttcctgtgtaatgctggaagtgagctggccattttgtacaatgacactgctgtgctggagagccaccatgcggccttggccttccagctgaccactggagatgataaatgcaatatatttaaaaacatggagaggaatgattatcggacactgcgccaggggattatcgacatggtcttagccacagaaatgacaaagcactttgagcatgtcaacaaatttgtcaacagcatcaacaaacccttggcaacactagaagaaaatggggaaactgataaaaaccaggaagtgataaacactatgcttaggactccagagaaccggaccctaatcaaacgaatgctgattaaatgtgctgatgtgtccaatccctgccgacccctgcagtactgcatcgagtgggctgcacgcatttcggaagaatatttttctcagactgatgaagagaagcagcagggcttacctgtggtgatgccagtgtttgacagaaatacctgcagcatccccaaatcccaaatctctttcattgattacttcatcacagacatgtttgatgcttgggatgcctttgtagacctgcctgatttaatgcagcatcttgacaacaactttaaatactggaaaggactggacgaaatgaagctgcggaacctccgaccacctcctgaatagtgggagacaccacccagagccctgaagctttgttccttcggtcatttggaattcctgagggcagccagagctccttggtcctttcagtactaggcagaacagcccccgatctgcatagcctgtgaaagcccacggggacatcagtaaccttctgcagccaccatccaatgccattactgtcaagtgagacttggccactgtagcctgggcctgctgcaggagctcttcagaaaggcacatgaggaccacggtttgcctcagtttctggtaaaacacaaggtctggagtgcccctgcaaagggtattgatggacttcctgccagtgacagagcatgtctattgcaaacaattctctcagttacgttcagcacttaagaacggctaatggcaataggatctttagcaactttttcacatcatagaaggtgcaatcgctcacttgggaacactactgagagtgacttctcttttaaaattgagtagcagatgaaaaattaaaatttgaacttgattattaatatcaattaaaatgttttatttattttattaaaagctcaatattttctatgaattcaaaaatacttcagagccaaagccaacttcaaataccgtgaccaaatttacatgattcatattcattatgcattacttggtatacagacttattttcataatgcaaattaataaaatgacacttttactgcactatagaaatattcatgtatgttaaacttttctgattgaggctaactggaaaaagctggggtcgtattctaagtgctaaagaaggctgcttctactgtatagaacccagggctctgaaacagctctagccgcctaatgcacttcacaggtaactccccaaggtaaaactagactctcttgttggttcgcaaagaaaagttaggacttaacacttttttctaaaattttataattcaatttccaaaagtctactctattttatactgtttctacaaaatattccttataaaaacaaagaacaaaaattgaatatttaatgaattgacattttataaccaacctgtttttatctacggtgggaatctttgatgccagaaatttataaagaggttctgtatcttcacaccttgaataagcataataccataaaaaatgacacttgacatgtcaatgtatttgtcatttcattttaaactcgtatttgtggtttttttcccagataaaaatgaaattaaaccatttcttttt

SEQ ID NO: 165446 - DNA, 2999 bp, Homo sapiens
  Payload ID: 12569
  Gene Symbol: PDE8A
  Gene Name: phosphodiesterase 8A
  ENST ID: ENST00000485596
  CDS Start-End: 183-1001
cgccgcagcgcccgcaccgcgataaaaggggcggccgcgtttcctgacgcgagatccgcgctcgccgccgcccgcccaggcggcgatgacacggcgcccgcggcggcccggaggcgccgggtgggccgtttgctgaccggatcgcggctacccgccagcgtgtccgcggcgccgccgccagcatgggctgtgccccgagcatccacatttccgagcgcctggtggccgaggacgcgcctagccccgcggcaccgccgctgtcgtccggcgggccgcgcctcccgcagggccagaagacggccgccttgccccggacccgcggcgccggcctcttggagtcggagcttcgcgacggcagcggcaagaaggtagcagtagctgatgtgcagtttggccccatgagatttcatcaagatcaacttcaggtacttttagtgtttaccaaagaagataaccaatgtaatggattctgcagggcatgtgaaaaagcagggtttaagtgtacagttaccaaggaggctcaggctgtccttgcctgtttcctggacaaacatcatgacattatcatcatagaccacagaaatcctcgacagctggatgcagaggcactgtgcaggtctatcagatcatcaaaactctcagaaaacacagttattgttggtgtagtacgcagggtggatagagaagagttgtccgtaatgcctttcatttctgctggatttacaaggaggtatgtagaaaaccccaacatcatggcctgctacaatgaactgctccagctggagtttggagaggtgcgatcacaactgaaactcagggcttgtaactcagtattcactgcattagaaaacagtgaagatgcaattgaaattacaagcgaagaccgttttatacagccctgttgtagcagctcctggtttggcgctgtgcacatcccttcctctgcccctgttgaagtgggagtgggcctgctgccctcctggagcctcaggagaacatagcagaaagcccagccgggtatcacccaagcagaagctcgtctgggctccagaattcttcgtgggttatgtgcttatggcttcacaactgccacgtatgcaaatcctgcatttgaaacaacaatgggctatcagtcaggtgaattaatagggaaggagttaggagaagtgcctataaatgaaaaaaaggctgacttgctcgatactataaattcatgcatcaggataggcaaggagtggcaaggaatttactatgccaaaaagaaaaacggagataatatacaacaaaatgtgaagataatacctgtcattggacagggaggaaaaattagacactatgtgtccattatcagagtgtgcaatggcaacaataaggctgagaaaatatccgaatgtgttcagtctgacactcatacagataatcagacaggcaaacataaagacaggagaaaaggctcactagacgtcaaagctgttgcctcccgtgcaactgaagtttccagccagagacgacactcttccatggcccggatacattccatgacaattgaggcgcccatcaccaaggtaatcaatattatcaatgctgcccaggaaagtagtcccatgcctgtgacagaagccctagaccgtgtgctggaaattctaagaaccactgagttatattcaccacagtttggtgctaaagatgatgatccccatgccaatgaccttgttgggggcttaatgtctgatggtttgcgaagactatcagggaatgaatatgttctttcaacaaaaaacactcaaatggtttcaagcaatataatcactcccatctcccttgatgatgtcccaccacggatagctcgggccatggaaaatgaggaatactgggactttgatatttttgaactggaggctgccacccacaataggcctttgatttatcttggtctcaaaatgtttgctcgctttggaatctgtgaattcttacactgctccgagtcaacgctaagatcatggttacaaattatcgaagccaattatcattcctccaatccctaccacaattctacacattctgctgatgtgcttcatgccactgcctattttctctccaaggagaggataaaggaaactttagatccaattgatgaggtcgctgcactcatcgcagccaccattcatgatgtggatcaccctgggagaaccaactccttcctgtgtaatgctggaagtgagctggccattttgtacaatgacactgctgtgctggagagccaccatgcggccttggccttccagctgaccactggagatgataaatgcaatatatttaaaaacatggagaggaatgattatcggacactgcgccaggggattatcgacatggtcttagccacagaaatgacaaagcactttgagcatgtcaacaaatttgtcaacagcatcaacaaacccttggcaacactagaagaaaatggggaaactgataaaaaccaggaagtgataaacactatgcttaggactccagagaaccggaccctaatcaaacgaatgctgattaaatgtgctgatgtgtccaatccctgccgacccctgcagtactgcatcgagtgggctgcacgcatttcggaagaatatttttctcagactgatgaagagaagcagcagggcttacctgtggtgatgccagtgtttgacagaaatacctgcagcatccccaaatcccaaatctctttcattgattacttcatcacagacatgtttgatgcttgggatgcctttgtagacctgcctgatttaatgcagcatcttgacaacaactttaaatactggaaaggactggacgaaatgaagctgcggaacctccgaccacctcctgaatagtgggagacaccacccagagccctgaagctttgttccttcggtcatttggaattcctgagggcagccagagctccttggtcctttcagtactaggcagaacagcccccgatctgcatagcctgtgaaagc

SEQ ID NO: 165447 - DNA, 2722 bp, Homo sapiens
  Payload ID: 12569
  Gene Symbol: PDE8A
  Gene Name: phosphodiesterase 8A
  Uniprot ID: O60658
  ENST ID: ENST00000478717
  CDS Start-End: 183-869
cgccgcagcgcccgcaccgcgataaaaggggcggccgcgtttcctgacgcgagatccgcgctcgccgccgcccgcccaggcggcgatgacacggcgcccgcggcggcccggaggcgccgggtgggccgtttgctgaccggatcgcggctacccgccagcgtgtccgcggcgccgccgccagcatgggctgtgccccgagcatccacatttccgagcgcctggtggccgaggacgcgcctagccccgcggcaccgccgctgtcgtccggcgggccgcgcctcccgcagggccagaagacggccgccttgccccggacccgcggcgccggcctcttggagtcggagcttcgcgacggcagcggcaagaaggtagcagtagctgatgtgcagtttggccccatgagatttcatcaagatcaacttcaggtacttttagtgtttaccaaagaagataaccaatgtaatggattctgcagggcatgtgaaaaagcagggtttaagtgtacagttaccaaggaggctcaggctgtccttgcctgtttcctggacaaacatcatgacattatcatcatagaccacagaaatcctcgacagctggatgcagaggcactgtgcaggtctatcagatcatcaaaactctcagaaaacacagttattgttggtgtagtacgcagggtggatagagaagagttgtccgtaatgcctttcatttctgctggatttacaaggaggtatgtagaaaaccccaacatcatggcctgctacaatgaactgctccagctggagtttggagaggtgcgatcacaactgaaactcagtatgcaaatcctgcatttgaaacaacaatgggctatcagtcaggtgaattaatagggaaggagttaggagaagtgcctataaatgaaaaaaaggctgacttgctcgatactataaattcatgcatcaggataggcaaggagtggcaaggaatttactatgccaaaaagaaaaacggagataatatacaacaaaatgtgaagataatacctgtcattggacagggaggaaaaattagacactatgtgtccattatcagagtgtgcaatggcaacaataaggctgagaaaatatccgaatgtgttcagtctgacactcatacagataatcagacaggcaaacataaagacaggagaaaaggctcactagacgtcaaagctgttgcctcccgtgcaactgaagtttccagccagagacgacactcttccatggcccggatacattccatgacaattgaggcgcccatcaccaaggtaatcaatattatcaatgctgcccaggaaagtagtcccatgcctgtgacagaagccctagaccgtgtgctggaaattctaagaaccactgagttatattcaccacagtttggtgctaaagatgatgatccccatgccaatgaccttgttgggggcttaatgtctgatggtttgcgaagactatcagggaatgaatatgttctttcaacaaaaaacactcaaatggtttcaagcaatataatcactcccatctcccttgatgatgtcccaccacggatagctcgggccatggaaaatgaggaatactgggactttgatatttttgaactggaggctgccacccacaataggcctttgatttatcttggtctcaaaatgtttgctcgctttggaatctgtgaattcttacactgctccgagtcaacgctaagatcatggttacaaattatcgaagccaattatcattcctccaatccctaccacaattctacacattctgctgatgtgcttcatgccactgcctattttctctccaaggagaggataaaggaaactttagatccaattgatgaggtcgctgcactcatcgcagccaccattcatgatgtggatcaccctgggagaaccaactccttcctgtgtaatgctggaagtgagctggccattttgtacaatgacactgctgtgctggagagccaccatgcggccttggccttccagctgaccactggagatgataaatgcaatatatttaaaaacatggagaggaatgattatcggacactgcgccaggggattatcgacatggtcttagccacagaaatgacaaagcactttgagcatgtcaacaaatttgtcaacagcatcaacaaacccttggcaacactagaagaaaatggggaaactgataaaaaccaggaagtgataaacactatgcttaggactccagagaaccggaccctaatcaaacgaatgctgattaaatgtgctgatgtgtccaatccctgccgacccctgcagtactgcatcgagtgggctgcacgcatttcggaagaatatttttctcagactgatgaagagaagcagcagggcttacctgtggtgatgccagtgtttgacagaaatacctgcagcatccccaaatcccaaatctctttcattgattacttcatcacagacatgtttgatgcttgggatgcctttgtagacctgcctgatttaatgcagcatcttgacaacaactttaaatactggaaaggactggacgaaatgaagctgcggaacctccgaccacctcctgaatagtgggagacaccacccagagccctgaagctttgttccttcggtcatttggaattcctgagggcagccagagctccttggtcctttcagtactaggcagaacagcccccgatctgcatagcctgtgaaagc

SEQ ID NO: 165448 - DNA, 2584 bp, Homo sapiens
  Payload ID: 12569
  Gene Symbol: PDE8A
  Gene Name: phosphodiesterase 8A
  ENST ID: ENST00000559742
  CDS Start-End: 183-878
cgccgcagcgcccgcaccgcgataaaaggggcggccgcgtttcctgacgcgagatccgcgctcgccgccgcccgcccaggcggcgatgacacggcgcccgcggcggcccggaggcgccgggtgggccgtttgctgaccggatcgcggctacccgccagcgtgtccgcggcgccgccgccagcatgggctgtgccccgagcatccacatttccgagcgcctggtggccgaggacgcgcctagccccgcggcaccgccgctgtcgtccggcgggccgcgcctcccgcagggccagaagacggccgccttgccccggacccgcggcgccggcctcttggagtcggagcttcgcgacggcagcggcaagaaggtagcagtagctgatgtgcagtttggccccatgagatttcatcaagatcaacttcaggtacttttagtgtttaccaaagaagataaccaatgtaatggattctgcagggcatgtgaaaaagcagggtttaagtgtacagttaccaaggaggctcaggctgtccttgcctgtttcctggacaaacatcatgacattatcatcatagaccacagaaatcctcgacagctggatgcagaggcactgtgcaggtctatcagatcatcaaaactctcagaaaacacagttattgttggtgtagtacgcagggtggatagagaagagttgtccgtaatgcctttcatttctgctggatttacaaggaggtatgtagaaaaccccaacatcatggcctgctacaatgaactgctccagctggagtttggagaggtgcgatcacaactgaaactcaggagtggcaaggaatttactatgccaaaaagaaaaacggagataatatacaacaaaatgtgaagataatacctgtcattggacagggaggaaaaattagacactatgtgtccattatcagagtgtgcaatggcaacaataaggctgagaaaatatccgaatgtgttcagtctgacactcatacagataatcagacaggcaaacataaagacaggagaaaaggctcactagacgtcaaagctgttgcctcccgtgcaactgaagtttccagccagagacgacactcttccatggcccggatacattccatgacaattgaggcgcccatcaccaaggtaatcaatattatcaatgctgcccaggaaagtagtcccatgcctgtgacagaagccctagaccgtgtgctggaaattctaagaaccactgagttatattcaccacagtttggtgctaaagatgatgatccccatgccaatgaccttgttgggggcttaatgtctgatggtttgcgaagactatcagggaatgaatatgttctttcaacaaaaaacactcaaatggtttcaagcaatataatcactcccatctcccttgatgatgtcccaccacggatagctcgggccatggaaaatgaggaatactgggactttgatatttttgaactggaggctgccacccacaataggcctttgatttatcttggtctcaaaatgtttgctcgctttggaatctgtgaattcttacactgctccgagtcaacgctaagatcatggttacaaattatcgaagccaattatcattcctccaatccctaccacaattctacacattctgctgatgtgcttcatgccactgcctattttctctccaaggagaggataaaggaaactttagatccaattgatgaggtcgctgcactcatcgcagccaccattcatgatgtggatcaccctgggagaaccaactccttcctgtgtaatgctggaagtgagctggccattttgtacaatgacactgctgtgctggagagccaccatgcggccttggccttccagctgaccactggagatgataaatgcaatatatttaaaaacatggagaggaatgattatcggacactgcgccaggggattatcgacatggtcttagccacagaaatgacaaagcactttgagcatgtcaacaaatttgtcaacagcatcaacaaacccttggcaacactagaagaaaatggggaaactgataaaaaccaggaagtgataaacactatgcttaggactccagagaaccggaccctaatcaaacgaatgctgattaaatgtgctgatgtgtccaatccctgccgacccctgcagtactgcatcgagtgggctgcacgcatttcggaagaatatttttctcagactgatgaagagaagcagcagggcttacctgtggtgatgccagtgtttgacagaaatacctgcagcatccccaaatcccaaatctctttcattgattacttcatcacagacatgtttgatgcttgggatgcctttgtagacctgcctgatttaatgcagcatcttgacaacaactttaaatactggaaaggactggacgaaatgaagctgcggaacctccgaccacctcctgaatagtgggagacaccacccagagccctgaagctttgttccttcggtcatttggaattcctgagggcagccagagctccttggtcctttcagtactaggcagaacagcccccgatctgcatagcctgtgaaagc

SEQ ID NO: 165449 - DNA, 3716 bp, Homo sapiens
  Payload ID: 12569
  Gene Symbol: PDE8A
  Gene Name: phosphodiesterase 8A
  Uniprot ID: O60658
  ENST ID: ENST00000557957
  CDS Start-End: 204-2477
tcggagaggacaggaaggagccggctgcaccgcgccagggtctccgcaaaccgggagcccagggagggcgggaagactggcgggggtccgaggcagcccgctacaggatacgtgatggacgcccagagacaccgccctccagctggtgggggaggagccccagccaccaagaagtagcagtagctgatgtgcagtttggccccatgagatttcatcaagatcaacttcaggtacttttagtgtttaccaaagaagataaccaatgtaatggattctgcagggcatgtgaaaaagcagggtttaagtgtacagttaccaaggaggctcaggctgtccttgcctgtttcctggacaaacatcatgacattatcatcatagaccacagaaatcctcgacagctggatgcagaggcactgtgcaggtctatcagatcatcaaaactctcagaaaacacagttattgttggtgtagtacgcagggtggatagagaagagttgtccgtaatgcctttcatttctgctggatttacaaggaggtatgtagaaaaccccaacatcatggcctgctacaatgaactgctccagctggagtttggagaggtgcgatcacaactgaaactcagggcttgtaactcagtattcactgcattagaaaacagtgaagatgcaattgaaattacaagcgaagaccgttttatacagtatgcaaatcctgcatttgaaacaacaatgggctatcagtcaggtgaattaatagggaaggagttaggagaagtgcctataaatgaaaaaaaggctgacttgctcgatactataaattcatgcatcaggataggcaaggagtggcaaggaatttactatgccaaaaagaaaaacggagataatatacaacaaaatgtgaagataatacctgtcattggacagggaggaaaaattagacactatgtgtccattatcagagtgtgcaatggcaacaataaggctgagaaaatatccgaatgtgttcagtctgacactcatacagataatcagacaggcaaacataaagacaggagaaaaggctcactagacgtcaaagctgttgcctcccgtgcaactgaagtttccagccagagacgacactcttccatggcccggatacattccatgacaattgaggcgcccatcaccaaggtaatcaatattatcaatgctgcccaggaaagtagtcccatgcctgtgacagaagccctagaccgtgtgctggaaattctaagaaccactgagttatattcaccacagtttggtgctaaagatgatgatccccatgccaatgaccttgttgggggcttaatgtctgatggtttgcgaagactatcagggaatgaatatgttctttcaacaaaaaacactcaaatggtttcaagcaatataatcactcccatctcccttgatgatgtcccaccacggatagctcgggccatggaaaatgaggaatactgggactttgatatttttgaactggaggctgccacccacaataggcctttgatttatcttggtctcaaaatgtttgctcgctttggaatctgtgaattcttacactgctccgagtcaacgctaagatcatggttacaaattatcgaagccaattatcattcctccaatccctaccacaattctacacattctgctgatgtgcttcatgccactgcctattttctctccaaggagaggataaaggaaactttagatccaattgatgaggtcgctgcactcatcgcagccaccattcatgatgtggatcaccctgggagaaccaactccttcctgtgtaatgctggaagtgagctggccattttgtacaatgacactgctgtgctggagagccaccatgcggccttggccttccagctgaccactggagatgataaatgcaatatatttaaaaacatggagaggaatgattatcggacactgcgccaggggattatcgacatggtcttagccacagaaatgacaaagcactttgagcatgtcaacaaatttgtcaacagcatcaacaaacccttggcaacactagaagaaaatggggaaactgataaaaaccaggaagtgataaacactatgcttaggactccagagaaccggaccctaatcaaacgaatgctgattaaatgtgctgatgtgtccaatccctgccgacccctgcagtactgcatcgagtgggctgcacgcatttcggaagaatatttttctcagactgatgaagagaagcagcagggcttacctgtggtgatgccagtgtttgacagaaatacctgcagcatccccaaatcccaaatctctttcattgattacttcatcacagacatgtttgatgcttgggatgcctttgtagacctgcctgatttaatgcagcatcttgacaacaactttaaatactggaaaggactggacgaaatgaagctgcggaacctccgaccacctcctgaatagtgggagacaccacccagagccctgaagctttgttccttcggtcatttggaattcctgagggcagccagagctccttggtcctttcagtactaggcagaacagcccccgatctgcatagcctgtgaaagcccacggggacatcagtaaccttctgcagccaccatccaatgccattactgtcaagtgagacttggccactgtagcctgggcctgctgcaggagctcttcagaaaggcacatgaggaccacggtttgcctcagtttctggtaaaacacaaggtctggagtgcccctgcaaagggtattgatggacttcctgccagtgacagagcatgtctattgcaaacaattctctcagttacgttcagcacttaagaacggctaatggcaataggatctttagcaactttttcacatcatagaaggtgcaatcgctcacttgggaacactactgagagtgacttctcttttaaaattgagtagcagatgaaaaattaaaatttgaacttgattattaatatcaattaaaatgttttatttattttattaaaagctcaatattttctatgaattcaaaaatacttcagagccaaagccaacttcaaataccgtgaccaaatttacatgattcatattcattatgcattacttggtatacagacttattttcataatgcaaattaataaaatgacacttttactgcactatagaaatattcatgtatgttaaacttttctgattgaggctaactggaaaaagctggggtcgtattctaagtgctaaagaaggctgcttctactgtatagaacccagggctctgaaacagctctagccgcctaatgcacttcacaggtaactccccaaggtaaaactagactctcttgttggttcgcaaagaaaagttaggacttaacacttttttctaaaattttataattcaatttccaaaagtctactctattttatactgtttctacaaaatattccttataaaaacaaagaacaaaaattgaatatttaatgaattgacattttataaccaacctgtttttatctacggtgggaatctttgatgccagaaatttataaagaggttctgtatcttcacaccttgaataagcataataccataaaaaatgacacttgacatgtcaatgtatttgtcatttcattttaaactcgtatttgtggtttttttcccagataaaaatgaaattaaaccatttctttttaagaaa

SEQ ID NO: 165450 - DNA, 538 bp, Homo sapiens
  Payload ID: 12569
  Gene Symbol: PDE8A
  Gene Name: phosphodiesterase 8A
  ENST ID: ENST00000559086
  CDS Start-End: 1-381
gcggcaccgccgctgtcgtccggcgggccgcgcctcccgcagggccagaagacggccgccttgccccggacccgcggcgccggcctcttggagtcggagcttcgcgacggcagcggcaagaaggtagcagtagctgatgtgcagtttggccccatgagatttcatcaagatcaacttcaggtacttttagtgtttaccaaagaagataaccaatgtaatggattctgcagggcatgtgaaaaagcagggtttaagtgtacagttaccaaggaggctcaggctgtccttgcctgtttcctggacaaacatcatgacattatcatcatagaccacagaaatcctcgacagctggatgcagaggcactgtgcagaggtatgtagaaaaccccaacatcatggcctgctacaatgaactgctccagctggagtttggagaggtgcgatcacaactgaaactcagataatcagacaggcaaacataaagacaggagaaaaggctcactagacgtcaaagctgttgcctcccgtgcaactgaag

SEQ ID NO: 165451 - DNA, 5956 bp, Homo sapiens
  Payload ID: 12570
  Gene Symbol: PDE8B
  Gene Name: phosphodiesterase 8B
  Uniprot ID: O95263
  ENST ID: ENST00000264917
  CDS Start-End: 46-2703
gcggccgcgggcgcgggcgggcgcgcgggggagcccggccgagggatgggctgcgcccccagcatccatgtctcgcagagcggcgtgatctactgccgggactcggacgagtccagctcgccccgccagaccaccagcgtgtcgcagggcccggcggcacccctgcccggcctcttcgtccagaccgacgccgccgacgccatccccccgagccgcgcgtcgggaccccccagcgtagcccgcgtccgcagggcccgcaccgagctgggcagcggtagcagcgcgggttccgcagcccccgccgcgaccaccagcaggggccggaggcgccactgctgcagcagcgccgaggccgagactcagacctgctacaccagcgtgaagcaggtgtcttctgcggaggtgcgcatcgggcccatgagactgacgcaggaccctattcaggttttgctgatctttgcaaaggaagatagtcagagcgatggcttctggtgggcctgcgacagagctggttatagatgcaatattgctcggactccagagtcagcccttgaatgctttcttgataagcatcatgaaattattgtaattgatcatagacaaactcagaacttcgatgcagaagcagtgtgcaggtcgatccgggccacaaatccctccgagcacacggtgatcctcgcagtggtttcgcgagtatcggatgaccatgaagaggcgtcagtccttcctcttctccacgcaggcttcaacaggagatttatggagaatagcagcataattgcttgctataatgaactgattcaaatagaacatggggaagttcgctcccagttcaaattacgggcctgtaattcagtgtttacagcattagatcactgtcatgaagccatagaaataacaagcgatgaccacgtgattcagtatgtcaacccagccttcgaaaggatgatgggctaccacaaaggtgagctcctgggaaaagaactcgctgatctgcccaaaagcgataagaaccgggcagaccttctcgacaccatcaatacatgcatcaagaagggaaaggagtggcagggggtttactatgccagacggaaatccggggacagcatccaacagcacgtgaagatcaccccagtgattggccaaggagggaaaattaggcattttgtctcgctcaagaaactgtgttgtaccactgacaataataagcagattcacaagattcatcgtgattcaggagacaattctcagacagagcctcattcattcagatataagaacaggaggaaagagtccattgacgtgaaatcgatatcatctcgaggcagtgatgcaccaagcctgcagaatcgtcgctatccgtccatggcgaggatccactccatgaccatcgaggctcccatcacaaaggttataaatataatcaatgcagcccaagaaaacagcccagtcacagtagcggaagccttggacagagttctagagattttacggaccacagaactgtactcccctcagctgggtaccaaagatgaagatccccacaccagtgatcttgttggaggcctgatgactgacggcttgagaagactgtcaggaaacgagtatgtgtttactaagaatgtgcaccagagtcacagtcaccttgcaatgccaataaccatcaatgatgttcccccttgtatctctcaattacttgataatgaggagagttgggacttcaacatctttgaattggaagccattacgcataaaaggccattggtttatctgggcttaaaggtcttctctcggtttggagtatgtgaatttttaaactgttctgaaaccactcttcgggcctggttccaagtgatcgaagccaactaccactcttccaatgcctaccacaactccacccatgctgccgacgtcctgcacgccaccgctttctttcttggaaaggaaagagtaaagggaagcctcgatcagttggatgaggtggcagccctcattgctgccacagtccatgacgtggatcacccgggaaggaccaactctttcctctgcaatgcaggcagtgagcttgctgtgctctacaatgacactgctgttctggagagtcaccacaccgccctggccttccagctcacggtcaaggacaccaaatgcaacattttcaagaatattgacaggaaccattatcgaacgctgcgccaggctattattgacatggttttggcaacagagatgacaaaacactttgaacatgtgaataagtttgtgaacagcatcaacaagccaatggcagctgagattgaaggcagcgactgtgaatgcaaccctgctgggaagaacttccctgaaaaccaaatcctgatcaaacgcatgatgattaagtgtgctgacgtggccaacccatgccgccccttggacctgtgcattgaatgggctgggaggatctctgaggagtattttgcacagactgatgaagagaagagacagggactacctgtggtgatgccagtgtttgaccggaatacctgtagcatccccaagtctcagatctctttcattgactacttcataacagacatgtttgatgcttgggatgcctttgcacatctgccagccctgatgcaacatttggctgacaactacaaacactggaagacactagatgacctaaagtgcaaaagtttgaggcttccatctgacagctaaagccaagccacagagggggcctcttgaccgacaaaggacactgtgaatcacagtagcgtaaacgagaggccttcctttctaatgacaatgacaggtattggtgaaggagctaatgtttaatatttgaccttgaatcattcaagtccccaaatttcattcttagaaagttatgttccatgaagaaaaatatatgttcttttgaatacttaatgacagaacaaatacttggcaaactcctttgctctgctgtcatcctgtgtacccttgtcaatccatggagctggttcactgtaactagcaggccacaggaagcaaagccttggtgcctgtgagctcatctcccaggatggtgactaagtagcttagctagtgatcagctcatcctttaccataaaagtcatcattgctgtttagcttgactgttttcctcaagaacatcgatctgaaggattcataaggagcttatctgaacagatttatctaagaaaaaaaaaaaacgacataaaataagtgaaacaactaggaccaaattacagataaactagttagcttcacagcctctatggctacatggttcttctggccgatggtatgacacctaagttagaacacagccttggctggtgggtgccctctctagactggtatcagcagcctgtgtaacccctttcctgtaaaaggggttcatcttaacaaagtcatccatgatgagggaaaaagtggcatttcatttttggggaatccatgagcttcctttatttctggctcacagaggcagccacgaggcactacaccaagtattatataaaagccattaaatttgaatgcccttggacaagcttttcttaaaaaaaaaaaaaaaaagtttatatacatgtttaaaatttttattaaaatccaaattttctgggtgtaagcccatgcagtatgttgtgccatgcaccatctatacgtaatattttgggaggggataggggaagtttcaaggttcagatatttttaaccagtctatatttgaaatcatgccattagctttaacaatgttaaaattgtgtggtgtaaatatatcagaaaataggcatatggggaggcagtaaatactattttaagctattaattgtatgctaaaagcttctaaagcacaagtgcatatttttatactgctcttttcacaactccctgtgatctacataaagtcagactcgagattttcctttctcttttaccagctgatccttcctatgtattataaatattagactccgtaaacaaacttcatttttctttctctgtacttcatgctgcatttttaaaaggtataaacaaacagagactgaattaattgaatcagtaattacttttttccaatacaaattggaatgcagaatacttggaacttgtacatggggaaaaaatgacttatcactacataatgtgccaatgtttttttctatgttttgtaccaaaaatggaaaaatatgacaattccatgcaaagaaatgtatctaaattatttttgttagatgataagagaacttgcttggtcaggacagcagccagctttgtattgtaatgctatattatgtaaatgtgatgaaaatgtttttgtgaagtacttgtaactaaattcctacagccatttttcactcccaacagctgtttttattttacctctttggcctaaagttttcataatttcaaatttggggtttagtgtcctttatttcatgagtcacacactttgttttcagagcacattaaaatcaggatgccagaatcccatattaaggacctagctaacttgcctaggcttcagaagcttgcttgaggcaaggacaatctttttctgatcatctcactttcagttctatttggtaagtaacatttatcaggtgtcagacatcttctatatgaaatatttacagcttactcagttttatgtcaaatttcttgttaacttcaaactttttattagtaatgtgcaaatgtttaaaaatgctttaagacagctaggtactaaagcgtcaacaatttctgctctttaccagtgtaatctacggtataatcttctggcctgcgaactagtctattcttccacatagtcaacttgttagaaatacaggctttcagatgatatgtgtatcagatagtttatattatataaactattataactgcctcttacacagagttgtttacttaaatgtcatgtgctgaggagggccgtattaggaaaatgcaacactctctaataatttccgtgactagtaagagaaggaagccagttataaaacactgctggaccagaatgaccctataatttcctaagatcattctttatttctaatttaagatttttaaatttacttgccctccatgtcaggactggttagcattctgggcaaaaaaaaaacaagcctgtcagttcactcagaacctactcagctttagagagagaaacagaagggatgatcttgtgcccttgcgctatgtgaatatagccagagactgaggtaataaatatattttaaaataaaaatgacaagggatttgtacactgtaacactatgtagtgttacttctgctgttgcaagtatcttaactgttgaaagctaaactcaggaaatggagaaaatgtacataatatacattgacccattattttattctaaattgaaagtccaacttttagcagcagtctacctgcaactactgaacaccatcaggtttgagtccctaccagaatctcccatcatactgttatcccccatctctgtgaccttagggcatgcatgaaaacaaaagcaatctagtccctagggttggagactgccctctagacagtttttcatggcagaaaattagaatacaagtatacctcattttattgcattctgcttcattgtgcttcaaagatactgccttttctacaaattgagggcttgtggccaccctgcatagagcaagtctatcggggcattttcccagcatgggctcactttgtgtaagtgtcacattttggtaactcttagagtatttcaaatgtttttattcttgtatctgtcatggtggtctgtgatcagtgatctttgttactactgtaattgttttagggtactgcaaaccatgcccgtataagacagtgaacttaattgataaatcttgtgtatattctaactgttccaccaactagcggtttccagtctctccctcttcttagacctccctattccctgagacacaacaatatcga

SEQ ID NO: 165452 - DNA, 3276 bp, Homo sapiens
  Payload ID: 12570
  Gene Symbol: PDE8B
  Gene Name: phosphodiesterase 8B
  Uniprot ID: O95263
  ENST ID: ENST00000346042
  CDS Start-End: 46-2412
gcggccgcgggcgcgggcgggcgcgcgggggagcccggccgagggatgggctgcgcccccagcatccatgtctcgcagagcggcgtgatctactgccgggactcggacgagtccagctcgccccgccagaccaccagcgtgtcgcagggcccggcggcacccctgcccggcctcttcgtccagaccgacgccgccgacgccatccccccgagccgcgcgtcgggaccccccagcgtagcccgcgtccgcagggcccgcaccgagctgggcagcggtagcagcgcgggttccgcagcccccgccgcgaccaccagcaggggccggaggcgccactgctgcagcagcgccgaggccgagactcagacctgctacaccagcgtgaagcaggtgtcttctgcggaggtgcgcatcgggcccatgagactgacgcaggaccctattcaggttttgctgatctttgcaaaggaagatagtcagagcgatggcttctggtgggcctgcgacagagctggttatagatgcaatattgctcggactccagagtcagcccttgaatgctttcttgataagcatcatgaaattattgtaattgatcatagacaaactcagaacttcgatgcagaagcagtgtgcaggtcgatccgggccacaaatccctccgagcacacggtgatcctcgcagtggtttcgcgagtatcggatgaccatgaagaggcgtcagtccttcctcttctccacgcaggcttcaacaggagatttatggagaatagcagcataattgcttgctataatgaactgattcaaatagaacatggggaagttcgctcccagttcaaattacgggcctgtaattcagtgtttacagcattagatcactgtcatgaagccatagaaataacaagcgatgaccacgtgattcagattcacaagattcatcgtgattcaggagacaattctcagacagagcctcattcattcagatataagaacaggaggaaagagtccattgacgtgaaatcgatatcatctcgaggcagtgatgcaccaagcctgcagaatcgtcgctatccgtccatggcgaggatccactccatgaccatcgaggctcccatcacaaaggttataaatataatcaatgcagcccaagaaaacagcccagtcacagtagcggaagccttggacagagttctagagattttacggaccacagaactgtactcccctcagctgggtaccaaagatgaagatccccacaccagtgatcttgttggaggcctgatgactgacggcttgagaagactgtcaggaaacgagtatgtgtttactaagaatgtgcaccagagtcacagtcaccttgcaatgccaataaccatcaatgatgttcccccttgtatctctcaattacttgataatgaggagagttgggacttcaacatctttgaattggaagccattacgcataaaaggccattggtttatctgggcttaaaggtcttctctcggtttggagtatgtgaatttttaaactgttctgaaaccactcttcgggcctggttccaagtgatcgaagccaactaccactcttccaatgcctaccacaactccacccatgctgccgacgtcctgcacgccaccgctttctttcttggaaaggaaagagtaaagggaagcctcgatcagttggatgaggtggcagccctcattgctgccacagtccatgacgtggatcacccgggaaggaccaactctttcctctgcaatgcaggcagtgagcttgctgtgctctacaatgacactgctgttctggagagtcaccacaccgccctggccttccagctcacggtcaaggacaccaaatgcaacattttcaagaatattgacaggaaccattatcgaacgctgcgccaggctattattgacatggttttggcaacagagatgacaaaacactttgaacatgtgaataagtttgtgaacagcatcaacaagccaatggcagctgagattgaaggcagcgactgtgaatgcaaccctgctgggaagaacttccctgaaaaccaaatcctgatcaaacgcatgatgattaagtgtgctgacgtggccaacccatgccgccccttggacctgtgcattgaatgggctgggaggatctctgaggagtattttgcacagactgatgaagagaagagacagggactacctgtggtgatgccagtgtttgaccggaatacctgtagcatccccaagtctcagatctctttcattgactacttcataacagacatgtttgatgcttgggatgcctttgcacatctgccagccctgatgcaacatttggctgacaactacaaacactggaagacactagatgacctaaagtgcaaaagtttgaggcttccatctgacagctaaagccaagccacagagggggcctcttgaccgacaaaggacactgtgaatcacagtagcgtaaacgagaggccttcctttctaatgacaatgacaggtattggtgaaggagctaatgtttaatatttgaccttgaatcattcaagtccccaaatttcattcttagaaagttatgttccatgaagaaaaatatatgttcttttgaatacttaatgacagaacaaatacttggcaaactcctttgctctgctgtcatcctgtgtacccttgtcaatccatggagctggttcactgtaactagcaggccacaggaagcaaagccttggtgcctgtgagctcatctcccaggatggtgactaagtagcttagctagtgatcagctcatcctttaccataaaagtcatcattgctgtttagcttgactgttttcctcaagaacatcgatctgaaggattcataaggagcttatctgaacagatttatctaagaaaaaaaaaaaacgacataaaataagtgaaacaactaggaccaaattacagataaactagttagcttcacagcctctatggctacatggttcttctggccgatggtatgacacctaagttagaacacagccttggctggtgggtgccctctctagactggtatcagcagcctgtgtaacccctttcctgtaaaaggggttcatcttaacaaagtcatccatgatgagggaaaaagtggcatttcatttttggggaatccatgagcttcctttatttctggctcacagaggcagccacgaggcactacaccaagtattatataaaagccattaaatttgaatgcccttggacaagcttttcttaaaaaaaaaaaaaaaaa

SEQ ID NO: 165453 - DNA, 2572 bp, Homo sapiens
  Payload ID: 12570
  Gene Symbol: PDE8B
  Gene Name: phosphodiesterase 8B
  Uniprot ID: O95263
  ENST ID: ENST00000333194
  CDS Start-End: 1-2493
atgggctgcgcccccagcatccatgtctcgcagagcggcgtgatctactgccgggactcggacgagtccagctcgccccgccagaccaccagcgtgtcgcagggcccggcggcacccctgcccggcctcttcgtccagaccgacgccgccgacgccatccccccgagccgcgcgtcgggaccccccagcgtagcccgcgtccgcagggcccgcaccgagctgggcagcggtagcagcgcgggttccgcagcccccgccgcgaccaccagcaggggccggaggcgccactgctgcagcagcgccgaggccgagactcagacctgctacaccagcgtgaagcaggtgtcttctgcggaggtgcgcatcgggcccatgagactgacgcaggaccctattcaggttttgctgatctttgcaaaggaagatagtcagagcgatggcttctggtgggcctgcgacagagctggttatagatgcaatattgctcggactccagagtcagcccttgaatgctttcttgataagcatcatgaaattattgtaattgatcatagacaaactcagaacttcgatgcagaagcagtgtgcaggtcgatccgggccacaaatccctccgagcacacggtgatcctcgcagtggtttcgcgagtatcggatgaccatgaagaggcgtcagtccttcctcttctccacgcaggcttcaacaggagatttatggagaatagcagcataattgcttgctataatgaactgattcaaatagaacatggggaagttcgctcccagttcaaattacgggcctgtaattcagtgtttacagcattagatcactgtcatgaagccatagaaataacaagcgatgaccacgtgattcagtatgtcaacccagccttcgaaaggatgatgggctaccacaaaggtgagctcctgggaaaagaactcgctgatctgcccaaaagcgataagaaccgggcagaccttctcgacaccatcaatacatgcatcaagaagggaaaggagtggcagggggtttactatgccagacggaaatccggggacagcatccaacagcacgtgaagatcaccccagtgattggccaaggagggaaaattaggcattttgtctcgctcaagaaactgtgttgtaccactgacaataataagcagattcacaagattcatcgtgattcaggagacaattctcagacagagcctcattcattcagatataagaacaggaggaaagagtccattgacgtgaaatcgatatcatctcgaggcagtgatgcaccaagcctgcagaatcgtcgctatccgtccatggcgaggatccactccatgaccatcgaggctcccatcacaaaggacggcttgagaagactgtcaggaaacgagtatgtgtttactaagaatgtgcaccagagtcacagtcaccttgcaatgccaataaccatcaatgatgttcccccttgtatctctcaattacttgataatgaggagagttgggacttcaacatctttgaattggaagccattacgcataaaaggccattggtttatctgggcttaaaggtcttctctcggtttggagtatgtgaatttttaaactgttctgaaaccactcttcgggcctggttccaagtgatcgaagccaactaccactcttccaatgcctaccacaactccacccatgctgccgacgtcctgcacgccaccgctttctttcttggaaaggaaagagtaaagggaagcctcgatcagttggatgaggtggcagccctcattgctgccacagtccatgacgtggatcacccgggaaggaccaactctttcctctgcaatgcaggcagtgagcttgctgtgctctacaatgacactgctgttctggagagtcaccacaccgccctggccttccagctcacggtcaaggacaccaaatgcaacattttcaagaatattgacaggaaccattatcgaacgctgcgccaggctattattgacatggttttggcaacagagatgacaaaacactttgaacatgtgaataagtttgtgaacagcatcaacaagccaatggcagctgagattgaaggcagcgactgtgaatgcaaccctgctgggaagaacttccctgaaaaccaaatcctgatcaaacgcatgatgattaagtgtgctgacgtggccaacccatgccgccccttggacctgtgcattgaatgggctgggaggatctctgaggagtattttgcacagactgatgaagagaagagacagggactacctgtggtgatgccagtgtttgaccggaatacctgtagcatccccaagtctcagatctctttcattgactacttcataacagacatgtttgatgcttgggatgcctttgcacatctgccagccctgatgcaacatttggctgacaactacaaacactggaagacactagatgacctaaagtgcaaaagtttgaggcttccatctgacagctaaagccaagccacagagggggcctcttgaccgacaaaggacactgtgaatcacagtagcgtaaacgagaggccttcctttc

SEQ ID NO: 165454 - DNA, 3426 bp, Homo sapiens
  Payload ID: 12570
  Gene Symbol: PDE8B
  Gene Name: phosphodiesterase 8B
  Uniprot ID: O95263
  ENST ID: ENST00000340978
  CDS Start-End: 46-2562
gcggccgcgggcgcgggcgggcgcgcgggggagcccggccgagggatgggctgcgcccccagcatccatgtctcgcagagcggcgtgatctactgccgggactcggacgagtccagctcgccccgccagaccaccagcgtgtcgcagggcccggcggcacccctgcccggcctcttcgtccagaccgacgccgccgacgccatccccccgagccgcgcgtcgggaccccccagcgtagcccgcgtccgcagggcccgcaccgagctgggcagcggtagcagcgcgggttccgcagcccccgccgcgaccaccagcaggggccggaggcgccactgctgcagcagcgccgaggccgagactcagacctgctacaccagcgtgaagcaggtgtcttctgcggaggtgcgcatcgggcccatgagactgacgcaggaccctattcaggttttgctgatctttgcaaaggaagatagtcagagcgatggcttctggtgggcctgcgacagagctggttatagatgcaatattgctcggactccagagtcagcccttgaatgctttcttgataagcatcatgaaattattgtaattgatcatagacaaactcagaacttcgatgcagaagcagtgtgcaggtcgatccgggccacaaatccctccgagcacacggtgatcctcgcagtggtttcgcgagtatcggatgaccatgaagaggcgtcagtccttcctcttctccacgcaggcttcaacaggagatttatggagaatagcagcataattgcttgctataatgaactgattcaaatagaacatggggaagttcgctcccagttcaaattacgggcctgtaattcagtgtttacagcattagatcactgtcatgaagccatagaaataacaagcgatgaccacgtgattcaggagtggcagggggtttactatgccagacggaaatccggggacagcatccaacagcacgtgaagatcaccccagtgattggccaaggagggaaaattaggcattttgtctcgctcaagaaactgtgttgtaccactgacaataataagcagattcacaagattcatcgtgattcaggagacaattctcagacagagcctcattcattcagatataagaacaggaggaaagagtccattgacgtgaaatcgatatcatctcgaggcagtgatgcaccaagcctgcagaatcgtcgctatccgtccatggcgaggatccactccatgaccatcgaggctcccatcacaaaggttataaatataatcaatgcagcccaagaaaacagcccagtcacagtagcggaagccttggacagagttctagagattttacggaccacagaactgtactcccctcagctgggtaccaaagatgaagatccccacaccagtgatcttgttggaggcctgatgactgacggcttgagaagactgtcaggaaacgagtatgtgtttactaagaatgtgcaccagagtcacagtcaccttgcaatgccaataaccatcaatgatgttcccccttgtatctctcaattacttgataatgaggagagttgggacttcaacatctttgaattggaagccattacgcataaaaggccattggtttatctgggcttaaaggtcttctctcggtttggagtatgtgaatttttaaactgttctgaaaccactcttcgggcctggttccaagtgatcgaagccaactaccactcttccaatgcctaccacaactccacccatgctgccgacgtcctgcacgccaccgctttctttcttggaaaggaaagagtaaagggaagcctcgatcagttggatgaggtggcagccctcattgctgccacagtccatgacgtggatcacccgggaaggaccaactctttcctctgcaatgcaggcagtgagcttgctgtgctctacaatgacactgctgttctggagagtcaccacaccgccctggccttccagctcacggtcaaggacaccaaatgcaacattttcaagaatattgacaggaaccattatcgaacgctgcgccaggctattattgacatggttttggcaacagagatgacaaaacactttgaacatgtgaataagtttgtgaacagcatcaacaagccaatggcagctgagattgaaggcagcgactgtgaatgcaaccctgctgggaagaacttccctgaaaaccaaatcctgatcaaacgcatgatgattaagtgtgctgacgtggccaacccatgccgccccttggacctgtgcattgaatgggctgggaggatctctgaggagtattttgcacagactgatgaagagaagagacagggactacctgtggtgatgccagtgtttgaccggaatacctgtagcatccccaagtctcagatctctttcattgactacttcataacagacatgtttgatgcttgggatgcctttgcacatctgccagccctgatgcaacatttggctgacaactacaaacactggaagacactagatgacctaaagtgcaaaagtttgaggcttccatctgacagctaaagccaagccacagagggggcctcttgaccgacaaaggacactgtgaatcacagtagcgtaaacgagaggccttcctttctaatgacaatgacaggtattggtgaaggagctaatgtttaatatttgaccttgaatcattcaagtccccaaatttcattcttagaaagttatgttccatgaagaaaaatatatgttcttttgaatacttaatgacagaacaaatacttggcaaactcctttgctctgctgtcatcctgtgtacccttgtcaatccatggagctggttcactgtaactagcaggccacaggaagcaaagccttggtgcctgtgagctcatctcccaggatggtgactaagtagcttagctagtgatcagctcatcctttaccataaaagtcatcattgctgtttagcttgactgttttcctcaagaacatcgatctgaaggattcataaggagcttatctgaacagatttatctaagaaaaaaaaaaaacgacataaaataagtgaaacaactaggaccaaattacagataaactagttagcttcacagcctctatggctacatggttcttctggccgatggtatgacacctaagttagaacacagccttggctggtgggtgccctctctagactggtatcagcagcctgtgtaacccctttcctgtaaaaggggttcatcttaacaaagtcatccatgatgagggaaaaagtggcatttcatttttggggaatccatgagcttcctttatttctggctcacagaggcagccacgaggcactacaccaagtattatataaaagccattaaatttgaatgcccttggacaagcttttcttaaaaaaaaaaaaaaaaa

SEQ ID NO: 165455 - DNA, 2677 bp, Homo sapiens
  Payload ID: 12570
  Gene Symbol: PDE8B
  Gene Name: phosphodiesterase 8B
  Uniprot ID: O95263
  ENST ID: ENST00000342343
  CDS Start-End: 1-2598
atgggctgcgcccccagcatccatgtctcgcagagcggcgtgatctactgccgggactcggacgagtccagctcgccccgccagaccaccagcgtgtcgcagggcccggcggcacccctgcccggcctcttcgtccagaccgacgccgccgacgccatccccccgagccgcgcgtcgggaccccccagcgtagcccgcgtccgcagggcccgcaccgagctgggcagcggtagcagcgcgggttccgcagcccccgccgcgaccaccagcaggggccggaggcgccactgctgcagcagcgccgaggccgagactcagacctgctacaccagcgtgaaggttttgctgatctttgcaaaggaagatagtcagagcgatggcttctggtgggcctgcgacagagctggttatagatgcaatattgctcggactccagagtcagcccttgaatgctttcttgataagcatcatgaaattattgtaattgatcatagacaaactcagaacttcgatgcagaagcagtgtgcaggtcgatccgggccacaaatccctccgagcacacggtgatcctcgcagtggtttcgcgagtatcggatgaccatgaagaggcgtcagtccttcctcttctccacgcaggcttcaacaggagatttatggagaatagcagcataattgcttgctataatgaactgattcaaatagaacatggggaagttcgctcccagttcaaattacgggcctgtaattcagtgtttacagcattagatcactgtcatgaagccatagaaataacaagcgatgaccacgtgattcagtatgtcaacccagccttcgaaaggatgatgggctaccacaaaggtgagctcctgggaaaagaactcgctgatctgcccaaaagcgataagaaccgggcagaccttctcgacaccatcaatacatgcatcaagaagggaaaggagtggcagggggtttactatgccagacggaaatccggggacagcatccaacagcacgtgaagatcaccccagtgattggccaaggagggaaaattaggcattttgtctcgctcaagaaactgtgttgtaccactgacaataataagcagattcacaagattcatcgtgattcaggagacaattctcagacagagcctcattcattcagatataagaacaggaggaaagagtccattgacgtgaaatcgatatcatctcgaggcagtgatgcaccaagcctgcagaatcgtcgctatccgtccatggcgaggatccactccatgaccatcgaggctcccatcacaaaggttataaatataatcaatgcagcccaagaaaacagcccagtcacagtagcggaagccttggacagagttctagagattttacggaccacagaactgtactcccctcagctgggtaccaaagatgaagatccccacaccagtgatcttgttggaggcctgatgactgacggcttgagaagactgtcaggaaacgagtatgtgtttactaagaatgtgcaccagagtcacagtcaccttgcaatgccaataaccatcaatgatgttcccccttgtatctctcaattacttgataatgaggagagttgggacttcaacatctttgaattggaagccattacgcataaaaggccattggtttatctgggcttaaaggtcttctctcggtttggagtatgtgaatttttaaactgttctgaaaccactcttcgggcctggttccaagtgatcgaagccaactaccactcttccaatgcctaccacaactccacccatgctgccgacgtcctgcacgccaccgctttctttcttggaaaggaaagagtaaagggaagcctcgatcagttggatgaggtggcagccctcattgctgccacagtccatgacgtggatcacccgggaaggaccaactctttcctctgcaatgcaggcagtgagcttgctgtgctctacaatgacactgctgttctggagagtcaccacaccgccctggccttccagctcacggtcaaggacaccaaatgcaacattttcaagaatattgacaggaaccattatcgaacgctgcgccaggctattattgacatggttttggcaacagagatgacaaaacactttgaacatgtgaataagtttgtgaacagcatcaacaagccaatggcagctgagattgaaggcagcgactgtgaatgcaaccctgctgggaagaacttccctgaaaaccaaatcctgatcaaacgcatgatgattaagtgtgctgacgtggccaacccatgccgccccttggacctgtgcattgaatgggctgggaggatctctgaggagtattttgcacagactgatgaagagaagagacagggactacctgtggtgatgccagtgtttgaccggaatacctgtagcatccccaagtctcagatctctttcattgactacttcataacagacatgtttgatgcttgggatgcctttgcacatctgccagccctgatgcaacatttggctgacaactacaaacactggaagacactagatgacctaaagtgcaaaagtttgaggcttccatctgacagctaaagccaagccacagagggggcctcttgaccgacaaaggacactgtgaatcacagtagcgtaaacgagaggccttcctttc

SEQ ID NO: 165456 - DNA, 574 bp, Homo sapiens
  Payload ID: 12570
  Gene Symbol: PDE8B
  Gene Name: phosphodiesterase 8B
  ENST ID: ENST00000503963
  CDS Start-End: 218-574
gacaaactcagaacttcgatgcagaagcagtgtgcaggtcgatccgggccacaaatccctccgagcacacggtgatcctcgcagtggtttcgcgagttgtgaggaatcctggtttgtatctgctgagtgaccacattttctgctttgctgcagatcggatgaccatgaagaggcgtcagtccttcctcttctccacgcaggcttcaacaggagatttatggagaatagcagcataattgcttgctataatgaactgattcaaatagaacatggggaagttcgctcccagttcaaattacgggcctgtaattcagtgtttacagcattagatcactgtcatgaagccatagaaataacaagcgatgaccacgtgattcagtatgtcaacccagccttcgaaaggatgatgggctaccacaaaggtgagctcctgggaaaagaactcgctgatctgcccaaaagcgataagaaccgggcagaccttctcgacaccatcaatacatgcatcaagaagggaaaggagtggcagggggtttactatgccagacggaaatccggggacagcatccaacag

SEQ ID NO: 165457 - DNA, 3474 bp, Homo sapiens
  Payload ID: 12570
  Gene Symbol: PDE8B
  Gene Name: phosphodiesterase 8B
  Uniprot ID: O95263
  ENST ID: ENST00000505283
  CDS Start-End: 781-1833
gtggcatgctggtgggcatagcttatggggaggtgcttctgccctgttctacctagtcctcaatttggccccatgtccgagtcccttctcctacctcactgccataccatcgtgggtttcctctccagagaatgctgtgaggaaccagtgagtgattccacctcaattttatgtggttttggggaagcggagcgagagaagagcaagtaaaaccaagaatctcttgccatacacacgttacaggcaggacaattgtggctgttgttacttctgtatttactcagtttttaaaattaagctcttggcctaaagatccaacatgtaacttcaggggagtccttcattaattaatactactttaaaccttagcacacatcgtctgggaatgacaaataagcatttctttttttttaaatttaattttattattattatactttaagttttagggtacatgtgcacaacgtgcaggtttgttacatatgtatacatgtgccatgttggtgtgcatttctaaatgacttttaagcaaagatctagatgattgaggtactcagagatcaaaggtggagggaaggaaactgagattcaggaacacttggggactagttcaagagccaggatatggccaagcattggaatttcgtccactctcttaacgctgcatctccaaggacctcaagcccagaaactcttctttaaaaggacggcttgagaagactgtcaggaaacgagtatgtgtttactaagaatgtgcaccagagtcacagtcaccttgcaatgccaataaccatcaatgatgttcccccttgtatctctcaattacttgataatgaggagagttgggacttcaacatctttgaattggaagccattacgcataaaaggccattggtttatctgggcttaaaggtcttctctcggtttggagtatgtgaatttttaaactgttctgaaaccactcttcgggcctggttccaagtgatcgaagccaactaccactcttccaatgcctaccacaactccacccatgctgccgacgtcctgcacgccaccgctttctttcttggaaaggaaagagtaaagggaagcctcgatcagttggatgaggtggcagccctcattgctgccacagtccatgacgtggatcacccgggaaggaccaactctttcctctgcaatgcaggcagtgagcttgctgtgctctacaatgacactgctgttctggagagtcaccacaccgccctggccttccagctcacggtcaaggacaccaaatgcaacattttcaagaatattgacaggaaccattatcgaacgctgcgccaggctattattgacatggttttggcaacagagatgacaaaacactttgaacatgtgaataagtttgtgaacagcatcaacaagccaatggcagctgagattgaaggcagcgactgtgaatgcaaccctgctgggaagaacttccctgaaaaccaaatcctgatcaaacgcatgatgattaagtgtgctgacgtggccaacccatgccgccccttggacctgtgcattgaatgggctgggaggatctctgaggagtattttgcacagactgatgaagagaagagacagggactacctgtggtgatgccagtgtttgaccggaatacctgtagcatccccaagtctcagatctctttcattgactacttcataacagacatgtttgatgcttgggatgcctttgcacatctgccagccctgatgcaacatttggctgacaactacaaacactggaagacactagatgacctaaagtgcaaaagtttgaggcttccatctgacagctaaagccaagccacagagggggcctcttgaccgacaaaggacactgtgaatcacagtagcgtaaacgagaggccttcctttctaatgacaatgacaggtattggtgaaggagctaatgtttaatatttgaccttgaatcattcaagtccccaaatttcattcttagaaagttatgttccatgaagaaaaatatatgttcttttgaatacttaatgacagaacaaatacttggcaaactcctttgctctgctgtcatcctgtgtacccttgtcaatccatggagctggttcactgtaactagcaggccacaggaagcaaagccttggtgcctgtgagctcatctcccaggatggtgactaagtagcttagctagtgatcagctcatcctttaccataaaagtcatcattgctgtttagcttgactgttttcctcaagaacatcgatctgaaggattcataaggagcttatctgaacagatttatctaagaaaaaaaaaaaacgacataaaataagtgaaacaactaggaccaaattacagataaactagttagcttcacagcctctatggctacatggttcttctggccgatggtatgacacctaagttagaacacagccttggctggtgggtgccctctctagactggtatcagcagcctgtgtaacccctttcctgtaaaaggggttcatcttaacaaagtcatccatgatgagggaaaaagtggcatttcatttttggggaatccatgagcttcctttatttctggctcacagaggcagccacgaggcactacaccaagtattatataaaagccattaaatttgaatgcccttggacaagcttttcttaaaaaaaaaaaaaaaaagtttatatacatgtttaaaatttttattaaaatccaaattttctgggtgtaagcccatgcagtatgttgtgccatgcaccatctatacgtaatattttgggaggggataggggaagtttcaaggttcagatatttttaaccagtctatatttgaaatcatgccattagctttaacaatgttaaaattgtgtggtgtaaatatatcagaaaataggcatatggggaggcagtaaatactattttaagctattaattgtatgctaaaagcttctaaagcacaagtgcatatttttatactgctcttttcacaactccctgtgatctacataaagtcagactcgagattttcctttctcttttaccagctgatccttcctatgtattataaatattagactccgtaaacaaacttcatttttctttctctgtacttcatgctgcatttttaaaaggtataaacaaacagagactgaattaattgaatcagtaattacttttttccaatacaaattggaatgcagaatacttggaacttgtacatggggaaaaaatgacttatcactacataatgtgccaatgtttttttctatgttttgtaccaaaaatggaaaaatatgacaattccatgcaaagaaatgtatctaaattatttttgttagatgataagagaacttgcttggtcaggacagcagccagctttgtattgtaatgctatattatgtaaatgtgatgaaaatgtttttgtgaagtacttgtaactaaattcctacagccatt

SEQ ID NO: 165458 - DNA, 736 bp, Homo sapiens
  Payload ID: 12570
  Gene Symbol: PDE8B
  Gene Name: phosphodiesterase 8B
  ENST ID: ENST00000505926
  CDS Start-End: 387-736
agcgagggagggaggggacgggcgcagaccgaaagtggggaaagaagagcggcgtgatctactgccgggactcggacgagtccagctcgccccgccagaccaccagcgtgtcgcagggcccggcggcacccctgcccggcctcttcgtccagaccgacgccgccgacgccatccccccgagccgcgcgtcgggaccccccagcgtagcccgcgtccgcagggcccgcaccgagctgggcagcggtagcagcgcgggttccgcagcccccgccgcgaccaccagcaggggccggaggcgccactgctgcagcagcgccgaggccgagactcagacctgctacaccagcgtgaagcaggtgtcttctgcggaggtgcgcatcgggcccatgagactgacgcaggaccctattcaggttttgctgatctttgcaaaggaagatagtcagagcgatggcttctggtgggcctgcgacagagctggttatagatgcaatattgctcggactccagagtcagcccttgaatgctttcttgataagcatcatgaaattattgtaattgatcatagacaaactcagaacttcgatgcagaagcagtgtgcaggtcgatccgggccacaaatccctccgagcacacggtgatcctcgcagtggtttcgcgagtatcggatgaccatgaagaggcgtcagtccttcctcttctccacgcaggcttcaacagggtatgtacaagata

SEQ ID NO: 165459 - DNA, 535 bp, Homo sapiens
  Payload ID: 12570
  Gene Symbol: PDE8B
  Gene Name: phosphodiesterase 8B
  ENST ID: ENST00000502945
  CDS Start-End: 200-535
aataattcatatgcagtacaatgatatcacatgggtttccatttctgaaaaagtttgccaatccctggtctactggagcaggttggagaagctgtgagctcgttgaggaaagtgactaagctttacaaaggaaaagagccagcaggcaacatggtgttcttgttggcaggtgtcttctgcggaggtgcgcatcgggcccatgagactgacgcaggaccctattcaggttttgctgatctttgcaaaggaagatagtcagagcgatggcttctggtgggcctgcgacagagctggttatagatgcaatattgctcggactccagagtcagcccttgaatgctttcttgataagcatcatgaaattattgtaattgatcatagacaaactcagaacttcgatgcagaagcagtgtgcaggtcgatccgggccacaaatccctccgagcacacggtgatcctcgcagtggtttcgcgagtatcggatgaccatgaagaggcgtcagtccttcctcttctccacgcaggcttcaacagg

SEQ ID NO: 165460 - DNA, 2058 bp, Homo sapiens
  Payload ID: 12571
  Gene Symbol: PDE9A
  Gene Name: phosphodiesterase 9A
  Uniprot ID: O76083
  ENST ID: ENST00000291539
  CDS Start-End: 61-1842
cgcggcggctggcgtcgggaaagtacagtaaaaagtccgagtgcagccgccgggcgcaggatgggatccggctcctccagctaccggcccaaggccatctacctggacatcgatggacgcattcagaaggtaatcttcagcaagtactgcaactccagcgacatcatggacctgttctgcatcgccaccggcctgcctcggaacacgaccatctccctgctgaccaccgacgacgccatggtctccatcgaccccaccatgcccgcgaattcagaacgcactccgtacaaagtgagacctgtggccatcaagcaactctccgctggtgtcgaggacaagagaaccacaagccgtggccagtctgctgagagaccactgagggacagacgggttgtgggcctggagcagccccggagggaaggagcatttgaaagtggacaggtagagcccaggcccagagagccccagggctgctaccaggaaggccagcgcatccctccagagagagaagaattaatccagagcgtgctggcgcaggttgcagagcagttctcaagagcattcaaaatcaatgaactgaaagctgaagttgcaaatcacttggctgtcctagagaaacgcgtggaattggaaggactaaaagtggtggagattgagaaatgcaagagtgacattaagaagatgagggaggagctggcggccagaagcagcaggaccaactgcccctgtaagtacagttttttggataaccacaagaagttgactcctcgacgcgatgttcccacttaccccaagtacctgctctctccagagaccatcgaggccctgcggaagccgacctttgacgtctggctttgggagcccaatgagatgctgagctgcctggagcacatgtaccacgacctcgggctggtcagggacttcagcatcaaccctgtcaccctcaggaggtggctgttctgcgtccacgacaactacagaaacaaccccttccacaacttccggcactgcttctgcgtggcccagatgatgtacagcatggtctggctctgcagtctccaggagaagttctcacaaacggatatcctgatcctaatgacagcggccatctgccacgatctggaccatcccggctacaacaacacgtaccagatcaatgcccgcacagagctggcggtccgctacaatgacatctcaccgctggagaaccaccactgcgccgtggccttccagatcctcgccgagcctgagtgcaacatcttctccaacatcccacctgatgggttcaagcagatccgacagggaatgatcacattaatcttggccactgacatggcaagacatgcagaaattatggattctttcaaagagaaaatggagaattttgactacagcaacgaggagcacatgaccctgctgaagatgattttgataaaatgctgtgatatctctaacgaggtccgtccaatggaagtcgcagagccttgggtggactgtttattagaggaatattttatgcagagcgaccgtgagaagtcagaaggccttcctgtggcaccgttcatggaccgagacaaagtgaccaaggccacagcccagattgggttcatcaagtttgtcctgatcccaatgtttgaaacagtgaccaagctcttccccatggttgaggagatcatgctgcagccactttgggaatcccgagatcgctacgaggagctgaagcggatagatgacgccatgaaagagttacagaagaagactgacagcttgacgtctggggccaccgagaagtccagagagagaagcagagatgtgaaaaacagtgaaggagactgtgcctgaggaaagcggggggcgtggctgcagttctggacgggctggccgagctgcgcgggatccttgtgcagggaagagctgccctgggcacctggcaccacaagaccatgttttctaagaaccattttgttcactgatacaaaaaaaaaaaaaggaattcatgatgctgtacagaattttatttttaaactgtcttttaaataatatattcttatacggaaa

SEQ ID NO: 165461 - DNA, 1956 bp, Homo sapiens
  Payload ID: 12571
  Gene Symbol: PDE9A
  Gene Name: phosphodiesterase 9A
  Uniprot ID: O76083
  ENST ID: ENST00000328862
  CDS Start-End: 37-1740
acagtaaaaagtccgagtgcagccgccgggcgcaggatgggatccggctcctccagctaccggcccaaggccatctacctggacatcgatggacgcattcagaaggtaatcttcagcaagtactgcaactccagcgacatcatggacctgttctgcatcgccaccggcctgcctcgcactccgtacaaagtgagacctgtggccatcaagcaactctccgctggtgtcgaggacaagagaaccacaagccgtggccagtctgctgagagaccactgagggacagacgggttgtgggcctggagcagccccggagggaaggagcatttgaaagtggacaggtagagcccaggcccagagagccccagggctgctaccaggaaggccagcgcatccctccagagagagaagaattaatccagagcgtgctggcgcaggttgcagagcagttctcaagagcattcaaaatcaatgaactgaaagctgaagttgcaaatcacttggctgtcctagagaaacgcgtggaattggaaggactaaaagtggtggagattgagaaatgcaagagtgacattaagaagatgagggaggagctggcggccagaagcagcaggaccaactgcccctgtaagtacagttttttggataaccacaagaagttgactcctcgacgcgatgttcccacttaccccaagtacctgctctctccagagaccatcgaggccctgcggaagccgacctttgacgtctggctttgggagcccaatgagatgctgagctgcctggagcacatgtaccacgacctcgggctggtcagggacttcagcatcaaccctgtcaccctcaggaggtggctgttctgcgtccacgacaactacagaaacaaccccttccacaacttccggcactgcttctgcgtggcccagatgatgtacagcatggtctggctctgcagtctccaggagaagttctcacaaacggatatcctgatcctaatgacagcggccatctgccacgatctggaccatcccggctacaacaacacgtaccagatcaatgcccgcacagagctggcggtccgctacaatgacatctcaccgctggagaaccaccactgcgccgtggccttccagatcctcgccgagcctgagtgcaacatcttctccaacatcccacctgatgggttcaagcagatccgacagggaatgatcacattaatcttggccactgacatggcaagacatgcagaaattatggattctttcaaagagaaaatggagaattttgactacagcaacgaggagcacatgaccctgctgaagatgattttgataaaatgctgtgatatctctaacgaggtccgtccaatggaagtcgcagagccttgggtggactgtttattagaggaatattttatgcagagcgaccgtgagaagtcagaaggccttcctgtggcaccgttcatggaccgagacaaagtgaccaaggccacagcccagattgggttcatcaagtttgtcctgatcccaatgtttgaaacagtgaccaagctcttccccatggttgaggagatcatgctgcagccactttgggaatcccgagatcgctacgaggagctgaagcggatagatgacgccatgaaagagttacagaagaagactgacagcttgacgtctggggccaccgagaagtccagagagagaagcagagatgtgaaaaacagtgaaggagactgtgcctgaggaaagcggggggcgtggctgcagttctggacgggctggccgagctgcgcgggatccttgtgcagggaagagctgccctgggcacctggcaccacaagaccatgttttctaagaaccattttgttcactgatacaaaaaaaaaaaaaggaattcatgatgctgtacagaattttatttttaaactgtcttttaaataatatattcttatacggaaa

SEQ ID NO: 165462 - DNA, 1883 bp, Homo sapiens
  Payload ID: 12571
  Gene Symbol: PDE9A
  Gene Name: phosphodiesterase 9A
  Uniprot ID: O76083
  ENST ID: ENST00000335512
  CDS Start-End: 66-1667
cctcccgcggcggctggcgtcgggaaagtacagtaaaaagtccgagtgcagccgccgggcgcaggatgggatccggctcctccagctaccggcccaaggccatctacctggacatcgatggacgcattcagaaggtaatcttcagcaagtactgcaactccagcgacatcatggacctgttctgcatcgccaccggcctgcctcggaacacgaccatctccctgctgaccaccgacgacgccatggtctccatcgaccccaccatgcccgcgaattcagaacgcactccgtacaaagtgagacctgtggccatcaagcaactctccgagagagaagaattaatccagagcgtgctggcgcaggttgcagagcagttctcaagagcattcaaaatcaatgaactgaaagctgaagttgcaaatcacttggctgtcctagagaaacgcgtggaattggaaggactaaaagtggtggagattgagaaatgcaagagtgacattaagaagatgagggaggagctggcggccagaagcagcaggaccaactgcccctgtaagtacagttttttggataaccacaagaagttgactcctcgacgcgatgttcccacttaccccaagtacctgctctctccagagaccatcgaggccctgcggaagccgacctttgacgtctggctttgggagcccaatgagatgctgagctgcctggagcacatgtaccacgacctcgggctggtcagggacttcagcatcaaccctgtcaccctcaggaggtggctgttctgcgtccacgacaactacagaaacaaccccttccacaacttccggcactgcttctgcgtggcccagatgatgtacagcatggtctggctctgcagtctccaggagaagttctcacaaacggatatcctgatcctaatgacagcggccatctgccacgatctggaccatcccggctacaacaacacgtaccagatcaatgcccgcacagagctggcggtccgctacaatgacatctcaccgctggagaaccaccactgcgccgtggccttccagatcctcgccgagcctgagtgcaacatcttctccaacatcccacctgatgggttcaagcagatccgacagggaatgatcacattaatcttggccactgacatggcaagacatgcagaaattatggattctttcaaagagaaaatggagaattttgactacagcaacgaggagcacatgaccctgctgaagatgattttgataaaatgctgtgatatctctaacgaggtccgtccaatggaagtcgcagagccttgggtggactgtttattagaggaatattttatgcagagcgaccgtgagaagtcagaaggccttcctgtggcaccgttcatggaccgagacaaagtgaccaaggccacagcccagattgggttcatcaagtttgtcctgatcccaatgtttgaaacagtgaccaagctcttccccatggttgaggagatcatgctgcagccactttgggaatcccgagatcgctacgaggagctgaagcggatagatgacgccatgaaagagttacagaagaagactgacagcttgacgtctggggccaccgagaagtccagagagagaagcagagatgtgaaaaacagtgaaggagactgtgcctgaggaaagcggggggcgtggctgcagttctggacgggctggccgagctgcgcgggatccttgtgcagggaagagctgccctgggcacctggcaccacaagaccatgttttctaagaaccattttgttcactgatacaaaaaaaaaaaaaggaattcatgatgctgtacagaattttatttttaaactgtcttttaaataatatattcttatacggaaa

SEQ ID NO: 165463 - DNA, 1728 bp, Homo sapiens
  Payload ID: 12571
  Gene Symbol: PDE9A
  Gene Name: phosphodiesterase 9A
  Uniprot ID: O76083
  ENST ID: ENST00000335440
  CDS Start-End: 37-1512
acagtaaaaagtccgagtgcagccgccgggcgcaggatgggatccggctcctccagctaccggcccaaggccatctacctggacatcgatggacgcattcagaaggaacacgaccatctccctgctgaccaccgacgacgccatggtctccatcgaccccaccatgcccgcgaattcagaacgcactccgtacaaagtgagacctgtggccatcaagcaactctccgagcattcaaaatcaatgaactgaaagctgaagttgcaaatcacttggctgtcctagagaaacgcgtggaattggaaggactaaaagtggtggagattgagaaatgcaagagtgacattaagaagatgagggaggagctggcggccagaagcagcaggaccaactgcccctgtaagtacagttttttggataaccacaagaagttgactcctcgacgcgatgttcccacttaccccaagtacctgctctctccagagaccatcgaggccctgcggaagccgacctttgacgtctggctttgggagcccaatgagatgctgagctgcctggagcacatgtaccacgacctcgggctggtcagggacttcagcatcaaccctgtcaccctcaggaggtggctgttctgcgtccacgacaactacagaaacaaccccttccacaacttccggcactgcttctgcgtggcccagatgatgtacagcatggtctggctctgcagtctccaggagaagttctcacaaacggatatcctgatcctaatgacagcggccatctgccacgatctggaccatcccggctacaacaacacgtaccagatcaatgcccgcacagagctggcggtccgctacaatgacatctcaccgctggagaaccaccactgcgccgtggccttccagatcctcgccgagcctgagtgcaacatcttctccaacatcccacctgatgggttcaagcagatccgacagggaatgatcacattaatcttggccactgacatggcaagacatgcagaaattatggattctttcaaagagaaaatggagaattttgactacagcaacgaggagcacatgaccctgctgaagatgattttgataaaatgctgtgatatctctaacgaggtccgtccaatggaagtcgcagagccttgggtggactgtttattagaggaatattttatgcagagcgaccgtgagaagtcagaaggccttcctgtggcaccgttcatggaccgagacaaagtgaccaaggccacagcccagattgggttcatcaagtttgtcctgatcccaatgtttgaaacagtgaccaagctcttccccatggttgaggagatcatgctgcagccactttgggaatcccgagatcgctacgaggagctgaagcggatagatgacgccatgaaagagttacagaagaagactgacagcttgacgtctggggccaccgagaagtccagagagagaagcagagatgtgaaaaacagtgaaggagactgtgcctgaggaaagcggggggcgtggctgcagttctggacgggctggccgagctgcgcgggatccttgtgcagggaagagctgccctgggcacctggcaccacaagaccatgttttctaagaaccattttgttcactgatacaaaaaaaaaaaaaggaattcatgatgctgtacagaattttatttttaaactgtcttttaaataatatattcttatacggaaa

SEQ ID NO: 165464 - DNA, 1616 bp, Homo sapiens
  Payload ID: 12571
  Gene Symbol: PDE9A
  Gene Name: phosphodiesterase 9A
  Uniprot ID: O76083
  ENST ID: ENST00000349112
  CDS Start-End: 3-1400
ggatgggatccggctcctccagctaccggcccaaggccatctacctggacatcgatggacgcattcagaagcactccgtacaaagtgagacctgtggccatcaagcaactctccgagcattcaaaatcaatgaactgaaagctgaagttgcaaatcacttggctgtcctagagaaacgcgtggaattggaaggactaaaagtggtggagattgagaaatgcaagagtgacattaagaagatgagggaggagctggcggccagaagcagcaggaccaactgcccctgtaagtacagttttttggataaccacaagaagttgactcctcgacgcgatgttcccacttaccccaagtacctgctctctccagagaccatcgaggccctgcggaagccgacctttgacgtctggctttgggagcccaatgagatgctgagctgcctggagcacatgtaccacgacctcgggctggtcagggacttcagcatcaaccctgtcaccctcaggaggtggctgttctgcgtccacgacaactacagaaacaaccccttccacaacttccggcactgcttctgcgtggcccagatgatgtacagcatggtctggctctgcagtctccaggagaagttctcacaaacggatatcctgatcctaatgacagcggccatctgccacgatctggaccatcccggctacaacaacacgtaccagatcaatgcccgcacagagctggcggtccgctacaatgacatctcaccgctggagaaccaccactgcgccgtggccttccagatcctcgccgagcctgagtgcaacatcttctccaacatcccacctgatgggttcaagcagatccgacagggaatgatcacattaatcttggccactgacatggcaagacatgcagaaattatggattctttcaaagagaaaatggagaattttgactacagcaacgaggagcacatgaccctgctgaagatgattttgataaaatgctgtgatatctctaacgaggtccgtccaatggaagtcgcagagccttgggtggactgtttattagaggaatattttatgcagagcgaccgtgagaagtcagaaggccttcctgtggcaccgttcatggaccgagacaaagtgaccaaggccacagcccagattgggttcatcaagtttgtcctgatcccaatgtttgaaacagtgaccaagctcttccccatggttgaggagatcatgctgcagccactttgggaatcccgagatcgctacgaggagctgaagcggatagatgacgccatgaaagagttacagaagaagactgacagcttgacgtctggggccaccgagaagtccagagagagaagcagagatgtgaaaaacagtgaaggagactgtgcctgaggaaagcggggggcgtggctgcagttctggacgggctggccgagctgcgcgggatccttgtgcagggaagagctgccctgggcacctggcaccacaagaccatgttttctaagaaccattttgttcactgatacaaaaaaaaaaaaaggaattcatgatgctgtacagaattttatttttaaactgtcttttaaataatatattcttatacggaaa

SEQ ID NO: 165465 - DNA, 1875 bp, Homo sapiens
  Payload ID: 12571
  Gene Symbol: PDE9A
  Gene Name: phosphodiesterase 9A
  Uniprot ID: O76083
  ENST ID: ENST00000380328
  CDS Start-End: 37-1659
acagtaaaaagtccgagtgcagccgccgggcgcaggatgggatccggctcctccagctaccggcccaaggccatctacctggacatcgatggacgcattcagaaggtaatcttcagcaagtactgcaactccagcgacatcatggacctgttctgcatcgccaccggcctgcctcggaacacgaccatctccctgctgaccaccgacgacgccatggtctccatcgaccccaccatgcccgcgaattcagaacggaatgagctcattctctatacatcactccgtaacttgttgtttttacctagtaaggagtcatgggcgtcccaccagcactccgtacaaagtgagacctgtggccatcaagcaactctccgagcattcaaaatcaatgaactgaaagctgaagttgcaaatcacttggctgtcctagagaaacgcgtggaattggaaggactaaaagtggtggagattgagaaatgcaagagtgacattaagaagatgagggaggagctggcggccagaagcagcaggaccaactgcccctgtaagtacagttttttggataaccacaagaagttgactcctcgacgcgatgttcccacttaccccaagtacctgctctctccagagaccatcgaggccctgcggaagccgacctttgacgtctggctttgggagcccaatgagatgctgagctgcctggagcacatgtaccacgacctcgggctggtcagggacttcagcatcaaccctgtcaccctcaggaggtggctgttctgcgtccacgacaactacagaaacaaccccttccacaacttccggcactgcttctgcgtggcccagatgatgtacagcatggtctggctctgcagtctccaggagaagttctcacaaacggatatcctgatcctaatgacagcggccatctgccacgatctggaccatcccggctacaacaacacgtaccagatcaatgcccgcacagagctggcggtccgctacaatgacatctcaccgctggagaaccaccactgcgccgtggccttccagatcctcgccgagcctgagtgcaacatcttctccaacatcccacctgatgggttcaagcagatccgacagggaatgatcacattaatcttggccactgacatggcaagacatgcagaaattatggattctttcaaagagaaaatggagaattttgactacagcaacgaggagcacatgaccctgctgaagatgattttgataaaatgctgtgatatctctaacgaggtccgtccaatggaagtcgcagagccttgggtggactgtttattagaggaatattttatgcagagcgaccgtgagaagtcagaaggccttcctgtggcaccgttcatggaccgagacaaagtgaccaaggccacagcccagattgggttcatcaagtttgtcctgatcccaatgtttgaaacagtgaccaagctcttccccatggttgaggagatcatgctgcagccactttgggaatcccgagatcgctacgaggagctgaagcggatagatgacgccatgaaagagttacagaagaagactgacagcttgacgtctggggccaccgagaagtccagagagagaagcagagatgtgaaaaacagtgaaggagactgtgcctgaggaaagcggggggcgtggctgcagttctggacgggctggccgagctgcgcgggatccttgtgcagggaagagctgccctgggcacctggcaccacaagaccatgttttctaagaaccattttgttcactgatacaaaaaaaaaaaaaggaattcatgatgctgtacagaattttatttttaaactgtcttttaaataatatattcttatacggaaa

SEQ ID NO: 165466 - DNA, 1671 bp, Homo sapiens
  Payload ID: 12571
  Gene Symbol: PDE9A
  Gene Name: phosphodiesterase 9A
  Uniprot ID: O76083
  ENST ID: ENST00000398224
  CDS Start-End: 55-1455
ggatgggatccggctcctccagctaccggcccaaggccatctacctggacatcgatggacgcattcagaagcactccgtacaaagtgagacctgtggccatcaagcaactctccgagagagaagaattaatccagagcgtgctggcgcaggttgcagagcagttctcaagagcattcaaaatcaatgaactgaaagctgaagttgcaaatcacttggctgtcctagagaaacgcgtggaattggaaggactaaaagtggtggagattgagaaatgcaagagtgacattaagaagatgagggaggagctggcggccagaagcagcaggaccaactgcccctgtaagtacagttttttggataaccacaagaagttgactcctcgacgcgatgttcccacttaccccaagtacctgctctctccagagaccatcgaggccctgcggaagccgacctttgacgtctggctttgggagcccaatgagatgctgagctgcctggagcacatgtaccacgacctcgggctggtcagggacttcagcatcaaccctgtcaccctcaggaggtggctgttctgcgtccacgacaactacagaaacaaccccttccacaacttccggcactgcttctgcgtggcccagatgatgtacagcatggtctggctctgcagtctccaggagaagttctcacaaacggatatcctgatcctaatgacagcggccatctgccacgatctggaccatcccggctacaacaacacgtaccagatcaatgcccgcacagagctggcggtccgctacaatgacatctcaccgctggagaaccaccactgcgccgtggccttccagatcctcgccgagcctgagtgcaacatcttctccaacatcccacctgatgggttcaagcagatccgacagggaatgatcacattaatcttggccactgacatggcaagacatgcagaaattatggattctttcaaagagaaaatggagaattttgactacagcaacgaggagcacatgaccctgctgaagatgattttgataaaatgctgtgatatctctaacgaggtccgtccaatggaagtcgcagagccttgggtggactgtttattagaggaatattttatgcagagcgaccgtgagaagtcagaaggccttcctgtggcaccgttcatggaccgagacaaagtgaccaaggccacagcccagattgggttcatcaagtttgtcctgatcccaatgtttgaaacagtgaccaagctcttccccatggttgaggagatcatgctgcagccactttgggaatcccgagatcgctacgaggagctgaagcggatagatgacgccatgaaagagttacagaagaagactgacagcttgacgtctggggccaccgagaagtccagagagagaagcagagatgtgaaaaacagtgaaggagactgtgcctgaggaaagcggggggcgtggctgcagttctggacgggctggccgagctgcgcgggatccttgtgcagggaagagctgccctgggcacctggcaccacaagaccatgttttctaagaaccattttgttcactgatacaaaaaaaaaaaaaggaattcatgatgctgtacagaattttatttttaaactgtcttttaaataatatattcttatacggaaa

SEQ ID NO: 165467 - DNA, 1963 bp, Homo sapiens
  Payload ID: 12571
  Gene Symbol: PDE9A
  Gene Name: phosphodiesterase 9A
  Uniprot ID: O76083
  ENST ID: ENST00000398225
  CDS Start-End: 89-1747
acagtaaaaagtccgagtgcagccgccgggcgcaggatgggatccggctcctccagctaccggcccaaggccatctacctggacatcgatggacgcattcagaaggaacacgaccatctccctgctgaccaccgacgacgccatggtctccatcgaccccaccatgcccgcgaattcagaacgcactccgtacaaagtgagacctgtggccatcaagcaactctccgctggtgtcgaggacaagagaaccacaagccgtggccagtctgctgagagaccactgagggacagacgggttgtgggcctggagcagccccggagggaaggagcatttgaaagtggacaggtagagcccaggcccagagagccccagggctgctaccaggaaggccagcgcatccctccagagagagaagaattaatccagagcgtgctggcgcaggttgcagagcagttctcaagagcattcaaaatcaatgaactgaaagctgaagttgcaaatcacttggctgtcctagagaaacgcgtggaattggaaggactaaaagtggtggagattgagaaatgcaagagtgacattaagaagatgagggaggagctggcggccagaagcagcaggaccaactgcccctgtaagtacagttttttggataaccacaagaagttgactcctcgacgcgatgttcccacttaccccaagtacctgctctctccagagaccatcgaggccctgcggaagccgacctttgacgtctggctttgggagcccaatgagatgctgagctgcctggagcacatgtaccacgacctcgggctggtcagggacttcagcatcaaccctgtcaccctcaggaggtggctgttctgcgtccacgacaactacagaaacaaccccttccacaacttccggcactgcttctgcgtggcccagatgatgtacagcatggtctggctctgcagtctccaggagaagttctcacaaacggatatcctgatcctaatgacagcggccatctgccacgatctggaccatcccggctacaacaacacgtaccagatcaatgcccgcacagagctggcggtccgctacaatgacatctcaccgctggagaaccaccactgcgccgtggccttccagatcctcgccgagcctgagtgcaacatcttctccaacatcccacctgatgggttcaagcagatccgacagggaatgatcacattaatcttggccactgacatggcaagacatgcagaaattatggattctttcaaagagaaaatggagaattttgactacagcaacgaggagcacatgaccctgctgaagatgattttgataaaatgctgtgatatctctaacgaggtccgtccaatggaagtcgcagagccttgggtggactgtttattagaggaatattttatgcagagcgaccgtgagaagtcagaaggccttcctgtggcaccgttcatggaccgagacaaagtgaccaaggccacagcccagattgggttcatcaagtttgtcctgatcccaatgtttgaaacagtgaccaagctcttccccatggttgaggagatcatgctgcagccactttgggaatcccgagatcgctacgaggagctgaagcggatagatgacgccatgaaagagttacagaagaagactgacagcttgacgtctggggccaccgagaagtccagagagagaagcagagatgtgaaaaacagtgaaggagactgtgcctgaggaaagcggggggcgtggctgcagttctggacgggctggccgagctgcgcgggatccttgtgcagggaagagctgccctgggcacctggcaccacaagaccatgttttctaagaaccattttgttcactgatacaaaaaaaaaaaaaggaattcatgatgctgtacagaattttatttttaaactgtcttttaaataatatattcttatacggaaa

SEQ ID NO: 165468 - DNA, 1606 bp, Homo sapiens
  Payload ID: 12571
  Gene Symbol: PDE9A
  Gene Name: phosphodiesterase 9A
  Uniprot ID: O76083
  ENST ID: ENST00000398227
  CDS Start-End: 89-1390
acagtaaaaagtccgagtgcagccgccgggcgcaggatgggatccggctcctccagctaccggcccaaggccatctacctggacatcgatggacgcattcagaagagcattcaaaatcaatgaactgaaagctgaagttgcaaatcacttggctgtcctagagaaacgcgtggaattggaaggactaaaagtggtggagattgagaaatgcaagagtgacattaagaagatgagggaggagctggcggccagaagcagcaggaccaactgcccctgtaagtacagttttttggataaccacaagaagttgactcctcgacgcgatgttcccacttaccccaagtacctgctctctccagagaccatcgaggccctgcggaagccgacctttgacgtctggctttgggagcccaatgagatgctgagctgcctggagcacatgtaccacgacctcgggctggtcagggacttcagcatcaaccctgtcaccctcaggaggtggctgttctgcgtccacgacaactacagaaacaaccccttccacaacttccggcactgcttctgcgtggcccagatgatgtacagcatggtctggctctgcagtctccaggagaagttctcacaaacggatatcctgatcctaatgacagcggccatctgccacgatctggaccatcccggctacaacaacacgtaccagatcaatgcccgcacagagctggcggtccgctacaatgacatctcaccgctggagaaccaccactgcgccgtggccttccagatcctcgccgagcctgagtgcaacatcttctccaacatcccacctgatgggttcaagcagatccgacagggaatgatcacattaatcttggccactgacatggcaagacatgcagaaattatggattctttcaaagagaaaatggagaattttgactacagcaacgaggagcacatgaccctgctgaagatgattttgataaaatgctgtgatatctctaacgaggtccgtccaatggaagtcgcagagccttgggtggactgtttattagaggaatattttatgcagagcgaccgtgagaagtcagaaggccttcctgtggcaccgttcatggaccgagacaaagtgaccaaggccacagcccagattgggttcatcaagtttgtcctgatcccaatgtttgaaacagtgaccaagctcttccccatggttgaggagatcatgctgcagccactttgggaatcccgagatcgctacgaggagctgaagcggatagatgacgccatgaaagagttacagaagaagactgacagcttgacgtctggggccaccgagaagtccagagagagaagcagagatgtgaaaaacagtgaaggagactgtgcctgaggaaagcggggggcgtggctgcagttctggacgggctggccgagctgcgcgggatccttgtgcagggaagagctgccctgggcacctggcaccacaagaccatgttttctaagaaccattttgttcactgatacaaaaaaaaaaaaaggaattcatgatgctgtacagaattttatttttaaactgtcttttaaataatatattcttatacggaaa

SEQ ID NO: 165469 - DNA, 1684 bp, Homo sapiens
  Payload ID: 12571
  Gene Symbol: PDE9A
  Gene Name: phosphodiesterase 9A
  Uniprot ID: O76083
  ENST ID: ENST00000398229
  CDS Start-End: 89-1468
acagtaaaaagtccgagtgcagccgccgggcgcaggatgggatccggctcctccagctaccggcccaaggccatctacctggacatcgatggacgcattcagaaggaacacgaccatctccctgctgaccaccgacgacgccatggtctccatcgaccccaccatgcccgcgaattcagaacgagcattcaaaatcaatgaactgaaagctgaagttgcaaatcacttggctgtcctagagaaacgcgtggaattggaaggactaaaagtggtggagattgagaaatgcaagagtgacattaagaagatgagggaggagctggcggccagaagcagcaggaccaactgcccctgtaagtacagttttttggataaccacaagaagttgactcctcgacgcgatgttcccacttaccccaagtacctgctctctccagagaccatcgaggccctgcggaagccgacctttgacgtctggctttgggagcccaatgagatgctgagctgcctggagcacatgtaccacgacctcgggctggtcagggacttcagcatcaaccctgtcaccctcaggaggtggctgttctgcgtccacgacaactacagaaacaaccccttccacaacttccggcactgcttctgcgtggcccagatgatgtacagcatggtctggctctgcagtctccaggagaagttctcacaaacggatatcctgatcctaatgacagcggccatctgccacgatctggaccatcccggctacaacaacacgtaccagatcaatgcccgcacagagctggcggtccgctacaatgacatctcaccgctggagaaccaccactgcgccgtggccttccagatcctcgccgagcctgagtgcaacatcttctccaacatcccacctgatgggttcaagcagatccgacagggaatgatcacattaatcttggccactgacatggcaagacatgcagaaattatggattctttcaaagagaaaatggagaattttgactacagcaacgaggagcacatgaccctgctgaagatgattttgataaaatgctgtgatatctctaacgaggtccgtccaatggaagtcgcagagccttgggtggactgtttattagaggaatattttatgcagagcgaccgtgagaagtcagaaggccttcctgtggcaccgttcatggaccgagacaaagtgaccaaggccacagcccagattgggttcatcaagtttgtcctgatcccaatgtttgaaacagtgaccaagctcttccccatggttgaggagatcatgctgcagccactttgggaatcccgagatcgctacgaggagctgaagcggatagatgacgccatgaaagagttacagaagaagactgacagcttgacgtctggggccaccgagaagtccagagagagaagcagagatgtgaaaaacagtgaaggagactgtgcctgaggaaagcggggggcgtggctgcagttctggacgggctggccgagctgcgcgggatccttgtgcagggaagagctgccctgggcacctggcaccacaagaccatgttttctaagaaccattttgttcactgatacaaaaaaaaaaaaaggaattcatgatgctgtacagaattttatttttaaactgtcttttaaataatatattcttatacggaaa

SEQ ID NO: 165470 - DNA, 1885 bp, Homo sapiens
  Payload ID: 12571
  Gene Symbol: PDE9A
  Gene Name: phosphodiesterase 9A
  Uniprot ID: O76083
  ENST ID: ENST00000398232
  CDS Start-End: 89-1669
acagtaaaaagtccgagtgcagccgccgggcgcaggatgggatccggctcctccagctaccggcccaaggccatctacctggacatcgatggacgcattcagaagcactccgtacaaagtgagacctgtggccatcaagcaactctccgctggtgtcgaggacaagagaaccacaagccgtggccagtctgctgagagaccactgagggacagacgggttgtgggcctggagcagccccggagggaaggagcatttgaaagtggacaggtagagcccaggcccagagagccccagggctgctaccaggaaggccagcgcatccctccagagagagaagaattaatccagagcgtgctggcgcaggttgcagagcagttctcaagagcattcaaaatcaatgaactgaaagctgaagttgcaaatcacttggctgtcctagagaaacgcgtggaattggaaggactaaaagtggtggagattgagaaatgcaagagtgacattaagaagatgagggaggagctggcggccagaagcagcaggaccaactgcccctgtaagtacagttttttggataaccacaagaagttgactcctcgacgcgatgttcccacttaccccaagtacctgctctctccagagaccatcgaggccctgcggaagccgacctttgacgtctggctttgggagcccaatgagatgctgagctgcctggagcacatgtaccacgacctcgggctggtcagggacttcagcatcaaccctgtcaccctcaggaggtggctgttctgcgtccacgacaactacagaaacaaccccttccacaacttccggcactgcttctgcgtggcccagatgatgtacagcatggtctggctctgcagtctccaggagaagttctcacaaacggatatcctgatcctaatgacagcggccatctgccacgatctggaccatcccggctacaacaacacgtaccagatcaatgcccgcacagagctggcggtccgctacaatgacatctcaccgctggagaaccaccactgcgccgtggccttccagatcctcgccgagcctgagtgcaacatcttctccaacatcccacctgatgggttcaagcagatccgacagggaatgatcacattaatcttggccactgacatggcaagacatgcagaaattatggattctttcaaagagaaaatggagaattttgactacagcaacgaggagcacatgaccctgctgaagatgattttgataaaatgctgtgatatctctaacgaggtccgtccaatggaagtcgcagagccttgggtggactgtttattagaggaatattttatgcagagcgaccgtgagaagtcagaaggccttcctgtggcaccgttcatggaccgagacaaagtgaccaaggccacagcccagattgggttcatcaagtttgtcctgatcccaatgtttgaaacagtgaccaagctcttccccatggttgaggagatcatgctgcagccactttgggaatcccgagatcgctacgaggagctgaagcggatagatgacgccatgaaagagttacagaagaagactgacagcttgacgtctggggccaccgagaagtccagagagagaagcagagatgtgaaaaacagtgaaggagactgtgcctgaggaaagcggggggcgtggctgcagttctggacgggctggccgagctgcgcgggatccttgtgcagggaagagctgccctgggcacctggcaccacaagaccatgttttctaagaaccattttgttcactgatacaaaaaaaaaaaaaggaattcatgatgctgtacagaattttatttttaaactgtcttttaaataatatattcttatacggaaa

SEQ ID NO: 165471 - DNA, 1783 bp, Homo sapiens
  Payload ID: 12571
  Gene Symbol: PDE9A
  Gene Name: phosphodiesterase 9A
  Uniprot ID: O76083
  ENST ID: ENST00000398234
  CDS Start-End: 89-1567
acagtaaaaagtccgagtgcagccgccgggcgcaggatgggatccggctcctccagctaccggcccaaggccatctacctggacatcgatggacgcattcagaaggaacacgaccatctccctgctgaccaccgacgacgccatggtctccatcgaccccaccatgcccgcgaattcagaacgcactccgtacaaagtgagacctgtggccatcaagcaactctccgagagagaagaattaatccagagcgtgctggcgcaggttgcagagcagttctcaagagcattcaaaatcaatgaactgaaagctgaagttgcaaatcacttggctgtcctagagaaacgcgtggaattggaaggactaaaagtggtggagattgagaaatgcaagagtgacattaagaagatgagggaggagctggcggccagaagcagcaggaccaactgcccctgtaagtacagttttttggataaccacaagaagttgactcctcgacgcgatgttcccacttaccccaagtacctgctctctccagagaccatcgaggccctgcggaagccgacctttgacgtctggctttgggagcccaatgagatgctgagctgcctggagcacatgtaccacgacctcgggctggtcagggacttcagcatcaaccctgtcaccctcaggaggtggctgttctgcgtccacgacaactacagaaacaaccccttccacaacttccggcactgcttctgcgtggcccagatgatgtacagcatggtctggctctgcagtctccaggagaagttctcacaaacggatatcctgatcctaatgacagcggccatctgccacgatctggaccatcccggctacaacaacacgtaccagatcaatgcccgcacagagctggcggtccgctacaatgacatctcaccgctggagaaccaccactgcgccgtggccttccagatcctcgccgagcctgagtgcaacatcttctccaacatcccacctgatgggttcaagcagatccgacagggaatgatcacattaatcttggccactgacatggcaagacatgcagaaattatggattctttcaaagagaaaatggagaattttgactacagcaacgaggagcacatgaccctgctgaagatgattttgataaaatgctgtgatatctctaacgaggtccgtccaatggaagtcgcagagccttgggtggactgtttattagaggaatattttatgcagagcgaccgtgagaagtcagaaggccttcctgtggcaccgttcatggaccgagacaaagtgaccaaggccacagcccagattgggttcatcaagtttgtcctgatcccaatgtttgaaacagtgaccaagctcttccccatggttgaggagatcatgctgcagccactttgggaatcccgagatcgctacgaggagctgaagcggatagatgacgccatgaaagagttacagaagaagactgacagcttgacgtctggggccaccgagaagtccagagagagaagcagagatgtgaaaaacagtgaaggagactgtgcctgaggaaagcggggggcgtggctgcagttctggacgggctggccgagctgcgcgggatccttgtgcagggaagagctgccctgggcacctggcaccacaagaccatgttttctaagaaccattttgttcactgatacaaaaaaaaaaaaaggaattcatgatgctgtacagaattttatttttaaactgtcttttaaataatatattcttatacggaaa

SEQ ID NO: 165472 - DNA, 1776 bp, Homo sapiens
  Payload ID: 12571
  Gene Symbol: PDE9A
  Gene Name: phosphodiesterase 9A
  Uniprot ID: O76083
  ENST ID: ENST00000398236
  CDS Start-End: 37-1560
acagtaaaaagtccgagtgcagccgccgggcgcaggatgggatccggctcctccagctaccggcccaaggccatctacctggacatcgatggacgcattcagaaggtaatcttcagcaagtactgcaactccagcgacatcatggacctgttctgcatcgccaccggcctgcctcgcactccgtacaaagtgagacctgtggccatcaagcaactctccgagagagaagaattaatccagagcgtgctggcgcaggttgcagagcagttctcaagagcattcaaaatcaatgaactgaaagctgaagttgcaaatcacttggctgtcctagagaaacgcgtggaattggaaggactaaaagtggtggagattgagaaatgcaagagtgacattaagaagatgagggaggagctggcggccagaagcagcaggaccaactgcccctgtaagtacagttttttggataaccacaagaagttgactcctcgacgcgatgttcccacttaccccaagtacctgctctctccagagaccatcgaggccctgcggaagccgacctttgacgtctggctttgggagcccaatgagatgctgagctgcctggagcacatgtaccacgacctcgggctggtcagggacttcagcatcaaccctgtcaccctcaggaggtggctgttctgcgtccacgacaactacagaaacaaccccttccacaacttccggcactgcttctgcgtggcccagatgatgtacagcatggtctggctctgcagtctccaggagaagttctcacaaacggatatcctgatcctaatgacagcggccatctgccacgatctggaccatcccggctacaacaacacgtaccagatcaatgcccgcacagagctggcggtccgctacaatgacatctcaccgctggagaaccaccactgcgccgtggccttccagatcctcgccgagcctgagtgcaacatcttctccaacatcccacctgatgggttcaagcagatccgacagggaatgatcacattaatcttggccactgacatggcaagacatgcagaaattatggattctttcaaagagaaaatggagaattttgactacagcaacgaggagcacatgaccctgctgaagatgattttgataaaatgctgtgatatctctaacgaggtccgtccaatggaagtcgcagagccttgggtggactgtttattagaggaatattttatgcagagcgaccgtgagaagtcagaaggccttcctgtggcaccgttcatggaccgagacaaagtgaccaaggccacagcccagattgggttcatcaagtttgtcctgatcccaatgtttgaaacagtgaccaagctcttccccatggttgaggagatcatgctgcagccactttgggaatcccgagatcgctacgaggagctgaagcggatagatgacgccatgaaagagttacagaagaagactgacagcttgacgtctggggccaccgagaagtccagagagagaagcagagatgtgaaaaacagtgaaggagactgtgcctgaggaaagcggggggcgtggctgcagttctggacgggctggccgagctgcgcgggatccttgtgcagggaagagctgccctgggcacctggcaccacaagaccatgttttctaagaaccattttgttcactgatacaaaaaaaaaaaaaggaattcatgatgctgtacagaattttatttttaaactgtcttttaaataatatattcttatacggaaa

SEQ ID NO: 165473 - DNA, 4341 bp, Homo sapiens
  Payload ID: 12572
  Gene Symbol: PCK1
  Gene Name: phosphoenolpyruvate carboxykinase 1 (soluble)
  Uniprot ID: P35558
  ENST ID: ENST00000319441
  CDS Start-End: 165-2033
atttaaagctgggaggttctgccaccaagcacggccttcccactgggaacacaaacttgctggcgggaagagcccggaaagaaacctgtggatctcccttcgagatcatccaaagagaagaaaggtgacctcacattcgtgccccttagcagcactctgcagaaatgcctcctcagctgcaaaacggcctgaacctctcggccaaagttgtccagggaagcctggacagcctaccccaggcagtgagggagtttctcgagaataacgctgagctgtgtcagcctgatcacatccacatctgtgacggctctgaggaggagaatgggcggcttctgggccagatggaggaagagggcatcctcaggcggctgaagaagtatgacaactgctggttggctctcactgaccccagggatgtggccaggatcgaaagcaagacggttatcgtcacccaagagcaaagagacacagtgcccatccccaaaacaggcctcagccagctcggtcgctggatgtcagaggaggattttgagaaagcgttcaatgccaggttcccagggtgcatgaaaggtcgcaccatgtacgtcatcccattcagcatggggccgctgggctcgcctctgtcaaagatcggcatcgagctgacggattcaccctacgtggtggccagcatgcggatcatgacgcggatgggcacgcccgtcctggaagcagtgggcgatggggagtttgtcaaatgcctccattctgtggggtgccctctgcctttacaaaagcctttggtcaacaactggccctgcaacccggagctgacgctcatcgcccacctgcctgaccgcagagagatcatctcctttggcagtgggtacggcgggaactcgctgctcgggaagaagtgctttgctctcaggatggccagccggctggccaaggaggaagggtggctggcagagcacatgctgattctgggtataaccaaccctgagggtgagaagaagtacctggcggccgcatttcccagcgcctgcgggaagaccaacctggccatgatgaaccccagcctccccgggtggaaggttgagtgcgtcggggatgacattgcctggatgaagtttgacgcacaaggtcatttaagggccatcaacccagaaaatggctttttcggtgtcgctcctgggacttcagtgaagaccaaccccaatgccatcaagaccatccagaagaacacaatctttaccaatgtggccgagaccagcgacgggggcgtttactgggaaggcattgatgagccgctagcttcaggtgtcaccatcacgtcctggaagaataaggagtggagctcagaggatggggaaccttgtgcccaccccaactcgaggttctgcacccctgccagccagtgccccatcattgatgctgcctgggagtctccggaaggtgttcccattgaaggcattatctttggaggccgtagacctgctggtgtccctctagtctatgaagctctcagctggcaacatggagtctttgtgggggcggccatgagatcagaggccacagcggctgcagaacataaaggcaaaatcatcatgcatgacccctttgccatgcggcccttctttggctacaacttcggcaaatacctggcccactggcttagcatggcccagcacccagcagccaaactgcccaagatcttccatgtcaactggttccggaaggacaaggaaggcaaattcctctggccaggctttggagagaactccagggtgctggagtggatgttcaaccggatcgatggaaaagccagcaccaagctcacgcccataggctacatccccaaggaggatgccctgaacctgaaaggcctggggcacatcaacatgatggagcttttcagcatctccaaggaattctgggagaaggaggtggaagacatcgagaagtatctggaggatcaagtcaatgccgacctcccctgtgaaatcgagagagagatccttgccttgaagcaaagaataagccagatgtaatcagggcctgagtgctttacctttaaaatcattccctttcccatccataaggtgcagtaggagcaagagagggcaagtgttcccaaattgacgccaccataataatcatcaccacaccgtgagcagatctgaaaggcacactttgatttttttaaggataagaaccacagaacactgggtagtagctaatgaaattgagaagggaaatcttagcatgcctccaaaaattcacatccaatgcatagtttgttcaaatttaaggttactcaggcattgatcttttcagtgttttttcactttagctatgtggattagctagaatgcacaccaaaaaaatacttgagctgtatatatatatgtgtgtgtgtgtgtgtgtgtgtgtgtgtgtgtgtgcatgtatgtgcacatgtgtctgtgtggtatatttgtgtatgtgtatttgtatgtactgttattgaaaatatatttaatacctttggaaaaatcttgggcaagatgacctactagttttccttgaaaaaaagttgctttgttattaatattgtgcttaaattatttttatacaccattgttccttacctttacataattgcaatatttcccccttactacttcttggaaaaaaattacaaaatgaagttttatagaaaagatggatttgctttgcttggtttttcttatttgagctaccaagaggagagaactctgattaaatatcttgtgatttaaatcctgccccctccccaagaaggtggggacgttcagaatcacacttgaagagggggtgcattgcctggtcccagggagaaggagggagcagatggggaggaatgaggcagggaaccatggttggggttttctgaatttgctgaagccactagttggcatcctttaacaattctacaaacctttagatggtgaggcttatgtggcaggactgggagggtttaatgcatgctttttgacagtttggatctggaggggtctcaggcttccacaaaaattacattgtggacagtttcataggattttgccttttaactcttcaaagcaacagttttctcaactgtcatccccgcgggggagcagaggaagacaagtgagaaggaaaaggggacaggatctgggttgagcaagcattaattgagcgccttctgtatcccggacatcatgccaacaccatgggctgcccgagaagagaggtgggtggtttggtccccagctctgccttgaaccctcacctgctctcctctactcccagtgtttattggatattccagaacagtccaaacgaaccataaactttatatcacagattcaatctgtgtaaatactattatcttcaagttgtagtttctttcttgggcccaggctgtgaaattggcttcacccctaccacaccccagcgggcaggcttgttcttatgtcacactccacccctccagtctcctcaactggaaaacttgcctcttttcctcacttcctctgctccttacaatggcttcatatggaaggtgaagctgagatcaccccaattttacaggtgaggaaactgaggtcaagctaggagcgtccagcggggctgagaaattgccaggatttccttccccattaaggagctgagagtcttagctccagacacgttggcttgttagaatatcaaaaccaccgaaggggaaaaaccacttactggaattaaatgctatctgctgtattagtttaaatcagtggcgttcaaacttgtttctccttttcactgcggaacacgttcttgacatgtacttgactcagagtcccatgtctaaaggagacagagcccaaggcagcccacctgaagctggggagggagtccaaagtgcaagccacctggtctccatttccccgccccttgggggcctttgggcagctccttggacccctgaaagaggccaccaggataaactttgttaaaatgcatgccttgtgccccactgtcctattacgggctttcagtagtctccactccctcggcaggcaaagacactggccatctccaaattccctcccctcctgcacagcatcagccacctggcaagcagtctcacataggaccatttgccagcaggccctgcaagcctgggggacagcctagaggaggtgacttacatacacagcataagagttttcaggagaccaaaaagattcaatatatgtcattaactcctgactcagtttccccaaaccatgcctcctgagtgctccctctgtctccaaatcctgatttttgtgcgcggacccctgtctacaataaacaggatcctatgacttc

SEQ ID NO: 165474 - DNA, 2357 bp, Homo sapiens
  Payload ID: 12573
  Gene Symbol: PCK2
  Gene Name: phosphoenolpyruvate carboxykinase 2 (mitochondrial)
  Uniprot ID: Q16822
  ENST ID: ENST00000216780
  CDS Start-End: 269-2191
ggcggtttggaggcaggggttggggcggcggctgggctgacctggagcctggagccccggggccgagggagctggcctgccagcggggcggaggaaagctagtgccagccctaccaggttccgcccccgcgcctgcccccctcctttttaagcgcctcccgccagcctctgctgtggctcgcttcgccgcgctccctccttccccgccttccatacctccccggctccgctcggttcctggccaccccgcagcccctgcccaggtgccatggccgcattgtaccgccctggcctgcggcttaactggcatgggctgagccccttgggctggccatcatgccgtagcatccagaccctgcgagtgcttagtggagatctgggccagcttcccactggcattcgagattttgtagagcacagtgcccgcctgtgccaaccagagggcatccacatctgtgatggaactgaggctgagaatactgccacactgaccctgctggagcagcagggcctcatccgaaagctccccaagtacaataactgctggctggcccgcacagaccccaaggatgtggcacgagtagagagcaagacggtgattgtaactccttctcagcgggacacggtaccactcccgcctggtggggcccgtgggcagctgggcaactggatgtccccagctgatttccagcgagctgtggatgagaggtttccaggctgcatgcagggccgcaccatgtatgtgcttccattcagcatgggtcctgtgggctccccgctgtcccgcatcggggtgcagctcactgactcagcctatgtggtggcaagcatgcgtattatgacccgactggggacacctgtgcttcaggccctgggagatggtgactttgtcaagtgtctgcactccgtgggccagcccctgacaggacaaggggagccagtgagccagtggccgtgcaacccagagaaaaccctgattggccacgtgcccgaccagcgggagatcatctccttcggcagcggctatggtggcaactccctgctgggcaagaagtgctttgccctacgcatcgcctctcggctggcccgggatgagggctggctggcagagcacatgctgatcctgggcatcaccagccctgcagggaagaagcgctatgtggcagccgccttccctagtgcctgtggcaagaccaacctggctatgatgcggcctgcactgccaggctggaaagtggagtgtgtgggggatgatattgcttggatgaggtttgacagtgaaggtcgactccgggccatcaaccctgagaacggcttctttggggttgcccctggtacctctgccaccaccaatcccaacgccatggctacaatccagagtaacactatttttaccaatgtggctgagaccagtgatggtggcgtgtactgggagggcattgaccagcctcttccacctggtgttactgtgacctcctggctgggcaaaccctggaaacctggtgacaaggagccctgtgcacatcccaactctcgattttgtgccccggctcgccagtgccccatcatggacccagcctgggaggccccagagggtgtccccattgacgccatcatctttggtggccgcagacccaaaggggtacccctggtatacgaggccttcaactggcgtcatggggtgtttgtgggcagcgccatgcgctctgagtccactgctgcagcagaacacaaagggaagatcatcatgcacgacccatttgccatgcggcccttttttggctacaacttcgggcactacctggaacactggctgagcatggaagggcgcaagggggcccagctgccccgtatcttccatgtcaactggttccggcgtgacgaggcagggcacttcctgtggccaggctttggggagaatgctcgggtgctagactggatctgccggcggttagagggggaggacagtgcccgagagacacccattgggctggtgccaaaggaaggagccttggatctcagcggcctcagagctatagacaccactcagctgttctccctccccaaggacttctgggaacaggaggttcgtgacattcggagctacctgacagagcaggtcaaccaggatctgcccaaagaggtgttggctgagcttgaggccctggagagacgtgtgcacaaaatgtgacctgaggccctagtctagcaagaggacatagcaccctcatctgggaatagggaaggcaccttgcagaaaatatgagcaatttgatattaactaacatcttcaatgtgccatagaccttcccacaaagactgtccaataataagagatgcttatctattttacacaa

SEQ ID NO: 165475 - DNA, 1830 bp, Homo sapiens
  Payload ID: 12573
  Gene Symbol: PCK2
  Gene Name: phosphoenolpyruvate carboxykinase 2 (mitochondrial)
  ENST ID: ENST00000396973
  CDS Start-End: 248-1573
ggggcggcggctgggctgacctggagcctggagccccggggccgagggagctggcctgccagcggggcggaggaaagctagtgccagccctaccaggttccgcccccgcgcctgcccccctcctttttaagcgcctcccgccagcctctgctgtggctcgcttcgccgcgctccctccttccccgccttccatacctccccggctccgctcggttcctggccaccccgcagcccctgcccaggtgccatggccgcattgtaccgccctggcctgcggcttaactggcatgggctgagccccttgggctggccatcatgccgtagcatccagaccctgcgagtgcttagtggagatctgggccagcttcccactggcattcgagattttgtagagcacagtgcccgcctgtgccaaccagagggcatccacatctgtgatggaactgaggctgagaatactgccacactgaccctgctggagcagcagggcctcatccgaaagctccccaagtacaataactgctggctggcccgcacagaccccaaggatgtggcacgagtagagagcaagacggtgattgtaactccttctcagcgggacacggtaccactcccgcctggtggggcccgtgggcagctgggcaactggatgtccccagctgatttccagcgagctgtggatgagaggtttccaggctgcatgcagggccgcaccatgtatgtgcttccattcagcatgggtcctgtgggctccccgctgtcccgcatcggggtgcagctcactgactcagcctatgtggtggcaagcatgcgtattatgacccgactggggacacctgtgcttcaggccctgggagatggtgactttgtcaagtgtctgcactccgtgggccagcccctgacaggacaaggggagccagtgagccagtggccgtgcaacccagagaaaaccctgattggccacgtgcccgaccagcgggagatcatctccttcggcagcggctatggtggcaactccctgctgggcaagaagtgctttgccctacgcatcgcctctcggctggcccgggatgagggctggctggcagagcacatgctgatcctgggcatcaccagccctgcagggaagaagcgctatgtggcagccgccttccctagtgcctgtggcaagaccaacctggctatgatgcggcctgcactgccaggctggaaagtggagtgtgtgggggatgatattgcttggatgaggtttgacagtgaaggtcgactccgggccatcaaccctgagaacggcttctttggggttgcccctggtacctctgccaccaccaatcccaacgccatggctacaatccagagtaacactatttttaccaatgtggctgagaccagtgatggtggcgtgtactgggagggcattgaccagcctcttccacctggtgttactgtgacctcctggctgggcaaaccctggaaacctggtatgtgcggtggggaaggtgtggcacagcctccaggcctcagcaccttaatggtggaaaagctttctccacaacctccaaccatcttctaggactgccaggaggcacagaagtcatgaacgtttgcagtttccagtcccaggcaaaatctcagttcatgtcccaactccaccagtcactggttttgtgatctggctaagttgctcaacttccctaagctttagtttccacatcagttgaatgagggtagttgtgatagtacctatctcatgagattgttggaggattaaatagtgcataaaaagggtttatcacactgacaaatacacagtaaattctcaataataaa

SEQ ID NO: 165476 - DNA, 2505 bp, Homo sapiens
  Payload ID: 12573
  Gene Symbol: PCK2
  Gene Name: phosphoenolpyruvate carboxykinase 2 (mitochondrial)
  ENST ID: ENST00000545054
  CDS Start-End: 919-2439
agcctctgctgtggctcgcttcgccgcgctccctccttccccgccttccatacctccccggctccgctcggttcctggccaccccgcagcccctgcccaggtgccatggccgcattgtaccgccctggcctgcggtgagtgacccccggcccggggcccacccgcaccttccgctgcgctcgccccctcggggctgccagtggcgctctcctgctctcagcctccgccaggtttcccatcctaggcggaggcgggcaggggcgactgctgtgggtccagcctcccgcgccgcgcgtctcttgggagggcagccggccggtgctcctcgtttccgcctgcacctccccttctctgcctcgctcgcctctgaccgcgcgatctctatctgccactctcagaacttcctctctctcctcgctcctctctgctgagccaggtctccgcatatcctcctttccttcccagatacctccctcggacctctaacgggctctcagccagcgccccagggtacttcgagaggcagcagggccctggggacaagggcttaactggcatgggctgagccccttgggctggccatcatgccgtagcatccagaccctgcgagtgcttagtggagatctgggccagcttcccactggcattcgagattttgtagagcacagtgcccgcctgtgccaaccagagggcatccacatctgtgatggaactgaggctgagaatactgccacactgaccctgctggagcagcagggcctcatccgaaagctccccaagtacaataactgctggctggcccgcacagaccccaaggatgtggcacgagtagagagcaagacggtgattgtaactccttctcagcgggacacggtaccactcccgcctggtggggcccgtgggcagctgggcaactggatgtccccagctgatttccagcgagctgtggatgagaggtttccaggctgcatgcagggccgcaccatgtatgtgcttccattcagcatgggtcctgtgggctccccgctgtcccgcatcggggtgcagctcactgactcagcctatgtggtggcaagcatgcgtattatgacccgactggggacacctgtgcttcaggccctgggagatggtgactttgtcaagtgtctgcactccgtgggccagcccctgacaggacaaggggagccagtgagccagtggccgtgcaacccagagaaaaccctgattggccacgtgcccgaccagcgggagatcatctccttcggcagcggctatggtggcaactccctgctgggcaagaagtgctttgccctacgcatcgcctctcggctggcccgggatgagggctggctggcagagcacatgctgatcctgggcatcaccagccctgcagggaagaagcgctatgtggcagccgccttccctagtgcctgtggcaagaccaacctggctatgatgcggcctgcactgccaggctggaaagtggagtgtgtgggggatgatattgcttggatgaggtttgacagtgaaggtcgactccgggccatcaaccctgagaacggcttctttggggttgcccctggtacctctgccaccaccaatcccaacgccatggctacaatccagagtaacactatttttaccaatgtggctgagaccagtgatggtggcgtgtactgggagggcattgaccagcctcttccacctggtgttactgtgacctcctggctgggcaaaccctggaaacctggtgacaaggagccctgtgcacatcccaactctcgattttgtgccccggctcgccagtgccccatcatggacccagcctgggaggccccagagggtgtccccattgacgccatcatctttggtggccgcagacccaaaggggtacccctggtatacgaggccttcaactggcgtcatggggtgtttgtgggcagcgccatgcgctctgagtccactgctgcagcagaacacaaagggaagatcatcatgcacgacccatttgccatgcggcccttttttggctacaacttcgggcactacctggaacactggctgagcatggaagggcgcaagggggcccagctgccccgtatcttccatgtcaactggttccggcgtgacgaggcagggcacttcctgtggccaggctttggggagaatgctcgggtgctagactggatctgccggcggttagagggggaggacagtgcccgagagacacccattgggctggtgccaaaggaaggagccttggatctcagcggcctcagagctatagacaccactcagctgttctccctccccaaggacttctgggaacaggaggttcgtgacattcggagctacctgacagagcaggtcaaccaggatctgcccaaagaggtgttggctgagcttgaggccctggagagacgtgtgcacaaaatgtgacctgaggccctagtctagcaagaggacatagcaccctcatctgggaatagggaaggcaccttgcag

SEQ ID NO: 165477 - DNA, 666 bp, Homo sapiens
  Payload ID: 12573
  Gene Symbol: PCK2
  Gene Name: phosphoenolpyruvate carboxykinase 2 (mitochondrial)
  ENST ID: ENST00000559584
  CDS Start-End: 50-238
cccggctccgctcggttcctggccaccccgcagcccctgcccaggtgccatggccgcattgtaccgccctggcctgcgatacctccctcggacctctaacgggctctcagccagcgccccagggtacttcgagaggcagcagggccctggggacaaggcttttgtcccagagtcggaagtgacccacatctgtcgcacagcccgttccacttgggcagcccttgtgggtggtctctgaaggaaacgtcccacttagagggctgcaagagggtgtgggggcttcacaagagataacgtgagccaggctccagggagagagaggctgtcctcaagactgtgtgcttgaaaactgatgctcacggagaacttccctctgaggcaggaacagacccaggcttaactggcatgggctgagccccttgggctggccatcatgccgtagcatccagaccctgcgagtgcttagtggagatctgggccagcttcccactggcattcgagattttgtagagcacagtgcccgcctgtgccaaccagagggcatccacatctgtgatggaactgaggctgagaatactgccacactgaccctgctggagcagcagggcctcatccgaaagctccccaagtacaataactgctggctggcccgcacagaccccaagg

SEQ ID NO: 165478 - DNA, 1804 bp, Homo sapiens
  Payload ID: 12573
  Gene Symbol: PCK2
  Gene Name: phosphoenolpyruvate carboxykinase 2 (mitochondrial)
  ENST ID: ENST00000559250
  CDS Start-End: 17-1546
gggagggcggtggcggatggggggcggggcctcgaagtcgggggccgaagagtggacccagtcctccaatgggagagatgggcttaactggcatgggctgagccccttgggctggccatcatgccgtagcatccagaccctgcgagtgcttagtggagatctgggccagcttcccactggcattcgagattttgtagagcacagtgcccgcctgtgccaaccagagggcatccacatctgtgatggaactgaggctgagaatactgccacactgaccctgctggagcagcagggcctcatccgaaagctccccaagtacaataactgctggctggcccgcacagaccccaaggatgtggcacgagtagagagcaagacggtgattgtaactccttctcagcgggacacggtaccactcccgcctggtggggcccgtgggcagctgggcaactggatgtccccagctgatttccagcgagctgtggatgagaggtttccaggctgcatgcagggccgcaccatgtatgtgcttccattcagcatgggtcctgtgggctccccgctgtcccgcatcggggtgcagctcactgactcagcctatgtggtggcaagcatgcgtattatgacccgactggggacacctgtgcttcaggccctgggagatggtgactttgtcaagtgtctgcactccgtgggccagcccctgacaggacaaggggagccagtgagccagtggccgtgcaacccagagaaaaccctgattggccacgtgcccgaccagcgggagatcatctccttcggcagcggctatggtggcaactccctgctgggcaagaagtgctttgccctacgcatcgcctctcggctggcccgggatgagggctggctggcagagcacatgctgatcctgggcatcaccagccctgcagggaagaagcgctatgtggcagccgccttccctagtgcctgtggcaagaccaacctggctatgatgcggcctgcactgccaggctggaaagtggagtgtgtgggggatgatattgcttggatgaggtttgacagtgaaggtcgactccgggccatcaaccctgagaacggcttctttggggttgcccctggtacctctgccaccaccaatcccaacgccatggctacaatccagagtaacactatttttaccaatgtggctgagaccagtgatggtggcgtgtactgggagggcattgaccagcctcttccacctggtgttactgtgacctcctggctgggcaaaccctggaaacctggtgacaaggagccctgtgcacatcccaactctcgattttgtgccccggctcgccagtgccccatcatggacccagcctgggaggccccagagggtgtccccattgacgccatcatctttggtggccgcagacccaaaggggtacccctggtatacgaggccttcaactggcgtcatggggtgtttgtgggcagcgccatgcgctctgagtccactgctgcagcagaacacaaaggacttctgggaacaggaggttcgtgacattcggagctacctgacagagcaggtcaaccaggatctgcccaaagaggtgttggctgagcttgaggccctggagagacgtgtgcacaaaatgtgacctgaggccctagtctagcaagaggacatagcaccctcatctgggaatagggaaggcaccttgcagaaaatatgagcaatttgatattaactaacatcttcaatgtgccatagaccttcccacaaagactgtccaataataagagatgcttatctatttta

SEQ ID NO: 165479 - DNA, 826 bp, Homo sapiens
  Payload ID: 12573
  Gene Symbol: PCK2
  Gene Name: phosphoenolpyruvate carboxykinase 2 (mitochondrial)
  ENST ID: ENST00000559503
  CDS Start-End: 1-367
tgtgggctccccgctgtcccgcatcggggtgcagctcactgactcagcctatgtggtggcaagcatgcgtattatgacccgactggggacacctgtgcttcaggccctgggagatggtgactttgtcaagtgtctgcactccgtgggccagcccctgacaggacaaggggagccagtgagccagtggccgtgcaacccagagaaaaccctgattggccacgtgcccgaccagcgggagatcatctccttcggcagcggctatggtggcaactccctgctgggcaagaagtgctttgccctacgcatcgcctctcggctggcccgggatgagggctggctggcagagcacatgctggtgagggcctgatcctgggcatcaccagccctgcagggaagaagcgctatgtggcagccgccttccctagtgcctgtggcaagaccaacctggctatgatgcggcctgcactgccaggctggaaagtggagtgtgtgggggatgatattgcttggatgaggtttgacagtgaaggtcgactccgggccatcaaccctgagaacggcttctttggggttgcccctggtacctctgccaccaccaatcccaacgccatggctacaatccagagtaacactatttttaccaatgtggctgagaccagtgatggtggcgtgtactgggagggcattgaccagcctcttccacctggtgttactgtgacctcctggctgggcaaaccctggaaacctggtgacaaggagccctgtgcacatcccaactctcgattttgtgccccggctcgccagtgccccatcatggacccagcct

SEQ ID NO: 165480 - DNA, 2433 bp, Homo sapiens
  Payload ID: 12573
  Gene Symbol: PCK2
  Gene Name: phosphoenolpyruvate carboxykinase 2 (mitochondrial)
  ENST ID: ENST00000558096
  CDS Start-End: 843-2267
ggccaccccgcagcccctgcccaggtgccatggccgcattgtaccgccctggcctgcggtgagtgacccccggcccggggcccacccgcaccttccgctgcgctcgccccctcggggctgccagtggcgctctcctgctctcagcctccgccaggtttcccatcctaggcggaggcgggcaggggcgactgctgtgggtccagcctcccgcgccgcgcgtctcttgggagggcagccggccggtgctcctcgtttccgcctgcacctccccttctctgcctcgctcgcctctgaccgcgcgatctctatctgccactctcagaacttcctctctctcctcgctcctctctgctgagccaggtctccgcatatcctcctttccttcccagatacctccctcggacctctaacgggctctcagccagcgccccagggtacttcgagaggcagcagggccctggggacaagggcttaactggcatgggctgagccccttgggctggccatcatgccgtagcatccagaccctgcgagtgcttagtggagatctgggccagcttcccactggcattcgagattttgtagagcacagtgcccgcctgtgccaaccagagggcatccacatctgtgatggaactgaggctgagaatactgccacactgaccctgctggagcagcagggcctcatccgaaagctccccaagtacaataactgctggctggcccgcacagaccccaaggatgtggcacgagtagagagcaagacggtgattgtaactccttctcagcgggacacggtaccactcccgcctggtggggcccgtgggcagctgggcaactggatgtccccagctgatttccagcgagctgtggatgagaggtttccaggctgcatgcagggccgcaccatgtatgtgcttccattcagcatgggtcctgtgggctccccgctgtcccgcatcggggtgcagctcactgactcagcctatgtggtggcaagcatgcgtattatgacccgactggggacacctgtgcttcaggccctgggagatggtgactttgtcaagtgtctgcactccgtgggccagcccctgacaggacaaggggagccagtgagccagtggccgtgcaacccagagaaaaccctgattggccacgtgcccgaccagcgggagatcatctccttcggcagcggctatggtggcaactccctgctgggcaagaagtgctttgccctacgcatcgcctctcggctggcccgggatgagggctggctggcagagcacatgctgatcctgggcatcaccagccctgcagggaagaagcgctatgtggcagccgccttccctagtgcctgtggcaagaccaacctggctatgatgcggcctgcactgccaggctggaaagtggagtgtgtgggggatgatattgcttggatgaggtttgacagtgaaggtcgactccgggccatcaaccctgagaacggcttctttggggttgcccctggtacctctgccaccaccaatcccaacgccatggctacaatccagagtaacactatttttaccaatgtggctgagaccagtgatggtggcgtgtactgggagggcattgaccagcctcttccacctggtgttactgtgacctcctggctgggcaaaccctggaaacctggtgacaaggagccctgtgcacatcccaactctcgattttgtgccccggctcgccagtgccccatcatggacccagcctgggaggccccagagggtgtccccattgacgccatcatctttggtggccgcagacccaaagggaagatcatcatgcacgacccatttgccatgcggcccttttttggctacaacttcgggcactacctggaacactggctgagcatggaagggcgcaagggggcccagctgccccgtatcttccatgtcaactggttccggcgtgacgaggcagggcacttcctgtggccaggctttggggagaatgctcgggtgctagactggatctgccggcggttagagggggaggacagtgcccgagagacacccattgggctggtgccaaaggaaggagccttggatctcagcggcctcagagctatagacaccactcagctgttctccctccccaaggacttctgggaacaggaggttcgtgacattcggagctacctgacagagcaggtcaaccaggatctgcccaaagaggtgttggctgagcttgaggccctggagagacgtgtgcacaaaatgtgacctgaggccctagtctagcaagaggacatagcaccctcatctgggaatagggaaggcaccttgcagaaaatatgagcaatttgatattaactaacatcttcaatgtgccatagaccttcccacaaagactgtccaataataagagatgcttatctattttacacaa

SEQ ID NO: 165481 - DNA, 756 bp, Homo sapiens
  Payload ID: 12573
  Gene Symbol: PCK2
  Gene Name: phosphoenolpyruvate carboxykinase 2 (mitochondrial)
  ENST ID: ENST00000559837
  CDS Start-End: 435-756
ccggggccgagggagctggcctgccagcggggcggaggaaagctagtgccagccctaccaggcttaactggcatgggctgagccccttgggctggccatcatgccgtagcatccagaccctgcgagtgcttagtggagatctgggccagcttcccactggcattcgagattttgtagagcacagtgcccgcctgtgccaaccagagggcatccacatctgtgatggaactgaggctgagaatactgccacactgaccctgctggagcagcagggcctcatccgaaagctccccaagtacaataactgctggctggcccgcacagaccccaaggatgtggcacgagtagagagcaagacggtgattgtaactccttctcagcgggacacggtaccactcccgcctggtggggcccgtgggcagctgggcaactggatgtccccagctgatttccagcgagctgtggatgagaggtttccaggctgcatgcagggccgcaccatgtatgtgcttccattcagcatgggtcctgtgggctccccgctgtcccgcatcggggtgcagctcactgactcagcctatgtggtggcaagcatgcgtattatgacccgactggggacacctgtgcttcaggccctgggagatggtgactttgtcaagtgtctgcactccgtgggccagcccctgacaggacaaggggagccagtgagccagtggccgtgcaacccagagaaaaccctgattggccacgtgcccg

SEQ ID NO: 165482 - DNA, 508 bp, Homo sapiens
  Payload ID: 12573
  Gene Symbol: PCK2
  Gene Name: phosphoenolpyruvate carboxykinase 2 (mitochondrial)
  ENST ID: ENST00000559171
  CDS Start-End: 1-328
cattgaccagcctcttccacctggtgttactgtgacctcctggctgggcaaaccctggaaacctggtgacaaggagccctgtgcacatcccaactctcgattttgtgccccggctcgccagtgccccatcatggacccagcctgggaggccccagagggtgtccccattgacgccatcatctttggtggccgcagacccaaagagatggggtttcgtcacattgcccaggctgatctcaaattcctgtggtcaagcgagctgcccgcctcagcctctcaaagtactgggattacaggtgtgagctaccacgcctattatactttctaatgaaaaaatgaaaccacatcgtttttgcatctattacatgtcaccagaagaaatgattatctttatttttttaacttgacaatgtagtttgcacaatttcctatggtataaaaatagaaggctacaacaaacctataccaggaataggtaccttaaaaaaaaattgaagactacaacacc

SEQ ID NO: 165483 - DNA, 897 bp, Homo sapiens
  Payload ID: 12573
  Gene Symbol: PCK2
  Gene Name: phosphoenolpyruvate carboxykinase 2 (mitochondrial)
  ENST ID: ENST00000560736
  CDS Start-End: 559-897
gcaggggttggggcggcggctgggctgacctggagcctggagccccggggccgagggagctggcctgccagcggggcggaggaaagctagtgccagccctaccagatacctccctcggacctctaacgggctctcagccagcgccccagggtacttcgagaggcagcagggccctggggacaagggcttaactggcatgggctgagccccttgggctggccatcatgccgtagcatccagaccctgcgagtgcttagtggagatctgggccagcttcccactggcattcgagattttgtagagcacagtgcccgcctgtgccaaccagagggcatccacatctgtgatggaactgaggctgagaatactgccacactgaccctgctggagcagcagggcctcatccgaaagctccccaagtacaataactgctggctggcccgcacagaccccaaggatgtggcacgagtagagagcaagacggtgattgtaactccttctcagcgggacacggtaccactcccgcctggtggggcccgtgggcagctgggcaactggatgtccccagctgatttccagcgagctgtggatgagaggtttccaggctgcatgcagggccgcaccatgtatgtgcttccattcagcatgggtcctgtgggctccccgctgtcccgcatcggggtgcagctcactgactcagcctatgtggtggcaagcatgcgtattatgacccgactggggacacctgtgcttcaggccctgggagatggtgactttgtcaagtgtctgcactccgtgggccagcccctgacaggacaaggggagccagtgagccagtggccgtgcaacccagagaaaaccctgattggccacgtgcccgaccagcgggagatcatc

SEQ ID NO: 165484 - DNA, 2012 bp, Homo sapiens
  Payload ID: 12573
  Gene Symbol: PCK2
  Gene Name: phosphoenolpyruvate carboxykinase 2 (mitochondrial)
  ENST ID: ENST00000561286
  CDS Start-End: 332-1852
gtggctcgcttcgccgcgctccctccttccccgccttccatacctccccggctccgctcggttcctggccaccccgcagcccctgcccaggtgccatggccgcattgtaccgccctggcctgcgatacctccctcggacctctaacgggctctcagccagcgccccagggtacttcgagaggcagcagggccctggggacaaggctggctggcccgcacagaccccaaggatgtggcacgagtagagagcaagacggtgattgtaactccttctcagcgggacacggtaccactcccgcctggtggggcccgtgggcagctgggcaactggatgtccccagctgatttccagcgagctgtggatgagaggtttccaggctgcatgcagggccgcaccatgtatgtgcttccattcagcatgggtcctgtgggctccccgctgtcccgcatcggggtgcagctcactgactcagcctatgtggtggcaagcatgcgtattatgacccgactggggacacctgtgcttcaggccctgggagatggtgactttgtcaagtgtctgcactccgtgggccagcccctgacaggacaaggggagccagtgagccagtggccgtgcaacccagagaaaaccctgattggccacgtgcccgaccagcgggagatcatctccttcggcagcggctatggtggcaactccctgctgggcaagaagtgctttgccctacgcatcgcctctcggctggcccgggatgagggctggctggcagagcacatgctgatcctgggcatcaccagccctgcagggaagaagcgctatgtggcagccgccttccctagtgcctgtggcaagaccaacctggctatgatgcggcctgcactgccaggctggaaagtggagtgtgtgggggatgatattgcttggatgaggtttgacagtgaaggtcgactccgggccatcaaccctgagaacggcttctttggggttgcccctggtacctctgccaccaccaatcccaacgccatggctacaatccagagtaacactatttttaccaatgtggctgagaccagtgatggtggcgtgtactgggagggcattgaccagcctcttccacctggtgttactgtgacctcctggctgggcaaaccctggaaacctggtgacaaggagccctgtgcacatcccaactctcgattttgtgccccggctcgccagtgccccatcatggacccagcctgggaggccccagagggtgtccccattgacgccatcatctttggtggccgcagacccaaaggggtacccctggtatacgaggccttcaactggcgtcatggggtgtttgtgggcagcgccatgcgctctgagtccactgctgcagcagaacacaaagggaagatcatcatgcacgacccatttgccatgcggcccttttttggctacaacttcgggcactacctggaacactggctgagcatggaagggcgcaagggggcccagctgccccgtatcttccatgtcaactggttccggcgtgacgaggcagggcacttcctgtggccaggctttggggagaatgctcgggtgctagactggatctgccggcggttagagggggaggacagtgcccgagagacacccattgggctggtgccaaaggaaggagccttggatctcagcggcctcagagctatagacaccactcagctgttctccctccccaaggacttctgggaacaggaggttcgtgacattcggagctacctgacagagcaggtcaaccaggatctgcccaaagaggtgttggctgagcttgaggccctggagagacgtgtgcacaaaatgtgacctgaggccctagtctagcaagaggacatagcaccctcatctgggaatagggaaggcaccttgcagaaaatatgagcaatttgatattaactaacatcttcaatgtgccatagaccttcccacaaagactgtccaataataagagatgcttatctatttt

SEQ ID NO: 165485 - DNA, 782 bp, Homo sapiens
  Payload ID: 12573
  Gene Symbol: PCK2
  Gene Name: phosphoenolpyruvate carboxykinase 2 (mitochondrial)
  ENST ID: ENST00000560106
  CDS Start-End: 126-254
ctttttaagcgcctcccgccagcctctgctgtggctcgcttcgccgcgctccctccttccccgccttccatacctccccggctccgctcggttcctggccaccccgcagcccctgcccaggtgccatggccgcattgtaccgccctggcctgcgatacctccctcggacctctaacgggctctcagccagcgccccagggtacttcgagaggcagcagggccctggggacaagggcttaactggcatgggctgagccccttgggctggccatcatgccgtagcatccagaccctgcgagtgcttagtggagatctgggccagcttcccactggcattcgagattttgtagagcacagtgcccgcctgtgccaaccagagggcatccacatctgtgatggaactgaggctgagaatactgccacactgaccctgctggagcagcagggcctcatccgaaagctccccaagtacaataactgctggctggcccgcacagaccccaaggatgtggcacgagtagagagcaagacggtgattgtaactccttctcagcgggacacggtaccactcccgcctggtggggcccgtgggcagctgggcaactggatgtccccagctgatttccagcgagctgtggatgagaggtttccaggctgcatgcagggccgcaccatgtatgtgcttccattcagcatgggtcctgtgggctccccgctgtcccgcatcggggtgcagctcactgactcagcctatgtggtggcaagcatgcgtattatgaccc

SEQ ID NO: 165486 - DNA, 2912 bp, Homo sapiens
  Payload ID: 12574
  Gene Symbol: PFKL
  Gene Name: phosphofructokinase, liver
  Uniprot ID: P17858
  ENST ID: ENST00000349048
  CDS Start-End: 56-2398
gcgacgcggcgcaggcggcgggagtgcgagctgggcccgtgtttcggccgccgccatggccgcggtggacctggagaagctgcgggcgtcgggcgcgggcaaggccatcggcgtcctgaccagcggcggcgacgcgcaaggcatgaacgctgctgtccgggctgtgacgcgcatgggcatttatgtgggtgccaaagtcttcctcatctacgagggctatgagggcctcgtggagggaggtgagaacatcaagcaggccaactggctgagcgtctccaacatcatccagctgggcggcactatcattggcagcgctcgctgcaaggcctttaccaccagggaggggcgccgggcagcggcctacaacctggtccagcacggcatcaccaacctgtgcgtcatcggcggggatggcagcctcacaggtgccaacatcttccgcagcgagtggggcagcctgctggaggagctggtggcggaaggtaagatctcagagactacagcccggacctactcgcacctgaacatcgcgggcctagtgggctccatcgataacgacttctgcggcaccgacatgaccatcggcacggactcggccctccaccgcatcatggaggtcatcgatgccatcaccaccactgcccagagccaccagaggaccttcgtgctggaagtgatgggccggcactgcgggtacctggcgctggtatctgcactggcctcaggggccgactggctgttcatccccgaggctccacccgaggacggctgggagaacttcatgtgtgagaggctgggtgagactcggagccgtgggtcccgactgaacatcatcatcatcgctgagggtgccattgaccgcaacgggaagcccatctcgtccagctacgtgaaggacctggtggttcagaggctgggcttcgacacccgtgtaactgtgctgggccacgtgcagcggggagggacgccctctgccttcgaccggatcctgagcagcaagatgggcatggaggcggtgatggcgctgctggaagccacgcctgacacgccggcctgcgtggtcaccctctcggggaaccagtcagtgcggctgcccctcatggagtgcgtgcagatgaccaaggaagtgcagaaagccatggatgacaagaggtttgacgaggccacccagctccgtggtgggagcttcgagaacaactggaacatttacaagctcctcgcccaccagaagccccccaaggagaagtctaacttctccctggccatcctgaatgtgggggccccggcggctggcatgaatgcggccgtgcgctcggcggtgcggaccggcatctcccatggacacacagtatacgtggtgcacgatggcttcgaaggcctagccaagggtcaggtgcaagaagtaggctggcacgacgtggccggctggttggggcgtggtggctccatgctggggaccaagaggaccctgcccaagggccagctggagtccattgtggagaacatccgcatctatggtattcacgccctgctggtggtcggtgggtttgaggcctatgaaggggtgctgcagctggtggaggctcgcgggcgctacgaggagctctgcatcgtcatgtgtgtcatcccagccaccatcagcaacaacgtccctggcaccgacttcagcctgggctccgacactgctgtaaatgccgccatggagagctgtgaccgcatcaaacagtctgcctcggggaccaagcgccgtgtgttcatcgtggagaccatggggggttactgtggctacctggccaccgtgactggcattgctgtgggggccgacgccgcctacgtcttcgaggaccctttcaacatccacgacttaaaggtcaacgtggagcacatgacggagaagatgaagacagacattcagaggggcctggtgctgcggaacgagaagtgccatgactactacaccacggagttcctgtacaacctgtactcatcagagggcaagggcgtcttcgactgcaggaccaatgtcctgggccacctgcagcagggtggcgctccaaccccctttgaccggaactatgggaccaagctgggggtgaaggccatgctgtggttgtcggagaagctgcgcgaggtttaccgcaagggacgggtgttcgccaatgccccagactcggcctgcgtgatcggcctgaagaagaaggcggtggccttcagccccgtcactgagctcaagaaagacactgatttcgagcaccgcatgccacgggagcagtggtggctgagcctgcggctcatgctgaagatgctggcacaataccgcatcagtatggccgcctacgtgtcaggggagctggagcacgtgacccgccgcaccctgagcatggacaagggcttctgaggccagccatgcccacgcccctccccagcccccacccatgccagcgcagcgccagggctcagatggggcctgggctgttgtgtctggagcctgcaggcaggtgggggctgcgtccctgctcagcccatcccctgcctctatccctggccacctgccaggcctccctcgggctggtgtcttgagaccagcctgccaggccctccagcaggaggacagagtgccctggggcatccaccttcctgcccaggggacgtggcgctgtcggtgtttggaggctgctgccccctggctttggcgccccatgggccctcagcgtctccccatgctgggctcactacatgggccagcccttgctctacctggccggtaggctgctggcgcctaggttgtgttgagagggggatgcccctggccctgcctcactgtgacctgctcctgcccacgtgcagcacctgtcaccttttctagaaataaaatcaccctgactgtggggtgcatcggtctccggagagca

SEQ ID NO: 165487 - DNA, 3390 bp, Homo sapiens
  Payload ID: 12574
  Gene Symbol: PFKL
  Gene Name: phosphofructokinase, liver
  ENST ID: ENST00000397961
  CDS Start-End: 56-184
gcgacgcggcgcaggcggcgggagtgcgagctgggcccgtgtttcggccgccgccatggccgcggtggacctggagaagctgcgggcgtcgggcgcgggcaaggccatcggcgtcctgaccagcggcggcgacgcgcaaggtcccctgacaagcccaccaggccccctgctgagatggctgtgaccctgggctgacccgcccagtggcacattgactccgcctggagctggggagaccagagaggccctgtggttggacggtggcctgggtgcgctgctcctgccctctccttgccctgcctcagctgctgcctgccagaggcgtggcacctcacctcacacctgctccctgctgctgagccccacgccaagctggagagcggatgagaagcatgtgtaaccagggtagaggtcgagagtcctctcgtgggggtctccatgttcaagggagctgccgaggcttgagcaggagcccccagcaggaaactggctttgccaaggcccccgctgggacagactgtttctttcactgcagtcctgggagccgagggcaaggggacaggaaagaggaagtgacctcagagcctggtggcaccagcatcatgtccaggctggggggcatgaacgctgctgtccgggctgtgacgcgcatgggcatttatgtgggtgccaaagtcttcctcatctacgagggctatgagggcctcgtggagggaggtgagaacatcaagcaggccaactggctgagcgtctccaacatcatccagctgggcggcactatcattggcagcgctcgctgcaaggcctttaccaccagggaggggcgccgggcagcggcctacaacctggtccagcacggcatcaccaacctgtgcgtcatcggcggggatggcagcctcacaggtgccaacatcttccgcagcgagtggggcagcctgctggaggagctggtggcggaaggtaagatctcagagactacagcccggacctactcgcacctgaacatcgcgggcctagtgggctccatcgataacgacttctgcggcaccgacatgaccatcggcacggactcggccctccaccgcatcatggaggtcatcgatgccatcaccaccactgcccagagccaccagaggaccttcgtgctggaagtgatgggccggcactgcgggtacctggcgctggtatctgcactggcctcaggggccgactggctgttcatccccgaggctccacccgaggacggctgggagaacttcatgtgtgagaggctgggtgagactcggagccgtgggtcccgactgaacatcatcatcatcgctgagggtgccattgaccgcaacgggaagcccatctcgtccagctacgtgaaggacctggtggttcagaggctgggcttcgacacccgtgtaactgtgctgggccacgtgcagcggggagggacgccctctgccttcgaccggatcctgagcagcaagatgggcatggaggcggtgatggcgctgctggaagccacgcctgacacgccggcctgcgtggtcaccctctcggggaaccagtcagtgcggctgcccctcatggagtgcgtgcagatgaccaaggaagtgcagaaagccatggatgacaagaggtttgacgaggccacccagctccgtggtgggagcttcgagaacaactggaacatttacaagctcctcgcccaccagaagccccccaaggagaagtctaacttctccctggccatcctgaatgtgggggccccggcggctggcatgaatgcggccgtgcgctcggcggtgcggaccggcatctcccatggacacacagtatacgtggtgcacgatggcttcgaaggcctagccaagggtcaggtgcaagaagtaggctggcacgacgtggccggctggttggggcgtggtggctccatgctggggaccaagaggaccctgcccaagggccagctggagtccattgtggagaacatccgcatctatggtattcacgccctgctggtggtcggtgggtttgaggcctatgaaggggtgctgcagctggtggaggctcgcgggcgctacgaggagctctgcatcgtcatgtgtgtcatcccagccaccatcagcaacaacgtccctggcaccgacttcagcctgggctccgacactgctgtaaatgccgccatggagagctgtgaccgcatcaaacagtctgcctcggggaccaagcgccgtgtgttcatcgtggagaccatggggggttactgtggctacctggccaccgtgactggcattgctgtgggggccgacgccgcctacgtcttcgaggaccctttcaacatccacgacttaaaggtcaacgtggagcacatgacggagaagatgaagacagacattcagaggggcctggtgctgcggaacgagaagtgccatgactactacaccacggagttcctgtacaacctgtactcatcagagggcaagggcgtcttcgactgcaggaccaatgtcctgggccacctgcagcagggtggcgctccaaccccctttgaccggaactatgggaccaagctgggggtgaaggccatgctgtggttgtcggagaagctgcgcgaggtttaccgcaagggacgggtgttcgccaatgccccagactcggcctgcgtgatcggcctgaagaagaaggcggtggccttcagccccgtcactgagctcaagaaagacactgatttcgagcaccgcatgccacgggagcagtggtggctgagcctgcggctcatgctgaagatgctggcacaataccgcatcagtatggccgcctacgtgtcaggggagctggagcacgtgacccgccgcaccctgagcatggacaagggcttctgaggccagccatgcccacgcccctccccagcccccacccatgccagcgcagcgccagggctcagatggggcctgggctgttgtgtctggagcctgcaggcaggtgggggctgcgtccctgctcagcccatcccctgcctctatccctggccacctgccaggcctccctcgggctggtgtcttgagaccagcctgccaggccctccagcaggaggacagagtgccctggggcatccaccttcctgcccaggggacgtggcgctgtcggtgtttggaggctgctgccccctggctttggcgccccatgggccctcagcgtctccccatgctgggctcactacatgggccagcccttgctctacctggccggtaggctgctggcgcctaggttgtgttgagagggggatgcccctggccctgcctcactgtgacctgctcctgcccacgtgcagcacctgtcaccttttctagaaataaaatcaccctgactgtggggtgcatcggtctccggagagca

SEQ ID NO: 165488 - DNA, 129 bp, Homo sapiens
  Payload ID: 12574
  Gene Symbol: PFKL
  Gene Name: phosphofructokinase, liver
  ENST ID: ENST00000628044
  CDS Start-End: 1-129
atggccgcggtggacctggagaagctgcgggcgtcgggcgcgggcaaggccatcggcgtcctgaccagcggcggcgacgcgcaaggtcccctgacaagcccaccaggccccctgctgagatggctgtga

SEQ ID NO: 165489 - DNA, 3078 bp, Homo sapiens
  Payload ID: 12575
  Gene Symbol: PFKM
  Gene Name: phosphofructokinase, muscle
  Uniprot ID: P08237
  ENST ID: ENST00000312352
  CDS Start-End: 40-2382
agacttggtatagtgggagagcctgactgagagtggatcatgacccatgaagagcaccatgcagccaaaaccctggggattggcaaagccattgctgtcttaacctctggtggagatgcccaaggtatgaatgctgctgtcagggctgtggttcgagttggtatcttcaccggtgcccgtgtcttctttgtccatgagggttatcaaggcctggtggatggtggagatcacatcaaggaagccacctgggagagcgtttcgatgatgcttcagctgggaggcacggtgattggaagtgcccggtgcaaggactttcgggaacgagaaggacgactccgagctgcctacaacctggtgaagcgtgggatcaccaatctctgtgtcattgggggtgatggcagcctcactggggctgacaccttccgttctgagtggagtgacttgttgagtgacctccagaaagcaggtaagatcacagatgaggaggctacgaagtccagctacctgaacattgtgggcctggttgggtcaattgacaatgacttctgtggcaccgatatgaccattggcactgactctgccctgcatcggatcatggaaattgtagatgccatcactaccactgcccagagccaccagaggacatttgtgttagaagtaatgggccgccactgtggatacctggcccttgtcacctctctgtcctgtggggccgactgggtttttattcctgaatgtccaccagatgacgactgggaggaacacctttgtcgccgactcagcgagacaaggacccgtggttctcgtctcaacatcatcattgtggctgagggtgcaattgacaagaatggaaaaccaatcacctcagaagacatcaagaatctggtggttaagcgtctgggatatgacacccgggttactgtcttggggcatgtgcagaggggtgggacgccatcagcctttgacagaattctgggcagcaggatgggtgtggaagcagtgatggcacttttggaggggaccccagataccccagcctgtgtagtgagcctctctggtaaccaggctgtgcgcctgcccctcatggaatgtgtccaggtgaccaaagatgtgaccaaggccatggatgagaagaaatttgacgaagccctgaagctgagaggccggagcttcatgaacaactgggaggtgtacaagcttctagctcatgtcagacccccggtatctaagagtggttcgcacacagtggctgtgatgaacgtgggggctccggctgcaggcatgaatgctgctgttcgctccactgtgaggattggccttatccagggcaaccgagtgctcgttgtccatgatggtttcgagggcctggccaaggggcagatagaggaagctggctggagctatgttgggggctggactggccaaggtggctctaaacttgggactaaaaggactctacccaagaagagctttgaacagatcagtgccaatataactaagtttaacattcagggccttgtcatcattgggggctttgaggcttacacagggggcctggaactgatggagggcaggaagcagtttgatgagctctgcatcccatttgtggtcattcctgctacagtctccaacaatgtccctggctcagacttcagcgttggggctgacacagcactcaatactatctgcacaacctgtgaccgcatcaagcagtcagcagctggcaccaagcgtcgggtgtttatcattgagactatgggtggctactgtggctacctggctaccatggctggactggcagctggggccgatgctgcctacatttttgaggagcccttcaccattcgagacctgcaggcaaatgttgaacatctggtgcaaaagatgaaaacaactgtgaaaaggggcttggtgttaaggaatgaaaagtgcaatgagaactataccactgacttcattttcaacctgtactctgaggaggggaagggcatcttcgacagcaggaagaatgtgcttggtcacatgcagcagggtgggagcccaaccccatttgataggaattttgccactaagatgggcgccaaggctatgaactggatgtctgggaaaatcaaagagagttaccgtaatgggcggatctttgccaatactccagattcgggctgtgttctggggatgcgtaagagggctctggtcttccaaccagtggctgagctgaaggaccagacagattttgagcatcgaatccccaaggaacagtggtggctgaaactgaggcccatcctcaaaatcctagccaagtacgagattgacttggacacttcagaccatgcccacctggagcacatcacccggaagcggtccggggaagctgccgtctaaacctctctggagtgaggggaatagattacctgatcatggtcagctcacaccctaataagtccacatcttctcagtgttttagctgtttttttcattaggtttccttttattctgtaccttgcagccatgaccagttctggccaggagctggaggagcaggcagtgggtgggagctccttttaggtagaatttaacatgacttctgccccagctttatctgtcacacaaggctgggcacctctagtgctactgctagatatcacttactcagttagaattttcctaaaaataagctttatttatttctttgtgataacaaagagtcttggttcctctactacttttactacagtgacaaattgtaactacactaataaatgccaactggtcactgtgcttttgcttctcctgttatcatcttcctaagtggaatgtaatactgtcagccccatgtatcagacacttgtctgatgaagcagtaaagacgttaagggtatcacagggggtggaggaagggattatctctagtacactacttgctggctgtctgaaaaattgtcactgccaaactctaaaaacagttctaaatagtgactgagaaggtttgttgctggagtcagggaataaggcagccaaatactctttgcacagttctttagtgggaagagaaattaacaataaatatcaagcactgtg

SEQ ID NO: 165490 - DNA, 3176 bp, Homo sapiens
  Payload ID: 12575
  Gene Symbol: PFKM
  Gene Name: phosphofructokinase, muscle
  Uniprot ID: P08237
  ENST ID: ENST00000340802
  CDS Start-End: 225-2780
gcttccgcccagtccagcccgggccggctgaccgggtccgacacagtctcctggaccaggctccctccatcctcacccctcccccagcttcccgccgccactcaccgaaccggaaccggctgccatgcgaaggggtttccggccgggcgcggaacgcaaaacccgggaaccgccgcgaaccggaaccgccttcacagcaccggaagagtcgctaggaggcagccatgcataaagacgagtttcatctgaaatttttcatgtgtgtgattcagtctcgccagttagtcaggactcctcagagaacagctggggaagcttctacttccagcatgctcataccaaagccaccaccaaagacagacatcttgaagagtctagatactatggatgatccagacaccgtgggaagcatacctgttttcaaaactgagtggatcatgacccatgaagagcaccatgcagccaaaaccctggggattggcaaagccattgctgtcttaacctctggtggagatgcccaaggtatgaatgctgctgtcagggctgtggttcgagttggtatcttcaccggtgcccgtgtcttctttgtccatgagggttatcaaggcctggtggatggtggagatcacatcaaggaagccacctgggagagcgtttcgatgatgcttcagctgggaggcacggtgattggaagtgcccggtgcaaggactttcgggaacgagaaggacgactccgagctgcctacaacctggtgaagcgtgggatcaccaatctctgtgtcattgggggtgatggcagcctcactggggctgacaccttccgttctgagtggagtgacttgttgagtgacctccagaaagcaggtaagatcacagatgaggaggctacgaagtccagctacctgaacattgtgggcctggttgggtcaattgacaatgacttctgtggcaccgatatgaccattggcactgactctgccctgcatcggatcatggaaattgtagatgccatcactaccactgcccagagccaccagaggacatttgtgttagaagtaatgggccgccactgtggatacctggcccttgtcacctctctgtcctgtggggccgactgggtttttattcctgaatgtccaccagatgacgactgggaggaacacctttgtcgccgactcagcgagacaaggacccgtggttctcgtctcaacatcatcattgtggctgagggtgcaattgacaagaatggaaaaccaatcacctcagaagacatcaagaatctggtggttaagcgtctgggatatgacacccgggttactgtcttggggcatgtgcagaggggtgggacgccatcagcctttgacagaattctgggcagcaggatgggtgtggaagcagtgatggcacttttggaggggaccccagataccccagcctgtgtagtgagcctctctggtaaccaggctgtgcgcctgcccctcatggaatgtgtccaggtgaccaaagatgtgaccaaggccatggatgagaagaaatttgacgaagccctgaagctgagaggccggagcttcatgaacaactgggaggtgtacaagcttctagctcatgtcagacccccggtatctaagagtggttcgcacacagtggctgtgatgaacgtgggggctccggctgcaggcatgaatgctgctgttcgctccactgtgaggattggccttatccagggcaaccgagtgctcgttgtccatgatggtttcgagggcctggccaaggggcagatagaggaagctggctggagctatgttgggggctggactggccaaggtggctctaaacttgggactaaaaggactctacccaagaagagctttgaacagatcagtgccaatataactaagtttaacattcagggccttgtcatcattgggggctttgaggcttacacagggggcctggaactgatggagggcaggaagcagtttgatgagctctgcatcccatttgtggtcattcctgctacagtctccaacaatgtccctggctcagacttcagcgttggggctgacacagcactcaatactatctgcacaacctgtgaccgcatcaagcagtcagcagctggcaccaagcgtcgggtgtttatcattgagactatgggtggctactgtggctacctggctaccatggctggactggcagctggggccgatgctgcctacatttttgaggagcccttcaccattcgagacctgcaggcaaatgttgaacatctggtgcaaaagatgaaaacaactgtgaaaaggggcttggtgttaaggaatgaaaagtgcaatgagaactataccactgacttcattttcaacctgtactctgaggaggggaagggcatcttcgacagcaggaagaatgtgcttggtcacatgcagcagggtgggagcccaaccccatttgataggaattttgccactaagatgggcgccaaggctatgaactggatgtctgggaaaatcaaagagagttaccgtaatgggcggatctttgccaatactccagattcgggctgtgttctggggatgcgtaagagggctctggtcttccaaccagtggctgagctgaaggaccagacagattttgagcatcgaatccccaaggaacagtggtggctgaaactgaggcccatcctcaaaatcctagccaagtacgagattgacttggacacttcagaccatgcccacctggagcacatcacccggaagcggtccggggaagctgccgtctaaacctctctggagtgaggggaatagattacctgatcatggtcagctcacaccctaataagtccacatcttctcagtgttttagctgtttttttcattaggtttccttttattctgtaccttgcagccatgaccagttctggccaggagctggaggagcaggcagtgggtgggagctccttttaggtagaatttaacatgacttctgccccagctttatctgtcacacaaggctgggcacctctagtgctactgctagatatcacttactcagttagaattttcctaaaaataagctttatttatttctttgtgataacaaagagtcttggttcctctactacttttactacagtgacaaattgtaactacactaataaatgccaactggtcactgtg

SEQ ID NO: 165491 - DNA, 3228 bp, Homo sapiens
  Payload ID: 12575
  Gene Symbol: PFKM
  Gene Name: phosphofructokinase, muscle
  Uniprot ID: P08237
  ENST ID: ENST00000359794
  CDS Start-End: 190-2532
aagcaggaggaggcggagccttcttgtcagcatctgttagtggaggttgggaagcctctcctccttccccctccctctttgcctccacctggctcctccccatgttcgtccatcacccctcccccctttcccaaggacaatctgcaagaaagcagcggcggaggagagctaagactaaaagagtggatcatgacccatgaagagcaccatgcagccaaaaccctggggattggcaaagccattgctgtcttaacctctggtggagatgcccaaggtatgaatgctgctgtcagggctgtggttcgagttggtatcttcaccggtgcccgtgtcttctttgtccatgagggttatcaaggcctggtggatggtggagatcacatcaaggaagccacctgggagagcgtttcgatgatgcttcagctgggaggcacggtgattggaagtgcccggtgcaaggactttcgggaacgagaaggacgactccgagctgcctacaacctggtgaagcgtgggatcaccaatctctgtgtcattgggggtgatggcagcctcactggggctgacaccttccgttctgagtggagtgacttgttgagtgacctccagaaagcaggtaagatcacagatgaggaggctacgaagtccagctacctgaacattgtgggcctggttgggtcaattgacaatgacttctgtggcaccgatatgaccattggcactgactctgccctgcatcggatcatggaaattgtagatgccatcactaccactgcccagagccaccagaggacatttgtgttagaagtaatgggccgccactgtggatacctggcccttgtcacctctctgtcctgtggggccgactgggtttttattcctgaatgtccaccagatgacgactgggaggaacacctttgtcgccgactcagcgagacaaggacccgtggttctcgtctcaacatcatcattgtggctgagggtgcaattgacaagaatggaaaaccaatcacctcagaagacatcaagaatctggtggttaagcgtctgggatatgacacccgggttactgtcttggggcatgtgcagaggggtgggacgccatcagcctttgacagaattctgggcagcaggatgggtgtggaagcagtgatggcacttttggaggggaccccagataccccagcctgtgtagtgagcctctctggtaaccaggctgtgcgcctgcccctcatggaatgtgtccaggtgaccaaagatgtgaccaaggccatggatgagaagaaatttgacgaagccctgaagctgagaggccggagcttcatgaacaactgggaggtgtacaagcttctagctcatgtcagacccccggtatctaagagtggttcgcacacagtggctgtgatgaacgtgggggctccggctgcaggcatgaatgctgctgttcgctccactgtgaggattggccttatccagggcaaccgagtgctcgttgtccatgatggtttcgagggcctggccaaggggcagatagaggaagctggctggagctatgttgggggctggactggccaaggtggctctaaacttgggactaaaaggactctacccaagaagagctttgaacagatcagtgccaatataactaagtttaacattcagggccttgtcatcattgggggctttgaggcttacacagggggcctggaactgatggagggcaggaagcagtttgatgagctctgcatcccatttgtggtcattcctgctacagtctccaacaatgtccctggctcagacttcagcgttggggctgacacagcactcaatactatctgcacaacctgtgaccgcatcaagcagtcagcagctggcaccaagcgtcgggtgtttatcattgagactatgggtggctactgtggctacctggctaccatggctggactggcagctggggccgatgctgcctacatttttgaggagcccttcaccattcgagacctgcaggcaaatgttgaacatctggtgcaaaagatgaaaacaactgtgaaaaggggcttggtgttaaggaatgaaaagtgcaatgagaactataccactgacttcattttcaacctgtactctgaggaggggaagggcatcttcgacagcaggaagaatgtgcttggtcacatgcagcagggtgggagcccaaccccatttgataggaattttgccactaagatgggcgccaaggctatgaactggatgtctgggaaaatcaaagagagttaccgtaatgggcggatctttgccaatactccagattcgggctgtgttctggggatgcgtaagagggctctggtcttccaaccagtggctgagctgaaggaccagacagattttgagcatcgaatccccaaggaacagtggtggctgaaactgaggcccatcctcaaaatcctagccaagtacgagattgacttggacacttcagaccatgcccacctggagcacatcacccggaagcggtccggggaagctgccgtctaaacctctctggagtgaggggaatagattacctgatcatggtcagctcacaccctaataagtccacatcttctcagtgttttagctgtttttttcattaggtttccttttattctgtaccttgcagccatgaccagttctggccaggagctggaggagcaggcagtgggtgggagctccttttaggtagaatttaacatgacttctgccccagctttatctgtcacacaaggctgggcacctctagtgctactgctagatatcacttactcagttagaattttcctaaaaataagctttatttatttctttgtgataacaaagagtcttggttcctctactacttttactacagtgacaaattgtaactacactaataaatgccaactggtcactgtgcttttgcttctcctgttatcatcttcctaagtggaatgtaatactgtcagccccatgtatcagacacttgtctgatgaagcagtaaagacgttaagggtatcacagggggtggaggaagggattatctctagtacactacttgctggctgtctgaaaaattgtcactgccaaactctaaaaacagttctaaatagtgactgagaaggtttgttgctggagtcagggaataaggcagccaaatactctttgcacagttctttagtgggaagagaaattaacaataaatatcaagcactgtg

SEQ ID NO: 165492 - DNA, 585 bp, Homo sapiens
  Payload ID: 12575
  Gene Symbol: PFKM
  Gene Name: phosphofructokinase, muscle
  ENST ID: ENST00000546465
  CDS Start-End: 56-585
atcttgattcctgctgtgtcttaactgaccattgtcttaaattctagagtggatcatgacccatgaagagcaccatgcagccaaaaccctggggattggcaaagccattgctgtcttaacctctggtggagatgcccaaggcatgaatgctgctgttcgctccactgtgaggattggccttatccagggcaaccgagtgctcgttgtccatgatggtttcgagggcctggccaaggggcagatagaggaagctggctggagctatgttgggggctggactggccaaggtggctctaaacttgggactaaaaggactctacccaagaagagctttgaacagatcagtgccaatataactaagtttaacattcagggccttgtcatcattgggggctttgaggcttacacagggggcctggaactgatggagggcaggaagcagtttgatgagctctgcatcccatttgtggtcattcctgctacagtctccaacaatgtccctggctcagacttcagcgttggggctgacacagcactcaatactatctgcacaacctgtgaccgcatcaagcagtcagcagctgg

SEQ ID NO: 165493 - DNA, 887 bp, Homo sapiens
  Payload ID: 12575
  Gene Symbol: PFKM
  Gene Name: phosphofructokinase, muscle
  ENST ID: ENST00000552752
  CDS Start-End: 1-125
tgagcctctctggtaaccaggctgtgcgcctgcccctcatggaatgtgtccaggtgaccaaagatgtgaccaaggccatggatgagaagaaatttgacgaagccctgaagctgagaggccggtgaggagatgacgggaagctcactagctacagaaatcagaggcgtgaacgaagccaaagatctccatggctccaggcccaaaacatgagcttctgctgcttccttttctgattctctctgcagcaagttcctgcccaagaaaattagttgtgaggagcttcatgaacaactgggaggtgtacaagcttctagctcatgtcagacccccggtatctaagagtggttcgcacacagtggctgtgatgaacgtgggggctccggctgcaggcatgaatgctgctgttcgctccactgtgaggattggccttatccagggcaaccgagtgctcgttgtccatgatggtttcgagggcctggccaaggggcagatagaggaagctggctggagctatgttgggggctggactggccaaggtggctctaaacttgggactaaaaggactctacccaagaagagctttgaacagatcagtgccaatataactaagtttaacattcagggccttgtcatcattgggggctttgaggcttacacagggggcctggaactgatggagggcaggaagcagtttgatgagctctgcatcccatttgtggtcattcctgctacagtctccaacaatgtccctggctcagacttcagcgttggggctgacacagcactcaatactatctgcacaacctgtgaccgcatcaagcagtcagcagctggcaccaagcgtcgggtgtttatcattgagactatgggtggctactgtggctacc

SEQ ID NO: 165494 - DNA, 571 bp, Homo sapiens
  Payload ID: 12575
  Gene Symbol: PFKM
  Gene Name: phosphofructokinase, muscle
  ENST ID: ENST00000549022
  CDS Start-End: 89-571
atttcagcttgtcagtctacaagggtgtggctttcctctggaagaagtccaaagctctcaggctgcaaagctcagacttgagtggatcatgacccatgaagagcaccatgcagccaaaaccctggggattggcaaagccattgctgtcttaacctctggtggagatgcccaaggtatgaatgctgctgtcagggctgtggttcgagttggtatcttcaccggtgcccgtgtcttctttgtccatgagggttatcaaggcctggtggatggtggagatcacatcaaggaagccacctgggagagcgtttcgatgatgcttcagctgggaggcacggtgattggaagtgcccggtgcaaggactttcgggaacgagaaggacgactccgagctgcctacaacctggtgaagcgtgggatcaccaatctctgtgtcattgggggtgatggcagcctcactggggctgacaccttccgttctgagtggagtgacttgttgagtgacctccagaaagcaggtaagatcacagatgaggaggctacgaagtccagctacctgaacattgtgggcctg

SEQ ID NO: 165495 - DNA, 594 bp, Homo sapiens
  Payload ID: 12575
  Gene Symbol: PFKM
  Gene Name: phosphofructokinase, muscle
  ENST ID: ENST00000549941
  CDS Start-End: 137-594
acagtgctccccgcttccgcccagtccagcccgggccggctgaccgggtccgacacagtctcctggaccaggctccctccatcctcacccctcccccagcttcccgccgccactcaccgaaccggaaccggctgccatgcgaaggggtttccggccgggcgcggaacgcaaaacccgggaaccgccgcgaaccggaaccgccttcacagcaccggaagagtcgctagagtggatcatgacccatgaagagcaccatgcagccaaaaccctggggattggcaaagccattgctgtcttaacctctggtggagatgcccaaggtatgaatgctgctgtcagggctgtggttcgagttggtatcttcaccggtgcccgtgtcttctttgtccatgagggttatcaaggcctggtggatggtggagatcacatcaaggaagccacctgggagagcgtttcgatgatgcttcagctgggaggcacggtgattggaagtgcccggtgcaaggactttcgggaacgagaaggacgactccgagctgcctacaacctggtgaagcgtgggatcaccaatctctgtgtcattgggggtgatgg

SEQ ID NO: 165496 - DNA, 452 bp, Homo sapiens
  Payload ID: 12575
  Gene Symbol: PFKM
  Gene Name: phosphofructokinase, muscle
  ENST ID: ENST00000550924
  CDS Start-End: 199-452
accacagaaagccgagcttcccggtgaaaacagctctccccagagaagacccagctctggcgggaaagccccggaatcgcaaccggcctttccccaagtacggctgggcgctgggatggggcctgctgtaacggcagggagacggtctctccgcggcccaggagagagagaccagaaggaacggcctcagagtggatcatgacccatgaagagcaccatgcagccaaaaccctggggattggcaaagccattgctgtcttaacctctggtggagatgcccaaggtatgaatgctgctgtcagggctgtggttcgagttggtatcttcaccggtgcccgtgtcttctttgtccatgagggttatcaaggcctggtggatggtggagatcacatcaaggaagccacctgggagagcgtttcgatgatgcttcagctgggaggcacggtgattgg

SEQ ID NO: 165497 - DNA, 580 bp, Homo sapiens
  Payload ID: 12575
  Gene Symbol: PFKM
  Gene Name: phosphofructokinase, muscle
  ENST ID: ENST00000552989
  CDS Start-End: 65-244
ctttcccaaggacaatctgcaagaaagcagcggcggaggagagctaagactaaaagagtggatcatgacccatgaagagcaccatgcagccaaaaccctggggattggcaaagccattgctgtcttaacctctggtggagatgcccaagaggacatttgtgttagaagtaatgggccgccactgtggatacctggcccttgtcacctctctgtcctgtggggccgactgggtttttattcctgaatgtccaccagatgacgactgggaggaacacctttgtcgccgactcagcgagacaaggacccgtggttctcgtctcaacatcatcattgtggctgagggtgcaattgacaagaatggaaaaccaatcacctcagaagacatcaagaatctggtggttaagcgtctgggatatgacacccgggttactgtcttggggcatgtgcagaggggtgggacgccatcagcctttgacagaattctgggcagcaggatgggtgtggaagcagtgatggcacttttggaggggaccccagataccccagcctgtgtagtgagcctctctggtaaccaggctgt

SEQ ID NO: 165498 - DNA, 3579 bp, Homo sapiens
  Payload ID: 12575
  Gene Symbol: PFKM
  Gene Name: phosphofructokinase, muscle
  ENST ID: ENST00000547581
  CDS Start-End: 42-572
aaccgccttcacagcaccggaagagtcgctaggaggcagccatgcataaagacgagtttcatctgaaatttttcatgtgtgtgattcagtctcgccagttagtcaggactcctcagagaacagctggggaagcttctacttccagcatgctcataccaaagccaccaccaaagacagacatcttgaagagtctagatactatggatgatccagacaccgtgggaagcatacctgttttcaaaactgaatgtgcagaggtagagatacaagtaagcaagaggaagagggcagtggtaaaagcaagaggagacccgactgtggagacaatgaagcaaagggaagagtggatcatgacccatgaagagcaccatgcagccaaaaccctggggattggcaaagccattgctgtcttaacctctggtggagatgcccaagagatgggacgggatcggccaggtgcagtggctcacacctgtaatcccaggactttgggaggccgaggcgggcagatcacccgaggttgggagttcgagaccagcctgaccaacatggagaaaccccgtctctactaaaaatacaaaattagctgggcgtggtggtgcatgcctgtaatcccagccacttgggaggctgaggcaggagaatcgcttgaacccgggaggcagaggttgcggtatgaatgctgctgtcagggctgtggttcgagttggtatcttcaccggtgcccgtgtcttctttgtccatgagggttatcaaggcctggtggatggtggagatcacatcaaggaagccacctgggagagcgtttcgatgatgcttcagctgggaggcacggtgattggaagtgcccggtgcaaggactttcgggaacgagaaggacgactccgagctgcctacaacctggtgaagcgtgggatcaccaatctctgtgtcattgggggtgatggcagcctcactggggctgacaccttccgttctgagtggagtgacttgttgagtgacctccagaaagcaggtaagatcacagatgaggaggctacgaagtccagctacctgaacattgtgggcctggttgggtcaattgacaatgacttctgtggcaccgatatgaccattggcactgactctgccctgcatcggatcatggaaattgtagatgccatcactaccactgcccagagccaccagaggacatttgtgttagaagtaatgggccgccactgtggatacctggcccttgtcacctctctgtcctgtggggccgactgggtttttattcctgaatgtccaccagatgacgactgggaggaacacctttgtcgccgactcagcgagacaaggacccgtggttctcgtctcaacatcatcattgtggctgagggtgcaattgacaagaatggaaaaccaatcacctcagaagacatcaagaatgttcgtatgaatgaagccagagaggccttagaatccatagcccattcccttctggcttctgagtctcctgacattgcttctccccttggtccttctgcacatctctccctggttccctgcccctgattgcctcccacaaagaaccattacaagacaagaggctgagctgtccatggtttacccaagtctctgcttgttttcttcctttgactctgcgtaaccctctctctgtccctctgttggtcccttcagctggtggttaagcgtctgggatatgacacccgggttactgtcttggggcatgtgcagaggggtgggacgccatcagcctttgacagaattctgggcagcaggatgggtgtggaagcagtgatggcacttttggaggggaccccagataccccagcctgtgtagtgagcctctctggtaaccaggctgtgcgcctgcccctcatggaatgtgtccaggtgaccaaagatgtgaccaaggccatggatgagaagaaatttgacgaagccctgaagctgagaggccggagcttcatgaacaactgggaggtgtacaagcttctagctcatgtcagacccccggtatctaagagtggttcgcacacagtggctgtgatgaacgtgggggctccggctgcaggcatgaatgctgctgttcgctccactgtgaggattggccttatccagggcaaccgagtgctcgttgtccatgatggtttcgagggcctggccaaggggcagatagaggaagctggctggagctatgttgggggctggactggccaaggtggctctaaacttgggactaaaaggactctacccaagaagagctttgaacagatcagtgccaatataactaagtttaacattcagggccttgtcatcattgggggctttgaggcttacacagggggcctggaactgatggagggcaggaagcagtttgatgagctctgcatcccatttgtggtcattcctgctacagtctccaacaatgtccctggctcagacttcagcgttggggctgacacagcactcaatactatctgcacaacctgtgaccgcatcaagcagtcagcagctggcaccaagcgtcgggtgtttatcattgagactatgggtggctactgtggctacctggctaccatggctggactggcagctggggccgatgctgcctacatttttgaggagcccttcaccattcgagacctgcaggcaaatgttgaacatctggtgcaaaagatgaaaacaactgtgaaaaggggcttggtgttaaggaatgaaaagtgcaatgagaactataccactgacttcattttcaacctgtactctgaggaggggaagggcatcttcgacagcaggaagaatgtgcttggtcacatgcagcagggtgggagcccaaccccatttgataggaattttgccactaagatgggcgccaaggctatgaactggatgtctgggaaaatcaaagagagttaccgtaatgggcggatctttgccaatactccagattcgggctgtgttctggggatgcgtaagagggctctggtcttccaaccagtggctgagctgaaggaccagacagattttgagcatcgaatccccaaggaacagtggtggctgaaactgaggcccatcctcaaaatcctagccaagtacgagattgacttggacacttcagaccatgcccacctggagcacatcacccggaagcggtccggggaagctgccgtctaaacctctctggagtgaggggaatagattacctgatcatggtcagctcacaccctaataagtccacatcttctcagtgttttagctgtttttttcattaggtttccttttattctgtaccttgcagccatgaccagttctggccaggagctggaggagcaggcagtgggtgggagctccttttaggtagaatttaacatgacttctgccccagctttatctgtcacacaaggctgggcacctctagtgctactgctagatatcacttactcagttagaattttcctaaaaataagctttatttatttctttgtgataacaaagagtcttggttcctctactacttttactacagtgacaaattgtaactacactaataaatgccaactggtcactgtg

SEQ ID NO: 165499 - DNA, 571 bp, Homo sapiens
  Payload ID: 12575
  Gene Symbol: PFKM
  Gene Name: phosphofructokinase, muscle
  ENST ID: ENST00000550257
  CDS Start-End: 125-571
gcttccgcccagtccagcccgggccggctgaccgggtccgacacagtctcctggaccaggctccctccatcctcacccctcccccagcttcccgccgccactcaccgaaccggaaccggctgccatgcgaaggggtttccggccgggcgcggaacgcaaaacccgggaaccgccgcgaaccggaaccgccttcacagcaccggaagagtcgctagctggggaagcttctacttccagcatgctcataccaaagccaccaccaaagacagacatcttgaagagtctagatactatggatgatccagacaccgtgggaagcatacctgttttcaaaactgagtggatcatgacccatgaagagcaccatgcagccaaaaccctggggattggcaaagccattgctgtcttaacctctggtggagatgcccaaggtatgaatgctgctgtcagggctgtggttcgagttggtatcttcaccggtgcccgtgtcttctttgtccatgagggttatcaaggcctggtggatggtggagatcacatcaaggaagccacctgggagagcgtttcgatg

SEQ ID NO: 165500 - DNA, 582 bp, Homo sapiens
  Payload ID: 12575
  Gene Symbol: PFKM
  Gene Name: phosphofructokinase, muscle
  ENST ID: ENST00000548288
  CDS Start-End: 158-582
gagttttgcttgcttgcgttccagtttccatggcagcttttcgcggtggccctaaatctgcggaaacctgtggcttcccccgacagatagggacctgagatctaaatcgatctcaggctatctcgtgttttattgagaatcacagaacgaggcagccatgcataaagacgagtttcatctgaaatttttcatgtgtgtgattcagtctcgccagttagtcaggactcctcagagaacagctggggaagcttctacttccagcatgctcataccaaagccaccaccaaagacagacatcttgaagagtctagatactatggatgatccagacaccgtgggaagcatacctgttttcaaaactgagtggatcatgacccatgaagagcaccatgcagccaaaaccctggggattggcaaagccattgctgtcttaacctctggtggagatgcccaaggtatgaatgctgctgtcagggctgtggttcgagttggtatcttcaccggtgcccgtgtcttctttgtccatgagggttatcaaggcctggtggatggtggagatcacatcaaggaagccacctggga

SEQ ID NO: 165501 - DNA, 2797 bp, Homo sapiens
  Payload ID: 12575
  Gene Symbol: PFKM
  Gene Name: phosphofructokinase, muscle
  Uniprot ID: P08237
  ENST ID: ENST00000551804
  CDS Start-End: 152-2401
aatatctgtctgtttttgtctacgtgcgtgtcattgtgggtctgtaagggatgcttatacatgagtctgcatgaatttctgtgtcctgtgcctctataactgtcttagagatttcaggagaagaatatgagcggtttttacagagtggatcatgacccatgaagagcaccatgcagccaaaaccctggggattggcaaagccattgctgtcttaacctctggtggagatgcccaaggtatgaatgctgctgtcagggctgtggttcgagttggtatcttcaccggtgcccgtgtcttctttgtccatgagggttatcaaggcctggtggatggtggagatcacatcaaggaagccacctgggagagcgtttcgatgatgcttcagctgggaggcacggtgattggaagtgcccggtgcaaggactttcgggaacgagaaggacgactccgagctgcctacaacctggtgaagcgtgggatcaccaatctctgtgtcattgggggtgatggcagcctcactggggctgacaccttccgttctgagtggagtgacttgttgagtgacctccagaaagcaggtaagatcacagatgaggaggctacgaagtccagctacctgaacattgtgggcctggttgggtcaattgacaatgacttctgtggcaccgatatgaccattggcactgactctgccctgcatcggatcatggaaattgtagatgccatcactaccactgcccagagccaccagaggacatttgtgttagaagtaatgggccgccactgtggatacctggcccttgtcacctctctgtcctgtggggccgactgggtttttattcctgaatgtccaccagatgacgactgggaggaacacctttgtcgccgactcagcgagacaaggacccgtggttctcgtctcaacatcatcattgtggctgagggtgcaattgacaagaatggaaaaccaatcacctcagaagacatcaagaatggcagcaggatgggtgtggaagcagtgatggcacttttggaggggaccccagataccccagcctgtgtagtgagcctctctggtaaccaggctgtgcgcctgcccctcatggaatgtgtccaggtgaccaaagatgtgaccaaggccatggatgagaagaaatttgacgaagccctgaagctgagaggccggagcttcatgaacaactgggaggtgtacaagcttctagctcatgtcagacccccggtatctaagagtggttcgcacacagtggctgtgatgaacgtgggggctccggctgcaggcatgaatgctgctgttcgctccactgtgaggattggccttatccagggcaaccgagtgctcgttgtccatgatggtttcgagggcctggccaaggggcagatagaggaagctggctggagctatgttgggggctggactggccaaggtggctctaaacttgggactaaaaggactctacccaagaagagctttgaacagatcagtgccaatataactaagtttaacattcagggccttgtcatcattgggggctttgaggcttacacagggggcctggaactgatggagggcaggaagcagtttgatgagctctgcatcccatttgtggtcattcctgctacagtctccaacaatgtccctggctcagacttcagcgttggggctgacacagcactcaatactatctgcacaacctgtgaccgcatcaagcagtcagcagctggcaccaagcgtcgggtgtttatcattgagactatgggtggctactgtggctacctggctaccatggctggactggcagctggggccgatgctgcctacatttttgaggagcccttcaccattcgagacctgcaggcaaatgttgaacatctggtgcaaaagatgaaaacaactgtgaaaaggggcttggtgttaaggaatgaaaagtgcaatgagaactataccactgacttcattttcaacctgtactctgaggaggggaagggcatcttcgacagcaggaagaatgtgcttggtcacatgcagcagggtgggagcccaaccccatttgataggaattttgccactaagatgggcgccaaggctatgaactggatgtctgggaaaatcaaagagagttaccgtaatgggcggatctttgccaatactccagattcgggctgtgttctggggatgcgtaagagggctctggtcttccaaccagtggctgagctgaaggaccagacagattttgagcatcgaatccccaaggaacagtggtggctgaaactgaggcccatcctcaaaatcctagccaagtacgagattgacttggacacttcagaccatgcccacctggagcacatcacccggaagcggtccggggaagctgccgtctaaacctctctggagtgaggggaatagattacctgatcatggtcagctcacaccctaataagtccacatcttctcagtgttttagctgtttttttcattaggtttccttttattctgtaccttgcagccatgaccagttctggccaggagctggaggagcaggcagtgggtgggagctccttttaggtagaatttaacatgacttctgccccagctttatctgtcacacaaggctgggcacctctagtgctactgctagatatcacttactcagttagaattttcctaaaaataagctttatttatttctttgtgataacaaagagtcttggttcctctactacttttactacagtgacaaattgtaactacactaataaatgccaactggtcactgtg

SEQ ID NO: 165502 - DNA, 526 bp, Homo sapiens
  Payload ID: 12575
  Gene Symbol: PFKM
  Gene Name: phosphofructokinase, muscle
  ENST ID: ENST00000551339
  CDS Start-End: 108-526
aatctgcaagaaagcagcggcggaggagagctaagactaaaaggcaagaggggccattgagtgaagagcaagggggagagctgggagtgaggtgggaagagtggatcatgacccatgaagagcaccatgcagccaaaaccctggggattggcaaagccattgctgtcttaacctctggtggagatgcccaaggtatgaatgctgctgtcagggctgtggttcgagttggtatcttcaccggtgcccgtgtcttctttgtccatgagggttatcaaggcctggtggatggtggagatcacatcaaggaagccacctgggagagcgtttcgatgatgcttcagctgggaggcacggtgattggaagtgcccggtgcaaggactttcgggaacgagaaggacgactccgagctgcctacaacctggtgaagcgtgggatcaccaatctctgtgtcattgggggtgatggcagcctcactggggctgacaccttccgttctgagtggagtgacttgttgagtgacctcca

SEQ ID NO: 165503 - DNA, 689 bp, Homo sapiens
  Payload ID: 12575
  Gene Symbol: PFKM
  Gene Name: phosphofructokinase, muscle
  ENST ID: ENST00000551485
  CDS Start-End: 64-372
tttcccaaggacaatctgcaagaaagcagcggcggaggagagctaagactaaaagagtggatcatgacccatgaagagcaccatgcagccaaaaccctggggattggcaaagccattgctgtcttaacctctggtggagatgcccaaggtatgaatgctgctgtcagggctgtggttcgagttggtatcttcaccggtgcccgtgtcttctttgtccatgagggttatcaaggcctggtggatggtggagatcacatcaaggaagccacctgggagagcgtttcgatgatgcttcagctgctcagttccctaaaaatccatgggcaaaaatttaatatgcagtgtctagtgaaggctctacctaggtgctaagtaatggtgcctgccataaagtggtctgagaatgagccagaattctccaccagtatcccaaagtcatggctgcccaggagtacatatgatatgaaaacctaagtatacttacctctctcagggaggcacggtgattggaagtgcccggtgcaaggactttcgggaacgagaaggacgactccgagctgcctacaacctggtgaagcgtgggatcaccaatctctgtgtcattgggggtgatggcagcctcactggggctgacaccttccgttctgagtggagtgacttgttgagtgacctccagaaagcaggtaaga

SEQ ID NO: 165504 - DNA, 616 bp, Homo sapiens
  Payload ID: 12575
  Gene Symbol: PFKM
  Gene Name: phosphofructokinase, muscle
  ENST ID: ENST00000547066
  CDS Start-End: 152-373
agtggaggttgggaagcctctcctccttccccctccctctttgcctccacctggctcctccccatgttcgtccatcacccctcccccctttcccaaggacaatctgcaagaaagcagcggcggaggagagctaagactaaaagagtggatcatgacccatgaagagcaccatgcagccaaaaccctggggattggcaaagccattgctgtcttaacctctggtggagatgcccaagagatgggacgggatcggccaggtgcagtggctcacacctgtaatcccaggactttgggaggccgaggcgggcagatcacccgaggttgggagttcgagaccagcctgaccaacatggagaaaccccgtctctactaaaaatacaaaattagctgggcgtggtggtgcatgcctgtaatcccagccacttgggaggctgaggcaggagaatcgcttgaacccgggaggcagaggttgcggtatgaatgctgctgtcagggctgtggttcgagttggtatcttcaccggtgcccgtgtcttctttgtccatgagggttatcaaggcctggtggatggtggagatcacatcaaggaagccacctgggagagcgtttcgatgat

SEQ ID NO: 165505 - DNA, 626 bp, Homo sapiens
  Payload ID: 12575
  Gene Symbol: PFKM
  Gene Name: phosphofructokinase, muscle
  ENST ID: ENST00000552792
  CDS Start-End: 178-626
gaagaggagggggctggggcaggaggtcaaagaacagagttaaggaccagtggggcgcctgcgcggtgtggcgaggcccgagaagcgaagggagcatttaagactagtcgtaatttctcagtacccttttcagtctgggctttttcgctttctcgtactcggaatactgaggcagccatgcataaagacgagtttcatctgaaatttttcatgtgtgtgattcagtctcgccagttagtcaggactcctcagagaacagctggggaagcttctacttccagcatgctcataccaaagccaccaccaaagacagacatcttgaagagtctagatactatggatgatccagacaccgtgggaagcatacctgttttcaaaactgagtggatcatgacccatgaagagcaccatgcagccaaaaccctggggattggcaaagccattgctgtcttaacctctggtggagatgcccaaggtatgaatgctgctgtcagggctgtggttcgagttggtatcttcaccggtgcccgtgtcttctttgtccatgagggttatcaaggcctggtggatggtggagatcacatcaaggaagccacctgggagagcgtttcgatgatgcttcagct

SEQ ID NO: 165506 - DNA, 492 bp, Homo sapiens
  Payload ID: 12575
  Gene Symbol: PFKM
  Gene Name: phosphofructokinase, muscle
  ENST ID: ENST00000548345
  CDS Start-End: 25-492
gagctaagactaaaagagtggatcatgacccatgaagagcaccatgcagccaaaaccctggggattggcaaagccattgctgtcttaacctctggtggagatgcccaaggtatgaatgctgctgtcagggctgtggttcgagttggtatcttcaccggtgcccgtgtcttctttgtccatgagggttatcaaggcctggtggatggtggagatcacatcaaggaagccacctgggagagcgtttcgatgatgcttcagctgggaggcacggtgattggaagtgcccggtgcaaggactttcgggaacgagaaggacgactccgagctgcctacaacctggtgaagcgtgggatcaccaatctctgtgtcattgggggtgatggcagcctcactggggctgacaccttccgttctgagtggagtgacttgttgagtgacctccagaaagcagatgacgactgggaggaacacctttgtcgccgactcagcgag

SEQ ID NO: 165507 - DNA, 2867 bp, Homo sapiens
  Payload ID: 12575
  Gene Symbol: PFKM
  Gene Name: phosphofructokinase, muscle
  Uniprot ID: P08237
  ENST ID: ENST00000547587
  CDS Start-End: 129-2471
agacttggtatagtgggagagcctgactgaggtggctctagccagtctaattgccgttcctttagctagtggcatcttgattcctgctgtgtcttaactgaccattgtcttaaattctagagtggatcatgacccatgaagagcaccatgcagccaaaaccctggggattggcaaagccattgctgtcttaacctctggtggagatgcccaaggtatgaatgctgctgtcagggctgtggttcgagttggtatcttcaccggtgcccgtgtcttctttgtccatgagggttatcaaggcctggtggatggtggagatcacatcaaggaagccacctgggagagcgtttcgatgatgcttcagctgggaggcacggtgattggaagtgcccggtgcaaggactttcgggaacgagaaggacgactccgagctgcctacaacctggtgaagcgtgggatcaccaatctctgtgtcattgggggtgatggcagcctcactggggctgacaccttccgttctgagtggagtgacttgttgagtgacctccagaaagcaggtaagatcacagatgaggaggctacgaagtccagctacctgaacattgtgggcctggttgggtcaattgacaatgacttctgtggcaccgatatgaccattggcactgactctgccctgcatcggatcatggaaattgtagatgccatcactaccactgcccagagccaccagaggacatttgtgttagaagtaatgggccgccactgtggatacctggcccttgtcacctctctgtcctgtggggccgactgggtttttattcctgaatgtccaccagatgacgactgggaggaacacctttgtcgccgactcagcgagacaaggacccgtggttctcgtctcaacatcatcattgtggctgagggtgcaattgacaagaatggaaaaccaatcacctcagaagacatcaagaatctggtggttaagcgtctgggatatgacacccgggttactgtcttggggcatgtgcagaggggtgggacgccatcagcctttgacagaattctgggcagcaggatgggtgtggaagcagtgatggcacttttggaggggaccccagataccccagcctgtgtagtgagcctctctggtaaccaggctgtgcgcctgcccctcatggaatgtgtccaggtgaccaaagatgtgaccaaggccatggatgagaagaaatttgacgaagccctgaagctgagaggccggagcttcatgaacaactgggaggtgtacaagcttctagctcatgtcagacccccggtatctaagagtggttcgcacacagtggctgtgatgaacgtgggggctccggctgcaggcatgaatgctgctgttcgctccactgtgaggattggccttatccagggcaaccgagtgctcgttgtccatgatggtttcgagggcctggccaaggggcagatagaggaagctggctggagctatgttgggggctggactggccaaggtggctctaaacttgggactaaaaggactctacccaagaagagctttgaacagatcagtgccaatataactaagtttaacattcagggccttgtcatcattgggggctttgaggcttacacagggggcctggaactgatggagggcaggaagcagtttgatgagctctgcatcccatttgtggtcattcctgctacagtctccaacaatgtccctggctcagacttcagcgttggggctgacacagcactcaatactatctgcacaacctgtgaccgcatcaagcagtcagcagctggcaccaagcgtcgggtgtttatcattgagactatgggtggctactgtggctacctggctaccatggctggactggcagctggggccgatgctgcctacatttttgaggagcccttcaccattcgagacctgcaggcaaatgttgaacatctggtgcaaaagatgaaaacaactgtgaaaaggggcttggtgttaaggaatgaaaagtgcaatgagaactataccactgacttcattttcaacctgtactctgaggaggggaagggcatcttcgacagcaggaagaatgtgcttggtcacatgcagcagggtgggagcccaaccccatttgataggaattttgccactaagatgggcgccaaggctatgaactggatgtctgggaaaatcaaagagagttaccgtaatgggcggatctttgccaatactccagattcgggctgtgttctggggatgcgtaagagggctctggtcttccaaccagtggctgagctgaaggaccagacagattttgagcatcgaatccccaaggaacagtggtggctgaaactgaggcccatcctcaaaatcctagccaagtacgagattgacttggacacttcagaccatgcccacctggagcacatcacccggaagcggtccggggaagctgccgtctaaacctctctggagtgaggggaatagattacctgatcatggtcagctcacaccctaataagtccacatcttctcagtgttttagctgtttttttcattaggtttccttttattctgtaccttgcagccatgaccagttctggccaggagctggaggagcaggcagtgggtgggagctccttttaggtagaatttaacatgacttctgccccagctttatctgtcacacaaggctgggcacctctagtgctactgctagatatcacttactcagttagaattttcctaaaaataagctttatttatttctttgtgataacaaagagtcttggttcctctactacttttactacagtgacaaattgtaactacactaataaatgccaactggtcactgtg

SEQ ID NO: 165508 - DNA, 570 bp, Homo sapiens
  Payload ID: 12575
  Gene Symbol: PFKM
  Gene Name: phosphofructokinase, muscle
  ENST ID: ENST00000549366
  CDS Start-End: 76-570
acagcaccggaagagtcgctaggtggctgaagaggagggggctggggcaggaggtcaaagaacagagaggcagccatgcataaagacgagtttcatctgaaatttttcatgtgtgtgattcagtctcgccagttagtcaggactcctcagagaacagctggggaagcttctacttccagcatgctcataccaaagccaccaccaaagacagacatcttgaagagtctagatactatggatgatccagacaccgtgggaagcatacctgttttcaaaactgaatgtgcagaggtagagatacaagtaagcaagaggaagagggcagtggtaaaagcaagaggagacccgactgtggagacaatgaagcaaagggaagagtggatcatgacccatgaagagcaccatgcagccaaaaccctggggattggcaaagccattgctgtcttaacctctggtggagatgcccaaggtatgaatgctgctgtcagggctgtggttcgagttggtatcttcaccggtgcccgtgtcttctttgtccatgagggttatcaaggcctggtggatggtgga

SEQ ID NO: 165509 - DNA, 594 bp, Homo sapiens
  Payload ID: 12575
  Gene Symbol: PFKM
  Gene Name: phosphofructokinase, muscle
  ENST ID: ENST00000549003
  CDS Start-End: 245-594
tttctgatggtggcactagcgatatcacatctcagggagataccacagagtaggagagttggagaaatgtttacgtgagacgcagaagtagtcaagaaatatcactcgggtctcaaggaaggcgggagatgaagccggtaccacagaaagccgagcttcccggtgaaaacagctctccccagagaagacccagctctggcgggaaagccccggaatcgcaaccggcctttccccaaagtggatcatgacccatgaagagcaccatgcagccaaaaccctggggattggcaaagccattgctgtcttaacctctggtggagatgcccaaggtatgaatgctgctgtcagggctgtggttcgagttggtatcttcaccggtgcccgtgtcttctttgtccatgagggttatcaaggcctggtggatggtggagatcacatcaaggaagccacctgggagagcgtttcgatgatgcttcagctgggaggcacggtgattggaagtgcccggtgcaaggactttcgggaacgagaaggacgactccgagctgcctacaacctggtgaagcgtgggatcaccaatctctgtgtcattgg

SEQ ID NO: 165510 - DNA, 289 bp, Homo sapiens
  Payload ID: 12575
  Gene Symbol: PFKM
  Gene Name: phosphofructokinase, muscle
  ENST ID: ENST00000553055
  CDS Start-End: 1-289
cccatttgtggtcattcctgctacagtctccaacaatgtccctggctcagacttcagcgttggggctgacacagcactcaatactatctgcacagcaaatgttgaacatctggtgcaaaagatgaaaacaactgtgaaaaggggcttggtgttaaggaatgaaaagtgcaatgagaactataccactgacttcattttcaacctgtactctgaggaggggaagggcatcttcgacagcaggaagaatgtgcttggtcacatgcagcagggtgggagcccaaccccattt

SEQ ID NO: 165511 - DNA, 590 bp, Homo sapiens
  Payload ID: 12575
  Gene Symbol: PFKM
  Gene Name: phosphofructokinase, muscle
  ENST ID: ENST00000546755
  CDS Start-End: 215-590
accgccttcacagcaccggaagagtcgctaggtggctgaagaggagggggctggggcaggaggtcaaagaacagagttaaggaccagtggggcgcctgcgcggtgtggcgaggcccgagaagcgaagggagcatttaagactagtcgtaatttctcagtacccttttcagtctgggctttttcgctttctcgtactcggaatactgaggcagccatgcataaagacgagtttcatctgaaatttttcatgtgtgtgattcagtctcgccagttagtcaggactcctcagagaacagctggggaagcttctacttccagcatgctcataccaaagccaccaccaaagacagacatcttgaagagtctagatactatggatgatccagacaccgtgggaagcatacctgttttcaaaactgaatgtgcagaggtagagatacaagtaagcaagaggaagagggcagtggtaaaagcaagaggagacccgactgtggagacaatgaagcaaagggaagagtggatcatgacccatgaagagcaccatgcagccaaaaccctggggattggcaaagccattgctgtcttaacct

SEQ ID NO: 165512 - DNA, 762 bp, Homo sapiens
  Payload ID: 12575
  Gene Symbol: PFKM
  Gene Name: phosphofructokinase, muscle
  ENST ID: ENST00000550345
  CDS Start-End: 290-762
ggtagtagataaaaggctttatatgaatattacaagaatcaccaccactccaaatataataagtgtaccaaatatgaagtaaaatgactttaacaaggctgacttgaaagtgataaagaagcaagttactgctaacaagatagtggaaatactgcacaggcaccgataaacagaaatcaccaagctcaaggaaagagaaacgaggcatagatccagagatcacgttagggtacaccaagaaagagacggttcaagggaattaccaggaggcgatgagccagagtggatcatgacccatgaagagcaccatgcagccaaaaccctggggattggcaaagccattgctgtcttaacctctggtggagatgcccaaggtatgaatgctgctgtcagggctgtggttcgagttggtatcttcaccggtgcccgtgtcttctttgtccatgagggttatcaaggcctggtggatggtggagatcacatcaaggaagccacctgggagagcgtttcgatgatgcttcagctgggaggcacggtgattggaagtgcccggtgcaaggactttcgggaacgagaaggacgactccgagctgcctacaacctggtgaagcgtgggatcaccaatctctgtgtcattgggggtgatggcagcctcactggggctgacaccttccgttctgagtggagtgacttgttgagtgacctccagaaagcaggtaagatcacagatgaggaggctacgaagtccagctacctgaacat

SEQ ID NO: 165513 - DNA, 381 bp, Homo sapiens
  Payload ID: 12575
  Gene Symbol: PFKM
  Gene Name: phosphofructokinase, muscle
  ENST ID: ENST00000629846
  CDS Start-End: 73-381
cctcccccctttcccaaggacaatctgcaagaaagcagcggcggaggagagctaagactaaaagagtggatcatgacccatgaagagcaccatgcagccaaaaccctggggattggcaaagccattgctgtcttaacctctggtggagatgcccaaggtatgaatgctgctgtcagggctgtggttcgagttggtatcttcaccggtgcccgtgtcttctttgtccatgagggttatcaaggcctggtggatggtggagatcacatcaaggaagccacctgggagagcgtttcgatgatgcttcagctgctcagttccctaaaaatccatgggcaaaaatttaatatgcagtgtctagtgaaggctctacctaggtgctaa

SEQ ID NO: 165514 - DNA, 1698 bp, Homo sapiens
  Payload ID: 12576
  Gene Symbol: PFKP
  Gene Name: phosphofructokinase, platelet
  ENST ID: ENST00000381072
  CDS Start-End: 876-1484
gaactggatcagatttatgttttttatagatggggtcctttctgtgtgaacggattggagggtcccggggtgggagctgaggcccaggaagagggcgttgcagccggactgatgtatgggtgggaaggcggccgatgcatttctttgccatttttctccccgccgagcttgggtcctcatggagggcggatggcagacatttcactctgggatccgatgcctgtgcatctggaagacttccccaggtgcctgggtctaagaaccaccatctgcctttgagtagagtttccataaatgtaacattcgccaatggatggaagatggccgcacctctaaaatcacagggagcttttcagaagaaaatagaatagcacagcggttctcacggactaagctggcaggggacagtcccctaacatctcagctaacacctaacggtgtctgtgtccggtgaaagcggcttcagcagggacagtcacagagcagcgtggagtgagctggcttgtggggtcgtcttttccgtccccttctatggggcctgggagaagggagcggcagatggccaggcccccaaaacgggacatcgaggtcacctccaggtggctgccatggtggggttgcgggggaccacgttcacacccactccgagggcacatcctggctgctgcacacccttcacctctgcgggatgctgggaccgcatgtttgggcgcggtgggggggccttgctgcactcactcttgggggagctctgggatggtgggcgcgccccgggcctgggctggagtgactgatcgcttctctgtgaccagacctgcgaccgcatcaagcagtccgccagcggaaccaagcggcgcgtgttcatcatcgagaccatgggcggctactgtggctacctggccaacatgggggggctcgcggccggagctgatgccgcatacattttcgaagagcccttcgacatcagggatctgcagtccaacgtggagcacctgacggagaaaatgaagaccaccatccagagaggccttgtgctcagaaatgagagctgcagtgaaaactacaccaccgacttcatttaccagctgtattcagaagagggcaaaggcgtgtttgactgcaggaagaacgtgctgggtcacatgcagcagggtggggcaccctctccatttgatagaaactttggaaccaaaatctctgccagagctatggagtggatcactgcaaaactcaaggaggcccggggcagaggaaaaaaatttaccaccgatgattccatttgtgtgctgggaataagcaaaagaaacgttatttttcaacctgtggcagagctgaagaagcaaacggattttgagcacaggattcccaaagaacagtggtggctcaagctacggcccctcatgaaaatcctggccaagtacaaggccagctatgacgtgtcggactcaggccagctggaacatgtgcagccctggagtgtctgacccagtcccgcctgcatgtgcctgcagccaccgtggactgtctgtttttgtaacacttaagttattttatcagcactttatgcacgtattattgacattaatacctaatcggcgagtgcccatctgccccacctgctccagtgcgtgctgtctgtggagtgtgtctcatgctttcagatgtgcatatgagcagaattaattaaacatttgccta

SEQ ID NO: 165515 - DNA, 2769 bp, Homo sapiens
  Payload ID: 12576
  Gene Symbol: PFKP
  Gene Name: phosphofructokinase, platelet
  Uniprot ID: Q01813
  ENST ID: ENST00000381075
  CDS Start-End: 225-2555
atttaacattgaagagcggaaggtggcggagactcggcgcgccccaggccccgggtgcacgtgggggcgccggtgcccggatgatggagtgtcccgatccgtgcaatccctggcggggctgggttctcagagaaagaaaacgtgatgcagcagaggatgggattgaagaaacaggagagtgaagtggaaatagcctggcccgcgtgacttaaaccggcccggagatgtgcgggtatgaacgctgccgtccgtgccgtggtgcgcatgggtatctacgtgggggccaaggtgtacttcatctacgagggctaccagggcatggtggacggaggctcaaacatcgcagaggccgactgggagagtgtctccagcatcctgcaagtggtgctgtaaggggtgactggagggagaagcctggctgctggtcacaccgcttcccttgtcctggccggcatgctctggtgggcgggacgatcattggcagtgcgcggtgccaggccttccgcacgcgggaaggccgcctgaaggctgcttgcaacctgctgcagcgcggcatcaccaacctgtgtgtgatcggcggggacgggagcctcaccggggccaacctcttccggaaggagtggagtgggctgctggaggagctggccaggaacggccagatcgataaggaggccgtgcagaagtacgcctacctcaacgtggtgggcatggtgggctccatcgacaatgatttctgcggcaccgacatgaccatcggcacggactccgccctgcacaggatcatcgaggtcgtcgacgccatcatgaccacggcccagagccaccagaggaccttcgttctggaggtgatgggacgacactgtgggtacctggccctggtgagtgccttggcctgcggtgcggactgggtgttccttccagaatctccaccagaggaaggctgggaggagcagatgtgtgtcaaactctcggagaaccgtgcccggaaaaaaaggctgaatattattattgtggctgaaggagcaattgatacccaaaataaacccatcacctctgagaaaatcaaagagcttgtcgtcacgcagctgggctatgacacacgtgtgaccatcctcgggcacgtgcagagaggagggaccccttcggcattcgacaggatcttggccagccgcatgggagtggaggcagtcatcgccttgctagaggccaccccggacaccccagcttgcgtcgtgtcactgaacgggaaccacgccgtgcgcctgccgctgatggagtgcgtgcagatgactcaggatgtgcagaaggcgatggacgagaggagatttcaagatgcggttcgactccgagggaggagctttgcgggcaacctgaacacctacaagcgacttgccatcaagctgccggatgatcagatcccaaagaccaattgcaacgtagctgtcatcaacgtgggggcacccgcggctgggatgaacgcagccgtacgctcagctgtgcgcgtgggcattgccgacggccacaggatgctcgccatctatgatggctttgacggcttcgccaagggccagatcaaagaaatcggctggacagatgtcgggggctggaccggccaaggaggctccattcttgggacaaaacgcgttctcccggggaagtacttggaagagatcgccacacagatgcgcacgcacagcatcaacgcgctgctgatcatcggtggattcgaggcctacctgggactcctggagctgtcagccgcccgggagaagcacgaggagttctgtgtccccatggtcatggttcccgctactgtgtccaacaatgtgccgggttccgatttcagcatcggggcagacaccgccctgaacactatcaccgacacctgcgaccgcatcaagcagtccgccagcggaaccaagcggcgcgtgttcatcatcgagaccatgggcggctactgtggctacctggccaacatgggggggctcgcggccggagctgatgccgcatacattttcgaagagcccttcgacatcagggatctgcagtccaacgtggagcacctgacggagaaaatgaagaccaccatccagagaggccttgtgctcagaaatgagagctgcagtgaaaactacaccaccgacttcatttaccagctgtattcagaagagggcaaaggcgtgtttgactgcaggaagaacgtgctgggtcacatgcagcagggtggggcaccctctccatttgatagaaactttggaaccaaaatctctgccagagctatggagtggatcactgcaaaactcaaggaggcccggggcagaggaaaaaaatttaccaccgatgattccatttgtgtgctgggaataagcaaaagaaacgttatttttcaacctgtggcagagctgaagaagcaaacggattttgagcacaggattcccaaagaacagtggtggctcaagctacggcccctcatgaaaatcctggccaagtacaaggccagctatgacgtgtcggactcaggccagctggaacatgtgcagccctggagtgtctgacccagtcccgcctgcatgtgcctgcagccaccgtggactgtctgtttttgtaacacttaagttattttatcagcactttatgcacgtattattgacattaatacctaatcggcgagtgcccatctgccccacctgctccagtgcgtgctgtctgtggagtgtgtctcatgctttcagatgtgcatatgagcagaattaattaaacatttgccta

SEQ ID NO: 165516 - DNA, 2654 bp, Homo sapiens
  Payload ID: 12576
  Gene Symbol: PFKP
  Gene Name: phosphofructokinase, platelet
  Uniprot ID: Q01813
  ENST ID: ENST00000381125
  CDS Start-End: 77-2431
gagtcaggcgcgcgcgggcagggtccccattgcctgctgcgcacccggacgtgcggctcccctcggcctcctcgccatggacgcggacgactcccgggcccccaagggctccttgcggaagttcctggagcacctctccggggccggcaaggccatcggcgtgctgaccagcggcggggatgctcaaggtatgaacgctgccgtccgtgccgtggtgcgcatgggtatctacgtgggggccaaggtgtacttcatctacgagggctaccagggcatggtggacggaggctcaaacatcgcagaggccgactgggagagtgtctccagcatcctgcaagtgggcgggacgatcattggcagtgcgcggtgccaggccttccgcacgcgggaaggccgcctgaaggctgcttgcaacctgctgcagcgcggcatcaccaacctgtgtgtgatcggcggggacgggagcctcaccggggccaacctcttccggaaggagtggagtgggctgctggaggagctggccaggaacggccagatcgataaggaggccgtgcagaagtacgcctacctcaacgtggtgggcatggtgggctccatcgacaatgatttctgcggcaccgacatgaccatcggcacggactccgccctgcacaggatcatcgaggtcgtcgacgccatcatgaccacggcccagagccaccagaggaccttcgttctggaggtgatgggacgacactgtgggtacctggccctggtgagtgccttggcctgcggtgcggactgggtgttccttccagaatctccaccagaggaaggctgggaggagcagatgtgtgtcaaactctcggagaaccgtgcccggaaaaaaaggctgaatattattattgtggctgaaggagcaattgatacccaaaataaacccatcacctctgagaaaatcaaagagcttgtcgtcacgcagctgggctatgacacacgtgtgaccatcctcgggcacgtgcagagaggagggaccccttcggcattcgacaggatcttggccagccgcatgggagtggaggcagtcatcgccttgctagaggccaccccggacaccccagcttgcgtcgtgtcactgaacgggaaccacgccgtgcgcctgccgctgatggagtgcgtgcagatgactcaggatgtgcagaaggcgatggacgagaggagatttcaagatgcggttcgactccgagggaggagctttgcgggcaacctgaacacctacaagcgacttgccatcaagctgccggatgatcagatcccaaagaccaattgcaacgtagctgtcatcaacgtgggggcacccgcggctgggatgaacgcagccgtacgctcagctgtgcgcgtgggcattgccgacggccacaggatgctcgccatctatgatggctttgacggcttcgccaagggccagatcaaagaaatcggctggacagatgtcgggggctggaccggccaaggaggctccattcttgggacaaaacgcgttctcccggggaagtacttggaagagatcgccacacagatgcgcacgcacagcatcaacgcgctgctgatcatcggtggattcgaggcctacctgggactcctggagctgtcagccgcccgggagaagcacgaggagttctgtgtccccatggtcatggttcccgctactgtgtccaacaatgtgccgggttccgatttcagcatcggggcagacaccgccctgaacactatcaccgacacctgcgaccgcatcaagcagtccgccagcggaaccaagcggcgcgtgttcatcatcgagaccatgggcggctactgtggctacctggccaacatgggggggctcgcggccggagctgatgccgcatacattttcgaagagcccttcgacatcagggatctgcagtccaacgtggagcacctgacggagaaaatgaagaccaccatccagagaggccttgtgctcagaaatgagagctgcagtgaaaactacaccaccgacttcatttaccagctgtattcagaagagggcaaaggcgtgtttgactgcaggaagaacgtgctgggtcacatgcagcagggtggggcaccctctccatttgatagaaactttggaaccaaaatctctgccagagctatggagtggatcactgcaaaactcaaggaggcccggggcagaggaaaaaaatttaccaccgatgattccatttgtgtgctgggaataagcaaaagaaacgttatttttcaacctgtggcagagctgaagaagcaaacggattttgagcacaggattcccaaagaacagtggtggctcaagctacggcccctcatgaaaatcctggccaagtacaaggccagctatgacgtgtcggactcaggccagctggaacatgtgcagccctggagtgtctgacccagtcccgcctgcatgtgcctgcagccaccgtggactgtctgtttttgtaacacttaagttattttatcagcactttatgcacgtattattgacattaatacctaatcggcgagtgcccatctgccccacctgctccagtgcgtgctgtctgtggagtgtgtctcatgctttcagatgtgcatatgagcagaattaattaaacatttgcctatgactccaa

SEQ ID NO: 165517 - DNA, 705 bp, Homo sapiens
  Payload ID: 12576
  Gene Symbol: PFKP
  Gene Name: phosphofructokinase, platelet
  ENST ID: ENST00000407806
  CDS Start-End: 74-705
ttaaggaagttcacctccagatgtactcagagggcctggtcttagctgccacagatttacaaacccttacagtatgaacgctgccgtccgtgccgtggtgcgcatgggtatctacgtgggggccaaggtgtacttcatctacgagggctaccagggcatggtggacggaggctcaaacatcgcagaggccgactgggagagtgtctccagcatcctgcaagtgggcgggacgatcattggcagtgcgcggtgccaggccttccgcacgcgggaaggccgcctgaaggctgcttgcaacctgctgcagcgcggcatcaccaacctgtgtgtgatcggcggggacgggagcctcaccggggccaacctcttccggaaggagtggagtgggctgctggaggagctggccaggaacggccagatcgataaggaggccgtgcagaagtacgcctacctcaacgtggtgggcatggtgggctccatcgacaatgatttctgcggcaccgacatgaccatcggcacggactccgccctgcacaggatcatcgaggtcgtcgacgccatcatgaccacggcccagagccaccagaggaccttcgttctggaggtgatgggacgacactgtgggtacctggccctggtgagtgccttggcctgcggtgcggactgggtgttccttccagaatctccaccagaggaaggctggga

SEQ ID NO: 165518 - DNA, 496 bp, Homo sapiens
  Payload ID: 12576
  Gene Symbol: PFKP
  Gene Name: phosphofructokinase, platelet
  ENST ID: ENST00000413079
  CDS Start-End: 1-496
tgccgacggccacaggatgctcgccatctatgatggctttgacggcttcgccaagggccagatcaaagaaatcggctggacagatgtcgggggctggaccggccaaggaggctccattcttgggacaaaacgcgttctcccggggaagtacttggaagagatcgccacacagatgcgcacgcacagcatcaacgcgctgctgatcatcggtggattcgaggcttacaagagtgcgtgcgacatggccgaggcacgaggccgccaccaggagctttgcatccccctgtgtgtggtgccggccacgattagcaacaatgtcccaggcacagaaataagcctgggctccgacactggcctgaatgctgttgttgagacctgcgaccgcatcaagcagtccgccagcggaaccaagcggcgcgtgttcatcatcgagaccatgggcggctactgtggctacctggccaacatgggggggctcgcggccggagctgatgcc

SEQ ID NO: 165519 - DNA, 1140 bp, Homo sapiens
  Payload ID: 12576
  Gene Symbol: PFKP
  Gene Name: phosphofructokinase, platelet
  ENST ID: ENST00000415005
  CDS Start-End: 420-1140
gtttccgtgggagagatccagccgtggctgtcgacagcagctgccgactgtgcccaatagagaaggtatctgggaaagagcccagcacggggccggggagtgtgagtgtgtcctggcacaggcaggcagaaggtgtccaacgtgcaactggagagcgcagaggtggctcaagtccccttcctcgcaggagtctggaaggctactgcatagcgtttgccttagtagaaaatggaccatttttgaagcctaggtccctgcaggcctcctggctaactcggctgtcaaagccccttttctctgctttctgagctgtttccaggactgagtgggtgctccctctgtttctctgctttctgagctgtgtccggggctccctctgtttctcttccagccaccagaggaccttcgttctggaggtgatgggacgacactgtgggtacctggccctggtgagtgccttggcctgcggtgcggactgggtgttccttccagaatctccaccagaggaaggctgggaggagcagatgtgtgtcaaactctcggagaaccgtgcccggaaaaaaaggctgaatattattattgtggctgaaggagcaattgatacccaaaataaacccatcacctctgagaaaatcaaagagcttgtcgtcacgcagctgggctatgacacacgtgtgaccatcctcgggcacgtgcagagaggagggaccccttcggcattcgacaggatcttggccagccgcatgggagtggaggcagtcatcgccttgctagaggccaccccggacaccccagcttgcgtcgtgtcactgaacgggaaccacgccgtgcgcctgccgctgatggagtgcgtgcagatgactcaggatgtgcagaaggcgatggacgagaggagatttcaagatgcggttcgactccgagggaggagctttgcgggcaacctgaacacctacaagcgacttgccatcaagctgccggatgatcagatcccaaagaccaattgcaacgtagctgtcatcaacgtgggggcacccgcggctgggatgaacgcagccgtacgctcagctgtgcgcgtgggcattgccgacggccacaggatgctcgccatctatgatggctttgacggcttcgccaagggcc

SEQ ID NO: 165520 - DNA, 453 bp, Homo sapiens
  Payload ID: 12576
  Gene Symbol: PFKP
  Gene Name: phosphofructokinase, platelet
  ENST ID: ENST00000433193
  CDS Start-End: 1-311
acttcatttaccagctgtattcagaagagggcaaaggcgtgtttgactgcaggaagaacgtgctgggtcacatgcagcagggtggggcaccctctccatttgatagaaactttggaaccaaaatctctgccagagctatggagtggatcactgcaaaactcaaggaggcccggggcagaggaaaaaaatttaccaccgatgattccatttgtgtgctgggaataagcaaaagaaacgttatttttcaacctgtggcagagctgaagaagcaaacggattttgagacggtttccatgcagccgccgcggtgaactcccgtctggtggacactcccccagggcctcggtgtgatggagtttcctgaatcagcgcaggcagacgtgggacacccttgtgcaccttttcattttacttctgtttttaaataaaggccctaaatgctgcttaaaataa

SEQ ID NO: 165521 - DNA, 425 bp, Homo sapiens
  Payload ID: 12576
  Gene Symbol: PFKP
  Gene Name: phosphofructokinase, platelet
  ENST ID: ENST00000468050
  CDS Start-End: 71-425
gtggctgtcgacagcagctgccgactgtgcccaatagagaagccaccagaggaccttcgttctggaggtgatgggacgacactgtgggtacctggccctggtgagtgccttggcctgcggtgcggactgggtgttccttccagaatctccaccagaggaaggctgggaggagcagatgtgtgtcaaactctcggagaaccgtgcccggaaaaaaaggctgaatattattattgtggctgaaggagcaattgatacccaaaataaacccatcacctctgagaaaatcaaagagcttgtcgtcacgcagctgggctatgacacacgtgtgaccatcctcgggcacgtgcagagaggagggaccccttcggcattcgacaggatcttggccagccgcatgggagtggaggcagtcatcgccttgctag

SEQ ID NO: 165522 - DNA, 432 bp, Homo sapiens
  Payload ID: 12576
  Gene Symbol: PFKP
  Gene Name: phosphofructokinase, platelet
  ENST ID: ENST00000607886
  CDS Start-End: 93-432
gcttctatgggggctgccccctctcccatcgcagggtaactggcaccaggctgttaagctgtggatgggcaaccgcacagtgcattggatgtatgaacgctgccgtccgtgccgtggtgcgcatgggtatctacgtgggggccaaggtgtacttcatctacgagggctaccagggcatggtggacggaggctcaaacatcgcagaggccgactgggagagtgtctccagcatcctgcaagtgggcgggacgatcattggcagtgcgcggtgccaggccttccgcacgcgggaaggccgcctgaaggctgcttgcaacctgctgcagcgcggcatcaccaacctgtgtgtgatcggcggggacgggagcctcaccggggccaacctcttccggaaggagtggagtgggctgctggaggagctggccaggaacg

SEQ ID NO: 165523 - DNA, 4392 bp, Homo sapiens
  Payload ID: 12577
  Gene Symbol: PACS1
  Gene Name: phosphofurin acidic cluster sorting protein 1
  Uniprot ID: Q6VY07
  ENST ID: ENST00000320580
  CDS Start-End: 34-2925
cctcggcctccgtaacccccgcctagccgggccatggcggaacgcggaggggcgggcggtggtcccggaggcgccgggggcggcagcggccagcggggatccggggtcgcccagtcccctcagcagccgccgccgcagcagcagcagcagcagccgccgcagcagccgacgccccccaagctggcccaggccacctcgtcgtcctcgtccacctcggcggcggctgcctcctcctcgtcctcgtctacctccacctccatggccgtggcggtggcctcgggctccgcgcctcccggtggcccggggccaggccgcacccccgccccggtgcagatgaacctgtacgccacctgggaggtggaccggagctcgtccagctgcgtgcctaggctattcagcttgaccctgaagaaactcgtcatgctaaaagaaatggacaaagatcttaactcagtggtcatcgctgtgaagctgcagggttcaaaaagaattcttcgctccaacgagatcgtccttccagctagtggactggtggaaacagagctccaattaaccttctcccttcagtaccctcatttccttaagcgagatgccaacaagctgcagatcatgctgcaaaggagaaaacgttacaagaatcggaccatcttgggctataagaccttggccgtgggactcatcaacatggcagaggtgatgcagcatcctaatgaaggcgcactggtgcttggcctacacagcaacgtgaaggatgtctctgtgcctgtggcagaaataaagatctactccctgtccagccaacccattgaccatgaaggaatcaaatccaagctttctgatcgttctcctgatattgacaattattctgaggaagaggaagagagtttctcatcagaacaggaaggcagtgatgatccattgcatgggcaggacttgttctacgaagacgaagatctccggaaagtgaagaagacccggaggaaactaacctcaacctctgccatcacaaggcaacctaacatcaaacagaagtttgtggccctcctgaagcggtttaaagtttcagatgaggtgggctttgggctggagcatgtgtcccgcgagcagatccgggaagtggaagaggacttggatgaattgtatgacagtctggagatgtacaaccccagcgacagtggccctgagatggaggagacagaaagcatcctcagcacgccaaagcccaagctcaagcctttctttgaggggatgtcgcagtccagctcccagacggagattggcagcctcaacagcaaaggcagcctcggaaaagacaccaccagccctatggaattggctgctctagaaaaaattaaatctacttggattaaaaaccaagatgacagcttgactgaaacagacactctggaaatcactgaccaggacatgtttggagatgccagcacgagtctggttgtgccggagaaagtcaaaactcccatgaagtccagtaaaacggatctccagggctctgcctcccccagcaaagtggagggggtgcacacaccccggcagaagaggagcacgcccctgaaggagcggcagctctccaagcccctaagtgagaggaccaacagttccgacagcgagcgctccccagatctgggccacagcacgcagattccaagaaaggtggtgtatgaccagctcaatcagatcctggtgtcagatgcagccctcccagaaaatgtcattctggtgaacaccactgactggcagggccagtatgtggctgagctgctccaggaccagcggaagcctgtggtgtgcacctgctccaccgtggaggtccaggccgtgctgtccgccctgctcacccggatccagcgctactgcaactgcaactcttccatgccgaggccagtgaaggtggctgctgtgggaggccagagctacctgagctccatcctcaggttctttgtcaagtccctggccaacaagacctccgactggcttggctacatgcgcttcctcatcatccccctcggttctcaccctgtggccaaatacttggggtcagtcgacagtaaatacagtagttccttcctggattctggttggagagatctgttcagtcgctcggagccaccagtgtcagagcaactggacgtggcagggcgggtgatgcagtacgtcaacggggcagccacgacacaccagcttcccgtggccgaagccatgctgacttgccggcataagttccctgatgaagactcctatcagaagtttattcccttcattggcgtggtgaaggtgggtctggttgaagactctccctccacagcaggcgatggggacgattctcctgtggtcagccttactgtgccctccacatcaccaccctccagctcgggcctgagccgagacgccacggccacccctccctcctccccatctatgagcagcgccctggccatcgtggggagccctaatagcccatatggggacgtgattggcctccaggtggactactggctgggccaccccggggagcggaggagggaaggcgacaagagggacgccagctcgaagaacaccctcaagagtgtcttccgctcagtgcaggtgtcccgcctgccccatagtggggaggcccagctttctggcaccatggccatgactgtggtcaccaaagaaaagaacaagaaagttcccaccatcttcctgagcaagaaaccccgagaaaaggaggtggattctaagagccaggtcattgaaggcatcagccgcctcatctgctcagccaagcagcagcagactatgctgagagtgtccatcgatggggtcgagtggagtgacatcaagttcttccagctggcagcccagtggcccacccatgtcaagcactttccagtgggactcttcagtggcagcaaggccacctgaggccctgtctcccagccactttccctcctggcactgccaccagcctcaccgcctgcgggcagggggaggccagcaggcccgggcccagcaccccttccctggcaccagggtctgcctctcactcgcccaggtcccgaaggacactgccacagggacgccttccctcccctcccctccagcccacccctgcacagcccctcctccttcccgcttttccccttctccctcctgctccaggcccaaggcgtgttggttttgccttctggtgcccatagtcccctggactgagtcccccaggccttccttcacccgacttccaaactcttccttgtggtatcagtttccttctcggaaatgagaaagctggaatcctggtccccagcaggagagcctagtcctcccccagcccctccagccaccagggtgtcctctaggatgcagctgccagatccactcactctgctgcctccagcaggacccaaggccactttcaactcttatggggttctccacctgccccagagcttctcaagggagggtaagggggcaccctgagcccacaggacccctacttcacagctcacaggggcaggaggcagctcccctgcctccaggaccctgttgctatggtgacacagcgtttctaggacagaggggcctcccagtctccccccaccacccgtgcacgacttcctcaccacccccaggttccctgcagatgtcgtgtgtgtcctgagtgtttctttggttctttgcacgccaagtctcttggttgtaccatgtgacacaccctgtgcactggtcgctgtcttcgtggcttccacccttgttaatgatgctcctgcctctgcctcccagcccctcacccagcacagctctgcctggacttggagagatgggaggcagacccccaccaccatacatgctgtctgtggcccctcagacattctgtttcatctcccattcatctccctcctcccaccgtgtcagtttttctgcctttccctgctctgttcttccccctccttaggccccagcctgggcccagacccatcctcccagccaggtttccctccagcaggctccttccctccctgtcacctccctctcaccaacccggggtctgagcccctcattcctgaccgtccgtgttctcaggagtggttgaggacacagggccccagcccagccctctgcaccccccagcccggccatctgcgccccacagcccctttggagcttttctcttgtcctctcactccttcccagaagtttttgcacagaacttcattttgaaagtgtttttctcattctccatacctcccccaagctctcctccagcccttcccagggctcagccctgctgtcctgagcgtctcctgggccagagagaggagatgggggtgggagggactgagttgatgttgggtttttcattcaataaattggtgatttcttaccgactgc

SEQ ID NO: 165524 - DNA, 679 bp, Homo sapiens
  Payload ID: 12577
  Gene Symbol: PACS1
  Gene Name: phosphofurin acidic cluster sorting protein 1
  ENST ID: ENST00000529677
  CDS Start-End: 1-322
ggacgtgattggcctccaggtggactactggctgggccaccccggggagcggaggagggaaggcgacaagagggacgccagctcgaagaacaccctcaagagtgtcttccgctcagtgcaggtgtcccgcctgccccatagtggggaggcccagctttctggcaccatggccatgactgtggtcaccaaagaaaagaacaagaaagtgtccatcgatggggtcgagtggagtgacatcaagttcttccagctggcagcccagtggcccacccatgtcaagcactttccagtgggactcttcagtggcagcaaggccacctgaggccctgtctcccagccactttccctcctggcactgccaccagcctcaccgcctgcgggcagggggaggccagcaggcccgggcccagcaccccttccctggcaccagggtctgcctctcactcgcccaggtcccgaaggacactgccacagggacgccttccctcccctcccctccagcccacccctgcacagcccctcctccttcccgcttttccccttctccctcctgctccaggcccaaggcgtgttggttttgccttctggtgcccatagtcccctggactgagtcccccaggccttccttcacccgacttccaaactcttccttgtggtatcagtttccttctcggaaatg

SEQ ID NO: 165525 - DNA, 548 bp, Homo sapiens
  Payload ID: 12577
  Gene Symbol: PACS1
  Gene Name: phosphofurin acidic cluster sorting protein 1
  ENST ID: ENST00000527380
  CDS Start-End: 51-548
ctcaccgtgtgatgtctggcagctgatgccagctattagctgggacctccatgagaactgtggctggaacacctgttatggcctttccacgtggctgcttggcttcctcacggctattcagcttgaccctgaagaaactcgtcatgctaaaagaaatggacaaagatcttaactcagtggtcatcgctgtgaagctgcagggttcaaaaagaattcttcgctccaacgagatcgtccttccagctagtggactggtggaaacagagctccaattaaccttctcccttcagtaccctcatttccttaagcgagatgccaacaagctgcagatcatgctgcaaaggagaaaacgttacaagaatcggaccatcttgggctataagaccttggccgtgggactcatcaacatggcagaggtgatgcagcatcctaatgaaggcgcactggtgcttggcctacacagcaacgtgaaggatgtctctgtgcctgtggcagaaataaagatctactccctgtccagccaacccattgaccatgaaggaatcaaa

SEQ ID NO: 165526 - DNA, 1688 bp, Homo sapiens
  Payload ID: 12577
  Gene Symbol: PACS1
  Gene Name: phosphofurin acidic cluster sorting protein 1
  ENST ID: ENST00000529757
  CDS Start-End: 187-1686
gcgattttccttcggctgaggcaggagctttaggaccacttgctttcaggaaaagaaaatgagtaactctctcttcaggatggtgatggggcctggccagtccaaggaggctcctgggtggtcactgagtgggaggtcatcttcactgtttcctctcctccatggtaggaaatcactgaccaggacatgtttggagatgccagcacgagtctggttgtgccggagaaagtcaaaactcccatgaagtccagtaaaacggatctccagggctctgcctcccccagcaaagtggagggggtgcacacaccccggcagaagaggagcacgcccctgaaggagcggcagctctccaagcccctaagtgagaggaccaacagttccgacagcgagcgctccccagatctgggccacagcacgcagattccaagaaaggtggtgtatgaccagctcaatcagatcctggtgtcagatgcagccctcccagaaaatgtcattctggtgaacaccactgactggcagggccagtatgtggctgagctgctccaggaccagcggaagcctgtggtgtgcacctgctccaccgtggaggtccaggccgtgctgtccgccctgctcacccggatccagcgctactgcaactgcaactcttccatgccgaggccagtgaaggtggctgctgtgggaggccagagctacctgagctccatcctcaggttctttgtcaagtccctggccaacaagacctccgactggcttggctacatgcgcttcctcatcatccccctcggttctcaccctgtggccaaatacttggggtcagtcgacagtaaatacagtagttccttcctggattctggttggagagatctgttcagtcgctcggagccaccagtgtcagagcaactggacgtggcagggcgggtgatgcagtacgtcaacggggcagccacgacacaccagcttcccgtggccgaagccatgctgacttgccggcataagttccctgatgaagactcctatcagaagtttattcccttcattggcgtggtgaaggtgggtctggttgaagactctccctccacagcaggcgatggggacgattctcctgtggtcagccttactgtgccctccacatcaccaccctccagctcgggcctgagccgagacgccacggccacccctccctcctccccatctatgagcagcgccctggccatcgtggggagccctaatagcccatatggggacgtgattggcctccaggtggactactggctgggccaccccggggagcggaggagggaaggcgacaagagggacgccagctcgaagaacaccctcaagagtgtcttccgctcagtgcaggtgtcccgcctgccccatagtggggaggcccagctttctggcaccatggccatgactgtggtcaccaaagaaaagaacaagaaagttcccaccatcttcctgagcaagaaaccccgagaaaaggaggtggattctaagagccaggtcattgaaggcatcagccgcctcatctgctcagccaagcagcagcagactatgctgagagtgtccatcgatggggtcgagtggagtgacatcaagttcttccagctggcagcccagtggcccacccatgtcaagcactttccagtgggactcttcagtggcagcaaggccacctgagg

SEQ ID NO: 165527 - DNA, 628 bp, Homo sapiens
  Payload ID: 12577
  Gene Symbol: PACS1
  Gene Name: phosphofurin acidic cluster sorting protein 1
  ENST ID: ENST00000524815
  CDS Start-End: 315-590
tgcaggtcgggtggcaccagctgctgtcctgaggctgcactggagccgcccgcaggggcttctgccgggctcaggccttctctccagctcgaggctcagtttggcccaggctttgcctgctgggcgtgagccctaatagcccatatggggacgtgattggcctccaggtggactactggctgggccaccccggggagcggaggagggaaggcgacaagagggacgccagctcgaagaacaccctcaagagtgtcttccgctcagtgcaggtgtcccgcctgccccatagtggggaggcccagctttctggcaccatggccatgactgtggtcaccaaagaaaagaacaagaaagttcccaccatcttcctgagcaagaaaccccgagaaaaggaggtggattctaagagccaggtcattgaaggcatcagccgcctcatctgctcagccaagcagcagcagactatgctgagagtgtccatcgatggggtcgagtggagtgacatcaagttcttccagctggcagcccagtggcccacccatgtcaagcactttccagtgggactcttcagtggcagcaaggccacctgaggccctgtctcccagccactttccctcctggcactgcc

SEQ ID NO: 165528 - DNA, 617 bp, Homo sapiens
  Payload ID: 12577
  Gene Symbol: PACS1
  Gene Name: phosphofurin acidic cluster sorting protein 1
  ENST ID: ENST00000531597
  CDS Start-End: 388-617
ctttattctccccagctttgttctcagatcagcctgattctcctctcctacatgagctgctctgtgtggctggagggaacagagctgcagccttcctcagcctgccctcccggggactggcatggcccctaccccatcaggcctatgtagttgggagctgaaggcagagctgacctctcctctttgttccctttcctcaggagccctaatagcccatatggggacgtgattggcctccaggtggactactggctgggccaccccggggagcggaggagggaaggcgacaagagggacgccagctcgaagaacaccctcaagagtgtcttccgctcagtgcaggtgtcccgcctgccccatagtggggaggcccagctttctggcaccatggccatgactgtggtcaccaaagaaaagaacaagaaagttcccaccatcttcctgagcaagaaaccccgagaaaaggaggtggattctaagagccaggtcattgaaggcatcagccgcctcatctgctcagccaagcagcagcagactatgctgagagtgtccatcgatggggtcgagtggagtgacatcaagttcttccagctggcagcccagtggcccacccatgt

SEQ ID NO: 165529 - DNA, 540 bp, Homo sapiens
  Payload ID: 12577
  Gene Symbol: PACS1
  Gene Name: phosphofurin acidic cluster sorting protein 1
  ENST ID: ENST00000524784
  CDS Start-End: 1-270
tattctgaggaagaggaagagagtttctcatcagaacaggaaggcagtgatgatccattgcatgggcaggacttgttctacgaagacgaagatctccggaaagtgaagaagacccggaggaaactaacctcaacctctgccatcacaaggtgcagagctagcctagggaccaaacccctgagagccgagatgcccaccccttcagggatgaaacggaggccagatcactctcccatcacaatgaggtgtcactggacttcagcaacctaacatcaaacagaagtttgtggccctcctgaagcggtttaaagtttcagatgaggtgggctttgggctggagcatgtgtcccgcgagcagatccgggaagtggaagaggacttggatgaattgtatgacagtctggagatgtacaaccccagcgacagtggccctgagatggaggagacagaaagcatcctcagcacgccaaagcccaagctcaagcctttctttgaggggatgtcgcagtccagctcccagacggagattggcagcctcaa

SEQ ID NO: 165530 - DNA, 846 bp, Homo sapiens
  Payload ID: 12577
  Gene Symbol: PACS1
  Gene Name: phosphofurin acidic cluster sorting protein 1
  ENST ID: ENST00000528935
  CDS Start-End: 610-846
ctgtttctctgagcacctgctggccgccctctgcctctcccttcctggttcttacgctgctgcccctcctgccacccacaccgtttcccatccgcgaggcttgctgcacctccatcctctccacctgccctggcaggacaaccgctgtggctttgttcctcatctccatgtgtcctctaaggactcgctttgctgcttctttctcctcctttccatcgtggtctggccagtgggagactgagtctccctcccaaagtcctgatatctgttctctctaacacccctgctccagagactccccatgcaccagtccagcagccctgtcctcaggctccccagggactccctaacaagagacactttcttttgttcctgcagattccaagaaaggtggtgtatgaccagctcaatcagatcctggtgtcagatgcagccctcccagaaaatgtcattctggtgaacaccactgactggcagggccagtatgtggctgagctgctccaggaccagcggaagcctgtggtgtgcacctgctccaccgtggaggtccaggccgtgctgtccgccctgctcacccggatccagcgctactgcaactgcaactcttccatgccgaggccagtgaaggtggctgctgtgggaggccagagctacctgagctccatcctcaggttctttgtcaagtccctggccaacaagacctccgactggcttggctacatgcgcttcctcatcatccccctcggttctcaccctgtggccaaatacttggggtcagtcgacagtaaatacagtagttccttcctggattctggttggagagatctgttcagtcgctcggagcca

SEQ ID NO: 165531 - DNA, 578 bp, Homo sapiens
  Payload ID: 12577
  Gene Symbol: PACS1
  Gene Name: phosphofurin acidic cluster sorting protein 1
  ENST ID: ENST00000533756
  CDS Start-End: 259-578
agaccagtcactgcttggatactgaggagagagcagtgaacaaaacagacagaaattccagctcttgcggagcttaccttctggggacagggtgggcagcaggcagtagtgagtgagtgagcaaatattagggtgtgttggacgggaagaataaagctggatggggataagtgggcagaggaaagaggtcacggttttaaacaaggtggtctagaaagacctcagaaagcgagccggccacatggaacacacatttagatgctgcattttttacagattgaagatttgtggcaaccctacgttgagctattcagcttgaccctgaagaaactcgtcatgctaaaagaaatggacaaagatcttaactcagtggtcatcgctgtgaagctgcagggttcaaaaagaattcttcgctccaacgagatcgtccttccagctagtggactggtggaaacagagctccaattaaccttctcccttcagtaccctcatttccttaagcgagatgccaacaagctgcagatcatgctgcaaaggagaaaacgttacaagaatcggaccatcttgggctataagac

SEQ ID NO: 165532 - DNA, 547 bp, Homo sapiens
  Payload ID: 12577
  Gene Symbol: PACS1
  Gene Name: phosphofurin acidic cluster sorting protein 1
  ENST ID: ENST00000531298
  CDS Start-End: 1-356
aaataaagatctactccctgtccagccaacccattgaccatgaaggaatcaaatccaagctttctgatcgttctcctgatattgacaattattctgaggaagaggaagagagtttctcatcagaacaggaaggcagtgatgatccattgcatgggcaggacttgttctacgaagacgaagatctccggaaagtgaagaagacccggaggaaactaacctcaacctctgccatcacaaggctgcacccaaggcccaggagctacactggaatttggcctgtcttcctgacaggctttgagtgccaagggcagagaccaagtcctccagtcttcgtgtcttcccacagctcgtcatgaaagtgggctctggtgggtgtttattgacttgaattgaccccaagtggacgttgctgagaactgtcatgcgatttgtccctacagcaacctaacatcaaacagaagtttgtggccctcctgaagcggtttaaagtttcagatgaggtgggctttgggctggagcatgtgtcccgcgagcagatccgggaagt

SEQ ID NO: 165533 - DNA, 3708 bp, Homo sapiens
  Payload ID: 12578
  Gene Symbol: PACS2
  Gene Name: phosphofurin acidic cluster sorting protein 2
  Uniprot ID: Q86VP3
  ENST ID: ENST00000325438
  CDS Start-End: 505-3174
ggtggacccccacgactctcccggcccttgcccgcggctcccggggggcggggcggggcgccccgggcggggtctgtgcgcaggcgcgtgagtgcgcgctctcgcgcaccggcgggcggggacgccccgtgaggcgccgccggaggaagcgcgcgcgcacctcacttccggcgcgcgctgcgccggcggcgattggacccgaggcggcgagctggcgccccgcccagccaatcggcggcgccggcgcgggtcggagggcgccgggcgcgcgcggggcggccgggggcgcgcggggcgcgggcggggcgccgggcggggcggggcggagcggccgcagctcgtcgccgcccgcgggcctgtccgacgccggggcccggcccgtcccctccgccgcccggcagccatgtgaccgcgccgccgccctccgcgcgcccggcccgcccgccgcgcgtccgcggcccggccgcagccccaggccgccgagggagcggcggggccggcgccatggccgagcgaggccgcctcggcctccccggcgcgcccggcgcgctcaacacgcccgtgcccatgaacctgttcgccacctgggaggtggacggctccagccccagctgcgtgcccaggttgtgcagcctgactctgaagaagctggtggtcttcaaggagctggagaaggagctgatctccgtggtgatcgctgtcaagatgcagggctccaaacgaatcctgcggtcccatgagattgtgctgccccccagtggacaagtggagacagacctggccctgaccttctccttgcagtatcctcacttcttgaagagggaaggcaacaagcttcagatcatgctgcagcgcagaaagcgctacaagaacagaaccatcctgggctacaagacgctggccgcgggctccatcagcatggctgaggtgatgcaacacccgtctgaaggtggccaggtgctgagcctctgcagcagcatcaaggaggcccccgtcaaggcggccgagatctggatcgcctccctgtccagccagcccattgaccacgaagacagcaccatgcaggccggccccaaggccaagtccacggataactactccgaggaggagtatgagagcttctcctccgagcaggaggccagtgacgacgccgtgcaggggcaggacttggacgaggacgactttgacgtggggaagccgaagaagcagcggagatcgattgtaagaacgacgtccatgaccaggcaacagaacttcaagcagaaagtggtagcgctgctgcggaggttcaaagtgtccgacgaggtcctggactcggagcaggaccctgcggagcacatccccgaggcagaggaggacctggacctcctgtatgacaccctggacatggagcaccccagcgacagcggccccgacatggaggatgacgacagcgtcctcagcacccccaagccgaagctgcggccatactttgaaggcctgtcgcactcgagctcgcagacggagattgggagcatccacagcgcccgcagccacaaggagcccccaagcccggctgacgtgcccgagaagacgcggtccctgggaggcaggcagccgagcgacagtgtctctgacacggtggccctcggtgtgccaggcccgagggagcaccctggacagcctgaggacagccccgaggctgaggcctccaccctggatgtgttcacggagaggctgccgcccagcgggaggatcaccaagacagagtcccttgtcatcccctccaccaggtccgaggggaagcaggctggccgacggggccggagcacatccttgaaggagcggcaggcagcacggccccagaatgagcgggccaacagcctggacaacgagcgctgcccggacgcccggagccagctacagatccccaggaagactgtgtatgaccagctcaaccacatcctcatctccgatgaccagcttcccgaaaacatcatccttgtcaacacctcggactggcaggggcagttcctctccgacgtcctgcagaggcacacgctccccgtggtgtgcacgtgctctcctgcggacgtccaggcggccttcagcaccatcgtctcacggatacagagatactgcaactgcaattcccagcccccgacccccgtgaagatcgccgtggcgggagcgcagcattacctcagtgccatcctgcggctctttgtggagcagctgtcccacaagacacccgactggctcggctacatgcgcttcctggtcatcccactgggctcccaccccgtggccaggtacctaggctccgtggactaccgctacaacaacttcttccaggacctggcctggagagacctgttcaacaagctggaggcccagagtgcggtacaggacacgccagacattgtgtcacgcatcacgcagtacatcgcaggggccaactgtgcccaccagctccccatcgcagaggccatgctgacctacaagcagaagagccctgacgaagagtcctcccaaaagttcattccctttgtcggggttgtgaaggttggaattgtggagccatcctcggccacatcaggcgactcggacgacgcggccccctcgggctctggcacgctctcctccaccccgccgtccgcatctcctgcggccaaggaggcctcacccaccccgccctcctccccgtcggtgagcggaggcctgtcctcccccagccagggtgtcggcgccgagctgatggggctgcaggtggactactggacggcagcacagcctgcggacaggaagagggacgccgagaagaaggacctgcctgtcaccaaaaacacgctcaagtgcactttccggtccctccaggtcagcaggctgcccagcagcggcgaggctgcagccacgcccaccatgtccatgaccgtggtcaccaaggagaagaacaagaaggtgatgtttctgcccaagaaagcgaaggacaaggacgtggagtctaagagccagtgcattgagggcatcagccggctcatctgcactgccaggcagcagcagaacatgctgcgggtcctcatcgacggcgtggagtgcagcgacgtcaagttcttccagctggccgcgcagtggtcctcgcacgtgaagcacttccccatctgcatcttcggacactccaaggccaccttctagccccacccaccagggggcccacctcctgccccatgctgtgaggggcccagctgcatttctgttaacatttcagtttactacagagacagacgcttaaaacacaaagagaaacagtcttaagtatgaatgtgctcacaacgtggaaactaacgggggagctcctgccaggagccgaataactgctctgcttattaacccgaacgttcggcccggggctgggaagccagaaggacgatgctgagccatggatcgcggaaggcgtcctctggcctcaggagccacccagagcctcacaggctgagttcttgcctctgtgtcctgtccttcctggaagtcaggactctgcttcctcagggagcccggggaaggcggagctcagtggccacaggccgagggccatggggccgctcagtcccgttggggttgtcctgagttgagcctgggggggccgtcctgcccgcctaagagatgcccccagcaccgcacactcgtggttcccaataaactcctgcctgcggcggaggttttatagca

SEQ ID NO: 165534 - DNA, 2944 bp, Homo sapiens
  Payload ID: 12578
  Gene Symbol: PACS2
  Gene Name: phosphofurin acidic cluster sorting protein 2
  Uniprot ID: Q86VP3
  ENST ID: ENST00000430725
  CDS Start-End: 500-2944
cgtccccgcgcgccgcgtccagctcgatgtccgtgccgccgcaaccgcggcacacgcggcccgtcatgccggcgaccgcgcgggcagcgcccggagcctcccaagactctcaagccacccgagcctccggagcagcccgcgccgcccgcccaggcccagccgcccaggcctcgccgctctcgcgaggccccgctccagccgattcgcagccgcagattcgccgcgcgcgcccgggccgcgccgcccgcaacggccgcgcccgcgggatgggacaggcaccgggaccacggcggggacgcgaggactggagccgcgacctccccactgcgagcgagctggcctcccttgcggcgcgccggcgtcggaggggcgacctgcgggggctgggcttcggcggaacccgagcggggcctaccggttgtgcagcctgactctgaagaagctggtggtcttcaaggagctggagaaggagctgatctccgtggtgatcgctgtcaagatgcagggctccaaacgaatcctgcggtcccatgagattgtgctgccccccagtggacaagtggagacagacctggccctgaccttctccttgcagtatcctcacttcttgaagagggaaggcaacaagcttcagatcatgctgcagcgcagaaagcgctacaagaacagaaccatcctgggctacaagacgctggccgcgggctccatcagcatggctgaggtgatgcaacacccgtctgaaggtggccaggtgctgagcctctgcagcagcatcaaggaggcccccgtcaaggcggccgagatctggatcgcctccctgtccagccagcccattgaccacgaagacagcaccatgcaggccggccccaaggccaagtccacggataactactccgaggaggagtatgagagcttctcctccgagcaggaggccagtgacgacgccgtgcaggggcaggacttggacgaggacgactttgacgtggggaagccgaagaagcagcggagatcgattcaacagaacttcaagcagaaagtggtagcgctgctgcggaggttcaaagtgtccgacgaggtcctggactcggagcaggaccctgcggagcacatccccgaggcagaggaggacctggacctcctgtatgacaccctggacatggagcaccccagcgacagcggccccgacatggaggatgacgacagcgtcctcagcacccccaagccgaagctgcggccatactttgaaggcctgtcgcactcgagctcgcagacggagattgggagcatccacagcgcccgcagccacaaggagcccccaagcccggctgacgtgcccgagaagacgcggtccctgggaggcaggcagccgagcgacagtgtctctgacacggtggccctcggtgtgccaggcccgagggagcaccctggacagcctgaggacagccccgaggctgaggcctccaccctggatgtgttcacggagaggctgccgcccagcgggaggatcaccaagacagagtcccttgtcatcccctccaccaggtccgaggggaagcaggctggccgacggggccggagcacatccttgaaggagcggcaggcagcacggccccagaatgagcgggccaacagcctggacaacgagcgctgcccggacgcccggagccagctacagatccccaggaagactgtgtatgaccagctcaaccacatcctcatctccgatgaccagcttcccgaaaacatcatccttgtcaacacctcggactggcaggggcagttcctctccgacgtcctgcagaggcacacgctccccgtggtgtgcacgtgctctcctgcggacgtccaggcggccttcagcaccatcgtctcacggatacagagatactgcaactgcaattcccagcccccgacccccgtgaagatcgccgtggcgggagcgcagcattacctcagtgccatcctgcggctctttgtggagcagctgtcccacaagacacccgactggctcggctacatgcgcttcctggtcatcccactgggctcccaccccgtggccaggtacctaggctccgtggactaccgctacaacaacttcttccaggacctggcctggagagacctgttcaacaagctggaggcccagagtgcggtacaggacacgccagacattgtgtcacgcatcacgcagtacatcgcaggggccaactgtgcccaccagctccccatcgcagaggccatgctgacctacaagcagaagagccctgacgaagagtcctcccaaaagttcattccctttgtcggggttgtgaaggttggaattgtggagccatcctcggccacatcaggcgactcggacgacgcggccccctcgggctctggcacgctctcctccaccccgccgtccgcatctcctgcggccaaggaggcctcacccaccccgccctcctccccgtcggtgagcggaggcctgtcctcccccagccagggtgtcggcgccgagctgatggggctgcaggtggactactggacggcagcacagcctgcggacaggaagagggacgccgagaagaaggacctgcctgtcaccaaaaacacgctcaagtgcactttccggtccctccaggtcagcaggctgcccagcagcggcgaggctgcagccacgcccaccatgtccatgaccgtggtcaccaaggagaagaacaagaaggtgatgtttctgcccaagaaagcgaaggacaaggacgtggagtctaagagccagtgcattgagggcatcagccggctcatctgcactgccaggcagcagcagaacatgctgcgggtcctcatcgacggcgtggagtgcagcgacgtcaagttcttccagctggccgcgcagtggtcctcgcacgtgaagcacttccccatctgcatcttcggacactccaaggccaccttctag

SEQ ID NO: 165535 - DNA, 6365 bp, Homo sapiens
  Payload ID: 12578
  Gene Symbol: PACS2
  Gene Name: phosphofurin acidic cluster sorting protein 2
  Uniprot ID: Q86VP3
  ENST ID: ENST00000447393
  CDS Start-End: 176-2890
ggccgcagctcgtcgccgcccgcgggcctgtccgacgccggggcccggcccgtcccctccgccgcccggcagccatgtgaccgcgccgccgccctccgcgcgcccggcccgcccgccgcgcgtccgcggcccggccgcagccccaggccgccgagggagcggcggggccggcgccatggccgagcgaggccgcctcggcctccccggcgcgcccggcgcgctcaacacgcccgtgcccatgaacctgttcgccacctgggaggtggacggctccagccccagctgcgtgcccaggttgtgcagcctgactctgaagaagctggtggtcttcaaggagctggagaaggagctgatctccgtggtgatcgctgtcaagatgcagggctccaaacgaatcctgcggtcccatgagattgtgctgccccccagtggacaagtggagacagacctggccctgaccttctccttgcagtatcctcacttcttgaagagggaaggcaacaagcttcagatcatgctgcagcgcagaaagcgctacaagaacagaaccatcctgggctacaagacgctggccgcgggctccatcagcatggctgaggtgatgcaacacccgtctgaaggtggccaggtgctgagcctctgcagcagcatcaaggaggcccccgtcaaggcggccgagatctggatcgcctccctgtccagccagcccattgaccacgaagacagcaccatgcaggccggccccaaggccaagtccacggataactactccgaggaggagtatgagagcttctcctccgagcaggaggccagtgacgacgccgtgcaggggcaggacttggacgaggacgactttgacgtggggaagccgaagaagcagcggagatcgattgtaagaacgacgtccatgaccaggcaacagaacttcaagcagaaagtggtagcgctgctgcggaggttcaaagtgtccgacgaggtcctggactcggagcaggaccctgcggagcacatccccgaggcagaggaggacctggacctcctgtatgacaccctggacatggagcaccccagcgacagcggccccgacatggaggatgacgacagcgtcctcagcacccccaagccgaagctgcggccatactttgaaggcctgtcgcactcgagctcgcagacggagattgggagcatccacagcgcccgcagccacaaggagcccccaagcccggctgacgtgcccgagaagacgcggtccctgggaggcaggcagccgagcgacagtgtctctgacacggtggccctcggtgtgccaggcccgagggagcaccctggacagcctgaggacagccccgaggctgaggcctccaccctggatgtgttcacggagaggctgccgcccagcgggaggatcaccaagacagagtcccttgtcatcccctccaccaggtccgaggggaagcaggctggccgacggggccggagcacatccttgaaggagcggcaggcagcacggccccagaatgagcgggccaacagcctggacaacgagcgctgcccggacgcccggagccagctacaggtgcagctgcagatccccaggaagactgtgtatgaccagctcaaccacatcctcatctccgatgaccagcttcccgaaaacatcatccttgtcaacacctcggactggcaggggcagttcctctccgacgtcctgcagaggcacacgctccccgtggtgtgcacgtgctctcctgcggacgtccaggcggccttcagcaccatcgtctcacggatacagagatactgcaactgcaattcccagcccccgacccccgtgaagatcgccgtggcgggagcgcagcattacctcagtgccatcctgcggctctttgtggagcagctgtcccacaagacacccgactggctcggctacatgcgcttcctggtcatcccactgggctcccaccccgtggccaggtacctaggctccgtggactaccgctacaacaacttcttccaggacctggcctggagagacctgttcaacaagctggaggcccagagtgcggtacaggacacgccagacattgtgtcacgcatcacgcagtacatcgcaggggccaactgtgcccaccagctccccatcgcagaggccatgctgacctacaagcagaagaggaaaaagcattttcattttgactttaccctaagccctgacgaagagtcctcccaaaagttcattccctttgtcggggttgtgaaggttggaattgtggagccatcctcggccacatcaggcgactcggacgacgcggccccctcgggctctggcacgctctcctccaccccgccgtccgcatctcctgcggccaaggaggcctcacccaccccgccctcctccccgtcggtgagcggaggcctgtcctcccccagccagggtgtcggcgccgagctgatggggctgcaggtggactactggacggcagcacagcctgcggacaggaagagggacgccgagaagaaggacctgcctgtcaccaaaaacacgctcaagtgcactttccggtccctccaggtcagcaggctgcccagcagcggcgaggctgcagccacgcccaccatgtccatgaccgtggtcaccaaggagaagaacaagaaggtgatgtttctgcccaagaaagcgaaggacaaggacgtggagtctaagagccagtgcattgagggcatcagccggctcatctgcactgccaggcagcagcagaacatgctgcgggtcctcatcgacggcgtggagtgcagcgacgtcaagttcttccagctggccgcgcagtggtcctcgcacgtgaagcacttccccatctgcatcttcggacactccaaggccaccttctagccccacccaccagggggcccacctcctgccccatgctgtgaggggcccagctgcatttctgttaacatttcagtttactacagagacagacgcttaaaacacaaagagaaacagtcttaagtatgaatgtgctcacaacgtggaaactaacgggggagctcctgccaggagccgaataactgctctgcttattaacccgaacgttcggcccggggctgggaagccagaaggacgatgctgagccatggatcgcggaaggcgtcctctggcctcaggagccacccagagcctcacaggctgagttcttgcctctgtgtcctgtccttcctggaagtcaggactctgcttcctcagggagcccggggaaggcggagctcagtggccacaggccgagggccatggggccgctcagtcccgttggggttgtcctgagttgagcctgggggggccgtcctgcccgcctaagagatgcccccagcaccgcacactcgtggttcccaataaactcctgcctgcggcggaggttttatagcagcagatatttttaatgcttttcaatacatgttctaatgtagctgccaaacatgttgctcttctgaagtccccctggggctgggcagagccagcagagcctgcccccacttccccagcccctgccccaccccgcctcacaccttccccactctcaggctgttcttgaaacaccatgaggcttctgcgtgtagtccctgccccaaacttagcaagcacaggggcctccacagcccaggtggccccagaaaatgttccagagcccagcttggtacatagtgagatgctgctggggttggcctgaggtgggggccacttcctccaccccagtgggtatgtctgaggtcagccatggggatatctgggttgagattcaggttttggtgaatatggggcaggcgtccagatgtgtttgtgtcacctgctgcaacgctgtagccaatgaagattccagcgggatggcctgaccagcggggccggcactttggagccgtgggtgcagccaggtaccccgtgcagggcctgggaggctctccaggccacagtcctcagagcgtgttgggtcccatgttgtgtgtgggttccatgccctccacacagcaggagagggcttccctgaccacacctgccccctcagtcctgcttctccccagtaagcctgcactgtggggtctccataggaggagctggggaagctggggccctcccaggggtcctgatcgaccctgggggctcttggcctggtttcgtaagatggagcactgcaaaaggccatgctcagaaagcaaacgcagggcagggtgggcctcgagccggggctggaggggtctccacccttgctggcctgagagatggcccacatttcttacttgtgaccgccctgctcttcctggccgccccccccaggtggctgaacagggtgattttgttgtggtgaggggccaggatgtggcctggtgtgcagcctcagctccctgggttcaggcctcagaggtagcctgtgtgcaggaggcagagccccagcccctcccagccagagcccctccacaccagggactcctccttcacctgggaccaggagcctggggcacaccccagggtgggggagagggtaggaaggtctcccattgaatcctggcttcaggctctgccccgagaagtgtctgcggtgagggtgtgagccccgggctgatggcctctgaccccggcaacaggtgggaccctgactgactcgttcagctgcccccaagctgggctgcagagcatctgtttttctgctctccagtttcttttctttttttttttttttttttttgagatggagtcttgctctgttgcccaggctggagtgcagtggcatgatctcagctcactgcagcctccgtctcccaggttcaagcagttctcctgcctcagcctcccgagtagctgggattacaggcgtgtgccaccacacctggctattttttttgtatttttagtagagatggggttttgccatgttggccaggctggtcttgaactcctgacctcaagtgatccacccgcctcggcctcccaaagtgctgggattacaggcgtgagtcaccgcgtcctgcctgctcttcctgtttctttcccaagggtcacactcagtagggagatgaaggtggaaacatccttgctgtggctttctggcctcagagcaggttttagaggaaggggccacaggctgcctagtgcatcctggctgtgggcagcccctttcctggagccctcctgcctaccccgtacctcccatctggctgcacagctccatccttagccacgcaaggggagaacatgggcagagtctccatccagcagctgggggttctggtggcactccctgtgcccctgctgctgctgggctgtgggtctgccctgcacccaggagccccacggtccatcccccacaccatgcccagcaccagggaggttgggcagacaagacctgggccatgccagccctctgtgcctcggttttcccactggttacacaggatggtcgcattttccctgcctacctcacagagctgttctgagggtgcatggaggagcactctgtcccaccaaggacaactagaaaccaaagccatctgacagccagtgcggtaagggcgggggatgtgtgtgtgaggtgtgcacaccccccgagaacctggccctggactggcctcacaggacaggaggcagccccttgtagagctagggctcagccccatcagtctcaaaggttaagccaccagtcaccaccgaggcacccctcaggcctggtggccactgtccactattacgtagacagaccccaccctcacccaggccagctgtgggccagtcccgccctgcaatctggtctgctgccttcctcttccatgttggtccccttggccactgtctctgggcatgcaagccagtgtcctggttcagtgcctcggccagagctggggcaggagaggggcctctgggtgagagctgggggtgtctctgcagggtactggcagccttgccacactgtcctcattcccagatggaaagacctgagtgcctctcgccttcctccgggaatgaattcctcatgaaaatgaccaggccacttcttccgagggccaggccgccccctccccgagacctgtcctgccgtccgcgggtgtgtggcctgtaggggactgagagctgggcttgctgggcacctctggaatctgaccctgtgggccaaagaagcaccactgtagtttctgcagacccccatgcggttcattgtgcattgtttggtttctaggatgtatgtgttgctagttttttttaatgaaaccctggattaatgtaaatagctttttggggaacggattctaatgtcacgtatgtgaccgtgtggactatttcaaggtgctgatgcaacactaataaacctggaggggccggc

SEQ ID NO: 165536 - DNA, 576 bp, Homo sapiens
  Payload ID: 12578
  Gene Symbol: PACS2
  Gene Name: phosphofurin acidic cluster sorting protein 2
  ENST ID: ENST00000546915
  CDS Start-End: 317-576
aagcacaggatgcagcccagcagtggtggcaccgtggagtggctgggcggaagagatcctggtccacgctgctgtctggagggcagggtcctcaggtgaccagagtccgtgcaggagcgagtgaggacagggctggggcaggcggcaggatgaggccgcccagagcaactcagtgagtgaatgagtgaaagcacgcacgccccatgctccagcggggccagagtgtgctgttgggttgtgcagcctgactctgaagaagctggtggtcttcaaggagctggagaaggagctgatctccgtggtgatcgctgtcaagatgcagggctccaaacgaatcctgcggtcccatgagattgtgctgccccccagtggacaagtggagacagacctggccctgaccttctccttgcagtatcctcacttcttgaagagggaaggcaacaagcttcagatcatgctgcagcgcagaaagcgctacaagaacagaaccatcctgggctacaagacgctggccgcgggctccatcagcatggctgaggtgatgcaacacccgtctgaaggtggccaggtgctgag

SEQ ID NO: 165537 - DNA, 2809 bp, Homo sapiens
  Payload ID: 12578
  Gene Symbol: PACS2
  Gene Name: phosphofurin acidic cluster sorting protein 2
  ENST ID: ENST00000547217
  CDS Start-End: 33-2612
caggccgccgagggagcggcggggccggcgccatggccgagcgaggccgcctcggcctccccggcgcgcccggcgcgctcaacacgcccgtgcccatgaacctgttcgccacctgggaggtggacggctccagccccagctgcgtgcccaggttgtgcagcctgactctgaagaagctggtggtcttcaaggagctggagaaggagctgatctccgtggtgatcgctgtcaagatgcagtatcctcacttcttgaagagggaaggcaacaagcttcagatcatgctgcagcgcagaaagcgctacaagaacagaaccatcctgggctacaagacgctggccgcgggctccatcagcatggctgaggtgatgcaacacccgtctgaaggtggccaggtgctgagcctctgcagcagcatcaaggaggcccccgtcaaggcggccgagatctggatcgcctccctgtccagccagcccattgaccacgaagacagcaccatgcaggccggccccaaggccaagtccacggataactactccgaggaggagtatgagagcttctcctccgagcaggaggccagtgacgacgccgtgcaggggcaggacttggacgaggacgactttgacgtggggaagccgaagaagcagcggagatcgattgtaagaacgacgtccatgaccaggcaacagaacttcaagcagaaagtggtagcgctgctgcggaggttcaaagtgtccgacgaggtcctggactcggagcaggaccctgcggagcacatccccgaggcagaggaggacctggacctcctgtatgacaccctggacatggagcaccccagcgacagcggccccgacatggaggatgacgacagcgtcctcagcacccccaagccgaagctgcggccatactttgaaggcctgtcgcactcgagctcgcagacggagattgggagcatccacagcgcccgcagccacaaggagcccccaagcccggctgacgtgcccgagaagacgcggtccctgggaggcaggcagccgagcgacagtgtctctgacacggtggccctcggtgtgccaggcccgagggagcaccctggacagcctgaggacagccccgaggctgaggcctccaccctggatgtgttcacggagaggctgccgcccagcgggaggatcaccaagacagagtcccttgtcatcccctccaccaggtccgaggggaagcaggctggccgacggggccggagcacatccttgaaggagcggcaggcagcacggccccagaatgagcgggccaacagcctggacaacgagcgctgcccggacgcccggagccagctacagatccccaggaagactgtgtatgaccagctcaaccacatcctcatctccgatgaccagcttcccgaaaacatcatccttgtcaacacctcggactggcaggggcagttcctctccgacgtcctgcagaggcacacgctccccgtggtgtgcacgtgctctcctgcggacgtccaggcggccttcagcaccatcgtctcacggatacagagatactgcaactgcaattcccagcccccgacccccgtgaagatcgccgtggcgggagcgcagcattacctcagtgccatcctgcggctctttgtggagcagctgtcccacaagacacccgactggctcggctacatgcgcttcctggtcatcccactgggctcccaccccgtggccaggtacctaggctccgtggactaccgctacaacaacttcttccaggacctggcctggagagacctgttcaacaagctggaggcccagagtgcggtacaggacacgccagacattgtgtcacgcatcacgcagtacatcgcaggggccaactgtgcccaccagctccccatcgcagaggccatgctgacctacaagcagaagagccctgacgaagagtcctcccaaaagttcattccctttgtcggggttgtgaaggttggaattgtggagccatcctcggccacatcaggcgactcggacgacgcggccccctcgggctctggcacgctctcctccaccccgccgtccgcatctcctgcggccaaggaggcctcacccaccccgccctcctccccgtcggtgagcggaggcctgtcctcccccagccagggtgtcggcgccgagctgatggggctgcaggtggactactggacggcagcacagcctgcggacaggaagagggacgccgagaagaaggacctgcctgtcaccaaaaacacgctcaagtgcactttccggtccctccaggtcagcaggctgcccagcagcggcgaggctgcagccacgcccaccatgtccatgaccgtggtcaccaaggagaagaacaagaaggtgatgtttctgcccaagaaagcgaaggacaaggacgtggagtctaagagccagtgcattgagggcatcagccggctcatctgcactgccaggcagcagcagaacatgctgcgggtcctcatcgacggcgtggagtgcagcgacgtcaagttcttccagctggccgcgcagtggtcctcgcacgtgaagcacttccccatctgcatcttcggacactccaaggccaccttctagccccacccaccagggggcccacctcctgccccatgctgtgaggggcccagctgcatttctgttaacatttcagtttactacagagacagacgcttaaaacacaaagagaaacagtcttaagtatgaatgtgctcacaacgtggaaactaacgggggagctcctgccaggagccgaataactgctctgcttattaacc

SEQ ID NO: 165538 - DNA, 2657 bp, Homo sapiens
  Payload ID: 12579
  Gene Symbol: PGM1
  Gene Name: phosphoglucomutase 1
  Uniprot ID: P36871
  ENST ID: ENST00000371083
  CDS Start-End: 369-2111
tgtttacagctgaagttggctgcatgcagcactccttggagctatctctaccctaacggggaaatgagacaaaaataattgaagggtatttggcttggttaagtgggcagaagtgtcctcatcaaaacaactttgaagacctgctttgtgtgtgggtgcgagtgggtgtgtggcccttaacttgttcacaagggacaacaacaacaaggaattaaccaagctttctcattgagagtgatcgtccatgcaaaccctctattttagttactcatacgacactgttgcagcttcaggttggacagacctattttggagtcccttgactgctttctggacaccctcactgagccagtcggtggaagtgaaggatgagtgattttgaagaatggatttctgggacatatagaaaaatggaagaaggtcctctccctctgttgacttttgctacagctccctaccacgatcagaaaccaggaacaagtggattacggaagaaaacctattattttgaggaaaagccatgctatctggagaatttcatccagagtatattcttttccatagacctaaaagatcgccagggatcatcactggtggttggtggagatgggcggtactttaataaatcagcaatagaaacaatagtgcagatggcagctgccaatgggatcggtcgcttggttatcggacagaatggaatcctctccacccctgctgtatcctgcatcattagaaaaatcaaagccattggtgggatcattctgacagccagtcacaacccagggggccccaatggagattttggaatcaaattcaatatttctaatggaggtcctgctccagaagcaataactgataaaattttccaaatcagcaagacaattgaagaatatgcagtttgccctgacctgaaagtagaccttggtgttctgggaaagcagcagtttgacttggaaaataagttcaaacccttcacagtggaaattgtggattcggtagaagcttatgctacaatgctgagaagcatctttgatttcagtgcactgaaagaactactttctgggccaaaccgactgaagatccgtattgatgctatgcatggagttgtgggaccgtatgtaaagaagatcctctgtgaagaactcggtgcccctgcgaactcggcagttaactgcgttcctctggaggactttggaggccaccaccctgaccccaacctcacctatgcagctgacctggtggagaccatgaagtcaggagagcatgattttggggctgcctttgatggagatggggatcgaaacatgattctgggcaagcatgggttctttgtgaacccttcagactctgtggctgtcattgctgccaacatcttcagcattccgtatttccagcagactggggtccgcggctttgcacggagcatgcccacgagtggtgctctggaccgggtggctagtgctacaaagattgctttgtatgagaccccaactggctggaagttttttgggaatttgatggacgcgagcaaactgtccctttgtggggaggagagcttcgggaccggttctgaccacatccgtgagaaagatggactgtgggctgtccttgcctggctctccatcctagccacccgcaagcagagtgtggaggacattctcaaagatcattggcaaaagtatggccggaatttcttcaccaggtatgattacgaggaggtggaagctgagggcgcaaacaaaatgatgaaggacttggaggccctgatgtttgatcgctcctttgtggggaagcagttctcagcaaatgacaaagtttacactgtggagaaggccgataactttgaatacagcgacccagtggatggaagcatttcaagaaatcagggcttgcgcctcattttcacagatggttctcgaatcgtcttccgactgagcggcactgggagtgccggggccaccattcggctgtacatcgatagctatgagaaggacgttgccaagattaaccaggacccccaggtcatgttggccccccttatttccattgctctgaaagtgtcccagctgcaggagaggacgggacgcactgcacccactgtcatcacctaagaagacaggcctgatgtggtacgtccctccacccccggacccatccaagtcatctgattgaagagcatgacagaaacaaaatgtattcaccaagcattttaggatttgactttttcactaaccagttgacgagcagtgcatttacaaggcactgccaaacaagatgcccttgggagctgtgagggaaagaggacctgcgggcttagatcaatctcaattccttttcatgccctcctgcattgctgctgcgtgggtatttgtctccttagccatcaggtacagtttacactacaatgtaagctataggtggagcatcagcagtgagtgaggccattcttcatccttaggatgtggcaatgaaatgatggtgcaagttcctttctcttttgtgaatctttccccccatttcctgtttacatgtaacccaacaaaatgcaatttctagtgccttctgtccaatcagttctttcctctgagtgagacgtacttggctacagatttctgccttgttttgcgacattgtcccattcacacagatattttggg

SEQ ID NO: 165539 - DNA, 2472 bp, Homo sapiens
  Payload ID: 12579
  Gene Symbol: PGM1
  Gene Name: phosphoglucomutase 1
  Uniprot ID: P36871
  ENST ID: ENST00000371084
  CDS Start-End: 214-1902
cctttcccctcccgccggacctgccaggaggtgggctggcgcggagggagggccctgtcccctgtccctttaaggaggagggccaaacgccggcctagagtgcggcgtagcccccacccgccgtgccctcaccccagagcagctgcagcctcagccggccgcccctccgccagccaagtccgccgctctgacccccggcagcaagtcgccaccatggtgaagatcgtgacagttaagacccaggcgtaccaggaccagaagccgggcacgagcgggctgcggaagcgggtgaaggtgttccagagcagcgccaactacgcggagaacttcatccagagtatcatctccaccgtggagccggcgcagcggcaggaggccacgctggtggtgggcggggacggccggttctacatgaaggaggccatccagctcatcgctcgcatcgctgccgccaacgggatcggtcgcttggttatcggacagaatggaatcctctccacccctgctgtatcctgcatcattagaaaaatcaaagccattggtgggatcattctgacagccagtcacaacccagggggccccaatggagattttggaatcaaattcaatatttctaatggaggtcctgctccagaagcaataactgataaaattttccaaatcagcaagacaattgaagaatatgcagtttgccctgacctgaaagtagaccttggtgttctgggaaagcagcagtttgacttggaaaataagttcaaacccttcacagtggaaattgtggattcggtagaagcttatgctacaatgctgagaagcatctttgatttcagtgcactgaaagaactactttctgggccaaaccgactgaagatccgtattgatgctatgcatggagttgtgggaccgtatgtaaagaagatcctctgtgaagaactcggtgcccctgcgaactcggcagttaactgcgttcctctggaggactttggaggccaccaccctgaccccaacctcacctatgcagctgacctggtggagaccatgaagtcaggagagcatgattttggggctgcctttgatggagatggggatcgaaacatgattctgggcaagcatgggttctttgtgaacccttcagactctgtggctgtcattgctgccaacatcttcagcattccgtatttccagcagactggggtccgcggctttgcacggagcatgcccacgagtggtgctctggaccgggtggctagtgctacaaagattgctttgtatgagaccccaactggctggaagttttttgggaatttgatggacgcgagcaaactgtccctttgtggggaggagagcttcgggaccggttctgaccacatccgtgagaaagatggactgtgggctgtccttgcctggctctccatcctagccacccgcaagcagagtgtggaggacattctcaaagatcattggcaaaagtatggccggaatttcttcaccaggtatgattacgaggaggtggaagctgagggcgcaaacaaaatgatgaaggacttggaggccctgatgtttgatcgctcctttgtggggaagcagttctcagcaaatgacaaagtttacactgtggagaaggccgataactttgaatacagcgacccagtggatggaagcatttcaagaaatcagggcttgcgcctcattttcacagatggttctcgaatcgtcttccgactgagcggcactgggagtgccggggccaccattcggctgtacatcgatagctatgagaaggacgttgccaagattaaccaggacccccaggtcatgttggccccccttatttccattgctctgaaagtgtcccagctgcaggagaggacgggacgcactgcacccactgtcatcacctaagaagacaggcctgatgtggtacgtccctccacccccggacccatccaagtcatctgattgaagagcatgacagaaacaaaatgtattcaccaagcattttaggatttgactttttcactaaccagttgacgagcagtgcatttacaaggcactgccaaacaagatgcccttgggagctgtgagggaaagaggacctgcgggcttagatcaatctcaattccttttcatgccctcctgcattgctgctgcgtgggtatttgtctccttagccatcaggtacagtttacactacaatgtaagctataggtggagcatcagcagtgagtgaggccattcttcatccttaggatgtggcaatgaaatgatggtgcaagttcctttctcttttgtgaatctttccccccatttcctgtttacatgtaacccaacaaaatgcaatttctagtgccttctgtccaatcagttctttcctctgagtgagacgtacttggctacagatttctgccttgttttgcgacattgtcccattcacacagatattttgggataataaaggaaaataagctacaa

SEQ ID NO: 165540 - DNA, 2345 bp, Homo sapiens
  Payload ID: 12579
  Gene Symbol: PGM1
  Gene Name: phosphoglucomutase 1
  Uniprot ID: P36871
  ENST ID: ENST00000540265
  CDS Start-End: 682-1779
gctcggggccggccgcttccgcgcgctgccgcctcggtttccacctcccgctcctccctctccttcgcgctcgctcttctggcctggaggcccgacggaggtcgccgggctggggaaagtggccacgggacccggcagacctgctcgcctgactcccggggcgccgggaggtgcgggcgcggagcctcccaaggtcacgcccgactctccgtctctagccgctgccttccctctccccgtcccccgcccctcccgaggcgtctgacatttgccctaaccttgcagccttggaagatacgattacggcgcagagtgctgtcgccttaagcaggaaagatcggtcgcttggttatcggacagaatggaatcctctccacccctgctgtatcctgcatcattagaaaaatcaaagccattggtgggatcattctgacagccagtcacaacccagggggccccaatggagattttggaatcaaattcaatatttctaatggaggtcctgctccagaagcaataactgataaaattttccaaatcagcaagacaattgaagaatatgcagtttgccctgacctgaaagtagaccttggtgttctgggaaagcagcagtttgacttggaaaataagttcaaacccttcacagtggaaattgtggattcggtagaagcttatgctacaatgctgagaagcatctttgatttcagtgcactgaaagaactactttctgggccaaaccgactgaagatccgtattgatgctatgcatggagttgtgggaccgtatgtaaagaagatcctctgtgaagaactcggtgcccctgcgaactcggcagttaactgcgttcctctggaggactttggaggccaccaccctgaccccaacctcacctatgcagctgacctggtggagaccatgaagtcaggagagcatgattttggggctgcctttgatggagatggggatcgaaacatgattctgggcaagcatgggttctttgtgaacccttcagactctgtggctgtcattgctgccaacatcttcagcattccgtatttccagcagactggggtccgcggctttgcacggagcatgcccacgagtggtgctctggaccgggtggctagtgctacaaagattgctttgtatgagaccccaactggctggaagttttttgggaatttgatggacgcgagcaaactgtccctttgtggggaggagagcttcgggaccggttctgaccacatccgtgagaaagatggactgtgggctgtccttgcctggctctccatcctagccacccgcaagcagagtgtggaggacattctcaaagatcattggcaaaagtatggccggaatttcttcaccaggtatgattacgaggaggtggaagctgagggcgcaaacaaaatgatgaaggacttggaggccctgatgtttgatcgctcctttgtggggaagcagttctcagcaaatgacaaagtttacactgtggagaaggccgataactttgaatacagcgacccagtggatggaagcatttcaagaaatcagggcttgcgcctcattttcacagatggttctcgaatcgtcttccgactgagcggcactgggagtgccggggccaccattcggctgtacatcgatagctatgagaaggacgttgccaagattaaccaggacccccaggtcatgttggccccccttatttccattgctctgaaagtgtcccagctgcaggagaggacgggacgcactgcacccactgtcatcacctaagaagacaggcctgatgtggtacgtccctccacccccggacccatccaagtcatctgattgaagagcatgacagaaacaaaatgtattcaccaagcattttaggatttgactttttcactaaccagttgacgagcagtgcatttacaaggcactgccaaacaagatgcccttgggagctgtgagggaaagaggacctgcgggcttagatcaatctcaattccttttcatgccctcctgcattgctgctgcgtgggtatttgtctccttagccatcaggtacagtttacactacaatgtaagctataggtggagcatcagcagtgagtgaggccattcttcatccttaggatgtggcaatgaaatgatggtgcaagttcctttctcttttgtgaatctttccccccatttcctgtttacatgtaacccaacaaaatgcaatttctagtgccttctgtccaatcagttctttcctctgagtgagacgtacttggctacagatttctgccttgttttgcgacattgtcccattcacacagatattttgggataataaaggaaaataagct

SEQ ID NO: 165541 - DNA, 3264 bp, Homo sapiens
  Payload ID: 12580
  Gene Symbol: PGM2
  Gene Name: phosphoglucomutase 2
  Uniprot ID: Q96G03
  ENST ID: ENST00000381967
  CDS Start-End: 101-1939
ggctctccccgcccccgcctccgcctccacgtcttggggccgggccggaaggcagatctcaccgcctgcttccctctgcagcggtagcacaagctcagcgatggcggctccagaaggcagcggtctaggcgaggacgcccggctggaccaggagaccgcccagtggctgcgctgggacaagaattccttaactttggaggcagtgaaacgactaatagcagaaggtaataaagaagaactacgaaaatgttttggggcccgaatggagtttgggacagctggcctccgagctgctatgggacctggaatttctcgtatgaatgacttgaccatcatccagactacacagggattttgcagatacctggaaaaacaattcagtgacttaaagcagaaaggcatcgtgatcagttttgacgcccgagctcatccatccagtgggggtagcagcagaaggtttgcccgacttgctgcaaccacatttatcagtcaggggattcctgtgtacctcttttctgatataacgccaaccccctttgtgcccttcacagtatcacatttgaaactttgtgctggaatcatgataactgcatctcacaatccaaagcaggataatggttataaggtctattgggataatggagctcagatcatttctcctcacgataaagggatttctcaagctattgaagaaaatctagaaccgtggcctcaagcttgggacgattctttaattgatagcagtccacttctccacaatccgagtgcttccatcaataatgactactttgaagaccttaaaaagtactgtttccacaggagcgtgaacagggagacaaaggtgaagtttgtgcacacctctgtccatggggtgggtcatagctttgtgcagtcagctttcaaggcttttgaccttgttcctcctgaggctgttcctgaacagaaagatccggatcctgagtttccaacagtgaaatacccgaatcccgaagaggggaaaggtgtcttgactttgtcttttgctttggctgacaaaaccaaggccagaattgttttagctaacgacccggatgctgatagacttgctgtggcagaaaagcaagacagtggtgaatggagggtgttttcaggcaatgagttgggggccctcctgggctggtggctttttacatcttggaaagagaagaaccaggatcgcagtgctctcaaagacacgtacatgttgtccagcaccgtctcctccaaaatcttgcgggccattgccttaaaggaaggttttcattttgaggaaacattaactggctttaagtggatgggaaacagagccaaacagctaatagaccaggggaaaactgttttatttgcatttgaagaagctattggatacatgtgctgcccttttgttctggacaaagatggagtcagtgccgctgtcataagtgcagagttggctagcttcctagcaaccaagaatttgtctttgtctcagcaactaaaggccatttatgtggagtatggctaccatattactaaagcttcctattttatctgccatgatcaagaaaccattaagaaattatttgaaaacctcagaaactacgatggaaaaaataattatccaaaagcttgtggcaaatttgaaatttctgccattagggaccttacaactggctatgatgatagccaacctgataaaaaagctgttcttcccactagtaaaagcagccaaatgatcaccttcacctttgctaatggaggcgtggccaccatgcgcaccagtgggacagagcccaaaatcaagtactatgcagagctgtgtgccccacctgggaacagtgatcctgagcagctgaagaaggaactgaatgaactggtcagtgctattgaagaacattttttccagccacagaagtacaatctgcagccaaaagcagactaaaatagtccagccttgggtatacttgcatttacctacaattaagctgggtttaacttgttaagcaatatttttaagggccaaatgattcaaaacatcacaggtatttatgtgttttacaaagacctacattcctcattgtttcatgtttgacctttaaggtgaaaaaagaaaatggccaaacccaacaaactaacattcctactaaaaagttgagcttggacatattttgaatttttgtaagtgaagatttttaaactgactaacttaaaaaaatagattgtaattgatgtgccttaatttgcataaatcataaatgtatgtcctctctgtaattgttttaatgtgtgcttgaaatatccagaaaacctatggagttagtaaattctgggctgtcatatgtaggatagccactttttaggtatatgtacatttatatttctatcaattccttagaaagtaaaataaatgaatagatcaaatgttgtgttcatgtttggggaaaatataatttgcagaaacctatgaagtagagcaaagatgctttaaaaagataagtttttttgaactaaattttttttagttctaataatgcacataggatattagtacatcgtacacgtgctaggaaaaaacagcttcagtgtctttgtttaatgtgttgaaactcatctttttaaatcttgaaaaaccaattgtttacttgaaacttgaaagtagcatatttttctgttttttggttgtttgttcatttgtattagcacaatttaatgtaattcctggtttggaggcagcaagacctatgagcaagaactatttacttgaccctcgtttttttctcttgttcttgtgtggtctgaaatctaaaactagactttattatgatagatttcctataagccaatttctaataacaaatagatttattatttaatctgtaccttctatcttctcataattcgtggtcttacagccttccaaaataactccagttgggcacccatgagctaggatcaaactttctttatatactttatatattttacattatttctgatttttaaagcaaatgattgccattatgattacactcaacctaaatagttatgaacagtttcagaacaatgaaaaattacaatactatgtgatagtattgtaactatttttctattttagtcatatgtcgcttatatcctaccagaactcttaaatctataatattcgatatattctacaaactgctttattgtagaagccatatttatgtttattttataatgttttctagtgtcaaactgtactgtggagaaaagaaatgttagatctgt

SEQ ID NO: 165542 - DNA, 511 bp, Homo sapiens
  Payload ID: 12580
  Gene Symbol: PGM2
  Gene Name: phosphoglucomutase 2
  ENST ID: ENST00000510084
  CDS Start-End: 1-180
tacatgttgtccagcaccgtctcctccaaaatcttgcgggccattgccttaaaggaaggttttcattttgaggaaacattaactggctttaagtggatgggaaacagagccaaacagctaatagaccaggggaaaactgttttatttgcatttgaagaagctattggttcttcccactagtaaaagcagccaaatgatcaccttcacctttgctaatggaggcgtggccaccatgcgcaccagtgggacagagcccaaaatcaagtactatgcagagctgtgtgccccacctgggaacagtgatcctgagcagctgaagaaggaactgaatgaactggtcagtgctattgaagaacattttttccagccacagaagtacaatctgcagccaaaagcagactaaaatagtccagccttgggtatacttgcatttacctacaattaagctgggtttaacttgttaagcaatatttttaagggccaaatgattcaaaacatcacaggtatttat

SEQ ID NO: 165543 - DNA, 1646 bp, Homo sapiens
  Payload ID: 12580
  Gene Symbol: PGM2
  Gene Name: phosphoglucomutase 2
  ENST ID: ENST00000505986
  CDS Start-End: 15-602
gcacaagctcagcgatggcggctccagaaggcagcggtctaggcgaggacgcccggctggaccaggagaccgcccagtggctgcgctgggacaagaattccttaactttggaggcagtgaaacgactaatagcagaaggtaataaagaagaactacgaaaatgttttggggcccgaatggagtttgggacagctggcctccgagctgctatgggacctggaatttctcgtatgaatgacttgaccatcatccagactacacagggattttgcagatacctggaaaaacaattcagtgacttaaagcagaaaggcatcgtgatcagttttgacgcccgagctcatccatccagtgggggtagcagcagaaggtttgcccgacttgctgcaaccacatttatcagtcaggggattcctgtgtacctcttttctgatataacgccaaccccctttgtggtagaagcattgaaagcattggaatggaggcttagaccatcgttgtgtttgaagaattttctagctctaccaagtagaagatggaatgagaaggcactgaggaaattactcacctttcttattaggaaatacatcctggaattatgagcagccagttaattctaaggcccttcacagtatcacatttgaaactttgtgctggaatcatgataactgcatctcacaatccaaagcaggataatggttataaggtctattgggataatggagctcagatcatttctcctcacgataaagggatttctcaagctattgaagaaaatctagaaccgtggcctcaagcttgggacgattctttaattgatagcagtccacttctccacaatccgagtgcttccatcaataatgactactttgaagaccttaaaaagtactgtttccacaggagcgtgaacagggagacaaaggtgaagtttgtgcacacctctgtccatggggtgggtcatagctttgtgcagtcagctttcaaggcttttgaccttgttcctcctgaggctgttcctgaacagaaagatccggatcctgagtttccaacagtgaaatacccgaatcccgaagaggggaaaggtgtcttgactttgtcttttgctttggctgacaaaaccaaggccagaattgttttagctaacgacccggatgctgatagacttgctgtggcagaaaagcaagacagtggtgaatggagggtgttttcaggcaatgagttgggggccctcctgggctggtggctttttacatcttggaaagagaagaaccaggatcgcagtgctctcaaagacacgtacatgttgtccagcaccgtctcctccaaaatcttgcgggccattgccttaaaggaaggttttcattttgaggaaacattaactggctttaagtggatgggaaacagagccaaacagctaatagaccaggggaaaactgttttatttgcatttgaagaagctattggtaagaagtgatcatgaacattaaggaattggctgcaaggcaaaaggaaaaggtttggattgggattcaaagatccacagtgaaacacggtttattttgcctctccagcactcaggttgaatgtcgaactgtcctactccaaaattgacatctcagatgatttacagccaaaaggaatgtctt

SEQ ID NO: 165544 - DNA, 2050 bp, Homo sapiens
  Payload ID: 12580
  Gene Symbol: PGM2
  Gene Name: phosphoglucomutase 2
  ENST ID: ENST00000512556
  CDS Start-End: 13-273
acaagctcagcgatggcggctccagaaggcagcggtctaggcgaggacgcccggctggaccaggagaccgcccagtggctgcgctgggacaagaattccttaactttggaggcagtgaaacgactaatagcagaaggtaataaagaagaactacgaaaatgttttggggcccgaatggagtttgggacagctggcctccgagctgctatgggacctggaatttctcgtatgaatgacttgaccatcatccagactacacagtatcacatttgaaactttgtgctggaatcatgataactgcatctcacaatccaaagcaggataatggttataaggtctattgggataatggagctcagatcatttctcctcacgataaagggatttctcaagctattgaagaaaatctagaaccgtggcctcaagcttgggacgattctttaattgatagcagtccacttctccacaatccgagtgcttccatcaataatgactactttgaagaccttaaaaagtactgtttccacaggagcgtgaacagggagacaaaggtgaagtttgtgcacacctctgtccatggggtgggtcatagctttgtgcagtcagctttcaaggcttttgaccttgttcctcctgaggctgttcctgaacagaaagatccggatcctgagtttccaacagtgaaatacccgaatcccgaagaggggaaaggtgtcttgactttgtcttttgctttggctgacaaaaccaaggccagaattgttttagctaacgacccggatgctgatagacttgctgtggcagaaaagcaagacagtggtgaatggagggtgttttcaggcaatgagttgggggccctcctgggctggtggctttttacatcttggaaagagaagaaccaggatcgcagtgctctcaaagacacgtacatgttgtccagcaccgtctcctccaaaatcttgcgggccattgccttaaaggaaggttttcattttgaggaaacattaactggctttaagtggatgggaaacagagccaaacagctaatagaccaggggaaaactgttttatttgcatttgaagaagctattggatacatgtgctgcccttttgttctggacaaagatggagtcagtgccgctgtcataagtgcagagttggctagcttcctagcaaccaagaatttgtctttgtctcagcaactaaaggccatttatgtggagtatggctaccatattactaaagcttcctattttatctgccatgatcaagaaaccattaagaaattatttgaaaacctcagaaactacgatggaaaaaataattatccaaaagcttgtggcaaatttgaaatttctgccattagggaccttacaactggctatgatgatagccaacctgataaaaaagctgttcttcccactagtaaaagcagccaaatgatcaccttcacctttgctaatggaggcgtggccaccatgcgcaccagtgggacagagcccaaaatcaagtactatgcagagctgtgtgccccacctgggaacagtgatcctgagcagctgaagaaggaactgaatgaactggtcagtgctattgaagaacattttttccagccacagaagtacaatctgcagccaaaagcagactaaaatagtccagccttgggtatacttgcatttacctacaattaagctgggtttaacttgttaagcaatatttttaagggccaaatgattcaaaacatcacaggtatttatgtgttttacaaagacctacattcctcattgtttcatgtttgacctttaaggtgaaaaaagaaaatggccaaacccaacaaactaacattcctactaaaaagttgagcttggacatattttgaatttttgtaagtgaagatttttaaactgactaacttaaaaaaatagattgtaattgatgtgccttaatttgcataaatcataaatgtatgtcctctctgtaattgttttaatgtgtgcttgaaatatccagaaaacctatggagttagtaaattctgggctgtcatatgta

SEQ ID NO: 165545 - DNA, 1415 bp, Homo sapiens
  Payload ID: 12580
  Gene Symbol: PGM2
  Gene Name: phosphoglucomutase 2
  ENST ID: ENST00000515668
  CDS Start-End: 26-613
ctgcagcggtagcacaagctcagcgatggcggctccagaaggcagcggtctaggcgaggacgcccggctggaccaggagaccgcccagtggctgcgctgggacaagaattccttaactttggaggcagtgaaacgactaatagcagaaggtaataaagaagaactacgaaaatgttttggggcccgaatggagtttgggacagctggcctccgagctgctatgggacctggaatttctcgtatgaatgacttgaccatcatccagactacacagggattttgcagatacctggaaaaacaattcagtgacttaaagcagaaaggcatcgtgatcagttttgacgcccgagctcatccatccagtgggggtagcagcagaaggtttgcccgacttgctgcaaccacatttatcagtcaggggattcctgtgtacctcttttctgatataacgccaaccccctttgtggtagaagcattgaaagcattggaatggaggcttagaccatcgttgtgtttgaagaattttctagctctaccaagtagaagatggaatgagaaggcactgaggaaattactcacctttcttattaggaaatacatcctggaattatgagcagccagttaattctaaggcccttcacagtatcacatttgaaactttgtgctggaatcatgataactgcatctcacaatccaaagcaggataatggttataaggtctattgggataatggagctcagatcatttctcctcacgataaagggatttctcaagctattgaagaaaatctagaaccgtggcctcaagcttgggacgattctttaattgatagcagtccacttctccacaatccgagtgcttccatcaataatgactactttgaagaccttaaaaagtactgtttccacagactttgtcttttgctttggctgacaaaaccaaggccagaattgttttagctaacgacccggatgctgatagacttgctgtggcagaaaagcaagacagtggtgaatggagggtgttttcaggcaatgagttgggggccctcctgggctggtggctttttacatcttggaaagagaagaaccaggatcgcagtgctctcaaagacacgtacatgttgtccagcaccgtctcctccaaaatcttgcgggccattgccttaaaggaaggttttcattttgaggtagggtgtttctgggactcactcattttcctttcatctgctctgtagaagatctaaggcatgtctttctcttttggattatccctttaggaaacattaactggctttaagtggatgggaaacagagccaaacagctaatagaccaggggaaaactgttttatttgcatttgaagaagctattggtaagaagtgatcatgaacattaaggaattggctgcaaggc

SEQ ID NO: 165546 - DNA, 661 bp, Homo sapiens
  Payload ID: 12580
  Gene Symbol: PGM2
  Gene Name: phosphoglucomutase 2
  ENST ID: ENST00000625312
  CDS Start-End: 74-661
cacgtcttggggccgggccggaaggcagatctcaccgcctgcttccctctgcagcggtagcacaagctcagcgatggcggctccagaaggcagcggtctaggcgaggacgcccggctggaccaggagaccgcccagtggctgcgctgggacaagaattccttaactttggaggcagtgaaacgactaatagcagaaggtaataaagaagaactacgaaaatgttttggggcccgaatggagtttgggacagctggcctccgagctgctatgggacctggaatttctcgtatgaatgacttgaccatcatccagactacacagggattttgcagatacctggaaaaacaattcagtgacttaaagcagaaaggcatcgtgatcagttttgacgcccgagctcatccatccagtgggggtagcagcagaaggtttgcccgacttgctgcaaccacatttatcagtcaggggattcctgtgtacctcttttctgatataacgccaaccccctttgtggtagaagcattgaaagcattggaatggaggcttagaccatcgttgtgtttgaagaattttctagctctaccaagtagaagatggaatgagaaggcactgaggaaattactcacctttcttattaggaaatacatcctggaattatga

SEQ ID NO: 165547 - DNA, 8515 bp, Homo sapiens
  Payload ID: 12581
  Gene Symbol: PGM2L1
  Gene Name: phosphoglucomutase 2-like 1
  Uniprot ID: Q6PCE3
  ENST ID: ENST00000298198
  CDS Start-End: 313-2181
gggcgggcggcggcggcggcggcggagccaggacccagacatctgggactgttgttctctcgcggcgcgaccgcctcagtcacttcgcccagagacccggacctggtccgctggggagcaggcggccataaaccccctctctcccggttccctgacgccgcggcaggagctgttacgaacaccctgcggttggtctccgatgcccttcagtgaggtggggacgcctggaccctggtgagcgaaccccaagccaccccccaccccaactcagtgtcttcgccggcccccggcccgtacgcctgtctggtcgccatggctgaaaacacagagggggatctgaactccaacctgctccacgccccctaccacaccggggaccctcagctggacacggccatcgggcagtggctccgctgggataagaatcccaaaacaaaagagcagattgaaaacctgttacggaatgggatgaacaaggagctgcgagatcgtctttgttgccgaatgacttttgggactgcaggacttcgttctgccatgggggcagggttttgctatattaatgaccttacagtaatacagtcaacacaggggatgtacaaataccttgagagatgtttctcagacttcaagcagagaggctttgtggttgggtatgacactcggggtcaagtaactagcagctgcagcagccagaggcttgctaaactcactgctgcagtcttgctggccaaagatgttcctgtgtaccttttttcaagatatgttcctacaccttttgtaccatatgcagttcagaagctcaaagcagttgcaggtgtgatgattactgcctctcacaaccgcaaggaagacaatggatacaaggtttactgggaaactggtgctcagatcacatctcctcatgataaagaaattctaaaatgtatagaagaatgtgtggaaccctggaatggttcctggaatgataatttagtggataccagcccgctgaagagagaccctctgcaggacatttgcaggagatacatggaagatctgaaaaagatctgtttttacagggagttaaactcgaagaccaccttgaaatttgtgcacacatcttttcatggggtcggacatgactatgtgcagttggcttttaaagtgtttggttttaagcctccaattccagtaccagaacaaaaagatcctgatccagacttttctaccgttaaatgtccaaatcctgaagaaggagaatctgtgctggaactttccttgagactggcagagaaagaaaatgcccgggtagtgctagccacagatcctgatgcagacagactggcagcagcagaacttcaggagaatggttgttggaaagttttcacagggaatgagttggcagctttgtttggatggtggatgtttgattgctggaagaaaaataaatcaagaaatgctgatgtgaagaacgtttatatgttagccaccacagtctcttctaaaattctgaaggcaattgcacttaaagaaggatttcattttgaagaaacattaccaggttttaaatggattggaagtaggataatagacctcctggaaaatgggaaagaagtcctttttgcatttgaagagtctattggttttctctgtggaacttcagttttggataaagatggggtgagtgcagctgttgtggttgctgagatggcatcttacctggaaaccatgaatataacattgaaacagcaactggttaaggtttatgaaaaatatggttatcatatttcaaaaacttcctatttcttgtgttatgaaccacctaccatcaaaagtatatttgaaaggcttcgtaattttgattctccaaaagaatatccaaaattttgtggaacatttgctatattgcatgtacgggacgttaccactggatatgacagtagccagcctaataagaaatcagtgctgcctgtgagtaaaaacagccaaatgattacatttacttttcaaaatggctgtgttgctacccttcggacaagtggaacagaaccaaagataaagtattatgcagagatgtgtgcgtcacctgaccagagtgacactgctttactggaggaagaactgaagaaactcattgatgctctgatagagaattttcttcagcctagtaagaatggactgatctggcgttctgtttaggggtacaccaatatgtcatgacactgtgtgggcatatggaacagagcaaccgagaactgcatacattgaaccttgtgttagcattctctctctatctcatctggccgagtatctttttccttttattttctttctttttggtcaactggctagactaaacaaagtataagtttgaaatgaaatggtctagagggaaatgattcaaattttttcataattcaaacaaaagttattacactaaaagtattatagtaacgtattgtccttccgttaacagaaacatcacaattcaaaagtgagttttcttattatagtgtgattaagcctagttctgtatctcgtaattgtgtatagcatggtaaaagaaaaaaaaaaagacaggtaaatgttatataattgtagggttagttaaggaaattagtccataaaattggcaagaaaatggtactttccttgattgttatgaaaaagtgtcattgtgacatcacaggtattaatttacaaattagagtatttgaaataggatatttagcatttctgtagtttagaacagatgttacagtgtgtggttttggcatgtctgtttcaggtgcccttggtgcagtataaatttactgtatgtatttaaaattctgatgtttactgaacataaaacaatagtggcaacactcctattggctttgttcttatcaaatttctcagtgccttctcagggtctggtgtgaacagaaaaaacagtgttcctgcatttaccataatttaatcagtcaatttgcagatagctaaggaaaatcttccaaaatctgtaggtgcttcctctatatcaagtgagtttgctgattttaaaatcttaggaatataaataaagatcttaataaaagcaagcttaatgtagttaaggatcttcatattagaattgtgtcatttatcaaaccttttattacagaaaaaaatctgaactgagaaaggagctctgaatttatttgacagtctaacttttgaattacatttttgtaagtagatttattcttttattttatgaagtaatgttaattttactaagaataaaacatccaaattttaagtattatgaaatactaaaactacatgttttaaaacagaggtccagtttattctaacatcttgctgacttctgtagaatttctgattgcatgactattatttatcttcttttagtgtagaaaataattttttacaaaaagtcacttttgggctgggcgcagtggctcacgcctgtaatcccagcactttgggaggctgaggcaggtggatcacaatgtcaggagtttgagactagcctggccaatatggtgaaaccctgtctctactaaaaatacaaaaattagccgggtgtggtggtgggcacctgtagtcccagctactcgggaggctgaggcaggagaattgcttgaacctaggaggctgagattgcagtgagccgaaatcacgccactacactccagcctgggcaacagagggagactccatctcaaaaaaaaaaaaagtcacttttggctaatcatgcagtcttctgaaaaggtttaatagagaaatgctgtttaggctgggcttggtggctcacatctgtaataccagcgctttgggaggctgaggcaggaggattgcttgaggccaggagtttaagttacagaactatgatcacactgccgcactgaagcctggatgacagagtgagaccttatctcaaaaaaaaaaaaaaaaagagagagagagagaaaaagaaatgctgtgtttaatcttcttaaaatgtatcttgtcctacatagttctcagaatacatatggggtatagttaggagataacaataacaagacctaaacaaattgcttatgggagatagcactgtaattagagaatttatttcatataaaataataatataaagtttgaactgattagaatgttccttaaatcatggtttcgtttgttgcagctgtcagctaacatttggttgagctcatataatccaaacctaattgtccaactattgtattgccactattgttaatttgttccttccttactttcttattgttggatcttatatgactgtatgactgtagataatagacagctagctaaatgtagagcaccatttttctcaatgagtttgttttcaaaggctttgcactggagaagatatgtgtagaatttttgttttatttttaaaatgtgtaaaacatcttttgttttatatgcttttaagaatgtagattgtaatttaggaaatggcatatattctgcaaagtggtataatgttgtatatatgaaaaacaggtatatttggtttagttctgtgtttcagtgactgataaacaaaaatgaagctaaaatgaatcaacggctcattcatagttactaaagccatgtcatgactgtcattctattatgaagaaaacagttttatttgagtgctttaatataatgcaacatttaagtcatcttaaggtgaaaagttattgaagtgttcttctctcaagttaacaaaattttacaaatgttcctgaagtgtatcgattgagggaattattttattctagcctgtcatgagtctgtctgagcatgatacttaacatgaacttgatgtagtaggtgcacatttgcctaacaggataaattcagtgatagcccaagctggtcaggagagacagaagtgctggctaggaggtctcagcctcgggcactacaatgtttatctttttctttttgaacaatattgtgaaaatgattgcattctcattgagcatgaaagtcaaaactggaattttctaaagctttggagaaaaggagagaattagtagggcaagatcaaagcatacattggaaataaacagtagaaataagcaaacaatataaagagacacgggaaatgcttctcgtgaagggcaaatgtaacaccataacagtagggaataaactgtgtcccacctgtttacttgtgtttatttgttgttatgatgagtatgcacctaccattttcctttattgtgatcactaaaatgaggccaaggtttaggaggtgagaaaaagtatcccttttacggattcagttcctgctaggatgttgtatcagaatcatgtgagaactcaggaagaggtagagcagaaataaaaaggaagaaaatgtagattagaaaataagacttctgagaaaaagttcaaggaataaagattgtttgactctggagaggagaaagctgttgagatagtttgctaagtttgctaataaagctttattgagtcttttattgaagggttcaaagtaagaaatactatgccatagtgttctccatctctagtgaagacagaaccagagggaataaggatcttttttttaaagacagcatggaaagtttaagatttaggaacttcttgagaaatcttcataatatcttctattcaaaatcttttttttatttttaagggaataaaaattttaaaaattaagagatatacagatgactttttaagggtccttctttccagcacattttttttaaaaactcaggttagaacaaaaatgtcataaagggcactaaaagtaacatttgggtttcactccatatctagaagaatttagctcacaaaacaatttttgtgtgttttgagtaactgatgcataagtgcaatgaataattttcctgcttcactgttatttttaatttaacctggcaaattaagtgagacttgaacaaaattttgttcatcttgaagaatgtatagtggcttaggttatttgaggttttcgttttgaatatatatgttgttattttgatgtagatacgttagcagatggagaggttctaagagattggatactttggaatgtctttatataggaaatagacctcccatttcttaagcaagttgcttctggaattgatgcaacagggatattagctgtagtttaatggataagttgttctatgagctgctgctatcagtacttttttccacattttccattgatatttgtgatgcttgaaaaatccaaacttcacttggatacatttaattttatgcctttttctctctacctcccacttttcctaggcacccttgcacattttgttactgtgaaggactattgccctgttacctcactgataagaaatctcaactgtattcattcagaatgctttaagcttagtcataaactacatttgcctatggacctttggttattttgttaatgttgtcattatatttaagacttattgtaggaagtaattttaaatctatttcataacctgttttgatctgtctgcatactgctatatgttaatttattacggccttttacaattcacttgtcatctgagattgttctagaaactgatgaggaaagagtcgtactaaccaaaatgaatgggcaattgacataacattctatttcaggtttccttgtacttggggagccaaagcacaagatctaaggaaatcttattcacatttgtccctcagagcatcttaccctaagccatagaggtataaatagtaagatgagaattgctcattgtctgactccttgcacagcatgaatttaattctagttggaaacaaagttagtgttgactactggttaccttaaagtattcaccatactatatatttattagaccatctttcctctttgtttattcaagactatgtacttataaaagagaacctataagaatgtgtagagtgaccaaatagggacaaagtgacatacctagagtttgctgctcaaatttttccactagcgtaaccctaaagcagaggggcatgatgaagggggaaggggttctgagagcaaaatcagaatcagcctaccactgacatgaagtgtgttctgtctttaaaatgtaagtgaattttgcattctttataataaaacttttaatataaaaatgatatgtttaatctttactgaaacttatgccaccacaaaggagcaccatgttcatcacgtggctgctcagttttctcccccagtgccctcacccccagtggaggcaagtccttgagctacacacactggctgtagtgcaagatatataaacataggccgggctcggtggctcatgcctgtaatcctagcactttgggaggccgaagcaggtggatcatctgaggtcgggagattgagactagcctgaccgacatggagaaaccctgtgtccactaaaaatacaaaattagccgggtgtggtggcacatgcctgtaatcccagctactcgggaggctgaggcaggagaatcacttgaacccaggaggtggaggttgtggtgagccaagatcgcgccgttgcactccagcctgggcaacaagagtgaaactccatctcaaaaaaaaaaaaaaaagatatataaacatagaacatatccagactatttcctgcccttggaatctgaccttcagaaggattaatgccaaactaaactgacctgaaacagttttgttactattggcattccttgactaaaaaggaccacctgatgctcagtcccgagagtaggaatcgtggtttattatttttcatatccataccacctagttcagtacctgttatagagtgtttaattgctgatactaggaattaagggattttttaaaagtagcaaatagtttaaggaacaatcaaaaaatgaattttctaattcagttttttcaatgaagtcccatcactgaactttataatgtaatgtttattaagcagacatccccttaaatactcagtttctttggagagagcaaagcatatctctctgtggaaattatatataatgcctggtattttacactcaaagcaaggtgttggccaggaaggtaaagaaatggtgtctatgtagacttaatatcactagtctaagtgtcattttgagcctagtagcactaccttccaagtgagtcacaacaaatttgatcctatttggtatgtttttgtccactgttatgattcatcatgtatcttacaagagccactcaagcaagactctgcttctatgtatggtgaggccttgttgttctaggctagaataaactctttgtatgcctcattgaatatgccaggtaaaatttatgcagtcaagaatgaattatttttctgactaaagtgtgtagcagtagttcaaaattgtgcccttgttttaacagtttctgtcaacatcttctcatttttccctacaaaaacaccagggtgtattataagtactgcctgtgagaatttgcactttatgtatttgtgtgtggatttcttgtggttttagccaaatgaagtgttatcagtaataaacaggtctcttcata

SEQ ID NO: 165548 - DNA, 2219 bp, Homo sapiens
  Payload ID: 12582
  Gene Symbol: PGM3
  Gene Name: phosphoglucomutase 3
  ENST ID: ENST00000283977
  CDS Start-End: 128-1513
tgcggttctgaggactgggtttgggtgcagacgttgttgcttgggcgcttctccgctgcgtgtaggtgaagggggcttcctgaccgaggaagacaatggtgtaaaattggttgatcctttgggtgaaatgttggcaccatcctgggaggaacatgccacctgtttagcaaatgctgaggaacaagatatgcagagagtgcttattgacatcagcgagaaagaagctgtgaatctgcaacaagatgcctttgtagttattggtagagataccaggcccagcagtgagaaactttcacaatctgtaatagatggtgtgactgttctaggaggtcaattccatgattatggcttgttaacaacaccccagctgcactacatggtgtattgtcgaaacacgggtggccgatatggaaaggcaactatagaaggttactaccagaaactctctaaggcttttgtggaactcaccaaacaggcttcttgcagtggagatgaatacagatcacttaaggttgactgtgcaaatggcataggggccctgaagctaagggaaatggaacactacttctcacagggcctgtcagttcagctgtttaatgatgggtccaagggcaaactcaatcatttatgtggagctgactttgtgaaaagtcatcagaaacctccacagggaatggaaattaagtccaatgaaagatgctgttcttttgatggagatgcagacagaattgtttattactaccatgatgcagatggccactttcatctcatagatggagacaagatagcaacgttaattagcagtttccttaaagagctcctggtggagattggagaaagtttgaatattggtgttgtacaaactgcatatgcaaatggaagttcaacacggtatcttgaagaagttatgaaggtacctgtctattgcactaagactggtgtaaaacatttgcaccacaaggctcaagagtttgacattggagtttattttgaagcaaatgggcatggcactgcactgtttagtacagctgttgaaatgaagataaaacaatcagcagaacaactggaagataagaaaagaaaagctgctaagatgcttgaaaacattattgacttgtttaaccaggcagctggtgatgctatttctgacatgctggtgattgaagcaatcttggctctgaagggcttgactgtacaacagtgggatgctctctatacagatcttccaaacagacaacttaaagttcaggttgcagacaggagagttattagcactaccgatgctgaaagacaagcagttacacccccaggattacaggaggcaatcaatgacctggtgaagaagtacaagctttctcgagcttttgtccggccctctggtacagaagatgtcgtccgagtatatgcagaagcagactcacaagaaagtgcagatcaccttgcacatgaagtgagcttggcagtatttcagctggctggaggaattggagaaaggccccaaccaggtttctgaagataattttcatattcctgagaaactggactttttacaagtctttacaaaactgtcaataataatggcagtactaagagatttataatcataatgtttacaatgcagcctactggattgtctctagatctgtttttcttaaacactaacagaataattctttataaataggtaagccttacacttgttaaagaaatttacctctaatttcagtctcactaatgtaaaatactgggacttaagtatacaattcagtcactaactgtacagttttatgtggggaacaattcatgcaggctactggaaaattaaatcttattaccaactccttgtgatatctttgccatcaccatcacatgagcaagatgatgttttgcagcattccccattgctgatacaaatggagagggcagagaagactttatacaaccagtttttccattgcagagtcttaagaaagattattagatgacttacctatatgactaatgccatcaggaactcagaggtatgaatagggggttgtccatccctcttccatactgaggtggagatgctcatgcaatacttttaaggatgcatggtccagccttcagttattcttcactgctcttggtgaaggtatgtgggagaaaaactaattataatacgtttcccagcctctgatggagaaggaacaccattctgataccagaacatggttaat

SEQ ID NO: 165549 - DNA, 605 bp, Homo sapiens
  Payload ID: 12582
  Gene Symbol: PGM3
  Gene Name: phosphoglucomutase 3
  ENST ID: ENST00000504780
  CDS Start-End: 1-341
tggctctgaagggcttgactgtacaacagtgggatgctctctatacagatcttccaaacagacaacttaaagttcaggttgcagacaggagagttattagcactaccgatgctgaaagacaagcagttacacccccaggattacaggaggcaatcaatgacctggtgaagaagtacaagctttctcgagcttttgtccggccctctggtacagaagatgtcgtccgagtatatgcagaagcagactcacaagaaagtgcagatcaccttgcacatgaagtgagcttggcagtatttcagctggctggaggaattggagaaaggccccaaccaggtttctgaagataattttcatattcctgagaaactggactttttacaagtctttacaaaactgtcaataataatggcagtactaagagatttataatcataatgtttacaatgcagcctactggattgtctctagatctgtttttcttaaacactaacagaataattctttataaatagtaactaacatcttgacaaagaggataaactgattttggttcttgtcatggaagataaaaagtcagtatcatgagcatactatttcatgtccct

SEQ ID NO: 165550 - DNA, 2013 bp, Homo sapiens
  Payload ID: 12582
  Gene Symbol: PGM3
  Gene Name: phosphoglucomutase 3
  Uniprot ID: O95394
  ENST ID: ENST00000512866
  CDS Start-End: 56-1756
gttgcttgggcgcttctccgctgcgtgtaggtgaagggggcttcctgaccgagacatggatttaggtgctattacaaaatactcagcattacacgccaagcccaatggactgatccttcaatacgggactgctggatttcgaacgaaggcagaacatcttgatcatgtcatgtttcgcatgggattattagctgtcctgaggtcaaaacagacaaaatccactataggagtcatggtaacagcgtcccacaatcctgaggaagacaatggtgtaaaattggttgatcctttgggtgaaatgttggcaccatcctgggaggaacatgccacctgtttagcaaatgctgaggaacaagatatgcagagagtgcttattgacatcagcgagaaagaagctgtgaatctgcaacaagatgcctttgtagttattggtagagataccaggcccagcagtgagaaactttcacaatctgtaatagatggtgtgactgttctaggaggtcaattccatgattatggcttgttaacaacaccccagctgcactacatggtgtattgtcgaaacacgggtggccgatatggaaaggcaactatagaaggttactaccagaaactctctaaggcttttgtggaactcaccaaacaggcttcttgcagtggagatgaatacagatcacttaaggttgactgtgcaaatggcataggggccctgaagctaagggaaatggaacactacttctcacagggcctgtcagttcagctgtttaatgatgggtccaagggcaaactcaatcatttatgtggagctgactttgtgaaaagtcatcagaaacctccacagggaatggaaattaagtccaatgaaagatgctgttcttttgatggagatgcagacagaattgtttattactaccatgatgcagatggccactttcatctcatagatggagacaagatagcaacgttaattagcagtttccttaaagagctcctggtggagattggagaaagtttgaatattggtgttgtacaaactgcatatgcaaatggaagttcaacacggtatcttgaagaagttatgaaggtacctgtctattgcactaagactggtgtaaaacatttgcaccacaaggctcaagagtttgacattggagtttattttgaagcaaatgggcatggcactgcactgtttagtacagctgttgaaatgaagataaaacaatcagcagaacaactggaagataagaaaagaaaagctgctaagatgcttgaaaacattattgacttgtttaaccaggcagctggtgatgctatttctgacatgctggtgattgaagcaatcttggctctgaagggcttgactgtacaacagtgggatgctctctatacagatcttccaaacagacaacttaaagttcaggttgcagacaggagagttattagcactaccgatgctgaaagacaagcagttacacccccaggattacaggaggcaatcaatgacctggtgaagaagtacaagctttctcgagcttttgtccggccctctggtacagaagatgtcgtccgagtatatgcagaagcagactcacaagaaagtgcagatcaccttgcacatgaagtgagcttggcagtatttcagctggctggaggaattggagaaaggccccaaccaggttataaagcagcagagacaacacacaacatcaacaatgcatttggcccaggaactgctaatgaacatacagtgccgtgatggctcaagaagttttgcaaaggagactagagccttgaagatgaggagtgcagtggccagtcatcggaaattgataatgaccaattgagaacatcatcgaagctgatcctcttacaactataagagagctgcccaagaactcaatgttgaccattttatggtcgttcggcatttgaagcaaattgaaaaggtgaaaaagctcaataaatgggtgcctcatgagctgagtgaaaaataaaaaaattcgttgttttgaa

SEQ ID NO: 165551 - DNA, 558 bp, Homo sapiens
  Payload ID: 12582
  Gene Symbol: PGM3
  Gene Name: phosphoglucomutase 3
  ENST ID: ENST00000503094
  CDS Start-End: 217-558
gcggttctgaggactgggtttgggtgcagacgttgttgcttgggcgcttctccgctgcgtgtaggtgaagggggcttcctgaccgaggtaagccgggccccgaggctcggagttgagaagggagactaccggtcggcaagggctcggtgggagcgggacagttgagagtggaccaatttaagtgtgcccggcgtccaggatagtcctggagctaaaatgggaggagagtggggacaatctgctatctgccctgagtctgcccaggagtggacataccaagttggacaacatcttgtagacatggatttaggtgctattacaaaatactcagcattacacgccaagcccaatggactgatccttcaatacgggactgctggatttcgaacgaaggcagaacatcttgatcatgtcatgtttcgcatgggattattagctgtcctgaggtcaaaacagacaaaatccactataggagtcatggtaacagcgtcccacaatcctgaggaagacaatggtgtaaaattggttgatcctttgggtgaaatgttggcaccatcc

SEQ ID NO: 165552 - DNA, 753 bp, Homo sapiens
  Payload ID: 12582
  Gene Symbol: PGM3
  Gene Name: phosphoglucomutase 3
  ENST ID: ENST00000509219
  CDS Start-End: 1-594
gaagcaaatgggcatggcactgcactgtttagtacagctgttgaaatgaagataaaacaatcagcagaacaactggaagataagaaaagaaaagctgctaagatgcttgaaaacattattgacttgtttaaccaggcagctggtgatgctatttctgacatgctggtgattgaagcaatcttggctctgaagggcttgactgtacaacagtgggatgctctctatacagatcttccaaacagacaacttaaagttcaggttgcagacaggagagttattagcactaccgatgctgaaagacaagcagttacacccccaggattacaggaggcaatcaatgacctggtgaagaagtacaagctttctcgagcttttgtccggccctctggtacagaagatgtcgtccgagtatatgcagaagcagactcacaagggtcaagacttgtggtctggatttttattatttggcctcttcacatactccttaaagtgtgtgcaaagccagggcaaagtacagtgagtgcgctgaatagggaatcaggaggagacatttggcagctttcctgcagaagcttaagccatctcagagtctaatgaatatccatgatggatgaggagatggcaacagaggcattagtacttacttactgttaggccaattgtggattaaagttttattgaattttttcagttgtggaatgatagctatttttataatctgaattgattaaaaacttaccttatttagaagaa

SEQ ID NO: 165553 - DNA, 561 bp, Homo sapiens
  Payload ID: 12582
  Gene Symbol: PGM3
  Gene Name: phosphoglucomutase 3
  ENST ID: ENST00000505470
  CDS Start-End: 80-295
ggactgggtttgggtgcagacgttgttgcttgggcgcttctccgctgcgtgtaggtgaagggggcttcctgaccgagacatggatttaggtgctattacaaaatactcagcattacacgccaagcccaatggactgatccttcaatacgggactgctggatttcgaacgaaggcagaacatcttgatcatgtcatgtttcgcatgggattattagctgtcctgaggtcaaaacagacaaaatccactataggagtcatggtaacagcgtcccacaatcctgagacaatggtgtaaaattggttgatcctttgggtgaaatgttggcaccatcctgggaggaacatgccacctgtttagcaaatgctgaggaacaagatatgcagagagtgcttattgacatcagcgagaaagaagctgtgaatctgcaacaagatgcctttgtagttattggtagagataccaggcccagcagtgagaaactttcacaatctgtaatagatggtgtgactgttctaggaggtcaattccatgattatggcttgttaacaacaccccagctg

SEQ ID NO: 165554 - DNA, 640 bp, Homo sapiens
  Payload ID: 12582
  Gene Symbol: PGM3
  Gene Name: phosphoglucomutase 3
  ENST ID: ENST00000508748
  CDS Start-End: 171-640
gagccggaagccacgcagggccacgtctgcggttctgaggactgggtttgggtgcagacgttgttgcttgggcgcttctccgctgcgtgtaggtgaagggggcttcctgaccgagttgagagtggaccaatttaagtgtgcccggcgtccaggatagtcctggagctaaaatgggaggagagtggggacaatctgctatctgccctgagtctgcccaggagtggacataccaagttggacaacatcttgtagacatggatttaggtgctattacaaaatactcagcattacacgccaagcccaatggactgatccttcaatacgggactgctggatttcgaacgaaggcagaacatcttgatcatgtcatgtttcgcatgggattattagctgtcctgaggtcaaaacagacaaaatccactataggagtcatggtaacagcgtcccacaatcctgaggaagacaatggtgtaaaattggttgatcctttgggtgaaatgttggcaccatcctgggaggaacatgccacctgtttagcaaatgctgaggaacaagatatgcagagagtgcttattgacatcagcgagaaagaagctgtgaatctgcaacaagatgcctttgtagttattggtagagatac

SEQ ID NO: 165555 - DNA, 6107 bp, Homo sapiens
  Payload ID: 12582
  Gene Symbol: PGM3
  Gene Name: phosphoglucomutase 3
  Uniprot ID: O95394
  ENST ID: ENST00000513973
  CDS Start-End: 118-1746
gagccggaagccacgcagggccacgtctgcggttctgaggactgggtttgggtgcagacgttgttgcttgggcgcttctccgctgcgtgtaggtgaagggggcttcctgaccgagacatggatttaggtgctattacaaaatactcagcattacacgccaagcccaatggactgatccttcaatacgggactgctggatttcgaacgaaggcagaacatcttgatcatgtcatgtttcgcatgggattattagctgtcctgaggtcaaaacagacaaaatccactataggagtcatggtaacagcgtcccacaatcctgaggaagacaatggtgtaaaattggttgatcctttgggtgaaatgttggcaccatcctgggaggaacatgccacctgtttagcaaatgctgaggaacaagatatgcagagagtgcttattgacatcagcgagaaagaagctgtgaatctgcaacaagatgcctttgtagttattggtagagataccaggcccagcagtgagaaactttcacaatctgtaatagatggtgtgactgttctaggaggtcaattccatgattatggcttgttaacaacaccccagctgcactacatggtgtattgtcgaaacacgggtggccgatatggaaaggcaactatagaaggttactaccagaaactctctaaggcttttgtggaactcaccaaacaggcttcttgcagtggagatgaatacagatcacttaaggttgactgtgcaaatggcataggggccctgaagctaagggaaatggaacactacttctcacagggcctgtcagttcagctgtttaatgatgggtccaagggcaaactcaatcatttatgtggagctgactttgtgaaaagtcatcagaaacctccacagggaatggaaattaagtccaatgaaagatgctgttcttttgatggagatgcagacagaattgtttattactaccatgatgcagatggccactttcatctcatagatggagacaagatagcaacgttaattagcagtttccttaaagagctcctggtggagattggagaaagtttgaatattggtgttgtacaaactgcatatgcaaatggaagttcaacacggtatcttgaagaagttatgaaggtacctgtctattgcactaagactggtgtaaaacatttgcaccacaaggctcaagagtttgacattggagtttattttgaagcaaatgggcatggcactgcactgtttagtacagctgttgaaatgaagataaaacaatcagcagaacaactggaagataagaaaagaaaagctgctaagatgcttgaaaacattattgacttgtttaaccaggcagctggtgatgctatttctgacatgctggtgattgaagcaatcttggctctgaagggcttgactgtacaacagtgggatgctctctatacagatcttccaaacagacaacttaaagttcaggttgcagacaggagagttattagcactaccgatgctgaaagacaagcagttacacccccaggattacaggaggcaatcaatgacctggtgaagaagtacaagctttctcgagcttttgtccggccctctggtacagaagatgtcgtccgagtatatgcagaagcagactcacaagaaagtgcagatcaccttgcacatgaagtgagcttggcagtatttcagctggctggaggaattggagaaaggccccaaccaggtttctgaagataattttcatattcctgagaaactggactttttacaagtctttacaaaactgtcaataataatggcagtactaagagatttataatcataatgtttacaatgcagcctactggattgtctctagatctgtttttcttaaacactaacagaataattctttataaataggtaagccttacacttgttaaagaaatttacctctaatttcagtctcactaatgtaaaatactgggacttaagtatacaattcagtcactaactgtacagttttatgtggggaacaattcatgcaggctactggaaaattaaatcttattaccaactccttgtgatatctttgccatcaccatcacatgagcaagatgatgttttgcagcattccccattgctgatacaaatggagagggcagagaagactttatacaaccagtttttccattgcagagtcttaagaaagattattagatgacttacctatatgactaatgccatcaggaactcagaggtatgaatagggggttgtccatccctcttccatactgaggtggagatgctcatgcaatacttttaaggatgcatggtccagccttcagttattcttcactgctcttggtgaaggtatgtgggagaaaaactaattataatacgtttcccagcctctgatggagaaggaacaccattctgataccagaacatggttaataaggaaaagagaaaaatccccaaccaatcttaattgaaccaagtctgaaaccaatggaaaaaaaaaatgggtagtgtatattttgcaggtttaagacaactcaggacaataaaaacaatggactttacatgtgtatatatatagctctcttaggcaccataatcagtatgagccaacaatatttaaacttgattcaggccacattcagacatttgctcttatatacaaatatttaaattaaatacaatctgaaatgtgttctgttacatacaaaaaaggaaaaactatacaacgcagagcagtgtgtgtgttttaaataattacatttacatgtaagctaaatggaaccagcaatggtgctcaagtttttatcatcccttccagaaaatctttttctaccatctcttctattttttgcctggctttgctggaacatggtttgtggttctccagtttcatgtccttattagggaaggcatttgagtagaggataggactccctgagtgtcctccacatcggcttgtgactttgctgttgaagacttgactgagcacattgaagaacggcaggagctgctccatactgcgcacggtgcagatggtgagcagcaagtgccctggctcccaacccaatgttctccctgagttgtcttcctctggatttttctgcagaaaacaaaaagtgaactggtattaatacaacagacaatgtggtatgttagaaaaattaaaaatatataaactttggcaattggtcaagaaatgaatacaaatgacattaagtttctaactcctgacctgatcaaaacccttggtgcttctgagaccttttactgccatttattagttttacatggagcagtctaacattgtagtaatagttcccaactagaatgcgcagataagcttagttaacagaaatagctttgaacaggaatagagtcaaacataaaagttttatgttgtgctttgtatttactcaaaaagctcccaggtttctgaaccctcactactgtaaccaaggactaggtcacaaaattactacagaaaaaaggaacaaagtgctttatacatttcataatatatccccttttattataattagttaattcccttttatctaaatggcctaaatttgccatgatggtagcagtgtccaaagtgaataattactgtcagtactgcatcacagagaaaggaagggatccctcaggagacactgctgtctccttctgggttgtgctaaacaacatagggaggaaagctggacctggagtcaaaggaattgagttagtgtgctggctctgccatacttacggcacccttgggcaggatatacaaaggttcctcacttataaaatgggacagtctaaaactaccttttagtagagaagtcaaatgagaaggtatgtgaaaactctgtcaactaaatataaagactaataatttgggtattaagaggctagtttgagaagccacctgaattacacaaacacagctacagacatcattctgtctagagaaagataagagagaacaggttggttgaacttgggcagaatcacagatacaattccacactaaagaatgaaaataagcaatgaactagacagaaggaagaaatcatgaagacttaggaagcagaattacaatctgtcatattaacaaatggagtttgccttctaagatcagatgttgctcagaaactttcattgtttacctaataatttaatatcactagtttcctagtgggtcaagcagatgcaaaatccagcttattttcttctatgtgctctcaagcttattgcttattttaaagtaaaatcctgaaaaaggaaaatattaggttggtgcaaacgtaattgcggtttttgcattgttgaaatttgccgttttatattggagtacattcttaaataaatgtggttatgttatacatcattttaagcatatttctcactttttttttgctaatgacttattgctgtttatatttattttagactatggaaatgatgttagacaaaaatcaaatttagcgattttctgagttcaaaataggttataaagcagcagagacaacacacaacatcaacaatgcatttggcccaggaactgctaatgaacatacagtgccgtgatggctcaagaagttttgcaaaggagactagagccttgaagatgaggagtgcagtggccagtcatcggaaattgataatgaccaattgagaacatcatcgaagctgatcctcttacaactataagagagctgcccaagaactcaatgttgaccattttatggtcgttcggcatttgaagcaaattgaaaaggtgaaaaagctcaataaatgggtgcctcatgagctgagtgaaaaataaaaaaattcgttgttttgaagtgtcattttctctattctatgcaacaataatgaatcatttctctatcggattgtgatgtgtgccaaaaggtggattttatacgacaactggcgatgaccagctcagtggctggactgaaagaagctccaaagcacttcccaaagccaaacttgctccaaaaaatggtcatggtcattgtttggtggtttgctgccagtctgatccactacagctttctgaatccaggtgaaaccattacatctgataagtatgctcagcaaatcaatgagatgcaccaaaaactgcaatgcctgcagccggcattggccaccagaaagggcccaattcttttcacgacaacactgggccgcacgttgcacaaccaacgcttcgaaaattgaactaattgggctatgaagttttgcctcatctgccatattcacctgacctcttgccaacaaactaccacttctttaggcatctcagcaacgttttgcagggaaattgcttccacaactagcaggacacagaaaatgctttccaagagttcgtcaaatttggaagcatggatttttatgctacaggagtaaacaaacttatttctcattggcaaaaatgtgttgattgtaatggttcctattttaattaataaagatttgtgtgaacctagttataatgacttaaaattcatggtcccaaacagcaattacttttgcaccaaactaaaaatataagttaaaatggaagagtctaggagcaaaccaagaaaagatcacctacttcatcatctctggtcaaaaacaaaccaaaaaacttaacagctatcacttaagtttgcttcctagcaattatttagcttccagtctagattacaggatatataaaactttctttctttctttcttaactatgacactggcaccaatgagagtcctgtgactgactttcacatttccaccattactcaattactggtaccataccacctctaatcccctaaatcaaactgcaattcaacaataaagggcgtacagagatgactttgtcctgaaggaaaatgaatatccttgtaccctctatatagctaacttccaaatgtaagagaactatggggtaaccttttgtttctattcctatcaagatgagcctttaagagagggacttttattaagctcttgaccaagaagaatacacttgattcagagtttctgatgctcttaatcagaactatatgtattgtctcaatattaaataaagtcaaatgtttccatacaaa

SEQ ID NO: 165556 - DNA, 556 bp, Homo sapiens
  Payload ID: 12582
  Gene Symbol: PGM3
  Gene Name: phosphoglucomutase 3
  ENST ID: ENST00000507554
  CDS Start-End: 117-556
gactcgcggaccgcccccccccaacaccgcggtggccttttcgcttgggccgcattccagggctccggacgtttacgattcactggcctctgccccgagggacccaggataaggacatggatttaggtgctattacaaaatactcagcattacacgccaagcccaatggactgatccttcaatacgggactgctggatttcgaacgaaggcagaacatcttgatcatgtcatgtttcgcatgggattattagctgtcctgaggtcaaaacagacaaaatccactataggagtcatggtaacagcgtcccacaatcctgaggaagacaatggtgtaaaattggttgatcctttgggtgaaatgttggcaccatcctgggaggaacatgccacctgtttagcaaatgctgaggaacaagatatgcagagagtgcttattgacatcagcgagaaagaagctgtgaatctgcaacaagatgcctttgtagttattggtagagataccaggcccagcagtgagaaactttcacaatctgtaatagatggtgtgactgttct

SEQ ID NO: 165557 - DNA, 1971 bp, Homo sapiens
  Payload ID: 12582
  Gene Symbol: PGM3
  Gene Name: phosphoglucomutase 3
  Uniprot ID: O95394
  ENST ID: ENST00000506587
  CDS Start-End: 148-1860
aacaccgcggtggccttttcgcttgggccgcattccagggctccggacgtttacgattcactggcctctgccccgagggacccaggataaggttgagagtggaccaatttaagtgtgcccggcgtccaggatagtcctggagctaaaatgggaggagagtggggacaatctgctatctgccctgagtctgcccaggagtggacataccaagttggacaacatcttgtagacatggatttaggtgctattacaaaatactcagcattacacgccaagcccaatggactgatccttcaatacgggactgctggatttcgaacgaaggcagaacatcttgatcatgtcatgtttcgcatgggattattagctgtcctgaggtcaaaacagacaaaatccactataggagtcatggtaacagcgtcccacaatcctgaggaagacaatggtgtaaaattggttgatcctttgggtgaaatgttggcaccatcctgggaggaacatgccacctgtttagcaaatgctgaggaacaagatatgcagagagtgcttattgacatcagcgagaaagaagctgtgaatctgcaacaagatgcctttgtagttattggtagagataccaggcccagcagtgagaaactttcacaatctgtaatagatggtgtgactgttctaggaggtcaattccatgattatggcttgttaacaacaccccagctgcactacatggtgtattgtcgaaacacgggtggccgatatggaaaggcaactatagaaggttactaccagaaactctctaaggcttttgtggaactcaccaaacaggcttcttgcagtggagatgaatacagatcacttaaggttgactgtgcaaatggcataggggccctgaagctaagggaaatggaacactacttctcacagggcctgtcagttcagctgtttaatgatgggtccaagggcaaactcaatcatttatgtggagctgactttgtgaaaagtcatcagaaacctccacagggaatggaaattaagtccaatgaaagatgctgttcttttgatggagatgcagacagaattgtttattactaccatgatgcagatggccactttcatctcatagatggagacaagatagcaacgttaattagcagtttccttaaagagctcctggtggagattggagaaagtttgaatattggtgttgtacaaactgcatatgcaaatggaagttcaacacggtatcttgaagaagttatgaaggtacctgtctattgcactaagactggtgtaaaacatttgcaccacaaggctcaagagtttgacattggagtttattttgaagcaaatgggcatggcactgcactgtttagtacagctgttgaaatgaagataaaacaatcagcagaacaactggaagataagaaaagaaaagctgctaagatgcttgaaaacattattgacttgtttaaccaggcagctggtgatgctatttctgacatgctggtgattgaagcaatcttggctctgaagggcttgactgtacaacagtgggatgctctctatacagatcttccaaacagacaacttaaagttcaggttgcagacaggagagttattagcactaccgatgctgaaagacaagcagttacacccccaggattacaggaggcaatcaatgacctggtgaagaagtacaagctttctcgagcttttgtccggccctctggtacagaagatgtcgtccgagtatatgcagaagcagactcacaagaaagtgcagatcaccttgcacatgaagtgagcttggcagtatttcagctggctggaggaattggagaaaggccccaaccaggtttctgaagataattttcatattcctgagaaactggactttttacaagtctttacaaaactgtcaataataatggcagtactaagagatttataatcataatgtttacaatgcagcct

SEQ ID NO: 165558 - DNA, 750 bp, Homo sapiens
  Payload ID: 12582
  Gene Symbol: PGM3
  Gene Name: phosphoglucomutase 3
  ENST ID: ENST00000510258
  CDS Start-End: 233-750
gttgttgcttgggcgcttctccgctgcgtgtaggtgaagggggcttcctgaccgagttgagagtggaccaatttaagtgtgcccggcgtccaggatagtcctggagctaaaatgggaggagagtggggacaatctgctatctgccctgagtctgcccaggagtggacataccaagttggacaacatcttgtaggaagacaatggtgtaaaattggttgatcctttgggtgaaatgttggcaccatcctgggaggaacatgccacctgtttagcaaatgctgaggaacaagatatgcagagagtgcttattgacatcagcgagaaagaagctgtgaatctgcaacaagatgcctttgtagttattggtagagataccaggcccagcagtgagaaactttcacaatctgtaatagatggtgtgactgttctaggaggtcaattccatgattatggcttgttaacaacaccccagctgcactacatggtgtattgtcgaaacacgggtggccgatatggaaaggcaactatagaaggttactaccagaaactctctaaggcttttgtggaactcaccaaacaggcttcttgcagtggagatgaatacagatcacttaaggttgactgtgcaaatggcataggggccctgaagctaagggaaatggaacactacttctcacagggcctgtcagttcagctgtttaatgatgggtccaagggcaaactcaatcatttatgtggagctgactttgt

SEQ ID NO: 165559 - DNA, 143 bp, Homo sapiens
  Payload ID: 12582
  Gene Symbol: PGM3
  Gene Name: phosphoglucomutase 3
  ENST ID: ENST00000605602
  CDS Start-End: 1-36
gatgcctttgtagttattggtagagataccaggtgatgataagagttactggtaaaaaaaaaaacctttgggaacgtgatataaacgattgtatcagttttaatccaagacaaatggaaagaagtaaagtggaactaccctga

SEQ ID NO: 165560 - DNA, 5905 bp, Homo sapiens
  Payload ID: 12582
  Gene Symbol: PGM3
  Gene Name: phosphoglucomutase 3
  ENST ID: ENST00000616566
  CDS Start-End: 155-1480
gagccggaagccacgcagggccacgtctgcggttctgaggactgggtttgggtgcagacgttgttgcttgggcgcttctccgctgcgtgtaggtgaagggggcttcctgaccgaggaagacaatggtgtaaaattggttgatcctttgggtgaaatgttggcaccatcctgggaggaacatgccacctgtttagcaaatgctgaggaacaagatatgcagagagtgcttattgacatcagcgagaaagaagctgtgaatctgcaacaagatgcctttgtagttattggtagagataccaggcccagcagtgagaaactttcacaatctgtaatagatggtgtgactgttctaggaggtcaattccatgattatggcttgttaacaacaccccagctgcactacatggtgtattgtcgaaacacgggtggccgatatggaaaggcaactatagaaggttactaccagaaactctctaaggcttttgtggaactcaccaaacaggcttcttgcagtggagatgaatacagatcacttaaggttgactgtgcaaatggcataggggccctgaagctaagggaaatggaacactacttctcacagggcctgtcagttcagctgtttaatgatgggtccaagggcaaactcaatcatttatgtggagctgactttgtgaaaagtcatcagaaacctccacagggaatggaaattaagtccaatgaaagatgctgttcttttgatggagatgcagacagaattgtttattactaccatgatgcagatggccactttcatctcatagatggagacaagatagcaacgttaattagcagtttccttaaagagctcctggtggagattggagaaagtttgaatattggtgttgtacaaactgcatatgcaaatggaagttcaacacggtatcttgaagaagttatgaaggtacctgtctattgcactaagactggtgtaaaacatttgcaccacaaggctcaagagtttgacattggagtttattttgaagcaaatgggcatggcactgcactgtttagtacagctgttgaaatgaagataaaacaatcagcagaacaactggaagataagaaaagaaaagctgctaagatgcttgaaaacattattgacttgtttaaccaggcagctggtgatgctatttctgacatgctggtgattgaagcaatcttggctctgaagggcttgactgtacaacagtgggatgctctctatacagatcttccaaacagacaacttaaagttcaggttgcagacaggagagttattagcactaccgatgctgaaagacaagcagttacacccccaggattacaggaggcaatcaatgacctggtgaagaagtacaagctttctcgagcttttgtccggccctctggtacagaagatgtcgtccgagtatatgcagaagcagactcacaagtaagaaagtgcagatcaccttgcacatgaagtgagcttggcagtatttcagctggctggaggaattggagaaaggccccaaccaggtttctgaagataattttcatattcctgagaaactggactttttacaagtctttacaaaactgtcaataataatggcagtactaagagatttataatcataatgtttacaatgcagcctactggattgtctctagatctgtttttcttaaacactaacagaataattctttataaataggtaagccttacacttgttaaagaaatttacctctaatttcagtctcactaatgtaaaatactgggacttaagtatacaattcagtcactaactgtacagttttatgtggggaacaattcatgcaggctactggaaaattaaatcttattaccaactccttgtgatatctttgccatcaccatcacatgagcaagatgatgttttgcagcattccccattgctgatacaaatggagagggcagagaagactttatacaaccagtttttccattgcagagtcttaagaaagattattagatgacttacctatatgactaatgccatcaggaactcagaggtatgaatagggggttgtccatccctcttccatactgaggtggagatgctcatgcaatacttttaaggatgcatggtccagccttcagttattcttcactgctcttggtgaaggtatgtgggagaaaaactaattataatacgtttcccagcctctgatggagaaggaacaccattctgataccagaacatggttaataaggaaaagagaaaaatccccaaccaatcttaattgaaccaagtctgaaaccaatggaaaaaaaaaatgggtagtgtatattttgcaggtttaagacaactcaggacaataaaaacaatggactttacatgtgtatatatatagctctcttaggcaccataatcagtatgagccaacaatatttaaacttgattcaggccacattcagacatttgctcttatatacaaatatttaaattaaatacaatctgaaatgtgttctgttacatacaaaaaaggaaaaactatacaacgcagagcagtgtgtgtgttttaaataattacatttacatgtaagctaaatggaaccagcaatggtgctcaagtttttatcatcccttccagaaaatctttttctaccatctcttctattttttgcctggctttgctggaacatggtttgtggttctccagtttcatgtccttattagggaaggcatttgagtagaggataggactccctgagtgtcctccacatcggcttgtgactttgctgttgaagacttgactgagcacattgaagaacggcaggagctgctccatactgcgcacggtgcagatggtgagcagcaagtgccctggctcccaacccaatgttctccctgagttgtcttcctctggatttttctgcagaaaacaaaaagtgaactggtattaatacaacagacaatgtggtatgttagaaaaattaaaaatatataaactttggcaattggtcaagaaatgaatacaaatgacattaagtttctaactcctgacctgatcaaaacccttggtgcttctgagaccttttactgccatttattagttttacatggagcagtctaacattgtagtaatagttcccaactagaatgcgcagataagcttagttaacagaaatagctttgaacaggaatagagtcaaacataaaagttttatgttgtgctttgtatttactcaaaaagctcccaggtttctgaaccctcactactgtaaccaaggactaggtcacaaaattactacagaaaaaaggaacaaagtgctttatacatttcataatatatccccttttattataattagttaattcccttttatctaaatggcctaaatttgccatgatggtagcagtgtccaaagtgaataattactgtcagtactgcatcacagagaaaggaagggatccctcaggagacactgctgtctccttctgggttgtgctaaacaacatagggaggaaagctggacctggagtcaaaggaattgagttagtgtgctggctctgccatacttacggcacccttgggcaggatatacaaaggttcctcacttataaaatgggacagtctaaaactaccttttagtagagaagtcaaatgagaaggtatgtgaaaactctgtcaactaaatataaagactaataatttgggtattaagaggctagtttgagaagccacctgaattacacaaacacagctacagacatcattctgtctagagaaagataagagagaacaggttggttgaacttgggcagaatcacagatacaattccacactaaagaatgaaaataagcaatgaactagacagaaggaagaaatcatgaagacttaggaagcagaattacaatctgtcatattaacaaatggagtttgccttctaagatcagatgttgctcagaaactttcattgtttacctaataatttaatatcactagtttcctagtgggtcaagcagatgcaaaatccagcttattttcttctatgtgctctcaagcttattgcttattttaaagtaaaatcctgaaaaaggaaaatattaggttggtgcaaacgtaattgcggtttttgcattgttgaaatttgccgttttatattggagtacattcttaaataaatgtggttatgttatacatcattttaagcatatttctcactttttttttgctaatgacttattgctgtttatatttattttagactatggaaatgatgttagacaaaaatcaaatttagcgattttctgagttcaaaataggttataaagcagcagagacaacacacaacatcaacaatgcatttggcccaggaactgctaatgaacatacagtgccgtgatggctcaagaagttttgcaaaggagactagagccttgaagatgaggagtgcagtggccagtcatcggaaattgataatgaccaattgagaacatcatcgaagctgatcctcttacaactataagagagctgcccaagaactcaatgttgaccattttatggtcgttcggcatttgaagcaaattgaaaaggtgaaaaagctcaataaatgggtgcctcatgagctgagtgaaaaataaaaaaattcgttgttttgaagtgtcattttctctattctatgcaacaataatgaatcatttctctatcggattgtgatgtgtgccaaaaggtggattttatacgacaactggcgatgaccagctcagtggctggactgaaagaagctccaaagcacttcccaaagccaaacttgctccaaaaaatggtcatggtcattgtttggtggtttgctgccagtctgatccactacagctttctgaatccaggtgaaaccattacatctgataagtatgctcagcaaatcaatgagatgcaccaaaaactgcaatgcctgcagccggcattggccaccagaaagggcccaattcttttcacgacaacactgggccgcacgttgcacaaccaacgcttcgaaaattgaactaattgggctatgaagttttgcctcatctgccatattcacctgacctcttgccaacaaactaccacttctttaggcatctcagcaacgttttgcagggaaattgcttccacaactagcaggacacagaaaatgctttccaagagttcgtcaaatttggaagcatggatttttatgctacaggagtaaacaaacttatttctcattggcaaaaatgtgttgattgtaatggttcctattttaattaataaagatttgtgtgaacctagttataatgacttaaaattcatggtcccaaacagcaattacttttgcaccaaactaaaaatataagttaaaatggaagagtctaggagcaaaccaagaaaagatcacctacttcatcatctctggtcaaaaacaaaccaaaaaacttaacagctatcacttaagtttgcttcctagcaattatttagcttccagtctagattacaggatatataaaactttctttctttctttcttaactatgacactggcaccaatgagagtcctgtgactgactttcacatttccaccattactcaattactggtaccataccacctctaatcccctaaatcaaactgcaattcaacaataaagggcgtacagagatgactttgtcctgaaggaaaatgaatatccttgtaccctctatatagctaacttccaaatgtaagagaactatggggtaaccttttgtttctattcctatcaagatgagcctttaagagagggacttttattaagctcttgaccaagaagaatacacttgattcagagtttctgatgctcttaatcagaactatatgtattgtctcaatattaaataaagtcaaatgtttccatacaaa

SEQ ID NO: 165561 - DNA, 1782 bp, Homo sapiens
  Payload ID: 12583
  Gene Symbol: PGM5
  Gene Name: phosphoglucomutase 5
  Uniprot ID: Q15124
  ENST ID: ENST00000396392
  CDS Start-End: 230-1393
ggaaggcagaagcaatctctgccgagagagtcagccgagcggccgcgcggagaggaggggcgggcggtccccaggcgggcgggtgcagggcgcagggcgccgacctgctggagagggggcccgggcgcgaggcggagtcccggcgcgcagccaggctggtggaggcccccggcaggctgcagattccctccggctccgggagccgcagcaggaccggccaggaggcgccatggaggggagccccatcccggtgctgacagtgcccaccgcgccctacgaggaccagcggccggccggcggcgggggtctgcggcgacccaccggcctcttcgagggccagcgcaactacctgcccaactttatccagagcgtgctgtcgtccatcgacctgcgcgaccgtcagggctgcaccatggtggtgggcagcgacggcaggtactttagcaggacggccatcgagatcgtggtgcagatggccgcggccaacgggattggacgactgattattggacagaatggcatcttgtcgacacctgcggtctcctgcattatcaggaagatcaaggcagctggtggaatcattctaacagccagccactgccctggaggaccagggggagagtttggagtgaagtttaatgttgccaatggaggtcctgcacccgatgttgtctcagacaaaatctaccaaatcagcaaaacgattgaggaatatgctatatgtcctgatctccgaatcgacctatctcgactaggaagacaagaatttgacctagaaaacaaattcaaaccattcagagtggagatagtggacccagtggatatctatcttaacctccttcggaccatctttgactttcatgccatcaagggtttgctgactggacccagccaactgaagattcgcattgacgcaatgcacggagttatgggaccttatgtgagaaaagttctgtgtgatgagctgggggccccagccaattctgcaataaactgtgttcccctggaagactttggagggcagcaccctgacccaaacctgacatatgcaacgactcttctggaagcaatgaaaggaggagaatatggatttggagctgcatttgatgctgatggggaccgttatatgatcctaggccaaaatggcttctttgtgagcccttctgactccctggccatcattgctgccaacctctcttgcattccatatttccgtcagatgggggtccgcgggtttgggaggagtatgccaaccagcatggccctggacagagtggccaaatcaatgaaggtccctgtatatgagaccccagctggatggagattcttctcaaatctgatggactcaggacgttgcaatctgtgtggggaagagagctttggcactgtttagatcgtctctattggaacatctttaagttcactgattctttccttagctgtgtccaatctgctgatgagcctgttgaaggaattcttcttctccgatactgtgtgttttttttttttttttagcatttctctttgactcttttaaaatagtttttagttctctgaaattccccatctgtttatgtaattgtttatctttttcattagatcatttaacatattagacatggttgttttaaacaccctgtctgatagttccaatctctggttcatctctgactttggttcagctgattgctttatctcttgacaatggtttgggttttcctgttttttgtagatctcataaatttttattgaatgctgaataatatgtggataagaacagta

SEQ ID NO: 165562 - DNA, 3338 bp, Homo sapiens
  Payload ID: 12583
  Gene Symbol: PGM5
  Gene Name: phosphoglucomutase 5
  Uniprot ID: Q15124
  ENST ID: ENST00000396396
  CDS Start-End: 230-1933
ggaaggcagaagcaatctctgccgagagagtcagccgagcggccgcgcggagaggaggggcgggcggtccccaggcgggcgggtgcagggcgcagggcgccgacctgctggagagggggcccgggcgcgaggcggagtcccggcgcgcagccaggctggtggaggcccccggcaggctgcagattccctccggctccgggagccgcagcaggaccggccaggaggcgccatggaggggagccccatcccggtgctgacagtgcccaccgcgccctacgaggaccagcggccggccggcggcgggggtctgcggcgacccaccggcctcttcgagggccagcgcaactacctgcccaactttatccagagcgtgctgtcgtccatcgacctgcgcgaccgtcagggctgcaccatggtggtgggcagcgacggcaggtactttagcaggacggccatcgagatcgtggtgcagatggccgcggccaacgggattggacgactgattattggacagaatggcatcttgtcgacacctgcggtctcctgcattatcaggaagatcaaggcagctggtggaatcattctaacagccagccactgccctggaggaccagggggagagtttggagtgaagtttaatgttgccaatggaggtcctgcacccgatgttgtctcagacaaaatctaccaaatcagcaaaacgattgaggaatatgctatatgtcctgatctccgaatcgacctatctcgactaggaagacaagaatttgacctagaaaacaaattcaaaccattcagagtggagatagtggacccagtggatatctatcttaacctccttcggaccatctttgactttcatgccatcaagggtttgctgactggacccagccaactgaagattcgcattgacgcaatgcacggagttatgggaccttatgtgagaaaagttctgtgtgatgagctgggggccccagccaattctgcaataaactgtgttcccctggaagactttggagggcagcaccctgacccaaacctgacatatgcaacgactcttctggaagcaatgaaaggaggagaatatggatttggagctgcatttgatgctgatggggaccgttatatgatcctaggccaaaatggcttctttgtgagcccttctgactccctggccatcattgctgccaacctctcttgcattccatatttccgtcagatgggggtccgcgggtttgggaggagtatgccaaccagcatggccctggacagagtggccaaatcaatgaaggtccctgtatatgagaccccagctggatggagattcttctcaaatctgatggactcaggacgttgcaatctgtgtggggaagagagctttggcactggctctgaccacctccgagagaaggatggcctgtgggctgtcttggtctggctctccattattgctgcccggaagcagagtgtggaggaaattgtccgagatcactgggccaaatttggccgccactactattgcaggtttgactatgaggggttggatcccaagacgacatattatatcatgagggacctggaggccctggtcacagacaaatccttcattggccagcagtttgctgtggggagccatgtctacagcgtggcgaagacggatagttttgaatacgtggaccctgtggatggcactgtgaccaagaaacagggcctaaggatcattttctcggatgcatcacggctcatcttccggctcagttcctccagtggtgtgcgggccaccctcagactgtacgcagagagctacgagagggatcccagcggccatgaccaggagccacaggcagtgctgagccctctcatagccatcgcactgaaaatatcccagattcatgagagaactggccggaggggacccactgtcatcacctgaatagaggaaagatcactcaccagggccaaagagagtgctcagcgggagatgcttcactgatgccttcttgctacctgtttgtgcctcttatgactttggaaaaacaaaagatattttgcttttgggggatagagggtgggtgggaaaagaaaaaaaatccatttggttttggttttgtcctattcctccaaatgcagcagggcctttagttgtctgttaaagctgcactataatttggtatctacattttatcacacaaaggaacctccccttttgacaacaactgggctaggcagctgttaatcacaacatttgtgcatcacttgtgccaagtgagaaaatgttctaaaatcacaagagagaacagtgccagaatgaaactgaccctaagtcccaggtgcccctgggcaggcagaaggagacactcccagcatggaggagggtttatcttttcatcctaggtcaggtctacaatgggggaaggttttattatagaactcccaacagcccacctcactcctgccacccacccgatggccctgcctcccccatcccatccccaacatccctgtaccaccttctctcacatcttctaaagctttgtacaaatcacaatggtgcacttccaacaaaatatatcaataggtgttttcctctcttattttgtaaatagtattattttagctattaagctggataccttctttcaaattcagccattcagttgtaaagttgggaagaagtttcttgacaagactctgcaattaaatgcttaaaatttggaggggatccttccttgattacatcaagtatgttggtacatgggtttatacaagttcctcttgagaaggcaaaaagaccaccatgtgtgagagctctttgacttggccaataggggcctatcttaatgcacttgtttggacacatttctgatcttatttgtaaaggctgcaaaaggagaggatgaaatgctgtaaaagtaggaaatgaagtggaagctggaagaaaatgtaattggtggtacagctatgggccagatggtggaggggagggtggggacccctgccggcaagcagagtgtcacagctggctttcctcacttgggaaaagggtactgccggtctagcagcctcctctgtactcagccaggacacccagcgcgtgggacctgtttgtgtctgttttgcttccttgggaacggcacagtcactcaccctgccatttgcggaaatgacctggtgcactttgactgttaagcaatgcgttattgctgtagtcaaggttagtgcaagcaaggaaacattcccagtaaggtatttgtttccattttctgtctgtgcttctgtcagaaacttgctaggacatttagtggccaataaaaaagaaattcctaatttcaacctta

SEQ ID NO: 165563 - DNA, 616 bp, Homo sapiens
  Payload ID: 12583
  Gene Symbol: PGM5
  Gene Name: phosphoglucomutase 5
  ENST ID: ENST00000431583
  CDS Start-End: 1-616
gagggccagcgcaactacctgcccaactttatccagagcgtgctgtcgtccatcgacctgcgcgaccgtcagggctgcaccatggtggtgggcagcgacggcaggtactttagcaggacggccatcgagatcgtggtgcagatggccgcggccaacgggattggacgactgattattggacagaatggcatcttgtcgacacctgcggtctcctgcattatcaggaagatcaaggcagctggtggaatcattctaacagccagccactgccctggaggaccagggggagagtttggagtgaagtttaatgttgccaatggagtggagatagtggacccagtggatatctatcttaacctccttcggaccatctttgactttcatgccatcaagggtttgctgactggacccagccaactgaagattcgcattgacgcaatgcacggagttatgggaccttatgtgagaaaagttctgtgtgatgagctgggggccccagccaattctgcaataaactgtgttcccctggaagactttggagggcagcaccctgacccaaacctgacatatgcaacgactcttctggaagcaatgaaaggaggagaatatggatttg

SEQ ID NO: 165564 - DNA, 1885 bp, Homo sapiens
  Payload ID: 12584
  Gene Symbol: PGD
  Gene Name: phosphogluconate dehydrogenase
  Uniprot ID: P52209
  ENST ID: ENST00000270776
  CDS Start-End: 39-1490
gcgcgtcgccgctcttcggttctgctctgtccgccgccatggcccaagctgacatcgcgctgatcggattggccgtcatgggccagaacttaattctgaacatgaatgaccacggctttgtggtctgtgcttttaataggactgtctccaaagttgatgatttcttggccaatgaggcaaagggaaccaaagtggtgggtgcccagtccctgaaagagatggtctccaagctgaagaagccccggcggatcatcctcctggtgaaggctgggcaagctgtggatgatttcatcgagaaattggtaccattgttggatactggtgacatcatcattgacggaggaaattctgaatatagggacaccacaagacggtgccgagacctcaaggccaagggaattttatttgtggggagcggagtcagtggtggagaggaaggggcccggtatggcccatcgctcatgccaggagggaacaaagaagcgtggccccacatcaagaccatcttccaaggcattgctgcaaaagtgggaactggagaaccctgctgtgactgggtgggagatgagggagcaggccacttcgtgaagatggtgcacaacgggatagagtatggggacatgcagctgatctgtgaggcataccacctgatgaaagacgtgctgggcatggcgcaggacgagatggcccaggcctttgaggattggaataagacagagctagactcattcctgattgaaatcacagccaatattctcaagttccaagacaccgatggcaaacacctgctgccaaagatcagggacagcgcggggcagaagggcacagggaagtggaccgccatctccgccctggaatacggcgtacccgtcaccctcattggagaagctgtctttgctcggtgcttatcatctctgaaggatgagagaattcaagctagcaaaaagctgaagggtccccagaagttccagtttgatggtgataagaaatcattcctggaggacattcggaaggcactctacgcttccaagatcatctcttacgctcaaggctttatgctgctaaggcaggcagccaccgagtttggctggactctcaattatggtggcatcgccctgatgtggagagggggctgcatcattagaagtgtattcctaggaaagataaaggatgcatttgatcgaaacccggaacttcagaacctcctactggacgacttctttaagtcagctgttgaaaactgccaggactcctggcggcgggcagtcagcactggggtccaggctggcattcccatgccctgttttaccactgccctctccttctatgacgggtacagacatgagatgcttccagccagcctcatccaggctcagcgggattacttcggggctcacacctatgaactcttggccaaaccagggcagtttatccacaccaactggacaggccatggtggcaccgtgtcatcctcgtcatacaatgcctgatcatgctgctcctgtcaccctccacgattccacagaccaggacattccatgtgcctcatggcactgccacctggccctttgccctattttctgttcagttttttaaaagtgttgtaagagactcctgaggaagacacacagtttatttgtaaagtagctctgtgagagccaccatgccctctgcccttgcctcttgggactgaccaggagctgctcatgtgcgtgagagtgggaaccatctccttgcggcagtggcttccgcgtgccccgtgtgctggtgcggttcccatcacgcagacaggaagggtgtttgcgcactctgatcaactggaacctctgtatcatgcggctgaattccctttttcctttactcaataaaagctacatcagactga

SEQ ID NO: 165565 - DNA, 508 bp, Homo sapiens
  Payload ID: 12584
  Gene Symbol: PGD
  Gene Name: phosphogluconate dehydrogenase
  ENST ID: ENST00000477958
  CDS Start-End: 46-237
gtcctccgcgcgtcgccgctcttcggttctgctctgtccgccgccatggcccaagctgacatcgcgctgatcggattggccgtcatgggccagaacttaattctgaacatgaatgaccacggctttgtggacttttgtccttctaggtctgtgcttttaataggactgtctccaaagttgatgatttcttggccaatgaggcaaagggaaccaaagtggtgggtgcccagtccctgaaagagatggtctccaagctgaagaagccccggcggatcatcctcctggtgaaggctgggcaagctgtggatgatttcatcgagaaattggtaccattgttggatactggtgacatcatcattgacggaggaaattctgaatatagggacaccacaagacggtgccgagacctcaaggccaagggaattttatttgtggggagcggagtcagtggtggagaggaaggggcccggtatggcccatcgctcatgccaggagggaacaaagaagc

SEQ ID NO: 165566 - DNA, 680 bp, Homo sapiens
  Payload ID: 12584
  Gene Symbol: PGD
  Gene Name: phosphogluconate dehydrogenase
  ENST ID: ENST00000483936
  CDS Start-End: 7-680
gccgccatggcccaagctgacatcgcgctgatcggattggccgtcatgggccagaacttaattctgaacatgaatgaccacggctttgtggtgggagatgagggagcaggccacttcgtgaagatggtgcacaacgggatagagtatggggacatgcagctgatctgtgaggcataccacctgatgaaagacgtgctgggcatggcgcaggacgagatggcccaggcctttgaggattggaataagacagagctagactcattcctgattgaaatcacagccaatattctcaagttccaagacaccgatggcaaacacctgctgccaaagatcagggacagcgcggggcagaagggcacagggaagtggaccgccatctccgccctggaatacggcgtacccgtcaccctcattggagaagctgtctttgctcggtgcttatcatctctgaaggatgagagaattcaagctagcaaaaagctgaagggtccccagaagttccagtttgatggtgataagaaatcattcctggaggacattcggaaggcactctacgcttccaagatcatctcttacgctcaaggctttatgctgctaaggcaggcagccaccgagtttggctggactctcaattatggtggcatcgccctgatgtggagagggggctgcatcattagaag

SEQ ID NO: 165567 - DNA, 806 bp, Homo sapiens
  Payload ID: 12584
  Gene Symbol: PGD
  Gene Name: phosphogluconate dehydrogenase
  ENST ID: ENST00000491493
  CDS Start-End: 192-806
cgagtgcgcacaggactgaacgagcacgcccggtccctgctccggagcggaggacacgacgcggacccgcacggtgcaccgcagtgacctgaggaaggagcgacgggcgctcgcgccaaaggcgtccgagtgcctggtaaactgtaaagcgcggtcctgcagctgacatcgcgctgatcggattggccgtcatgggccagaacttaattctgaacatgaatgaccacggctttgtggtctgtgcttttaataggactgtctccaaagttgatgatttcttggccaatgaggcaaagggaaccaaagtggtgggtgcccagtccctgaaagagatggtctccaagctgaagaagccccggcggatcatcctcctggtgaaggctgggcaagctgtggatgatttcatcgagaaattggtaccattgttggatactggtgacatcatcattgacggaggaaattctgaatatagggacaccacaagacggtgccgagacctcaaggccaagggaattttatttgtggggagcggagtcagtggtggagaggaaggggcccggtatggcccatcgctcatgccaggagggaacaaagaagcgtggccccacatcaagaccatcttccaaggcattgctgcaaaagtgggaactggagaaccctgctgtgactgggtgggagatgagggagcaggccacttcgtgaagatggtgcacaacgggatagagtatggggacatgcagctgatctgtgaggcataccacctgatgaaagacgtgctgggcatggcgcaggacgagatggcccag

SEQ ID NO: 165568 - DNA, 642 bp, Homo sapiens
  Payload ID: 12584
  Gene Symbol: PGD
  Gene Name: phosphogluconate dehydrogenase
  ENST ID: ENST00000465632
  CDS Start-End: 163-642
gggggcccgcgggaggcgcggaggaaagtgcagactcccagtcacggccaaatgtggaaggaccggacccctgggttgcagcgcgtcgagcggtgctgactctttcctttgttctgtttctgcctctctagagctgacatcgcgctgatcggattggccgtcatgggccagaacttaattctgaacatgaatgaccacggctttgtggtctgtgcttttaataggactgtctccaaagttgatgatttcttggccaatgaggcaaagggaaccaaagtggtgggtgcccagtccctgaaagagatggtctccaagctgaagaagccccggcggatcatcctcctggtgaaggctgggcaagctgtggatgatttcatcgagaaattggtaccattgttggatactggtgacatcatcattgacggaggaaattctgaatatagggacaccacaagacggtgccgagacctcaaggccaagggaattttatttgtggggagcggagtcagtggtggagaggaaggggcccggtatggcccatcgctcatgccaggagggaacaaagaagcgtggccccacatcaagaccatcttccaaggcattgctgcaaaagtgggaactggagaaccctgctgtgactgg

SEQ ID NO: 165569 - DNA, 767 bp, Homo sapiens
  Payload ID: 12584
  Gene Symbol: PGD
  Gene Name: phosphogluconate dehydrogenase
  ENST ID: ENST00000460189
  CDS Start-End: 1-767
tgacatcgcgctgatcggattggccgtcatgggccagaacttaattctgaacatgaatgaccacggctttgtggtctgtgcttttaataggactgtctccaaagttgatgatttcttggccaatgaggcaaagggaaccaaagtggtgggtgcccagtccctgaaagagatggtctccaagctgaagaagccccggcggatcatcctcctggtgaaggctgggcaagctgtggatgatttcatcgagaaattgagacggtgccgagacctcaaggccaagggaattttatttgtggggagcggagtcagtggtggagaggaaggggcccggtatggcccatcgctcatgccaggagggaacaaagaagcgtggccccacatcaagaccatcttccaaggcattgctgcaaaagtgggaactggagaaccctgctgtgactgggtgggagatgagggagcaggccacttcgtgaagatggtgcacaacgggatagagtatggggacatgcagctgatctgtgaggcataccacctgatgaaagacgtgctgggcatggcgcaggacgagatggcccaggcctttgaggattggaataagacagagctagactcattcctgattgaaatcacagccaatattctcaagttccaagacaccgatggcaaacacctgctgccaaagatcagggacagcgcggggcagaagggcacagggaagtggaccgccatctccgccctggaatacggcgtacccgtcaccctcattg

SEQ ID NO: 165570 - DNA, 3180 bp, Homo sapiens
  Payload ID: 12585
  Gene Symbol: PHGDH
  Gene Name: phosphoglycerate dehydrogenase
  ENST ID: ENST00000369407
  CDS Start-End: 1508-3007
attctatgctgcagcctaagcatcattcctcttctcttcttagtggagataaaattacccactgctctccttacatttactttgtccatatttgctcctatgctctaggctcgtgcacaacaaacacagtgtgggcccttaccctagaagccaacttctcatgacctttctctatctccagaatccatgcagtgggaatgaaggtaaaagaaggttttcatgggatccagctgagagctctacggggaaaatggatctgaggagccatgtgctccatctcttttattttacaggtagagactaggggtatagagtgaggtgaattaccgcagtgacccacacattgttggcagacctaggattagaactctgtcttcctggttcccagcttggtgcttttgaaagcatacttgctgctttcttaccggcctggtgtctgccactttgggacagagtgtggacttgctcacctgccccatttcttagggattctcattctgtgtttgagcaagaatattcttattctggaaagaaccacataccacaggattctgggtgagcataaggaagattgtcttggggatctgacttagctcacgtatagtggctatgatgaattcagtgtcttattttttgcatatgtatatttttagtctaatattgcctgggtgtctgagcaagtctagatgaatttaattgctctcatttttcccctgcccctcttcctttggtctctcttttaggaaatgtttttctttcaacattcgtttcattcattatttactcattcggccaaccaacatttattgagtgccttccctgtatcagggacaggggcttacaaagtagaatttgatcccacctctgccctcagtagctcagtgtctaatggaggtagtgatgttcattaagcgtcgccagatactgtgctaggtgctgtgcctgttctctctcgcttgttcctcacacacttgagaaggccgaagctgattcatagcttggaaggcaggggccttggatttgaacccaggcctgaccaatggcagaacctatcagatgtgtggacagatgacattgcctttctttctttggatatatcaaaatcagccagcaggcaggaactcccattttgagcaagcaatgtgcaggaatgatagggtatacagagaggaacaggagatggcccctgacttccagcatgtgtctgatggacatccaggctgcaggcatcatggtgctgtctagagagatgagccaggtgcccagagcccatgggccaatgctgccctttcttgagcatgccaaacaaagcggttggtgtgttagaggcacagtctcctccactctaagtaaaaatcagcatgagtcctagcccacatttccctagtgagtataccaaagatatctatgaactggcagtcatcagtgacttcctaaggttccggaaatgcatctcttactcaggagtaagcaatgatgtgcctgcggctttacgagttctcacagaatgactttctggacccaaatgttttttctgcttcaggactgtgaaggccttattgttcgctctgccaccaaggtgaccgctgatgtcatcaacgcagctgagaaactccaggtggtgggcagggctggcacaggtgtggacaatgtggatctggaggccgcaacaaggaagggcatcttggttatgaacacccccaatgggaacagcctcagtgccgcagaactcacttgtggaatgatcatgtgcctggccaggcagattccccaggcgacggcttcgatgaaggacggcaaatgggagcggaagaagttcatgggaacagagctgaatggaaagaccctgggaattcttggcctgggcaggattgggagagaggtagctacccggatgcagtcctttgggatgaagactatagggtatgaccccatcatttccccagaggtctcggcctcctttggtgttcagcagctgcccctggaggagatctggcctctctgtgatttcatcactgtgcacactcctctcctgccctccacgacaggcttgctgaatgacaacacctttgcccagtgcaagaagggggtgcgtgtggtgaactgtgcccgtggagggatcgtggacgaaggcgccctgctccgggccctgcagtctggccagtgtgccggggctgcactggacgtgtttacggaagagccgccacgggaccgggccttggtggaccatgagaatgtcatcagctgtccccacctgggtgccagcaccaaggaggctcagagccgctgtggggaggaaattgctgttcagttcgtggacatggtgaaggggaaatctctcacgggggttgtgaatgcccaggcccttaccagtgccttctctccacacaccaagccttggattggtctggcagaagctctggggacactgatgcgagcctgggctgggtcccccaaagggaccatccaggtgataacacagggaacatccctgaagaatgctgggaactgcctaagccccgcagtcattgtcggcctcctgaaagaggcttccaagcaggcggatgtgaacttggtgaacgctaagctgctggtgaaagaggctggcctcaatgtcaccacctcccacagccctgctgcaccaggggagcaaggcttcggggaatgcctcctggccgtggccctggcaggcgccccttaccaggctgtgggcttggtccaaggcactacgcctgtactgcaggggctcaatggagctgtcttcaggccagaagtgcctctccgcagggacctgcccctgctcctattccggactcagacctctgaccctgcaatgctgcctaccatgattggcctcctggcagaggcaggcgtgcggctgctgtcctaccagacttcactggtgtcagatggggagacctggcacgtcatgggcatctcctccttgctgcccagcctggaagcgtggaagcagcatgtgactgaagccttccagttccacttctaaccttggagctcactggtccctgcctctggggcttttctgaagaaacccacccactgtgatcaatagggagagaaaatccacattcttgggctgaacgcgggcctctgacactgcttacactgcactctgaccctgtagtacagcaataaccgtctaataaagagcctaccccc

SEQ ID NO: 165571 - DNA, 1913 bp, Homo sapiens
  Payload ID: 12585
  Gene Symbol: PHGDH
  Gene Name: phosphoglycerate dehydrogenase
  Uniprot ID: O43175
  ENST ID: ENST00000369409
  CDS Start-End: 137-1738
gaggaggaggaggagatgactggggagcgggagctggagaatactgcccagttactctagcgcgccaggccgaaccgcagcttcttggcttaggtacttctactcacagcggccgattccgaggccaactccagcaatggcttttgcaaatctgcggaaagtgctcatcagtgacagcctggacccttgctgccggaagatcttgcaagatggagggctgcaggtggtggaaaagcagaaccttagcaaagaggagctgatagcggagctgcaggactgtgaaggccttattgttcgctctgccaccaaggtgaccgctgatgtcatcaacgcagctgagaaactccaggtggtgggcagggctggcacaggtgtggacaatgtggatctggaggccgcaacaaggaagggcatcttggttatgaacacccccaatgggaacagcctcagtgccgcagaactcacttgtggaatgatcatgtgcctggccaggcagattccccaggcgacggcttcgatgaaggacggcaaatgggagcggaagaagttcatgggaacagagctgaatggaaagaccctgggaattcttggcctgggcaggattgggagagaggtagctacccggatgcagtcctttgggatgaagactatagggtatgaccccatcatttccccagaggtctcggcctcctttggtgttcagcagctgcccctggaggagatctggcctctctgtgatttcatcactgtgcacactcctctcctgccctccacgacaggcttgctgaatgacaacacctttgcccagtgcaagaagggggtgcgtgtggtgaactgtgcccgtggagggatcgtggacgaaggcgccctgctccgggccctgcagtctggccagtgtgccggggctgcactggacgtgtttacggaagagccgccacgggaccgggccttggtggaccatgagaatgtcatcagctgtccccacctgggtgccagcaccaaggaggctcagagccgctgtggggaggaaattgctgttcagttcgtggacatggtgaaggggaaatctctcacgggggttgtgaatgcccaggcccttaccagtgccttctctccacacaccaagccttggattggtctggcagaagctctggggacactgatgcgagcctgggctgggtcccccaaagggaccatccaggtgataacacagggaacatccctgaagaatgctgggaactgcctaagccccgcagtcattgtcggcctcctgaaagaggcttccaagcaggcggatgtgaacttggtgaacgctaagctgctggtgaaagaggctggcctcaatgtcaccacctcccacagccctgctgcaccaggggagcaaggcttcggggaatgcctcctggccgtggccctggcaggcgccccttaccaggctgtgggcttggtccaaggcactacgcctgtactgcaggggctcaatggagctgtcttcaggccagaagtgcctctccgcagggacctgcccctgctcctattccggactcagacctctgaccctgcaatgctgcctaccatgattggcctcctggcagaggcaggcgtgcggctgctgtcctaccagacttcactggtgtcagatggggagacctggcacgtcatgggcatctcctccttgctgcccagcctggaagcgtggaagcagcatgtgactgaagccttccagttccacttctaaccttggagctcactggtccctgcctctggggcttttctgaagaaacccacccactgtgatcaatagggagagaaaatccacattcttgggctgaacgcgggcctctgacactgcttacactgcactctgaccctgtagtacagcaataaccgtctaataaagagcctacccccaa

SEQ ID NO: 165572 - DNA, 4887 bp, Homo sapiens
  Payload ID: 12586
  Gene Symbol: PGK1
  Gene Name: phosphoglycerate kinase 1
  Uniprot ID: P00558
  ENST ID: ENST00000373316
  CDS Start-End: 168-1421
cagcggccgggaaggggcggtgcgggaggcggggtgtggggcggtagtgtgggccctgttcctgcccgcgcggtgttccgcattctgcaagcctccggagcgcacgtcggcagtcggctccctcgttgaccgaatcaccgacctctctccccagctgtatttccaaaatgtcgctttctaacaagctgacgctggacaagctggacgttaaagggaagcgggtcgttatgagagtcgacttcaatgttcctatgaagaacaaccagataacaaacaaccagaggattaaggctgctgtcccaagcatcaaattctgcttggacaatggagccaagtcggtagtccttatgagccacctaggccggcctgatggtgtgcccatgcctgacaagtactccttagagccagttgctgtagaactcaaatctctgctgggcaaggatgttctgttcttgaaggactgtgtaggcccagaagtggagaaagcctgtgccaacccagctgctgggtctgtcatcctgctggagaacctccgctttcatgtggaggaagaagggaagggaaaagatgcttctgggaacaaggttaaagccgagccagccaaaatagaagctttccgagcttcactttccaagctaggggatgtctatgtcaatgatgcttttggcactgctcacagagcccacagctccatggtaggagtcaatctgccacagaaggctggtgggtttttgatgaagaaggagctgaactactttgcaaaggccttggagagcccagagcgacccttcctggccatcctgggcggagctaaagttgcagacaagatccagctcatcaataatatgctggacaaagtcaatgagatgattattggtggtggaatggcttttaccttccttaaggtgctcaacaacatggagattggcacttctctgtttgatgaagagggagccaagattgtcaaagacctaatgtccaaagctgagaagaatggtgtgaagattaccttgcctgttgactttgtcactgctgacaagtttgatgagaatgccaagactggccaagccactgtggcttctggcatacctgctggctggatgggcttggactgtggtcctgaaagcagcaagaagtatgctgaggctgtcactcgggctaagcagattgtgtggaatggtcctgtgggggtatttgaatgggaagcttttgcccggggaaccaaagctctcatggatgaggtggtgaaagccacttctaggggctgcatcaccatcataggtggtggagacactgccacttgctgtgccaaatggaacacggaggataaagtcagccatgtgagcactgggggtggtgccagtttggagctcctggaaggtaaagtccttcctggggtggatgctctcagcaatatttagtactttcctgccttttagttcctgtgcacagcccctaagtcaacttagcattttctgcatctccacttggcattagctaaaaccttccatgtcaagattcagctagtggccaagagatgcagtgccaggaacccttaaacagttgcacagcatctcagctcatcttcactgcaccctggatttgcatacattcttcaagatcccatttgaattttttagtgactaaaccattgtgcattctagagtgcatatatttatattttgcctgttaaaaagaaagtgagcagtgttagcttagttctcttttgatgtaggttattatgattagctttgtcactgtttcactactcagcatggaaacaagatgaaattccatttgtaggtagtgagacaaaattgatgatccattaagtaaacaataaaagtgtccattgaaaccgtgatttttttttttttcctgtcatactttgttaggaagggtgagaatagaatcttgaggaacggatcagatgtctatattgctgaatgcaagaagtggggcagcagcagtggagagatgggacaattagataaatgtccattctttatcaagggcctactttatggcagacattgtgctagtgcttttattctaacttttatttttatcagttacacatgatcataatttaaaaagtcaaggcttataacaaaaaagccccagcccattcctcccattcaagattcccactccccagaggtgaccactttcaactcttgagtttttcaggtatatacctccatgtttctaagtaatatgcttatattgttcacttcttttttttttattttttaaagaaatctatttcataccatggaggaaggctctgttccacatatatttccacttcttcattctctcggtatagttttgtcacaattatagattagatcaaaagtctacataactaatacagctgagctatgtagtatgctatgattaaatttacttatgtaacttttattgtctttggcattaacagtgtttcaaaaaattttctgtgtatacccatcagtgattcattcccaaatcttctagaagcataagtgtctcaatatattaaaacatattgaataatccttgttagagttatccctgcaggagtccttagtgctcctttatccaatttgtacttgatgccctctaggcagggtgtacagctagctgttgctctggtatttcctataaccttcttggggatttcttttacctcctgtgttagactcctgttttctggattcccccttttccctctttcttggtctactttttgtagaacacaagactctactagcttcctgagaaagggtgcctgggaggcaaaatctctaagactttgtaagtctgaaaatgtctttattcgacccttatacttgattcctagtttggctatatatagaattttagcctgagtatcactttttgagactcgaagccactgtttcattgtcactattgagaatctaaatggccattcggattctttcatcatctttataattttaccttcctatttctttcctgtccttttaatggagttttgggagagagcagaggtaaacatgatttgaaaaagccatgtctgaccagaaattctgtgctggaaagatatgtatttcacctttagggacaaagaaataaacttttggacaggaccacagagctagtaagtaacagcagggattcaagtccaggtttgtctggttccagtggctgatgcttttccaatgtgcctccgtccctgacatgatgcttctaggctatagatgcttctagactctatccctgacatgatgcttctagactattttgtttaaccctggatagaatagcaaaagaaaattttggtggttgctctaaacaaaacagaaatttgaaagctcaagttttttcttcatttgtattttagttaatactgtacccatatttgtagttaattttaaattgtaccatgtttctgcatacctctatgggtactcaggaattctagtccaatttttgtgactttttcctactgattacctttcctccaacgttttaaaaattatttcaaatggaactgaaagaagcataaactcccataaacccagcacctagactctacaattgccaacattatctatccaacaatctctgactgtaccttttaagtactttctactggactgtttccaggatcacccctcatttatttgggttgttaacctaaagaatgaatgggggaatctccagtcataaacaacttgtcaattaggcaaatatttgagttccttctatgtgcttaaagacgtgatagagggaatataagagcatttatgttctgaaggaatttttaacctaaccaaagaagatagtagataacttgtgtgcatataagctagaacagtataaggggccgggcatggtggcttacgcctgtaatcccaggactttgggaggccaaggcgggcagatcacctgtcaggagtttgggaccagcctggccaacatggtgaaaccccgtttctaccaaaaatacaaaaattagccgggcgtggtggcgtgtgccactgtagtcccagctattcagaaggctgaggcaggagaatcacttgaacccgggaggtggaggttgcagtgagctgagatcacgctactgcattcctgcttgggcgacagagtgagactctgcctcaaaacaaaaaccccacaaaacagtataaggatgtgctttctaatttggaattatgaattattggtaaaatattgcaaaggtgtatgctttaagttgtaaattcacctttaaccctagactatatatgtgtgtttatatgcagaaaaaaataattcccatgtcgtaagtgaacaatttggttctttagctcagtgttttcctgttttcttcatttccaaaatttccctctagcacaggggtttacacatgatcaaaaaggagtatacaatgaagacaccttcctcagtcccctacctaccagtttccctccccagaagcaacctctggaagaccagtttctttcaatctaaggctatttaatatacattaagaggccgggcgcagtggctcacgcctgtaatcccaacaacactttgggaggcccaggcaggcgggtcatgaggtcaggagattgagaccatcctggctaacacggtgaaaccctgtctctactaaaaatacaaaaaattagctgggcgtgatggtgggcgcctgtagtcccagctactcgggaggctgaggcaggagaatggcgtgaacctgggaagcggagctcgcagtgagccgagatcacgccactgcactccagcctgggcaacagtgagactctgcataaagagcatacccatgtgtgtacctatctatctatctatctatctatctatctatctatctatctgtatatagatatattaaaatgtaaatggtggcat

SEQ ID NO: 165573 - DNA, 1657 bp, Homo sapiens
  Payload ID: 12587
  Gene Symbol: PGK2
  Gene Name: phosphoglycerate kinase 2
  Uniprot ID: P07205
  ENST ID: ENST00000304801
  CDS Start-End: 121-1374
aagaaaggggcgggacaagggcaaaggcgttagaagtcaccaccgacccagcccctcaacagcaagttggttcttcagcattaagatccaggtgtcagcctatgtctttatattgtcaagatgtctctttctaagaagttgactttagacaaactggatgttagagggaagcgagtcatcatgagagtagacttcaatgttcccatgaagaagaaccagattacaaacaaccagaggatcaaggcttccatcccaagcatcaagtactgcctggacaatggagccaaggcagtagttcttatgagtcatctaggtcggcctgatggtgttcccatgcctgacaaatattccttagcacctgttgctgttgagctcaaatccttgctgggcaaggatgttctgttcctgaaggactgtgtaggcgcagaagtggagaaagcctgtgccaacccagctcctggttcagtcatcctgctggagaacctgcgctttcatgtggaggaagaagggaagggccaagatccctctggaaagaagattaaagctgagccagataaaatagaagccttccgagcatcactttccaagctaggggacgtctatgtcaatgatgcttttggcactgcacaccgcgctcatagttccatggtgggagtgaatctgccccataaagcatccggattcttgatgaagaaggaactagattactttgctaaagccttggaaaacccagtgagaccctttctggctatacttggtggagccaaagtggcagacaagatccaacttatcaaaaatatgctggacaaagtcaatgagatgattattggtggtggaatggcttataccttccttaaggtactcaacaacatggagattggtgcttccctgtttgatgaagagggagccaagatcgttaaagatatcatggccaaagcacaaaagaatggtgtaaggattacttttcctgttgattttgttactggggacaagtttgacgagaacgctcaggttggaaaagccactgtagcatctggcatatctcctggctggatgggtttggactgtggtcctgagagcaacaagaatcatgctcaagttgtggctcaagcaaggctaattgtttggaatgggccgttaggagtatttgaatgggatgcctttgctaagggaaccaaagccctcatggatgaaattgtgaaagccacttccaagggctgcatcactgttatagggggtggagacactgctacttgctgtgccaaatggaacactgaagataaagtcagccatgtcagcactggaggcggtgccagtctagagcttctggaaggtaaaatccttcctggagtagaggccctcagcaacatgtagttaatatagtgttacttccttctgttttctgtccatggcccttaagtcagcttaatgcttttacatctcgatgtgacttttgttaaaatctactcctagatcaagacctatgtaatggacaagcagcaggccatcaggaactcttaatatcagcacagcaattcattttagtttggtcacgcatttgcctgttcaagttctcatttgaacttcaccattgtgctatctagggaggacatattcttaagttgcctattaaagaaagtgagctgaagaaactgaa

SEQ ID NO: 165574 - DNA, 1830 bp, Homo sapiens
  Payload ID: 12588
  Gene Symbol: PGAM1
  Gene Name: phosphoglycerate mutase 1 (brain)
  Uniprot ID: P18669
  ENST ID: ENST00000334828
  CDS Start-End: 149-913
agcggtccagagcgagtggaaagatttgggcgagaacttgcgcgggagccggactgagcggtgcgagcgcgcaggcgcggccgacggggcgggctgctactccggaatctgctaatcccagtcggtgccgcatccccagcccgccgccatggccgcctacaaactggtgctgatccggcacggcgagagcgcatggaacctggagaaccgcttcagcggctggtacgacgccgacctgagcccggcgggccacgaggaggcgaagcgcggcgggcaggcgctacgagatgctggctatgagtttgacatctgcttcacctcagtgcagaagagagcgatccggaccctctggacagtgctagatgccattgatcagatgtggctgccagtggtgaggacttggcgcctcaatgagcggcactatgggggtctaaccggtctcaataaagcagaaactgctgcaaagcatggtgaggcccaggtgaagatctggaggcgctcctatgatgtcccaccacctccgatggagcccgaccatcctttctacagcaacatcagtaaggatcgcaggtatgcagacctcacagaagatcagctaccctcctgtgagagtctgaaggatactattgccagagctctgcccttctggaatgaagaaatagttccccagatcaaggaggggaaacgtgtactgattgcagcccatggcaacagcctccggggcattgtcaagcatctggagggtctctctgaagaggctatcatggagctgaacctgccgactggtattcccattgtctatgaattggacaagaacttgaagcctatcaagcccatgcagtttctgggggatgaagagacggtgcgcaaagccatggaagctgtggctgcccagggcaaggccaagaagtgaaggccggcggggaggatactgtccccaggagcaccctccctgcccgtcttgtccctctgcccctcccacctgcacatgtcacactgaccacatctgtagacatcttgagttgtagctgcagacggggaccagtggctcccattttcattttagccattttgtcgcctgcacccactcccttcatacaatctagtcagaatagcagttctagagcacaggttctcagtctaagctatggaaaagctccccttatccaacagagtttaaaagtagtgacttgggtttttgcgagtgctttgtttactaaggactttggggaggaaccatgctaagccatgaccagtgaggagaagcaacagagcctgtctgtccccatgagcggagtctgtcctctgctcttctgcagtcaggtcactgcctactgcctgggggctctagtcattccagtggaagacgaatgtaacctgcgtggtgatgtgacaactgtttcctccctgaccccagaggatctggctctaggttgggatcaatcctgaatttcgttatgtgttaatttacttttattaaaaaagtatagtatatataatacaaaacaataacccttctggggtttcttgtggcggttgaaatagtcccacatgtggtcatcagaaaataagccattcctcataccaatataggatcagctccttgacctctgaggggcaggagtgcttcctggtgtgtgtattagaatcccttcctgccttgtttcatggcagtgaaatgcctcttggtcctgtccaagtgtatctttcactgatttctgaatcatgttctagttgcttgaccctgccacatgggtccagtgttcatctgagcataactgtactaaatcctttttccatatcagtataataaaggagtgatgtgcaata

SEQ ID NO: 165575 - DNA, 857 bp, Homo sapiens
  Payload ID: 12589
  Gene Symbol: PGAM2
  Gene Name: phosphoglycerate mutase 2 (muscle)
  Uniprot ID: P15259
  ENST ID: ENST00000297283
  CDS Start-End: 59-820
gggagtgttgggaagcagccgtccccgtccagagtcctctgtggtccctgctgccaccatggccactcaccgcctcgtgatggtccggcacggcgagagcacatggaaccaggagaaccgtttctgtggctggttcgatgcagagctgagtgaaaaggggaccgaggaggccaagcggggagccaaggccatcaaggatgccaagatggagtttgacatctgctacacgtcagtgctgaagcgggccatccgcaccctctgggccatcctggacggcacggaccagatgtggctgcctgtggtgcgcacttggcgcctcaatgagcggcattacgggggcctcacaggcctcaacaaggcagaaacggccgccaagcacggggaggagcaggtgaagatctggaggcgctccttcgacatcccgccgcccccgatggacgagaagcacccctactacaactccattagcaaggagcgtcggtacgcaggcctgaagcccggggaactccccacctgcgagagcctcaaggacaccattgcccgggccctgcccttctggaacgaggagattgttccccagatcaaggccggcaagcgagtgctcattgcagcccacgggaacagcctgcggggcattgtcaagcacctggaagggatgtcagaccaggcgatcatggagctgaacctgcccacggggatccccattgtgtatgagctgaacaaggagctgaagcccaccaagcccatgcagttcctgggtgatgaggaaacggtgcggaaggccatggaggctgtggctgcccagggcaaggccaagtgaggggtgggcttgggcaataaaggcacctcccccaaca

SEQ ID NO: 165576 - DNA, 765 bp, Homo sapiens
  Payload ID: 12590
  Gene Symbol: PGAM4
  Gene Name: phosphoglycerate mutase family member 4
  Uniprot ID: Q8N0Y7
  ENST ID: ENST00000458128
  CDS Start-End: 1-765
atggccgcctacaaactggtgctgatccggcacggcgagagcacatggaacctggagaaccgcttcagctgctggtacgacgccgatctgagcccggcgggccacgaggaggcgaagcgcggcgggcaggcgctacgagatgctggctatgagtttgacatctgcctcacctcagtgcagaagagagtgatccggaccctctggacagtgctagatgccattgatcagatgtggctgccagtggtgaggacttggcgcctcaatgagcggcactatgggggtctaaccggtctcaataaagcagaaactgctgcaaagcatggtgaggcccaggtgaagatctggaggcgctcctatgatgtcccaccacctccgatggagcccgaccatcctttctacagcaacatcagtaaggatcgcaggtatgcagacctcacagaagatcagctaccctcctatgagagtccgaaggatactattgccagagctctgcccttctggaatgaagaaatagttccccagatcaaggaggggaaacgtgtactgattgcagcccatggcaacagcctccagggcattgccaagcatgtggagggtctctctgaagaggctatcatggagctgaacctgccgactggtattcccatcgtctatgaattggacaagaacttgaagcctatcaagcccatgcagtttctgggggatgaagagacggtgtgcaaagccatagaagctgtggctgcccagggcaaggccaagaagtga

SEQ ID NO: 165577 - DNA, 2727 bp, Homo sapiens
  Payload ID: 12591
  Gene Symbol: PGP
  Gene Name: phosphoglycolate phosphatase
  Uniprot ID: A6NDG6
  ENST ID: ENST00000333503
  CDS Start-End: 31-996
ccggcgggcggcggcggccggcgggcggcgatggcggcggcggaggccggtggcgacgacgcccgctgcgtgcggctgagcgccgagcgggcacaggcgctgctggccgacgtggacacgctgctgttcgactgcgacggcgtgctgtggcgcggggagaccgccgtgcctggcgcgcccgaggccctgcgggcgctgcgagcccgcggcaagcgcctgggcttcatcaccaacaacagcagcaagacccgcgctgcctacgccgagaagctgcggcgcctgggcttcggcggccccgcggggcccggcgccagcctggaggtcttcggcacggcctactgcaccgcgctctacctgcgccagcgcctggccggcgcccccgcgcccaaggcctacgtgctgggcagcccagccctggccgcggagctggaggccgtgggcgtcgccagcgtgggcgtggggcccgagccactgcagggcgagggtcccggcgactggctgcacgcgccgctggagcccgacgtgcgcgcggtggtggtgggctttgacccgcacttcagctacatgaagctcaccaaggccctgcgctacctgcagcagcccggctgcctgctcgtgggcaccaacatggacaaccggcttccgcttgagaacggccgcttcatcgcgggtaccgggtgtctggtccgagccgtggagatggccgcccagcgccaggccgacatcatcgggaagcccagccgcttcattttcgactgcgtgtcccaggaatacggcatcaaccccgagcgcaccgtcatggtgggagaccgcctggacacagacatcctcctaggcgccacctgtggcctgaagaccatcctgaccctcaccggagtctccactctaggggatgtgaagaataatcaggaaagtgactgcgtgtctaagaagaaaatggtccctgacttctatgttgacagcatagccgaccttttgcctgcccttcaaggttaaagattgagtgtctttaatctgcagaataaaaaaaaagaaattgaaaaccagttacccaaattaataggtggggcttaagcatctgctcggctaagtggcttcaaagagtgtaattggagttaagcaaaggcattcattgttaaccttgtaagtacacgtttgggggacgattttgtttacagatgcttgtaatcgaagatgcacttttaggcttggaaggcgttgtgggctgggttctgggccttgggtggggttggcaggggcaggctctgcacctgtccgggattcaggtaaccagggcctgccgatgggactgaggcgggtctaggggtgtgtgtcctgtattttattgaaaaactcattcagggatccagcccctcagggggcagagggactgattattctgactgttgggagaggcttgcatggaccagagccccatcagtatgactgaaagtccagcggagccttctgtgtccctgtgcctcccagcagggtgggagtggaggaggcggctgctcccaggtggcatctccctgcccttgggtgcaaagtgctgccctcaccactctcccacctcccttacttccttgaaaaccactctgatgtcacaactgagtgtctgttccgtttcagatacccagggctgctgcccagttctgtaaacgcagcccagctaaagctctgctgtctcaagtgtgcatttatacccaggtgatttggacggagcagctaccatggcgtggacgccttcactgaactccgggctgcagtgcagggagctcagagcagtgctgctaccagtttttaactttgaacaactgtgtcaggcaatggatttgaattttaagtgtattaatagctgtgctctgtgtcgtaggcaaaattccactgaaggagcctctgtgccctgcagccggcagcgcggctgaagcatgtgttggccaaggaatgcctgtcatccaggtgccctgcagccagcagcgcggctcaagcatgtgttggccaaggaatgcctgtcagtcatccagggctctgggaggggacgagagttatgtccccaagaacaggaagtcctttacaaagcatccagtctcttcctgtcctccccttccctaggctggggtaggggttagagactggtggcccaggaggtcacctgccttgccctggattccctcttcagtggccagcaggacttggcagggccaccagctcgccaaggttctgggcggggctccagcctctcctgcctgctccttggctctgctgacctttcacaggcctgacagcagactcagcagggccatcccgggatgctgcaccttctggctggctccctaccagcgcctttccctgtacctggcagcttctctcttggccccacagtcacagcactccacttggtcacaaagacttcagagcaataagaggcgtcctgagccttcagcacctcccaggcctgggatatcgggttcagagggtgctgcagagcagcatgagggtggctccacccatgaggctggtgacactgacgctggcttggctaagttggctcaagccgggtctggcctgacagggtgcagtcacaccaggagcgcatggcagatgcagcctcagtgatgcctctcttgccgggtaggggctgggagtccccgtgcatcctgtctctggcccatgaggggctgcagcactgtgggcgccagagcacagattaaactctcaaaccca

SEQ ID NO: 165578 - DNA, 905 bp, Homo sapiens
  Payload ID: 12591
  Gene Symbol: PGP
  Gene Name: phosphoglycolate phosphatase
  ENST ID: ENST00000562001
  CDS Start-End: 1-172
catcctcctaggcgccacctgtggcctgaagaccatcctgaccctcaccggagtctccactctaggggatgtgaagaataatcaggaaagtgactgcgtgtctaagaagaaaatggtccctgacttctatgttgacagcatagccgaccttttgcctgcccttcaaggttaaagattgagtgtctttaatctgcagaataaaaaaaaagaaattgaaaaccagttacccaaattaataggtggggcttaagcatctgctcggctaagtggcttcaaagagtgtaattggagttaagcaaaggcattcattgttaaccttgcaaaattccactgaaggagcctctgtgccctgcagccggcagcgcggctgaagcatgtgttggccaaggaatgcctgtcatccaggtgccctgcagccagcagcgcggctcaagcatgtgttggccaaggaatgcctgtcagtcatccagggctctgggaggggacgagagttatgtccccaagaacaggaagtcctttacaaagcatccagtctcttcctgtcctccccttccctaggctggggtaggggttagagactggtggcccaggaggtcacctgccttgccctggattccctcttcagtggccagcaggacttggcagggccaccagctcgccaaggttctgggcggggctccagcctctcctgcctgctccttggctctgctgacctttcacaggcctgacagcagactcagcagggccatcccgggatgctgcaccttctggctggctccctaccagcgcctttccctgtacctggcagcttctctcttggccccacagtcacagcactccacttggtcacaaagacttcagagcaataagaggcgtcctgagccttcagcacctcccaggcctgg

SEQ ID NO: 165579 - DNA, 890 bp, Homo sapiens
  Payload ID: 12592
  Gene Symbol: PHPT1
  Gene Name: phosphohistidine phosphatase 1
  Uniprot ID: Q9NRX4
  ENST ID: ENST00000247665
  CDS Start-End: 338-715
ctccctcgttgccccagcctcgcgggccgcctaactgccccgttccaagggtgccaccggaccccgctggagaggaacttctccgttggctggatttcatcaccacccattcccgattccacgtttcctttaagcggggctggcggagccgcaaggcggcaaggaactggattgcgattggtcagcacgtgcctcggtcggcggtacaattggctgaggcgctgggccttgggaagcattccccgacgggattggtcgtcgctctcgcagagcccgcctcccgcagtacaagcggcccccgggtcgggtgggaggaggggactccgggaggaggaacatggcggtggcggacctcgctctcattcctgatgtggacatcgactccgacggcgtcttcaagtatgtgctgatccgagtccactcggctccccgctccggggctccggctgcagagagcaaggagatcgtgcgcggctacaagtgggctgagtaccatgcggacatctacgacaaagtgtcgggcgacatgcagaagcaaggctgcgactgtgagtgtctgggcggcgggcgcatctcccaccagagtcaggacaagaagattcacgtgtacggctattccatggcctatggtcctgcccagcacgccatttcaactgagaaaatcaaagccaagtaccccgactacgaggtcacctgggctaacgacggctactgagcactcccagcccggggcctgctgcctccagcagccacttcagagcccccgcctttgcctgcactcctcttgcagggctggccctgcctgctcctgcggcagcctctggtgacgtgctgtccaccaggccttggagacaggctagcctggccacagaattaaacgtgttgccaca

SEQ ID NO: 165580 - DNA, 985 bp, Homo sapiens
  Payload ID: 12592
  Gene Symbol: PHPT1
  Gene Name: phosphohistidine phosphatase 1
  Uniprot ID: Q9NRX4
  ENST ID: ENST00000371661
  CDS Start-End: 378-752
ggccgggaacgcccctggaccggaataatttccagggggcaagagctttcgaaccaacctcgcgggccgcctaactgccccgttccaagggtgccaccggaccccgctggagaggaacttctccgttggctggatttcatcaccacccattcccgattccacgtttcctttaagcggggctggcggagccgcaaggcggcaaggaactggattgcgattggtcagcacgtgcctcggtcggcggtacaattggctgaggcgctgggccttgggaagcattccccgacgggattggtcgtcgctctcgcagagcccgcctcccgcagtacaagcggcccccgggtcgggtgggaggaggggactccgggaggaggaacatggcggtggcggacctcgctctcattcctgatgtggacatcgactccgacggcgtcttcaagtatgtgctgatccgagtccactcggctccccgctccggggctccggctgcagagagcaaggagatcgtgcgcggctacaagtgggctgagtaccatgcggacatctacgacaaagtgtcgggcgacatgcagaagcaaggctgcgactgtgagtgtctgggcggcgggcgcatctcccaccagagtcaggacaagaagattcacgtgtacggctattccatgatgagacccacgtgcgtccctctgggcgcctcaggccccaggatccaccatcaaggcctatggtcctgcccagcacgccatttcaactgagaaaatcaaagccaagtaccccgactacgaggtcacctgggctaacgacggctactgagcactcccagcccggggcctgctgcctccagcagccacttcagagcccccgcctttgcctgcactcctcttgcagggctggccctgcctgctcctgcggcagcctctggtgacgtgctgtccaccaggccttggagacaggctagcctggccacagaattaaacgtgttgccaca

SEQ ID NO: 165581 - DNA, 9901 bp, Homo sapiens
  Payload ID: 12593
  Gene Symbol: PIKFYVE
  Gene Name: phosphoinositide kinase, FYVE finger containing
  Uniprot ID: Q9Y2I7
  ENST ID: ENST00000264380
  CDS Start-End: 159-6455
caaccatgtaagcagcttcgcttcctgccgcaaccgtccgcggcctgaggagcccaccgccgctctcgggggccgacttccgggggctgagccgttgaagcggaggctggggcggggggcagccggcgcggccggggcaggaggcgcagactcatgaaatggccacagatgataagacgtccccaacactggactctgctaatgatttgcctcgatctcctactagtccttctcatctcacacactttaaacctttgactcctgatcaagatgagcccccttttaaatcagcttatagttcttttgtaaatctctttcgttttaacaaagagagagcagaaggaggccagggagaacagcagcctttgagtggaagttggaccagccctcagctcccttcgaggacacagtctgttaggtcacccacaccttataaaaagcagcttaatgaggaactccagcggcgctcttcagcattagacacaagaaggaaagcagaacctacctttggaggtcatgaccctcgtacagctgttcagcttcgaagcctcagcacagtattaaaacgcctcaaggaaatcatggaggggaaaagccaggatagtgacctgaaacaatactggatgccagatagccaatgtaaagagtgctatgactgtagtgagaaatttacaacctttaggcgcagacaccattgccgactatgtgggcagattttctgcagtcgttgctgtaatcaagaaatccctggaaaatttatgggctatacaggagacctccgagcttgcacatattgtagaaaaatagccttaagttatgctcattccacagacagtaattctattggggaagacttgaatgctctttcagattctgcttgctctgtgtctgtgcttgatccaagtgaaccccgaacacctgttgggagtaggaaagccagccgtaacatatttttagaggatgatttggcctggcaaagtttgattcatccagattcctcaaatactcctctttcaacaagacttgtatctgtgcaagaggatgctgggaaatctcctgctcgaaatagatcagccagcattactaacctgtcactggatagatctggttctcctatggtaccttcatatgagacatctgtcagtccccaggctaaccgaacatatgttaggacagagaccactgaggatgaacgcaaaattcttctggacagtgtgcagttaaaagacctgtggaaaaaaatctgccatcacagcagtggaatggagtttcaggatcaccgctactggttgagaacgcatcccaactgcattgtaggaaaggaattagtcaactggctaatccgaaatgggcatattgccacaagggcacaagctatagcaattggacaagcaatggttgatggacgttggctggattgtgttagtcatcacgaccagcttttcagagatgagtatgcgctgtatagaccactgcagagtacagaattttctgagacgccttctcccgacagtgactcagtgaactccgtggaaggacactctgagccatcctggtttaaagacataaagtttgatgacagtgacacagaacagatagctgaagaaggtgacgataatttggctaattctgccagtcctagcaagcgcacatcagtcagcagtttccagtccacagtggacagtgactcagccgcttctatcagcctgaacgtggagctggacaacgtgaacttccatatcaagaagccctccaagtacccacatgtgccccctcaccctgctgaccaaaaagagtatttgatttctgacactggaggacaacagctctcaataagtgacgctttcatcaaagaatccttatttaatcgccgagtagaggaaaaatccaaagagctgcctttcacacctttgggctggcatcataacaacctggagctcctgagggaggagaatggggagaaacaagccatggagaggttgctttcagctaatcataaccacatgatggcactactccagcagttgctccatagtgactcactgtcatcatcttggagggacatcatcgtgtcattggtctgccaggttgttcagacagtccgacctgatgtcaagaaccaggatgatgacatggatatccgtcagtttgtccacatcaaaaaaatcccaggtggaaagaagtttgattctgtggttgtcaatggctttgtttgtaccaagaacattgcacataaaaagatgagttcttgtattaaaaaccccaaaattcttctgttgaagtgttccattgagtatctctacagagaagaaactaagtttacttgcattgatcctattgtgcttcaggaaagggaattcttgaagaattatgtccagcgaatagttgatgttcgacccaccttggttcttgttgagaaaacagtgtctcggattgcccaggacatgttattggaacatggcattactttggtcattaatgtaaagtcacaagttttggaacgaatcagtcgaatgacccaaggtgatttagtgatgtcaatggaccagctgcttacgaaaccacacctgggcacttgtcacaaattttatatgcagatatttcagttgcctaatgaacaaaccaagacactgatgttttttgaaggttgtccacagcacctaggctgtacaatcaagctaagaggaggctctgattatgagctggctcgagttaaggagatcctaatatttatgatctgtgttgcttatcattctcaactagaaatatcctttctcatggatgaatttgctatgcctcccacattaatgcaaaacccttcattccattccctgattgagggacgagggcatgagggggctgtccaagagcagtacggtggaggttccatcccctgggatcctgacatccctcctgagtctctgccctgtgatgatagcagtttgctggaattgaggattgtgtttgagaagggtgagcaggaaaataaaaatcttccgcaggctgttgcctctgtgaagcatcaagaacatagcacaacagcttgcccggcgggtctcccttgtgctttctttgcacctgtaccggaatcattgttgccactccctgtggatgaccaacaagatgctttaggcagcgagcagccagagactttgcagcaaacagttgtgctgcaggatcccaaaagccagataagagcctttagagaccctctacaggatgacactggattatatgttactgaggaagtcacctcctctgaagataaacgaaagacttattctttggcctttaagcaggaattaaaagatgtgatcctctgtatctccccagtaatcacattccgagaaccctttcttttaactgaaaaggggatgagatgctctacccgagattattttgcagagcaggtttactggtctcctctcctcaataaagaattcaaagaaatggagaacaggaggaagaaacagctgctcagggatctctctggacttcagggcatgaatggaagtattcaggccaagtctattcaagtcttaccctcacatgagctagtgagcactagaattgctgagcatctgggcgatagccagagcttgggtagaatgctggccgattatcgagccagaggaggaagaattcagcccaaaaattcagacccttttgctcattcaaaggatgcatcaagtacttcaagtggccaatcaggaagcaaaaatgagggtgatgaagagagagggcttattctgagtgatgctgtgtggtcaacaaaggtggactgtctgaatcccattaatcaccagagactttgtgtgctcttcagcagctcttctgcccagtccagcaatgctcctagtgcctgtgtcagtccttggattgtaacaatggaattttatggaaagaatgatcttacattaggaatatttttagagagatactgtttcaggccttcttatcagtgtccaagcatgttctgtgatacccccatggtacatcatattcggcgctttgttcatggccaaggctgtgtgcagataatcctgaaggagttggattctccagtacctggatatcagcatacaattcttacatattcctggtgtagaatctgcaaacaggtaacaccagttgttgctctttccaatgagtcctggtctatgtcatttgcaaaataccttgaacttaggttttatgggcaccagtatactcgcagagccaacgctgagccctgtggtcactccatccatcatgattatcaccagtatttctcctataaccagatggtggcgtctttcagttattctcccattcggcttcttgaagtatgtgttccactccccaaaatattcattaagcgtcaggccccattaaaagtgtcccttcttcaggatctgaaggacttctttcaaaaagtttcacaggtatatgttgccattgatgaaagacttgcatctttgaaaactgatacatttagtaaaacaagagaggaaaaaatggaagatatttttgcacagaaagagatggaagaaggtgagttcaagaactggattgagaagatgcaagcaaggctcatgtcttcctctgtagatacccctcagcaactgcagtcggtctttgagtcactcattgccaagaaacaaagtctctgtgaagtgctgcaagcttggaataacaggttgcaggaccttttccaacaggaaaagggtagaaagagaccttcagttcctccaagtcctggaagactgagacaaggggaagaaagcaagataagtgcgatggatgcatctccacggaatatttctccaggacttcagaatggagaaaaagaggatcgcttcttaacaactttgtccagccagagctccaccagttctactcatctccaattgcctacgccacctgaagtcatgtctgaacagtcagtgggagggccccctgagctagatacagccagcagttccgaagatgtgtttgatgggcatttgctgggatccacagacagccaagtgaaggaaaagtcaaccatgaaagccatctttgcaaatttgcttccaggaaatagctataatcctattccatttccttttgatccagataaacactacttaatgtatgaacatgaacgagtgcccattgcagtctgcgagaaggaacccagctccatcattgcttttgctctcagttgtaaagaataccgaaatgccttagaggaattgtctaaagcgactcagtggaacagtgccgaagaagggcttccaacaaatagtacttcagatagcagaccaaagagtagcagccctatcagattacctgaaatgagtggaggacagacaaatcgtacaacagaaacagaaccacaaccaaccaaaaaggcttctggaatgttgtccttcttcagagggacagcagggaaaagccccgatctctcttcccagaagagagagaccttacgtggagcagatagtgcttactaccaggttgggcagacgggcaaggaggggaccgagaatcaaggcgttgagcctcaagatgaagtagatggaggagatacacaaaagaagcaactcataaatcctcatgtggaacttcaattttcagatgctaatgccaagttttactgtcggctctactatgcgggagagtttcataagatgcgtgaagtgattctggacagcagtgaagaagatttcattcgttccctctcccactcatcaccctggcaggcccggggaggcaaatcaggagctgccttctatgcaactgaggatgatagatttattttgaagcaaatgcctcgtctggaagtccagtccttcctcgactttgcaccacattacttcaattatattacaaatgctgttcaacaaaagaggcccacggcgttggccaaaattcttggagtttacagaattggttataagaactctcagaacaacactgagaagaagttagatctccttgtcatggaaaatcttttctacgggagaaagatggcacaggtttttgatttgaagggctctcttaggaatcggaatgtaaaaactgacactggaaaagagagttgtgatgtggtcctgctagatgaaaatctcctaaagatggttcgagacaaccctctatatattcgttctcattccaaagctgtgctgagaacctcgatccatagtgactcccatttcctttctagccacctcattatagattattctttgctggttgggcgagatgatactagcaatgagctagtagttggaattatagattatattcgaacatttacatgggacaaaaagcttgagatggttgtgaaatcaacaggaattttaggtggacaaggtaaaatgccaacagtggtgtctccggagttgtacaggactaggttttgtgaggcaatggacaagtatttcctaatggtaccagaccactggacaggcttgggtctgaattgctgaaatcaagcacatattttgaaatggactgtgaaggaaaaggggacaggaacaaaggaccaaaaataagctacatgttttatttcttcatcgtgttcaccactgtatgccaaggcttttcagttctgtggctgtttagactgtccgtaatggaatggtaaaactccatgaatttgcactttggtttttgatacctgtggagctgtctgtaggttgggaagtggcatgaaaattttcttaagctaaaatacagacatgtttcaaagggctaaagttggagatgagtagatagggtgaaaaatgggttaaatttgctagcttaattgttttaagaagaaaacagtgtctcataaattgactatcctggcatcacatttaacatgttatctacttagaaagcatttgtagagctgctgaatttgttttgtgtttttctgtaataatttaatgttacttattatcagaatttctgaaacctttacaaaaattctgatttattccattaatggccggttaaacacgtgggcatttattgttttattgaggaatttgacttaaactgggaatcctgtcatgttgtttatctttccagcttgcctgtttttgagtatgtttgatgtttttaaaattttgtcttctctgtggaagacaggaggctacagcaattaactttaagcctccttttagagatatttttaaaacttgtttaaaatttttgtgcaattcatatattaaattgcacttacttgcatacgctcatattctagggttttttctctatttttagggtatcatagtaaatcattagtaaatgagtctgtagttactaaaccctaatggaataattattaatgaaagatttttgaaatataaaaaataaattaggcccaatccaagaaattgagtgagaaggaaacacttgttttattcacagaggtaaagtgtcttttcaatataaccagcaatttaggtggcatctataaaataaaaaatttctactgtggacatccccttttccaactttctacataatggctagttctgactactaagaaatgttaagaaataggccaagtgcggtggctcacgcctataatcctatcactttgggaggcctaggcaggcagatcacctgaggtcaggagttcaagaccagcctggccaacatgacgaaaccccatctctactaaaaagacaaaaaattagctgggcatggtggcatatacctgtaaccccaactacttgggtggctgaggcaggagaattgtttgaacctgggaggcggaggctgcagtgagctgggattacaccattgcattccagcctgggcaacagagcaagactgtctcaaaaaacaaaacgaaacaaaaaaagaaagttattcttagtaaggaacttcttgtttaatagcatttttgtttattttaaaaagtgatcagaagtagtaaactatctttgaggaaatactgtaaccccagaatatttcctcttgacttctttttgtaacaaggataatttagggatttataaagttgtaaggatttcactgtttttggactgcctataataatagcacattaaccttcacataataagaaatctggacaagttcagttacacagtatgatgaatacttgaattaggaacattgtggaaaatttgctttagagaatcaaggcagtagtttggtatttggtgcttattaaaaatgtggtttgttttgaactggaagcaagttgaccaaggacttatgactaatgtgatgctaagttccacttggccccttttaaaaacgtgtatgtgccttttgaagatacacaaaacactgaggattttagttttgaaatcaaagactattaaaggagctgtacagaggtaaaaaaataaatgtggaacattattaacttactttgtgtctaggaacaatggattttgtatctgatttaaaatgccaacactgttttgtctctgttcattttttctgtgaggatacttaaggttattattcctgtctgtttcctgtactcccctagtcatgagcacttgaagtacaaggtgtctccccctaggtgcaattaggttgtttctttgtttttagtttcaattctatgtgcatagcaggaatgctccacaggaatggcttctgacaataatctgtcctgttgattttgttttccttgcccatgacttgaacaactgtgttttaaagtactgtagtctagtaggtaactttgtggcaaaaattttcaatataatacattctgaaacaatagttgctgccttgcaaaggtaatctctcattttaaaattggacagtattaatgaaggggaaatatacaatttatttctattgagtggtagaactatatgtctggtcccttgctgctcttgtttaggccactatcatagatatatttcaaatattgtactactcagtgttaagtattgaatgactgtttccctttccttcaaggcctagagtatattctgaaaatttaggaatgaggaagaaatcttaatacttccttccttaacatacaacatgagtcccgagaataattgatagtagcaagagaaaactatgtcagtaacatgttgctttgtataaaaatcttatttataaatgtgaagctttttgatgccatcaaaacttattaaaaaataggatttacttttttctaattctgacctaagaaaaataatgagaacaagctgttgcaagctcttttgtagtctattgaatattttatagatattcaaaatttcctacaaactataattttttccatgatttagcagtgagtgattttctagctttggctcttattaggtattgtaaatagtagggttatatcgatatcagcttttgtgatggcattgtggtcatcagcttcatgacattttacccatttgcagtgatcctgtgtaaaactgccaaggaaagtaattacctgtaggagtttgctgagcttgaagagtgaaaactgttgtgaatgagcctgatcataaaacggaccaggccattcattattcctcaagtgttaatatactgacttatgcagtattcaaaccatctagtgcaatgtttttgtttttgttttttttttggtaacacaggtgcagtgtattatagaaaaaataaaaactacaatcattagcagttttaatactgctgtgtcagttttgtaaaaaatgtacattatgtcttttgacatgttgaattttaaactagggaaatgacattgtaaatcatagtagcctcttttaatttaatatgaaaaatgccactatattgaaagtacttaatgtattgtatatatttctctactttggttctagctattttatatgattgacatgttatttaaaagataactgccttgaacttttggagacttgtactgtaaataaagaaatcttaacaataaactcagaatctacttactcca

SEQ ID NO: 165582 - DNA, 1640 bp, Homo sapiens
  Payload ID: 12593
  Gene Symbol: PIKFYVE
  Gene Name: phosphoinositide kinase, FYVE finger containing
  Uniprot ID: Q9Y2I7
  ENST ID: ENST00000308862
  CDS Start-End: 148-1536
gcagcttcgcttcctgccgcaaccgtccgcggcctgaggagcccaccgccgctctcgggggccgacttccgggggctgagccgttgaagcggaggctggggcggggggcagccggcgcggccggggcaggaggcgcagactcatgaaatggccacagatgataagacgtccccaacactggactctgctaatgatttgcctcgatctcctactagtccttctcatctcacacactttaaacctttgactcctgatcaagatgagcccccttttaaatcagcttatagttcttttgtaaatctctttcgttttaacaaagagagagcagaaggaggccagggagaacagcagcctttgagtggaagttggaccagccctcagctcccttcgaggacacagtctgttaggtcacccacaccttataaaaagcagcttaatgaggaactccagcggcgctcttcagcattagacaacagtttgcaacatccccaggagaacacaggagacctccgagcttgcacatattgtagaaaaatagccttaagttatgctcattccacagacagtaattctattggggaagacttgaatgctctttcagattctgcttgctctgtgtctgtgcttgatccaagtgaaccccgaacacctgttgggagtaggaaagccagccgtaacatatttttagaggatgatttggcctggcaaagtttgattcatccagattcctcaaatactcctctttcaacaagacttgtatctgtgcaagaggatgctgggaaatctcctgctcgaaatagatcagccagcattactaacctgtcactggatagatctggttctcctatggtaccttcatatgagacatctgtcagtccccaggctaaccgaacatatgttaggacagagaccactgaggatgaacgcaaaattcttctggacagtgtgcagttaaaagacctgtggaaaaaaatctgccatcacagcagtggaatggagtttcaggatcaccgctactggttgagaacgcatcccaactgcattgtaggaaaggaattagtcaactggctaatccgaaatgggcatattgccacaagggcacaagctatagcaattggacaagcaatggttgatggacgttggctggattgtgttagtcatcacgaccagcttttcagagatgagtatgcgctgtatagaccactgcagagtacagaattttctgagacgccttctcccgacagtgactcagtgaactccgtggaaggacactctgagccatcctggtttaaagacataaagtttgatgacagtgacacagaacagatagctgaagaaggtgacgataatttggctaattctgccagtcctagcaagcgcacatcagtcagcagtttccagtccacagtggacagtgactcagccgcttctatcagcctgaacgtggagctggacaacgtgaacttccatatcaagaagccctccaagtacccacatgtgccccctcaccctgctgaccaaaaaggtaggaggtagtcaccatctggaatccaaacacaggctggacagctgggccataggatctcatgccagcctgtccttctggcttcctctgtcccacgtggctgagggtatttggt

SEQ ID NO: 165583 - DNA, 2039 bp, Homo sapiens
  Payload ID: 12593
  Gene Symbol: PIKFYVE
  Gene Name: phosphoinositide kinase, FYVE finger containing
  Uniprot ID: Q9Y2I7
  ENST ID: ENST00000392202
  CDS Start-End: 159-1514
caaccatgtaagcagcttcgcttcctgccgcaaccgtccgcggcctgaggagcccaccgccgctctcgggggccgacttccgggggctgagccgttgaagcggaggctggggcggggggcagccggcgcggccggggcaggaggcgcagactcatgaaatggccacagatgataagacgtccccaacactggactctgctaatgatttgcctcgatctcctactagtccttctcatctcacacactttaaacctttgactcctgatcaagatgagcccccttttaaatcagcttatagttcttttgtaaatctctttcgttttaacaaagagagagcagaaggaggccagggagaacagcagcctttgagtggaagttggaccagccctcagctcccttcgaggacacagtctgttaggtcacccacaccttataaaaagcagcttaatgaggaactccagcggcgctcttcagcattaggagacctccgagcttgcacatattgtagaaaaatagccttaagttatgctcattccacagacagtaattctattggggaagacttgaatgctctttcagattctgcttgctctgtgtctgtgcttgatccaagtgaaccccgaacacctgttgggagtaggaaagccagccgtaacatatttttagaggatgatttggcctggcaaagtttgattcatccagattcctcaaatactcctctttcaacaagacttgtatctgtgcaagaggatgctgggaaatctcctgctcgaaatagatcagccagcattactaacctgtcactggatagatctggttctcctatggtaccttcatatgagacatctgtcagtccccaggctaaccgaacatatgttaggacagagaccactgaggatgaacgcaaaattcttctggacagtgtgcagttaaaagacctgtggaaaaaaatctgccatcacagcagtggaatggagtttcaggatcaccgctactggttgagaacgcatcccaactgcattgtaggaaaggaattagtcaactggctaatccgaaatgggcatattgccacaagggcacaagctatagcaattggacaagcaatggttgatggacgttggctggattgtgttagtcatcacgaccagcttttcagagatgagtatgcgctgtatagaccactgcagagtacagaattttctgagacgccttctcccgacagtgactcagtgaactccgtggaaggacactctgagccatcctggtttaaagacataaagtttgatgacagtgacacagaacagatagctgaagaaggtgacgataatttggctaattctgccagtcctagcaagcgcacatcagtcagcagtttccagtccacagtggacagtgactcagccgcttctatcagcctgaacgtggagctggacaacgtgaacttccatatcaagaagccctccaagtacccacatgtgccccctcaccctgctgaccaaaaaggtaggaggtagtcaccatctggaatccaaacacaggctggacagctgggccataggatctcatgccagcctgtccttctggcttcctctgtcccacgtggctgagggtatttggtgtgggttttgttctaccctttctcatttctcccacacctcctccccataccttttttggttgattccttttatttcttgttttctccctcagcaccaccatgcccagtgtaaagcttgtagtctttaaaaggaactacatctgactgctcttcccataatgtgcaacttccaaggtggcatttctttgcatttataacatggatgttctgctctattcttttctctttcttcatttaacattttaaagcctatttgcctttgccgttacccagtaacataatatttcactaaacccattaagatgcttgaactagattgggggaaaatcattcacacattccaaaatatctccataataattcataatgcttattatgtatattctatatttattaaaacaatttcttctctaatgtaaaa

SEQ ID NO: 165584 - DNA, 1898 bp, Homo sapiens
  Payload ID: 12593
  Gene Symbol: PIKFYVE
  Gene Name: phosphoinositide kinase, FYVE finger containing
  Uniprot ID: Q9Y2I7
  ENST ID: ENST00000407449
  CDS Start-End: 148-1794
gcagcttcgcttcctgccgcaaccgtccgcggcctgaggagcccaccgccgctctcgggggccgacttccgggggctgagccgttgaagcggaggctggggcggggggcagccggcgcggccggggcaggaggcgcagactcatgaaatggccacagatgataagacgtccccaacactggactctgctaatgatttgcctcgatctcctactagtccttctcatctcacacactttaaacctttgactcctgatcaagatgagcccccttttaaatcagcttatagttcttttgtaaatctctttcgttttaacaaagagagagcagaaggaggccagggagaacagcagcctttgagtggaagttggaccagccctcagctcccttcgaggacacagtctgttaggtcacccacaccttataaaaagcagcttaatgaggaactccagcggcgctcttcagcattagacacaagaaggaaagcagaacctacctttggaggtcatgaccctcgtacagctgttcagcttcgaagcctcagcacagtattaaaacgcctcaaggaaatcatggaggggaaaagccaggatagtgacctgaaacaatactggatgccagatagccaatgtaaagagtgctatgactgtagtgagaaatttacaacctttaggcgcagacaccattgccgactatgtgggcagattttctgcagtcgttgctgtaatcaagaaatccctggaaaatttatgggctatacaggagacctccgagcttgcacatattgtagaaaaatagccttaagttatgctcattccacagacagtaattctattggggaagacttgaatgctctttcagattctgcttgctctgtgtctgtgcttgatccaagtgaaccccgaacacctgttgggagtaggaaagccagccgtaacatatttttagaggatgatttggcctggcaaagtttgattcatccagattcctcaaatactcctctttcaacaagacttgtatctgtgcaagaggatgctgggaaatctcctgctcgaaatagatcagccagcattactaacctgtcactggatagatctggttctcctatggtaccttcatatgagacatctgtcagtccccaggctaaccgaacatatgttaggacagagaccactgaggatgaacgcaaaattcttctggacagtgtgcagttaaaagacctgtggaaaaaaatctgccatcacagcagtggaatggagtttcaggatcaccgctactggttgagaacgcatcccaactgcattgtaggaaaggaattagtcaactggctaatccgaaatgggcatattgccacaagggcacaagctatagcaattggacaagcaatggttgatggacgttggctggattgtgttagtcatcacgaccagcttttcagagatgagtatgcgctgtatagaccactgcagagtacagaattttctgagacgccttctcccgacagtgactcagtgaactccgtggaaggacactctgagccatcctggtttaaagacataaagtttgatgacagtgacacagaacagatagctgaagaaggtgacgataatttggctaattctgccagtcctagcaagcgcacatcagtcagcagtttccagtccacagtggacagtgactcagccgcttctatcagcctgaacgtggagctggacaacgtgaacttccatatcaagaagccctccaagtacccacatgtgccccctcaccctgctgaccaaaaaggtaggaggtagtcaccatctggaatccaaacacaggctggacagctgggccataggatctcatgccagcctgtccttctggcttcctctgtcccacgtggctgagggtatttggt

SEQ ID NO: 165585 - DNA, 4214 bp, Homo sapiens
  Payload ID: 12593
  Gene Symbol: PIKFYVE
  Gene Name: phosphoinositide kinase, FYVE finger containing
  ENST ID: ENST00000452564
  CDS Start-End: 63-4214
gaagcggaggctggggcggggggcagccggcgcggccggggcaggaggcgcagactcatgaaatggccacagatgataagacgtccccaacactggactctgctaatgatttgcctcgatctcctactagtccttctcatctcacacactttaaacctttgactcctgatcaagatgagcccccttttaaatcagcttatagttcttttgtaaatctctttcgttttaacaaagagagagcagaaggaggccagggagaacagcagcctttgagtggaagttggaccagccctcagctcccttcgaggacacagtctgttaggtcacccacaccttataaaaagcagcttaatgaggaactccagcggcgctcttcagcattagacacaagaaggaaagcagaacctacctttggaggtcatgaccctcgtacagctgttcagcttcgaagcctcagcacagtattaaaacgcctcaaggaaatcatggaggggaaaagccaggatagtgacctgaaacaatactggatgccagatagccaatgtaaagagtgctatgactgtagtgagaaatttacaacctttaggcgcagacaccattgccgactatgtgggcagattttctgcagtcgttgctgtaatcaagaaatccctggaaaatttatgggctatacaggagacctccgagcttgcacatattgtagaaaaatagccttaagttatgctcattccacagacagtaattctattggggaagacttgaatgctctttcagattctgcttgctctgtgtctgtgcttgatccaagtgaaccccgaacacctgttgggagtaggaaagccagccgtaacatatttttagaggatgatttggcctggcaaagtttgattcatccagattcctcaaatactcctctttcaacaagacttgtatctgtgcaagaggatgctgggaaatctcctgctcgaaatagatcagccagcattactaacctgtcactggatagatctggttctcctatggtaccttcatatgagacatctgtcagtccccaggctaaccgaacatatgttaggacagagaccactgaggatgaacgcaaaattcttctggacagtgtgcagttaaaagacctgtggaaaaaaatctgccatcacagcagtggaatggagtttcaggatcaccgctactggttgagaacgcatcccaactgcattgtaggaaaggaattagtcaactggctaatccgaaatgggcatattgccacaagggcacaagctatagcaattggacaagcaatggttgatggacgttggctggattgtgttagtcatcacgaccagcttttcagagatgagtatgcgctgtatagaccactgcagagtacagaattttctgagacgccttctcccgacagtgactcagtgaactccgtggaaggacactctgagccatcctggtttaaagacataaagtttgatgacagtgacacagaacagatagctgaagaaggtgacgataatttggctaagtatttgatttctgacactggaggacaacagctctcaataagtgacgctttcatcaaagaatccttatttaatcgccgagtagaggaaaaatccaaagagctgcctttcacacctttgggctggcatcataacaacctggagctcctgagggaggagaatggggagaaacaagccatggagaggttgctttcagctaatcataaccacatgatggcactactccagcagttgctccatagtgactcactgtcatcatcttggagggacatcatcgtgtcattggtctgccaggttgttcagacagtccgacctgatgtcaagaaccaggatgatgacatggatatccgtcagtttgtccacatcaaaaaaatcccaggtggaaagaagtttgattctgtggttgtcaatggctttgtttgtaccaagaacattgcacataaaaagatgagttcttgtattaaaaaccccaaaattcttctgttgaagtgttccattgagtatctctacagagaagaaactaagtttacttgcattgatcctattgtgcttcaggaaagggaattcttgaagaattatgtccagcgaatagttgatgttcgacccaccttggttcttgttgagaaaacagtgtctcggattgcccaggacatgttattggaacatggcattactttggtcattaatgtaaagtcacaagttttggaacgaatcagtcgaatgacccaaggtgatttagtgatgtcaatggaccagctgcttacgaaaccacacctgggcacttgtcacaaattttatatgcagatatttcagttgcctaatgaacaaaccaagacactgatgttttttgaaggttgtccacagcacctaggctgtacaatcaagctaagaggaggctctgattatgagctggctcgagttaaggagatcctaatatttatgatctgtgttgcttatcattctcaactagaaatatcctttctcatggatgaatttgctatgcctcccacattaatgcaaaacccttcattccattccctgattgagggacgagggcatgagggggctgtccaagagcagtacggtggaggttccatcccctgggatcctgacatccctcctgagtctctgccctgtgatgatagcagtttgctggaattgaggattgtgtttgagaagggtgagcaggaaaataaaaatcttccgcaggctgttgcctctgtgaagcatcaagaacatagcacaacagcttgcccggcgggtctcccttgtgctttctttgcacctgtaccggaatcattgttgccactccctgtggatgaccaacaagatgctttaggcagcgagcagccagagactttgcagcaaacagttgtgctgcaggatcccaaaagccagataagagcctttagagaccctctacaggatgacactggattatatgttactgaggaagtcacctcctctgaagataaacgaaagacttattctttggcctttaagcaggaattaaaagatgtgatcctctgtatctccccagtaatcacattccgagaaccctttcttttaactgaaaaggggatgagatgctctacccgagattattttgcagagcaggtttactggtctcctctcctcaataaagaattcaaagaaatggagaacaggaggaagaaacagctgctcagggatctctctggacttcagggcatgaatggaagtattcaggccaagtctattcaagtcttaccctcacatgagctagtgagcactagaattgctgagcatctgggcgatagccagagcttgggtagaatgctggccgattatcgagccagaggaggaagaattcagcccaaaaattcagacccttttgctcattcaaaggatgcatcaagtacttcaagtggccaatcaggaagcaaaaatgagggtgatgaagagagagggcttattctgagtgatgctgtgtggtcaacaaaggtggactgtctgaatcccattaatcaccagagactttgtgtgctcttcagcagctcttctgcccagtccagcaatgctcctagtgcctgtgtcagtccttggattgtaacaatggaattttatggaaagaatgatcttacattaggaatatttttagagagatactgtttcaggccttcttatcagtgtccaagcatgttctgtgatacccccatggtacatcatattcggcgctttgttcatggccaaggctgtgtgcagataatcctgaaggagttggattctccagtacctggatatcagcatacaattcttacatattcctggtgtagaatctgcaaacaggtaacaccagttgttgctctttccaatgagtcctggtctatgtcatttgcaaaataccttgaacttaggttttatgggcaccagtatactcgcagagccaacgctgagccctgtggtcactccatccatcatgattatcaccagtatttctcctataaccagatggtggcgtctttcagttattctcccattcggcttcttgaagtatgtgttccactccccaaaatattcattaagcgtcaggccccattaaaagtgtcccttcttcaggatctgaaggacttctttcaaaaagtttcacaggtatatgttgccattgatgaaagacttgcatctttgaaaactgatacatttagt

SEQ ID NO: 165586 - DNA, 3282 bp, Homo sapiens
  Payload ID: 12593
  Gene Symbol: PIKFYVE
  Gene Name: phosphoinositide kinase, FYVE finger containing
  ENST ID: ENST00000443896
  CDS Start-End: 159-635
caaccatgtaagcagcttcgcttcctgccgcaaccgtccgcggcctgaggagcccaccgccgctctcgggggccgacttccgggggctgagccgttgaagcggaggctggggcggggggcagccggcgcggccggggcaggaggcgcagactcatgaaatggccacagatgataagacgtccccaacactggactctgctaatgatttgcctcgatctcctactagtccttctcatctcacacactttaaacctttgactcctgatcaagatgagcccccttttaaatcagcttatagttcttttgtaaatctctttcgttttaacaaagagagagcagaaggaggccagggagaacagcagcctttgagtggaagttggaccagccctcagctcccttcgaggacacagtctgttaggtcacccacaccttataaaaagcagcttaatgaggaactccagcggcgctcttcagcattagacacaagaaggaaagcagaacctacctttggaggtcatgaccctcgtacagctgttcagcttcgaagcctcagcacagtattaaaacgcctcaaggaaatcatggaggggaaaagccaggagacctccgagcttgcacatattgtagaaaaatagccttaagttatgctcattccacagacagtaattctattggggaagacttgaatgctctttcagattctgcttgctctgtgtctgtgcttgatccaagtgaaccccgaacacctgttgggagtaggaaagccagccgtaacatatttttagaggatgatttggcctggcaaagtttgattcatccagattcctcaaatactcctctttcaacaagacttgtatctgtgcaagaggatgctgggaaatctcctgctcgaaatagatcagccagcattactaacctgtcactggatagatctggttctcctatggtaccttcatatgagacatctgtcagtccccaggctaaccgaacatatgttaggacagagaccactgaggatgaacgcaaaattcttctggacagtgtgcagttaaaagacctgtggaaaaaaatctgccatcacagcagtggaatggagtttcaggatcaccgctactggttgagaacgcatcccaactgcattgtaggaaaggaattagtcaactggctaatccgaaatgggcatattgccacaagggcacaagctatagcaattggacaagcaatggttgatggacgttggctggattgtgttagtcatcacgaccagcttttcagagatgagtatgcgctgtatagaccactgcagagtacagaattttctgagacgccttctcccgacagtgactcagtgaactccgtggaaggacactctgagccatcctggtttaaagacataaagtttgatgacagtgacacagaacagatagctgaagaaggtgacgataatttggctaattctgccagtcctagcaagcgcacatcagtcagcagtttccagtccacagtggacagtgactcagccgcttctatcagcctgaacgtggagctggacaacgtgaacttccatatcaagaagccctccaagtacccacatgtgccccctcaccctgctgaccaaaaagagtatttgatttctgacactggaggacaacagctctcaataagtgacgctttcatcaaagaatccttatttaatcgccgagtagaggaaaaatccaaagagctgcctttcacacctttgggctggcatcataacaacctggagctcctgagggaggagaatggggagaaacaagccatggagaggttgctttcagctaatcataaccacatgatggcactactccagcagttgctccatagtgactcactgtcatcatcttggagggacatcatcgtgtcattggtctgccaggttgttcagacagtccgacctgatgtcaagaaccaggatgatgacatggatatccgtcagtttgtccacatcaaaaaaatcccaggtggaaagaagtttgattctgtggttgtcaatggctttgtttgtaccaagaacattgcacataaaaagatgagttcttgtattaaaaaccccaaaattcttctgttgaagtgttccattgagtatctctacagagaagaaactaagtttacttgcattgatcctattgtgcttcaggaaagggaattcttgaagaattatgtccagcgaatagttgatgttcgacccaccttggttcttgttgagaaaacagtgtctcggattgcccaggacatgttattggaacatggcattactttggtcattaatgtaaagtcacaagttttggaacgaatcagtcgaatgacccaaggtgatttagtgatgtcaatggaccagctgcttacgaaaccacacctgggcacttgtcacaaattttatatgcagatatttcagttgcctaatgaacaaaccaagacactgatgttttttgaaggttgtccacagcacctaggctgtacaatcaagctaagaggaggctctgattatgagctggctcgagttaaggagatcctaatatttatgatctgtgttgcttatcattctcaactagaaatatcctttctcatggatgaatttgctatgcctcccacattaatgcaaaacccttcattccattccctgattgagggacgagggcatgagggggctgtccaagagcagtacggtggaggttccatcccctgggatcctgacatccctcctgagtctctgccctgtgatgatagcagtttgctggaattgaggattgtgtttgagaagggtgagcaggaaaataaaaatcttccgcaggctgttgcctctgtgaagcatcaagaacatagcacaacagcttgcccggcgggtctcccttgtgctttctttgcacctgtaccggaatcattgttgccactccctgtggatgaccaacaagatgctttaggcagcgagcagccagagactttgcagcaaacagttgtgctgcaggatcccaaaagccagataagagcctttagagaccctctacaggatgacactggattatatgttactgaggaagtcacctcctctgaagataaacgaaagacttattctttggcctttaagcaggaattaaaagatgtgatcctctgtatctccccagtaatcacattccgagaaccctttcttttaactgaaaaggggatgagatgctctacccgagattattttgcagagcaggtttactggtctcctctcctcaataaagaattcaaagaaatgga

SEQ ID NO: 165587 - DNA, 792 bp, Homo sapiens
  Payload ID: 12593
  Gene Symbol: PIKFYVE
  Gene Name: phosphoinositide kinase, FYVE finger containing
  ENST ID: ENST00000422495
  CDS Start-End: 69-792
gccgttgaagcggaggctggggcggggggcagccggcgcggccggggcaggaggcgcagactcatgaaatggccacagatgataagacgtccccaacactggactctgctaatgatttgcctcgatctcctactagtccttctcatctcacacactttaaacctttgactcctgatcaagatgagcccccttttaaatcagcttatagttcttttgtaaatctctttcgttttaacaaagagagagcagaaggaggccagggagaacagcagcctttgagtggaagttggaccagccctcagctcccttcgaggacacagtctgttaggtcacccacaccttataaaaagcagcttaatgaggaactccagcggcgctcttcagcattagcagacaacagtttgcaacatccccaggagaacacagacacaagaaggaaagcagaacctacctttggaggtcatgaccctcgtacagctgttcagcttcgaagcctcagcacagtattaaaacgcctcaaggaaatcatggaggggaaaagccaggatagtgacctgaaacaatactggatgccagatagccaatgtaaagagtgctatgactgtagtgagaaatttacaacctttaggcgcagacaccattgccgactatgtgggcagattttctgcagtcgttgctgtaatcaagaaatccctggaaaatttatgggctatacaggagacctccgagcttgcacatattgtagaaaaatagccttaagttatgctcattccacagacagtaattctattg

SEQ ID NO: 165588 - DNA, 4803 bp, Homo sapiens
  Payload ID: 12594
  Gene Symbol: PIK3AP1
  Gene Name: phosphoinositide-3-kinase adaptor protein 1
  Uniprot ID: Q6ZUJ8
  ENST ID: ENST00000339364
  CDS Start-End: 121-2538
agagcggcggccggtcccgcgcggagcccggcgcccctccagcccgagccaggacgccgccggccccggtcccggccccgggcacgcagcgagccagggatgtgagcggcgccccgcggcatggcagcctcaggggtgcccagaggatgcgacatcctcatcgtctacagcccggatgccgaggaatggtgccagtacctgcagaccctgttcctgtccagtcggcaggtccgcagccagaagatactgactcacaggctgggccccgaggcctccttctcggcagaggacctaagccttttcctcagcacccgctgtgtcgtggtgctgctgtccgcggagctggtgcagcacttccacaagcccgccttgctgcccctgctgcagagagctttccatcctccgcaccgcgtggtcaggctgctctgcggcgtgcgggacagcgaggagttcctagacttctttccagattgggcccattggcaggagctcacctgtgacgatgagccagagacctacgtggcagctgtgaaaaaagccatttccgaagattctggctgtgactcagtcactgacactgagcctgaggacgagaaggttgtttcctactcgaagcagcagaacctgccgacggtgacttcacctgggaacctgatggtggtgcagccggaccgcattcgctgtggggcagaaaccactgtctatgttattgtgagatgtaagctggatgacagggtggcgacagaagcagagttttctcctgaggattctccctctgtaaggatggaagccaaggtggagaatgagtacaccatttcagtgaaggctcccaacctttcatctgggaacgtttctctgaagatatattctggagacttagtggtgtgtgaaaccgttatcagctattatactgacatggaagaaattgggaatttattgtccaatgccgcgaatcctgtggaattcatgtgtcaggcctttaaaattgtgccctacaacacagagacccttgataaactgctaaccgaatccctgaagaacaatatccctgcaagcggactgcacctctttggaatcaaccagctggaagaagaagatatgatgacaaatcagagggatgaagagctgcccaccctgttgcattttgctgcgaagtatggactgaagaacctcactgccttgttgctcacctgcccaggagccctgcaggcgtacagcgtggccaacaagcatggccactaccccaacaccatcgctgagaaacacggcttcagggacctgcggcagttcatcgacgagtatgtggaaacggtggacatgctcaagagtcacattaaagaggaactgatgcacggggaggaggctgatgctgtgtacgagtccatggcccacctttccacagacctgcttatgaaatgctcgctcaaccccggctgtgacgaggatctctatgagtccatggctgcctttgtcccagctgccactgaagacctctatgttgaaatgcttcaggccagtacatctaacccaatccctggagatggtttctctcgggccactaaggactctatgatccgcaagtttttagaaggcaacagcatgggaatgaccaatctggagagagatcagtgccatcttggtcaggaagaagatgtttatcacacggtggatgacgatgaggccttttctgtggacctggccagcaggccccctgtcccagtgcccagaccagagaccactgctcctggtgctcaccagctgcctgacaacgaaccatacatttttaaagtttttgcagaaaaaagtcaagagcggcctgggaatttctacgtttcctcagagagcatcaggaaagggccgcccgtcagaccatggagggacaggccccagtcgagtatatatgacccttttgcgggaatgaaaacgccaggccagcggcagcttatcaccctccaggagcaggtgaagctgggcattgtcaacgtggatgaggctgtgctccacttcaaagagtggcagctcaaccagaagaaacgatcggagtcctttcgtttccagcaggaaaatcttaaacggctaagagacagcatcacccgaagacagagagagaagcaaaaatcaggaaagcagacagacttggagatcacggtcccaattcggcactcacagcacctgcctgcaaaagtggagtttggagtctatgagagtggccccaggaaaagtgtcattccccctaggacggagctgagacgaggagactggaaaacagacagcacctccagcacagcaagtagcacaagtaaccgctccagcacccggagcctcctcagtgtgagcagcgggatggaaggggacaacgaggataatgaagtccctgaggttaccagaagtcgcagtccaggccccccacaagtggatgggacacccaccatgtccctcgagagaccccccagggtgcctccgagagctgcctcacagaggcctccgaccagggagaccttccatcctcctccacctgttccacccagaggacgctgattccacctcctaaaacctgcctacttcaggactttaagactcacagtcttcagcctgttaatgatgtcttcatgttgagttttatagcatgactgttgaccttaagatccattctcattgctgataatgctgcagccctgctggtttgggcttgcctcgaagattttattaaggcacgaagaagtgaaaaactaagggcttcattcaccatcaccaagtatatcgaaccatatacttgtttgccaaaaggatgaagacttaatcgaaatacttacctctaatttgccatatcagaagcctaaaaagaatgatcataaatgtacttcaccagtgattttactgaaatgcacttatattagtctttatgtatttgctagttcagcctgatttctagaagaggttatagtgtgagacttgtagtattcaagtaagataagtgacctaattttaaaataattcttctacttttctgtatattcagcagggtatttaagtgctagggctggtcacacacaaccaactgaaaaagactagagggattagtacaaactcctcttatacagaaggcaaatctgaggttccacagaagtctggaaccaagactattcagttggttaaataaagaggttagtctagactgggcctgctcattctaggtcaccacattttccatctccaaatagccaggccctctctccctcaagaaatgcccagatgtagaaattcatcagtgcctattggtcttccagaattttccatcttccgtatctcccaggcatgagactaccaagtttgtttgttttctttccaatttgggaatttatacttcagtatggtttcaacgcagttatgtttccagagaacatctagaagtggctggaaaccagaagctggggattccagggaccccacttagtgctctatttcctttataggttttatttctggtcatagagagagaaggacctttgactttttcttcgttgaggcttctgaggaggaaaaacaaacctaaaatagaaatacagtcagcctttcaaatccatgggttctgtgtccgtggattcaaccaaccttggatcaaaaatatttgaaaaaaaatctacaaagtttcaaaaagcaaaacttgaatttgctgcatgccaagaagtatgttgaattcatgtaaatgaagtgatgtgtaggcattgtattagatattataagaaatctagaaatgatttaaagcatacaggaggatgtgcataggttatatgcaaatactatgctattttatatatgggacttgagcatttgtggattttgatactgggggatcctggaaccaatcccccatggataccaaagtacgactgtagttatctattttttacatacttattattaccaccatgctcagtaagtccatttttgcatggaatatggagccttaaaacatgtcatgaatttggagtccctggcacataaatctaccttcaaatcagaggtccttaatgatgcctaaacatacagtaaaattagaatcagaaatacttctttaaaaaatattcaaaatgtgtttgtttcccatgggattattctctatcccacacgaatgtaaaaaaatccacattaatgatccatttaagtatagttttattgggtccttttctaatgattaaaggttctttctcaatttcattcctcagtcctgcaagtaaggactcatactgaagagtactgaaacaaggacttcttgtcagaaacagcttctggaatcttgggttttgtttttgttttttgacaaaatacactattggccatgtccatcacgagagtgtttgtagtaattaattaccttgtacaggacctggcacttagtagcattcttcaaatgttccctcagtgatccttttactctccttgtcacttatttgggagaaataggggcacgtgagataagaagaagaataattttgatgttggtatgcttgccctgttacttatagacagtctttgtcataggcaaacttgaatttgatttaaaatagggctgggaaaaatattcaataactgtaagcccccttttggatgccaaacttagaattttgtacattctctgatgaacaagcatttagatcgtaacatggtaaagcctattaccagccaatgttgttagcatctttgtatgcacatcactgtttgtgcaatatatgaatattttgttgcattgtattcttatataaaaataagtagaaaacataaaattgaaattgctgatgagaa

SEQ ID NO: 165589 - DNA, 1766 bp, Homo sapiens
  Payload ID: 12594
  Gene Symbol: PIK3AP1
  Gene Name: phosphoinositide-3-kinase adaptor protein 1
  Uniprot ID: Q6ZUJ8
  ENST ID: ENST00000371109
  CDS Start-End: 183-1397
aaatggctcctgattggtaaattgcatctggaactgggaggatctgtacaggaactagaaatacttgaaagggacagcattctttgggctttcctgagggcattgactctggcatacctctcatggtgaccctggaagctccgcctctggagttgctatgagagaaattgctcttgtaggacatgaggtttttcaccagcgtggcctgctatggatcttgtctctttgcatctgagttgctgatcagatgcaaggactggctcaaaggaagaccagctctcttcactgccctgctagcttgtgtcctttatctttgtgagtggactggtgccaagcatgtcccagggtcatcttatgttgaaatgcttcaggccagtacatctaacccaatccctggagatggtttctctcgggccactaaggactctatgatccgcaagtttttagaaggcaacagcatgggaatgaccaatctggagagagatcagtgccatcttggtcaggaagaagatgtttatcacacggtggatgacgatgaggccttttctgtggacctggccagcaggccccctgtcccagtgcccagaccagagaccactgctcctggtgctcaccagctgcctgacaacgaaccatacatttttaaagtttttgcagaaaaaagtcaagagcggcctgggaatttctacgtttcctcagagagcatcaggaaagggccgcccgtcagaccatggagggacaggccccagtcgagtatatatgacccttttgcgggaatgaaaacgccaggccagcggcagcttatcaccctccaggagcaggtgaagctgggcattgtcaacgtggatgaggctgtgctccacttcaaagagtggcagctcaaccagaagaaacgatcggagtcctttcgtttccagcaggaaaatcttaaacggctaagagacagcatcacccgaagacagagagagaagcaaaaatcaggaaagcagacagacttggagatcacggtcccaattcggcactcacagcacctgcctgcaaaagtggagtttggagtctatgagagtggccccaggaaaagtgtcattccccctaggacggagctgagacgaggagactggaaaacagacagcacctccagcacagcaagtagcacaagtaaccgctccagcacccggagcctcctcagtgtgagcagcgggatggaaggggacaacgaggataatgaagtccctgaggttaccagaagtcgcagtccaggccccccacaagtggatgggacacccaccatgtccctcgagagaccccccagggtgcctccgagagctgcctcacagaggcctccgaccagggagaccttccatcctcctccacctgttccacccagaggacgctgattccacctcctaaaacctgcctacttcaggactttaagactcacagtcttcagcctgttaatgatgtcttcatgttgagttttatagcatgactgttgaccttaagatccattctcattgctgataatgctgcagccctgctggtttgggcttgcctcgaagattttattaaggcacgaagaagtgaaaaactaagggcttcattcaccatcaccaagtatatcgaaccatatacttgtttgccaaaaggatgaagacttaatcgaaatacttacctctaatttgccatatcagaagcctaaaaagaatgatcataaatgtacttcaccagtgattttactgaaatgcacttatattagtctttatgta

SEQ ID NO: 165590 - DNA, 3151 bp, Homo sapiens
  Payload ID: 12594
  Gene Symbol: PIK3AP1
  Gene Name: phosphoinositide-3-kinase adaptor protein 1
  Uniprot ID: Q6ZUJ8
  ENST ID: ENST00000371110
  CDS Start-End: 186-2069
ataatgctgcccaggctggtctcaaactcctgagctcaagcaatcctcccgactcggcttcccaaagcacttggattacagattctggctgtgactcagtcactgacactgagcctgaggacgagaaggttgtttcctactcgaagcagcagaacctgccgacggtgacttcacctgggaacctgatggtggtgcagccggaccgcattcgctgtggggcagaaaccactgtctatgttattgtgagatgtaagctggatgacagggtggcgacagaagcagagttttctcctgaggattctccctctgtaaggatggaagccaaggtggagaatgagtacaccatttcagtgaaggctcccaacctttcatctgggaacgtttctctgaagatatattctggagacttagtggtgtgtgaaaccgttatcagctattatactgacatggaagaaattgggaatttattgtccaatgccgcgaatcctgtggaattcatgtgtcaggcctttaaaattgtgccctacaacacagagacccttgataaactgctaaccgaatccctgaagaacaatatccctgcaagcggactgcacctctttggaatcaaccagctggaagaagaagatatgatgacaaatcagagggatgaagagctgcccaccctgttgcattttgctgcgaagtatggactgaagaacctcactgccttgttgctcacctgcccaggagccctgcaggcgtacagcgtggccaacaagcatggccactaccccaacaccatcgctgagaaacacggcttcagggacctgcggcagttcatcgacgagtatgtggaaacggtggacatgctcaagagtcacattaaagaggaactgatgcacggggaggaggctgatgctgtgtacgagtccatggcccacctttccacagacctgcttatgaaatgctcgctcaaccccggctgtgacgaggatctctatgagtccatggctgcctttgtcccagctgccactgaagacctctatgttgaaatgcttcaggccagtacatctaacccaatccctggagatggtttctctcgggccactaaggactctatgatccgcaagtttttagaaggcaacagcatgggaatgaccaatctggagagagatcagtgccatcttggtcaggaagaagatgtttatcacacggtggatgacgatgaggccttttctgtggacctggccagcaggccccctgtcccagtgcccagaccagagaccactgctcctggtgctcaccagctgcctgacaacgaaccatacatttttaaagtttttgcagaaaaaagtcaagagcggcctgggaatttctacgtttcctcagagagcatcaggaaagggccgcccgtcagaccatggagggacaggccccagtcgagtatatatgacccttttgcgggaatgaaaacgccaggccagcggcagcttatcaccctccaggagcaggtgaagctgggcattgtcaacgtggatgaggctgtgctccacttcaaagagtggcagctcaaccagaagaaacgatcggagtcctttcgtttccagcaggaaaatcttaaacggctaagagacagcatcacccgaagacagagagagaagcaaaaatcaggaaagcagacagacttggagatcacggtcccaattcggcactcacagcacctgcctgcaaaagtggagtttggagtctatgagagtggccccaggaaaagtgtcattccccctaggacggagctgagacgaggagactggaaaacagacagcacctccagcacagcaagtagcacaagtaaccgctccagcacccggagcctcctcagtgtgagcagcgggatggaaggggacaacgaggataatgaagtccctgaggttaccagaagtcgcagtccaggccccccacaagtggatgggacacccaccatgtccctcgagagaccccccagggtgcctccgagagctgcctcacagaggcctccgaccagggagaccttccatcctcctccacctgttccacccagaggacgctgattccacctcctaaaacctgcctacttcaggactttaagactcacagtcttcagcctgttaatgatgtcttcatgttgagttttatagcatgactgttgaccttaagatccattctcattgctgataatgctgcagccctgctggtttgggcttgcctcgaagattttattaaggcacgaagaagtgaaaaactaagggcttcattcaccatcaccaagtatatcgaaccatatacttgtttgccaaaaggatgaagacttaatcgaaatacttacctctaatttgccatatcagaagcctaaaaagaatgatcataaatgtacttcaccagtgattttactgaaatgcacttatattagtctttatgtatttgctagttcagcctgatttctagaagaggttatagtgtgagacttgtagtattcaagtaagataagtgacctaattttaaaataattcttctacttttctgtatattcagcagggtatttaagtgctagggctggtcacacacaaccaactgaaaaagactagagggattagtacaaactcctcttatacagaaggcaaatctgaggttccacagaagtctggaaccaagactattcagttggttaaataaagaggttagtctagactgggcctgctcattctaggtcaccacattttccatctccaaatagccaggccctctctccctcaagaaatgcccagatgtagaaattcatcagtgcctattggtcttccagaattttccatcttccgtatctcccaggcatgagactaccaagtttgtttgttttctttccaatttgggaatttatacttcagtatggtttcaacgcagttatgtttccagagaacatctagaagtggctggaaaccagaagctggggattccagggaccccacttagtgctctatttcctttataggttttatttctggtcatagagagagaaggacctttgactttttcttcgttgaggcttctgaggaggaaaaacaaacctaaaatagaaatacagtcagcctttcaaatccatgggttctgtgtccgtggattcaaccaaccttggatc

SEQ ID NO: 165591 - DNA, 2467 bp, Homo sapiens
  Payload ID: 12595
  Gene Symbol: PIK3IP1
  Gene Name: phosphoinositide-3-kinase interacting protein 1
  Uniprot ID: Q96FE7
  ENST ID: ENST00000215912
  CDS Start-End: 185-976
aaaacagctcgcgctgcagcaagctagctgggaagctcccagttctaaagagaggctgtttaccagaacagcataacaagggcaggtctgactgcaaggctgggactgggaggcagagccgccgccaagggggcctcggttaaacactggtcgttcaatcacctgcaagacgaaggaggcaaggatgctgttggcctgggtacaagcattcctcgtcagcaacatgctcctagcagaagcctatggatctggaggctgtttctgggacaacggccacctgtaccgggaggaccagacctcccccgcgccgggcctccgctgcctcaactggctggacgcgcagagcgggctggcctcggcccccgtgtcgggggccggcaatcacagttactgccgaaacccggacgaggacccgcgcgggccctggtgctacgtcagtggcgaggccggcgtccctgagaaacggccttgcgaggacctgcgctgtccagagaccacctcccaggccctgccagccttcacgacagaaatccaggaagcgtctgaagggccaggtgcagatgaggtgcaggtgttcgctcctgccaacgccctgcccgctcggagtgaggcggcagctgtgcagccagtgattgggatcagccagcgggtgcggatgaactccaaggagaaaaaggacctgggaactctgggctacgtgctgggcattaccatgatggtgatcatcattgccatcggagctggcatcatcttgggctactcctacaagagggggaaggatttgaaagaacagcatgatcagaaagtatgtgagagggagatgcagcgaatcactctgcccttgtctgccttcaccaaccccacctgtgagattgtggatgagaagactgtcgtggtccacaccagccagactccagttgaccctcaggagggcaccaccccccttatgggccaggccgggactcctggggcctgagcccccccagtgggcaggagcccatgcagacactggtgcaggacagcccaccctcctacagctaggaggaactaccactttgtgttctggttaaaaccctaccactcccccgcttttttggcgaatcctagtaagagtgacagaagcaggtggccctgtgggctgagggtaaggctgggtagggtcctaacagtgctccttgtccatcccttggagcagattttgtctgtggatggagacagtggcagctcccacagtgatgctgctgctaagggcttccaaacattgcctgcacccctggaactgaaccagggatagacggggagctcccccaggctcctctgtgctttactaagatggcctcagtctccactgtgggcttgagtggcatacactgttattcatggttaaggtaaagcaggtcaagggatggcattgaaaaaatatatttagtttttaaaatatttgggatggaactccctactgacctctgagaactggaaacgagtttgtacagaagtcagaactttgggttgggaatgagatctaggttgtggctgctggtatgcttcagcttgctggcaatgatgtgccttgacaaccgtgggccaggcctgggcccagggactcttcctgtttcataaggaaaggaagaattgcactgagcattccacttaggaagaggatagagaaggatctgctccgcctttggccacaggagcagaggcagacctgggatgccccagtttctcttcagggatggatagtgacctgtcttcattttgcacaggtaagagagtagttagctaacctatgggaattatactgtggggccttgtgagctgcttctaagaggctaacctggaaactaagctcagaggcaaggtaataaagcacttcagggcttgctccccaagtgggcctgatttagcaggtggtcctgcgggcgtccaggtcagcaccttcctgtagggcactggggctagggtcacagcccctaactcataaagcaatcaaagaaccattagaaagggctcattaagccttttggacacaggaccccagagaggaaaaagtgacttgcccaaggtcgtaagcaagctactggcatggcaagagcccagcttcctgacggagcgcaacatttctccactgcactgtgctagcagctcagcagggcctctaacctgtgatgtcacactcaagaggccttggcagctcctagccatagagcttcctttccagaacccttccactgcccaatgtggagacgggttagtggggctttctatggagccatctgctttggggacctagacctcaggtggtctcttggtgttagtgatgctggagaagagaatattactggtttctacttttctataaaggcatttctctatatacatgttttatatacctcattctgacacctgcatatagtgtgggaaattgctctgcatttgacttaattaaaaaaaaaaaaagactcca

SEQ ID NO: 165592 - DNA, 999 bp, Homo sapiens
  Payload ID: 12595
  Gene Symbol: PIK3IP1
  Gene Name: phosphoinositide-3-kinase interacting protein 1
  Uniprot ID: Q96FE7
  ENST ID: ENST00000402249
  CDS Start-End: 136-840
gagaggctgtttaccagaacagcataacaagggcaggtctgactgcaaggctgggactgggaggcagagccgccgccaagggggcctcggttaaacactggtcgttcaatcacctgcaagacgaaggaggcaaggatgctgttggcctgggtacaagcattcctcgtcagcaacatgctcctagcagaagcctatggatctggaggctgtttctgggacaacggccacctgtaccgggaggaccagacctcccccgcgccgggcctccgctgcctcaactggctggacgcgcagagcgggctggcctcggcccccgtgtcgggggccggcaatcacagttactgccgaaacccggacgaggacccgcgcgggccctggtgctacgtcagtggcgaggccggcgtccctgagaaacggccttgcgaggacctgcgctgtccagagaccacctcccaggccctgccagccttcacgacagaaatccaggaagcgtctgaagggccaggtgcagatgaggtgcaggtgttcgctcctgccaacgccctgcccgctcggagtgaggcggcagctgtgcagccagtgattgggatcagccagcgggtgcggatgaactccaaggagaaaaaggacctgggaactctgggctacgtgctgggcattaccatgatggtgatcatcattgccatcggagctggcatcatcttgggctactcctacaagaggtcagtagcttctcttctgggccctcttaggaggaggggaggaaggtacacaaagtcaaactttgtggctttcttacccaaaaggaagcaagatgttgaaaatcagctcaagatgtagagacttggtcctagtctttatctgctgaccttggacaaaccctttcctttggtgcctttacacctcacttaaaagccttgtgagggatgttcttgttccgcattttacaaatgaagaagcctctgtcagagacttgctcaaagtcacatagcctaggag

SEQ ID NO: 165593 - DNA, 578 bp, Homo sapiens
  Payload ID: 12595
  Gene Symbol: PIK3IP1
  Gene Name: phosphoinositide-3-kinase interacting protein 1
  ENST ID: ENST00000443175
  CDS Start-End: 145-578
agttctaaagagaggctgtttaccagaacagcataacaagggcaggtctgactgcaaggctgggactgggaggcagagccgccgccaagggggcctcggttaaacactggtcgttcaatcacctgcaagacgaaggaggcaaggatgctgttggcctgggtacaagcattcctcgtcagcaacatgctcctagcagaagcctatggatctggaggctgtttctgggacaacggccacctgtaccgggaggaccagacctcccccgcgccgggcctccgctgcctcaactggctggacgcgcagagcgggctggcctcggcccccgtgtcgggggccggcaatcacagttactgccgaaacccggacgaggacccgcgcgggccctggtgctacgtcagtggcgaggccggcgtccctgagaaacggccttgcgaggacctgcgctgtccaggccaggttcagctgtggaattcactcagggcagtccctgatgagagctgtttcccacctcatctccagagaccacctcccaggccctgccagccttcacgacagaaatccaggaagcgtctgaaggg

SEQ ID NO: 165594 - DNA, 2374 bp, Homo sapiens
  Payload ID: 12595
  Gene Symbol: PIK3IP1
  Gene Name: phosphoinositide-3-kinase interacting protein 1
  Uniprot ID: Q96FE7
  ENST ID: ENST00000441972
  CDS Start-End: 191-712
agctgaaaaacagctcgcgctgcagcaagctagctgggaagctcccagttctaaagagaggctgtttaccagaacagcataacaagggcaggtctgactgcaaggctgggactgggaggcagagccgccgccaagggggcctcggttaaacactggtcgttcaatcacctgcaagacgaaggaggcaaggatgctgttggcctgggtacaagcattcctcgtcagcaacatgctcctagcagaagcctatggatctggaggctgtttctgggacaacggccacctgtaccgggaggaccagacctcccccgcgccgggcctccgctgcctcaactggctggacgcgcagagcgggctggcctcggcccccgtgtcgggggccggcaatcacagttactgccgaaacccggacgaggacccgcgcgggccctggtgctacgtcagtggcgaggccggcgtccctgagaaacggccttgcgaggacctgcgctgtccagagaccacctcccaggccctgccagccttcacgacagaaatccaggaagcgtctgaagggccaggtgcagatgaggtgcaggtgttcgctcctgccaacgccctgcccgctcggagtgaggcggcagctgtgcagccagtgattgggatcagccagcgggtgcggatgaactccaaggagaaaaaggacctgggaactctggggggaaggatttgaaagaacagcatgatcagaaagtatgtgagagggagatgcagcgaatcactctgcccttgtctgccttcaccaaccccacctgtgagattgtggatgagaagactgtcgtggtccacaccagccagactccagttgaccctcaggagggcaccaccccccttatgggccaggccgggactcctggggcctgagcccccccagtgggcaggagcccatgcagacactggtgcaggacagcccaccctcctacagctaggaggaactaccactttgtgttctggttaaaaccctaccactcccccgcttttttggcgaatcctagtaagagtgacagaagcaggtggccctgtgggctgagggtaaggctgggtagggtcctaacagtgctccttgtccatcccttggagcagattttgtctgtggatggagacagtggcagctcccacagtgatgctgctgctaagggcttccaaacattgcctgcacccctggaactgaaccagggatagacggggagctcccccaggctcctctgtgctttactaagatggcctcagtctccactgtgggcttgagtggcatacactgttattcatggttaaggtaaagcaggtcaagggatggcattgaaaaaatatatttagtttttaaaatatttgggatggaactccctactgacctctgagaactggaaacgagtttgtacagaagtcagaactttgggttgggaatgagatctaggttgtggctgctggtatgcttcagcttgctggcaatgatgtgccttgacaaccgtgggccaggcctgggcccagggactcttcctgtttcataaggaaaggaagaattgcactgagcattccacttaggaagaggatagagaaggatctgctccgcctttggccacaggagcagaggcagacctgggatgccccagtttctcttcagggatggatagtgacctgtcttcattttgcacaggtaagagagtagttagctaacctatgggaattatactgtggggccttgtgagctgcttctaagaggctaacctggaaactaagctcagaggcaaggtaataaagcacttcagggcttgctccccaagtgggcctgatttagcaggtggtcctgcgggcgtccaggtcagcaccttcctgtagggcactggggctagggtcacagcccctaactcataaagcaatcaaagaaccattagaaagggctcattaagccttttggacacaggaccccagagaggaaaaagtgacttgcccaaggtcgtaagcaagctactggcatggcaagagcccagcttcctgacggagcgcaacatttctccactgcactgtgctagcagctcagcagggcctctaacctgtgatgtcacactcaagaggccttggcagctcctagccatagagcttcctttccagaacccttccactgcccaatgtggagacgggttagtggggctttctatggagccatctgctttggggacctagacctcaggtggtctcttggtgttagtgatgctggagaagagaatattactggtttctacttttctataaaggcatttctctatatacatgttttatatacctcattctgacacctgcatatagtgtgggaaattgctctgcatttgacttaatt

SEQ ID NO: 165595 - DNA, 2625 bp, Homo sapiens
  Payload ID: 12596
  Gene Symbol: PIK3R1
  Gene Name: phosphoinositide-3-kinase, regulatory subunit 1 (alpha)
  Uniprot ID: P27986
  ENST ID: ENST00000320694
  CDS Start-End: 369-1643
atctttatctaagggagacgtgcgagcgcctgggctcctttcctccccgatacagtagcgaaatccagttggcttctcaatgaggagccggcagtgagcggcggtggcccggacgcactgccgggcggggcgtggggcggagggacgagccgagccgagccaagcggagctgggccactgtgcacgcccggagggtcctggcggcgcccccgctcctgcgcgcactctcggcgccggacacgagcactgcctgccgggaacaggctggggggaggtgcgggggcttggcccacttggtggaagaacagctttggggattttttttttttcattgtcggatacaggcatttcaaagggaaaccgttgaaatgcataacctgcaaacactgcctcctaaaccaccaaaacctactactgtagccaacaacggtatgaataacaatatgtccttacaagatgctgaatggtactggggagatatctcgagggaagaagtgaatgaaaaacttcgagatacagcagacgggacctttttggtacgagatgcgtctactaaaatgcatggtgattatactcttacactaaggaaagggggaaataacaaattaatcaaaatatttcatcgagatgggaaatatggcttctctgacccattaaccttcagttctgtggttgaattaataaaccactaccggaatgaatctctagctcagtataatcccaaattggatgtgaaattactttatccagtatccaaataccaacaggatcaagttgtcaaagaagataatattgaagctgtagggaaaaaattacatgaatataacactcagtttcaagaaaaaagtcgagaatatgatagattatatgaagaatatacccgcacatcccaggaaatccaaatgaaaaggacagctattgaagcatttaatgaaaccataaaaatatttgaagaacagtgccagacccaagagcggtacagcaaagaatacatagaaaagtttaaacgtgaaggcaatgagaaagaaatacaaaggattatgcataattatgataagttgaagtctcgaatcagtgaaattattgacagtagaagaagattggaagaagacttgaagaagcaggcagctgagtatcgagaaattgacaaacgtatgaacagcattaaaccagaccttatccagctgagaaagacgagagaccaatacttgatgtggttgactcaaaaaggtgttcggcaaaagaagttgaacgagtggttgggcaatgaaaacactgaagaccaatattcactggtggaagatgatgaagatttgccccatcatgatgagaagacatggaatgttggaagcagcaaccgaaacaaagctgaaaacctgttgcgagggaagcgagatggcacttttcttgtccgggagagcagtaaacagggctgctatgcctgctctgtagtggtggacggcgaagtaaagcattgtgtcataaacaaaacagcaactggctatggctttgccgagccctataacttgtacagctctctgaaagaactggtgctacattaccaacacacctcccttgtgcagcacaacgactccctcaatgtcacactagcctacccagtatatgcacagcagaggcgatgaagcgcttactctttgatccttctcctgaagttcagccaccctgaggcctctggaaagcaaagggctcctctccagtctgatctgtgaattgagctgcagaaacgaagccatctttctttggatgggactagagctttctttcacaaaaaagaagtaggggaagacatgcagcctaaggctgtatgatgaccacacgttcctaagctggagtgcttatcccttctttttctttttttctttggtttaatttaaagccacaaccacatacaacacaaagagaaaaagaaatgcaaaaatctctgcgtgcagggacaaagaggcctttaaccatggtgcttgttaatgctttctgaagctttaccagctgaaagttgggactctggagagcggaggagagagaggcagaagaaccctggcctgagaaggtttggtccagcctggtttagcctggatgttgctgtgcacggtggacccagacacatcgcactgtggattatttcattttgtaacaaatgaacgatatgtagcagaaaggcacgtccactcacaagggacgctttgggagaatgtcagttcatgtatgttcagaagaaattctgtcatagaaagtgccagaaagtgtttaacttgtcaaaaaacaaaaacccagcaacagaaaaatggagtttggaaaacaggacttaaaatgacattcagtatataaaatatgtacataatattggatgactaactatcaaatagatggatttgtatcaataccaaatagcttctgttttgttttgctgaaggctaaattcacagcgctatgcaattcttaattttcattaagttgttatttcagttttaaatgtaccttcagaataagcttccccaccccagtttttgttgcttgaaaatattgttgtcccggatttttgttaatattcatttttgttatccttttttaaaagtaaatgtacaggatgccagtaaaaaaaaaaaa

SEQ ID NO: 165596 - DNA, 2439 bp, Homo sapiens
  Payload ID: 12596
  Gene Symbol: PIK3R1
  Gene Name: phosphoinositide-3-kinase, regulatory subunit 1 (alpha)
  Uniprot ID: P27986
  ENST ID: ENST00000336483
  CDS Start-End: 93-1457
tataggttttaaaatgaattccaagacaccattacaaagaaagccggactcttttcttataactgagctcagccaaggaaactcttgcacaaatgtacaatactgtttggaatatggaagacctggatttagaatatgccaagacagatataaattgtggcacagacttgatgttttatatagaaatggacccaccagcactgcctcctaaaccaccaaaacctactactgtagccaacaacggtatgaataacaatatgtccttacaagatgctgaatggtactggggagatatctcgagggaagaagtgaatgaaaaacttcgagatacagcagacgggacctttttggtacgagatgcgtctactaaaatgcatggtgattatactcttacactaaggaaagggggaaataacaaattaatcaaaatatttcatcgagatgggaaatatggcttctctgacccattaaccttcagttctgtggttgaattaataaaccactaccggaatgaatctctagctcagtataatcccaaattggatgtgaaattactttatccagtatccaaataccaacaggatcaagttgtcaaagaagataatattgaagctgtagggaaaaaattacatgaatataacactcagtttcaagaaaaaagtcgagaatatgatagattatatgaagaatatacccgcacatcccaggaaatccaaatgaaaaggacagctattgaagcatttaatgaaaccataaaaatatttgaagaacagtgccagacccaagagcggtacagcaaagaatacatagaaaagtttaaacgtgaaggcaatgagaaagaaatacaaaggattatgcataattatgataagttgaagtctcgaatcagtgaaattattgacagtagaagaagattggaagaagacttgaagaagcaggcagctgagtatcgagaaattgacaaacgtatgaacagcattaaaccagaccttatccagctgagaaagacgagagaccaatacttgatgtggttgactcaaaaaggtgttcggcaaaagaagttgaacgagtggttgggcaatgaaaacactgaagaccaatattcactggtggaagatgatgaagatttgccccatcatgatgagaagacatggaatgttggaagcagcaaccgaaacaaagctgaaaacctgttgcgagggaagcgagatggcacttttcttgtccgggagagcagtaaacagggctgctatgcctgctctgtagtggtggacggcgaagtaaagcattgtgtcataaacaaaacagcaactggctatggctttgccgagccctataacttgtacagctctctgaaagaactggtgctacattaccaacacacctcccttgtgcagcacaacgactccctcaatgtcacactagcctacccagtatatgcacagcagaggcgatgaagcgcttactctttgatccttctcctgaagttcagccaccctgaggcctctggaaagcaaagggctcctctccagtctgatctgtgaattgagctgcagaaacgaagccatctttctttggatgggactagagctttctttcacaaaaaagaagtaggggaagacatgcagcctaaggctgtatgatgaccacacgttcctaagctggagtgcttatcccttctttttctttttttctttggtttaatttaaagccacaaccacatacaacacaaagagaaaaagaaatgcaaaaatctctgcgtgcagggacaaagaggcctttaaccatggtgcttgttaatgctttctgaagctttaccagctgaaagttgggactctggagagcggaggagagagaggcagaagaaccctggcctgagaaggtttggtccagcctggtttagcctggatgttgctgtgcacggtggacccagacacatcgcactgtggattatttcattttgtaacaaatgaacgatatgtagcagaaaggcacgtccactcacaagggacgctttgggagaatgtcagttcatgtatgttcagaagaaattctgtcatagaaagtgccagaaagtgtttaacttgtcaaaaaacaaaaacccagcaacagaaaaatggagtttggaaaacaggacttaaaatgacattcagtatataaaatatgtacataatattggatgactaactatcaaatagatggatttgtatcaataccaaatagcttctgttttgttttgctgaaggctaaattcacagcgctatgcaattcttaattttcattaagttgttatttcagttttaaatgtaccttcagaataagcttccccaccccagtttttgttgcttgaaaatattgttgtcccggatttttgttaatattcatttttgttatccttttttaaaagtaaatgtacaggatgccagtaaaaaaaaaaaa

SEQ ID NO: 165597 - DNA, 7011 bp, Homo sapiens
  Payload ID: 12596
  Gene Symbol: PIK3R1
  Gene Name: phosphoinositide-3-kinase, regulatory subunit 1 (alpha)
  Uniprot ID: P27986
  ENST ID: ENST00000521381
  CDS Start-End: 617-2791
gcgccgggcgctggagctgcgggcgcacggagaggagtcgccagcagctggagcggagttggaggaagcagcggcagcggcgagggcggcaggctagctgtcggagacggcaagcacggatcgggcacggccggcgggtcgcagccgggctggaggccggtcggaaccgagcgggcaggaggccaccgctgcagcgcgggccccgcagaggaaggaagccggcgggcggggtgaagctcgtgtgtggagtgccacggtacaatcagacgacagatggacagtgtgacaaaagtgtcagaaaggattgggcctcgctgtgagagtcagcctggattcaaagtgttgacaagttgctgaaaaggaagccagtgagaggactgtggcacgcagaggaagtggagccctgtcttcggtcacaccattgatggaggacagatggacagccgtatggccagtcacctctcctcttaaacctttggagagtggtcctttgtcctctgctggacacataataggaattctaacacattctctgaattcacttttcataaaaacgtaaaatcagactgctctgtacaaccaggctcaactgttgcatggtagcagatttgcaaacatgagtgctgaggggtaccagtacagagcgctgtatgattataaaaaggaaagagaagaagatattgacttgcacttgggtgacatattgactgtgaataaagggtccttagtagctcttggattcagtgatggacaggaagccaggcctgaagaaattggctggttaaatggctataatgaaaccacaggggaaaggggggactttccgggaacttacgtagaatatattggaaggaaaaaaatctcgcctcccacaccaaagccccggccacctcggcctcttcctgttgcaccaggttcttcgaaaactgaagcagatgttgaacaacaagctttgactctcccggatcttgcagagcagtttgcccctcctgacattgccccgcctcttcttatcaagctcgtggaagccattgaaaagaaaggtctggaatgttcaactctatacagaacacagagctccagcaacctggcagaattacgacagcttcttgattgtgatacaccctccgtggacttggaaatgatcgatgtgcacgttttggctgacgctttcaaacgctatctcctggacttaccaaatcctgtcattccagcagccgtttacagtgaaatgatttctttagctccagaagtacaaagctccgaagaatatattcagctattgaagaagcttattaggtcgcctagcatacctcatcagtattggcttacgcttcagtatttgttaaaacatttcttcaagctctctcaaacctccagcaaaaatctgttgaatgcaagagtactctctgaaattttcagccctatgcttttcagattctcagcagccagctctgataatactgaaaacctcataaaagttatagaaattttaatctcaactgaatggaatgaacgacagcctgcaccagcactgcctcctaaaccaccaaaacctactactgtagccaacaacggtatgaataacaatatgtccttacaagatgctgaatggtactggggagatatctcgagggaagaagtgaatgaaaaacttcgagatacagcagacgggacctttttggtacgagatgcgtctactaaaatgcatggtgattatactcttacactaaggaaagggggaaataacaaattaatcaaaatatttcatcgagatgggaaatatggcttctctgacccattaaccttcagttctgtggttgaattaataaaccactaccggaatgaatctctagctcagtataatcccaaattggatgtgaaattactttatccagtatccaaataccaacaggatcaagttgtcaaagaagataatattgaagctgtagggaaaaaattacatgaatataacactcagtttcaagaaaaaagtcgagaatatgatagattatatgaagaatatacccgcacatcccaggaaatccaaatgaaaaggacagctattgaagcatttaatgaaaccataaaaatatttgaagaacagtgccagacccaagagcggtacagcaaagaatacatagaaaagtttaaacgtgaaggcaatgagaaagaaatacaaaggattatgcataattatgataagttgaagtctcgaatcagtgaaattattgacagtagaagaagattggaagaagacttgaagaagcaggcagctgagtatcgagaaattgacaaacgtatgaacagcattaaaccagaccttatccagctgagaaagacgagagaccaatacttgatgtggttgactcaaaaaggtgttcggcaaaagaagttgaacgagtggttgggcaatgaaaacactgaagaccaatattcactggtggaagatgatgaagatttgccccatcatgatgagaagacatggaatgttggaagcagcaaccgaaacaaagctgaaaacctgttgcgagggaagcgagatggcacttttcttgtccgggagagcagtaaacagggctgctatgcctgctctgtagtggtggacggcgaagtaaagcattgtgtcataaacaaaacagcaactggctatggctttgccgagccctataacttgtacagctctctgaaagaactggtgctacattaccaacacacctcccttgtgcagcacaacgactccctcaatgtcacactagcctacccagtatatgcacagcagaggcgatgaagcgcttactctttgatccttctcctgaagttcagccaccctgaggcctctggaaagcaaagggctcctctccagtctgatctgtgaattgagctgcagaaacgaagccatctttctttggatgggactagagctttctttcacaaaaaagaagtaggggaagacatgcagcctaaggctgtatgatgaccacacgttcctaagctggagtgcttatcccttctttttctttttttctttggtttaatttaaagccacaaccacatacaacacaaagagaaaaagaaatgcaaaaatctctgcgtgcagggacaaagaggcctttaaccatggtgcttgttaatgctttctgaagctttaccagctgaaagttgggactctggagagcggaggagagagaggcagaagaaccctggcctgagaaggtttggtccagcctggtttagcctggatgttgctgtgcacggtggacccagacacatcgcactgtggattatttcattttgtaacaaatgaacgatatgtagcagaaaggcacgtccactcacaagggacgctttgggagaatgtcagttcatgtatgttcagaagaaattctgtcatagaaagtgccagaaagtgtttaacttgtcaaaaaacaaaaacccagcaacagaaaaatggagtttggaaaacaggacttaaaatgacattcagtatataaaatatgtacataatattggatgactaactatcaaatagatggatttgtatcaataccaaatagcttctgttttgttttgctgaaggctaaattcacagcgctatgcaattcttaattttcattaagttgttatttcagttttaaatgtaccttcagaataagcttccccaccccagtttttgttgcttgaaaatattgttgtcccggatttttgttaatattcatttttgttatccttttttaaaagtaaatgtacaggatgccagtaaaaaaaaaaaatggcttcagaattaaaactatgaaatattttacagtttttcttgtacagagtacttggctgttagcccaaggttaaaaagttcataacagattttttttggactgttttgttgggcagtgcctgataagcttcaaagctgctttattcaataaaaaaaagaaatgaaaaagatatatgaatatgacaaagtattgctgagtccaacaatgttgttttaagactcttaaaatacggtacctggcaatgtttatttcataaagaattgtgaacttcttgaatctagggagggggaatgtagtgaagggatgtatcaagtggggtggtgggagggggaggcaaggttatatgcactttctcatgatttacagagaagtgaataactgcaaagtgaagttgcttcttctacttcagtcttctctcactttgatttgctagttgttatcaattaatgacaattacaaacctactgtatctctaatacagtgtgactggtcaggtatttcagttcttaggaaggaagtgccaagtttgtttttgggttcctggaacagcgctcacctttgtttagaacactggtttaaagggataatcatctctgtcacattagactatccatcatgaccagcaaatactcattttaggaaaaaaaaaagcatgatctgaaaaatacttttggtggtatgttggttaccctcctagctttccatttggtttagaacataaagcaaatagacacagtcatactgtcactgctctggactgtgtggagctcgctaaagtcatggtcattgcaggaatccaagtggcagtccttctcattcattctaatcattgtatgtgcttcactacgggggggagaaggaaacgttagcatcatgtttcccatttagggcaggagtgagaggtctctcttcctgatttagatatgcaaaagctggtatgttcagtaggaactgtacatgtgttgggaggcataaagactaattagcaaccataatatggtcactaccctaatagactaaatgaaatcttgcaatttcaaattactctttctccatattagatttacccacagctatatttctgtttaagtactagggtgagggttttctgttactttgttttttaatgttgttccttttgaaagaatcagtcttgcagctgagtgaaaaatctgtggaatgtattatttgtcctctttacatgaaactactcatacttaagcaaaagtcagtcttatagcaagactgttagccctcaaacttgactctactgatctgaccatttccctctcatcgccagacaactgacgatttccctggttttagtctgcgtctctgctttaaagttattgtgatatccttctagatcatacacaagtctaacagttaattagttaacagtttttaaactaggtttgtgggtatttttttggtagcacatgtatgctattacatacaaatttttatttctaaaatataagatctgagattgaatattttcattaaaagctacagttttgtgaatctttgtgcttcaacattctttgcaagatgatacggtatttaggcatttgccttatttttgcatctcacaaacataagtgcaatagatcttttcattgaacagcaaagtaggattcatcattccatatgacttgagttacaccagacctgttctgcccaatgcctttttgattacagtgtagcttgcccaccgcatttgtcgttttagatactttgctagccggccactttggatttcatcagacagtcctaacaatattgtctgaacggctgaatatgaatagatacagcagaggcactcctgatatatgatttttatccatgcgtcagtttttcccacccagtgtagcatcctaaagataaagccagaagctaagctgcagtgaggctgtgattgggcgtagaagtgggagcattgggacctcacattacacacacgagagatcataaccatgtgaaaaggcaaaaagcatgtgtttgcaacatctgataacttcatggcctttgataaatgtatatatgtatatgtgcatggactgtgtttccagtacacctttcagccaaaacagatccacagtagttgttgagttcaagtacataaagtacataacaagcgaacgtctagtacaattcttacttatgtgtatgggatttttccctttgaggttgctttgttttgtcttacaaaggtgaaaattgtttgtaagtgaagtgagaagttcatatttctttggcttttttgtgtttttaaaagttactccttttagggagctggtctgatgacttgcttagcttggaaatccttgttttcagtgtgtcgagtcaaaatgtgtttatgtgagctgtcactgtggggaaccaattgctttgtcatatagctggttatgaactagtaacatgtttgggaagtcctactgatgttcctttggaagaaaaaatctgctggttttaacaactgtgcttttgctatgtatggtatccaagttagttgaaacgcagacactgagatctgtttgagtttagggtcatttttagaaaggggcagtttaaagcacaatgtctcacatgggacaaagttccaaaatgccaaattcttattttttaaaaagctagttctataaaatactggtattatgggtggggaggaaatagaattgagtcaattggaaagactatccaacttaacatgaaacttgtcaccatgagatagcattagctgcccaggatgctgctatatatatatatatatatatatatgtgtgtgtgtgtgtgtgtgtgtgtgtatatatatatatatatatatatatatatatatatatatatgtgtgtgtatatatatatatatgtgtatatatatatgtatatacatatatgtatatatatgcacatatatatatgtatttaaaaaaatcaaaacaaaaaaaaactcatttatacctgtgtattttttaaagctacaatctgttcaatgtttttaaaaatctgtttatatgacattgttaaaataaagttggtcttttgacgagagggaggatgtcacggtcagttgtaactttgccttcacaaggcaactggggtggggggtgggggtagtgtgcctccttgacatttcgttcaagttatagattcaatggagctatgtcttgttttaagttgctttaatgcattgtattagatcttcaaacagaataaaggttgttttgaaactgaa

SEQ ID NO: 165598 - DNA, 395 bp, Homo sapiens
  Payload ID: 12596
  Gene Symbol: PIK3R1
  Gene Name: phosphoinositide-3-kinase, regulatory subunit 1 (alpha)
  ENST ID: ENST00000520675
  CDS Start-End: 1-395
acagcaaaagaacctcatcagaaccgcaggctggaaagagctttgactctcccggatcttgcagagcagtttgcccctcctgacattgccccgcctcttcttatcaagctcgtggaagccattgaaaagaaaggtctggaatgttcaactctatacagaacacagagctccagcaacctggcagaattacgacagcttcttgattgtgatacaccctccgtggacttggaaatgatcgatgtgcacgttttggctgacgctttcaaacgctatctcctggacttaccaaatcctgtcattccagcagccgtttacagtgaaatgatttctttagctccagaagtacaaagctccgaagaatatattcagctattgaagaagcttattaggtcgcc

SEQ ID NO: 165599 - DNA, 567 bp, Homo sapiens
  Payload ID: 12596
  Gene Symbol: PIK3R1
  Gene Name: phosphoinositide-3-kinase, regulatory subunit 1 (alpha)
  ENST ID: ENST00000519025
  CDS Start-End: 1-567
aaagacgaccagaaaaagtcactgagcactggagaactggaagaagtgaatgaaaaacttcgagatacagcagacgggacctttttggtacgagatgcgtctactaaaatgcatggtgattatactcttacactaaggaaagggggaaataacaaattaatcaaaatatttcatcgagatgggaaatatggcttctctgacccattaaccttcagttctgtggttgaattaataaaccactaccggaatgaatctctagctcagtataatcccaaattggatgtgaaattactttatccagtatccaaataccaacaggatcaagttgtcaaagaagataatattgaagctgtagggaaaaaattacatgaatataacactcagtttcaagaaaaaagtcgagaatatgatagattatatgaagaatatacccgcacatcccaggaaatccaaatgaaaaggacagctattgaagcatttaatgaaaccataaaaatatttgaagaacagtgccagacccaagagcggtacagcaaagaatacatagaaaagtttaaacgtgaaggc

SEQ ID NO: 165600 - DNA, 3891 bp, Homo sapiens
  Payload ID: 12596
  Gene Symbol: PIK3R1
  Gene Name: phosphoinositide-3-kinase, regulatory subunit 1 (alpha)
  Uniprot ID: P27986
  ENST ID: ENST00000521657
  CDS Start-End: 565-2739
agttggaggaagcagcggcagcggcgagggcggcaggctagctgtcggagacggcaagcacggatcgggcacggccggcgggtcgcagccgggctggaggccggtcggaaccgagcgggcaggaggccaccgctgcagcgcgggccccgcagaggaaggaagccggcgggcggggtaggtgaagctcgtgtgtggagtgccacggtacaatcagacgacagatggacagtgtgacaaaagtgtcagaaaggattgggcctcgctgtgagagtcagcctggattcaaagtgttgacaagttgctgaaaaggaagccagtgagaggactgtggcacgcagaggaagtggagccctgtcttcggtcacaccattgatggaggacagatggacagccgtatggccagtcacctctcctcttaaacctttggagagtggtcctttgtcctctgctggacacataataggaattctaacacattctctgaattcacttttcataaaaacgtaaaatcagactgctctgtacaaccaggctcaactgttgcatggtagcagatttgcaaacatgagtgctgaggggtaccagtacagagcgctgtatgattataaaaaggaaagagaagaagatattgacttgcacttgggtgacatattgactgtgaataaagggtccttagtagctcttggattcagtgatggacaggaagccaggcctgaagaaattggctggttaaatggctataatgaaaccacaggggaaaggggggactttccgggaacttacgtagaatatattggaaggaaaaaaatctcgcctcccacaccaaagccccggccacctcggcctcttcctgttgcaccaggttcttcgaaaactgaagcagatgttgaacaacaagctttgactctcccggatcttgcagagcagtttgcccctcctgacattgccccgcctcttcttatcaagctcgtggaagccattgaaaagaaaggtctggaatgttcaactctatacagaacacagagctccagcaacctggcagaattacgacagcttcttgattgtgatacaccctccgtggacttggaaatgatcgatgtgcacgttttggctgacgctttcaaacgctatctcctggacttaccaaatcctgtcattccagcagccgtttacagtgaaatgatttctttagctccagaagtacaaagctccgaagaatatattcagctattgaagaagcttattaggtcgcctagcatacctcatcagtattggcttacgcttcagtatttgttaaaacatttcttcaagctctctcaaacctccagcaaaaatctgttgaatgcaagagtactctctgaaattttcagccctatgcttttcagattctcagcagccagctctgataatactgaaaacctcataaaagttatagaaattttaatctcaactgaatggaatgaacgacagcctgcaccagcactgcctcctaaaccaccaaaacctactactgtagccaacaacggtatgaataacaatatgtccttacaagatgctgaatggtactggggagatatctcgagggaagaagtgaatgaaaaacttcgagatacagcagacgggacctttttggtacgagatgcgtctactaaaatgcatggtgattatactcttacactaaggaaagggggaaataacaaattaatcaaaatatttcatcgagatgggaaatatggcttctctgacccattaaccttcagttctgtggttgaattaataaaccactaccggaatgaatctctagctcagtataatcccaaattggatgtgaaattactttatccagtatccaaataccaacaggatcaagttgtcaaagaagataatattgaagctgtagggaaaaaattacatgaatataacactcagtttcaagaaaaaagtcgagaatatgatagattatatgaagaatatacccgcacatcccaggaaatccaaatgaaaaggacagctattgaagcatttaatgaaaccataaaaatatttgaagaacagtgccagacccaagagcggtacagcaaagaatacatagaaaagtttaaacgtgaaggcaatgagaaagaaatacaaaggattatgcataattatgataagttgaagtctcgaatcagtgaaattattgacagtagaagaagattggaagaagacttgaagaagcaggcagctgagtatcgagaaattgacaaacgtatgaacagcattaaaccagaccttatccagctgagaaagacgagagaccaatacttgatgtggttgactcaaaaaggtgttcggcaaaagaagttgaacgagtggttgggcaatgaaaacactgaagaccaatattcactggtggaagatgatgaagatttgccccatcatgatgagaagacatggaatgttggaagcagcaaccgaaacaaagctgaaaacctgttgcgagggaagcgagatggcacttttcttgtccgggagagcagtaaacagggctgctatgcctgctctgtagtggtggacggcgaagtaaagcattgtgtcataaacaaaacagcaactggctatggctttgccgagccctataacttgtacagctctctgaaagaactggtgctacattaccaacacacctcccttgtgcagcacaacgactccctcaatgtcacactagcctacccagtatatgcacagcagaggcgatgaagcgcttactctttgatccttctcctgaagttcagccaccctgaggcctctggaaagcaaagggctcctctccagtctgatctgtgaattgagctgcagaaacgaagccatctttctttggatgggactagagctttctttcacaaaaaagaagtaggggaagacatgcagcctaaggctgtatgatgaccacacgttcctaagctggagtgcttatcccttctttttctttttttctttggtttaatttaaagccacaaccacatacaacacaaagagaaaaagaaatgcaaaaatctctgcgtgcagggacaaagaggcctttaaccatggtgcttgttaatgctttctgaagctttaccagctgaaagttgggactctggagagcggaggagagagaggcagaagaaccctggcctgagaaggtttggtccagcctggtttagcctggatgttgctgtgcacggtggacccagacacatcgcactgtggattatttcattttgtaacaaatgaacgatatgtagcagaaaggcacgtccactcacaagggacgctttgggagaatgtcagttcatgtatgttcagaagaaattctgtcatagaaagtgccagaaagtgtttaacttgtcaaaaaacaaaaacccagcaacagaaaaatggagtttggaaaacaggacttaaaatgacattcagtatataaaatatgtacataatattggatgactaactatcaaatagatggatttgtatcaataccaaatagcttctgttttgttttgctgaaggctaaattcacagcgctatgcaattcttaattttcattaagttgttatttcagttttaaatgtaccttcagaataagcttccccaccccagtttttgttgcttgaaaatattgttgtcccggatttttgttaatattcatttttgttatccttttttaaaagtaaatgtacaggatgccagtaaaaaaaaaaaatggcttcagaattaaaactatgaaatattttacagtttttcttgtacagagtacttggctgttagcccaaggttaaaaagttcataacagattttttttggactgttttgttgggcagtgcctgataagcttcaaagctgctttattcaataaaaaaaagaaatgaaaaa

SEQ ID NO: 165601 - DNA, 705 bp, Homo sapiens
  Payload ID: 12596
  Gene Symbol: PIK3R1
  Gene Name: phosphoinositide-3-kinase, regulatory subunit 1 (alpha)
  ENST ID: ENST00000522084
  CDS Start-End: 398-705
acacactgagctttttgcatttccatttgacctgagatttctactttctcataatgcgttttctaatgagaaggacaaatgtactgtgtgcttctcccaacaactttttaaatgactcctatagcttgaagaaagagcagaacttttctaggtgtttattcactgatacctggaagtagtcgcttactcatttctctttttttttttttttaaacttgtagaagtacaaagctccgaagaatatattcagctattgaagaagcttattaggtcgcctagcatacctcatcagtattggcttacgcttcagtatttgttaaaacatttcttcaagctctctcaaacctccagcaaaaatctgttgaatgcaagagtactctctgaaattttcagccctatgcttttcagattctcagcagccagctctgataatactgaaaacctcataaaagttatagaaattttaatctcaactgaatggaatgaacgacagcctgcaccagcactgcctcctaaaccaccaaaacctactactgtagccaacaacggtatgaataacaatatgtccttacaagatgctgaatggtactggggagatatctcgagggaagaagtgaatgaaaaacttcgagatacagcagacgggacctttttggtacgagatgcgtctactaaaatgcatggtgattatactcttacactaag

SEQ ID NO: 165602 - DNA, 2473 bp, Homo sapiens
  Payload ID: 12596
  Gene Symbol: PIK3R1
  Gene Name: phosphoinositide-3-kinase, regulatory subunit 1 (alpha)
  Uniprot ID: P27986
  ENST ID: ENST00000523872
  CDS Start-End: 233-1318
attattgacagagatgtcagtgaagtgccagagtgaagtggcactgcctaagaacagagtgtgaaggcactctatctattaagcacaactctaagaattcttgccttaaacacaataagaaaacaatgccattttatgttagctttgggaagggggagtaagggaagaagtgaatgaaaaacttcgagatacagcagacgggacctttttggtacgagatgcgtctactaaaatgcatggtgattatactcttacactaaggaaagggggaaataacaaattaatcaaaatatttcatcgagatgggaaatatggcttctctgacccattaaccttcagttctgtggttgaattaataaaccactaccggaatgaatctctagctcagtataatcccaaattggatgtgaaattactttatccagtatccaaataccaacaggatcaagttgtcaaagaagataatattgaagctgtagggaaaaaattacatgaatataacactcagtttcaagaaaaaagtcgagaatatgatagattatatgaagaatatacccgcacatcccaggaaatccaaatgaaaaggacagctattgaagcatttaatgaaaccataaaaatatttgaagaacagtgccagacccaagagcggtacagcaaagaatacatagaaaagtttaaacgtgaaggcaatgagaaagaaatacaaaggattatgcataattatgataagttgaagtctcgaatcagtgaaattattgacagtagaagaagattggaagaagacttgaagaagcaggcagctgagtatcgagaaattgacaaacgtatgaacagcattaaaccagaccttatccagctgagaaagacgagagaccaatacttgatgtggttgactcaaaaaggtgttcggcaaaagaagttgaacgagtggttgggcaatgaaaacactgaagaccaatattcactggtggaagatgatgaagatttgccccatcatgatgagaagacatggaatgttggaagcagcaaccgaaacaaagctgaaaacctgttgcgagggaagcgagatggcacttttcttgtccgggagagcagtaaacagggctgctatgcctgctctgtagtggtggacggcgaagtaaagcattgtgtcataaacaaaacagcaactggctatggctttgccgagccctataacttgtacagctctctgaaagaactggtgctacattaccaacacacctcccttgtgcagcacaacgactccctcaatgtcacactagcctacccagtatatgcacagcagaggcgatgaagcgcttactctttgatccttctcctgaagttcagccaccctgaggcctctggaaagcaaagggctcctctccagtctgatctgtgaattgagctgcagaaacgaagccatctttctttggatgggactagagctttctttcacaaaaaagaagtaggggaagacatgcagcctaaggctgtatgatgaccacacgttcctaagctggagtgcttatcccttctttttctttttttctttggtttaatttaaagccacaaccacatacaacacaaagagaaaaagaaatgcaaaaatctctgcgtgcagggacaaagaggcctttaaccatggtgcttgttaatgctttctgaagctttaccagctgaaagttgggactctggagagcggaggagagagaggcagaagaaccctggcctgagaaggtttggtccagcctggtttagcctggatgttgctgtgcacggtggacccagacacatcgcactgtggattatttcattttgtaacaaatgaacgatatgtagcagaaaggcacgtccactcacaagggacgctttgggagaatgtcagttcatgtatgttcagaagaaattctgtcatagaaagtgccagaaagtgtttaacttgtcaaaaaacaaaaacccagcaacagaaaaatggagtttggaaaacaggacttaaaatgacattcagtatataaaatatgtacataatattggatgactaactatcaaatagatggatttgtatcaataccaaatagcttctgttttgttttgctgaaggctaaattcacagcgctatgcaattcttaattttcattaagttgttatttcagttttaaatgtaccttcagaataagcttccccaccccagtttttgttgcttgaaaatattgttgtcccggatttttgttaatattcatttttgttatccttttttaaaagtaaatgtacaggatgccagtaaaaaaaaaaaatggcttcagaattaaaactatgaaatattttacagtttttcttgtacagagtacttggctgttagcccaaggttaaaaagttcataacagattttttttggactgttttgttgggcagtgcctgataagcttcaaagctgctttattcaataaaaaaaagaaatgaaaaagat

SEQ ID NO: 165603 - DNA, 552 bp, Homo sapiens
  Payload ID: 12596
  Gene Symbol: PIK3R1
  Gene Name: phosphoinositide-3-kinase, regulatory subunit 1 (alpha)
  ENST ID: ENST00000523807
  CDS Start-End: 201-552
acacttgaagctgctcaatactggaagtacaaagctccgaagaatatattcagctattgaagaagcttattaggtcgcctagcatacctcatcagtattggcttacgcttcagtatttgttaaaacatttcttcaagctctctcaaacctccagcaaaaatctgttgaatgcaagagtactctctgaaattttcagccctatgcttttcagattctcagcagccagctctgataatactgaaaacctcataaaagttatagaaattttaatctcaactgaatggaatgaacgacagcctgcaccagcactgcctcctaaaccaccaaaacctactactgtagccaacaacggtatgaataacaatatgtccttacaagatgctgaatggtactggggagatatctcgagggaagaagtgaatgaaaaacttcgagatacagcagacgggacctttttggtacgagatgcgtctactaaaatgcatggtgattatactcttacactaaggaaagggggaaataacaaattaatcaaaatatttcatcgagatg

SEQ ID NO: 165604 - DNA, 945 bp, Homo sapiens
  Payload ID: 12596
  Gene Symbol: PIK3R1
  Gene Name: phosphoinositide-3-kinase, regulatory subunit 1 (alpha)
  ENST ID: ENST00000517698
  CDS Start-End: 48-164
ggactcttttcttataactgagctcagccaaggaaactcttgcacaaatgtacaatactgtttggaatatggaagacctggatttagaatatgccaagacagatataaattgtggcacagacttgatgttttatatagaaatggacccaccagggaagaagtgaatgaaaaacttcgagatacagcagacgggacctttttggtacgagatgcgtctactaaaatgcatggtgattatactcttacactaaggaaagggggaaataacaaattaatcaaaatatttcatcgagatgggaaatatggcttctctgacccattaaccttcagttctgtggttgaattaataaaccactaccggaatgaatctctagctcagtataatcccaaattggatgtgaaattactttatccagtatccaaataccaacaggatcaagttgtcaaagaagataatattgaagctgtagggaaaaaattacatgaatataacactcagtttcaagaaaaaagtcgagaatatgatagattatatgaagaatatacccgcacatcccaggaaatccaaatgaaaaggacagctattgaagcatttaatgaaaccataaaaatatttgaagaacagtgccagacccaagagcggtacagcaaagaatacatagaaaagtttaaacgtgaaggcaatgagaaagaaatacaaaggattatgcataattatgataagttgaagtctcgaatcagtgaaattattgacagtagaagaagattggaagaagacttgaagaagcaggcagctgagtatcgagaaattgacaaacgtatgaacagcattaaaccagaccttatccagctgagaaagacgagagaccaatacttgatgtggttgactcaaaaaggtgttcggcaaaagaagttgaacgagtggttgggcaatgaaaacactga

SEQ ID NO: 165605 - DNA, 540 bp, Homo sapiens
  Payload ID: 12596
  Gene Symbol: PIK3R1
  Gene Name: phosphoinositide-3-kinase, regulatory subunit 1 (alpha)
  ENST ID: ENST00000521409
  CDS Start-End: 128-540
ttcattgtcggatacaggcatttcaaagggaaaccgttgaaatgcataacctgcaaaggaagaagtgaatgaaaaacttcgagatacagcagacgggacctttttggtacgagatgcgtctactaaaatgcatggtgattatactcttacactaaggaaagggggaaataacaaattaatcaaaatatttcatcgagatgggaaatatggcttctctgacccattaaccttcagttctgtggttgaattaataaaccactaccggaatgaatctctagctcagtataatcccaaattggatgtgaaattactttatccagtatccaaataccaacaggatcaagttgtcaaagaagataatattgaagctgtagggaaaaaattacatgaatataacactcagtttcaagaaaaaagtcgagaatatgatagattatatgaagaatatacccgcacatcccaggaaatccaaatgaaaaggacagctattgaagcatttaatgaaaccataaaaatatttgaagaacagtgccagaccca

SEQ ID NO: 165606 - DNA, 4033 bp, Homo sapiens
  Payload ID: 12597
  Gene Symbol: PIK3R2
  Gene Name: phosphoinositide-3-kinase, regulatory subunit 2 (beta)
  Uniprot ID: O00459
  ENST ID: ENST00000222254
  CDS Start-End: 601-2787
ccgcccggctcgaatgcgctcgggcatttccgccgggggcgggccaggccgctcggaaccgtggcggcggcggaggcggggatcccgcggctgcggcgacggtggccgcggtggagccacggggcgggcttggcttggtgtgacggcggctgcggcggcggtggcggccgcgaccaggtcggcgtcctcagctggccgagcatggtggcagcctgcacccttggctcccttgtctggtgcagccagcagagccgccagccttgggcgcccatggccctccgtgtgagggcgtgagcggcctgccccagcctcacctgctgatggaggactcaatggcccagtgacctgacaccacaccaccaactccctcccaccagctgacgaatggtggacccagtgacgagtggcccttgtaagggtcatggaataatttgaagcgaggcatgagcggcccctgtggtcgcctgtgactgctggagatagaggtcccagcaccccaagccaacccagcggaccctcccagccctgcttcaaccaatggggccagtggggctccaagcagccacctaaccatccagaccccaccccactcacgcggccatggcgggccctgagggcttccagtaccgcgctctgtacccgttccgccgggagcggccggaggacctggagctgctgcccggcgacgtgctggtagtgagccgggcggccttgcaggcgctgggcgtggccgagggtggcgagcgctgcccacagagcgtgggctggatgcccggcctcaacgagcgcacacggcagcgaggtgacttccctggcacctatgtggagttcctggggcccgtggccctggcccggcccggccctcgcccacggggcccccgcccactgcccgccaggccccgtgatggggcccctgagccaggcctcacactccccgacttgcccgagcagttctccccacctgatgtggctccccctcttctggtgaagcttgtggaggccattgaaaggacagggctggacagcgaatctcactaccgcccggagctgcccgcaccgcgtacagactggtccctgagcgacgtggatcagtgggacacggcagccctggctgacggcattaagagcttcctgctggcactgcccgcgccgctcgtgacccccgaggcctcggccgaggcgcgccgggccctgcgggaggccgcggggcccgtggggccggcgctggagccaccgacgctgccgctgcaccgcgcgctcacgctgcgcttcctgctccagcacctgggccgcgtggccagccgcgccccggccctgggtcccgcggtccgggccctgggcgccacctttgggccgctgctgctgcgcgcgccgccgccgccgtcctcgccgccgccagggggcgctcccgacgggagtgagcccagccctgacttcccggcgctgctggtggagaagctgcttcaggaacacttggaagagcaggaggttgcgcccccagcgctgccgcctaaaccccccaaggcaaagccggcctccacagtcctggccaatggagggagcccaccctccctgcaggatgctgagtggtactggggggacatttcaagggaggaggtgaacgagaaactccgggacactcccgatggcaccttcctagtccgagatgcttctagcaagatccagggcgagtacacgctgaccctcaggaaaggcgggaacaataagctgatcaaggtcttccaccgagatgggcactatggcttctcagagccactcaccttctgctccgttgtggacctcatcaatcactaccgccacgagtctctggcccagtacaatgccaagctggacacacggctcctctaccctgtgtccaaataccagcaggaccagattgtcaaggaggacagcgtggaggcagtgggcgcccagcttaaggtctatcaccagcagtaccaggacaagagccgcgagtatgaccagctttatgaagagtacacacggacctcccaggagctgcagatgaagcgtactgcaattgaggccttcaatgagactatcaagatctttgaagagcagggccagactcaagagaaatgcagcaaggaatacctggagcgcttccggcgtgagggcaacgagaaagagatgcaaaggatcctgctgaactccgagcggctcaagtcccgcattgccgagatccatgagagccgcacgaagctggagcagcagctgcgggcccaggcctcggacaacagagagatcgacaagcgcatgaacagcctcaagccggacctcatgcagctgcgcaagatccgagaccagtacctcgtgtggctcacccagaaaggcgcccggcagaagaaaatcaacgagtggctggggattaaaaatgagactgaggaccagtacgcactcatggaggacgaggacgatctcccgcaccacgaggaacgcacttggtacgtgggcaagatcaaccgcacgcaggcagaggagatgctgagtggcaagcgggatggcaccttcctcatccgcgagagcagccagcggggctgctacgcctgctccgtggtagtggacggcgacaccaagcactgcgtcatctaccgcacggccaccggcttcggcttcgcggagccctacaacctgtacgggtcgctgaaggagctggtgctgcactaccagcacgcctcgctggtgcagcacaacgacgcgctcaccgtcaccctggcgcacccagtgcgcgccccgggccccggcccgccgcctgccgcccgctgagcaccgaggacccgccccaagcagagccgcccctgggcccgtctgcgccggaggctgcggcggcgggagccacggaccagaccagccacatccaggggtcctcatttctccggctctggctcttgtttggggttctctcaccctctttctctttccttccctcccccattctccagatctccctctgtctccttttctctgtctttcttggcccctgtctctctccatgttgggggtcctaactcccccaccccatatctacgtgtcctccgggcattgccctctccatggctctggtcaccctgaccctctgccctgcccaccgcaggtcccccggggtcccggaagccccttctggctgcacctgccatgtttacagagggcccctgggctgcgcggccccagcctgggcaccctgatttttaagccatagacctggggtcagggcaggaaggaacttcactctgctgcttccgagaacctcggccgtgacattcggggccgggcgggacccgccccacagactccaacttcccctccaaaccccgaagtgaaacccgccaccgggttacccccacaagggggccgctgcgagaagttcacccacccccgaaaaaataattaaactcgcaggccaggcacggtggctcatgcctgtaatcccagcactttgggaggccaagacgggcggatcttttgaggtcgggagttggaggccagcctggccaaaatggcaaaaccccgcatctactaaaatacaaaaattagccgggcgtggtggcggccgcctgtaatcccagctacttgggaggctgaggcgtgagaatctcttgaacccaggagatggaggttgcagtgagcagagatcgtgccactgcactccagcctgggtaacagagggagactcctccgtctcaaaaaaataaataaataaacttgtgagctggccccaacccctcctaggaatcacagctccccgtactggtgccgccgcagtggccaagttgcgacactgcccacggcccctccctctgatgcagattcagggcttctcttcgatcatgttgggttttgattctgtttttccttgactgcaaaaccctctttcctctcctcttttgggacaagagccctggttttctacgctgcccttggccaccacactgcctgccccacgagctgggaggcaggttttgtacggtacgttgttattgatatgatataaaacatcaaacgtcgtgggtga

SEQ ID NO: 165607 - DNA, 3273 bp, Homo sapiens
  Payload ID: 12597
  Gene Symbol: PIK3R2
  Gene Name: phosphoinositide-3-kinase, regulatory subunit 2 (beta)
  ENST ID: ENST00000426902
  CDS Start-End: 259-1704
gacctgacaccacaccaccaactccctcccaccagctgacgaatggtggacccagtgacgagtggcccttgtaagggtcatggaataatttgaagcgaggcatgagcggcccctgtggtcgcctgtgactgctggagatagaggtcccagcaccccaagccaacccagcggaccctcccagccctgcttcaaccaatggggccagtggggctccaagcagccacctaaccatccagaccccaccccactcacgcggccatggcgggccctgagggcttccagtaccgcgctctgtacccgttccgccgggagcggccggaggacctggagctgctgcccggcgacgtgctggtagtgagccgggcggccttgcaggcgctgggcgtggccgagggtggcgagcgctgcccacagagcgtgggctggatgcccggcctcaacgagcgcacacggcagcgaggtgacttccctggcacctatgtggagttcctggggcccgtggccctggcccggcccggccctcgcccacggggcccccgcccactgcccgccaggccccgtgatggggcccctgagccaggcctcacactccccgacttgcccgagcagttctccccacctgatgtggctccccctcttctggtgaagcttgtggaggccattgaaaggacagggctggacagcgaatctcactaccgcccggagctgcccgcaccgcgtacagactggtccctgagcgacgtggatcagtgggacacggcagccctggctgacggcattaagagcttcctgctggcactgcccgcgccgctcgtgacccccgaggcctcggccgaggcgcgccgggccctgcgggaggccgcggggcccgtggggccggcgctggagccaccgacgctgccgctgcaccgcgcgctcacgctgcgcttcctgctccagcacctgggccgcgtggccagccgcgccccggccctgggtcccgcggtccgggccctgggcgccacctttgggccgctgctgctgcgcgcgccgccgccgccgtcctcgccgccgccagggggcgctcccgacgggagtgagcccagccctgacttcccggcgctgctggtggagaagctgcttcaggaacacttggaagagcaggaggttgcgcccccagcgctgccgcctaaaccccccaaggcaaagccggcctccacagtcctggccaatggagggagcccaccctccctgcaggatgctgagtggtactggggggacatttcaagggaggaggtgaacgagaaactccgggacactcccgatggcaccttcctagtccgagatgcttctagcaagatccagggcgagtacacgctgaccctcaggaaaggcgggaacaataagctgatcaaggtcttccaccgagatgggcactatggcttctcagagccactcaccttctgctccgttgtggacctcatcaatcactaccgccacgagtctctggcccagtacaatgccaagctggacacacggctcctctaccctgtgtccaaataccagcaggaccagattgtcaaggaggacagcgtggaggcagtgggcgcccagcttaaggtctatcaccagcagtaccaggacaagagccgcgagtatgaccagctttatgaagagtacacacggacctcccagggccttttggggagtcccaggaggtgctgagctgcgccccctcctccaggagctgcagatgaagcgtactgcaattgaggccttcaatgagactatcaagatctttgaagagcagggccagactcaagagaaatgcagcaaggaatacctggagcgcttccggcgtgagggcaacgagaaagagatgcaaaggatcctgctgaactccgagcggctcaagtcccgcattgccgagatccatgagagccgcacgaagctggagcagcagctgcgggcccaggcctcggacaacagagagatcgacaagcgcatgaacagcctcaagccggacctcatgcagctgcgcaagatccgagaccagtacctcgtgtggctcacccagaaaggcgcccggcagaagaaaatcaacgagtggctggggattaaaaatgagactgaggaccagtacgcactcatggaggacgaggacgatctcccgcaccacgaggaacgcacttggtacgtgggcaagatcaaccgcacgcaggcagaggagatgctgagtggcaagcgggatggcaccttcctcatccgcgagagcagccagcggggctgctacgcctgctccgtggtagtggacggcgacaccaagcactgcgtcatctaccgcacggccaccggcttcggcttcgcggagccctacaacctgtacgggtcgctgaaggagctggtgctgcactaccagcacgcctcgctggtgcagcacaacgacgcgctcaccgtcaccctggcgcacccagtgcgcgccccgggccccggcccgccgcctgccgcccgctgagcaccgaggacccgccccaagcagagccgcccctgggcccgtctgcgccggaggctgcggcggcgggagccacggaccagaccagccacatccaggggtcctcatttctccggctctggctcttgtttggggttctctcaccctctttctctttccttccctcccccattctccagatctccctctgtctccttttctctgtctttcttggcccctgtctctctccatgttgggggtcctaactcccccaccccatatctacgtgtcctccgggcattgccctctccatggctctggtcaccctgaccctctgccctgcccaccgcaggtcccccggggtcccggaagccccttctggctgcacctgccatgtttacagagggcccctgggctgcgcggccccagcctgggcaccctgatttttaagccatagacctggggtcagggcaggaaggaacttcactctgctgcttccgagaacctcggccgtgacattcggggccgggcgggacccgccccacagactccaacttcccctccaaaccccgaagtgaaacccgccaccgggttacccccacaagggggccgctgcgagaagttcacccacccccgaaaaaataattaaactcgcaggccaggcacggtggctcatgcctgtaatcccagcactttgggaggccaagacgggcggatcttttgaggtcgggagttggaggccagcctggccaaaatggcaaaaccccgcatctactaaaatacaaaaattagccgggcgtggt

SEQ ID NO: 165608 - DNA, 588 bp, Homo sapiens
  Payload ID: 12597
  Gene Symbol: PIK3R2
  Gene Name: phosphoinositide-3-kinase, regulatory subunit 2 (beta)
  ENST ID: ENST00000464016
  CDS Start-End: 1-373
tgagggcaacgagaaagagatgcaaaggatcctgctgaactccgagcggctcaagtcccgcattgccgagatccatgagagccgcacgaagctggagcagcagctgcgggcccaggcctcggacaacagagagatcgacaagcgcatgaacagcctcaagccggacctcatgcagctgcgcaagatccgagaccagtacctcgtgtggctcacccagaaaggcgcccggcagaagaaaatcaacgagtggctggggattaaaaatgagactgaggatacgcactcatggaggacgaggacgatctcccgcaccacgaggaacgcacttggtacgtgggcaagatcaaccgcacgcaggcagaggagatgctgagtggcaagcgggatggcaccttcctcatccgcgagagcagccagcggggctgctacgcctgctccgtggtagtggacggcgacaccaagcactgcgtcatctaccgcacggccaccggcttcggcttcgcggagccctacaacctgtacgggtcgctgaaggagctggtgctgcactaccagcacgcctcgctggtgcagcacaacgacgcgctc

SEQ ID NO: 165609 - DNA, 2187 bp, Homo sapiens
  Payload ID: 12597
  Gene Symbol: PIK3R2
  Gene Name: phosphoinositide-3-kinase, regulatory subunit 2 (beta)
  Uniprot ID: O00459
  ENST ID: ENST00000617130
  CDS Start-End: 1-2187
atggcgggccctgagggcttccagtaccgcgctctgtacccgttccgccgggagcggccggaggacctggagctgctgcccggcgacgtgctggtagtgagccgggcggccttgcaggcgctgggcgtggccgagggtggcgagcgctgcccacagagcgtgggctggatgcccggcctcaacgagcgcacacggcagcgaggtgacttccctggcacctatgtggagttcctggggcccgtggccctggcccggcccggccctcgcccacggggcccccgcccactgcccgccaggccccgtgatggggcccctgagccaggcctcacactccccgacttgcccgagcagttctccccacctgatgtggctccccctcttctggtgaagcttgtggaggccattgaaaggacagggctggacagcgaatctcactaccgcccggagctgcccgcaccgcgtacagactggtccctgagcgacgtggatcagtgggacacggcagccctggctgacggcattaagagcttcctgctggcactgcccgcgccgctcgtgacccccgaggcctcggccgaggcgcgccgggccctgcgggaggccgcggggcccgtggggccggcgctggagccaccgacgctgccgctgcaccgcgcgctcacgctgcgcttcctgctccagcacctgggccgcgtggccagccgcgccccggccctgggtcccgcggtccgggccctgggcgccacctttgggccgctgctgctgcgcgcgccgccgccgccgtcctcgccgccgccagggggcgctcccgacgggagtgagcccagccctgacttcccggcgctgctggtggagaagctgcttcaggaacacttggaagagcaggaggttgcgcccccagcgctgccgcctaaaccccccaaggcaaagccggcctccacagtcctggccaatggagggagcccaccctccctgcaggatgctgagtggtactggggggacatttcaagggaggaggtgaacgagaaactccgggacactcccgatggcaccttcctagtccgagatgcttctagcaagatccagggcgagtacacgctgaccctcaggaaaggcgggaacaataagctgatcaaggtcttccaccgagatgggcactatggcttctcagagccactcaccttctgctccgttgtggacctcatcaatcactaccgccacgagtctctggcccagtacaatgccaagctggacacacggctcctctaccctgtgtccaaataccagcaggaccagattgtcaaggaggacagcgtggaggcagtgggcgcccagcttaaggtctatcaccagcagtaccaggacaagagccgcgagtatgaccagctttatgaagagtacacacggacctcccaggagctgcagatgaagcgtactgcaattgaggccttcaatgagactatcaagatctttgaagagcagggccagactcaagagaaatgcagcaaggaatacctggagcgcttccggcgtgagggcaacgagaaagagatgcaaaggatcctgctgaactccgagcggctcaagtcccgcattgccgagatccatgagagccgcacgaagctggagcagcagctgcgggcccaggcctcggacaacagagagatcgacaagcgcatgaacagcctcaagccggacctcatgcagctgcgcaagatccgagaccagtacctcgtgtggctcacccagaaaggcgcccggcagaagaaaatcaacgagtggctggggattaaaaatgagactgaggaccagtacgcactcatggaggacgaggacgatctcccgcaccacgaggaacgcacttggtacgtgggcaagatcaaccgcacgcaggcagaggagatgctgagtggcaagcgggatggcaccttcctcatccgcgagagcagccagcggggctgctacgcctgctccgtggtagtggacggcgacaccaagcactgcgtcatctaccgcacggccaccggcttcggcttcgcggagccctacaacctgtacgggtcgctgaaggagctggtgctgcactaccagcacgcctcgctggtgcagcacaacgacgcgctcaccgtcaccctggcgcacccagtgcgcgccccgggccccggcccgccgcctgccgcccgctga

SEQ ID NO: 165610 - DNA, 1446 bp, Homo sapiens
  Payload ID: 12597
  Gene Symbol: PIK3R2
  Gene Name: phosphoinositide-3-kinase, regulatory subunit 2 (beta)
  ENST ID: ENST00000617642
  CDS Start-End: 1-1446
atggcgggccctgagggcttccagtaccgcgctctgtacccgttccgccgggagcggccggaggacctggagctgctgcccggcgacgtgctggtagtgagccgggcggccttgcaggcgctgggcgtggccgagggtggcgagcgctgcccacagagcgtgggctggatgcccggcctcaacgagcgcacacggcagcgaggtgacttccctggcacctatgtggagttcctggggcccgtggccctggcccggcccggccctcgcccacggggcccccgcccactgcccgccaggccccgtgatggggcccctgagccaggcctcacactccccgacttgcccgagcagttctccccacctgatgtggctccccctcttctggtgaagcttgtggaggccattgaaaggacagggctggacagcgaatctcactaccgcccggagctgcccgcaccgcgtacagactggtccctgagcgacgtggatcagtgggacacggcagccctggctgacggcattaagagcttcctgctggcactgcccgcgccgctcgtgacccccgaggcctcggccgaggcgcgccgggccctgcgggaggccgcggggcccgtggggccggcgctggagccaccgacgctgccgctgcaccgcgcgctcacgctgcgcttcctgctccagcacctgggccgcgtggccagccgcgccccggccctgggtcccgcggtccgggccctgggcgccacctttgggccgctgctgctgcgcgcgccgccgccgccgtcctcgccgccgccagggggcgctcccgacgggagtgagcccagccctgacttcccggcgctgctggtggagaagctgcttcaggaacacttggaagagcaggaggttgcgcccccagcgctgccgcctaaaccccccaaggcaaagccggcctccacagtcctggccaatggagggagcccaccctccctgcaggatgctgagtggtactggggggacatttcaagggaggaggtgaacgagaaactccgggacactcccgatggcaccttcctagtccgagatgcttctagcaagatccagggcgagtacacgctgaccctcaggaaaggcgggaacaataagctgatcaaggtcttccaccgagatgggcactatggcttctcagagccactcaccttctgctccgttgtggacctcatcaatcactaccgccacgagtctctggcccagtacaatgccaagctggacacacggctcctctaccctgtgtccaaataccagcaggaccagattgtcaaggaggacagcgtggaggcagtgggcgcccagcttaaggtctatcaccagcagtaccaggacaagagccgcgagtatgaccagctttatgaagagtacacacggacctcccagggccttttggggagtcccaggaggtgctga

SEQ ID NO: 165611 - DNA, 5609 bp, Homo sapiens
  Payload ID: 12598
  Gene Symbol: PIK3R3
  Gene Name: phosphoinositide-3-kinase, regulatory subunit 3 (gamma)
  Uniprot ID: Q92569
  ENST ID: ENST00000262741
  CDS Start-End: 691-2076
gtggctggagtccgggcagagcttgagggcagttggtgcggtcgggttggttcttacaccccggcgggagcgcccagacaagccgagctgactggacttctccggccggccccattcccgaggctgcggcagcttcggttccgagaccgaccggagaggagcccgagtcccggcctctgggggattcgctctctgcagaccagtgggaccccgaaacttgaacgcaatctccagcccccttttttgccttcctttgtcacttgcccgggtttctcccaacgtgttcttttttttcctcttcattctccctccttcgaaggacacaaaagtggcttccgcggaaagatttggaggcggtgggagcttttctccccggagagcgactgtgtagaaaggatttttgggaagccgctttttaacacctctgctctccgtcccccaagcctctgtgtaatcctctgaggagaaaagcccatagcttgaaagttcgggggcattttgttgtgttctgtaggagagagggggaggaccctgttcgggtagtttggccggactggtactggccgttggaaaacccgaagtacatttccgtgtggaacttttgcagatatatatttttagatttttaaataccagataaaaaatatatgccttctatatatctcctggcgacctgcccctgacagcgcgatgtacaatacggtgtggagtatggaccgcgatgacgcagactggagggaggtgatgatgccctattcgacagaactgatattttatattgaaatggatcctccagctcttccaccaaagccacctaagccaatgacttcagcagttccaaatggaatgaaggacagttctgtttctcttcaggatgcagaatggtactggggggatatttcaagggaggaggtaaatgacaaattgcgggatatgccagatgggaccttcttggtccgagatgcctcaacaaaaatgcagggagattatactttgactttgcggaagggaggcaataataagttaataaagatctatcaccgggatggtaaatatggcttttctgatcctctgacatttaattccgtggtggagctcattaaccactatcaccatgaatctcttgctcagtacaatcccaaacttgatgtgaagctgatgtacccagtgtccagataccaacaggatcagttggtaaaagaagataatattgatgcagtaggtaaaaaactgcaagaataccactctcagtatcaggagaagagtaaagagtatgataggctgtatgaagaatatactagaacatcccaggaaatacagatgaagaggactgcaatagaagcttttaatgaaacaattaaaatatttgaagagcagtgtcacacacaagaacaacatagcaaagaatatattgagcgatttcgcagagaggggaatgaaaaggagattgaacgaattatgatgaattatgataaattgaaatcacgtctgggtgagattcatgatagcaaaatgcgtctagagcaggatttgaagaatcaagctttggacaaccgagaaatagataaaaaaatgaatagcatcaaacctgacctgatccagctgcgaaagatccgagatcaacaccttgtatggctcaatcacaaaggagtgagacagaaacgcctgaatgtctggctgggaattaagaatgaggatgctgatgagaactattttatcaatgaggaagatgaaaacctgccccattatgatgagaaaacctggtttgttgaggatatcaatcgagtacaagcagaggacttgctttatgggaaacctgatggtgcattcttaattcgtgagagtagcaagaaaggatgctatgcttgctctgtggtggccgatggggaagtgaagcactgtgtgatctacagcactgctcggggctatggctttgcagagccctacaacctgtacagctctctgaaggagctagtgctccattaccagcagacatccttggttcagcacaacgactccctcaacgtcaggcttgcctaccctgttcatgcacagatgccctcgctttgcagataaagaggaagtgggaagagaggtggttctctggcatttttttctacagtttttattagactacgatgagggcattctttctacatagactgcttgttttgcacaagaagtgattttgtgaatgtgaagtggagaggccgagcagcagccggccgggatgggggcattagaggcctgaggttctctaggactcagccatgccgctgcactgacatactaagctggaagcagatgttttttttgaaagtctgtttcattggggtttttgttttgtttagccagacaccctcaacagaatattaggcttgatggttatagcgggtggggttgtatttggaagcctctgaagagaccatgtctttttaaaatctaactcttgagagtgcagcaggggcatggctctgctgggagttgtgttttgctttggcagtctctcttccccccacgaagaaggctgtttaggttttgtgatagaatgggatttgatgaaaaagacaaccaaaggaaaatggggaggcttgggatttcatttaaataatctaagccaagatgataaaaaaaaccttcaactgaaggtattttgtttcttaccaacataatttaggcttcagcatctcaccagcccctccctctgaagaagtattatgttcagaagccaacaaaacagtttgttgccagaccaatgtttgatgggaaaacgtggcactcatagttgaatgtatacttctgtaccaaaacttgaacataaaaagactagaatttgtgagttttagcaaacgctaaaattgatcactgtaactaaccccttctgtccttcctgcctgtttctctgagatgaggaatagcattctttttgtggggatggtgagctttgaatcataaaatgaagttggtgcttgtatggtgtttccttagcctaaagaatgatctgttgtttgaaacctttgtaacttgtttgtatgagtaaagaaaaggtgcaatgcagtgcttttagatggcttgatataccaaataacaatatagaacaacattattatatgtgcttccccaagtttaaaggccctgcagaaatagtaaacatggtttaatttcccttcatttccccctcctttgctggatggggttttgggagctataggttgctaaggaggggagtcagattgtggtcaggtgcctcagtaaatcacagacccaggggccctgtggtccagggtgagagtcacaccacattacacatgtgcttccatacagtggtttctgaagcttttgcagggagagaagatggcttagtgtttagactgttagtagaagccatctggaagcttttctctttgcctttttttgtgatcctgccattaaggctatgtgcagtctgccctcctgctccagtggccttgattttaggccaggaatcttctgctccatgtggcttaagccttccagctgagtgaagctaggcaaatggagtgggggcaggcatctattcctgcccccatcatgccccacacccatcagtcaacactcatttgacaaatagagtccagctgcctctgagccaatcctgggaccataataggctcagagtgagtcagctgtttgaacccaaagctgtgcagtcaggcaccctggctgagctagagaagccagtacctgcatcttggtttataaggcttacagctaggaaagctctagttctgggggtgaaagaaaaatattagtttacctgagcacttatttccatgacagggtctaaaatatggaccatgatgtagacacagatttttaattttggaaaaacctccagttactagtgacgaggatagaaagggaagtgcttctctttggctttttcttggttacactgcagtttcaggattgggtgagacagagacaaatgaacccccctctaaagtcatttaactaatagccagcacatcccttccccaaactgtcaattgaaatcttaactgaaagttttactgaataataccaagctaattgctgttgggcacacctggatggctttgcacctggtgttgaacctgctgaagcaggtggatgctcaagattacgtgcaaggaatccctcccatctggtactaaaatttcagtgtgttctgagtgtcttttaaaccaaaatggaaatacagatacagggctgtagtattcagtaatgtgtctgctccttgttgggcagacaccagcggtgtgcagggagagaccaagtaccatctttatctacacttgggctggcttgtggagaagggctgctttttttcagtcctacattccttcattttttttttcattcttgaattcattgttttgtgggatctaagacccaggggtcatttgagaggtttgacagtatcttttctgaccagttgccacatgacttgcttgaccctgagcctgtggaaatggcatagggaccagtctactacccactgggcctggtgtgtagagggggagagggtagcaaggtgcttctctacgcccatgacttgggagcaggtcttggcctccttcatgagagtctagtgccatgtcctgtcccatgatctggaccctgggactgtcttggcatcttaactgcagtttcaatgaggcagagggcaaagagagaccaagatcagaggggttcattatacccctggctagagaacccagctactgacatgcaagcagcttggggctggctggacacaggtactaggcccattgtttccaggtgaagctttcatcacagaacagtgttgtctccacctggccttagatggcacgccatgattcgggcctggatagactgcctgcgtccttaccactgatctggccaagaatgaggccctcccaacactttcactccctctccaagccttgatgggacctccacttatttaggcctcatgtgctttgaagaagctttgagagccaatgtgtcttccacgggtctcttttttgctacaagtaatcagccccatgtgttctcttaaactgagaattgcacctgggcaattcctgttttctaaggtggtctctgctgctatttaacaacccagagtaggcctctgtgaggcttcagtggcctcagaaaccagagggtccagatagggggcctgcttgggccctctgctgccaactgctcaaacctgctttagctccagccacttgtggcaaacaacctcgtttccttacaaattccagcatgtgactttggtgccgttacttgtgaaaaatctattctgttgtctttgatgtgtccaagaaaattcgtgtagtttacgtaaaaatatctgactcacaagaaagccaactgtatgtcttgtgatgggacagttcataatgtagttgctagaccactttacaaattgttcttgtcaccagatgtgttcagacattgctgtgcaattgttggggagggtagggggaaaggcgagaggagatacttattggtctttttgtttaataccttccccaagaggggacagtctggccaacttgctccagtaatgcaataaagacattgcaataaagtaa

SEQ ID NO: 165612 - DNA, 5019 bp, Homo sapiens
  Payload ID: 12598
  Gene Symbol: PIK3R3
  Gene Name: phosphoinositide-3-kinase, regulatory subunit 3 (gamma)
  Uniprot ID: Q92569
  ENST ID: ENST00000372006
  CDS Start-End: 101-1486
acagaatcccggtacatcgaggcgggacggcgtggaaggggcggtggtgatgcctgctgtcccccctcccggcgcggttgggtggcgcctcagcggcgcgatgtacaatacggtgtggagtatggaccgcgatgacgcagactggagggaggtgatgatgccctattcgacagaactgatattttatattgaaatggatcctccagctcttccaccaaagccacctaagccaatgacttcagcagttccaaatggaatgaaggacagttctgtttctcttcaggatgcagaatggtactggggggatatttcaagggaggaggtaaatgacaaattgcgggatatgccagatgggaccttcttggtccgagatgcctcaacaaaaatgcagggagattatactttgactttgcggaagggaggcaataataagttaataaagatctatcaccgggatggtaaatatggcttttctgatcctctgacatttaattccgtggtggagctcattaaccactatcaccatgaatctcttgctcagtacaatcccaaacttgatgtgaagctgatgtacccagtgtccagataccaacaggatcagttggtaaaagaagataatattgatgcagtaggtaaaaaactgcaagaataccactctcagtatcaggagaagagtaaagagtatgataggctgtatgaagaatatactagaacatcccaggaaatacagatgaagaggactgcaatagaagcttttaatgaaacaattaaaatatttgaagagcagtgtcacacacaagaacaacatagcaaagaatatattgagcgatttcgcagagaggggaatgaaaaggagattgaacgaattatgatgaattatgataaattgaaatcacgtctgggtgagattcatgatagcaaaatgcgtctagagcaggatttgaagaatcaagctttggacaaccgagaaatagataaaaaaatgaatagcatcaaacctgacctgatccagctgcgaaagatccgagatcaacaccttgtatggctcaatcacaaaggagtgagacagaaacgcctgaatgtctggctgggaattaagaatgaggatgctgatgagaactattttatcaatgaggaagatgaaaacctgccccattatgatgagaaaacctggtttgttgaggatatcaatcgagtacaagcagaggacttgctttatgggaaacctgatggtgcattcttaattcgtgagagtagcaagaaaggatgctatgcttgctctgtggtggccgatggggaagtgaagcactgtgtgatctacagcactgctcggggctatggctttgcagagccctacaacctgtacagctctctgaaggagctagtgctccattaccagcagacatccttggttcagcacaacgactccctcaacgtcaggcttgcctaccctgttcatgcacagatgccctcgctttgcagataaagaggaagtgggaagagaggtggttctctggcatttttttctacagtttttattagactacgatgagggcattctttctacatagactgcttgttttgcacaagaagtgattttgtgaatgtgaagtggagaggccgagcagcagccggccgggatgggggcattagaggcctgaggttctctaggactcagccatgccgctgcactgacatactaagctggaagcagatgttttttttgaaagtctgtttcattggggtttttgttttgtttagccagacaccctcaacagaatattaggcttgatggttatagcgggtggggttgtatttggaagcctctgaagagaccatgtctttttaaaatctaactcttgagagtgcagcaggggcatggctctgctgggagttgtgttttgctttggcagtctctcttccccccacgaagaaggctgtttaggttttgtgatagaatgggatttgatgaaaaagacaaccaaaggaaaatggggaggcttgggatttcatttaaataatctaagccaagatgataaaaaaaaccttcaactgaaggtattttgtttcttaccaacataatttaggcttcagcatctcaccagcccctccctctgaagaagtattatgttcagaagccaacaaaacagtttgttgccagaccaatgtttgatgggaaaacgtggcactcatagttgaatgtatacttctgtaccaaaacttgaacataaaaagactagaatttgtgagttttagcaaacgctaaaattgatcactgtaactaaccccttctgtccttcctgcctgtttctctgagatgaggaatagcattctttttgtggggatggtgagctttgaatcataaaatgaagttggtgcttgtatggtgtttccttagcctaaagaatgatctgttgtttgaaacctttgtaacttgtttgtatgagtaaagaaaaggtgcaatgcagtgcttttagatggcttgatataccaaataacaatatagaacaacattattatatgtgcttccccaagtttaaaggccctgcagaaatagtaaacatggtttaatttcccttcatttccccctcctttgctggatggggttttgggagctataggttgctaaggaggggagtcagattgtggtcaggtgcctcagtaaatcacagacccaggggccctgtggtccagggtgagagtcacaccacattacacatgtgcttccatacagtggtttctgaagcttttgcagggagagaagatggcttagtgtttagactgttagtagaagccatctggaagcttttctctttgcctttttttgtgatcctgccattaaggctatgtgcagtctgccctcctgctccagtggccttgattttaggccaggaatcttctgctccatgtggcttaagccttccagctgagtgaagctaggcaaatggagtgggggcaggcatctattcctgcccccatcatgccccacacccatcagtcaacactcatttgacaaatagagtccagctgcctctgagccaatcctgggaccataataggctcagagtgagtcagctgtttgaacccaaagctgtgcagtcaggcaccctggctgagctagagaagccagtacctgcatcttggtttataaggcttacagctaggaaagctctagttctgggggtgaaagaaaaatattagtttacctgagcacttatttccatgacagggtctaaaatatggaccatgatgtagacacagatttttaattttggaaaaacctccagttactagtgacgaggatagaaagggaagtgcttctctttggctttttcttggttacactgcagtttcaggattgggtgagacagagacaaatgaacccccctctaaagtcatttaactaatagccagcacatcccttccccaaactgtcaattgaaatcttaactgaaagttttactgaataataccaagctaattgctgttgggcacacctggatggctttgcacctggtgttgaacctgctgaagcaggtggatgctcaagattacgtgcaaggaatccctcccatctggtactaaaatttcagtgtgttctgagtgtcttttaaaccaaaatggaaatacagatacagggctgtagtattcagtaatgtgtctgctccttgttgggcagacaccagcggtgtgcagggagagaccaagtaccatctttatctacacttgggctggcttgtggagaagggctgctttttttcagtcctacattccttcattttttttttcattcttgaattcattgttttgtgggatctaagacccaggggtcatttgagaggtttgacagtatcttttctgaccagttgccacatgacttgcttgaccctgagcctgtggaaatggcatagggaccagtctactacccactgggcctggtgtgtagagggggagagggtagcaaggtgcttctctacgcccatgacttgggagcaggtcttggcctccttcatgagagtctagtgccatgtcctgtcccatgatctggaccctgggactgtcttggcatcttaactgcagtttcaatgaggcagagggcaaagagagaccaagatcagaggggttcattatacccctggctagagaacccagctactgacatgcaagcagcttggggctggctggacacaggtactaggcccattgtttccaggtgaagctttcatcacagaacagtgttgtctccacctggccttagatggcacgccatgattcgggcctggatagactgcctgcgtccttaccactgatctggccaagaatgaggccctcccaacactttcactccctctccaagccttgatgggacctccacttatttaggcctcatgtgctttgaagaagctttgagagccaatgtgtcttccacgggtctcttttttgctacaagtaatcagccccatgtgttctcttaaactgagaattgcacctgggcaattcctgttttctaaggtggtctctgctgctatttaacaacccagagtaggcctctgtgaggcttcagtggcctcagaaaccagagggtccagatagggggcctgcttgggccctctgctgccaactgctcaaacctgctttagctccagccacttgtggcaaacaacctcgtttccttacaaattccagcatgtgactttggtgccgttacttgtgaaaaatctattctgttgtctttgatgtgtccaagaaaattcgtgtagtttacgtaaaaatatctgactcacaagaaagccaactgtatgtcttgtgatgggacagttcataatgtagttgctagaccactttacaaattgttcttgtcaccagatgtgttcagacattgctgtgcaattgttggggagggtagggggaaaggcgagaggagatacttattggtctttttgtttaataccttccccaagaggggacagtctggccaacttgctccagtaatgcaataaagacattgcaataaagtaa

SEQ ID NO: 165613 - DNA, 1884 bp, Homo sapiens
  Payload ID: 12598
  Gene Symbol: PIK3R3
  Gene Name: phosphoinositide-3-kinase, regulatory subunit 3 (gamma)
  Uniprot ID: Q92569
  ENST ID: ENST00000423209
  CDS Start-End: 665-1873
gggcagttggtgcggtcgggttggttcttacaccccggcgggagcgcccagacaagccgagctgactggacttctccggccggccccattcccgaggctgcggcagcttcggttccgagaccgaccggagaggagcccgagtcccggcctctgggggattcgctctctgcagaccagtgggaccccgaaacttgaacgcaatctccagcccccttttttgccttcctttgtcacttgcccgggtttctcccaacgtgttcttttttttcctcttcattctccctccttcgaaggacacaaaagtggcttccgcggaaagatttggaggcggtgggagcttttctccccggagagcgactgtgtagaaaggatttttgggaagccgctttttaacacctctgctctccgtcccccaagcctctgtgtaatcctctgaggagaaaagcccatagcttgaaagttcgggggcattttgttgtgttctgtaggagagagggggaggaccctgttcgggtagtttggccggactggtactggccgttggaaaacccgaagtacatttccgtgtggaacttttgcagatatatatttttagatttttaaataccagataaaaaatatatgccttctatatatctcctggcgacctgcccctgacagcgcgatgtacaatacggtgtggagtatggaccgcgatgacgcagactggagggaggtgatgatgccctattcgacagaactgatattttatattgaaatggatcctccagctcttccaccaaagccacctaagccaatgacttcagcagttccaaatggaatgaaggacagttctgtttctcttcaggatgcagaatggtactggggggatatttcaagggaggaggtaaatgacaaattgcgggatatgccagatgggaccttcttggtccgagatgcctcaacaaaaatgcagggagattatactttgactttgcggaagggaggcaataataagttaataaagatctatcaccgggatggtaaatatggcttttctgatcctctgacatttaattccgtggtggagctcattaaccactatcaccatgaatctcttgctcagtacaatcccaaacttgatgtgaagctgatgtacccagtgtccagataccaacaggatcagttggtaaaagaagataatattgatgcagtaggtaaaaaactgcaagaataccactctcagtatcaggagaagagtaaagagtatgataggctgtatgaagaatatactagaacatcccaggaaatacagatgaagaggactgcaatagaagcttttaatgaaacaattaaaatatttgaagagcagtgtcacacacaagaacaacatagcaaagaatatattgagcgatttcgcagagaggggaatgaaaaggagattgaacgatggctcaatcacaaaggagtgagacagaaacgcctgaatgtctggctgggaattaagaatgaggatgctgatgagaactattttatcaatgaggaagatgaaaacctgccccattatgatgagaaaacctggtttgttgaggatatcaatcgagtacaagcagaggacttgctttatgggaaacctgatggtgcattcttaattcgtgagagtagcaagaaaggatgctatgcttgctctgtggtggccgatggggaagtgaagcactgtgtgatctacagcactgctcggggctatggctttgcagagccctacaacctgtacagctctctgaaggagctagtgctccattaccagcagacatccttggttcagcacaacgactccctcaacgtcaggcttgcctaccctgttcatgcacagatgccctcgctttgcagataaagaggaagtgg

SEQ ID NO: 165614 - DNA, 5174 bp, Homo sapiens
  Payload ID: 12598
  Gene Symbol: PIK3R3
  Gene Name: phosphoinositide-3-kinase, regulatory subunit 3 (gamma)
  Uniprot ID: Q92569
  ENST ID: ENST00000420542
  CDS Start-End: 258-1643
aaccggcctcagccaatcaccacccaccttgcctctcttccctcgccccactccctcctcgcctggctcgcgtgctcccggcactgactcctggagtgcggccagcgcccggatcgtaccattctgattgaggctgggggagagcgcggatggctgattggggagccgaagcctagagagcggtggggagacgtgaaagtcgagatggagagcagctttttgaacatgttctcaggcacttgacagaatcccgcgcgatgtacaatacggtgtggagtatggaccgcgatgacgcagactggagggaggtgatgatgccctattcgacagaactgatattttatattgaaatggatcctccagctcttccaccaaagccacctaagccaatgacttcagcagttccaaatggaatgaaggacagttctgtttctcttcaggatgcagaatggtactggggggatatttcaagggaggaggtaaatgacaaattgcgggatatgccagatgggaccttcttggtccgagatgcctcaacaaaaatgcagggagattatactttgactttgcggaagggaggcaataataagttaataaagatctatcaccgggatggtaaatatggcttttctgatcctctgacatttaattccgtggtggagctcattaaccactatcaccatgaatctcttgctcagtacaatcccaaacttgatgtgaagctgatgtacccagtgtccagataccaacaggatcagttggtaaaagaagataatattgatgcagtaggtaaaaaactgcaagaataccactctcagtatcaggagaagagtaaagagtatgataggctgtatgaagaatatactagaacatcccaggaaatacagatgaagaggactgcaatagaagcttttaatgaaacaattaaaatatttgaagagcagtgtcacacacaagaacaacatagcaaagaatatattgagcgatttcgcagagaggggaatgaaaaggagattgaacgaattatgatgaattatgataaattgaaatcacgtctgggtgagattcatgatagcaaaatgcgtctagagcaggatttgaagaatcaagctttggacaaccgagaaatagataaaaaaatgaatagcatcaaacctgacctgatccagctgcgaaagatccgagatcaacaccttgtatggctcaatcacaaaggagtgagacagaaacgcctgaatgtctggctgggaattaagaatgaggatgctgatgagaactattttatcaatgaggaagatgaaaacctgccccattatgatgagaaaacctggtttgttgaggatatcaatcgagtacaagcagaggacttgctttatgggaaacctgatggtgcattcttaattcgtgagagtagcaagaaaggatgctatgcttgctctgtggtggccgatggggaagtgaagcactgtgtgatctacagcactgctcggggctatggctttgcagagccctacaacctgtacagctctctgaaggagctagtgctccattaccagcagacatccttggttcagcacaacgactccctcaacgtcaggcttgcctaccctgttcatgcacagatgccctcgctttgcagataaagaggaagtgggaagagaggtggttctctggcatttttttctacagtttttattagactacgatgagggcattctttctacatagactgcttgttttgcacaagaagtgattttgtgaatgtgaagtggagaggccgagcagcagccggccgggatgggggcattagaggcctgaggttctctaggactcagccatgccgctgcactgacatactaagctggaagcagatgttttttttgaaagtctgtttcattggggtttttgttttgtttagccagacaccctcaacagaatattaggcttgatggttatagcgggtggggttgtatttggaagcctctgaagagaccatgtctttttaaaatctaactcttgagagtgcagcaggggcatggctctgctgggagttgtgttttgctttggcagtctctcttccccccacgaagaaggctgtttaggttttgtgatagaatgggatttgatgaaaaagacaaccaaaggaaaatggggaggcttgggatttcatttaaataatctaagccaagatgataaaaaaaaccttcaactgaaggtattttgtttcttaccaacataatttaggcttcagcatctcaccagcccctccctctgaagaagtattatgttcagaagccaacaaaacagtttgttgccagaccaatgtttgatgggaaaacgtggcactcatagttgaatgtatacttctgtaccaaaacttgaacataaaaagactagaatttgtgagttttagcaaacgctaaaattgatcactgtaactaaccccttctgtccttcctgcctgtttctctgagatgaggaatagcattctttttgtggggatggtgagctttgaatcataaaatgaagttggtgcttgtatggtgtttccttagcctaaagaatgatctgttgtttgaaacctttgtaacttgtttgtatgagtaaagaaaaggtgcaatgcagtgcttttagatggcttgatataccaaataacaatatagaacaacattattatatgtgcttccccaagtttaaaggccctgcagaaatagtaaacatggtttaatttcccttcatttccccctcctttgctggatggggttttgggagctataggttgctaaggaggggagtcagattgtggtcaggtgcctcagtaaatcacagacccaggggccctgtggtccagggtgagagtcacaccacattacacatgtgcttccatacagtggtttctgaagcttttgcagggagagaagatggcttagtgtttagactgttagtagaagccatctggaagcttttctctttgcctttttttgtgatcctgccattaaggctatgtgcagtctgccctcctgctccagtggccttgattttaggccaggaatcttctgctccatgtggcttaagccttccagctgagtgaagctaggcaaatggagtgggggcaggcatctattcctgcccccatcatgccccacacccatcagtcaacactcatttgacaaatagagtccagctgcctctgagccaatcctgggaccataataggctcagagtgagtcagctgtttgaacccaaagctgtgcagtcaggcaccctggctgagctagagaagccagtacctgcatcttggtttataaggcttacagctaggaaagctctagttctgggggtgaaagaaaaatattagtttacctgagcacttatttccatgacagggtctaaaatatggaccatgatgtagacacagatttttaattttggaaaaacctccagttactagtgacgaggatagaaagggaagtgcttctctttggctttttcttggttacactgcagtttcaggattgggtgagacagagacaaatgaacccccctctaaagtcatttaactaatagccagcacatcccttccccaaactgtcaattgaaatcttaactgaaagttttactgaataataccaagctaattgctgttgggcacacctggatggctttgcacctggtgttgaacctgctgaagcaggtggatgctcaagattacgtgcaaggaatccctcccatctggtactaaaatttcagtgtgttctgagtgtcttttaaaccaaaatggaaatacagatacagggctgtagtattcagtaatgtgtctgctccttgttgggcagacaccagcggtgtgcagggagagaccaagtaccatctttatctacacttgggctggcttgtggagaagggctgctttttttcagtcctacattccttcattttttttttcattcttgaattcattgttttgtgggatctaagacccaggggtcatttgagaggtttgacagtatcttttctgaccagttgccacatgacttgcttgaccctgagcctgtggaaatggcatagggaccagtctactacccactgggcctggtgtgtagagggggagagggtagcaaggtgcttctctacgcccatgacttgggagcaggtcttggcctccttcatgagagtctagtgccatgtcctgtcccatgatctggaccctgggactgtcttggcatcttaactgcagtttcaatgaggcagagggcaaagagagaccaagatcagaggggttcattatacccctggctagagaacccagctactgacatgcaagcagcttggggctggctggacacaggtactaggcccattgtttccaggtgaagctttcatcacagaacagtgttgtctccacctggccttagatggcacgccatgattcgggcctggatagactgcctgcgtccttaccactgatctggccaagaatgaggccctcccaacactttcactccctctccaagccttgatgggacctccacttatttaggcctcatgtgctttgaagaagctttgagagccaatgtgtcttccacgggtctcttttttgctacaagtaatcagccccatgtgttctcttaaactgagaattgcacctgggcaattcctgttttctaaggtggtctctgctgctatttaacaacccagagtaggcctctgtgaggcttcagtggcctcagaaaccagagggtccagatagggggcctgcttgggccctctgctgccaactgctcaaacctgctttagctccagccacttgtggcaaacaacctcgtttccttacaaattccagcatgtgactttggtgccgttacttgtgaaaaatctattctgttgtctttgatgtgtccaagaaaattcgtgtagtttacgtaaaaatatctgactcacaagaaagccaactgtatgtcttgtgatgggacagttcataatgtagttgctagaccactttacaaattgttcttgtcaccagatgtgttcagacattgctgtgcaattgttggggagggtagggggaaaggcgagaggagatacttattggtctttttgtttaataccttccccaagaggggacagtctggccaacttgctccagtaatgcaataaagacattgcaataaagt

SEQ ID NO: 165615 - DNA, 753 bp, Homo sapiens
  Payload ID: 12598
  Gene Symbol: PIK3R3
  Gene Name: phosphoinositide-3-kinase, regulatory subunit 3 (gamma)
  ENST ID: ENST00000425892
  CDS Start-End: 135-753
ctgattgaggctgggggagagcgcggatggctgattggggagccgaagcctagagagcggtggggagacgtgaaagtcgagatggagagcagctttttgaacatgttctcaggcacttgacagaatcccgcgcgatgtacaatacggtgtggagtatggaccgcgatgacgcagactggagggaggtgatgatgccctattcgacagaactgatattttatattgaaatggatcctccagctcttccaccaaagccacctaagccaatgacttcagcagttccaaatggaatgaaggacagttctgtttctcttcaggatgcagaatggtactggggggatatttcaagggaggaggtaaatgacaaattgcgggatatgccagatgggaccttcttggtccgagatgcctcaacaaaaatgcagggagattatactttgactttgcggaagggaggcaataataagttaataaagatctatcaccgggatggtaaatatggcttttctgatcctctgacatttaattccgtggtggagctcattaaccactatcaccatgaatctcttgctcagtacaatcccaaacttgatgtgaagctgatgtacccagtgtccagataccaacaggatcagttggtaaaagaagataatattgatgcagtaggtaaaaaactgcaagaataccactctcagtatcaggagaagagtaaagagtatgataggctgtatgaagaatatactagaacatccc

SEQ ID NO: 165616 - DNA, 1553 bp, Homo sapiens
  Payload ID: 12599
  Gene Symbol:
  Gene Name: phosphoinositide-3-kinase, regulatory subunit 3 (gamma) [Source:EntrezGene
  Acc:8503]
  ENST ID: ENST00000540385
  CDS Start-End: 18-1541
agaagctccctgtgcccatggggccatctcggcttgtccgtggccctcggccccagggcatgcgttccccctaccgcaggccaggtatgggctggcccaggccccgatttcccaggatgttcaagtgtagccgcagaagatatcaacagggtctccgaggtcgaactgccagcagtgcagccatcaatcctgccaccagggccatgggtatcaacaacacccacactgacaccaccatagtgtggatcttcccacctcaagctcttccaccaaagccacctaagccaatgacttcagcagttccaaatggaatgaaggacagttctgtttctcttcaggatgcagaatggtactggggggatatttcaagggaggaggtaaatgacaaattgcgggatatgccagatgggaccttcttggtccgagatgcctcaacaaaaatgcagggagattatactttgactttgcggaagggaggcaataataagttaataaagatctatcaccgggatggtaaatatggcttttctgatcctctgacatttaattccgtggtggagctcattaaccactatcaccatgaatctcttgctcagtacaatcccaaacttgatgtgaagctgatgtacccagtgtccagataccaacaggatcagttggtaaaagaagataatattgatgcagtaggtaaaaaactgcaagaataccactctcagtatcaggagaagagtaaagagtatgataggctgtatgaagaatatactagaacatcccaggaaatacagatgaagaggactgcaatagaagcttttaatgaaacaattaaaatatttgaagagcagtgtcacacacaagaacaacatagcaaagaatatattgagcgatttcgcagagaggggaatgaaaaggagattgaacgaattatgatgaattatgataaattgaaatcacgtctgggtgagattcatgatagcaaaatgcgtctagagcaggatttgaagaatcaagctttggacaaccgagaaatagataaaaaaatgaatagcatcaaacctgacctgatccagctgcgaaagatccgagatcaacaccttgtatggctcaatcacaaaggagtgagacagaaacgcctgaatgtctggctgggaattaagaatgaggatgctgatgagaactattttatcaatgaggaagatgaaaacctgccccattatgatgagaaaacctggtttgttgaggatatcaatcgagtacaagcagaggacttgctttatgggaaacctgatggtgcattcttaattcgtgagagtagcaagaaaggatgctatgcttgctctgtggtggccgatggggaagtgaagcactgtgtgatctacagcactgctcggggctatggctttgcagagccctacaacctgtacagctctctgaaggagctagtgctccattaccagcagacatccttggttcagcacaacgactccctcaacgtcaggcttgcctaccctgttcatgcacagatgccctcgctttgcagataaagaggaagtggg

SEQ ID NO: 165617 - DNA, 5015 bp, Homo sapiens
  Payload ID: 12600
  Gene Symbol: PIK3R4
  Gene Name: phosphoinositide-3-kinase, regulatory subunit 4
  Uniprot ID: Q99570
  ENST ID: ENST00000356763
  CDS Start-End: 559-4635
gaggtcagaccggttgctttcccgggagttcggcgtttgctggggctgcagcagctgaagtgtagtgttttcttgggactggcggtctgcacttctctcccgggttccatctccccccgcccggtggtgaggccctcgaggagggctcggacgggtgtagcgatccgcgctagaggaagacgaggcccgggaacgcatgtcccccagggcaggttagggggctggaggggtcaaatcccggggtacttgtggagactctttagcgtggcttcttctctctgctgagaccccgagagctttcccagttctcctcccaggaccaccggggttcctgaagatcgggacttttctgcgcccctccaccaacagcccatctcctgtctatgaagaaagacccttcgtagaaacaacttccccgctgctgacgcgttttcccgtcccgtccccgaagtagtctactatgacctcgttgtgagcctctgaacgattttgacactttcccgaggcctagggtattatatcctaaccttactaaagaccacagaggtgcttgccattatgggaaatcagcttgctggcattgctccctcccagatcctttctgtagagagttatttttcagatattcatgactttgaatatgataaaagcctggggagtactcggttttttaaagttgctcgagccaagcaccgagaaggcctggtcgttgtgaaggtttttgcaattcaggatcccacattgcctttaaccagctataaacaagagctggaggaactgaaaatcaggcttaattctgcacagaattgtctacctttccagaaagcatcagaaaaagcatctgagaaagcagctatgctctttaggcagtatgtgcgagacaatctctatgatcgcatcagtacccgtccattcttgaataacattgagaagcgctggattgctttccagatcctgacagctgtggaccaagcacacaaatctggagttcgtcatggggacatcaagactgagaatgtgatggtcaccagttggaattgggttcttctaactgattttgccagttttaagcccacttatcttccagaagacaacccggcagatttcaattatttctttgacacatcacggaggagaacttgctatattgctcctgaacgttttgttgatggtgggatgtttgccactgagttagaatatatgagagatccttcaactccgcttgtagacttaaatagcaatcagagaacaagaggagagttgaagagagcaatggacatcttttcagcaggttgtgtgatagctgagctttttacagaaggtgtaccattatttgatctctctcaacttttggcttatagaaatggacattttttccctgaacaagtgctaaataaaattgaagatcacagtatcagagaattggtaactcagatgattcaccgtgagccagataaacgtttagaggcagaagattacttaaaacagcagcgtggcaatgcctttcctgaaatattttacacttttcttcagccctacatggcccagtttgccaaggaaacgtttctttctgcagatgagcgtattctggttatacggaaggatttgggcaacattattcacaatctctgtggacatgatctgccagaaaaagccgaaggagagcctaaggaaaatgggctggttatcttggtatctgttataacatcctgcctacagacccttaaatactgtgattccaaactagctgctttggaactgattcttcatttggctccaagattaagtgttgaaatccttttggatcgtattactccatatcttttgcatttcagcaatgactctgttcctagggtgagggctgaagccttgaggacgttgaccaaagttcttgctctcgtcaaagaggttcctcgtaatgatatcaatatttatccggaatacattctgccaggcatagcccacttagcccaagatgatgctactatcgttagactagcctatgctgaaaacatagctctgctggcagaaacagctctgagattcctggaattagtacagttaaaaaatcttaatatggaaaatgaccccaataatgaagaaatagatgaggttacacatccaaatggaaattatgacacagagctccaagccttacatgaaatggtccagcagaaagttgttactttgctaagtgaccctgaaaatattgtaaaacaaaccttgatggaaaatggaataacacggctgtgtgtattctttggacgtcagaaagccaacgatgttttgttgtcccacatgattactttcctaaatgataagaatgattggcatctacgtggagcattttttgatagtatagttggtgttgctgcctatgttggctggcaaagctcctcaattctcaagcctctgctgcaacaaggtcttagtgatgctgaggaatttgtcattgtgaaagctctttatgcccttacttgtatgtgccagttaggactgctacaaaaaccccatgtttacgaatttgccagtgatattgcccccttcctgtgtcatcccaatttatggatacgttatggtgccgtgggatttatcacagtggtagctcgtcaaataagtacagctgatgtctactgtaaactgatgccttatcttgacccatatattacccaaccaataatacagattgaaagaaaacttgttctgctcagtgttttaaaggaaccagtaagtcgttctatatttgattatgctttgaggtctaaagatattactagcttgttcagacatcttcacatgcgtcagaagaaacgaaatggttctcttcccgactgccctccgccagaggatcctgccatagcacagcttctgaagaagttgctctcacagggaatgacagaggaagaggaagacaaacttctggcactgaaagacttcatgatgaaatctaataaagcaaaggccaatatagtggaccagagccatcttcatgatagtagtcagaaaggtgtaattgacttggcagctttaggcataactgggagacaagttgatcttgttaaaaccaaacaagaaccagatgacaaacgggccagaaaacatgtaaaacaagactcaaatgtaaatgaagaatggaaaagcatgtttgggtcactggacccaccaaacatgccacaggccctacctaaagggagtgatcaggaggtgattcagactgggaaacctcctcgttccgagtcctctgctggcatttgtgtccctttgtcaacttcttcacaggttccagaagtgacaactgtccaaaataaaaaaccagtaataccggttttaagtagtacaatcttaccatccacctatcagattcgaattacaacttgtaaaactgaacttcagcaactcatccagcaaaagcgggagcagtgcaatgctgagagaatagctaagcagatgatggaaaatgctgaatgggagagtaaaccaccaccacctggatggcgtcctaaagggctgttagttgcccatcttcatgagcataaatctgctgtgaatcgaattagagtctctgatgaacactcactttttgcaacatgttcaaatgatggcacagtgaaaatctggaacagtcaaaagatggaggggaagaccaccactaccagatctattcttacatacagccgaattggaggacgagtcaagacgctcacattctgccaaggctcccactatttagccatagcatctgataatggtgctgtccagcttcttggaattgaggcttctaagctgcccaagtctcctaaaatccatcctctacaaagcagaattctagatcagaaggaggacggttgtgttgtggatatgcatcacttcaactctggagcacagtctgttcttgcctatgccactgtgaatggctctctggttggctgggaccttaggtcttcaagcaatgcgtggactttaaagcatgatttaaagtcgggcctcatcacttcctttgctgtggacatccaccaatgctggctctgcattggtacaagcagtggtaccatggcttgttgggacatgaggttccagttgccaatttcaagtcactgtcatccttccagggctcgaatcagacgcctctcaatgcaccctctgtatcagtcctgggtgattgcagctgttcagggcaacaacgaagtgtccatgtgggacatggagactggtgacagaagatttactctctgggccagcagtgcaccaccactttctgaattacagccttctcctcatagcgtccatggtatctactgtagtcctgcagatggaaatcctatcctactaacagctggctcagatatgaaaataaggttttgggacttggcttacccagaaaggtcctatgttgttgcaggaagtactagttccccatctgtgtcctactacaggaaaataattgaaggcactgaagttgtccaggaaattcagaataagcagaaagtaggaccaagtgatgacacccctcgaaggggcccagagtccctgcccgtgggacatcatgacatcatcactgatgtcgccacattccagaccacacagggcttcatcgtaactgcttctagagatgggattgtgaaggtgtggaaataaaacctactgatttgtataaattttaatagttataaatataatactataactcgagaaaaggcatttctagagaacagattcatttgcttaattttcaaaattatgtctccatattactgtttcatgactgactgactaaatgacacccaaaatggttaagatgtacttgactagtttacttatgcatctctttgcaagaatcagccagccaacaatgtctgggatttttattgtatatgttatagaggtgagaaatgtaaaatatgaaaatgaatatgtttattttgtattgaaaaagatggttgaaaagatggttgtaagctattatagtataaacacatttttgctattaaaaatgctattcaaagcagttaaactgt

SEQ ID NO: 165618 - DNA, 579 bp, Homo sapiens
  Payload ID: 12600
  Gene Symbol: PIK3R4
  Gene Name: phosphoinositide-3-kinase, regulatory subunit 4
  ENST ID: ENST00000512430
  CDS Start-End: 200-579
cttctaacctccattgttgctgaagattatataattacagtctgattcttcttcctttttaggagacctatattttcatttctgtgttgctgcctatgttggctggcaaagctcctcaattctcaagcctctgctgcaacaaggtcttagtgatgctgaggaatttgtcattgtgaaagctctttatgcccttacttgtatgtgccagttaggactgctacaaaaaccccatgtttacgaatttgccagtgatattgcccccttcctgtgtcatcccaatttatggatacgttatggtgccgtgggatttatcacagtggtagctcgtcaaataagtacagctgatgtctactgtaaactgatgccttatcttgacccatatattacccaaccaataatacagattgaaagaaaacttgttctgctcagtgttttaaaggaaccagtaagtcgttctatatttgattatgctttgaggtctaaagatattactagcttgttcagacatcttcacatgcgtcagaagaaacgaaatggttctcttcccgactgccctccgccagaggatcctgccatagc

SEQ ID NO: 165619 - DNA, 563 bp, Homo sapiens
  Payload ID: 12600
  Gene Symbol: PIK3R4
  Gene Name: phosphoinositide-3-kinase, regulatory subunit 4
  ENST ID: ENST00000507330
  CDS Start-End: 177-563
aagtgctgcacacccatccagtgtgaaataggctttacttagtccttgcctgttggaagggtgttgctgcctatgttggctggcaaagctcctcaattctcaagcctctgctgcaacaaggtcttagtgatgctgaggaatttgtcattgtgaaagctctttatgcccttacttgtatgtgccagttaggactgctacaaaaaccccatgtttacgaatttgccagtgatattgcccccttcctgtgtcatcccaatttatggatacgttatggtgccgtgggatttatcacagtggtagctcgtcaaataagtacagctgatgtctactgtaaactgatgccttatcttgacccatatattacccaaccaataatacagattgaaagaaaacttgttctgctcagtgttttaaaggaaccagtaagtcgttctatatttgattatgctttgaggtctaaagatattactagcttgttcagacatcttcacatgcgtcagaagaaacgaaatggttctcttcccgactgccctccgccagaggatcctgccatagcacagctt

SEQ ID NO: 165620 - DNA, 817 bp, Homo sapiens
  Payload ID: 12600
  Gene Symbol: PIK3R4
  Gene Name: phosphoinositide-3-kinase, regulatory subunit 4
  ENST ID: ENST00000508273
  CDS Start-End: 239-817
tttctgtaagttcttaggatcttagcttttctgtggtgtccgagaatttcctgatgatttgccttgctgtgggtctttttaactttatcatgctgggtaggaagtgcaatgttctttcctaggtgttgctgcctatgttggctggcaaagctcctcaattctcaagcctctgctgcaacaaggtcttagtgatgctgaggaatttgtcattgtgaaagctctttatgcccttacttgtatgtgccagttaggactgctacaaaaaccccatgtttacgaatttgccagtgatattgcccccttcctgtgtcatcccaatttatggatacgttatggtgccgtgggatttatcacagtggtagctcgtcaaataagtacagctgatgtctactgtaaactgatgccttatcttgacccatatattacccaaccaataatacagattgaaagaaaacttgttctgctcagtgttttaaaggaaccagtaagtcgttctatatttgattatgctttgaggtctaaagatattactagcttgttcagacatcttcacatgcgtcagaagaaacgaaatggttctcttcccgactgccctccgccagaggatcctgccatagcacagcttctgaagaagttgctctcacagggaatgacagaggaagaggaagacaaacttctggcactgaaagacttcatgatgaaatctaataaagcaaaggccaatatagtggaccagagccatcttcatgatagtagtcagaaaggtgtaattgacttggcagctttaggcataactgggagacaagttgatcttgtt

SEQ ID NO: 165621 - DNA, 4317 bp, Homo sapiens
  Payload ID: 12601
  Gene Symbol: PIK3R5
  Gene Name: phosphoinositide-3-kinase, regulatory subunit 5
  ENST ID: ENST00000269300
  CDS Start-End: 122-757
gctgcggctcgccgcgcggctccagctggggcgcggtggtcccgacggtcacccgaatcgcagggagtcgccgctggagaggggctcggcgcccggcggggactgcaggcgatgacccaggatgcagccaggggccacgacatgcacggaggaccgcatccagcatgccctggaacgctgcctgcatggactcagcctcagccgccgctccacctcctggtcagctgggctgtgtctgaactgctggagcctgcaggagctggtcagcagggacccgggccacttccttatcctccttgagcagatcctgcagaagacccgagaggtccaggagaagggcacctacgacctgctcaccccgctggccctgctcttctattccactgttctttgtacaccacacttcccaccagactcggatctccttctgaaggcagccagcacctaccaccggttcctgacctggcctgttccttactgcagcatctgccaggagctgctcaccttcattgatgctgaactcaaggccccagggatctcctaccagagactggtgagggctgagcagggcctgcccatcaggagtcaccgcagctccaccgtgccaagaccctggcagagcttgaggacatcttcacggagaccgcagaggcacaggagctggcatctggcatcggggatgctgcagaggcccggcggtggctcaggaccaagctgcaggcggtgggagaaaaagctggcttccctggggtgttagacactgcaaaaccagggaagctccacaccatccccatccctgtcgccaggtgctacacctacagctggagccaggacagctttgacatcctgcaggaaatcctgctcaaggaacaggagctactccagccagggatcctgggagatgatgaagaggaggaagaggaggaggaggaggtggaggaggacttggaaactgacgggcactgtgccgagagagattccctgctctccaccagctctttggcgtcccatgactccaccttgtcccttgcatcctcccaggcctcggggccggccctctcgcgccatctgctgacttcctttgtctcaggcctctctgatggcatggacagcggctacgtggaggacagcgaggagagctcctccgagtggccttggaggcgtggcagccaggaacgccgaggccaccgcaggcctgggcagaagttcatcaggatctataaactcttcaagagcaccagccagctggtactgcggagggactctcggagcctggagggcagctcggacacggccctgcccctgaggcgggcagggagcctctgcagccccctggacgaaccagtatcacccccttcccgggcccagcgctcccgctccctgccccagcccaaactcggtacccagctgcccagctggcttctggcccctgcttcacgcccccagcgccgccgccccttcctgagtggagatgaggatcccaaggcttccacgctacgtgttgtggtctttggctccgatcggatttcagggaaggtggctcgggcgtacagcaaccttcggcggctggagaacaatcgcccactcctcacacggttcttcaaacttcagttcttctacgtgcctgtgaagcgaagtcatgggaccagccctggtgcctgtccaccccctcggagccagacgccctcacccccgacagactcccctaggcacgccagccctggagagctgggcaccaccccatgggaggagagcaccaatgacatctcccactacctcggcatgctggacccctggtatgagcgcaatgtactgggcctcatgcacctgccccctgaagtcctgtgccagcagtccctgaaggctgaagcccaggccctggagggctccccaacccagctgcccatcctggctgacatgctactctactactgccgctttgccgccagaccggtgctgctgcaagtctatcagaccgagctgaccttcatcactggggagaagacgacagagatcttcatccactccttggagctgggtcactccgctgccacacgtgccatcaaggcgtcaggtcctggcagcaagcggctgggcatcgatggcgaccgggaggctgttcctctaacactacagattatttacagcaagggggccatcagtggacgaagtcgctggagcaacctggagaaggtctgtacctccgtgaacctcaacaaggcctgccggaagcaggaggagctggattccagcatggaggccctgacgctaaacctgacagaagtggtgaaaaggcagaactccaaatccaagaagggctttaaccagattagcacatcgcagatcaaagtggacaaggtgcagatcatcggctccaacagctgcccctttgctgtgtgcctggaccaggatgagagaaagatcctgcagagtgtagtcagatgtgaggtctcaccgtgctacaagccagagaagagcgacctctcctcaccaccccagacgcctcctgacctgccggcccaggccgcacctgatctctgctcccttctctgcctgcccatcatgactttcagtggagctctgccctagtgtgggcccagcgccagactggacagaagccctggggcaacctcctcggccacccctccaggacagtccctctctgtggagaactgaatggccctgtgcagagccatagtcccactgtgggtcctgcaatgagcaggggctgggagtagagggtttctggggcctcagggttctgggaaagcaacagctatcagagagagaagggccagaccccatagcctcttagattcctggcagtagaaggagaaggatgggtaaattgacctctgaagtccctgaccattagcatggtctaggatcctttctagaaggaagatctgaggctctggtgctcagggggatggcttgggccttttctctcaaccttggctgagcctaccccttactttgccaaagacttgaggaccctgtatgtctggagttcagtcccctcctctgtggggctcaggtgattgaaatgtggatgaaacatttctctacttcaagaccacctctccctgcaaacaccacacacacatggcatgcatgtacgcacatgcgcacacacacacgcacacacctcaataatttctctcaagtttcctgagtctccagaaaaacagcactaacgctggacctgtctactctcagaacccggcacagattctctcttgatctccttttggaatctgagattcttagaagacaggatagggttaaatttagtagcagctcagttctagctaaatcactagaggaagttaattaactttaagccttcatttctccagcactaaaatggagtggagagttggggtggaaataagacatccttaaaaggttaaattgtctgcaaagcacctagcccagtgccgagctcccagtaggtgttcagtaaagcttagtgcctgactttctgaacactgattcctcctgtttggagtcactgggatactctcattgccgttgggatgttcctcactccttcccagttcgtggctgaggcagaacccagactgaagagggaagagacattccagaggaggattgccttcgtcagggtaaggggtgggctgctcaggggccctacccttcacccccttctgtatcagattggccctcccactcccatctcactctgcgtgtacaatcttccatatccgcaagttcactggcactcttctggcacctgggcaagatcccagaacagaggatggagtgactggcctcacagagcttagtgcccgactcaggggaaatgggactggtgcatgggaaatggtcagcctaggataggacacgagagtctgaaattcaaagcaaccagcttgaagtggtttgagaagctggaagcaaacatgggctagagagatagggcagaagtcaagacgaggatctggactgatgtggagaaagtagccacggaagcatgaactgtatcctgcacaaagtccctcttccccgcctcctaattcattatgcccaaaaggccttacgtgaaattccagcccagagtactcatgacttgagagacgtggacagagccagcttctaccttgcctggccgtctctcccctgtcttaatgtctgctcttgctctaagctccagaagagtggcgggccatgtatcttcaatatgtttttgctgtatgggcaggttgtcttattatgtgatcaacagatgtccaggaactaatgagtggaatttaatattattgtcaaataaaacttgatttgtcctatatttaa

SEQ ID NO: 165622 - DNA, 4495 bp, Homo sapiens
  Payload ID: 12601
  Gene Symbol: PIK3R5
  Gene Name: phosphoinositide-3-kinase, regulatory subunit 5
  Uniprot ID: Q8WYR1
  ENST ID: ENST00000447110
  CDS Start-End: 131-2773
tgggcagatgctgcggctcgccgcgcggctccagctggggcgcggtggtcccgacggtcacccgaatcgcagggagtcgccgctggagaggggctcggcgcccggcggggactgcaggcgatgacccaggatgcagccaggggccacgacatgcacggaggaccgcatccagcatgccctggaacgctgcctgcatggactcagcctcagccgccgctccacctcctggtcagctgggctgtgtctgaactgctggagcctgcaggagctggtcagcagggacccgggccacttccttatcctccttgagcagatcctgcagaagacccgagaggtccaggagaagggcacctacgacctgctcaccccgctggccctgctcttctattccactgttctttgtacaccacacttcccaccagactcggatctccttctgaaggcagccagcacctaccaccggttcctgacctggcctgttccttactgcagcatctgccaggagctgctcaccttcattgatgctgaactcaaggccccagggatctcctaccagagactggtgagggctgagcagggcctgcccatcaggagtcaccgcagctccaccgtcaccgtgctgctgctgaacccagtggaagtgcaggccgagttccttgctgtagccaataagctgagtacgcccggacactcgcctcacagtgcctacaccaccctgctcctgcacgccttccaggccacctttggggcccactgtgacgtcccgggcctgcactgcaggctacaggccaagaccctggcagagcttgaggacatcttcacggagaccgcagaggcacaggagctggcatctggcatcggggatgctgcagaggcccggcggtggctcaggaccaagctgcaggcggtgggagaaaaagctggcttccctggggtgttagacactgcaaaaccagggaagctccacaccatccccatccctgtcgccaggtgctacacctacagctggagccaggacagctttgacatcctgcaggaaatcctgctcaaggaacaggagctactccagccagggatcctgggagatgatgaagaggaggaagaggaggaggaggaggtggaggaggacttggaaactgacgggcactgtgccgagagagattccctgctctccaccagctctttggcgtcccatgactccaccttgtcccttgcatcctcccaggcctcggggccggccctctcgcgccatctgctgacttcctttgtctcaggcctctctgatggcatggacagcggctacgtggaggacagcgaggagagctcctccgagtggccttggaggcgtggcagccaggaacgccgaggccaccgcaggcctgggcagaagttcatcaggatctataaactcttcaagagcaccagccagctggtactgcggagggactctcggagcctggagggcagctcggacacggccctgcccctgaggcgggcagggagcctctgcagccccctggacgaaccagtatcacccccttcccgggcccagcgctcccgctccctgccccagcccaaactcggtacccagctgcccagctggcttctggcccctgcttcacgcccccagcgccgccgccccttcctgagtggagatgaggatcccaaggcttccacgctacgtgttgtggtctttggctccgatcggatttcagggaaggtggctcgggcgtacagcaaccttcggcggctggagaacaatcgcccactcctcacacggttcttcaaacttcagttcttctacgtgcctgtgaagcgaagtcatgggaccagccctggtgcctgtccaccccctcggagccagacgccctcacccccgacagactcccctaggcacgccagccctggagagctgggcaccaccccatgggaggagagcaccaatgacatctcccactacctcggcatgctggacccctggtatgagcgcaatgtactgggcctcatgcacctgccccctgaagtcctgtgccagcagtccctgaaggctgaagcccaggccctggagggctccccaacccagctgcccatcctggctgacatgctactctactactgccgctttgccgccagaccggtgctgctgcaagtctatcagaccgagctgaccttcatcactggggagaagacgacagagatcttcatccactccttggagctgggtcactccgctgccacacgtgccatcaaggcgtcaggtcctggcagcaagcggctgggcatcgatggcgaccgggaggctgttcctctaacactacagattatttacagcaagggggccatcagtggacgaagtcgctggagcaacctggagaaggtctgtacctccgtgaacctcaacaaggcctgccggaagcaggaggagctggattccagcatggaggccctgacgctaaacctgacagaagtggtgaaaaggcagaactccaaatccaagaagggctttaaccagattagcacatcgcagatcaaagtggacaaggtgcagatcatcggctccaacagctgcccctttgctgtgtgcctggaccaggatgagagaaagatcctgcagagtgtagtcagatgtgaggtctcaccgtgctacaagccagagaagagcgacctctcctcaccaccccagacgcctcctgacctgccggcccaggccgcacctgatctctgctcccttctctgcctgcccatcatgactttcagtggagctctgccctagtgtgggcccagcgccagactggacagaagccctggggcaacctcctcggccacccctccaggacagtccctctctgtggagaactgaatggccctgtgcagagccatagtcccactgtgggtcctgcaatgagcaggggctgggagtagagggtttctggggcctcagggttctgggaaagcaacagctatcagagagagaagggccagaccccatagcctcttagattcctggcagtagaaggagaaggatgggtaaattgacctctgaagtccctgaccattagcatggtctaggatcctttctagaaggaagatctgaggctctggtgctcagggggatggcttgggccttttctctcaaccttggctgagcctaccccttactttgccaaagacttgaggaccctgtatgtctggagttcagtcccctcctctgtggggctcaggtgattgaaatgtggatgaaacatttctctacttcaagaccacctctccctgcaaacaccacacacacatggcatgcatgtacgcacatgcgcacacacacacgcacacacctcaataatttctctcaagtttcctgagtctccagaaaaacagcactaacgctggacctgtctactctcagaacccggcacagattctctcttgatctccttttggaatctgagattcttagaagacaggatagggttaaatttagtagcagctcagttctagctaaatcactagaggaagttaattaactttaagccttcatttctccagcactaaaatggagtggagagttggggtggaaataagacatccttaaaaggttaaattgtctgcaaagcacctagcccagtgccgagctcccagtaggtgttcagtaaagcttagtgcctgactttctgaacactgattcctcctgtttggagtcactgggatactctcattgccgttgggatgttcctcactccttcccagttcgtggctgaggcagaacccagactgaagagggaagagacattccagaggaggattgccttcgtcagggtaaggggtgggctgctcaggggccctacccttcacccccttctgtatcagattggccctcccactcccatctcactctgcgtgtacaatcttccatatccgcaagttcactggcactcttctggcacctgggcaagatcccagaacagaggatggagtgactggcctcacagagcttagtgcccgactcaggggaaatgggactggtgcatgggaaatggtcagcctaggataggacacgagagtctgaaattcaaagcaaccagcttgaagtggtttgagaagctggaagcaaacatgggctagagagatagggcagaagtcaagacgaggatctggactgatgtggagaaagtagccacggaagcatgaactgtatcctgcacaaagtccctcttccccgcctcctaattcattatgcccaaaaggccttacgtgaaattccagcccagagtactcatgacttgagagacgtggacagagccagcttctaccttgcctggccgtctctcccctgtcttaatgtctgctcttgctctaagctccagaagagtggcgggccatgtatcttcaatatgtttttgctgtatgggcaggttgtcttattatgtgatcaacagatgtccaggaactaatgagtggaatttaatattattgtcaaataaaacttgatttgtcctat

SEQ ID NO: 165623 - DNA, 628 bp, Homo sapiens
  Payload ID: 12601
  Gene Symbol: PIK3R5
  Gene Name: phosphoinositide-3-kinase, regulatory subunit 5
  ENST ID: ENST00000581895
  CDS Start-End: 495-628
aagcatattgagggagttgctgtggccttgtcatcaggaacacgctctctgccccatccctggaggtttggaaaacacagcctggaaattcagaaaaagtcctccgagtgattctgattttcccctcaggatcttcctgcccagcccactggggtctgaccactccctgggtacttggcgacacttcccactgcccagtgccctttccacctctctgctcccattcctgaccccttacttcccacacctctgtcccgttctgctgcaggggtgctctgtcctgccactcagatgtggccctccagatgccattcctaccctggaggcagctgtaaggcccctggtcctgtttccacagcacctgagctatagctgggctgggctgatcgcgctgcactgtgagcacctgttgtctttactggaccaggtgctctctgggaaaggagctcgacaagctgaccggcgtctgtcccccatgcaggcgatgacccaggatgcagccaggggccacgacatgcacggaggaccgcatccagcatgccctggaacgctgcctgcatggactcagcctcagccgccgctccacctcctggtcagctgggctgtgtctgaactgctggagcctgca

SEQ ID NO: 165624 - DNA, 3253 bp, Homo sapiens
  Payload ID: 12601
  Gene Symbol: PIK3R5
  Gene Name: phosphoinositide-3-kinase, regulatory subunit 5
  Uniprot ID: Q8WYR1
  ENST ID: ENST00000581552
  CDS Start-End: 68-2710
aagcttactcagcgcatctgctacagcattttatcttcccaagagccccatgaggcgatgacccaggatgcagccaggggccacgacatgcacggaggaccgcatccagcatgccctggaacgctgcctgcatggactcagcctcagccgccgctccacctcctggtcagctgggctgtgtctgaactgctggagcctgcaggagctggtcagcagggacccgggccacttccttatcctccttgagcagatcctgcagaagacccgagaggtccaggagaagggcacctacgacctgctcaccccgctggccctgctcttctattccactgttctttgtacaccacacttcccaccagactcggatctccttctgaaggcagccagcacctaccaccggttcctgacctggcctgttccttactgcagcatctgccaggagctgctcaccttcattgatgctgaactcaaggccccagggatctcctaccagagactggtgagggctgagcagggcctgcccatcaggagtcaccgcagctccaccgtcaccgtgctgctgctgaacccagtggaagtgcaggccgagttccttgctgtagccaataagctgagtacgcccggacactcgcctcacagtgcctacaccaccctgctcctgcacgccttccaggccacctttggggcccactgtgacgtcccgggcctgcactgcaggctacaggccaagaccctggcagagcttgaggacatcttcacggagaccgcagaggcacaggagctggcatctggcatcggggatgctgcagaggcccggcggtggctcaggaccaagctgcaggcggtgggagaaaaagctggcttccctggggtgttagacactgcaaaaccagggaagctccacaccatccccatccctgtcgccaggtgctacacctacagctggagccaggacagctttgacatcctgcaggaaatcctgctcaaggaacaggagctactccagccagggatcctgggagatgatgaagaggaggaagaggaggaggaggaggtggaggaggacttggaaactgacgggcactgtgccgagagagattccctgctctccaccagctctttggcgtcccatgactccaccttgtcccttgcatcctcccaggcctcggggccggccctctcgcgccatctgctgacttcctttgtctcaggcctctctgatggcatggacagcggctacgtggaggacagcgaggagagctcctccgagtggccttggaggcgtggcagccaggaacgccgaggccaccgcaggcctgggcagaagttcatcaggatctataaactcttcaagagcaccagccagctggtactgcggagggactctcggagcctggagggcagctcggacacggccctgcccctgaggcgggcagggagcctctgcagccccctggacgaaccagtatcacccccttcccgggcccagcgctcccgctccctgccccagcccaaactcggtacccagctgcccagctggcttctggcccctgcttcacgcccccagcgccgccgccccttcctgagtggagatgaggatcccaaggcttccacgctacgtgttgtggtctttggctccgatcggatttcagggaaggtggctcgggcgtacagcaaccttcggcggctggagaacaatcgcccactcctcacacggttcttcaaacttcagttcttctacgtgcctgtgaagcgaagtcatgggaccagccctggtgcctgtccaccccctcggagccagacgccctcacccccgacagactcccctaggcacgccagccctggagagctgggcaccaccccatgggaggagagcaccaatgacatctcccactacctcggcatgctggacccctggtatgagcgcaatgtactgggcctcatgcacctgccccctgaagtcctgtgccagcagtccctgaaggctgaagcccaggccctggagggctccccaacccagctgcccatcctggctgacatgctactctactactgccgctttgccgccagaccggtgctgctgcaagtctatcagaccgagctgaccttcatcactggggagaagacgacagagatcttcatccactccttggagctgggtcactccgctgccacacgtgccatcaaggcgtcaggtcctggcagcaagcggctgggcatcgatggcgaccgggaggctgttcctctaacactacagattatttacagcaagggggccatcagtggacgaagtcgctggagcaacctggagaaggtctgtacctccgtgaacctcaacaaggcctgccggaagcaggaggagctggattccagcatggaggccctgacgctaaacctgacagaagtggtgaaaaggcagaactccaaatccaagaagggctttaaccagattagcacatcgcagatcaaagtggacaaggtgcagatcatcggctccaacagctgcccctttgctgtgtgcctggaccaggatgagagaaagatcctgcagagtgtagtcagatgtgaggtctcaccgtgctacaagccagagaagagcgacctctcctcaccaccccagacgcctcctgacctgccggcccaggccgcacctgatctctgctcccttctctgcctgcccatcatgactttcagtggagctctgccctagtgtgggcccagcgccagactggacagaagccctggggcaacctcctcggccacccctccaggacagtccctctctgtggagaactgaatggccctgtgcagagccatagtcccactgtgggtcctgcaatgagcaggggctgggagtagagggtttctggggcctcagggttctgggaaagcaacagctatcagagagagaagggccagaccccatagcctcttagattcctggcagtagaaggagaaggatgggtaaattgacctctgaagtccctgaccattagcatggtctaggatcctttctagaaggaagatctgaggctctggtgctcagggggatggcttgggccttttctctcaaccttggctgagcctaccccttactttgccaaagacttgaggaccctgtatgtctggagttcagtcccctcctctgtggggctcaggtgattgaaatgtggatgaaacatttctctacttcaagaccacctctccctgcaaacaccacacacacatggcatgcatgtacgcacatgcgcac

SEQ ID NO: 165625 - DNA, 2653 bp, Homo sapiens
  Payload ID: 12601
  Gene Symbol: PIK3R5
  Gene Name: phosphoinositide-3-kinase, regulatory subunit 5
  ENST ID: ENST00000584803
  CDS Start-End: 14-2653
gcgatgacccaggatgcagccaggggccacgacatgcacggaggaccgcatccagcatgccctggaacgctgcctgcatggactcagcctcagccgccgctccacctcctggtcagctgggctgtgtctgaactgctggagcctgcaggagctggtcagcagggacccgggccacttccttatcctccttgagcagatcctgcagaagacccgagaggtccaggagaagggcacctacgacctgctcaccccgctggccctgctcttctattccactgttctttgtacaccacacttcccaccagactcggatctccttctgaaggcagccagcacctaccaccggttcctgacctggcctgttccttactgcagcatctgccaggagctgctcaccttcattgatgctgaactcaaggccccagggatctcctaccagagactggtgagggctgagcagggcctgcccatcaggagtcaccgcagctccaccgtcaccgtgctgctgctgaacccagtggaagtgcaggccgagttccttgctgtagccaataagctgagtacgcccggacactcgcctcacagtgcctacaccaccctgctcctgcacgccttccaggccacctttggggcccactgtgacgtcccgggcctgcactgcaggctacaggccaagaccctggcagagcttgaggacatcttcacggagaccgcagaggcacaggagctggcatctggcatcggggatgctgcagaggcccggcggtggctcaggaccaagctgcaggcggtgggagaaaaagctggcttccctggggtgttagacactgcaaaaccagggaagctccacaccatccccatccctgtcgccaggtgctacacctacagctggagccaggacagctttgacatcctgcaggaaatcctgctcaaggaacaggagctactccagccagggatcctgggagatgatgaagaggaggaagaggaggaggaggaggtggaggaggacttggaaactgacgggcactgtgccgagagagattccctgctctccaccagctctttggcgtcccatgactccaccttgtcccttgcatcctcccaggcctcggggccggccctctcgcgccatctgctgacttcctttgtctcaggcctctctgatggcatggacagcggctacgtggaggacagcgaggagagctcctccgagtggccttggaggcgtggcagccaggaacgccgaggccaccgcaggcctgggcagaagttcatcaggatctataaactcttcaagagcaccagccagctggtactgcggagggactctcggagcctggagggcagctcggacacggccctgcccctgaggcgggcagggagcctctgcagccccctggacgaaccagtatcacccccttcccgggcccagcgctcccgctccctgccccagcccaaactcggtacccagctgcccagctggcttctggcccctgcttcacgcccccagcgccgccgccccttcctgagtggagatgaggatcccaaggcttccacgctacgtgttgtggtctttggctccgatcggatttcagggaaggtggctcgggcgtacagcaaccttcggcggctggagaacaatcgcccactcctcacacggttcttcaaacttcagttcttctacgtgcctgtgaagcgaagtcatgggaccagccctggtgcctgtccaccccctcggagccagacgccctcacccccgacagactcccctaggcacgccagccctggagagctgggcaccaccccatgggaggagagcaccaatgacatctcccactacctcggcatgctggacccctggtatgagcgcaatgtactgggcctcatgcacctgccccctgaagtcctgtgccagtccctgaaggctgaagcccaggccctggagggctccccaacccagctgcccatcctggctgacatgctactctactactgccgctttgccgccagaccggtgctgctgcaagtctatcagaccgagctgaccttcatcactggggagaagacgacagagatcttcatccactccttggagctgggtcactccgctgccacacgtgccatcaaggcgtcaggtcctggcagcaagcggctgggcatcgatggcgaccgggaggctgttcctctaacactacagattatttacagcaagggggccatcagtggacgaagtcgctggagcaacctggagaaggtctgtacctccgtgaacctcaacaaggcctgccggaagcaggaggagctggattccagcatggaggccctgacgctaaacctgacagaagtggtgaaaaggcagaactccaaatccaagaagggctttaaccagattagcacatcgcagatcaaagtggacaaggtgcagatcatcggctccaacagctgcccctttgctgtgtgcctggaccaggatgagagaaagatcctgcagagtgtagtcagatgtgaggtctcaccgtgctacaagccagagaagagcgacctctcctcaccaccccagacgcctcctgacctgccggcccaggccgcacctgatctctgctcccttctctgcctgcccatcatgactttcagtggagctctgccctag

SEQ ID NO: 165626 - DNA, 719 bp, Homo sapiens
  Payload ID: 12601
  Gene Symbol: PIK3R5
  Gene Name: phosphoinositide-3-kinase, regulatory subunit 5
  ENST ID: ENST00000585260
  CDS Start-End: 1-282
ggacgaagtcgctggagcaacctggagaaggtctgtacctccgtgaacctcaacaaggcctgccggaagcaggaggagctggattccagcatggaggccctgacgctaaacctgacagaagtggtgaaaaggcagaactccaaatccaagaagggctttaaccagattagcacatcgcagatcaaagtggacaaggtgcagatcatcggctccaacagctgcccctttgctgtgtgcctggaccaggatgagagaaagatcctgcagagtgtagtcaggtaggaaaggggggtcctagggaggggagcagtttctgctcccaccaacccagaggcctggaaggagctggaaggatgggggcctgctctgatccctggcccctgccctgctgcacagatgtgaggtctcaccgtgctacaagccagagaagagcgacctctcctcaccaccccagacgcctcctgacctgccggcccaggccgcacctgatctctgctcccttctctgcctgcccatcatgactttcagtggagctctgccctagtgtgggcccagcgccagactggacagaagccctggggcaacctcctcggccacccctccaggacagtccctctctgtggagaactgaatggccctgtgcagagccatagtcccactgtgggtcctgcaatgagcaggggctgggagtagagggtttctggggcctcagggttctg

SEQ ID NO: 165627 - DNA, 4339 bp, Homo sapiens
  Payload ID: 12601
  Gene Symbol: PIK3R5
  Gene Name: phosphoinositide-3-kinase, regulatory subunit 5
  Uniprot ID: Q8WYR1
  ENST ID: ENST00000611902
  CDS Start-End: 1135-2619
tgggcagatgctgcggctcgccgcgcggctccagctggggcgcggtggtcccgacggtcacccgaatcgcagggagtcgccgctggagaggggctcggcgcccggcggggactgcaggcgatgacccaggatgcagccaggggccacgacatgcacggaggaccgcatccagcatgccctggaacgctgcctgcatggactcagcctcagccgccgctccacctcctggtcagctgggctgtgtctgaactgctggagcctgcaggagctggtcagcagggacccgggccacttccttatcctccttgagcagatcctgcagaagacccgagaggtccaggagaagggcacctacgacctgctcaccccgctggccctgctcttctattccactgttctttgtacaccacacttcccaccagactcggatctccttctgaaggcagccagcacctaccaccggttcctgacctggcctgttccttactgcagcatctgccaggagctgctcaccttcattgatgctgaactcaaggccccagggatctcctaccagagactggtgagggctgagcagggcctgcccatcaggagtcaccgcagctccaccgtcaccgtgctgctgctgaacccagtggaagtgcaggccgagttccttgctgtagccaataagctgagtacgcccggacactcgcctcacagtgcctacaccaccctgctcctgcacgccttccaggccacctttggggcccactgtgacgtcccgggcctgcactgcaggctacagacactgcaaaaccagggaagctccacaccatccccatccctgtcgccaggtgctacacctacagctggagccaggacagctttgacatcctgcaggaaatcctgctcaaggaacaggagctactccagccagggatcctgggagatgatgaagaggaggaagaggaggaggaggaggtggaggaggacttggaaactgacgggcactgtgccgagagagattccctgctctccaccagctctttggcgtcccatgactccaccttgtcccttgcatcctcccaggcctcggggccggccctctcgcgccatctgctgacttcctttgtctcaggcctctctgatggcatggacagcggctacgtggaggacagcgaggagagctcctccgagtggccttggaggcgtggcagccaggaacgccgaggccaccgcaggcctgggcagaagttcatcaggatctataaactcttcaagagcaccagccagctggtactgcggagggactctcggagcctggagggcagctcggacacggccctgcccctgaggcgggcagggagcctctgcagccccctggacgaaccagtatcacccccttcccgggcccagcgctcccgctccctgccccagcccaaactcggtacccagctgcccagctggcttctggcccctgcttcacgcccccagcgccgccgccccttcctgagtggagatgaggatcccaaggcttccacgctacgtgttgtggtctttggctccgatcggatttcagggaaggtggctcgggcgtacagcaaccttcggcggctggagaacaatcgcccactcctcacacggttcttcaaacttcagttcttctacgtgcctgtgaagcgaagtcatgggaccagccctggtgcctgtccaccccctcggagccagacgccctcacccccgacagactcccctaggcacgccagccctggagagctgggcaccaccccatgggaggagagcaccaatgacatctcccactacctcggcatgctggacccctggtatgagcgcaatgtactgggcctcatgcacctgccccctgaagtcctgtgccagcagtccctgaaggctgaagcccaggccctggagggctccccaacccagctgcccatcctggctgacatgctactctactactgccgctttgccgccagaccggtgctgctgcaagtctatcagaccgagctgaccttcatcactggggagaagacgacagagatcttcatccactccttggagctgggtcactccgctgccacacgtgccatcaaggcgtcaggtcctggcagcaagcggctgggcatcgatggcgaccgggaggctgttcctctaacactacagattatttacagcaagggggccatcagtggacgaagtcgctggagcaacctggagaaggtctgtacctccgtgaacctcaacaaggcctgccggaagcaggaggagctggattccagcatggaggccctgacgctaaacctgacagaagtggtgaaaaggcagaactccaaatccaagaagggctttaaccagattagcacatcgcagatcaaagtggacaaggtgcagatcatcggctccaacagctgcccctttgctgtgtgcctggaccaggatgagagaaagatcctgcagagtgtagtcagatgtgaggtctcaccgtgctacaagccagagaagagcgacctctcctcaccaccccagacgcctcctgacctgccggcccaggccgcacctgatctctgctcccttctctgcctgcccatcatgactttcagtggagctctgccctagtgtgggcccagcgccagactggacagaagccctggggcaacctcctcggccacccctccaggacagtccctctctgtggagaactgaatggccctgtgcagagccatagtcccactgtgggtcctgcaatgagcaggggctgggagtagagggtttctggggcctcagggttctgggaaagcaacagctatcagagagagaagggccagaccccatagcctcttagattcctggcagtagaaggagaaggatgggtaaattgacctctgaagtccctgaccattagcatggtctaggatcctttctagaaggaagatctgaggctctggtgctcagggggatggcttgggccttttctctcaaccttggctgagcctaccccttactttgccaaagacttgaggaccctgtatgtctggagttcagtcccctcctctgtggggctcaggtgattgaaatgtggatgaaacatttctctacttcaagaccacctctccctgcaaacaccacacacacatggcatgcatgtacgcacatgcgcacacacacacgcacacacctcaataatttctctcaagtttcctgagtctccagaaaaacagcactaacgctggacctgtctactctcagaacccggcacagattctctcttgatctccttttggaatctgagattcttagaagacaggatagggttaaatttagtagcagctcagttctagctaaatcactagaggaagttaattaactttaagccttcatttctccagcactaaaatggagtggagagttggggtggaaataagacatccttaaaaggttaaattgtctgcaaagcacctagcccagtgccgagctcccagtaggtgttcagtaaagcttagtgcctgactttctgaacactgattcctcctgtttggagtcactgggatactctcattgccgttgggatgttcctcactccttcccagttcgtggctgaggcagaacccagactgaagagggaagagacattccagaggaggattgccttcgtcagggtaaggggtgggctgctcaggggccctacccttcacccccttctgtatcagattggccctcccactcccatctcactctgcgtgtacaatcttccatatccgcaagttcactggcactcttctggcacctgggcaagatcccagaacagaggatggagtgactggcctcacagagcttagtgcccgactcaggggaaatgggactggtgcatgggaaatggtcagcctaggataggacacgagagtctgaaattcaaagcaaccagcttgaagtggtttgagaagctggaagcaaacatgggctagagagatagggcagaagtcaagacgaggatctggactgatgtggagaaagtagccacggaagcatgaactgtatcctgcacaaagtccctcttccccgcctcctaattcattatgcccaaaaggccttacgtgaaattccagcccagagtactcatgacttgagagacgtggacagagccagcttctaccttgcctggccgtctctcccctgtcttaatgtctgctcttgctctaagctccagaagagtggcgggccatgtatcttcaatatgtttttgctgtatgggcaggttgtcttattatgtgatcaacagatgtccaggaactaatgagtggaatttaatattattgtcaaataaaacttgatttgtcct

SEQ ID NO: 165628 - DNA, 4377 bp, Homo sapiens
  Payload ID: 12601
  Gene Symbol: PIK3R5
  Gene Name: phosphoinositide-3-kinase, regulatory subunit 5
  Uniprot ID: Q8WYR1
  ENST ID: ENST00000616147
  CDS Start-End: 1173-2657
tgggcagatgctgcggctcgccgcgcggctccagctggggcgcggtggtcccgacggtcacccgaatcgcagggagtcgccgctggagaggggctcggcgcccggcggggactgcagctgggctgtgtctgaactgctggagcctgcaggagctggtcagcagggacccgggccacttccttatcctccttgagcagatcctgcagaagacccgagaggtccaggagaagggcacctacgacctgctcaccccgctggccctgctcttctattccactgttctttgtacaccacacttcccaccagactcggatctccttctgaaggcagccagcacctaccaccggttcctgacctggcctgttccttactgcagcatctgccaggagctgctcaccttcattgatgctgaactcaaggccccagggatctcctaccagagactggtgagggctgagcagggcctgcccatcaggagtcaccgcagctccaccgtcaccgtgctgctgctgaacccagtggaagtgcaggccgagttccttgctgtagccaataagctgagtacgcccggacactcgcctcacagtgcctacaccaccctgctcctgcacgccttccaggccacctttggggcccactgtgacgtcccgggcctgcactgcaggctacaggccaagaccctggcagagcttgaggacatcttcacggagaccgcagaggcacaggagctggcatctggcatcggggatgctgcagaggcccggcggtggctcaggaccaagctgcaggcggtgggagaaaaagctggcttccctggggtgttagacactgcaaaaccagggaagctccacaccatccccatccctgtcgccaggtgctacacctacagctggagccaggacagctttgacatcctgcaggaaatcctgctcaaggaacaggagctactccagccagggatcctgggagatgatgaagaggaggaagaggaggaggaggaggtggaggaggacttggaaactgacgggcactgtgccgagagagattccctgctctccaccagctctttggcgtcccatgactccaccttgtcccttgcatcctcccaggcctcggggccggccctctcgcgccatctgctgacttcctttgtctcaggcctctctgatggcatggacagcggctacgtggaggacagcgaggagagctcctccgagtggccttggaggcgtggcagccaggaacgccgaggccaccgcaggcctgggcagaagttcatcaggatctataaactcttcaagagcaccagccagctggtactgcggagggactctcggagcctggagggcagctcggacacggccctgcccctgaggcgggcagggagcctctgcagccccctggacgaaccagtatcacccccttcccgggcccagcgctcccgctccctgccccagcccaaactcggtacccagctgcccagctggcttctggcccctgcttcacgcccccagcgccgccgccccttcctgagtggagatgaggatcccaaggcttccacgctacgtgttgtggtctttggctccgatcggatttcagggaaggtggctcgggcgtacagcaaccttcggcggctggagaacaatcgcccactcctcacacggttcttcaaacttcagttcttctacgtgcctgtgaagcgaagtcatgggaccagccctggtgcctgtccaccccctcggagccagacgccctcacccccgacagactcccctaggcacgccagccctggagagctgggcaccaccccatgggaggagagcaccaatgacatctcccactacctcggcatgctggacccctggtatgagcgcaatgtactgggcctcatgcacctgccccctgaagtcctgtgccagcagtccctgaaggctgaagcccaggccctggagggctccccaacccagctgcccatcctggctgacatgctactctactactgccgctttgccgccagaccggtgctgctgcaagtctatcagaccgagctgaccttcatcactggggagaagacgacagagatcttcatccactccttggagctgggtcactccgctgccacacgtgccatcaaggcgtcaggtcctggcagcaagcggctgggcatcgatggcgaccgggaggctgttcctctaacactacagattatttacagcaagggggccatcagtggacgaagtcgctggagcaacctggagaaggtctgtacctccgtgaacctcaacaaggcctgccggaagcaggaggagctggattccagcatggaggccctgacgctaaacctgacagaagtggtgaaaaggcagaactccaaatccaagaagggctttaaccagattagcacatcgcagatcaaagtggacaaggtgcagatcatcggctccaacagctgcccctttgctgtgtgcctggaccaggatgagagaaagatcctgcagagtgtagtcagatgtgaggtctcaccgtgctacaagccagagaagagcgacctctcctcaccaccccagacgcctcctgacctgccggcccaggccgcacctgatctctgctcccttctctgcctgcccatcatgactttcagtggagctctgccctagtgtgggcccagcgccagactggacagaagccctggggcaacctcctcggccacccctccaggacagtccctctctgtggagaactgaatggccctgtgcagagccatagtcccactgtgggtcctgcaatgagcaggggctgggagtagagggtttctggggcctcagggttctgggaaagcaacagctatcagagagagaagggccagaccccatagcctcttagattcctggcagtagaaggagaaggatgggtaaattgacctctgaagtccctgaccattagcatggtctaggatcctttctagaaggaagatctgaggctctggtgctcagggggatggcttgggccttttctctcaaccttggctgagcctaccccttactttgccaaagacttgaggaccctgtatgtctggagttcagtcccctcctctgtggggctcaggtgattgaaatgtggatgaaacatttctctacttcaagaccacctctccctgcaaacaccacacacacatggcatgcatgtacgcacatgcgcacacacacacgcacacacctcaataatttctctcaagtttcctgagtctccagaaaaacagcactaacgctggacctgtctactctcagaacccggcacagattctctcttgatctccttttggaatctgagattcttagaagacaggatagggttaaatttagtagcagctcagttctagctaaatcactagaggaagttaattaactttaagccttcatttctccagcactaaaatggagtggagagttggggtggaaataagacatccttaaaaggttaaattgtctgcaaagcacctagcccagtgccgagctcccagtaggtgttcagtaaagcttagtgcctgactttctgaacactgattcctcctgtttggagtcactgggatactctcattgccgttgggatgttcctcactccttcccagttcgtggctgaggcagaacccagactgaagagggaagagacattccagaggaggattgccttcgtcagggtaaggggtgggctgctcaggggccctacccttcacccccttctgtatcagattggccctcccactcccatctcactctgcgtgtacaatcttccatatccgcaagttcactggcactcttctggcacctgggcaagatcccagaacagaggatggagtgactggcctcacagagcttagtgcccgactcaggggaaatgggactggtgcatgggaaatggtcagcctaggataggacacgagagtctgaaattcaaagcaaccagcttgaagtggtttgagaagctggaagcaaacatgggctagagagatagggcagaagtcaagacgaggatctggactgatgtggagaaagtagccacggaagcatgaactgtatcctgcacaaagtccctcttccccgcctcctaattcattatgcccaaaaggccttacgtgaaattccagcccagagtactcatgacttgagagacgtggacagagccagcttctaccttgcctggccgtctctcccctgtcttaatgtctgctcttgctctaagctccagaagagtggcgggccatgtatcttcaatatgtttttgctgtatgggcaggttgtcttattatgtgatcaacagatgtccaggaactaatgagtggaatttaatattattgtcaaataaaacttgatttgtcct

SEQ ID NO: 165629 - DNA, 4318 bp, Homo sapiens
  Payload ID: 12601
  Gene Symbol: PIK3R5
  Gene Name: phosphoinositide-3-kinase, regulatory subunit 5
  Uniprot ID: Q8WYR1
  ENST ID: ENST00000623421
  CDS Start-End: 1114-2598
tgggcagatgctgcggctcgccgcgcggctccagctggggcgcggtggtcccgacggtcacccgaatcgcagggagtcgccgctggagaggggctcggcgcccggcggggactgcaggcgatgacccaggatgcagccaggggccacgacatgcacggaggaccgcatccagcatgccctggaacgctgcctgcatggactcagcctcagccgccgctccacctcctggtcagctgggctgtgtctgaactgctggagcctgcaggagctggtcagcagggacccgggccacttccttatcctccttgagcagatcctgcagaagacccgagaggtccaggagaagggcacctacgacctgctcaccccgctggccctgctcttctattccactgttctttgtacaccacacttcccaccagactcggatctccttctgaaggcagccagcacctaccaccggttcctgacctggcctgttccttactgcagcatctgccaggagctgctcaccttcattgatgctgaactcaaggccccagggatctcctaccagagactggtgagggctgagcagggcctgcccatcaggagtcaccgcagctccaccgtgccaagaccctggcagagcttgaggacatcttcacggagaccgcagaggcacaggagctggcatctggcatcggggatgctgcagaggcccggcggtggctcaggaccaagctgcaggcggtgggagaaaaagctggcttccctggggtgttagacactgcaaaaccagggaagctccacaccatccccatccctgtcgccaggtgctacacctacagctggagccaggacagctttgacatcctgcaggaaatcctgctcaaggaacaggagctactccagccagggatcctgggagatgatgaagaggaggaagaggaggaggaggaggtggaggaggacttggaaactgacgggcactgtgccgagagagattccctgctctccaccagctctttggcgtcccatgactccaccttgtcccttgcatcctcccaggcctcggggccggccctctcgcgccatctgctgacttcctttgtctcaggcctctctgatggcatggacagcggctacgtggaggacagcgaggagagctcctccgagtggccttggaggcgtggcagccaggaacgccgaggccaccgcaggcctgggcagaagttcatcaggatctataaactcttcaagagcaccagccagctggtactgcggagggactctcggagcctggagggcagctcggacacggccctgcccctgaggcgggcagggagcctctgcagccccctggacgaaccagtatcacccccttcccgggcccagcgctcccgctccctgccccagcccaaactcggtacccagctgcccagctggcttctggcccctgcttcacgcccccagcgccgccgccccttcctgagtggagatgaggatcccaaggcttccacgctacgtgttgtggtctttggctccgatcggatttcagggaaggtggctcgggcgtacagcaaccttcggcggctggagaacaatcgcccactcctcacacggttcttcaaacttcagttcttctacgtgcctgtgaagcgaagtcatgggaccagccctggtgcctgtccaccccctcggagccagacgccctcacccccgacagactcccctaggcacgccagccctggagagctgggcaccaccccatgggaggagagcaccaatgacatctcccactacctcggcatgctggacccctggtatgagcgcaatgtactgggcctcatgcacctgccccctgaagtcctgtgccagcagtccctgaaggctgaagcccaggccctggagggctccccaacccagctgcccatcctggctgacatgctactctactactgccgctttgccgccagaccggtgctgctgcaagtctatcagaccgagctgaccttcatcactggggagaagacgacagagatcttcatccactccttggagctgggtcactccgctgccacacgtgccatcaaggcgtcaggtcctggcagcaagcggctgggcatcgatggcgaccgggaggctgttcctctaacactacagattatttacagcaagggggccatcagtggacgaagtcgctggagcaacctggagaaggtctgtacctccgtgaacctcaacaaggcctgccggaagcaggaggagctggattccagcatggaggccctgacgctaaacctgacagaagtggtgaaaaggcagaactccaaatccaagaagggctttaaccagattagcacatcgcagatcaaagtggacaaggtgcagatcatcggctccaacagctgcccctttgctgtgtgcctggaccaggatgagagaaagatcctgcagagtgtagtcagatgtgaggtctcaccgtgctacaagccagagaagagcgacctctcctcaccaccccagacgcctcctgacctgccggcccaggccgcacctgatctctgctcccttctctgcctgcccatcatgactttcagtggagctctgccctagtgtgggcccagcgccagactggacagaagccctggggcaacctcctcggccacccctccaggacagtccctctctgtggagaactgaatggccctgtgcagagccatagtcccactgtgggtcctgcaatgagcaggggctgggagtagagggtttctggggcctcagggttctgggaaagcaacagctatcagagagagaagggccagaccccatagcctcttagattcctggcagtagaaggagaaggatgggtaaattgacctctgaagtccctgaccattagcatggtctaggatcctttctagaaggaagatctgaggctctggtgctcagggggatggcttgggccttttctctcaaccttggctgagcctaccccttactttgccaaagacttgaggaccctgtatgtctggagttcagtcccctcctctgtggggctcaggtgattgaaatgtggatgaaacatttctctacttcaagaccacctctccctgcaaacaccacacacacatggcatgcatgtacgcacatgcgcacacacacacgcacacacctcaataatttctctcaagtttcctgagtctccagaaaaacagcactaacgctggacctgtctactctcagaacccggcacagattctctcttgatctccttttggaatctgagattcttagaagacaggatagggttaaatttagtagcagctcagttctagctaaatcactagaggaagttaattaactttaagccttcatttctccagcactaaaatggagtggagagttggggtggaaataagacatccttaaaaggttaaattgtctgcaaagcacctagcccagtgccgagctcccagtaggtgttcagtaaagcttagtgcctgactttctgaacactgattcctcctgtttggagtcactgggatactctcattgccgttgggatgttcctcactccttcccagttcgtggctgaggcagaacccagactgaagagggaagagacattccagaggaggattgccttcgtcagggtaaggggtgggctgctcaggggccctacccttcacccccttctgtatcagattggccctcccactcccatctcactctgcgtgtacaatcttccatatccgcaagttcactggcactcttctggcacctgggcaagatcccagaacagaggatggagtgactggcctcacagagcttagtgcccgactcaggggaaatgggactggtgcatgggaaatggtcagcctaggataggacacgagagtctgaaattcaaagcaaccagcttgaagtggtttgagaagctggaagcaaacatgggctagagagatagggcagaagtcaagacgaggatctggactgatgtggagaaagtagccacggaagcatgaactgtatcctgcacaaagtccctcttccccgcctcctaattcattatgcccaaaaggccttacgtgaaattccagcccagagtactcatgacttgagagacgtggacagagccagcttctaccttgcctggccgtctctcccctgtcttaatgtctgctcttgctctaagctccagaagagtggcgggccatgtatcttcaatatgtttttgctgtatgggcaggttgtcttattatgtgatcaacagatgtccaggaactaatgagtggaatttaatattattgtcaaataaaacttgatttgtcct

SEQ ID NO: 165630 - DNA, 3041 bp, Homo sapiens
  Payload ID: 12602
  Gene Symbol: PIK3R6
  Gene Name: phosphoinositide-3-kinase, regulatory subunit 6
  Uniprot ID: Q5UE93
  ENST ID: ENST00000619866
  CDS Start-End: 241-2505
tttgcagatctgaagagcacagtcaagaccacagacacccgtggaggctcccccaagacatctgcttctctgggactggggacctcgctcaggaccgtggggagttggctgaaggacttggggagcccagaagctgccaccgaaccaagaaccacctctgtgcagaaaagcaaccaccttgttctctattctgctgcccgagacaaccacatcctcctcctcctacacccaaaggctcccatggagagctcagatgtggagctggacctccagaggagcgtgcaggctgtgctccgggagctcagcacccaggcccctgccctgcagagcaaccaaggcatgtggaggtggtccctgcacaagaaggtcgagcgagatcccggtaagagcccagtgctggtccgcattcttctcagagaactggagaaggcggaaagccaggacctccggcatgtcatcattcccttgctgcacactgtaatgtacgtgctcaccaaggccacaggaatcacagaagagctctaccagagaatctatgccttttgcacaaggttactgaccctgcccaccccctactgcacagtcgccttggactgcgcgataaggctgaaaacggagatggctgtcccagggacactgtaccaaaggatggtcattgccgaacagaacttgacgaatgagctgtatccctaccaggagagagtgttcctcttcgtggatcctgagctggtgtctgcgtctgtgtgcagtgctctgctactggagatcgaggcggcccaggcgcagcagacaccagagacctgcatgcgccacgtggtctcccacgccctgcaggcggctctgggggaggcctgtcacgcaggcgctctgcacaggaagctgcaggccagccctcgccgcaccctggagcactatttccacgccgtggtggccgccttggagcagatggccagcgaggccagcccgagccgggagggacacgtagagaggctggaggagatttactgctcgctgctgggtcccgcggcggggcgctgcggtggtgaccttgtccaagagcggccaccaagcattcccctgcccagcccctacatcaccttccacttgtggaccggtgaggagcagctctggaaggaactggtgctcttcctccgcccaagatcccagctgcgcctcagtgctgacttggaggtcttggatctgcagggcctccggccggaccgggagttggcccgggtttctgtgctgtccactgacagcggcattgagcgggaccttcccacgggggctgatgagctgcctgcacccggcagccctgagatggagcgagccgggctgcagcgcaaagggggcatcaagaagcgtgcatggcccctggacttcttgatgcctggcagctgggacgggcccccagggctgcaccggaggacaggccggcccagtggggatggggaaatgctgcccggcgtgtcccggctgcacacagcccgggtacttgtgctcggagatgacaggatgctggggcgcctggcccaggcctaccacagactcaggaaacgggagacccagaagttctgcctcactcccagactcagcctgcagctctactacatccccgtgctggcgcctgagaagcctgcagcatccaggcagccggagctgggagagctggctacgttcctgggccgcgtagacccgtggtaccagagcaacgtcaacacgctgtgccccgccatccacaagctggctgagatgcctccttccctggacacatcccggactgtggaccccttcatcctagacgtcatcacctactacatccgcatgggcacccaacccatctatttccagatctacacagtcaagatctttttcagtgacctgagccaagaccctactgaggacattttcctcattgaactgaaggtgaagatccaagattctaaattccccaaagatggcttttcacccaggaggagaggcgtggctgagggcccaggggcagagctctccctatgctaccagaaggccttgcttagccaccggccccgagaggtcaccgtttccctgcgggccactgggctgatcctgaaggccattccagccagcgacacagaagtttcagggtctagccattgccccctgcctgctgctcctgtcacagaccacacatgtctgaatgtcaacgtgacagaggttgtcaagtcctccaacttggcgggaaagtccttctctacagtgaccaacaccttcaggacgaacaatatccagatccagagccgggaccagaggctgctgacactgtcgctggacaaggacgatcaacgcactttcagggatgtggtcagattcgaggttgctccctgcccagaaccatgttctggggcccagaagtccaaggcaccgtggctcaatttgcatgggcaacaggaggtggaagcaatcaaagccaagcccaagccccttctgatgcccatcaacacattctctggtattgtccagtgagcctgcagggacagcaggcccaggaggaaggatacactaccccaccaactccaaacactcacaccaacagccagagcaaggcccggctccacacggcagctttggccttgaccaggagccagcgagtgcctgggagcacagggagcctaccctggggactgtgatgaggaagggcccacatggaggtctacggatggcccaggcaatgctgtcgctgcttgagaacatacacaccaagcccagcttctcatacaaatgtctactccttcatttagcttcaattcccacttctcccactgtcctctcccacccaagctccccatccagcccttaaaaccagggttaaagctgctgtcttggccagagccctgtggcctaggggaaaattggaagcaaggaacagcaacagcaccacctccctcccaagtctcttcccttcccactctcaggccactgcccacctcactcagcccaggcaggtgtctctatcaggtgagagaaaaatgtcagactcaataaatgtacactgaagtctt

SEQ ID NO: 165631 - DNA, 3392 bp, Homo sapiens
  Payload ID: 12602
  Gene Symbol: PIK3R6
  Gene Name: phosphoinositide-3-kinase, regulatory subunit 6
  ENST ID: ENST00000611951
  CDS Start-End: 224-526
cacagtcaagaccacagacacccgtggaggctcccccaagacatctgcttctctgggactggggacctcgctcaggaccgtggggagttggctgaaggacttggggagcccagaagctgccaccgaaccaagaaccacctctgtgcagaaaagcaaccaccttgttctctattctgctgcccgagacaaccacatcctcctcctcctacacccaaaggctcccatggagagctcagatgtggagctggacctccagaggagcgtgcaggctgtgctccgggagctcagcacccaggcccctgccctgcagagcaaccaaggcatgtggaggtggtccctgcacaagaaggtcgagcgagatcccggtaagagcccagtgctggtccgcattcttctcagagaactggagaaggtgagttcctggacctcagggaggaagacggggatgaaaggaagagaggggccaattgggcaggggctcagtcctggcagcgctatatctcataagctttggttgcctgcatgatttttaccatatgcatctccctcctgtacttttacgtaagcagtattttctttacgtcgactctcattgttttacttgaataaacatctttcaaaaagaagcactataacgcgaccacaaatggaaaacccgcatcacttgtcagaaacagaaggcggaaagccaggacctccggcatgtcatcattcccttgctgcacactgtaatgtacgtgctcaccaaggccacaggaatcacagaagagctctaccagagaatctatgccttttgcacaaggttactgaccctgcccaccccctactgcacagtcgccttggactgcgcgataaggctgaaaacggagatggctgtcccaggataccggggagctcaaaagcctccacaccttctgtaggaaggtggagaatgggagtcagagacttgggggctgtttggccaaagtggtctggtttgcagggacactgtaccaaaggatggtcattgccgaacagaacttgacgaatgagctgtatccctaccaggagagagtgttcctcttcgtggatcctgagctggtgtctgcgtctgtgtgcagtgctctgctactggagatcgaggcggcccaggcgcagcagacaccagagacctgcatgcgccacgtggtctcccacgccctgcaggcggctctgggggaggcctgtcacgcaggcgctctgcacaggaagctgcaggccagccctcgccgcaccctggagcactatttccacgccgtggtggccgccttggagcagatggccagcgaggccagcccgagccgggagggacacgtagagaggctggaggagatttactgctcgctgctgggtcccgcggcggggcgctgcggtggtgaccttgtccaagagcggccaccaagcattcccctgcccagcccctacatcaccttccacttgtggaccggtgaggagcagctctggaaggaactggtgctcttcctccgcccaagatcccagctgcgcctcagtgctgacttggaggtcttggatctgcagggcctccggccggaccgggagttggcccgggtttctgtgctgtccactgacagcggcattgagcgggaccttcccacgggggctgatgagctgcctgcacccggcagccctgagatggagcgagccgggctgcagcgcaaagggggcatcaagaagcgtgcatggcccctggacttcttgatgcctggcagctgggacgggcccccagggctgcaccggaggacaggccggcccagtggggatggggaaatgctgcccggcgtgtcccggctgcacacagcccgggtacttgtgctcggagatgacaggatgctggggcgcctggcccaggcctaccacagactcaggaaacgggagacccagaagttctgcctcactcccagactcagcctgcagctctactacatccccgtgctggcgcctgagaagcctgcagcatccaggcagccggagctgggagagctggctacgttcctgggccgcgtagacccgtggtaccagagcaacgtcaacacgctgtgccccgccatccacaagctggctgagatgcctccttccctggacacatcccggactgtggaccccttcatcctagacgtcatcacctactacatccgcatgggcacccaacccatctatttccagatctacacagtcaagatctttttcagtgacctgagccaagaccctactgaggacattttcctcattgaactgaaggtgaagatccaagattctaaattccccaaagatggcttttcacccaggaggagaggcgtggctgagggcccaggggcagagctctccctatgctaccagaaggccttgcttagccaccggccccgagaggtcaccgtttccctgcgggccactgggctgatcctgaaggccattccagccagcgacacagaagtttcagggtctagccattgccccctgcctgctgctcctgtcacagaccacacatgtctgaatgtcaacgtgacagaggttgtcaagtcctccaacttggcgggaaagtccttctctacagtgaccaacaccttcaggacgaacaatatccagatccagagccgggaccagaggctgctgacactgtcgctggacaaggacgatcaacgcactttcagggatgtggtcagattcgaggttgctccctgcccagaaccatgttctggggcccagaagtccaaggcaccgtggctcaatttgcatgggcaacaggaggtggaagcaatcaaagccaagcccaagccccttctgatgcccatcaacacattctctggtattgtccagtgagcctgcagggacagcaggcccaggaggaaggatacactaccccaccaactccaaacactcacaccaacagccagagcaaggcccggctccacacggcagctttggccttgaccaggagccagcgagtgcctgggagcacagggagcctaccctggggactgtgatgaggaagggcccacatggaggtctacggatggcccaggcaatgctgtcgctgcttgagaacatacacaccaagcccagcttctcatacaaatgtctactccttcatttagcttcaattcccacttctcccactgtcctctcccacccaagctccccatccagcccttaaaaccagggttaaagctgctgtcttggccagagccctgtggcctaggggaaaattggaagcaaggaacagcaacagcaccacctccctcccaagtctcttcccttcccactctcaggccactgcccacctcactcagcccaggcaggtgtctctatcaggtgagagaaaaatgtcagactcaataaatgtacactgaagtctt

SEQ ID NO: 165632 - DNA, 2265 bp, Homo sapiens
  Payload ID: 12602
  Gene Symbol: PIK3R6
  Gene Name: phosphoinositide-3-kinase, regulatory subunit 6
  Uniprot ID: Q5UE93
  ENST ID: ENST00000614407
  CDS Start-End: 1-2265
atggagagctcagatgtggagctggacctccagaggagcgtgcaggctgtgctccgggagctcagcacccaggcccctgccctgcagagcaaccaaggcatgtggaggtggtccctgcacaagaaggtcgagcgagatcccggtaagagcccagtgctggtccgcattcttctcagagaactggagaaggcggaaagccaggacctccggcatgtcatcattcccttgctgcacactgtaatgtacgtgctcaccaaggccacaggaatcacagaagagctctaccagagaatctatgccttttgcacaaggttactgaccctgcccaccccctactgcacagtcgccttggactgcgcgataaggctgaaaacggagatggctgtcccagggacactgtaccaaaggatggtcattgccgaacagaacttgacgaatgagctgtatccctaccaggagagagtgttcctcttcgtggatcctgagctggtgtctgcgtctgtgtgcagtgctctgctactggagatcgaggcggcccaggcgcagcagacaccagagacctgcatgcgccacgtggtctcccacgccctgcaggcggctctgggggaggcctgtcacgcaggcgctctgcacaggaagctgcaggccagccctcgccgcaccctggagcactatttccacgccgtggtggccgccttggagcagatggccagcgaggccagcccgagccgggagggacacgtagagaggctggaggagatttactgctcgctgctgggtcccgcggcggggcgctgcggtggtgaccttgtccaagagcggccaccaagcattcccctgcccagcccctacatcaccttccacttgtggaccggtgaggagcagctctggaaggaactggtgctcttcctccgcccaagatcccagctgcgcctcagtgctgacttggaggtcttggatctgcagggcctccggccggaccgggagttggcccgggtttctgtgctgtccactgacagcggcattgagcgggaccttcccacgggggctgatgagctgcctgcacccggcagccctgagatggagcgagccgggctgcagcgcaaagggggcatcaagaagcgtgcatggcccctggacttcttgatgcctggcagctgggacgggcccccagggctgcaccggaggacaggccggcccagtggggatggggaaatgctgcccggcgtgtcccggctgcacacagcccgggtacttgtgctcggagatgacaggatgctggggcgcctggcccaggcctaccacagactcaggaaacgggagacccagaagttctgcctcactcccagactcagcctgcagctctactacatccccgtgctggcgcctgagaagcctgcagcatccaggcagccggagctgggagagctggctacgttcctgggccgcgtagacccgtggtaccagagcaacgtcaacacgctgtgccccgccatccacaagctggctgagatgcctccttccctggacacatcccggactgtggaccccttcatcctagacgtcatcacctactacatccgcatgggcacccaacccatctatttccagatctacacagtcaagatctttttcagtgacctgagccaagaccctactgaggacattttcctcattgaactgaaggtgaagatccaagattctaaattccccaaagatggcttttcacccaggaggagaggcgtggctgagggcccaggggcagagctctccctatgctaccagaaggccttgcttagccaccggccccgagaggtcaccgtttccctgcgggccactgggctgatcctgaaggccattccagccagcgacacagaagtttcagggtctagccattgccccctgcctgctgctcctgtcacagaccacacatgtctgaatgtcaacgtgacagaggttgtcaagtcctccaacttggcgggaaagtccttctctacagtgaccaacaccttcaggacgaacaatatccagatccagagccgggaccagaggctgctgacactgtcgctggacaaggacgatcaacgcactttcagggatgtggtcagattcgaggttgctccctgcccagaaccatgttctggggcccagaagtccaaggcaccgtggctcaatttgcatgggcaacaggaggtggaagcaatcaaagccaagcccaagccccttctgatgcccatcaacacattctctggtattgtccagtga

SEQ ID NO: 165633 - DNA, 3291 bp, Homo sapiens
  Payload ID: 12602
  Gene Symbol: PIK3R6
  Gene Name: phosphoinositide-3-kinase, regulatory subunit 6
  ENST ID: ENST00000613555
  CDS Start-End: 241-543
tttgcagatctgaagagcacagtcaagaccacagacacccgtggaggctcccccaagacatctgcttctctgggactggggacctcgctcaggaccgtggggagttggctgaaggacttggggagcccagaagctgccaccgaaccaagaaccacctctgtgcagaaaagcaaccaccttgttctctattctgctgcccgagacaaccacatcctcctcctcctacacccaaaggctcccatggagagctcagatgtggagctggacctccagaggagcgtgcaggctgtgctccgggagctcagcacccaggcccctgccctgcagagcaaccaaggcatgtggaggtggtccctgcacaagaaggtcgagcgagatcccggtaagagcccagtgctggtccgcattcttctcagagaactggagaaggtgagttcctggacctcagggaggaagacggggatgaaaggaagagaggggccaattgggcaggggctcagtcctggcagcgctatatctcataagctttggttgcctgcatgatttttaccatatgcatctccctcctgtacttttacgtaagcagtattttctttacgtcgactctcattgttttacttgaataaacatctttcaaaaagaagcactataacgcgaccacaaatggaaaacccgcatcacttgtcagaaacagaaggcggaaagccaggacctccggcatgtcatcattcccttgctgcacactgtaatgccacaggaatcacagaagagctctaccagagaatctatgccttttgcacaaggttactgaccctgcccaccccctactgcacagtcgccttggactgcgcgataaggctgaaaacggagatggctgtcccagggacactgtaccaaaggatggtcattgccgaacagaacttgacgaatgagctgtatccctaccaggagagagtgttcctcttcgtggatcctgagctggtgtctgcgtctgtgtgcagtgctctgctactggagatcgaggcggcccaggcgcagcagacaccagagacctgcatgcgccacgtggtctcccacgccctgcaggcggctctgggggaggcctgtcacgcaggcgctctgcacaggaagctgcaggtgaccttgtccaagagcggccaccaagcattcccctgcccagcccctacatcaccttccacttgtggaccggtgaggagcagctctggaaggaactggtgctcttcctccgcccaagatcccagctgcgcctcagtgctgacttggaggtcttggatctgcagggcctccggccggaccgggagttggcccgggtttctgtgctgtccactgacagcggcattgagcgggaccttcccacgggggctgatgagctgcctgcacccggcagccctgagatggagcgagccgggctgcagcgcaaagggggcatcaagaagcgtgcatggcccctggacttcttgatgcctggcagctgggacgggcccccagggctgcaccggaggacaggccggcccagtggggatggggaaatgctgcccggcgtgtcccggctgcacacagcccgggtacttgtgctcggagatgacaggatgctggggcgcctggcccaggcctaccacagactcaggaaacgggagacccagaagttctgcctcactcccagactcagcctgcagctctactacatccccgtgctggcgcctgagaagcctgcagcatccaggcagccggagctgggagagctggctacgttcctgggccgcgtagacccgtggtaccagagcaacgtcaacacgctgtgccccgccatccacaagctggctgagatgcctccttccctggacacatcccggactgtggaccccttcatcctagacgtcatcacctactacatccgcatgggcacccaacccatctatttccagatctacacagtcaagatctttttcagtgacctgagccaagaccctactgaggacattttcctcattgaactgaaggtgaagatccaagattctaaattccccaaagatggcttttcacccaggaggagaggcgtggctgagggcccaggggcagagctctccctatgctaccagaaggccttgcttagccaccggccccgagaggtcaccgtttccctgcgggccactgggctgatcctgaaggccattccagccagcgacacagaagtttcagggtctagccattgccccctgcctgctgctcctgtcacagaccacacatgtctgaatgtcaacgtgacagaggttgtcaagtcctccaacttggcgggaaagtccttctctacagtgaccaacaccttcaggacgaacaatatccagatccagagccgggaccagaggctgctgacactgtcgctggacaaggacgatcaacgcactttcagggatgtggtcagatgcctctgcatacactcagcctgcagcctcctgatccagtcccctctgcaggcacgggcccctcccacacaggctgacctgtggcatctgtgttccagttagctgacccttactggcttcccctcgggaggtgtgtttggattcgaggttgctccctgcccagaaccatgttctggggcccagaagtccaaggcaccgtggctcaatttgcatgggcaacaggaggtggaagcaatcaaagccaagcccaagccccttctgatgcccatcaacacattctctggtattgtccagtgagcctgcagggacagcaggcccaggaggaaggatacactaccccaccaactccaaacactcacaccaacagccagagcaaggcccggctccacacggcagctttggccttgaccaggagccagcgagtgcctgggagcacagggagcctaccctggggactgtgatgaggaagggcccacatggaggtctacggatggcccaggcaatgctgtcgctgcttgagaacatacacaccaagcccagcttctcatacaaatgtctactccttcatttagcttcaattcccacttctcccactgtcctctcccacccaagctccccatccagcccttaaaaccagggttaaagctgctgtcttggccagagccctgtggcctaggggaaaattggaagcaaggaacagcaacagcaccacctccctcccaagtctcttcccttcccactctcaggccactgcccacctcactcagcccaggcaggtgtctctatcaggtgagagaaaaatgtcagactcaataaatgtacactgaagtctttctgctttcatctc

SEQ ID NO: 165634 - DNA, 3810 bp, Homo sapiens
  Payload ID: 12603
  Gene Symbol: PIRT
  Gene Name: phosphoinositide-interacting regulator of transient receptor potential channels
  Uniprot ID: P0C851
  ENST ID: ENST00000580256
  CDS Start-End: 640-1053
agtgtagcctgagtcagccggagggtctgatccactctttggcaactcatccccaccaccatggccactacacacctccaccaacccagaaactccaggtcctctgatttctgagcctgggtcaggagaagctgccctgcccaggcaccaacggaacgcacgcctccatgaaacttgaagacagactgcagagaagcatcatgaatttttcacaagattcatctaattgtggctgagcagagctgagaaagccacagtccgaggacccatgccagcagctcacaaagagttaacccattaggccattgcctggtgagctcatccatccctgctggagcctgctcagttgctgggattcacaacacactgacttctggacgtggtcagggtggctttctctggctggcatggacttgagcagaaactcattgccggcttcctccttgcacgagcaccaagtgattcccaggtcccccatcctcccctgggacatcgaggacacacaaaaaccttgttcaccctccactgagagcggggctagagatggatgctgagtacaggaagggtgtgtgaggattcctttggctccactcttgtttccaactattgctggtcctaggcgcccagtcctgagcaaccatgacgatggagactctccccaaggttctagaggtcgatgagaagtctccagaagccaaggacctgctgcccagccagaccgccagctccctgtgcatcagctccaggagcgagtctgtctggaccaccacccccaggagtaactgggaaatctaccgcaagcccatcgttatcatgtcagtgggcggtgccatcctgcttttcggcgtggtcatcacctgcttggcctacaccttgaagctgagtgacaagagtctctccatcctcaaaatggtagggcctggcttcctgtccctgggactcatgatgctggtgtgcgggctggtgtgggtgcccatcatcaaaaagaaacagaagcacagacagaagtcgaatttcttacgcagcctcaagtccttcttcctgactcgctgatggtggtttccgcatctccctgccaccttgactgggagaagatctgatgaccaacatccgacatccctgtctcctctgtggggtgccataaaactgatccaggaaaatgctcttcctgaccctgtggggaagatagagcttggggctccaccctccatgcagccgggaatgttgccagatgtatccacttgatctctattctgactgatgcttccttggatcccggctgtggccttccctttggtcactctaaccccctgcccctgcatccaggcatcattcatccaactctctctgccaagtgcaatgcatgctgggaaattcttcgaaggtgggctatgcccaagggagaacctcatgtttacatatctgagtgccagagctggattcttcatttgcatacttctggaaccaaaactgacccacggaggtcctttacagaggagggagggatggctgagctctgacccattgggtttgacagccctagctcccttagcagactttcaagatcacaagtatcaaacattccaaagactgaacaatgaagggaggcctgggaaaaatactctccaagatggcacgtgcccctggacatgacaacatgactctaggggttagtcagctgaagaagtttagttcctaattatataatatttacatcagaggcagtggggtaggctaggggatgtcactgtttccgcttgaccttatctttctcattgaccactgtcttctctgaacttgatcattagccaaggacaaaatgcatgttgccctaatttctttcctacccctgcctctatctctgcatctagaacagctaaatggaaagatacagagggatcctgtaaggttgttttccctttcacgtccatcaagatcaaaattgagagaatcaagttccatatctgaatgatctgtaggtttctagagatggaattcacgtcagaaaattccaacttctgttatccctgcccccacccaccaaaaaagccaacatttattaagtgtcgcattctgggataagccctggctgggggcaagacacggtccctgatgtcttcttgcttcccgaggtgagagaggcagccaagccaactggcgaaatgtgggtgggtgtgggaacacaggcggtgtctaccctagacttgatagaggacggagaaattcctggaggccatgtcctccaacccaaaaacaaaaggaaagataagagttaccaaagaggggaaagaatggcattggaagcagcaggagctgctatgcgtgtgcaggagtagcttggggaaggagaagcatgatggaattaggaaactgcacggccatttgtctgacctcccagatgtttttacttcatccctctctttcccggcttcccacctcttcaccaagtgcctagcgcagcttctcctggaggcacattgagggcctcctggtgtctatggtagagacgggaagtgggtttccagagggcctggcaagcaaagagtccctgagaagtgcttctgtaactccctgtggcaaccaagaggcccgtaggtgaaagaacagaagcagtacctgtgagggagccagccacgctgccctaggccaaagacccctggagagcatttggtaatgaggtgtgagaggagagcatcctgcaccagaatcacccttgtcttgagctaattctcttcactcctcagccttgtggccttcccagtcaccatggccctccagatatccccatcctgcatggcagttccatatgcagagccagaatccatccttgttccttctgcattgtgagaaaatccatggaggaaagcacttgtgtcatggggaccacccctacctgacccacccacggagtcagagtttggggaactcatggccgttgaggctcacccaggatggccatagccttcatggagacccatgccagtgtggccatgtctctagctcacctctagccctgcacacaggtggtcaggaccaatcttgggagtgttgcaagtgctatgtcgttaattgtagttttagtgcctcagtgacaaaccttgcagatcatttcccttcttctgagatgaatgcagatttgatggccctataatattactcttgcattcctcgatgcattcttaaatgggagcaaatgggatgggccccagatcactcactggaaacccacactccaggtgcctcatttcctctgcccaggagattgtagcctgggcacagctatatgaggagggcccatttggatactgctatcatggatgtcttagtggaaggaagtttagggataaccacaactctagaagtccaggttctggactcactttgcagactctagcagtacctgcctccattccctgcccactcaagctagtttctcagcaaagagaatatgaggaaatatccccaaacatcgtcatccccactgggatcctccacatgagtgtgggctggaaaggttccagggtcacactgaggcaggacattttttgccaatgcctgttaccccatggaaggctgaggtacggatgcacctgatctggaaatgcagcccaggtcagactccacatttctgcaacaaagcatcacctgcaatgactcttttcacgtcagtgggtcaaaggacagaaccagcttccgtgttttaggctcactagattgtctcatgctccccatggctattctgtttgggagaatttgatctaacccgaagcctaaaggaatcaatgtaatgttgaattgtattctatgtaa

SEQ ID NO: 165635 - DNA, 2001 bp, Homo sapiens
  Payload ID: 12604
  Gene Symbol: PLN
  Gene Name: phospholamban
  Uniprot ID: P26678
  ENST ID: ENST00000357525
  CDS Start-End: 193-351
aaactgggtgacagagtcagaaaactccccagctaaacacccgtaagacttcatacaacacaatactctatactgtgatgatcacagctgccaaggctacctaaaagaagacagttatctcatatttggctgccagctttttatctttctctcgaccacttaaaacttcagacttcctgtcctgctggtatcatggagaaagtccaatacctcactcgctcagctataagaagagcctcaaccattgaaatgcctcaacaagcacgtcaaaagctacagaatctatttatcaatttctgtctcatcttaatatgtctcttgctgatctgtatcatcgtgatgcttctctgaagttctgctacaacctctagatctgcagcttgccacatcagcttaaaatctgtcatcccatgcagacaggaaaacaatattgtataacagaccacttcctgagtagaagagtttctttgtgaaaaggtcaagattaagactaaaacttattgttaccatatgtattcatctgttggatcttgtaaacatgaaaagggctttattttcaaaaattaacttcaaaataagtgtataaaatgcaactgttgatttcctcaacatggctcacaaatttctatcccaaatcttttctgaagatgaagagtttagttttaaaactgcactgccaacaagttcacttcatatataaagcattatttttactcttttgaggtgaatataatttatattacaatgtaaaagcttctttaatactaagtatttttcaggtcttcaccaagtatcaaagtaataacacaaatgaagtgtcattattcaaaatagtccactgactcctcacatctgttatcttattataaagaactatttgtagtaactatcagaatctacattctaaaacagaaattgtattttttctatgccacattaacatcttttaaagttgatgagaatcaagtatggaaaagtaaggccatactcttacataataaaattccttttaagtaattttttcaaagaatcacagaattctagtacatgtaggtaaatcataaatctgttctaagacatatgatcaacagatgagaactggtggttaatatgtgacagtgagattagtcatatcactaatatactaacaacagaatctaatcttcatttaaggcactgtagtgaattatctgagctagagttacctagcttaccatactatatctttggaatcatgaaaccttaagacttcagaatgattttgcaggttgtcttccattccagcctaacatccaatgcaggcaaggaaaataaaagatttccagtgacagaaaaatatattatctcaagtattttttaaaaatatatgaattctctctccaaatattaactaattattagattatattttgaaatgaacttgttggcccatctattacatctacagctgacccttgaacatgggggttaggggagctgacaattcgtgggtccgcaaaatcttaactacctaatagcctactattgaccataaaccttactgataacataaacagtaaattaacacatattttgcgtgttatatgtattatacactatattcctacaataaagtaagctagagaaaatgttatttagaaaatcataagaaagagaaaatatatttactattcattaaatggaagtgggtcaacataaaagtcttcattctcattgtcttcacattgagtaggcagaggaggagaaagatggggaggaagagaaggcgttggtcttgcagtcttgtcttaggggtgtggggagtgggggaaagaatattcatgtataagtggacccttgcaattcaagcccttgttgttcaagggtcaactgtaataggatatagctatttttcttcctctatcaaccaaatggtaagcatctattttgcagtccactctactgagctaaattatagatccagctatgctatttataattattttcttgatgaataaattt

SEQ ID NO: 165636 - DNA, 1786 bp, Homo sapiens
  Payload ID: 12605
  Gene Symbol: PLA1A
  Gene Name: phospholipase A1 member A
  Uniprot ID: Q53H76
  ENST ID: ENST00000273371
  CDS Start-End: 73-1443
gaggctgggttatatgatctctttggctttagggaattactccataccagctctgagatttccagctcagcgatgcccccaggtccctgggagagctgcttctgggtggggggcctcattttgtggctcagcgttggaagttcaggggatgcacctcctaccccacagccaaagtgcgctgacttccagagcgccaacctttttgaaggcaccgatctcaaagtccagtttctcctctttgtcccttcgaatcctagctgtgggcagctagtagaaggaagcagtgacctccaaaactctgggttcaatgccactctgggaaccaaactaattatccatggattcagggttttaggaacaaagccttcctggattgacacatttattagaacccttctgcgtgcaacgaatgctaatgtgattgccgtggactggatttatgggtctacaggagtctacttctcagctgtgaaaaatgtgattaagttgagcctcgagatctcccttttcctcaataaactcctggtgctgggtgtgtcggaatcctcaatccacatcattggtgttagcctgggggcccacgttgggggcatggtgggacagctcttcggaggccagctgggacagatcacaggcctggaccccgctggacctgagtacaccagggccagtgtggaagagcgcttggatgctggagatgccctcttcgtggaagccatccacacagacaccgacaatttgggtattcggattcccgttggacatgtggactacttcgtcaacggaggccaagaccaacctggctgccccaccttcttttacgcaggttatagttatctgatctgtgatcacatgagggctgtgcacctctacatcagcgccctggagaattcctgtccactgatggcctttccctgtgccagctacaaggccttccttgctggacgctgtctggattgctttaacccttttctgctttcctgcccaaggataggactggtggaacaaggtggtgtcaagatagagccgctccccaaggaagtgaaagtctacctcctgactacttccagtgctccgtactgcatgcatcacagcctcgtggagtttcacttgaaggaactgagaaacaaggacaccaacatcgaggttaccttccttagcagtaacatcacctcttcatctaagatcaccatacctaagcagcaacgctatgggaaaggaatcatagcccatgccaccccacaatgccagataaaccaagtgaaattcaagtttcagtcttccaaccgagtttggaaaaaagaccggactaccattattgggaagttctgcactgcccttttgcctgtcaatgacagagaaaagatggtctgcttacctgaaccagtgaacttacaagcaagtgtgactgtttcctgtgacctgaagatagcctgtgtgtagtttaacctgggcaggacacatctccctgcattttttttttttttttgagagagaggtgtgatgagggatgtgtgtgtgcagcttattgtagaccattactactaaggagaaaagcaaagctctttcttattttcctcataatcagctaccctggaggggagggagaactcattttacagaacttggtttcctttgccgatcttatgtacatacccattttagctttcccatgcatacttaactgcacttgctttatctccttgggcattcgtacttaggattcaatagaaacatgtacagggtaaacaattttttaaaaataaaacttcatggagtatctgaa

SEQ ID NO: 165637 - DNA, 728 bp, Homo sapiens
  Payload ID: 12605
  Gene Symbol: PLA1A
  Gene Name: phospholipase A1 member A
  ENST ID: ENST00000475963
  CDS Start-End: 1-675
aatgtgattaagttgagcctcgagatctcccttttcctcaataaactcctggtgctgggtgtgtcggaatcctcaatccacatcattggtgttagcctgggggcccacgttgggggcatggtgggacagctcttcggaggccagctgggacagatcacaggcctggaccccgctggacctgagtacaccagggccagtgtggaagagcgcttggatgctggagatgccctcttcgtggaagccatccacacagacaccgacaatttgggtattcggattcccgttggacatgtggactacttcgtcaacggaggccaagaccaacctggctgccccaccttcttttacgcaggttatagttatctgatctgtgatcacatgagggctgtgcacctctacatcagcgccctggagaattcctgtccactgatggcctttccctgtgccagctacaaggccttccttgctggacgctgtctggattgctttaacccttttctgctttcctgcccaaggataggactggtggaacaaggtggtgtcaagatagagccgctccccaaggaagtgaaagtctacctcctgactacttccagtgctccgtactgcaatgcattccagcttctcactgttgctcctaaccatggcatttccttgaagctaggatgctggtgattgtaacgatgttaaatgtgaagtaaaaatgtgtccagaatccatgaaataca

SEQ ID NO: 165638 - DNA, 1695 bp, Homo sapiens
  Payload ID: 12605
  Gene Symbol: PLA1A
  Gene Name: phospholipase A1 member A
  Uniprot ID: Q53H76
  ENST ID: ENST00000495992
  CDS Start-End: 30-1352
ataccagctctgagatttccagctcagcgatgcccccaggtccctgggagagctgcttctgggtggggggcctcattttgtggctcagcgttggaagttcaggggatgcacctcctaccccacagccaaagtgcgctgacttccagagcgccaacctttttgaaggcaccgatctcaaagtccagtttctcctctttgtcccttcgaatcctagctgtgggcagctagtagaaggaagcagtgacctccaaaactctgggttcaatgccactctgggaaccaaactaattatccatggattcagggttttaggaacaaagccttcctggattgacacatttattagaacccttctgcgtgcaacgaatgctaatgtgattgccgtggactggatttatgggtctacaggagtctacttctcagctgtgaaaaatgtgctgggtgtgtcggaatcctcaatccacatcattggtgttagcctgggggcccacgttgggggcatggtgggacagctcttcggaggccagctgggacagatcacaggcctggaccccgctggacctgagtacaccagggccagtgtggaagagcgcttggatgctggagatgccctcttcgtggaagccatccacacagacaccgacaatttgggtattcggattcccgttggacatgtggactacttcgtcaacggaggccaagaccaacctggctgccccaccttcttttacgcaggttatagttatctgatctgtgatcacatgagggctgtgcacctctacatcagcgccctggagaattcctgtccactgatggcctttccctgtgccagctacaaggccttccttgctggacgctgtctggattgctttaacccttttctgctttcctgcccaaggataggactggtggaacaaggtggtgtcaagatagagccgctccccaaggaagtgaaagtctacctcctgactacttccagtgctccgtactgcatgcatcacagcctcgtggagtttcacttgaaggaactgagaaacaaggacaccaacatcgaggttaccttccttagcagtaacatcacctcttcatctaagatcaccatacctaagcagcaacgctatgggaaaggaatcatagcccatgccaccccacaatgccagataaaccaagtgaaattcaagtttcagtcttccaaccgagtttggaaaaaagaccggactaccattattgggaagttctgcactgcccttttgcctgtcaatgacagagaaaagatggtctgcttacctgaaccagtgaacttacaagcaagtgtgactgtttcctgtgacctgaagatagcctgtgtgtagtttaacctgggcaggacacatctccctgcattttttttttttttttgagagagaggtgtgatgagggatgtgtgtgtgcagcttattgtagaccattactactaaggagaaaagcaaagctctttcttattttcctcataatcagctaccctggaggggagggagaactcattttacagaacttggtttcctttgccgatcttatgtacatacccattttagctttcccatgcatacttaactgcacttgctttatctccttgggcattcgtacttaggattcaatagaaacatgtacagggtaaacaattttttaaaaataaaacttcatggagtatctgaa

SEQ ID NO: 165639 - DNA, 1775 bp, Homo sapiens
  Payload ID: 12605
  Gene Symbol: PLA1A
  Gene Name: phospholipase A1 member A
  ENST ID: ENST00000494440
  CDS Start-End: 110-1432
agtcacacctagtttttccttggactgtggagctttagattgttgagctccttgatcaacctggcccttgagcttccaggctggctcaggcgtcctctcctccaggtggatgcacaagtcttcctccatctggggggatgcacctcctaccccacagccaaagtgcgctgacttccagagcgccaacctttttgaaggcaccgatctcaaagtccagtttctcctctttgtcccttcgaatcctagctgtgggcagctagtagaaggaagcagtgacctccaaaactctgggttcaatgccactctgggaaccaaactaattatccatggattcagggttttaggaacaaagccttcctggattgacacatttattagaacccttctgcgtgcaacgaatgctaatgtgattgccgtggactggatttatgggtctacaggagtctacttctcagctgtgaaaaatgtgattaagttgagcctcgagatctcccttttcctcaataaactcctggtgctgggtgtgtcggaatcctcaatccacatcattggtgttagcctgggggcccacgttgggggcatggtgggacagctcttcggaggccagctgggacagatcacaggcctggaccccgctggacctgagtacaccagggccagtgtggaagagcgcttggatgctggagatgccctcttcgtggaagccatccacacagacaccgacaatttgggtattcggattcccgttggacatgtggactacttcgtcaacggaggccaagaccaacctggctgccccaccttcttttacgcaggttatagttatctgatctgtgatcacatgagggctgtgcacctctacatcagcgccctggagaattcctgtccactgatggcctttccctgtgccagctacaaggccttccttgctggacgctgtctggattgctttaacccttttctgctttcctgcccaaggataggactggtggaacaaggtggtgtcaagatagagccgctccccaaggaagtgaaagtctacctcctgactacttccagtgctccgtactgcatgcatcacagcctcgtggagtttcacttgaaggaactgagaaacaaggacaccaacatcgaggttaccttccttagcagtaacatcacctcttcatctaagatcaccatacctaagcagcaacgctatgggaaaggaatcatagcccatgccaccccacaatgccagataaaccaagtgaaattcaagtttcagtcttccaaccgagtttggaaaaaagaccggactaccattattgggaagttctgcactgcccttttgcctgtcaatgacagagaaaagatggtctgcttacctgaaccagtgaacttacaagcaagtgtgactgtttcctgtgacctgaagatagcctgtgtgtagtttaacctgggcaggacacatctccctgcattttttttttttttttgagagagaggtgtgatgagggatgtgtgtgtgcagcttattgtagaccattactactaaggagaaaagcaaagctctttcttattttcctcataatcagctaccctggaggggagggagaactcattttacagaacttggtttcctttgccgatcttatgtacatacccattttagctttcccatgcatacttaactgcacttgctttatctccttgggcattcgtacttaggattcaatagaaacatgtacagggtaaacaattttttaaaaataaaacttcatggagtatctgaa

SEQ ID NO: 165640 - DNA, 1456 bp, Homo sapiens
  Payload ID: 12605
  Gene Symbol: PLA1A
  Gene Name: phospholipase A1 member A
  Uniprot ID: Q53H76
  ENST ID: ENST00000488919
  CDS Start-End: 357-1208
gaattactccataccagctctgagatttccagctcagcgatgcccccaggtccctgggagagctgcttctgggtggggggcctcattttgtggctcagcgttggaagttcagggttttaggaacaaagccttcctggattgacacatttattagaacccttctgcgtgcaacgaatgctaatgtgattgccgtggactggatttatgggtctacaggagtctacttctcagctgtgaaaaatgtgattaagttgagcctcgagatctcccttttcctcaataaactcctggtgctgggtgtgtcggaatcctcaatccacatcattggtgttagcctgggggcccacgttgggggcatggtgggacagctcttcggaggccagctgggacagatcacaggcctggaccccgctggacctgagtacaccagggccagtgtggaagagcgcttggatgctggagatgccctcttcgtggaagccatccacacagacaccgacaatttgggtattcggattcccgttggacatgtggactacttcgtcaacggaggccaagaccaacctggctgccccaccttcttttacgcaggttatagttatctgatctgtgatcacatgagggctgtgcacctctacatcagcgccctggagaattcctgtccactgatggcctttccctgtgccagctacaaggccttccttgctggacgctgtctggattgctttaacccttttctgctttcctgcccaaggataggactggtggaacaaggtggtgtcaagatagagccgctccccaaggaagtgaaagtctacctcctgactacttccagtgctccgtactgcatgcatcacagcctcgtggagtttcacttgaaggaactgagaaacaaggacaccaacatcgaggttaccttccttagcagtaacatcacctcttcatctaagatcaccatacctaagcagcaacgctatgggaaaggaatcatagcccatgccaccccacaatgccagataaaccaagtgaaattcaagtttcagtcttccaaccgagtttggaaaaaagaccggactaccattattgggaagttctgcactgcccttttgcctgtcaatgacagagaaaagatggtctgcttacctgaaccagtgaacttacaagcaagtgtgactgtttcctgtgacctgaagatagcctgtgtgtagtttaacctgggcaggacacatctccctgcattttttttttttttttgagagagaggtgtgatgagggatgtgtgtgtgcagcttattgtagaccattactactaaggagaaaagcaaagctctttcttattttcctcataatcagctaccctggaggggagggagaactcattttacagaacttggtttcctttgccgatcttatgtacatacccattttagctttcccatgcatacttaactgcact

SEQ ID NO: 165641 - DNA, 706 bp, Homo sapiens
  Payload ID: 12606
  Gene Symbol: PINLYP
  Gene Name: phospholipase A2 inhibitor and LY6/PLAUR domain containing
  Uniprot ID: A6NC86
  ENST ID: ENST00000562365
  CDS Start-End: 253-603
ctccagcctgggcaactccgtctaaaaaaaataagaaaagaaagaaaaaaaagaaagagaccatcccaggaagttgtggggttggggaggcctagggttaggcaagaccttgaggcaggggttgaagccagggagtggtcagccagcactgtccctgcctgtccccatcccacagagggcaaggagttggtgcacacctacaagggctgcatcaggtcccaggactgctactccggcgttatatccaccaccatgggccccaaggaccacatggtaaccagctccttctgctgccagagcgacggctgcaacagtgcctttttgtctgttcccttgaccaatcttactgagaatggcctgatgtgccccgcctgcactgcgagcttcagggacaaatgcatggggcccatgacccactgtactggaaaggaaaaccactgcgtctccttatctggacacgtgcaggctggtattttcaaacccagatttgctatgcggggctgtgctacagagagtatgtgctttaccaagcctggtgctgaagtacccacaggcaccaatgtcctcttcctccatcatatagagtgcactcactccccctgaaaagctatctgaacagaggaagataatgtagtgtgaagtccccatttgtcctcagcctgtaactccccgtgtgcctataaagaagttaatagagcaagcctga

SEQ ID NO: 165642 - DNA, 557 bp, Homo sapiens
  Payload ID: 12606
  Gene Symbol: PINLYP
  Gene Name: phospholipase A2 inhibitor and LY6/PLAUR domain containing
  Uniprot ID: A6NC86
  ENST ID: ENST00000569031
  CDS Start-End: 110-460
ggggtggaagggaccacatccagcaggctgagagggcaaggagttggtgcacacctacaagggctgcatcaggtcccaggactgctactccggcgttatatccaccaccatgggccccaaggaccacatggtaaccagctccttctgctgccagagcgacggctgcaacagtgcctttttgtctgttcccttgaccaatcttactgagaatggcctgatgtgccccgcctgcactgcgagcttcagggacaaatgcatggggcccatgacccactgtactggaaaggaaaaccactgcgtctccttatctggacacgtgcaggctggtattttcaaacccagatttgctatgcggggctgtgctacagagagtatgtgctttaccaagcctggtgctgaagtacccacaggcaccaatgtcctcttcctccatcatatagagtgcactcactccccctgaaaagctatctgaacagaggaagataatgtagtgtgaagtccccatttgtcctcagcctgtaactccccgtgtgcctataaagaagttaatagagcaa

SEQ ID NO: 165643 - DNA, 569 bp, Homo sapiens
  Payload ID: 12606
  Gene Symbol: PINLYP
  Gene Name: phospholipase A2 inhibitor and LY6/PLAUR domain containing
  Uniprot ID: A6NC86
  ENST ID: ENST00000562255
  CDS Start-End: 122-472
atttcacgaaggcatgggggtggccataggcggcctgaaatagaagggcaaggagttggtgcacacctacaagggctgcatcaggtcccaggactgctactccggcgttatatccaccaccatgggccccaaggaccacatggtaaccagctccttctgctgccagagcgacggctgcaacagtgcctttttgtctgttcccttgaccaatcttactgagaatggcctgatgtgccccgcctgcactgcgagcttcagggacaaatgcatggggcccatgacccactgtactggaaaggaaaaccactgcgtctccttatctggacacgtgcaggctggtattttcaaacccagatttgctatgcggggctgtgctacagagagtatgtgctttaccaagcctggtgctgaagtacccacaggcaccaatgtcctcttcctccatcatatagagtgcactcactccccctgaaaagctatctgaacagaggaagataatgtagtgtgaagtccccatttgtcctcagcctgtaactccccgtgtgcctataaagaagttaatagagcaa

SEQ ID NO: 165644 - DNA, 712 bp, Homo sapiens
  Payload ID: 12606
  Gene Symbol: PINLYP
  Gene Name: phospholipase A2 inhibitor and LY6/PLAUR domain containing
  Uniprot ID: A6NC86
  ENST ID: ENST00000599207
  CDS Start-End: 1-615
atgaggctctccaggagaccagagacctttctgctggcctttgtgttgctctgcaccctcctgggtcttgggtgcccactacactgcgaaatatgtacggcggcggggagcaggtgccatggccaaatgaagacctgcagcagtgacaaggacacatgtgtgctcctggtcgggaaggctacttcaaagggcaaggagttggtgcacacctacaagggctgcatcaggtcccaggactgctactccggcgttatatccaccaccatgggccccaaggaccacatggtaaccagctccttctgctgccagagcgacggctgcaacagtgcctttttgtctgttcccttgaccaatcttactgagaatggcctgatgtgccccgcctgcactgcgagcttcagggacaaatgcatggggcccatgacccactgtactggaaaggaaaaccactgcgtctccttatctggacacgtgcaggctggtattttcaaacccagatttgctatgcggggctgtgctacagagagtatgtgctttaccaagcctggtgctgaagtacccacaggcaccaatgtcctcttcctccatcatatagagtgcactcactccccctgaaaagctatctgaacagaggaagataatgtagtgtgaagtccccatttgtcctcagcctgtaactccccgtgtgcctataaagaagttaatagagcaa

SEQ ID NO: 165645 - DNA, 914 bp, Homo sapiens
  Payload ID: 12606
  Gene Symbol: PINLYP
  Gene Name: phospholipase A2 inhibitor and LY6/PLAUR domain containing
  Uniprot ID: A6NC86
  ENST ID: ENST00000612042
  CDS Start-End: 126-812
aggagaggggaagagagagaaggagagggaatcccagttcttgcagccactgggaatcaagaggcccaactccgtcttggtcttcaagcaaacaaacaaacaacaatgggccgtgggaagggtgaatgtgggtccagacccacccctcctcagcttcctataaaagctggggaccaggtactgctgatacacacaccatgaggctctccaggagaccagagacctttctgctggcctttgtgttgctctgcaccctcctgggtcttgggtgcccactacactgcgaaatatgtacggcggcggggagcaggtgccatggccaaatgaagacctgcagcagtgacaaggacacatgtgtgctcctggtcgggaaggctacttcaaagggcaaggagttggtgcacacctacaagggctgcatcaggtcccaggactgctactccggcgttatatccaccaccatgggccccaaggaccacatggtaaccagctccttctgctgccagagcgacggctgcaacagtgcctttttgtctgttcccttgaccaatcttactgagaatggcctgatgtgccccgcctgcactgcgagcttcagggacaaatgcatggggcccatgacccactgtactggaaaggaaaaccactgcgtctccttatctggacacgtgcaggctggtattttcaaacccagatttgctatgcggggctgtgctacagagagtatgtgctttaccaagcctggtgctgaagtacccacaggcaccaatgtcctcttcctccatcatatagagtgcactcactccccctgaaaagctatctgaacagaggaagataatgtagtgtgaagtccccatttgtcctcagcctgtaactccccgtgtgcctataaagaagttaatagagcaagcctg

SEQ ID NO: 165646 - DNA, 8526 bp, Homo sapiens
  Payload ID: 12607
  Gene Symbol: PLA2R1
  Gene Name: phospholipase A2 receptor 1, 180kDa
  Uniprot ID: Q13018
  ENST ID: ENST00000283243
  CDS Start-End: 208-4599
cccgagtgtcggttcactgtggagacagcggtggcggagtgggtctccagggctctgggctggcaaggcccccggagggggtggggcgcggaggaggctacggatccgcttccgcgcggcggggccgggtgcttgggacgcggctctgggctcccgggataaggggctcccgggacaaggggctcccggagagcccagtggttagcgatgctgctgtcgccgtcgctgctgctgctgctgctgctgggggcgccgcggggctgcgccgagggtgtggcggcggcgcttacccccgagcggctcctggagtggcaggataaaggaatatttgttatccaaagtgagagtctcaagaaatgcattcaagcaggtaaatcggttctgaccctggagaactgcaagcaagcaaacaagcacatgctgtggaaatgggtttcaaaccatggcctctttaacataggaggcagtggttgcctgggcctgaatttctccgccccagagcagccattaagcttatatgaatgtgactccaccctcgtttccttacggtggcgctgtaacaggaagatgatcacaggcccgctgcagtactctgtccaggtggcgcatgacaacacagtggtggcctcacggaagtatattcataagtggatttcttatgggtcaggtggtggagacatttgtgaatatctacacaaagatttgcatacaatcaaagggaacacccacgggatgccgtgtatgtttcccttccagtataaccatcagtggcatcatgaatgtacccgtgaaggtcgggaagatgacttactgtggtgtgccacgacaagccgttatgaaagagatgaaaagtggggattttgccctgatcccacctctgcagaagtaggttgtgatactatttgggagaaggacctcaattcacacatttgctaccagttcaacctgctttcatctctctcttggagtgaggcacattcttcatgccagatgcaaggaggtacgctgttaagtattacagatgaaactgaagaaaatttcataagggagcacatgagcagtaaaacagtggaggtgtggatgggcctcaatcagctggatgaacacgctggctggcagtggtctgatggaacgccgctcaactatctgaattggagcccagaggtaaattttgagccatttgttgaagatcactgtggaacatttagttcatttatgccaagtgcctggaggagtcgggattgtgagtccaccttgccatatatatgtaaaaaatatctaaaccacattgatcatgaaatagttgaaaaagatgcgtggaaatattatgctacccactgtgagcctggctggaatccctacaatcgtaattgctacaaacttcagaaagaagaaaagacctggcatgaggctctgcgttcttgtcaggctgataacagtgcattaatagacataacctcattagcagaggtggagtttcttgtaaccctccttggagatgaaaatgcatcagaaacatggattggtttgagcagcaataaaattccagtttcctttgaatggtctaatgactcttcagtcatctttactaattggcacacacttgagccccacatttttccaaatagaagccagctgtgtgtctcagcagagcagtctgagggacactggaaagtcaaaaattgtgaagaaagacttttttacatttgtaaaaaagcaggccatgtcctctctgatgctgaatcaggatgtcaagagggatgggagagacatggtggattctgttacaaaattgacacagtccttcgaagctttgaccaagcttccagcggttattactgtcctcctgcacttgtaaccattacaaacaggtttgaacaggcttttattaccagtttgatcagtagtgtggtaaaaatgaaggacagttatttttggatagctcttcaggaccaaaatgatacgggagaatacacttggaagccagtagggcagaaacccgagccggtgcagtacacacactggaacacacaccagccgcgctacagtggtggctgtgttgccatgcgaggaaggcatccacttggtcgctgggaagtgaagcactgtcggcactttaaggcaatgtccttgtgcaagcagccagttgaaaatcaggaaaaagcagagtatgaagagagatggccctttcacccctgctatttggactgggagtcagagcctggtctggccagttgcttcaaggtatttcatagtgaaaaagttctgatgaaaagaacatggagagaagctgaagcattttgcgaagaatttggagctcatcttgcaagctttgcccatattgaggaagagaattttgtgaatgagctcttacattcaaaatttaattggacagaagaaaggcagttctggattggatttaataaaagaaacccactgaatgccggctcatgggagtggtctgatagaactcctgttgtctcttcgtttttagacaacacttattttggagaagatgcaagaaactgtgctgtttataaggcaaacaaaacattgctgcccttacactgtggttccaaacgtgaatggatatgcaaaatcccaagagatgtgaaacccaagattccgttctggtaccagtacgatgtaccctggctcttttatcaggatgcagaatacctttttcatacctttgcctcagaatggttgaactttgagtttgtctgtagctggctgcacagtgatcttctcacaattcattctgcacatgagcaagaattcatccacagcaaaataaaagcgctatcaaagtatggtgcaagttggtggattggacttcaagaagaaagagccaatgatgaatttcgctggagagatggaacaccagtgatataccagaactgggacacaggaagagaaagaactgtgaataatcagagccagagatgtggctttatttcttctataacaggactctggggtagtgaagagtgttcagtttctatgcctagtatctgtaagcgaaaaaaggtttggctcatagagaaaaagaaagatacaccaaaacaacatggaacgtgtcccaaaggatggctatattttaactataagtgccttctgctgaatatccccaaagacccaagcagttggaagaactggacgcatgctcaacatttctgtgctgaagaaggggggaccctggtcgccattgaaagtgaggtggagcaagctttcattactatgaatctttttggccagaccaccagtgtgtggataggtttacaaaatgatgattatgaaacatggctaaatggaaagcctgtggtatattctaactggtctccatttgatataataaatattccaagtcacaataccactgaagttcagaaacacattcctctctgtgccttactctcaagtaatcctaattttcatttcactggaaaatggtattttgaagactgtggaaaggaaggctatgggtttgtttgtgaaaaaatgcaagatacttctggacacggtgtaaatacatctgatatgtatccaatgcccaataccttagaatatggaaacagaacttacaaaataattaatgcaaatatgacttggtatgcagcaataaaaacctgcctgatgcacaaagcacaactggtcagcatcacagaccagtatcaccagtccttcctcactgttgtcctcaaccggctaggatatgcccactggattggactgttcaccacagataatggtcttaattttgactggtctgatggcaccaaatcttctttcactttttggaaagatgaggagtcctccctccttggtgactgcgtttttgccgacagcaacggacgctggcatagcacagcctgcgagtcatttctgcaaggtgccatttgtcatgtgccacctgaaacaagacaatctgaacacccagagttgtgctcagaaacatctattccctggataaaatttaaaagtaattgctacagtttttctacagtcctagacagtatgagttttgaggctgctcatgaattttgcaaaaaggaaggttctaatcttttaacaatcaaggatgaggctgaaaatgcatttctcctagaagagctgtttgcttttggttcttctgtccagatggtttggttgaatgctcaatttgatggtaacaatgaaaccataaagtggtttgatggaactcccacagaccagtcaaactggggcattcggaagccagacacagactacttcaagccccatcattgtgttgccttgaggatccctgaaggattatggcagctatccccgtgtcaagaaaaaaaaggctttatatgtaaaatggaggcagatattcacactgcagaggcgctgccagaaaaaggaccaagtcacagcatcattcctcttgcggttgtactgacactgatagtcattgtggccatttgcacactttccttctgcatatacaagcataacggtggcttcttcaggagacttgcagggtttcggaatccttactatcctgcaaccaactttagtacagtatatttagaagaaaatattctcatttctgatcttgagaagagtgaccaataataatgaggtcagagaatgccacagacaccagggtaagtaaagaagactaaacaggagtctcatctgtctttccctttacagcacagatgccattagaatgtgaattgggtcactattttaattattcttgaagtgattactggttttgaatcttaaccaaatcagatgggttttgatttattcatttccctaaactgtgatccattcttaaaaggggtaaattatgcattggttatttttcagaaagacaagaactattaaaagaaactccctattgaaaactctgaaatcaatgcgaataatagtttttgcattaatgtatctctactaaaatttgggggaattttaaaactaatctggtatctattcagacatttacctgcactcgtaccattaagaaagacagaaagaagcaaaaaaaaattaatcttgtatatgagaggaaaaggaaagggcttctgagaggattcttagttgtttcttttgaattcacttttaatagcaggatttggaaaatactaatttctgtgcttaagggtcacaggttctgggctctcaactgatatttaaggtgacattcatttttattaggtctaacatctcaagctaaaggagaaagaaaaataccttcttttaaatggcaaagaccttcattagcagcacacttttataaacaaccatatagttaaaatgtggccttaaactttcaattactaaatgatgattaagttggatattttaaaatgtcttatacataagcttaaagtaatatattgaaactttaacagttgtactgttaaaactcatggactttctgaaaaactaaatatataaaataatatgtaacactcttaataactggaagatataaaatgtaacttggatttaaaggagaagagctaaagatctgaattatagtctcattagaaccagacagatgttgttgagaagtactaaataaattagtaatctagatatctttattatgtaaatgagtttaggtgttctatttaataaactattttctgggaacgatctccttttatattagtctagttagtgtagatggtaaataatgattatgatactgtctgtaaataaaaaattacagattttattttcctttattagttccttataaagaaaacagcttcataatcaatatctaaaaatttactcattacataactgtttattgaattttatcaagaaaaaagtgtactgagcatggtggcacgcacctgtagtcccagctacttaggaggctgagggaagaggatcaactgagcccagaagttgaaggctgcagtgagctatggttgcaccactgcactcctgcctgggcaactgaatgagaccccacctcaaaaaagtgctgttctagaaacagaggtactaaggtgagcaacttggggtaagggctatcttttcatgccacttattttctaatgagggaaaattgacagtaactcagtaaagaaatgcatatgcataaaatagcaagtggttatgaaaatgaagtaaggttccatgatagagagaaactgggggactctcagggcctccctgagagtgtgcattttaattattacaaccaactgcctcaaaaccagtggccactaatcacaagggggagctctgagagaaagtatgaatgaatttctaagaggcaaaccatcatcattagaaatacaatttgaagagcataccactaagaatggaatccttgtggcctgcaacagttaatccagcttccaaaagcagctctttgctactgttataataatttacacactgggacagtctacctccataatttttttaagtattgggacttcattttttaaaagatattatattatgtggcagttgcatatttatgactcaaaaaataattggcttgaactcaccagatggtataaaagcccaatttaaccatcttttgagtggaattaaagttctgttcttttcaatggacttggtaaaaactgctaatcaaccagccttccagtcaaggtatatagtcacacataataatttgacaaaatacaccattaggaaagtgattttgcagaaagaagctgtattgcttctcagtgctccatactttgatgtttagtattgaacaacatctccagataatctggacccatggacagatcacacacttcttgccattactgaatttgcagaaatagtactgaagtattctgctacatttttatatttgcattttttttgaaactttttttcattttttttttttttttttggagatggagtcttgctctgttgccaggcaggagtacagtggcatgatctcagctcactgcaaccttcaactgcctggttcgagcaagtttcctgcctcagcctcccgagtagctgtgattacaggcacatgccaccatgcccagctaatttttgtatttttagtagagacagggtttcaccatgttgtccaggatggtctcgatctcctgatctcgtgatccacccgccccagcctcccaaagtgctaagattacaggcatgagccaccgcacctggcctcatctgtatttttaatgtgaactagattttatagctataattcgaaaagaaaaaaaagtagcaggtaatgggtatattatacactatttgcgtgatggttacaccagactttaccactacatactgtatttatgtaacaaaattacacttgtactccttacatttatgccaaaaaagcggcaggatcacaaattcacacatagttaatgtgcccctccaacagtcaattatgttctatgactaacctgaggatctttatagaatctgagtaatggaaatgcctgggtttttccatttaacaatatattgggctcttacagttacaacagtcttctttcgggttaaatatttcttctcttgaagggtccactccttattaaagataagattgaactgaatgtttacttaaacgttcagtcttttggagtttctttactcttctcaaaatggtggttggatatataagaacttgctgtgtcctggtagtgttgaggggagaaggtgacaacttactgtggatgtatgttagctggtgtccactgagaatagctgtctggcctcactcctgggaattctgctggcatctgctgtgaagtctgcagttgctttaatctgtagtctgttctctttgatttggcctcattctggctgtccctggtgctgtcttatctcttgagaactggctgtgtctcctgttgaattccctatccgaacactgcagttcttggctacaaggcagtcacttcacccctgcagtggtgagatcccattagctaccattagctactcttttcgtccagaaaggcgaaatgccatagcaaacaatcccacagtcttggtggattaacacagcaaaggtttatttctcacccacacctgcatgggctggcaagaggactttgctctgttcagtcattcatgggtccatgcttctcctatatagccagccctctgtctcctaaggcctggagtcctccatgggcctccaatctgtggctgacagaggatgttgacttgagacccatctttgattcattatggagcttccacaggctgttgaaatcctctaagtcaaaagtcctcaaactggggacacatgcctaaggaatacaggagcatgggtatttaagaaacttaatttccagaatcttcatgtatattttttcttaaaactgatttacctgagagcacccctggttcttctttcccacctctctttacacaaatgcctttctctacctttaaaaagaaaaagaaaaagaaatggctttcatttcagatcttactatgggaaaatcctccatggctccaaagaaaaatattcgaagtattgatgtcagtgaagcttcttttaataaagaaattgtaaactca

SEQ ID NO: 165647 - DNA, 5160 bp, Homo sapiens
  Payload ID: 12607
  Gene Symbol: PLA2R1
  Gene Name: phospholipase A2 receptor 1, 180kDa
  Uniprot ID: Q13018
  ENST ID: ENST00000392771
  CDS Start-End: 208-4182
cccgagtgtcggttcactgtggagacagcggtggcggagtgggtctccagggctctgggctggcaaggcccccggagggggtggggcgcggaggaggctacggatccgcttccgcgcggcggggccgggtgcttgggacgcggctctgggctcccgggataaggggctcccgggacaaggggctcccggagagcccagtggttagcgatgctgctgtcgccgtcgctgctgctgctgctgctgctgggggcgccgcggggctgcgccgagggtgtggcggcggcgcttacccccgagcggctcctggagtggcaggataaaggaatatttgttatccaaagtgagagtctcaagaaatgcattcaagcaggtaaatcggttctgaccctggagaactgcaagcaagcaaacaagcacatgctgtggaaatgggtttcaaaccatggcctctttaacataggaggcagtggttgcctgggcctgaatttctccgccccagagcagccattaagcttatatgaatgtgactccaccctcgtttccttacggtggcgctgtaacaggaagatgatcacaggcccgctgcagtactctgtccaggtggcgcatgacaacacagtggtggcctcacggaagtatattcataagtggatttcttatgggtcaggtggtggagacatttgtgaatatctacacaaagatttgcatacaatcaaagggaacacccacgggatgccgtgtatgtttcccttccagtataaccatcagtggcatcatgaatgtacccgtgaaggtcgggaagatgacttactgtggtgtgccacgacaagccgttatgaaagagatgaaaagtggggattttgccctgatcccacctctgcagaagtaggttgtgatactatttgggagaaggacctcaattcacacatttgctaccagttcaacctgctttcatctctctcttggagtgaggcacattcttcatgccagatgcaaggaggtacgctgttaagtattacagatgaaactgaagaaaatttcataagggagcacatgagcagtaaaacagtggaggtgtggatgggcctcaatcagctggatgaacacgctggctggcagtggtctgatggaacgccgctcaactatctgaattggagcccagaggtaaattttgagccatttgttgaagatcactgtggaacatttagttcatttatgccaagtgcctggaggagtcgggattgtgagtccaccttgccatatatatgtaaaaaatatctaaaccacattgatcatgaaatagttgaaaaagatgcgtggaaatattatgctacccactgtgagcctggctggaatccctacaatcgtaattgctacaaacttcagaaagaagaaaagacctggcatgaggctctgcgttcttgtcaggctgataacagtgcattaatagacataacctcattagcagaggtggagtttcttgtaaccctccttggagatgaaaatgcatcagaaacatggattggtttgagcagcaataaaattccagtttcctttgaatggtctaatgactcttcagtcatctttactaattggcacacacttgagccccacatttttccaaatagaagccagctgtgtgtctcagcagagcagtctgagggacactggaaagtcaaaaattgtgaagaaagacttttttacatttgtaaaaaagcaggccatgtcctctctgatgctgaatcaggatgtcaagagggatgggagagacatggtggattctgttacaaaattgacacagtccttcgaagctttgaccaagcttccagcggttattactgtcctcctgcacttgtaaccattacaaacaggtttgaacaggcttttattaccagtttgatcagtagtgtggtaaaaatgaaggacagttatttttggatagctcttcaggaccaaaatgatacgggagaatacacttggaagccagtagggcagaaacccgagccggtgcagtacacacactggaacacacaccagccgcgctacagtggtggctgtgttgccatgcgaggaaggcatccacttggtcgctgggaagtgaagcactgtcggcactttaaggcaatgtccttgtgcaagcagccagttgaaaatcaggaaaaagcagagtatgaagagagatggccctttcacccctgctatttggactgggagtcagagcctggtctggccagttgcttcaaggtatttcatagtgaaaaagttctgatgaaaagaacatggagagaagctgaagcattttgcgaagaatttggagctcatcttgcaagctttgcccatattgaggaagagaattttgtgaatgagctcttacattcaaaatttaattggacagaagaaaggcagttctggattggatttaataaaagaaacccactgaatgccggctcatgggagtggtctgatagaactcctgttgtctcttcgtttttagacaacacttattttggagaagatgcaagaaactgtgctgtttataaggcaaacaaaacattgctgcccttacactgtggttccaaacgtgaatggatatgcaaaatcccaagagatgtgaaacccaagattccgttctggtaccagtacgatgtaccctggctcttttatcaggatgcagaatacctttttcatacctttgcctcagaatggttgaactttgagtttgtctgtagctggctgcacagtgatcttctcacaattcattctgcacatgagcaagaattcatccacagcaaaataaaagcgctatcaaagtatggtgcaagttggtggattggacttcaagaagaaagagccaatgatgaatttcgctggagagatggaacaccagtgatataccagaactgggacacaggaagagaaagaactgtgaataatcagagccagagatgtggctttatttcttctataacaggactctggggtagtgaagagtgttcagtttctatgcctagtatctgtaagcgaaaaaaggtttggctcatagagaaaaagaaagatacaccaaaacaacatggaacgtgtcccaaaggatggctatattttaactataagtgccttctgctgaatatccccaaagacccaagcagttggaagaactggacgcatgctcaacatttctgtgctgaagaaggggggaccctggtcgccattgaaagtgaggtggagcaagctttcattactatgaatctttttggccagaccaccagtgtgtggataggtttacaaaatgatgattatgaaacatggctaaatggaaagcctgtggtatattctaactggtctccatttgatataataaatattccaagtcacaataccactgaagttcagaaacacattcctctctgtgccttactctcaagtaatcctaattttcatttcactggaaaatggtattttgaagactgtggaaaggaaggctatgggtttgtttgtgaaaaaatgcaagatacttctggacacggtgtaaatacatctgatatgtatccaatgcccaataccttagaatatggaaacagaacttacaaaataattaatgcaaatatgacttggtatgcagcaataaaaacctgcctgatgcacaaagcacaactggtcagcatcacagaccagtatcaccagtccttcctcactgttgtcctcaaccggctaggatatgcccactggattggactgttcaccacagataatggtcttaattttgactggtctgatggcaccaaatcttctttcactttttggaaagatgaggagtcctccctccttggtgactgcgtttttgccgacagcaacggacgctggcatagcacagcctgcgagtcatttctgcaaggtgccatttgtcatgtgccacctgaaacaagacaatctgaacacccagagttgtgctcagaaacatctattccctggataaaatttaaaagtaattgctacagtttttctacagtcctagacagtatgagttttgaggctgctcatgaattttgcaaaaaggaaggttctaatcttttaacaatcaaggatgaggctgaaaatgcatttctcctagaagagctgtttgcttttggttcttctgtccagatggtttggttgaatgctcaatttgatggtaacagtaagtgatttgggtagaggagaggacataaataaatacatggttgttaaagctgatgataatggcatctgtgagccagaaaactctccttggatacgttttctgagaaaaaatagcatgaagcctaaagccatttcttccaaaaacaacattgcaacccttttctttacccttttgtcttttaaaataatcccagaacaccaaaaataaaaacaaacaataacatgtttatctttacccttagcaggaagatgcttggctggaactttgtgttcacagacttagtcattgcataccaaaaccatatttactggaaaatatcccaggtttctaaatgttataaaagcacaatagagttatggaaatgtttccatgatgaactgtgctgttaggattcttatttgctactcataaaaaccagagtttgtaataaaatggaagcatggtattcttttctttatgtaattgatggttattgaaaggtacttgtgaagaaaattattttaattggtatggagagcttgttacagtggtgtaccaaggttgggggtgagcctaccctttcgaggaggagtattttaatcaccaacattgtttagaatttcaagcagatggtgataataaaaagcagaccaacttttagttagctgtattgttagttttaaattattttcagacaatacactattgcccacacatgggatggactctcctaccgcccctacccccttggtacatggctggcttggtattaaagaaattcactgtaaaatctttttagaaagtgagccattttgtaatgatgaagatgttaggacttcaaaggatttttctttactcgattagttttgtttatcaaatgatttctttaaatcgattatatatatatatggaatatttcaaaattcaaactgtcacattaagaaacatgataacctaaatgacctaaataagaacactgtacctaaaataaagaggcaacttta

SEQ ID NO: 165648 - DNA, 565 bp, Homo sapiens
  Payload ID: 12608
  Gene Symbol: PLA2G1B
  Gene Name: phospholipase A2, group IB (pancreas)
  Uniprot ID: P04054
  ENST ID: ENST00000308366
  CDS Start-End: 37-483
tggtcatctcagttcttttctcaccttgactgcaagatgaaactccttgtgctagctgtgctgctcacagtggccgccgccgacagcggcatcagccctcgggccgtgtggcagttccgcaaaatgatcaagtgcgtgatcccggggagtgaccccttcttggaatacaacaactacggctgctactgtggcttggggggctcaggcacccccgtggatgaactggacaagtgctgccagacacatgacaactgctatgaccaggccaagaagctggacagctgtaaatttctgctggacaacccgtacacccacacctattcatactcgtgctctggctcggcaatcacctgtagcagcaaaaacaaagagtgtgaggccttcatttgcaactgcgaccgcaacgctgccatctgcttttcaaaagctccatataacaaggcacacaagaacctggacaccaagaagtattgtcagagttgaatatcacctctcaaaagcatcacctctatctgcctcatctcacactgtactctccaataaagcaccttgttgaaagacctca

SEQ ID NO: 165649 - DNA, 423 bp, Homo sapiens
  Payload ID: 12608
  Gene Symbol: PLA2G1B
  Gene Name: phospholipase A2, group IB (pancreas)
  ENST ID: ENST00000423423
  CDS Start-End: 27-239
agttcttttctcaccttgactgcaagatgaaactccttgtgctagctgtgctgctcacagtggccgccgccgacagcggcatcagccctcgggccgtgtggcagttccgcaaaatgatcaagtgcgtgatcccggggagtgaccccttcttggaatacaacaactacggctgctactgtggcttggggggctcaggcacccccgtggatgaactggacaagcaaaaacaaagagtgtgaggccttcatttgcaactgcgaccgcaacgctgccatctgcttttcaaaagctccatataacaaggcacacaagaacctggacaccaagaagtattgtcagagttgaatatcacctctcaaaagcatcacctctatctgcctcatctcacactgtactctccaataaagcaccttgttgaaagac

SEQ ID NO: 165650 - DNA, 562 bp, Homo sapiens
  Payload ID: 12608
  Gene Symbol: PLA2G1B
  Gene Name: phospholipase A2, group IB (pancreas)
  ENST ID: ENST00000549767
  CDS Start-End: 127-486
gagggagcaggaaggcagtgtgtccccggggtgctggcagaccgatttgaactctggctatgtcttcttgcagtggccgccgccgacagcggcatcagccctcgggccgtgtggcagttccgcaaaatgatcaagtgcgtgatcccggggagtgaccccttcttggaatacaacaactacggctgctactgtggcttggggggctcaggcacccccgtggatgaactggacaagtgctgccagacacatgacaactgctatgaccaggccaagaagctggacagctgtaaatttctgctggacaacccgtacacccacacctattcatactcgtgctctggctcggcaatcacctgtagcagcaaaaacaaagagtgtgaggccttcatttgcaactgcgaccgcaacgctgccatctgcttttcaaaagctccatataacaaggcacacaagaacctggacaccaagaagtattgtcagagttgaatatcacctctcaaaagcatcacctctatctgcctcatctcacactgtactctccaataaagcaccttgttgaaag

SEQ ID NO: 165651 - DNA, 970 bp, Homo sapiens
  Payload ID: 12609
  Gene Symbol: PLA2G2A
  Gene Name: phospholipase A2, group IIA (platelets, synovial fluid)
  Uniprot ID: P14555
  ENST ID: ENST00000375111
  CDS Start-End: 273-707
gaaggaaaaagagcaacagatccagggagcattcacctgccctgtctccaaacagccttgtgcctcacctacccccaacctcccagagggagcagctatttaaggggagcaggagtgcagaacaaacaagacggcctggggatacaactctggagtcctctgagagagccaccaaggaggagcaggggagcgacggccggggcagaagttgagaccacccagcagaggagctaggccagtccatctgcatttgtcacccaagaactcttaccatgaagaccctcctactgttggcagtgatcatgatctttggcctactgcaggcccatgggaatttggtgaatttccacagaatgatcaagttgacgacaggaaaggaagccgcactcagttatggcttctacggctgccactgtggcgtgggtggcagaggatcccccaaggatgcaacggatcgctgctgtgtcactcatgactgttgctacaaacgtctggagaaacgtggatgtggcaccaaatttctgagctacaagtttagcaactcggggagcagaatcacctgtgcaaaacaggactcctgcagaagtcaactgtgtgagtgtgataaggctgctgccacctgttttgctagaaacaagacgacctacaataaaaagtaccagtactattccaataaacactgcagagggagcacccctcgttgctgagtcccctcttccctggaaaccttccacccagtgctgaatttccctctctcataccctccctccctaccctaaccaagttccttggccatgcagaaagcatccctcacccatcctagaggccaggcaggagcccttctatacccacccagaatgagacatccagcagatttccagccttctactgctctcctccacctcaactccgtgcttaaccaaagaagctgtactccggggggtctcttctgaataaagcaattagcaaa

SEQ ID NO: 165652 - DNA, 974 bp, Homo sapiens
  Payload ID: 12609
  Gene Symbol: PLA2G2A
  Gene Name: phospholipase A2, group IIA (platelets, synovial fluid)
  Uniprot ID: P14555
  ENST ID: ENST00000400520
  CDS Start-End: 271-705
aggggtatgggcgaccaatcctgagtccaccaactgaccacgcccatccccagccttgtgcctcacctacccccaacctcccagagggagcagctatttaaggggagcaggagtgcagaacaaacaagacggcctggggatacaactctggagtcctctgagagagccaccaaggaggagcaggggagcgacggccggggcagaagttgagaccacccagcagaggagctaggccagtccatctgcatttgtcacccaagaactcttaccatgaagaccctcctactgttggcagtgatcatgatctttggcctactgcaggcccatgggaatttggtgaatttccacagaatgatcaagttgacgacaggaaaggaagccgcactcagttatggcttctacggctgccactgtggcgtgggtggcagaggatcccccaaggatgcaacggatcgctgctgtgtcactcatgactgttgctacaaacgtctggagaaacgtggatgtggcaccaaatttctgagctacaagtttagcaactcggggagcagaatcacctgtgcaaaacaggactcctgcagaagtcaactgtgtgagtgtgataaggctgctgccacctgttttgctagaaacaagacgacctacaataaaaagtaccagtactattccaataaacactgcagagggagcacccctcgttgctgagtcccctcttccctggaaaccttccacccagtgctgaatttccctctctcataccctccctccctaccctaaccaagttccttggccatgcagaaagcatccctcacccatcctagaggccaggcaggagcccttctatacccacccagaatgagacatccagcagatttccagccttctactgctctcctccacctcaactccgtgcttaaccaaagaagctgtactccggggggtctcttctgaataaagcaattagcaaatcatgt

SEQ ID NO: 165653 - DNA, 453 bp, Homo sapiens
  Payload ID: 12610
  Gene Symbol: PLA2G2C
  Gene Name: phospholipase A2, group IIC
  ENST ID: ENST00000247992
  CDS Start-End: 1-453
atgctcattgcaacttccttcttcctttttttctcatcggtggtggcagcccccacccacagcagtttctggcagtttcagaggagggtcaaacacatcacggggcgaagtgccttcttctcatattacggatatggctgctactgtgggcttggggataaagggatccccgtggatgacactgacagcccctcatctccctctccctacgagaagctgaaggagttcagctgccagcctgtgttgaacagctaccagttccacatcgtcaatggcgcagtggtttgtggatgcacccttggtcctggtgccagctgccactgcaggctgaaggcctgtgagtgtgacaagcaatccgtgcactgcttcaaagagagcctgcccacctatgagaaaaacttcaagcagttctccagccagcccaggtgtggcagacataagccctggtgctag

SEQ ID NO: 165654 - DNA, 3249 bp, Homo sapiens
  Payload ID: 12610
  Gene Symbol: PLA2G2C
  Gene Name: phospholipase A2, group IIC
  Uniprot ID: Q5R387
  ENST ID: ENST00000429261
  CDS Start-End: 62-511
acccctcacacacaggtgaaggcgtggctgtagaacctcagaccccctggtctcctcaggaatgaaggtcattgccatcctcaccctcctcctcttctgctcccccacccacagcagtttctggcagtttcagaggagggtcaaacacatcacggggcgaagtgccttcttctcatattacggatatggctgctactgtgggcttggggataaagggatccccgtggatgacactgacaggcacagcccctcatctccctctccctacgagaagctgaaggagttcagctgccagcctgtgttgaacagctaccagttccacatcgtcaatggcgcagtggtttgtggatgcacccttggtcctggtgccagctgccactgcaggctgaaggcctgtgagtgtgacaagcaatccgtgcactgcttcaaagagagcctgcccacctatgagaaaaacttcaagcagttctccagccagcccaggtgtggcagacataagccctggtgctagggacaccacagggtccctctcatcatccagcatccgctctagtgttgctcttccaggaagccttctcagatcatccccaacaggcccctgttcttccactgggagggaggacaaaatgtctcccgcagggcagctcacccttcagcattctgaccaaggggactccctgtcgttcagcatcagagggctggagagcagaaatgggaaagatgagatgcctgccctgcaggagctggcattctgtggagtggggaggactacaaatgcatggatatagaagtaagagacacattagactgtagtaagtgctatgatgcagtaaaacaaagggacgggatagagatgcacccaaccccacatcccagggtttccaggaggggagaagccccaggatctaccccaaactctctcttcacccccactgcaaaccgggacacagagcagacttgagcgccaggcccatgcccagctctagctggcaacaaagccaccactttccttgcccctctgcgtcctcagtttttatgatgtcattcttagcttttcttatcaagaggcagaatctgttttccccatcccatgaatctgaactggtcttgtggcttagtttggtcaatagaatgttgtgggagggatggtttaccagttttgagctaggcctcaggaggtctagggcatgtctactctctcttaggacagctgcccccaccctgcaaaaaagcctgggctagcctgctggaggatgagagcccacctggatcagttgtctcagctgatttcagacacgtgagagagagctcagcgagactcagcttgtagctgactacagatgtgtgagggaacctggctgagaccaaaacaactgtccagctgagcccaggctaaactgccaacatgcagaattgtgagctaaataaaggctgctgttctaagtcactgggttttggtatggtttgttaggcagccataactaacaggtgtaattggtccttattcccttattcactgagagtgatgggttctcagccctgagctggacttggaggccatggaaatgcagtggacatggcctttgttccttaccttgaaggtgtggaaggaggtcaagttcatggaataatggagaacacacagctgtaatcgtttgcttgttcagggaacacacatttattgagcacttgctatgtgccaggcacagtgccaggcagtagggatccagatatttaaagaaaacaaacaaaaatcaggtccaaaactcctggggagaatgctgagagtggtatcagcttttaggaattcagacacaaaatctggattgaaaaatggacagatgtgaagacagaaaaagacaccagatgtggagtgtcagtggagggtctgggggcccaggctcctgcgctctggctggctcagcttgtactatcatgtgggtgactggcctgctcttctgtcccacacacatgggtggaaattgcaactgcagatgggcagcttgaggtttacgaacatcagggagactgtaagccggccatgagggaagcagctgtagaaaggtgggcatggaaccaaggtggccaggcccaagccagcaggcacccccccaccttggggatcctgaccactgcagagaccagctccagactgtgaaggtgcctggctgaccgacacaatggaggaagaggggtgagggccaggcttagggtgggggatagggttcccgtgtgagatccaggccgtgtttttaaaaaaaatttttgagacagagtctcactctgtcatccaggatggagggccatggcacgatcgcagctcactgcaacctccacctcctgggtgcaagtgattctcctgcctcagcctcccaagtatctgggattacaagcgcccaccaccatgcccagctaatttttgtatttctagtagagacagggtttcatcatgctggccaggctggtctggaactcctgacctcaactgatccacccacctcagcctcccaaagtgctgggattacaggcatgagccactgcacccagccccaggccatctttttcactccctcctctcttccatcccctaaatctataagacagaaatgatgggcccttgatggtatgcaagccccatttgtttggcattgatgccctgattcttggagagctgagatgggagtgtagaagaatgggcagactctctctgggaaagcctactgtcctcgaagggaaatcatccattccatgagcacatgttactgaagacctactccaagccaggccctctgcaccagactccacggagctcttggaccaaagggaaaacaagtaagcaggggattgcagaacaagctgggggtgccaggattggggtgggcatggggagcaatgcccacctcctggaggatgagggaagctttcctgaggactgctgggggtctgacatctcatctgagacttgaagatgaggaggagttaggagggccggtggggccatgcagagcctcccaggttgaggtctggagaaaagcagcatatgtctatgcaagctccttgtccacctgccttgcccatctctgctgaaggctctttatcatttgtccctgcagcccaaaaacctgggtgttgaattatcatattccacatcccacacccaatctgttggcactaccttcacaatgcatctagattctgtatttataaaatgcttccatcaaatgtttacatggaaaaaaaaaaagagag

SEQ ID NO: 165655 - DNA, 2672 bp, Homo sapiens
  Payload ID: 12611
  Gene Symbol: PLA2G2D
  Gene Name: phospholipase A2, group IID
  Uniprot ID: Q9UNK4
  ENST ID: ENST00000375105
  CDS Start-End: 60-497
gggcagcctgcatggaaagggactgccagcatctgcctccactgctctgtgctgggatcatggaacttgcactgctgtgtgggctggtggtgatggctggtgtgattccaatccagggcgggatcctgaacctgaacaagatggtcaagcaagtgactgggaaaatgcccatcctctcctactggccctacggctgtcactgcggactaggtggcagaggccaacccaaagatgccacggactggtgctgccagacccatgactgctgctatgaccacctgaagacccaggggtgcagcatctacaaggactattacagatacaacttttcccaggggaacatccactgctctgacaagggaagctggtgtgagcagcagctgtgtgcctgtgacaaggaggtggccttctgcctgaagcgcaacctggacacctaccagaagcgactgcgtttctactggcggccccactgccgggggcagacccctgggtgctagaagcccacaccctctaccctgttcctcagcatggagctctggcatccccacctcagtatctaacctgaaccagcctggcttttcaaacactccggggggaggtagtcccagcctcccccggaaccctctaccaatgccttctgaccttctgaagctttccgaatcctcccagttgaggcagtagctgtgtcctctgagggtggatgggaatcttgggagaagcccaagcaagggagccctcagaggtggtgtttggaccaaagcatcggggtgggggaggggtctgccgctgtcccccacctgctggcccccttgtccttcctcaccccctccaatatagtctcggagctacaaccgcagcagccactataaagggcaatattgatctttctgtccatgtggctctatcttttaaaacctcaaggccctccactgtcctaagataaagcctctcataggcactggggaccctgcacagtctggccatgtgaccctctccccaggcaagctctgaagtccctgcaggtggaggccatgcctgtcttaaactcagttgcatccctggtgcccaaagcaacaccagaaccaagaaggagctccataaatccttcttgggtgaagcctagacaaagccgccaggtcttgtggctccaggcaccagagccttgagtactttctcctgcctccaggcattggctcagggtgaattacaaggggctactgaatggctattactttcatcacgactgatccccacctcctcagggtcaaagggctactttctggaagtctccccaggctgactccttctccctgactgcaagggctcactccctcctccaagctcccacaatgcttcatggctctgccgcttacctagcttggcctagagtggcaaatggaacttctctgatctcccccaactagactggagcccccgaaggatggagaccatgtctgtgccatctctgtttcccctgttttcccacatactaggtgctcaattcatgcctgtgaatggcgtgagcccataatggatacacagaggttgcagcagatggtgtgggtacctcacccagatatcatccaggcccaaggcccctctccctgagtgaggccaggtgttggcagccaactgctccaatctgcctccttcccctaaatactgccctggtctagtgggagctgccttccccctgccccacctctcccaccaagaggccacctgtcactcatggccaggagagtgacaccatggagggtacaattgccagctcccccgtgtctgtgcaggattgtctgggttgaatgacactctcaaattgttcctgggatcgggctgaggccaggcctctcctggaaccacctctctgcttggtctgaccccttggcctatccagttttcctggttccctcacaggtttctccagaaagtactccctcagtaaagcatttgcacaagaatccttgtctcaggctctgcttctaaggaaagagactgaagagggacaactttttcctatgaggactcccaatctgccatttgtgtgtggctagctgtttccagccagggggctgaggcacctgcagtcacccacactctgggcctgtggcaccatctgtgcctcagctgactgagcagttctgagatgtggtgactcatgtgaagtggtgtcataggaatgaaggactgtgggcgctgggttcaaattccagttctatgcaccactccaggtagggatacccatgggggcagctgtgcctgtgtgggggaacagggtagggaaatctccataccttctcaattttgctgtgaacctaaaactgccatataaagataaagtctaggccaggcatggtggctcatgcctgtaatcccaacacttagggtggctgaggcaggcagatcacctggggtcaggagttcaagaccagcctgcccaacatggcaaaacctcgtctctactaaaaatacaaaaattagccaggcatcgtggtgggtgcctgtaatcccagctattcaggaggctgaggcaggagaatcacttggacctgggaggcagaggtttcagtgagcccagatcgcgacactgcactccagcctgggcaacagagtgacactctgtctcaaaaaataaaataaaataaaataaaataaaataaaataaaataaaa

SEQ ID NO: 165656 - DNA, 1856 bp, Homo sapiens
  Payload ID: 12611
  Gene Symbol: PLA2G2D
  Gene Name: phospholipase A2, group IID
  ENST ID: ENST00000617227
  CDS Start-End: 69-257
gatataagggggcagcctgcatggaaagggactgccagcatctgcctccactgctctgtgctgggatcatggaacttgcactgctgtgtgggctggtggtgatggctggtgtgattccaatccagggcgggatcctgaacctgaacaagatggtcaagcaagtgactgggaaaatgcccatcctctcctactggccctacggctgtcactgcggactaggtggcagaggccaacccaaagatgccacggactgctgacaagggaagctggtgtgagcagcagctgtgtgcctgtgacaaggaggtggccttctgcctgaagcgcaacctggacacctaccagaagcgactgcgtttctactggcggccccactgccgggggcagacccctgggtgctagaagcccacaccctctaccctgttcctcagcatggagctctggcatccccacctcagtatctaacctgaaccagcctggcttttcaaacactccggggggaggtagtcccagcctcccccggaaccctctaccaatgccttctgaccttctgaagctttccgaatcctcccagttgaggcagtagctgtgtcctctgagggtggatgggaatcttgggagaagcccaagcaagggagccctcagaggtggtgtttggaccaaagcatcggggtgggggaggggtctgccgctgtcccccacctgctggcccccttgtccttcctcaccccctccaatatagtctcggagctacaaccgcagcagccactataaagggcaatattgatctttctgtccatgtggctctatcttttaaaacctcaaggccctccactgtcctaagataaagcctctcataggcactggggaccctgcacagtctggccatgtgaccctctccccaggcaagctctgaagtccctgcaggtggaggccatgcctgtcttaaactcagttgcatccctggtgcccaaagcaacaccagaaccaagaaggagctccataaatccttcttgggtgaagcctagacaaagccgccaggtcttgtggctccaggcaccagagccttgagtactttctcctgcctccaggcattggctcagggtgaattacaaggggctactgaatggctattactttcatcacgactgatccccacctcctcagggtcaaagggctactttctggaagtctccccaggctgactccttctccctgactgcaagggctcactccctcctccaagctcccacaatgcttcatggctctgccgcttacctagcttggcctagagtggcaaatggaacttctctgatctcccccaactagactggagcccccgaaggatggagaccatgtctgtgccatctctgtttcccctgttttcccacatactaggtgctcaattcatgcctgtgaatggcgtgagcccataatggatacacagaggttgcagcagatggtgtgggtacctcacccagatatcatccaggcccaaggcccctctccctgagtgaggccaggtgttggcagccaactgctccaatctgcctccttcccctaaatactgccctggtctagtgggagctgccttccccctgccccacctctcccaccaagaggccacctgtcactcatggccaggagagtgacaccatggagggtacaattgccagctcccccgtgtctgtgcaggattgtctgggttgaatgacactctcaaattgttcctgggatcgggctgaggccaggcctctcctggaaccacctctctgcttggtctgaccccttggcctatccagttttcctggttccctcacaggtttctccagaaagtactccctcagtaaagcatttgc

SEQ ID NO: 165657 - DNA, 785 bp, Homo sapiens
  Payload ID: 12612
  Gene Symbol: PLA2G2E
  Gene Name: phospholipase A2, group IIE
  Uniprot ID: Q9NZK7
  ENST ID: ENST00000375116
  CDS Start-End: 59-487
ctgctttcttctgctgccttttatgctccttgtgcacctcccttccccccaacctgggatgaaatctccccacgtgctggtgttcctttgcctcctggtggctctggtcaccgggaacctggttcagtttggggtgatgatcgagaagatgacaggcaagtccgccctgcagtacaacgactatggctgttactgcggcatcggtggctcccactggccggtggaccagactgactggtgctgccacgcccacgactgctgctacgggcgtctggagaagctgggctgtgagcccaaactggaaaagtatcttttctctgtcagcgaacgtggcattttctgcgccggcaggaccacctgccagcggctgacctgcgagtgtgacaagagggctgccctctgctttcgccgcaacctgggcacctacaaccgcaaatatgcccattatcccaacaagctgtgcaccgggcccaccccgccctgctgaggctatgctcggcctcccccccgtccctggaggtcccgcctcgggctgctgtagtcccaggcctggggaacattggcaccaaaggccctccctttggaaaattcctttcctgcaaactcatccctccttgagagctcagagatatgtcctggaccatcactagcctcccaggctaccccttctctgtagaaagaaccctgccccaggagccatggacccttcagcacccagaagactgtcactagcttctgggatctcagctccctcttctgaataagtgaataatgttttcccataa

SEQ ID NO: 165658 - DNA, 2723 bp, Homo sapiens
  Payload ID: 12613
  Gene Symbol: PLA2G2F
  Gene Name: phospholipase A2, group IIF
  Uniprot ID: Q9BZM2
  ENST ID: ENST00000375102
  CDS Start-End: 103-738
agtgtgcgaggcagcgtgaagctggggcctgctccccgcagcctctggagcgcatctcagaccttctgagacctatgttgctggccccccagaacccgcaacatggcagatggggcaaaggccaaccccaaagggttcaaaaagaaggtgctggatagatgcttctctgggtggaggggcccacgcttcggggcctcctgtccttcaagaacctccaggtctagcctgggtatgaagaagttcttcaccgtggccatccttgctggcagcgttctgtccacagctcacggcagcctgctcaacctgaaggccatggtggaggccgtcacagggaggagcgccatcctgtccttcgtgggctacggttgctactgtgggctggggggccgtggccagcccaaggatgaggtggactggtgctgccacgcccacgactgctgctaccaggaactctttgaccaaggctgtcacccctatgtggaccactatgatcacaccatcgagaacaacactgagatagtctgcagtgacctcaacaagacagagtgtgacaagcagacatgcatgtgtgacaagaacatggttctgtgcctcatgaaccagacgtaccgagaggagtaccgtggcttcctcaatgtctactgccagggccccacgcccaactgcagcatctatgaaccgccccctgaggaggtcacctgcagtcaccaatccccagcgccccccgcccctccctagagcctctgaggtttgagagagagagcgggaggagggtctggcttggggaccagacgaggtgcagggagggtaggagccaggccaggagcctgagggttgctggttgcctcctccctggagctctccagtgagggctcagctctcagaggactcaggaaggcctgggtcctgactcccccagcccagccccaggcatgggtgcctcctgctgctggttctggactgggtgggaggcacggagcttataggggtctctcctgagggtggccggggagacctgagagagaggaggaggggcctctgagtggggcctctgttgctggcgccagtttaactccccggagccttagaaagtctgagccttagaaagtctgggcctgagcatccaggcccagagctggatgcatcctcggcccaagatcacaggaaggcagattgctggtcacaaagcatgggttccgggagcccctcagctgatcccacaggatggcctggggtggtggctactttgggcttgaagctctctagagccccattcacagagcaggtgccccaccccagccctcactgaggtggccatgagtccaggttcagaccctaggggatgtgcagtgctgagtgtcccagccctgaagtctagcctcagagcaggctcctgggcactgacagagccacacacccaggtacaccccccaggctaatatggggacacacaaaaatatggccttcaacacctacaagtcttctctgtgtcccccatcgacccatgcacatcaccccaaccctgctctgccacaccacgtgggtctgaggagcactcctaccccccggctccgggtccctgacagacactgccctcctggcctgcacctggaatggcagccagaacactggagggggacccacaccctctctccctgggctgtggatgggtgttgcaagtcccatccctcctggcctgcacctggaacagcagccagaacaccggagggggacccacaccctctctccctgggctgtgggcaggcgtcacaagtcccattggtggggaagaggctgagggctgagacccacctcagtgaagagggaaacgtaagcagggagagcatcaaggcgggaggcagcctggaaacttctagaagagggtcaaggtaggaggctacatggaagcttctagaaggcagtaaggaacagggtggtgaaggagaggggagaagatgggagcatggagagacgaggtgagtgacagccaccagcagggacgggcctccaggcaacacagaggagctgggggccagggccttacggggctgggttcctgtgtggggcgtggagctggggctgaagtggaggggacggccctgcggcccccagcactgttgtttctccaggtgcaccttaccttcctccttacctgcccgagcctcaactcagggtcagcagcctccacggagccagccccacctgcccgaaaaccactgaagccaccctccgcccggactcaacagccgccagcaagctcgcctggcagtgcccctggagcaccattgtcgctggggagggagagccgggaagggtggagaaggaggcagaagggacatgtatgaaaaaaggacaggaaacctgaccagaggcggtttccagagccccagccttggagacaaggacactgccacccagcgccacagtcagtctgggaggggcccacgccccccaccccccatgccacactgccgcctcttgctggccatggttctccggcttgggggaacgcaggttcccagctgcgcccctcccccgcgcacacacaccctcccctgtccctcggaaagactaggccagggtctggggatgggattctgctgccaggggtcctgcctgcccccactcaccccagacgcttcggatgctgcagctcctggataatctccacaggactcggcttcctctcctcaaatgaataaaggcctcctacctcaactccc

SEQ ID NO: 165659 - DNA, 2697 bp, Homo sapiens
  Payload ID: 12614
  Gene Symbol: PLA2G3
  Gene Name: phospholipase A2, group III
  Uniprot ID: Q9NZ20
  ENST ID: ENST00000215885
  CDS Start-End: 254-1783
atgggggcgtgggccctggcaagtgcactcctcagccaatcagcgtcctgcccggctggtggattcggttacaagcccaagatcaccccatactccagcctctttcctcctcctcccgcagctccattcattggtcccgccgcaccgggcctgctgggctccgcttccgttccactgctcagctgccgcctggtggggccaccaagggcaggcatcccaggggctttgtctgactggactgggccagtgcagaatgggggttcaggcagggctgtttgggatgctgggcttcctgggggtggccctggggggctcccctgccctccgctggtacaggacctcctgccacttgaccaaggccgtccctggcaacccactggggtacctgagcttcctggccaaggatgctcagggactggccctgatccatgcccgctgggatgcgcataggaggctgcagtcatgtagctgggaggatgagccggagctcaccgcagcctacggtgctctctgtgctcatgagactgcctggggctccttcatccacacccccggacccgagctgcagagagcactggccactcttcagagtcagtgggaggcatgccgagcgcttgaggagagtccagcaggggccaggaagaagcgagcagcagggcagagtggagtccctggtggagggcaccagcgagagaagagaggatggaccatgcctggcacactgtggtgtggagttggagattctgctgggaactcctcggagctgggggtcttccagggacctgatctctgttgccgggaacatgaccgctgcccacagaacatctcacccttgcagtacaactatggcatccgaaactaccgattccacaccatctcccactgtgactgtgacaccaggtttcagcaatgcctacagaatcagcacgactccatctcggacatcgtgggcgtggccttcttcaacgtgctggagatcccctgctttgtgctggaggagcaggaggcgtgtgtggcgtggtactggtggggcgggtgtaggatgtacggcacagtgcccctcgctcgcctgcagcccaggaccttctacaatgcctcctggagctcccgggccacctccccaactcccagctcccggagcccagcccctcccaagcctcgacagaagcagcaccttcggaaggggccaccacatcagaaagggtccaagcgccccagcaaagccaacaccacagccctccaggaccctatggtctctcccaggcttgatgtggcccccacaggcctccagggcccacagggtggcctaaaacctcagggtgcccgctgggtctgccgcagcttccgccgccacctggaccagtgtgagcaccagattgggccccgggaaatcgagttccagctgctcaacagcgcccaagagcccctcttccactgcaactgcacgcgccgtctggcacgcttcctgaggctccacagcccacccgaggttaccaacatgctttgggagctgctgggcacaacctgcttcaagctggcccctccactggactgtgtggaaggcaaaaactgttccagagaccctagggccatcagggtgtcagcccggcacttgcggaggcttcagcagaggcgacaccagctccaggataaaggcacagatgagaggcagccatggccttcagagcccctgagaggccccatgtcattctacaaccagtgcctgcagctaacccaggcagccaggagacccgacaggcagcagaagtcctggagccagtgacctcagtttcagctttcctgggcaccagcctggaccttgcccatggctatgccaagccttgggaatctcagcctcccctccgtaggttagactgaagcatggcagaggctgttgtggacaatcaagaggatgaatggggggatctcaaggcccaaatgctggaccacatctcctgctgttctgggtaaccttgagctatgtatgacacaactcttctatgcctggatgtggtgttcaggaagctcattctgatgccctgggctttggccttgccagggaacttcacatacagatgagaatggggaaagggtaacttattgcagcagccccaggcagtaccaggaggaggtacatgtatgtccgtgttgcaaaaataatacatgcctcaaaaacctgcctaggggagccctagtgcctgggtgctgtggcctgaggtagcaggtgggaagttagggatgtcacagaaatgtctgtgtctgaatccaggattggggtgggtgttggagagggctttcagctcccctcctcccaggggggcctctttttttaacggctgccgtgcccttcctggcccagccctaaacctaaattcaaatctcctccatgcctttgcgcaaaggacctccctcttgcactctaagccttagtttcctcctctaaaaaaagggggtctctaaacaggagctacctcatagggttgttgaggattaagtgaaccaatacatatacagtgcttagcacttaataagtattcccccctgcgacacctagctgaactatggtttggtgtctgatcttgagaggttgatgtaaccttttaaaggcctcagttcgctcacctgtgaaatgggtctaagaatagcactgatctcacagggttgtgatgcagattaaaggagatggcatgtgtaatg

SEQ ID NO: 165660 - DNA, 2875 bp, Homo sapiens
  Payload ID: 12615
  Gene Symbol: PLA2G4A
  Gene Name: phospholipase A2, group IVA (cytosolic, calcium-dependent)
  Uniprot ID: P47712
  ENST ID: ENST00000367466
  CDS Start-End: 153-2402
aggataagactttctctaagtccggagctgaaaaaggatcctgactgaaagctagaggcattgaggagcctgaagattctcaggttttaaagacgctagagtgccaaagaagactttgaagtgtgaaaacatttcctgtaattgaaaccaaaatgtcatttatagatccttaccagcacattatagtggagcaccagtattcccacaagtttacggtagtggtgttacgtgccaccaaagtgacaaagggggcctttggtgacatgcttgatactccagatccctatgtggaactttttatctctacaacccctgacagcaggaagagaacaagacatttcaataatgacataaaccctgtgtggaatgagacctttgaatttattttggatcctaatcaggaaaatgttttggagattacgttaatggatgccaattatgtcatggatgaaactctagggacagcaacatttactgtatcttctatgaaggtgggagaaaagaaagaagttccttttattttcaaccaagtcactgaaatggttctagaaatgtctcttgaagtttgctcatgcccagacctacgatttagtatggctctgtgtgatcaggagaagactttcagacaacagagaaaagaacacataagggagagcatgaagaaactcttgggtccaaagaatagtgaaggattgcattctgcacgtgatgtgcctgtggtagccatattgggttcaggtgggggtttccgagccatggtgggattctctggtgtgatgaaggcattatacgaatcaggaattctggattgtgctacctacgttgctggtctttctggctccacctggtatatgtcaaccttgtattctcaccctgattttccagagaaagggccagaggagattaatgaagaactaatgaaaaatgttagccacaatccccttttacttctcacaccacagaaagttaaaagatatgttgagtctttatggaagaagaaaagctctggacaacctgtcacctttactgatatctttgggatgttaataggagaaacactaattcataatagaatgaatactactctgagcagtttgaaggaaaaagttaatactgcacaatgccctttacctcttttcacctgtcttcatgtcaaacctgacgtttcagagctgatgtttgcagattgggttgaatttagtccatacgaaattggcatggctaaatatggtacttttatggctcccgacttatttggaagcaaattttttatgggaacagtcgttaagaagtatgaagaaaaccccttgcatttcttaatgggtgtctggggcagtgccttttccatattgttcaacagagttttgggcgtttctggttcacaaagcagaggctccacaatggaggaagaattagaaaatattaccacaaagcatattgtgagtaatgatagctcggacagtgatgatgaatcacacgaacccaaaggcactgaaaatgaagatgctggaagtgactatcaaagtgataatcaagcaagttggattcatcgtatgataatggccttggtgagtgattcagctttattcaataccagagaaggacgtgctgggaaggtacacaacttcatgctgggcttgaatctcaatacatcttatccactgtctcctttgagtgactttgccacacaggactcctttgatgatgatgaactggatgcagctgtagcagatcctgatgaatttgagcgaatatatgagcctctggatgtcaaaagtaaaaagattcatgtagtggacagtgggctcacatttaacctgccgtatcccttgatactgagacctcagagaggggttgatctcataatctcctttgacttttctgcaaggccaagtgactctagtcctccgttcaaggaacttctacttgcagaaaagtgggctaaaatgaacaagctcccctttccaaagattgatccttatgtgtttgatcgggaagggctgaaggagtgctatgtctttaaacccaagaatcctgatatggagaaagattgcccaaccatcatccactttgttctggccaacatcaacttcagaaagtacagggctccaggtgttccaagggaaactgaggaagagaaagaaatcgctgactttgatatttttgatgacccagaatcaccattttcaaccttcaattttcaatatccaaatcaagcattcaaaagactacatgatcttatgcacttcaatactctgaacaacattgatgtgataaaagaagccatggttgaaagcattgaatatagaagacagaatccatctcgttgctctgtttcccttagtaatgttgaggcaagaagatttttcaacaaggagtttctaagtaaacccaaagcatagttcatgtactggaaatggcagcagtttctgatgctgaggcagtttgcaatcccatgacaactggatttaaaagtacagtacagatagtcgtactgatcatgagagactggctgatactcaaagttgcagttacttagctgcatgagaataatactattataagttaggttgacaaatgatgttgattatgtaaggatatacttagctacattttcagtcagtatgaacttcctgatacaaatgtagggatatatactgtatttttaaacatttctcaccaactttcttatgtgtgttctttttaaaaattttttttcttttaaaatatttaacagttcaatctcaataagacctcgcattatgtatgaatgttattcactgactagatttattcataccatgagacaacactatttttatttatatatgcatatatatacatacatgaaataaatacatcaatataaaaataa

SEQ ID NO: 165661 - DNA, 2985 bp, Homo sapiens
  Payload ID: 12616
  Gene Symbol: PLA2G4B
  Gene Name: phospholipase A2, group IVB (cytosolic)
  Uniprot ID: P0C869
  ENST ID: ENST00000452633
  CDS Start-End: 353-2698
agacggggtttcaccgtgttagccagtatggtcttgatctcctgacctcgtgatccacctgcctcggcctcccaaaagtgctgggattacaggtgtgagctgctgcgcctggcttatgagtcgtatgttctgatcctccctcttgaagttgccttctgtggtctaaggagggcctgaaggttcaggtggctggttcaggagtgggtgtggagcttaggtggagcagaggcggcgggtaggagggacttgggaccaattgggacatcacatccctggctctgggttagaaagctgacagtccttgatcctgtggccactgccccatcattcctgctcctgaggactcagtctcatggctgtggcagaggtgtccaggacctgcctgctcacggttcgtgtcctgcaggcccatcgcctaccctctaaggacctagtgaccccctctgactgctacgtgactctctggctgcccacggcctgcagccacaggctccagacacgcacggtcaagaacagcagtagccctgtctggaaccagagctttcacttcaggatccacaggcagctcaagaatgtcatggaactgaaagtctttgaccaggacctggtgaccggagatgaccctgtgttgtcagtactgtttgatgcggggactctgcgggctggggagttccggcgcgagagcttctcactgagccctcagggtgaggggcgcctggaagttgaatttcgcctgcagagtctggctgaccgtggcgagtggctcgtcagcaatggcgttctggtggcccgggagctctcctgcttgcacgttcaactggaggagacaggagaccagaagtcctcagagcacagagttcagcttgtggttcctgggtcctgtgagggtccgcaggaggcctctgtgggcactggcaccttccgcttccactgcccagcctgctgggagcaggagctgagtattcgcctgcaggatgcccccgaggagcaactaaaggcgccactgagtgccctgccctctggtcaagtggtgaggcttgtcttccccacgtcccaggagcccctgatgagagtggagctgaaaaaagaagcaggactgagggagctggccgtgcgactgggcttcgggccctgtgcagaggagcaggccttcctgagcaggaggaagcaggtggtggccgcggccttgaggcaggccctgcagctggacggagacctgcaggaggatgagatcccagtggtagctattatggccactggtggtgggatccgggcaatgacttccctgtatgggcagctggctggcctgaaggagctgggcctcttggattgcgtctcctacatcaccggggcctcgggctccacctgggccttggccaacctttatgaggacccagagtggtctcagaaggacctggcagggcccactgagttgctgaagacccaggtgaccaagaacaagctgggtgtgctggcccccagccagctgcagcggtaccggcaggagctggccgagcgtgcccgcttgggctacccaagctgcttcaccaacctgtgggccctcatcaacgaggcgctgctgcatgatgagccccatgatcacaagctctcagatcaacgggaggccctgagtcatggccagaaccctctgcccatctactgtgccctcaacaccaaagggcagagcctgaccacttttgaatttggggagtggtgcgagttctctccctacgaggtcggcttccccaagtacggggccttcatcccctctgagctctttggctccgagttctttatggggcagctgatgaagaggcttcctgagtcccgcatctgcttcttagaaggtatctggagcaacctgtatgcagccaacctccaggacagcttatactgggcctcagagcccagccagttctgggaccgctgggtcaggaaccaggccaacctggacaaggagcaggtcccccttctgaagatagaagaaccaccctcaacagccggcaggatagctgagtttttcaccgatcttctgacgtggcgtccactggcccaggccacacataatttcctgcgtggcctccatttccacaaagactactttcagcatcctcacttctccacatggaaagctaccactctggatgggctccccaaccagctgacaccctcggagccccacctgtgcctgctggatgttggctacctcatcaataccagctgcctgcccctcctgcagcccactcgggacgtggacctcatcctgtcattggactacaacctccacggagccttccagcagttgcagctcctgggccggttctgccaggagcaggggatcccgttcccacccatctcgcccagccccgaagagcagctccagcctcgggagtgccacaccttctccgaccccacctgccccggagcccctgcggtgctgcactttcctctggtcagcgactccttccgggagtactcggcccctggggtccggcggacacccgaggaggcggcagctggggaggtgaacctgtcttcatcggactctccctaccactacacgaaggtgacctacagccaggaggacgtggacaagctgctgcacctgacacattacaatgtctgcaacaaccaggagcagctgctggaggctctgcgccaggcagtgcagcggaggcggcagcgcaggccccactgatggccggggcccctgccacccctaactctcattcattccctggctgctgagttgcaggtgggaactgtcatcacgcagtgcttcagagcctcgggctcaggtggcacggtcccagggtccaggctgagggctgggagctcccttgcgcctcagcagtttgcagtggggtaaggaggccaagcccatttgtgtaatcacccaaaaccccccggcctgtgcctgttttcccttctgcgctaccttgagtagttggagcacttgatacatcacagactcatacaaatgtg

SEQ ID NO: 165662 - DNA, 264 bp, Homo sapiens
  Payload ID: 12616
  Gene Symbol: PLA2G4B
  Gene Name: phospholipase A2, group IVB (cytosolic)
  ENST ID: ENST00000569354
  CDS Start-End: 1-92
tgtcattggactacaacctccacggagccttccagctgctggaggctctgcgccaggcagtgcagcggaggcggcagcgcaggccccactgatggccggggcccctgccacccctaactctcattcattccctggctgctgagttgcaggtgggaactgtcatcacgcagtgcttcagagcctcgggctcaggtggcacggtcccagggtccaggctgagggctgggagctcccttgcgcctcagcagtttgcagtggggtaag

SEQ ID NO: 165663 - DNA, 2496 bp, Homo sapiens
  Payload ID: 12617
  Gene Symbol: PLA2G4C
  Gene Name: phospholipase A2, group IVC (cytosolic, calcium-independent)
  Uniprot ID: Q9UP65
  ENST ID: ENST00000354276
  CDS Start-End: 329-1912
aagccgaggagggctgtttaaaggcgcaggggccattttacctccaggttggccctgctcaggaccaggaggaaacacctccagcccgcgacctcctcccacagggggaaaaggaaagcaggaggaccacagaagctttggcaccgaggatccccgcagtcttcacccgcggagattccggctgaaggagctgtccagcgactacaccgctaagcgcagggagcccaagcctccgcaccggattccggagcacaagctccaccgcgcatgcgcacacgccccagacccaggctcaggaggactgagaattttctgaccgcagtgcaccatgggaagctctgaagtttccataattcctgggctccagaaagaagaaaaggcggccgtggagagacgaagacttcatgtgctgaaagctctgaagaagctaaggattgaggctgatgaggccccagttgttgctgtgctgggctcaggcggaggactgcgggctcacattgcctgccttggggtcctgagtgagatgaaagaacagggcctgttggatgccgtcacgtacctcgcaggggtctctggatccacttgggcaatatcttctctctacaccaatgatggtgacatggaagctctcgaggctgacctgaaacatcgatttacccgacaggagtgggacttggctaagagcctacagaaaaccatccaagcagcgaggtctgagaattactctctgaccgacttctgggcctacatggttatctctaagcaaaccagagaactgccggagtctcatttgtccaatatgaagaagcccgtggaagaagggacactaccctacccaatatttgcagccattgacaatgacctgcaaccttcctggcaggaggcaagagcaccagagacctggttcgagttcacccctcaccacgctggcttctctgcactgggggcctttgtttccataacccacttcggaagcaaattcaagaagggaagactggtcagaactcaccctgagagagacctgactttcctgagaggtttatggggaagtgctcttggtaacactgaagtcattagggaatacatttttgaccagttaaggaatctgaccctgaaaggtttatggagaagggctgttgctaatgctaaaagcattggacaccttatttttgcccgattactgaggctgcaagaaagttcacaaggggaacatcctcccccagaagatgaaggcggtgagcctgaacacacctggctgactgagatgctcgagaattggaccaggacctccctggaaaagcaggagcagccccatgaggaccccgaaaggaaaggctcactcagtaacttgatggattttgtgaagaaaacaggcatttgcgcttcaaagtgggaatgggggaccactcacaacttcctgtacaaacacggtggcatccgggacaagataatgagcagccggaagcacctccacctggtggatgctggtttagccatcaacactcccttcccactcgtgctgcccccgacgcgggaggttcacctcatcctctccttcgacttcagtgccggagatcctttcgagaccatccgggctaccactgactactgccgccgccacaagatcccctttccccaagtagaagaggctgagctggatttgtggtccaaggcccccgccagctgctacatcctgaaaggagaaactggaccagtggtgatgcattttcccctgttcaacatagatgcctgtggaggtgatattgaggcatggagtgacacatacgacacattcaagcttgctgacacctacactctagatgtggtggtgctactcttggcattagccaagaagaatgtcagggaaaacaagaagaagatccttagagagttgatgaacgtggccgggtaggtgggagaccatagtcgctctgatgcctatgctcgttcagctctactacccgaaggatagtgcccgaagttgctgcttggcatagatgagcctcagcttccagggcactgtgggcctgttggtctactagggccctgatgtccacctggccttcctgttcttcactcccttcagccacacgcttcatggccttgagttcaccttggctgtcctaacagggccaatcaccagtgaccagctagactgtgattttgatagcgtcattcagaagaaggcgtccaaggagctgaaggtggtgaaatttgtcctgcaggtccctcgggagatcctggagctggagcatgagtgtctgacaatcagaagcatcatgtccaatgtccagatggccagaatgaatgtgatagttcagaccaatgccttccactgctcctttatgactgcacttctagccagtagctctgcacaagttagctctgtagaagtaagaacttgggcttaaatcatgggctatctctccacagccaagtggagctctgagaatacaacaagtgctcaataaatgcttgctgattgactgatggatt

SEQ ID NO: 165664 - DNA, 298 bp, Homo sapiens
  Payload ID: 12617
  Gene Symbol: PLA2G4C
  Gene Name: phospholipase A2, group IVC (cytosolic, calcium-independent)
  ENST ID: ENST00000598488
  CDS Start-End: 49-180
ggagcccaagcctccgcaccggattccggagcacaagctccaccgcgcatgcgcacacgccccagacccaggctcagagtttcactcttgttgcccagactggagtgcaatggcatgatctctgctcactggcacctccacctcctgagttcaagtgattctcctccctcagcctcctgagtagctgggattacaggcgcccgccatcatgcccaggaggactgagaattttctgaccgcagtgcaccatgggaagctctgaagtttccataattcctgggctccagaaagaagaaaa

SEQ ID NO: 165665 - DNA, 1984 bp, Homo sapiens
  Payload ID: 12617
  Gene Symbol: PLA2G4C
  Gene Name: phospholipase A2, group IVC (cytosolic, calcium-independent)
  Uniprot ID: Q9UP65
  ENST ID: ENST00000599921
  CDS Start-End: 359-1984
aaaaagctggagcaaccaagcagggcctacaagccgaggagggctgtttaaaggcgcaggggccattttacctccaggttggccctgctcaggaccaggaggaaacacctccagcccgcgacctcctcccacagggggaaaaggaaagcaggaggaccacagaagctttggcaccgaggatccccgcagtcttcacccgcggagattccggctgaaggagctgtccagcgactacaccgctaagcgcagggagcccaagcctccgcaccggattccggagcacaagctccaccgcgcatgcgcacacgccccagacccaggctcaggaggactgagaattttctgaccgcagtgcaccatgggaagctctgaagtttccataattcctgggctccagaaagaagaaaaggcggccgtggagagacgaagacttcatgtgctgaaagctctgaagaagctaaggattgaggctgatgaggccccagttgttgctgtgctgggctcaggcggaggactgcgggctcacattgcctgccttggggtcctgagtgagatgaaagaacagggcctgttggatgccgtcacgtacctcgcaggggtctctggatccacttgggcaatatcttctctctacaccaatgatggtgacatggaagctctcgaggctgacctgaaacatcgatttacccgacaggagtgggacttggctaagagcctacagaaaaccatccaagcagcgaggtctgagaattactctctgaccgacttctgggcctacatggttatctctaagcaaaccagagaactgccggagtctcatttgtccaatatgaagaagcccgtggaagaagggacactaccctacccaatatttgcagccattgacaatgacctgcaaccttcctggcaggaggcaagagcaccagagacctggttcgagttcacccctcaccacgctggcttctctgcactgggggcctttgtttccataacccacttcggaagcaaattcaagaagggaagactggtcagaactcaccctgagagagacctgactttcctgagaggtttatggggaagtgctcttggtaacactgaagtcattagggaatacatttttgaccagttaaggaatctgaccctgaaaggtttatggagaagggctgttgctaatgctaaaagcattggacaccttatttttgcccgattactgaggctgcaagaaagttcacaaggggaacatcctcccccagaagatgaaggcggtgagcctgaacacacctggctgactgagatgctcgagaattggaccaggacctccctggaaaagcaggagcagccccatgaggaccccgaaaggaaaggctcactcagtaacttgatggattttgtgaagaaaacaggcatttgcgcttcaaagtgggaatgggggaccactcacaacttcctgtacaaacacggtggcatccgggacaagataatgagcagccggaagcacctccacctggtggatgctggtttagccatcaacactcccttcccactcgtgctgcccccgacgcgggaggttcacctcatcctctccttcgacttcagtgccggagatcctttcgagaccatccgggctaccactgactactgccgccgccacaagatcccctttccccaagtagaagaggctgagctggatttgtggtccaaggcccccgccagctgctacatcctgaaaggagaaactggaccagtggtgatgcattttcccctgttcaacatagatgcctgtggaggtgatattgaggcatggagtgacacatacgacacattcaagcttgctgacacctacactctagatgtggtggtgctactcttggcattagccaagaagaatgtcagggaaaacaagaagaagatccttagagagttgatgaacgtggccgggctctactacccgaaggatagtgcccgaagttgctgcttggcatag

SEQ ID NO: 165666 - DNA, 438 bp, Homo sapiens
  Payload ID: 12617
  Gene Symbol: PLA2G4C
  Gene Name: phospholipase A2, group IVC (cytosolic, calcium-independent)
  ENST ID: ENST00000595161
  CDS Start-End: 1-391
gatgctcgagaattggaccaggacctccctggaaaagcaggagcagccccatgaggaccccgaaaggaaaggctcactcagtaacttgatggattttgtgaagaaaacaggcatttgcgcttcaaagtgggaatgggggaccactcacaacttcctgtacaaacacggtggcatccgggacaagataatgagcagccggaagcacctccacctggtggatgctggtttagccatcaacactcccttcccactcgtgctgcccccgacgcgggaggttcacctcatcctctccttcgacttcagtgccggagatcctttcgagcacccgcggtcggccacatccaacgaacttctgtgcatgtcggtttcctcagctgtaaaattgggctaacgatggctccaccaggagttgttctgtggattaaattaatacttgtt

SEQ ID NO: 165667 - DNA, 641 bp, Homo sapiens
  Payload ID: 12617
  Gene Symbol: PLA2G4C
  Gene Name: phospholipase A2, group IVC (cytosolic, calcium-independent)
  ENST ID: ENST00000599300
  CDS Start-End: 1-641
ggaagtgctcttggtaacactgaagtcattagggaatacatttttggtttatggagaagggctgttgctaatgctaaaagcattggacaccttatttttgcccgattactgaggctgcaagaaagttcacaaggggaacatcctcccccagaagatgaaggcggtgagcctgaacacacctggctgactgagatgctcgagaattggaccaggacctccctggaaaagcaggagcagccccatgaggaccccgaaaggaaaggctcactcagtaacttgatggattttgtgaagaaaacaggcatttgcgcttcaaagtgggaatgggggaccactcacaacttcctgtacaaacacggtggcatccgggacaagataatgagcagccggaagcacctccacctggtggatgctggtttagccatcaacactcccttcccactcgtgctgcccccgacgcgggaggttcacctcatcctctccttcgacttcagtgccggagatcctttcgagaccatccgggctaccactgactactgccgccgccacaagatcccctttccccaagtagaagaggctgagctggatttgtggtccaaggcccccgccagctgctacatcctgaaaggagaaactggacc

SEQ ID NO: 165668 - DNA, 516 bp, Homo sapiens
  Payload ID: 12617
  Gene Symbol: PLA2G4C
  Gene Name: phospholipase A2, group IVC (cytosolic, calcium-independent)
  ENST ID: ENST00000596138
  CDS Start-End: 398-516
tttacctccaggttggccctgctcaggaccaggaggaaacacctccagcccgcgacctcctcccacagggggaaaaggaaagcaggaggaccacagaagctttggcaccgaggatccccgcagtcttcacccgcggagattccggctgaaggagctgtccagcgactacaccgctaagcgcagggagcccaagcctccgcaccggattccggagcacaagctccaccgcgcatgcgcacacgccccagacccaggctcagtggacaaggagaacccatgagcccgtgacagtcccagccctcccccactgtctttgctaagcccaacagtgggcacaggactaagaagagccatttctttggcaggaggactgagaattttctgaccgcagtgcaccatgggaagctctgaagtttccataattcctgggctccagaaagaagaaaaggcggccgtggagagacgaagacttcatgtgctgaaagctctgaagaagctaaggattgaggctgatga

SEQ ID NO: 165669 - DNA, 599 bp, Homo sapiens
  Payload ID: 12617
  Gene Symbol: PLA2G4C
  Gene Name: phospholipase A2, group IVC (cytosolic, calcium-independent)
  ENST ID: ENST00000595487
  CDS Start-End: 47-157
agcccaagcctccgcaccggattccggagcacaagctccaccgcgcatgcgcacacgccccagacccaggctcagactggagtgcaatggcatgatctctgctcactggcacctccacctcctgagttcaagtgattctcctccctcagcctcctgagtagctgggattacaggcgcccgccatcatgcccaggaggactgagaattttctgaccgcagtgcaccatgggaagctctgaagtttccataattcctgggctccagaaagaagaaaaggcggccgtggagagacgaagacttcatgtgctgaaagctctgaagaagctaaggattgaggctgatgaggccccagttgttgctgtgctgggctcaggcggaggactgcgggctcacattgcctgccttggggtcctgagtgagatgaaagaacagggcctgttggatgccgtcacgtacctcgcaggggtctctggatccacttgggcaatatcttctctctacaccaatgatggtgacatggaagctctcgaggctgacctgaaacatcgatttacccgacaggagtgggacttggctaagagcctacagaaaaccatcca

SEQ ID NO: 165670 - DNA, 293 bp, Homo sapiens
  Payload ID: 12617
  Gene Symbol: PLA2G4C
  Gene Name: phospholipase A2, group IVC (cytosolic, calcium-independent)
  ENST ID: ENST00000596352
  CDS Start-End: 153-293
ggagcccaagcctccgcaccggattccggagcacaagctccaccgcgcatgcgcacacgccccagacccaggctcaggccccagttgttgctgtgctgggctcaggcggaggactgcgggctcacattgcctgccttggggtcctgagtgagatgaaagaacagggcctgttggatgccgtcacgtacctcgcaggggtctctggatccacttgggcaatatcttctctctacaccaatgatggtgacatggaagctctcgaggctgacctgaaacatcgatttacccgacag

SEQ ID NO: 165671 - DNA, 2458 bp, Homo sapiens
  Payload ID: 12617
  Gene Symbol: PLA2G4C
  Gene Name: phospholipase A2, group IVC (cytosolic, calcium-independent)
  Uniprot ID: Q9UP65
  ENST ID: ENST00000599111
  CDS Start-End: 303-1958
agctgaaaaagctggagcaaccaagcagggcctacaagccgaggagggctgtttaaaggcgcaggggccattttacctccaggttggccctgctcaggaccaggaggaaacacctccagcccgcgacctcctcccacagggggaaaaggaaagcaggaggaccacagaagctttggcaccgaggatccccgcagtcttcacccgcggagattccggctgaaggagctgtccagcgactacaccgctaagcgcagggagcccaagcctccgcaccggattccggagcacaagctccaccgcgcatgcgcacacgccccagacccaggctcaggaggactgagaattttctgaccgcagtgcaccatgggaagaaagaagaaaaggcggccgtggagagacgaagacttcatgtgctgaaagctctgaagaagctaaggattgaggctgatgaggccccagttgttgctgtgctgggctcaggcggaggactgcgggctcacattgcctgccttggggtcctgagtgagatgaaagaacagggcctgttggatgccgtcacgtacctcgcaggggtctctggatccacttgggcaatatcttctctctacaccaatgatggtgacatggaagctctcgaggctgacctgaaacatcgatttacccgacaggagtgggacttggctaagagcctacagaaaaccatccaagcagcgaggtctgagaattactctctgaccgacttctgggcctacatggttatctctaagcaaaccagagaactgccggagtctcatttgtccaatatgaagaagcccgtggaagaagggacactaccctacccaatatttgcagccattgacaatgacctgcaaccttcctggcaggaggcaagagcaccagagacctggttcgagttcacccctcaccacgctggcttctctgcactgggggcctttgtttccataacccacttcggaagcaaattcaagaagggaagactggtcagaactcaccctgagagagacctgactttcctgagaggtttatggggaagtgctcttggtaacactgaagtcattagggaatacatttttgaccagttaaggaatctgaccctgaaaggtttatggagaagggctgttgctaatgctaaaagcattggacaccttatttttgcccgattactgaggctgcaagaaagttcacaaggggaacatcctcccccagaagatgaaggcggtgagcctgaacacacctggctgactgagatgctcgagaattggaccaggacctccctggaaaagcaggagcagccccatgaggaccccgaaaggaaaggctcactcagtaacttgatggattttgtgaagaaaacaggcatttgcgcttcaaagtgggaatgggggaccactcacaacttcctgtacaaacacggtggcatccgggacaagataatgagcagccggaagcacctccacctggtggatgctggtttagccatcaacactcccttcccactcgtgctgcccccgacgcgggaggttcacctcatcctctccttcgacttcagtgccggagatcctttcgagaccatccgggctaccactgactactgccgccgccacaagatcccctttccccaagtagaagaggctgagctggatttgtggtccaaggcccccgccagctgctacatcctgaaaggagaaactggaccagtggtgatgcattttcccctgttcaacatagatgcctgtggaggtgatattgaggcatggagtgacacatacgacacattcaagcttgctgacacctacactctagatgtggtggtgctactcttggcattagccaagaagaatgtcagggaaaacaagaagaagatccttagagagttgatgaacgtggccgggctctactacccgaaggatagtgcccgaagttgctgcttggcatagatgagcctcagcttccagggcactgtgggcctgttggtctactagggccctgatgtccacctggccttcctgttcttcactcccttcagccacacgcttcatggccttgagttcaccttggctgtcctaacagggccaatcaccagtgaccagctagactgtgattttgatagcgtcattcagaagaaggcgtccaaggagctgaaggtggtgaaatttgtcctgcaggtccctcgggagatcctggagctggagcatgagtgtctgacaatcagaagcatcatgtccaatgtccagatggccagaatgaatgtgatagttcagaccaatgccttccactgctcctttatgactgcacttctagccagtagctctgcacaagttagctctgtagaagtaagaacttgggcttaaatcatgggctatctctccacagccaagtggagctctgagaatacaacaagtgctcaataaatgcttgctgattgactgatggatta

SEQ ID NO: 165672 - DNA, 581 bp, Homo sapiens
  Payload ID: 12617
  Gene Symbol: PLA2G4C
  Gene Name: phospholipase A2, group IVC (cytosolic, calcium-independent)
  ENST ID: ENST00000601946
  CDS Start-End: 1-581
ctaccctacccaatatttgcagccattgacaatgacctgcaaccttcctggcaggaggcaagagcaccagagacctggttcgagttcacccctcaccacgctggcttctctgcactgggggcctttgtttccataacccacttcggaagcaaattcaagaagggaagactggtcagaactcaccctgagagagacctgactttcctgagagaccagttaaggaatctgaccctgaaaggtttatggagaagggctgttgctaatgctaaaagcattggacaccttatttttgcccgattactgaggctgcaagaaagttcacaaggggaacatcctcccccagaagatgaaggcggtgagcctgaacacacctggctgactgagatgctcgagaattggaccaggacctccctggaaaagcaggagcagccccatgaggaccccgaaaggaaaggctcactcagtaacttgatggattttgtgaagaaaacaggcatttgcgcttcaaagtgggaatgggggaccactcacaacttcctgtacaaacacggtggcatccgggacaagataatgagcagccg

SEQ ID NO: 165673 - DNA, 669 bp, Homo sapiens
  Payload ID: 12617
  Gene Symbol: PLA2G4C
  Gene Name: phospholipase A2, group IVC (cytosolic, calcium-independent)
  ENST ID: ENST00000597713
  CDS Start-End: 1-104
atatgaagaagcccgtggaagaagggacactaccctacccaatatttgcagccattgacaatgacctgcaaccttcctggcaggaggcaagagcaccaggttagagtgcaatggcacgatctcggctcaccacaacctccgcctcccaggttcaagcgattctcctgccccagcctcccgagtagctgggattacaggcatgcgccatcacgcccagcgaattttgtatttttagtagagacgtggtttctccctgttggtcaggctggtctcgaactcctgacctcaggtgatccacccgcctcggcctcccaaagtgctgggattacaggcatgagccaccgcacccggccatctctcactttttagatgtcttccttctccataggtccgattatcacccaaatgctggcagctctccagacattccagtttctcttttgagctcatctctctcctgagatccagacctccttaccctatttcctaagcataaaatgcactcacttgttcagcaactgtgtcctgagacctggttcgagttcacccctcaccacgctggcttctctgcactgggggcctttgtttccataacccacttcggaagcaaattcaagaagggaagactggtcagaactcaccctgagagagacctgactttcctgagag

SEQ ID NO: 165674 - DNA, 3584 bp, Homo sapiens
  Payload ID: 12618
  Gene Symbol: PLA2G4D
  Gene Name: phospholipase A2, group IVD (cytosolic)
  Uniprot ID: Q86XP0
  ENST ID: ENST00000290472
  CDS Start-End: 96-2552
gctggtcctatcccactgggaccgtcgctgccactcagccagagagccagcatcttggcaagggctgggcctggagtgaagctggaagggctagcatggagagcctgtcacctgggggaccacctggccacccttaccagggggaggcctctacctgctggcagctcacagtgagggtcctggaggcgcggaacctgcgctgggctgacctgttgagtgaggccgacccttacgtgatcctacagctgtcgaccgcacctggaatgaagtttaagaccaagacgctcaccgacaccagtcatcctgtgtggaatgaggccttccgtttccttatccaaagtcaggtcaagaatgttctggagcttagcatctatgatgaggactcagtcacggaggatgacatctgcttcaaggttctctatgacatctcagaagtcctccctggcaagctgctccggaaaaccttctcccagagtccccagggagaggaggagctggatgtggagttcctgatggaagaaacgtcagatcgcccagaaaacctcatcaccaacaaagtcattgtggcccgagagctgtcatgcctggatgtgcatctggacagcacagggagcaccgctgtggttgcagatcaggacaagctggagctggagctggtgctgaaggggtcctatgaggacacacagacatccttcctgggcacagcctctgccttccgcttccactacatggcagccctagagacagagctgagcgggcgcctgaggagctccagaagcaatggctggaatggggacaactcagctgggtacctcactgtgcccctgaggcccttgaccattgggaaggaggtgactatggatgttcctgctccaaatgccccaggagtgaggctgcagctcaaggcagagggctgccctgaggagctggccgtgcacctgggcttcaatctctgtgcagaggagcaggccttcctgagcaggaggaagcaggtggtggccaaggccctgaagcaggccctgcagctggacagagacctgcaggaggatgaggtacccgttgtgggcatcatggccacaggaggaggtgcccgggccatgacctcactctacggccacctattggccttgcagaagctgggcctcctagactgtgtgacctacttcagtggcatctctggctctacgtggacaatggcccacctgtacggggaccctgagtggtcgcagagggacctggagggacctatcagatacgcccgggagcacctggccaagagcaagctggaggtcttttccccagagcgcctggcgagctaccgccgggagctggagctgcgggctgagcagggccaccccacgacctttgtggacctgtgggcgctagtgctggagtccatgctgcacggccaggtgatggatcagaagctgtcaggacagagagccgccctggaacggggtcagaaccctctgcccctctacttgagcctcaatgtcaaagagaacaatctggagacactggacttcaaggagtgggttgagttctccccctatgaggtcggtttcctgaagtacggggccttcgtccctcctgagctcttcggctccgagttcttcatgggacggctgatgaggaggatcccggagccccggatctgctttctggaagccatctggagcaacattttctccctgaacctgctggatgcctggtatgacctcaccagttctggggagtcctggaaacagcacatcaaggacaagaccaggagcttagagaaggagcccctgaccacctcggggacctcctcgcggctggaggcctcgtggctgcagccaggcacggcgctggcccaggcatttaaaggcttcctgacaggcaggcccctccaccagcgcagccccaacttcctccagggcctccagctgcaccaggactactgtagccacaaagacttctccacctgggcagactaccagcttgactccatgcccagccagctgacccccaaggagccccggctctgcctggtggacgccgcctacttcatcaacaccagctctccctccatgttccggccaggccgcaggctggacctcatcctctccttcgactactccctatctgcgcccttcgaggcactgcagcagacggagctgtactgccgggcccgggggctgcccttcccccgggtggaacccagccctcaggaccagcaccagccaagggaatgccacctcttctcagaccccgcctgccccgaggccccgatcctgctgcacttcccgctggtcaatgcctccttcaaggaccactcagcccccggtgtccagcgcagccccgcagagctccagggtggccaagtggatctcaccggggccacctgcccctacaccctgtccaacatgacctacaaggaggaagacttcgagcgcctgctgcggctcagtgactacaacgtgcagaccagccagggtgccatcctgcaggccctgaggaccgcgctgaagcaccggactctagaggcgaggcctccaagggcacagacctgaggttgctcagaggctgcaggaccctccagggcctgcgggcataacctgatctgtagctgggctcagccacaggccttcctggttggagttctgggctctcccaggcctgggtggcctctgtagctggtctcactgcccagagggaactgcacacacagacttctctcttacgttcatggctggcttgagatgagttgaaaataacttcgccaggccagtgtgtagaacagctggtccaaccagacagactttcacaccacaattacttccatgcctgagcaggatagatttgaagtgcaagccggaggcagcagatcaggagtagggacaggaaggacaggggatgcctgacctgacaggtggcttcaggcctcgggaatcacaagacatcctgaacacattgcctcctcatcttcttcctgctcctccacctcctcctctccttgtccttctcctctttgtcctcctgctttccgtatccaagtcttgtacttgtttaaatttattcctaaatattttattctttttgataagtggagttactttcttaatttcatttagattattcattgctattttatagaaatacaatggatttttaaatgttgatcttgtattccgcaatcttgctgaagttgtttaccggctctaatacttttgcggatttcttagaattttctgtagacagatcatgccatctccaaatagagatggttttacttcttcctgtctgatctgaatgccttttatttatttttcccaattgccctgagcagtacaatgatgaacacacgtttcaagagcagacatcttgtcttgttcctgactctgacaagaaagcataagtctctcaccatttagtgtgattttagctgtgggtttttcttggacatccttatcaggttgagaaagttctcttttatttctagtttattgagtgttttatgatgaaacggtgttaggttttgtcaagtgatttttctgtgtctatgggcatgatcatgtggttttgtcgtgtattttattaatgta

SEQ ID NO: 165675 - DNA, 5266 bp, Homo sapiens
  Payload ID: 12619
  Gene Symbol: PLA2G4E
  Gene Name: phospholipase A2, group IVE
  Uniprot ID: Q3MJ16
  ENST ID: ENST00000399518
  CDS Start-End: 488-3094
gtgaggctccttcaggggcctggatggcctcagccatttcacccccagccctctctccctccctctcccactgacatattgagtttcgcactttaaaaatagctctgcagcactaagaagctttctctgagcgtggatcccagccctgaaacgcaggcctcccttgacggagaactgtcctatgtgagcataatgctagctccctgcttgtctttcaggcagcgcaagaaatttctctccacaaaataggtccagatggtttgaaatattcacagagatagacgtggggctcctttagttaagccctggcttccttcagctccttaataattcatcctggcttagcttcaggaggagtctggtggcactgcttccctttcacacaaaactcccttgaaattaccccaggaggctccaacaacaccttactttgaggaccagcctcagctccacacagcccgtcctgagtcccagagaggaggctgggatgagtctccaggcctcggaaggctgtcctggcctgggaactaatgtgtttgtcccacagagcccacaaacggatgaagaaggcagcaggtcaggaagaagtttcagtgagttcgaggatacacaggacctggacactcctggtctcccacctttctgtcctatggctccttggggctctgaggaggggctgtctccatgccacctgttgacagtgagggtcatccggatgaaaaatgtccggcaggctgatatgctgagccagacagactgttttgtgagcctctggctgcccaccgcctctcagaagaagctgaggacaaggaccatctccaactgcccaaatccagagtggaatgaaagcttcaacttccagatccagagccgagtgaagaacgtgctagagttgagtgtctgtgatgaagacacagtgacaccagatgaccatctcctgacagttctctatgacctcaccaagctctgtttccgaaagaaaacccacgtgaagtttccactcaacccgcagggcatggaagagctggaggtggagttcctgctggaggagagtccctctccacctgagaccctcgtcaccaatggcgtgctggtgtctcgacaagtctcctgcctggaggttcatgcacaatccaggaggcggaggaagagggagaaaatgaaggacctcctggtgatggtgaacgaatcctttgagaacacccagcgtgtccggccctgcttggaaccctgctgcccaacctctgcctgcttccaaaccgctgcctgcttccactaccccaagtacttccagtcccaggtgcacgtggaagtgcccaagagtcactggagctgtgggctttgctgccgctctcgcaagaagggccccatcagccagcccctcgactgcctttccgatggtcaggtgatgaccctgcctgtgggtgagagttatgaattacacatgaagtctacaccctgccctgagacactggacgtgcggctgggcttcagcctgtgcccagcagagctggagtttctgcagaagcggaaggtcgtggtggccaaggccctgaagcaggtgctgcagctggaggaagacctgcaggaggacgaggtgccgctgatagccatcatggccactgggggtggaacaagatccatgacctccatgtatggccacctgctggggctgcagaagctgaacctcctggactgtgccagctacatcaccggtctatcaggggccacctggaccatggctaccttgtaccgtgaccctgactggtcctccaaaaacttggagcctgctatctttgaggctcggagacatgtggtaaaggacaagctaccctccctgttcccagaccagctccgcaaattccaggaggagctccggcagcgcagccaggaaggctacagggtcacctttacagacttctggggcctgctgatagagacctgcctgggggacgagagaaatgaatgcaaactgtcagatcagcgtgctgctttgagctgcggccagaaccccctgcccatctacctcaccatcaatgtcaaggatgatgtaagcaaccaggacttcagagagtggttcgagttctccccctacgaggtgggcctgcagaagtatggggccttcatcccctccgagctcttcggctccgagttcttcatggggcggctggtgaagaggatcccggagtctcgaatctgctacatgctaggcctgtggagcagcatcttctccctgaacctgctggatgcctggaacctgtcacacacctcggaggagtttttccacaggtggacaagggagaaagtgcaggacatcgaagacgagccgatcctgcctgaaatccccaaatgtgatgctaacatcctggagaccacggtagtgatcccagggtcatggctgtccaattctttccgagaaatccttacccatcggtccttcgtgtctgagtttcacaacttcctgtctgggctgcagctgcacaccaactacctccagaatggccagttctctaggtggaaagacacagtgctagatggtttcccaaaccagctgaccgagtccgcgaaccacctgtgcctgctggacactgcgttctttgtcaactccagctacccgcccctcctcaggccagagcgaaaagccgacctcatcatccacctcaactactgtgctgggtcccagacaaagcccctgaaacaaacctgtgagtactgcactgtgcagaacatccccttccccaaatacgagctgccagatgagaatgaaaatctcaaggaatgctacctgatggagaacccccaggaacccgatgcccccatcgtgactttcttcccactcatcaatgacactttccgaaaatacaaggcaccaggtgtagagcgaagccctgaggagctggagcagggccaggtggacatttatggtcccaaaactccctatgccaccaaggagctgacatacacagaggccacctttgacaagctggtgaaactctcagagtataacatcctgaataataaggacactctcctccaggctctgcggctcgcagtggagaagaagaagcgcctgaagggccagtgtccctcctaggccccagggagcctcccctgttctgtgtcagcttctaccatcagaggtgcaggacccctcagggctgaccaggttactacgcagccagctctgctctccggcaatgggtgtgagcaggttggcctgggctttctaacgaaaagtaaaaaattttaaaaagttgagaaagtcagaaagagagagagaggagctctgttggggttttatacccactagagtttcttcaagtgcttccctatagagaaggtggtctcatagccacaggctcccacacatctgtggagaggaaaagcctggggaagaggctgggcccccagaaacctcgactcagaggcagagcccagggctggcagccctcctctctctgtcctctacctcgtgtggcgggcctagggaaatgcacagaaggacctgagaggcactcggcgtttcactggaaaaacacttcaaaatttaaggcaattctagtcttgtgatttttgggtttttttagacggagtctcactctgttgcccaggctggagtgcaatggcgcgatctcggctcactgcaacctctgcctcccaggttcaagcaattctcttgcctcagcctcccaagtggccgggattagaggcacccgccaccatgcccagctaattttttgtatttttagtacaggctggtctggaactcctgacctcaggtgatccacctgcctcggcctcccaaagtgctgggattacaggcatgagccaacgcacccggccctagtctcattatttttataggcaattatatttcatgatttttatttttatgaatcggagtattaataggaagcatgaagctagaagatctagatggagccctagaaataagccagtctctgccacaacaaagccaaataggtggccggtttcagtggctctctccagctacccagagctccagggctggtgatccatgtcatcatgaccagacagccatgcccaagcatccagctccaaacaaatgccaggcaaagcctaagtctatagcccaggttcaccaaatgaggatctgggatggagttcagcaaggtcaggcaggctgtgggtaaatgaggttgggggccaggcaggcgatgcatccagcgctgcccactccagctgtcggtgctcactgacgaccctgctccaagagcatctctcagcctcttactgcccatctctctggctgcctcatgggattacttatttctaaatgtgattcctcttatctgtgttgtcaacaccgtgaccagtgcattccaactcttggagagtcacccacagagactgaaactgggaagaattagtgaaaaaggactaggttagccgtcagaggaagaagcccgccctttaagattgcttcctaatgaatctctgggaaaaccctgggacacagagaaacccaaagtcagcaggtctcccttcaggctgggaacataaccaaggaaatgtataaccggagccactgacaggcccaggctgatagaaggtgaaagcagaaaggcaggaagacatgaggtctgcaggaaacccagcaaccctggaaggcggagtcccctttctgggccaccatgctccctaagcagtctttgggttgtgaggaaaccagtggtgacaggtaccaaaagtttagaaaaattggcctccgatgtacatccttgctactcaaagtgcagtggggagctggttggaaatgcggaatctcaggccttagcccagctgtactaaattagaagctgcatttttcaggagattcccatccccaggcgccccccgtgattcctgtgcatattgaagtttgagaggcctggatttacgccactccctcccatgagcttggaacgtatgaatcagtgctcccttgagccactgataaactgagctctggacctgcaaaactggtccccatccaggtaatgctaacctgggacaccagccctcccctccaccagagcaactggctgcctccactttgacatcttttctttctgactgcaacagactctccttccagtatcaaagagtgagccaagcaacagacaggacttgtttatcgtaaggcgaaggcagccatgccttggattcatcaaaagtttgtgaaacgaggtttataaaatcatcatattatttgtgcatggaataaaatggccatgtgggtgaa

SEQ ID NO: 165676 - DNA, 3319 bp, Homo sapiens
  Payload ID: 12620
  Gene Symbol: PLA2G4F
  Gene Name: phospholipase A2, group IVF
  ENST ID: ENST00000290497
  CDS Start-End: 63-245
gcagtttgtgcaaccagaggagcgcaggcagggttccctgctggggcccgggctgcccagccatgctttgggcactctggccaaggtggctggcagacaagatgctgcccctcctgggggcagtgctgcttcagaagagagagaagaggggccctctgtggaggcactggcggtgtccaaagccgactgctatgtgcaactgtggctgcccacggcgtccccaagccctgcccagactaggatagtggccaactgcagtgaccccgagtggaatgagaccttccactaccagatccatggtgctgtgaagaacgtcctggagctcaccctctatgacaaggacatcctgggcagcgaccagctctctctgctcctgtttgacctgagaagcctcaagtgtggccaacctcacaaacacaccttcccactcaaccaccaggattcacaagagctgcaggtggaatttgttctggagaagagccaggtgcctgcatctgaagtcatcaccaacggggttctggtggctcacccctgtctgagaatccagggcacgctccggggagatgggacagccccacgggaagagtacggctctaggcagctccagctggcagtgcctggagcctacgagaagccacagctcttgcccctgcagcctcccacagagccaggcctcccacccacctttaccttccacgtgaacccagtgctgagctccaggctacacgtggagctgatggagctgctggcagctgtgcagagtggccccagcgcagagttggaggctcagaccagcaagctgggcgaggggggcatcctgctctcctctctgcccctaggccaggaggaacagtgttctgtggccctgggggagggccaggaggtggctctgagcatgaaggtggaaatgagctccggggacctagacctacgccttggctttgacctctctgacggggagcaggagtttctggacaggaggaagcaggtcgtgtccaaggccctgcagcaagtgctgggattgagtgaggctctggacagtggccaggtgcctgtagtggctgtgttgggttccgggggtggaacccgagccatgtcttctctgtacggcagcctggcagggttgcaggagctcggccttctagacactgtgacctacctgagtggggtctctgggtctacctggtgcatctccacactctacagggacccagcctggtcccaggtggccttgcagggccccattgagcgtgcccaggttcacgtctgcagcagtaagatgggagctttgtccacggagcggctacagtactacactcaggaactgggggtccgggagcgcagtggccacagcgtgtccctcatcgacctctggggcctccttgttgagtatctcctgtaccaggaggagaaccctgccaagctgtctgaccaacaggaggcggtccgccagggtcagaacccttaccccatttacaccagtgtcaacgtccgcaccaacttgagtggggaagattttgcagagtggtgcgagttcacgccctatgaggttggcttccccaagtacggggcttatgttcccaccgagctcttcggctcagaactcttcatgggacgattgctgcagctccagcctgaaccccggatctgttacctgcaaggtatgtggggcagcgcctttgccaccagcctggatgagatcttcctaaagaccgccggctcgggcctcagcttcctggagtggtacagaggcagtgtgaatatcacagacgactgccagaagcctcagctgcacaacccctcgaggctgcgaacgaggctcctcaccccacaggggcccttctcccaggctgtgctggacatattcacctcccgcttcacttccgcccagagctttaacttcacccggggtctctgcttgcacaaggactatgtggctggcagggagttcgtggcctggaaagacacacacccggacgccttccccaaccagctcacccccatgcgggactgcctgtacctggtggacggaggctttgccatcaactctccgttcccactggctctgctgcctcagagagcagtggacctcattctgtcctttgactattccttggaagccccttttgaggtcttgaagatgacagagaagtactgcctggaccgaggaatccccttccctagcatcgaggtgggccctgaggacatggaggaggcccgtgagtgctatctgtttgccaaggctgaggacccccgctcccccattgtgctgcacttccccctggttaaccgtaccttccgcacacacctggccccaggtgtggagcgacaaacagctgaggagaaggcctttggggactttgtcatcaacaggccagacaccccctatggcatgatgaacttcacctatgagccccaggacttttatcggctggtggccctcagtcgatacaacgtcctgaacaacgtggagaccttgaagtgcgccctccagctggctctggaccggcaccaggctcgggagagggcaggggcctgaccaaggcaggaagcggaggactgtgacagagaggagacacactgctcatggtcagggcttgtagagggaggagcgatggggactctgtgcaggatctgcttcccttctctccaggacctgcctcgaggtgccccaggccccggaaagctcttgcagaattgcagcttggactggggcagggctctccttgtgtgtttttggagaagatgggcagtagatcgctccagggactcttggggatgtagggcagaagagaacagcactcatttcacagcggggtgtggagagaatcaggtgagccacagagcccaccccagacacagaaggacctcagagggcccaagtcctcagacccacacagaacaggggctgagggcactgagaagccagctgtcctccttacactgagatggaaagcagagatgcatccatccacacttcctgcagagcggcccaagccccaaccccacctcgagctcctggatgcactgctatcaagaacaatgaggggctgaggggatggccagcctatgttgctgactccatcatcctaaccctccttctgccttctggtctcctcgtgcctcctcccagatcacccttctcttcccagcgccctaaagcctgtggggtgatgtcccattctggctgctccaggtgggagatgtgcgcgtgtctccctgccagttacccaggcttcactcttcgaacctggaccacagtctctggtgatgtgtgtagtggccacatcatgcaaatatagtctcaccattcctagga

SEQ ID NO: 165677 - DNA, 5587 bp, Homo sapiens
  Payload ID: 12620
  Gene Symbol: PLA2G4F
  Gene Name: phospholipase A2, group IVF
  Uniprot ID: Q68DD2
  ENST ID: ENST00000397272
  CDS Start-End: 88-2637
agtgctgcctgtcacacctgagccagcagtttgtgcaaccagaggagcgcaggcagggttccctgctggggcccgggctgcccagccatgctttgggcactctggccaaggtggctggcagacaagatgctgcccctcctgggggcagtgctgcttcagaagagagagaagaggggccctctgtggaggcactggcggcgggaaacctacccatactatgacctccaggtgaaggtgctgagggccacaaacatccggggcacagacctgctgtccaaagccgactgctatgtgcaactgtggctgcccacggcgtccccaagccctgcccagactaggatagtggccaactgcagtgaccccgagtggaatgagaccttccactaccagatccatggtgctgtgaagaacgtcctggagctcaccctctatgacaaggacatcctgggcagcgaccagctctctctgctcctgtttgacctgagaagcctcaagtgtggccaacctcacaaacacaccttcccactcaaccaccaggattcacaagagctgcaggtggaatttgttctggagaagagccaggtgcctgcatctgaagtcatcaccaacggggttctggtggctcacccctgtctgagaatccagggcacgctccggggagatgggacagccccacgggaagagtacggctctaggcagctccagctggcagtgcctggagcctacgagaagccacagctcttgcccctgcagcctcccacagagccaggcctcccacccacctttaccttccacgtgaacccagtgctgagctccaggctacacgtggagctgatggagctgctggcagctgtgcagagtggccccagcgcagagttggaggctcagaccagcaagctgggcgaggggggcatcctgctctcctctctgcccctaggccaggaggaacagtgttctgtggccctgggggagggccaggaggtggctctgagcatgaaggtggaaatgagctccggggacctagacctacgccttggctttgacctctctgacggggagcaggagtttctggacaggaggaagcaggtcgtgtccaaggccctgcagcaagtgctgggattgagtgaggctctggacagtggccaggtgcctgtagtggctgtgttgggttccgggggtggaacccgagccatgtcttctctgtacggcagcctggcagggttgcaggagctcggccttctagacactgtgacctacctgagtggggtctctgggtctacctggtgcatctccacactctacagggacccagcctggtcccaggtggccttgcagggccccattgagcgtgcccaggttcacgtctgcagcagtaagatgggagctttgtccacggagcggctacagtactacactcaggaactgggggtccgggagcgcagtggccacagcgtgtccctcatcgacctctggggcctccttgttgagtatctcctgtaccaggaggagaaccctgccaagctgtctgaccaacaggaggcggtccgccagggtcagaacccttaccccatttacaccagtgtcaacgtccgcaccaacttgagtggggaagattttgcagagtggtgcgagttcacgccctatgaggttggcttccccaagtacggggcttatgttcccaccgagctcttcggctcagaactcttcatgggacgattgctgcagctccagcctgaaccccggatctgttacctgcaaggtatgtggggcagcgcctttgccaccagcctggatgagatcttcctaaagaccgccggctcgggcctcagcttcctggagtggtacagaggcagtgtgaatatcacagacgactgccagaagcctcagctgcacaacccctcgaggctgcgaacgaggctcctcaccccacaggggcccttctcccaggctgtgctggacatattcacctcccgcttcacttccgcccagagctttaacttcacccggggtctctgcttgcacaaggactatgtggctggcagggagttcgtggcctggaaagacacacacccggacgccttccccaaccagctcacccccatgcgggactgcctgtacctggtggacggaggctttgccatcaactctccgttcccactggctctgctgcctcagagagcagtggacctcattctgtcctttgactattccttggaagccccttttgaggtcttgaagatgacagagaagtactgcctggaccgaggaatccccttccctagcatcgaggtgggccctgaggacatggaggaggcccgtgagtgctatctgtttgccaaggctgaggacccccgctcccccattgtgctgcacttccccctggttaaccgtaccttccgcacacacctggccccaggtgtggagcgacaaacagctgaggagaaggcctttggggactttgtcatcaacaggccagacaccccctatggcatgatgaacttcacctatgagccccaggacttttatcggctggtggccctcagtcgatacaacgtcctgaacaacgtggagaccttgaagtgcgccctccagctggctctggaccggcaccaggctcgggagagggcaggggcctgaccaaggcaggaagcggaggactgtgacagagaggagacacactgctcatggtcagggcttgtagagggaggagcgatggggactctgtgcaggatctgcttcccttctctccaggacctgcctcgaggtgccccaggccccggaaagctcttgcagaattgcagcttggactggggcagggctctccttgtgtgtttttggagaagatgggcagtagatcgctccagggactcttggggatgtagggcagaagagaacagcactcatttcacagcggggtgtggagagaatcaggtgagccacagagcccaccccagacacagaaggacctcagagggcccaagtcctcagacccacacagaacaggggctgagggcactgagaagccagctgtcctccttacactgagatggaaagcagagatgcatccatccacacttcctgcagagcggcccaagccccaaccccacctcgagctcctggatgcactgctatcaagaacaatgaggggctgaggggatggccagcctatgttgctgactccatcatcctaaccctccttctgccttctggtctcctcgtgcctcctcccagatcacccttctcttcccagcgccctaaagcctgtggggtgatgtcccattctggctgctccaggtgggagatgtgcgcgtgtctccctgccagttacccaggcttcactcttcgaacctggaccacagtctctggtgatgtgtgtagtggccacatcatgcaaatatagtctcaccattcctaggagctaaatgggtgtgtctagtaggggcatcagttcatcgggggagaggtgtgcacctgtatgtggggcaggagggtgtgcaagttcctggaggtgggttactccaaggcatgggcagtgcagagggagcctcgcctgggctcttgcctctttcccagatgcatccaatgggtcttggcaagttttgtttctcactctccctcttctccatttcccctgacccgccagggactctccaaatacctagaacctctctagtgtgggcagccctcagattcgtgaagaggagatcccgttctggccaggccctctccatctggccacggcctctgcagcatatgcctccagtgctgagctgcctaggagcctgcagcagcacttgagaccttgttccttctgccccctgtcccaggggctccctcttggctgcaccccctgctccatgctctctcacacagacacgctgtcaggaacacctgtgctgggaagccttacctgtcctgagtctggaaagaagactagttctggtttccaggttggggaagggtgactggagcccagcctgtgtcttggcctggcctgggatctgcagccctccagctggcatgagttgcgagggctgggggagccagttatttgggctggcatggggtggggacacctcagttctcctctgcctcctcaccatggctgcctgtcacaggccacggcccctccccttggttcagcagtgagaggtttatctgggagtttatctggctcctgctgtggccattgtcatcaacactgctgtgcctgccgtcatcaataacttgttagtaaaaccttcatagggttcacagctcagaactgcacagcgttcacaacttagaatctgtggtgtttcttcagtgcccattagagcctcaggctgtctctggctcctagaaagtcattctaccatctgttttgttcactgctgtatcctcagtgcctagagcagcagttgatacatggtaggtgctcagtaaatatttgataaatgaatgggaacctacattctaagaaatggatcgtcacccaccaaccacaaaaaagcatgcaatgctttcatgattcctaacccatgtggactttttgaagagctgatataaaccacagaccctctcccaagaaaaaggcatacacacacacatgaaaagttgcttacaataaggtctctgcttcagctatgtgatcagcagccccagggttgcagaggccagcgtctgtccccgcaggccagcaaggcttgtgaaggaggcaaacgtgggcttgtgcagagtgggcggggaccttctcacacagaagtgtaggcaatgccacttgtgctcagataaggtttgggaggagactgggacaagatcaagggcagggggcagggggcaggaggctgggctagtgctgtggcccagatattggccagaagtacagggaggatctcagccagggatggggaggctccaacaagactgaatctgggagccacgcagagcaagaagccaggggaggggccgaaggtaacccagccagtttaatgtctgctcctcaggagagatctgagtctttacctcattcccaacccttatctgagatggctggaaataagcttcagggtcctgaaggtgacagagttggagggatttgtctagaagagcaagcatggtttcccttgaagctgggtagaaacacaggagcagggacatcattcatcaacttgtcagagctcctcatgaggcaagggaagaaaaagggggccacaagtgtaggagattggtcagagtggtgggagaagctatagggaaaggagcaggccttctgaaaggttggaaggctctgcatagctttggaggagaatagctaaagacagctgttctataaccctgaggcagagggcaaggagtaggtacgagggagtgtgggggaatttatcttaaacaggcttgtttacttctgttgaccaggaactgacctttgatcatctacgcccatgaccttccctgaaaggggaacaataaatgttaattacctccagtgtttgctccaggcttttggcattgtgcctgcactgaataaaagcaagcagctccagcttctcagggctgcactttggccacttgagctgggcagtcccctagctgctcttacactgca

SEQ ID NO: 165678 - DNA, 3329 bp, Homo sapiens
  Payload ID: 12620
  Gene Symbol: PLA2G4F
  Gene Name: phospholipase A2, group IVF
  ENST ID: ENST00000569985
  CDS Start-End: 70-960
tgagccagcagtttgtgcaaccagaggagcgcaggcagggttccctgctggggcccgggctgcccagccatgctttgggcactctggccaaggtggctggcagacaagatgctgcccctcctgggggcagtgctgcttcagaagagagagaagaggggccctctgtggaggcactggcggcgggaaacctacccatactatgacctccaggtgaaggtgctgagggccacaaacatccggggcacagacctgctgtccaaagccgactgctatgtgcaactgtggctgcccacggcgtccccaagccctgcccagactaggatagtggccaactgcagtgaccccgagtggaatgagaccttccactaccagatccatggtgctgtgaagaacgtcctggagctcaccctctatgacaaggacatcctgggcagcgaccagctctctctgctcctgtttgacctgagaagcctcaagtgtggccaacctcacaaacacaccttcccactcaaccaccaggattcacaagagctgcaggtggaatttgttctggagaagagccaggtgcctgcatctgaagtcatcaccaacggggttctggtggctcacccctgtctgagaatccagggcacgctccggggagatgggacagccccacgggaagagtacgcctcccacagagccaggcctcccacccacctttaccttccacgtgaacccagtgctgagctccaggctacacgtggagctgatggagctgctggcagctgtgcagagtggccccagcgcagagttggaggctcagaccagcaagctgggcgaggggggcatcctgctctcctctctgcccctaggccaggaggaacagtgttctgtggccctgggggagggccaggaggtggctctgagcatgaaggtggaaatgagctccggggacctagacctacgccttggctttgacctctctgacggggagcaggagtttctggacaggaggaagcaggtcgtgtccaaggccctgcagcaagtgctgggattgagtgaggctctggacagtggccaggtgcctgtagtggctgtgttgggttccgggggtggaacccgagccatgtcttctctgtacggcagcctggcagggttgcaggagctcggccttctagacactgtgacctacctgagtggggtctctgggtctacctggtgcatctccacactctacagggacccagcctggtcccaggtggccttgcagggccccattgagcgtgcccaggttcacgtctgcagcagtaagatgggagctttgtccacggagcggctacagtactacactcaggaactgggggtccgggagcgcagtggccacagcgtgtccctcatcgacctctggggcctccttgttgagtatctcctgtaccaggaggagaaccctgccaagctgtctgaccaacaggaggcggtccgccagggtcagaacccttaccccatttacaccagtgtcaacgtccgcaccaacttgagtggggaagattttgcagagtggtgcgagttcacgccctatgaggttggcttccccaagtacggggcttatgttcccaccgagctcttcggctcagaactcttcatgggacgattgctgcagctccagcctgaaccccggatctgttacctgcaaggtatgtggggcagcgcctttgccaccagcctggatgagatcttcctaaagaccgccggctcgggcctcagcttcctggagtggtacagaggcagtgtgaatatcacagacgactgccagaagcctcagctgcacaacccctcgaggctgcgaacgaggctcctcaccccacaggggcccttctcccaggctgtgctggacatattcacctcccgcttcacttccgcccagagctttaacttcacccggggtctctgcttgcacaaggactatgtggctggcagggagttcgtggcctggaaagacacacacccggacgccttccccaaccagctcacccccatgcgggactgcctgtacctggtggacggaggctttgccatcaactctccgttcccactggctctgctgcctcagagagcagtggacctcattctgtcctttgactattccttggaagccccttttgaggtcttgaagatgacagagaagtactgcctggaccgaggaatccccttccctagcatcgaggtgggccctgaggacatggaggaggcccgtgagtgctatctgtttgccaaggctgaggacccccgctcccccattgtgctgcacttccccctggttaaccgtaccttccgcacacacctggccccaggtgtggagcgacaaacagctgaggagaaggcctttggggactttgtcatcaacaggccagacaccccctatggcatgatgaacttcacctatgagccccaggacttttatcggctggtggccctcagtcgatacaacgtcctgaacaacgtggagaccttgaagtgcgccctccagctggctctggaccggcaccaggctcgggagagggcaggggcctgaccaaggcaggaagcggaggactgtgacagagaggagacacactgctcatggtcagggcttgtagagggaggagcgatggggactctgtgcaggatctgcttcccttctctccaggacctgcctcgaggtgccccaggccccggaaagctcttgcagaattgcagcttggactggggcagggctctccttgtgtgtttttggagaagatgggcagtagatcgctccagggactcttggggatgtagggcagaagagaacagcactcatttcacagcggggtgtggagagaatcaggtgagccacagagcccaccccagacacagaaggacctcagagggcccaagtcctcagacccacacagaacaggggctgagggcactgagaagccagctgtcctccttacactgagatggaaagcagagatgcatccatccacacttcctgcagagcggcccaagccccaaccccacctcgagctcctggatgcactgctatcaagaacaatgaggggctgaggggatggccagcctatgttgctgactccatcatcctaaccctccttctgccttctggtctcctcgtgcctcctcccagatcacccttctcttcccagcgccctaaagcctgtggggtgatgtcccattctggctgctccaggtgggagatgtgcgcgtgtctccctgccagttacccaggcttcactcttcgaacctggaccacagtctctggtgatgtgtgtagtggccacatcatgcaaatatagtctcaccattcc

SEQ ID NO: 165679 - DNA, 1402 bp, Homo sapiens
  Payload ID: 12620
  Gene Symbol: PLA2G4F
  Gene Name: phospholipase A2, group IVF
  ENST ID: ENST00000562320
  CDS Start-End: 1-261
gtgaatatcacagacgactgccagaagcctcagctgcacaacccctcgaggctgcgaacgaggctcctcaccccacaggggcccttctcccaggctgtgctggacatattcacctcccgcttcacttccgcccagagctttaacttcacccggggtctctgcttgcacaaggactatgtggctggcagggagttcgtggcctggaaaggtcttgaagatgacagagaagtactgcctggaccgaggaatccccttccctagcatcgaggtgggccctgaggacatggaggaggcccgtgagtgctatctgtttgccaaggctgaggacccccgctcccccattgtgctgcacttccccctggttaaccgtaccttccgcacacacctggccccaggtgtggagcgacaaacagctgaggagaaggcctttggggactttgtcatcaacaggccagacaccccctatggcatgatgaacttcacctatgagccccaggacttttatcggctggtggccctcagtcgatacaacgtcctgaacaacgtggagaccttgaagtgcgccctccagctggctctggaccggcaccaggctcgggagagggcaggggcctgaccaaggcaggaagcggaggactgtgacagagaggagacacactgctcatggtcagggcttgtagagggaggagcgatggggactctgtgcaggatctgcttcccttctctccaggacctgcctcgaggtgccccaggccccggaaagctcttgcagaattgcagcttggactggggcagggctctccttgtgtgtttttggagaagatgggcagtagatcgctccagggactcttggggatgtagggcagaagagaacagcactcatttcacagcggggtgtggagagaatcaggtgagccacagagcccaccccagacacagaaggacctcagagggcccaagtcctcagacccacacagaacaggggctgagggcactgagaagccagctgtcctccttacactgagatggaaagcagagatgcatccatccacacttcctgcagagcggcccaagccccaaccccacctcgagctcctggatgcactgctatcaagaacaatgaggggctgaggggatggccagcctatgttgctgactccatcatcctaaccctccttctgccttctggtctcctcgtgcctcctcccagatcacccttctcttcccagcgccctaaagcctgtggggtgatgtcccattctggctgctccaggtgggagatgtgcgcgtgtctccctgccagttacccaggcttcactcttcgaacctggaccacagtctctggtgatgtgtgtagtggccacatcatgcaaatatagtctcaccattcctaggagctaaa

SEQ ID NO: 165680 - DNA, 574 bp, Homo sapiens
  Payload ID: 12620
  Gene Symbol: PLA2G4F
  Gene Name: phospholipase A2, group IVF
  ENST ID: ENST00000565553
  CDS Start-End: 88-300
agtgctgcctgtcacacctgagccagcagtttgtgcaaccagaggagcgcaggcagggttccctgctggggcccgggctgcccagccatgctttgggcactctggccaaggtggctggcagacaagatgctgcccctcctgggggcagtgctgcttcagaagagagagaagaggggccctctgtggaggcactggcggcgggaaacctacccatactatgacctccaggtgaaggtgctgagggccacaaacatccggggcacagacctgccctccccaaggaaaccttttcagcaatgagagcttgaggccccggcccctccctgtcctacctgcagtgtccaaagccgactgctatgtgcaactgtggctgcccacggcgtccccaagccctgcccagactaggatagtggccaactgcagtgaccccgagtggaatgagaccttccactaccagatccatggtgctgtgaagaacgtcctggagctcaccctctatgacaaggacatcctgggcagcgaccagctctctctgctcctgtttgacctgagaagcctcaagtgtggccaacct

SEQ ID NO: 165681 - DNA, 584 bp, Homo sapiens
  Payload ID: 12620
  Gene Symbol: PLA2G4F
  Gene Name: phospholipase A2, group IVF
  ENST ID: ENST00000561627
  CDS Start-End: 61-420
agtttgtgcaaccagaggagcgcaggcagggttccctgctggggcccgggctgcccagccatgctttgggcactctggccaaggtggctggcagacaagatgctgcccctcctgggggcagtgctgcttcagaagagagagaagaggggccctctgtggaggcactggcggcgggaaacctacccatactatgacctccaggtgaaggtgctgagggccacaaacatccggggcacagacctgctgtccaaagccgactgctatgtgcaactgtggctgcccacggcgtccccaagccctgcccagactaggatagtggccaactgcagtgaccccgagtggaatttgttctggagaagagccaggtgcctgcatctgaagtcatcaccaacggggttctggtggctcacccctgtctgagaatccagggcacgctccggggagatgggacagccccacgggaagagtacggctctaggcagctccagctggcagtgcctggagcctacgagaagccacagctcttgcccctgcagcctcccacagagccaggcctcccacccacctttaccttccacgtgaac

SEQ ID NO: 165682 - DNA, 1161 bp, Homo sapiens
  Payload ID: 12621
  Gene Symbol: PLA2G5
  Gene Name: phospholipase A2, group V
  Uniprot ID: P39877
  ENST ID: ENST00000375108
  CDS Start-End: 269-685
cagggttctacccggctgggtccaggcagaagtttttcctccccacctccgggtttgtcctcatcatcggtcactcccattcacagctttaagattctggaggccaagaatttgactccccccggatccatggtctgtggataccaatgttccgactggagacggggagcccgcgagacccgggtctccagggtctgcccaaggaagttgctcatgggagcagacctctagagcaggatttgaggccaggccaaagagaaccccagagatgaaaggcctcctcccactggcttggttcctggcttgtagtgtgcctgctgtgcaaggaggcttgctggacctaaaatcaatgatcgagaaggtgacagggaagaacgccctgacaaactacggcttctacggctgttactgcggctggggcggccgaggaacccccaaggatggcaccgattggtgctgttgggcgcatgaccactgctatgggcggctggaggagaagggctgcaacattcgcacacagtcctacaaatacagattcgcgtggggcgtggtcacctgcgagcccgggcccttctgccatgtgaacctctgtgcctgtgaccggaagctcgtctactgcctcaagagaaacctacggagctacaacccacagtaccaatactttcccaacatcctctgctcctaggcctccccagcgagctcctcccagaccaagacttttgttctgtttttctacaacacagagtactgactctgcctggttcctgagagaggctcctaagtcacagacctcagtctttctcgaagcttggcggacccccagggccacactgtaccctccagcgagtcccaggagagtgactctggtcataggacttggtagggtcccagggtccctaggcctccacttctgagggcagcccctctggtgccaagagctctcctccaactcagggttggctgtgtctcttttcttctctgaagacagcgtcctggctccagttggaacactttcctgagatgcacttacttctcagcttctgcgatcagattatcatcaccaccaccctccagagaatttttacgcaagaagagccaaattgactctctaaatctggtgtatgggtattaaataaaattcattctcaaggctaataaaaa

SEQ ID NO: 165683 - DNA, 3271 bp, Homo sapiens
  Payload ID: 12622
  Gene Symbol: PLA2G6
  Gene Name: phospholipase A2, group VI (cytosolic, calcium-independent)
  Uniprot ID: O60733
  ENST ID: ENST00000332509
  CDS Start-End: 185-2605
aagtgctgagtaagccgaggtgagtgacctcgcgggtgggcggggcctgggggtccgttccccaacttcctcggcgctccggactcccaagtctccgccggaccctcctttggatattcctcgtgtctccgattctgagacagagggggaagacggtggggcctccccacctgccccgcagaagatgcagttctttggccgcctggtcaataccttcagtggcgtcaccaacttgttctctaacccattccgggtgaaggaggtggctgtggccgactacacctcgagtgaccgagttcgggaggaagggcagctgattctgttccagaacactcccaaccgcacctgggactgcgtcctggtcaaccccaggaactcacagagtggattccgactcttccagctggagttggaggctgacgccctagtgaatttccatcagtattcttcccagctgctacccttctatgagagctcccctcaggtcctgcacactgaggtcctgcagcacctgaccgacctcatccgtaaccaccccagctggtcagtggcccacctggctgtggagctagggatccgcgagtgcttccatcacagccgtatcatcagctgtgccaattgcgcggagaacgaggagggctgcacacccctgcacctggcctgccgcaagggtgatggggagatcctggtggagctggtgcagtactgccacactcagatggatgtcaccgactacaagggagagaccgtcttccattatgctgtccagggtgacaattctcaggtgctgcagctccttggaaggaacgcagtggctggcctgaaccaggtgaataaccaagggctgaccccgctgcacctggcctgccagctggggaagcaggagatggtccgcgtgctgctgctgtgcaatgctcggtgcaacatcatgggccccaacggctaccccatccactcggccatgaagttctctcagaaggggtgtgcggagatgatcatcagcatggacagcagccagatccacagcaaagacccccgttacggagccagccccctccactgggccaagaacgcagagatggcccgcatgctgctgaaacggggctgcaacgtgaacagcaccagctccgcggggaacacggccctgcacgtggcggtgatgcgcaaccgcttcgactgtgccatagtgctgctgacccacggggccaacgcggatgcccgcggagagcacggcaacaccccgctgcacctggccatgtcgaaagacaacgtggagatgatcaaggccctcatcgtgttcggagcagaagtggacaccccgaatgactttggggagactcctacattcctagcctccaaaatcggcagacttgtcaccaggaaggcgatcttgactctgctgagaaccgtgggggccgaatactgcttcccacccatccacggggtccccgcggagcagggctctgcagcgccacatcatcccttctccctggaaagagctcagcccccaccgatcagcctaaacaacctagaactacaggatctcatgcacatctcacgggcccggaagccagcgttcatcctgggctccatgagggacgagaagcggacccacgaccacctgctgtgcctggatggaggaggagtgaaaggcctcatcatcatccagctcctcatcgccatcgagaaggcctcgggtgtggccaccaaggacctgtttgactgggtggcgggcaccagcactggaggcatcctggccctggccattctgcacagtaagtccatggcctacatgcgcggcatgtactttcgcatgaaggatgaggtgttccggggctccaggccctacgagtcggggcccctggaggagttcctgaagcgggagtttggggagcacaccaagatgacggacgtcaggaaacccaaggtgatgctgacagggacactgtctgaccggcagccggctgaactccacctcttccggaactacgatgctccagaaactgtccgggagcctcgtttcaaccagaacgttaacctcaggcctccagctcagccctcagaccagctggtgtggcgggcggcccgaagcagcggggcagctcctacttacttccgacccaatgggcgcttcctggacggtgggctgctggccaacaaccccacgctggatgccatgaccgagatccatgagtacaatcaggacctgatccgcaagggtcaggccaacaaggtgaagaaactctccatcgttgtctccctggggacagggaggtccccacaagtgcctgtgacctgtgtggatgtcttccgtcccagcaacccctgggagctggccaagactgtttttggggccaaggaactgggcaagatggtggtggactgttgcacggatccagacgggcgggctgtggaccgggcacgggcctggtgcgagatggtcggcatccagtacttcagattgaacccccagctggggacggacatcatgctggatgaggtcagtgacacagtgctggtcaacgccctctgggagaccgaggtctacatctatgagcaccgcgaggagttccagaagctcatccagctgctgctctcaccctgagggtccccagcctctcaccggccccagctgacctcgtccattcagcccctgccaggccaagcccagccactgccctcccgggcagatctgggcccaggcacctctgagtccatagaccaggcctgggagaatgccaagctgcctgcccgaggctggtcctgaaggcctgtctcccactaaccccgccttccagcactttctgtcattccaggctgggaaagtctagagccccctttggcccctttccctgactgtcaaggacaactgactcccccatcagctcaaacattaagggtacccgggcacaaccgtacccctgcccccagccccagcctccctgagggcctgccgggctgcctctgccccagcccccagcaagggcactcccaggcttcctggtgggtgcagcccactccctctgccctctgctccgttccctgggggctgggactaaagaaatgggtgtcccccaccccatcagctgggaaagcccaggccgcaggagtgggatgcccgttggactttgcccctcacactggcccagcccctcacactgccccaccccgagaaccctcagctctcaaaggtcactcctgggagtttcttcttcccaatggaagtggcttaagagccaaaactgaaataaatcatttggattcaagttca

SEQ ID NO: 165684 - DNA, 3060 bp, Homo sapiens
  Payload ID: 12622
  Gene Symbol: PLA2G6
  Gene Name: phospholipase A2, group VI (cytosolic, calcium-independent)
  Uniprot ID: O60733
  ENST ID: ENST00000335539
  CDS Start-End: 137-2395
gggggtccgttccccaacttcctcggcgctccggactcccaagtctccgccggaccctcctttggatattcctcgtgtctccgattctgagacagagggggaagacggtggggcctccccacctgccccgcagaagatgcagttctttggccgcctggtcaataccttcagtggcgtcaccaacttgttctctaacccattccgggtgaaggaggtggctgtggccgactacacctcgagtgaccgagttcgggaggaagggcagctgattctgttccagaacactcccaaccgcacctgggactgcgtcctggtcaaccccaggaactcacagagtggattccgactcttccagctggagttggaggctgacgccctagtgaatttccatcagtattcttcccagctgctacccttctatgagagctcccctcaggtcctgcacactgaggtcctgcagcacctgaccgacctcatccgtaaccaccccagctggtcagtggcccacctggctgtggagctagggatccgcgagtgcttccatcacagccgtatcatcagctgtgccaattgcgcggagaacgaggagggctgcacacccctgcacctggcctgccgcaagggtgatggggagatcctggtggagctggtgcagtactgccacactcagatggatgtcaccgactacaagggagagaccgtcttccattatgctgtccagggtgacaattctcaggtgctgcagctccttggaaggaacgcagtggctggcctgaaccaggtgaataaccaagggctgaccccgctgcacctggcctgccagctggggaagcaggagatggtccgcgtgctgctgctgtgcaatgctcggtgcaacatcatgggccccaacggctaccccatccactcggccatgaagttctctcagaaggggtgtgcggagatgatcatcagcatggacagcagccagatccacagcaaagacccccgttacggagccagccccctccactgggccaagaacgcagagatggcccgcatgctgctgaaacggggctgcaacgtgaacagcaccagctccgcggggaacacggccctgcacgtggcggtgatgcgcaaccgcttcgactgtgccatagtgctgctgacccacggggccaacgcggatgcccgcggagagcacggcaacaccccgctgcacctggccatgtcgaaagacaacgtggagatgatcaaggccctcatcgtgttcggagcagaagtggacaccccgaatgactttggggagactcctacattcctagcctccaaaatcggcagacaactacaggatctcatgcacatctcacgggcccggaagccagcgttcatcctgggctccatgagggacgagaagcggacccacgaccacctgctgtgcctggatggaggaggagtgaaaggcctcatcatcatccagctcctcatcgccatcgagaaggcctcgggtgtggccaccaaggacctgtttgactgggtggcgggcaccagcactggaggcatcctggccctggccattctgcacagtaagtccatggcctacatgcgcggcatgtactttcgcatgaaggatgaggtgttccggggctccaggccctacgagtcggggcccctggaggagttcctgaagcgggagtttggggagcacaccaagatgacggacgtcaggaaacccaaggtgatgctgacagggacactgtctgaccggcagccggctgaactccacctcttccggaactacgatgctccagaaactgtccgggagcctcgtttcaaccagaacgttaacctcaggcctccagctcagccctcagaccagctggtgtggcgggcggcccgaagcagcggggcagctcctacttacttccgacccaatgggcgcttcctggacggtgggctgctggccaacaaccccacgctggatgccatgaccgagatccatgagtacaatcaggacctgatccgcaagggtcaggccaacaaggtgaagaaactctccatcgttgtctccctggggacagggaggtccccacaagtgcctgtgacctgtgtggatgtcttccgtcccagcaacccctgggagctggccaagactgtttttggggccaaggaactgggcaagatggtggtggactgttgcacggatccagacgggcgggctgtggaccgggcacgggcctggtgcgagatggtcggcatccagtacttcagattgaacccccagctggggacggacatcatgctggatgaggtcagtgacacagtgctggtcaacgccctctgggagaccgaggtctacatctatgagcaccgcgaggagttccagaagctcatccagctgctgctctcaccctgagggtccccagcctctcaccggccccagctgacctcgtccattcagcccctgccaggccaagcccagccactgccctcccgggcagatctgggcccaggcacctctgagtccatagaccaggcctgggagaatgccaagctgcctgcccgaggctggtcctgaaggcctgtctcccactaaccccgccttccagcactttctgtcattccaggctgggaaagtctagagccccctttggcccctttccctgactgtcaaggacaactgactcccccatcagctcaaacattaagggtacccgggcacaaccgtacccctgcccccagccccagcctccctgagggcctgccgggctgcctctgccccagcccccagcaagggcactcccaggcttcctggtgggtgcagcccactccctctgccctctgctccgttccctgggggctgggactaaagaaatgggtgtcccccaccccatcagctgggaaagcccaggccgcaggagtgggatgcccgttggactttgcccctcacactggcccagcccctcacactgccccaccccgagaaccctcagctctcaaaggtcactcctgggagtttcttcttcccaatggaagtggcttaagagccaaaactgaaataaatcatttggattcaagttc

SEQ ID NO: 165685 - DNA, 3011 bp, Homo sapiens
  Payload ID: 12622
  Gene Symbol: PLA2G6
  Gene Name: phospholipase A2, group VI (cytosolic, calcium-independent)
  Uniprot ID: O60733
  ENST ID: ENST00000402064
  CDS Start-End: 92-2350
tttgtttgcggaagtaggaggaagtagaagtgctgagtaagccgagacagagggggaagacggtggggcctccccacctgccccgcagaagatgcagttctttggccgcctggtcaataccttcagtggcgtcaccaacttgttctctaacccattccgggtgaaggaggtggctgtggccgactacacctcgagtgaccgagttcgggaggaagggcagctgattctgttccagaacactcccaaccgcacctgggactgcgtcctggtcaaccccaggaactcacagagtggattccgactcttccagctggagttggaggctgacgccctagtgaatttccatcagtattcttcccagctgctacccttctatgagagctcccctcaggtcctgcacactgaggtcctgcagcacctgaccgacctcatccgtaaccaccccagctggtcagtggcccacctggctgtggagctagggatccgcgagtgcttccatcacagccgtatcatcagctgtgccaattgcgcggagaacgaggagggctgcacacccctgcacctggcctgccgcaagggtgatggggagatcctggtggagctggtgcagtactgccacactcagatggatgtcaccgactacaagggagagaccgtcttccattatgctgtccagggtgacaattctcaggtgctgcagctccttggaaggaacgcagtggctggcctgaaccaggtgaataaccaagggctgaccccgctgcacctggcctgccagctggggaagcaggagatggtccgcgtgctgctgctgtgcaatgctcggtgcaacatcatgggccccaacggctaccccatccactcggccatgaagttctctcagaaggggtgtgcggagatgatcatcagcatggacagcagccagatccacagcaaagacccccgttacggagccagccccctccactgggccaagaacgcagagatggcccgcatgctgctgaaacggggctgcaacgtgaacagcaccagctccgcggggaacacggccctgcacgtggcggtgatgcgcaaccgcttcgactgtgccatagtgctgctgacccacggggccaacgcggatgcccgcggagagcacggcaacaccccgctgcacctggccatgtcgaaagacaacgtggagatgatcaaggccctcatcgtgttcggagcagaagtggacaccccgaatgactttggggagactcctacattcctagcctccaaaatcggcagacaactacaggatctcatgcacatctcacgggcccggaagccagcgttcatcctgggctccatgagggacgagaagcggacccacgaccacctgctgtgcctggatggaggaggagtgaaaggcctcatcatcatccagctcctcatcgccatcgagaaggcctcgggtgtggccaccaaggacctgtttgactgggtggcgggcaccagcactggaggcatcctggccctggccattctgcacagtaagtccatggcctacatgcgcggcatgtactttcgcatgaaggatgaggtgttccggggctccaggccctacgagtcggggcccctggaggagttcctgaagcgggagtttggggagcacaccaagatgacggacgtcaggaaacccaaggtgatgctgacagggacactgtctgaccggcagccggctgaactccacctcttccggaactacgatgctccagaaactgtccgggagcctcgtttcaaccagaacgttaacctcaggcctccagctcagccctcagaccagctggtgtggcgggcggcccgaagcagcggggcagctcctacttacttccgacccaatgggcgcttcctggacggtgggctgctggccaacaaccccacgctggatgccatgaccgagatccatgagtacaatcaggacctgatccgcaagggtcaggccaacaaggtgaagaaactctccatcgttgtctccctggggacagggaggtccccacaagtgcctgtgacctgtgtggatgtcttccgtcccagcaacccctgggagctggccaagactgtttttggggccaaggaactgggcaagatggtggtggactgttgcacggatccagacgggcgggctgtggaccgggcacgggcctggtgcgagatggtcggcatccagtacttcagattgaacccccagctggggacggacatcatgctggatgaggtcagtgacacagtgctggtcaacgccctctgggagaccgaggtctacatctatgagcaccgcgaggagttccagaagctcatccagctgctgctctcaccctgagggtccccagcctctcaccggccccagctgacctcgtccattcagcccctgccaggccaagcccagccactgccctcccgggcagatctgggcccaggcacctctgagtccatagaccaggcctgggagaatgccaagctgcctgcccgaggctggtcctgaaggcctgtctcccactaaccccgccttccagcactttctgtcattccaggctgggaaagtctagagccccctttggcccctttccctgactgtcaaggacaactgactcccccatcagctcaaacattaagggtacccgggcacaaccgtacccctgcccccagccccagcctccctgagggcctgccgggctgcctctgccccagcccccagcaagggcactcccaggcttcctggtgggtgcagcccactccctctgccctctgctccgttccctgggggctgggactaaagaaatgggtgtcccccaccccatcagctgggaaagcccaggccgcaggagtgggatgcccgttggactttgcccctcacactggcccagcccctcacactgccccaccccgagaaccctcagctctcaaaggtcactcctgggagtttcttcttcccaatggaagtggcttaagagccaaaactgaaataaatcatttggattcaa

SEQ ID NO: 165686 - DNA, 781 bp, Homo sapiens
  Payload ID: 12622
  Gene Symbol: PLA2G6
  Gene Name: phospholipase A2, group VI (cytosolic, calcium-independent)
  ENST ID: ENST00000452794
  CDS Start-End: 1-374
atgcccgcggagagcacggcaacaccccgctgcacctggccatgtcgaaagacaacgtggagatgatcaaggccctcatcgtgttcggagcagaagtggacaccccgaatgactttggggagactcctacattcctagcctccaaaatcggcagacttgtcaccaggaaggcgatcttgactctgctgagaaccgtgggggccgaatactgcttcccacccatccacggggtccccgcggagcagggctctgcagcgccacatcatcccttctccctggaaagagctcagcccccaccgatcagcctaaacaacctaggcagtcacccaagccaggccggatggtgggcctggggtgcggcgtcagatgggtaacgccctgggcctggagaggccaccgagcctagccatgcggcattagctctagctctcactccctaatccgtccttcttagctgcgcacacaccacacgccccctcccctgcaccctgtccccggcctctctcagccactcttctgcttcccttgttcactgtggagccgtgtgccctggggagggggagacaccgcttcgcagccctcggttctgctttgctgcttctagactctgcacagtggtggggggctgtcagagttggggtcacgcgggctgctgcaccaggcacctggggactgggctgcttgtcaggaggggcagctagtcagttgggtggacgtcaggcaggccttggacacaaaggaagacatggacagagtggatggtgggcctgatcccggaggc

SEQ ID NO: 165687 - DNA, 567 bp, Homo sapiens
  Payload ID: 12622
  Gene Symbol: PLA2G6
  Gene Name: phospholipase A2, group VI (cytosolic, calcium-independent)
  ENST ID: ENST00000447598
  CDS Start-End: 67-366
aagtagaagtgctgagtaagccgagagggggaagacggtggggcctccccacctgccccgcagaagatgcagttctttggccgcctggtcaataccttcagtggcgtcaccaacttgttctctaacccattccgggtgaaggaggtggctgtggccgactacacctcgagtgaccgagttcgggaggaagggcagctgattctgttccagaacactcccaaccgcacctgggactgcgtcctggtcaaccccaggaactcacagagtggattccgacgcctgggctccagtccctgtgtcctgagccccatgaggctgttactggtgctgctcgtctgcccatcctctccagtaacagccacctgaacactgcaattcctgggtttccatcattccttccagcctgactcttccagctggagttggaggctgacgccctagtgaatttccatcagtattcttcccagctgctacccttctatgagagctcccctcaggtcctgcacactgaggtcctgcagcacctgaccgacctcatccgtaaccaccccagctggtcagtggccc

SEQ ID NO: 165688 - DNA, 364 bp, Homo sapiens
  Payload ID: 12622
  Gene Symbol: PLA2G6
  Gene Name: phospholipase A2, group VI (cytosolic, calcium-independent)
  ENST ID: ENST00000455341
  CDS Start-End: 126-364
atgagttgcttgaggtcacaccgatgaggttgaagctggaatctgacaccagagcctgtgtgattgtcctgatgtgtaagacagagggggaagacggtggggcctccccacctgccccgcagaagatgcagttctttggccgcctggtcaataccttcagtggcgtcaccaacttgttctctaacccattccgggtgaaggaggtggctgtggccgactacacctcgagtgaccgagttcgggaggaagggcagctgattctgttccagaacactcccaaccgcacctgggactgcgtcctggtcaaccccaggaactcacagagtggattccgactcttccagctggagttggaggctgacgc

SEQ ID NO: 165689 - DNA, 656 bp, Homo sapiens
  Payload ID: 12622
  Gene Symbol: PLA2G6
  Gene Name: phospholipase A2, group VI (cytosolic, calcium-independent)
  ENST ID: ENST00000430886
  CDS Start-End: 159-656
agtgacctcgcgggtgggcggggcctgggggtccgttccccaacttcctcggcgctccggactcccaagtctccgccggaccctcctttggatattcctcgtgtctccgattctgagagggggaagacggtggggcctccccacctgccccgcagaagatgcagttctttggccgcctggtcaataccttcagtggcgtcaccaacttgttctctaacccattccgggtgaaggaggtggctgtggccgactacacctcgagtgaccgagttcgggaggaagggcagctgattctgttccagaacactcccaaccgcacctgggactgcgtcctggtcaaccccaggaactcacagagtggattccgctgtgccaattgcgcggagaacgaggagggctgcacacccctgcacctggcctgccgcaagggtgatggggagatcctggtggagctggtgcagtactgccacactcagatggatgtcaccgactacaagggagagaccgtcttccattatgctgtccagggtgacaattctcaggtgctgcagctccttggaaggaacgcagtggctggcctgaaccaggtgaataaccaagggctgaccccgctgcacctggcctgccagctggggaagcaggagatggtccgcgtg

SEQ ID NO: 165690 - DNA, 552 bp, Homo sapiens
  Payload ID: 12622
  Gene Symbol: PLA2G6
  Gene Name: phospholipase A2, group VI (cytosolic, calcium-independent)
  ENST ID: ENST00000436218
  CDS Start-End: 93-548
gtttgtttgcggaagtaggaggaagtagaagtgctgagtaagccgagacagagggggaagacggtggggcctccccacctgccccgcagaagatgcagttctttggccgcctggtcaataccttcagtggcgtcaccaacttgttctctaacccattccgggtgaaggaggtggctgtggccgactacacctcgagtgaccgagttcgggaggaagggcagctgattctgttccagaacactcccaaccgcacctgggactgcgtcctggtcaaccccaggaactcacagagtggattccgactcttccagctggagttggaggctgacgccctagtgaatttccatcagtattcttcccagctgctacccttctatgagagctcccctcaggtcctgcacactgaggtcctgcagcacctgaccgacctcatccgtaaccaccccagctggtcagtggcccacctggctgtggagctagggatccgcgagtgcttccatcacagccgtatcatcagctccttggaaggaacgcagtggctggcctgaacca

SEQ ID NO: 165691 - DNA, 501 bp, Homo sapiens
  Payload ID: 12622
  Gene Symbol: PLA2G6
  Gene Name: phospholipase A2, group VI (cytosolic, calcium-independent)
  ENST ID: ENST00000417303
  CDS Start-End: 114-413
tcagatgccactttgttcagcaggcttcccagatcatccccaggctgactcaggttcctgtgtacaagacagagggggaagacggtggggcctccccacctgccccgcagaagatgcagttctttggccgcctggtcaataccttcagtggcgtcaccaacttgttctctaacccattccgggtgaaggaggtggctgtggccgactacacctcgagtgaccgagttcgggaggaagggcagctgattctgttccagaacactcccaaccgcacctgggactgcgtcctggtcaaccccaggaactcacagagtggattccgacgcctgggctccagtccctgtgtcctgagccccatgaggctgttactggtgctgctcgtctgcccatcctctccagtaacagccacctgaacactgcaattcctgggtttccatcattccttccagcctgactcttccagctggagttggaggctgacgccctagtgaatttccatca

SEQ ID NO: 165692 - DNA, 1147 bp, Homo sapiens
  Payload ID: 12622
  Gene Symbol: PLA2G6
  Gene Name: phospholipase A2, group VI (cytosolic, calcium-independent)
  ENST ID: ENST00000448094
  CDS Start-End: 2-682
catggacagcagccagatccacagcaaagacccccgttacggagccagccccctccactgggccaagaacgcagagatggcccgcatgctgctgaaacggggctgcaacgtgaacagcaccagctccgcggggaacacggccctgcacgtggcggtgatgcgcaaccgcttcgactgtgccatagtgctgctgacccacggggccaacgcggatgcccgcggagagcacggcaacaccccgctgcacctggccatgtcgaaagacaacgtggagatgatcaaggccctcatcgtgttcggagcagaagtggacaccccgaatgactttggggagactcctacattcctagcctccaaaatcggcagacttgtcaccaggaaggcgatcttgactctgctgagaaccgtgggggccgaatactgcttcccacccatccacggggtccccgcggagcagggctctgcagcgccacatcatcccttctccctggaaagagctcagcccccaccgatcagcctaaacaacctaggcagtcacccaagccaggccggatggtgggcctggggtgcggcgtcagatggaactacaggatctcatgcacatctcacgggcccggaagccagcgttcatcctgggctccatgagggacgagaagcggacatgcagaacctgagcccctgagaggtgaagtgacttgctcaaggtcacacggaccacgaccacctgctgtgcctggatggaggaggagtgaaaggcctcatcatcatccagctcctcatcgccatcgagaaggcctcgggtgtggccaccaaggacctgtttgactgggtggcgggcaccagcactggaggcatcctggccctggccattctgcacagtaagtccatggcctacatgcgcggcatgtactttcgcatgaaggatgaggtgttccggggctccaggccctacgagtcggggcccctggaggagttcctgaagcgggagtttggggagcacaccaagatgacggacgtcaggaaacccaaggtgatgctgacagggacactgtctgaccggcagccggctgaactccacctcttccggaactacgatgctccagaaactgtccgggagcctcgtttcaaccagaacgttaacctcagg

SEQ ID NO: 165693 - DNA, 688 bp, Homo sapiens
  Payload ID: 12622
  Gene Symbol: PLA2G6
  Gene Name: phospholipase A2, group VI (cytosolic, calcium-independent)
  ENST ID: ENST00000427114
  CDS Start-End: 1-688
gtgcttccatcacagccgtatcatcagctgtgccaattgcgcggagaacgaggagggctgcacacccctgcacctggcctgccgcaagggtgatggggagatcctggtggagctggtgcagtactgccacactcagatggatgtcaccgactacaagggagagaccgtcttccattatgctgtccagggtgacaattctcaggtgctgcaggtgtgcggagatgatcatcagcatggacagcagccagatccacagcaaagacccccgttacggagccagccccctccactgggccaagaacgcagagatggcccgcatgctgctgaaacggggctgcaacgtgaacagcaccagctccgcggggaacacggccctgcacgtggcggtgatgcgcaaccgcttcgactgtgccatagtgctgctgacccacggggccaacgcggatgcccgcggagagcacggcaacaccccgctgcacctggccatgtcgaaagacaacgtggagatgatcaaggccctcatcgtgttcggagcagaagtggacaccccgaatgactttggggagactcctacattcctagcctccaaaatcggcagacttgtcaccaggaaggcgatcttgactctgctgagaaccgtgggggccgaatactgcttcccacccatccacggggtccccgcggagca

SEQ ID NO: 165694 - DNA, 499 bp, Homo sapiens
  Payload ID: 12622
  Gene Symbol: PLA2G6
  Gene Name: phospholipase A2, group VI (cytosolic, calcium-independent)
  ENST ID: ENST00000427453
  CDS Start-End: 1-473
tgggccccaacggctaccccatccactcggccatgaagttctctcagaaggggtgtgcggagatgatcatcagcatggacagcagccagatccacagcaaagacccccgttacggagccagccccctccactgggccaagaacgcagagatggcccgcatgctgctgaaacggggctgcaacgtgaacagcaccagctccgcggggaacacggccctgcacgtggcggtgatgcgcaaccgcttcgactgtgccatagtgctgctgacccacggggccaacgcggatgcccgcggagagcacggcaacaccccgctgcacctggccatgtcgatggagtctcgcactgtcgcccaggctggagtgcagtggcgcgatctcggctcaccacaacctccgcctcccaggttcaagcgattctcctgcctcagcctcccaagtagctgggactgcagaaagacaacgtggagatgatcaaggccctcatcgtgttcggagca

SEQ ID NO: 165695 - DNA, 591 bp, Homo sapiens
  Payload ID: 12622
  Gene Symbol: PLA2G6
  Gene Name: phospholipase A2, group VI (cytosolic, calcium-independent)
  ENST ID: ENST00000452542
  CDS Start-End: 1-591
tcctggtggagctggtgcagtactgccacactcagatggatgtcaccgactacaagggagagaccgtcttccattatgctgtccagggtgacaattctcagctccttggaaggaacgcagtggctggcctgaaccaggtgaataaccaagggctgaccccgctgcacctggcctgccagctggggaagcaggagatggtccgcgtgctgctgctgtgcaatgctcggtgcaacatcatgggccccaacggctaccccatccactcggccatgaagttctctcagaaggggtgtgcggagatgatcatcagcatggacagcagccagatccacagcaaagacccccgttacggagccagccccctccactgggccaagaacgcagagatggcccgcatgctgctgaaacggggctgcaacgtgaacagcaccagctccgcggggaacacggccctgcacgtggcggtgatgcgcaaccgcttcgactgtgccatagtgctgctgacccacggggccaacgcggatgcccgcggagagcacggcaacaccccgctgcacctggccatgtcgaaagacaacgtggagatgatca

SEQ ID NO: 165696 - DNA, 741 bp, Homo sapiens
  Payload ID: 12622
  Gene Symbol: PLA2G6
  Gene Name: phospholipase A2, group VI (cytosolic, calcium-independent)
  ENST ID: ENST00000454670
  CDS Start-End: 1-505
ggatctcatgcacatctcacgggcccggaagccagcgttcatcctgggctccatgagggacgagaagcggacccacgaccacctgctgtgcctggatggaggaggagtgaaaggcctcatcatcatccagctcctcatcgccatcgagaaggcctcgggtgtggccaccaaggacctgtttgactgggtggcgggcaccagcactggaggcatcctggccctggccattctgcacagtaagtccatggcctacatgcgcggcatgtactttcgcatgaaggatgaggtgttccggggctccaggccctacgagtcggggcccctggaggagttcctgaagcgggagtttggggagcacaccaagatgacggacgtcaggaaacccaagttggaccaatctgacactcctccagcactgccggagagagcctgttttgcggggatggtgcggggagaagcccacctatcccgaacagagggtgatgctgacagggacactgtctgaccggcagccggctgaactccacctcttccggaactacgatgctccagaaactgtccgggagcctcgtttcaaccagaacgttaacctcaggcctccagctcagccctcagaccagctggtgtggcgggcggcccgaagcagcggggcagctcctacttacttccgacccaatgggcgcttcctggacggtgggctgctggccaacaaccccacgctggatgccatgaccgagatcc

SEQ ID NO: 165697 - DNA, 612 bp, Homo sapiens
  Payload ID: 12622
  Gene Symbol: PLA2G6
  Gene Name: phospholipase A2, group VI (cytosolic, calcium-independent)
  ENST ID: ENST00000435484
  CDS Start-End: 211-510
ttgtttgcggaagtaggaggaagtagaagtgctgagtaagccgaggtgagtgacctcgcgggtgggcggggcctgggggtccgttccccaacttcctcggcgctccggactcccaagtctccgccggaccctcctttggatattcctcgtgtctccgattctgagacagagggggaagacggtggggcctccccacctgccccgcagaagatgcagttctttggccgcctggtcaataccttcagtggcgtcaccaacttgttctctaacccattccgggtgaaggaggtggctgtggccgactacacctcgagtgaccgagttcgggaggaagggcagctgattctgttccagaacactcccaaccgcacctgggactgcgtcctggtcaaccccaggaactcacagagtggattccgacgcctgggctccagtccctgtgtcctgagccccatgaggctgttactggtgctgctcgtctgcccatcctctccagtaacagccacctgaacactgcaattcctgggtttccatcattccttccagcctgactcttccagctggagttggaggctgacgccctagtgaatttccatcagtattcttcccagc

SEQ ID NO: 165698 - DNA, 675 bp, Homo sapiens
  Payload ID: 12622
  Gene Symbol: PLA2G6
  Gene Name: phospholipase A2, group VI (cytosolic, calcium-independent)
  ENST ID: ENST00000498338
  CDS Start-End: 316-675
aaactgaacagaaacctgatacaggtcacatcagatataattacattcaaatcagcccaactagctgagtggcgggaatgctcttgagctcaaataaaccagaaagtccgagtttccgagtgcacttccctgcatgtgcacttaggtccccctgccaccttgtaccacacctgctcacctctgctcaccctggccctctcctgcagctgtgccaattgcgcggagaacgaggagggctgcacacccctgcacctggcctgccgcaagggtgatggggagatcctggtggagctggtgcagtactgccacactcagatggatgtcaccgactacaagggagagaccgtcttccattatgctgtccagggtgacaattctcaggtgctgcagctccttggaaggaacgcagtggctggcctgaaccaggtgaataaccaagggctgaccccgctgcacctggcctgccagctggggaagcaggagatggtccgcgtgctgctgctgtgcaatgctcggtgcaacatcatgggccccaacggctaccccatccactcggccatgaagttctctcagaaggggtgtgcggagatgatcatcagcatggacagcagccagatccacagcaaagacccccgttacggagccagccccctccactgggccaagaacgcagag

SEQ ID NO: 165699 - DNA, 595 bp, Homo sapiens
  Payload ID: 12622
  Gene Symbol: PLA2G6
  Gene Name: phospholipase A2, group VI (cytosolic, calcium-independent)
  ENST ID: ENST00000594306
  CDS Start-End: 444-595
accaccacctctccctggcttcttcccttggaagccagcagagctgacctccagggtctgcaggttcatgacgtcttctggaggcataaggagagaggtgactcttgagggactgacaactgccttgtccagtcagcagccacaaccctccaacgtccccctccctggccccaccagtccactccagagacatcctgtagaaggcccacccgctggcatgggctcctttctggctgctgagccattctgctcgctctgtgaggacagggaaaaaatgtgttttcctagctcttggcagtcagcactgctggagcctcctccctgctggaaggggagcaaggctggaagaaccaagcaccacagagaagcaacggcctggggttccagccccagttcagacagagggggaagacggtggggcctccccacctgccccgcagaagatgcagttctttggccgcctggtcaataccttcagtggcgtcaccaacttgttctctaacccattccgggtgaaggaggtggctgtggccgactacacctcgagtgaccgagttcgggaggaagggcagctgattctgttccagaacactcc

SEQ ID NO: 165700 - DNA, 1882 bp, Homo sapiens
  Payload ID: 12623
  Gene Symbol: PLA2G7
  Gene Name: phospholipase A2, group VII (platelet-activating factor acetylhydrolase, plasma)
  Uniprot ID: Q13093
  ENST ID: ENST00000274793
  CDS Start-End: 198-1523
gccagagctgctcggcccgcagccagggggacagcggctggtcggaggctcgcagtgctgtcggcgagaagcagtcgggtttggagcgcttgggtcgcgttggtgcgcggtggaacgcgcccagggaccccagttcccgcgagcagctccgcgccgcgcctgagagactaagctgaaactgctgctcagctcccaagatggtgccacccaaattgcatgtgcttttctgcctctgcggctgcctggctgtggtttatccttttgactggcaatacataaatcctgttgcccatatgaaatcatcagcatgggtcaacaaaatacaagtactgatggctgctgcaagctttggccaaactaaaatcccccggggaaatgggccttattccgttggttgtacagacttaatgtttgatcacactaataagggcaccttcttgcgtttatattatccatcccaagataatgatcgccttgacaccctttggatcccaaataaagaatatttttggggtcttagcaaatttcttggaacacactggcttatgggcaacattttgaggttactctttggttcaatgacaactcctgcaaactggaattcccctctgaggcctggtgaaaaatatccacttgttgttttttctcatggtcttggggcattcaggacactttattctgctattggcattgacctggcatctcatgggtttatagttgctgctgtagaacacagagatagatctgcatctgcaacttactatttcaaggaccaatctgctgcagaaataggggacaagtcttggctctaccttagaaccctgaaacaagaggaggagacacatatacgaaatgagcaggtacggcaaagagcaaaagaatgttcccaagctctcagtctgattcttgacattgatcatggaaagccagtgaagaatgcattagatttaaagtttgatatggaacaactgaaggactctattgatagggaaaaaatagcagtaattggacattcttttggtggagcaacggttattcagactcttagtgaagatcagagattcagatgtggtattgccctggatgcatggatgtttccactgggtgatgaagtatattccagaattcctcagcccctcttttttatcaactctgaatatttccaatatcctgctaatatcataaaaatgaaaaaatgctactcacctgataaagaaagaaagatgattacaatcaggggttcagtccaccagaattttgctgacttcacttttgcaactggcaaaataattggacacatgctcaaattaaagggagacatagattcaaatgtagctattgatcttagcaacaaagcttcattagcattcttacaaaagcatttaggacttcataaagattttgatcagtgggactgcttgattgaaggagatgatgagaatcttattccagggaccaacattaacacaaccaatcaacacatcatgttacagaactcttcaggaatagagaaatacaattaggattaaaataggttttttaaaagtcttgtttcaaaactgtctaaaattatgtgtgtgtgtgtgtgtgtgtgtgtgtgtgtgagagagagagagagagagagagagagagagagagagaattttaatgtattttcccaaaggactcatattttaaaatgtaggctatactgtaatcgtgattgaagcttggactaagaattttttccctttagatgtaaagaaagaatacagtatacaatattcatatcagcctaaattttaattttaaagatgattccttttcagtgtcgaagttaaaaactgtttttacattactttgacagacaagtagattaaaacaggcaaaatcccagtgaaaa

SEQ ID NO: 165701 - DNA, 1747 bp, Homo sapiens
  Payload ID: 12623
  Gene Symbol: PLA2G7
  Gene Name: phospholipase A2, group VII (platelet-activating factor acetylhydrolase, plasma)
  Uniprot ID: Q13093
  ENST ID: ENST00000537365
  CDS Start-End: 179-1504
ggaaaaccggcctgactggggggtgaattcagcagggagtaaatctgatcggcatcaggtctgcggaaaggagctggtgagcacgacaccacccaggcattgcctggctctctccgcggcgggctaagttaaccgcgggtccaggagactaagctgaaactgctgctcagctcccaagatggtgccacccaaattgcatgtgcttttctgcctctgcggctgcctggctgtggtttatccttttgactggcaatacataaatcctgttgcccatatgaaatcatcagcatgggtcaacaaaatacaagtactgatggctgctgcaagctttggccaaactaaaatcccccggggaaatgggccttattccgttggttgtacagacttaatgtttgatcacactaataagggcaccttcttgcgtttatattatccatcccaagataatgatcgccttgacaccctttggatcccaaataaagaatatttttggggtcttagcaaatttcttggaacacactggcttatgggcaacattttgaggttactctttggttcaatgacaactcctgcaaactggaattcccctctgaggcctggtgaaaaatatccacttgttgttttttctcatggtcttggggcattcaggacactttattctgctattggcattgacctggcatctcatgggtttatagttgctgctgtagaacacagagatagatctgcatctgcaacttactatttcaaggaccaatctgctgcagaaataggggacaagtcttggctctaccttagaaccctgaaacaagaggaggagacacatatacgaaatgagcaggtacggcaaagagcaaaagaatgttcccaagctctcagtctgattcttgacattgatcatggaaagccagtgaagaatgcattagatttaaagtttgatatggaacaactgaaggactctattgatagggaaaaaatagcagtaattggacattcttttggtggagcaacggttattcagactcttagtgaagatcagagattcagatgtggtattgccctggatgcatggatgtttccactgggtgatgaagtatattccagaattcctcagcccctcttttttatcaactctgaatatttccaatatcctgctaatatcataaaaatgaaaaaatgctactcacctgataaagaaagaaagatgattacaatcaggggttcagtccaccagaattttgctgacttcacttttgcaactggcaaaataattggacacatgctcaaattaaagggagacatagattcaaatgtagctattgatcttagcaacaaagcttcattagcattcttacaaaagcatttaggacttcataaagattttgatcagtgggactgcttgattgaaggagatgatgagaatcttattccagggaccaacattaacacaaccaatcaacacatcatgttacagaactcttcaggaatagagaaatacaattaggattaaaataggttttttaaaagtcttgtttcaaaactgtctaaaattatgtgtgtgtgtgtgtgtgtgtgtgtgtgtgtgagagagagagagagagagagagagagagagagagagaattttaatgtattttcccaaaggactcatattttaaaatgtaggctatactgtaatcgtgattgaagcttggactaagaattttttccctttagatgtaaagaaagaatacagtatacaatattc

SEQ ID NO: 165702 - DNA, 1000 bp, Homo sapiens
  Payload ID: 12624
  Gene Symbol: PLA2G10
  Gene Name: phospholipase A2, group X
  Uniprot ID: O15496
  ENST ID: ENST00000438167
  CDS Start-End: 441-938
ggccttccaaagtgctgggattacaggcgtgagtcaccgcgcccggccaaataaaataaaatgttaaagcaaattcaggactacccctcctccaagtcttctgttccctttgggcgcccaggtgagcgggggaggggctgggggagtaataacatcaaaagagcgccttttcctcccttattccgaggagacttccctgggcctgactcccggtcctgtccccagcgccccgcggcctctggagccccttcagtgaccaagatacagagatcaggacgcctttgcgccgccccaggtgcccgcccctagctggctctgcttgggccgcgagggaaggtgaggtcgggggcggagccggggcgtgacagccggggtgtgtgtccgccgggcttggtgcctccggtggccctgcagcaccgtcccacctctgccaccctccgatggggccgctacctgtgtgcctgccaatcatgctgctcctgctactgccgtcgctgctgctgctgctgcttctacctggccccgggtccggcgaggcctccaggatattacgtgtgcaccggcgtgggatcctggaactggcaggaactgtgggttgtgttggtccccgaacccccatcgcctatatgaaatatggttgcttttgtggcttgggaggccatggccagccccgcgatgccattgactggtgctgccatggccacgactgttgttacactcgagctgaggaggccggctgcagccccaagacagagcgctactcctggcagtgcgtcaatcagagcgtcctgtgcggaccggcagagaacaaatgccaagaactgttgtgcaagtgtgaccaggagattgctaactgcttagcccaaactgagtacaacttaaagtacctcttctacccccagttcctatgtgagccggactcgcccaagtgtgactgactaccttgacttgaaatgctcttttgcacaaggaaataaagcgtcctctcagtaatgaacaa

SEQ ID NO: 165703 - DNA, 587 bp, Homo sapiens
  Payload ID: 12624
  Gene Symbol: PLA2G10
  Gene Name: phospholipase A2, group X
  ENST ID: ENST00000567462
  CDS Start-End: 48-440
gtgcctccggtggccctgcagcaccgtcccacctctgccaccctccgatggggccgctacctgtgtgcctgccaatcatgctgctcctgctactgccgtcgctgctgctgctgctgcttctacctggccccgggtccggcgaggcctccaggatattacgtgtgcaccggcgtgggatcctggaactggcaggaactgtgggttgtgttggtccccgaacccccatcgcctatatgaaatatggttgcttttgtggcttgggaggccatggccagccccgcgatgccattgactggtgctgccatggccacgactgttgttacactcgagctgaggaggccggctgcagccccaagacagagcgctactcctggcagtgcgtcaatcagagcgtcctgtgcgtcttgctctgtcacccaggctggagtgcagtggtgtgatctcggctcacttcaacctctgccttttgggctcaagcgatcctcgcacctcagcctcctgagtagctggaatcacaggaccggcagagaacaaatgccaagaactgttgtgcaagtgtgaccaggagattgctaactgcttagccc

SEQ ID NO: 165704 - DNA, 1000 bp, Homo sapiens; identical to SEQ ID NO: 165702
  Payload ID: 12624
  Gene Symbol: PLA2G10
  Gene Name: phospholipase A2, group X
  Uniprot ID: O15496
  ENST ID: ENST00000621727
  CDS Start-End: 441-938

SEQ ID NO: 165705 - DNA, 587 bp, Homo sapiens; identical to SEQ ID NO: 165703
  Payload ID: 12624
  Gene Symbol: PLA2G10
  Gene Name: phospholipase A2, group X
  ENST ID: ENST00000634009
  CDS Start-End: 48-440

SEQ ID NO: 165706 - DNA, 5226 bp, Homo sapiens
  Payload ID: 12625
  Gene Symbol: PLA2G12A
  Gene Name: phospholipase A2, group XIIA
  Uniprot ID: Q9BZM1
  ENST ID: ENST00000243501
  CDS Start-End: 269-838
cgcaggcgcacaggggacggttgctggcccaggtgagcgggcgcgctggtccaggtgagcgggcgcgtccccgcgacggcgctgcctgcccgaggcggttcacgtaaagacagcgagatcctgagggccagccgggaaggaggcgtggatatggagctggctgctgccaagtccggggcccgcgccgctgcctagcgcgtcctggggactctgtggggacgcgccccgcgccgcggctcggggacccgtagagcccggcgctgcgcgcatggccctgctctcgcgccccgcgctcaccctcctgctcctcctcatggccgctgttgtcaggtgccaggagcaggcccagaccaccgactggagagccaccctgaagaccatccggaacggcgttcataagatagacacgtacctgaacgccgccttggacctcctgggaggcgaggacggtctctgccagtataaatgcagtgacggatctaagcctttcccacgttatggttataaaccctccccaccgaatggatgtggctctccactgtttggtgttcatcttaacattggtatcccttccctgacaaagtgttgcaaccaacacgacaggtgctatgagacctgtggcaaaagcaagaatgactgtgatgaagaattccagtattgcctctccaagatctgccgagatgtacagaaaacactaggactaactcagcatgttcaggcatgtgaaacaacagtggagctcttgtttgacagtgttatacatttaggttgtaaaccatatctggacagccaacgagccgcatgcaggtgtcattatgaagaaaaaactgatctttaaaggagatgccgacagctagtgacagatgaagatggaagaacatacctttgacaaataactaatgtttttacaacataaaactgtcttatttttgtgaaaggattattttgagaccttaaaataatttatatcttgatgttaaaacctcaaagcaaaaaaagtgagggagatagtgaggggagggcacgcttgtcttctcaggtatcttccccagcattgctcccttacttagtatgccaaatgtcttgaccaatatcaaaaacaagtgcttgtttagcggagaattttgaaaagaggaatatataactcaattttcacaaccacatttaccaaaaaaagagatcaaatataaaattcatcataatgtctgttcaacattatcttatttggaaaatggggaaattatcacttacaagtatttgtttactatgaaattttaaatacacatttatgcctagaaggaacggactttttttttctattttaattacacataatatgtaattaaagtacaacataatatgttgtttctctgtagcccgttgagcatatgagtaagtcacatttctattaggactacttacaaggacaaggtttccatttttccagttgtaaaattggaaccatcagctgataacctcgtagggagcaaccccaggatagctaagtgttatgtaatatgcctagaaggtgatgtgaatgcgattcagaagcatagccactcccattttatgagctactcacatgacaaatgtcatcttttgctataacctttgccaagttagagaaaagatggatttaatgagataaatgaaaagatatttaacctaatatatcaaggcactatttgctgttatgctttgttatttatttcccagcacttgttccttattgtagattttttaaagactgtaaccttttactaactgtggtcttactaaaatttgtgcttgatactgcttttcaaaaagcctttaattagagccaaaaggatggaaaaggcaagatataaatgccttttatagatctcttatttacattgaaaattattaccatatgtttagagcaaatccaagaaaacttcaacagcttctgaagatgtctatgaatgttgaaaacttttcaatctcttggaatgctcagttatgttcctagaccggtctttgctgactactggttgttaacctttccctagcctgggacctcaagccatatatatcctttgggtgacccatggccaaagttattaagatgaactgactttcaaagtcagagaaggacagcatagggagaggcggttatttgtaagtcattacaggtagaacagggcagaaggaaaagtatgttctggagaaagggccatgttcctaactttggagatatgtcattgccgggaacctagtatcttccaacttgaattggtggcagctgttccagtgagacaaggcacatgtatgccttgtggctaagtgagcaaactgggtttccacttaaatgtttgggaccctcaattgattctttatttcaaacctttataaaaggtacagttttgtaagccattattaataattaatgcttatcggctgggcacagtggctcacacctataatcccagcactttgggaggctgaggcggttggatcacttgaggtcaggagtttgagaccagctggccaacatggtgaaacagcgtctctactaaaaatacaaaaatttgccgggcgtggtggcgcatgcttatagtctcagctactcaggaagctgaggtacgagaatcacttgaacccaggaggtggaggttgcagtgagctgagattgtgccactgcactgcagcctgggcaacagagcaagactctaaaaaaaaaatggtttatcaatatttactattgaaatatttgtccaggtaactttacacttacaatgaattcatggattttgttagcagcattggctttctcaaaaggacaaactcaatatcgttataaaatataattcgtgatcacaaattatacaaaaatcagtagaaacagttttttatgttcagattaaaaaaaaaaacttgggataattttagatttacagaaaagttgcaaagatacatggagagcttctgtgaccactcacccagttcccccagtgttaaccttttatttaaccatgaagcatttgtcagaagctaagtaaccagcaatggcaattactattaacggaactttgactttatttttcagattgtactagttttttaattaatgtcatttttcttttccaggatccaatctaggataccacactgaattagtcgtcatgcctaattagcctctggtctgtgatagttccacagtctttctttttcataaccttgacagttttgaggagtactggtcaggtgttttgtagaatattcctcaatttgggtttgtctgatgttttcctcatggttagagtggggttatagatttttaggaagaataccagaggtgaaggtccttctcactgcatcatgtcaggagttacatgctatcagcttgatggtgtattaactttggacacttggttaaggtagtgtgtgttggttttttgctgctgaaaattactgttattttccctttccatacttctgttctttggaaaacagtcactaagtccagtcatgggaggtggtgggtgggaaagattacattcaaccccctggaagtgggaatatccatatgtagtatttggaatttttctatatggaaaatttgtttctccctcccaccctaatttgtttacatcagtatggactcatgtatattttgtattttgggtaacacagtatttattttgttgcttaagttgtccagcttggctattaggagttctgccaggttggctactatgtccctttgatgtgcccatccttttgatttttgagcacttcttactttctggcactacaagatgctccaggttcatcttggatattccctgccccaaccctagaatccctagaatcaacccctgctccaaagagccctggttccttttgttggagaatcatacttagaaaccaagatctgggcattagatgtgcttgttgctactgggatgtcactgtttgtagcagagttgagaaatatgtatgtatattaatccatgcatatgtacacatctataattatttatgtgtgtacaaagctaaacatgagtttgtactgccgtcttcaactcaaaatttgtcccaaaattttgtggcatatgtttagattttaaagttgatattttccctattgacagaataaactcattaaaagagcaaaaaaaaaaaaaaaaaaaaaaaggcaagaactaactgtcagcagctctttgcaagaaatgtaatattgatactttaaaataatactgccttcaaatgatgcctgtctctttaaaatcttttgacatagttcttccagggacagatatggctgtatttatttcatagatggagaaactgagcacagagctgtaatgaagacagaattgagatataagggcaaaagctaattaaacgcatcctcacaggtagcctttctttcagtgaacctgtagactagtccagtaatacttattaaaattagttgttagaggctgggcatggtggttcaagcctgtaatctcagcactgtgggaggccaaggcggacagatcactcaaagtcagaagttcgagaccagcttggccaacatggcaaaaccctgtctctactaaaaatacaaaaattagttgggtgtggtggcacatgcctgtaatcccagccactcgggaggtgaaggcacaagaattggttgaacctgggaagcagaggttgcagtgagctgagattgcactgctgcactccagcataggcgtcagaataagactctgtcttggaaagaagaaaaaaaattgttagcctaaaaccaactctctctaaatttaaaagagtgattatttatcttagtatttatagaagtatgagattatcagaaggtgcgatgcacaatgctcattattttatcctagtacaagacacgtataacatctaacagtaaagaagatggaatctttctataaaaacaattctgttattaatagttgactgacttcagtaactttgaggagtagaatgaaacttattaggcaagatctttccacatacactacattgtattgttcaaaattcatagaaattacttgcaatatattgatttaagccttatgtagtgactgttgctatatttgaagtagcatttttagtttgctgtttttcctcactgcttaatcctacaaaaaccagccatctgcctaaaaaataaaagagcaaaaatgaatcagtgcaaccggtatacgaaaaataataattattaataaaactgtaaaggga

SEQ ID NO: 165707 - DNA, 755 bp, Homo sapiens
  Payload ID: 12625
  Gene Symbol: PLA2G12A
  Gene Name: phospholipase A2, group XIIA
  ENST ID: ENST00000507961
  CDS Start-End: 148-360
tgagggccagccgggaaggaggcgtggatatggagctggctgctgccaagtccggggcccgcgccgctgcctagcgcgtcctggggactctgtggggacgcgccccgcgccgcggctcggggacccgtagagcccggcgctgcgcgcatggccctgctctcgcgccccgcgctcaccctcctgctcctcctcatggccgctgttgtcaggtgccaggagcaggcccagaccaccgactggagagccaccctgaagaccatccggaacggcgttcataagatagacacgtacctgaacgccgccttggacctcctgggaggcgaggacggtctctgccagtataaatgcagtgacgcttaacattggtatcccttccctgacaaagtgttgcaaccaacacgacaggtgctatgagacctgtggcaaaagcaagaatgactgtgatgaagaattccagtattgcctctccaagatctgccgagatgtacagaaaacactaggactaactcagcatgttcaggcatgtgaaacaacagtggagctcttgtttgacagtgttatacatttaggttgtaaaccatatctggacagccaacgagccgcatgcaggtgtcattatgaagaaaaaactgatctttaaaggagatgccgacagctagtgacagatgaagatggaagaacatacctttgacaaataactaatgtttttacaacataaaactgtcttatttttgtgaaaggattattttgagacc

SEQ ID NO: 165708 - DNA, 1189 bp, Homo sapiens
  Payload ID: 12625
  Gene Symbol: PLA2G12A
  Gene Name: phospholipase A2, group XIIA
  ENST ID: ENST00000502283
  CDS Start-End: 166-729
gtaaagacagcgagatcctgagggccagccgggaaggaggcgtggatatggagctggctgctgccaagtccggggcccgcgccgctgcctagcgcgtcctggggactctgtggggacgcgccccgcgccgcggctcggggacccgtagagcccggcgctgcgcgcatggccctgctctcgcgccccgcgctcaccctcctgctcctcctcatggccgctgttgtcaggtgccaggagcaggcccagaccaccgactggagagccaccctgaagaccatccggaacggcgttcataagatagacacgtacctgaacgccgccttggacctcctgggaggcgaggacggtctctgccagtataaatgcagtgacggatctaagcctttcccacgttatggttataaaccctccccaccgaatggatgtggctctccactgtttggtcttaacattggtatcccttccctgacaaagtgttgcaaccaacacgacaggtgctatgagacctgtggcaaaagcaagaatgactgtgatgaagaattccagtattgcctctccaagatctgccgagatgtacagaaaacactaggactaactcagcatgttcaggcatgtgaaacaacagtggagctcttgtttgacagtgttatacatttaggttgtaaaccatatctggacagccaacgagccgcatgcaggtgtcattatgaagaaaaaactgatctttaaaggagatgccgacagctagtgacagatgaagatggaagaacatacctttgacaaataactaatgtttttacaacataaaactgtcttatttttgtgaaaggattattttgagaccttaaaataatttatatcttgatgttaaaacctcaaagcaaaaaaagtgagggagatagtgaggggagggcacgcttgtcttctcaggtatcttccccagcattgctcccttacttagtatgccaaatgtcttgaccaatatcaaaaacaagtgcttgtttagcggagaattttgaaaagaggaatatataactcaattttcacaaccacatttaccaaaaaaagagatcaaatataaaattcatcataatgtctgttcaacattatcttatttggaaaatggggaaattatcacttacaagtatttgtttactatgaaattttaaatacacatttatgcctagaa

SEQ ID NO: 165709 - DNA, 1128 bp, Homo sapiens
  Payload ID: 12626
  Gene Symbol: PLA2G12B
  Gene Name: phospholipase A2, group XIIB
  Uniprot ID: Q9BX93
  ENST ID: ENST00000373032
  CDS Start-End: 94-681
cctgcctgacatctgggtagggggtttgtccctggaattctgggacactggctggggtttgaggagagaagccagtacctacctggctgcaggatgaagctggccagtggcttcttggttttgtggctcagccttgggggtggcctggctcagagcgacacgagccctgacacggaggagtcctattcagactggggccttcggcacctccggggaagctttgaatccgtcaatagctacttcgattcttttctggagctgctgggagggaagaatggagtctgtcagtacaggtgccgatatggaaaggcaccaatgcccagacctggctacaagccccaagagcccaatggctgcggctcctatttcctgggtctcaaggtaccagaaagtatggacttgggcattccagcaatgacaaagtgctgcaaccagctggatgtctgttatgacacttgcggtgccaacaaatatcgctgtgatgcaaaattccgatggtgtctccactcgatctgctctgaccttaagcggagtctgggctttgtctccaaagtggaagcagcctgtgattccctggttgacactgtgttcaacaccgtgtggaccttgggctgccgcccctttatgaatagtcagcgggcagcttgcatctgtgcagaggaggagaaggaagagttatgaggaagaagtgattccttcctggttttgagtgacaccacagctgtcagccttcaagatgtcaagtcttcgagtcagcgtgactcattcgttcttccaacagtttggacaccacaaagcaggagaaagggaacatttttctacagctggaaagtgagtcctatcctttgaggaaatttgaaaaaagacatggagtggtttgaaagctactcttcatttaagactgctctccccaaccaagacacatttgcctggaaattcagttcttagcttaaagactaaaatgcaagcaaaccctgcaattcctggacctgatagttatattcatgagtgaaattgtggggagtccagccatttgggaggcaatgactttctgctggcccatgtttcagttgccagtaagcttctcacatttaataaagtgtactttttagaacatttggaaagaga

SEQ ID NO: 165710 - DNA, 2727 bp, Homo sapiens
  Payload ID: 12627
  Gene Symbol: PLA2G15
  Gene Name: phospholipase A2, group XV
  Uniprot ID: Q8NCC3
  ENST ID: ENST00000219345
  CDS Start-End: 84-1322
aagcgcgtcgccaccgcccccgcctaggcgagagcccagagagctgaacctgcatcccggacctgcggcgaccgtcgtacaccatgggcctccacctccgcccctaccgtgtggggctgctcccggatggcctcctgttcctcttgctgctgctaatgctgctcgcggacccagcgctcccggccggacgtcaccccccagtggtgctggtccctggtgatttgggtaaccaactggaagccaagctggacaagccgacagtggtgcactacctctgctccaagaagaccgaaagctacttcacaatctggctgaacctggaactgctgctgcctgtcatcattgactgctggattgacaatatcaggctggtttacaacaaaacatccagggccacccagtttcctgatggtgtggatgtacgtgtccctggctttgggaagaccttctcactggagttcctggaccccagcaaaagcagcgtgggttcctatttccacaccatggtggagagccttgtgggctggggctacacacggggtgaggatgtccgaggggctccctatgactggcgccgagccccaaatgaaaacgggccctacttcctggccctccgcgagatgatcgaggagatgtaccagctgtatgggggccccgtggtgctggttgcccacagtatgggcaacatgtacacgctctactttctgcagcggcagccgcaggcctggaaggacaagtatatccgggccttcgtgtcactgggtgcgccctgggggggcgtggccaagaccctgcgcgtcctggcttcaggagacaacaaccggatcccagtcatcgggcccctgaagatccgggagcagcagcggtcagctgtctccaccagctggctgctgccctacaactacacatggtcacctgagaaggtgttcgtgcagacacccacaatcaactacacactgcgggactaccgcaagttcttccaggacatcggctttgaagatggctggctcatgcggcaggacacagaagggctggtggaagccacgatgccacctggcgtgcagctgcactgcctctatggtactggcgtccccacaccagactccttctactatgagagcttccctgaccgtgaccctaaaatctgctttggtgacggcgatggtactgtgaacttgaagagtgccctgcagtgccaggcctggcagagccgccaggagcaccaagtgttgctgcaggagctgccaggcagcgagcacatcgagatgctggccaacgccaccaccctggcctatctgaaacgtgtgctccttgggccctgactcctgtgccacaggactcctgtggctcggccgtggacctgctgttggcctctggggctgtcatggcccacgcgttttgcaaagtttgtgactcaccattcaaggccccgagtcttggactgtgaagcatctgccatggggaagtgctgtttgttatcctttctctgtggcagtgaagaaggaagaaatgagagtctagactcaagggacactggatggcaagaatgctgctgatggtggaactgctgtgaccttaggactggctccacagggtggactggctgggccctggtcccagtccctgcctggggccatgtgtcccccctattcctgtgggcttttcatacttgcctactgggccctggccccgcagccttcctatgagggatgttactgggctgtggtcctgtacccagaggtcccagggatcggctcctggcccctcgggtgacccttcccacacaccagccacagataggcctgccactggtcatgggtagctagagctgctggcttccctgtggcttagctggtggccagcctgactggcttcctgggcgagcctagtagctcctgcaggcaggggcagtttgttgcgttcttcgtggttcccaggccctgggacatctcactccactcctacctcccttaccaccaggagcattcaagctctggattgggcagcagatgtgcccccagtcccgcaggctgtgttccaggggccctgatttcctcggatgtgctattggccccaggactgaagctgcctcccttcaccctgggactgtggttccaaggatgagagcaggggttggagccatggccttctgggaacctatggagaaagggaatccaaggaagcagccaaggctgctcgcagcttccctgagctgcacctcttgctaaccccaccatcacactgccaccctgccctagggtctcactagtaccaagtgggtcagcacagggctgaggatggggctcctatccaccctggccagcacccagcttagtgctgggactagcccagaaacttgaatgggaccctgagagagccaggggtcccctgaggcccccctaggggctttctgtctgccccagggtgctccatggatctccctgtggcagcaggcatggagagtcagggctgccttcatggcagtaggctctaagtgggtgactggccacaggccgagaaaagggtacagcctctaggtggggttcccaaagacgccttcacgctggactgagctgctctcccacagggtttctgtgcagctggattttctctgttgcatacatgcctggcatctgtctccccttgttcctgagtggccccacatggggctctgagcaggctgtatctggattctggcaataaaagtactctggatgctgtaaggtg

SEQ ID NO: 165711 - DNA, 943 bp, Homo sapiens
  Payload ID: 12627
  Gene Symbol: PLA2G15
  Gene Name: phospholipase A2, group XV
  ENST ID: ENST00000444212
  CDS Start-End: 55-693
gagagcccagagagctgaacctgcatcccggacctgcggcgaccgtcgtacaccatgggcctccacctccgcccctaccgtgtggggctgctcccggatggcctcctgttcctcttgctgctgctaatgctgctcgcggacccagcgctcccggccggacgtcaccccccagtggtgctgggagacaacaaccggatcccagtcatcgggcccctgaagatccgggagcagcagcggtcagctgtctccaccagctggctgctgccctacaactacacatggtcacctgagaaggtgttcgtgcagacacccacaatcaactacacactgcgggactaccgcaagttcttccaggacatcggctttgaagatggctggctcatgcggcaggacacagaagggctggtggaagccacgatgccacctggcgtgcagctgcactgcctctatggtactggcgtccccacaccagactccttctactatgagagcttccctgaccgtgaccctaaaatctgctttggtgacggcgatggtactgtgaacttgaagagtgccctgcagtgccaggcctggcagagccgccaggagcaccaagtgttgctgcaggagctgccaggcagcgagcacatcgagatgctggccaacgccaccaccctggcctatctgaaacgtgtgctccttgggccctgactcctgtgccacaggactcctgtggctcggccgtggacctgctgttggcctctggggctgtcatggcccacgcgttttgcaaagtttgtgactcaccattcaaggccccgagtcttggactgtgaagcatctgccatggggaagtgctgtttgttatcctttctctgtggcagtgaagaaggaagaaatgagagtctagactcaagggacactggatggcaagaatgctgctgatggtggaactgctgtg

SEQ ID NO: 165712 - DNA, 1346 bp, Homo sapiens
  Payload ID: 12627
  Gene Symbol: PLA2G15
  Gene Name: phospholipase A2, group XV
  Uniprot ID: Q8NCC3
  ENST ID: ENST00000413021
  CDS Start-End: 124-1080
gattggccggggggatgcgggggatgcgggcggcggggttaagcgcgtcgccaccgcccccgcctaggcgagagcccagagagctgaacctgcatcccggacctgcggcgaccgtcgtacaccatgggcctccacctccgcccctaccgtgtggggctgctcccggatggcctcctgttcctcttgctgctgctaatgctgctcgcggacccagcgctcccggccggacgtcaccccccagtggtgctgggctggtttacaacaaaacatccagggccacccagtttcctgatggtgtggatgtacgtgtccctggctttgggaagaccttctcactggagttcctggaccccagcaaaagcagcgtgggttcctatttccacaccatggtggagagccttgtgggctggggctacacacggggtgaggatgtccgaggggctccctatgactggcgccgagccccaacggcagccgcaggcctggaaggacaagtatatccgggccttcgtgtcactgggtgcgccctgggggggcgtggccaagaccctgcgcgtcctggcttcaggagacaacaaccggatcccagtcatcgggcccctgaagatccgggagcagcagcggtcagctgtctccaccagctggctgctgccctacaactacacatggtcacctgagaaggtgttcgtgcagacacccacaatcaactacacactgcgggactaccgcaagttcttccaggacatcggctttgaagatggctggctcatgcggcaggacacagaagggctggtggaagccacgatgccacctggcgtgcagctgcactgcctctatggtactggcgtccccacaccagactccttctactatgagagcttccctgaccgtgaccctaaaatctgctttggtgacggcgatggtactgtgaacttgaagagtgccctgcagtgccaggcctggcagagccgccaggagcaccaagtgttgctgcaggagctgccaggcagcgagcacatcgagatgctggccaacgccaccaccctggcctatctgaaacgtgtgctccttgggccctgactcctgtgccacaggactcctgtggctcggccgtggacctgctgttggcctctggggctgtcatggcccacgcgttttgcaaagtttgtgactcaccattcaaggccccgagtcttggactgtgaagcatctgccatggggaagtgctgtttgttatcctttctctgtggcagtgaagaaggaagaaatgagagtctagactcaagggacactggatggcaagaatgctgctgatggtggaactgctgtgaccttaggactggctc

SEQ ID NO: 165713 - DNA, 577 bp, Homo sapiens
  Payload ID: 12627
  Gene Symbol: PLA2G15
  Gene Name: phospholipase A2, group XV
  ENST ID: ENST00000565744
  CDS Start-End: 87-577
gttaagcgcgtcgccaccgcccccgcctaggcgagagcccagagagctgaacctgcatcccggacctgcggcgaccgtcgtacaccatgggcctccacctccgcccctaccgtgtggggctgctcccggatggcctcctgttcctcttgctgctgctaatgctgctcgcggacccagcgctcccggccggacgtcaccccccagtggtgctggtccctggtgatttgggtaaccaactggaagccaagctggacaagccgacagtggtgcactacctctgctccaagaagaccgaaagctacttcacaatctggctgaacctggaactgctgctgcctgtcatcattgactgctggattgacaatatcaggctggtttacaacaaaacatccagggccacccagtttcctgatggtgtggatgtacgtgtccctggctttgggaagaccttctcactggagttcctggaccccagcaaaagcagcgtggatgaaaacgggccctacttcctggccctccgcgagatgatcgaggagatgtaccagctgtatgggggccccgtggtgctggttgccca

SEQ ID NO: 165714 - DNA, 929 bp, Homo sapiens
  Payload ID: 12627
  Gene Symbol: PLA2G15
  Gene Name: phospholipase A2, group XV
  ENST ID: ENST00000568082
  CDS Start-End: 36-929
cctgcatcccggacctgcggcgaccgtcgtacaccatgggcctccacctccgcccctaccgtgtggggctgctcccggatggcctcctgttcctcttgctgctgctaatgctgctcgcggacccagcgctcccggccggacgtcaccccccagtggtgctggtccctggtgatttgggtaaccaactggaagccaagctggacaagccgacagtggtgcactacctctgctccaagaagaccgaaagctacttcacaatctggctgaacctggaactgctgctgcctgtcatcattgactgctggattgacaatatcaggctggtttacaacaaaacatccagggccacccagtttcctgatggtgtggatgtacgtgtccctggctttgggaagaccttctcactggagttcctggaccccagcaaaagcagcgtgggttcctatttccacaccatggtggagagccttgtgggctggggctacacacggggtgaggatgtccgaggggctccctatgactggcgccgagccccaactcagtggttccggctccaggacccttcccacctgacccctgcctggctctggcctgcagatgaaaacgggccctacttcctggccctccgcgagatgatcgaggagatgtaccagctgtatgggggccccgtggtgctggttgcccacagtatgggcaacatgtacacgctctactttctgcagcggcagccgcaggcctggaaggacaagtatatccgggccttcgtgtcactgggtgcgccctgggggggcgtggccaagaccctgcgcgtcctggcttcaggagacaacaaccggatcccagtcatcgggcccctgaagatccgggagcagcagcggtcagctgtctccaccagctggctgctgccctacaactacacatggtcacct

SEQ ID NO: 165715 - DNA, 781 bp, Homo sapiens
  Payload ID: 12627
  Gene Symbol: PLA2G15
  Gene Name: phospholipase A2, group XV
  ENST ID: ENST00000564827
  CDS Start-End: 55-781
gagagcccagagagctgaacctgcatcccggacctgcggcgaccgtcgtacaccatgggcctccacctccgcccctaccgtgtggggctgctcccggatggcctcctgttcctcttgctgctgctaatgctgctcgcggacccagcgctcccggccggacgtcaccccccagtggtgctggtccctggtgatttgggtaaccaactggaagccaagctggacaagccgacagtggtgcactacctctgctccaagaagaccgaaagctacttcacaatctggctgaacctggaactgctgctgcctgtcatcattgactgctggattgacaatatcaggctggagtgcagtggcgcaatctcggctcactacacctctgcctcccaggctcaagcacttctcctgcctcagactccggataactgggattacaggctggtttacaacaaaacatccagggccacccagtttcctgatggtgtggatgtacgtgtccctggctttgggaagaccttctcactggagttcctggaccccagcaaaagcagcgtgggttcctatttccacaccatggtggagagccttgtgggctggggctacacacggggtgaggatgtccgaggggctccctatgactggcgccgagccccaacggcagccgcaggcctggaaggacaagtatatccgggccttcgtgtcactgggtgcgccctgggggggcgtggccaagaccctgcgcgtcctggcttcaggagacaacaaccggatcccagtcatcggg

SEQ ID NO: 165716 - DNA, 1203 bp, Homo sapiens
  Payload ID: 12627
  Gene Symbol: PLA2G15
  Gene Name: phospholipase A2, group XV
  ENST ID: ENST00000566188
  CDS Start-End: 55-765
gagagcccagagagctgaacctgcatcccggacctgcggcgaccgtcgtacaccatgggcctccacctccgcccctaccgtgtggggctgctcccggatggcctcctgttcctcttgctgctgctaatgctgctcgcggacccagcgctcccggccggacgtcaccccccagtggtgctggtccctggtgatttgggtaaccaactggaagccaagctggacaagccgacagtggtgcactacctctgctccaagaagaccgaaagctacttcacaatctggctgaacctggaactgctgctgcctgtcatcattgactgctggattgacaatatcaggctggtttacaacaaaacatccagggccacccagtttcctgatggtgtggatgtacgtgtccctggctttgggaagaccttctcactggagttcctggaccccagcaaaagcagcgtgggttcctatttccacaccatggtggagagccttgtgggctggggctacacacggggtgaggatgtccgaggggctccctatgactggcgccgagccccaacggcagccgcaggcctggaaggacaagtatatccgggccttcgtgtcactgggtgcgccctgggggggcgtggccaagaccctgcgcgtcctggcttcaggagacaacaaccggatcccagtcatcgggcccctgaagatccgggagcagcagcggtcagctgtctccaccagctggctgctgccctacaactacacatggtcacctgagaaggtgttcgtgcagacacccacaatcaactacacactgcgggactaccgcaagttcttccaggacatcggctttgaagatggctggctcatgcggcaggacacagaagggctggtggaagccacgatgccacctggcgtgcagctgcactgcctctatggtactggcgtccccacaccagactccttctactatgagagcttccctgaccgtgaccctaaaatctgctttggtgacggcgatggtactgtgaacttgaagagtgccctgcagtgccaggcctggcagagccgccaggagcaccaagtgttgctgcaggagctgccaggcagcgagcacatcgagatgctggccaacgccaccaccctggcctatctgaaacgtgtgctccttgggccctgactcctgtgccacaggactcctgtggctcggccgtg

SEQ ID NO: 165717 - DNA, 584 bp, Homo sapiens
  Payload ID: 12627
  Gene Symbol: PLA2G15
  Gene Name: phospholipase A2, group XV
  ENST ID: ENST00000566978
  CDS Start-End: 57-317
gcgagagcccagagagctgaacctgcatcccggacctgcggcgaccgtcgtacaccatgggcctccacctccgcccctaccgtgtggggctgctcccggatggcctcctgttcctcttgctgctgctaatgctgctcgcggacccagcgctcccggccggacgtcaccccccagtggtgctggtagagatgggctttcaccatattggccaagctggtcttgaactcctgaccgcaagtgatccactcacctcggcctcccaaagtgctgggattacaggcatgagcccctgcgccctgcctcgaagtccctggtgatttgggtaaccaactggaagccaagctggacaagccgacagtggtgcactacctctgctccaagaagaccgaaagctacttcacaatctggctgaacctggaactgctgctgcctgtcatcattgactgctggattgacaatatcaggctggtttacaacaaaacatccagggccacccagtttcctgatggtgtggatgtacgtgtccctggctttgggaagaccttctcactggagttcctggaccccagcaaaagcagcgtggg

SEQ ID NO: 165718 - DNA, 2594 bp, Homo sapiens
  Payload ID: 12628
  Gene Symbol: PLA2G16
  Gene Name: phospholipase A2, group XVI
  Uniprot ID: P53816
  ENST ID: ENST00000323646
  CDS Start-End: 356-844
cttcctggaagggtgcgataaggccgggcgaggtgcctgggatgcttctccccttccgcgaggaagagatctaattgggtagggcgggtgtagactagcctgccgagccgcccgctggcacctgcagcctcctgggcgcccgccgggccccggcgagaaagttgttaaagggagcgaggtggttgttcctggggtccgaggcgcgcctctcacgccctgcccaacagaagccgcagtcccgtggggtctggagacgcagtttcctgttaatgacaataaatccctgctccccctgcctcagacatctacgcagcgaaatcgagcctggccttgagggtccacaccgcgagggaagatgcgtgcgcccattccagagcctaagcctggagacctgattgagatttttcgccctttctacagacactgggccatctatgttggcgatggatatgtggttcatctggcccctccaagtgaggtcgcaggagctggtgcagccagtgtcatgtccgccctgactgacaaggccatcgtgaagaaggaattgctgtatgatgtggccgggagtgacaagtaccaggtcaacaacaaacatgatgacaagtactcgccgctgccctgcagcaaaatcatccagcgggcggaggagctggtggggcaggaggtgctctacaagctgaccagtgagaactgcgagcactttgtgaatgagctgcgctatggagtcgcccgcagtgaccaggtcagagatgtcatcatcgctgcaagcgttgcaggaatgggcttggcagccatgagccttattggagtcatgttctcaagaaacaagcgacaaaagcaataactgaaaaagactgtcctgtcagcgatgactttatacatcaagggggtcttgttttgctagagagtttggggtttggtttgtggatttcattgtgatttataataaggcttattttcacagaataaaataaagcaaaacgagggaggattttattgggggaagtgcagcaagaactgcctggtgtgaagtctgttcagggaacagccgggctgtcttcctggtcagggattgtctttcactttctttttgcgtgctgtgttctttgcattgcaggaggcagagtccagctccagttatctcaagtagagggcgtttctggtcgtcaggatacatgcggggcggaagggagacagaaagacataatacacaagaacagaaagcagcagacagccaggacccttggcccggaactagatctaggatggcctctgagactcagcagctggagtctgtagatgttcagctgagttgaaaaaaaaaaagtcctcggctataaggaaatttagtatagatgcttgccaatcttactaaaatttcccttattttcctttgctctacacgtctttcctttgccttgttgcttccatctccttggcactcctgcttcctcactgcttctgcttgccatgatccccaagtctctgacccaccttcctgcctgctcctctcctcccacattggctcagattctttccccgctgtctgtgggtccacactcccagtggcacctccaggagagaatctgattggctcagttcgccagataactcaactttcccattggctacctttgggtcaggtgatctccactagacctatcgcctatgcctgatggtgggtcacatggtgcaaatgttgcctgagagcttagtggattagggatgtggctgggctcatggttgacgtccctgctgctgagcccttacgggtcaggctgggagaaggtaccatgttgtgtgactggtcatttgaggtcttgcagctgttgcttgctgggcttggcaggtgttcaaagtgaccatttttctgaagggtttttttctgagtattcctcagatgtactcccctggggccgacggtctttccttccacagggcgatgcttccctacttgcttgtgaatgtttccttcatctccaggttgtctggggacaattctgtcttttggaggcctgggcaggatttacagagggctccatgccagctccttcctgccgggtccacttctggtgtagggtaaacacctgcccattcatgtcctagtgttgatagaataatcattttctttcagtacagtttcctttttttttttttttgccccggctttttagatgtagcacttaatgccagttctcgagctccccaaacttaagggacacaggtcaacaagcagtaggtctttggaagctcgctctctcacatggtataaggtgagggggacacatggaatgtaaacctccaaactaattatgggggaaaaaggaatgagaaaaacaaacacaagaaggcaaaacaaaaacacctggttcaattaaaaacaacaacaaagcaaaacaaaaaaaacccaaaaccaaaccacacaataaatgagaaaaaaattacataaaacagatgacatgtatagaaataaaaaaatagaatggaggaactaattccaaatatataagtaatcctaagtggactaaatttgcaaagtaaaaggcaaacattacactggattaaaaaacaaatccagggaatacagtttacag

SEQ ID NO: 165719 - DNA, 1099 bp, Homo sapiens
  Payload ID: 12628
  Gene Symbol: PLA2G16
  Gene Name: phospholipase A2, group XVI
  Uniprot ID: P53816
  ENST ID: ENST00000415826
  CDS Start-End: 140-628
gggtgacctcacgccggcccggccaccgcggccattagacccggtccaattgctggggctgcagcgctgcctccgagaccgcgagacatctacgcagcgaaatcgagcctggccttgagggtccacaccgcgagggaagatgcgtgcgcccattccagagcctaagcctggagacctgattgagatttttcgccctttctacagacactgggccatctatgttggcgatggatatgtggttcatctggcccctccaagtgaggtcgcaggagctggtgcagccagtgtcatgtccgccctgactgacaaggccatcgtgaagaaggaattgctgtatgatgtggccgggagtgacaagtaccaggtcaacaacaaacatgatgacaagtactcgccgctgccctgcagcaaaatcatccagcgggcggaggagctggtggggcaggaggtgctctacaagctgaccagtgagaactgcgagcactttgtgaatgagctgcgctatggagtcgcccgcagtgaccaggtcagagatgtcatcatcgctgcaagcgttgcaggaatgggcttggcagccatgagccttattggagtcatgttctcaagaaacaagcgacaaaagcaataactgaaaaagactgtcctgtcagcgatgactttatacatcaagggggtcttgttttgctagagagtttggggtttggtttgtggatttcattgtgatttataataaggcttattttcacagaataaaataaagcaaaacgagggaggattttattgggggaagtgcagcaagaactgcctggtgtgaagtctgttcagggaacagccgggctgtcttcctggtcagggattgtctttcactttctttttgcgtgctgtgttctttgcattgcaggaggcagagtccagctccagttatctcaagtagagggcgtttctggtcgtcaggatacatgcggggcggaagggagacagaaagacataatacacaagaacagaaagcagcagacagccaggacccttggcccggaactagatctaggatggcctctgagactcagcagctggagtctgtagatgttcagctgagttg

SEQ ID NO: 165720 - DNA, 243 bp, Homo sapiens
  Payload ID: 12628
  Gene Symbol: PLA2G16
  Gene Name: phospholipase A2, group XVI
  ENST ID: ENST00000540943
  CDS Start-End: 161-243
cttgggttaaaaagtattctgaaagcatcctcactgtcctccctggtcccgcacagtgccagagccgggggtcttggactgagtcagagttgcatgggtgcatctggagggaccttgattggagagaggtgaggtcgcaggagctggtgcagccagtgtcatgtccgccctgactgacaaggccatcgtgaagaaggaattgctgtatgatgtggccgggagtgacaagtaccaggtcaacaa

SEQ ID NO: 165721 - DNA, 4234 bp, Homo sapiens
  Payload ID: 12629
  Gene Symbol: PLAA
  Gene Name: phospholipase A2-activating protein
  Uniprot ID: Q9Y263
  ENST ID: ENST00000397292
  CDS Start-End: 419-2806
cacaaactgttgggcccggagtcggaagagacccgggtttgggaaggaccccagggtcaggcgtcctggtggaagggcgggcctctttctctcttgctcagcagggagtccagagccctggaggaaagccagctcagctccgcatcggcgtcggcggttgggacgcacacactctgcgtcatggagggctgaggccgatgatgaattccggagtgcctgtcaggcttgctgtgtcactcggcccgctcggcgcgccccttcccagccgcccttccgtaccggctctcgggctcttccggtctccggccgccccttacctgcaggctcttctcccgccgcggcccggcgctctccgagtcgcccctgcggactggtctcgcacagtgcctgggcaccgggcgccagacagacactggccatgacgagcggcgcaaccaggtaccggctgagctgctcgctccggggccacgagctggacgtacggggcctggtgtgctgcgcctatccgccgggagcctttgtgtccgtgtcccgagaccgcaccacccgcctctgggccccagacagtccaaacaggagctttacagaaatgcactgtatgagtggccattccaattttgtatcttgtgtatgcatcataccctcaagtgacatctaccctcatggcctaattgccaccggtggaaatgaccacaatatatgcattttctcactggacagtccaatgccactttatattctaaaaggccacaaaaatactgtttgtagtctatcatctggaaaatttgggacattacttagtggttcatgggacaccactgctaaagtctggctgaatgacaagtgcatgatgaccttgcagggtcatacagctgcagtgtgggcggtaaagatcttacctgaacagggcttaatgttgactggatcagcagacaagactgttaaactgtggaaggctggaagatgtgagaggactttttcagggcatgaagactgtgtaagaggtttggcaattttgagtgaaacagaatttctttcctgtgcaaatgatgctagtattagaaggtggcaaatcactggcgagtgtcttgaagtatattatggacatacaaattatatttatagcatatccgtttttccaaattgtagagactttgtgacaacagcagaggacagatctctgagaatctggaaacatggggaatgtgctcaaactatccgacttccagctcagtctatatggtgctgctgtgtgctcgacaatggtgacattgtggttggtgcgagtgatggcattattagagtgtttacagaatcagaagatcgaacagcaagtgctgaagaaatcaaggcttttgaaaaagaactgtctcacgcaaccattgattctaaaactggcgatttaggggacatcaatgctgagcagcttcctgggagggaacatcttaatgaacctggtactagagaaggacagactcgtctaatcagagatggggagaaagtcgaagcctatcagtggagtgttagtgaagggaggtggataaaaattggtgatgttgttggctcatctggtgctaatcagcaaacatctggaaaagttttatatgaagggaaagaatttgattatgttttctcaattgatgtcaatgaaggtggaccatcatataaattgccatataataccagtgatgacccttggttaactgcatacaacttcttacagaagaatgatttgaatcctatgtttctggatcaagtagctaaatttattattgataacacaaaaggtcaaatgttgggacttgggaatcccagcttttcagatccatttacaggtggtggtcggtatgttccgggctcttcgggatcttctaacacactacccacagcagatccttttacaggtgctggtcgttatgtaccaggttctgcaagtatgggaactaccatggccggagttgatccatttacagggaatagtgcctaccgatcagctgcatctaaaacaatgaatatttatttccctaaaaaagaggctgtcacatttgaccaagcaaaccctacacaaatattaggtaaactgaaggaacttaatggaactgcacctgaagagaagaagttaactgaggatgacttgatacttcttgagaagatactgtctctaatatgtaatagttcttcagaaaaacccacagtccagcaacttcagattttgtggaaagctattaactgtcctgaagatattgtctttcctgcacttgacattcttcggttgtcaattaaacaccccagtgtgaatgagaacttctgcaatgaaaaggaaggggctcagttcagcagtcatcttatcaatcttctgaaccctaaaggaaagccagcaaaccagctgcttgctctcaggactttttgcaattgttttgttggccaggcaggacaaaaactcatgatgtcccagagggaatcactgatgtcccatgcaatagaactgaaatcagggagcaataagaacattcacattgctctggctacattggccctgaactattctgtttgttttcataaagaccataacattgaagggaaagcccaatgtttgtcactaattagcacaatcttggaagtagtacaagacctagaagccacttttagacttcttgtggctcttggaacacttatcagtgatgattcaaatgctgtacaattagccaagtctttaggtgttgattctcaaataaaaaagtattcctcagtatcagaaccagctaaagtaagtgaatgctgtagatttatcctaaatttgctgtagcagtggggaagagggacggatatttttaattgattagtgtttttttcctcacatttgacatgactgataacagataattaaaaaaagagaatacggtggattaagtaaaattttacatcttgtaaagtggtggggaggggaaacagaaataaaatttttgcactgctgaactgtgagattttcctgtgtaatttgggtagattttcaagagtgtgaacacaaatttaaaataagctataatcagcaacaacacaatgacaatgacatcttccccttaccttagccactaagaagacaagggctgttactcatataacttgcttttattacttaatgtacaccaaactgttgttgtcaattatcttttatttaacttctccaccttcattgctagatccttcgaacagcactgatacatttcaaggtcttgttttaggataactactttaaaattttttaaattatattaaatttataaaataatttataaattcatatattaaaacaatataagataatttcttgatttgtcatttataaatcctaaagtatatttgtttaatggcctatttttagatgaagaaaaagccagttggtaagctgtgttagtcatgtatcagttcagacagacgaggtctcaatttaactccaggcttagatccagtttcttttgcccttcactatttgaggtaacttcatttttcattctagttttgatatttggctgtttatttttgtcattttccattatttcaaagggaatttggaacatgttgaattttatcaggtggttacataagcaagagtacatcaaactgtattatttgaaagtctagaacctgtcatgtgaaattactatttttgagccctctatgtggtccaggcagaatagtagacacactgatatttaatccttaaaacccctttaaatgagggccagtattatctctgctttcagaagtagacataataggatgaatcatataacagaaaaaaaaaagtgaagccaagagggagttaactacttaaagtacatgctatgctatactttctagagagatcacagatgtgtgtgaacatcctagcaattaacacaaagaaggaaccatcacattaattacacaatttattgtgtctgaggtaacccagtttcttgagagaagcgtaactattttcaaaagtgggaaagatcttttcataaagacgttgccagaaatagcaacattctcaatactcgtggtgtaaaaaccatgaatcccctggcttaatgccaaattatagccttagaagaataattgttccccaaatgggcaagaaaggttctaattgtcaagagtaacccaagtaagaacttttggaatatcaaaaggaaatgagcaaaatgtaaatagaggggatatgtactttgctgagtattaaattggaact

SEQ ID NO: 165722 - DNA, 730 bp, Homo sapiens
  Payload ID: 12629
  Gene Symbol: PLAA
  Gene Name: phospholipase A2-activating protein
  ENST ID: ENST00000523212
  CDS Start-End: 1-730
acggggcctggtgtgctgcgcctatccgccgggagcctttgtgtccgtgtcccgagaccgcaccacccgcctctgggccccagacaggagctttacagaaatgcactgtatgagtggccattccaattttgtatcttgtgtatgcatcataccctcaagtgacatctaccctcatggcctaattgccaccggtggaaatgaccacaatatatgcattttctcactggacagtccaatgccactttatattctaaaaggccacaaaaatactgtttgtagtctatcatctggaaaatttgggacattacttagtggttcatgggacaccactgctaaagtctggctgaatgacaagtgcatgatgaccttgcagggtcatacagctgcagtgtgggcggtaaagatcttacctgaacagggcttaatgttgactggatcagcagacaagactgttaaactgtggaaggctggaagatgtgagaggactttttcagggcatgaagactgtgtaagaggtttggcaattttgagtgaaacagaatttctttcctgtgcaaatgatgctagtattagaaggtggcaaatcactggcgagtgtcttgaagtatattatggacatacaaattatatttatagcatatccgtttttccaaattgtagagactttgtgacaacagcagaggacagatctctgagaatctggaaacatggggaatgtgctcaaactatc

SEQ ID NO: 165723 - DNA, 2041 bp, Homo sapiens
  Payload ID: 12629
  Gene Symbol: PLAA
  Gene Name: phospholipase A2-activating protein
  ENST ID: ENST00000520884
  CDS Start-End: 189-2018
gtgtcactcggcccgctcggcgcgccccttcccagccgcccttccgtaccggctctcgggctcttccggtctccggccgccccttacctgcaggctcttctcccgccgcggcccggcgctctccgagtcgcccctgcggactggtctcgcacagtgcctgggcaccgggcgccagacagacactggccatgacgagcggcgcaaccaggtaccggctgagctgctcgctccggggccacgagctggacgtacggggcctggtgtgctgcgcctatccgccgggagcctttgtgtccgtgtcccgagaccgcaccacccgcctctgggccccagacagtccaaacaggagctttacagaaatgcactgtatgagtggccattccaattttgtatcttgtgtatgcatcataccctcaagtgacatctaccctcatggcctaattgccaccggtggaaatgaccacaatatatgcattttctcactggacagtccaatgccactttatattctaaaaggccacaaaaatactgtttgtagtctatcatctggaaaatttgggacattacttagtggttcatgggacaccactgctaaagtctggctgaatgacaagtgcatgatgaccttgcagggtcatacagctgcagtgtgggcggtaaagatcttacctgaacagggcttaatgttgactggatcagcagacaagactgttaaactgtggaaggctggaagatgtgagaggactttttcagggcatgaagactgtgtaagaggtttggcaattttgagtgaaacagaatttctttcctgtgcaaatgatgctagtattagaaggtggcaaatcactggcgagtgtcttgaagtatattatggacatacaaattatatttatagcatatccgtttttccaaattgtagagactttgtgacaacagcagaggacagatctctgagaatctggaaacatggggaatgtgctcaaactatccgacttccagctcagtctatatggtgctgctgtgtgctcgacaatggtgacattgtggttggtgcgagtgatggcattattagagtgtttacagaatcagaagatcgaacagcaagtgctgaagaaatcaaggcttttgaaaaagaactgtctcacgcaaccattgattctaaaactggcgatttaggggacatcaatgctgagcagcttcctgggagggaacatcttaatgaacctggtactagagaaggacagactcgtctaatcagagatggggagaaagtcgaagcctatcagtggagtgttagtgaagggaggtggataaaaattggtgatgttgttggctcatctggtgctaatcagcaaacatctggaaaagttttatatgaagggaaagaatttgattatgttttctcaattgatgtcaatgaaggtggaccatcatataaattgccatataataccagtgatgacccttggttaactgcatacaacttcttacagaagaatgatttgaatcctatgtttctggatcaagtagctaaatttattattgataacacaaaaggtcaaatgttgggacttgggaatcccagcttttcagatccatttacaggtggtggtcggtatgttccgggctcttcgggatcttctaacacactacccacagcagatccttttacaggtgctggtcgttatgtaccaggttctgcaagtatgggaactaccatggccggagttgatccatttacagggaatagtgcctaccgatcagctgcatctaaaacaatgaatatttatttccctaaaaaagaggctgtcacatttgaccaagcaaaccctacacaaatattaggtaaactgaaggaacttaatggaactgcacctgaagagaagaagttaactgaggatgacttgatacttcttgagaagatactgtctctaatatgtaatagttcttcagaaaaacccacagtccagcaacttcagattttgtggaaagctattaactgtcctgaaggtaaataaacactcttcaaaaatgtaaccag

SEQ ID NO: 165724 - DNA, 868 bp, Homo sapiens
  Payload ID: 12629
  Gene Symbol: PLAA
  Gene Name: phospholipase A2-activating protein
  ENST ID: ENST00000517642
  CDS Start-End: 1-868
tttaggggacatcaatgctgagcagcttcctgggagggaacatcttaatgaacctggtactagagaaggacagactcgtctaatcagagatggggagaaagtcgaagcctatcagtggagtgttagtgaagggaggtggataaaaattggtgatgttgttggctcatctggtgctaatcagcaaacatctggaaaagttttatatgaagggaaagaatttgattatgttttctcaattgatgtcaatgaaggtggaccatcatataaattgccatataataccagtgatgacccttggttaactgcatacaacttcttacagaagaatgatttgaatcctatgtttctggatcaagtagctaaatttattattgataacacaaaaggtcaaatgttgggacttgggaatcccagcttttcagatccatttacaggtggtggtcggtatgttccgggctcttcgggatcttctaacacactacccacagcagatccttttacaggtgctggtcgttatgtaccaggttctgcaagtatgggaactaccatggccggagttgatccatttacagggaatagtgcctaccgatcagctgcatctaaaacaatgaatatttatttccctaaaaaagaggctgtcacatttgaccaagcaaaccctacacaaatattagatattgtctttcctgcacttgacattcttcggttgtcaattaaacaccccagtgtgaatgagaacttctgcaatgaaaaggaaggggctcagttcagcagtcatcttatcaatcttctgaaccctaaaggaaagccagcaaaccagctgcttgctctcaggactttttgcaattgttttgttggccaggcagga

SEQ ID NO: 165725 - DNA, 625 bp, Homo sapiens
  Payload ID: 12629
  Gene Symbol: PLAA
  Gene Name: phospholipase A2-activating protein
  ENST ID: ENST00000487173
  CDS Start-End: 1-409
tattgataacacaaaaggtcaaatgttgggacttgggaatcccagcttttcagatccatttacaggtgctggtcgttatgtaccaggttctgcaagtatgggaactaccatggccggagttgatccatttacagggaatagtgcctaccgatcagctgcatctaaaacaatgaatatttatttccctaaaaaagaggctgtcacatttgaccaagcaaaccctacacaaatattaggtaaactgaaggaacttaatggaactgcacctgaagagaagaagttaactgaggatgacttgatacttcttgagaagatactgtctctaatatgtaatagttcttcagaaaaacccacagtccagcaacttcagattttgtggaaagctattaactgtcctgaaggtaaataaacactcttcaaaaatgtaaccagaaagcaagaagttttatcttcatttctatcaatattactggtatttgtggattaaatgaaagttaacttcggtagttctaaatcactatggaaaatcttcacgaaaagggttcactacactactggaattgatgatcttgtttccgttacatgccttttgagaatctgaaggtaatatatgatccccatatat

SEQ ID NO: 165726 - DNA, 2426 bp, Homo sapiens
  Payload ID: 12630
  Gene Symbol: PLBD1
  Gene Name: phospholipase B domain containing 1
  Uniprot ID: Q6P4A8
  ENST ID: ENST00000240617
  CDS Start-End: 654-2315
agtgtgtctagtgtcagccccgtctgaatcactctcctgtggtggctccagccaacgaagaggaagcaaaaaggataaaaaatctgagctacagcgcatggatttaggttaaacagcctgggaatgaggggtacgctaatcgctgaggaaaacgcacctgtggaggcctctccagaaacagcagaggatccgagctgcgtgtaggcagggcgcgcatgtcaccctggcccgggcgcctggtccgctgctggagataaatggtcgaccccggagggagaggctagtaggggtgttgatgtgaactgattcgcccaagccttgggccgcaaaactgcgaaagaaagcggcaggcagcctctgcatttcccagaagtgcagctggggaactttcccagaccggcccaggggttgctagagggtcagacgtaaaggatccgcctttcctaggcggggtgggccccaggccaccacgtgaagcgtcctcgcccctcagagcccggagcaggccgggctcaagaaagaggaaagttgaggacgccccacctcggagaggcggcgcccctgagtaggccaggagcctctcttgcaacttctgccaccgcgggccaccgcggccgcctgatcccgcagaggaaggtcgcggccgtggagcgatgacccgcggcggtccgggcgggcgcccggggctgccacagccgccaccgcttctgctgctgctgctgctgctgccgctgttgttagtcaccgcggagccgccgaaacctgcaggagtctactatgcaactgcatactggatgcctgctgaaaagacagtacaagtcaaaaatgtaatggacaagaatggggacgcctatggcttttacaataactctgtgaaaaccacaggctggggcatcctggagatcagagctggctatggctctcaaaccctgagcaatgagatcatcatgtttgtggctggctttttggagggttacctcactgccccacacatgaatgaccactacacaaacctctacccacagctgatcacgaaaccttccatcatggataaagtgcaggattttatggagaagcaagataagtggacccggaaaaatatcaaagaatacaagactgattcattttggagacatacaggctatgtgatggcacaaatagatggcctctatgtaggagcaaagaagagggctatattagaagggacaaagccaatgaccctgttccagattcagttcctgaatagtgttggagatctattggatctgattccctcactctctcccacaaaaaacggcagcctaaaggtttttaagagatgggacatgggacattgctccgctcttatcaaggttcttcctggatttgagaacatcctttttgctcactcaagctggtacacgtatgcagccatgctcaggatatataaacactgggacttcaacgtcatagataaagataccagcagtagtcgcctctctttcagcagttacccagggtttttggagtctctggatgatttttacattcttagcagtggattgatattgctgcagaccacaaacagtgtgtttaataaaaccctgctaaagcaggtaatacccgagactctcctgtcctggcaaagagtccgtgtggccaatatgatggcagatagtggcaagaggtgggcagacatcttttcaaaatacaactctggcacctataacaatcaatacatggttctggacctgaagaaagtaaagctgaaccacagtcttgacaaaggcactctgtacattgtggagcaaattcctacatatgtagaatattctgaacaaactgatgttctacggaaaggatattggccctcctacaatgttcctttccatgaaaaaatctacaactggagtggctatccactgttagttcagaagctgggcttggactactcttatgatttagctccacgagccaaaattttccggcgtgaccaagggaaagtgactgatacggcatccatgaaatatatcatgcgatacaacaattataagaaggatccttacagtagaggtgacccctgtaataccatctgctgccgtgaggacctgaactcacctaacccaagtcctggaggttgttatgacacaaaggtggcagatatctacctagcatctcagtacacatcctatgccataagtggtcccacagtacaaggtggcctccctgtttttcgctgggaccgtttcaacaaaactctacatcagggcatgccagaggtctacaactttgattttattaccatgaaaccaattttgaaacttgatataaaatgaaggagggagatgacggactagaagactgtaaataagataccaaaggcactattttagctatgtttttcccatcagaattatgcaataaaatatattaatttgtcactttca

SEQ ID NO: 165727 - DNA, 553 bp, Homo sapiens
  Payload ID: 12630
  Gene Symbol: PLBD1
  Gene Name: phospholipase B domain containing 1
  ENST ID: ENST00000540572
  CDS Start-End: 120-553
ggaggtgaaccagaatggagagatgggcgtgatgagtgcagggattgtgtagggacggacccacaaaattatcaacaccatacggagtcacaggagtctactatgcaactgcatactggatgcctgctgaaaagacagtacaagtcaaaaatgtaatggacaagaatggggacgcctatggcttttacaataactctgtgaaaaccacaggctggggcatcctggagatcagagctggctatggctctcaaaccctgagcaatgagatcatcatgtttgtggctggctttttggagggttacctcactgccccacacatgaatgaccactacacaaacctctacccacagctgatcacgaaaccttccatcatggataaagtgcaggattttatggagaagcaagataagtggacccggaaaaatatcaaagaatacaagactgattcattttggagacatacaggctatgtgatggcacaaatagatggcctctatgtaggagcaaagaagagggctatattagaagggacaaagccaatgaccctgttcca

SEQ ID NO: 165728 - DNA, 857 bp, Homo sapiens
  Payload ID: 12630
  Gene Symbol: PLBD1
  Gene Name: phospholipase B domain containing 1
  ENST ID: ENST00000541618
  CDS Start-End: 33-155
atcccgcagaggaaggtcgcggccgtggagcgatgacccgcggcggtccgggcgggcgcccggggctgccacagccgccaccgcttctgctgctgctgctgctgctgccgctgttgttagtcaccgcggagccgccgaaacctgcagacacatgaatgaccactacacaaacctctacccacagctgatcacgaaaccttccatcatggataaagtgcaggattttatggagaagcaagataagtggacccggaaaaatatcaaagaatacaagactgattcattttggagacatacaggctatgtgatggcacaaatagatggcctctatgtaggagcaaagaagagggctatattagaagggacaaagccaatgaccctgttccagattcagttcctgaatagtgttggagatctattggatctgattccctcactctctcccacaaaaaacggcagcctaaaggtttttaagagatgggacatgggacattgctccgctcttatcaaggttcttcctggatttgagaacatcctttttgctcactcaagctggtacacgtatgcagccatgctcaggatatataaacactgggacttcaacgtcatagataaagataccagcagtagtcgcctctctttcagcagttacccagggtttttggagtctctggatgatttttacattcttagcagtggattgatattgctgcagaccacaaacagtgtgtttaataaaaccctgctaaagcaggtaatacccgagactctcctgtcctggcaaagagtccgtgtggccaatatgatggcagatagtggcaagaggtgggcagacatcttttcaaaatacaactctg

SEQ ID NO: 165729 - DNA, 4800 bp, Homo sapiens
  Payload ID: 12631
  Gene Symbol: PLBD2
  Gene Name: phospholipase B domain containing 2
  Uniprot ID: Q8NHP8
  ENST ID: ENST00000280800
  CDS Start-End: 32-1801
cccgggctgcggggcgcagcattgtgcggtcatggtgggccagatgtactgctaccccggcagccacctggcccgggcgctgacgcgggcgctggcgctggccctggtgctggccctgctggtcgggccgttcctgagcggcctggcgggggcgatcccagcgccggggggccgctgggcgcgcgatgggcaggtccctccagcctcccgcagccgctcggtgctcctggacgtctcggcgggccagctgcttatggtggacggacgccaccctgacgccgtggcctgggccaacctcaccaacgccatccgcgagactgggtgggccttcctggagctgggcacaagtggccaatacaatgacagcttgcaggcctatgcagccggtgtggtggaggctgctgtgtcggaggagctcatctacatgcactggatgaacacggtggtgaattactgcggccccttcgagtatgaagtcggctactgcgagaggctgaagagcttcctggaggccaacctagagtggatgcaggaagagatggagtcaaacccagactcaccttactggcaccaggtgcggctgaccctcctgcagctgaaaggcctggaggacagctacgaaggccgtgtgagcttcccagctgggaagttcaccatcaaacccttggggttcctcctgctgcagctctctggggacctggaagacctggagctggccctgaacaagaccaagatcaaaccttctctgggctctggctcctgttctgccctcatcaagctgctccctggccagagtgacctcctggttgcccacaacacctggaacaactaccagcacatgctgcgtgtcatcaagaagtactggctccagttccgggaaggcccctggggggactacccgctggttcccggcaacaagctggtcttctcctcctaccccggcaccatcttctcctgcgacgacttctacatcctgggcagtgggctggtgacactggagaccaccattggcaacaagaacccagccctgtggaagtatgtgcggcccaggggctgtgtgctggagtgggtacgcaacatcgtggccaaccgcctggcctcggatggggccacctgggcagacatcttcaagaggttcaacagcggcacgtataacaaccagtggatgatcgtggactacaaggcgttcatcccgggtgggcccagccccgggagccgggtgcttaccatcctggagcagatccccggcatggtggtggtggctgacaagacctcggagctctaccagaagacctactgggccagctacaacataccgtccttcgagactgtgttcaatgccagtgggctgcaggccctagtggcccagtatggggactggttttcttatgacgggagcccccgggcccagatcttccggcggaaccagtcactggtacaagacatggactccatggtcaggctgatgaggtacaatgacttcctccatgaccctctgtcactgtgcaaagcctgcaacccccagcccaatggggagaatgctatctccgcccgctccgacctcaacccggccaatggctcctaccccttccaggccctgcgtcagcgctcccatgggggtatcgatgtgaaggtgaccagcatgtcactggccaggatcctgagcctgctggcggccagcggtcccacgtgggaccaggtgcccccgttccagtggagcacctcgcccttcagcggcctgctgcacatgggccagccagacctctggaagttcgcgcctgtcaaggtttcatgggactgaagttctgtccctgctctgctgctttcgcccctgctgaccctcgtcagggtcacccccgtcccaaggccaccggacttctaactccagcccctcctgggggcttcgttctctgatctggggtctgagtcatctcctcctagagtgggtcacgaacctgatggggctcagaactgaccccctctctcccccgaggtgggtgggcaccgtggcgtctcttctgccctgccctaaatctcccactctctgtttctgtctgtttcctactgctgctctctcaacctcattcccacctctggggccccttcctcgtgcttctccttcctgagggtttgggaaggtcctggggcagactctggggctcccatggggtggaaggagcctgttccagcacccttctcccagctgcattcccacgggtggccctggagctggtgagctttgtctgggcgttgtcttcggctggcattgctcctcccagctctggcccctctgctccctcaggaagcagtcccctcgtctccctttctgggcagcttccttgaggacagaaacttgaaaacaaacacaaaccaaagtttctggccatctgtggctggagggttctgaatgtcctctctccatgtcaggcagagggtcagcccccatgcttctgcctcaggccccaccccaccccaccccaggcctgcccctcacctcagggccatacccacagcgccctgatggaggaaccagaccgcaggctgtgccaccattaaacaagagcggctgtggccccatgctgtgcttcttggggtggcagggaaggtggggtcagcgctttttctcctctcaggtttgggttctgcgccatcccccatgcagcctcctgtgcagccctctgtctgtccttctgtccattcattcatctgccaacatactcacccatcatccatctgcacagccttccacccacccatccgtcttccatcatccatccatccatctacctatccatttatcatccatccactcacccatccaaccacccatccaaccattcagccatctccatctgtccattttctttcttcttcttttttttttgtttttgttttttctgagtgggagtttcactctattgcccaggctggagtgcaatggcataatctctgctcactgcaacctctgcttcctgggttcaagcgattctcctgccttagcttcccaagtagctggggttacaggcatgagccaccatgcctggctaattttgtatttttagtagagacagggtttcaccatgttggccaggctggtctcgaactcctggcctcaagtgatccgcccgtcttggcctcccaaagtgcttggattacagatgtgagcccccgcacctggcctcatttgtccattttccatccacttacccacccacccatttactcatccagccattgactcatccatccacctatgagatcagacagggagggatccttttttgtattggtctgtataccacagcatggcttacgaagttcttatctatctatcacccatccacccacccatttatctacccacccattcatccacccacccatccaactacctatccattcatccatccacccatctgccaacgcatccatccatccacccacccaatcatctacccactcacctatccacccatccacctacctatttgtcacccatccacccatccatccatccaatcacccatccaaccatcaatccaaccattttcatctgttcattttccatccatctacccgtccacccattcactcctccatccacctacctatccatttatcacccatttacccatccatccatccatccttccaaccatttatccacccatccaaacatttccatctgtttttccatccatctacccatccacccattcactcatccatccaccttcctatccatttatcatccatctacccactcacccatccatccaaccttccaaccatttatccacccatccaactatttccatctgttcattttccacccatttacccatctactaattcactcatccatccacctacctatccatttatcatccatctacccactcacccatccatccatccttccaaccatttatccacccatccaaccatttccatctgttcatttccatccatctacccatctacccattcactcatccgtccacctatccatttatcacccatctacccatccatccacccactcatccatccattcatccatccacccacccacccgtccatccacctacctattcatttatcacccatccatccacacacgggtctgtgcagattcattaatatccacccatgcatccatatttatctattttctatccatcagccatccattcattcatatccatccatccatctatccatccagatgtttattgagcacctgtgttctgggtcctatttgggagccttgttaaccaccaagaccttcctaagccatattgtggtatacagacagatacaaaaaaaaaggctctctccctgtctgatctcatgcagcctgccttggagacaagactctcccagtgctgtgtgcttggagagaggaaagcacacagccctggagtcagagacctgggtttcaattctgtctccacctcttattagctagctatggactcctctctgagcctcgattacctcatctgtgaaatggggtaatggtgtgagcagcgtttccctgggggatgtgatgcagcccacttggggcctcatgcactcagcatctctttattagcaaacacttattgaacccctagtacatgccaggcactgttatgaggtcccggggatactttataacaaaagggacagaagcattcctgctcttgtgaagtttacattgactagatagtaaacaaaataaatgaaatatgcagtgtgtcagtgctggtaaacccgtggagaaaataaagcaaggttggggtctggggttgggaa

SEQ ID NO: 165730 - DNA, 2321 bp, Homo sapiens
  Payload ID: 12631
  Gene Symbol: PLBD2
  Gene Name: phospholipase B domain containing 2
  Uniprot ID: Q8NHP8
  ENST ID: ENST00000545182
  CDS Start-End: 36-1709
gtgacccgggctgcggggcgcagcattgtgcggtcatggtgggccagatgtactgctaccccggcagccacctggcccgggcgctgacgcgggcgctggcgctggccctggtgctggccctgctggtcgggccgttcctgagcggcctggcgggggcgatcccagcgccggggggccgctgggcgcgcgatgggcaggtccctccagcctcccgcagccgctcggtgctcctggacgtctcggcgggccagctgcttatggtggacggacgccaccctgacgccgtggcctgggccaacctcaccaacgccatccgcgagactgggtgggccttcctggagctgggcacaagtggccaatacaatgacagcttgcaggcctatgcagccggtgtggtggaggctgctgtgtcggaggagctcatctacatgcactggatgaacacggtggtgaattactgcggccccttcgagtatgaagtcggctactgcgagaggctgaagagcttcctggaggccaacctagagtggatgcaggaagagatggagtcaaacccagactcaccttactggcaccaggtgcggctgaccctcctgcagctgaaaggcctggaggacagctacgaaggccgtgtgagcttcccagctgggaagttcaccatcaaacccttggggttcctcctgctgcagctctctggggacctggaagacctggagctggccctgaacaagaccaagatcaaaccttctctgggctctggctcctgttctgccctcatcaagctgctccctggccagagtgacctcctggttgcccacaacacctggaacaactaccagcacatgctgcgtgtcatcaagaagtactggctccagttccgggaaggcccctggggggactacccgctggttcccggcaacaagctggtcttctcctcctaccccggcaccatcttctcctgcgacgacttctacatcctgggcagtgggctggtgacactggagaccaccattggcaacaagaacccagccctgtggaagtatgtgcggcccaggggctgtgtgctggagtgggtacgcaacatcgtggccaaccgcctggcctcggatggggccacctgggcagacatcttcaagaggttcaacagcggcaccggcatggtggtggtggctgacaagacctcggagctctaccagaagacctactgggccagctacaacataccgtccttcgagactgtgttcaatgccagtgggctgcaggccctagtggcccagtatggggactggttttcttatgacgggagcccccgggcccagatcttccggcggaaccagtcactggtacaagacatggactccatggtcaggctgatgaggtacaatgacttcctccatgaccctctgtcactgtgcaaagcctgcaacccccagcccaatggggagaatgctatctccgcccgctccgacctcaacccggccaatggctcctaccccttccaggccctgcgtcagcgctcccatgggggtatcgatgtgaaggtgaccagcatgtcactggccaggatcctgagcctgctggcggccagcggtcccacgtgggaccaggtgcccccgttccagtggagcacctcgcccttcagcggcctgctgcacatgggccagccagacctctggaagttcgcgcctgtcaaggtttcatgggactgaagttctgtccctgctctgctgctttcgcccctgctgaccctcgtcagggtcacccccgtcccaaggccaccggacttctaactccagcccctcctgggggcttcgttctctgatctggggtctgagtcatctcctcctagagtgggtcacgaacctgatggggctcagaactgaccccctctctcccccgaggtgggtgggcaccgtggcgtctcttctgccctgccctaaatctcccactctctgtttctgtctgtttcctactgctgctctctcaacctcattcccacctctggggccccttcctcgtgcttctccttcctgagggtttgggaaggtcctggggcagactctggggctcccatggggtggaaggagcctgttccagcacccttctcccagctgcattcccacgggtggccctggagctggtgagctttgtctgggcgttgtcttcggctggcattgctcctcccagctctggcccctctgctccctcaggaagcagtcccctcgtctccctttctgggcagcttccttgaggacagaaacttgaaaacaaacacaaaccaaagtttctggccatctgtggctggagggttctgaatgtcc

SEQ ID NO: 165731 - DNA, 465 bp, Homo sapiens
  Payload ID: 12631
  Gene Symbol: PLBD2
  Gene Name: phospholipase B domain containing 2
  ENST ID: ENST00000548997
  CDS Start-End: 1-159
gatgggcaggtccctccagcctcccgcagccgctcggtgctcctggacgtctcggcgggccagctgcttatggtggacggacgccaccctgacgccgtggcctgggccaacctcaccaacgccatccgcgagactggctcatctacatgcactggatgaacacggtggtgaattactgcggccccttcgagtatgaagtcggctactgcgagaggctgaagagcttcctggaggccaacctagagtggatgcaggaagagatggagtcaaacccagactcaccttactggcaccaggtgcggctgaccctcctgcagctgaaaggcctggaggacagctacgaaggccgtgtgagcttcccagctgggaagttcaccatcaaacccttggggttcctcctgctgcagctctctggggacctggaagacctggagctggccctgaacaagaccaagatcaaacctt

SEQ ID NO: 165732 - DNA, 5107 bp, Homo sapiens
  Payload ID: 12632
  Gene Symbol: PLB1
  Gene Name: phospholipase B1
  Uniprot ID: Q6P1J6
  ENST ID: ENST00000327757
  CDS Start-End: 45-4421
ggagcagctcttccagaggcccgagtcacctggagcattctggcatggggctgcggccaggcattttcctcctggagctgctgctgcttctggggcaagggacccctcagatccatacctctcctagaaagagtacattggaagggcagctatggccagagaccctgaagaattctccattcccatgcaacccaaataaattaggagtgaatatgccttctaaatcagttcactctctgaagccttctgatattaaatttgtggcagccattggcaatctggaaattcctccagacccagggacgggcgatctggagaagcaagactggactgaaaggccacagcaggtgtgcatgggagtgatgacagtcctttcagacatcatcagatatttcagtccttctgttccaatgcctgtgtgccacactggaaagagagtcataccccacgatggtgctgaagacttgtggattcaggctcaagaactggtgagaaacatgaaagagaacctgcaacttgactttcaatttgactggaagctcatcaatgtgttcttcagtaatgcaagccagtgttacctgtgcccctctgctcaacagaatgggcttgcggcgggcggcgtggatgagctgatgggggtgctggactacctgcagcaggaggtccccagagcatttgtaaacctggtggacctctctgaggttgcagaggtctctcgtcagtatcacggcacttggctcagccctgcaccagagccctgtaattgctcagaggagaccacccggctggccaaggtggtgatgcagtggtcttatcaggaagcctggaacagcctcctggcctccagcaggtacagtgagcaggagtccttcaccgtggttttccagcctttcttctatgagaccaccccatctctacactcggaggacccccgactccaggattctaccacgctggcctggcatctctggaataggatgatggagccagcaggagagaaagatgagccattgagtgtaaaacacgggaggccaatgaagtgtccctctcaggagagcccctatctgttcagctacagaaacagcaactacctgaccagactgcagaaaccccaagacaagcttgaggtaagagaaggagcggaaatcagatgtcctgacaaagacccctccgatacggttcccacctcagttcataggctgaagccggctgacatcaacgtaattggagccctgggtgactctctcacggcaggcaatggggccgggtccacacctgggaacgtcttggacgtcttgactcagtaccgaggcctgtcctggagcgtcggcggagatgagaacatcggcaccgttaccaccctggcgaacatcctccgggaattcaacccttccctgaagggcttctctgttggcactgggaaagaaaccagtcctaatgccttcttaaaccaggctgtggcaggaggccgagctgaggatctacctgtccaggccaggaggctggtggacctgatgaagaatgacacgaggatacactttcaggaagactggaagataataaccctgtttataggcggcaatgacctctgtgatttctgcaatgatctggtccactattctccccagaacttcacagacaacattggaaaggccctggacatcctccatgctgaggttcctcgggcatttgtgaacctggtgacggtgcttgagatcgtcaacctgagggagctgtaccaggagaaaaaagtctactgcccaaggatgatcctcaggtctctgtgtccctgtgtcctgaagtttgatgataactcaacagaacttgctaccctcatcgaattcaacaagaagtttcaggagaagacccaccaactgattgagagtgggcgatatgacacaagggaagattttactgtggttgtgcagccgttctttgaaaacgtggacatgccaaagacctcggaaggattgcctgacaactctttcttcgctcctgactgtttccacttcagcagcaagtctcactcccgagcagccagtgctctctggaacaatatgctggagcctgttggccagaagacgactcgtcataagtttgaaaacaagatcaatatcacatgtccgaaccaggtccagccgtttctgaggacctacaagaacagcatgcagggtcatgggacctggctgccatgcagggacagagccccttctgccttgcaccctacctcagtgcatgccctgagacctgcagacatccaagttgtggctgctctgggggattctctgaccgctggcaatggaattggctccaaaccagacgacctccccgatgtcaccacacagtatcggggactgtcatacagtgcaggaggggacggctccctggagaatgtgaccaccttacctaatatccttcgggagtttaacagaaacctcacaggctacgccgtgggcacgggtgatgccaatgacacgaatgcattcctcaatcaagctgttcccggagcaaaggctgaggatcttatgagccaagtccaaactctgatgcagaagatgaaagatgatcatagagtaaatttccatgaagactggaaggtcatcacagtgctgatcggaggcagcgatttatgtgactactgcacagattcgaatctgtattctgcagccaactttgttcaccatctccgcaatgccttggacgtcctgcatagagaggtgcccagagtcctggtcaacctcgtggacttcctgaaccccactatcatgcggcaggtgttcctgggaaacccagacaagtgcccagtgcagcaggccagcgttttgtgtaactgcgttctgaccctgcgggagaactcccaagagctagccaggctggaggccttcagccgagcctaccggagcagcatgcgcgagctggtggggtcaggccgctatgacacgcaggaggacttctctgtggtgctgcagcccttcttccagaacatccagctccctgtcctggcggatgggctcccagatacgtccttctttgccccagactgcatccacccaaatcagaaattccactcccagctggccagagccctttggaccaatatgcttgaaccacttggaagcaaaacagagaccctggacctgagagcagagatgcccatcacctgtcccactcagaatgagcccttcctgagaacccctcggaatagtaactacacgtaccccatcaagccagccattgagaactggggcagtgacttcctgtgtacagagtggaaggcttccaatagtgttccaacctctgtccaccagctccgaccagcagacatcaaagtggtggccgccctgggtgactctctgactacagcagtgggagctcgaccaaacaactccagtgacctacccacatcttggaggggactctcttggagcattggaggggatgggaacttggagactcacaccacactgcccaacattctgaagaagttcaacccttacctccttggcttctctaccagcacctgggaggggacagcaggactaaatgtggcagcggaaggggccagagctagggacatgccagcccaggcctgggacctggtagagcgaatgaaaaacagccccgacatcaacctggagaaagactggaagctggtcacactcttcattggggtcaacgacttgtgtcattactgtgagaatccggaggcccacttggccacggaatatgttcagcacatccaacaggccctggacatcctctctgaggagctcccaagggctttcgtcaacgtggtggaggtcatggagctggctagcctgtaccagggccaaggcgggaaatgtgccatgctggcagctcagaacaactgcacttgcctcagacactcgcaaagctccctggagaagcaagaactgaagaaagtgaactggaacctccagcatggcatctccagtttctcctactggcaccaatacacacagcgtgaggactttgcggttgtggtgcagcctttcttccaaaacacactcaccccactgaacgagagaggggacactgacctcaccttcttctccgaggactgttttcacttctcagaccgcgggcatgccgagatggccatcgcactctggaacaacatgctggaaccagtgggccgcaagactacctccaacaacttcacccacagccgagccaaactcaagtgcccctctcctgagagcccttacctctacaccctgcggaacagccgattgctcccagaccaggctgaagaagcccccgaggtgctctactgggctgtcccagtggcagcgggagtcggccttgtggtgggcatcatcgggacagtggtctggaggtgcaggagaggtggccggagggaagatcctccaatgagcctgcgcactgtggccctctaggcccgggggtgggtcctcaccctaaactccctatagccactctcttcaccgccctctgccccagccactcccggccaccaggacatgcttcaatgcctggtgccataggaagcccaggggacagtcacaacttcttggggcctgggcttcttccaggcctatgctcctggaatggatacatttaaataaagtccaaagctattttattcctgggtttgcctgcgtgaagcactcaccttccatctcttgtgcagcccaggtgtgggagctgccactttttgtggcctgcctccagcagggctgcccaagccacgaccaaccagagcccaaactgcctgccaccacgagcatatcctcaagtcaccaaacccactatttcaaaggcagaaaaaatgctggtcaccaggtggtggctggaattttggagctggctggttgccattcagtccaatccaacacatacctattaagcaactgttttgtatccaggacaatgcgaagcactgaggtgcctcctaggctgtgcatgtcgcagcctggcagagaggtcaaactccttcaataaccaagaagccacgtgatgatgtgtaactactagggcatcagtaggtaaatgtgtctgattgttttaaagaatagaaagggttcttcggggaaagtttcttgggggagagcaaccttcacat

SEQ ID NO: 165733 - DNA, 4431 bp, Homo sapiens
  Payload ID: 12632
  Gene Symbol: PLB1
  Gene Name: phospholipase B1
  ENST ID: ENST00000404858
  CDS Start-End: 1-4340
ggctgcggccaggcattttcctcctggagctgctgctgcttctggggcaagggacccctcagatccatacctctcctagaaagagtacattggaagggcagctatggccagagaccctgaagaattctccattcccatgcaacccaaataaattaggagtgaatatgccttctaaatcagttcactctctgaagccttctgatattaaatttgtggcagccattggcaatctggaaattcctccagacccagggacgggcgatctggagaagcaagactggactgaaaggccacagcaggtgtgcatgggagtgatgacagtcctttcagacatcatcagatatttcagtccttctgttccaatgcctgtgtgccacactggaaagagagtcataccccacgatggtgctgaagacttgtggattcaggctcaagaactggtgagaaacatgaaagagaacctgcaacttgactttcaatttgactggaagctcatcaatgtgttcttcagtaatgcaagccagtgttacctgtgcccctctgctcaacaggcaccctcacttagcacggttctcctctcacagaatgggcttgcggcgggcggcgtggatgagctgatgggggtgctggactacctgcagcaggaggtccccagagcatttgtaaacctggtggacctctctgaggttgcagaggtctctcgtcagtatcacggcacttggctcagccctgcaccagagccctgtaattgctcagaggagaccacccggctggccaaggtggtgatgcagtggtcttatcaggaagcctggaacagcctcctggcctccagcaggtacagtgagcaggagtccttcaccgtggttttccagcctttcttctatgagaccaccccatctctacactcggaggacccccgactccaggattctaccacgctggcctggcatctctggaataggatgatggagccagcaggagagaaagatgagccattgagtgtaaaacacgggaggccaatgaagtgtccctctcaggagagcccctatctgttcagctacagaaacagcaactacctgaccagactgcagaaaccccaagacaagcttgaggtaagagaaggagcggaaatcagatgtcctgacaaagacccctccgatacggttcccacctcagttcataggctgaagccggctgacatcaacgtaattggagccctgggtgactctctcacggcaggcaatggggccgggtccacacctgggaacgtcttggacgtcttgactcagtaccgaggcctgtcctggagcgtcggcggagatgagaacatcggcaccgttaccaccctggcgaacatcctccgggaattcaacccttccctgaagggcttctctgttggcactgggaaagaaaccagtcctaatgccttcttaaaccaggctgtggcaggaggccgagctgaggatctacctgtccaggccaggaggctggtggacctgatgaagaatgacacgaggatacactttcaggaagactggaagataataaccctgtttataggcggcaatgacctctgtgatttctgcaatgatctggttcctcgggcatttgtgaacctggtgacggtgcttgagatcgtcaacctgagggagctgtaccaggagaaaaaagtctactgcccaaggatgatcctcaggtctctgtgtccctgtgtcctgaagtttgatgataactcaacagaacttgctaccctcatcgaattcaacaagaagtttcaggagaagacccaccaactgattgagagtgggcgatatgacacaagggaagattttactgtggttgtgcagccgttctttgaaaacgtggacatgccaaagacctcggaaggattgcctgacaactctttcttcgctcctgactgtttccacttcagcagcaagtctcactcccgagcagccagtgctctctggaacaatatgctggagcctgttggccagaagacgactcgtcataagtttgaaaacaagatcaatatcacatgtccgaaccaggtccagccgtttctgaggacctacaagaacagcatgcagggtcatgggacctggctgccatgcagggacagagccccttctgccttgcaccctacctcagtgcatgccctgagacctgcagacatccaagttgtggctgctctgggggattctctgaccgctggcaatggaattggctccaaaccagacgacctccccgatgtcaccacacagtatcggggactgtcatacagtgcaggaggggacggctccctggagaatgtgaccaccttacctaatatccttcgggagtttaacagaaacctcacaggctacgccgtgggcacgggtgatgccaatgacacgaatgcattcctcaatcaagctgttcccggagcaaaggctgaggatcttatgagccaagtccaaactctgatgcagaagatgaaagatgatcatagagtaaatttccatgaagactggaaggtcatcacagtgctgatcggaggcagcgatttatgtgactactgcacagattcgaatctgtattctgcagccaactttgttcaccatctccgcaatgccttggacgtcctgcatagagaggtgcccagagtcctggtcaacctcgtggacttcctgaaccccactatcatgcggcaggtgttcctgggaaacccagacaagtgcccagtgcagcaggccagcgttttgtgtaactgcgttctgaccctgcgggagaactcccaagagctagccaggctggaggccttcagccgagcctaccggagcagcatgcgcgagctggtggggtcaggccgctatgacacgcaggaggacttctctgtggtgctgcagcccttcttccagaacatccagctccctgtcctggcggatgggctcccagatacgtccttctttgccccagactgcatccacccaaatcagaaattccactcccagctggccagagccctttggaccaatatgcttgaaccacttggaagcaaaacagagaccctggacctgagagcagagatgcccatcacctgtcccactcagaatgagcccttcctgagaacccctcggaatagtaactacacgtaccccatcaagccagccattgagaactggggcagtgacttcctgtgtacagagtggaaggcttccaatagtgttccaacctctgtccaccagctccgaccagcagacatcaaagtggtggccgccctgggtgactctctgactacagcagtgggagctcgaccaaacaactccagtgacctacccacatcttggaggggactctcttggagcattggaggggatgggaacttggagactcacaccacactgcccaacattctgaagaagttcaacccttacctccttggcttctctaccagcacctgggaggggacagcaggactaaatgtggcagcggaaggggccagagctagggacatgccagcccaggcctgggacctggtagagcgaatgaaaaacagccccgacatcaacctggagaaagactggaagctggtcacactcttcattggggtcaacgacttgtgtcattactgtgagaatccggaggcccacttggccacggaatatgttcagcacatccaacaggccctggacatcctctctgaggagctcccaagggctttcgtcaacgtggtggaggtcatggagctggctagcctgtaccagggccaaggcgggaaatgtgccatgctggcagctcagaacaactgcacttgcctcagacactcgcaaagctccctggagaagcaagaactgaagaaagtgaactggaacctccagcatggcatctccagtttctcctactggcaccaatacacacagcgtgaggactttgcggttgtggtgcagcctttcttccaaaacacactcaccccactgaacgagagaggggacactgacctcaccttcttctccgaggactgttttcacttctcagaccgcgggcatgccgagatggccatcgcactctggaacaacatgctggaaccagtgggccgcaagactacctccaacaacttcacccacagccgagccaaactcaagtgcccctctcctgagagcccttacctctacaccctgcggaacagccgattgctcccagaccaggctgaagaagcccccgaggtgctctactgggctgtcccagtggcagcgggagtcggccttgtggtgggcatcatcgggacagtggtctggaggtgcaggagaggtggccggagggaagatcctccaatgagcctgcgcactgtggccctctaggcccgggggtgggtcctcaccctaaactccctatagccactctcttcaccgccctctgccccagccactcccggccaccaggacatgcttc

SEQ ID NO: 165734 - DNA, 1661 bp, Homo sapiens
  Payload ID: 12632
  Gene Symbol: PLB1
  Gene Name: phospholipase B1
  ENST ID: ENST00000444257
  CDS Start-End: 1-834
ttcttccagaacatccagctccctgtcctggcggatgggctcccagatacgtccttctttgccccagactgcatccacccaaatcagaaattccactcccagctggccagagccctttggaccaatatgcttgaaccacttggaagcaaaacagagaccctggacctgagagcagagatgcccatcacctgtcccactcagaatgagcccttcctgagaacccctcggaatagtaactacacgtaccccatcaagccagccattgagaactggggcagtgacttcctgtgtacagagtggaaggcttccaatagtgttccaacctctgtccaccagctccgaccagcagacatcaaagtggtggccgccctgggtgactctctgactacagcagtgggagctcgaccaaacaactccagtgacctacccacatcttggaggggactctcttggagcattggaggggatgggaacttggagactcacaccacactgcccaacattctgaagaagttcaacccttacctccttggcttctctaccagcacctgggaggggacagcaggactaaatgtggcagcggaaggggccagagctagggacatgccagcccaggcctgggacctggtagagcgaatgaaaaacagccccgacatcaacctggagaaagactggaagctggtcacactcttcattggggtcaacgacttgtgtcattactgtgagaatccggtaggcccccgaccaaccccatggggacctgagaaggaaggaggcccacttggccacggaatatgttcagcacatccaacaggccctggacatcctctctgaggagctcccaagggctttcgtcaacgtggtggaggtcatggagctggctagcctgtaccagggccaaggcgggaaatgtgccatgctggcagctcagaacaactgcacttgcctcagacactcgcaaagctccctggagaagcaagaactgaagaaagtgaactggaacctccagcatggcatctccagtttctcctactggcaccaatacacacagcgtgaggactttgcggttgtggtgcagcctttcttccaaaacacactcaccccactgaacgagagaggggacactgacctcaccttcttctccgaggactgttttcacttctcagaccgcgggcatgccgagatggccatcgcactctggaacaacatgctggaaccagtgggccgcaagactacctccaacaacttcacccacagccgagccaaactcaagtgcccctctcctgagagcccttacctctacaccctgcggaacagccgattgctcccagaccaggctgaagaagcccccgaggtgctctactgggctgtcccagtggcagcgggagtcggccttgtggtgggcatcatcgggacagtggtctggaggtgcaggagaggtggccggagggaagatcctccaatgagcctgcgcactgtggccctctaggcccgggggtgggtcctcaccctaaactccctatagccactctcttcaccgccctctgccccagccactcccggccaccaggacatgcttcaatgcctggtgccataggaagcccaggggacagtcacaacttcttggggcctgggcttcttccaggcctatgctcctggaa

SEQ ID NO: 165735 - DNA, 3543 bp, Homo sapiens
  Payload ID: 12632
  Gene Symbol: PLB1
  Gene Name: phospholipase B1
  ENST ID: ENST00000436544
  CDS Start-End: 1-1533
cagctctgtcctggctggctgggccccacctcaacctctgctgtgcagcttttccttctaggagagatggagccagcaggagagaaagatgagccattgagtgtaaaacacgggaggccaatgaagtgtccctctcaggagagcccctatctgttcagctacagaaacagcaactacctgaccagactgcagaaaccccaagacaagcttgaggtaagagaaggagcggaaatcagatgtcctgacaaagacccctccgatacggttcccacctcagttcataggctgaagccggctgacatcaacgtaattggagccctgggtgactctctcacggcaggcaatggggccgggtccacacctgggaacgtcttggacgtcttgactcagtaccgaggcctgtcctggagcgtcggcggagatgagaacatcggcaccgttaccaccctggcgaacatcctccgggaattcaacccttccctgaagggcttctctgttggcactgggaaagaaaccagtcctaatgccttcttaaaccaggctgtggcaggaggccgagctgaggatctacctgtccaggccaggaggctggtggacctgatgaagaatgacacgaggatacactttcaggaagactggaagataataaccctgtttataggcggcaatgacctctgtgatttctgcaatgatctggtccactattctccccagaacttcacagacaacattggaaaggccctggacatcctccatgctgaggttcctcgggcatttgtgaacctggtgacggtgcttgagatcgtcaacctgagggagctgtaccaggagaaaaaagtctactgcccaaggatgatcctcaggtctctgtgtccctgtgtcctgaagtttgatgataactcaacagaacttgctaccctcatcgaattcaacaagaagtttcaggagaagacccaccaactgattgagagtgggcgatatgacacaagggaagattttactgtggttgtgcagccgttctttgaaaacgtggacatgccaaagacctcggaaggattgcctgacaactctttcttcgctcctgactgtttccacttcagcagcaagtctcactcccgagcagccagtgctctctggaacaatatgctggagcctgttggccagaagacgactcgtcataagtttgaaaacaagatcaatatcacatgtccgaaccaggtccagccgtttctgaggacctacaagaacagcatgcagggtcatgggacctggctgccatgcagggacagagccccttctgccttgcaccctacctcagtgcatgccctgagacctgcagacatccaagttgtggctgctctgggggattctctgaccgctggcaatggaattggctccaaaccagacgacctccccgatgtcaccacacagtatcggggactgtcatacagagaaagtaaaccagggttcttatcagactcctgggtcagcaaatccaacaggaaatgcaccagaaaagcaccaaatccctgaatcttcacctccccgcttgcatgtatacgtgtacacgtggtgttcctacgtctctgtttactgtctttatgtgtttattcatgttgtcttgtagtcacacagctgcctttacatatatgtacacatctgcacagaaaacctctgaaacccatcgcacacttcgagaggccataaccaagacacaatcacaatcagccatgtcttgaaagattagcaattcgacaagaggaaagggtgagaaagggcatcccgaacacggaagtggagaagctcagggtgtgtcaggcgagcggttgcgtgtagatattctcaagtttctttctctcctaataaagttctcattcctgtaggcttcaaagtaagtggcgagtagctcagaatttacctgggaaaacaactagaacgaagctggccacaagggggcagcgtgctaatgagtggcggagccaggacagcacctttgctgccgcctcccttttcttctgagtcagtttgcttcctggggaagtgacagggagcagggagggggtgatcaagactgtgaaggttctctggccagacctgagcagagtcccagagaggatgggtttccagggcgagagggaggcgccatcactcggcctgtaccacccacaacgaggacctaggttgtccttagcatgaggacatcaacctctcaagaacagaggtcagtgccttcctgcgccaaggtccctgcgtttccacaagtccttggtcaggtacctggtcctaacaggctgccatggaacaaatcagagcctcactgactcaccattctgctcctaatgaggctacaagaaaaaaaaccagaggagagaaagcagagcttattacaatcaggaaagagcatgaggttctggcagctgcacttggtctcagctaaagaaggcaatgacctcatacgatagcatgggaaacaaaaatcaagcagacgaaccacattgcaggtgatagatacgcgacgtgcacctggtggggcagcctggggaagtgaggtgatgtgccctactttaaaacagatcgaccagctgggctcctgggattcagatatgaaccagcagtcctctactaaaagtttctttctgcagcgatgggaaaattcagccattgctctgtttcttccaacaagtgaagtccattacagcctaatgtctcaatcttttagttctagctctaaggcctcaggttcaatggctgctgtccctttaaacccttcatttgtcctaaatgtttcaaatagctgcccccaaatgcacgtgtgttaaagatggaagctctaggtcggggtctgagagacagcttgacacttggtagaatacatagactactgtgtctcaaagtgtgttccatggaacattaactccagacctgttcctggagaagagaaaatcctttgtatctgagggggaaacattaccataaccttcctttggggaattcatgtgtgtattagcatattaaaggctctcataaggcctgcaatgcagaaatctatttaagttttatctgtttaacccaatgtttcccttaattccagaacattttctttgttcataacacctgttaacacctcctgaaagtgttcacgtagtagacttatctgagaaaagcaatttttgagccgttaaagcttctagattggacaaactaggcaattaatgatactagatcaattcagaatgcaatttgagcctcttccccctgggaaacaaagtgaaaagagtggatctcatggaattaggggagaagtagacccagaattcatggggggtgggtggctgtgaacaggacctgcagaagaggctcggctgtgaatatttccaaggccccttgacctgtgagattctgtagtgaacggttccagctttggccagcttaacaatgtgctgggccccaaggtcttgagagcattgccttttcttccattgaaataagttcgcttgtttgggaccattcaaaggatcaaaataaaatttacttaccaaaaaa

SEQ ID NO: 165736 - DNA, 690 bp, Homo sapiens
  Payload ID: 12632
  Gene Symbol: PLB1
  Gene Name: phospholipase B1
  ENST ID: ENST00000436775
  CDS Start-End: 1-484
gaacaactgcacttgcctcagacactcgcaaagctccctggagaagcaagaactgaagaaagtgaactggaacctccagcatggcatctccagtttctcctactggcaccaatacacacagcgtgaggactttgcggttgtggtgcagcctttcttccaaaacacactcaccccactgaacgagagaggggacactgacctcaccttcttctccgaggactgttttcacttctcagaccgcgggcatgccgagatggccatcgcactctggaacaacatggagagcccttacctctacaccctgcggaacagccgattgctcccagaccaggctgaagaagcccccgaggtgctctactgggctgtcccagtggcagcgggagtcggccttgtggtgggcatcatcgggacagtggtctggaggtgcaggagaggtggccggagggaagatcctccaatgagcctgcgcactgtggccctctaggcccgggggtgggtcctcaccctaaactccctatagccactctcttcaccgccctctgccccagccactcccggccaccaggacatgcttcaatgcctggtgccataggaagcccaggggacagtcacaacttcttggggcctgggcttcttccaggcctatgctcctggaatggatacatttaaataaagtccaaagctatttta

SEQ ID NO: 165737 - DNA, 1673 bp, Homo sapiens
  Payload ID: 12632
  Gene Symbol: PLB1
  Gene Name: phospholipase B1
  ENST ID: ENST00000411743
  CDS Start-End: 1-187
ctttgttcaccatctccgcaatgccttggacgtcctgcatagagaggtgcccagagtcctggtcaacctcgtggacttcctgaaccccactatcatgcggcaggtgttcctgggaaacccagacaagtgcccagtgcagcaggccagcttgaaccacttggaagcaaaacagagaccctggacctgagagcagagatgcccatcacctgtcccactcagaatgagcccttcctgagaacccctcggaatagtaactacacgtaccccatcaagccagccattgagaactggggcagtgacttcctgtgtacagagtggaaggcttccaatagtgttccaacctctgtccaccagctccgaccagcagacatcaaagtggtggccgccctgggtgactctctgactacagcagtgggagctcgaccaaacaactccagtgacctacccacatcttggaggggactctcttggagcattggaggggatgggaacttggagactcacaccacactgcccaacattctgaagaagttcaacccttacctccttggcttctctaccagcacctgggaggggacagcaggactaaatgtggcagcggaaggggccagagctagggacatgccagcccaggcctgggacctggtagagcgaatgaaaaacagccccgacatcaacctggagaaagactggaagctggtcacactcttcattggggtcaacgacttgtgtcattactgtgagaatccggaggcccacttggccacggaatatgttcagcacatccaacaggccctggacatcctctctgaggagctcccaagggctttcgtcaacgtggtggaggtcatggagctggctagcctgtaccagggccaaggcgggaaatgtgccatgctggcagctcagaacaactgcacttgcctcagacactcgcaaagctccctggagaagcaagaactgaagaaagtgaactggaacctccagcatggcatctccagtttctcctactggcaccaatacacacagcgtgaggactttgcggttgtggtgcagcctttcttccaaaacacactcaccccactgaacgagagaggggacactgacctcaccttcttctccgaggactgttttcacttctcagaccgcgggcatgccgagatggccatcgcactctggaacaacatgctggaaccagtgggccgcaagactacctccaacaacttcacccacagccgagccaaactcaagtgcccctctcctgagagcccttacctctacaccctgcggaacagccgattgctcccagaccaggctgaagaagcccccgaggtgctctactgggctgtcccagtggcagcgggagtcggccttgtggtgggcatcatcgggacagtggtctggaggtgcaggagaggtggccggagggaagatcctccaatgagcctgcgcactgtggccctctaggcccgggggtgggtcctcaccctaaactccctatagccactctcttcaccgccctctgccccagccactcccggccaccaggacatgcttcaatgcctggtgccataggaagcccaggggacagtcacaacttcttggggcctgggcttcttccaggcctatgctcctggaatggatacatttaaataaagtccaaagctatttta

SEQ ID NO: 165738 - DNA, 716 bp, Homo sapiens
  Payload ID: 12632
  Gene Symbol: PLB1
  Gene Name: phospholipase B1
  ENST ID: ENST00000416713
  CDS Start-End: 167-716
agtaccgttcgccttccgccatgattgtgaggcctctccagccacgcagaactggacccctcagatccatacctctcctagaaagagtacattggaagggcagctatggccagagaccctgaagaattctccattcccatgcaacccaaataaattaggagtgaatatgccttctaaatcagttcactctctgaagccttctgatattaaatttgtggcagccattggcaatctggaaattcctccagacccagggacgggcgatctggagaagcaagactggactgaaaggccacagcaggtgtgcatgggagtgatgacagtcctttcagacatcatcagatatttcagtccttctgttccaatgcctgtgtgccacactggaaagagagtcataccccacgatggtgctgaagacttgtggattcaggctcaagaactggtgagaaacatgaaagagaacctgcaacttgactttcaatttgactggaagctcatcaatgtgttcttcagtaatgcaagccagtgttacctgtgcccctctgctcaacaggcaccctcacttagcacggttctcctctcacagaatgggcttgcggcgggcggcgtggatgagctgatgggggtgctggactacctgcagcaggaggtccccagagcatttgtaaacctggtggacctctctgaggttgcagaggtctctcgtcagtatcacg

SEQ ID NO: 165739 - DNA, 5115 bp, Homo sapiens
  Payload ID: 12632
  Gene Symbol: PLB1
  Gene Name: phospholipase B1
  Uniprot ID: Q6P1J6
  ENST ID: ENST00000422425
  CDS Start-End: 45-4388
ggagcagctcttccagaggcccgagtcacctggagcattctggcatggggctgcggccaggcattttcctcctggagctgctgctgcttctggggcaagggacccctcagatccatacctctcctagaaagagtacattggaagggcagctatggccagagaccctgaagaattctccattcccatgcaacccaaataaattaggagtgaatatgccttctaaatcagttcactctctgaagccttctgatattaaatttgtggcagccattggcaatctggaaattcctccagacccagggacgggcgatctggagaagcaagactggactgaaaggccacagcaggtgtgcatgggagtgatgacagtcctttcagacatcatcagatatttcagtccttctgttccaatgcctgtgtgccacactggaaagagagtcataccccacgatggtgctgaagacttgtggattcaggctcaagaactggtgagaaacatgaaagagaacctgcaacttgactttcaatttgactggaagctcatcaatgtgttcttcagtaatgcaagccagtgttacctgtgcccctctgctcaacaggcaccctcacttagcacggttctcctctcacagaatgggcttgcggcgggcggcgtggatgagctgatgggggtgctggactacctgcagcaggaggtccccagagcatttgtaaacctggtggacctctctgaggttgcagaggtctctcgtcagtatcacggcacttggctcagccctgcaccagagccctgtaattgctcagaggagaccacccggctggccaaggtggtgatgcagtggtcttatcaggaagcctggaacagcctcctggcctccagcaggtacagtgagcaggagtccttcaccgtggttttccagcctttcttctatgagaccaccccatctctacactcggaggacccccgactccaggattctaccacgctggcctggcatctctggaataggatgatggagccagcaggagagaaagatgagccattgagtgtaaaacacgggaggccaatgaagtgtccctctcaggagagcccctatctgttcagctacagaaacagcaactacctgaccagactgcagaaaccccaagacaagcttgaggtaagagaaggagcggaaatcagatgtcctgacaaagacccctccgatacggttcccacctcagttcataggctgaagccggctgacatcaacgtaattggagccctgggtgactctctcacggcaggcaatggggccgggtccacacctgggaacgtcttggacgtcttgactcagtaccgaggcctgtcctggagcgtcggcggagatgagaacatcggcaccgttaccaccctggcgaacatcctccgggaattcaacccttccctgaagggcttctctgttggcactgggaaagaaaccagtcctaatgccttcttaaaccaggctgtggcaggaggccgagctgaggatctacctgtccaggccaggaggctggtggacctgatgaagaatgacacgaggatacactttcaggaagactggaagataataaccctgtttataggcggcaatgacctctgtgatttctgcaatgatctggttcctcgggcatttgtgaacctggtgacggtgcttgagatcgtcaacctgagggagctgtaccaggagaaaaaagtctactgcccaaggatgatcctcaggtctctgtgtccctgtgtcctgaagtttgatgataactcaacagaacttgctaccctcatcgaattcaacaagaagtttcaggagaagacccaccaactgattgagagtgggcgatatgacacaagggaagattttactgtggttgtgcagccgttctttgaaaacgtggacatgccaaagacctcggaaggattgcctgacaactctttcttcgctcctgactgtttccacttcagcagcaagtctcactcccgagcagccagtgctctctggaacaatatgctggagcctgttggccagaagacgactcgtcataagtttgaaaacaagatcaatatcacatgtccgaaccaggtccagccgtttctgaggacctacaagaacagcatgcagggtcatgggacctggctgccatgcagggacagagccccttctgccttgcaccctacctcagtgcatgccctgagacctgcagacatccaagttgtggctgctctgggggattctctgaccgctggcaatggaattggctccaaaccagacgacctccccgatgtcaccacacagtatcggggactgtcatacagtgcaggaggggacggctccctggagaatgtgaccaccttacctaatatccttcgggagtttaacagaaacctcacaggctacgccgtgggcacgggtgatgccaatgacacgaatgcattcctcaatcaagctgttcccggagcaaaggctgaggatcttatgagccaagtccaaactctgatgcagaagatgaaagatgatcatagagtaaatttccatgaagactggaaggtcatcacagtgctgatcggaggcagcgatttatgtgactactgcacagattcgaatctgtattctgcagccaactttgttcaccatctccgcaatgccttggacgtcctgcatagagaggtgcccagagtcctggtcaacctcgtggacttcctgaaccccactatcatgcggcaggtgttcctgggaaacccagacaagtgcccagtgcagcaggccagcgttttgtgtaactgcgttctgaccctgcgggagaactcccaagagctagccaggctggaggccttcagccgagcctaccggagcagcatgcgcgagctggtggggtcaggccgctatgacacgcaggaggacttctctgtggtgctgcagcccttcttccagaacatccagctccctgtcctggcggatgggctcccagatacgtccttctttgccccagactgcatccacccaaatcagaaattccactcccagctggccagagccctttggaccaatatgcttgaaccacttggaagcaaaacagagaccctggacctgagagcagagatgcccatcacctgtcccactcagaatgagcccttcctgagaacccctcggaatagtaactacacgtaccccatcaagccagccattgagaactggggcagtgacttcctgtgtacagagtggaaggcttccaatagtgttccaacctctgtccaccagctccgaccagcagacatcaaagtggtggccgccctgggtgactctctgactacagcagtgggagctcgaccaaacaactccagtgacctacccacatcttggaggggactctcttggagcattggaggggatgggaacttggagactcacaccacactgcccaacattctgaagaagttcaacccttacctccttggcttctctaccagcacctgggaggggacagcaggactaaatgtggcagcggaaggggccagagctagggacatgccagcccaggcctgggacctggtagagcgaatgaaaaacagccccgacatcaacctggagaaagactggaagctggtcacactcttcattggggtcaacgacttgtgtcattactgtgagaatccggaggcccacttggccacggaatatgttcagcacatccaacaggccctggacatcctctctgaggagctcccaagggctttcgtcaacgtggtggaggtcatggagctggctagcctgtaccagggccaaggcgggaaatgtgccatgctggcagctcagaacaactgcacttgcctcagacactcgcaaagctccctggagaagcaagaactgaagaaagtgaactggaacctccagcatggcatctccagtttctcctactggcaccaatacacacagcgtgaggactttgcggttgtggtgcagcctttcttccaaaacacactcaccccactgaacgagagaggggacactgacctcaccttcttctccgaggactgttttcacttctcagaccgcgggcatgccgagatggccatcgcactctggaacaacatgctggaaccagtgggccgcaagactacctccaacaacttcacccacagccgagccaaactcaagtgcccctctcctgagagcccttacctctacaccctgcggaacagccgattgctcccagaccaggctgaagaagcccccgaggtgctctactgggctgtcccagtggcagcgggagtcggccttgtggtgggcatcatcgggacagtggtctggaggtgcaggagaggtggccggagggaagatcctccaatgagcctgcgcactgtggccctctaggcccgggggtgggtcctcaccctaaactccctatagccactctcttcaccgccctctgccccagccactcccggccaccaggacatgcttcaatgcctggtgccataggaagcccaggggacagtcacaacttcttggggcctgggcttcttccaggcctatgctcctggaatggatacatttaaataaagtccaaagctattttattcctgggtttgcctgcgtgaagcactcaccttccatctcttgtgcagcccaggtgtgggagctgccactttttgtggcctgcctccagcagggctgcccaagccacgaccaaccagagcccaaactgcctgccaccacgagcatatcctcaagtcaccaaacccactatttcaaaggcagaaaaaatgctggtcaccaggtggtggctggaattttggagctggctggttgccattcagtccaatccaacacatacctattaagcaactgttttgtatccaggacaatgcgaagcactgaggtgcctcctaggctgtgcatgtcgcagcctggcagagaggtcaaactccttcaataaccaagaagccacgtgatgatgtgtaactactagggcatcagtaggtaaatgtgtctgattgttttaaagaatagaaagggttcttcggggaaagtttcttgggggagagcaaccttcacatgtcattttgggaaaaggaataaaaaatgattgggacacaaa

SEQ ID NO: 165740 - DNA, 7092 bp, Homo sapiens
  Payload ID: 12633
  Gene Symbol: PLCB1
  Gene Name: phospholipase C, beta 1 (phosphoinositide-specific)
  Uniprot ID: Q9NQ66
  ENST ID: ENST00000338037
  CDS Start-End: 388-4038
cactcgctctctccctctgtgtatagaggatgtgctgaatggtgcgctttgaggcggcggcggcggaggagcagaatccgccgcgactggcagcctcggctgaccggctcggcttctcttcgccttccgaggctcctcatccaccgcgggctccagacctcgcgtcccgcccggggcatggccgggcgctgcgcccccgcgcgctctgcctgctgagcggcgccggagggaggtgcggaggccgggaggccggggaggccggcggggagcagagtcgagcgcctccggagcagagaaaggagcccgcgccccgcgccccgcgccccgcgcacggtccccagtccctgccgcgctcgcccgggccgcccggagcccagatgagcccagatggccggggctcaacccggagtgcacgccttgcaactcaagcccgtgtgcgtgtccgacagcctcaagaagggcaccaaattcgtcaagtgggatgatgactcaactattgttactccaattattttgaggactgaccctcagggatttttcttttactggacagatcaaaacaaggagacagagctactggatctcagccttgtcaaagatgccagatgtgggagacacgccaaagctcccaaggaccccaaattacgtgaacttttggatgtggggaacatcgggcgcctggagcagcgcatgatcacagtggtgtatgggcctgacctcgtgaacatctcccatttgaatctcgtggctttccaagaagaagtggccaaggaatggacaaatgaggttttcagtttggcaacaaacctgctggcccaaaacatgtccagggatgcatttctggaaaaagcctatactaaacttaagctgcaagtcactccagaagggcgtattcctctcaaaaacatatatcgcttgttttcagcagatcggaagcgagttgaaactgctttagaggcttgtagtcttccatcttcaaggaatgattcaatacctcaagaagatttcactccagaagtgtacagagttttcctcaacaacctttgccctcgacctgaaattgataacatcttttcagaatttggtgcaaaaagcaaaccatatcttaccgttgatcagatgatggattttatcaaccttaagcagcgagatcctcggcttaatgaaatactttatccacctctaaaacaagagcaagtccaagtattgattgagaagtatgaacccaacaacagcctcgccagaaaaggacaaatatcagtggatgggttcatgcgctatctgagtggagaagaaaacggagtcgtttcacctgagaaactggatttgaatgaagacatgtctcagcccctttctcactatttcattaattcctcgcacaacacctacctcacagctggccaactggctggaaactcctctgttgagatgtatcgccaagtgctcctgtctggttgtcgctgtgtggagctggactgctggaagggacggactgcagaagaggaacctgtcatcacccatggcttcaccatgacaactgaaatatctttcaaggaagtgatagaagcaattgcggagtgtgcatttaagacttcaccttttccaattctcctttcgtttgagaaccatgtggattccccaaagcagcaagccaagatggcggagtactgccgactgatctttggggatgcccttctcatggagcccctggaaaaatatccactggaatctggagttcctcttccaagccctatggatttaatgtataaaattttggtgaaaaataagaagaaatcacacaagtcatcagaaggaagcggcaaaaagaagctctcagaacaagcctccaacacctacagtgactcctccagcatgttcgagccctcatccccaggagccggagaagctgatacggaaagtgacgacgacgatgatgatgatgactgtaaaaaatcttcaatggatgaggggactgctggaagtgaggctatggccacagaagaaatgtctaatctggtgaactatattcagccagtcaagtttgagtcatttgaaatttcaaaaaaaagaaataaaagttttgaaatgtcttccttcgtggaaaccaaaggacttgaacaactcaccaagtctccagtggaatttgtagaatataacaaaatgcagcttagcaggatatatccaaaaggaacacgtgtggattcatccaactatatgcctcagctcttctggaatgcaggttgtcagatggtggcacttaatttccagacaatggacctggctatgcaaataaatatggggatgtatgaatacaacgggaagagtggctacagattgaagccagagttcatgaggaggcctgacaagcattttgatccatttactgaaggcatcgtagatgggatagtggcaaacactttgtctgttaagattatttcaggtcagtttctttctgataagaaagttgggacttacgtggaagtagatatgtttggtttgcctgtggatacaaggaggaaggcatttaagaccaaaacatcccaaggaaatgctgtgaatcctgtctgggaagaagaacctattgtgttcaaaaaggtggttcttcctactctggcctgtttgagaatagcagtttatgaagaaggaggtaaattcattggccaccgtatcttgccagtgcaagccattcggccaggctatcactatatctgtctaaggaatgaaaggaaccagcctctgacgctgcctgctgtctttgtctacatagaagtgaaagactatgtgccagacacatatgcagatgtcatcgaagctttatcaaacccaatccgatatgtgaacctgatggaacagagagctaagcaattggctgctttgacactggaagatgaagaagaagtaaagaaagaggctgatcctggagaaacaccatcagaggctccaagtgaagcgagaacgactccagcagaaaatggggtgaatcacactacaaccctgacacccaagccaccctcccaggctctccacagccagccagctccaggttctgtaaaggcacctgccaaaacagaagatcttattcagagtgtcttaacagaagtggaagcacagaccatcgaagaactaaagcaacagaaatcgtttgtgaaacttcaaaagaaacactacaaagaaatgaaagacctggttaagagacaccacaagaaaaccactgaccttatcaaagaacacactaccaagtataatgaaattcagaatgactacttgagaaggagagccgctttggaaaagtccgccaaaaaggacagtaagaaaaaatcggaacccagcagccctgatcatggttcatcaacgattgagcaagacctcgctgctctggatgctgaaatgacccaaaagttaatagacttgaaggacaaacaacagcagcagctgcttaatcttcggcaagaacagtattatagtgaaaaataccagaagcgagaacatattaaactgcttattcaaaagttgacggatgtcgcagaagagtgtcagaacaatcagttaaagaagctcaaagaaatctgtgagaaagaaaagaaagaattaaagaagaaaatggataaaaagaggcaggagaagataacagaagctaaatccaaagacaaaagtcagatggaagaggagaagacagagatgatccggtcatatatccaggaagtggtgcagtatatcaagaggctagaagaagcgcaaagtaaacggcaagaaaaactcgtagagaaacacaaggaaatacgtcagcagatcctggatgaaaagcccaagctgcaggtggagctggagcaagaataccaagacaaattcaaaagactgcccctcgagattttggaattcgtgcaggaagccatgaaaggaaagatcagtgaagacagcaatcacggttctgcccctctctccctgtcctcagaccctggaaaagtgaaccacaagactccctccagtgaggagctgggaggagacatcccaggaaaagaatttgatactcctctgtgaatgctcctgccaggccttcagaaattgcatggccactccagcgtcatcggactctctcttattacaaagatcactgcccaggaccatcttcccgagaagcatcccttagcctaaaatccacaccaaagggagagttccagaggaatccatgaagaattcccatgcccaggctccatgtgtcatgtggaaacctccacaggtctgctagtgaagaatgcatgtatgtgagatttttgttttctttccaatagcaaattcaaagcaagcaacttgcaggctccatggaacttttaatgaaggacagtgtcttctttgaagaaaatcaagctcgtgtttttattcgaagctctggtgtaaaatatttcaaagtcatagaaatagtttgagaaatgcatagcattatttaacactattgaacagccgactttgagcattgtttcttctaactgcccctcaactaccattatcttcaagtcaacatgcatattacattttcatcctttgctttgcaagcactggtggcttgcagtttgctaatttatttatcatagagtcatcaatgtatttgttgctgacatggttttattagatactgtagtgattcaaataagttttctatttgaaaaaaaaaatcacttgattgtatccttgcccagtgaagccatcctaagacttagcaatatggattgtacatttggctgcatgagcaagtcggccgcacacttccagacagtgtgctgtttgaattgactatttgcactcaaagtctgggtattcattggttattggcctgaaatgatcaaataactacaaatgatctgttgaataaaaatagttgagctgatatatgttaagcagatattcaatcagaatgaacaggttccggtggttattttgccgtttgacattttttatggttcatttatttttaatatagagaggaagattgaatatttatctagagaatacaaagacccacatgtaaatgataggtattatctccatgtatatatgtacccacttagtcatgtaagtgcatatacacatacacacacatgagtgtagacatgtgtttattaattgacaatgacccaaatctcttccacaagacttaaaaccaaattcagggacaaatggatagagaagaaaagggtcaaacatcgagattacatggatgttaaattatatggagacgctaagaaataattgatggagccattgatgcaaaccgaagtagatttagaacttatatgaatttgatttatattttgcaagatcaaaaattagatgttaagtatcagattttaagcttgttttaatggtcaaaaaattaggacagaaataatatggacatttattagtatcttccataatttttaagtctgacacatttctattttattctaacataaaaaaacttccattatatatttactaagtatatttaattcacttaactctgtctttataagttcctattttagatggaataagagaaacaaattatatcaaggtaaaactgatcaaaagcataattgaaagttctgaaaaaagaaaaataataatatgtagaaaaatgtaacttagagagtaacacatgaacattgaagttaaaacccagaagccagatgctcacagttttattttactttaaaataaacctgtctgactgtagctttgtgaaatatcttaaaacgcaaaaaccaattgtgtcctgaaaattgtttcaagaatttaatatttttatgaaaattattttatttaactttaagcaataactagagattacaattaaattttaatcaaaatgaaggcttagttcaaacataaggaaacagtgtttgattaaaaaaaacacatctagtaagacgtaaggggaaaatcacatcctctttggagatgattatattttgatctgaagggtttggggtgttcattagacacttaataaaacttaacttccaatgaaaaagaaatcttttgtaaatcattctacttttgcactttgaaagaaaggcgttaatcataaagaagcaagaatggtcaaaatcgaatgctgcatttttataaacaaaattacagactgtctgaaattgaagaagaatgaactaataatagcattcataaccaaacacaatgatgattattgcagaacattgtatcacattttagtccagagatagaataaagttgaataaccttgacttacacaaaactgttttggtagttggatttcattatcttagtgaatttagtcattttacaatatgtttgtatttggccatttactgtaatcacatttttatatctgtacaatgacactttttgcagttgtggggtagtgtgtaacactgtccatcttgcatcattgaaactactacaatgatactatcatttaataatattaatattacttgaaatagactaagataaagaaaaggggtctgtatgatgtgcagttttgtgcctttatgtatttgccttgttctttgtcgaatgtgtgaaattccgtactgtggtttttcctataatagaaagtagagctgtgtattaaattagactgtgtctctctgatacctttacactactgagaatagcatggttttggccatgtaaaccaattttcaaagttctaatgacatagccatgtgtttttggttttttatatttcattttaaaatttgagtatcaccatacattaattaatactcctgtagtagataagctgtcattaagtaattcccaaaaaaagggccatttgcttgcattactttgaatttaatgttgcgcttgtgcactgtgttaatattgtttgtgatggattggacgttgtgactcttgccttttaagaagaaaaaaaagataggacaaagtatttgaagctcttaaaatgtacatattttggttcttctatctcaaattatttaaaatgcataattcacatttttgtaataattctatgcaattttgtggcatgatgtttcttccacttgtaattttatgtgctttcatcacaaatccaaaggaaagaataaaaatttcttaacacaaccc

SEQ ID NO: 165741 - DNA, 3864 bp, Homo sapiens
  Payload ID: 12633
  Gene Symbol: PLCB1
  Gene Name: phospholipase C, beta 1 (phosphoinositide-specific)
  Uniprot ID: Q9NQ66
  ENST ID: ENST00000378637
  CDS Start-End: 4-3525
cagatggccggggctcaacccggagtgcacgccttgcaactcaagcccgtgtgcgtgtccgacagcctcaagaagggcaccaaattcgtcaagtgggatgatgactcaactattgttactccaattattttgaggactgaccctcagggatttttcttttactggacagatcaaaacaaggagacagagctactggatctcagccttgtcaaagatgccagatgtgggagacacgccaaagctcccaaggaccccaaattacgtgaacttttggatgtggggaacatcgggcgcctggagcagcgcatgatcacagtggtgtatgggcctgacctcgtgaacatctcccatttgaatctcgtggctttccaagaagaagtggccaaggaatggacaaatgaggttttcagtttggcaacaaacctgctggcccaaaacatgtccagggatgcatttctggaaaaagcctatactaaacttaagctgcaagtcactccagaagggcgtattcctctcaaaaacatatatcgcttgttttcagcagatcggaagcgagttgaaactgctttagaggcttgtagtcttccatcttcaaggaatgattcaatacctcaagaagatttcactccagaagtgtacagagttttcctcaacaacctttgccctcgacctgaaattgataacatcttttcagaatttggtgcaaaaagcaaaccatatcttaccgttgatcagatgatggattttatcaaccttaagcagcgagatcctcggcttaatgaaatactttatccacctctaaaacaagagcaagtccaagtattgattgagaagtatgaacccaacaacagcctcgccagaaaaggacaaatatcagtggatgggttcatgcgctatctgagtggagaagaaaacggagtcgtttcacctgagaaactggatttgaatgaagacatgtctcagcccctttctcactatttcattaattcctcgcacaacacctacctcacagctggccaactggctggaaactcctctgttgagatgtatcgccaagtgctcctgtctggttgtcgctgtgtggagctggactgctggaagggacggactgcagaagaggaacctgtcatcacccatggcttcaccatgacaactgaaatatctttcaaggaagtgatagaagcaattgcggagtgtgcatttaagacttcaccttttccaattctcctttcgtttgagaaccatgtggattccccaaagcagcaagccaagatggcggagtactgccgactgatctttggggatgcccttctcatggagcccctggaaaaatatccactggaatctggagttcctcttccaagccctatggatttaatgtataaaattttggtgaaaaataagaagaaatcacacaagtcatcagaaggaagcggcaaaaagaagctctcagaacaagcctccaacacctacagtgactcctccagcatgttcgagccctcatccccaggagccggagaagctgatacggaaagtgacgacgacgatgatgatgatgactgtaaaaaatcttcaatggatgaggggactgctggaagtgaggctatggccacagaagaaatgtctaatctggtgaactatattcagccagtcaagtttgagtcatttgaaatttcaaaaaaaagaaataaaagttttgaaatgtcttccttcgtggaaaccaaaggacttgaacaactcaccaagtctccagtggaatttgtagaatataacaaaatgcagcttagcaggatatatccaaaaggaacacgtgtggattcatccaactatatgcctcagctcttctggaatgcaggttgtcagatggtggcacttaatttccagacaatggacctggctatgcaaataaatatggggatgtatgaatacaacgggaagagtggctacagattgaagccagagttcatgaggaggcctgacaagcattttgatccatttactgaaggcatcgtagatgggatagtggcaaacactttgtctgttaagattatttcaggtcagtttctttctgataagaaagttgggacttacgtggaagtagatatgtttggtttgcctgtggatacaaggaggaaggcatttaagaccaaaacatcccaaggaaatgctgtgaatcctgtctgggaagaagaacctattgtgttcaaaaaggtggttcttcctactctggcctgtttgagaatagcagtttatgaagaaggaggtaaattcattggccaccgtatcttgccagtgcaagccattcggccaggctatcactatatctgtctaaggaatgaaaggaaccagcctctgacgctgcctgctgtctttgtctacatagaagtgaaagactatgtgccagacacatatgcagatgtcatcgaagctttatcaaacccaatccgatatgtgaacctgatggaacagagagctaagcaattggctgctttgacactggaagatgaagaagaagtaaagaaagaggctgatcctggagaaacaccatcagaggctccaagtgaagcgagaacgactccagcagaaaatggggtgaatcacactacaaccctgacacccaagccaccctcccaggctctccacagccagccagctccaggttctgtaaaggcacctgccaaaacagaagatcttattcagagtgtcttaacagaagtggaagcacagaccatcgaagaactaaagcaacagaaatcgtttgtgaaacttcaaaagaaacactacaaagaaatgaaagacctggttaagagacaccacaagaaaaccactgaccttatcaaagaacacactaccaagtataatgaaattcagaatgactacttgagaaggagagccgctttggaaaagtccgccaaaaaggacagtaagaaaaaatcggaacccagcagccctgatcatggttcatcaacgattgagcaagacctcgctgctctggatgctgaaatgacccaaaagttaatagacttgaaggacaaacaacagcagcagctgcttaatcttcggcaagaacagtattatagtgaaaaataccagaagcgagaacatattaaactgcttattcaaaagttgacggatgtcgcagaagagtgtcagaacaatcagttaaagaagctcaaagaaatctgtgagaaagaaaagaaagaattaaagaagaaaatggataaaaagaggcaggagaagataacagaagctaaatccaaagacaaaagtcagatggaagaggagaagacagagatgatccggtcatatatccaggaagtggtgcagtatatcaagaggctagaagaagcgcaaagtaaacggcaagaaaaactcgtagagaaacacaaggaaatacgtcagcagatcctggatgaaaagcccaagggggaaggttcctcctcattcttgtcggaaacttgccatgaggatccctctgtttcccccaactttactccccccaaccctcaagctctcaagtggtgaccaccgtccttccggccaggtaggactggatgggaggggtcgcttttgagagaagggtggtgtgtagccatccagttttcaggcatcacggacttgctcgtttgtccttcatcctccctttctctacattcccatcttttttttctgctaaagttcccagccacacccatgatcatttcctcatcctttctgccttcctctggtattaatttctccatcattgtgctctctcttcctgacataaatctcattcttccatattgtcttcttcctctttctccattttgtttctctattggcaaatttggcttcctttttaatctggattttctctcttgc

SEQ ID NO: 165742 - DNA, 7323 bp, Homo sapiens
  Payload ID: 12633
  Gene Symbol: PLCB1
  Gene Name: phospholipase C, beta 1 (phosphoinositide-specific)
  Uniprot ID: Q9NQ66
  ENST ID: ENST00000378641
  CDS Start-End: 515-4036
gcaaagttgggctgggagccgcggggggaaggaaggacccagcgagcgagggtggcggggaaggggggcgggggggaggaggagggaggagggaaaagagcggttagggggggcgccgggcgtgtgtcactcgctctctccctctgtgtatagaggatgtgctgaatggtgcgctttgaggcggcggcggcggaggagcagaatccgccgcgactggcagcctcggctgaccggctcggcttctcttcgccttccgaggctcctcatccaccgcgggctccagacctcgcgtcccgcccggggcatggccgggcgctgcgcccccgcgcgctctgcctgctgagcggcgccggagggaggtgcggaggccgggaggccggggaggccggcggggagcagagtcgagcgcctccggagcagagaaaggagcccgcgccccgcgccccgcgccccgcgcacggtccccagtccctgccgcgctcgcccgggccgcccggagcccagatgagcccagatggccggggctcaacccggagtgcacgccttgcaactcaagcccgtgtgcgtgtccgacagcctcaagaagggcaccaaattcgtcaagtgggatgatgactcaactattgttactccaattattttgaggactgaccctcagggatttttcttttactggacagatcaaaacaaggagacagagctactggatctcagccttgtcaaagatgccagatgtgggagacacgccaaagctcccaaggaccccaaattacgtgaacttttggatgtggggaacatcgggcgcctggagcagcgcatgatcacagtggtgtatgggcctgacctcgtgaacatctcccatttgaatctcgtggctttccaagaagaagtggccaaggaatggacaaatgaggttttcagtttggcaacaaacctgctggcccaaaacatgtccagggatgcatttctggaaaaagcctatactaaacttaagctgcaagtcactccagaagggcgtattcctctcaaaaacatatatcgcttgttttcagcagatcggaagcgagttgaaactgctttagaggcttgtagtcttccatcttcaaggaatgattcaatacctcaagaagatttcactccagaagtgtacagagttttcctcaacaacctttgccctcgacctgaaattgataacatcttttcagaatttggtgcaaaaagcaaaccatatcttaccgttgatcagatgatggattttatcaaccttaagcagcgagatcctcggcttaatgaaatactttatccacctctaaaacaagagcaagtccaagtattgattgagaagtatgaacccaacaacagcctcgccagaaaaggacaaatatcagtggatgggttcatgcgctatctgagtggagaagaaaacggagtcgtttcacctgagaaactggatttgaatgaagacatgtctcagcccctttctcactatttcattaattcctcgcacaacacctacctcacagctggccaactggctggaaactcctctgttgagatgtatcgccaagtgctcctgtctggttgtcgctgtgtggagctggactgctggaagggacggactgcagaagaggaacctgtcatcacccatggcttcaccatgacaactgaaatatctttcaaggaagtgatagaagcaattgcggagtgtgcatttaagacttcaccttttccaattctcctttcgtttgagaaccatgtggattccccaaagcagcaagccaagatggcggagtactgccgactgatctttggggatgcccttctcatggagcccctggaaaaatatccactggaatctggagttcctcttccaagccctatggatttaatgtataaaattttggtgaaaaataagaagaaatcacacaagtcatcagaaggaagcggcaaaaagaagctctcagaacaagcctccaacacctacagtgactcctccagcatgttcgagccctcatccccaggagccggagaagctgatacggaaagtgacgacgacgatgatgatgatgactgtaaaaaatcttcaatggatgaggggactgctggaagtgaggctatggccacagaagaaatgtctaatctggtgaactatattcagccagtcaagtttgagtcatttgaaatttcaaaaaaaagaaataaaagttttgaaatgtcttccttcgtggaaaccaaaggacttgaacaactcaccaagtctccagtggaatttgtagaatataacaaaatgcagcttagcaggatatatccaaaaggaacacgtgtggattcatccaactatatgcctcagctcttctggaatgcaggttgtcagatggtggcacttaatttccagacaatggacctggctatgcaaataaatatggggatgtatgaatacaacgggaagagtggctacagattgaagccagagttcatgaggaggcctgacaagcattttgatccatttactgaaggcatcgtagatgggatagtggcaaacactttgtctgttaagattatttcaggtcagtttctttctgataagaaagttgggacttacgtggaagtagatatgtttggtttgcctgtggatacaaggaggaaggcatttaagaccaaaacatcccaaggaaatgctgtgaatcctgtctgggaagaagaacctattgtgttcaaaaaggtggttcttcctactctggcctgtttgagaatagcagtttatgaagaaggaggtaaattcattggccaccgtatcttgccagtgcaagccattcggccaggctatcactatatctgtctaaggaatgaaaggaaccagcctctgacgctgcctgctgtctttgtctacatagaagtgaaagactatgtgccagacacatatgcagatgtcatcgaagctttatcaaacccaatccgatatgtgaacctgatggaacagagagctaagcaattggctgctttgacactggaagatgaagaagaagtaaagaaagaggctgatcctggagaaacaccatcagaggctccaagtgaagcgagaacgactccagcagaaaatggggtgaatcacactacaaccctgacacccaagccaccctcccaggctctccacagccagccagctccaggttctgtaaaggcacctgccaaaacagaagatcttattcagagtgtcttaacagaagtggaagcacagaccatcgaagaactaaagcaacagaaatcgtttgtgaaacttcaaaagaaacactacaaagaaatgaaagacctggttaagagacaccacaagaaaaccactgaccttatcaaagaacacactaccaagtataatgaaattcagaatgactacttgagaaggagagccgctttggaaaagtccgccaaaaaggacagtaagaaaaaatcggaacccagcagccctgatcatggttcatcaacgattgagcaagacctcgctgctctggatgctgaaatgacccaaaagttaatagacttgaaggacaaacaacagcagcagctgcttaatcttcggcaagaacagtattatagtgaaaaataccagaagcgagaacatattaaactgcttattcaaaagttgacggatgtcgcagaagagtgtcagaacaatcagttaaagaagctcaaagaaatctgtgagaaagaaaagaaagaattaaagaagaaaatggataaaaagaggcaggagaagataacagaagctaaatccaaagacaaaagtcagatggaagaggagaagacagagatgatccggtcatatatccaggaagtggtgcagtatatcaagaggctagaagaagcgcaaagtaaacggcaagaaaaactcgtagagaaacacaaggaaatacgtcagcagatcctggatgaaaagcccaagggggaaggttcctcctcattcttgtcggaaacttgccatgaggatccctctgtttcccccaactttactccccccaaccctcaagctctcaagtggtgaccaccgtccttccggccagctgcaggtggagctggagcaagaataccaagacaaattcaaaagactgcccctcgagattttggaattcgtgcaggaagccatgaaaggaaagatcagtgaagacagcaatcacggttctgcccctctctccctgtcctcagaccctggaaaagtgaaccacaagactccctccagtgaggagctgggaggagacatcccaggaaaagaatttgatactcctctgtgaatgctcctgccaggccttcagaaattgcatggccactccagcgtcatcggactctctcttattacaaagatcactgcccaggaccatcttcccgagaagcatcccttagcctaaaatccacaccaaagggagagttccagaggaatccatgaagaattcccatgcccaggctccatgtgtcatgtggaaacctccacaggtctgctagtgaagaatgcatgtatgtgagatttttgttttctttccaatagcaaattcaaagcaagcaacttgcaggctccatggaacttttaatgaaggacagtgtcttctttgaagaaaatcaagctcgtgtttttattcgaagctctggtgtaaaatatttcaaagtcatagaaatagtttgagaaatgcatagcattatttaacactattgaacagccgactttgagcattgtttcttctaactgcccctcaactaccattatcttcaagtcaacatgcatattacattttcatcctttgctttgcaagcactggtggcttgcagtttgctaatttatttatcatagagtcatcaatgtatttgttgctgacatggttttattagatactgtagtgattcaaataagttttctatttgaaaaaaaaaatcacttgattgtatccttgcccagtgaagccatcctaagacttagcaatatggattgtacatttggctgcatgagcaagtcggccgcacacttccagacagtgtgctgtttgaattgactatttgcactcaaagtctgggtattcattggttattggcctgaaatgatcaaataactacaaatgatctgttgaataaaaatagttgagctgatatatgttaagcagatattcaatcagaatgaacaggttccggtggttattttgccgtttgacattttttatggttcatttatttttaatatagagaggaagattgaatatttatctagagaatacaaagacccacatgtaaatgataggtattatctccatgtatatatgtacccacttagtcatgtaagtgcatatacacatacacacacatgagtgtagacatgtgtttattaattgacaatgacccaaatctcttccacaagacttaaaaccaaattcagggacaaatggatagagaagaaaagggtcaaacatcgagattacatggatgttaaattatatggagacgctaagaaataattgatggagccattgatgcaaaccgaagtagatttagaacttatatgaatttgatttatattttgcaagatcaaaaattagatgttaagtatcagattttaagcttgttttaatggtcaaaaaattaggacagaaataatatggacatttattagtatcttccataatttttaagtctgacacatttctattttattctaacataaaaaaacttccattatatatttactaagtatatttaattcacttaactctgtctttataagttcctattttagatggaataagagaaacaaattatatcaaggtaaaactgatcaaaagcataattgaaagttctgaaaaaagaaaaataataatatgtagaaaaatgtaacttagagagtaacacatgaacattgaagttaaaacccagaagccagatgctcacagttttattttactttaaaataaacctgtctgactgtagctttgtgaaatatcttaaaacgcaaaaaccaattgtgtcctgaaaattgtttcaagaatttaatatttttatgaaaattattttatttaactttaagcaataactagagattacaattaaattttaatcaaaatgaaggcttagttcaaacataaggaaacagtgtttgattaaaaaaaacacatctagtaagacgtaaggggaaaatcacatcctctttggagatgattatattttgatctgaagggtttggggtgttcattagacacttaataaaacttaacttccaatgaaaaagaaatcttttgtaaatcattctacttttgcactttgaaagaaaggcgttaatcataaagaagcaagaatggtcaaaatcgaatgctgcatttttataaacaaaattacagactgtctgaaattgaagaagaatgaactaataatagcattcataaccaaacacaatgatgattattgcagaacattgtatcacattttagtccagagatagaataaagttgaataaccttgacttacacaaaactgttttggtagttggatttcattatcttagtgaatttagtcattttacaatatgtttgtatttggccatttactgtaatcacatttttatatctgtacaatgacactttttgcagttgtggggtagtgtgtaacactgtccatcttgcatcattgaaactactacaatgatactatcatttaataatattaatattacttgaaatagactaagataaagaaaaggggtctgtatgatgtgcagttttgtgcctttatgtatttgccttgttctttgtcgaatgtgtgaaattccgtactgtggtttttcctataatagaaagtagagctgtgtattaaattagactgtgtctctctgatacctttacactactgagaatagcatggttttggccatgtaaaccaattttcaaagttctaatgacatagccatgtgtttttggttttttatatttcattttaaaatttgagtatcaccatacattaattaatactcctgtagtagataagctgtcattaagtaattcccaaaaaaagggccatttgcttgcattactttgaatttaatgttgcgcttgtgcactgtgttaatattgtttgtgatggattggacgttgtgactcttgccttttaagaagaaaaaaaagataggacaaagtatttgaagctcttaaaatgtacatattttggttcttctatctcaaattatttaaaatgcataattcacatttttgtaataattctatgcaattttgtggcatgatgtttcttccacttgtaattttatgtgctttcatcacaaatccaaaggaaagaataaaaatt

SEQ ID NO: 165743 - DNA, 1260 bp, Homo sapiens
  Payload ID: 12633
  Gene Symbol: PLCB1
  Gene Name: phospholipase C, beta 1 (phosphoinositide-specific)
  ENST ID: ENST00000404098
  CDS Start-End: 127-744
gcggggagcagagtcgagcgcctccggagcagagaaaggagcccgcgccccgcgccccgcgccccgcgcacggtccccagtccctgccgcgctcgcccgggccgcccggagcccagatgagcccagatggccggggctcaacccggagtgcacgccttgcaactcaagcccgtgtgcgtgtccgacagcctcaagaagggcaccaaattcgtcaagtgggatgatgactcaactattgttactccaattattttgaggactgaccctcagggatttttcttttactggacagatcaaaacaaggagacagagctactggatctcagccttgtcaaagatgccagatgtgggagacacgccaaagctcccaaggaccccaaattacgtgaacttttggatgtggggaacatcgggcgcctggagcagcgcatgatcacagtggtgtatgggcctgacctcgtgaacatctcccatttgaatctcgtggctttccaagaagaagtggccaaggaatggacaaatgaggttttcagtttggcaacaaacctgctggcccaaaacatgtccagggatgcatttctggaaaaagcctatactaaacttaagctgcaagtcactccagaagggcgtattcctctcaaaaacatatatcgcttgttttcagcagatcggaagcgagttgaaactgctttagaggcttgtagtcttccatcttcaagggtgagcatgtgtgttatgctatagtttgaatgttcagcccctccaaaactcatgttgaaacttaatccccaatatgacagttttgagaggtagggcctttaagaggaaattaagagcttccatgattaatgggttaatgaattaatggattatcatcggagaggaactggtggctttataagaagagaaaaacagacctgagctagcatgttcttccccctcaccatctgattccctgtgccacctctgccaaagtggagagtccccactagcaagaagacttttgccagatgtgccctctccaccttggacttcccagcctttgtaactgtaggaaatacattttgattcctatatattatacagtttcaagtattctgctatatgcatcagaaaacagagtaagactgaaaattggtaccaagaggtggggtttttgctgataacaaatatctgaaaatgtagaagcagctttggaactgggtaatgaacagaggctgaaaaaagtttatagagctagctagaaacagccaagacttg

SEQ ID NO: 165744 - DNA, 321 bp, Homo sapiens
  Payload ID: 12633
  Gene Symbol: PLCB1
  Gene Name: phospholipase C, beta 1 (phosphoinositide-specific)
  ENST ID: ENST00000437439
  CDS Start-End: 1-126
atccaggaagtggtgcagtatatcaagaggctagaagaagcgcaaagtaaacggcaagaaaaactcgtagagaaacacaaggaaatacgtcagcagatcctggatgaaaagcccaaggtaccatgatgaattcctctgtgcttttcttccatgaggttgctccatgaccatctttttgtgtctggatttgaaggttgcccatgaagattgttggttccatgtcaaactaaagcatttcttgagggtttttcttcatggcttaaaaacgttgtgccttaaagctgtgattttattaataaaataataaatcatgactgttaa

SEQ ID NO: 165745 - DNA, 1819 bp, Homo sapiens
  Payload ID: 12633
  Gene Symbol: PLCB1
  Gene Name: phospholipase C, beta 1 (phosphoinositide-specific)
  ENST ID: ENST00000439627
  CDS Start-End: 1-591
attatttcaggtcagtttctttctgataagaaagttgggacttacgtggaagtagatatgtttggtttgcctgtggatacaaggaggaaggcatttaagaccaaaacatcccaaggaaatgctgtgaatcctgtctgggaagaagaacctattgtgttcaaaaaggtggttcttcctactctggcctgtttgagaatagcagtttatgaagaaggaggtaaattcattggccaccgtatcttgccagtgcaagccattcggccaggctatcactatatctgtctaaggaatgaaaggaaccagcctctgacgctgcctgctgtctttgtctacatagaagtgaaagactatgtgccagacacatatgcagatgtcatcgaagctttatcaaacccaatccgatatgtgaacctgatggaacagagagctaagcaattggctgctttgacactggaagatgaagaagaagtaaagaaagagggtggatttctgcatgatgaaattatgagactcacccgtaatacgctggaaaaactgatggccttacctcttacccatgtggtgcccatccaaagcaagatgctgtcataagttttagtagagacgggatttcaccatgttagccaggatggtctcgatctcctgacctcgggatccacccgcctcggcctcccaaagtgctgggattacaggcatgagccaccgcgcccggccggaactgcactcttcagatgactcagacaaggaaagcatgatccaacacctctaatagcccagtaatacatatgatatttgaaaggcccttcacttaccatgttaaccattcagttaaatcctccaaatcctaattctctgctgctcaaccatcagatccaaactttcaatgcccaggacggaaatcttttcaaccagcacatcaaatggcttttcctccttctatagaacttataaaaatgatcttttcagttaccattttactggtccatctgtattctattttcagtgcacttctgttcattttggaattaggaagcgtacaaattctttttatatttaattttaacattcaagttaggcatattttgaagaaaaagatattgcaatgattgcatttgtccactagagggcaggaacttacttctgtggttcattctgcactttttttttcactacccacctaagaaaaatctagtcaatgcgactgaagtactaccaccttctgaatcttctttccttgataattgcttaattggaatttaaatctttgaatcaaattaagaaactagacattcctagtttctgtttctatcacaatttccagtaccagatttttattcactcataaaaacaaataatgggggagaaataaaatattgacttctgctgattctcttgagtgggataaggaatttggtttttgcactttggcttacagatccatatagtggaattattcgatctttcaattataatatcagaaagttcaattttagtattgtactcctataggtgctttttttcatttttcagccattgttttgcttaacttatttaactttgtatgtacggatgcctttttagtgcaacagggtagttctttgagaattatgtttacatgtagacatctctatctcagcagcaagttaagttattattacggttccttaagctgctgttatcatagagtggactgctgtaatagaaaaatttagtctttagcatatagtccatattcaaatacttgttcacagtttcctgtgtgacctctggcaagttacatgacttttaataaagtttttagtaaagacttttaataaca

SEQ ID NO: 165746 - DNA, 4781 bp, Homo sapiens
  Payload ID: 12633
  Gene Symbol: PLCB1
  Gene Name: phospholipase C, beta 1 (phosphoinositide-specific)
  ENST ID: ENST00000487210
  CDS Start-End: 1-2744
aaatactttatccacctctaaaacaagagcaagtccaagtattgattgagaagtatgaacccaacaacagcctcgccagaaaaggacaaatatcagtggatgggttcatgcgctatctgagtggagaagaaaacggagtcgtttcacctgagaaactggatttgaatgaagacatgtctcagcccctttctcactatttcattaattcctcgcacaacacctacctcacagctggccaactggctggaaactcctctgttgagatgtatcgccaagtgctcctgtctggttgtcgctgtgtggagctggactgctggaagggacggactgcagaagaggaacctgtcatcacccatggcttcaccatgacaactgaaatatctttcaaggaagtgatagaagcaattgcggagtgtgcatttaagacttcaccttttccaattctcctttcgtttgagaaccatgtggattccccaaagcagcaagccaagatggcggagtactgccgactgatctttggggatgcccttctcatggagcccctggaaaaatatccactggaatctggagttcctcttccaagccctatggatttaatgtataaaattttggtgaaaaataagaagaaatcacacaagtcatcagaaggaagcggcaaaaagaagctctcagaacaagcctccaacacctacagtgactcctccagcatgttcgagccctcatccccaggagccggagaagctgatacggaaagtgacgacgacgatgatgatgatgactgtaaaaaatcttcaatggatgaggggactgctggaagtgaggctatggccacagaagaaatgtctaatctggtgaactatattcagccagtcaagtttgagtcatttgaaatttcaaaaaaaagaaataaaagttttgaaatgtcttccttcgtggaaaccaaaggacttgaacaactcaccaagtctccagtggaatttgtagaatataacaaaatgcagcttagcaggatatatccaaaaggaacacgtgtggattcatccaactatatgcctcagctcttctggaatgcaggttgtcagatggtggcacttaatttccagacaatggacctggctatgcaaataaatatggggatgtatgaatacaacgggaagagtggctacagattgaagccagagttcatgaggaggcctgacaagcattttgatccatttactgaaggcatcgtagatgggatagtggcaaacactttgtctgttaagattatttcaggtcagtttctttctgataagaaagttgggacttacgtggaagtagatatgtttggtttgcctgtggatacaaggaggaaggcatttaagaccaaaacatcccaaggaaatgctgtgaatcctgtctgggaagaagaacctattgtgttcaaaaaggtggttcttcctactctggcctgtttgagaatagcagtttatgaagaaggaggtaaattcattggccaccgtatcttgccagtgcaagccattcggccaggctatcactatatctgtctaaggaatgaaaggaaccagcctctgacgctgcctgctgtctttgtctacatagaagtgaaagactatgtgccagacacatatgcagatgtcatcgaagctttatcaaacccaatccgatatgtgaacctgatggaacagagagctaagcaattggctgctttgacactggaagatgaagaagaagtaaagaaagaggctgatcctggagaaacaccatcagaggctccaagtgaagcgagaacgactccagcagaaaatggggtgaatcacactacaaccctgacacccaagccaccctcccaggctctccacagccagccagctccaggttctgtaaaggcacctgccaaaacagaagatcttattcagagtgtcttaacagaagtggaagcacagaccatcgaagaactaaagcaacagaaatcgtttgtgaaacttcaaaagaaacactacaaagaaatgaaagacctggttaagagacaccacaagaaaaccactgaccttatcaaagaacacactaccaagtataatgaaattcagaatgactacttgagaaggagagccgctttggaaaagtccgccaaaaaggacagtaagaaaaaatcggaacccagcagccctgatcatggttcatcaacgattgagcaagacctcgctgctctggatgctgaaatgacccaaaagttaatagacttgaaggacaaacaacagcagcagctgcttaatcttcggcaagaacagtattatagtgaaaaataccagaagcgagaacatattaaactgcttattcaaaagttgacggatgtcgcagaagagtgtcagaacaatcagttaaagaagctcaaagaaatctgtgagaaagaaaagaaagaattaaagaagaaaatggataaaaagaggcaggagaagataacagaagctaaatccaaagacaaaagtcagatggaagaggagaagacagagatgatccggtcatatatccaggaagtggtgcagtatatcaagaggctagaagaagcgcaaagtaaacggcaagaaaaactcgtagagaaacacaaggaaatacgtcagcagatcctggatgaaaagcccaagggggaaggttcctcctcattcttgtcggaaacttgccatgaggatccctctgtttcccccaactttactccccccaaccctcaagctctcaagtggtgaccaccgtccttccggccagtcatgacaagaaataattggcttgtgagaatcaacattgaagctggaaaaatgatggcatccgaacaagtagacacagccctagtcaaggcaataaactacactaaagacagaggagaaagactcaaagttgttctaacatgtgagtacctaggggtgctgcatgccgttgtgtggtttgtgtactgcatagttgtactcagccaaggaagtggatgaggccacagctttaacatgggctgctgtctgcccagaaggataatcttttccttattttatatctcatttcaggggttctccaacttctgaaatccatccagaaactccctgtatttgggtaacagtattataactttttgcaccagggcttttttgtttgtttgttaatattaattgatttttcttatgttctttatgaaagaataactcatccattaatgaaaccaaatgtgaacttagtgccttctgtgtagaaaaggctaggaatacatattgtgggagattcattacatcactggccttaatactacaccttctcatgttcccccttggctgtgtaactttctagtgtccatatgctctctcttggggtggccagtgtgacttgctttggccaatgggatattagcaaccatgacataacccgaggcttataaagttgcctgctcattgggacttgtttcactgttgcatcccagttattcacatcactccagctgacagccaaccaacaaacagccagacacgtgagcccaaccaagatcagaagaactgtcccactgagcatagtctaaattgctaacatgcaaatgcatgaaacagaccacagcaaggtaatcttacagcccaggactcagctgctgcaatctctgtgaaaggttctgctcatgaaacagagacaaccatgtgtggtgcctgcattcttggcctgcggggagtggaaaggagacaaagagtaaaacacggtgggaaagaagaaaaagaggttaagaaaagcaaatgtgcctactccaggtaattttgacttagggaccctgattaacttacacactaattaaaccatttccagattttgtgcagtctgaaagcagcccattttccccaacaccaggtcgctcaagatgaccacaggaaggttgtcatcttcatgtctaaaagccagttgacactcaagggtgtcatttcacttcagtgaaatgagaagcttcacagatgtgtagactctgaaaaatctaactggaaaacaatacagggaaatagcaatactaggcatcaaagcagcaaaaaaactactcaattatctgatatggggattatcaatggaataaatgtggggtttgttgtttgttgttgggattgttgtgggttttgtttcattttttagggtctcacttttctccaccaattagatctgtgctgtgagccacacaggttttgagtacatgttttgggactttatatcggtcagactttgccatggtaacactgtgtaacgagcagccccaaaaatctcagtggtggtcaaaagcaaacctttatttctcattcatgggttttcagtttgttcaggctaaaagtaaaatacacagattcttcacctgtctttcattccatgctgaaggagcaattgactgcctgggacatacttttctcataacagaggcaagggtgaaaaacaccaagtcatcttgattatgcaatcccatttttaatgtaaacaatgtcatgtctgcttctatttcattgagcaaagcaagtcatataggcaagcccaacatcagtggggtgataaagcacactctccaatggaaggaggaggggagcatgatcatttgctgaacagtaatgcaagatagcacaagacttgtctggggtgagagagagatcaaagctgtggatcccacccagtcttcaaccaaagcaatgtggctttgacctgttttctgtcttggacttgaataatactttatttgaaagaagtgttaaattgtttattaaaaaaaaagacaagtttgaaaa

SEQ ID NO: 165747 - DNA, 6458 bp, Homo sapiens
  Payload ID: 12633
  Gene Symbol: PLCB1
  Gene Name: phospholipase C, beta 1 (phosphoinositide-specific)
  ENST ID: ENST00000617005
  CDS Start-End: 1-3411
acccaggaccccaaattacgtgaacttttggatgtggggaacatcgggcgcctggagcagcgcatgatcacagtggtgtatgggcctgacctcgtgaacatctcccatttgaatctcgtggctttccaagaagaagtggccaaggaatggacaaatgaggttttcagtttggcaacaaacctgctggcccaaaacatgtccagggatgcatttctggaaaaagcctatactaaacttaagctgcaagtcactccagaagggcgtattcctctcaaaaacatatatcgcttgttttcagcagatcggaagcgagttgaaactgctttagaggcttgtagtcttccatcttcaaggaatgattcaatacctcaagaagatttcactccagaagtgtacagagttttcctcaacaacctttgccctcgacctgaaattgataacatcttttcagaatttggtgcaaaaagcaaaccatatcttaccgttgatcagatgatggattttatcaaccttaagcagcgagatcctcggcttaatgaaatactttatccacctctaaaacaagagcaagtccaagtattgattgagaagtatgaacccaacaacagcctcgccagaaaaggacaaatatcagtggatgggttcatgcgctatctgagtggagaagaaaacggagtcgtttcacctgagaaactggatttgaatgaagacatgtctcagcccctttctcactatttcattaattcctcgcacaacacctacctcacagctggccaactggctggaaactcctctgttgagatgtatcgccaagtgctcctgtctggttgtcgctgtgtggagctggactgctggaagggacggactgcagaagaggaacctgtcatcacccatggcttcaccatgacaactgaaatatctttcaaggaagtgatagaagcaattgcggagtgtgcatttaagacttcaccttttccaattctcctttcgtttgagaaccatgtggattccccaaagcagcaagccaagatggcggagtactgccgactgatctttggggatgcccttctcatggagcccctggaaaaatatccactggaatctggagttcctcttccaagccctatggatttaatgtataaaattttggtgaaaaataagaagaaatcacacaagtcatcagaaggaagcggcaaaaagaagctctcagaacaagcctccaacacctacagtgactcctccagcatgttcgagccctcatccccaggagccggagaagctgatacggaaagtgacgacgacgatgatgatgatgactgtaaaaaatcttcaatggatgaggggactgctggaagtgaggctatggccacagaagaaatgtctaatctggtgaactatattcagccagtcaagtttgagtcatttgaaatttcaaaaaaaagaaataaaagttttgaaatgtcttccttcgtggaaaccaaaggacttgaacaactcaccaagtctccagtggaatttgtagaatataacaaaatgcagcttagcaggatatatccaaaaggaacacgtgtggattcatccaactatatgcctcagctcttctggaatgcaggttgtcagatggtggcacttaatttccagacaatggacctggctatgcaaataaatatggggatgtatgaatacaacgggaagagtggctacagattgaagccagagttcatgaggaggcctgacaagcattttgatccatttactgaaggcatcgtagatgggatagtggcaaacactttgtctgttaagattatttcaggtcagtttctttctgataagaaagttgggacttacgtggaagtagatatgtttggtttgcctgtggatacaaggaggaaggcatttaagaccaaaacatcccaaggaaatgctgtgaatcctgtctgggaagaagaacctattgtgttcaaaaaggtggttcttcctactctggcctgtttgagaatagcagtttatgaagaaggaggtaaattcattggccaccgtatcttgccagtgcaagccattcggccaggctatcactatatctgtctaaggaatgaaaggaaccagcctctgacgctgcctgctgtctttgtctacatagaagtgaaagactatgtgccagacacatatgcagatgtcatcgaagctttatcaaacccaatccgatatgtgaacctgatggaacagagagctaagcaattggctgctttgacactggaagatgaagaagaagtaaagaaagaggctgatcctggagaaacaccatcagaggctccaagtgaagcgagaacgactccagcagaaaatggggtgaatcacactacaaccctgacacccaagccaccctcccaggctctccacagccagccagctccaggttctgtaaaggcacctgccaaaacagaagatcttattcagagtgtcttaacagaagtggaagcacagaccatcgaagaactaaagcaacagaaatcgtttgtgaaacttcaaaagaaacactacaaagaaatgaaagacctggttaagagacaccacaagaaaaccactgaccttatcaaagaacacactaccaagtataatgaaattcagaatgactacttgagaaggagagccgctttggaaaagtccgccaaaaaggacagtaagaaaaaatcggaacccagcagccctgatcatggttcatcaacgattgagcaagacctcgctgctctggatgctgaaatgacccaaaagttaatagacttgaaggacaaacaacagcagcagctgcttaatcttcggcaagaacagtattatagtgaaaaataccagaagcgagaacatattaaactgcttattcaaaagttgacggatgtcgcagaagagtgtcagaacaatcagttaaagaagctcaaagaaatctgtgagaaagaaaagaaagaattaaagaagaaaatggataaaaagaggcaggagaagataacagaagctaaatccaaagacaaaagtcagatggaagaggagaagacagagatgatccggtcatatatccaggaagtggtgcagtatatcaagaggctagaagaagcgcaaagtaaacggcaagaaaaactcgtagagaaacacaaggaaatacgtcagcagatcctggatgaaaagcccaagctgcaggtggagctggagcaagaataccaagacaaattcaaaagactgcccctcgagattttggaattcgtgcaggaagccatgaaaggaaagatcagtgaagacagcaatcacggttctgcccctctctccctgtcctcagaccctggaaaagtgaaccacaagactccctccagtgaggagctgggaggagacatcccaggaaaagaatttgatactcctctgtgaatgctcctgccaggccttcagaaattgcatggccactccagcgtcatcggactctctcttattacaaagatcactgcccaggaccatcttcccgagaagcatcccttagcctaaaatccacaccaaagggagagttccagaggaatccatgaagaattcccatgcccaggctccatgtgtcatgtggaaacctccacaggtctgctagtgaagaatgcatgtatgtgagatttttgttttctttccaatagcaaattcaaagcaagcaacttgcaggctccatggaacttttaatgaaggacagtgtcttctttgaagaaaatcaagctcgtgtttttattcgaagctctggtgtaaaatatttcaaagtcatagaaatagtttgagaaatgcatagcattatttaacactattgaacagccgactttgagcattgtttcttctaactgcccctcaactaccattatcttcaagtcaacatgcatattacattttcatcctttgctttgcaagcactggtggcttgcagtttgctaatttatttatcatagagtcatcaatgtatttgttgctgacatggttttattagatactgtagtgattcaaataagttttctatttgaaaaaaaaaatcacttgattgtatccttgcccagtgaagccatcctaagacttagcaatatggattgtacatttggctgcatgagcaagtcggccgcacacttccagacagtgtgctgtttgaattgactatttgcactcaaagtctgggtattcattggttattggcctgaaatgatcaaataactacaaatgatctgttgaataaaaatagttgagctgatatatgttaagcagatattcaatcagaatgaacaggttccggtggttattttgccgtttgacattttttatggttcatttatttttaatatagagaggaagattgaatatttatctagagaatacaaagacccacatgtaaatgataggtattatctccatgtatatatgtacccacttagtcatgtaagtgcatatacacatacacacacatgagtgtagacatgtgtttattaattgacaatgacccaaatctcttccacaagacttaaaaccaaattcagggacaaatggatagagaagaaaagggtcaaacatcgagattacatggatgttaaattatatggagacgctaagaaataattgatggagccattgatgcaaaccgaagtagatttagaacttatatgaatttgatttatattttgcaagatcaaaaattagatgttaagtatcagattttaagcttgttttaatggtcaaaaaattaggacagaaataatatggacatttattagtatcttccataatttttaagtctgacacatttctattttattctaacataaaaaaacttccattatatatttactaagtatatttaattcacttaactctgtctttataagttcctattttagatggaataagagaaacaaattatatcaaggtaaaactgatcaaaagcataattgaaagttctgaaaaaagaaaaataataatatgtagaaaaatgtaacttagagagtaacacatgaacattgaagttaaaacccagaagccagatgctcacagttttattttactttaaaataaacctgtctgactgtagctttgtgaaatatcttaaaacgcaaaaaccaattgtgtcctgaaaattgtttcaagaatttaatatttttatgaaaattattttatttaactttaagcaataactagagattacaattaaattttaatcaaaatgaaggcttagttcaaacataaggaaacagtgtttgattaaaaaaaacacatctagtaagacgtaaggggaaaatcacatcctctttggagatgattatattttgatctgaagggtttggggtgttcattagacacttaataaaacttaacttccaatgaaaaagaaatcttttgtaaatcattctacttttgcactttgaaagaaaggcgttaatcataaagaagcaagaatggtcaaaatcgaatgctgcatttttataaacaaaattacagactgtctgaaattgaagaagaatgaactaataatagcattcataaccaaacacaatgatgattattgcagaacattgtatcacattttagtccagagatagaataaagttgaataaccttgacttacacaaaactgttttggtagttggatttcattatcttagtgaatttagtcattttacaatatgtttgtatttggccatttactgtaatcacatttttatatctgtacaatgacactttttgcagttgtggggtagtgtgtaacactgtccatcttgcatcattgaaactactacaatgatactatcatttaataatattaatattacttgaaatagactaagataaagaaaaggggtctgtatgatgtgcagttttgtgcctttatgtatttgccttgttctttgtcgaatgtgtgaaattccgtactgtggtttttcctataatagaaagtagagctgtgtattaaattagactgtgtctctctgatacctttacactactgagaatagcatggttttggccatgtaaaccaattttcaaagttctaatgacatagccatgtgtttttggttttttatatttcattttaaaatttgagtatcaccatacattaattaatactcctgtagtagataagctgtcattaagtaattcccaaaaaaagggccatttgcttgcattactttgaatttaatgttgcgcttgtgcactgtgttaatattgtttgtgatggattggacgttgtgactcttgccttttaagaagaaaaaaaagataggacaaagtatttgaagctcttaaaatgtacatattttggttcttctatctcaaattatttaaaatgcataattcacatttttgtaataattctatgcaattttgtggcatgatgtttcttccacttgtaattttatgtgctttcatcacaaatccaaaggaaagaataaaaatttcttaac

SEQ ID NO: 165748 - DNA, 6576 bp, Homo sapiens
  Payload ID: 12633
  Gene Symbol: PLCB1
  Gene Name: phospholipase C, beta 1 (phosphoinositide-specific)
  ENST ID: ENST00000612075
  CDS Start-End: 1-3282
acccaggaccccaaattacgtgaacttttggatgtggggaacatcgggcgcctggagcagcgcatgatcacagtggtgtatgggcctgacctcgtgaacatctcccatttgaatctcgtggctttccaagaagaagtggccaaggaatggacaaatgaggttttcagtttggcaacaaacctgctggcccaaaacatgtccagggatgcatttctggaaaaagcctatactaaacttaagctgcaagtcactccagaagggcgtattcctctcaaaaacatatatcgcttgttttcagcagatcggaagcgagttgaaactgctttagaggcttgtagtcttccatcttcaaggaatgattcaatacctcaagaagatttcactccagaagtgtacagagttttcctcaacaacctttgccctcgacctgaaattgataacatcttttcagaatttggtgcaaaaagcaaaccatatcttaccgttgatcagatgatggattttatcaaccttaagcagcgagatcctcggcttaatgaaatactttatccacctctaaaacaagagcaagtccaagtattgattgagaagtatgaacccaacaacagcctcgccagaaaaggacaaatatcagtggatgggttcatgcgctatctgagtggagaagaaaacggagtcgtttcacctgagaaactggatttgaatgaagacatgtctcagcccctttctcactatttcattaattcctcgcacaacacctacctcacagctggccaactggctggaaactcctctgttgagatgtatcgccaagtgctcctgtctggttgtcgctgtgtggagctggactgctggaagggacggactgcagaagaggaacctgtcatcacccatggcttcaccatgacaactgaaatatctttcaaggaagtgatagaagcaattgcggagtgtgcatttaagacttcaccttttccaattctcctttcgtttgagaaccatgtggattccccaaagcagcaagccaagatggcggagtactgccgactgatctttggggatgcccttctcatggagcccctggaaaaatatccactggaatctggagttcctcttccaagccctatggatttaatgtataaaattttggtgaaaaataagaagaaatcacacaagtcatcagaaggaagcggcaaaaagaagctctcagaacaagcctccaacacctacagtgactcctccagcatgttcgagccctcatccccaggagccggagaagctgatacggaaagtgacgacgacgatgatgatgatgactgtaaaaaatcttcaatggatgaggggactgctggaagtgaggctatggccacagaagaaatgtctaatctggtgaactatattcagccagtcaagtttgagtcatttgaaatttcaaaaaaaagaaataaaagttttgaaatgtcttccttcgtggaaaccaaaggacttgaacaactcaccaagtctccagtggaatttgtagaatataacaaaatgcagcttagcaggatatatccaaaaggaacacgtgtggattcatccaactatatgcctcagctcttctggaatgcaggttgtcagatggtggcacttaatttccagacaatggacctggctatgcaaataaatatggggatgtatgaatacaacgggaagagtggctacagattgaagccagagttcatgaggaggcctgacaagcattttgatccatttactgaaggcatcgtagatgggatagtggcaaacactttgtctgttaagattatttcaggtcagtttctttctgataagaaagttgggacttacgtggaagtagatatgtttggtttgcctgtggatacaaggaggaaggcatttaagaccaaaacatcccaaggaaatgctgtgaatcctgtctgggaagaagaacctattgtgttcaaaaaggtggttcttcctactctggcctgtttgagaatagcagtttatgaagaaggaggtaaattcattggccaccgtatcttgccagtgcaagccattcggccaggctatcactatatctgtctaaggaatgaaaggaaccagcctctgacgctgcctgctgtctttgtctacatagaagtgaaagactatgtgccagacacatatgcagatgtcatcgaagctttatcaaacccaatccgatatgtgaacctgatggaacagagagctaagcaattggctgctttgacactggaagatgaagaagaagtaaagaaagaggctgatcctggagaaacaccatcagaggctccaagtgaagcgagaacgactccagcagaaaatggggtgaatcacactacaaccctgacacccaagccaccctcccaggctctccacagccagccagctccaggttctgtaaaggcacctgccaaaacagaagatcttattcagagtgtcttaacagaagtggaagcacagaccatcgaagaactaaagcaacagaaatcgtttgtgaaacttcaaaagaaacactacaaagaaatgaaagacctggttaagagacaccacaagaaaaccactgaccttatcaaagaacacactaccaagtataatgaaattcagaatgactacttgagaaggagagccgctttggaaaagtccgccaaaaaggacagtaagaaaaaatcggaacccagcagccctgatcatggttcatcaacgattgagcaagacctcgctgctctggatgctgaaatgacccaaaagttaatagacttgaaggacaaacaacagcagcagctgcttaatcttcggcaagaacagtattatagtgaaaaataccagaagcgagaacatattaaactgcttattcaaaagttgacggatgtcgcagaagagtgtcagaacaatcagttaaagaagctcaaagaaatctgtgagaaagaaaagaaagaattaaagaagaaaatggataaaaagaggcaggagaagataacagaagctaaatccaaagacaaaagtcagatggaagaggagaagacagagatgatccggtcatatatccaggaagtggtgcagtatatcaagaggctagaagaagcgcaaagtaaacggcaagaaaaactcgtagagaaacacaaggaaatacgtcagcagatcctggatgaaaagcccaagggggaaggttcctcctcattcttgtcggaaacttgccatgaggatccctctgtttcccccaactttactccccccaaccctcaagctctcaagtggtgaccaccgtccttccggccagctgcaggtggagctggagcaagaataccaagacaaattcaaaagactgcccctcgagattttggaattcgtgcaggaagccatgaaaggaaagatcagtgaagacagcaatcacggttctgcccctctctccctgtcctcagaccctggaaaagtgaaccacaagactccctccagtgaggagctgggaggagacatcccaggaaaagaatttgatactcctctgtgaatgctcctgccaggccttcagaaattgcatggccactccagcgtcatcggactctctcttattacaaagatcactgcccaggaccatcttcccgagaagcatcccttagcctaaaatccacaccaaagggagagttccagaggaatccatgaagaattcccatgcccaggctccatgtgtcatgtggaaacctccacaggtctgctagtgaagaatgcatgtatgtgagatttttgttttctttccaatagcaaattcaaagcaagcaacttgcaggctccatggaacttttaatgaaggacagtgtcttctttgaagaaaatcaagctcgtgtttttattcgaagctctggtgtaaaatatttcaaagtcatagaaatagtttgagaaatgcatagcattatttaacactattgaacagccgactttgagcattgtttcttctaactgcccctcaactaccattatcttcaagtcaacatgcatattacattttcatcctttgctttgcaagcactggtggcttgcagtttgctaatttatttatcatagagtcatcaatgtatttgttgctgacatggttttattagatactgtagtgattcaaataagttttctatttgaaaaaaaaaatcacttgattgtatccttgcccagtgaagccatcctaagacttagcaatatggattgtacatttggctgcatgagcaagtcggccgcacacttccagacagtgtgctgtttgaattgactatttgcactcaaagtctgggtattcattggttattggcctgaaatgatcaaataactacaaatgatctgttgaataaaaatagttgagctgatatatgttaagcagatattcaatcagaatgaacaggttccggtggttattttgccgtttgacattttttatggttcatttatttttaatatagagaggaagattgaatatttatctagagaatacaaagacccacatgtaaatgataggtattatctccatgtatatatgtacccacttagtcatgtaagtgcatatacacatacacacacatgagtgtagacatgtgtttattaattgacaatgacccaaatctcttccacaagacttaaaaccaaattcagggacaaatggatagagaagaaaagggtcaaacatcgagattacatggatgttaaattatatggagacgctaagaaataattgatggagccattgatgcaaaccgaagtagatttagaacttatatgaatttgatttatattttgcaagatcaaaaattagatgttaagtatcagattttaagcttgttttaatggtcaaaaaattaggacagaaataatatggacatttattagtatcttccataatttttaagtctgacacatttctattttattctaacataaaaaaacttccattatatatttactaagtatatttaattcacttaactctgtctttataagttcctattttagatggaataagagaaacaaattatatcaaggtaaaactgatcaaaagcataattgaaagttctgaaaaaagaaaaataataatatgtagaaaaatgtaacttagagagtaacacatgaacattgaagttaaaacccagaagccagatgctcacagttttattttactttaaaataaacctgtctgactgtagctttgtgaaatatcttaaaacgcaaaaaccaattgtgtcctgaaaattgtttcaagaatttaatatttttatgaaaattattttatttaactttaagcaataactagagattacaattaaattttaatcaaaatgaaggcttagttcaaacataaggaaacagtgtttgattaaaaaaaacacatctagtaagacgtaaggggaaaatcacatcctctttggagatgattatattttgatctgaagggtttggggtgttcattagacacttaataaaacttaacttccaatgaaaaagaaatcttttgtaaatcattctacttttgcactttgaaagaaaggcgttaatcataaagaagcaagaatggtcaaaatcgaatgctgcatttttataaacaaaattacagactgtctgaaattgaagaagaatgaactaataatagcattcataaccaaacacaatgatgattattgcagaacattgtatcacattttagtccagagatagaataaagttgaataaccttgacttacacaaaactgttttggtagttggatttcattatcttagtgaatttagtcattttacaatatgtttgtatttggccatttactgtaatcacatttttatatctgtacaatgacactttttgcagttgtggggtagtgtgtaacactgtccatcttgcatcattgaaactactacaatgatactatcatttaataatattaatattacttgaaatagactaagataaagaaaaggggtctgtatgatgtgcagttttgtgcctttatgtatttgccttgttctttgtcgaatgtgtgaaattccgtactgtggtttttcctataatagaaagtagagctgtgtattaaattagactgtgtctctctgatacctttacactactgagaatagcatggttttggccatgtaaaccaattttcaaagttctaatgacatagccatgtgtttttggttttttatatttcattttaaaatttgagtatcaccatacattaattaatactcctgtagtagataagctgtcattaagtaattcccaaaaaaagggccatttgcttgcattactttgaatttaatgttgcgcttgtgcactgtgttaatattgtttgtgatggattggacgttgtgactcttgccttttaagaagaaaaaaaagataggacaaagtatttgaagctcttaaaatgtacatattttggttcttctatctcaaattatttaaaatgcataattcacatttttgtaataattctatgcaattttgtggcatgatgtttcttccacttgtaattttatgtgctttcatcacaaatccaaaggaaagaataaaaatttcttaac

SEQ ID NO: 165749 - DNA, 3206 bp, Homo sapiens
  Payload ID: 12633
  Gene Symbol: PLCB1
  Gene Name: phospholipase C, beta 1 (phosphoinositide-specific)
  ENST ID: ENST00000625874
  CDS Start-End: 326-3206
aatcaagcctgggcaatggcgggcgcccctcccccagcctcgctgccgccttgcagtttgatctcagactgctgtgctagcaaccagcgagactccgtgggcgtaggaccctccgagccaggactcaactattgttactccaattattttgaggactgaccctcagggatttttcttttactggacagatcaaaacaaggagacagagctactggatctcagccttgtcaaagatgccagatgtgggagacacgccaaagctcccaaggaccccaaattacgtgaacttttggatgtggggaacatcgggcgcctggagcagcgcatgatcacagtggtgtatgggcctgacctcgtgaacatctcccatttgaatctcgtggctttccaagaagaagtggccaaggaatggacaaatgaggttttcagtttggcaacaaacctgctggcccaaaacatgtccagggatgcatttctggaaaaagcctatactaaacttaagctgcaagtcactccagaagggcgtattcctctcaaaaacatatatcgcttgttttcagcagatcggaagcgagttgaaactgctttagaggcttgtagtcttccatcttcaaggaatgattcaatacctcaagaagatttcactccagaagtgtacagagttttcctcaacaacctttgccctcgacctgaaattgataacatcttttcagaatttggtgcaaaaagcaaaccatatcttaccgttgatcagatgatggattttatcaaccttaagcagcgagatcctcggcttaatgaaatactttatccacctctaaaacaagagcaagtccaagtattgattgagaagtatgaacccaacaacagcctcgccagaaaaggacaaatatcagtggatgggttcatgcgctatctgagtggagaagaaaacggagtcgtttcacctgagaaactggatttgaatgaagacatgtctcagcccctttctcactatttcattaattcctcgcacaacacctacctcacagctggccaactggctggaaactcctctgttgagatgtatcgccaagtgctcctgtctggttgtcgctgtgtggagctggactgctggaagggacggactgcagaagaggaacctgtcatcacccatggcttcaccatgacaactgaaatatctttcaaggaagtgatagaagcaattgcggagtgtgcatttaagacttcaccttttccaattctcctttcgtttgagaaccatgtggattccccaaagcagcaagccaagatggcggagtactgccgactgatctttggggatgcccttctcatggagcccctggaaaaatatccactggaatctggagttcctcttccaagccctatggatttaatgtataaaattttggtgaaaaataagaagaaatcacacaagtcatcagaaggaagcggcaaaaagaagctctcagaacaagcctccaacacctacagtgactcctccagcatgttcgagccctcatccccaggagccggagaagctgatacggaaagtgacgacgacgatgatgatgatgactgtaaaaaatcttcaatggatgaggggactgctggaagtgaggctatggccacagaagaaatgtctaatctggtgaactatattcagccagtcaagtttgagtcatttgaaatttcaaaaaaaagaaataaaagttttgaaatgtcttccttcgtggaaaccaaaggacttgaacaactcaccaagtctccagtggaatttgtagaatataacaaaatgcagcttagcaggatatatccaaaaggaacacgtgtggattcatccaactatatgcctcagctcttctggaatgcaggttgtcagatggtggcacttaatttccagacaatggacctggctatgcaaataaatatggggatgtatgaatacaacgggaagagtggctacagattgaagccagagttcatgaggaggcctgacaagcattttgatccatttactgaaggcatcgtagatgggatagtggcaaacactttgtctgttaagattatttcaggtcagtttctttctgataagaaagttgggacttacgtggaagtagatatgtttggtttgcctgtggatacaaggaggaaggcatttaagaccaaaacatcccaaggaaatgctgtgaatcctgtctgggaagaagaacctattgtgttcaaaaaggtggttcttcctactctggcctgtttgagaatagcagtttatgaagaaggaggtaaattcattggccaccgtatcttgccagtgcaagccattcggccaggctatcactatatctgtctaaggaatgaaaggaaccagcctctgacgctgcctgctgtctttgtctacatagaagtgaaagactatgtgccagacacatatgcagatgtcatcgaagctttatcaaacccaatccgatatgtgaacctgatggaacagagagctaagcaattggctgctttgacactggaagatgaagaagaagtaaagaaagaggctgatcctggagaaacaccatcagaggctccaagtgaagcgagaacgactccagcagaaaatggggtgaatcacactacaaccctgacacccaagccaccctcccaggctctccacagccagccagctccaggttctgtaaaggcacctgccaaaacagaagatcttattcagagtgtcttaacagaagtggaagcacagaccatcgaagaactaaagcaacagaaatcgtttgtgaaacttcaaaagaaacactacaaagaaatgaaagacctggttaagagacaccacaagaaaaccactgaccttatcaaagaacacactaccaagtataatgaaattcagaatgactacttgagaaggagagccgctttggaaaagtccgccaaaaaggacagtaagaaaaaatcggaacccagcagccctgatcatggttcatcaacgattgagcaagacctcgctgctctggatgctgaaatgacccaaaagttaatagacttgaaggacaaacaacagcagcagctgcttaatcttcggcaagaacagtattatagtgaaaaataccagaagcgagaacatattaaactgcttattcaaaagttgacggatgtcgcagaagagtgtcagaacaatcagttaaagaagctcaaagaaatctgtg

SEQ ID NO: 165750 - DNA, 443 bp, Homo sapiens
  Payload ID: 12633
  Gene Symbol: PLCB1
  Gene Name: phospholipase C, beta 1 (phosphoinositide-specific)
  ENST ID: ENST00000475958
  CDS Start-End: 1-80
cagcagatcggaagcgagttgaaactgctttagaggcttgtagtcttccatcttcaagggcattgagaatatggtggtgaagaaaatgaaactcaaggtttcaaggacaatagagtcttctggggaaactagccaataagcatgccaacaaatgcgtctgtaaactgggggaagtgctataaaaagaaagactggagaactactattgagaagaagggaagctcattccagaaaaagaaaacaatgctcgcaaatccctgaggctggaaataatttccctactggatttaagcaactgagaaaagaccaccgcattcaagcataaagagaaaacatgagagatggatttgcaaagacatgcaaagaatttttttccttttgcaatcacttctgattttaccttttctggataacctctggtaaaatataataatcaaaatatt

SEQ ID NO: 165751 - DNA, 3095 bp, Homo sapiens
  Payload ID: 12633
  Gene Symbol: PLCB1
  Gene Name: phospholipase C, beta 1 (phosphoinositide-specific)
  ENST ID: ENST00000629992
  CDS Start-End: 383-1129
gctctctccctctgtgtatagaggatgtgctgaatggtgcgctttgaggcggcggcggcggaggagcagaatccgccgcgactggcagcctcggctgaccggctcggcttctcttcgccttccgaggctcctcatccaccgcgggctccagacctcgcgtcccgcccggggcatggccgggcgctgcgcccccgcgcgctctgcctgctgagcggcgccggagggaggtgcggaggccgggaggccggggaggccggcggggagcagagtcgagcgcctccggagcagagaaaggagcccgcgccccgcgccccgcgccccgcgcacggtccccagtccctgccgcgctcgcccgggccgcccggagcccagatgagcccagatggccggggctcaacccggagtgcacgccttgcaactcaagcccgtgtgcgtgtccgacagcctcaagaagggcaccaaattcgtcaagtgggatgatgactcaactattgttactccaattattttgaggactgaccctcagggatttttcttttactggacagatcaaaacaaggagacagagctactggatctcagccttgtcaaagatgccagatgtgggagacacgccaaagctcccaaggaccccaaattacgtgaacttttggatgtggggaacatcgggcgcctggagcagcgcatgatcacagtggtgtatgggcctgacctcgtgaacatctcccatttgaatctcgtggctttccaagaagaagtggccaaggaatggacaaatgaggttttcagtttggcaacaaacctgctggcccaaaacatgtccagggatgcatttctggaaaaagcctatactaaacttaagctgcaagtcactccagaagggcgtattcctctcaaaaacatatatcgcttgttttcagcagatcggaagcgagttgaaactgctttagaggcttgtagtcttccatcttcaagggtggaaaaagctaatgaggctgcgaaaagtgagcagagctgtggaaaggctcccccaaaacattttcaccttcattttataaagcaaaataaaatgcttgaacctgcttgctattgcttttttgttagatgctttggaataggaaaaatataacaattaaggtcctgtccccgacttcaacaaatatttcttgagctcttactatgtgcccataggcattgagaatatggtggtgaagaaaatgaaactcaaggtttcaaggacaatagagtcttctggggaaactagccaataagcatgccaacaaatgcgtctgtaaactgggggaagtgctataaaaagaaagactggagaactactattgagaagaagggaagctcattccagaaaaagaaaacaatgctcgcaaatccctgaggctggaaataatttccctactggatttaagcaactgagaaaagaccaccgcattcaagcataaagagaaaacatgagagatggatttgcaaagacatgcaaagaatttttttccttttgcaatcacttctgattttaccttttctggataacctctggtaaaatataataatcaaaatatttaacttatgaatctagctaagggaaagaaggaatagaaaattaaatgtatgaaccaattccccgtaaattgtaattttctaaacaactggattctgagcagtcaataaatacacattgagtaatctactatgtttattatatgttcaaactttcagaccaatgtcaattgcaggcaaatttaaaaggaaaatgagattcaaataacatgagttatgtttaaattagaaaaaattatctctaacaaattaaatgtaatgataattatctgaagttggagaaaactttaaaaaacctctatgctaaaactttgaaaaattattattcatagtaaagtataatttacttggatgacttatagaattagaatgctttttaaaaatctaaaaaccaaagactgtttcagagctaggaaataaatgtttctgtgaactgactatgatgtatcaaaactctgttttaaatctctgtgataatttcattcctacataacaatgactctagaaaatatccactaattagcaaaaaattttggccatattcacaagaggtattttaaacaagccacggaagaaaagggttatataaatcatagttggttctgcgtaaatgggagcatattttgtagccaagtcatttaagctagatttaattgtgctctgtaaatagatatattaccagaaacacagtggatgtcctgttgagatttctttttaaaacatgatattactgcacattgttggggataaataaggcacttgaacttgtatcctggctgacgtgatccactagaataacatattcctttagaagatgctactctttagaaatcacagttgctagcctgaagttaccctaattgttaaaaggtagtactgtatccaaagagagagacaaagcaattactgtccttctgttaacaacccaagcatattttccagtgagacccttgaaaactgttccgtgttcaaaaaattaccactttacccacaaactttctgagaactgaaaatagtttatttgcaccaaattcccttgatttaaggcttattaacttgaaaagagctcagtgacatctggaattgtataatagtcttgccacagcactggcatacggagttgcattttaacgaagaagatcaggaataaacccatgtatttgtttcaaataataaagtttactgtagttggtgggcacacatgtaatacaaagagaaattaattattttaaatttgaagaattgtataaattttactaaatactatgaataaaatgtataaaataacttctgtgtgtaacttattagtatgttgcctttcttctgtgccttacatcctgaatataaatcagaagcaatcacttttgtagttgtgattcttaatatgactaatatcaaaattctactttaaaaccaaattaagtattccgttcattatgagtgatttacttgtagttatttcatgtattccatggctaattcaatgttttatttatagtttcagaataaaaatattgacagta

SEQ ID NO: 165752 - DNA, 759 bp, Homo sapiens
  Payload ID: 12633
  Gene Symbol: PLCB1
  Gene Name: phospholipase C, beta 1 (phosphoinositide-specific)
  ENST ID: ENST00000630495
  CDS Start-End: 350-759
agtttgatctcagactgctgtgctagcaaccagcgagactccgtgggcgtaggaccctccgagccaggcttgtcccatggcctctcatagaaatcatggaccatggaagaacaagaatatggtagacatgaaggaaatgtagagggactcaactattgttactccaattattttgaggactgaccctcagggatttttcttttactggacagatcaaaacaaggagacagagctactggatctcagccttgtcaaagatgccagatgtgggagacacgccaaagctcccaaggaccccaaattacgtgaacttttggatgtggggaacatcgggcgcctggagcagcgcatgatcacagtggtgtatgggcctgacctcgtgaacatctcccatttgaatctcgtggctttccaagaagaagtggccaaggaatggacaaatgaggttttcagtttggcaacaaacctgctggcccaaaacatgtccagggatgcatttctggaaaaagcctatactaaacttaagctgcaagtcactccagaagggcgtattcctctcaaaaacatatatcgcttgttttcagcagatcggaagcgagttgaaactgctttagaggcttgtagtcttccatcttcaaggaatgattcaatacctcaagaagatttcactccagaagtgtacagagttttcctcaacaacctttgccctcgacctgaaattgataacatcttttcagaatttggtgcaaaaagcaaacc

SEQ ID NO: 165753 - DNA, 2996 bp, Homo sapiens
  Payload ID: 12633
  Gene Symbol: PLCB1
  Gene Name: phospholipase C, beta 1 (phosphoinositide-specific)
  ENST ID: ENST00000626966
  CDS Start-End: 114-2996
agactgctgtgctagcaaccagcgagactccgtgggcgtaggaccctccgagccaggaccccaaattacgtgaacttttggatgtggggaacatcgggcgcctggagcagcgcatgatcacagtggtgtatgggcctgacctcgtgaacatctcccatttgaatctcgtggctttccaagaagaagtggccaaggaatggacaaatgaggttttcagtttggcaacaaacctgctggcccaaaacatgtccagggatgcatttctggaaaaagcctatactaaacttaagctgcaagtcactccagaagggcgtattcctctcaaaaacatatatcgcttgttttcagcagatcggaagcgagttgaaactgctttagaggcttgtagtcttccatcttcaaggaatgattcaatacctcaagaagatttcactccagaagtgtacagagttttcctcaacaacctttgccctcgacctgaaattgataacatcttttcagaatttggtgcaaaaagcaaaccatatcttaccgttgatcagatgatggattttatcaaccttaagcagcgagatcctcggcttaatgaaatactttatccacctctaaaacaagagcaagtccaagtattgattgagaagtatgaacccaacaacagcctcgccagaaaaggacaaatatcagtggatgggttcatgcgctatctgagtggagaagaaaacggagtcgtttcacctgagaaactggatttgaatgaagacatgtctcagcccctttctcactatttcattaattcctcgcacaacacctacctcacagctggccaactggctggaaactcctctgttgagatgtatcgccaagtgctcctgtctggttgtcgctgtgtggagctggactgctggaagggacggactgcagaagaggaacctgtcatcacccatggcttcaccatgacaactgaaatatctttcaaggaagtgatagaagcaattgcggagtgtgcatttaagacttcaccttttccaattctcctttcgtttgagaaccatgtggattccccaaagcagcaagccaagatggcggagtactgccgactgatctttggggatgcccttctcatggagcccctggaaaaatatccactggaatctggagttcctcttccaagccctatggatttaatgtataaaattttggtgaaaaataagaagaaatcacacaagtcatcagaaggaagcggcaaaaagaagctctcagaacaagcctccaacacctacagtgactcctccagcatgttcgagccctcatccccaggagccggagaagctgatacggaaagtgacgacgacgatgatgatgatgactgtaaaaaatcttcaatggatgaggggactgctggaagtgaggctatggccacagaagaaatgtctaatctggtgaactatattcagccagtcaagtttgagtcatttgaaatttcaaaaaaaagaaataaaagttttgaaatgtcttccttcgtggaaaccaaaggacttgaacaactcaccaagtctccagtggaatttgtagaatataacaaaatgcagcttagcaggatatatccaaaaggaacacgtgtggattcatccaactatatgcctcagctcttctggaatgcaggttgtcagatggtggcacttaatttccagacaatggacctggctatgcaaataaatatggggatgtatgaatacaacgggaagagtggctacagattgaagccagagttcatgaggaggcctgacaagcattttgatccatttactgaaggcatcgtagatgggatagtggcaaacactttgtctgttaagattatttcaggtcagtttctttctgataagaaagttgggacttacgtggaagtagatatgtttggtttgcctgtggatacaaggaggaaggcatttaagaccaaaacatcccaaggaaatgctgtgaatcctgtctgggaagaagaacctattgtgttcaaaaaggtggttcttcctactctggcctgtttgagaatagcagtttatgaagaaggaggtaaattcattggccaccgtatcttgccagtgcaagccattcggccaggctatcactatatctgtctaaggaatgaaaggaaccagcctctgacgctgcctgctgtctttgtctacatagaagtgaaagactatgtgccagacacatatgcagatgtcatcgaagctttatcaaacccaatccgatatgtgaacctgatggaacagagagctaagcaattggctgctttgacactggaagatgaagaagaagtaaagaaagaggctgatcctggagaaacaccatcagaggctccaagtgaagcgagaacgactccagcagaaaatggggtgaatcacactacaaccctgacacccaagccaccctcccaggctctccacagccagccagctccaggttctgtaaaggcacctgccaaaacagaagatcttattcagagtgtcttaacagaagtggaagcacagaccatcgaagaactaaagcaacagaaatcgtttgtgaaacttcaaaagaaacactacaaagaaatgaaagacctggttaagagacaccacaagaaaaccactgaccttatcaaagaacacactaccaagtataatgaaattcagaatgactacttgagaaggagagccgctttggaaaagtccgccaaaaaggacagtaagaaaaaatcggaacccagcagccctgatcatggttcatcaacgattgagcaagacctcgctgctctggatgctgaaatgacccaaaagttaatagacttgaaggacaaacaacagcagcagctgcttaatcttcggcaagaacagtattatagtgaaaaataccagaagcgagaacatattaaactgcttattcaaaagttgacggatgtcgcagaagagtgtcagaacaatcagttaaagaagctcaaagaaatctgtgag

SEQ ID NO: 165754 - DNA, 830 bp, Homo sapiens
  Payload ID: 12633
  Gene Symbol: PLCB1
  Gene Name: phospholipase C, beta 1 (phosphoinositide-specific)
  ENST ID: ENST00000628239
  CDS Start-End: 1-695
agcaacagaaatcgtttgtgaaacttcaaaagaaacactacaaagaaatgaaagacctggttaagagacaccacaagaaaaccactgaccttatcaaagaacacactaccaagtataatgaaattcagaatgactacttgagaaggagagccgctttggaaaagtccgccaaaaaggacagtaagaaaaaatcggaacccagcagccctgatcatggttcatcaacgattgagcaagacctcgctgctctggatgctgaaatgacccaaaagttaatagacttgaaggacaaacaacagcagcagctgcttaatcttcggcaagaacagtattatagtgaaaaataccagaagcgagaacatattaaactgcttattcaaaagttgacggatgtcgcagaagagtgtcagaacaatcagttaaagaagctcaaagaaatctgtgagaaagaaaagaaagaattaaagaagaaaatggataaaaagaggcaggagaagataacagaagctaaatccaaagacaaaagtcagatggaagaggagaagacagagatgatccggtcatatatccaggaagtggtgcagtatatcaagaggctagaagaagcgcaaagtaaacggcaagaaaaactcgtagagaaacacaaggaaatacgtcagcagatcctggatgaaaagcccaaggttgctccatgaccatctttttgtgtctggatttgaaggttgcccatgaagattgttggttccatgtcaaactaaagcatttcttgagggtttttcttcatggcttaaaaacgttgtgccttaaagctgtgattttattaataaaat

SEQ ID NO: 165755 - DNA, 4616 bp, Homo sapiens
  Payload ID: 12634
  Gene Symbol: PLCB2
  Gene Name: phospholipase C, beta 2
  Uniprot ID: Q00722
  ENST ID: ENST00000260402
  CDS Start-End: 251-3808
acaggcccccatggcaggcagggcgggtgggaggagggtgatttacaaggcagatgggcctctggctacagctcagtcctgcactcagccagggccaccccaggggctataagagcaactagatttctggagcagctcggggatgggtgccatttgagcccagcttggctccccctcctggctggcctccttcctgcccttctgcctgcctgtgtctgctgagattctgcaaagaggaacgcttggcaccatgtctctgctcaaccctgtcctgctgccccccaaggtgaaggcctatctgagccaaggggagcgcttcatcaaatgggatgatgaaactacagttgcctctccagttatcctccgtgtggatcctaagggctactacttatactggacgtatcaaagtaaggagatggagtttctggatatcaccagcatccgggatactcgctttgggaagtttgccaagatgcccaagagccagaagctccgggacgtcttcaacatggactttcctgataacagtttcctgctgaagacactcacggtggtgtccggcccggacatggtggacctcaccttccacaacttcgtctcctacaaggagaacgtgggcaaggcctgggctgaggacgtactggccctagtcaaacatccgctgacggccaacgcctcccgcagcaccttcctggacaagatccttgtgaagctcaagatgcagctcaactctgaagggaagattccggtgaagaactttttccagatgtttcctgctgaccgcaagcgggtggaagctgctctcagtgcctgccacctccccaaaggcaaaaatgacgccatcaatcctgaggacttcccagaacctgtctacaagagtttcctcatgagcctctgtcctcggccagaaatagatgagatcttcacttcttaccatgctaaggccaaaccctacatgacgaaggagcacctgaccaaattcatcaaccagaaacagcgggactcccggcttaactccctgctgttcccgccagcacggcctgaccaggtgcagggcctcatcgacaagtatgagcccagtggcatcaatgcacagaggggccagctgtcacctgaaggcatggtctggtttctctgtgggccagagaacagcgtgctggcccaggacaagctgctgctccaccacgacatgacgcagccactcaatcattacttcatcaactcgtcccacaacacctacctgacagccggccagttctcaggcctctcctcggctgagatgtaccgccaggtgctgctctctggctgccgttgcgtggagctagactgctggaaggggaaaccccctgacgaggagcccattatcacccatggcttcaccatgaccacagacatcttcttcaaagaagcaattgaggctattgcagaaagcgcctttaagacctccccctatcccatcatcctgtcgtttgagaaccatgtggactcaccccgccagcaggctaagatggctgagtattgccggacgatctttggggatatgctgctcacagagcccctggaaaagttcccactaaaaccaggtgtccccctgcccagccctgaggatctcaggggcaagatcctcatcaagaacaagaagaaccagttttctggccccacctcctccagtaaggatactggtggggaggctgagggcagcagcccacccagtgcccctgcaggtgagggcacagtgtgggctggcgaggaagggactgagctggaggaggaggaggtggaagaggaagaggaggaggagtcaggaaacctggatgaagaagagattaagaagatgcagtcggatgagggcacagcgggcctggaagtgacggcttatgaggagatgtccagcctagtcaattacatccagcccaccaagttcgtctcctttgagttctctgcccaaaagaaccgaagttatgtcatctcgtccttcacagagctcaaggcatatgacctgctctccaaggcctcggtgcagtttgtggactacaacaagcgccagatgagccgcatttaccccaagggaacccgcatggactcctccaactacatgccccagatgttctggaatgctggatgccagatggttgccctcaacttccagacgatggacttgcccatgcagcagaacatggcagtatttgagttcaacgggcagagcggctacctcctcaagcatgagttcatgcgccggccggacaagcagttcaaccccttctcagtggaccgcatcgacgtggtggtggccaccaccctttccattacggtgatctctgggcagttcctgtcagaacgcagcgtgcgcacctatgtagaagtggagctgtttggccttcctggggaccccaagaggcgctatcgaactaagctgtcacccagtactaactccatcaatcctgtctggaaggaggagccctttgtctttgagaagatcttgatgcctgagctggcctccctcagagtggctgtgatggaggaaggcaacaagtttcttggacaccgcatcatccccatcaatgccctaaattctgggtaccaccacctgtgcctgcacagtgagagcaacatgcccctcaccatgcctgcgctcttcatcttcctggagatgaaggactacatacctggtgcttgggcagatctcactgtggccctcgccaaccccattaagttcttcagtgcccatgacacgaagtctgtgaagctcaaggaggccatgggaggtctgcctgagaagcccttcccactggcgagtccagttgccagccaggtcaatggggcgttggccccaacgagcaatgggtcaccagcagccagggccggggccagggaagaggctatgaaagaagctgcggagccgcggaccgccagcctggaggagctccgggagctaaagggcgtggtgaagctgcagcggcggcacgagaaggagctgcgagagttggagcggcgcggagcgcggcgctgggaggagctgctgcagcggggcgcggcgcagctggcggagctcgggccaccgggcgtggggggcgtcggggcctgcaagctcggtcccggcaagggctctcgcaagaagaggagcctgccccgcgaggagagcgccggagccgcgccgggcgagggccctgagggcgtggacgggcgcgtgcgggagctgaaagacaggctggagctggagctgctgcggcagggcgaggagcagtacgagtgcgttctgaagcgcaaggagcagcacgtggccgagcaaatctccaaaatgatggagctggccagagagaaacaggcggcagagctgaaggccctgaaggagacgtcggagaacgacaccaaagagatgaagaaaaagctggagacaaagagactggagcggatccagggcatgaccaaagtcaccacagacaagatggcccaggagaggttgaagagagagattaacaactcccacatccaggaagtagtgcaggtgatcaagcagatgacggagaacttggagaggcaccaggagaagctggaggagaagcaggcggcttgcctggaacagatacgggagatggaaaagcagttccagaaggaggcgctggcagagtacgaggccaggatgaagggtctggaggcagaggtgaaggagtcggtgagggcctgcctcaggacctgctttccctccgaggccaaggacaagcctgagagggcctgcgagtgccccccagagctgtgtgagcaggacccactcatagcaaaggcagatgcccaggagagccgcctctgatgcccccatcccactgggacatttagcaaggaggttcagccccttctctgggatgtggttctattcccccaggaaaaaggagccccagccttctgaggctgtgggaacctgtggctgccttggacgctgcagccccctcctcaacggccaggccagagtctgagacaggacccaggcaccctcacggcagggcctctctggggcctagaagtcttctcaagctgacttcctacctccccctccatctctagataagtgtcatatatttgttgagggcaaaagactatggactggaaggcagaaagtgggatcctggccccactctgcctttcctattgagcaaccagctctgggctcagtttcctcacctggagggttggacccactcacctccactctagccccgaaccctcctgccccaggcttccaggccccatcaggcctgccctgagttggccttgtccactccttgaggcagatcctggcactacctcacagctccctggggacggccactccctggctgagggccctcccctcccctctgcctgtccggaacgggaggctgaaatggaaaagctgccttggccctgcttggctgagtcacaaggggcagtgggctcttgggtgctgttccaccctgaccctggctcacccctcttcctaggcctgggggcaggcagttcctaccatgtacccctctcaggctgcctgcctgacaaggtcagcatcatttgctctcctgaatttatgaggtttatttatttttctctttcctactcctattaaagaacctcgtcccagtgtt

SEQ ID NO: 165756 - DNA, 4242 bp, Homo sapiens
  Payload ID: 12634
  Gene Symbol: PLCB2
  Gene Name: phospholipase C, beta 2
  Uniprot ID: Q00722
  ENST ID: ENST00000456256
  CDS Start-End: 154-3666
ccccaggggctataagagcaactagatttctggagcagctcggggatgggtgccatttgagcccagcttggctccccctcctggctggcctccttcctgcccttctgcctgcctgtgtctgctgagattctgcaaagaggaacgcttggcaccatgtctctgctcaaccctgtcctgctgccccccaaggtgaaggcctatctgagccaaggggagcgcttcatcaaatgggatgatgaaactacagttgcctctccagttatcctccgtgtggatcctaagggctactacttatactggacgtatcaaagtaaggagatggagtttctggatatcaccagcatccgggatactcgctttgggaagtttgccaagatgcccaagagccagaagctccgggacgtcttcaacatggactttcctgataacagtttcctgctgaagacactcacggtggtgtccggcccggacatggtggacctcaccttccacaacttcgtctcctacaaggagaacgtgggcaaggcctgggctgaggacgtactggccctagtcaaacatccgctgacggccaacgcctcccgcagcaccttcctggacaagatccttgtgaagctcaagatgcagctcaactctgaagggaagattccggtgaagaactttttccagatgtttcctgctgaccgcaagcgggtggaagctgctctcagtgcctgccacctccccaaaggcaaaaatgacgccatcaatcctgaggacttcccagaacctgtctacaagagtttcctcatgagcctctgtcctcggccagaaatagatgagatcttcacttcttaccatgctaaggccaaaccctacatgacgaaggagcacctgaccaaattcatcaaccagaaacagcgggactcccggcttaactccctgctgttcccgccagcacggcctgaccaggtgcagggcctcatcgacaagtatgagcccagtggcatcaatgcacagaggggccagctgtcacctgaaggcatggtctggtttctctgtgggccagagaacagcgtgctggcccaggacaagctgctgctccaccacgacatgacgcagccactcaatcattacttcatcaactcgtcccacaacacctacctgacagccggccagttctcaggcctctcctcggctgagatgtaccgccaggtgctgctctctggctgccgttgcgtggagctagactgctggaaggggaaaccccctgacgaggagcccattatcacccatggcttcaccatgaccacagacatcttcttcaaagaagcaattgaggctattgcagaaagcgcctttaagacctccccctatcccatcatcctgtcgtttgagaaccatgtggactcaccccgccagcaggctaagatggctgagtattgccggacgatctttggggatatgctgctcacagagcccctggaaaagttcccactaaaaccaggtgtccccctgcccagccctgaggatctcaggggcaagatcctcatcaagaacaagaagaaccagttttctggccccacctcctccagtaaggatactggtggggaggctgagggcagcagcccacccagtgcccctgcaggtgagggcacagtgtgggctggcgaggaagggactgagctggaggaggaggaggtggaagaggaagaggaggaggagtcaggaaacctggatgaagaagagattaagaagatgcagtcggatgagggcacagcgggcctggaagtgacggcttatgaggagatgtccagcctagtcaattacatccagcccaccaagttcgtctcctttgagttctctgcccaaaagaaccgaagttatgtcatctcgtccttcacagagctcaaggcatatgacctgctctccaaggcctcggtgcagtttgtggactacaacaagcgccagatgagccgcatttaccccaagggaacccgcatggactcctccaactacatgccccagatgttctggaatgctggatgccagatggttgccctcaacttccagacgatggacttgcccatgcagcagaacatggcagtatttgagttcaacgggcagagcggctacctcctcaagcatgagttcatgcgccggccggacaagcagttcaaccccttctcagtggaccgcatcgacgtggtggtggccaccaccctttccattacggtgatctctgggcagttcctgtcagaacgcagcgtgcgcacctatgtagaagtggagctgtttggccttcctggggaccccaagaggcgctatcgaactaagctgtcacccagtactaactccatcaatcctgtctggaaggaggagccctttgtctttgagaagatcttgatgcctgagctggcctccctcagagtggctgtgatggaggaaggcaacaagtttcttggacaccgcatcatccccatcaatgccctaaattctgggtaccaccacctgtgcctgcacagtgagagcaacatgcccctcaccatgcctgcgctcttcatcttcctggagatgaaggactacatacctggtgcttgggcagatctcactgtggccctcgccaaccccattaagttcttcagtgcccatgacacgaagtctgtgaagctcaaggaggccatgggaggtctgcctgagaagcccttcccactggcgagtccagttgccagccaggtcaatggggcgttggccccaacgagcaatgggtcaccagagccgcggaccgccagcctggaggagctccgggagctaaagggcgtggtgaagctgcagcggcggcacgagaaggagctgcgagagttggagcggcgcggagcgcggcgctgggaggagctgctgcagcggggcgcggcgcagctggcggagctcgggccaccgggcgtggggggcgtcggggcctgcaagctcggtcccggcaagggctctcgcaagaagaggagcctgccccgcgaggagagcgccggagccgcgccgggcgagggccctgagggcgtggacgggcgcgtgcgggagctgaaagacaggctggagctggagctgctgcggcagggcgaggagcagtacgagtgcgttctgaagcgcaaggagcagcacgtggccgagcaaatctccaaaatgatggagctggccagagagaaacaggcggcagagctgaaggccctgaaggagacgtcggagaacgacaccaaagagatgaagaaaaagctggagacaaagagactggagcggatccagggcatgaccaaagtcaccacagacaagatggcccaggagaggttgaagagagagattaacaactcccacatccaggaagtagtgcaggtgatcaagcagatgacggagaacttggagaggcaccaggagaagctggaggagaagcaggcggcttgcctggaacagatacgggagatggaaaagcagttccagaaggaggcgctggcagagtacgaggccaggatgaagggtctggaggcagaggtgaaggagtcggtgagggcctgcctcaggacctgctttccctccgaggccaaggacaagcctgagagggcctgcgagtgccccccagagctgtgtgagcaggacccactcatagcaaaggcagatgcccaggagagccgcctctgatgcccccatcccactgggacatttagcaaggaggttcagccccttctctgggatgtggttctattcccccaggaaaaaggagccccagccttctgaggctgtgggaacctgtggctgccttggacgctgcagccccctcctcaacggccaggccagagtctgagacaggacccaggcaccctcacggcagggcctctctggggcctagaagtcttctcaagctgacttcctacctccccctccatctctagataagtgtcatatatttgttgagggcaaaagactatggactggaaggcagaaagtgggatcctggccccactctgcctttcctattgagcaaccagctctgggctcagtttcctcacctggagggttggacccactcacctccactctagccccgaaccctcctgccccaggcttccaggccccatcaggcctgccctgagttggccttgtccactccttgaggcagatcctggcactacctcacagctccctggggacggccactccctggctgagggccctcccctcccctctgcctgtccggaacgggaggctgaaatggaa

SEQ ID NO: 165757 - DNA, 1763 bp, Homo sapiens
  Payload ID: 12634
  Gene Symbol: PLCB2
  Gene Name: phospholipase C, beta 2
  ENST ID: ENST00000543785
  CDS Start-End: 239-838
ggcaggcagggcgggtgggaggagggtgatttacaaggcagatgggcctctggctacagctcagtcctgcactcagccagggccaccccaggggctataagagcaactagatttctggagcagctcggggatgggtgccatttgagcccagcttggctccccctcctggctggcctccttcctgcccttctgcctgcctgtgtctgctgagattctgcaaagaggaacgcttggcaccatgtctctgctcaaccctgtcctgctgccccccaaggtgaaggcctatctgagccaaggggagcgcttcatcaaatgggatgatgaaactacagttgcctctccagttatcctccgtgtggatcctaagggctactacttatactggacgtatcaaagtaaggagatggagtttctggatatcaccagcatccgggatactcgctttgggaagtttgccaagatgcccaagagccagaagctccgggacgtcttcaacatggactttcctgataacagtttcctgctgaagacactcacggtggtgtccggcccggacatggtggacctcaccttccacaacttcgtctcctacaaggagaacgtgggcaaggcctgggctgaggacgtactggccctagtcaaacatccgctgacggccaacgcctcccgcagcaccttcctggacaagatccttgtgaagctcaagatgcagctcaactctgaagggaagattccggtgaagaactttttccagatgtttcctgctgaccgcaagcgggtggaagctgctctcagtgcctgccacctccccaaaggcaaacctggaggagcgagataaggtcggcagtggcaggcggcagtctgcagggatctggaagtctgcagcgtgtcgagggagaggaactgaaccaaaggcggaagctgccaagatgcagacttctgctctgtacagaaaagcatttttccctgtctttttagttaaataattaatttttaattacaagttgtaagcagggtcaccccatgaagcaacttgtgtgaattacaaaaaggagccctctgggctgatatggccctgagctaggcttcaagcctggccaatggagcgaatctcagcccctgtccctgcttggccagtgctcttgtgtgggtcccagcctataccccatggagtattttctcctggtaagaatttggaacgttataaataaataaaaccacgacccccattgatcacctgcccacatgaatcccaggaggagcatttaccccacagccacagctctgcagagttggtgactccttgatgcagtcagtcacagggatccaaatgtggcgttggggagaggtaggaatgggctcctgcggctcccctacagccagcaacacttacctgtggtcagcacacatccaccctccctctctcctgctgcctgagctcctcccttggctaagtcctccttatctatctgctttccttgtgtctcagtagaggctactgacccaactttgcttggagctgaagctccagagacagggaggggtttggggagatccagttagactctcctgctcagaccctctgctccaaactaagactgatgttggccttccagtgtgattctgaaagacatttaatgttttttttggggggggaaggaatgcaaaggtgcagaatccctgaataccacaaatgtacttttcatttctatttctatagatttgcctattctggtggtaaagtaaatgaaatcataaatata

SEQ ID NO: 165758 - DNA, 517 bp, Homo sapiens
  Payload ID: 12634
  Gene Symbol: PLCB2
  Gene Name: phospholipase C, beta 2
  ENST ID: ENST00000559671
  CDS Start-End: 1-262
cgacaccaaagagatgaagaaaaagctggagacaaagagactggagcggatccagggcatgaccaaagtcaccacagacaagatggcccaggagaggttgaagagagagattaacaactcccacatccaggaagtagtgcaggtgatcaagcagatgacggagaacttggagaggcaccaggagaagctggaggagaagcaggcggcttgcctggaacagatacgggagatggaaaagcagccagatcccgcacatccttgaaggcctatctttaaaaggcccgagagccctctcctgcccacaactccatcttttcatccaaggactgtgttggtacgtatttagcagaagaattcagccctcaggtgacaacgtccattttttaagtcccagtgttgtcttcttaagaggtggaacgtctcgcacccagaaccgagattctgtctctctcttacccgctgccggcaacaaaatgtgcggctcatgaaaagtctcagtaaattctgcagctgataa

SEQ ID NO: 165759 - DNA, 4517 bp, Homo sapiens
  Payload ID: 12634
  Gene Symbol: PLCB2
  Gene Name: phospholipase C, beta 2
  Uniprot ID: Q00722
  ENST ID: ENST00000557821
  CDS Start-End: 166-3711
cagccagggccaccccaggggctataagagcaactagatttctggagcagctcggggatgggtgccatttgagcccagcttggctccccctcctggctggcctccttcctgcccttctgcctgcctgtgtctgctgagattctgcaaagaggaacgcttggcaccatgtctctgctcaaccctgtcctgctgccccccaaggtgaaggcctatctgagccaaggggagcgcttcatcaaatgggatgatgaaactacagttgcctctccagttatcctccgtgtggatcctaagggctactacttatactggacgtatcaaagtaaggagatggagtttctggatatcaccagcatccgggatactcgctttgggaagtttgccaagatgcccaagagccagaagctccgggacgtcttcaacatggactttcctgataacagtttcctgctgaagacactcacggtggtgtccggcccggacatggtggacctcaccttccacaacttcgtctcctacaaggagaacgtgggcaaggcctgggctgaggacgtactggccctagtcaaacatccgctgacggccaacgcctcccgcagcaccttcctggacaagatccttgtgaagctcaagatgcagctcaactctgaagggaagattccggtgaagaactttttccagatgtttcctgctgaccgcaagcgggtggaagctgctctcagtgcctgccacctccccaaaggcaaaaatgacgccatcaatcctgaggacttcccagaacctgtctacaagagtttcctcatgagcctctgtcctcggccagaaatagatgagatcttcacttcttaccatgctaaggccaaaccctacatgacgaaggagcacctgaccaaattcatcaaccagaaacagcgggactcccggcttaactccctgctgttcccgccagcacggcctgaccaggtgcagggcctcatcgacaagtatgagcccagtggcatcaatgcacagaggggccagctgtcacctgaaggcatggtctggtttctctgtgggccagagaacagcgtgctggcccaggacaagctgctgctccaccacgacatgacgcagccactcaatcattacttcatcaactcgtcccacaacacctacctgacagccggccagttctcaggcctctcctcggctgagatgtaccgccaggtgctgctctctggctgccgttgcgtggagctagactgctggaaggggaaaccccctgacgaggagcccattatcacccatggcttcaccatgaccacagacatcttcttcaaagaagcaattgaggctattgcagaaagcgcctttaagacctccccctatcccatcatcctgtcgtttgagaaccatgtggactcaccccgccagcaggctaagatggctgagtattgccggacgatctttggggatatgctgctcacagagcccctggaaaagttcccactaaaaccaggtgtccccctgcccagccctgaggatctcaggggcaagatcctcatcaagaacaagaagaaccagttttctggccccacctcctccagtaaggatactggtggggaggctgagggcagcagcccacccagtgcccctgcagtgtgggctggcgaggaagggactgagctggaggaggaggaggtggaagaggaagaggaggaggagtcaggaaacctggatgaagaagagattaagaagatgcagtcggatgagggcacagcgggcctggaagtgacggcttatgaggagatgtccagcctagtcaattacatccagcccaccaagttcgtctcctttgagttctctgcccaaaagaaccgaagttatgtcatctcgtccttcacagagctcaaggcatatgacctgctctccaaggcctcggtgcagtttgtggactacaacaagcgccagatgagccgcatttaccccaagggaacccgcatggactcctccaactacatgccccagatgttctggaatgctggatgccagatggttgccctcaacttccagacgatggacttgcccatgcagcagaacatggcagtatttgagttcaacgggcagagcggctacctcctcaagcatgagttcatgcgccggccggacaagcagttcaaccccttctcagtggaccgcatcgacgtggtggtggccaccaccctttccattacggtgatctctgggcagttcctgtcagaacgcagcgtgcgcacctatgtagaagtggagctgtttggccttcctggggaccccaagaggcgctatcgaactaagctgtcacccagtactaactccatcaatcctgtctggaaggaggagccctttgtctttgagaagatcttgatgcctgagctggcctccctcagagtggctgtgatggaggaaggcaacaagtttcttggacaccgcatcatccccatcaatgccctaaattctgggtaccaccacctgtgcctgcacagtgagagcaacatgcccctcaccatgcctgcgctcttcatcttcctggagatgaaggactacatacctggtgcttgggcagatctcactgtggccctcgccaaccccattaagttcttcagtgcccatgacacgaagtctgtgaagctcaaggaggccatgggaggtctgcctgagaagcccttcccactggcgagtccagttgccagccaggtcaatggggcgttggccccaacgagcaatgggtcaccagcagccagggccggggccagggaagaggctatgaaagaagctgcggagccgcggaccgccagcctggaggagctccgggagctaaagggcgtggtgaagctgcagcggcggcacgagaaggagctgcgagagttggagcggcgcggagcgcggcgctgggaggagctgctgcagcggggcgcggcgcagctggcggagctcgggccaccgggcgtggggggcgtcggggcctgcaagctcggtcccggcaagggctctcgcaagaagaggagcctgccccgcgaggagagcgccggagccgcgccgggcgagggccctgagggcgtggacgggcgcgtgcgggagctgaaagacaggctggagctggagctgctgcggcagggcgaggagcagtacgagtgcgttctgaagcgcaaggagcagcacgtggccgagcaaatctccaaaatgatggagctggccagagagaaacaggcggcagagctgaaggccctgaaggagacgtcggagaacgacaccaaagagatgaagaaaaagctggagacaaagagactggagcggatccagggcatgaccaaagtcaccacagacaagatggcccaggagaggttgaagagagagattaacaactcccacatccaggaagtagtgcaggtgatcaagcagatgacggagaacttggagaggcaccaggagaagctggaggagaagcaggcggcttgcctggaacagatacgggagatggaaaagcagttccagaaggaggcgctggcagagtacgaggccaggatgaagggtctggaggcagaggtgaaggagtcggtgagggcctgcctcaggacctgctttccctccgaggccaaggacaagcctgagagggcctgcgagtgccccccagagctgtgtgagcaggacccactcatagcaaaggcagatgcccaggagagccgcctctgatgcccccatcccactgggacatttagcaaggaggttcagccccttctctgggatgtggttctattcccccaggaaaaaggagccccagccttctgaggctgtgggaacctgtggctgccttggacgctgcagccccctcctcaacggccaggccagagtctgagacaggacccaggcaccctcacggcagggcctctctggggcctagaagtcttctcaagctgacttcctacctccccctccatctctagataagtgtcatatatttgttgagggcaaaagactatggactggaaggcagaaagtgggatcctggccccactctgcctttcctattgagcaaccagctctgggctcagtttcctcacctggagggttggacccactcacctccactctagccccgaaccctcctgccccaggcttccaggccccatcaggcctgccctgagttggccttgtccactccttgaggcagatcctggcactacctcacagctccctggggacggccactccctggctgagggccctcccctcccctctgcctgtccggaacgggaggctgaaatggaaaagctgccttggccctgcttggctgagtcacaaggggcagtgggctcttgggtgctgttccaccctgaccctggctcacccctcttcctaggcctgggggcaggcagttcctaccatgtacccctctcaggctgcctgcctgacaaggtcagcatcatttgctctcctgaatttatgaggtttatttatttttctctttcctactcctattaaagaacctcgtcccagtg

SEQ ID NO: 165760 - DNA, 438 bp, Homo sapiens
  Payload ID: 12634
  Gene Symbol: PLCB2
  Gene Name: phospholipase C, beta 2
  ENST ID: ENST00000559618
  CDS Start-End: 1-225
atacgggagatggaaaagcagttccagaaggaggcgctggcagagtacgaggccaggatgaagggtctggaggcagaggtgaaggagtcggtgagggcctgcctcaggacctgctttccctccgaggccaaggacaagcctgagagggcctgcgagtgccccccagagctgtgtgagcaggacccactcatagcaaaggcagatgcccaggagagccgcctctgatgcccccatcccactgggacatttagcaaggaggttcagccccttctctgggatgtggttctattcccccaggaaaaaggagccccagccttctgaggctgtgggaacctgtggctgcctgcctgacaaggtcagcatcatttgctctcctgaatttatgaggtttatttatttttctctttcctactcctattaaagaacctcgtcccagtg

SEQ ID NO: 165761 - DNA, 4197 bp, Homo sapiens
  Payload ID: 12635
  Gene Symbol: PLCB3
  Gene Name: phospholipase C, beta 3 (phosphatidylinositol-specific)
  Uniprot ID: Q01970
  ENST ID: ENST00000279230
  CDS Start-End: 128-3832
ccgggacagactggcgggcgggcgggcactgacgccgcggggccggagcgggccgcgcggtgggagcagcggcgccgtcggtccccgtcagggctccgtgggtccccgacccgcccctggccgggccatggcgggcgcccagcccggcgtccacgcgctgcagttggagccgcccaccgtggtggagaccctgcggcgcgggagtaagttcatcaaatgggacgaggagacctccagtcggaacctggtgaccctgcgtgtggaccccaatggcttcttcttgtactggacgggccccaacatggaggtggacacactggacatcagttccatcagggacacacggacaggccggtacgcccgcctgcccaaggaccccaagatccgggaagttctgggctttgggggtcccgatgcccggctggaggagaagctgatgacggtggtgtctgggccagacccagtgaacacagtgttcttgaacttcatggccgtgcaggatgacacagccaaggtctggtctgaggagctattcaagctggctatgaacatcctggctcagaacgcctcccggaacaccttcctgcgcaaagcatacacgaagctgaagctgcaggtgaaccaggatggtcggatccccgtcaagaacatcctgaagatgttctcagcagacaagaagcgggtggagactgcgctggaatcctgtggcctcaaattcaaccggagtgagtccatccggcctgatgagttttccttggaaatctttgagcggttcctgaacaagctgtgtctgcggccggacattgacaagatcctgctggagataggcgccaagggcaagccatacctgacgctggagcagctcatggacttcatcaaccagaagcaacgcgacccgagactcaacgaagtgctgtacccgcccctgcggccctcccaggcccggctgctcatcgaaaagtatgagcccaaccagcagtttctggagcgagaccagatgtccatggagggctttagccgctacctgggaggcgaggagaatggcatcctgcccctggaagccctggatctgagcacggacatgacccagccactgagtgcctacttcatcaactcctcgcataacacctatctcactgcggggcagctggctgggacctcgtcggtggagatgtaccgccaggcactactatggggctgccgctgcgtggagctggacgtgtggaagggacggccgcctgaggaggaacccttcattacccacggcttcaccatgaccacagaggtgcctctgcgcgacgtgctggaggccattgccgagactgccttcaagacctcgccctaccccgtcatcctctccttcgagaaccatgtggactcggcaaagcaacaggcaaagatggctgagtactgccgctccatctttggagacgcgctactcatcgagcctctggacaagtacccgctggccccaggcgttcccctgcccagcccccaggacctgatgggccgtatcctggtgaagaacaagaagcggcaccgacccagcgcaggtggcccagacagcgccgggcgcaagcggcccctggagcagagcaattctgccctgagcgagagctccgcggccaccgagccctcctccccgcagctggggtctcccagctctgacagctgcccaggcctgagcaatggggaggaggtagggcttgagaagcccagcctggagcctcagaagtctctgggtgacgagggcctgaaccgaggcccctatgttcttggacctgctgaccgtgaggatgaggaggaagatgaggaagaggaggaacagacagaccccaaaaagccaactacagatgagggcacagccagcagcgaggtgaatgccactgaggagatgtccacgcttgtcaactacatcgaacctgtcaagttcaagtcctttgaggctgctcgaaagaggaacaaatgcttcgagatgtcgtcctttgtggagaccaaggccatggagcaactgaccaagagccccatggagtttgtggaatacaacaagcagcagctcagccgcatctaccccaagggcacccgcgtggactcctccaactacatgccccagctcttctggaacgtagggtgccagcttgttgcgctcaacttccagaccctcgatgtggcgatgcagctcaacgcgggcgtttttgagtacaacgggcgcagcgggtacctgctcaagccggagttcatgcggcggccggacaagtccttcgaccccttcactgaggtcatcgtggatggcatcgtggccaatgccttgcgggtcaaggtgatctcagggcagttcctgtccgacaggaaggtgggcatctacgtggaggtggacatgtttggcctccctgttgatacgcggcgcaagtaccgcacccggacctctcaggggaactcgttcaaccccgtgtgggacgaagagcccttcgacttccccaaggtggtgctgcccacgctggcttcacttcgcattgcagcctttgaggaggggggtaaattcgtagggcaccggatcctgcctgtctctgccatccgctccggataccactacgtctgcctgcggaacgaggccaaccaaccgctgtgcctgccggccctgctcatctacaccgaagcctcggactacattcctgacgaccaccaggactatgcggaggccctgatcaaccccattaagcacgtcagcctgatggaccagagggcccggcagctggccgccctcattggggagagtgaggctcaggctggccaagagacgtgccaggacacccagtctcagcagctggggtctcagccgtcctcaaaccccacccccagcccactggatgcctccccccgccggccccctggccccaccacctcccctgccagcacctccctcagcagcccagggcagcgtgatgatctcatcgccagcatcctctcagaggtggcccccaccccgctggatgagctccgaggtcacaaggctctggtcaagctccggagccggcaagagcgagacctgcgggagctgcgcaagaagcatcagcggaaggcagtcaccctcacccgccgcctgctggatggcctggctcaggcacaggctgagggcaggtgccggctgcggccaggtgccctaggtggggccgctgatgtggaggacacgaaggagggggaggacgaggcaaagcggtatcaggagttccagaacagacaggtgcagagcctgctggagctgcgggaggcccaggtggacgcagaggcccagcggaggctggaacacctgagacaggctctgcagcggctcagggaggtcgtccttgatgcaaacacaactcagttcaagaggctgaaagagatgaacgagagggagaagaaggagctgcagaagatcctggacagaaagcgccataacagcatctcggaggccaagatgagggacaagcataagaaggaggcggaactgacggagattaaccgtcggcacatcactgagtcagtcaactccatccgtcggctggaggaggcccagaagcagcggcatgaccgtcttgtggctgggcagcagcaggtcctgcaacagctggcagaagaggagcccaagctgctggcccagctggcccaggagtgtcaggagcagcgggcgaggctcccccaggagatccgccggagcctgctgggcgagatgccggaggggctgggggacgggcctctggtggcctgtgccagcaacggtcacgcacccgggagcagcgggcacctgtcgggcgctgactcggagagccaggaggagaacacgcagctctgaactggctgagcgaggtggccacagggccagggcgggcgctgggtggagggcaggaggcaatgacactaatgctttttttttttttttttaactttttatctagaaattttatttttttaaacccggggcaagtacctcagctaactcccttcatcctcctggggcccctccttcctgccctcagtcttaggttagggccttggtcagggctttgctccctgtgacacccacaccctcgagctagcagcgtctcctcccttccccgggagagctggctggagacttggagctccgggaagtaggagtcacatttttttctctattctttggggattttttttacatgaataaaagtggatttcagg

SEQ ID NO: 165762 - DNA, 3946 bp, Homo sapiens
  Payload ID: 12635
  Gene Symbol: PLCB3
  Gene Name: phospholipase C, beta 3 (phosphatidylinositol-specific)
  Uniprot ID: Q01970
  ENST ID: ENST00000325234
  CDS Start-End: 76-3579
ccgcgcggtgggagcagcggcgccgtcggtccccgtcagggctccgtgggtccccgacccgcccctggccgggccatggcgggcgcccagcccggcgtccacgcgctgcagttggagccgcccaccgtggtggagaccctgcggcgcgggagtaagttcatcaaatgggacgaggagaagctgatgacggtggtgtctgggccagacccagtgaacacagtgttcttgaacttcatggccgtgcaggatgacacagccaaggtctggtctgaggagctattcaagctggctatgaacatcctggctcagaacgcctcccggaacaccttcctgcgcaaagcatacacgaagctgaagctgcaggtgaaccaggatggtcggatccccgtcaagaacatcctgaagatgttctcagcagacaagaagcgggtggagactgcgctggaatcctgtggcctcaaattcaaccggagtgagtccatccggcctgatgagttttccttggaaatctttgagcggttcctgaacaagctgtgtctgcggccggacattgacaagatcctgctggagataggcgccaagggcaagccatacctgacgctggagcagctcatggacttcatcaaccagaagcaacgcgacccgagactcaacgaagtgctgtacccgcccctgcggccctcccaggcccggctgctcatcgaaaagtatgagcccaaccagcagtttctggagcgagaccagatgtccatggagggctttagccgctacctgggaggcgaggagaatggcatcctgcccctggaagccctggatctgagcacggacatgacccagccactgagtgcctacttcatcaactcctcgcataacacctatctcactgcggggcagctggctgggacctcgtcggtggagatgtaccgccaggcactactatggggctgccgctgcgtggagctggacgtgtggaagggacggccgcctgaggaggaacccttcattacccacggcttcaccatgaccacagaggtgcctctgcgcgacgtgctggaggccattgccgagactgccttcaagacctcgccctaccccgtcatcctctccttcgagaaccatgtggactcggcaaagcaacaggcaaagatggctgagtactgccgctccatctttggagacgcgctactcatcgagcctctggacaagtacccgctggccccaggcgttcccctgcccagcccccaggacctgatgggccgtatcctggtgaagaacaagaagcggcaccgacccagcgcaggtggcccagacagcgccgggcgcaagcggcccctggagcagagcaattctgccctgagcgagagctccgcggccaccgagccctcctccccgcagctggggtctcccagctctgacagctgcccaggcctgagcaatggggaggaggtagggcttgagaagcccagcctggagcctcagaagtctctgggtgacgagggcctgaaccgaggcccctatgttcttggacctgctgaccgtgaggatgaggaggaagatgaggaagaggaggaacagacagaccccaaaaagccaactacagatgagggcacagccagcagcgaggtgaatgccactgaggagatgtccacgcttgtcaactacatcgaacctgtcaagttcaagtcctttgaggctgctcgaaagaggaacaaatgcttcgagatgtcgtcctttgtggagaccaaggccatggagcaactgaccaagagccccatggagtttgtggaatacaacaagcagcagctcagccgcatctaccccaagggcacccgcgtggactcctccaactacatgccccagctcttctggaacgtagggtgccagcttgttgcgctcaacttccagaccctcgatgtggcgatgcagctcaacgcgggcgtttttgagtacaacgggcgcagcgggtacctgctcaagccggagttcatgcggcggccggacaagtccttcgaccccttcactgaggtcatcgtggatggcatcgtggccaatgccttgcgggtcaaggtgatctcagggcagttcctgtccgacaggaaggtgggcatctacgtggaggtggacatgtttggcctccctgttgatacgcggcgcaagtaccgcacccggacctctcaggggaactcgttcaaccccgtgtgggacgaagagcccttcgacttccccaaggtggtgctgcccacgctggcttcacttcgcattgcagcctttgaggaggggggtaaattcgtagggcaccggatcctgcctgtctctgccatccgctccggataccactacgtctgcctgcggaacgaggccaaccaaccgctgtgcctgccggccctgctcatctacaccgaagcctcggactacattcctgacgaccaccaggactatgcggaggccctgatcaaccccattaagcacgtcagcctgatggaccagagggcccggcagctggccgccctcattggggagagtgaggctcaggctggccaagagacgtgccaggacacccagtctcagcagctggggtctcagccgtcctcaaaccccacccccagcccactggatgcctccccccgccggccccctggccccaccacctcccctgccagcacctccctcagcagcccagggcagcgtgatgatctcatcgccagcatcctctcagaggtggcccccaccccgctggatgagctccgaggtcacaaggctctggtcaagctccggagccggcaagagcgagacctgcgggagctgcgcaagaagcatcagcggaaggcagtcaccctcacccgccgcctgctggatggcctggctcaggcacaggctgagggcaggtgccggctgcggccaggtgccctaggtggggccgctgatgtggaggacacgaaggagggggaggacgaggcaaagcggtatcaggagttccagaacagacaggtgcagagcctgctggagctgcgggaggcccaggtggacgcagaggcccagcggaggctggaacacctgagacaggctctgcagcggctcagggaggtcgtccttgatgcaaacacaactcagttcaagaggctgaaagagatgaacgagagggagaagaaggagctgcagaagatcctggacagaaagcgccataacagcatctcggaggccaagatgagggacaagcataagaaggaggcggaactgacggagattaaccgtcggcacatcactgagtcagtcaactccatccgtcggctggaggaggcccagaagcagcggcatgaccgtcttgtggctgggcagcagcaggtcctgcaacagctggcagaagaggagcccaagctgctggcccagctggcccaggagtgtcaggagcagcgggcgaggctcccccaggagatccgccggagcctgctgggcgagatgccggaggggctgggggacgggcctctggtggcctgtgccagcaacggtcacgcacccgggagcagcgggcacctgtcgggcgctgactcggagagccaggaggagaacacgcagctctgaactggctgagcgaggtggccacagggccagggcgggcgctgggtggagggcaggaggcaatgacactaatgctttttttttttttttttaactttttatctagaaattttatttttttaaacccggggcaagtacctcagctaactcccttcatcctcctggggcccctccttcctgccctcagtcttaggttagggccttggtcagggctttgctccctgtgacacccacaccctcgagctagcagcgtctcctcccttccccgggagagctggctggagacttggagctccgggaagtaggagtcacatttttttctctattctttggggattttttttacatgaataaaagtggatttcaggga

SEQ ID NO: 165763 - DNA, 4469 bp, Homo sapiens
  Payload ID: 12635
  Gene Symbol: PLCB3
  Gene Name: phospholipase C, beta 3 (phosphatidylinositol-specific)
  Uniprot ID: Q01970
  ENST ID: ENST00000540288
  CDS Start-End: 104-3808
ggcactgacgccgcggggccggagcgggccgcgcggtgggagcagcggcgccgtcggtccccgtcagggctccgtgggtccccgacccgcccctggccgggccatggcgggcgcccagcccggcgtccacgcgctgcagttggagccgcccaccgtggtggagaccctgcggcgcgggagtaagttcatcaaatgggacgaggagacctccagtcggaacctggtgaccctgcgtgtggaccccaatggcttcttcttgtactggacgggccccaacatggaggtggacacactggacatcagttccatcagggacacacggacaggccggtacgcccgcctgcccaaggaccccaagatccgggaagttctgggctttgggggtcccgatgcccggctggaggagaagctgatgacggtggtgtctgggccagacccagtgaacacagtgttcttgaacttcatggccgtgcaggatgacacagccaaggtctggtctgaggagctattcaagctggctatgaacatcctggctcagaacgcctcccggaacaccttcctgcgcaaagcatacacgaagctgaagctgcaggtgaaccaggatggtcggatccccgtcaagaacatcctgaagatgttctcagcagacaagaagcgggtggagactgcgctggaatcctgtggcctcaaattcaaccggagtgagtccatccggcctgatgagttttccttggaaatctttgagcggttcctgaacaagctgtgtctgcggccggacattgacaagatcctgctggagataggcgccaagggcaagccatacctgacgctggagcagctcatggacttcatcaaccagaagcaacgcgacccgagactcaacgaagtgctgtacccgcccctgcggccctcccaggcccggctgctcatcgaaaagtatgagcccaaccagcagtttctggagcgagaccagatgtccatggagggctttagccgctacctgggaggcgaggagaatggcatcctgcccctggaagccctggatctgagcacggacatgacccagccactgagtgcctacttcatcaactcctcgcataacacctatctcactgcggggcagctggctgggacctcgtcggtggagatgtaccgccaggcactactatggggctgccgctgcgtggagctggacgtgtggaagggacggccgcctgaggaggaacccttcattacccacggcttcaccatgaccacagaggtgcctctgcgcgacgtgctggaggccattgccgagactgccttcaagacctcgccctaccccgtcatcctctccttcgagaaccatgtggactcggcaaagcaacaggcaaagatggctgagtactgccgctccatctttggagacgcgctactcatcgagcctctggacaagtacccgctggccccaggcgttcccctgcccagcccccaggacctgatgggccgtatcctggtgaagaacaagaagcggcaccgacccagcgcaggtggcccagacagcgccgggcgcaagcggcccctggagcagagcaattctgccctgagcgagagctccgcggccaccgagccctcctccccgcagctggggtctcccagctctgacagctgcccaggcctgagcaatggggaggaggtagggcttgagaagcccagcctggagcctcagaagtctctgggtgacgagggcctgaaccgaggcccctatgttcttggacctgctgaccgtgaggatgaggaggaagatgaggaagaggaggaacagacagaccccaaaaagccaactacagatgagggcacagccagcagcgaggtgaatgccactgaggagatgtccacgcttgtcaactacatcgaacctgtcaagttcaagtcctttgaggctgctcgaaagaggaacaaatgcttcgagatgtcgtcctttgtggagaccaaggccatggagcaactgaccaagagccccatggagtttgtggaatacaacaagcagcagctcagccgcatctaccccaagggcacccgcgtggactcctccaactacatgccccagctcttctggaacgtagggtgccagcttgttgcgctcaacttccagaccctcgatgtggcgatgcagctcaacgcgggcgtttttgagtacaacgggcgcagcgggtacctgctcaagccggagttcatgcggcggccggacaagtccttcgaccccttcactgaggtcatcgtggatggcatcgtggccaatgccttgcgggtcaaggtgatctcagggcagttcctgtccgacaggaaggtgggcatctacgtggaggtggacatgtttggcctccctgttgatacgcggcgcaagtaccgcacccggacctctcaggggaactcgttcaaccccgtgtgggacgaagagcccttcgacttccccaaggtggtgctgcccacgctggcttcacttcgcattgcagcctttgaggaggggggtaaattcgtagggcaccggatcctgcctgtctctgccatccgctccggataccactacgtctgcctgcggaacgaggccaaccaaccgctgtgcctgccggccctgctcatctacaccgaagcctcggactacattcctgacgaccaccaggactatgcggaggccctgatcaaccccattaagcacgtcagcctgatggaccagagggcccggcagctggccgccctcattggggagagtgaggctcaggctggccaagagacgtgccaggacacccagtctcagcagctggggtctcagccgtcctcaaaccccacccccagcccactggatgcctccccccgccggccccctggccccaccacctcccctgccagcacctccctcagcagcccagggcagcgtgatgatctcatcgccagcatcctctcagaggtggcccccaccccgctggatgagctccgaggtcacaaggctctggtcaagctccggagccggcaagagcgagacctgcgggagctgcgcaagaagcatcagcggaaggcagtcaccctcacccgccgcctgctggatggcctggctcaggcacaggctgagggcaggtgccggctgcggccaggtgccctaggtggggccgctgatgtggaggacacgaaggagggggaggacgaggcaaagcggtatcaggagttccagaacagacaggtgcagagcctgctggagctgcgggaggcccaggtggacgcagaggcccagcggaggctggaacacctgagacaggctctgcagcggctcagggaggtcgtccttgatgcaaacacaactcagttcaagaggctgaaagagatgaacgagagggagaagaaggagctgcagaagatcctggacagaaagcgccataacagcatctcggaggccaagatgagggacaagcataagaaggaggcggaactgacggagattaaccgtcggcacatcactgagtcagtcaactccatccgtcggctggaggaggcccagaagcagcggcatgaccgtcttgtggctgggcagcagcaggtcctgcaacagctggcagaagaggagcccaagctgctggcccagctggcccaggagtgtcaggagcagcgggcgaggctcccccaggagatccgccggagcctgctgggcgagatgccggaggggctgggggacgggcctctggtggcctgtgccagcaacggtcacgcacccgggagcagcgggcacctgtcgggcgctgactcggagagccaggaggagaacacgcagctctgaactggctgagcgagatgaggagactgaggcccggagccatctgtcgtgtgctaggccacagctaagtcaagacgtcctgacctggaggcagggcaggcctggaccctccgtggtggactgtcttcagccagcctggacctgtcccatgcctcaagaccagcgaaaagtggcagagagcccacagtgcgggctccagggcggggctgggctcgcagcagggtcggcttggcacctcttcaaggcctctcccagcttcctggctcttcccaggctgcccgcctgcatccctcctccaggggaaggcggcctcttatctgggcttatctcctgccaattgagtatcttctttgctttgtttttgctgcagcctcaggcaaacagatggggtggggaggccagggaaacaggctccggagtagggccctcctccctcagggtcaatgcaatggccccagacttcctcacttcttctgtgggacgctgccctatcccccagttctgctcactccagtgtattccgtatctaggctcctcagcagccaactcccaccttcctgactctagctggtgtccactgagggacacactccaagtcagttcccaggtcctcaaataccagctgaatgtctaacttctgggtgtgacattccagcccctagaa

SEQ ID NO: 165764 - DNA, 5430 bp, Homo sapiens
  Payload ID: 12636
  Gene Symbol: PLCB4
  Gene Name: phospholipase C, beta 4
  Uniprot ID: Q15147
  ENST ID: ENST00000278655
  CDS Start-End: 79-3606
aggacagtgctgctgtgagtttgacgaagtggacatcacctgcagtcagtccagagctgcccagtcttgaatataatcatggccaaaccttatgaatttaactggcagaaggaagttccctcctttttgcaagaaggagcagtttttgacagatacgaggaggaatcctttgtgtttgaacccaactgcctcttcaaagtggatgagtttggcttctttctgacatggagaagtgaaggcaaggaaggacaggtgctagaatgctccctcatcaacagtattcggtcgggagccataccaaaggatcccaaaatcttggctgctcttgaagctgttggaaaatcagaaaatgatctggaagggcggatagtttgtgtctgcagtggcacagatctagtgaacattagttttacctacatggtggctgaaaatccagaagtaactaagcaatgggtagaaggcctgagatcaatcatacacaacttcagggccaacaacgtcagtccaatgacatgcctcaagaaacactggatgaaattggcatttatgaccaacacaaatggtaaaattccagttaggagtattactagaacatttgcatcgggaaaaacagaaaaggtgatctttcaagcactcaaggagttaggtcttcccagtggaaagaatgatgaaattgagcccacagcattttcttatgaaaagttctatgaactgacacaaaagatttgtcctcggacagatatagaagatcttttcaaaaaaatcaatggagacaaaactgattatttaacggtagaccaattagtgagctttctaaatgaacatcaacgagatcctcgattgaatgaaattttatttccattttatgatgccaaaagggcaatgcagatcattgagatgtatgaacctgatgaagatttgaagaaaaaaggccttatatcaagtgatgggttttgcagatatctgatgtcagatgaaaacgccccagtcttcctagatcgtttagaactttaccaagaaatggaccatcctctggctcactacttcatcagttcttcccataacacttatctcactggcagacagttcggcgggaagtcttcggtagaaatgtacagacaggttctcctggctggttgcagatgtgttgaacttgactgctgggatggaaaaggtgaagaccaagaaccaataataactcatggaaaagcaatgtgtacagatatcctttttaaggatgtaattcaagccatcaaggaaactgcatttgtcacatcagaatatcctgtaattctctcctttgaaaatcactgcagcaaatatcaacagtacaagatgtccaaatattgcgaagatctatttggggatctcctgttgaaacaagcacttgaatcacatccacttgaaccaggcagggctttgccatcccccaatgacctcaaaagaaaaatactcataaaaaacaagcggctgaaacctgaagttgaaaaaaaacagctggaagctttgagaagcatgatggaagctggagaatctgcctccccagcaaacatcttagaggacgataatgaagaggagatcgaaagtgctgaccaagaggaggaagctcaccccgaattcaaatttggaaatgaactttctgctgatgacttgggtcacaaggaagctgttgcaaatagcgtcaagaagggcctggtcactgtagaagatgagcaggcgtggatggcatcttataaatatgtaggtgctaccactaatatccatccatatttgtccacaatgatcaactacgcccagcctgtaaagtttcaaggtttccatgtggcagaagaacgcaatattcattataacatgtcttcttttaatgaatcagtcggtcttggctacttgaagacacatgcaattgaatttgtcaattataacaaacggcaaatgagtcgcatttaccccaagggaggccgagtcgattccagtaattacatgcctcagattttctggaacgctggctgccagatggtttcactgaactatcaaaccccagatttagcgatgcaattgaatcagggaaaatttgagtataatggatcgtgcgggtaccttctcaaaccagatttcatgaggcggcctgatcgaacatttgaccccttctctgaaactcctgttgatggtgttattgcagccacttgctcagtgcaggttatatcaggtcaattcttatcagataagaaaattggcacctacgtagaggtggatatgtatgggttgcccactgacaccatacgtaaggaattccgaactcgcatggttatgaataatggactcaatccagtttacaatgaagagtcatttgtatttcggaaggtgatcctgccggacctggctgtcttgagaatagctgtgtatgatgataacaacaagctgattggccagaggatcctcccgcttgatggcctccaagccggatatcgacacatttcccttcgaaatgagggaaataaaccattatcactaccaacaattttctgcaatattgttcttaaaacatatgtgcctgatggatttggagatatcgtggatgctttatcagatccaaagaaatttctctcaattacagaaaagagagcagaccaaatgagagctatgggcattgaaactagtgacatagccgacgtgcccagtgacacttccaaaaatgacaagaaaggaaaggccaacaccgccaaagcaaatgtgacccctcagagtagctctgagctcagaccaaccaccacggctgccctggcctctggtgtggaagccaagaaaggtattgaacttatccctcaagtaaggatagaagacttaaagcagatgaaggcttacttgaagcatttaaagaaacagcagaaggagctaaattctttaaagaagaaacatgcaaaggaacacagtaccatgcagaagttacactgcacgcaagttgacaaaattgtggcacagtatgacaaagagaagtcgactcatgagaaaatcctagagaaggcaatgaagaagaaggggggaagtaattgtctcgaaatgaaaaaagaaacagaaatcaaaattcagacgctgacatcagatcacaaatctaaggtcaaagagattgtagcacagcacacaaaggaatggtcagaaatgatcaatacccacagtgctgaggagcaagaaatccgagacctgcacctcagccagcagtgtgagctgctgaaaaagctactcatcaatgcccacgagcagcaaacccagcagctgaaactgtcccatgacagggaaagcaaggaaatgcgagcacaccaggctaagatttctatggaaaatagcaaagccatcagccaagataaatctatcaagaataaagcagaacgggaaaggcgagtcagggagttaaacagcagcaacactaaaaagtttctggaagaaagaaagagacttgccatgaagcagtccaaagaaatggatcagttgaaaaaagtccagcttgaacatctagaattcctagagaaacagaatgagcaggcgaaggagatgcagcagatggtgaaattggaagccgagatggaccgcagaccagcaacagtagtatgaaactccaaaatgcaaactgaagcagcaaacccacaaagcatcaaaagactcactcacaaacttctgaacacaaactccatggatgaaagctgtttattttgtttcctttatgtgtaaacaagatgatatctgaaaccagagagacttggaatgtctgactgacttctatttaacagcttgagtattgcatttccttggccaaacaaaaatagctacaaatccacaaaaatttactattccagtaaggcagagtccaaccattgataatacaacttaaacatgtttgctataaaataccatcacaagtaaatgagcttggtgtgaacaactctcctttgtgatgccttaggacatgtttgaactgcagcaaaaaacaaaaacaaaaaacagtgcattagcaatttcatagcaagtgcatgcactaggaaaagaaaactctgtctacaagtttattagcagaagtggtggtctgctagacaaataattttgcaaaatttttctacatctaagttacctcatcagtaagtgccatgtctctaccatgccatcagaggctaatttcctgtaaaagttgtggaaattgttagaacaatagaaaaatagagcagtgtatgtgtgccaaaactcatcattactcaaaggagaactgtgttaggcacatttaagaaagtttacatctgacattgctttataggaattgtttctgcagattccggatattataattcacaccataaagattgtgaagtggttattggcaaacgtttgtaaatgtgaccatgtataaagtatttatactctttaattcacactgttagagagcaaaatcatctaagtattgccacatgacaagattagtaaacaggaatactagaactatgtttgcatgatacacaagcaccaataaagactaatccatacacagttaacctaatgccaaataaatactggttaaataaatgtatggcacagaatataatttgactatcaagacttttagcataatgaaaaaccctctctctatatatatatgtgtatatgaattatgtgggcattcttgatacttcaagttctagtttgaaaaaaatacataactaatttaattttacacaaaaatatttatgcagattttcagaatttcatatcaggaaatgacctttttatgtctgttaaatatcaaaacaatttgctacagtgttaatctgcatggtctttaagcctgctgtagttgagttgcagacagtgcatgaaaaagtattccgctgggaattgagccatgccaccaaagccaagaggagcgcatggaaacccggtagtctagaactaatcagattactgattttagggcacagcaccagatgaattgttgtatatgcttgtaaaaattgattctgtgtgttcctctgaacaaagcggagaaaatgatgataccatcaatattgaaattaaacttccaacttctctaataaaaaattaaaacacgcataacactcgtcaagagtatttgctcccaagacacattctagcaaatgttttgcctttttcatatacatgatatcatcgttattttcaaagggggcttattaataccctcagcatgtttttcacccaaatgatgcaaaacatgcagattctagttgacttcagttgtaatagacttgtttttctcctatttatgatttgaagtggattctgtaaaatatctcttgttcttagtttccttatctgtaaaacagtggagttagactacatatcttttggcactaacatctcatgaaaaattatggttaataaaatatcaccacatttggattgccaattttc

SEQ ID NO: 165765 - DNA, 5619 bp, Homo sapiens
  Payload ID: 12636
  Gene Symbol: PLCB4
  Gene Name: phospholipase C, beta 4
  Uniprot ID: Q15147
  ENST ID: ENST00000378473
  CDS Start-End: 232-3795
agtaagtgagctgcaccgccaacaagatctctcacacacagacacacacacgcacacgcacacacgggcgcgcacacacacgcgcgtacacactgggtctccaggcagcggccgtcgccgcatccccggcagcagctccaggcaaagtgacagaggacagtgctgctgtgagtttgacgaagtggacatcacctgcagtcagtccagagctgcccagtcttgaatataatcatggccaaaccttatgaatttaactggcagaaggaagttccctcctttttgcaagaaggagcagtttttgacagatacgaggaggaatcctttgtgtttgaacccaactgcctcttcaaagtggatgagtttggcttctttctgacatggagaagtgaaggcaaggaaggacaggtgctagaatgctccctcatcaacagtattcggtcgggagccataccaaaggatcccaaaatcttggctgctcttgaagctgttggaaaatcagaaaatgatctggaagggcggatagtttgtgtctgcagtggcacagatctagtgaacattagttttacctacatggtggctgaaaatccagaagtaactaagcaatgggtagaaggcctgagatcaatcatacacaacttcagggccaacaacgtcagtccaatgacatgcctcaagaaacactggatgaaattggcatttatgaccaacacaaatggtaaaattccagttaggagtattactagaacatttgcatcgggaaaaacagaaaaggtgatctttcaagcactcaaggagttaggtcttcccagtggaaagaatgatgaaattgagcccacagcattttcttatgaaaagttctatgaactgacacaaaagatttgtcctcggacagatatagaagatcttttcaaaaaaatcaatggagacaaaactgattatttaacggtagaccaattagtgagctttctaaatgaacatcaacgagatcctcgattgaatgaaattttatttccattttatgatgccaaaagggcaatgcagatcattgagatgtatgaacctgatgaagatttgaagaaaaaaggccttatatcaagtgatgggttttgcagatatctgatgtcagatgaaaacgccccagtcttcctagatcgtttagaactttaccaagaaatggaccatcctctggctcactacttcatcagttcttcccataacacttatctcactggcagacagttcggcgggaagtcttcggtagaaatgtacagacaggttctcctggctggttgcagatgtgttgaacttgactgctgggatggaaaaggtgaagaccaagaaccaataataactcatggaaaagcaatgtgtacagatatcctttttaaggatgtaattcaagccatcaaggaaactgcatttgtcacatcagaatatcctgtaattctctcctttgaaaatcactgcagcaaatatcaacagtacaagatgtccaaatattgcgaagatctatttggggatctcctgttgaaacaagcacttgaatcacatccacttgaaccaggcagggctttgccatcccccaatgacctcaaaagaaaaatactcataaaaaacaagcggctgaaacctgaagttgaaaaaaaacagctggaagctttgagaagcatgatggaagctggagaatctgcctccccagcaaacatcttagaggacgataatgaagaggagatcgaaagtgctgaccaagaggaggaagctcaccccgaattcaaatttggaaatgaactttctgctgatgacttgggtcacaaggaagctgttgcaaatagcgtcaagaaggcttcagatgaccttgaacatgaaaacaacaaaaagggcctggtcactgtagaagatgagcaggcgtggatggcatcttataaatatgtaggtgctaccactaatatccatccatatttgtccacaatgatcaactacgcccagcctgtaaagtttcaaggtttccatgtggcagaagaacgcaatattcattataacatgtcttcttttaatgaatcagtcggtcttggctacttgaagacacatgcaattgaatttgtcaattataacaaacggcaaatgagtcgcatttaccccaagggaggccgagtcgattccagtaattacatgcctcagattttctggaacgctggctgccagatggtttcactgaactatcaaaccccagatttagcgatgcaattgaatcagggaaaatttgagtataatggatcgtgcgggtaccttctcaaaccagatttcatgaggcggcctgatcgaacatttgaccccttctctgaaactcctgttgatggtgttattgcagccacttgctcagtgcaggttatatcaggtcaattcttatcagataagaaaattggcacctacgtagaggtggatatgtatgggttgcccactgacaccatacgtaaggaattccgaactcgcatggttatgaataatggactcaatccagtttacaatgaagagtcatttgtatttcggaaggtgatcctgccggacctggctgtcttgagaatagctgtgtatgatgataacaacaagctgattggccagaggatcctcccgcttgatggcctccaagccggatatcgacacatttcccttcgaaatgagggaaataaaccattatcactaccaacaattttctgcaatattgttcttaaaacatatgtgcctgatggatttggagatatcgtggatgctttatcagatccaaagaaatttctctcaattacagaaaagagagcagaccaaatgagagctatgggcattgaaactagtgacatagccgacgtgcccagtgacacttccaaaaatgacaagaaaggaaaggccaacaccgccaaagcaaatgtgacccctcagagtagctctgagctcagaccaaccaccacggctgccctggcctctggtgtggaagccaagaaaggtattgaacttatccctcaagtaaggatagaagacttaaagcagatgaaggcttacttgaagcatttaaagaaacagcagaaggagctaaattctttaaagaagaaacatgcaaaggaacacagtaccatgcagaagttacactgcacgcaagttgacaaaattgtggcacagtatgacaaagagaagtcgactcatgagaaaatcctagagaaggcaatgaagaagaaggggggaagtaattgtctcgaaatgaaaaaagaaacagaaatcaaaattcagacgctgacatcagatcacaaatctaaggtcaaagagattgtagcacagcacacaaaggaatggtcagaaatgatcaatacccacagtgctgaggagcaagaaatccgagacctgcacctcagccagcagtgtgagctgctgaaaaagctactcatcaatgcccacgagcagcaaacccagcagctgaaactgtcccatgacagggaaagcaaggaaatgcgagcacaccaggctaagatttctatggaaaatagcaaagccatcagccaagataaatctatcaagaataaagcagaacgggaaaggcgagtcagggagttaaacagcagcaacactaaaaagtttctggaagaaagaaagagacttgccatgaagcagtccaaagaaatggatcagttgaaaaaagtccagcttgaacatctagaattcctagagaaacagaatgagcaggcgaaggagatgcagcagatggtgaaattggaagccgagatggaccgcagaccagcaacagtagtatgaaactccaaaatgcaaactgaagcagcaaacccacaaagcatcaaaagactcactcacaaacttctgaacacaaactccatggatgaaagctgtttattttgtttcctttatgtgtaaacaagatgatatctgaaaccagagagacttggaatgtctgactgacttctatttaacagcttgagtattgcatttccttggccaaacaaaaatagctacaaatccacaaaaatttactattccagtaaggcagagtccaaccattgataatacaacttaaacatgtttgctataaaataccatcacaagtaaatgagcttggtgtgaacaactctcctttgtgatgccttaggacatgtttgaactgcagcaaaaaacaaaaacaaaaaacagtgcattagcaatttcatagcaagtgcatgcactaggaaaagaaaactctgtctacaagtttattagcagaagtggtggtctgctagacaaataattttgcaaaatttttctacatctaagttacctcatcagtaagtgccatgtctctaccatgccatcagaggctaatttcctgtaaaagttgtggaaattgttagaacaatagaaaaatagagcagtgtatgtgtgccaaaactcatcattactcaaaggagaactgtgttaggcacatttaagaaagtttacatctgacattgctttataggaattgtttctgcagattccggatattataattcacaccataaagattgtgaagtggttattggcaaacgtttgtaaatgtgaccatgtataaagtatttatactctttaattcacactgttagagagcaaaatcatctaagtattgccacatgacaagattagtaaacaggaatactagaactatgtttgcatgatacacaagcaccaataaagactaatccatacacagttaacctaatgccaaataaatactggttaaataaatgtatggcacagaatataatttgactatcaagacttttagcataatgaaaaaccctctctctatatatatatgtgtatatgaattatgtgggcattcttgatacttcaagttctagtttgaaaaaaatacataactaatttaattttacacaaaaatatttatgcagattttcagaatttcatatcaggaaatgacctttttatgtctgttaaatatcaaaacaatttgctacagtgttaatctgcatggtctttaagcctgctgtagttgagttgcagacagtgcatgaaaaagtattccgctgggaattgagccatgccaccaaagccaagaggagcgcatggaaacccggtagtctagaactaatcagattactgattttagggcacagcaccagatgaattgttgtatatgcttgtaaaaattgattctgtgtgttcctctgaacaaagcggagaaaatgatgataccatcaatattgaaattaaacttccaacttctctaataaaaaattaaaacacgcataacactcgtcaagagtatttgctcccaagacacattctagcaaatgttttgcctttttcatatacatgatatcatcgttattttcaaagggggcttattaataccctcagcatgtttttcacccaaatgatgcaaaacatgcagattctagttgacttcagttgtaatagacttgtttttctcctatttatgatttgaagtggattctgtaaaatatctcttgttcttagtttccttatctgtaaaacagtggagttagactacatatcttttggcactaacatctcatgaaaaattatggttaataaaatatcaccacatttggattgccaattttc

SEQ ID NO: 165766 - DNA, 5796 bp, Homo sapiens
  Payload ID: 12636
  Gene Symbol: PLCB4
  Gene Name: phospholipase C, beta 4
  Uniprot ID: Q15147
  ENST ID: ENST00000378493
  CDS Start-End: 16-3543
gtcttgaatataatcatggccaaaccttatgaatttaactggcagaaggaagttccctcctttttgcaagaaggagcagtttttgacagatacgaggaggaatcctttgtgtttgaacccaactgcctcttcaaagtggatgagtttggcttctttctgacatggagaagtgaaggcaaggaaggacaggtgctagaatgctccctcatcaacagtattcggtcgggagccataccaaaggatcccaaaatcttggctgctcttgaagctgttggaaaatcagaaaatgatctggaagggcggatagtttgtgtctgcagtggcacagatctagtgaacattagttttacctacatggtggctgaaaatccagaagtaactaagcaatgggtagaaggcctgagatcaatcatacacaacttcagggccaacaacgtcagtccaatgacatgcctcaagaaacactggatgaaattggcatttatgaccaacacaaatggtaaaattccagttaggagtattactagaacatttgcatcgggaaaaacagaaaaggtgatctttcaagcactcaaggagttaggtcttcccagtggaaagaatgatgaaattgagcccacagcattttcttatgaaaagttctatgaactgacacaaaagatttgtcctcggacagatatagaagatcttttcaaaaaaatcaatggagacaaaactgattatttaacggtagaccaattagtgagctttctaaatgaacatcaacgagatcctcgattgaatgaaattttatttccattttatgatgccaaaagggcaatgcagatcattgagatgtatgaacctgatgaagatttgaagaaaaaaggccttatatcaagtgatgggttttgcagatatctgatgtcagatgaaaacgccccagtcttcctagatcgtttagaactttaccaagaaatggaccatcctctggctcactacttcatcagttcttcccataacacttatctcactggcagacagttcggcgggaagtcttcggtagaaatgtacagacaggttctcctggctggttgcagatgtgttgaacttgactgctgggatggaaaaggtgaagaccaagaaccaataataactcatggaaaagcaatgtgtacagatatcctttttaaggatgtaattcaagccatcaaggaaactgcatttgtcacatcagaatatcctgtaattctctcctttgaaaatcactgcagcaaatatcaacagtacaagatgtccaaatattgcgaagatctatttggggatctcctgttgaaacaagcacttgaatcacatccacttgaaccaggcagggctttgccatcccccaatgacctcaaaagaaaaatactcataaaaaacaagcggctgaaacctgaagttgaaaaaaaacagctggaagctttgagaagcatgatggaagctggagaatctgcctccccagcaaacatcttagaggacgataatgaagaggagatcgaaagtgctgaccaagaggaggaagctcaccccgaattcaaatttggaaatgaactttctgctgatgacttgggtcacaaggaagctgttgcaaatagcgtcaagaagggcctggtcactgtagaagatgagcaggcgtggatggcatcttataaatatgtaggtgctaccactaatatccatccatatttgtccacaatgatcaactacgcccagcctgtaaagtttcaaggtttccatgtggcagaagaacgcaatattcattataacatgtcttcttttaatgaatcagtcggtcttggctacttgaagacacatgcaattgaatttgtcaattataacaaacggcaaatgagtcgcatttaccccaagggaggccgagtcgattccagtaattacatgcctcagattttctggaacgctggctgccagatggtttcactgaactatcaaaccccagatttagcgatgcaattgaatcagggaaaatttgagtataatggatcgtgcgggtaccttctcaaaccagatttcatgaggcggcctgatcgaacatttgaccccttctctgaaactcctgttgatggtgttattgcagccacttgctcagtgcaggttatatcaggtcaattcttatcagataagaaaattggcacctacgtagaggtggatatgtatgggttgcccactgacaccatacgtaaggaattccgaactcgcatggttatgaataatggactcaatccagtttacaatgaagagtcatttgtatttcggaaggtgatcctgccggacctggctgtcttgagaatagctgtgtatgatgataacaacaagctgattggccagaggatcctcccgcttgatggcctccaagccggatatcgacacatttcccttcgaaatgagggaaataaaccattatcactaccaacaattttctgcaatattgttcttaaaacatatgtgcctgatggatttggagatatcgtggatgctttatcagatccaaagaaatttctctcaattacagaaaagagagcagaccaaatgagagctatgggcattgaaactagtgacatagccgacgtgcccagtgacacttccaaaaatgacaagaaaggaaaggccaacaccgccaaagcaaatgtgacccctcagagtagctctgagctcagaccaaccaccacggctgccctggcctctggtgtggaagccaagaaaggtattgaacttatccctcaagtaaggatagaagacttaaagcagatgaaggcttacttgaagcatttaaagaaacagcagaaggagctaaattctttaaagaagaaacatgcaaaggaacacagtaccatgcagaagttacactgcacgcaagttgacaaaattgtggcacagtatgacaaagagaagtcgactcatgagaaaatcctagagaaggcaatgaagaagaaggggggaagtaattgtctcgaaatgaaaaaagaaacagaaatcaaaattcagacgctgacatcagatcacaaatctaaggtcaaagagattgtagcacagcacacaaaggaatggtcagaaatgatcaatacccacagtgctgaggagcaagaaatccgagacctgcacctcagccagcagtgtgagctgctgaaaaagctactcatcaatgcccacgagcagcaaacccagcagctgaaactgtcccatgacagggaaagcaaggaaatgcgagcacaccaggctaagatttctatggaaaatagcaaagccatcagccaagataaatctatcaagaataaagcagaacgggaaaggcgagtcagggagttaaacagcagcaacactaaaaagtttctggaagaaagaaagagacttgccatgaagcagtccaaagaaatggatcagttgaaaaaagtccagcttgaacatctagaattcctagagaaacagaatgagcaggcgaaggagatgcagcagatggtgaaattggaagccgagatggaccgcagaccagcaacagtagtatgaaactccaaaatgcaaactgaagcagcaaacccacaaagcatcaaaagactcactcacaaacttctgaacacaaactccatggatgaaagctgtttattttgtttcctttatgtgtaaacaagatgatatctgaaaccagagagacttggaatgtctgactgacttctatttaacagcttgagtattgcatttccttggccaaacaaaaatagctacaaatccacaaaaatttactattccagtaaggcagagtccaaccattgataatacaacttaaacatgtttgctataaaataccatcacaagtaaatgagcttggtgtgaacaactctcctttgtgatgccttaggacatgtttgaactgcagcaaaaaacaaaaacaaaaaacagtgcattagcaatttcatagcaagtgcatgcactaggaaaagaaaactctgtctacaagtttattagcagaagtggtggtctgctagacaaataattttgcaaaatttttctacatctaagttacctcatcagtaagtgccatgtctctaccatgccatcagaggctaatttcctgtaaaagttgtggaaattgttagaacaatagaaaaatagagcagtgtatgtgtgccaaaactcatcattactcaaaggagaactgtgttaggcacatttaagaaagtttacatctgacattgctttataggaattgtttctgcagattccggatattataattcacaccataaagattgtgaagtggttattggcaaacgtttgtaaatgtgaccatgtataaagtatttatactctttaattcacactgttagagagcaaaatcatctaagtattgccacatgacaagattagtaaacaggaatactagaactatgtttgcatgatacacaagcaccaataaagactaatccatacacagttaacctaatgccaaataaatactggttaaataaatgtatggcacagaatataatttgactatcaagacttttagcataatgaaaaaccctctctctatatatatatgtgtatatgaattatgtgggcattcttgatacttcaagttctagtttgaaaaaaatacataactaatttaattttacacaaaaatatttatgcagattttcagaatttcatatcaggaaatgacctttttatgtctgttaaatatcaaaacaatttgctacagtgttaatctgcatggtctttaagcctgctgtagttgagttgcagacagtgcatgaaaaagtattccgctgggaattgagccatgccaccaaagccaagaggagcgcatggaaacccggtagtctagaactaatcagattactgattttagggcacagcaccagatgaattgttgtatatgcttgtaaaaattgattctgtgtgttcctctgaacaaagcggagaaaatgatgataccatcaatattgaaattaaacttccaacttctctaataaaaaattaaaacacgcataacactcgtcaagagtatttgctcccaagacacattctagcaaatgttttgcctttttcatatacatgatatcatcgttattttcaaagggggcttattaataccctcagcatgtttttcacccaaatgatgcaaaacatgcagattctagttgacttcagttgtaatagacttgtttttctcctatttatgatttgaagtggattctgtaaaatatctcttgttcttagtttccttatctgtaaaacagtggagttagactacatatcttttggcactaacatctcatgaaaaattatggttaataaaatatcaccacatttggattgccaattttcaaagattctgagtggcttctcatcatcaaatcaaatcaaatccaagagctcaactatgctcaccattctgtaacacttgactgaattcatcacttgcctcctcttgtttctgctttggagaggtactactagtttttccatttttcttatttcttccctcttttcatcctcctaggccaccataagcatttatattttccagtgttatacatggaaccagtttgtttttctttgatccaggttacttttagtatttgagacatcataccattaatccattgtagtaggattaaaatgtacacacaactcaaatgtgcaacaaaagcatgtgttacctgctattgtcagttcatattgcactcaaaccttgcattatcccttattatgaagaaaaattaatagccaattaaagtaactcagtgtcttcca

SEQ ID NO: 165767 - DNA, 5833 bp, Homo sapiens
  Payload ID: 12636
  Gene Symbol: PLCB4
  Gene Name: phospholipase C, beta 4
  Uniprot ID: Q15147
  ENST ID: ENST00000378501
  CDS Start-End: 16-3600
gtcttgaatataatcatggccaaaccttatgaatttaactggcagaaggaagttccctcctttttgcaagaaggagcagtttttgacagatacgaggaggaatcctttgtgtttgaacccaactgcctcttcaaagtggatgagtttggcttctttctgacatggagaagtgaaggcaaggaaggacaggtgctagaatgctccctcatcaacagtattcggtcgggagccataccaaaggatcccaaaatcttggctgctcttgaagctgttggaaaatcagaaaatgatctggaagggcggatagtttgtgtctgcagtggcacagatctagtgaacattagttttacctacatggtggctgaaaatccagaagtaactaagcaatgggtagaaggcctgagatcaatcatacacaacttcagggccaacaacgtcagtccaatgacatgcctcaagaaacactggatgaaattggcatttatgaccaacacaaatggtaaaattccagttaggagtattactagaacatttgcatcgggaaaaacagaaaaggtgatctttcaagcactcaaggagttaggtcttcccagtggaaagaatgatgaaattgagcccacagcattttcttatgaaaagttctatgaactgacacaaaagatttgtcctcggacagatatagaagatcttttcaaaaaaatcaatggagacaaaactgattatttaacggtagaccaattagtgagctttctaaatgaacatcaacgagatcctcgattgaatgaaattttatttccattttatgatgccaaaagggcaatgcagatcattgagatgtatgaacctgatgaagatttgaagaaaaaaggccttatatcaagtgatgggttttgcagatatctgatgtcagatgaaaacgccccagtcttcctagatcgtttagaactttaccaagaaatggaccatcctctggctcactacttcatcagttcttcccataacacttatctcactggcagacagttcggcgggaagtcttcggtagaaatgtacagacaggttctcctggctggttgcagatgtgttgaacttgactgctgggatggaaaaggtgaagaccaagaaccaataataactcatggaaaagcaatgtgtacagatatcctttttaaggatgtaattcaagccatcaaggaaactgcatttgtcacatcagaatatcctgtaattctctcctttgaaaatcactgcagcaaatatcaacagtacaagatgtccaaatattgcgaagatctatttggggatctcctgttgaaacaagcacttgaatcacatccacttgaaccaggcagggctttgccatcccccaatgacctcaaaagaaaaatactcataaaaaacaagcggctgaaacctgaagttgaaaaaaaacagctggaagctttgagaagcatgatggaagctggagaatctgcctccccagcaaacatcttagaggacgataatgaagaggagatcgaaagtgctgaccaagaggaggaagctcaccccgaattcaaatttggaaatgaactttctgctgatgacttgggtcacaaggaagctgttgcaaatagcgtcaagaagggcctggtcactgtagaagatgagcaggcgtggatggcatcttataaatatgtaggtgctaccactaatatccatccatatttgtccacaatgatcaactacgcccagcctgtaaagtttcaaggtttccatgtggcagaagaacgcaatattcattataacatgtcttcttttaatgaatcagtcggtcttggctacttgaagacacatgcaattgaatttgtcaattataacaaacggcaaatgagtcgcatttaccccaagggaggccgagtcgattccagtaattacatgcctcagattttctggaacgctggctgccagatggtttcactgaactatcaaaccccagatttagcgatgcaattgaatcagggaaaatttgagtataatggatcgtgcgggtaccttctcaaaccagatttcatgaggcggcctgatcgaacatttgaccccttctctgaaactcctgttgatggtgttattgcagccacttgctcagtgcaggttatatcaggtcaattcttatcagataagaaaattggcacctacgtagaggtggatatgtatgggttgcccactgacaccatacgtaaggaattccgaactcgcatggttatgaataatggactcaatccagtttacaatgaagagtcatttgtatttcggaaggtgatcctgccggacctggctgtcttgagaatagctgtgtatgatgataacaacaagctgattggccagaggatcctcccgcttgatggcctccaagccggatatcgacacatttcccttcgaaatgagggaaataaaccattatcactaccaacaattttctgcaatattgttcttaaaacatatgtgcctgatggatttggagatatcgtggatgctttatcagatccaaagaaatttctctcaattacagaaaagagagcagaccaaatgagagctatgggcattgaaactagtgacatagccgacgtgcccagtgacacttccaaaaatgacaagaaaggaaaggccaacaccgccaaagcaaatgtgacccctcagagtagctctgagctcagaccaaccaccacggctgccctggcctctggtgtggaagccaagaaaggtattgaacttatccctcaagtaaggatagaagacttaaagcagatgaaggcttacttgaagcatttaaagaaacagcagaaggagctaaattctttaaagaagaaacatgcaaaggaacacagtaccatgcagaagttacactgcacgcaagttgacaaaattgtggcacagtatgacaaagagaagtcgactcatgagaaaatcctagagaaggcaatgaagaagaaggggggaagtaattgtctcgaaatgaaaaaagaaacagaaatcaaaattcagacgctgacatcagatcacaaatctaaggtcaaagagattgtagcacagcacacaaaggaatggtcagaaatgatcaatacccacagtgctgaggagcaagaaatccgagacctgcacctcagccagcagtgtgagctgctgaaaaagctactcatcaatgcccacgagcagcaaacccagcagctgaaactgtcccatgacagggaaagcaaggaaatgcgagcacaccaggctaagatttctatggaaaatagcaaagccatcagccaagataaatctatcaagaataaagcagaacgggaaaggcgagtcagggagttaaacagcagcaacactaaaaagtttctggaagaaagaaagagacttgccatgaagcagtccaaagaaatggatcagttgaaaaaagtccagcttgaacatctagaattcctagagaaacagaatgagcagcttttgaaatcctgtcatgcagtgtcccaaacgcaaggcgaaggagatgcagcagatggtgaaattggaagccgagatggaccgcagaccagcaacagtagtatgaaactccaaaatgcaaactgaagcagcaaacccacaaagcatcaaaagactcactcacaaacttctgaacacaaactccatggatgaaagctgtttattttgtttcctttatgtgtaaacaagatgatatctgaaaccagagagacttggaatgtctgactgacttctatttaacagcttgagtattgcatttccttggccaaacaaaaatagctacaaatccacaaaaatttactattccagtaaggcagagtccaaccattgataatacaacttaaacatgtttgctataaaataccatcacaagtaaatgagcttggtgtgaacaactctcctttgtgatgccttaggacatgtttgaactgcagcaaaaaacaaaaacaaaaaacagtgcattagcaatttcatagcaagtgcatgcactaggaaaagaaaactctgtctacaagtttattagcagaagtggtggtctgctagacaaataattttgcaaaatttttctacatctaagttacctcatcagtaagtgccatgtctctaccatgccatcagaggctaatttcctgtaaaagttgtggaaattgttagaacaatagaaaaatagagcagtgtatgtgtgccaaaactcatcattactcaaaggagaactgtgttaggcacatttaagaaagtttacatctgacattgctttataggaattgtttctgcagattccggatattataattcacaccataaagattgtgaagtggttattggcaaacgtttgtaaatgtgaccatgtataaagtatttatactctttaattcacactgttagagagcaaaatcatctaagtattgccacatgacaagattagtaaacaggaatactagaactatgtttgcatgatacacaagcaccaataaagactaatccatacacagttaacctaatgccaaataaatactggttaaataaatgtatggcacagaatataatttgactatcaagacttttagcataatgaaaaaccctctctctatatatatatgtgtatatgaattatgtgggcattcttgatacttcaagttctagtttgaaaaaaatacataactaatttaattttacacaaaaatatttatgcagattttcagaatttcatatcaggaaatgacctttttatgtctgttaaatatcaaaacaatttgctacagtgttaatctgcatggtctttaagcctgctgtagttgagttgcagacagtgcatgaaaaagtattccgctgggaattgagccatgccaccaaagccaagaggagcgcatggaaacccggtagtctagaactaatcagattactgattttagggcacagcaccagatgaattgttgtatatgcttgtaaaaattgattctgtgtgttcctctgaacaaagcggagaaaatgatgataccatcaatattgaaattaaacttccaacttctctaataaaaaattaaaacacgcataacactcgtcaagagtatttgctcccaagacacattctagcaaatgttttgcctttttcatatacatgatatcatcgttattttcaaagggggcttattaataccctcagcatgtttttcacccaaatgatgcaaaacatgcagattctagttgacttcagttgtaatagacttgtttttctcctatttatgatttgaagtggattctgtaaaatatctcttgttcttagtttccttatctgtaaaacagtggagttagactacatatcttttggcactaacatctcatgaaaaattatggttaataaaatatcaccacatttggattgccaattttcaaagattctgagtggcttctcatcatcaaatcaaatcaaatccaagagctcaactatgctcaccattctgtaacacttgactgaattcatcacttgcctcctcttgtttctgctttggagaggtactactagtttttccatttttcttatttcttccctcttttcatcctcctaggccaccataagcatttatattttccagtgttatacatggaaccagtttgtttttctttgatccaggttacttttagtatttgagacatcataccattaatccattgtagtaggattaaaatgtacacacaactcaaatgtgcaacaaaagcatgtgttacctgctattgtcagttcatattgcactcaaaccttgcattatcccttattatgaagaaaaattaatagccaattaaagtaactcagtgtcttcca

SEQ ID NO: 165768 - DNA, 614 bp, Homo sapiens
  Payload ID: 12636
  Gene Symbol: PLCB4
  Gene Name: phospholipase C, beta 4
  ENST ID: ENST00000407043
  CDS Start-End: 276-614
gggaggaggaagcggctggccgctgaggggcggcggggcccggagcgggggacgcgcagggcccggcggtgggcgggcgggtcggcgctgccccgtgggctcgctggggagccacggcggagacccccgccctcaactgaggaaaagacaatttctctctgattcagaatcctgaaaatgtgatctcccttaaaaagaggacagtgctgctgtgagtttgacgaagtggacatcacctgcagtcagtccagagctgcccagtcttgaatataatcatggccaaaccttatgaatttaactggcagaaggaagttccctcctttttgcaagaaggagcagtttttgacagatacgaggaggaatcctttgtgtttgaacccaactgcctcttcaaagtggatgagtttggcttctttctgacatggagaagtgaaggcaaggaaggacaggtgctagaatgctccctcatcaacagtattcggtcgggagccataccaaaggatcccaaaatcttggctgctcttgaagctgttggaaaatcagaaaatgatctggaagggcggatagtttgtgtctgcagtggcacagatctagtgaacattagttttacctac

SEQ ID NO: 165769 - DNA, 3947 bp, Homo sapiens
  Payload ID: 12636
  Gene Symbol: PLCB4
  Gene Name: phospholipase C, beta 4
  Uniprot ID: Q15147
  ENST ID: ENST00000414679
  CDS Start-End: 16-3579
gtcttgaatataatcatggccaaaccttatgaatttaactggcagaaggaagttccctcctttttgcaagaaggagcagtttttgacagatacgaggaggaatcctttgtgtttgaacccaactgcctcttcaaagtggatgagtttggcttctttctgacatggagaagtgaaggcaaggaaggacaggtgctagaatgctccctcatcaacagtattcggtcgggagccataccaaaggatcccaaaatcttggctgctcttgaagctgttggaaaatcagaaaatgatctggaagggcggatagtttgtgtctgcagtggcacagatctagtgaacattagttttacctacatggtggctgaaaatccagaagtaactaagcaatgggtagaaggcctgagatcaatcatacacaacttcagggccaacaacgtcagtccaatgacatgcctcaagaaacactggatgaaattggcatttatgaccaacacaaatggtaaaattccagttaggagtattactagaacatttgcatcgggaaaaacagaaaaggtgatctttcaagcactcaaggagttaggtcttcccagtggaaagaatgatgaaattgagcccacagcattttcttatgaaaagttctatgaactgacacaaaagatttgtcctcggacagatatagaagatcttttcaaaaaaatcaatggagacaaaactgattatttaacggtagaccaattagtgagctttctaaatgaacatcaacgagatcctcgattgaatgaaattttatttccattttatgatgccaaaagggcaatgcagatcattgagatgtatgaacctgatgaagatttgaagaaaaaaggccttatatcaagtgatgggttttgcagatatctgatgtcagatgaaaacgccccagtcttcctagatcgtttagaactttaccaagaaatggaccatcctctggctcactacttcatcagttcttcccataacacttatctcactggcagacagttcggcgggaagtcttcggtagaaatgtacagacaggttctcctggctggttgcagatgtgttgaacttgactgctgggatggaaaaggtgaagaccaagaaccaataataactcatggaaaagcaatgtgtacagatatcctttttaaggatgtaattcaagccatcaaggaaactgcatttgtcacatcagaatatcctgtaattctctcctttgaaaatcactgcagcaaatatcaacagtacaagatgtccaaatattgcgaagatctatttggggatctcctgttgaaacaagcacttgaatcacatccacttgaaccaggcagggctttgccatcccccaatgacctcaaaagaaaaatactcataaaaaacaagcggctgaaacctgaagttgaaaaaaaacagctggaagctttgagaagcatgatggaagctggagaatctgcctccccagcaaacatcttagaggacgataatgaagaggagatcgaaagtgctgaccaagaggaggaagctcaccccgaattcaaatttggaaatgaactttctgctgatgacttgggtcacaaggaagctgttgcaaatagcgtcaagaaggcttcagatgaccttgaacatgaaaacaacaaaaagggcctggtcactgtagaagatgagcaggcgtggatggcatcttataaatatgtaggtgctaccactaatatccatccatatttgtccacaatgatcaactacgcccagcctgtaaagtttcaaggtttccatgtggcagaagaacgcaatattcattataacatgtcttcttttaatgaatcagtcggtcttggctacttgaagacacatgcaattgaatttgtcaattataacaaacggcaaatgagtcgcatttaccccaagggaggccgagtcgattccagtaattacatgcctcagattttctggaacgctggctgccagatggtttcactgaactatcaaaccccagatttagcgatgcaattgaatcagggaaaatttgagtataatggatcgtgcgggtaccttctcaaaccagatttcatgaggcggcctgatcgaacatttgaccccttctctgaaactcctgttgatggtgttattgcagccacttgctcagtgcaggttatatcaggtcaattcttatcagataagaaaattggcacctacgtagaggtggatatgtatgggttgcccactgacaccatacgtaaggaattccgaactcgcatggttatgaataatggactcaatccagtttacaatgaagagtcatttgtatttcggaaggtgatcctgccggacctggctgtcttgagaatagctgtgtatgatgataacaacaagctgattggccagaggatcctcccgcttgatggcctccaagccggatatcgacacatttcccttcgaaatgagggaaataaaccattatcactaccaacaattttctgcaatattgttcttaaaacatatgtgcctgatggatttggagatatcgtggatgctttatcagatccaaagaaatttctctcaattacagaaaagagagcagaccaaatgagagctatgggcattgaaactagtgacatagccgacgtgcccagtgacacttccaaaaatgacaagaaaggaaaggccaacaccgccaaagcaaatgtgacccctcagagtagctctgagctcagaccaaccaccacggctgccctggcctctggtgtggaagccaagaaaggtattgaacttatccctcaagtaaggatagaagacttaaagcagatgaaggcttacttgaagcatttaaagaaacagcagaaggagctaaattctttaaagaagaaacatgcaaaggaacacagtaccatgcagaagttacactgcacgcaagttgacaaaattgtggcacagtatgacaaagagaagtcgactcatgagaaaatcctagagaaggcaatgaagaagaaggggggaagtaattgtctcgaaatgaaaaaagaaacagaaatcaaaattcagacgctgacatcagatcacaaatctaaggtcaaagagattgtagcacagcacacaaaggaatggtcagaaatgatcaatacccacagtgctgaggagcaagaaatccgagacctgcacctcagccagcagtgtgagctgctgaaaaagctactcatcaatgcccacgagcagcaaacccagcagctgaaactgtcccatgacagggaaagcaaggaaatgcgagcacaccaggctaagatttctatggaaaatagcaaagccatcagccaagataaatctatcaagaataaagcagaacgggaaaggcgagtcagggagttaaacagcagcaacactaaaaagtttctggaagaaagaaagagacttgccatgaagcagtccaaagaaatggatcagttgaaaaaagtccagcttgaacatctagaattcctagagaaacagaatgagcaggcgaaggagatgcagcagatggtgaaattggaagccgagatggaccgcagaccagcaacagtagtatgaaactccaaaatgcaaactgaagcagcaaacccacaaagcatcaaaagactcactcacaaacttctgaacacaaactccatggatgaaagctgtttattttgtttcctttatgtgtaaacaagatgatatctgaaaccagagagacttggaatgtctgactgacttctatttaacagcttgagtattgcatttccttggccaaacaaaaatagctacaaatccacaaaaatttactattccagtaaggcagagtccaaccattgataatacaacttaaacatgtttgctataaaataccatcacaagtaaatgagcttggtgtgaacaactctcctttgtgatgccttaggacatgtttgaactgcagc

SEQ ID NO: 165770 - DNA, 484 bp, Homo sapiens
  Payload ID: 12636
  Gene Symbol: PLCB4
  Gene Name: phospholipase C, beta 4
  ENST ID: ENST00000437503
  CDS Start-End: 241-484
acacgcacacgcacacacgggcgcgcacacacacgcgcgtacacactgggtctccaggcagcggccgtcgccgcatccccggcagcagctccaggcaaagtgacaggaaaagacaatttctctctgattcagaatcctgaaaatgtgatctcccttaaaaagaggacagtgctgctgtgagtttgacgaagtggacatcacctgcagtcagtccagagctgcccagtcttgaatataatcatggccaaaccttatgaatttaactggcagaaggaagttccctcctttttgcaagaaggagcagtttttgacagatacgaggaggaatcctttgtgtttgaacccaactgcctcttcaaagtggatgagtttggcttctttctgacatggagaagtgaaggcaaggaaggacaggtgctagaatgctccctcatcaacagtattcggtcgggagccataccaaaggatcccaaaatcttggctg

SEQ ID NO: 165771 - DNA, 595 bp, Homo sapiens
  Payload ID: 12636
  Gene Symbol: PLCB4
  Gene Name: phospholipase C, beta 4
  ENST ID: ENST00000416836
  CDS Start-End: 417-595
ctgtgacaagcgtttgctgtatttgttgttcgacttagggtagttgaaagagtctctctcagccactctctctggatattttgttgtggctgtgggcactgtttgcccagcctctcactttgtagcggaggggtgggactctgcgtgaaaggaccagcgttatagtccctggcttctccggctaattcatcccgaggctcctgccccttcccattctggaaggggcgagcttatcctagacctgtgactgcctctgaagttctccacctgcctcaggcgtgctctccagtgcctgtttctgactgagtgaggttgaaatcctactgactccttttcagaggacagtgctgctgtgagtttgacgaagtggacatcacctgcagtcagtccagagctgcccagtcttgaatataatcatggccaaaccttatgaatttaactggcagaaggaagttccctcctttttgcaagaaggagcagtttttgacagatacgaggaggaatcctttgtgtttgaacccaactgcctcttcaaagtggatgagtttggcttctttctgacatggagaagtgaaggcaaggaaggacaggtgct

SEQ ID NO: 165772 - DNA, 505 bp, Homo sapiens
  Payload ID: 12636
  Gene Symbol: PLCB4
  Gene Name: phospholipase C, beta 4
  ENST ID: ENST00000441846
  CDS Start-End: 176-505
gcgggggacgcgcagggcccggcggtgggcgggcgggtcggcgctgccccgtgggctcgctggggagccacggcggagacccccgccctcaactgagaggacagtgctgctgtgagtttgacgaagtggacatcacctgcagtcagtccagagctgcccagtcttgaatataatcatggccaaaccttatgaatttaactggcagaaggaagttccctcctttttgcaagaaggagcagtttttgacagatacgaggaggaatcctttgtgtttgaacccaactgcctcttcaaagtggatgagtttggcttctttctgacatggagaagtgaaggcaaggaaggacaggtgctagaatgctccctcatcaacagtattcggtcgggagccataccaaaggatcccaaaatcttggctgctcttgaagctgttggaaaatcagaaaatgatctggaagggcggatagtttgtgtctgcagtggcacagatctagtgaacattagt

SEQ ID NO: 165773 - DNA, 2769 bp, Homo sapiens
  Payload ID: 12637
  Gene Symbol: PLCD1
  Gene Name: phospholipase C, delta 1
  Uniprot ID: P51178
  ENST ID: ENST00000334661
  CDS Start-End: 224-2494
cgcgtccccagaagggggcggggagagacgagggttggcgggctcagggggcgggggcgcagggcagcgggggcggggcggtgtcccgggaccacccccggcctcctcccaccgcggtccattcaggtccctgcaccgcactccgctcggaccccaggccgccggtgctgtcgctactcaagtgagtcccgcggtgcccctcccgccgcgccgcccgtcgggcatggactcgggccgggacttcctgaccctgcacggcctacaggatgatgaggatctacaggcgctgctgaagggcagccagctcctgaaggtgaagtccagctcatggaggagagagcgcttctacaagttgcaggaggactgcaagaccatctggcaggagtcccgcaaggtcatgcggaccccggagtcccagctgttctccatcgaggacattcaggaggtgcgaatggggcaccgcacggagggtctggagaagttcgcccgtgatgtgcccgaggaccgctgcttctccattgtcttcaaggaccagcgcaatacactagacctcatcgccccatcgccagctgatgcccagcactgggtgctggggctgcacaagatcatccaccactcaggctccatggaccagcgtcagaagctacagcactggattcactcctgcttgcgaaaagctgacaaaaacaaggacaacaagatgagcttcaaggagctgcagaacttcctgaaggagctcaacatccaggtggacgacagctatgcccggaagatcttcagggagtgtgaccactcccagacagactccctggaggacgaggagattgaggccttctacaagatgctgacccagcgggtggagatcgaccgcaccttcgccgaggccgcgggctcaggggagactctgtcggtggatcagttagtgacgttcctgcagcaccagcagcgggaggaggcggcagggcctgcgctggccctctccctcattgagcgctacgagcccagcgagactgccaaggcgcagcggcagatgaccaaggacggcttcctcatgtacttactgtcggctgacggcagcgccttcagcctggcacaccgccgtgtctaccaggacatgggccagccacttagccactacctggtgtcctcttcacacaacacctacctgctggaggaccagctagccgggcccagcagcactgaagcctacatccgggcactgtgcaaaggctgccgatgcctggagcttgactgctgggacgggcccaaccaggaaccaatcatctaccacggctatactttcacttccaagatcctcttctgcgatgtgctcagggccatccgggactatgccttcaaggcgtccccctaccctgtcatcctatccctggagaaccactgcacactggagcagcagcgcgtgatggcgcggcacctgcatgccatcctgggccccatgctgttgaaccgaccactggatggggtcaccaacagcctgccctcccctgagcaactgaaggggaagatcctgctgaaggggaagaagctcggggggctcctgccccctggaggggagggtggccctgaggccactgtggtgtcagacgaagacgaggctgctgagatggaggatgaggcagtgaggagccgtgtgcagcacaagcccaaggaggacaagctcaggctagcacaggagctctctgacatggtcatttactgcaagagtgtccactttgggggcttctccagtcctggcacccctggacaggccttctacgagatggcgtccttctctgagaaccgtgcccttcgactgctccaagaatcaggaaacggctttgtccgccacaacgtggggcacctgagcagaatctacccggctggatggagaacagactcctccaactacagccccgtggagatgtggaatgggggctgccagatcgtggccctgaatttccagacacctgggccagagatggacgtgtaccagggccgcttccaggacaacggggcctgtgggtacgtgctgaagcccgccttcctgcgagaccccaacggcacctttaacccccgcgccctggctcaggggccctggtgggcacggaagcggctcaacatcagggtcatttcggggcagcagctgccaaaagtcaacaagaataagaattcaattgtggaccccaaagtgacagtggagatccatggcgtgagccgggacgtggccagccgccagactgctgtcatcaccaacaatggtttcaacccatggtgggacacggagtttgcgtttgaggtagttgtgcctgaccttgccctcatccgcttcttggtggaagattatgatgcctcctccaagaatgacttcattggccagagtaccatccccttgaacagcctcaagcaaggataccgccatgtccacctcatgtctaagaacggggaccagcatccatcagccaccctctttgtgaagatctccctccaggactaggctggaggaagccagtggggtcccccctgagtgggctgggccctctgtccacatgtggggacagggctggtgtggctgctcccagcctcttgctcagagctaggcccccaaattgccttcagccctaacatagtgtctgctgctgcctccctggggaccaggagctagcccagtccctggagctgtccttcattccgttaggaataacactgcagccctctccaccctccggccagcgagtggtcaaggatttttataaaaatcacgataagatt

SEQ ID NO: 165774 - DNA, 2963 bp, Homo sapiens
  Payload ID: 12637
  Gene Symbol: PLCD1
  Gene Name: phospholipase C, delta 1
  Uniprot ID: P51178
  ENST ID: ENST00000463876
  CDS Start-End: 355-2688
ttcttctcgtcccgcctcctgtattctgactccccccactcatttactttgcctcggtttcgctctcgcctcaccttcagggggcataggtcccgccgctcgtggactagctccgcctcctagcgtctgactaccccctcagcccagatttccctctcgtcccgcccctccgaagtgcgcccctcctctcgaactctagctcctccctcccattcctggactccgcccctgctcccctccaagggcgacagttccgccccccggaccagagcagagggtgttgtgagcataaaacactggaggcggcactgccccggacccggctccgcgcaggcaggggcactgtggagggccatgcagtgcctggggatccggagccggagccgctccagggagctctacctgcaggagcggagccttaaggtggcggcgctcaatggacggaggctgggcctacaggatgatgaggatctacaggcgctgctgaagggcagccagctcctgaaggtgaagtccagctcatggaggagagagcgcttctacaagttgcaggaggactgcaagaccatctggcaggagtcccgcaaggtcatgcggaccccggagtcccagctgttctccatcgaggacattcaggaggtgcgaatggggcaccgcacggagggtctggagaagttcgcccgtgatgtgcccgaggaccgctgcttctccattgtcttcaaggaccagcgcaatacactagacctcatcgccccatcgccagctgatgcccagcactgggtgctggggctgcacaagatcatccaccactcaggctccatggaccagcgtcagaagctacagcactggattcactcctgcttgcgaaaagctgacaaaaacaaggacaacaagatgagcttcaaggagctgcagaacttcctgaaggagctcaacatccaggtggacgacagctatgcccggaagatcttcagggagtgtgaccactcccagacagactccctggaggacgaggagattgaggccttctacaagatgctgacccagcgggtggagatcgaccgcaccttcgccgaggccgcgggctcaggggagactctgtcggtggatcagttagtgacgttcctgcagcaccagcagcgggaggaggcggcagggcctgcgctggccctctccctcattgagcgctacgagcccagcgagactgccaaggcgcagcggcagatgaccaaggacggcttcctcatgtacttactgtcggctgacggcagcgccttcagcctggcacaccgccgtgtctaccaggacatgggccagccacttagccactacctggtgtcctcttcacacaacacctacctgctggaggaccagctagccgggcccagcagcactgaagcctacatccgggcactgtgcaaaggctgccgatgcctggagcttgactgctgggacgggcccaaccaggaaccaatcatctaccacggctatactttcacttccaagatcctcttctgcgatgtgctcagggccatccgggactatgccttcaaggcgtccccctaccctgtcatcctatccctggagaaccactgcacactggagcagcagcgcgtgatggcgcggcacctgcatgccatcctgggccccatgctgttgaaccgaccactggatggggtcaccaacagcctgccctcccctgagcaactgaaggggaagatcctgctgaaggggaagaagctcggggggctcctgccccctggaggggagggtggccctgaggccactgtggtgtcagacgaagacgaggctgctgagatggaggatgaggcagtgaggagccgtgtgcagcacaagcccaaggaggacaagctcaggctagcacaggagctctctgacatggtcatttactgcaagagtgtccactttgggggcttctccagtcctggcacccctggacaggccttctacgagatggcgtccttctctgagaaccgtgcccttcgactgctccaagaatcaggaaacggctttgtccgccacaacgtggggcacctgagcagaatctacccggctggatggagaacagactcctccaactacagccccgtggagatgtggaatgggggctgccagatcgtggccctgaatttccagacacctgggccagagatggacgtgtaccagggccgcttccaggacaacggggcctgtgggtacgtgctgaagcccgccttcctgcgagaccccaacggcacctttaacccccgcgccctggctcaggggccctggtgggcacggaagcggctcaacatcagggtcatttcggggcagcagctgccaaaagtcaacaagaataagaattcaattgtggaccccaaagtgacagtggagatccatggcgtgagccgggacgtggccagccgccagactgctgtcatcaccaacaatggtttcaacccatggtgggacacggagtttgcgtttgaggtagttgtgcctgaccttgccctcatccgcttcttggtggaagattatgatgcctcctccaagaatgacttcattggccagagtaccatccccttgaacagcctcaagcaaggataccgccatgtccacctcatgtctaagaacggggaccagcatccatcagccaccctctttgtgaagatctccctccaggactaggctggaggaagccagtggggtcccccctgagtgggctgggccctctgtccacatgtggggacagggctggtgtggctgctcccagcctcttgctcagagctaggcccccaaattgccttcagccctaacatagtgtctgctgctgcctccctggggaccaggagctagcccagtccctggagctgtccttcattccgttaggaataacactgcagccctctccaccctccggccagcgagtggtcaaggatttttataaaaatcacgataagatt

SEQ ID NO: 165775 - DNA, 546 bp, Homo sapiens
  Payload ID: 12638
  Gene Symbol: PLCD3
  Gene Name: phospholipase C, delta 3
  ENST ID: ENST00000538093
  CDS Start-End: 166-546
acggatgcccacccacgggttgacgtcgcggacaactacaccgcgggtgccgggctggggtgccggcctgtccaagcctcgaacccagaaccagttgctggggactccaggctcggctccgcctcacgctccccaggcctgacggaggacgaggacgtgcgcgccatgctgcggggctcccggctccgcaagatccgctcgcgcacgtggcacaaggagcggctgtaccggctgcaggaggacggcctgagcgtgtggttccagcggcgcatcccgcgtgcgccatcgcagcacatcttcttcgtgcagcacatcgaggcggtccgcgagggccaccagtccgagggcctgcggcgcttcgggggtgccttcgcgccagcgcgctgcctcaccatcgccttcaagggccgccgcaagaacctggacctggcggcgcccacggctgaggaagcgcagcgctgggtgcgcggtctgaccaagctccgcgcgcgcctggacgccatgagccagcgcgagcggctagaccactggatccactcctatctg

SEQ ID NO: 165776 - DNA, 648 bp, Homo sapiens
  Payload ID: 12638
  Gene Symbol: PLCD3
  Gene Name: phospholipase C, delta 3
  ENST ID: ENST00000539433
  CDS Start-End: 1-335
tagtcaatgggcagtgtggctacgtcctaaaacctgcctgcctgcggcaacctgactcgacctttgaccccgagtacccaggacctcccagaaccactctcagcatccaggtgctgactgcacagcagctgcccaagctgaatgccgagaagccacactccattgtggaccccctggtgcgcattgagatccatggggtgcccgcagactgtgcccggcaggagactgactacgtgctcaacaatgggtaccgccacatacacctgctttccaaggacggggcctcactgtcaccagccacgctcttcatccaaatccgcatccagcgctcctgagggcccacctcactcgccttggggttctgcgagtgccagtccacatcccctgcagagccctctcctcctctggagtcaggtggtgggagtaccagccccccagcccacccacttggcccactcagcccattcaccaggcgctggtctcacctgggtgctgagggctgcctgggcccctcctgaagaacagaaaggtgttcatgtgacttcagtgagctccaaccctggggccctgagatggccccagctcctcttgtcctcagcccacccctcattgtgacttatgaggagcaagcctgttgctgccaggaga

SEQ ID NO: 165777 - DNA, 595 bp, Homo sapiens
  Payload ID: 12638
  Gene Symbol: PLCD3
  Gene Name: phospholipase C, delta 3
  ENST ID: ENST00000590644
  CDS Start-End: 11-595
gtgtgcgcccatgtctctgccggacccaggccaccggccgcagaaacgctgccacctggacgtcccccacttcgcgcacgcactctggtgcttgcatataaatagcctgacggaggacgaggacgtgcgcgccatgctgcggggctcccggctccgcaagatccgctcgcgcacgtggcacaaggagcggctgtaccggctgcaggaggacggcctgagcgtgtggttccagcggcgcatcccgcgtgcgccatcgcagcacatcttcttcgtgcagcacatcgaggcggtccgcgagggccaccagtccgagggcctgcggcgcttcgggggtgccttcgcgccagcgcgctgcctcaccatcgccttcaagggccgccgcaagaacctggacctggcggcgcccacggctgaggaagcgcagcgctgggtgcgcggtctgaccaagctccgcgcgcgcctggacgccatgagccagcgcgagcggctagaccactggatccactcctatctgcaccgggctgactccaaccaggacagcaagatgagcttcaaggagatcaagagcctgctgagaatggtcaacgtggacatg

SEQ ID NO: 165778 - DNA, 6107 bp, Homo sapiens
  Payload ID: 12638
  Gene Symbol: PLCD3
  Gene Name: phospholipase C, delta 3
  Uniprot ID: Q8N3E9
  ENST ID: ENST00000619929
  CDS Start-End: 89-2458
ctcagagccggggccgggccagagcggcgccccgctgccctgtccccgcgtgcagaccccgggcccggccccggccccccgccaagccatgctgtgcggccgctggaggcgttgccgccgcccgcccgaggagcccccggtggccgcccaggtcgcagcccaagtcgcggcgccggtcgctctcccgtccccgccgactccctccgatggcggcaccaagaggcccgggctgcgggcgctgaagaagatgggcctgacggaggacgaggacgtgcgcgccatgctgcggggctcccggctccgcaagatccgctcgcgcacgtggcacaaggagcggctgtaccggctgcaggaggacggcctgagcgtgtggttccagcggcgcatcccgcgtgcgccatcgcagcacatcttcttcgtgcagcacatcgaggcggtccgcgagggccaccagtccgagggcctgcggcgcttcgggggtgccttcgcgccagcgcgctgcctcaccatcgccttcaagggccgccgcaagaacctggacctggcggcgcccacggctgaggaagcgcagcgctgggtgcgcggtctgaccaagctccgcgcgcgcctggacgccatgagccagcgcgagcggctagaccactggatccactcctatctgcaccgggctgactccaaccaggacagcaagatgagcttcaaggagatcaagagcctgctgagaatggtcaacgtggacatgaacgacatgtacgcctacctcctcttcaaggagtgtgaccactccaacaacgaccgtctagagggggctgagatcgaggagttcctgcggcggctgctgaagcggccggagctggaggagatcttccatcagtactcgggcgaggaccgcgtgctgagtgcccctgagctgctggagttcctggaggaccagggcgaggagggcgccacactggcccgcgcccagcagctcattcagacctatgagctcaacgagacagccaagcagcatgagctgatgacactggatggcttcatgatgtacctgttgtcgccggagggggctgccttggacaacacccacacgtgtgtgttccaggacatgaaccagccccttgcccactacttcatctcttcctcccacaacacctatctgactgactcccagatcggggggcccagcagcaccgaggcctatgttagggcctttgcccagggatgccgctgcgtggagctggactgctgggaggggccaggaggggagcccgtcatctatcatggccataccctcacctccaagattctcttccgggacgtggtccaagccgtgcgcgaccatgccttcacgctgtccccttaccctgtcatcctatccctggagaaccactgcgggctggagcagcaggctgccatggcccgccacctctgcaccatcctgggggacatgctggtgacacaggcgctggactccccaaatcccgaggagctgccatccccagagcagctgaagggccgggtcctggtgaagggaaagaagttgcccgctgctcggagcgaggatggccgggctctgtcggatcgggaggaggaggaggaggatgacgaggaggaagaagaggaggtggaggctgcagcgcagaggcggctggccaagcagatctccccggagctgtcggccctggctgtgtactgccacgccacccgcctgcggaccctgcaccctgcccccaacgccccacaaccctgccaggtcagctccctcagcgagcgcaaagccaagaaactcattcgggaggcagggaacagctttgtcaggcacaatgcccgccagctgacccgcgtgtacccgctggggctgcggatgaactcagccaactacagtccccaggagatgtggaactcgggctgtcagctggtggccttgaacttccagacgccaggctacgagatggacctcaatgccgggcgcttcctagtcaatgggcagtgtggctacgtcctaaaacctgcctgcctgcggcaacctgactcgacctttgaccccgagtacccaggacctcccagaaccactctcagcatccaggtgctgactgcacagcagctgcccaagctgaatgccgagaagccacactccattgtggaccccctggtgcgcattgagatccatggggtgcccgcagactgtgcccggcaggagactgactacgtgctcaacaatggcttcaacccccgctgggggcagaccctgcagttccagctgcgggctccggagctggcactggtccggtttgtggtggaagattatgacgccacctcccccaatgactttgtgggccagtttacactgcctcttagcagcctaaagcaagggtaccgccacatacacctgctttccaaggacggggcctcactgtcaccagccacgctcttcatccaaatccgcatccagcgctcctgagggcccacctcactcgccttggggttctgcgagtgccagtccacatcccctgcagagccctctcctcctctggagtcaggtggtgggagtaccagccccccagcccacccacttggcccactcagcccattcaccaggcgctggtctcacctgggtgctgagggctgcctgggcccctcctgaagaacagaaaggtgttcatgtgacttcagtgagctccaaccctggggccctgagatggccccagctcctcttgtcctcagcccacccctcattgtgacttatgaggagcaagcctgttgctgccaggagacttggggagcaggacacttgtgggccctcagttcccctctgtcctcccgtgggccatcccagcctccttcccccagaggagcgcagtcactccacttggccccgaccccgagcttagcccctaagccctcctttaccccaggccttcctggactcctccctccagctccggaacctgagctccccttcccttctcaaagcaagaagggagcgctgaggcatgaagccctggggaaactggcagtaggttttggtttttattttttgagacagggtctcgctccgtcgcccaggctggagtgcaatgttgcaatcatggctcactgcagctttgaactcccaggctcaagcgatcctcccatctcagcctcctgagtagctgggactacaggcacaggccaccaaacctggctaatgtttaaattttatgtagagatggcggggggggcgggggtctccctatgttgcccaggctggtctcgagctcctgacctcaagtgatcctcctgccccagcattccaaagtgctgggattacaggtgtgagccactgcctggcctggccgtaggtttgtaactgtttcatagaagagccctggagaagacagtagaatgagcctatctagtttaaaaaataaagaagcacgttgatttcaccaccgccactccctgagcacctctatgctgccacccccacaggcccatgaggagggacagggctggatgagtttcttgggcctctcccctcaacagggcatggacttggctaagacagccagggggtggcagcaggagatgccacagctctaaatagcccgatccctgctcctggcttaaagctgctgcgagtatcacaagactgtctgaggatgccaattcagcaggtcagcgcctccccacaacacacacacacacacacacacacacacactcacacatacacagaggggccttgaatgaggaggagacaggagtctgagggaccctcagactgccactctccaggcttggctgggctcaaggcccctgtctgctcagtagggcaaatcccaaggacacgggcttcccttcctccagccagccagccttttacacaaaggctggaaacgctgcttgggccgcctctatagaaatgccaggagagcgcactggacactaggcgacagaatctggagaaaatcctgcacccgcccctgccagcagggtgaaatgtggaggcctggtgttttaggttctgccagccaacagtgccggcactggacaagggcagaacttgacattagtccccagagggtggcctggaactgggctgggataggccttgaactggccccaagccccacagaaaccaaaacacagggctggggcagactccaccttctagcaactccaagaactaatgcagaaagtggcagtgtcccccgctccttcatgctgggagtggcgtttggctctggttaatttgtgtgtctgaaagaggataatcagaatcaaaagggcccagaaggaatgggccgagccaggcgggccgggccaggcagcccgggcatctggcactcagggctgtcagagggtcaggctgccaaactgcagcctcaggatgggaggcacagtgaggctaagtccagttttagcaaatgaagagccattagcattgcccagcccctgcagagccaggtctggccaggggctggctggggggtctgggtcaggtgagcaccagacccagggctgagtgcccatcctgcttggcttctctggtttcgtatctggtaccaagaggaaggggtgaaggctaggatgagggcccaatactgagaaggctgccttgaaagggcaagagtcttttttttttttcttttgagacaaagtcttgctcgtcccccaggatggagtgcgatggcgtgatctcggctcactgcaacctctgcctcccgggttcaagcgattctcttgcctcagcctccggagtagctgggattacaggcgcccgccaccatacccagctaatttttgtatttttagtagagacggggtttcaccatgttggccaggctggtctcgaactcctgacctcaggtgatccacccgccttgacctcccaaagtgctgggattacaggcgtgagccactgcacccagccaaaagggcaagagtctttaaggaagtgaactgggaagcagaagcaagggagaaatcacagggttttttttttgtttgtttttttgagatggagtctcgctctgtcgcctaggctagagtgcagtggcacgaccttggctcactgcaagctccgcctcccgggttcacaccattctcctgcctcagcttcccaagtagctgggactacaggcgcccaccaccatgcccggctaatttttttgtgtttttagtagagacagggtttcatagtgttagccaggatggtctcgatctcctgacctcgtgatccacccgcctcgccctcccaaagtgctgggattacaggcgtgagccaccatgcccagcctgaaatcacagctttttatcccagaggcccatgggtagaaacaacacatagggctatgttctctcagcccaaagctaagggcaggaaaaaaggcatgggccataggagcctgagtgacttggtttgggacaggagggttggggggctttagaggggtcaggcaggtcctgtgtcctctcagtttccctggaaaggggcttggaggcaccagtcatggacctgaaaggatcagggggtcagggaatgggtaagttccagaggatgagaagagggggaatgggaagtcttaaacacagctactggggcccagcaacttgccatgttaaaatgcacccctagtgactcaaagaaccacccggccagtggtgcaggaggagagatgtggcacctgggcacagtgggaaggcacggggcctgcacctccaccagaggagccactgctgacctggaccaagggggctgctctgtgcccagctagggaagcctgggccggctcctgtgctgaggtgctcaggtgctggctgagagcccagttgctgctctaacttggagtgaacctgggtcaatagcagctcgtctctggcgggtgggaagggtctgacaacaccaagtttgccctggaagaagggcagccttaaaggaaggcctttggaagctggcctggtgctgtgggcttgagggactttgtgtccaagccctgtcgtcctggctccagcctaggctccagcactccatttcttccactgccacctgctgaccaggaataccaggacagaaggttttgttcagctgctttctttattagaaacaagtgagatgtattgagcag

SEQ ID NO: 165779 - DNA, 3232 bp, Homo sapiens
  Payload ID: 12639
  Gene Symbol: PLCD4
  Gene Name: phospholipase C, delta 4
  Uniprot ID: Q9BRC7
  ENST ID: ENST00000450993
  CDS Start-End: 340-2628
cttctctccccaccccacccccactactccctcacattgaccagtgtcctgggcctttaagagttggatgggctggactggagagagctcacacctctccccttcttactgcttccctccggctataacttgccagtcacagcagccagctgctgtagaagaggggaggaaacaagccagtgcaaggggagcaaaagagaaaaggagccaggctgggcttcctgatcccacagcatcgcagagctcgggaggcacagctcacagacacaggaaacacaggactgctattctgctctcctgcccacggtgatctggtgccagctggtggaacagtgggtgatggcgtccctgctgcaagaccagctgaccactgatcaggacttgctgctgatgcaggaaggcatgccgatgcgcaaggtgaggtccaaaagctggaagaagctaagatacttcagacttcagaatgacggcatgacagtctggcatgcacggcaggccaggggcagtgccaagcccagcttctcaatctctgatgtggagacaatacgtaatggccatgattccgagttgctgcgtagcctggcagaggagctccccctggagcagggcttcaccattgtcttccatggccgccgctccaacctggacctgatggccaacagtgttgaggaggcccagatatggatgcgagggctccagctgttggtggatcttgtcaccagcatggaccatcaggagcgcctggaccaatggctgagcgattggtttcaacgtggagacaaaaatcaggatggtaagatgagtttccaagaagttcagcggttattgcacctaatgaatgtggaaatggaccaagaatatgccttcagtctttttcaggcagcagacacgtcccagtctggaaccctggaaggagaagaattcgtacagttctataaggcattgactaaacgtgctgaggtgcaggaactgtttgaaagtttttcagctgatgggcagaagctgactctgctggaatttttggatttcctccaagaggagcagaaggagagagactgcacctctgagcttgctctggaactcattgaccgctatgaaccttcagacagtggcaaactgcggcatgtgctgagtatggatggcttcctcagctacctctgctctaaggatggagacatcttcaacccagcctgcctccccatctatcaggatatgactcaacccctgaaccactacttcatctgctcttctcataacacctacctagtgggggaccagctttgtggccagagcagcgtcgagggatatatacgggccctgaagcgggggtgccgctgcgtggaggtggatgtatgggatggacctagcggggaacctgtcgtttaccacggacacaccctgacctcccgcatcctgttcaaagatgtcgtggccacagtagcacagtatgccttccagacatcagactacccagtcatcttgtccctggagacccactgcagctgggagcagcagcagaccatggcccgtcatctgactgagatcctgggggagcagctgctgagcaccaccttggatggggtgctgcccactcagctgccctcgcctgaggagcttcggaggaagatcctggtgaaggggaagaagttaacacttgaggaagacctggaatatgaggaagaggaagcagaacctgagttggaagagtcagaattggcgctggagtcccagtttgagactgagcctgagccccaggagcagaaccttcagaataaggacaaaaagaagaaatccaagcccatcttgtgtccagccctctcttccctggttatctacttgaagtctgtctcattccgcagcttcacacattcaaaggagcactaccacttctacgagatatcatctttctctgaaaccaaggccaagcgcctcatcaaggaggctggcaatgagtttgtgcagcacaatacttggcagttaagccgtgtgtatcccagcggcctgaggacagactcttccaactacaacccccaggaactctggaatgcaggctgccagatggtggccatgaatatgcagactgcagggcttgaaatggacatctgtgatgggcatttccgccagaatggcggctgtggctatgtgctgaagccagacttcctgcgtgatatccagagttctttccaccctgagaagcccatcagccctttcaaagcccagactctcttaatccaggtgatcagcggtcagcaactccccaaagtggacaagaccaaagaggggtccattgtggatccactggtgaaagtgcagatctttggcgttcgtctagacacagcacggcaggagaccaactatgtggagaacaatggttttaatccatactgggggcagacactatgtttccgggtgctggtgcctgaacttgccatgctgcgttttgtggtaatggattatgactggaaatcccgaaatgactttattggtcagtacaccctgccttggacctgcatgcaacaaggttaccgccacattcacctgctgtccaaagatggcatcagcctccgcccagcttccatctttgtgtatatctgcatccaggaaggcctggagggggatgagtcctgaggtgggcatttcacgggaagggttggtgtgctggctttagacggggagaaacatctggaaggatgctcgagagaacaaatggaggtggtgaaaatcaagctttggattgtgcattcctaggcacaaaattacctcattcttcctaacaagcaatctgggacctgattttccaccttttttctcttttcttcccttcctttgttttcataagcctttggtatctttcctgcccttttcctttgtgtactctatactggagttcccttcttcctcttgctgtaggctcaatcccataccgacatctacaactaatctttcccatcaactctgtgtgaaggcaggttgcaactagaaattcagaggggcttggaatagagaaacctaaagaagcatcatcccctccatccccaacttcctcaaagcccaaagccaagggaaggataaatcaaggctcaaggcttccccagcaaagattagggaaagagacttgaccccaggactgtactacgactcttaagagaacactgcacagcactcaaagtcccccactggactgcttcctccttagccccactggtataaatacatctctctccaatttggc

SEQ ID NO: 165780 - DNA, 556 bp, Homo sapiens
  Payload ID: 12639
  Gene Symbol: PLCD4
  Gene Name: phospholipase C, delta 4
  ENST ID: ENST00000415854
  CDS Start-End: 261-556
agaagcaagggagtagacaaaatgattctcttctttcttgcccctcagagagacctgagacaccctgaatcccactgtaatctccttggtgccattggtaactctgccaaagtccatctctaggtgacatgaagtctcttagaaattgaggaccaaattgcgctctgcagctctgggctacttcccatctcattttgtgtccctattttcgtatctgtattagagaggtgatctggtgccagctggtggaacagtgggtgatggcgtccctgctgcaagaccagctgaccactgatcaggacttgctgctgatgcaggaaggcatgccgatgcgcaaggtgaggtccaaaagctggaagaagctaagatacttcagacttcagaatgacggcatgacagtctggcatgcacggcaggccaggggcagtgccaagcccagcttctcaatctctgatgtggagacaatacgtaatggccatgattccgagttgctgcgtagcctggcagaggagctccccctggagcagggcttcaccattgtcttccatggccgccg

SEQ ID NO: 165781 - DNA, 3225 bp, Homo sapiens
  Payload ID: 12639
  Gene Symbol: PLCD4
  Gene Name: phospholipase C, delta 4
  ENST ID: ENST00000432688
  CDS Start-End: 243-2627
agagaaaagtgaggctgagcagagggacacgcatgctactgagttctgaacccaagtgtcctcccttctggaccacagtctcaaaattctcaaaggagatgagactcagagccattgcgaattagtggagtcaaaagagggaaccaactggaagaggtgatggggagaagggatgaggagaaggaagagaagaggagagactgacctaggtgatctggtgccagctggtggaacagtgggtgatggcgtccctgctgcaagaccagctgaccactgatcaggacttgctgctgatgcaggaaggcatgccgatgcgcaaggtgaggtccaaaagctggaagaagctaagatacttcagacttcagaatgacggcatgacagtctggcatgcacggcaggccaggggcagtgccaagcccagcttctcaatctctgatgtggagacaatacgtaatggccatgattccgagttgctgcgtagcctggcagaggagctccccctggagcagggcttcaccattgtcttccatggccgccgctccaacctggacctgatggccaacagtgttgaggaggcccagatatggatgcgagggctccagctgttggtggatcttgtcaccagcatggaccatcaggagcgcctggaccaatggctgagcgattggtttcaacgtggagacaaaaatcaggatggtaagatgagtttccaagaagttcagcggttattgcacctaatgaatgtggaaatggaccaagaatatgccttcagtctttttcaggcagcagacacgtcccagtctggaaccctggaaggagaagaattcgtacagttctataaggcattgactaaacgtgctgaggtgcaggaactgtttgaaagtttttcagctgatgggcagaagctgactctgctggaatttttggatttcctccaagaggagcagaaggagagagactgcacctctgagcttgctctggaactcattgaccgctatgaaccttcagacagtggcaaactgcggcatgtgctgagtatggatggcttcctcagctacctctgctctaaggatggagacatcttcaacccagcctgcctccccatctatcaggatatgactcaacccctgaaccactacttcatctgctcttctcataacacctacctagtgggggaccagctttgtggccagagcagcgtcgagggatatatacgggccctgaagcgggggtgccgctgcgtggaggtggatgtatgggatggacctagcggggaacctgtcgtttaccacggacacaccctgacctcccgcatcctgttcaaagatgtcgtggccacagtagcacagtatgccttccagacatcagactacccagtcatcttgtccctggagacccactgcagctgggagcagcagcagaccatggcccgtcatctgactgagatcctgggggagcagctgctgagcaccaccttggatggggtgctgcccactcagctgccctcgcctgaggagcttcggaggaagatcctggtgaaggggaagaagttaacacttgaggaagacctggaatatgaggaagaggaagcagaacctgagttggaagagtcagaattggcgctggagtcccagtttgagactgagcctgagccccaggagcagaaccttcagaataaggacaaaaagaaggttgtgacgtgcccgctgttttgtccgtctatctgttgtcagattgtggcccaggctcctatttccaagcctgagtcccttctcttgtcccggcagaaatccaagcccatcttgtgtccagccctctcttccctggttatctacttgaagtctgtctcattccgcagcttcacacattcaaaggagcactaccacttctacgagatatcatctttctctgaaaccaaggccaagcgcctcatcaaggaggctggcaatgagtttgtgcagcacaatacttggcagttaagccgtgtgtatcccagcggcctgaggacagactcttccaactacaacccccaggaactctggaatgcaggctgccagatggtggccatgaatatgcagactgcagggcttgaaatggacatctgtgatgggcatttccgccagaatggcggctgtggctatgtgctgaagccagacttcctgcgtgatatccagagttctttccaccctgagaagcccatcagccctttcaaagcccagactctcttaatccaggtgatcagcggtcagcaactccccaaagtggacaagaccaaagaggggtccattgtggatccactggtgaaagtgcagatctttggcgttcgtctagacacagcacggcaggagaccaactatgtggagaacaatggttttaatccatactgggggcagacactatgtttccgggtgctggtgcctgaacttgccatgctgcgttttgtggtaatggattatgactggaaatcccgaaatgactttattggtcagtacaccctgccttggacctgcatgcaacaaggttaccgccacattcacctgctgtccaaagatggcatcagcctccgcccagcttccatctttgtgtatatctgcatccaggaaggcctggagggggatgagtcctgaggtgggcatttcacgggaagggttggtgtgctggctttagacggggagaaacatctggaaggatgctcgagagaacaaatggaggtggtgaaaatcaagctttggattgtgcattcctaggcacaaaattacctcattcttcctaacaagcaatctgggacctgattttccaccttttttctcttttcttcccttcctttgttttcataagcctttggtatctttcctgcccttttcctttgtgtactctatactggagttcccttcttcctcttgctgtaggctcaatcccataccgacatctacaactaatctttcccatcaactctgtgtgaaggcaggttgcaactagaaattcagaggggcttggaatagagaaacctaaagaagcatcatcccctccatccccaacttcctcaaagcccaaagccaagggaaggataaatcaaggctcaaggcttccccagcaaagattagggaaagagacttgaccccaggactgtactacgactcttaagagaacactgcacagcactcaaagtcccccactggactgcttcctccttagccccactggtataaatacatctctctccaa

SEQ ID NO: 165782 - DNA, 2738 bp, Homo sapiens
  Payload ID: 12639
  Gene Symbol: PLCD4
  Gene Name: phospholipase C, delta 4
  Uniprot ID: Q9BRC7
  ENST ID: ENST00000417849
  CDS Start-End: 186-2474
gtagaagaggggaggaaacaagccagtgcaaggggagcaaaagagaaaaggagccaggctgggcttcctgatcccacagcatcgcagagctcgggaggcacagctcacagacacaggaaacacaggactgctattctgctctcctgcccacggtgatctggtgccagctggtggaacagtgggtgatggcgtccctgctgcaagaccagctgaccactgatcaggacttgctgctgatgcaggaaggcatgccgatgcgcaaggtgaggtccaaaagctggaagaagctaagatacttcagacttcagaatgacggcatgacagtctggcatgcacggcaggccaggggcagtgccaagcccagcttctcaatctctgatgtggagacaatacgtaatggccatgattccgagttgctgcgtagcctggcagaggagctccccctggagcagggcttcaccattgtcttccatggccgccgctccaacctggacctgatggccaacagtgttgaggaggcccagatatggatgcgagggctccagctgttggtggatcttgtcaccagcatggaccatcaggagcgcctggaccaatggctgagcgattggtttcaacgtggagacaaaaatcaggatggtaagatgagtttccaagaagttcagcggttattgcacctaatgaatgtggaaatggaccaagaatatgccttcagtctttttcaggcagcagacacgtcccagtctggaaccctggaaggagaagaattcgtacagttctataaggcattgactaaacgtgctgaggtgcaggaactgtttgaaagtttttcagctgatgggcagaagctgactctgctggaatttttggatttcctccaagaggagcagaaggagagagactgcacctctgagcttgctctggaactcattgaccgctatgaaccttcagacagtggcaaactgcggcatgtgctgagtatggatggcttcctcagctacctctgctctaaggatggagacatcttcaacccagcctgcctccccatctatcaggatatgactcaacccctgaaccactacttcatctgctcttctcataacacctacctagtgggggaccagctttgtggccagagcagcgtcgagggatatatacgggccctgaagcgggggtgccgctgcgtggaggtggatgtatgggatggacctagcggggaacctgtcgtttaccacggacacaccctgacctcccgcatcctgttcaaagatgtcgtggccacagtagcacagtatgccttccagacatcagactacccagtcatcttgtccctggagacccactgcagctgggagcagcagcagaccatggcccgtcatctgactgagatcctgggggagcagctgctgagcaccaccttggatggggtgctgcccactcagctgccctcgcctgaggagcttcggaggaagatcctggtgaaggggaagaagttaacacttgaggaagacctggaatatgaggaagaggaagcagaacctgagttggaagagtcagaattggcgctggagtcccagtttgagactgagcctgagccccaggagcagaaccttcagaataaggacaaaaagaagaaatccaagcccatcttgtgtccagccctctcttccctggttatctacttgaagtctgtctcattccgcagcttcacacattcaaaggagcactaccacttctacgagatatcatctttctctgaaaccaaggccaagcgcctcatcaaggaggctggcaatgagtttgtgcagcacaatacttggcagttaagccgtgtgtatcccagcggcctgaggacagactcttccaactacaacccccaggaactctggaatgcaggctgccagatggtggccatgaatatgcagactgcagggcttgaaatggacatctgtgatgggcatttccgccagaatggcggctgtggctatgtgctgaagccagacttcctgcgtgatatccagagttctttccaccctgagaagcccatcagccctttcaaagcccagactctcttaatccaggtgatcagcggtcagcaactccccaaagtggacaagaccaaagaggggtccattgtggatccactggtgaaagtgcagatctttggcgttcgtctagacacagcacggcaggagaccaactatgtggagaacaatggttttaatccatactgggggcagacactatgtttccgggtgctggtgcctgaacttgccatgctgcgttttgtggtaatggattatgactggaaatcccgaaatgactttattggtcagtacaccctgccttggacctgcatgcaacaaggttaccgccacattcacctgctgtccaaagatggcatcagcctccgcccagcttccatctttgtgtatatctgcatccaggaaggcctggagggggatgagtcctgaggttgcaactagaaattcagaggggcttggaatagagaaacctaaagaagcatcatcccctccatccccaacttcctcaaagcccaaagccaagggaaggataaatcaaggctcaaggcttccccagcaaagattagggaaagagacttgaccccaggactgtactacgactcttaagagaacactgcacagcactcaaagtcccccactggactgcttcctccttagccccactggtataaatacatctctctccaatttggc

SEQ ID NO: 165783 - DNA, 548 bp, Homo sapiens
  Payload ID: 12639
  Gene Symbol: PLCD4
  Gene Name: phospholipase C, delta 4
  ENST ID: ENST00000458239
  CDS Start-End: 1-370
ccagacatcagactacccagtcatcttgtccctggagacccactgcagctgggagcagcagcagaccatggcccgtcatctgactgagatcctgggggagcagctgctgagcaccaccttggatggggtgctgcccactcagctgccctcgcctgaggagcttcggaggaagatcctggtgaaggggaagaagttaacacttgaggaagacctggaatatgaggaagaggaagcagaacctgagttggaagagtcagaattggcgctggagtcccagtttgagactgagcctgagccccaggagcagaaccttcagaataaggacaaaaagaaggcaatgagtttgtgcagcacaatacttggcagttaagccgtgtgtatcccagcggcctgaggacagactcttccaactacaacccccaggaactctggaatgcaggctgccagatggtggccatgaatatgcagactgcagggcttgaaatggacatctgtgatgggcatttccgccagaatggcggctgtggctatgtgctgaagccagactt

SEQ ID NO: 165784 - DNA, 649 bp, Homo sapiens
  Payload ID: 12639
  Gene Symbol: PLCD4
  Gene Name: phospholipase C, delta 4
  ENST ID: ENST00000457773
  CDS Start-End: 1-334
tccactggtgaaagtgcagatctttggcgttcgtctagacacagcacggcaggagaccaactatgtggagaacaatggttttaatccatactgggggcagacactatgtttccgggtgctggtgcctgaacttgccatgctgcgttttgtggtaatggattatgactggaaatcccgaaatgactttattggtcagtacaccctgccttggacctgcatgcaacaaggttaccgccacattcacctgctgtccaaagatggcatcagcctccgcccagcttccatctttgtgtatatctgcatccaggaaggcctggagggggatgagtcctgaggctcaatcccataccgacatctacaactaatctttcccatcaactctgtgtgaaggcaggttgcaactagaaattcagaggggcttggaatagagaaacctaaagaagcatcatcccctccatccccaacttcctcaaagcccaaagccaagggaaggataaatcaaggctcaaggcttccccagcaaagattagggaaagagacttgaccccaggactgtactacgactcttaagagaacactgcacagcactcaaagtcccccactggactgcttcctccttagccccactggtataaatacatctctctcc

SEQ ID NO: 165785 - DNA, 578 bp, Homo sapiens
  Payload ID: 12639
  Gene Symbol: PLCD4
  Gene Name: phospholipase C, delta 4
  ENST ID: ENST00000446503
  CDS Start-End: 206-415
agtcacagcagccagctgctgtagaagaggggaggaaacaagccagtgcaaggggagcaaaagagaaaaggagccaggctgggcttcctgatcccacagcatcgcagagctcgggaggcacagctcacagacacaggaaacacaggactgctattctgctctcctgcccacggtgatctggtgccagctggtggaacagtgggtgatggcgtccctgctgcaagaccagctgaccactgatcaggacttgctgctgatgcaggaaggcatgccgatgcgcaagtctcaatctctgatgtggagacaatacgtaatggccatgattccgagttgctgcgtagcctggcagaggagctccccctggagcagggcttcaccattgtcttccatggccgccgctccaacctggacctgatggccaacagtgttgaggaggcccagatatggatgcgagggctccagctgttggtggatcttgtcaccagcatggaccatcaggagcgcctggaccaatggctgagcgattggtttcaacgtggagacaaaaatcaggatggacctctctgtccatggccaga

SEQ ID NO: 165786 - DNA, 591 bp, Homo sapiens
  Payload ID: 12639
  Gene Symbol: PLCD4
  Gene Name: phospholipase C, delta 4
  ENST ID: ENST00000444453
  CDS Start-End: 206-415
agtcacagcagccagctgctgtagaagaggggaggaaacaagccagtgcaaggggagcaaaagagaaaaggagccaggctgggcttcctgatcccacagcatcgcagagctcgggaggcacagctcacagacacaggaaacacaggactgctattctgctctcctgcccacggtgatctggtgccagctggtggaacagtgggtgatggcgtccctgctgcaagaccagctgaccactgatcaggacttgctgctgatgcaggaaggcatgccgatgcgcaagtctcaatctctgatgtggagacaatacgtaatggccatgattccgagttgctgcgtagcctggcagaggagctccccctggagcagggcttcaccattgtcttccatggccgccgctccaacctggacctgatggccaacagtgttgaggaggcccagatatggatgcgagggctccagctgttggtggatcttgtcaccagcatggaccatcaggagcgcctggaccaatggctgagcgattggtttcaacgtggagacaaaaatcaggatggtaagatgagtttccaagaagttcagcggttattg

SEQ ID NO: 165787 - DNA, 7992 bp, Homo sapiens
  Payload ID: 12640
  Gene Symbol: PLCE1
  Gene Name: phospholipase C, epsilon 1
  Uniprot ID: Q9P212
  ENST ID: ENST00000260766
  CDS Start-End: 635-7543
cgctgggcaacgtgggcaacgcggcgggcggcgggctcgcgcggcgggaggggcagcggcggcgcgcccgggctctacctcccgggctctgcctcccgggctctgcctctcgggcacttgcctggctcctgcgcgttcctgggcatcggctctgcagctgacacacagtagcggggacacccgacgccgctagcgacaggcgcgcggacggctggtcccagagggacgctgcgcttggggacgccggcgagactcgccaggagccaagaggaaacaggaatcattcaaactggattttaaaatcattgcaaatcagtgatggatcagaagttgcagagtgcaatcccgagtaaaagtcttcaaaaaattttgcttcaggtaacagaggaaggaaaattgatctaccaccttaaaaccctgatctagaaaaaatatatattcatgataggaagttataactaagaaaatttatttgcctcttaatgctcctgaatgaaaggaattatccctttgttctttgggaggacttgtgtatctgagattgttgtaataatcagtcattttattaaaaccttgacatgatcaccagggaggaaaaatagagcaatagtcaaaacctgtgtgttagtccaagatgacttctgaagaaatgacagcttctgttctcatacctgtgactcagagaaaagtggtttctgcccagtcggctgcagatgaaagtagtgaaaaggtctcagacatcaatatttcaaaagcacatactgtcagacgaagtggggagacttctcataccatctcacaactgaacaaacttaaagaagaaccttctggaagcaacttgccaaagattctctcaatagcgagggagaaaatagtgagtgatgagaacagtaatgaaaaatgttgggagaaaatcatgccagattctgcgaaaaaccttaacattaactgcaacaacatattgagaaaccatcagcatggccttcctcagagacaattttatgaaatgtacaactctgttgctgaggaagacttgtgtttagaaactggaattccttctccactggaaagaaaggtgttccctggaattcaactggaactagacagaccttccatgggcattagtcctttaggaaatcagtcagtgatcatagagacaggcagagcacaccctgacagcagaagggcagtatttcattttcattatgaagttgacagaagaatgtcagacactttctgtaccctatcagaaaacttaattttagacgattgtggaaattgtgtaccactacctgggggtgaggagaagcaaaagaaaaactatgtggcatatacctgtaaactgatggaattggccaaaaattgtgataataagaatgagcagctgcagtgtgatcattgtgacaccttgaatgataaatacttttgctttgaaggctcttgtgagaaggttgacatggtatattcaggtgatagcttttgtaggaaagactttactgacagtcaagctgccaagacctttttgagccattttgaggacttccctgataattgtgatgatgtagaagaagacgcttttaaaagcaaaaaggagcgatccactttgttagtcaggagattctgtaaaaatgacagagaagttaagaaatctgtgtatactggaacaagagcaattgtgagaactctgccttctggccacattgggctgactgcatggagttacatagatcagaagagaaatggtcccttactgccttgtgggagagtaatggaacccccgtcaacagtggagataaggcaagatgggagccaacgtctgtcagaagcccagtggtatcctatctacaatgcagtgagaagagaagaaacagaaaatacagttggatctctactccatttcctcaccaagctcccagcctccgagacagcccatggaaggataagcgttggtccatgcttaaagcaatgtgtccgagacactgtatgtgagtatcgcgccaccctccaaaggacttcaatatcgcagtacatcaccggttctctcctagaagcaaccacgtctttgggagcaagaagtggccttctcagtacttttggaggatccactggacgaatgatgctgaaagaacgccagccaggcccctctgtggccaattccaatgccctcccttcaagttcagctgggatcagcaaggagctgatcgatctgcagcctctcatccagttcccagaggaagtcgccagcatcctgatggagcaagagcagactatttaccgcagggtcttgccagtcgactacctttgcttcttaacacgggacttgggcactcctgaatgccagagctccttgccctgcctcaaagcatccatctcagcgtcgattcttaccactcagaatggagagcacaatgcccttgaagatctggtgatgaggtttaatgaggtgagctcctgggtgacatggctgatcctcacggcaggctccatggaggagaagcgagaagtcttttcatatttggtgcatgtggccaaatgctgctggaacatgggcaactacaacgctgtcatggagttcttggctggcctcaggtcaagaaaagttttaaaaatgtggcagttcatggaccagtctgatattgagaccatgaggagcctgaaggatgctatggcccagcatgagtcctcttgtgagtacagaaaggtggtgacacgtgccctgcacatccctggctgtaaggtggttccattctgtggggtgtttctgaaggagctctgtgaagtgcttgacggcgcctccggtctcatgaagctttgcccgcggtacaattcccaagaagaaactttagagtttgtagcagattacagtggacaagataatttcttacaacgagtgggacaaaatggcttaaagaattcggagaaggagtccactgtcaacagcatctttcaggtcatccggagctgcaatcgaagtctggagacagacgaggaggacagccccagtgaaggaaacagctccaggaaaagctccttgaaggataaaagccgatggcagtttataattggagatttgttggattcagacaatgacatctttgagcaatccaaagaatacgactctcatggttcagaggactcacagaaggccttcgaccatgggacggagctcatcccttggtacgtgctgtccatccaagccgatgtgcaccagttcctgctgcagggggccacggtcatccactacgaccaggacacacacctctctgcccgctgcttcctccagcttcagcccgacaatagcaccttgacctgggtaaagcccacaactgcctccccagccagcagtaaagcaaaacttggtgtacttaataacacagctgagcctggaaaattcccactactgggtaatgctggattaagtagcctgacggaaggggtcttggatctttttgcagtgaaggctgtatacatgggccaccctggcattgatatacacactgtgtgtgttcagaacaaactgggtagcatgttcctgtcagagactggtgtgacattgctctatgggcttcagaccacagacaacagattattgcacttcgtggcaccaaagcacacagctaaaatgctcttcagcggattattggaactcactagagctgtgagaaagatgaggaaattccctgaccaaagacagcagtggctgcggaaacagtacgtcagcctttatcaggaggatggacggtatgaaggcccaactttggctcacgctgtggagttgtttggtggcagacggtggagtgctcgaaaccccagccccggaacatcagcaaagaatgctgagaagcccaatatgcagagaaacaataccctgggcataagcactaccaagaaaaagaagaaaatcctcatgaggggtgagagtggagaggtaactgacgatgagatggcaacccgaaaggccaagatgcacaaagagtgtcgaagccggagtggttctgatcctcaagacattaatgaacaagaagaatcagaggtgaatgccatcgctaaccctccaaaccccctcccttccagaagagcccactctttgaccacagctgggtcccccaacttggctgccgggacgtcatctcccatcaggccagtgtcctcccctgtgctgtcttcttcaaacaagagcccatccagtgcttggagcagtagtagctggcacgggcggatcaaaggcggcatgaagggatttcagagcttcatggtttcagatagcaacatgagttttgttgaatttgttgagctgttcaaatcattcagtgtcaggagccgcaaggacctgaaggatctgtttgatgtctatgcagtgccctgcaaccgatctggctccgagtcagccccactctacaccaacctgacaattgatgaaaacaccagcgatcttcagcctgacctagatctgttgaccagaaatgtctcggatttggggttgttcattaagagtaaacagcagctatcggacaaccagaggcagatatctgatgccattgctgctgcaagcattgtgacaaatggcactgggattgagagcacatctctgggcatttttggggtgggcatacttcagctcaacgatttcctcgtgaattgccaaggagaacactgcacttatgatgaaatcctcagcatcatccagaagttcgagcctagcatcagtatgtgtcatcagggactaatgtcatttgaagggtttgccaggtttctgatggataaagaaaattttgcctcaaaaaatgatgagtcacaggagaacattaaagaactgcagctacccctctcatactattacatcgaatcttcgcacaatacctacctcacgggccatcagctcaaaggagaatcctcggtagaactctacagccaggtccttttgcaaggctgtcgaagtgtagaattggactgctgggacggagacgatgggatgcccatcatttatcatggacatacgctgacaaccaagatccccttcaaggaagtggttgaagccattgatcgcagtgccttcatcaactctgacctgccaatcatcatatcgattgagaaccactgttcattgcctcagcaacgaaaaatggcagaaattttcaagactgtgtttggagaaaagctggtgactaaattcttatttgagactgatttctcagatgatccaatgcttccttcacctgaccaactcagaaagaaagttcttcttaaaaacaagaagctaaaagcccatcagacgccagtggatatcttaaagcaaaaggctcatcagttagcatctatgcaagtgcaggcttataatggtgggaatgccaacccccgacctgccaataatgaggaagaggaagatgaggaggacgaatatgattatgactatgaatccctttctgatgacaacattctggaagacagacctgaaaataaatcatgtaatgacaagcttcagtttgaatataatgaagaaatcccaaagaggataaagaaagcagataactctgcttgcaacaaaggaaaggtttatgatatggaactgggagaagaattttatcttgatcagaataaaaaggaaagcagacagattgcaccagagctttctgaccttgtaatctattgtcaagcagtaaaatttccaggactgtcaactctaaatgcatctggctctagcagaggaaaagaaaggaaaagcaggaagtccatttttggcaacaatccgggcagaatgagcccaggggagacagcatcatttaacaaaacatctggaaaaagttcctgtgaaggcattcgacagacctgggaggaatcttcttcccctctcaacccaaccacgtccctcagtgctatcattagaactcccaaatgttatcatatctcgtcgctgaatgaaaatgccgccaaacgtctgtgtcgcaggtattctcagaaactgacccagcacaccgcctgtcagctgctgagaacttaccctgctgccacccgcatcgactcttccaacccgaaccccctcatgttctggctccatgggatacagcttgtggcactcaactaccagactgatgatctccctttacatttaaatgctgcaatgtttgaggcaaatggtggttgtggttatgtattgaaacctccagttctgtgggacaagaactgccccatgtatcagaagttttctccactagaaagagatctggacagcatggatcctgcagtctattctttaactattgtctctggtcagaatgtgtgccccagtaatagcatgggaagcccgtgcattgaagtcgacgtcctgggcatgcctctggacagctgccatttccgcacaaagcccatccatcgaaacaccctgaaccccatgtggaacgagcagtttctgttccacgttcacttcgaagatcttgtatttcttcgttttgcagttgtggaaaacaatagttcagcggtaactgctcagagaatcattccactgaaagctttaaaacgaggatatcgacatcttcagctgcgaaaccttcacaatgaagtcttggagatttctagtttattcattaacagcagaaggatggaagaaaattcctctggcaataccatgtcagcctcttcgatgtttaatacagaagaaagaaaatgtttgcagactcacagagtcacggtgcatggggtcccagggccagagccctttaccgttttcactattaatggaggcaccaaggcaaagcagcttctgcagcaaattctgacaaatgaacaagacatcaaacctgttaccacagactattttttgatggaagaaaaatattttatatctaaagaaaagaatgaatgtaggaaacaaccattccagagagccattggtccagaagaggagatcatgcaaattttaagcagctggtttccagaagagggatacatgggcaggattgtcttaaaaacccagcaggaaaacctagaagagaaaaacattgttcaagatgacaaagaggtgatcttgagctcagaggaggagagtttctttgtccaagtgcatgatgtttctccagagcaacctcgaacagtcatcaaagcaccccgcgtcagcactgcacaggatgtcattcagcagaccttatgcaaagccaaatattcctacagcatcctgagcaaccccaatccaagcgactatgtgcttttggaagaggtggtgaaagacactaccaacaagaagactaccacaccaaagtcctctcagcgggtccttctggatcaggagtgtgtgtttcaagcccaaagcaagtggaaaggtgcaggaaaattcatccttaagctaaaggagcaggtgcaggcatctcgagaagataaaaagaaaggcatttctttcgcaagtgaactcaagaagctcaccaagtcaactaaacagccccgaggacttacatcaccttctcagctcttgacctcagaaagtatccaaaccaaggaggagaaacctgtgggtggcttgtcctccagtgacacaatggattaccgacagtgactaagggcagcatgtttaacccaggtgaagatctttaagcaagaagttaaagagtgaacatggtggaaaaaatataattattttcatcagacttaaactggaaattgatgatttctgaactgaagccttcacacatgtgagatccatgctgaggagaagcaaaatggcacagggctagttgccaccaaccaatttactgatgaatgaagcccaggggactgccattttataaatgtcagcagttggaaaaatcgtcacgaattgacttagagcaagggtcagcaagcttgtctgtaaagggccaaacagtaaatattttagggctgggggccataaaatatgttgcaaccacccaattctgccattgtagtgcaaaagcagccatagacaacacatacatgaacgaacgtggctgtattccaataaaactttatttatggacactgaaa

SEQ ID NO: 165788 - DNA, 6514 bp, Homo sapiens
  Payload ID: 12640
  Gene Symbol: PLCE1
  Gene Name: phospholipase C, epsilon 1
  Uniprot ID: Q9P212
  ENST ID: ENST00000371375
  CDS Start-End: 1-5985
atggtttcagaaggaagtgcagcaggaagagactttgcaggaatggaagaggtgaggcagctccacgtgagattctgcaaagggattaagatttggcaccaggcttggtttctgtgcagcctcttaggcagagagccccaggagagggaagcaggctgtcagctgtggctttgcacgctctcagctgtcttgaaggttggttggctcttcccgctctctgaggtacccaattttaccttgttaaaggatggatgtggatgctggaggcttaaagaagaccagatctacaatgcagtgagaagagaagaaacagaaaatacagttggatctctactccatttcctcaccaagctcccagcctccgagacagcccatggaaggataagcgttggtccatgcttaaagcaatgtgtccgagacactgtatgtgagtatcgcgccaccctccaaaggacttcaatatcgcagtacatcaccggttctctcctagaagcaaccacgtctttgggagcaagaagtggccttctcagtacttttggaggatccactggacgaatgatgctgaaagaacgccagccaggcccctctgtggccaattccaatgccctcccttcaagttcagctgggatcagcaaggagctgatcgatctgcagcctctcatccagttcccagaggaagtcgccagcatcctgatggagcaagagcagactatttaccgcagggtcttgccagtcgactacctttgcttcttaacacgggacttgggcactcctgaatgccagagctccttgccctgcctcaaagcatccatctcagcgtcgattcttaccactcagaatggagagcacaatgcccttgaagatctggtgatgaggtttaatgaggtgagctcctgggtgacatggctgatcctcacggcaggctccatggaggagaagcgagaagtcttttcatatttggtgcatgtggccaaatgctgctggaacatgggcaactacaacgctgtcatggagttcttggctggcctcaggtcaagaaaagttttaaaaatgtggcagttcatggaccagtctgatattgagaccatgaggagcctgaaggatgctatggcccagcatgagtcctcttgtgagtacagaaaggtggtgacacgtgccctgcacatccctggctgtaaggtggttccattctgtggggtgtttctgaaggagctctgtgaagtgcttgacggcgcctccggtctcatgaagctttgcccgcggtacaattcccaagaagaaactttagagtttgtagcagattacagtggacaagataatttcttacaacgagtgggacaaaatggcttaaagaattcggagaaggagtccactgtcaacagcatctttcaggtcatccggagctgcaatcgaagtctggagacagacgaggaggacagccccagtgaaggaaacagctccaggaaaagctccttgaaggataaaagccgatggcagtttataattggagatttgttggattcagacaatgacatctttgagcaatccaaagaatacgactctcatggttcagaggactcacagaaggccttcgaccatgggacggagctcatcccttggtacgtgctgtccatccaagccgatgtgcaccagttcctgctgcagggggccacggtcatccactacgaccaggacacacacctctctgcccgctgcttcctccagcttcagcccgacaatagcaccttgacctgggtaaagcccacaactgcctccccagccagcagtaaagcaaaacttggtgtacttaataacacagctgagcctggaaaattcccactactgggtaatgctggattaagtagcctgacggaaggggtcttggatctttttgcagtgaaggctgtatacatgggccaccctggcattgatatacacactgtgtgtgttcagaacaaactgggtagcatgttcctgtcagagactggtgtgacattgctctatgggcttcagaccacagacaacagattattgcacttcgtggcaccaaagcacacagctaaaatgctcttcagcggattattggaactcactagagctgtgagaaagatgaggaaattccctgaccaaagacagcagtggctgcggaaacagtacgtcagcctttatcaggaggatggacggtatgaaggcccaactttggctcacgctgtggagttgtttggtggcagacggtggagtgctcgaaaccccagccccggaacatcagcaaagaatgctgagaagcccaatatgcagagaaacaataccctgggcataagcactaccaagaaaaagaagaaaatcctcatgaggggtgagagtggagaggtaactgacgatgagatggcaacccgaaaggccaagatgcacaaagagtgtcgaagccggagtggttctgatcctcaagacattaatgaacaagaagaatcagaggtgaatgccatcgctaaccctccaaaccccctcccttccagaagagcccactctttgaccacagctgggtcccccaacttggctgccgggacgtcatctcccatcaggccagtgtcctcccctgtgctgtcttcttcaaacaagagcccatccagtgcttggagcagtagtagctggcacgggcggatcaaaggcggcatgaagggatttcagagcttcatggtttcagatagcaacatgagttttgttgaatttgttgagctgttcaaatcattcagtgtcaggagccgcaaggacctgaaggatctgtttgatgtctatgcagtgccctgcaaccgatctggctccgagtcagccccactctacaccaacctgacaattgatgaaaacaccagcgatcttcagcctgacctagatctgttgaccagaaatgtctcggatttggggttgttcattaagagtaaacagcagctatcggacaaccagaggcagatatctgatgccattgctgctgcaagcattgtgacaaatggcactgggattgagagcacatctctgggcatttttggggtgggcatacttcagctcaacgatttcctcgtgaattgccaaggagaacactgcacttatgatgaaatcctcagcatcatccagaagttcgagcctagcatcagtatgtgtcatcagggactaatgtcatttgaagggtttgccaggtttctgatggataaagaaaattttgcctcaaaaaatgatgagtcacaggagaacattaaagaactgcagctacccctctcatactattacatcgaatcttcgcacaatacctacctcacgggccatcagctcaaaggagaatcctcggtagaactctacagccaggtccttttgcaaggctgtcgaagtgtagaattggactgctgggacggagacgatgggatgcccatcatttatcatggacatacgctgacaaccaagatccccttcaaggaagtggttgaagccattgatcgcagtgccttcatcaactctgacctgccaatcatcatatcgattgagaaccactgttcattgcctcagcaacgaaaaatggcagaaattttcaagactgtgtttggagaaaagctggtgactaaattcttatttgagactgatttctcagatgatccaatgcttccttcacctgaccaactcagaaagaaagttcttcttaaaaacaagaagctaaaagcccatcagacgccagtggatatcttaaagcaaaaggctcatcagttagcatctatgcaagtgcaggcttataatggtgggaatgccaacccccgacctgccaataatgaggaagaggaagatgaggaggacgaatatgattatgactatgaatccctttctgatgacaacattctggaagacagacctgaaaataaatcatgtaatgacaagcttcagtttgaatataatgaagaaatcccaaagaggataaagaaagcagataactctgcttgcaacaaaggaaaggtttatgatatggaactgggagaagaattttatcttgatcagaataaaaaggaaagcagacagattgcaccagagctttctgaccttgtaatctattgtcaagcagtaaaatttccaggactgtcaactctaaatgcatctggctctagcagaggaaaagaaaggaaaagcaggaagtccatttttggcaacaatccgggcagaatgagcccaggggagacagcatcatttaacaaaacatctggaaaaagttcctgtgaaggcattcgacagacctgggaggaatcttcttcccctctcaacccaaccacgtccctcagtgctatcattagaactcccaaatgttatcatatctcgtcgctgaatgaaaatgccgccaaacgtctgtgtcgcaggtattctcagaaactgacccagcacaccgcctgtcagctgctgagaacttaccctgctgccacccgcatcgactcttccaacccgaaccccctcatgttctggctccatgggatacagcttgtggcactcaactaccagactgatgatctccctttacatttaaatgctgcaatgtttgaggcaaatggtggttgtggttatgtattgaaacctccagttctgtgggacaagaactgccccatgtatcagaagttttctccactagaaagagatctggacagcatggatcctgcagtctattctttaactattgtctctggtcagaatgtgtgccccagtaatagcatgggaagcccgtgcattgaagtcgacgtcctgggcatgcctctggacagctgccatttccgcacaaagcccatccatcgaaacaccctgaaccccatgtggaacgagcagtttctgttccacgttcacttcgaagatcttgtatttcttcgttttgcagttgtggaaaacaatagttcagcggtaactgctcagagaatcattccactgaaagctttaaaacgaggatatcgacatcttcagctgcgaaaccttcacaatgaagtcttggagatttctagtttattcattaacagcagaaggatggaagaaaattcctctggcaataccatgtcagcctcttcgatgtttaatacagaagaaagaaaatgtttgcagactcacagagtcacggtgcatggggtcccagggccagagccctttaccgttttcactattaatggaggcaccaaggcaaagcagcttctgcagcaaattctgacaaatgaacaagacatcaaacctgttaccacagactattttttgatggaagaaaaatattttatatctaaagaaaagaatgaatgtaggaaacaaccattccagagagccattggtccagaagaggagatcatgcaaattttaagcagctggtttccagaagagggatacatgggcaggattgtcttaaaaacccagcaggaaaacctagaagagaaaaacattgttcaagatgacaaagaggtgatcttgagctcagaggaggagagtttctttgtccaagtgcatgatgtttctccagagcaacctcgaacagtcatcaaagcaccccgcgtcagcactgcacaggatgtcattcagcagaccttatgcaaagccaaatattcctacagcatcctgagcaaccccaatccaagcgactatgtgcttttggaagaggtggtgaaagacactaccaacaagaagactaccacaccaaagtcctctcagcgggtccttctggatcaggagtgtgtgtttcaagcccaaagcaagtggaaaggtgcaggaaaattcatccttaagctaaaggagcaggtgcaggcatctcgagaagataaaaagaaaggcatttctttcgcaagtgaactcaagaagctcaccaagtcaactaaacagccccgaggacttacatcaccttctcagctcttgacctcagaaagtatccaaaccaaggaggagaaacctgtgggtggcttgtcctccagtgacacaatggattaccgacagtgactaagggcagcatgtttaacccaggtatagtaagtcattgcaccatcctggaacagggcttaacttaaactactttgtaaggaaggcataattagtacaatgtcttttatcttttccaacaggaggatgtcccttgaaggcaggtaggaatgggaccttaaaacaggaaaagggctctgaagatatgtgtaacatgatatgctattgaacaccgcctataaagaaaaagggaaagaggctgggcgtggtggcgcatgcctgtaatcccagcactttgggaggccaaggcaggcagatcacctgaggtcagttcaagaccagcctgaccaacatggagaaaccccgtctctactaaaaatacaaaattagctgggcatggtggtgcatgcctataatcccagctactggggaggctgaggcaggagaatcacttgaacttggaaggcagaggttgcagtgagctgagatcacaccattgcactccagcctgggcaatgagagtgaaaactccgtctcaaaaaaaaaaaaa

SEQ ID NO: 165789 - DNA, 12024 bp, Homo sapiens
  Payload ID: 12640
  Gene Symbol: PLCE1
  Gene Name: phospholipase C, epsilon 1
  Uniprot ID: Q9P212
  ENST ID: ENST00000371380
  CDS Start-End: 236-7144
atctaccaccttaaaaccctgatctagaaaaaatatatattcatgataggaagttataactaagaaaatttatttgcctcttaatgctcctgaatgaaaggaattatccctttgttctttgggaggacttgtgtatctgagattgttgtaataatcagtcattttattaaaaccttgacatgatcaccagggaggaaaaatagagcaatagtcaaaacctgtgtgttagtccaagatgacttctgaagaaatgacagcttctgttctcatacctgtgactcagagaaaagtggtttctgcccagtcggctgcagatgaaagtagtgaaaaggtctcagacatcaatatttcaaaagcacatactgtcagacgaagtggggagacttctcataccatctcacaactgaacaaacttaaagaagaaccttctggaagcaacttgccaaagattctctcaatagcgagggagaaaatagtgagtgatgagaacagtaatgaaaaatgttgggagaaaatcatgccagattctgcgaaaaaccttaacattaactgcaacaacatattgagaaaccatcagcatggccttcctcagagacaattttatgaaatgtacaactctgttgctgaggaagacttgtgtttagaaactggaattccttctccactggaaagaaaggtgttccctggaattcaactggaactagacagaccttccatgggcattagtcctttaggaaatcagtcagtgatcatagagacaggcagagcacaccctgacagcagaagggcagtatttcattttcattatgaagttgacagaagaatgtcagacactttctgtaccctatcagaaaacttaattttagacgattgtggaaattgtgtaccactacctgggggtgaggagaagcaaaagaaaaactatgtggcatatacctgtaaactgatggaattggccaaaaattgtgataataagaatgagcagctgcagtgtgatcattgtgacaccttgaatgataaatacttttgctttgaaggctcttgtgagaaggttgacatggtatattcaggtgatagcttttgtaggaaagactttactgacagtcaagctgccaagacctttttgagccattttgaggacttccctgataattgtgatgatgtagaagaagacgcttttaaaagcaaaaaggagcgatccactttgttagtcaggagattctgtaaaaatgacagagaagttaagaaatctgtgtatactggaacaagagcaattgtgagaactctgccttctggccacattgggctgactgcatggagttacatagatcagaagagaaatggtcccttactgccttgtgggagagtaatggaacccccgtcaacagtggagataaggcaagatgggagccaacgtctgtcagaagcccagtggtatcctatctacaatgcagtgagaagagaagaaacagaaaatacagttggatctctactccatttcctcaccaagctcccagcctccgagacagcccatggaaggataagcgttggtccatgcttaaagcaatgtgtccgagacactgtatgtgagtatcgcgccaccctccaaaggacttcaatatcgcagtacatcaccggttctctcctagaagcaaccacgtctttgggagcaagaagtggccttctcagtacttttggaggatccactggacgaatgatgctgaaagaacgccagccaggcccctctgtggccaattccaatgccctcccttcaagttcagctgggatcagcaaggagctgatcgatctgcagcctctcatccagttcccagaggaagtcgccagcatcctgatggagcaagagcagactatttaccgcagggtcttgccagtcgactacctttgcttcttaacacgggacttgggcactcctgaatgccagagctccttgccctgcctcaaagcatccatctcagcgtcgattcttaccactcagaatggagagcacaatgcccttgaagatctggtgatgaggtttaatgaggtgagctcctgggtgacatggctgatcctcacggcaggctccatggaggagaagcgagaagtcttttcatatttggtgcatgtggccaaatgctgctggaacatgggcaactacaacgctgtcatggagttcttggctggcctcaggtcaagaaaagttttaaaaatgtggcagttcatggaccagtctgatattgagaccatgaggagcctgaaggatgctatggcccagcatgagtcctcttgtgagtacagaaaggtggtgacacgtgccctgcacatccctggctgtaaggtggttccattctgtggggtgtttctgaaggagctctgtgaagtgcttgacggcgcctccggtctcatgaagctttgcccgcggtacaattcccaagaagaaactttagagtttgtagcagattacagtggacaagataatttcttacaacgagtgggacaaaatggcttaaagaattcggagaaggagtccactgtcaacagcatctttcaggtcatccggagctgcaatcgaagtctggagacagacgaggaggacagccccagtgaaggaaacagctccaggaaaagctccttgaaggataaaagccgatggcagtttataattggagatttgttggattcagacaatgacatctttgagcaatccaaagaatacgactctcatggttcagaggactcacagaaggccttcgaccatgggacggagctcatcccttggtacgtgctgtccatccaagccgatgtgcaccagttcctgctgcagggggccacggtcatccactacgaccaggacacacacctctctgcccgctgcttcctccagcttcagcccgacaatagcaccttgacctgggtaaagcccacaactgcctccccagccagcagtaaagcaaaacttggtgtacttaataacacagctgagcctggaaaattcccactactgggtaatgctggattaagtagcctgacggaaggggtcttggatctttttgcagtgaaggctgtatacatgggccaccctggcattgatatacacactgtgtgtgttcagaacaaactgggtagcatgttcctgtcagagactggtgtgacattgctctatgggcttcagaccacagacaacagattattgcacttcgtggcaccaaagcacacagctaaaatgctcttcagcggattattggaactcactagagctgtgagaaagatgaggaaattccctgaccaaagacagcagtggctgcggaaacagtacgtcagcctttatcaggaggatggacggtatgaaggcccaactttggctcacgctgtggagttgtttggtggcagacggtggagtgctcgaaaccccagccccggaacatcagcaaagaatgctgagaagcccaatatgcagagaaacaataccctgggcataagcactaccaagaaaaagaagaaaatcctcatgaggggtgagagtggagaggtaactgacgatgagatggcaacccgaaaggccaagatgcacaaagagtgtcgaagccggagtggttctgatcctcaagacattaatgaacaagaagaatcagaggtgaatgccatcgctaaccctccaaaccccctcccttccagaagagcccactctttgaccacagctgggtcccccaacttggctgccgggacgtcatctcccatcaggccagtgtcctcccctgtgctgtcttcttcaaacaagagcccatccagtgcttggagcagtagtagctggcacgggcggatcaaaggcggcatgaagggatttcagagcttcatggtttcagatagcaacatgagttttgttgaatttgttgagctgttcaaatcattcagtgtcaggagccgcaaggacctgaaggatctgtttgatgtctatgcagtgccctgcaaccgatctggctccgagtcagccccactctacaccaacctgacaattgatgaaaacaccagcgatcttcagcctgacctagatctgttgaccagaaatgtctcggatttggggttgttcattaagagtaaacagcagctatcggacaaccagaggcagatatctgatgccattgctgctgcaagcattgtgacaaatggcactgggattgagagcacatctctgggcatttttggggtgggcatacttcagctcaacgatttcctcgtgaattgccaaggagaacactgcacttatgatgaaatcctcagcatcatccagaagttcgagcctagcatcagtatgtgtcatcagggactaatgtcatttgaagggtttgccaggtttctgatggataaagaaaattttgcctcaaaaaatgatgagtcacaggagaacattaaagaactgcagctacccctctcatactattacatcgaatcttcgcacaatacctacctcacgggccatcagctcaaaggagaatcctcggtagaactctacagccaggtccttttgcaaggctgtcgaagtgtagaattggactgctgggacggagacgatgggatgcccatcatttatcatggacatacgctgacaaccaagatccccttcaaggaagtggttgaagccattgatcgcagtgccttcatcaactctgacctgccaatcatcatatcgattgagaaccactgttcattgcctcagcaacgaaaaatggcagaaattttcaagactgtgtttggagaaaagctggtgactaaattcttatttgagactgatttctcagatgatccaatgcttccttcacctgaccaactcagaaagaaagttcttcttaaaaacaagaagctaaaagcccatcagacgccagtggatatcttaaagcaaaaggctcatcagttagcatctatgcaagtgcaggcttataatggtgggaatgccaacccccgacctgccaataatgaggaagaggaagatgaggaggacgaatatgattatgactatgaatccctttctgatgacaacattctggaagacagacctgaaaataaatcatgtaatgacaagcttcagtttgaatataatgaagaaatcccaaagaggataaagaaagcagataactctgcttgcaacaaaggaaaggtttatgatatggaactgggagaagaattttatcttgatcagaataaaaaggaaagcagacagattgcaccagagctttctgaccttgtaatctattgtcaagcagtaaaatttccaggactgtcaactctaaatgcatctggctctagcagaggaaaagaaaggaaaagcaggaagtccatttttggcaacaatccgggcagaatgagcccaggggagacagcatcatttaacaaaacatctggaaaaagttcctgtgaaggcattcgacagacctgggaggaatcttcttcccctctcaacccaaccacgtccctcagtgctatcattagaactcccaaatgttatcatatctcgtcgctgaatgaaaatgccgccaaacgtctgtgtcgcaggtattctcagaaactgacccagcacaccgcctgtcagctgctgagaacttaccctgctgccacccgcatcgactcttccaacccgaaccccctcatgttctggctccatgggatacagcttgtggcactcaactaccagactgatgatctccctttacatttaaatgctgcaatgtttgaggcaaatggtggttgtggttatgtattgaaacctccagttctgtgggacaagaactgccccatgtatcagaagttttctccactagaaagagatctggacagcatggatcctgcagtctattctttaactattgtctctggtcagaatgtgtgccccagtaatagcatgggaagcccgtgcattgaagtcgacgtcctgggcatgcctctggacagctgccatttccgcacaaagcccatccatcgaaacaccctgaaccccatgtggaacgagcagtttctgttccacgttcacttcgaagatcttgtatttcttcgttttgcagttgtggaaaacaatagttcagcggtaactgctcagagaatcattccactgaaagctttaaaacgaggatatcgacatcttcagctgcgaaaccttcacaatgaagtcttggagatttctagtttattcattaacagcagaaggatggaagaaaattcctctggcaataccatgtcagcctcttcgatgtttaatacagaagaaagaaaatgtttgcagactcacagagtcacggtgcatggggtcccagggccagagccctttaccgttttcactattaatggaggcaccaaggcaaagcagcttctgcagcaaattctgacaaatgaacaagacatcaaacctgttaccacagactattttttgatggaagaaaaatattttatatctaaagaaaagaatgaatgtaggaaacaaccattccagagagccattggtccagaagaggagatcatgcaaattttaagcagctggtttccagaagagggatacatgggcaggattgtcttaaaaacccagcaggaaaacctagaagagaaaaacattgttcaagatgacaaagaggtgatcttgagctcagaggaggagagtttctttgtccaagtgcatgatgtttctccagagcaacctcgaacagtcatcaaagcaccccgcgtcagcactgcacaggatgtcattcagcagaccttatgcaaagccaaatattcctacagcatcctgagcaaccccaatccaagcgactatgtgcttttggaagaggtggtgaaagacactaccaacaagaagactaccacaccaaagtcctctcagcgggtccttctggatcaggagtgtgtgtttcaagcccaaagcaagtggaaaggtgcaggaaaattcatccttaagctaaaggagcaggtgcaggcatctcgagaagataaaaagaaaggcatttctttcgcaagtgaactcaagaagctcaccaagtcaactaaacagccccgaggacttacatcaccttctcagctcttgacctcagaaagtatccaaaccaaggaggagaaacctgtgggtggcttgtcctccagtgacacaatggattaccgacagtgactaagggcagcatgtttaacccaggtgaagatctttaagcaagaagttaaagagtgaacatggtggaaaaaatataattattttcatcagacttaaactggaaattgatgatttctgaactgaagccttcacacatgtgagatccatgctgaggagaagcaaaatggcacagggctagttgccaccaaccaatttactgatgaatgaagcccaggggactgccattttataaatgtcagcagttggaaaaatcgtcacgaattgacttagagcaagggtcagcaagcttgtctgtaaagggccaaacagtaaatattttagggctgggggccataaaatatgttgcaaccacccaattctgccattgtagtgcaaaagcagccatagacaacacatacatgaacgaacgtggctgtattccaataaaactttatttatggacactgaaattggaatttcatatatttttcacatgtcacaaatactcttgttttgactttttttcaaccatttaaaaacttaaaaactattcttaattcaggggccatacaaaaacaggtggcaggctagatttggcccaaggaccttaatttgccaacacaactaagagaagagaactgggaacaaggagcacaaagatctgaaaacaggaaaggaagtttagccatacattttatggccgagaattagaagcttagaattagaagctttggggcatttcaagtgtaaatatgtcctataacataagagtcattaaaattcaatttagttcctgtattgtgtaccacagtgcactcctctttaggatttttttacatatagaaataatattgggttttttttaaggttattgcctattcagttaatagggttgctttaaaaaaggttattgcttaatcatagattagattactcatttttggttttcaaaatgaatttagaatgacgtataatttaatatctactgaattgcaatgtcttaacaagaaacctaacaattttttaaagcaaaagtagattgagttggcgtttaaatttattttgcaaggtttgtactgacactatacttatatatttattatacatcgctctcttgatattgccatggattagaagcattagttctcagtacttgaagacaaacttctaaaaagaaaatatatgctctgaacatctgaaatgggctagactttcaagtaaaattgcttcatttctcattaactgaagagctattgatccaagtcatacttgccatttaatgtaaattatttttaaactttgctgtacaaaaccattaagtgtaaaggattcttcatattcttagtatgaagcaaattatgaattttaaaaatgaaatatgtattcctctaaaacccaaacttttatctttccattggtatctttgaattttaagacacttttcttcaaattacaaaacactaaaactcactcctaaacttcactttgagaaacttttttaaccaattataaaaataaaaccatccccatgtgtttcttgcatattctaaaaacagaagtgttaaaaatacaccacacaggctgggcagagtggctcacgcctgtaactccagcactttgggaggccaagatgggcggatcaggacagagaatgaggccatcctggccaacatggtgaaacccaatctctactaaaagtacaaaaattagctgagcgtggtggcacgtgcctgtaatcccagctactcgggaggctgaggcaggagaatcacttgaacctgggaggtggaggctgcagtgagccaagatcgcaccaccacgctccagcctggtgacagagcgagactccgtctcaaaaaaaaaaaaaaaaaaaaaaaaaaaaaaaaaaacaccatacagctttcatgtcattgaaagttcttactgggtcaaagccttaaggctagaactaccattttcttgtcaacagaattcaggctattccagtttgatgtaatctatacagtagtacagttttaagtcaaatattcattctaacaaatgcacaatgctgctccattttaaaaatattccggaaacactttatcaagcctctataagtgaacatgccaaacagtttgccctaccacgtgttgaaaactgagttgctggtctaagtggctagaggccaaatgaaaactgtgcagagtaacaagatgaaaagactcgtctctttaggtttatcacatttgattctgatgctaagcgctgccccactcctcctccatgacctttaacacaggtgtatgttttacaacataaatctgagactgaagttgagaccaggttgtttagcaagtgagagaatccagcctactgcctaggttgcatcccaatttagttgtttatcacattttgaggtgaaagtacatacttcattgtatttgagtctttgggattacagaaagaacacattgtttcaaaatgtaaagagttggctgggcacagtggctcatgcctgtaatcccaacactctgggaggctgaggtgggtggatcacctgaggtctggagttcgaggccaacatggtgaaacccgtctctactaaaaatacaaaaattagctgggtactaaaaatacaaaaattagtggtggtgggcacctgtaaatcccagctattggggaggctgaggcaggagagaattgcctgaactcaagacgcagaggttgcagtgagtggagactgtgccactgcactccagcctgggtacaagagtgagactccatctcaaaaaaaaaaaaaaaaagtaaagagtctagtctactattatacacaaatggccagcacaatctgatgttggctgaaaatatttaagttttatttaaagctttctgaattaaacagctatattatgccaagtgaaagaaattatcctaaatagccactatgactatacccattaccatttcacactttttaggccaccagaaatctgggtagcaaactcttctcattaaagttgatgtggacaagaatctaaatatgcaagttggggtcattacaaaattttaagaagcatcactgaaagtgaagagaaaggagcatgaattctgtcactctattcagtgatgccaaatctgtaggaatgatcctatctgggtagaaagtgccctttgaggggtaaagcttcttttcatgtcatcattagcaagtaaaagttatttacaaattctccagttgggagtcaatatgaagtctagactcaacaaaagttgagttacaagtgacttgtttttaatcaaacttgctttcttttatgggaggcttttatgcctcccatctcaatacctctggagacactggaagctcattaatgaaagtgggccctctatgatatgtatcaatttaccttttgctaactacatcgtccccttcctttcttctctcctcttccaatatctctatagacttctgtcctctgcccagagacccacaggccttgcttaattctggaaagttatcagggcttgcttactggcccaataaaattgaattaactctaaaacacaaaactccacatctatgctcccatgctagtaaagaagagtaggattttcctggctggtgtctttgatcttacattggcagcctgcagggaaagtgctctcatggtgaaagtctctgaccccttttcagttgcttatatatcagcagtgaggccagaaaagatatacctgggaccccaaaaaagttagagagaaaagggagattgtctcttatacagagtctagacttgggtcaatattccccatgatccattgttaataatttatgtgttctctgccatccttatgtagcagcttcctaaaagcaatccttggctgatggctatggattctgacataggaatacctgaaatgagtccctttgaaacacatactgagtctctatgattaccaagttattcttttttttttttttttttttgaggcaaagtctcactctgttgcccagcctggagtgcagtggtacgatctcgactcaccacaacctccacctcccaggttcaagtgattctcctgcctcagcctcccaagtagctgggactacaggtgtgcgccatgtccgtctaattttttttattttcagtagagacgggggtttcactatgttggtaaggctggtctcgaactcctgacctcgtgatccacccgcctcagcctcccaaagtgctgggattacaggcgtgagccaccacacctggcctacctactcttatacatctcttagattcaaaacatactatgcacaagcctgtcaccaaacagatctctgaaaccttccctattgcagatgacataggtctctaaacttttgacacaagtaattctaacactgaattgggtactgtcgcatttttcaaaagcgttatgtggatgatttgactcagcatggaagactgaggttgtcttacacccattatttcccaccccactcttaagtgccagcatagtgctaaacacacagtaggtgctcattatttgtctagttaaaaaacaaattaaggctgtagcttaatatagcctcaggatatgtgtgtgcctgtgtgtgtgtgtgtgtgtgtgtgtgtgtgtgtgtgtgtgtgtttaaacataagcttacatataagcgtatgtaagttaatgcacaaatatatttcctcaaattcacataggatactcaaatatagatgtataattttgtagtcccactgtgattctccatatgtataacaagaaaattaaaggcataatacagctgtgaaatagctgatgagtttctattttaagctgatttttcaccagaagtatagtttctgctgccaaagtaaagtataaatgtatttgtatatgtgtggaaaataaataatttgtgacatgta

SEQ ID NO: 165790 - DNA, 6500 bp, Homo sapiens
  Payload ID: 12640
  Gene Symbol: PLCE1
  Gene Name: phospholipase C, epsilon 1
  Uniprot ID: Q9P212
  ENST ID: ENST00000371385
  CDS Start-End: 70-6054
accctgcacgttgcaggatttttcactgtgatttgagattgggcttcattcagtgggtcgtggtgattaatggtttcagaaggaagtgcagcaggaagagactttgcaggaatggaagaggtgaggcagctccacgtgagattctgcaaagggattaagatttggcaccaggcttggtttctgtgcagcctcttaggcagagagccccaggagagggaagcaggctgtcagctgtggctttgcacgctctcagctgtcttgaaggttggttggctcttcccgctctctgaggtacccaattttaccttgttaaaggatggatgtggatgctggaggcttaaagaagaccagatctacaatgcagtgagaagagaagaaacagaaaatacagttggatctctactccatttcctcaccaagctcccagcctccgagacagcccatggaaggataagcgttggtccatgcttaaagcaatgtgtccgagacactgtatgtgagtatcgcgccaccctccaaaggacttcaatatcgcagtacatcaccggttctctcctagaagcaaccacgtctttgggagcaagaagtggccttctcagtacttttggaggatccactggacgaatgatgctgaaagaacgccagccaggcccctctgtggccaattccaatgccctcccttcaagttcagctgggatcagcaaggagctgatcgatctgcagcctctcatccagttcccagaggaagtcgccagcatcctgatggagcaagagcagactatttaccgcagggtcttgccagtcgactacctttgcttcttaacacgggacttgggcactcctgaatgccagagctccttgccctgcctcaaagcatccatctcagcgtcgattcttaccactcagaatggagagcacaatgcccttgaagatctggtgatgaggtttaatgaggtgagctcctgggtgacatggctgatcctcacggcaggctccatggaggagaagcgagaagtcttttcatatttggtgcatgtggccaaatgctgctggaacatgggcaactacaacgctgtcatggagttcttggctggcctcaggtcaagaaaagttttaaaaatgtggcagttcatggaccagtctgatattgagaccatgaggagcctgaaggatgctatggcccagcatgagtcctcttgtgagtacagaaaggtggtgacacgtgccctgcacatccctggctgtaaggtggttccattctgtggggtgtttctgaaggagctctgtgaagtgcttgacggcgcctccggtctcatgaagctttgcccgcggtacaattcccaagaagaaactttagagtttgtagcagattacagtggacaagataatttcttacaacgagtgggacaaaatggcttaaagaattcggagaaggagtccactgtcaacagcatctttcaggtcatccggagctgcaatcgaagtctggagacagacgaggaggacagccccagtgaaggaaacagctccaggaaaagctccttgaaggataaaagccgatggcagtttataattggagatttgttggattcagacaatgacatctttgagcaatccaaagaatacgactctcatggttcagaggactcacagaaggccttcgaccatgggacggagctcatcccttggtacgtgctgtccatccaagccgatgtgcaccagttcctgctgcagggggccacggtcatccactacgaccaggacacacacctctctgcccgctgcttcctccagcttcagcccgacaatagcaccttgacctgggtaaagcccacaactgcctccccagccagcagtaaagcaaaacttggtgtacttaataacacagctgagcctggaaaattcccactactgggtaatgctggattaagtagcctgacggaaggggtcttggatctttttgcagtgaaggctgtatacatgggccaccctggcattgatatacacactgtgtgtgttcagaacaaactgggtagcatgttcctgtcagagactggtgtgacattgctctatgggcttcagaccacagacaacagattattgcacttcgtggcaccaaagcacacagctaaaatgctcttcagcggattattggaactcactagagctgtgagaaagatgaggaaattccctgaccaaagacagcagtggctgcggaaacagtacgtcagcctttatcaggaggatggacggtatgaaggcccaactttggctcacgctgtggagttgtttggtggcagacggtggagtgctcgaaaccccagccccggaacatcagcaaagaatgctgagaagcccaatatgcagagaaacaataccctgggcataagcactaccaagaaaaagaagaaaatcctcatgaggggtgagagtggagaggtaactgacgatgagatggcaacccgaaaggccaagatgcacaaagagtgtcgaagccggagtggttctgatcctcaagacattaatgaacaagaagaatcagaggtgaatgccatcgctaaccctccaaaccccctcccttccagaagagcccactctttgaccacagctgggtcccccaacttggctgccgggacgtcatctcccatcaggccagtgtcctcccctgtgctgtcttcttcaaacaagagcccatccagtgcttggagcagtagtagctggcacgggcggatcaaaggcggcatgaagggatttcagagcttcatggtttcagatagcaacatgagttttgttgaatttgttgagctgttcaaatcattcagtgtcaggagccgcaaggacctgaaggatctgtttgatgtctatgcagtgccctgcaaccgatctggctccgagtcagccccactctacaccaacctgacaattgatgaaaacaccagcgatcttcagcctgacctagatctgttgaccagaaatgtctcggatttggggttgttcattaagagtaaacagcagctatcggacaaccagaggcagatatctgatgccattgctgctgcaagcattgtgacaaatggcactgggattgagagcacatctctgggcatttttggggtgggcatacttcagctcaacgatttcctcgtgaattgccaaggagaacactgcacttatgatgaaatcctcagcatcatccagaagttcgagcctagcatcagtatgtgtcatcagggactaatgtcatttgaagggtttgccaggtttctgatggataaagaaaattttgcctcaaaaaatgatgagtcacaggagaacattaaagaactgcagctacccctctcatactattacatcgaatcttcgcacaatacctacctcacgggccatcagctcaaaggagaatcctcggtagaactctacagccaggtccttttgcaaggctgtcgaagtgtagaattggactgctgggacggagacgatgggatgcccatcatttatcatggacatacgctgacaaccaagatccccttcaaggaagtggttgaagccattgatcgcagtgccttcatcaactctgacctgccaatcatcatatcgattgagaaccactgttcattgcctcagcaacgaaaaatggcagaaattttcaagactgtgtttggagaaaagctggtgactaaattcttatttgagactgatttctcagatgatccaatgcttccttcacctgaccaactcagaaagaaagttcttcttaaaaacaagaagctaaaagcccatcagacgccagtggatatcttaaagcaaaaggctcatcagttagcatctatgcaagtgcaggcttataatggtgggaatgccaacccccgacctgccaataatgaggaagaggaagatgaggaggacgaatatgattatgactatgaatccctttctgatgacaacattctggaagacagacctgaaaataaatcatgtaatgacaagcttcagtttgaatataatgaagaaatcccaaagaggataaagaaagcagataactctgcttgcaacaaaggaaaggtttatgatatggaactgggagaagaattttatcttgatcagaataaaaaggaaagcagacagattgcaccagagctttctgaccttgtaatctattgtcaagcagtaaaatttccaggactgtcaactctaaatgcatctggctctagcagaggaaaagaaaggaaaagcaggaagtccatttttggcaacaatccgggcagaatgagcccaggggagacagcatcatttaacaaaacatctggaaaaagttcctgtgaaggcattcgacagacctgggaggaatcttcttcccctctcaacccaaccacgtccctcagtgctatcattagaactcccaaatgttatcatatctcgtcgctgaatgaaaatgccgccaaacgtctgtgtcgcaggtattctcagaaactgacccagcacaccgcctgtcagctgctgagaacttaccctgctgccacccgcatcgactcttccaacccgaaccccctcatgttctggctccatgggatacagcttgtggcactcaactaccagactgatgatctccctttacatttaaatgctgcaatgtttgaggcaaatggtggttgtggttatgtattgaaacctccagttctgtgggacaagaactgccccatgtatcagaagttttctccactagaaagagatctggacagcatggatcctgcagtctattctttaactattgtctctggtcagaatgtgtgccccagtaatagcatgggaagcccgtgcattgaagtcgacgtcctgggcatgcctctggacagctgccatttccgcacaaagcccatccatcgaaacaccctgaaccccatgtggaacgagcagtttctgttccacgttcacttcgaagatcttgtatttcttcgttttgcagttgtggaaaacaatagttcagcggtaactgctcagagaatcattccactgaaagctttaaaacgaggatatcgacatcttcagctgcgaaaccttcacaatgaagtcttggagatttctagtttattcattaacagcagaaggatggaagaaaattcctctggcaataccatgtcagcctcttcgatgtttaatacagaagaaagaaaatgtttgcagactcacagagtcacggtgcatggggtcccagggccagagccctttaccgttttcactattaatggaggcaccaaggcaaagcagcttctgcagcaaattctgacaaatgaacaagacatcaaacctgttaccacagactattttttgatggaagaaaaatattttatatctaaagaaaagaatgaatgtaggaaacaaccattccagagagccattggtccagaagaggagatcatgcaaattttaagcagctggtttccagaagagggatacatgggcaggattgtcttaaaaacccagcaggaaaacctagaagagaaaaacattgttcaagatgacaaagaggtgatcttgagctcagaggaggagagtttctttgtccaagtgcatgatgtttctccagagcaacctcgaacagtcatcaaagcaccccgcgtcagcactgcacaggatgtcattcagcagaccttatgcaaagccaaatattcctacagcatcctgagcaaccccaatccaagcgactatgtgcttttggaagaggtggtgaaagacactaccaacaagaagactaccacaccaaagtcctctcagcgggtccttctggatcaggagtgtgtgtttcaagcccaaagcaagtggaaaggtgcaggaaaattcatccttaagctaaaggagcaggtgcaggcatctcgagaagataaaaagaaaggcatttctttcgcaagtgaactcaagaagctcaccaagtcaactaaacagccccgaggacttacatcaccttctcagctcttgacctcagaaagtatccaaaccaaggaggagaaacctgtgggtggcttgtcctccagtgacacaatggattaccgacagtgactaagggcagcatgtttaacccaggtgaagatctttaagcaagaagttaaagagtgaacatggtggaaaaaatataattattttcatcagacttaaactggaaattgatgatttctgaactgaagccttcacacatgtgagatccatgctgaggagaagcaaaatggcacagggctagttgccaccaaccaatttactgatgaatgaagcccaggggactgccattttataaatgtcagcagttggaaaaatcgtcacgaattgacttagagcaagggtcagcaagcttgtctgtaaagggccaaacagtaaatattttagggctgggggccataaaatatgttgcaaccacccaattctgccattgtagtgcaaaagcagccatagacaacacatacatgaacgaacgtggctgtattccaataaaactttatttatggacactg

SEQ ID NO: 165791 - DNA, 6128 bp, Homo sapiens
  Payload ID: 12641
  Gene Symbol: PLCH1
  Gene Name: phospholipase C, eta 1
  Uniprot ID: Q4KWH8
  ENST ID: ENST00000334686
  CDS Start-End: 75-5042
tggaaaaaaggaactgtgtgcagtaccgcaggcattttctggtggacaacagtgtgtttcatgttgaaagatgcatgagtgtgatgcagtccgggacacagatgatcaagctgaaacgtggaaccaaagggcttgtccgcctcttttacctggatgagcaccggacacgcctccgatggcgaccctctaggaagagtgagaaggcaaaaatacttattgattccatttacaaagtgactgagggccggcagtctgaaatattccacagacaagctgaggggaacttcgaccccagctgctgcttcaccatctaccatggcaaccacatggagtccctggacctcatcacctccaaccccgaggaggcccgcacctggatcacaggcctcaagtacctgatggctggcatcagtgatgaagactcccttgccaaaaggcagaggacccatgaccaatgggtgaagcagacctttgaggaagctgataagaatggtgacggcttgctgaatattgaagagatacatcagctgatgcataaactgaatgttaatctgccccgaagaaaagtcagacaaatgtttcaggaagccgacacagatgagaatcagggaactttgacatttgaagagttctgtgttttttacaaaatgatgtctttgagacgagacctttatttgttacttttgagctacagtgacaagaaagatcacctaactgtggaagaactggctcagtttttgaaggtggagcaaaagatgaataatgtgacaacggactattgtcttgacatcataaagaagtttgaagtttcagaagaaaataaggtgaaaaatgttcttggcatagaaggcttcacgaacttcatgcgtagtcctgcctgtgacatatttaacccattgcaccatgaagtgtaccaagacatggatcagcccctctgcaactactacattgcttcctctcacaatacatacctgactggagaccagctcctttctcagtccaaagtggatatgtatgcacgggtgctgcaagagggctgtcgctgtgtggaagttgactgttgggatggcccagatggagagccagtagtacatcatggttacactctcacttcaaaaattctcttcagagatgttgtggagaccatcaacaagcatgcctttgtgaagaatgagtttcctgttatattgtctatcgagaatcactgcagtatccagcagcaaaggaagattgctcagtacctgaaaggaatattcggagacaaactggacctgtcatctgttgatacaggggagtgcaagcagcttccaagccctcaaagtttgaaaggcaaaattctagtgaagggtaagaagttgccttatcaccttggggatgatgcagaggaaggggaagtttctgatgaggacagtgcagatgaaattgaagacgagtgcaaattcaagctccattatagtaatgggaccactgagcatcaggtggaatctttcataaggaaaaaactggagtcactgttaaaagaatctcaaattcgagataaagaagatcctgatagtttcacagtgcgggcactactgaaggccacgcatgaaggcttaaatgcacacctgaagcagagtccagatgtaaaggaaagtggaaagaaatcacatggacgatccctcatgaccaactttggaaaacataagaaaactacaaaatcacggtctaaatcttacagtactgatgatgaggaagacacacagcagagtactggcaaggagggtggccagctgtacagattgggtcgccgaaggaaaaccatgaagctctgccgagaactctctgatttggttgtgtacacaaactccgtggccgctcaggacattgtggatgacggaaccacaggaaatgtgttatcattcagtgaaacaagagcacatcaggttgttcagcaaaaatcagagcagttcatgatttataatcaaaagcaactcacgaggatttacccctctgcctaccgcattgattccagtaacttcaaccctctcccctactggaacgcaggctgccagctagtggcactgaattatcaatctgaaggacgaatgatgcagttaaaccgagccaaattcaaggcaaatggcaattgtggctatgtcctcaaaccccagcaaatgtgcaaaggtactttcaaccctttctctggtgaccctcttcctgccaaccccaaaaagcagctcatcctgaaagttatcagtggacagcaactccccaaacctccagactccatgtttggagatcgaggcgagatcattgacccttttgttgaagttgaaattattggattgccagtagattgttgtaaagatcaaacccgtgtggtagatgacaatggatttaaccctgtgtgggaagaaacactgacatttacagtacacatgccagaaatagctttggttcggttccttgtgtgggatcacgatcccattggacgagactttgttggacaaagaactgtgaccttcagcagcttagtgcctggctaccggcatgtctatttggaaggactgacagaagcatccatatttgtacacataaccatcaatgaaatctatggaaagaacagacaactccagggtctgaagggactgttcaataagaatcctaggcacagttcttcagaaaacaattcccattatgtacggaagcgatccattggagatagaattctgcgacgcacagctagcgccccagccaaaggcaggaaaaagagcaaaatgggcttccaagaaatggtggagataaaggattctgtgtccgaggccacaagagatcaagatggcgtgctgaggaggaccacacgcagtttgcaagcacgccctgtctctatgcctgttgacagaaaccttctgggagctttgtcgctgcctgtatctgaaacagcaaaagacattgaaggaaaagaaaactctctagcagaagataaagatggcagaagaaaagggaaagcaagtataaaagatccacattttctaaatttcaacaaaaagttatcatcctcctccagtgctctgctccacaaagataccagccaaggggacaccattgtatctactgcccacatgtcagtcacaggagaacagctgggcatgtcaagtcctaggggtgggagaaccacatcaaatgccacaagcaattgccaggaaaacccctgtcccagcaagtctctctccccaaagcagcatttggctcccgatcctgtagttaaccccacacaagatctgcatggtgtgaaaatcaaggaaaagggtaatcctgaggactttgtggaagggaaaagcatcttgtcaggaagcgtcctttctcatagcaacctagaaattaagaacctggaaggtaataggggtaagggccgagctgcaacatccttttctttgtcagacgtctccatgctctgttctgacatacctgacctacattcaactgcaattctgcaggagagtgtaatttcccatcttattgacaatgtcactttaacaaatgagaatgagccgggcagttccatctcagccctgattggccagtttgatgagaccaacaatcaggctctcacagttgtttctcatcttcataataccagtgtgatgtcaggccattgtcccttgcctagcctgggcctaaaaatgcccatcaagcatggtttttgcaagggaaaatccaagtcttccttcctgtgctcatctccggagctgatagcactctcgagttctgagaccaccaaacatgcaacgaacacagtttatgaaactacctgcactcccatctctaaaaccaaaccagatgatgacctttctagtaaggccaagacagcggccttagaaagcaacctgcctggatcccctaatacttctcgtggctggttaccaaaaagtcctaccaagggagaagactgggaaacactgaagagctgcagccctgcctcttcccctgatttgaccctggaggatgtaatagctgatcccactctctgtttcaattctggggagagcagccttgtggaaattgatggagaatcagaaaatctttctctaacaacctgtgaatataggagagagggcacaagtcaacttgcttctcctttaaaactcaagtacaatcagggtgtggtagaacactttcaaagaggtttgagaaacggctactgtaaagagaccctccgcccttctgtccctgaaatattcaacaatattcaagatgtcaaaactcaaagtatttcttatctagcctatcagggtgctggctttgtgcataatcatttctcagattcagatgcaaaaatgttccagacctgtgtgccccagcaatctagtgctcaagatatgcatgtccctgtacccaagcagttggcacatcttcctttgcctgctctgaaactgcctagtccttgcaaatccaaaagtctgggggacttaacatcagaggacattgcctgcaattttgagagcaagtaccagtgtattagtaagagttttgttacaactggcattagagacaagaagggcgtgactgtgaagacaaagtcgttagagcctatagatgccctgaccgagcagcttcggaagcttgtgtcctttgaccaggaagacaactgccaagtgctatattcaaagcaggatgccaatcagctcccccgggcactggtcaggaagttgtcatccagaagtcagagcagagtgcgcaatattgctagtcgtgccaaggagaaacaggaagccaacaagcagaaagttccaaaccccagcaatggggcaggagtggttcttagaaacaaaccctcagcacccacccctgcagtgaatcgccactccaccggctcctacatcgcaggctacctgaagaacacgaaagggggtggccttgaaggccggggcatcccagagggggcatgcacggctcttcactatggccacgttgaccagttttgttcagataattctgttttgcagactgagccaagcagtgatgataaaccagaaatttattttcttttgagactgtgaattatttaaaactgcattcttaaggttttcaaggtattctgtagaatgtcagagttttcagtaaataagttccttggctttggaatgattttcaaatgtatttttaaacttgtatttgggtctccctttgacttcatgtgttctccctgttaatgcgtttgtatatagatttggtgacatttcccatgtacctattatgatctttctcccttgagttgttgtaaactgtatcagtatgaaatatgtgcatgccctagatgtgaaactcctcagcagctcgggttataatgtgtgtgtgtttcaccaagatgtcctttactgtgtcctcagattgcagtcacaaatgtagtcatttttactctctaactgttgagttgattaagagactttgcaaacgacaaagggatgaattccttactttaatctgttatcatttttcctatgtttccctctttgttcagaagcccagatgcatttttataactcagttttaaaaactttaaaatagttaccttgccttttaggatgttcttatcccacccataatgagagttgaaaggggatggatagctgctccccatgcccttcccactttttggaataggccgtgagggtgtgaggaagaaggctgtcttttgtacataaggacaaaattgtttgttttacataaattttgttacatatttttgctaatggctttgtatgtaacaagaagcgagttgccaaactacctgttgtacttttgaattttctgattgaattacagactgcgaacaacggctttcagaatgagggacttccatcagactctaatgataatagtagcacaaattgaaaacttccccaaagctttcacagaatattttctcataataaaatccaagtgaacagataattagaagaaacccttttccttcagggaaccaagcaactctattttagtactgacatgcattattttcactgtgaattcacttttttattgcatgttcagatgtccctctttgttttttttttttgtaacattaactgcaatgatgttcttcctggaattcatgaaaatataattaaaacacatttttaaac

SEQ ID NO: 165792 - DNA, 6168 bp, Homo sapiens
  Payload ID: 12641
  Gene Symbol: PLCH1
  Gene Name: phospholipase C, eta 1
  Uniprot ID: Q4KWH8
  ENST ID: ENST00000340059
  CDS Start-End: 1-5082
atggcagaccttgaagtgtataaaaacttaagtccagaaaaagttgaaagatgcatgagtgtgatgcagtccgggacacagatgatcaagctgaaacgtggaaccaaagggcttgtccgcctcttttacctggatgagcaccggacacgcctccgatggcgaccctctaggaagagtgagaaggcaaaaatacttattgattccatttacaaagtgactgagggccggcagtctgaaatattccacagacaagctgaggggaacttcgaccccagctgctgcttcaccatctaccatggcaaccacatggagtccctggacctcatcacctccaaccccgaggaggcccgcacctggatcacaggcctcaagtacctgatggctggcatcagtgatgaagactcccttgccaaaaggcagaggacccatgaccaatgggtgaagcagacctttgaggaagctgataagaatggtgacggcttgctgaatattgaagagatacatcagctgatgcataaactgaatgttaatctgccccgaagaaaagtcagacaaatgtttcaggaagccgacacagatgagaatcagggaactttgacatttgaagagttctgtgttttttacaaaatgatgtctttgagacgagacctttatttgttacttttgagctacagtgacaagaaagatcacctaactgtggaagaactggctcagtttttgaaggtggagcaaaagatgaataatgtgacaacggactattgtcttgacatcataaagaagtttgaagtttcagaagaaaataaggtgaaaaatgttcttggcatagaaggcttcacgaacttcatgcgtagtcctgcctgtgacatatttaacccattgcaccatgaagtgtaccaagacatggatcagcccctctgcaactactacattgcttcctctcacaatacatacctgactggagaccagctcctttctcagtccaaagtggatatgtatgcacgggtgctgcaagagggctgtcgctgtgtggaagttgactgttgggatggcccagatggagagccagtagtacatcatggttacactctcacttcaaaaattctcttcagagatgttgtggagaccatcaacaagcatgcctttgtgaagaatgagtttcctgttatattgtctatcgagaatcactgcagtatccagcagcaaaggaagattgctcagtacctgaaaggaatattcggagacaaactggacctgtcatctgttgatacaggggagtgcaagcagcttccaagccctcaaagtttgaaaggcaaaattctagtgaagggtaagaagttgccttatcaccttggggatgatgcagaggaaggggaagtttctgatgaggacagtgcagatgaaattgaagacgagtgcaaattcaagctccattatagtaatgggaccactgagcatcaggtggaatctttcataaggaaaaaactggagtcactgttaaaagaatctcaaattcgagataaagaagatcctgatagtttcacagtgcgggcactactgaaggccacgcatgaaggcttaaatgcacacctgaagcagagtccagatgtaaaggaaagtggaaagaaatcacatggacgatccctcatgaccaactttggaaaacataagaaaactacaaaatcacggtctaaatcttacagtactgatgatgaggaagacacacagcagagtactggcaaggagggtggccagctgtacagattgggtcgccgaaggaaaaccatgaagctctgccgagaactctctgatttggttgtgtacacaaactccgtggccgctcaggacattgtggatgacggaaccacaggaaatgtgttatcattcagtgaaacaagagcacatcaggttgttcagcaaaaatcagagcagttcatgatttataatcaaaagcaactcacgaggatttacccctctgcctaccgcattgattccagtaacttcaaccctctcccctactggaacgcaggctgccagctagtggcactgaattatcaatctgaaggacgaatgatgcagttaaaccgagccaaattcaaggcaaatggcaattgtggctatgtcctcaaaccccagcaaatgtgcaaaggtactttcaaccctttctctggtgaccctcttcctgccaaccccaaaaagcagctcatcctgaaagttatcagtggacagcaactccccaaacctccagactccatgtttggagatcgaggcgagatcattgacccttttgttgaagttgaaattattggattgccagtagattgttgtaaagatcaaacccgtgtggtagatgacaatggatttaaccctgtgtgggaagaaacactgacatttacagtacacatgccagaaatagctttggttcggttccttgtgtgggatcacgatcccattggacgagactttgttggacaaagaactgtgaccttcagcagcttagtgcctggctaccggcatgtctatttggaaggactgacagaagcatccatatttgtacacataaccatcaatgaaatctatggaaagtggagccctttaatactcaaccccagttatactatattgcactttctaggagctacaaagaacagacaactccagggtctgaagggactgttcaataagaatcctaggcacagttcttcagaaaacaattcccattatgtacggaagcgatccattggagatagaattctgcgacgcacagctagcgccccagccaaaggcaggaaaaagagcaaaatgggcttccaagaaatggtggagataaaggattctgtgtccgaggccacaagagatcaagatggcgtgctgaggaggaccacacgcagtttgcaagcacgccctgtctctatgcctgttgacagaaaccttctgggagctttgtcgctgcctgtatctgaaacagcaaaagacattgaaggaaaagaaaactctctagcagaagataaagatggcagaagaaaagggaaagcaagtataaaagatccacattttctaaatttcaacaaaaagttatcatcctcctccagtgctctgctccacaaagataccagccaaggggacaccattgtatctactgcccacatgtcagtcacaggagaacagctgggcatgtcaagtcctaggggtgggagaaccacatcaaatgccacaagcaattgccaggaaaacccctgtcccagcaagtctctctccccaaagcagcatttggctcccgatcctgtagttaaccccacacaagatctgcatggtgtgaaaatcaaggaaaagggtaatcctgaggactttgtggaagggaaaagcatcttgtcaggaagcgtcctttctcatagcaacctagaaattaagaacctggaaggtaataggggtaagggccgagctgcaacatccttttctttgtcagacgtctccatgctctgttctgacatacctgacctacattcaactgcaattctgcaggagagtgtaatttcccatcttattgacaatgtcactttaacaaatgagaatgagccgggcagttccatctcagccctgattggccagtttgatgagaccaacaatcaggctctcacagttgtttctcatcttcataataccagtgtgatgtcaggccattgtcccttgcctagcctgggcctaaaaatgcccatcaagcatggtttttgcaagggaaaatccaagtcttccttcctgtgctcatctccggagctgatagcactctcgagttctgagaccaccaaacatgcaacgaacacagtttatgaaactacctgcactcccatctctaaaaccaaaccagatgatgacctttctagtaaggccaagacagcggccttagaaagcaacctgcctggatcccctaatacttctcgtggctggttaccaaaaagtcctaccaagggagaagactgggaaacactgaagagctgcagccctgcctcttcccctgatttgaccctggaggatgtaatagctgatcccactctctgtttcaattctggggagagcagccttgtggaaattgatggagaatcagaaaatctttctctaacaacctgtgaatataggagagagggcacaagtcaacttgcttctcctttaaaactcaagtacaatcagggtgtggtagaacactttcaaagaggtttgagaaacggctactgtaaagagaccctccgcccttctgtccctgaaatattcaacaatattcaagatgtcaaaactcaaagtatttcttatctagcctatcagggtgctggctttgtgcataatcatttctcagattcagatgcaaaaatgttccagacctgtgtgccccagcaatctagtgctcaagatatgcatgtccctgtacccaagcagttggcacatcttcctttgcctgctctgaaactgcctagtccttgcaaatccaaaagtctgggggacttaacatcagaggacattgcctgcaattttgagagcaagtaccagtgtattagtaagagttttgttacaactggcattagagacaagaagggcgtgactgtgaagacaaagtcgttagagcctatagatgccctgaccgagcagcttcggaagcttgtgtcctttgaccaggaagacaactgccaagtgctatattcaaagcaggatgccaatcagctcccccgggcactggtcaggaagttgtcatccagaagtcagagcagagtgcgcaatattgctagtcgtgccaaggagaaacaggaagccaacaagcagaaagttccaaaccccagcaatggggcaggagtggttcttagaaacaaaccctcagcacccacccctgcagtgaatcgccactccaccggctcctacatcgcaggctacctgaagaacacgaaagggggtggccttgaaggccggggcatcccagagggggcatgcacggctcttcactatggccacgttgaccagttttgttcagataattctgttttgcagactgagccaagcagtgatgataaaccagaaatttattttcttttgagactgtgaattatttaaaactgcattcttaaggttttcaaggtattctgtagaatgtcagagttttcagtaaataagttccttggctttggaatgattttcaaatgtatttttaaacttgtatttgggtctccctttgacttcatgtgttctccctgttaatgcgtttgtatatagatttggtgacatttcccatgtacctattatgatctttctcccttgagttgttgtaaactgtatcagtatgaaatatgtgcatgccctagatgtgaaactcctcagcagctcgggttataatgtgtgtgtgtttcaccaagatgtcctttactgtgtcctcagattgcagtcacaaatgtagtcatttttactctctaactgttgagttgattaagagactttgcaaacgacaaagggatgaattccttactttaatctgttatcatttttcctatgtttccctctttgttcagaagcccagatgcatttttataactcagttttaaaaactttaaaatagttaccttgccttttaggatgttcttatcccacccataatgagagttgaaaggggatggatagctgctccccatgcccttcccactttttggaataggccgtgagggtgtgaggaagaaggctgtcttttgtacataaggacaaaattgtttgttttacataaattttgttacatatttttgctaatggctttgtatgtaacaagaagcgagttgccaaactacctgttgtacttttgaattttctgattgaattacagactgcgaacaacggctttcagaatgagggacttccatcagactctaatgataatagtagcacaaattgaaaacttccccaaagctttcacagaatattttctcataataaaatccaagtgaacagataattagaagaaacccttttccttcagggaaccaagcaactctattttagtactgacatgcattattttcactgtgaattcacttttttattgcatgttcagatgtccctctttgttttttttttttgtaacattaactgcaatgatgttcttcctggaattcatgaaaatataattaaaacacatttttaaac

SEQ ID NO: 165793 - DNA, 6196 bp, Homo sapiens
  Payload ID: 12641
  Gene Symbol: PLCH1
  Gene Name: phospholipase C, eta 1
  Uniprot ID: Q4KWH8
  ENST ID: ENST00000447496
  CDS Start-End: 1-3009
atggcagaccttgaagtgtataaaaacttaagtccagaaaaagttgaaagatgcatgagtgtgatgcagtccgggacacagatgatcaagctgaaacgtggaaccaaagggcttgtccgcctcttttacctggatgagcaccggacacgcctccgatggcgaccctctaggaagagtgagaaggcaaaaatacttattgattccatttacaaagtgactgagggccggcagtctgaaatattccacagacaagctgaggggaacttcgaccccagctgctgcttcaccatctaccatggcaaccacatggagtccctggacctcatcacctccaaccccgaggaggcccgcacctggatcacaggcctcaagtacctgatggctggcatcagtgatgaagactcccttgccaaaaggcagaggacccatgaccaatgggtgaagcagacctttgaggaagctgataagaatggtgacggcttgctgaatattgaagagatacatcagctgatgcataaactgaatgttaatctgccccgaagaaaagtcagacaaatgtttcaggaagccgacacagatgagaatcagggaactttgacatttgaagagttctgtgttttttacaaaatgatgtctttgagacgagacctttatttgttacttttgagctacagtgacaagaaagatcacctaactgtggaagaactggctcagtttttgaaggtggagcaaaagatgaataatgtgacaacggactattgtcttgacatcataaagaagtttgaagtttcagaagaaaataaggtgaaaaatgttcttggcatagaaggcttcacgaacttcatgcgtagtcctgcctgtgacatatttaacccattgcaccatgaagtgtaccaagacatggatcagcccctctgcaactactacattgcttcctctcacaatacatacctgactggagaccagctcctttctcagtccaaagtggatatgtatgcacgggtgctgcaagagggctgtcgctgtgtggaagttgactgttgggatggcccagatggagagccagtagtacatcatggttacactctcacttcaaaaattctcttcagagatgttgtggagaccatcaacaagcatgcctttgtgaagaatgagtttcctgttatattgtctatcgagaatcactgcagtatccagcagcaaaggaagattgctcagtacctgaaaggaatattcggagacaaactggacctgtcatctgttgatacaggggagtgcaagcagcttccaagccctcaaagtttgaaaggcaaaattctagtgaagggtaagaagttgccttatcaccttggggatgatgcagaggaaggggaagtttctgatgaggacagtgcagatgaaattgaagacgagtgcaaattcaagctccattatagtaatgggaccactgagcatcaggtggaatctttcataaggaaaaaactggagtcactgttaaaagaatctcaaattcgagataaagaagatcctgatagtttcacagtgcgggcactactgaaggccacgcatgaaggcttaaatgcacacctgaagcagagtccagatgtaaaggaaagtggaaagaaatcacatggacgatccctcatgaccaactttggaaaacataagaaaactacaaaatcacggtctaaatcttacagtactgatgatgaggaagacacacagcagagtactggcaaggagggtggccagctgtacagattgggtcgccgaaggaaaaccatgaagctctgccgagaactctctgatttggttgtgtacacaaactccgtggccgctcaggacattgtggatgacggaaccacaggaaatgtgttatcattcagtgaaacaagagcacatcaggttgttcagcaaaaatcagagcagttcatgatttataatcaaaagcaactcacgaggatttacccctctgcctaccgcattgattccagtaacttcaaccctctcccctactggaacgcaggctgccagctagtggcactgaattatcaatctgaaggacgaatgatgcagttaaaccgagccaaattcaaggcaaatggcaattgtggctatgtcctcaaaccccagcaaatgtgcaaaggtactttcaaccctttctctggtgaccctcttcctgccaaccccaaaaagcagctcatcctgaaagttatcagtggacagcaactccccaaacctccagactccatgtttggagatcgaggcgagatcattgacccttttgttgaagttgaaattattggattgccagtagattgttgtaaagatcaaacccgtgtggtagatgacaatggatttaaccctgtgtgggaagaaacactgacatttacagtacacatgccagaaatagctttggttcggttccttgtgtgggatcacgatcccattggacgagactttgttggacaaagaactgtgaccttcagcagcttagtgcctggctaccggcatgtctatttggaaggactgacagaagcatccatatttgtacacataaccatcaatgaaatctatggaaagtggagccctttaatactcaaccccagttatactatattgcactttctaggagctacaaagaacagacaactccagggtctgaagggactgttcaataagaatcctaggcacagttcttcagaaaacaattcccattatgtacggaagcgatccattggagatagaattctgcgacgcacagctagcgccccagccaaaggcaggaaaaagagcaaaatgggcttccaagaaatggtggagataaaggattctgtgtccgaggccacaagagatcaagatggcgtgctgaggaggaccacacgcagtttgcaagcacgccctgtctctatgcctgttgacagaaaccttctgggagctttgtcgctgcctgtatctgaaacagcaaaagacattgaaggaaaagaaaactctctagtacaaatctgaataggaaacaacttaagcagaagataaagatggcagaagaaaagggaaagcaagtataaaagatccacattttctaaatttcaacaaaaagttatcatcctcctccagtgctctgctccacaaagataccagccaaggggacaccattgtatctactgcccacatgtcagtcacaggagaacagctgggcatgtcaagtcctaggggtgggagaaccacatcaaatgccacaagcaattgccaggaaaacccctgtcccagcaagtctctctccccaaagcagcatttggctcccgatcctgtagttaaccccacacaagatctgcatggtgtgaaaatcaaggaaaagggtaatcctgaggactttgtggaagggaaaagcatcttgtcaggaagcgtcctttctcatagcaacctagaaattaagaacctggaaggtaataggggtaagggccgagctgcaacatccttttctttgtcagacgtctccatgctctgttctgacatacctgacctacattcaactgcaattctgcaggagagtgtaatttcccatcttattgacaatgtcactttaacaaatgagaatgagccgggcagttccatctcagccctgattggccagtttgatgagaccaacaatcaggctctcacagttgtttctcatcttcataataccagtgtgatgtcaggccattgtcccttgcctagcctgggcctaaaaatgcccatcaagcatggtttttgcaagggaaaatccaagtcttccttcctgtgctcatctccggagctgatagcactctcgagttctgagaccaccaaacatgcaacgaacacagtttatgaaactacctgcactcccatctctaaaaccaaaccagatgatgacctttctagtaaggccaagacagcggccttagaaagcaacctgcctggatcccctaatacttctcgtggctggttaccaaaaagtcctaccaagggagaagactgggaaacactgaagagctgcagccctgcctcttcccctgatttgaccctggaggatgtaatagctgatcccactctctgtttcaattctggggagagcagccttgtggaaattgatggagaatcagaaaatctttctctaacaacctgtgaatataggagagagggcacaagtcaacttgcttctcctttaaaactcaagtacaatcagggtgtggtagaacactttcaaagaggtttgagaaacggctactgtaaagagaccctccgcccttctgtccctgaaatattcaacaatattcaagatgtcaaaactcaaagtatttcttatctagcctatcagggtgctggctttgtgcataatcatttctcagattcagatgcaaaaatgttccagacctgtgtgccccagcaatctagtgctcaagatatgcatgtccctgtacccaagcagttggcacatcttcctttgcctgctctgaaactgcctagtccttgcaaatccaaaagtctgggggacttaacatcagaggacattgcctgcaattttgagagcaagtaccagtgtattagtaagagttttgttacaactggcattagagacaagaagggcgtgactgtgaagacaaagtcgttagagcctatagatgccctgaccgagcagcttcggaagcttgtgtcctttgaccaggaagacaactgccaagtgctatattcaaagcaggatgccaatcagctcccccgggcactggtcaggaagttgtcatccagaagtcagagcagagtgcgcaatattgctagtcgtgccaaggagaaacaggaagccaacaagcagaaagttccaaaccccagcaatggggcaggagtggttcttagaaacaaaccctcagcacccacccctgcagtgaatcgccactccaccggctcctacatcgcaggctacctgaagaacacgaaagggggtggccttgaaggccggggcatcccagagggggcatgcacggctcttcactatggccacgttgaccagttttgttcagataattctgttttgcagactgagccaagcagtgatgataaaccagaaatttattttcttttgagactgtgaattatttaaaactgcattcttaaggttttcaaggtattctgtagaatgtcagagttttcagtaaataagttccttggctttggaatgattttcaaatgtatttttaaacttgtatttgggtctccctttgacttcatgtgttctccctgttaatgcgtttgtatatagatttggtgacatttcccatgtacctattatgatctttctcccttgagttgttgtaaactgtatcagtatgaaatatgtgcatgccctagatgtgaaactcctcagcagctcgggttataatgtgtgtgtgtttcaccaagatgtcctttactgtgtcctcagattgcagtcacaaatgtagtcatttttactctctaactgttgagttgattaagagactttgcaaacgacaaagggatgaattccttactttaatctgttatcatttttcctatgtttccctctttgttcagaagcccagatgcatttttataactcagttttaaaaactttaaaatagttaccttgccttttaggatgttcttatcccacccataatgagagttgaaaggggatggatagctgctccccatgcccttcccactttttggaataggccgtgagggtgtgaggaagaaggctgtcttttgtacataaggacaaaattgtttgttttacataaattttgttacatatttttgctaatggctttgtatgtaacaagaagcgagttgccaaactacctgttgtacttttgaattttctgattgaattacagactgcgaacaacggctttcagaatgagggacttccatcagactctaatgataatagtagcacaaattgaaaacttccccaaagctttcacagaatattttctcataataaaatccaagtgaacagataattagaagaaacccttttccttcagggaaccaagcaactctattttagtactgacatgcattattttcactgtgaattcacttttttattgcatgttcagatgtccctctttgttttttttttttgtaacattaactgcaatgatgttcttcctggaattcatgaaaatataattaaaacacatttttaaac

SEQ ID NO: 165794 - DNA, 6413 bp, Homo sapiens
  Payload ID: 12641
  Gene Symbol: PLCH1
  Gene Name: phospholipase C, eta 1
  Uniprot ID: Q4KWH8
  ENST ID: ENST00000460012
  CDS Start-End: 359-5326
gagaaagcaggttgtggcggcggcgccctgctcttccccgctcgtctggggcttctgctggctagtggggagaagtgctcttctaggggggcttttctggcccttggcaggggtttggagttggagtcacaggggccaataactcatcaccccagcacttcggaggtggctccttgtgccacggactccgaggagtccttcagctactgaacactcaaagctgaggagggcaatttggttttgatgctgtgccagaaatcttctgacaatgagttactggaacttggaaaaaaggaactgtgtgcagtaccgcaggcattttctggtggacaacagtgtgtttcatgttgaaagatgcatgagtgtgatgcagtccgggacacagatgatcaagctgaaacgtggaaccaaagggcttgtccgcctcttttacctggatgagcaccggacacgcctccgatggcgaccctctaggaagagtgagaaggcaaaaatacttattgattccatttacaaagtgactgagggccggcagtctgaaatattccacagacaagctgaggggaacttcgaccccagctgctgcttcaccatctaccatggcaaccacatggagtccctggacctcatcacctccaaccccgaggaggcccgcacctggatcacaggcctcaagtacctgatggctggcatcagtgatgaagactcccttgccaaaaggcagaggacccatgaccaatgggtgaagcagacctttgaggaagctgataagaatggtgacggcttgctgaatattgaagagatacatcagctgatgcataaactgaatgttaatctgccccgaagaaaagtcagacaaatgtttcaggaagccgacacagatgagaatcagggaactttgacatttgaagagttctgtgttttttacaaaatgatgtctttgagacgagacctttatttgttacttttgagctacagtgacaagaaagatcacctaactgtggaagaactggctcagtttttgaaggtggagcaaaagatgaataatgtgacaacggactattgtcttgacatcataaagaagtttgaagtttcagaagaaaataaggtgaaaaatgttcttggcatagaaggcttcacgaacttcatgcgtagtcctgcctgtgacatatttaacccattgcaccatgaagtgtaccaagacatggatcagcccctctgcaactactacattgcttcctctcacaatacatacctgactggagaccagctcctttctcagtccaaagtggatatgtatgcacgggtgctgcaagagggctgtcgctgtgtggaagttgactgttgggatggcccagatggagagccagtagtacatcatggttacactctcacttcaaaaattctcttcagagatgttgtggagaccatcaacaagcatgcctttgtgaagaatgagtttcctgttatattgtctatcgagaatcactgcagtatccagcagcaaaggaagattgctcagtacctgaaaggaatattcggagacaaactggacctgtcatctgttgatacaggggagtgcaagcagcttccaagccctcaaagtttgaaaggcaaaattctagtgaagggtaagaagttgccttatcaccttggggatgatgcagaggaaggggaagtttctgatgaggacagtgcagatgaaattgaagacgagtgcaaattcaagctccattatagtaatgggaccactgagcatcaggtggaatctttcataaggaaaaaactggagtcactgttaaaagaatctcaaattcgagataaagaagatcctgatagtttcacagtgcgggcactactgaaggccacgcatgaaggcttaaatgcacacctgaagcagagtccagatgtaaaggaaagtggaaagaaatcacatggacgatccctcatgaccaactttggaaaacataagaaaactacaaaatcacggtctaaatcttacagtactgatgatgaggaagacacacagcagagtactggcaaggagggtggccagctgtacagattgggtcgccgaaggaaaaccatgaagctctgccgagaactctctgatttggttgtgtacacaaactccgtggccgctcaggacattgtggatgacggaaccacaggaaatgtgttatcattcagtgaaacaagagcacatcaggttgttcagcaaaaatcagagcagttcatgatttataatcaaaagcaactcacgaggatttacccctctgcctaccgcattgattccagtaacttcaaccctctcccctactggaacgcaggctgccagctagtggcactgaattatcaatctgaaggacgaatgatgcagttaaaccgagccaaattcaaggcaaatggcaattgtggctatgtcctcaaaccccagcaaatgtgcaaaggtactttcaaccctttctctggtgaccctcttcctgccaaccccaaaaagcagctcatcctgaaagttatcagtggacagcaactccccaaacctccagactccatgtttggagatcgaggcgagatcattgacccttttgttgaagttgaaattattggattgccagtagattgttgtaaagatcaaacccgtgtggtagatgacaatggatttaaccctgtgtgggaagaaacactgacatttacagtacacatgccagaaatagctttggttcggttccttgtgtgggatcacgatcccattggacgagactttgttggacaaagaactgtgaccttcagcagcttagtgcctggctaccggcatgtctatttggaaggactgacagaagcatccatatttgtacacataaccatcaatgaaatctatggaaagaacagacaactccagggtctgaagggactgttcaataagaatcctaggcacagttcttcagaaaacaattcccattatgtacggaagcgatccattggagatagaattctgcgacgcacagctagcgccccagccaaaggcaggaaaaagagcaaaatgggcttccaagaaatggtggagataaaggattctgtgtccgaggccacaagagatcaagatggcgtgctgaggaggaccacacgcagtttgcaagcacgccctgtctctatgcctgttgacagaaaccttctgggagctttgtcgctgcctgtatctgaaacagcaaaagacattgaaggaaaagaaaactctctagcagaagataaagatggcagaagaaaagggaaagcaagtataaaagatccacattttctaaatttcaacaaaaagttatcatcctcctccagtgctctgctccacaaagataccagccaaggggacaccattgtatctactgcccacatgtcagtcacaggagaacagctgggcatgtcaagtcctaggggtgggagaaccacatcaaatgccacaagcaattgccaggaaaacccctgtcccagcaagtctctctccccaaagcagcatttggctcccgatcctgtagttaaccccacacaagatctgcatggtgtgaaaatcaaggaaaagggtaatcctgaggactttgtggaagggaaaagcatcttgtcaggaagcgtcctttctcatagcaacctagaaattaagaacctggaaggtaataggggtaagggccgagctgcaacatccttttctttgtcagacgtctccatgctctgttctgacatacctgacctacattcaactgcaattctgcaggagagtgtaatttcccatcttattgacaatgtcactttaacaaatgagaatgagccgggcagttccatctcagccctgattggccagtttgatgagaccaacaatcaggctctcacagttgtttctcatcttcataataccagtgtgatgtcaggccattgtcccttgcctagcctgggcctaaaaatgcccatcaagcatggtttttgcaagggaaaatccaagtcttccttcctgtgctcatctccggagctgatagcactctcgagttctgagaccaccaaacatgcaacgaacacagtttatgaaactacctgcactcccatctctaaaaccaaaccagatgatgacctttctagtaaggccaagacagcggccttagaaagcaacctgcctggatcccctaatacttctcgtggctggttaccaaaaagtcctaccaagggagaagactgggaaacactgaagagctgcagccctgcctcttcccctgatttgaccctggaggatgtaatagctgatcccactctctgtttcaattctggggagagcagccttgtggaaattgatggagaatcagaaaatctttctctaacaacctgtgaatataggagagagggcacaagtcaacttgcttctcctttaaaactcaagtacaatcagggtgtggtagaacactttcaaagaggtttgagaaacggctactgtaaagagaccctccgcccttctgtccctgaaatattcaacaatattcaagatgtcaaaactcaaagtatttcttatctagcctatcagggtgctggctttgtgcataatcatttctcagattcagatgcaaaaatgttccagacctgtgtgccccagcaatctagtgctcaagatatgcatgtccctgtacccaagcagttggcacatcttcctttgcctgctctgaaactgcctagtccttgcaaatccaaaagtctgggggacttaacatcagaggacattgcctgcaattttgagagcaagtaccagtgtattagtaagagttttgttacaactggcattagagacaagaagggcgtgactgtgaagacaaagtcgttagagcctatagatgccctgaccgagcagcttcggaagcttgtgtcctttgaccaggaagacaactgccaagtgctatattcaaagcaggatgccaatcagctcccccgggcactggtcaggaagttgtcatccagaagtcagagcagagtgcgcaatattgctagtcgtgccaaggagaaacaggaagccaacaagcagaaagttccaaaccccagcaatggggcaggagtggttcttagaaacaaaccctcagcacccacccctgcagtgaatcgccactccaccggctcctacatcgcaggctacctgaagaacacgaaagggggtggccttgaaggccggggcatcccagagggggcatgcacggctcttcactatggccacgttgaccagttttgttcagataattctgttttgcagactgagccaagcagtgatgataaaccagaaatttattttcttttgagactgtgaattatttaaaactgcattcttaaggttttcaaggtattctgtagaatgtcagagttttcagtaaataagttccttggctttggaatgattttcaaatgtatttttaaacttgtatttgggtctccctttgacttcatgtgttctccctgttaatgcgtttgtatatagatttggtgacatttcccatgtacctattatgatctttctcccttgagttgttgtaaactgtatcagtatgaaatatgtgcatgccctagatgtgaaactcctcagcagctcgggttataatgtgtgtgtgtttcaccaagatgtcctttactgtgtcctcagattgcagtcacaaatgtagtcatttttactctctaactgttgagttgattaagagactttgcaaacgacaaagggatgaattccttactttaatctgttatcatttttcctatgtttccctctttgttcagaagcccagatgcatttttataactcagttttaaaaactttaaaatagttaccttgccttttaggatgttcttatcccacccataatgagagttgaaaggggatggatagctgctccccatgcccttcccactttttggaataggccgtgagggtgtgaggaagaaggctgtcttttgtacataaggacaaaattgtttgttttacataaattttgttacatatttttgctaatggctttgtatgtaacaagaagcgagttgccaaactacctgttgtacttttgaattttctgattgaattacagactgcgaacaacggctttcagaatgagggacttccatcagactctaatgataatagtagcacaaattgaaaacttccccaaagctttcacagaatattttctcataataaaatccaagtgaacagataattagaagaaacccttttccttcagggaaccaagcaactctattttagtactgacatgcattattttcactgtgaattcacttttttattgcatgttcagatgtccctctttgttttttttttttgtaacattaactgcaatgatgttcttcctggaattcatgaaaatataattaaaacacatttttaaaca

SEQ ID NO: 165795 - DNA, 3525 bp, Homo sapiens
  Payload ID: 12641
  Gene Symbol: PLCH1
  Gene Name: phospholipase C, eta 1
  Uniprot ID: Q4KWH8
  ENST ID: ENST00000494598
  CDS Start-End: 378-3422
ataatgccttgagggctttaacgcgctgcacgaagcatgcatgtctcatacccaaagtagccacagcgcctgcattcccacaatagcggcagccccgagcagatgcttccagcgtgcttatctggctgtgcttttcactttgggacaaagttctataatcatatctcatggatttattttctccacactataaagcctgaattgtgaagatctcatcatgccataaagggcagcatgagccaagttctgggggctgctaaggatttctttgccttttttccccccaccctttttggaaatgtgtatcaggaaaaggctttgcctttagagagaaattgtactgctcttgccaataatgtgtaatagtattaaatttaatggcagaccttgaagtgtataaaaacttaagtccagaaaaagttgaaagatgcatgagtgtgatgcagtccgggacacagatgatcaagctgaaacgtggaaccaaagggcttgtccgcctcttttacctggatgagcaccggacacgcctccgatggcgaccctctaggaagagtgagaaggcaaaaatacttattgattccatttacaaagtgactgagggccggcagtctgaaatattccacagacaagctgaggggaacttcgaccccagctgctgcttcaccatctaccatggcaaccacatggagtccctggacctcatcacctccaaccccgaggaggcccgcacctggatcacaggcctcaagtacctgatggctggcatcagtgatgaagactcccttgccaaaaggcagaggacccatgaccaatgggtgaagcagacctttgaggaagctgataagaatggtgacggcttgctgaatattgaagagatacatcagctgatgcataaactgaatgttaatctgccccgaagaaaagtcagacaaatgtttcaggaagccgacacagatgagaatcagggaactttgacatttgaagagttctgtgttttttacaaaatgatgtctttgagacgagacctttatttgttacttttgagctacagtgacaagaaagatcacctaactgtggaagaactggctcagtttttgaaggtggagcaaaagatgaataatgtgacaacggactattgtcttgacatcataaagaagtttgaagtttcagaagaaaataaggtgaaaaatgttcttggcatagaaggcttcacgaacttcatgcgtagtcctgcctgtgacatatttaacccattgcaccatgaagtgtaccaagacatggatcagcccctctgcaactactacattgcttcctctcacaatacatacctgactggagaccagctcctttctcagtccaaagtggatatgtatgcacgggtgctgcaagagggctgtcgctgtgtggaagttgactgttgggatggcccagatggagagccagtagtacatcatggttacactctcacttcaaaaattctcttcagagatgttgtggagaccatcaacaagcatgcctttgtgaagaatgagtttcctgttatattgtctatcgagaatcactgcagtatccagcagcaaaggaagattgctcagtacctgaaaggaatattcggagacaaactggacctgtcatctgttgatacaggggagtgcaagcagcttccaagccctcaaagtttgaaaggcaaaattctagtgaagggtaagaagttgccttatcaccttggggatgatgcagaggaaggggaagtttctgatgaggacagtgcagatgaaattgaagacgagtgcaaattcaagctccattatagtaatgggaccactgagcatcaggtggaatctttcataaggaaaaaactggagtcactgttaaaagaatctcaaattcgagataaagaagatcctgatagtttcacagtgcgggcactactgaaggccacgcatgaaggcttaaatgcacacctgaagcagagtccagatgtaaaggaaagtggaaagaaatcacatggacgatccctcatgaccaactttggaaaacataagaaaactacaaaatcacggtctaaatcttacagtactgatgatgaggaagacacacagcagagtactggcaaggagggtggccagctgtacagattgggtcgccgaaggaaaaccatgaagctctgccgagaactctctgatttggttgtgtacacaaactccgtggccgctcaggacattgtggatgacggaaccacaggaaatgtgttatcattcagtgaaacaagagcacatcaggttgttcagcaaaaatcagagcagttcatgatttataatcaaaagcaactcacgaggatttacccctctgcctaccgcattgattccagtaacttcaaccctctcccctactggaacgcaggctgccagctagtggcactgaattatcaatctgaaggacgaatgatgcagttaaaccgagccaaattcaaggcaaatggcaattgtggctatgtcctcaaaccccagcaaatgtgcaaaggtactttcaaccctttctctggtgaccctcttcctgccaaccccaaaaagcagctcatcctgaaagttatcagtggacagcaactccccaaacctccagactccatgtttggagatcgaggcgagatcattgacccttttgttgaagttgaaattattggattgccagtagattgttgtaaagatcaaacccgtgtggtagatgacaatggatttaaccctgtgtgggaagaaacactgacatttacagtacacatgccagaaatagctttggttcggttccttgtgtgggatcacgatcccattggacgagactttgttggacaaagaactgtgaccttcagcagcttagtgcctggctaccggcatgtctatttggaaggactgacagaagcatccatatttgtacacataaccatcaatgaaatctatggaaagaacagacaactccagggtctgaagggactgttcaataagaatcctaggcacagttcttcagaaaacaattcccattatgtacggaagcgatccattggagatagaattctgcgacgcacagctagcgccccagccaaaggcaggaaaaagagcaaaatgggcttccaagaaatggtggagataaaggattctgtgtccgaggccacaagagatcaagatggcgtgctgaggaggaccacacgcagtttgcaagcacgccctgtctctatgcctgttgacagaaaccttctgggagctttgtcgctgcctgtatctgaaacagcaaaagacattgaaggaaaagaaaactctctagactctagcttttgcaggccgactgagcaggctaaagcagaaatgtgcaaagtgcctttccccagacagttagaatgtgtaatgaagatggaaatttccgagacctgaatccccaaacccagactgatctctcttctcttcttgaatataaaagtaagctggcaagatttaaaaaactgaacccaaataaatattcatcatttttttcttc

SEQ ID NO: 165796 - DNA, 3781 bp, Homo sapiens
  Payload ID: 12642
  Gene Symbol: PLCH2
  Gene Name: phospholipase C, eta 2
  ENST ID: ENST00000278878
  CDS Start-End: 1-3718
ggcgcgcacctgggtcactggcctgcgctacctcatggccggcatcagcgacgaggacagcctggctcgccgccagcgcaccagggaccaatggctgaagcagacgtttgacgaggccgacaagaacggggatggcagcctgagcattggcgaggtcctgcagctgctgcacaagctcaacgtgaacctgccccggcagagggtgaagcagatgttcagggaagcggacacggatgaccaccaagggacgctgggttttgaagagttctgtgccttctacaagatgatgtccacccgccgggacctctacctgctcatgctgacctacagcaaccacaaggaccacctggatgccgccagcctgcagcgcttcctgcaggtggagcagaagatggcgggtgtgaccctcgagagctgccaggacatcatcgagcagtttgagccatgcccagaaaacaagagtaaggggctgctgggcattgatggcttcaccaactacaccaggagccctgctggtgacatcttcaaccctgagcaccaccatgtgcaccaggacatgacgcagccgctgagccactacttcatcacctcgtcccacaacacctacctcgtgggtgaccagctcatgtcccagtcacgggtggacatgtatgcttgggtcctgcaggctggctgccgctgcgtggaggtggactgctgggatgggcccgacggggagcccattgtgcaccatggctacactctgacttccaagatcctcttcaaagacgtcattgaaaccatcaacaaatatgccttcatcaagaatgagtacccagtgatcctgtccatcgaaaaccactgcagtgtcatccagcagaagaaaatggcccagtatctgactgacatccttggggacaagctggacctgtcatcagtgagcagtgaagatgccaccacactcccctctccacagatgctcaagggcaagatcctcgtgaaggggaagaagctcccagccaacatcagcgaggatgcggaggaaggcgaggtgtctgatgaggacagtgctgatgagattgacgatgactgcaagctcctcaatggggatgcatccaccaatcgaaagcgtgtagaaaacactgctaagaggaaactggattccctcatcaaagagtcgaagattcgggactgtgaggaccccaacaacttctccgtctccacactgtccccatctggaaagctcggacgcaagagcaaggctgaagaggacgtggagtctggggaggatgccggggccagcagacgcaatggccgcctcgtcgtgggaagcttctccaggcgcaagaagaagggcagcaagctgaagaaggcggccagcgtggaggagggagatgagggtcaggactccccgggaggccagagccgaggggcgacccggcagaagaagaccatgaagctgtcccgggccctctctgacctggtgaagtacaccaagtccgtggccacccacgacatagagatggaggcggcgtccagctggcaggtgtcgtccttcagcgagaccaaggcccaccagattctgcagcagaagccggcgcagtacctacgcttcaaccagcagcagctctcccgcatctacccctcctcctaccgtgtggactccagcaactacaacccgcagcccttctggaacgccggctgccaaatgggcgtgttcaaccccaactcggaggaccccctgcccgggcagctcaagaagcagctggtgctccggatcatcagtggccagcagcttcccaagccgcgcgactccatgctgggggaccgtggggagatcatcgacccctttgtggaggtggagatcattgggctccctgtggactgcagcagggagcagacccgcgtggtggacgacaacgggttcaaccccacctgggaggagaccctggttttcatggtgcacatgccggagatcgcgctggtccgcttcctcgtctgggaccacgatcccatcgggcgtgacttcattggccagaggacgctggccttcagcagcatgatgccaggctacagacacgtgtacctagaagggatggaagaggcctccatcttcgtgcatgtggctgtcagtgacatcagcggtaaggtcaagcaggctctgggcctaaaaggcctcttcctccgaggcccaaagcccggctcgctggacagtcatgctgctgggcggcccccggcccggccctccgttagccagcggatcctgcggcgcacggccagcgccccgaccaagagccagaagccgggccgcaggggcttcccggagctggtcctgggtacacgggacacaggctccaagggggtggcagacgatgtggtgccccccgggcccggacctgctccggaagccccagcccaggaggggcccggcagcggcagcccccgagacacccgccccctctccacgcagcggccactccccccactgtgcagcctggaaaccatcgctgaggagcccgccccaggccctggtcccccgccaccagcggctgtccccaccagctcttctcagggacggcccccataccccacaggacccggagccaatgtggcaagccccctagaggacactgaggagccccgagacagcaggcctcggccgtgcaacggcgagggcgccggcggggcatacgagagggcccccggcagccagacggacggcaggagccagccccggaccctgggccacctgcccgtgattagaagggtgaagagtgaggggcaggtgcccacggagcccctgggagggtggcggcccctggccgctccctttccagctcctgccgtgtactccgatgccacgggcagtgacccgctgtggcagcggctggagccatgtggccaccgagacagcgtttcctcctcctccagcatgtcatccagcgacactgtcattgacctctccctgcccagcctgggcctgggccgcagccgtgagaacctcgctggagcccacatgggacgcctgccccccaggccccactcggcttcggctgcccgcccagacctgccacctgtgaccaagagcaaatccaaccccaaccttcgggctacaggccagcggcctcccatacctgacgaactgcagcccaggtccctggccccaaggatggctggcctccccttccggcctccctggggctgcctttccctggtgggcgtgcaggactgccccgtggctgccaagtccaagagcctgggcgacctcactgctgatgactttgcccctagctttgagggcggctcccgcagactgagccacagcctgggcctcccgggagggacacggcgggtgtcggggccaggggtgagacgggacaccctgacagagcagctgcgctggctcactgtcttccagcaggcaggagacatcacgtcacccaccagcctgggcccggctggggagggggtggcagggggccctggttttgtgcggcgctcctcctcccgcagccacagccgcgtgcgtgccattgccagccgggcccgccaggcccaggagcggcagcagagactgcagggcctgggccggcagggacccccagaagaggagcggggcacccccgagggcgcctgctccgtgggccacgagggcagtgtggatgcaccagcaccctccaagggagccctcgggccagcatccgcggctgctgaaaacctggtcctgctccgcctctgaccgtcagtggtgggaacctgggcggctctggaggcccagggcaggggtgggcgtgttgtttgc

SEQ ID NO: 165797 - DNA, 4837 bp, Homo sapiens
  Payload ID: 12642
  Gene Symbol: PLCH2
  Gene Name: phospholipase C, eta 2
  Uniprot ID: O75038
  ENST ID: ENST00000378486
  CDS Start-End: 275-4525
gcggctgcgtcagggattccttggtggccctggagggtggataggctggcctgggggccatcaggacagcaggtgacggtcaggccaatgccagccgggcctgggcacagccctgtgggggcttcggagggccctgaggaggaggaggaagaggcagaggagagaaggccccacggaggtcctgtcgccagcgctgccactgcctgacctccgctgcccgaaggccggtgggcctctgtggcctccgtgaagcaggcccggctgtcgtcaggccatgtctggtccatggccctcccccgacagccggaccaagggaacggtggcctggctggcggaggtactcctctgggttggagggagtgtggtgctgtcttcagagtggcagctcggccccctggtggagcggtgcatgggtgccatgcaagaggggatgcagatggtgaagctgcgtggcggctccaagggcctggtccgcttctactacctggacgagcaccgctcctgcatccgctggaggccctcacgcaagaacgagaaggccaagatctccatcgactccatccaggaggtgagtgaggggcggcagtcggaggtcttccagcgctaccctgacggcagcttcgaccccaactgctgcttcagcatctaccacggcagccaccgcgagtcgctggacctggtctccaccagcagcgaggtggcgcgcacctgggtcactggcctgcgctacctcatggccggcatcagcgacgaggacagcctggctcgccgccagcgcaccagggaccagtggctgaagcagacgtttgacgaggccgacaagaacggggatggcagcctgagcattggcgaggtcctgcagctgctgcacaagctcaacgtgaacctgccccggcagagggtgaagcagatgttcagggaagcggacacggatgaccaccaagggacgctgggttttgaagagttctgtgccttctacaagatgatgtccacccgccgggacctctacctgctcatgctgacctacagcaaccacaaggaccacctggatgccgccagcctgcagcgcttcctgcaggtggagcagaagatggcgggtgtgaccctcgagagctgccaggacatcatcgagcagtttgagccatgcccagaaaacaagagtaaggggctgctgggcattgatggcttcaccaactacaccaggagccctgctggtgacatcttcaaccctgagcaccaccatgtgcaccaggacatgacgcagccgctgagccactacttcatcacctcgtcccacaacacctacctcgtgggtgaccagctcatgtcccagtcacgggtggacatgtatgcttgggtcctgcaggctggctgccgctgcgtggaggtggactgctgggatgggcccgacggggagcccattgtgcaccatggctacactctgacttccaagatcctcttcaaagacgtcattgaaaccatcaacaaatatgccttcatcaagaatgagtacccagtgatcctgtccatcgaaaaccactgcagtgtcatccagcagaagaaaatggcccagtatctgactgacatccttggggacaagctggacctgtcatcagtgagcagtgaagatgccaccacactcccctctccacagatgctcaagggcaagatcctcgtgaaggggaagaagctcccagccaacatcagcgaggatgcggaggaaggcgaggtgtctgatgaggacagtgctgatgagattgacgatgactgcaagctcctcaatggggatgcatccaccaatcgaaagcgtgtagaaaacactgctaagaggaaactggattccctcatcaaagagtcgaagattcgggactgtgaggaccccaacaacttctccgtctccacactgtccccatctggaaagctcggacgcaagagcaaggctgaagaggacgtggagtctggggaggatgccggggccagcagacgcaatggccgcctcgtcgtgggaagcttctccaggcgcaagaagaagggcagcaagctgaagaaggcggccagcgtggaggagggagatgagggtcaggactccccgggaggccagagccgaggggcgacccggcagaagaagaccatgaagctgtcccgggccctctctgacctggtgaagtacaccaagtccgtggccacccacgacatagagatggaggcggcgtccagctggcaggtgtcgtccttcagcgagaccaaggcccaccagattctgcagcagaagccggcgcagtacctacgcttcaaccagcagcagctctcccgcatctacccctcctcctaccgtgtggactccagcaactacaacccgcagcccttctggaacgccggctgccaaatggttgccctgaactaccagtcagaggggcggatgctgcagctgaaccgagccaagttcagcgccaacggtggctgcggctacgtactcaagcctgggtgcatgtgccagggcgtgttcaaccccaactcggaggaccccctgcccgggcagctcaagaagcagctggtgctccggatcatcagtggccagcagcttcccaagccgcgcgactccatgctgggggaccgtggggagatcatcgacccctttgtggaggtggagatcattgggctccctgtggactgcagcagggagcagacccgcgtggtggacgacaacgggttcaaccccacctgggaggagaccctggttttcatggtgcacatgccggagatcgcgctggtccgcttcctcgtctgggaccacgatcccatcgggcgtgacttcattggccagaggacgctggccttcagcagcatgatgccaggctacagacacgtgtacctagaagggatggaagaggcctccatcttcgtgcatgtggctgtcagtgacatcagcggtaaggtcaagcaggctctgggcctaaaaggcctcttcctccgaggcccaaagcccggctcgctggacagtcatgctgctgggcggcccccggcccggccctccgttagccagcggatcctgcggcgcacggccagcgccccgaccaagagccagaagccgggccgcaggggcttcccggagctggtcctgggtacacgggacacaggctccaagggggtggcagacgatgtggtgccccccgggcccggacctgctccggaagccccagcccaggaggggcccggcagcggcagcccccgagacacccgccccctctccacgcagcggccactccccccactgtgcagcctggaaaccatcgctgaggagcccgccccaggccctggtcccccgccaccagcggctgtccccaccagctcttctcagggacggcccccataccccacaggacccggagccaatgtggcaagccccctagaggacactgaggagccccgagacagcaggcctcggccgtgcaacggcgagggcgccggcggggcatacgagagggcccccggcagccagacggacggcaggagccagccccggaccctgggccacctgcccgtgattagaagggtgaagagtgaggggcaggtgcccacggagcccctgggagggtggcggcccctggccgctccctttccagctcctgccgtgtactccgatgccacgggcagtgacccgctgtggcagcggctggagccatgtggccaccgagacagcgtttcctcctcctccagcatgtcatccagcgacactgtcattgacctctccctgcccagcctgggcctgggccgcagccgtgagaacctcgctggagcccacatgggacgcctgccccccaggccccactcggcttcggctgcccgcccagacctgccacctgtgaccaagagcaaatccaaccccaaccttcgggctacaggccagcggcctcccatacctgacgaactgcagcccaggtccctggccccaaggatggctggcctccccttccggcctccctggggctgcctttccctggtgggcgtgcaggactgccccgtggctgccaagtccaagagcctgggcgacctcactgctgatgactttgcccctagctttgagggcggctcccgcagactgagccacagcctgggcctcccgggagggacacggcgggtgtcggggccaggggtgagacgggacaccctgacagagcagctgcgctggctcactgtcttccagcaggcaggagacatcacgtcacccaccagcctgggcccggctggggagggggtggcagggggccctggttttgtgcggcgctcctcctcccgcagccacagccgcgtgcgtgccattgccagccgggcccgccaggcccaggagcggcagcagagactgcagggcctgggccggcagggacccccagaagaggagcggggcacccccgagggcgcctgctccgtgggccacgagggcagtgtggatgcaccagcaccctccaagggagccctcgggccagcatccgcggctgctgaaaacctggtcctgctccgcctctgaccgtcagtggtgggaacctgggcggctctggaggcccagggcaggggtgggcgtgttgtttgctcaggaaacagggcagccaggcccccaaaactgtgtccccctggctgccctgtgtcccctccacccctgcctccctcctgcccctgctcccggggaggaaaggctaaagctgctggcccggggcccacaggaggggcttcgaggctggccctgccaggcagttttcccggcgttttaggatctgtacatagagaaatatttaaatttttagaagcaaaacttatacaacattaaaatgataccaagtcc

SEQ ID NO: 165798 - DNA, 4837 bp, Homo sapiens
  Payload ID: 12642
  Gene Symbol: PLCH2
  Gene Name: phospholipase C, eta 2
  Uniprot ID: O75038
  ENST ID: ENST00000419816
  CDS Start-End: 275-4525
gcggctgcgtcagggattccttggtggccctggagggtggataggctggcctgggggccatcaggacagcaggtgacggtcaggccaatgccagccgggcctgggcacagccctgtgggggcttcggagggccctgaggaggaggaggaagaggcagaggagagaaggccccacggaggtcctgtcgccagcgctgccactgcctgacctccgctgcccgaaggccggtgggcctctgtggcctccgtgaagcaggcccggctgtcgtcaggccatgtctggtccatggccctcccccgacagccggaccaagggaacggtggcctggctggcggaggtactcctctgggttggagggagtgtggtgctgtcttcagagtggcagctcggccccctggtggagcggtgcatgggtgccatgcaagaggggatgcagatggtgaagctgcgtggcggctccaagggcctggtccgcttctactacctggacgagcaccgctcctgcatccgctggaggccctcacgcaagaacgagaaggccaagatctccatcgactccatccaggaggtgagtgaggggcggcagtcggaggtcttccagcgctaccctgacggcagcttcgaccccaactgctgcttcagcatctaccacggcagccaccgcgagtcgctggacctggtctccaccagcagcgaggtggcgcgcacctgggtcactggcctgcgctacctcatggccggcatcagcgacgaggacagcctggctcgccgccagcgcaccagggaccaatggctgaagcagacgtttgacgaggccgacaagaacggggatggcagcctgagcattggcgaggtcctgcagctgctgcacaagctcaacgtgaacctgccccggcagagggtgaagcagatgttcagggaagcggacacggatgaccaccaagggacgctgggttttgaagagttctgtgccttctacaagatgatgtccacccgccgggacctctacctgctcatgctgacctacagcaaccacaaggaccacctggatgccgccagcctgcagcgcttcctgcaggtggagcagaagatggcgggtgtgaccctcgagagctgccaggacatcatcgagcagtttgagccatgcccagaaaacaagagtaaggggctgctgggcattgatggcttcaccaactacaccaggagccctgctggtgacatcttcaaccctgagcaccaccatgtgcaccaggacatgacgcagccgctgagccactacttcatcacctcgtcccacaacacctacctcgtgggtgaccagctcatgtcccagtcacgggtggacatgtatgcttgggtcctgcaggctggctgccgctgcgtggaggtggactgctgggatgggcccgacggggagcccattgtgcaccatggctacactctgacttccaagatcctcttcaaagacgtcattgaaaccatcaacaaatatgccttcatcaagaatgagtacccagtgatcctgtccatcgaaaaccactgcagtgtcatccagcagaagaaaatggcccagtatctgactgacatccttggggacaagctggacctgtcatcagtgagcagtgaagatgccaccacactcccctctccacagatgctcaagggcaagatcctcgtgaaggggaagaagctcccagccaacatcagcgaggatgcggaggaaggcgaggtgtctgatgaggacagtgctgatgagattgacgatgactgcaagctcctcaatggggatgcatccaccaatcgaaagcgtgtagaaaacactgctaagaggaaactggattccctcatcaaagagtcgaagattcgggactgtgaggaccccaacaacttctccgtctccacactgtccccatctggaaagctcggacgcaagagcaaggctgaagaggacgtggagtctggggaggatgccggggccagcagacgcaatggccgcctcgtcgtgggaagcttctccaggcgcaagaagaagggcagcaagctgaagaaggcggccagcgtggaggagggagatgagggtcaggactccccgggaggccagagccgaggggcgacccggcagaagaagaccatgaagctgtcccgggccctctctgacctggtgaagtacaccaagtccgtggccacccacgacatagagatggaggcggcgtccagctggcaggtgtcgtccttcagcgagaccaaggcccaccagattctgcagcagaagccggcgcagtacctacgcttcaaccagcagcagctctcccgcatctacccctcctcctaccgtgtggactccagcaactacaacccgcagcccttctggaacgccggctgccaaatggttgccctgaactaccagtcagaggggcggatgctgcagctgaaccgagccaagttcagcgccaacggtggctgcggctacgtactcaagcctgggtgcatgtgccagggcgtgttcaaccccaactcggaggaccccctgcccgggcagctcaagaagcagctggtgctccggatcatcagtggccagcagcttcccaagccgcgcgactccatgctgggggaccgtggggagatcatcgacccctttgtggaggtggagatcattgggctccctgtggactgcagcagggagcagacccgcgtggtggacgacaacgggttcaaccccacctgggaggagaccctggttttcatggtgcacatgccggagatcgcgctggtccgcttcctcgtctgggaccacgatcccatcgggcgtgacttcattggccagaggacgctggccttcagcagcatgatgccaggctacagacacgtgtacctagaagggatggaagaggcctccatcttcgtgcatgtggctgtcagtgacatcagcggtaaggtcaagcaggctctgggcctaaaaggcctcttcctccgaggcccaaagcccggctcgctggacagtcatgctgctgggcggcccccggcccggccctccgttagccagcggatcctgcggcgcacggccagcgccccgaccaagagccagaagccgggccgcaggggcttcccggagctggtcctgggtacacgggacacaggctccaagggggtggcagacgatgtggtgccccccgggcccggacctgctccggaagccccagcccaggaggggcccggcagcggcagcccccgagacacccgccccctctccacgcagcggccactccccccactgtgcagcctggaaaccatcgctgaggagcccgccccaggccctggtcccccgccaccagcggctgtccccaccagctcttctcagggacggcccccataccccacaggacccggagccaatgtggcaagccccctagaggacactgaggagccccgagacagcaggcctcggccgtgcaacggcgagggcgccggcggggcatacgagagggcccccggcagccagacggacggcaggagccagccccggaccctgggccacctgcccgtgattagaagggtgaagagtgaggggcaggtgcccacggagcccctgggagggtggcggcccctggccgctccctttccagctcctgccgtgtactccgatgccacgggcagtgacccgctgtggcagcggctggagccatgtggccaccgagacagcgtttcctcctcctccagcatgtcatccagcgacactgtcattgacctctccctgcccagcctgggcctgggccgcagccgtgagaacctcgctggagcccacatgggacgcctgccccccaggccccactcggcttcggctgcccgcccagacctgccacctgtgaccaagagcaaatccaaccccaaccttcgggctacaggccagcggcctcccatacctgacgaactgcagcccaggtccctggccccaaggatggctggcctccccttccggcctccctggggctgcctttccctggtgggcgtgcaggactgccccgtggctgccaagtccaagagcctgggcgacctcactgctgatgactttgcccctagctttgagggcggctcccgcagactgagccacagcctgggcctcccgggagggacacggcgggtgtcggggccaggggtgagacgggacaccctgacagagcagctgcgctggctcactgtcttccagcaggcaggagacatcacgtcacccaccagcctgggcccggctggggagggggtggcagggggccctggttttgtgcggcgctcctcctcccgcagccacagccgcgtgcgtgccattgccagccgggcccgccaggcccaggagcggcagcagagactgcagggcctgggccggcagggacccccagaagaggagcggggcacccccgagggcgcctgctccgtgggccacgagggcagtgtggatgcaccagcaccctccaagggagccctcgggccagcatccgcggctgctgaaaacctggtcctgctccgcctctgaccgtcagtggtgggaacctgggcggctctggaggcccagggcaggggtgggcgtgttgtttgctcaggaaacagggcagccaggcccccaaaactgtgtccccctggctgccctgtgtcccctccacccctgcctccctcctgcccctgctcccggggaggaaaggctaaagctgctggcccggggcccacaggaggggcttcgaggctggccctgccaggcagttttcccggcgttttaggatctgtacatagagaaatatttaaatttttagaagcaaaacttatacaacattaaaatgataccaagtcc

SEQ ID NO: 165799 - DNA, 5450 bp, Homo sapiens
  Payload ID: 12642
  Gene Symbol: PLCH2
  Gene Name: phospholipase C, eta 2
  Uniprot ID: O75038
  ENST ID: ENST00000449969
  CDS Start-End: 162-3551
cacgggcgggcgcggcagggcagcgtgtggggctgcgatcggcatgggctctgcgcgcggggtgcccctgctcgggctggggctcaggggacgccgggggccagcacagggcccggtgtccctcgggccgtgccggtaactgggattggcacccgccggccatggaagagcctgggcccccaggtgggctcagccaagaccaagtggagcggtgcatgggtgccatgcaagaggggatgcagatggtgaagctgcgtggcggctccaagggcctggtccgcttctactacctggacgagcaccgctcctgcatccgctggaggccctcacgcaagaacgagaaggccaagatctccatcgactccatccaggaggtgagtgaggggcggcagtcggaggtcttccagcgctaccctgacggcagcttcgaccccaactgctgcttcagcatctaccacggcagccaccgcgagtcgctggacctggtctccaccagcagcgaggtggcgcgcacctgggtcactggcctgcgctacctcatggccggcatcagcgacgaggacagcctggctcgccgccagcgcaccagggaccaatggctgaagcagacgtttgacgaggccgacaagaacggggatggcagcctgagcattggcgaggtcctgcagctgctgcacaagctcaacgtgaacctgccccggcagagggtgaagcagatgttcagggaagcggacacggatgaccaccaagggacgctgggttttgaagagttctgtgccttctacaagatgatgtccacccgccgggacctctacctgctcatgctgacctacagcaaccacaaggaccacctggatgccgccagcctgcagcgcttcctgcaggtggagcagaagatggcgggtgtgaccctcgagagctgccaggacatcatcgagcagtttgagccatgcccagaaaacaagagtaaggggctgctgggcattgatggcttcaccaactacaccaggagccctgctggtgacatcttcaaccctgagcaccaccatgtgcaccaggacatgacgcagccgctgagccactacttcatcacctcgtcccacaacacctacctcgtgggtgaccagctcatgtcccagtcacgggtggacatgtatgcttgggtcctgcaggctggctgccgctgcgtggaggtggactgctgggatgggcccgacggggagcccattgtgcaccatggctacactctgacttccaagatcctcttcaaagacgtcattgaaaccatcaacaaatatgccttcatcaagaatgagtacccagtgatcctgtccatcgaaaaccactgcagtgtcatccagcagaagaaaatggcccagtatctgactgacatccttggggacaagctggacctgtcatcagtgagcagtgaagatgccaccacactcccctctccacagatgctcaagggcaagatcctcgtgaaggggaagaagctcccagccaacatcagcgaggatgcggaggaaggcgaggtgtctgatgaggacagtgctgatgagattgacgatgactgcaagctcctcaatggggatgcatccaccaatcgaaagcgtgtagaaaacactgctaagaggaaactggattccctcatcaaagagtcgaagattcgggactgtgaggaccccaacaacttctccgtctccacactgtccccatctggaaagctcggacgcaagagcaaggctgaagaggacgtggagtctggggaggatgccggggccagcagacgcaatggccgcctcgtcgtgggaagcttctccaggcgcaagaagaagggcagcaagctgaagaaggcggccagcgtggaggagggagatgagggtcaggactccccgggaggccagagccgaggggcgacccggcagaagaagaccatgaagctgtcccgggccctctctgacctggtgaagtacaccaagtccgtggccacccacgacatagagatggaggcggcgtccagctggcaggtgtcgtccttcagcgagaccaaggcccaccagattctgcagcagaagccggcgcagtacctacgcttcaaccagcagcagctctcccgcatctacccctcctcctaccgtgtggactccagcaactacaacccgcagcccttctggaacgccggctgccaaatggttgccctgaactaccagtcagaggggcggatgctgcagctgaaccgagccaagttcagcgccaacggtggctgcggctacgtactcaagcctgggtgcatgtgccagggcgtgttcaaccccaactcggaggaccccctgcccgggcagctcaagaagcagctggtgctccggatcatcagtggccagcagcttcccaagccgcgcgactccatgctgggggaccgtggggagatcatcgacccctttgtggaggtggagatcattgggctccctgtggactgcagcagggagcagacccgcgtggtggacgacaacgggttcaaccccacctgggaggagaccctggttttcatggtgcacatgccggagatcgcgctggtccgcttcctcgtctgggaccacgatcccatcgggcgtgacttcattggccagaggacgctggccttcagcagcatgatgccaggctacagacacgtgtacctagaagggatggaagaggcctccatcttcgtgcatgtggctgtcagtgacatcagcggtaaggtcaagcaggctctgggcctaaaaggcctcttcctccgaggcccaaagcccggctcgctggacagtcatgctgctgggcggcccccggcccggccctccgttagccagcggatcctgcggcgcacggccagcgccccgaccaagagccagaagccgggccgcaggggcttcccggagctggtcctgggtacacgggacacaggctccaagggggtggcagacgatgtggtgccccccgggcccggacctgctccggaagccccagcccaggaggggcccggcagcggcagcccccgaggtaaggcgccagctgcggtggcagagaagagccctgtgcgagtgcggcccccgcgtgtcctggacggccccgggcctgctgggatggccgccacatgcatgaagtgtgtggtgggatcctgcgccggcgtgaacaccgggggcctgcagagggagcggccacccagcccggggcctgcaagcaggcaggcagccattcgccagcagccccgggcccgggctgactcactgggggccccctgctgtggcctggaccctcacgctatcccggggagaagcagagaggcccccaagggtcctggggcctggaggcagggtccaggcggtagcggctccatgtcctcggactccagcagcccagacagcccgggcatccccgaaaggtccccccgctggcctgagggtgcctgcaggcaaccgggggccctgcagggagagatgagtgccttgtttgctcaaaagctggaggagatcaggagtaaatcccccatgttctccgccgttaggaactgagagcggcgagtgacaggtaacggggcccagccccggtgtcccgtgctgtcccagcccaaggagggccccgtgtgcggcacagggcgtggactgggccccagcagcagcagggtggggacaccgagtgtgccgcgcccgggggatgcctcggggtgggagctgggcctggcgaccctcggcacagggcaccggggacaccaccctgatccgactcctctccgcctctctccctgcctccctctctctcttctgcttctccctctggctctctctcactcccccacctccccacagacacccgccccctctccacgcagcggccactccccccactgtgcagcctggaaaccatcgctgaggagcccgccccaggccctggtcccccgccaccagcggctgtccccaccagctcttctcagggacggcccccataccccacaggacccggagccaatgtggcaagccccctagaggacactgaggagccccgagacagcaggcctcggccgtgcaacggcgagggcgccggcggggcatacgagagggcccccggcagccagacggacggcaggagccagccccggaccctgggccacctgcccgtgattagaagggtgaagagtgaggggcaggtgcccacggagcccctgggagggtggcggcccctggccgctccctttccagctcctgccgtgtactccgatgccacgggcagtgacccgctgtggcagcggctggagccatgtggccaccgagacagcgtttcctcctcctccagcatgtcatccagcgacactgtcattgacctctccctgcccagcctgggcctgggccgcagccgtgagaacctcgctggagcccacatgggacgcctgccccccaggccccactcggcttcggctgcccgcccagacctgccacctgtgaccaagagcaaatccaaccccaaccttcgggctacaggccagcggcctcccatacctgacgaactgcagcccaggtccctggccccaaggatggctggcctccccttccggcctccctggggctgcctttccctggtgggcgtgcaggactgccccgtggctgccaagtccaagagcctgggcgacctcactgctgatgactttgcccctagctttgagggcggctcccgcagactgagccacagcctgggcctcccgggagggacacggcgggtgtcggggccaggggtgagacgggacaccctgacagagcagctgcgctggctcactgtcttccagcaggcaggagacatcacgtcacccaccagcctgggcccggctggggagggggtggcagggggccctggttttgtgcggcgctcctcctcccgcagccacagccgcgtgcgtgccattgccagccgggcccgccaggcccaggagcggcagcagagactgcagggcctgggccggcagggacccccagaagaggagcggggcacccccgagggcgcctgctccgtgggccacgagggcagtgtggatgcaccagcaccctccaagggagccctcgggccagcatccgcggctgctgaaaacctggtcctgctccgcctctgaccgtcagtggtgggaacctgggcggctctggaggcccagggcaggggtgggcgtgttgtttgctcaggaaacagggcagccaggcccccaaaactgtgtccccctggctgccctgtgtcccctccacccctgcctccctcctgcccctgctcccggggaggaaaggctaaagctgctggcccggggcccacaggaggggcttcgaggctggccctgccaggcagttttcccggcgttttaggatctgtacatagagaaatatttaaatttttagaagcaaaacttatacaacattaaaatgataccaagtccc

SEQ ID NO: 165800 - DNA, 568 bp, Homo sapiens
  Payload ID: 12642
  Gene Symbol: PLCH2
  Gene Name: phospholipase C, eta 2
  ENST ID: ENST00000609981
  CDS Start-End: 236-568
gccctttgctgcggcagctttctgttctccctggctccctgcacggaactgagctttggtgtgtgatgcgctgctggcccaggctacaccccgacaagggacaccgggggccccgggagcagagagacctcagagcagcctcctcctgcctcctgtggacggccggccccagctggtgatcccagccagtcccagctttcagttgctgcccccaccgacagtcctcagtccctccatgatggctcccccgacagccggcccccttcctggcccagctcttccgcctgaggacccagggccggatccggagagcaggtggcttttcttgagcgccaacattctgcccgtggtggagcggtgcatgggtgccatgcaagaggggatgcagatggtgaagctgcgtggcggctccaagggcctggtccgcttctactacctggacgagcaccgctcctgcatccgctggaggccctcacgcaagaacgagaaggccaagatctccatcgactccatccaggaggtgagtgaggggcggcagtcggaggtcttccagcgctaccctgacggc

SEQ ID NO: 165801 - DNA, 4837 bp, Homo sapiens; identical to SEQ ID NO: 165797
  Payload ID: 12642
  Gene Symbol: PLCH2
  Gene Name: phospholipase C, eta 2
  Uniprot ID: O75038
  ENST ID: ENST00000620687
  CDS Start-End: 275-4525

SEQ ID NO: 165802 - DNA, 4837 bp, Homo sapiens; identical to SEQ ID NO: 165798
  Payload ID: 12642
  Gene Symbol: PLCH2
  Gene Name: phospholipase C, eta 2
  Uniprot ID: O75038
  ENST ID: ENST00000626246
  CDS Start-End: 275-4525

SEQ ID NO: 165803 - DNA, 5450 bp, Homo sapiens; identical to SEQ ID NO: 165799
  Payload ID: 12642
  Gene Symbol: PLCH2
  Gene Name: phospholipase C, eta 2
  Uniprot ID: O75038
  ENST ID: ENST00000627854
  CDS Start-End: 162-3551

SEQ ID NO: 165804 - DNA, 5285 bp, Homo sapiens
  Payload ID: 12643
  Gene Symbol: PLCG1
  Gene Name: phospholipase C, gamma 1
  Uniprot ID: P19174
  ENST ID: ENST00000244007
  CDS Start-End: 198-4073
gagggcgcgcggaggacccgccgccgccggtgtgaggcggcccgtcctggctcccttgtccgggaagcccgcccaggagccgccgccgggtcccgctcgtctgccgcctcagcctcagccccaacctcagccgccgccgttgcgcttgctcccgggcggtcctggcctgtgccgccgccgcccccagcgtcggagccatggcgggcgccgcgtccccttgcgccaacggctgcgggcccggcgcgccctcggacgccgaggtgctgcacctctgccgcagcctcgaggtgggcaccgtcatgactttgttctactccaagaagtcgcagcgacccgagcggaagaccttccaggtcaagctggagacgcgccagatcacgtggagccggggcgccgacaagatcgagggggccattgacattcgtgaaattaaggagatccgcccagggaagacctcacgggactttgatcgctatcaagaggacccagctttccggccggaccagtcacattgctttgtcattctctatggaatggaatttcgcctgaaaacgctgagcctgcaagccacatctgaggatgaagtgaacatgtggatcaagggcttaacttggctgatggaggatacattgcaggcacccacacccctgcagattgagaggtggctccggaagcagttttactcagtggatcggaatcgtgaggatcgtatatcagccaaggacctgaagaacatgctgtcccaggtcaactaccgggtccccaacatgcgcttcctccgagagcggctgacggacctggagcagcgcagcggggacatcacctacgggcagtttgctcagctgtaccgcagcctcatgtacagcgcccagaagacgatggacctccccttcttggaagccagtactctgagggctggggagcggccggagctttgccgagtgtcccttcctgagttccagcagttccttcttgactaccagggggagctgtgggctgttgatcgcctccaggtgcaggagttcatgctcagcttcctccgagaccccttacgagagatcgaggagccatacttcttcctggatgagtttgtcaccttcctgttctccaaagagaacagtgtgtggaactcgcagctggatgcagtatgcccggacaccatgaacaaccctctttcccactactggatctcctcctcgcacaacacgtacctgaccggggaccagttctccagtgagtcctccttggaagcctatgctcgctgcctgcggatgggctgtcgctgcattgagttggactgctgggacggcccggatgggatgccagttatttaccatgggcacacccttaccaccaagatcaagttctcagatgtcctgcacaccatcaaggagcatgcctttgtggcctcagagtacccagtcatcctgtccattgaggaccactgcagcattgcccagcagagaaacatggcccaatacttcaagaaggtgctgggggacacactcctcaccaagcccgtggagatctctgccgacgggctcccctcacccaaccagcttaagaggaagatcctcatcaagcacaagaagctggctgagggcagtgcctacgaggaggtgcctacatccatgatgtactctgagaacgacatcagcaactctatcaagaatggcatcctctacctggaggaccctgtgaaccacgaatggtatccccactactttgttctgaccagcagcaagatctactactctgaggagaccagcagtgaccagggcaacgaggatgaggaggagcccaaggaggtcagcagcagcacagagctgcactccaatgagaagtggttccatgggaagctaggggcagggcgtgacgggcgtcacatcgctgagcgcctgcttactgagtactgcatcgagaccggagcccctgacggctccttcctcgtgcgagagagtgagaccttcgtgggcgactacacgctctctttctggcggaacgggaaagtccagcactgccgtatccactcccggcaagatgctgggacccccaagttcttcttgacagacaacctcgtctttgactccctctatgacctcatcacgcactaccagcaggtgcccctgcgctgtaatgagtttgagatgcgactttcagagcctgtcccacagaccaacgcccacgagagcaaagagtggtaccacgcgagcctgaccagagcacaggctgagcacatgctaatgcgcgtccctcgtgatggggccttcctggtgcggaagcggaatgaacccaactcatatgccatctctttccgggctgagggcaagatcaagcattgccgtgtccagcaagagggccagacagtgatgctagggaactcggagttcgacagccttgttgacctcatcagctactatgagaaacacccgctataccgcaagatgaagctgcgctatcccatcaacgaggaggcactggagaagattggcacagctgagcctgactacggggccctgtatgagggacgcaaccctggcttctatgtagaggcaaaccctatgccaactttcaagtgtgcagtcaaagccctctttgactacaaggcccagagggaggacgagctgaccttcatcaagagcgccatcatccagaatgtggagaagcaagagggaggctggtggcgaggggactacggagggaagaagcagctgtggttcccatcaaactacgtggaagagatggtcaaccccgtggccctggagccggagagggagcacttggacgagaacagccccctaggggacttgctgcggggggtcttggatgtgccggcttgtcagattgccatccgtcctgagggcaagaacaaccggctcttcgtcttctccatcagcatggcgtcggtggcccactggtccctggatgttgctgccgactcacaggaggagctgcaggactgggtgaaaaagatccgtgaagtggcccagacagcagacgccaggctcactgaagggaagataatggaacggaggaagaagattgccctggagctctctgaacttgtcgtctactgccggcctgttccctttgatgaagagaagattggcacagaacgtgcttgctaccgggacatgtcatccttcccggaaaccaaggctgagaaatacgtgaacaaggccaaaggcaagaagttccttcagtacaatcgactgcagctctcccgcatctaccccaagggccagcgactggattcctccaactacgatcctttgcccatgtggatctgtggcagtcagcttgtggccctcaacttccagacccctgacaagcctatgcagatgaaccaggccctcttcatgacgggcaggcactgtggctacgtgctgcagccaagcaccatgcgggatgaggccttcgacccctttgacaagagcagcctccgcgggctggagccatgtgccatctctattgaggtgctgggggcccgacatctgccaaagaatggccgaggcattgtgtgtccttttgtggagattgaggtggctggagctgagtatgacagcaccaagcagaagacagagtttgtggtggacaatggactcaaccctgtatggccagccaagcccttccacttccagatcagtaaccctgaatttgcctttctgcgcttcgtggtgtatgaggaagacatgtttagtgaccagaatttcctggctcaggctactttcccagtaaaaggcctgaagacaggatacagagcagtgcctttgaagaacaactacagtgaggacctggagttggcctccctgctgatcaagattgacattttccctgccaagcaggagaatggtgacctcagtcccttcagtggtacgtccctgcgggagcggggctcagatgcctcaggccagctgtttcatggccgagcccgggaaggctcctttgaatcccgctaccagcagccgtttgaggacttccgcatctcccaggagcatctcgcagaccattttgacagtcgagaacgaagggccccaagaaggactcgggtcaatggagacaaccgcctctagttgtaccccagcctcgttggagagcagcaggtgctgtgcgccttgtagaatgccgcgaactgggttctttggaagcagccccctgtggcggccttccgggtctcgcagcctgaagcctggattccagcagtgaatgctagacagaaaccaagccattaatgagatgttattactgttttgggcctccatgccccagctctggatgaaggcaaaaactgtactgtgtttcgcattaagcacacacatctggccctgacttctggagatggatccttccatcttgtggggccaggaccatggccgaagccccttggagagagaggctgcctcagccagtggcacaggagactccaaggagctactgacattcctaagagtggaggaggaggaggagccttgctgggccagggaaacaaagtttacattgtcctgtagctttaaaaccacagctgggcagggtgagaagctagatgcccctgcagtttggccctggagccagggcagaggaatgtagggcctgcatggagaagggttctgccctgcctgaggaggaggacacagcacaagggcacattgcccatggctgggaacatgacccagcctgaaagatacaggggatcatgttaaaaatagcagtattatttttcgtctcaatggtattgtaactaagttatttactcctcctgctcctcacccctgtagggaaaccttggagaggagagtggcaggtgggctgcctgctgtgttaagaggacttagtttgtgatgtaaggcactgtcaggaatggggggcgggccagggtgggaagagaagaaatagcagagcctattttggtgaggttttttgtttttaagtcaaagaagactcagtatgctttccctgaggaatgaaaaagggattgaggagttgcctgactcctgggtgggtggggtacaggcagttaggtgctgaatgaagctgccatccttgctgcagcttctaactggtaaaaagatccagggatggagatgggaaggttagaaaggcagccctcacctctgaggacagaggccggggtccaggcccgtgggcgcaaaggtgcctcatagcatagccagcattcagcacacacaaacctactgcccacatttgggctcagggttggccatttgctagttctgctgccctcttaagatctgactgccaaataaatcatcctcatgtcctttttc

SEQ ID NO: 165805 - DNA, 7395 bp, Homo sapiens
  Payload ID: 12643
  Gene Symbol: PLCG1
  Gene Name: phospholipase C, gamma 1
  Uniprot ID: P19174
  ENST ID: ENST00000373271
  CDS Start-End: 406-4278
gccgctcgtggccgccgggctgtgtccggggccgcgtgagaaagctctgcgggactgagggctgggtgggtcgaccgggaacggcgcgcgctcccgccgccatcgcgcctccgtccccgcctgcggcctgtctgggggtcgcggggcgcaggcgcggcgggccgacgggcgggggtcctccccacgggtgcgcgggcgcctttgttcccggcgccgaagcggggtggggcctcagggcagccccgccccgccgcgctgaggccccgccccgtgtccgcctgcaggagccgccgccgggtcccgctcgtctgccgcctcagcctcagccccaacctcagccgccgccgttgcgcttgctcccgggcggtcctggcctgtgccgccgccgcccccagcgtcggagccatggcgggcgccgcgtccccttgcgccaacggctgcgggcccggcgcgccctcggacgccgaggtgctgcacctctgccgcagcctcgaggtgggcaccgtcatgactttgttctactccaagaagtcgcagcgacccgagcggaagaccttccaggtcaagctggagacgcgccagatcacgtggagccggggcgccgacaagatcgagggggccattgacattcgtgaaattaaggagatccgcccagggaagacctcacgggactttgatcgctatcaagaggacccagctttccggccggaccagtcacattgctttgtcattctctatggaatggaatttcgcctgaaaacgctgagcctgcaagccacatctgaggatgaagtgaacatgtggatcaagggcttaacttggctgatggaggatacattgcaggcacccacacccctgcagattgagaggtggctccggaagcagttttactcagtggatcggaatcgtgaggatcgtatatcagccaaggacctgaagaacatgctgtcccaggtcaactaccgggtccccaacatgcgcttcctccgagagcggctgacggacctggagcagcgcagcggggacatcacctacgggcagtttgctcagctgtaccgcagcctcatgtacagcgcccagaagacgatggacctccccttcttggaagccagtactctgagggctggggagcggccggagctttgccgagtgtcccttcctgagttccagcagttccttcttgactaccagggggagctgtgggctgttgatcgcctccaggtgcaggagttcatgctcagcttcctccgagaccccttacgagagatcgaggagccatacttcttcctggatgagtttgtcaccttcctgttctccaaagagaacagtgtgtggaactcgcagctggatgcagtatgcccggacaccatgaacaaccctctttcccactactggatctcctcctcgcacaacacgtacctgaccggggaccagttctccagtgagtcctccttggaagcctatgctcgctgcctgcggatgggctgtcgctgcattgagttggactgctgggacggcccggatgggatgccagttatttaccatgggcacacccttaccaccaagatcaagttctcagatgtcctgcacaccatcaaggagcatgcctttgtggcctcagagtacccagtcatcctgtccattgaggaccactgcagcattgcccagcagagaaacatggcccaatacttcaagaaggtgctgggggacacactcctcaccaagcccgtggagatctctgccgacgggctcccctcacccaaccagcttaagaggaagatcctcatcaagcacaagaagctggctgagggcagtgcctacgaggaggtgcctacatccatgatgtactctgagaacgacatcagcaactctatcaagaatggcatcctctacctggaggaccctgtgaaccacgaatggtatccccactactttgttctgaccagcagcaagatctactactctgaggagaccagcagtgaccagggcaacgaggatgaggaggagcccaaggaggtcagcagcagcacagagctgcactccaatgagaagtggttccatgggaagctaggggcagggcgtgacgggcgtcacatcgctgagcgcctgcttactgagtactgcatcgagaccggagcccctgacggctccttcctcgtgcgagagagtgagaccttcgtgggcgactacacgctctctttctggcggaacgggaaagtccagcactgccgtatccactcccggcaagatgctgggacccccaagttcttcttgacagacaacctcgtctttgactccctctatgacctcatcacgcactaccagcaggtgcccctgcgctgtaatgagtttgagatgcgactttcagagcctgtcccacagaccaacgcccacgagagcaaagagtggtaccacgcgagcctgaccagagcacaggctgagcacatgctaatgcgcgtccctcgtgatggggccttcctggtgcggaagcggaatgaacccaactcatatgccatctctttccgggctgagggcaagatcaagcattgccgtgtccagcaagagggccagacagtgatgctagggaactcggagttcgacagccttgttgacctcatcagctactatgagaaacacccgctataccgcaagatgaagctgcgctatcccatcaacgaggaggcactggagaagattggcacagctgagcctgactacggggccctgtatgagggacgcaaccctggcttctatgtagaggcaaaccctatgccaactttcaagtgtgcagtcaaagccctctttgactacaaggcccagagggaggacgagctgaccttcatcaagagcgccatcatccagaatgtggagaagcaagagggaggctggtggcgaggggactacggagggaagaagcagctgtggttcccatcaaactacgtggaagagatggtcaaccccgtggccctggagccggagagggagcacttggacgagaacagccccctaggggacttgctgcggggggtcttggatgtgccggcttgtcagattgccatccgtcctgagggcaagaacaaccggctcttcgtcttctccatcagcatggcgtcggtggcccactggtccctggatgttgctgccgactcacaggaggagctgcaggactgggtgaaaaagatccgtgaagtggcccagacagcagacgccaggctcactgaagggaagataatggaacggaggaagaagattgccctggagctctctgaacttgtcgtctactgccggcctgttccctttgatgaagagaagattggcacagaacgtgcttgctaccgggacatgtcatccttcccggaaaccaaggctgagaaatacgtgaacaaggccaaaggcaagaagttccttcagtacaatcgactgcagctctcccgcatctaccccaagggccagcgactggattcctccaactacgatcctttgcccatgtggatctgtggcagtcagcttgtggccctcaacttccagacccctgacaagcctatgcagatgaaccaggccctcttcatgacgggcaggcactgtggctacgtgctgcagccaagcaccatgcgggatgaggccttcgacccctttgacaagagcagcctccgcgggctggagccatgtgccatctctattgaggtgctgggggcccgacatctgccaaagaatggccgaggcattgtgtgtccttttgtggagattgaggtggctggagctgagtatgacagcaccaagcagaagacagagtttgtggtggacaatggactcaaccctgtatggccagccaagcccttccacttccagatcagtaaccctgaatttgcctttctgcgcttcgtggtgtatgaggaagacatgtttagtgaccagaatttcctggctcaggctactttcccagtaaaaggcctgaagacaggatacagagcagtgcctttgaagaacaactacagtgaggacctggagttggcctccctgctgatcaagattgacattttccctgccaaggagaatggtgacctcagtcccttcagtggtacgtccctgcgggagcggggctcagatgcctcaggccagctgtttcatggccgagcccgggaaggctcctttgaatcccgctaccagcagccgtttgaggacttccgcatctcccaggagcatctcgcagaccattttgacagtcgagaacgaagggccccaagaaggactcgggtcaatggagacaaccgcctctagttgtaccccagcctcgttggagagcagcaggtgctgtgcgccttgtagaatgccgcgaactgggttctttggaagcagccccctgtggcggccttccgggtctcgcagcctgaagcctggattccagcagtgaatgctagacagaaaccaagccattaatgagatgttattactgttttgggcctccatgccccagctctggatgaaggcaaaaactgtactgtgtttcgcattaagcacacacatctggccctgacttctggagatggatccttccatcttgtggggccaggaccatggccgaagccccttggagagagaggctgcctcagccagtggcacaggagactccaaggagctactgacattcctaagagtggaggaggaggaggagccttgctgggccagggaaacaaagtttacattgtcctgtagctttaaaaccacagctgggcagggtgagaagctagatgcccctgcagtttggccctggagccagggcagaggaatgtagggcctgcatggagaagggttctgccctgcctgaggaggaggacacagcacaagggcacattgcccatggctgggaacatgacccagcctgaaagatacaggggatcatgttaaaaatagcagtattatttttcgtctcaatggtattgtaactaagttatttactcctcctgctcctcacccctgtagggaaaccttggagaggagagtggcaggtgggctgcctgctgtgttaagaggacttagtttgtgatgtaaggcactgtcaggaatggggggcgggccagggtgggaagagaagaaatagcagagcctattttggtgaggttttttgtttttaagtcaaagaagactcagtatgctttccctgaggaatgaaaaagggattgaggagttgcctgactcctgggtgggtggggtacaggcagttaggtgctgaatgaagctgccatccttgctgcagcttctaactggtaaaaagatccagggatggagatgggaaggttagaaaggcagccctcacctctgaggacagaggccggggtccaggcccgtgggcgcaaaggtgcctcatagcatagccagcattcagcacacacaaacctactgcccacatttgggctcagggttggccatttgctagttctgctgccctcttaagatctgactgccaaataaatcatcctcatgtcctttttcctttgacttgtatgctctttcgggggctcaggaaagcctgttgcatgggacatgctcactagaaacagtcgccagatgattattctgcagtagaagcaggtaggaaatttctggaaatttctcaggttaagcagcaagagctgtaacccctcctctgggctaacaggagttgtgggtccactctctcctgcccaccctctgagggtgtgtctgagcagagtacatcctgcctgggttctttgtggccagccagttttggtggtgagctggaaacaaccagagcccctttccagttccacagaaacctctcctttcaaaaatgttgcattcagttcgttaacactgccaggtgccattctgattgcctctaggacttggcagctgaaatctctgggccctttcaacacagttgaaaggcccttctcttcctgaagctctgtttccatagttggctgtgctgggatggaacaaaaatgacgccacacaaaaaatttaagatagatccggttccgtggatgacatgaactgatgatagccagtatcaaacagcgatagtgctcaggttcttgtgtgactttcttttacagcttcacagtcccagttcatagagaggagggtggctttttcccatacacaagaaggtggtgggtgggaattcacctgggccctcatgatccatgtttcctctctaggtttttatggcctggagagaaaggtttcctatcagagaaggaagaggactgtgtaggcccttctgttagggcccatccacgttggttaggacgtccttggcgtgtttgttagtgttgacccttttagttttcatcaatacgtatctctatttgctgaacaagtgtctttctggaacacaacctggggaacagacagctctgcctttcttaaggcagctttgtagacctgaggctcacctctcttgggctctgtaagacattgcctttgcctcactgcaaatgttttgattgttcttcctagtggaaaacgtgccaactctcaagcaaatttaaagatcattttcacttcaagattcctccagacctgacaaatgttgattgacccagaaggcagagtgtttgttggtggggaagacccttacttggggccgaatgctttggcatcaggagttgtttgccccatcccatgcatgcaggccgtgtccctacagtgcgacagctcagggttatgacctgtggagtctcaaccctaacagcacattagcaccacttggggagcttctgaaaaatactggtacccggggccttagcataggtattgttcaaaacctctcaaggtgatttaaatgagtaacaagggttgaaaaaccctgattttggcagcacaaaccaaaagagcaggcagggccgggagagggaagtcagtggtaccagaaggtagatgggctcccttgcaggctccttgttctcctgccatcaccagtagaaccttctggctgacagaccagggacaagtagactgggttcaaagtgacagacctttcactttcaacagctttggctcagcagacatgtacacatacaaagtagagcctacaaggtcaggggcattctgcccccgccacaggactaaagactgccctgcgggaagatggcaggagcagtttctgacctcagttgagtatctgtggccatgagcagaaaaggcaggggtctgcctcctgaccaagcacatcttgaacatcacctgagagcttgaacatcactaaggacctagacactcacttgtctttcaacttgagcccatcactcaccatgtgagttctgttgagggtgggtagaaagcaaataggttcaggttatcccaccagactaactcggtgaatgaaaggatcatgccttcttcacattttaattaaatggatcaagcaca

SEQ ID NO: 165806 - DNA, 880 bp, Homo sapiens
  Payload ID: 12643
  Gene Symbol: PLCG1
  Gene Name: phospholipase C, gamma 1
  ENST ID: ENST00000599785
  CDS Start-End: 1-153
gatgttgctgccgactcacaggaggagctgcaggactgggtgaaaaagatccgtgaagtggcccagacagcagacgccaggagattggcacagaacgtgcttgctaccgggacatgtcatccttcccggaaaccaaggctgagaaatacgtgaacaaggccaaaggcaagaagttccttcagtacaatcgactgcagctctcccgcatctaccccaagggccagcgactggattcctccaactacgatcctttgcccatgtggatctgtggcagtcagcttgtggccctcaacttccagacccctgacaagcctatgcagatgaaccaggccctcttcatgacgggcaggcactgtggctacgtgctgcagccaagcaccatgcgggatgaggccttcgacccctttgacaagagcagcctccgcgggctggagccatgtgccatctctattgaggtgctgggggcccgacatctgccaaagaatggccgaggcattgtgtgtccttttgtggagattgaggtggctggagctgagtatgacagcaccaagcagaagacagagtttgtggtggacaatggactcaaccctgtatggccagccaagcccttccacttccagatcagtaaccctgaatttgcctttctgcgcttcgtggtgtatgaggaagacatgtttagtgaccagaatttcctggctcaggctactttcccagtaaaaggcctgaagacaggatacagagcagtgcctttgaagaacaactacagtgaggacctggagttggcctccctgctgatcaagattgacattttccctgccaagaccaactcttcagccagtgcatgcagggctctggaggtgatgccagcaggatctggagg

SEQ ID NO: 165807 - DNA, 865 bp, Homo sapiens
  Payload ID: 12643
  Gene Symbol: PLCG1
  Gene Name: phospholipase C, gamma 1
  ENST ID: ENST00000608885
  CDS Start-End: 1-660
cttcagtacaatcgactgcagctctcccgcatctaccccaagggccagcgactggattcctccaactacgatcctttgcccatgtggatctgtggcagtcagcttgtggccctcaacttccagacccctgacaagcctatgcagatgaaccaggccctcttcatgacgggcaggcactgtggctacgtgctgcagccaagcaccatgcgggatgaggccttcgacccctttgacaagagcagcctccgcgggctggagccatgtgccatctctattgaggtgctgggggcccgacatctgccaaagaatggccgaggcattgtgtgtccttttgtggagattgaggtggctggagctgagtatgacagcaccaagcagaagacagagtttgtggtggacaatggactcaaccctgtatggccagccaagcccttccacttccagatcagtaaccctgaatttgcctttctgcgcttcgtggtgtatgaggaagacatgtttagtgaccagaatttcctggctcaggctactttcccagtaaaaggcctgaagacaggatacagagcagtgcctttgaagaacaactacagtgaggacctggagttggcctccctgctgatcaagattgacattttccctgccaagaaacttctctgttgaaggactgcgtccccattcaaagaggtcagatttgtgggcaggcaagagctcaggaatgaagaaccaaaaaggaggctctcaacccctctccaaggccagacgctctctgtactcccattaacttcacaaccaagtgcagacgctcgaccaactcttcagccagtgcatgcagggctctggaggtgatgccagcaggatctggagg

SEQ ID NO: 165808 - DNA, 1005 bp, Homo sapiens
  Payload ID: 12643
  Gene Symbol: PLCG1
  Gene Name: phospholipase C, gamma 1
  ENST ID: ENST00000607954
  CDS Start-End: 1-327
ctgaagacaggatacagagcagtgcctttgaagaacaactacagtgaggacctggagttggcctccctgctgatcaagattgacattttccctgccaaggagaatggtgacctcagtcccttcagtggtacgtccctgcgggagcggggctcagatgcctcaggccagctgtttcatggccgagcccgggaaggctcctttgaatcccgctaccagcagccgtttgaggacttccgcatctcccaggagcatctcgcagaccattttgacagtcgagaacgaagggccccaagaaggactcgggtcaatggagacaaccgcctctagttgtaccccagcctcgttggagagcagcaggtgctgtgcgccttgtagaatgccgcgaactgggttctttggaagcagccccctgtggcggccttccgggtctcgcagcctgaagcctggattccagcagtgaatgctagacagaaaccaagccattaatgagatgttattactgttttgggcctccatgccccagctctggatgaaggcaaaaactgtactgtgtttcgcattaagcacacacatctggccctgacttctggagatggatccttccatcttgtggggccaggaccatggccgaagccccttggagagagaggctgcctcagccagtggcacaggagactccaaggagctactgacattcctaagagtggaggaggaggaggagccttgctgggccagggaaacaaagtttacattgtcctgtagctttaaaaccacagctgggcaggaaacttctctgttgaaggactgcgtccccattcaaagaggtcagatttgtgggcaggcaagagctcaggaatgaagaaccaaaaaggaggctctcaacccctctccaaggccagacgctctctgtactcccattaacttcacaaccaagtgcagacgctcgaccaactcttcagccagtgcatgcagggctctggaggtgatgccagcaggatctggagg

SEQ ID NO: 165809 - DNA, 956 bp, Homo sapiens
  Payload ID: 12643
  Gene Symbol: PLCG1
  Gene Name: phospholipase C, gamma 1
  ENST ID: ENST00000609257
  CDS Start-End: 1-400
cttcgtggtgtatgaggaagacatgtttagtgaccagaatttcctggctcaggctactttcccagtaaaaggcctgaagacaggatacagagcagtgcctttgaagaacaactacagtgaggacctggagttggcctccctgctgatcaagattgacattttccctgccaaggagaatggtgacctcagtcccttcagtggtacgtccctgcgggagcggggctcagatgcctcaggccagctgtttcatggccgagcccgggaaggctcctttgaatcccgctaccagcagccgtttgaggacttccgcatctcccaggagcatctcgcagaccattttgacagtcgagaacgaagggccccaagaaggactcgggtcaatggagacaaccgcctctagttgtaccccagcctcgttggagagcagcaggtgctgtgcgccttgtagaatgccgcgaactgggttctttggaagcagccccctgtggcggccttccgggtctcgcagcctgaagcctggattccagcagtgaatgctagacagaaaccaagccattaatgagatgttattactgttttgggcctccatgccccagctctggatgaaggcaaaaactgtactgtgtttcgcattaagcacacacatctggccctgacttctggagatggatccttccatcttgtggggccaggaccatggccgaagccccttggagagagaggctgcctcagccagtggcacaggagactccaaggagctactgacattcctaagagtggaggaggaggaggagccttgctgggccagggaaacaaagtttacattgtcctgtagctttaaaaccacagctgggcagggaaagcctgttgcatgggacatgctcactagaaacagtcgccagatgattattctgcagtagaagcagaccaactcttcagccagtgcatgcagggct

SEQ ID NO: 165810 - DNA, 544 bp, Homo sapiens
  Payload ID: 12643
  Gene Symbol: PLCG1
  Gene Name: phospholipase C, gamma 1
  ENST ID: ENST00000612731
  CDS Start-End: 1-397
ccagaatgtggagaagcaagagggaggctggtggcgaggggactacggagggaagaagcagctgtggttcccatcaaactacgtggaagagatggtcaaccccgtggccctggagccggagagggagcacttggacgagaacagccccctaggggacttgctgcggggggtcttggatgtgccggcttgtcagattgccatccgtcctgagggcaagaacaaccggctcttcgtcttctccatcagcatggcgtcggtggcccactggtccctggatgttgctgccgactcacaggaggagctgcaggactgggtgaaaaagatccgtgaagtggcccagacagcagacgccagggacttggcagctgaaatctctgggccctttcaacacagttgaaaggcccttctcttcctgaagctctgtttccatagttggctgtgctgggatggaacaaaaatgacgccacacaaaaaatttaagatagatccggttccgtggatgacatgaactgatgatagccagtatcaaacagcgatagtgctc

SEQ ID NO: 165811 - DNA, 3819 bp, Homo sapiens
  Payload ID: 12644
  Gene Symbol: PLCG2
  Gene Name: phospholipase C, gamma 2 (phosphatidylinositol-specific)
  ENST ID: ENST00000359376
  CDS Start-End: 1-3759
atgtccaccacggtcaatgtagattcccttgcggaatatgagaagagccagatcaagagagccctggagctggggacggtgatgactgtgttcagcttccgcaagtccacccccgagcggagaaccgtccaggtgatcatggagacgcggcaggtggcctggagcaagaccgctgacaagatcgagggcttcttggatatcatggaaataaaagaaatccgcccagggaagaactccaaagatttcgagcgagcaaaagcagttcgccagaaagaagactgctgcttcaccatcctatatggcactcagttcgtcctcagcacgctcagcttggcagctgactctaaagaggatgcagttaactggctctctggcttgaaaatcttacaccaggaagcgatgaatgcgtccacgcccaccattatcgagagttggctgagaaagcagatatattctgtggatcaaaccagaagaaacagcatcagtctccgagagttgaagaccatcttgcccctgatcaactttaaagtgagcagtgccaagttccttaaagataagtttgtggaaataggagcacacaaagatgagctcagctttgaacagttccatctcttctataaaaaacttatgtttgaacagcaaaaatcgattctcgatgaattcaaaaaggattcgtccgtgttcatcctggggaacactgacaggccggatgcctctgctgtttacctgcatgacttccagaggtttctcatacatgaacagcaggagcattgggctcaggatctgaacaaagtccgtgagcggatgacaaagttcattgatgacaccatgcgtgaaactgctgagcctttcttgtttgtggatgagttcctcacgtacctgttttcacgagaaaacagcatctgggatgagaagtatgacgcggtggacatgcaggacatgaacaaccccctgtctcattactggatctcctcgtcacataacacgtaccttacaggtgaccagctgcggagcgagtcgtccccagaagcttacatccgctgcctgcgcatgggctgtcgctgcattgaactggactgctgggacgggcccgatgggaagccggtcatctaccatggctggacgcggactaccaagatcaagtttgacgacgtcgtgcaggccatcaaagaccacgcctttgttacctcgagcttcccagtgatcctgtccatcgaggagcactgcagcgtggagcaacagcgtcacatggccaaggccttcaaggaagtatttggcgacctgctgttgacgaagcccacggaggccagtgctgaccagctgccctcgcccagccagctgcgggagaagatcatcatcaagcataagaagctgggcccccgaggcgatgtggatgtcaacatggaggacaagaaggacgaacacaagcaacagggggagctgtacatgtgggattccattgaccagaaatggactcggcactactgcgccattgccgatgccaagctgtccttcagtgatgacattgaacagactatggaggaggaagtgccccaggatataccccctacagaactacattttggggagaaatggttccacaagaaggtggagaagaggacgagtgccgagaagttgctgcaggaatactgcatggagacggggggcaaggatggcaccttcctggttcgggagagcgagaccttccccaatgactacaccctgtccttctggcggtcaggccgggtccagcactgccggatccgctccaccatggagggcgggaccctgaaatactacttgactgacaacctcaccttcagcagcatctatgccctcatccagcactaccgcgagacgcacctgcgctgcgccgagttcgagctgcggctcacggaccctgtgcccaaccccaacccccacgagtccaagccgtggtactatgacagcctgagccgcggagaggcagaggacatgctgatgaggattccccgggacggggccttcctgatccggaagcgagaggggagcgactcctatgccatcaccttcagggctaggggcaaggtaaagcattgtcgcatcaaccgggacggccggcactttgtgctggggacctccgcctattttgagagtctggtggagctcgtcagttactacgagaagcattcactctaccgaaagatgagactgcgctaccccgtgacccccgagctcctggagcgctacaatatggaaagagatataaactccctctacgacgtcagcagaatgtatgtggatcccagtgaaatcaatccgtccatgcctcagagaaccgtgaaagctctgtatgactacaaagccaagcgaagcgatgagctgagcttctgccgtggtgccctcatccacaatgtctccaaggagcccgggggctggtggaaaggagactatggaaccaggatccagcagtacttcccatccaactacgtcgaggacatctcaactgcagacttcgaggagctagaaaagcagattattgaagacaatcccttagggtctctttgcagaggaatattggacctcaatacctataacgtcgtgaaagcccctcagggaaaaaaccagaagtcctttgtcttcatcctggagcccaagcagcagggcgatcctccggtggagtttgccacagacagggtggaggagctctttgagtggtttcagagcatccgagagatcacctggaagattgacaccaaggagaacaacatgaagtactgggagaagaaccagtccatcgccatcgagctctctgacctggttgtctactgcaaaccaaccagcaaaaccaaggacaacttagaaaatcctgacttccgagaaatccgctcctttgtggagacgaaggctgacagcatcatcagacagaagcccgtcgacctcctgaagtacaatcaaaagggcctgacccgcgtctacccaaagggacaaagagttgactcttcaaactacgaccccttccgcctctggctgtgcggttctcagatggtggcactcaatttccagacggcagataagtacatgcagatgaatcacgcattgttttctctcaatgggcgcacgggctacgttctgcagcctgagagcatgaggacagagaaatatgacccgatgccacccgagtcccagaggaagatcctgatgacgctgacagtcaaggttctcggtgctcgccatctccccaaacttggacgaagtattgcctgtccctttgtagaagtggagatctgtggagccgagtatgacaacaacaagttcaagacgacggttgtgaatgataatggcctcagccctatctgggctccaacacaggagaaggtgacatttgaaatttatgacccaaacctggcatttctgcgctttgtggtttatgaagaagatatgttcagcgatcccaactttcttgctcatgccacttaccccattaaagcagtcaaatcaggattcaggtccgttcctctgaagaatgggtacagcgaggacatagagctggcttccctcctggttttctgtgagatgcggccagtcctggagagcgaagaggaactttactcctcctgtcgccagctgaggaggcggcaagaagaactgaacaaccagctctttctgtatgacacacaccagaacttgcgcaatgccaaccgggatgccctggttaaagagttcagtgttaatgagaaccagtccagctgtaccaggagaaatgcaacaagaggttaagagagaagagagtcagcaacagcaagttttactcatagaagctggggtatgtgtgtaagg

SEQ ID NO: 165812 - DNA, 454 bp, Homo sapiens
  Payload ID: 12644
  Gene Symbol: PLCG2
  Gene Name: phospholipase C, gamma 2 (phosphatidylinositol-specific)
  ENST ID: ENST00000563375
  CDS Start-End: 1-136
ggacatgcaggacatgaacaaccccctgtctcattactggatctcctcgtcacataacactggactgctgggacgggcccgatgggaagccggtcatctaccatggctggacgcggactaccaagatcaagtttgacgacgtcgtgcaggccatcaaagaccacgcctttgttacctcgagcataagaagctgggcccccgaggcgatgtggatgtcaacatggaggacaagaaggacgaacacaagcaacagggggagctgtacatgtgggattccattgaccaggatccagtacccggtgctgccgtgcatttaggttgtcctgactccttcgtgtcctccaactgggggtcgttccaccagaaaccttatttttcagactttaatgctgcctctatccctttacctaatgtgtatatccattttgagtatatttttacatgtccgttctta

SEQ ID NO: 165813 - DNA, 1282 bp, Homo sapiens
  Payload ID: 12644
  Gene Symbol: PLCG2
  Gene Name: phospholipase C, gamma 2 (phosphatidylinositol-specific)
  ENST ID: ENST00000563193
  CDS Start-End: 1-535
gaacactgacaggccggatgcctctgctgtttacctgcatgacttccagaggtttctcatacatgaacagcaggagcattgggctcaggatctgaacaaagtccgtgagcggatgacaaagttcattgatgacaccatgcgtgaaactgctgagcctttcttgtttgtggatgagttcctcacgtacctgttttcacgagaaaacagcatctgggatgagaagtatgacgcggtggacatgcaggacatgaacaaccccctgtctcattactggatctcctcgtcacataacacgtaccttacaggtgaccagctgcggagcgagtcgtccccagaagcttacatccgctgcctgcgcatgggctgtcgctgcattgaactggactgctgggacgggcccgatgggaagccggtcatctaccatggctggacgcggactaccaagatcaagtttgacgacgtcgtgcaggccatcaaagaccacgcctttgttacctcgagatgtcccttgagctgggtggaggtgttgctgtgagacaatgaaattatggacgtcttttcgcacttggtgaaaacctttcaatgaaggcatatgatttctccatcgcagcattctcccctgtggggtcctagcccttctaagtgccaacctccatcaggcagatggaaggagctggtattaacagacactgtgcagtggcagcttacactctgctttgagagtttgctttcatttgcaggacataggtgcttatggttgtgagctgacagtcattcatcgaacattatctcattcatgactagaggaagttttttctggttaaaatagggctggaatcatctaacacctatagggctagaactctgtaatcaaacattaatgcattaatgttttggcagcaaaagccatccttattggtattaagagggatttaagaaaatgattgcaagcagcgttcattcgaatggttcagattttgctgtcagttacattttgataccaacttactaggtagcctttgttgtaaaagctttttagctgttatgttctagtaagggtgtgtggatcaggatcggggagtgagctgggtccacgcttcccaggagtgatgaggctatgatttacttgagctggaacatggttaaggattttatttttatcatcgtcactttattttcacatttgccttcatttctattgagtgacgtgatttcctatttatggaagtgacatagctgcctttagaataattttgtttcatagtaaatgccatgcacaagc

SEQ ID NO: 165814 - DNA, 912 bp, Homo sapiens
  Payload ID: 12644
  Gene Symbol: PLCG2
  Gene Name: phospholipase C, gamma 2 (phosphatidylinositol-specific)
  ENST ID: ENST00000565054
  CDS Start-End: 434-912
tccctccaggggcccaagagccactggtactcagtgtctgggtgggggcaggggggatttttgttctcccagcacctgcggctgttgagaccagagaagctggtggtcgaccacagcctggggtattagttcacccctagcttctccccagcgagaccccagggcccttgggcacaggggattaagcctctatctgcttacgtgcaagcggaagaaataggcccagagagcaacagtggcgggtctgcagtcacacagccaacttgcgcttgtggcagtggcaaggttgaagttctgagggtacccctcactcaagctccaggcgtcaggaaaagaacattccacgaagtccatctggaagacggtcctttccctgctgcccccagcttcctgatttctcccgattccttccttctccctggagcggccgacaatgtccaccacggtcaatgtagattcccttgcggaatatgagaagagccagatcaagagagccctggagctggggacggtgatgactgtgttcagcttccgcaagtccacccccgagcggagaaccgtccaggtgatcatggagacgcggcaggtggcctggagcaagaccgctgacaagatcgagggcttcttggatatcatggaaataaaagaaatccgcccagggaagaactccaaagatttcgagcgagcaaaagcagttcgccagaaagaagactgctgcttcaccatcctatatggcactcagttcgtcctcagcacgctcagcttggcagctgactctaaagaggatgcagttaactggctctctggcttgaaaatcttacaccaggaagcgatgaatgcgtccacgcccaccattatcgagagttggctgagaaagcagatatattctgtggatcaaaccagaagaaacag

SEQ ID NO: 165815 - DNA, 8707 bp, Homo sapiens
  Payload ID: 12644
  Gene Symbol: PLCG2
  Gene Name: phospholipase C, gamma 2 (phosphatidylinositol-specific)
  Uniprot ID: P16885
  ENST ID: ENST00000564138
  CDS Start-End: 215-4012
gaggatcacgtggcgcggcgccgcggccgaagcagaagtagcgagcgccggcggcggagggcgtgagcggcgctgagtgacccgagtcgggacgcgggctgcgcgcgcgggaccccggagcccaaacccggggcaggcgggcagctgtgcccgggcggcacggccagcttcctgatttctcccgattccttccttctccctggagcggccgacaatgtccaccacggtcaatgtagattcccttgcggaatatgagaagagccagatcaagagagccctggagctggggacggtgatgactgtgttcagcttccgcaagtccacccccgagcggagaaccgtccaggtgatcatggagacgcggcaggtggcctggagcaagaccgctgacaagatcgagggcttcttggatatcatggaaataaaagaaatccgcccagggaagaactccaaagatttcgagcgagcaaaagcagttcgccagaaagaagactgctgcttcaccatcctatatggcactcagttcgtcctcagcacgctcagcttggcagctgactctaaagaggatgcagttaactggctctctggcttgaaaatcttacaccaggaagcgatgaatgcgtccacgcccaccattatcgagagttggctgagaaagcagatatattctgtggatcaaaccagaagaaacagcatcagtctccgagagttgaagaccatcttgcccctgatcaactttaaagtgagcagtgccaagttccttaaagataagtttgtggaaataggagcacacaaagatgagctcagctttgaacagttccatctcttctataaaaaacttatgtttgaacagcaaaaatcgattctcgatgaattcaaaaaggattcgtccgtgttcatcctggggaacactgacaggccggatgcctctgctgtttacctgcatgacttccagaggtttctcatacatgaacagcaggagcattgggctcaggatctgaacaaagtccgtgagcggatgacaaagttcattgatgacaccatgcgtgaaactgctgagcctttcttgtttgtggatgagttcctcacgtacctgttttcacgagaaaacagcatctgggatgagaagtatgacgcggtggacatgcaggacatgaacaaccccctgtctcattactggatctcctcgtcacataacacgtaccttacaggtgaccagctgcggagcgagtcgtccccagaagcttacatccgctgcctgcgcatgggctgtcgctgcattgaactggactgctgggacgggcccgatgggaagccggtcatctaccatggctggacgcggactaccaagatcaagtttgacgacgtcgtgcaggccatcaaagaccacgcctttgttacctcgagcttcccagtgatcctgtccatcgaggagcactgcagcgtggagcaacagcgtcacatggccaaggccttcaaggaagtatttggcgacctgctgttgacgaagcccacggaggccagtgctgaccagctgccctcgcccagccagctgcgggagaagatcatcatcaagcataagaagctgggcccccgaggcgatgtggatgtcaacatggaggacaagaaggacgaacacaagcaacagggggagctgtacatgtgggattccattgaccagaaatggactcggcactactgcgccattgccgatgccaagctgtccttcagtgatgacattgaacagactatggaggaggaagtgccccaggatataccccctacagaactacattttggggagaaatggttccacaagaaggtggagaagaggacgagtgccgagaagttgctgcaggaatactgcatggagacggggggcaaggatggcaccttcctggttcgggagagcgagaccttccccaatgactacaccctgtccttctggcggtcaggccgggtccagcactgccggatccgctccaccatggagggcgggaccctgaaatactacttgactgacaacctcaccttcagcagcatctatgccctcatccagcactaccgcgagacgcacctgcgctgcgccgagttcgagctgcggctcacggaccctgtgcccaaccccaacccccacgagtccaagccgtggtactatgacagcctgagccgcggagaggcagaggacatgctgatgaggattccccgggacggggccttcctgatccggaagcgagaggggagcgactcctatgccatcaccttcagggctaggggcaaggtaaagcattgtcgcatcaaccgggacggccggcactttgtgctggggacctccgcctattttgagagtctggtggagctcgtcagttactacgagaagcattcactctaccgaaagatgagactgcgctaccccgtgacccccgagctcctggagcgctacaatatggaaagagatataaactccctctacgacgtcagcagaatgtatgtggatcccagtgaaatcaatccgtccatgcctcagagaaccgtgaaagctctgtatgactacaaagccaagcgaagcgatgagctgagcttctgccgtggtgccctcatccacaatgtctccaaggagcccgggggctggtggaaaggagactatggaaccaggatccagcagtacttcccatccaactacgtcgaggacatctcaactgcagacttcgaggagctagaaaagcagattattgaagacaatcccttagggtctctttgcagaggaatattggacctcaatacctataacgtcgtgaaagcccctcagggaaaaaaccagaagtcctttgtcttcatcctggagcccaagcagcagggcgatcctccggtggagtttgccacagacagggtggaggagctctttgagtggtttcagagcatccgagagatcacctggaagattgacaccaaggagaacaacatgaagtactgggagaagaaccagtccatcgccatcgagctctctgacctggttgtctactgcaaaccaaccagcaaaaccaaggacaacttagaaaatcctgacttccgagaaatccgctcctttgtggagacgaaggctgacagcatcatcagacagaagcccgtcgacctcctgaagtacaatcaaaagggcctgacccgcgtctacccaaagggacaaagagttgactcttcaaactacgaccccttccgcctctggctgtgcggttctcagatggtggcactcaatttccagacggcagataagtacatgcagatgaatcacgcattgttttctctcaatgggcgcacgggctacgttctgcagcctgagagcatgaggacagagaaatatgacccgatgccacccgagtcccagaggaagatcctgatgacgctgacagtcaaggttctcggtgctcgccatctccccaaacttggacgaagtattgcctgtccctttgtagaagtggagatctgtggagccgagtatgacaacaacaagttcaagacgacggttgtgaatgataatggcctcagccctatctgggctccaacacaggagaaggtgacatttgaaatttatgacccaaacctggcatttctgcgctttgtggtttatgaagaagatatgttcagcgatcccaactttcttgctcatgccacttaccccattaaagcagtcaaatcaggattcaggtccgttcctctgaagaatgggtacagcgaggacatagagctggcttccctcctggttttctgtgagatgcggccagtcctggagagcgaagaggaactttactcctcctgtcgccagctgaggaggcggcaagaagaactgaacaaccagctctttctgtatgacacacaccagaacttgcgcaatgccaaccgggatgccctggttaaagagttcagtgttaatgagaaccagctccagctgtaccaggagaaatgcaacaagaggttaagagagaagagagtcagcaacagcaagttttactcatagaagctggggtatgtgtgtaagggtattgtgtgtgtgcgcatgtgtgtttgcatgtaggagaacgtgccctattcacactctgggaagacgctaatctgtgacatcttttcttcaagcctgccatcaaggacatttcttaagacccaactggcatgagttggggtaatttcctattattttcatcttggacaactttcttaacttatattctttatagaggattccccaaaatgtgctcctcatttttggcctctcatgttccaaacctcattgaataaaagcaatgaaaaccttgatcaattaagccttctgttgcacgacctgtgcagtgaacaggatttcttttctggccaagaagattctacctctaatgatccaggtaactgatgtccatggaggatgagctggaaatgtaagaaactattcatgagattctgaaaaggattttaactcaaaggcaaatgattccataagggcccaaagagaagccctacccacaggcagcctgctcagttcaatgtactttaactaccaccggctgcctgctgcagtccacaagaaaatggctgagtgatgggatctgttcattaagacaatttctaattaatggtgacagcttgttttgtgactagagttactgggatggagggtaggaatcttggggcctctttgttttaaaaagcccatcagagagaccagagccgtgctgcaggggcaggttctcacttgcccctggctctgccagctgctgggaggctctggccccactagtccctcatggccctactgaactggctgggaggctgctggaatggcccttggtccacagctctccacaggcaagaggtcaactgctgcttgaaagaggtagacaaaagttaggttgatggcgaaatgtctctgggttacccagtcttctggagcagcaagctgagctttaatgggctaagcattagggtgttacagaaaatttcaaatgcagccatctcccttggggcagatctacctagttcatgacagtatgtgcggctggccagggctttacacctctgcatcttaagttgttaatacataccaataatgtaatatggctttttaaaggagaggagagtgctgggttgggaagggaggtggttggtagagtcacaacttctcaatgagtgaatttacagctgatgggaaaaggagtgtaactgtgaaaaacgatggctgtggtggggaagaacaaaccagcagtaagcctgatgtttgatgtggatggaactggcccctagaaacccatctgaccctcctcttgttacccgaaatgctgggcttagtatgcatgtactgctgaaaagcagggcagaacaaatcaggctctgaccagaagatccttctggtcccttcactctacaaaaacttactgatcacctccacatgccaaatacagtgccaagatttgggggtgtggatgtttaaacaaaaagctgtgggtctcatcaatcatctccatccacaagctcctaaaagaaagccatttacctcgcttgaagccaggaacacagggaacagcagtctggccaaggaagggctgttatctggtgctatcactccagttactcctccaactgggagctgctattttatttggcagtcagcaactgaagaaagaacattcctcttagtggcagatgttcaaagcaactttcaagaaaggctaggtgagaaaggcactgggatgagtgctgcaggcactctgtagccagggccccattagcctttggccaggtagccaccagaacctatttattgcacctggcatctcccccaacccctctcagctctgttaggacttccacacagcagagctcaggtgttgctgtcattacctcctttcagctcctcacttcattctactttaaagccacagtgctaaggcctgcatcccctttctgcccaaatgggttttttgctaccatatcaaagaacctgacatatggcggcataggaagcagaagctaagcctctctccagctgctgctgtgtaaaatccatgcgtggccaaagagaagtcaggggattatgacataaatggtgctgggaagaaccctctgcctaaaactgtctccttctcctggtgctacaaccggaatccaccatgagagagtactttcttcggttctttcctcctgtccttgacagagtaacacgttaatctggttcttggtggtgttagggactgattctctcaggaaaggcacacatggtatgatggctcttcccagagtctatgtgatgctacataacttcagtatctagctgagacatgcttcctacatgactgttaaagcacagccaatccaggccaagaagactagtaacaggcacattctgaaagatggaagcagcactgatagatcaaaaccaccactgcatatgtattacactgtttttgttcaccattttcctaagtgtgttatttagaatattggttattacaaggaaaaataaagtggggaggctggttaggccttgtgagtttgggaaacttaggttataaaaactaaataaagtttttctactgtgagactagatgtgcaggagtgaaaggtgtagagggtcttgttttccaaattcgatctcagaatctttttgccagaagtgtctcatgggacttatctatagtggaacacatttgaagacctactgctctattaagaaggcagccggacaacatgttctaatacttcgtatgctttgtgacctagttaaaatctaaacttaagtcgccatggccagtggcctttagattaagctagccttacccctgggagtataccagagctttccaaggaatacacagactccagtactctcaggggagcagtgttcagagcctcatcttcctgttatattcttctctaagattcatctgcctgagaaaatgcccttttctcaccttacaaaagaaaatatggctgtctccacctctagtcttactgtagagcatgtcccaaggtgtaaaaattcaaaatgtggatatttggaaagtgaaagacttatcaacagggcacaaatctttttgcaaatggattttccaagtttttctggtggttccaaattttttgctttcaacaaagtgggaggaacagcctgtagatttctgagtctcttagcatgtaactacaaaggggttggaagaattcagtgattctgctatcataaagcttccgttcccattgatgtatctgtgtgaacaaggatcaacatctccataaatgaaattgaaaacggaaaatagaattgatgatgaactttggctcaatcttaagatgttatcaatctacatagatgaaataattgtggagaaaagccctctttatctcattaagtgatacatttccaaagaagttttactatgtttaataatttagtgaaatttgggctatgtgtttattgattcagctcaatccagaggaaaattttaaaggcttacagccttaggattataggatactatataatacttttggtacagagatagaattaaataacataaaaatcaaaaatttattaggctaaaattttgagggagaagtggtatgaaaatacaaattcaaggagtaaaaggaaaagtggggcattccttgctactaaaaattgccttgttccaggtaagactgatcataaaaaaatggccctgttcataaaatttttaaaaagatcatagtatctatcaaataacttatattaagaacctcctgggctaaatttaaaaagtaatacaacagttttatttaaacatgtagtgtctacggtatgccagcactttgcagctatttataatgagaaattttagatgtcaatatagcaatgtgcaagaagatagagattttcaaaattcacttaagagtatctgagcataaaatgttaagattgctgatcggatgtgagggcgatctggctgcgacatctgtcaccccattgatcgccagggttgattcggctgatctggctggctaggtgggtgtccccttcctacctcaccgctccatgtgcgtccctcccgaagctgcgcgctccgtcgaagaggacgaccaaccccgatagaggaggaccggtcttcggtcaagggtatacgagtagctgcgctcccctgctggaacctccaaacaagctctcaagattgctgatctagggccactaagtgatgaattgtatttggaagcaaaaaggatggctaaaaaggacctcaacccttttgactttaaaaggaaaatagcttaaccttcaacctgtgtgacatttaactttttgaacccaaccgtaaaagctatcttctaaccaacaaaaagttaataattagatttggaattatacagaattagaaaattggcatttaaaaatactcaataatttgtccctggtttttaattttcaaaatattttctttttgaagagccagattccagtgatcctgcctctcagaaatttccacatttcttatttttcattaggccttaagaagctgcatttgtaaacttgtgtttcattattaaagcttaatttattttttatataaatagtatgtgctttgtgtacatagagaattaagtgaatgagtcacacagatgttggctgttgttaatgtgaaaattaaacagctgtatcacattttgaaaaataaaagtttcatctgaatgaatatagcaa

SEQ ID NO: 165816 - DNA, 2148 bp, Homo sapiens
  Payload ID: 12645
  Gene Symbol: PLCZ1
  Gene Name: phospholipase C, zeta 1
  Uniprot ID: Q86YW0
  ENST ID: ENST00000266505
  CDS Start-End: 265-2091
acaatgggaattcagaccaaaaggaaaaaatgacagtcacctgacagtgtggtgcccagccaaccagctatacctcttttgaagattttaagaacttagcctcctgaacagtcttcttcgaaagtgaaaagtggtaacagctgatgagtatcaagaaattattttctgcaaaggggcagagttaattgtatttggaacccatgacagcacctactggggaaagacttctaagtgaggagaaacggctctacaggtcatgaaactatggaaatgagatggtttttgtcaaagattcaggatgacttcagaggtggaaaaattaacctagaaaaaactcagaggttacttgaaaaattagatattcggtgcagttatattcatgtgaaacagatttttaaggacaatgacaggctgaaacaaggaagaatcaccatagaagaatttagagcaatttatcgaattatcacgcacagagaagaaattattgagattttcaacacatattctgaaaaccggaaaattcttttagcaagtaatctggctcaatttctgacacaagaacaatatgcagctgagatgagtaaagctattgcttttgagatcattcagaaatacgagcctatcgaagaagttaggaaagcacaccaaatgtcattagaaggttttacaagatacatggattcacgtgaatgtctactgtttaaaaatgaatgtagaaaagtttatcaagatatgactcatccattaaatgattattttatttcatcttcacataacacatatttggtatctgatcaattattgggaccaagtgacctttggggatatgtaagtgcccttgtgaaaggatgccgttgtttggagattgactgctgggatggagcacaaaatgaacctgttgtatatcatggctacacactcacaagcaaacttctgtttaaaactgttatccaagctatacacaagtatgcattcatgacatctgactacccagtggtgctctctttagaaaatcactgctccactgcccaacaagaagtaatggcagacaatttgcaggctacttttggagagtccttgctttctgatatgcttgatgattttcctgatactctaccatcaccagaggcactaaaattcaaaatattagttaaaaataagaaaataggaaccttaaaggaaacccatgaaagaaaaggttctgataagcgtggagacaatcaagacaaggaaacaggggtaaaaaagttacctggagtaatgcttttcaagaaaaagaagaccaggaagctaaaaattgctctggccttatctgatcttgtcatttatacgaaagctgagaaattcaaaagctttcaacattcaagattatatcagcaatttaatgaaaataattctattggggagacacaagcccgaaaactttcaaaattgcgagtccatgagtttatttttcacaccaggaagttcattaccagaatatatcccaaagcaacaagagcagactcttctaattttaatccccaagaattttggaatataggttgtcaaatggtggctttaaatttccagacccctggtctgcccatggatctgcaaaatgggaaatttttggataatggtggttctggatatattttgaaaccacatttcttaagagagagtaaatcatactttaacccaagtaacataaaagagggtatgccaattacacttacaataaggctcatcagtggtatccagttgcctcttactcattcatcatctaacaaaggtgattcattagtaattatagaagtttttggtgttccaaatgatcaaatgaagcagcagactcgtgtaattaaaaaaaatgcttttagtccaagatggaatgaaacattcacatttattattcatgtcccagaattggcattgatacgttttgttgttgaaggtcaaggtttaatagcaggaaatgaatttcttgggcaatatactttgccacttctatgcatgaacaaaggttatcgtcgtattcctctgttttccagaatgggtgagagccttgagcctgcttcactgtttgtttatgtttggtacgtcagataacagctaatgataaatgacatatcattagctatgcatcgcaataaaacagccaaaatg

SEQ ID NO: 165817 - DNA, 2113 bp, Homo sapiens
  Payload ID: 12645
  Gene Symbol: PLCZ1
  Gene Name: phospholipase C, zeta 1
  ENST ID: ENST00000318197
  CDS Start-End: 223-360
gacagtgtggtgcccagccaaccagctatacctcttttgaagattttaagaacttagcctcctgaacagtcttcttcgaaagtgaaaagtggtaacagctgatgagtatcaagaaattattttctgcaaaggggcagagttaattgtatttggaacccatgacagcacctactggggaaagacttctaagtgaggagaaacggctctacaggtcatgaaactatggaaatgagatggtttttgtcaaagattcaggatgacttcagaggtggaaaaattaacctagaaaaaactcagaggttacttgaaaaattagatattcggtgcagttatattcatgtgaaacagatttttaagtaggacaatgacaggctgaaacaaggaagaatcaccatagaagaatttagagcaatttatcgaattatcacgcacagagaagaaattattgagattttcaacacatattctgaaaaccggaaaattcttttagcaagtaatctggctcaatttctgacacaagaacaatatgcagctgagatgagtaaagctattgcttttgagatcattcagaaatacgagcctatcgaagaagttaggaaagcacaccaaatgtcattagaaggttttacaagatacatggattcacgtgaatgtctactgtttaaaaatgaatgtagaaaagtttatcaagatatgactcatccattaaatgattattttatttcatcttcacataacacatatttggtatctgatcaattattgggaccaagtgacctttggggatatgtaagtgcccttgtgaaaggatgccgttgtttggagattgactgctgggatggagcacaaaatgaacctgttgtatatcatggctacacactcacaagcaaacttctgtttaaaactgttatccaagctatacacaagtatgcattcatgacatctgactacccagtggtgctctctttagaaaatcactgctccactgcccaacaagaagtaatggcagacaatttgcaggctacttttggagagtccttgctttctgatatgcttgatgattttcctgatactctaccatcaccagaggcactaaaattcaaaatattagttaaaaataagaaaataggaaccttaaaggaaacccatgaaagaaaaggttctgataagcgtggagacaatcaagacaaggaaacaggggtaaaaaagttacctggagtaatgcttttcaagaaaaagaagaccaggaagctaaaaattgctctggccttatctgatcttgtcatttatacgaaagctgagaaattcaaaagctttcaacattcaagattatatcagcaatttaatgaaaataattctattggggagacacaagcccgaaaactttcaaaattgcgagtccatgagtttatttttcacaccaggaagttcattaccagaatatatcccaaagcaacaagagcagactcttctaattttaatccccaagaattttggaatataggttgtcaaatggtggctttaaatttccagacccctggtctgcccatggatctgcaaaatgggaaatttttggataatggtggttctggatatattttgaaaccacatttcttaagagagagtaaatcatactttaacccaagtaacataaaagagggtatgccaattacacttacaataaggctcatcagtggtatccagttgcctcttactcattcatcatctaacaaaggtgattcattagtaattatagaagtttttggtgttccaaatgatcaaatgaagcagcagactcgtgtaattaaaaaaaatgcttttagtccaagatggaatgaaacattcacatttattattcatgtcccagaattggcattgatacgttttgttgttgaaggtcaaggtttaatagcaggaaatgaatttcttgggcaatatactttgccacttctatgcatgaacaaaggttatcgtcgtattcctctgttttccagaatgggtgagagccttgagcctgcttcactgtttgtttatgtttggtacgtcagataacagctaatgataaatgacatatcattagctatgcatcgcaataaaacagccaaaatgaatg

SEQ ID NO: 165818 - DNA, 653 bp, Homo sapiens
  Payload ID: 12645
  Gene Symbol: PLCZ1
  Gene Name: phospholipase C, zeta 1
  ENST ID: ENST00000539072
  CDS Start-End: 156-653
agtgtggtgcccagccaaccagctatacctcttttgaagattttaagaacttagcctcctgaacagtcttcttcgaaagtgaaaagtggtaacagctgatgagtatcaagaaattattttctgcaaaggggcagagttaattgtatttggaacccatgacagcacctactggggaaagacttctaaattcagggttaatttgctcacctttctggaagagagaactaaaacagagaggtcagattcaggatgacttcagaggtggaaaaattaacctagaaaaaactcagaggttacttgaaaaattagatattcggtgcagttatattcatgtgaaacagatttttaagacatctgactacccagtggtgctctctttagaaaatcactgctccactgcccaacaagaagtaatggcagacaatttgcaggctacttttggagagtccttgctttctgatatgcttgatgattttcctgatactctaccatcaccagaggcactaaaattcaaaatattagttaaaaataagaaaataggaaccttaaaggaaacccatgaaagaaaaggttctgataagcgtggagacaatcaagacaaggaaacaggggtaaaaaagttacctggagtaatgcttttcaagaaaaagaag

SEQ ID NO: 165819 - DNA, 374 bp, Homo sapiens
  Payload ID: 12645
  Gene Symbol: PLCZ1
  Gene Name: phospholipase C, zeta 1
  ENST ID: ENST00000536023
  CDS Start-End: 1-304
ggctttaaatttccagacccctggtctgcccatggatctgcaaaatgggaaatttttggataatggtggttctggatatattttgaaaccacatttcttaagagagagtaaatcatactttaacccaagtaacataaaagagggtatgccaattacacttacaataaggctcatcagtggtatccagttgcctcttactcattcatcatctaacaaaggttatcgtcgtattcctctgttttccagaatgggtgagagccttgagcctgcttcactgtttgtttatgtttggtacgtcagataacagctaatgataaatgacatatcattagctatgcatcgcaataaaacagccaaaatgaatgtctttatgt

SEQ ID NO: 165820 - DNA, 525 bp, Homo sapiens
  Payload ID: 12645
  Gene Symbol: PLCZ1
  Gene Name: phospholipase C, zeta 1
  ENST ID: ENST00000534932
  CDS Start-End: 199-468
aaaatgggaaatttttggataatggtggttctggatatattttgaaaccacatttcttaagagagagtaaatcatactttaacccaagtaacataaaagaggctcatcagtggtatccagttgcctcttactcattcatcatctaacaaaggtgattcattagtaattatagaagtttttggtgttccaaatgatcaaatgaagcagcagactcgtgtaattaaaaaaaatgcttttagtccaagatggaatgaaacattcacatttattattcatgtcccagaattggcattgatacgttttgttgttgaaggtcaaggtttaatagcaggaaatgaatttcttgggcaatatactttgccacttctatgcatgaacaaaggttatcgtcgtattcctctgttttccagaatgggtgagagccttgagcctgcttcactgtttgtttatgtttggtacgtcagataacagctaatgataaatgacatatcattagctatgcatcgcaataaaacagccaaaatg

SEQ ID NO: 165821 - DNA, 626 bp, Homo sapiens
  Payload ID: 12645
  Gene Symbol: PLCZ1
  Gene Name: phospholipase C, zeta 1
  ENST ID: ENST00000535429
  CDS Start-End: 217-378
agtgtggtgcccagccaaccagctatacctcttttgaagattttaagaacttagcctcctgaacagtcttcttcgaaaaaaagtggtaacagctgatgagtatcaagaaattattttctgcaaaggggcagagttaattgtatttggaacccatgacagcacctactggggaaagacttctaagtgaggagaaacggctctacaggtcatgaaactatggaaatgagatggtttttgtcaaagattcaggatgacttcagaggtggaaaaattaacctagaaaaaactcagaggttacttgaaaaattagatattcggtgcagttatattcatgtgaaacagatttttaagttaggaaagcacaccaaatgtcattagaaggttttacaagatacatggattcacgtgaatgtctactgtttaaaaatgaatgtagaaaagtttatcaagatatgactcatccattaaatgattattttatttcatcttcacataacacatatttggtatctgatcaattattgggaccaagtgacctttggggatatgtaagtgcccttgtgaaaggatgccgttgtttggagattgactgctgggatggagcacaaaatgaacctgttgtatat

SEQ ID NO: 165822 - DNA, 1667 bp, Homo sapiens
  Payload ID: 12645
  Gene Symbol: PLCZ1
  Gene Name: phospholipase C, zeta 1
  ENST ID: ENST00000540270
  CDS Start-End: 1-1237
gtcattagaaggttttacaagatacatggattcacgtgaatgtctactgtttaaaaatgaatgtagaaaagtttatcaagatatgactcatccattaaatgattattttatttcatcttcacataacacatatttggtatctgatcaattattgggaccaagtgacctttggggatatgtaagtgcccttgtgaaaggatgccgttgtttggagattgactgctgggatggagcacaaaatgaacctgttgtatatcatggctacacactcacaagcaaacttctgtttaaaactgttatccaagctatacacaagtatgcattcatgacatctgactacccagtggtgctctctttagaaaatcactgctccactgcccaacaagaagtaatggcagacaatttgcaggctacttttggagagtccttgctttctgatatgcttgatgattttcctgatactctaccatcaccagaggcactaaaattcaaaatattagttaaaaataagaaaataggaaccttaaaggaaacccatgaaagaaaaggttctgataagcgtggagacaatcaagacaaggaaacaggggtaaaaaagttacctggagtaatgcttttcaagaaaaagaagaccaggaagctaaaaattgctctggccttatctgatcttgtcatttatacgaaagctgagaaattcaaaagctttcaacattcaagattatatcagcaatttaatgaaaataattctattggggagacacaagcccgaaaactttcaaaattgcgagtccatgagtttatttttcacaccaggaagttcattaccagaatatatcccaaagcaacaagagcagactcttctaattttaatccccaagaattttggaatataggttgtcaaatggtggctttaaatttccagacccctggtctgcccatggatctgcaaaatgggaaatttttggataatggtggttctggatatattttgaaaccacatttcttaagagagagtaaatcatactttaacccaagtaacataaaagagggtatgccaattacacttacaataaggctcatcagtggtatccagttgcctcttactcattcatcatctaacaaaggtgattcattagtaattatagaagtttttggtgttccaaatgatcaaatgaagcagcagactcgtgtaattaaaaaaaatggtcaaggtaatatggtcattattccagcatgagccaattagtttactatttctgtgggcatagactgcaccctagattgctatgtggtaaatgtgctcttgtgaccacaggtgaaccatagaaaacatagatatagtataattagaaattcatcagtgcttctggaaatcttttagtccaagatggaatgaaacattcacatttattattcatgtcccagaattggcattgatacgttttgttgttgaaggtcaaggtttaatagcaggaaatgaatttcttgggcaatatactttgccacttctatgcatgaacaaaggttatcgtcgtattcctctgttttccagaatgggtgagagccttgagcctgcttcactgtttgtttatgtttggtacgtcagataacagctaatgataaatgacatatcattagctatgcatcgcaataaaacagccaaaatg

SEQ ID NO: 165823 - DNA, 773 bp, Homo sapiens
  Payload ID: 12645
  Gene Symbol: PLCZ1
  Gene Name: phospholipase C, zeta 1
  ENST ID: ENST00000543242
  CDS Start-End: 380-773
agtgtggtgcccagccaaccagctatacctcttttgaagattttaagaacttagcctcctgaacagtcttcttcgaaagtgaaaagtggtaacagctgatgagtatcaagaaattattttctgcaaaggggcagagttaattgtatttggaacccatgacagcacctactggggaaagacttctaagtgaggagaaacggctctacagattcaggatgacttcagaggtggaaaaattaacctagaaaaaactcagaggttacttgaaaaattagatattcggtgcagttatattcatgtgaaacagatttttaagacatctgactacccagtggtgctctctttagaaaatcactgctccactgcccaacaagaagtaatggcagacaatttgcaggctacttttggagagtccttgctttctgatatgcttgatgattttcctgatactctaccatcaccagaggcactaaaattcaaaatattagttaaaaataagaaaataggaaccttaaaggaaacccatgaaagaaaaggttctgataagcgtggagacaatcaagacaaggaaacaggggtaaaaaagttacctggagtaatgcttttcaagaaaaagaagaccaggaagctaaaaattgctctggccttatctgatcttgtcatttatacgaaagctgagaaattcaaaagctttcaacattcaagattatatcagcaatttaatgaaaataattctattggggagacacaagcccgaaaactttcaaaattgc

SEQ ID NO: 165824 - DNA, 722 bp, Homo sapiens
  Payload ID: 12645
  Gene Symbol: PLCZ1
  Gene Name: phospholipase C, zeta 1
  ENST ID: ENST00000541966
  CDS Start-End: 494-722
agtgtggtgcccagccaaccagctatacctcttttgaagattttaagaacttagcctcctgaacagtcttcttcgaaagtgaaaagtggtaacagctgatgagtatcaagaaattattttctgcaaaggggcagagttaattgtatttggaacccatgacagcacctactggggaaagacttctaagtgaggagaaacggctctacagattcaggatgacttcagaggtggaaaaattaacctagaaaaaactcagaggttacttgaaaaattagatattcggtgcagttatattcatgtgaaacagatttttaaggacaatgacaggctgaaacaaggaagaatcaccatagaagaatttagagcaatttatcgaattatcacgcacagagaagaaattattgagattttcaacacatattctgaaaaccggaaaattcttttagcaagtaatctggctcaatttctgacacaagaacaatatgcagctgagatgagtaaagctattgcttttgagatcattcagaaatacgagcctatcgaagaagttaggaaagcacaccaaatgtcattagaaggttttacaagatacatggattcacgtgaatgtctactgtttaaaaatgaatgtagaaaagtttatcaagatatgactcatccattaaatgattattttatttcatcttcacataacacatatttggtatctgatcaattattgg

SEQ ID NO: 165825 - DNA, 997 bp, Homo sapiens
  Payload ID: 12645
  Gene Symbol: PLCZ1
  Gene Name: phospholipase C, zeta 1
  ENST ID: ENST00000539207
  CDS Start-End: 234-371
gacagtcacctgacagtgtggtgcccagccaaccagctatacctcttttgaagattttaagaacttagcctcctgaacagtcttcttcgaaagtgaaaagtggtaacagctgatgagtatcaagaaattattttctgcaaaggggcagagttaattgtatttggaacccatgacagcacctactggggaaagacttctaagtgaggagaaacggctctacaggtcatgaaactatggaaatgagatggtttttgtcaaagattcaggatgacttcagaggtggaaaaattaacctagaaaaaactcagaggttacttgaaaaattagatattcggtgcagttatattcatgtgaaacagatttttaagtaggacaatgacaggctgaaacaaggaagaatcaccatagaagaatttagagcaatttatcgaattatcacgcacagagaagaaattattgagattttcaacacatattctgaaaaccggaaaattcttttagcaagtaatctggctcaatttctgacacaagaacaatatgcagctgagatgagtaaagctattgcttttgagatcattcagaaatacgagcctatcgaagaagttaggaaagcacaccaaatgtcattagaaggttttacaagatacatggattcacgtgaatgtctactgtttaaaaatgaatgtagaaaagtttatcaagatatgactcatccattaaatgattattttatttcatcttcacataacacatatttggtatctgatcaattattgggaccaagtgacctttggggatatgtaaggtagaaaaatcaggcccagttttagatatcagcagaagcagaaatatagtttcctcagttttgataaagctgtgaacttgtattctgagtgcccttgtgaaaggatgccgttgtttggagattgactgctgggatggagcacaaaatgaacctgttgtatatcatggctacacactcacaagcaaacttctg

SEQ ID NO: 165826 - DNA, 1398 bp, Homo sapiens
  Payload ID: 12645
  Gene Symbol: PLCZ1
  Gene Name: phospholipase C, zeta 1
  Uniprot ID: Q86YW0
  ENST ID: ENST00000539875
  CDS Start-End: 99-1346
tgcaaaggggcagagttaattgtatttggaacccatgacagcacctactggggaaagacttctaagtgaggagaaacggctctacaggtcatgaaactatggaaatgagatggtttttgtcaaagattcaggatgacttcagaggtggaaaaattaacctagaaaaaactcagaggttacttgaaaaattagatattcggtgcagttatattcatgtgaaacagatttttaagacatctgactacccagtggtgctctctttagaaaatcactgctccactgcccaacaagaagtaatggcagacaatttgcaggctacttttggagagtccttgctttctgatatgcttgatgattttcctgatactctaccatcaccagaggcactaaaattcaaaatattagttaaaaataagaaaataggaaccttaaaggaaacccatgaaagaaaaggttctgataagcgtggagacaatcaagacaaggaaacaggggtaaaaaagttacctggagtaatgcttttcaagaaaaagaagaccaggaagctaaaaattgctctggccttatctgatcttgtcatttatacgaaagctgagaaattcaaaagctttcaacattcaagattatatcagcaatttaatgaaaataattctattggggagacacaagcccgaaaactttcaaaattgcgagtccatgagtttatttttcacaccaggaagttcattaccagaatatatcccaaagcaacaagagcagactcttctaattttaatccccaagaattttggaatataggttgtcaaatggtggctttaaatttccagacccctggtctgcccatggatctgcaaaatgggaaatttttggataatggtggttctggatatattttgaaaccacatttcttaagagagagtaaatcatactttaacccaagtaacataaaagagggtatgccaattacacttacaataaggctcatcagtggtatccagttgcctcttactcattcatcatctaacaaaggtgattcattagtaattatagaagtttttggtgttccaaatgatcaaatgaagcagcagactcgtgtaattaaaaaaaatgcttttagtccaagatggaatgaaacattcacatttattattcatgtcccagaattggcattgatacgttttgttgttgaaggtcaaggtttaatagcaggaaatgaatttcttgggcaatatactttgccacttctatgcatgaacaaaggttatcgtcgtattcctctgttttccagaatgggtgagagccttgagcctgcttcactgtttgtttatgtttggtacgtcagataacagctaatgataaatgacatatcattagctatgcatcgcaataaaacagcca

SEQ ID NO: 165827 - DNA, 646 bp, Homo sapiens
  Payload ID: 12645
  Gene Symbol: PLCZ1
  Gene Name: phospholipase C, zeta 1
  ENST ID: ENST00000543219
  CDS Start-End: 1-450
gatctgcaaaatgggaaatttttggataatggtggttctggatatattttgaaaccacatttcttaagagagagtaaatcatactttaacccaagtaacataaaagagggtatgccaattacacttacaataaggctcatcagtggtatccagttgcctcttactcattcatcatctaacaaaggtgattcattagtaattatagaagtttttggtgttccaaatgatcaaatgaagcagcagactcgtgtaattaaaaaaaatgcttttagtccaagatggaatgaaacattcacatttattattcatgtcccagaattggcattgatacgttttgttgttgaaggtcaaggtttaatagcaggaaatgaatttcttgggcaatatactttgccacttctatgcatgaacaaagcatctgagatgtgcctaggaaacaggtcttcctgaagcagaagggtggtggctaattttggatcatgcagcgctttgcggaaggagaagttatcgtcgtattcctctgttttccagaatgggtgagagccttgagcctgcttcactgtttgtttatgtttggtacgtcagataacagctaatgataaatgacatatcattagctatgcatcgcaataaaacagccaaaatg

SEQ ID NO: 165828 - DNA, 1612 bp, Homo sapiens
  Payload ID: 12645
  Gene Symbol: PLCZ1
  Gene Name: phospholipase C, zeta 1
  ENST ID: ENST00000538330
  CDS Start-End: 383-1555
ttacaaacctctccctatctccagttgtggcagccgaaaatgtctccagacattgccaaatccctcctgtgaggcaaagtcgtcccagtggaaaaccagtagcctgtagacatggggtagaaaaatcaggcccagttttagatatcagcagaagcagaaatatagtttcctcagttttgataaagctgtgaacttgtattctgagtgcccttgtgaaaggatgccgttgtttggagattgactgctgggatggagcacaaaatgaacctgttgtatatcatggctacacactcacaagcaaacttctgtttaaaactgttatccaagctatacacaagtatgcattcatgaaaatcactgctccactgcccaacaagaagtaatggcagacaatttgcaggctacttttggagagtccttgctttctgatatgcttgatgattttcctgatactctaccatcaccagaggcactaaaattcaaaatattagttaaaaataagaaaataggaaccttaaaggaaacccatgaaagaaaaggttctgataagcgtggtaaggtggaggaatgggaagaagaagtggcagatggagaggaggaggaggaggaggaggaggaggaggaggaggaggaggaggataaattcaaagaatcagaagtattggaatctgttttaggagacaatcaagacaaggaaacaggggtaaaaaagttacctggagtaatgcttttcaagaaaaagaagaccaggaagctaaaaattgctctggccttatctgatcttgtcatttatacgaaagctgagaaattcaaaagctttcaacattcaagattatatcagcaatttaatgaaaataattctattggggagacacaagcccgaaaactttcaaaattgcgagtccatgagtttatttttcacaccaggaagttcattaccagaatatatcccaaagcaacaagagcagactcttctaattttaatccccaagaattttggaatataggttgtcaaatggtggctttaaatttccagacccctggtctgcccatggatctgcaaaatgggaaatttttggataatggtggttctggatatattttgaaaccacatttcttaagagagagtaaatcatactttaacccaagtaacataaaagagggtatgccaattacacttacaataaggctcatcagtggtatccagttgcctcttactcattcatcatctaacaaaggtgattcattagtaattatagaagtttttggtgttccaaatgatcaaatgaagcagcagactcgtgtaattaaaaaaaatgcttttagtccaagatggaatgaaacattcacatttattattcatgtcccagaattggcattgatacgttttgttgttgaaggtcaaggtttaatagcaggaaatgaatttcttgggcaatatactttgccacttctatgcatgaacaaaggttatcgtcgtattcctctgttttccagaatgggtgagagccttgagcctgcttcactgtttgtttatgtttggtacgtcagataacagctaatgataaatgacatatcattagctatgcatcgcaataaaacagccaaaatg

SEQ ID NO: 165829 - DNA, 797 bp, Homo sapiens
  Payload ID: 12645
  Gene Symbol: PLCZ1
  Gene Name: phospholipase C, zeta 1
  ENST ID: ENST00000540421
  CDS Start-End: 1-797
ggctacacactcacaagcaaacttctgtttaaaactgttatccaagctatacacaagtatgcattcatggcactaaaattcaaaatattagttaaaaataagaaaataggaaccttaaaggaaacccatgaaagaaaaggttctgataagcgtggagacaatcaagacaaggaaacaggggtaaaaaagttacctggagtaatgcttttcaagaaaaagaagaccaggaagctaaaaattgctctggccttatctgatcttgtcatttatacgaaagctgagaaattcaaaagctttcaacattcaagattatatcagcaatttaatgaaaataattctattggggagacacaagcccgaaaactttcaaaattgcgagtccatgagtttatttttcacaccaggaagttcattaccagaatatatcccaaagcaacaagagcagactcttctaattttaatccccaagaattttggaatataggttgtcaaatggtggctttaaatttccagacccctggtctgcccatggatctgcaaaatgggaaatttttggataatggtggttctggatatattttgaaaccacatttcttaagagagagtaaatcatactttaacccaagtaacataaaagagggtatgccaattacacttacaataaggctcatcagtggtatccagttgcctcttactcattcatcatctaacaaaggtgattcattagtaattatagaagtttttggtgttccaaatgatcaaatgaagcagcagactcgtgtaattaaaaaaaatgg

SEQ ID NO: 165830 - DNA, 5125 bp, Homo sapiens
  Payload ID: 12646
  Gene Symbol: PLCL1
  Gene Name: phospholipase C-like 1
  Uniprot ID: Q15111
  ENST ID: ENST00000428675
  CDS Start-End: 399-3686
atcgggccgccggcgtccgggctccagaggccgcctggctgggcgcccggtgccttttgtctggcgcagggccggcgtttgcatcacatttcggatacctccctctctttttcgcctctccttctgcctcccgctcacatcgcctccccactcccgccaccgtcccccgccggactgctagcctcctagaccgaagcccgaggacgtctctgcccgagcgatgtcccctctccagaaagttgccgccgccgccgccgccgccgccactgccgccgctgggcggtgaaacaaagtctggcggggccgcctcccggtgcaggagcgcaccggtgcctagcggctggactccgctgccgggcgtcccgctttcccccggggagccctaaacgctccaggccatggccgagggcgcggccggcagggaggatccggcgccgcccgacgcggcggggggcgaagacgacccccgagtgggcccggatgccgccggggactgcgtgacggcggcctctgggggccggatgagggaccgtcgcagcggggtcgcactgccaggcgccgcggggaccccagcggacagcgaggcgggcctcctggaggcagcacgggcgaccccccggcgcagcagcatcatcaaggatccttcaaaccaaaaatgtggtggaagaaagaaaaccgtgtctttcagcagcatgccatcggaaaagaaaattagcagtgcaaatgactgcatcagcttcatgcaagctggctgtgagttgaagaaagtccggccaaattctcgcatttacaaccgttttttcactctggacacagaccttcaagctcttcgctgggaaccttcaaagaaagacctcgagaaagccaagcttgatatttctgccataaaagagatcagactggggaaaaacacggaaacatttagaaacaatggccttgctgaccagatctgtgaggactgtgccttttccatactccacggggaaaactatgagtctctggacctagttgccaattcagcagatgtggcaaacatctgggtgtctgggttacggtacctggtttctcgaagtaagcagcctcttgattttatggagggcaaccagaacacaccacggttcatgtggttgaaaacagtgtttgaagcagcagatgttgatgggaatgggattatgttggaagacacctctgtagagttaataaaacaactcaaccctactctgaaggaagccaagatcaggttaaagtttaaagaaatccagaagagcaaggaaaaactaaccacccgcgtgaccgaagaggaattttgtgaagctttttgtgaactttgcaccaggccagaagtgtatttcttacttgtacagatatctaaaaacaaagaatatttggatgccaatgatctcatgctctttttagaagctgagcaaggagtcacccatatcaccgaggatatatgcttagacatcataaggagatacgaactttctgaagagggacgtcaaaaagggtttcttgcaattgatggctttacccagtatttattgtcatcagaatgtgacatttttgatcctgagcaaaagaaggttgcccaagatatgacccagccattatctcactactatatcaatgcctctcataacacctatctaatagaagaccagttcagggggccagctgacatcaatgggtacattagagctttgaaaatgggctgtcgaagcgttgaactcgatgtaagtgatggttcagataatgaaccaatcctttgtaatcgaaataacatgacaacccatgtttcctttcgaagtgtcatagaggtaataaataaatttgcctttgttgcttctgaatacccactcattctttgcttgggaaatcactgctccttgccgcagcagaaggtaatggctcaacagatgaaaaaggtctttggcaataaactctatactgaagcacctttgccctcagaatcctacctcccatcaccagaaaaattaaaaagaatgatcattgtgaaaggaaagaagttgccttctgatccagatgtgttagaaggagaagtaacagatgaagatgaagaagctgaaatgtctcgaaggatgtcggtagattacaatggtgagcagaagcaaatccgactctgtagggagctctctgatttggtgtctatttgtaaatctgttcaatacagggattttgaactatctatgaaaagccaaaactattgggaaatgtgttcatttagtgaaacagaggccagccgcattgcaaatgagtacccagaggattttgttaattataataagaagttcttatcaagaatctatccaagtgccatgaggatcgattccagtaacttgaatccacaggacttttggaattgtggctgtcagattgtagcaatgaattttcagactccgggtccaatgatggaccttcacacgggctggtttcttcaaaacgggggatgtggttatgttctaaggccgtctataatgcgagatgaagtttcttacttcagcgcaaatacaaagggcattctacctggggtgtctcctctagctcttcatatcaagatcatcagtggtcagaatttcccaaagcccaagggagcttgtgccaaaggggatgtcatagatccctatgtttgtatagagatacacggaattccagcggattgttcggaacaaagaactaaaactgtacagcaaaacagtgataatcctatttttgatgaaacttttgagttccaagtaaacctacctgagctggccatgatccgttttgttgttctggatgatgactacattggggatgagtttatagggcaatatacgataccatttgaatgtttgcagcctggatatcggcatgttcccctgcgttcttttgtgggtgacatcatggagcacgtaaccctttttgtccacatagcaataactaatcgaagtggaggaggaaaggcacagaagcgcagtctttcagtgagaatggggaagaaagttcgggaatataccatgctcaggaatatcggtcttaaaaccattgatgacatctttaaaatagcggttcatccattacgagaagccatagatatgagagaaaatatgcagaatgcaatcgtgtctattaaggaactatgtggactccctccaattgccagtctgaagcagtgcctgttaactctgtcatctcggctcatcaccagtgacaatactccttcagtctcacttgtgatgaaagacagctttccttacctggagcctctgggtgcaattccagatgtgcagaaaaagatgctgactgcttatgatctgatgattcaagagagccggtttctcatagaaatggcggacacagtccaggaaaagattgtacagtgtcagaaagcagggatggagttccatgaagaacttcataatttgggggcaaaagaaggcttgaagggaagaaaactcaacaaagcaactgagagctttgcttggaacattacagtattgaagggccaaggagatctgttgaagaatgccaagaatgaagctatagaaaacatgaagcagatccagctggcatgcctgtcctgtggactgagtaaagcccccagcagcagtgctgaggccaagagcaagcgcagcctggaagccatagaggagaaggaaagtagtgaggagaatgggaagctgtgactctgggcattatcgacacgttcacccatcttatcaaggactctggtttctcattcttgttttctttctttaaatgttttataagttcacaaaatggtgccctatatggggtattggacatagatattttcacaatgtcagtatttcagtgtagttaatttatctaaattaaagcctttagtatcagtgttttaaattctgagacatgtgtcaacacccctgtgtggatgcctgtggaagagtgtgtgtgtgtgtgtgtgtgtgtgtgtgtggcagagagagagaaagagagagagagagagaaattctgttaaaatctattctgtgttgcattattcatttagtgagttattccttgatcattttgggacaattgttttaatctgaaattctaaagagcacttactgtaacctgttgctgtgtttaatttgacttctctgcctttgacatttaatttagtgatcttagcatagcttattattgaaggaagccaaatttatcaaagcatagatgttttggtagattaaatatagattagaaaaattcctaagaatcagagtagaaataaaagtgaatgaaagattaaacagatgatgagaatttctaaaaagattagcaaggtcatttcttcagtcagaaaactttaaaaaatatttattaaataaaatcaatttttaggaagttttctgtagtcatttactaaacatatgatttcactagaaaagctgatcataagtgaatttatacctacctgtgtggtactctgaaacacactgaaagctctgttgcaattaggattttgatgtgacaataatattgttgtataatttcgagatttgtaggaaggtctcattcttccaagctgagagtctagcactcattttctataacagatatggcagcttagaggtgttggctttgtttggatgtaatttagggtactaaatttaaatttaaagatattgttcaaacaatatcatatcatcacattgagctgatataaattctgtgggtccgataatatctttgtgataatttaagagctaaccagttaccacacatctatgatataaccctaacacacacagaaaagcatacatgcaaaaagaaatgactaattagggtacatttataattgcatctaggtaatttttaccctaatgtcttcataaagtacttgagtgtaatgtttgttacctccaacagaactaaatgttctatggttatgaaagaatatatttatttaaagcattgcttttattttgaaaagcttcttaattaatttgattaacaaatatgctaatttggggaaacctagagaagataattgttgaaattttgcaaatataaacatctcctatagcttctgtgttatttctgacttcttaacactattatgtttatgttgcacattactgaaagagtaaagatatgaaaa

SEQ ID NO: 165831 - DNA, 6665 bp, Homo sapiens
  Payload ID: 12646
  Gene Symbol: PLCL1
  Gene Name: phospholipase C-like 1
  ENST ID: ENST00000435320
  CDS Start-End: 399-683
atcgggccgccggcgtccgggctccagaggccgcctggctgggcgcccggtgccttttgtctggcgcagggccggcgtttgcatcacatttcggatacctccctctctttttcgcctctccttctgcctcccgctcacatcgcctccccactcccgccaccgtcccccgccggactgctagcctcctagaccgaagcccgaggacgtctctgcccgagcgatgtcccctctccagaaagttgccgccgccgccgccgccgccgccactgccgccgctgggcggtgaaacaaagtctggcggggccgcctcccggtgcaggagcgcaccggtgcctagcggctggactccgctgccgggcgtcccgctttcccccggggagccctaaacgctccaggccatggccgagggcgcggccggcagggaggatccggcgccgcccgacgcggcggggggcgaagacgacccccgagtgggcccggatgccgccggggactgcgtgacggcggcctctgggggccggatgagggaccgtcgcagcggggtcgcactgccaggcgccgcggggaccccagcggacagcgaggcgggcctcctggaggcagcacgggcgaccccccggcgcagcagcatcatcaagatgggactgtgtagttgcaggaaaacagctcagagtttccactgattcttcattatggatccttcaaaccaaaaatgtggtggaagaaagaaaaccgtgtctttcagcagcatgccatcggaaaagaaaattagcagtgcaaatgactgcatcagcttcatgcaagctggctgtgagttgaagaaagtccggccaaattctcgcatttacaaccgttttttcactctggacacagaccttcaagctcttcgctgggaaccttcaaagaaagacctcgagaaagccaagcttgatatttctgccataaaagagatcagactggggaaaaacacggaaacatttagaaacaatggccttgctgaccagatctgtgaggactgtgccttttccatactccacggggaaaactatgagtctctggacctagttgccaattcagcagatgtggcaaacatctgggtgtctgggttacggtacctggtttctcgaagtaagcagcctcttgattttatggagggcaaccagaacacaccacggttcatgtggttgaaaacagtgtttgaagcagcagatgttgatgggaatgggattatgttggaagacacctctgtagagttaataaaacaactcaaccctactctgaaggaagccaagatcaggttaaagtttaaagaaatccagaagagcaaggaaaaactaaccacccgcgtgaccgaagaggaattttgtgaagctttttgtgaactttgcaccaggccagaagtgtatttcttacttgtacagatatctaaaaacaaagaatatttggatgccaatgatctcatgctctttttagaagctgagcaaggagtcacccatatcaccgaggatatatgcttagacatcataaggagatacgaactttctgaagagggacgtcaaaaagggtttcttgcaattgatggctttacccagtatttattgtcatcagaatgtgacatttttgatcctgagcaaaagaaggttgcccaagatatgacccagccattatctcactactatatcaatgcctctcataacacctatctaatagaagaccagttcagggggccagctgacatcaatgggtacattagagctttgaaaatgggctgtcgaagcgttgaactcgatgtaagtgatggttcagataatgaaccaatcctttgtaatcgaaataacatgacaacccatgtttcctttcgaagtgtcatagaggtaataaataaatttgcctttgttgcttctgaatacccactcattctttgcttgggaaatcactgctccttgccgcagcagaaggtaatggctcaacagatgaaaaaggtctttggcaataaactctatactgaagcacctttgccctcagaatcctacctcccatcaccagaaaaattaaaaagaatgatcattgtgaaaggaaagaagttgccttctgatccagatgtgttagaaggagaagtaacagatgaagatgaagaagctgaaatgtctcgaaggatgtcggtagattacaatggtgagcagaagcaaatccgactctgtagggagctctctgatttggtgtctatttgtaaatctgttcaatacagggattttgaactatctatgaaaagccaaaactattgggaaatgtgttcatttagtgaaacagaggccagccgcattgcaaatgagtacccagaggattttgttaattataataagaagttcttatcaagaatctatccaagtgccatgaggatcgattccagtaacttgaatccacaggacttttggaattgtggctgtcagattgtagcaatgaattttcagactccgggtccaatgatggaccttcacacgggctggtttcttcaaaacgggggatgtggttatgttctaaggccgtctataatgcgagatgaagtttcttacttcagcgcaaatacaaagggcattctacctggggtgtctcctctagctcttcatatcaagatcatcagtggtcagaatttcccaaagcccaagggagcttgtgccaaaggggatgtcatagatccctatgtttgtatagagatacacggaattccagcggattgttcggaacaaagaactaaaactgtacagcaaaacagtgataatcctatttttgatgaaacttttgagttccaagtaaacctacctgagctggccatgatccgttttgttgttctggatgatgactacattggggatgagtttatagggcaatatacgataccatttgaatgtttgcagcctggatatcggcatgttcccctgcgttcttttgtgggtgacatcatggagcacgtaaccctttttgtccacatagcaataactaatcgaagtggaggaggaaaggcacagaagcgcagtctttcagtgagaatggggaagaaagttcgggaatataccatgctcaggaatatcggtcttaaaaccattgatgacatctttaaaatagcggttcatccattacgagaagccatagatatgagagaaaatatgcagaatgcaatcgtgtctattaaggaactatgtggactccctccaattgccagtctgaagcagtgcctgttaactctgtcatctcggctcatcaccagtgacaatactccttcagtctcacttgtgatgaaagacagctttccttacctggagcctctgggtgcaattccagatgtgcagaaaaagatgctgactgcttatgatctgatgattcaagagagccggtttctcatagaaatggcggacacagtccaggaaaagattgtacagtgtcagaaagcagggatggagttccatgaagaacttcataatttgggggcaaaagaaggcttgaagggaagaaaactcaacaaagcaactgagagctttgcttggaacattacagtattgaagggccaaggagatctgttgaagaatgccaagaatgaagctatagaaaacatgaagcagatccagctggcatgcctgtcctgtggactgagtaaagcccccagcagcagtgctgaggccaagagcaagcgcagcctggaagccatagaggagaaggaaagtagtgaggagaatgggaagctgtgactctgggcattatcgacacgttcacccatcttatcaaggactctggtttctcattcttgttttctttctttaaatgttttataagttcacaaaatggtgccctatatggggtattggacatagatattttcacaatgtcagtatttcagtgtagttaatttatctaaattaaagcctttagtatcagtgttttaaattctgagacatgtgtcaacacccctgtgtggatgcctgtggaagagtgtgtgtgtgtgtgtgtgtgtgtgtgtgtggcagagagagagaaagagagagagagagagaaattctgttaaaatctattctgtgttgcattattcatttagtgagttattccttgatcattttgggacaattgttttaatctgaaattctaaagagcacttactgtaacctgttgctgtgtttaatttgacttctctgcctttgacatttaatttagtgatcttagcatagcttattattgaaggaagccaaatttatcaaagcatagatgttttggtagattaaatatagattagaaaaattcctaagaatcagagtagaaataaaagtgaatgaaagattaaacagatgatgagaatttctaaaaagattagcaaggtcatttcttcagtcagaaaactttaaaaaatatttattaaataaaatcaatttttaggaagttttctgtagtcatttactaaacatatgatttcactagaaaagctgatcataagtgaatttatacctacctgtgtggtactctgaaacacactgaaagctctgttgcaattaggattttgatgtgacaataatattgttgtataatttcgagatttgtaggaaggtctcattcttccaagctgagagtctagcactcattttctataacagatatggcagcttagaggtgttggctttgtttggatgtaatttagggtactaaatttaaatttaaagatattgttcaaacaatatcatatcatcacattgagctgatataaattctgtgggtccgataatatctttgtgataatttaagagctaaccagttaccacacatctatgatataaccctaacacacacagaaaagcatacatgcaaaaagaaatgactaattagggtacatttataattgcatctaggtaatttttaccctaatgtcttcataaagtacttgagtgtaatgtttgttacctccaacagaactaaatgttctatggttatgaaagaatatatttatttaaagcattgcttttattttgaaaagcttcttaattaatttgattaacaaatatgctaatttggggaaacctagagaagataattgttgaaattttgcaaatataaacatctcctatagcttctgtgttatttctgacttcttaacactattatgtttatgttgcacattactgaaagagtaaagatatgaaaaaaacacttattgttttcttttattgtgaattgaaaaagcaaagctaatgaaaatgggttactacatcaaaaatatcttaaagagtttgctatttccatggaccagatatgatgaaattattccctgggtttaaaactgggcactcgaggaggaggtacctgaagtcatttgaaggcaagtttccaatgatgctacaatggcctgaaaaaatttctttaccctctgttatatttaacttgctggtaggaggaatagtggaatgcaggtgttaagccctttgtggtgaaaaagaggttctatagacagaaacaaaacccaccttacatcagctgattggttgattttactagtgtacctcttcatctacttgaattctatttggtaaatccatgtctttactggatatacagttaggtgggaagaggagataaaggatgacaaactctcaaacaatatttatacatttatttactccagggtcaaatccaatccttggaagtagcttctctagtttattttatttgtcccagagctctactcacacttaggacccacccaaaaattctcaaaaacgtaatatggattctgcctcatctgatgctatttctggcagtgggttgtcagccatactctgcttcattccactgggtgtccttgctagatggggagtgagatgtggagcagggaggagctttggattctgggagtggaggtggcaagggaaaagtctcctagtctcctgtgatgttcctgcctccagatagaatagcaaaaacaaacaatttttttttgtgtattatgcctccatgacattgttacattctatgaggagcatctgtctcctttctagacttgaactgtggtagaaaaagcccccttctctcttctatctacttagatttggtgatgctaggaatgtagtgttttagatattaattctatttttatttattcatttttacatcaccaataggatctgaggtggagatggcgggtattatcactggcattttacaggtgagaaagcccaaagccactgaggtaattaatggaataattgattttgaacttgggtctgtctgatttcatgtgcaagattatatacttagtgattttgattttaagtttattcttaacattttaaaccagactattaactcttacctttataaccacagatacaaagaactgtatcatttattttctgaatataaaatattaatggtcaatataaaaatacaaaaatagagaactatatacaacagaaaagcaaaattacccactaataacattttgatttatatccctttagacactgtttagagtttatacatatatgtaaatatgcttgtattttaacaaaattgagatattatataaactgtttgtagcagggtgtttaaaattttaacaatatgttatggatatctttctgtgtcaataaatgtgtatttacattagagttccaagcatttgaactgaa

SEQ ID NO: 165832 - DNA, 5979 bp, Homo sapiens
  Payload ID: 12646
  Gene Symbol: PLCL1
  Gene Name: phospholipase C-like 1
  ENST ID: ENST00000437704
  CDS Start-End: 1-3057
attttacaggatccttcaaaccaaaaatgtggtggaagaaagaaaaccgtgtctttcagcagcatgccatcggaaaagaaaattagcagtgcaaatgactgcatcagcttcatgcaagctggctgtgagttgaagaaagtccggccaaattctcgcatttacaaccgttttttcactctggacacagaccttcaagctcttcgctgggaaccttcaaagaaagacctcgagaaagccaagcttgatatttctgccataaaagagatcagactggggaaaaacacggaaacatttagaaacaatggccttgctgaccagatctgtgaggactgtgccttttccatactccacggggaaaactatgagtctctggacctagttgccaattcagcagatgtggcaaacatctgggtgtctgggttacggtacctggtttctcgaagtaagcagcctcttgattttatggagggcaaccagaacacaccacggttcatgtggttgaaaacagtgtttgaagcagcagatgttgatgggaatgggattatgttggaagacacctctgtagagttaataaaacaactcaaccctactctgaaggaagccaagatcaggttaaagtttaaagaaatccagaagagcaaggaaaaactaaccacccgcgtgaccgaagaggaattttgtgaagctttttgtgaactttgcaccaggccagaagtgtatttcttacttgtacagatatctaaaaacaaagaatatttggatgccaatgatctcatgctctttttagaagctgagcaaggagtcacccatatcaccgaggatatatgcttagacatcataaggagatacgaactttctgaagagggacgtcaaaaagggtttcttgcaattgatggctttacccagtatttattgtcatcagaatgtgacatttttgatcctgagcaaaagaaggttgcccaagatatgacccagccattatctcactactatatcaatgcctctcataacacctatctaatagaagaccagttcagggggccagctgacatcaatgggtacattagagctttgaaaatgggctgtcgaagcgttgaactcgatgtaagtgatggttcagataatgaaccaatcctttgtaatcgaaataacatgacaacccatgtttcctttcgaagtgtcatagaggtaataaataaatttgcctttgttgcttctgaatacccactcattctttgcttgggaaatcactgctccttgccgcagcagaaggtaatggctcaacagatgaaaaaggtctttggcaataaactctatactgaagcacctttgccctcagaatcctacctcccatcaccagaaaaattaaaaagaatgatcattgtgaaaggaaagaagttgccttctgatccagatgtgttagaaggagaagtaacagatgaagatgaagaagctgaaatgtctcgaaggatgtcggtagattacaatggtgagcagaagcaaatccgactctgtagggagctctctgatttggtgtctatttgtaaatctgttcaatacagggattttgaactatctatgaaaagccaaaactattgggaaatgtgttcatttagtgaaacagaggccagccgcattgcaaatgagtacccagaggattttgttaattataataagaagttcttatcaagaatctatccaagtgccatgaggatcgattccagtaacttgaatccacaggacttttggaattgtggctgtcagattgtagcaatgaattttcagactccgggtccaatgatggaccttcacacgggctggtttcttcaaaacgggggatgtggttatgttctaaggccgtctataatgcgagatgaagtttcttacttcagcgcaaatacaaagggcattctacctggggtgtctcctctagctcttcatatcaagatcatcagtggtcagaatttcccaaagcccaagggagcttgtgccaaaggggatgtcatagatccctatgtttgtatagagatacacggaattccagcggattgttcggaacaaagaactaaaactgtacagcaaaacagtgataatcctatttttgatgaaacttttgagttccaagtaaacctacctgagctggccatgatccgttttgttgttctggatgatgactacattggggatgagtttatagggcaatatacgataccatttgaatgtttgcagcctggatatcggcatgttcccctgcgttcttttgtgggtgacatcatggagcacgtaaccctttttgtccacatagcaataactaatcgaagtggaggaggaaaggcacagaagcgcagtctttcagtgagaatggggaagaaagttcgggaatataccatgctcaggaatatcggtcttaaaaccattgatgacatctttaaaatagcggttcatccattacgagaagccatagatatgagagaaaatatgcagaatgcaatcgtgtctattaaggaactatgtggactccctccaattgccagtctgaagcagtgcctgttaactctgtcatctcggctcatcaccagtgacaatactccttcagtctcacttgtgatgaaagacagctttccttacctggagcctctgggtgcaattccagatgtgcagaaaaagatgctgactgcttatgatctgatgattcaagagagccggtttctcatagaaatggcggacacagtccaggaaaagattgtacagtgtcagaaagcagggatggagttccatgaagaacttcataatttgggggcaaaagaaggcttgaagggaagaaaactcaacaaagcaactgagagctttgcttggaacattacagtattgaagggccaaggagatctgttgaagaatgccaagaatgaagctatagaaaacatgaagcagatccagctggcatgcctgtcctgtggactgagtaaagcccccagcagcagtgctgaggccaagagcaagcgcagcctggaagccatagaggagaaggaaagtagtgaggagaatgggaagctgtgactctgggcattatcgacacgttcacccatcttatcaaggactctggtttctcattcttgttttctttctttaaatgttttataagttcacaaaatggtgccctatatggggtattggacatagatattttcacaatgtcagtatttcagtgtagttaatttatctaaattaaagcctttagtatcagtgttttaaattctgagacatgtgtcaacacccctgtgtggatgcctgtggaagagtgtgtgtgtgtgtgtgtgtgtgtgtgtgtggcagagagagagaaagagagagagagagagaaattctgttaaaatctattctgtgttgcattattcatttagtgagttattccttgatcattttgggacaattgttttaatctgaaattctaaagagcacttactgtaacctgttgctgtgtttaatttgacttctctgcctttgacatttaatttagtgatcttagcatagcttattattgaaggaagccaaatttatcaaagcatagatgttttggtagattaaatatagattagaaaaattcctaagaatcagagtagaaataaaagtgaatgaaagattaaacagatgatgagaatttctaaaaagattagcaaggtcatttcttcagtcagaaaactttaaaaaatatttattaaataaaatcaatttttaggaagttttctgtagtcatttactaaacatatgatttcactagaaaagctgatcataagtgaatttatacctacctgtgtggtactctgaaacacactgaaagctctgttgcaattaggattttgatgtgacaataatattgttgtataatttcgagatttgtaggaaggtctcattcttccaagctgagagtctagcactcattttctataacagatatggcagcttagaggtgttggctttgtttggatgtaatttagggtactaaatttaaatttaaagatattgttcaaacaatatcatatcatcacattgagctgatataaattctgtgggtccgataatatctttgtgataatttaagagctaaccagttaccacacatctatgatataaccctaacacacacagaaaagcatacatgcaaaaagaaatgactaattagggtacatttataattgcatctaggtaatttttaccctaatgtcttcataaagtacttgagtgtaatgtttgttacctccaacagaactaaatgttctatggttatgaaagaatatatttatttaaagcattgcttttattttgaaaagcttcttaattaatttgattaacaaatatgctaatttggggaaacctagagaagataattgttgaaattttgcaaatataaacatctcctatagcttctgtgttatttctgacttcttaacactattatgtttatgttgcacattactgaaagagtaaagatatgaaaaaaacacttattgttttcttttattgtgaattgaaaaagcaaagctaatgaaaatgggttactacatcaaaaatatcttaaagagtttgctatttccatggaccagatatgatgaaattattccctgggtttaaaactgggcactcgaggaggaggtacctgaagtcatttgaaggcaagtttccaatgatgctacaatggcctgaaaaaatttctttaccctctgttatatttaacttgctggtaggaggaatagtggaatgcaggtgttaagccctttgtggtgaaaaagaggttctatagacagaaacaaaacccaccttacatcagctgattggttgattttactagtgtacctcttcatctacttgaattctatttggtaaatccatgtctttactggatatacagttaggtgggaagaggagataaaggatgacaaactctcaaacaatatttatacatttatttactccagggtcaaatccaatccttggaagtagcttctctagtttattttatttgtcccagagctctactcacacttaggacccacccaaaaattctcaaaaacgtaatatggattctgcctcatctgatgctatttctggcagtgggttgtcagccatactctgcttcattccactgggtgtccttgctagatggggagtgagatgtggagcagggaggagctttggattctgggagtggaggtggcaagggaaaagtctcctagtctcctgtgatgttcctgcctccagatagaatagcaaaaacaaacaatttttttttgtgtattatgcctccatgacattgttacattctatgaggagcatctgtctcctttctagacttgaactgtggtagaaaaagcccccttctctcttctatctacttagatttggtgatgctaggaatgtagtgttttagatattaattctatttttatttattcatttttacatcaccaataggatctgaggtggagatggcgggtattatcactggcattttacaggtgagaaagcccaaagccactgaggtaattaatggaataattgattttgaacttgggtctgtctgatttcatgtgcaagattatatacttagtgattttgattttaagtttattcttaacattttaaaccagactattaactcttacctttataaccacagatacaaagaactgtatcatttattttctgaatataaaatattaatggtcaatataaaaatacaaaaatagagaactatatacaacagaaaagcaaaattacccactaataacattttgatttatatccctttagacactgtttagagtttatacatatatgtaaatatgcttgtattttaacaaaattgagatattatataaactgtttgtagcagggtgtttaaaattttaacaatatgttatggatatctttctgtgtcaataaatgtgtatttacattagagttccaagcatttgaactgaa

SEQ ID NO: 165833 - DNA, 3083 bp, Homo sapiens
  Payload ID: 12646
  Gene Symbol: PLCL1
  Gene Name: phospholipase C-like 1
  ENST ID: ENST00000487695
  CDS Start-End: 48-3083
attgcagggtctttctgatgtgatttcttatagcacctctcaagaaaatgaagaataaacttcaggatccttcaaaccaaaaatgtggtggaagaaagaaaaccgtgtctttcagcagcatgccatcggaaaagaaaattagcagtgcaaatgactgcatcagcttcatgcaagctggctgtgagttgaagaaagtccggccaaattctcgcatttacaaccgttttttcactctggacacagaccttcaagctcttcgctgggaaccttcaaagaaagacctcgagaaagccaagcttgatatttctgccataaaagagatcagactggggaaaaacacggaaacatttagaaacaatggccttgctgaccagatctgtgaggactgtgccttttccatactccacggggaaaactatgagtctctggacctagttgccaattcagcagatgtggcaaacatctgggtgtctgggttacggtacctggtttctcgaagtaagcagcctcttgattttatggagggcaaccagaacacaccacggttcatgtggttgaaaacagtgtttgaagcagcagatgttgatgggaatgggattatgttggaagacacctctgtagagttaataaaacaactcaaccctactctgaaggaagccaagatcaggttaaagtttaaagaaatccagaagagcaaggaaaaactaaccacccgcgtgaccgaagaggaattttgtgaagctttttgtgaactttgcaccaggccagaagtgtatttcttacttgtacagatatctaaaaacaaagaatatttggatgccaatgatctcatgctctttttagaagctgagcaaggagtcacccatatcaccgaggatatatgcttagacatcataaggagatacgaactttctgaagagggacgtcaaaaagggtttcttgcaattgatggctttacccagtatttattgtcatcagaatgtgacatttttgatcctgagcaaaagaaggttgcccaagatatgacccagccattatctcactactatatcaatgcctctcataacacctatctaatagaagaccagttcagggggccagctgacatcaatgggtacattagagctttgaaaatgggctgtcgaagcgttgaactcgatgtaagtgatggttcagataatgaaccaatcctttgtaatcgaaataacatgacaacccatgtttcctttcgaagtgtcatagaggtaataaataaatttgcctttgttgcttctgaatacccactcattctttgcttgggaaatcactgctccttgccgcagcagaaggtaatggctcaacagatgaaaaaggtctttggcaataaactctatactgaagcacctttgccctcagaatcctacctcccatcaccagaaaaattaaaaagaatgatcattgtgaaaggaaagaagttgccttctgatccagatgtgttagaaggagaagtaacagatgaagatgaagaagctgaaatgtctcgaaggatgtcggtagattacaatggtgagcagaagcaaatccgactctgtagggagctctctgatttggtgtctatttgtaaatctgttcaatacagggattttgaactatctatgaaaagccaaaactattgggaaatgtgttcatttagtgaaacagaggccagccgcattgcaaatgagtacccagaggattttgttaattataataagaagttcttatcaagaatctatccaagtgccatgaggatcgattccagtaacttgaatccacaggacttttggaattgtggctgtcagattgtagcaatgaattttcagactccgggtccaatgatggaccttcacacgggctggtttcttcaaaacgggggatgtggttatgttctaaggccgtctataatgcgagatgaagtttcttacttcagcgcaaatacaaagggcattctacctggggtgtctcctctagctcttcatatcaagatcatcagtggtcagaatttcccaaagcccaagggagcttgtgccaaaggggatgtcatagatccctatgtttgtatagagatacacggaattccagcggattgttcggaacaaagaactaaaactgtacagcaaaacagtgataatcctatttttgatgaaacttttgagttccaagtaaacctacctgagctggccatgatccgttttgttgttctggatgatgactacattggggatgagtttatagggcaatatacgataccatttgaatgtttgcagcctggatatcggcatgttcccctgcgttcttttgtgggtgacatcatggagcacgtaaccctttttgtccacatagcaataactaatcgaagtggaggaggaaaggcacagaagcgcagtctttcagtgagaatggggaagaaagttcgggaatataccatgctcaggaatatcggtcttaaaaccattgatgacatctttaaaatagcggttcatccattacgagaagccatagatatgagagaaaatatgcagaatgcaatcgtgtctattaaggaactatgtggactccctccaattgccagtctgaagcagtgcctgttaactctgtcatctcggctcatcaccagtgacaatactccttcagtctcacttgtgatgaaagacagctttccttacctggagcctctgggtgcaattccagatgtgcagaaaaagatgctgactgcttatgatctgatgattcaagagagccggtttctcatagaaatggcggacacagtccaggaaaagattgtacagtgtcagaaagcagggatggagttccatgaagaacttcataatttgggggcaaaagaaggcttgaagggaagaaaactcaacaaagcaactgagagctttgcttggaacattacagtattgaagggccaaggagatctgttgaagaatgccaagaatgaagctatagaaaacatgaagcagatccagctggcatgcctgtcctgtggactgagtaaagcccccagcagcagtgctgaggccaagagcaagcgcagcctggaagccatagaggagaag

SEQ ID NO: 165834 - DNA, 2416 bp, Homo sapiens
  Payload ID: 12647
  Gene Symbol: PLCL2
  Gene Name: phospholipase C-like 2
  ENST ID: ENST00000419842
  CDS Start-End: 1-2114
aaattattcacaaatatgaaccatccaaagagggtcaggaaaagggctggctctccatagacgggttcactaattaccttatgtcacctgactgttatatattcgatccagaacataagaaggtctgtcaggatatgaagcaacctctgtctcattactttataaactcatctcataatacatacttaatagaggatcagttccgaggtccctccgacatcacaggatatattcgagctcttaaaatgggttgccggagtgttgaattagatgtatgggatgggccggacaatgaacctgtaatttacacaggccacaccatgacctctcagatagttttccgcagtgtcattgatattattaacaagtatgcattctttgcttcagagtatcctcttatcttgtgtttagaaaaccactgttccattaaacaacagaaggtaatggttcagcacatgaagaaacttttaggagacaagctctatacaacatcacccaatgttgaggaatcttatctaccatccccagatgtcctgaaagggaaaatactaattaaagcaaagaagctgtcctcaaattgctctggggtagaaggagatgttactgacgaagatgaaggagcagaaatgtctcagaggatgggaaaagagaacatggagcaacccaataatgtgcctgtgaagcgatttcagctttgtaaagaactgtctgaactggtcagcatctgcaaatcagttcagttcaaagaatttcaggtgtcgtttcaggttcagaagtactgggaagtctgttcctttaatgaagtgcttgccagcaagtacgccaatgaaaatccaggggactttgtaaattacaacaaacgttttcttgctagggtttttcccagtccaatgagaattgattccagtaacatgaatcctcaagatttttggaaatgtggttgccaaattgtagccatgaactttcagacaccaggactgatgatggacctgaatattggctggtttaggcagaacggaaactgtggctatgtcctccggccagccatcatgagggaggaggtctccttcttcagcgccaatacaaaagactctgtcccaggggtctcacctcaacttcttcacattaaaatcatcagtgggcagaactttcccaagcccaaaggatcaggtgccaaaggtgatgtggtagatccttatgtctatgttgaaatccatggaatccctgctgattgtgcagaacaaaggacaaaaacagtgcaccagaatggagacgctcccatttttgatgaaagctttgaatttcaaatcaacctgcctgaactggccatggtgcgctttgtagtgctggatgatgactacattggggatgaattcatcggccagtacacaattccctttgaatgtttacagacgggctaccgccatgtccccctgcagtccttaactggagaggtccttgcacatgcttctttatttgtccacgtggctattactaaccgaagaggaggaggaaagcctcataaaaggggcctttctgtgagaaaagggaagaaatccagggaatatgcatctttgagaacactgtggattaaaaccgtggatgaggtattcaagaatgcccagccccctatacgggatgccacagatctgagagaaaacatgcagaatgcggtggtgtcattcaaggagctgtgtggcctctcctctgtggccaatctcatgcagtgcatgttggcggtgtctccccgctttctggggcccgataacacacccctagtggtcctaaatctcagcgagcagtaccccacaatggagctgcagggaattgtgccggaggttctgaagaagatcgtaacaacttatgacatgatgattcagtccctcaaggcgttgattgaaaatgcagatgctgtatatgaaaagatcgtacattgtcagaaggcagccatggaattccatgaacacttgcacagcataggcaccaaggaaggtttgaaggaaagaaaactacaaaaagcagtggagagctttacctggaatattaccatcttaaagataagaaagacaggaaggaggagtatttttgtgcctcagactcccataatggtatgagtaccctcctccttctcctccctcacactgcatgtgatttggaagaaaagtgtctgctggcccccagggaatggaaggtgctaatctttgctgtcttcaacatccaagcatgtggccattacacaggtggcagagggcaggggaagtcttagctgccgcactggatccctcacctcagaagtaagacaactgtttttctctaatagatagttggacaaaaggactttgaaaaaattagccagatgtagaatccctgttgttttgcccctacgtctgaataaaagcaatgacttgtgattgtt

SEQ ID NO: 165835 - DNA, 3940 bp, Homo sapiens
  Payload ID: 12647
  Gene Symbol: PLCL2
  Gene Name: phospholipase C-like 2
  Uniprot ID: Q9UPR0
  ENST ID: ENST00000432376
  CDS Start-End: 254-3259
gaaacgtacctaagtattattggacagccggagtattttacagtggttgctgctcaggaaatttgagtgaaggactgcaaaagaggagcaaagcagacccgagagagaaggcagcagtgctcccctgtgacgtgctccatcaccgggcagggaagacaccgctgccacctctccacagccttgttcaagagcactggaaattgatggtacaaaacagaagagggaacggaaaaagacagtctcattcagcagcatgccaacagagaagaagatcagcagtgcaagtgattgtattaattcaatggttgagggttcagaactcaaaaaggttcgctccaactctagaatttatcataggtactttttactggatgctgacatgcagagcctaaggtgggagccatctaagaaggattctgagaaagccaagattgacattaaatccatcaaggaagtgagaacaggaaaaaacacagacatattccgcagcaatggcatttctgaccagatatctgaagattgtgcgttttccgtcatatatggagagaattatgagtcactggatttggttgccaactccgcagatgttgcaaacatctgggttacaggactgcggtacctaatttcttatggaaaacatacacttgatatgttagaaagtagccaagataacatgaggacttcttgggtttcacaaatgtttagtgaaattgatgtagataaccttggacatataactctgtgtaatgctgtgcaatgtatcagaaacctcaatcctggtttaaaaacgagcaaaattgagcttaagttcaaagaattgcataaatcaaaggacaaagctggtaccgaggtcacaaaggaagaatttattgaggtttttcatgagctttgtactagacctgaaatttatttccttttagttcagttttcaagcaataaagaattccttgataccaaggaccttatgatgtttcttgaggcagaacagggtgtggcacatataaatgaggaaataagccttgaaattattcacaaatatgaaccatccaaagagggtcaggaaaagggctggctctccatagacgggttcactaattaccttatgtcacctgactgttatatattcgatccagaacataagaaggtctgtcaggatatgaagcaacctctgtctcattactttataaactcatctcataatacatacttaatagaggatcagttccgaggtccctccgacatcacaggatatattcgagctcttaaaatgggttgccggagtgttgaattagatgtatgggatgggccggacaatgaacctgtaatttacacaggccacaccatgacctctcagatagttttccgcagtgtcattgatattattaacaagtatgcattctttgcttcagagtatcctcttatcttgtgtttagaaaaccactgttccattaaacaacagaaggtaatggttcagcacatgaagaaacttttaggagacaagctctatacaacatcacccaatgttgaggaatcttatctaccatccccagatgtcctgaaagggaaaatactaattaaagcaaagaagctgtcctcaaattgctctggggtagaaggagatgttactgacgaagatgaaggagcagaaatgtctcagaggatgggaaaagagaacatggagcaacccaataatgtgcctgtgaagcgatttcagctttgtaaagaactgtctgaactggtcagcatctgcaaatcagttcagttcaaagaatttcaggtgtcgtttcaggttcagaagtactgggaagtctgttcctttaatgaagtgcttgccagcaagtacgccaatgaaaatccaggggactttgtaaattacaacaaacgttttcttgctagggtttttcccagtccaatgagaattgattccagtaacatgaatcctcaagatttttggaaatgtggttgccaaattgtagccatgaactttcagacaccaggactgatgatggacctgaatattggctggtttaggcagaacggaaactgtggctatgtcctccggccagccatcatgagggaggaggtctccttcttcagcgccaatacaaaagactctgtcccaggggtctcacctcaacttcttcacattaaaatcatcagtgggcagaactttcccaagcccaaaggatcaggtgccaaaggtgatgtggtagatccttatgtctatgttgaaatccatggaatccctgctgattgtgcagaacaaaggacaaaaacagtgcaccagaatggagacgctcccatttttgatgaaagctttgaatttcaaatcaacctgcctgaactggccatggtgcgctttgtagtgctggatgatgactacattggggatgaattcatcggccagtacacaattccctttgaatgtttacagacgggctaccgccatgtccccctgcagtccttaactggagaggtccttgcacatgcttctttatttgtccacgtggctattactaaccgaagaggaggaggaaagcctcataaaaggggcctttctgtgagaaaagggaagaaatccagggaatatgcatctttgagaacactgtggattaaaaccgtggatgaggtattcaagaatgcccagccccctatacgggatgccacagatctgagagaaaacatgcagaatgcggtggtgtcattcaaggagctgtgtggcctctcctctgtggccaatctcatgcagtgcatgttggcggtgtctccccgctttctggggcccgataacacacccctagtggtcctaaatctcagcgagcagtaccccacaatggagctgcagggaattgtgccggaggttctgaagaagatcgtaacaacttatgacatgatgattcagtccctcaaggcgttgattgaaaatgcagatgctgtatatgaaaagatcgtacattgtcagaaggcagccatggaattccatgaacacttgcacagcataggcaccaaggaaggtttgaaggaaagaaaactacaaaaagcagtggagagctttacctggaatattaccatcttaaagggacaagcagatcttttgaaatatgctaagaatgagacattggagaacctgaaacaaatccattttgctgctgtttcatgtggactgaataaaccaggcaccgaaaatgctgatgtccagaagccacgccggagcttggaagtcatacccgaaaaagcaaacgatgaaactggagaatgaggaaacttacaataaaccattatggagtttataactctaggaccaattgtagtcagatgggacatttgctttgcactcactaatgagaataatattcgggattttaaagcacaactggaatagctaattacagtctattaaaactgtgaatgtatgtagcaatcctgcgtgtgaaggcaaataaactctttaacaggcaattatattgctggccaaaatatgctatatttgtatacaaagacattctaactcagttccagtatgaagaaagattattcactctagctccactgagaaacattttcctaagtgaaaacaatttcttaagatggaaatggattggattgtcaaattattatttattggagaaaaaaacctgatctacacatttttacttatatggggttgccagagtctctgggttctagatgattttggtggcatgcttgctgagccataattactaaagagaatgtaagtggacgggttccctgaatccccggggtccttggagagccatcgaggagaatgtgcaattggactgaagctccctggctgaagatacatgccgagtcagcacatgggtagagatgatgtaaaagcagccaatctggaaacaatacattgtaaatagtttttcattgtatgaagtagtgttcacattaaaaagatgttttatga

SEQ ID NO: 165836 - DNA, 4147 bp, Homo sapiens
  Payload ID: 12647
  Gene Symbol: PLCL2
  Gene Name: phospholipase C-like 2
  Uniprot ID: Q9UPR0
  ENST ID: ENST00000615277
  CDS Start-End: 82-3465
ccgcgcgcggcggcccgaggcggcggcggggacgcggggacgcgaggacgcggctttgtgcaggcgggtcgcggggcgcccatggcggagtgcggccgggggggcgccgccggcggggccctgcccacctccccgggcccggccctcggcgccaagggcgccctgaaagccggagtgggggaaggcggtggcgggggaggtcgcctcggccacgggcgggcgcgctatgacagcggcggggtttccaacggagactgcagcctcggcgtgtccggggacgaagcccgggctagccctaccaggggaccccgcggcgttgcgctcgccccgacccccagcgcggtcgtctgtaccctcccccgggagagcaagccgggcggcctgccccgccggagcagcatcatcaaggatggtacaaaacagaagagggaacggaaaaagacagtctcattcagcagcatgccaacagagaagaagatcagcagtgcaagtgattgtattaattcaatggttgagggttcagaactcaaaaaggttcgctccaactctagaatttatcataggtactttttactggatgctgacatgcagagcctaaggtgggagccatctaagaaggattctgagaaagccaagattgacattaaatccatcaaggaagtgagaacaggaaaaaacacagacatattccgcagcaatggcatttctgaccagatatctgaagattgtgcgttttccgtcatatatggagagaattatgagtcactggatttggttgccaactccgcagatgttgcaaacatctgggttacaggactgcggtacctaatttcttatggaaaacatacacttgatatgttagaaagtagccaagataacatgaggacttcttgggtttcacaaatgtttagtgaaattgatgtagataaccttggacatataactctgtgtaatgctgtgcaatgtatcagaaacctcaatcctggtttaaaaacgagcaaaattgagcttaagttcaaagaattgcataaatcaaaggacaaagctggtaccgaggtcacaaaggaagaatttattgaggtttttcatgagctttgtactagacctgaaatttatttccttttagttcagttttcaagcaataaagaattccttgataccaaggaccttatgatgtttcttgaggcagaacagggtgtggcacatataaatgaggaaataagccttgaaattattcacaaatatgaaccatccaaagagggtcaggaaaagggctggctctccatagacgggttcactaattaccttatgtcacctgactgttatatattcgatccagaacataagaaggtctgtcaggatatgaagcaacctctgtctcattactttataaactcatctcataatacatacttaatagaggatcagttccgaggtccctccgacatcacaggatatattcgagctcttaaaatgggttgccggagtgttgaattagatgtatgggatgggccggacaatgaacctgtaatttacacaggccacaccatgacctctcagatagttttccgcagtgtcattgatattattaacaagtatgcattctttgcttcagagtatcctcttatcttgtgtttagaaaaccactgttccattaaacaacagaaggtaatggttcagcacatgaagaaacttttaggagacaagctctatacaacatcacccaatgttgaggaatcttatctaccatccccagatgtcctgaaagggaaaatactaattaaagcaaagaagctgtcctcaaattgctctggggtagaaggagatgttactgacgaagatgaaggagcagaaatgtctcagaggatgggaaaagagaacatggagcaacccaataatgtgcctgtgaagcgatttcagctttgtaaagaactgtctgaactggtcagcatctgcaaatcagttcagttcaaagaatttcaggtgtcgtttcaggttcagaagtactgggaagtctgttcctttaatgaagtgcttgccagcaagtacgccaatgaaaatccaggggactttgtaaattacaacaaacgttttcttgctagggtttttcccagtccaatgagaattgattccagtaacatgaatcctcaagatttttggaaatgtggttgccaaattgtagccatgaactttcagacaccaggactgatgatggacctgaatattggctggtttaggcagaacggaaactgtggctatgtcctccggccagccatcatgagggaggaggtctccttcttcagcgccaatacaaaagactctgtcccaggggtctcacctcaacttcttcacattaaaatcatcagtgggcagaactttcccaagcccaaaggatcaggtgccaaaggtgatgtggtagatccttatgtctatgttgaaatccatggaatccctgctgattgtgcagaacaaaggacaaaaacagtgcaccagaatggagacgctcccatttttgatgaaagctttgaatttcaaatcaacctgcctgaactggccatggtgcgctttgtagtgctggatgatgactacattggggatgaattcatcggccagtacacaattccctttgaatgtttacagacgggctaccgccatgtccccctgcagtccttaactggagaggtccttgcacatgcttctttatttgtccacgtggctattactaaccgaagaggaggaggaaagcctcataaaaggggcctttctgtgagaaaagggaagaaatccagggaatatgcatctttgagaacactgtggattaaaaccgtggatgaggtattcaagaatgcccagccccctatacgggatgccacagatctgagagaaaacatgcagaatgcggtggtgtcattcaaggagctgtgtggcctctcctctgtggccaatctcatgcagtgcatgttggcggtgtctccccgctttctggggcccgataacacacccctagtggtcctaaatctcagcgagcagtaccccacaatggagctgcagggaattgtgccggaggttctgaagaagatcgtaacaacttatgacatgatgattcagtccctcaaggcgttgattgaaaatgcagatgctgtatatgaaaagatcgtacattgtcagaaggcagccatggaattccatgaacacttgcacagcataggcaccaaggaaggtttgaaggaaagaaaactacaaaaagcagtggagagctttacctggaatattaccatcttaaagggacaagcagatcttttgaaatatgctaagaatgagacattggagaacctgaaacaaatccattttgctgctgtttcatgtggactgaataaaccaggcaccgaaaatgctgatgtccagaagccacgccggagcttggaagtcatacccgaaaaagcaaacgatgaaactggagaatgaggaaacttacaataaaccattatggagtttataactctaggaccaattgtagtcagatgggacatttgctttgcactcactaatgagaataatattcgggattttaaagcacaactggaatagctaattacagtctattaaaactgtgaatgtatgtagcaatcctgcgtgtgaaggcaaataaactctttaacaggcaattatattgctggccaaaatatgctatatttgtatacaaagacattctaactcagttccagtatgaagaaagattattcactctagctccactgagaaacattttcctaagtgaaaacaatttcttaagatggaaatggattggattgtcaaattattatttattggagaaaaaaacctgatctacacatttttacttatatggggttgccagagtctctgggttctagatgattttggtggcatgcttgctgagccataattactaaagagaatgtaagtggacgggttccctgaatccccggggtccttggagagccatcgaggagaatgtgcaattggactgaagctccctggctgaagatacatgccgagtcagcacatgggtagagatgatgtaaaagcagccaatctggaaacaatacattgtaaatagtttttcattgtatgaagtagtgttcacattaaaaagatgttttatgat

SEQ ID NO: 165837 - DNA, 1906 bp, Homo sapiens
  Payload ID: 12648
  Gene Symbol: PLD3
  Gene Name: phospholipase D family, member 3
  Uniprot ID: Q8IV08
  ENST ID: ENST00000356508
  CDS Start-End: 124-1596
gtcaggcggggatacagcctggaaggtaatgcatgtccatggtacacaaattcacaagtttggagaccctgacacacccaccttctcacctgggctctgcgtatcccccagccttgagggaagatgaagcctaaactgatgtaccaggagctgaaggtgcctgcagaggagcccgccaatgagctgcccatgaatgagattgaggcgtggaaggctgcggaaaagaaagcccgctgggtcctgctggtcctcattctggcggttgtgggcttcggagccctgatgactcagctgtttctatgggaatacggcgacttgcatctctttgggcccaaccagcgcccagccccctgctatgacccttgcgaagcagtgctggtggaaagcattcctgagggcctggacttccccaatgcctccacggggaacccttccaccagccaggcctggctgggcctgctcgccggtgcgcacagcagcctggacatcgcctccttctactggaccctcaccaacaatgacacccacacgcaggagccctctgcccagcagggtgaggaggtcctccggcagctgcagaccctggcaccaaagggcgtgaacgtccgcatcgctgtgagcaagcccagcgggccccagccacaggcggacctgcaggctctgctgcagagcggtgcccaggtccgcatggtggacatgcagaagctgacccatggcgtcctgcataccaagttctgggtggtggaccagacccacttctacctgggcagtgccaacatggactggcgttcactgacccaggtcaaggagctgggcgtggtcatgtacaactgcagctgcctggctcgagacctgaccaagatctttgaggcctactggttcctgggccaggcaggcagctccatcccatcaacttggccccggttctatgacacccgctacaaccaagagacaccaatggagatctgcctcaatggaacccctgctctggcctacctggcgagtgcgcccccacccctgtgtccaagtggccgcactccagacctgaaggctctactcaacgtggtggacaatgcccggagtttcatctacgtcgctgtcatgaactacctgcccactctggagttctcccaccctcacaggttctggcctgccattgacgatgggctgcggcgggccacctacgagcgtggcgtcaaggtgcgcctgctcatcagctgctggggacactcggagccatccatgcgggccttcctgctctctctggctgccctgcgtgacaaccatacccactctgacatccaggtgaaactctttgtggtccccgcggatgaggcccaggctcgaatcccatatgcccgtgtcaaccacaacaagtacatggtgactgaacgcgccacctacatcggaacctccaactggtctggcaactacttcacggagacggcgggcacctcgctgctggtgacgcagaatgggaggggcggcctgcggagccagctggaggccattttcctgagggactgggactccccttacagccatgaccttgacacctcagctgacagcgtgggcaacgcctgccgcctgctctgaggcccgatccagtgggcaggccaaggcctgctgggcccccgcggacccaggtgctctgggtcacggtccctgtccccgcgcccccgcttctgtctgccccattgtggctcctcaggctctctcccctgctctcccacctctacctccacccccaccggcctgacgctgtggccccgggacccagcagagctgggggagggatcagcccccaaagaaatgggggtgcatgctgggcctggccccctggcccacccccactttccagggcaaaaagggcccagggttataataagtaaataacttgtctgta

SEQ ID NO: 165838 - DNA, 745 bp, Homo sapiens
  Payload ID: 12648
  Gene Symbol: PLD3
  Gene Name: phospholipase D family, member 3
  ENST ID: ENST00000359274
  CDS Start-End: 213-745
ctggctgagctgtgtggtgtgggggcacctgagggcggaggagccacctagaatataccccctgtcccagggctgagaaaagccaggcacaaagacctggggctccgctgacctcatccagcgctgcctttcttggggtgtctacagtttggagaccctgacacacccaccttctcacctgggctctgcgtatcccccagccttgagggaagatgaagcctaaactgatgtaccaggagctgaaggtgcctgcagaggagcccgccaatgagctgcccatgaatgagattgaggcgtggaaggctgcggaaaagaaagcccgctgggtcctgctggtcctcattctggcggttgtgggcttcggagccctgatgactcagctgtttctatgggaatacggcgacttgcatctctttgggcccaaccagcgcccagccccctgctatgacccttgcgaagcagtgctggtggaaagcattcctgagggcctggacttccccaatgcctccacggggaacccttccaccagccaggcctggctgggcctgctcgccggtgcgcacagcagcctggacatcgcctccttctactggaccctcaccaacaatgacacccacacgcaggagccctctgcccagcagggtgaggaggtcctccggcagctgcagaccctggcaccaaagggcgtgaacgtccgcatcgctgtgagcaagcccagcgggccccagccacaggcggacctgca

SEQ ID NO: 165839 - DNA, 873 bp, Homo sapiens
  Payload ID: 12648
  Gene Symbol: PLD3
  Gene Name: phospholipase D family, member 3
  ENST ID: ENST00000392032
  CDS Start-End: 488-873
ggcgctcccctccgcccgaagctagcaagcggcgcggccaatgagaaaggcgcatgcctggcccccgccggcctgcagtctagccgtagtgcgcctgcgcgcggctaggaggggccgtcaggcggggatacagcctggaaggtaatgcatgtccatggtacacaaattcacaaggctggagcgaccgtgtctggggagccgagccccgcttctcgctgcggtgagcccggactggggcacgcactgcgcagactccccgctgcagtgggcggagctcccacaggccccgccccctcctcccaccctcgttcagcctgtccagacagaagctggggcccaccggaggtagctgcagacgcctgagagcgaggccgaggcccctcagggaacaccccacacagtgcccacttttgttctgccagtttggagaccctgacacacccaccttctcacctgggctctgcgtatcccccagccttgagggaagatgaagcctaaactgatgtaccaggagctgaaggtgcctgcagaggagcccgccaatgagctgcccatgaatgagattgaggcgtggaaggctgcggaaaagaaagcccgctgggtcctgctggtcctcattctggcggttgtgggcttcggagccctgatgactcagctgtttctatgggaatacggcgacttgcatctctttgggcccaaccagcgcccagccccctgctatgacccttgcgaagcagtgctggtggaaagcattcctgagggcctggacttccccaatgcctccacggggaacccttccaccagccaggcctggctgggcctgctcgccggtgcgcacagcagcctggacatcgcctccttctactggaccct

SEQ ID NO: 165840 - DNA, 1966 bp, Homo sapiens
  Payload ID: 12648
  Gene Symbol: PLD3
  Gene Name: phospholipase D family, member 3
  Uniprot ID: Q8IV08
  ENST ID: ENST00000409419
  CDS Start-End: 192-1664
ctgcgcgcggctaggaggggccgtcaggcggggatacagcctggaaggtgcgtgtggggctgggtctcggagtgggagacgtggagtgcagaacaccccacacagtgcccacttttgttctgccagtttggagaccctgacacacccaccttctcacctgggctctgcgtatcccccagccttgagggaagatgaagcctaaactgatgtaccaggagctgaaggtgcctgcagaggagcccgccaatgagctgcccatgaatgagattgaggcgtggaaggctgcggaaaagaaagcccgctgggtcctgctggtcctcattctggcggttgtgggcttcggagccctgatgactcagctgtttctatgggaatacggcgacttgcatctctttgggcccaaccagcgcccagccccctgctatgacccttgcgaagcagtgctggtggaaagcattcctgagggcctggacttccccaatgcctccacggggaacccttccaccagccaggcctggctgggcctgctcgccggtgcgcacagcagcctggacatcgcctccttctactggaccctcaccaacaatgacacccacacgcaggagccctctgcccagcagggtgaggaggtcctccggcagctgcagaccctggcaccaaagggcgtgaacgtccgcatcgctgtgagcaagcccagcgggccccagccacaggcggacctgcaggctctgctgcagagcggtgcccaggtccgcatggtggacatgcagaagctgacccatggcgtcctgcataccaagttctgggtggtggaccagacccacttctacctgggcagtgccaacatggactggcgttcactgacccaggtcaaggagctgggcgtggtcatgtacaactgcagctgcctggctcgagacctgaccaagatctttgaggcctactggttcctgggccaggcaggcagctccatcccatcaacttggccccggttctatgacacccgctacaaccaagagacaccaatggagatctgcctcaatggaacccctgctctggcctacctggcgagtgcgcccccacccctgtgtccaagtggccgcactccagacctgaaggctctactcaacgtggtggacaatgcccggagtttcatctacgtcgctgtcatgaactacctgcccactctggagttctcccaccctcacaggttctggcctgccattgacgatgggctgcggcgggccacctacgagcgtggcgtcaaggtgcgcctgctcatcagctgctggggacactcggagccatccatgcgggccttcctgctctctctggctgccctgcgtgacaaccatacccactctgacatccaggtgaaactctttgtggtccccgcggatgaggcccaggctcgaatcccatatgcccgtgtcaaccacaacaagtacatggtgactgaacgcgccacctacatcggaacctccaactggtctggcaactacttcacggagacggcgggcacctcgctgctggtgacgcagaatgggaggggcggcctgcggagccagctggaggccattttcctgagggactgggactccccttacagccatgaccttgacacctcagctgacagcgtgggcaacgcctgccgcctgctctgaggcccgatccagtgggcaggccaaggcctgctgggcccccgcggacccaggtgctctgggtcacggtccctgtccccgcgcccccgcttctgtctgccccattgtggctcctcaggctctctcccctgctctcccacctctacctccacccccaccggcctgacgctgtggccccgggacccagcagagctgggggagggatcagcccccaaagaaatgggggtgcatgctgggcctggccccctggcccacccccactttccagggcaaaaagggcccagggttataataagtaaataact

SEQ ID NO: 165841 - DNA, 2140 bp, Homo sapiens
  Payload ID: 12648
  Gene Symbol: PLD3
  Gene Name: phospholipase D family, member 3
  Uniprot ID: Q8IV08
  ENST ID: ENST00000409735
  CDS Start-End: 358-1830
aggaggggccgtcaggcggggatacagcctggaaggtgcgtgtggggctgggtctcggagtgggagacgtggagtgcaggctggagcgaccgtgtctggggagccgagccccgcttctcgctgcggtgagcccggactggggcacgcactgcgcagactccccgctgcagtgggcggagctcccacaggccccgccccctcctcccaccctcgttcagcctgtccagacagaagctggggcccaccggaggtagctgcagacgcctgagagcgaggccgaggcccctcagggtttggagaccctgacacacccaccttctcacctgggctctgcgtatcccccagccttgagggaagatgaagcctaaactgatgtaccaggagctgaaggtgcctgcagaggagcccgccaatgagctgcccatgaatgagattgaggcgtggaaggctgcggaaaagaaagcccgctgggtcctgctggtcctcattctggcggttgtgggcttcggagccctgatgactcagctgtttctatgggaatacggcgacttgcatctctttgggcccaaccagcgcccagccccctgctatgacccttgcgaagcagtgctggtggaaagcattcctgagggcctggacttccccaatgcctccacggggaacccttccaccagccaggcctggctgggcctgctcgccggtgcgcacagcagcctggacatcgcctccttctactggaccctcaccaacaatgacacccacacgcaggagccctctgcccagcagggtgaggaggtcctccggcagctgcagaccctggcaccaaagggcgtgaacgtccgcatcgctgtgagcaagcccagcgggccccagccacaggcggacctgcaggctctgctgcagagcggtgcccaggtccgcatggtggacatgcagaagctgacccatggcgtcctgcataccaagttctgggtggtggaccagacccacttctacctgggcagtgccaacatggactggcgttcactgacccaggtcaaggagctgggcgtggtcatgtacaactgcagctgcctggctcgagacctgaccaagatctttgaggcctactggttcctgggccaggcaggcagctccatcccatcaacttggccccggttctatgacacccgctacaaccaagagacaccaatggagatctgcctcaatggaacccctgctctggcctacctggcgagtgcgcccccacccctgtgtccaagtggccgcactccagacctgaaggctctactcaacgtggtggacaatgcccggagtttcatctacgtcgctgtcatgaactacctgcccactctggagttctcccaccctcacaggttctggcctgccattgacgatgggctgcggcgggccacctacgagcgtggcgtcaaggtgcgcctgctcatcagctgctggggacactcggagccatccatgcgggccttcctgctctctctggctgccctgcgtgacaaccatacccactctgacatccaggtgaaactctttgtggtccccgcggatgaggcccaggctcgaatcccatatgcccgtgtcaaccacaacaagtacatggtgactgaacgcgccacctacatcggaacctccaactggtctggcaactacttcacggagacggcgggcacctcgctgctggtgacgcagaatgggaggggcggcctgcggagccagctggaggccattttcctgagggactgggactccccttacagccatgaccttgacacctcagctgacagcgtgggcaacgcctgccgcctgctctgaggcccgatccagtgggcaggccaaggcctgctgggcccccgcggacccaggtgctctgggtcacggtccctgtccccgcgcccccgcttctgtctgccccattgtggctcctcaggctctctcccctgctctcccacctctacctccacccccaccggcctgacgctgtggccccgggacccagcagagctgggggagggatcagcccccaaagaaatgggggtgcatgctgggcctggccccctggcccacccccactttccagggcaaaaagggcccagggttataataagtaaataacttgtctgta

SEQ ID NO: 165842 - DNA, 2115 bp, Homo sapiens
  Payload ID: 12648
  Gene Symbol: PLD3
  Gene Name: phospholipase D family, member 3
  Uniprot ID: Q8IV08
  ENST ID: ENST00000409281
  CDS Start-End: 333-1805
ctctttataatttagtttccatagaagttatatgtgcatttaaaaaaattcaatgctggagcgaccgtgtctggggagccgagccccgcttctcgctgcggtgagcccggactggggcacgcactgcgcagactccccgctgcagtgggcggagctcccacaggccccgccccctcctcccaccctcgttcagcctgtccagacagaagctggggcccaccggaggtagctgcagacgcctgagagcgaggccgaggcccctcagggtttggagaccctgacacacccaccttctcacctgggctctgcgtatcccccagccttgagggaagatgaagcctaaactgatgtaccaggagctgaaggtgcctgcagaggagcccgccaatgagctgcccatgaatgagattgaggcgtggaaggctgcggaaaagaaagcccgctgggtcctgctggtcctcattctggcggttgtgggcttcggagccctgatgactcagctgtttctatgggaatacggcgacttgcatctctttgggcccaaccagcgcccagccccctgctatgacccttgcgaagcagtgctggtggaaagcattcctgagggcctggacttccccaatgcctccacggggaacccttccaccagccaggcctggctgggcctgctcgccggtgcgcacagcagcctggacatcgcctccttctactggaccctcaccaacaatgacacccacacgcaggagccctctgcccagcagggtgaggaggtcctccggcagctgcagaccctggcaccaaagggcgtgaacgtccgcatcgctgtgagcaagcccagcgggccccagccacaggcggacctgcaggctctgctgcagagcggtgcccaggtccgcatggtggacatgcagaagctgacccatggcgtcctgcataccaagttctgggtggtggaccagacccacttctacctgggcagtgccaacatggactggcgttcactgacccaggtcaaggagctgggcgtggtcatgtacaactgcagctgcctggctcgagacctgaccaagatctttgaggcctactggttcctgggccaggcaggcagctccatcccatcaacttggccccggttctatgacacccgctacaaccaagagacaccaatggagatctgcctcaatggaacccctgctctggcctacctggcgagtgcgcccccacccctgtgtccaagtggccgcactccagacctgaaggctctactcaacgtggtggacaatgcccggagtttcatctacgtcgctgtcatgaactacctgcccactctggagttctcccaccctcacaggttctggcctgccattgacgatgggctgcggcgggccacctacgagcgtggcgtcaaggtgcgcctgctcatcagctgctggggacactcggagccatccatgcgggccttcctgctctctctggctgccctgcgtgacaaccatacccactctgacatccaggtgaaactctttgtggtccccgcggatgaggcccaggctcgaatcccatatgcccgtgtcaaccacaacaagtacatggtgactgaacgcgccacctacatcggaacctccaactggtctggcaactacttcacggagacggcgggcacctcgctgctggtgacgcagaatgggaggggcggcctgcggagccagctggaggccattttcctgagggactgggactccccttacagccatgaccttgacacctcagctgacagcgtgggcaacgcctgccgcctgctctgaggcccgatccagtgggcaggccaaggcctgctgggcccccgcggacccaggtgctctgggtcacggtccctgtccccgcgcccccgcttctgtctgccccattgtggctcctcaggctctctcccctgctctcccacctctacctccacccccaccggcctgacgctgtggccccgggacccagcagagctgggggagggatcagcccccaaagaaatgggggtgcatgctgggcctggccccctggcccacccccactttccagggcaaaaagggcccagggttataataagtaaataacttgtctgta

SEQ ID NO: 165843 - DNA, 2180 bp, Homo sapiens
  Payload ID: 12648
  Gene Symbol: PLD3
  Gene Name: phospholipase D family, member 3
  Uniprot ID: Q8IV08
  ENST ID: ENST00000409587
  CDS Start-End: 398-1870
cggctaggaggggccgtcaggcggggatacagcctggaaggtgcgtgtggggctgggtctcggagtgggagacgtggagtgcaggctggagcgaccgtgtctggggagccgagccccgcttctcgctgcggtgagcccggactggggcacgcactgcgcagactccccgctgcagtgggcggagctcccacaggccccgccccctcctcccaccctcgttcagcctgtccagacagaagctggggcccaccggaggtagctgcagacgcctgagagcgaggccgaggcccctcagggaacaccccacacagtgcccacttttgttctgccagtttggagaccctgacacacccaccttctcacctgggctctgcgtatcccccagccttgagggaagatgaagcctaaactgatgtaccaggagctgaaggtgcctgcagaggagcccgccaatgagctgcccatgaatgagattgaggcgtggaaggctgcggaaaagaaagcccgctgggtcctgctggtcctcattctggcggttgtgggcttcggagccctgatgactcagctgtttctatgggaatacggcgacttgcatctctttgggcccaaccagcgcccagccccctgctatgacccttgcgaagcagtgctggtggaaagcattcctgagggcctggacttccccaatgcctccacggggaacccttccaccagccaggcctggctgggcctgctcgccggtgcgcacagcagcctggacatcgcctccttctactggaccctcaccaacaatgacacccacacgcaggagccctctgcccagcagggtgaggaggtcctccggcagctgcagaccctggcaccaaagggcgtgaacgtccgcatcgctgtgagcaagcccagcgggccccagccacaggcggacctgcaggctctgctgcagagcggtgcccaggtccgcatggtggacatgcagaagctgacccatggcgtcctgcataccaagttctgggtggtggaccagacccacttctacctgggcagtgccaacatggactggcgttcactgacccaggtcaaggagctgggcgtggtcatgtacaactgcagctgcctggctcgagacctgaccaagatctttgaggcctactggttcctgggccaggcaggcagctccatcccatcaacttggccccggttctatgacacccgctacaaccaagagacaccaatggagatctgcctcaatggaacccctgctctggcctacctggcgagtgcgcccccacccctgtgtccaagtggccgcactccagacctgaaggctctactcaacgtggtggacaatgcccggagtttcatctacgtcgctgtcatgaactacctgcccactctggagttctcccaccctcacaggttctggcctgccattgacgatgggctgcggcgggccacctacgagcgtggcgtcaaggtgcgcctgctcatcagctgctggggacactcggagccatccatgcgggccttcctgctctctctggctgccctgcgtgacaaccatacccactctgacatccaggtgaaactctttgtggtccccgcggatgaggcccaggctcgaatcccatatgcccgtgtcaaccacaacaagtacatggtgactgaacgcgccacctacatcggaacctccaactggtctggcaactacttcacggagacggcgggcacctcgctgctggtgacgcagaatgggaggggcggcctgcggagccagctggaggccattttcctgagggactgggactccccttacagccatgaccttgacacctcagctgacagcgtgggcaacgcctgccgcctgctctgaggcccgatccagtgggcaggccaaggcctgctgggcccccgcggacccaggtgctctgggtcacggtccctgtccccgcgcccccgcttctgtctgccccattgtggctcctcaggctctctcccctgctctcccacctctacctccacccccaccggcctgacgctgtggccccgggacccagcagagctgggggagggatcagcccccaaagaaatgggggtgcatgctgggcctggccccctggcccacccccactttccagggcaaaaagggcccagggttataataagtaaataacttgtctgta

SEQ ID NO: 165844 - DNA, 443 bp, Homo sapiens
  Payload ID: 12648
  Gene Symbol: PLD3
  Gene Name: phospholipase D family, member 3
  ENST ID: ENST00000596682
  CDS Start-End: 199-443
ggcggggatacagcctggaaggtgcgtgtggggctgggtctcggagtgggagacgtggagtgcaggtaatgcatgtccatggtacacaaattcacaagaacaccccacacagtgcccacttttgttctgccagtttggagaccctgacacacccaccttctcacctgggctctgcgtatcccccagccttgagggaagatgaagcctaaactgatgtaccaggagctgaaggtgcctgcagaggagcccgccaatgagctgcccatgaatgagattgaggcgtggaaggctgcggaaaagaaagcccgctgggtcctgctggtcctcattctggcggttgtgggcttcggagccctgatgactcagctgtttctatgggaatacggcgacttgcatctctttgggcccaaccagcgcccagccccctgctatgacccttgcga

SEQ ID NO: 165845 - DNA, 503 bp, Homo sapiens
  Payload ID: 12648
  Gene Symbol: PLD3
  Gene Name: phospholipase D family, member 3
  ENST ID: ENST00000602131
  CDS Start-End: 145-503
aggaggggccgtcaggcggggatacagcctggaaggtgcgtgtggggctgggtctcggagtgggagacgtggagtgcagtttggagaccctgacacacccaccttctcacctgggctctgcgtatcccccagccttgagggaagatgaagcctaaactgatgtaccaggagctgaaggtgcctgcagaggagcccgccaatgagctgcccatgaatgagattgaggcgtggaaggctgcggaaaagaaagcccgctgggtcctgctggtcctcattctggcggttgtgggcttcggagccctgatgactcagctgtttctatgggaatacggcgacttgcatctctttgggcccaaccagcgcccagccccctgctatgacccttgcgaagcagtgctggtggaaagcattcctgagggcctggacttccccaatgcctccacggggaacccttccaccagccaggcctggctgggcctgctcgccggtgcgcacagcagcct

SEQ ID NO: 165846 - DNA, 544 bp, Homo sapiens
  Payload ID: 12648
  Gene Symbol: PLD3
  Gene Name: phospholipase D family, member 3
  ENST ID: ENST00000599685
  CDS Start-End: 335-544
tcgtccgcggccgctctaccccaacaggccgccaccagcgagagtgcggccataaccatcacgtgaccgcccaccgacaccagcgagagtgcagtcgtaaccgtcacgtgaccgcccaccgtcggcccggcgctcccctccgcccgaagctagcaagcggcgcggccaatgagaaaggcgcatgcctggcccccgccggcctgcagtctagccgtagtgcgcctgcgcgcggctaggaggggccgtcaggcggggatacagcctggaagtttggagaccctgacacacccaccttctcacctgggctctgcgtatcccccagccttgagggaagatgaagcctaaactgatgtaccaggagctgaaggtgcctgcagaggagcccgccaatgagctgcccatgaatgagattgaggcgtggaaggctgcggaaaagaaagcccgctgggtcctgctggtcctcattctggcggttgtgggcttcggagccctgatgactcagctgtttctatgggaatacggcgacttgcatctctttgggccc

SEQ ID NO: 165847 - DNA, 710 bp, Homo sapiens
  Payload ID: 12648
  Gene Symbol: PLD3
  Gene Name: phospholipase D family, member 3
  ENST ID: ENST00000492243
  CDS Start-End: 1-364
caaccagcgcccagccccctgctatgacccttgcgatctatccaacacacccatggacggacagctgagcactcacctcccagcccttgctctccggcaccgtatggctgatagcatcccccaccccccagagcagtgctggtggaaagcattcctgagggcctggacttccccaatgcctccacggggaacccttccaccagccaggcctggctgggcctgctcgccggtgcgcacagcagcctggacatcgcctccttctactggaccctcaccaacaatgacacccacacgcaggagccctctgcccagcagggtgaggaggtcctccggcagctgcagaccctggcaccaaagggcgtgaacgtccgcatcgctgtgagcaagcccagcgggccccagccacaggcggacctgcaggctctgctgcagagcggtgcccaggtccgcatggtggacatgcagaagctgacccatggcgtcctgcataccaagttctgggtggtggaccagacccacttctacctgggcagtgccaacatggactggcgttcactgacccaggtcaaggagctgggcgtggtcatgtacaactgcagctgcctggctcgagacctgaccaagatctttgaggcctactggttcctgggccaggcaggcagctccatcccatcaacttggccccggttctatgacacccgctacaacca

SEQ ID NO: 165848 - DNA, 580 bp, Homo sapiens
  Payload ID: 12648
  Gene Symbol: PLD3
  Gene Name: phospholipase D family, member 3
  ENST ID: ENST00000598962
  CDS Start-End: 497-580
gtgcgcctgcgcgcggctaggaggggccgtcaggcggggatacagcctggaaggtaatgcatgtccatggtacacaaattcacaaggtttgtaaatgagaaaagacgtgaggttccttttgttctttacctgtggcctccctgccctacacggggactctagggtggaatgtagcaaagcccatccaccagccatgtactaccccccaacccggccaggctggagcgaccgtgtctggggagccgagccccgcttctcgctgcggtgagcccggactggggcacgcactgcgcagactccccgctgcagtgggcggagctcccacaggccccgccccctcctcccaccctcgttcagcctgtccagacagaagctggggcccaccggaggtagctgcagacgcctgagagcgaggccgaggcccctcagggtttggagaccctgacacacccaccttctcacctgggctctgcgtatcccccagccttgagggaagatgaagcctaaactgatgtaccaggagctgaaggtgcctgcagaggagcccgccaatgagctgcccatgaatgagattgaggcg

SEQ ID NO: 165849 - DNA, 804 bp, Homo sapiens
  Payload ID: 12648
  Gene Symbol: PLD3
  Gene Name: phospholipase D family, member 3
  ENST ID: ENST00000594908
  CDS Start-End: 164-804
ggcggggatacagcctggaaggtgcgtgtggggctgggtctcggagtgggagacgtggagtgcaggtaatgcatgtccatggtacacaaattcacaagtttggagaccctgacacacccaccttctcacctgggctctgcgtatcccccagccttgagggaagatgaagcctaaactgatgtaccaggagctgaaggtgcctgcagaggagcccgccaatgagctgcccatgaatgagattgaggcgtggaaggctgcggaaaagaaagcccgctgggtcctgctggtcctcattctggcggttgtgggcttcggagccctgatgactcagctgtttctatgggaatacggcgacttgcatctctttgggcccaaccagcgcccagccccctgctatgacccttgcgaagcagtgctggtggaaagcattcctgagggcctggacttccccaatgcctccacggggaacccttccaccagccaggcctggctgggcctgctcgccggtgcgcacagcagcctggacatcgcctccttctactggaccctcaccaacaatgacacccacacgcaggagccctctgcccagcagggtgaggaggtcctccggcagctgcagaccctggcaccaaagggcgtgaacgtccgcatcgctgtgagcaagcccagcgggccccagccacaggcggacctgcaggctctgctgcagagcggtgcccaggtccgcatggtggacatgcagaagctgacccatggcgtcctgcataccaagttctgggtggtggaccagacccacttctacct

SEQ ID NO: 165850 - DNA, 536 bp, Homo sapiens
  Payload ID: 12648
  Gene Symbol: PLD3
  Gene Name: phospholipase D family, member 3
  ENST ID: ENST00000600948
  CDS Start-End: 404-536
gtcaggcggggatacagcctggaaggtgcgtgtggggctgggtctcggagtgggagacgtggagtgcagggtggaatgtagcaaagcccatccaccagccatgtactaccccccaacccggccaggctggagcgaccgtgtctggggagccgagccccgcttctcgctgcggtgagcccggactggggcacgcactgcgcagactccccgctgcagtgggcggagctcccacaggccccgccccctcctcccaccctcgttcagcctgtccagacagaagctggggcccaccggaggtagctgcagacgcctgagagcgaggccgaggcccctcagggtttggagaccctgacacacccaccttctcacctgggctctgcgtatcccccagccttgagggaagatgaagcctaaactgatgtaccaggagctgaaggtgcctgcagaggagcccgccaatgagctgcccatgaatgagattgaggcgtggaaggctgcggaaaagaaagcccgctgggtcctgctggtcctcattc

SEQ ID NO: 165851 - DNA, 332 bp, Homo sapiens
  Payload ID: 12648
  Gene Symbol: PLD3
  Gene Name: phospholipase D family, member 3
  ENST ID: ENST00000599353
  CDS Start-End: 1-332
aaagcattcctgagggcctggacttccccaatgcctccacggggaacccttccaccagccaggcctggctgggcctgctcgccggtgcgcacagcagcctggacatcgcctccttctactggaccctcaccaacaatgacacccacacgcaggagccctctgcccagcagggtgaggaggtcctccggcagctgcagaccctggcaccaaagggcgtgaacgtccgcatggtggacatgcagaagctgacccatggcgtcctgcataccaagttctgggtggtggaccagacccacttctacctgggcagtgccaacatggactggcgttca

SEQ ID NO: 165852 - DNA, 327 bp, Homo sapiens
  Payload ID: 12648
  Gene Symbol: PLD3
  Gene Name: phospholipase D family, member 3
  ENST ID: ENST00000486134
  CDS Start-End: 1-214
ggtgactgaacgcgccacctacatcggaacctccaactggtctggcaactacttcacggagacggcgggcacctcgctgctggtgacgcagaatgggaggggcggcctgcggagccagctggaggccattttcctgagggactgggactccccttacagccatgaccttgacacctcagctgacagcgtgggcaacgcctgccgcctgctctgaggcccgatccagtgggcaggccaaggcctgctgggcccccgcggacccaggatggccagtggctcagcagaggccccgagatgctctccttcctcccagctgctgccccggca

SEQ ID NO: 165853 - DNA, 6515 bp, Homo sapiens
  Payload ID: 12649
  Gene Symbol: PLD4
  Gene Name: phospholipase D family, member 4
  Uniprot ID: Q96BZ4
  ENST ID: ENST00000392593
  CDS Start-End: 169-1689
agaggaagtagctggaaggggaaggagccagctgcagagaggaggaggtgagctgcagagaagaggaggttggtgtggagcacaggcagcaccgagcctgccccgtgagctgagggcctgcagtctgcggctggaatcaggatagacaccaaggcaggacccccagagatgctgaagcctctttggaaagcagcagtggcccccacatggccatgctccatgccgccccgccgcccgtgggacagagaggctggcacgttgcaggtcctgggagcgctggctgtgctgtggctgggctccgtggctcttatctgcctcctgtggcaagtgccccgtcctcccacctggggccaggtgcagcccaaggacgtgcccaggtcctgggagcatggctccagcccagcttgggagcccctggaagcagaggccaggcagcagagggactcctgccagcttgtccttgtggaaagcatcccccaggacctgccatctgcagccggcagcccctctgcccagcctctgggccaggcctggctgcagctgctggacactgcccaggagagcgtccacgtggcttcatactactggtccctcacagggcctgacatcggggtcaacgactcgtcttcccagctgggagaggctcttctgcagaagctgcagcagctgctgggcaggaacatttccctggctgtggccaccagcagcccgacactggccaggacatccaccgacctgcaggttctggctgcccgaggtgcccatgtacgacaggtgcccatggggcggctcaccaggggtgttttgcactccaaattctgggttgtggatggacggcacatatacatgggcagtgccaacatggactggcggtctctgacgcaggtgaaggagcttggcgctgtcatctataactgcagccacctggcccaagacctggagaagaccttccagacctactgggtactgggggtgcccaaggctgtcctccccaaaacctggcctcagaacttctcatctcacttcaaccgtttccagcccttccacggcctctttgatggggtgcccaccactgcctacttctcagcgtcgccaccagcactctgtccccagggccgcacccgggacctggaggcgctgctggcggtgatggggagcgcccaggagttcatctatgcctccgtgatggagtatttccccaccacgcgcttcagccaccccccgaggtactggccggtgctggacaacgcgctgcgggcggcagccttcggcaagggcgtgcgcgtgcgcctgctggtcggctgcggactcaacacggaccccaccatgttcccctacctgcggtccctgcaggcgctcagcaaccccgcggccaacgtctctgtggacgtgaaagtcttcatcgtgccggtggggaaccattccaacatcccattcagcagggtgaaccacagcaagttcatggtcacggagaaggcagcctacataggcacctccaactggtcggaggattacttcagcagcacggcgggggtgggcttggtggtcacccagagccctggcgcgcagcccgcgggggccacggtgcaggagcagctgcggcagctctttgagcgggactggagttcgcgctacgccgtcggcctggacggacaggctccgggccaggactgcgtttggcagggctgaggggggcctctttttctctcggcgaccccgccccgcacgcgccctcccctctgaccccggcctgggcttcagccgcttcctcccgcaagcagcccgggtccgcactgcgccaggagccgcctgcgaccgcccgggcgtcgcaaaccgcccgcctgctctctgatttccgagtccagccccccctgagccccacctcctccagggagccctccaggaagccccttccctgactcctggcccacaggccaggcctaaaaaaaactcgtggcttcccggtgcctctgtgtgagtcccgcgcgggcggcccttcatcctcttgccaagggcccgcctctatgcgcccgcccctgcgaaactgcgccgcgcgaccgccgtggcagcgcctcagctagccccgggtccgcgagaacctggggcggggcggggcggggaccagacgggcctcccaggcggagcgaaccctccacctcccaccccgcgccgggctgccgcgctccggaacccaaattcccgccccgaggctgccgggggaagcgagaggcgcggagcccacgcccgggactccagcggaggaaacgcagaccaaggcgcagcgccgcgcacccaccgccagggggcagctcctacggcgccggacaggggcggcgcgggaggggagcggggctgaggggaccgggagggcgggaggggacctgcgactgaggggacagggagggcgggaggcgacccgcggctgagtgagggaagggcgggaggggacccgcggctgaggggaccgggagggcgggaggcgacccgcggctgagtgaggggagggtgggaggggacccgcggctgaggggacagggagggcgggaggggacccgcggctgaggggaccgggagggcgggaggcgacccggggctgagtgaggggagggcgggaggggagcggggctgaggggaccgggagggcgggaggggacctgcgactgaggggacggggaggatgtgaggcgatccggggctgagtgaggggagggtgggaggggacccgcggctgaggggacggggagggcgggaggggacccgcggctgaggggacggggagggcgggaggcgacccggggctgaggggacggggagggcgggaggggacccgcggctgaggggacaggtcctgcgtgcgggctggggagacaggcgggcgagggtaggggtgcacaaggctgtgtggtttgtgggctgttgtgcagggtgggtccaagcatgtgggggcaggcttgtcctggggatgcagtgcccagggttggtggatggggctgagaggaccagcatttgagctggagggcaggaaggtgactccagtctgagaccaggacttggatgcagctccactggaactcaccctatcctgggagccacctgggcacctgtcctgcagatgcaggatttgaacccaggtttggcaactcagttcccactcttctgctatgaatgctgggtcagaaggattctcaaaacaccctggcttatctcacctgatggttcctgaccaagaccacagggtaccctcccctggtggaggtccatggggccatgctaggctggagttcagggatggctcagcggtatgaaggagcactggatgctgaatggaccccagggtgccccgaatgctctcccggtcttgaggcaccactttcctacccttctctacttctctccttttcctacccttctctacttttttctttcctacatttgtgtccctgccacactgtgaactcagccatatcttcctcttccctctttgctttggggaaagctagcaaagttcatctcaggtacagtacaagttacttttctgttcgattagtgacctcatacttcccccatctaaaggacaccttagacttcagcattctgtctgtgcagaaatctcctacacccatcctgcctccctgcccaagcttgtgaaaagcttgctgcagatgctgcagggggatagggatccacatagccctgcaaggccttcaggagcttctgggggctgctttgtgtgtgagctgcacttggccaagccaagctctggcagttgcagtggctgctccctgtggcttcctatccctcattcatgctccatatctcctcagtaaccatctggcaaaaagcttcgtggcaacacctggctcagaagccgatatcatcccagactaagctctgccctccagggttgcacgtgtgggtttgctccctggttcttggccttatacctgaatgtgtctcagagcacttggcctgctctcttggcctgccaactatgttctaggagggctctgtgctccaggctgtgatttggacaactggctggtggccctcagccagtgaaaggcctctttccacacacctggggactggcagtcacacctcagtggcactgacagaggcctgcttcaaggcagatgcctattccaaaggaaatccagcttgacaaggcttgggagaccccaggagggtgccacaatgtggccccttctgggctatagcagacagactctagaatggctcccttgacccccacctgctggtatgcatgcccttgtgtgatctcaccttgagtgtgtgcaggacctgtgccttgttgtaaccaatagaatacagaggtaaggggatgtcactcctgtgacaccttgtgatcatgtgacataagattataacattatcaaggaatagcagtctatcccttgctagctttaaaaagtgagctgctaggctatgagctgtcctatgaagaggcccatgtagcagggtactggggttgcctccagcccccaactagcaagaaactggggccctcaatcatcccatccacaaggagttgagtgtggctagcaacaacgtgagcttcagaagtggctgctttcctggtcatacctgaaggggagaccacagccccagctgacatcttgattgtagcctaatgggaccttgagcagagaacccaacaaagccacacttgggctcctgatccacagaaactgggagatcataaatgtgtgttgttttaagttgctaatttgtagtgatgttcttatgcagcatagataactcatacacagagaaccaaggccacgcgagaaccctgtgggggcccctgctgctcagccactcctcacatgctgggacagctgtctctctggcctctagcaccaaggtccccactatcccaggccttgactcttggatcagagagggacaaaagccccatggagccaagcagactcctccccctgggctgcactcacctagcttgtctggcacacacaagttggagtagagaaggcaggaagccctgggaagggagagggtgatggccttgcttaactgggatgagtgtccaccaaatttcccttcccacttcccctgctcatgagcccccaggggacctgtgtcagttcactttctagaggcttctatgtgccctaacttggatgacacccacgggcctccccaactcagcacagggaacatatgcccatggtggcatggggaaagaacccagcctctcccctgcccaggctcctgcaccccatagctgtcacccctctggaacctctcagggcagcacgagtggtagcctcggagtggccttcaccctccaggcactgcggtcctccagattggctcacagcccagctcttgctcccatatccacagccatgagagcagccacctccccagggggccataagcgcttctcaccaggagcccacctaggccaggagggagctgggggcaagttccaactgcccccttgaacactgcatacccatgaatctggcaggggcatctgggaagagatttgaccactgaaagactgtagggaaacccttgaacctcaatccgctacgccacgtggatttgcttcctgtgggctgcccaagagcgcctctgtggtgaaggaagcttctgaggatgggccactaaagatggccaaggtcacctttctgtgctgtccccactctgcactccatctcccatcccacactgcctccagctggagggagggagggagggttgtacgtctgtgtccctgccacactgtgaactcagccctatcttccttgtcttcctcacagcctctggctcagaggaggacctggacaaatggatgataggtaggcaaccacccaaatgttcctcattgactgttctctagagctgcttagtagagaccaggagtgtgtgggaggaaagccctggtaaacttcgaccctgagacagaagacctcagcagccttcagcatgggatgcagcactttctttattgcccatccagggaacagccaagccagctccatctgcattctggctgcagcgtgtacattaggggactcaggggccacagtgtgggaccgtgcacactggcaaggcactggcggatgctggcaggccagtggacatggatagatgagaatgacaactcacagatgtcctagcttctgctggcccagctgccagccactggccatcacccttttgcccagcatgtgtgcattgtcacccaaaacatcttgaaacttgccattagtgaggcattcaacaaagaagtaagctaagtgagtaggaaacagtgtttcctggaatataccgcactctgcctgaaataggaaaactatgtttgccgggaagcagcagcagcaggaaagaagttataccaaaaacgacttgtacaccacagacattataaccctttcctcaaagaaacagtcatgttctgttgggtattatggacaggtctctggaaatttatctaataaagaccaacaaacttccccagcagt

SEQ ID NO: 165854 - DNA, 2007 bp, Homo sapiens
  Payload ID: 12649
  Gene Symbol: PLD4
  Gene Name: phospholipase D family, member 4
  ENST ID: ENST00000540372
  CDS Start-End: 193-1734
aggacaaagaggaagtagctggaaggggaaggagccagctgcagagaggaggaggtgagctgcagagaagaggaggttggtgtggagcacaggcagcaccgagcctgccccgtgagctgagggcctgcagtctgcggctggaatcaggatagacaccaaggcaggacccccagagagctggagctgctggtgatgccaggctgccctgtgcagatgctgaagcctctttggaaagcagcagtggcccccacatggccatgctccatgccgccccgccgcccgtgggacagagaggctggcacgttgcaggtcctgggagcgctggctgtgctgtggctgggctccgtggctcttatctgcctcctgtggcaagtgccccgtcctcccacctggggccaggtgcagcccaaggacgtgcccaggtcctgggagcatggctccagcccagcttgggagcccctggaagcagaggccaggcagcagagggactcctgccagcttgtccttgtggaaagcatcccccaggacctgccatctgcagccggcagcccctctgcccagcctctgggccaggcctggctgcagctgctggacactgcccaggagagcgtccacgtggcttcatactactggtccctcacagggcctgacatcggggtcaacgactcgtcttcccagctgggagaggctcttctgcagaagctgcagcagctgctgggcaggaacatttccctggctgtggccaccagcagcccgacactggccaggacatccaccgacctgcaggttctggctgcccgaggtgcccatgtacgacaggtgcccatggggcggctcaccaggggtgttttgcactccaaattctgggttgtggatggacggcacatatacatgggcagtgccaacatggactggcggtctctgacgcaggtgaaggagcttggcgctgtcatctataactgcagccacctggcccaagacctggagaagaccttccagacctactgggtactgggggtgcccaaggctgtcctccccaaaacctggcctcagaacttctcatctcacttcaaccgtttccagcccttccacggcctctttgatggggtgcccaccactgcctacttctcagcgtcgccaccagcactctgtccccagggccgcacccgggacctggaggcgctgctggcggtgatggggagcgcccaggagttcatctatgcctccgtgatggagtatttccccaccacgcgcttcagccaccccccgaggtactggccggtgctggacaacgcgctgcgggcggcagccttcggcaagggcgtgcgcgtgcgcctgctggtcggctgcggactcaacacggaccccaccatgttcccctacctgcggtccctgcaggcgctcagcaaccccgcggccaacgtctctgtggacgtgaaagtcttcatcgtgccggtggggaaccattccaacatcccattcagcagggtgaaccacagcaagttcatggtcacggagaaggcagcctacataggcacctccaactggtcggaggattacttcagcagcacggcgggggtgggcttggtggtcacccagagccctggcgcgcagcccgcgggggccacggtgcaggagcagctgcggcagctctttgagcgggactggagttcgcgctacgccgtcggcctggacggacaggctccgggccaggactgcgtttggcagggctgaggggggcctctttttctctcggcgaccccgccccgcacgcgccctcccctctgaccccggcctgggcttcagccgcttcctcccgcaagcagcccgggtccgcactgcgccaggagccgcctgcgaccgcccgggcgtcgcaaaccgcccgcctgctctctgatttccgagtccagccccccctgagccccacctcctccagggagccctccaggaagccccttccctgactcctggcccacaggccaggcctaaaaaaaactcgtggcttcc

SEQ ID NO: 165855 - DNA, 883 bp, Homo sapiens
  Payload ID: 12649
  Gene Symbol: PLD4
  Gene Name: phospholipase D family, member 4
  ENST ID: ENST00000557573
  CDS Start-End: 113-883
agagaagaggaggttggtgtggagcacaggcagcaccgagcctgccccgtgagctgagggcctgcagtctgcggctggaatcaggatagacaccaaggcaggacccccagagatgctgaagcctctttggaaagcagcagtggcccccacatggccatgctccatgccgccccgccgcccgtgggacagagaggctggcacggtcctgggagcgctggctgtgctgtggctgggctccgtggctcttatctgcctcctgtggcaagtgccccgtcctcccacctggggccaggtgcagcccaaggacgtgcccaggtcctgggagcatggctccagcccagcttgggagcccctggaagcagaggccaggcagcagagggactcctgccagcttgtccttgtggaaagcatcccccaggacctgccatctgcagccggcagcccctctgcccagcctctgggccaggcctggctgcagctgctggacactgcccaggagagcgtccacgtggcttcatactactggtccctcacagggcctgacatcggggtcaacgactcgtcttcccagctgggagaggctcttctgcagaagctgcagcagctgctgggcaggaacatttccctggctgtggccaccagcagcccgacactggccaggacatccaccgacctgcaggttctggctgcccgaggtgcccatgtacgacaggtgcccatggggcggctcaccaggggtgttttgcactccaaattctgggttgtggatggacggcacatatacatgggcagtgccaacatggactggcggtctctgacgcaggtgaaggagcttggcgctgtcatctataactgcagccacctggcccaagacctggagaag

SEQ ID NO: 165856 - DNA, 667 bp, Homo sapiens
  Payload ID: 12649
  Gene Symbol: PLD4
  Gene Name: phospholipase D family, member 4
  ENST ID: ENST00000553861
  CDS Start-End: 169-396
aacgtctctgtggacgtggtgagggcgtgctcccggccgggcgtgggaaaggcggccctcctgccgcccttcctgacgcgctgcctctgctcccctaagaaagtcttcatcgtgccggtggggaaccattccaacatcccattcagcagggtgaaccacagcaagttcatggtcacggagaaggcagcctacataggcacctccaactggtcggaggattacttcagcagcacggcgggggtgggcttggtggtcacccagagccctggcgcgcagcccgcgggggccacggtgcaggagcagctgcggcagctctttgagcgggactggagttcgcgctacgccgtcggcctggacggacaggctccgggccaggactgcgtttggcagggctgaggggggcctctttttctctcggcgaccccgccccgcacgcgccctcccctctgaccccggcctgggcttcagccgcttcctcccgcaagcagcccgggtccgcactgcgccaggagccgcctgcgaccgcccgggcgtcgcaaaccgcccgcctgctctctgatttccgagtccagccccccctgagccccacctcctccagggagccctccaggaagccccttccctgactcctggcccacaggccaggcctaaaaaaaactcgtggctt

SEQ ID NO: 165857 - DNA, 2830 bp, Homo sapiens
  Payload ID: 12650
  Gene Symbol: PLD5
  Gene Name: phospholipase D family, member 5
  ENST ID: ENST00000314833
  CDS Start-End: 101-244
attctctgcctctgaaggctccagaggctgtgggaagcagcacatcagcgacagctcctggctgctggactccgcagggagggaaggaagattggtcgcaatgtcccagcagaagtgcatcgtgatctttgccctggtgtgctgctttgccattctggttgcactgatcttttcagccgtggacatcatgggagaggatgaggatggactctcagaaaaaaattgccaaaataaatgtcggtaagagggtcaacgtctttttgaaaagttgctccagctgacttcgcaaaatattgaaatcaagctagtgagtgatgtaacagctgattcaaaggtattagaagccttgaaattaaagggagccgaggtgacgtacatgaacatgaccgcttacaacaagggccggctgcagtcctccttctggatcgtggacaaacagcacgtgtatatcggcagtgccggtttggactggcaatccctgggacagatgaaagaactcggtgtcatcttctacaactgcagctgcctggtcctagatttacaaaggatatttgctctatatagttcattaaaattcaaaagcagagtgcctcaaacctggtccaaaagactctatggagtctatgacaatgaaaagaaattgcaacttcagttgaatgaaaccaaatctcaagcatttgtatcgaattctccaaaactcttttgccctaaaaacagaagttttgacatagatgccatctacagtgtgatagatgatgccaagcagtatgtgtacatcgctgtcatggactacctgcctatctccagcacaagcaccaaaaggacttactggccagacttggatgcaaaaataagagaagcattagttttacgaagcgttagagttcgactccttttaagcttctggaaggaaactgatccccttacgtttaactttatttcatctcttaaagcgatttgcactgaaatagccaactgcagtttgaaagttaaattttttgatctggaaagagagaatgcttgtgctacaaaagaacaaaagaatcacacctttcctaggttaaatcgcaacaagtacatggtgacagatggagcagcttatattggaaattttgattgggtagggaatgatttcactcagaatgctggcacgggccttgttatcaaccaggcagatgtgaggaacaacagaagcatcattaagcaacttaaagatgtgtttgaaagggactggtattcaccgtatgccaaaaccttacagccaaccaaacagccgaactgctcaagcctgttcaaactcaaacccctctccaacaaaactgccacagacgacacaggcggaaaggatccccggaacgtataacatgatgaagaaactgacaggacagctctgtatttcatatttatacataaaggacttgaggagagaaaaaacactttaatatgtctctttttttagggaaaaagcacacttataaaaaatattctctgaacaacacataatacctatctaacaatatcttagcgtcgtgtacactaaaattaagacttttgtatttgttacctctgacagagaatgtcattctggcgtagaagttagtttttacgtttgcatacaaattttaagactttcattcctgctcctttctagttttagaactttttctgctgacctacccggtcagttgttaggaagcttagcatgaggtgggctctttaacaccattctgagaactgttgatttagagaggaaggtgaggattttgccttggagaagagactgataaaaccaagtgtttattcttgtaaatcgtctccaagacctacacagtcagctaagcatgaatagcttacatctcatgccagccttcaacacccttgaaaaatatccttttctgtcttgctcattttcttcttataccataagttttatttggtatcattttctcttctcacaaaatgttcctattatatagcattttctgtattcacctcaacattacttctaactatgataacatcttttgaaaacatacaaatttttcagaatggatactaagtggaaatagcagtctttcattttcacctttcaactgaatccttttttcccctaccgaattggtatttaaaaaaaatcacagtcagcaatatgtatcctttctctcaagctcagaaaaattatgtagccacctgctaatatccagcaagctatcaagtctgcattttgggaataaagtagtttttcacatttttgttcagtttatggtattataaaggaaaaaatctctatgcgtcagtggattttaatttctttagaatcattatgctgttaagagtatgccagcaaacgtttctagagctatttaatataccttctgctatttaatataccaaatgcttttcagagaaatgcaatttaaatactgtgcttaacatattttactaagaagcagaaatattgaattattgttctataacgtaattgtgtgttgttgttttatatctatacaatatatacccctgtattaatggagaccattgctacactagggagaggcatggcctcttcagagcccacagcaggtggccgggatgtccagttccaatgttgttcccgactctgtgactcaaagcggagcccctcactgcttggcctcgggcttctcttggtaatgtagacggtaataactcacctacctcgcaaggatgttgtcacggtaggaaatatttataacttgttttgaaatcaaaagaacctatataaatgctaagcattataatatataatctttttcttgaaataaactttgtcatatcttgatggaatcaa

SEQ ID NO: 165858 - DNA, 2729 bp, Homo sapiens
  Payload ID: 12650
  Gene Symbol: PLD5
  Gene Name: phospholipase D family, member 5
  ENST ID: ENST00000366545
  CDS Start-End: 228-557
gtaggtgccgcaaggagccggcgagcggagcgcccgctcgggaccgcagccgccgggcgacgtcgccgccgcaccgggcacttctgtctccccggagcagctcctccagctcagtctccagctccacctccggctcccgctgggcctcccgctcgccctccgcgcccggctccccgcgcgcccgtcccgagtccgctgctcgccggcggccgcccggtcatgtcaggatggagatccggcagcacgagtggctctcggcctccccccatgagggcttcgagcagatgaggctcaaaagccgccccaaggagccctccccaagcctgacccgagtgggcgcgaacttctacagcagcgtcaagcagcaggactacagcgccagcgtctggcttcggaggaaagacaagctggagcactcccagcagaagtgcatcgtgatctttgccctggtgtgctgctttgccattctggttgcactgatcttttcagccgtggacatcatgggagaggatgaggatggactctcagaaaaaaattgccaaaataaatgtcggtaagagaattgccctggtggaaaatattcctgaaggccttaactattcagaaaatgcaccatttcacttatcacttttccaaggctggatgaatttactcaacatggccaaaaagtctgttgacatagtgtcttcccattgggatctcaaccacactcatccatcagcatgtcagggtcaacgtctttttgaaaagttgctccagctgacttcgcaaaatattgaaatcaagctagtgagtgatgtaacagctgattcaaaggtattagaagccttgaaattaaagggagccgaggtgacgtacatgaacatgaccgcttacaacaagggccggctgcagtcctccttctggatcgtggacaaacagcacgtgtatatcggcagtgccggtttggactggcaatccctgggacagatgaaagaactcggtgtcatcttctacaactgcagctgcctggtcctagatttacaaaggatatttgctctatatagttcattaaaattcaaaagcagagtgcctcaaacctggtccaaaagactctatggagtctatgacaatgaaaagaaattgcaacttcagttgaatgaaaccaaatctcaagcatttgtatcgaattctccaaaactcttttgccctaaaaacagaagttttgacatagatgccatctacagtgtgatagatgatgccaagcagtatgtgtacatcgctgtcatggactacctgcctatctccagcacaagcaccaaaaggacttactggccagacttggatgcaaaaataagagaagcattagttttacgaagcgttagagttcgactccttttaagcttctggaaggaaactgatccccttacgtttaactttatttcatctcttaaagcgatttgcactgaaatagccaactgcagtttgaaagttaaattttttgatctggaaagagagaatgcttgtgctacaaaagaacaaaagaatcacacctttcctaggttaaatcgcaacaagtacatggtgacagatggagcagcttatattggaaattttgattgggtagggaatgatttcactcagaatgctggcacgggccttgttatcaaccaggcagatgtgaggaacaacagaagcatcattaagcaacttaaagatgtgtttgaaagggactggtattcaccgtatgccaaaaccttacagccaaccaaacagccgaactgctcaagcctgttcaaactcaaacccctctccaacaaaactgccacagacgacacaggcggaaaggatccccggaacgtataacatgatgaagaaactgacaggacagctctgtatttcatatttatacataaaggacttgaggagagaaaaaacactttaatatgtctctttttttagggaaaaagcacacttataaaaaatattctctgaacaacacataatacctatctaacaatatcttagcgtcgtgtacactaaaattaagacttttgtatttgttacctctgacagagaatgtcattctggcgtagaagttagtttttacgtttgcatacaaattttaagactttcattcctgctcctttctagttttagaactttttctgctgacctacccggtcagttgttaggaagcttagcatgaggtgggctctttaacaccattctgagaactgttgatttagagaggaaggtgaggattttgccttggagaagagactgataaaaccaagtgtttattcttgtaaatcgtctccaagacctacacagtcagctaagcatgaatagcttacatctcatgccagccttcaacacccttgaaaaatatccttttctgtcttgctcattttcttcttataccataagttttatttggtatcattttctcttctcacaaaatgttcctattatatagcattttctgtattcacctcaacattacttctaactatgataacatcttttgaaaacatacaaatttttcagaatggatactaagtggaaatagcagtctttcattttcacctttcaactgaatccttttttcccctaccgaattggtatttaaaaaaaatcacagtcagcaatatgtatcctttctctcaagctcagaaaaattatgtagccacctgctaatatccagcaagctatcaagtctgcattttgggaataaagtagtttttcac

SEQ ID NO: 165859 - DNA, 3018 bp, Homo sapiens
  Payload ID: 12650
  Gene Symbol: PLD5
  Gene Name: phospholipase D family, member 5
  Uniprot ID: Q8N7P1
  ENST ID: ENST00000427495
  CDS Start-End: 127-1551
ggtgatacgtttgtgccacatgaaacattctctgcctctgaaggctccagaggctgtgggaagcagcacatcagcgacagctcctggctgctggactccgcagggagggaaggaagattggtcgcaatgtcccagcagaagtgcatcgtgatctttgccctggtgtgctgctttgccattctggttgcactgatcttttcagccgtggacatcatgggagaggatgaggatggactctcagaaaaaaattgccaaaataaatgtcgaattgccctggtggaaaatattcctgaaggccttaactattcagaaaatgcaccatttcacttatcacttttccaaggctggatgaatttactcaacatggccaaaaagtctgttgacatagtgtcttcccattgggatctcaaccacactcatccatcagcatgtcagggtcaacgtctttttgaaaagttgctccagctgacttcgcaaaatattgaaatcaagctagtgagtgatgtaacagctgattcaaaggtattagaagccttgaaattaaagggagccgaggtgacgtacatgaacatgaccgcttacaacaagggccggctgcagtcctccttctggatcgtggacaaacagcacgtgtatatcggcagtgccggtttggactggcaatccctgggacagatgaaagaactcggtgtcatcttctacaactgcagctgcctggtcctagatttacaaaggatatttgctctatatagttcattaaaattcaaaagcagagtgcctcaaacctggtccaaaagactctatggagtctatgacaatgaaaagaaattgcaacttcagttgaatgaaaccaaatctcaagcatttgtatcgaattctccaaaactcttttgccctaaaaacagaagttttgacatagatgccatctacagtgtgatagatgatgccaagcagtatgtgtacatcgctgtcatggactacctgcctatctccagcacaagcaccaaaaggacttactggccagacttggatgcaaaaataagagaagcattagttttacgaagcgttagagttcgactccttttaagcttctggaaggaaactgatccccttacgtttaactttatttcatctcttaaagcgatttgcactgaaatagccaactgcagtttgaaagttaaattttttgatctggaaagagagaatgcttgtgctacaaaagaacaaaagaatcacacctttcctaggttaaatcgcaacaagtacatggtgacagatggagcagcttatattggaaattttgattgggtagggaatgatttcactcagaatgctggcacgggccttgttatcaaccaggcagatgtgaggaacaacagaagcatcattaagcaacttaaagatgtgtttgaaagggactggtattcaccgtatgccaaaaccttacagccaaccaaacagccgaactgctcaagcctgttcaaactcaaacccctctccaacaaaactgccacagacgacacaggcggaaaggatccccggaacgtataacatgatgaagaaactgacaggacagctctgtatttcatatttatacataaaggacttgaggagagaaaaaacactttaatatgtctctttttttagggaaaaagcacacttataaaaaatattctctgaacaacacataatacctatctaacaatatcttagcgtcgtgtacactaaaattaagacttttgtatttgttacctctgacagagaatgtcattctggcgtagaagttagtttttacgtttgcatacaaattttaagactttcattcctgctcctttctagttttagaactttttctgctgacctacccggtcagttgttaggaagcttagcatgaggtgggctctttaacaccattctgagaactgttgatttagagaggaaggtgaggattttgccttggagaagagactgataaaaccaagtgtttattcttgtaaatcgtctccaagacctacacagtcagctaagcatgaatagcttacatctcatgccagccttcaacacccttgaaaaatatccttttctgtcttgctcattttcttcttataccataagttttatttggtatcattttctcttctcacaaaatgttcctattatatagcattttctgtattcacctcaacattacttctaactatgataacatcttttgaaaacatacaaatttttcagaatggatactaagtggaaatagcagtctttcattttcacctttcaactgaatccttttttcccctaccgaattggtatttaaaaaaaatcacagtcagcaatatgtatcctttctctcaagctcagaaaaattatgtagccacctgctaatatccagcaagctatcaagtctgcattttgggaataaagtagtttttcacatttttgttcagtttatggtattataaaggaaaaaatctctatgcgtcagtggattttaatttctttagaatcattatgctgttaagagtatgccagcaaacgtttctagagctatttaatataccttctgctatttaatataccaaatgcttttcagagaaatgcaatttaaatactgtgcttaacatattttactaagaagcagaaatattgaattattgttctataacgtaattgtgtgttgttgttttatatctatacaatatatacccctgtattaatggagaccattgctacactagggagaggcatggcctcttcagagcccacagcaggtggccgggatgtccagttccaatgttgttcccgactctgtgactcaaagcggagcccctcactgcttggcctcgggcttctcttggtaatgtagacggtaataactcacctacctcgcaaggatgttgtcacggtaggaaatatttataacttgttttgaaatcaaaagaacctatataaatgctaagcattataatatataatctttttcttgaaataaactttgtcatatcttgatggaatcaa

SEQ ID NO: 165860 - DNA, 3305 bp, Homo sapiens
  Payload ID: 12650
  Gene Symbol: PLD5
  Gene Name: phospholipase D family, member 5
  Uniprot ID: Q8N7P1
  ENST ID: ENST00000442594
  CDS Start-End: 228-1838
gtaggtgccgcaaggagccggcgagcggagcgcccgctcgggaccgcagccgccgggcgacgtcgccgccgcaccgggcacttctgtctccccggagcagctcctccagctcagtctccagctccacctccggctcccgctgggcctcccgctcgccctccgcgcccggctccccgcgcgcccgtcccgagtccgctgctcgccggcggccgcccggtcatgtcaggatggagatccggcagcacgagtggctctcggcctccccccatgagggcttcgagcagatgaggctcaaaagccgccccaaggagccctccccaagcctgacccgagtgggcgcgaacttctacagcagcgtcaagcagcaggactacagcgccagcgtctggcttcggaggaaagacaagctggagcactcccagcagaagtgcatcgtgatctttgccctggtgtgctgctttgccattctggttgcactgatcttttcagccgtggacatcatgggagaggatgaggatggactctcagaaaaaaattgccaaaataaatgtcgaattgccctggtggaaaatattcctgaaggccttaactattcagaaaatgcaccatttcacttatcacttttccaaggctggatgaatttactcaacatggccaaaaagtctgttgacatagtgtcttcccattgggatctcaaccacactcatccatcagcatgtcagggtcaacgtctttttgaaaagttgctccagctgacttcgcaaaatattgaaatcaagctagtgagtgatgtaacagctgattcaaaggtattagaagccttgaaattaaagggagccgaggtgacgtacatgaacatgaccgcttacaacaagggccggctgcagtcctccttctggatcgtggacaaacagcacgtgtatatcggcagtgccggtttggactggcaatccctgggacagatgaaagaactcggtgtcatcttctacaactgcagctgcctggtcctagatttacaaaggatatttgctctatatagttcattaaaattcaaaagcagagtgcctcaaacctggtccaaaagactctatggagtctatgacaatgaaaagaaattgcaacttcagttgaatgaaaccaaatctcaagcatttgtatcgaattctccaaaactcttttgccctaaaaacagaagttttgacatagatgccatctacagtgtgatagatgatgccaagcagtatgtgtacatcgctgtcatggactacctgcctatctccagcacaagcaccaaaaggacttactggccagacttggatgcaaaaataagagaagcattagttttacgaagcgttagagttcgactccttttaagcttctggaaggaaactgatccccttacgtttaactttatttcatctcttaaagcgatttgcactgaaatagccaactgcagtttgaaagttaaattttttgatctggaaagagagaatgcttgtgctacaaaagaacaaaagaatcacacctttcctaggttaaatcgcaacaagtacatggtgacagatggagcagcttatattggaaattttgattgggtagggaatgatttcactcagaatgctggcacgggccttgttatcaaccaggcagatgtgaggaacaacagaagcatcattaagcaacttaaagatgtgtttgaaagggactggtattcaccgtatgccaaaaccttacagccaaccaaacagccgaactgctcaagcctgttcaaactcaaacccctctccaacaaaactgccacagacgacacaggcggaaaggatccccggaacgtataacatgatgaagaaactgacaggacagctctgtatttcatatttatacataaaggacttgaggagagaaaaaacactttaatatgtctctttttttagggaaaaagcacacttataaaaaatattctctgaacaacacataatacctatctaacaatatcttagcgtcgtgtacactaaaattaagacttttgtatttgttacctctgacagagaatgtcattctggcgtagaagttagtttttacgtttgcatacaaattttaagactttcattcctgctcctttctagttttagaactttttctgctgacctacccggtcagttgttaggaagcttagcatgaggtgggctctttaacaccattctgagaactgttgatttagagaggaaggtgaggattttgccttggagaagagactgataaaaccaagtgtttattcttgtaaatcgtctccaagacctacacagtcagctaagcatgaatagcttacatctcatgccagccttcaacacccttgaaaaatatccttttctgtcttgctcattttcttcttataccataagttttatttggtatcattttctcttctcacaaaatgttcctattatatagcattttctgtattcacctcaacattacttctaactatgataacatcttttgaaaacatacaaatttttcagaatggatactaagtggaaatagcagtctttcattttcacctttcaactgaatccttttttcccctaccgaattggtatttaaaaaaaatcacagtcagcaatatgtatcctttctctcaagctcagaaaaattatgtagccacctgctaatatccagcaagctatcaagtctgcattttgggaataaagtagtttttcacatttttgttcagtttatggtattataaaggaaaaaatctctatgcgtcagtggattttaatttctttagaatcattatgctgttaagagtatgccagcaaacgtttctagagctatttaatataccttctgctatttaatataccaaatgcttttcagagaaatgcaatttaaatactgtgcttaacatattttactaagaagcagaaatattgaattattgttctataacgtaattgtgtgttgttgttttatatctatacaatatatacccctgtattaatggagaccattgctacactagggagaggcatggcctcttcagagcccacagcaggtggccgggatgtccagttccaatgttgttcccgactctgtgactcaaagcggagcccctcactgcttggcctcgggcttctcttggtaatgtagacggtaataactcacctacctcgcaaggatgttgtcacggtaggaaatatttataacttgttttgaaatcaaaagaacctatataaatgctaagcattataatatataatctttttcttgaaataaactttgtcatatcttgatggaatcaa

SEQ ID NO: 165861 - DNA, 490 bp, Homo sapiens
  Payload ID: 12650
  Gene Symbol: PLD5
  Gene Name: phospholipase D family, member 5
  ENST ID: ENST00000459864
  CDS Start-End: 70-490
gggaagcagcacatcagcgacagctcctggctgctggactccgcagggagggaaggaagattggtcgcaatgtcccagcagaagtgcatcgtgatctttgccctggtgtgctgctttgccattctggttgcactgatcttttcagccgtggacatcatgggagaggatgaggatggactctcagaaaaaaattgccaaaataaatgtcgaattgccctggtggaaaatattcctgaaggccttaactattcagaaaatgcaccatttcacttatcacttttccaaggctggatgaatttactcaacatggccaaaaagtctgttgacatagtgtcttcccattgggatctcaaccacactcatccatcagcatgtcagggtcaacgtctttttgaaaagttgctccagctgacttcgcaaaatattgaaatcaagctagtgagtgatgtaacagctgattcaaaggtattagaagccttgaaattaaagg

SEQ ID NO: 165862 - DNA, 1353 bp, Homo sapiens
  Payload ID: 12650
  Gene Symbol: PLD5
  Gene Name: phospholipase D family, member 5
  ENST ID: ENST00000467561
  CDS Start-End: 396-989
cggagcgcccgctcgggaccgcagccgccgggcgacgtcgccgccgcaccgggcacttctgtctccccggagcaggttcctttccctccctgtcccctctcgtcccccttctccccgtccgtccccctccgcccccgcccccgcccccgcccgcacctcgccctccctccttccgccccgcgcctcccgcgatcgccccctcccgcccggccgcgctcccagctggcgctcagcaccccgcgctccccgcgcccgctcgctcctccagctcctccagctcagtctccagctccacctccggctcccgctgggcctcccgctcgccctccgcgcccggctccccgcgcgcccgtcccgagtccgctgctcgccggcggccgcccggtcatgtcaggatggagatccggcagcacgagtggctctcggcctccccccatgagggcttcgagcagatgaggctcaaaagccgccccaaggagccctccccaagcctgacccgagtgggcgcgaacttctacagcagcgtcaagcagcaggactacagcgccagcgtctggcttcggaggaaagacaagctggagcactcccagcagaagtgcatcgtgatctttgccctggtgtgctgctttgccattctggttgcactgatcttttcagccgtggacatcatgggagaggatgaggatggactctcagaaaaaaattgccaaaataaatgtcgaattgccctggtggaaaatattcctgaaggccttaactattcagaaaatgcaccatttcacttatcacttttccaaggctggatgaatttactcaacatggccaaaaagtctgttgacatagtgtcttcccattgggatctcaaccacactcatccatcagcatgtcagggtcaacgtctttttgaaaagttgctccagctgacttcgcaaaatattgaaatcaagctagtgagtgatgtaacagctgattcaaaggagccgaggtgacgtacatgaacatgaccgcttacaacaagggccggctgcagtcctccttctggatcgtggacaaacagcacgtgtatatcggcagtgccggtttggactggcaatccctgggacagatgaaagaactcggtgtcatcttctacaactgcagctgcctggtcctagatttacaaaggatatttgctctatatagttcattaaaattcaaaagcagagtgcctcaaacctggtccaaaagactctatggagtctatgacaatgaaaagaaattgcaacttcagttgaatgaaaccaaatctcaagcatttgtatcggtgagttgttttccctttctcctccccttctccttcttcctccaaaggct

SEQ ID NO: 165863 - DNA, 8721 bp, Homo sapiens
  Payload ID: 12650
  Gene Symbol: PLD5
  Gene Name: phospholipase D family, member 5
  Uniprot ID: Q8N7P1
  ENST ID: ENST00000536534
  CDS Start-End: 243-1853
cacctcgccctccctccttccgccccgcgcctcccgcgatcgccccctcccgcccggccgcgctcccagctggcgctcagcaccccgcgctccccgcgcccgctcgctcctccagctcctccagctcagtctccagctccacctccggctcccgctgggcctcccgctcgccctccgcgcccggctccccgcgcgcccgtcccgagtccgctgctcgccggcggccgcccggtcatgtcaggatggagatccggcagcacgagtggctctcggcctccccccatgagggcttcgagcagatgaggctcaaaagccgccccaaggagccctccccaagcctgacccgagtgggcgcgaacttctacagcagcgtcaagcagcaggactacagcgccagcgtctggcttcggaggaaagacaagctggagcactcccagcagaagtgcatcgtgatctttgccctggtgtgctgctttgccattctggttgcactgatcttttcagccgtggacatcatgggagaggatgaggatggactctcagaaaaaaattgccaaaataaatgtcgaattgccctggtggaaaatattcctgaaggccttaactattcagaaaatgcaccatttcacttatcacttttccaaggctggatgaatttactcaacatggccaaaaagtctgttgacatagtgtcttcccattgggatctcaaccacactcatccatcagcatgtcagggtcaacgtctttttgaaaagttgctccagctgacttcgcaaaatattgaaatcaagctagtgagtgatgtaacagctgattcaaaggtattagaagccttgaaattaaagggagccgaggtgacgtacatgaacatgaccgcttacaacaagggccggctgcagtcctccttctggatcgtggacaaacagcacgtgtatatcggcagtgccggtttggactggcaatccctgggacagatgaaagaactcggtgtcatcttctacaactgcagctgcctggtcctagatttacaaaggatatttgctctatatagttcattaaaattcaaaagcagagtgcctcaaacctggtccaaaagactctatggagtctatgacaatgaaaagaaattgcaacttcagttgaatgaaaccaaatctcaagcatttgtatcgaattctccaaaactcttttgccctaaaaacagaagttttgacatagatgccatctacagtgtgatagatgatgccaagcagtatgtgtacatcgctgtcatggactacctgcctatctccagcacaagcaccaaaaggacttactggccagacttggatgcaaaaataagagaagcattagttttacgaagcgttagagttcgactccttttaagcttctggaaggaaactgatccccttacgtttaactttatttcatctcttaaagcgatttgcactgaaatagccaactgcagtttgaaagttaaattttttgatctggaaagagagaatgcttgtgctacaaaagaacaaaagaatcacacctttcctaggttaaatcgcaacaagtacatggtgacagatggagcagcttatattggaaattttgattgggtagggaatgatttcactcagaatgctggcacgggccttgttatcaaccaggcagatgtgaggaacaacagaagcatcattaagcaacttaaagatgtgtttgaaagggactggtattcaccgtatgccaaaaccttacagccaaccaaacagccgaactgctcaagcctgttcaaactcaaacccctctccaacaaaactgccacagacgacacaggcggaaaggatccccggaacgtataacatgatgaagaaactgacaggacagctctgtatttcatatttatacataaaggacttgaggagagaaaaaacactttaatatgtctctttttttagggaaaaagcacacttataaaaaatattctctgaacaacacataatacctatctaacaatatcttagcgtcgtgtacactaaaattaagacttttgtatttgttacctctgacagagaatgtcattctggcgtagaagttagtttttacgtttgcatacaaattttaagactttcattcctgctcctttctagttttagaactttttctgctgacctacccggtcagttgttaggaagcttagcatgaggtgggctctttaacaccattctgagaactgttgatttagagaggaaggtgaggattttgccttggagaagagactgataaaaccaagtgtttattcttgtaaatcgtctccaagacctacacagtcagctaagcatgaatagcttacatctcatgccagccttcaacacccttgaaaaatatccttttctgtcttgctcattttcttcttataccataagttttatttggtatcattttctcttctcacaaaatgttcctattatatagcattttctgtattcacctcaacattacttctaactatgataacatcttttgaaaacatacaaatttttcagaatggatactaagtggaaatagcagtctttcattttcacctttcaactgaatccttttttcccctaccgaattggtatttaaaaaaaatcacagtcagcaatatgtatcctttctctcaagctcagaaaaattatgtagccacctgctaatatccagcaagctatcaagtctgcattttgggaataaagtagtttttcacatttttgttcagtttatggtattataaaggaaaaaatctctatgcgtcagtggattttaatttctttagaatcattatgctgttaagagtatgccagcaaacgtttctagagctatttaatataccttctgctatttaatataccaaatgcttttcagagaaatgcaatttaaatactgtgcttaacatattttactaagaagcagaaatattgaattattgttctataacgtaattgtgtgttgttgttttatatctatacaatatatacccctgtattaatggagaccattgctacactagggagaggcatggcctcttcagagcccacagcaggtggccgggatgtccagttccaatgttgttcccgactctgtgactcaaagcggagcccctcactgcttggcctcgggcttctcttggtaatgtagacggtaataactcacctacctcgcaaggatgttgtcacggtaggaaatatttataacttgttttgaaatcaaaagaacctatataaatgctaagcattataatatataatctttttcttgaaataaactttgtcatatcttgatggaatcaacaccaggtcctcccccagaatccacaaaggaaaacaaattcacagcttcctgttgcaaatgtggatgaaaagagcacagccccacagaaaccctggtggagatctggattgtcaacatttcaatagaacattgcgttgggctgctttggcatgaataacatcaacacaaaactagacgtcgtgctagagctggttcttcaggaccataatatacatgtattttcagagcaaggaaacactcagttattctttttcatttctggagacttgatttctaaatgccaaaagagtgatcgaggagcctgtgaatcttatccaatggatttacttaatatagaatggctatgttggttatccagtgagtgatcacattacttcccttcttgttatttgcaagtattgcttcactagatatttaaccagttgatcaagagagctggaaggaagctgtatttttaagggtagcatggttttatgactaattgggagattctcactgaaattcttcatcaataatagccagtccctaagactctaaatatttaccatatacacaatccatatttgagttgggagttataactctgccagttatcccaataaagtaaacgtggctttggtgatgattttaaaaagaaagcagcctgggtgcggtggctcacgcctgtcatcccagcgctttggaaggccaaggcaggaggattgcttgaggccaagagtttgagaccagcctgggtagcatagcaagatcctgcctctaaaaataaataaatacagaaaggaaagaaggaatcagaataggagtggagacaaacctaccaagttcacactcagacaaacaaaagcgacctgagttggttttaaaaaggacatctaaagggagaaaaaaaaaccaaataaactaaaatttgttagttctcaagttgtcccctgaagtattcatccacagccatgggacactcataggcttggtgtcatggggccccttcactgtcactatctgctgtatgtgctacgagaagagaatgtcatccattacggaatgaccatcattgccatttccttttgaggcctggcaaaatgctatcaccaggagccgcatcccaggcttttctgccaagcagcagcagcagatgcctaccagacacagcaagcccctaatcaggggagtctgggcagcggtggtgactccatggggccacactgtccttctgtggcagccagaaaagtgacccccataccaagagtgtcagaaatgggttcatgtctcccaagagaacatttcattctgcagaactttctttcatttggatgctttagctatccctctagagacggctttcctttcttttagacttgtttctgtgctaaacaaactatcaacctccattcccccccacccctaaatatcccaggaattactttccaggagggaaagaatgcaaaacaaaaacaggttaatttgacaccctctggtggatgtccatgccagaaattatgaggagcagggtgactactccccattaacattcctggatttatttcccaagaggcaaaaaggaaaacaaacacaattagagactatatcttggatttcagtaccactaacactaacttagtgccttatgtatcctcaagtgttgattttaaacaatgacttattctatgagaacacttctctctcctgtggaattcaaatgaccttccgatgggcctaccagttgaaaacttccatttgagcagtgacagtttttatgctgcctgttctcttcccaagccccatcacctttatccacccccccgccaaatcaaatcattgcacacaccatcaaagatcaatactgtgggcctccactgcattgtcactggccactagcctatcaaataattgaatctctgcttgtccaaccattggagaggaagtggaagagtgagatgacatccatgctttgtaaacaacaagctttaggtacctgaacctgatagaaacaaggaatgctgaaaatgtccccactgacttaaaagaatgctgtaaagagatgctttgcagacttcctaggtcctgtggcacagagaatgaaaaccagcgtctttaacaagtcaaagcagacaaagaaacaaaaggtctgcggatacactttgcacctgtgtaactctgggcaccattcgggccctctctgtgctactgtttgtctcatgtctgaatggttcttggtgagaggggtctgatcacatttttggttgatctcaccctttgaaaaatgtgggggattttttttgaaatgcagttaatggtttaagtgcctcgatgaacctgggatggatagaagctcatttcccaccagcctgtggctatactcagtgactctgattcattctgtttgtttttaggaacttttattgaactaaattccaaggggggagaaaagaccataagaatttcttgataagatcagatccagggtctatctgtctcaggaattctatcctacaattaacttttttttttttccacacgtatgaccactggtgtgtgtttctgtgtccaaaattcatttcattatttttaactttaggaatgtaaaacgctgccattacttgcatagaacagccacttcctataatgaaagatactttgttattgtttattcaaactcagtccttacgaacagccccatatattgtggacaaatgtttcattcttttatctttctgtacttgttcccaatgaactggtgtgctttattatacaccttttaaaggcaaaattaatataacttccatttggcccaaggtaaaaaattttccaatttgatttggattagcatctttcattttccttttatatgttgttaacaaaatagctgcttaccattttcaccttattgacttaaatggacggaggcttttgaatagccctgacatcaaccccagttcgcagcctgtctttctcatttgagagaattcccatctttggctgaattatgaagatgctgctttatacagtgactcaatgggtattcctcagaagtttcttgaagatgtaaaaatgaaattttcttatttttgacccattagcagtcttgtatttacaaggttctaaaacttcactggtcattaacgcttcttttggcaatttgaaaaaaaaaagttacatttaatagactattacacattttcttttgctatgttcaactactaaacttctaattctgttacaaaaggtatcttgaatttttaatgttcctttatgtaaataggataaacttgtacctggacatatctatattattaaccttaagatccctaaataaatgggtttgataaagggttgaatttgggggaatcattaaaattatcaaacctttcgtataaccagatgctcagttttttcagaagtaaatattagatggctttttcatactgtgagatgaggcatttctttttctcctcaagctgatctcagaaacaaatcagtctctcatcagtaaccaagctgtactgtggtaaattatgaagaaggtagatgcgactggtccaatgggcccactgttttgtatattcacacaaggaggcatctttgaaacactatacctatctctttctctaaaaaaaaaaaaaaaaaaaaaaaaaaaacctttccaataaatgttcattctgagtacattaatttttagtgagaaaaagaaacaatcatagagaccccactagagaacctagtgtctgctcagcaaacccatattgagctgtagagcatactttaacagccatctcaaccagctcacccaacgtgtaaattcccttcccatttgggcatagaagttgacagcctagagtgtcaggacggccgagtggtctgaggctccagactcaaggtgagaagctgaaaacctacttgagccaaacaatttggagtgctttatatggttcctttctcaagacccacacaggataaaattttgttgatttactaaagtaatttggatttgaggcagtcttatctctgaaaggatatgcacagcatgtaataaggtgggtgctgttttcataaagagaatcaatctgagaggcatacttttaaaaaaaaaactatcattggagaggttagcaaaggcttaaaagtgaactttgagtctgcaatagtcaatagtattctgattttattggcagtttctgaatgctacaatttcgtgtttttttttaaaaaaatgggctaacagtgcgatgacagtcatgtacaaggagtccaattaaatcatagtaagggtgaagattatttgtgatttatttttatatgagagataaattagtaaggagaaaagatctctttttatgaagtggatatctggctctcaaacccattccttttggctcagacattaaaaaattattaattcccttatggactctcctattccccatgggcggaaaattctgaaaagcagatgagacattctgagccccttgcaagacaaacacagatggtttctaatttagagttttcccacacaaatgcacaaccaatcttggaaatatgacctcaattcccaggattaaaaacgttgaaattatatgttactttccaatataaatagaggatgaagatctttaaagacaactcagaaaatatgatccaataacattcaaatcagagcgtaatctacaatttcacttaatagttaaaagtgaagattagctgcttctttaaaaggggtgagttattaaaggcaacatcctagaaaatgtaataacaagaaggcaacaccatattttcagcaaagttatggtactgataaagcactttgaaaatcctctgtaggaaaatgtcattgagaaacaaaggccaatttgtctccagtgataaagctatctctcattcatatttcataggtggatctatagttttcctggtgtcttggagagaccctacctccacagctcctgcaggagcaaaaccatgttttctgccatgtgagctctctacactggccacagctgattgtaccaaggttcagtacccgacccaaagagactcattttcaggccagagggcggcctaaggaatgaaagtgtacctagcagtggtattcttgtttgatggtacctggccccaccaatcacggccctcttttagggagtttgaacaccagaaagtaaatgatgaataggaagcacagccagaatagacacagtcaccgtaatggtgactctgagaacagtgacagcagttacttctgcagtcaagacaatttgaggtcttgttgattcaccattctgctcttagcttactggagaaatacttgactcctgaacaatgagtctggactttgtagttcctgggttgctttttttttttcttcctttcttatgtattgacataaataaactcacattaactgaa

SEQ ID NO: 165864 - DNA, 2560 bp, Homo sapiens
  Payload ID: 12651
  Gene Symbol: PLD6
  Gene Name: phospholipase D family, member 6
  Uniprot ID: Q8N2A8
  ENST ID: ENST00000321560
  CDS Start-End: 30-788
gtggctgtgggtcccggattagcggcggcatgggacggttgagttggcaggtggcggccgcggcggctgtgggcctggctctgactctggaggcgctgccttgggtgctgcgctggctgcggtccaggcggcggcggccgcggcgcgaggcgctgttcttcccgtctcaggtgacctgtaccgaggccctgctgcgggctccgggcgcggagctggccgagctccccgagggctgcccgtgcggcctgccccacggcgagagcgcgctaagccgcctgctgcgtgccctgctggccgcccgcgccagcctggatctctgcctgttcgccttctccagcccgcagctgggccgcgccgtgcagttgctgcaccagcgtggggtgcgagtgcgggtcgtcaccgactgcgactacatggccctcaacggctcgcaaatcggtctgctgcgcaaggcagggatccaggtccggcacgatcaagacccaggctacatgcatcacaagtttgccatcgtggacaagagggtgctcatcactggctcgctcaactggaccacgcaagccatccagaacaacagggagaatgttctcatcacggaggacgacgagtacgtgcggctttttctggaagaatttgagcgcatctgggaacagtttaaccctacaaagtatacctttttcccaccaaagaaaagtcacggaagctgtgccccacctgtctccagagctggagggagattgctttcatggcacagaacttgcggcacctccagcgaaagccaaacctaaccaagaatggggctgagccctccctgcgggctgctgtgcgttctgagggagggagacctcggcactagaaaaaaatcgttaaactaaagtctcgtctattagaatactaaattgaactaaagaaggttaggaaagggaaatttctgttacttcgggtcagttatttcgggccagacctttttcttgctcctttgccaaaataacttcagtcacgacctgccacggggtgctttcatgagtgtggtccgtatcttggtttggaatcgaaacttctgctacagcacagaaaaggcacagtgcctcttccaggtcgatcccattcccttccctgattctagaaaagtccctcctgctttggctgatgtgggccctttcagcatctccctgagatttcatccctctctccatgtggcacgactggggttggttggggcctacagtctccttgtccctcacagtctgcccctgtcagggctcggtcctcagagtaaggaaaggaaatggaagtcaggaggaagggaagatgtgagtgtgcggtgcgggtggcaaaagcagccttcggggcaaccccgtgagcgtcattgccaccaaaggctggctgttcccttgattccttgcataattgctctttaaaaccagtatgcacgccagtgccaagctcttcagcagcctgtccttgggtagtaagtgctgtggtctgtcaggactgatggccagcagctgtttctatgttgggcttttaactttttttattttatttatttatttatttatcttttttgagatggagtctcactctgtggcccaggctggagtgcagtggcacaacctcggctcactgcatcctctgcctcctgggttcaaacgattgtcctgcctcagcctcccgagtagctgggattacaggtgcctgccacaacacctggctgattttttttttggtatttttagtagagacagggtttcaccatgttggttaggctggtctcaaactcctgacctcaagtgatccaccacttccgcctcccaaagtgctgggattacaggtgtgagccgccatgcccggccgggcttttaacttttaatgtcctaatgttaaggtaattttgttgtgtgtttagaagtgaccttacctttaacacctgtggagttagtgcgtgcacattgctggctcagcgtaacccatcacgggaccggaggagaggagagcggggaagaggagagcagcttcaggccgtggtgtctcccacgtctgtgttcttatttgcagctcagggtttgcattcccaggtagaacaggtgtcgtacactgtgaaatgttccaggttatttgtttataatgtgtgtgtcatatacagatagctccgatgacatctgaagttgtgacttcatcatcttgtcatatttctgtatgatgagccccagggcccatcctgaggtctgctagccatgtgcttagtctcacctccccagcccacgctggcattaccacccagagacccttcagtgctgtgtgtttttcctttttagggttacttttgactcacagtgttaggcaagccagcttggaagttaacttttaaaaaaattcaattgaagctgtaaagtataatatatagattggaagtcaccagaaattgttttagtttgtgaattcccccagtgtatgttctgaaaagaaaatgggagagcttgtaaagcatctcctaaatgcgaagccgcgtgaccctggacttctggcacatctgaataaacatgttcttattctggaa

SEQ ID NO: 165865 - DNA, 2906 bp, Homo sapiens
  Payload ID: 12652
  Gene Symbol: PLD1
  Gene Name: phospholipase D1, phosphatidylcholine-specific
  ENST ID: ENST00000331659
  CDS Start-End: 1888-2346
ccagcccgcagagcacggtcctgggggtgtgatcacagctgctgaccgcggctcccgccgtgtgatgtgaccactcggaggtggggcgagggggccgggggccagcagcagggagtgtgtaaaaggtcttcttcctcacaatacgattgaaggtgtttgggacgtagggctcagatccaggagtgccgtcctccaagccttccataggattttgtgacgcccttgagaaccgcccttgtagactcagtcctgaactaccgccacgcctgtatttgctcctcctcatctcggattattgctttctttacttcctctgtgaagcactaaatactagtagctttttaagaacagaccacaacagtttcttcgtttgaccattactaagtctgcctccaaaatggggagttccgttaactttatcagccagccctgccaattttagttaagataagccttcgtgggcctccaaaggcctctgagagactaggtacccagagacctctgaggtatgttaaatggtttagttcgtggtggtgcaatgaaaacttaaagaaggaaaggaatctgcaatttgaactgttaacagaccccacatttacacactgcctatttgaataagaatctctttcagtattaaatgttttgtgacacacaaatgaatttgtacacagtcttttagcttgaatttgtagacagcctttaaatgttgtttggggatctttggactaattgtataagcgctcagtctggtctcaaactcatgatctcaggttatccatgcgcctcggcctccgaaaatgctgcgattataggcgtgagccaccactcccagccccttcttgtgatgatgtgagatgataaaatgcctgtgtgaagatgaagtgaggcgaataacctaggcagtgtgacataagtggaaaacgccagaaataaacaattcatgttataaattgtgcaccattctgagtagtgtgatgaaatcttgcactcctccattccatcctgccagcattgccagtcactcggtggccatctctgtgatcagattaacagtggttttatcagtatcatagggcttatgttcaagtaactgtattttacttaataatggctacaaagtgcaaaagtagcgatataatatttttggaccatggttgactgcaggtaactgaaattttagttacatgaaaccacagataaggggggactgcactacacataaaataggcataagtaacctcaagacaatagacattattaaaatatagaaaagtaataaagaagtgataaatggagaacttttgctttaatataatttattgtaagtttatataatttaatttttagtaacttcaatttttaatattttaatttttaatgatttatgtgtttaacaactgactcacaaaattgctgaaaatttcccaatcttgatgaaaatttcccagtctgctctcaggagcctatatgagccagcccagaataccactggagttataattttagaagattaccttggtagcaatctgtagaaatgttttgtaggggagctacagtagggatcaaaagtggagacagattacgaaatgtcttcagaccctgccagcatgagggttcaaatgatgtctagtcagtggagatcacgcaaatttcactggtttgtgttcccacgtggatccgtaggaccttcaatgcaagtctccttcaggtattcctggtggtatcttggcattgtctcacatgtgttttgagagccccacttccttggggagtcttccgctttggcttccttgttgatgaccgtgggccaaagggctttgtgtgtgaggctccacctcagccatagctggtgtcctcctgaagaggatttatgccaaaaggagtcacatgccaggacttgtttttttcaagtttgcaaatctggggggagggtggggctctagaaagatgctggaacctggtatgtgccctgcagaaatgtccttgactccttttgtcaccaggagcctaaatttactgtgtttctctgtgactcacagaggcagggggaaagacaatcctctccacttcttcctgcagctacttgctccatcagcctcagccagtctggggctgggcagggaaacaggccctcttccttctcctggtttgtcccctggtttgctcagcgagaccttcgtgtctgagggcccccttctcaccttgcagatcagctggtgtggtactgaatgcctgatggatggccaggggcccctgatccatctgcattcccagaatataagaatctcatttggggccacccagcccccactactcttagtatatgaaataaggtggaatagataagaggatggaactggcccctgggtgcatgatggggccaataacggaggtacagggtgcatatgtggctgggctgtgagacagggaaagaggatggaattgagatgcaaggtagaaaagcatgactatgttcagtttgggacttgatgaaatagatactggtaggacagttcactaggcactgggccttcaggagaaagagaagaaaggaatggtggcattgggagtagtaaagctgtgggtatgaatgagtatctatgagactcacctccctgtgaggacatagaatgaggagacacagtctacaggtagactaggtcgagttcagaagcctgaagaacaccagtgtttaagggatggtgttgggaaagggagccaggccagccagagaggaatgttccggaactctgaaaggaaggaaatggcaggaacaaaggagctggggcacaacagtggtgactcacactgggaacacttcggcccattgtgtttatgcttatagtttcccaagtttatcttttcagggttatgattacgttaacctcacctccctccctccctct

SEQ ID NO: 165866 - DNA, 5604 bp, Homo sapiens
  Payload ID: 12652
  Gene Symbol: PLD1
  Gene Name: phospholipase D1, phosphatidylcholine-specific
  Uniprot ID: Q13393
  ENST ID: ENST00000351298
  CDS Start-End: 128-3352
ccctccctcccgctgagctccagctgtgccagaggcacccgagccctgagagtccgccgccaacgcgcaggtgctagcggccccttcgccctgcagcccctttgcttttactctgtccaaagttaacatgtcactgaaaaacgagccacgggtaaatacctctgcactgcagaaaattgctgctgacatgagtaatatcatagaaaatctggacacgcgggaactccactttgagggagaggaggtagactacgacgtgtctcccagcgatcccaagatacaagaagtgtatatccctttctctgctatttataacactcaaggatttaaggagcctaatatacagacgtatctctccggctgtccaataaaagcacaagttctggaagtggaacgcttcacatctacaacaagggtaccaagtattaatctttacactattgaattaacacatggggaatttaaatggcaagttaagaggaaattcaagcattttcaagaatttcacagagagctgctcaagtacaaagcctttatccgcatccccattcccactagaagacacacgtttaggaggcaaaacgtcagagaggagcctcgagagatgcccagtttgccccgttcatctgaaaacatgataagagaagaacaattccttggtagaagaaaacaactggaagattacttgacaaagatactaaaaatgcccatgtatagaaactatcatgccacaacagagtttcttgatataagccagctgtctttcatccatgatttgggaccaaagggcatagaaggtatgataatgaaaagatctggaggacacagaataccaggcttgaattgctgtggtcagggaagagcctgctacagatggtcaaaaagatggttaatagtgaaagattcctttttattgtatatgaaaccagacagcggtgccattgccttcgtcctgctggtagacaaagaattcaaaattaaggtggggaagaaggagacagaaacgaaatatggaatccgaattgataatctttcaaggacacttattttaaaatgcaacagctatagacatgctcggtggtggggaggggctatagaagaattcatccagaaacatggcaccaactttctcaaagatcatcgatttgggtcatatgctgctatccaagagaatgctttagctaaatggtatgttaatgccaaaggatattttgaagatgtggcaaatgcaatggaagaggcaaatgaagagatttttatcacagactggtggctgagtccagaaatcttcctgaaacgcccagtggttgagggaaatcgttggaggttggactgcattcttaaacgaaaagcacaacaaggagtgaggatcttcataatgctctacaaagaggtggaactcgctcttggcatcaatagtgaatacaccaagaggactttgatgcgtctacatcccaacataaaggtgatgagacacccggatcatgtgtcatccaccgtctatttgtgggctcaccatgagaagcttgtcatcattgaccaatcggtggcctttgtgggagggattgacctggcctatggaaggtgggacgacaatgagcacagactcacagacgtgggcagtgtgaagcgggtcacttcaggaccgtctctgggttccctcccacctgccgcaatggagtctatggaatccttaagactcaaagataaaaatgagcctgttcaaaacctacccatccagaagagtattgatgatgtggattcaaaactgaaaggaataggaaagccaagaaagttctccaaatttagtctctacaagcagctccacaggcaccacctgcacgacgcagatagcatcagcagcattgacagcacctccagttattttaatcactatagaagtcatcacaatttaatccatggtttaaaaccccacttcaaactctttcacccgtccagtgagtctgagcaaggactcactagacctcatgctgataccgggtccatccgtagtttacagacaggtgtgggagagctgcatggggaaaccagattctggcatggaaaggactactgcaatttcgtcttcaaagactgggttcaacttgataaaccttttgctgatttcattgacaggtactccacgccccggatgccctggcatgacattgcctctgcagtccacgggaaggcggctcgtgatgtggcacgtcacttcatccagcgctggaacttcacaaaaattatgaaatcaaaatatcggtccctttcttatccttttctgcttccaaagtctcaaacaacagcccatgagttgagatatcaagtgcctgggtctgtccatgctaacgtacagttgctccgctctgctgctgattggtctgctggtataaagtaccatgaagagtccatccacgccgcttacgtccatgtgatagagaacagcaggcactatatctatatcgaaaaccagtttttcataagctgtgctgatgacaaagttgtgttcaacaagataggcgatgccattgcccagaggatcctgaaagctcacagggaaaaccagaaataccgggtatatgtcgtgataccacttctgccagggttcgaaggagacatttcaaccggcggaggaaatgctctacaggcaatcatgcacttcaactacagaaccatgtgcagaggagaaaattccatccttggacagttaaaagcagagcttggtaatcagtggataaattacatatcattctgtggtcttagaacacatgcagagctcgaaggaaacctagtaactgagcttatctatgtccacagcaagttgttaattgctgatgataacactgttattattggctctgccaacataaatgaccgcagcatgctgggaaagcgtgacagtgaaatggctgtcattgtgcaagatacagagactgttccttcagtaatggatggaaaagagtaccaagctggccggtttgcccgaggacttcggctacagtgctttagggttgtccttggctatcttgatgacccaagtgaggacattcaggatccagtgagtgacaaattcttcaaggaggtgtgggtttcaacagcagctcgaaatgctacaatttatgacaaggttttccggtgccttcccaatgatgaagtacacaatttaattcagctgagagactttataaacaagcccgtattagctaaggaagatcccattcgagctgaggaggaactgaagaagatccgtggatttttggtgcaattccccttttatttcttgtctgaagaaagcctactgccttctgttgggaccaaagaggccatagtgcccatggaggtttggacttaagagatattcattggcagctcaaagacttccaccctggagaccacactgcacacagtgacttcctggggatgtcatagccaaagccaggcctgacgcattctcgtatccaacccaaggaccttttggaatgactggggagggctgcagtcacattgatgtaaggactgtaaacatcagcaagactttataattccttctgcctaacttgtaaaaagggggctgcattcttgttggtagcatgtactctgttgagtaaaacacatattcaaattccgtataccaaaatccatttcctttgtaacaagaatttaccagtaactgtgatctaggttgccaaaagttgtctgaatctccttattcttctctgatcttcatttatgcagccaatgtctagctggacctgccctcatcttgcagttcatacaggcactgtttgagagattgtttattattagatgttgtaatgctgcttcaagattcttcatggttacatgggatgcccctgctcatctggtcctgaagtagtaacattcacccaaatgaggatatagtcattattccttttcagtcactgtacgaacacggcagactttagcctacacagtagactgtgttaggcacttctggtaacattgacactgtatcttgacaccactaagcaacaggaaggaataaattccaatattgagacagagatttatttcattttgctcccaaaggcactgacaacatgagtccttgtgattaggcccacctgatcaaatgtaaaaacatgcatgggatatttgattacgtaacaaccagctaaaactgagagcacacagccttcggaaacccccaaggtgtcgaggaggatcagatccagataagagaagatgattccttctagtcctgtaaaatttcctgtcatccttagctgctgggttgattgaaatttgatctctacatttcaaaatcaaactagtgaatacagtttgtctttcaagagaatcagaggcatcgtaactcctaccaagttagtaagtatgagtctaaccttgtttgacattcaggtcttctgctacattatcttctttgagaaaaattaattgattataaaatatgtgctacttcacttacattattaaatatgtattaacgcctctcaccagggcttccagtgaagttacaatgccctagtctgtgaattagtctggaaacgtgtttttccttttcggatgttagagtaccctttgataaactaaattttactaagctgaacaactctgacagtctaaagagctaatgtgggttaccaaaaggcctgtacctgtaaaacaaaatgcaggtgtaatgattatacatgtctatggattacctggacatactctcatttgggttgttcttcaaagaagcaagcagccgatccctgttttcataaagctaatacttcagttggaaaaattaaacaggagcacaaagtcagggataggggttagcagaagagagaaatagtgtcacatcaagggcaggatctcatagctagggaacatttcacaaataaggtgagattttgtaaccaataataaaaatgaatgtttttataagtaaataacttatttttcatatggctaaagatggtaaaatgacttcattctatagccattgtaaataagaatttgctattgatgaaagaagttcagattggcatttgaagtattgagtgtatgggatctctaaggatttcttagattttatatttaaatattttttaaaccttagaggagtcaacaaactggctcttgattttcagcaccctactctcatgaaaaaagcctgaaaggaccctttcccttataagtaatttaatccaatttctccccattttatagatgaggaaactgaggctcagatcagatgagaactcacttaaatccactcaatgtgtagatggtagagctgggactagcaacattgctgcagcccattgttggcctctctcttcactttatcattgcccaagaatgaggatatgcagtaaacagaattcaggcaagatacctctaagctgttttgaaccctctgatattttgtatttatgtgtttgtctgtctccccctactagaatgtaagctccatggggcagggacttcactgtattttgttcatagtgtatccccagagcctggaccagtgcttggcacataggagatggcaataaatgcttgtagaattaataaacaaggtgaaggagagagctaatgaaatgaaaa

SEQ ID NO: 165867 - DNA, 5855 bp, Homo sapiens
  Payload ID: 12652
  Gene Symbol: PLD1
  Gene Name: phospholipase D1, phosphatidylcholine-specific
  Uniprot ID: Q13393
  ENST ID: ENST00000356327
  CDS Start-End: 72-3182
ccgccaacgcgcaggtgctagcggccccttcgccctgcagcccctttgcttttactctgtccaaagttaacatgtcactgaaaaacgagccacgggtaaatacctctgcactgcagaaaattgctgctgacatgagtaatatcatagaaaatctggacacgcgggaactccactttgagggagaggaggtagactacgacgtgtctcccagcgatcccaagatacaagaagtgtatatccctttctctgctatttataacactcaaggatttaaggagcctaatatacagacgtatctctccggctgtccaataaaagcacaagttctggaagtggaacgcttcacatctacaacaagggtaccaagtattaatctttacactattgaattaacacatggggaatttaaatggcaagttaagaggaaattcaagcattttcaagaatttcacagagagctgctcaagtacaaagcctttatccgcatccccattcccactagaagacacacgtttaggaggcaaaacgtcagagaggagcctcgagagatgcccagtttgccccgttcatctgaaaacatgataagagaagaacaattccttggtagaagaaaacaactggaagattacttgacaaagatactaaaaatgcccatgtatagaaactatcatgccacaacagagtttcttgatataagccagctgtctttcatccatgatttgggaccaaagggcatagaaggtatgataatgaaaagatctggaggacacagaataccaggcttgaattgctgtggtcagggaagagcctgctacagatggtcaaaaagatggttaatagtgaaagattcctttttattgtatatgaaaccagacagcggtgccattgccttcgtcctgctggtagacaaagaattcaaaattaaggtggggaagaaggagacagaaacgaaatatggaatccgaattgataatctttcaaggacacttattttaaaatgcaacagctatagacatgctcggtggtggggaggggctatagaagaattcatccagaaacatggcaccaactttctcaaagatcatcgatttgggtcatatgctgctatccaagagaatgctttagctaaatggtatgttaatgccaaaggatattttgaagatgtggcaaatgcaatggaagaggcaaatgaagagatttttatcacagactggtggctgagtccagaaatcttcctgaaacgcccagtggttgagggaaatcgttggaggttggactgcattcttaaacgaaaagcacaacaaggagtgaggatcttcataatgctctacaaagaggtggaactcgctcttggcatcaatagtgaatacaccaagaggactttgatgcgtctacatcccaacataaaggtgatgagacacccggatcatgtgtcatccaccgtctatttgtgggctcaccatgagaagcttgtcatcattgaccaatcggtggcctttgtgggagggattgacctggcctatggaaggtgggacgacaatgagcacagactcacagacgtgggcagtgtgaagcgggtcacttcaggaccgtctctgggttccctcccacctgccgcaatggagtctatggaatccttaagactcaaagataaaaatgagcctgttcaaaacctacccatccagaagagtattgatgatgtggattcaaaactgaaaggaataggaaagccaagaaagttctccaaatttagtctctacaagcagctccacaggcaccacctgcacgacgcagatagcatcagcagcattgacagcacctccaataccgggtccatccgtagtttacagacaggtgtgggagagctgcatggggaaaccagattctggcatggaaaggactactgcaatttcgtcttcaaagactgggttcaacttgataaaccttttgctgatttcattgacaggtactccacgccccggatgccctggcatgacattgcctctgcagtccacgggaaggcggctcgtgatgtggcacgtcacttcatccagcgctggaacttcacaaaaattatgaaatcaaaatatcggtccctttcttatccttttctgcttccaaagtctcaaacaacagcccatgagttgagatatcaagtgcctgggtctgtccatgctaacgtacagttgctccgctctgctgctgattggtctgctggtataaagtaccatgaagagtccatccacgccgcttacgtccatgtgatagagaacagcaggcactatatctatatcgaaaaccagtttttcataagctgtgctgatgacaaagttgtgttcaacaagataggcgatgccattgcccagaggatcctgaaagctcacagggaaaaccagaaataccgggtatatgtcgtgataccacttctgccagggttcgaaggagacatttcaaccggcggaggaaatgctctacaggcaatcatgcacttcaactacagaaccatgtgcagaggagaaaattccatccttggacagttaaaagcagagcttggtaatcagtggataaattacatatcattctgtggtcttagaacacatgcagagctcgaaggaaacctagtaactgagcttatctatgtccacagcaagttgttaattgctgatgataacactgttattattggctctgccaacataaatgaccgcagcatgctgggaaagcgtgacagtgaaatggctgtcattgtgcaagatacagagactgttccttcagtaatggatggaaaagagtaccaagctggccggtttgcccgaggacttcggctacagtgctttagggttgtccttggctatcttgatgacccaagtgaggacattcaggatccagtgagtgacaaattcttcaaggaggtgtgggtttcaacagcagctcgaaatgctacaatttatgacaaggttttccggtgccttcccaatgatgaagtacacaatttaattcagctgagagactttataaacaagcccgtattagctaaggaagatcccattcgagctgaggaggaactgaagaagatccgtggatttttggtgcaattccccttttatttcttgtctgaagaaagcctactgccttctgttgggaccaaagaggccatagtgcccatggaggtttggacttaagagatattcattggcagctcaaagacttccaccctggagaccacactgcacacagtgacttcctggggatgtcatagccaaagccaggcctgacgcattctcgtatccaacccaaggaccttttggaatgactggggagggctgcagtcacattgatgtaaggactgtaaacatcagcaagactttataattccttctgcctaacttgtaaaaagggggctgcattcttgttggtagcatgtactctgttgagtaaaacacatattcaaattccgtataccaaaatccatttcctttgtaacaagaatttaccagtaactgtgatctaggttgccaaaagttgtctgaatctccttattcttctctgatcttcatttatgcagccaatgtctagctggacctgccctcatcttgcagttcatacaggcactgtttgagagattgtttattattagatgttgtaatgctgcttcaagattcttcatggttacatgggatgcccctgctcatctggtcctgaagtagtaacattcacccaaatgaggatatagtcattattccttttcagtcactgtacgaacacggcagactttagcctacacagtagactgtgttaggcacttctggtaacattgacactgtatcttgacaccactaagcaacaggaaggaataaattccaatattgagacagagatttatttcattttgctcccaaaggcactgacaacatgagtccttgtgattaggcccacctgatcaaatgtaaaaacatgcatgggatatttgattacgtaacaaccagctaaaactgagagcacacagccttcggaaacccccaaggtgtcgaggaggatcagatccagataagagaagatgattccttctagtcctgtaaaatttcctgtcatccttagctgctgggttgattgaaatttgatctctacatttcaaaatcaaactagtgaatacagtttgtctttcaagagaatcagaggcatcgtaactcctaccaagttagtaagtatgagtctaaccttgtttgacattcaggtcttctgctacattatcttctttgagaaaaattaattgattataaaatatgtgctacttcacttacattattaaatatgtattaacgcctctcaccagggcttccagtgaagttacaatgccctagtctgtgaattagtctggaaacgtgtttttccttttcggatgttagagtaccctttgataaactaaattttactaagctgaacaactctgacagtctaaagagctaatgtgggttaccaaaaggcctgtacctgtaaaacaaaatgcaggtgtaatgattatacatgtctatggattacctggacatactctcatttgggttgttcttcaaagaagcaagcagccgatccctgttttcataaagctaatacttcagttggaaaaattaaacaggagcacaaagtcagggataggggttagcagaagagagaaatagtgtcacatcaagggcaggatctcatagctagggaacatttcacaaataaggtgagattttgtaaccaataataaaaatgaatgtttttataagtaaataacttatttttcatatggctaaagatggtaaaatgacttcattctatagccattgtaaataagaatttgctattgatgaaagaagttcagattggcatttgaagtattgagtgtatgggatctctaaggatttcttagattttatatttaaatattttttaaaccttagaggagtcaacaaactggctcttgattttcagcaccctactctcatgaaaaaagcctgaaaggaccctttcccttataagtaatttaatccaatttctccccattttatagatgaggaaactgaggctcagatcagatgagaactcacttaaatccactcaatgtgtagatggtagagctgggactagcaacattgctgcagcccattgttggcctctctcttcactttatcattgcccaagaatgaggatatgcagtaaacagaattcaggcaagatacctctaagctgttttgaaccctctgatattttgtatttatgtgtttgtctgtctccccctactagaatgtaagctccatggggcagggacttcactgtattttgttcatagtgtatccccagagcctggaccagtgcttggcacataggagatggcaataaatgcttgtagaattaataaacaaggtgaaggagagagctaatgaaatgaaaatcttagtctcatataagaagtcttactactgctttctatggcaagttccttttctattgcatcttcccaaagacaagatgctcatctgcaaaggggtgataagatttacttggagggattttatggaaaattcagtgcaataattgcttttttttttttttttgcagtagcagtttacatagtacagcattctgcaaaaattgcatgaaatgtggacacaagatgtactgtatgacttaattacctgtcattctctgacaccattactacctactagaagttcaaataatttatctttaacattgcaatatctgataaactttttaaaatgtaaataattcaaagccttgaaaatctatcatgaatctgctcaacatttcaaagtgactattttgaaatgcctataaatgctatatacctg

SEQ ID NO: 165868 - DNA, 646 bp, Homo sapiens
  Payload ID: 12652
  Gene Symbol: PLD1
  Gene Name: phospholipase D1, phosphatidylcholine-specific
  ENST ID: ENST00000440204
  CDS Start-End: 96-269
aggcacccgagccctgagagtccgccgccaacgcgcaggtgctagcggccccttcgccctgcagcccctttgcttttactctgtccaaagttaacatgtcactgaaaaacgagccacgggtaaatacctctgcactgcagaaaattgctgctgacatgagtaatatcatagaaaatctggacacgcgggaactccactttgagggagaggaggtagactacgacgtgtctcccagcgatcccaagatacaagaaggtaccaagtattaatctttacactattgaattaacacatggggaatttaaatggcaagttaagaggaaattcaagcattttcaagaatttcacagagagctgctcaagtacaaagcctttatccgcatccccattcccactagaagacacacgtttaggaggcaaaacgtcagagaggagcctcgagagatgcccagtttgccccgttcatctgaaaacatgataagagaagaacaattccttggtagaagaaaacaactggaagattacttgacaaagatactaaaaatgcccatgtatagaaactatcatgccacaacagagtttcttgatataagccagctgtctttcatccatgatttgggaccaaagggcatgtaagttgcaataa

SEQ ID NO: 165869 - DNA, 839 bp, Homo sapiens
  Payload ID: 12652
  Gene Symbol: PLD1
  Gene Name: phospholipase D1, phosphatidylcholine-specific
  ENST ID: ENST00000446289
  CDS Start-End: 1-704
tccatgctaacgtacagttgctccgctctgctgctgattggtctgctggtataaagtaccatgaagagtccatccacgccgcttacgtccatgtgatagagaacagcaggcactatatctatatcgaaaaccagtttttcataagctgtgctgatgacaaagttgtgttcaacaagataggcgatgccattgcccagaggatcctgaaagctcacagggaaaaccagaaataccgggtatatgtcgtgataccacttctgccagggttcgaaggagacatttcaaccggcggaggaaatgctctacaggcaatcatgcacttcaactacagaaccatgtgcagaggagaaaattccatccttggacagttaaaagcagagcttggtaatcagtggataaattacatatcattctgtggtcttagaacacatgcagagctcgaaggaaacctagtaactgagcttatctatgtccacagcaagttgttaattgctgatgataacactgttattattggctctgccaacataaatgaccgcagcatgctgggaaagcgtgacagtgaaatggctgtcattgtgcaagatacagagactgttccttcagtaatggatggaaaagagtaccaagctggccggtttgcccgaggacttcggctacagtgctttaggtctaaaatgactccaggtgtcgaagatccctgatctttggcaagaagatgcaaattttaaactaatctgtggtgaagcagagagaatactgggctaggaagctgggctcgtttcagctgtgcgatcctaaataagtccattcaataaagtgttatttagaactttcaa

SEQ ID NO: 165870 - DNA, 621 bp, Homo sapiens
  Payload ID: 12652
  Gene Symbol: PLD1
  Gene Name: phospholipase D1, phosphatidylcholine-specific
  ENST ID: ENST00000418087
  CDS Start-End: 197-621
agccaaaactgggcttgggaacaggaaggctttgcccgtttatttggattctcagggtagtcgattttgccacctcttggctatcagctgccttggagattggtttcatagtaaggattctttctttaaggtgatatggagcaactgctttcacaggggcaccagcccctttgcttttactctgtccaaagttaacatgtcactgaaaaacgagccacgggtaaatacctctgcactgcagaaaattgctgctgacatgagtaatatcatagaaaatctggacacgcgggaactccactttgagggagaggaggtagactacgacgtgtctcccagcgatcccaagatacaagaagtgtatatccctttctctgctatttataacactcaaggatttaaggagcctaatatacagacgtatctctccggctgtccaataaaagcacaagttctggaagtggaacgcttcacatctacaacaagggtaccaagtattaatctttacactattgaattaacacatggggaatttaaatggcaagttaagaggaaattcaagcattttcaagaatttcacagagagctgctcaagtacaaagcctttatccgcatccccattcc

SEQ ID NO: 165871 - DNA, 174 bp, Homo sapiens
  Payload ID: 12652
  Gene Symbol: PLD1
  Gene Name: phospholipase D1, phosphatidylcholine-specific
  ENST ID: ENST00000627725
  CDS Start-End: 1-174
atgtcactgaaaaacgagccacgggtaaatacctctgcactgcagaaaattgctgctgacatgagtaatatcatagaaaatctggacacgcgggaactccactttgagggagaggaggtagactacgacgtgtctcccagcgatcccaagatacaagaaggtaccaagtattaa

SEQ ID NO: 165872 - DNA, 3503 bp, Homo sapiens
  Payload ID: 12653
  Gene Symbol: PLD2
  Gene Name: phospholipase D2
  Uniprot ID: O14939
  ENST ID: ENST00000263088
  CDS Start-End: 132-2933
cgagggcaggccctgagccccggccccgcctcggccggccccgcctcggccggggcgtgggctccggctgcagctccggtctgctctcttggctccggaacccccgcgggcgctggctccgtctgccagggatgacggcgacccctgagagcctcttccccactggggacgaactggactccagccagctccagatggagtccgatgaggtggacaccctgaaggagggagaggacccagccgaccggatgcacccgtttctggccatctatgagcttcagtctctgaaagtgcaccccttggtgttcgcacctggggtccctgtcacagcccaggtggtgggcaccgaaagatataccagcggatccaaggtgggaacctgcactctgtattctgtccgcttgactcacggcgacttttcctggacaaccaagaagaaataccgtcattttcaggagctgcatcgggacctcctgagacacaaagtcttgatgagtctgctccctctggctcgatttgccgttgcctattctccagcccgagatgcaggcaacagagagatgccctctctaccccgggcaggtcctgagggctccaccagacatgcagccagcaaacagaaatacctggagaattacctcaaccgtctcttgaccatgtctttctatcgcaactaccatgccatgacagagttcctggaagtcagtcagctgtcctttatcccggacttgggccgcaaaggactggaggggatgatccggaagcgctcaggtggccaccgtgttcctggcctcacctgctgtggccgagaccaagtttgttatcgctggtccaagaggtggctggtggtgaaggactccttcctgctgtacatgtgcctcgagacaggtgccatctcatttgttcagctctttgaccctggctttgaggtgcaagtggggaaaaggagcacggaggcacggcacggcgtgcggatcgatacctcccacaggtccttgattctcaagtgcagcagctaccggcaggcacggtggtgggcccaagagatcactgagctggcacagggcccaggcagagacttcctacagctgcaccggcatgacagctacgccccaccccggcctgggaccttggcccggtggtttgtgaatggggcaggttactttgctgctgtggcagatgccatccttcgagctcaagaggagattttcatcacagactggtggttgagtcctgaggtttacctgaagcgtccggcccattcagatgactggagactggacattatgctcaagaggaaggcggaggagggtgtccgtgtgtctattctgctgtttaaagaagtggaattggccttgggcatcaacagtggctatagcaagagggcgctgatgctgctgcaccccaacataaaggtgatgcgtcacccagaccaagtgacgttgtgggcccatcatgagaagctcctggtggtggaccaagtggtagcattcctggggggactggaccttgcctatggccgctgggatgacctgcactaccgactgactgaccttggagactcctctgaatcagctgcctcccagcctcccaccccgcgcccagactcaccagccaccccagacctctctcacaaccaattcttctggctgggcaaggactacagcaatcttatcaccaaggactgggtgcagctggaccggcctttcgaagatttcattgacagggagacgacccctcggatgccatggcgggacgttggggtggtcgtccatggcctaccggcccgggaccttgcccggcacttcatccagcgctggaacttcaccaagaccaccaaggccaagtacaagactcccacatacccctacctgcttcccaagtctaccagcacggccaatcagctccccttcacacttccaggagggcagtgcaccaccgtacaggtcttgcgatcagtggaccgctggtcagcagggactctggagaactccatcctcaatgcctacctgcacaccatcagggagagccagcacttcctctacattgagaatcagttcttcattagctgctcagatgggcggacggttctgaacaaggtgggcgatgagattgtggacagaatcctgaaggcccacaaacaggggtggtgttaccgagtctacgtgcttttgcccttactccctggcttcgagggtgacatctccacgggcggtggcaactccatccaggccattctgcactttacttacaggaccctgtgtcgtggggagtattcaatcctgcatcgccttaaagcagccatggggacagcatggcgggactatatttccatctgcgggcttcgtacacacggagagctgggcgggcaccccgtctcggagctcatctacatccacagcaaggtgctcatcgcagatgaccggacagtcatcattggttctgcaaacatcaatgaccggagcttgctggggaagcgggacagtgagctggccgtgctgatcgaggacacagagacggaaccatccctcatgaatggggcagagtatcaggcgggcaggtttgccttgagtctgcggaagcactgcttcggtgtgattcttggagcaaatacccggccagacttggatctccgagaccccatctgtgatgacttcttccagttgtggcaagacatggctgagagcaacgccaatatctatgagcagatcttccgctgcctgccatccaatgccacgcgttccctgcggactctccgggagtacgtggccgtggagcccttggccacggtcagtccccccttggctcggtctgagctcacccaggtccagggccacctggtccacttccccctcaagttcctagaggatgagtctttgctgcccccgctgggtagcaaggagggcatgatccccctagaagtgtggacatagttgaggcccccgtcagggagaggtcaccagctgctgtgccccaccacgtctggctccctgccccttaaccccaaggactgagggcagtgccctttgagatctggggaggcaggcattcctgaagggaactagaggtgttacagaggacccttacgtgagaaatagctgaaaagggcactcccaaccctgggctggggaggaggagagagtcccagagctcatcccccctgctgcccagtgcaaaccacttctccatgctgcaaaggagaagcacagctcctgccagggtgagcagggtcaagcctcttattccaggagaagggggctctgccccaggccctactacccattgttcccttcctcttcctgcccttgaaccccctccctgtcccagggccctcccagcccattgctgccaaggtggagggaaggataaagccacttctggcttcagcccccaccaggggaaggaaggagggcacattaactccctccaccagcctgctgacagacactaactttgtatccgttcaataagcatttcataaataaaggtgtagaaaaggttca

SEQ ID NO: 165873 - DNA, 544 bp, Homo sapiens
  Payload ID: 12653
  Gene Symbol: PLD2
  Gene Name: phospholipase D2
  ENST ID: ENST00000575316
  CDS Start-End: 28-544
actgggattgtggatgaaggactaaggatgacggcgacccctgagagcctcttccccactggggacgaactggactccagccagctccagatggagtccgatgaggtggacaccctgaaggagggagaggacccagccgaccggatgcacccgtttctggccatctatgagcttcagtctctgaaagtgcaccccttggtgttcgcacctggggtccctgtcacagcccaggtggtgggcaccgaaagatataccagcggatccaaggtgggaacctgcactctgtattctgtccgcttgactcacggcgacttttcctggacaaccaagaagaaataccgtcattttcaggagctgcatcgggacctcctgagacacaaagtcttgatgagtctgctccctctggctcgatttgccgttgcctattctccagcccgagatgcaggcaacagagagatgccctctctaccccgggcaggtcctgagggctccaccagacatgcagccagcaaacagaaatacctggagaattacctcaaccgtc

SEQ ID NO: 165874 - DNA, 2278 bp, Homo sapiens
  Payload ID: 12653
  Gene Symbol: PLD2
  Gene Name: phospholipase D2
  ENST ID: ENST00000575246
  CDS Start-End: 45-431
cttggctccggaacccccgcgggcgctggctccgtctgccagggatgacggcgacccctgagagcctcttccccactggggacgaactggactccagccagctccagatggagtccgatgaggtggacaccctgaaggagggagaggacccagccgaccggatgcacccgtttctggccatctatgagcttcagtctctgaaagtgcaccccttggtgttcgcacctggggtccctgtcacagcccaggtggtgggcaccgaaagatataccagcggatccaaggtgggaacctgcactctgtattctgtccgcttgactcacggcgacttttcctggacaaccaagaagaaataccgtcattttcaggagctgcatcgggacctcctgagacacaaagtcttgatgagtctgctccctctggctcggtgagggcgaccggactgcttcctgtagagggcagatttgccgttgcctattctccagcccgagatgcaggcaacagagagatgccctctctaccccgggcaggtcctgagggctccaccagacatgcagccagcaaacagaaatacctggagaattacctcaaccgtctcttgaccatgtctttctatcgcaactaccatgccatgacagagttcctggaagtcagtcagctgtcctttatcccggacttgggccgcaaaggactggaggggatgatccggaagcgctcaggtggccaccgtgttcctggcctcacctgctgtggccgagaccaagtttgttatcgctggtccaagaggtggctggtggtgaaggactccttcctgctgtacatgtgcctcgagacaggtgccatctcatttgttcagctctttgaccctggctttgaggtgcaagtggggaaaaggagcacggaggcacggcacggcgtgcggatcgatacctcccacaggtccttgattctcaagtgcagcagctaccggcaggcacggtggtgggcccaagagatcactgagctggcacagggcccaggcagagacttcctacagctgcaccggcatgacagctacgccccaccccggcctgggaccttggcccggtggtttgtgaatggggcaggttactttgctgctgtggcagatgccatccttcgagctcaagaggagattttcatcacagactggtggttgagtcctgaggtttacctgaagcgtccggcccattcagatgactggagactggacattatgctcaagaggaaggcggaggagggtgtccgtgtgtctattctgctgtttaaagaagtggaattggccttgggcatcaacagtggctatagcaagagggcgctgatgctgctgcaccccaacataaaggtgatgcgtcacccagaccaagtgacgttgtgggcccatcatgagaagctcctggtggtggaccaagtggtagcattcctggggggactggaccttgcctatggccgctgggatgacctgcactaccgactgactgaccttggagactcctctgaatcagctgcctcccagcctcccaccccgcgcccagactcaccagccaccccagacctctctcacaaccaattcttctggctgggcaaggactacagcaatcttatcaccaaggactgggtgcagctggaccggcctttcgaagatttcattgacagggagacgacccctcggatgccatggcgggacgttggggtggtcgtccatggcctaccggcccgggaccttgcccggcacttcatccagcgctggaacttcaccaagaccaccaaggccaagtacaagactcccacatacccctacctgcttcccaagtctaccagcacggccaatcagctccccttcacacttccaggagggcagtgcaccaccgtacaggtcttgcgatcagtggaccgctggtcagcagggactctggagaactccatcctcaatgcctacctgcacaccatcagggagagccagcacttcctctacattgaggtctgactgggaggaggtgggggagagcatggaaggggtgtcccaggagagagacctggggaatgagtggagtcagtcattgagggctggtggagcagaagcagacgcctggagcctgggaccaaggctggaggccgaggacagggccaggggccaggctgctgatgtctgtctctgattcttgccccagaatcagttcttcattagctgctcagatgggcggacggttctgaacaaggtgggcgatgagattgtggacagaatcctgaaggcccacaa

SEQ ID NO: 165875 - DNA, 3391 bp, Homo sapiens
  Payload ID: 12653
  Gene Symbol: PLD2
  Gene Name: phospholipase D2
  Uniprot ID: O14939
  ENST ID: ENST00000572940
  CDS Start-End: 59-2827
ctccggtctgctctcttggctccggaacccccgcgggcgctggctccgtctgccagggatgacggcgacccctgagagcctcttccccactggggacgaactggactccagccagctccagatggagtccgatgaggtggacaccctgaaggagggagaggacccagccgaccggatgcacccgtttctggccatctatgagcttcagtctctgaaagtgcaccccttggtgttcgcacctggggtccctgtcacagcccaggtggtgggcaccgaaagatataccagcggatccaaggtgggaacctgcactctgtattctgtccgcttgactcacggcgacttttcctggacaaccaagaagaaataccgtcattttcaggagctgcatcgggacctcctgagacacaaagtcttgatgagtctgctccctctggctcgatttgccgttgcctattctccagcccgagatgcaggcaacagagagatgccctctctaccccgggcaggtcctgagggctccaccagacatgcagccagcaaacagaaatacctggagaattacctcaaccgtctcttgaccatgtctttctatcgcaactaccatgccatgacagagttcctggaagtcagtcagctgtcctttatcccggacttgggccgcaaaggactggaggggatgatccggaagcgctcaggtggccaccgtgttcctggcctcacctgctgtggccgagaccaagtttgttatcgctggtccaagaggtggctggtggtgaaggactccttcctgctgtacatgtgcctcgagacaggtgccatctcatttgttcagctctttgaccctggctttgaggtgcaagtggggaaaaggagcacggaggcacggcacggcgtgcggatcgatacctcccacaggtccttgattctcaagtgcagcagctaccggcaggcacggtggtgggcccaagagatcactgagctggcacagggcccaggcagagacttcctacagctgcaccggcatgacagctacgccccaccccggcctgggaccttggcccggtggtttgtgaatggggcaggttactttgctgctgtggcagatgccatccttcgagctcaagaggagattttcatcacagactggtggttgagtcctgaggtttacctgaagcgtccggcccattcagatgactggagactggacattatgctcaagaggaaggcggaggagggtgtccgtgtgtctattctgctgtttaaagaagtggaattggccttgggcatcaacagtggctatagcaagagggcgctgatgctgctgcaccccaacataaaggtgatgcgtcacccagaccaagtgacgttgtgggcccatcatgagaagctcctggtggtggaccaagtggtagcattcctggggggactggaccttgcctatggccgctgggatgacctgcactaccgactgactgaccttggagactcctctgaatcagctgcctcccagcctcccaccccgcgcccagactcaccagccaccccagacctctctcacaaccaattcttctggctgggcaaggactacagcaatcttatcaccaaggactgggtgcagctggaccggcctttcgaagatttcattgacagggagacgacccctcggatgccatggcgggacgttggggtggtcgtccatggcctaccggcccgggaccttgcccggcacttcatccagcgctggaacttcaccaagaccaccaaggccaagtacaagactcccacatacccctacctgcttcccaagtctaccagcacggccaatcagctccccttcacacttccaggagggcagtgcaccaccgtacaggtcttgcgatcagtggaccgctggtcagcagggactctggagaactccatcctcaatgcctacctgcacaccatcagggagagccagcacttcctctacattgagaatcagttcttcattagctgctcagatgggcggacggttctgaacaaggtgggcgatgagattgtggacagaatcctgaaggcccacaaacaggggtggtgttaccgagtctacgtgcttttgcccttactccctggcttcgagggtgacatctccacgggcggtggcaactccatccaggccattctgcactttacttacaggaccctgtgtcgtggggagtattcaatcctgcatcgccttaaagcagccatggggacagcatggcgggactatatttccatctgcgggcttcgtacacacggagagctgggcgggcaccccgtctcggagctcatctacatccacagcaaggtgctcatcgcagatgaccggacagtcatcattggttctgcaaacatcaatgaccggagcttgctggggaagcgggacagtgagctggccgtgctgatcgaggacacagagacggaaccatccctcatgaatggggcagagtatcaggcgggcagtgtgattcttggagcaaatacccggccagacttggatctccgagaccccatctgtgatgacttcttccagttgtggcaagacatggctgagagcaacgccaatatctatgagcagatcttccgctgcctgccatccaatgccacgcgttccctgcggactctccgggagtacgtggccgtggagcccttggccacggtcagtccccccttggctcggtctgagctcacccaggtccagggccacctggtccacttccccctcaagttcctagaggatgagtctttgctgcccccgctgggtagcaaggagggcatgatccccctagaagtgtggacatagttgaggcccccgtcagggagaggtcaccagctgctgtgccccaccacgtctggctccctgccccttaaccccaaggactgagggcagtgccctttgagatctggggaggcaggcattcctgaagggaactagaggtgttacagaggacccttacgtgagaaatagctgaaaagggcactcccaaccctgggctggggaggaggagagagtcccagagctcatcccccctgctgcccagtgcaaaccacttctccatgctgcaaaggagaagcacagctcctgccagggtgagcagggtcaagcctcttattccaggagaagggggctctgccccaggccctactacccattgttcccttcctcttcctgcccttgaaccccctccctgtcccagggccctcccagcccattgctgccaaggtggagggaaggataaagccacttctggcttcagcccccaccaggggaaggaaggagggcacattaactccctccaccagcctgctgacagacactaactttgtatccgttcaataagcatttcataaataaaggtgtagaaaa

SEQ ID NO: 165876 - DNA, 589 bp, Homo sapiens
  Payload ID: 12653
  Gene Symbol: PLD2
  Gene Name: phospholipase D2
  ENST ID: ENST00000576983
  CDS Start-End: 1-589
accaccaaggccaagtacaagactcccacatacccctacctgcttcccaagtctaccagcacggccaatcagctccccttcacacttccaggagggcagtgcaccaccgtacagaatcagttcttcattagctgctcagatgggcggacggttctgaacaaggtgggcgatgagattgtggacagaatcctgaaggcccacaaacaggggtggtgttaccgagtctacgtgcttttgcccttactccctggcttcgagggtgacatctccacgggcggtggcaactccatccaggccattctgcactttacttacaggaccctgtgtcgtggggagtattcaatcctgcatcgccttaaagcagccatggggacagcatggcgggactatatttccatctgcgggcttcgtacacacggagagctgggcgggcaccccgtctcggagctcatctacatccacagcaaggtgctcatcgcagatgaccggacagtcatcattggttctgcaaacatcaatgaccggagcttgctggggaagcgggacagtgagctggccgtgctgatcgaggacacagagacggaaccat

SEQ ID NO: 165877 - DNA, 726 bp, Homo sapiens
  Payload ID: 12653
  Gene Symbol: PLD2
  Gene Name: phospholipase D2
  ENST ID: ENST00000576864
  CDS Start-End: 1-592
gcactttacttacaggaccctgtgtcgtggggagtattcaatcctgcatcgccttaaagcagccatggggacagcatggcgggactatatttccatctgcgggcttcgtacacacggagagctgggcgggcaccccgtctcggagctcatctacatccacagcaaggtgctcatcgcagatgaccggacagtcatcattggttctgcaaacatcaatgaccggagcttgctggggaagcgggacagtgagctggccgtgctgatcgaggacacagagacggaaccatccctcatgaatggggcagagtatcaggcgggcaggtttgccttgagtctgcggaagcactgcttcggtgtgattcttggagcaaatacccggccagacttggatctccgagaccccatctgtgatgacttcttccagttgtggcaagacatggctgagagcaacgccaatatctatgagcagatcttccgctgcctgccatccaatgccacgcgttccctgcggactctccgggagtacgtggccgtggagcccttggccacgggccctcccagcccattgctgccaaggtggagggaaggataaagccacttctggcttcagcccccaccaggggaaggaaggagggcacattaactccctccaccagcctgctgacagacactaactttgtatccgttcaataagcatttcataaataaaggtgtagaaaaggttca

SEQ ID NO: 165878 - DNA, 438 bp, Homo sapiens
  Payload ID: 12653
  Gene Symbol: PLD2
  Gene Name: phospholipase D2
  ENST ID: ENST00000575813
  CDS Start-End: 1-146
tgattctcaagtgcagcagctaccggcaggcacggtggtgggcccaagagatcactgagctggcacagggcccaggcagagacttcctacagctgcaccggcatgacagctacgccccaccccggcctgggaccttggcccggtgagctttctggcttctgactcccctgacctccttggcttggcctccccccaggtttgtgaatggggcaggttactttgctgctgtggcagatgccatccttcgagctcaagaggagattttcatcacagactggtggttgagtcctgaggtttacctgaagcgtccggcccattcagatgactggagactggacattatgctcaagaggaaggcggaggagggtgtccgtgtgtctattctgctgtttaaagaagtggaattggccttgggcatcaacagtggctatagcaaga

SEQ ID NO: 165879 - DNA, 1550 bp, Homo sapiens
  Payload ID: 12654
  Gene Symbol: PLPP1
  Gene Name: phospholipid phosphatase 1
  Uniprot ID: O14494
  ENST ID: ENST00000264775
  CDS Start-End: 341-1198
cctgtgggagagagcgccgggatccggacggggagcaaccggggcaggccgtgccggctgaggaggtcctgaggctacagagctgccgcggctggcacacgagcgcctcggcactaaccgagtgttcgcgggggctgtgaggggagggccccgggcgccattgctggcggtgggagcgccgcccggtctcagcccgccctcggctgctctcctcctccggctgggaggggccgtagctcggggccgtcgccagccccggcccgggctcgagaatcaagggcctcggccgccgtcccgcagctcagtccatcgcccttgccgggcagcccgggcagagaccatgtttgacaagacgcggctgccgtacgtggccctcgatgtgctctgcgtgttgctggcttccatgcctatggctgttctaaaattgggccaaatatatccatttcagagaggctttttctgtaaagacaacagcatcaactatccgtaccatgacagtaccgtcacatccactgtcctcatcctagtgggggttggcttgcccatttcctctattattcttggagaaaccctgtctgtttactgtaaccttttgcactcaaattcctttatcaggaataactacatagccactatttacaaagccattggaacctttttatttggtgcagctgctagtcagtccctgactgacattgccaagtattcaataggcagactgcggcctcacttcttggatgtttgtgatccagattggtcaaaaatcaactgcagcgatggttacattgaatactacatatgtcgagggaatgcagaaagagttaaggaaggcaggttgtccttctattcaggccactcttcgttttccatgtactgcatgctgtttgtggcactttatcttcaagccaggatgaagggagactgggcaagactcttacgccccacactgcaatttggtcttgttgccgtatccatttatgtgggcctttctcgagtttctgattataaacaccactggagcgatgtgttgactggactcattcagggagctctggttgcaatattagttgctgtatatgtatcggatttcttcaaagaaagaacttcttttaaagaaagaaaagaggaggactctcatacaactctgcatgaaacaccaacaactgggaatcactatccgagcaatcaccagccttgaaaggcagcagggtgcccaggtgaagctggcctgttttctaaaggaaaatgattgccacaaggcaagaggatgcatctttcttcctggtgtacaagcctttaaagacttctgctgctgctatgcctcttggatgcacactttgtgtgtacatagttacctttaactcagtggttatctaatagctctaaactcattaaaaaaactccaagccttccaccaaaacagtgccccacctgtatacatttttattaaaaaaatgtaatgcttatgtataaacatgtatgtaatatgctttctatgaatgatgtttgatttaaatataatacatattaaaatgtatgggagaaccaaa

SEQ ID NO: 165880 - DNA, 1597 bp, Homo sapiens
  Payload ID: 12654
  Gene Symbol: PLPP1
  Gene Name: phospholipid phosphatase 1
  Uniprot ID: O14494
  ENST ID: ENST00000307259
  CDS Start-End: 422-1276
gctgctcagcgggaggggctggaccccgcgttcctcctccctgccggtccccatccttaaagcgagagtctggacgccccgcctgtgggagagagcgccgggatccggacggggagcaaccggggcaggccgtgccggctgaggaggtcctgaggctacagagctgccgcggctggcacacgagcgcctcggcactaaccgagtgttcgcgggggctgtgaggggagggccccgggcgccattgctggcggtgggagcgccgcccggtctcagcccgccctcggctgctctcctcctccggctgggaggggccgtagctcggggccgtcgccagccccggcccgggctcgagaatcaagggcctcggccgccgtcccgcagctcagtccatcgcccttgccgggcagcccgggcagagaccatgtttgacaagacgcggctgccgtacgtggccctcgatgtgctctgcgtgttgctggctggattgccttttgcaattcttacttcaaggcatacccccttccaacgaggagtattctgtaatgatgagtccatcaagtacccttacaaagaagacaccataccttatgcgttattaggtggaataatcattccattcagtattatcgttattattcttggagaaaccctgtctgtttactgtaaccttttgcactcaaattcctttatcaggaataactacatagccactatttacaaagccattggaacctttttatttggtgcagctgctagtcagtccctgactgacattgccaagtattcaataggcagactgcggcctcacttcttggatgtttgtgatccagattggtcaaaaatcaactgcagcgatggttacattgaatactacatatgtcgagggaatgcagaaagagttaaggaaggcaggttgtccttctattcaggccactcttcgttttccatgtactgcatgctgtttgtggcactttatcttcaagccaggatgaagggagactgggcaagactcttacgccccacactgcaatttggtcttgttgccgtatccatttatgtgggcctttctcgagtttctgattataaacaccactggagcgatgtgttgactggactcattcagggagctctggttgcaatattagttgctgtatatgtatcggatttcttcaaagaaagaacttcttttaaagaaagaaaagaggaggactctcatacaactctgcatgaaacaccaacaactgggaatcactatccgagcaatcaccagccttgaaaggcagcagggtgcccaggtgaagctggcctgttttctaaaggaaaatgattgccacaaggcaagaggatgcatctttcttcctggtgtacaagcctttaaagacttctgctgctgctatgcctcttggatgcacactttgtgtgtacatagttacctttaactcagtggttatctaatagctctaaactcattaaaaaaactccaagccttccaccaaaacagtgccccacctgtatacatttttattaaaaaaatgtaatgcttatgtataaacatgtatgtaatatgctttctatgaatgatgtttgatttaaatat

SEQ ID NO: 165881 - DNA, 971 bp, Homo sapiens
  Payload ID: 12654
  Gene Symbol: PLPP1
  Gene Name: phospholipid phosphatase 1
  ENST ID: ENST00000509667
  CDS Start-End: 323-655
gggatccggacggggagcaaccggggcaggccgtgccggctgaggaggtcctgaggctacagagctgccgcggctggcacacgagcgcctcggcactaaccgagtgttcgcgggggctgtgaggggagggccccgggcgccattgctggcggtgggagcgccgcccggtctcagcccgccctcggctgctctcctcctccggctgggaggggccgtagctcggggccgtcgccagccccggcccgggctcgagaatcaagggcctcggccgccgtcccgcagctcagtccatcgcccttgccgggcagcccgggcagagaccatgtttgacaagacgcggctgccgtacgtggccctcgatgtgctctgcgtgttgctggcttccatgcctatggctgttctaaaattgggccaaatatatccatttcagagaggctttttctgtaaagacaacagcatcaactatccgtaccatgacagtaccgtcacatccactgtcctcatcctagtgggggttggcttgcccatttcctctctggattgccttttgcaattcttacttcaaggcatacccccttccaacgaggagtattctgtaatgatgagtccatcaagtacccttacaaagaagacaccataccttatgcgttattaggtggaataatcattccattcagtattatcgttattattcttggagaaaccctgtctgtttactgtaaccttttgcactcaaattcctttatcaggaataactacatagccactatttacaaagccattggaacctttttatttggtgcagctgctagtcagtccctgactgacattgccaagtattcaataggcagactgcggcctcacttcttggatgtttgtgatccagattggtcaaaaatcaactgcagcgatggttacattgaatactacatatgtcgagggaatgcagaaagagttaaggaaggcaggtt

SEQ ID NO: 165882 - DNA, 1228 bp, Homo sapiens
  Payload ID: 12655
  Gene Symbol: PLPP2
  Gene Name: phospholipid phosphatase 2
  Uniprot ID: O43688
  ENST ID: ENST00000269812
  CDS Start-End: 185-883
ggccgggccgggacgcgacgggacgcgctgggaccggcgtcgggggtcgcggggaccatgcagcggagcctccctgcccttcgctatcctgacgctggtgaacgccccgtacaagcgaggattttactgcggggatgactccatccggtacccctaccgtccagataccatcacccacgggctcatggctggggtcaccatcacggccaccgtcatccttgtctcggccggggaagcctacctggtgtacacagaccggctctattctcgctcggacttcaacaactacgtggctgctgtatacaaggtgctggggaccttcctgtttggggctgccgtgagccagtctctgacagacctggccaagtacatgattgggcgtctgaggcccaacttcctagccgtctgcgaccccgactggagccgggtcaactgctcggtctatgtgcagctggagaaggtgtgcaggggaaaccctgctgatgtcaccgaggccaggttgtctttctactcgggacactcttcctttgggatgtactgcatggtgttcttggcgctgtatgtgcaggcacgactctgttggaagtgggcacggctgctgcgacccacagtccagttcttcctggtggcctttgccctctacgtgggctacacccgcgtgtctgattacaaacaccactggagcgatgtccttgttggcctcctgcagggggcactggtggctgccctcactgtctgctacatctcagacttcttcaaagcccgacccccacagcactgtctgaaggaggaggagctggaacggaagcccagcctgtcactgacgttgaccctgggcgaggctgaccacaaccactatggatacccgcactcctcctcctgaggccggaccccgcccaggcagggagctgctgtgagtccagctgaggcccacccaggtggtccctccagccctggttaggcactgagggctctggacgggctccaggaaccctgggctgatgggagcagtgagcgggctccgctgccccctgccctgcactggaccaggagtctggagatgcctgggtagccctcagcatttggaggggaacctgttcccgtcggtccccaaatatccccttctttttatggggttaaggaagggaccgagagatcagatagttgctgttttgtaaaatgtaatgtatatgtggtttttagtaaaatagggcacctgtttcacaaa

SEQ ID NO: 165883 - DNA, 1397 bp, Homo sapiens
  Payload ID: 12655
  Gene Symbol: PLPP2
  Gene Name: phospholipid phosphatase 2
  Uniprot ID: O43688
  ENST ID: ENST00000327790
  CDS Start-End: 120-1049
ctcgtccctccgaggaccctggaggcggggacctcgcgtgaggaccagacctccctccgcgccccgcactgcgcgcgccctcccaggctcgggggtccccgcgtcccaggcccagggggatgggggtcgcgagaggcccggggagccggggccagcatcccccgccccggcagcaggaagtctgtgcggaggggccgcgcgcgcgcctccatcccgccccgcctggcctgggagcctccctgcccttcgctatcctgacgctggtgaacgccccgtacaagcgaggattttactgcggggatgactccatccggtacccctaccgtccagataccatcacccacgggctcatggctggggtcaccatcacggccaccgtcatccttgtctcggccggggaagcctacctggtgtacacagaccggctctattctcgctcggacttcaacaactacgtggctgctgtatacaaggtgctggggaccttcctgtttggggctgccgtgagccagtctctgacagacctggccaagtacatgattgggcgtctgaggcccaacttcctagccgtctgcgaccccgactggagccgggtcaactgctcggtctatgtgcagctggagaaggtgtgcaggggaaaccctgctgatgtcaccgaggccaggttgtctttctactcgggacactcttcctttgggatgtactgcatggtgttcttggcgctgtatgtgcaggcacgactctgttggaagtgggcacggctgctgcgacccacagtccagttcttcctggtggcctttgccctctacgtgggctacacccgcgtgtctgattacaaacaccactggagcgatgtccttgttggcctcctgcagggggcactggtggctgccctcactgtctgctacatctcagacttcttcaaagcccgacccccacagcactgtctgaaggaggaggagctggaacggaagcccagcctgtcactgacgttgaccctgggcgaggctgaccacaaccactatggatacccgcactcctcctcctgaggccggaccccgcccaggcagggagctgctgtgagtccagctgaggcccacccaggtggtccctccagccctggttaggcactgagggctctggacgggctccaggaaccctgggctgatgggagcagtgagcgggctccgctgccccctgccctgcactggaccaggagtctggagatgcctgggtagccctcagcatttggaggggaacctgttcccgtcggtccccaaatatccccttctttttatggggttaaggaagggaccgagagatcagatagttgctgttttgtaaaatgtaatgtatatgtggtttttagtaaaatagggcacctgtttcacaaacgg

SEQ ID NO: 165884 - DNA, 1383 bp, Homo sapiens
  Payload ID: 12655
  Gene Symbol: PLPP2
  Gene Name: phospholipid phosphatase 2
  Uniprot ID: O43688
  ENST ID: ENST00000434325
  CDS Start-End: 169-1035
cccctcccctcctcacctctcccctcgtgccctccccgcccctcccctcctccccttcccgcccctcccctcctctccgcgcggggcgggctccgcgccacgtgactccgcggccgggccgggacgcgacgggacgcgctgggaccggcgtcgggggtcgcggggaccatgcagcggaggtgggtcttcgtgctgctcgacgtgctgtgcttactggtcgcctccctgcccttcgctatcctgacgctggtgaacgccccgtacaagcgaggattttactgcggggatgactccatccggtacccctaccgtccagataccatcacccacgggctcatggctggggtcaccatcacggccaccgtcatccttgtctcggccggggaagcctacctggtgtacacagaccggctctattctcgctcggacttcaacaactacgtggctgctgtatacaaggtgctggggaccttcctgtttggggctgccgtgagccagtctctgacagacctggccaagtacatgattgggcgtctgaggcccaacttcctagccgtctgcgaccccgactggagccgggtcaactgctcggtctatgtgcagctggagaaggtgtgcaggggaaaccctgctgatgtcaccgaggccaggttgtctttctactcgggacactcttcctttgggatgtactgcatggtgttcttggcgctgtatgtgcaggcacgactctgttggaagtgggcacggctgctgcgacccacagtccagttcttcctggtggcctttgccctctacgtgggctacacccgcgtgtctgattacaaacaccactggagcgatgtccttgttggcctcctgcagggggcactggtggctgccctcactgtctgctacatctcagacttcttcaaagcccgacccccacagcactgtctgaaggaggaggagctggaacggaagcccagcctgtcactgacgttgaccctgggcgaggctgaccacaaccactatggatacccgcactcctcctcctgaggccggaccccgcccaggcagggagctgctgtgagtccagctgaggcccacccaggtggtccctccagccctggttaggcactgagggctctggacgggctccaggaaccctgggctgatgggagcagtgagcgggctccgctgccccctgccctgcactggaccaggagtctggagatgcctgggtagccctcagcatttggaggggaacctgttcccgtcggtccccaaatatccccttctttttatggggttaaggaagggaccgagagatcagatagttgctgttttgtaaaatgtaatgtatatgtggtttttagtaaaatagggcacctgtttcacaaacgg

SEQ ID NO: 165885 - DNA, 581 bp, Homo sapiens
  Payload ID: 12655
  Gene Symbol: PLPP2
  Gene Name: phospholipid phosphatase 2
  ENST ID: ENST00000591572
  CDS Start-End: 47-581
gacgcgacgggacgcgctgggaccggcgtcgggggtcgcggggaccatgcagcggaggtgggtcttcgtgctgctcgacgtgctgtgcttactggtcggcttttcttccccaccagcctccctgcccttcgctatcctgacgctggtgaacgccccgtacaagcgaggattttactgcggggatgactccatccggtacccctaccgtccagataccatcacccacgggctcatggctggggtcaccatcacggccaccgtcatccttgtctcggccggggaagcctacctggtgtacacagaccggctctattctcgctcggacttcaacaactacgtggctgctgtatacaaggtgctggggaccttcctgtttggggctgccgtgagccagtctctgacagacctggccaagtacatgattgggcgtctgaggcccaacttcctagccgtctgcgaccccgactggagccgggtcaactgctcggtctatgtgcagctggagaaggtgtgcaggggaaaccctgctgatgtcaccgaggccaggttgtctttctactcgggacactcttcctttggga

SEQ ID NO: 165886 - DNA, 541 bp, Homo sapiens
  Payload ID: 12655
  Gene Symbol: PLPP2
  Gene Name: phospholipid phosphatase 2
  ENST ID: ENST00000586998
  CDS Start-End: 1-410
ccgtgagccagtctctgacagacctggccaagtacatgattgggcgtctgaggcccaacttcctagccgtctgcgaccccgactggagccgggtcaactgctcggtctatgtgcagctggagaaggtgtgcaggggaaaccctgctgatgtcaccgaggccaggttgtctttctactcgggacactcttcctttgggatgtactgcatggtgttcttggcgctgtatgtgcaggcacgactctgttggaagtgggcacggctgctgcgacccacagtccagttcttcctggtggcctttgccctctacgtgggctacacccgcgtgtctgattacaaacaccactggagcgatgtccttgttggcctcctgcagggggcactggtggctgccctcactgtgagcttctaaccctaactctatcccctgtgttgtccagagaccactccccagccaaccctagtgctgccctgggtacccttgccccactgagtccttccttgggcctcctccctgtcagtcctccctgggaccccttcccc

SEQ ID NO: 165887 - DNA, 850 bp, Homo sapiens
  Payload ID: 12655
  Gene Symbol: PLPP2
  Gene Name: phospholipid phosphatase 2
  ENST ID: ENST00000633125
  CDS Start-End: 227-850
tccgcggccgggccgggacgcgacgggacgcgctgggaccggcgtcgggggtcgcggggaccatgcagcggaggtgggtcttcgtgctgctcgacgtgctgtgcttactgcctccctgcccttcgctatcctgacgctggtgaacgccccgtacaagcgaggattttactgcggggatgactccatccggtacccctaccgtccagataccatcacccacgggctcatggctggggtcaccatcacggccaccgtcatccttgtctcggccggggaagcctacctggtgtacacagaccggctctattctcgctcggacttcaacaactacgtggctgctgtatacaaggtgctggggaccttcctgtttggggctgccgtgagccagtctctgacagacctggccaagtacatgattgggcgtctgaggcccaacttcctagccgtctgcgaccccgactggagccgggtcaactgctcggtctatgtgcagctggagaaggtgtgcaggggaaaccctgctgatgtcaccgaggccaggttgtctttctactcgggacactcttcctttgggatgtactgcatggtgttcttggcgctgtatgtgcaggcacgactctgttggaagtgggcacggctgctgcgacccacagtccagttcttcctggtggcctttgccctctacgtgggctacacccgcgtgtctgattacaaacaccactggagcgatgtccttgttggcctcctgcagggggcactggtggctgccctcactgtctgctacatctcagacttcttcaaagcccgacccccacagcactgtctgaaggaggaggagctggaacggaag

SEQ ID NO: 165888 - DNA, 3292 bp, Homo sapiens
  Payload ID: 12656
  Gene Symbol: PLPP3
  Gene Name: phospholipid phosphatase 3
  Uniprot ID: O14495
  ENST ID: ENST00000371250
  CDS Start-End: 553-1488
agtgcagaaaacaaacccaggcgatcacagcagcagccgccgcggcagcagcaccaacagcaggaggagcaggaggagccggaggaggaggaggaggaggaggcaaagttagagttggggctggcgctccggagttgctgggctcagcgcagctcccattcattaaggaaccagctgcggaggaaggtggccgagcgcccgcgctgcccactcgctcgctcgcgcactcagacgcgcgccacaacagcgcgccccaagctgcgcagctctgcaaaagtttctgctcgggatctggctctcttccccttggactttagaacgatttagggttgacagaggaaagcagaggcgcgcaggaggagcagaaaacaccaccttctgcagttggaggcaggcagccccggctgcactctagccgccgcgcccggagccggggccgacccgccactatccgcagcagcctcggccaggaggcgacccgggcgcctgggtgtgtggctgctgttgcgggacgtcttcgcggggcgggaggctcgcgccgcagccagcgccatgcaaaactacaagtacgacaaagcgatcgtcccggagagcaagaacggcggcagcccggcgctcaacaacaacccgaggaggagcggcagcaagcgggtgctgctcatctgcctcgacctcttctgcctcttcatggcgggcctccccttcctcatcatcgagacaagcaccatcaagccttaccaccgagggttttactgcaatgatgagagcatcaagtacccactgaaaactggtgagacaataaatgacgctgtgctctgtgccgtggggatcgtcattgccatcctcgcgatcatcacgggggaattctaccggatctattacctgaagaagtcgcggtcgacgattcagaacccctacgtggcagcactctataagcaagtgggctgcttcctctttggctgtgccatcagccagtctttcacagacattgccaaagtgtccatagggcgcctgcgtcctcacttcttgagtgtctgcaaccctgatttcagccagatcaactgctctgaaggctacattcagaactacagatgcagaggtgatgacagcaaagtccaggaagccaggaagtccttcttctctggccatgcctccttctccatgtacactatgctgtatttggtgctatacctgcaggcccgcttcacttggcgaggagcccgcctgctccggcccctcctgcagttcaccttgatcatgatggccttctacacgggactgtctcgcgtatcagaccacaagcaccatcccagtgatgttctggcaggatttgctcaaggagccctggtggcctgctgcatagttttcttcgtgtctgacctcttcaagactaagacgacgctctccctgcctgcccctgctatccggaaggaaatcctttcacctgtggacattattgacaggaacaatcaccacaacatgatgtaggtgccacccacctcctgagctgtttttgtaaaatgactgctgacagcaagttcttgctgctctccaatctcatcagacagtagaatgtagggaaaaacttttgcccgactgatttttaaaaaggaaaaaaaaaatgttttactatgtggccttccaaaataggtagtgtttgcctatgtggaaacaacagcaaactaacaccaagtgccagagtcctggatgtgcaattggtttaagtgttcatgttctagtgaacacagcttgttcaggaacaaacactaaaacgatttgagtagaggctgctggtcaccttttgtgacctgaggaatcccaggcctgtgagaaaagcaaaaattcacattgcagcacatgatgccagaaatagcactgaatcaagaaaatagccattgcggagctgccctcttgagtctttctgtccatcccattctattctgtactgtgactttagttcaggaagttttgttttgtgttttaaataaaaggaaagagcaagtttgctcagtcaagtgatcagatcccgaatctagattcccagttctaaggccttatcacctcccctgcccataggccaacaaccatagttcctcacattagtgattagcagactctttgtggacgagtgaatttcacaaacagcacaatttcagaagaaatcgagggcacaggccctcacttttcttcttttgacgcatcatcctgtgatgttgaaatgtcaattgcaggatgctgatgttgtgcacgtcaatcaccgggcacttgcatactcttagaaacagttcgacttcggttactgccttctcccttgaaatccttgctgcgtgcccaccaggatttcctgtgagggcccaggaatgagcaaggcatggtctgccaccagctgacggaaagcagccttctgtacaacagatgggagggtgaagggggcagaatgaaaatcgaaccaaccttttagctgttgcaaatcagaaggagccagagaagcaggcagtctcatgcatgagaggttacccttcaggatgacagagctgagggtctttgtaggagttgctcttgctgtgtaaagcactattgtcttggggttgagccctagggcagttcttggtaggttctgctgggcagaacatatgggttaaatctcggtagagagtttccctcatcctctatccgtaagtgtccttccatgcaaggtcccactctaggtgatagacagggaccccttctactgaacctttgaggaaaggaggaaggaagaaatgcgtttagatcttggatgcagacctttcaaagggttaaatgtaaccatatggatcaaccacatgcacatccttactacagaatccgtcctttcatttcaacttatagcaagctatgatttttatatataaatattatataaataatgtataaaacattaaaagttaactatgtaagatattatttctgaaacaatttagctatatccactatgattataaactgtgtctcgacctgtgttatttacattagctgcttaaaaaagcattgagttaatttttttaaatatcaactaaaatatcatagttctgtggtagacattgttttataatgaaataactgcaactagagaaaactgtataaaaacattaaattgtcagtatttttgtaaggttccattttgtaaagagaataatattcaaagacttttgtagcatacaaagtgaaaacttgtatctgcgaaactatacttgtattaaatgtgctttttaaataaaagctcgtaacacaactaattaaggacttgcaa

SEQ ID NO: 165889 - DNA, 1135 bp, Homo sapiens
  Payload ID: 12657
  Gene Symbol: PLPP4
  Gene Name: phospholipid phosphatase 4
  ENST ID: ENST00000369073
  CDS Start-End: 1-786
atgcatggaattggtccttctggcagttttacagagtttttggatccgttccagagagtcatccagccagaagagatctggctctataaaaatcctttggtgcaatcagataacatacctacccgcctcatgtttgcaatttctttcctcacacccctggctgttatttgtgtggtgaaaattatccggcgaacagacaagactgaaattaaggaagccttcttagcggtgtccttggctcttgctttgaatggagtctgcacaaacactattaaattaatagtgggaagacctcgccccgatttcttttaccgctgctttccagatggagtgatgaactcggaaatgcattgcacaggtgaccccgatctggtgtccgagggccgcaaaagcttccccagcatccattcctcctttgccttttcgggccttggcttcacgacgttctacttggcgggcaagctgcactgcttcaccgagagtgggcggggaaagagctggcggctctgtgctgccatcctgcccttgtactgcgccatgatgattgccctgtcccgcatgtgcgactacaagcatcactggcaagattcctttgtgggtggagtcatcggcctcatttttgcatacatttgctacagacagcactatcctcctctggccaacacagcttgccataaaccctacgttagtctgcgagtcccagcctcactgaagaaagaggagaggcccacagctgacagcgcacccagcttgcctctggaggggatcaccgaaggcccggtatgaccagtgtcctgggaggatggacactaagccctgggcacatctgccaccctgacatcataacacaatagaaatggttttctgtagtgtatttttcatcagttgtttctcaaagtcatcgtacttctgcttctgtttcactgatggtgttcctgctactttaaatgtctacttccaacatccttgaatttgcaagtgaaggacaacaatctctgagagacgtgtggaagaggctgtgaaggtggggtttggggagcttggccgattcgtctatctgaaatgtttgctgtaacagccaccttcctatgttttcatggttgtaaaacataataaaacctcccacgtggaagac

SEQ ID NO: 165890 - DNA, 1521 bp, Homo sapiens
  Payload ID: 12657
  Gene Symbol: PLPP4
  Gene Name: phospholipid phosphatase 4
  Uniprot ID: Q5VZY2
  ENST ID: ENST00000398250
  CDS Start-End: 353-1168
cgggcttcccctccccggtccgcgggtgcccggcgcgggcccaggaggcggaggcggctcctggggagagggatccgggagtccctgaggcggccccggctccgcactaggaggcggggtccgcagtatcgccagcggccggcgcggcttcccggagccccggagcccgaggcgcgaggtttaggctgagccctccccggcgcctgcccccgcccggcgcccgcctccgcccccgcccgcggcctggagcgcgcctccctcgcctcccagggtctggcgagccggcgccggccgagctgcgggagccgcggagagcaccagctgacgccgcgggagctgctccggccgcaccatgcgggagctggccattgagatcggggtgcgagccctgctcttcggagtcttcgtttttacagagtttttggatccgttccagagagtcatccagccagaagagatctggctctataaaaatcctttggtgcaatcagataacatacctacccgcctcatgtttgcaatttctttcctcacacccctggctgttatttgtgtggtgaaaattatccggcgaacagacaagactgaaattaaggaagccttcttagcggtgtccttggctcttgctttgaatggagtctgcacaaacactattaaattaatagtgggaagacctcgccccgatttcttttaccgctgctttccagatggagtgatgaactcggaaatgcattgcacaggtgaccccgatctggtgtccgagggccgcaaaagcttccccagcatccattcctcctttgccttttcgggccttggcttcacgacgttctacttggcgggcaagctgcactgcttcaccgagagtgggcggggaaagagctggcggctctgtgctgccatcctgcccttgtactgcgccatgatgattgccctgtcccgcatgtgcgactacaagcatcactggcaagattcctttgtgggtggagtcatcggcctcatttttgcatacatttgctacagacagcactatcctcctctggccaacacagcttgccataaaccctacgttagtctgcgagtcccagcctcactgaagaaagaggagaggcccacagctgacagcgcacccagcttgcctctggaggggatcaccgaaggcccggtatgaccagtgtcctgggaggatggacactaagccctgggcacatctgccaccctgacatcataacacaatagaaatggttttctgtagtgtatttttcatcagttgtttctcaaagtcatcgtacttctgcttctgtttcactgatggtgttcctgctactttaaatgtctacttccaacatccttgaatttgcaagtgaaggacaacaatctctgagagacgtgtggaagaggctgtgaaggtggggtttggggagcttggccgattcgtctatctgaaatgtttgctgtaacagccaccttcctatgttttcatggttgtaaaacataataaaacctcccacgtggaagacttgg

SEQ ID NO: 165891 - DNA, 885 bp, Homo sapiens
  Payload ID: 12657
  Gene Symbol: PLPP4
  Gene Name: phospholipid phosphatase 4
  ENST ID: ENST00000427079
  CDS Start-End: 85-885
agggtctggcgagccggcgccggccgagctgcgggagccgcggagagcaccagctgacgccgcgggagctgctccggccgcaccatgcgggagctggccattgagatcggggtgcgagccctgctcttcggagtcttcgtttttacagagtttttggatccgttccagagagtcatccagccagaagagatctggctctataaaaatcctttggtgcaatcagataacatacctacccgcctcatgtttgcaatttctttcctcacacccctggctgttatttgtgtggtgaaaattatccggcgaacagacaagactgaaattaaggaagccttcttagcggtgtccttggctcttgctttgaatggagtctgcacaaacactattaaattaatagtgggaagacctcgccccgatttcttttaccgctgctttccagatggagtgatgaactcggaaatgcattgcacaggtgaccccgatctggtgtccgagggccgcaaaagcttccccagcatccattcctcctttgccttttcgggccttggcttcacgacgttctacttggcgggcaagctgcactgcttcaccgagagtgggcggggaaagagctggcggctctgtgctgccatcctgcccttgtactgcgccatgatgattgccctgtcccgcatgtgcgactacaagcatcactggcaagattcctttgtgggtggagtcatcggcctcatttttgcatacatttgctacagacagcactatcctcctctggccaacacagcttgccataaaccctacgttagtctgcgagtcccagcctcactgaagaaagaggagaggcccacagctgacagcgcacccagcttgcctctggaggggatcacc

SEQ ID NO: 165892 - DNA, 853 bp, Homo sapiens
  Payload ID: 12658
  Gene Symbol: PLPP5
  Gene Name: phospholipid phosphatase 5
  Uniprot ID: Q8NEB5
  ENST ID: ENST00000422581
  CDS Start-End: 9-659
gcggccggatggggaaggcggcggcggcggtggcctttggggccgaagtgggcgtgcggctcgcgctgttcgcggccttcctggtgacggagctgctccccccgttccagagactcatccagccggaggagatgtggctctaccggaacccctacgtggaggcggagtatttccccaccaagccgatgtttgttattgcatttctctctccactgtctctgatcttcctggccaaatttctcaagaaggcagacacaagagacagcagacaagcctgcctggctgccagccttgccctggctctgaatggcgtctttaccaacacaataaaactgatcgtagggaggccacgcccagatttcttctaccgctgcttccctgatgggctagcccattctgacttgatgtgtacaggggataaggacgtggtgaatgagggccgaaagagcttccccagtggacattcttcctttgcatttgctggtctggcctttgcgtccttctacctggcagggaagttacactgcttcacaccacaaggccgtgggaaatcttggaggttctgtgcctttctgtcacctctactttttgcagctgtgattgcactgtcccgcacatgtgactacaagcatcactggcaaggaccctttaaatggtgaaaatgggcagatgaatagcaataagtggacctttgttactcttctgagttagaaaaattctaatttagtacactctgaacaaagcttattatacttacttaagatgtgttttgatttggtgttcagaaagcaacctgacaatgataatactgtaactatgataaaattgagaataaaaagattttatttagaaa

SEQ ID NO: 165893 - DNA, 2130 bp, Homo sapiens
  Payload ID: 12658
  Gene Symbol: PLPP5
  Gene Name: phospholipid phosphatase 5
  Uniprot ID: Q8NEB5
  ENST ID: ENST00000424479
  CDS Start-End: 22-816
tcgctcggagctcgcggccggatggggaaggcggcggcggcggtggcctttggggccgaagtgggcgtgcggctcgcgctgttcgcggccttcctggtgacggagctgctccccccgttccagagactcatccagccggaggagatgtggctctaccggaacccctacgtggaggcggagtatttccccaccaagccgatgtttgttattgcatttctctctccactgtctctgatcttcctggccaaatttctcaagaaggcagacacaagagacagcagacaagcctgcctggctgccagccttgccctggctctgaatggcgtctttaccaacacaataaaactgatcgtagggaggccacgcccagatttcttctaccgctgcttccctgatgggctagcccattctgacttgatgtgtacaggggataaggacgtggtgaatgagggccgaaagagcttccccagtggacattcttcctttgcatttgctggtctggcctttgcgtccttctacctggcagggaagttacactgcttcacaccacaaggccgtgggaaatcttggaggttctgtgcctttctgtcacctctactttttgcagctgtgattgcactgtcccgcacatgtgactacaagcatcactggcaagatgtactagttggatccatgattggaatgacatttgcctatgtctgctatcggcagtattatcctcctctgactgatgcagaatgccataaaccatttcaagacaaacttgtactttccactgcacagaagcctggggattcttattgttttgatatttaaaaattgaatctggccgggcgtggtggctcatgcctgtaatcccaacactttgggaggctgaggagggtggatcacctgaggtcaggaccagcctggccaacatggtgaaccctgtctctactaaaaatacaaaaattagccaggagttgtgtgccgtaatcccagctacctgggaggctgaggtaggagaattgcttgaacctgggagctggaggttccagtgagccgagatcgcaccactgcactccagcctaggcaacagagtgagaccccatctcaaaaaaaaaaaaaattgaatctatctcaatagagaacaggtgaactagccctcctaaccggaccatgcacaagacaagaaattctagcctttttttccccttccaaggtgcaagtgaggacataagccacactgtattctgcctccaaatgattacacacttttgcccctgctcatctatcttgaggagttacggttcttttccactactgtatgccacatgttctagtaaaaggatctttcaaaggtgtccaacaccttatgaatctggtctatcagattaatatctgaagatctacagtgtttttacatttaatttaaatgccattcttagaaggatcttgtcacaaagaagcctttacatagccccaccttgtctcagaagctagagttcattatcaaaacttaatttccatttcatatagctcaaaatcttaaaatctagggcatggccaactaaattactttgattctgtttaccttctctgatgacaattccatcaagccttaaataggaaaatgtcgaatctagggtaatttatcacttttgtgtgcatcttatctgagtccagccatctggtactgctgtgcattttgaacaccgtgggcataaacaatttgttgaattactaagtgaaaacaataataaagaagaaaatggtcaggagtgtggtttcagcactactaacagatgactgtttctacctcatttgaccataactgtacttgtgagcttctttccttccattcatgactgaagatctgctcaaatgcaccaacactgccaagtgactaaggtagaaaagaaaaatgacaggtatcgtcatctgaaggacagatgaatctttttctgccccttcttcacaatggaatataaggaacaattatgggatgtcatcagaatggatgccataggacctacagctccctttctctttattgtgattatactttaaatatgacattgtcttttatgtgtatgttcctatattttcaatgtatctttttccttcagtaaacctgatattcaaataaaa

SEQ ID NO: 165894 - DNA, 794 bp, Homo sapiens
  Payload ID: 12658
  Gene Symbol: PLPP5
  Gene Name: phospholipid phosphatase 5
  Uniprot ID: Q8NEB5
  ENST ID: ENST00000419686
  CDS Start-End: 45-575
gaggtggccacgtcagcgcagcgtcgctcggagctcgcggccggatggggaaggcggcggcggcggtggcctttggggccgaagtgggcgtgcggctcgcgctgttcgcggccttcctggtgacggagctgctccccccgttccagagactcatccagccggaggagatgtggctctaccggaacccctacgtggaggcggagtatttccccaccaagccgatgtttgttattgcatttctctctccactgtctctgatcttcctggccaaatttctcaagaaggcagacacaagagacagcagacaagcctgcctggctgccagccttgccctggctctgaatggcgtctttaccaacacaataaaactgatcgtagggaggccacgcccagatttcttctaccgctgcttccctgatgggctagcccattctgacttgatgtgtacaggggataaggacgtggtgaatgagggccgaaagagcttccccagtggacattcttcctgtatgaatatcatatggactctaccctatgcttgttttcacatcattgaatttaacctagaaagctagtagggatgggaaaatctgactactcttgtttctacaatttggaaaatccccccttctttagtaactccacagtttaacaagtctgagccttgactatttgggtaaatattacagaacagaaaggtagtttaccttcatgagatttgcacatttaattgttatattatttgcctagatcctgcaatcttgtactagcaataaaaatacctttaacgaaga

SEQ ID NO: 165895 - DNA, 745 bp, Homo sapiens
  Payload ID: 12658
  Gene Symbol: PLPP5
  Gene Name: phospholipid phosphatase 5
  ENST ID: ENST00000534339
  CDS Start-End: 1-734
cggtggcctttggggccgaagtgggcgtgcggctcgcgctgttcgcggccttcctggtgacggagctgctccccccgttccagagactcatccagccggaggagatgtggctctaccggaacccctacgtggaggcggagtatttccccaccaagccgatgtttgttattgcatttctctctccactgtctctgatcttcctggccaaatttctcaagaaggcagacacaagagacagcagacaagcctgcctggctgccagccttgccctggctctgaatggcgtctttaccaacacaataaaactgatcgtagggaggccacgcccagatttcttctaccgctgcttccctgatgggctagcccattctgacttgatgtgtacaggggataaggacgtggtgaatgagggccgaaagagcttccccagtggacattcttcctggaagttacactgcttcacaccacaaggccgtgggaaatcttggaggttctgtgcctttctgtcacctctactttttgcagctgtgattgcactgtcccgcacatgtgactacaagcatcactggcaagatgtactagttggatccatgattggaatgacatttgcctatgtctgctatcggcagtattatcctcctctgactgatgcagaatgccataaaccatttcaagacaaacttgtactttccactgcacagaagcctggggattcttattgttttgatatttaaaaattgaatct

SEQ ID NO: 165896 - DNA, 831 bp, Homo sapiens
  Payload ID: 12658
  Gene Symbol: PLPP5
  Gene Name: phospholipid phosphatase 5
  ENST ID: ENST00000524616
  CDS Start-End: 1-738
gggaaggcggcggcggcggtggcctttggggccgaagtgggcgtgcggctcgcgctgttcgcggccttcctggtgacggagctgctccccccgttccagagactcatccagccggaggagatgtggctctaccggaacccctacgtggaggcggagtatttccccaccaagccgatgtttaaggcagacacaagagacagcagacaagcctgcctggctgccagccttgccctggctctgaatggcgtctttaccaacacaataaaactgatcgtagggaggccacgcccagatttcttctaccgctgcttccctgatgggctagcccattctgacttgatgtgtacaggggataaggacgtggtgaatgagggccgaaagagcttccccagtggacattcttcctttgcatttgctggtctggcctttgcgtccttctacctggcagggaagttacactgcttcacaccacaaggccgtgggaaatcttggaggttctgtgcctttctgtcacctctactttttgcagctgtgattgcactgtcccgcacatgtgactacaagcatcactggcaagatgtactagttggatccatgattggaatgacatttgcctatgtctgctatcggcagtattatcctcctctgactgatgcagaatgccataaaccatttcaagacaaacttgtactttccactgcacagaagcctggggattcttattgttttgatatttaaaaattgaatctggccgggcgtggtggctcatgcctgtaatcccaacactttgggaggctgaggagggtggatcacctgaggtcaggaccagcc

SEQ ID NO: 165897 - DNA, 581 bp, Homo sapiens
  Payload ID: 12658
  Gene Symbol: PLPP5
  Gene Name: phospholipid phosphatase 5
  ENST ID: ENST00000531109
  CDS Start-End: 1-183
gcctttggggccgaagtgggcgtgcggctcgcgctgttcgcggccttcctggtgacggagctgctccccccgttccagagactcatccagccggaggagatgtggctctaccggaacccctacgtggaggcggagtatttccccaccaagccgatgtttctgccagccttgccctggctctgaatggcgtctttaccaacacaataaaactgatcgtagggaggccacgcccagatttcttctaccgctgcttccctgatgggctagcccattctgacttgatgtgtacaggggataaggacgtggtgaatgagggccgaaagagcttccccagtggacattcttcctttgcatttgctggtctggcctttgcgtccttctacctggcagggaagttacactgcttcacaccacaaggccgtgggaaatcttggaggttctgtgcctttctgtcacctctactttttgcagctgtgattgcactgtcccgcacatgtgactacaagcatcactggcaagatgtactagttggatccatgattggaatgacatttgcctatgtctgctatcggcagtattat

SEQ ID NO: 165898 - DNA, 2185 bp, Homo sapiens
  Payload ID: 12658
  Gene Symbol: PLPP5
  Gene Name: phospholipid phosphatase 5
  Uniprot ID: Q8NEB5
  ENST ID: ENST00000529359
  CDS Start-End: 200-871
gttcgcggccttcctgtaagaaagatccacggccgggcccgggcggccccgcttcccaggcaggcgggcggcacggggcggcgggtcgggcagtggggaagcggggaggaagccaggcgacctgctctgcgcttctttgttcccctctagggtgacggagctgctccccccgttccagagactcatccagccggaggagatgtggctctaccggaacccctacgtggaggcggagtatttccccaccaagccgatgtttgttattgcatttctctctccactgtctctgatcttcctggccaaatttctcaagaaggcagacacaagagacagcagacaagcctgcctggctgccagccttgccctggctctgaatggcgtctttaccaacacaataaaactgatcgtagggaggccacgcccagatttcttctaccgctgcttccctgatgggctagcccattctgacttgatgtgtacaggggataaggacgtggtgaatgagggccgaaagagcttccccagtggacattcttcctttgcatttgctggtctggcctttgcgtccttctacctggcagggaagttacactgcttcacaccacaaggccgtgggaaatcttggaggttctgtgcctttctgtcacctctactttttgcagctgtgattgcactgtcccgcacatgtgactacaagcatcactggcaagatgtactagttggatccatgattggaatgacatttgcctatgtctgctatcggcagtattatcctcctctgactgatgcagaatgccataaaccatttcaagacaaacttgtactttccactgcacagaagcctggggattcttattgttttgatatttaaaaattgaatctggccgggcgtggtggctcatgcctgtaatcccaacactttgggaggctgaggagggtggatcacctgaggtcaggaccagcctggccaacatggtgaaccctgtctctactaaaaatacaaaaattagccaggagttgtgtgccgtaatcccagctacctgggaggctgaggtaggagaattgcttgaacctgggagctggaggttccagtgagccgagatcgcaccactgcactccagcctaggcaacagagtgagaccccatctcaaaaaaaaaaaaaattgaatctatctcaatagagaacaggtgaactagccctcctaaccggaccatgcacaagacaagaaattctagcctttttttccccttccaaggtgcaagtgaggacataagccacactgtattctgcctccaaatgattacacacttttgcccctgctcatctatcttgaggagttacggttcttttccactactgtatgccacatgttctagtaaaaggatctttcaaaggtgtccaacaccttatgaatctggtctatcagattaatatctgaagatctacagtgtttttacatttaatttaaatgccattcttagaaggatcttgtcacaaagaagcctttacatagccccaccttgtctcagaagctagagttcattatcaaaacttaatttccatttcatatagctcaaaatcttaaaatctagggcatggccaactaaattactttgattctgtttaccttctctgatgacaattccatcaagccttaaataggaaaatgtcgaatctagggtaatttatcacttttgtgtgcatcttatctgagtccagccatctggtactgctgtgcattttgaacaccgtgggcataaacaatttgttgaattactaagtgaaaacaataataaagaagaaaatggtcaggagtgtggtttcagcactactaacagatgactgtttctacctcatttgaccataactgtacttgtgagcttctttccttccattcatgactgaagatctgctcaaatgcaccaacactgccaagtgactaaggtagaaaagaaaaatgacaggtatcgtcatctgaaggacagatgaatctttttctgccccttcttcacaatggaatataaggaacaattatgggatgtcatcagaatggatgccataggacctacagctccctttctctttattgtgattatactttaaatatgacattgtcttttatgtgtatgttcctatattttcaatgtatctttttccttcagtaaacctgatattcaaataaaa

SEQ ID NO: 165899 - DNA, 875 bp, Homo sapiens
  Payload ID: 12658
  Gene Symbol: PLPP5
  Gene Name: phospholipid phosphatase 5
  ENST ID: ENST00000531823
  CDS Start-End: 431-829
cctttggggccgaagtgggcgtgcggctcgcgctgttcgcggccttcctggtgacggagctgctccccccgttccagagactcatccagccggaggagatgtggctctaccggaacccctacgtggaggcggagtatttccccaccaagccgatgtttgtgcgtggagaaagatcgtctttcctccctccccatgacccggcttcccgcgggcacctgttattgcatttctctctccactgtctctgatcttcctggccaaatttctcaagaaggcagacacaagagacagcagacaagcctgcctggctgccagccttgccctggctctgaatggcgtctttaccaacacaataaaactgatcgtagggaggccacgcccagatttcttctaccgctgcttccctgatgggctagcccattctgacttgatgtgtacaggggataaggacgtggtgaatgagggccgaaagagcttccccagtggacattcttcctttgcatttgctggtctggcctttgcgtccttctacctggcagggaagttacactgcttcacaccacaaggccgtgggaaatcttggaggttctgtgcctttctgtcacctctactttttgcagctgtgattgcactgtcccgcacatgtgactacaagcatcactggcaagatgtactagttggatccatgattggaatgacatttgcctatgtctgctatcggcagtattatcctcctctgactgatgcagaatgccataaaccatttcaagacaaacttgtactttccactgcacagaagcctggggattcttattgttttgatatttaaaaattgaatctggccgggcgtggtggctcatgcctgtaatcccaac

SEQ ID NO: 165900 - DNA, 2944 bp, Homo sapiens
  Payload ID: 12659
  Gene Symbol: PLPP6
  Gene Name: phospholipid phosphatase 6
  Uniprot ID: Q8IY26
  ENST ID: ENST00000381883
  CDS Start-End: 62-949
gcagggccgggaagcctctgtttggtccggccaggtcccgggatccgggccgccagctgcgatgccaagtccccggaggagcatggagggacggccgctgggcgtctccgcttcgagcagcagcagcagccccggcagcccagcccatggcggcggtggcggcggcagcaggtttgagttccagtccctgctcagcagccgcgccacggccgtggaccccacctgcgcccggctccgtgcatcggagagcccagttcaccgccgcggctccttccccctggccgcggcgggcccctcgcagtcgcccgcgcctccgctgcccgaggaggaccgcatggacttgaacccgtccttcctgggcatcgccctgcgctccctgctggccatcgacctgtggctgtccaagaagctgggggtgtgcgcgggagagagctcgtcgtggggcagcgtgcgaccccttatgaagctgctggagatctcgggacacggcatcccctggctgctgggcaccctctactgcctgtgcaggagcgacagctgggccgggcgcgaggtgctgatgaacctgctcttcgccctgctgttggacctgctgctggtggccttgatcaaagggctggtccgcaggcgccgcccggcccacaaccagatggacatgtttgtcactctctcggtggacaagtactccttcccctcgggccatgccacaagggccgccctgatgtcgaggttcatcctgaaccacctggtgctggccattccactgagggtgctggtggttctgtgggccttcgtcttgggcctatccagggtcatgctggggcggcacaatgtcaccgacgtagcttttggcttttttctgggctacatgcagtacagcatcgtggactattgctggctctcaccccataatgctccggtcctctttttactgtggagtcaacgatgacaccatctcattgattatggcaccaggaagtctgaaggtttccacattcgatgatgtcaacctaaaccagcagccatcccgcttgtccctcttaggcatttcaggcttcctttgggatttcaggtgtcccatgatcttgatgtgctgctaggctggagcacacactggccattactgaacacagccatattagggaaagcaaaaaaacccaaaaaatcctctattgtatatttattcaacaactgtttatgtttccaggacaactgcaaagaaaacaagctgaggtggttatactgttgctgttaaaagttggtatcagtaagatttgtgttttgtgataatccctaaatcaacataccacttgtaaactgaacttcgagaaagaaacatgatgttcattctgtaaatatacatgcagacaggtcatgtactaatcctagtccttttcctgaggtagattttaaacagtatttttaaagtccaagacataggtttttctagtttattccctgaagatctgttgccacagttgggagatttcttcttaatcctgattttcttggtaagcttttttactttattatctctataatttattatctctatccatatttgtggatcgggtagtgggaaaagagattataatacttgtctttctctcctctccctccatccctcaaaagatctttatgcatttcccactactcccttactgtcttttagcattcagagaaaaagccaacttgcttaaagaggaatcacttaaaaggtaggcatatctaagatgctcatagaagaggaagaatgggacatggccccatgcttatttttgtttacaacgtaacatggcatgagagagggcagagaaactaagttgctggggaaagttagaggaactgaaagtttgggaataggctgaccacatattatgccagtgaccagtatgacaggagatggggccctgctgccagtcatctccactgaataaagaataatgctcctctttcagggtaataaagtggggaaaaggaacgtcttctcaatgcaagaacataagctttctcgtatatacctgtatgctacagtttttcacatggaattccgttttctgaggtacagcacattttaggtaacagtatttaacttgaaattcatcatgggagtctgctgctataccaggcacaagataaaactccaaaatttctgtttacattgacctttacatttaaagctgttcatccatggtgcctccccaaatcataagaccaaagaccaccaaacgcagggtggactctgctcattattctttgacccagaaagactggagaaggtatgtgctttaagtgctgctctacctgaaaagaaatcctttaaattacctatggaagtgatgtcctcagataatcttaatgactattttggcatttataaatagaaatgattatggactttgatctgccatacggaggttcggaacctggagaacggctgtgataagtaggttttgattgagtgaaagcatgagcttgttcagagtgaggggcatagtgaaaaaggaacagccatgcctcaaaatcaaatcatttgcattcccacagcatcctgaataccgactacctcttcacttgctaaagcagctaaactgtgaagctctaagtggtttgggtttgttgtttaaccttagcgagatcctttaactgcagcaatattcaagccagatatttggaagcaaatgatatttcctcttgcagtgtccacaaatctgaatattaggggcatgaaattaggcttaccatctgatttgtaattacaattttggaattctctgttttagttgctgaggcctgagttttctggctcttaaagcatagatcatttcacctgatgtttttgaagcatcctaagtacagtagagtagaaaactgatttctttgttaattgtacactgaataatgccttttaaaaatcaaaataaaattaacaaataatggtgaa

SEQ ID NO: 165901 - DNA, 972 bp, Homo sapiens
  Payload ID: 12660
  Gene Symbol: PLPP7
  Gene Name: phospholipid phosphatase 7 (inactive)
  ENST ID: ENST00000372261
  CDS Start-End: 187-642
ccccttggagctgggtggcagaggagataaacagccatgtgcaactctccacactatatttaacagctgcggcggagaaggcagggaggcagccacggtggcggctctgggggcagctcttgtcttcggggagaaggcccttggagccgggctggcatcggccttctcggggtgagcgaggtcaccatgccagcttcccagagccgggcccgtgcccgggaccgcaacaacgtcctcaaccgggctgagttcctgtccctgaaccagccccccaaggggggcccggagccccgcagctcgggcagaaaggcctcgggcccatcagcacagcccccacctgctggtgacggggccagagagcgacgccagtcacagcagctgccagaggaggactgcatgcagctgaacccctccttcaagggcatcgccttcaactccctgctggccatcgatatctgtatgtccaagcggctgggggtgtgcgctggccgggcggcgtcctgggccagtgcccgctccatggtcaagctcatcggcatcacgggccacggcatcccctggatcggaggcaccatcctctgcctggtgaagagcagcacactggccggccaggaggtgctcatgaatctgctcctggattagcaccgccctgtgccaggtgccacgtggggcccatgtggaggcaagccattccctccacccagaggtgatgcccagcccccgtccggcccacccttcgggcaccaccaggtccccaaggtgccccaggaagcttccaccctccacgccaggcccgcatcgatttccttgtctttcccggtgtggccatcatttgagggacatgtgaggtggaggtctcaggcaaggcaaacattaacaaggggtctcagttccaaaagggcattgggttggaccacggagaacatcagttccagaggaagttacaataaaaacacgtatctccctgctcta

SEQ ID NO: 165902 - DNA, 2095 bp, Homo sapiens
  Payload ID: 12660
  Gene Symbol: PLPP7
  Gene Name: phospholipid phosphatase 7 (inactive)
  Uniprot ID: Q8NBV4
  ENST ID: ENST00000372264
  CDS Start-End: 305-1120
aaatagcccaggcccgaggcagccaggccgcagctgtggactcctcacctcccggaggctctgctggtgcaggccccgcattggagggctcgattggctgcccggctggcactgacgtccccttggagctgggtggcagaggagataaacagccatgtgcaactctccacactatatttaacagctgcggcggagaaggcagggaggcagccacggtggcggctctgggggcagctcttgtcttcggggagaaggcccttggagccgggctggcatcggccttctcggggtgagcgaggtcaccatgccagcttcccagagccgggcccgtgcccgggaccgcaacaacgtcctcaaccgggctgagttcctgtccctgaaccagccccccaaggggggcccggagccccgcagctcgggcagaaaggcctcgggcccatcagcacagcccccacctgctggtgacggggccagagagcgacgccagtcacagcagctgccagaggaggactgcatgcagctgaacccctccttcaagggcatcgccttcaactccctgctggccatcgatatctgtatgtccaagcggctgggggtgtgcgctggccgggcggcgtcctgggccagtgcccgctccatggtcaagctcatcggcatcacgggccacggcatcccctggatcggaggcaccatcctctgcctggtgaagagcagcacactggccggccaggaggtgctcatgaatctgctcctggccctgctcctggacatcatgacggtggccggcgtgcagaagctcatcaagcggcgcggcccgtacgagacgagccccagcctcctggactacctcaccatggacatctacgccttcccggccgggcacgccagccgcgccgccatggtgtccaagttcttcctcagccacctggtgctggcggtgcccctgcgtgtgctgctggtgctctgggccctctgcgtgggcctgtcccgcgtgatgatcggccgccaccacgtcacggacgtcctctccggctttgtcatcggctacctccagttccgtctggtggagctggtctggatgccctccagcacctgccagatgctcatctctgcctggtgaagcgcccgccggcccacacaagcctctgggggcagggctggccctagagaaggggcagggggtggcgaggtggcgggcgtgggtggaacagagcggccaggagtcagagcggccacccccacctcatcttcccctcctggctggaggctggcgaacccaggccacccctcccggagacaagcgtgtttggcagtgccaggcctcttgcccctttgcttggactccaagtctcctctctaggcagccaggacccacccatggggacagccctatttagcttctgctctgggaacagcaaaaatcaggatggtgggaggggccgagtcttgtcttgtcctttcatcatcatgactgttgagttcttggctgtgcccatcacgccacagcacgacgcctgccaaaatgcccccaacctactgcctgatgcaggtgccattgccattagcggtcatcgacagcttagggcagcactttccaacgggtgcccatgggacaccagcctgcgagatgcttttgggggaaaggggttttgtggttcaataactttcggaagtgctgcacactctgtccccaagttggacattcacaaaggccgttattgccgtaaaggctctgacaagccctatagaaaagcttcttgctaaaccttctttaacccatgttttctaaacttatttgaccacagaacccttttcttggggaacagctattaacccccaaggaattattggttcctcaagtgcgttttgggagctgctgccagagagctaaagggcctggggtgtgagctgactctcctctggggaggccgggtgcacacgccacagcccgaggaaagtgctggccaccgcccgtgggcatcgatgaggctttggcccccaggggccggactccgtgtgacctaataggtcgtttccaagtcacccgttttggatgtgcatttcatgtgacaatacagatgacatgcaaatggcc

SEQ ID NO: 165903 - DNA, 2495 bp, Homo sapiens
  Payload ID: 12661
  Gene Symbol: PLPPR1
  Gene Name: phospholipid phosphatase related 1
  Uniprot ID: Q8TBJ4
  ENST ID: ENST00000374874
  CDS Start-End: 440-1417
ctccgccccctccgcgccagccttttgctctttcctttcattaaacaaacaggagatcctgaaacctggaccctgtgcaagctgcagcgccaggaggaggcagcggaggaagcagagcgcgggatgggcgcccagcggcatctgtgatcccgcgcacctccgccccacgggcgcgcgcacaaacacggacacacacatacacacactcgcgcacacactcgcacaaacacacactcgtacacgcccgcgccgctcgctcgccggcttgctctcccacgcaagcggaatgcagcagcgcctggagagcgtgtctcggaccgccgcctgaatgtacctcgctcccgggagccggacggcccagtagggcgcactggaggacgctccgctgcgggagcctggacagtttttgacggtgcagtcttgctatatggtgtgagaaatggctgtaggaaacaacactcaacgaagttattccatcatcccgtgttttatatttgttgagcttgtcatcatggctgggacagtgctgcttgcctactacttcgaatgcactgacacttttcaggtgcatatccaaggattcttctgtcaggacggagacttaatgaagccttacccagggacagaggaagaaagcttcatcacccctctggtgctctattgtgtgctggctgccaccccaactgctattatttttattggtgagatatccatgtatttcataaaatcaacaagagaatccctgattgctcaggagaaaacaattctgaccggagaatgctgttacctgaaccccttacttcgaaggatcataagattcacaggggtgtttgcatttggactttttgctactgacatttttgtaaacgccggacaagtggtcactgggcacttaacgccatacttcctgactgtgtgcaagccaaactacaccagtgcagactgccaagcgcaccaccagtttataaacaatgggaacatttgtactggggacctggaagtgatagaaaaggctcggagatcctttccctccaaacacgctgctctgagcatttactccgccttatatgccacgatgtatattacaagcacaatcaagacgaagagcagtcgactggccaagccggtgctgtgcctcggaactctctgcacagccttcctgacaggcctcaaccgggtctctgagtatcggaaccactgctcggacgtgattgctggtttcatcctgggcactgcagtggccctgtttctgggaatgtgtgtggttcataactttaaaggaacgcaaggatctccttccaaacccaagcctgaggatccccgtggagtacccctaatggctttcccaaggatagaaagccctctggaaaccttaagtgcacagaatcactctgcgtccatgaccgaagttacctgagacgactgatgtgtcacaagctgttttttaaaatcatcttccaattctatacttcaaaacacacagttgctcaatgtcaaactgtgatgacaaatattacgtttatctagttagaagctaatgttttgtacattttttgtatgaggaagtgatgtagcttgccctgattttttttttttttttttggtcagctttaatatatttatgccagaattttaaaaccaacaaaattttcttgttcaagcgtgcattgaagaaccacatttattcaatggttgacgttgttttgtgatatttgtacacaaattttcttttctcagttttataaacacagaatataacaattcactttaaacttttattaccacagttgctgcctcctccagaatttttgaattttaataaaaggcaaacttttgagctgcaggaaggacaatgttggttaataataaatctcaaagtcaattgtagaaaaaaaattgtcttcaaaaagaatgttgcactctgatctcttaacaaattgttacgttcaaagtttaaagtgatatattaacaaagtcacctagttatacaaacaattgtcagagaattctggatttggagggtattggggttatatgattctttcttagataatggcctctactaaataactcaagatctttctggaatgtcttctggcaggcaggtgccactgtcagcttttctccaaaaagcagccaacatcagcctcccctgtcaactcaacagttttgtatctcatattatatggactttatatgaaaatgaatattttacagtttgcacagtattattttacagaaaaggaatcagagaatctacaacatagggccccagaacaacagtttcactttgtggcttttaattattctagaattttaactgcatctcatttttctagcatggtgagaactaatatgtaactcctttgattgaaggagctcttttgtccgtacctatcagaatgttttcttgacacttccatgttggctcttctcagctttttttgtacatattttttttttctaaagagaagaaaaagttatcacaaaatgta

SEQ ID NO: 165904 - DNA, 2318 bp, Homo sapiens
  Payload ID: 12661
  Gene Symbol: PLPPR1
  Gene Name: phospholipid phosphatase related 1
  Uniprot ID: Q8TBJ4
  ENST ID: ENST00000395056
  CDS Start-End: 267-1244
aattctctaggttgcaaattgggaggattaggaacaagtaagagagatccatgcaggatggacaagaaaaaaaagttttataccaaaaattgtatttcatggcattagggcagtctactggggtaaggcactatgcagtactaggcaattagaattctattcactagctatgtgcacaagcggctcctgacctggtcattttggctgtaaaactattcatgcctggacagtttttgacggtgcagtcttgctatatggtgtgagaaatggctgtaggaaacaacactcaacgaagttattccatcatcccgtgttttatatttgttgagcttgtcatcatggctgggacagtgctgcttgcctactacttcgaatgcactgacacttttcaggtgcatatccaaggattcttctgtcaggacggagacttaatgaagccttacccagggacagaggaagaaagcttcatcacccctctggtgctctattgtgtgctggctgccaccccaactgctattatttttattggtgagatatccatgtatttcataaaatcaacaagagaatccctgattgctcaggagaaaacaattctgaccggagaatgctgttacctgaaccccttacttcgaaggatcataagattcacaggggtgtttgcatttggactttttgctactgacatttttgtaaacgccggacaagtggtcactgggcacttaacgccatacttcctgactgtgtgcaagccaaactacaccagtgcagactgccaagcgcaccaccagtttataaacaatgggaacatttgtactggggacctggaagtgatagaaaaggctcggagatcctttccctccaaacacgctgctctgagcatttactccgccttatatgccacgatgtatattacaagcacaatcaagacgaagagcagtcgactggccaagccggtgctgtgcctcggaactctctgcacagccttcctgacaggcctcaaccgggtctctgagtatcggaaccactgctcggacgtgattgctggtttcatcctgggcactgcagtggccctgtttctgggaatgtgtgtggttcataactttaaaggaacgcaaggatctccttccaaacccaagcctgaggatccccgtggagtacccctaatggctttcccaaggatagaaagccctctggaaaccttaagtgcacagaatcactctgcgtccatgaccgaagttacctgagacgactgatgtgtcacaagctgttttttaaaatcatcttccaattctatacttcaaaacacacagttgctcaatgtcaaactgtgatgacaaatattacgtttatctagttagaagctaatgttttgtacattttttgtatgaggaagtgatgtagcttgccctgattttttttttttttttttggtcagctttaatatatttatgccagaattttaaaaccaacaaaattttcttgttcaagcgtgcattgaagaaccacatttattcaatggttgacgttgttttgtgatatttgtacacaaattttcttttctcagttttataaacacagaatataacaattcactttaaacttttattaccacagttgctgcctcctccagaatttttgaattttaataaaaggcaaacttttgagctgcaggaaggacaatgttggttaataataaatctcaaagtcaattgtagaaaaaaaattgtcttcaaaaagaatgttgcactctgatctcttaacaaattgttacgttcaaagtttaaagtgatatattaacaaagtcacctagttatacaaacaattgtcagagaattctggatttggagggtattggggttatatgattctttcttagataatggcctctactaaataactcaagatctttctggaatgtcttctggcaggcaggtgccactgtcagcttttctccaaaaagcagccaacatcagcctcccctgtcaactcaacagttttgtatctcatattatatggactttatatgaaaatgaatattttacagtttgcacagtattattttacagaaaaggaatcagagaatctacaacatagggccccagaacaacagtttcactttgtggcttttaattattctagaattttaactgcatctcatttttctagcatggtgagaactaatatgtaactcctttgattgaaggagctcttttgtccgtacctatcagaatgttttcttgacacttccatgttggctcttctcagctttttttgtacatattttttttttctaaagagaagaaaaagttatcacaaaa

SEQ ID NO: 165905 - DNA, 472 bp, Homo sapiens
  Payload ID: 12661
  Gene Symbol: PLPPR1
  Gene Name: phospholipid phosphatase related 1
  ENST ID: ENST00000456287
  CDS Start-End: 164-472
cagaaagtgagccagatggagctggaatgtagaggactcgtcgtgagcggggagcccacttggtcagctcagtgaaggctctccctcagacgccaacatctacatgcggatatggaagcctggacagtttttgacggtgcagtcttgctatatggtgtgagaaatggctgtaggaaacaacactcaacgaagttattccatcatcccgtgttttatatttgttgagcttgtcatcatggctgggacagtgctgcttgcctactacttcgaatgcactgacacttttcaggtgcatatccaaggattcttctgtcaggacggagacttaatgaagccttacccagggacagaggaagaaagcttcatcacccctctggtgctctattgtgtgctggctgccaccccaactgctattatttttattggtgagatatccatgtatttcataaaatcaacaagagaatccctgatt

SEQ ID NO: 165906 - DNA, 2318 bp, Homo sapiens; identical to SEQ ID NO: 165904
  Payload ID: 12661
  Gene Symbol: PLPPR1
  Gene Name: phospholipid phosphatase related 1
  Uniprot ID: Q8TBJ4
  ENST ID: ENST00000614834
  CDS Start-End: 267-1244

SEQ ID NO: 165907 - DNA, 2495 bp, Homo sapiens; identical to SEQ ID NO: 165903
  Payload ID: 12661
  Gene Symbol: PLPPR1
  Gene Name: phospholipid phosphatase related 1
  Uniprot ID: Q8TBJ4
  ENST ID: ENST00000611695
  CDS Start-End: 440-1417

SEQ ID NO: 165908 - DNA, 472 bp, Homo sapiens; identical to SEQ ID NO: 165905
  Payload ID: 12661
  Gene Symbol: PLPPR1
  Gene Name: phospholipid phosphatase related 1
  ENST ID: ENST00000633861
  CDS Start-End: 164-472

SEQ ID NO: 165909 - DNA, 748 bp, Homo sapiens
  Payload ID: 12661
  Gene Symbol: PLPPR1
  Gene Name: phospholipid phosphatase related 1
  ENST ID: ENST00000632580
  CDS Start-End: 64-748
ggagggagtgtgctctgaggggcaagggctgctccgaagccctgctaatgtctctgtgtggccatgctgtattttcagcttgtcatcatggctgggacagtgctgcttgcctactacttcgaatgcactgacacttttcaggtgcatatccaaggattcttctgtcaggacggagacttaatgaagccttacccagggacagaggaagaaagcttcatcacccctctggtgctctattgtgtgctggctgccaccccaactgctattatttttattggtgagatatccatgtatttcataaaatcaacaagagaatccctgattgctcaggagaaaacaattctgaccggagaatgctgttacctgaaccccttacttcgaaggatcataagattcacaggggtgtttgcatttggactttttgctactgacatttttgtaaacgccggacaagtggtcactgggcacttaacgccatacttcctgactgtgtgcaagccaaactacaccagtgcagactgccaagcgcaccaccagtttataaacaatgggaacatttgtactggggacctggaagtgatagaaaaggctcggagatcctttccctccaaacacgctgctctgagcatttactccgccttatatgccacgatgtatattacaagcacaatcaagacgaagagcagtcgactggccaagccggtgctgtgcctcggaactctctgcacagccttcctgacaggcctca

SEQ ID NO: 165910 - DNA, 2727 bp, Homo sapiens
  Payload ID: 12662
  Gene Symbol: PLPPR2
  Gene Name: phospholipid phosphatase related 2
  Uniprot ID: Q96GM1
  ENST ID: ENST00000251473
  CDS Start-End: 377-1408
atgcaaatgagacgcccggaggccccgcccctccctccacctcggagtctgcgcggcgcggccaggcccggccgaccgcgtctcggtcttcgcgtctgccagcctggctggcagtccgtctgtccatcccgccgcgccggggcagtctaggcggagcgggggctcaggcggcggcggcctcgacgcgagtgagtgtcgtggttggggtgctggacccagagtgcctaccctcgcctgcctgggcctcagtttccacatctgcacaatgggggtgaccatccctgccctgctggctgccaggagcggctgtgagtcttcaggcgtggatgcagcctgggggaagccatagggcgctttcacaggcctggccttcaccatggcgggagggagaccgcatctgaagaggagtttctccatcatcccctgctttgtcttcgtggagtcggtgctgctgggcattgtgatcctgcttgcttaccgcctggagttcacggacaccttccctgtgcacacccagggattcttctgctatgacagtacctacgccaagccctacccagggcctgaggctgccagccgagtgcctcctgctcttgtctacgcactggtcactgccgggcccaccctcacgatcctgctgggagagctggcgcgtgcctttttccctgcaccaccttcagccgtcccagtcatcggggagagcaccatcgtgtctggggcctgctgccgcttcagccccccagtgcggaggctggtccgcttcctgggggtctactccttcggcctcttcaccacgaccatcttcgccaacgcggggcaggtggtgaccggcaatcccacgccacacttcctgtccgtgtgccgccccaactacacggccctgggctgcctgccaccttctccggatcggccaggtcccgaccgctttgtcactgaccagggtgcctgcgctggcagtcccagcctcgtggccgccgcgcgccgcgccttcccctgcaaggatgcggccctctgcgcctacgcggtcacctacacagcgatgtacgtgactctcgtgttccgcgtgaagggctcccgcctggtcaaaccctcgctctgcctggccttgctgtgcccggccttcctggtgggcgtggtccgcgtggccgagtaccgaaaccactggtcggacgtgctggctggcttcctgacaggggcggccatcgccacctttttggtcacctgcgttgtgcataactttcagagccggccaccctctggccgaaggctctctccctgggaggacctgggccaagcccccaccatggatagccccctcgaaaagaacccgaggtctgcaggccgcattcgacaccggcacggctcaccccatccaagtcgcagaactgcgcccgccgtggccacctgatccccagctgtgtctcctccagggccccagccatgtgttcgtcgccccgtgtgccccgtcctcgattgaggtctgagccgacgcccttgcccctgcccctacccctgccagcgcccacccccagccagggcccctcgccttcctcccctggacctggggggccaggcgggggtggtggacgtggccggaagctgctgctgcccacgcccctgctgcgggacctgtacaccctgagtggactctatccctcccccttccaccgggacaacttcagcccttacctgtttgccagccgtgaccacctgctgtgaggcccgaccacccacccagaatctgcccagtccccacttcttccctgccacgcgtgtgtgtgcgtgtgccacgtgagtgccaaagtcccctgccccccaagccagccagacccagacattagaagatggctagaaggacatttaggagacatctgcctctctggccctctgagatatcccgatgggcacaaatggaaggtgcgcacttgcccctactattgcccttttaagggccaaagcttgaccccattggccattgcctggctaatgagaacccctggttctcagaattttaaccaaaaggagttggctccaaccaatgggagccttcccctcacttcttagaatcctcctgcaagagggcaactccagccagtgttcagcgactgaacagccaataggagcccttggtttccagaatttctagagtgggtgggcatgattccagtcaatgggggaccgcccgtgtctaagcatgtgcaaaggagaggagggagatgaggtcattgtttgtcattgagtcttctctcagaatcagcgagcccagctgtagggtggggggcaggctcccccatggcagggtccttggggtaccccttttcctctcagcccctccctgtgtgcggcctctccacctctcacccactctctcctaatcccctacttaagtagggcttgccccacttcagaggttttggggttcagggtgctgtgtctccccttgcctgtgcccaggtcatcccaaacccttctgttatttattagggctgtgggaagggtttttcttctttttcttggaacctgcccctgttcttcacactgccccccatgcctcagcctcatacagatgtgccatcatggggggcatgggtggagcagaggggctccctcaccccgggcaggcaaaggcagtgggtagaggaggcactgcccccctttcctgccccctcctcatctttaataaagacctggcttctcatctttaataaagacctgtttgtaacagaa

SEQ ID NO: 165911 - DNA, 535 bp, Homo sapiens
  Payload ID: 12662
  Gene Symbol: PLPPR2
  Gene Name: phospholipid phosphatase related 2
  ENST ID: ENST00000586380
  CDS Start-End: 338-535
tctcggtcttcgcgtctgccagcctggctggcagtccgtctgtccatcccgccgcgccggggcagtctaggcggagcgggggctcaggcggcggcggcctcgacgcgagtgagtgtcgtggttggggtgctggacccagagtgcctaccctcgcctgcctgggcctcagtttccacatctgcacaatgggggtgaccatccctgccctgctggctgccaggagcggctgtgagtcttcaggcgtggatgcagcctgggggaagccatagggcgctttcacaggcacaccccctgggactcccactccctccccacctctgcaggcctggccttcaccatggcgggagggagaccgcatctgaagaggagtttctccatcatcccctgctttgtcttcgtggagggattcttctgctatgacagtacctacgccaagccctacccagggcctgaggctgccagccgagtgcctcctgctcttgtctacgcactggtcactgccgggcccaccctcacgatcctgctgggagagctg

SEQ ID NO: 165912 - DNA, 2552 bp, Homo sapiens
  Payload ID: 12662
  Gene Symbol: PLPPR2
  Gene Name: phospholipid phosphatase related 2
  ENST ID: ENST00000591608
  CDS Start-End: 265-1548
agtccgtctgtccatcccgccgcgccggggcagtctaggcggagcgggggctcaggcggcggcggcctcgacgcgagtgagtgtcgtggttggggtgctggacccagagtgcctaccctcgcctgcctgggcctcagtttccacatctgcacaatgggggtgaccatccctgccctgctggctgccaggagcggctgtgagtcttcaggcgtggatgcagcctgggggaagccatagggcgctttcacaggcctggccttcaccatggcgggagggagaccgcatctgaagaggagtttctccatcatcccctgctttgtcttcgtggagggattcttctgctatgacagtacctacgccaagccctacccagggcctgaggctgccagccgagtgcctcctgctcttgtctacgcactggtcactgccgggcccaccctcacgatcctgctgggagagctggcgcgtgcctttttccctgcaccaccttcagccgtcccagtcatcggggagagcaccatcgtgtctggggcctgctgccgcttcagccccccagtgcggaggctggtccgcttcctgggggtctactccttcggcctcttcaccacgaccatcttcgccaacgcggggcaggtggtgaccggcaatcccacgccacacttcctgtccgtgtgccgccccaactacacggccctgggctgcctgccaccttctccggatcggccaggtcccgaccgctttgtcactgaccagggtgcctgcgctggcagtcccagcctcgtggccgccgcgcgccgcgccttcccctgcaaggatgcggccctctgcgcctacgcggtcacctacacagcgatgtacgtgactctcgtgttccgcgtgaagggctcccgcctggtcaaaccctcgctctgcctggccttgctgtgcccggccttcctggtgggcgtggtccgcgtggccgagtaccgaaaccactggtcggacgtgctggctggcttcctgacaggggcggccatcgccacctttttggtcacctgcgttgtgcataactttcagagccggccaccctctggccgaaggctctctccctgggaggacctgggccaagcccccaccatggatagccccctcgaaaagttaagtgtggcgcaggaacccgaggtctgcaggccgcattcgacaccggcacggctcaccccatccaagtcgcagaactgcgcccgccgtggccacctgatccccagctgtgtctcctccagggccccagccatgtgttcgtcgccccgtgtgccccgtcctcgattgaggtctgagccgacgcccttgcccctgcccctacccctgccagcgcccacccccagccagggcccctcgccttcctcccctggacctggggggccaggcgggggtggtggacgtggccggaagctgctgctgcccacgcccctgctgcgggacctgtacaccctgagtggactctatccctcccccttccaccgggacaacttcagcccttacctgtttgccagccgtgaccacctgctgtgaggcccgaccacccacccagaatctgcccagtccccacttcttccctgccacgcgtgtgtgtgcgtgtgccacgtgagtgccaaagtcccctgccccccaagccagccagacccagacattagaagatggctagaaggacatttaggagacatctgcctctctggccctctgagatatcccgatgggcacaaatggaaggtgcgcacttgcccctactattgcccttttaagggccaaagcttgaccccattggccattgcctggctaatgagaacccctggttctcagaattttaaccaaaaggagttggctccaaccaatgggagccttcccctcacttcttagaatcctcctgcaagagggcaactccagccagtgttcagcgactgaacagccaataggagcccttggtttccagaatttctagagtgggtgggcatgattccagtcaatgggggaccgcccgtgtctaagcatgtgcaaaggagaggagggagatgaggtcattgtttgtcattgagtcttctctcagaatcagcgagcccagctgtagggtggggggcaggctcccccatggcagggtccttggggtaccccttttcctctcagcccctccctgtgtgcggcctctccacctctcacccactctctcctaatcccctacttaagtagggcttgccccacttcagaggttttggggttcagggtgctgtgtctccccttgcctgtgcccaggtcatcccaaacccttctgttatttattagggctgtgggaagggtttttcttctttttcttggaacctgcccctgttcttcacactgccccccatgcctcagcctcatacagatgtgccatcatggggggcatgggtggagcagaggggctccctcaccccgggcaggcaaaggcagtgggtagaggaggcactgcccccctttcctgccccctcctcatctttaataaagacctggcttctcatctttaataaagacctgtttgtaac

SEQ ID NO: 165913 - DNA, 633 bp, Homo sapiens
  Payload ID: 12662
  Gene Symbol: PLPPR2
  Gene Name: phospholipid phosphatase related 2
  ENST ID: ENST00000591329
  CDS Start-End: 380-633
acctcggagtctgcgcggcgcggccaggcccggccgaccgcgtctcggtcttcgcgtctgccagcctggctggcagtccgtctgtccatcccgccgcgccggggcagtctaggcggagcgggggctcaggcggcggcggcctcgacgcgagtgagtgtcgtggttggggtgctggacccagagtgcctaccctcgcctgcctgggcctcagtttccacatctgcacaatgggggtgaccatccctgccctgctggctgccaggagcggctgtgagtcttcaggcgtggatgcagcctgggggaagccatagggcgctttcacaggcacaccccctgggactcccactccctccccacctctgcaggcctggccttcaccatggcgggagggagaccgcatctgaagaggagtttctccatcatcccctgctttgtcttcgtggagtcggtgctgctgggcattgtgatcctgcttgcttaccgcctggagttcacggacaccttccctgtgcacacccagggattcttctgctatgacagtacctacgccaagccctacccagggcctgaggctgccagccgagtgcctcctgctcttgtctacgcactggtcactgccgggcccaccctcac

SEQ ID NO: 165914 - DNA, 2387 bp, Homo sapiens
  Payload ID: 12663
  Gene Symbol: PLPPR3
  Gene Name: phospholipid phosphatase related 3
  ENST ID: ENST00000359894
  CDS Start-End: 65-2305
gaggagacgcgctttgtgctgggcgccggccgcgccagccacggcctgcggcgcccgcggcaccatgatctccaccaaggagaagaacaagatcccgaaggacagcatgacgcttctgccctgcttctacttcgtggagctgcccatagtggcttcttccatcgtatccttgtacttcctggagctgaccgacctcttcaagccggccaaggtgggcttccagtgctatgaccgcactctctccatgccctacgtggagaccaacgaggagctcatcccgctgctgatgctgctcagcttggccttcgcggcccctgccgcctcgatcatggtggccgagggcatgttgtactgtctgcagtcccggctgtggggccgtgccggggggcccgccggggcggagggcagcatcaacgccggcggctgcaacttcaactccttcctgcggcgtacggtgcggtttgtgggtgtccacgtgttcggcctgtgtgccacagccctggtgacggacgtgatccagctggccacgggttaccacactcccttcttcctcaccgtctgcaagcccaactacactctcctgggcacgtcctgcgaggtcaacccctacatcacgcaggacatctgctccggccacgacatccacgccatcctgtctgcacggaagaccttcccgtcccagcacgccacgctgtcagccttcgccgcggtctatgtgtcggtgagtccggcccctcactgcccttcccaggccctcttgctgacccgtggggagccctccctgaccccaacccccatgccccagatgtacttcaactcggtcatctcggacaccaccaagctgctgaagcccatcctggtcttcgcctttgccatcgccgcgggcgtatgcgggctcacgcagatcacgcagtaccgcagccaccctgtggacgtgtatgccggcttcctcatcggggcgggcatcgctgcctacctggcctgccacgcggtgggcaacttccaggccccacctgcagagaagcccgcggccccggcccccgccaaggacgcgctgcgggccctgacgcagcggggccacgactcggtttatcagcagaataagtcggtgagcaccgacgagctggggcccccagggcggctggagggcgcgccccggcccgtggcccgcgagaagacctcgctgggcagcctgaagcgcgccagcgtggacgtggacctgctggccccgcgcagccccatggccaaggagaacatggtgaccttcagccacacgctgcccagggccagcgcgccctcgctggacgaccccgcgcgccgccacatgaccatccacgtgccgctggacgcctcgcgctccaagcagctcatcagcgagtggaagcagaagagcctggagggccgcggcctggggctgcccgacgacgccagccccgggcacctgcgcgcgcccgccgaacccatggcggaggaggaggaagaggaggaggacgaagaggaagaggaggaggaggaagaggaggaggacgagggcccggccccgccctcgctctaccccaccgtgcaggcgcggccggggctggggcctcgggtcatcctcccaccgcgcgcggggccgccgccgctggtgcacatcccggaggagggcgcgcagacgggggccggcctgtcccccaaaagcggcgccggggtgcgcgccaagtggctcatgatggccgagaagagcggggcggcagtggccaaccctccgcggctgctgcaggtcatcgccatgtccaaggctccgggcgcgccgggccccaaggcggccgagacggcgtcgtcgtccagcgccagctccgactcctcgcagtaccggtcgccgtcggaccgcgactccgccagcatcgtgaccatcgacgcgcacgcgccgcaccaccccgtggtgcacctgtcggccggcggcgcgccctgggagtggaaggcggcgggcggcggggccaaggcggaggccgacggcggctacgagctgggggacctggcgcgcggcttccgcggcggggccaagcccccgggcgtgtcccccggctcgtcggtcagcgacgtggaccaggaggagccgcggttcggggccgtggccaccgtcaacctggccacgggcgaggggctgcccccgctgggcgcggccgatggggcgctgggcccgggcagccgggagtccacgctgcggcgccacgcgggcggcctggggctggcggagcgcgaggcggaggcggaggccgagggctacttccgcaagatgcaggcgcgccgcttccccgactagcgcggcggggccgggggcgggcggggggcgggccgagggcgcgggcggccgcgcggatgctcaataaagcggcagaaaccga

SEQ ID NO: 165915 - DNA, 2328 bp, Homo sapiens
  Payload ID: 12663
  Gene Symbol: PLPPR3
  Gene Name: phospholipid phosphatase related 3
  Uniprot ID: Q6T4P5
  ENST ID: ENST00000520876
  CDS Start-End: 90-2246
tcccggctcccggccccgccccacggaggagacgcgctttgtgctgggcgccggccgcgccagccacggcctgcggcgcccgcggcaccatgatctccaccaaggagaagaacaagatcccgaaggacagcatgacgcttctgccctgcttctacttcgtggagctgcccatagtggcttcttccatcgtatccttgtacttcctggagctgaccgacctcttcaagccggccaaggtgggcttccagtgctatgaccgcactctctccatgccctacgtggagaccaacgaggagctcatcccgctgctgatgctgctcagcttggccttcgcggcccctgccgcctcgatcatggtggccgagggcatgttgtactgtctgcagtcccggctgtggggccgtgccggggggcccgccggggcggagggcagcatcaacgccggcggctgcaacttcaactccttcctgcggcgtacggtgcggtttgtgggtgtccacgtgttcggcctgtgtgccacagccctggtgacggacgtgatccagctggccacgggttaccacactcccttcttcctcaccgtctgcaagcccaactacactctcctgggcacgtcctgcgaggtcaacccctacatcacgcaggacatctgctccggccacgacatccacgccatcctgtctgcacggaagaccttcccgtcccagcacgccacgctgtcagccttcgccgcggtctatgtgtcgatgtacttcaactcggtcatctcggacaccaccaagctgctgaagcccatcctggtcttcgcctttgccatcgccgcgggcgtatgcgggctcacgcagatcacgcagtaccgcagccaccctgtggacgtgtatgccggcttcctcatcggggcgggcatcgctgcctacctggcctgccacgcggtgggcaacttccaggccccacctgcagagaagcccgcggccccggcccccgccaaggacgcgctgcgggccctgacgcagcggggccacgactcggtttatcagcagaataagtcggtgagcaccgacgagctggggcccccagggcggctggagggcgcgccccggcccgtggcccgcgagaagacctcgctgggcagcctgaagcgcgccagcgtggacgtggacctgctggccccgcgcagccccatggccaaggagaacatggtgaccttcagccacacgctgcccagggccagcgcgccctcgctggacgaccccgcgcgccgccacatgaccatccacgtgccgctggacgcctcgcgctccaagcagctcatcagcgagtggaagcagaagagcctggagggccgcggcctggggctgcccgacgacgccagccccgggcacctgcgcgcgcccgccgaacccatggcggaggaggaggaagaggaggaggacgaagaggaagaggaggaggaggaagaggaggaggacgagggcccggccccgccctcgctctaccccaccgtgcaggcgcggccggggctggggcctcgggtcatcctcccaccgcgcgcggggccgccgccgctggtgcacatcccggaggagggcgcgcagacgggggccggcctgtcccccaaaagcggcgccggggtgcgcgccaagtggctcatgatggccgagaagagcggggcggcagtggccaaccctccgcggctgctgcaggtcatcgccatgtccaaggctccgggcgcgccgggccccaaggcggccgagacggcgtcgtcgtccagcgccagctccgactcctcgcagtaccggtcgccgtcggaccgcgactccgccagcatcgtgaccatcgacgcgcacgcgccgcaccaccccgtggtgcacctgtcggccggcggcgcgccctgggagtggaaggcggcgggcggcggggccaaggcggaggccgacggcggctacgagctgggggacctggcgcgcggcttccgcggcggggccaagcccccgggcgtgtcccccggctcgtcggtcagcgacgtggaccaggaggagccgcggttcggggccgtggccaccgtcaacctggccacgggcgaggggctgcccccgctgggcgcggccgatggggcgctgggcccgggcagccgggagtccacgctgcggcgccacgcgggcggcctggggctggcggagcgcgaggcggaggcggaggccgagggctacttccgcaagatgcaggcgcgccgcttccccgactagcgcggcggggccgggggcgggcggggggcgggccgagggcgcgggcggccgcgcggatgctcaataaagcggcagaaaccga

SEQ ID NO: 165916 - DNA, 362 bp, Homo sapiens
  Payload ID: 12663
  Gene Symbol: PLPPR3
  Gene Name: phospholipid phosphatase related 3
  ENST ID: ENST00000517665
  CDS Start-End: 1-362
gacatccacgccatcctgtctgcacggaagaccttcccgtcccagcacgccacgctgtcagccttcgccgcggtctatgtgtcgctgctgaagcccatcctggtcttcgcctttgccatcgccgcgggcgtatgcgggctcacgcagatcacgcagtaccgcagccaccctgtggacgtgtatgccggcttcctcatcggggcgggcatcgctgcctacctggcctgccacgcggtgggcaacttccaggccccacctgcagagaagcccgcggccccggcccccgccaaggacgcgctgcgggccctgacgcagcggggccacgactcggtttatcagcagaataagtcggtgagcaccga

SEQ ID NO: 165917 - DNA, 782 bp, Homo sapiens
  Payload ID: 12663
  Gene Symbol: PLPPR3
  Gene Name: phospholipid phosphatase related 3
  ENST ID: ENST00000519502
  CDS Start-End: 397-782
acggaggagacgcgctttgtgctgggcgccggccgcgccaggtgaggggctgtggggctgggggcgcggacccagtctcctccgccgcccggaaccccagttctcccggatgccccccaccaccacgcggggactggctcccgcccggagaccccccgccctcctcggcgatcccggccccgaccccccgatcccgggtgtaggggcgcccggaagccgcgtgctgggccggggcgcggggaggccacgcggacgccgctctctgcagcctcagtttccccgaccgcccctcccccgccggcgccggccaccgtgtctcccccgggctccgcctgcgcgcccccctccagcgccgctttctcccctccagccacggcctgcggcgcccgcggcaccatgatctccaccaaggagaagaacaagatcccgaaggacagcatgacgcttctgccctgcttctacttcgtggagctgcccatagtggcttcttccatcgtatccttgtacttcctggagctgaccgacctcttcaagccggccaaggtgggcttccagtgctatgaccgcactctctccatgccctacgtggagaccaacgaggagctcatcccgctgctgatgctgctcagcttggccttcgcggcccctgccgcctcgatcatggtggccgagggcatgttgtactgtctgcagtcccggctgtggggccgtgccggggggcccgccggggcggagggcagcatcaacgccggcggctgcaacttcaactccttcctgcggcg

SEQ ID NO: 165918 - DNA, 164 bp, Homo sapiens
  Payload ID: 12663
  Gene Symbol: PLPPR3
  Gene Name: phospholipid phosphatase related 3
  ENST ID: ENST00000633654
  CDS Start-End: 90-164
tcccggctcccggccccgccccacggaggagacgcgctttgtgctgggcgccggccgcgccagccacggcctgcggcgcccgcggcaccatgatctccaccaaggagaagaacaagatcccgaaggacagcatgacgcttctgccctgcttctacttcgtggag

SEQ ID NO: 165919 - DNA, 139 bp, Homo sapiens
  Payload ID: 12663
  Gene Symbol: PLPPR3
  Gene Name: phospholipid phosphatase related 3
  ENST ID: ENST00000632433
  CDS Start-End: 65-139
gaggagacgcgctttgtgctgggcgccggccgcgccagccacggcctgcggcgcccgcggcaccatgatctccaccaaggagaagaacaagatcccgaaggacagcatgacgcttctgccctgcttctacttcgtggag

SEQ ID NO: 165920 - DNA, 471 bp, Homo sapiens
  Payload ID: 12663
  Gene Symbol: PLPPR3
  Gene Name: phospholipid phosphatase related 3
  ENST ID: ENST00000633312
  CDS Start-End: 397-471
acggaggagacgcgctttgtgctgggcgccggccgcgccaggtgaggggctgtggggctgggggcgcggacccagtctcctccgccgcccggaaccccagttctcccggatgccccccaccaccacgcggggactggctcccgcccggagaccccccgccctcctcggcgatcccggccccgaccccccgatcccgggtgtaggggcgcccggaagccgcgtgctgggccggggcgcggggaggccacgcggacgccgctctctgcagcctcagtttccccgaccgcccctcccccgccggcgccggccaccgtgtctcccccgggctccgcctgcgcgcccccctccagcgccgctttctcccctccagccacggcctgcggcgcccgcggcaccatgatctccaccaaggagaagaacaagatcccgaaggacagcatgacgcttctgccctgcttctacttcgtggag

SEQ ID NO: 165921 - DNA, 4505 bp, Homo sapiens
  Payload ID: 12664
  Gene Symbol: PLPPR4
  Gene Name: phospholipid phosphatase related 4
  ENST ID: ENST00000370184
  CDS Start-End: 108-1925
cttaagtatctgtttagaagtttaggaattttctatactgtcttcttgaaatcaacttagagaaaatgaacacaatagattttaagatcttaattcactaatgtttaatgaatatgtttgatgctgacacaaccaccaacttggtaacaatttctttcattttgcctataggtgttcatgtatttggattatgctctacagctctcattacagatatcatacagctgtccacaggatatcaagcaccttactttctgactgtgtgcaaaccaaactatacctctctgaatgtatcttgcaaagaaaattcctacattgtggaagatatttgctcaggatctgacctcacagttatcaacagtggcagaaagtccttcccttctcaacatgcaacccttgctgcctttgcagctgtgtatgtttcgatgtacttcaattccacattaacggattcctctaagcttctgaaacctctcttggtcttcacatttatcatctgtggaataatctgcgggctaacacggataactcagtataagaaccacccagttgatgtctattgtggctttttaataggaggaggaattgcactgtacttgggcttgtatgctgtggggaatttcctgcccagtgatgagagtatgtttcagcacagagacgccctcaggtctctgacagacctcaatcaagatcccaaccgacttttatctgctaaaaatggtagcagcagtgatggaattgctcatacagaaggcatcctcaaccgaaaccacagagatgctagctctctgacaaatctcaaaagagcaaatgctgatgtggaaatcattactccacggagccccatggggaaggagaacatggttaccttcagcaataccttgccgcgagccaataccccatctgtagaagaccctgtcagaagaaatgcgagcattcatgcctctatggattccgctcgatcaaagcagctcctcacccagtggaagaataagaatgaaagtcgaaagttgtccttgcaagttatagagcctgagcctgggcagtcaccacccagatccatagaaatgaggtcaagctcagagccatcgagggtaggggtgaatggagaccaccatggtcctggcaatcagtacctcaaaatccagcctggcgctgtccccggatgtaacaacagcatgcctggagggccaagagtgtccattcagtcccgtcctgggtcctcacagttggtgcacatccctgaggagactcaggaaaacataagcacctcccccaaaagcagctctgctcgggccaagtggttaaaagctgctgaaaagactgtggcctgtaacagaagcaacagccagccccgaatcatgcaagtcatagccatgtccaagcagcagggtgtcctccaaagcagccccaagaacactgaaggcagcacggtctcctgcactggctccatccgctataaaaccttgacagaccatgagcccagtgggatagtgagggttgaggctcacccagagaacaacaggcccatcatacagatcccgtccactgaaggtgaaggcagtggctcctggaagtggaaagcccctgaaaagggcagccttcgccaaacttacgagctcaacgatctcaacagggactcagaaagctgtgagtctctgaaagacagctttggttctggagatcgcaagagaagcaacattgatagcaatgagcatcaccaccacggaattaccaccatccgcgtcaccccagtagagggcagcgaaattggctcagagacgctgtccatttcttcttcccgcgactccaccctgcggagaaagggcaatatcattctaatccctgaaagaagcaacagccccgaaaacactagaaatatcttctacaaaggaacctcccccacacgggcttataaggattgagtgatgtccattccatcattagggctactcgcaaaagaccatatgttgattctacctgtgttctgttccagcgaattgggaagtctcaccaagctagattgtctaccatcagcccagaactctgtaacttttcagaactgctatactcaaacttgcagatctcacatcaaggagagggaaaagcacaatgcaagaacctaactaacgtgatgatatgaagagttttcttaagacctgtcgtcaaacttaaaaggttttgcagagggcagtatcaaaagaaagtggttttcttcaaatgtatactattttacttcctgaatgtgccaactttggggatttttctttatagtgagctgtgggaacccagaacacacacgttttccctacagcagaggccatgcagtattatatattcattttgcagaatctgcacctacagctcaatacgggtggtgctgattattatagtacatataccatgtaaactctcaaactctatttagctgtgaaatagtggtgtgcaattccttgttaaagaaatgctactttattaagaagatgctggctgctttgtgttagaataggacaccccgcagcttctctgtagtggctctgtcacagtcaaaaaatgaaaaggtttttgtgcgtttcttcaaaattctgctttcttcaacatcaaaaattgtgtagaaatattttcagtgaaagggaataactagtacttttctgcatagtttttcttctgcttactttttatttaagtataggtactgctaatgaatctgttttcttagtgagtaaatttgcataattttataaatattattttagagaatcttttgaaattgttgtgatcatattttgctttctatggcttctccttaacttattgattaattttttgaagttatagatatgttctcctattttaaaagcaaaaataacaattgacattccttgagcaaaatatactgctgtgaatttgcaaacaagaaatctgagccaaaacttgacattgtgggttacattgccagaaatgttggtcaagtttgcccttagatgtctacaactagctggcataggttgccatcttaacaagtaatctaaaagtcccattcggttctacattattaactttttttttctatatcctgatgaccagtaaattagagccacactggttaagtttgactcgtctctaaaacgtttttgttaattggacaccaagaggaagaatctgaaaaaaaaatgcatgttggtaagtaaaagtatctcacggtacaaattaagaatgactttcttcaaaatatctgaataggtgcagttttagtttaacatgcaaacaaccattgttgctacctatcctgaatcaagccttgagcctaaatcaaagcaaaccaataccattgataagaagaagataaaaacaaaatattttggagtgttttccaacttaaagtatgaagacatactcagttcttggaacttagtattaaaccttttttatgccatttcataagaattccgatatatacttgatgattgccaaggggatgaaaggaaacaacagagatggttgatctgatcttagctcactttccaataacagaaggagttgtttacagatgaatagtatcacatcattatcaatttccacatgaaaaaggtggagctttctagaaaaaccaacctctaaggcattaggaatttagctgaaaccagcagaattgaaaactctggcaataaaacatggactcaaccatatcccttctggcaatttccttctcagagaggggagtgggaataaaatgttgccttccccacttctcaccaccaccgccatcatgacgctcatactggcttttgcctgtttgtagaggaaaaggtgggctggttttagtactctgaaggacaaaaacaagcaaacaaaaacccctgctgcagcatttcaggtgcagtatgatatttcctaatctttcctatttcttaacaaaagattttaaagtacttctctagtcattgaagtttttttttctttacataaatattgatatattctttttctactcaaagtgccaaaggctacagtttttaatgacttaacaaattgtaccacattgttaaggacatataatgatagacactagaactcagacctctgcatgtatatttgataacatgtcttttgtaaaacaaaaattacaaaaaaatttgtttacattccactggtaccttaatttaaaataaatcagactaaaaggtggtatctcttcttagtgttctatttatcttatttgctaatgggagcacttcttcctttgttaggctgtgctttactgataaaaccaagtattgaataaagagagttaattatctttttaaagtaaataaaattatgaaaatatatatagtatatataaagtactgtgtttaaaaaaatgttatgcaatgttttccaaactgataaagtttgtaaagtgctataaatgtattttgttaagtacagataaaagctattgtgtgagtatattgtgctaaaatcatagaaataaagattagatttcttcatcaaaattggaa

SEQ ID NO: 165922 - DNA, 5369 bp, Homo sapiens
  Payload ID: 12664
  Gene Symbol: PLPPR4
  Gene Name: phospholipid phosphatase related 4
  Uniprot ID: Q7Z2D5
  ENST ID: ENST00000370185
  CDS Start-End: 498-2789
gagctgtcattcctgggtagcaacaagctgtcagttaatgcctacctcagcctacttttcagtatgggatccaagatctcatttcgtggaggtaggggttggttttcttgctatgggtcagcgcgctggagcagggcttctgatccttagcattctttaatagcattcctagagtgacctaggaggctccccaggaggagactaggtggcttagctcctcagcctaactactgcagaaaccaggagtgcgtcctccttttcggattcttgacgtcaagctccgacagccttggagcgtcgcaagggcggtagagagctgagggagggtgacagggaggggaagccattgcagcaacagcttggaggagggagctggacgtcgtctctcgccagaaaaacggggagcaggagccagactaggggaggaagaggactggcccgctcagggaatagctgggttgctgcaaaaaggggcggggagaaggcgggggcgctgcatgcagcgcgctggctccagcggtggccgcggggaatgtgacatcagcggcgccgggcgcttggggctggaggaggcagctcgcctcagctgcgctgtgcacacctcgcccgggggaggacgcagacccgggcaggcggcagggatgtcggcgaaggagaggccaaagggcaaagtgatcaaggacagcgtcaccctcctgccctgcttttatttcgtcgagttgcctatattggcatcatcggtggttagcctctatttcctcgaactcacagatgtcttcaaacctgtgcactctggatttagctgctatgaccggagtcttagcatgccgtacattgaaccaacccaggaggcaattccattcctcatgttgcttagcttggcttttgctggacctgcaattacgattatggtaggagaaggaattctctactgttgcctctccaaaagaagaaatggggtcggactagagcccaacattaatgctggaggctgcaacttcaattccttcctcagacgagctgtcagattcgttggtgttcatgtatttggattatgctctacagctctcattacagatatcatacagctgtccacaggatatcaagcaccttactttctgactgtgtgcaaaccaaactatacctctctgaatgtatcttgcaaagaaaattcctacattgtggaagatatttgctcaggatctgacctcacagttatcaacagtggcagaaagtccttcccttctcaacatgcaacccttgctgcctttgcagctgtgtatgtttcgatgtacttcaattccacattaacggattcctctaagcttctgaaacctctcttggtcttcacatttatcatctgtggaataatctgcgggctaacacggataactcagtataagaaccacccagttgatgtctattgtggctttttaataggaggaggaattgcactgtacttgggcttgtatgctgtggggaatttcctgcccagtgatgagagtatgtttcagcacagagacgccctcaggtctctgacagacctcaatcaagatcccaaccgacttttatctgctaaaaatggtagcagcagtgatggaattgctcatacagaaggcatcctcaaccgaaaccacagagatgctagctctctgacaaatctcaaaagagcaaatgctgatgtggaaatcattactccacggagccccatggggaaggagaacatggttaccttcagcaataccttgccgcgagccaataccccatctgtagaagaccctgtcagaagaaatgcgagcattcatgcctctatggattccgctcgatcaaagcagctcctcacccagtggaagaataagaatgaaagtcgaaagttgtccttgcaagttatagagcctgagcctgggcagtcaccacccagatccatagaaatgaggtcaagctcagagccatcgagggtaggggtgaatggagaccaccatggtcctggcaatcagtacctcaaaatccagcctggcgctgtccccggatgtaacaacagcatgcctggagggccaagagtgtccattcagtcccgtcctgggtcctcacagttggtgcacatccctgaggagactcaggaaaacataagcacctcccccaaaagcagctctgctcgggccaagtggttaaaagctgctgaaaagactgtggcctgtaacagaagcaacagccagccccgaatcatgcaagtcatagccatgtccaagcagcagggtgtcctccaaagcagccccaagaacactgaaggcagcacggtctcctgcactggctccatccgctataaaaccttgacagaccatgagcccagtgggatagtgagggttgaggctcacccagagaacaacaggcccatcatacagatcccgtccactgaaggtgaaggcagtggctcctggaagtggaaagcccctgaaaagggcagccttcgccaaacttacgagctcaacgatctcaacagggactcagaaagctgtgagtctctgaaagacagctttggttctggagatcgcaagagaagcaacattgatagcaatgagcatcaccaccacggaattaccaccatccgcgtcaccccagtagagggcagcgaaattggctcagagacgctgtccatttcttcttcccgcgactccaccctgcggagaaagggcaatatcattctaatccctgaaagaagcaacagccccgaaaacactagaaatatcttctacaaaggaacctcccccacacgggcttataaggattgagtgatgtccattccatcattagggctactcgcaaaagaccatatgttgattctacctgtgttctgttccagcgaattgggaagtctcaccaagctagattgtctaccatcagcccagaactctgtaacttttcagaactgctatactcaaacttgcagatctcacatcaaggagagggaaaagcacaatgcaagaacctaactaacgtgatgatatgaagagttttcttaagacctgtcgtcaaacttaaaaggttttgcagagggcagtatcaaaagaaagtggttttcttcaaatgtatactattttacttcctgaatgtgccaactttggggatttttctttatagtgagctgtgggaacccagaacacacacgttttccctacagcagaggccatgcagtattatatattcattttgcagaatctgcacctacagctcaatacgggtggtgctgattattatagtacatataccatgtaaactctcaaactctatttagctgtgaaatagtggtgtgcaattccttgttaaagaaatgctactttattaagaagatgctggctgctttgtgttagaataggacaccccgcagcttctctgtagtggctctgtcacagtcaaaaaatgaaaaggtttttgtgcgtttcttcaaaattctgctttcttcaacatcaaaaattgtgtagaaatattttcagtgaaagggaataactagtacttttctgcatagtttttcttctgcttactttttatttaagtataggtactgctaatgaatctgttttcttagtgagtaaatttgcataattttataaatattattttagagaatcttttgaaattgttgtgatcatattttgctttctatggcttctccttaacttattgattaattttttgaagttatagatatgttctcctattttaaaagcaaaaataacaattgacattccttgagcaaaatatactgctgtgaatttgcaaacaagaaatctgagccaaaacttgacattgtgggttacattgccagaaatgttggtcaagtttgcccttagatgtctacaactagctggcataggttgccatcttaacaagtaatctaaaagtcccattcggttctacattattaactttttttttctatatcctgatgaccagtaaattagagccacactggttaagtttgactcgtctctaaaacgtttttgttaattggacaccaagaggaagaatctgaaaaaaaaatgcatgttggtaagtaaaagtatctcacggtacaaattaagaatgactttcttcaaaatatctgaataggtgcagttttagtttaacatgcaaacaaccattgttgctacctatcctgaatcaagccttgagcctaaatcaaagcaaaccaataccattgataagaagaagataaaaacaaaatattttggagtgttttccaacttaaagtatgaagacatactcagttcttggaacttagtattaaaccttttttatgccatttcataagaattccgatatatacttgatgattgccaaggggatgaaaggaaacaacagagatggttgatctgatcttagctcactttccaataacagaaggagttgtttacagatgaatagtatcacatcattatcaatttccacatgaaaaaggtggagctttctagaaaaaccaacctctaaggcattaggaatttagctgaaaccagcagaattgaaaactctggcaataaaacatggactcaaccatatcccttctggcaatttccttctcagagaggggagtgggaataaaatgttgccttccccacttctcaccaccaccgccatcatgacgctcatactggcttttgcctgtttgtagaggaaaaggtgggctggttttagtactctgaaggacaaaaacaagcaaacaaaaacccctgctgcagcatttcaggtgcagtatgatatttcctaatctttcctatttcttaacaaaagattttaaagtacttctctagtcattgaagtttttttttctttacataaatattgatatattctttttctactcaaagtgccaaaggctacagtttttaatgacttaacaaattgtaccacattgttaaggacatataatgatagacactagaactcagacctctgcatgtatatttgataacatgtcttttgtaaaacaaaaattacaaaaaaatttgtttacattccactggtaccttaatttaaaataaatcagactaaaaggtggtatctcttcttagtgttctatttatcttatttgctaatgggagcacttcttcctttgttaggctgtgctttactgataaaaccaagtattgaataaagagagttaattatctttttaaagtaaataaaattatgaaaatatatatagtatatataaagtactgtgtttaaaaaaatgttatgcaatgttttccaaactgataaagtttgtaaagtgctataaatgtattttgttaagtacagataaaagctattgtgtgagtatattgtgctaaaatcatagaaataaagattagatttcttcatcaaaattggaa

SEQ ID NO: 165923 - DNA, 4846 bp, Homo sapiens
  Payload ID: 12664
  Gene Symbol: PLPPR4
  Gene Name: phospholipid phosphatase related 4
  ENST ID: ENST00000457765
  CDS Start-End: 159-2276
gaagccattgcagcaacagcttggaggagggagctggacgtcgtctctcgccagaaaaacggggagcaggagccagactaggggaggaagaggactggcccgctcagggaatagctgggttgctgcaaaaaggggcggggagaaggcgggggcgctgcatgcagcgcgctggctccagcggtggccgcggggaatgtgacatcagcggcgccgggcgcttggggctggaggaggcagctcgcctcagctgcgctgtgcacacctcgcccgggggaggacgcagacccgggcaggcggcagggatgtcggcgaaggagaggccaaagggcaaagtgatcaaggacagcgtcaccctcctgccctgcttttatttcgtcgagttgcctatattggcatcatcggtggttagcctctatttcctcgaactcacagatgtcttcaaacctgtgcactctggatttagctgctatgaccggagtcttagcatgccgtacattgaaccaacccaggaggcaattccattcctcatgttgcttagcttggcttttgctggacctgcaattacgattatggtaggagaaggaattctctactgttgcctctccaaaagaagaaatggggtcggactagagcccaacattaatgctggaggctgcaacttcaattccttcctcagacgagctgtcagattcgttggtgttcatgtatttggattatgctctacagctctcattacagatatcatacagctgtccacaggatatcaagcaccttactttctgactgtgtgcaaaccaaactatacctctctgaatgtatcttgcaaagaaaattcctacattgtggaagatatttgctcaggatctgacctcacagttatcaacagtggcagaaagtccttcccttctcaacatgcaacccttgctgcctttgcagctgtgtatgtttcgggcttgtatgctgtggggaatttcctgcccagtgatgagagtatgtttcagcacagagacgccctcaggtctctgacagacctcaatcaagatcccaaccgacttttatctgctaaaaatggtagcagcagtgatggaattgctcatacagaaggcatcctcaaccgaaaccacagagatgctagctctctgacaaatctcaaaagagcaaatgctgatgtggaaatcattactccacggagccccatggggaaggagaacatggttaccttcagcaataccttgccgcgagccaataccccatctgtagaagaccctgtcagaagaaatgcgagcattcatgcctctatggattccgctcgatcaaagcagctcctcacccagtggaagaataagaatgaaagtcgaaagttgtccttgcaagttatagagcctgagcctgggcagtcaccacccagatccatagaaatgaggtcaagctcagagccatcgagggtaggggtgaatggagaccaccatggtcctggcaatcagtacctcaaaatccagcctggcgctgtccccggatgtaacaacagcatgcctggagggccaagagtgtccattcagtcccgtcctgggtcctcacagttggtgcacatccctgaggagactcaggaaaacataagcacctcccccaaaagcagctctgctcgggccaagtggttaaaagctgctgaaaagactgtggcctgtaacagaagcaacagccagccccgaatcatgcaagtcatagccatgtccaagcagcagggtgtcctccaaagcagccccaagaacactgaaggcagcacggtctcctgcactggctccatccgctataaaaccttgacagaccatgagcccagtgggatagtgagggttgaggctcacccagagaacaacaggcccatcatacagatcccgtccactgaaggtgaaggcagtggctcctggaagtggaaagcccctgaaaagggcagccttcgccaaacttacgagctcaacgatctcaacagggactcagaaagctgtgagtctctgaaagacagctttggttctggagatcgcaagagaagcaacattgatagcaatgagcatcaccaccacggaattaccaccatccgcgtcaccccagtagagggcagcgaaattggctcagagacgctgtccatttcttcttcccgcgactccaccctgcggagaaagggcaatatcattctaatccctgaaagaagcaacagccccgaaaacactagaaatatcttctacaaaggaacctcccccacacgggcttataaggattgagtgatgtccattccatcattagggctactcgcaaaagaccatatgttgattctacctgtgttctgttccagcgaattgggaagtctcaccaagctagattgtctaccatcagcccagaactctgtaacttttcagaactgctatactcaaacttgcagatctcacatcaaggagagggaaaagcacaatgcaagaacctaactaacgtgatgatatgaagagttttcttaagacctgtcgtcaaacttaaaaggttttgcagagggcagtatcaaaagaaagtggttttcttcaaatgtatactattttacttcctgaatgtgccaactttggggatttttctttatagtgagctgtgggaacccagaacacacacgttttccctacagcagaggccatgcagtattatatattcattttgcagaatctgcacctacagctcaatacgggtggtgctgattattatagtacatataccatgtaaactctcaaactctatttagctgtgaaatagtggtgtgcaattccttgttaaagaaatgctactttattaagaagatgctggctgctttgtgttagaataggacaccccgcagcttctctgtagtggctctgtcacagtcaaaaaatgaaaaggtttttgtgcgtttcttcaaaattctgctttcttcaacatcaaaaattgtgtagaaatattttcagtgaaagggaataactagtacttttctgcatagtttttcttctgcttactttttatttaagtataggtactgctaatgaatctgttttcttagtgagtaaatttgcataattttataaatattattttagagaatcttttgaaattgttgtgatcatattttgctttctatggcttctccttaacttattgattaattttttgaagttatagatatgttctcctattttaaaagcaaaaataacaattgacattccttgagcaaaatatactgctgtgaatttgcaaacaagaaatctgagccaaaacttgacattgtgggttacattgccagaaatgttggtcaagtttgcccttagatgtctacaactagctggcataggttgccatcttaacaagtaatctaaaagtcccattcggttctacattattaactttttttttctatatcctgatgaccagtaaattagagccacactggttaagtttgactcgtctctaaaacgtttttgttaattggacaccaagaggaagaatctgaaaaaaaaatgcatgttggtaagtaaaagtatctcacggtacaaattaagaatgactttcttcaaaatatctgaataggtgcagttttagtttaacatgcaaacaaccattgttgctacctatcctgaatcaagccttgagcctaaatcaaagcaaaccaataccattgataagaagaagataaaaacaaaatattttggagtgttttccaacttaaagtatgaagacatactcagttcttggaacttagtattaaaccttttttatgccatttcataagaattccgatatatacttgatgattgccaaggggatgaaaggaaacaacagagatggttgatctgatcttagctcactttccaataacagaaggagttgtttacagatgaatagtatcacatcattatcaatttccacatgaaaaaggtggagctttctagaaaaaccaacctctaaggcattaggaatttagctgaaaccagcagaattgaaaactctggcaataaaacatggactcaaccatatcccttctggcaatttccttctcagagaggggagtgggaataaaatgttgccttccccacttctcaccaccaccgccatcatgacgctcatactggcttttgcctgtttgtagaggaaaaggtgggctggttttagtactctgaaggacaaaaacaagcaaacaaaaacccctgctgcagcatttcaggtgcagtatgatatttcctaatctttcctatttcttaacaaaagattttaaagtacttctctagtcattgaagtttttttttctttacataaatattgatatattctttttctactcaaagtgccaaaggctacagtttttaatgacttaacaaattgtaccacattgttaaggacatataatgatagacactagaactcagacctctgcatgtatatttgataacatgtcttttgtaaaacaaaaattacaaaaaaatttgtttacattccactggtaccttaatttaaaataaatcagactaaaaggtggtatctcttcttagtgttctatttatcttatttgctaatgggagcacttcttcctttgttaggctgtgctttactgataaaaccaagtattgaataaagagagttaattatctttttaaagtaaataaaattatgaaaatatatatagtatatataaagtactgtgtttaaaaaaatgttatgcaatgttttccaaactgataaagtttgtaaagtgctataaatgtattttgttaagtacagataaaagctattgtgtgagtatattgtgctaaaatcatagaaataaagattagatttcttcatc

SEQ ID NO: 165924 - DNA, 3288 bp, Homo sapiens
  Payload ID: 12665
  Gene Symbol: PLPPR5
  Gene Name: phospholipid phosphatase related 5
  Uniprot ID: Q32ZL2
  ENST ID: ENST00000263177
  CDS Start-End: 223-1188
ggggctcgtccgggggtagccgcctcctctgcagcctgccggcgcctcgaagcccggacctgcctccgcctcttcctccagcggctccatcccgcctcccgtgcctcgtcctcccgccgcctccgccgccgcgcccccggtggctgcctcggcggaccggggagggggcccaccgcgtcgaccgcccgctcggctcggctcggcccggcccgggaggcgtgcatgcccctgctgcccgcggcgctcaccagcagcatgctctatttccagatggtgatcatggcagggacggtgatgctggcgtactacttcgagtatacggacacgttcaccgtgaacgtgcagggcttcttctgccacgacagcgcctaccgcaaaccctacccgggcccggaggacagcagcgccgtgccccccgtgctcctctactcgctggccgccggggtccccgtgctcgtgataatagttggagaaactgctgtcttttgcctacaactagccacaagggattttgaaaaccaggaaaaaactattttaactggagactgttgctatataaacccgctggtgcgccgaactgtccgatttcttggaatttatacatttggactgtttgctacagatatctttgtaaatgctggacaagtagtcacaggaaatctggccccacatttccttgccctgtgtaagcccaattatacagcacttggatgtcagcagtatacacaattcatcagtggggaagaggcctgtactggcaacccagatctcatcatgagagcccgaaaaacctttccatccaaagaagcagctctcagtgtctatgcagctatgtatctgaccatgtacatcaccaacacaatcaaagccaagggaaccagacttgctaagccagttctatgcttgggcttaatgtgtttggcatttcttactggactcaacagagtagcagaatatcgaaatcattggtcagatgttatagcaggctttctggttggaatatctatagcagtatttctggttgtgtgcgtggtgaataatttcaaagggagacaagcagaaaatgagcatatacacatggataatctggcacagatgccaatgatcagcattcctcgagtagaaagtcctttggaaaaggtaacatctgtacagaaccacatcactgccttcgcagaagtcacatgatatcgaagcagatggtttttcactgcattggacatcatccctttttaccatccattcataacacccaaagtttgtttgattgcaagtgaagtttataaagttgtttaataatttttataattttaaaatcaatgtcaacctatctgtttcccccactagactgtgagctcctcgagggcaggattgtctttttttttctgtgtccccagcacttacaacaaagcctagcacaaagtaggtgttcaacaaaaatgtgatgaccaaatgaacaaaattcttaaataaaacattcactttagtttctcacagaatcattgcaattatgttaaaagaaatctctacataaatcgtatttgtgtatgaaaaccttctattttgggctagttatttttttaatcttcatatatctattcagcagtatgccatatttaatttgaagtggactttgaaagtcatgggggtttttattttgttattcagcatgacattatttccattctaacatttcagtgtgtgaaattactttatttttagaaagtatgttctatagtaaaataatgtttccacattatattatgttatatttcacttaaaatactattcatactatacattctaagactggtgcttctgcttttgaaggggaaaatgccaatttttactgtaataagtaatgtatcataattaaaaattatttatttggacttcttctcctgacaattgtggcttaattcatgacttgtttttgaatgcaggcagtatttagggtagtttaaatgagtaaattcagcactggtaccttattattgagtaatttcccatgggtagcagtgtctcaagagtggtcaaaagctccactcttaggcttttttactactaaagattccacataatttaaatgggaaagaactataccctgacacataatttaaattatataaatgctagaaatatggttaatgtattttactttgcatttgtgtagtactttatagtttacaaagcatatttacaccaattattttatgtaatcctcataataacctggtataaacatgaagggtatggctttatttttatagataagaaaaatgaagccaagacagggtaaataacatgccaaatcacaaactagtaagagacatagttgaagcttaaattcaagttttctggccctgaactcatattcctttctaatatagcacagctgtcatctcattttggacactgaggcctttcagagctcagtagaatcctgggcaactacctatggttcaaaaaataaagaaatgccagaatacaaatatgaaagctctgctgtattttaaatgtttatgttttaagaatgaacacttttcaaatataaaactatataataattataatccagttttaagataatatcaagagtctagatgtgaggctttttgtgaaagagaagcctaaattcagcatctccccttccaccctcacccccaggtcccagcctcccactcagcagagtgcccaagggacataccttacatttagcatgtagaattccagattacaatcgccataatataaggaaggtgagctcctcaacaataactttgcaataattaaaactaccctaagtaactttggcttatatggcaaagtaactttggcagtaattgactgaaatgaatctttctaaactttacagtactaaagaaagcaaacttttaatttcctctgtaatttcaacagagatcagcaaataaatataaccaaagattgtccattactccccaaatagatgttatttgcccatttctatcactgtggaagctaaaacacttctactagggccaaaaagagaaaagaaaagaaaatttctactaatttcagacctctagagcaattcagtcctgttggaaatttagaacatgaagaaactttgaatgtcttgaccctttttaaagattttttaggcaataacagtaatagggaattcacttattgagaatgaaagtgaaggggatgatcctaatgtcttagaaagctagattactagtaaggcttccagacttctatcagttctattgattctacatcagacttccaagcagccaagca

SEQ ID NO: 165925 - DNA, 4139 bp, Homo sapiens
  Payload ID: 12665
  Gene Symbol: PLPPR5
  Gene Name: phospholipid phosphatase related 5
  ENST ID: ENST00000370188
  CDS Start-End: 362-1312
ccagcgccgctgcttctcgaatggtctcgtgcaggggcgcagcggccgctgcccgtcgcccgggactccccgccctccctcgcgaccccgcgccggggcgggcggcgcttgcggcgggcagggggcgggcaggggagagggggctcgtccgggggtagccgcctcctctgcagcctgccggcgcctcgaagcccggacctgcctccgcctcttcctccagcggctccatcccgcctcccgtgcctcgtcctcccgccgcctccgccgccgcgcccccggtggctgcctcggcggaccggggagggggcccaccgcgtcgaccgcccgctcggctcggctcggcccggcccgggaggcgtgcatgcccctgctgcccgcggcgctcaccagcagcatgctctatttccagatggtgatcatggcagggacggtgatgctggcgtactacttcgagtatacggacacgttcaccgtgaacgtgcagggcttcttctgccacgacagcgcctaccgcaaaccctacccgggcccggaggacagcagcgccgtgccccccgtgctcctctactcgctggccgccggggtccccgtgctcgtgataatagttggagaaactgctgtcttttgcctacaactagccacaagggattttgaaaaccaggaaaaaactattttaactggagactgttgctatataaacccgctggtgcgccgaactgtccgatttcttggaatttatacatttggactgtttgctacagatatctttgtaaatgctggacaagtagtcacaggaaatctggccccacatttccttgccctgtgtaagcccaattatacagcacttggatgtcagcagtatacacaattcatcagtggggaagaggcctgtactggcaacccagatctcatcatgagagcccgaaaaacctttccatccaaagaagcagctctcagtgtctatgcagctatgtatctgaccatgtacatcaccaacacaatcaaagccaagggaaccagacttgctaagccagttctatgcttgggcttaatgtgtttggcatttcttactggactcaacagagtagcagaatatcgaaatcattggtcagatgttatagcaggctttctggttggaatatctatagcagtatttctggttgtgtgcgtggtgaataatttcaaagggagacaagcagaaaatgagcatatacacatggataatctggcacagatgccaatgatcagcattcctcgagtagaaagtcctttggaaaagaaccacatcactgccttcgcagaagtcacatgatatcgaagcagatggtttttcactgcattggacatcatccctttttaccatccattcataacacccaaagtttgtttgattgcaagtgaagtttataaagttgtttaataatttttataattttaaaatcaatgtcaacctatctgtttcccccactagactgtgagctcctcgagggcaggattgtctttttttttctgtgtccccagcacttacaacaaagcctagcacaaagtaggtgttcaacaaaaatgtgatgaccaaatgaacaaaattcttaaataaaacattcactttagtttctcacagaatcattgcaattatgttaaaagaaatctctacataaatcgtatttgtgtatgaaaaccttctattttgggctagttatttttttaatcttcatatatctattcagcagtatgccatatttaatttgaagtggactttgaaagtcatgggggtttttattttgttattcagcatgacattatttccattctaacatttcagtgtgtgaaattactttatttttagaaagtatgttctatagtaaaataatgtttccacattatattatgttatatttcacttaaaatactattcatactatacattctaagactggtgcttctgcttttgaaggggaaaatgccaatttttactgtaataagtaatgtatcataattaaaaattatttatttggacttcttctcctgacaattgtggcttaattcatgacttgtttttgaatgcaggcagtatttagggtagtttaaatgagtaaattcagcactggtaccttattattgagtaatttcccatgggtagcagtgtctcaagagtggtcaaaagctccactcttaggcttttttactactaaagattccacataatttaaatgggaaagaactataccctgacacataatttaaattatataaatgctagaaatatggttaatgtattttactttgcatttgtgtagtactttatagtttacaaagcatatttacaccaattattttatgtaatcctcataataacctggtataaacatgaagggtatggctttatttttatagataagaaaaatgaagccaagacagggtaaataacatgccaaatcacaaactagtaagagacatagttgaagcttaaattcaagttttctggccctgaactcatattcctttctaatatagcacagctgtcatctcattttggacactgaggcctttcagagctcagtagaatcctgggcaactacctatggttcaaaaaataaagaaatgccagaatacaaatatgaaagctctgctgtattttaaatgtttatgttttaagaatgaacacttttcaaatataaaactatataataattataatccagttttaagataatatcaagagtctagatgtgaggctttttgtgaaagagaagcctaaattcagcatctccccttccaccctcacccccaggtcccagcctcccactcagcagagtgcccaagggacataccttacatttagcatgtagaattccagattacaatcgccataatataaggaaggtgagctcctcaacaataactttgcaataattaaaactaccctaagtaactttggcttatatggcaaagtaactttggcagtaattgactgaaatgaatctttctaaactttacagtactaaagaaagcaaacttttaatttcctctgtaatttcaacagagatcagcaaataaatataaccaaagattgtccattactccccaaatagatgttatttgcccatttctatcactgtggaagctaaaacacttctactagggccaaaaagagaaaagaaaagaaaatttctactaatttcagacctctagagcaattcagtcctgttggaaatttagaacatgaagaaactttgaatgtcttgaccctttttaaagattttttaggcaataacagtaatagggaattcacttattgagaatgaaagtgaaggggatgatcctaatgtcttagaaagctagattactagtaaggcttccagacttctatcagttctattgattctacatcagacttccaagcagccaagcaggaatgtttttcctgttggaagccttagccatatattcttatgtcaaggttgcttctttgcaccttgctaaacctgatacgaatgcaggagttttaaattcttcaaaaactcagatttaacccagaaccagagtaaagtcacctctactatttacacatcataggctcaagattgtacagtgagtgatgctgtcatgaagaaaattcagatgaaaaaggcaagatacatgtgaataaggcaaaagccagaaaatagcccttattcatgatgctgttactgagaataatgaaaatcatatttcagaaaatattaccatgtaaatatgtacatatgtagtctagtaaaagcaggcaaacacatatctttctgataaaaacatctcctttttattctacttacttggggcccaggtcagtataatttagtcaacttgaaaatttcggtagtctctgtttgcatggcagaaattctgcacatgttttatctgattcctgtgataacttaaaaggctcttttatgttaaaagagaggtgaatcttctttgacagactttgtattttccacttctaactgggcctctcttttctcaggatctatcctagccaaatatctcagttacatttaccatacagtttcctttgtgaaagaacagtaggggaggaaataattctctgctgtgtattgtatttttcaaataaaaatttaaaaattcaattgaaaactgaa

SEQ ID NO: 165926 - DNA, 2233 bp, Homo sapiens
  Payload ID: 12666
  Gene Symbol: PLSCR1
  Gene Name: phospholipid scramblase 1
  Uniprot ID: O15162
  ENST ID: ENST00000342435
  CDS Start-End: 412-1368
gagtcccagttcctctccttaaccaccggacaaacgtctctggagtctctccaatgagcaagaaagcaagtcgggggtaggggaggggcctcacaccagggggtgggcgcagtccctcctccagctccttcaccctccagtagtctcgtgggtccccgagcgccagcgcgggaaccgggaaaaggaaaccgtgttgtgtacgtaagattcaggaaacgaaaccaggagccgcgggtgttggcgcaaaggttactcccagacccttttccggctgacttctgagaaggttgcgcagcagctgtgcccggcagtctagaggcgcagaagaggaagccatcgcctggccccggctctctggaccttgtctcgctcgggagcggaaacagcggcagccagagaactgttttaatcatggacaaacaaaactcacagatgaatgcttctcacccggaaacaaacttgccagttgggtatcctcctcagtatccaccgacagcattccaaggacctccaggatatagtggctaccctgggccccaggtcagctacccacccccaccagccggccattcaggtcctggcccagctggctttcctgtcccaaatcagccagtgtataatcagccagtatataatcagccagttggagctgcaggggtaccatggatgccagcgccacagcctccattaaactgtccacctggattagaatatttaagtcagatagatcagatactgattcatcagcaaattgaacttctggaagttttaacaggttttgaaactaataacaaatatgaaattaagaacagctttggacagagggtttactttgcagcggaagatactgattgctgtacccgaaattgctgtgggccatctagaccttttaccttgaggattattgataatatgggtcaagaagtcataactctggagagaccactaagatgtagcagctgttgttgtccctgctgccttcaggagatagaaatccaagctcctcctggtgtaccaataggttatgttattcagacttggcacccatgtctaccaaagtttacaattcaaaatgagaaaagagaggatgtactaaaaataagtggtccatgtgttgtgtgcagctgttgtggagatgttgattttgagattaaatctcttgatgaacagtgtgtggttggcaaaatttccaagcactggactggaattttgagagaggcatttacagacgctgataactttggaatccagttccctttagaccttgatgttaaaatgaaagctgtaatgattggtgcctgtttcctcattgacttcatgttttttgaaagcactggcagccaggaacaaaaatcaggagtgtggtagtggattagtgaaagtctcctcaggaaatctgaagtctgtatattgattgagactatctaaactcatacctgtatgaattaagctgtaaggcctgtagctctggttgtatacttttgcttttcaaattatagtttatcttctgtataactgatttataaaggtttttgtacattttttaatactcattgtcaatttgagaaaaaggacatatgagtttttgcatttattaatgaaacttcctttgaaaaactgctttgaattatgatctctgattcattgtccattttactaccaaatattaactaaggccttattaatttttatataaattatatcttgtcctattaaatctagttacaatttatttcatgcataagagctaatgttattttgcaaatgccatatattcaaaaaagctcaaagataattttctttactattatgttcaaataatattcaatatgcatattatctttaaaaagttaaatgtttttttaatcttcaagaaatcatgctacacttaacttctcctagaagctaatctataccataatattttcatattcacaagatattaaattaccaattttcaaattattgttagtaaagaacaaaatgattctctcccaaagaaagacacattttaaatactccttcactctaaaactctggtattataacttttgaaagttaatatttctacatgaaatgtttagctcttacactctatccttcctagaaaatggtaattgagattactcagatattaattaaatacaatatcatatatatattcacagagtataaacctaaataatgatctattagattcaaatatttgaaataaaaacttgatttttttgta

SEQ ID NO: 165927 - DNA, 996 bp, Homo sapiens
  Payload ID: 12666
  Gene Symbol: PLSCR1
  Gene Name: phospholipid scramblase 1
  Uniprot ID: O15162
  ENST ID: ENST00000448787
  CDS Start-End: 193-906
aaaggttactcccagacccttttccggctgacttctgagaaggttgcgcagcagctgtgcccggcagtctagaggcgcagaagaggaagccatcgcctggccccggctctctggaccttgtctcgctcgggagcggaaacagcggcagccagagaactgttttaatcatggacaaacaaaactcacagatgaatgcttctcacccggaaacaaacttgccagttgggtatcctcctcagtatccaccgacagcattccaagatagatcagatactgattcatcagcaaattgaacttctggaagttttaacaggttttgaaactaataacaaatatgaaattaagaacagctttggacagagggtttactttgcagcggaagatactgattgctgtacccgaaattgctgtgggccatctagaccttttaccttgaggattattgataatatgggtcaagaagtcataactctggagagaccactaagatgtagcagctgttgttgtccctgctgccttcaggagatagaaatccaagctcctcctggtgtaccaataggttatgttattcagacttggcacccatgtctaccaaagtttacaattcaaaatgagaaaagagaggatgtactaaaaataagtggtccatgtgttgtgtgcagctgttgtggagatgttgattttgagattaaatctcttgatgaacagtgtgtggttggcaaaatttccaagcactggactggaattttgagagaggcatttacagacgctgataactttggaatccagttccctttagaccttgatgttaaaatgaaagctgtaatgattggtgcctgtttcctcattgacttcatgttttttgaaagcactggcagccaggaacaaaaatcaggagtgtggtagtggattagtgaaagtctcctcaggaaatctgaagtctgtatattgattgagactatctaaactcatacctgtatgaattaagctgtaagg

SEQ ID NO: 165928 - DNA, 983 bp, Homo sapiens
  Payload ID: 12666
  Gene Symbol: PLSCR1
  Gene Name: phospholipid scramblase 1
  ENST ID: ENST00000468985
  CDS Start-End: 152-277
agtctagaggcgcagaagaggaagccatcgcctggccccggctctctggaccttgtctcgctcgggagcggaaacagcggcagccagaggaccacataaacccattttgaattattcaaccattgctgaacttcttgaaactgttttaatcatggacaaacaaaactcacagatgaatgcttctcacccggaaacaaacttgccagttgggtatcctcctcagtatccaccgacagcattccaagatagatcagatactgattcatcagcaaattgaacttctggaagttttaacaggttttgaaactaataacaaatatgaaattaagaacagctttggacagagggtttactttgcagcggaagatactgattgctgtacccgaaattgctgtgggccatctagaccttttaccttgaggattattgataatatgggtcaagaagtcataactctggagagaccactaagatgtagcagctgttgttgtccctgctgccttcaggagatagaaatccaagctcctcctggtgtaccaataggttatgttattcagacttggcacccatgtctaccaaagtttacaattcaaaatgagaaaagagaggatgtactaaaaataagtggtccatgtgttgtgtgcagctgttgtggagatgttgattttgagattaaatctcttgatgaacagtgtgtggttggcaaaatttccaagcactggactggaattttgagagaggcatttacagacgctgataactttggaatccagttccctttagaccttgatgttaaaatgaaagctgtaatgattggtgcctgtttcctcattgacttcatgttttttgaaagcactggcagccaggaacaaaaatcaggagtgtggtagtggattagtgaaagtctcctcaggaaatctgaagtctgtatattgattgagactatctaaactcatacctgtatgaattaagctgtaaggcct

SEQ ID NO: 165929 - DNA, 870 bp, Homo sapiens
  Payload ID: 12666
  Gene Symbol: PLSCR1
  Gene Name: phospholipid scramblase 1
  ENST ID: ENST00000478267
  CDS Start-End: 86-211
gaggaagccatcgcctggccccggctctctggaccttgtctcgctcgggagcggaaacagcggcagccagagaactgttttaatcatggacaaacaaaactcacagatgaatgcttctcacccggaaacaaacttgccagttgggtatcctcctcagtatccaccgacagcattccaagatagatcagatactgattcatcagcaaattgaacttctggaagttttaacaggttttgaaactaataacaaatatgaaattaagaacagctttggacagagggtttactttgcagcggaagatactgattgctgtacccgaaattgctgtgggccatctagaccttttaccttgaggattattgataatatgggtcaagaagtcataactctggagagaccactaagatgtagcagctgttgttgtccctgctgccttcaggagatagaaatccaagctcctcctggtgtaccaataggttatgttattcagacttggcacccatgtctaccaaagtttacaattcaaaatgagaaaagagaggatgtactaaaaataagtggtccatgtgttgtgtgcagctgttgtggagatgttgattttgagattaaatctcttgatgaacagtgtgtggttggcaaaatttccaagcactggactggaattttgagagaggcatttacagacgctgataactttggaatccagttccctttagaccttgatgttaaaatgaaagctgtaatgattggtgcctgtttcctcattgtaagtctgttcttattaatcttgattatagatgctttctctaggttcattctgaaatgattcagtaaagtgtatatttcaaaatgacattttaaaatttata

SEQ ID NO: 165930 - DNA, 984 bp, Homo sapiens
  Payload ID: 12666
  Gene Symbol: PLSCR1
  Gene Name: phospholipid scramblase 1
  ENST ID: ENST00000489775
  CDS Start-End: 144-269
ggcgcagaagaggaagccatcgcctggccccggctctctggaccttgtctcgctcgggagcggaaacagcggcagccagaggaccacataaacccattttgaattattcaaccattgctgaacttcttgaaactgttttaatcatggacaaacaaaactcacagatgaatgcttctcacccggaaacaaacttgccagttgggtatcctcctcagtatccaccgacagcattccaagatagatcagatactgattcatcagcaaattgaacttctggaagttttaacaggttttgaaactaataacaaatatgaaattaagaacagctttggacagagggtttactttgcagcggaagatactgattgctgtacccgaaattgctgtgggccatctagaccttttaccttgaggattattgataatatgggtcaagaagtcataactctggagagaccactaagatgtagcagctgttgttgtccctgctgccttcaggaggtctgtgatcaattaccagggcactttgtaaaatagttcagcaagaatttctgccctgtcattgaacctttcatcgaacctaggcattatgattattacatttacatatattattttgcctttgtagatagaaatccaagctcctcctggtgtaccaataggttatgttattcagacttggcacccatgtctaccaaagtttacaattcaaaatgagaaaagagaggatgtactaaaaataagtggtccatgtgttgtgtgcagctgttgtggagatgttgattttgagattaaatctcttgatgaacagtgtgtggttggcaaaatttccaagcactggactggaattttgagagaggcatttacagacgctgataactttggaatccagttccctttagaccttgatgttaaaatgaaagctgtaatgattggtgcctgtttcctcattgacttcatgttttttgaaagcactggcagcca

SEQ ID NO: 165931 - DNA, 1443 bp, Homo sapiens
  Payload ID: 12666
  Gene Symbol: PLSCR1
  Gene Name: phospholipid scramblase 1
  ENST ID: ENST00000487389
  CDS Start-End: 280-1215
cttcaccctccagtagtctcgtgggtccccgagcgccagcgcgggaaccgggaaaaggaaaccgtgttgtgtacgtaagattcaggaaacgaaaccaggagccgcgggtgttggcgcaaaggttactcccagacccttttccggctgacttctgagaaggttgcgcagcagctgtgcccggcagtctagaggcgcagaagaggaagccatcgcctggccccggctctctggaccttgtctcgctcgggagcggaaacagcggcagccagagactcacagatgaatgcttctcacccggaaacaaacttgccagttgggtatcctcctcagtatccaccgacagcattccaaggacctccaggatatagtggctaccctgggccccaggtcagctacccacccccaccagccggccattcaggtcctggcccagctggctttcctgtcccaaatcagccagtgtataatcagccagtatataatcagccagttggagctgcaggggtaccatggatgccagcgccacagcctccattaaactgtccacctggattagaatatttaagtcagatagatcagatactgattcatcagcaaattgaacttctggaagttttaacaggttttgaaactaataacaaatatgaaattaagaacagctttggacagagggtttactttgcagcggaagatactgattgctgtacccgaaattgctgtgggccatctagaccttttaccttgaggattattgataatatgggtcaagaagtcataactctggagagaccactaagatgtagcagctgttgttgtccctgctgccttcaggagatagaaatccaagctcctcctggtgtaccaataggttatgttattcagacttggcacccatgtctaccaaagtttacaattcaaaatgagaaaagagaggatgtactaaaaataagtggtccatgtgttgtgtgcagctgttgtggagatgttgattttgagattaaatctcttgatgaacagtgtgtggttggcaaaatttccaagcactggactggaattttgagagaggcatttacagacgctgataactttggaatccagttccctttagaccttgatgttaaaatgaaagctgtaatgattggtgcctgtttcctcattgacttcatgttttttgaaagcactggcagccaggaacaaaaatcaggagtgtggtagtggattagtgaaagtctcctcaggaaatctgaagtctgtatattgattgagactatctaaactcatacctgtatgaattaagctgtaaggcctgtagctctggttgtatacttttgcttttcaaattatagtttatcttctgtataactgatttataaaggtttttgtacattttttaatactcattgtcaatttgagaaaaaggacatatgagtttttgcatttatt

SEQ ID NO: 165932 - DNA, 862 bp, Homo sapiens
  Payload ID: 12666
  Gene Symbol: PLSCR1
  Gene Name: phospholipid scramblase 1
  ENST ID: ENST00000462666
  CDS Start-End: 118-862
gcagctgtgcccggcagtctagaggcgcagaagaggaagccatcgcctggccccggctctctggaccttgtctcgctcgggagcggaaacagcggcagccagagaactgttttaatcatggacaaacaaaactcacagatgaatgcttctcacccggaaacaaacttgccagttgggtatcctcctcagtatccaccgacagcattccaaggacctccaggatatagtggctaccctgggccccaggtcagctacccacccccaccagccggccattcaggtcctggcccagctggctttcctgtcccaaatcagccagtgtataatcagccagtatataatcagccagttggagctgcaggggtaccatggatgccagcgccacagcctccattaaactgtccacctggattagaatatttaagtcagatagatcagatactgattcatcagcaaattgaacttctggaagcggaagatactgattgctgtacccgaaattgctgtgggccatctagaccttttaccttgaggattattgataatatgggtcaagaagtcataactctggagagaccactaagatgtagcagctgttgttgtccctgctgccttcaggagatagaaatccaagctcctcctggtgtaccaataggttatgttattcagacttggcacccatgtctaccaaagtttacaattcaaaatgagaaaagagaggatgtactaaaaataagtggtccatgtgttgtgtgcagctgttgtggagatgttgattttgagattaaatctcttgatgaacagtgtgtggttggcaaaatttccaagcactggactggaattttgagagaggcatttacag

SEQ ID NO: 165933 - DNA, 701 bp, Homo sapiens
  Payload ID: 12666
  Gene Symbol: PLSCR1
  Gene Name: phospholipid scramblase 1
  ENST ID: ENST00000486631
  CDS Start-End: 188-701
aggagccgcgggtgttggcgcaaaggttactcccagacccttttccggctgacttctgagaaggttgcgcagcagctgtgcccggcagtctagaggcgcagaagaggaagccatcgcctggccccggctctctggaccttgtctcgctcgggagcggaaacagcggcagccagagactcacagatgaatgcttctcacccggaaacaaacttgccagttgggtatcctcctcagtatccaccgacagcattccaagatagatcagatactgattcatcagcaaattgaacttctggaagttttaacaggttttgaaactaataacaaatatgaaattaagaacagctttggacagagggtttactttgcagcggaagatactgattgctgtacccgaaattgctgtgggccatctagaccttttaccttgaggattattgataatatgggtcaagaagtcataactctggagagaccactaagatgtagcagctgttgttgtccctgctgccttcaggagatagaaatccaagctcctcctggtgtaccaataggttatgttattcagacttggcacccatgtctaccaaagtttacaattcaaaatgagaaaagagaggatgtactaaaaataagtggtccatgtgttgtgtgcagctgttgtggagatgttgattttgagattaaatctcttgatgaac

SEQ ID NO: 165934 - DNA, 581 bp, Homo sapiens
  Payload ID: 12666
  Gene Symbol: PLSCR1
  Gene Name: phospholipid scramblase 1
  ENST ID: ENST00000488253
  CDS Start-End: 78-203
catcgcctggccccggctctctggaccttgtctcgctcgggagcggaaacagcggcagccagagaactgttttaatcatggacaaacaaaactcacagatgaatgcttctcacccggaaacaaacttgccagttgggtatcctcctcagtatccaccgacagcattccaagatagatcagatactgattcatcagcaaattgaacttctggaagatagaaatccaagctcctcctggtgtaccaataggttatgttattcagacttggcacccatgtctaccaaagtttacaattcaaaatgagaaaagagaggatgtactaaaaataagtggtccatgtgttgtgtgcagctgttgtggagatgttgattttgagattaaatctcttgatgaacagtgtgtggttggcaaaatttccaagcactggactggaattttgagagaggcatttacagacgctgataactttggaatccagttccctttagaccttgatgttaaaatgaaagctgtaatgattggtgcctgtttcctcattgacttcatgttttttgaaagcactggcagccaggaacaaaaat

SEQ ID NO: 165935 - DNA, 701 bp, Homo sapiens
  Payload ID: 12666
  Gene Symbol: PLSCR1
  Gene Name: phospholipid scramblase 1
  ENST ID: ENST00000463777
  CDS Start-End: 103-228
agtctagaggcgcagaagaggaagccatcgcctggccccggctctctggaccttgtctcgctcgggagcggaaacagcggcagccagagaactgttttaatcatggacaaacaaaactcacagatgaatgcttctcacccggaaacaaacttgccagttgggtatcctcctcagtatccaccgacagcattccaagatagatcagatactgattcatcagcaaattgaacttctggaagattaaatctcttgatgaacagtgtgtggttggcaaaatttccaagcactggactggaattttgagagaggcatttacagacgctgataactttggaatccagttccctttagaccttgatgttaaaatgaaagctgtaatgattggtgcctgtttcctcattgacttcatgttttttgaaagcactggcagccaggaacaaaaatcaggagtgtggtagtggattagtgaaagtctcctcaggaaatctgaagtctgtatattgattgagactatctaaactcatacctgtatgaattaagctgtaaggcctgtagctctggttgtatacttttgcttttcaaattatagtttatcttctgtataactgatttataaaggtttttgtacattttttaatactcattgtcaatttgagaaaaaggacatatgagtttttgcatttattaatgaaacttccttt

SEQ ID NO: 165936 - DNA, 1384 bp, Homo sapiens
  Payload ID: 12666
  Gene Symbol: PLSCR1
  Gene Name: phospholipid scramblase 1
  ENST ID: ENST00000493432
  CDS Start-End: 165-290
gccccggctctctggaccttgtctcgctcgggagcggaaacagcggcagccagagcataaaatacacaagaggatttttatggaatggctccttgttacaaggaccacataaacccattttgaattattcaaccattgctgaacttcttgaaactgttttaatcatggacaaacaaaactcacagatgaatgcttctcacccggaaacaaacttgccagttgggtatcctcctcagtatccaccgacagcattccaagatagatcagatactgattcatcagcaaattgaacttctggaagattaaatctcttgatgaacagtgtgtggttggcaaaatttccaagcactggactggaattttgagagaggcatttacagacgctgataactttggaatccagttccctttagaccttgatgttaaaatgaaagctgtaatgattggtgcctgtttcctcattgacttcatgttttttgaaagcactggcagccaggaacaaaaatcaggagtgtggtagtggattagtgaaagtctcctcaggaaatctgaagtctgtatattgattgagactatctaaactcatacctgtatgaattaagctgtaaggcctgtagctctggttgtatacttttgcttttcaaattatagtttatcttctgtataactgatttataaaggtttttgtacattttttaatactcattgtcaatttgagaaaaaggacatatgagtttttgcatttattaatgaaacttcctttgaaaaactgctttgaattatgatctctgattcattgtccattttactaccaaatattaactaaggccttattaatttttatataaattatatcttgtcctattaaatctagttacaatttatttcatgcataagagctaatgttattttgcaaatgccatatattcaaaaaagctcaaagataattttctttactattatgttcaaataatattcaatatgcatattatctttaaaaagttaaatgtttttttaatcttcaagaaatcatgctacacttaacttctcctagaagctaatctataccataatattttcatattcacaagatattaaattaccaattttcaaattattgttagtaaagaacaaaatgattctctcccaaagaaagacacattttaaatactccttcactctaaaactctggtattataacttttgaaagttaatatttctacatgaaatgtttagctcttacactctatccttcctagaaaatggtaattgagattactcagatattaattaaatacaatatcatatatatattcacagagtataaacctaaataatgatctattagattcaaatatttgaaataaaaacttgatttttttgt

SEQ ID NO: 165937 - DNA, 514 bp, Homo sapiens
  Payload ID: 12666
  Gene Symbol: PLSCR1
  Gene Name: phospholipid scramblase 1
  ENST ID: ENST00000483300
  CDS Start-End: 1-514
ctggctttcctgtcccaaatcagccagtgtataatcagccagtatataatcagccagttggagctgcaggggtaccatggatgccagcgccacagcctccattaaactgtccacctggattagaatatttaagtcagatagatcagatactgattcatcagcaaattgaacttctggaagaaatccaagctcctcctggtgtaccaataggttatgttattcagacttggcacccatgtctaccaaagtttacaattcaaaatgagaaaagagaggatgtactaaaaataagtggtccatgtgttgtgtgcagctgttgtggagatgttgattttgagattaaatctcttgatgaacagtgtgtggttggcaaaatttccaagcactggactggaattttgagagaggcatttacagacgctgataactttggaatccagttccctttagaccttgatgttaaaatgaaagctgtaatgattggtgcctgtttcctcattgacttcatgttttt

SEQ ID NO: 165938 - DNA, 1198 bp, Homo sapiens
  Payload ID: 12666
  Gene Symbol: PLSCR1
  Gene Name: phospholipid scramblase 1
  ENST ID: ENST00000472349
  CDS Start-End: 451-1198
gttcctctccttaaccaccggacaaacgtctctggagtctctccaatgagcaagaaagcaagtcgggggtaggggaggggcctcacaccagggggtgggcgcagtccctcctccagctccttcaccctccagtagtctcgtgggtccccgagcgccagcgcgggaaccgggaaaaggaaaccgtgttgtgtacgtaagattcaggaaacgaaaccaggagccgcgggtgttggcgcaaaggttactcccagacccttttccggctgacttctgagaaggttgcgcagcagctgtgcccggcagtctagaggcgcagaagaggaagccatcgcctggccccggctctctggaccttgtctcgctcgggagcggaaacagcggcagccagagcataaaatacacaagaggatttttatggaatggctccttgttacaagaactgttttaatcatggacaaacaaaactcacagatgaatgcttctcacccggaaacaaacttgccagttgggtatcctcctcagtatccaccgacagcattccaaggacctccaggatatagtggctaccctgggccccaggtcagctacccacccccaccagccggccattcaggtcctggcccagctggctttcctgtcccaaatcagccagtgtataatcagccagtatataatcagccagttggagctgcaggggtaccatggatgccagcgccacagcctccattaaactgtccacctggattagaatatttaagtcagatagatcagatactgattcatcagcaaattgaacttctggaagttttaacaggttttgaaactaataacaaatatgaaattaagaacagctttggacagagggtttactttgcagcggaagatactgattgctgtacccgaaattgctgtgggccatctagaccttttaccttgaggattattgataatatgggtcaagaagtcataactctggagagaccactaagatgtagcagctgttgttgtccctgctgccttcaggagatagaaatccaagctcctcctggtgtaccaataggttatgttattcagacttggcacccatgtctaccaaagtttacaattcaaaatgagaaaagagaggatgtactaaaaataagtggtccatgtgttgtgtgcagctgttgtggagatgttgattttgagattaaatctc

SEQ ID NO: 165939 - DNA, 1272 bp, Homo sapiens
  Payload ID: 12667
  Gene Symbol: PLSCR2
  Gene Name: phospholipid scramblase 2
  Uniprot ID: Q9NRY7
  ENST ID: ENST00000336685
  CDS Start-End: 334-1008
ggccgaatggagaatgaagccttttcaaattcacctcccagtgaaccaccctcaaaatagaagtgaatgtgaaaccacagatatttcattaaaacatatctgaagataaaaacatacctcaagcttcacagatataggacttctgagctgagaggacctcccggacatattgtctaccctaagcaccaggctggacacactgggaaacaggctgaccacctgggctcccaggccttctacccaggacgtcagcatgactacctagtcccacctgctggcacagctggcattcctgttcaaaatcagccaggtagacctgaaggggtaccatggatgccagcaccaccaccaccattaaactgtccgccaggattggaatacttaagtcagatagatatgatactaattcatcagcaaattgaacttctggaagttctattcagttttgaaagtagtaacatgtatgaaatcaagaacagctttgggcagaggatttattttgcagcagaagatactaatttctgtatccgaaattgctgtgggcggtctagaccttttaccttgaggattactgataatgtgggtcgagaagtcataactctggaaagaccactaagatgtaactgttgttgttgcccctgctgccttcaggagatagaaatccaagctcctcctggtgtaccagtaggttatgttactcagacctggcacccatgtctaacaaagtttacaattaaaaatcagaaaagagaggatgtactaaaaattagtggtccatgtatcgtgtgcagctgtattgcgggtgttgattttgagattacatctcttgatgaacaaattgtggttggcaggatttctaagcactggtctgggtttttaagagaggcatttactgatgctgacaactttggaatccaattccctagagaccttgatgttaaaatgaaagccgtgatgattggtgcctgtttcctcattgactacatgttttttgaaagaactaggtaatgactggaatgtcagagtgtgggagtggattaatgattccggatctttggctaggcaaaatgaaactataactgatctaaacggttccttccttcttctactgtgcaaggaagatgtaaggaaaaactcgcacactatctgtggaactcatttaaattcaaatactagataaacatttcgcattgaatatttacatggagaaaaatcatcaaacatcaacaattatcaagttaattaataaaaatactaggtattgcaaaaaag

SEQ ID NO: 165940 - DNA, 759 bp, Homo sapiens
  Payload ID: 12667
  Gene Symbol: PLSCR2
  Gene Name: phospholipid scramblase 2
  ENST ID: ENST00000489015
  CDS Start-End: 277-759
gtatctgcccatcttagattcttcctagcaataattctgagagactctggattgtgggccgaatggagaatgaagccttttcaaattcacctcccaggacctcccggacatattgtctaccctaagcaccaggctggacacactgggaaacaggctgaccacctgggctcccaggccttctacccaggacgtcagcatgactacctagtcccacctgctggcacagctggcattcctgttcaaaatcagccaggtagacctgaaggggtaccatggatgccagcaccaccaccaccattaaactgtccgccaggattggaatacttaagtcagatagatatgatactaattcatcagcaaattgaacttctggaagttctattcagttttgaaagtagtaacatgtatgaaatcaagaacagctttgggcagaggatttattttgcagcagaagatactaatttctgtatccgaaattgctgtgggcggtctagaccttttaccttgaggattactgataatgtgggtcgagaagtcataactctggaaagaccactaagatgtaactgttgttgttgcccctgctgccttcaggagatagaaatccaagctcctcctggtgtaccagtaggttatgttactcagacctggcacccatgtctaacaaagtttacaattaaaaatcagaaaagagaggatgtactaaaaattagtggtccatgtatcgtgtgcagctgtattgcgggtgttgattttgag

SEQ ID NO: 165941 - DNA, 574 bp, Homo sapiens
  Payload ID: 12667
  Gene Symbol: PLSCR2
  Gene Name: phospholipid scramblase 2
  ENST ID: ENST00000463633
  CDS Start-End: 171-287
gacatattgtctaccctaagcaccaggctggacacactgggaaacaggctgaccacctgggctcccaggccttctacccaggacgtcagcatgactacctagtcccacctgctggcacagctggcattcctgttcaaaatcagccaggtagacctgaaggggtaccatggatgccagcaccaccaccaccattaaactgtccgccaggattggaatacttaagtcagatagatatgatactaattcatcagcaaattgaacttctggaagttattgactctggatgaggaaatggttattggaaagatttcaaaacagtactctggatttgtaaggggaatattaaccaatggtgagaaatttgggatccagtttccatttgatcttgatgttaaaattaaagcattgatgcttggagcaactttcctcattgaatacatgtattttgaactgtggccataagaattaccctgaaagaatatgtcagagattactggcatttatttttgccagccctcaacaaaactaagcaactttcactgaaaatatctaaataaagttttattttactaaa

SEQ ID NO: 165942 - DNA, 1441 bp, Homo sapiens
  Payload ID: 12667
  Gene Symbol: PLSCR2
  Gene Name: phospholipid scramblase 2
  Uniprot ID: Q9NRY7
  ENST ID: ENST00000497985
  CDS Start-End: 441-1334
acaccagaaccgttcgaatgacaaggggtgtcctgcctgaaaacgccttgcggggctcagcttccccttagctacactgctttacaggtagagagcggccctgaatcctgggcagagtctgggctcaggagcatgtgccagcatagtggggctattagaagggacggttaatacagcctgcaagctgtcatttatcaggccaaataaacccacttggaattattcaacctttgctgaacttcttgagtagatgtaactaagaggtgactataattggagaattcttaagagtttcactatattatgaaaatgtgtgcttaaagttggtaatcataaaaaataattttgaaatggcagcttatgaaaggatattatttgtagctgtgttttcccttgtaaattccagtactgggcactcctgaaaacttcgcaagatatatatgagatcatggaactcactcttctgcttaaattcctccagacctcccggacatattgtctaccctaagcaccaggctggacacactgggaaacaggctgaccacctgggctcccaggccttctacccaggacgtcagcatgactacctagtcccacctgctggcacagctggcattcctgttcaaaatcagccaggtagacctgaaggggtaccatggatgccagcaccaccaccaccattaaactgtccgccaggattggaatacttaagtcagatagatatgatactaattcatcagcaaattgaacttctggaagttctattcagttttgaaagtagtaacatgtatgaaatcaagaacagctttgggcagaggatttattttgcagcagaagatactaatttctgtatccgaaattgctgtgggcggtctagaccttttaccttgaggattactgataatgtgggtcgagaagtcataactctggaaagaccactaagatgtaactgttgttgttgcccctgctgccttcaggagatagaaatccaagctcctcctggtgtaccagtaggttatgttactcagacctggcacccatgtctaacaaagtttacaattaaaaatcagaaaagagaggatgtactaaaaattagtggtccatgtatcgtgtgcagctgtattgcgggtgttgattttgagattacatctcttgatgaacaaattgtggttggcaggatttctaagcactggtctgggtttttaagagaggcatttactgatgctgacaactttggaatccaattccctagagaccttgatgttaaaatgaaagccgtgatgattggtgcctgtttcctcattgactacatgttttttgaaagaactaggtaatgactggaatgtcagagtgtgggagtggattaatgattccggatctttggctaggcaaaatgaaactataactgatctaaacggttccttccttcttctactgtgca

SEQ ID NO: 165943 - DNA, 1001 bp, Homo sapiens
  Payload ID: 12667
  Gene Symbol: PLSCR2
  Gene Name: phospholipid scramblase 2
  Uniprot ID: Q9NRY7
  ENST ID: ENST00000610787
  CDS Start-End: 299-973
tcacagtgaaccaccctcaaaatagaagtgaatgtgaaaccacagatatttcattaaaacatatctgaagataaaaacatacctcaagcttcacagatataggacttctgagctgagaggacctcccggacatattgtctaccctaagcaccaggctggacacactgggaaacaggctgaccacctgggctcccaggccttctacccaggacgtcagcatgactacctagtcccacctgctggcacagctggcattcctgttcaaaatcagccaggtagacctgaaggggtaccatggatgccagcaccaccaccaccattaaactgtccgccaggattggaatacttaagtcagatagatatgatactaattcatcagcaaattgaacttctggaagttctattcagttttgaaagtagtaacatgtatgaaatcaagaacagctttgggcagaggatttattttgcagcagaagatactaatttctgtatccgaaattgctgtgggcggtctagaccttttaccttgaggattactgataatgtgggtcgagaagtcataactctggaaagaccactaagatgtaactgttgttgttgcccctgctgccttcaggagatagaaatccaagctcctcctggtgtaccagtaggttatgttactcagacctggcacccatgtctaacaaagtttacaattaaaaatcagaaaagagaggatgtactaaaaattagtggtccatgtatcgtgtgcagctgtattgcgggtgttgattttgagattacatctcttgatgaacaaattgtggttggcaggatttctaagcactggtctgggtttttaagagaggcatttactgatgctgacaactttggaatccaattccctagagaccttgatgttaaaatgaaagccgtgatgattggtgcctgtttcctcattgactacatgttttttgaaagaactaggtaatgactggaatgtcagagtgtgggagtgg

SEQ ID NO: 165944 - DNA, 1208 bp, Homo sapiens
  Payload ID: 12667
  Gene Symbol: PLSCR2
  Gene Name: phospholipid scramblase 2
  Uniprot ID: Q9NRY7
  ENST ID: ENST00000613069
  CDS Start-End: 70-951
gtatctgcccatcttagattcttcctagcaataattctgagagactctggattgtgggccgaatggagaatgaagccttttcaaattcacctcccaggacctcccggacatattgtctaccctaagcaccaggctggacacactgggaaacaggctgaccacctgggctcccaggccttctacccaggacgtcagcatgactacctagtcccacctgctggcacagctggcattcctgttcaaaatcagccaggtagacctgaaggggtaccatggatgccagcaccaccaccaccattaaactgtccgccaggattggaatacttaagtcagatagatatgatactaattcatcagcaaattgaacttctggaagttctattcagttttgaaagtagtaacatgtatgaaatcaagaacagctttgggcagaggatttattttgcagcagaagatactaatttctgtatccgaaattgctgtgggcggtctagaccttttaccttgaggattactgataatgtgggtcgagaagtcataactctggaaagaccactaagatgtaactgttgttgttgcccctgctgccttcaggagatagaaatccaagctcctcctggtgtaccagtaggttatgttactcagacctggcacccatgtctaacaaagtttacaattaaaaatcagaaaagagaggatgtactaaaaattagtggtccatgtatcgtgtgcagctgtattgcgggtgttgattttgagattacatctcttgatgaacaaattgtggttggcaggatttctaagcactggtctgggtttttaagagaggcatttactgatgctgacaactttggaatccaattccctagagaccttgatgttaaaatgaaagccgtgatgattggtgcctgtttcctcattgactacatgttttttgaaagaactaggtaatgactggaatgtcagagtgtgggagtggattaatgattccggatctttggctaggcaaaatgaaactataactgatctaaacggttccttccttcttctactgtgcaaggaagatgtaaggaaaaactcgcacactatctgtggaactcatttaaattcaaatactagataaacatttcgcattgaatatttacatggagaaaaatcatcaaacatcaacaattatcaagttaattaataaaaatactaggtattgc

SEQ ID NO: 165945 - DNA, 3303 bp, Homo sapiens
  Payload ID: 12668
  Gene Symbol: PLSCR4
  Gene Name: phospholipid scramblase 4
  Uniprot ID: Q9NRQ2
  ENST ID: ENST00000354952
  CDS Start-End: 242-1231
cgagacggggaagccgcgcgcggggaaggagggtccaggcgtgccggacccgcccccagaacccgcgcctagccctcccttccgcgcgcttactttgtttataacttgaaaaatcctctccgtctcccttccctgcctcctttcctttccctttcctctgccagtacaactagacccggcgtctggcgtccccggtgcccagcattctgcggggcaggcggattaattggaattcttcaaaatgtcaggtgtggtacccacagcccctgaacagcctgcaggtgaaatggaaaatcaaacaaaaccaccagatccaaggcctgatgctcctcctgaatacaattctcattttttaccaggaccccctggaacagctgtccctccacctactggctacccaggaggcttgcctatgggatactacagtccacagcaacccagtaccttccctttgtaccagccagttggtggtatccatcctgtccggtatcagcctggcaaatatcctatgccaaatcagtctgttccaataacatggatgccagggccaactcctatggcaaactgccctcctggtctggaatacttagttcagttggacaacatacatgttcttcagcattttgagcctctggaaatgatgacatgttttgaaactaataatagatatgatattaaaaacaactcagaccagatggtttacattgtaaccgaagacacagatgactttaccaggaatgcctatcggacactaaggcccttcgtcctccgggtcactgattgtatgggccgagaaatcatgacaatgcagagacccttcagatgcacctgctgttgcttctgttgcccctctgccagacaagagctggaggtgcagtgtcctcctggtgtcaccattggctttgttgcggaacattggaacctgtgcagggcggtgtacagcatccaaaatgagaagaaagaaaatgtgatgagagttcgtgggccatgctcaacctatggctgtggttcagattctgtttttgaggtcaaatcccttgatggcatatccaacatcggcagtattatccggaagtggaatggtttgttatcagcaatggcagatgctgaccattttgacattcacttcccactagacctggatgtgaagatgaaagccatgatttttggagcttgcttcctcattgacttcatgtattttgaaagatctccaccacaacgttcaagatagagagacacagcaagccatcaactatggttaattttgaaaaatggaaaagttggattgggcttacagtcagcactcagttatttgcaagtgtatttctttgctttgtagagtatttttattgggtgttaactttgacagctgagagtgggcttgcaagaacacaatctaaaagtgtgtttcaattgagtatctctctagtagaataggagttcatcctgaaaagctgtgactcattaacccagtaaacatatacaaagtaagcttaaaacactataaacatgagataagggaaaatgaatccagagttctcatattaataggtagtgaaacaataaggctttttagagcagactttgttggcataaaataacctggcttctatccctaaccctttcctacctttcctctccgtcaacatgtcctcatactgaagacaaacttgtttcaatgatagtcttcatttttaaaaacaaaaaggcaggcagacagaaataatgatgttttcttgcactaagaaggtactacttgtacacatatatcaaaacctcattctgcaaagtttttgaaggtttcaatgggaaatttgattttattacaaaataaaacattttttaatgttaaagtttatatattccatgcttgttttctcattcactggcatggatgatcaggagctgcctatatatgaaggcagaatcagactatcaggaaaggagctggccagggccacagccagtcaagatctctgagcaacttagagacattggtgtcattatatgaagcttgcatttaatacatttatacataatacatttgtacatttaattcataacgtctcttggtcacagatgccttatatataaaataagttgccagatctctaagattgcctagtacacctttgtatctcatttgatgtgatacccagaagagatcattgttttttgtttttgtttttgtttttttcaagaagatccttcgtgatcaccatgctgttctcatggtaagaactggagttatgtttttaaatttggaaatatgacattttatgtagcactttataaaaagtgaaagcgacaaattccaccgctgcttaatactgctttgcttctttttattgacatgatagataaatatgtatctacacagagtaataataataaaacacagtaaacattctatttctctatggtctacagcatgccagtaaataatatgtaggaccaataataaattatcaattacacatttttgtgttaactaattaaaagcatagtgtataagtgagtacactctaattaacttgcttctgttgcactttagttttctacctgcatatggactgcattttttttttttaacacagtcagtatgtagaatgggatgtattcttctgctgctgcttattaaataaagaaagcctgagtgttcttagatggggttattctgagatgagggtcttagcctacagttctttttgaaatgaaaggtgctttgttttttaattatattcatcttttcagggtaaatttgtttttctgagtttctcgtaatgctcatttttacatgctgctactagcttttttttttaaaaaaagtaaaagttgctgctttctaaaatattaattgccttatatttgaaagtgccattgcaatcgtaagtagactatgtatttcctataatgatgtctgatatttaaataggaaatcagacaaacaatattcagaaagtttaagcatataaactttttatttttaacttgcctaaatccctgtattccaaaacctgctgcatcataataaatatatctatatatatttagcataagacgtgatatttttaatttcttttttaaaaaattatatttgtctcttagagttaaaattttctttatataatattgtcatatgtcatagttttaatacaattcacatgatttctatgtttcttaatgatattttgttgtgtaaaattgatcggattgattaaaaaacaaattctctggaatttgtgcgttcatgctttttcgtattctttatggcttttaaataaatatacaatggttaatagt

SEQ ID NO: 165946 - DNA, 3033 bp, Homo sapiens
  Payload ID: 12668
  Gene Symbol: PLSCR4
  Gene Name: phospholipid scramblase 4
  ENST ID: ENST00000383083
  CDS Start-End: 242-961
cgagacggggaagccgcgcgcggggaaggagggtccaggcgtgccggacccgcccccagaacccgcgcctagccctcccttccgcgcgcttactttgtttataacttgaaaaatcctctccgtctcccttccctgcctcctttcctttccctttcctctgccagtacaactagacccggcgtctggcgtccccggtgcccagcattctgcggggcaggcggattaattggaattcttcaaaatgtcaggtgtggtacccacagcccctgaacagcctgcaggtgaaatggaaaatcaaacaaaaccaccagatccaaggcctgatgctcctcctgaatacaattctcattttttaccaggaccccctggaacagctgtccctccacctactggctacccaggaggcttgcctatgggatactacagtccacagcaacccagtaccttccctttgtaccagccagttggtggtatccatcctgtccggtatcagcctggcaaatatcctatgccaaatcagtctgttccaataacatggatgccagggccaactcctatggcaaactgccctcctggtctggaatacttagttcagctggaggtgcagtgtcctcctggtgtcaccattggctttgttgcggaacattggaacctgtgcagggcggtgtacagcatccaaaatgagaagaaagaaaatgtgatgagagttcgtgggccatgctcaacctatggctgtggttcagattctgtttttgaggtcaaatcccttgatggcatatccaacatcggcagtattatccggaagtggaatggtttgttatcagcaatggcagatgctgaccattttgacattcacttcccactagacctggatgtgaagatgaaagccatgatttttggagcttgcttcctcattgacttcatgtattttgaaagatctccaccacaacgttcaagatagagagacacagcaagccatcaactatggttaattttgaaaaatggaaaagttggattgggcttacagtcagcactcagttatttgcaagtgtatttctttgctttgtagagtatttttattgggtgttaactttgacagctgagagtgggcttgcaagaacacaatctaaaagtgtgtttcaattgagtatctctctagtagaataggagttcatcctgaaaagctgtgactcattaacccagtaaacatatacaaagtaagcttaaaacactataaacatgagataagggaaaatgaatccagagttctcatattaataggtagtgaaacaataaggctttttagagcagactttgttggcataaaataacctggcttctatccctaaccctttcctacctttcctctccgtcaacatgtcctcatactgaagacaaacttgtttcaatgatagtcttcatttttaaaaacaaaaaggcaggcagacagaaataatgatgttttcttgcactaagaaggtactacttgtacacatatatcaaaacctcattctgcaaagtttttgaaggtttcaatgggaaatttgattttattacaaaataaaacattttttaatgttaaagtttatatattccatgcttgttttctcattcactggcatggatgatcaggagctgcctatatatgaaggcagaatcagactatcaggaaaggagctggccagggccacagccagtcaagatctctgagcaacttagagacattggtgtcattatatgaagcttgcatttaatacatttatacataatacatttgtacatttaattcataacgtctcttggtcacagatgccttatatataaaataagttgccagatctctaagattgcctagtacacctttgtatctcatttgatgtgatacccagaagagatcattgttttttgtttttgtttttgtttttttcaagaagatccttcgtgatcaccatgctgttctcatggtaagaactggagttatgtttttaaatttggaaatatgacattttatgtagcactttataaaaagtgaaagcgacaaattccaccgctgcttaatactgctttgcttctttttattgacatgatagataaatatgtatctacacagagtaataataataaaacacagtaaacattctatttctctatggtctacagcatgccagtaaataatatgtaggaccaataataaattatcaattacacatttttgtgttaactaattaaaagcatagtgtataagtgagtacactctaattaacttgcttctgttgcactttagttttctacctgcatatggactgcattttttttttttaacacagtcagtatgtagaatgggatgtattcttctgctgctgcttattaaataaagaaagcctgagtgttcttagatggggttattctgagatgagggtcttagcctacagttctttttgaaatgaaaggtgctttgttttttaattatattcatcttttcagggtaaatttgtttttctgagtttctcgtaatgctcatttttacatgctgctactagcttttttttttaaaaaaagtaaaagttgctgctttctaaaatattaattgccttatatttgaaagtgccattgcaatcgtaagtagactatgtatttcctataatgatgtctgatatttaaataggaaatcagacaaacaatattcagaaagtttaagcatataaactttttatttttaacttgcctaaatccctgtattccaaaacctgctgcatcataataaatatatctatatatatttagcataagacgtgatatttttaatttcttttttaaaaaattatatttgtctcttagagttaaaattttctttatataatattgtcatatgtcatagttttaatacaattcacatgatttctatgtttcttaatgatattttgttgtgtaaaattgatcggattgattaaaaaacaaattctctggaatttgtgcgttcatgctttttcgtattctttatggcttttaaataaatatacaatggttaatagt

SEQ ID NO: 165947 - DNA, 1442 bp, Homo sapiens
  Payload ID: 12668
  Gene Symbol: PLSCR4
  Gene Name: phospholipid scramblase 4
  Uniprot ID: Q9NRQ2
  ENST ID: ENST00000446574
  CDS Start-End: 333-1322
ggccgcggtgcctgcgggcaggcgcggaggttgcgcggcgtcctgcgctagcagttcccggacactgcgctcgcgtcgcatcctcaggtggttgcagaagttccgtggtgtcgggcgcgcgtctgcactgcagacgcagagggtttgggagcgagcagtttcctgcccagggatgggggtcctggctgcacttcacgggggcggccctttcgtttcgctctgcgtgacaggtctcgcttgattgggtttctcatgggtctctggcgtttctacggcgcggctctcacggactcaggccaggccactcgcaggattaattggaattcttcaaaatgtcaggtgtggtacccacagcccctgaacagcctgcaggtgaaatggaaaatcaaacaaaaccaccagatccaaggcctgatgctcctcctgaatacaattctcattttttaccaggaccccctggaacagctgtccctccacctactggctacccaggaggcttgcctatgggatactacagtccacagcaacccagtaccttccctttgtaccagccagttggtggtatccatcctgtccggtatcagcctggcaaatatcctatgccaaatcagtctgttccaataacatggatgccagggccaactcctatggcaaactgccctcctggtctggaatacttagttcagttggacaacatacatgttcttcagcattttgagcctctggaaatgatgacatgttttgaaactaataatagatatgatattaaaaacaactcagaccagatggtttacattgtaaccgaagacacagatgactttaccaggaatgcctatcggacactaaggcccttcgtcctccgggtcactgattgtatgggccgagaaatcatgacaatgcagagacccttcagatgcacctgctgttgcttctgttgcccctctgccagacaagagctggaggtgcagtgtcctcctggtgtcaccattggctttgttgcggaacattggaacctgtgcagggcggtgtacagcatccaaaatgagaagaaagaaaatgtgatgagagttcgtgggccatgctcaacctatggctgtggttcagattctgtttttgaggtcaaatcccttgatggcatatccaacatcggcagtattatccggaagtggaatggtttgttatcagcaatggcagatgctgaccattttgacattcacttcccactagacctggatgtgaagatgaaagccatgatttttggagcttgcttcctcattgacttcatgtattttgaaagatctccaccacaacgttcaagatagagagacacagcaagccatcaactatggttaattttgaaaaatggaaaagttggattgggcttacagtcagcactcagttatttgcaagtgtatttctttgctttgtagagtatttttatt

SEQ ID NO: 165948 - DNA, 2839 bp, Homo sapiens
  Payload ID: 12668
  Gene Symbol: PLSCR4
  Gene Name: phospholipid scramblase 4
  Uniprot ID: Q9NRQ2
  ENST ID: ENST00000433593
  CDS Start-End: 159-833
ataacttgaaaaatcctctccgtctcccttccctgcctcctttcctttccctttcctctgccagtacaactagacccggcgtctggcgtccccggtgcccagcattctgcggggcaggcggtgtggtacccacagcccctgaacagcctgcaggtgaaatggaaaatcaaacaaaaccaccagatccaaggcctgatgctcctcctgaatacaattctcattttttaccaggaccccctggaacagctgtccctccacctactggctacccaggaggcttgcctatgggatactacagtccacagcaacccagtaccttccctttgtaccagccagttggtggtatccatcctgtccggtatcagcctggcaaatatcctatgccaaatcagtctgttccaataacatggatgccagggccaactcctatggcaaactgccctcctggtctggaatacttagttcagctggaggtgcagtgtcctcctggtgtcaccattggctttgttgcggaacattggaacctgtgcagggcggtgtacagcatccaaaatgagaagaaagaaaatgtgatgagagttcgtgggccatgctcaacctatggctgtggttcagattctgtttttgaggtcaaatcccttgatggcatatccaacatcggcagtattatccggaagtggaatggtttgttatcagcaatggcagatgctgaccattttgacattcacttcccactagacctggatgtgaagatgaaagccatgatttttggagcttgcttcctcattgacttcatgtattttgaaagatctccaccacaacgttcaagatagagagacacagcaagccatcaactatggttaattttgaaaaatggaaaagttggattgggcttacagtcagcactcagttatttgcaagtgtatttctttgctttgtagagtatttttattgggtgttaactttgacagctgagagtgggcttgcaagaacacaatctaaaagtgtgtttcaattgagtatctctctagtagaataggagttcatcctgaaaagctgtgactcattaacccagtaaacatatacaaagtaagcttaaaacactataaacatgagataagggaaaatgaatccagagttctcatattaataggtagtgaaacaataaggctttttagagcagactttgttggcataaaataacctggcttctatccctaaccctttcctacctttcctctccgtcaacatgtcctcatactgaagacaaacttgtttcaatgatagtcttcatttttaaaaacaaaaaggcaggcagacagaaataatgatgttttcttgcactaagaaggtactacttgtacacatatatcaaaacctcattctgcaaagtttttgaaggtttcaatgggaaatttgattttattacaaaataaaacattttttaatgttaaagtttatatattccatgcttgttttctcattcactggcatggatgatcaggagctgcctatatatgaaggcagaatcagactatcaggaaaggagctggccagggccacagccagtcaagatctctgagcaacttagagacattggtgtcattatatgaagcttgcatttaatacatttatacataatacatttgtacatttaattcataacgtctcttggtcacagatgccttatatataaaataagttgccagatctctaagattgcctagtacacctttgtatctcatttgatgtgatacccagaagagatcattgttttttgtttttgtttttgtttttttcaagaagatccttcgtgatcaccatgctgttctcatggtaagaactggagttatgtttttaaatttggaaatatgacattttatgtagcactttataaaaagtgaaagcgacaaattccaccgctgcttaatactgctttgcttctttttattgacatgatagataaatatgtatctacacagagtaataataataaaacacagtaaacattctatttctctatggtctacagcatgccagtaaataatatgtaggaccaataataaattatcaattacacatttttgtgttaactaattaaaagcatagtgtataagtgagtacactctaattaacttgcttctgttgcactttagttttctacctgcatatggactgcattttttttttttaacacagtcagtatgtagaatgggatgtattcttctgctgctgcttattaaataaagaaagcctgagtgttcttagatggggttattctgagatgagggtcttagcctacagttctttttgaaatgaaaggtgctttgttttttaattatattcatcttttcagggtaaatttgtttttctgagtttctcgtaatgctcatttttacatgctgctactagcttttttttttaaaaaaagtaaaagttgctgctttctaaaatattaattgccttatatttgaaagtgccattgcaatcgtaagtagactatgtatttcctataatgatgtctgatatttaaataggaaatcagacaaacaatattcagaaagtttaagcatataaactttttatttttaacttgcctaaatccctgtattccaaaacctgctgcatcataataaatatatctatatatatttagcataagacgtgatatttttaatttcttttttaaaaaattatatttgtctcttagagttaaaattttctttatataatattgtcatatgtcatagttttaatacaattcacatgatttctatgtttcttaatgatattttgttgtgtaaaattgatcggattgattaaaaaacaaattctctgg

SEQ ID NO: 165949 - DNA, 593 bp, Homo sapiens
  Payload ID: 12668
  Gene Symbol: PLSCR4
  Gene Name: phospholipid scramblase 4
  ENST ID: ENST00000498625
  CDS Start-End: 301-593
aacatttcttgactttttttaaatctcattctactacaatataaactgcagcacagtaggtggcagagtgtctgtctgcttcattgctgtactctcaacatctgtattagtgcctcgtacataataggtgctcaataagtatttttttaattaatgaagggacaaatgtaaggtaactggaggttaaaaaaattacagaaatccttacctgtgttactgagtagcaatactatttattatgtatgtattttaaaggcattaacattttttatttttcaggattaattggaattcttcaaaatgtcaggtgtggtacccacagcccctgaacagcctgcaggtgaaatggaaaatcaaacaaaaccaccagatccaaggcctgatgctcctcctgaatacaattctcattttttaccaggaccccctggaacagctgtccctccacctactggctacccaggaggcttgcctatgggatactacagtccacagcaacccagtaccttccctttgtaccagccagttggtggtatccatcctgtccggtatcagcctggcaaatatcctatgccaaatcagtctgttccaataac

SEQ ID NO: 165950 - DNA, 1054 bp, Homo sapiens
  Payload ID: 12668
  Gene Symbol: PLSCR4
  Gene Name: phospholipid scramblase 4
  ENST ID: ENST00000460350
  CDS Start-End: 269-1054
cccagaacccgcgcctagccctcccttccgcgcgcttactttgtttataacttgaaaaatcctctccgtctcccttccctgcctcctttcctttccctttcctctgccagtacaactagacccggcgtctggcgtccccggtgcccagcattctgcggggcaggcggtctcgcttgattgggtttctcatgggtctctggcgtttctacggcgcggctctcacggactcaggccaggccactcgcaggattaattggaattcttcaaaatgtcaggtgtggtacccacagcccctgaacagcctgcaggtgaaatggaaaatcaaacaaaaccaccagatccaaggcctgatgctcctcctgaatacaattctcattttttaccaggaccccctggaacagctgtccctccacctactggctacccaggaggcttgcctatgggatactacagtccacagcaacccagtaccttccctttgtaccagccagttggtggtatccatcctgtccggtatcagcctggcaaatatcctatgccaaatcagtctgttccaataacatggatgccagggccaactcctatggcaaactgccctcctggtctggaatacttagttcagttggacaacatacatgttcttcagcattttgagcctctggaaatgatgacatgttttgaaactaataatagatatgatattaaaaacaactcagaccagatggtttacattgtaaccgaagacacagatgactttaccaggaatgcctatcggacactaaggcccttcgtcctccgggtcactgattgtatgggccgagaaatcatgacaatgcagagacccttcagatgcacctgctgttgcttctgttgcccctctgccagacaagagctggaggtgcagtgtcctcctggtgtcaccattggctttgttgcggaacattggaacctgtgcagggcggtgtacagcatccaaaatgagaagaaagaaaatgtgatgagagttcgtgggccatgctcaacctatggctgtggttcagattctgtttttgag

SEQ ID NO: 165951 - DNA, 814 bp, Homo sapiens
  Payload ID: 12668
  Gene Symbol: PLSCR4
  Gene Name: phospholipid scramblase 4
  ENST ID: ENST00000476202
  CDS Start-End: 191-814
gtttataacttgaaaaatcctctccgtctcccttccctgcctcctttcctttccctttcctctgccagtacaactagacccggcgtctggcgtccccggtgcccagcattctgcggggcaggcgcttggagacacatagggcaccgtacaacaaactccagctccagaggattaattggaattcttcaaaatgtcaggtgtggtacccacagcccctgaacagcctgcaggtgaaatggaaaatcaaacaaaaccaccagatccaaggcctgatgctcctcctgaatacaattctcattttttaccaggaccccctggaacagctgtccctccacctactggctacccaggaggcttgcctatgggatactacagtccacagcaacccagtaccttccctttgtaccagccagttggtggtatccatcctgtccggtatcagcctggcaaatatcctatgccaaatcagtctgttccaataacatggatgccagggccaactcctatggcaaactgccctcctggtctggaatacttagttcagttggacaacatacatgttcttcagcattttgagcctctggaaatgatgacatgttttgaaactaataatagatatgatattaaaaacaactcagaccagatggtttacattgtaaccgaagacacagatgactttaccaggaatgcctatcggacactaaggcccttcgtcctccgggtcactgattgtatgggccgagaaatcatgacaatgcagagacccttcagatgcacctgctgttgcttctgttgcccctctgccagacaagag

SEQ ID NO: 165952 - DNA, 683 bp, Homo sapiens
  Payload ID: 12668
  Gene Symbol: PLSCR4
  Gene Name: phospholipid scramblase 4
  ENST ID: ENST00000481701
  CDS Start-End: 256-683
gtgtttctcttaagcttgttacattgttttcctcataactgtactatctaacgttaaactttaacatttcttgactttttttaaatctcattctactacaatataaactgcagcacagtaggtggcagagtgtctgtctgcttcattgctgtactctcaacatctgtattagtgcctcgtacataataggtgctcaataagtatttttttaattaatgaagggacaaatgtaaggattaattggaattcttcaaaatgtcaggtgtggtacccacagcccctgaacagcctgcaggtgaaatggaaaatcaaacaaaaccaccagatccaaggcctgatgctcctcctgaatacaattctcattttttaccaggaccccctggaacagctgtccctccacctactggctacccaggaggcttgcctatgggatactacagtccacagcaacccagtaccttccctttgtaccagccagttggtggtatccatcctgtccggtatcagcctggcaaatatcctatgccaaatcagtctgttccaataacatggatgccagggccaactcctatggcaaactgccctcctggtctggaatacttagttcagttggacaacatacatgttcttcagcattttgagcctctggaaatgatgacatgttttgaaactaataatagata

SEQ ID NO: 165953 - DNA, 1375 bp, Homo sapiens
  Payload ID: 12668
  Gene Symbol: PLSCR4
  Gene Name: phospholipid scramblase 4
  Uniprot ID: Q9NRQ2
  ENST ID: ENST00000493382
  CDS Start-End: 332-1321
aggcgtgccggacccgcccccagaacccgcgcctagccctcccttccgcgcgcttactttgtttataacttgaaaaatcctctccgtctcccttccctgcctcctttcctttccctttcctctgccagtacaactagacccggcgtctggcgtccccggtgcccagcattctgcggggcaggcggtctcgcttgattgggtttctcatgggtctctggcgtttctacggcgcggctctcacggactcaggccaggccactcgcagcttggagacacatagggcaccgtacaacaaactccagctccagaggattaattggaattcttcaaaatgtcaggtgtggtacccacagcccctgaacagcctgcaggtgaaatggaaaatcaaacaaaaccaccagatccaaggcctgatgctcctcctgaatacaattctcattttttaccaggaccccctggaacagctgtccctccacctactggctacccaggaggcttgcctatgggatactacagtccacagcaacccagtaccttccctttgtaccagccagttggtggtatccatcctgtccggtatcagcctggcaaatatcctatgccaaatcagtctgttccaataacatggatgccagggccaactcctatggcaaactgccctcctggtctggaatacttagttcagttggacaacatacatgttcttcagcattttgagcctctggaaatgatgacatgttttgaaactaataatagatatgatattaaaaacaactcagaccagatggtttacattgtaaccgaagacacagatgactttaccaggaatgcctatcggacactaaggcccttcgtcctccgggtcactgattgtatgggccgagaaatcatgacaatgcagagacccttcagatgcacctgctgttgcttctgttgcccctctgccagacaagagctggaggtgcagtgtcctcctggtgtcaccattggctttgttgcggaacattggaacctgtgcagggcggtgtacagcatccaaaatgagaagaaagaaaatgtgatgagagttcgtgggccatgctcaacctatggctgtggttcagattctgtttttgaggtcaaatcccttgatggcatatccaacatcggcagtattatccggaagtggaatggtttgttatcagcaatggcagatgctgaccattttgacattcacttcccactagacctggatgtgaagatgaaagccatgatttttggagcttgcttcctcattgacttcatgtattttgaaagatctccaccacaacgttcaagatagagagacacagcaagccatcaactatggttaattttgaaaaatggaaaagttgga

SEQ ID NO: 165954 - DNA, 609 bp, Homo sapiens
  Payload ID: 12668
  Gene Symbol: PLSCR4
  Gene Name: phospholipid scramblase 4
  ENST ID: ENST00000460885
  CDS Start-End: 168-609
ctcccttccgcgcgcttactttgtttataacttgaaaaatcctctccgtctcccttccctgcctcctttcctttccctttcctctgccagtacaactagacccggcgtctggcgtccccggtgcccagcattctgcggggcaggcggattaattggaattcttcaaaatgtcaggtgtggtacccacagcccctgaacagcctgcaggtgaaatggaaaatcaaacaaaaccaccagatccaaggcctgatgctcctcctgaatacaattctcattttttaccaggaccccctggaacagctgtccctccacctactggctacccaggaggcttgcctatgggatactacagtccacagcaacccagtaccttccctttgtaccagccagttggtggtatccatcctgtccggtatcagcctggcaaatatcctatgccaaatcagtctgttccaataacatggatgccagggccaactcctatggcaaactgccctcctggtctggaatacttagttcagctggaggtgcagtgtcctcctggtgtcaccattggctttgttgcggaacattggaacctgtgcagggcggtgtacagcatccaaaatg

SEQ ID NO: 165955 - DNA, 1969 bp, Homo sapiens
  Payload ID: 12669
  Gene Symbol: PLSCR5
  Gene Name: phospholipid scramblase family, member 5
  Uniprot ID: A0PG75
  ENST ID: ENST00000443512
  CDS Start-End: 1005-1820
ctttgtcaaataaggaaaactcaaacttttggcagtctgcaaactgtgaggttgactttataatttttcatcacaaggtatacctcctgaagcctcttaactattttcagaaaaagacagtgttgctgataatgcaatatatcctgcatgttcaacctttgtgaatcataccatgtagggcaattgacttggtgagcaaaatctccatggtcacctgggtagctgcatttagaaataggagctgtccagtcaaggttacagcacttgttttctttccttagaattcaatgcagttaaatatcatctgtaaattttgattagctttgcaaggctattgaaggtttgtatattccaatgcctctgattaatcaaattcaattaaaaatgaaaataaagatttatttatataatagtagggaatatatcctcttcttatttattttgagttgaagagatggagataaatccaatagaaaaataacaataataatgttcaaacattttcaacatgtaaagaattgtatttagaactatcaaaaatttatacaataggatgttttatcacagaatctggaaaggagacttctagaaattgagaaatacaggatatttctgatataagactgaatgcaaatgtgtatattctaagaaatacaaaaacaacttggtaaaaaaaaaaaagacacttaaaatgagtgctgtgtgctttcctttctggtttttattatttttaaattgttccttcagccaccaaagttatatgatggtttctgaacagcgtttacttttgtgacagtttcatctcactctgttgtccaaactgataaagtccagaagtctagaaacagcaagggactcccttcctctgttatatgtaagctgacaagaggcagacaaacacgttctgaagttttgtgcatgctgcgttttctctccttgctgcaacaagaaaagcctttgttttccaacctggcaacctttgaagaagtgactcagacatcttcatggcctctaaagatgcccagaaccaaagaagaggtctgcctggttttcttcctggagctccagacccagaccaaagccttcctgcctcttccaatccagggaaccaagcatggcagctgagtctccctctgccaagcagtttcctgccaacagtcagtctccctcctggtctagaatatttaagccagttagacctgataattatacaccagcaggtggagctgcttggaatgatacttggtactgagacctccaacaaatatgagattaaaaacagcttgggacaaagaatttactttgcagtggaggaaagcatctgcttcaatcgtactttctgttccactctgcgatcttgcaccctgaggatcacagataactcaggtcgagaggtcattacagtgaacaggcccttgagatgtaacagctgctggtgcccttgctacctacaagagttagaaatccaagcccctcctggtactatagttggttacgttacgcagaagtgggacccctttctgcctaaattcacaatccaaaatgcaaacaaagaagatattttgaaaattgttggtccttgtgtgacatgtggctgttttggcgatgtggattttgaggtgaaaaccattaatgaaaagcttacaattgggaagatttcaaagtactggtcaggatttgtaaatgatgtcttcacaaatgctgacaatttcggaattcatgttcctgcagatctagatgtaacagtcaaagcagcaatgatcggtgcctgttttctctttgattttatgttctttgaacattcactggctggattataataaccaagataatgaaaacaataaaatatgcagaacatatttcaaaatcccttgggctctggatttcatttctgaatggtttgaatgtttgcttttttgttaaaaaaaaatgttaattattatatttattaaaacagtttaatgaggca

SEQ ID NO: 165956 - DNA, 1058 bp, Homo sapiens
  Payload ID: 12669
  Gene Symbol: PLSCR5
  Gene Name: phospholipid scramblase family, member 5
  Uniprot ID: A0PG75
  ENST ID: ENST00000492200
  CDS Start-End: 28-843
ctttgaagaagtgactcagacatcttcatggcctctaaagatgcccagaaccaaagaagaggtctgcctggttttcttcctggagctccagacccagaccaaagccttcctgcctcttccaatccagggaaccaagcatggcagctgagtctccctctgccaagcagtttcctgccaacagtcagtctccctcctggtctagaatatttaagccagttagacctgataattatacaccagcaggtggagctgcttggaatgatacttggtactgagacctccaacaaatatgagattaaaaacagcttgggacaaagaatttactttgcagtggaggaaagcatctgcttcaatcgtactttctgttccactctgcgatcttgcaccctgaggatcacagataactcaggtcgagaggtcattacagtgaacaggcccttgagatgtaacagctgctggtgcccttgctacctacaagagttagaaatccaagcccctcctggtactatagttggttacgttacgcagaagtgggacccctttctgcctaaattcacaatccaaaatgcaaacaaagaagatattttgaaaattgttggtccttgtgtgacatgtggctgttttggcgatgtggattttgaggtgaaaaccattaatgaaaagcttacaattgggaagatttcaaagtactggtcaggatttgtaaatgatgtcttcacaaatgctgacaatttcggaattcatgttcctgcagatctagatgtaacagtcaaagcagcaatgatcggtgcctgttttctctttgattttatgttctttgaacattcactggctggattataataaccaagataatgaaaacaataaaatatgcagaacatatttcaaattatttagagtatttcaaagcacttccacacatatgaatggcctgcactggacctcacaagaaaacagagggtttcaactgtgcataacatcagagatgaccaggtgcaacctccatatattgaagacttagaaaatgagaaatataaaaattaaattactttgtttta

SEQ ID NO: 165957 - DNA, 1018 bp, Homo sapiens
  Payload ID: 12669
  Gene Symbol: PLSCR5
  Gene Name: phospholipid scramblase family, member 5
  Uniprot ID: A0PG75
  ENST ID: ENST00000482567
  CDS Start-End: 28-807
ctttgaagaagtgactcagacatcttcatggcctctaaagatgcccagaaccaaagaagaggtctgcctggttttcttcctggagctccagacccagaccaaagccttcctgcctcttccaatccagggaaccaagcatggcagctgagtctccctctgccaagcagtttcctgccaacattagacctgataattatacaccagcaggtggagctgcttggaatgatacttggtactgagacctccaacaaatatgagattaaaaacagcttgggacaaagaatttactttgcagtggaggaaagcatctgcttcaatcgtactttctgttccactctgcgatcttgcaccctgaggatcacagataactcaggtcgagaggtcattacagtgaacaggcccttgagatgtaacagctgctggtgcccttgctacctacaagagttagaaatccaagcccctcctggtactatagttggttacgttacgcagaagtgggacccctttctgcctaaattcacaatccaaaatgcaaacaaagaagatattttgaaaattgttggtccttgtgtgacatgtggctgttttggcgatgtggattttgaggtgaaaaccattaatgaaaagcttacaattgggaagatttcaaagtactggtcaggatttgtaaatgatgtcttcacaaatgctgacaatttcggaattcatgttcctgcagatctagatgtaacagtcaaagcagcaatgatcggtgcctgttttctctttgattttatgttctttgaacattcactggctggattataataaccaagataatgaaaacaataaaatatgcagaacatatttcaaattatttagagtatttcaaagcacttccacacatatgaatggcctgcactggacctcacaagaaaacagagggtttcaactgtgcataacatcagagatgaccaggtgcaacctccatatattgaagacttagaaaatgagaaatataaaaattaaattactttgt

SEQ ID NO: 165958 - DNA, 1731 bp, Homo sapiens
  Payload ID: 12670
  Gene Symbol: PLTP
  Gene Name: phospholipid transfer protein
  Uniprot ID: P55058
  ENST ID: ENST00000354050
  CDS Start-End: 86-1411
agaccccgtcgcccggatcccctgagctgcccgccatcccacgtgaccgcgccgccccccagctccaccgctgagcccgctcgccatggccctcttcggggccctcttcctagcgctgctggcaggcgcacatgcagagttcccaggctgcaagatccgcgtcacctccaaggcgctggagctggtgaagcaggaggggctgcgctttctggagcaagagctggagactatcaccattccggacctgcggggcaaagaaggccacttctactacaacatctctgaggtgaaggtcacagagctgcaactgacatcttccgagctcgatttccagccacagcaggagctgatgcttcaaatcaccaatgcctccttggggctgcgcttccggagacagctgctctactggttcttgaaggtgtatgattttctctccacgttcatcacctcagggatgcgcttcctcctcaaccagcagatctgccctgtcctctaccacgcagggacggtcctgctcaactccctcctggacaccgtgcctgtgcgcagttctgtggacgagcttgttggcattgactattccctcatgaaggatcctgtggcttccaccagcaacctggacatggacttccggggggccttcttccccctgactgagaggaactggagcctccccaaccgggcagtggagccccagctgcaggaggaagagcggatggtgtatgtggccttctctgagttcttcttcgactctgccatggagagctacttccgggcgggggccctgcagctgttgctggtgggggacaaggtgccccacgacctggacatgctgctgagggccacctactttgggagcattgtcctgctgagcccagcagtgattgactccccattgaagctggagctgcgggtcctggccccaccgcgctgcaccatcaagccctctggcaccaccatctctgtcactgctagcgtcaccattgccctggtcccaccagaccagcctgaggtccagctgtccagcatgactatggacgcccgtctcagcgccaagatggctctccgggggaaggccctgcgcacgcagctggacctgcgcaggttccgaatctattccaaccattctgcactggagtcgctggctctgatcccattacaggcccctctgaagaccatgctgcagattggggtgatgcccatgctcaatgagcggacctggcgtggggtgcagatcccactacctgagggcatcaactttgtgcatgaggtggtgacgaaccatgcgggattcctcaccatcggggctgatctccactttgccaaagggctgcgagaggtgattgagaagaaccggcctgctgatgtcagggcgtccactgcccccacaccgtccacagcagctgtctgagccctcaatccccaagctggcagctgtcattcaggaccccaacccctctcagcccctcttttcccacattcatagcctgtagtgccccctctaacccccagtgccacagagaagacgggatttgaagctgtacccaatttaattccataatcaatctatcaattacagtccgtccaccacctccctgtgggctgtcctgagctctgttgggttcctgggatggaatcagtgcatcataaagggcattctttaagcagagaaggggccaggccaccccattcaggaactgctgcgggaataaagtgctaacttgcccccag

SEQ ID NO: 165959 - DNA, 1530 bp, Homo sapiens
  Payload ID: 12670
  Gene Symbol: PLTP
  Gene Name: phospholipid transfer protein
  Uniprot ID: P55058
  ENST ID: ENST00000372420
  CDS Start-End: 132-1349
atgtagagggggccaagaaggaagcaggaccagtggatgtgaggcgtggtcgaagaacaacagaaagggtgaaggtcacagagctgcaactgacatcttccgagctcgatttccagccacagcaggagctgatgcttcaaatcaccaatgcctccttggggctgcgcttccggagacagctgctctactggttcttctatgatgggggctacatcaacgcctcagctgagggtgtgtccatccgcactggtctggagctctcccgggatcccgctggacggatgaaagtgtccaatgtctcctgccaggcctctgtctccagaatgcacgcggccttcgggggaaccttcaagaaggtgtatgattttctctccacgttcatcacctcagggatgcgcttcctcctcaaccagcagatctgccctgtcctctaccacgcagggacggtcctgctcaactccctcctggacaccgtgcctgtgcgcagttctgtggacgagcttgttggcattgactattccctcatgaaggatcctgtggcttccaccagcaacctggacatggacttccggggggccttcttccccctgactgagaggaactggagcctccccaaccgggcagtggagccccagctgcaggaggaagagcggatggtgtatgtggccttctctgagttcttcttcgactctgccatggagagctacttccgggcgggggccctgcagctgttgctggtgggggacaaggtgccccacgacctggacatgctgctgagggccacctactttgggagcattgtcctgctgagcccagcagtgattgactccccattgaagctggagctgcgggtcctggccccaccgcgctgcaccatcaagccctctggcaccaccatctctgtcactgctagcgtcaccattgccctggtcccaccagaccagcctgaggtccagctgtccagcatgactatggacgcccgtctcagcgccaagatggctctccgggggaaggccctgcgcacgcagctggacctgcgcaggttccgaatctattccaaccattctgcactggagtcgctggctctgatcccattacaggcccctctgaagaccatgctgcagattggggtgatgcccatgctcaatgagcggacctggcgtggggtgcagatcccactacctgagggcatcaactttgtgcatgaggtggtgacgaaccatgcgggattcctcaccatcggggctgatctccactttgccaaagggctgcgagaggtgattgagaagaaccggcctgctgatgtcagggcgtccactgcccccacaccgtccacagcagctgtctgagccctcaatccccaagctggcagctgtcattcaggaccccaacccctctcagcccctcttttcccacattcatagcctgtagtgccccctctaacccccagtgccacagagaagacgggatttgaagctgtacccaatttaattccataatcaatctatcaattacagtccgtccaccacc

SEQ ID NO: 165960 - DNA, 1743 bp, Homo sapiens
  Payload ID: 12670
  Gene Symbol: PLTP
  Gene Name: phospholipid transfer protein
  Uniprot ID: P55058
  ENST ID: ENST00000372431
  CDS Start-End: 81-1562
ccgtcgcccggatcccctgagctgcccgccatcccacgtgaccgcgccgccccccagctccaccgctgagcccgctcgccatggccctcttcggggccctcttcctagcgctgctggcaggcgcacatgcagagttcccaggctgcaagatccgcgtcacctccaaggcgctggagctggtgaagcaggaggggctgcgctttctggagcaagagctggagactatcaccattccggacctgcggggcaaagaaggccacttctactacaacatctctgaggtgaaggtcacagagctgcaactgacatcttccgagctcgatttccagccacagcaggagctgatgcttcaaatcaccaatgcctccttggggctgcgcttccggagacagctgctctactggttcttctatgatgggggctacatcaacgcctcagctgagggtgtgtccatccgcactggtctggagctctcccgggatcccgctggacggatgaaagtgtccaatgtctcctgccaggcctctgtctccagaatgcacgcggccttcgggggaaccttcaagaaggtgtatgattttctctccacgttcatcacctcagggatgcgcttcctcctcaaccagcagatctgccctgtcctctaccacgcagggacggtcctgctcaactccctcctggacaccgtgcctgtgcgcagttctgtggacgagcttgttggcattgactattccctcatgaaggatcctgtggcttccaccagcaacctggacatggacttccggggggccttcttccccctgactgagaggaactggagcctccccaaccgggcagtggagccccagctgcaggaggaagagcggatggtgtatgtggccttctctgagttcttcttcgactctgccatggagagctacttccgggcgggggccctgcagctgttgctggtgggggacaaggtgccccacgacctggacatgctgctgagggccacctactttgggagcattgtcctgctgagcccagcagtgattgactccccattgaagctggagctgcgggtcctggccccaccgcgctgcaccatcaagccctctggcaccaccatctctgtcactgctagcgtcaccattgccctggtcccaccagaccagcctgaggtccagctgtccagcatgactatggacgcccgtctcagcgccaagatggctctccgggggaaggccctgcgcacgcagctggacctgcgcaggttccgaatctattccaaccattctgcactggagtcgctggctctgatcccattacaggcccctctgaagaccatgctgcagattggggtgatgcccatgctcaatgagcggacctggcgtggggtgcagatcccactacctgagggcatcaactttgtgcatgaggtggtgacgaaccatgcgggattcctcaccatcggggctgatctccactttgccaaagggctgcgagaggtgattgagaagaaccggcctgctgatgtcagggcgtccactgcccccacaccgtccacagcagctgtctgagccctcaatccccaagctggcagctgtcattcaggaccccaacccctctcagcccctcttttcccacattcatagcctgtagtgccccctctaacccccagtgccacagagaagacgggatttgaagctgtacccaatttaattccataatcaatctatcaattacagtccgtccaccacc

SEQ ID NO: 165961 - DNA, 1420 bp, Homo sapiens
  Payload ID: 12670
  Gene Symbol: PLTP
  Gene Name: phospholipid transfer protein
  Uniprot ID: P55058
  ENST ID: ENST00000420868
  CDS Start-End: 89-1285
gccagaccccgtcgcccggatcccctgagctgcccgccatcccacgtgaccgcgccgccccccagctccaccgctgagcccgctcgccatggccctcttcggggccctcttcctagcgctgctggcaggcgcacatgcagagttcccaggctgcaagatccgcgtcacctccaaggcgctggagctggtgaagcaggaggggctgcgctttctggagcaagagctggagactatcaccattccggacctgcggggcaaagaaggccacttctactacaacatctctgagaaggtgtatgattttctctccacgttcatcacctcagggatgcgcttcctcctcaaccagcagatctgccctgtcctctaccacgcagggacggtcctgctcaactccctcctggacaccgtgcctgtgcgcagttctgtggacgagcttgttggcattgactattccctcatgaaggatcctgtggcttccaccagcaacctggacatggacttccggggggccttcttccccctgactgagaggaactggagcctccccaaccgggcagtggagccccagctgcaggaggaagagcggatggtgtatgtggccttctctgagttcttcttcgactctgccatggagagctacttccgggcgggggccctgcagctgttgctggtgggggacaaggtgccccacgacctggacatgctgctgagggccacctactttgggagcattgtcctgctgagcccagcagtgattgactccccattgaagctggagctgcgggtcctggccccaccgcgctgcaccatcaagccctctggcaccaccatctctgtcactgctagcgtcaccattgccctggtcccaccagaccagcctgaggtccagctgtccagcatgactatggacgcccgtctcagcgccaagatggctctccgggggaaggccctgcgcacgcagctggacctgcgcaggttccgaatctattccaaccattctgcactggagtcgctggctctgatcccattacaggcccctctgaagaccatgctgcagattggggtgatgcccatgctcaatgagcggacctggcgtggggtgcagatcccactacctgagggcatcaactttgtgcatgaggtggtgacgaaccatgcgggattcctcaccatcggggctgatctccactttgccaaagggctgcgagaggtgattgagaagaaccggcctgctgatgtcagggcgtccactgcccccacaccgtccacagcagctgtctgagccctcaatccccaagctggcagctgtcattcaggaccccaacccctctcagcccctcttttcccacattcatagcctgtagtgccccctctaacccccagtgccacagagaagacgggatttgaagctgtaccc

SEQ ID NO: 165962 - DNA, 2255 bp, Homo sapiens
  Payload ID: 12670
  Gene Symbol: PLTP
  Gene Name: phospholipid transfer protein
  Uniprot ID: P55058
  ENST ID: ENST00000477313
  CDS Start-End: 596-2077
agtccctcgccgagccgcgtggtgcactgaagccggcgtggggaggagagccgatgaaggagaacgctaacatgggggctccaggcagaatctctaatgggagagatttaggacctgagggagccgggagacccgggagcccacggtctggtcggccacctcctctcctccccgggcgcgaggcctaggagaccgcaagccaccctccaagaatgcgcgtgcagtcgttgccgtggcaacgtgcaagcctgcatgggcccaccgctaaaggaaaggggaggttgttgggggtgtgggggctggtcccctggaggtccaaactcatcacgcggcggtagcacgagggaactgggaacgtcccctcccccgtgtcccaaatcctctgggagccagaacgcaagtcgcatcgcctctctgagcctcagtttccacatctgccatatggaggcaagattattggttccaagttccccgaagagttatctggagggtaacgatccaggctagttcccacttatggttggacgtccaaggaatgggtttaagcggctcagataactcctgcgaccccaccccacccccaggcccgctcgccatggccctcttcggggccctcttcctagcgctgctggcaggcgcacatgcagagttcccaggctgcaagatccgcgtcacctccaaggcgctggagctggtgaagcaggaggggctgcgctttctggagcaagagctggagactatcaccattccggacctgcggggcaaagaaggccacttctactacaacatctctgaggtgaaggtcacagagctgcaactgacatcttccgagctcgatttccagccacagcaggagctgatgcttcaaatcaccaatgcctccttggggctgcgcttccggagacagctgctctactggttcttctatgatgggggctacatcaacgcctcagctgagggtgtgtccatccgcactggtctggagctctcccgggatcccgctggacggatgaaagtgtccaatgtctcctgccaggcctctgtctccagaatgcacgcggccttcgggggaaccttcaagaaggtgtatgattttctctccacgttcatcacctcagggatgcgcttcctcctcaaccagcagatctgccctgtcctctaccacgcagggacggtcctgctcaactccctcctggacaccgtgcctgtgcgcagttctgtggacgagcttgttggcattgactattccctcatgaaggatcctgtggcttccaccagcaacctggacatggacttccggggggccttcttccccctgactgagaggaactggagcctccccaaccgggcagtggagccccagctgcaggaggaagagcggatggtgtatgtggccttctctgagttcttcttcgactctgccatggagagctacttccgggcgggggccctgcagctgttgctggtgggggacaaggtgccccacgacctggacatgctgctgagggccacctactttgggagcattgtcctgctgagcccagcagtgattgactccccattgaagctggagctgcgggtcctggccccaccgcgctgcaccatcaagccctctggcaccaccatctctgtcactgctagcgtcaccattgccctggtcccaccagaccagcctgaggtccagctgtccagcatgactatggacgcccgtctcagcgccaagatggctctccgggggaaggccctgcgcacgcagctggacctgcgcaggttccgaatctattccaaccattctgcactggagtcgctggctctgatcccattacaggcccctctgaagaccatgctgcagattggggtgatgcccatgctcaatgagcggacctggcgtggggtgcagatcccactacctgagggcatcaactttgtgcatgaggtggtgacgaaccatgcgggattcctcaccatcggggctgatctccactttgccaaagggctgcgagaggtgattgagaagaaccggcctgctgatgtcagggcgtccactgcccccacaccgtccacagcagctgtctgagccctcaatccccaagctggcagctgtcattcaggaccccaacccctctcagcccctcttttcccacattcatagcctgtagtgccccctctaacccccagtgccacagagaagacgggatttgaagctgtacccaatttaattccataatcaatctatcaattacagtccgtccacc

SEQ ID NO: 165963 - DNA, 1522 bp, Homo sapiens
  Payload ID: 12671
  Gene Symbol: LHPP
  Gene Name: phospholysine phosphohistidine inorganic pyrophosphate phosphatase
  Uniprot ID: Q9H008
  ENST ID: ENST00000368839
  CDS Start-End: 21-653
gaggagcagggccgggcgccatggcaccgtggggcaagcggctggctggcgtgcgcggggtgctgcttgacatctcgggcgtgctgtacgacagcggcgcgggcggcggcacggccatcgccggctcggtggaggcggtggccagactgaagcgttcccggctgaaggtgaggttctgcaccaacgagtcgcagaagtcccgggcagagctggtggggcagcttcagaggctgggatttgacatctctgagcaggaggtgaccgccccggcaccagctgcctgccagatcctgaaggagcaaggcctgcgaccatacctgctcatccatgacggagtccgctcagaatttgatcagatcgacacatccaacccaaactgtgtggtaattgcagacgcaggagaaagcttttcttatcaaaacatgaataacgccttccaggtgctcatggagctggaaaaacctgtgctcatatcactgggaaaagggcgttactacaaggagacctctggcctgatgctggacgttggtccctacatgaaggcgcttgagtatgcctgtggcatcaaagccgaggtggtggggaagccttctcctgagtttttcaagtctgccctgcaagcgataggagtggaagcccaccaggcccagtgacgagcaccatccggaagtgaaggctgatgggtacgtggacaacctcgcagaggcagtggacctgctgctgcagcacgccgacaagtgatggcctcctgggagagccccgcctcctccacccctgcctctcctccacccctgcctcccctccacccctgcctctcctccacccgcccaggagagccccacctcctccacccctgcctctcctccacccctgcctcccctccacctgccccagtgcccagaccaaccaaggccctgacagccctgccttctgccctctgccctgcatgggcaggcatttgttccctacctgggtggcctgctcccctgcctgggccctgacttcagctccctgtagtgaagtccaggagggtgggacaggcctgtcaggcctctgggaatctcccaaatcccagaactcaccactcaccatgggcctttaaatgcagtaaactccacctaaccagattcaggggcactatgcccactgcctcctcttcagactctttgcatttcagtgaagagcctggaagaaacccaggggcctcctatgcacagatcttgcagcccagaaccaagtcagcctccctgcgactgcccaggcacactgcccaccaccccacccccgaaacaatgccagcccgctgctttttctatcctcccagtcacctttgcagacaaagaccaggggcagctcccgagggcactgtgaaggctcccatgccacacagtgagaactgtagcctctgcgtccaaggcacacagggtactttctggacccactgctggacagacttgaaggtgtcatgcccggtgtgtgcaggaggaaactaacagttcagtaaactctgccttgaccagca

SEQ ID NO: 165964 - DNA, 1622 bp, Homo sapiens
  Payload ID: 12671
  Gene Symbol: LHPP
  Gene Name: phospholysine phosphohistidine inorganic pyrophosphate phosphatase
  Uniprot ID: Q9H008
  ENST ID: ENST00000368842
  CDS Start-End: 29-841
gcggagctgaggagcagggccgggcgccatggcaccgtggggcaagcggctggctggcgtgcgcggggtgctgcttgacatctcgggcgtgctgtacgacagcggcgcgggcggcggcacggccatcgccggctcggtggaggcggtggccagactgaagcgttcccggctgaaggtgaggttctgcaccaacgagtcgcagaagtcccgggcagagctggtggggcagcttcagaggctgggatttgacatctctgagcaggaggtgaccgccccggcaccagctgcctgccagatcctgaaggagcaaggcctgcgaccatacctgctcatccatgacggagtccgctcagaatttgatcagatcgacacatccaacccaaactgtgtggtaattgcagacgcaggagaaagcttttcttatcaaaacatgaataacgccttccaggtgctcatggagctggaaaaacctgtgctcatatcactgggaaaagggcgttactacaaggagacctctggcctgatgctggacgttggtccctacatgaaggcgcttgagtatgcctgtggcatcaaagccgaggtggtggggaagccttctcctgagtttttcaagtctgccctgcaagcgataggagtggaagcccaccaggccgtcatgattggggacgatatcgtgggcgacgtcggcggtgcccagcggtgtggaatgagagcgctgcaggtgcgcaccgggaagttcaggcccagtgacgagcaccatccggaagtgaaggctgatgggtacgtggacaacctcgcagaggcagtggacctgctgctgcagcacgccgacaagtgatggcctcctgggagagccccgcctcctccacccctgcctctcctccacccctgcctcccctccacccctgcctctcctccacccgcccaggagagccccacctcctccacccctgcctctcctccacccctgcctcccctccacctgccccagtgcccagaccaaccaaggccctgacagccctgccttctgccctctgccctgcatgggcaggcatttgttccctacctgggtggcctgctcccctgcctgggccctgacttcagctccctgtagtgaagtccaggagggtgggacaggcctgtcaggcctctgggaatctcccaaatcccagaactcaccactcaccatgggcctttaaatgcagtaaactccacctaaccagattcaggggcactatgcccactgcctcctcttcagactctttgcatttcagtgaagagcctggaagaaacccaggggcctcctatgcacagatcttgcagcccagaaccaagtcagcctccctgcgactgcccaggcacactgcccaccaccccacccccgaaacaatgccagcccgctgctttttctatcctcccagtcacctttgcagacaaagaccaggggcagctcccgagggcactgtgaaggctcccatgccacacagtgagaactgtagcctctgcgtccaaggcacacagggtactttctggacccactgctggacagacttgaaggtgtcatgcccggtgtgtgcaggaggaaactaacagttcagtaaactctgccttgaccagca

SEQ ID NO: 165965 - DNA, 840 bp, Homo sapiens
  Payload ID: 12671
  Gene Symbol: LHPP
  Gene Name: phospholysine phosphohistidine inorganic pyrophosphate phosphatase
  ENST ID: ENST00000392757
  CDS Start-End: 30-668
cgcggagctgaggagcagggccgggcgccatggcaccgtggggcaagcggctggctggcgtgcgcggggtgctgcttgacatctcgggcgtgctgtacgacagcggcgcgggcggcggcacggccatcgccggctcggtggaggcggtggccagactgaagcgttcccggctgaaggtgaggttctgcaccaacgagtcgcagaagtcccgggcagagctggtggggcagcttcagaggctgggatttgacatctctgagcaggaggtgaccgccccggcaccagctgcctgccagatcctgaaggagcaaggcctgcgaccatacctgctcatccatgacggagtccgctcagaatttgatcagatcgacacatccaacccaaactgtgtggtaattgcagacgcaggagaaagcttttcttatcaaaacatgaataacgccttccaggtgctcatggagctggaaaaacctgtgctcatatcactgggaaaagggcgttactacaaggagacctctggcctgatgctggacgttggtccctacatgaaggcgcttgagtatgcctgtggcatcaaagccgaggtggtggggaagccttctcctgagtttttcaagtctgccctgcaagcgataggagtggaagcccaccagttactttcagtatgaaagcaagaagcagaaatgcctgcggcttttcctgagtttttgctgcttctctgaaaggataagaattgacaagtcctatcagtgtgttaatatatctcactggcaagacagtgtaacagcaagattacaacaatatggaggaaataataaagtcactcattttgcgaccttt

SEQ ID NO: 165966 - DNA, 1298 bp, Homo sapiens
  Payload ID: 12672
  Gene Symbol: PMM1
  Gene Name: phosphomannomutase 1
  Uniprot ID: Q92871
  ENST ID: ENST00000216259
  CDS Start-End: 86-874
aatgccccgccccgtcagcacttatccctgagctgcttctgccgttgcatcttcgggactccgccccgcgcgcggacctgcagccatggcagtcaccgcccaggcagcccgcaggaaggagcgcgtcctctgcctgtttgacgtggacgggaccctcacgccggctcgccagaaaattgaccctgaggtggccgccttcctgcagaagctacgaagtagagtgcagatcggtgtggtgggcggctctgactactgtaagatcgctgagcagctgggtgacggggatgaagtcattgagaagtttgattatgtgtttgccgagaacgggacggtgcagtataagcacggacgactgctctccaagcagaccatccagaaccacctgggggaggagctgctgcaggacttgatcaacttctgcctcagctacatggccctgctcaggctgcccaagaagcgtggaaccttcatcgagttccggaatggcatgctgaacatctcgcccatcggccggagctgcaccctggaggagaggatcgagttctccgaactggacaagaaagagaagatccgggagaagttcgtggaagccctgaaaacagagtttgctggcaaagggctgaggttctctcgaggaggcatgatcagctttgacgtcttccccgagggctgggacaagcgctactgcctggatagcctggaccaggacagcttcgacaccatccacttctttgggaacgagactagccctggtgggaacgactttgagatctttgccgacccccggactgttggccacagcgtggtgtctcctcaggacacggtgcagcgatgccgggagattttcttcccagagacagctcatgaggcgtgaccggggcccacatctgtgtgtcgtgacttctgaagagtttggcctaggcctaaagagaggtcctggtgttggatagatgccagggcccctcctctggcccaggacgcctgctgcaagcccacccagatggggccagagtctgtgtggacaaccgtccccagccagtctgctcctagtggcactggcttcgtcctcccagggcccagagtgttccccatgctccacctggtggcccaggccacagctgctgcttgtatttcggtacagaagaggtttctttctgcaccaggaggaggcgtgctcaagtatcggtacgagatctagcctgccctgcctgcctgccctgggcgatgaggtacggtggggaaggtgcctattttagagaactttgtcacagtattaaagttcccagaacaaagtaggt

SEQ ID NO: 165967 - DNA, 567 bp, Homo sapiens
  Payload ID: 12672
  Gene Symbol: PMM1
  Gene Name: phosphomannomutase 1
  ENST ID: ENST00000414636
  CDS Start-End: 43-249
gttgcatcttcgggactccgccccgcgcgcggacctgcagccatggcagtcaccgcccaggcagcccgcaggaaggagcgcgtcctctgcctgtttgacgtggacgggaccctcacgccggctcgccagtcgtggagcagagagggcttcttttcaaattcgtttatgagctctacccacccggatgtgagaggctccaggcctagcctgtttgctgtgaggacactgaggaatagtgaggaaaattgaccctgaggtggccgccttcctgcagaagctacgaagtagagtgcagatcggtgtggtgggcggctctgactactgtaagatcgctgagcagctgggtgacggggatgaagtcattgagaagtttgattatgtgtttgccgagaacgggacggtgcagtataagcacggacgactgctctccaagcagaccatccagaaccacctgggggaggagctgctgcaggacttgatcaacttctgcctcagctacatggccctgctcaggctgcccaagaagcgtggaaccttcatcgagttccggaatggcatgctgaacat

SEQ ID NO: 165968 - DNA, 2313 bp, Homo sapiens
  Payload ID: 12673
  Gene Symbol: PMM2
  Gene Name: phosphomannomutase 2
  Uniprot ID: O15305
  ENST ID: ENST00000268261
  CDS Start-End: 67-807
ccggaagttccgggccgagttcctcgtgccaacgtgtcttgtaaggtgcggctagaaactggggacatggcagcgcctggcccagcgctctgcctcttcgacgtggatgggaccctcaccgccccgcggcagaaaattaccaaagaaatggatgacttcctacaaaaattgaggcagaagatcaaaatcggagtggtaggcggatcggactttgagaaagtgcaggagcaactgggaaatgatgtggttgaaaaatacgattatgtgtttccagaaaatggcttggtagcatacaaagatgggaaactcttgtgtagacagaatattcaaagtcatctgggtgaggccctaatccaagatttaatcaactactgtctgagctacattgcgaaaattaaactcccgaagaagaggggtactttcattgaattccgaaatgggatgttaaacgtgtcccctattggaagaagctgcagccaagaagaacgcattgagttctacgaactcgataaaaaagaaaatataagacaaaagtttgtagcagatctacggaaagagtttgctggaaaaggcctcacgttttccataggaggccagatcagctttgatgtctttcctgatggatgggacaagagatactgtctgcgacatgtggaaaatgacggttataagaccatttatttctttggagacaaaactatgccaggtggcaatgaccatgagatcttcacagaccccagaaccatgggctactccgtgacagcgcctgaggacacgcgcaggatctgtgaactgctgttctcctaacgtgggagcgggaggggcggggtcccggctgacaagccagcatagggcattcggtggccagagccgagggtcctcccacacgtgctcacccacccgcagcctaggcaggctctgcatgctatgccaggcatgtgcagtctggacttccacctccagtgccagaaacttccagaaggaaggagaaaactcttgtcaagaatggcccagaggaatgcctcgcacaaaaggtcttccccacccacccccagccccctagtctaatacccaccctgatacgtgcaatcatgtagttttggcggaaatttccccatcattctaggatgatacagaaagaaaaactgtgcctggaccctccctcttggtgggtctgtggaaacataagcggtttttttaatgggcccctgcatcaataccaaacatgggggtttggtaatgagaaaccaggacaggccatctgcagtgacccagcccaggacgaagtttacaaacacctcctggaacgaagctcccgcctgcatgtcaccttgatgggggctgtgagtggggcagtgtgatacccagtgactagacgcactctgcgttttcccgtgtttggggctgaggcctgctggacagatggctggccaagtgggagcagaccctagggagtttgcacctcggctgggccggattcggaccggctctgtgttcactacactcagaatagcctggctgcttctctgtctccgagaccggaggtagtgggaaccaacagctgggctggagagttggtgctggcaaaacagtccttgccctggggccggttcttacccaggtccagagaaaccaacgcgggatgtcagacttcaccaaaaggactttctggttgcccctggctggcttcctggaggcgttcgcctctagtttctcagggatggagcgagagcccagccagagaacagtaagaggagctgctctcctatctgcactcacccaggccttcacccagactttaccacggaggcggctgagtgcagctacagctaggtccgcgtccctcactcttttcatcttctgcacgttcttcgtgaaactggaaggatcccgggtctcagctagaacacggtggaagagaactttcctaggaaacggttcatgtgtcacttttcaggatgtggaaacactgagccatacaccctccattgcttggtgctggggttgtgtggcctccactgggcacttgccgacctgagtctggggccaggggagcccaggctgccctgcactcctgcctcccagcccacagccaggtgctttcatcacagctaaacctggttccctccaaacctcccagccactcgggcttgtaactgtctgagccccggatccggtggggtgaaagcagccagctcatcccagtgactcacaggacacagccatccagcggcatctttccttgtcgaatgatactgtaatgaccttccaaagtgaagagtagcacattaaagtgattttattgtttcctgt

SEQ ID NO: 165969 - DNA, 1557 bp, Homo sapiens
  Payload ID: 12673
  Gene Symbol: PMM2
  Gene Name: phosphomannomutase 2
  ENST ID: ENST00000566540
  CDS Start-End: 42-242
gtgccaacgtgtcttgtaaggtgcggctagaaactggggacatggcagcgcctggcccagcgctctgcctcttcgacgtggatgggaccctcaccgccccgcggcagaaaattaccaaagaaatggatgacttcctacaaaaattgaggcagaagatcaaaatcggagtggtaggcggatcggactttgagaaagtgcaggagcaactgggaaatgatgaatattcaaagtcatctgggtgaggccctaatccaagatttaatcaactactgtctgagctacattgcgaaaattaaactcccgaagaagagaaagaaaatataagacaaaagtttgtagcagatctacggaaagagtttgctggaaaaggcctcacgttttccataggaggccagatcagctttgatgtctttcctgatggatgggacaagagatactgtctgcgacatgtggaaaatgacggttataagaccatttatttctttggagacaaaactatgccaggtggcaatgaccatgagatcttcacagaccccagaaccatgggctactccgtgacagcgcctgaggacacgcgcaggatctgtgaactgctgttctcctaacgtgggagcgggaggggcggggtcccggctgacaagccagcatagggcattcggtggccagagccgagggtcctcccacacgtgctcacccacccgcagcctaggcaggctctgcatgctatgccaggcatgtgcagtctggacttccacctccagtgccagaaacttccagaaggaaggagaaaactcttgtcaagaatggcccagaggaatgcctcgcacaaaaggtcttccccacccacccccagccccctagtctaatacccaccctgatacgtgcaatcatgtagttttggcggaaatttccccatcattctaggatgatacagaaagaaaaactgtgcctggaccctccctcttggtgggtctgtggaaacataagcggtttttttaatgggcccctgcatcaataccaaacatgggggtttggtaatgagaaaccaggacaggccatctgcagtgacccagcccaggacgaagtttacaaacacctcctggaacgaagctcccgcctgcatgtcaccttgatgggggctgtgagtggggcagtgtgatacccagtgactagacgcactctgcgttttcccgtgtttggggctgaggcctgctggacagatggctggccaagtgggagcagaccctagggagtttgcacctcggctgggccggattcggaccggctctgtgttcactacactcagaatagcctggctgcttctctgtctccgagaccggaggtagtgggaaccaacagctgggctggagagttggtgctggcaaaacagtccttgccctggggccggttcttacccaggtccagagaaaccaacgcgggatgtcagacttcaccaaaaggactttctggttgcccctggctggcttcctggaggcgttcgcctctagtttctcagggatggagcgagagcccagccagagaacagtaagaggagct

SEQ ID NO: 165970 - DNA, 931 bp, Homo sapiens
  Payload ID: 12673
  Gene Symbol: PMM2
  Gene Name: phosphomannomutase 2
  ENST ID: ENST00000562318
  CDS Start-End: 42-242
gtgccaacgtgtcttgtaaggtgcggctagaaactggggacatggcagcgcctggcccagcgctctgcctcttcgacgtggatgggaccctcaccgccccgcggcagaaaattaccaaagaaatggatgacttcctacaaaaattgaggcagaagatcaaaatcggagtggtaggcggatcggactttgagaaagtgcaggagcaactgggaaatgatgaatattcaaagtcatctgggtgaggccctaatccaagatttaatcaactactgtctgagctacattgcgaaaattaaactcccgaagaagaggggtactttcattgaattccgaaatgggatgttaaacgtgtcccctattggaagaagctgcagccaagaagaacgcattgagttctacgaactcgataaaaaagaaaatataagacaaaagtttgtagcagatctacggaaagagtttgctggaaaaggcctcacgttttccataggaggccagatcagctttgatgtctttcctgatggatgggacaagagatactgtctgcgacatgtggaaaatgacggttataagaccatttatttctttggagacaaaactatgccaggtggcaatgaccatgagatcttcacagaccccagaaccatgggctactccgtgacagcgcctgaggacacgcgcaggatctgtgaactgctgttctcctaacgtgggagcgggaggggcggggtcccggctgacaagccagcatagggcattcggtggccagagccgagggtcctcccacacgtgctcacccacccgcagcctaggcaggctctgcatgctatgccaggcatgtgcagtctggacttccacctccagtgccagaaacttccagaaggaaggagaaaactcttgtcaagaatggcccagaggaatgcctcgcacaaaa

SEQ ID NO: 165971 - DNA, 550 bp, Homo sapiens
  Payload ID: 12673
  Gene Symbol: PMM2
  Gene Name: phosphomannomutase 2
  ENST ID: ENST00000568602
  CDS Start-End: 42-317
gtgccaacgtgtcttgtaaggtgcggctagaaactggggacatggcagcgcctggcccagcgctctgcctcttcgacgtggatgggaccctcaccgccccgcggcagaaaattaccaaagaaatggatgacttcctacaaaaattgaggcagaagatcaaaatcggagtggtaggcggatcggactttgagaaagtgcaggagcaactgggaaatgatgcccccctcacctccccatcactgaaacagaatctccagcacaggaccccgaaaaaccagagaggcttattgaccccttcactggagagtctgacttgataggtctgtggagcctgggaatcctatttcatggttgaaaaatacgattatgtgtttccagaaaatggcttggtagcatacaaagatgggaaactcttgtgtagacagaatattcaaagtcatctgggtgaggccctaatccaagatttaatcaactactgtctgagctacattgcgaaaattaaactcccgaagaagaggggtactttcattgaattccgaaatgggatgtt

SEQ ID NO: 165972 - DNA, 567 bp, Homo sapiens
  Payload ID: 12673
  Gene Symbol: PMM2
  Gene Name: phosphomannomutase 2
  ENST ID: ENST00000564069
  CDS Start-End: 1-427
cttcgacgtggatgggaccctcaccgccccgcggcagaaaattaccaaagaaatggatgacttcctacaaaaattgaggcagaagatcaaaatcggagtggtaggcggatcggactttgagaaagtgcaggagcaactgggaaatgatgtggttgaaaaatacgattatgtgtttccagaaaatggcttggtagcatacaaagatgggaaactcttgtgtagacagaatattcaaagtcatctgggtgaggccctaatccaagatttaatcaactactgtctgagctacattgcgaaaattaaactcccgaagaagaggggtactttcattgaattccgaaatgggatgttaaacgtgtcccctattggaagaagctgcagccaagaagaacgcattgagttctacgaactcgataaaaaaatataagacaaaagtttgtagcagatctacggaaagagtttgctggaaaaggcctcacgttttccataggaggccagatcagctttgatgtctttcctgatggatgggacaagagatactgtctgcgacatgtggaaaatgacggt

SEQ ID NO: 165973 - DNA, 514 bp, Homo sapiens
  Payload ID: 12673
  Gene Symbol: PMM2
  Gene Name: phosphomannomutase 2
  ENST ID: ENST00000565896
  CDS Start-End: 42-239
gtgccaacgtgtcttgtaaggtgcggctagaaactggggacatggcagcgcctggcccagcgctctgcctcttcgacgtggatgggaccctcaccgccccgcggcagaaaattaccaaagaaatggatgacttcctacaaaaattgaggcagaagatcaaaatcggagtggtaggcggatcggactttgagaaagtgcaggagcaactgggaaatgatgtacatttctggagttactgatggagaactgggtactcagatgtgtgagtagattcacctagaaagaatctccagcacaggaccccgaaaaaccagagaggcttattgaccccttcactggagagtctgacttgataggtctgtggagcctgggaatcctatttcagggtactttcattgaattccgaaatgggatgttaaacgtgtcccctattggaagaagctgcagccaagaagaacgcattgagttctacgaactcgataaaaaagaaaatataagacaaaagtttgtagca

SEQ ID NO: 165974 - DNA, 573 bp, Homo sapiens
  Payload ID: 12673
  Gene Symbol: PMM2
  Gene Name: phosphomannomutase 2
  ENST ID: ENST00000570134
  CDS Start-End: 46-246
cctcgtgccaacgtgtcttgtaaggtgcggctagaaactggggacatggcagcgcctggcccagcgctctgcctcttcgacgtggatgggaccctcaccgccccgcggcagaaaattaccaaagaaatggatgacttcctacaaaaattgaggcagaagatcaaaatcggagtggtaggcggatcggactttgagaaagtgcaggagcaactgggaaatgatgaatattcaaagtcatctgggtgaggccctaatccaagatttaatcaactactgtctgagctacattgcgaaaattaaactcccgaagaagagaaagaaaatataagacaaaagtttgtagcagatctacggaaagagtttgctggaaaaggcctcacgttttccataggaggccagatcagctttgatgtctttcctgatggatgggacaagagatactgtctgcgacatgtggaaaatgacggttataagaccatttatttctttggagacaaaactatgccaacccttgcagaggagacaaacagtgatgttttccattcatacacggcgagaggggccagaagcctg

SEQ ID NO: 165975 - DNA, 698 bp, Homo sapiens
  Payload ID: 12673
  Gene Symbol: PMM2
  Gene Name: phosphomannomutase 2
  ENST ID: ENST00000569958
  CDS Start-End: 17-484
gctagaaactggggacatggcagcgcctggcccagcgctctgcctcttcgacgtggatgggaccctcaccgccccgcggcagaaaattaccaaagaaatggatgacttcctacaaaaattgaggcagaagatcaaaatcggagtggtaggcggatcggactttgagaaagtgcaggagcaactgggaaatgatgaaaatataagacaaaagtttgtagcagatctacggaaagagtttgctggaaaaggcctcacgttttccataggaggccagatcagctttgatgtctttcctgatggatgggacaagagatactgtctgcgacatgtggaaaatgacggttataagaccatttatttctttggagacaaaactatgccaggtggcaatgaccatgagatcttcacagaccccagaaccatgggctactccgtgacagcgcctgaggacacgcgcaggatctgtgaactgctgttctcctaacgtgggagcgggaggggcggggtcccggctgacaagccagcatagggcattcggtggccagagccgagggtcctcccacacgtgctcacccacccgcagcctaggcaggctctgcatgctatgccaggcatgtgcagtctggacttccacctccagtgccagaaacttccagaaggaaggagaaaactcttgtcaagaatggcccagaggaatg

SEQ ID NO: 165976 - DNA, 986 bp, Homo sapiens
  Payload ID: 12673
  Gene Symbol: PMM2
  Gene Name: phosphomannomutase 2
  Uniprot ID: O15305
  ENST ID: ENST00000566604
  CDS Start-End: 47-406
tcctcgtgccaacgtgtcttgtaaggtgcggctagaaactggggacatggcagcgcctggcccagcgctctgcctcttcgacgtggatgggaccctcaccgccccgcggcagaaaattaccaaagaaatggatgacttcctacaaaaattgaggcagaagatcaaaatcggagtggtaggcggatcggactttgagaaagtgcaggagcaactgggaaatgatgtggttgaaaaatacgattatgtgtttccagaaaatggcttggtagcatacaaagatgggaaactcttgtgtagacagaatattcaaagtcatctgggtgaggccctaatccaagatttaatcaactactgtctgagctacattgcgaaaattaaactcccgaagaagagaaagaaaatataagacaaaagtttgtagcagatctacggaaagagtttgctggaaaaggcctcacgttttccataggaggccagatcagctttgatgtctttcctgatggatgggacaagagatactgtctgcgacatgtggaaaatgacggttataagaccatttatttctttggagacaaaactatgccaggtggcaatgaccatgagatcttcacagaccccagaaccatgggctactccgtgacagcgcctgaggacacgcgcaggatctgtgaactgctgttctcctaacgtgggagcgggaggggcggggtcccggctgacaagccagcatagggcattcggtggccagagccgagggtcctcccacacgtgctcacccacccgcagcctaggcaggctctgcatgctatgccaggcatgtgcagtctggacttccacctccagtgccagaaacttccagaaggaaggagaaaactcttgtcaagaatggcccagaggaatgcctcgcacaaaaggtcttccccacccacccccagccccctagtctaatacccaccctgatacgtgcaatcatgtagttttggcgg

SEQ ID NO: 165977 - DNA, 1002 bp, Homo sapiens
  Payload ID: 12673
  Gene Symbol: PMM2
  Gene Name: phosphomannomutase 2
  ENST ID: ENST00000570076
  CDS Start-End: 34-306
gtgtcttgtaaggtgcggctagaaactggggacatggcagcgcctggcccagcgctctgcctcttcgacgtggatgggaccctcaccgccccgcggcagaaaattaccaaagaaatggatgacttcctacaaaaattgaggcagaagatcaaaatcggagtggtaggcggatcggactttgagaaagtgcaggagcaactgggaaatgatgaaagaaaatataagacaaaagtttgtagcagatctacggaaagagtttgctggaaaaggcctcacgttttccataggaggccagatcagctttgatgtctttcctgatggatgggacaagagatactgtctgcgacatgtggaaaatgacggttataagaccatttatttctttggagacaaaactatgccaggtggcaatgaccatgagatcttcacagaccccagaaccatgggctactccgtgacagcgcctgaggacacgcgcaggatctgtgaactgctgttctcctaacgtgggagcgggaggggcggggtcccggctgacaagccagcatagggcattcggtggccagagccgagggtcctcccacacgtgctcacccacccgcagcctaggcaggctctgcatgctatgccaggcatgtgcagtctggacttccacctccagtgccagaaacttccagaaggaaggagaaaactcttgtcaagaatggcccagaggaatgcctcgcacaaaaggtcttccccacccacccccagccccctagtctaatacccaccctgatacgtgcaatcatgtagttttggcggaaatttccccatcattctaggatgatacagaaagaaaaactgtgcctggaccctccctcttggtgggtctgtggaaacataagcggtttttttaatgggcccctgcatcaataccaaacatgggggtttggtaatgagaaaccaggacaggccatctgcagtgacccagcccaggacgaagtttacaaacacctcctg

SEQ ID NO: 165978 - DNA, 793 bp, Homo sapiens
  Payload ID: 12673
  Gene Symbol: PMM2
  Gene Name: phosphomannomutase 2
  ENST ID: ENST00000565221
  CDS Start-End: 17-229
gctagaaactggggacatggcagcgcctggcccagcgctctgcctcttcgacgtggatgggaccctcaccgccccgcggcagaaaattaccaaagaaatggatgacttcctacaaaaattgaggcagaagatcaaaatcggagtggtaggcggatcggactttgagaaagtgcaggagcaactgggaaatgatggggtactttcattgaattccgaaatgggatgttaaacgtgtcccctattggaagaagctgcagccaagaagaacgcattgagttctacgaactcgataaaaaagaaaatataagacaaaagtttgtagcagatctacggaaagagtttgctggaaaaggcctcacgttttccataggaggccagatcagctttgatgtctttcctgatggatgggacaagagatactgtctgcgacatgtggaaaatgacggttataagaccatttatttctttggagacaaaactatgccaggtggcaatgaccatgagatcttcacagaccccagaaccatgggctactccgtgacagcgcctgaggacacgcgcaggatctgtgaactgctgttctcctaacgtgggagcgggaggggcggggtcccggctgacaagccagcatagggcattcggtggccagagccgagggtcctcccacacgtgctcacccacccgcagcctaggcaggctctgcatgctatgccaggcatgtgcagtctggacttccacctccagtgccagaaacttccagaaggaaggagaaaactcttgtcaagaatggccc

SEQ ID NO: 165979 - DNA, 907 bp, Homo sapiens
  Payload ID: 12673
  Gene Symbol: PMM2
  Gene Name: phosphomannomutase 2
  ENST ID: ENST00000566983
  CDS Start-End: 205-864
gaactcacgagtcttgcagtcataaagcagcaacataaagcaagctcccaactctagttctccaggcaattcatccaggctgtcccctgcaagctgctcagcccaccagatctgctttggggagcgcattaaacatggttatgcaatgattgggtggcggatgccatagacatctggccctatgacaagaaaattaccaaagaaatggatgacttcctacaaaaattgaggcagaagatcaaaatcggagtggtaggcggatcggactttgagaaagtgcaggagcaactgggaaatgatgtggttgaaaaatacgattatgtgtttccagaaaatggcttggtagcatacaaagatgggaaactcttgtgtagacagaatattcaaagtcatctgggtgaggccctaatccaagatttaatcaactactgtctgagctacattgcgaaaattaaactcccgaagaagaggggtactttcattgaattccgaaatgggatgttaaacgtgtcccctattggaagaagctgcagccaagaagaacgcattgagttctacgaactcgataaaaaagaaaatataagacaaaagtttgtagcagatctacggaaagagtttgctggaaaaggcctcacgttttccataggaggccagatcagctttgatgtctttcctgatggatgggacaagagatactgtctgcgacatgtggaaaatgacggttataagaccatttatttctttggagacaaaactatgccaggtggcaatgaccatgagatcttcacagaccccagaaccatgggctactccgtgacagcgcctgaggacacgcgcaggatctgtgaactgctgttctcctaacgtgggagcgggaggggcggggtcccggctgacaagccagcat

SEQ ID NO: 165980 - DNA, 1280 bp, Homo sapiens
  Payload ID: 12674
  Gene Symbol: PMVK
  Gene Name: phosphomevalonate kinase
  Uniprot ID: Q15126
  ENST ID: ENST00000368467
  CDS Start-End: 307-885
gaaggttctgggcggggctggactgttctaagtgagttcgggtgggggagcttcacgaggggaggctgctctgtgaaggaaccgcctttctctccgcgtgtctcacccttttctccccatatctgtttggacatgagctgagggcacggtcgcgggcggtcagccctgttcgcagctacggcgaggaggggcgcgattgttccttgttgccgctccgcttagtggccgcgtccattccgcgcggtgtcccgattttaggggtagggagaagtgtcagcttcaggcatcgcgaggcgtggcggccccatggccccgctgggaggcgccccgcggctggtactgctgttcagcggcaagaggaaatccgggaaggacttcgtgaccgaggcgctgcagagcagacttggagctgatgtctgtgctgtcctccggctctctggtccactcaaggaacagtatgctcaggagcatggcttgaacttccagagactcctggacaccagcacctacaaggaggcctttcggaaggacatgatccgctggggagaggagaaacgccaggctgacccaggcttcttttgcaggaagattgtggagggcatctcccagcccatctggctggtgagtgacacacggagagtgtctgacatccagtggtttcgggaggcctatggggccgtgacgcagacggtccgcgttgtagcgttggagcagagccgacagcagcggggctgggtgttcacgccaggggtggacgatgctgagtcagaatgtggcctggacaacttcggggactttgactgggtcatcgagaaccatggagttgaacagcgcctggaggagcagttggagaacctgatagaatttatccgctccagactttagtcactaggttctaggagtgagctggggcctgctgaggtgggggtggggctgactctgcaaaatgggggtgtcccccgatcctggccgaggtgaggaacagacagggggggtctagattctgagggggttggtggatattgggcaaggcaggaaacctctggagacctcattttctccatggggaagacagccatgctcttcaggaggagactccaagggcaaaggagggtgtcttggctgtgcttgaaggcgaaaccctgccatatccccagtgccagtcccctcagcctgtggtggccttgcatcctgactggatgttctcagccccttgttctgggcaagaacccagagctccccagtgtggatactaataaacctcttggagcacactctca

SEQ ID NO: 165981 - DNA, 2250 bp, Homo sapiens
  Payload ID: 12675
  Gene Symbol: PPCDC
  Gene Name: phosphopantothenoylcysteine decarboxylase
  Uniprot ID: Q96CD2
  ENST ID: ENST00000342932
  CDS Start-End: 145-759
agtcagattccgcgggagagcggcagagataccgcgatatttgggagcggccccgagacgcgcctggcgcggatcctaaatcccgacagctttatagagcccaggcctggcaggctcccagaacttgaagccaccagaccccacatggaaccaaaggcctcctgtccagctgctgcacccttgatggagagaaaattccatgttcttgtgggtgtcacggggagtgtcgcagccctgaagttgcctcttctggtgtcaaagcttttggacattcctgggctggaagtagcagtggtcacaactgagagagccaaacatttctacagcccccaggacattcctgtcaccctctacagcgacgctgatgaatgggagatatggaagagccgctctgacccagttctgcacattgacctgcggaggtgggcagacctcctgctggtggctcctcttgatgccaacactctggggaaggtggccagtggcatctgtgacaacttgcttacctgcgtcatgcgggcctgggaccgcagcaagcccctgctcttctgcccggccatgaacaccgccatgtgggagcacccgatcacagcgcagcaggtagaccagctcaaggcctttggctatgtcgagatcccctgtgtggccaagaagctggtgtgcggagatgaaggtctcggggccatggctgaagtggggaccatcgtggacaaagtgaaagaagtcctcttccagcacagtggcttccagcagagttgacctgggatttctgtcatgggtgtccctctgtactcagaatgggttcaggccaagtcggtgaagatggatgttggcaaaataggaggataccctcatttgctgaatgggggacctgctctgagcctgcccaggggccaggcctgctccaggttaaactggacggaaggcccaggtctcagtttctttcaaccaggagaggccgctgcctagagcccctccccaccttttcctggatgggtgaggcaagccaggagagcaagcagtgttgtcctcacgggaggaggactgagcgactgggaaaactcggctctacatctcacccagaacggcttttagaaacaccacagctggagagtcctggctgagccttgggagtttcagctctttggcggggtgcccaggtgccatgcgatcagcgaagcctgcgagttggcaggactctgaggtttcctgcagaccatgccatgagattgaaggtgcggggaaataaagaaaaatcaccatttaggagactccattctttccctacaacccagctgtggtcccagagatcagggggtgttgccaggtgtggctggggaagggtctgggttcacaactcaccggcactctttagtccccgtataacatggtggttaaggataaagatctgaagccagacagcccctagttccaatcccagctctgccgcttactagcagtggcagtttggttcaggacttagccttcctgaccttcacttacctcagctatcttgttatcctaccctcagggagttgttgagaggattcagtgaaattttgtgtgcagaatacccatgccactgagtgcctggaacgtagtaaatgtcaaatcaatggaagttaaaactaggcatgcatatatgccagagagctttcctagcatttactgcaatgccctgtctcattttgggaaaaaggaaatcctggatgctaagttgacacatccctttatgcaagtgacaggtaagcagccaggagggttgaccctgccctgggtcccaggcctcttgcctgcttcttggtttcctctgttctcatcctttcagctttgctggacctgaggcaggggcctgggtgtctgtgcctccctaccccccagtacacatgaccaagggaagtagatccagagacaccatgcactctggcccagaaaccctctgctacccagcttttgacttaattgccatttggtgtggctgcagcggggagggcttgtctgcgtatttggagctgaggctgaggctggcttcctgccctctggcttccaggccaggtgtgagggacatcccatgtgggctctgagagcactgagagtagaggtgccttgaggggaccaggaagcctactggctggaatcagtgctccagcagcctccacagcctttatctcaacagcacttgacttcaccaggtgaccctttgggataaaattgccttagggtatgaaataaactataactaaaatggta

SEQ ID NO: 165982 - DNA, 464 bp, Homo sapiens
  Payload ID: 12675
  Gene Symbol: PPCDC
  Gene Name: phosphopantothenoylcysteine decarboxylase
  ENST ID: ENST00000569562
  CDS Start-End: 272-464
gatatttgggagcggccccgagacgcgcctggcgcggctggaagtagcagtggtcacaactgagagagccaaacatttctacagcccccaggacattcctgtcaccctctacagcgacgctgatgaatgggagatatggaagagccgctctgacccagttctgcacattgacctgcggaggtgggcagacctcctgctggtggctcctcttgatgccaacactctggggaaggtggccagtggcatctgtgacaacttgcttacctgcgtcatgcgggcctgggaccgcagcaagcccctgctcttctgcccggccatgaacaccgccatgtgggagcacccgatcacagcgcagcaggtagaccagctcaaggcctttggctatgtcgagatcccctgtgtggccaagaagctggtgtgcggagatgaaggtctcggggccatggctgaagtggggaccatcg

SEQ ID NO: 165983 - DNA, 926 bp, Homo sapiens
  Payload ID: 12675
  Gene Symbol: PPCDC
  Gene Name: phosphopantothenoylcysteine decarboxylase
  ENST ID: ENST00000568649
  CDS Start-End: 95-580
ccccgagacgcgcctggcgcggatcctaaatcccgacagctttatagagcccaggcctggcaggctcccagaacttgaagccaccagaccccacatggaaccaaaggcctcctgtccagctgctgcacccttgatggagagaaaattccatgttcttgtgggtgtcacggggagtgtcgcagccctgaagttgcctcttctggtgtcaaagcttttggacattcctgggctggaagtagcagtggtcacaactgagagagccaaacatttctacagcccccaggacattcctgtcaccctctacagcgacgctgatgaatgggagacctgcgtcatgcgggcctgggaccgcagcaagcccctgctcttctgcccggccatgaacaccgccatgtgggagcacccgatcacagcgcagcaggtagaccagctcaaggcctttggctatgtcgagatcccctgtgtggccaagaagctggtgtgcggagatgaaggtctcggggccatggctgaagtggggaccatcgtggacaaagtgaaagaagtcctcttccagcacagtggcttccagcagagttgacctgggatttctgtcatgggtgtccctctgtactcagaatgggttcaggccaagtcggtgaagatggatgttggcaaaataggaggataccctcatttgctgaatgggggacctgctctgagcctgcccaggggccaggcctgctccaggttaaactggacggaaggcccaggtctcagtttctttcaaccaggagaggccgctgcctagagcccctccccaccttttcctggatgggtgaggcaagccaggagagcaagcagtgttgtcctcacgggaggaggactgagcgactgggaaaactcggctctacatctcacccagaacggcttttagaaacaccaca

SEQ ID NO: 165984 - DNA, 892 bp, Homo sapiens
  Payload ID: 12675
  Gene Symbol: PPCDC
  Gene Name: phosphopantothenoylcysteine decarboxylase
  ENST ID: ENST00000567336
  CDS Start-End: 71-589
cctaaatcccgacagctttatagagcccaggcctggcaggctcccagaacttgaagccaccagaccccacatggaaccaaaggcctcctgtccagctgctgcacccttgatggagagaaaattccatgttcttgtgggtgtcacggggagtgtcgcagccctgaagttgcctcttctggtgtcaaagcttttggacattcctgggatatggaagagccgctctgacccagttctgcacattgacctgcggaggtgggcagacctcctgctggtggctcctcttgatgccaacactctggggaaggtggccagtggcatctgtgacaacttgcttacctgcgtcatgcgggcctgggaccgcagcaagcccctgctcttctgcccggccatgaacaccgccatgtgggagcacccgatcacagcgcagcaggtagaccagctcaaggcctttggctatgtcgagatcccctgtgtggccaagaagctggtgtgcggagatgaaggtctcggggccatggctgaagtggggaccatcgtggacaaagtgaaagaagtcctcttccagcacagtggcttccagcagagttgacctgggatttctgtcatgggtgtccctctgtactcagaatgggttcaggccaagtcggtgaagatggatgttggcaaaataggaggataccctcatttgctgaatgggggacctgctctgagcctgcccaggggccaggcctgctccaggttaaactggacggaaggcccaggtctcagtttctttcaaccaggagaggccgctgcctagagcccctccccaccttttcctggatgggtgaggcaagccaggagagcaagcagtgttgtcctcacgggaggaggactgagcgactgggaaaac

SEQ ID NO: 165985 - DNA, 757 bp, Homo sapiens
  Payload ID: 12675
  Gene Symbol: PPCDC
  Gene Name: phosphopantothenoylcysteine decarboxylase
  ENST ID: ENST00000564923
  CDS Start-End: 113-502
cgcgatatttgggagcggccccgagacgcgcctggcgcggatcctaaatcccgacagctttatagagcccaggcctggcaggctcccagaacttgaagccaccagaccccacatggaaccaaaggcctcctgtccagctgctgcacccttgatggagagaaaattccatgttcttgtgggtgtcacggggagtgtcgcagccctgaagttgcctcttctggtgtcaaagcttttggacattcctgggacctgcgtcatgcgggcctgggaccgcagcaagcccctgctcttctgcccggccatgaacaccgccatgtgggagcacccgatcacagcgcagcaggtagaccagctcaaggcctttggctatgtcgagatcccctgtgtggccaagaagctggtgtgcggagatgaaggtctcggggccatggctgaagtggggaccatcgtggacaaagtgaaagaagtcctcttccagcacagtggcttccagcagagttgacctgggatttctgtcatgggtgtccctctgtactcagaatgggttcaggccaagtcggtgaagatggatgttggcaaaataggaggataccctcatttgctgaatgggggacctgctctgagcctgcccaggggccaggcctgctccaggttaaactggacggaaggcccaggtctcagtttctttcaaccaggagaggccgctgcctagagcccctccccaccttttcctggatgggtgaggcaagccaggaga

SEQ ID NO: 165986 - DNA, 334 bp, Homo sapiens
  Payload ID: 12675
  Gene Symbol: PPCDC
  Gene Name: phosphopantothenoylcysteine decarboxylase
  ENST ID: ENST00000562095
  CDS Start-End: 148-334
gggcctaatacgtggtgctccatacattctggtcgactgtatgaatgaagggggtggcccttgttctccttttagatcctaaatcccgacagctttatagagcccaggcctggcaggctcccagaacttgaagccaccagaccccacatggaaccaaaggcctcctgtccagctgctgcacccttgatggagagaaaattccatgttcttgtgggtgtcacggggagtgtcgcagccctgaagttgcctcttctggtgtcaaagcttttggacattcctgggctggaagtagcagtggtcacaactgagagagccaaacatttctacagccccc

SEQ ID NO: 165987 - DNA, 1149 bp, Homo sapiens
  Payload ID: 12675
  Gene Symbol: PPCDC
  Gene Name: phosphopantothenoylcysteine decarboxylase
  ENST ID: ENST00000563393
  CDS Start-End: 401-646
agtagctaagcagacatgaggcttgcagctaaggagggaagtcctctctcaagccagcctgtgaagacagcacctgcctgccctgaccctcctgtggcctccaggcctgtggctctggtaacagtttcttcctccctccccgccacccccttcttcttggtgacagctggaagtagcagtggtcacaactgagagagccaaacatttctacagcccccaggacattcctgtcaccctctacagcgacgctgatgaatgggagatatggaagagccgctctgacccagttctgcacattgacctgcggaggtgggcagacctcctgctggtggctcctcttgatgccaacactctggggaaggtggccagtggcatctgtgacaacttgcttacctgcgtcatgcgggcctgggaccgcagcaagcccctgctcttctgcccggccatgaacaccgccatgtgggagcacccgatcacagcgcagcaggtagaccagctcaaggcctttggctatgtcgagatcccctgtgtggccaagaagctggtgtgcggagatgaaggtctcggggccatggctgaagtggggaccatcgtggacaaagtgaaagaagtcctcttccagcacagtggcttccagcagagttgacctgggatttctgtcatgggtgtccctctgtactcagaatgggttcaggccaagtcggtgaagatggatgttggcaaaataggaggataccctcatttgctgaatgggggacctgctctgagcctgcccaggggccaggcctgctccaggttaaactggacggaaggcccaggtctcagtttctttcaaccaggagaggccgctgcctagagcccctccccaccttttcctggatgggtgaggcaagccaggagagcaagcagtgttgtcctcacgggaggaggactgagcgactgggaaaactcggctctacatctcacccagaacggcttttagaaacaccacagctggagagtcctggctgagccttgggagtttcagctctttggcggggtgcccaggtgccatgcgatcagcgaagcctgcgagttggcaggactctgaggtttcctgcagaccatgccatgagattgaaggtgcggggaaataaagaaaaatcacca

SEQ ID NO: 165988 - DNA, 984 bp, Homo sapiens
  Payload ID: 12676
  Gene Symbol: PPCS
  Gene Name: phosphopantothenoylcysteine synthetase
  ENST ID: ENST00000372556
  CDS Start-End: 6-176
tgcagatggcggaaatggatccggtagccgagttcccccagcctcccggtgctgcgcgctgggctgaggcccttctgcgatgttttacctggctgcggctgtgtcagatttctatgttcctgtctctgaaatgcctgaacacaagatccagtcatctgggggcccactgcagataacaatgaagatggtgccaaaactgctttctcctttggttaaagattgggctcccaaagcatttataatttcctttaagttggagactgaccccgccattgtaattaatcgagctcggaaggctttggaaatttatcagcatcaagtggtggtggctaatatccttgagtcacgacagtcctttgtgtttattgtaaccaaagactcggaaaccaagttattgctatcagaggaagaaatagaaaaaggcgtagagatagaagagaagatagtggataatcttcagtctcgacacacagcttttataggtgacagaaactgaagtaaaaagcccttataggatcaaaaattgttcagggctcttagagatggtgaaaactacaaaaaaaaccatggctttcatatggacagataaaatgaaagaaagggaaaaggcagtggtgtgtaggcaaatatggtttggcatttgtcttttaatgacacctgatatgatgtcattttgattttgaaattgaacactagaactgttaatcacctttaaaaagaagagcttattgggaattatatattccttaaaatatacatgggggcctgaatgtcagccatctttatactatagaaaaaggattatggatgcatgaatggtcatgctttggagatcaaatattggttgaatgcctatgtatgtcaggccctgtgctgagccatgaggattaaaaagatgaataaacatatcttgtttaggaaatggatgtataaaaaaatcaagtgcaataaagtgtgtgtccaaaagctgacacaatggaaagg

SEQ ID NO: 165989 - DNA, 793 bp, Homo sapiens
  Payload ID: 12676
  Gene Symbol: PPCS
  Gene Name: phosphopantothenoylcysteine synthetase
  ENST ID: ENST00000372560
  CDS Start-End: 28-669
gcgcaggcgccggccgctgcgctgcagatggcggaaatggatccggtagccgagttcccccagcctcccggtgctgcgcgctgggctgaggttatggctcgcttcgcggccaggctgggcgcgcagggccggcgggtggtgttggttacgtcaggcggcaccaaggtcccactggaagcgcggccggtgcgcttcctggacaacttcagcagcgggcggcgcggtgcaacctcggccgaggccttcctagccgccggctacggggtcctgttcttgtatcgcgctcgctctgccttcccctatgcccaccgcttcccaccccagacttggctgtccgctctgcggccttcgggcccagccctttcgggcttgctgagcctggaggccgaggagaatgcacttccgggttttgctgaggctctgaggagctaccaggaggctgcggctgcaggcaccttcctggcagtagagttcaccactttggcggactatttgcatctgttgcaggctgcggcccaggcactcaatccgctaggcccttctgcgatgttttacctggctgcggctgtgtcagatttctatgttcctgtctctgaaatgcctgaacacaagatccagtcatctgggggcccactgcaggtgatgggcgcttctcttccagagatctaatcccatataaccaatcttgggttaatttcctcttgatctggagatggcctttctgcatctgtattcgctaggcacaggggatacagagatgaataagacaccgccctccctcatggacctcaca

SEQ ID NO: 165990 - DNA, 1431 bp, Homo sapiens
  Payload ID: 12676
  Gene Symbol: PPCS
  Gene Name: phosphopantothenoylcysteine synthetase
  Uniprot ID: Q9HAB8
  ENST ID: ENST00000372561
  CDS Start-End: 8-943
gctgcagatggcggaaatggatccggtagccgagttcccccagcctcccggtgctgcgcgctgggctgaggttatggctcgcttcgcggccaggctgggcgcgcagggccggcgggtggtgttggttacgtcaggcggcaccaaggtcccactggaagcgcggccggtgcgcttcctggacaacttcagcagcgggcggcgcggtgcaacctcggccgaggccttcctagccgccggctacggggtcctgttcttgtatcgcgctcgctctgccttcccctatgcccaccgcttcccaccccagacttggctgtccgctctgcggccttcgggcccagccctttcgggcttgctgagcctggaggccgaggagaatgcacttccgggttttgctgaggctctgaggagctaccaggaggctgcggctgcaggcaccttcctggcagtagagttcaccactttggcggactatttgcatctgttgcaggctgcggcccaggcactcaatccgctaggcccttctgcgatgttttacctggctgcggctgtgtcagatttctatgttcctgtctctgaaatgcctgaacacaagatccagtcatctgggggcccactgcagataacaatgaagatggtgccaaaactgctttctcctttggttaaagattgggctcccaaagcatttataatttcctttaagttggagactgaccccgccattgtaattaatcgagctcggaaggctttggaaatttatcagcatcaagtggtggtggctaatatccttgagtcacgacagtcctttgtgtttattgtaaccaaagactcggaaaccaagttattgctatcagaggaagaaatagaaaaaggcgtagagatagaagagaagatagtggataatcttcagtctcgacacacagcttttataggtgacagaaactgaagtaaaaagcccttataggatcaaaaattgttcagggctcttagagatggtgaaaactacaaaaaaaaccatggctttcatatggacagataaaatgaaagaaagggaaaaggcagtggtgtgtaggcaaatatggtttggcatttgtcttttaatgacacctgatatgatgtcattttgattttgaaattgaacactagaactgttaatcacctttaaaaagaagagcttattgggaattatatattccttaaaatatacatgggggcctgaatgtcagccatctttatactatagaaaaaggattatggatgcatgaatggtcatgctttggagatcaaatattggttgaatgcctatgtatgtcaggccctgtgctgagccatgaggattaaaaagatgaataaacatatcttgtttaggaaatggatgtataaaaaaatcaagtgcaataaagtgtgtgtccaaaagctgacacaatggaaagg

SEQ ID NO: 165991 - DNA, 966 bp, Homo sapiens
  Payload ID: 12676
  Gene Symbol: PPCS
  Gene Name: phosphopantothenoylcysteine synthetase
  Uniprot ID: Q9HAB8
  ENST ID: ENST00000372562
  CDS Start-End: 395-811
gggacgtgactcgactaacatctgggtgtattgctgaagttggaaaaggggaagaaagaaagaaaaagcagcacaaaacccacaagtcccacgggtcaaatggccgagaaacgactcccaaggagtccaagtccagaaaggcccgtacagtggccggtaagggtcaaacatggccagttcttcacccaggctaggaaacgaacgtgagggaacgtgaccctaccagatgcccacccagccggggatccccctcgttgcagtgtcactttcgctgggctctggggcagaacaactacgcatttccagacttggcgagatcgggacctagtgtcaaaagaagggtagtgaaccgcccactcagtacggcgcggcgcgtacaccaggcccttctgcgatgttttacctggctgcggctgtgtcagatttctatgttcctgtctctgaaatgcctgaacacaagatccagtcatctgggggcccactgcagataacaatgaagatggtgccaaaactgctttctcctttggttaaagattgggctcccaaagcatttataatttcctttaagttggagactgaccccgccattgtaattaatcgagctcggaaggctttggaaatttatcagcatcaagtggtggtggctaatatccttgagtcacgacagtcctttgtgtttattgtaaccaaagactcggaaaccaagttattgctatcagaggaagaaatagaaaaaggcgtagagatagaagagaagatagtggataatcttcagtctcgacacacagcttttataggtgacagaaactgaagtaaaaagcccttataggatcaaaaattgttcagggctcttagagatggtgaaaactacaaaaaaaaccatggctttcatatggacagataaaatgaaagaaagggaaaaggcagtggtgtgtaggcaaatatggtttggcatttgtcttttaa

SEQ ID NO: 165992 - DNA, 2471 bp, Homo sapiens
  Payload ID: 12677
  Gene Symbol: PEA15
  Gene Name: phosphoprotein enriched in astrocytes 15
  Uniprot ID: Q15121
  ENST ID: ENST00000360472
  CDS Start-End: 189-581
catcaccggccagccgggtggagtgagcggcgctgggctcgggctccggctccgcgggcggaagaggcggcggcggcggcagaagcggcggcggcggcggcgggagccgaggaggaggttccggacgctgcttaggaaccggggactcaggagtgcccgcgccctgagcgctcagctccagaggcgtcatggctgagtacgggaccctcctgcaagacctgaccaacaacatcacccttgaagatctagaacagctcaagtcggcctgcaaggaagacatccccagcgaaaagagtgaggagatcactactggcagtgcctggtttagcttcctggagagccacaacaagctggacaaagacaacctctcctacattgagcacatctttgagatctcccgccgtcctgacctactcactatggtggttgactacagaacccgtgtgctgaagatctctgaggaggatgagctggacaccaagctaacccgtatccccagtgccaagaagtacaaagacattatccggcagccctctgaggaagagatcatcaaattggctcccccaccgaagaaggcctgagcaagggggaggaagaggaggaaggttggaccttcatcagaccactcccttcccccatcctccaggagagggggcaagggcaacccaccatctacccacttactaacctggtcctaacccccttactgtgcgcgtgtgtgtgcgtgtgcgcacgctctggctgtttgtctatatgtctagctcatctagttcctcttcttaaggggatgggggtcaggggctaggggagggggctgagtttccccactttaggaggaggtgggggctatttctatgcaaatagaaatcagcacattcctcctacttccctttcctccactccccccatatctttaaagtgtggaagcagaaaggacctgcattttcctacattgaggagctgacataggggtaaggtatgggagaggtaggtggatccagggaaaagcagtggggacggaaggcaaagagaccactcaacccccacctggaaggggcaaagaaaagccagagttccatgtttgtactcctgtgctggactgtttcctgagtaccagcaggtccctttttgtctctcatgggcctagcataggtatgagccagggatcctttcctggtccctaagatcaaaccccatggagcagccagcgttagatgcccccacccacctgtactctggagagactgtgctgggaacatgtaccactgagcctgagatggggatgagggcagagagaggggagccccctcttccactcagttgttcctactcagactgttgcactctaaacctagggaggttgaagaatgagacccttaggttttaacacgaatcctgacaccaccatctatagggtcccaacttggttattgtaggcaaccttccctctctccttggtgaagaacatcccaagccagaaagaagttaactacagtgttttcctttgcaccgatccccaccccaattcaatcccggaagggacttacttaggaaacccttctttactagatatcctggccccctgggcttgtgaacacctcctagccacatcactacagtacagtgagtgaccccagcctcctgcctaccccaagatgcccctccccaccctgaccgtgctaactgtgtgtacatatatattctacatatatgtatattaaaactgcactgccatgtctgcccttttttgtggtgtctagcattaacttattgtctaggccagagcgggggtgggaggggaatgccacagtgaagggagtggcagaatcaaattgctacatagtccaaacaaaaaagaaggctttttcaaaaaacattaaattcacatgcagtctcagagactatttagacaaagttcaagttaggagcttttaggatgtgggagtaaaactttaatgggaggggagggctggctgctggaagaaggaagaagccagactggttagacagtactcttaactcctagcccagcctagcgtgccctgcccctctggccactgctgcagacacctgccttaacacacacacctctaggactccacagttttgccttaaaggaccttcccaagtctccctttccctgtctggcttctcccttaagaagagagagatacttgtagaattgggtggggggaatgagcatgaactgtccttccatttgggatatgttacattagagtgagagagagaataaggagcctttcttatggaagaaatgggagaagagagacagggttcttttcagcagagtctagtagtttctctgtaaggcaaaataatctaaaaagactaacctgcccacccactccttatattgctgtgagattgcccctatcttgtgctcttctgtctgcagtgtgcacggccttgttctaacccggaataaaggtgattgattgtattgcaactaa

SEQ ID NO: 165993 - DNA, 2694 bp, Homo sapiens
  Payload ID: 12677
  Gene Symbol: PEA15
  Gene Name: phosphoprotein enriched in astrocytes 15
  Uniprot ID: Q15121
  ENST ID: ENST00000368076
  CDS Start-End: 349-804
gcggcggcggcggcggcgggagccgaggaggaggttccggacgctgcttaggaaccggggactcaggagtgcccgcgccctgagcgctcagctccagaggcgggatgctcaccccttcctaattgcagctccgaatattcagatggggacagtgaagcacagatctcaggagtcctaagtattcatggctaccactaagttggatagaatggcctccgcccagactgcctggtgatccctgagcagctctctgcactgctccagaaatcaggaggatttttcagagcccagagagcagatttctccacgagccctaaggaaatctgaatctctggtgaggaaagtgacatggaggatgaaggaaacaagctctgccaagccccaccatggccaggccagaccagcccagtcatggctgagtacgggaccctcctgcaagacctgaccaacaacatcacccttgaagatctagaacagctcaagtcggcctgcaaggaagacatccccagcgaaaagagtgaggagatcactactggcagtgcctggtttagcttcctggagagccacaacaagctggacaaagacaacctctcctacattgagcacatctttgagatctcccgccgtcctgacctactcactatggtggttgactacagaacccgtgtgctgaagatctctgaggaggatgagctggacaccaagctaacccgtatccccagtgccaagaagtacaaagacattatccggcagccctctgaggaagagatcatcaaattggctcccccaccgaagaaggcctgagcaagggggaggaagaggaggaaggttggaccttcatcagaccactcccttcccccatcctccaggagagggggcaagggcaacccaccatctacccacttactaacctggtcctaacccccttactgtgcgcgtgtgtgtgcgtgtgcgcacgctctggctgtttgtctatatgtctagctcatctagttcctcttcttaaggggatgggggtcaggggctaggggagggggctgagtttccccactttaggaggaggtgggggctatttctatgcaaatagaaatcagcacattcctcctacttccctttcctccactccccccatatctttaaagtgtggaagcagaaaggacctgcattttcctacattgaggagctgacataggggtaaggtatgggagaggtaggtggatccagggaaaagcagtggggacggaaggcaaagagaccactcaacccccacctggaaggggcaaagaaaagccagagttccatgtttgtactcctgtgctggactgtttcctgagtaccagcaggtccctttttgtctctcatgggcctagcataggtatgagccagggatcctttcctggtccctaagatcaaaccccatggagcagccagcgttagatgcccccacccacctgtactctggagagactgtgctgggaacatgtaccactgagcctgagatggggatgagggcagagagaggggagccccctcttccactcagttgttcctactcagactgttgcactctaaacctagggaggttgaagaatgagacccttaggttttaacacgaatcctgacaccaccatctatagggtcccaacttggttattgtaggcaaccttccctctctccttggtgaagaacatcccaagccagaaagaagttaactacagtgttttcctttgcaccgatccccaccccaattcaatcccggaagggacttacttaggaaacccttctttactagatatcctggccccctgggcttgtgaacacctcctagccacatcactacagtacagtgagtgaccccagcctcctgcctaccccaagatgcccctccccaccctgaccgtgctaactgtgtgtacatatatattctacatatatgtatattaaaactgcactgccatgtctgcccttttttgtggtgtctagcattaacttattgtctaggccagagcgggggtgggaggggaatgccacagtgaagggagtggcagaatcaaattgctacatagtccaaacaaaaaagaaggctttttcaaaaaacattaaattcacatgcagtctcagagactatttagacaaagttcaagttaggagcttttaggatgtgggagtaaaactttaatgggaggggagggctggctgctggaagaaggaagaagccagactggttagacagtactcttaactcctagcccagcctagcgtgccctgcccctctggccactgctgcagacacctgccttaacacacacacctctaggactccacagttttgccttaaaggaccttcccaagtctccctttccctgtctggcttctcccttaagaagagagagatacttgtagaattgggtggggggaatgagcatgaactgtccttccatttgggatatgttacattagagtgagagagagaataaggagcctttcttatggaagaaatgggagaagagagacagggttcttttcagcagagtctagtagtttctctgtaaggcaaaataatctaaaaagactaacctgcccacccactccttatattgctgtgagattgcccctatcttgtgctcttctgtctgcagtgtgcacggccttgttctaacccggaataaaggtgattgattgtattgcaactaa

SEQ ID NO: 165994 - DNA, 1021 bp, Homo sapiens
  Payload ID: 12677
  Gene Symbol: PEA15
  Gene Name: phosphoprotein enriched in astrocytes 15
  ENST ID: ENST00000368077
  CDS Start-End: 146-472
ctccggctccgcgggcggaagaggcggcggcggcggcagaagcggcggcggcggcggcgggagccgaggaggaggttccggacgctgcttaggaaccggggactcaggagtgcccgcgccctgagcgctcagctccagaggcgtcatggctgagtacgggaccctcctgcaagacctgaccaacaacatcacccttgaagatctagaacagctcaagtcggcctgcaaggaagacatccccagcgaaaagaacaacctctcctacattgagcacatctttgagatctcccgccgtcctgacctactcactatggtggttgactacagaacccgtgtgctgaagatctctgaggaggatgagctggacaccaagctaacccgtatccccagtgccaagaagtacaaagacattatccggcagccctctgaggaagagatcatcaaattggctcccccaccgaagaaggcctgagcaagggggaggaagaggaggaaggttggaccttcatcagaccactcccttcccccatcctccaggagagggggcaagggcaacccaccatctacccacttactaacctggtcctaacccccttactgtgcgcgtgtgtgtgcgtgtgcgcacgctctggctgtttgtctatatgtctagctcatctagttcctcttcttaaggggatgggggtcaggggctaggggagggggctgagtttccccactttaggaggaggtgggggctatttctatgcaaatagaaatcagcacattcctcctacttccctttcctccactccccccatatctttaaagtgtggaagcagaaaggacctgcattttcctacattgaggagctgacataggggtaaggtatgggagaggtaggtggatccagggaaaagcagtggggacggaaggcaaagagaccactcaacccccacctggaaggggcaaagaaaagccagagttccatgtttgtactcctgtgctggactgtttcctgagtaccagcaggtcccttttt

SEQ ID NO: 165995 - DNA, 10744 bp, Homo sapiens
  Payload ID: 12678
  Gene Symbol: PAG1
  Gene Name: phosphoprotein membrane anchor with glycosphingolipid microdomains 1
  Uniprot ID: Q9NWQ8
  ENST ID: ENST00000220597
  CDS Start-End: 712-2010
attctccgcggcgcggcggcgagtgctggctgcggtaccctcccgctcgcttgtccgtctgcgcgcccgcgatgtgaccagccgactgggggcgggctggcggctctgcctgcggcagcgcatcggtttttctcctggcaggtccctaattgagccgtgattcccttggagccagagacacccaccaggggctcggagcgccgcgctccggggctggaggcagctgcagcgctcgggtccgcgcggccgggtgcagtagcctcagtcccagccgccgcctcgctgagtcgtgtgccctggcgaatgcccggcgcccggcacagctgagccaaggcgactggtgcagagcggcggcgcctggtcctgcacttgccgctgctgccgggctgtgccggggcggcggcgctgcgcgccggagtttgcagaggctgcctccgagcgccgtccgccaggaagactccctgcctcctgagtcccaaaaacacgagatttttctcctatttcagcagttggccacaacttcattgctgggaaaaggccaagaaagaagagagaactctcaccacaacatttcaaagggaatacattgccagaacttggaatactctactggacaaacatttcctccaaggacacagctctctgcctccatgtcaccacctttgaaggactgactgattccctcggctggtgccagtgcctgctcctgccatggggcccgcggggagcctgctgggcagcggacagatgcagatcaccctgtggggaagtctggctgctgtcgccattttcttcgtcatcaccttcctcatcttcctgtgctctagttgtgacagggaaaagaagccgcgacagcatagtggggaccatgagaacctgatgaacgtgccttcagacaaggagatgttcagccgttcagttactagcctggcaacagatgctcctgccagcagtgagcagaatggggcactcaccaatggggacattctttcagaggacagtactctgacctgcatgcagcattacgaggaagtccagacatcggcctcggatctgctggattcccaggacagcacagggaaaccaaaatgtcatcagagtcgggagctgcccagaatccctcccgagagcgcagtggataccatgctcacggcgagaagtgtggacggggaccaggggctggggatggaagggccctatgaagtgctcaaggacagctcctcccaagaaaacatggtggaggactgcttgtatgaaactgtgaaagagatcaaggaggtggctgcagctgcacacctggagaaaggccacagtggcaaggcaaaatctacttctgcctcgaaagagctcccagggccccagactgaaggcaaagctgagtttgctgaatatgcctcggtggacagaaacaaaaaatgtcgtcaaagtgttaatgtagagagtatccttggaaattcatgtgatccagaagaggaggccccaccacctgtccctgttaagcttctggacgagaatgaaaaccttcaggagaaggaagggggagaggcggaagagagtgccacagacacgaccagtgaaactaacaagagatttagctcattgtcatacaagtctcgggaagaagaccccactctcacagaagaagagatctcagctatgtactcatcagtaaataaacctggacagttagtgaataaatcggggcagtcgcttacagttccggagtccacctacacctccattcaaggggacccacagaggtcaccctcctcctgtaatgatctctatgctactgttaaagacttcgaaaaaactccaaacagcacacttccaccagcagggaggcccagcgaggagccagagcctgattatgaagcgatacagactctcaacagagaggaagaaaaggccaccctggggaccaatggccaccacggtctcgtcccaaaggagaacgactacgagagcataagtgacttgcagcaaggcagagatattaccaggctctagcaacccagaagacaaccctgggtagcctgtgatcagtgtctggagacgtttcttctgtggaagagaagaagtgacacaaacctatacttcatatgctgctttagtcacctgaagatggttggagaggccctgtcgactgttctcccagttgttcagtttctgagacagagaggtacggactaggctgcacctgagtgtgcccctgcctgccagatggacaggtacacccaagcacatctccctgctgcaccctcaccacccacaaaagatcccagctgtcagtggtctcatctcattagtgaggaaagccaagctgtatggaaaagctgcactcaccaaggaccacaatgcccccggcctaaagtactgccattcagaaaagcaggtttttcttcctctctttccttttctctgtctgctactgactttaaggctttttcccccttgaaatgtccagattcctgtggttcatcccaaggaaattttcacacaaagcttggcctttgccctcaatataggtgttttaggatggtgacaaaccatggctgctgctttctgcccagctcgccagtcctccccaaagagttgcgcatcagcacctggggatctggaccctgcgggtgaagggatggggagggacgtccctggagtctcttctgtctttgttccttcttattttggcattcgatatcagcagcctctccccaaagtacttgaagtcagttttagatgctttattttatttttctagtcaaaaacgtgtttcccccagtgtttgaaaactcgtccgaatcttttcagtattttccatgagtattgtggtacttctagacttgtttaagcccagaactcattccttcaaaacagagagccttaatctttatgttgggacacagaccacatatttggacggcagccatgcatccatcgctgaagggctgtggacatgaatgtgtatttcccatggtctccgctgcccacaccaacagtgtggcatctcataagttaactgctaccctaaggtaatctaagattaaaatgtaaacatttatttttgttatgtaagtttataagatgttttatgttcaatgcctaatttctcaaaagtgccagaaaaaaatgtatattagctattttgattttatgtacaatgatttatactctccttttgaaaagataccataaagcacataagctagatcactacaaggagctgttatcttttttctaatcaagtgtttaaaacactgatggtttttaaagactcacctttttaaatggtacttggagctcctgattcaaattacctagaccccctagagaaataaatggaatatacataaataatcattttcagtggtttatggtgggcaatattgcaatatttgaaatggtaaaaatggaaagaagaacaaaatatgatgagaggtggctgtgaattataaacctcataaaagtgtcataattccattaaggtttaattatattttttcagaaaacagtgatgaattctgtagtccagtgcttgccaatgcaaattgcctattggaatcttcttcctatattttacaaacatcagtggctgaaatagctcagagtaagagctcagcctggtttgaatttaatcatctctttagatcttataaggccagcattaggaaacttgttcacttttcattttcaaaggagcctagttgaagtgctattatgagtgtgggctatggaaagacagcttttcctacactgataaagaaaaaaaatgaggaaattatttcatccccttgtgacatctgtgactttttggatttaataatcttgctgtttttcctctttatgacaaagaatataattgggaggatgaagtgtcttaaaaattgtagagaccagctcactggaatgtttttccatccctgtattcatggcttgactttgtgactgctctacactgcatgtctgacattgcagagtgagctatgttgaggtaaactggttggttgtcattattttgcaatcagcctggtctctcccatgaagatgtcgtgtgcataagcacaatcatcactgattagaagatcacagcagaatacccttggattagagagaagttcgtaccttgcatttctctgaattctagtctctcataagcactgctttgctggatgattttcactgctttgtgttaatgactttgagcgatctctcacatgatggggttctttagtacatggtaacagccatgtcatcttacacacctagcattgtgaatgctgtagtgacatcctttataggcaccttacagctcaaaacttttgtttcatttcatgccttacttatcaaaaaggcaggaaagtaggtatgatctctaaagtaaaaaaaaaaaaaaaaaaaaaactttttatagaaagctcataaataatcatgtcattttgcaattttgttaccaaaatttcccccaagagttttcaaatattagttctgcaatgtggctatgaaatatgcactgaaatataccttttaatttgagaaccagtggttagaataagctgtgatataaagtattttcagtgtacttttaaaggaactataaggccctccagcataaacgctaaaagaatagatggtagcacaggccatgagggctgggggagagaagcagagtgaaccttagaaagatggctcagctatttggagcactggatattttactgaagttatttactgaggcaccatcactgttttgactgtacagtatagtttttcataaatttcatcacatttactttgttcagaatctgggcttgaatctttgagttggacaaaagcctatggtttcttttaaaaagtttcatcttgagctaatgctacagtttaaataaaatgtatgaaaggtagttatcaaaaacaatttgtatatttaaaattctattttgacatccattttttacagcgaattatagcaggttatgtgaaatttaaaaataaattttaggaaatttttttatcttgtaagtaagaattataaatctatctcagttaaaagtaggatctttgtttttattcagatattttgaaagtttagaagcattttgtatgctactttggtatttcttaagtatagtcagcaggaaagggtaacctgttttatgcaaaatttttttaatttgtcaaatgtttttagtgtgtctactttctgaaatagtctcaatatcctgtctgtatcctaggcagataactacacaagaacaaaacgctatatagaaaagaaaatatttgaggaaatcttaaattccataagaaagtaattcttgcaagaatgttggctacatatttttttttctgtcctgaataaattacatcattaggtctgttgaagcttttgaagctaccactattctttctgggataaaggctaattactgatttatctgccctcaaaatcccagagttaattctaattgagtactaaattaacagtaagtagttaacacagagaactaaaatttaaccgcattatatcactgtatatatttctcatgatttttgctaattagagcatttacttaaccagtaataaactacacacacacacacacacacacacacgtatacgtgtgtgtgtgtatatacttggctctgacacaactctggtgcttaattaggatatgttctattatgtattttgaatgtttatcctgctagtgtgatgaacttttgttggaaaagcagaattagaaggaacagtttttcaatcagtttcatttggtaattacaggaaaaccttgagttgctctaatttaatttttccaattaatacatttagactttaaattgcatccgtaattctcttggctgaaaaacagtggtattttaagacagttttgttatacatgtgacttacttttgactcagcctgagaggaggaaatgtaaagagataagagatttggcccaaagcagcaagagactagtaaccttgagccaggacgaagccaagacaacgtgactcccaagtagcaggagcagaggtcggtcacctgtggcattctgtttcattcccttttaaaattatgagactttataggcagtgtaaaacatcagcaggcagcgatgtgataggatgtgcgaaaaagctggtctgataccatggctataattacagagctttagttcaattaggattttgtaaatgagcaaatgacctttttttccagtgccccttgtaatagttaatatgagtccatgcaatcttgtgatgccattctcctgaaggtgttgatttctggtacccagccagcttagctttggctgctggaagcacagtaggtactgatgattacttcctggaaatcttgacaggcttattgtactgtgtaatggggaaaagttaaagtataatgtttggtgttaataaatgactgatgtgaaaataggaacatgtgtctttaatatcaaatatggctttatttgcagtgaaatctaaattccttattctacagtagtattttcttgccctgtgttgtatattttcctaaatacatttttcctgacagtggctttaggccagttgaacacacttagactgaaagtgtttaacttaaagagatcagtccagaaaccatgataaattagaatctttatctggaattaccaaattaaaatttaaaatcatggtccagaagagaacaaacattcatggttttttttatcctactgctcatttttaggtctgtgtttacatctagtctctactatttgtgaagtatgtcattatttttttcaagttcttctttgacttaactgaaaaataatattccaaattcttaatgtaacatgaaaagagaaatacaatttttgcttaaaagacattttttaaaaagcgttcaattcagtaatcatttctgttaatacaggaagtttttttggcttgccagttatatactgtgggtattttttaaaatgtgctacccttgggttgtctcatatcaccttgcgtaatcatgtattacaaaggttgataattgtcatttctcagatgtctgtatgttacattggcagcagtaaaatgttttaatgttgttaccttttaaataattgtgttgtattaacatgcctcatattttctggggaaacttgaaatatatctaaacaaaaaaggtctgttataaataggaattggcatttcattgttaatgttttttcctcataaaaatagttacaccaaaagtgacatattgtctattacatgggcccaatcagtattaaagtactccccttactcaaaaatattaaaaaataattcatgacacttagtagcattttcattgattgtttcaaaagatcttcataatggtcaaattgtccaattcacaaaagagtgagaaagttgttttcagtactgggaatttttaaaccttagttttaagaccaaaaatatctcttattagcttgaacattttgtgattacttttccctccccggatctagtccttttaaggagtaagtctaaagaatgaggccatgaagtcactatttcctcccacctcagtttgtctcctggtacttagctggcctatcgctttgtgtggcaatacccctgggtcgcttccccactcagccttctgtatctgctgttcacaggacatgccattatgtctttccagtacggatcacagtgctgccatatcacagaccctgccagccggcacagaaccatgcctcgtcacagctctgcccaactcacaggctgccaagatgaggccacaggtccacctagggcggcagatgctggtgctatttgtcacgacttttgccaaaacatgtacactgttgctcacatctttcgtaagaatggttgacactaaggggccatggaaaagcacttttaaaaaattatgtggtggaatcaaactcacagaggcagaaatgttagtgccgtgctctaaccaagtaagcttagtgttccccacagtgatctgtatctggcctgagtctcctcaagcagcaacccccactgtccagcatgtggaaggtagatccttatgacaacaccagacccatagttaccaggaaagaaaaaggaagctgagtgttgtgaaggggaagaaatcctttttataagaagtaatcatttttaggccgggtgcagtggctcatgcctgtaatcccagcactttgggaggctgagacaggtggatcacttgaggtcaggagtttgagacctgcctggccaacatgatgaaaccctgtctctactaaaaatgcaaaaaaaattagccaggcatggtggcatgtgcctgtagtcccaactactcaggaggctgaggcaggagaatcacttgaacctgggaggcagaggttgcaatgagctgagatcgcaacactgcactccagcctgggcgacagagcaagactccatctcaaaaacaaaaacaaaaaaaaaacctttttaaagtaaattgagtgtaaaatgttttcaccatgaagccattgcaccctctcccccaggaaacagtgcctaaggatgatgtcaagttacagccagtttgctctgatcccccaggacctaagaaaactgtgagtgcttcagcatgcaaaggtagagctaccagataaggagaataacttggccatttatagcaaactgcctgactttggagtgagaaaccaagcaccttctaggtcctaggataggtgaattggaggtgcagctgctgaagttcccattttctacatacttcaggagccagggtgtttcatttggttttgtaaaactttgctgtaagtcatcacagttaattctttgaatggacattttagagtgtaactttttttcaaaattagcagaacagatatctctgctcattctctttatacatttagttttttaaagttcccctagtatacctgttaggcactctaaataggacacagttaaagctaaaagaaggaccagttgctccctagagcctacagttcagaactatcttgttgtcatgtcctggtttggtttggtttgtttttaactcaacaagttggaaaccatgagtttaaagcaaactatttccttttcttaagcttaaagagaattttttttttaatctttagctcctcatttaggtagtgaaggcttccctgaaagacagcagtgcccttctctggaagaagaggctgggaccaaaagcctgagtctatgggttgaggattttgagcattcctttgacaagcttctatgtatttttaatataagactcataaatgaacctgatgtggtgttcatgacccatcccttaagcatgcttgctttttttaactttactttttgagtatagtacttgtcttgtttttcctggagccatgctaggatttaattcctatgtgccactacccgcccatgtcctggaagatggccatgcctgcagcaatgctcatgtcttgaggagaagcaatgtgaaaagcatcaggaaagctgaaccttacgttcaagtcagcaaacatttgtgagcattctagtatgcttgcgaccttgacactttttaaaaattatctttttatttgcttcgagtatcaaccgtatagttgactctagtggggcgaagggagcagagatgagagcaaaattcagacttgctgcccctgtgtgtctcagttctcatgtctctctgagaaatgtgttggcccaattccctatctgccactctgagtctcttgagtaaatgtgtgtaaatgagaaaaattatctcaaagatttaacttattatttagatattttcttctttttaaactcaggaataaacctggtttgtagataatataatatggctactagagctataattgagtaggtgactagaagcattttttcaaatatatttcttgtaaagacatctactttgttttaactaggaaaagaaactcctcatattaaaataaacatttccataagcactttctagaagagtgtagcatccatctaccatccatcccagaatgtttgtatcttgctcatagtatttcaaaaatttttatgggtgaaaaaaatgcacttttttatttattggaaaagtgtagagttattgaattaaattctcaagtgggacaatttagtgtaaagggaaacatgggttttggagacaagagcacagggctgtggtccctgttccagcattgactttactatgtgacctcgagcaaatgatttaacttctctgtgcctcagtttctccatatacaaaatggggataatgatactaaccattgcctacctcatagagatgttatggggacaaacgaaataatagagataagcacgaatgctttcaactcttcggaagaaaggtgctatataaattgaagttgtgtttttaatgatccaattattaattatgtttagggtttaaataacaatactgttagtcatgttaagaataagttttgttttgatgcatatttccacttctcttctgtggccagatcttgatcattcaaccagtaatggtacctgaggaactgaaatgggtatttgttttcgtatgtttctgccagtagtatttcaattgaatatccagaaaagactggagtttaacttgtaatatcttatagtttacatgtaataaaacttattcaagctatatataaaagtatgattacatgtaaatagcaggtatgttgtaattaaaggcacttatcaaattgtctttgttcttttttaattgtaataaaagtcagttttacataaa

SEQ ID NO: 165996 - DNA, 3682 bp, Homo sapiens
  Payload ID: 12679
  Gene Symbol: PPAT
  Gene Name: phosphoribosyl pyrophosphate amidotransferase
  Uniprot ID: Q06203
  ENST ID: ENST00000264220
  CDS Start-End: 139-1692
agtagctggggccaccctcgggaaggaagagcctgtcgcgagcgcgagcttctgagctcgacgggccgagctggcagctggttggtgcttacaccttggccgcagcggcaggtccttccacgtgctttcggcggcgacatggagctggaggagttggggatccgagaggaatgtggcgtgttcgggtgcatcgcctcaggagagtggcccacgcagctggatgtaccgcatgtgatcactctgggactcgtggggctgcagcaccggggtcaggagagtgctggtattgtgactagtgatgggagttcggtgccaacattcaaatcacacaagggaatgggtcttgtaaatcacgtctttactgaagacaatttgaaaaaattatatgtttcaaatcttggaattggacacaccaggtatgccaccacaggaaaatgtgaactagaaaattgtcagcccttcgttgttgaaacacttcatgggaagatagctgtggcacataatggcgaattggtaaatgctgctcgattaaggaaaaagcttctgcgtcatggtattggtctgtctacaagttctgatagtgaaatgattacccagttactggcgtatacccctcctcaggaacaagatgacaccccagactgggtagccaggattaaaaacttgatgaaggaagcacccacagcatactccctgcttataatgcacagagatgttatttatgcagtacgagatccttatggaaatcgtcccttatgcattggtcgtcttattccagtgtctgatataaatgacaaagagaaaaaaacatcagaaacagaaggatgggtggtgtcttcagaatcttgtagcttcttatctattggtgcaagatattaccgtgaagtcttgcctggagaaattgtggaaatatccagacacaatgtccaaactcttgatattatatcaaggtctgaaggaaacccagtggctttttgtatctttgaatatgtttattttgcaagaccagacagtatgttcgaagaccaaatggtttatacagtaagataccgttgtggccagcagctagcgattgaagcacctgtggatgcagatttggttagcactgttccagaatctgctacgcctgctgctcttgcttacgcaggaaagtgtggacttccatatgtggaggtgctgtgtaaaaaccggtatgtagggagaaccttcattcagccaaacatgaggttaagacaacttggtgttgcaaaaaaatttggagtattgtcagacaactttaaaggcaaaagaattgttcttgtagatgattcaattgtcagaggcaataccatctcacctataataaaactgctcaaagaatctggtgcaaaagaggtacacattcgagtagcttcaccaccaattaaatatccatgcttcatgggaataaacattcctacaaaagaagagctcattgccaataaaccagaatttgatcaccttgcagaatatctaggagcaaacagtgttgtgtatctgtcagtagaaggactggtttcatctgtacaagaagggataaagtttaaaaaacagaaagagaaaaagcacgatattatgatccaagaaaatggaaatggtctggaatgttttgaaaagagtggtcattgtacagcttgtctcactggaaaatatcctgtagaattagaatggtagctggtagggttggatgtgtgtagtttcaagatagaaagttggtcaagaagttatagtggtcacacctcatctatttactgttactcagttggtacaatgtaaaatgccatgcttatgtttataagttttgagattttttttttttctgaaaaggataccaaagtgcgataactgaacatttccaattgcatataatacaacaatatgtggtgttcttttttttacacaagcattggctagcctttttaacctggtcagagaaggcaggtggtcactgacatttcccaagtccatgctttaaagggtttgcaagaagttagggttaaggagaggtgatgccaacaagacaggtgagttaaatataccatttcacacaaagtttgaatagaatacattatacctcataggtgtctagcctctacagttctggctgtagttatgaccttggcttccctgtctaactgtagacaaatctttaaaaaaaaataataataatctggtgcctcagtttccccacatgtgcaatgggatacttattaaataattaataagaatgtgaataagtgtcatacttttgtgatttgagccatcatttcacttctgattttaagacaactcatgattgttagctttcagaaagctaatgattgttaactttttgaaattagtttacaattaattaagatttcattatgatggaaggagacataattggcagatctttgccatctctctttgagatgtcctaaaaagggttgtaaaaatctgtgaaaaagtttttcctacatttgactagaaaatgtgatccatagtatttagtgccctgatactataagctcagcaagtaacctggtacatttgaaataaaaaccaaatttttagattcaaacaatccctttatccttaatttaattaattatcatatgctttttttaatgaagtgcttgatcacttgcaaacatatatacatgtagatgtacatatacatgtacacatacacataaatattattgcaattaagtgatcaagtacagacacaataggggccagttttgtttaaggatcaaagagacaaccactttggggaattagtatcaacttacaatccaagtccaagtatcatcttataatcacttttttctactatattaagatctaatgaatttgatttcttttttgaagttttttcttgtaacatctgagattagaagtttaagatgacttgaccccaaacctttgtttatgtaagaatttttaaacataaaagtgtttgtttctgttatgttaccataatttgatgtatatagtgtccagatccatttagaaatttaatatttattaataactgaaactgtttgtcttcctttggtatatagtctcgcatattatattatagcaggccaagataaaattttgacagctctttaagcccacatgcagcagtgggtcagataaccctgtggcagtgacacgggcaaattggcatttgaataaagccctgggaccacctcaacatgcgtagcctcttgtcttaaatgtactccccatggcagcatggaggaggcaagacctgtgggtcaattttgaactggccttactttgatttttaaaacaagagactcagggaaagtactaaaccaaaatctctgattttactttgcgttttctgtagtttttgttttactgagatgcttttgtaaaggaaaataatactgtgacagtttagtaattctacagattcttaatatttctccatcatggccttttacttcacaattttctgaagtctgaattcaattacaatttttttttaccaatttaatctcaaatgttgtttaactgctttaaattcatatacgtagagtattataaactgcagagatgaaaaatgtgttttcacgggatttatattgtgaactaaactaagcctactttttgtgacttatttgtgatgccttgttgataaatatgtgtaataagtatgtttaaa

SEQ ID NO: 165997 - DNA, 808 bp, Homo sapiens
  Payload ID: 12679
  Gene Symbol: PPAT
  Gene Name: phosphoribosyl pyrophosphate amidotransferase
  ENST ID: ENST00000510643
  CDS Start-End: 32-610
gcaggtccttccacgtgctttcggcggcgacatggagctggaggagttggggatccgagaggaatgtggcgtgttcgggtgcatcgcctcaggagagtggcccacgcagctggatgtaccgcatgtgatcactctgggactcgtggggctgcagcaccggggtcaggagagtgctggtattgtgactagtgatgggagttcggtgccaacattcaaatcacacaagggaatgggtcttgtaaatcacgtctttactgaagacaatttgaaaaaattatatgtttcaaatcttggaattggacacaccaggtatgccaccacaggaaaatgtgaactagaaaattgtcagcccttcgttgttgaaacacttcatgggaagatagctgtggcacataatggcgaattggtaaatgctgctcgattaaggaaaaagatttcctattgcctccagccatggtcatccgttattagtatatacatactattagcgcaggagtccccaacccctgtgctagggactagtaccagtctgtggcttgttaggaaccaggccacacagcaggaggtgagtgcttctgcgtcatggtattggtctgtctacaagttctgatagtgaaatgattacccagttactggcgtatacccctcctcaggaacaagatgacaccccagactgggtagccaggattaaaaacttgatgaaggaagcacccacagcatactccctgcttataatgcacagagatgttatttatgcagtacgagatccttatggaaatcgtcccttatgcattggtcgtcttattcc

SEQ ID NO: 165998 - DNA, 563 bp, Homo sapiens
  Payload ID: 12679
  Gene Symbol: PPAT
  Gene Name: phosphoribosyl pyrophosphate amidotransferase
  ENST ID: ENST00000507724
  CDS Start-End: 20-238
acgtgctttcggcggcgacatggagctggaggagttggggatccgagaggaatgtggcgtgttcgggtgcatcgcctcaggagagtggcccacgcagctggatgtaccgcatgtgatcactctgggactcgtggggctgcagcaccggggtcaggagagtgctggtattgtgactagtgatgggagttcggtgccaacattcaaatcacacaaggtatgccaccacaggaaaatgtgaactagaaaattgtcagcccttcgttgttgaaacacttcatgggaagatagctgtggcacataatggcgaattggtaaatgctgctcgattaaggaaaaagcttctgcgtcatggtattggtctgtctacaagttctgatagtgaaatgattacccagttactggcgtatacccctcctcaggaacaagatgacaccccagactgggtagccaggattaaaaacttgatgaaggaagcacccacagcatactccctgcttataatgcacagagatgttatttatgcagtacgagatccttatggaaatcgtcccttatgcattggt

SEQ ID NO: 165999 - DNA, 942 bp, Homo sapiens
  Payload ID: 12680
  Gene Symbol: PRPS1
  Gene Name: phosphoribosyl pyrophosphate synthetase 1
  ENST ID: ENST00000372418
  CDS Start-End: 17-673
aatcaatgacaatttaatggagcttttgatcatgattaatgcctgcaagattgcttcagccagccgggttactgcagtcatcccatgcttcccttatgcccggcaggataagaaagataagggcttttttgatatcccagtagacaatttgtatgcagagccggctgtcctaaagtggataagggagaatatctctgagtggaggaactgcactattgtctcacctgatgctggtggagctaagagagtgacctccattgcagacaggctgaatgtggactttgccttgattcacaaagaacggaagaaggccaatgaagtggaccgcatggtgcttgtgggagatgtgaaggatcgggtggccatccttgtggatgacatggctgacacttgtggcacaatctgccatgcagctgacaaacttctctcagctggcgccaccagagtttatgccatcttgactcatggaatcttctccggtcctgctatttctcgcatcaacaacgcatgctttgaggcagtagtagtcaccaataccatacctcaggaggacaagatgaagcattgctccaaaatacaggtgattgacatctctatgatccttgcagaagccatcaggagaactcacaatggagaatccgtttcttacctattcagccatgtccctttataatagagtaacttctgaggctttttgagaataaaatccaccccacccttgtttccccttggtatttgatgacaaattcagcagaagacccggcttgctccagtgtagctttctacatcccacatcaggtatattagagcttatccgaactggggaaagacggattgagattaactgctgggacctcctacctgcattatctcattctggcttccttgataattctgtgggccttgcagctttaactatagctcagctgctgcaagatttca

SEQ ID NO: 166000 - DNA, 628 bp, Homo sapiens
  Payload ID: 12680
  Gene Symbol: PRPS1
  Gene Name: phosphoribosyl pyrophosphate synthetase 1
  ENST ID: ENST00000372419
  CDS Start-End: 100-606
caacgcaaagcgcttggtattgagtctgtggccgacttcggttccggtctctgcagcagccgtgatcgcttagtggagtgcttagggtagttggccaggatgccgaatatcaaaatcttcagcggcagctcccaccaggacttatctcagaaaattgctgaccgcctgggcctggagctaggcaaggtggtgactaagaaattcagcaaccaggagacctgtgtggaaattggtgaaagtgtacgtggagaggatgtctacattgttcagagtggttgtggcgaaatcaatgacaatttaatggagcttttgatcatgattaatgcctgcaagattgcttcagccagccgggttactgcagtcatcccatgcttcccttatgcccggcaggataagaaagataagagccgggcgccaatctcagccaagcttgttgcaaatatgctatctgtagcaggtgcagatcatattatcaccatggacctacatgcttctcaaattcaggtatcagtggaagctaaatattggtgtttgaaaggtgggaggaaaggactgatgatgctgaagactgcagagaagccaaaaattatgcccaagtacatctgaaataaactagatatcaacaaca

SEQ ID NO: 166001 - DNA, 1748 bp, Homo sapiens
  Payload ID: 12680
  Gene Symbol: PRPS1
  Gene Name: phosphoribosyl pyrophosphate synthetase 1
  ENST ID: ENST00000372428
  CDS Start-End: 410-754
agctaatcgttgccagcggggtgtggacttcgccgctgaccccacctccgccgctttgggtaatttagagccgcgcgccgggcgggaatgtaagatggcggagtagcaacgcaaagcgcttggtattgagtctgtggccgacttcggttccggtctctgcagcagccgtgatcgcttagtggagtgcttagggtagttggccaggatgccgaatatcaaaatcttcagcggcagctcccaccaggacttatctcagaaaattgctgaccgcctgggcctggagctaggcaaggtggtgactaagaaattcagcaaccaggagacctgagtgacctccattgcagacaggctgaatgtggactttgccttgattcacaaagaacggaagaaggccaatgaagtggaccgcatggtgcttgtgggagatgtgaaggatcgggtggccatccttgtggatgacatggctgacacttgtggcacaatctgccatgcagctgacaaacttctctcagctggcgccaccagagtttatgccatcttgactcatggaatcttctccggtcctgctatttctcgcatcaacaacgcatgctttgaggcagtagtagtcaccaataccatacctcaggaggacaagatgaagcattgctccaaaatacaggtgattgacatctctatgatccttgcagaagccatcaggagaactcacaatggagaatccgtttcttacctattcagccatgtccctttataatagagtaacttctgaggctttttgagaataaaatccaccccacccttgtttccccttggtatttgatgacaaattcagcagaagacccggcttgctccagtgtagctttctacatcccacatcaggtatattagagcttatccgaactggggaaagacggattgagattaactgctgggacctcctacctgcattatctcattctggcttccttgataattctgtgggccttgcagctttaactatagctcagctgctgcaagatttcagacttttgaggatgttgtgtgagggtgtttgactgtgactggggaagctcagactactttgtatgtgaatgcttcagggttttctttgttgagaacaactagcaacaaaggcaacccatgtgtgaccagttctccccaaggtctatgctaaattatagcaagagccctgggcaaccccaaacctagtcctggtagctgagcaccctgtaaggcaggagcaggcagctcagcttgagcagacattgggtggggggtggggggtggttgaggggggaggcagcacagtgcagcaaatgtttcttgggaggaagaagcctgatccatcaccatctgcttgactatgtagcttggattctcctttgtacctatccctttcgatttggctttaccttcatctatcttgatcctttcctggccaaatatcctcttgggcccaaatgaacattgtaccatagtcttctggaaagcaaacatgcttcctgctatgtaattgctaacattcatattagatgatgtgctgtagcttgatcttccttagcctactgccactgaggcagtaggttttaggtggtatcgtagtgccttttgattaatttaagtatttaattttcatcttccttctttggatctatttggcctctcaaatgaactgagattcctgttaaaaaagattgatgttattgtctcttgtagaggaaactaataaagtgtgtgtacctgtgtga

SEQ ID NO: 166002 - DNA, 2073 bp, Homo sapiens
  Payload ID: 12680
  Gene Symbol: PRPS1
  Gene Name: phosphoribosyl pyrophosphate synthetase 1
  Uniprot ID: P60891
  ENST ID: ENST00000372435
  CDS Start-End: 123-1079
gggaatgtaagatggcggagtagcaacgcaaagcgcttggtattgagtctgtggccgacttcggttccggtctctgcagcagccgtgatcgcttagtggagtgcttagggtagttggccaggatgccgaatatcaaaatcttcagcggcagctcccaccaggacttatctcagaaaattgctgaccgcctgggcctggagctaggcaaggtggtgactaagaaattcagcaaccaggagacctgtgtggaaattggtgaaagtgtacgtggagaggatgtctacattgttcagagtggttgtggcgaaatcaatgacaatttaatggagcttttgatcatgattaatgcctgcaagattgcttcagccagccgggttactgcagtcatcccatgcttcccttatgcccggcaggataagaaagataagagccgggcgccaatctcagccaagcttgttgcaaatatgctatctgtagcaggtgcagatcatattatcaccatggacctacatgcttctcaaattcagggcttttttgatatcccagtagacaatttgtatgcagagccggctgtcctaaagtggataagggagaatatctctgagtggaggaactgcactattgtctcacctgatgctggtggagctaagagagtgacctccattgcagacaggctgaatgtggactttgccttgattcacaaagaacggaagaaggccaatgaagtggaccgcatggtgcttgtgggagatgtgaaggatcgggtggccatccttgtggatgacatggctgacacttgtggcacaatctgccatgcagctgacaaacttctctcagctggcgccaccagagtttatgccatcttgactcatggaatcttctccggtcctgctatttctcgcatcaacaacgcatgctttgaggcagtagtagtcaccaataccatacctcaggaggacaagatgaagcattgctccaaaatacaggtgattgacatctctatgatccttgcagaagccatcaggagaactcacaatggagaatccgtttcttacctattcagccatgtccctttataatagagtaacttctgaggctttttgagaataaaatccaccccacccttgtttccccttggtatttgatgacaaattcagcagaagacccggcttgctccagtgtagctttctacatcccacatcaggtatattagagcttatccgaactggggaaagacggattgagattaactgctgggacctcctacctgcattatctcattctggcttccttgataattctgtgggccttgcagctttaactatagctcagctgctgcaagatttcagacttttgaggatgttgtgtgagggtgtttgactgtgactggggaagctcagactactttgtatgtgaatgcttcagggttttctttgttgagaacaactagcaacaaaggcaacccatgtgtgaccagttctccccaaggtctatgctaaattatagcaagagccctgggcaaccccaaacctagtcctggtagctgagcaccctgtaaggcaggagcaggcagctcagcttgagcagacattgggtggggggtggggggtggttgaggggggaggcagcacagtgcagcaaatgtttcttgggaggaagaagcctgatccatcaccatctgcttgactatgtagcttggattctcctttgtacctatccctttcgatttggctttaccttcatctatcttgatcctttcctggccaaatatcctcttgggcccaaatgaacattgtaccatagtcttctggaaagcaaacatgcttcctgctatgtaattgctaacattcatattagatgatgtgctgtagcttgatcttccttagcctactgccactgaggcagtaggttttaggtggtatcgtagtgccttttgattaatttaagtatttaattttcatcttccttctttggatctatttggcctctcaaatgaactgagattcctgttaaaaaagattgatgttattgtctcttgtagaggaaactaataaagtgtgtgtacctgtgtga

SEQ ID NO: 166003 - DNA, 1090 bp, Homo sapiens
  Payload ID: 12681
  Gene Symbol: PRPS1L1
  Gene Name: phosphoribosyl pyrophosphate synthetase 1-like 1
  ENST ID: ENST00000506618
  CDS Start-End: 82-1038
attagagtctgtgcttcacttccgttccagcctcagcggcagctggatcgctcgacggagtgcctctggtagttggccaagacgccgaatatcaaaatcttcagcggcagctcccaccaggacttatcccagaaaattgctgaccgcctgggcctggagctaggcaaggtggtgactaagaaattcagcaaccaggagacctgcgtggaaattgatgagagtgtgcgtggagaggatgtctacatcgttcagagtggttgtggcgaaatcaacgacagtctaatggagcttttgatcatgattaatgcctgcaagattgcttcagctagccgagttactgcagtcatcccatgcttcccttatgcccgacaggataagaaggataagagccggtccccaatctctgccaagcttgttgcaaatatgctctctatagcaggtgcggatcatatcatcaccatggacctacatgcttctcaaattcagggcttttttgatatcccagtagacaacttgtatgcagagccaactgtcctgaagtggataagggagaatatccctgagtggaagaactgcattattgtctcgccagatgctggtggagctaaaagagtgacctccattgcagaccagttgaatgtggactttgctttgattcataaagaacggaagaaggccaatgaagtggactgcatagtgctagtgggagatgtgaatgatcgtgtggctatccttgtagatgacatggcagacacttgtgttacaatctgcctcgcagctgacaaacttctctcagctggagcaaccagagtttatgctatcttgactcatggaatcttttctggcccagccatttctcgcatcaacactgcatgctttgaagcagtggtagtcaccaataccatacctcaagatgagaagatgaagcattgctccaaaatacgagtaattgacatctccatgatccttgcagaagccataaggagaactcataatggggaatctgtttcctacctgttcagccatgttcctttataacagaataacttctaggttatgctattttaaaataaaataagattaataaaaa

SEQ ID NO: 166004 - DNA, 584 bp, Homo sapiens
  Payload ID: 12682
  Gene Symbol: PRPS2
  Gene Name: phosphoribosyl pyrophosphate synthetase 2
  ENST ID: ENST00000380663
  CDS Start-End: 144-584
tcctccccctccgctcctccccttccctacatctagccgccgcgctttcccgctcccgcagcagcagcctcccgcgtcgctgtcgctgttgcctccgccacctcctccgccgccgcgcgcccctcggagttccgcgccccaccatgcccaacatcgtgctgttcagcggcagctcgcatcaggacctgtcccagcgcgtggccgaccgcctgggcctggagctgggcaaggtggtcacgaagaagttcagcaaccaggagaccagcgtggagattggtgaaagcgtgagaggggaagatgtctacatcatccagagcggctgcggggaaattaacgacaacctgatggaactcctcatcatgatcaatgcctgcaagattgcgtcatcatccagagtaactgccgtgatcccgtgtttcccatacgcccgacaagataaaaaggacaagagtcgtgccccaatttctgcaaaacttgtggccaatatgctgtcggtggctggggcggatcacatcatcaccatggacctgcatgcttctcagatacagggaaaacattgccgagtggaagaactgtatcattgt

SEQ ID NO: 166005 - DNA, 2511 bp, Homo sapiens
  Payload ID: 12682
  Gene Symbol: PRPS2
  Gene Name: phosphoribosyl pyrophosphate synthetase 2
  Uniprot ID: P11908
  ENST ID: ENST00000380668
  CDS Start-End: 129-1085
cctccccttccctacatctagccgccgcgctttcccgctcccgcagcagcagcctcccgcgtcgctgtcgctgttgcctccgccacctcctccgccgccgcgcgcccctcggagttccgcgccccaccatgcccaacatcgtgctgttcagcggcagctcgcatcaggacctgtcccagcgcgtggccgaccgcctgggcctggagctgggcaaggtggtcacgaagaagttcagcaaccaggagaccagcgtggagattggtgaaagcgtgagaggggaagatgtctacatcatccagagcggctgcggggaaattaacgacaacctgatggaactcctcatcatgatcaatgcctgcaagattgcgtcatcatccagagtaactgccgtgatcccgtgtttcccatacgcccgacaagataaaaaggacaagagtcgtgccccaatttctgcaaaacttgtggccaatatgctgtcggtggctggggcggatcacatcatcaccatggacctgcatgcttctcagatacagggattctttgatattcctgtggataatttgtatgcggagcccgcagtcctgcagtggattcgggaaaacattgccgagtggaagaactgtatcattgtttcacctgacgcagggggagccaaaagggttacatcaattgcagacaggttgaatgtggaatttgctttgatccacaaagagaggaagaaggcgaatgaagtggaccggatggtcctggtgggcgacgtgaaggaccgtgtggccatcctcgtggatgacatggctgacacttgcggcaccatctgccatgctgcggacaagctgctgtcagctggagccaccaaagtgtatgctatccttacccatgggatcttctctggaccagctatttccagaataaataatgccgcctttgaggctgttgtcgtcacaaacacaattccgcaagaggacaaaatgaaacactgcaccaagattcaggtcattgacatttccatgatcttggccgaagcaatccgaaggacacacaatggggaatccgtgtcctacctgttcagccatgtcccgctataaatccagaatgggaagtgtccagcaagcctactctgacttctgacttgtttttgttttctggatttttagctgtaggtattcagcaatgataggttaatcactggcaaaagcatcagatctttgtatatgctaagatttattgtttccccttctaaagctcaagatcatttctttccagtttttggggaaatggtggtggttatttggtctttaagtgaactgtcttaaatgagaaacgtttttgtcattttgacttttaacaggtacaggtgatctcttcctttgttctttcagtactttgaggcgacaactttcaagtatataatttcattgtggaagtcatagtttatatatttcgaggttgccaaaggtgacttcagattaaagccttctgtgtaaatatatactgataatgcctatggacatttgggtaaaaccctgtatagaattaattatccttttactttggagtgaaccttggaaaatttataattataataccatggattttgaattttccttttttttttttttttggataactcagtttcagataaaccatcttggttactgtgcttaatttggaccaaattttatttagcttaatatggacactgacacattttggggggtatacattagacatatcagagcagtgtatttctggatcattttttaaatgacctcttctaaaacataactgtcacttacctgaaatgctgcatcctaaaattccaaaattatattgagcaatcgccaaggcctaaagccaactgacttaaaggtaatcatttcagctaagattaaatttaaagcctaagaatgtatagagctagttttaaaataatgatctcagatttttaaaaaggatataggaacctgcattgtcattctctgaattaagaactgatggtttctatcattatttagccccacctttgtattttaaaatccttcagaatacatttatgaaccaatgcgactggacttagccacacacaatggaaattcagaccttgactatttggtgtttccagttcacaaaggtgatgaagactgtcttgggagcagcttaatcccaaaatttgtacatttcttgctgctcctggcgtggaaacttaagtgagaccaccaaatacattggtcctgtccaattctactgaatgggggtggacctggcatttatctggccaaaaacaggagccagagaaatatgaatataccaaagttgtttgtttagcctccaacttaaattacattagtcaacttatagatactcatatgatcacttttctttttagatactacatcaactagattcaggagtatatcatttgcagtgcttgtattggtttaaaatgtaagattttaagatcctctaacactgtactaaaacatttcaataaaatcattctgactgcgttca

SEQ ID NO: 166006 - DNA, 1348 bp, Homo sapiens
  Payload ID: 12682
  Gene Symbol: PRPS2
  Gene Name: phosphoribosyl pyrophosphate synthetase 2
  Uniprot ID: P11908
  ENST ID: ENST00000398491
  CDS Start-End: 93-1058
gctcccgcagcagcagcctcccgcgtcgctgtcgctgttgcctccgccacctcctccgccgccgcgcgcccctcggagttccgcgccccaccatgcccaacatcgtgctgttcagcggcagctcgcatcaggacctgtcccagcgcgtggccgaccgcctgggcctggagctgggcaaggtggtcacgaagaagttcagcaaccaggagaccagcgtggagattggtgaaagcgtgagaggggaagatgtctacatcatccagagcggctgcggggaaattaacgacaacctgatggaactcctcatcatgatcaatgcctgcaagattgcgtcatcatccagagtaactgccgtgatcccgtgtttcccatacgcccgacaagataaaaaggacaaggtaggagagagtcgtgccccaatttctgcaaaacttgtggccaatatgctgtcggtggctggggcggatcacatcatcaccatggacctgcatgcttctcagatacagggattctttgatattcctgtggataatttgtatgcggagcccgcagtcctgcagtggattcgggaaaacattgccgagtggaagaactgtatcattgtttcacctgacgcagggggagccaaaagggttacatcaattgcagacaggttgaatgtggaatttgctttgatccacaaagagaggaagaaggcgaatgaagtggaccggatggtcctggtgggcgacgtgaaggaccgtgtggccatcctcgtggatgacatggctgacacttgcggcaccatctgccatgctgcggacaagctgctgtcagctggagccaccaaagtgtatgctatccttacccatgggatcttctctggaccagctatttccagaataaataatgccgcctttgaggctgttgtcgtcacaaacacaattccgcaagaggacaaaatgaaacactgcaccaagattcaggtcattgacatttccatgatcttggccgaagcaatccgaaggacacacaatggggaatccgtgtcctacctgttcagccatgtcccgctataaatccagaatgggaagtgtccagcaagcctactctgacttctgacttgtttttgttttctggatttttagctgtaggtattcagcaatgataggttaatcactggcaaaagcatcagatctttgtatatgctaagatttattgtttccccttctaaagctcaagatcatttctttccagtttttggggaaatggtggtggttatttggtctttaagtgaactgtcttaaatgagaaacgtttttgtcattttgacttttaacaggtacaggtgatctcttcctttgttctt

SEQ ID NO: 166007 - DNA, 891 bp, Homo sapiens
  Payload ID: 12682
  Gene Symbol: PRPS2
  Gene Name: phosphoribosyl pyrophosphate synthetase 2
  ENST ID: ENST00000461630
  CDS Start-End: 1-522
tgtttcccatacgcccgacaagataaaaaggacaaggtaggagagagtcgtgccccaatttctgcaaaacttgtggccaatatgctgtcggtggctggggcggatcacatcatcaccatggacctgcatgcttctcagatacagggattctttgatattcctgtggataatttgtatgcggagcccgcagtcctgcagtggattcgggaaaacattgccgagtggaagaactgtatcattgtttcacctgacgcagggggagccaaaaggctgctgtcagctggagccaccaaagtgtatgctatccttacccatgggatcttctctggaccagctatttccagaataaataatgccgcctttgaggctgttgtcgtcacaaacacaattccgcaagaggacaaaatgaaacactgcaccaagattcaggtcattgacatttccatgatcttggccgaagcaatccgaaggacacacaatggggaatccgtgtcctacctgttcagccatgtcccgctataaatccagaatgggaagtgtccagcaagcctactctgacttctgacttgtttttgttttctggatttttagctgtaggtattcagcaatgataggttaatcactggcaaaagcatcagatctttgtatatgctaagatttattgtttccccttctaaagctcaagatcatttctttccagtttttggggaaatggtggtggttatttggtctttaagtgaactgtcttaaatgagaaacgtttttgtcattttgacttttaacaggtacaggtgatctcttcctttgttctttcagtactttgaggcgacaactttcaagtatataatttcattgtggaagtcatagtttatatatttcgaggttgccaaa

SEQ ID NO: 166008 - DNA, 763 bp, Homo sapiens
  Payload ID: 12682
  Gene Symbol: PRPS2
  Gene Name: phosphoribosyl pyrophosphate synthetase 2
  ENST ID: ENST00000489404
  CDS Start-End: 11-613
gcgccccaccatgcccaacatcgtgctgttcagcggcagctcgcatcaggacctgtcccagcgcgtggccgaccgcctgggcctggagctgggcaaggtggtcacgaagaagttcagcaaccaggagaccagcgtggagattggtgaaagcgtgagaggggaagatgtctacatcatccagagcggctgcggggaaattaacgacaacctgatggaactcctcatcatgatcaatgcctgcaagattgcgtcatcatccagagtaactgccgtgatcccgtgtttcccatacgcccgacaagataaaaaggacaagagtcgtgccccaatttctgcaaaacttgtggccaatatgctgtcggtggctggggcggatcacatcatcaccatggacctgcatgcttctcagatacagggattctttgatattcctgtggataatttgtatgcggagcccgcagtcctgcagtggattcgggaaaacattgccgagtggaagaactgtatcattgtttcacctgacgcagggggagccaaaaggtatcatgcaggctacaccttgcagatttctccatctgctgattggtttttccttttccgatgtattagataaggaagcatgctgtaaattacttaaagctttattttgctaatgagcaagtaagtagaccgcaggcttcacttccagagcagaaacccatcatctttgttaatatttcgtcattcaggaaagaagaaaatacagagacacacatacacaata

SEQ ID NO: 166009 - DNA, 1678 bp, Homo sapiens
  Payload ID: 12683
  Gene Symbol: PRPSAP1
  Gene Name: phosphoribosyl pyrophosphate synthetase-associated protein 1
  ENST ID: ENST00000324684
  CDS Start-End: 222-1070
agagctagatcgtatacctcctcggaggcggacatgttgggtcctggccaaaaagttggaaacacctggggccactaccgaggcgccttggtgctgaattggggaagtctgttgtatatcaagagaccaatggagaaacaagagttgaaataaaagaatctgttcgtggccaagatattttcattatacagacaatacccagagatgtgaatacagctgtgatggagttgctcatcatggcttacgcactgaagactgcctgtgccaggaacattattggggtcatcccctacttcccctacagcaagcagagcaagatgaggaagaggggttccattgtgtgcaagctgctagcatccatgctggcgaaagcaggtttaactcacattatcactatggatcttcatcaaaaggaaatacaaggctttttcagctttcctgtggacaaccttagagcctcacctttcctgcttcagtatatccaggaagaaattccaaattacagaaatgcagtcattgtagctaagtctcctgatgctgcaaagagggcccagtcctatgcggagagactgcgtctgggtttggccgtcattcacggggaagctcagtgcacggaactggacatggacgatggtcgtcactccccgcctatggtcaaaaatgctactgtgcacccaggcctggagttgccattgatgatggccaaagagaagccaccgataactgtagttggagatgttggaggccgcatcgcaatcatcgtggatgacattattgacgatgtggagagttttgttgctgccgcggagatcctgaaagagagaggcgcctataagatctatgttatggccacccacggcatcctgtctgcagaggcccctcgcctgattgaggagtcctccgtagacgaggtggtggtgacgaatactgtccctcatgaggttcagaagctgcaatgtcccaagataaagactgtggatatcagtttgattctttctgaagccattcggagaatccacaatggagagtccatggcctaccttttccgaaacatcactgtggatgactagctttcacgagggtctcgaccctggacctcctgagggaaacatggaaaaagcagtgccatgagtgatacagtgtttccttgcaagggaggactcgaaacagcctggagttagatatcttcttttgcccggattgatggggaggagggattaaaagagtcaggaagaagacagagctaatggataaatatcataacatggccttacatgtctgctgtcatcagccctgttccttaaaagttctagctgctttcttaaaaataatctgaaaatcttattgatactaaagaggagttaaaggcacataaagtcttaactctataatgttcatttagttgtttcagctccagggaaatggaggtattgatgttgaacctggttagggaagctgagcgcctgtggccctattactatccagttggcctctcccaaatcaacttcaagtcttttatagagaatcgtatttttctttcagaaattgttatgcctacagccattgaaaaatgaagcattcatgttgttacatcttccaaggatgtcagattagaaaatagcatcccacctctgggtatctgagtggctctgaagttgcaaataaaataatttgttgt

SEQ ID NO: 166010 - DNA, 1003 bp, Homo sapiens
  Payload ID: 12683
  Gene Symbol: PRPSAP1
  Gene Name: phosphoribosyl pyrophosphate synthetase-associated protein 1
  ENST ID: ENST00000436498
  CDS Start-End: 532-1003
cccgccccacctcctgcacctggggcgggaggcgcgggccttcccagccggacaaagcttggaggtgacggataccgccccccgctccccggttttgcagctgggaggcttggggcggactctcggtgacctcagccccccgccccgtgactgggtccgcggcctgcctgcctttcgtctccgcagtcccacaccccggggcgggccgagctttctggagccccggagtgcgtgtcttggggaaaggggctcagggcttggcttcctttcccacggctggagttgacctgggaatctgaccgccgccactctcaagtctcactgcagtgagacccgcgggcgtggttgtgagttgggggatccgacgcggcaggtgcggtcgcagagcaaaggcgccttggtgctgaattggggaagtctgttgtatatcaagagaccaatggagaaacaagagttgaaataaaagaatctgttcgtggccaagatattttcattatacagacaatacccagagatgtgaatacagctgtgatggagttgctcatcatggcttacgcactgaagactgcctgtgccaggaacattattggggtcatcccctacttcccctacagcaagcagagcaagatgaggaagaggggttccattgtgtgcaagctgctagcatccatgctggcgaaagcaggtttaactcacattatcactatggatcttcatcaaaaggaaatacaaggctttttcagctttcctgtggacaaccttagagcctcacctttcctgcttcagtatatccaggaagaaattccaaattacagaaatgcagtcattgtagctaagtctcctgatgctgcaaagagggcccagtcctatgcggagagactgcgtctgggtttggccgtcattcacggggaagctcagtgcacggaactggacatggacgatggtcgtcactccccgcctatggtcaaaaatgctactgtgcacccaggcctggagttgccat

SEQ ID NO: 166011 - DNA, 916 bp, Homo sapiens
  Payload ID: 12683
  Gene Symbol: PRPSAP1
  Gene Name: phosphoribosyl pyrophosphate synthetase-associated protein 1
  ENST ID: ENST00000435555
  CDS Start-End: 227-916
ctgggtaacacggagcactcaggaatacacgatcttggcggggcgtgatggctgaggcctgtaatgtcggcattttgaatgactgaggcgccttggtgctgaattggggaagtctgttgtatatcaagagaccaatggagaaacaagagttgaaataaaagaatctgttcgtggccaagatattttcattatacagacaatacccagagatgtgaatacagctgtgatggagttgctcatcatggcttacgcactgaagactgcctgtgccaggaacattattggggtcatcccctacttcccctacagcaagcagagcaagatgaggaagaggggttccattgtgtgcaagctgctagcatccatgctggcgaaagcaggtttaactcacattatcactatggatcttcatcaaaaggaaatacaaggctttttcagctttcctgtggacaaccttagagcctcacctttcctgcttcagtatatccaggaagaaattccaaattacagaaatgcagtcattgtagctaagtctcctgatgctgcaaagagggcccagtcctatgcggagagactgcgtctgggtttggccgtcattcacggggaagctcagtgcacggaactggacatggacgatggtcgtcactccccgcctatggtcaaaaatgctactgtgcacccaggcctggagttgccattgatgatggccaaagagaagccaccgataactgtagttggagatgttggaggccgcatcgcaatcatcgtggatgacattattgacgatgtggagagttttgttgctgccgcggagatcctgaaagagagaggcgcctataagatctatgttatggccacccacggcatcctgtctgcagaggcccctcgcctgattgaggagtcctccgtagacgag

SEQ ID NO: 166012 - DNA, 908 bp, Homo sapiens
  Payload ID: 12683
  Gene Symbol: PRPSAP1
  Gene Name: phosphoribosyl pyrophosphate synthetase-associated protein 1
  ENST ID: ENST00000442767
  CDS Start-End: 596-908
ccgggccacgagctggttcccgcccgggtcctaggaagcggcaagcgcgcccccgccgctcgtcctaggcgtctggctagaaggcggcgccgcgacctggccgggtgagctgaggcggcaggccgcgaggcgcggagtcccgggcccggccgcgagcgcagtgtctggggcgcgcgaaagcgaccgcgcagcgcagacggaggcgcgggctccgcgcgaactcgtgtcggagcgagcgccgggcgcgcgcggctccgctctcccgggggacccttggtttcacctcgacgccacgacctcgcccccgcgggtgctgtcggcgccgggatgcagcgccccttttgcgcgctctgccctagcccacccgaaattcgaggcccgcacgccacccggggcgcctctccaggccggggcgtctcgcccgccgcccaccagcttccctctttcttcctcccccgcgctcccacggaggttatttttaacttcccgacgctgcagctgggctaccgagcctgaggccgcctagcgcgctgtcccgggtagagcaggcgacaggccgggggctccgagccggagaggaggcttgacagtgtagatgggcctgggggcccccgtcgggattggaaagccaagcatgtggcgccttggtgctgaattggggaagtctgttgtatatcaagagaccaatggagaaacaagagttgaaataaaagaatctgttcgtggccaagatattttcattatacagacaatacccagagatgtgaatacagctgtgatggagttgctcatcatggcttacgcactgaagactgcctgtgccaggaacattattggggtcatcccctacttcccctacagcaagcagagcaagatgaggaagaggggttccattgtgtgcaagctgc

SEQ ID NO: 166013 - DNA, 549 bp, Homo sapiens
  Payload ID: 12683
  Gene Symbol: PRPSAP1
  Gene Name: phosphoribosyl pyrophosphate synthetase-associated protein 1
  ENST ID: ENST00000423915
  CDS Start-End: 281-549
ctcagcgcgccgcctccggcacggcccgcgcccacggccgggccacgagctggttcccgcccgggtcctaggaagcggcaagcgcgcccccgccgctcgtcctaggcgtctggctagaaggcggcgccgcgacctggccgggcgccttggtgctgaattggggaagtctgttgtatatcaagagaccaatggagaaacaagagttgaaataaaagaatctgttcgtggccaagatattttcattatacagacaatacccagagatgtgaatacagctgtgatggagttgctcatcatggcttacgcactgaagactgcctgtgccaggaacattattggggtcatcccctacttcccctacagcaagcagagcaagatgaggaagaggggttccattgtgtgcaagctgctagcatccatgctggcgaaagcaggtttaactcacattatcactatggatcttcatcaaaaggaaatacaaggctttttcagctttcctgtggacaaccttagagcctcacctttcctgcttcagtatatccaggaaga

SEQ ID NO: 166014 - DNA, 3660 bp, Homo sapiens
  Payload ID: 12683
  Gene Symbol: PRPSAP1
  Gene Name: phosphoribosyl pyrophosphate synthetase-associated protein 1
  Uniprot ID: Q14558
  ENST ID: ENST00000446526
  CDS Start-End: 447-1604
aaaaagttggaaacacctggggccactaccgaggtaggctgctcctcccaagaaagtgagaccgaaagagctcccgtggaagcggtcaaagcaggggcggggcgaacctgtgacatgcccctcggaagaacaggcttttagagagtcgccaggctccctgccctcatccgagatggcggcctgagggcgctctagccgacgctcttcggatgcccggagggggcggtggccttgcctctggctctgaggcggcggcgccgggcgctgcgaaggctcggccgctgtagtcagtggtgtggggtgcgcaagggcacggacctcggagctctccccgcttgcgccgagtttctcagcgccttccccacccaaaccggggtctcgcagtcggaagcactcagagtgcagccccgcgcggggccggtcgtaaccgcgccgcgggccggacgatgcccaagaagctgctgctgttgcccccgccctccgcgtcctcggctttccgcgtcccgcgcgcccgccccgttcccccgccggccatgaacgccgctcgcaccggctaccgagtcttctcggccaactccacggccgcctgcacggagctggccaagcgcatcacagagcgccttggtgctgaattggggaagtctgttgtatatcaagagaccaatggagaaacaagagttgaaataaaagaatctgttcgtggccaagatattttcattatacagacaatacccagagatgtgaatacagctgtgatggagttgctcatcatggcttacgcactgaagactgcctgtgccaggaacattattggggtcatcccctacttcccctacagcaagcagagcaagatgaggaagaggggttccattgtgtgcaagctgctagcatccatgctggcgaaagcaggtttaactcacattatcactatggatcttcatcaaaaggaaatacaaggctttttcagctttcctgtggacaaccttagagcctcacctttcctgcttcagtatatccaggaagaaattccaaattacagaaatgcagtcattgtagctaagtctcctgatgctgcaaagagggcccagtcctatgcggagagactgcgtctgggtttggccgtcattcacggggaagctcagtgcacggaactggacatggacgatggtcgtcactccccgcctatggtcaaaaatgctactgtgcacccaggcctggagttgccattgatgatggccaaagagaagccaccgataactgtagttggagatgttggaggccgcatcgcaatcatcgtggatgacattattgacgatgtggagagttttgttgctgccgcggagatcctgaaagagagaggcgcctataagatctatgttatggccacccacggcatcctgtctgcagaggcccctcgcctgattgaggagtcctccgtagacgaggtggtggtgacgaatactgtccctcatgaggttcagaagctgcaatgtcccaagataaagactgtggatatcagtttgattctttctgaagccattcggagaatccacaatggagagtccatggcctaccttttccgaaacatcactgtggatgactagctttcacgagggtctcgaccctggacctcctgagggaaacatggaaaaagcagtgccatgagtgatacagtgtttccttgcaagggaggactcgaaacagcctggagttagatatcttcttttgcccggattgatggggaggagggattaaaagagtcaggaagaagacagagctaatggataaatatcataacatggccttacatgtctgctgtcatcagccctgttccttaaaagttctagctgctttcttaaaaataatctgaaaatcttattgatactaaagaggagttaaaggcacataaagtcttaactctataatgttcatttagttgtttcagctccagggaaatggaggtattgatgttgaacctggttagggaagctgagcgcctgtggccctattactatccagttggcctctcccaaatcaacttcaagtcttttatagagaatcgtatttttctttcagaaattgttatgcctacagccattgaaaaatgaagcattcatgttgttacatcttccaaggatgtcagattagaaaatagcatcccacctctgggtatctgagtggctctgaagttgcaaataaaataatttgttgtcttgctagtcttttcattagacagcagaagaccatggatacagaacagcagtcaggtctgtggctggacacaaacactttcccaggttccaccctcttcctaagtgttgaagctaaatccttgttgaatactgtattttaaatctttaaaaaaaaaaaaaaaaagtctaggtgtggtggctcacacctataatctgagtactttgggaggctgaggcaaggaggattgcttgagcccaggagtttcagaccagcctgggaaacatggcgaaacccccatgtctacaaaaaatacaaaaattagccaggcattggtagcatgtgcctgtagttccagctaccttgggaggctgaggtgggaggattgcctgagccaaggaggttgaagctgcagtgaactatgattgtaccactgccatccatcctgggtgacagagcaacaccctgtctcaaaaaaaaaaaacaggccagggatcgtgtcttatgcctgtaatccctgcactttgggaggccgaggcaggtagatcacctgaggtcaggagtttgagaccagcctggccaacatggcaaaaccccgtctctactaaaaatacaaaaattagcctagctaagttaaaagcataaaaagactacaaagaggccaggcatcatggctcacgcctgtaatcccagcactttgggaggccgaggtgggcagatcacttgaggtcaggagtttgagaccagcctggccaatatggtgaaaccctgtccctactaaaaatacaaaaattagccgggtgttgggggagggggtgcacgcctgtaatcccagctactcgggaggctgaggcaggagaattaattggttgaacccaagaggcagagattgcagtgagctgagattgtgccactgcactccagcccaagtgacagagcaagattccatctcaaaaaaaaaaaaagactgcaaagaactagttattttgataaccccttaaaggcctactgtgtcccaagttattggaatataatgatgatcgaaaatccttcaattaaataaacagtacctctcaggctgaagtgaaaaatctgaacttgaacagtagttaaaatagtacagttattccttacaatccatgggtgattggttccaggactcaacctcctgcccatggatgtgcaagtccctgatagaaaatggtgtagtatctgcatataagctatgcacatcctggatgacttgtaatacctactgcaatatcctgtgtagatggtggtcatgctgtattatttagagaatcatgacaggaatctgtacgtgttcagtcgtggttggttaaatctgcagatgcagagctcacggaggaggctggccatgcatggcacacattcataggttctctttaagtagccttgctgtgcttctgttaggaagttttatttatacgtttttgggaagaatcttgt

SEQ ID NO: 166015 - DNA, 1910 bp, Homo sapiens
  Payload ID: 12684
  Gene Symbol: PRPSAP2
  Gene Name: phosphoribosyl pyrophosphate synthetase-associated protein 2
  Uniprot ID: O60256
  ENST ID: ENST00000268835
  CDS Start-End: 284-1393
cgcccctccccgcccaccggcctcgcagtcaccgcggacgccaatcttgtgcatggagtcgccattttgctcctagagaggccgccaggagacccggcgctttcttccttctgcagctgaggctgcggcggggccggggctggggtcggggccaggaggaattttgttgtcagagaataaaaggaggttgtccataattgactttaagcagcaatcagtaaaacattgagctcttcagctccgcctttcttgctctgaaaattggaaaaccaagaaggttttgatgttttgtgtgacgccacctgaattagaaaccaagatgaacataaccaaaggtggtctggtgttgttttcagcaaactcgaattcatcatgtatggagctatcaaagaaaattgcagagcggctaggggtggagatgggcaaagtgcaggtttaccaggaacctaacagagaaacaagagtacaaattcaagagtctgtgaggggaaaagatgttttcatcatccaaactgtttcgaaggacgtgaacaccaccatcatggagctcctgatcatggtgtatgcatgtaagacctcttgtgccaagagcatcattggcgtgataccctactttccttacagcaagcagtgcaagatgagaaaaagaggctccattgtctctaaattgctggcttccatgatgtgcaaagctggtctaactcatcttattactatggatttacaccagaaggaaattcagggcttcttcaatattcctgttgacaatttaagagcatctcccttcttattacagtatattcaagaagagatcccagattacaggaatgcagtaatcgtggccaagtctccagcctcggcgaagagggcacagtcttttgctgagcgcctgcgcctgggaattgcagtgattcatggagaggcgcaggatgccgagtcggacttggtggatggacggcattccccacccatggtcagaagtgtggctgccatccaccccagcctggagatccccatgctgattcctaaagaaaagcccccaatcacggttgtgggtgatgttggaggaaggattgccatcatcgtggatgacatcattgatgatgttgacagctttcttgctgcagcagagaccctgaaggaaagaggtgcatataagatctttgtgatggcaactcatggcttgttgtcttctgacgccccccggcggattgaagagtctgccattgatgaggtggtggtcaccaatacaattccacatgaagtccagaagctccagtgccccaagattaaaactgtggatatcagcatgatcctttcagaggcgatccgtcggatccacaatggggagtccatgtcctaccttttcagaaacataggcttagatgactgagttttcctttaggaaaactcccgagggccaaactggaaacataagagtgactgctcggtgggatggatttcacaggaaccgtcatgcttgttcctccctctcccctgtaacctcacttcttattgattcctaagaagatagaccaactttttatgtcggtttgggtgtttgtgagtttggggagcaatttttataaaagaaaaactttattctcctcttttgaaaaggtaagacctcgttttagttgtaactgtttaaaaaataacacttggaataagatttgtaagctcacaaagccttcttccaaagttgcttgagccaagtgcttaaaaagttaataaaataaaatgatctgtatgatacctgcaattgaaaagccgaaaagattatactgtcaagtccagtaaatgacatttttagagatgcttttgtagacaagcatatggaatatgtgattgtatttattttctgcaactaaaaaaggaataaaaacttgtgtttgtgtgtttttctaaaa

SEQ ID NO: 166016 - DNA, 1540 bp, Homo sapiens
  Payload ID: 12684
  Gene Symbol: PRPSAP2
  Gene Name: phosphoribosyl pyrophosphate synthetase-associated protein 2
  ENST ID: ENST00000395656
  CDS Start-End: 158-394
accgcggacgccaatcttgtgcatggagtcgccattttgctcctagagaggccgccaggagacccggcgctttcttccttctgcagctgaggctgcggcggggccggggctggggtcggggccaggctctgaaaattggaaaaccaagaaggttttgatgttttgtgtgacgccacctgaattagaaaccaagatgaacataaccaaaggtggtctggtgttgttttcagcaaactcgaattcatcatgtatggagctatcaaagaaaattgcagaaaacaagagtacaaattcaagagtctgtgaggggaaaagatgttttcatcatccaaactgtttcgaaggacgtgaacaccaccatcatggagctcctgatcatggtgtatgcatgtaagacctcttgtgccaagagcatcattggcgtgataccctactttccttacagcaagcagtgcaagatgagaaaaagaggctccattgtctctaaattgctggcttccatgatgtgcaaagctggtctaactcatcttattactatggatttacaccagaaggaaattcagggcttcttcaatattcctgttgacaatttaagagcatctcccttcttattacagtatattcaagaagagatcccagattacaggaatgcagtaatcgtggccaagtctccagcctcggcgaagagggcacagtcttttgctgagcgcctgcgcctgggaattgcagtgattcatggagaggcgcaggatgccgagtcggacttggtggatggacggcattccccacccatggtcagaagtgtggctgccatccaccccagcctggagatccccatgctgattcctaaagaaaagcccccaatcacggttgtgggtgatgttggaggaaggattgccatcatcgtggatgacatcattgatgatgttgacagctttcttgctgcagcagagaccctgaaggaaagaggtgcatataagatctttgtgatggcaactcatggcttgttgtcttctgacgccccccggcggattgaagagtctgccattgatgaggtggtggtcaccaatacaattccacatgaagtccagaagctccagtgccccaagattaaaactgtggatatcagcatgatcctttcagaggcgatccgtcggatccacaatggggagtccatgtcctaccttttcagaaacataggcttagatgactgagttttcctttaggaaaactcccgagggccaaactggaaacataagagtgactgctcggtgggatggatttcacaggaaccgtcatgcttgttcctccctctcccctgtaacctcacttcttattgattcctaagaagatagaccaactttttatgtcggtttgggtgtttgtgagtttggggagcaatttttataaaagaaaaactttattctcctcttttgaaaaggtaagacctcgttttagttgtaactgtttaaaaaataacacttggaataagatttgtaagctcacaaagccttcttccaaagttgcttgagccaagtgc

SEQ ID NO: 166017 - DNA, 1491 bp, Homo sapiens
  Payload ID: 12684
  Gene Symbol: PRPSAP2
  Gene Name: phosphoribosyl pyrophosphate synthetase-associated protein 2
  Uniprot ID: O60256
  ENST ID: ENST00000419071
  CDS Start-End: 206-1195
gttgtgaccggagttagatgccagcgcagaagggacgtgagcccagccgaggtaccgctgaagaggaatcaattttggaggaattttgttgtcagagaataaaaggaggttgtccataattgactttaagcagcaatcagtaaaacattgagctcttcagctccgcctttcttgctctgaaaattggaaaaccaagaaggttttgatgttttgtgtgacgccacctgaattagaaaccaagatgaacataaccaaaggtggtctggtgttgttttcagcaaactcgaattcatcatgtatggagctatcaaagaaaattgcagaggacgtgaacaccaccatcatggagctcctgatcatggtgtatgcatgtaagacctcttgtgccaagagcatcattggcgtgataccctactttccttacagcaagcagtgcaagatgagaaaaagaggctccattgtctctaaattgctggcttccatgatgtgcaaagctggtctaactcatcttattactatggatttacaccagaaggaaattcagggcttcttcaatattcctgttgacaatttaagagcatctcccttcttattacagtatattcaagaagagatcccagattacaggaatgcagtaatcgtggccaagtctccagcctcggcgaagagggcacagtcttttgctgagcgcctgcgcctgggaattgcagtgattcatggagaggcgcaggatgccgagtcggacttggtggatggacggcattccccacccatggtcagaagtgtggctgccatccaccccagcctggagatccccatgctgattcctaaagaaaagcccccaatcacggttgtgggtgatgttggaggaaggattgccatcatcgtggatgacatcattgatgatgttgacagctttcttgctgcagcagagaccctgaaggaaagaggtgcatataagatctttgtgatggcaactcatggcttgttgtcttctgacgccccccggcggattgaagagtctgccattgatgaggtggtggtcaccaatacaattccacatgaagtccagaagctccagtgccccaagattaaaactgtggatatcagcatgatcctttcagaggcgatccgtcggatccacaatggggagtccatgtcctaccttttcagaaacataggcttagatgactgagttttcctttaggaaaactcccgagggccaaactggaaacataagagtgactgctcggtgggatggatttcacaggaaccgtcatgcttgttcctccctctcccctgtaacctcacttcttattgattcctaagaagatagaccaactttttatgtcggtttgggtgtttgtgagtttggggagcaatttttataaaagaaaaactttattctcctcttttgaaaaggtaagacctcgttttagttgtaactgtttaaaaaataacacttggaataagatttgtaagctcacaaag

SEQ ID NO: 166018 - DNA, 700 bp, Homo sapiens
  Payload ID: 12684
  Gene Symbol: PRPSAP2
  Gene Name: phosphoribosyl pyrophosphate synthetase-associated protein 2
  ENST ID: ENST00000441887
  CDS Start-End: 280-700
atctacatgaagaattacagcaagacatgcaaaagtttaagaatgaggtcaacacattagaagaagagttcctggctttgaagaaagaaaatgttcaacttcataaagaggttgaagaagaaatggagaagcacagaagtaatagcacagaattatcaggaaccctaactgatggtactactgttggcaatgatgatgatggactaaatcagcagattcctaggaaggaaaatgaagagcatgacaggctctgaaaattggaaaaccaagaaggttttgatgttttgtgtgacgccacctgaattagaaaccaagatgaacataaccaaaggtggtctggtgttgttttcagcaaactcgaattcatcatgtatggagctatcaaagaaaattgcagagcggctaggggtggagatgggcaaagtgcaggtttaccaggaacctaacagagaaacaagagtacaaattcaagagtctgtgaggggaaaagatgttttcatcatccaaactgtttcgaaggacgtgaacaccaccatcatggagctcctgatcatggtgtatgcatgtaagacctcttgtgccaagagcatcattggcgtgataccctactttccttacagcaagcagtgcaagatgagaaaaagaggctccattgtctctaaattgctggcttccatgatgtgcaaagctggtctaactc

SEQ ID NO: 166019 - DNA, 1014 bp, Homo sapiens
  Payload ID: 12684
  Gene Symbol: PRPSAP2
  Gene Name: phosphoribosyl pyrophosphate synthetase-associated protein 2
  ENST ID: ENST00000432893
  CDS Start-End: 211-1014
acatgccaacatgtgacgcgtggaatctacgccagccacagcagagaggtgggggttgtgaccggagttagatgccagcgcagaagggacgtgagcccagccgaggtaccgctgaagaggaatcaattttggtatgcagataatcactgggctcatgggtcttgctctttacaaagaggctctgaaaattggaaaaccaagaaggttttgatgttttgtgtgacgccacctgaattagaaaccaagatgaacataaccaaaggtggtctggtgttgttttcagcaaactcgaattcatcatgtatggagctatcaaagaaaattgcagagcggctaggggtggagatgggcaaagtgcaggtttaccaggaacctaacagagaaacaagagtacaaattcaagagtctgtgaggggaaaagatgttttcatcatccaaactgtttcgaaggacgtgaacaccaccatcatggagctcctgatcatggtgtatgcatgtaagacctcttgtgccaagagcatcattggcgtgataccctactttccttacagcaagcagtgcaagatgagaaaaagaggctccattgtctctaaattgctggcttccatgatgtgcaaagctggtctaactcatcttattactatggatttacaccagaaggaaattcagggcttcttcaatattcctgttgacaatttaagagcatctcccttcttattacagtatattcaagaagagatcccagattacaggaatgcagtaatcgtggccaagtctccagcctcggcgaagagggcacagtcttttgctgagcgcctgcgcctgggaattgcagtgattcatggagaggcgcaggatgccgagtcggacttggtggatggacggcattccccacccatggtcagaagtgtggctgccatccaccccagcctggagatccccatgctgattcctaaagaaaagcccccaatcacggttgtgggtgatgttggaggaaggattgccatcatcgtg

SEQ ID NO: 166020 - DNA, 1038 bp, Homo sapiens
  Payload ID: 12684
  Gene Symbol: PRPSAP2
  Gene Name: phosphoribosyl pyrophosphate synthetase-associated protein 2
  ENST ID: ENST00000422237
  CDS Start-End: 306-1038
agtctctgctgcctggaccttaaattctgatggggaaatctttttaccaaggttatatctcttgtctggaaggtaaaggctgaggcccagcaaggacaagtgatgtccacatggcctagtagctggaaggcaaacccaactcttcacactcctacttcagccatctttaagtagaaggaggaattttgttgtcagagaataaaaggaggttgtccataattgactttaagcagcaatcagtaaaacattgagctcttcagctccgcctttcttgctctgaaaattggaaaaccaagaaggttttgatgttttgtgtgacgccacctgaattagaaaccaagatgaacataaccaaaggtggtctggtgttgttttcagcaaactcgaattcatcatgtatggagctatcaaagaaaattgcagagcggctaggggtggagatgggcaaagtgcaggtttaccaggaacctaacagagaaacaagagtacaaattcaagagtctgtgaggggaaaagatgttttcatcatccaaactgtttcgaaggacgtgaacaccaccatcatggagctcctgatcatggtgtatgcatgtaagacctcttgtgccaagagcatcattggcgtgataccctactttccttacagcaagcagtgcaagatgagaaaaagaggctccattgtctctaaattgctggcttccatgatgtgcaaagctggtctaactcatcttattactatggatttacaccagaaggaaattcagggcttcttcaatattcctgttgacaatttaagagcatctcccttcttattacagtatattcaagaagagatcccagattacaggaatgcagtaatcgtggccaagtctccagcctcggcgaagagggcacagtcttttgctgagcgcctgcgcctgggaattgcagtgattcatggagaggcgcaggatgccgagtcggacttggtggatggacggcattccccacccatggtcagaagtgtggctgccatccaccccagcctggagatcccca

SEQ ID NO: 166021 - DNA, 968 bp, Homo sapiens
  Payload ID: 12684
  Gene Symbol: PRPSAP2
  Gene Name: phosphoribosyl pyrophosphate synthetase-associated protein 2
  ENST ID: ENST00000412418
  CDS Start-End: 165-968
cgcagtcaccgcggacgccaatcttgtgcatggagtcgccattttgctcctagagaggccgccaggagacccggcgctttcttccttctgcagctgaggctgcggcggggccggggctggggtcggggccaggctctgaaaattggaaaaccaagaaggttttgatgttttgtgtgacgccacctgaattagaaaccaagatgaacataaccaaaggtggtctggtgttgttttcagcaaactcgaattcatcatgtatggagctatcaaagaaaattgcagagcggctaggggtggagatgggcaaagtgcaggtttaccaggaacctaacagagaaacaagagtacaaattcaagagtctgtgaggggaaaagatgttttcatcatccaaactgtttcgaaggacgtgaacaccaccatcatggagctcctgatcatggtgtatgcatgtaagacctcttgtgccaagagcatcattggcgtgataccctactttccttacagcaagcagtgcaagatgagaaaaagaggctccattgtctctaaattgctggcttccatgatgtgcaaagctggtctaactcatcttattactatggatttacaccagaaggaaattcagggcttcttcaatattcctgttgacaatttaagagcatctcccttcttattacagtatattcaagaagagatcccagattacaggaatgcagtaatcgtggccaagtctccagcctcggcgaagagggcacagtcttttgctgagcgcctgcgcctgggaattgcagtgattcatggagaggcgcaggatgccgagtcggacttggtggatggacggcattccccacccatggtcagaagtgtggctgccatccaccccagcctggagatccccatgctgattcctaaagaaaagcccccaatcacggttgtgggtgatgttggaggaaggattgccatcatcgtg

SEQ ID NO: 166022 - DNA, 950 bp, Homo sapiens
  Payload ID: 12684
  Gene Symbol: PRPSAP2
  Gene Name: phosphoribosyl pyrophosphate synthetase-associated protein 2
  ENST ID: ENST00000419284
  CDS Start-End: 423-950
cctcgcccctccccgcccaccggcctcgcagtcaccgcggacgccaatcttgtgcatggagtcgccattttgctcctagagaggccgccaggagacccggcgctttcttccttctgcagctgaggctgcggcggggccggggctggggtcggggccagaattcagcggggtgccaagtcgttttctgtgtgggttgagagacaggctgtgcagcccactgttgcataggactaactactacaaatcatgctgagaccgagctatttttgctgcttagaggctttgcagccttgagaggaattttgttgtcagagaataaaaggaggttgtccataattgactttaagcagcaatcagtaaaacattgagctcttcagctccgcctttcttgctctgaaaattggaaaaccaagaaggttttgatgttttgtgtgacgccacctgaattagaaaccaagatgaacataaccaaaggtggtctggtgttgttttcagcaaactcgaattcatcatgtatggagctatcaaagaaaattgcagagcggctaggggtggagatgggcaaagtgcaggtttaccaggaacctaacagagaaacaagagtacaaattcaagagtctgtgaggggaaaagatgttttcatcatccaaactgtttcgaaggacgtgaacaccaccatcatggagctcctgatcatggtgtatgcatgtaagacctcttgtgccaagagcatcattggcgtgataccctactttccttacagcaagcagtgcaagatgagaaaaagaggctccattgtctctaaattgctggcttccatgatgtgcaaagctggtctaactcatcttattactatggatttacaccagaaggaaattcagggcttcttcaatattcctgttgacaatttaagagcatctcccttcttattacagtatattcaagaagag

SEQ ID NO: 166023 - DNA, 908 bp, Homo sapiens
  Payload ID: 12684
  Gene Symbol: PRPSAP2
  Gene Name: phosphoribosyl pyrophosphate synthetase-associated protein 2
  ENST ID: ENST00000455992
  CDS Start-End: 205-690
ggccgccaggagacccggcgctttcttccttctgcagctgaggctgcggcggggccggggctggggtcggggccaggaggaattttgttgtcagagaataaaaggaggttgtccataattgactttaagcagcaatcagtaaaacattgagctcttcagctccgcctttcttgctctgaaaattggaaaaccaagaaggttttgatgttttgtgtgacgccacctgaattagaaaccaagatgaacataaccaaaggtggtctggtgttgttttcagcaaactcgaattcatcatgtatggagctatcaaagaaaattgcagagcggctaggggtggagatgggcaaagtgcaggtttaccaggaacctaacagagaaacaagagtacaaattcaagagtctgtgaggggaaaagatgttttcatcatccaaactgtttcgaaggacgtgaacaccaccatcatggagctcctgatcatggtgtatgcatgtaagacctcttgtgccaagagcatcattggcgtgataccctactttccttacagcaagcagtgcaagatgagaaaaagaggctccattgtctctaaattgctggcttccatgatgtgcaaagctgatcccagattacaggaatgcagtaatcgtggccaagtctccagcctcggcgaagagggcacagtcttttgctgagcgcctgcgcctgggaattgcagtgattcatggagaggcgcaggatgccgagtcggacttggtggatggacggcattccccacccatggtcagaagtgtggctgccatccaccccagcctggagatccccatgctgattcctaaagaaaagcccccaatcacggttgtgggtgatgttggaggaaggattgccatcatcgtggtatgtagacctcttt

SEQ ID NO: 166024 - DNA, 787 bp, Homo sapiens
  Payload ID: 12684
  Gene Symbol: PRPSAP2
  Gene Name: phosphoribosyl pyrophosphate synthetase-associated protein 2
  ENST ID: ENST00000414602
  CDS Start-End: 204-787
gccagccacagcagagaggtgggggttgtgaccggagttagatgccagcgcagaagggacgtgagcccagccgaggaggaattttgttgtcagagaataaaaggaggttgtccataattgactttaagcagcaatcagtaaaacattgagctcttcagctccgcctttcttgctctgaaaattggaaaaccaagaaggttttgatgttttgtgtgacgccacctgaattagaaaccaagatgaacataaccaaaggtggtctggtgttgttttcagcaaactcgaattcatcatgtatggagctatcaaagaaaattgcagagcggctaggggtggagatgggcaaagtgcaggtttaccaggaacctaacagagaaacaagagtacaaattcaagagtctgtgaggggaaaagatgttttcatcatccaaactgtttcgaaggacgtgaacaccaccatcatggagctcctgatcatggtgtatgcatgtaagacctcttgtgccaagagcatcattggcgtgataccctactttccttacagcaagcagtgcaagatgagaaaaagaggctccattgtctctaaattgctggcttccatgatgtgcaaagctggtctaactcatcttattactatggatttacaccagaaggaaattcagggcttcttcaatattcctgttgacaatttaagagcatctcccttcttattacagtatattcaagaagagatcccagattacaggaatgcagtaatcgtggccaagtctccagcctcggcgaagag

SEQ ID NO: 166025 - DNA, 1047 bp, Homo sapiens
  Payload ID: 12684
  Gene Symbol: PRPSAP2
  Gene Name: phosphoribosyl pyrophosphate synthetase-associated protein 2
  Uniprot ID: O60256
  ENST ID: ENST00000542013
  CDS Start-End: 49-1011
cagctccgcctttcttgctctgaaaattggaaaaccaagaaggttttgatgttttgtgtgacgccacctgaattagaaaccaagatgaacataaccaaaggtggtctggtgttgttttcagcaaactcgaattcatcatgtatggagctatcaaagaaaattgcagagcggctaggggtggagatgggcaaagtgcaggtttaccaggaacctaacagagaaacaagagtacaaattcaagagtctgtgaggggaaaagatgttttcatcatccaaactgtttcgaaggacgtgaacaccaccatcatggagctcctgatcatggtgtatgcatgtaagacctcttgtgccaagagcatcattggcgtgataccctactttccttacagcaagcagtgcaagatgagaaaaagaggctccattgtctctaaattgctggcttccatgatgtgcaaagctggtctaactcatcttattactatggatttacaccagaaggaaattcagggcttcttcaatattcctgttgacaatttaagagcatctcccttcttattacagtatattcaagaagagatcccagattacaggaatgcagtaatcgtggccaagtctccagcctcggcgaagagggcacagtcttttgctgagcgcctgcgcctgggaattgcagtgattcatggagaggcgcaggatgccgagtcggacttggtggatggacggcattccccacccatggtcagaagtgtggctgccatccaccccagcctggagatccccatgctgattcctaaagaaaagcccccaatcacggttgtgggtgatgttggaggaaggattgccatcatcgtggtggtggtcaccaatacaattccacatgaagtccagaagctccagtgccccaagattaaaactgtggatatcagcatgatcctttcagaggcgatccgtcggatccacaatggggagtccatgtcctaccttttcagaaacataggcttagatgactgagttttcctttaggaaaactcccgagggccaaactgg

SEQ ID NO: 166026 - DNA, 1872 bp, Homo sapiens
  Payload ID: 12684
  Gene Symbol: PRPSAP2
  Gene Name: phosphoribosyl pyrophosphate synthetase-associated protein 2
  Uniprot ID: O60256
  ENST ID: ENST00000536323
  CDS Start-End: 432-1283
agctaggtgcctccgctgtccgggctctagtcccgccctcgcccctccccgcccaccggcctcgcagtcaccgcggacgccaatcttgtgcatggagtcgccattttgctcctagagaggccgccaggagacccggcgctttcttccttctgcagctgaggctgcggcggggccggggctggggtcggggccaggctctgaaaattggaaaaccaagaaggttttgatgttttgtgtgacgccacctgaattagaaaccaagatgaacataaccaaaggtggtctggtgttgttttcagcaaactcgaattcatcatgtatggagctatcaaagaaaattgcagaaaacaagagtacaaattcaagagtctgtgaggggaaaagatgttttcatcatccaaactgtttcgaaggacgtgaacaccaccatcatggagctcctgatcatggtgtatgcatgtaagacctcttgtgccaagagcatcattggcgtgataccctactttccttacagcaagcagtgcaagatgagaaaaagaggctccattgtctctaaattgctggcttccatgatgtgcaaagctggtctaactcatcttattactatggatttacaccagaaggaaattcagggcttcttcaatattcctgttgacaatttaagagcatctcccttcttattacagtatattcaagaagagatcccagattacaggaatgcagtaatcgtggccaagtctccagcctcggcgaagagggcacagtcttttgctgagcgcctgcgcctgggaattgcagtgattcatggagaggcgcaggatgccgagtcggacttggtggatggacggcattccccacccatggtcagaagtgtggctgccatccaccccagcctggagatccccatgctgattcctaaagaaaagcccccaatcacggttgtgggtgatgttggaggaaggattgccatcatcgtggatgacatcattgatgatgttgacagctttcttgctgcagcagagaccctgaaggaaagaggtgcatataagatctttgtgatggcaactcatggcttgttgtcttctgacgccccccggcggattgaagagtctgccattgatgaggtggtggtcaccaatacaattccacatgaagtccagaagctccagtgccccaagattaaaactgtggatatcagcatgatcctttcagaggcgatccgtcggatccacaatggggagtccatgtcctaccttttcagaaacataggcttagatgactgagttttcctttaggaaaactcccgagggccaaactggaaacataagagtgactgctcggtgggatggatttcacaggaaccgtcatgcttgttcctccctctcccctgtaacctcacttcttattgattcctaagaagatagaccaactttttatgtcggtttgggtgtttgtgagtttggggagcaatttttataaaagaaaaactttattctcctcttttgaaaaggtaagacctcgttttagttgtaactgtttaaaaaataacacttggaataagatttgtaagctcacaaagccttcttccaaagttgcttgagccaagtgcttaaaaagttaataaaataaaatgatctgtatgatacctgcaattgaaaagccgaaaagattatactgtcaagtccagtaaatgacatttttagagatgcttttgtagacaagcatatggaatatgtgattgtatttattttctgcaactaaaaaaggaataaaaacttgtgtttgtgtgtttttctaaaactttgtgttttggcaatcgttttataactaaaataaaatgaaagctaaatctacacgctgtgaatgttgaaa

SEQ ID NO: 166027 - DNA, 1019 bp, Homo sapiens
  Payload ID: 12684
  Gene Symbol: PRPSAP2
  Gene Name: phosphoribosyl pyrophosphate synthetase-associated protein 2
  ENST ID: ENST00000574451
  CDS Start-End: 1-782
tggatttacaccagaaggaaattcagggcttcttcaatattcctgttgacaatttaagagcatctcccttcttattacagtatattcaagaagagatcccagattacaggaatgcagtaatcgtggccaagtctccagcctcggcgaagagggcacagtcttttgctgagcgcctgcgcctgggaattgcagtgattcatggagaggcgcaggatgccgagtcggacttggtggatggacggcattccccacccatggtcagaagtgtggctgccatccaccccagcctggagatccccacctggagtgcagtggtgcaatcatggcacactgcaacctcggcctcccaggttcaggcgattctcctgggtagctgggactaccggtacatgccaccatgcccagtgctgattcctaaagaaaagcccccaatcacggttgtgggtgatgttggaggaaggattgccatcatcgtggatgacatcattgatgatgttgacagctttcttgctgcagcagagaccctgaaggaaagaggtgcatataagatctttgtgatggcaactcatggcttgttgtcttctgacgccccccggcggattgaagagtctgccattgatgaggtggtggtcaccaatacaattccacatgaagtccagaagctccagtgccccaagattaaaactgtggatatcagcatgatcctttcagaggcgatccgtcggatccacaatggggagtccatgtcctaccttttcagaaacataggcttagatgactgagttttcctttaggaaaactcccgagggccaaactggaaacataagagtgactgctcggtgggatggatttcacaggaaccgtcatgcttgttcctccctctcccctgtaacctcacttcttattgattcctaagaagatagaccaactttttatgtcggtttgggtgtttgtgagtttggggagcaatttttataaaagaaaaactttattctcctcttttgaaaaggtaagacctc

SEQ ID NO: 166028 - DNA, 561 bp, Homo sapiens
  Payload ID: 12684
  Gene Symbol: PRPSAP2
  Gene Name: phosphoribosyl pyrophosphate synthetase-associated protein 2
  ENST ID: ENST00000576355
  CDS Start-End: 250-561
ccctcccttcttcctctcccgccaggggtcggcgggggcgggggacgggcgtccggtgcctgggctctctcctctccctgaggcgccgctggggagtcgaaccctgatgatgggacctgtggaggaattttgttgtcagagaataaaaggaggttgtccataattgactttaagcagcaatcagtaaaacattgagctcttcagctccgcctttcttgctctgaaaattggaaaaccaagaaggttttgatgttttgtgtgacgccacctgaattagaaaccaagatgaacataaccaaaggtggtctggtgttgttttcagcaaactcgaattcatcatgtatggagctatcaaagaaaattgcagagcggctaggggtggagatgggcaaagtgcaggtttaccaggaacctaacagagaaacaagagtacaaattcaagagtctgtgaggggaaaagatgttttcatcatccaaactgtttcgaaggacgtgaacaccaccatcatggagctcctgatcatggtgtatgcatgtaagacctcttgtgccaagagcatc

SEQ ID NO: 166029 - DNA, 584 bp, Homo sapiens
  Payload ID: 12684
  Gene Symbol: PRPSAP2
  Gene Name: phosphoribosyl pyrophosphate synthetase-associated protein 2
  ENST ID: ENST00000573253
  CDS Start-End: 191-334
agatgccagcgcagaagggacgtgagcccagccgaggtaccgctgaagaggaatcaattttggaggaattttgttgtcagagaataaaaggaggttgtccataattgactttaagcagcaatcagtaaaacattgagctcttcagctccgcctttcttgctctgaaaattggaaaaccaagaaggttttgatgttttgtgtgacgccacctgaattagaaaccaagatgaacataaccaaaggtggtctggtgttgttttcagcaaactcgaattcatcatgtatggagctatcaaagaaaattgcagactttttccccctttctcttctctaggcggctaggggtggagatgggcaaagtgcaggtttaccaggaacctaacagagaaacaagagtacaaattcaagagtctgtgaggggaaaagatgttttcatcatccaaactgtttcgaaggacgtgaacaccaccatcatggagctcctgatcatggtgtatgcatgtaagacctcttgtgccaagagcatcattggcgtgataccctactttccttacagcaagcagtgcaagatgagaaaaagaggc

SEQ ID NO: 166030 - DNA, 556 bp, Homo sapiens
  Payload ID: 12684
  Gene Symbol: PRPSAP2
  Gene Name: phosphoribosyl pyrophosphate synthetase-associated protein 2
  ENST ID: ENST00000575102
  CDS Start-End: 490-556
agtcgccattttgctcctagagaggccgccaggagacccggcgctttcttccttctgcagctgaggctgcggcggggccggggctggggtcggggccagaattcagcggggtgccaagtcgttttctgtgtgggttgagagacaggctgtgcagcccactgttgcataggactaactactacaaatcatgctgagaccgagctatttttgctgcttagaggctttgcagccttgagttatatctcttgtctggaaggtaaaggctgaggcccagcaaggacaagtgatgtccacatggcctagtagctggaaggcaaacccaactcttcacactcctacttcagccatctttaagtagaaggaggaattttgttgtcagagaataaaaggaggttgtccataattgactttaagcagcaatcagtaaaacattgagctcttcagctccgcctttcttgctctgaaaattggaaaaccaagaaggttttgatgttttgtgtgacgccacctgaattagaaaccaagatgaacataaccaaaggtggtctggtgttgt

SEQ ID NO: 166031 - DNA, 1835 bp, Homo sapiens
  Payload ID: 12684
  Gene Symbol: PRPSAP2
  Gene Name: phosphoribosyl pyrophosphate synthetase-associated protein 2
  ENST ID: ENST00000492129
  CDS Start-End: 209-445
ggggttgtgaccggagttagatgccagcgcagaagggacgtgagcccagccgaggtaccgctgaagaggaatcaattttggaggaattttgttgtcagagaataaaaggaggttgtccataattgactttaagcagcaatcagtaaaacattgagctcttcagctccgcctttcttgctctgaaaattggaaaaccaagaaggttttgatgttttgtgtgacgccacctgaattagaaaccaagatgaacataaccaaaggtggtctggtgttgttttcagcaaactcgaattcatcatgtatggagctatcaaagaaaattgcagaaaacaagagtacaaattcaagagtctgtgaggggaaaagatgttttcatcatccaaactgtttcgaaggacgtgaacaccaccatcatggagctcctgatcatggtgtatgcatgtaagacctcttgtgccaagagcatcattggcgtgataccctactttccttacagcaagcagtgcaagatgagaaaaagaggctccattgtctctaaattgctggcttccatgatgtgcaaagctggtctaactcatcttattactatggatttacaccagaaggaaattcagggcttcttcaatattcctgttgacaatttaagagcatctcccttcttattacagtatattcaagaagagatcccagattacaggaatgcagtaatcgtggccaagtctccagcctcggcgaagagggcacagtcttttgctgagcgcctgcgcctgggaattgcagtgattcatggagaggcgcaggatgccgagtcggacttggtggatggacggcattccccacccatggtcagaagtgtggctgccatccaccccagcctggagatccccatgctgattcctaaagaaaagcccccaatcacggttgtgggtgatgttggaggaaggattgccatcatcgtggatgacatcattgatgatgttgacagctttcttgctgcagcagagaccctgaaggaaagaggtgcatataagatctttgtgatggcaactcatggcttgttgtcttctgacgccccccggcggattgaagagtctgccattgatgaggtggtggtcaccaatacaattccacatgaagtccagaagctccagtgccccaagattaaaactgtggatatcagcatgatcctttcagaggcgatccgtcggatccacaatggggagtccatgtcctaccttttcagaaacataggcttagatgactgagttttcctttaggaaaactcccgagggccaaactggaaacataagagtgactgctcggtgggatggatttcacaggaaccgtcatgcttgttcctccctctcccctgtaacctcacttcttattgattcctaagaagatagaccaactttttatgtcggtttgggtgtttgtgagtttggggagcaatttttataaaagaaaaactttattctcctcttttgaaaaggtaagacctcgttttagttgtaactgtttaaaaaataacacttggaataagatttgtaagctcacaaagccttcttccaaagttgcttgagccaagtgcttaaaaagttaataaaataaaatgatctgtatgatacctgcaattgaaaagccgaaaagattatactgtcaagtccagtaaatgacatttttagagatgcttttgtagacaagcatatggaatatgtgattgtatttattttctgcaactaaaaaaggaataaaaacttgtgtttgtgtgtttttctaaaactttgtgttttggcaatcgttttataactaaaataaaatgaaagctaaatcta

SEQ ID NO: 166032 - DNA, 567 bp, Homo sapiens
  Payload ID: 12684
  Gene Symbol: PRPSAP2
  Gene Name: phosphoribosyl pyrophosphate synthetase-associated protein 2
  ENST ID: ENST00000574522
  CDS Start-End: 288-567
agagaggtgggggttgtgaccggagttagatgccagcgcagaagggacgtgagcccagccgaggtaccgctgaagaggaatcaattttgatgaggaaacaagctcagagggttgaaatgacttgtccaaggttacaggccagtggaggcttgaacccaggaggaattttgttgtcagagaataaaaggaggttgtccataattgactttaagcagcaatcagtaaaacattgagctcttcagctccgcctttcttgctctgaaaattggaaaaccaagaaggttttgatgttttgtgtgacgccacctgaattagaaaccaagatgaacataaccaaaggtggtctggtgttgttttcagcaaactcgaattcatcatgtatggagctatcaaagaaaattgcagagcggctaggggtggagatgggcaaagtgcaggtttaccaggaacctaacagagaaacaagagtacaaattcaagagtctgtgaggggaaaagatgttttcatcatccaaactgtttcgaaggacgtgaacaccaccatcatggagctcctgatcatggtgt

SEQ ID NO: 166033 - DNA, 504 bp, Homo sapiens
  Payload ID: 12684
  Gene Symbol: PRPSAP2
  Gene Name: phosphoribosyl pyrophosphate synthetase-associated protein 2
  ENST ID: ENST00000575228
  CDS Start-End: 334-504
gcagtcaccgcggacgccaatcttgtgcatggagtcgccattttgctcctagagaggccgccaggagacccggcgctttcttccttctgcagctgaggctgcggcggggccggggctggggtcggggccagatggagtcttgctgtgtcgccaggctggaagtgcagtggcacgatctcagctcactgcaacctctgcctcccaggaggaattttgttgtcagagaataaaaggaggttgtccataattgactttaagcagcaatcagtaaaacattgagctcttcagctccgcctttcttgctctgaaaattggaaaaccaagaaggttttgatgttttgtgtgacgccacctgaattagaaaccaagatgaacataaccaaaggtggtctggtgttgttttcagcaaactcgaattcatcatgtatggagctatcaaagaaaattgcagaaaacaagagtacaaattcaagagtctgtgaggggaaaagatgttttcatcat

SEQ ID NO: 166034 - DNA, 927 bp, Homo sapiens
  Payload ID: 12684
  Gene Symbol: PRPSAP2
  Gene Name: phosphoribosyl pyrophosphate synthetase-associated protein 2
  ENST ID: ENST00000487101
  CDS Start-End: 248-484
gaagggacgtgagcccagccgaggtaccgctgaagaggaatcaattttgatgaggaaacaagctcagagggttgaaatgacttgtccaaggttacaggccagtggaggcttgaacccaggaggaattttgttgtcagagaataaaaggaggttgtccataattgactttaagcagcaatcagtaaaacattgagctcttcagctccgcctttcttgctctgaaaattggaaaaccaagaaggttttgatgttttgtgtgacgccacctgaattagaaaccaagatgaacataaccaaaggtggtctggtgttgttttcagcaaactcgaattcatcatgtatggagctatcaaagaaaattgcagaaaacaagagtacaaattcaagagtctgtgaggggaaaagatgttttcatcatccaaactgtttcgaaggacgtgaacaccaccatcatggagctcctgatcatggtgtatgcatgtaagacctcttgtgccaagagcatcattggcgtgataccctactttccttacagcaagcagtgcaagatgagaaaaagaggctccattgtctctaaattgctggcttccatgatgtgcaaagctggtctaactcatcttattactatggatttacaccagaaggaaattcagggcttcttcaatattcctgttgacaatttaagagcatctcccttcttattacagtatattcaagaagagatcccagattacaggaatgcagtaatcgtggccaagtctccagcctcggcgaagagggcacagtcttttgctgagcgcctgcgcctgggaattgcagtgattcatggagaggcgcaggatgccgagtcggacttggtggatggacggcattccccacccatggtcagaagtgtggctgccatccaccccagcctggagatcccca

SEQ ID NO: 166035 - DNA, 927 bp, Homo sapiens
  Payload ID: 12684
  Gene Symbol: PRPSAP2
  Gene Name: phosphoribosyl pyrophosphate synthetase-associated protein 2
  ENST ID: ENST00000570450
  CDS Start-End: 400-927
gagaggtgggggttgtgaccggagttagatgccagcgcagaagggacgtgagcccagccgaggtaccgctgaagaggaatcaattttggtatgcagataatcactgggctcatgggtcttgctctttacaaagagaattcagcggggtgccaagtcgttttctgtgtgggttgagagacaggctgtgcagcccactgttgcataggactaactactacaaatcatgctgagaccgagctatttttgctgcttagaggctttgcagccttgagaggaattttgttgtcagagaataaaaggaggttgtccataattgactttaagcagcaatcagtaaaacattgagctcttcagctccgcctttcttgctctgaaaattggaaaaccaagaaggttttgatgttttgtgtgacgccacctgaattagaaaccaagatgaacataaccaaaggtggtctggtgttgttttcagcaaactcgaattcatcatgtatggagctatcaaagaaaattgcagagcggctaggggtggagatgggcaaagtgcaggtttaccaggaacctaacagagaaacaagagtacaaattcaagagtctgtgaggggaaaagatgttttcatcatccaaactgtttcgaaggacgtgaacaccaccatcatggagctcctgatcatggtgtatgcatgtaagacctcttgtgccaagagcatcattggcgtgataccctactttccttacagcaagcagtgcaagatgagaaaaagaggctccattgtctctaaattgctggcttccatgatgtgcaaagctggtctaactcatcttattactatggatttacaccagaaggaaattcagggcttcttcaatattcctgttgacaatttaagagcatctcccttcttattacagtatattcaagaagag

SEQ ID NO: 166036 - DNA, 570 bp, Homo sapiens
  Payload ID: 12684
  Gene Symbol: PRPSAP2
  Gene Name: phosphoribosyl pyrophosphate synthetase-associated protein 2
  ENST ID: ENST00000460724
  CDS Start-End: 1-430
agaggcgcaggatgccgagtcggacttggtggatggacggcattccccacccatggtcagaagtgtggctgccatccaccccagcctggagatccccatgctgattcctaaagaaaagcccccaatcacggttgtgggtgatgttggaggaaggattgccatcatcgtggatgacatcattgatgatgttgacagctttcttgctgcagcagagaccctgaaggaaagaggtgcatataagatctttgtgatggcaactcatggcttgttgtcttctgacgccccccggcggattgaagagtctgccattgatgagatttgcctgttctggacatttcatataaatgagattatacaatgtgtggtcttttgtgtctggctgtcttcactcaacataatattttcaaggttcatccatgttggagcatgaatcaatacttcattttatgatcaaataatgctgtgttacatggatagtccacattttgtctctctcttcgtatttcatgttgatagaaaaaattttttttctactttttaacttatgaatggtgctgcagtaaacatttg

SEQ ID NO: 166037 - DNA, 537 bp, Homo sapiens
  Payload ID: 12684
  Gene Symbol: PRPSAP2
  Gene Name: phosphoribosyl pyrophosphate synthetase-associated protein 2
  ENST ID: ENST00000571907
  CDS Start-End: 295-438
agtcccgccctcgcccctccccgcccaccggcctcgcagtcaccgcggacgccaatcttgtgcatggagtcgccattttgctcctagagaggccgccaggagacccggcgctttcttccttctgcagctgaggctgcggcggggccggggctggggtcggggccaggaggaattttgttgtcagagaataaaaggaggttgtccataattgactttaagcagcaatcagtaaaacattgagctcttcagctccgcctttcttgctctgaaaattggaaaaccaagaaggttttgatgttttgtgtgacgccacctgaattagaaaccaagatgaacataaccaaaggtggtctggtgttgttttcagcaaactcgaattcatcatgtatggagctatcaaagaaaattgcagactttttccccctttctcttctctaggcggctaggggtggagatgggcaaagtgcaggtttaccaggaacctaacagagaaacaagagtacaaattcaagagtctgtgaggggaaaagatgtttt

SEQ ID NO: 166038 - DNA, 1905 bp, Homo sapiens
  Payload ID: 12684
  Gene Symbol: PRPSAP2
  Gene Name: phosphoribosyl pyrophosphate synthetase-associated protein 2
  Uniprot ID: O60256
  ENST ID: ENST00000610773
  CDS Start-End: 465-1316
acatgccaacatgtgacgcgtggaatctacgccagccacagcagagaggtgggggttgtgaccggagttagatgccagcgcagaagggacgtgagcccagccgaggtaccgctgaagaggaatcaattttggaggaattttgttgtcagagaataaaaggaggttgtccataattgactttaagcagcaatcagtaaaacattgagctcttcagctccgcctttcttgctctgaaaattggaaaaccaagaaggttttgatgttttgtgtgacgccacctgaattagaaaccaagatgaacataaccaaaggtggtctggtgttgttttcagcaaactcgaattcatcatgtatggagctatcaaagaaaattgcagaaaacaagagtacaaattcaagagtctgtgaggggaaaagatgttttcatcatccaaactgtttcgaaggacgtgaacaccaccatcatggagctcctgatcatggtgtatgcatgtaagacctcttgtgccaagagcatcattggcgtgataccctactttccttacagcaagcagtgcaagatgagaaaaagaggctccattgtctctaaattgctggcttccatgatgtgcaaagctggtctaactcatcttattactatggatttacaccagaaggaaattcagggcttcttcaatattcctgttgacaatttaagagcatctcccttcttattacagtatattcaagaagagatcccagattacaggaatgcagtaatcgtggccaagtctccagcctcggcgaagagggcacagtcttttgctgagcgcctgcgcctgggaattgcagtgattcatggagaggcgcaggatgccgagtcggacttggtggatggacggcattccccacccatggtcagaagtgtggctgccatccaccccagcctggagatccccatgctgattcctaaagaaaagcccccaatcacggttgtgggtgatgttggaggaaggattgccatcatcgtggatgacatcattgatgatgttgacagctttcttgctgcagcagagaccctgaaggaaagaggtgcatataagatctttgtgatggcaactcatggcttgttgtcttctgacgccccccggcggattgaagagtctgccattgatgaggtggtggtcaccaatacaattccacatgaagtccagaagctccagtgccccaagattaaaactgtggatatcagcatgatcctttcagaggcgatccgtcggatccacaatggggagtccatgtcctaccttttcagaaacataggcttagatgactgagttttcctttaggaaaactcccgagggccaaactggaaacataagagtgactgctcggtgggatggatttcacaggaaccgtcatgcttgttcctccctctcccctgtaacctcacttcttattgattcctaagaagatagaccaactttttatgtcggtttgggtgtttgtgagtttggggagcaatttttataaaagaaaaactttattctcctcttttgaaaaggtaagacctcgttttagttgtaactgtttaaaaaataacacttggaataagatttgtaagctcacaaagccttcttccaaagttgcttgagccaagtgcttaaaaagttaataaaataaaatgatctgtatgatacctgcaattgaaaagccgaaaagattatactgtcaagtccagtaaatgacatttttagagatgcttttgtagacaagcatatggaatatgtgattgtatttattttctgcaactaaaaaaggaataaaaacttgtgtttgtgtgtttttctaaaactttgtgttttggcaatcgttttataactaaaataaaatgaaagctaaatctacacgctgtgaatgttgaaa

SEQ ID NO: 166039 - DNA, 192 bp, Homo sapiens
  Payload ID: 12684
  Gene Symbol: PRPSAP2
  Gene Name: phosphoribosyl pyrophosphate synthetase-associated protein 2
  ENST ID: ENST00000628609
  CDS Start-End: 49-192
cagctccgcctttcttgctctgaaaattggaaaaccaagaaggttttgatgttttgtgtgacgccacctgaattagaaaccaagatgaacataaccaaaggtggtctggtgttgttttcagcaaactcgaattcatcatgtatggagctatcaaagaaaattgcagactttttccccctttctcttctctag

SEQ ID NO: 166040 - DNA, 1944 bp, Homo sapiens
  Payload ID: 12685
  Gene Symbol: PRTFDC1
  Gene Name: phosphoribosyl transferase domain containing 1
  Uniprot ID: Q9NRG1
  ENST ID: ENST00000320152
  CDS Start-End: 30-707
cttcccttcccgcgttccccgggagaaacatggccgggagcagcgaggaggcgccagactacgggcgaggcgtcgtgattatggatgattggccagggtatgacttgaatttattcacgtacccacagcactattatggagacttggagtatgtcctcatccctcatggtatcattgtggacagaattgagcggctggccaaggatattatgaaagacataggatatagtgacatcatggtcctgtgtgtgcttaaaggaggttacaaattctgtgctgatctcgtagaacaccttaagaacatcagccgaaattcagatcgatttgtctcaatgaaggttgatttcatcagactaaaaagttacaggaatgaccagtccatgggtgagatgcagataatcggaggcgatgatctttcaacgctggctggaaagaatgttctcattgttgaggatgttgtcggaactgggaggaccatgaaagcactactcagcaatatagagaaatacaagcccaacatgattaaggtagccagtttgttggtgaagagaacatccagaagtgacggctttagacctgactatgctggatttgagattccaaacttatttgtggtgggatatgccttagattacaatgaatacttcagagatctgaatcacatatgcgtcatcaatgagcacggtaaagaaaaatatcgagtctaaagacatgaattctcaccactaaagtcccagatagcatcatatttacgcctgtacttgggaagccagctgtcaagtttgtccccccaggcatcttcactcagcaggatataaaagaaaaaaatgttcaaatgagagagctttcttttctgaggttaatataaagagtatcaaaggttcctaaggaaaagaaagcagtgcttttatttgacttgttccaaattaaacactccgccttgtgactcagcaatgctatctaccttcacactcctgagctccgccttcctttgttttgatacagtcattatatttgattagtattcccaggaatacccccacctagttactcaaatatttttcacttaactttttatactcttattttggtaataagcttacaatattaagaagctggggacttttttttaactgaagacttgagtcccctataccgggaatgcagctattaatagattcccatattttaaaaggagggaaaggacaatttaatataaatttctgtttgtgcatttctgacaggccattattatctgctttgacaaagcctttctgaaacgcagtgtacaatgaatcttaatgatgttatgaaacgagctttgctcggggctcttgattggagcttccggtatgtgatgacggtatgtcatgtatgcatggatgtactcaactgtgtttaatactctgaattttaattagaaaaaaatacaatagcagcaaggccctggtttctaagctgtatccttttattcatgtgggacatgagcaaatggcagaattaggggcgagtgctttcaatgctcgaaactaagcaagtataaatttttcctcttatttgcatgaaaggacaagacactgttatgccctgtcctaaatgtgaagacagaggttgaattttttaaaaaatatctttaaaagactgatcacaaaatccaaggtgctacaggaaacaagcacactcaagaaagtttttttctgaataacatttttttccaatttctccgttttataagacatttcctaatttatggggattttaattgaaaataaacttgagtcccaatagagctgtttttttctcacttcctacaaaatgcaaatgcaaaataaataactaagcagcttttgtttggttctgaaccgtatgtggcgtattgttattaggttctagcttcctttaaactaataaagaataagaaaacttgttatgttttatcacttc

SEQ ID NO: 166041 - DNA, 741 bp, Homo sapiens
  Payload ID: 12685
  Gene Symbol: PRTFDC1
  Gene Name: phosphoribosyl transferase domain containing 1
  Uniprot ID: Q9NRG1
  ENST ID: ENST00000376376
  CDS Start-End: 18-539
cgttccccgggagaaacatggccgggagcagcgaggaggcgccagactacgggcgaggcgtcgtgattatggatgattggccagggtatgacttgaatttattcacgtacccacagcactattatggagacttggagtatgtcctcatccctcatggtatcattgtggacagaattgagcggctggccaaggatattatgaaagacataggatatagtgacatcatggtcctgtgtgtgcttaaaggaggttacaaattctgtgctgatctcgtagaacaccttaagaacatcagccgaaattcagatcgatttgtctcaatgaaggttgatttcatcagactaaaaagttacaggctgcgtgctcggttgaagaggacaaccatctgtgatagaggaggactggccttcagtcaagggtatatgagtagctgtgctcccctgcaagaatctccaaataccctctggagaggttacctccaagtgctcattccctgtttccacatccggtttcagttaccaagatcagagcagaattaggtctgagatccagtgaggtgtacagtagcacctggaccattctagggctcactgtcttcaagccctggctgtgcccacagtcttcatgaagaaactggacactgtgtctgctggatgatgtatttcttcttgcttgaggttatgaaaaatatcaaaatatgtaaagaaacatgctggataaaaatattgccttgaaatacaa

SEQ ID NO: 166042 - DNA, 747 bp, Homo sapiens
  Payload ID: 12685
  Gene Symbol: PRTFDC1
  Gene Name: phosphoribosyl transferase domain containing 1
  Uniprot ID: Q9NRG1
  ENST ID: ENST00000376378
  CDS Start-End: 10-582
gggagaaacatggccgggagcagcgaggaggcgccagactacgggcgaggcgtcgtgattatggatgattggccagggtatgacttgaatttattcacgtacccacagcactattatggagacttggagtatgtcctcatccctcatggtatcattgtggacagaattgagcggctggccaaggatattatgaaagacataggatatagtgacatcatggtcctgtgtgtgcttaaaggaggttacaaattctgtgctgatctcgtagaacaccttaagaacatcagccgaaattcagatcgatttgtctcaatgaaggttgatttcatcagactaaaaagttacaggaatgaccagtccatgggtgagatgcagataatcggaggcgatgatctttcaacgctggctggaaagaatgttctcattgttgaggatgttgtcggaactgggaggaccatgaaagcactactcagcaatatagagaaatacaagcccaacatgattaaggtagccagtttgttggtgaagagaacatccagaagtgacggctttagacctgactcacatatgcgtcatcaatgagcacggtaaagaaaaatatcgagtctaaagacatgaattctcaccactaaagtcccagatagcatcatatttacgcctgtacttgggaagccagctgtcaagtttgtccccccaggcatcttcactcagcaggatataaaagaaaaaaatgttcaaatgagagag

SEQ ID NO: 166043 - DNA, 3339 bp, Homo sapiens
  Payload ID: 12686
  Gene Symbol: PAICS
  Gene Name: phosphoribosylaminoimidazole carboxylase, phosphoribosylaminoimidazole succinocarboxamide synthetase
  Uniprot ID: P22234
  ENST ID: ENST00000264221
  CDS Start-End: 232-1509
gctagccttcccctaagagctgcctggaaagctgtatttgctgcacgtggaaatctccgttattttccagcacccaacagtagcgtaatgggagtaacggacttaacctcatttctctttcagagcatttagccttcatatgcccttccctgcatgcttcccccaggccgtcaagacttgagttctgcctcgcttcccggcgcggtcgcagccctcagcccacttaggataatggcgacagctgaggtactgaacattggtaaaaaattatatgagggtaaaacaaaagaagtctacgaattgttagacagtccaggaaaagtcctcctgcagtccaaggaccagattacagcaggaaatgcagctagaaaaaaccacctggaaggaaaagctgcaatctcaaataaaatcaccagttgtatttttcagttattacaggaagcaggtattaaaactgccttcaccagaaaatgtggggagacagctttcattgcaccgcagtgtgaaatgattccaattgaatgggtttgcagaagaatagcaactggttcttttctcaaaagaaatcctggtgtcaaggaaggatataagttttacccacctaaagtggagttgtttttcaaggatgatgccaataatgacccacagtggtctgaggaacagctgattgctgcaaaattttgctttgctggacttcttataggccagactgaagtggatatcatgagtcatgctacacaggctatatttgaaatactggagaaatcctggttgccccagaattgtacactggttgatatgaagattgaatttggtgttgatgtaaccaccaaagaaattgttcttgctgatgttattgacaatgattcctggagactctggccatcaggagatcgaagccaacagaaagacaaacagtcttatcgggacctcaaagaagtaactcctgaagggctccaaatggtaaagaaaaactttgagtgggttgcagagagagtagagttgcttttgaaatcagaaagtcagtgcagggttgtagtgttgatgggctctacttctgatcttggtcactgtgaaaaaatcaagaaggcctgtggaaattttggcattccatgtgaacttcgagtaacatctgcgcataaaggaccagatgaaactctgaggattaaagctgagtatgaaggggatggcattcctactgtatttgtggcagtggcaggcagaagtaatggtttgggaccagtgatgtctgggaacactgcatatccagttatcagctgtcctcccctcacaccagactggggagttcaggatgtgtggtcttctcttcgactacccagtggtcttggctgttcaaccgtactttctccagaaggatcagctcaatttgctgctcagatatttgggttaagcaaccatttggtatggagcaaactgcgagcaagcattttgaacacatggatttccttgaagcaggctgacaagaaaatcagagaatgtaatttataagaaagaatgccattgaattttttaggggaaaaactacaaatttctaatttagctgaaggaaaatcaagcaagatgaaaaggtaattttaaattagagaacacaaataaaatgtattagtgaataaatgcttctctagatccatattaataaacatgagcatctaacccctcctttcttaggctagacaccaagatatttcagccagcctttatcattcctcttactttatcctttttccttaagtattggtggtcactactattgagtttcttccttaacactgattaaatgatcttaactccctcagctaaaactggcattactgactcccagctatatttctccagacttgcatttttttttttttttttgagacagggtctcactgtcgcccaggctggagtgcagtggcgtgatctcagttcactgctgctttccctcctgggctcaagcagttctcccacctcagcctctcgactaacagggactataatcttgcagcaccatgccgagctaattttattttttgtagagatgagctctcactatgtcacccaggttcgtctcaaactcctgaaccctagtaattctcctatctcagcctcccaaagtgctagggttacagacatgagccactgtgcctgtctagacttgtactttcaactgtccatttctccctgtctgtcccatgggcactcatgaaaaaacagaatgctcccaactttattcatcttccaagcctgtagctcttggtatactcactgttgcaagtcagaagcttgatttcatcattgatgtttttctcacgtttcacatctcactcatcaccaagtcatgttggtgttaatttctgattaacccttgaatttaccgtcttctcatcctctgtacaaaagcctcaagtgagggtcaaattcaacattatcctgatctagacagcccccattctcaatccacccttttccaagttgattgcccaaggacttctaacaataaactctcttttgcaccacagacttctttgaaaatatacatgctgttgaccctctctgtagaaaaccgcacacataaaacttaccaacagatttcattggttcttgggttctcccgaagcctatccatggtttatagattaagaattgatgaggtagctgggcacagtggctcacacctacgatcacagcacttcgggaggctgaagcaagcagatcacttgaggtcaggagtttgagaccagcctggccaacatggtgaaaccctgtctctactaaaaatacaaaaagtagccagccgtgatgacaggcacctgtaatcccagctactcgggaggctgaggcatgagaattgcttgaacccgggaggcggaggttgcagtgagcctagatcatgccactgcactccaacctgggcagcagagcaagactctgtctcaaaaggggaaaaaaaaaattgctgatgtgacccatgaagggaactcattttcctcgtaattttggactgccacacattggtacctttagttctctgaaggcccacgtttttatcattaagacctatttgttagctagtagagctttatgttcgctgtccatgaaaccttctgtaaccacagtgactacaagtagttctttctctattgaattattaggtccagaatagaagatgtcattgtacactttatttccctcacactgtgttatgctctgatgtgctatgcttagctatctgtcagagattagtaaattataaaactcatgtgtactacttaagtttatatcttatgctagtttataagaacaattaaaaggacttagaagattaactttggt

SEQ ID NO: 166044 - DNA, 3297 bp, Homo sapiens
  Payload ID: 12686
  Gene Symbol: PAICS
  Gene Name: phosphoribosylaminoimidazole carboxylase, phosphoribosylaminoimidazole succinocarboxamide synthetase
  Uniprot ID: P22234
  ENST ID: ENST00000399688
  CDS Start-End: 176-1474
agtctccgcccatacccctccgggttaggcggctgtagcggagctcgaaaagagtggcgcagggtcgcgcggccccgcctccttccccgcccagcgaagctctctgaccacccctcttttctagagttctgcctcgcttcccggcgcggtcgcagccctcagcccacttaggataatggcgacagctgaggtactgaacattggtaaaaaattatatgagggtaaaacaaaagaagtctacgaattgttagacagtccaggaaaagtcctcctgcagtccaaggaccagattacagcaggaaatgcagctagaaaaaaccacctggaaggaaaagctgcaatctcaaataaaatcaccagttgtatttttcagttattacaggaagcagttacctcatataagtcaaatcgtattaaaactgccttcaccagaaaatgtggggagacagctttcattgcaccgcagtgtgaaatgattccaattgaatgggtttgcagaagaatagcaactggttcttttctcaaaagaaatcctggtgtcaaggaaggatataagttttacccacctaaagtggagttgtttttcaaggatgatgccaataatgacccacagtggtctgaggaacagctgattgctgcaaaattttgctttgctggacttcttataggccagactgaagtggatatcatgagtcatgctacacaggctatatttgaaatactggagaaatcctggttgccccagaattgtacactggttgatatgaagattgaatttggtgttgatgtaaccaccaaagaaattgttcttgctgatgttattgacaatgattcctggagactctggccatcaggagatcgaagccaacagaaagacaaacagtcttatcgggacctcaaagaagtaactcctgaagggctccaaatggtaaagaaaaactttgagtgggttgcagagagagtagagttgcttttgaaatcagaaagtcagtgcagggttgtagtgttgatgggctctacttctgatcttggtcactgtgaaaaaatcaagaaggcctgtggaaattttggcattccatgtgaacttcgagtaacatctgcgcataaaggaccagatgaaactctgaggattaaagctgagtatgaaggggatggcattcctactgtatttgtggcagtggcaggcagaagtaatggtttgggaccagtgatgtctgggaacactgcatatccagttatcagctgtcctcccctcacaccagactggggagttcaggatgtgtggtcttctcttcgactacccagtggtcttggctgttcaaccgtactttctccagaaggatcagctcaatttgctgctcagatatttgggttaagcaaccatttggtatggagcaaactgcgagcaagcattttgaacacatggatttccttgaagcaggctgacaagaaaatcagagaatgtaatttataagaaagaatgccattgaattttttaggggaaaaactacaaatttctaatttagctgaaggaaaatcaagcaagatgaaaaggtaattttaaattagagaacacaaataaaatgtattagtgaataaatgcttctctagatccatattaataaacatgagcatctaacccctcctttcttaggctagacaccaagatatttcagccagcctttatcattcctcttactttatcctttttccttaagtattggtggtcactactattgagtttcttccttaacactgattaaatgatcttaactccctcagctaaaactggcattactgactcccagctatatttctccagacttgcatttttttttttttttttgagacagggtctcactgtcgcccaggctggagtgcagtggcgtgatctcagttcactgctgctttccctcctgggctcaagcagttctcccacctcagcctctcgactaacagggactataatcttgcagcaccatgccgagctaattttattttttgtagagatgagctctcactatgtcacccaggttcgtctcaaactcctgaaccctagtaattctcctatctcagcctcccaaagtgctagggttacagacatgagccactgtgcctgtctagacttgtactttcaactgtccatttctccctgtctgtcccatgggcactcatgaaaaaacagaatgctcccaactttattcatcttccaagcctgtagctcttggtatactcactgttgcaagtcagaagcttgatttcatcattgatgtttttctcacgtttcacatctcactcatcaccaagtcatgttggtgttaatttctgattaacccttgaatttaccgtcttctcatcctctgtacaaaagcctcaagtgagggtcaaattcaacattatcctgatctagacagcccccattctcaatccacccttttccaagttgattgcccaaggacttctaacaataaactctcttttgcaccacagacttctttgaaaatatacatgctgttgaccctctctgtagaaaaccgcacacataaaacttaccaacagatttcattggttcttgggttctcccgaagcctatccatggtttatagattaagaattgatgaggtagctgggcacagtggctcacacctacgatcacagcacttcgggaggctgaagcaagcagatcacttgaggtcaggagtttgagaccagcctggccaacatggtgaaaccctgtctctactaaaaatacaaaaagtagccagccgtgatgacaggcacctgtaatcccagctactcgggaggctgaggcatgagaattgcttgaacccgggaggcggaggttgcagtgagcctagatcatgccactgcactccaacctgggcagcagagcaagactctgtctcaaaaggggaaaaaaaaaattgctgatgtgacccatgaagggaactcattttcctcgtaattttggactgccacacattggtacctttagttctctgaaggcccacgtttttatcattaagacctatttgttagctagtagagctttatgttcgctgtccatgaaaccttctgtaaccacagtgactacaagtagttctttctctattgaattattaggtccagaatagaagatgtcattgtacactttatttccctcacactgtgttatgctctgatgtgctatgcttagctatctgtcagagattagtaaattataaaactcatgtgtactacttaagtttatatcttatgctagtttataagaacaattaaaaggacttagaagattaa

SEQ ID NO: 166045 - DNA, 6480 bp, Homo sapiens
  Payload ID: 12686
  Gene Symbol: PAICS
  Gene Name: phosphoribosylaminoimidazole carboxylase, phosphoribosylaminoimidazole succinocarboxamide synthetase
  Uniprot ID: P22234
  ENST ID: ENST00000512576
  CDS Start-End: 162-1439
cccctccgggttaggcggctgtagcggagctcgaaaagagtggcgcagggtcgcgcggccccgcctccttccccgcccagcgaagctctctgaccacccctcttttctagagttctgcctcgcttcccggcgcggtcgcagccctcagcccacttaggataatggcgacagctgaggtactgaacattggtaaaaaattatatgagggtaaaacaaaagaagtctacgaattgttagacagtccaggaaaagtcctcctgcagtccaaggaccagattacagcaggaaatgcagctagaaaaaaccacctggaaggaaaagctgcaatctcaaataaaatcaccagttgtatttttcagttattacaggaagcaggtattaaaactgccttcaccagaaaatgtggggagacagctttcattgcaccgcagtgtgaaatgattccaattgaatgggtttgcagaagaatagcaactggttcttttctcaaaagaaatcctggtgtcaaggaaggatataagttttacccacctaaagtggagttgtttttcaaggatgatgccaataatgacccacagtggtctgaggaacagctgattgctgcaaaattttgctttgctggacttcttataggccagactgaagtggatatcatgagtcatgctacacaggctatatttgaaatactggagaaatcctggttgccccagaattgtacactggttgatatgaagattgaatttggtgttgatgtaaccaccaaagaaattgttcttgctgatgttattgacaatgattcctggagactctggccatcaggagatcgaagccaacagaaagacaaacagtcttatcgggacctcaaagaagtaactcctgaagggctccaaatggtaaagaaaaactttgagtgggttgcagagagagtagagttgcttttgaaatcagaaagtcagtgcagggttgtagtgttgatgggctctacttctgatcttggtcactgtgaaaaaatcaagaaggcctgtggaaattttggcattccatgtgaacttcgagtaacatctgcgcataaaggaccagatgaaactctgaggattaaagctgagtatgaaggggatggcattcctactgtatttgtggcagtggcaggcagaagtaatggtttgggaccagtgatgtctgggaacactgcatatccagttatcagctgtcctcccctcacaccagactggggagttcaggatgtgtggtcttctcttcgactacccagtggtcttggctgttcaaccgtactttctccagaaggatcagctcaatttgctgctcagatatttgggttaagcaaccatttggtatggagcaaactgcgagcaagcattttgaacacatggatttccttgaagcaggctgacaagaaaatcagagaatgtaatttataagaaagaatgccattgaattttttaggggaaaaactacaaatttctaatttagctgaaggaaaatcaagcaagatgaaaaggtaattttaaattagagaacacaaataaaatgtattagtgaataaatgcttctctagatccatattaataaacatgagcatctaacccctcctttcttaggctagacaccaagatatttcagccagcctttatcattcctcttactttatcctttttccttaagtattggtggtcactactattgagtttcttccttaacactgattaaatgatcttaactccctcagctaaaactggcattactgactcccagctatatttctccagacttgcatttttttttttttttttgagacagggtctcactgtcgcccaggctggagtgcagtggcgtgatctcagttcactgctgctttccctcctgggctcaagcagttctcccacctcagcctctcgactaacagggactataatcttgcagcaccatgccgagctaattttattttttgtagagatgagctctcactatgtcacccaggttcgtctcaaactcctgaaccctagtaattctcctatctcagcctcccaaagtgctagggttacagacatgagccactgtgcctgtctagacttgtactttcaactgtccatttctccctgtctgtcccatgggcactcatgaaaaaacagaatgctcccaactttattcatcttccaagcctgtagctcttggtatactcactgttgcaagtcagaagcttgatttcatcattgatgtttttctcacgtttcacatctcactcatcaccaagtcatgttggtgttaatttctgattaacccttgaatttaccgtcttctcatcctctgtacaaaagcctcaagtgagggtcaaattcaacattatcctgatctagacagcccccattctcaatccacccttttccaagttgattgcccaaggacttctaacaataaactctcttttgcaccacagacttctttgaaaatatacatgctgttgaccctctctgtagaaaaccgcacacataaaacttaccaacagatttcattggttcttgggttctcccgaagcctatccatggtttatagattaagaattgatgaggtagctgggcacagtggctcacacctacgatcacagcacttcgggaggctgaagcaagcagatcacttgaggtcaggagtttgagaccagcctggccaacatggtgaaaccctgtctctactaaaaatacaaaaagtagccagccgtgatgacaggcacctgtaatcccagctactcgggaggctgaggcatgagaattgcttgaacccgggaggcggaggttgcagtgagcctagatcatgccactgcactccaacctgggcagcagagcaagactctgtctcaaaaggggaaaaaaaaaattgctgatgtgacccatgaagggaactcattttcctcgtaattttggactgccacacattggtacctttagttctctgaaggcccacgtttttatcattaagacctatttgttagctagtagagctttatgttcgctgtccatgaaaccttctgtaaccacagtgactacaagtagttctttctctattgaattattaggtccagaatagaagatgtcattgtacactttatttccctcacactgtgttatgctctgatgtgctatgcttagctatctgtcagagattagtaaattataaaactcatgtgtactacttaagtttatatcttatgctagtttataagaacaattaaaaggacttagaagattaactttggtttcatggtctctgaagtcactgactgctatttcagcttgtttacccttacctagcattaagactccatctacttctgtgcagtatatgaaaatttttaaactttcatttagactggtggataggactgaccattacaaattgtcgttatcaattttttttcctttttttttttaagagccaagttctcactgtctcccaggctggagtgcagtggcatgattatggctccctgcagccttgaactcctggactcaagctgcagcctctcgagtagctgggtgcatgtgctaccacacccaattatgaatttcatcattagtttcttagtagagtccacatgtcctcagtagtaagttcatcagtgctaaatatttgaaggtatttctactgttttgtaaaagtaacttaagcctacctggtctgctatcttttgagtatttatactttctacgggcttgtaggtaaacataaaaagagaaaaaatatcccaataatacagtttttaaccttttatgataaagacatgcttagaattgctgttaagctttctgagatttaaccactgaaactaagtaaaagacaaagcacttaggtaaagcttcattcagtatccattcacccaatactggtttgattctagggcctaggaaaataggactgagcaaagcccttgtccagatggaacttatgttttagaggggaaaacaaaccataaaaaggtaaacagtataaaatcaggaaaggataaatgtatatgaagaatcaaaatgaggacggtgatggggataagaggggaaggtttttgaggagagcagagcaatgatgtaaaagcaagacacacagatagggaaatagctttccatactaagggaatgggaaataaagctgagttttgccttgaggacctccaaacatgagaattgctagagctctgtgaacaaggatgagagtggaagacaatataagcaaaggctacatcacttagggcctataggccacactgaagtgtgacaggaaaaactcagtttgagcagaggcttgacatacttaacatatttaaaggttctctggctgttgtgtggacaagaggagaagcagagattagttaagaggctattgtagcccaggtgagggatgatgtatgatcttcaacatgtctaatttttttgtgcctcaatttcatgaaatgaaaatgcgactaataccacctcataaagttgtgagaattacatgagtcaatatatgtaaggcccatcatggcacacaaatgtgttatgtaatatccatttggcagactgaagaacaacagtatgaatggaattcattcaccatgagaattacctggaattctctgggcatggtagctcatgcctgtaatcccagcactttgggtggccgaggcaggtggatcacctgagatcaggagttcgagaccagcctgaccaacatggagaaacccagtctctaataaaaatacaaaactagccgggcatggtggcacattcctgtaatcccagcgactcaggaggctgaggcaggagaatcgcttgaacctgggaagcggaggttgtggtgagccgaggttgcgccattgtactccagcctgggcaacaagagcaaaactctgtttcaaaaaaaaagaaagaaagaaaattacctggaattcaatattgccatcggctgatttaatttctaatatgaagaaaggggcagtgtgatgtgccacggagcatccacaacctgccatttcagcccagccaaccttagaaagccattgaaaagagttgtttttaatggtgtttttacatccagcttcccacacctcaaatacttggggtggaattgttaatctcacattgcagtacaatgaaaatagtggaatggaaatcaagttataaaatggagctaaatatttcttctgcttgcctctgagttgataagataccataagatactgtacatgaggctgggcgcggtggctcacgtcttatttcttctgcttgcctctgagttgacaagataccataagatactgtacatgaggctgggtgcagtggctcacgcctgtaatcccagcactttgggagggtgaggtgggcagatcacctgaggtcgggagttcaagaccagcctgactgacatggagaaaccccctctttactaaaaatacaaaattagccaggcatggtggtgcatgcctataattccaactactcgggaggctgaggcaggagaatcgcttgaacctggaaggcagaggttgtggtgagctgagatcgaaccattgcactccagcctgggcaacaagagcgaaaatctgtcgccaaaaaaaaaaaaaaaaagatactgtacatggaagcttctcaggctaaatccattaatataaaaatacattgtggatactgatgagatggctaattctgtcaacttgactaggctacgggatgccttgatagctggtcaaacaacatttctaggtacatctgtgatggtgtttctggaagagactagcacttgaatcagtagacttgagtaaagaagactgccttcacccatgtgggtgagcgtcatctaatccattgagggcctgaatagaacaaaaaaggggaagaagggtgaactgctgggacatccatttcgtgcccccagatgttggtgctcctggtcctcaggccttcagactaggacttaacgttattgcctcccctgattctcaagccctcgggtttggaactacactggctttcctgggccttcagcctgcagaaggcagactgtgggacttcacctccattttgcagagccaatttctcataatctgtacatatcctattggttctgtattttttagagaacaaatacagcctattatgtatatataagaccctgggaatgcaaagatgaacaaaattaaccttctgctctcaatgaatcttggaagtctccagaggcagacaatttcaaaacaccgtatatagtcttaatatggaattaacaatagggtattgtgaatacacaaaagtaggaaggactctgatctctagaaaacaattgtatactgtgaatgaaaaagactaattctccacagtctatactcaatctctcttacctttccataattttcttcagcaaacttattaccaccaaacatagtacatgtttatttattacccatctctcccaactagaaaataaatgtattacactggg

SEQ ID NO: 166046 - DNA, 1514 bp, Homo sapiens
  Payload ID: 12686
  Gene Symbol: PAICS
  Gene Name: phosphoribosylaminoimidazole carboxylase, phosphoribosylaminoimidazole succinocarboxamide synthetase
  ENST ID: ENST00000505164
  CDS Start-End: 276-1514
agccttcccctaagagctgcctggaaagctgtatttgctgcacgtggaaatctccgttattttccagcacccaacagtagcgtaatgggagtaacggacttaacctcatttctctttcagagcatttagccttcatatgcccttccctgcatgcttcccccaggccgtcaagacttggtacgctccaacttctgagtcgctcccgcagccgagaaggggccgggagttctgcctcgcttcccggcgcggtcgcagccctcagcccacttaggataatggcgacagctgaggtactgaacattggtaaaaaattatatgagggtaaaacaaaagaagtctacgaattgttagacagtccaggaaaagtcctcctgcagtccaaggaccagattacagcaggaaatgcagctagaaaaaaccacctggaaggaaaagctgcaatctcaaataaaatcaccagttgtatttttcagttattacaggaagcaggtattaaaactgccttcaccagaaaatgtggggagacagctttcattgcaccgcagtgtgaaatgattccaattgaatgggtttgcagaagaatagcaactggttcttttctcaaaagaaatcctggtgtcaaggaaggatataagttttacccacctaaagtggagttgtttttcaaggatgatgccaataatgacccacagtggtctgaggaacagctgattgctgcaaaattttgctttgctggacttcttataggccagactgaagtggatatcatgagtcatgctacacaggctatatttgaaatactggagaaatcctggttgccccagaattgtacactggttgatatgaagattgaatttggtgttgatgtaaccaccaaagaaattgttcttgctgatgttattgacaatgattcctggagactctggccatcaggagatcgaagccaacagaaagacaaacagtcttatcgggacctcaaagaagtaactcctgaagggctccaaatggtaaagaaaaactttgagtgggttgcagagagagtagagttgcttttgaaatcagaaagtcagtgcagggttgtagtgttgatgggctctacttctgatcttggtcactgtgaaaaaatcaagaaggcctgtggaaattttggcattccatgtgaacttcgagtaacatctgcgcataaaggaccagatgaaactctgaggattaaagctgagtatgaaggggatggcattcctactgtatttgtggcagtggcaggcagaagtaatggtttgggaccagtgatgtctgggaacactgcatatccagttatcagctgtcctcccctcacaccagactggggagttcaggatgtgtggtcttctcttcgactacccagtggtcttggctgttcaaccgtactttctccagaaggatcagctcaatttgctgctcagatatttgggttaagcaaccatttggtatggagcaaactgcgagcaagcattttgaacacatggatttccttg

SEQ ID NO: 166047 - DNA, 3340 bp, Homo sapiens
  Payload ID: 12686
  Gene Symbol: PAICS
  Gene Name: phosphoribosylaminoimidazole carboxylase, phosphoribosylaminoimidazole succinocarboxamide synthetase
  ENST ID: ENST00000514888
  CDS Start-End: 516-1517
agggtggagctagccttcccctaagagctgcctggaaagctgtatttgctgcacgtggaaatctccgttattttccagcacccaacagtagcgtaatgggagtaacggacttaacctcatttctctttcagagcatttagccttcatatgcccttccctgcatgcttcccccaggccgtcaagacttgagttctgcctcgcttcccggcgcggtcgcagccctcagcccacttaggataatggcgacagctgaggtactgaacattggtaaaaaattatatgagggtaaaacaaaagaagtctacgaattgttagacagtccaggaaaagtcctcctgcagtccaaggaccagattacagcaggaaatgcagctagaaaaaaccacctggaaggaaaagctgcaatctcaaataaaatcaccagttgtatttttcagttattacaggaagcaggtattaaaactgccttcaccagaaaatgtggggagacagctttcattgcaccgcagtgtgaaatgattccaattgaatgggtttgcagaagaatagcaactggttcttttctcaaaagaaatcctggtgtcaaggaaggatataagttttacccacctaaagtggagttgtttttcaaggatgatgccaataatgacccacagtggtctgaggaacagctgattgctgcaaaattttgctttgctggacttcttataggccagactgaagtggatatcatgagtcatgctacacaggctatatttgaaatactggagaaatcctggttgccccagaattgtacactggttgatatgaagattgaatttggtgttgatgtaaccaccaaagaaattgttcttgctgatgttattgacaatgattcctggagactctggccatcaggagatcgaagccaacagaaagacaaacagtcttatcgggacctcaaagaagtaactcctgaagggctccaaatggtaaagaaaaactttgagtgggttgcagagagagtagagttgcttttgaaatcagaaagtcagtgcagggttgtagtgttgatgggctctacttctgatcttggtcactgtgaaaaaatcaagaaggcctgtggaaattttggcattccatgtgaacttcgagtaacatctgcgcataaaggaccagatgaaactctgaggattaaagctgagtatgaaggggatggcattcctactgtatttgtggcagtggcaggcagaagtaatggtttgggaccagtgatgtctgggaacactgcatatccagttatcagctgtcctcccctcacaccagactggggagttcaggatgtgtggtcttctcttcgactacccagtggtcttggctgttcaaccgtactttctccagaaggatcagctcaatttgctgctcagatatttgggttaagcaaccatttggtatggagcaaactgcgagcaagcattttgaacacatggatttccttgaagcaggctgacaagaaaatcagagaatgtaatttataagaaagaatgccattgaattttttaggggaaaaactacaaatttctaatttagctgaaggaaaatcaagcaagatgaaaaggtaattttaaattagagaacacaaataaaatgtattagtgaataaatgcttctctagatccatattaataaacatgagcatctaacccctcctttcttaggctagacaccaagatatttcagccagcctttatcattcctcttactttatcctttttccttaagtattggtggtcactactattgagtttcttccttaacactgattaaatgatcttaactccctcagctaaaactggcattactgactcccagctatatttctccagacttgcatttttttttttttttttgagacagggtctcactgtcgcccaggctggagtgcagtggcgtgatctcagttcactgctgctttccctcctgggctcaagcagttctcccacctcagcctctcgactaacagggactataatcttgcagcaccatgccgagctaattttattttttgtagagatgagctctcactatgtcacccaggttcgtctcaaactcctgaaccctagtaattctcctatctcagcctcccaaagtgctagggttacagacatgagccactgtgcctgtctagacttgtactttcaactgtccatttctccctgtctgtcccatgggcactcatgaaaaaacagaatgctcccaactttattcatcttccaagcctgtagctcttggtatactcactgttgcaagtcagaagcttgatttcatcattgatgtttttctcacgtttcacatctcactcatcaccaagtcatgttggtgttaatttctgattaacccttgaatttaccgtcttctcatcctctgtacaaaagcctcaagtgagggtcaaattcaacattatcctgatctagacagcccccattctcaatccacccttttccaagttgattgcccaaggacttctaacaataaactctcttttgcaccacagacttctttgaaaatatacatgctgttgaccctctctgtagaaaaccgcacacataaaacttaccaacagatttcattggttcttgggttctcccgaagcctatccatggtttatagattaagaattgatgaggtagctgggcacagtggctcacacctacgatcacagcacttcgggaggctgaagcaagcagatcacttgaggtcaggagtttgagaccagcctggccaacatggtgaaaccctgtctctactaaaaatacaaaaagtagccagccgtgatgacaggcacctgtaatcccagctactcgggaggctgaggcatgagaattgcttgaacccgggaggcggaggttgcagtgagcctagatcatgccactgcactccaacctgggcagcagagcaagactctgtctcaaaaggggaaaaaaaaaattgctgatgtgacccatgaagggaactcattttcctcgtaattttggactgccacacattggtacctttagttctctgaaggcccacgtttttatcattaagacctatttgttagctagtagagctttatgttcgctgtccatgaaaccttctgtaaccacagtgactacaagtagttctttctctattgaattattaggtccagaatagaagatgtcattgtacactttatttccctcacactgtgttatgctctgatgtgctatgcttagctatctgtcagagattagtaaattataaaactcatgtgtactacttaagtttatatcttatgctagtttataagaacaattaaaaggacttagaagattaa

SEQ ID NO: 166048 - DNA, 5371 bp, Homo sapiens
  Payload ID: 12687
  Gene Symbol: PFAS
  Gene Name: phosphoribosylformylglycinamidine synthase
  Uniprot ID: O15067
  ENST ID: ENST00000314666
  CDS Start-End: 134-4150
aacaaacgcgcgcgacgattcgaggtgctctgtggccgcgagtgcatcttccacgaacctaattcatctctccagcaaaggacacatctctccagcaaaggacacctctctccagcaaaggacacctgcagagatgtccccagtccttcacttctatgttcgtccctctggccatgagggggcagcccctggacacactcggaggaaactgcaagggaaactgccagagctgcagggcgtcgagactgaactgtgctacaacgtgaactggacagctgaggccctccccagtgctgaggagacaaagaagctgatgtggctgtttggttgccccttactgctggatgatgttgctcgggagtcctggctccttcctggctccaatgacctgctgctggaggtcgggcccaggctgaacttctccaccccaacatccaccaacatcgtgtcagtgtgccgcgccactgggctggggcctgtggatcgtgtggagaccacccggcgctaccggctctcgtttgcccaccccccgtcagctgaggtggaagccattgctctggctaccctgcacgaccggatgacagagcagcacttcccccatcccatccagagtttctcccctgagagcatgccggaacccctcaatggccctatcaatatactgggtgagggccggcttgcgctggagaaggccaaccaggagcttggtctggctttagactcttgggacctagacttctacaccaagcgcttccaggagctacagcggaacccgagcactgtggaggcctttgacttggcgcagtccaatagcgagcacagccgacactggttcttcaagggccagctccacgtggatgggcagaagctggtgcactcactgtttgagtccatcatgagcacccaggaatcctcgaaccccaacaacgtcctcaaattctgtgataacagcagtgcaatccagggaaaggaagtccgattcctacggcctgaggaccccacacggccaagccgcttccagcaacagcaagggctgagacatgttgtcttcacagcagagactcacaactttcccacaggagtatgcccctttagtggtgcaaccactggcacagggggccggattcgagatgtccagtgcacaggccgcggggcccacgtggtggctggcactgccggctattgctttggaaatctgcatattccaggttacaatctgccctgggaggatccaagcttccagtatcctgggaattttgcccggcccctggaggttgccattgaagccagtaatggagcttctgactatggcaacaagtttggggaaccagtgctggctggcttcgcccgctccttgggcctccagctcccagacggccagcggcgtgagtggatcaagcccatcatgtttagtgggggcattgggtccatggaagctgaccacataagcaaggaggccccagagccaggcatggaagttgtaaaggttggaggtcccgtctacaggattggagttggaggtggagctgcttcatctgtgcaggtgcagggagataacaccagtgacctggactttggggctgtgcagcgaggagacccggagatggaacagaagatgaaccgtgtgatcagggcttgtgtggaggcccccaagggaaaccccatctgcagccttcatgatcagggcgctggtggcaatggcaatgtcctaaaagagctgagtgacccagctggagccatcatttacaccagccgcttccagcttggggacccaaccctgaatgccctggaaatctggggggctgagtaccaggaatcaaatgctcttctgctgaggtcccccaaccgggacttcctgactcatgtcagtgcccgtgaacgttgcccggcttgcttcgtgggcaccatcactggagaccggagaatagtgctggtggacgatcgggagtgtcctgtcagaagaaatggccagggggatgcccccccgacacccctgccaacccctgtggacctggagctcgaatgggtgctgggcaagatgcctcggaaggagttcttcctgcagaggaagccccccatgctgcagcctctggccttgcccccagggctgagcgtgcaccaggctctggagagggttctgaggctgcccgccgtggccagcaagcgctacctcaccaataaggtggaccgctctgtgggaggcctggtggcccagcagcagtgcgtggggcccctgcaaactcctctggcagatgtagcggttgtggcactgagccatgaggagctcataggggctgccacagccttgggagaacagccagtcaagagcctgctggacccaaaagtcgccgcccggctggccgtggccgaagccctcaccaacctggtgtttgctctggtcactgacctccgggatgtgaagtgtagcgggaactggatgtgggcagccaagctcccaggggagggcgcagctttggcggatgcctgtgaggctatggtggcagtgatggcagccctgggtgtggcagtggatggtggcaaggactccctcagcatggctgctcgggttggcactgagaccgtgcgggctcctgggtcactggtcatctcagcctatgccgtctgcccagacatcacagccactgtgaccccagacctcaagcatcctgaagggagaggccatctgctctatgtggctctgagccctgggcagcaccggctcgggggcacagctctggcccagtgcttctcccagcttggggaacaccctccagacctggaccttcctgagaacttggtgcgggccttcagcatcactcaggggctgctgaaagaccgcctcctctgctcaggccacgatgtcagtgacggaggcctcgtcacatgcctgctggagatggcctttgctggaaattgcgggctacaggtggatgtgcctgtccccagggttgatgtcctgtctgtgctgttcgctgaggagccaggcctcgtgctggaggtgcaggagccagacctggcccaggtgctgaagcgttaccgggatgctggcctccattgcctggagctgggccacacaggcgaggccgggccccacgccatggtccgggtgtcagtgaacggggctgtggttctggaggagcctgttggggagctgcgagccctctgggaggagacgagtttccagctggaccggctacaggcagagcctcgctgtgtggcagaggaggaacggggcctgagggagcggatggggcccagctattgcctgccccccacctttcccaaagcctccgtgccccgtgagcctggtggtcccagcccccgagtcgccatcttgcgagaggagggcagtaatggagaccgggagatggccgatgccttccacttagctgggtttgaggtatgggacgtgaccatgcaggacctctgctctggggcaattgggctggacactttccgtggcgtggccttcgtgggcggcttcagctatgcagatgtcctgggctctgccaaagggtgggcagctgctgtgacctttcatcccagggctggggctgagctgaggcgcttccggaagcggccagacaccttcagcctgggcgtgtgtaatggctgtcaactgctggctctgctcggctgggtgggaggcgaccccaatgaggatgctgcagagatgggccctgactcccagccagcccggccaggccttctgctacgccacaacctgtctgggcgctacgagtctcgctgggccagcgtgcgtgtggggcctgggccagccctgatgctgcgagggatggagggcgccgtgctgcccgtgtggagtgcgcacggggaaggttacgtagcattttcttctccggaactccaagctcagattgaggccaggggcttggctccactgcactgggctgatgatgacgggaaccccacagagcagtaccctctgaatcccaatgggtccccagggggcgtggctggcatctgctcctgtgatggccgccacctggctgtcatgcctcaccctgagcgggccgttaggccttggcagtgggcatggcgaccccctccatttgatactctgaccacctccccctggctccagctctttatcaatgcccgaaactggaccctggaagggagctgctgactggccacaggggctcacctgggccccatggcttttcacctaagtgggtcctgccccctcccccatgaccttcaggagcaccccatattatttccaaaaatatcttggacagacaaggaccaaaatgccaaaatctcagcggactcgataatctgcctgctgatgttccttctgtggctgtgtctattttcagttctgctctaacatggcatgccctttctcagcccaggaaacagcatgtggttcagagaaaagagcgacaaggaaaagttaggactcctgaggtccgaacaggggcttctgttgcccacttcacaacacccagtgatcaccggtgtgcaattgcctccttggctctgagggatgttttgcgctcccttttctcatcattggggttagcgggtgcagacaaattcagcaatagtatgcagatcagcccctcaccacctcattgttctcatctggaactgaaactttctggatttctcttgaagtgctacactgcactgaatgtaaggaattgttgcttgtggaagtttctcagcgtttctggctgtcttagggctggcctcagaacccagcattcctgttatttgcttctaaattagcagctctctttttttttttttttttgaggcagtctcactctgtcacccaggctggagtacaatggcgtgatctcggcccactgcaacctctgcctcctgggttcaagcaattttcctgcctcagcctcccgagtagctgggagtacaggcacacaccaccacacccagctaatttttgtatttttagtagagatagggtttcaccatgtctcccaggctggtctcaaactcctaacctcaagtgattcgcctgcctcggcctcccaaagtgctgggattacaggtgggagccactacagctggcccagcagctctgtttctgatagaggtggttggggctctcatccctagatcctaaccctttagtatgctggaattctactcttcacttactgcattgactgttgttgattagttattattgcaaagcactgtcaccggcctcagggagtttatgtgtaatagaattaaaaataatagctgtgtataacacttagctcaagccacgcatgtgtgaggcatttggtatgtatctgaattaattctcactaaaattcagcaaaggacttgatagcccctccccgccttttcaataaaggatgaatgaaggttg

SEQ ID NO: 166049 - DNA, 2652 bp, Homo sapiens
  Payload ID: 12687
  Gene Symbol: PFAS
  Gene Name: phosphoribosylformylglycinamidine synthase
  ENST ID: ENST00000546020
  CDS Start-End: 1-1157
ggctgctgaaagaccgcctcctctgctcaggccacgatgtcagtgacggaggcctcgtcacatgcctgctggagatggcctttgctggaaattgcgggctacaggtggatgtgcctgtccccagggttgatgtcctgtctgtgctgttcgctgaggagccaggcctcgtgctggaggtgcaggagccagacctggcccaggtgctgaagcgttaccgggatgctggcctccattgcctggagctgggccacacaggcgaggccgggccccacgccatggtccgggtgtcagtgaacggggctgtggttctggaggagcctgttggggagctgcgagccctctgggaggagacgagtttccagctggaccggctacaggcagagcctcgctgtgtggcagaggaggaacggggcctgagggagcggatggggcccagctattgcctgccccccacctttcccaaagcctccgtgccccgtgagcctggtggtcccagcccccgagtcgccatcttgcgagaggagggcagtaatggagaccgggagatggccgatgccttccacttagctgggtttgaggtatgggacgtgaccatgcaggacctctgctctggggcaattgggctggacactttccgtggcgtggccttcgtgggcggcttcagctatgcagatgtcctgggctctgccaaagggtgggcagctgctgtgacctttcatcccagggctggggctgagctgaggcgcttccggaagcggccagacaccttcagcctgggcgtgtgtaatggctgtcaactgctggctctgctcggctgggtgggaggcgaccccaatgaggatgctgcagagatgggccctgactcccagccagcccggccaggccttctgctacgccacaacctgtctgggcgctacgagtctcgctgggccagcgtgcgtgtggggcctgggccagccctgatgctgcgagggatggagggcgccgtgctgcccgtgtggagtgcgcacggggaaggtcaggcccaaggaaggctgggggagggcccgagggttgggggcaagggtgggcatgaaggaccttggctctcacttccctcctccttccatcccaggttacgtagcattttcttctccggaactccaagctcagattgaggccaggggcttggctccactgcactgggctgatgatgacgggaaccccacagagcagtaccctctgaatcccaatgggtccccagggggcgtggctggcatctgctcctgtgatggccgccacctggctgtcatgcctcaccctgagcgggccgttaggccttggcagtgggcatggcgaccccctccatttgatactctgaccacctccccctggctccagctctttatcaatgcccgaaactggaccctggaagggagctgctgactggccacaggggctcacctgggccccatggcttttcacctaagtgggtcctgccccctcccccatgaccttcaggagcaccccatattatttccaaaaatatcttggacagacaaggaccaaaatgccaaaatctcagcggactcgataatctgcctgctgatgttccttctgtggctgtgtctattttcagttctgctctaacatggcatgccctttctcagcccaggaaacagcatgtggttcagagaaaagagcgacaaggaaaagttaggactcctgaggtccgaacaggggcttctgttgcccacttcacaacacccagtgatcaccggtgtgcaattgcctccttggctctgagggatgttttgcgctcccttttctcatcattggggttagcgggtgcagacaaattcagcaatagtatgcagatcagcccctcaccacctcattgttctcatctggaactgaaactttctggatttctcttgaagtgctacactgcactgaatgtaaggaattgttgcttgtggaagtttctcagcgtttctggctgtcttagggctggcctcagaacccagcattcctgttatttgcttctaaattagcagctctctttttttttttttttttgaggcagtctcactctgtcacccaggctggagtacaatggcgtgatctcggcccactgcaacctctgcctcctgggttcaagcaattttcctgcctcagcctcccgagtagctgggagtacaggcacacaccaccacacccagctaatttttgtatttttagtagagatagggtttcaccatgtctcccaggctggtctcaaactcctaacctcaagtgattcgcctgcctcggcctcccaaagtgctgggattacaggtgggagccactacagctggcccagcagctctgtttctgatagaggtggttggggctctcatccctagatcctaaccctttagtatgctggaattctactcttcacttactgcattgactgttgttgattagttattattgcaaagcactgtcaccggcctcagggagtttatgtgtaatagaattaaaaataatagctgtgtataacacttagctcaagccacgcatgtgtgaggcatttggtatgtatctgaattaattctcactaaaattcagcaaaggacttgatagcccctccccgccttttcaataaaggatgaatgaaggttgactgca

SEQ ID NO: 166050 - DNA, 349 bp, Homo sapiens
  Payload ID: 12687
  Gene Symbol: PFAS
  Gene Name: phosphoribosylformylglycinamidine synthase
  ENST ID: ENST00000583059
  CDS Start-End: 1-349
gcatggaagttgtaaaggttggaggtcccgtctacaggattggagttggaggtggagctgcttcatctgtgcaggtgcagggagataacaccagtgacctggactttggggctgtgcagcgaggagacccggagatggaacagaagatgaaccgtgtgatcagggcttgtgtggaggcccccaagggaaaccccatctgcagccttcatgatcagggcgctggtggcaatggcaatgtcctaaaagagctgagtgacccagctggagccatcatttacaccagccgcttccagatagtgctggtggacgatcgggagtgtcctgtcagaagaaatggccagggggatgc

SEQ ID NO: 166051 - DNA, 553 bp, Homo sapiens
  Payload ID: 12687
  Gene Symbol: PFAS
  Gene Name: phosphoribosylformylglycinamidine synthase
  ENST ID: ENST00000581242
  CDS Start-End: 244-553
gagtatagttaccgcgtgcggacctggatcctcctccaggtgcagcgtttcgtcatctagcccaagcttggtctggcggcttcagtatccccaccgggccgagctgtgtctacttggtgcccgcgtatttgctttagtggaggcgtccattcgtcctatcttgcgaacctaattcatctctccagcaaaggacacatctctccagcaaaggacacctctctccagcaaaggacacctgcagagatgtccccagtccttcacttctatgttcgtccctctggccatgagggggcagcccctggacacactcggaggaaactgcaagggaaactgccagagctgcagggcgtcgagactgaactgtgctacaacgtgaactggacagctgaggccctccccagtgctgaggagacaaagaagctgatgtggctgtttggttgccccttactgctggatgatgttgctcgggagtcctggctccttcctggctccaatgacctgctgctggaggtcgggcccaggctgaacttctccaccccaacatccaccaaca

SEQ ID NO: 166052 - DNA, 765 bp, Homo sapiens
  Payload ID: 12687
  Gene Symbol: PFAS
  Gene Name: phosphoribosylformylglycinamidine synthase
  ENST ID: ENST00000578979
  CDS Start-End: 1-188
agaacttggtgcgggccttcagcatcactcaggggctgctgaaagaccgcctcctctgctcaggccacgatgtcagtgacggaggcctcgtcacatgcctgctggagatggcctttgctggaaattgcgggctacaggtggatgtgcctgtccccagggttgatgctgaactggatggaactggctgacacccaccatgttcctgactgcacccctctgagacttcccatccctgagatgtccatgatgaaacatcctcagtcctgccgtcctagccctcatcctccctgatccctaccctactctctggctgcatccctctgaccctcaccctggcccttcctgcatttccctgatcccgccccaactcccttggcccttcttgcatccccctgactccccacattgctctcccagtcctgtctgtgctgttcgctgaggagccaggcctcgtgctggaggtgcaggagccagacctggcccaggtgctgaagcgttaccgggatgctggcctccattgcctggagctgggccacacaggcgaggccgggccccacgccatggtccgggtgtcagtgaacggggctgtggttctggaggagcctgttggggagctgcgagccctctgggaggagacgagtttccagctggaccggctacaggcagagcctcgctgtgtggcagaggaggaacggggcctgagggagcggatggggcccagctattgcctgccccccacctttcccaaagcctccgtgccccgtg

SEQ ID NO: 166053 - DNA, 581 bp, Homo sapiens
  Payload ID: 12687
  Gene Symbol: PFAS
  Gene Name: phosphoribosylformylglycinamidine synthase
  ENST ID: ENST00000585183
  CDS Start-End: 319-581
gctttttgccttctacacgcacttcgggtctcagacgcttttacttattatggttgcccttttcccctacagctccgtcaagggtcttctccaggaacccacagccccatagttcccccattaacctgctcctggtttcccaccaggattaaaccctagagagtgaacggagaccagtttaaggctcacagcgggcgccgcgtgaatgagggaataaacattcgcagaaccagtaagaggaacctaattcatctctccagcaaaggacacatctctccagcaaaggacacctctctccagcaaaggacacctgcagagatgtccccagtccttcacttctatgttcgtccctctggccatgagggggcagcccctggacacactcggaggaaactgcaagggaaactgccagagctgcagggcgtcgagactgaactgtgctacaacgtgaactggacagctgaggccctccccagtgctgaggagacaaagaagctgatgtggctgtttggttgccccttactgctggatgatgttgctcgggagtcctggctccttcctggctccaatgacctgctgct

SEQ ID NO: 166054 - DNA, 4242 bp, Homo sapiens
  Payload ID: 12687
  Gene Symbol: PFAS
  Gene Name: phosphoribosylformylglycinamidine synthase
  ENST ID: ENST00000580356
  CDS Start-End: 134-529
aacaaacgcgcgcgacgattcgaggtgctctgtggccgcgagtgcatcttccacgaacctaattcatctctccagcaaaggacacatctctccagcaaaggacacctctctccagcaaaggacacctgcagagatgtccccagtccttcacttctatgttcgtccctctggccatgagggggcagcccctggacacactcggaggaaactgcaagggaaactgccagagctgcagggcgtcgagactgaactgtgctacaacgtgaactggacagctgaggccctccccagtgctgaggagacaaagaagctgatgtggctgtttggttgccccttactgctggatgatgttgctcgggagtcctggctccttcctggctccaatgacctgctgctggaggtcgggcccaggctgaacttctccaccccaacatccaccaacatcgtgtcagtgtgccgcgccactgggctggggcctgtggatcgtgtggagaccacccggcgctaccggctctcggtctggctttagactcttgggacctagacttctacaccaagcgcttccaggagctacagcggaacccgagcactgtggaggcctttgacttggcgcagtccaatagcgagcacagccgacactggttcttcaagggccagctccacgtggatgggcagaagctggtgcactcactgtttgagtccatcatgagcacccaggaatcctcgaaccccaacaacgtcctcaaattctgtgataacagcaggtgctgtgccctagactgggttggcgtcaggacccggggaggggaggccccaggccctggttgggttagtgtaggtcccagaaaggaagcaaggtccatgacgggtatgtccacagtgcaatccagggaaaggaagtccgattcctacggcctgaggaccccacacggccaagccgcttccagcaacagcaagggctgagacatgttgtcttcacagcagagactcacaactttcccacaggagtatgcccctttagtggtgcaaccactggcacagggggccggattcgagatgtccagtgcacaggccgcggggcccacgtggtggctggcactgccggctattgctttggaaatctgcatattccaggttacaatctgccctgggaggatccaagcttccagtatcctgggaattttgcccggcccctggaggttgccattgaagccagtaatggagcttctgactatggcaacaagtttggggaaccagtgctggctggcttcgcccgctccttgggcctccagctcccagacggccagcggcgtgagtggatcaagcccatcatgtttagtgggggcattgggtccatggaagctgaccacataagcaaggaggccccagagccaggcatggaagttgtaaaggttggaggtcccgtctacaggattggagttggaggtggagctgcttcatctgtgcaggtgcagggagataacaccagtgacctggactttggggctgtgcagcgaggagacccggagatggaacagaagatgaaccgtgtgatcagggcttgtgtggaggcccccaagggaaaccccatctgcagccttcatgatcagggcgctggtggcaatggcaatgtcctaaaagagctgagtgacccagctggagccatcatttacaccagccgcttccagcttggggacccaaccctgaatgccctggaaatctggggggctgagtaccaggaatcaaatgctcttctgctgaggtcccccaaccgggacttcctgactcatgtcagtgcccgtgaacgttgcccggcttgcttcgtgggcaccatcactggagaccggagaatagtgctggtggacgatcgggagtgtcctgtcagaagaaatggccagggggatgcccccccgacacccctgccaacccctgtggacctggagctcgaatgggtgctgggcaagatgcctcggaaggagttcttcctgcagaggaagccccccatgctgcagcctctggccttgcccccagggctgagcgtgcaccaggctctggagagggttctgaggctgcccgccgtggccagcaagcgctacctcaccaataaggtggaccgctctgtgggaggcctggtggcccagcagcagtgcgtggggcccctgcaaactcctctggcagatgtagcggttgtggcactgagccatgaggagctcataggggctgccacagccttgggagaacagccagtcaagagcctgctggacccaaaagtcgccgcccggctggccgtggccgaagccctcaccaacctggtgtttgctctggtcactgacctccgggatgtgaagtgtagcgggaactggatgtgggcagccaagctcccaggggagggcgcagctttggcggatgcctgtgaggctatggtggcagtgatggcagccctgggtgtggcagtggatggtggcaaggactccctcagcatggctgctcgggttggcactgagaccgtgcgggctcctgggtcactggtcatctcagcctatgccgtctgcccagacatcacagccactgtgaccccagacctcaagcatcctgaagggagaggccatctgctctatgtggctctgagccctgggcagcaccggctcgggggcacagctctggcccagtgcttctcccagcttggggaacaccctccagacctggaccttcctgagaacttggtgcgggccttcagcatcactcaggggctgctgaaagaccgcctcctctgctcaggccacgatgtcagtgacggaggcctcgtcacatgcctgctggagatggcctttgctggaaattgcgggctacaggtggatgtgcctgtccccagggttgatgtcctgtctgtgctgttcgctgaggagccaggcctcgtgctggaggtgcaggagccagacctggcccaggtgctgaagcgttaccgggatgctggcctccattgcctggagctgggccacacaggcgaggccgggccccacgccatggtccgggtgtcagtgaacggggctgtggttctggaggagcctgttggggagctgcgagccctctgggaggagacgagtttccagctggaccggctacaggcagagcctcgctgtgtggcagaggaggaacggggcctgagggagcggatggggcccagctattgcctgccccccacctttcccaaagcctccgtgccccgtgagcctggtggtcccagcccccgagtcgccatcttgcgagaggagggcagtaatggagaccgggagatggccgatgccttccacttagctgggtttgaggtatgggacgtgaccatgcaggacctctgctctggggcaattgggctggacactttccgtggcgtggccttcgtgggcggcttcagctatgcagatgtcctgggctctgccaaagggtgggcagctgctgtgacctttcatcccagggctggggctgagctgaggcgcttccggaagcggccagacaccttcagcctgggcgtgtgtaatggctgtcaactgctggctctgctcggctgggtgggaggcgaccccaatgaggatgctgcagagatgggccctgactcccagccagcccggccaggccttctgctacgccacaacctgtctgggcgctacgagtctcgctgggccagcgtgcgtgtggggcctgggccagccctgatgctgcgagggatggagggcgccgtgctgcccgtgtggagtgcgcacggggaaggttacgtagcattttcttctccggaactccaagctcagattgaggccaggggcttggctccactgcactgggctgatgatgacgggaaccccacagagcagtaccctctgaatcccaatgggtccccagggggcgtggctggcatctgctcctgtgatggccgccacctggctgtcatgcctcaccctgagcgggccgttaggccttggcagtgggcatggcgaccccctccatttgatactctgaccacctccccctggctccagctctttatcaatgcccgaaactggaccctggaagggagctgctgactggccacaggggctcacctgggccccatggcttttcacctaagtgggtcctgccccctcccccatgaccttcaggagcaccccatattatttccaaaaatatcttggacagacaaggaccaaaatgccaaaatctcagcggactcgataatctgcctgctgatgt

SEQ ID NO: 166055 - DNA, 557 bp, Homo sapiens
  Payload ID: 12687
  Gene Symbol: PFAS
  Gene Name: phosphoribosylformylglycinamidine synthase
  ENST ID: ENST00000584044
  CDS Start-End: 151-557
aacaaacgcgcgcgacgattcgaggtgctctgtggccgcgagtgcatcttccacttaatgttattttttaggaacctaattcatctctccagcaaaggacacatctctccagcaaaggacacctctctccagcaaaggacacctgcagagatgtccccagtccttcacttctatgttcgtccctctggccatgagggggcagcccctggacacactcggaggaaactgcaagggaaactgccagagctgcagggcgtcgagactgaactgtgctacaacgtgaactggacagctgaggccctccccagtgctgaggagacaaagaagctgatgtggctgtttggttgccccttactgctggatgatgttgctcgggagtcctggctccttcctggctccaatgacctgctgctggaggtcgggcccaggctgaacttctccaccccaacatccaccaacatcgtgtcagtgtgccgcgccactgggctggggcctgtggatcgtgtggagaccacccggcgctaccggctctcgtttgcccaccccccgtcagctga

SEQ ID NO: 166056 - DNA, 396 bp, Homo sapiens
  Payload ID: 12687
  Gene Symbol: PFAS
  Gene Name: phosphoribosylformylglycinamidine synthase
  ENST ID: ENST00000625942
  CDS Start-End: 1-396
atgtccccagtccttcacttctatgttcgtccctctggccatgagggggcagcccctggacacactcggaggaaactgcaagggaaactgccagagctgcagggcgtcgagactgaactgtgctacaacgtgaactggacagctgaggccctccccagtgctgaggagacaaagaagctgatgtggctgtttggttgccccttactgctggatgatgttgctcgggagtcctggctccttcctggctccaatgacctgctgctggaggtcgggcccaggctgaacttctccaccccaacatccaccaacatcgtgtcagtgtgccgcgccactgggctggggcctgtggatcgtgtggagaccacccggcgctaccggctctcggtctggctttag

SEQ ID NO: 166057 - DNA, 2149 bp, Homo sapiens
  Payload ID: 12688
  Gene Symbol: GART
  Gene Name: phosphoribosylglycinamide formyltransferase, phosphoribosylglycinamide synthetase, phosphoribosylaminoimidazole synthetase
  Uniprot ID: P22102
  ENST ID: ENST00000361093
  CDS Start-End: 92-1393
ccgacttccggcgagcgggcaagcgggaaccaggtggccacccggtgtcggtttcattttcctttggaatttctgctttacagacagaacaatggcagcccgagtacttataattggcagtggaggaagggaacatacgctggcctggaaacttgcacagtctcatcatgtcaaacaagtgttggttgccccaggaaacgcaggcactgcctgctctgaaaagatttcaaataccgccatctcaatcagtgaccacactgcccttgctcaattctgcaaagagaagaaaattgaatttgtagttgttggaccagaagcacctctggctgctgggattgttgggaacctgaggtctgcaggagtgcaatgctttggcccaacagcagaagcggctcagttagagtccagcaaaaggtttgccaaagagtttatggacagacatggaatcccaaccgcacaatggaaggctttcaccaaacctgaagaagcctgcagcttcattttgagtgcagacttccctgctttggttgtgaaggccagtggtcttgcagctggaaaaggggtgattgttgcaaagagcaaagaagaggcctgcaaagctgtacaagagatcatgcaggagaaagcctttggggcagctggagaaacaattgtcattgaagaacttcttgacggagaagaggtgtcgtgtctgtgtttcactgatggcaagactgtggcccccatgcccccagcacaggaccataagcgattactggagggagatggtggccctaacacagggggaatgggagcctattgtccagcccctcaggtttctaatgatctattactaaaaattaaagatactgttcttcagaggacagtggatggcatgcagcaagagggtactccatatacaggtattctctatgctggaataatgctgaccaagaatggcccaaaagttctagagtttaattgccgttttggtgatccagagtgccaagtaatcctcccacttcttaaaagtgatctttatgaagtgattcagtccaccttagatggactgctctgcacatctctgcctgtttggctagaaaaccacaccgccctaactgttgtcatggcaagtaaaggttatcctggagactacaccaagggtgtagagataacagggtttcctgaggctcaagctctaggactggaggtgttccatgcaggcactgccctcaaaaatggcaaagtagtaactcatgggggtagagttcttgcagtcacagccatccgggaaaatctcatatcagcccttgaggaagccaagaaaggactagctgctataaagtttgagggagcaatttataggaaagacgtcggctttcgtgccatagctttcctccagcagcccaggtaaaactctaagcaagttagctgtagtgccatttcagaaactggcctaaatggctatgtagaacatttcattaaccctataagtcattcagtattcttttctctctgtgggagtgatacagtcttggtttgtattttgtttgaatcaaaactggttatagcaatactcaaatggaaaaaacttcatgatagcgtaagtttggaaagtttagcaaaatcacagtggtactgatttttatttgttttctattttttttattttatatttttaatttttttaacagggtcttcctctctcgcccaagttctcatgcctcagcctcccaaatagctgggactacaggcacaggccaccacacctggctaatttttttgtattttttgtggagatggggtttcaccatgttgccaaggccagtctgaaatcctgggctcaagtgatcctcctgctttggcctcccaaaatgctgggattataggcatgagccgctgcacttggcctgatactgatttttattccttgcgttatcacatagtgttgtatttgaaacatagttcatggttttatcaaagaactgaagatgagaatactggtcatctaactttgtaatttgatttgattatactgtaaagtttgacagtctcattttatcactgcgtttgtatctattactaaaatgtattttttgacctcttactgattcattgttggtatgtacaaactgttgacttgtaaaatcaataaagtcttagttggaaa

SEQ ID NO: 166058 - DNA, 3341 bp, Homo sapiens
  Payload ID: 12688
  Gene Symbol: GART
  Gene Name: phosphoribosylglycinamide formyltransferase, phosphoribosylglycinamide synthetase, phosphoribosylaminoimidazole synthetase
  Uniprot ID: P22102
  ENST ID: ENST00000381815
  CDS Start-End: 116-3148
tggtcccgcgccggtcccggtgggccgacttccggcgagcgggcaagcgggaaccaggtggccacccggtgtcggtttcattttcctttggaatttctgctttacagacagaacaatggcagcccgagtacttataattggcagtggaggaagggaacatacgctggcctggaaacttgcacagtctcatcatgtcaaacaagtgttggttgccccaggaaacgcaggcactgcctgctctgaaaagatttcaaataccgccatctcaatcagtgaccacactgcccttgctcaattctgcaaagagaagaaaattgaatttgtagttgttggaccagaagcacctctggctgctgggattgttgggaacctgaggtctgcaggagtgcaatgctttggcccaacagcagaagcggctcagttagagtccagcaaaaggtttgccaaagagtttatggacagacatggaatcccaaccgcacaatggaaggctttcaccaaacctgaagaagcctgcagcttcattttgagtgcagacttccctgctttggttgtgaaggccagtggtcttgcagctggaaaaggggtgattgttgcaaagagcaaagaagaggcctgcaaagctgtacaagagatcatgcaggagaaagcctttggggcagctggagaaacaattgtcattgaagaacttcttgacggagaagaggtgtcgtgtctgtgtttcactgatggcaagactgtggcccccatgcccccagcacaggaccataagcgattactggagggagatggtggccctaacacagggggaatgggagcctattgtccagcccctcaggtttctaatgatctattactaaaaattaaagatactgttcttcagaggacagtggatggcatgcagcaagagggtactccatatacaggtattctctatgctggaataatgctgaccaagaatggcccaaaagttctagagtttaattgccgttttggtgatccagagtgccaagtaatcctcccacttcttaaaagtgatctttatgaagtgattcagtccaccttagatggactgctctgcacatctctgcctgtttggctagaaaaccacaccgccctaactgttgtcatggcaagtaaaggttatcctggagactacaccaagggtgtagagataacagggtttcctgaggctcaagctctaggactggaggtgttccatgcaggcactgccctcaaaaatggcaaagtagtaactcatgggggtagagttcttgcagtcacagccatccgggaaaatctcatatcagcccttgaggaagccaagaaaggactagctgctataaagtttgagggagcaatttataggaaagacgtcggctttcgtgccatagctttcctccagcagcccaggagtttgacttacaaggaatctggagtagatatcgcagctggaaatatgctggtcaagaaaattcagcctttagcaaaagccacttccagatcaggctgtaaagttgatcttggaggttttgctggtctttttgatttaaaagcagctggtttcaaagatccccttctggcctctggaacagatggcgttggaactaaactaaagattgcccagctatgcaataaacatgataccattggtcaagatttggtagcaatgtgtgttaatgatattctggcacaaggagcagagcccctcttcttccttgattacttttcctgtggaaaacttgacctcagtgtaactgaagctgttgttgctggaattgctaaagcttgtggaaaagctggatgtgctctccttggaggtgaaacagcagaaatgcctgacatgtatccccctggagagtatgacctagctgggtttgccgttggtgccatggagcgagatcagaaactccctcacctggaaagaatcactgagggtgatgttgttgttggaatagcttcatctggtcttcatagcaatggatttagccttgtgaggaaaatcgtggcaaaatcttccctccagtactcctctccagcacctgatggttgtggtgaccagactttaggggacttacttctcacgcctaccagaatctacagccattcactgttacctgtcctacgttcaggacatgtcaaagcctttgcccatattactggtggaggattactagagaacatccccagagtcctccctgagaaacttggggtagatttagatgcccagacctggaggatccccagggtcttctcatggttgcagcaggaaggacacctctctgaggaagagatggccagaacatttaactgtggggttggcgctgtccttgtggtatcaaaggagcagacagagcagattctgagggatatccagcagcacaaggaagaagcctgggtgattggcagtgtggttgcacgagctgaaggttccccacgtgtgaaagtcaagaatctgattgaaagcatgcaaataaatgggtcagtgttgaagaatggctccctgacaaatcatttctcttttgaaaaaaaaaaggccagagtggctgtcttaatatctggaacaggatcgaacctgcaagcacttatagacagtactcgggaaccaaatagctctgcacaaattgatattgttatctccaacaaagccgcagtagctgggttagataaagcggaaagagctggtattcccactagagtaattaatcataaactgtataaaaatcgtgtagaatttgacagtgcaattgacctagtccttgaagagttctccatagacatagtctgtcttgcaggattcatgagaattctttctggcccctttgtccaaaagtggaatggaaaaatgctcaatatccacccatccttgctcccttcttttaagggttcaaatgcccatgagcaagccctggaaaccggagtcacagttactgggtgcactgtacactttgtagctgaagatgtggatgctggacagattattttgcaagaagctgttcccgtgaagaggggtgatactgtcgcaactctttctgaaagagtaaaattagcagaacataaaatatttcctgcagcccttcagctggtggccagtggaactgtacagcttggagaaaatggcaagatctgttgggttaaagaggaatgaagccttttaattcagaaatggggccagtttagaaagaattatttgctgtttgcatggtggttttttatcatggacttggcccaaaagaaaaactgctaaaagacaaaaaagacctcacccttacttcatctatttttttaataaatagagactcactaaaaacaagactagttagtgcagcatatctgagaca

SEQ ID NO: 166059 - DNA, 3490 bp, Homo sapiens
  Payload ID: 12688
  Gene Symbol: GART
  Gene Name: phosphoribosylglycinamide formyltransferase, phosphoribosylglycinamide synthetase, phosphoribosylaminoimidazole synthetase
  Uniprot ID: P22102
  ENST ID: ENST00000381831
  CDS Start-End: 265-3297
ctgacgcaggcgccattacaggagccgtctctcttgaggcgaccgtgtccgcataagttgtcagtccccagcagtgtttgggagccttaacaggcttgctaagtgcctgagattaaaggcgaagaggaagaagagcaagaagggcaacccggtgtttaacacacggctttcaggcgctctcaggtggcgccaagttcagtttcgacagggatatgcatccgggagagaatttttcagcccccgcccccactggcatacagaacaatggcagcccgagtacttataattggcagtggaggaagggaacatacgctggcctggaaacttgcacagtctcatcatgtcaaacaagtgttggttgccccaggaaacgcaggcactgcctgctctgaaaagatttcaaataccgccatctcaatcagtgaccacactgcccttgctcaattctgcaaagagaagaaaattgaatttgtagttgttggaccagaagcacctctggctgctgggattgttgggaacctgaggtctgcaggagtgcaatgctttggcccaacagcagaagcggctcagttagagtccagcaaaaggtttgccaaagagtttatggacagacatggaatcccaaccgcacaatggaaggctttcaccaaacctgaagaagcctgcagcttcattttgagtgcagacttccctgctttggttgtgaaggccagtggtcttgcagctggaaaaggggtgattgttgcaaagagcaaagaagaggcctgcaaagctgtacaagagatcatgcaggagaaagcctttggggcagctggagaaacaattgtcattgaagaacttcttgacggagaagaggtgtcgtgtctgtgtttcactgatggcaagactgtggcccccatgcccccagcacaggaccataagcgattactggagggagatggtggccctaacacagggggaatgggagcctattgtccagcccctcaggtttctaatgatctattactaaaaattaaagatactgttcttcagaggacagtggatggcatgcagcaagagggtactccatatacaggtattctctatgctggaataatgctgaccaagaatggcccaaaagttctagagtttaattgccgttttggtgatccagagtgccaagtaatcctcccacttcttaaaagtgatctttatgaagtgattcagtccaccttagatggactgctctgcacatctctgcctgtttggctagaaaaccacaccgccctaactgttgtcatggcaagtaaaggttatcctggagactacaccaagggtgtagagataacagggtttcctgaggctcaagctctaggactggaggtgttccatgcaggcactgccctcaaaaatggcaaagtagtaactcatgggggtagagttcttgcagtcacagccatccgggaaaatctcatatcagcccttgaggaagccaagaaaggactagctgctataaagtttgagggagcaatttataggaaagacgtcggctttcgtgccatagctttcctccagcagcccaggagtttgacttacaaggaatctggagtagatatcgcagctggaaatatgctggtcaagaaaattcagcctttagcaaaagccacttccagatcaggctgtaaagttgatcttggaggttttgctggtctttttgatttaaaagcagctggtttcaaagatccccttctggcctctggaacagatggcgttggaactaaactaaagattgcccagctatgcaataaacatgataccattggtcaagatttggtagcaatgtgtgttaatgatattctggcacaaggagcagagcccctcttcttccttgattacttttcctgtggaaaacttgacctcagtgtaactgaagctgttgttgctggaattgctaaagcttgtggaaaagctggatgtgctctccttggaggtgaaacagcagaaatgcctgacatgtatccccctggagagtatgacctagctgggtttgccgttggtgccatggagcgagatcagaaactccctcacctggaaagaatcactgagggtgatgttgttgttggaatagcttcatctggtcttcatagcaatggatttagccttgtgaggaaaatcgtggcaaaatcttccctccagtactcctctccagcacctgatggttgtggtgaccagactttaggggacttacttctcacgcctaccagaatctacagccattcactgttacctgtcctacgttcaggacatgtcaaagcctttgcccatattactggtggaggattactagagaacatccccagagtcctccctgagaaacttggggtagatttagatgcccagacctggaggatccccagggtcttctcatggttgcagcaggaaggacacctctctgaggaagagatggccagaacatttaactgtggggttggcgctgtccttgtggtatcaaaggagcagacagagcagattctgagggatatccagcagcacaaggaagaagcctgggtgattggcagtgtggttgcacgagctgaaggttccccacgtgtgaaagtcaagaatctgattgaaagcatgcaaataaatgggtcagtgttgaagaatggctccctgacaaatcatttctcttttgaaaaaaaaaaggccagagtggctgtcttaatatctggaacaggatcgaacctgcaagcacttatagacagtactcgggaaccaaatagctctgcacaaattgatattgttatctccaacaaagccgcagtagctgggttagataaagcggaaagagctggtattcccactagagtaattaatcataaactgtataaaaatcgtgtagaatttgacagtgcaattgacctagtccttgaagagttctccatagacatagtctgtcttgcaggattcatgagaattctttctggcccctttgtccaaaagtggaatggaaaaatgctcaatatccacccatccttgctcccttcttttaagggttcaaatgcccatgagcaagccctggaaaccggagtcacagttactgggtgcactgtacactttgtagctgaagatgtggatgctggacagattattttgcaagaagctgttcccgtgaagaggggtgatactgtcgcaactctttctgaaagagtaaaattagcagaacataaaatatttcctgcagcccttcagctggtggccagtggaactgtacagcttggagaaaatggcaagatctgttgggttaaagaggaatgaagccttttaattcagaaatggggccagtttagaaagaattatttgctgtttgcatggtggttttttatcatggacttggcccaaaagaaaaactgctaaaagacaaaaaagacctcacccttacttcatctatttttttaataaatagagactcactaaaaacaagactagttagtgcagcatatctgagaca

SEQ ID NO: 166060 - DNA, 3469 bp, Homo sapiens
  Payload ID: 12688
  Gene Symbol: GART
  Gene Name: phosphoribosylglycinamide formyltransferase, phosphoribosylglycinamide synthetase, phosphoribosylaminoimidazole synthetase
  Uniprot ID: P22102
  ENST ID: ENST00000381839
  CDS Start-End: 244-3276
atgtccgccatgttagtgtctgacgcaggcgccattacaggagccgtctctcttgaggcgaccgtgtccgcataagttgtcagtccccagcagtgtttgggagccttaacaggcttgctaagtgcctgagattaaaggcgaagaggaagaagagcaagaagggcaacccggtgtttaacacacggctttcaggcgctctcaggtttcattttcctttggaatttctgctttacagacagaacaatggcagcccgagtacttataattggcagtggaggaagggaacatacgctggcctggaaacttgcacagtctcatcatgtcaaacaagtgttggttgccccaggaaacgcaggcactgcctgctctgaaaagatttcaaataccgccatctcaatcagtgaccacactgcccttgctcaattctgcaaagagaagaaaattgaatttgtagttgttggaccagaagcacctctggctgctgggattgttgggaacctgaggtctgcaggagtgcaatgctttggcccaacagcagaagcggctcagttagagtccagcaaaaggtttgccaaagagtttatggacagacatggaatcccaaccgcacaatggaaggctttcaccaaacctgaagaagcctgcagcttcattttgagtgcagacttccctgctttggttgtgaaggccagtggtcttgcagctggaaaaggggtgattgttgcaaagagcaaagaagaggcctgcaaagctgtacaagagatcatgcaggagaaagcctttggggcagctggagaaacaattgtcattgaagaacttcttgacggagaagaggtgtcgtgtctgtgtttcactgatggcaagactgtggcccccatgcccccagcacaggaccataagcgattactggagggagatggtggccctaacacagggggaatgggagcctattgtccagcccctcaggtttctaatgatctattactaaaaattaaagatactgttcttcagaggacagtggatggcatgcagcaagagggtactccatatacaggtattctctatgctggaataatgctgaccaagaatggcccaaaagttctagagtttaattgccgttttggtgatccagagtgccaagtaatcctcccacttcttaaaagtgatctttatgaagtgattcagtccaccttagatggactgctctgcacatctctgcctgtttggctagaaaaccacaccgccctaactgttgtcatggcaagtaaaggttatcctggagactacaccaagggtgtagagataacagggtttcctgaggctcaagctctaggactggaggtgttccatgcaggcactgccctcaaaaatggcaaagtagtaactcatgggggtagagttcttgcagtcacagccatccgggaaaatctcatatcagcccttgaggaagccaagaaaggactagctgctataaagtttgagggagcaatttataggaaagacgtcggctttcgtgccatagctttcctccagcagcccaggagtttgacttacaaggaatctggagtagatatcgcagctggaaatatgctggtcaagaaaattcagcctttagcaaaagccacttccagatcaggctgtaaagttgatcttggaggttttgctggtctttttgatttaaaagcagctggtttcaaagatccccttctggcctctggaacagatggcgttggaactaaactaaagattgcccagctatgcaataaacatgataccattggtcaagatttggtagcaatgtgtgttaatgatattctggcacaaggagcagagcccctcttcttccttgattacttttcctgtggaaaacttgacctcagtgtaactgaagctgttgttgctggaattgctaaagcttgtggaaaagctggatgtgctctccttggaggtgaaacagcagaaatgcctgacatgtatccccctggagagtatgacctagctgggtttgccgttggtgccatggagcgagatcagaaactccctcacctggaaagaatcactgagggtgatgttgttgttggaatagcttcatctggtcttcatagcaatggatttagccttgtgaggaaaatcgtggcaaaatcttccctccagtactcctctccagcacctgatggttgtggtgaccagactttaggggacttacttctcacgcctaccagaatctacagccattcactgttacctgtcctacgttcaggacatgtcaaagcctttgcccatattactggtggaggattactagagaacatccccagagtcctccctgagaaacttggggtagatttagatgcccagacctggaggatccccagggtcttctcatggttgcagcaggaaggacacctctctgaggaagagatggccagaacatttaactgtggggttggcgctgtccttgtggtatcaaaggagcagacagagcagattctgagggatatccagcagcacaaggaagaagcctgggtgattggcagtgtggttgcacgagctgaaggttccccacgtgtgaaagtcaagaatctgattgaaagcatgcaaataaatgggtcagtgttgaagaatggctccctgacaaatcatttctcttttgaaaaaaaaaaggccagagtggctgtcttaatatctggaacaggatcgaacctgcaagcacttatagacagtactcgggaaccaaatagctctgcacaaattgatattgttatctccaacaaagccgcagtagctgggttagataaagcggaaagagctggtattcccactagagtaattaatcataaactgtataaaaatcgtgtagaatttgacagtgcaattgacctagtccttgaagagttctccatagacatagtctgtcttgcaggattcatgagaattctttctggcccctttgtccaaaagtggaatggaaaaatgctcaatatccacccatccttgctcccttcttttaagggttcaaatgcccatgagcaagccctggaaaccggagtcacagttactgggtgcactgtacactttgtagctgaagatgtggatgctggacagattattttgcaagaagctgttcccgtgaagaggggtgatactgtcgcaactctttctgaaagagtaaaattagcagaacataaaatatttcctgcagcccttcagctggtggccagtggaactgtacagcttggagaaaatggcaagatctgttgggttaaagaggaatgaagccttttaattcagaaatggggccagtttagaaagaattatttgctgtttgcatggtggttttttatcatggacttggcccaaaagaaaaactgctaaaagacaaaaaagacctcacccttacttcatctatttttttaataaatagagactcactaaaaacaagactagttagtgcagcatatctgagaca

SEQ ID NO: 166061 - DNA, 3571 bp, Homo sapiens
  Payload ID: 12688
  Gene Symbol: GART
  Gene Name: phosphoribosylglycinamide formyltransferase, phosphoribosylglycinamide synthetase, phosphoribosylaminoimidazole synthetase
  ENST ID: ENST00000424203
  CDS Start-End: 344-1264
agaggtgctgacgtttgcgccgcgcacgactatgtccgccatgttagtgtctgacgcaggcgccattacaggagccgtctctcttgaggcgaccgtgtccgcataagttgtcagtccccagcagtgtttgggagccttaacaggcttgctaagtgcctgagattaaaggcgaagaggaagaagagcaagaagggcaacccggtgtttaacacacggctttcaggcgctctcaggtggcgccaagttcagtttcgacagggatatgcatccgggagagaatttttcagcccccgcccccactggtttcattttcctttggaatttctgctttacagacagaacaatggcagcccgagtacttataattggcagtggaggaagggaacatacgctggcctggaaacttgcacagtctcatcatgtcaaacaagtgttggttgccccaggaaacgcaggcactgcctgctctgaaaagatttcaaataccgccatctcaatcagtgaccacactgcccttgctcaattctgcaaagagaagaaaattgaatttgtagttgttggaccagaagcacctctggctgctgggattgttgggaacctgaggtctgcaggagtgcaatgctttggcccaacagcagaagcggctcagttagagtccagcaaaaggtttgccaaagagtttatggacagacatggaatcccaaccgcacaatggaaggctttcaccaaacctgaagaagcctgcagcttcattttgagtgcagacttccctgctttggttgtgaaggccagtggtcttgcagctggaaaaggggtgattgttgcaaagagcaaagaagaggcctgcaaagctgtacaagagatcatgcaggagaaagcctttggggcagctggagaaacaattgtcattgaagaacttcttgacggagaagaggtgtcgtgtctgtgtttcactgatggcaagactgtggcccccatgcccccagcacaggaccataagcgattactggagggagatggtggccctaacacagggggaatgggagcctattgtccagcccctcaggtttctaatgatctattactaaaaattaaagatactgttcttcagaggacagtggatggcatgcagcaagagggtactccatatacaggtattctctatgctggaataatgctgaccaagaatggcccaaaagttctagagtttaattgccgttttggtgatccagagtgccaagtgggtaatcctcccacttcttaaaagtgatctttatgaagtgattcagtccaccttagatggactgctctgcacatctctgcctgtttggctagaaaaccacaccgccctaactgttgtcatggcaagtaaaggttatcctggagactacaccaagggtgtagagataacagggtttcctgaggctcaagctctaggactggaggtgttccatgcaggcactgccctcaaaaatggcaaagtagtaactcatgggggtagagttcttgcagtcacagccatccgggaaaatctcatatcagcccttgaggaagccaagaaaggactagctgctataaagtttgagggagcaatttataggaaagacgtcggctttcgtgccatagctttcctccagcagcccaggagtttgacttacaaggaatctggagtagatatcgcagctggaaatatgctggtcaagaaaattcagcctttagcaaaagccacttccagatcaggctgtaaagttgatcttggaggttttgctggtctttttgatttaaaagcagctggtttcaaagatccccttctggcctctggaacagatggcgttggaactaaactaaagattgcccagctatgcaataaacatgataccattggtcaagatttggtagcaatgtgtgttaatgatattctggcacaaggagcagagcccctcttcttccttgattacttttcctgtggaaaacttgacctcagtgtaactgaagctgttgttgctggaattgctaaagcttgtggaaaagctggatgtgctctccttggaggtgaaacagcagaaatgcctgacatgtatccccctggagagtatgacctagctgggtttgccgttggtgccatggagcgagatcagaaactccctcacctggaaagaatcactgagggtgatgttgttgttggaatagcttcatctggtcttcatagcaatggatttagccttgtgaggaaaatcgtggcaaaatcttccctccagtactcctctccagcacctgatggttgtggtgaccagactttaggggacttacttctcacgcctaccagaatctacagccattcactgttacctgtcctacgttcaggacatgtcaaagcctttgcccatattactggtggaggattactagagaacatccccagagtcctccctgagaaacttggggtagatttagatgcccagacctggaggatccccagggtcttctcatggttgcagcaggaaggacacctctctgaggaagagatggccagaacatttaactgtggggttggcgctgtccttgtggtatcaaaggagcagacagagcagattctgagggatatccagcagcacaaggaagaagcctgggtgattggcagtgtggttgcacgagctgaaggttccccacgtgtgaaagtcaagaatctgattgaaagcatgcaaataaatgggtcagtgttgaagaatggctccctgacaaatcatttctcttttgaaaaaaaaaaggccagagtggctgtcttaatatctggaacaggatcgaacctgcaagcacttatagacagtactcgggaaccaaatagctctgcacaaattgatattgttatctccaacaaagccgcagtagctgggttagataaagcggaaagagctggtattcccactagagtaattaatcataaactgtataaaaatcgtgtagaatttgacagtgcaattgacctagtccttgaagagttctccatagacatagtctgtcttgcaggattcatgagaattctttctggcccctttgtccaaaagtggaatggaaaaatgctcaatatccacccatccttgctcccttcttttaagggttcaaatgcccatgagcaagccctggaaaccggagtcacagttactgggtgcactgtacactttgtagctgaagatgtggatgctggacagattattttgcaagaagctgttcccgtgaagaggggtgatactgtcgcaactctttctgaaagagtaaaattagcagaacataaaatatttcctgcagcccttcagctggtggccagtggaactgtacagcttggagaaaatggcaagatctgttgggttaaagaggaatgaagccttttaattcagaaatggggccagtttagaaagaattatttgctgtttgcatggtggttttttatcatggacttggcccaaaagaaaaactgctaaaagacaaaaaagacctcacccttacttcatctatttttttaataaatagagactcactaaaaacaagactagttagtgcagcatatctgaga

SEQ ID NO: 166062 - DNA, 837 bp, Homo sapiens
  Payload ID: 12688
  Gene Symbol: GART
  Gene Name: phosphoribosylglycinamide formyltransferase, phosphoribosylglycinamide synthetase, phosphoribosylaminoimidazole synthetase
  ENST ID: ENST00000426819
  CDS Start-End: 143-837
cgcataagttgtcagtccccagcagtgtttgggagccttaacaggcttgctaagtgcctgagattaaaggcgaagaggaagaagagcaagaagggcaacccggtgtttaacacacggctttcaggcgctctcagacagaacaatggcagcccgagtacttataattggcagtggaggaagggaacatacgctggcctggaaacttgcacagtctcatcatgtcaaacaagtgttggttgccccaggaaacgcaggcactgcctgctctgaaaagatttcaaataccgccatctcaatcagtgaccacactgcccttgctcaattctgcaaagagaagaaaattgaatttgtagttgttggaccagaagcacctctggctgctgggattgttgggaacctgaggtctgcaggagtgcaatgctttggcccaacagcagaagcggctcagttagagtccagcaaaaggtttgccaaagagtttatggacagacatggaatcccaaccgcacaatggaaggctttcaccaaacctgaagaagcctgcagcttcattttgagtgcagacttccctgctttggttgtgaaggccagtggtcttgcagctggaaaaggggtgattgttgcaaagagcaaagaagaggcctgcaaagctgtacaagagatcatgcaggagaaagcctttggggcagctggagaaacaattgtcattgaagaacttcttgacggagaagaggtgtcgtgtctgtgtttcactgatggcaagactgtggcccccatgcccccagcacaggaccataagcgattactggagggagatggtggccctaacacaggggg

SEQ ID NO: 166063 - DNA, 715 bp, Homo sapiens
  Payload ID: 12688
  Gene Symbol: GART
  Gene Name: phosphoribosylglycinamide formyltransferase, phosphoribosylglycinamide synthetase, phosphoribosylaminoimidazole synthetase
  ENST ID: ENST00000441403
  CDS Start-End: 308-715
ttttggcgctcccccccggcgctcctggaaacactgcgtggcaccccgtaccactgtcacattataaacgtgctaaggcttgggtgtctcggctggggagcagtcaggcagcgcccagggcgggagggaatcagactagattctcgccgcggagacccagggccgcgcggaccaatggggcagggaagccgtcgtagggcggggcagtgaggggcggtgccgcgctggtcccgcgccggtcccggtgggccgacttccggcgagcgggcaagcgggaaccaggtggccacccggtgtcgacagaacaatggcagcccgagtacttataattggcagtggaggaagggaacatacgctggcctggaaacttgcacagtctcatcatgtcaaacaagtgttggttgccccaggaaacgcaggcactgcctgctctgaaaagatttcaaataccgccatctcaatcagtgaccacactgcccttgctcaattctgcaaagagaagaaaattgaatttgtagttgttggaccagaagcacctctggctgctgggattgttgggaacctgaggtctgcaggagtgcaatgctttggcccaacagcagaagcggctcagttagagtccagcaaaaggtttgccaaagagtttatggacagacatggaatcccaaccgcacaatggaaggctttcaccaaacctgaagaagcctgcagcttc

SEQ ID NO: 166064 - DNA, 805 bp, Homo sapiens
  Payload ID: 12688
  Gene Symbol: GART
  Gene Name: phosphoribosylglycinamide formyltransferase, phosphoribosylglycinamide synthetase, phosphoribosylaminoimidazole synthetase
  ENST ID: ENST00000366093
  CDS Start-End: 1-437
cacaatggaaggctttcaccaaacctgaagaagcctgcagcttcattttgagtgcagacttccctgctttggttgtgaaggccagtggtcttgcagctggaaaaggggtgattgttgcaaagagcaaagaagaggcctgcaaagctgtacaagagatcatgcaggagaaagcctttggggcagctggagaaacaattgtcattgaagaacttcttgacggagaagaggtgtcgtgtctgtgtttcactgatggcaagactgtggcccccatgcccccagcacaggaccataagcgattactggagggagatggtggccctaacacagggggaatgggagcctattgtccagcccctcagattaaaaataggccaggcgcagtggctcatgcctgtaatcccagcactttgggaggccgaggcaggtggataacctgaggtcgggagtttgagaccagcctggccaacatggagaaaccccgtctctactgaaaatacaaaaattagctgggcgcgatggcacatgcctgtagtcccagtcccagctacttgggaagctaaggtttctaatgatctattactaaaaattaaagatactgttcttcagaggacagtggatggcatgcagcaagagggtactccatatacaggtattctctatgctggaataatgctgaccaagaatggcccaaaagttctagagtttaattgccgttttggtgatccagagtgccaagtaatcctcccacttcttaaaagtgatctttatgaagtgattcagtccaccttagatggactgctctgca

SEQ ID NO: 166065 - DNA, 1036 bp, Homo sapiens
  Payload ID: 12688
  Gene Symbol: GART
  Gene Name: phosphoribosylglycinamide formyltransferase, phosphoribosylglycinamide synthetase, phosphoribosylaminoimidazole synthetase
  ENST ID: ENST00000430874
  CDS Start-End: 314-1036
cccgtccctggcggacaaccgggcctacgagtagctaaacggcaggggggacccaaacaggggagaagggtgaacatcttaactcggttctgaaacagggagtcttgggttacctcggaaaaggcgaagttcctcgagggaaaaggaagggagcggctgggggggcggttggggggggcccggaaaatggatcccaggcccaggcggggccctagcggggcctgagccggggaacgactgcgtctccgaagaaaggtgccaaagaaggctaggtttcattttcctttggaatttctgctttacagacagaacaatggcagcccgagtacttataattggcagtggaggaagggaacatacgctggcctggaaacttgcacagtctcatcatgtcaaacaagtgttggttgccccaggaaacgcaggcactgcctgctctgaaaagatttcaaataccgccatctcaatcagtgaccacactgcccttgctcaattctgcaaagagaagaaaattgaatttgtagttgttggaccagaagcacctctggctgctgggattgttgggaacctgaggtctgcaggagtgcaatgctttggcccaacagcagaagcggctcagttagagtccagcaaaaggtttgccaaagagtttatggacagacatggaatcccaaccgcacaatggaaggctttcaccaaacctgaagaagcctgcagcttcattttgagtgcagacttccctgctttggttgtgaaggccagtggtcttgcagctggaaaaggggtgattgttgcaaagagcaaagaagaggcctgcaaagctgtacaagagatcatgcaggagaaagcctttggggcagctggagaaacaattgtcattgaagaacttcttgacggagaagaggtgtcgtgtctgtgtttcactgatggcaagactgtggcccccatgcccccagcacaggaccataagcgattactggagggagatggtggccctaacacagggggaatgggagcctattgtccagcccctcag

SEQ ID NO: 166066 - DNA, 697 bp, Homo sapiens
  Payload ID: 12688
  Gene Symbol: GART
  Gene Name: phosphoribosylglycinamide formyltransferase, phosphoribosylglycinamide synthetase, phosphoribosylaminoimidazole synthetase
  ENST ID: ENST00000438059
  CDS Start-End: 282-697
agccgtctctcttgaggcgaccgtgtccgcataagttgtcagtccccagcagtgtttgggagccttaacaggcttgctaagtgcctgagattaaaggcgaagaggaagaagagcaagaagggcaacccggtgtttaacacacggctttcaggcgctctcaggtggcgccaagttcagtttcgacagggatatgcatccgggagagaatttttcagcccccgcccccactggcatgtgagaggaggaactcgctgttgccctgtgtcttccccaacagaacaatggcagcccgagtacttataattggcagtggaggaagggaacatacgctggcctggaaacttgcacagtctcatcatgtcaaacaagtgttggttgccccaggaaacgcaggcactgcctgctctgaaaagatttcaaataccgccatctcaatcagtgaccacactgcccttgctcaattctgcaaagagaagaaaattgaatttgtagttgttggaccagaagcacctctggctgctgggattgttgggaacctgaggtctgcaggagtgcaatgctttggcccaacagcagaagcggctcagttagagtccagcaaaaggtttgccaaagagtttatggacagacatggaatcccaaccgcacaatggaaggctttcaccaaacctgaagaagcctgcagcttcattttgag

SEQ ID NO: 166067 - DNA, 1119 bp, Homo sapiens
  Payload ID: 12688
  Gene Symbol: GART
  Gene Name: phosphoribosylglycinamide formyltransferase, phosphoribosylglycinamide synthetase, phosphoribosylaminoimidazole synthetase
  Uniprot ID: P22102
  ENST ID: ENST00000573055
  CDS Start-End: 1-926
atgcccagacctggaggatccccagggtcttctcatggttgcagcaggaaggacacctctctgaggaagagatggccagaacatttaactgtggggttggcgctgtccttgtggtatcaaaggagcagacagagcagattctgagggatatccagcagcacaaggaagaagcctgggtgattggcagtgtggttgcacgagctgaaggttccccacgtgtgaaagtcaagaatctgattgaaagcatgcaaataaatgggtcagtgttgaagaatggctccctgacaaatcatttctcttttgaaaaaaaaaaggccagagtggctgtcttaatatctggaacaggatcgaacctgcaagcacttatagacagtactcgggaaccaaatagctctgcacaaattgatattgttatctccaacaaagccgcagtagctgggttagataaagcggaaagagctggtattcccactagagtaattaatcataaactgtataaaaatcgtgtagaatttgacagtgcaattgacctagtccttgaagagttctccatagacatagtctgtcttgcaggattcatgagaattctttctggcccctttgtccaaaagtggaatggaaaaatgctcaatatccacccatccttgctcccttcttttaagggttcaaatgcccatgagcaagccctggaaaccggagtcacagttactgggtgcactgtacactttgtagctgaagatgtggatgctggacagattattttgcaagaagctgttcccgtgaagaggggtgatactgtcgcaactctttctgaaagagtaaaattagcagaacataaaatatttcctgcagcccttcagctggtggccagtggaactgtacagcttggagaaaatggcaagatctgttgggttaaagaggaatgaagccttttaattcagaaatggggccagtttagaaagaattatttgctgtttgcatggtggttttttatcatggacttggcccaaaagaaaaactgctaaaagacaaaaaagacctcacccttacttcatctatttttttaataaatagagactcactaaaaacaagactagttagtgcagcatatctgagaca

SEQ ID NO: 166068 - DNA, 1119 bp, Homo sapiens; identical to SEQ ID NO: 166067
  Payload ID: 12688
  Gene Symbol: GART
  Gene Name: phosphoribosylglycinamide formyltransferase, phosphoribosylglycinamide synthetase, phosphoribosylaminoimidazole synthetase
  Uniprot ID: P22102
  ENST ID: ENST00000571089
  CDS Start-End: 1-926

SEQ ID NO: 166069 - DNA, 1208 bp, Homo sapiens
  Payload ID: 12688
  Gene Symbol: GART
  Gene Name: phosphoribosylglycinamide formyltransferase, phosphoribosylglycinamide synthetase, phosphoribosylaminoimidazole synthetase
  ENST ID: ENST00000574289
  CDS Start-End: 1-672
gctgtccttgtggtatcaaaggagcagacagagcagattctgagggatatccagcagcacaaggaagaagcctgggtgattggcagtgtggttgcacgagctgaaggttccccacgtgtgaaagtcaagaatctgattgaaagcatgcaaataaatgggtcagtgttgaagaatggctccctgacaaatcatttctcttttgaaaaaaaaaaggccagagtggctgtcttaatatctggaacaggatcgaacctgcaagcacttatagacagtactcgggaaccaaatagctctgcacaaattgatattgttatctccaacaaagccgcagtagctgggttagataaagcggaaagagctggtattcccactagagtaattaatcataaactgtataaaaatcgtgtagaatttgacagtgcaattgacctagtccttgaagagttctccatagacatagtctgtcttgcaggattcatgagaattctttctggcccctttgtccaaaagtggaatggaaaaatgctcaatatccacccatccttgctcccttcttttaagggttcaaatgcccatgagcaagccctggaaaccggagtcacagttactgggtgcactgtacactttgtagctatggagtttcactctgttacccaggctggagtggagtagcgcgatctcagcttactgcaacctctgcctcccgggttcaagggattctcctgcttcagcctcctgaatagctgagattataggtgtttaccaccatgcccagctaatttttgtacttttagtagagacggggtttcactatgctggccaggctggtctggaactccccacctcaagcaatctgcccacctcggcctcccaaagtgttgggattataggcatgagccaccgcgcctggcctaaaaaaaaaaaaaaaaatctttttttataaaaaatttgattcatagtttttttaaatacaacgagtacattgaacatgcttcacattcagaacatgaagtcttttaaatgaatataggtagaacttccaacttccaggctttgtaacagaaatcatattaaagactcagtagcaagcctaatcctcaaatcccccatctgttaacctgataatcctcatgtgtaaacttatttaagaagctaactcctgagccacctgtattctgagcattgcaataaagatgtgaagattttaa

SEQ ID NO: 166070 - DNA, 1119 bp, Homo sapiens; identical to SEQ ID NO: 166067
  Payload ID: 12688
  Gene Symbol: GART
  Gene Name: phosphoribosylglycinamide formyltransferase, phosphoribosylglycinamide synthetase, phosphoribosylaminoimidazole synthetase
  Uniprot ID: P22102
  ENST ID: ENST00000575273
  CDS Start-End: 1-926

SEQ ID NO: 166071 - DNA, 6121 bp, Homo sapiens
  Payload ID: 12689
  Gene Symbol: PHKA1
  Gene Name: phosphorylase kinase, alpha 1 (muscle)
  Uniprot ID: P46020
  ENST ID: ENST00000339490
  CDS Start-End: 302-3934
cacgcggaggccggactggactaagggggcaggagcggcgcctggggcgctgcggcggggctctagaccgcgggaagccagtgctagcgctggcgcgtggtgggcccctgaggccgccggagtccggagaggtacgcggaatccgcggcgccaggcctgagcggtgggagggctctgcggggcctggtgttcaggcgtcccaccacgagggtggagcagcgttggatacttgttccttagggaccgaaggctccggtggcacccgggctatttctcagaggacaattagtaacgtgtcgccatgaggagccggagtaactccggggtccggctggacggctacgctcgactggtgcaacagaccatcctgtgccatcagaatccagtgactggcttgcttccagccagctatgatcagaaagatgcttgggtccgagataatgtgtacagcatcttggctgtgtggggtttgggcctggcctatcggaagaatgcagaccgggatgaggataaggcaaaggcctatgaattggagcagagtgtagtgaagctgatgagaggactactgcactgcatgatcagacaggtggataaagtagaatccttcaaatatagtcagagtactaaggatagcctccatgcaaagtacaacaccaaaacctgtgccactgtagtgggtgatgatcaatggggacacctgcagttggatgctacctctgtgtacctgctcttcttagcccaaatgactgcctcaggactccatatcatccacagcctagatgaagtcaatttcatacagaaccttgtgttttacattgaagctgcatataaaactgctgacttcgggatatgggaacgtggagacaagaccaaccaagggatctcagagttgaatgccagttcagttggaatggcaaaggcagccctggaagcattagatgaactggatctgtttggtgtgaaaggtgggcctcaatcagttatccatgtcctggctgatgaagtacagcactgccagtctatcctaaattcactactgccccgtgcttcaacatcaaaagaggttgatgctagtctactctcagtggtttccttccctgcctttgcagtagaggatagccagttggtggagctcacaaaacaggaaatcatcaccaagcttcagggtcgttatggttgctgtcgctttctacgagatggatataaaactcctaaagaggatcccaatcgtctgtactatgaaccagctgagctgaagctatttgaaaacattgagtgtgaatggccattgttctggacatactttattcttgatggggtcttcagtggcaatgcagaacaggttcaagaatataaagaggctcttgaagcagtcctcatcaagggcaaaaatggagtcccacttctgccagagctgtacagtgttcctcctgacagggtcgatgaagaatatcagaatcctcacactgtggaccgagtccccatggggaaattgcctcacatgtggggtcagtctctatacattttaggaagcttgatggcagagggatttttagcccctggagaaattgatcccctgaatcgcaggttttctactgtaccgaagcccgatgttgtggttcaagtctccattctagctgaaacagaagaaatcaagaccattttgaaggacaagggaatttacgtggagaccattgctgaggtataccccatcagagtacaaccagctcgtattctcagccacatttattccagcctaggatgcaacaatagaatgaaactcagtggacgaccctacagacacatgggagtgcttggaacttcaaaactctatgacattcggaaaactatctttactttcactccacagtttatagaccagcaacagttctacctggctctggacaacaagatgatagtggaaatgcttagaacagacctctcctacctctgtagccgctggcggatgacaggccagcccaccatcaccttccccatctcacacagcatgcttgatgaagatggaacaagcttgaattcaagtatcctggcagcactccgaaaaatgcaagatgggtattttggtggggcaagggttcaaacaggtaaattgtcagagtttttgacaacatcttgttgcacacacttgagcttcatggaccctggacctgagggtaagctgtacagtgaagattatgatgacaactatgattacctggaatctggcaactggatgaatgattatgattcaaccagtcatgctcgctgtggtgatgaagttgctcgttatttagatcaccttttggcgcacactgctccccatcctaaactagcccctacctcacagaagggagggctagatcggttccaagctgctgtgcaaacaacctgcgacttaatgtccttggtgaccaaggccaaggaactgcatgtacagaatgttcacatgtatcttcctacgaagttatttcaggcttcccggccttcattcaacttacttgattcacctcatccccgacaggagaaccaggttccctctgttcgtgtagaaatacatcttcctagagaccagtctggggaggtggactttaaagcactggttttacagttgaaggagacctcaagcttacaggaacaagctgatatcctctatatgctgtatactatgaaaggacctgactggaacactgaattgtataatgaacggagtgctacagtgagagagcttcttaccgagctgtatggcaaagtgggagaaattcgtcactggggcctgatccgatacatttctgggatcttaaggaagaaagtggaagcacttgatgaggcctgcacagaccttctctcccaccagaaacatttgacagtaggacttcctccagaacctcgagaaaagactatctctgcacctctgccctatgaggcgctcactcagctgatagatgaagccagtgaaggggatatgagcatttcaatccttacacaggaaataatggtatatctagccatgtatatgcgaacccagcctggcctctttgctgaaatgtttcgacttcgaattggtctgatcatacaagttatggcaacagaactggcccactcccttcgatgctcagctgaggaagccacagagggcctgatgaatctcagtccttcggccatgaagaatctcctgcatcacattctcagcggcaaggagtttggagtggaacgaagcgttcgtcccactgattcaaatgtcagtcctgctatttctatccacgagattggtgctgttggagcaaccaaaacagaacgaactgggatcatgcagttaaaaagtgagataaagcagtcacctggaacctctatgactccaagtagtgggtcctttcctagtgcatatgatcagcagtcatctaaagatagtcgtcaaggtcaatggcaacgccgaagaaggctggatggggcactgaatagagttccagttggattttatcagaaagtatggaaagttttgcagaagtgtcacggactttctgttgaagggtttgtccttccttcctctaccactagagagatgactccaggtgagattaaattctctgttcatgtggagtctgtcctgaatcgtgtacctcagccagagtaccgtcagctgctggttgaagccatccttgtcctcaccatgctggcagatattgaaattcatagcatcggaagcatcattgctgtggaaaaaatagtgcatattgccaatgacttgttccttcaagaacagaaaacccttggcgcagatgataccatgttggcaaaggatcccgcatctggcatctgtactcttctgtatgacagtgcacccagtggcaggtttggcaccatgacctacctctccaaggcagccgccacctacgtgcaggagttcctgccccacagcatctgtgccatgcaatgagggctttggttcctggcttctgggagccttttgacagctggtccctgcctcggttgattgtgcatggaactaaaatgttattgcctaatcactccaaccctgcccctttctgtcccatccttcccaagaagagagaactttttcgataaactaactactgtagaagaagtgaacacttacctggaggctcaccttgcagaaccagtgacaatcttatgagtataatgaacactcagccaggcctgtcatgattggctttatttctttcatcattcataaaagtttgcatgtgtttttattctctagatctgttaccaatatagttttctaactcctgtttggggagcaagtgttaataataacttattcctaaagcttggtttttcttttttgtgattttattgtgtatatgagtggtgggtactttgggacattatttcaaatgagtaaactctaaattgttaaatatttatgctgctataaattagaattacctattctacgtgccttttcttaggaaaagagagtactggatcatggttttcttccttacttacaggttgcttcacactgagtgataatttaaaattgtttctatgtagaatcattgtctctactgttgccctctctgtgtctgcacacataatgcctctctcactttggtgaaatatcaaaaaaatgcaagtacagcatgcatatttaagaatttctgaactaacacttgaaatcacattttataaagattgttggtactcagagttgtatttgcagcagaaaatgcagaataacccagaaatggagcccggagcccaattccagagaggaagggaaagaagagacgatgcctggacaatgtcttatacatagggaacagagagggaatcagaggtggcttagttccctgaagacagccttatgcgcttaatccctgcctttgaaaaatgggccaatacacaacacagacaataatttgaagcgtctgtattcagcaaagataaatacagcagtccagtctataggtgctctacttagcattcttttcatgtgctcctggtctctgtctcactcacctactttctactacatccaactcaactccctgacaccctatccccccatctattcttaaactctttcatatatattttcacttcctaattctagtgtacatatccctgtatatcatggtatctgtgggcatatgtctgtttcttataaagacacatatttgtgtgtgtatgtgtgtgtgtgtgtgtgtgtgtgtataagcatacatgggaatttttctgaatgtaagcagttttgatgtgtctgtatatcaatctgtatctacatttgatggactgagtaagaatgttgcatgtgagagaagggatgtgactgtggactcagattgacacacacagattggtggaagaatagcttcagtcctcttccttcatcccatatgtaggtagccttgcttgacaaatgtttcttctaactctccttcttctgaattgtgcagagactctgttaacttccctttttgcacttagataacttcctacttcaaccccctcctttatcttggatttctaaagtttttccccaatattgggaatggtgagggtggggatgagagactctctgaacaattcttgcagaaccagtgacaatcttatgaatataatgaataagtaagcatatagtagggtgatagaatacagatagtagaaacaaagagaggacagcaaaccttttcagcacttctctcagagcaaatggaaacacacagtaagtagctttctgactacattattttctggtcacttttaaagaaagtttacaacctgttctgaaactatttgtcttttcactggttgtaagtgtaccccaatctcagggagtatatctgtagtgccacaggcaaaagatccactccttcccacactcatttgcctgaacttactcgaagggctgcatttctctgagtttacgaaattgtgtcattatggtccccatacagtggtatttaacttttaaagcaacttttaagaaaactcgacttgttttttgttcattttaagtgtgtggtactaaaaagacatgttagactttttttaaaaaagcacttatgttttgaaaatagaataaataataagaatttccaattaaatcatgtctggtgccaatgtgcaaaacttc

SEQ ID NO: 166072 - DNA, 4476 bp, Homo sapiens
  Payload ID: 12689
  Gene Symbol: PHKA1
  Gene Name: phosphorylase kinase, alpha 1 (muscle)
  ENST ID: ENST00000373539
  CDS Start-End: 379-4101
gacctgttggcggcggccgggcgggaggctgtgggccgcggcggtctcccggggttgaggggaggatgcaggagtcacacgcggaggccggactggactaagggggcaggagcggcgcctggggcgctgcggcggggctctagaccgcgggaagccagtgctagcgctggcgcgtggtgggcccctgaggccgccggagtccggagaggtacgcggaatccgcggcgccaggcctgagcggtgggagggctctgcggggcctggtgttcaggcgtcccaccacgagggtggagcagcgttggatacttgttccttagggaccgaaggctccggtggcacccgggctatttctcagaggacaattagtaacgtgtcgccatgaggagccggagtaactccggggtccggctggacggctacgctcgactggtgcaacagaccatcctgtgccatcagaatccagtgactggcttgcttccagccagctatgatcagaaagatgcttgggtccgagataatgtgtacagcatcttggctgtgtggggtttgggcctggcctatcggaagaatgcagaccgggatgaggataaggcaaaggcctatgaattggagcagagtgtagtgaagctgatgagaggactactgcactgcatgatcagacaggtggataaagtagaatccttcaaatatagtcagagtactaaggatagcctccatgcaaagtacaacaccaaaacctgtgccactgtagtgggtgatgatcaatggggacacctgcagttggatgctacctctgtgtacctgctcttcttagcccaaatgactgcctcaggactccatatcatccacagcctagatgaagtcaatttcatacagaaccttgtgttttacattgaagctgcatataaaactgctgacttcgggatatgggaacgtggagacaagaccaaccaagggatctcagagttgaatgccagttcagttggaatggcaaaggcagccctggaagcattagatgaactggatctgtttggtgtgaaaggtgggcctcaatcagttatccatgtcctggctgatgaagtacagcactgccagtctatcctaaattcactactgccccgtgcttcaacatcaaaagaggttgatgctagtctactctcagtggtttccttccctgcctttgcagtagaggatagccagttggtggagctcacaaaacaggaaatcatcaccaagcttcagggtcgttatggttgctgtcgctttctacgagatggatataaaactcctaaagaggatcccaatcgtctgtactatgaaccagctgagctgaagctatttgaaaacattgagtgtgaatggccattgttctggacatactttattcttgatggggtcttcagtggcaatgcagaacaggttcaagaatataaagaggctcttgaagcagtcctcatcaagggcaaaaatggagtcccacttctgccagagctgtacagtgttcctcctgacagggtcgatgaagaatatcagaatcctcacactgtggaccgagtccccatggggaaattgcctcacatgtggggtcagtctctatacattttaggaagcttgatggcagagggatttttagcccctggagaaattgatcccctgaatcgcaggttttctactgtaccgaagcccgatgttgtggttcaagtctccattctagctgaaacagaagaaatcaagaccattttgaaggacaagggaatttacgtggagaccattgctgaggtataccccatcagagtacaaccagctcgtattctcagccacatttattccagcctaggatgcaacaatagaatgaaactcagtggacgaccctacagacacatgggagtgcttggaacttcaaaactctatgacattcggaaaactatctttactttcactccacagtttatagaccagcaacagttctacctggctctggacaacaagatgatagtggaaatgcttagaacagacctctcctacctctgtagccgctggcggatgacaggccagcccaccatcaccttccccatctcacacagcatgcttgatgaagatggaacaagcttgaattcaagtatcctggcagcactccgaaaaatgcaagatgggtattttggtggggcaagggttcaaacaggtaaattgtcagagtttttgacaacatcttgttgcacacacttgagcttcatggaccctggacctgagggtaagctgtacagtgaagattatgatgacaactatgattacctggaatctggcaactggatgaatgattatgattcaaccagtcatgctcgctgtggtgatgaagttgctcgttatttagatcaccttttggcgcacactgctccccatcctaaactagcccctacctcacagaagggagggctagatcggttccaagctgctgtgcaaacaacctgcgacttaatgtccttggtgaccaaggccaaggaactgcatgtacagaatgttcacatgtatcttcctacgaagttatttcaggcttcccggccttcattcaacttacttgattcacctcatccccgacaggagaaccaggttccctctgttcgtgtagaaatacatcttcctagagaccagtctggggaggtggactttaaagcactggttttacagttgaaggagacctcaagcttacaggaacaagctgatatcctctatatgctgtatactatgaaaggacctgactggaacactgaattgtataatgaacggagtgctacagtgagagagcttcttaccgagctgtatggcaaagtgggagaaattcgtcactggggcctgatccgatacatttctgggatcttaaggaagaaagtggaagcacttgatgaggcctgcacagaccttctctcccaccagaaacatttgacagtaggacttcctccagaacctcgagaaaagactatctctgcacctctgccctatgaggcgctcactcagctgatagatgaagccagtgaaggggatatgagcatttcaatccttacacaggaaataatggtatatctagccatgtatatgcgaacccagcctggcctctttgctgaaatgtttcgacttcgaattggtctgatcatacaagttatggcaacagaactggcccactcccttcgatgctcagctgaggaagccacagagggcctgatgaatctcagtccttcggccatgaagaatctcctgcatcacattctcagcggcaaggagtttggagtggaacgaagcgttcgtcccactgattcaaatgtcagtcctgctatttctatccacgagattggtgctgttggagcaaccaaaacagaacgaactgggatcatgcagttaaaaagtgagataaagcaggtggaatttcgtagactgtcaatctcagctgagagtcagtccaatggtggtcatcccctgggtatagatttgatgtcaccgtcttttatgtcacctggaacctctatgactccaagtagtgggtcctttcctagtgcatatgatcagcagtcatctaaagatagtcgtcaaggtcaatggcaacgccgaagaaggctggatggggcactgaatagagttccagttggattttatcagaaagtatggaaagttttgcagaagtgtcacggactttctgttgaagggtttgtccttccttcctctaccactagagagatgactccaggtgagattaaattctctgttcatgtggagtctgtcctgaatcgtgtacctcagccagagtaccgtcagctgctggttgaagccatccttgtcctcaccatgctggcagatattgaaattcatagcatcggaagcatcattgctgtggaaaaaatagtgcatattgccaatgacttgttccttcaagaacagaaaacccttggcgcagatgataccatgttggcaaaggatcccgcatctggcatctgtactcttctgtatgacagtgcacccagtggcaggtttggcaccatgacctacctctccaaggcagccgccacctacgtgcaggagttcctgccccacagcatctgtgccatgcaatgagggctttggttcctggcttctgggagccttttgacagctggtccctgcctcggttgattgtgcatggaactaaaatgttattgcctaatcactccaaccctgcccctttctgtcccatccttcccaagaagagagaactttttcgataaactaactactgtagaagaagtgaacacttacctggaggctcaccttgcagaaccagtgacaatcttatgagtataatgaacactcagccaggcctgtcatgattggctttatttctttcatcattcataaaagtttgcatgtgtttttattctctagatctgttaccaatatagttttctaactcctgtttggggagcaagtgttaataataacttattcctaaag

SEQ ID NO: 166073 - DNA, 6020 bp, Homo sapiens
  Payload ID: 12689
  Gene Symbol: PHKA1
  Gene Name: phosphorylase kinase, alpha 1 (muscle)
  Uniprot ID: P46020
  ENST ID: ENST00000373542
  CDS Start-End: 161-3832
tccgcggcgccaggcctgagcggtgggagggctctgcggggcctggtgttcaggcgtcccaccacgagggtggagcagcgttggatacttgttccttagggaccgaaggctccggtggcacccgggctatttctcagaggacaattagtaacgtgtcgccatgaggagccggagtaactccggggtccggctggacggctacgctcgactggtgcaacagaccatcctgtgccatcagaatccagtgactggcttgcttccagccagctatgatcagaaagatgcttgggtccgagataatgtgtacagcatcttggctgtgtggggtttgggcctggcctatcggaagaatgcagaccgggatgaggataaggcaaaggcctatgaattggagcagagtgtagtgaagctgatgagaggactactgcactgcatgatcagacaggtggataaagtagaatccttcaaatatagtcagagtactaaggatagcctccatgcaaagtacaacaccaaaacctgtgccactgtagtgggtgatgatcaatggggacacctgcagttggatgctacctctgtgtacctgctcttcttagcccaaatgactgcctcaggactccatatcatccacagcctagatgaagtcaatttcatacagaaccttgtgttttacattgaagctgcatataaaactgctgacttcgggatatgggaacgtggagacaagaccaaccaagggatctcagagttgaatgccagttcagttggaatggcaaaggcagccctggaagcattagatgaactggatctgtttggtgtgaaaggtgggcctcaatcagttatccatgtcctggctgatgaagtacagcactgccagtctatcctaaattcactactgccccgtgcttcaacatcaaaagaggttgatgctagtctactctcagtggtttccttccctgcctttgcagtagaggatagccagttggtggagctcacaaaacaggaaatcatcaccaagcttcagggtcgttatggttgctgtcgctttctacgagatggatataaaactcctaaagaggatcccaatcgtctgtactatgaaccagctgagctgaagctatttgaaaacattgagtgtgaatggccattgttctggacatactttattcttgatggggtcttcagtggcaatgcagaacaggttcaagaatataaagaggctcttgaagcagtcctcatcaagggcaaaaatggagtcccacttctgccagagctgtacagtgttcctcctgacagggtcgatgaagaatatcagaatcctcacactgtggaccgagtccccatggggaaattgcctcacatgtggggtcagtctctatacattttaggaagcttgatggcagagggatttttagcccctggagaaattgatcccctgaatcgcaggttttctactgtaccgaagcccgatgttgtggttcaagtctccattctagctgaaacagaagaaatcaagaccattttgaaggacaagggaatttacgtggagaccattgctgaggtataccccatcagagtacaaccagctcgtattctcagccacatttattccagcctaggatgcaacaatagaatgaaactcagtggacgaccctacagacacatgggagtgcttggaacttcaaaactctatgacattcggaaaactatctttactttcactccacagtttatagaccagcaacagttctacctggctctggacaacaagatgatagtggaaatgcttagaacagacctctcctacctctgtagccgctggcggatgacaggccagcccaccatcaccttccccatctcacacagcatgcttgatgaagatggaacaagcttgaattcaagtatcctggcagcactccgaaaaatgcaagatgggtattttggtggggcaagggttcaaacaggtaaattgtcagagtttttgacaacatcttgttgcacacacttgagcttcatggaccctggacctgagggtaagctgtacagtgaagattatgatgacaactatgattacctggaatctggcaactggatgaatgattatgattcaaccagtcatgctcgctgtggtgatgaagttgctcgttatttagatcaccttttggcgcacactgctccccatcctaaactagcccctacctcacagaagggagggctagatcggttccaagctgctgtgcaaacaacctgcgacttaatgtccttggtgaccaaggccaaggaactgcatgtacagaatgttcacatgtatcttcctacgaagttatttcaggcttcccggccttcattcaacttacttgattcacctcatccccgacaggagaaccaggttccctctgttcgtgtagaaatacatcttcctagagaccagtctggggaggtggactttaaagcactggttttacagttgaaggagacctcaagcttacaggaacaagctgatatcctctatatgctgtatactatgaaaggacctgactggaacactgaattgtataatgaacggagtgctacagtgagagagcttcttaccgagctgtatggcaaagtgggagaaattcgtcactggggcctgatccgatacatttctgggatcttaaggaagaaagtggaagcacttgatgaggcctgcacagaccttctctcccaccagaaacatttgacagtaggacttcctccagaacctcgagaaaagactatctctgcacctctgccctatgaggcgctcactcagctgatagatgaagccagtgaaggggatatgagcatttcaatccttacacaggaaataatggtatatctagccatgtatatgcgaacccagcctggcctctttgctgaaatgtttcgacttcgaattggtctgatcatacaagttatggcaacagaactggcccactcccttcgatgctcagctgaggaagccacagagggcctgatgaatctcagtccttcggccatgaagaatctcctgcatcacattctcagcggcaaggagtttggagtggaacgaagcgttcgtcccactgattcaaatgtcagtcctgctatttctatccacgagattggtgctgttggagcaaccaaaacagaacgaactgggatcatgcagttaaaaagtgagataaagcaggtggaatttcgtagactgtcaatctcagctgagagtcagtcacctggaacctctatgactccaagtagtgggtcctttcctagtgcatatgatcagcagtcatctaaagatagtcgtcaaggtcaatggcaacgccgaagaaggctggatggggcactgaatagagttccagttggattttatcagaaagtatggaaagttttgcagaagtgtcacggactttctgttgaagggtttgtccttccttcctctaccactagagagatgactccaggtgagattaaattctctgttcatgtggagtctgtcctgaatcgtgtacctcagccagagtaccgtcagctgctggttgaagccatccttgtcctcaccatgctggcagatattgaaattcatagcatcggaagcatcattgctgtggaaaaaatagtgcatattgccaatgacttgttccttcaagaacagaaaacccttggcgcagatgataccatgttggcaaaggatcccgcatctggcatctgtactcttctgtatgacagtgcacccagtggcaggtttggcaccatgacctacctctccaaggcagccgccacctacgtgcaggagttcctgccccacagcatctgtgccatgcaatgagggctttggttcctggcttctgggagccttttgacagctggtccctgcctcggttgattgtgcatggaactaaaatgttattgcctaatcactccaaccctgcccctttctgtcccatccttcccaagaagagagaactttttcgataaactaactactgtagaagaagtgaacacttacctggaggctcaccttgcagaaccagtgacaatcttatgagtataatgaacactcagccaggcctgtcatgattggctttatttctttcatcattcataaaagtttgcatgtgtttttattctctagatctgttaccaatatagttttctaactcctgtttggggagcaagtgttaataataacttattcctaaagcttggtttttcttttttgtgattttattgtgtatatgagtggtgggtactttgggacattatttcaaatgagtaaactctaaattgttaaatatttatgctgctataaattagaattacctattctacgtgccttttcttaggaaaagagagtactggatcatggttttcttccttacttacaggttgcttcacactgagtgataatttaaaattgtttctatgtagaatcattgtctctactgttgccctctctgtgtctgcacacataatgcctctctcactttggtgaaatatcaaaaaaatgcaagtacagcatgcatatttaagaatttctgaactaacacttgaaatcacattttataaagattgttggtactcagagttgtatttgcagcagaaaatgcagaataacccagaaatggagcccggagcccaattccagagaggaagggaaagaagagacgatgcctggacaatgtcttatacatagggaacagagagggaatcagaggtggcttagttccctgaagacagccttatgcgcttaatccctgcctttgaaaaatgggccaatacacaacacagacaataatttgaagcgtctgtattcagcaaagataaatacagcagtccagtctataggtgctctacttagcattcttttcatgtgctcctggtctctgtctcactcacctactttctactacatccaactcaactccctgacaccctatccccccatctattcttaaactctttcatatatattttcacttcctaattctagtgtacatatccctgtatatcatggtatctgtgggcatatgtctgtttcttataaagacacatatttgtgtgtgtatgtgtgtgtgtgtgtgtgtgtgtgtataagcatacatgggaatttttctgaatgtaagcagttttgatgtgtctgtatatcaatctgtatctacatttgatggactgagtaagaatgttgcatgtgagagaagggatgtgactgtggactcagattgacacacacagattggtggaagaatagcttcagtcctcttccttcatcccatatgtaggtagccttgcttgacaaatgtttcttctaactctccttcttctgaattgtgcagagactctgttaacttccctttttgcacttagataacttcctacttcaaccccctcctttatcttggatttctaaagtttttccccaatattgggaatggtgagggtggggatgagagactctctgaacaattcttgcagaaccagtgacaatcttatgaatataatgaataagtaagcatatagtagggtgatagaatacagatagtagaaacaaagagaggacagcaaaccttttcagcacttctctcagagcaaatggaaacacacagtaagtagctttctgactacattattttctggtcacttttaaagaaagtttacaacctgttctgaaactatttgtcttttcactggttgtaagtgtaccccaatctcagggagtatatctgtagtgccacaggcaaaagatccactccttcccacactcatttgcctgaacttactcgaagggctgcatttctctgagtttacgaaattgtgtcattatggtccccatacagtggtatttaacttttaaagcaacttttaagaaaactcgacttgttttttgttcattttaagtgtgtggtactaaaaagacatgttagactttttttaaaaaagcacttatgttttgaaaatagaataaataataagaatttccaattaaatcatgtctggtgccaatgtgcaaaacttca

SEQ ID NO: 166074 - DNA, 6173 bp, Homo sapiens
  Payload ID: 12689
  Gene Symbol: PHKA1
  Gene Name: phosphorylase kinase, alpha 1 (muscle)
  ENST ID: ENST00000373545
  CDS Start-End: 440-3985
tcgcgcccgccccgcctcccgctcgcgtctcccgcaaggtggaggcggcgcagcggtcgttgacctgttggcggcggccgggcgggaggctgtgggccgcggcggtctcccggggttgaggggaggatgcaggagtcacacgcggaggccggactggactaagggggcaggagcggcgcctggggcgctgcggcggggctctagaccgcgggaagccagtgctagcgctggcgcgtggtgggcccctgaggccgccggagtccggagaggtacgcggaatccgcggcgccaggcctgagcggtgggagggctctgcggggcctggtgttcaggcgtcccaccacgagggtggagcagcgttggatacttgttccttagggaccgaaggctccggtggcacccgggctatttctcagaggacaattagtaacgtgtcgccatgaggagccggagtaactccggggtccggctggacggctacgctcgactggtgcaacagaccatcctgtgccatcagaatccagtgactggcttgcttccagccagctatgatcagaaagatgcttgggtccgagataatgtgtacagcatcttggctgtgtggggtttgggcctggcctatcggaagaatgcagaccgggatgaggataaggcaaaggcctatgaattggagcagagtgtagtgaagctgatgagaggactactgcactgcatgatcagacaggtggataaagtagaatccttcaaatatagtcagagtactaaggatagcctccatgcaaagtacaacaccaaaacctgtgccactgtagtgggtgatgatcaatggggacacctgcagttggatgctacctctgtgtacctgctcttcttagcccaaatgactgcctcaggactccatatcatccacagcctagatgaagtcaatttcatacagaaccttgtgttttacattgaagctgcatataaaactgctgacttcgggatatgggaacgtggagacaagaccaaccaagggatctcagagttgaatgccagttcagttggaatggcaaaggcagccctggaagcattagatgaactggatctgtttggtgtgaaaggtgggcctcaatcagttatccatgtcctggctgatgaagtacagcactgccagtctatcctaaattcactactgccccgtgcttcaacatcaaaagaggttgatgctagtctactctcagtggtttccttccctgcctttgcagtagaggatagccagttggtggagctcacaaaacaggaaatcatcaccaagcttcagggtcgttatggttgctgtcgctttctacgagatggatataaaactcctaaagaggatcccaatcgtctgtactatgaaccagctgagctgaagctatttgaaaacattgagtgtgaatggccattgttctggacatactttattcttgatggggtcttcagtggcaatgcagaacaggttcaagaatataaagaggctcttgaagcagtcctcatcaagggcaaaaatggagtcccacttctgccagagctgtacagtgttcctcctgacagggtcgatgaagaatatcagaatcctcacactgtggaccgagtccccatggggaaattgcctcacatgtggggtcagtctctatacattttaggaagcttgatggcagagggatttttagcccctggagaaattgatcccctgaatcgcaggttttctactgtaccgaagcccgatgttgtggttcaagtctccattctagctgaaacagaagaaatcaagaccattttgaaggacaagggaatttacgtggagaccattgctgaggtataccccatcagagtacaaccagctcgtattctcagccacatttattccagcctaggatgcaacaatagaatgaaactcagtggacgaccctacagacacatgggagtgcttggaacttcaaaactctatgacattcggaaaactatctttactttcactccacagtttatagaccagcaacagttctacctggctctggacaacaagatgatagtggaaatgcttagaacagacctctcctacctctgtagccgctggcggatgacaggccagcccaccatcaccttccccatctcacacagcatgcttgatgaagatggaacaagcttgaattcaagtatcctggcagcactccgaaaaatgcaagatgggtattttggtggggcaagggttcaaacaggtaaattgtcagagtttttgacaacatcttgttgcacacacttgagcttcatggaccctggacctgagggtaagctgtacagtgaagattatgatgacaactatgattacctggaatctggcaactggatgaatgattatgattcaaccagtcatgatgttcacatgtatcttcctacgaagttatttcaggcttcccggccttcattcaacttacttgattcacctcatccccgacaggagaaccaggttccctctgttcgtgtagaaatacatcttcctagagaccagtctggggaggtggactttaaagcactggttttacagttgaaggagacctcaagcttacaggaacaagctgatatcctctatatgctgtatactatgaaaggacctgactggaacactgaattgtataatgaacggagtgctacagtgagagagcttcttaccgagctgtatggcaaagtgggagaaattcgtcactggggcctgatccgatacatttctgggatcttaaggaagaaagtggaagcacttgatgaggcctgcacagaccttctctcccaccagaaacatttgacagtaggacttcctccagaacctcgagaaaagactatctctgcacctctgccctatgaggcgctcactcagctgatagatgaagccagtgaaggggatatgagcatttcaatccttacacaggaaataatggtatatctagccatgtatatgcgaacccagcctggcctctttgctgaaatgtttcgacttcgaattggtctgatcatacaagttatggcaacagaactggcccactcccttcgatgctcagctgaggaagccacagagggcctgatgaatctcagtccttcggccatgaagaatctcctgcatcacattctcagcggcaaggagtttggagtggaacgaagcgttcgtcccactgattcaaatgtcagtcctgctatttctatccacgagattggtgctgttggagcaaccaaaacagaacgaactgggatcatgcagttaaaaagtgagataaagcaggtggaatttcgtagactgtcaatctcagctgagagtcagtccaatggtggtcatcccctgggtatagatttgatgtcaccgtcttttatgtcacctggaacctctatgactccaagtagtgggtcctttcctagtgcatatgatcagcagtcatctaaagatagtcgtcaaggtcaatggcaacgccgaagaaggctggatggggcactgaatagagttccagttggattttatcagaaagtatggaaagttttgcagaagtgtcacggactttctgttgaagggtttgtccttccttcctctaccactagagagatgactccaggtgagattaaattctctgttcatgtggagtctgtcctgaatcgtgtacctcagccagagtaccgtcagctgctggttgaagccatccttgtcctcaccatgctggcagatattgaaattcatagcatcggaagcatcattgctgtggaaaaaatagtgcatattgccaatgacttgttccttcaagaacagaaaacccttggcgcagatgataccatgttggcaaaggatcccgcatctggcatctgtactcttctgtatgacagtgcacccagtggcaggtttggcaccatgacctacctctccaaggcagccgccacctacgtgcaggagttcctgccccacagcatctgtgccatgcaatgagggctttggttcctggcttctgggagccttttgacagctggtccctgcctcggttgattgtgcatggaactaaaatgttattgcctaatcactccaaccctgcccctttctgtcccatccttcccaagaagagagaactttttcgataaactaactactgtagaagaagtgaacacttacctggaggctcaccttgcagaaccagtgacaatcttatgagtataatgaacactcagccaggcctgtcatgattggctttatttctttcatcattcataaaagtttgcatgtgtttttattctctagatctgttaccaatatagttttctaactcctgtttggggagcaagtgttaataataacttattcctaaagcttggtttttcttttttgtgattttattgtgtatatgagtggtgggtactttgggacattatttcaaatgagtaaactctaaattgttaaatatttatgctgctataaattagaattacctattctacgtgccttttcttaggaaaagagagtactggatcatggttttcttccttacttacaggttgcttcacactgagtgataatttaaaattgtttctatgtagaatcattgtctctactgttgccctctctgtgtctgcacacataatgcctctctcactttggtgaaatatcaaaaaaatgcaagtacagcatgcatatttaagaatttctgaactaacacttgaaatcacattttataaagattgttggtactcagagttgtatttgcagcagaaaatgcagaataacccagaaatggagcccggagcccaattccagagaggaagggaaagaagagacgatgcctggacaatgtcttatacatagggaacagagagggaatcagaggtggcttagttccctgaagacagccttatgcgcttaatccctgcctttgaaaaatgggccaatacacaacacagacaataatttgaagcgtctgtattcagcaaagataaatacagcagtccagtctataggtgctctacttagcattcttttcatgtgctcctggtctctgtctcactcacctactttctactacatccaactcaactccctgacaccctatccccccatctattcttaaactctttcatatatattttcacttcctaattctagtgtacatatccctgtatatcatggtatctgtgggcatatgtctgtttcttataaagacacatatttgtgtgtgtatgtgtgtgtgtgtgtgtgtgtgtgtataagcatacatgggaatttttctgaatgtaagcagttttgatgtgtctgtatatcaatctgtatctacatttgatggactgagtaagaatgttgcatgtgagagaagggatgtgactgtggactcagattgacacacacagattggtggaagaatagcttcagtcctcttccttcatcccatatgtaggtagccttgcttgacaaatgtttcttctaactctccttcttctgaattgtgcagagactctgttaacttccctttttgcacttagataacttcctacttcaaccccctcctttatcttggatttctaaagtttttccccaatattgggaatggtgagggtggggatgagagactctctgaacaattcttgcagaaccagtgacaatcttatgaatataatgaataagtaagcatatagtagggtgatagaatacagatagtagaaacaaagagaggacagcaaaccttttcagcacttctctcagagcaaatggaaacacacagtaagtagctttctgactacattattttctggtcacttttaaagaaagtttacaacctgttctgaaactatttgtcttttcactggttgtaagtgtaccccaatctcagggagtatatctgtagtgccacaggcaaaagatccactccttcccacactcatttgcctgaacttactcgaagggctgcatttctctgagtttacgaaattgtgtcattatggtccccatacagtggtatttaacttttaaagcaacttttaagaaaactcgacttgttttttgttcattttaagtgtgtggtactaaaaagacatgttagactttttttaaaaaagcacttatgttttgaaaatagaataaataataagaatttccaattaaatcatgtctggtgccaatgtgcaaaacttca

SEQ ID NO: 166075 - DNA, 5944 bp, Homo sapiens
  Payload ID: 12689
  Gene Symbol: PHKA1
  Gene Name: phosphorylase kinase, alpha 1 (muscle)
  Uniprot ID: P46020
  ENST ID: ENST00000541944
  CDS Start-End: 302-3757
cacgcggaggccggactggactaagggggcaggagcggcgcctggggcgctgcggcggggctctagaccgcgggaagccagtgctagcgctggcgcgtggtgggcccctgaggccgccggagtccggagaggtacgcggaatccgcggcgccaggcctgagcggtgggagggctctgcggggcctggtgttcaggcgtcccaccacgagggtggagcagcgttggatacttgttccttagggaccgaaggctccggtggcacccgggctatttctcagaggacaattagtaacgtgtcgccatgaggagccggagtaactccggggtccggctggacggctacgctcgactggtgcaacagaccatcctgtgccatcagaatccagtgactggcttgcttccagccagctatgatcagaaagatgcttgggtccgagataatgtgtacagcatcttggctgtgtggggtttgggcctggcctatcggaagaatgcagaccgggatgaggataaggcaaaggcctatgaattggagcagagtgtagtgaagctgatgagaggactactgcactgcatgatcagacaggtggataaagtagaatccttcaaatatagtcagagtactaaggatagcctccatgcaaagtacaacaccaaaacctgtgccactgtagtgggtgatgatcaatggggacacctgcagttggatgctacctctgtgtacctgctcttcttagcccaaatgactgcctcaggactccatatcatccacagcctagatgaagtcaatttcatacagaaccttgtgttttacattgaagctgcatataaaactgctgacttcgggatatgggaacgtggagacaagaccaaccaagggatctcagagttgaatgccagttcagttggaatggcaaaggcagccctggaagcattagatgaactggatctgtttggtgtgaaaggtgggcctcaatcagttatccatgtcctggctgatgaagtacagcactgccagtctatcctaaattcactactgccccgtgcttcaacatcaaaagaggttgatgctagtctactctcagtggtttccttccctgcctttgcagtagaggatagccagttggtggagctcacaaaacaggaaatcatcaccaagcttcagggtcgttatggttgctgtcgctttctacgagatggatataaaactcctaaagaggatcccaatcgtctgtactatgaaccagctgagctgaagctatttgaaaacattgagtgtgaatggccattgttctggacatactttattcttgatggggtcttcagtggcaatgcagaacaggttcaagaatataaagaggctcttgaagcagtcctcatcaagggcaaaaatggagtcccacttctgccagagctgtacagtgttcctcctgacagggtcgatgaagaatatcagaatcctcacactgtggaccgagtccccatggggaaattgcctcacatgtggggtcagtctctatacattttaggaagcttgatggcagagggatttttagcccctggagaaattgatcccctgaatcgcaggttttctactgtaccgaagcccgatgttgtggttcaagtctccattctagctgaaacagaagaaatcaagaccattttgaaggacaagggaatttacgtggagaccattgctgaggtataccccatcagagtacaaccagctcgtattctcagccacatttattccagcctaggatgcaacaatagaatgaaactcagtggacgaccctacagacacatgggagtgcttggaacttcaaaactctatgacattcggaaaactatctttactttcactccacagtttatagaccagcaacagttctacctggctctggacaacaagatgatagtggaaatgcttagaacagacctctcctacctctgtagccgctggcggatgacaggccagcccaccatcaccttccccatctcacacagcatgcttgatgaagatggaacaagcttgaattcaagtatcctggcagcactccgaaaaatgcaagatgggtattttggtggggcaagggttcaaacaggtaaattgtcagagtttttgacaacatcttgttgcacacacttgagcttcatggaccctggacctgagggtaagctgtacagtgaagattatgatgacaactatgattacctggaatctggcaactggatgaatgattatgattcaaccagtcatgatgttcacatgtatcttcctacgaagttatttcaggcttcccggccttcattcaacttacttgattcacctcatccccgacaggagaaccaggttccctctgttcgtgtagaaatacatcttcctagagaccagtctggggaggtggactttaaagcactggttttacagttgaaggagacctcaagcttacaggaacaagctgatatcctctatatgctgtatactatgaaaggacctgactggaacactgaattgtataatgaacggagtgctacagtgagagagcttcttaccgagctgtatggcaaagtgggagaaattcgtcactggggcctgatccgatacatttctgggatcttaaggaagaaagtggaagcacttgatgaggcctgcacagaccttctctcccaccagaaacatttgacagtaggacttcctccagaacctcgagaaaagactatctctgcacctctgccctatgaggcgctcactcagctgatagatgaagccagtgaaggggatatgagcatttcaatccttacacaggaaataatggtatatctagccatgtatatgcgaacccagcctggcctctttgctgaaatgtttcgacttcgaattggtctgatcatacaagttatggcaacagaactggcccactcccttcgatgctcagctgaggaagccacagagggcctgatgaatctcagtccttcggccatgaagaatctcctgcatcacattctcagcggcaaggagtttggagtggaacgaagcgttcgtcccactgattcaaatgtcagtcctgctatttctatccacgagattggtgctgttggagcaaccaaaacagaacgaactgggatcatgcagttaaaaagtgagataaagcagtcacctggaacctctatgactccaagtagtgggtcctttcctagtgcatatgatcagcagtcatctaaagatagtcgtcaaggtcaatggcaacgccgaagaaggctggatggggcactgaatagagttccagttggattttatcagaaagtatggaaagttttgcagaagtgtcacggactttctgttgaagggtttgtccttccttcctctaccactagagagatgactccaggtgagattaaattctctgttcatgtggagtctgtcctgaatcgtgtacctcagccagagtaccgtcagctgctggttgaagccatccttgtcctcaccatgctggcagatattgaaattcatagcatcggaagcatcattgctgtggaaaaaatagtgcatattgccaatgacttgttccttcaagaacagaaaacccttggcgcagatgataccatgttggcaaaggatcccgcatctggcatctgtactcttctgtatgacagtgcacccagtggcaggtttggcaccatgacctacctctccaaggcagccgccacctacgtgcaggagttcctgccccacagcatctgtgccatgcaatgagggctttggttcctggcttctgggagccttttgacagctggtccctgcctcggttgattgtgcatggaactaaaatgttattgcctaatcactccaaccctgcccctttctgtcccatccttcccaagaagagagaactttttcgataaactaactactgtagaagaagtgaacacttacctggaggctcaccttgcagaaccagtgacaatcttatgagtataatgaacactcagccaggcctgtcatgattggctttatttctttcatcattcataaaagtttgcatgtgtttttattctctagatctgttaccaatatagttttctaactcctgtttggggagcaagtgttaataataacttattcctaaagcttggtttttcttttttgtgattttattgtgtatatgagtggtgggtactttgggacattatttcaaatgagtaaactctaaattgttaaatatttatgctgctataaattagaattacctattctacgtgccttttcttaggaaaagagagtactggatcatggttttcttccttacttacaggttgcttcacactgagtgataatttaaaattgtttctatgtagaatcattgtctctactgttgccctctctgtgtctgcacacataatgcctctctcactttggtgaaatatcaaaaaaatgcaagtacagcatgcatatttaagaatttctgaactaacacttgaaatcacattttataaagattgttggtactcagagttgtatttgcagcagaaaatgcagaataacccagaaatggagcccggagcccaattccagagaggaagggaaagaagagacgatgcctggacaatgtcttatacatagggaacagagagggaatcagaggtggcttagttccctgaagacagccttatgcgcttaatccctgcctttgaaaaatgggccaatacacaacacagacaataatttgaagcgtctgtattcagcaaagataaatacagcagtccagtctataggtgctctacttagcattcttttcatgtgctcctggtctctgtctcactcacctactttctactacatccaactcaactccctgacaccctatccccccatctattcttaaactctttcatatatattttcacttcctaattctagtgtacatatccctgtatatcatggtatctgtgggcatatgtctgtttcttataaagacacatatttgtgtgtgtatgtgtgtgtgtgtgtgtgtgtgtgtataagcatacatgggaatttttctgaatgtaagcagttttgatgtgtctgtatatcaatctgtatctacatttgatggactgagtaagaatgttgcatgtgagagaagggatgtgactgtggactcagattgacacacacagattggtggaagaatagcttcagtcctcttccttcatcccatatgtaggtagccttgcttgacaaatgtttcttctaactctccttcttctgaattgtgcagagactctgttaacttccctttttgcacttagataacttcctacttcaaccccctcctttatcttggatttctaaagtttttccccaatattgggaatggtgagggtggggatgagagactctctgaacaattcttgcagaaccagtgacaatcttatgaatataatgaataagtaagcatatagtagggtgatagaatacagatagtagaaacaaagagaggacagcaaaccttttcagcacttctctcagagcaaatggaaacacacagtaagtagctttctgactacattattttctggtcacttttaaagaaagtttacaacctgttctgaaactatttgtcttttcactggttgtaagtgtaccccaatctcagggagtatatctgtagtgccacaggcaaaagatccactccttcccacactcatttgcctgaacttactcgaagggctgcatttctctgagtttacgaaattgtgtcattatggtccccatacagtggtatttaacttttaaagcaacttttaagaaaactcgacttgttttttgttcattttaagtgtgtggtactaaaaagacatgttagactttttttaaaaaagcacttatgttttgaaaatagaataaataataagaatttccaattaaatcatgtctggtgccaatgtgcaaaacttc

SEQ ID NO: 166076 - DNA, 5559 bp, Homo sapiens
  Payload ID: 12690
  Gene Symbol: PHKA2
  Gene Name: phosphorylase kinase, alpha 2 (liver)
  Uniprot ID: P46019
  ENST ID: ENST00000379942
  CDS Start-End: 667-4374
cggagggcgggtccaaggcgcccaggtggccgcggcagaagggcctgtttctctggccttggctgtggttggcagccggccggggagagaagggactcagggaggcaacctggttcccgcccgttgctgatttcgcagcggctctcccgggccgcccccttttccttcctcctcaggccgcgacttggagggttccgctccgcggcgggggcagagccaggggcggggctgagcgcggcctgggcgatctccccggcggctggggtgggctggcgtcttcttcgcgcccgggggacctcctcgcgaccgccgggacgtaaaaggggcttggcaggggcgtcctcgccccactcccggaacctggtttcccgctgctcccgcgagcgtcgggagcccagcaggcctggccgaggcgggaccttcgtcgctccagcccccgtccccgcccccgcgcctccccgccgcgcggagctctggttggcttgctttccaaccggactttggggctagcgtttagaaaagtctcgacctcctccggcccggtcccatcccaagaaccgactaaggctgtgagtgtccgggaaccagacccgcttggaggccacagccccgacgtcccgcgcccacgcggcagatcgggcgctgcggcctgggagcctcggggagatgcggagcaggagcaattccggggtccgcttggacgggtacgcgcggctggtgcagcaaaccatcctgtgttaccagaatcccgtcacggggctgctgtcagccagccatgagcagaaggatgcctgggtgcgggataacatctacagtatcctggccgtgtggggcctgggcatggcctaccgtaagaatgcagaccgcgatgaggacaaggccaaggcctacgagctggagcagaacgtggtgaagctgatgcgaggtcttctccagtgcatgatgagacaggtggccaaagtggagaagttcaaacacactcagagcaccaaggacagcctgcacgccaagtacaacaccgccacctgtggcacggtggtgggcgacgaccagtggggccacctccaggtggatgccacctctctcttcctcctgttcctggcccagatgaccgcctcaggcttacgtatcattttcactctcgatgaggtggccttcatacagaatcttgtcttttacatagaagctgcatataaagtcgctgattatggaatgtgggagcgtggagataagactaatcagggcatcccggaattgaatgcaagctccgtaggaatggccaaggcagctcttgaggcaattgatgaactggacctttttggagcccatggaggacgcaagtcagtgattcatgttctgccagatgaggtcgagcactgccagtctattctgttctccatgctgccaagagcgtcgacatctaaagaaattgatgctggacttctttccattatttccttcccggcctttgcagtggaagatgtaaaccttgtaaatgtgaccaaaaatgaaattatttctaagctccaggggcgttatggatgctgtcgcttccttcgagatggttataaaactccaagagaggaccctaatcgactgcattatgaccctgctgaactcaagctcttcgaaaacattgaatgtgagtggcctgtgttttggacatattttataatagatggagtcttcagtggtgatgctgttcaggtccaagaataccgagaggccctggagggaatactcatcagaggcaagaatgggatccgcctggtgcctgaactctacgctgtcccgcctaacaaggtagatgaagagtacaagaatcctcacacagtagaccgagttcctatggggaaggtgcctcatctgtggggccaatccttgtacatcctcagctcgctgttggcagagggattccttgccgctggtgaaatcgatcccttaaatagaagattttccacttcagtcaaacctgatgttgtagtacaagttactgttttggcagaaaacaatcacattaaggacttattgaggaaacacggggtgaacgtccagagtatcgcggacattcatccaattcaagtccagccgggccggattcttagtcacatatatgccaagcttggacggaataagaatatgaatttgagtgggcgaccgtatcgacatattggtgtccttggaacctctaaactatatgtgattaggaaccaaatctttacttttacaccccagttcaccgaccagcatcacttctacctggccctcgacaatgagatgatcgtggagatgctaaggatcgagctggcctacctgtgcacctgctggaggatgacgggcagacccacactcaccttccccatcagtcgcaccatgctcacaaatgatggctcagacattcattctgctgtgctctccacaattagaaaactagaggatggatattttggaggagccagagtaaaattagggaacctttcggaatttctcaccacatcgttctacacatatctgacttttctggatccagactgtgatgagaagttgtttgacaatgccagcgaagggactttcagtcctgatagtgattcagatttggtaggatatctggaagacacctgtaatcaagaaagccaagacgaacttgaccattatatcaaccaccttctgcaaagcacatcgttgaggtcctatctgcctcctctttgtaagaacacagaagaccgccatgtcttcagtgctatccactccacgcgggacatactttctgtgatggcaaaagcaaagggtttggaagttccatttgttcccatgactttgccgactaaagttctaagtgcccaccgtaaatcactgaatcttgttgattctcctcagccactcctagaaaaggttcctgaaagtgactttcagtggcccagagatgaccatggtgacgtggactgtgagaagctggttgagcagctaaaagattgttcgaacctacaggaccaagcagacattctgtacattctttatgtcataaagggtcccagctgggacacaaatctctctggacagcacggggtcaccgttcaaaaccttcttggtgagctctatgggaaagccggcttgaaccaggagtggggtctgattcgctacatctcaggccttctcaggaagaaagtggaggtcctggctgaggcctgcacagacctgctttcgcaccagaagcagctcaccgtgggcctgccgcccgagccccgggagaagatcatctctgcgccccttcccccagaggagctcacaaaactcatctacgaggccagtgggcaggacatcagcattgccgtcctcacgcaggagattgtggtttacctggccatgtatgtcagggcgcagcccagcctctttgtggagatgctgagactccggattggactgatcattcaggtgatggccacggagctggcacggagcctgaactgctcaggagaagaggcttctgaaagtttgatgaacctcagccctttcgatatgaaaaatctcctgcaccatattctaagtgggaaagagtttggcgttgaaagaagtgtgcgccctatccactcctccacatccagccctaccatctccatccacgaggtgggccataccggagtcaccaaaactgagaggagtggcattaacagactgaggagtgaaatgaaacagatgactaggcggtttagtgctgatgaacagttcttttctgtgggccaggccgcgtccagcagtgcgcattcctccaagtctgcgaggtccagcaccccatcctcgcccactggcacgtcatcctcagactcgggaggacatcacatcggctggggtgagcggcagggccagtggctgcgcaggagaaggctggatggggccatcaacagggtccccgtgggattctaccagagggtgtggaagatcctccagaagtgccacggtctctccatcgatggttatgtcctcccatcctcgacgacccgagagatgaccccgcatgagatcaagtttgctgtccatgtcgaatcggtgctgaaccgcgtgccgcagcccgagtaccggcagctgctggtggaagccatcatggtgctgacgctgctctcggacacggagatgaccagcatcgggggcatcatccacgtggaccagatcgtgcagatggccagtcagctgttcttgcaggaccaggtgtcaattggtgccatggacaccctggagaaagaccaagccacaggaatctgccacttcttttatgacagcgctccgagtggggcttatgggacgatgacctacctaacaagagcagtggcttcttatttgcaggaattgttgcccaattcgggctgccagatgcaatagggtctcacctggaaacatgatcacactctcaatctgtcacgtgccccctagccttactgggaaccttctgtcccccaagatcccctgtgctatcaggaaagcatgtcccatcagaaacactctcggggggcaatggtagcactcaccctgaaactgatgtatgttaaagccacagagatagagctgaggagtcctgtgttcccccgcaaggagcaccccgggatcattttctaggttcatttctctggaacatttgctgtagcatctggtctcacggactctgaggaggaattggaaattggtctcttttgagtgcagagggaactgagacgccagcttaaattggctcttgcagagagttacagaaatagtttcgatgagctagtgacacatcctaaagatgcaaagatcctcctggcggcagtagccttgacaagggccacctcttcacaggatgcagtctgtctgtgcaccaaactcttcaccaaatagaacacttgtgtctctctgtggaatgggggttttcttgtgccttgcttgctttcatagccttccattttattggcatggctgccttgatgtaacataattctctgtccccaagatttagaaaattcctcttcgttcaccttggctcatggtcttccagggtttttatcctggctgtctatgaactagggttttctcctgccttaggaaaaatactgcatcttctggaatctagaaaaaaaaaaaaaaaaagacaaggctcctcttatagccaggcaagcagttgtttagggctagacctgttgtccccgctcgcgtggggtgaacgccccgcagtggatactgtcctcctgtgctctgggcgaggcgtcatagggtgagcacaagtcagcagtgccatggaagtgaacaggcatgtccccgcagaaacaatgcttccctctgaaaaatagagccaggctaggaacctgtaccctcttggtagaagcactttggtcttcactctcttgggtgggtgcagttggaggcaccgattggaggagagcaaggttgagtcaggtgtcagggtctggcaaatcttttgccaatgccctagcaatggagtttctctccgggcattgtcttaccttgggggaaggaaacaaaaccaatgggaaaacagtttctgtaaataataaaccttgaaagacaaatgct

SEQ ID NO: 166077 - DNA, 5464 bp, Homo sapiens
  Payload ID: 12691
  Gene Symbol: PHKB
  Gene Name: phosphorylase kinase, beta
  Uniprot ID: Q93100
  ENST ID: ENST00000299167
  CDS Start-End: 26-3307
tggccaaggcggcgaccggagcgcgatggcgggggcggcgggactcacggcagaagtgagctggaaggtcttggagcgaagagctcggaccaagcgctcaggctcagtttatgaacctcttaaaagcattaatcttccaagacctgataatgaaactctctgggataagttggaccattattacagaattgtcaagtcaacattgctgctgtatcaaagtccaactaccggtctctttcccactaaaacatgcggtggtgaccagaaggccaagatccaggacagcctatactgcgctgctggggcctgggctttggctcttgcatacaggcgaattgatgatgacaagggaaggacccatgagctggagcactcagctataaaatgcatgagaggaattctctactgctatatgcgtcaggccgataaggtccagcagtttaagcaggatccacgcccaacaacatgtcttcactctgttttcaatgtgcatacaggagatgagttgctttcctatgaggaatatggtcatcttcagataaatgcagtgtcactttatctcctttaccttgtggaaatgatttcctcaggactccagattatctacaacactgatgaggtctcttttattcaaaaccttgtattttgtgtggaaagagtttaccgtgtgcctgactttggtgtctgggaaagaggaagcaaatataataatggcagcacagagctacattcgagctcggttggtttagcaaaagcagctctagaagcaattaatggattcaacctttttggcaaccagggctgttcgtggtcagttatatttgtggatctcgatgctcacaatcgcaacaggcaaactttgtgctcgctgttacccagagaatcaagatcacataatacagatgctgccctgctcccctgcatcagttatcctgcatttgccctggatgatgaagttctttttagccagacacttgataaagtggttagaaaattaaaaggaaaatatggatttaaacgtttcttgagagatgggtatagaacatcattggaagatcccaacagatgctactacaagccagctgaaattaagctatttgatggcattgaatgtgaatttcccatatttttcctttatatgatgattgatggagtttttagaggcaatcctaagcaagtacaggaatatcaggatcttttgactccagtacttcatcataccacagaaggatatcctgttgtaccaaagtactattatgtgccagctgactttgtagaatatgaaaaaaataaccctggtagtcaaaaacgatttcctagcaactgtggccgtgatggaaaactgtttctttggggacaagcactttatatcatcgcaaaactcctggctgatgaacttattagtcctaaagacattgatcctgtccagcgctatgtcccactaaaggatcaacgtaacgtgagcatgaggttttccaatcagggcccactggaaaatgacttggtagttcatgtggcacttatagcagaaagccaaagacttcaagtttttctgaacacatatggtattcaaactcaaactcctcaacaagtagaacccattcagatatggcctcagcaggagcttgtgaaagcttatttgcagctgggtatcaatgaaaagttaggactctctggaaggccagacaggcccattggctgcctcgggacatcaaagatttatcgcattctaggaaagactgtggtttgttacccgattattttcgacctaagtgatttctacatgtctcaggatgttttcctgctgatagatgacataaagaatgcgctgcagttcattaaacaatattggaaaatgcatggacgtccacttttccttgttctcatccgggaagacaatataagaggtagccggttcaaccccatattagatatgctggcagcccttaaaaaaggaataattggaggagtcaaagttcatgtggatcgtctacagacactaatatctggagctgtggtagaacaacttgatttcctacgaatcagtgacacagaagagcttccagaatttaagagttttgaggaactagaacctcccaaacattcaaaagtcaaacggcaaagcagcacccctagtgctcctgaactgggacagcagccggatgtcaacattagtgaatggaaggacaaacccacccacgaaattcttcaaaaactgaatgattgcagttgtctggctagccaagccatcctgctgggtatactgctcaaaagagaaggccccaacttcatcacaaaggaaggtaccgtttctgatcacattgagagagtctatagaagagctggcagccaaaaactttggtcggttgtacgccgtgcagcaagtcttttaagtaaagtagtggacagcctggccccatccattactaatgttttagtgcagggcaaacaggtaactctgggtgcctttgggcatgaagaagaagttatctctaatcctttgtctccaagagtgattcaaaacatcatctattataagtgtaacacccatgatgagagggaagcggtcattcagcaagaactggtcatccatattggctggatcatctccaataaccctgagttattcagtggcatgctgaaaatacgaatcgggtggatcatccatgccatggagtatgaacttcagatccgtggcggagacaagccagccttggacttgtatcagctgtcacctagtgaagttaaacagcttctgctggatattctgcagcctcaacagaatggaagatgttggctgaacaggcgtcagatcgatgggtctttgaatagaactcccaccgggttctatgaccgagtgtggcagattctggagcgcacgcccaatgggatcattgttgctgggaagcatttgcctcagcaaccaaccctgtcagatatgaccatgtatgagatgaatttctctctccttgttgaagacacgttgggaaatattgaccagccacagtacagacagatcgttgtagagttacttatggttgtatccattgtactggaaagaaaccccgagctagaatttcaagacaaagtagatctagacagactggtcaaagaagcatttaatgaatttcaaaaagatcagagtcggctaaaggaaattgaaaaacaagatgacatgacttccttttacaacactcctcccctgggaaaaagaggaacatgcagctatttgacaaaggcggtgatgaatctgctgctggaaggagaagtcaagccaaacaatgatgacccgtgtctgattagctagtggggaaggtgtaggaagctctgttgagacacatgttctgaagtgtgttgtgtttcatgttcaagcttaatcaaggcagccattaatatacgaactgagcatgctggggaggtgaatgccacatccttggcggggttatggacctcttgcatgtcatagccaatctaacggtaatggtaaatgcttttaatcaagcaggaaaaagttctcatgattatgccaactataatagtaatcctcactgagtgataaaaatagtttatgaattgaaaatttgccgctgcatgttgtatgatcaaatagttcatcaaaatgaatctttgctctttggactgaattcttaccatactgccattaaaataaatttgccaactagtaatgcatactggaaatcaaaagatactgaaagaatggtgaacttctcttagtggtattgtcatgctaaaagatgttaatatacatcataaaagcaaagtcagccagctgatattttggttctcaaaaactgcattattaataatattttagtatacagagctattctacagtttttacattgtaaacatgactgtggttttgtatttgctaaatataggggttggactaaaatataataaatctgtaccttatcaaacattttctttgagctcctgctaaaaataggacatgtctatgattgttcaaaaatatgttaaatttaggctcagcacagtagctcacacctgaaatcttagcacttcgggaggctgaggcaggtggatcacttgaggttaggagttcaagaccagcccagccaacatggtgaaaaccctgtctctactaaaaatacaaaaattagccaggcatgatggtgcatgcctttaaacccagctactgaggaggctgaggcatgagaattgcttgaaccaggagacggaggttgcagtgagctgaaatcctgccactgcacaccagcctgggtgacagagcgagactccatctcaaaaaaaaaaaaaaaaaagaaaaagaaaaaaatatgttaaatttaaggactgttaacctacgttctactagtaaaaacaacattaagggtcattaaattttatttctgaattaatgaacatatctggacattttttgttcctaggttcacaagattgagcttcaaactcccgagtgttttcatttaattgatttagaggtagaatggaagagaatctgtggtacctaccattatacacatttagttgcccagtttacttaaactttaatgaaagtagaaagtagattaaacatttaaattttatttctttcctaaatagaaaaaaaaaaggcccatgagtttgagcccttgccccaaagagagttgtttttctgatcaatcttactggagtttcacctgagaagatagatttgtcacataaaaaatgcagcttatttgtagtgttttgaaaggatgtaagaaaggatgagtggcttcagtattgagtcaatcgatatcaaatgaatggatgtgtgagcacatggaaaaatctgctgtcagtcacatttctcataacattgaggtacagtgccgagatcttgcataagaaattgtatggatattagttggcaaaattgaaatgaatgagacacagttgggccctaaagaactaaggagggggattgacaaagaatagaattaaactacttgactcaatatgttaagagagtttatgaaaagatagtcgtgaagggtgaagctaatttgtaaaactaatgcctgaaaaaaacgtaagcatgaagtccatggagagggaattgagagctgacacttcataactggagaaactggaaattaaagaaagggaaacaaaagacttaaaatttttgtttgccgaaatttttacgaaagtaaactgtgttgtagttttaagaatttttttaaaaaatctgattagctgagcaaagttaccagaaaactgctatcctagttgaaatcaaacattacttgcaaatgtgttttctgagtgttagcttcctgcttaaatgttacatatgcaaaattctgaagttttcctgtgctactcctgaaagcattcagaatctgtgacacgtattgacttcatgctttgagattcaaaatttattgttctgaaagttatatttagaatcagtaaatcttgatattcaccttta

SEQ ID NO: 166078 - DNA, 4283 bp, Homo sapiens
  Payload ID: 12691
  Gene Symbol: PHKB
  Gene Name: phosphorylase kinase, beta
  Uniprot ID: Q93100
  ENST ID: ENST00000323584
  CDS Start-End: 25-3306
ggccaaggcggcgaccggagcgcgatggcgggggcggcgggactcacggcagaagtgagctggaaggtcttggagcgaagagctcggaccaagcgctcaggctcagtttatgaacctcttaaaagcattaatcttccaagacctgataatgaaactctctgggataagttggaccattattacagaattgtcaagtcaacattgctgctgtatcaaagtccaactaccggtctctttcccactaaaacatgcggtggtgaccagaaggccaagatccaggacagcctatactgcgctgctggggcctgggctttggctcttgcatacaggcgaattgatgatgacaagggaaggacccatgagctggagcactcagctataaaatgcatgagaggaattctctactgctatatgcgtcaggccgataaggtccagcagtttaagcaggatccacgcccaacaacatgtcttcactctgttttcaatgtgcatacaggagatgagttgctttcctatgaggaatatggtcatcttcagataaatgcagtgtcactttatctcctttaccttgtggaaatgatttcctcaggactccagattatctacaacactgatgaggtctcttttattcaaaaccttgtattttgtgtggaaagagtttaccgtgtgcctgactttggtgtctgggaaagaggaagcaaatataataatggcagcacagagctacattcgagctcggttggtttagcaaaagcagctctagaagcaattaatggattcaacctttttggcaaccagggctgttcgtggtcagttatatttgtggatctcgatgctcacaatcgcaacaggcaaactttgtgctcgctgttacccagagaatcaagatcacataatacagatgctgccctgctcccctgcatcagttatcctgcatttgccctggatgatgaagttctttttagccagacacttgataaagtggttagaaaattaaaaggaaaatatggatttaaacgtttcttgagagatgggtatagaacatcattggaagatcccaacagatgctactacaagccagctgaaattaagctatttgatggcattgaatgtgaatttcccatatttttcctttatatgatgattgatggagtttttagaggcaatcctaagcaagtacaggaatatcaggatcttttgactccagtacttcatcataccacagaaggatatcctgttgtaccaaagtactattatgtgccagctgactttgtagaatatgaaaaaaataaccctggtagtcaaaaacgatttcctagcaactgtggccgtgatggaaaactgtttctttggggacaagcactttatatcatcgcaaaactcctggctgatgaacttattagtcctaaagacattgatcctgtccagcgctatgtcccactaaaggatcaacgtaacgtgagcatgaggttttccaatcagggcccactggaaaatgacttggtagttcatgtggcacttatagcagaaagccaaagacttcaagtttttctgaacacatatggtattcaaactcaaactcctcaacaagtagaacccattcagatatggcctcagcaggagcttgtgaaagcttatttgcagctgggtatcaatgaaaagttaggactctctggaaggccagacaggcccattggctgcctcgggacatcaaagatttatcgcattctaggaaagactgtggtttgttacccgattattttcgacctaagtgatttctacatgtctcaggatgttttcctgctgatagatgacataaagaatgcgctgcagttcattaaacaatattggaaaatgcatggacgtccacttttccttgttctcatccgggaagacaatataagaggtagccggttcaaccccatattagatatgctggcagcccttaaaaaaggaataattggaggagtcaaagttcatgtggatcgtctacagacactaatatctggagctgtggtagaacaacttgatttcctacgaatcagtgacacagaagagcttccagaatttaagagttttgaggaactagaacctcccaaacattcaaaagtcaaacggcaaagcagcacccctagtgctcctgaactgggacagcagccggatgtcaacattagtgaatggaaggacaaacccacccacgaaattcttcaaaaactgaatgattgcagttgtctggctagccaagccatcctgctgggtatactgctcaaaagagaaggccccaacttcatcacaaaggaaggtaccgtttctgatcacattgagagagtctatagaagagctggcagccaaaaactttggttggcggtgcgctacggggctgcatttacccagaaattttcttcctctatagccccacacattactacttttctggtacatgggaaacaggtaactctgggtgcctttgggcatgaagaagaagttatctctaatcctttgtctccaagagtgattcaaaacatcatctattataagtgtaacacccatgatgagagggaagcggtcattcagcaagaactggtcatccatattggctggatcatctccaataaccctgagttattcagtggcatgctgaaaatacgaatcgggtggatcatccatgccatggagtatgaacttcagatccgtggcggagacaagccagccttggacttgtatcagctgtcacctagtgaagttaaacagcttctgctggatattctgcagcctcaacagaatggaagatgttggctgaacaggcgtcagatcgatgggtctttgaatagaactcccaccgggttctatgaccgagtgtggcagattctggagcgcacgcccaatgggatcattgttgctgggaagcatttgcctcagcaaccaaccctgtcagatatgaccatgtatgagatgaatttctctctccttgttgaagacacgttgggaaatattgaccagccacagtacagacagatcgttgtagagttacttatggttgtatccattgtactggaaagaaaccccgagctagaatttcaagacaaagtagatctagacagactggtcaaagaagcatttaatgaatttcaaaaagatcagagtcggctaaaggaaattgaaaaacaagatgacatgacttccttttacaacactcctcccctgggaaaaagaggaacatgcagctatttgacaaaggcggtgatgaatctgctgctggaaggagaagtcaagccaaacaatgatgacccgtgtctgattagctagtggggaaggtgtaggaagctctgttgagacacatgttctgaagtgtgttgtgtttcatgttcaagcttaatcaaggcagccattaatatacgaactgagcatgctggggaggtgaatgccacatccttggcggggttatggacctcttgcatgtcatagccaatctaacggtaatggtaaatgcttttaatcaagcaggaaaaagttctcatgattatgccaactataatagtaatcctcactgagtgataaaaatagtttatgaattgaaaatttgccgctgcatgttgtatgatcaaatagttcatcaaaatgaatctttgctctttggactgaattcttaccatactgccattaaaataaatttgccaactagtaatgcatactggaaatcaaaagatactgaaagaatggtgaacttctcttagtggtattgtcatgctaaaagatgttaatatacatcataaaagcaaagtcagccagctgatattttggttctcaaaaactgcattattaataatattttagtatacagagctattctacagtttttacattgtaaacatgactgtggttttgtatttgctaaatataggggttggactaaaatataataaatctgtaccttatcaaacattttctttgagctcctgctaaaaataggacatgtctatgattgttcaaaaatatgttaaatttaggctcagcacagtagctcacacctgaaatcttagcacttcgggaggctgaggcaggtggatcacttgaggttaggagttcaagaccagcccagccaacatggtgaaaaccctgtctctactaaaaatacaaaaattagccaggcatgatggtgcatgcctttaaacccagctactgaggaggctgaggcatgagaattgcttgaaccaggagacggaggttgcagtgagctgaaatcctgccactgcacaccagcctgggtgacagagcgagactcc

SEQ ID NO: 166079 - DNA, 1032 bp, Homo sapiens
  Payload ID: 12691
  Gene Symbol: PHKB
  Gene Name: phosphorylase kinase, beta
  ENST ID: ENST00000566037
  CDS Start-End: 345-1032
agagtggcgcgcagccccgggacgcgtaagagccgctgccggctcctttttctctctcccactagggctgcccttccgacgctaaaaaagcagtggagctagggtgaaagccgccctcacgctcacttccggcaggcgcgcctcccgacagtgtcgtgcggggggcgtggcccggcattgctgacaggcggccccgggggcggtggccaaggcggcgaccggagcgcgatggcgggggcggcgggactcacggcagaagtgagctggaaggtcttggagcgaagagctcggaccaagcgctcagcttagcctgcgacgcttatgattagagccaacaatttgaaatggcctgctcacctgatgcagtcgtctctccgtcttccgctttcttaaggtctggctcagtttatgaacctcttaaaagcattaatcttccaagacctgataatgaaactctctgggataagttggaccattattacagaattgtcaagtcaacattgctgctgtatcaaagtccaactaccggtctctttcccactaaaacatgcggtggtgaccagaaggccaagatccaggacagcctatactgcgctgctggggcctgggctttggctcttgcatacaggcgaattgatgatgacaagggaaggacccatgagctggagcactcagctataaaatgcatgagaggaattctctactgctatatgcgtcaggccgataaggtccagcagtttaagcaggatccacgcccaacaacatgtcttcactctgttttcaatgtgcatacaggagatgagttgctttcctatgaggaatatggtcatcttcagataaatgcagtgtcactttatctcctttaccttgtggaaatgatttcctcaggactccagattatctacaacactgatgaggtctcttttattcaaaaccttgtattttgtgtggaaagagtttaccgtgtgcctgactttggtgtctgggaaagaggaagcaaatataataatggcagcacagagctacattcga

SEQ ID NO: 166080 - DNA, 3829 bp, Homo sapiens
  Payload ID: 12691
  Gene Symbol: PHKB
  Gene Name: phosphorylase kinase, beta
  Uniprot ID: Q93100
  ENST ID: ENST00000566044
  CDS Start-End: 190-3450
cggcattgctgacaggcggccccgggggcggtggccaaggcggcgaccggagcgcgatggcgggggcggcgggactcacggcagaagtgagctggaaggtcttggagcgaagagctcggaccaagcgctcagttttaaaattgctatagcttagcctgcgacgcttatgattagagccaacaatttgaaatggcctgctcacctgatgcagtcgtctctccgtcttccgctttcttaaggtctggctcagtttatgaacctcttaaaagcattaatcttccaagacctgataatgaaactctctgggataagttggaccattattacagaattgtcaagtcaacattgctgctgtatcaaagtccaactaccggtctctttcccactaaaacatgcggtggtgaccagaaggccaagatccaggacagcctatactgcgctgctggggcctgggctttggctcttgcatacaggcgaattgatgatgacaagggaaggacccatgagctggagcactcagctataaaatgcatgagaggaattctctactgctatatgcgtcaggccgataaggtccagcagtttaagcaggatccacgcccaacaacatgtcttcactctgttttcaatgtgcatacaggagatgagttgctttcctatgaggaatatggtcatcttcagataaatgcagtgtcactttatctcctttaccttgtggaaatgatttcctcaggactccagattatctacaacactgatgaggtctcttttattcaaaaccttgtattttgtgtggaaagagtttaccgtgtgcctgactttggtgtctgggaaagaggaagcaaatataataatggcagcacagagctacattcgagctcggttggtttagcaaaagcagctctagaagcaattaatggattcaacctttttggcaaccagggctgttcgtggtcagttatatttgtggatctcgatgctcacaatcgcaacaggcaaactttgtgctcgctgttacccagagaatcaagatcacataatacagatgctgccctgctcccctgcatcagttatcctgcatttgccctggatgatgaagttctttttagccagacacttgataaagtggttagaaaattaaaaggaaaatatggatttaaacgtttcttgagagatgggtatagaacatcattggaagatcccaacagatgctactacaagccagctgaaattaagctatttgatggcattgaatgtgaatttcccatatttttcctttatatgatgattgatggagtttttagaggcaatcctaagcaagtacaggaatatcaggatcttttgactccagtacttcatcataccacagaaggatatcctgttgtaccaaagtactattatgtgccagctgactttgtagaatatgaaaaaaataaccctggtagtcaaaaacgatttcctagcaactgtggccgtgatggaaaactgtttctttggggacaagcactttatatcatcgcaaaactcctggctgatgaacttattagtcctaaagacattgatcctgtccagcgctatgtcccactaaaggatcaacgtaacgtgagcatgaggttttccaatcagggcccactggaaaatgacttggtagttcatgtggcacttatagcagaaagccaaagacttcaagtttttctgaacacatatggtattcaaactcaaactcctcaacaagtagaacccattcagatatggcctcagcaggagcttgtgaaagcttatttgcagctgggtatcaatgaaaagttaggactctctggaaggccagacaggcccattggctgcctcgggacatcaaagatttatcgcattctaggaaagactgtggtttgttacccgattattttcgacctaagtgatttctacatgtctcaggatgttttcctgctgatagatgacataaagaatgcgctgcagttcattaaacaatattggaaaatgcatggacgtccacttttccttgttctcatccgggaagacaatataagaggtagccggttcaaccccatattagatatgctggcagcccttaaaaaaggaataattggaggagtcaaagttcatgtggatcgtctacagacactaatatctggagctgtggtagaacaacttgatttcctacgaatcagtgacacagaagagcttccagaatttaagagttttgaggaactagaacctcccaaacattcaaaagtcaaacggcaaagcagcacccctagtgctcctgaactgggacagcagccggatgtcaacattagtgaatggaaggacaaacccacccacgaaattcttcaaaaactgaatgattgcagttgtctggctagccaagccatcctgctgggtatactgctcaaaagagaaggccccaacttcatcacaaaggaaggtaccgtttctgatcacattgagagagtctatagaagagctggcagccaaaaactttggtcggttgtacgccgtgcagcaagtcttttaagtaaagtagtggacagcctggccccatccattactaatgttttagtgcagggcaaacaggtaactctgggtgcctttgggcatgaagaagaagttatctctaatcctttgtctccaagagtgattcaaaacatcatctattataagtgtaacacccatgatgagagggaagcggtcattcagcaagaactggtcatccatattggctggatcatctccaataaccctgagttattcagtggcatgctgaaaatacgaatcgggtggatcatccatgccatggagtatgaacttcagatccgtggcggagacaagccagccttggacttgtatcagctgtcacctagtgaagttaaacagcttctgctggatattctgcagcctcaacagaatggaagatgttggctgaacaggcgtcagatcgatgggtctttgaatagaactcccaccgggttctatgaccgagtgtggcagattctggagcgcacgcccaatgggatcattgttgctgggaagcatttgcctcagcaaccaaccctgtcagatatgaccatgtatgagatgaatttctctctccttgttgaagacacgttgggaaatattgaccagccacagtacagacagatcgttgtagagttacttatggttgtatccattgtactggaaagaaaccccgagctagaatttcaagacaaagtagatctagacagactggtcaaagaagcatttaatgaatttcaaaaagatcagagtcggctaaaggaaattgaaaaacaagatgacatgacttccttttacaacactcctcccctgggaaaaagaggaacatgcagctatttgacaaaggcggtgatgaatctgctgctggaaggagaagtcaagccaaacaatgatgacccgtgtctgattagctagtggggaaggtgtaggaagctctgttgagacacatgttctgaagtgtgttgtgtttcatgttcaagcttaatcaaggcagccattaatatacgaactgagcatgctggggaggtgaatgccacatccttggcggggttatggacctcttgcatgtcatagccaatctaacggtaatggtaaatgcttttaatcaagcaggaaaaagttctcatgattatgccaactataatagtaatcctcactgagtgataaaaatagtttatgaattgaaaatttgccgctgcatgttgtatgatcaaatagttcatcaaaatgaatctttgctctttggactgaattcttaccatactgccattaaaataaatttgccaactagtaa

SEQ ID NO: 166081 - DNA, 697 bp, Homo sapiens
  Payload ID: 12691
  Gene Symbol: PHKB
  Gene Name: phosphorylase kinase, beta
  ENST ID: ENST00000563376
  CDS Start-End: 247-697
gatggcgggggcggcgggactcacggcagaagtgagctggaaggtcttggagcgaagagctcggaccaagcgctcagaaattattttcggacgggcgcggtggctcacgcctgtaatcccagcactttgggaggccgaggcgggcggatcacctgaggtcaggagttcgagaccagcctggccaacctgttttaaaattgctatagcttagcctgcgacgcttatgattagagccaacaatttgaaatggcctgctcacctgatgcagtcgtctctccgtcttccgctttcttaaggtctggctcagtttatgaacctcttaaaagcattaatcttccaagacctgataatgaaactctctgggataagttggaccattattacagaattgtcaagtcaacattgctgctgtatcaaagtccaactaccggtctctttcccactaaaacatgcggtggtgaccagaaggccaagatccaggacagcctatactgcgctgctggggcctgggctttggctcttgcatacaggcgaattgatgatgacaagggaaggacccatgagctggagcactcagctataaaatgcatgagaggaattctctactgctatatgcgtcaggccgataaggtccagcagtttaagcaggatccacgcccaacaacatgtcttcactctgttttcaatgtgcatacag

SEQ ID NO: 166082 - DNA, 499 bp, Homo sapiens
  Payload ID: 12691
  Gene Symbol: PHKB
  Gene Name: phosphorylase kinase, beta
  ENST ID: ENST00000568439
  CDS Start-End: 1-229
aaaaaataaccctggtagtcaaaaacgatttcctagcaactgtggccgtgatggaaaactgtttctttggggacaagcactttatatcatcgcaaaactcctggctgatgaacttattagtcctaaagacattgatcctgtccagcgctatgtcccactaaaggatcaacgtaacgtgagcatgaggttttccaatcaggtagacaacgtgagtctcagagaggtttagtaatctctccaaggtcccacagttgtcaagtgacagaaccaatatgaaggcgttaactgaagaatgaaaggaaggagggaatgtcaagcatttggaagcagtgatttttgtaatggtgtgaaggagttaacaggagaaatagcttgttcttgaacagcctggctgaatatcacatcataggaacacagttgcaccggtgccttaggatgctgagagttctgtgaaagtgatctgaaaaattaaacacaaagatgccccatcagtacaaaa

SEQ ID NO: 166083 - DNA, 412 bp, Homo sapiens
  Payload ID: 12691
  Gene Symbol: PHKB
  Gene Name: phosphorylase kinase, beta
  ENST ID: ENST00000567200
  CDS Start-End: 382-412
aaattgcaacgtcatgacttgtggcgttattaaaacttcctgtattcctggttggctggatataatcttgaacaaaaggcatgcacttaaacaggaaaggtgaaaggcggaatgcaggttttcagctaaggagcttcccttttaaagaattgatgaagtgtcattattgggggtgggtgtgaaaggtgttagctaggaaaattaactttgcacttgcattgatattaagaaattattttcggacgggcgcggtggctcacgcctgtaatcccagcactttgggaggccgaggcgggcggatcacctgaggtcaggagttcgagaccagcctggccaacctgcttagcctgcgacgcttatgattagagccaacaatttgaaatggcctgctcacctgatgcagtcgtctctc

SEQ ID NO: 166084 - DNA, 697 bp, Homo sapiens
  Payload ID: 12691
  Gene Symbol: PHKB
  Gene Name: phosphorylase kinase, beta
  ENST ID: ENST00000564711
  CDS Start-End: 1-236
gacagatcgttgtagagttacttatggttgtatccattgtactggaaagaaaccccgagctagaatttcaagacaaagtagatctagacagactggtcaaagaagcatttaatgaatttcaaaaagatcagagtcggctaaaggaaattgaaaaacaactgacacagattttacctgtcaactctttacaaacagaagatcgaatgccttgcctactgttttcctttgtaggatgacatgacttccttttacaacactcctcccctgggaaaaagaggaacatgcagctatttgacaaaggcggtgatgaatctgctgctggaaggagaagtcaagccaaacaatgatgacccgtgtctgattagctagtggggaaggtgtaggaagctctgttgagacacatgttctgaagtgtgttgtgtttcatgttcaagcttaatcaaggcagccattaatatacgaactgagcatgctggggaggtgaatgccacatccttggcggggttatggacctcttgcatgtcatagccaatctaacggtaatggtaaatgcttttaatcaagcaggaaaaagttctcatgattatgccaactataatagtaatcctcactgagtgataaaaatagtttatgaattgaaaatttgccgctgcatgttgtatgatcaaatagttcatcaaaatgaatctttgctctt

SEQ ID NO: 166085 - DNA, 1375 bp, Homo sapiens
  Payload ID: 12691
  Gene Symbol: PHKB
  Gene Name: phosphorylase kinase, beta
  ENST ID: ENST00000566275
  CDS Start-End: 1-633
tcaaaagtcaaacggcaaagcagcacccctagtgctcctgaactgggacagcagccggatgtcaacattagtgaatggaaggacaaacccacccacgaaattcttcaaaaactgaatgattgcagttgtctggctagccaagccatcctgctgggtatactgctcaaaagagaaggccccaacttcatcacaaaggaaggtaccgtttctgatcacattgagagagtctatagaagagctggcagccaaaaactttggtcggttgtacgccgtgcagcaagtcttttaagtaaagtagtggacagcctggccccatccattactaatgttttagtgcagggcaaacaggtaactctgggtgcctttgggcatgaagaagaagttatctctaatcctttgtctccaagagtgattcaaaacatcatctattataagtgtaacacccatgatgagagggaagcggtcattcagcaagaactggtcatccatattggctggatcatctccaataaccctgagttattcagtggcatgctgaaaatacgaatcgggtttgcaaaggccgtgtgctctcacaagagaagttcaccttggaggagggggccctttcagccatggttgagtcccctgtaggcccagtggaatgatcccaaagcatctcatatggaaactccatctcagaatcccattgggatgatctcttgccatctaacatgatgtcacctctccgtcacctggtagacactcacgacacctgtggcaaacaccctaaaatcccttcagacctacgcccacagcactcttccaccacagtaataaaggcttgggaatgctgtttctgccctagggatatcagacaacttcagataactgtcatcctgtctgtggggcttgtgatagtgcccctctgaagagtaaaaagatacttttgtgtcttctatgtttttattagacttcatcctcaataaattatactaaggcctcaacccctttaagtgaatgggccccttgcatatttgtttattagcagcagcaaatacatactcagtatgtttctttacaaattttaccttgaattagtccctggaaggtttttagtttgcttaaaattggtgagcaaattattcatttataaagtctttgaatgtcaaatttcctataaattgttgaacatgtaactgtttctgagttagtcctttgtgtattgtagtggttgtagcacaattttaaaagaaagggaggggatttatagaatgtattctttttttactgccttatggtacaataagcacatcagactcattcttacttggctttttgctattgtttctctcttttaaatgttaattatgattaaagagattgattgattggt

SEQ ID NO: 166086 - DNA, 1493 bp, Homo sapiens
  Payload ID: 12691
  Gene Symbol: PHKB
  Gene Name: phosphorylase kinase, beta
  ENST ID: ENST00000564873
  CDS Start-End: 1273-1493
gttctccttacgttttgggcttttcctatttatgaagttcttagttgtctgttgtgcacactgacttttttttttttttttttggagaaagtaaatctaatttctgaaaatctaatttcagaaatcatacaccgaacactctgtttttttataccttacaaaaagttcagctttatatacttagggttatagtaaaattaccatctatgaagtatgagataattttttcaaaaagtagtccttagtactactaagaatcaataaagtgacttggaatagtcacatgtatttgtttcacactttttcttaaattgtttttgtgtgatatagaaatactgagttggctactaacgatgtggctatctggatataaaaagtgttattggattggttatgtctgaacaaagagaataactggagttttcttacagggacctgagtactgcccccaacatatatttttgcaacatttctctttaactttcataagctcatagagttgattttcttcgtcagtctttgtttcctctgaaatgcatgtcataacagtaagctttgaaaaccttaattctcttttcttagctgagaaaaaaaattctagtgttaactgttgttgagtgcagttatttaaatccacttttatgtgcaaagtgcatagtatcaatgttgaatgttcctgtatgtttacatcatagtagtaaagagataccacttgaagttattcctccaaattaatagttaaatttgaggtttcagattcttgtaagtatatgaagtacagaggataaagttaataactcgagttaataacttcctgtatcattaaaagcaatcaacttgattctgtttgttacttttagaagaatatataaatggagctttgttaaacacttgactaacctgactccagtatagagtcctccccacagagttctgagcattgttacatagtagcataattacttcactgcacaacagaggatactacttttatgtaatgtctaataagtggatattatatagtttctatctcatccatatgagcaagtgtaatttatcaaagcaaagaaaatcacattttcaagtcataaaagagaaaataaaattataatgatcctcagttactgcctttgttgcatactgcatcatgttaataactgctcacactgctttcaattaatttaacactgattgcttctaacctttactaaacagttttaaaattgctatagcttagcctgcgacgcttatgattagagccaacaatttgaaatggcctgctcacctgatgcagtcgtctctccgtcttccgctttcttaaggtctggctcagtttatgaacctcttaaaagcattaatcttccaagacctgataatgaaactctctgggataagttggaccattattacagaattgtcaagtcaacattgctgctgtatcaaagtccaactaccggtctctttcccactaaaacatgcggtggtgaccagaa

SEQ ID NO: 166087 - DNA, 797 bp, Homo sapiens
  Payload ID: 12691
  Gene Symbol: PHKB
  Gene Name: phosphorylase kinase, beta
  ENST ID: ENST00000570047
  CDS Start-End: 1-563
tcaagtcaacattgctgctgtatcaaagtccaactaccggtctctttcccactaaaacatgcggtggtgaccagaaggccaagatccaggacagcctatactgcgctgctggggcctgggctttggctcttgcatacaggcgaattgatgatgacaagggaaggacccatgagctggagcactcagctataaaatgcatgagaggaattctctactgctatatgcgtcaggccgataaggtccagcagtttaagcaggatccacgcccaacaacatgtcttcactctgttttcaatgtgcatacaggagatgagttgctttcctatgaggaatatggtcatcttcagataaatgcagtgtcactttatctcctttaccttgtggaaatgatttcctcaggactccagattatctacaacactgatgaggtctcttttattcaaaaccttgtattttgtgtggaaagagtttaccgtgtgcctgactttggtgtctgggaaagaggaagcaaatataataatggcagcacagagctacattcgaggatttcctgcacttggtagacaaaagcaacaaattgctgaacaaaaagagatgcagcttctgcctcctccagcctctgttgagttgagaatcagcaggctcggttggtttagcaaaagcagctctagaagcaattaatggattcaacctttttggcaaccagggctgttcgtggtcagttatatttgtggatctcgatgctcacaatcgcaacaggcaaactttgtgctcgctgttacccagagaatcaagat

SEQ ID NO: 166088 - DNA, 1431 bp, Homo sapiens
  Payload ID: 12692
  Gene Symbol: PHKG1
  Gene Name: phosphorylase kinase, gamma 1 (muscle)
  Uniprot ID: Q16816
  ENST ID: ENST00000297373
  CDS Start-End: 196-1359
acgttagcctccggtcatcaaatagcaaaacccaaaacaacagcagatgatatcttccaagtgtctgctcgggacacggcttcagccctctgtggtcccctctccccggggggctttgggattcttgtcaagctccttcaagagcctgcaagcacttaaccagccacccagagttccctcactgaagatctgagcatgacccgggacgaggcactgccggactctcattctgcacaggacttctatgagaattatgagcccaaagagatcctgggcaggggcgttagcagtgtggtcaggcgatgcatccacaagcccacgagccaggagtacgccgtgaaggtcatcgacgtcaccggtggaggcagcttcagcccggaggaggtgcgggagctgcgagaagccacgctgaaggaggtggacatcctgcgcaaggtctcagggcaccccaacatcatacagctgaaggacacttatgagaccaacactttcttcttcttggtgtttgacctgatgaagagaggggagctctttgactacctcactgagaaggtcaccttgagtgagaaggaaaccagaaagatcatgcgagctctgctggaggtgatctgcaccttgcacaaactcaacatcgtgcaccgggacctgaagcccgagaacattctcttggatgacaacatgaacatcaagctcacagactttggcttttcctgccagctggagccgggagagaggctgcgagaggtctgcgggacccccagttacctggcccctgagattatcgagtgctccatgaatgaggaccacccgggctacgggaaagaggtggacatgtggagcactggcgtcatcatgtacacgctgctggccggctccccgcccttctggcaccggaagcagatgctgatgctgaggatgatcatgagcggcaactaccagtttggctcgcccgagtgggatgattactcggacaccgtgaaggacctggtctcccgattcctggtggtgcaaccccagaaccgctacacagcggaagaggccttggcacaccccttcttccagcagtacttggtggaggaagtgcggcacttcagcccccgggggaagttcaaggtgatcgctctgaccgtgctggcttcagtgcggatctactaccagtaccgccgggtgaagcctgtgacccgggagatcgtcatccgagacccctatgccctccggcctctgcgccggctcatcgacgcctacgctttccgaatctatggccactgggtgaagaaggggcagcagcagaaccgggcagcccttttcgagaacacacccaaggccgtgctcctctccctggccgaggaggactactgaggggctggccagtcagggagggctagggggcaggtggggaggggaagccatggaaatacaagtcaaaggggt

SEQ ID NO: 166089 - DNA, 580 bp, Homo sapiens
  Payload ID: 12692
  Gene Symbol: PHKG1
  Gene Name: phosphorylase kinase, gamma 1 (muscle)
  ENST ID: ENST00000395428
  CDS Start-End: 152-418
agatgatatcttccaagtgtctgctcgggacacggcttcagccctctgtggtcccctctccccggggggctttgggattcttgtcaagctccttcaagagcctgcaagcacttaaccagccacccagagttccctcactgaagatctgagcatgacccgggacgaggcactgccggactctcattctgcacaggacttctatgagaattatgagcccaaagagatcctgggcaggggcgttagcagtgtggtcaggcgatgcatccacaagcccacgagccaggagtacgccgtgaaggtcatcgacgtcaccggtggaggcagcttcagcccggaggaggtgcgggagctgcgagaagccacgctgaaggaggtggacatcctgcgcaaggtctcagggcaccccaacatcagatgaagagaggggagctctttgactacctcactgagaaggtcaccttgagtgagaaggaaaccagaaagatcatgcgagctctgctggaggtgatctgcaccttgcacaaactcaacatcgtgcaccgggacctgaagcccgagaacattctcttggatgacaaca

SEQ ID NO: 166090 - DNA, 483 bp, Homo sapiens
  Payload ID: 12692
  Gene Symbol: PHKG1
  Gene Name: phosphorylase kinase, gamma 1 (muscle)
  ENST ID: ENST00000446428
  CDS Start-End: 132-483
ctgctcgggacacggcttcagccctctgtggtcccctctccccggggggctttgggattcttgtcaagctccttcaagagcctgcaagcacttaaccagccacccagagttccctcactgaagatctgagcatgacccgggacgaggcactgccggactctcattctgcacaggacttctatgagaattatgagcccaaagagatcctgggcaggatgaagagaggggagctctttgactacctcactgagaaggtcaccttgagtgagaaggaaaccagaaagatcatgcgagctctgctggaggtgatctgcaccttgcacaaactcaacatcgtgcaccgggacctgaagcccgagaacattctcttggatgacaacatgaacatcaagctcacagactttggcttttcctgccagctggagccgggagagaggctgcgaggtctcccgattcctggtggtgcaaccccagaaccgctac

SEQ ID NO: 166091 - DNA, 582 bp, Homo sapiens
  Payload ID: 12692
  Gene Symbol: PHKG1
  Gene Name: phosphorylase kinase, gamma 1 (muscle)
  ENST ID: ENST00000432123
  CDS Start-End: 146-582
tatcttccaagtgtctgctcgggacacggcttcagccctctgtggtcccctctccccggggggctttgggattcttgtcaagctccttcaagagcctgcaagcacttaaccagccacccagagttccctcactgaagatctgagcatgacccgggacgaggcactgccggactctcattctgcacaggacttctatgagaattatgagcccaaagagatcctgggcaggatgaagagaggggagctctttgactacctcactgagaaggtcaccttgagtgagaaggaaaccagaaagatcatgcgagctctgctggaggtgatctgcaccttgcacaaactcaacatcgtgcaccgggacctgaagcccgagaacattctcttggatgacaacatgaacatcaagctcacagactttggcttttcctgccagctggagccgggagagaggctgcgagaggtctgcgggacccccagttacctggcccctgagattatcgagtgctccatgaatgaggaccacccgggctacgggaaagaggtggacatgtggagcactggcgtcatcatgtacacgctgct

SEQ ID NO: 166092 - DNA, 2139 bp, Homo sapiens
  Payload ID: 12692
  Gene Symbol: PHKG1
  Gene Name: phosphorylase kinase, gamma 1 (muscle)
  ENST ID: ENST00000537360
  CDS Start-End: 196-1368
acgttagcctccggtcatcaaatagcaaaacccaaaacaacagcagatgatatcttccaagtgtctgctcgggacacggcttcagccctctgtggtcccctctccccggggggctttgggattcttgtcaagctccttcaagagcctgcaagcacttaaccagccacccagagttccctcactgaagatctgagcatgacccgggacgaggcactgccggactctcattctgcacaggacttctatgagaattatgagcccaaagagatcctgggcaggggcgttagcagtgtggtcaggcgatgcatccacaagcccacgagccaggagtacgccgtgaaggtcatcgacgtcaccggtggaggcagcttcagcccggaggaggtgcgggagctgcgagaagccacgctgaaggaggtggacatcctgcgcaaggtctcagggcaccccaacatcatacagctgaaggacacttatgagaccaacactttcttcttcttggtgtttgaccttttccacaggatgaagagaggggagctctttgactacctcactgagaaggtcaccttgagtgagaaggaaaccagaaagatcatgcgagctctgctggaggtgatctgcaccttgcacaaactcaacatcgtgcaccgggacctgaagcccgagaacattctcttggatgacaacatgaacatcaagctcacagactttggcttttcctgccagctggagccgggagagaggctgcgagaggtctgcgggacccccagttacctggcccctgagattatcgagtgctccatgaatgaggaccacccgggctacgggaaagaggtggacatgtggagcactggcgtcatcatgtacacgctgctggccggctccccgcccttctggcaccggaagcagatgctgatgctgaggatgatcatgagcggcaactaccagtttggctcgcccgagtgggatgattactcggacaccgtgaaggacctggtctcccgattcctggtggtgcaaccccagaaccgctacacagcggaagaggccttggcacaccccttcttccagcagtacttggtggaggaagtgcggcacttcagcccccgggggaagttcaaggtgatcgctctgaccgtgctggcttcagtgcggatctactaccagtaccgccgggtgaagcctgtgacccgggagatcgtcatccgagacccctatgccctccggcctctgcgccggctcatcgacgcctacgctttccgaatctatggccactgggtgaagaaggggcagcagcagaaccgggcagcccttttcgagaacacacccaaggccgtgctcctctccctggccgaggaggactactgaggggctggccagtcagggagggctagggggcaggtggggaggggaagccatggaaatacaagtcaaaggggtgagatgcgtgcaggcctctgcagaaggagcacttggccctggccaggaacccctggaactgaggccacgatcccctctcaaaggctgtgcacaagggaagtgggtgttcccaccacacagcaatacctgcaggctggggcaggccctgggtgggcagagatcacacgtggcctgagaaccaggaaccccctgctcctctacttcctagatgagccaccatctccatttctctttaggggaggcccagagttactgacactcaggctttcttcccttagggtcacagggtgaggatcaaagacacaaatgtctgagatacacaattgcaggagattttattggccccatgacatccagtgacagtgtgggagcaggctactctccagggacatgtttttggaggcatatggagaagggggcccaggcgaggtggctcacacctgtaatcccagcactttgggaggtcgaggtgggaggatcgcttgaggccaggagttcgagaccaccctgggcaacagagcgagatcccatcactacaaaaattcaaaaaattagccaggcatggtggtgcacacttgtagtcccagctactcaggaggctgaggtgggagaattgcttgggcccaggaattcaaggctagagtgagccgtgatcaccagtgcactctagcctgggcaacagagaaagaccctgtctca

SEQ ID NO: 166093 - DNA, 2226 bp, Homo sapiens
  Payload ID: 12692
  Gene Symbol: PHKG1
  Gene Name: phosphorylase kinase, gamma 1 (muscle)
  Uniprot ID: Q16816
  ENST ID: ENST00000452681
  CDS Start-End: 196-1455
acgttagcctccggtcatcaaatagcaaaacccaaaacaacagcagatgatatcttccaagtgtctgctcgggacacggcttcagccctctgtggtcccctctccccggggggctttgggattcttgtcaagctccttcaagagcctgcaagcacttaaccagccacccagagttccctcactgaagatctgagcatgacccgggacgaggcactgccggactctcattctgcacaggacttctatgagaattatgagcccaaagagatcctgggcaggggcgttagcagtgtggtcaggcgatgcatccacaagcccacgagccaggagtacgccgtgaaggtcatcgacgtcaccggtggaggcagcttcagcccggaggaggtgcgggagctgcgagaagccacgctgaaggaggtggacatcctgcgcaaggtctcagggcaccccaacatcatacagctgaaggacacttatgagaccaacactttcttcttcttggtgtttgacctatgggaagacactgatacaatggagatggaacagaaatggtgcttgggctgggactctcccaagtccaccaacttcagggcccagggcagggcaaggatgaagagaggggagctctttgactacctcactgagaaggtcaccttgagtgagaaggaaaccagaaagatcatgcgagctctgctggaggtgatctgcaccttgcacaaactcaacatcgtgcaccgggacctgaagcccgagaacattctcttggatgacaacatgaacatcaagctcacagactttggcttttcctgccagctggagccgggagagaggctgcgagaggtctgcgggacccccagttacctggcccctgagattatcgagtgctccatgaatgaggaccacccgggctacgggaaagaggtggacatgtggagcactggcgtcatcatgtacacgctgctggccggctccccgcccttctggcaccggaagcagatgctgatgctgaggatgatcatgagcggcaactaccagtttggctcgcccgagtgggatgattactcggacaccgtgaaggacctggtctcccgattcctggtggtgcaaccccagaaccgctacacagcggaagaggccttggcacaccccttcttccagcagtacttggtggaggaagtgcggcacttcagcccccgggggaagttcaaggtgatcgctctgaccgtgctggcttcagtgcggatctactaccagtaccgccgggtgaagcctgtgacccgggagatcgtcatccgagacccctatgccctccggcctctgcgccggctcatcgacgcctacgctttccgaatctatggccactgggtgaagaaggggcagcagcagaaccgggcagcccttttcgagaacacacccaaggccgtgctcctctccctggccgaggaggactactgaggggctggccagtcagggagggctagggggcaggtggggaggggaagccatggaaatacaagtcaaaggggtgagatgcgtgcaggcctctgcagaaggagcacttggccctggccaggaacccctggaactgaggccacgatcccctctcaaaggctgtgcacaagggaagtgggtgttcccaccacacagcaatacctgcaggctggggcaggccctgggtgggcagagatcacacgtggcctgagaaccaggaaccccctgctcctctacttcctagatgagccaccatctccatttctctttaggggaggcccagagttactgacactcaggctttcttcccttagggtcacagggtgaggatcaaagacacaaatgtctgagatacacaattgcaggagattttattggccccatgacatccagtgacagtgtgggagcaggctactctccagggacatgtttttggaggcatatggagaagggggcccaggcgaggtggctcacacctgtaatcccagcactttgggaggtcgaggtgggaggatcgcttgaggccaggagttcgagaccaccctgggcaacagagcgagatcccatcactacaaaaattcaaaaaattagccaggcatggtggtgcacacttgtagtcccagctactcaggaggctgaggtgggagaattgcttgggcccaggaattcaaggctagagtgagccgtgatcaccagtgcactctagcctgggcaacagagaaagaccctgtctca

SEQ ID NO: 166094 - DNA, 1536 bp, Homo sapiens
  Payload ID: 12693
  Gene Symbol: PHKG2
  Gene Name: phosphorylase kinase, gamma 2 (testis)
  ENST ID: ENST00000328273
  CDS Start-End: 70-1302
cggcgacagcgcagctcgcgtcgaccctggctcctctgcctgccccctcaggcccccgcctccttcaggatgacgctggacgtggggccggaggatgagctgcccgactgggccgccgccaaagagttttaccagaagtacgaccctaaggacgtcatcggcagaggagtgagctctgtggtccgccgttgtgttcatcgagctactggccacgagtttgcggtgaagattatggaagtgacagctgagcggctgagtcctgagcagctggaggaggtgcgggaagccacacggcgagagacacacatccttcgccaggtcgccggccacccccacatcatcaccctcatcgattcctacgagtcttctagcttcatgttcctggtgtttgacctgatgcggaagggagagctgtttgactatctcacagagaaggtggccctctctgaaaaggaaaccaggtccatcatgcggtctctgctggaagcagtgagctttctccatgccaacaacattgtgcatcgagatctgaagcccgagaatattctcctagatgacaatatgcagatccgactttcagatttcgggttctcctgccacttggaacctggcgagaagcttcgagagttgtgtgggaccccagggtatctagcgccagagatccttaaatgctccatggatgaaacccacccaggctatggcaaggaggtcgaccttctctttcccagctgggcctgtggggtgatcttgttcacactcctggctggctcgccacccttctggcaccggcggcagatcctgatgttacgcatgatcatggagggccagtaccagttcagttcccccgagtgggatgaccgttccagcactgtcaaagacctgatctccaggctgctgcaggtggatcctgaggcacgcctgacagctgagcaggccctacagcaccccttctttgagcgttgtgaaggcagccaaccctggaacctcaccccccgccagcggttccgggtggcagtgtggacagtgctggctgctggacgagtggccctaagcacccatcgtgtacggccactgaccaagaatgcactgttgagggacccttatgcgctgcggtcagtgcggcacctcatcgacaactgtgccttccggctctacgggcactgggtaaagaaaggggagcagcagaaccgggcggctctctttcagcaccggccccctgggccttttcccatcatgggccctgaagaggagggagactctgctgctataactgaggatgaggccgtgcttgtgctgggctaggacctcaaccccagggattcccaggaagcagaactctccagaagaagggttttgatcattccagctcctctgggctctggcctctggcctcaggcccactaatgatcctgctaccctcttgaagaccagcccggtacctctctccccactggccaggactctgagatcagagctggggtggaagggagccattctgaacgccacgcctggcccggtcagtgctgcatgcactgc

SEQ ID NO: 166095 - DNA, 1566 bp, Homo sapiens
  Payload ID: 12693
  Gene Symbol: PHKG2
  Gene Name: phosphorylase kinase, gamma 2 (testis)
  Uniprot ID: P15735
  ENST ID: ENST00000424889
  CDS Start-End: 211-1335
aattgggcggccggtttccaattggaagggcttctgagcctcagtcttcgggcggcgctgaccattggcgggcaggatggaggcggagccttgggttgtcgcccgccgccgggggttaaggtgagcgactgcaggcaaacccggcgacagcgcagctcgcgtcgaccctggctcctctgcctgccccctcaggcccccgcctccttcaggatgacgctggacgtggggccggaggatgagctgcccgactgggccgccgccaaagagttttaccagaagtacgaccctaaggacgtcatcggcagaggagtgagctctgtggtccgccgttgtgttcatcgagctactggccacgagtttgcggtgaagattatggaagtgacagctgagcggctgagtcctgagcagctggaggaggtgcgggaagccacacggcgagagacacacatccttcgccaggtcgccggccacccccacatcatcaccctcatcgattcctacgagtcttctagcttcatgttcctggtgtttgacctgatgcggaagggagagctgtttgactatctcacagagaaggtggccctctctgaaaaggaaaccaggtccatcatgcggtctctgctggaagcagtgagctttctccatgccaacaacattgtgcatcgagatctgaagcccgagaatattctcctagatgacaatatgcagatccgactttcagatttcgggttctcctgccacttggaacctggcgagaagcttcgagagttgtgtgggaccccagggtatctagcgccagagatccttaaatgctccatggatgaaacccacccaggctatggcaaggaggtcgacctctgggcctgtggggtgatcttgttcacactcctggctggctcgccacccttctggcaccggcggcagatcctgatgttacgcatgatcatggagggccagtaccagttcagttcccccgagtgggatgaccgttccagcactgtcaaagacctgatctccaggctgctgcaggtggatcctgaggcacgcctgacagctgagcaggccctacagcaccccttctttgagcgttgtgaaggcagccaaccctggaacctcaccccccgccagcggttccgggtggcagtgtggacagtgctggctgctggacgagtggccctaagcacccatcgtgtacggccactgaccaagaatgcactgttgagggacccttatgcgctgcggtcagtgcggcacctcatcgacaactgtgccttccggctctacgggcactggataaggaagcagtggattggaaagctgatggcttgtgtatgatgatgctactaataatgacatattccaggcagaaatcccctgcttctgcttcccatggtcacttgtgccaggcccggttcctcttctccctggggctcaaacctggtagctgccccctctcaccaatacaagccttgtgaagatcctggagcagggcacaagccgctgacgtctgctccagtgagaagccctgctggcggcagaaaatgagcgcgtggcagaagaggtcca

SEQ ID NO: 166096 - DNA, 726 bp, Homo sapiens
  Payload ID: 12693
  Gene Symbol: PHKG2
  Gene Name: phosphorylase kinase, gamma 2 (testis)
  ENST ID: ENST00000563607
  CDS Start-End: 239-502
cctcctgggcacatctccccactcccctccctgccctgccatcctcccgcccccaggctcttctgcggggtctccccagtccgggtccttcccccacccccccccaccccccaggaccctggcgccccagctgcaagggctgcgcccccgggagccgccatgcgggtcgtctcagagcctgtgggcctccctgccctcactgccctcctcctccgcgcaggcccccgcctccttcaggatgacgctggacgtggggccggaggatgagctgcccgactgggccgccgccaaagagttttaccagaagtacgaccctaaggacgtcatcggcagaggagtgagctctgtggtccgccgttgtgttcatcgagctactggccacgagtttgcggtgaagattatggaagtgacagctgagcggctgagtcctgagcagctggaggagtcaccctcatcgattcctacgagtcttctagcttcatgttcctggtgtttgacctgatgcggaagggagagctgtttgactatctcacagagaaggtggccctctctgaaaaggaaaccaggtccatcatgcggtctctgctggaagcagtgagctttctccatgccaacaacattgtgcatcgagatctgaagcccgagaatattctcctagatgacaatatgcagatccgactttcagatttcgggttctcctgccacttggaacctggcgagaagctt

SEQ ID NO: 166097 - DNA, 908 bp, Homo sapiens
  Payload ID: 12693
  Gene Symbol: PHKG2
  Gene Name: phosphorylase kinase, gamma 2 (testis)
  ENST ID: ENST00000565924
  CDS Start-End: 145-908
agccccaattgggcggccggtttccaattggaagggcttctgagcctcagtcttcgggcggcgctgaccattggcgggcaggatggaggcggagccttgggttgtcgcccgccgccgggggttaaggcccccgcctccttcaggatgacgctggacgtggggccggaggatgagctgcccgactgggccgccgccaaagagttttaccagaagtacgaccctaaggacgtcatcggcagaggagtgagctctgtggtccgccgttgtgttcatcgagctactggccacgagtttgcggtgaagattatggaagtgacagctgagcggctgagtcctgagcagctggaggaggtgcgggaagccacacggcgagagacacacatccttcgccaggtcgccggccacccccacatcatcaccctcatcgattcctacgagtcttctagcttcatgttcctggtgtttgacctgatgcggaagggagagctgtttgactatctcacagagaaggtggccctctctgaaaaggaaaccaggtccatcatgcggtctctgctggaagcagtgagctttctccatgccaacaacattgtgcatcgagatctgaagcccgagaatattctcctagatgacaatatgcagatccgactttcagatttcgggttctcctgccacttggaacctggcgagaagcttcgagagttgtgtgggaccccagggtatctagcgccagagatccttaaatgctccatggatgaaacccacccaggctatggcaaggaggtcgacctctgggcctgtggggtgatcttgttcacactcctggctggctcgccacccttctggcaccggcggcagatcctgatgttacgcatgatcatggagggccagtaccagttcagttcccc

SEQ ID NO: 166098 - DNA, 5539 bp, Homo sapiens
  Payload ID: 12693
  Gene Symbol: PHKG2
  Gene Name: phosphorylase kinase, gamma 2 (testis)
  Uniprot ID: P15735
  ENST ID: ENST00000563588
  CDS Start-End: 240-1460
agccgagcgccgactcacgccccagccccaattgggcggccggtttccaattggaagggcttctgagcctcagtcttcgggcggcgctgaccattggcgggcaggatggaggcggagccttgggttgtcgcccgccgccgggggttaaggtgagcgactgcaggcaaacccggcgacagcgcagctcgcgtcgaccctggctcctctgcctgccccctcaggcccccgcctccttcaggatgacgctggacgtggggccggaggatgagctgcccgactgggccgccgccaaagagttttaccagaagtacgaccctaaggacgtcatcggcagaggagtgagctctgtggtccgccgttgtgttcatcgagctactggccacgagtttgcggtgaagattatggaagtgacagctgagcggctgagtcctgagcagctggaggaggtgcgggaagccacacggcgagagacacacatccttcgccaggtcgccggccacccccacatcatcaccctcatcgattcctacgagtcttctagcttcatgttcctggtgtttgacctgatgcggaagggagagctgtttgactatctcacagagaaggtggccctctctgaaaaggaaaccaggtccatcatgcggtctctgctggaagcagtgagctttctccatgccaacaacattgtgcatcgagatctgaagcccgagaatattctcctagatgacaatatgcagatccgactttcagatttcgggttctcctgccacttggaacctggcgagaagcttcgagagttgtgtgggaccccagggtatctagcgccagagatccttaaatgctccatggatgaaacccacccaggctatggcaaggaggtcgacctctgggcctgtggggtgatcttgttcacactcctggctggctcgccacccttctggcaccggcggcagatcctgatgttacgcatgatcatggagggccagtaccagttcagttcccccgagtgggatgaccgttccagcactgtcaaagacctgatctccaggctgctgcaggtggatcctgaggcacgcctgacagctgagcaggccctacagcaccccttctttgagcgttgtgaaggcagccaaccctggaacctcaccccccgccagcggttccgggtggcagtgtggacagtgctggctgctggacgagtggccctaagcacccatcgtgtacggccactgaccaagaatgcactgttgagggacccttatgcgctgcggtcagtgcggcacctcatcgacaactgtgccttccggctctacgggcactgggtaaagaaaggggagcagcagaaccgggcggctctctttcagcaccggccccctgggccttttcccatcatgggccctgaagaggagggagactctgctgctataactgaggatgaggccgtgcttgtgctgggctaggacctcaaccccagggattcccaggaagcagaactctccagaagaagggttttgatcattccagctcctctgggctctggcctctggcctcaggcccactaatgatcctgctaccctcttgaagaccagcccggtacctctctccccactggccaggactctgagatcagagctggggtggaagggagccattctgaacgccacgcctggcccggtcagtgctgcatgcactgcatatgaaataaaatctgctacacgccagggagaacaggtgtcctgtgtctgtctggcttgggcaggaaagcccagaaggtgctcagcagggtgcagggatggtgccattctggcccagacctttattggggaaaatgttgggggtcacttggtcttgctcttgcctttacccggaggtagctggaagggccgctctagtgcagtcaacttgctgctgagcctttcctcgctggccttgagccgctcctccaccagcccctggagctgctccagctctttgttcacttgggtcttgatgtaggctcggaggacgtggatgtggcctgcaggggcagggaagaaggggcagggtgaggagagatgctgtctggcaatggggggatggtccctagttgggcaaacagtccccaaatttcccctggtggggatatagaggtagcaatgttgtttccctttaggaaatgttagcaagcccttgtgtgagaggtagttgggtagggtggctatgctggactttgcagcttcaaattctgatccctactcagtagctgtgtgaccttaggcaggttatttaacctatctgtgcctcagtttccttgtatgaaatgtggatagtgatacctagcacataggattgagggaggattaaatgagttaatttatgtaaaatgcttagagcagggcatgcactgcacacctattgccaagtatgtgctggctgttattgtcattggctttctctttttttttttttttttgagatggagtcttgctttatcccccaggctggagtgcagtggcagcgatctcagctcactgcaagctctgcctcccaggttcatgccattctcctgcctcagcctcccagtagctgggactacaggcacccgccaccacgcccggctaactttttgtatttttagtagagacggggtttcacagtgttagccaggatggactcgatctcctgacctcgtgatccgcctgcctcagcctcccaaagtgctgggattacagttgtgagccactgcacctggcctgttctttgtttttttttaactcttaagttctgggatacgagcagaacatgcaggtttgctacgtaggtatacatgggccatggtggtttgctttacccatcaacccatcatataggttttaagccaccgtcattggctttctaatgatcatttctctggagccacttcagctgtgctttttgtttgtttgtttgtttgttttgagacagagtcttgctctgttgcccaggctggagtgcagtggccagatcttggctcactgcagtctccacctcctgggttcatgcagttctcctgcctcagcctcctgagtagctgggactacaagcgcgcaccaccatgcctggctattttttgtattttagtagatagggggtttcacggtgttgcccaggctggtcgcgaactcctgagctcaggcaatccgcctgcctcagattgtgctgggattacaggtgtgagccaccacgcctggcctgcagctgtgcttttatctgtcatcttggacttctgcataagggatcatttagagaaaggactctgactaaaaacaaaaagtctgaagtcctgatgtcatccaaacccttcattctacacctgctcagagggacagggcagcctgccctctccagatcctcacttggctctggctctggtggggccactgtctctagttcctctttctgcggggtaactgcctgctcctccatctccttgctttcttctttctctgcaaaccagaagcaggaagagactgtggccccaggcctggcccagcccagccctgccctggcactctcccttacccgtctcactctctggccacagtttgggtggctgtagccccatgtaagtcaaagacagatccagccgcacctgggaagcaaggcagagggaggctgaaaggagtgcacctgtgctgaggggaggggcggttgagggtggctcctcatggtccaccaccccctacctggggtgtgaagacgtatttatagagcttgaagtggcggaagtaagtgttgaccacgtagtcttccaaggccagcagctgttcctctttgaagaggtcgatgctgaaaggaggccgctgtggtggtgactcggaattagaaccctgactaccttccggagccctggctttgcctccaaaagcccagcaacaggagcaaggagagcccactggggtcttcacaagaagataagggtgatgaatgtgagagagactgggtgagaccttgtctggggatgggtaaagtttccagaatgttccaggggaactgaccctgactccatggcaaaaaaggacactggtgaagtagcggtagcactcctccacgttgcccaagggggttgctggtagggaaagcaagatgcagcagtgaggccctctctggtatccattcattcacttcactcaacagctgtttatgaccatgagcttcagaagcagacagatctgggtttcagcactggcttgtttccttaactcatgtaacaaatactgaatacccactatatgcccactgtatggttttcggcactgaacaagacagacaaggtcctgcccttacgaagcttatattctaggggaataaaccaagaaatagatcatttcagctattaaacattctgaagcaagagctattaaacattctaaagcaggtgttattgtgcactatgcatatatttgcatatattatttctcagaacagtcctgtaaaatgtgtgctgtatccttaatttctagataaggaagcagtggattggaaagctgatggcttgtgtatgatgatgctactaataatgacatattccaggcagaaatcccctgcttctgcttcccatggtcacttgtgccaggcccggttcctcttctccctggggctcaaacctggtagctgccccctctcaccaatacaagccttgtgaagatcctggagcagggcacaagccgctgacgtctgctccagtgagaagccctgctggcggcagaaaatgagcgcgtggcagaagaggtccagggtgatggcgtccctcaggctctgctcaggacaccctagctccagcagctcagccagcacccttgggagggagagaggagtgagtgacaactgggcctcctttcatcaccctacacccaccacatgctttggagtcagccattcctcatgttttcccaacctgacccctcagcctttgccaagagctcttcccacgcccccctcagtccctactccctcatctcagcattggtggtcttctccagctggtgcatggaatggacgtccaggtacttcctgttatagtaaaagaaaaagagtattggtggccgttacctatcatgacaaggctgtgacagctagtgcgtgagactgggagttggccaccggcgtgaagctgggctcttttgccagcttgctgtgtgactatgcaaatcgttaactctctgggcctaaatgaactcttatgagcctctccatttctaaagcctagggttaggaatcttgaattcttttttctgctctgccactaccttgtatgaccttggtcaagtactccctgtggccctcagtgtccccctctgtacaatactccttagcggccatgagactccatttacattctgtctttggctctttttttctcacactgcctcctctttggactggagaggctggaaagccaacttccagtcacctggagtaattgcatctccaggcctcagtctcatctgtaaaatggggatgccctggccacagacaggactgttggggagacaataaagaacgcaaatattcagtgtaa

SEQ ID NO: 166099 - DNA, 621 bp, Homo sapiens
  Payload ID: 12693
  Gene Symbol: PHKG2
  Gene Name: phosphorylase kinase, gamma 2 (testis)
  ENST ID: ENST00000561712
  CDS Start-End: 1-241
gatgcggaagggagagctgtttgactatctcacagagaaggtggccctctctgaaaaggaaaccaggtccatcatgcggtctctgctggaagcagtgagctttctccatgccaacaacattgtgcatcgagatctgaagcccgagaatattctcctagatgacaatatgcagatccgactttcagatttcgggttctcctgccacttggaacctggcgagaagcttcgaggtagacagtgagctcggtaagggctcatctcatttgccacttggcaaatcagtgcaacttggcattcaagaaatacttggtgtaggaatgaatttcccaacaaagtcagtttcaattcggggctgttaaaatctcctggaagtgtgccatggaacaaggttcagaaagtactggaagaattggtgcccgagtggtagaacaaactaaaaatacagacttgagccaagcgtggtggcacgcatctgtcaccccagctactcgggaggctgaaggaggaggctcacttgagcctaggagcccaaggctacaatgagctgtgatagtgccaccacactccagcctgtgtgacatagcgaccctgtctctaaaaataaataaatataaaaataca

SEQ ID NO: 166100 - DNA, 1068 bp, Homo sapiens
  Payload ID: 12693
  Gene Symbol: PHKG2
  Gene Name: phosphorylase kinase, gamma 2 (testis)
  ENST ID: ENST00000565897
  CDS Start-End: 271-1068
acagccgcctgcccttgcgccccttccccctgcctcctgggcacatctccccactcccctccctgccctgccatcctcccgcccccaggctcttctgcggggtctccccagtccgggtccttcccccacccccccccaccccccaggaccctggcgccccagctgcaagggctgcgcccccgggagccgccatgcgggtcgtctcagagcctgtgggcctccctgccctcactgccctcctcctccgcgcaggcccccgcctccttcaggatgacgctggacgtggggccggaggatgagctgcccgactgggccgccgccaaagagttttaccagaagtacgaccctaaggacgtcatcggcagaggagtgagctctgtggtccgccgttgtgttcatcgagctactggccacgagtttgcggtgaagattatggaagtgacagctgagcggctgagtcctgagcagctggaggaggtgcgggaagccacacggcgagagacacacatccttcgccaggtcgccggccacccccacatcatcaccctcatcgattcctacgagtcttctagcttcatgttcctggtgtttgacctgatgcggaagggagagctgtttgactatctcacagagaaggtggccctctctgaaaaggaaaccaggtccatcatgcggtctctgctggaagcagtgagctttctccatgccaacaacattgtgcatcgagatctgaagcccgagaatattctcctagatgacaatatgcagatccgactttcagatttcgggttctcctgccacttggaacctggcgagaagcttcgagagttgtgtgggaccccagggtatctagcgccagagatccttaaatgctccatggatgaaacccacccaggctatggcaaggaggtcgacctctgggcctgtggggtgatcttgttcacactcctggctggctcgccacccttctggcaccggcggcagatcctgatgttacgcatgatcatggagggccagtaccagttcagttcccccgagtgggatgaccgttccagcactgtcaaagac

SEQ ID NO: 166101 - DNA, 3048 bp, Homo sapiens
  Payload ID: 12694
  Gene Symbol: PYGL
  Gene Name: phosphorylase, glycogen, liver
  Uniprot ID: P06737
  ENST ID: ENST00000216392
  CDS Start-End: 334-2877
ggaaatccggaagggagcctccgagcccaggtcccgggctggcaggggtctcgccggcgcttggacctcgtctcccacccccgagcccactgcggccccagagcctcgggaggggccgggcacttcctctgccctccggcctggggcaggggccgggacgcggtgggagtgcagcggggacggcaccgcccgagggggcgggccccaaactttcgtgcgcgttgaaagctgctggcgcggcggggcggactccacccctgcccggcagcccagcgcctccggccgcacttccagctctctgcgcagcccgccgcgcagcccgccgccccagccatggcgaagcccctgacggaccaggagaagcggcggcagatcagcatccgcggcatcgtgggcgtggagaacgtggcagagctgaagaagagtttcaaccggcacctgcacttcacgctggtcaaggaccgcaacgtggccaccacccgcgactactacttcgcgctggcgcacacggtgcgcgaccacctggtggggcgctggatccgcacgcagcagcactactacgacaagtgccccaagagggtatattacctctctctggaattttacatgggccgaacattacagaacaccatgatcaacctcggtctgcaaaatgcctgtgatgaggccatttaccagcttggattggatatagaagagttagaagaaattgaagaagatgctggacttggcaatggtggtcttgggagacttgctgcctgcttcttggattccatggcaaccctgggacttgcagcctatggatacggcattcggtatgaatatgggattttcaatcagaagatccgagatggatggcaggtagaagaagcagatgattggctcagatatggaaacccttgggagaagtcccgcccagaattcatgctgcctgtgcacttctatggaaaagtagaacacaccaacaccgggaccaagtggattgacactcaagtggtcctggctctgccatatgacacccccgtgcccggctacatgaataacactgtcaacaccatgcgcctctggtctgctcgggcaccaaatgactttaacctcagagactttaatgttggagactacattcaggctgtgctggaccgaaacctggccgagaacatctcccgggtcctctatcccaatgacaatttttttgaagggaaggagctaagattgaagcaggaatactttgtggtggctgcaaccttgcaagatatcatccgccgtttcaaagcctccaagtttggctccacccgtggtgcaggaactgtgtttgatgccttcccggatcaggtggccatccagctgaatgacactcaccctgcactcgcgatccctgagctgatgaggatttttgtggatattgaaaaactgccctggtccaaggcatgggagctcacccagaagaccttcgcctacaccaaccacacagtgctcccggaagccctggagcgctggcccgtggacctggtggagaagctgctccctcgacatttggaaatcatttatgagataaatcagaagcatttagatagaattgtggccttgtttcctaaagatgtggaccgtctgagaaggatgtctctgatagaagaggaaggaagcaaaaggatcaacatggcccatctctgcattgtcggttcccatgctgtgaatggcgtggctaaaatccactcagacatcgtgaagactaaagtattcaaggacttcagtgagctagaacctgacaagtttcagaataaaaccaatgggatcactccaaggcgctggctcctactctgcaacccaggacttgcagagctcatagcagagaaaattggagaagactatgtgaaagacctgagccagctgacgaagctccacagcttcctgggtgatgatgtcttcctccgggaactcgccaaggtgaagcaggagaataagctgaagttttctcagttcctggagacggagtacaaagtgaagatcaacccatcctccatgtttgatgtccaggtgaagaggatacatgagtacaagcgacagctcttgaactgtctgcatgtgatcacgatgtacaaccgcattaagaaagaccctaagaagttattcgtgccaaggacagttatcattggtggtaaagctgccccaggatatcacatggccaaaatgatcataaagctgatcacttcagtggcagatgtggtgaacaatgaccctatggttggaagcaagttgaaagtcatcttcttggagaactacagagtatctcttgctgaaaaagtcattccagccacagatctgtcagagcagatttccactgcaggcaccgaagcctcggggacaggcaatatgaagttcatgctaaatggggccctaactatcgggaccatggatggggccaatgtggaaatggcagaagaagctggggaagagaacctgttcatctttggcatgaggatagatgatgtggctgctttggacaagaaagggtacgaggcaaaagaatactatgaggcacttccagagctgaagctggtcattgatcaaattgacaatggctttttttctcccaagcagcctgacctcttcaaagatatcatcaacatgctattttatcatgacaggtttaaagtctttgcagactacgaagcctatgtcaagtgtcaagataaagtgagtcagctgtacatgaatccaaaggcctggaacacaatggtactcaaaaacatagctgcctcggggaaattctccagtgaccgaacaattaaagaatatgcccaaaacatctggaacgtggaaccttcagatctaaagatttctctatccaatgaatctaacaaagtcaatggaaattgaactctagaattgtctctagaaaacatagcttcttactgaacttgaacatttttacaacattcactggtttttgttttgttagctaataatctataatagttgagtatctctgggaatggggagggaaattatatgtaatagagcttaaaaataaagtgtcaatttccaagg

SEQ ID NO: 166102 - DNA, 2711 bp, Homo sapiens
  Payload ID: 12694
  Gene Symbol: PYGL
  Gene Name: phosphorylase, glycogen, liver
  ENST ID: ENST00000532462
  CDS Start-End: 54-2513
ggccgcacttccagctctctgcgcagcccgccgcgcagcccgccgccccagccatggcgaagcccctgacggaccaggagaagcggcggcagatcagcatccgcggcatcgtgggcgtggagaacgtggcagagctgaagaagagtttcaaccggcacctgcacttcacgctggtcaaggaccgcaacgtggccaccacccgcgactactacttcgcgctggcgcacacggtgcgcgaccacctggtggggcgctggatccgcacgcagcagcactactacgacaagtgccccaagagggtatattacctctctctggaattttacatgggccgaacattacagaacaccatgatcaacctcggtctgcaaaatgcctgtgatgaggccatttaccagcttggattggatatagaagagttagaagaaattgaagaagatgctggacttggcaatggtggtcttgggagacttgctgcctgcttcttggattccatggcaaccctgggacttgcagcctatggatacggcattcggtatgaatatgggattttcaatcagaagatccgagatggatggcaggtagaagaagcagatgattggctcagatatggaaacccttgggagaagtcccgcccagaattcatgctgcctgtgcacttctatggaaaagtagaacacaccaacaccgggaccaagtggattgacactcaagtggtcctggctctgccatatgacacccccgtgcccggctacatgaataacactgtcaacaccatgcgcctctggtctgctcgggcaccaaatgactttaacctcagagactttaatgttggagactacattcaggctgtgctggaccgaaacctggccgagaacatctcccgggtcctctatcccaatgacaatttttttgaagggaaggagctaagattgaagcaggaatactttgtggtggctgcaaccttgcaagatatcatccgccgtttcaaagcctccaagtttggctccacccgtggtgcaggaactgtgtttgatgccttcccggatcaggtggccatccagctgaatgacactcaccctgcactcgcgatccctgagctgatgaggatttttgtggatattgaaaaactgccctggtccaaggcatgggagctcacccagaagaccttcgcctacaccaaccacacagtgctcccggaagccctggagcgctggcccgtggacctggtggagaagctgctccctcgacatttggaaatcatttatgagataaatcagaagcatttagatagaattgtggccttgtttcctaaagatgtggaccgtctgagaaggatgtctctgatagaagaggaaggaagcaaaaggatcaacatggcccatctctgcattgtcggttcccatgctgtgaatggcgtggctaaaatccactcagacatcgtgaagactaaagtattcaaggacttcagtgagctagaacctgacaagtttcagaataaaaccaatgggatcactccaaggcgctggctcctactctgcaacccaggacttgcagagctcatagcagagaaaattggagaagactatgtgaaagacctgagccagctgacgaagctccacagcttcctgggtgatgatgtcttcctccgggaactcgccaaggtgaagcaggagaataagctgaagttttctcagttcctggagacggagtacaaagtgaagatcaacccatcctccatgtttgatgtccaggtgaagaggatacatgagtacaagcgacagctcttgaactgtctgcatgtgatcacgatgtacaaccgcattaagaaagaccctaagaagttattcgtgccaaggacagttatcattggtggtaaagctgccccaggatatcacatggccaaaatgatcataaagctgatcacttcagtggcagatgtggtgaacaatgaccctatggttggaagcaagttgaaagtcatcttcttggagaactacagagtatctcttgctgaaaaagtcattccagccacagatctgtcagagcagatttccactgcaggcaccgaagcctcggggacaggcaatatgaagttcatgctaaatggggccctaactatcgggaccatggatggggccaatgtggaaatggcagaagaagctggggaagagaacctgttcatctttggcatgaggatagatgatgtggctgctttggacaagaaagggtacgaggcaaaagaatactatgaggcacttccagagctgaagctggtcattgatcaaattgacaatggctttttttctcccaagcagcctgacctcttcaaagatatcatcaacatgctattttatcatgacaggtttaaagtctttgcagactacgaagcctatgtcaagtgtcaagataaagtgagtcagctgtacatgaaatctgatgctgtcaggcccaagcattggccaggaaaggactcagtacagacaggaccactcagagaaacagtaagataagtccacgtatttacaatactctgaaaagcaaattgtccagagaggggaagagaactagctgttctttatcttcattagaacttttgtcctttgatttgtattctctctctccattcagcctctgctatggtctgagtgtttgtgtctgcccaaaattcatatgctgaaagcctaaccccagaggtgatggtattagaa

SEQ ID NO: 166103 - DNA, 2696 bp, Homo sapiens
  Payload ID: 12694
  Gene Symbol: PYGL
  Gene Name: phosphorylase, glycogen, liver
  Uniprot ID: P06737
  ENST ID: ENST00000544180
  CDS Start-End: 81-2522
acccctgcccggcagcccagcgcctccggccgcacttccagctctctgcgcagcccgccgcgcagcccgccgccccagccatggcgaagcccctgacggaccaggagaagcggcggcagatcagcatccgcggcatcgtgggcgtggagaacgtggcagagctgaagaagagtttcaaccggcacctgcacttcacgctggtcaaggaccgcaacgtggccaccacccgcgactactacttcgcgctggcgcacacggtgcgcgaccacctggtggggcgctggatccgcacgcagcagcactactacgacaagtgccccaagcttggattggatatagaagagttagaagaaattgaagaagatgctggacttggcaatggtggtcttgggagacttgctgcctgcttcttggattccatggcaaccctgggacttgcagcctatggatacggcattcggtatgaatatgggattttcaatcagaagatccgagatggatggcaggtagaagaagcagatgattggctcagatatggaaacccttgggagaagtcccgcccagaattcatgctgcctgtgcacttctatggaaaagtagaacacaccaacaccgggaccaagtggattgacactcaagtggtcctggctctgccatatgacacccccgtgcccggctacatgaataacactgtcaacaccatgcgcctctggtctgctcgggcaccaaatgactttaacctcagagactttaatgttggagactacattcaggctgtgctggaccgaaacctggccgagaacatctcccgggtcctctatcccaatgacaatttttttgaagggaaggagctaagattgaagcaggaatactttgtggtggctgcaaccttgcaagatatcatccgccgtttcaaagcctccaagtttggctccacccgtggtgcaggaactgtgtttgatgccttcccggatcaggtggccatccagctgaatgacactcaccctgcactcgcgatccctgagctgatgaggatttttgtggatattgaaaaactgccctggtccaaggcatgggagctcacccagaagaccttcgcctacaccaaccacacagtgctcccggaagccctggagcgctggcccgtggacctggtggagaagctgctccctcgacatttggaaatcatttatgagataaatcagaagcatttagatagaattgtggccttgtttcctaaagatgtggaccgtctgagaaggatgtctctgatagaagaggaaggaagcaaaaggatcaacatggcccatctctgcattgtcggttcccatgctgtgaatggcgtggctaaaatccactcagacatcgtgaagactaaagtattcaaggacttcagtgagctagaacctgacaagtttcagaataaaaccaatgggatcactccaaggcgctggctcctactctgcaacccaggacttgcagagctcatagcagagaaaattggagaagactatgtgaaagacctgagccagctgacgaagctccacagcttcctgggtgatgatgtcttcctccgggaactcgccaaggtgaagcaggagaataagctgaagttttctcagttcctggagacggagtacaaagtgaagatcaacccatcctccatgtttgatgtccaggtgaagaggatacatgagtacaagcgacagctcttgaactgtctgcatgtgatcacgatgtacaaccgcattaagaaagaccctaagaagttattcgtgccaaggacagttatcattggtggtaaagctgccccaggatatcacatggccaaaatgatcataaagctgatcacttcagtggcagatgtggtgaacaatgaccctatggttggaagcaagttgaaagtcatcttcttggagaactacagagtatctcttgctgaaaaagtcattccagccacagatctgtcagagcagatttccactgcaggcaccgaagcctcggggacaggcaatatgaagttcatgctaaatggggccctaactatcgggaccatggatggggccaatgtggaaatggcagaagaagctggggaagagaacctgttcatctttggcatgaggatagatgatgtggctgctttggacaagaaagggtacgaggcaaaagaatactatgaggcacttccagagctgaagctggtcattgatcaaattgacaatggctttttttctcccaagcagcctgacctcttcaaagatatcatcaacatgctattttatcatgacaggtttaaagtctttgcagactacgaagcctatgtcaagtgtcaagataaagtgagtcagctgtacatgaatccaaaggcctggaacacaatggtactcaaaaacatagctgcctcggggaaattctccagtgaccgaacaattaaagaatatgcccaaaacatctggaacgtggaaccttcagatctaaagatttctctatccaatgaatctaacaaagtcaatggaaattgaactctagaattgtctctagaaaacatagcttcttactgaacttgaacatttttacaacattcactggtttttgttttgttagctaataatctataatagttgagtatctctgggaatggggagggaaattatatgtaatagagcttaaaaataaagtgtcaatttccaagggct

SEQ ID NO: 166104 - DNA, 3198 bp, Homo sapiens
  Payload ID: 12695
  Gene Symbol: PYGM
  Gene Name: phosphorylase, glycogen, muscle
  Uniprot ID: P11217
  ENST ID: ENST00000164139
  CDS Start-End: 400-2928
ccatcctggttcagccactgacagacagctccccaatccagcactctgcctgctccttcttgtatccaaccctccaaaaggcagggacaagggacagaagaccatgtgcaaggcctggaggaagtgggtcagcacaggcctgtgaacaagccaggccagtcttggcggcccaagtggagctcacctctccctcccctctcctctcctccccttgccctcaaaatagctccctgagctgccaggccaagaccctcccattgcaggggaggcggggcgtgctgcccagagccaggctttaaatccccttgaggctggggagctccactccttggctggaggcagtgctgaggccgccgtcccctctaccatcagtccagtccggcccgccctcctgcagccatgtcccggcccctgtcagaccaagagaaaagaaagcaaatcagtgtgcgtggcctggccggcgtggagaacgtgactgagctgaaaaagaacttcaaccggcacctgcatttcacactcgtaaaggaccgcaatgtggccaccccacgagactactactttgctctggcccataccgtgcgcgaccacctcgtggggcgctggatccgcacgcagcagcactactatgagaaggaccccaagaggatctactacctgtctttagagttctatatgggacggacgctacagaacaccatggtgaacctggccttagagaatgcctgtgacgaggccacctaccagctgggcctggacatggaggagctggaggaaattgaggaggatgcggggctgggcaacgggggcctgggccggctggcagcctgctttcttgactccatggcaacactgggcctggccgcctatggctacgggattcgctatgagtttgggatttttaaccagaagatctccgggggctggcagatggaggaggccgatgactggcttcgctacggcaacccctgggagaaggcccggcccgagttcacgctacctgtgcacttctacggccatgtggagcacaccagccagggtgccaagtgggtggacacacaggtggtactggccatgccctacgatacgcccgtgcctggctatcgcaacaatgttgtcaacaccatgcgcctctggtctgccaaggctcccaatgacttcaacctcaaggacttcaatgtcggtggctacatccaggctgtgttggaccgaaacctggcggagaacatctctcgtgtcctgtaccccaatgataatttcttcgaagggaaggagctgcggctgaagcaggagtatttcgtggtggctgccaccctccaggacatcatccgtcgcttcaagtcttccaagttcggctgccgtgatcccgtgcgcacgaacttcgatgccttcccagataaggtggccatccagctcaatgacacccacccctccctggccatccccgagctgatgaggatcctggtggacctggaacggatggactgggacaaggcgtgggatgtgacagtgaggacctgtgcctacaccaaccacacggtgctgcccgaggccctggagcgctggccggtgcacctcttggagacgctgctgccgcggcacctccagatcatctacgagatcaaccagcgcttcctcaaccgggtggcggccgcattcccaggggacgtagaccggctgcggcgcatgtcgctggtggaggagggcgcagtgaagcgcatcaacatggcacacctgtgcatcgcggggtcgcacgccgtcaacggcgtggcgcgcatccactccgagatcctcaagaagaccatcttcaaagacttctatgagctggagcctcataagttccagaataagaccaacggcatcacccctcggcgctggctggttctgtgtaaccccgggctggcagaggtcattgctgagcgcatcggggaggacttcatctctgacctggaccagctgcgcaaactgctctcctttgtggatgatgaagctttcattcgggatgtggccaaagtgaagcaggaaaacaagttgaagtttgctgcctacctagagagggaatacaaagtccacatcaaccccaactcactcttcgacatccaggtgaagcggattcacgaatataaacgacagctcctcaactgcctccatgtcatcaccctgtacaaccgcatcaagagggagcccaataagttttttgtgcctcggactgtgatgattggagggaaggctgcacctgggtaccacatggccaagatgatcatcagactcgtcacagccatcggggatgtggtcaaccatgacccggcagtgggtgaccgcctccgtgtcatcttcctggagaactaccgagtctcactggccgagaaagtgatcccagctgcagacctctctgagcagatctccactgcgggcactgaagcctcaggcaccggcaacatgaagttcatgctcaacggggctctgaccattggcaccatggacggggccaatgtggagatggcagaagaggcgggagaggaaaacttcttcatctttggcatgcgggtggaggatgtggataagcttgaccaaagagggtacaatgcccaggagtactacgatcgcattcctgagcttcggcaggtcattgagcagctgagcagtggcttcttctcccccaaacagcccgacctgttcaaggacattgtcaatatgctcatgcaccatgaccggtttaaagtcttcgcagattatgaagactacattaaatgccaggagaaagtcagcgccttgtacaagaacccaagagagtggacgcggatggtgatccggaacatagccacctctggcaagttctccagtgaccgcaccattgcccagtatgcccgggagatctggggtgtggagccttcccgccagcgcctgccagccccggatgaggccatctgagcctccagaccagaccccaaaccagcccttgagtctgtcacactctcttgggccagccccagcacctcatgcagagggtggggtactggagttagatctctaagcccctcctggaaccctcattttccccactctcaatgtcccagtgtccagcgtgactaaggacacgggcccccttccgtcctcgggctcccggtcccctcctatttatggggtctgaccaactgcacccactccctaataaattcattctccttgggagcctcctta

SEQ ID NO: 166105 - DNA, 2611 bp, Homo sapiens
  Payload ID: 12695
  Gene Symbol: PYGM
  Gene Name: phosphorylase, glycogen, muscle
  Uniprot ID: P11217
  ENST ID: ENST00000377432
  CDS Start-End: 77-2341
actccttggctggaggcagtgctgaggccgccgtcccctctaccatcagtccagtccggcccgccctcctgcagccatgtcccggcccctgtcagaccaagagaaaagaaagcaaatcagtgtgcgtggcctggccggcgtggagaacgtgactgagctgaaaaagaacttcaaccggcacctgcatttcacactcgtaaaggaccgcaatgtggccaccccacgagactactactttgctctggcccataccgtgcgcgaccacctcgtggggcgctggatccgcacgcagcagcactactatgagaaggaccccaagaagatctccgggggctggcagatggaggaggccgatgactggcttcgctacggcaacccctgggagaaggcccggcccgagttcacgctacctgtgcacttctacggccatgtggagcacaccagccagggtgccaagtgggtggacacacaggtggtactggccatgccctacgatacgcccgtgcctggctatcgcaacaatgttgtcaacaccatgcgcctctggtctgccaaggctcccaatgacttcaacctcaaggacttcaatgtcggtggctacatccaggctgtgttggaccgaaacctggcggagaacatctctcgtgtcctgtaccccaatgataatttcttcgaagggaaggagctgcggctgaagcaggagtatttcgtggtggctgccaccctccaggacatcatccgtcgcttcaagtcttccaagttcggctgccgtgatcccgtgcgcacgaacttcgatgccttcccagataaggtggccatccagctcaatgacacccacccctccctggccatccccgagctgatgaggatcctggtggacctggaacggatggactgggacaaggcgtgggatgtgacagtgaggacctgtgcctacaccaaccacacggtgctgcccgaggccctggagcgctggccggtgcacctcttggagacgctgctgccgcggcacctccagatcatctacgagatcaaccagcgcttcctcaaccgggtggcggccgcattcccaggggacgtagaccggctgcggcgcatgtcgctggtggaggagggcgcagtgaagcgcatcaacatggcacacctgtgcatcgcggggtcgcacgccgtcaacggcgtggcgcgcatccactccgagatcctcaagaagaccatcttcaaagacttctatgagctggagcctcataagttccagaataagaccaacggcatcacccctcggcgctggctggttctgtgtaaccccgggctggcagaggtcattgctgagcgcatcggggaggacttcatctctgacctggaccagctgcgcaaactgctctcctttgtggatgatgaagctttcattcgggatgtggccaaagtgaagcaggaaaacaagttgaagtttgctgcctacctagagagggaatacaaagtccacatcaaccccaactcactcttcgacatccaggtgaagcggattcacgaatataaacgacagctcctcaactgcctccatgtcatcaccctgtacaaccgcatcaagagggagcccaataagttttttgtgcctcggactgtgatgattggagggaaggctgcacctgggtaccacatggccaagatgatcatcagactcgtcacagccatcggggatgtggtcaaccatgacccggcagtgggtgaccgcctccgtgtcatcttcctggagaactaccgagtctcactggccgagaaagtgatcccagctgcagacctctctgagcagatctccactgcgggcactgaagcctcaggcaccggcaacatgaagttcatgctcaacggggctctgaccattggcaccatggacggggccaatgtggagatggcagaagaggcgggagaggaaaacttcttcatctttggcatgcgggtggaggatgtggataagcttgaccaaagagggtacaatgcccaggagtactacgatcgcattcctgagcttcggcaggtcattgagcagctgagcagtggcttcttctcccccaaacagcccgacctgttcaaggacattgtcaatatgctcatgcaccatgaccggtttaaagtcttcgcagattatgaagactacattaaatgccaggagaaagtcagcgccttgtacaagaacccaagagagtggacgcggatggtgatccggaacatagccacctctggcaagttctccagtgaccgcaccattgcccagtatgcccgggagatctggggtgtggagccttcccgccagcgcctgccagccccggatgaggccatctgagcctccagaccagaccccaaaccagcccttgagtctgtcacactctcttgggccagccccagcacctcatgcagagggtggggtactggagttagatctctaagcccctcctggaaccctcattttccccactctcaatgtcccagtgtccagcgtgactaaggacacgggcccccttccgtcctcgggctcccggtcccctcctatttatggggtctgaccaactgcacccactccctaataaattcattctccttgggagcctcctta

SEQ ID NO: 166106 - DNA, 4134 bp, Homo sapiens
  Payload ID: 12696
  Gene Symbol: PYGB
  Gene Name: phosphorylase, glycogen
  brain
  Uniprot ID: P11216
  ENST ID: ENST00000216962
  CDS Start-End: 111-2642
cgcagtgccgggcgccagagcagcggcgccagagcagctgcaccatcccggcgttcgcgtgtgccgccgctttcctcctccatctcttttcctccgcctccgccggcgcgatggcgaagccgctgacggacagcgagaagcggaagcagatcagcgtgcgcggcctggcggggctaggcgacgtggccgaggtgcggaagagcttcaaccggcacttgcacttcacgctggtcaaggaccgcaatgtggccacgccccgcgactacttcttcgcgctggcgcacacggtgcgcgaccacctcgtgggccgctggatccgcacgcagcagcactactacgagcgcgaccccaagcgcatttattatctttccctggaattctacatgggtcgcacgctgcagaacacgatggtgaacctgggccttcagaatgcctgcgatgaagccatctatcagttggggttagacttggaggaactcgaggagatagaagaagatgctggccttgggaatggaggcctggggaggctggcagcgtgtttccttgactcaatggctaccttgggcctggcagcatacggctatggaatccgctatgaatttgggatttttaaccagaagattgtcaatggctggcaggtagaggaggccgatgactggctgcgctacggcaacccctgggagaaagcgcggcctgagtatatgcttcccgtgcacttctacggacgcgtggagcacacccccgacggcgtgaagtggctggacacacaggtggtgctggccatgccctacgacaccccagtgcccggctacaagaacaacaccgtcaacaccatgcggctgtggtccgccaaggctcccaacgacttcaagctgcaggacttcaacgtgggagactacatcgaggcggtcctggaccggaacttggctgagaacatctccagggtcctgtatccaaatgataacttctttgaggggaaggagctgcggctgaagcaggagtacttcgtggtggccgccacgctccaggacatcatccgccgcttcaagtcgtccaagttcggctgccgggaccctgtgagaacctgtttcgagacgttcccagacaaggtggccatccagctgaacgacacccaccccgccctctccatccctgagctcatgcggatcctggtggacgtggagaaggtggactgggacaaggcctgggaaatcacgaagaagacctgtgcatacaccaaccacactgtgctgcctgaggccttggagcgctggcccgtgtccatgtttgagaagctgctgccgcggcacctggagataatctatgccatcaaccagcggcacctggaccacgtggccgcgctgtttcccggcgatgtggaccgcctgcgcaggatgtctgtgatcgaggagggggactgcaagcggatcaacatggcccacctgtgtgtgattgggtcccatgctgtcaatggtgtggcgaggatccactcggagatcgtgaaacagtcggtctttaaggatttttatgaactggagccagagaagttccagaataagaccaatggcatcaccccccgccggtggctgctgctgtgcaacccggggctggccgataccatcgtggagaaaattggggaggagttcctgactgacctgagccagctgaagaagctgctgccgctggtcagtgacgaggtgttcatcagggacgtggccaaggtcaaacaggagaacaagctcaagttctcggccttcctggagaaggagtacaaggtgaagatcaacccctcctccatgttcgatgtgcatgtgaagaggatccacgagtacaagcggcagctgctcaactgcctgcacgtcgtcaccctgtacaatcgaatcaagagagacccggccaaggcttttgtgcccaggactgttatgattgggggcaaggcagcgcccggttaccacatggccaagctgatcatcaagttggtcacctccatcggcgacgtcgtcaatcatgacccagttgtgggtgacaggttgaaagtgatcttcctggagaactaccgtgtgtccttggctgagaaagtgatcccggccgctgatctgtcgcagcagatctccactgcaggcaccgaggcctcaggcacaggcaacatgaagttcatgctcaacggggccctcaccatcggcaccatggacggcgccaacgtggagatggccgaggaggccggggccgagaacctcttcatcttcggcctgcgggtggaggatgtcgaggccttggaccggaaagggtacaatgccagggagtactacgaccacctgcccgagctgaagcaggccgtggaccagatcagcagtggctttttttctcccaaggagccagactgcttcaaggacatcgtgaacatgctgatgcaccatgacaggttcaaggtgtttgcagactatgaagcctacatgcagtgccaggcacaggtggaccagctgtaccggaaccccaaggagtggaccaagaaggtcatcaggaacatcgcctgctcgggcaagttctccagtgaccggaccatcacggagtatgcacgggagatctggggtgtggagccctccgacctgcagatcccgccccccaacatcccccgggactaggcacaccctgccttggcgggaccagcgggcatttgttttcttgctgactttgcacctccttttttccccaaacactttgccagccactggtggtccctgcttttctgagtaccatgtttccaggaggggccatgggggtcagggtggttttgagagagcagggtaaggaaggaatgtgctagaagtgctcctagtttcttgtaaaggaagccagagttgacagtacaaagggtcgtggccagccctgcagcttcagcacctgccccacccagagtgggagtcaggtggagccacctgctgggctcccccagaactttgcacacatcttgctatgtattagccgatgtctttagtgttgagcctctggattctggggtctgggccagtggccatagtgaagcctgggaatgagtgttactgcagcatctgggctgccagccacagggaagggccaagccccatgtagccccagtcatcctgcccagccctgcctcctggccatgccgggaggggtcggatcctctaggcatcgccttcacagccccctgccccctgccctctgtcctggctctgcacctggtatatgggtcatggacccagatggggctttccctttgtagccatccaatgggcattgtgtgggtgcttggaacccgggatgactgagggggacactggagtgggtgcttgtgtctgctgtctcagaggccttggtcaggatgaagttggctgacacagcttagcttggttttgcttattcaaaagagaaaataactacacatggaaatgaaactagctgaagccttttcttgttttagcaactgaaaattgtacttggtcacttttgtgcttgaggaggcccattttctgcctggcagggggcaggtctgtgccctcccgctgactcctgctgtgtcctgaggtgcatttcctgttgtacacacaagggccaggctccattctccctccctttccaccagtgccacagcctcgtctggaaaaaggaccaggggtcccggaggaacccatttgtgctctgcttggacagcaggcctggcactgggaggtgggggtgagcccctcacagccttgcccctccccaaggctggcaacctgcctcccattgcccaagagagagggcagggaacaggctactgtccttccctgtggaattgccgagaaatctagcaccttgcatgctggatctgggctgcggggaggctctttttctccctggcctccagtgcccaccaggaggatctgcgcacggtgcacagcccaccagagcactacagccttttattgagtggggcaagtgctgggctgtggtcgtgccctgacagcatcttccccaggcagcggctctgtggaggaggccatactcccctagttggccactggggccaccaccctgaccaccactgtgcccctcattgttactgccttgtgagataaaaactgattaaacctttgtggctgtggttggctgaca

SEQ ID NO: 166107 - DNA, 734 bp, Homo sapiens
  Payload ID: 12696
  Gene Symbol: PYGB
  Gene Name: phosphorylase, glycogen
  brain
  ENST ID: ENST00000428458
  CDS Start-End: 1-734
tgaaacatcaccacacagtaccaccatccgtcacacctaaagcattggacaggagtcctccgtgtcctgaaatgttcactcgggcagcgcccggttaccacatggccaagctgatcatcaagttggtcacctccatcggcgacgtcgtcaatcatgacccagttgtgggtgacaggttgaaagtgatcttcctggagaactaccgtgtgtccttggctgagaaagtgatcccggccgctgatctgtcgcagcagatctccactgcaggcaccgaggcctcaggcacaggcaacatgaagttcatgctcaacggggccctcaccatcggcaccatggacggcgccaacgtggagatggccgaggaggccggggccgagaacctcttcatcttcggcctgcgggtggaggatgtcgaggccttggaccggaaagggtacaatgccagggagtactacgaccacctgcccgagctgaagcaggccgtggaccagatcagcagtggctttttttctcccaaggagccagactgcttcaaggacatcgtgaacatgctgatgcaccatgacaggttcaaggtgtttgcagactatgaagcctacatgcagtgccaggcacaggtggaccagctgtaccggaaccccaaggagtggaccaagaaggtcatcaggaacatcgcctgctcgggcaagttctccagtgaccggaccatcacggagtatgcacgggagatctgg

SEQ ID NO: 166108 - DNA, 4288 bp, Homo sapiens
  Payload ID: 12697
  Gene Symbol: PHAX
  Gene Name: phosphorylated adaptor for RNA export
  Uniprot ID: Q9H814
  ENST ID: ENST00000297540
  CDS Start-End: 696-1880
gctggcgagtgtaccctttctgcagaaagtaaaaatggccttattcagtaagttaaatttatgttgctatttctttacgacaccggaaaacaaacatttcaaacaccatgctgagaactcagtccttgttttggggagggatgcacttggaagattcgagctaaggtacaatcctccctaggtatccgcgggtcattgttttcaggacccccacagataccaacatccgccatgctcaagccccttacattatgtgggggtgcacggtgggtccttcccatccgcaggttcggcatccgtggatggggagtggatacagagggcggactatacagcttgaaaggcttccctggaagcaatatgtagagtggattgtggaggagcaagaacagaagcggggaggcttgtccagagcatacaggggaaggatgtacggccaagggaggaatcccagacgaccgcgatacgtgacatatttatgtttgcacgaaaataaagtttggaagaaaagtgttgggggaacaagggattcattttcccggggtagttggaatgcaatgggacgcctcaggccgctgggacaggctggcctccgcgcgggggcgcccgagcagccgagccgccgggccttccggctgccccgccggaagtgctctcctgacccgccgctgtgcagcgcagcgcaccgcgggaagatggcgttggaggtcggcgatatggaagatgggcagctttccgactcggattccgacatgacggtcgcacccagcgacaggccgctgcaattgccaaaagtgctaggtggcgacagtgctatgagggccttccagaacacggcaactgcatgtgcaccagtatcacattatcgagctgttgaaagtgtggattcaagtgaagaaagtttttctgattcagatgatgatagctgtctttggaaacgcaaacgacagaaatgttttaaccctcctcccaaaccagagccttttcagtttggccagagcagtcagaaaccacctgttgctggaggaaagaagattaacaacatatggggtgctgtgctgcaggaacagaatcaagatgcagtggccactgaacttggtatcttgggaatggagggcactattgacagaagcagacaatccgagacctacaattatttgcttgccaagaaacttaggaaggaatctcaagagcatacaaaagatctagacaaggaactagatgaatatatgcatggtggcaaaaaaatgggatcaaaggaagaggaaaatgggcaaggtcatctcaaaaggaaacgacctgtcaaagacaggctagggaacagaccagaaatgaactataaaggtcgatacgagatcacagcggaagattctcaagagaaagtggctgatgaaatttcattcaggttacaggaaccaaagaaagacctgatagcccgagtagtgaggattattggtaacaaaaaggcaattgaacttctgatggaaaccgctgaagttgaacaaaatggtggtctctttataatgaatggtagtcgaagaagaacaccaggtggagtttttctgaatctcttgaaaaacactcctagtatcagcgaggaacaaattaaggacattttctacattgaaaaccaaaaggaatatgaaaataaaaaagctgctaggaagaggagaacacaagtgttggggaaaaagatgaaacaagctattaaaagtctaaattttcaagaagatgatgatacatcacgagaaacttttgcaagtgacacgaatgaggccttggcctctcttgatgagtcacaggaaggacatgcagaagccaagttggaggcagaggaagccattgaagttgatcattctcatgatttggacatcttttaagtacattttcaacagtttgaggactaagcctttctaaaataacattgtaataaaccatttttactgagattgcaacgttttgcactgataaacatgagaatctggaggaaagacaattgttttcttgtttaaaatatgtgtggaaaggaatgcaattgatagaacatttaaagatatatctgacaaaatacttaagagtatatagcacaggatttaatttctcaatctgttgcatgtgctaattatgagtattactagttgataatcagttttgtctaggtcataacataccatttgtaagtttgtttgctttttcaggtttatctttgcagtgaattatgctttgctttaaaacattccgctaaaatcataatgggacatataaattattaagctgttagaaatgcattcaaatttgttttttctgtgttctaagaactcaggcaattttaaggataaaaactaacattggccaggcacggtggctcacgcctgtaatcccaacactttaggagaccaaggcgggcagatcacttgaggtcagaagtttgagaccagccaggccaacatggtgaaacttcatctctactaaaaatacaaaaactagccaggtgtggttctccatgcctataatcccggctactcgggaggctgaggcaggagaatcacctgaacccgggaggcaaaggttgcagtgagctgagatcgtaccactgtactccagcctgggcgacagagcaagactctgtctcaaaaaaaaaaaaaaatacaattaagaggtgtatactgatgattcttcccactcatttgtttgtccagaagtaaataaatgtcggaagttttccaagtaactatttgttttttggggggttttttagttagagtcttgatctgtcacccaggctggagtacagtggcaggatctcagcttactgcagcttccatctcccaggttcaagcgatcatgtgcctaagcctcctgagtagctgggatcacaggtgtgtaccaccacgcccagctgatttttgtatttttagtaaagactttcgccatgttgtccaggctggtctcgaactcctggcctaatgatctgcccacctctgcctcccaaagtgctgggatcacaggcatgagccaccgaacccagccttattctgcttaaatttaacgtgttttttgacttcttaattaacttggtcatatactaaatgtgatctcctgtggattaccacatgcattaaaaaatttttcaagctgggcctagtggcgcacacctgcaatcccaacactttgggaggccaagagaggaagattgcttgagcccaggagtttgagaccaatctaggcaatgtagtgagaccctgtctctaatttaaaaaagaaaaagaaaaaaacattcccagtggcagcctgcctaagactgtcttaccttatgttaaggaagtcaggtatttaaaatgttacatatgccggcgcagtggctcatgtgtgtaatcccagcactctgggaggctgagacaggtagatcatttgaggtcaggagttcaaaaccaacctggtctacatggtgaaaccccatctcaactaaaaatacaaaaaatacaaaaaattagccgggcgcggtggctcacacctgtaatcccagcactttgggaggtggaggcgggtggatcacaaggtcaagagatcgagaccatcctggccaacatggtgaaaccctgtctctattaaaaatacaaaaattagctgggcgtggtggcgcatgcctgtagtcccaactactagggaggctgaggcaggagaatcacttgaacccaggaggtggaggttgcagtgagccgagatcacgccactgcactccagcctggcgacagagcgagactccctctcaaaaaaaaaaaaaaaaatacaaaaaattagccgggcattgtggtgcatgcctgtaatctcagctatttgggaggccgaggcaggagaatcacttgaacccaggaggcagaggttgcagtgagtcgagatcgtgccactgcactccagcctgggtgacagagcaagactttgtctcaaaaataataatagtaaaatgttacatgtgcatgaagttttaaattactcatttttattaatgaagaaaataaggtagtttagacattccaagagttaactatagtttacaaaaatatattaagcaaaaatatgcttgatatattaagcagaaatgttgtatattaagcaaaaatgtaaaattcagcaattataaactgttccttacagacagtgtacttgaagtcttttggtagttctgagaatgtggtcattgaagttggatctaagaggaaagtggttatcggttgctttttatttataaaggatgcaaaaataaaattagatttttggcagtccttaa

SEQ ID NO: 166109 - DNA, 1411 bp, Homo sapiens
  Payload ID: 12698
  Gene Symbol: PSAT1
  Gene Name: phosphoserine aminotransferase 1
  Uniprot ID: Q9Y617
  ENST ID: ENST00000347159
  CDS Start-End: 69-1043
ggccaggaacgccagccgttcacgcgttcggtcctccttggctgactcaccgccctggccgccgcaccatggacgcccccaggcaggtggtcaactttgggcctggtcccgccaagctgccgcactcagtgttgttagagatacaaaaggaattattagactacaaaggagttggcattagtgttcttgaaatgagtcacaggtcatcagattttgccaagattattaacaatacagagaatcttgtgcgggaattgctagctgttccagacaactataaggtgatttttctgcaaggaggtgggtgcggccagttcagtgctgtccccttaaacctcattggcttgaaagcaggaaggtgtgctgactatgtggtgacaggagcttggtcagctaaggccgcagaagaagccaagaagtttgggactataaatatcgttcaccctaaacttgggagttatacaaaaattccagatccaagcacctggaacctcaacccagatgcctcctacgtgtattattgcgcaaatgagacggtgcatggtgtggagtttgactttatacccgatgtcaagggagcagtactggtttgtgacatgtcctcaaacttcctgtccaagccagtggatgtttccaagtttggtgtgatttttgctggtgcccagaagaatgttggctctgctggggtcaccgtggtgattgtccgtgatgacctgctggggtttgccctccgagagtgcccctcggtcctggaatacaaggtgcaggctggaaacagctccttgtacaacacgcctccatgtttcagcatctacgtcatgggcttggttctggagtggattaaaaacaatggaggtgccgcggccatggagaagcttagctccatcaaatctcaaacaatttatgagattattgataattctcaaggattctacgtgtctgtgggaggcatccgggcctctctgtataatgctgtcacaattgaagacgttcagaagctggccgccttcatgaaaaaatttttggagatgcatcagctatgaacacatcctaaccaggatatactctgttcttgaacaacatacaaagtttaaagtaacttggggatggctacaaaaagttaacacagtatttttctcaaatgaacatgtttattgcagattcttcttttttgaaagaacaacagcaaaacatccacaactctgtaaagctggtgggacctaatgtcaccttaattctgacttgaactggaagcattttaagaaatcttgttgcttttctaacaaattcccgcgtattttgcctttgctgctactttttctagttagatttcaaacttgcctgtggacttaataatgcaagttgcgattaattatttctggagtcatgggaacacacagcacagagggta

SEQ ID NO: 166110 - DNA, 2188 bp, Homo sapiens
  Payload ID: 12698
  Gene Symbol: PSAT1
  Gene Name: phosphoserine aminotransferase 1
  Uniprot ID: Q9Y617
  ENST ID: ENST00000376588
  CDS Start-End: 69-1181
ggccaggaacgccagccgttcacgcgttcggtcctccttggctgactcaccgccctggccgccgcaccatggacgcccccaggcaggtggtcaactttgggcctggtcccgccaagctgccgcactcagtgttgttagagatacaaaaggaattattagactacaaaggagttggcattagtgttcttgaaatgagtcacaggtcatcagattttgccaagattattaacaatacagagaatcttgtgcgggaattgctagctgttccagacaactataaggtgatttttctgcaaggaggtgggtgcggccagttcagtgctgtccccttaaacctcattggcttgaaagcaggaaggtgtgctgactatgtggtgacaggagcttggtcagctaaggccgcagaagaagccaagaagtttgggactataaatatcgttcaccctaaacttgggagttatacaaaaattccagatccaagcacctggaacctcaacccagatgcctcctacgtgtattattgcgcaaatgagacggtgcatggtgtggagtttgactttatacccgatgtcaagggagcagtactggtttgtgacatgtcctcaaacttcctgtccaagccagtggatgtttccaagtttggtgtgatttttgctggtgcccagaagaatgttggctctgctggggtcaccgtggtgattgtccgtgatgacctgctggggtttgccctccgagagtgcccctcggtcctggaatacaaggtgcaggctggaaacagctccttgtacaacacgcctccatgtttcagcatctacgtcatgggcttggttctggagtggattaaaaacaatggaggtgccgcggccatggagaagcttagctccatcaaatctcaaacaatttatgagattattgataattctcaaggattctacgtttgtccagtggagccccaaaatagaagcaagatgaatattccattccgcattggcaatgccaaaggagatgatgctttagaaaaaagatttcttgataaagctcttgaactcaatatgttgtccttgaaagggcataggtctgtgggaggcatccgggcctctctgtataatgctgtcacaattgaagacgttcagaagctggccgccttcatgaaaaaatttttggagatgcatcagctatgaacacatcctaaccaggatatactctgttcttgaacaacatacaaagtttaaagtaacttggggatggctacaaaaagttaacacagtatttttctcaaatgaacatgtttattgcagattcttcttttttgaaagaacaacagcaaaacatccacaactctgtaaagctggtgggacctaatgtcaccttaattctgacttgaactggaagcattttaagaaatcttgttgcttttctaacaaattcccgcgtattttgcctttgctgctactttttctagttagatttcaaacttgcctgtggacttaataatgcaagttgcgattaattatttctggagtcatgggaacacacagcacagagggtaggggggccctctaggtgctgaatctacacatctgtggggtctcctgggttcagcggctgttgattcaaggtcaacattgaccattggaggagtggtttaagagtgccaggcgaagggcaaactgtagatcgatctttatgctgttattacaggagaagtgacatactttatatatgtttatattagcaaggtctgtttttaataccatatactttatatttctatacatttatatttctaataatacagttatcactgatatatgtagacacttttagaatttattaaatccttgaccttgtgcattatagcattccattagcaagagttgtaccccctccccagtcttcgccttcctctttttaagctgttttatgaaaaagacctagaagttcttgattcatttttaccattctttccataggtagaagagaaagttgattggttggttgtttttcaattatgccattaaactaaacatttctgttaaattaccctatcctttgttctctactgttttctttgtaatgtatgactacgagagtgatactttgctgaaaagtctttcccctattgtttatctattgtcagtattttatgttgaatatgtaaagaacattaaagtcctaaaacatctaa

SEQ ID NO: 166111 - DNA, 2131 bp, Homo sapiens
  Payload ID: 12699
  Gene Symbol: PSPH
  Gene Name: phosphoserine phosphatase
  Uniprot ID: P78330
  ENST ID: ENST00000275605
  CDS Start-End: 759-1436
gttcccggcattccgtgctccttggttccggcgttggagctctttggggcccagctttgcggacccgggagctcgggacgcaggcggggcttgtgctccgcgggggcagggcgtagggtgggcctcctacctcccctgatctcgcggtttgttccgtttcattggagcttcccggaccgtgtgctcgacggtgccctaggtgccgtggggccacacgcgagtctgataagcaccctcccccggaatcatgcggtgctgtgaggcctagcgaagatgaagatagaatgcaaggtagaaagtgctggatacctttagaaagctgcaggactggtgcgatgggagttgagacgtaagaacctgcccgtccgtagggctctggatgctgctgaggcccgaggcccctatggcagatttgaaaattcacccttgtagagtcattcctgcctttgagcggactcccttttaagcagatctcaagagagcgttcggtggaggccctgggtctgcacagctcacctccctgggaactgctcgcccgagcgtcggagccggcgctggccccctgcagccggaaggttgcagccgcaggagccccggaggcccaggacacagggctcttgctcttgcagaatccacaggtctttcttgaggaaatctgtagacagaactttgtgctgcgtttttatctagggaaggaacagaagagtgtcgtctcctagaaatctagcactggagaaacgaggaaaattcttccagcgatggtctcccactcagagctgaggaagcttttctactcagcagatgctgtgtgttttgatgttgacagcacggtcatcagagaagaaggaatcgatgagctagccaaaatctgtggcgttgaggacgcggtgtcagaaatgacacggcgagccatgggcggggcagtgcctttcaaagctgctctcacagagcgcttagccctcatccagccctccagggagcaggtgcagagactcatagcagagcaacccccacacctgacccccggcataagggagctggtaagtcgcctacaggagcgaaatgttcaggttttcctaatatctggtggctttaggagtattgtagagcatgttgcttcaaagctcaatatcccagcaaccaatgtatttgccaataggctgaaattctactttaacggtgaatatgcaggttttgatgagacgcagccaacagctgaatctggtggaaaaggaaaagtgattaaacttttaaaggaaaaatttcattttaagaaaataatcatgattggagatggtgccacagatatggaagcctgtcctcctgctgatgctttcattggatttggaggaaatgtgatcaggcaacaagtcaaggataacgccaaatggtatatcactgattttgtagagctgctgggagaactggaagaataacatccattgtcgtacagctccaaacaacttcagatgaatttttacaagttatacagattgatactgtttgcttacagttgcctattacaacttgctatagaaagttggtacaaatgatctgtactttaaactacagttaggaatcctagaagattgctttttttttttttttaactgtagttccagtattatatgatgactattgatttcctggagaggttttttttttttttgagacagaatcttgctctgttgcccaggctggagtgcagtggcgcggtctcggctcactgcaagctctgcctcccaggttcacgccattctcctgcctcagcctcccgagtagctgggactacaggcacccgccaccacatccggctaattttttgtatttttagtagagacggggtttgaccgtgttagccaggatggtcttgatctcctgaccttgtgatccgcctgcctcagcctcccaaagtgctgggattacaggcttgggccaccgcgcccagccaatgtcctagagagttttgtgatctgaattctttatgtatatttgtagctatatttcatacaaagtgctttaagtgtggagagtcaattaaacacctttactcttagaaatacggattcggcagccttcagtgaatattggtttctctttggtatgtcaataaaagtttatccgtatgtca

SEQ ID NO: 166112 - DNA, 2178 bp, Homo sapiens
  Payload ID: 12699
  Gene Symbol: PSPH
  Gene Name: phosphoserine phosphatase
  Uniprot ID: P78330
  ENST ID: ENST00000395471
  CDS Start-End: 807-1484
gttcccggcattccgtgctccttggttccggcgttggagctctttggggcccagctttgcggacccgggagctcgggacgcaggcggggcttgtgctccgcgggggcagggcgtagggtgggcctcctacctcccctgatctcgcggtttgttccgtttcattggagcttcccggaccgtgtgctcgacggtgccctaggtgccgtggggccacacgcgagtctgataagcaccctcccccggaatcatgcggtgctgtgaggcctagcgaagatgaagatagaatgcaaggtagaaagtgctggatacctttagaaagctgcaggactggtgcgatgggagttgagacgtaagaacctgcccgtccgtagggctctggatgctgctgaggcccgaggcccctatggcagatttgaaaattcacccttgtagagtcattcctgcctttgagcggactcccttttaagtttacagaagcacttgcagaactcatcagaagccaccccgcttatcagcagatctcaagagagcgttcggtggaggccctgggtctgcacagctcacctccctgggaactgctcgcccgagcgtcggagccggcgctggccccctgcagccggaaggttgcagccgcaggagccccggaggcccaggacacagggctcttgctcttgcagaatccacaggtctttcttgaggaaatctgtagacagaactttgtgctgcgtttttatctagggaaggaacagaagagtgtcgtctcctagaaatctagcactggagaaacgaggaaaattcttccagcgatggtctcccactcagagctgaggaagcttttctactcagcagatgctgtgtgttttgatgttgacagcacggtcatcagagaagaaggaatcgatgagctagccaaaatctgtggcgttgaggacgcggtgtcagaaatgacacggcgagccatgggcggggcagtgcctttcaaagctgctctcacagagcgcttagccctcatccagccctccagggagcaggtgcagagactcatagcagagcaacccccacacctgacccccggcataagggagctggtaagtcgcctacaggagcgaaatgttcaggttttcctaatatctggtggctttaggagtattgtagagcatgttgcttcaaagctcaatatcccagcaaccaatgtatttgccaataggctgaaattctactttaacggtgaatatgcaggttttgatgagacgcagccaacagctgaatctggtggaaaaggaaaagtgattaaacttttaaaggaaaaatttcattttaagaaaataatcatgattggagatggtgccacagatatggaagcctgtcctcctgctgatgctttcattggatttggaggaaatgtgatcaggcaacaagtcaaggataacgccaaatggtatatcactgattttgtagagctgctgggagaactggaagaataacatccattgtcgtacagctccaaacaacttcagatgaatttttacaagttatacagattgatactgtttgcttacagttgcctattacaacttgctatagaaagttggtacaaatgatctgtactttaaactacagttaggaatcctagaagattgctttttttttttttttaactgtagttccagtattatatgatgactattgatttcctggagaggttttttttttttttgagacagaatcttgctctgttgcccaggctggagtgcagtggcgcggtctcggctcactgcaagctctgcctcccaggttcacgccattctcctgcctcagcctcccgagtagctgggactacaggcacccgccaccacatccggctaattttttgtatttttagtagagacggggtttgaccgtgttagccaggatggtcttgatctcctgaccttgtgatccgcctgcctcagcctcccaaagtgctgggattacaggcttgggccaccgcgcccagccaatgtcctagagagttttgtgatctgaattctttatgtatatttgtagctatatttcatacaaagtgctttaagtgtggagagtcaattaaacacctttactcttagaaatacggattcggcagccttcagtgaatattggtttctctttggtatgtcaataaaagtttatccgtatgtc

SEQ ID NO: 166113 - DNA, 555 bp, Homo sapiens
  Payload ID: 12699
  Gene Symbol: PSPH
  Gene Name: phosphoserine phosphatase
  ENST ID: ENST00000424596
  CDS Start-End: 524-555
tcattggagcttcccggaccgtgtgctcgacggtgccctaggtgccgtggggccacacgcgagtctgataagcaccctcccccggaatcatgcggtgctgtgaggcctagcgaagatgaagatagaatgcaaggtagaaagtgctggatacctttagaaagctgcaggactggtgcgatgggagttgagacgtaagaacctgcccgtccgtagggctctggatgctgctgaggcccgaggcccctatggcagatttgaaaattcacccttgtagagtcattcctgcctttgagcggactcccttttaagcagatctcaagagagcgttcggtggaggccctgggtctgcacagctcacctccctgggaactgctcgcccgagcgtcggagccggcgctggccccctgcagccggaaggttgcagccgcaggagccccggaggcccaggacacaggggaaggaacagaagagtgtcgtctcctagaaatctagcactggagaaacgaggaaaattcttccagcgatggtctcccactcagagctgaggaagctttt

SEQ ID NO: 166114 - DNA, 633 bp, Homo sapiens
  Payload ID: 12699
  Gene Symbol: PSPH
  Gene Name: phosphoserine phosphatase
  ENST ID: ENST00000421312
  CDS Start-End: 494-633
gatctcgcggtttgttccgtttcattggagcttcccggaccgtgtgctcgacggtgccctaggtgccgtggggccacacgcgagtctgataagcaccctcccccggaatcatgcggtgctgtgaggcctagcgaagatgaagatagaatgcaagtttacagaagcacttgcagaactcatcagaagccaccccgcttatcagcagatctcaagagagcgttcggtggaggccctgggtctgcacagctcacctccctgggaactgctcgcccgagcgtcggagccggcgctggccccctgcagccggaaggttgcagccgcaggagccccggaggcccaggacacagggctcttgctcttgcagaatccacaggtctttcttgaggaaatctgtagacagaactttgtgctgcgtttttatctagggaaggaacagaagagtgtcgtctcctagaaatctagcactggagaaacgaggaaaattcttccagcgatggtctcccactcagagctgaggaagcttttctactcagcagatgctgtgtgttttgatgttgacagcacggtcatcagagaagaaggaatcgatgagctagccaaaatctgtggcgttgaggacgcggtgtcagaaat

SEQ ID NO: 166115 - DNA, 826 bp, Homo sapiens
  Payload ID: 12699
  Gene Symbol: PSPH
  Gene Name: phosphoserine phosphatase
  ENST ID: ENST00000421626
  CDS Start-End: 265-826
agtttacagaagcacttgcagaactcatcagaagccaccccgcttatcagcagatctcaagagagcgttcggtggaggccctgggtctgcacagctcacctccctgggaactgctcgcccgagcgtcggagccggcgctggccccctgcagccggaaggttgcagccgcaggagccccggaggcccaggacacaggggaaggaacagaagagtgtcgtctcctagaaatctagcactggagaaacgaggaaaattcttccagcgatggtctcccactcagagctgaggaagcttttctactcagcagatgctgtgtgttttgatgttgacagcacggtcatcagagaagaaggaatcgatgagctagccaaaatctgtggcgttgaggacgcggtgtcagaaatgacacggcgagccatgggcggggcagtgcctttcaaagctgctctcacagagcgcttagccctcatccagccctccagggagcaggtgcagagactcatagcagagcaacccccacacctgacccccggcataagggagctggtaagtcgcctacaggagcgaaatgttcaggttttcctaatatctggtggctttaggagtattgtagagcatgttgcttcaaagctcaatatcccagcaaccaatgtatttgccaataggctgaaattctactttaacggtgaatatgcaggttttgatgagacgcagccaacagctgaatctggtggaaaaggaaaagtgattaaacttttaaaggaaaaatttcattttaagaaaataatcatgattggagatggtgccacagatatggaagcctgtc

SEQ ID NO: 166116 - DNA, 744 bp, Homo sapiens
  Payload ID: 12699
  Gene Symbol: PSPH
  Gene Name: phosphoserine phosphatase
  ENST ID: ENST00000419984
  CDS Start-End: 605-744
aagctgcaggactggtgcgatgggagttgagacgtaagaacctgcccgtccgtagggctctggatgctgctgaggcccgaggcccctatggcagatttgaaaattcacccttgtagagtcattcctgcctttgagcggactcccttttaagtttacagaagcacttgcagaactcatcagaagccaccccgcttatcagcagatctcaagagagcgttcggtggaggccctgggtctgcacagctcacctccctgggaactgctcgcccgagcgtcggagccggcgctggccccctgcagccggaaggttgcagccgcaggagccccggaggcccaggacacaggacagagtctcgttctgtcgcccaggctggagtgcagtggtgtgatctcggctcacttcaacctccgcctacagggttcaagggattctcctgcctcagcctcctgagtatctgggctcttgctcttgcagaatccacaggtctttcttgaggaaatctgtagacagaactttgtgctgcgtttttatctagggaaggaacagaagagtgtcgtctcctagaaatctagcactggagaaacgaggaaaattcttccagcgatggtctcccactcagagctgaggaagcttttctactcagcagatgctgtgtgttttgatgttgacagcacggtcatcagagaagaaggaatcgatgagctagccaaaatctgtggcgttgaggacgcggtgtcagaaat

SEQ ID NO: 166117 - DNA, 1409 bp, Homo sapiens
  Payload ID: 12699
  Gene Symbol: PSPH
  Gene Name: phosphoserine phosphatase
  Uniprot ID: P78330
  ENST ID: ENST00000437355
  CDS Start-End: 331-1008
tttcattggagcttcccggaccgtgtgctcgacggtgccctaggtgccgtggggccacacgcgagtctgataagcaccctcccccggaatcatgcggtgctgtgaggcctagcgaagatgaagatagaatgcaaggtagaaagtgctggatacctttagaaagctgcaggactggtgcgatgggagttgagacgtaagaacctgcccgtccgtagggctctggatgctgctgaggcccgaggcccctatggcagatttgaaaattcacccttgtagagtcattcctgcctttgagcggactcccttttaaggaggaaaattcttccagcgatggtctcccactcagagctgaggaagcttttctactcagcagatgctgtgtgttttgatgttgacagcacggtcatcagagaagaaggaatcgatgagctagccaaaatctgtggcgttgaggacgcggtgtcagaaatgacacggcgagccatgggcggggcagtgcctttcaaagctgctctcacagagcgcttagccctcatccagccctccagggagcaggtgcagagactcatagcagagcaacccccacacctgacccccggcataagggagctggtaagtcgcctacaggagcgaaatgttcaggttttcctaatatctggtggctttaggagtattgtagagcatgttgcttcaaagctcaatatcccagcaaccaatgtatttgccaataggctgaaattctactttaacggtgaatatgcaggttttgatgagacgcagccaacagctgaatctggtggaaaaggaaaagtgattaaacttttaaaggaaaaatttcattttaagaaaataatcatgattggagatggtgccacagatatggaagcctgtcctcctgctgatgctttcattggatttggaggaaatgtgatcaggcaacaagtcaaggataacgccaaatggtatatcactgattttgtagagctgctgggagaactggaagaataacatccattgtcgtacagctccaaacaacttcagatgaatttttacaagttatacagattgatactgtttgcttacagttgcctattacaacttgctatagaaagttggtacaaatgatctgtactttaaactacagttaggaatcctagaagattgctttttttttttttttaactgtagttccagtattatatgatgactattgatttcctggagagttttgtgatctgaattctttatgtatatttgtagctatatttcatacaaagtgctttaagtgtggagagtcaattaaacacctttactcttagaaatacggattcggcagccttcagtgaatattggtttctctttggtatgtcaataaaagtttatccgtatgtcagaacggatttgtggaa

SEQ ID NO: 166118 - DNA, 809 bp, Homo sapiens
  Payload ID: 12699
  Gene Symbol: PSPH
  Gene Name: phosphoserine phosphatase
  ENST ID: ENST00000427797
  CDS Start-End: 358-630
cagatctggtgtctccagtttacagaagcacttgcagaactcatcagaagccaccccgcttatcagcagatctcaagagagcgttcggtggaggccctgggtctgcacagctcacctccctgggaactgctcgcccgagcgtcggagccggcgctggccccctgcagccggaaggttgcagccgcaggagccccggaggcccaggacacagggctcttgctcttgcagaatccacaggtctttcttgaggaaatctgtagacagaactttgtgctgcgtttttatctagggaaggaacagaagagtgtcgtctcctagaaatctagcactggagaaacgaggaaaattcttccagcgatggtctcccactcagagctgaggaagcttttctactcagcagatgctgtgtgttttgatgttgacagcacggtcatcagagaagaaggaatcgatgagctagccaaaatctgtggcgttgaggacgcggtgtcagaaatacccggggcagtaaggcatgttaaccttgaggacatcggacctggctggcctgactgttgggtctccctcctaggacacggcgagccatgggcggggcagtgcctttcaaagctgctctcacagagcgcttagccctcatccagccctccagggagcaggtgcagagactcatagcagagcaacccccacacctgacccccggcataagggagctggtaagtcgcctacaggagcgaaatgttcaggttttcctaatatctggtggctttaggagtattgtagagcatgttgcttcaaagctcaatatccca

SEQ ID NO: 166119 - DNA, 539 bp, Homo sapiens
  Payload ID: 12699
  Gene Symbol: PSPH
  Gene Name: phosphoserine phosphatase
  ENST ID: ENST00000413218
  CDS Start-End: 533-539
acacgcgagtctgataagcaccctcccccggaatcatgcggtgctgtgaggcctagcgaagatgaagatagaatgcaagagtctcactctatcgcccaggctggagtgcaatggtgccatctcagctcactgcaacctccccttcccaagttcaagcaattttcatgccgcagcctcctagctgggattacagtttacagaagcacttgcagaactcatcagaagccaccccgcttatcagcagatctcaagagagcgttcggtggaggccctgggtctgcacagctcacctccctgggaactgctcgcccgagcgtcggagccggcgctggccccctgcagccggaaggttgcagccgcaggagccccggaggcccaggacacagggctcttgctcttgcagaatccacaggtctttcttgaggaaatctgtagacagaactttgtgctgcgtttttatctagggaaggaacagaagagtgtcgtctcctagaaatctagcactggagaaacgaggaaaattcttccagcgatggtct

SEQ ID NO: 166120 - DNA, 739 bp, Homo sapiens
  Payload ID: 12699
  Gene Symbol: PSPH
  Gene Name: phosphoserine phosphatase
  ENST ID: ENST00000416592
  CDS Start-End: 733-739
gatctcgcggtttgttccgtttcattggagcttcccggaccgtgtgctcgacggtgccctaggtgccgtggggccacacgcgagtctgataagcaccctcccccggaatcatgcggtgctgtgaggcctagcgaagatgaagatagaatgcaaggtagaaagtgctggatacctttagaaagctgcaggactggtgcgatgggagttgagacgtaagaacctgcccgtccgtagggctctggatgctgctgaggcccgaggcccctatggcagatttgaaaattcacccttgtagagtcattcctgcctttgagcggactcccttttaagatctcaagagagcgttcggtggaggccctgggtctgcacagctcacctccctgggaactgctcgcccgagcgtcggagccggcgctggccccctgcagccggaaggttgcagccgcaggagccccggaggcccaggacacaggacagagtctcgttctgtcgcccaggctggagtgcagtggtgtgatctcggctcacttcaacctccgcctacagggttcaagggattctcctgcctcagcctcctgagtatctgggctcttgctcttgcagaatccacaggtctttcttgaggaaatctgtagacagaactttgtgctgcgtttttatctagggaaggaacagaagagtgtcgtctcctagaaatctagcactggagaaacgaggaaaattcttccagcgatggtct

SEQ ID NO: 166121 - DNA, 1705 bp, Homo sapiens
  Payload ID: 12700
  Gene Symbol: PSTK
  Gene Name: phosphoseryl-tRNA kinase
  Uniprot ID: Q8IV42
  ENST ID: ENST00000368887
  CDS Start-End: 441-1487
ggtggtcggactgtcagcctcgccttctattctttgatttccagtaacttattttcgaaagattgctggagggaaaggctcaacgtctcttttgggattttcctaagcagaaagacctcatcctaacaaaactgaggcgccaatcctactggctggcaactttcggcagggagggtgattctatttgaagatcaatcctaactctgggaccccttgggaatgtccaggagctaggaacgcagcgccgcggtctctccagcctctggtccctgggagcaagcagggcaccggtggagcaggtgcctctggggccgcacggaaacccagctaggccagttcctccactgcgccggtaggcggcggagacgctgcgcgtgcgcgcagggcagacggtagagcggagacgacgctcccagactcctccggtctccccgggcagcatgaagaccgccgagaacatcagaggaaccggcagcgacgggccgcggaaacgaggcctctgcgtcctctgtggcctccccgcggcaggaaaatcgactttcgcgcgcgccctcgcccaccggctgcagcaggagcagggttgggccatcggtgttgtcgcgtatgatgacgtcatgcccgacgcgtttctcgccggggcaagagcgcgaccggcgccatcccaatggaaattgcttcgacaggaactgttgaagtacctggaatacttcttgatggctgtcattaatgggtgtcagatgtctgtcccacccaacaggactgaagccatgtgggaagattttataacctgcttaaaggatcaagatctgatattttctgcagcatttgaggcccagtcttgctacctcttaacaaaaactgctgtttctagacctttgtttttggttttggatgacaatttttattatcagagtatgagatatgaagtctaccagctggctcggaaatattcgttgggcttttgccagctctttttagattgtcctcttgagacctgtttacagaggaatggccagaggccacaggcactgcctcctgagaccatccacctgatgggaagaaagctagaaaagcccaaccctgagaaaaatgcttgggaacacaacagcctcacaattccgagtccagcatgtgcttcggaggccagcctggaagtgactgatttattgctcactgctttggaaaatccagtaaaatatgctgaggacaatatggaacaaaaggacacagacagaattatttgttcaactaacattcttcataaaactgatcagacactccgaaggattgtatctcagacaatgaaggaagcaaaaggtaatcaggaagccttctcagagatgacatttaagcaaagatgggtaagagcgaaccatgcagctatctggaggatcattctaggcaatgaacacatcaagtgcagaagcgcaaaggttggctggttgcagtgttgcagaatcgagaagaggccattgagcacggggtgagatgaacaagtgcttcctcacaacttgaagcttctagcagaagaacttaacaagctcaaagcagagtttttggaagacctaaaacaaggaaacaaaaaatatctgtgctttcagcaaaccattgacataccagatgtcatttctttttttcattatgagaaagataatattgtacagaagtatttttcaaagcagcattaaaatttctgaactgccaa

SEQ ID NO: 166122 - DNA, 1098 bp, Homo sapiens
  Payload ID: 12700
  Gene Symbol: PSTK
  Gene Name: phosphoseryl-tRNA kinase
  ENST ID: ENST00000406217
  CDS Start-End: 1-1079
gcatgaagaccgccgagaacatcagaggaaccggcagcgacgggccgcggaaacgaggcctctgcgtcctctgtggcctccccgcggcaggaaaatcgactttcgcgcgcgccctcgcccaccggctgcagcaggagcagggttgggccatcggtgttgtcgcgtatgatgacgtcatgcccgacgcgtttctcgccggggcaagagcgcgaccggcgccatcccaatggaaattgcttcgacaggaactgttgaagtacctggaatacttcttgatggctgtcattaatgggtgtcagatgtctgtcccacccaacaggactgaagccatgtgggaagattttataacctgcttaaaggatcaagatctgatattttctgcagcatttgaggcccagtcttgctacctcttaacaaaaactgctgtttctagacctttgtttttggttttggatgacaatttttattatcagagtatgagatatgaagtctaccagctggctcggaaatattcgttgggcttttgccagctctttttagattgtcctcttgagacctgtttacagaggaatggccagaggccacaggcactgcctcctgagaccatccacctgatgggaagaaagctagaaaagcccaaccctgagaaaaatgcttgggaacacaacagcctcacaattccgagtccagcatgtgcttcggaggccagcctggaagtgactgatttattgctcactgctttggaaaatccagtaaaatatgctgaggacaatatggaacaaaaggacacagacagaattatttgttcaactaacattcttcataaaactgatcagacactccgaaggattgtatctcagacaatgaaggaagcaaaagatgaacaagtgcttcctcacaacttgaagcttctagcagaagaacttaacaagctcaaagcagagtttttggaagacctaaaacaaggaaacaaaaaatatctgtgctttcagcaaaccattgacataccagatgtcatttctttttttcattatgagaaagataatattgtacagaagtatttttcaaagcagcattaaaatttctgaactgccaatc

SEQ ID NO: 166123 - DNA, 1047 bp, Homo sapiens
  Payload ID: 12700
  Gene Symbol: PSTK
  Gene Name: phosphoseryl-tRNA kinase
  Uniprot ID: Q8IV42
  ENST ID: ENST00000405485
  CDS Start-End: 1-1047
atgaagaccgccgagaacatcagaggaaccggcagcgacgggccgcggaaacgaggcctctgcgtcctctgtggcctccccgcggcaggaaaatcgactttcgcgcgcgccctcgcccaccggctgcagcaggagcagggttgggccatcggtgttgtcgcgtatgatgacgtcatgcccgacgcgtttctcgccggggcaagagcgcgaccggcgccatcccaatggaaattgcttcgacaggaactgttgaagtacctggaatacttcttgatggctgtcattaatgggtgtcagatgtctgtcccacccaacaggactgaagccatgtgggaagattttataacctgcttaaaggatcaagatctgatattttctgcagcatttgaggcccagtcttgctacctcttaacaaaaactgctgtttctagacctttgtttttggttttggatgacaatttttattatcagagtatgagatatgaagtctaccagctggctcggaaatattcgttgggcttttgccagctctttttagattgtcctcttgagacctgtttacagaggaatggccagaggccacaggcactgcctcctgagaccatccacctgatgggaagaaagctagaaaagcccaaccctgagaaaaatgcttgggaacacaacagcctcacaattccgagtccagcatgtgcttcggaggccagcctggaagtgactgatttattgctcactgctttggaaaatccagtaaaatatgctgaggacaatatggaacaaaaggacacagacagaattatttgttcaactaacattcttcataaaactgatcagacactccgaaggattgtatctcagacaatgaaggaagcaaaaggtaatcaggaagccttctcagagatgacatttaagcaaagatgggtaagagcgaaccatgcagctatctggaggatcattctaggcaatgaacacatcaagtgcagaagcgcaaaggttggctggttgcagtgttgcagaatcgagaagaggccattgagcacggggtga

SEQ ID NO: 166124 - DNA, 3448 bp, Homo sapiens
  Payload ID: 12701
  Gene Symbol: PTER
  Gene Name: phosphotriesterase related
  Uniprot ID: Q96BW5
  ENST ID: ENST00000298942
  CDS Start-End: 51-959
agaaaaaagaaatcctctttttagaacatctcttggtggtaccatcagaaatgtcttccttaagtggaaaagtccaaaccgttttgggccttgtagagccaagcaaactgggccgtaccctgacccatgaacacctggccatgacctttgactgctgttactgtccacctcccccgtgccaggaagctatttccaaagaacctatcgtgatgaaaaatttatattggattcagaaaaacgcctattcccataaagaaaaccttcaattaaatcaggagacagaagccataaaggaagaactgttgtattttaaagctaatggtggaggggctttggtggaaaacacaaccactgggattagccgagacacacagacgttgaagaggcttgcagaagagactggcgtccatatcatatctggagccgggttttatgtggatgcaactcactcctcagagaccagggccatgtcagtggagcagcttaccgatgtccttatgaatgaaattctccatggagctgatggaaccagtatcaagtgtggcattattggagaaattggttgctcctggcctttgactgagagtgaaagaaaggttctccaggccacagctcatgcccaggctcagcttggttgtcctgttattatccatcctggacggagctccagggcaccatttcagattatccgaatattgcaagaagcaggcgcagacatctccaaaacagtcatgtcacacctggatagggtgcgtctcctggtggaagagggctgtgaagatcgaattctggtagcacatgacatacatacgaaaacccggctgatgaaatatggaggtcacggctattctcatatactcaccaatgttgttcctaaaatgttgctgagaggcataactgagaatgtgcttgataagattctaatagagaaccctaagcaatggctaactttcaaataggatggttgcttatgaattcacaccttgagtataaaacttgcagagaacattcagcgatttccagtccactgtgagatattaatcagttacctaggactaatgacagatcatttccttctgatgagaactaggagggtttgccttctctgagaccagctattacaactgtgcctctagggagttactcagcctaattgagccctattattttaacttaacaaaataaatacagaagtacctatttctaaacaatgatttaaagtctatatcccctaagcggagttgttgtttttctccctaatctatcagctgcactacttgagaaaatttaaagtgtttctagttaaattatttccttcttgagcgatctaatgtttcttgtaatattgatgatcctactaattatcctgctgttctttaattaatgcttaatgaataatatggcactgtaaaatagcttctgcaacaagggaagttaaattttgagacttttttccccaaaggatactgactgtaatacaattaccaattcacaatgataaaaatattttgaaaggttaattttatactgtccacctatctatatattcttctactgaaatgattttgatatctttggctttccggtatctatttttgccatacattttgctgttttgcaaagtttgtataagaacacataacactactgaattataaaaattcaatcataaaagtcaaaatatattacataatatagtttaatgaatcattacatttataataacaaaggccacaatttaattaattggtaagatataatgcaaaaaaaaaaagagaaatgtttgccttatgtatattccctttatttcctttaccttttgtttttccttggacctaaacagagaaaataatgcttatgtatctgaagaaaaggtcagatctattggaaatgacagcccgatacttgagcctcctctttaaaaggtatccagccctgatattttgtgtaaataaaatgtttttaaaacctgttagttaaaacacttaggtgatgggcactgctgcttataaattcatcttttggttgaatcctcactatgctatttggtacctaaaaatattctccaaacccttgctgccagttcctctttgataaatatatagttaattcgaaataaaatccattgcaattcatttatgagttatcttacatatcacaaagaccaattagaattagtcattattcttgatgaagagtctgtttttaatcataaaaatcatgacagttactcagacccaggcatttcaacagagctaacaccaccttcagataggcacaccatgcataactcttgggaagttgagctttgctaaataaaagatatttctgctgatcaaagatgatcaagctttctgtgtattggaacagaaagtaacaaagaggaatgagccaggagaacaaactaattcctttaaataaataaaaaaaaaaaatgcaaatgtccttcaccagtaaagcaagcaaatttttaaaatctctgtttttgaaatctactcgtcaaagagttttcagaggcaatgaaaggggaacagatttttcattgtaatagtggaagttgtgtgatagttaggagatatcaacatgcatttttaatcttttccttagatgaaagagatggcttttggcagtgtgttctaaccagaaagaaaggatttgtattactctccaaatctactgtactgtcagcttcactccacctgagaaaaaagaaaaaaaaattgatagctcaaatgcatgtaattcataaacactgcaaaggagagccacttggtgtctgcagtcctcatattaacagtctgtcacagaatgcagttaaagtattgattggcatatggtaatagagcaaccatagccttaacttacagacctgtgaaataaagggcattttgacctaatacaattaattttctggataactcttaaagagaagtcattttaactgtttttgctactccatatattgtcattcaaaatatattttaacccaaaataagttaaataatttgtgcatgtttgtgtgtgtatatatgcatacacttttttatattaaaattttgaggctatacagccactgtgccctgtggaataaagccatatatataaatgttttatatgtatatgttttatacataaataaaacatttcatctaatatatatatgtgtgtgtgagtatatgtgtgcatgtttagcagatatttgtataaaatataaacactctgttgtcatataggctatatgcgaaattgttaattttaaaataacctcaggccacagacttgtagtaatcatttgaaggcctcacctagtgtccccttggtgacgtatgcagcagctcaaattaaacctttgtgcattgggttatgaataatcttttcttccaaagatggcaaaagcctcggtttgatttgatactaaagaataaatttctctgactttcccagtgaa

SEQ ID NO: 166125 - DNA, 3777 bp, Homo sapiens
  Payload ID: 12701
  Gene Symbol: PTER
  Gene Name: phosphotriesterase related
  Uniprot ID: Q96BW5
  ENST ID: ENST00000378000
  CDS Start-End: 247-1296
aaaaaggccagggaagttggcctgccggaagttcccagggagaaggcagcgcgttgtacccgagattcagggtctggctctgcttcccaggctagagtgcatttggcgcgatcacagctcactgcagcctcgacctcctgagctcaagcgaacttcctgcctcagcctcctgagcttcctgagtagctgcgactacagaaaaaagaaatcctctttttagaacatctcttggtggtaccatcagaaatgtcttccttaagtggaaaagtccaaaccgttttgggccttgtagagccaagcaaactgggccgtaccctgacccatgaacacctggccatgacctttgactgctgttactgtccacctcccccgtgccaggaagctatttccaaagaacctatcgtgatgaaaaatttatattggattcagaaaaacgcctattcccataaagaaaaccttcaattaaatcaggagacagaagccataaaggaagaactgttgtattttaaagctaatggtggaggggctttggtggaaaacacaaccactgggattagccgagacacacagacgttgaagaggcttgcagaagagactggcgtccatatcatatctggagccgggttttatgtggatgcaactcactcctcagagaccagggccatgtcagtggagcagcttaccgatgtccttatgaatgaaattctccatggagctgatggaaccagtatcaagtgtggcattattggagaaattggttgctcctggcctttgactgagagtgaaagaaaggttctccaggccacagctcatgcccaggctcagcttggttgtcctgttattatccatcctggacggagctccagggcaccatttcagattatccgaatattgcaagaagcaggcgcagacatctccaaaacagtcatgtcacacctggataggactattcttgataagaaagagctcttggagtttgctcaacttggctgctacttggaatatgatctctttggtactgaactacttcattaccaactcggcccagatattgacatgcctgatgataacaaaagaattagaagggtgcgtctcctggtggaagagggctgtgaagatcgaattctggtagcacatgacatacatacgaaaacccggctgatgaaatatggaggtcacggctattctcatatactcaccaatgttgttcctaaaatgttgctgagaggcataactgagaatgtgcttgataagattctaatagagaaccctaagcaatggctaactttcaaataggatggttgcttatgaattcacaccttgagtataaaacttgcagagaacattcagcgatttccagtccactgtgagatattaatcagttacctaggactaatgacagatcatttccttctgatgagaactaggagggtttgccttctctgagaccagctattacaactgtgcctctagggagttactcagcctaattgagccctattattttaacttaacaaaataaatacagaagtacctatttctaaacaatgatttaaagtctatatcccctaagcggagttgttgtttttctccctaatctatcagctgcactacttgagaaaatttaaagtgtttctagttaaattatttccttcttgagcgatctaatgtttcttgtaatattgatgatcctactaattatcctgctgttctttaattaatgcttaatgaataatatggcactgtaaaatagcttctgcaacaagggaagttaaattttgagacttttttccccaaaggatactgactgtaatacaattaccaattcacaatgataaaaatattttgaaaggttaattttatactgtccacctatctatatattcttctactgaaatgattttgatatctttggctttccggtatctatttttgccatacattttgctgttttgcaaagtttgtataagaacacataacactactgaattataaaaattcaatcataaaagtcaaaatatattacataatatagtttaatgaatcattacatttataataacaaaggccacaatttaattaattggtaagatataatgcaaaaaaaaaaagagaaatgtttgccttatgtatattccctttatttcctttaccttttgtttttccttggacctaaacagagaaaataatgcttatgtatctgaagaaaaggtcagatctattggaaatgacagcccgatacttgagcctcctctttaaaaggtatccagccctgatattttgtgtaaataaaatgtttttaaaacctgttagttaaaacacttaggtgatgggcactgctgcttataaattcatcttttggttgaatcctcactatgctatttggtacctaaaaatattctccaaacccttgctgccagttcctctttgataaatatatagttaattcgaaataaaatccattgcaattcatttatgagttatcttacatatcacaaagaccaattagaattagtcattattcttgatgaagagtctgtttttaatcataaaaatcatgacagttactcagacccaggcatttcaacagagctaacaccaccttcagataggcacaccatgcataactcttgggaagttgagctttgctaaataaaagatatttctgctgatcaaagatgatcaagctttctgtgtattggaacagaaagtaacaaagaggaatgagccaggagaacaaactaattcctttaaataaataaaaaaaaaaaatgcaaatgtccttcaccagtaaagcaagcaaatttttaaaatctctgtttttgaaatctactcgtcaaagagttttcagaggcaatgaaaggggaacagatttttcattgtaatagtggaagttgtgtgatagttaggagatatcaacatgcatttttaatcttttccttagatgaaagagatggcttttggcagtgtgttctaaccagaaagaaaggatttgtattactctccaaatctactgtactgtcagcttcactccacctgagaaaaaagaaaaaaaaattgatagctcaaatgcatgtaattcataaacactgcaaaggagagccacttggtgtctgcagtcctcatattaacagtctgtcacagaatgcagttaaagtattgattggcatatggtaatagagcaaccatagccttaacttacagacctgtgaaataaagggcattttgacctaatacaattaattttctggataactcttaaagagaagtcattttaactgtttttgctactccatatattgtcattcaaaatatattttaacccaaaataagttaaataatttgtgcatgtttgtgtgtgtatatatgcatacacttttttatattaaaattttgaggctatacagccactgtgccctgtggaataaagccatatatataaatgttttatatgtatatgttttatacataaataaaacatttcatctaatatatatatgtgtgtgtgagtatatgtgtgcatgtttagcagatatttgtataaaatataaacactctgttgtcatataggctatatgcgaaattgttaattttaaaataacctcaggccacagacttgtagtaatcatttgaaggcctcacctagtgtccccttggtgacgtatgcagcagctcaaattaaacctttgtgcattgggttatgaataatcttttcttccaaagatggcaaaagcctcggtttgatttgatactaaagaataaatttctctgactttc

SEQ ID NO: 166126 - DNA, 3212 bp, Homo sapiens
  Payload ID: 12701
  Gene Symbol: PTER
  Gene Name: phosphotriesterase related
  ENST ID: ENST00000423462
  CDS Start-End: 121-723
gagagaaccagagggcgaagtgggagggcacaggggagactaaaaaggccagggaagttggcctgccggaagttcccagggagaaggcagcgcgttgtacccgagcttaccgatgtccttatgaatgaaattctccatggagctgatggaaccagtatcaagtgtggcattattggagaaattggttgctcctggcctttgactgagagtgaaagaaaggttctccaggccacagctcatgcccaggctcagcttggttgtcctgttattatccatcctggacggagctccagggcaccatttcagattatccgaatattgcaagaagcaggcgcagacatctccaaaacagtcatgtcacacctggataggactattcttgataagaaagagctcttggagtttgctcaacttggctgctacttggaatatgatctctttggtactgaactacttcattaccaactcggcccagatattgacatgcctgatgataacaaaagaattagaagggtgcgtctcctggtggaagagggctgtgaagatcgaattctggtagcacatgacatacatacgaaaacccggctgatgaaatatggaggtcacggctattctcatatactcaccaatgttgttcctaaaatgttgctgagaggcataactgagaatgtgcttgataagattctaatagagaaccctaagcaatggctaactttcaaataggatggttgcttatgaattcacaccttgagtataaaacttgcagagaacattcagcgatttccagtccactgtgagatattaatcagttacctaggactaatgacagatcatttccttctgatgagaactaggagggtttgccttctctgagaccagctattacaactgtgcctctagggagttactcagcctaattgagccctattattttaacttaacaaaataaatacagaagtacctatttctaaacaatgatttaaagtctatatcccctaagcggagttgttgtttttctccctaatctatcagctgcactacttgagaaaatttaaagtgtttctagttaaattatttccttcttgagcgatctaatgtttcttgtaatattgatgatcctactaattatcctgctgttctttaattaatgcttaatgaataatatggcactgtaaaatagcttctgcaacaagggaagttaaattttgagacttttttccccaaaggatactgactgtaatacaattaccaattcacaatgataaaaatattttgaaaggttaattttatactgtccacctatctatatattcttctactgaaatgattttgatatctttggctttccggtatctatttttgccatacattttgctgttttgcaaagtttgtataagaacacataacactactgaattataaaaattcaatcataaaagtcaaaatatattacataatatagtttaatgaatcattacatttataataacaaaggccacaatttaattaattggtaagatataatgcaaaaaaaaaaagagaaatgtttgccttatgtatattccctttatttcctttaccttttgtttttccttggacctaaacagagaaaataatgcttatgtatctgaagaaaaggtcagatctattggaaatgacagcccgatacttgagcctcctctttaaaaggtatccagccctgatattttgtgtaaataaaatgtttttaaaacctgttagttaaaacacttaggtgatgggcactgctgcttataaattcatcttttggttgaatcctcactatgctatttggtacctaaaaatattctccaaacccttgctgccagttcctctttgataaatatatagttaattcgaaataaaatccattgcaattcatttatgagttatcttacatatcacaaagaccaattagaattagtcattattcttgatgaagagtctgtttttaatcataaaaatcatgacagttactcagacccaggcatttcaacagagctaacaccaccttcagataggcacaccatgcataactcttgggaagttgagctttgctaaataaaagatatttctgctgatcaaagatgatcaagctttctgtgtattggaacagaaagtaacaaagaggaatgagccaggagaacaaactaattcctttaaataaataaaaaaaaaaaatgcaaatgtccttcaccagtaaagcaagcaaatttttaaaatctctgtttttgaaatctactcgtcaaagagttttcagaggcaatgaaaggggaacagatttttcattgtaatagtggaagttgtgtgatagttaggagatatcaacatgcatttttaatcttttccttagatgaaagagatggcttttggcagtgtgttctaaccagaaagaaaggatttgtattactctccaaatctactgtactgtcagcttcactccacctgagaaaaaagaaaaaaaaattgatagctcaaatgcatgtaattcataaacactgcaaaggagagccacttggtgtctgcagtcctcatattaacagtctgtcacagaatgcagttaaagtattgattggcatatggtaatagagcaaccatagccttaacttacagacctgtgaaataaagggcattttgacctaatacaattaattttctggataactcttaaagagaagtcattttaactgtttttgctactccatatattgtcattcaaaatatattttaacccaaaataagttaaataatttgtgcatgtttgtgtgtgtatatatgcatacacttttttatattaaaattttgaggctatacagccactgtgccctgtggaataaagccatatatataaatgttttatatgtatatgttttatacataaataaaacatttcatctaatatatatatgtgtgtgtgagtatatgtgtgcatgtttagcagatatttgtataaaatataaacactctgttgtcatataggctatatgcgaaattgttaattttaaaataacctcaggccacagacttgtagtaatcatttgaaggcctcacctagtgtccccttggtgacgtatgcagcagctcaaattaaacctttgtgcattgggttatgaataatcttttcttccaaagatggcaaaagcctcggtttgatttgatactaaagaataaatttctctgactttcccagtgaa

SEQ ID NO: 166127 - DNA, 1203 bp, Homo sapiens
  Payload ID: 12701
  Gene Symbol: PTER
  Gene Name: phosphotriesterase related
  Uniprot ID: Q96BW5
  ENST ID: ENST00000535784
  CDS Start-End: 154-1203
gagagaaccagagggcgaagtgggagggcacaggggagactaaaaaggccagggaagttggcctgccggaagttcccagggagaaggcagcgcgttgtacccgagaaaaaagaaatcctctttttagaacatctcttggtggtaccatcagaaatgtcttccttaagtggaaaagtccaaaccgttttgggccttgtagagccaagcaaactgggccgtaccctgacccatgaacacctggccatgacctttgactgctgttactgtccacctcccccgtgccaggaagctatttccaaagaacctatcgtgatgaaaaatttatattggattcagaaaaacgcctattcccataaagaaaaccttcaattaaatcaggagacagaagccataaaggaagaactgttgtattttaaagctaatggtggaggggctttggtggaaaacacaaccactgggattagccgagacacacagacgttgaagaggcttgcagaagagactggcgtccatatcatatctggagccgggttttatgtggatgcaactcactcctcagagaccagggccatgtcagtggagcagcttaccgatgtccttatgaatgaaattctccatggagctgatggaaccagtatcaagtgtggcattattggagaaattggttgctcctggcctttgactgagagtgaaagaaaggttctccaggccacagctcatgcccaggctcagcttggttgtcctgttattatccatcctggacggagctccagggcaccatttcagattatccgaatattgcaagaagcaggcgcagacatctccaaaacagtcatgtcacacctggataggactattcttgataagaaagagctcttggagtttgctcaacttggctgctacttggaatatgatctctttggtactgaactacttcattaccaactcggcccagatattgacatgcctgatgataacaaaagaattagaagggtgcgtctcctggtggaagagggctgtgaagatcgaattctggtagcacatgacatacatacgaaaacccggctgatgaaatatggaggtcacggctattctcatatactcaccaatgttgttcctaaaatgttgctgagaggcataactgagaatgtgcttgataagattctaatagagaaccctaagcaatggctaactttcaaatag

SEQ ID NO: 166128 - DNA, 839 bp, Homo sapiens
  Payload ID: 12702
  Gene Symbol: PID1
  Gene Name: phosphotyrosine interaction domain containing 1
  Uniprot ID: Q7Z2X4
  ENST ID: ENST00000354069
  CDS Start-End: 32-784
atgaaaagccttgtacaagaggcttcgtgccatgttcagcctgccccttagccttccactgtgtgaggacacagcattccttccttccaagtgctgcagctctcacaagacaatcaaacaagcccgcaccttgatcatgatcttcctagcctccggaacgcactttcagaccatgctgaagtctaaattgaatgtcttaacactgaaaaaggaacctctcccagcggtcatcttccatgagccggaggccattgagctgtgcacgaccacaccgctgatgaagacaaggactcacagtggctgcaaggttacctacctgggcaaagtctccaccactggcatgcagtttttgtcaggctgcacagaaaagccagtcattgagctctggaagaagcacacgctagcccgagaggatgtctttccggccaatgccctcctggaaatccggccattccaagtttggctccatcatctcgaccacaaaggggaggccacagtgcacatggataccttccaggtggcccgcatcgcctactgcaccgccgaccacaacgtgagccccaacatcttcgcctgggtctacagggagatcaatgatgacctgtcctaccagatggactgccacgccgtggagtgcgagagcaagctcgaggccaagaaactggcccacgccatgatggaggccttcaggaagactttccacagtatgaagagcgacgggcggatccacagcaacagctcctccgaagaggtttcccaggaattggaatccgatgatggctgaatgaacttgagacgcttcagcaaaggcagcattggtcacggagttcaagggaata

SEQ ID NO: 166129 - DNA, 2745 bp, Homo sapiens
  Payload ID: 12702
  Gene Symbol: PID1
  Gene Name: phosphotyrosine interaction domain containing 1
  Uniprot ID: Q7Z2X4
  ENST ID: ENST00000392054
  CDS Start-End: 341-1087
aggacagccggcgcgcggccgtgcccacaagttgccggcagctgagcgccgcgcctcctcctgctcgcagccccctacgcccacccggcggcggtggccagcgccaggacgcacatcccgcggacaccgaccccagatgtaaagcgggaccccagcccctcgccccccggcgcgatcgacagtctcgccagcgtctcctctgccaaaacccagggctggaagatgtggcagccggccacggagcgcctgcaggagagatttgcagacacagaagcggcacagagaaggccattgtgaagatcaaggcagaaaccggagttatggcatcataagccaaggaatgccaaggattgctggcaaccacctgatgttagaagagtcgaggacatgttcttctccagagcttttggatggtgtgtggccctgccaacctttacattttggacttccagcctccgaaatgcactttcagaccatgctgaagtctaaattgaatgtcttaacactgaaaaaggaacctctcccagcggtcatcttccatgagccggaggccattgagctgtgcacgaccacaccgctgatgaagacaaggactcacagtggctgcaaggttacctacctgggcaaagtctccaccactggcatgcagtttttgtcaggctgcacagaaaagccagtcattgagctctggaagaagcacacgctagcccgagaggatgtctttccggccaatgccctcctggaaatccggccattccaagtttggctccatcatctcgaccacaaaggggaggccacagtgcacatggataccttccaggtggcccgcatcgcctactgcaccgccgaccacaacgtgagccccaacatcttcgcctgggtctacagggagatcaatgatgacctgtcctaccagatggactgccacgccgtggagtgcgagagcaagctcgaggccaagaaactggcccacgccatgatggaggccttcaggaagactttccacagtatgaagagcgacgggcggatccacagcaacagctcctccgaagaggtttcccaggaattggaatccgatgatggctgaatgaacttgagacgcttcagcaaaggcagcattggtcacggagttcaagggaatagatgagtaagcaacgtttcaaatttgggatgaaaagactgccaaactattggctgaccaaggtttttaaattcagaagagcaattctaaatctaaagaaatgtatcattaaagtaattacgttacattgaaacctgctgctgctgtgactgtgaggagggtgggagtgtggatggggaggaaggttctaggctctcttatttttctcatttcccaatgcctctctgtgggagagctccatgccagttttcaccacgctcaggcaaatactctgcagctgttattggatgggccattccgatctgccttatgaaattccacaagaatgttaggggcacctatgggatctctagtggggtgggcagggtgctgatggggacgctggccgcagggaggaaggaacatctcgggagggccctctgttcctctcccacggcagatgccctcctctgtatgcaaatcagcacagcctttattgagctttacaactaacaacctgatagttggcagttaattcacagttacagataatgcttttatttacataaatataccaagtagtaccctcttattgtattcacttcatctattttcttagaatacttgcaattactaatgaccccttccctttccctcctgctgccctgtccaccctctttccccttctaacatccttagagggatgaaatctcagcatatgttgcaggacaccaaaaggaagaaaacaatcaagcaaataaaataaacagtcaaacaaaccaggagtttaaaacaacaaccccaacaacagaagccttggcaaagaggaataagtgatcagcaagtgaacacactctatgtcaactctccttttatccagctgagatttatggtaacttatttaattaatggtcctgtctgatgcatccttgatggcaagcttcaaatctgatttggtatcaccgaggaaaccttgcccccatcactcagcattgcacttagatacagaatgagttagataaacttggcttgtctagagacccatgtcatcttaacctaaagggaaatcttattgcgttatcataaaattgatgatatcttagggtcagaattgccctttttttttattttgaatgggaagttctcactaaaacaatcctgagatttcttaatttcatggttctttaaatattataaacacagagtcaacatagaatgaaattgtatttgttaaaatacacacattggaggacaagagcagatgactacttttcgaagtaatgctgctccttcctaaaagtctgttttcaatcctggtaatattaggggcactgcggcacctaagaagccttaaatgagagctaatccaatctagagagcgatggtgtcagcatttcggtctgcatatctgtgtgtccgtatctgcgtttgtgtgcgtgtacgtgtgcccctgtgtgtgggcccagttttcaggcatgtagaataagcatggagtcatattgaggaggactcacttcttgaagatatgcttgttgctttacaacatatgtaagctattctttagcataaatgcattcattctttaataaaaatatgtttgcattaataaagctgaggagtttcat

SEQ ID NO: 166130 - DNA, 2533 bp, Homo sapiens
  Payload ID: 12702
  Gene Symbol: PID1
  Gene Name: phosphotyrosine interaction domain containing 1
  Uniprot ID: Q7Z2X4
  ENST ID: ENST00000392055
  CDS Start-End: 243-896
agtcctctcgcagctgcgccaggacagccggcgcgcggccgtgcccacaagttgccggcagctgagcgccgcgcctcctcctgctcgcagccccctacgcccacccggcggcggtggccagcgccaggacgcacatcccgcggacaccgaccccagatgtaaagcgggaccccagcccctcgccccccggcgcgatcgacagtctcgccagcgtctcctctgccaaaacccagggctggaagatgtggcagccggccacggagcgcctgcagcactttcagaccatgctgaagtctaaattgaatgtcttaacactgaaaaaggaacctctcccagcggtcatcttccatgagccggaggccattgagctgtgcacgaccacaccgctgatgaagacaaggactcacagtggctgcaaggttacctacctgggcaaagtctccaccactggcatgcagtttttgtcaggctgcacagaaaagccagtcattgagctctggaagaagcacacgctagcccgagaggatgtctttccggccaatgccctcctggaaatccggccattccaagtttggctccatcatctcgaccacaaaggggaggccacagtgcacatggataccttccaggtggcccgcatcgcctactgcaccgccgaccacaacgtgagccccaacatcttcgcctgggtctacagggagatcaatgatgacctgtcctaccagatggactgccacgccgtggagtgcgagagcaagctcgaggccaagaaactggcccacgccatgatggaggccttcaggaagactttccacagtatgaagagcgacgggcggatccacagcaacagctcctccgaagaggtttcccaggaattggaatccgatgatggctgaatgaacttgagacgcttcagcaaaggcagcattggtcacggagttcaagggaatagatgagtaagcaacgtttcaaatttgggatgaaaagactgccaaactattggctgaccaaggtttttaaattcagaagagcaattctaaatctaaagaaatgtatcattaaagtaattacgttacattgaaacctgctgctgctgtgactgtgaggagggtgggagtgtggatggggaggaaggttctaggctctcttatttttctcatttcccaatgcctctctgtgggagagctccatgccagttttcaccacgctcaggcaaatactctgcagctgttattggatgggccattccgatctgccttatgaaattccacaagaatgttaggggcacctatgggatctctagtggggtgggcagggtgctgatggggacgctggccgcagggaggaaggaacatctcgggagggccctctgttcctctcccacggcagatgccctcctctgtatgcaaatcagcacagcctttattgagctttacaactaacaacctgatagttggcagttaattcacagttacagataatgcttttatttacataaatataccaagtagtaccctcttattgtattcacttcatctattttcttagaatacttgcaattactaatgaccccttccctttccctcctgctgccctgtccaccctctttccccttctaacatccttagagggatgaaatctcagcatatgttgcaggacaccaaaaggaagaaaacaatcaagcaaataaaataaacagtcaaacaaaccaggagtttaaaacaacaaccccaacaacagaagccttggcaaagaggaataagtgatcagcaagtgaacacactctatgtcaactctccttttatccagctgagatttatggtaacttatttaattaatggtcctgtctgatgcatccttgatggcaagcttcaaatctgatttggtatcaccgaggaaaccttgcccccatcactcagcattgcacttagatacagaatgagttagataaacttggcttgtctagagacccatgtcatcttaacctaaagggaaatcttattgcgttatcataaaattgatgatatcttagggtcagaattgccctttttttttattttgaatgggaagttctcactaaaacaatcctgagatttcttaatttcatggttctttaaatattataaacacagagtcaacatagaatgaaattgtatttgttaaaatacacacattggaggacaagagcagatgactacttttcgaagtaatgctgctccttcctaaaagtctgttttcaatcctggtaatattaggggcactgcggcacctaagaagccttaaatgagagctaatccaatctagagagcgatggtgtcagcatttcggtctgcatatctgtgtgtccgtatctgcgtttgtgtgcgtgtacgtgtgcccctgtgtgtgggcccagttttcaggcatgtagaataagcatggagtcatattgaggaggactcacttcttgaagatatgcttgttgctttacaacatatgtaagctattctttagcataaatgcattcattctttaataaaaatatgtttgcatt

SEQ ID NO: 166131 - DNA, 2387 bp, Homo sapiens
  Payload ID: 12702
  Gene Symbol: PID1
  Gene Name: phosphotyrosine interaction domain containing 1
  Uniprot ID: Q7Z2X4
  ENST ID: ENST00000409462
  CDS Start-End: 238-744
tctcgcagctgcgccaggacagccggcgcgcggccgtgcccacaagttgccggcagctgagcgccgcgcctcctcctgctcgcagccccctacgcccacccggcggcggtggccagcgccaggacgcacatcccgcggacaccgaccccagatgtaaagcgggaccccagcccctcgccccccggcgcgatcgacagtctcgccagcgtctcctctgccaaaacccagggctggaagatgtggcagccggccacggagcgcctgcaggttacctacctgggcaaagtctccaccactggcatgcagtttttgtcaggctgcacagaaaagccagtcattgagctctggaagaagcacacgctagcccgagaggatgtctttccggccaatgccctcctggaaatccggccattccaagtttggctccatcatctcgaccacaaaggggaggccacagtgcacatggataccttccaggtggcccgcatcgcctactgcaccgccgaccacaacgtgagccccaacatcttcgcctgggtctacagggagatcaatgatgacctgtcctaccagatggactgccacgccgtggagtgcgagagcaagctcgaggccaagaaactggcccacgccatgatggaggccttcaggaagactttccacagtatgaagagcgacgggcggatccacagcaacagctcctccgaagaggtttcccaggaattggaatccgatgatggctgaatgaacttgagacgcttcagcaaaggcagcattggtcacggagttcaagggaatagatgagtaagcaacgtttcaaatttgggatgaaaagactgccaaactattggctgaccaaggtttttaaattcagaagagcaattctaaatctaaagaaatgtatcattaaagtaattacgttacattgaaacctgctgctgctgtgactgtgaggagggtgggagtgtggatggggaggaaggttctaggctctcttatttttctcatttcccaatgcctctctgtgggagagctccatgccagttttcaccacgctcaggcaaatactctgcagctgttattggatgggccattccgatctgccttatgaaattccacaagaatgttaggggcacctatgggatctctagtggggtgggcagggtgctgatggggacgctggccgcagggaggaaggaacatctcgggagggccctctgttcctctcccacggcagatgccctcctctgtatgcaaatcagcacagcctttattgagctttacaactaacaacctgatagttggcagttaattcacagttacagataatgcttttatttacataaatataccaagtagtaccctcttattgtattcacttcatctattttcttagaatacttgcaattactaatgaccccttccctttccctcctgctgccctgtccaccctctttccccttctaacatccttagagggatgaaatctcagcatatgttgcaggacaccaaaaggaagaaaacaatcaagcaaataaaataaacagtcaaacaaaccaggagtttaaaacaacaaccccaacaacagaagccttggcaaagaggaataagtgatcagcaagtgaacacactctatgtcaactctccttttatccagctgagatttatggtaacttatttaattaatggtcctgtctgatgcatccttgatggcaagcttcaaatctgatttggtatcaccgaggaaaccttgcccccatcactcagcattgcacttagatacagaatgagttagataaacttggcttgtctagagacccatgtcatcttaacctaaagggaaatcttattgcgttatcataaaattgatgatatcttagggtcagaattgccctttttttttattttgaatgggaagttctcactaaaacaatcctgagatttcttaatttcatggttctttaaatattataaacacagagtcaacatagaatgaaattgtatttgttaaaatacacacattggaggacaagagcagatgactacttttcgaagtaatgctgctccttcctaaaagtctgttttcaatcctggtaatattaggggcactgcggcacctaagaagccttaaatgagagctaatccaatctagagagcgatggtgtcagcatttcggtctgcatatctgtgtgtccgtatctgcgtttgtgtgcgtgtacgtgtgcccctgtgtgtgggcccagttttcaggcatgtagaataagcatggagtcatattgaggaggactcacttcttgaagatatgcttgttgctttacaacatatgtaagctattctttagcataaatgcattcattctttaataaaaatatgtttgcattaataaa

SEQ ID NO: 166132 - DNA, 553 bp, Homo sapiens
  Payload ID: 12702
  Gene Symbol: PID1
  Gene Name: phosphotyrosine interaction domain containing 1
  ENST ID: ENST00000534952
  CDS Start-End: 197-322
acaagttgccggcagctgagcgccgcgcctcctcctgctcgcagccccctacgcccacccggcggcggtggccagcgccaggacgcacatcccgcggacaccgaccccagatgtaaagcgggaccccagcccctcgccccccggcgcgatcgacagtctcgccagcgtctcctctgccaaaacccagggctggaagatgtggcagccggccacggagcgcctgcaggatggctgctgcaactccagtcacaatacacttgtccctcagtatccctggggaatcgattcaggacctcttgtgaataccaaaatctacagatagtcaagaccgtgcactttcagaccatgctgaagtctaaattgaatgtcttaacactgaaaaaggaacctctcccagcggtcatcttccatgagccggaggccattgagctgtgcacgaccacaccgctgatgaagacaaggactcacagtggctgcaaggttacctacctgggcaaagtctccaccactggcatgcagtttttgtcaggctgcacagaaaagccagtcattg

SEQ ID NO: 166133 - DNA, 1577 bp, Homo sapiens
  Payload ID: 12703
  Gene Symbol: PHYH
  Gene Name: phytanoyl-CoA 2-hydroxylase
  Uniprot ID: O14832
  ENST ID: ENST00000263038
  CDS Start-End: 60-1076
gcccgctgggctaaatggggcagaggccgggaggggtgggggttccccgcgccgcagccatggagcagcttcgcgccgccgcccgtctgcagattgttctgggccacctcggccgcccctcggccggggctgtcgtagctcatcccacttcagggactatttcctctgccagtttccatcctcaacaattccagtatactctggataataacgttctaaccctggaacagagaaaattttatgaagaaaatgggtttctagtaatcaaaaatcttgtacctgatgccgatattcaacgctttcggaatgagtttgaaaaaatctgcagaaaggaggtgaaaccattaggattaacagtaatgagagatgtgaccatttcgaaatccgaatatgctccaagtgagaagatgatcacgaaggtccaggatttccaggaagataaggagctcttcagatactgcactctccccgagattctgaaatatgtggagtgcttcactggacctaatattatggccatgcacacaatgttgataaacaaacctccagattctggcaagaagacgtcccgtcaccccctgcaccaggacctgcactatttccccttcaggcccagcgatctcatcgtttgcgcctggacggcgatggagcacatcagccggaacaacggctgtctggttgtgctcccaggcacacacaagggctccctgaagccccacgattaccccaagtgggaggggggagttaacaaaatgttccacgggatccaggactacgaggaaaacaaggcccgggtgcacctggtgatggagaagggcgacactgttttcttccatcctttgctcatccacggatctggtcagaataaaacccagggattccggaaggcaatttcctgccatttcgccagtgccgattgccactacattgacgtgaagggcaccagtcaagaaaacatcgagaaggaagttgtaggaatagcacataaattctttggagctgaaaatagcgtgaacttgaaggatatttggatgtttcgagctcgacttgtgaaaggagaaagaaccaatctttgaaatagccatctgctataactctttcaacagaaaaccaaaaccaaacgaaatgtctaaggaaaatgttttcttaatgagatgatgtaaccttttctatcacttgttaaaagcagaaaacatgtatcaggtacttaattgcatagagttagttttgcagcacaatggtgttgctttaatggaaaaaaaaaacagtaaaagtgaaatattactgttttaaggaaaactaatttagggtggcagccaataaaggtggttggtgtctaatttaagtgttaaatcaatttctttcattcagttagctctttacccaagaagaagtgaatgatttggagcttagggtatgttttgtatcccctttctgataaacccattccctaccaattttatgtcataagagatttttttcccccaaatctagaacaatgtataatacattcacatctagtcaagggcataggaacggtgtcatggagtccaaataaagtggatattcctgctcgg

SEQ ID NO: 166134 - DNA, 1732 bp, Homo sapiens
  Payload ID: 12703
  Gene Symbol: PHYH
  Gene Name: phytanoyl-CoA 2-hydroxylase
  Uniprot ID: O14832
  ENST ID: ENST00000396913
  CDS Start-End: 511-1227
cggccgccctggggtcggggcaattgccgcgttgccctgccctccgggatccctgggggcctctgctcctctctttgtggagacgtcgtttcaccggcggcgcgtgaccccggcagctgtccagagacccagagatgtccaatcacaggcgcacggtgcacaggcgcgcagggctgcctggaaccggcccaggcaggcagtgaccgggacctctccggaggggagaggacggtgccctcccgggcaggagctggccaggcaggcgctgcccagggcggcctccctgctggactacggcattgccactgagttatataaagacactatttggggaaggacagcgggtatactctggataataacgttctaaccctggaacagagaaaattttatgaagaaaatgggtttctagtaatcaaaaatcttgtacctgatgccgatattcaacgctttcggaatgagtttgaaaaaatctgcagaaaggaggtgaaaccattaggattaacagtaatgagagatgtgaccatttcgaaatccgaatatgctccaagtgagaagatgatcacgaaggtccaggatttccaggaagataaggagctcttcagatactgcactctccccgagattctgaaatatgtggagtgcttcactggacctaatattatggccatgcacacaatgttgataaacaaacctccagattctggcaagaagacgtcccgtcaccccctgcaccaggacctgcactatttccccttcaggcccagcgatctcatcgtttgcgcctggacggcgatggagcacatcagccggaacaacggctgtctggttgtgctcccaggcacacacaagggctccctgaagccccacgattaccccaagtgggaggggggagttaacaaaatgttccacgggatccaggactacgaggaaaacaaggcccgggtgcacctggtgatggagaagggcgacactgttttcttccatcctttgctcatccacggatctggtcagaataaaacccagggattccggaaggcaatttcctgccatttcgccagtgccgattgccactacattgacgtgaagggcaccagtcaagaaaacatcgagaaggaagttgtaggaatagcacataaattctttggagctgaaaatagcgtgaacttgaaggatatttggatgtttcgagctcgacttgtgaaaggagaaagaaccaatctttgaaatagccatctgctataactctttcaacagaaaaccaaaaccaaacgaaatgtctaaggaaaatgttttcttaatgagatgatgtaaccttttctatcacttgttaaaagcagaaaacatgtatcaggtacttaattgcatagagttagttttgcagcacaatggtgttgctttaatggaaaaaaaaaacagtaaaagtgaaatattactgttttaaggaaaactaatttagggtggcagccaataaaggtggttggtgtctaatttaagtgttaaatcaatttctttcattcagttagctctttacccaagaagaagtgaatgatttggagcttagggtatgttttgtatcccctttctgataaacccattccctaccaattttatgtcataagagatttttttcccccaaatctagaacaatgtataatacattcacatctagtcaagggcataggaacggtgtcatggagtccaaataaagtggatattcctgctcggacaa

SEQ ID NO: 166135 - DNA, 1829 bp, Homo sapiens
  Payload ID: 12703
  Gene Symbol: PHYH
  Gene Name: phytanoyl-CoA 2-hydroxylase
  ENST ID: ENST00000396920
  CDS Start-End: 406-1371
cttgcgttcaaaccgtgacaaaccgtagagtccttgagagccccgggttactcctacatggtcatattcccgcgcgggatgccgaagtggggcagatgaggtccggagctgctgagggatcccgggtccttctgttggtctgagaccctggggcgggcggaatcccggagaaagccggagggactccccagtggaagcctgggagctgccgttctcctccctgcctgtgcaaacaggaaggggctggtgatgctggctgcgggcctccctcctggactgcgacattgtcaccaaattctataaagacgtcatgcaggaagtgataacgtgtgctgcgacgttctggaagtaactcgaagctaaaaaagaacaaaaaatcaatgaaaaaatgaaactaaagaaacaatgagatgctatgtcaatatccctcatcccacttcagggactatttcctctgccagtttccatcctcaacaattccagtatactctggataataacgttctaaccctggaacagagaaaattttatgaagaaaatgggtttctagtaatcaaaaatcttgtacctgatgccgatattcaacgctttcggaatgagtttgaaaaaatctgcagaaaggaggtgaaaccattaggattaacagtaatgagagatgtgaccatttcgaaatccgaatatgctccaagtgagaagatgatcacgaaggtccaggatttccaggaagataaggagctcttcagatactgcactctccccgagattctgaaatatgtggagtgcttcactggacctaatattatggccatgcacacaatgttgataaacaaacctccagattctggtaattgcaagaagacgtcccgtcaccccctgcaccaggacctgcactatttccccttcaggcccagcgatctcatcgtttgcgcctggacggcgatggagcacatcagccggaacaacggctgtctggttgtgctcccaggcacacacaagggctccctgaagccccacgattaccccaagtgggaggggggagttaacaaaatgttccacgggatccaggactacgaggaaaacaaggcccgggtgcacctggtgatggagaagggcgacactgttttcttccatcctttgctcatccacggatctggtcagaataaaacccagggattccggaaggcaatttcctgccatttcgccagtgccgattgccactacattgacgtgaagggcaccagtcaagaaaacatcgagaaggaagttgtaggaatagcacataaattctttggagctgaaaatagcgtgaacttgaaggatatttggatgtttcgagctcgacttgtgaaaggagaaagaaccaatctttgaaatagccatctgctataactctttcaacagaaaaccaaaaccaaacgaaatgtctaaggaaaatgttttcttaatgagatgatgtaaccttttctatcacttgttaaaagcagaaaacatgtatcaggtacttaattgcatagagttagttttgcagcacaatggtgttgctttaatggaaaaaaaaaacagtaaaagtgaaatattactgttttaaggaaaactaatttagggtggcagccaataaaggtggttggtgtctaatttaagtgttaaatcaatttctttcattcagttagctctttacccaagaagaagtgaatgatttggagcttagggtatgttttgtatcccctttctgataaacccattccctaccaattttatgtcataagagatttttttcccccaaatctagaacaatgtataatacattcacatctagtcaagggcatagg

SEQ ID NO: 166136 - DNA, 883 bp, Homo sapiens
  Payload ID: 12703
  Gene Symbol: PHYH
  Gene Name: phytanoyl-CoA 2-hydroxylase
  ENST ID: ENST00000453759
  CDS Start-End: 356-883
ccggaggggagaggacggtgccctcccgggcaggagctggccaggcaggcgctgcccagggcggcctccctgctggactacggcattgccactgagttatataaagacactatttggggaaggacagcgggtagctcatcccacttcagggactatttcctctgccagtttccatcctcaacaattccagtatactctggataataacgttctaaccctggaacagagaaaattttatgaagaaaatgggtttctagtaatcaaaaatcttgtacctgatgccgatattcaacgctttcggaatgagtttgaaaaaatctgcagaaaggaggtgaaaccattaggattaacagtaatgagagatgtgaccatttcgaaatccgaatatgctccaagtgagaagatgatcacgaaggtccaggatttccaggaagataaggagctcttcagatactgcactctccccgagattctgaaatatgtggagtgcttcactggacctaatattatggccatgcacacaatgttgataaacaaacctccagattctggcaagaagacgtcccgtcaccccctgcaccaggacctgcactatttccccttcaggcccagcgatctcatcgtttgcgcctggacggcgatggagcacatcagccggaacaacggctgtctggttgtgctcccaggcacacacaagggctccctgaagccccacgattaccccaagtgggaggggggagttaacaaaatgttccacgggatccaggactacgaggaaaacaaggcccgggtgcacctggtgatggagaagggcgacactgttttcttccatcctttgctcatccacggatctggtcagaataaaacccagggattccggaag

SEQ ID NO: 166137 - DNA, 642 bp, Homo sapiens
  Payload ID: 12703
  Gene Symbol: PHYH
  Gene Name: phytanoyl-CoA 2-hydroxylase
  ENST ID: ENST00000479604
  CDS Start-End: 11-642
cgccgcagccatggagcagcttcgcgccgccgcccgtctgcagattgttctgggccacctcggccgcccctcggccggggctgtcgtagctcatcccacttcagggactatttcctctgccagtttccatcctcaacaattccagtatactctggataataacgttctaaccctggaacagagaaaattttatgaagaaaatgggtttctagtaatcaaaaatcttgtacctgatgccgatattcaacgctttcggaatgagtttgaaaaaatctgcagaaaggaggtgaaaccattaggattaacagtaatgagagatgtgaccatttcgaaatccgaatatgctccaagtgagaagatgatcacgaaggtccaggatttccaggaagataaggagctcttcagatactgcactctccccgagattctgaaatatgtggagtgcttcactggacctaatattatggccatgcacacaatgttgataaacaaacctccagattctggtaattgcaagaagacgtcccgtcaccccctgcaccaggacctgcactatttccccttcaggcccagcgatctcatcgtttgcgcctggacggcgatggagcacatcagccggaacaacggctgtctggttgtgct

SEQ ID NO: 166138 - DNA, 3099 bp, Homo sapiens
  Payload ID: 12704
  Gene Symbol: PHYHIP
  Gene Name: phytanoyl-CoA 2-hydroxylase interacting protein
  Uniprot ID: Q92561
  ENST ID: ENST00000321613
  CDS Start-End: 458-1450
ttctttctcccttctctgcctctctctcctccacgctgctttgatttcgctcttgcctctcttcttgcgctgctcagctgggaacatcgtctcaccaggggcagcagcgacgcgctgcacagccagacaggagctggctgcggggcatggaagcagcctccttggcagccgggagaggagcaagcgcacgccactgcccgtgacccaggcgtccggctgctgtcccctgccggggagctcatccacgcagaggtctctccctgtcctccctgcgagcttttcctctgcagagcccagtggagccagccatgtaccgcggcaacgcttgctgaccccagtgaggagagaggcctgaatccgagggccctggcacctgtgagctcttggctgtcacctgccccaagcctcgcacctccgctccacagcagtccccacaggagacaaccctgacgggagcatggagctgctgtccacgccccacagcattgagatcaacaacatcacctgcgactccttccgcatctcctgggccatggaggacagtgacctggagagggtcacccattacttcattgaccttaacaagaaggagaataagaattccaacaagttcaagcaccgggacgtccccaccaagctcgtggccaaggcagtgccgctgcccatgacggtgagaggccactggttcctgagcccccgcacggagtacagtgtggccgtgcagacggcagtgaagcagagcgatggggagtacctggtgtccggctggagcgagacggtggagttctgcactggggattatgccaaggagcacctggctcagcttcaggagaaagctgagcagatcgcaggccgcatgctccgcttctccgtcttctaccgcaaccatcacaaggagtacttccagcatgccaggacccactgcgggaacatgctgcagccttacctgaaggacaacagtggcagccacggctcccccaccagcggtatgctccacggggtcttcttcagctgcaacacggagttcaacacgggccagcccccgcaggactccccctacggccgctggcgcttccagatcccagctcagcgcctcttcaatcccagcaccaacctctactttgcggacttctactgcatgtacacggcctaccactacgccatcctggtgctggcgcccaaaggctccctgggggaccgcttctgccgcgaccgcctgcccctcctggacattgcttgcaacaagttcctgacctgcagcgtggaggatggggagctggtcttccgccacgcccaggacctcatcctggagatcatctacactgagcccgtcgacctgtccctgggcaccctgggggagatcagtgggcaccagctcatgagtctgtctactgccgatgccaagaaggaccccagctgcaagacctgcaacatcagcgtgggccgctagggactcctggggagctggggggcgagggagagatgagcggaaggtggaggtgggtagcccaggttcagggagctggctttctctctcctgcccccctgctccctccactctgcccagctgccctcccctcgccccttggcattggaggcaacagacggtggtcctcttggtaagtgtggcccacacccagcctggtggacatggaaaggcttctcagcctctgtagttggcagctgggctggacttctggagaacttcccctttcctctggtttccttgtcctactgttctttgcctcgtccaggtctctatctcccaaagacctgcccacctcctgggctctcccagggaagcccctctgggccaaagcccatgggtagcttggctgcctccagaagagatgcagagagctgtggggcgatctttcttagtcccactcaccccactcagggccaaccacagaatgccccctccctgctgagctgggtctctggggcttcccactccaggcctggatcccttccttctataaatagtctcctgcaccaccgtgactccctggctgctccttgccccaaagaaccctcttcctgcatgggagagctgtccctccttctccacctgcccaccgggacactccccctgctctctagaaaggaactctctttcttctcttggcactgggggcgtcaggctgtcggatgttccttccttccataccccagcataccttctccttgcttagagtgcaggggtctgagacagcagccactggggttgaggagggggaggagacccctgagacccagaggtgccccttcctcagctgggagtgggccgcctcatgctctgctggggcctggcatggaacgtgagacctgtaagctgtcccgcgggccccggcaccccgcccagctgtgcactttgctcactcgctctgccatggtgccatgactgtactgtgcccatgcgtgacctggactgtggaccctctgctgctccgcctctcccctccccactggctctgtctgctctcctgccaccctgctggccgggagcccctccccggggagttcttggtgaagtccttcccgggcctccttgtgtttttgcctcattcctactgtcacacaggtcacgagggtggactccctacaatcaacaaagcaaacagagagcctgtgggaggggctgacagcagcagccggctgtttgggggatgatggaggtgacatcaggcagaggagagtgcagcctcacagtgactttctcagaggtgacagagatgatggatgagcagctggattttcgtgatgaaggacggaagcagcagcgggccggcaaggccatacctcggtgagggacaggtggacaacggtcacctatctgtagccaggggcagttgtgtggccagctgtctctctgggatgagtcaggaggcctggaggcttggggagaggtgtggagaaggagagaacatggcccaggccctttccttccccctgtgctgacagcattgctgtgggggtggcccactgccctcccctggccctcatgtccccccggggctggggtccgcctgcctgtgctgtgcttgcgacgtgcatcaataaaccaccatggcctgagggccctgctcgtctcagtcc

SEQ ID NO: 166139 - DNA, 3200 bp, Homo sapiens
  Payload ID: 12704
  Gene Symbol: PHYHIP
  Gene Name: phytanoyl-CoA 2-hydroxylase interacting protein
  Uniprot ID: Q92561
  ENST ID: ENST00000454243
  CDS Start-End: 576-1568
agagatttccaagtagggggtgtgttggagggacttctgagggcagcttgtcctggaagaatgggggaaaggcggcgtgtgttgctgtccctgaggacatctgtgtagctccctgggagaccctctgccctttccccctcccaccagcccggcgagcagggaccaagcctgcttattatcacctgacgctgcgcagccgctgatcccattggtggaggcagattcggtctggctctctcgttctttctcccttctctgcctctctctcctccacgctgctttgatttcgctcttgcctctcttcttgcgctgctcagctgggaacatcgtctcaccaggggcagcagcgacgcgctgcacagccagacaggagctggctgcggggcatggaagcagcctccttggcagccgggagaggagcaagcgcacgccactgcccgtgacccaggcgtccggctgctgtcccctgccggggagctcatccacgcagaggtctctccctgtcctccctgcgagcttttcctctgcagagcccagtggagccagtccccacaggagacaaccctgacgggagcatggagctgctgtccacgccccacagcattgagatcaacaacatcacctgcgactccttccgcatctcctgggccatggaggacagtgacctggagagggtcacccattacttcattgaccttaacaagaaggagaataagaattccaacaagttcaagcaccgggacgtccccaccaagctcgtggccaaggcagtgccgctgcccatgacggtgagaggccactggttcctgagcccccgcacggagtacagtgtggccgtgcagacggcagtgaagcagagcgatggggagtacctggtgtccggctggagcgagacggtggagttctgcactggggattatgccaaggagcacctggctcagcttcaggagaaagctgagcagatcgcaggccgcatgctccgcttctccgtcttctaccgcaaccatcacaaggagtacttccagcatgccaggacccactgcgggaacatgctgcagccttacctgaaggacaacagtggcagccacggctcccccaccagcggtatgctccacggggtcttcttcagctgcaacacggagttcaacacgggccagcccccgcaggactccccctacggccgctggcgcttccagatcccagctcagcgcctcttcaatcccagcaccaacctctactttgcggacttctactgcatgtacacggcctaccactacgccatcctggtgctggcgcccaaaggctccctgggggaccgcttctgccgcgaccgcctgcccctcctggacattgcttgcaacaagttcctgacctgcagcgtggaggatggggagctggtcttccgccacgcccaggacctcatcctggagatcatctacactgagcccgtcgacctgtccctgggcaccctgggggagatcagtgggcaccagctcatgagtctgtctactgccgatgccaagaaggaccccagctgcaagacctgcaacatcagcgtgggccgctagggactcctggggagctggggggcgagggagagatgagcggaaggtggaggtgggtagcccaggttcagggagctggctttctctctcctgcccccctgctccctccactctgcccagctgccctcccctcgccccttggcattggaggcaacagacggtggtcctcttggtaagtgtggcccacacccagcctggtggacatggaaaggcttctcagcctctgtagttggcagctgggctggacttctggagaacttcccctttcctctggtttccttgtcctactgttctttgcctcgtccaggtctctatctcccaaagacctgcccacctcctgggctctcccagggaagcccctctgggccaaagcccatgggtagcttggctgcctccagaagagatgcagagagctgtggggcgatctttcttagtcccactcaccccactcagggccaaccacagaatgccccctccctgctgagctgggtctctggggcttcccactccaggcctggatcccttccttctataaatagtctcctgcaccaccgtgactccctggctgctccttgccccaaagaaccctcttcctgcatgggagagctgtccctccttctccacctgcccaccgggacactccccctgctctctagaaaggaactctctttcttctcttggcactgggggcgtcaggctgtcggatgttccttccttccataccccagcataccttctccttgcttagagtgcaggggtctgagacagcagccactggggttgaggagggggaggagacccctgagacccagaggtgccccttcctcagctgggagtgggccgcctcatgctctgctggggcctggcatggaacgtgagacctgtaagctgtcccgcgggccccggcaccccgcccagctgtgcactttgctcactcgctctgccatggtgccatgactgtactgtgcccatgcgtgacctggactgtggaccctctgctgctccgcctctcccctccccactggctctgtctgctctcctgccaccctgctggccgggagcccctccccggggagttcttggtgaagtccttcccgggcctccttgtgtttttgcctcattcctactgtcacacaggtcacgagggtggactccctacaatcaacaaagcaaacagagagcctgtgggaggggctgacagcagcagccggctgtttgggggatgatggaggtgacatcaggcagaggagagtgcagcctcacagtgactttctcagaggtgacagagatgatggatgagcagctggattttcgtgatgaaggacggaagcagcagcgggccggcaaggccatacctcggtgagggacaggtggacaacggtcacctatctgtagccaggggcagttgtgtggccagctgtctctctgggatgagtcaggaggcctggaggcttggggagaggtgtggagaaggagagaacatggcccaggccctttccttccccctgtgctgacagcattgctgtgggggtggcccactgccctcccctggccctcatgtccccccggggctggggtccgcctgcctgtgctgtgcttgcgacgtgcatcaataaaccaccatggcctgagggc

SEQ ID NO: 166140 - DNA, 769 bp, Homo sapiens
  Payload ID: 12704
  Gene Symbol: PHYHIP
  Gene Name: phytanoyl-CoA 2-hydroxylase interacting protein
  ENST ID: ENST00000523252
  CDS Start-End: 26-769
gccatttgcttgacttagaaaaggaatgggagagagtcctccgtgggacgtccccaccaagctcgtggccaaggcagtgccgctgcccatgacggtgagaggccactggttcctgagcccccgcacggagtacagtgtggccgtgcagacggcagtgaagcagagcgatggggagtacctggtgtccggctggagcgagacggtggagttctgcactggggattatgccaaggagcacctggctcagcttcaggagaaagctgagcagatcgcaggccgcatgctccgcttctccgtcttctaccgcaaccatcacaaggagtacttccagcatgccaggacccactgcgggaacatgctgcagccttacctgaaggacaacagtggcagccacggctcccccaccagcggtatgctccacggggtcttcttcagctgcaacacggagttcaacacgggccagcccccgcaggactccccctacggccgctggcgcttccagatcccagctcagcgcctcttcaatcccagcaccaacctctactttgcggacttctactgcatgtacacggcctaccactacgccatcctggtgctggcgcccaaaggctccctgggggaccgcttctgccgcgaccgcctgcccctcctggacattgcttgcaacaagttcctgacctgcagcgtggaggatggggagctggtcttccgccacgcccaggacctcatcctggagatcatctacactgagcccgtcgacctgtccctg

SEQ ID NO: 166141 - DNA, 3569 bp, Homo sapiens
  Payload ID: 12705
  Gene Symbol: PHYHIPL
  Gene Name: phytanoyl-CoA 2-hydroxylase interacting protein-like
  Uniprot ID: Q96FC7
  ENST ID: ENST00000373878
  CDS Start-End: 334-1386
gacgaggcgtttccgatctttgccgcagtccggatttcctgggtctctgggcactgaaggggaaatgccctcgggatgtttctagcaacccccttcccccaacacacacacactagttggcattctcttccagaaacttatcattttcttttttaaacctcccatcctcagactccccaaattaacaagtctttttagcctcttggattgggattaggatgacagtttttcagtgagggcgcagaaaaacagtgcatttcagcaccaaggacagacacaatcttcatggttcctgggctctgagtcagactgtcgaaaatattggcctaatatatgtgctgtgattcagactttgtggcgaggaacaaatcacaagacagtggcatagcagagatggaagaacttcctgtaccacataacatcaaaataagcaatataacgtgtgactcattcaagatttcatgggaaatggattcaaaatcaaaggatcgcattacacactattttattgacctcaacaagaaagagaacaagaactccaataaatttaaacacaaggatgttcccacaaaattggtggcaaaagctgttcccttgcctatgactgtccgtggacactggtttttaagcccaagaactgaatatacagtagcagtgcagactgcctcaaaacaagttgatggtgattatgttgtgtctgaatggagtgaaattatagaattctgcaccgcagactattcaaaagttcatctaacacaattgttggagaaggctgaagtgattgcaggacgcatgcttaagttttctgttttttatcgtaatcagcacaaagaatattttgactatgttcgagaacatcatgggaatgctatgcagccatctgtcaaggataacagtggtagccatggctctcctatcagtggaaaattagaaggcatcttcttcagctgcagcactgaattcaatactggaaagccaccccaggattcaccttatggaagatacaggtttgagattgccgcagaaaaactttttaaccccaatactaacttatactttggggacttctactgtatgtacactgcttatcattatgtgattcttgttattgctcctgtgggatcaccaggagatgaattttgtaagcagcgccttcctcaactaaattctaaggataataaatttttgacctgtacagaagaagatggggtgctggtttaccaccatgcccaggatgtcattttagaagtcatttacactgaccctgtggatctttctgtgggcaccgtggcagaaatcactggtcatcagctcatgagtttgtctactgcaaatgcaaagaaagatcccagctgcaaaacctgtaatatcagtgttggacgttaatgcccacttttcttattcttactcagccccttttcctcccttaggagcattggtcctctgttgtccatttttatcaccagatgttttccactgaagcatgcacatgccactgtcaccaaaacaaacaactaccactttccaaatttcattcagaaccattttagtgttttcctattccctacccctcccactactttcaatgatgaaataccctaagttaagttctccttttgacactttattgcctagatgctgcaatgtttttatgtttcctttatgccaaacataacaaaacagttatatagactgctttagcaaagtacacaataatggcttataaatggtgtttaaatatgcattcattttaatctactgaacaaatattgggataactccaaaccgcatgaaagggtgtaattgcagcatgagttaaatcttgaagcctagaattgtcagcacttccaacttcttgtttgacagtgttatttatgttatttatattagctaacaggaaacaactactgtgtttcaacataataaatataatagaaaaatattttatttgtattgttgtataaaatatttacaatcatatagaatatatagagttacattttaatagcaactgtgtacatgtcacgaaaccatttcccttatcaaagatgtaatttgtaaacctcaaatagttgtgtatctgtcctgttagaagtagatgacttcaattaaacaaatttatgaaggacattattctgattcataaaagttataaaatattaggtaaatacagagaaaacaataagcctctgaaataagtctgtttctgaaatagtcaatagtcttcccatccaaactataagagaatgtgaatttcttcaacatcatacttaaacattacagaaaatagaaatacaaacaaggttggtacatgagagaaaatgttgaccttttacttccttttacaaaaatgaaaataataaacatgttttcgtataaaataacacaaaatgatatacactgaagttgatgaagcaaataaatattctggcttctttttcaaggtatcagggcaaacaatttccaaacttttcattttgtacagaaggatgaataactacagctcatgggaaatgttttgactttacaaagtatagatgttggaacattaagaaaaatgtatattcccaatgaaaaaatagttatatcatcttatagtaaaccaaaagattagcaataatactatggacacattagattatatactacagacacatatctatccaaaatacctattttaaatttttaatacaatattttattttaatataaacatctgtcagttatagacaaagataataattcacaaagtacatgctatcagaatgaactttggtaaccagaaatgtaaaatttcaaataacggataaaataatgtgttatttttatagagaaagaaaaaaatagcaacacaatctagtttattttagggtactgagagcctagcagacttaaaggacaaggtagtaaatgttttatcactcaaaaatccattagaagtttcaaataaattgctttcttgctagctgtattccttcctacttgaaaagcgaatttcttttcctcctatgattgattttttaaaatcatgctcttttccatacatcaacataaacagtctttggatactaaataaactttccctaacaagtgtcctagctatgttatttagatttgataaaatattagacatttttaaaaatacttgtattgactatgagttttctgcttggcatggaggacactgaattttttcccaattatatggctacctgttgtattcttccccccgtttaaatcccttctccttgtatataattaaacttgctattccttcttaaaaacagctaatactaccactaaagtgcttccattttcattgtgtcaaaactacttagcaaggatggcagaggaaaataaactttactttatatcatgggtgaaagtgatcataacatttcctgaacctcaaatagttttggccacatcttgcttgctgatgaggacctctaatagtctcagtttggcttttatgtgcttatattcataatactcatctgccattggtatcctatcttccttttgtggacttctgcaaaacaaaaatacatttgttagttcacaatgaa

SEQ ID NO: 166142 - DNA, 3578 bp, Homo sapiens
  Payload ID: 12705
  Gene Symbol: PHYHIPL
  Gene Name: phytanoyl-CoA 2-hydroxylase interacting protein-like
  Uniprot ID: Q96FC7
  ENST ID: ENST00000373880
  CDS Start-End: 265-1395
cccgccgggagcgcgcgcctcccatcctcgcgccgggtcctgctcggtctctcagagccgcacactccgcggagctcctgccacagccgtcgccttcgcggcggctctccagccccgcgcctcagcctcggcgccgcatcaccgcgtcccaggcctccttccctccctctgccactccccctccctttcccgctcttcttgcccacccggccggcagagagagcctggatacgaagcaggcgggcttcagagtgggttggaaaaatggaggtgccgcgcctggatcatgccctcaacagccccaccagcccctgtgaggaggtgatcaaaaacctcagcctggaggccattcagctgtgcgaccgggacgggaacaaatcacaagacagtggcatagcagagatggaagaacttcctgtaccacataacatcaaaataagcaatataacgtgtgactcattcaagatttcatgggaaatggattcaaaatcaaaggatcgcattacacactattttattgacctcaacaagaaagagaacaagaactccaataaatttaaacacaaggatgttcccacaaaattggtggcaaaagctgttcccttgcctatgactgtccgtggacactggtttttaagcccaagaactgaatatacagtagcagtgcagactgcctcaaaacaagttgatggtgattatgttgtgtctgaatggagtgaaattatagaattctgcaccgcagactattcaaaagttcatctaacacaattgttggagaaggctgaagtgattgcaggacgcatgcttaagttttctgttttttatcgtaatcagcacaaagaatattttgactatgttcgagaacatcatgggaatgctatgcagccatctgtcaaggataacagtggtagccatggctctcctatcagtggaaaattagaaggcatcttcttcagctgcagcactgaattcaatactggaaagccaccccaggattcaccttatggaagatacaggtttgagattgccgcagaaaaactttttaaccccaatactaacttatactttggggacttctactgtatgtacactgcttatcattatgtgattcttgttattgctcctgtgggatcaccaggagatgaattttgtaagcagcgccttcctcaactaaattctaaggataataaatttttgacctgtacagaagaagatggggtgctggtttaccaccatgcccaggatgtcattttagaagtcatttacactgaccctgtggatctttctgtgggcaccgtggcagaaatcactggtcatcagctcatgagtttgtctactgcaaatgcaaagaaagatcccagctgcaaaacctgtaatatcagtgttggacgttaatgcccacttttcttattcttactcagccccttttcctcccttaggagcattggtcctctgttgtccatttttatcaccagatgttttccactgaagcatgcacatgccactgtcaccaaaacaaacaactaccactttccaaatttcattcagaaccattttagtgttttcctattccctacccctcccactactttcaatgatgaaataccctaagttaagttctccttttgacactttattgcctagatgctgcaatgtttttatgtttcctttatgccaaacataacaaaacagttatatagactgctttagcaaagtacacaataatggcttataaatggtgtttaaatatgcattcattttaatctactgaacaaatattgggataactccaaaccgcatgaaagggtgtaattgcagcatgagttaaatcttgaagcctagaattgtcagcacttccaacttcttgtttgacagtgttatttatgttatttatattagctaacaggaaacaactactgtgtttcaacataataaatataatagaaaaatattttatttgtattgttgtataaaatatttacaatcatatagaatatatagagttacattttaatagcaactgtgtacatgtcacgaaaccatttcccttatcaaagatgtaatttgtaaacctcaaatagttgtgtatctgtcctgttagaagtagatgacttcaattaaacaaatttatgaaggacattattctgattcataaaagttataaaatattaggtaaatacagagaaaacaataagcctctgaaataagtctgtttctgaaatagtcaatagtcttcccatccaaactataagagaatgtgaatttcttcaacatcatacttaaacattacagaaaatagaaatacaaacaaggttggtacatgagagaaaatgttgaccttttacttccttttacaaaaatgaaaataataaacatgttttcgtataaaataacacaaaatgatatacactgaagttgatgaagcaaataaatattctggcttctttttcaaggtatcagggcaaacaatttccaaacttttcattttgtacagaaggatgaataactacagctcatgggaaatgttttgactttacaaagtatagatgttggaacattaagaaaaatgtatattcccaatgaaaaaatagttatatcatcttatagtaaaccaaaagattagcaataatactatggacacattagattatatactacagacacatatctatccaaaatacctattttaaatttttaatacaatattttattttaatataaacatctgtcagttatagacaaagataataattcacaaagtacatgctatcagaatgaactttggtaaccagaaatgtaaaatttcaaataacggataaaataatgtgttatttttatagagaaagaaaaaaatagcaacacaatctagtttattttagggtactgagagcctagcagacttaaaggacaaggtagtaaatgttttatcactcaaaaatccattagaagtttcaaataaattgctttcttgctagctgtattccttcctacttgaaaagcgaatttcttttcctcctatgattgattttttaaaatcatgctcttttccatacatcaacataaacagtctttggatactaaataaactttccctaacaagtgtcctagctatgttatttagatttgataaaatattagacatttttaaaaatacttgtattgactatgagttttctgcttggcatggaggacactgaattttttcccaattatatggctacctgttgtattcttccccccgtttaaatcccttctccttgtatataattaaacttgctattccttcttaaaaacagctaatactaccactaaagtgcttccattttcattgtgtcaaaactacttagcaaggatggcagaggaaaataaactttactttatatcatgggtgaaagtgatcataacatttcctgaacctcaaatagttttggccacatcttgcttgctgatgaggacctctaatagtctcagtttggcttttatgtgcttatattcataatactcatctgccattggtatcctatcttccttttgtggacttctgcaaaacaaaaatacatttgttagttcacaatgaa

SEQ ID NO: 166143 - DNA, 1971 bp, Homo sapiens
  Payload ID: 12705
  Gene Symbol: PHYHIPL
  Gene Name: phytanoyl-CoA 2-hydroxylase interacting protein-like
  Uniprot ID: Q96FC7
  ENST ID: ENST00000486074
  CDS Start-End: 194-343
gagctcctgccacagccgtcgccttcgcggcggctctccagccccgcgcctcagcctcggcgccgcatcaccgcgtcccaggcctccttccctccctctgccactccccctccctttcccgctcttcttgcccacccggccggcagagagagcctggatacgaagcaggcgggcttcagagtgggttggaaaaatggaggtgccgcgcctggatcatgccctcaacagccccaccagcccctgtgaggaggtgatcaaaaacctcagcctggaggccattcagctgtgcgaccgggacgttgtttttgaagaacttacatccaaacagacaagaaaaggataaaagcaccattggttcatggcaagttattacattttaagtgattaactggaacaaatcacaagacagtggcatagcagagatggaagaacttcctgtaccacataacatcaaaataagcaatataacgtgtgactcattcaagatttcatgggaaatggattcaaaatcaaaggatcgcattacacactattttattgacctcaacaagaaagagaacaagaactccaataaatttaaacacaaggatgttcccacaaaattggtggcaaaagctgttcccttgcctatgactgtccgtggacactggtttttaagcccaagaactgaatatacagtagcagtgcagactgcctcaaaacaagttgatggtgattatgttgtgtctgaatggagtgaaattatagaattctgcaccgcagactattcaaaagttcatctaacacaattgttggagaaggctgaagtgattgcaggacgcatgcttaagttttctgttttttatcgtaatcagcacaaagaatattttgactatgttcgagaacatcatgggaatgctatgcagccatctgtcaaggataacagtggtagccatggctctcctatcagtggaaaattagaaggcatcttcttcagctgcagcactgaattcaatactggaaagccaccccaggattcaccttatggaagatacaggtttgagattgccgcagaaaaactttttaaccccaatactaacttatactttggggacttctactgtatgtacactgcttatcattatgtgattcttgttattgctcctgtgggatcaccaggagatgaattttgtaagcagcgccttcctcaactaaattctaaggataataaatttttgacctgtacagaagaagatggggtgctggtttaccaccatgcccaggatgtcattttagaagtcatttacactgaccctgtggatctttctgtgggcaccgtggcagaaatcactggtcatcagctcatgagtttgtctactgcaaatgcaaagaaagatcccagctgcaaaacctgtaatatcagtgttggacgttaatgcccacttttcttattcttactcagccccttttcctcccttaggagcattggtcctctgttgtccatttttatcaccagatgttttccactgaagcatgcacatgccactgtcaccaaaacaaacaactaccactttccaaatttcattcagaaccattttagtgttttcctattccctacccctcccactactttcaatgatgaaataccctaagttaagttctccttttgacactttattgcctagatgctgcaatgtttttatgtttcctttatgccaaacataacaaaacagttatatagactgctttagcaaagtacacaataatggcttataaatggtgtttaaatatgcattcattttaatctactgaacaaatattgggataactccaaaccgcatgaaagggtgtaattgcagcatgagttaaatcttgaagcctagaattgtcagcacttccaacttcttgtttgacagtgttatttatgttatttatattagctaacaggaaacaactactgtgtttcaacataataaatataatagaaaaata

SEQ ID NO: 166144 - DNA, 1599 bp, Homo sapiens
  Payload ID: 12706
  Gene Symbol: PHYHD1
  Gene Name: phytanoyl-CoA dioxygenase domain containing 1
  Uniprot ID: Q5SRE7
  ENST ID: ENST00000308941
  CDS Start-End: 421-1314
cctgcctcagcctcgcgagcagctgggactacaggtgcccgccaccacgcccggctaattttttgtatttttagtagagacggggtttcaccgtgttagccaggatggtctcgatttcctgacctcgtgatccgcgcgcctctgcctccaaagtgctgggattacaggcccgagccgccgcacccggcctgcaggtgttgttctgaccccagctccactgtgccagcccgacttgagatgccaagtatcttgggcctgaggattgaggcctagagagaggcaggcgttcctcagagtcacagggaatggcggcgcctggactgggactcagcccagctgcttggcctgaccctctcacagcataatttcccggcacctggaggccgcgcttagaagccgcccagtgccctgagcgtctccatggcctgcctgagcccctcgcagctccagaagttccaacaggatggattcctggtgctggaaggattcttgtctgcggaagagtgtgtggccatgcaacaaaggattggcgagatagtggctgaaatggatgttcctctccactgccgcacagaattctccacccaggaagaggagcagcttcgagcccagggcagcacagactatttcttgagcagtggtgacaagattcgattcttctttgagaaaggcgtttttgatgagaaaggaaatttcctggtccctccggagaaatccatcaacaaaattggccacgctctgcacgcccacgaccccgtcttcaagagcatcacacactccttcaaggtgcagaccttggccagaagtctgggcctccagatgcccgtggtggtgcagagcatgtacatctttaagtctcccctcatcaggacgcctccttcctgtacacggagcccctgggccgggtgctgggcgtgtggatcgcagtggaggatgccacgctggagaacggctgtctctggttcatccctggctcccacaccagtggtgtgtcaagaaggatggtccgggcccctgttggctcagcgcctggtaccagcttccttgggtcagagccagcccgggataacagcctctttgtgcccaccccagtgcagagaggggccctggtcctcatccatggagaagtggtacacaagagcaagcagaacctctctgaccgctcgcgccaggcctacactttccacctcatggaggcctctggcaccacctggagcccggagaactggctccagccaacagctgaactgccctttccccaactgtacacctaaaggctctcgcagggcaggagccctcgcccctcccgggtgaagctgtgggctgtaaacaccagtgccttgctcagcctcctggttgcaacagggaggtcttgtctcccctcctgggctttcctcctgccctgtgggcagcagcctaggctgggtcaggggcttccctaagatcttcacctctctgcctccctactgccccaacatagccttgaggaggcttctcagccaccaaagggttctggccccttctcactctcctctcctctcagatggaactctggttattatggtgttagttatcgaataaaaacgacttcagaatgca

SEQ ID NO: 166145 - DNA, 1374 bp, Homo sapiens
  Payload ID: 12706
  Gene Symbol: PHYHD1
  Gene Name: phytanoyl-CoA dioxygenase domain containing 1
  Uniprot ID: Q5SRE7
  ENST ID: ENST00000353176
  CDS Start-End: 237-1049
cggcctgcaggtgttgttctgaccccagctccactgtgccagcccgacttgagatgccaagtatcttgggcctgaggattgaggcctagagagaggcaggcgttcctcagagtcacagggaatggcggcgcctggactgggactcagcccagctgcttggcctgaccctctcacagcataatttcccggcacctggaggccgcgcttagaagccgcccagtgccctgagcgtctccatggcctgcctgagcccctcgcagctccagaagttccaacaggatggattcctggtgctggaaggattcttgtctgcggaagagtgtgtggccatgcaacaaaggattggcgagatagtggctgaaatggatgttcctctccactgccgcacagaattctccacccaggaagaggagcagcttcgagcccagggcagcacagactatttcttgagcagtggtgacaagattcgattcttctttgagaaaggcgtttttgatgagaaaggaaatttcctggtccctccggagaaatccatcaacaaaattggccacgctctgcacgcccacgaccccgtcttcaagagcatcacacactccttcaaggtgcagcaacctcactttggcggtgaagtctcccctcatcaggacgcctccttcctgtacacggagcccctgggccgggtgctgggcgtgtggatcgcagtggaggatgccacgctggagaacggctgtctctggttcatccctggctcccacaccagtggtgtgtcaagaaggatggtccgggcccctgttggctcagcgcctggtaccagcttccttgggtcagagccagcccgggataacagcctctttgtgcccaccccagtgcagagaggggccctggtcctcatccatggagaagtggtacacaagagcaagcagaacctctctgaccgctcgcgccaggcctacactttccacctcatggaggcctctggcaccacctggagcccggagaactggctccagccaacagctgaactgccctttccccaactgtacacctaaaggctctcgcagggcaggagccctcgcccctcccgggtgaagctgtgggctgtaaacaccagtgccttgctcagcctcctggttgcaacagggaggtcttgtctcccctcctgggctttcctcctgccctgtgggcagcagcctaggctgggtcaggggcttccctaagatcttcacctctctgcctccctactgccccaacatagccttgaggaggcttctcagccaccaaagggttctggccccttctcactctcctctcctctcagatggaactctggttattatggtgttagttatcgaataaaaacgacttcagaatgca

SEQ ID NO: 166146 - DNA, 2133 bp, Homo sapiens
  Payload ID: 12706
  Gene Symbol: PHYHD1
  Gene Name: phytanoyl-CoA dioxygenase domain containing 1
  Uniprot ID: Q5SRE7
  ENST ID: ENST00000372592
  CDS Start-End: 934-1809
agcaaacacgacttgactcgaggccaaggctcttgagggctgagcagtgtccccatgcacactcctgaaacactttgtcccttcgccattcagaaggcatcattttggggaaggcagcagccggtttttcagagccagcgagtggccctgccagctgctgagcagggcaagctgagaagggtggtggtgtgcaagtgttattctctctttttgtttttgtttttgttttttgagatggagtcttactctgtcgtccaggctggagtgagtgccgtggcatgatctcggctcactgcaacctccgcctcctgggttcaagcgattctcctgcctcagcctcccgagtaactgggactacaggcacctgccaccatgctcggctagtttttggtatttttatttattatttatttatttattttgagaccgagtctcgctctgtcgcccaggctctagtgcagtggcccaatctcggctcactgcaagctccgcctcccgcgttcacgccattctcctgcctcagcctcgcgagcagctgggactacaggtgcccgccaccacgcccggctaattttttgtatttttagtagagacggggtttcaccgtgttagccaggatggtctcgatttcctgacctcgtgatccgcgcgcctctgcctccaaagtgctgggattacaggcccgagccgccgcacccggcctgcaggtgttgttctgaccccagctccactgtgccagcccgacttgagatgccaagtatcttgggcctgaggattgaggcctagagagaggcaggcgttcctcagagtcacagggaatggcggcgcctggactgggactcagcccagctgcttggcctgaccctctcacagcataatttcccggcacctggaggccgcgcttagaagccgcccagtgccctgagcgtctccatggcctgcctgagcccctcgcagctccagaagttccaacaggatggattcctggtgctggaaggattcttgtctgcggaagagtgtgtggccatgcaacaaaggattggcgagatagtggctgaaatggatgttcctctccactgccgcacagaattctccacccaggaagaggagcagcttcgagcccagggcagcacagactatttcttgagcagtggtgacaagattcgattcttctttgagaaaggcgtttttgatgagaaaggaaatttcctggtccctccggagaaatccatcaacaaaattggccacgctctgcacgcccacgaccccgtcttcaagagcatcacacactccttcaaggtgcagaccttggccagaagtctgggcctccagatgcccgtggtggtgcagagcatgtacatctttaagcaacctcactttggcggtgaagtctcccctcatcaggacgcctccttcctgtacacggagcccctgggccgggtgctgggcgtgtggatcgcagtggaggatgccacgctggagaacggctgtctctggttcatccctggctcccacaccagtggtgtgtcaagaaggatggtccgggcccctgttggctcagcgcctggtaccagcttccttgggtcagagccagcccgggataacagcctctttgtgcccaccccagtgcagagaggggccctggtcctcatccatggagaagtggtacacaagagcaagcagaacctctctgaccgctcgcgccaggcctacactttccacctcatggaggcctctggcaccacctggagcccggagaactggctccagccaacagctgaactgccctttccccaactgtacacctaaaggctctcgcagggcaggagccctcgcccctcccgggtgaagctgtgggctgtaaacaccagtgccttgctcagcctcctggttgcaacagggaggtcttgtctcccctcctgggctttcctcctgccctgtgggcagcagcctaggctgggtcaggggcttccctaagatcttcacctctctgcctccctactgccccaacatagccttgaggaggcttctcagccaccaaagggttctggccccttctcactctcctctcctctcagatggaactctggttattatggtgttagttatcgaataaaaacgacttcagaatgc

SEQ ID NO: 166147 - DNA, 548 bp, Homo sapiens
  Payload ID: 12706
  Gene Symbol: PHYHD1
  Gene Name: phytanoyl-CoA dioxygenase domain containing 1
  ENST ID: ENST00000419552
  CDS Start-End: 350-548
cctcagcctcgcgagcagctgggactacaggtgcccgccaccacgcccggctaattttttgtatttttagtagagacggggtttcaccgtgttagccaggatggtctcgatttcctgacctcgtgatccgcgcgcctctgcctccaaagtgctgggattacaggcccgagccgccgcacccggcctgcagattgaggcctagagagaggcaggcgttcctcagagtcacagggaatggcggcgcctggactgggactcagcccagctgcttggcctgaccctctcacagcataatttcccggcacctggaggccgcgcttagaagccgcccagtgccctgagcgtctccatggcctgcctgagcccctcgcagctccagaagttccaacaggatggattcctggtgctggaaggattcttgtctgcggaagagtgtgtggccatgcaacaaaggattggcgagatagtggctgaaatggatgttcctctccactgccgcacagaattctccacccaggaagaggagcagcttcgagcccagggcagca

SEQ ID NO: 166148 - DNA, 753 bp, Homo sapiens
  Payload ID: 12706
  Gene Symbol: PHYHD1
  Gene Name: phytanoyl-CoA dioxygenase domain containing 1
  ENST ID: ENST00000419872
  CDS Start-End: 1-294
tcttgcagcaacctcactttggcggtgaagtctcccctcatcaggacgcctccttcctgtacacggagcccctgggccgggtgctgggcgtgtggatcgcagtggaggatgccacgctggagaacggctgtctctggttcatccctggctcccacaccagggccctggtcctcatccatggagaagtggtacacaagagcaagcagaacctctctgaccgctcgcgccaggcctacactttccacctcatggaggcctctggcaccacctggagcccggagaactggtaggtgacagggtgggtgtgtgtgcccgacagtcccctggaggctgggaacagtgaccctgcacctcaaggttgtttctcctctatcctctgcaggctccagccaacagctgaactgccctttccccaactgtacacctaaaggctctcgcagggcaggagccctcgcccctcccgggtgaagctgtgggctgtaaacaccagtgccttgctcagcctcctggttgcaacagggaggtcttgtctcccctcctgggctttcctcctgccctgtgggcagcagcctaggctgggtcaggggcttccctaagatcttcacctctctgcctccctactgccccaacatagccttgaggaggcttctcagccaccaaagggttctggccccttctcactctcctctcctctcagatggaactctggttattatggtgttagttatcgaataaaaacgacttcagaatgca

SEQ ID NO: 166149 - DNA, 790 bp, Homo sapiens
  Payload ID: 12706
  Gene Symbol: PHYHD1
  Gene Name: phytanoyl-CoA dioxygenase domain containing 1
  ENST ID: ENST00000428610
  CDS Start-End: 599-790
actttgtcccttcgccattcagaaggcatcattttggggaaggcagcagccggtttttcagagccagcgagtggccctgccagctgctgagcagggcaagctgagaagggtggtggtgtgcaagtgttattctctctttttgtttttgtttttgttttttgagatggagtcttactctgtcgtccaggctggagtgagtgccgtggcatgatctcggctcactgcaacctccgcctcctgggttcaagcgattctcctgcctcagcctcccgagtaactgggactacaggcacctgccaccatgctcggctagtttttgtagagacggggtttcaccgtgttagccaggatggtctcgatttcctgacctcgtgatccgcgcgcctctgcctccaaagtgctgggattacaggcccgagccgccgcacccggcctgcagattgaggcctagagagaggcaggcgttcctcagagtcacagggaatggcggcgcctggactgggactcagcccagctgcttggcctgaccctctcacagcataatttcccggcacctggaggccgcgcttagaagccgcccagtgccctgagcgtctccatggcctgcctgagcccctcgcagctccagaagttccaacaggatggattcctggtgctggaaggattcttgtctgcggaagagtgtgtggccatgcaacaaaggattggcgagatagtggctgaaatggatgttcctctccactgccgcacagaattctccacccaggaagaggagcagcttcgagcccag

SEQ ID NO: 166150 - DNA, 1811 bp, Homo sapiens
  Payload ID: 12706
  Gene Symbol: PHYHD1
  Gene Name: phytanoyl-CoA dioxygenase domain containing 1
  ENST ID: ENST00000412476
  CDS Start-End: 446-928
actgcaacctccgcctcctgggttcaagcgattctcctgcctcagcctcccgagtaactgggactacaggcacctgccaccatgctcggctagtttttgtagagacggggtttcaccgtgttagccaggatggtctcgatttcctgacctcgtgatccgcgcgcctctgcctccaaagtgctgggattacaggcccgagccgccgcacccggcctgcaggtgttgttctgaccccagctccactgtgccagcccgacttgagatgccaagtatcttgggcctgaggattgaggcctagagagaggcaggcgttcctcagagtcacagggaatggcggcgcctggactgggactcagcccagctgcttggcctgaccctctcacagcataatttcccggcacctggaggccgcgcttagaagccgcccagtgccctgagcgtctccatggcctgcctgagcccctcgcagctccagaagttccaacaggatggattcctggtgctggaaggattcttgtctgcggaagagtgtgtggccatgcaacaaaggattggcgagatagtggctgaaatggatgttcctctccactgccgcacagaattctccacccaggaagaggagcagcttcgagcccagggcagcacagactatttcttgagcagtggtgacaagattcgattcttctttgagaaaggcgtttttgatgagaaaggaaatttcctggtccctccggagaaatccatcaacaaaattggccacgctctgcacgcccacgaccccgtcttcaagagcatcacacactccttcaaggtgcagaccttggccagaagtctgggcctccagatgcccgtggtggtgcagagcatgtacatctttaagcaacctcactttggcggtgaaggtgagctgagagctgtgggcccctgaaaaggccatgggtgggacatctaagacagcaatggttctcagatcttcagaaggagggaaagcgcttgctcctgtctgttgtaggagcctggcccggagaggaggagccaccttccattccttcccctgatagtggattgtctcccctcatcaggacgcctccttcctgtacacggagcccctgggccgggtgctgggcgtgtggatcgcagtggaggatgccacgctggagaacggctgtctctggttcatccctggctcccacaccagtggtgtgtcaagaaggatggtccgggcccctgttggctcagcgcctggtaccagcttccttgggtcagagccagcccgggataacagcctctttgtgcccaccccagtgcagagaggggccctggtcctcatccatggagaagtggtacacaagagcaagcagaacctctctgaccgctcgcgccaggcctacactttccacctcatggaggcctctggcaccacctggagcccggagaactggctccagccaacagctgaactgccctttccccaactgtacacctaaaggctctcgcagggcaggagccctcgcccctcccgggtgaagctgtgggctgtaaacaccagtgccttgctcagcctcctggttgcaacagggaggtcttgtctcccctcctgggctttcctcctgccctgtgggcagcagcctaggctgggtcaggggcttccctaagatcttcacctctctgcctccctactgccccaacatagccttgaggaggcttctcagccaccaaagggttctggccccttctcactctcctctcctctcagatggaactctggttattatggtgttagttatcgaataaaaacgacttcagaatgc

SEQ ID NO: 166151 - DNA, 780 bp, Homo sapiens
  Payload ID: 12706
  Gene Symbol: PHYHD1
  Gene Name: phytanoyl-CoA dioxygenase domain containing 1
  ENST ID: ENST00000442837
  CDS Start-End: 1-495
cctccggagaaatccatcaacaaaattggccacgctctgcacgcccacgaccccgtcttcaagagcatcacacactccttcaaggtgcagaccttggccagaagtctgggcctccagatgcccgtggtggtgcagagcatgtacatctttaagtctcccctcatcaggacgcctccttcctgtacacggagcccctgggccgggtgctgggcgtgtggatcgcagtggaggatgccacgctggagaacggctgtctctggttcatccctggctcccacaccagggccctggtcctcatccatggagaagtggtacacaagagcaagcagaacctctctgaccgctcgcgccaggcctacactttccacctcatggaggcctctggcaccacctggagcccggagaactggctccagccaacagctgaactgccctttccccaactgtacacctaaaggctctcgcagggcaggagccctcgcccctcccgggtgaagctgtgggctgtaaacaccagtgccttgctcagcctcctggttgcaacagggaggtcttgtctcccctcctgggctttcctcctgccctgtgggcagcagcctaggctgggtcaggggcttccctaagatcttcacctctctgcctccctactgccccaacatagccttgaggaggcttctcagccaccaaagggttctggccccttctcactctcctctcctctcagatggaactctggttattatggtgttagttatcgaataaaaacgacttcagaatgca

SEQ ID NO: 166152 - DNA, 1182 bp, Homo sapiens
  Payload ID: 12706
  Gene Symbol: PHYHD1
  Gene Name: phytanoyl-CoA dioxygenase domain containing 1
  Uniprot ID: Q5SRE7
  ENST ID: ENST00000421063
  CDS Start-End: 42-854
gaggccgcgcttagaagccgcccagtgccctgagcgtctccatggcctgcctgagcccctcgcagctccagaagttccaacaggatggattcctggtgctggaaggattcttgtctgcggaagagtgtgtggccatgcaacaaaggattggcgagatagtggctgaaatggatgttcctctccactgccgcacagaattctccacccaggaagaggagcagcttcgagcccagggcagcacagactatttcttgagcagtggtgacaagattcgattcttctttgagaaaggcgtttttgatgagaaaggaaatttcctggtccctccggagaaatccatcaacaaaattggccacgctctgcacgcccacgaccccgtcttcaagagcatcacacactccttcaaggtgcagcaacctcactttggcggtgaagtctcccctcatcaggacgcctccttcctgtacacggagcccctgggccgggtgctgggcgtgtggatcgcagtggaggatgccacgctggagaacggctgtctctggttcatccctggctcccacaccagtggtgtgtcaagaaggatggtccgggcccctgttggctcagcgcctggtaccagcttccttgggtcagagccagcccgggataacagcctctttgtgcccaccccagtgcagagaggggccctggtcctcatccatggagaagtggtacacaagagcaagcagaacctctctgaccgctcgcgccaggcctacactttccacctcatggaggcctctggcaccacctggagcccggagaactggctccagccaacagctgaactgccctttccccaactgtacacctaaaggctctcgcagggcaggagccctcgcccctcccgggtgaagctgtgggctgtaaacaccagtgccttgctcagcctcctggttgcaacagggaggtcttgtctcccctcctgggctttcctcctgccctgtgggcagcagcctaggctgggtcaggggcttccctaagatcttcacctctctgcctccctactgccccaacatagccttgaggaggcttctcagccaccaaagggttctggccccttctcactctcctctcctctcagatggaactctggttattatggtgttagttatcgaataaaaacgacttcagaatgcagct

SEQ ID NO: 166153 - DNA, 615 bp, Homo sapiens
  Payload ID: 12706
  Gene Symbol: PHYHD1
  Gene Name: phytanoyl-CoA dioxygenase domain containing 1
  ENST ID: ENST00000451000
  CDS Start-End: 11-151
gagcgtctccatggcctgcctgagcccctcgcagctccagaagcagccaatattgattgctctttgctgggtgccagactccatgcctggggttggggacagggcagcaaacaagatacctggtcccaccttcacacagctgcaaggttgagggaagggtcagacaggagcatttgcagactggggaagcctgagtctcaagcctgcctgcagttccaacaggatggattcctggtgctggaaggattcttgtctgcggaagagtgtgtggccatgcaacaaaggattggcgagatagtggctgaaatggatgttcctctccactgccgcacagaattctccacccaggaagaggagcagcttcgagcccagggcagcacagactatttcttgagcagtggtgacaagattcgattcttctttgagaaaggcgtttttgatgagaaaggaaatttcctggtccctccggagaaatccatcaacaaaattggccacgctctgcacgcccacgaccccgtcttcaagagcatcacacactccttcaaggtgcagaccttggccagaagtctgggcctccagatgcccgtggtggtgcagagcatgtacatctttaag

SEQ ID NO: 166154 - DNA, 872 bp, Homo sapiens
  Payload ID: 12706
  Gene Symbol: PHYHD1
  Gene Name: phytanoyl-CoA dioxygenase domain containing 1
  ENST ID: ENST00000426694
  CDS Start-End: 342-872
ctgcagatggatgcgttaattcccttccataatcctcccaggaccgagagggtttcagatcggtgctgggaggggcccagatagttctccccaggacctcttccacctttggaatgcccattacctggagaaggggggtgccgcacatcccccagaccaaccctgcatcccattctatccagattgaggcctagagagaggcaggcgttcctcagagtcacagggaatggcggcgcctggactgggactcagcccagctgcttggcctgaccctctcacagcataatttcccggcacctggaggccgcgcttagaagccgcccagtgccctgagcgtctccatggcctgcctgagcccctcgcagctccagaagttccaacaggatggattcctggtgctggaaggattcttgtctgcggaagagtgtgtggccatgcaacaaaggattggcgagatagtggctgaaatggatgttcctctccactgccgcacagaattctccacccaggaagaggagcagcttcgagcccagggcagcacagactatttcttgagcagtggtgacaagattcgattcttctttgagaaaggcgtttttgatgagaaaggaaatttcctggtccctccggagaaatccatcaacaaaattggccacgctctgcacgcccacgaccccgtcttcaagagcatcacacactccttcaaggtgcagaccttggccagaagtctgggcctccagatgcccgtggtggtgcagagcatgtacatctttaagcaacctcactttggcggtgaagtctcccctcatcaggacgcctccttcctgtacacggagcccctgggccgggtgctgggcgtgtggatcgcagtg

SEQ ID NO: 166155 - DNA, 711 bp, Homo sapiens
  Payload ID: 12706
  Gene Symbol: PHYHD1
  Gene Name: phytanoyl-CoA dioxygenase domain containing 1
  ENST ID: ENST00000424503
  CDS Start-End: 1-163
ggatggattcctggtgctggaaggattcttgtctgcggaagagtgtgtggccatgcaacaaaggattggcgagatagtggctgaaatggatgttcctctccactgccgcacagaattctccacccaggaagaggagcagcttcgagcccaggcccagctctgaccccaggatgctgtctcagtcctctgatgtcccctttccacagggcagcacagactatttcttgagcagtggtgacaagattcgattcttctttgagaaaggcgtttttgatgagaaaggaaatttcctggtccctccggagaaatccatcaacaaaattggccacgctctgcacgcccacgaccccgtcttcaagagcatcacacactccttcaaggtgcagaccttggccagaagtctgggcctccagatgcccgtggtggtgcagagcatgtacatctttaagcaacctcactttggcggtgaagtctcccctcatcaggacgcctccttcctgtacacggagcccctgggccgggtgctgggcgtgtggatcgcagtggaggatgccacgctggagaacggctgtctctggttcatccctggctcccacaccagtggtgtgtcaagaaggatggtccgggcccctgttggctcagcgcctggtaccagcttccttgggtcagagccagcccgggataacagcctctttgtgcccaccccagtgc

SEQ ID NO: 166156 - DNA, 20329 bp, Homo sapiens
  Payload ID: 12707
  Gene Symbol: PCLO
  Gene Name: piccolo presynaptic cytomatrix protein
  Uniprot ID: Q9Y6V0
  ENST ID: ENST00000333891
  CDS Start-End: 339-15767
gcggtgcgcggtgggaggggcggacggcgcccggctggcaccgctcagatctgcttctccccggctcggggcgccgaggcggcgtccgggaggtgtcttctgcaaaggttgcctggcgctgtccaacatggaggaggcaccggcagcgggcgttacctgcgagcgggactaacccctgcctggcgttccgggcggcagtgcctggtccagagtccagggactcggctgcctgcacgccccgaggcggaccccggctctgactgctcccctggccgcgggcttctcgactgggacgcggcgcgaggagggagcgcggcggccccgagtctccctgagccatgggcaacgaggcgagcttggaaggggaagggctccccgaagggctggcggcggccgcagcggctggaggaggagctagcggggcggggagcccctctcacaccgcgatcccggccggcatggaggcggatttgagccagctgagcgaagaggagaggagacagatcgccgctgtcatgtcaagggcgcaggggctgcccaagggaagcgtccccccggccgctgcggagtcgccttccatgcacaggaaacaagagttggatagtagtcatcctccaaagcaatcaggaagacccccggaccctgggcgtccagctcaacctggtctcagtaaaagtagaactacagacactttcaggtcagagcagaaattgcctgggaggagtccttccactattagcttgaaagaatcaaagtccagaactgatttaaaggaagagcacaagtctagtatgatgcctggcttcctctcagaggttaacgctttaagtgctgtttcctctgttgtaaataaattcaacccttttgatttgatatcagactctgaggcatcccaggaagaaaccaccaagaaacaaaaagtggttcagaaggagcaaggaaaacctgaaggaatcataaaacctcctttacaacaacagccacccaagccgattcctaagcagcaaggacctggtagggatccgcttcagcaggatggcactcccaaatcaatatcttctcaacaaccagaaaaaattaaatcacaacctccaggtacaggaaagccaattcagggtcctacccagactcctcagacagaccatgcaaaattgccacttcaacgagatgcatccaggcctcagactaaacaggcagacatagtaaggggagaatcagttaaaccctcactgccaagcccatccaaaccacctattcagcaaccaactcctggaaaacctccagcacagcagcctggacatgaaaaatcacagcctgggcctgcaaagcccccagctcagccctcagggctaacaaagccattggctcaacaaccagggacagtgaaacccccagtccagccaccagggacaacaaagcctccagctcagcctcttggtcctgctaagcctccagctcagcagactgggtcagagaagccttcatcggagcagcctgggccaaaggctttagctcagcctcctggagttggaaagactccagctcaacagccagggccagcaaagcctccaacccagcaggtggggacaccaaaacccctagctcaacaacctgggctacagtctccagctaaggcacctgggcctacaaagactccagttcagcagcctgggccaggaaagattccagctcaacaggcaggacccggaaagacttctgcccagcagactggcccaacaaagcctccttcacaactgcctggcccagcaaagcccccacctcaacagcctggcccagcaaagcccccacctcaacagcctggctcagcaaagcccccatctcaacagcctggctcaacaaaacccccacctcaacagcctggcccagcaaagccctcacctcaacagcctggctcaacaaaacccccatctcaacagcctggctcagcaaaaccctcagctcaacagcctagcccagcaaagccctcggctcagcaatctacaaaaccagtaagccaaacaggatctggaaaacctctgcagccaccaacagtgtctccatctgcaaaacagcctccttcacaaggcctccctaaaaccatctgtcctctttgcaataccactgaacttctgttgcatgttccagaaaaggccaattttaacacatgcactgagtgtcaaaccactgtctgtagtctctgtggttttaatcccaatcctcatttaacggaggtaaaagagtggctctgtttgaactgtcaaatgaaaagagctctaggcggggatctggctccagttccgtcatcaccccagcccaaactgaagactgcacctgttaccactacatcagcagtgagcaaatcatccccacagccacagcagacttccccaaagaaggatgctgcaccaaaacaggatctctccaaggcacctgagcctaaaaagccaccaccactagtgaaacaaccaacccttcatggctctccttcagccaaggccaagcagccccctgaggcagattctttgtccaagccagcccctcccaaagaaccttctgtcccatctgagcaggacaaggcccctgttgctgatgataaaccaaagcagcccaagatggtaaagccaaccactgaccttgtatcttcatcatcagcaacaacaaaacctgatattccaagctccaaagtacagtcacaagctgaagagaaaacaacccctcctctaaaaacagactctgccaaaccctcacagagttttccaccaacaggggaaaaagtcagcccatttgattctaaagccatacctcgacctgcatcagattcaaaaattatttcacatcctggtcccagttcagagagcaaaggtcaaaaacaagttgaccccgtacaaaagaaggaagaacccaagaaagcacaaaccaaaatgagtcctaaaccagatgccaagccaatgccaaaagggtcaccaacaccccctggcccacgacctaccgctggccaaactgtccccacacctcaacagtccccaaagcctcaggagcagtcaaggcgtttcagtctgaatctgggaagtattactgatgcccccaaatcacagcctacaactcctcaagagaccgtgactgggaaactctttgggtttggagcatcaatcttcagccaggcatcaaatttaatttccactgcaggccaacctggacctcattcacaaagtggaccaggggccccaatgaaacaagcccctgccccttcacagccacctacttcacaagggccacccaaatccacaggtcaagcaccaccagcacctgcaaaaagtatacctgtgaaaaaggaaacaaaagccccagcagctgaaaaattagagcccaaagctgaacaagctccaacagtaaaaagaacagaaacagaaaaaaagccaccacctattaaggatagcaaatctttaacagctgagcctcaaaaggctgtccttcccacaaaactggagaaatcgcccaaaccagaatcaacctgtcctctctgcaaaactgaactcaacataggttctaaggatcctcctaacttcaatacttgcactgaatgcaagaatcaagtgtgtaatctctgtggatttaaccctacaccacatttgactgagattcaagaatggctttgtttaaattgccaaacccagagagcaatatcaggacagcttggagacatacgcaaaatgccacctgcaccatcaggacccaaagcatctcctatgcctgttcctacagaatcatcatctcagaaaacagcagtgcctccccaagtaaaattagtgaaaaagcaagaacaagaagtaaaaacggaagctgaaaaagtcattctggaaaaagtaaaggaaacactatcaatggaaaaaattcctcctatggtaaccacagatcaaaaacaagaagagagtaaactagagaaagacaaagcttcagctcttcaagaaaaaaagccactccctgaagaaaaaaaactaatccctgaagaagaaaagatacgttctgaagaaaaaaagccactcctagaagaaaaaaagccaacccctgaagacaaaaagctactcccagaggcaaaaacatcagccccagaagaacagaaacatgacttacttaaatctcaagtacaaattgctgaagaaaagcttgaaggcagagtggctccaaagacagtgcaagaagggaaacaaccacagaccaagatggaaggtttaccatctggcacacctcagagtttacctaaagaagatgataagacaaccaaaacaataaaagaacagccacagccaccatgcacagcaaaacctgatcaggtggaacctgggaaagaaaaaacagaaaaggaagatgacaaatcagacacctcaagttctcagcagcctaaaagcccccaaggtctgagcgacacgggatattcttccgatggaatatcaagctcacttggtgaaattccaagtcttattccaactgatgaaaaggatattctcaagggactcaaaaaggactctttttcacaagaaagcagcccttccagcccctcagatttggctaagttagaaagtacagtcctatctattttggaagctcaagcaagtacacttgctgatgaaaagtcagaaaagaaaacacaaccccatgaagtttctcctgaacagcctaaagaccaagagaaaactcagagtttatctgaaaccttggaaattactatttcagaagaggagatcaaagagagtcaagaagaaaggaaagacacttttaaaaaagatagccaacaagatattccttccagcaaggaccataaagagaagtctgagtttgttgatgacataactactagaagagagccttatgattcagttgaagagagtagtgaaagtgaaaactcacctgttccacaaagaaaacgaagaactagtgttggctcatcaagcagtgatgagtataaacaggaagacagccaaggatcaggggaagaggaggacttcattcgaaaacaaatcatagaaatgagtgctgatgaagatgcttcaggttctgaagatgatgagttcatcagaaaccagctcaaagagattagtagcagtactgagagccagaagaaggaagaaacaaagggaaaaggcaaaataacagcagggaaacacagacgactgactcgaaaaagtagcacaagcattgatgaagatgcaggaagacgtcactcatggcatgatgaagacgatgaagcatttgatgaaagtcctgaacttaaatacagagaaactaaaagtcaggaaagtgaagaacttgtagttactggaggaggagggctacgccgatttaaaacaattgagctcaacagtacaatagcagataaatattctgcagagtcatcacagaaaaaaacaagtttgtattttgacgaagagccagaattggaaatggaaagcctgacagactcacctgaagataggtcaaggggagagggatcttcgagtctgcatgcttccagcttcactcctggtacatcccctacatcagtatcatcacttgatgaggacagtgacagtagcccgagtcacaaaaaaggagagagcaaacagcaacgcaaagctcggcacagaccacatggccctcttttgcctactattgaagattcttcagaggaagaagaattgagagaggaagaagaattattaaaggagcaagaaaagcagagggaaatagaacagcaacaaagaaagagttctagtaaaaaatcaaagaaagacaaagatgaacttcgagctcagagaagaagggaaaggccaaagacaccacctagtaatctctctcccattgaagatgcatctccgacagaagagttacgtcaggctgcagaaatggaggagctccatagatcttcttgttctgaatattcacctagcatagagtcagacccagaaggttttgaaataagcccggaaaaaataatagaagtacaaaaagtttataaattgcccacagctgtttcattatactcaccaacagatgagcaatctattatgcagaaagaaggtagccaaaaggcgttaaaaagtgctgaggagatgtatgaagaaatgatgcataaaacacacaaatacaaagcttttccagctgcaaatgaacgagatgaagtgtttgaaaaagagcctttgtatggtgggatgctaatagaggattatatttatgaatctttagtagaagacacgtacaatggatcggtagatggcagtctgctaacaaggcaagaagaagaaaatggatttatgcagcagaaaggaagagagcaaaagataagactttcagaacagatttatgaagatcctatgcagaaaattacagacctccagaaagagttttatgagttagaaagcttacattctgttgtgcctcaggaagatattgtttcaagctcttttatcatcccagaaagccatgagatagtggacctgggtactatggtaacttctacagaagaagaaaggaaactactagatgctgatgctgcctatgaagaacttatgaagaggcaacagatgcaattaacacctggatctagcccaacccaggcccccattggtgaggatatgacagagtccaccatggactttgacagaatgccagatgcctctttgacatcaagtgttctctcaggagcgtctcttacagattcgaccagcagtgcaacactctctatcccagatgttaaaataacccaacatttttcaacagaagaaattgaggatgaatatgtaaccgattatacaagagaaattcaagagataattgcccatgaatcgctgattttgacctactcggagccttcagaaagtgctacatctgtcccaccctctgacacaccttctctcacatcatctgtttcttcggtctgtaccacagatagctcttcacccattactaccctggatagcataaccacagtttatacagagccagtggacatgataactaaatttgaagattctgaggaaatttcttcatcaacttattttccaggcagcattatagactatccagaagaaataagtgtatctttagatcggactgccccaccagatggtagagctagtgctgatcatattgttatttccttatctgatatggcatcttctatcatagaatctgtagtacctaaacctgaagggccagttgctgacactgtttctactgacttacttatatctgaaaaggacccagtgaagaaagccaagaaggaaactgggaatggaatcattctggaagttttggaagcttacagagataaaaaggagttggaggccgaacgaacaaaaagtagcttatccgaaaccgtgtttgatcacccaccttcttctgtaatagcccttccaatgaaagagcagctttcaactacatactttacatctggagagacctttggtcaggaaaaacctgcatctcagttaccatctggcagtccttctgtttcctctcttccagctaaacctcgcccattctttagaagttcttctttggatatatcagctcaacctcctccccctcctccccctccccctcctcctcctcctccaccaccaccccctcctcccccaccacttcctccaccaacttcacctaaaccaactattcttcctaaaaaaaagttaacagttgcatctccagtgactacagctacacctctgtttgatgctgttactactctagagaccacagctgttctgagaagtaatggattacctgttacaagaatatgtactactgcacctcctcctgttcctcctaagccatcttcaattccatctggacttgtatttacccacaggcctgagccaagcaaacctccaatcgcccccaaaccagtgattcctcagcttccaacaactacacaaaaaccaacagatatacaccccaaaccaacaggcctatctttaacttcaagtatgaccttaaatttagtgacttcagcagattataaattgccttcccctacctccccactttccccacactccaacaagtcttcaccaagattttccaaatccctcacagaaacttatgtagttattacattgccatctgaaccagggactccaacagattcttctgctagtcaagcaattaccagttggcccttgggatcaccctccaaagatctggtttctgttgaacctgtgttttctgtagttcctcctgtgacagctgtagaaattccaatttcttcagaacagaccttctacatctctggagctttacagacattttctgctacccctgtcacagcaccctcttcatttcaagcagctcccacatcagttacacagtttctcactactgaagtttccaagactgaggtttcagcaaccagaagtacagctcctagtgttggtctcagcagcatttccataacaattcctccagagcctcttgctctagataacatacatttagagaagcctcagtataaagaagatggaaaattgcaacttgttggtgatgtaattgatttgcgtacagtaccaaaggtagaagttaaaacaactgataaatgtattgatctttctgcttctacaatggatgtgaaaaggcagatcacagcaaatgaagtttatgggaaacaaattagtgctgtccaaccctctattataaatcttagtgtgacatcatcaatagtgactcctgtatctctggccactgagacagtgacctttgtcacatgcacagctagtgcaagttacactacaggcacagaaagcctagtgggtgcagaacatgcaatgacaacaccactccaacttacaacatcaaagcatgctgagcccccatacaggataccaagtgaccaggtctttcctatagctagggaagaagcaccaataaacttatctctaggtactccagcacatgcagtgacattggctattacaaaacctgtcactgtgcctcctgttggtgtcacaaatggatggactgatagcaccgtatcccagggaatcactgatggggaagtagtggatctcagtacaaccaagtctcacagaacagtcgtaacaatggatgagtctacttcaagtgtgatgaccaaaataatagaagatgaaaaacccgttgatttaaccgcagggagaagagctgtgtgctgtgatgtggtttataaattaccatttggaaggagctgcacagcacagcagcctgcaactactcttcctgaggatcgttttggttatagggatgaccactatcagtatgatcgatcagggccatatggttatagagggattgggggaatgaagccttccatgtctgacacaaatttagcagaagctggacattttttctataaaagtaagaatgcttttgattattctgaaggaactgacacagcagtagatctgacttcagggagagttactacaggtgaggtaatggattattcaagcaagactacaggtccatatccagaaacacgacaagtcatttcaggagctgggattagtaccccacagtattccacagcaagaatgacaccaccaccaggaccccagtattgtgtggggagtgttttgaggtcatctaatggtgttgtctattcttcagtagcaactccaacaccctctacatttgctatcaccacacaacctggctccattttcagcaccacagtgagggatttgtctggtattcatacggctgatgcagtgacttcattacctgccatgcaccatagccagccaatgcctagatcatattttataacaacaggtgcatctgaaacggacattgcagtaactggtattgatatcagtgccagtttgcaaactattactatggagtctcttactgctgagacgatagactctgttcccactttaaccacagcatccgaagtgtttcctgaagtggtgggagatgaaagtgctcttttaattgtccctgaagaagataaacaacagcagcagctagacttggagcgtgagctcctggaactggagaaaattaagcaacagcgctttgctgaggaattggagtgggaacgtcaggaaattcaaaggttccgagaacaagaaaagatcatggttcagaaaaagttggaggagctgcagtctatgaagcaacaccttctctttcagcaagaagaagagcggcaagcccagttcatgatgaggcaggagacgttagctcagcaacagttacagcttgagcagatccaacagctgcaacaacagcttcaccagcagctggaggagcaaaagattcggcagatctaccagtataactatgacccttctggaactgcttctccacaaaccactacagagcaggcaattttggaaggtcagtatgctgctctggaaggcagtcaattttgggcaactgaagatgcaaccaccacagcttcagctgttgtggcaattgaaataccacaaagccaaggatggtacaccgttcagtctgatggtgttactcagtacattgccccacctggtatcctgagcactgtttcagaaatacctctaacagatgttgttgtgaaagaggaaaaacaacccaaaaagagaagttctggagctaaagtccgaggacagtatgatgacatgggagaaaatatgacagatgatccccgaagttttaaaaagatagtggacagtggtgtacaaacggatgacgaagatgccacagatcggagctatgtgagtaggagaaggagaactaaaaagagtgtggatacaagcgtccaaactgatgatgaagatcaggatgagtgggatatgcctactagatcaaggaggaaagctcgtgtagggaaatatggtgacagcatgacagaggctgacaagaccaaacccctttccaaagtctccagcatagcagttcaaacggtagcagagatatctgtgcaaactgaaccagttggaaccataagaacaccctccatacgggcacgagtggatgccaaggtagaaataattaaacacatttcagcacctgaaaagacttacaaagggggcagtttaggatgtcaaacagaagcagattcagacacacaaagtcctcaatatctgagtgccacatctccacccaaagacaagaaacgcccaacacctttagagattggttattcatctcacctccgggcagattccacagtacagctggctccttccccacccaaatcccccaaagtcctttactcacccatctcaccactttcaccaggcaaagccttagaatcagcctttgtaccttatgaaaaacccctccctgatgatataagtccacagaaagtactgcatccagatatggctaaagttcccccagcaagtcctaagacagccaagatgatgcagcgttctatgtctgaccccaagcctctgagtccaacagcagacgaaagttccagggctccttttcagtataccgagggctatacgactaaaggttctcaaaccatgacatcctctggagcccagaaaaaagttaaaagaactctgccaaatccacctcctgaggagatttccacaggaactcaatccacattcagcacaatgggcacagtttccaggagaaggatctgcagaaccaacacaatggcacgagccaagattctccaggacatagacagagagcttgatcttgtggaaagggagtctgcaaaacttcgaaagaaacaagcagagcttgatgaagaagaaaaggagattgatgctaagctacgatacctggaaatgggaattaacaggaggaaagaggccctattaaaggagagagaaaagagagaacgagcctacctccagggagtagctgaggatcgtgattacatgtctgacagtgaagtgagtagcacaagaccaacccgaatagaaagtcagcatggcattgagcgaccaagaactgctccccaaactgaattcagccagtttataccaccacaaacccaaacagaatctcaactagttcctccgacaagtccttacacacaataccagtactcttcccctgctcttcctacccaagcacccacctcatacactcaacagtctcattttgagcaacaaactttgtaccatcagcaagtttcaccttatcagactcagccaacattccaagctgtggcaacaatgtccttcacacctcaagttcaacctacaccaaccccacagccttcttatcagttaccttcacagatgatggtgatacaacagaagccacggcaaactacattatatttggagcccaagataacctcaaactatgaagtgattcgcaaccaaccccttatgatagcacctgtttctacggataacacatttgctgtttcccatcttggtagtaagtacaatagtttagacttgagaataggtttggaggaaagaagtagcatggcaagcagtccaatatcaagcatatctgcagattctttctatgcagatattgatcaccatactccacgaaattatgtcctaattgacgacattggagagatcaccaaaggaacagcggcattaagcaccgcatttagccttcatgaaaaggatctgtcaaaaacagaccgtctccttcgaaccactgagacacgccggtctcaagaagtgacagatttcctagcacctttacagtcttcctctagattgcatagttatgtgaaggcggaggaagacccaatggaggatccttacgagttaaagcttctgaaacatcagattaaacaggaatttcgtagagggacagagagcttagatcaccttgctggtctttctcattattaccatgctgatactagctacagacattttccaaaatctgagaagtatagcatcagtagactcacacttgaaaaacaagcagcaaaacaactgccagcagccatactttatcaaaagcagtcaaagcataagaaatcactaattgaccctaaaatgtcaaaattttcacctattcaagaaagtagagaccttgaacctgattattcaagctatatgacttctagcacttcatctattggtggcatttcctccagggcaaggctccttcaagatgacatcacttttggcctcagaaaaaatattacagaccaacaaaaatttatgggatcttctcttggcacaggactgggcacattaggaaataccatacgctcagctctgcaggatgaagcggataagccatacagtagtggcagcaggtccagaccttcctccagaccttcctctgtctatgggcttgatttatcaattaaaagggattcttctagctcttccctaagactgaaagctcaagaggctgaagctctagatgtttcctttagtcatgcatcatcctctgccagaactaagccgaccagtttgccaattagtcaaagtagaggaagaataccaattgtggcccagaattctgaagaagaaagcccactcagtcctgttggccagccaatgggaatggccagggctgcagctggacccctgccaccaatatctgcagacaccagggatcagtttggatcaagccactcattgcctgaagttcagcaacacatgagggaagaatcacggactcgaggctatgaccgtgacatagcattcatcatggatgacttccaacatgccatgtcagacagtgaagcctatcatctgcgtcgtgaggaaacagattggtttgataaacccagggagtctcgtttggaaaatggacatggtctggaccgaaaactgccggaaagattggtccactctagaccactcagtcaacatcaagagcaaattatacagatgaacgggaaaactatgcactacatctttcctcacgcaaggataaaaataacaagagactcaaaggatcacacagtttcaggtaatggattaggaattagaattgtgggtggtaaagaaatcccgggacatagtggagaaattggagcctatattgccaagattcttcctgggggaagtgcggaacagacggggaagcttatggaagggatgcaagtattggaatggaatggaattcccttgacttctaaaacatatgaagaagttcagagtatcattagtcagcaaagtggggaagcagaaatatgtgtaagactggacctcaatatgctatcagattctgaaaattcccagcatctggaacttcatgagccaccaaaagctgtggataaggcgaaatccccaggggttgatcctaagcagttggcagcagaactccagaaggtttcactacagcagtcaccgctggttctgtcatcagttgttgaaaaaggatctcatgttcattcaggtcctacatcagcaggatccagttccgttcccagccctgggcaaccagggtccccctcagtgagcaaaaagaagcacggcagcagcaagcctaccgatggaacaaaggttgtctctcatccaattacaggagaaattcagcttcaaattaactatgatcttggaaatctcataatacatattctccaagcaagaaatcttgttcctcgagacaacaatggttattctgacccttttgtgaaagtgtaccttcttccagggagaggtcaagtcatggttgtccagaatgcaagtgctgagtacaagagaaggactaaacatgtccagaaaagtcttaatcctgagtggaatcaaacagtaatttataaaagtatttccatggaacagctcaagaagaaaacactggaggtgacagtttgggattatgatagattttcatccaacgacttccttggggaggtattgattgatttatctagcacatctcacctcgataacactccaaggtggtatcctctcaaagaacagactgaaagcattgatcatggcaagtctcattccagtcagagcagccagcagtccccaaagccatctgttatcaaaagcagaagccatggtatcttccctgacccatcaaaggacatgcaggttcccaccattgagaaatcccatagtagtcctggtagctcaaaatcatcatcagaaggccatctccgttctcatggaccatctcgcagtcaaagcaaaaccagcgtcactcagacccacctggaagatgcaggggctgccatagctgctgccgaagctgccgtgcaacaactccgcattcaaccaacaaagcctcccaatcaccggcctgcagaaagctctgtgtccaccggctcctcgggcagcagctttggcagtgggtatagcgtggacagtgaaggaagcagcagcactgcaggggagactaatctatttcctattccgaggatagggaagatgggacagaatggacaagagcctgtaaaacagccaggggtaggagtaggactagcagacactgaagctaaaactcaggtaatgggagaaatcaagattgcattgaagaaggaaatgaagacagatggtgaacaactaatagttgaaattctccaatgcagaaatattacatacaaatttaagtctcctgatcatctaccagatttatatgtgaaaatatatgtgatgaatatttctacccaaaaaaaggtgatcaagaaaaaaacaagagtatgcagacatgatcgagagccttcgtttaatgaaacttttcgattcagtctaagtcctgcaggacattctcttcagattttacttttctccaatggagggaagtttatgaaaaagaccttgattggtgaagcctgtatctggcttgacaaagtggatctcagaaaaagaatagtcaactggcacaaacttttggtcagtcctactcaaacgcattgaagaaacatgtcttctcagggtatagaaactgctctaaatagcctcacatcaagactatagttgaatactattgtacaaagctaagttttgagaggcaaacataagagtgggaacaacaagcaaaaacatacttaagaccttgtacatttattgttgtggatcacacaaagatattcaactgaaaaagttcacatactgaaaacaagaagaatggagttctgagaccttgaatttcccatggctgtgaagagaaactgtgaaacaaattttgattacttaagacaataatctttgagtagagttgagctatagcttaagacaggctcaaagattaatgtggttttcatgcagcacaaaggtaattctttatgcaaaggagccttggttgaaaggaaaggactgatgtaacaaatctcagttttcaaaacttcaaaaatcttccttcatcgtcttctattcagacaacttgctgctttcagattctgacataagatatacctacagtatgtgtccagggctggaagtgaggtggctgtgttcttagggaaaatggaagaggagatgtagaaattgtggctttcaggccatattttaccagttttctctgtgtctaaatgttacaagcatatacaacactgactttggaatccatgtggtaaaagcacatttgtttctgtatcatttgaaacaaggtagagtgaagataatactcagtagaaataaaattgaatttatctagaaataaaactatgactggctaacaaagaagaatgttgccccataaaatattggaattttggttgaaaccatcaaaatcttcataatttaccattaagccaagacatcttcagtctatgtaccaaaggacctagagtaaactgatatgttctaggaagcatgataacttactctttgtgaaactgcaaataaatgtattatcctgcacatttcctttctgttgagcgatgcattgacagagaaagaaaattctttctctggcaaacaaaccatattaatcttgtgacattgattaattaaatggatcctcatttcataatattttatgcttttttccttaatgacttaattcatttactgattgtatcatgaaaacatgacactaaactcgagttctctctagtgctctattttcttactttagtgacagtatcacagtgatcaagttcatcaatgttgggaaaatatgtgaaaagtcaacatttacctgagattaaaatatactttgagctattttaataataatgaataaaacaactaatgtccaagtcttaaaatgaagcaccctcttctctatcagcattattaattaaggaagtaacgtgaagttgtggaaaaaacactcagcagggaataaaagcctgtcttctggtcttagttctaccactgactgtgtcactttgcacatgtcacttacactcactttaccccagttttcttatctataggataaaaacaattatatattcttaaccttccaaatgagatgttgtgatgataaatcaatgatccatgaaagatgaaagcacatttccaaatatagttttatacacagaagtgaggaataattattacatatctttttaattctcaaattttatatgtgaaaaacatcatctaaaccaatggcaaggattgacatggataaaagcagtaaattagccacaaaacttattttttatttaaaatataaactttaacctgactaaaggtgaagaattacatgaaaatgcaaattttgctatcccaaattaaatgaataatgctggtcttaccctagtcctatattccacccaaaagaaataaatcaaattgcttctcagagcattctgagcttaaaacctgctgctttatttaagggtgaagtgttagtggaattagagaaaaccaactctagatattggttggatattgaattttctcatttttaaagaaaaaatgctctaaatttgagaggactgtaaagcactaaaaataagagaatttctaatatatcccaggatatatatatatatatatgacttcagaatacaaattcgatcttccccaaactgagaaagataaccataacttttcttccctctattttttaatccccctccactgacaatacaatgtcatttaccattgacattgctctcaaatgagcatgggagagtggaatcatcaaagacattatattgctagtattttatttttagaaactattagatctgctgatggttgccatggatatttccagcagaagctagcacttgaagaagcctataatcatcactcataattggggaagaaaaggtccaaggagatctccttctgacataaaaaggctctggtatttgcccttaaaagaaaaccctgactcatctctgatcctcttttgcagccactcatatccataggtatgcatgagagtttgtatgaccagttagctttcttcattccagttgcaatttcttttagaataatataaatggagggatcaccaaaacaaagattatctctttggtagctatttaacctgaaagcgtaggagtctttccattatagaagcccctccgttccaaggaactagcgatggggctaggtcaatcagcagagttgacaacagggcttctttttgtgcaccagcattccccttcagagagcataagatcctgccagtgtgccaagtttgcagctgaccaaacttctaggttgtactggaattattctatgcaacactgatccttatatgaatgcgtttcttctgaatgatgttgactacccttcttacaacaaaactgtttcttttttattgcaaatagggctcttggtgttttttacttttttgtacatatcacagtacatggtttttcactctttagtttatttcattttattggaattaacttttttttattctaatactgacagagtttgtaatctctatataatacgtaattactccaattacagcacttttaccttgaagagcatctcagtttttcccacaatttcattgagtcatcagagactgatgttgcttcttggtttcaaatttggtcctaaagaaactttcggctgtagaaacaaaagcacagagtgaattttttacaaaagacagggaatatagaatagtcattacagacacaaataaccctagtagcacgaagttggtgttttctctgtttttacttaagattaagaagatttttggtgactctgaactctttatttatatttcagtttaaaatatcaagactaaggggcatcagttatctttactctttaatattgcccatattttaataaattacactaattaaacgcatattttcagcataccagtggaattaattttgtggatcacacacatttaaatagtcatattgtgggaatattatagctggtaaccagctgatattgattcttattataggaatgactgtaatgatagtggtggtagcagtagtgatattagcggtggtggtgatgtgaagtaaaataaaagtatatattatattgtgcccaatttattagaaattatttgatcaatgcttcatttcattaaaatatcataaagatgtttatagtatttttttactttattatttaaatcataactaacaatatttttaaaaacttattttcattgctacaatgtcaaatattccaaaatcagccaactacagctatatatgtgttatgtgtgacagaagtgatcttccttccctctttttgagcttgacatgaaagtgaaagaagactcaatgaataattatgagctatttatttaataattacttgccttgggtgtaatacagtaatgaatgagtgaaacaaatattctcattgaatatgatacaatgctgttttctgtatgtttcatgttctattattaaaggtatccattaggccaaaattatttaatcaaattctttatctgataggtagattgagagcattttcttaatgcattaccttgtacataagtatacacttggtaaagtagacgaagttgaaatattaatttcatttggcatttagcatgtgaatatgattattgtttgattgtgtctgtatatttgtttggtgacgtgctcaggtgctcccactactgattaatgtgtgtgctaatatcctaaaaacacatatgaggtttaagaaaaaattttcttgtctgaaaacataaacatcttaataaaactgattttgaaataaaaactaaagtacttgaagatatgtcttgtttctaactatatgttgcatgccatgttggtgatttgctaatgtgtttttttgtttgtttgttttacccaaatccctttggaaaatctaatggacaaatgcaaattcttggactaaggactgtataaattgacctgaaaatacatgagagttgcatttaaaaaaaaatgcttgtaaatccgtcttgagttttactctatgtaaaaatatgtcttggttttgtgattgtatacaagatgtatcttgataacttatgtaaactgtgccgtataaaggctgttgcctcagccttactaataaatactgaaaatatc

SEQ ID NO: 166157 - DNA, 17147 bp, Homo sapiens
  Payload ID: 12707
  Gene Symbol: PCLO
  Gene Name: piccolo presynaptic cytomatrix protein
  Uniprot ID: Q9Y6V0
  ENST ID: ENST00000423517
  CDS Start-End: 339-15146
gcggtgcgcggtgggaggggcggacggcgcccggctggcaccgctcagatctgcttctccccggctcggggcgccgaggcggcgtccgggaggtgtcttctgcaaaggttgcctggcgctgtccaacatggaggaggcaccggcagcgggcgttacctgcgagcgggactaacccctgcctggcgttccgggcggcagtgcctggtccagagtccagggactcggctgcctgcacgccccgaggcggaccccggctctgactgctcccctggccgcgggcttctcgactgggacgcggcgcgaggagggagcgcggcggccccgagtctccctgagccatgggcaacgaggcgagcttggaaggggaagggctccccgaagggctggcggcggccgcagcggctggaggaggagctagcggggcggggagcccctctcacaccgcgatcccggccggcatggaggcggatttgagccagctgagcgaagaggagaggagacagatcgccgctgtcatgtcaagggcgcaggggctgcccaagggaagcgtccccccggccgctgcggagtcgccttccatgcacaggaaacaagagttggatagtagtcatcctccaaagcaatcaggaagacccccggaccctgggcgtccagctcaacctggtctcagtaaaagtagaactacagacactttcaggtcagagcagaaattgcctgggaggagtccttccactattagcttgaaagaatcaaagtccagaactgatttaaaggaagagcacaagtctagtatgatgcctggcttcctctcagaggttaacgctttaagtgctgtttcctctgttgtaaataaattcaacccttttgatttgatatcagactctgaggcatcccaggaagaaaccaccaagaaacaaaaagtggttcagaaggagcaaggaaaacctgaaggaatcataaaacctcctttacaacaacagccacccaagccgattcctaagcagcaaggacctggtagggatccgcttcagcaggatggcactcccaaatcaatatcttctcaacaaccagaaaaaattaaatcacaacctccaggtacaggaaagccaattcagggtcctacccagactcctcagacagaccatgcaaaattgccacttcaacgagatgcatccaggcctcagactaaacaggcagacatagtaaggggagaatcagttaaaccctcactgccaagcccatccaaaccacctattcagcaaccaactcctggaaaacctccagcacagcagcctggacatgaaaaatcacagcctgggcctgcaaagcccccagctcagccctcagggctaacaaagccattggctcaacaaccagggacagtgaaacccccagtccagccaccagggacaacaaagcctccagctcagcctcttggtcctgctaagcctccagctcagcagactgggtcagagaagccttcatcggagcagcctgggccaaaggctttagctcagcctcctggagttggaaagactccagctcaacagccagggccagcaaagcctccaacccagcaggtggggacaccaaaacccctagctcaacaacctgggctacagtctccagctaaggcacctgggcctacaaagactccagttcagcagcctgggccaggaaagattccagctcaacaggcaggacccggaaagacttctgcccagcagactggcccaacaaagcctccttcacaactgcctggcccagcaaagcccccacctcaacagcctggcccagcaaagcccccacctcaacagcctggctcagcaaagcccccatctcaacagcctggctcaacaaaacccccacctcaacagcctggcccagcaaagccctcacctcaacagcctggctcaacaaaacccccatctcaacagcctggctcagcaaaaccctcagctcaacagcctagcccagcaaagccctcggctcagcaatctacaaaaccagtaagccaaacaggatctggaaaacctctgcagccaccaacagtgtctccatctgcaaaacagcctccttcacaaggcctccctaaaaccatctgtcctctttgcaataccactgaacttctgttgcatgttccagaaaaggccaattttaacacatgcactgagtgtcaaaccactgtctgtagtctctgtggttttaatcccaatcctcatttaacggaggtaaaagagtggctctgtttgaactgtcaaatgaaaagagctctaggcggggatctggctccagttccgtcatcaccccagcccaaactgaagactgcacctgttaccactacatcagcagtgagcaaatcatccccacagccacagcagacttccccaaagaaggatgctgcaccaaaacaggatctctccaaggcacctgagcctaaaaagccaccaccactagtgaaacaaccaacccttcatggctctccttcagccaaggccaagcagccccctgaggcagattctttgtccaagccagcccctcccaaagaaccttctgtcccatctgagcaggacaaggcccctgttgctgatgataaaccaaagcagcccaagatggtaaagccaaccactgaccttgtatcttcatcatcagcaacaacaaaacctgatattccaagctccaaagtacagtcacaagctgaagagaaaacaacccctcctctaaaaacagactctgccaaaccctcacagagttttccaccaacaggggaaaaagtcagcccatttgattctaaagccatacctcgacctgcatcagattcaaaaattatttcacatcctggtcccagttcagagagcaaaggtcaaaaacaagttgaccccgtacaaaagaaggaagaacccaagaaagcacaaaccaaaatgagtcctaaaccagatgccaagccaatgccaaaagggtcaccaacaccccctggcccacgacctaccgctggccaaactgtccccacacctcaacagtccccaaagcctcaggagcagtcaaggcgtttcagtctgaatctgggaagtattactgatgcccccaaatcacagcctacaactcctcaagagaccgtgactgggaaactctttgggtttggagcatcaatcttcagccaggcatcaaatttaatttccactgcaggccaacctggacctcattcacaaagtggaccaggggccccaatgaaacaagcccctgccccttcacagccacctacttcacaagggccacccaaatccacaggtcaagcaccaccagcacctgcaaaaagtatacctgtgaaaaaggaaacaaaagccccagcagctgaaaaattagagcccaaagctgaacaagctccaacagtaaaaagaacagaaacagaaaaaaagccaccacctattaaggatagcaaatctttaacagctgagcctcaaaaggctgtccttcccacaaaactggagaaatcgcccaaaccagaatcaacctgtcctctctgcaaaactgaactcaacataggttctaaggatcctcctaacttcaatacttgcactgaatgcaagaatcaagtgtgtaatctctgtggatttaaccctacaccacatttgactgagattcaagaatggctttgtttaaattgccaaacccagagagcaatatcaggacagcttggagacatacgcaaaatgccacctgcaccatcaggacccaaagcatctcctatgcctgttcctacagaatcatcatctcagaaaacagcagtgcctccccaagtaaaattagtgaaaaagcaagaacaagaagtaaaaacggaagctgaaaaagtcattctggaaaaagtaaaggaaacactatcaatggaaaaaattcctcctatggtaaccacagatcaaaaacaagaagagagtaaactagagaaagacaaagcttcagctcttcaagaaaaaaagccactccctgaagaaaaaaaactaatccctgaagaagaaaagatacgttctgaagaaaaaaagccactcctagaagaaaaaaagccaacccctgaagacaaaaagctactcccagaggcaaaaacatcagccccagaagaacagaaacatgacttacttaaatctcaagtacaaattgctgaagaaaagcttgaaggcagagtggctccaaagacagtgcaagaagggaaacaaccacagaccaagatggaaggtttaccatctggcacacctcagagtttacctaaagaagatgataagacaaccaaaacaataaaagaacagccacagccaccatgcacagcaaaacctgatcaggtggaacctgggaaagaaaaaacagaaaaggaagatgacaaatcagacacctcaagttctcagcagcctaaaagcccccaaggtctgagcgacacgggatattcttccgatggaatatcaagctcacttggtgaaattccaagtcttattccaactgatgaaaaggatattctcaagggactcaaaaaggactctttttcacaagaaagcagcccttccagcccctcagatttggctaagttagaaagtacagtcctatctattttggaagctcaagcaagtacacttgctgatgaaaagtcagaaaagaaaacacaaccccatgaagtttctcctgaacagcctaaagaccaagagaaaactcagagtttatctgaaaccttggaaattactatttcagaagaggagatcaaagagagtcaagaagaaaggaaagacacttttaaaaaagatagccaacaagatattccttccagcaaggaccataaagagaagtctgagtttgttgatgacataactactagaagagagccttatgattcagttgaagagagtagtgaaagtgaaaactcacctgttccacaaagaaaacgaagaactagtgttggctcatcaagcagtgatgagtataaacaggaagacagccaaggatcaggggaagaggaggacttcattcgaaaacaaatcatagaaatgagtgctgatgaagatgcttcaggttctgaagatgatgagttcatcagaaaccagctcaaagagattagtagcagtactgagagccagaagaaggaagaaacaaagggaaaaggcaaaataacagcagggaaacacagacgactgactcgaaaaagtagcacaagcattgatgaagatgcaggaagacgtcactcatggcatgatgaagacgatgaagcatttgatgaaagtcctgaacttaaatacagagaaactaaaagtcaggaaagtgaagaacttgtagttactggaggaggagggctacgccgatttaaaacaattgagctcaacagtacaatagcagataaatattctgcagagtcatcacagaaaaaaacaagtttgtattttgacgaagagccagaattggaaatggaaagcctgacagactcacctgaagataggtcaaggggagagggatcttcgagtctgcatgcttccagcttcactcctggtacatcccctacatcagtatcatcacttgatgaggacagtgacagtagcccgagtcacaaaaaaggagagagcaaacagcaacgcaaagctcggcacagaccacatggccctcttttgcctactattgaagattcttcagaggaagaagaattgagagaggaagaagaattattaaaggagcaagaaaagcagagggaaatagaacagcaacaaagaaagagttctagtaaaaaatcaaagaaagacaaagatgaacttcgagctcagagaagaagggaaaggccaaagacaccacctagtaatctctctcccattgaagatgcatctccgacagaagagttacgtcaggctgcagaaatggaggagctccatagatcttcttgttctgaatattcacctagcatagagtcagacccagaaggttttgaaataagcccggaaaaaataatagaagtacaaaaagtttataaattgcccacagctgtttcattatactcaccaacagatgagcaatctattatgcagaaagaaggtagccaaaaggcgttaaaaagtgctgaggagatgtatgaagaaatgatgcataaaacacacaaatacaaagcttttccagctgcaaatgaacgagatgaagtgtttgaaaaagagcctttgtatggtgggatgctaatagaggattatatttatgaatctttagtagaagacacgtacaatggatcggtagatggcagtctgctaacaaggcaagaagaagaaaatggatttatgcagcagaaaggaagagagcaaaagataagactttcagaacagatttatgaagatcctatgcagaaaattacagacctccagaaagagttttatgagttagaaagcttacattctgttgtgcctcaggaagatattgtttcaagctcttttatcatcccagaaagccatgagatagtggacctgggtactatggtaacttctacagaagaagaaaggaaactactagatgctgatgctgcctatgaagaacttatgaagaggcaacagatgcaattaacacctggatctagcccaacccaggcccccattggtgaggatatgacagagtccaccatggactttgacagaatgccagatgcctctttgacatcaagtgttctctcaggagcgtctcttacagattcgaccagcagtgcaacactctctatcccagatgttaaaataacccaacatttttcaacagaagaaattgaggatgaatatgtaaccgattatacaagagaaattcaagagataattgcccatgaatcgctgattttgacctactcggagccttcagaaagtgctacatctgtcccaccctctgacacaccttctctcacatcatctgtttcttcggtctgtaccacagatagctcttcacccattactaccctggatagcataaccacagtttatacagagccagtggacatgataactaaatttgaagattctgaggaaatttcttcatcaacttattttccaggcagcattatagactatccagaagaaataagtgtatctttagatcggactgccccaccagatggtagagctagtgctgatcatattgttatttccttatctgatatggcatcttctatcatagaatctgtagtacctaaacctgaagggccagttgctgacactgtttctactgacttacttatatctgaaaaggacccagtgaagaaagccaagaaggaaactgggaatggaatcattctggaagttttggaagcttacagagataaaaaggagttggaggccgaacgaacaaaaagtagcttatccgaaaccgtgtttgatcacccaccttcttctgtaatagcccttccaatgaaagagcagctttcaactacatactttacatctggagagacctttggtcaggaaaaacctgcatctcagttaccatctggcagtccttctgtttcctctcttccagctaaacctcgcccattctttagaagttcttctttggatatatcagctcaacctcctccccctcctccccctccccctcctcctcctcctccaccaccaccccctcctcccccaccacttcctccaccaacttcacctaaaccaactattcttcctaaaaaaaagttaacagttgcatctccagtgactacagctacacctctgtttgatgctgttactactctagagaccacagctgttctgagaagtaatggattacctgttacaagaatatgtactactgcacctcctcctgttcctcctaagccatcttcaattccatctggacttgtatttacccacaggcctgagccaagcaaacctccaatcgcccccaaaccagtgattcctcagcttccaacaactacacaaaaaccaacagatatacaccccaaaccaacaggcctatctttaacttcaagtatgaccttaaatttagtgacttcagcagattataaattgccttcccctacctccccactttccccacactccaacaagtcttcaccaagattttccaaatccctcacagaaacttatgtagttattacattgccatctgaaccagggactccaacagattcttctgctagtcaagcaattaccagttggcccttgggatcaccctccaaagatctggtttctgttgaacctgtgttttctgtagttcctcctgtgacagctgtagaaattccaatttcttcagaacagaccttctacatctctggagctttacagacattttctgctacccctgtcacagcaccctcttcatttcaagcagctcccacatcagttacacagtttctcactactgaagtttccaagactgaggtttcagcaaccagaagtacagctcctagtgttggtctcagcagcatttccataacaattcctccagagcctcttgctctagataacatacatttagagaagcctcagtataaagaagatggaaaattgcaacttgttggtgatgtaattgatttgcgtacagtaccaaaggtagaagttaaaacaactgataaatgtattgatctttctgcttctacaatggatgtgaaaaggcagatcacagcaaatgaagtttatgggaaacaaattagtgctgtccaaccctctattataaatcttagtgtgacatcatcaatagtgactcctgtatctctggccactgagacagtgacctttgtcacatgcacagctagtgcaagttacactacaggcacagaaagcctagtgggtgcagaacatgcaatgacaacaccactccaacttacaacatcaaagcatgctgagcccccatacaggataccaagtgaccaggtctttcctatagctagggaagaagcaccaataaacttatctctaggtactccagcacatgcagtgacattggctattacaaaacctgtcactgtgcctcctgttggtgtcacaaatggatggactgatagcaccgtatcccagggaatcactgatggggaagtagtggatctcagtacaaccaagtctcacagaacagtcgtaacaatggatgagtctacttcaagtgtgatgaccaaaataatagaagatgaaaaacccgttgatttaaccgcagggagaagagctgtgtgctgtgatgtggtttataaattaccatttggaaggagctgcacagcacagcagcctgcaactactcttcctgaggatcgttttggttatagggatgaccactatcagtatgatcgatcagggccatatggttatagagggattgggggaatgaagccttccatgtctgacacaaatttagcagaagctggacattttttctataaaagtaagaatgcttttgattattctgaaggaactgacacagcagtagatctgacttcagggagagttactacaggtgaggtaatggattattcaagcaagactacaggtccatatccagaaacacgacaagtcatttcaggagctgggattagtaccccacagtattccacagcaagaatgacaccaccaccaggaccccagtattgtgtggggagtgttttgaggtcatctaatggtgttgtctattcttcagtagcaactccaacaccctctacatttgctatcaccacacaacctggctccattttcagcaccacagtgagggatttgtctggtattcatacggctgatgcagtgacttcattacctgccatgcaccatagccagccaatgcctagatcatattttataacaacaggtgcatctgaaacggacattgcagtaactggtattgatatcagtgccagtttgcaaactattactatggagtctcttactgctgagacgatagactctgttcccactttaaccacagcatccgaagtgtttcctgaagtggtgggagatgaaagtgctcttttaattgtccctgaagaagataaacaacagcagcagctagacttggagcgtgagctcctggaactggagaaaattaagcaacagcgctttgctgaggaattggagtgggaacgtcaggaaattcaaaggttccgagaacaagaaaagatcatggttcagaaaaagttggaggagctgcagtctatgaagcaacaccttctctttcagcaagaagaagagcggcaagcccagttcatgatgaggcaggagacgttagctcagcaacagttacagcttgagcagatccaacagctgcaacaacagcttcaccagcagctggaggagcaaaagattcggcagatctaccagtataactatgacccttctggaactgcttctccacaaaccactacagagcaggcaattttggaaggtcagtatgctgctctggaaggcagtcaattttgggcaactgaagatgcaaccaccacagcttcagctgttgtggcaattgaaataccacaaagccaaggatggtacaccgttcagtctgatggtgttactcagtacattgccccacctggtatcctgagcactgtttcagaaatacctctaacagatgttgttgtgaaagaggaaaaacaacccaaaaagagaagttctggagctaaagtccgaggacagtatgatgacatgggagaaaatatgacagatgatccccgaagttttaaaaagatagtggacagtggtgtacaaacggatgacgaagatgccacagatcggagctatgtgagtaggagaaggagaactaaaaagagtgtggatacaagcgtccaaactgatgatgaagatcaggatgagtgggatatgcctactagatcaaggaggaaagctcgtgtagggaaatatggtgacagcatgacagaggctgacaagaccaaacccctttccaaagtctccagcatagcagttcaaacggtagcagagatatctgtgcaaactgaaccagttggaaccataagaacaccctccatacgggcacgagtggatgccaaggtagaaataattaaacacatttcagcacctgaaaagacttacaaagggggcagtttaggatgtcaaacagaagcagattcagacacacaaagtcctcaatatctgagtgccacatctccacccaaagacaagaaacgcccaacacctttagagattggttattcatctcacctccgggcagattccacagtacagctggctccttccccacccaaatcccccaaagtcctttactcacccatctcaccactttcaccaggcaaagccttagaatcagcctttgtaccttatgaaaaacccctccctgatgatataagtccacagaaagtactgcatccagatatggctaaagttcccccagcaagtcctaagacagccaagatgatgcagcgttctatgtctgaccccaagcctctgagtccaacagcagacgaaagttccagggctccttttcagtataccgagggctatacgactaaaggttctcaaaccatgacatcctctggagcccagaaaaaagttaaaagaactctgccaaatccacctcctgaggagatttccacaggaactcaatccacattcagcacaatgggcacagtttccaggagaaggatctgcagaaccaacacaatggcacgagccaagattctccaggacatagacagagagcttgatcttgtggaaagggagtctgcaaaacttcgaaagaaacaagcagagcttgatgaagaagaaaaggagattgatgctaagctacgatacctggaaatgggaattaacaggaggaaagaggccctattaaaggagagagaaaagagagaacgagcctacctccagggagtagctgaggatcgtgattacatgtctgacagtgaagtgagtagcacaagaccaacccgaatagaaagtcagcatggcattgagcgaccaagaactgctccccaaactgaattcagccagtttataccaccacaaacccaaacagaatctcaactagttcctccgacaagtccttacacacaataccagtactcttcccctgctcttcctacccaagcacccacctcatacactcaacagtctcattttgagcaacaaactttgtaccatcagcaagtttcaccttatcagactcagccaacattccaagctgtggcaacaatgtccttcacacctcaagttcaacctacaccaaccccacagccttcttatcagttaccttcacagatgatggtgatacaacagaagccacggcaaactacattatatttggagcccaagataacctcaaactatgaagtgattcgcaaccaaccccttatgatagcacctgtttctacggataacacatttgctgtttcccatcttggtagtaagtacaatagtttagacttgagaataggtttggaggaaagaagtagcatggcaagcagtccaatatcaagcatatctgcagattctttctatgcagatattgatcaccatactccacgaaattatgtcctaattgacgacattggagagatcaccaaaggaacagcggcattaagcaccgcatttagccttcatgaaaaggatctgtcaaaaacagaccgtctccttcgaaccactgagacacgccggtctcaagaagtgacagatttcctagcacctttacagtcttcctctagattgcatagttatgtgaaggcggaggaagacccaatggaggatccttacgagttaaagcttctgaaacatcagattaaacaggaatttcgtagagggacagagagcttagatcaccttgctggtctttctcattattaccatgctgatactagctacagacattttccaaaatctgagaagtatagcatcagtagactcacacttgaaaaacaagcagcaaaacaactgccagcagccatactttatcaaaagcagtcaaagcataagaaatcactaattgaccctaaaatgtcaaaattttcacctattcaagaaagtagagaccttgaacctgattattcaagctatatgacttctagcacttcatctattggtggcatttcctccagggcaaggctccttcaagatgacatcacttttggcctcagaaaaaatattacagaccaacaaaaatttatgggatcttctcttggcacaggactgggcacattaggaaataccatacgctcagctctgcaggatgaagcggataagccatacagtagtggcagcaggtccagaccttcctccagaccttcctctgtctatgggcttgatttatcaattaaaagggattcttctagctcttccctaagactgaaagctcaagaggctgaagctctagatgtttcctttagtcatgcatcatcctctgccagaactaagccgaccagtttgccaattagtcaaagtagaggaagaataccaattgtggcccagaattctgaagaagaaagcccactcagtcctgttggccagccaatgggaatggccagggctgcagctggacccctgccaccaatatctgcagacaccagggatcagtttggatcaagccactcattgcctgaagttcagcaacacatgagggaagaatcacggactcgaggctatgaccgtgacatagcattcatcatggatgacttccaacatgccatgtcagacagtgaagcctatcatctgcgtcgtgaggaaacagattggtttgataaacccagggagtctcgtttggaaaatggacatggtctggaccgaaaactgccggaaagattggtccactctagaccactcagtcaacatcaagagcaaattatacagatgaacgggaaaactatgcactacatctttcctcacgcaaggataaaaataacaagagactcaaaggatcacacagtttcaggtaatggattaggaattagaattgtgggtggtaaagaaatcccgggacatagtggagaaattggagcctatattgccaagattcttcctgggggaagtgcggaacagacggggaagcttatggaagggatgcaagtattggaatggaatggaattcccttgacttctaaaacatatgaagaagttcagagtatcattagtcagcaaagtggggaagcagaaatatgtgtaagactggacctcaatatgctatcagattctgaaaattcccagcatctggaacttcatgagccaccaaaagctgtggataaggcgaaatccccaggggttgatcctaagcagttggcagcagaactccagaaggtttcactacagcagtcaccgctggttctgtcatcagttgttgaaaaaggatctcatgttcattcaggtcctacatcagcaggatccagttccgttcccagccctgggcaaccagggtccccctcagtgagcaaaaagaagcacggcagcagcaagcctaccgatggaacaaaggttgtctctcatccaattacaggagaaattcagcttcaaattaactatgatcttggaaatctcataatacatattctccaagcaagaaatcttgttcctcgagacaacaatggttattctgacccttttgtgaaagtgtaccttcttccagggagaggtcaagtcatggttgtccagaatgcaagtgctgagtacaagagaaggactaaacatgtccagaaaagtcttaatcctgagtggaatcaaacagtaatttataaaagtatttccatggaacagctcaagaagaaaacactggaggtgacagtttgggattatgatagattttcatccaacgacttccttggggaggtattgattgatttatctagcacatctcacctcgataacactccaaggtggtatcctctcaaagaacagactgaaagcattgatcatggcaagtctcattccagtcagagcagccagcagtccccaaagccatctgttatcaaaagcagaagccatggtatcttccctgacccatcaaaggacatgcaggttcccaccattgagaaatcccatagtagtcctggtagctcaaaatcatcatcagaaggccatctccgttctcatggaccatctcgcagtcaaagcaaaaccagcgtcactcagacccacctggaagatgcaggggctgccatagctgctgccgaagctgccgtgcaacaactccgcattcaaccaagtaaaagacgcaaataaattcctcagcatggcagcttaatgttcatctgttgcctttctttcctgctgtcctttcctgtttgctttcagttttcaacatcctctgctcaccctgttctctgtccctttgtctgtgtaagaacgatataaatacattaatatgctctttcttatttagattttttttatttacatagactgaaataaaactggctgtttctcctttgtttccaccatccatccaacctggctcatagcatttgatacagtgtctgtgatgtttggaagcaaagcaatgttgtgtgtcctttttgtttgcgcttaaatatcttttagaatacagaaattataagcacaagtggctgccagttttccaggacttataccaaaaaaaaaaaagtgcacacatataagtatttagagcagatttgcaattagattcttgtatctgaaaacactcaaaaagtctaggcagaagataatgcaaccaacagtcaacttctagaaccttggaggaaaagccatttcaagacagtgctttaaaacactaacaaattttgcttctgaaatatggtagctttccatgtgcaaaaaattgtagtcttctgaaaaatctgtgaagaaaatcttatttcttacattctcaaaaaactacattaaattaatatatgtataagcatatgtgataaggcaatgcaacctcactgaggagcacaattgggtccattctgttggatcacactttgtatgtgatgacagattttacagatattttttctaaccattggaaatcaagatatactatgtctggtagctataagtcaatcaaagtataacaattgacctatcttaactgctgtattttcatttcatttgtgaaaatttagtcgattgatataattatataaaaacttaatatgtgcaaatatttcacaaatgtaggtaccctgttacttctaaaaggcattagccaggcaatggagatagatcattgttctctccatctccctagtcatcattttcaaagaaacagccagttttaaacccctttagtgctgtgcatgtggtgtcattttggcatttgaaaacacaacctatttaaatagagcaaaagagcacttctgtttgcatgaataacatttaagctggttccatctgaggatacatactctgggtttccatttcacccacactgccacagcagcacataaaagcggtcagtctaatcatgccaggaagcagcacagacacagcatagcaggagtcctccccattcaaagaactcagtctgataatctgcctccaccagccaatggcaaccaagaccaaagccagctagccctcaggaaggtgatgtctgatggaccagtcaagccagaaggaggtgagcagaaaggccctgttcaaagcacacagcaagaacatccccaaatttaaagctctcatctttaatttttagagattgtctgataaaatatgtttatccactttttaatgtgcttttgtgggcatggcatttcaggacttcatcatcaccatgtaagtcccaagatcagtcccgtaatatattgactacagtgatttgtatttttctatgcactgggcatcttttgacttttgttgggaaatagattaacaatattcatattgcagaatggaatgcatgctactaacctaatctgttcaagcatgactataaatatgtttcattgtgataaaagtttaaattgctcacagttcaagttagcctaccagttggaatgtggatcagtgttttttgcctattatttcaagtgtaacttttaaaaatttagtggattttgaaaattcttagaggaaagtaaaggaaaaattgttaatgcactcatttacctttacatggtgaaagttctctcttgatcctacaaacagacattttccactcgtgtttccatagttgttaagtgtatcagatgtgttgggcatgtgaatctccaagtgcctgtgtaataaataaagtatctttatttcattcataaa

SEQ ID NO: 166158 - DNA, 3786 bp, Homo sapiens
  Payload ID: 12707
  Gene Symbol: PCLO
  Gene Name: piccolo presynaptic cytomatrix protein
  ENST ID: ENST00000437081
  CDS Start-End: 2-3655
gatgaggcaggagacgttagctcagcaacagttacagcttgagcagatccaacagctgcaacaacagcttcaccagcagctggaggagcaaaagattcggcagatctaccagtataactatgacccttctggaactgcttctccacaaaccactacagagcaggcaattttggaaggtcagtatgctgctctggaaggcagtcaattttgggcaactgaagatgcaaccaccacagcttcagctgttgtggcaattgaaataccacaaagccaaggatggtacaccgttcagtctgatggtgttactcagtacattgccccacctggtatcctgagcactgtttcagaaatacctctaacagatgttgttgtgaaagaggaaaaacaacccaaaaagagaagttctggagctaaagtccgaggacagtatgatgacatgggagaaaatatgacagatgatccccgaagttttaaaaagatagtggacagtggtgtacaaacggatgacgaagatgccacagatcggagctatgtgagtaggagaaggagaactaaaaagagtgtggatacaagcgtccaaactgatgatgaagatcaggatgagtgggatatgcctactagatcaaggaggaaagctcgtgtagggaaatatggtgacagcatgacagaggctgacaagaccaaacccctttccaaagtctccagcatagcagttcaaacggtagcagagatatctgtgcaaactgaaccagttggaaccataagaacaccctccatacgggcacgagtggatgccaaggtagaaataattaaacacatttcagcacctgaaaagacttacaaagggggcagtttaggatgtcaaacagaagcagattcagacacacaaagtcctcaatatctgagtgccacatctccacccaaagacaagaaacgcccaacacctttagagattggttattcatctcacctccgggcagattccacagtacagctggctccttccccacccaaatcccccaaagtcctttactcacccatctcaccactttcaccaggcaaagccttagaatcagcctttgtaccttatgaaaaacccctccctgatgatataagtccacagaaagtactgcatccagatatggctaaagttcccccagcaagtcctaagacagccaagatgatgcagcgttctatgtctgaccccaagcctctgagtccaacagcagacgaaagttccagggctccttttcagtataccgagggctatacgactaaaggttctcaaaccatgacatcctctggagcccagaaaaaagttaaaagaactctgccaaatccacctcctgaggagatttccacaggaactcaatccacattcagcacaatgggcacagtttccaggagaaggatctgcagaaccaacacaatggcacgagccaagattctccaggacatagacagagagcttgatcttgtggaaagggagtctgcaaaacttcgaaagaaacaagcagagcttgatgaagaagaaaaggagattgatgctaagctacgatacctggaaatgggaattaacaggaggaaagaggccctattaaaggagagagaaaagagagaacgagcctacctccagggagtagctgaggatcgtgattacatgtctgacagtgaagtgagtagcacaagaccaacccgaatagaaagtcagcatggcattgagcgaccaagaactgctccccaaactgaattcagccagtttataccaccacaaacccaaacagaatctcaactagttcctccgacaagtccttacacacaataccagtactcttcccctgctcttcctacccaagcacccacctcatacactcaacagtctcattttgagcaacaaactttgtaccatcagcaagtttcaccttatcagactcagccaacattccaagctgtggcaacaatgtccttcacacctcaagttcaacctacaccaaccccacagccttcttatcagttaccttcacagatgatggtgatacaacagaagccacggcaaactacattatatttggagcccaagataacctcaaactatgaagtgattcgcaaccaaccccttatgatagcacctgtttctacggataacacatttgctgtttcccatcttggtagtaagtacaatagtttagacttgagaataggtttggaggaaagaagtagcatggcaagcagtccaatatcaagcatatctgcagattctttctatgcagatattgatcaccatactccacgaaattatgtcctaattgacgacattggagagatcaccaaaggaacagcggcattaagcaccgcatttagccttcatgaaaaggatctgtcaaaaacagaccgtctccttcgaaccactgagacacgccggtctcaagaagtgacagatttcctagcacctttacagtcttcctctagattgcatagttatgtgaaggcggaggaagacccaatggaggatccttacgagttaaagcttctgaaacatcagattaaacaggaatttcgtagagggacagagagcttagatcaccttgctggtctttctcattattaccatgctgatactagctacagacattttccaaaatctgagaagtatagcatcagtagactcacacttgaaaaacaagcagcaaaacaactgccagcagccatactttatcaaaagcagtcaaagcataagaaatcactaattgaccctaaaatgtcaaaattttcacctattcaagaaagtagagaccttgaacctgattattcaagctatatgacttctagcacttcatctattggtggcatttcctccagggcaaggctccttcaagatgacatcacttttggcctcagaaaaaatattacagaccaacaaaaatttatgggatcttctcttggcacaggactgggcacattaggaaataccatacgctcagctctgcaggatgaagcggataagccatacagtagtggcagcaggtccagaccttcctccagaccttcctctgtctatgggcttgatttatcaattaaaagggattcttctagctcttccctaagactgaaagctcaagaggctgaagctctagatgtttcctttagtcatgcatcatcctctgccagaactaagccgaccagtttgccaattagtcaaagtagaggaagaataccaattgtggcccagaattctgaagaagaaagcccactcagtcctgttggccagccaatgggaatggccagggctgcagctggacccctgccaccaatatctgcagacaccagggatcagtttggatcaagccactcattgcctgaagttcagcaacacatgagggaagaatcacggactcgaggctatgaccgtgacatagcattcatcatggatgacttccaacatgccatgtcagacagtgaaggtaaattgggcctcaaactaccctgttactctcaaaactcaaactcttatttttctgcatgtttaatttcccttctccagagatgtatcctacttttcttggtgtgtcttttgcatgtttacttcaattttatttcttgtaaatggaaattttatcatgtgtatagattctgtagcatgcttttctttatttagttttactttattcctttattgttctgtttcttgattgtttgcttgatttgtttggtgtctgcttttctaaaaccattatcaaataattctgtcaataaaatatggtcatcctataaatccatagttgaaaa

SEQ ID NO: 166159 - DNA, 451 bp, Homo sapiens
  Payload ID: 12707
  Gene Symbol: PCLO
  Gene Name: piccolo presynaptic cytomatrix protein
  ENST ID: ENST00000456006
  CDS Start-End: 1-182
gtaatggattaggaattagaattgtgggtggtaaagaaatcccgggacatagtggagaaattggagcctatattgccaagattcttcctgggggaagtgcggaacagacggggaagcttatggaagatggcatggcagtgatcaaggttggagatcaagaaacacagcacacagatgagtgagcttccttgttcttgttccagggggattaccagggatgcaagtattggaatggaatggaattcccttgacttctaaaacatatgaagaagttcagagtatcattagtcagcaaagtggggaagcagaaatatgtgtaagactggacctcaatatgctatcagattctgaaaattcccagcatctggaacttcatgagccaccaaaagctgtggataaggcgaaatccccaggggttgatcctaagcagttggcagcagaactccagaag

SEQ ID NO: 166160 - DNA, 748 bp, Homo sapiens
  Payload ID: 12707
  Gene Symbol: PCLO
  Gene Name: piccolo presynaptic cytomatrix protein
  ENST ID: ENST00000413807
  CDS Start-End: 1-140
gtaatggattaggaattagaattgtgggtggtaaagaaatcccgggacatagtggagaaattggagcctatattgccaagattcttcctgggggaagtgcggaacagacggggaagcttatggaagcctgggattgttgaaataaacctaaggcccatctgaagataaagtttccttggaggatgcaagtattggaatggaatggaattcccttgacttctaaaacatatgaagaagttcagagtatcattagtcagcaaagtggggaagcagaaatatgtgtaagactggacctcaatatgctatcagattctgaaaattcccagcatctggaacttcatgagccaccaaaagctgtggataaggcgaaatccccaggggttgatcctaagcagttggcagcagaactccagaaggtttcactacagcagtcaccgctggttctgtcatcagttgttgaaaaaggatctcatgttcattcaggtcctacatcagcaggatccagttccgttcccagccctgggcaaccagggtccccctcagtgagcaaaaagaagcacggcagcagcaagcctaccgatggaacaaaggttgtctctcatccaattacaggagaaattcagcttcaaattaactatgatcttggaaatctcataatacatattctccaagcaagaaatcttgttcctcgagacaacaatggttattctgacccttttgtgaaagtgtaccttcttccagggagagg

SEQ ID NO: 166161 - DNA, 1614 bp, Homo sapiens
  Payload ID: 12707
  Gene Symbol: PCLO
  Gene Name: piccolo presynaptic cytomatrix protein
  Uniprot ID: Q9Y6V0
  ENST ID: ENST00000618073
  CDS Start-End: 175-1245
gtaatggattaggaattagaattgtgggtggtaaagaaatcccgggacatagtggagaaattggagcctatattgccaagattcttcctgggggaagtgcggaacagacggggaagcttatggaagggatgcaagtattggaatggaatggaattcccttgacttctaaaacatatgaagaagttcagagtatcattagtcagcaaagtggggaagcagaaatatgtggacctcaatatgctatcagattctgaaaattcccagcatctggaacttcatgagccaccaaaagctgtggataaggcgaaatccccaggggttgatcctaagcagttggcagcagaactccagaaggtttcactacagcagtcaccgctggttctgtcatcagttgttgaaaaaggatctcatgttcattcaggtcctacatcagcaggatccagttccgttcccagccctgggcaaccagggtccccctcagtgagcaaaaagaagcacggcagcagcaagcctaccgatggaacaaaggttgtctctcatccaattacaggagaaattcagcttcaaattaactatgatcttggaaatctcataatacatattctccaagcaagaaatcttgttcctcgagacaacaatggttattctgacccttttgtgaaagtgtaccttcttccagggagaggtgctgagtacaagagaaggactaaacatgtccagaaaagtcttaatcctgagtggaatcaaacagtaatttataaaagtatttccatggaacagctcaagaagaaaacactggaggtgacagtttgggattatgatagattttcatccaacgacttccttggggaggtattgattgatttatctagcacatctcacctcgataacactccaaggtggtatcctctcaaagaacagactgaaagcattgatcatggcaagtctcattccagtcagagcagccagcagtccccaaagccatctgttatcaaaagcagaagccatggtatcttccctgacccatcaaaggacatgcaggttcccaccattgagaaatcccatagtagtcctggtagctcaaaatcatcatcagaaggccatctccgttctcatggaccatctcgcagtcaaagcaaaaccagcgtcactcagacccacctggaagatgcaggggctgccatagctgctgccgaagctgccgtgcaacaactccgcattcaaccaagtaaaagacgcaaataaattcctcagcatggcagcttaatgttcatctgttgcctttctttcctgctgtcctttcctgtttgctttcagttttcaacatcctctgctcaccctgttctctgtccctttgtctgtgtaagaacgatataaatacattaatatgctctttcttatttagattttttttatttacatagactgaaataaaactggctgtttctcctttgtttccaccatccatccaacctggctcatagcatttgatacagtgtctgtgatgtttggaagcaaagcaatgttgtgtgtcctttttgtttgcgcttaaatatcttttagaatacagaaattataagcacaagtggctgccagttttccaggacttatacc

SEQ ID NO: 166162 - DNA, 8072 bp, Homo sapiens
  Payload ID: 12708
  Gene Symbol: PIEZO1
  Gene Name: piezo-type mechanosensitive ion channel component 1
  Uniprot ID: Q92508
  ENST ID: ENST00000301015
  CDS Start-End: 248-7813
cgtccggcccagctcggccccagtgagccgagcgctgcgctccgccgaggggcagggcggtcgcctgagcgagcgcgggcccgggacgtcggcaccggcggggcggccgaaggagaaggaggaagaggagaaggcggcgcgcgggtccccgcgggtcagccatggcgcgccggccccggggcccccgcaccgccccatagcgccgcggcgtccgctcggtctgggccgggccctgggccctccagccatggagccgcacgtgctcggcgcggtcctgtactggctgctgctgccctgcgcgctgctggctgcctgcctgctccgcttcagcggactctcgctggtctacctgctcttcctgctgctgctgccctggttccccggccccacccgatgcggcctccaaggtcacacaggccgcctcctgcgggcattgctgggcctcagcctgctcttcctggtggcccatctcgccctccagatctgcctgcatattgtgccccgcctggaccagctcctgggacccagctgcagccgctgggagaccctctcgcgacacataggggtcacaaggctggacctgaaggacatccccaacgccatccggctggtggcccctgacctgggcatcttggtggtctcctctgtctgcctcggcatctgcgggcgccttgcaaggaacacccggcagagcccacatccacgggagctggatgatgatgagagggatgtggatgccagcccgacggcagggctgcaggaagcagcaacgctggcccctacacggaggtcacggctggccgctcgtttccgagtcacggcccactggctgctggtggcggctgggcgggtcctggccgtaacactgcttgcactggcaggcatcgcccacccctcggccctctccagtgtctacctgctgctcttcctggccctctgcacctggtgggcctgccactttcccatcagcactcggggcttcagcagactctgcgtcgcggtggggtgcttcggcgccggccatctcatctgcctctactgctaccagatgcccttggcacaggctctgctcccgcctgccggcatctgggctagggtgctgggtctcaaggacttcgtgggtcccaccaactgctccagcccccacgcgctggtcctcaacaccggcctggactggcctgtgtatgccagccccggcgtcctcctgctgctgtgctacgccacggcctctctgcgcaagctccgcgcgtaccgcccctccggccagaggaaggaggcggcaaaggggtatgaggctcgggagctggagctagcagagctggaccagtggccccaggaacgggagtctgaccagcacgtggtgcccacagcacccgacaccgaggctgataactgcatcgtgcacgagctgaccggccagagctccgtcctgcggcggcctgtgcggcccaagcgggctgagcccagggaggcgtctccgctccacagcctgggccacctcatcatggaccagagctatgtgtgcgcgctcattgccatgatggtatggagcatcacctaccacagctggctgaccttcgtactgctgctctgggcctgcctcatctggacggtgcgcagccgccaccaactggccatgctgtgctcgccctgcatcctgctgtatgggatgacgctgtgctgcctacgctacgtgtgggccatggacctgcgccctgagctgcccaccaccctgggccccgtcagcctgcgccagctggggctggagcacacccgctacccctgtctggaccttggtgccatgttgctctacaccctgaccttctggctcctgctgcgccagtttgtgaaagagaagctgctgaagtgggcagagtctccagctgcgctgacggaggtcaccgtggcagacacagagcccacgcggacgcagacgctgttgcagagcctgggggagctggtgaagggcgtgtacgccaagtactggatctatgtgtgtgctggcatgttcatcgtggtcagcttcgccggccgcctcgtggtctacaagattgtctacatgttcctcttcctgctctgcctcaccctcttccaggtctactacagcctgtggcggaagctgctcaaggccttctggtggctcgtggtggcctacaccatgctggtcctcatcgccgtctacaccttccagttccaggacttccctgcctactggcgcaacctcactggcttcaccgacgagcagctgggggacctgggcctggagcagttcagcgtgtccgagctcttctccagcatcctggtgcccggcttcttcctcctggcctgcatcctgcagctgcactacttccacaggcccttcatgcagctcaccgacatggagcacgtgtccctgcctggcacgcgcctcccgcgctgggctcacaggcaggatgcagtgagtgggaccccactgctgcgggaggagcagcaggagcatcagcagcagcagcaggaggaggaggaggaggaggaggactccagggacgaggggctgggcgtggccactccccaccaggccacgcaggtgcctgaaggggcagccaagtggggcctggtggctgagcggctgctggagctggcagccggcttctcggacgtcctctcacgcgtgcaggtgttcctgcggcggctgctggagcttcacgttttcaagctggtggccctgtacaccgtctgggtggccctgaaggaggtgtcggtgatgaacctgctgctggtggtgctgtgggccttcgccctgccctacccacgcttccggcccatggcctcctgcctgtccaccgtgtggacctgcgtcatcatcgtgtgtaagatgctgtaccagctcaaggttgtcaacccccaggagtattccagcaactgcaccgagcccttccccaacagcaccaacttgctgcccacggagatcagccagtccctgctgtaccgggggcccgtggaccctgccaactggtttggggtgcggaaagggttccccaacctgggctacatccagaaccacctgcaagtgctgctgctgctggtattcgaggccatcgtgtaccggcgccaggagcactaccgccggcagcaccagctggccccgctgcctgcccaggccgtgtttgccagcggcacccgccagcagctggaccaggatctgctcggctgcctcaagtacttcatcaacttcttcttctacaaattcgggctggagatctgcttcctgatggccgtgaacgtgatcgggcagcgcatgaactttctggtgaccctgcacggttgctggctggtggccatcctcacccgcaggcaccgccaggccattgcccgcctctggcccaactactgcctcttcctggcgctgttcctgctgtaccagtacctgctgtgcctggggatgcccccggccctgtgcattgattatccctggcgctggagccgggccgtccccatgaactccgcactcatcaagtggctgtacctgcctgatttcttccgggcccccaactccaccaacctcatcagcgactttctcctgctgctgtgcgcctcccagcagtggcaggtgttctcagctgagcgcacagaggagtggcagcgcatggctggcgtcaacaccgaccgcctggagccgctgcggggggagcccaaccccgtgcccaactttatccactgcaggtcctaccttgacatgctgaaggtggccgtcttccgatacctgttctggctggtgctggtggtggtgtttgtcacgggggccacccgcatcagcatcttcgggctgggctacctgctggcctgcttctacctgctgctcttcggcacggccctgctgcagagggacacacgggcccgcctcgtgctgtgggactgcctcattctgtacaacgtcaccgtcatcatctccaagaacatgctgtcgctcctggcctgcgtcttcgtggagcagatgcagaccggcttctgctgggtcatccagctcttcagccttgtatgcaccgtcaagggctactatgaccccaaggagatgatggacagagaccaggactgcctgctgcctgtggaggaggctggcatcatctgggacagcgtctgcttcttcttcctgctgctgcagcgccgcgtcttccttagccattactacctgcacgtcagggccgacctccaggccaccgccctgctagcctccaggggcttcgccctctacaacgctgccaacctcaagagcattgactttcaccgcaggatagaggagaagtccctggcccagctgaaaagacagatggagcgtatccgtgccaagcaggagaagcacaggcagggccgggtggaccgcagtcgcccccaggacaccctgggccccaaggaccccggcctggagccagggcccgacagtccagggggctcctccccgccacggaggcagtggtggcggccctggctggaccacgccacagtcatccactccggggactacttcctgtttgagtccgacagtgaggaagaggaggaggctgttcctgaagacccgaggccgtcggcacagagtgccttccagctggcgtaccaggcatgggtgaccaacgcccaggcggtgctgaggcggcggcagcaggagcaggagcaggcaaggcaggaacaggcaggacagctacccacaggaggtggtcccagccaggaggtggagccagcagagggccccgaggaggcagcggcaggccggagccatgtggtgcagagggtgctgagcacggcgcagttcctgtggatgctggggcaggcgctagtggatgagctgacacgctggctgcaggagttcacccggcaccacggcaccatgagcgacgtgctgcgggcagagcgctacctcctcacacaggagctcctgcagggcggcgaagtgcacaggggcgtgctggatcagctgtacacaagccaggccgaggccacgctgccaggccccaccgaggcccccaatgccccaagcaccgtgtccagtgggctgggcgcggaggagccactcagcagcatgacagacgacatgggcagccccctgagcaccggctaccacacgcgcagtggcagtgaggaggcagtcaccgaccccggggagcgtgaggctggtgcctctctgtaccagggactgatgcggacggccagcgagctgctcctggacaggcgcctgcgcatcccagagctggaggaggcagagctgtttgcggaggggcagggccgggcgctgcggctgctgcgggccgtgtaccagtgtgtggccgcccactcggagctgctctgctacttcatcatcatcctcaaccacatggtcacggcctccgccggctcgctggtgctgcccgtgctcgtcttcctgtgggccatgctgtcgatcccgaggcccagcaagcgcttctggatgacggccatcgtcttcaccgagatcgcggtggtcgtcaagtacctgttccagtttgggttcttcccctggaacagccacgtggtgctgcggcgctacgagaacaagccctacttcccgccccgcatcctgggcctggagaagactgacggctacatcaagtacgacctggtgcagctcatggcccttttcttccaccgctcccagctgctgtgctatggcctctgggaccatgaggaggactcaccatccaaggagcatgacaagagcggcgaggaggagcagggagccgaggaggggccaggggtgcctgcggccaccaccgaagaccacattcaggtggaagccagggtcggacccacggacgggaccccagaaccccaagtggagctcaggccccgtgatacgaggcgcatcagtctacgttttagaagaaggaagaaggagggcccagcacggaaaggagcggcagccatcgaagctgaggacagggaggaagaagagggggaggaagagaaagaggcccccacggggagagagaagaggccaagccgctctggaggaagagtaagggcggccgggcggcggctgcagggcttctgcctgtccctggcccagggcacatatcggccgctacggcgcttcttccacgacatcctgcacaccaagtaccgcgcagccaccgacgtctatgccctcatgttcctggctgatgttgtcgacttcatcatcatcatttttggcttctgggcctttgggaagcactcggcggccacagacatcacgtcctccctatcagacgaccaggtacccgaggctttcctggtcatgctgctgatccagttcagtaccatggtggttgaccgcgccctctacctgcgcaagaccgtgctgggcaagctggccttccaggtggcgctggtgctggccatccacctatggatgttcttcatcctgcccgccgtcactgagaggatgttcaaccagaatgtggtggcccagctctggtacttcgtgaagtgcatctacttcgccctgtccgcctaccagatccgctgcggctaccccacccgcatcctcggcaacttcctcaccaagaagtacaatcatctcaacctcttcctcttccaggggttccggctggtgccgttcctggtggagctgcgggcagtgatggactgggtgtggacggacaccacgctgtccctgtccagctggatgtgtgtggaggacatctatgccaacatcttcatcatcaaatgcagccgagagacagagaagaaatacccgcagcccaaagggcagaagaagaagaagatcgtcaagtacggcatgggtggcctcatcatcctcttcctcatcgccatcatctggttcccactgctcttcatgtcgctggtgcgctccgtggttggggttgtcaaccagcccatcgatgtcaccgtcaccctgaagctgggcggctatgagccgctgttcaccatgagcgcccagcagccgtccatcatccccttcacggcccaggcctatgaggagctgtcccggcagtttgacccccagccgctggccatgcagttcatcagccagtacagccctgaggacatcgtcacggcgcagattgagggcagctccggggcgctgtggcgcatcagtccccccagccgtgcccagatgaagcgggagctctacaacggcacggccgacatcaccctgcgcttcacctggaacttccagagggacctggcgaagggaggcactgtggagtatgccaacgagaagcacatgctggccctggcccccaacagcactgcacggcggcagctggccagcctgctcgagggcacctcggaccagtctgtggtcatccctaatctcttccccaagtacatccgtgcccccaacgggcccgaagccaaccctgtgaagcagctgcagcccaatgaggaggccgactacctcggcgtgcgtatccagctgcggagggagcagggtgcgggggccaccggcttcctcgaatggtgggtcatcgagctgcaggagtgccggaccgactgcaacctgctgcccatggtcattttcagtgacaaggtcagcccaccgagcctcggcttcctggctggctacggcatcatggggctgtacgtgtccatcgtgctggtcatcggcaagttcgtgcgcggattcttcagcgagatctcgcactccattatgttcgaggagctgccgtgcgtggaccgcatcctcaagctctgccaggacatcttcctggtgcgggagactcgggagctggagctggaggaggagttgtacgccaagctcatcttcctctaccgctcaccggagaccatgatcaagtggactcgtgagaaggagtaggagctgctgctggcgcccgagagggaaggagccggcctgctgggcagcgtggccacaaggggcggcactcctcaggccgggggagccactgccccgtccaaggccgccagctgtgatgcatcctcccggcctgcctgagccctgatgctgctgtcagagaaggacactgcgtccccacggcctgcgtggcgctgccgtcccccacgtgtactgtagagttttttttttaattaaaaaatgttttatttatacaaatgga

SEQ ID NO: 166163 - DNA, 1246 bp, Homo sapiens
  Payload ID: 12708
  Gene Symbol: PIEZO1
  Gene Name: piezo-type mechanosensitive ion channel component 1
  ENST ID: ENST00000327397
  CDS Start-End: 1-1122
atgaagatttgcccgttttcttctaaaagttctatagttttagctctgaagtttcgctctttgatccactttgagaaatacccgcagcccaaagggcagaagaagaagaagatcgtcaagtacggcatgggtggcctcatcatcctcttcctcatcgccatcatctggttcccactgctcttcatgtcgctggtgcgctccgtggttggggttgtcaaccagcccatcgatgtcaccgtcaccctgaagctgggcggctatgagccgctgttcaccatgagcgcccagcagccgtccatcatccccttcacggcccaggcctatgaggagctgtcccggcagtttgacccccagccgctggccatgcagttcatcagccagtacagccctgaggacatcgtcacggcgcagattgagggcagctccggggcgctgtggcgcatcagtccccccagccgtgcccagatgaagcgggagctctacaacggcacggccgacatcaccctgcgcttcacctggaacttccagagggacctggcgaagggaggcactgtggagtatgccaacgagaagcacatgctggccctggcccccaacagcactgcacggcggcagctggccagcctgctcgagggcacctcggaccagtctgtggtcatccctaatctcttccccaagtacatccgtgcccccaacgggcccgaagccaaccctgtgaagcagctgcagcccaatgaggaggccgactacctcggcgtgcgtatccagctgcggagggagcagggtgcgggggccaccggcttcctcgaatggtgggtcatcgagctgcaggagtgccggaccgactgcaacctgctgcccatggtcattttcagtgacaagcatcatggggctgtacgtgtccatcgtgctggtcatcggcaagttcgtgcgcggattcttcagcgagatctcgcactccattatgttcgaggagctgccgtgcgtggaccgcatcctcaagctctgccaggacatcttcctggtgcgggagactcgggagctggagctggaggaggagttgtacgccaagctcatcttcctctaccgctcaccggagaccatgatcaagtggactcgtgagaaggagtaggagctgctgctggcgcccgagagggaaggagccggcctgctgggcagcgtggccacaaggggcggcactcctcaggccgggggagccactgccccgtccaaggccgccagctgt

SEQ ID NO: 166164 - DNA, 1635 bp, Homo sapiens
  Payload ID: 12708
  Gene Symbol: PIEZO1
  Gene Name: piezo-type mechanosensitive ion channel component 1
  ENST ID: ENST00000419505
  CDS Start-End: 1-267
taccagatccgctgcggctaccccacccgcatcctcggcaacttcctcaccaagaagtacaatcatctcaacctcttcctcttccaggggttccggctggtgccgttcctggtggagctgcgggcagtgatggactgggtgtggacggacaccacgctgtccctgtccagctggatgtgtgtggaggacatctatgccaacatcttcatcatcaaatgcagccgagagacagagaaggttcatgaagatttgcccgttttcttctaaaagttctatagttttagctctgaagtttcgctctttgatccactttgagaaatacccgcagcccaaagggcagaagaagaagaagatcgtcaagtacggcatgggtggcctcatcatcctcttcctcatcgccatcatctggttcccactgctcttcatgtcgctggtgcgctccgtggttggggttgtcaaccagcccatcgatgtcaccgtcaccctgaagctgggcggctatgagccgctgttcaccatgagcgcccagcagccgtccatcatccccttcacggcccaggcctatgaggagctgtcccggcagtttgacccccagccgctggccatgcagttcatcagccagtacagccctgaggacatcgtcacggcgcagattgagggcagctccggggcgctgtggcgcatcagtccccccagccgtgcccagatgaagcgggagctctacaacggcacggccgacatcaccctgcgcttcacctggaacttccagagggacctggcgaagggaggcactgtggagtatgccaacgagaagcacatgctggccctggcccccaacagcactgcacggcggcagctggccagcctgctcgagggcacctcggaccagtctgtggtcatccctaatctcttccccaagtacatccgtgcccccaacgggcccgaagccaaccctgtgaagcagctgcagcccaatgaggaggccgactacctcggcgtgcgtatccagctgcggagggagcagggtgcgggggccaccggcttcctcgaatggtgggtcatcgagctgcaggagtgccggaccgactgcaacctgctgcccatggtcattttcagtgacaagcatcatggggctgtacgtgtccatcgtgctggtcatcggcaagttcgtgcgcggattcttcagcgagatctcgcactccattatgttcgaggagctgccgtgcgtggaccgcatcctcaagctctgccaggacatcttcctggtgcgggagactcgggagctggagctggaggaggagttgtacgccaagctcatcttcctctaccgctcaccggagaccatgatcaagtggactcgtgagaaggagtaggagctgctgctggcgcccgagagggaaggagccggcctgctgggcagcgtggccacaaggggcggcactcctcaggccgggggagccactgccccgtccaaggccgccagctgtgatgcatcctcccggcctgcctgagccctgatgctgctgtcagagaaggacactgcgtccccacggcctgcgtggcgctgccgtcccccacgtgtactgtagagttttttttttaattaaaaaatgttttatttatacaaatggacaa

SEQ ID NO: 166165 - DNA, 544 bp, Homo sapiens
  Payload ID: 12708
  Gene Symbol: PIEZO1
  Gene Name: piezo-type mechanosensitive ion channel component 1
  ENST ID: ENST00000474606
  CDS Start-End: 1-544
ttagccattactacctgcacgtcagggccgacctccaggccaccgccctgctagcctccaggggcttcgccctctacaacgctgccaacctcaagagcattgactttcaccgcaggatagaggagaagtccctggcccagctgaaaagacagatggagcgtatccgtgccaagcaggagaagcacaggcagggccgggtggaccgcagtcgcccccaggacaccctgggccccaaggaccccggcctggagccagtcatccactccggggactacttcctgtttgagtccgacagtgaggaagaggaggaggctgttcctgaagacccgaggccgtcggcacagagtgccttccagctggcgtaccaggcatgggtgaccaacgcccaggcggtgctgaggcggcggcagcaggagcaggagcaggcaaggcaggaacaggcaggacagctacccacaggaggtggtcccagccaggaggtggagccagcagagggccccgaggaggcagcggcaggccggagccatgtggtgcagagggtgct

SEQ ID NO: 166166 - DNA, 584 bp, Homo sapiens
  Payload ID: 12708
  Gene Symbol: PIEZO1
  Gene Name: piezo-type mechanosensitive ion channel component 1
  ENST ID: ENST00000466823
  CDS Start-End: 1-554
cgtcctccctatcagacgaccaggtacccgaggctttcctggtcatgctgctgatccagttcagtaccatggtggttgaccgcgccctctacctgcgcaagaccgtgctgggcaagctggccttccaggtggcgctggtgctggccatccacctatggatgttcttcatcctgcccgccgtcactgagaggatgttcaaccagaatgtggtggcccagctctggtacttcgtgaagtgcatctacttcgccctgtccgcctaccagatccgctgcggctaccccacccgcatcctcggcaacttcctcaccaagaagtacaatcatctcaacctcttcctcttccaggggttccggctggtgccgttcctggtggagctgcgggcagtgatggactgggtgtggacggacaccacgctgtccctgtccagctggatgtgtgtggaggacatctatgccaacatcttcatcatcaaatgcagccgagagacagagaagatacattggctagaaatgactgaattggaagaattctctgtattctctggttgctagaaccttatcaattaaaatttgcagaaaatt

SEQ ID NO: 166167 - DNA, 660 bp, Homo sapiens
  Payload ID: 12708
  Gene Symbol: PIEZO1
  Gene Name: piezo-type mechanosensitive ion channel component 1
  ENST ID: ENST00000518793
  CDS Start-End: 1-106
ggtcatccctaatctcttccccaagtacatccgtgcccccaacgggcccgaagccaaccctgtgaagcagctgcagcccaatgaggaggccgactacctcggctgacaaggtcagcccaccgagcctcggcttcctggctggctacggcatcatggggctgtacgtgtccatcgtgctggtcatcggcaagttcgtgcgcggattcttcagcgagatctcgcactccattatgttcgaggagctgccgtgcgtggaccgcatcctcaagctctgccaggacatcttcctggtgcgggagactcgggagctggagctggaggaggagttgtacgccaagctcatcttcctctaccgctcaccggagaccatgatcaagtggactcgtgagaaggagtaggagctgctgctggcgcccgagagggaaggagccggcctgctgggcagcgtggccacaaggggcggcactcctcaggccgggggagccactgccccgtccaaggccgccagctgtgatgcatcctcccggcctgcctgagccctgatgctgctgtcagagaaggacactgcgtccccacggcctgcgtggcgctgccgtcccccacgtgtactgtagagttttttttttaattaaaaaatgttttatttatacaaatggacaa

SEQ ID NO: 166168 - DNA, 9356 bp, Homo sapiens
  Payload ID: 12709
  Gene Symbol: PIEZO2
  Gene Name: piezo-type mechanosensitive ion channel component 2
  Uniprot ID: Q9H5I5
  ENST ID: ENST00000302079
  CDS Start-End: 1-8070
atggcctcagaagtggtgtgcgggctcatcttcaggctgctgctgcccatctgcctggcagtagcatgtgcattccgatacaatgggctctcctttgtctaccttatctacctcttgctcattcctctgttctcagaaccaacaaaaacgacgatgcaaggacatacgggacggttattaaagtctctgtgcttcatcagtctttccttcctgttgctgcacatcattttccacatcacgttggtgagccttgaagctcaacatcgtattgcacctggctacaactgctcaacatgggaaaagacattccggcagatcggctttgaaagcttaaagggagctgatgctggcaatgggatcagagtgtttgtacctgacatcgggatgttcattgctagtctgaccatctggctcctctgtagaaacattgttcagaaacctgtgacagacgaagcagcacagagtaacccggagtttgaaaatgaagaattggctgaaggagaaaaaattgattcagaagaggcactgatctatgaagaggatttcaatggaggagatggtgttgaaggcgagttggaagaaagcacgaagttaaaaatgttccgcaggcttgcctctgtggcctctaagctcaaggagttcattggcaacatgatcaccactgctgggaaagtcgttgttaccatcttactgggctcctcgggcatgatgttgccgtctttgacatcatctgtgtatttttttgtatttttgggtctgtgcacctggtggtcctggtgccggacgttcgacccattgctgttcagctgtctctgtgttctgctggctattttcactgctggacatttgattggactttatttataccagttccaattctttcaagaggcagttccacccaatgactactatgcaaggttgtttggtatcaagtcagtaattcaaacggactgttcaagtacttggaagatcatagtgaacccggacctgtcgtggtaccaccacgccaaccctatcctcctgctggtgatgtactacactctggccactctgatccgcatctggctgcaagagccccttgtgcaggatgaggggaccaaagaagaggacaaagccctggcttgtagccccatccaaataacagcggggaggaggcggagcctgtggtacgcaacccattaccccactgatgagagaaaacttttatccatgacccaggatgactacaaaccatctgatggcctgctggtgactgtgaacggcaaccccgtggattaccacaccatccacccaagcctgcccatggagaacggccctggcaaagccgacctctactccacccctcagtaccggtgggagccctctgatgaatcctcagaaaagcgagaggaggaagaggaagagaaagaagaatttgaagaagaaaggagccgtgaggaaaaaagaagtatcaaagttcatgccatggtctccgtattccaatttattatgaaacaaagttacatctgtgccctcatagctatgatggcctggagcatcacctatcacagctggctgaccttcgtgctgctgatctggtcgtgcactctttggatgattcgcaacagaagaaaatatgccatgatcagctctcccttcatggtggtttatggaaacctattgttgatattacagtatatatggagttttgaacttcctgaaattaaaaaagttccaggatttttagaaaagaaagagccaggagaacttgcttccaaaatccttttcaccattactttttggctactgctgaggcagcacctcacagagcaaaaagctctgcaagaaaaggaagctcttttatcggaagtcaaaattggcagtcaggaaaatgaagaaaaagatgaggaacttcaagatatacaagtggaaggagagcccaaagaggaggaagaagaggaagcgaaggaagagaagcaagagagaaagaaggtagagcaagaggaagctgaagaagaagatgagcaggacatcatgaaagtcctgggcaatctggtggtggccatgttcatcaagtactggatctacgtctgcggaggcatgttcttcttcgtcagcttcgagggtaaaatcgtaatgtacaaaatcatctacatggtgctgttcctgttctgtgtggccctataccaggtgcactatgaatggtggaggaaaattctaaaatatttttggatgtcagtggttatttacactatgctggtgcttatctttatatacacatatcagtttgagaacttcccaggcctgtggcaaaatatgactggactgaaaaaagaaaagcttgaggatcttggcttaaagcagtttactgtggctgaactattcactcgcatattcatcccaacctcctttctgctggtgtgcattttacacctgcactacttccatgaccggttccttgaactcacagacctcaagtccattcccagcaaagaagacaacaccatctacagactggcccacccggaaggaagcctcccggacctcaccatgatgcatctgactgccagcctggagaagccggaggtgaggaagttggctgagcctggggaggagaagcttgagggctactctgaaaaagcccagaagggtgatcttgggaaagacagcgaggagtcagaggaggacggagaggaagaggaggaatccgaggaggaggaagaaacatcagacttaaggaacaaatggcacctggtgattgaccgcctcactgtgctcttcttaaaattcctggagtattttcacaagctgcaggtgttcatgtggtggattttggagttgcacatcatcaaaatcgtttcctcttacattatctgggtttctgtgaaagaggtgtctctgttcaactatgtatttttgatttcttgggcttttgctctgccgtacgccaagctgcgccgtctggcttcaagtgtctgcacagtctggacgtgtgtgatcatcgtctgcaaaatgttgtaccagctccaaaccattaagcctgagaacttctctgttaactgttccttgccaaatgaaaatcaaacaaacatcccctttaatgagttgaacaagtctctgctctacagcgctcctatcgatcctacagagtgggtcggcctgcggaagtcttcgcctctgctagtctacctgaggaataacctcctgatgctggctatcctggcctttgaagtcaccatttaccgccatcaggaatactatcgaggtcgaaataacctgacggcccctgtgtctagaactatctttcatgacattacaagactacatctagatgatggacttattaattgtgccaaatatttcattaattacttcttttacaagtttggtctggagacctgtttcctaatgtcagttaacgtcattggccagcgaatggatttctatgccatgatccacgcctgctggctgatcgctgtcttatatagacgcagaaggaaagccatcgcagagatctggcccaagtactgctgcttcctggcatgcatcatcaccttccagtatttcatctgcattggcatcccacctgctccttgccgagattacccgtggagattcaagggtgccagcttcaatgacaacatcataaagtggctgtacttcccagatttcattgtgcggcccaaccctgtgtttctcgtctatgacttcatgctgcttctgtgtgcctccttacaacggcagatttttgaggatgagaacaaggctgcagtgcgaatcatggcaggtgacaatgtcgagatctgcatgaaccttgatgcggcctccttcagccaacataaccctgtgccagattttattcactgcagatcttacttagacatgtccaaagtgatcatcttcagctacctcttctggtttgtgctcaccatcatcttcatcactgggaccaccaggatcagcatcttttgcatggggtacctggtggcctgtttctacttcctgctctttgggggcgatttgctgttgaaacccatcaagagcatcctgcgctactgggactggctgatcgcatacaacgtttttgtgattacgatgaaaaatatcctgtcaataggagcatgtggatacattggaacattggtgcacaatagttgttggttgatccaggctttcagcctggcctgcacagtcaaaggctatcaaatgcctgctgctaattcaccctgtacacttcccagtggggaagcaggaatcatttgggacagcatatgttttgccttcctcctgctgcaaagaagagttttcatgagttattattttctacatgttgtggctgatataaaagcttcccagattctggcatcaagaggagctgaacttttccaggccacaattgtaaaagctgtaaaggcaagaattgaggaagagaagaagtccatggaccagctgaagcgacagatggatcgcatcaaggccaggcaacagaaatataaaaagggtaaggagaggatgctgagcttgacccaggagccaggggaaggccaggacatgcaaaaactctctgaagaggatgatgaaagagaagcagacaaacagaaagccaagggcaaaaaaaagcagtggtggcggccttgggttgatcatgcttccatggtcaggagtggagattattatttgtttgaaacggatagtgaagaggaggaagaggaagaattaaagaaggaagatgaagaacctccacgaaggtcagcattccagtttgtttatcaagcctggattactgatcctaaaacagcactccgacaaagacacaaagagaaaaaaaggtctgcaagagaagaacggaaacgaaggcggaaaggatccaaggagggtcctgtggaatgggaagaccgggaggatgaaccaatcaaaaagaaatccgatggaccagataatatcatcaagaggatatttaatattttgaaatttacctgggtcctatttctggcaacagtggacagtttcactacttggcttaactccatttcaagggagcatattgatatatctacagttctgagaattgaacgatgcatgctgaccagagaaattaagaagggcaatgttccaactcgggagagcatccacatgtactatcagaaccacatcatgaacctttccagagagtcgggactggacaccattgacgagcatcccggagctgcttcaggtgcacagacagcccacaggatggatagtttagattcacatgacagtatctccagcgagcccacgcagtgtaccatgctgtactcacgccaggggaccactgagaccatcgaggaggtggaggctgagcaggaggaggaggcagggagcacggcgcctgagcccagggaggccaaggagtacgaggccactgggtacgatgtgggagccatgggtgccgaggaggccagcctcaccccagaggaagagctgacacagttctccaccttggacggggatgtggaggccccaccctcctacagcaaggctgtgagcttcgagcatctgtccttcggctcgcaggacgactctgcaggcaagaaccgtatggcagtcagcccggacgacagccgcaccgacaagctggggtccagcatcttacctcccctgacccatgagctgacggccagcgagctgctgctgaaaaagatgtttcacgacgatgagcttgaagagtcagagaaattctacgtggggcagccccgatttctgctgctcttctatgccatgtacaataccctggtggcccgctcggagatggtgtgctacttcgtgatcatcctcaaccacatggtctctgcctccatgatcacgctcctgcttcccatcctcatcttcctctgggccatgttgtccgtccccaggcccagccgccggttctggatgatggccatcgtctatactgaggtggcaattgtagtcaagtatttcttccaatttgggttctttccctggaataagaatgtggaggtgaacaaagataaaccgtatcaccccccaaacatcataggagtggaaaagaaggaaggttatgttctctatgacctcatccagctcctggctctgttctttcatcgatcaattttgaagtgccatggcttatgggatgaagatgacatgactgaaagtggcatggccagggaggaatcagatgatgagctctccctcggtcatggcaggagggactcctccgattctctcaagtccatcaacctggccgcgtctgtggagtcagtgcatgtgaccttcccggagcagcagacagctgtccggaggaagcgctccggcagcagctccgagccatcccagagatccagcttttcttcaaacagatcccaaagaggcagcacaagcacccgaaacagcagtcaaaaaggaagcagtgttttgagtattaagcaaaaaggcaaaagggaactttatatggaaaagcttcaagaacatttaatcaaagcaaaagcctttaccataaagaagacgctggagatctatgtgcccatcaaacagttcttttacaacctcatccacccggagtatagcgccgtgactgacgtgtatgtactcatgttcctggctgacactgtggacttcatcatcattgtcttcggcttttgggcctttgggaaacactcagcagctgcagacatcacctcttcactgtcagaggaccaggtcccggggccgtttttggtgatggtcctcattcagtttggaaccatggtggtggaccgagccctctacctcaggaagactgtactgggaaaggtcatcttccaggtcattcttgtgttcggaattcacttctggatgttcttcatcttacctggtgtgactgagaggaaattcagccagaacctggttgcccagctttggtactttgtgaaatgtgtttacttcgggttgtctgcttaccagatccgttgtggctacccaacgcgagtcctggggaacttcctcaccaagagctacaattacgtcaacctcttcttattccaagggtttcgcctcgtgccctttttgactgagctgagggcagtgatggactgggtgtggacggacacaactttgagcctgtccagctggatctgtgtggaggacatctatgctcacatattcatcctgaagtgttggcgggagtcggagaagcctattttcacaatgagtgcccaacaaagccagttgaaagttatggaccagcagagctttaacaaatttatacaagctttttctagggacaccggtgctatgcaatttctggaaaattatgaaaaagaagacataacagtagcagaactggaaggaaactcaaattctttgtggaccatcagcccacccagtaagcagaaaatgatacacgaactcctggaccccaatagtagcttctctgttgttttttcatggagtattcagagaaacttaagtctgggtgcaaaatcggaaatagcaacagataagctttcttttcctcttaaaaatattactcgaaagaatatcgctaaaatgatagcaggcaacagcacagaaagttcaaaaacaccagtgaccatagaaaagatttatccatattatgtgaaagcacctagtgattctaactcaaaacctataaagcaacttttatctgaaaataatttcatggatattaccatcattttgtccagagacaatacaactaaatataacagtgagtggtgggttctcaacctgactggaaacagaatatacaatccgaactctcaggccctggaactggtggtcttcaatgacaaagtcagtcccccaagtctggggttcctggctggctatggtattatgggattatatgcttcagttgtccttgtgattgggaaatttgtccgtgaattcttcagtgggatttctcactccatcatgtttgaagagcttccaaatgtggatcgaattttgaagttgtgcacagatatttttttagttcgagagacaggagaactggagctagaagaagatctctatgccaaattaatattcctatatcgctcaccagagacaatgatcaaatggactagagaaaaaacaaattgaaaccttagaacacagactgcaaataatgttaacatttgaattttttttaaaagcacaatattctcataagagctaagcatttctagttcgacggaaatggtttgtttctcttctgataggtagacaaaaggagctgatatccttctgcagtaaaagctaccttgcaagttaaggcactgttgaaaatgttatttgtaactccatttctctgaaatcagggctacttgctttatgttttagtcaacagtgtctcgcattctgattgatcatgtgaaggaatcatttatgggccccgtccctaagagaaacagaagaggagtcagaaagaaagatgcctgtgttttcctctgtggggcccgtgcacttcctggagagatgctacaatgcaatatacagcgctccatccccactggggaagctgctgtgatgagactagatgagccttcaacacactcagaaaatgcaacagcaatagggggcagacagctcctacctgtgtttctaggagcaaaagagagggaactaattgcccgtgaagacgccagtggaaggatcagcctcattctaagcaaaaacatagtattagtgatactcttactgccttatcttaaccaaggactaataggatacctttccattaaacaccagtgacttctcaggaaaaaaaaaaaaaaggagcaaaacaaatgatgtgtacacctgctttgttatggtccaccagtgaccagcttcaatgaggggaaccattctggagggctgcggtctcctgtgcaaacagacatgaggcagaagagtaaaaagaccaacccagtgggacctagaatactttgtaactctttaataactgaggtcaggaccgctcttctgccttccccttcccttaacgtgctttttcccatttccatgatttaaggcaatggtttttccagtatgtgacattttccttcctgtttttcaggtatatcaaagagtttacatattccaattcacatttttacatctgagacgggttttttaagttcataattatgaaagaaatatgtatattgagcttggggaaataaaaatggccttttcttaaattattattattggtaatacaacctcttcattaaataacaatgtagcatgaaaaatttatgattgaaatgtagttttcattccatattaagatacagtttctgagaagaatcattgaatggactagaatatgtcaaaaattgatcctgtgtagtttgggttcagggctgacttaaaataaagcacatcctgcaaagtcattttaa

SEQ ID NO: 166169 - DNA, 9718 bp, Homo sapiens
  Payload ID: 12709
  Gene Symbol: PIEZO2
  Gene Name: piezo-type mechanosensitive ion channel component 2
  ENST ID: ENST00000383408
  CDS Start-End: 328-8439
gccccgggagcgtgccctcggggcggagagcgtcgcggcccgcgccgaggcgatgctcgggtggctgcgagctgccggcggcgagaggccatagacgggcatgggccttgcgtcccaccacccctagggaccctcgagcctcgcccctctgctccgactcgccggaccgacgcgatggcctcagaagtggtgtgcgggctcatcttcaggctgctgctgcccatctgcctggcagtagcatgtgcattccgatacaatgggctctcctttgtctaccttatctacctcttgctcattcctctgttctcagaaccaacaaaaacgacgatgcaaggacatacgggacggttattaaagtctctgtgcttcatcagtctttccttcctgttgctgcacatcattttccacatcacgttggtgagccttgaagctcaacatcgtattgcacctggctacaactgctcaacatgggaaaagacattccggcagatcggctttgaaagcttaaagggagctgatgctggcaatgggatcagagtgtttgtacctgacatcgggatgttcattgctagtctgaccatctggctcctctgtagaaacattgttcagaaacctgtgacagacgaagcagcacagagtaacccggagtttgaaaatgaagaattggctgaaggagaaaaaattgattcagaagaggcactgatctatgaagaggatttcaatggaggagatggtgttgaaggcgagttggaagaaagcacgaagttaaaaatgttccgcaggcttgcctctgtggcctctaagctcaaggagttcattggcaacatgatcaccactgctgggaaagtcgttgttaccatcttactgggctcctcgggcatgatgttgccgtctttgacatcatctgtgtatttttttgtatttttgggtctgtgcacctggtggtcctggtgccggacgttcgacccattgctgttcagctgtctctgtgttctgctggctattttcactgctggacatttgattggactttatttataccagttccaattctttcaagaggcagttccacccaatgactactatgcaaggttgtttggtatcaagtcagtaattcaaacggactgttcaagtacttggaagatcatagtgaacccggacctgtcgtggtaccaccacgccaaccctatcctcctgctggtgatgtactacactctggccactctgatccgcatctggctgcaagagccccttgtgcaggatgaggggaccaaagaagaggacaaagccctggcttgtagccccatccaaataacagcggggaggaggcggagcctgtggtacgcaacccattaccccactgatgagagaaaacttttatccatgacccaggatgactacaaaccatctgatggcctgctggtgactgtgaacggcaaccccgtggattaccacaccatccacccaagcctgcccatggagaacggccctggcaaagccgacctctactccacccctcagtaccggtgggagccctctgatgaatcctcagaaaagcgagaggaggaagaggaagagaaagaagaatttgaagaagaaaggagccgtgaggaaaaaagaagtatcaaagttcatgccatggtctccgtattccaatttattatgaaacaaagttacatctgtgccctcatagctatgatggcctggagcatcacctatcacagctggctgaccttcgtgctgctgatctggtcgtgcactctttggatgattcgcaacagaagaaaatatgccatgatcagctctcccttcatggtggtttatggaaacctattgttgatattacagtatatatggagttttgaacttcctgaaattaaaaaagttccaggatttttagaaaagaaagagccaggagaacttgcttccaaaatccttttcaccattactttttggctactgctgaggcagcacctcacagagcaaaaagctctgcaagaaaaggaagctcttttatcggaagtcaaaattggcagtcaggaaaatgaagaaaaagatgaggaacttcaagatatacaagtggaaggagagcccaaagaggaggaagaagaggaagcgaaggaagagaagcaagagagaaagaaggtagagcaagaggaagctgaagaagaagatgagcaggacatcatgaaagtcctgggcaatctggtggtggccatgttcatcaagtactggatctacgtctgcggaggcatgttcttcttcgtcagcttcgagggtaaaatcgtaatgtacaaaatcatctacatggtgctgttcctgttctgtgtggccctataccaggtgcactatgaatggtggaggaaaattctaaaatatttttggatgtcagtggttatttacactatgctggtgcttatctttatatacacatatcagtttgagaacttcccaggcctgtggcaaaatatgactggactgaaaaaagaaaagcttgaggatcttggcttaaagcagtttactgtggctgaactattcactcgcatattcatcccaacctcctttctgctggtgtgcattttacacctgcactacttccatgaccggttccttgaactcacagacctcaagtccattcccagcaaagaagacaacaccatctacagactggcccacccggaaggaagcctcccggacctcaccatgatgcatctgactgccagcctggagaagccggaggtgaggaagttggctgagcctggggaggagaagcttgagggctactctgaaaaagcccagaagggtgatcttgggaaagacagcgaggagtcagaggaggacggagaggaagaggaggaatccgaggaggaggaagaaacatcagacttaaggaacaaatggcacctggtgattgaccgcctcactgtgctcttcttaaaattcctggagtattttcacaagctgcaggtgttcatgtggtggattttggagttgcacatcatcaaaatcgtttcctcttacattatctgggtttctgtgaaagaggcaagggtgtctctgttcaactatgtatttttgatttcttgggcttttgctctgccgtacgccaagctgcgccgtctggcttcaagtgtctgcacagtctggacgtgtgtgatcatcgtctgcaaaatgttgtaccagctccaaaccattaagcctgagaacttctctgttaactgttccttgccaaatgaaaatcaaacaaacatcccctttaatgagttgaacaagtctctgctctacagcgctcctatcgatcctacagagtgggtcggcctgcggaagtcttcgcctctgctagtctacctgaggaataacctcctgatgctggctatcctggcctttgaagtcaccatttaccgccatcaggaatactatcgaggtcgaaataacctgacggcccctgtgtctagaactatctttcatgacattacaagactacatctagatgatggacttattaattgtgccaaatatttcattaattacttcttttacaagtttggtctggagacctgtttcctaatgtcagttaacgtcattggccagcgaatggatttctatgccatgatccacgcctgctggctgatcgctgtcttatatagacgcagaaggaaagccatcgcagagatctggcccaagtactgctgcttcctggcatgcatcatcaccttccagtatttcatctgcattggcatcccacctgctccttgccgagattacccgtggagattcaagggtgccagcttcaatgacaacatcataaagtggctgtacttcccagatttcattgtgcggcccaaccctgtgtttctcgtctatgacttcatgctgcttctgtgtgcctccttacaacggcagatttttgaggatgagaacaaggctgcagtgcgaatcatggcaggtgacaatgtcgagatctgcatgaaccttgatgcggcctccttcagccaacataaccctgtgccagattttattcactgcagatcttacttagacatgtccaaagtgatcatcttcagctacctcttctggtttgtgctcaccatcatcttcatcactgggaccaccaggatcagcatcttttgcatggggtacctggtggcctgtttctacttcctgctctttgggggcgatttgctgttgaaacccatcaagagcatcctgcgctactgggactggctgatcgcatacaacgtttttgtgattacgatgaaaaatatcctgtcaataggagcatgtggatacattggaacattggtgcacaatagttgttggttgatccaggctttcagcctggcctgcacagtcaaaggctatcaaatgcctgctgctaattcaccctgtacacttcccagtggggaagcaggaatcatttgggacagcatatgttttgccttcctcctgctgcaaagaagagttttcatgagttattattttctacatgttgtggctgatataaaagcttcccagattctggcatcaagaggagctgaacttttccaggccacaattgtaaaagctgtaaaggcaagaattgaggaagagaagaagtccatggaccagctgaagcgacagatggatcgcatcaaggccaggcaacagaaatataaaaagggtaaggagaggatgctgagcttgacccaggagccaggggaaggccaggacatgcaaaaactctctgaagaggatgatgaaagagaagcagacaaacagaaagccaagggcaaaaaaaagcagtggtggcggccttgggttgatcatgcttccatggtcaggagtggagattattatttgtttgaaacggatagtgaagaggaggaagaggaagaattaaagaaggaagatgaagaacctccacgaaggtcagcattccagtttgtttatcaagcctggattactgatcctaaaacagcactccgacaaagacacaaagagaaaaaaaggtctgcaagagaagaacggaaacgaaggcggaaaggatccaaggagggtcctgtggaatgggaagaccgggaggatgaaccaatcaaaaagaaatccgatggaccagataatatcatcaagaggatatttaatattttgaaatttacctgggtcctatttctggcaacagtggacagtttcactacttggcttaactccatttcaagggagcatattgatatatctacagttctgagaattgaacgatgcatgctgaccagagaaattaagaagggcaatgttccaactcgggagagcatccacatgtactatcagaaccacatcatgaacctttccagagagtcgggactggacaccattgacgagcatcccggagctgcttcaggtgcacagacagcccacaggatggatagtttagattcacatgacagtatctccagcgagcccacgcagtgtaccatgctgtactcacgccaggggaccactgagaccatcgaggaggtggaggctgagcaggaggaggaggcagggagcacggcgcctgagcccagggaggccaaggagtacgaggccactgggtacgatgtgggagccatgggtgccgaggaggccagcctcaccccagaggaagagctgacacagttctccaccttggacggggatgtggaggccccaccctcctacagcaaggctgtgagcttcgagcatctgtccttcggctcgcaggacgactctgcaggcaagaaccgtatggcagtcagcccggacgacagccgcaccgacaagctggggtccagcatcttacctcccctgacccatgagctgacggccagcgagctgctgctgaaaaagatgtttcacgacgatgagcttgaagagtcagagaaattctacgtggggcagccccgatttctgctgctcttctatgccatgtacaataccctggtggcccgctcggagatggtgtgctacttcgtgatcatcctcaaccacatggtctctgcctccatgatcacgctcctgcttcccatcctcatcttcctctgggccatgttgtccgtccccaggcccagccgccggttctggatgatggccatcgtctatactgaggtggcaattgtagtcaagtatttcttccaatttgggttctttccctggaataagaatgtggaggtgaacaaagataaaccgtatcaccccccaaacatcataggagtggaaaagaaggaaggttatgttctctatgacctcatccagctcctggctctgttctttcatcgatcaattttgaagtgccatggcttatgggatgaagatgacatgactgaaagtggcatggccagggaggaatcagatgatgagctctccctcggtcatggcaggagggactcctccgattctctcaagtccatcaacctggccgcgtctgtggagtcagtgcatgtgaccttcccggagcagcagacagctgtccggaggaagcgctccggcagcagctccgagccatcccagagatccagcttttcttcaaacagatcccaaagaggcagcacaagcacccgaaacagcagtcaaaaaggaagcagtgttttgagtattaagcaaaaaggcaaaagggaactttatatggaaaagcttcaagaacatttaatcaaagcaaaagcctttaccataaagaagacgctggagatctatgtgcccatcaaacagttcttttacaacctcatccacccggagtatagcgccgtgactgacgtgtatgtactcatgttcctggctgacactgtggacttcatcatcattgtcttcggcttttgggcctttgggaaacactcagcagctgcagacatcacctcttcactgtcagaggaccaggtcccggggccgtttttggtgatggtcctcattcagtttggaaccatggtggtggaccgagccctctacctcaggaagactgtactgggaaaggtcatcttccaggtcattcttgtgttcggaattcacttctggatgttcttcatcttacctggtgtgactgagaggaaattcagccagaacctggttgcccagctttggtactttgtgaaatgtgtttacttcgggttgtctgcttaccagatccgttgtggctacccaacgcgagtcctggggaacttcctcaccaagagctacaattacgtcaacctcttcttattccaagggtttcgcctcgtgccctttttgactgagctgagggcagtgatggactgggtgtggacggacacaactttgagcctgtccagctggatctgtgtggaggacatctatgctcacatattcatcctgaagtgttggcgggagtcggagaagagataccctcagccacggggccagaagaagaagaaagtggtgaagtatggcatgggaggaatgatcatcgtcctgctcatctgcattgtctggtttcctcttctcttcatgtctttgatcaaatctgtggctggggtcatcaaccagcccctggacgtctccgtcacaattaccctgggagggtatcagcctattttcacaatgagtgcccaacaaagccagttgaaagttatggaccagcagagctttaacaaatttatacaagctttttctagggacaccggtgctatgcaatttctggaaaattatgaaaaagaagacataacagtagcagaactggaaggaaactcaaattctttgtggaccatcagcccacccagtaagcagaaaatgatacacgaactcctggaccccaatagtagcttctctgttgttttttcatggagtattcagagaaacttaagtctgggtgcaaaatcggaaatagcaacagataagctttcttttcctcttaaaaatattactcgaaagaatatcgctaaaatgatagcaggcaacagcacagaaagttcaaaaacaccagtgaccatagaaaagatttatccatattatgtgaaagcacctagtgattctaactcaaaacctataaagcaacttttatctgaaaataatttcatggatattaccatcattttgtccagagacaatacaactaaatataacagtgagtggtgggttctcaacctgactggaaacagaatatacaatccgaactctcaggccctggaactggtggtcttcaatgacaaagtcagtcccccaagtctggggttcctggctggctatggtattatgggattatatgcttcagttgtccttgtgattgggaaatttgtccgtgaattcttcagtgggatttctcactccatcatgtttgaagagcttccaaatgtggatcgaattttgaagttgtgcacagatatttttttagttcgagagacaggagaactggagctagaagaagatctctatgccaaattaatattcctatatcgctcaccagagacaatgatcaaatggactagagaaaaaacaaattgaaaccttagaacacagactgcaaataatgttaacatttgaattttttttaaaagcacaatattctcataagagctaagcatttctagttcgacggaaatggtttgtttctcttctgataggtagacaaaaggagctgatatccttctgcagtaaaagctaccttgcaagttaaggcactgttgaaaatgttatttgtaactccatttctctgaaatcagggctacttgctttatgttttagtcaacagtgtctcgcattctgattgatcatgtgaaggaatcatttatgggccccgtccctaagagaaacagaagaggagtcagaaagaaagatgcctgtgttttcctctgtggggcccgtgcacttcctggagagatgctacaatgcaatatacagcgctccatccccactggggaagctgctgtgatgagactagatgagccttcaacacactcagaaaatgcaacagcaatagggggcagacagctcctacctgtgtttctaggagcaaaagagagggaactaattgcccgtgaagacgccagtggaaggatcagcctcattctaagcaaaaacatagtattagtgatactcttactgccttatcttaaccaaggactaataggatacctttccattaaacaccagtgacttctcaggaaaaaaaaaaaaaaggagcaaaacaaatgatgtgtacacctgctttgttatggtccaccagtgaccagcttcaatgaggggaaccattctggagggctgcggtctcctgtgcaaacagacatgaggcagaagagtaaaaagaccaacccagtgggacctagaatactttgtaactctttaataactgaggtcaggaccgctcttctgccttccccttcccttaacgtgctttttcccatttccatgatttaaggcaatggtttttccagtatgtgacattttccttcctgtttttcaggtatatcaaagagtttacatattccaattcacatttttacatctgagacgggttttttaagttcataattatgaaagaaatatgtatattgagcttggggaaataaaaatggccttttcttaaattattattattggtaatacaacctcttcattaaataacaatgtagcatgaaaaatttatgattgaaatgtagttttcattccatattaagatacagtttctgagaagaatcattgaatggactagaatatgtcaaaaattgatcctgtgtagtttgggttcagggctgacttaaaataaagcacatcctgcaaagtc

SEQ ID NO: 166170 - DNA, 8259 bp, Homo sapiens
  Payload ID: 12709
  Gene Symbol: PIEZO2
  Gene Name: piezo-type mechanosensitive ion channel component 2
  Uniprot ID: Q9H5I5
  ENST ID: ENST00000503781
  CDS Start-End: 1-8259
atggcctcagaagtggtgtgcgggctcatcttcaggctgctgctgcccatctgcctggcagtagcatgtgcattccgatacaatgggctctcctttgtctaccttatctacctcttgctcattcctctgttctcagaaccaacaaaaacgacgatgcaaggacatacgggacggttattaaagtctctgtgcttcatcagtctttccttcctgttgctgcacatcattttccacatcacgttggtgagccttgaagctcaacatcgtattgcacctggctacaactgctcaacatgggaaaagacattccggcagatcggctttgaaagcttaaagggagctgatgctggcaatgggatcagagtgtttgtacctgacatcgggatgttcattgctagtctgaccatctggctcctctgtagaaacattgttcagaaacctgtgacagacgaagcagcacagagtaacccggagtttgaaaatgaagaattggctgaaggagaaaaaattgattcagaagaggcactgatctatgaagaggatttcaatggaggagatggtgttgaaggcgagttggaagaaagcacgaagttaaaaatgttccgcaggcttgcctctgtggcctctaagctcaaggagttcattggcaacatgatcaccactgctgggaaagtcgttgttaccatcttactgggctcctcgggcatgatgttgccgtctttgacatcatctgtgtatttttttgtatttttgggtctgtgcacctggtggtcctggtgccggacgttcgacccattgctgttcagctgtctctgtgttctgctggctattttcactgctggacatttgattggactttatttataccagttccaattctttcaagaggcagttccacccaatgactactatgcaaggttgtttggtatcaagtcagtaattcaaacggactgttcaagtacttggaagatcatagtgaacccggacctgtcgtggtaccaccacgccaaccctatcctcctgctggtgatgtactacactctggccactctgatccgcatctggctgcaagagccccttgtgcaggatgaggggaccaaagaagaggacaaagccctggcttgtagccccatccaaataacagcggggaggaggcggagcctgtggtacgcaacccattaccccactgatgagagaaaacttttatccatgacccaggatgactacaaaccatctgatggcctgctggtgactgtgaacggcaaccccgtggattaccacaccatccacccaagcctgcccatggagaacggccctggcaaagccgacctctactccacccctcagtaccggtgggagccctctgatgaatcctcagaaaagcgagaggaggaagaggaagagaaagaagaatttgaagaagaaaggagccgtgaggaaaaaagaagtatcaaagttcatgccatggtctccgtattccaatttattatgaaacaaagttacatctgtgccctcatagctatgatggcctggagcatcacctatcacagctggctgaccttcgtgctgctgatctggtcgtgcactctttggatgattcgcaacagaagaaaatatgccatgatcagctctcccttcatggtggtttatggaaacctattgttgatattacagtatatatggagttttgaacttcctgaaattaaaaaagttccaggatttttagaaaagaaagagccaggagaacttgcttccaaaatccttttcaccattactttttggctactgctgaggcagcacctcacagagcaaaaagctctgcaagaaaaggaagctcttttatcggaagtcaaaattggcagtcaggaaaatgaagaaaaagatgaggaacttcaagatatacaagtggaaggagagcccaaagaggaggaagaagaggaagcgaaggaagagaagcaagagagaaagaaggtagagcaagaggaagctgaagaagaagatgagcaggacatcatgaaagtcctgggcaatctggtggtggccatgttcatcaagtactggatctacgtctgcggaggcatgttcttcttcgtcagcttcgagggtaaaatcgtaatgtacaaaatcatctacatggtgctgttcctgttctgtgtggccctataccaggtgcactatgaatggtggaggaaaattctaaaatatttttggatgtcagtggttatttacactatgctggtgcttatctttatatacacatatcagtttgagaacttcccaggcctgtggcaaaatatgactggactgaaaaaagaaaagcttgaggatcttggcttaaagcagtttactgtggctgaactattcactcgcatattcatcccaacctcctttctgctggtgtgcattttacacctgcactacttccatgaccggttccttgaactcacagacctcaagtccattcccagcaaagaagacaacaccatctacagactggcccacccggaaggaagcctcccggacctcaccatgatgcatctgactgccagcctggagaagccggaggtgaggaagttggctgagcctggggaggagaagcttgagggctactctgaaaaagcccagaagggtgatcttgggaaagacagcgaggagtcagaggaggacggagaggaagaggaggaatccgaggaggaggaagaaacatcagacttaaggaacaaatggcacctggtgattgaccgcctcactgtgctcttcttaaaattcctggagtattttcacaagctgcaggtgttcatgtggtggattttggagttgcacatcatcaaaatcgtttcctcttacattatctgggtttctgtgaaagaggtgtctctgttcaactatgtatttttgatttcttgggcttttgctctgccgtacgccaagctgcgccgtctggcttcaagtgtctgcacagtctggacgtgtgtgatcatcgtctgcaaaatgttgtaccagctccaaaccattaagcctgagaacttctctgttaactgttccttgccaaatgaaaatcaaacaaacatcccctttaatgagttgaacaagtctctgctctacagcgctcctatcgatcctacagagtgggtcggcctgcggaagtcttcgcctctgctagtctacctgaggaataacctcctgatgctggctatcctggcctttgaagtcaccatttaccgccatcaggaatactatcgaggtcgaaataacctgacggcccctgtgtctagaactatctttcatgacattacaagactacatctagatgatggacttattaattgtgccaaatatttcattaattacttcttttacaagtttggtctggagacctgtttcctaatgtcagttaacgtcattggccagcgaatggatttctatgccatgatccacgcctgctggctgatcgctgtcttatatagacgcagaaggaaagccatcgcagagatctggcccaagtactgctgcttcctggcatgcatcatcaccttccagtatttcatctgcattggcatcccacctgctccttgccgagattacccgtggagattcaagggtgccagcttcaatgacaacatcataaagtggctgtacttcccagatttcattgtgcggcccaaccctgtgtttctcgtctatgacttcatgctgcttctgtgtgcctccttacaacggcagatttttgaggatgagaacaaggctgcagtgcgaatcatggcaggtgacaatgtcgagatctgcatgaaccttgatgcggcctccttcagccaacataaccctgtgccagattttattcactgcagatcttacttagacatgtccaaagtgatcatcttcagctacctcttctggtttgtgctcaccatcatcttcatcactgggaccaccaggatcagcatcttttgcatggggtacctggtggcctgtttctacttcctgctctttgggggcgatttgctgttgaaacccatcaagagcatcctgcgctactgggactggctgatcgcatacaacgtttttgtgattacgatgaaaaatatcctgtcaataggagcatgtggatacattggaacattggtgcacaatagttgttggttgatccaggctttcagcctggcctgcacagtcaaaggctatcaaatgcctgctgctaattcaccctgtacacttcccagtggggaagcaggaatcatttgggacagcatatgttttgccttcctcctgctgcaaagaagagttttcatgagttattattttctacatgttgtggctgatataaaagcttcccagattctggcatcaagaggagctgaacttttccaggccacaattgtaaaagctgtaaaggcaagaattgaggaagagaagaagtccatggaccagctgaagcgacagatggatcgcatcaaggccaggcaacagaaatataaaaagggtaaggagaggatgctgagcttgacccaggagccaggggaaggccaggacatgcaaaaactctctgaagaggatgatgaaagagaagcagacaaacagaaagccaagggcaaaaaaaagcagtggtggcggccttgggttgatcatgcttccatggtcaggagtggagattattatttgtttgaaacggatagtgaagaggaggaagaggaagaattaaagaaggaagatgaagaacctccacgaaggtcagcattccagtttgtttatcaagcctggattactgatcctaaaacagcactccgacaaagacacaaagagaaaaaaaggtctgcaagagaagaacggaaacgaaggcggaaaggatccaaggagggtcctgtggaatgggaagaccgggaggatgaaccaatcaaaaagaaatccgatggaccagataatatcatcaagaggatatttaatattttgaaatttacctgggtcctatttctggcaacagtggacagtttcactacttggcttaactccatttcaagggagcatattgatatatctacagttctgagaattgaacgatgcatgctgaccagagaaattaagaagggcaatgttccaactcgggagagcatccacatgtactatcagaaccacatcatgaacctttccagagagtcgggactggacaccattgacgagcatcccggagctgcttcaggtgcacagacagcccacaggatggatagtttagattcacatgacagtatctccagcgagcccacgcagtgtaccatgctgtactcacgccaggggaccactgagaccatcgaggaggtggaggctgagcaggaggaggaggcagggagcacggcgcctgagcccagggaggccaaggagtacgaggccactgggtacgatgtgggagccatgggtgccgaggaggccagcctcaccccagaggaagagctgacacagttctccaccttggacggggatgtggaggccccaccctcctacagcaaggctgtgagcttcgagcatctgtccttcggctcgcaggacgactctgcaggcaagaaccgtatggcagtcagcccggacgacagccgcaccgacaagctggggtccagcatcttacctcccctgacccatgagctgacggccagcgagctgctgctgaaaaagatgtttcacgacgatgagcttgaagagtcagagaaattctacgtggggcagccccgatttctgctgctcttctatgccatgtacaataccctggtggcccgctcggagatggtgtgctacttcgtgatcatcctcaaccacatggtctctgcctccatgatcacgctcctgcttcccatcctcatcttcctctgggccatgttgtccgtccccaggcccagccgccggttctggatgatggccatcgtctatactgaggtggcaattgtagtcaagtatttcttccaatttgggttctttccctggaataagaatgtggaggtgaacaaagataaaccgtatcaccccccaaacatcataggagtggaaaagaaggaaggttatgttctctatgacctcatccagctcctggctctgttctttcatcgatcaattttgaagtgccatggcttatgggatgaagatgacatgactgaaagtggcatggccagggaggaatcagatgatgagctctccctcggtcatggcaggagggactcctccgattctctcaagtccatcaacctggccgcgtctgtggagtcagtgcatgtgaccttcccggagcagcagacagctgtccggaggaagcgctccggcagcagctccgagccatcccagagatccagcttttcttcaaacagatcccaaagaggcagcacaagcacccgaaacagcagtcaaaaaggaagcagtgttttgagtattaagcaaaaaggcaaaagggaactttatatggaaaagcttcaagaacatttaatcaaagcaaaagcctttaccataaagaagacgctggagatctatgtgcccatcaaacagttcttttacaacctcatccacccggagtatagcgccgtgactgacgtgtatgtactcatgttcctggctgacactgtggacttcatcatcattgtcttcggcttttgggcctttgggaaacactcagcagctgcagacatcacctcttcactgtcagaggaccaggtcccggggccgtttttggtgatggtcctcattcagtttggaaccatggtggtggaccgagccctctacctcaggaagactgtactgggaaaggtcatcttccaggtcattcttgtgttcggaattcacttctggatgttcttcatcttacctggtgtgactgagaggaaattcagccagaacctggttgcccagctttggtactttgtgaaatgtgtttacttcgggttgtctgcttaccagatccgttgtggctacccaacgcgagtcctggggaacttcctcaccaagagctacaattacgtcaacctcttcttattccaagggtttcgcctcgtgccctttttgactgagctgagggcagtgatggactgggtgtggacggacacaactttgagcctgtccagctggatctgtgtggaggacatctatgctcacatattcatcctgaagtgttggcgggagtcggagaagagataccctcagccacggggccagaagaagaagaaagtggtgaagtatggcatgggaggaatgatcatcgtcctgctcatctgcattgtctggtttcctcttctcttcatgtctttgatcaaatctgtggctggggtcatcaaccagcccctggacgtctccgtcacaattaccctgggagggtatcagcctattttcacaatgagtgcccaacaaagccagttgaaagttatggaccagcagagctttaacaaatttatacaagctttttctagggacaccggtgctatgcaatttctggaaaattatgaaaaagaagacataacagtagcagaactggaaggaaactcaaattctttgtggaccatcagcccacccagtaagcagaaaatgatacacgaactcctggaccccaatagtagcttctctgttgttttttcatggagtattcagagaaacttaagtctgggtgcaaaatcggaaatagcaacagataagctttcttttcctcttaaaaatattactcgaaagaatatcgctaaaatgatagcaggcaacagcacagaaagttcaaaaacaccagtgaccatagaaaagatttatccatattatgtgaaagcacctagtgattctaactcaaaacctataaagcaacttttatctgaaaataatttcatggatattaccatcattttgtccagagacaatacaactaaatataacagtgagtggtgggttctcaacctgactggaaacagaatatacaatccgaactctcaggccctggaactggtggtcttcaatgacaaagtcagtcccccaagtctggggttcctggctggctatggtattatgggattatatgcttcagttgtccttgtgattgggaaatttgtccgtgaattcttcagtgggatttctcactccatcatgtttgaagagcttccaaatgtggatcgaattttgaagttgtgcacagatatttttttagttcgagagacaggagaactggagctagaagaagatctctatgccaaattaatattcctatatcgctcaccagagacaatgatcaaatggactagagaaaaaacaaattga

SEQ ID NO: 166171 - DNA, 2671 bp, Homo sapiens
  Payload ID: 12709
  Gene Symbol: PIEZO2
  Gene Name: piezo-type mechanosensitive ion channel component 2
  Uniprot ID: Q9H5I5
  ENST ID: ENST00000538948
  CDS Start-End: 141-2270
atgttaacaattaatcagttcaagttggtcatcttcctagataacctggaccgtaatcttcctagataacctggacatcaggattggtgatggggctgaggggccagtgagtgtgccatggcttatgggatgaagatgacatgactgaaagtggcatggccagggaggaatcagatgatgagctctccctcggtcatggcaggagggactcctccgattctctcaagtccatcaacctggccgcgtctgtggagtcagtgcatgtgaccttcccggagcagcagacagctgtccggaggaagcgctccggcagcagctccgagccatcccagagatccagcttttcttcaaacagatcccaaagaggcagcacaagcacccgaaacagcagtcaaaaaggaagcagtgttttgagtattaagcaaaaaggcaaaagggaactttatatggaaaagcttcaagaacatttaatcaaagcaaaagcctttaccataaagaagacgctggagatctatgtgcccatcaaacagttcttttacaacctcatccacccggagtatagcgccgtgactgacgtgtatgtactcatgttcctggctgacactgtggacttcatcatcattgtcttcggcttttgggcctttgggaaacactcagcagctgcagacatcacctcttcactgtcagaggaccaggtcccggggccgtttttggtgatggtcctcattcagtttggaaccatggtggtggaccgagccctctacctcaggaagactgtactgggaaaggtcatcttccaggtcattcttgtgttcggaattcacttctggatgttcttcatcttacctggtgtgactgagaggaaattcagccagaacctggttgcccagctttggtactttgtgaaatgtgtttacttcgggttgtctgcttaccagatccgttgtggctacccaacgcgagtcctggggaacttcctcaccaagagctacaattacgtcaacctcttcttattccaagggtttcgcctcgtgccctttttgactgagctgagggcagtgatggactgggtgtggacggacacaactttgagcctgtccagctggatctgtgtggaggacatctatgctcacatattcatcctgaagtgttggcgggagtcggagaagagataccctcagccacggggccagaagaagaagaaagtggtgaagtatggcatgggaggaatgatcatcgtcctgctcatctgcattgtctggtttcctcttctcttcatgtctttgatcaaatctgtggctggggtcatcaaccagcccctggacgtctccgtcacaattaccctgggagggtatcagcctattttcacaatgagtgcccaacaaagccagttgaaagttatggaccagcagagctttaacaaatttatacaagctttttctagggacaccggtgctatgcaatttctggaaaattatgaaaaagaagacataacagtagcagaactggaaggaaactcaaattctttgtggaccatcagcccacccagtaagcagaaaatgatacacgaactcctggaccccaatagtagcttctctgttgttttttcatggagtattcagagaaacttaagtctgggtgcaaaatcggaaatagcaacagataagctttcttttcctcttaaaaatattactcgaaagaatatcgctaaaatgatagcaggcaacagcacagaaagttcaaaaacaccagtgaccatagaaaagatttatccatattatgtgaaagcacctagtgattctaactcaaaacctataaagcaacttttatctgaaaataatttcatggatattaccatcattttgtccagagacaatacaactaaatataacagtgagtggtgggttctcaacctgactggaaacagaatatacaatccgaactctcaggccctggaactggtggtcttcaatgacaaagtcagtcccccaagtctggggttcctggctggctatggtattatgggattatatgcttcagttgtccttgtgattgggaaatttgtccgtgaattcttcagtgggatttctcactccatcatgtttgaagagcttccaaatgtggatcgaattttgaagttgtgcacagatatttttttagttcgagagacaggagaactggagctagaagaagatctctatgccaaattaatattcctatatcgctcaccagagacaatgatcaaatggactagagaaaaaacaaattgaaaccttagaacacagactgcaaataatgttaacatttgaattttttttaaaagcacaatattctcataagagctaagcatttctagttcgacggaaatggtttgtttctcttctgataggtagacaaaaggagctgatatccttctgcagtaaaagctaccttgcaagttaaggcactgttgaaaatgttatttgtaactccatttctctgaaatcagggctacttgctttatgttttagtcaacagtgtctcgcattctgattgatcatgtgaaggaatcatttatgggccccgtccctaagagaaacagaagaggagtcagaaagaaagatgcctgtgttttcctctgtggggcccgtgcacttcctggagagatgctacaatgcaatatacagcgctc

SEQ ID NO: 166172 - DNA, 8465 bp, Homo sapiens
  Payload ID: 12709
  Gene Symbol: PIEZO2
  Gene Name: piezo-type mechanosensitive ion channel component 2
  ENST ID: ENST00000582913
  CDS Start-End: 1-4422
atggcctcagaagtggtgtgcgggctcatcttcaggctgctgctgcccatctgcctggcagtagcatgtgcattccgatacaatgggctctcctttgtctaccttatctacctcttgctcattcctctgttctcagaaccaacaaaaacgacgatgcaaggacatacgggacggttattaaagtctctgtgcttcatcagtctttccttcctgttgctgcacatcattttccacatcacgttggtgagccttgaagctcaacatcgtattgcacctggctacaactgctcaacatgggaaaagacattccggcagatcggctttgaaagcttaaagggagctgatgctggcaatgggatcagagtgtttgtacctgacatcgggatgttcattgctagtctgaccatctggctcctctgtagaaacattgttcagaaacctgtgacagacgaagcagcacagagtaacccggagtttgaaaatgaagaattggctgaaggagaaaaaattgattcagaagaggcactgatctatgaagaggatttcaatggaggagatggtgttgaaggcgagttggaagaaagcacgaagttaaaaatgttccgcaggcttgcctctgtggcctctaagctcaaggagttcattggcaacatgatcaccactgctgggaaagtcgttgttaccatcttactgggctcctcgggcatgatgttgccgtctttgacatcatctgtgtatttttttgtatttttgggtctgtgcacctggtggtcctggtgccggacgttcgacccattgctgttcagctgtctctgtgttctgctggctattttcactgctggacatttgattggactttatttataccagttccaattctttcaagaggcagttccacccaatgactactatgcaaggttgtttggtatcaagtcagtaattcaaacggactgttcaagtacttggaagatcatagtgaacccggacctgtcgtggtaccaccacgccaaccctatcctcctgctggtgatgtactacactctggccactctgatccgcatctggctgcaagagccccttgtgcaggatgaggggaccaaagaagaggacaaagccctggcttgtagccccatccaaataacagcggggaggaggcggagcctgtggtacgcaacccattaccccactgatgagagaaaacttttatccatgacccaggatgactacaaaccatctgatggcctgctggtgactgtgaacggcaaccccgtggattaccacaccatccacccaagcctgcccatggagaacggccctggcaaagccgacctctactccacccctcagtaccggtgggagccctctgatgaatcctcagaaaagcgagaggaggaagaggaagagaaagaagaatttgaagaagaaaggagccgtgaggaaaaaagaagtatcaaagttcatgccatggtctccgtattccaatttattatgaaacaaagttacatctgtgccctcatagctatgatggcctggagcatcacctatcacagctggctgaccttcgtgctgctgatctggtcgtgcactctttggatgattcgcaacagaagaaaatatgccatgatcagctctcccttcatggtggtttatggaaacctattgttgatattacagtatatatggagttttgaacttcctgaaattaaaaaagttccaggatttttagaaaagaaagagccaggagaacttgcttccaaaatccttttcaccattactttttggctactgctgaggcagcacctcacagagcaaaaagctctgcaagaaaaggaagctcttttatcggaagtcaaaattggcagtcaggaaaatgaagaaaaagatgaggaacttcaagatatacaagtggaaggagagcccaaagaggaggaagaagaggaagcgaaggaagagaagcaagagagaaagaaggtagagcaagaggaagctgaagaagaagatgagcaggacatcatgaaagtcctgggcaatctggtggtggccatgttcatcaagtactggatctacgtctgcggaggcatgttcttcttcgtcagcttcgagggtaaaatcgtaatgtacaaaatcatctacatggtgctgttcctgttctgtgtggccctataccaggtgcactatgaatggtggaggaaaattctaaaatatttttggatgtcagtggttatttacactatgctggtgcttatctttatatacacatatcagtttgagaacttcccaggcctgtggcaaaatatgactggactgaaaaaagaaaagcttgaggatcttggcttaaagcagtttactgtggctgaactattcactcgcatattcatcccaacctcctttctgctggtgtgcattttacacctgcactacttccatgaccggttccttgaactcacagacctcaagtccattcccagcaaagaagacaacaccatctacagccatgccaaagtcaatggtcgcgtatatctaataataaatagactggcccacccggaaggaagcctcccggacctcaccatgatgcatctgactgccagcctggagaagccggaggtgaggaagttggctgagcctggggaggagaagcttgagggctactctgaaaaagcccagaagggtgatcttgggaaagacagcgaggagtcagaggaggacggagaggaagaggaggaatccgaggaggaggaagaaacatcagacttaaggaacaaatggcacctggtgattgaccgcctcactgtgctcttcttaaaattcctggagtattttcacaagctgcaggtgttcatgtggtggattttggagttgcacatcatcaaaatcgtttcctcttacattatctgggtttctgtgaaagaggtgtctctgttcaactatgtatttttgatttcttgggcttttgctctgccgtacgccaagctgcgccgtctggcttcaagtgtctgcacagtctggacgtgtgtgatcatcgtctgcaaaatgttgtaccagctccaaaccattaagcctgagaacttctctgttaactgttccttgccaaatgaaaatcaaacaaacatcccctttaatgagttgaacaagtctctgctctacagcgctcctatcgatcctacagagtgggtcggcctgcggaagtcttcgcctctgctagtctacctgaggaataacctcctgatgctggctatcctggcctttgaagtcaccatttaccgccatcaggaatactatcgaggtcgaaataacctgacggcccctgtgtctagaactatctttcatgacattacaagactacatctagatgatggacttattaattgtgccaaatatttcattaattacttcttttacaagtttggtctggagacctgtttcctaatgtcagttaacgtcattggccagcgaatggatttctatgccatgatccacgcctgctggctgatcgctgtcttatatagacgcagaaggaaagccatcgcagagatctggcccaagtactgctgcttcctggcatgcatcatcaccttccagtatttcatctgcattggcatcccacctgctccttgccgagattacccgtggagattcaagggtgccagcttcaatgacaacatcataaagtggctgtacttcccagatttcattgtgcggcccaaccctgtgtttctcgtctatgacttcatgctgcttctgtgtgcctccttacaacggcagatttttgaggatgagaacaaggctgcagtgcgaatcatggcaggtgacaatgtcgagatctgcatgaaccttgatgcggcctccttcagccaacataaccctgtgccagattttattcactgcagatcttacttagacatgtccaaagtgatcatcttcagctacctcttctggtttgtgctcaccatcatcttcatcactgggaccaccaggatcagcatcttttgcatggggtacctggtggcctgtttctacttcctgctctttgggggcgatttgctgttgaaacccatcaagagcatcctgcgctactgggactggctgatcgcatacaacgtttttgtgattacgatgaaaaatatcctgtcaataggagcatgtggatacattggaacattggtgcacaatagttgttggttgatccaggctttcagcctggcctgcacagtcaaaggctatcaaatgcctgctgctaattcaccctgtacacttcccagtggggaagcaggaatcatttgggacagcatatgttttgccttcctcctgctgcaaagaagagttttcatgagttattattttctacatgttgtggctgatataaaagcttcccagattctggcatcaaggtggctgaacttttccaggccacaattgtaaaagctgtaaaggcaagaattgaggaagagaagaagtccatggaccagctgaagcgacagatggatcgcatcaaggccaggcaacagaaatataaaaagggtaaggagaggatgctgagcttgacccaggagccaggggaaggccaggacatgcaaaaactctctgaagaggatgatgaaagagaagcagacaaacagaaagccaagggcaaaaaaaagcagtggtggcggccttgggttgatcatgcttccatggtcaggagtggagattattatttgtttgaaacggatagtgaagaggaggaagaggaagaattaaagaaggaagatgaagaacctccacgaaggtcagcattccagtttgtttatcaagcctggattactgatcctaaaacagcactccgacaaagacacaaagagaaaaaaaggtctgcaagagaagaacggaaacgaaggcggaaaggatccaaggagggtcctgtggaatgggaagaccgggaggatgaaccaatcaaaaagaaatccgatggaccagataatatcatcaagaggatatttaatattttgaaatttacctgggtcctatttctggcaacagtggacagtttcactacttggcttaactccatttcaagggagcatattgatatatctacagttctgagaattgaacgatgcatgctgaccagagaaattaagaagggcaatgttccaactcgggagagcatccacatgtactatcagaaccacatcatgaacctttccagagagtcgggactggacaccattgacgagcatcccggagctgcttcaggtgcacagacagcccacaggatggatagtttagattcacatgacagtatctccagctgctacactgaagcaaccatgctgttctcaaggcagtccacccttgatgatttagatggacaagaaattcctaaaacaagcgagcgtgctcggcctaggctccgtaaaatgctcagcatggatatgtcctcctcatcagctgacagtggcagtttagcatcaagcgagcccacgcagtgtaccatgctgtactcacgccaggggaccactgagaccatcgaggaggtggaggctgagcaggaggaggaggcagggagcacggcgcctgagcccagggaggccaaggagtacgaggccactgggtacgatgtgggagccatgggtgccgaggaggccagcctcaccccagaggaagagctgacacagttctccaccttggacggggatgtggaggccccaccctcctacagcaaggctgtgagcttcgagcatctgtccttcggctcgcaggacgactctgcaggcaagaaccgtatggcagtcagcccggacgacagccgcaccgacaagctggggtccagcatcttacctcccctgacccatgagctgacggccagcgagctgctgctgaaaaagatgtttcacgacgatgagcttgaagagtcagagaaattctacgtggggcagccccgatttctgctgctcttctatgccatgtacaataccctggtggcccgctcggagatggtgtgctacttcgtgatcatcctcaaccacatggtctctgcctccatgatcacgctcctgcttcccatcctcatcttcctctgggccatgttgtccgtccccaggcccagccgccggttctggatgatggccatcgtctatactgaggtggcaattgtagtcaagtatttcttccaatttgggttctttccctggaataagaatgtggaggtgaacaaagataaaccgtatcaccccccaaacatcataggagtggaaaagaaggaaggttatgttctctatgacctcatccagctcctggctctgttctttcatcgatcaattttgaagtgccatggcttatgggatgaagatgacatgactgaaagtggcatggccagggaggaatcagatgatgagctctccctcggtcatggcaggagggactcctccgattctctcaagtccatcaacctggccgcgtctgtggagtcagtgcatgtgaccttcccggagcagcagacagctgtccggaggaagcgctccggcagcagctccgagccatcccagagatccagcttttcttcaaacagatcccaaagaggcagcacaagcacccgaaacagcagtcaaaaaggaagcagtgttttgagtattaagcaaaaaggcaaaagggaactttatatggaaaagcttcaagaacatttaatcaaagcaaaagcctttaccataaagaagacgctggagatctatgtgcccatcaaacagttcttttacaacctcatccacccggagtatagcgccgtgactgacgtgtatgtactcatgttcctggctgacactgtggacttcatcatcattgtcttcggcttttgggcctttgggaaacactcagcagctgcagacatcacctcttcactgtcagaggaccaggtcccggggccgtttttggtgatggtcctcattcagtttggaaccatggtggtggaccgagccctctacctcaggaagactgtactgggaaaggtcatcttccaggtcattcttgtgttcggaattcacttctggatgttcttcatcttacctggtgtgactgagaggaaattcagccagaacctggttgcccagctttggtactttgtgaaatgtgtttacttcgggttgtctgcttaccagatccgttgtggctacccaacgcgagtcctggggaacttcctcaccaagagctacaattacgtcaacctcttcttattccaagggtttcgcctcgtgccctttttgactgagctgagggcagtgatggactgggtgtggacggacacaactttgagcctgtccagctggatctgtgtggaggacatctatgctcacatattcatcctgaagtgttggcgggagtcggagaagagataccctcagccacggggccagaagaagaagaaagtggtgaagtatggcatgggaggaatgatcatcgtcctgctcatctgcattgtctggtttcctcttctcttcatgtctttgatcaaatctgtggctggggtcatcaaccagcccctggacgtctccgtcacaattaccctgggagggtatcagcctattttcacaatgagtgcccaacaaagccagttgaaagttatggaccagcagagctttaacaaatttatacaagctttttctagggacaccggtgctatgcaatttctggaaaattatgaaaaagaagacataacagtagcagaactggaaggaaactcaaattctttgtggaccatcagcccacccagtaagcagaaaatgatacacgaactcctggaccccaatagtagcttctctgttgttttttcatggagtattcagagaaacttaagtctgggtgcaaaatcggaaatagcaacagataagctttcttttcctcttaaaaatattactcgaaagaatatcgctaaaatgatagcaggcaacagcacagaaagttcaaaaacaccagtgaccatagaaaagatttatccatattatgtgaaagcacctagtgattctaactcaaaacctataaagcaacttttatctgaaaataatttcatggatattaccatcattttgtccagagacaatacaactaaatataacagtgagtggtgggttctcaacctgactggaaacagaatatacaatccgaactctcaggccctggaactggtggtcttcaatgacaaagtcagtcccccaagtctggggttcctggctggctatggtattatgggattatatgcttcagttgtccttgtgattgggaaatttgtccgtgaattcttcagtgggatttctcactccatcatgtttgaagagcttccaaatgtggatcgaattttgaagttgtgcacagatatttttttagttcgagagacaggagaactggagctagaagaagatctctatgccaaattaatattcctatatcgctcaccagagacaatgatcaaatggactagagaaaaaacaaattga

SEQ ID NO: 166173 - DNA, 389 bp, Homo sapiens
  Payload ID: 12709
  Gene Symbol: PIEZO2
  Gene Name: piezo-type mechanosensitive ion channel component 2
  ENST ID: ENST00000582937
  CDS Start-End: 1-279
tggtggtcttcaatgacaaagtcagtcccccaagtctggggttcctggctggctatggcttttaggctgcatgtgagaccatgtccagatgttcatccagacccacagcatggcagaggccttgttgttcactggcagtctccatcagaccttccgtcccaggatgttctttggaggatcttcaaaggcaaccttcctgtggctgcttctccgtgtttgcagtttgaaaatggactagaaccactagcacaagacagcggttatcttgcatgtccatagcaaagatattagtatcttaaatgtttaaattattatcctttacaatgttgccttttctaagtttgtattatttatacttctaacaccattacagtttaaacctgcagtaa

SEQ ID NO: 166174 - DNA, 1021 bp, Homo sapiens
  Payload ID: 12709
  Gene Symbol: PIEZO2
  Gene Name: piezo-type mechanosensitive ion channel component 2
  ENST ID: ENST00000583325
  CDS Start-End: 444-1021
caaccacggaccagcacctcaaggaagaccacctgttgcagctgatttcctgcccaggtggaagttgttagaaaggttgggttcatcttcctcaggacttgcgtggtgcttctggcacccaacacaaacatgggagcatcctcggaaaagggacttaaaagcagtgaatctcagctgaagtcaagcagatccttttcaccattactttttggctactgctgaggcagcacctcacagagcaaaaagctctgcaagaaaaggaagctcttttatcggaagtcaaaattggcagtcaggaaaatgaagaaaaagatgaggaacttcaagatatacaagtggaaggagagcccaaagaggaggaagaagaggaagcgaaggaagagaagcaagagagaaagaaggtagagcaagaggaagctgaagaagaagatgagcaggacatcatgaaagtcctgggcaatctggtggtggccatgttcatcaagtactggatctacgtctgcggaggcatgttcttcttcgtcagcttcgagggtaaaatcgtaatgtacaaaatcatctacatggtgctgttcctgttctgtgtggccctataccaggtgcactatgaatggtggaggaaaattctaaaatatttttggatgtcagtggttatttacactatgctggtgcttatctttatatacacatatcagtttgagaacttcccaggcctgtggcaaaatatgactggactgaaaaaagaaaagcttgaggatcttggcttaaagcagtttactgtggctgaactattcactcgcatattcatcccaacctcctttctgctggtgtgcattttacacctgcactacttccatgaccggttccttgaactcacagacctcaagtccattcccagcaaagaagacaacaccatctacagactggcccacccggaaggaagcctcccggacctcaccatgatgcatctgactgccagcctggagaagccggaggtgaggaagttggctgagcctgggga

SEQ ID NO: 166175 - DNA, 8334 bp, Homo sapiens
  Payload ID: 12709
  Gene Symbol: PIEZO2
  Gene Name: piezo-type mechanosensitive ion channel component 2
  Uniprot ID: Q9H5I5
  ENST ID: ENST00000580640
  CDS Start-End: 1-8334
atggcctcagaagtggtgtgcgggctcatcttcaggctgctgctgcccatctgcctggcagtagcatgtgcattccgatacaatgggctctcctttgtctaccttatctacctcttgctcattcctctgttctcagaaccaacaaaaacgacgatgcaaggacatacgggacggttattaaagtctctgtgcttcatcagtctttccttcctgttgctgcacatcattttccacatcacgttggtgagccttgaagctcaacatcgtattgcacctggctacaactgctcaacatgggaaaagacattccggcagatcggctttgaaagcttaaagggagctgatgctggcaatgggatcagagtgtttgtacctgacatcgggatgttcattgctagtctgaccatctggctcctctgtagaaacattgttcagaaacctgtgacagacgaagcagcacagagtaacccggagtttgaaaatgaagaattggctgaaggagaaaaaattgattcagaagaggcactgatctatgaagaggatttcaatggaggagatggtgttgaaggcgagttggaagaaagcacgaagttaaaaatgttccgcaggcttgcctctgtggcctctaagctcaaggagttcattggcaacatgatcaccactgctgggaaagtcgttgttaccatcttactgggctcctcgggcatgatgttgccgtctttgacatcatctgtgtatttttttgtatttttgggtctgtgcacctggtggtcctggtgccggacgttcgacccattgctgttcagctgtctctgtgttctgctggctattttcactgctggacatttgattggactttatttataccagttccaattctttcaagaggcagttccacccaatgactactatgcaaggttgtttggtatcaagtcagtaattcaaacggactgttcaagtacttggaagatcatagtgaacccggacctgtcgtggtaccaccacgccaaccctatcctcctgctggtgatgtactacactctggccactctgatccgcatctggctgcaagagccccttgtgcaggatgaggggaccaaagaagaggacaaagccctggcttgtagccccatccaaataacagcggggaggaggcggagcctgtggtacgcaacccattaccccactgatgagagaaaacttttatccatgacccaggatgactacaaaccatctgatggcctgctggtgactgtgaacggcaaccccgtggattaccacaccatccacccaagcctgcccatggagaacggccctggcaaagccgacctctactccacccctcagtaccggtgggagccctctgatgaatcctcagaaaagcgagaggaggaagaggaagagaaagaagaatttgaagaagaaaggagccgtgaggaaaaaagaagtatcaaagttcatgccatggtctccgtattccaatttattatgaaacaaagttacatctgtgccctcatagctatgatggcctggagcatcacctatcacagctggctgaccttcgtgctgctgatctggtcgtgcactctttggatgattcgcaacagaagaaaatatgccatgatcagctctcccttcatggtggtttatggaaacctattgttgatattacagtatatatggagttttgaacttcctgaaattaaaaaagttccaggatttttagaaaagaaagagccaggagaacttgcttccaaaatccttttcaccattactttttggctactgctgaggcagcacctcacagagcaaaaagctctgcaagaaaaggaagctcttttatcggaagtcaaaattggcagtcaggaaaatgaagaaaaagatgaggaacttcaagatatacaagtggaaggagagcccaaagaggaggaagaagaggaagcgaaggaagagaagcaagagagaaagaaggtagagcaagaggaagctgaagaagaagatgagcaggacatcatgaaagtcctgggcaatctggtggtggccatgttcatcaagtactggatctacgtctgcggaggcatgttcttcttcgtcagcttcgagggtaaaatcgtaatgtacaaaatcatctacatggtgctgttcctgttctgtgtggccctataccaggtgcactatgaatggtggaggaaaattctaaaatatttttggatgtcagtggttatttacactatgctggtgcttatctttatatacacatatcagtttgagaacttcccaggcctgtggcaaaatatgactggactgaaaaaagaaaagcttgaggatcttggcttaaagcagtttactgtggctgaactattcactcgcatattcatcccaacctcctttctgctggtgtgcattttacacctgcactacttccatgaccggttccttgaactcacagacctcaagtccattcccagcaaagaagacaacaccatctacagccatgccaaagtcaatggtcgcgtatatctaataataaatagcatcaagaaaaaattaccaatccaccaaaatgaactggcccacccggaaggaagcctcccggacctcaccatgatgcatctgactgccagcctggagaagccggaggtgaggaagttggctgagcctggggaggagaagcttgagggctactctgaaaaagcccagaagggtgatcttgggaaagacagcgaggagtcagaggaggacggagaggaagaggaggaatccgaggaggaggaagaaacatcagacttaaggaacaaatggcacctggtgattgaccgcctcactgtgctcttcttaaaattcctggagtattttcacaagctgcaggtgttcatgtggtggattttggagttgcacatcatcaaaatcgtttcctcttacattatctgggtttctgtgaaagaggtgtctctgttcaactatgtatttttgatttcttgggcttttgctctgccgtacgccaagctgcgccgtctggcttcaagtgtctgcacagtctggacgtgtgtgatcatcgtctgcaaaatgttgtaccagctccaaaccattaagcctgagaacttctctgttaactgttccttgccaaatgaaaatcaaacaaacatcccctttaatgagttgaacaagtctctgctctacagcgctcctatcgatcctacagagtgggtcggcctgcggaagtcttcgcctctgctagtctacctgaggaataacctcctgatgctggctatcctggcctttgaagtcaccatttaccgccatcaggaatactatcgaggtcgaaataacctgacggcccctgtgtctagaactatctttcatgacattacaagactacatctagatgatggacttattaattgtgccaaatatttcattaattacttcttttacaagtttggtctggagacctgtttcctaatgtcagttaacgtcattggccagcgaatggatttctatgccatgatccacgcctgctggctgatcgctgtcttatatagacgcagaaggaaagccatcgcagagatctggcccaagtactgctgcttcctggcatgcatcatcaccttccagtatttcatctgcattggcatcccacctgctccttgccgagattacccgtggagattcaagggtgccagcttcaatgacaacatcataaagtggctgtacttcccagatttcattgtgcggcccaaccctgtgtttctcgtctatgacttcatgctgcttctgtgtgcctccttacaacggcagatttttgaggatgagaacaaggctgcagtgcgaatcatggcaggtgacaatgtcgagatctgcatgaaccttgatgcggcctccttcagccaacataaccctgtgccagattttattcactgcagatcttacttagacatgtccaaagtgatcatcttcagctacctcttctggtttgtgctcaccatcatcttcatcactgggaccaccaggatcagcatcttttgcatggggtacctggtggcctgtttctacttcctgctctttgggggcgatttgctgttgaaacccatcaagagcatcctgcgctactgggactggctgatcgcatacaacgtttttgtgattacgatgaaaaatatcctgtcaataggagcatgtggatacattggaacattggtgcacaatagttgttggttgatccaggctttcagcctggcctgcacagtcaaaggctatcaaatgcctgctgctaattcaccctgtacacttcccagtggggaagcaggaatcatttgggacagcatatgttttgccttcctcctgctgcaaagaagagttttcatgagttattattttctacatgttgtggctgatataaaagcttcccagattctggcatcaagaggagctgaacttttccaggccacaattgtaaaagctgtaaaggcaagaattgaggaagagaagaagtccatggaccagctgaagcgacagatggatcgcatcaaggccaggcaacagaaatataaaaagggtaaggagaggatgctgagcttgacccaggagccaggggaaggccaggacatgcaaaaactctctgaagaggatgatgaaagagaagcagacaaacagaaagccaagggcaaaaaaaagcagtggtggcggccttgggttgatcatgcttccatggtcaggagtggagattattatttgtttgaaacggatagtgaagaggaggaagaggaagaattaaagaaggaagatgaagaacctccacgaaggtcagcattccagtttgtttatcaagcctggattactgatcctaaaacagcactccgacaaagacacaaagagaaaaaaaggtctgcaagagaagaacggaaacgaaggcggaaaggatccaaggagggtcctgtggaatgggaagaccgggaggatgaaccaatcaaaaagaaatccgatggaccagataatatcatcaagaggatatttaatattttgaaatttacctgggtcctatttctggcaacagtggacagtttcactacttggcttaactccatttcaagggagcatattgatatatctacagttctgagaattgaacgatgcatgctgaccagagaaattaagaagggcaatgttccaactcgggagagcatccacatgtactatcagaaccacatcatgaacctttccagagagtcgggactggacaccattgacgagcatcccggagctgcttcaggtgcacagacagcccacaggatggatagtttagattcacatgacagtatctccagcgagcccacgcagtgtaccatgctgtactcacgccaggggaccactgagaccatcgaggaggtggaggctgagcaggaggaggaggcagggagcacggcgcctgagcccagggaggccaaggagtacgaggccactgggtacgatgtgggagccatgggtgccgaggaggccagcctcaccccagaggaagagctgacacagttctccaccttggacggggatgtggaggccccaccctcctacagcaaggctgtgagcttcgagcatctgtccttcggctcgcaggacgactctgcaggcaagaaccgtatggcagtcagcccggacgacagccgcaccgacaagctggggtccagcatcttacctcccctgacccatgagctgacggccagcgagctgctgctgaaaaagatgtttcacgacgatgagcttgaagagtcagagaaattctacgtggggcagccccgatttctgctgctcttctatgccatgtacaataccctggtggcccgctcggagatggtgtgctacttcgtgatcatcctcaaccacatggtctctgcctccatgatcacgctcctgcttcccatcctcatcttcctctgggccatgttgtccgtccccaggcccagccgccggttctggatgatggccatcgtctatactgaggtggcaattgtagtcaagtatttcttccaatttgggttctttccctggaataagaatgtggaggtgaacaaagataaaccgtatcaccccccaaacatcataggagtggaaaagaaggaaggttatgttctctatgacctcatccagctcctggctctgttctttcatcgatcaattttgaagtgccatggcttatgggatgaagatgacatgactgaaagtggcatggccagggaggaatcagatgatgagctctccctcggtcatggcaggagggactcctccgattctctcaagtccatcaacctggccgcgtctgtggagtcagtgcatgtgaccttcccggagcagcagacagctgtccggaggaagcgctccggcagcagctccgagccatcccagagatccagcttttcttcaaacagatcccaaagaggcagcacaagcacccgaaacagcagtcaaaaaggaagcagtgttttgagtattaagcaaaaaggcaaaagggaactttatatggaaaagcttcaagaacatttaatcaaagcaaaagcctttaccataaagaagacgctggagatctatgtgcccatcaaacagttcttttacaacctcatccacccggagtatagcgccgtgactgacgtgtatgtactcatgttcctggctgacactgtggacttcatcatcattgtcttcggcttttgggcctttgggaaacactcagcagctgcagacatcacctcttcactgtcagaggaccaggtcccggggccgtttttggtgatggtcctcattcagtttggaaccatggtggtggaccgagccctctacctcaggaagactgtactgggaaaggtcatcttccaggtcattcttgtgttcggaattcacttctggatgttcttcatcttacctggtgtgactgagaggaaattcagccagaacctggttgcccagctttggtactttgtgaaatgtgtttacttcgggttgtctgcttaccagatccgttgtggctacccaacgcgagtcctggggaacttcctcaccaagagctacaattacgtcaacctcttcttattccaagggtttcgcctcgtgccctttttgactgagctgagggcagtgatggactgggtgtggacggacacaactttgagcctgtccagctggatctgtgtggaggacatctatgctcacatattcatcctgaagtgttggcgggagtcggagaagagataccctcagccacggggccagaagaagaagaaagtggtgaagtatggcatgggaggaatgatcatcgtcctgctcatctgcattgtctggtttcctcttctcttcatgtctttgatcaaatctgtggctggggtcatcaaccagcccctggacgtctccgtcacaattaccctgggagggtatcagcctattttcacaatgagtgcccaacaaagccagttgaaagttatggaccagcagagctttaacaaatttatacaagctttttctagggacaccggtgctatgcaatttctggaaaattatgaaaaagaagacataacagtagcagaactggaaggaaactcaaattctttgtggaccatcagcccacccagtaagcagaaaatgatacacgaactcctggaccccaatagtagcttctctgttgttttttcatggagtattcagagaaacttaagtctgggtgcaaaatcggaaatagcaacagataagctttcttttcctcttaaaaatattactcgaaagaatatcgctaaaatgatagcaggcaacagcacagaaagttcaaaaacaccagtgaccatagaaaagatttatccatattatgtgaaagcacctagtgattctaactcaaaacctataaagcaacttttatctgaaaataatttcatggatattaccatcattttgtccagagacaatacaactaaatataacagtgagtggtgggttctcaacctgactggaaacagaatatacaatccgaactctcaggccctggaactggtggtcttcaatgacaaagtcagtcccccaagtctggggttcctggctggctatggtattatgggattatatgcttcagttgtccttgtgattgggaaatttgtccgtgaattcttcagtgggatttctcactccatcatgtttgaagagcttccaaatgtggatcgaattttgaagttgtgcacagatatttttttagttcgagagacaggagaactggagctagaagaagatctctatgccaaattaatattcctatatcgctcaccagagacaatgatcaaatggactagagaaaaaacaaattga

SEQ ID NO: 166176 - DNA, 532 bp, Homo sapiens
  Payload ID: 12709
  Gene Symbol: PIEZO2
  Gene Name: piezo-type mechanosensitive ion channel component 2
  ENST ID: ENST00000579112
  CDS Start-End: 1-532
cactgctggacatttgattggactttatttataccagttccaattctttcaagaggcagttccacccaatgactactatgcaaggttgtttggtatcaagtcagtaattcaaacggactgttcaagtacttggaagatcatagtgaacccggacctgtcgtggtaccaccacgccaaccctatcctcctgctggtgatgtactacactctggccactctgatccgcatctggctgcaagagccccttgtgcaggatgaggggaccaaagaagaggacaaagccctggcttgtagccccatccaaataacagcggggaggaggcggagcctgtggtacgcaacccattaccccactgatgagagaaaaggcctgctggtgactgtgaacggcaaccccgtggattaccacaccatccacccaagcctgcccatggagaacggccctggcaaagccgacctctactccacccctcagtaccggtgggagccctctgatgaatcctcagaaaagcgagaggaggaagaggaagag

SEQ ID NO: 166177 - DNA, 3682 bp, Homo sapiens
  Payload ID: 12709
  Gene Symbol: PIEZO2
  Gene Name: piezo-type mechanosensitive ion channel component 2
  ENST ID: ENST00000579949
  CDS Start-End: 1-460
tataaaagcttcccagattctggcatcaagaggagctgaacttttccaggccacaattgtaaaagctgtaaaggcaagaattgaggaagagaagaagtccatggaccagctgaagcgacagatggatcgcatcaaggccaggcaacagaaatataaaaagggtaaggagaggatgctgagcttgacccaggagccaggggaaggccaggacatgcaaaaactctctgaagaggatgatgaaagagaagcagacaaacagaaagccaagggcaaaaaaaagcagtggtggcggccttgggttgatcatgcttccagtaggttttctcgatccccttacaacctcatcgactctaacccttatatccttgaccagaattcaggcgttcccgtgacccatgtgttccatgcatggtttgatccttgtgacttgatagggggtcggagtgtaggaaaattttaatgtcagtgggtctttgagcccggggtccaattcttccagagacatcagcacagacgttctgacattcttgtgctggctgtagaaagccaaacacgtggcttatagactctagggcataatttatgggctcagaaagggaagaagaattgaatattatattgcccaattctgaggtcgagagccctattcacatacatattttatggctaaatacccttactaaaaatgagcttgggctccaccttggactctgatttaaggatgatcattctattcaaagggtcagtgaccctttctctgtaaggcactaggcatggatgccagtgagcctcccctcccctcattcccacagctttgattttatttgcatttaaggatttttggcaatttattaaatagaaagatgagggataacttaaaatgcactcactttcttactacgcctcctccccaatttcaaaaaggcactctaaattccaatgcccacatgtggcacagccttcaagccacctgatgctcagagacgaccaatgaacagcaaaaaccagaaaactatttttaaaagcagatcctgatagccacatagaatgcagtgtgtttccctcctgatcataaagatgaatgaggaattctggaactcagtggctatatttgctctgcttagcaaagaaaatatcactataggtcgatgggattatagtggaatgccccattccaatccagtcctctttaaatttcatagaatattgaataattattattttgcaagttacgtataatgtcgtcttcagtctttacatgatgtctccatacttgcagctaatctaactggacaaggaatatcactgagacaaataacatcacacaattgtaggagtgaatctactaggaggatatttagaatcactaggaaatcaaataaagtagaacttcttcccatacctaattattggtttcacatagatctgacgttggcctctctctcccaagacataattttctaaatcggcaagctagtttttaataaagcaatatttgaaatttgcttggtatatctggatgtaatcaaatttaatcccaaatattgaatttcaacattacaacaaaaaaagaaaaacacaagattagaaagagttttatttaattttctccccaagtccaaagacaaaagattccagtcggagtccagtgtgactcttctatttactgttcagggtatgacagtcacgctaacaatctggtaaatgcagtgcacaaatgcctatttctatcaagtcacaagtaaactgtgcttttctttatgtttttaaagggcctctgctaatttagagagacctatccatttcaaaattgtgtcatattgaatgttttttcacctcacctggggtaaattcccaccgcggtcattgtggttgcctttcctttcctcatgtaaaaatcgcatttgcaaaggaattggatatggtctgtgataactatcttacaagttgtaataatataaagaacttcctgtgaatgttgttgactttagattttctggttcatttcaccctcattatatcaagttattgaagattgatgttaaactacatgtgccttgttacaaaaccttatgatgcaataatgcagaaatgtgtgtaattcatagtttggaatcatattcagactgtggtgttaaattttttgctgcaaaatgtatttctttttacaagtgaatgaagaatgaaagggaaagaatgtgtgctgtattgttgtgtctatgatgagttccagaatttatctttagatctggaagtactttgttggaagcccttaatttgatcttttgagtaactgggctttcaaacagctatttcttagagaagccaagtgtaagaattagtgtagttggatacacatgtgtaaatctattgacaatacaaaaatgttgctatgttcttgatgttattagtaagcagtgaagattttagcatggtctgtatagggacagatttcctacttccatacctatgtacacacacaagattgcattattgctgttcaatgataccttccattccaataccttatgtttcaatattggttcagtactgcctaaattaataccaagcttcatcttattgataaatatctgaaacagaaggccaagttctgaggataaaagtagtggaatttaaaaagttaatttccaacttagtaatttagcagtaacatcaacatccatgatatgtatgtggacacaggctggagtcaggttcgccatctgagctaacaaacacgtgtgtaagagcttttctactcactaatttaacagatggcatgaatgaaaatgtgctctgtcattttcctagtttcatttcaataacattttataaggaaataagagacttttttacattttcttttttcttatgtgataattccactagctcacataaatattggtggtttctaatggtaaaatcaatgttaccactgcttgagatgaaaaccttttgaacttgtccatatgaataaaagttatcgaaggtatgattgaatacaatttaagctaatgttgattttggaacctataatgagggtaaaattctcgatcttataatagtctgtgttttcccaaacgaccacgtgatgtagagtccacatcactttcctgcaaatctctcggcttatgtgaaggcattactttaatggtcttcttcactatcaaatgtaatgctgtaactttggtttgttcttgcttattctcacttgtgttgtattgcatttatttcccaaggcctggacccagtactctgggcctggttctttcttcaaaatgaaaataacgaatgacagtgcttctgttcaaggatataaggcccaattcacccactgtgtatcttcatgaatggaggcttcagatttttctgaaatcgtgggcaaaattacttaacttttggccatgtgaagtgatattcaagcaattaattttaaacaagccaaggttttccattaccttacaatgtataggcccaaaagacaacttaagatcaaaatatgtcatccaaaagatgcctgagcatttgaaaacctgaatataatttgaaaatatgttttcctgcgatgatgggacattgcttgtagcatcagaaatgtatatgttgggcctcttttctctggtagactttaaataatgatcaaactgataaagatttaatttattaaatttccttaaatctc

SEQ ID NO: 166178 - DNA, 2687 bp, Homo sapiens
  Payload ID: 12710
  Gene Symbol: PIF1
  Gene Name: PIF1 5'-to-3' DNA helicase
  Uniprot ID: Q9H611
  ENST ID: ENST00000268043
  CDS Start-End: 96-2021
atttgaaaaatttctagtttcggagcttagccacaggccggctacgatctgcttgttcatctgagtgtcggcacaaaccagcagaggcggtgacgatgctctcgggcatagaggcggcggcaggggaatatgaggactcggagctgcggtgccgcgtggctgtggaggagctgagcccgggcgggcagccgcgaaggcgccaggccctgcgcaccgcggagctgagcctgggtcgcaacgagcgccgcgagttgatgctgcggctgcaagcgccagggcccgcggggcggccgcgctgctttcctctgcgcgccgcgcgcctcttcacgcgtttcgccgaggccgggcgcagcaccctgcggctccccgcccacgacacccccggggccggcgcagtgcagctgctgctctcggactgccccccagaccgcctgcgccgcttcctgcgcacattgcgcctcaagctggctgcggccccgggtcccgggccggcctccgcccgagcgcagctgctgggcccgcggccccgcgacttcgtcaccatcagccctgtgcagcccgaggagcggcggctcagggcggccacccgggttccggacactacgctggtgaagcggcctgtggagccccaggctggggccgagcctagcacagaagccccaaggtggcccctgcctgtgaagaggctgagcttgccctccaccaagccacagctttctgaggaacaggctgctgtgctgagggccgtcctgaaaggccagagcatcttcttcactgggagtgcaggaacagggaagtcatatctgctaaagcgaatcctgggctcactgccccccacaggcactgtggccactgccagcactggggtggcagcctgccacatcgggggcaccaccctccatgcctttgcaggcatcggctcaggccaggctcctctagcccagtgtgtggccctggcccaaaggccaggcgtgcggcagggctggctgaactgccagcggttggtcattgacgagatctcaatggtggaggcagacctgtttgacaaactggaggccgtggccagagctgtccggcagcagaacaagccattcggagggatccagctcatcatctgtggggactttctgcagctgccacctgtgaccaagggctcccagcccccacggttctgcttccagtccaagagctggaagaggtgtgtgccagtgaccctggagctgaccaaggtgtggaggcaggcagaccagaccttcatctctctactgcaggccgtgaggctaggcaggtgttcagatgaggtgacccgccagctccaggccacagcttcccacaaggtggggcgagatgggattgtggccacgaggctctgcacccaccaggatgatgtggccctcaccaacgagaggcggcttcaggagctgccaggtaaggtacacagatttgaggctatggacagcaaccctgagctggccagtaccctggatgcccagtgtcctgttagccagctccttcaactaaagctgggggcccaggtgatgctggtgaaaaacttatcggtgtctcggggcctggtgaatggtgcccgaggggtggtagttgggttcgaggcagaagggagagggctaccccaggtgcggttcctgtgtggagtcactgaggtcatccacgctgaccgctggacggtgcaggccaccgggggccagctcctcagtcggcagcagctgcccctccagctggcctgggcgatgtccatccacaagagccaaggcatgaccctggattgtgtggagatttctctgggccgtgtgtttgccagtggccaggcctatgtggccctttctcgggcccgcagcctgcagggcctacgtgtgctggactttgaccccatggcggttcgctgtgacccccgtgtgctgcacttctatgccaccctgcggcggggcaggagcctcagtctggagtccccagatgatgatgaggcagcctcagaccaggagaacatggacccaatcctctgagcctcacccacaaagagaagacaaagggtggcctgtggcctccccgtcctcctgctccctagtggcccagggccccagggaataactggagtaggcaggcagtgtccccttctgtattttttagggactctcagcctcctggcagggttaaagggagagtactttaaacccatataccagctgtgcttcagtttctctcactttgccctgggtaagctgctgtagggtcagaagtaaccctttctgtgccagttgagaatgagcctgtgtggtagctgatgtcagaggacaaagctctctgcaagggctggacacagagctgcagagtcctgaacatccctcctttcaggctgcagaagggagaggcaatgaagacaggtgctccggaagcagcatcagggctcttggaggggactggtggggactcaggctgggtgcagcctccaaacagagaacggaacttaggtgtgtctctacagctaggcccagcctagcccagcccagaacaaacacccttcagagcctaaccaaagaacataagctgcaaaatgtgcacccatattttaagctgctttttcaggggataaatagtgtttggggacattgaaatggatgttctcaggttgtatttatttcggacaaataaactagagaattgtgtaaaaa

SEQ ID NO: 166179 - DNA, 2278 bp, Homo sapiens
  Payload ID: 12710
  Gene Symbol: PIF1
  Gene Name: PIF1 5'-to-3' DNA helicase
  Uniprot ID: Q9H611
  ENST ID: ENST00000333425
  CDS Start-End: 96-2219
atttgaaaaatttctagtttcggagcttagccacaggccggctacgatctgcttgttcatctgagtgtcggcacaaaccagcagaggcggtgacgatgctctcgggcatagaggcggcggcaggggaatatgaggactcggagctgcggtgccgcgtggctgtggaggagctgagcccgggcgggcagccgcgaaggcgccaggccctgcgcaccgcggagctgagcctgggtcgcaacgagcgccgcgagttgatgctgcggctgcaagcgccagggcccgcggggcggccgcgctgctttcctctgcgcgccgcgcgcctcttcacgcgtttcgccgaggccgggcgcagcaccctgcggctccccgcccacgacacccccggggccggcgcagtgcagctgctgctctcggactgccccccagaccgcctgcgccgcttcctgcgcacattgcgcctcaagctggctgcggccccgggtcccgggccggcctccgcccgagcgcagctgctgggcccgcggccccgcgacttcgtcaccatcagccctgtgcagcccgaggagcggcggctcagggcggccacccgggttccggacactacgctggtgaagcggcctgtggagccccaggctggggccgagcctagcacagaagccccaaggtggcccctgcctgtgaagaggctgagcttgccctccaccaagccacagctttctgaggaacaggctgctgtgctgagggccgtcctgaaaggccagagcatcttcttcactgggagtgcaggaacagggaagtcatatctgctaaagcgaatcctgggctcactgccccccacaggcactgtggccactgccagcactggggtggcagcctgccacatcgggggcaccaccctccatgcctttgcaggcatcggctcaggccaggctcctctagcccagtgtgtggccctggcccaaaggccaggcgtgcggcagggctggctgaactgccagcggttggtcattgacgagatctcaatggtggaggcagacctgtttgacaaactggaggccgtggccagagctgtccggcagcagaacaagccattcggagggatccagctcatcatctgtggggactttctgcagctgccacctgtgaccaagggctcccagcccccacggttctgcttccagtccaagagctggaagaggtgtgtgccagtgaccctggagctgaccaaggtgtggaggcaggcagaccagaccttcatctctctactgcaggccgtgaggctaggcaggtgttcagatgaggtgacccgccagctccaggccacagcttcccacaaggtggggcgagatgggattgtggccacgaggctctgcacccaccaggatgatgtggccctcaccaacgagaggcggcttcaggagctgccaggtaaggtacacagatttgaggctatggacagcaaccctgagctggccagtaccctggatgcccagtgtcctgttagccagctccttcaactaaagctgggggcccaggtgatgctggtgaaaaacttatcggtgtctcggggcctggtgaatggtgcccgaggggtggtagttgggttcgaggcagaagggagagggctaccccaggtgcggttcctgtgtggagtcactgaggtcatccacgctgaccgctggacggtgcaggccaccgggggccagctcctcagtcggcagcagctgcccctccagctggcctgggcgatgtccatccacaagagccaaggcatgaccctggattgtgtggagatttctctgggccgtgtgtttgccagtggccaggcctatgtggccctttctcgggcccgcagcctgcagggcctacgtgtgctggactttgaccccatggcggttcgctgtgacccccgtgtgctgcacttctatgccaccctgcggcggggcaggagcctcagtctggctgcagaagggagaggcaatgaagacaggtgctccggaagcagcatcagggctcttggaggggactggtggggactcaggctgggtgcagcctccaaacagagaacggaacttaggtgtgtctctacagctaggcccagcctagcccagcccagaacaaacacccttcagagcctaaccaaagaacataagctgcaaaatgtgcacccatattttaagctgctttttcaggggataaatagtgtttggggacattgaaatggatgttctcaggttgtatttatttcggacaaataaactagagaattgtgtaaaaa

SEQ ID NO: 166180 - DNA, 2677 bp, Homo sapiens
  Payload ID: 12710
  Gene Symbol: PIF1
  Gene Name: PIF1 5'-to-3' DNA helicase
  Uniprot ID: Q9H611
  ENST ID: ENST00000559239
  CDS Start-End: 91-2016
gccacaggccggctacgatctgcttgttcatctgagtgtcggcacaagtgagtgtctgcccgaacccagagaccagcagaggcggtgacgatgctctcgggcatagaggcggcggcaggggaatatgaggactcggagctgcggtgccgcgtggctgtggaggagctgagcccgggcgggcagccgcgaaggcgccaggccctgcgcaccgcggagctgagcctgggtcgcaacgagcgccgcgagttgatgctgcggctgcaagcgccagggcccgcggggcggccgcgctgctttcctctgcgcgccgcgcgcctcttcacgcgtttcgccgaggccgggcgcagcaccctgcggctccccgcccacgacacccccggggccggcgcagtgcagctgctgctctcggactgccccccagaccgcctgcgccgcttcctgcgcacattgcgcctcaagctggctgcggccccgggtcccgggccggcctccgcccgagcgcagctgctgggcccgcggccccgcgacttcgtcaccatcagccctgtgcagcccgaggagcggcggctcagggcggccacccgggttccggacactacgctggtgaagcggcctgtggagccccaggctggggccgagcctagcacagaagccccaaggtggcccctgcctgtgaagaggctgagcttgccctccaccaagccacagctttctgaggaacaggctgctgtgctgagggccgtcctgaaaggccagagcatcttcttcactgggagtgcaggaacagggaagtcatatctgctaaagcgaatcctgggctcactgccccccacaggcactgtggccactgccagcactggggtggcagcctgccacatcgggggcaccaccctccatgcctttgcaggcatcggctcaggccaggctcctctagcccagtgtgtggccctggcccaaaggccaggcgtgcggcagggctggctgaactgccagcggttggtcattgacgagatctcaatggtggaggcagacctgtttgacaaactggaggccgtggccagagctgtccggcagcagaacaagccattcggagggatccagctcatcatctgtggggactttctgcagctgccacctgtgaccaagggctcccagcccccacggttctgcttccagtccaagagctggaagaggtgtgtgccagtgaccctggagctgaccaaggtgtggaggcaggcagaccagaccttcatctctctactgcaggccgtgaggctaggcaggtgttcagatgaggtgacccgccagctccaggccacagcttcccacaaggtggggcgagatgggattgtggccacgaggctctgcacccaccaggatgatgtggccctcaccaacgagaggcggcttcaggagctgccaggtaaggtacacagatttgaggctatggacagcaaccctgagctggccagtaccctggatgcccagtgtcctgttagccagctccttcaactaaagctgggggcccaggtgatgctggtgaaaaacttatcggtgtctcggggcctggtgaatggtgcccgaggggtggtagttgggttcgaggcagaagggagagggctaccccaggtgcggttcctgtgtggagtcactgaggtcatccacgctgaccgctggacggtgcaggccaccgggggccagctcctcagtcggcagcagctgcccctccagctggcctgggcgatgtccatccacaagagccaaggcatgaccctggattgtgtggagatttctctgggccgtgtgtttgccagtggccaggcctatgtggccctttctcgggcccgcagcctgcagggcctacgtgtgctggactttgaccccatggcggttcgctgtgacccccgtgtgctgcacttctatgccaccctgcggcggggcaggagcctcagtctggagtccccagatgatgatgaggcagcctcagaccaggagaacatggacccaatcctctgagcctcacccacaaagagaagacaaagggtggcctgtggcctccccgtcctcctgctccctagtggcccagggccccagggaataactggagtaggcaggcagtgtccccttctgtattttttagggactctcagcctcctggcagggttaaagggagagtactttaaacccatataccagctgtgcttcagtttctctcactttgccctgggtaagctgctgtagggtcagaagtaaccctttctgtgccagttgagaatgagcctgtgtggtagctgatgtcagaggacaaagctctctgcaagggctggacacagagctgcagagtcctgaacatccctcctttcaggctgcagaagggagaggcaatgaagacaggtgctccggaagcagcatcagggctcttggaggggactggtggggactcaggctgggtgcagcctccaaacagagaacggaacttaggtgtgtctctacagctaggcccagcctagcccagcccagaacaaacacccttcagagcctaaccaaagaacataagctgcaaaatgtgcacccatattttaagctgctttttcaggggataaatagtgtttggggacattgaaatggatgttctcaggttgtatttatttcggacaaataaactagagaattgtgt

SEQ ID NO: 166181 - DNA, 371 bp, Homo sapiens
  Payload ID: 12711
  Gene Symbol: PIGBOS1
  Gene Name: PIGB opposite strand 1
  ENST ID: ENST00000565225
  CDS Start-End: 283-371
gtggtggcctccttgcggtttcctttcgccgtttccgaaccgagggattgctactcgcctttggcttggcggtctctgtgctcgggggtccgaaaactgctggaaggcccccggtctctggaggggagcaggcggtagcgagtttagtgacgtggagcaggcgcagaacagtcggaggtacctgagtggttattaaaaacggtaacgatttgaagagatttcctgggtgtggagtgtgactttccaaaaccagcttttccttgagctgtatttgttgcagcaatgtttaggagattgacttttgcacaactgctttttgccactgtccttggaattgctggaggagtatatatttttcaaccagtatttga

SEQ ID NO: 166182 - DNA, 801 bp, Homo sapiens
  Payload ID: 12711
  Gene Symbol: PIGBOS1
  Gene Name: PIGB opposite strand 1
  Uniprot ID: A0A0B4J2F0
  ENST ID: ENST00000567948
  CDS Start-End: 331-495
gctcgcaagcccggaagtaaccgggaacgggcaacttcgtagctcccacccgacgtggtggcctccttgcggtttcctttcgccgtttccgaaccgagggattgctactcgcctttggcttggcggtctctgtgctcgggggtccgaaaactgctggaaggcccccggtctctggaggggagcaggcggtagcgagtttagtgacgtggagcaggcgcagaacagtcggaggtacctgagtggttattaaaaacgatttgaagagatttcctgggtgtggagtgtgactttccaaaaccagcttttccttgagctgtatttgttgcagcaatgtttaggagattgacttttgcacaactgctttttgccactgtccttggaattgctggaggagtatatatttttcaaccagtatttgaacagtatgccaaagatcagaaggaattaaaagaaaagatgcagttggtacaagaatcagaagagaagaaaagttaatactacatggagttaggcctggcgcagtggctcacgcctgtaatcccagcactttgggaggccgaggcgggtggatcaggtggtcaggagttcaagaccagcctgaccaacatggtgaaaccctgtctctactgaaaatacaaaaatcagccaggcttggtggcatgcgcctgtaatcccagctacttgggaggctgaggcaggagcatcacttgaacctgggaggcagaggtggcagtgagtcaagatcacgctgctgcactccagcctgggtgacagagcgagactccatctaaaaaaacaaaa

SEQ ID NO: 166183 - DNA, 866 bp, Homo sapiens
  Payload ID: 12711
  Gene Symbol: PIGBOS1
  Gene Name: PIGB opposite strand 1
  Uniprot ID: A0A0B4J2F0
  ENST ID: ENST00000436697
  CDS Start-End: 258-422
ggcttggcggtctctgtgctcgggggtccgaaaactgctggaaggcccccggtctctggaggggagcaggcggtagcgagtttagtgacgtggagcaggcgcagaacagtcggaggtacctgagtggttattaaaaacggtaacggtaattgtagacgtcagtgttggtgttaacatttcagatttgaagagatttcctgggtgtggagtgtgactttccaaaaccagcttttccttgagctgtatttgttgcagcaatgtttaggagattgacttttgcacaactgctttttgccactgtccttggaattgctggaggagtatatatttttcaaccagtatttgaacagtatgccaaagatcagaaggaattaaaagaaaagatgcagttggtacaagaatcagaagagaagaaaagttaatactacatggagttaggcctggcgcagtggctcacgcctgtaatcccagcactttgggaggccgaggcgggtggatcaggtggtcaggagttcaagaccagcctgaccaacatggtgaaaccctgtctctactgaaaatacaaaaatcagccaggcttggtggcatgcgcctgtaatcccagctacttgggaggctgaggcaggagcatcacttgaacctgggaggcagaggtggcagtgagtcaagatcacgctgctgcactccagcctgggtgacagagcgagactccatctaaaaaaacaaaaagcaaaaaaacccacaaatacctcatggagatgaactgtaataattgcttaaagttccatttaattatgttaactctaatctagcaaaaacatagatgtacttaaaaataaatcatggataatgattttttaacctaa

SEQ ID NO: 166184 - DNA, 3100 bp, Homo sapiens
  Payload ID: 12712
  Gene Symbol: PGBD1
  Gene Name: piggyBac transposable element derived 1
  Uniprot ID: Q96JS3
  ENST ID: ENST00000259883
  CDS Start-End: 406-2835
gtacccgcccagctgctggaggcgccggcagcgcccgccagacccgccagcccagcggcccgggctctggggaaaccggcgctcccgacaggggagcaccgggcctctgagctccctcgggagcctttcacgaggtcagctacgtctttgttgtgcgcgttcctgaacttttggtccattaaccaacaattagacacgccggtattcagtgcctggcgcggtgctagatgctgggtgtaatctcagaaaaatacattcaggggcgcgcctgagggtgctggctgctggcatctcaggtgctttacgtgcattcgtgaagaagcccatcagtatttcttgaataccagatctctatttctgaatatagaccccaagctaagtgaagctttagcctctaagctcaacatgtatgaagctttgccaggccctgctcctgaaaatgaagatggccttgtgaaagtgaaggaggaagatcccacctgggagcaggtgtgcaactcacaggagggcagctcccacactcaggagatttgccgcctgcgctttcggcacttctgctaccaggaggctcacggaccccaggaagctctggcccaactccgagaactttgtcatcaatggctgagaccggagatgcacaccaaggaacagataatggaactgctggtgctggagcagttcctgaccatcctgcccaaggagctccagccctgtgtgaagacatatcctctggagagtggagaggaggcagtgacagtgctggagaatctagagacaggaagtggagacacaggacaacaggcctctgtctatattcagggacaggacatgcacccaatggtggcagaatatcaaggagtctctttggagtgtcagagcctccagctcctgcctgggataaccaccctgaagtgtgaacctccacagcgtcctcaagggaacccccaagaagtgagtgggcctgttccccacggatcagctcatctccaggaaaaaaaccccagagacaaggctgtagtgcctgtgtttaacccagtcaggtcccagacattggtgaagactgaggaagaaacagcccaggccgttgctgcagagaagtggtcacatctgagtctgactcggaggaacctctgtgggaactcagctcaggagacagttatgagcctcagtccgatgactgaagaaattgtaactaaagatagattgtttaaagcaaagcaagaaacttctgaagaaatggaacaaagtggagaagcctcaggaaagcccaacagagagtgtgcaccccagattccttgtagtactcctattgctactgaaaggacagttgcacatttgaacactctgaaggaccgtcacccaggtgatttgtgggcccgcatgcacatctcatccctggaatatgctgcaggagacattacccgaaaagggagaaaaaaagacaaagctcgagtgagtgaactgctccaaggcctctcattctctggtgactcagatgtggaaaaagataatgagcctgagatccagcctgctcaaaagaagttaaaggtatcatgtttcccagaaaagagttggaccaaaagagacattaaacccaattttccaagctggtcagcactggattctggacttttgaatctcaagagcgaaaagttgaacccagtagagctttttgaattattttttgatgatgaaacattcaacttaattgtcaatgaaaccaataattatgcttctcagaaaaatgtcagcttggaagtcacagttcaggaaatgaggtgtgtgtttggtgtcttacttttgagtggatttatgaggcatcctagaagggaaatgtattgggaagtctctgacaccgatcagaacctggttagagatgcaatcagaagggacagatttgaattgattttctcaaacctgcactttgcagataatggccacctagatcaaaaagataagtttacaaagttgagacctctcataaaacaaatgaataaaaatttcctcttgtatgctcccctggaagaatactattgctttgataagtcaatgtgtgaatgctttgatagtgaccaattcctgaatggaaagcctattagaattggctataaaatttggtgtggtacaaccacacagggttatctggtttggtttgaaccctatcaagaagaatcaactatgaaggtagatgaggatcctgatcttgggttaggtggaaatctagtgatgaacttcgctgatgttcttttagagagaggtcagtatccctatcacctgtgttttgatagcttctttacaagtgtcaaattgttgtcagccttgaaaaagaagggggtgagggcaacaggaacaattcgtgagaacaggaccgaaaaatgtccccttatgaatgtagaacatatgaaaaaaatgaagagagggtattttgatttccgaatagaagaaaacaatgagataattttgtgtcgttggtatggggatggcattatcagtctgtgctccaatgctgtgggcatagaaccagtcaatgaggtaagctgttgtgatgctgataacgaagaaatccctcagataagtcaaccatccatagtaaaagtgtatgatgaatgcaaggaaggtgtagctaaaatggatcaaattatttcgaaatacagggtgaggataagaagcaagaaatggtactcaattttggtgagctacatgattgatgtagccatgaacaatgcatggcaactacacagagcctgtaacccaggtgcttctctagaccccttggattttcggagatttgttgcacatttctacttggaacacaatgctcatctgtcagattagggtacataaaatggacatagtgcagacattaataagacatagaaaaataataattatacatgctgttgtaccctcccaaagtaaatctgatatatgtaatgaagttattaaataatacttttaaaaatcagacatttatatagagtttcaaagactattgtaacaagtaatgttaaaaattgtctgtgagaatgttgaactgtagtacctttctctatgtcaagttttgtgtcagacatgggaaatcatgtatttgttcaattga

SEQ ID NO: 166185 - DNA, 2136 bp, Homo sapiens
  Payload ID: 12713
  Gene Symbol: PGBD2
  Gene Name: piggyBac transposable element derived 2
  Uniprot ID: Q6P3X8
  ENST ID: ENST00000329291
  CDS Start-End: 148-1926
cgcggccgcgacgcccgacgccaacgcaggcgcagcgctccgattcggcgcggctcatggtccggttcgggctcgcgagtctccgtctggggtagggcaggttcttagactctgtgagtaaagacagcttcatcttcccagttcatcatggcttcaacatccagagatgtcattgctgggagaggtatccactcaaaggtgaagtctgcaaagctgcttgaggttctgaatgctatggaggaggaagagtccaacaacaacagggaagagattttcattgcacctcccgacaatgctgcgggggaattcactgatgaggactcaggggatgaagacagccagcgaggtgctcacctacctggcagtgtgctgcatgcttcagtcctgtgtgaggactctggcaccggggaggataatgacgacctggagctgcagccagccaagaagaggcagaaagcagttgtgaaacctcagcgcatttggaccaaaagagatattcgtccagactttggcagttggactgcatcagatcctcatattgaggatctgaaaagccaagagctgagtcccgtgggcctttttgagttgttttttgatgaaggaacaattaatttcattgttaatgaaaccaatcgttatgcttggcagaaaaatgtcaatttgagtcttacggctcaggaattgaagtgtgttttgggcattttgattttaagtgggtacatctcttatccaaggagaaggatgttctgggaaacctctcccgattcacatcatcatcttgtggctgatgcaattagaagggacagatttgaactaatcttctcatacttacattttgcagataacaacgaacttgatgcaagtgataggtttgccaaggtcagacctctcatcatccggatgaactgcaatttccagaagcatgcacccttggaagagttctacagctttggcgagtctatgtgtgagtactttgggcaccgggggtccaagcagctgcacagggggaagcctgtgcgacttggctacaagatttggtgtgggacaaccagcagaggctacttggtgtggtttgagccctcacagggcacactgtttaccaagccagacaggagcttggatctaggaggcagtatggtaataaaatttgtggatgcgcttcaggagcgtggttttctgccatatcacatattttttgacaaggttttcacaagtgttaaactgatgtccattttgaggaaaaagggggtgaaagccacaggaactgttcgtgagtacaggactgagcgatgtcccctaaaagaccccaaagaactgaaaaaaatgaagaggggttcatttgattacaaagtcgatgagagtgaggagatcatcgtgtgccgctggcacgatagcagcgtggtcaacatttgctccaatgctgtgggcatagagccagtgaggctgaccagtcgtcactctggagcagctaaaacgcggactcaggtccaccagccatcactggtgaagctgtatcaggagaaggtgggtggcgttggtaggatggatcagaatattgccaagtacaaggtgaagatccgaggcatgaagtggtactcaagctttattggctatgtcattgatgctgccctcaacaatgcatggcagctgcatagaatctgctgccaagatgcccaggtggacctccttgccttccggagatacattgcctgtgtgtatctggagagcaatgctgacacaacatctcaagggaggcgaagcaggcggttggagactgagagccgcttcgatatgattgggcactggattatccatcaggacaagaggacccggtgtgccctctgccactcacagaccaacacccggtgtgagaagtgccagaagggtgtccatgccaaatgcttcagggagtaccacatccggtgacatcatgagacatgcttctttggtttataatgagatgtttacagttaaatacagatggcagttgagcacttctgttttgtgttggaaaaaagacctgaatttctaatgacttgattttctattttctccctacccacaatacagttatcttttttattgtgttgtgttatgcctacatgtgatataaattaatatttatattcatttata

SEQ ID NO: 166186 - DNA, 2879 bp, Homo sapiens
  Payload ID: 12713
  Gene Symbol: PGBD2
  Gene Name: piggyBac transposable element derived 2
  Uniprot ID: Q6P3X8
  ENST ID: ENST00000355360
  CDS Start-End: 271-1296
atggaaggccggccgaggtgcagcgagccctctggtgccggacgttgcgcggccgcgacgcccgacgccaacgcaggcgcagcgctccgattcggcgcggctcatggtccggttcgggctcgcgagtctccgtctggggtagggcaggttcttagactctgtgagtaaagacagcttcatcttcccagttcatcatggcttcaacatccagataacaacgaacttgatgcaagtgataggtttgccaaggtcagacctctcatcatccggatgaactgcaatttccagaagcatgcacccttggaagagttctacagctttggcgagtctatgtgtgagtactttgggcaccgggggtccaagcagctgcacagggggaagcctgtgcgacttggctacaagatttggtgtgggacaaccagcagaggctacttggtgtggtttgagccctcacagggcacactgtttaccaagccagacaggagcttggatctaggaggcagtatggtaataaaatttgtggatgcgcttcaggagcgtggttttctgccatatcacatattttttgacaaggttttcacaagtgttaaactgatgtccattttgaggaaaaagggggtgaaagccacaggaactgttcgtgagtacaggactgagcgatgtcccctaaaagaccccaaagaactgaaaaaaatgaagaggggttcatttgattacaaagtcgatgagagtgaggagatcatcgtgtgccgctggcacgatagcagcgtggtcaacatttgctccaatgctgtgggcatagagccagtgaggctgaccagtcgtcactctggagcagctaaaacgcggactcaggtccaccagccatcactggtgaagctgtatcaggagaaggtgggtggcgttggtaggatggatcagaatattgccaagtacaaggtgaagatccgaggcatgaagtggtactcaagctttattggctatgtcattgatgctgccctcaacaatgcatggcagctgcatagaatctgctgccaagatgcccaggtggacctccttgccttccggagatacattgcctgtgtgtatctggagagcaatgctgacacaacatctcaagggaggcgaagcaggcggttggagactgagagccgcttcgatatgattgggcactggattatccatcaggacaagaggacccggtgtgccctctgccactcacagaccaacacccggtgtgagaagtgccagaagggtgtccatgccaaatgcttcagggagtaccacatccggtgacatcatgagacatgcttctttggtttataatgagatgtttacagttaaatacagatggcagttgagcacttctgttttgtgttggaaaaaagacctgaatttctaatgacttgattttctattttctccctacccacaatacagttatcttttttattgtgttgtgttatgcctacatgtgatataaattaatatttatattcatttatatttatatttttgaacttatttatttaaagttatggatcactttttattcaaataaaagttgtgctttggggtatatttgaatcctagcaagaataatcaaaggaaaacttgcaagaacagtaagaagactttaccattgcatgccatggtttataatctaagataggcaatagtgtataaatatcatgtaaatgtgatggatttcttaatcatatttatttcatattaatccaagtttatcaaacttttgagggataatctgccttgtatttagtcagagggctagaggtgcagatttcatattttcttaatgaaaatattttcctaatacacatatatcaatgtgagattcatttttgtaaaaaaaattatttttttaattttgtgggtacatagtaggagtgtatttttatgggttacatgagatattctgatacaaacatgcaatgtataaaaatcacatcagggtaaatggggtatccatcttgtcaaacacttgtcctttgtgtttcaaacaatccaattatactgttagttattttaaaatgtgcaattaaattatttttaactatattcaccctgttgtgctagcaaatactaggtcttactcattctttctattttttcatacccattaactattcccactctcccccaccccctaactaccctttccaagctctggtaaccttctttccactctgtgtgtccatgagttcaattgttttcatttttagctcccacaaataagtgagaacatctgaagtttgtctgtctttgcttggcttatttcacttaacataatgacctccagttccattcatgttgttgcaaatgactgaatatcatttttttgtggctaaatattaatcacacttcattgtgtatatgtacattttctttatccattcttctgttgatggacacttaggttgctcccaaatcatgactattgagaatagtgcagaaaataaacatgagttcagatctttcttcaatatactgatttttttttcttttggatgtatacttaggaatgggattcctgaatcatatggtagctctatttttagtttttgaggaagcttcaaactgttctccatagaggttgtactaatttacattcccaccagcagtgttcaagggttcccttttctccacatccttgccagcatttgttattgtctgtcttttggattacagccatttctgcccggatgagatatctcaatgtagttttcacttgcatttttctgttgatcagtgatgttgagcactttttttatacctgtttgccatttgtaccttttgtttttattttgagatggagttgccttgtcacccaggctggaatgcagtggtgcgcaatctcg

SEQ ID NO: 166187 - DNA, 2212 bp, Homo sapiens
  Payload ID: 12714
  Gene Symbol: PGBD3
  Gene Name: piggyBac transposable element derived 3
  Uniprot ID: Q8N328
  ENST ID: ENST00000374127
  CDS Start-End: 203-1984
ctatgagctgaagcctctgcccaagggcgggaaacggcagaagaaagtgccagtgcaggagattgatgatgactttttcccaagttctggggaagaagctgaagctgcttctgtaggagaaggaggaggaggaggtcggaaagtgggaagataccgagatgatggagatgaagattattataagcagcggttaagtcccaagatgcctcgaacactaagtttacatgaaataactgaccttttagagacagatgacagcatagaagcaagtgctatagtgatacaaccacctgaaaatgctacagcacctgtttctgatgaggaatcaggagatgaagaaggtggaacaataaataatctgccaggttctttgttgcacacagctgcgtatcttattcaagatggctctgatgctgagtctgactcagatgatccctcatacgcacctaaagatgactctcctgatgaagttccatctacgtttactgtgcagcaacctccaccatcaaggaggaggaaaatgacaaaaattctttgcaaatggaaaaaagccgacctaactgtacaacccgtagcaggtagagttacagcaccaccaaacgatttcttcaccgtaatgagaactcccacagaaattcttgaactttttcttgatgacgaggtcattgaactcattgtcaagtactccaacttatatgcttgcagtaaaggtgtacatcttggcttgactagctctgaattcaaatgttttctgggaattatttttctgagtggttatgtctcagttcctagaaggcgtatgttttgggaacaaagaacagatgtgcataatgtactggttagtgctgccatgagacgtgaccggtttgaaactatattttctaatttgcatgttgctgacaatgcaaatttggatccagtggacaaattttccaaattgcgacctctcataagcaaacttaatgagagatgcatgaaatttgttccaaatgaaacatatttcagctttgatgaattcatggttccttattttggtcgtcacgggtgcaaacaatttattcggggaaagcccattcggtttggctataagttttggtgtggtgccacctgtctgggctacatttgctggtttcagccgtatcagggtaaaaacccaaatactaaacatgaggaatatggtgtcggtgcgtcacttgtccttcagtttagtgaggcacttacagaggcacaccctggacaataccattttgtattcaataactttttcaccagtattgcacttcttgataagctcagttcaatgggacatcaggcaacaggtacagtgagaaaggatcacattgacagagttccactggaatcagatgtagctttaaagaaaaaagaaagaggcacatttgattatcgaattgatggcaaaggcaatattgtctgcagatggaatgataacagtgttgtcactgttgcctcatctggtgctggtatccatcccctgtgtcttgtcagtcgttactcccagaaactgaaaaagaagatacaagttcagcagccaaacatgatcaaagtgtataaccagttcatgggaggcgtagacagagctgatgaaaacattgataagtatcgggcatcaatccgtggaaagaaatggtattcaagccctcttttgttctgtttcgaactggtcttacaaaatgcttggcaattgcataaaacatatgatgagaaaccagtggattttctggagtttcgtcgacgtgtggtatgccattatctggagacccatggtcatcctccagaacctggccaaaaaggaagacctcagaagcgtaacattgactcacgttatgatggcataaatcatgtgatagtcaaacagggaaagcaaacgcgatgcgctgaatgtcataagaacacaacttttcgatgtgaaaaatgtgatgttgccttacatgtgaagtgttccgttgaatatcacactgaatagcaggtgtcaccacctcctgagataagaaacatagttttatacattatgtacagtgtagcagtggttttgcctagtgttccaattttggaacgtcacataacaatggaacataataaatttttttttctcttcaaatttttgttccttgaatttttctaggtaacatatatgaatttcatgcaaaaattcaaaaaattgtaacctcagacataaatgggttaaagatgt

SEQ ID NO: 166188 - DNA, 6612 bp, Homo sapiens
  Payload ID: 12715
  Gene Symbol: PGBD4
  Gene Name: piggyBac transposable element derived 4
  Uniprot ID: Q96DM1
  ENST ID: ENST00000397766
  CDS Start-End: 460-2217
tgtgtcaagtgcctatgaaggggactgcccatgaagtgaaagtcaagtgtgtgttgctgcggcagccacggaggccaaggacctcacgggagtaaaagatgacgagactggcttcgggagaaacaccatccagaagagacctttcaaaaaacttctagagactccccaagacgtatgagatgaaaggcttcttctgtctgtgtgcgtttaactcatttctccttagccccgagattacgcgctgctgtgcctgcgactgcagcgtttacgccgagataactcgtggattacagtgccaaccttactcccaaagtttgccacgaaatatctcgcttctgttattttcgcatggttctggtatattgacttttgaaacaaaagacatcattctgtttatagcattctgtttttagtagtgggatttccatctacaaaatatagtaattctcgatcgctgaaatgtcaaatcctagaaaacgtagcattcctatgcgtgatagtaataccggtctcgaacagttgttggctgaagattcatttgatgaatctgatttttcggaaatagatgattctgataatttttcggatagtgctttagaagccgataagatcaggcctctgtcccatttagaatctgatggaaagagctctacatcaagtgactcagggcgctccatgaaatggtcagctcgtgctatgattccacgtcaaaggtatgactttaccggcacacctggcagaaaagtcgatgtcagtgatatcactgacccattgcagtattttgaactgttctttactgaggaattagtttcaaaaattactagagaaacaaatgcccaagctgccttgttggcttcaaagccaccgggtccgaaaggattttcgcgaatggataaatggaaagacactgacaatgacgagctcaaagtcttttttgcagtaatgttactgcaaggtattgtgcagaaacctgagctggagatgttttggtcaacaaggcctcttttggatacaccttatctcaggcaaattatgactggtgaaagatttttacttttgtttcggtgcctgcattttgtcaacaattcttctatatctgctggtcaatcaaaggcccagatttcattgcagaagatcaaacctgtgttcgactttcttgtaaataaattttccactgtatatactccaaacagaaacattgcagttgatgaatcactgatgctgttcaaggggccattagctatgaagcagtacctcccgacaaaacgagtacgatttggtctgaagctatatgtactttgtgaaagtcagtctggttatgtgtggaatgcgcttgttcacacagggcctggcatgaatttgaaagattcagcggatggcctgaaatcatcacgcattgttcttaccttggtcaatgaccttcttggccaagggtattgtgtcttcctcgataactttaatatatctcccatgcttttcagagaattacatcaaaataggactgatgcagttgggacagctcgtttgaacagaaaacagattccaaatgatctgaaaaaaaggattgcaaaggggacgactgtagccagattctgtggtgaacttatggcactgaaatggtgtgacggcaaggaggtgacaatgttgtcaacattccacaatgatactgtgattgaagtaaacaatagaaatggaaagaaaactaaaaggccacgtgtcattgtggattataacgagaatatgggagcagtggactcggctgatcaaatgcttacttcttatccatctgagcgcaaaagacacaaggtttggtataagaaattctttcaccatcttctacacattacagtgctgaactcctacatcctgttcaagaaggataatcctgagcacacgatgagccatataaacttcagactggcattgattgaaagaatgctggaaaagcatcacaagccagggcagcaacatcttcgaggtcgtccttgctccgatgatgtcacacctcttcgtctgtctggaagacatttccccaagagcataccagcaacgtccgggaaacagaatccaactggtcgctgcaaaatttgctgctcccaatacgacaaggatggcaagaagatccggaaagaaacgcgctatttttgtgccgaatgtgatgttccgctttgtgttgttccgtgctttgaaatttaccacacgaaaaaaaattattaaataccgatcatcatacacatctgttccattaggattagagacaagttctgtttagaaataactccaagattgggaggccgacctgggtggatcacctgagatcaggaattcaagaccagcctggccaacatggtgaaaccctgtctctactaaaaatacaacaattagctggatgtggtggcacatgcctgtaatccaagctacttgggaggctgaggcaggagaattgcttgaacccatgaggcggaggttgcagtgagctgagatcacaccactgcactccagcctgggtgacatagcgagactccatctcaaaaaaaagaaataactccaagaacagttttgttgtttttgttttgttttgttttgttttgagacggagtttcactcttgttgcccaggctggagtgcaatggcatgatattggctcactgtaacctccacctcccaggttcaagcgattctcgtgcctcagcctccctagtagctgggattacaggcatgtgccaccacacccacctaattttgcatttttagtagagactgggtttatccatgttggtcaggctagtcttgacctcccgacctcaggtgatccgcctatctgggcctcacaaagtcctgggattataggcatgagccactgcgcctagcaccaagaacagtttttatattttattttcacattgaaaatcagtcagatttgcttcagcctcaaagagggtgtttatgtaaaactaaatgagtgcaggcagcgagctacacttttttttttcctaaatggaaaatgggaaggagatactgtctctgaacaaaaatagctggaaaaacacataactgttaactaagggttgcctctagtgaaaaggattggaagacaatttatctgatgctacactattcttcctgttgtgattgttttactgtgaacataacaaggttgtattggggaggagggcaggggttgattgctgccaatgttgattgctgaggccttagccaagatttcaggcatcatttgctccagtcctttcattttctttatggtggaaagtgaagtgacttgcccaagatctttgttggccctaaacatcgctgtctctgctacagattcctattgagagcaatgcatgttttagccttgtgcactcttagagtcagcatcatgggaaagagtaacagcaattgaaaaaagagattcaagagccaagtactcagccctggcaggggatggggacatgatgcccagagccacccctatactccagtctccctggcatcagctactgcagtactggggtacttgccttcatcttttttctgaagatagttacttcttcatatttgatcatcggaaggagcagcattgctcagaaacacacacacacacacacacacttgactttcttgtctgccaaataaatttcttatttgctagggaactggtaatctaggctcaagaagtgtgtggagaaggtttattttcattctttttactttaaaatatgccttagtttttgaatagataagacattcaagtgtcagaaagtaaaagtcagttcaggactgagaaaggaaagatcagtgctgattttaatcagactgtaatgtaccaactagatacagacagggccagtggcaaggccatcagaaaacttcttcccaaggccacaccacacctgcaaaatgcctaacaaccttcttcttttcagtgattaccactttcttaccaatgacttcgctttgttcctcgtgcctctgaacagactgctgagatacccaatcaagagccaatccttgcttccctagactctcctcaatcattcaacagaagcccaaatcttgtaaaagttcctttctgggccgggcacagtggctcacgcctgtaatcccagcactttggaaggccgagatgggcgaatcacaaggtcaggagtttgagactagcctggccaacatggtgaaaccctgtctctactaaaaatacaaaaaaaaattagctgggcatagtggtgggtgcctgtaatcccagctacttgggaggctgagacaggagaatcacttgaacccgggaggcagaggttgcagtgagccaagatcgcaccactgcactccagccctggcgacagagtgagactccatctcaaaaaataaaaaagtttccttctgttccctcttactgttatatccttggtttctctggtgtggggtcttccttacagcagcaagctcataaacttaacttgaccgcaggtgtgttccttggtggtctttatctgatagactttgtcacatggtacaatattcaaaaggcacatggtacaatattcaaaaggcacatggtacaatattcaaaaggtatgagtatacaaaaaaaatctcccacctacttctctccctagtcacccaattctcaagaggcaatcactgttgccattttcctgagtattcttccacagatagtcaactatctacagaaaaatatatacattaaaaataaggccaggcacagtggcatgcctgtagtcccagctactcagaaggttgaagcaggaggatcacttgaggccaggagggccaggaatttgaagctgtagtgtgctatgatagcaggcctgtgaatagccattgcactccatcctgggcaacatagccagaccctgtctctaaaaaaaaaaaaaaaaaaaaaaaagacaaaaaaacaaatccatatatacatatatatgtatatatatagtatgctaccagttgtgtgaaaaaaggggcaaaatatatatttatttaacttatatacaaataacattctagaaataaattgtttaatataaaatacactaatatataataatgtattacctaacatatgattatatataactataatgtgtactgttttacatacatatttccaaagtatactataaatgcacttccgcactttgctctttttactaaatatatcttggaaatcatcctttattcgtacataaaaagcttcatagttcctttttatggctgcaaaatgttccagcttatggatggactgattctctatcgagcaacattaagattgtgtcctattttactattcctaattttgctgaagtgaatttcttttgccatgtgatttccacaggtgtatatatgtagcgtaattagtactagtagaaagtagaattgctagatcaaagagtatgtgcctttgtaattttgatgatattgtgaaatcttcttccacagaagttgttgcaactttcactctcaccagcaatgtgtaagataacttgcttcttcataccctcaccaacaatgagctatcaaatgttatttttgccaagcaaataaattaaaagtgatatctcagtttttgtttgtttgtttgttttttgagacagagtttcactctttgttgcccaggctggagtgcagtggcgtgatctcggctcactgtaacctccgcctcccaggttcaaacgattctcctgtctcaccctcccgagtagctgggattacaggcacctgccaccacacccagttaatttttgtatttttagtagagacagggtttcaccatgttggctaggctgacctcgaactcctaacctcaggtgatccacctgcctcggcctcccaaagtgctggaattacaggcgtgagccaccatgcctggctcttcttgcttgtttgttttgagacagagtcttgctctgtcagccaggctggagtgcagtggcacgatattggctcactgcaacctctgtctcccaggctcaagcaattctcctgcctcagcctcctgagtagctaggattacagatgtgtgccaccacgcctggctaatttttgtacttttagtagagacggagtttcaccatgttggccaggctggtctcaaactcctgacctcaggtaatccgcctgccttggcctcccaaagtgctgggatgacaggcgtgagccaccacgctgggcctcttcttggttttttaatccatcttctgccatatggtgaattaaatctaagttgtattgtaggattaatggagagcagctaaagaggaataaagccatgtgttcagccaaggatagttatcatgaaggataaaagcctcaaaatcctgattttgaaatacaaagtgctgattttaaaatcagtacatgttgagctgagccctgaggcctttgtttcagtcccaaccagagcagaagtaagcattgttgaaaccgtagtaaaaagattatttgagaaataatggaatgggacaaaggattataatgtgctacagccctctgaccattacactttctaaactattaataaaattttacttttcaaaaatgatttcaaaaattgcaaaatttagaaatatgctgaaataaaaacagcttcatccc

SEQ ID NO: 166189 - DNA, 10319 bp, Homo sapiens
  Payload ID: 12716
  Gene Symbol: PGBD5
  Gene Name: piggyBac transposable element derived 5
  ENST ID: ENST00000391860
  CDS Start-End: 147-1376
cgggacccccaggggccgccccgccaccgccccgcgccccggacgcacaggagccggaggaggacgaggccggcgcgggctggagcgcagcgctgcgggaccgcccgcccccgcgcttcgaggataccggcggtcccacccgaaagatgccccccagcgccagtgccgtggacttcttccagctctttgtcccagacaacgtcctcaagaacatggtggtgcagacaaacatgtatgccaagaagttccaggagcggtttgggagcgacggagcctgggtggaggtgacgctgacggagatgaaggcgttcctgggctacatgatctccaccagcatctcccactgcgagtccgtcctcagcatctggagcggaggcttctacagcaaccgcagcctcgccctcgtcatgagccaggcccgcttcgagaagatcctcaagtacttccacgtcgtggccttccgctccagccagaccacgcacgggctctacaaggtccagcccttcctcgactccctgcagaacagcttcgactctgccttcaggccttcccaaacccaggtgctacatgaacccctgatcgatgaggatcctgtattcattgccacgtgcacagagcgggagctgcgaaagaggaaaaagcggaaattcagcctctgggtcagacaatgttcttccactggcttcatcatccagatttatgtccacctgaaggaaggtgggggcccagatggcctggatgcgctgaagaataagccccagctccacagcatggtggccaggagcctgtgccggaacgcggcaggcaagaactacatcattttcacggggcccagcatcaccagcctgacgctgtttgaagagtttgagaagcaagggatttactgctgcggcttgctccgcgcgcggaagagtgactgcaccggcctcccactgtccatgctgaccaacccagccacacccccggcccggggccagtaccaaatcaagatgaaggggaacatgtccttgatctgctggtacaacaaaggacacttccgcttcctgaccaacgcctactccccggtgcagcagggagtcatcatcaaaaggaagagtggggagatcccatgccccttggccgtggaggcgtttgccgctcacctgagctacatctgcagatacgatgacaaatacagcaagtatttcatttctcataaaccaaacaagacctggcagcaggtgttctggttcgccatcagcatcgccatcaacaatgcctacatcctgtacaaaatgtcagacgcctaccacgtgaagaggtacagccgggcgcagtttggagagagactcgtcagagagctgctgggcttggaggatgcctctccgacccactgatgctgggggcgcaggactcggtcaagggaggggcaagaggaggaggagagcctgccgttccaacttgcccatcagagacccggacacggcctggtgtgtggcttgctgcctgggagggatgcacagggcctctggagggacaggatggacctggtcagaggacggttgctgtcctcatttgcattccaagaagagcatgtcctccctcgagaaacagtgccgccggtgtgatgagcacttacacccacgttctcaagggcagattctctcatgacatccgtggagcttgcgaggcagcgtggactggtgactgtgaaggaaggcccccgtggtagaatgagctggagcacgctctaagagagatgcctgcttcctaaagatctacagcaatctgggacgtggttcaagttcaagacttgaaggaagcaaagacgccctgcatggttacaatggctcaggtgtcaggggaggccggagggttttccagcatttgcctcatgccagcacctttgaaccggtctcttagaagaagacacacatcctgggtgtacagtggtgaaatggggagtgggtgcccattctgaaaaacgaggcattcctgctcattccctctgcttagctggtgggcaggggagagagggaaatgccaaaaacttggagtgaaggatgatgctattttttatttttaaatatatcttcaggttattttcttactgttgcttcagatctaatgtaaaaggcagatgtcccctcctctccacccccgacgctgaccccggcctcagtcacggctctttgcatgatcacagttctgtgttctggcctgtggcagggccgggaagggccgctggcttccgaacagacgtggttgctctccacgaggcgcatggggagcccgcgggccctaagctttgtcgcagatgtcatcattggcagaattacttgtcttgaaaaataagtagcattgctgaaacacacaaccgaattctctacgatggccatttgctcattgtctttcctctgtgtgtagtgagtgaccctggcagtgtttgcctgctcagagtggcccctcagaacaacagggctggccttggaaaaaccccaaaacaggactgtggtgacaactctggtcaggtgtgatttgacatgagggccggaggcggttgctgacggcaggactggagaggctgcgtgcccggcactggcagcgaggctcgtgtgtcccccaggcagatctgggcactttcccaacccaggtttatgcgtctccagggaagcctcggtgccagagtggtgggcagatctgaccatccccacagaccagaaacaaggaatttctgggattacccagtcccccttcaacccagttgatgtaaccacctcattttttacaaatacagaatctattctactcaggctatgggcctcgtcctcactcagttattgcgagtgttgctgtccgcatgctccgggccccacgtggctcctgtgctctagatcatggtgactcccccgccctgtggttggaatcgatgccacggattgcaggccaaatttcagatcgtgtttccaaacacccttgctgtgccctttaatgggattgaaagcacttttaccacatggagaaatatatttttaatttgtgatgcttttctacaaggtccactatttctgagtttaatgtgtttccaacacttaaggagactctaatgaaagctgatgaattttcttttctgtccaaacaagtaaaataaaaataaaagtctatttagatgttgattctccgttaatacgtgaattcgtttaaaaggtcagggaacaggcggggtgcggtggctcatgcctgtaatcccagcacttttggaggctgaagcgggcggatcgcttgagtccaggagtttgagaccagcattggcaacatggcgaaagcccatttctacaaaaaatacaagaattaggtgtggtggcacatgcctgcagtcccagctacttgggaggctgaggtgggaggatctcttgagccactgcactccagcctgggtgacagagccagaccctgtatcaagaaaaaaaacaaggtgaaggaacaaaaatacaggctactcttttaaatacttgattttttttgttatataatctggtgtgtatgatattaactgttcttggtgtctcaaaccactgagcagtttaaaaaagaaatgtttttgagtttggctaatagaaatacctcttgatgttgcagttgtatgagtgcagttgtatttgaggtgcctgtttcattgaagacactagcaggcctgccttccggcctggtggttttccctcttttcttctagtttgtgtcgtgtgtcattccagatgagcaggaagaggtgctgttctgacaggcagtgggtggctgcattccccagtcatgagagaataattgtaacattgtaacactctgtttctaaaatggcagccacctgttgtctgatacatgatgggaaaaggcagctgttgagccgggtctaggggaggcttcagtggccacttcaggtctctggaggaatgctgttgactgagaagagtttctcttctccatccagaaggacagaatagcatgtaggacggactgacagaacctccagggacctggaccttgccttagagatgtgattcaaagtggctttttggagtgactctagttgaagtgcatctggttccagtatctccctgggttcaacagccctcaggttgattcttgattggctttggagtagctggccatccctggggatgaggaaagagcatcgtaagtggtcttatgacagagggagccagcatggccctggctgagtatatggggctggcaagcaccactgcacacatggcaagtgagagcccattccactcagatccagccactaagccaagccgatcccctgagggatgtctctgctgcaggctctggaaaaaaaagatggagcaatgagcttcccagccttatgcaaaacaaaacacccacaaaaacttccaagcttctccaaagagaatctgcatttccctgcaactcacagggaattgaacctgcactgagcttcacggagtttatgagaccttcccattactgcagttgtgttgagcgtcccgtgaggtccttcttaggcaaatttaacttcattgagtgaatgtctgtttctgtttggtgcctacttgatcaggttccatattcgactttcattgtctttccccacactctgctccctaaagagcctcgattttggccaggtgcggtggctcacacctgtaatcccagcactttgggaggccgaggcaggcggatcacaaggccaggagattgagaccagcctggccaatatggtgaaaccccatctctactaaaaatacaaaaattagctgggtgtggtggtggacacctgtagtcccagctactcgggaggctaagcaggagaatatcttgaatccgggaagcagaggctgcagtgagccaagatcgcaccactgcactccagcctgggtgacagagcgagactccaacccccaccccgccacaaaaaaaaaaaaaaaaaaaaagcctcgagtttgaacaacgtcttcccgtggtccatgggacattatactagggacatctttcaaaagtcaggcaagtcatatggaaaagtcttggtggctgggtcattctgagcaaacacatccagtactgactaaatcagatgaggcttggtcaccaaaattgagttaactctgctgcgtgcaagaagcaagaagattgcaggtccccaggacagagcctggaaggttctgaatccttcctgtgtggcccgtgtgtcaccatcctccccagggacccaggctcagcccccccaacagtgagggggggtcaccaagcatcaggctgagaggaagcagggcaaacccgggagggccatggggccttgcaactacgcaagcctcacacattctcctccagtctgcattcatggcaaaaaaaaaacatttccccacttgcctgggattggggcgagaacaagtcaacgacactgatgggggagaaaggtgaccttgggtgtggtacctcccagatctgtctcctgcatcctcgcaggtgctgtgtttgaaaggtatgacagcggtggctaacaggcaggcacacttccaggcggcttggggtggcccttctgccccagagccttactcctcacagggatccctgtgggttaggcatggactgtcaccacgcccagatggagtggtgcaatggttcgcccaggtaagcagacccgggtttgcctgacgcaggaggccgcgtcctaactgctgtgggcactggctgtcctgattcatcacgaggacgggggattttatccctgacttacctgacaactttgtgggggattttctcctttccatatccaatcctctctgctgatccgaatactgaaaacaatcattatgagatccgggacatcaccctccccctgggtccttttcttgtcctagatggagatgggtgttttggagcttaacaactactgaagctgaagttagcctggtagggagccactattctggggggcatttggacagggcaagcccttggccacaccagaccctgagccagaaagaaccatagcgatttcctcacccagatggccccagctcacagtatggggagagtgggatggggtgggggagtggagccagctgtggggtctcatcagagtgccctgggatctaggccagaggcgccgtcttcacccacatgccagctttgtggttctggtccctcttccttaagcgagggcttgccaagctttggctgtggaaagccttagccttgtgtagtgggagttccaaacgaaagaagtccccagaagttcacaaggtagtggccagggaaagtgtccccagtgccccctccccaccggtggcctctgcagcttgctttggaaaacagttctgtctgtgaagaaatctctcctgttacggccctgtgtcagtcaatgcgggcttggctgtctgcccaaataccttccgttcttatcaggaacatgactgaggcttctcacttttgactccatcacttaatccctttttctccgtggcttctgtgtgtctcatcttcgagaatatttctcagccttctttgcaggtatgttattctctcccaataagaaataaagagtatcaggtaccaaagtggcacttagagctgttgccataaaatagcaccagagagtaagcatgccctctggccacgcagctcgctgccatttagccatctctgtgtccctccctccctggggtgcccagtgcgcaccccagttctccagcagcccaggcacattctcctagctctgacccctgtctggtgggggccgggcagcctctcttgagtgtagggcggtggtgctggcgctggtggcagctctgtgtgaactgtgttccggggagggtggggcaccttcacccttccgtgtatacccatgtatacacggtcgtaatgaggagactcctgcgggagacttgattgtgcgctccatgtcactagctactctacaagcagatactattcttcaggttttttccttagttgcctggaagcttgaccttgtgtgcatgtatttggagatgaaaacagaaagggcggggaggacatcggcttgtgtgaaagacctaggaagacgatggaggagtgtgtgcggcttccctcacgtgtcaagcctcctggctccctcaggtggaaggggcactttatggccaaggaaattcagtgaggagtgaagggtgaggctgagcccgccagataaatcagcctcggccctcccctccccaagggtcagcccccggcagcgcacctctgttcttggtgcgtctcgctagtctttgattcattcttctgccgtcttcacccaagcctcgctggactaaagagtgacagttaatgcacatggagcatttctgttccagcaggtcacgtctccctgtatggttcctttgctgagtcctcagcattgccctgggagctgacaaccatcggtcccccttttgtgatgggaaagtgacactctgagagccgtggtgactctacagggtgtggagccaggttgaccctcactctgtctgctccagggcttcctggttctcagccactgctgcttctgaactgctacaggccaggcattgtgctaagaactgggcacgtgttaccccaacgtggtctgtgcccttgagggtgccatgactgaaacacgttgggggcacagagcaggctgattctccgccgaaagaaggctccagccagaggccgagaccccgtgtgggggaggtggcagtcaccattgctgctggactcagcaacccccagaccctccaccttgcttggcaggcatcacatgcacctggcttagcacatccctgcaaacacaagagtctgagcctcctcaagaggctgcagtcacactgcatttgaccaggacttgccaacctgcaacttgccctgagagccaggtatgcgtgtgtgtatctggggagcacgccccaaacatgagcagggacggtgttcccagctatccgagaggtcatgcccaagccaaaaggaaggctctagctcttaaacatgaataagtttattcctttcatttccacagtgtcttatgcttgcttctgttttctccaaggaagtatggtgcccacctactcctccagcctgacgatccatgtgagggttccttgttcccagcccaattctcatgtcccacctttctccactaagaaacagccaaattttggcaagagtcgtggtaggaaaaaaaaacaataattgggcagatgaggatttttcactttttgactagttctttctctagactttcctgtctttttaaaacttctagtttcccccttgagcgctccctcccagtgggtagaccacggaaggaatgaacaggggatggaagcaggggatgcagtccctattatttcaatagattggaaagatgggcccagaacaattgcgtacggtgttcagtgtaaattgaagatctggagttgcaggattgttgaggcaatttttagttgctttgctccatctaaacacaaggccataggatagtgtgactttgtagcttcatcaccgtatccacatcagaagtacaatgtccacttaatacatatatacacatatgtacgtatacacatatacacatgtgtacatatgtatgtatacacatgcacatgtgtacgtatgtatgtatacacatacatatatgtgtacacatatacatatgtatgtatacacatagatatatgtgtacacataaacatatgtatgtatacacataaacatgtatgtatacacatacatatatgtgtacacatatacttatgtatgtatacacatacatatatgtgtacacatatacttatgtatgtatacacatacatatatgtgtacacatatacttatgtatgtatacacatacatatatgtgtacacatatacacatatacatatatgtgtacacataaatatgtatgtatccatatatgtatatatatacacatgtatacagatatgcatctatatgtatacctctatatgtatgcacatatacatatatgtatacatatatacatatatgcatacatctataatatatgtatgtgtatatatacacatacagtgtccacttaatatatatatctatcttgtgtgtatgtgtgtgtaaatatacacacacatacacacacgataaaatacagagtctaccacatgatgagcctctgctaggtccttagcaatcaaaccacatgtccagtcctggcccccattctacaactaaacacatgggccagtttaggggtccaggagggcaagaatggtgggtccacgtagaaaccaggtgagggaggagcagtccacagggctggggtgatgggctggtgaagcagtgttccaggaggggaactgctgctcacagggctgtcctggtcgccctcgggatacagccagacttgatccgagtggctcccggggctgaatggggaccgccgggtgcatatcccaggaggcagccttcagctcagtggggaaagcagtttccaaccttagagctgcccaacactagcacagggcacctgagaaaggaggggcccctctgcctttactctgtctcccactagaggcagctggttccttcagggaactctggtggggggtgagggggtggctggttctcagtgggcaggggtgaccctactggggtcagtgggctggcaatgctggtcttcactaagaagagttgaaaatagccaggaagctaagccctggctcctgggctcctgggcagatgcttaattaggaggaagaaggaaccaaaatcatgaacacaactggctctctcagggggaggctgtcaccctccaagctcttcttccccttcctcaaatggagattcacactcatccctagttcaggagagccgccattgatgatgaggaaatccgtgtcaaagaagctggaaagactgctattcattgtgagaattttgtttccactgctacattacattgtttcttcttgttttcccttccaatttccagttaagaatctttcacagaaaatttttaattttatcacaaactgcacagatatcacacagctgcacccccatttggtgacacaaagcatacccttctgtgaagattttcactttacgccaaggcatgattgtcactttacgccaaggcaataaatttttacaaattttgtataacaggagctgaattctgggttctcaaatgtgaaatgtggcaaaaaaaaaaaaaaaaaaaaaaaagatttaattcaagcattttgtcatgtggttcttatttcttcaaccaagtttgtttacagtcactgcctttgaaatacagtcaaatacatctgtttgcttc

SEQ ID NO: 166190 - DNA, 1569 bp, Homo sapiens
  Payload ID: 12716
  Gene Symbol: PGBD5
  Gene Name: piggyBac transposable element derived 5
  Uniprot ID: Q8N414
  ENST ID: ENST00000525115
  CDS Start-End: 25-1392
gggcacctgttcggtaggtcagatatgcctgactacagaactcgagctctcttcgtgcaaagtactctcggggactctgcaggacctgagctgcagttgctcagcatagtgcccggccgggatctgcagccaagcgattcattcacaggtcccacccgaaagatgccccccagcgccagtgccgtggacttcttccagctctttgtcccagacaacgtcctcaagaacatggtggtgcagacaaacatgtatgccaagaagttccaggagcggtttgggagcgacggagcctgggtggaggtgacgctgacggagatgaaggcgttcctgggctacatgatctccaccagcatctcccactgcgagtccgtcctcagcatctggagcggaggcttctacagcaaccgcagcctcgccctcgtcatgagccaggcccgcttcgagaagatcctcaagtacttccacgtcgtggccttccgctccagccagaccacgcacgggctctacaaggtccagcccttcctcgactccctgcagaacagcttcgactctgccttcaggccttcccaaacccaggtgctacatgaacccctgatcgatgaggatcctgtattcattgccacgtgcacagagcgggagctgcgaaagaggaaaaagcggaaattcagcctctgggtcagacaatgttcttccactggcttcatcatccagatttatgtccacctgaaggaaggtgggggcccagatggcctggatgcgctgaagaataagccccagctccacagcatggtggccaggagcctgtgccggaacgcggcaggcaagaactacatcattttcacggggcccagcatcaccagcctgacgctgtttgaagagtttgagaagcaagggatttactgctgcggcttgctccgcgcgcggaagagtgactgcaccggcctcccactgtccatgctgaccaacccagccacacccccggcccggggccagtaccaaatcaagatgaaggggaacatgtccttgatctgctggtacaacaaaggacacttccgcttcctgaccaacgcctactccccggtgcagcagggagtcatcatcaaaaggaagagtggggagatcccatgccccttggccgtggaggcgtttgccgctcacctgagctacatctgcagatacgatgacaaatacagcaagtatttcatttctcataaaccaaacaagacctggcagcaggtgttctggttcgccatcagcatcgccatcaacaatgcctacatcctgtacaaaatgtcagacgcctaccacgtgaagaggtacagccgggcgcagtttggagagagactcgtcagagagctgctgggcttggaggatgcctctccgacccactgatgctgggggcgcaggactcggtcaagggaggggcaagaggaggaggagagcctgccgttccaacttgcccatcagagacccggacacggcctggtgtgtggcttgctgcctgggagggatgcacagggcctctggagggacaggatggacctggtcagaggacggttgctgtcctca

SEQ ID NO: 166191 - DNA, 1361 bp, Homo sapiens
  Payload ID: 12717
  Gene Symbol: PYURF
  Gene Name: PIGY upstream reading frame
  Uniprot ID: Q96I23
  ENST ID: ENST00000273968
  CDS Start-End: 114-458
tcctggaggaccagggggcggggcctgcccggctggcctggacgaacgggaagccgggagctcggccacgggtggcgaggctgcggtgaggcctggtctccggctgccagaccatgctgagtggagcacgctgcaggctcgcctcagcgctgcggggaacgcgcgcgccgccgtccgcggtcgcccgtaggtgcctgcacgcgtcggggtcgcggcctttggccgaccggggcaagaagactgaggagccgccccgcgacttcgatccggcgctgctggagttcctggtgtgcccgctctccaagaagccgctcagatatgaagcatcaacaaacgaattgattaatgaagagttgggaatagcttatccaatcattgatgggatccctaatatgataccacaggcagctaggatgacacgtcaaagtaagaagcaagaagaagtggagcagcgctagttcataatttaaaaaaattaaaaaaacgcaacagccaacttttcttaataccatataccttttaaaacacagtggcaggtaataagtggaagagaagaatgtttctgtctcttcctacgttgactgttcttattccactggtttctttagcaggactgttctactcagcctctgtggaagaaaacttcccacagggctgcactagcacagccagcctttgcttttacagcctgctcttgcctattaccataccagtgtatgtattcttccacctttggacttggatgggtattaaactcttcaggcataattgatgcaactagagtcaatatgctgtatatattaatgatagctcttgggcatcgatctctgaaagctcaaatggatggaatttagtttgcgggaaagaggctttgctttgcgcatatcaggcttaggactgtgggaggcttaagttgcagatgcttcttttattgtactcttgttctgcccttgttttttgaaggctctgacttataactgctgtatcagaagaaacattttgacagtgtcttggttggagatgaacatccctaattgacatgtgatgactatttcttattccattcatctaagagtcattgaaattttgttttgcttgtttgtttagcttcaaggtctttggtaaagtcacatgttaaggatgactgaaataattccaaaggagtgatgttggaatagtccctctaagggagagaaatgcatttgaacgaatgtgatataaaaccacataatcaaatagaaacttcatgtacttacaaaaactgagtttgtaaaattaccttcatttctttgacattaaatgcttatattagcaataaacatgttgacactttcctataaaaaataaaccagtttgcagta

SEQ ID NO: 166192 - DNA, 1192 bp, Homo sapiens
  Payload ID: 12718
  Gene Symbol: PIH1D1
  Gene Name: PIH1 domain containing 1
  Uniprot ID: Q9NWS0
  ENST ID: ENST00000262265
  CDS Start-End: 237-1109
acagttcggcacgtaggacggagggtagtgcgtctagagacacatattccccacggatttgacgatggtgttcggtcttgaatggaaatgtagtcttaggccagtcttaggtttttgaacaggatagtaggtatccggagtcgattgagggccagagcaggcactggggttcggatcctgggcaaagtttcccacgttgagggtctcgaggacgcctagatctctttcccagggccatggcgaacccgaagctgctgggaatggggctaagcgaggcggaggcgatcggtgctgattcggcgcgatttgaggagctgctgctgcaggcctcgaaggagctccagcaagcccagacaaccagaccagaatcgacacaaatccagcctcagcctggtttctgcataaagaccaactcctcggaagggaaggttttcatcaacatctgccactccccctctatccctcctcccgccgacgtgaccgaggaggagctgcttcagatgctagaggaggaccaagctgggtttcgcatccccatgagtctgggagagcctcatgcagaactggatgcaaaaggccagggatgtaccgcctacgacgtagctgtcaacagcgacttctaccggaggatgcagaacagcgatttcttgcgggagctcgtgatcaccatcgccagggagggccttgaggacaaatacaacttgcagctgaatccggaatggcgcatgatgaagaaccggccattcatgggctccatctcgcagcagaacatccgctcggagcagcgtcctcggatccaggagctgggggacctgtacacgcccgcccccgggagagctgagtcagggcctgaaaagcctcacctgaacctgtggctggaagcccccgacctcctcttggccgaagttgacctccccaaactggatggagccctggggctgtcgctggagatcggggagaaccgcctggtgatggggggcccccagcagctgtatcatctagacgcttatatcccgctgcagatcaactctcatgagagcaaggcagccttccaccggaagagaaagcaattaatggtggccatgccgcttctgccggtgccttcttgatcagggtgtctccttgtgcttctgagatgtggagaagaggctgctggcttccctaaaagttgaaataaaagatttttgccttt

SEQ ID NO: 166193 - DNA, 833 bp, Homo sapiens
  Payload ID: 12718
  Gene Symbol: PIH1D1
  Gene Name: PIH1 domain containing 1
  ENST ID: ENST00000599366
  CDS Start-End: 125-833
gggactccccgcgaaaaaccgggcgcccaggcctggggaacgcagcgagcagcgccggccgggcagactctcaccagtgcgcatgcgtggctctccggcaccggtccgtactccagcgagggccatggcgaacccgaagctgctgggaatggggctaagcgaggcggaggcgatcggtgctgattcggcgcgatttgaggagctgctgctgcaggcctcgaaggagctccagcaagcccagacaaccagaccagaatcgacacaaatccagcctcagcctggtttctgcataaagaccaactcctcggaagggaaggttttcatcaacatctgccactccccctctatccctcctcccgccgacgtgaccgaggaggagctgcttcagatgctagaggaggaccaagctgggtttcgcatccccatgagtctgggagagcctcatgcagaactggatgcaagtcagtgccctcagaggacccaggagtctggcccgctaggccccttcttccctagaacccaagaatcctgggcccaggaccctcctccctcagctcctggagatctggcccctcgatctgattcttttccctatgaaggccagggatgtaccgcctacgacgtagctgtcaacagcgacttctaccggaggatgcagaacagcgatttcttgcgggagctcgtgatcaccatcgccagggagggccttgaggacaaatacaacttgcagctgaatccggaatggcgcatgatgaagaaccggccattcatgggctccatctcgcagcagaacatccgctcggagcagcgtcctcggatccaggagctggggg

SEQ ID NO: 166194 - DNA, 998 bp, Homo sapiens
  Payload ID: 12718
  Gene Symbol: PIH1D1
  Gene Name: PIH1 domain containing 1
  ENST ID: ENST00000601807
  CDS Start-End: 178-998
ggacgcctagatctctttcccagggccatggcgaacccgaagctgctgggaatggggctaagcgaggcggaggcgatcggtgctgattcggcgcgatttgaggagctgctgctgcaggtgcagtgaccggacccctggatccttgagtattcggggattttggcggggtgctcaaagatgggactgcagttcccagaatgcactaaggcgggaaccaggcctcggggaattgaggcctcgaaggagctccagcaagcccagacaaccagaccagaatcgacacaaatccagcctcagcctggtttctgcataaagaccaactcctcggaagggaaggttttcatcaacatctgccactccccctctatccctcctcccgccgacgtgaccgaggaggagctgcttcagatgctagaggaggaccaagctgggtttcgcatccccatgagtctgggagagcctcatgcagaactggatgcaaaaggccagggatgtaccgcctacgacgtagctgtcaacagcgacttctaccggaggatgcagaacagcgatttcttgcgggagctcgtgatcaccatcgccagggagggccttgaggacaaatacaacttgcagctgaatccggaatggcgcatgatgaagaaccggccattcatgggctccatctcgcagcagaacatccgctcggagcagcgtcctcggatccaggagctgggggacctgtacacgcccgcccccgggagagctgagtcagggcctgaaaagcctcacctgaacctgtggctggaagcccccgacctcctcttggccgaagttgacctccccaaactggatggagccctggggctgtcgctggagatcggggagaaccgcctggtgatggggggcccccagcagctgtatcatctagacgcttatatcccgctgcagatcaactctcatgagagcaaggcagccttccaccggaagagaaagcaattaatggtggccatgccgct

SEQ ID NO: 166195 - DNA, 874 bp, Homo sapiens
  Payload ID: 12718
  Gene Symbol: PIH1D1
  Gene Name: PIH1 domain containing 1
  ENST ID: ENST00000597415
  CDS Start-End: 383-874
acgggactccccgcgaaaaaccgggcgcccaggcctggggaacgcagcgagcagcgccggccgggcagactctcaccagtgcgcatgcgtggctctccggcaccggtccgtactccagcgaggtgaagatctcgcgggcgcggggccctgcacgcgtcgcagccatcgcctaccccgaacgctttccgcgaagactgcggggcgctctgtgttaaggggaaccttgagggccatggcgaacccgaagctgctgggaatggggctaagcgaggcggaggcgatcggtgctgattcggcgcgatttgaggagctgctgctgcaggtgcagtgaccggacccctggatccttgagtattcggggattttggcggggtgctcaaagatgggactgcagttcccagaatgcactaaggcgggaaccaggcctcggggaattgaggcctcgaaggagctccagcaagcccagacaaccagaccagaatcgacacaaatccagcctcagcctggtttctgcataaagaccaactcctcggaagggaaggttttcatcaacatctgccactccccctctatccctcctcccgccgacgtgaccgaggaggagctgcttcagatgctagaggaggaccaagctgggtttcgcatccccatgagtctgggagagcctcatgcagaactggatgcaaaaggccagggatgtaccgcctacgacgtagctgtcaacagcgacttctaccggaggatgcagaacagcgatttcttgcgggagctcgtgatcaccatcgccagggagggccttgaggacaaatacaacttgcagctgaatccggaatggcgcatgatgaagaaccggccattcatgggctccatctcg

SEQ ID NO: 166196 - DNA, 489 bp, Homo sapiens
  Payload ID: 12718
  Gene Symbol: PIH1D1
  Gene Name: PIH1 domain containing 1
  ENST ID: ENST00000594845
  CDS Start-End: 1-164
aaggccagggatgtaccgcctacgacgtagctgtcaacagcgacttctaccggaggatgcagaacagcgatttcttgcgggagctcgtgatcaccatcgccagggagggccttgaggacaaatacaacttgcagctgaatccgggcctgaaaagcctcacctgaacctgtggctggaagcccccgacctcctcttggccgaagttgacctccccaaactggatggagccctggggctgtcgctggagatcggggagaaccgcctggtgatggggggcccccagcagctgtatcatctagacgcttatatcccgctgcagatcaactctcatgagagcaaggcagccttccaccggaagagaaagcaattaatggtggccatgccgcttctgccggtgccttcttgatcagggtgtctccttgtgcttctgagatgtggagaagaggctgctggcttccctaaaagttgaaataaaagatttttgccttt

SEQ ID NO: 166197 - DNA, 992 bp, Homo sapiens
  Payload ID: 12718
  Gene Symbol: PIH1D1
  Gene Name: PIH1 domain containing 1
  Uniprot ID: Q9NWS0
  ENST ID: ENST00000596049
  CDS Start-End: 107-979
ggactccccgcgaaaaaccgggcgcccaggcctggggaacgcagcgagcagcgccggccgggcagactctcaccagtgcgcatgcgtggctctccggcaccgggccatggcgaacccgaagctgctgggaatggggctaagcgaggcggaggcgatcggtgctgattcggcgcgatttgaggagctgctgctgcaggcctcgaaggagctccagcaagcccagacaaccagaccagaatcgacacaaatccagcctcagcctggtttctgcataaagaccaactcctcggaagggaaggttttcatcaacatctgccactccccctctatccctcctcccgccgacgtgaccgaggaggagctgcttcagatgctagaggaggaccaagctgggtttcgcatccccatgagtctgggagagcctcatgcagaactggatgcaaaaggccagggatgtaccgcctacgacgtagctgtcaacagcgacttctaccggaggatgcagaacagcgatttcttgcgggagctcgtgatcaccatcgccagggagggccttgaggacaaatacaacttgcagctgaatccggaatggcgcatgatgaagaaccggccattcatgggctccatctcgcagcagaacatccgctcggagcagcgtcctcggatccaggagctgggggacctgtacacgcccgcccccgggagagctgagtcagggcctgaaaagcctcacctgaacctgtggctggaagcccccgacctcctcttggccgaagttgacctccccaaactggatggagccctggggctgtcgctggagatcggggagaaccgcctggtgatggggggcccccagcagctgtatcatctagacgcttatatcccgctgcagatcaactctcatgagagcaaggcagccttccaccggaagagaaagcaattaatggtggccatgccgcttctgccggtgccttcttgatcagggtgtctcc

SEQ ID NO: 166198 - DNA, 741 bp, Homo sapiens
  Payload ID: 12718
  Gene Symbol: PIH1D1
  Gene Name: PIH1 domain containing 1
  ENST ID: ENST00000596651
  CDS Start-End: 1-390
aagaccaactcctcggaagggaaggttttcatcaacatctgccactccccctctatccctcctcccgccgacgtgaccgaggaggagctgcttcagatgctagaggaggaccaagctgggtttcgcatccccatgagtctgggagagcctcatgcagaactggatgcaaaaggccagggatgtaccgcctacgacgtagctgtcaacagcgacttctaccggaggatgcagaacagcgatttcttgcgggagctcgtgatcaccatcgccagggagggccttgaggacaaatacaacttgcagctgaatccggcagaacatccgctcggagcagcgtcctcggatccaggagctgggggacctgtacacgcccgcccccgggagagctgagtcagggcctgaaaagcctcacctgaacctgtggctggaagcccccgacctcctcttggccgaagttgacctccccaaactggatggagccctggggctgtcgctggagatcggggagaaccgcctggtgatggggggcccccagcagctgtatcatctagacgcttatatcccgctgcagatcaactctcatgagagcaaggcagccttccaccggaagagaaagcaattaatggtggccatgccgcttctgccggtgccttcttgatcagggtgtctccttgtgcttctgagatgtggagaagaggctgctggcttccctaaaagttgaaataaaagatttttgccttt

SEQ ID NO: 166199 - DNA, 418 bp, Homo sapiens
  Payload ID: 12718
  Gene Symbol: PIH1D1
  Gene Name: PIH1 domain containing 1
  ENST ID: ENST00000598175
  CDS Start-End: 1-166
gaggatgcagaacagcgatttcttgcgggagctcgtgatcaccatcgccagggagggccttgaggacaaatacaacttgcagctgaatccggaacatccgctcggagcagcgtcctcggatccaggagctgggggacctgtacacgcccgcccccgggagagctgagtcagggcctgaaaagcctcacctgaacctgtggctggaagcccccgacctcctcttggccgaagttgacctccccaaactgatcaactctcatgagagcaaggcagccttccaccggaagagaaagcaattaatggtggccatgccgcttctgccggtgccttcttgatcagggtgtctccttgtgcttctgagatgtggagaagaggctgctggcttccctaaaagttgaaataaaagatttttgccttt

SEQ ID NO: 166200 - DNA, 615 bp, Homo sapiens
  Payload ID: 12718
  Gene Symbol: PIH1D1
  Gene Name: PIH1 domain containing 1
  ENST ID: ENST00000598889
  CDS Start-End: 1-264
cgcatccccatgagtctgggagagcctcatgcagaactggatgcaaaaggccagggatgtaccgcctacgacgtagctgtcaacagcgacttctaccggaggatgcagaacagcgatttcttgcgggagctcgtgatcaccatcgccagggagggccttgaggacaaatacaacttgcagctgaatccggaacatccgctcggagcagcgtcctcggatccaggagctgggggacctgtacacgcccgcccccgggagagctgagtcagggcctgaaaagcctcacctgaacctgtggctggaagcccccgacctcctcttggccgaagttgacctccccaaactggatggagccctggggctgtcgctggagatcggggagaaccgcctggtgatggggggcccccagcagctgtatcatctagacgcttatatcccgctgcagatcaactctcatgagagcaaggcagccttccaccggaagagaaagcaattaatggtggccatgccgcttctgccggtgccttcttgatcagggtgtctccttgtgcttctgagatgtggagaagaggctgctggcttccctaaaagttgaaataaaagatttttgccttt

SEQ ID NO: 166201 - DNA, 381 bp, Homo sapiens
  Payload ID: 12718
  Gene Symbol: PIH1D1
  Gene Name: PIH1 domain containing 1
  ENST ID: ENST00000601825
  CDS Start-End: 136-381
gactccccgcgaaaaaccgggcgcccaggcctggggaacgcagcgagcagcgccggccgggcagactctcaccagtgcgcatgcgtggctctccggcaccggtccgtactccagcgagatctctttcccagggccatggcgaacccgaagctgctgggaatggggctaagcgaggcggaggcgatcggtgctgattcggcgcgatttgaggagctgctgctgcaggcctcgaaggagctccagcaagcccagacaaccagaccagaatcgacacaaatccagcctcagcctggtttctgcataaagaccaactcctcggaagggaaggttttcatcaacatctgccactccccctctatccctcctcccgccgacgtgacc

SEQ ID NO: 166202 - DNA, 793 bp, Homo sapiens
  Payload ID: 12718
  Gene Symbol: PIH1D1
  Gene Name: PIH1 domain containing 1
  ENST ID: ENST00000596916
  CDS Start-End: 1-288
ctccagcaagcccagacaaccagaccagaatcgacacaaatccagcctcagcctggtttctgcataaagaccaactcctcggaagggaaggttttcatcaacatctgccactccccctctatccctcctcccgccgacgtgaccgaggaggagctgcttcagatgctagaggaggaccaagctgggtttcgcatccccatgagtctgggagagcctcatgcagaactggatgcaaaacagcgatttcttgcgggagctcgtgatcaccatcgccagggagggccttgaggacaaatacaacttgcagctgaatccggaatggcgcatgatgaagaaccggccattcatgggctccatctcgcagcagaacatccgctcggagcagcgtcctcggatccaggagctgggggacctgtacacgcccgcccccgggagagctgagtcagggcctgaaaagcctcacctgaacctgtggctggaagcccccgacctcctcttggccgaagttgacctccccaaactggatggagccctggggctgtcgctggagatcggggagaaccgcctggtgatggggggcccccagcagctgtatcatctagacgcttatatcccgctgcagatcaactctcatgagagcaaggcagccttccaccggaagagaaagcaattaatggtggccatgccgcttctgccggtgccttcttgatcagggtgtctccttgtgcttctgagatgtggagaagaggctgctggcttccctaaaagttgaaataaaagatttttgcctttg

SEQ ID NO: 166203 - DNA, 583 bp, Homo sapiens
  Payload ID: 12718
  Gene Symbol: PIH1D1
  Gene Name: PIH1 domain containing 1
  ENST ID: ENST00000595550
  CDS Start-End: 478-583
ataccagcttgtgaatgaacactggggtactcggaagtgtggcatactccagtcctgtgtttaccgatagaccggaagtgtggcttcgtttacagttcggcacgtaggacggagggtagtgcgtctagagacacatattccccacggatttgacgatggtgttcggtcttgaatggaaatgtagtcttaggccagtcttaggtttttgaacaggatagtaggtatccggagtcgattgagggccagagcaggcactggggttcggatcctgggcaaagtttcccacgttgagggtctcgaggacgcctagatctctttcccagggccatggcgaacccgaagctgctgggaatggggctaagcgaggcggaggcgatcggtgctgattcggcgcgatttgaggagctgctgctgcaggtgcagtgaccggacccctggatccttgagtattcggggattttggcggggtgctcaaagatgggactgcagttcccagaatgcactaaggcgggaaccaggcctcggggaattgagctctcatgcataagaattgctccatttgaggaacaaatgaggggtctga

SEQ ID NO: 166204 - DNA, 698 bp, Homo sapiens
  Payload ID: 12718
  Gene Symbol: PIH1D1
  Gene Name: PIH1 domain containing 1
  ENST ID: ENST00000597577
  CDS Start-End: 1-344
acgacgtagctgtcaacagcgacttctaccggaggatgcagaacagcgatttcttgcgggagctcgtgatcaccatcgccagggagggccttgaggacaaatacaacttgcagctgaatccggaatggcgcatgatgaagaaccggccattcatgggctccatctcgcagcagaacatccgctcggagcagcgtcctcggatccaggagctgggggacctgtacacgcccgcccccgggagagctgagtcagggcctgaaaagcctcacctgaacctgtggctggaagcccccgacctcctcttggccgaagttgacctccccaaactgacccttcaaatatagtttcccagcgtgtgaggctaccatgcctggtccaggtgatcatcctgttgctggggagggtgacctgattccgccacctctccaggatggagccctggggctgtcgctggagatcggggagaaccgcctggtgatggggggcccccagcagctgtatcatctagacgcttatatcccgctgcagatcaactctcatgagagcaaggcagccttccaccggaagagaaagcaattaatggtggccatgccgcttctgccggtgccttcttgatcagggtgtctccttgtgcttctgagatgtggagaagaggctgctggcttccctaaaagttgaaataaaagatttttgccttt

SEQ ID NO: 166205 - DNA, 633 bp, Homo sapiens
  Payload ID: 12718
  Gene Symbol: PIH1D1
  Gene Name: PIH1 domain containing 1
  ENST ID: ENST00000600875
  CDS Start-End: 1-550
ccctcctcccgccgacgtgaccgaggaggagctgcttcagatgctagaggaggaccaagctgggtttcgcatccccatgagtctgggagagcctcatgcagaactggatgcaaaaggccagggatgtaccgcctacgacgtagctgtcaacagcgacttctaccggaggatgcagaacagcgatttcttgcgggagctcgtgatcaccatcgccagggagggccttgaggacaaatacaacttgcagctgaatccggaatggcgcatgatgaagaaccggccattcatgggctccatctcgcagcagaacatccgctcggagcagcgtcctcggatccaggagctgggggacctgtacacgcccgcccccgggagagctgagtcagggcctgaaaagcctcacctgaacctgtggctggaagcccccgacctcctcttggccgaagttgacctccccaaactgatcaactctcatgagagcaaggcagccttccaccggaagagaaagcaattaatggtggccatgccgcttctgccggtgccttcttgatcagggtgtctccttgtgcttctgagatgtggagaagaggctgctggcttccctaaaagttgaaataaaagatttttgccttt

SEQ ID NO: 166206 - DNA, 634 bp, Homo sapiens
  Payload ID: 12718
  Gene Symbol: PIH1D1
  Gene Name: PIH1 domain containing 1
  ENST ID: ENST00000601053
  CDS Start-End: 1-346
ggcgatcggtgctgattcggcgcgatttgaggagctgctgctgcaggcctcgaaggagctccagcaagcccagacaaccagaccagaatcgacacaaatccagcctcagcctggtttctgcataaagaccaactcctcggaagggaaggttttcatcaacatctgccactccccctctatccctcctcccgccgacgtgaccgaggaggagctgcttcagatgctagaggaggaccaagctgggtttcgcatccccatgagtctgggagagcctcatgcagaactggatgcaaaacagcgatttcttgcgggagctcgtgatcaccatcgccagggagggccttgaggacaaatacaacttgcagctgaatccggaatggcgcatgatgaagaaccggccattcatgggctccatctcgcagcagaacatccgctcggagcagcgtcctcggatccaggagctgggggacctgtacacgcccgcccccgggagagctgagtcagggcctgaaaagcctcacctgaacctgtggctggaagcccccgacctcctcttggccgaagttgacctccccaaactgacccttcaaatatagtttcccagcgtgtgaggctaccatgcctggtccaggtg

SEQ ID NO: 166207 - DNA, 1241 bp, Homo sapiens
  Payload ID: 12719
  Gene Symbol: PIH1D2
  Gene Name: PIH1 domain containing 2
  Uniprot ID: Q8WWB5
  ENST ID: ENST00000280350
  CDS Start-End: 224-1171
cgggcgctttcctggaagagaagtgggtcaggcccaactgaaaagcaagcctggcaccagaagggggacattccggaactagatatgaagagacttttctccctgaagttccccggacccaattagatgttgtacccaggctggttaccctggtaacaggcgtcgcggtttgtcaaggaactgagagaagaggcttaagaaaattattcaccactcataagtcatggagacatcctcaaaaggtctgcttacccaagttactcagttttggaacctcctagatgatctagctcagagtgaccctgagggctatgagaagtttattcagcagcagctgaaagaagggaaacagctctgtgctgccccagaaccacagctttgtctacagaccaggattctgaaaccaaaagaaaaaatactttttatcaacctgtgtcagtggacaaggatcccagctccccaatcaaccactcatccagtacctctaactgttggcaaaccagaagatacaactgagatatcagatgcttacacagtcattgatgttgcctacaatcctgatgttcttcatgcagcagaaaaggaccaagtgaaaaaaaatcagttaattcagatggccatgaaatgcattgaggagaaattccagttcaccctctcacactcttaccatattaccaaatttagaataaaaggaagcattcaaagaatgaaacaaaatctgatgggaatccaaactgattccatagatttaagagaaaaaatgagaagggaactaactcttggacagatacgaagcagtactatgagcaatccagatcactttcctcaactgttactgccaaaagaccaagtttcaggcaaagcagtgtgtctgatagaagagatttccagtactgaaatccaggtggagatgaagatgccagcctatgaactaaaaattgtgcatgatcacagtgagaaacctctgaaaattgagttgaaagttgaattacctggtattaattctgtctctctctgtgaccttagtgtttctgaggatgatttattgattgaagtatctgagaagtacagattacatctgaatcttccaaaacttattgatactgaaatgaccacagcaaaatttatcaaagaaaaatccacgctaatcatcacaatgcctttggtgtgaaagaagagcatcatatgttttgggttttcagtgctaaagtcatgtgaattaaaggaccttcattttggct

SEQ ID NO: 166208 - DNA, 1245 bp, Homo sapiens
  Payload ID: 12719
  Gene Symbol: PIH1D2
  Gene Name: PIH1 domain containing 2
  Uniprot ID: Q8WWB5
  ENST ID: ENST00000431456
  CDS Start-End: 224-1090
cgggcgctttcctggaagagaagtgggtcaggcccaactgaaaagcaagcctggcaccagaagggggacattccggaactagatatgaagagacttttctccctgaagttccccggacccaattagatgttgtacccaggctggttaccctggtaacaggcgtcgcggtttgtcaaggaactgagagaagaggcttaagaaaattattcaccactcataagtcatggagacatcctcaaaaggtctgcttacccaagttactcagttttggaacctcctagatgatctagctcagagtgaccctgagggctatgagaagtttattcagcagcagctgaaagaagggaaacagctctgtgctgccccagaaccacagctttgtctacagaccaggattctgaaaccaaaagaaaaaatactttttatcaacctgtgtcagtggacaaggatcccagctccccaatcaaccactcatccagtacctctaactgttggcaaaccagaagatacaactgagatatcagatgcttacacagtcattgatgttgcctacaatcctgatgttcttcatgcagcagaaaaggaccaagtgaaaaaaaatcagttaattcagatggccatgaaatgcattgaggagaaattccagttcaccctctcacactcttaccatattaccaaatttagaataaaaggaagcattcaaagaatgaaacaaaatctgatgggaatccaaactgattccatagatttaagagaaaaaatgagaagggaactaactcttggacagatacgaagcagtactatgagcaatccagatcactttcctcaactgttactgccaaaagaccaagtttcaggcaaagcagtgtgtctgatagaagagatttccagtactgaaatccaggtggagatgaagatgccagcctatgaactaaaaattgtgcatgatcacagtgagaaacctctgaaaattgagttgaaagttgaattacctggtattaattctgtctctctctgtgaccttagtgtttctgagggaacaacagaaccacaagcattagcgaaagatgaattatctttgaagttttgaatgtttgaaccagatttggatcatattgatgatggtcccttgtgataagcttgtttcttttggataatcttcaacctaaaattactaattactgaaaaatcaaattaatgtattgttttcataataatacagcaaggtaaaagtctgtgtggaat

SEQ ID NO: 166209 - DNA, 1838 bp, Homo sapiens
  Payload ID: 12719
  Gene Symbol: PIH1D2
  Gene Name: PIH1 domain containing 2
  Uniprot ID: Q8WWB5
  ENST ID: ENST00000530641
  CDS Start-End: 327-1148
aagtcgtgctcctgagaaatcgtcccaccaacaggcagcccagagactcccacaagggagggttttcaggacactccagaggttgacgggtgcagaaggaaggcgggcgctttcctggaagagaagtgggtcaggcccaactgaaaagcaagcctggcaccagaagggggacattccggaactagatatgaagagacttttctccctgaagttccccggacccaattagatgttgtacccaggctggttaccctggtaacaggcgtcgcggtttgtcaaggaactgagagaagaggcttaagaaaattattcaccactcataagtcatggagacatcctcaaaaggtctgcttacccaagttactcagttttggaacctcctagatgatctagctcagagtgaccctgagggctatgagaagtttattcagcagcagctgaaagaagggaaacagctctgtgctgccccagaaccacagctttgtctacagaccaggattctgaaaccaaaagaaaaaatactttttatcaacctgtgtcagtggacaaggatcccagctccccaatcaaccactcatccagtacctctaactgttggcaaaccagaagatacaactgagatatcagatgcttacacagtcattgatgttgcctacaatcctgatgttcttcatgcagcagaaaaggaccaagtgaaaaaaaatcagttaattcagatggccatgaaatgcattgaggagaaattccagttcaccctctcacactcttaccatattaccaaatttagaataaaaggaagcattcaaagaatgaaacaaaatctgatgggaatccaaactgattccatagatttaagagaaaaaatgagaagggaactaactcttggacagatacgaagcagtactatgagcaatccagatcactttcctcaactgttactgccaaaagaccaagtttcaggcaaagcagtgtgtctgatagaagagatttccagtactgaaatccaggtggagatgaagatgccagcctatgaactaaaaattgtgcatgatcacagtgagaaacctctgaaaattgagttgaaagttgaattacctggtattaattctgtctctctctgtgaccttagtgtttctgaggtaagttgaatagataacactgtaaatttgtattggccagcattcactaacatatattatgccacagtaacaaactacataatttcaggggcttacaatgatttgctcaggttacccggtgaaggagcaattcccttctgagatgtgccattcacatctcagcaaagggaaaatagaatgatcaaaccatgcagtggatcgtaatacttctactcagacatgacacttcatgatatcacttctactcacgctccactggccaaagtaagtcacaaggccagttctacatcagtaggactgagaagtgtattctcacagtcacaggaagtcatatggcagggtaaacgtactatcctcttacagaagagcaaatagttagagtcagtcctacagtctaccagtctacactcttggttgcaaatatttgcttctttctggaaggaaaacacctccaatcccagtatcagactccaaaggacagaattttgctttctcttcctcttgaaccatggactaagacatgtaaaaaaagttatgtactccctcagtcccatctgtcatgcaatgtggaatggggagaagataaccgtaattaaccatctcaattcagaaatgggaaaaataagaggcacactgcagttactggtgcacagcaattctgaaatcctagtaggcagacattgtgagggctccttttct

SEQ ID NO: 166210 - DNA, 755 bp, Homo sapiens
  Payload ID: 12719
  Gene Symbol: PIH1D2
  Gene Name: PIH1 domain containing 2
  ENST ID: ENST00000525072
  CDS Start-End: 1-755
gggctatgagaagtttattcagcagcagctgaaagaagggaaacagctctgtgctgccccagaaccacagctttgtctacagaccaggattctgaaaccaaaagaaaaaatactttttatcaacctgtgtcagtggacaaggatcccagctccccaatcaaccactcatccagtacctctaactgttggcaaaccagaagatacaactgagatatcagcagaaaaggaccaagtgaaaaaaaatcagttaattcagatggccatgaaatgcattgaggagaaattccagttcaccctctcacactcttaccatattaccaaatttagaataaaaggaagcattcaaagaatgaaacaaaatctgatgggaatccaaactgattccatagatttaagagaaaaaatgagaagggaactaactcttggacagatacgaagcagtactatgagcaatccagatcactttcctcaactgttactgccaaaagaccaagtttcaggcaaagcagtgtgtctgatagaagagatttccagtactgaaatccaggtggagatgaagatgccagcctatgaactaaaaattgtgcatgatcacagtgagaaacctctgaaaattgagttgaaagttgaattacctggtattaattctgtctctctctgtgaccttagtgtttctgaggatgatttattgattgaagtatctgagaagtacagattacatctgaatcttccaaaacttattgatactgaaatga

SEQ ID NO: 166211 - DNA, 1103 bp, Homo sapiens
  Payload ID: 12719
  Gene Symbol: PIH1D2
  Gene Name: PIH1 domain containing 2
  Uniprot ID: Q8WWB5
  ENST ID: ENST00000532211
  CDS Start-End: 83-1030
ggtgggtttgccaacctatagaatgattacccgttagaactgagagaagaggcttaagaaaattattcaccactcataagtcatggagacatcctcaaaaggtctgcttacccaagttactcagttttggaacctcctagatgatctagctcagagtgaccctgagggctatgagaagtttattcagcagcagctgaaagaagggaaacagctctgtgctgccccagaaccacagctttgtctacagaccaggattctgaaaccaaaagaaaaaatactttttatcaacctgtgtcagtggacaaggatcccagctccccaatcaaccactcatccagtacctctaactgttggcaaaccagaagatacaactgagatatcagatgcttacacagtcattgatgttgcctacaatcctgatgttcttcatgcagcagaaaaggaccaagtgaaaaaaaatcagttaattcagatggccatgaaatgcattgaggagaaattccagttcaccctctcacactcttaccatattaccaaatttagaataaaaggaagcattcaaagaatgaaacaaaatctgatgggaatccaaactgattccatagatttaagagaaaaaatgagaagggaactaactcttggacagatacgaagcagtactatgagcaatccagatcactttcctcaactgttactgccaaaagaccaagtttcaggcaaagcagtgtgtctgatagaagagatttccagtactgaaatccaggtggagatgaagatgccagcctatgaactaaaaattgtgcatgatcacagtgagaaacctctgaaaattgagttgaaagttgaattacctggtattaattctgtctctctctgtgaccttagtgtttctgaggatgatttattgattgaagtatctgagaagtacagattacatctgaatcttccaaaacttattgatactgaaatgaccacagcaaaatttatcaaagaaaaatccacgctaatcatcacaatgcctttggtgtgaaagaagagcatcatatgttttgggttttcagtgctaaagtcatgtgaattaaaggaccttcattttggctaaa

SEQ ID NO: 166212 - DNA, 487 bp, Homo sapiens
  Payload ID: 12719
  Gene Symbol: PIH1D2
  Gene Name: PIH1 domain containing 2
  ENST ID: ENST00000525744
  CDS Start-End: 1-487
cagcagctgaaagaagggaaacagctctgtgctgccccagaaccacagctttgtctacagaccaggattctgaaaccaaaagaaaaaatactttttatcaacctgtgtcagtggacaaggatcccagctccccaatcaaccactcatccagtacctctaactgttggcaaaccagaagatacaactgagatatcagatgcttacacagtcattgatgttgcctacaatcctgatgttcttcatgcagcagaaaaggaccaagtgaaaaaaaatcagttaattcagatggccatgaaatgcattgaggagaaattccagttcaccctctcacactcttaccatattaccaaatttagaataaaaggaagcattcaaagaatgaaacaaaatctgatgggaatccaaactgattccatagatttaagagaaaaaatgagaaggggtaagttgatgattgtaaatggaaaattaaactgctttaagatgt

SEQ ID NO: 166213 - DNA, 1025 bp, Homo sapiens
  Payload ID: 12719
  Gene Symbol: PIH1D2
  Gene Name: PIH1 domain containing 2
  Uniprot ID: Q8WWB5
  ENST ID: ENST00000528775
  CDS Start-End: 1-867
atggagacatcctcaaaaggtctgcttacccaagttactcagttttggaacctcctagatgatctagctcagagtgaccctgagggctatgagaagtttattcagcagcagctgaaagaagggaaacagctctgtgctgccccagaaccacagctttgtctacagaccaggattctgaaaccaaaagaaaaaatactttttatcaacctgtgtcagtggacaaggatcccagctccccaatcaaccactcatccagtacctctaactgttggcaaaccagaagatacaactgagatatcagatgcttacacagtcattgatgttgcctacaatcctgatgttcttcatgcagcagaaaaggaccaagtgaaaaaaaatcagttaattcagatggccatgaaatgcattgaggagaaattccagttcaccctctcacactcttaccatattaccaaatttagaataaaaggaagcattcaaagaatgaaacaaaatctgatgggaatccaaactgattccatagatttaagagaaaaaatgagaagggaactaactcttggacagatacgaagcagtactatgagcaatccagatcactttcctcaactgttactgccaaaagaccaagtttcaggcaaagcagtgtgtctgatagaagagatttccagtactgaaatccaggtggagatgaagatgccagcctatgaactaaaaattgtgcatgatcacagtgagaaacctctgaaaattgagttgaaagttgaattacctggtattaattctgtctctctctgtgaccttagtgtttctgagggaacaacagaaccacaagcattagcgaaagatgaattatctttgaagttttgaatgtttgaaccagatttggatcatattgatgatggtcccttgtgataagcttgtttcttttggataatcttcaacctaaaattactaattactgaaaaatcaaattaatgtattgttttcataataatacagcaaggtaaaagtctgtgtggaatata

SEQ ID NO: 166214 - DNA, 993 bp, Homo sapiens
  Payload ID: 12720
  Gene Symbol: PIH1D3
  Gene Name: PIH1 domain containing 3
  Uniprot ID: Q9NQM4
  ENST ID: ENST00000336387
  CDS Start-End: 283-927
gcacgatttatcctggcctagcatgccttggttaggaaatgttttgggggatatcacacttcagactgaaaaaaaaatggccccagtacttactacgtgaataatgtcctttgtgcgacaacttgaacgctgtggtctgagggttccagtgttgcttggttagataagctgaggagtgagaagtaatcagaccttcacttggtgggcccgagtgtactgtgcagagactacttgtacctacaagacctgctactcgccaagggctgattgggagagtaaataatggaatctgaaaatatggattctgaaaatatgaagacagaaaatatggaatctcaaaatgtagactttgagagtgtttcttcagttacagctctggaagccctctctaagctacttaatcctgaagaagaggatgattctgactatggacagacaaatggtttatctactattggagccatgggtcctgggaatattggaccaccccaaatagaagagctcaaagtcatccctgaaaccagcgaggaaaataatgaggacatctggaattcagaagagattccagaaggagcagaatatgatgatatgtgggatgttagagaaatcccagagtatgagattatattcagacagcaggtgggaactgaagatatatttttagggttgtcaaaaaaggactcctcaacaggttgttgcagtgaactagtggctaaaattaaattgccaaatacaaacccttctgatattcaaattgatatccaggaaacaatccttgaccttcgtactcctcagaagaagctgttgataactcttcctgagctggtggaatgtaccagtgccaaagcattctatatcccagagactgaaactcttgaaatcactatgactatgaaaagagagttagatattgctaatttcttctgaaactgcatgaaaaagataaaaagtagtaaaatggcattggtaacaattaaaaaactttgaaaaaaa

SEQ ID NO: 166215 - DNA, 1652 bp, Homo sapiens
  Payload ID: 12720
  Gene Symbol: PIH1D3
  Gene Name: PIH1 domain containing 3
  Uniprot ID: Q9NQM4
  ENST ID: ENST00000372453
  CDS Start-End: 63-707
cgccacgctctgcacagtctattttcggagcctagccagagacgggaaaactgaccaagataatggaatctgaaaatatggattctgaaaatatgaagacagaaaatatggaatctcaaaatgtagactttgagagtgtttcttcagttacagctctggaagccctctctaagctacttaatcctgaagaagaggatgattctgactatggacagacaaatggtttatctactattggagccatgggtcctgggaatattggaccaccccaaatagaagagctcaaagtcatccctgaaaccagcgaggaaaataatgaggacatctggaattcagaagagattccagaaggagcagaatatgatgatatgtgggatgttagagaaatcccagagtatgagattatattcagacagcaggtgggaactgaagatatatttttagggttgtcaaaaaaggactcctcaacaggttgttgcagtgaactagtggctaaaattaaattgccaaatacaaacccttctgatattcaaattgatatccaggaaacaatccttgaccttcgtactcctcagaagaagctgttgataactcttcctgagctggtggaatgtaccagtgccaaagcattctatatcccagagactgaaactcttgaaatcactatgactatgaaaagagagttagatattgctaatttcttctgaaactgcatgaaaaagataaaaagtagtaaaatggcattggtaacaattaaaaaactttgaaaaaaatgattgttttctatattctctttattattctgacatatttttgaaagggacaaaattcagttctagtgatattgtgaccatttacagtaatttctattactctgttaggaaatatgtttccttggccaggtgcaatggctcatgcctgtaatcccaacactttgggaggccgaagcaggcggatcacttgaggtcaggagtttgagaccagcctggtcaacatggcgaaaccctgtctctactaaaaatacgaaaattagcctggcgtggtggcaggtgcctgtaatcccagctactctgtctcaaaaaacaaacaaaaaaaggaaatatgttttcttatgtaaataaactattctatttttatagtgatagctgagtagaatctttacaggttaaaaaattagaatatttcatggtcaattacataattgaaatatgatcatgaaatggttggtccacttacttcagtagtctgaaaaacttatgctaattatttacatttacactgtgatacaatcagttgcatagcaattggtcattattattaccagagaattttatttggttgctttttcattgatttgagcaaatgatttacagtgttctctgtttaggctctcactgttgttctggaatatacaggtaataaatagtttgatgtaccatactatcaacatatttacttgagtaaggaacacttttgtgcgtacagtattatttggcttcttcagttgtgcttttaatgcttggatatagttaggttaaaaacattttttatatgcactaataattattagcattgcctttttgggtactgtatttatatgtagtcaattgaaatccttgactttaaaataaatttaaagtgtggcacattta

SEQ ID NO: 166216 - DNA, 1926 bp, Homo sapiens
  Payload ID: 12720
  Gene Symbol: PIH1D3
  Gene Name: PIH1 domain containing 3
  Uniprot ID: Q9NQM4
  ENST ID: ENST00000535523
  CDS Start-End: 338-982
cgccacgctctgcacagtctattttcggagcctagccagagacgggaaaactgaccaaggcacgatttatcctggcctagcatgccttggttaggaaatgttttgggggatatcacacttcagactgaaaaaaaaatggccccagtacttactacgtgaataatgtcctttgtgcgacaacttgaacgctgtggtctgagggttccagtgttgcttggttagataagctgaggagtgagaagtaatcagaccttcacttggtgggcccgagtgtactgtgcagagactacttgtacctacaagacctgctactcgccaagggctgattgggagaataatggaatctgaaaatatggattctgaaaatatgaagacagaaaatatggaatctcaaaatgtagactttgagagtgtttcttcagttacagctctggaagccctctctaagctacttaatcctgaagaagaggatgattctgactatggacagacaaatggtttatctactattggagccatgggtcctgggaatattggaccaccccaaatagaagagctcaaagtcatccctgaaaccagcgaggaaaataatgaggacatctggaattcagaagagattccagaaggagcagaatatgatgatatgtgggatgttagagaaatcccagagtatgagattatattcagacagcaggtgggaactgaagatatatttttagggttgtcaaaaaaggactcctcaacaggttgttgcagtgaactagtggctaaaattaaattgccaaatacaaacccttctgatattcaaattgatatccaggaaacaatccttgaccttcgtactcctcagaagaagctgttgataactcttcctgagctggtggaatgtaccagtgccaaagcattctatatcccagagactgaaactcttgaaatcactatgactatgaaaagagagttagatattgctaatttcttctgaaactgcatgaaaaagataaaaagtagtaaaatggcattggtaacaattaaaaaactttgaaaaaaatgattgttttctatattctctttattattctgacatatttttgaaagggacaaaattcagttctagtgatattgtgaccatttacagtaatttctattactctgttaggaaatatgtttccttggccaggtgcaatggctcatgcctgtaatcccaacactttgggaggccgaagcaggcggatcacttgaggtcaggagtttgagaccagcctggtcaacatggcgaaaccctgtctctactaaaaatacgaaaattagcctggcgtggtggcaggtgcctgtaatcccagctactctgtctcaaaaaacaaacaaaaaaaggaaatatgttttcttatgtaaataaactattctatttttatagtgatagctgagtagaatctttacaggttaaaaaattagaatatttcatggtcaattacataattgaaatatgatcatgaaatggttggtccacttacttcagtagtctgaaaaacttatgctaattatttacatttacactgtgatacaatcagttgcatagcaattggtcattattattaccagagaattttatttggttgctttttcattgatttgagcaaatgatttacagtgttctctgtttaggctctcactgttgttctggaatatacaggtaataaatagtttgatgtaccatactatcaacatatttacttgagtaaggaacacttttgtgcgtacagtattatttggcttcttcagttgtgcttttaatgcttggatatagttaggttaaaaacattttttatatgcactaataattattagcattgcctttttgggtactgtatttatatgtagtcaattgaaatccttgactttaaaataaatttaaagtgtggcacattt

SEQ ID NO: 166217 - DNA, 2323 bp, Homo sapiens
  Payload ID: 12721
  Gene Symbol: PIANP
  Gene Name: PILR alpha associated neural protein
  Uniprot ID: Q8IYJ0
  ENST ID: ENST00000320591
  CDS Start-End: 231-1079
gagccgaggcgagcatctcccaccgccgccgccccgcgccccaggcgcccgccccccacccgctccagcgccctgccgcgggccaaacctccccaccatgccccgcaccccgcccgctcctgcgaccccccagccccgctcagtcccgagcgcccgcagtcgtcgcgccgccgcgccaagcatgcagtaaaggctgaaaatctgggtcacagctgaggaagacctcagacatggagtccaggatgtggcctgcgctgctgctgtcccacctcctccctctctggccactgctgttgctgcccctcccaccgcctgctcagggctcttcatcctcccctcgaaccccaccagccccagcccgccccccgtgtgccaggggaggcccctcggccccacgtcatgtgtgcgtgtgggagcgagcacctccaccaagccgatctcctcgggtcccaagatcacgtcggcaagtcctgcctggcactgcacccccagccaccccatcaggctttgaggaggggccgccctcatcccaatacccctgggctatcgtgtggggtcccaccgtgtctcgagaggatggaggggaccccaactctgccaatcccggatttctggactatggttttgcagcccctcatgggctcgcaaccccacaccccaactcagactccatgcgaggtgatggagatgggcttatccttggagaggcacctgccaccctgcggccattcctgttcgggggccgtggggaaggtgtggacccccagctctatgtcacaattaccatctccatcatcattgttctcgtggccactggcatcatcttcaagttctgctgggaccgcagccagaagcgacgcagaccctcagggcagcaaggtgccctgaggcaggaggagagccagcagccactgacagacctgtccccggctggagtcactgtgctgggggccttcggggactcacctacccccacccctgaccatgaggagccccgagggggaccccggcctgggatgccccaccccaagggggctccagccttccagttgaaccggattcccctggtgaatctgtgatgcccccaatgttggggtgcagccaagcaggaggccaaggggccggcacagcccccatcccactgagggtggggcagctgtggggagctggggccacaggggctcctggctcctgccccttgcacaccacccggaacactccccagccccacgggcaatcctatctgctcgccctcctgcaggtgggggcctcacatatctgtgacttcgggtccctgtccccacccttgtgcactcacatgaaagccttgcacactcacctccaccttcacaggccatttgcacacgctcctgcaccctctccccgtccataccgctccgctcagctgactctcatgttctctcgtctcacatttgcactctctccttcccacattctgtgctcagctcactcagtggtcagcgtttcctgcacactttacctctcatgtgcgtttcccggcctgatgttgtggtggtgtgcggcgtgctcactctctccctcatgaacacccacccacctcgtttccgcagcccctgcgtgctgctccagaggtgggtgggaggtgagctgggggctccttgggccctcatcggtcatggtctcgtcccattccacaccatttgtttctctgtctccccatcctactccaaggatgccggcatcaccctgagggctcccccttgggaatggggtagtgaggccccagacttcacccccagcccactgctaaaatctgttttctgacagatgggttttggggagtcgcctgctgcactacatgagaaagggactcccatttgcccttccctttctcctacagtcccttttgtcttgtctgtcctggctgtctgtgtgtgtgccattctctggacttcagagccccctgagccagtcctcccttcccagcctccctttgggcctccctaactccacctaggctgccagggaccggagtcagctggttcaaggccatcgggagctctgcctccaagtctacccttcccttcccggactccctcctgtcccctcctttcctccctccttccttccactctccttccttttgcttccctgccctttccccctcctcaggttcttccctccttctcactggtttttccaccttcctccttcccttcttccctggctcctaggctgtgatatatatttttgtattatctctttcttcttcttgtggtgatcatcttgaattactgtgggatgtaagtttcaaaattttcaaataaagcctttgcaagat

SEQ ID NO: 166218 - DNA, 290 bp, Homo sapiens
  Payload ID: 12721
  Gene Symbol: PIANP
  Gene Name: PILR alpha associated neural protein
  ENST ID: ENST00000536467
  CDS Start-End: 61-290
agactccctccctagcgtaaaggctgaaaatctgggtcacagctgaggaagacctcagacatggagtccaggatgtggcctgcgctgctgctgtcccacctcctccctctctggccactgctgttgctgcccctcccaccgcctgctcagggctcttcatcctcccctcgaaccccaccagccccagcccgccccccgtgtgccaggggaggcccctcggccccacgtcatgtgtgcgtgtgggagcgagcacctccaccaagccgatctcctcgggtcccaagatcacg

SEQ ID NO: 166219 - DNA, 2432 bp, Homo sapiens
  Payload ID: 12721
  Gene Symbol: PIANP
  Gene Name: PILR alpha associated neural protein
  Uniprot ID: Q8IYJ0
  ENST ID: ENST00000540656
  CDS Start-End: 340-1188
ctccctggcgcagccgtccccgtccccgcggctgcctccatcccgcctcggctcggcgggcggctccgcgcagtctcctgcttcgggtccccagtccgctctcggcactccctgcctcggggtcccttcgccgacctccttttcctcgtctccccccactctcgccgctctccagccctgtgcggggagtgcgggcctgcgggatgggtgggatgggggccacgctggggctggggcccggctcccgcaccccgaggctcctgccccacccccagctcgtctcctgcgcacaacagtaaaggctgaaaatctgggtcacagctgaggaagacctcagacatggagtccaggatgtggcctgcgctgctgctgtcccacctcctccctctctggccactgctgttgctgcccctcccaccgcctgctcagggctcttcatcctcccctcgaaccccaccagccccagcccgccccccgtgtgccaggggaggcccctcggccccacgtcatgtgtgcgtgtgggagcgagcacctccaccaagccgatctcctcgggtcccaagatcacgtcggcaagtcctgcctggcactgcacccccagccaccccatcaggctttgaggaggggccgccctcatcccaatacccctgggctatcgtgtggggtcccaccgtgtctcgagaggatggaggggaccccaactctgccaatcccggatttctggactatggttttgcagcccctcatgggctcgcaaccccacaccccaactcagactccatgcgaggtgatggagatgggcttatccttggagaggcacctgccaccctgcggccattcctgttcgggggccgtggggaaggtgtggacccccagctctatgtcacaattaccatctccatcatcattgttctcgtggccactggcatcatcttcaagttctgctgggaccgcagccagaagcgacgcagaccctcagggcagcaaggtgccctgaggcaggaggagagccagcagccactgacagacctgtccccggctggagtcactgtgctgggggccttcggggactcacctacccccacccctgaccatgaggagccccgagggggaccccggcctgggatgccccaccccaagggggctccagccttccagttgaaccggattcccctggtgaatctgtgatgcccccaatgttggggtgcagccaagcaggaggccaaggggccggcacagcccccatcccactgagggtggggcagctgtggggagctggggccacaggggctcctggctcctgccccttgcacaccacccggaacactccccagccccacgggcaatcctatctgctcgccctcctgcaggtgggggcctcacatatctgtgacttcgggtccctgtccccacccttgtgcactcacatgaaagccttgcacactcacctccaccttcacaggccatttgcacacgctcctgcaccctctccccgtccataccgctccgctcagctgactctcatgttctctcgtctcacatttgcactctctccttcccacattctgtgctcagctcactcagtggtcagcgtttcctgcacactttacctctcatgtgcgtttcccggcctgatgttgtggtggtgtgcggcgtgctcactctctccctcatgaacacccacccacctcgtttccgcagcccctgcgtgctgctccagaggtgggtgggaggtgagctgggggctccttgggccctcatcggtcatggtctcgtcccattccacaccatttgtttctctgtctccccatcctactccaaggatgccggcatcaccctgagggctcccccttgggaatggggtagtgaggccccagacttcacccccagcccactgctaaaatctgttttctgacagatgggttttggggagtcgcctgctgcactacatgagaaagggactcccatttgcccttccctttctcctacagtcccttttgtcttgtctgtcctggctgtctgtgtgtgtgccattctctggacttcagagccccctgagccagtcctcccttcccagcctccctttgggcctccctaactccacctaggctgccagggaccggagtcagctggttcaaggccatcgggagctctgcctccaagtctacccttcccttcccggactccctcctgtcccctcctttcctccctccttccttccactctccttccttttgcttccctgccctttccccctcctcaggttcttccctccttctcactggtttttccaccttcctccttcccttcttccctggctcctaggctgtgatatatatttttgtattatctctttcttcttcttgtggtgatcatcttgaattactgtgggatgtaagtttcaaaattttcaaataaagcctttgcaagat

SEQ ID NO: 166220 - DNA, 577 bp, Homo sapiens
  Payload ID: 12721
  Gene Symbol: PIANP
  Gene Name: PILR alpha associated neural protein
  ENST ID: ENST00000542740
  CDS Start-End: 246-577
agatggggctggagtctggtcaggcaaccacgctggagtttttcccccaaaaggatgctaacaaccagtgaatcctgggtgcagccgcatagctggcagctgggtggcctgggagggcagatgcgggtagaattggtggatgaattagctggggaagtacacagggcagggctggggtgtgacggccccctttttctcccagtaaaggctgaaaatctgggtcacagctgaggaagacctcagacatggagtccaggatgtggcctgcgctgctgctgtcccacctcctccctctctggccactgctgttgctgcccctcccaccgcctgctcagggctcttcatcctcccctcgaaccccaccagccccagcccgccccccgtgtgccaggggaggcccctcggccccacgtcatgtgtgcgtgtgggagcgagcacctccaccaagccgatctcctcgggtcccaagatcacgtcggcaagtcctgcctggcactgcacccccagccaccccatcaggctttgaggaggggccgccctcatcccaatacccctgggctatcgtgtggggtcccac

SEQ ID NO: 166221 - DNA, 2695 bp, Homo sapiens
  Payload ID: 12721
  Gene Symbol: PIANP
  Gene Name: PILR alpha associated neural protein
  Uniprot ID: Q8IYJ0
  ENST ID: ENST00000534837
  CDS Start-End: 231-1061
gagccgaggcgagcatctcccaccgccgccgccccgcgccccaggcgcccgccccccacccgctccagcgccctgccgcgggccaaacctccccaccatgccccgcaccccgcccgctcctgcgaccccccagccccgctcagtcccgagcgcccgcagtcgtcgcgccgccgcgccaagcatgcagtaaaggctgaaaatctgggtcacagctgaggaagacctcagacatggagtccaggatgtggcctgcgctgctgctgtcccacctcctccctctctggccactgctgttgctgcccctcccaccgcctgctcagggctcttcatcctcccctcgaaccccaccagccccagcccgccccccgtgtgccaggggaggcccctcggccccacgtcatgtgtgcgtgtgggagcgagcacctccaccaagccgatctcctcgggtcccaagatcacgtcggcaagtcctgcctggcactgcacccccagccaccccatcaggctttgaggaggggccgccctcatcccaatacccctgggctatcgtgtggggtcccaccgtgtctcgagaggatggaggggaccccaactctgccaatcccggatttctggactatggttttgcagcccctcatgggctcgcaaccccacaccccaactcagactccatgcgaggtgatggagatgggcttatccttggagaggcacctgccaccctgcggccattcctgttcgggggccgtggggaaggtgtggacccccagctctatgtcacaattaccatctccatcatcattgttctcgtggccactggcatcatcttcaagttctgctgggaccgcagccagaagcgacgcagaccctcagggcagcaaggtgccctgaggcaggaggagagccagcagccactgacagacctgtccccggctggagtcactgtgctgggggccttcggggactcacctacccccacccctgaccatgaggagccccgagggggaccccggcctgggatgccccaccccaagggggctccagccttccagttgaaccggtgagggcaggggcaatgggatgggagggcaaagagggaaggcaacttaggtcttcagagctggggtgggggtgccctctggatgggtagtgaggaggcaggcgtggcctcccacagcccctggccctcccaagggggctggaccagctcctctctgggaggcacccttccttctcccagtctctcaggatctgtgtcctattctctgctgcccataactccaactctgccctctttggttttttctcatgccaccttgtctaagacaactctgccctcttaaccttgattccccctctttgtcttgaacttccccttctattctggcctaccccttggttcctgactgtgccctttccctcttcctctcaggattcccctggtgaatctgtgatgcccccaatgttggggtgcagccaagcaggaggccaaggggccggcacagcccccatcccactgagggtggggcagctgtggggagctggggccacaggggctcctggctcctgccccttgcacaccacccggaacactccccagccccacgggcaatcctatctgctcgccctcctgcaggtgggggcctcacatatctgtgacttcgggtccctgtccccacccttgtgcactcacatgaaagccttgcacactcacctccaccttcacaggccatttgcacacgctcctgcaccctctccccgtccataccgctccgctcagctgactctcatgttctctcgtctcacatttgcactctctccttcccacattctgtgctcagctcactcagtggtcagcgtttcctgcacactttacctctcatgtgcgtttcccggcctgatgttgtggtggtgtgcggcgtgctcactctctccctcatgaacacccacccacctcgtttccgcagcccctgcgtgctgctccagaggtgggtgggaggtgagctgggggctccttgggccctcatcggtcatggtctcgtcccattccacaccatttgtttctctgtctccccatcctactccaaggatgccggcatcaccctgagggctcccccttgggaatggggtagtgaggccccagacttcacccccagcccactgctaaaatctgttttctgacagatgggttttggggagtcgcctgctgcactacatgagaaagggactcccatttgcccttccctttctcctacagtcccttttgtcttgtctgtcctggctgtctgtgtgtgtgccattctctggacttcagagccccctgagccagtcctcccttcccagcctccctttgggcctccctaactccacctaggctgccagggaccggagtcagctggttcaaggccatcgggagctctgcctccaagtctacccttcccttcccggactccctcctgtcccctcctttcctccctccttccttccactctccttccttttgcttccctgccctttccccctcctcaggttcttccctccttctcactggtttttccaccttcctccttcccttcttccctggctcctaggctgtgatatatatttttgtattatctctttcttcttcttgtggtgatcatcttgaattactgtgggatgtaagtttcaaaattttcaaataaagcctttgcaagat

SEQ ID NO: 166222 - DNA, 614 bp, Homo sapiens
  Payload ID: 12721
  Gene Symbol: PIANP
  Gene Name: PILR alpha associated neural protein
  ENST ID: ENST00000545917
  CDS Start-End: 100-614
agtcctagagtcagctggccacagatgcgccctgggagcccttctccgcttcactgtaaaggctgaaaatctgggtcacagctgaggaagacctcagacatggagtccaggatgtggcctgcgctgctgctgtcccacctcctccctctctggccactgctgttgctgcccctcccaccgcctgctcagggctcttcatcctcccctcgaaccccaccagccccagcccgccccccgtgtgccaggggaggcccctcggccccacgtcatgtgtgcgtgtgggagcgagcacctccaccaagccgatctcctcgggtcccaagatcacgtcggcaagtcctgcctggcactgcacccccagccaccccatcaggctttgaggaggggccgccctcatcccaatacccctgggctatcgtgtggggtcccaccgtgtctcgagaggatggaggggaccccaactctgccaatcccggatttctggactatggttttgcagcccctcatgggctcgcaaccccacaccccaactcagactccatgcgaggtgatggagatgggcttatccttggagaggcacctgccaccctgcggccattcctgttcgggggccg

SEQ ID NO: 166223 - DNA, 2650 bp, Homo sapiens
  Payload ID: 12722
  Gene Symbol: PIM1
  Gene Name: Pim-1 proto-oncogene, serine/threonine kinase
  Uniprot ID: P11309
  ENST ID: ENST00000373509
  CDS Start-End: 374-1315
gaggaggcccgagaggagtcggtggcagcggcggcggcgggaccggcagcagcagcagcagcagcagcagcagcaaccactagcctcctgccccgcggcgctgccgcacgagccccacgagccgctcaccccgccgttctcagcgctgcccgaccccgctggcgcgccctcccgccgccagtcccggcagcgccctcagttgtcctccgactcgccctcggccttccgcgccagccgcagccacagccgcaacgccacccgcagccacagccacagccacagccccaggcatagccttcggcacagccccggctccggctcctgcggcagctcctctgggcaccgtccctgcgccgacatcctggaggttgggatgctcttgtccaaaatcaactcgcttgcccacctgcgcgccgcgccctgcaacgacctgcacgccaccaagctggcgcccggcaaggagaaggagcccctggagtcgcagtaccaggtgggcccgctactgggcagcggcggcttcggctcggtctactcaggcatccgcgtctccgacaacttgccggtggccatcaaacacgtggagaaggaccggatttccgactggggagagctgcctaatggcactcgagtgcccatggaagtggtcctgctgaagaaggtgagctcgggtttctccggcgtcattaggctcctggactggttcgagaggcccgacagtttcgtcctgatcctggagaggcccgagccggtgcaagatctcttcgacttcatcacggaaaggggagccctgcaagaggagctggcccgcagcttcttctggcaggtgctggaggccgtgcggcactgccacaactgcggggtgctccaccgcgacatcaaggacgaaaacatccttatcgacctcaatcgcggcgagctcaagctcatcgacttcgggtcgggggcgctgctcaaggacaccgtctacacggacttcgatgggacccgagtgtatagccctccagagtggatccgctaccatcgctaccatggcaggtcggcggcagtctggtccctggggatcctgctgtatgatatggtgtgtggagatattcctttcgagcatgacgaagagatcatcaggggccaggttttcttcaggcagagggtctcttcagaatgtcagcatctcattagatggtgcttggccctgagaccatcagataggccaaccttcgaagaaatccagaaccatccatggatgcaagatgttctcctgccccaggaaactgctgagatccacctccacagcctgtcgccggggcccagcaaatagcagcctttctggcaggtcctcccctctcttgtcagatgcccgagggaggggaagcttctgtctccagcttcccgagtaccagtgacacgtctcgccaagcaggacagtgcttgatacaggaacaacatttacaactcattccagatcccaggcccctggaggctgcctcccaacagtggggaagagtgactctccaggggtcctaggcctcaactcctcccatagatactctcttcttctcataggtgtccagcattgctggactctgaaatatcccgggggtggggggtgggggtgggtcagaaccctgccatggaactgtttccttcatcatgagttctgctgaatgccgcgatgggtcaggtaggggggaaacaggttgggatgggataggactagcaccattttaagtccctgtcacctcttccgactctttctgagtgccttctgtggggactccggctgtgctgggagaaatacttgaacttgcctcttttacctgctgcttctccaaaaatctgcctgggttttgttccctatttttctctcctgtcctccctcaccccctccttcatatgaaaggtgccatggaagaggctacagggccaaacgctgagccacctgcccttttttctgcctcctttagtaaaactccgagtgaactggtcttcctttttggtttttacttaactgtttcaaagccaagacctcacacacacaaaaaatgcacaaacaatgcaatcaacagaaaagctgtaaatgtgtgtacagttggcatggtagtatacaaaaagattgtagtggatctaatttttaagaaattttgcctttaagttattttacctgtttttgtttcttgttttgaaagatgcgcattctaacctggaggtcaatgttatgtatttatttatttatttatttggttcccttcctattccaagcttccatagctgctgccctagttttctttcctcctttcctcctctgacttggggaccttttgggggagggctgcgacgcttgctctgtttgtggggtgacgggactcaggcgggacagtgctgcagctccctggcttctgtggggcccctcacctacttacccaggtgggtcccggctctgtgggtgatggggaggggcattgctgactgtgtatataggataattatgaaaagcagttctggatggtgtgccttccagatcctctctggggctgtgttttgagcagcaggtagcctgctggttttatctgagtgaaatactgtacaggggaataaaagagatcttatttttttttttatacttggcgttttttgaataaaaaccttttgtctt

SEQ ID NO: 166224 - DNA, 2075 bp, Homo sapiens
  Payload ID: 12723
  Gene Symbol: PIM2
  Gene Name: Pim-2 proto-oncogene, serine/threonine kinase
  Uniprot ID: Q9P1W9
  ENST ID: ENST00000376509
  CDS Start-End: 191-1126
agtagcattggggctggcgcgcgcggcgaatctcaacgctgcgccgtctgcgggcgcttccgggccaccagtttctctgctttccaccctggcgccccccagccctggctccccagctgcgctgccccgggcgtccacgccctgcgggcttagcgggttcagtgggctcaatctgcgcagcgccacctccatgttgaccaagcctctacaggggcctcccgcgccccccgggacccccacgccgccgccaggaggcaaggatcgggaagcgttcgaggccgagtatcgactcggccccctcctgggtaaggggggctttggcaccgtcttcgcaggacaccgcctcacagatcgactccaggtggccatcaaagtgattccccggaatcgtgtgctgggctggtcccccttgtcagactcagtcacatgcccactcgaagtcgcactgctatggaaagtgggtgcaggtggtgggcaccctggcgtgatccgcctgcttgactggtttgagacacaggagggcttcatgctggtcctcgagcggcctttgcccgcccaggatctctttgactatatcacagagaagggcccactgggtgaaggcccaagccgctgcttctttggccaagtagtggcagccatccagcactgccattcccgtggagttgtccatcgtgacatcaaggatgagaacatcctgatagacctacgccgtggctgtgccaaactcattgattttggttctggtgccctgcttcatgatgaaccctacactgactttgatgggacaagggtgtacagccccccagagtggatctctcgacaccagtaccatgcactcccggccactgtctggtcactgggcatcctcctctatgacatggtgtgtggggacattccctttgagagggaccaggagattctggaagctgagctccacttcccagcccatgtctccccagactgctgtgccctaatccgccggtgcctggcccccaaaccttcttcccgaccctcactggaagagatcctgctggacccctggatgcaaacaccagccgaggatgtacccctcaacccctccaaaggaggccctgcccctttggcctggtccttgctaccctaagcctggcctggcctggcctggcccccaatggtcagaagagccatcccatggccatgtcacagggatagatggacatttgttgacttggttttacaggtcattaccagtcattaaagtccagtattactaaggtaagggattgaggatcaggggttagaagacataaaccaagtctgcccagttcccttcccaatcctacaaaggagccttcctcccagaacctgtggtccctgattctggagggggaacttcttgcttctcattttgctaaggaagtttattttggtgaagttgttcccattctgagccccgggactcttattctgatgatgtgtcaccccacattggcacctcctactaccaccacacaaacttagttcatatgctcttacttgggcaagggtgctttccttccaataccccagtagcttttattttagtaaagggaccctttcccctagcctagggtcccatattgggtcaagctgcttacctgcctcagcccaggattctttattctgggggaggtaatgccctgttgttaccccaaggcttcttttttttttttttttttttgggtgaggggaccctactctgttatcccaagtgctcttattctggtgagaagaaccttacttccataatttgggaaggaatggaagatggacaccaccggacaccaccagacactaggatgggatggatggttttttgggggatgggctaggggaaataaggcttgctgtttgttctcctggggcgctccctccaacttttgcagattcttgcaacctcctcctgagccgggattgtccaattactaaaatgtaaataatcacgtattgtggggaggggagttccaagtgtgccctcctctcttctcctgcctggattatttaaaaagccatgtgtggaaacccactatttaataaaagtaatagaatcagaa

SEQ ID NO: 166225 - DNA, 892 bp, Homo sapiens
  Payload ID: 12723
  Gene Symbol: PIM2
  Gene Name: Pim-2 proto-oncogene, serine/threonine kinase
  ENST ID: ENST00000442430
  CDS Start-End: 458-892
ttgaactcttgggctcaagcaatccacccacatcagcctcccaaagtgctgggattgcagggatgagccactgtgcctggccgaacttctttcgtttattcaaatgtttattgatctacgacatgcgagatttgtgcaggctctttgctggtttcaccctctcaatcgctgtgtgagtttgtgtctttagggaaagtgaggcccaggaagggaagtgagttgcttagcgacacactgtcaggaaaaggggccctgagttgagcttaggtaaaaagcctcagagctgttgccctgacatctgtcttttttctctccctgcttcccaccccacctgtgcccccagtcagactcagtcacatgcccactcgaagtcgcactgctatggaaagtgggtgcaggtggtgggcaccctggcgtgatccgcctgcttgactggtttgagacacaggagggcttcatgctggtcctcgagcggcctttgcccgcccaggatctctttgactatatcacagagaagggcccactgggtgaaggcccaagccgctgcttctttggccaagtagtggcagccatccagcactgccattcccgtggagttgtccatcgtgacatcaaggatgagaacatcctgatagacctacgccgtggctgtgccaaactcattgattttggttctggtgccctgcttcatgatgaaccctacactgactttgatgggacaagggtgtacagccccccagagtggatctctcgacaccagtaccatgcactcccggccactgtctggtcactgggcatcctcctctatgacatggtgtgtggggacattccctttgagagggaccaggagattctggaagctgagctccacttcccagcccatgtctcccca

SEQ ID NO: 166226 - DNA, 2369 bp, Homo sapiens
  Payload ID: 12724
  Gene Symbol: PIM3
  Gene Name: Pim-3 proto-oncogene, serine/threonine kinase
  Uniprot ID: Q86V86
  ENST ID: ENST00000360612
  CDS Start-End: 436-1416
agcggaccgacgcgacacgccgtgcgcctccgcggctgcgctacgaaaacgagtcccggagcggccccgcgcccgccgcacccggccctcgcccgcccgaagacaggcgccaagctgccccgccgtctccccagctagcgcccggccgccgccgcctcgcgggccccgggcggaagggggcggggtcccgattcgccccgcccccgcggagggatacgcggcgccgcggcccaaaacccccgggcgaggcggccggggcgggtgaggcgctccgcctgctgcgcgtctacgcggtccccgcgggccttccgggcccactgcgccgcgcggaccgcctcgggctcggacggccggtgtccccggcgcgccgctcgcccggatcggccgcggcttcggcgcctggggctcggggctccggggaggccgtcgcccgcgatgctgctctccaagttcggctccctggcgcacctctgcgggcccggcggcgtggaccacctcccggtgaagatcctgcagccagccaaggcggacaaggagagcttcgagaaggcgtaccaggtgggcgccgtgctgggtagcggcggcttcggcacggtctacgcgggtagccgcatcgccgacgggctcccggtggctgtgaagcacgtggtgaaggagcgggtgaccgagtggggcagcctgggcggcgcgaccgtgcccctggaggtggtgctgctgcgcaaggtgggcgcggcgggcggcgcgcgcggcgtcatccgcctgctggactggttcgagcggcccgacggcttcctgctggtgctggagcggcccgagccggcgcaggacctcttcgactttatcacggagcgcggcgccctggacgagccgctggcgcgccgcttcttcgcgcaggtgctggccgccgtgcgccactgccacagctgcggggtcgtgcaccgcgacattaaggacgaaaatctgcttgtggacctgcgctccggagagctcaagctcatcgacttcggttcgggtgcgctgctcaaggacacggtctacaccgacttcgacggcacccgagtgtacagccccccggagtggatccgctaccaccgctaccacgggcgctcggccaccgtgtggtcgctgggcgtgcttctctacgatatggtgtgtggggacatccccttcgagcaggacgaggagatcctccgaggccgcctgctcttccggaggagggtctctccagagtgccagcagctgatccggtggtgcctgtccctgcggccctcagagcggccgtcgctggatcagattgcggcccatccctggatgctgggggctgacgggggcgtcccggagagctgtgacctgcggctgtgcaccctcgaccctgatgacgtggccagcaccacgtccagcagcgagagcttgtgaggagctgcacctgactgggagctaggggaccacctgccttggccagacctgggacgcccccagaccctgactttctcctgcgtgggccgtctcctcctgcggaagcagtgacctctgacccctggtgaccttcgctttgagtgccttttgaacgctggtcccgcgggacttggttttctcaagctctgtctgtccaaagacgctccggtcgaggtcccgcctgccctgggtggatacttgaaccccagacgcccctctgtgctgctgtgtccggaggcggccttcccatctgcctgcccacccggagctctttccgccggcgcagggtcccaagcccacctcccgccctcagtcctgcggtgtgcgtctgggcacgtcctgcacacacaatgcaagtcctggcctccgcgcccgcccgcccacgcgagccgtacccgccgccaactctgttatttatggtgtgaccccctggaggtgccctcggcccaccggggctatttattgtttaatttatttgttgaggttatttcctctgagcagtctgcctctcccaagccccaggggacagtggggaggcaggggagggggtggctgtggtccagggaccccaggccctgattcctgtgcctggcgtctgtcccggccccgcctgtcagaagatgaacatgtatagtggctaacttaaggggagtgggtgaccctgacacttccaggcactgtgcccagggtttgggttttaaattattgactttgtacagtctgcttgtgggctctgaaagctggggtggggccagagcctgagcgtttaatttattcagtacctgtgtttgtgtgaatgcggtgtgtgcaggcatcgcagatgggggttctttcagttcaaaagtgagatgtctggagatcatatttttttatacaggtatttcaattaaaatgtttttgtacatagtggataa

SEQ ID NO: 166227 - DNA, 1545 bp, Homo sapiens
  Payload ID: 12725
  Gene Symbol: PINX1
  Gene Name: PIN2/TERF1 interacting, telomerase inhibitor 1
  Uniprot ID: Q96BK5
  ENST ID: ENST00000314787
  CDS Start-End: 121-1107
cgtccgctgcagtccgccggcgagggagttacgcacgtcctgattctcctggagtctccagcccgcccagtggccgcagtcacccaggtccagaggcggcggtatcacaggctctccgacatgtctatgctggctgaacgtcggcggaagcagaagtgggctgtggatcctcagaacactgcctggagtaatgacgattccaagtttggccagcggatgctagagaagatggggtggtctaaaggaaagggtttaggggctcaggagcaaggagccacagatcatattaaagttcaagtgaaaaataaccacctgggactcggagctaccatcaataatgaagacaactggattgcccatcaggatgattttaaccagcttctggccgaactgaacacttgccatgggcaggaaaccacagattcctcggacaagaaggaaaagaaatcttttagccttgaggaaaagtccaaaatctccaaaaaccgtgttcactatatgaaattcacaaaagggaaggatctgtcatctcggagcaaaacagatcttgactgcatttttgggaaaagacagagtaagaagactcccgagggcgatgccagtccctccactccagaggagaacgaaaccacgacaaccagcgccttcaccatccaggagtactttgccaagcggatggcagcactgaagaacaagccccaggttccagttccagggtctgacatttctgagacgcaggtggaacgtaaaagggggaagaaaagaaataaagaggccacaggtaaagatgtggaaagttacctccagcctaaggccaagaggcacacggagggaaagcccgagagggccgaggcccaggagcgagtggccaagaagaagagcgcgccagcagaagagcagctcagaggcccctgctgggaccagagttccaaggcctctgctcaggatgcaggggaccatgtgcagccgcctgagggccgggacttcaccctgaagcccaaaaagaggagagggaagaaaaagctgcaaaaaccagtagagatagcagaggacgctacactagaagaaacgctagtgaaaaagaagaagaagaaagattccaaatgaatccttcccagccggggccttccgaccactcagctgtcagggcactgcgggggcagacacctctggcctgaagtcacagcagagttcaccccagagcgcctgggcgcatcttgtggcatgcccatgggctgccgagtcctgccctctcgccacatttcccccaagttacattcccaggaggacctttttaatgttctcaatcgtggctctcagacacaaataaatttttttgtaaactctgagcccttcagcaagagagtttaattataatcattacaaatacatgcattcatgtaagtgtgcacacgtgtgtgtgcatgtgcgcatctgtgtgtgtgtgtgtgtgtcactatctccgtttgctctcggttcccttcaataacaatgaatggtgctttcttctgaaagactcagcctaattaaaggattaagaggcaa

SEQ ID NO: 166228 - DNA, 778 bp, Homo sapiens
  Payload ID: 12725
  Gene Symbol: PINX1
  Gene Name: PIN2/TERF1 interacting, telomerase inhibitor 1
  ENST ID: ENST00000523559
  CDS Start-End: 121-525
cgtccgctgcagtccgccggcgagggagttacgcacgtcctgattctcctggagtctccagcccgcccagtggccgcagtcacccaggtccagaggcggcggtatcacaggctctccgacatgtctatgctggctgaacgtcggcggaagcagaagtgggctgtggatcctcagaacactgcctggagtaatgacgattccaagtttggccagcggatgctagagaagatggggtggtctaaaggaaagggtttaggggctcaggagcaaggagccacagatcatattaaagttcaagtgaaaaataaccacctgggactcggagctaccatcaataatgaagacaactggattgcccatcaggatgattttaaccagcttctggccgaactgaacacttgccatgggcaggaaaccacagattcctcggacaagaaggaaaagaaatcttttagccttgaggaaaagtccaaaatctccaaaaaccgtgttcactatatgaaattcacaaaagtttattgttgaagtcaccttggattccttgtcttacagaatttcccatgtcctgaattttgttgatttcaccttcccagtgggctttaatgtattcacttcgtaaagagaccgtacactgactcactttaaccacatagattaccatccctgctgaatccacatttatccttaatttcccttgtgtggctttttaccaaaagggcgatgccagtccctccactccagaggagaacgaaaccacgacaaccagcgccttcaccat

SEQ ID NO: 166229 - DNA, 610 bp, Homo sapiens
  Payload ID: 12725
  Gene Symbol: PINX1
  Gene Name: PIN2/TERF1 interacting, telomerase inhibitor 1
  ENST ID: ENST00000524114
  CDS Start-End: 16-610
cacaggctctccgacatgtctatgctggctgaacgtgagtgtcggaagcggaggcccgacccaggtcggcggaagcagaagtgggctgtggatcctcagaacactgcctggagtaatgacgattccaagtttggccagcggatgctagagaagatggggtggtctaaaggaaagggtttaggggctcaggagcaaggagccacagatcatattaaagttcaagtgaaaaataaccacctgggactcggagctaccatcaataatgaagacaactggattgcccatcaggatgattttaaccagcttctggccgaactgaacacttgccatgggcaggaaaccacagattcctcggacaagaaggaaaagaaatcttttagccttgaggaaaagtccaaaatctccaaaaaccgtgttcactatatgaaattcacaaaagggaaggatctgtcatctcggagcaaaacagatcttgactgcatttttgggaaaagacagagtaagaagactcccgagggcgatgccagtccctccactccagaggagaacgaaaccacgacaaccagcgccttcaccatccaggagtactttgccaagcggatggcagcac

SEQ ID NO: 166230 - DNA, 1272 bp, Homo sapiens
  Payload ID: 12725
  Gene Symbol: PINX1
  Gene Name: PIN2/TERF1 interacting, telomerase inhibitor 1
  Uniprot ID: Q96BK5
  ENST ID: ENST00000519088
  CDS Start-End: 121-645
cgtccgctgcagtccgccggcgagggagttacgcacgtcctgattctcctggagtctccagcccgcccagtggccgcagtcacccaggtccagaggcggcggtatcacaggctctccgacatgtctatgctggctgaacgtcggcggaagcagaagtgggctgtggatcctcagaacactgcctggagtaatgacgattccaagtttggccagcggatgctagagaagatggggtggtctaaaggaaagggtttaggggctcaggagcaaggagccacagatcatattaaagttcaagtgaaaaataaccacctgggactcggagctaccatcaataatgaagacaactggattgcccatcaggatgattttaaccagcttctggccgaactgaacacttgccatgggcaggaaaccacagattcctcggacaagaaggaaaagaaatcttttagccttgaggaaaagtccaaaatctccaaaaaccgtgttcactatatgaaattcacaaaagggcgatgccagtccctccactccagaggagaacgaaaccacgacaaccagcgccttcaccatccaggagtactttgccaagcggatggcagcactgaagaacaagccccaggttccagttccagggtctgacatttctgagacgcaggtggaacgtaaaagggggaagaaaagaaataaagaggccacaggtaaagatgtggaaagttacctccagcctaaggccaagaggcacacggagggaaagcccgagagggccgaggcccaggagcgagtggccaagaagaagagcgcgccagcagaagagcagctcagaggcccctgctgggaccagagttccaaggcctctgctcaggatgcaggggaccatgtgcagccgcctgagggccgggacttcaccctgaagcccaaaaagaggagagggaagaaaaagctgcaaaaaccagtagagatagcagaggacgctacactagaagaaacgctagtgaaaaagaagaagaagaaagattccaaatgaatccttcccagccggggccttccgaccactcagctgtcagggcactgcgggggcagacacctctggcctgaagtcacagcagagttcaccccagagcgcctgggcgcatcttgtggcatgcccatgggctgccgagtcctgccctctcgccacatttcccccaagttacattcccaggaggacctttttaatgttctcaatcgtggctctcagacacaaataaatttttttgtaaactctga

SEQ ID NO: 166231 - DNA, 440 bp, Homo sapiens
  Payload ID: 12725
  Gene Symbol: PINX1
  Gene Name: PIN2/TERF1 interacting, telomerase inhibitor 1
  ENST ID: ENST00000524061
  CDS Start-End: 1-59
atatgaaattcacaaaaggaagaacagtcttactgaaaagcatcacattgtttttctagggaaggatctgtcatctcggagcaaaacagatcttgactgcatttttgggaaaagacagagtaagaagactcccgagtttattgttgaagtcaccttggattccttgtcttacagaatttcccatgtcctgaattttgttgatttcaccttcccagtgggctttaatgtattcacttcgtaaagagaccgtacactgactcactttaaccacatagattaccatccctgctgaatccacatttatccttaatttcccttgtgtggctttttaccaaaaggtaaatggttcttgccatcacatagcttacagtgtaatctgaaagataataatattgtaaactctttcaaaatactaatgtcaaatagaagatatgtcagcc

SEQ ID NO: 166232 - DNA, 3576 bp, Homo sapiens
  Payload ID: 12726
  Gene Symbol: PNN
  Gene Name: pinin, desmosome associated protein
  Uniprot ID: Q9H307
  ENST ID: ENST00000216832
  CDS Start-End: 68-2221
cgcctcggcggcgcggcatagcccggctcggcctgtaaagcagtctcaagcctgccgcagggagaagatggcggtcgccgtgagaactttgcaggaacagctggaaaaggccaaagagagtcttaagaacgtggatgagaacattcgcaagctcaccgggcgggatccgaatgacgtgaggcccatccaagccagattgctggccctttctggtcctggtggaggtagaggacgtggtagtttattactgaggcgtggattctcagatagtggaggaggacccccagccaaacagagagaccttgaaggggcagtcagtaggctgggcggggagcgtcggaccagaagagaatcacgccaggaaagcgacccggaggatgatgatgttaaaaagccagcattgcagtcttcagttgtagctacctccaaagagcgcacacgtagagaccttatccaggatcaaaatatggatgaaaagggaaagcaaaggaaccggcgaatatttggcttgttgatgggtacccttcaaaaatttaaacaagaatccactgttgctactgaaaggcaaaagcggcgccaggaaattgaacaaaaacttgaagttcaggcagaagaagagagaaagcaggttgaaaatgaaaggagagaactgtttgaagagaggcgtgctaaacagacagaactgcggcttttggaacagaaagttgagcttgcgcagctgcaagaagaatggaatgaacataatgccaaaataattaaatatataagaactaagacaaagccccatttgttttatattcctggaagaatgtgtccagctacccaaaaactaatagaagagtcacagagaaaaatgaacgctttatttgaaggtagacgcatcgaatttgcagaacaaataaataaaatggaggctaggcctagaagacaatcaatgaaggaaaaagagcatcaggtggtgcgtaatgaagaacagaaggcggaacaagaagagggtaaggtggctcagcgagaggaagagttggaggagacaggtaatcagcacaatgatgtagaaatagaggaagcaggagaggaagaggaaaaggaaatagcgattgttcatagtgatgcagagaaagaacaggaggaggaagaacaaaaacaggaaatggaggttaagatggaggaggaaactgaggtaagggaaagtgagaagcagcaggatagtcagcctgaagaagttatggatgtgctagagatggttgagaatgtcaaacatgtaattgctgaccaggaggtaatggaaactaatcgagttgaaagtgtagaaccttcagaaaatgaagctagcaaagaattggaaccagaaatggaatttgaaattgagccagataaagaatgtaaaaccctttctcctgggaaagagaatgtcagtgctttagacatggaaaaggagtctgaggaaaaagaagaaaaagaatctgagccccaacctgagcctgtggctcaacctcagcctcagtctcagccccagcttcagcttcaatcccagtcccaaccagtactccagtcccagcctccctctcagcctgaggatttgtcattagctgttttacagccaacaccccaagttactcaggagcaagggcatttactacctgagaggaaggattttcctgtagagtctgtaaaactcactgaggtaccagtagagccagtcttgacagtacatccagagagcaagagcaaaaccaaaactaggagcagaagtagaggtcgagctagaaataaaacaagcaagagtagaagtcgaagcagtagcagtagcagttctagtagcagttcaaccagtagcagcagtggaagtagttccagcagtggaagtagtagcagtcgcagtagttccagtagcagctccagtacaagtggcagcagcagcagagatagtagcagtagcactagtagtagtagtgagagtagaagtcggagtaggggccggggacataatagagatagaaagcacagaaggagcgtggatcggaagagaagggatacttcaggactagaaagaagtcacaaatcttcaaaaggtggtagtagtagagatacaaaaggatcaaaggataagaattcccggtccgacagaaagaggtctatatcagagagtagtcgatcaggcaaaagatcttcaagaagtgaaagagaccgaaaatcagacaggaaagacaaaaggcgttaatggaagaagccaggctttcttagccattctttgcagcagaagatttcttgataaaaaaggattacctttccttgtaaagaggatgctgccttaagaattgcatgttgtaaaaaatctttttggaaaatacagactgtttgtttaccagacattcttgtactttttgcataattttgtaagagttatttatcaaaattatgtgaggttccaaaatatgtaaaaatgataataataaaaaaagattaacatcccttgtcatcttttttaaatatcctatactcttcagtaagaatctgtatattttaataggcaaatctttaagtctgttcccttctaattctgtatcatacattgcttttgtagaaataaatgtgtgtttatttcattatttttgggatgtcctcgttgacacttgtataataaatatcctctttatcattttcagcttttaacactagatactgcacgtgattagaatgtttttgaaggtttcctcgtttttatttgccttggacagtttttagttgtcagagtcagagctttgcagctttgagggggaacagttctctttaaaatcatttgctattttctattctcccttgttattttaatctaagcattttcccccgtttctcatattttaaccatatgttcggtagataactaaacagtatgatctggttggcattttcttcctgatgatgggagcgtcattcttttgtcttcatggttacttgtgtgatataacatacatctgttaaagaaaatcacttctttctaggggagggaggtagaaaagtatctttcaaacttggtttttgagtttgtgtcttgtcttaactttgtgttggctctaacttaaacatgctgatatgtgttttcaagaattttgtttaaggaagtattgtatggaagtccacaaaatgaaggaagttcatctaggttttaatatgtaagcaagataacacacaagtgtaccaagtgattattaactttgttgttttacaaatttgtatgaacttggagtatctgttggccattactatacatgtgcaaataaatgtggcttagacttgtgtgactgcttaagactagtacttgtattaactttctgatgctttatacaagagagcacttaaattgcatccttctttgagtttaacactgtagctttagccttgactttgaatattcattttgccttcccttgacaagtaaatggttacagtgaaaatgtgaagaagtatttccagttagtttttgtgtgtatataactcacttgtgtaagtggatgtgttaaaagatctctttttaaaaatccttttattggagtaattattaaaacagtaaatgca

SEQ ID NO: 166233 - DNA, 656 bp, Homo sapiens
  Payload ID: 12726
  Gene Symbol: PNN
  Gene Name: pinin, desmosome associated protein
  ENST ID: ENST00000553331
  CDS Start-End: 98-472
attggctgagcccggctgtcagtcctttcgcgcctcggcggcgcggcatagcccggctcggcctgtaaagcagtctcaagcctgccgcagggagaagatggcggtcgccgtgagaactttgcaggaacagctggaaaaggccaaagagagtcttaagaacgtggatgagaacattcgcaagctcaccgggcgggatccgaatgacgtgaggcccatccaagccagattgctggccctttctggtcctggtggaggtagaggacgtggtagtttattactgaggcgtggattctcagatagtggaggaggacccccagccaaacagagagaccttgaaggggcagtcagtaggctgggcggggagcgtcggaccagaagagaatcacgccaggaaagcgacccggaggatgatgatgttaaaaaggaaccggcgaatatttggcttgttgatgggtacccttcaaaaatttaaacaagaatccactgttgctactgaaaggcaaaagcggcgccaggaaattgaacaaaaacttgaagttcaggcagaagaagagagaaagcaggttgaaaatgaaaggagagaactgtttgaagagaggcgtgctaaacagacagaactgcggcttttggaacagaaagttgagcttgcgcagctg

SEQ ID NO: 166234 - DNA, 601 bp, Homo sapiens
  Payload ID: 12726
  Gene Symbol: PNN
  Gene Name: pinin, desmosome associated protein
  ENST ID: ENST00000556530
  CDS Start-End: 51-404
atagcccggctcggcctgtaaagcagtctcaagcctgccgcagggagaagatggcggtcgccgtgagaactttgcaggaacagctggaaaaggccaaagagagtcttaagaacgtggatgagaacattcgcaagctcaccgggcgggatccgaatgacgtgaggcccatccaagccagattgctggccctttctggtcctggtggaggtagaggacgtggtagtttattactgaggcgtggattctcagatagtggaggaggacccccagccaaacagagagaccttgaaggggcagtcagtaggctgggcggggagcgtcggaccagaagagaatcacgccaggaaagcgacccggaggatgatgatgttaaaaaggtattgagattgaaagaacttaaatgaatgtagtaccttcactttactacatttaaaagcacaccactcatatgctagttaaattactgagattttctttttctgcagccagcattgcagtcttcagttgtagctacctccaaagagcgcacacgtagagaccttatccaggatcaaaatatggatgaaaagggaaagcaaaggtatttccctgggggaaaaaa

SEQ ID NO: 166235 - DNA, 2414 bp, Homo sapiens
  Payload ID: 12727
  Gene Symbol: PIPOX
  Gene Name: pipecolic acid oxidase
  Uniprot ID: Q9P0Z9
  ENST ID: ENST00000323372
  CDS Start-End: 327-1499
gagacaggaaggtggcaaaggaaggagcccatttgcatgacaataattgagccaagaatagaaagccacagggatgcaagggtgaggctggcggctgagctgggctaaacctcacaaatcagactacccagctctgctccgcaggggaagggagactgagccctgggccaggcttggcagagagggaagcgggaggacacgaccccagggcattgtgggaacactggccaggctggactttgccttcctcctcgtcctttagccgggagcctgtctttgcttgcctttgcctttgaggctctgtggctgtggggctgagtggcatcatggcggctcagaaagatctctgggacgccattgtgattggggcggggatccagggctgcttcactgcataccacctggccaaacacaggaagaggatcctcctgctggagcagttctttctaccacactcccgaggaagctcccatggacaaagccggataatccgaaaggcgtacctggaagacttttacacccggatgatgcatgagtgctatcagatatgggcccagctggagcacgaggctggaacccaattgcacaggcagactggattactgctgctgggaatgaaagagaatcaagaattaaagacaatccaggccaatctgtcgaggcagagggtagaacaccagtgtctttcatctgaggaactgaagcaacgtttcccaaatattcggttgcccaggggagaagtggggctcttggacaattccggaggagttatctatgcatataaggccctcagagccctgcaggatgcaattcgacagctaggaggcatagtgcgtgacggagagaaggtggtggagataaacccagggctactggtcacggtgaaaaccacctccaggagctaccaagctaagagcttggtcatcacagcaggtccttggaccaaccagctcctccgtcccctgggcattgagatgcctctccagaccctgcggatcaacgtgtgttactggcgagagatggttcctgggagctatggtgtgtcccaggcctttccgtgcttcctgtggctgggcttgtgtccccaccacatctacggactgcccacaggagagtacccagggctgatgaaggtcagctatcaccacggcaaccacgcagaccctgaggagcgggactgccccacagcacgcacagacatcggagacgtccagatcctgagcagctttgtcagagatcacttacctgatctgaagcccgagcctgctgtcattgagagctgcatgtacacgaatacccctgatgagcagttcattctcgatcgccacccaaagtatgacaacattgtcattggtgctggattctctgggcacgggttcaagctggcccctgtggtggggaagatcctgtatgaattaagcatgaaattaacaccatcttatgacttggcaccttttcgaatcagccgtttcccaagcctgggcaaagcccacctttgacctctggccagaagcctcccttctgtgcacaggagccagtttcacagatggagaagatgtctcagatgaagggagtgtccctgagatatcatccttttcttctgcctcgcctgaatcccccataaacaccagatgattgagtctaccttctttccttggcccgctccctttttcttctgcctcacttgaatcccccgtaaacaccagacgattgagtctaccttcttttcttggccacctccccattcacaactactttctcgctcccagaaggttgatcagatattctacaatcacagagtagcaaggacgtttgagatgggtatatcagtaagaagagggcacaagaactggctctggagaccaaagcagttgttaaaaattctctttgctgggggccgggtgtggtggctcacacctgtaatctcggcactttggggggctgagacaggcggatcacctgaggccaggaattcaagaccagcctggccaacatggtgaaaccctatctccactaaaaatacaaaattagctgggtgtggtggcgcatgcctgtaatcccagctacttgggagactgaggcaagagaatcacttgaacccgggaggtggaggtggcagtgagccgagattgcgccattgcactccagcctgggcaaaaagagtgagactctgtctcaaaaaaaaaacaaaacaaaaaaaacctctttgctggtatatttgaagagcttgggatggatttgactaaatctgccccgaggagggtgaacaaggtgatctcagagatcactactgctcttggagttccttctcctaaagctaaggccagcctccatcacaaatgcccataaaatctggctcgtctttgatgaacaataaatatttgttgaacaaataaataactgccctgcattaa

SEQ ID NO: 166236 - DNA, 760 bp, Homo sapiens
  Payload ID: 12727
  Gene Symbol: PIPOX
  Gene Name: pipecolic acid oxidase
  ENST ID: ENST00000469082
  CDS Start-End: 147-760
gggctggagtagttgaactggaaggttttttctaattttgcttctttgtgaatctaagtgagttctttctaccacactcccgaggaagctcccatggacaaagccggataatccgaaaggcgtacctggaagacttttacacccggatgatgcatgagtgctatcagatatgggcccagctggagcacgaggctggaacccaattgcacaggcagactggattactgctgctgggaatgaaagagaatcaagaattaaagacaatccaggccaatctgtcgaggcagagggtagaacaccagtgtctttcatctgaggaactgaagcaacgtttcccaaatattcggttgcccaggggagaagtggggctcttggacaattccggaggagttatctatgcatataaggccctcagagccctgcaggatgcaattcgacagctaggaggcatagtgcgtgacggagagaaggtggtggagataaacccagggctactggtcacggtgaaaaccacctccaggagctaccaagctaagagcttggtcatcacagcaggtccttggaccaaccagctcctccgtcccctgggcattgagatgcctctccagaccctgcggatcaacgtgtgttactggcgagagatggttcctgggagctatggtgtgtcccaggcctttccgtgcttcctgtggctgggcttgtgtccccaccacatctacggactgcccacaggagagtacccagggctgatgaaggtcag

SEQ ID NO: 166237 - DNA, 720 bp, Homo sapiens
  Payload ID: 12727
  Gene Symbol: PIPOX
  Gene Name: pipecolic acid oxidase
  ENST ID: ENST00000466889
  CDS Start-End: 262-720
gtcagcatcagtttccttgttcataaaatgaaggggctggagtagttgaactggaaggttttttctaattttgcttctttgtgaatctaagtgaggtgagattgcagcaggatggttgaagactagctaacaaaagaacttctggatgtgaacaacgttagcaaaaaggaagcctaattctttctaccacactcccgaggaagctcccatggacaaagccggataatccgaaaggcgtacctggaagacttttacacccggatgatgcatgagtgctatcagatatgggcccagctggagcacgaggctggaacccaattgcacaggcagactggattactgctgctgggaatgaaagagaatcaagaattaaagacaatccaggccaatctgtcgaggcagagggtagaacaccagtgtctttcatctgaggaactgaagcaacgtttcccaaatattcggttgcccaggggagaagtggggctcttggacaattccggaggagttatctatgcatataaggccctcagagccctgcaggatgcaattcgacagctaggaggcatagtgcgtgacggagagaaggtggtggagataaacccagggctactggtcacggtgaaaaccacctccaggagctaccaagctaagagcttggtcatcacagcaggtccttggaccaaccagctcctccgtcccctgggcattgagatgcctctc

SEQ ID NO: 166238 - DNA, 1282 bp, Homo sapiens
  Payload ID: 12728
  Gene Symbol: PIR
  Gene Name: pirin (iron-binding nuclear protein)
  Uniprot ID: O00625
  ENST ID: ENST00000380420
  CDS Start-End: 205-1077
cctcccgcctcctctaggccgccggccgcgaagcgctgagtcacggtgaggctactggacccacactctcttaacctgccctccctgcactcgctcccggcggctcttcgcgtcacccccgccgctaaggctccaggtgccgctaccgcagcccctccatcctctacagctcagcatcagaacactctctttttagactccgatatggggtcctccaagaaagttactctctcagtgctcagccgggagcagtcggaaggggttggagcgagggtccggagaagcattggcagacccgagttaaaaaatctggatccgtttttactgtttgatgaatttaaaggaggtagaccaggaggatttcctgatcatccacatcgaggttttgaaacagtatcctacctcctggaagggggcagcatggcccatgaagacttctgtggacacactggtaaaatgaacccaggagatttgcagtggatgactgcgggccggggcattctgcacgctgagatgccttgctcagaggagccagcccatggcctacaactgtgggttaatttgaggagctcagagaagatggtggagcctcagtaccaggaactgaaaagtgaagaaatccctaaacccagtaaggatggtgtgacagttgctgtcatttctggagaagccctgggaataaagtccaaggtttacactcgcacaccaaccttatatttggacttcaaattggacccaggagccaaacattcccaacctatccctaaagggtggacaagcttcatttacacgatatctggagatgtgtatattgggcccgatgatgcacaacaaaaaatagaacctcatcacacagcagtgcttggagaaggtgacagtgtccaggtggagaacaaggatcccaagagaagccactttgtcttaattgctggggagccattaagagaaccagttatccaacatggtccatttgtgatgaacaccaatgaagagatttctcaagctattcttgatttcagaaacgcaaaaaatgggtttgaaagggccaaaacctggaaatcaaagattgggaactagtggaaagcggaagagcaggtcttgatgtgtcctagaattttgccatttctgagattgagccattgaaggcattccatttctaaagcttatttagccggtgcttctaaagaattccacactaacgtgataacatggtttttgtaacaataaatgtaggatatttcctggcacatgcaaataaacctaatcattgtttctttaaaaa

SEQ ID NO: 166239 - DNA, 1539 bp, Homo sapiens
  Payload ID: 12728
  Gene Symbol: PIR
  Gene Name: pirin (iron-binding nuclear protein)
  Uniprot ID: O00625
  ENST ID: ENST00000380421
  CDS Start-End: 462-1334
accgaccggagcgccgatcagagcacctgcccgggccacacatttcctcctggagcacagcaagtgccgcctaaattacccgagtgagcatctcttcccggcacgagaggcagggaggccaaagggccgccaagctggcctgggagaggcgtagggcggagcgagagtggagtgacattcccgagggcggagccccagggcctccgagacccgtagactcccgcctcccgcctcctctaggccgccggccgcgaagcgctgagtcacggtgaggctactggacccacactctcttaacctgccctccctgcactcgctcccggcggctcttcgcgtcacccccgccgctaaggctccaggtgccgctaccgcagcgtgagtacctggggctcctgcaggggtccactagccctccatcctctacagctcagcatcagaacactctctttttagactccgatatggggtcctccaagaaagttactctctcagtgctcagccgggagcagtcggaaggggttggagcgagggtccggagaagcattggcagacccgagttaaaaaatctggatccgtttttactgtttgatgaatttaaaggaggtagaccaggaggatttcctgatcatccacatcgaggttttgaaacagtatcctacctcctggaagggggcagcatggcccatgaagacttctgtggacacactggtaaaatgaacccaggagatttgcagtggatgactgcgggccggggcattctgcacgctgagatgccttgctcagaggagccagcccatggcctacaactgtgggttaatttgaggagctcagagaagatggtggagcctcagtaccaggaactgaaaagtgaagaaatccctaaacccagtaaggatggtgtgacagttgctgtcatttctggagaagccctgggaataaagtccaaggtttacactcgcacaccaaccttatatttggacttcaaattggacccaggagccaaacattcccaacctatccctaaagggtggacaagcttcatttacacgatatctggagatgtgtatattgggcccgatgatgcacaacaaaaaatagaacctcatcacacagcagtgcttggagaaggtgacagtgtccaggtggagaacaaggatcccaagagaagccactttgtcttaattgctggggagccattaagagaaccagttatccaacatggtccatttgtgatgaacaccaatgaagagatttctcaagctattcttgatttcagaaacgcaaaaaatgggtttgaaagggccaaaacctggaaatcaaagattgggaactagtggaaagcggaagagcaggtcttgatgtgtcctagaattttgccatttctgagattgagccattgaaggcattccatttctaaagcttatttagccggtgcttctaaagaattccacactaacgtgataacatggtttttgtaacaataaatgtaggatatttcctggcacatgcaaataaacctaatcattgtttctttaaaaa

SEQ ID NO: 166240 - DNA, 1603 bp, Homo sapiens
  Payload ID: 12729
  Gene Symbol: PITHD1
  Gene Name: PITH (C-terminal proteasome-interacting domain of thioredoxin-like) domain containing 1
  Uniprot ID: Q9GZP4
  ENST ID: ENST00000246151
  CDS Start-End: 112-747
gcgcggcgcgcttagttgccggagctgaacggcgcggagctggtctgaggcgagccgagccgagcgagcgcggcggtggggccgagaggacgcgcaggtggcggcgttgccatgtcgcacggtcacagccacggcgggggtggctgccgctgcgccgccgaacgggaggagccgcccgagcagcgcggcctggcctacggcctgtacctgcgcatcgacctggagcggctgcaatgccttaacgagagccgcgagggcagcggccgcggcgtcttcaagccgtgggaggagcggaccgaccgctccaagtttgttgaaagtgatgcagatgaagagcttctgtttaatattccatttacgggcaatgtcaagctcaaaggcatcattataatgggagaggatgatgactcacacccctctgagatgagactgtacaagaatattccacagatgtcctttgatgatacagaaagggagccagatcagacctttagtctgaaccgggatcttacaggagaattagagtatgctacaaaaatttctcgtttttcaaatgtctatcatctctcaattcatatttcaaaaaacttcggagcagatacgacaaaggtcttttatattggcctgagaggagagtggactgagcttcgccgacacgaggtgaccatctgcaattacgaagcatctgccaacccagcagaccatagggtccatcaggttaccccacagacacactttatttcctaagggctggccaaggctcccatagaggcgctgtgtcagtgaagatgtacgactacctgttgggaaggacaaagggatgaggctccagagagagttggctgccacagcctctgccaagctttgtctttggggcttgctgcagaaacctggcctacggaagatacgacaccactgggagggttgtgtaggtgccaggggaccatcgtggttctctagggcgctgtggaaattgggtcttgggctgggtggcatctggcagtcatgggtaacacttgcttttccagttaatgtggccatgtgattccaagtgtcatgttgctttgtggcaagattgttgtgtgacttgtttttttgtttttgtttttgtttttttaaaggaaactatttgtgggctataggaaactttctgatgcctccggattgtgttagtagtagccatcaggagggtctccaactaaaacacttgttcctgcttgctcctttcccctctcattgttcagcattcttgtcaagttgcccagcttggagttgtctgtcacgcacatgtgtcctgtggttatagctagaaggacaggagtctcctgctgatgcgtgatagcttaagcttggggagaaggtcttttccactgcctagctaagcagtctggggagagcatggggatcatttctatgtgtgtgggtaatctggtcagtaagattgagacttagttaagattccccttggaaattccttaatgtttattagcttctaactagtgttgtaagtccgatgccagaatttggagatttgagttcttcttttcatggcttttattcactgtgactaataagcttcctaataaatccttgccagacttaa

SEQ ID NO: 166241 - DNA, 1292 bp, Homo sapiens
  Payload ID: 12729
  Gene Symbol: PITHD1
  Gene Name: PITH (C-terminal proteasome-interacting domain of thioredoxin-like) domain containing 1
  ENST ID: ENST00000374524
  CDS Start-End: 140-436
tggattaaagatatttgtaggctagacgcggtggctcatgcctgtaattccagcactttcggagaccgacgtaggcggatcacctgaggttgggagttagagaccagcattgccaacatggtacaagaatattccacagatgtcctttgatgatacagaaagggagccagatcagacctttagtctgaaccgggatcttacaggagaattagagtatgctacaaaaatttctcgtttttcaaatgtctatcatctctcaattcatatttcaaaaaacttcggagcagatacgacaaaggtcttttatattggcctgagaggagagtggactgagcttcgccgacacgaggtgaccatctgcaattacgaagcatctgccaacccagcagaccatagggtccatcaggttaccccacagacacactttatttcctaagggctggccaaggctcccatagaggcgctgtgtcagtgaagatgtacgactacctgttgggaaggacaaagggatgaggctccagagagagttggctgccacagcctctgccaagctttgtctttggggcttgctgcagaaacctggcctacggaagatacgacaccactgggagggttgtgtaggtgccaggggaccatcgtggttctctagggcgctgtggaaattgggtcttgggctgggtggcatctggcagtcatgggtaacacttgcttttccagttaatgtggccatgtgattccaagtgtcatgttgctttgtggcaagattgttgtgtgacttgtttttttgtttttgtttttgtttttttaaaggaaactatttgtgggctataggaaactttctgatgcctccggattgtgttagtagtagccatcaggagggtctccaactaaaacacttgttcctgcttgctcctttcccctctcattgttcagcattcttgtcaagttgcccagcttggagttgtctgtcacgcacatgtgtcctgtggttatagctagaaggacaggagtctcctgctgatgcgtgatagcttaagcttggggagaaggtcttttccactgcctagctaagcagtctggggagagcatggggatcatttctatgtgtgtgggtaatctggtcagtaagattgagacttagttaagattccccttggaaattccttaatgtttattagcttctaactagtgttgtaagtccgatgccagaatttggagatttgagttcttcttttcatggcttttattcactgtgactaataagcttcctaataaatccttgccagacttaa

SEQ ID NO: 166242 - DNA, 754 bp, Homo sapiens
  Payload ID: 12729
  Gene Symbol: PITHD1
  Gene Name: PITH (C-terminal proteasome-interacting domain of thioredoxin-like) domain containing 1
  ENST ID: ENST00000415372
  CDS Start-End: 545-754
agcagggtgggagatgcctgaaattgtaggctctcagcaaatatttgttgctttctcctcccccctccccatcccctccagtttgttgaaagtgatgcagatgaagagcttctgtttaatattccgtaagtatctccttggtgcctacctcaggctaaataggctgtacccagttgcctcagatggattcattcactggtgtcaagagcacacatttgcttctagaaatgggataaattactttggtgggtttgaggaggaaagcatcatagctttcttggtgcagactggaaacagatgtatttgtagaacaataactgagaaattgaggtagatttcttagaattgtagaatgctagaggtagacaggatcttagaaattatctagtacaagttgacagatgagtaaactgaagcccatacaggggaagggtcttgcccagggtcacacaactaaacaggtattcaaactcaggtttgacaaccttctcttttgcattctggcagatttacgggcaatgtcaagctcaaaggcatcattataatgggagaggatgatgactcacacccctctgagatgagactgtacaagaatattccacagatgtcctttgatgatacagaaagggagccagatcagacctttagtctgaaccgggatcttacaggagaattagagtatgctacaaaaatttctcgtttttcaaatgtctatcatctctcaattcatatttcaaaaaacttcggagcagat

SEQ ID NO: 166243 - DNA, 7086 bp, Homo sapiens
  Payload ID: 12730
  Gene Symbol: PITPNM3
  Gene Name: PITPNM family member 3
  Uniprot ID: Q9BZ71
  ENST ID: ENST00000262483
  CDS Start-End: 89-3013
gagtccgttcggggccggaggcggtcggggccgggcccgggaagcgcgaggagcgcgcgtagcgccgccggagcccgccgcccgggacatggccaaggcgggccgtgcaggtggtcctcccccgggcggcggtgccccctggcaccttcgaaatgtcctcagtgactctgtggagagctcagatgatgaattctttgatgccagagaggagatggctgaagggaagaatgccatcctcattgggatgagccagtggaactccaatgacctcgtggagcagatcgagaccatggggaaactggacgagcatcaaggagaagggaccgcgccgtgcacatccagcatcctccaggagaagcagcgagaactgtaccgggtttccttgagaagacagaggttcccagcccagggaagcatcgagatccacgaagacagcgaggaaggctgcccgcagcgctcctgcaagacacatgtcctcctgctggtcctgcatgggggaaacatcctggacacgggtgccggggacccgtcctgcaaggcagccgacatccacaccttcagctccgtgctggagaaggtcacacgagcccatttccctgctgccctgggccacatcctcatcaagttcgtcccctgtcctgccatctgctctgaggctttctcgcttgtctctcacctgaacccctacagccacgatgagggctgcctcagcagcagccaggaccacgtccctctggccgcccttcccctgttggccatctcctccccgcagtaccaggatgctgtcgccaccgtcatcgagcgagccaaccaggtctacagagagttcctgaagtcctctgatgggattggcttcagtgggcaggtgtgtctcatcggggactgtgtggggggcctcctggccttcgatgccatctgctacagtgcggggccctcaggggacagccctgccagcagcagccggaaggggagcatcagcagcacccaggacaccccagtcgcggtggaggaagattgcagcctggccagcagcaagcgtctcagcaaaagcaacattgacatctccagtgggttggaggatgaggagcccaagaggccgttgccgcggaaacagagcgactcctccacctatgactgcgaggccatcacccagcaccatgccttcctctcaagcatccactccagcgtgctaaaggatgagtctgagaccccggcggctggggggccgcagctccctgaggtcagcctgggccgctttgacttcgatgtgtccgacttcttcctcttcggctcgccactgggcctggtcctggccatgcggaggacggtgctgcctgggctggacggcttccaggtgcgtcctgcctgcagccaggtctacagcttcttccattgcgcagacccctctgcctcacggctcgagccactgctggagcccaagttccacctggtgccgcctgtcagcgtgcctcgctaccagaggttcccactgggcgatgggcagtccctcctcctcgctgatgccctacacacccacagccccctcttcctggagggcagctcccgggacagcccgccacttctggatgcccctgcctcgccccctcaggcctcgaggttccagcgcccaggacggaggatgagcgaggggagctcccacagcgagagctcggagtcctcggacagcatggcacccgtgggtgcctcccgcatcacagccaagtggtggggaagcaagaggatcgactatgccctgtactgccctgatgtcctcacggccttccccaccgtggccctgccccacctcttccacgccagttactgggagtccacagacgtggtggccttcatcctgagacaggtaatgcgctatgagagcgtgaacatcaaggaaagcgcccgcctggaccctgcagcactgagtcctgccaacccccgggagaagtggcttcgtaagcggactcaggtcaagctgaggaatgtcacggctaatcaccgggccaatgatgtgattgctgctgaagatggcccccaggtcctggtggggcggttcatgtacgggcccctcgacatggtggctctgactggagagaaggtggacatcctagtaatggcagagccatcctcaggccgctgggtacacctggacacagagatcaccaacagcagtggtcgcatcacatacaatgtgccgcggccccggcgcctgggggttggtgtctatcctgtgaagatggtcgtcaggggcgaccagacctgtgccatgagctacctcacggtgttgcccaggggcatggagtgtgtagtgttcagcattgatgggtccttcgcggccagcgtgtctatcatgggaagcgaccccaaggtccggccgggtgcagtggatgttgtccggcactggcaggacttgggctacatgatcctttacatcacgggacggccggacatgcagaagcagcgggtggtgtcgtggctgtcccagcacaacttcccacagggcatgatcttcttctccgatgggctggtgcatgacccgctgcggcagaaggccatcttcctgcgcaacctcatgcaggagtgcttcatcaaaatcagtgcggcctatggctccacgaaggacatctctgtctacagcgtgctgggcctgcctgcctcccagatcttcattgtgggccggcccaccaagaagtaccaaacccagtgccagttcctgagcgagggctacgccgcacacctggccgcgctggaggccagccaccgctcacgcccaaagaagaacaactcgcgcatgatcctgcgcaagggcagcttcgggctgcacgcgcagccagagttcctgcggaagcgcaaccacctgcgcagaaccatgtcagtgcagcagcccgacccgcccgccgccaaccccaagcccgagcgggcccagagccagcccgagtcggacaaagaccacgagcggccgctgccggcgctcagctgggcgcgtgggccccccaagttcgagtcggtgccctgaggggtgggctgtgctcagagcagggagcggggggcccaatcaggctgcctgcggggacgggagggggctgccctctccccgacacaggcgttttcctgctttttccctcccgtgtctgtccagcagtgtccgaccagagcggggagggatcctgcccgagcccggggggctccctgagctgcgacggggtgaggtccggggatctcggtgcagccactgctgcctcccacgggcctgcgaccgcaagcccaagtcagggttcatgtttgtgtcatcctgggggcaggcttgcccggggctgaagcgtttgggcaaagtcgaccaccctcctgcgtccccaggcttcacagcgagctaggcaggccctcaagggggcagccccagcctcggcaccaagcgccgctggcaggcacagcctctgggctgtcttgtggaggtgtgagtggcatttgtgcccgcccttcctgtggtttgggtcaccattttggggttggcgctcttatggcaagatggccactttctgggagtgagagcacatccccgggctcatgttacgccgtctctgtccacagccctcgggggtggggtctggtgctgacggtctgtcctgcagctgtccattgtccccaacccccgttgtcctcagtgtcctcaccatttccctgtggccctggaggccagggcttcctcttcccggagccctgcctcatgccctcccttgggaggctgcagccttgggctctggctcagctgggctggctgtgagcccctgagctggttgcttgccctctctgggctccgtcttccttctgttattggaggggtccccctagctgagattggtgtgagtctttgactcccaagatgtcctgcagtttggcccattgaggctcttcaggcctaagggtccctccgagtgtcctgtgacccacacctttcacacagcctgggagagggggtctgggtgggctggaaaggaggggctcttaaaggagcctctctgggtgggctgggaagggatccctactccacggagaggtgcagctggtttgccttgcactgcgtgtcccagggacaacccactcaaactgggtgtcctagggacaacccacctccctctcctgccaaaaggttactgattgggctccccataaccccagctctgccaggacccttttatcctttttggctcccagaggcatagagctgagattccagggttctaggggttcctggaagtttggctccaactgttgtattctcttccctttcccctgctgctcagtttgtgcccataacctcctcctgggtagtcccctgaggttggcaggacttggcccttctggggcccctaaagcctgctcaggccctcctgctgctgaaccttggcctgggcactgctttcctgcatcctggaaaaccccgactccctggcccaggcccacacctgctgtgtggggctgcccacgtggccactgagcccccataggctgccatcaaggccggtcccagcaatttcagccaggctgccccagggcccagacgtctgtatacacagcaggcacctgtgtcagctcagtgtcgcttctgctcaatgtctacctctcgcggctcccatgcagccagtgacgctgctggtgggggcggctggcaccgccgttgtgaattgcctggcaaattgggtgccctcctggggctggaggggtctgggctcctaacccccatccctgctctccccactagaaatgtgtcttcagtctgccagctcttctgctctacttccagtgctgcatcctgcactcaagcccagggctgctggcgagtctatggggaggagtgcggatcaggctcagcctcagcctcagcctcagcctcctctatggtcctgtctcctggcggttcacaggtgcccatcccccctttaacatttcacagttcttggctttccaaaggcaccagctcatatggcatagccaccccaaccctaatccttcccccaaatatcctgatttaaacttgggcagacttagtctgattcttgaaaactctaccatctccttcttgcagaaggcactggttacactaaaatgataaaataattagtatggggtactttgctcccagttacattccctcttccctgagaaccccaggctaggcgagagagggagagggagagagaaagagagagagggagagagagagagagagagggagagagaaagagagagagaaagaaaggaagacagaggaaagaaaggaagacagagagaggaaggcagagagagagagggagaaagaaagacaggaaggcagagagagagagagagagagaaaggaagacagagagagagagagaggaagagagagagagagaggaagagagagagagagctcatgagccaggatccctggggaatttgaagtcagtgtgaccagggttctgtggctctggggtcagagctgggacacaggacccagcaggagggccaccaccccttccttttggaaacagctctggttccaagcagcaatcaggtaggaggatcggggctttggctgatgatgcacacacaagatgctgatggtgtacggtgagatattgtgaacgcaacaactggagctgtagttggcgtgtgtgagtgtgtacctgcggttctgtttagtggcgagacaaggtatgtttcagtactgctttcacggcaactgtgtaatgcatatgctctttctacactagcggtttgctcagttttgtctgtccggttaagttggagaaagaaccaagttgtgttgttctctggagggggtgctgctgcctctccttgagtagttctgtgacccccaatccagctgttttgtagagaatccttctagcttctggtatgcctgctctccagcagctggaaacagatcttcctgcctgaccaaagctccttgtttcttgcgtggcatgtttgttcttcccgatccggtggctgtcgtagccgagggcctgcctgccaccttcctttatcatttgccctgttggggttcagggtgcatccttagcccaggacctgctcttccagcatcatgggttttttcctaaagatctcaacggctcccttgggctccataaaatatttcttttttaaaaaagcagactcctttcatgcattgggatgaacggccctcttgtctgggtgctgggctacagcaaacaaatgtgtttgaatcccagtattccagagattcctggcggtgggctgtctagaagaggcgaggctggatctcacggtttttaaactgtatttttacccctttgggacccatacctgtgccctggagtctttcatgaggcacgtgggtcctctgcatcctcactctcccccctagcccaggtgcagccccgggaggggtgccctgaccccgccttaaacaaccaactttcccaccgaatcccatcggcgggcggggggggggggtttgggtgccaagtgccctggaaacctattgtcttttggctcagccaaaagaaacattccctccttcctttccttccgggcttgggggaaaccttcgtaaaaatcatagttagggttaagtccaagcagtgaggcctgacctgggctctgctctccttgttgagacactaacaggcagttgggaggaaaatctgcatttgactccaccctctttggggcaaaggagaaacaggtgacccgagggggggcaggccagaggagggcgactcgtgcacagggacccccacccttggaccccgctgtccttttctagttgtttacttggtggtggcagccagtctgaccttgtctgtggtctgactgttcctaagtgtgtaactttcagtattatctgtgacagatggttctgtggtgaaaaaggtttattatattccttatggctgccttgtacaaaatccgttagaaacgctaatgtaagatatcagatttctaacaagacaaaaacagcattatggagttaaaagatttttacaactgggtcttgattttgatgtgagctggtttttagctctcaaatgttgtcacttaaataaaaaccttctttgcctt

SEQ ID NO: 166244 - DNA, 6945 bp, Homo sapiens
  Payload ID: 12730
  Gene Symbol: PITPNM3
  Gene Name: PITPNM family member 3
  Uniprot ID: Q9BZ71
  ENST ID: ENST00000421306
  CDS Start-End: 55-2871
gcccgggaagcgcgaggagcgcgcgtagcgccgccggagcccgccgcccgggacatggccaaggcgggccgtgcaggtggtcctcccccgggcggcggtgccccctggcaccttcgaaatgtcctcagtgactctgtggagagctcagatgatgaattctttgatgccagaggagaagggaccgcgccgtgcacatccagcatcctccaggagaagcagcgagaactgtaccgggtttccttgagaagacagaggttcccagcccagggaagcatcgagatccacgaagacagcgaggaaggctgcccgcagcgctcctgcaagacacatgtcctcctgctggtcctgcatgggggaaacatcctggacacgggtgccggggacccgtcctgcaaggcagccgacatccacaccttcagctccgtgctggagaaggtcacacgagcccatttccctgctgccctgggccacatcctcatcaagttcgtcccctgtcctgccatctgctctgaggctttctcgcttgtctctcacctgaacccctacagccacgatgagggctgcctcagcagcagccaggaccacgtccctctggccgcccttcccctgttggccatctcctccccgcagtaccaggatgctgtcgccaccgtcatcgagcgagccaaccaggtctacagagagttcctgaagtcctctgatgggattggcttcagtgggcaggtgtgtctcatcggggactgtgtggggggcctcctggccttcgatgccatctgctacagtgcggggccctcaggggacagccctgccagcagcagccggaaggggagcatcagcagcacccaggacaccccagtcgcggtggaggaagattgcagcctggccagcagcaagcgtctcagcaaaagcaacattgacatctccagtgggttggaggatgaggagcccaagaggccgttgccgcggaaacagagcgactcctccacctatgactgcgaggccatcacccagcaccatgccttcctctcaagcatccactccagcgtgctaaaggatgagtctgagaccccggcggctggggggccgcagctccctgaggtcagcctgggccgctttgacttcgatgtgtccgacttcttcctcttcggctcgccactgggcctggtcctggccatgcggaggacggtgctgcctgggctggacggcttccaggtgcgtcctgcctgcagccaggtctacagcttcttccattgcgcagacccctctgcctcacggctcgagccactgctggagcccaagttccacctggtgccgcctgtcagcgtgcctcgctaccagaggttcccactgggcgatgggcagtccctcctcctcgctgatgccctacacacccacagccccctcttcctggagggcagctcccgggacagcccgccacttctggatgcccctgcctcgccccctcaggcctcgaggttccagcgcccaggacggaggatgagcgaggggagctcccacagcgagagctcggagtcctcggacagcatggcacccgtgggtgcctcccgcatcacagccaagtggtggggaagcaagaggatcgactatgccctgtactgccctgatgtcctcacggccttccccaccgtggccctgccccacctcttccacgccagttactgggagtccacagacgtggtggccttcatcctgagacaggtaatgcgctatgagagcgtgaacatcaaggaaagcgcccgcctggaccctgcagcactgagtcctgccaacccccgggagaagtggcttcgtaagcggactcaggtcaagctgaggaatgtcacggctaatcaccgggccaatgatgtgattgctgctgaagatggcccccaggtcctggtggggcggttcatgtacgggcccctcgacatggtggctctgactggagagaaggtggacatcctagtaatggcagagccatcctcaggccgctgggtacacctggacacagagatcaccaacagcagtggtcgcatcacatacaatgtgccgcggccccggcgcctgggggttggtgtctatcctgtgaagatggtcgtcaggggcgaccagacctgtgccatgagctacctcacggtgttgcccaggggcatggagtgtgtagtgttcagcattgatgggtccttcgcggccagcgtgtctatcatgggaagcgaccccaaggtccggccgggtgcagtggatgttgtccggcactggcaggacttgggctacatgatcctttacatcacgggacggccggacatgcagaagcagcgggtggtgtcgtggctgtcccagcacaacttcccacagggcatgatcttcttctccgatgggctggtgcatgacccgctgcggcagaaggccatcttcctgcgcaacctcatgcaggagtgcttcatcaaaatcagtgcggcctatggctccacgaaggacatctctgtctacagcgtgctgggcctgcctgcctcccagatcttcattgtgggccggcccaccaagaagtaccaaacccagtgccagttcctgagcgagggctacgccgcacacctggccgcgctggaggccagccaccgctcacgcccaaagaagaacaactcgcgcatgatcctgcgcaagggcagcttcgggctgcacgcgcagccagagttcctgcggaagcgcaaccacctgcgcagaaccatgtcagtgcagcagcccgacccgcccgccgccaaccccaagcccgagcgggcccagagccagcccgagtcggacaaagaccacgagcggccgctgccggcgctcagctgggcgcgtgggccccccaagttcgagtcggtgccctgaggggtgggctgtgctcagagcagggagcggggggcccaatcaggctgcctgcggggacgggagggggctgccctctccccgacacaggcgttttcctgctttttccctcccgtgtctgtccagcagtgtccgaccagagcggggagggatcctgcccgagcccggggggctccctgagctgcgacggggtgaggtccggggatctcggtgcagccactgctgcctcccacgggcctgcgaccgcaagcccaagtcagggttcatgtttgtgtcatcctgggggcaggcttgcccggggctgaagcgtttgggcaaagtcgaccaccctcctgcgtccccaggcttcacagcgagctaggcaggccctcaagggggcagccccagcctcggcaccaagcgccgctggcaggcacagcctctgggctgtcttgtggaggtgtgagtggcatttgtgcccgcccttcctgtggtttgggtcaccattttggggttggcgctcttatggcaagatggccactttctgggagtgagagcacatccccgggctcatgttacgccgtctctgtccacagccctcgggggtggggtctggtgctgacggtctgtcctgcagctgtccattgtccccaacccccgttgtcctcagtgtcctcaccatttccctgtggccctggaggccagggcttcctcttcccggagccctgcctcatgccctcccttgggaggctgcagccttgggctctggctcagctgggctggctgtgagcccctgagctggttgcttgccctctctgggctccgtcttccttctgttattggaggggtccccctagctgagattggtgtgagtctttgactcccaagatgtcctgcagtttggcccattgaggctcttcaggcctaagggtccctccgagtgtcctgtgacccacacctttcacacagcctgggagagggggtctgggtgggctggaaaggaggggctcttaaaggagcctctctgggtgggctgggaagggatccctactccacggagaggtgcagctggtttgccttgcactgcgtgtcccagggacaacccactcaaactgggtgtcctagggacaacccacctccctctcctgccaaaaggttactgattgggctccccataaccccagctctgccaggacccttttatcctttttggctcccagaggcatagagctgagattccagggttctaggggttcctggaagtttggctccaactgttgtattctcttccctttcccctgctgctcagtttgtgcccataacctcctcctgggtagtcccctgaggttggcaggacttggcccttctggggcccctaaagcctgctcaggccctcctgctgctgaaccttggcctgggcactgctttcctgcatcctggaaaaccccgactccctggcccaggcccacacctgctgtgtggggctgcccacgtggccactgagcccccataggctgccatcaaggccggtcccagcaatttcagccaggctgccccagggcccagacgtctgtatacacagcaggcacctgtgtcagctcagtgtcgcttctgctcaatgtctacctctcgcggctcccatgcagccagtgacgctgctggtgggggcggctggcaccgccgttgtgaattgcctggcaaattgggtgccctcctggggctggaggggtctgggctcctaacccccatccctgctctccccactagaaatgtgtcttcagtctgccagctcttctgctctacttccagtgctgcatcctgcactcaagcccagggctgctggcgagtctatggggaggagtgcggatcaggctcagcctcagcctcagcctcagcctcctctatggtcctgtctcctggcggttcacaggtgcccatcccccctttaacatttcacagttcttggctttccaaaggcaccagctcatatggcatagccaccccaaccctaatccttcccccaaatatcctgatttaaacttgggcagacttagtctgattcttgaaaactctaccatctccttcttgcagaaggcactggttacactaaaatgataaaataattagtatggggtactttgctcccagttacattccctcttccctgagaaccccaggctaggcgagagagggagagggagagagaaagagagagagggagagagagagagagagagggagagagaaagagagagagaaagaaaggaagacagaggaaagaaaggaagacagagagaggaaggcagagagagagagggagaaagaaagacaggaaggcagagagagagagagagagagaaaggaagacagagagagagagagaggaagagagagagagagaggaagagagagagagagctcatgagccaggatccctggggaatttgaagtcagtgtgaccagggttctgtggctctggggtcagagctgggacacaggacccagcaggagggccaccaccccttccttttggaaacagctctggttccaagcagcaatcaggtaggaggatcggggctttggctgatgatgcacacacaagatgctgatggtgtacggtgagatattgtgaacgcaacaactggagctgtagttggcgtgtgtgagtgtgtacctgcggttctgtttagtggcgagacaaggtatgtttcagtactgctttcacggcaactgtgtaatgcatatgctctttctacactagcggtttgctcagttttgtctgtccggttaagttggagaaagaaccaagttgtgttgttctctggagggggtgctgctgcctctccttgagtagttctgtgacccccaatccagctgttttgtagagaatccttctagcttctggtatgcctgctctccagcagctggaaacagatcttcctgcctgaccaaagctccttgtttcttgcgtggcatgtttgttcttcccgatccggtggctgtcgtagccgagggcctgcctgccaccttcctttatcatttgccctgttggggttcagggtgcatccttagcccaggacctgctcttccagcatcatgggttttttcctaaagatctcaacggctcccttgggctccataaaatatttcttttttaaaaaagcagactcctttcatgcattgggatgaacggccctcttgtctgggtgctgggctacagcaaacaaatgtgtttgaatcccagtattccagagattcctggcggtgggctgtctagaagaggcgaggctggatctcacggtttttaaactgtatttttacccctttgggacccatacctgtgccctggagtctttcatgaggcacgtgggtcctctgcatcctcactctcccccctagcccaggtgcagccccgggaggggtgccctgaccccgccttaaacaaccaactttcccaccgaatcccatcggcgggcggggggggggggtttgggtgccaagtgccctggaaacctattgtcttttggctcagccaaaagaaacattccctccttcctttccttccgggcttgggggaaaccttcgtaaaaatcatagttagggttaagtccaagcagtgaggcctgacctgggctctgctctccttgttgagacactaacaggcagttgggaggaaaatctgcatttgactccaccctctttggggcaaaggagaaacaggtgacccgagggggggcaggccagaggagggcgactcgtgcacagggacccccacccttggaccccgctgtccttttctagttgtttacttggtggtggcagccagtctgaccttgtctgtggtctgactgttcctaagtgtgtaactttcagtattatctgtgacagatggttctgtggtgaaaaaggtttattatattccttatggctgccttgtacaaaatccgttagaaacgctaatgtaagatatcagatttctaacaagacaaaaacagcattatggagttaaaagatttttacaactgggtcttgattttgatgtgagctggtttttagctctcaaatgttgtcacttaaataaaaaccttctttgccttt

SEQ ID NO: 166245 - DNA, 734 bp, Homo sapiens
  Payload ID: 12730
  Gene Symbol: PITPNM3
  Gene Name: PITPNM family member 3
  ENST ID: ENST00000575201
  CDS Start-End: 1-349
gggcgaccagacctgtgccatgagctacctcacggtgttgcccaggggcatggagtgtgtagtgttcagcattgatgggtccttcgcggccagcgtgtctatcatgggaagcgaccccaaggtccggccgggtgcagtggatgttgtccggcactggcaggacttgggctacatgatcctttacatcacgggacggccggacatgcagaagcagcgggtggtgtcgtggctgtcccagcacaacttcccacagggcatgatcttcttctccgatgggctggtgcatgacccgctgcggcagaaggccatcttcctgcgcaacctcatgcaggagatgtgctttccatgaccgaagctatggttcccactagcagcaccaggaaactcggaaactcgggagaagtgcaaattatctgccctgcctcctcctgccaccctcttagacctactcaatcagaaactctggggaggggctcaggaaccttttcacaagccctccaggggattctgatgcacagaaagattaatcaagaatccctgacctagagcagaagaggcgttgacatataatgaccaaacccagcccacagcctgttttgatatgactggtcagctaagaatggtttttacactttcaaatggatggagagaataatcaaaagaatgatatttcatgacatgcaaattacatgaatttcaatgtctctaaataaaaaaagtttgattggaacaca

SEQ ID NO: 166246 - DNA, 3450 bp, Homo sapiens
  Payload ID: 12731
  Gene Symbol: PITRM1
  Gene Name: pitrilysin metallopeptidase 1
  Uniprot ID: Q5JRX3
  ENST ID: ENST00000224949
  CDS Start-End: 36-3149
ggggttcctcgccagccaggtgctcgtcatgcgcaatgtggcgctgcggcgggcggcagggcctgtgtgtgctgaggcggctgagcggcggacatgcacaccacagagcgtggcgatggaacagtaaccgggcttgtgagagggctctgcagtataaactaggagacaagatccatggattcaccgtaaaccaggtgacatctgttcccgagctgttcctgactgcagtgaagctcacccatgatgacacaggagccaggtatttacacctggccagagaagacacgaataatctgttcagcgtgcagttccgtactactcccatggacagtactggtgttcctcacattcttgagcataccgtcctttgtgggtctcagaaatatccgtgcagagaccctttcttcaaaatgttgaaccggtccctctccacgttcatgaacgccttcacagctagtgattatactctgtatccattttccacacaaaatcccaaggactttcagaatctcctctcggtgtatttggatgccacctttttcccatgtttacgcgagctggatttctggcaggaaggatggcggctggaacatgagaatccgagcgacccccagacgcccttggtctttaaaggagtcgtctttaatgagatgaagggagcgtttacagacaatgagaggatattctcccagcaccttcagaacagacttcttcctgaccacacgtactcagtggtctccgggggtgacccactgtgcatcccggagcttacatgggagcagcttaagcagtttcatgccactcactatcacccaagcaatgctaggttcttcacgtacggtaattttccattagaacagcatctgaaacaaattcacgaggaagcactgagcaaattccagaaaattgaaccaagcaccgtggtgccagctcagacaccctgggacaagcctagggaattccagataacatgtggcccggattcatttgctacagatccctctaaacaaacaaccatcagcgttagcttcctcttaccggacatcaccgacacatttgaagccttcacattaagtcttctgtcttcactcttgacttctgggcccaattctcccttttacaaagccttgattgaatctggccttggcacagacttttctcctgatgttggatataatggctacacgagggaggcctactttagtgtcggcctccaagggattgcggagaaagacattgagaccgtcagaagcctcatagacagaacgattgatgaagtagttgagaaaggatttgaagatgatcgaattgaggctttacttcataaaattgaaatacagatgaaacatcagtctaccagctttgggctgatgctgacatcatacatagcttcttgctggaaccatgatggggaccctgtggagctcttgaagttgggaaatcagttagctaaattcagacagtgcctgcaggaaaatccaaaatttttgcaagaaaaagtaaaacagtattttaagaataaccagcataagctgactttatcgatgaggccagatgacaagtatcacgagaagcaggcacaggtggaagccacgaagctcaagcagaaggtcgaggctctgtcccccggagacaggcagcagatctacgagaaaggtctagaattacggagtcaacaaagcaaacctcaagatgcctcttgtctgccagcgttgaaagtttccgatattgaacccaccatacctgtcacagagttggacgtggtcctgacagctggagatatccctgttcagtactgcgcccagcccaccaatggcatggtgtatttccgggccttctccagcctgaacacactccccgaggagctgaggccctatgtgcccctcttctgcagcgtcctcaccaagctgggctgcggccttcttgactaccgggagcaggctcagcagatagaattgaagaccggagggatgagtgcttctccccacgtgctccccgacgactcacacatggacacctacgagcagggtgtgcttttctcctctctctgcctggatcgaaacctgccagacatgatgcagctatggagtgaaatatttaacaacccgtgctttgaagaagaggagcacttcaaggtgctggtgaagatgaccgcccaggagctcgccaatggaattcctgactctgggcacctgtacgcatccatcagggcaggccggaccctcacgcccgcaggggacctgcaggagaccttcagcgggatggatcaggtgcggctgatgaagaggattgcagaaatgacagatatcaaacccatcctgaggaagctcccgcgtatcaagaaacacttgttaaatggtgataatatgaggtgttcagtgaatgcgactcctcagcagatgcctcagacagaaaaagcggtcgaagacttccttagaagcatcggtcggagtaaaaaggaacggaggcctgtgcgcccacacacggtcgagaaacctgtgcccagcagctctggtggagatgcccacgttccccatggctcccaggtcattaggaagctggtcatggaacccaccttcaagccctggcagatgaagactcacttcctgatgcccttcccggtgaattacgtgggtgaatgcatccgaactgtcccctacacggacccagatcatgccagtcttaaaatccttgcacgtttgatgactgccaaattcttgcatacagaaattcgagaaaaaggcggtgcttatggtggaggcgcaaaactcagccacaatgggattttcaccctttactcttacagggacccaaatacaatagagacgctccagtcttttgggaaggctgtcgactgggctaagtctggaaaattcacacagcaagacatcgacgaagccaaactttctgtcttctcaaccgtagatgctcctgtcgctccttcagacaaaggaatggaccacttcttgtacggcctctcggatgagatgaagcaggcccacagagagcagctctttgctgtcagccacgacaagctcctggccgtgagcgatagatacctcggcactgggaagagcacacacggcctggccatcctcggacccgagaacccgaaaattgccaaggacccatcctggatcatccaatgagcagccgtggcgctcgactgcacaggagcccgagacaatacacctccgagctgaatatgaaaagtcagaaatgctactgctttttccaagaatattatgtcattgagtgtcgccaaagcccttgactggcgagtcaaaaactcagatctatcttaagagtgaccaggaagaggttcattgaaataatcatgcatgaagcgccaaagatgcaccatgtagaattttcactttgtactggcaggctcgttttacctcattctagaatatttaagaatctaaaaataaagggcaactctgactt

SEQ ID NO: 166247 - DNA, 3487 bp, Homo sapiens
  Payload ID: 12731
  Gene Symbol: PITRM1
  Gene Name: pitrilysin metallopeptidase 1
  Uniprot ID: Q5JRX3
  ENST ID: ENST00000380989
  CDS Start-End: 70-3186
aagccccgccccgcgccctgcgtcgggttaagagggggttcctcgccagccaggtgctcgtcatgcgcaatgtggcgctgcggcgggcggcagggcctgtgtgtgctgaggcggctgagcggcggacatgcacaccacagagcgtggcgatggaacagtaaccgggcttgtgagagggctctgcagtataaactaggagacaagatccatggattcaccgtaaaccaggtgacatctgttcccgagctgttcctgactgcagtgaagctcacccatgatgacacaggagccaggtatttacacctggccagagaagacacgaataatctgttcagcgtgcagttccgtactactcccatggacagtactggtgttcctcacattcttgagcataccgtcctttgtgggtctcagaaatatccgtgcagagaccctttcttcaaaatgttgaaccggtccctctccacgttcatgaacgccttcacagctagtgattatactctgtatccattttccacacaaaatcccaaggactttcagaatctcctctcggtgtatttggatgccacctttttcccatgtttacgcgagctggatttctggcaggaaggatggcggctggaacatgagaatccgagcgacccccagacgcccttggtctttaaaggagtcgtctttaatgagatgaagggagcgtttacagacaatgagaggatattctcccagcaccttcagaacagacttcttcctgaccacacgtactcagtggtctccgggggtgacccactgtgcatcccggagcttacatgggagcagcttaagcagtttcatgccactcactatcacccaagcaatgctaggttcttcacgtacggtaattttccattagaacagcatctgaaacaaattcacgaggaagcactgagcaaattccagaaaattgaaccaagcaccgtggtgccagctcagacaccctgggacaagcctagggaattccagataacatgtggcccggattcatttgctacagatccctctaaacaaacaaccatcagcgttagcttcctcttaccggacatcaccgacacatttgaagccttcacattaagtcttctgtcttcactcttgacttctgggcccaattctcccttttacaaagccttgattgaatctggccttggcacagacttttctcctgatgttggatataatggctacacgagggaggcctactttagtgtcggcctccaagggattgcggagaaagacattgagaccgtcagaagcctcatagacagaacgattgatgaagtagttgagaaaggatttgaagatgatcgaattgaggctttacttcataaaattgaaatacagatgaaacatcagtctaccagctttgggctgatgctgacatcatacatagcttcttgctggaaccatgatggggaccctgtggagctcttgaagttgggaaatcagttagctaaattcagacagtgcctgcaggaaaatccaaaatttttgcaagaaaaagtaaaacagtattttaagaataaccagcataagctgactttatcgatgaggccagatgacaagtatcacgagaagcaggcacaggtggaagccacgaagctcaagcagaaggtcgaggctctgtcccccggagacaggcagcagatctacgagaaaggtctagaattacggagtcaacaaagcaaacctcaagatgcctcttgtctgccagcgttgaaagtttccgatattgaacccaccatacctgtcacagagttggacgtggtcctgacagctggagatatccctgttcagtactgcgcccagcccaccaatggcatggtgtatttccgggccttctccagcctgaacacactccccgaggagctgaggccctatgtgcccctcttctgcagcgtcctcaccaagctgggctgcggccttcttgactaccgggagcaggctcagcagatagaattgaagaccggagggatgagtgcttctccccacgtgctccccgacgactcacacatggacacctacgagcaggtaggtgtgcttttctcctctctctgcctggatcgaaacctgccagacatgatgcagctatggagtgaaatatttaacaacccgtgctttgaagaagaggagcacttcaaggtgctggtgaagatgaccgcccaggagctcgccaatggaattcctgactctgggcacctgtacgcatccatcagggcaggccggaccctcacgcccgcaggggacctgcaggagaccttcagcgggatggatcaggtgcggctgatgaagaggattgcagaaatgacagatatcaaacccatcctgaggaagctcccgcgtatcaagaaacacttgttaaatggtgataatatgaggtgttcagtgaatgcgactcctcagcagatgcctcagacagaaaaagcggtcgaagacttccttagaagcatcggtcggagtaaaaaggaacggaggcctgtgcgcccacacacggtcgagaaacctgtgcccagcagctctggtggagatgcccacgttccccatggctcccaggtcattaggaagctggtcatggaacccaccttcaagccctggcagatgaagactcacttcctgatgcccttcccggtgaattacgtgggtgaatgcatccgaactgtcccctacacggacccagatcatgccagtcttaaaatccttgcacgtttgatgactgccaaattcttgcatacagaaattcgagaaaaaggcggtgcttatggtggaggcgcaaaactcagccacaatgggattttcaccctttactcttacagggacccaaatacaatagagacgctccagtcttttgggaaggctgtcgactgggctaagtctggaaaattcacacagcaagacatcgacgaagccaaactttctgtcttctcaaccgtagatgctcctgtcgctccttcagacaaaggaatggaccacttcttgtacggcctctcggatgagatgaagcaggcccacagagagcagctctttgctgtcagccacgacaagctcctggccgtgagcgatagatacctcggcactgggaagagcacacacggcctggccatcctcggacccgagaacccgaaaattgccaaggacccatcctggatcatccaatgagcagccgtggcgctcgactgcacaggagcccgagacaatacacctccgagctgaatatgaaaagtcagaaatgctactgctttttccaagaatattatgtcattgagtgtcgccaaagcccttgactggcgagtcaaaaactcagatctatcttaagagtgaccaggaagaggttcattgaaataatcatgcatgaagcgccaaagatgcaccatgtagaattttcactttgtactggcaggctcgttttacctcattctagaatatttaagaatctaaaaataaagggcaactctgactt

SEQ ID NO: 166248 - DNA, 2579 bp, Homo sapiens
  Payload ID: 12731
  Gene Symbol: PITRM1
  Gene Name: pitrilysin metallopeptidase 1
  ENST ID: ENST00000380994
  CDS Start-End: 495-2282
tgagaccgtcagaagcctcatagacagaacgattgatgaagtagttgagaaaggatttgaagatgatcgaattgaggctttacttcataaaattgaaatacagatgaaacatcagtctaccagctttgggctgatgctgacatcagtaagtgatctctcaacaattttgtttttgttttataatagacattttgtcttgttactagcttaactggctttttgatatttttatgtgaaatagattactttaaatgggtaagggtttataactagtaatctgttggttatttcctaaacattatttcagcctgtgctttttattttattggaacaaaacagggctaaagtaagtttttttgtttctccatccaaagaattacatgacttttgttataaacaatcatctgtggtatatttaaatacagaaactaggattttagtatcaagtctgggctgttggtggaggttgtactgtggtaccagctgcattgtggatgtggaaatcttccttccagtacatagcttcttgctggaaccatgatggggaccctgtggagctcttgaagttgggaaatcagttagctaaattcagacagtgcctgcaggaaaatccaaaatttttgcaagaaaaagtaaaacagtattttaagaataaccagcataagctgactttatcgatgaggccagatgacaagtatcacgagaagcaggcacaggtggaagccacgaagctcaagcagaaggtcgaggctctgtcccccggagacaggcagcagatctacgagaaaggtctagaattacggagtcaacaaagcaaacctcaagatgcctcttgtctgccagcgttgaaagtttccgatattgaacccaccatacctgtcacagagttggacgtggtcctgacagctggagatatccctgttcagtactgcgcccagcccaccaatggcatggtgtatttccgggccttctccagcctgaacacactccccgaggagctgaggccctatgtgcccctcttctgcagcgtcctcaccaagctgggctgcggccttcttgactaccgggagcaggctcagcagatagaattgaagaccggagggatgagtgcttctccccacgtgctccccgacgactcacacatggacacctacgagcagggtgtgcttttctcctctctctgcctggatcgaaacctgccagacatgatgcagctatggagtgaaatatttaacaacccgtgctttgaagaagaggagcacttcaaggtgctggtgaagatgaccgcccaggagctcgccaatggaattcctgactctgggcacctgtacgcatccatcagggcaggccggaccctcacgcccgcaggggacctgcaggagaccttcagcgggatggatcaggtgcggctgatgaagaggattgcagaaatgacagatatcaaacccatcctgaggaagctcccgcgtatcaagaaacacttgttaaatggtgataatatgaggtgttcagtgaatgcgactcctcagcagatgcctcagacagaaaaagcggtcgaagacttccttagaagcatcggtcggagtaaaaaggaacggaggcctgtgcgcccacacacggtcgagaaacctgtgcccagcagctctggtggagatgcccacgttccccatggctcccaggtcattaggaagctggtcatggaacccaccttcaagccctggcagatgaagactcacttcctgatgcccttcccggtgaattacgtgggtgaatgcatccgaactgtcccctacacggacccagatcatgccagtcttaaaatccttgcacgtttgatgactgccaaattcttgcatacagaaattcgagaaaaaggcggtgcttatggtggaggcgcaaaactcagccacaatgggattttcaccctttactcttacagggacccaaatacaatagagacgctccagtcttttgggaaggctgtcgactgggctaagtctggaaaattcacacagcaagacatcgacgaagccaaactttctgtcttctcaaccgtagatgctcctgtcgctccttcagacaaaggaatggaccacttcttgtacggcctctcggatgagatgaagcaggcccacagagagcagctctttgctgtcagccacgacaagctcctggccgtgagcgatagatacctcggcactgggaagagcacacacggcctggccatcctcggacccgagaacccgaaaattgccaaggacccatcctggatcatccaatgagcagccgtggcgctcgactgcacaggagcccgagacaatacacctccgagctgaatatgaaaagtcagaaatgctactgctttttccaagaatattatgtcattgagtgtcgccaaagcccttgactggcgagtcaaaaactcagatctatcttaagagtgaccaggaagaggttcattgaaataatcatgcatgaagcgccaaagatgcaccatgtagaattttcactttgtactggcaggctcgttttacctcattctagaatatttaagaatctaaaaataaagggcaactctg

SEQ ID NO: 166249 - DNA, 718 bp, Homo sapiens
  Payload ID: 12731
  Gene Symbol: PITRM1
  Gene Name: pitrilysin metallopeptidase 1
  ENST ID: ENST00000430362
  CDS Start-End: 1-700
cttgattgaatctggccttggcacagacttttctcctgatgttggatataatggctacacgagggaggcctactttagtgtcggcctccaagggattgcggagaaagacattgagaccgtcagaagcctcatagacagaacgattgatgaagtagttgagaaaggatttgaagatgatcgaattgaggctttacttcataaaattgaaatacagatgaaacatcagtctaccagctttgggctgatgctgacatcatacatagcttcttgctggaaccatgatggggaccctgtggagctcttgaagttgggaaatcagttagctaaattcagacagtgcctgcaggaaaatccaaaatttttgcaagaaaaagtaaaacagtattttaagaataaccagcataagctgactttatcgatgaggccagatgacaagtatcacgagaagcaggcacaggtggaagccacgaagctcaagcagaaggtcgaggctctgtcccccggagacaggcagcagatctacgagaaaggtctagaattacggagtcaacaaagcaaacctcaagatgcctcttgtctgccagcgttgaaagtttccgatattgaacccaccatacctgtcacagagttggacgtggtcctgacaggtcactgtgaacgctacgcttttcccgggtctcgggttccttgggggaattaaatgtcactcctcacagaa

SEQ ID NO: 166250 - DNA, 673 bp, Homo sapiens
  Payload ID: 12731
  Gene Symbol: PITRM1
  Gene Name: pitrilysin metallopeptidase 1
  ENST ID: ENST00000455371
  CDS Start-End: 1-555
aaacctgtgcccagcagctctggtggagatgcccacgttccccatggctcccaggtcattaggaagctggtcatggaacccaccttcaagccctggcagatgaagactcacttcctgatgcccttcccggtgaattacgtgggtgaatgcatccgaactgtcccctacacggacccagatcatgccagtcttaaaatccttgcacgtttgatgactgccaaattcttgcatacagaaattcgagaaaaaggcggtgcttatggtggaggcgcaaaactcagccacaatgggattttcaccctttactcttacagggacccaaatacaatagagacgctccagtcttttgggaaggctgtcgactgggctaagtctggaaaattcacacagcaagacatcgacgaagccaaactttctgtcttctcaaccgtagatgctcctgtcgctccttcagacaaaggtattttgagtataacagtgagaatctcaacccacagcctcacagatgacgttgctgttttccaagttcccggcatgcatgggcaggagcactagcttctggtgcctccatccttgcttgtgatacgatttccacgtctgacaccctaaacacgcttcctgacatccgggcgagaagagtgcatcctgtcatttgttttactgacctgagacc

SEQ ID NO: 166251 - DNA, 3183 bp, Homo sapiens
  Payload ID: 12731
  Gene Symbol: PITRM1
  Gene Name: pitrilysin metallopeptidase 1
  Uniprot ID: Q5JRX3
  ENST ID: ENST00000451104
  CDS Start-End: 63-2882
aagccccgccccgcgccctgcgtcgggttaagagggggttcctcgccagccaggtgctcgtcatgcgcaatgtggcgctgcggcgggcggcagggcctgtgtgtgctgaggcggctgagcggcgggtgacatctgttcccgagctgttcctgactgcagtgaagctcacccatgatgacacaggagccaggtatttacacctggccagagaagacacgaataatctgttcagcgtgcagttccgtactactcccatggacagtactggtgttcctcacattcttgagcataccgtcctttgtgggtctcagaaatatccgtgcagagaccctttcttcaaaatgttgaaccggtccctctccacgttcatgaacgccttcacagctagtgattatactctgtatccattttccacacaaaatcccaaggactttcagaatctcctctcggtgtatttggatgccacctttttcccatgtttacgcgagctggatttctggcaggaaggatggcggctggaacatgagaatccgagcgacccccagacgcccttggtctttaaaggagtcgtctttaatgagatgaagggagcgtttacagacaatgagaggatattctcccagcaccttcagaacagacttcttcctgaccacacgtactcagtggtctccgggggtgacccactgtgcatcccggagcttacatgggagcagcttaagcagtttcatgccactcactatcacccaagcaatgctaggttcttcacgtacggtaattttccattagaacagcatctgaaacaaattcacgaggaagcactgagcaaattccagaaaattgaaccaagcaccgtggtgccagctcagacaccctgggacaagcctagggaattccagataacatgtggcccggattcatttgctacagatccctctaaacaaacaaccatcagcgttagcttcctcttaccggacatcaccgacacatttgaagccttcacattaagtcttctgtcttcactcttgacttctgggcccaattctcccttttacaaagccttgattgaatctggccttggcacagacttttctcctgatgttggatataatggctacacgagggaggcctactttagtgtcggcctccaagggattgcggagaaagacattgagaccgtcagaagcctcatagacagaacgattgatgaagtagttgagaaaggatttgaagatgatcgaattgaggctttacttcataaaattgaaatacagatgaaacatcagtctaccagctttgggctgatgctgacatcatacatagcttcttgctggaaccatgatggggaccctgtggagctcttgaagttgggaaatcagttagctaaattcagacagtgcctgcaggaaaatccaaaatttttgcaagaaaaagtaaaacagtattttaagaataaccagcataagctgactttatcgatgaggccagatgacaagtatcacgagaagcaggcacaggtggaagccacgaagctcaagcagaaggtcgaggctctgtcccccggagacaggcagcagatctacgagaaaggtctagaattacggagtcaacaaagcaaacctcaagatgcctcttgtctgccagcgttgaaagtttccgatattgaacccaccatacctgtcacagagttggacgtggtcctgacagctggagatatccctgttcagtactgcgcccagcccaccaatggcatggtgtatttccgggccttctccagcctgaacacactccccgaggagctgaggccctatgtgcccctcttctgcagcgtcctcaccaacccgtgctttgaagaagaggagcacttcaaggtgctggtgaagatgaccgcccaggagctcgccaatggaattcctgactctgggcacctgtacgcatccatcagggcaggccggaccctcacgcccgcaggggacctgcaggagaccttcagcgggatggatcaggtgcggctgatgaagaggattgcagaaatgacagatatcaaacccatcctgaggaagctcccgcgtatcaagaaacacttgttaaatggtgataatatgaggtgttcagtgaatgcgactcctcagcagatgcctcagacagaaaaagcggtcgaagacttccttagaagcatcggtcggagtaaaaaggaacggaggcctgtgcgcccacacacggtcgagaaacctgtgcccagcagctctggtggagatgcccacgttccccatggctcccaggtcattaggaagctggtcatggaacccaccttcaagccctggcagatgaagactcacttcctgatgcccttcccggtgaattacgtgggtgaatgcatccgaactgtcccctacacggacccagatcatgccagtcttaaaatccttgcacgtttgatgactgccaaattcttgcatacagaaattcgagaaaaaggcggtgcttatggtggaggcgcaaaactcagccacaatgggattttcaccctttactcttacagggacccaaatacaatagagacgctccagtcttttgggaaggctgtcgactgggctaagtctggaaaattcacacagcaagacatcgacgaagccaaactttctgtcttctcaaccgtagatgctcctgtcgctccttcagacaaaggaatggaccacttcttgtacggcctctcggatgagatgaagcaggcccacagagagcagctctttgctgtcagccacgacaagctcctggccgtgagcgatagatacctcggcactgggaagagcacacacggcctggccatcctcggacccgagaacccgaaaattgccaaggacccatcctggatcatccaatgagcagccgtggcgctcgactgcacaggagcccgagacaatacacctccgagctgaatatgaaaagtcagaaatgctactgctttttccaagaatattatgtcattgagtgtcgccaaagcccttgactggcgagtcaaaaactcagatctatcttaagagtgaccaggaagaggttcattgaaataatcatgcatgaagcgccaaagatgcaccatgtagaattttcactttgtactggcaggctcgttttacctcattctagaatatttaagaatctaaaaataaagggcaactctgactt

SEQ ID NO: 166252 - DNA, 482 bp, Homo sapiens
  Payload ID: 12731
  Gene Symbol: PITRM1
  Gene Name: pitrilysin metallopeptidase 1
  ENST ID: ENST00000424714
  CDS Start-End: 1-261
gtgaatgcgactcctcagcagatgcctcagacagaaaaagcggtcgaagacttccttagaagcatcggtcggagtaaaaaggaacggaggcctgtgcgcccacacacggtcgagaaacctgtgcccagcagctctggtggagatgcccacgttccccatggctcccaggtcattaggaagctggtcatgtatacgttaaggcatcacgtcaagattggaggacttcatgtcagttttacagtgagaaattgtgtggagtgacggaactgcagtgccttgctctcgcgccccagcacctggctgcagagtgtcacggagatgggacccctgagatggctccagtcccagtgccgtgggcagtgcgtgggagcacagccgcctctgacccctgagtgggtccagtcccagtgccgtgggcggtgcatggcagcacagccgcctctgaccataccgtgtccctcaggaacccaccttcaagccct

SEQ ID NO: 166253 - DNA, 875 bp, Homo sapiens
  Payload ID: 12731
  Gene Symbol: PITRM1
  Gene Name: pitrilysin metallopeptidase 1
  ENST ID: ENST00000451454
  CDS Start-End: 1-778
tttctcctctctctgcctggatcgaaacctgccagacatgatgcagctatggagtgaaatatttaacaacccgtgctttgaagaagaggagcacttcaaggtgctggtgaagatgaccgcccaggagctcgccaatggaattcctgactctgggcacctgtacgcatccatcagggcaggccggaccctcacgcccgcaggggacctgcaggagaccttcagcgggatggatcaggtgcggctgatgaagaggattgcagaaatgacagatatcaaacccatcctgaggaagctcccgcgtatcaagaaacacttgttaaatggtgataatatgaggtgttcagtgaatgcgactcctcagcagatgcctcagacagaaaaagcggtcgaagacttccttagaagcatcggtcggagtaaaaaggaacggaggcctgtgcgcccacacacggtcgagaaacctgtgcccagcagctctggtggagatgcccacgttccccatggctcccaggtcattaggaagctggtcatggaacccaccttcaagccctggcagatgaagactcacttcctgatgcccttcccggtgaattacgtgggtgaatgcatccgaactgtcccctacacggacccagatcatgccaggaaaaggcctgtctgtggaagcggcgacctggggctgatctcaccacgggcgtcttcaaggagcctgtgtctgtgctgcagaccctcccatcattgtctgccccgccttctgtcggaggtggatgtgttctagaatcagcttgaatgtgatgttaccgttcacagtggaaggcagaggaaattggccctgttcctagaaatgtgctttatcagagagtgtgtgttttctt

SEQ ID NO: 166254 - DNA, 753 bp, Homo sapiens
  Payload ID: 12732
  Gene Symbol: PTTG1
  Gene Name: pituitary tumor-transforming 1
  Uniprot ID: O95997
  ENST ID: ENST00000352433
  CDS Start-End: 82-690
gtggtttaaaccaggagtgcgccgcgtccgttcaccgcggcctcagatgaatgcggctgttaagacctgcaataatccagaatggctactctgatctatgttgataaggaaaatggagaaccaggcacccgtgtggttgctaaggatgggctgaagctggggtctggaccttcaatcaaagccttagatgggagatctcaagtttcaacaccacgttttggcaaaacgttcgatgccccaccagccttacctaaagctactagaaaggctttgggaactgtcaacagagctacagaaaagtctgtaaagaccaagggacccctcaaacaaaaacagccaagcttttctgccaaaaagatgactgagaagactgttaaagcaaaaagctctgttcctgcctcagatgatgcctatccagaaatagaaaaattctttcccttcaatcctctagactttgagagttttgacctgcctgaagagcaccagattgcgcacctccccttgagtggagtgcctctcatgatccttgacgaggagagagagcttgaaaagctgtttcagctgggccccccttcacctgtgaagatgccctctccaccatgggaatccaatctgttgcagtctccttcaagcattctgtcgaccctggatgttgaattgccacctgtttgctgtgacatagatatttaaatttcttagtgcttcagagtttgtgtgtatttgtattaataaagcattctttaacagattctt

SEQ ID NO: 166255 - DNA, 1070 bp, Homo sapiens
  Payload ID: 12732
  Gene Symbol: PTTG1
  Gene Name: pituitary tumor-transforming 1
  Uniprot ID: O95997
  ENST ID: ENST00000393964
  CDS Start-End: 404-1012
cgcgggtggttagttgagccggctccggcggggaaggaggcgggctgcggctgcggctggggctgaagctggggctggggttgggggactgcccggggcttagatggctccgagcccgtttgagcgtggtctcggactgctaactggaccaacggcaactgtctgatgagtgccagccccaaaccgcgcgctgctcgggaccttagagcctctgactcaggctggaagatttgagagctggattaagtacttgttggctcacgcccgtgactgttccgctgtttagctcttgttttttgtgtggacactcctaggatagaaagtttggtatgttgctatacctttgcttctcccaccttccccaatatctaatatgtatttctcattcttagaataatccagaatggctactctgatctatgttgataaggaaaatggagaaccaggcacccgtgtggttgctaaggatgggctgaagctggggtctggaccttcaatcaaagccttagatgggagatctcaagtttcaacaccacgttttggcaaaacgttcgatgccccaccagccttacctaaagctactagaaaggctttgggaactgtcaacagagctacagaaaagtctgtaaagaccaagggacccctcaaacaaaaacagccaagcttttctgccaaaaagatgactgagaagactgttaaagcaaaaagctctgttcctgcctcagatgatgcctatccagaaatagaaaaattctttcccttcaatcctctagactttgagagttttgacctgcctgaagagcaccagattgcgcacctccccttgagtggagtgcctctcatgatccttgacgaggagagagagcttgaaaagctgtttcagctgggccccccttcacctgtgaagatgccctctccaccatgggaatccaatctgttgcagtctccttcaagcattctgtcgaccctggatgttgaattgccacctgtttgctgtgacatagatatttaaatttcttagtgcttcagagtttgtgtgtatttgtattaataaagcattctttaacaga

SEQ ID NO: 166256 - DNA, 895 bp, Homo sapiens
  Payload ID: 12732
  Gene Symbol: PTTG1
  Gene Name: pituitary tumor-transforming 1
  Uniprot ID: O95997
  ENST ID: ENST00000520452
  CDS Start-End: 264-872
gagggtcgcgggtggttagttgagccggctccggcggggaaggaggcgggctgcggctgcggctggggctgaagctggggctggggttgggggactgcccggggcttagatggctccgagcccgtttgagcgtggtctcggactgctaactggaccaacggcaactgtctgatgagtgccagccccaaaccgcgcgctgctcgggaccttagagcctctgactcaggctggaagatttgagagctggattaaaataatccagaatggctactctgatctatgttgataaggaaaatggagaaccaggcacccgtgtggttgctaaggatgggctgaagctggggtctggaccttcaatcaaagccttagatgggagatctcaagtttcaacaccacgttttggcaaaacgttcgatgccccaccagccttacctaaagctactagaaaggctttgggaactgtcaacagagctacagaaaagtctgtaaagaccaagggacccctcaaacaaaaacagccaagcttttctgccaaaaagatgactgagaagactgttaaagcaaaaagctctgttcctgcctcagatgatgcctatccagaaatagaaaaattctttcccttcaatcctctagactttgagagttttgacctgcctgaagagcaccagattgcgcacctccccttgagtggagtgcctctcatgatccttgacgaggagagagagcttgaaaagctgtttcagctgggccccccttcacctgtgaagatgccctctccaccatgggaatccaatctgttgcagtctccttcaagcattctgtcgaccctggatgttgaattgccacctgtttgctgtgacatagatatttaaatttcttagtgcttcagagtttg

SEQ ID NO: 166257 - DNA, 684 bp, Homo sapiens
  Payload ID: 12732
  Gene Symbol: PTTG1
  Gene Name: pituitary tumor-transforming 1
  ENST ID: ENST00000517480
  CDS Start-End: 321-684
gcggcctcagatgaatgcggctgttaagacctgcaataatccagaatggctactctgatctatgttgataaggaaaatggagaaccaggcacccgtgtggttgctaaggatgggctgaagctggggtctggaccttgtaagtatacaaggctgcagtcggatacactggtattgtggacgtggcctggagctggacgagacatttagtgtactttttgggcaattggagtcgtttgttattggtcctttttcatttttaatatcttaatgagatgatttaaggaagttactgaatctctgctattaggcctatcatagccatgccactaccaaaagtggggggtgggtttgggggtgagaggtcaagtttatatacacagtatttaagttgtacaggtattttgctgctggaatattcttatggtaagactttttcttcagcaatcaaagccttagatgggagatctcaagtttcaacaccacgttttggcaaaacgttcgatgccccaccagccttacctaaagctactagaaaggctttgggaactgtcaacagagctacagaaaagtctgtaaagaccaagggacccctcaaacaaaaacagccaagcttttctgccaaaaagatgactgagaagactgttaaagcaaaaagctctgttcctgcctcagatgatgcctatc

SEQ ID NO: 166258 - DNA, 2760 bp, Homo sapiens
  Payload ID: 12733
  Gene Symbol: PTTG1IP
  Gene Name: pituitary tumor-transforming 1 interacting protein
  Uniprot ID: P53801
  ENST ID: ENST00000330938
  CDS Start-End: 222-764
gcgcaggcgcactgaacctcagccgcgccgggaggcgagcccgttggcgaggggcggggcagatggcgagggagcggggcgagctgctttttgaggctgcgcactcgcatggccccacctcgcaggtccacttccggcgccgcggctgttccgggcggagaccgcttgtgctggagtcggagttgtaacgctccactgactgatagagcgaccggccgaccatggcgcccggagtggcccgcgggccgacgccgtactggaggttgcgcctcggtggcgccgcgctgctcctgctgctcatcccggtggccgccgcgcaggagcctcccggagctgcttgttctcagaacacaaacaaaacctgtgaagagtgcctgaagaacgtctcctgtctttggtgcaacactaacaaggcttgtctggactacccagttacaagcgtcttgccaccggcttccctttgtaaattgagctctgcacgctggggagtttgttgggtgaactttgaggcgctgatcatcaccatgtcggtagtcgggggaaccctcctcctgggcattgccatctgctgctgctgctgctgcaggaggaagaggagccggaagccggacaggagtgaggagaaggccatgcgtgagcgggaggagaggcggatacggcaggaggaacggagagcagagatgaagacaagacatgatgaaatcagaaaaaaatatggcctgtttaaagaagaaaacccgtatgctagatttgaaaacaactaaagcgctccagcacatcagtcccgacgcttcctgtgaggtgcacgctccgcagcccagcccagccgggagaccacgtggccattgcggtctcctgaccttggccagtgaacctgccagccttccaggacaggcggccggagagctgcccctgaaggacagtcctctcgtcttgcagactggtgaccttctattccctgttcatctctgtttctagatttagtcacttgaaataagaaatctttggggtttgggcttttttatactcttctcagtttgtgaaacgctaactgcacacgaagccgcctgacggcacccagcgctgtggctgtcattctcccagggcagaaccctgcgtttctctctgtccactaacaagcttcacacgcaacacagggaagtcggtttgacttttgtcatgaggagaactgaccagccctcatcattccccataaaaccacggacagcgtctgtgtgcgcatcttgagtcttcacacctgttgactcacacggcttttgctgatgacacggggctccagtacacagtctgataaggacttaacgtcctaacctcaattgtattaaatagcattggggaatagctaaacctttttaaaaaaatttattggattttcctccctgcttaaaagatttcaccagaaaaccttcatataaaaattcaggccctttttggacaatttttaaaatttgtatctttactagaacatgagaatctttttcccttggaagcttgaattataaatgtggtgtttggcctgcctcagcagcaccagttgactgctcgtgtgccagcggtgtggggaggacggggcaggacgctgcagctctctccagccctgttggcatcctcagtgcctgcaggcctctcgctgcctgttgggctgtctggggggtggccatttagggatcgtggggacggggtccaccccaagaagaaagaaaggcccgtccacaggcccggctctgggccacgtgccccggaagcaggtgtgtccagagtcagctgagggctctccccacaccacccagcaggcgctggtgctccttctgcctcatgggaccagtccagcttccagccgctctggctcgagggtggtctgaccacttccttctgagtgggcttctctgggagctctccagtggcactgctggacctgcccacgtttctgtaaaatcaggatacgtggctttagtaagcagaccaagcgcttcgtggcagggaaagcagcgtgcggggaagtcactgaaaagtgctgcctaaggaagtttggaaatagtccctgttccagattgccttgaattttaaaacattttgctttgggaaagtaggtcagcagcacctaagatcaaggatgcgttccattttcacacttcacagtcatgaaaactgagaagactgtcttcagcgtgaactaaagttcacaggcagatcactgatccagaacacttcaagaactcgtcaaacagctcgataagcctttttgactgtgtacatctgtaccgggaataacattcctaggctgaaatttccacaaagaatagaacctgtacccagttcttcaggctgatttccctgacctcttgggcatttgtatttgtagtaaagtattgcagagattcctaagtattttatagcagccatcaaaattggactttgtattgtttattcataaaagacacttggtaatagacttcagtgaactctgtatgaatgcagtagtgtgtgtgcaaaatccgcttcctgagcgtagggtgctgagctggcgctagggctcggttgtgaaatacagcgtagtcagcccttgcgctcagtgtagaaacccacgtctgtaaggtcggtcttcgtccatctgcttttttctgaaatacactaagagcagccacaaaactgtaacctcaaggaaaccataaagcttggagtgccttaatttttaaccagtttccaataaaacggtttactacctgcgtgtgtttagta

SEQ ID NO: 166259 - DNA, 755 bp, Homo sapiens
  Payload ID: 12733
  Gene Symbol: PTTG1IP
  Gene Name: pituitary tumor-transforming 1 interacting protein
  ENST ID: ENST00000397886
  CDS Start-End: 102-581
agtgcagttgtgaaggtcagaggtaggaagcatggtccttgctacagatggtgaccatgctcacccaagtccattcaacacaaactcagtgagtgcctgtgatgggccaggctgtgtcctgtgttcttgggagacttcagccagtgaagtgcacaggtgcccggcgtgtggggaggagaggtctacggaagcaaacctcacaggagtgtctttggtgcaacactaacaaggcttgtctggactacccagttacaagcgtcttgccaccggcttccctttgtaaattgagctctgcacgctggggagtttgttgggtgaactttgaggcgctgatcatcaccatgtcggtagtcgggggaaccctcctcctgggcattgccatctgctgctgctgctgctgcaggaggaagaggagccggaagccggacaggagtgaggagaaggccatgcgtgagcgggaggagaggcggatacggcaggaggaacggagagcagagatgaagacaagacatgatgaaatcagaaaaaaatatggcctgtttaaagaagaaaacccgtatgctagatttgaaaacaactaaagcgctccagcacatcagtcccgacgcttcctgtgaggtgcacgctccgcagcccagcccagccgggagaccacgtggccattgcggtctcctgaccttggccagtgaacctgccagccttccaggacaggcggccggagagctgcccctgaaggacagtcctctcgtcttgca

SEQ ID NO: 166260 - DNA, 2413 bp, Homo sapiens
  Payload ID: 12733
  Gene Symbol: PTTG1IP
  Gene Name: pituitary tumor-transforming 1 interacting protein
  ENST ID: ENST00000397887
  CDS Start-End: 94-417
cacttccggcgccgcggctgttccgggcggagaccgcttgtgctggagtcggagttgtaacgctccactgactgatagagcgaccggccgaccatggcgcccggagtggcccgcgggccgacgccgtactggaggttgcgcctcggtggcgccgcgctgctcctgctgctcatcccggtggccgccgcgcaggagcctcccggagctgcttgttctcagaacacaaacaaaacctgtgaagagtgcctgaagaacgtctcctgtctttggtgcaacactaacaaggcttgtctggactacccagttacaagcgtcttgccaccggcttccctttgtaaattgagctctgcacgctggggagtttgttggggcctgtttaaagaagaaaacccgtatgctagatttgaaaacaactaaagcgctccagcacatcagtcccgacgcttcctgtgaggtgcacgctccgcagcccagcccagccgggagaccacgtggccattgcggtctcctgaccttggccagtgaacctgccagccttccaggacaggcggccggagagctgcccctgaaggacagtcctctcgtcttgcagactggtgaccttctattccctgttcatctctgtttctagatttagtcacttgaaataagaaatctttggggtttgggcttttttatactcttctcagtttgtgaaacgctaactgcacacgaagccgcctgacggcacccagcgctgtggctgtcattctcccagggcagaaccctgcgtttctctctgtccactaacaagcttcacacgcaacacagggaagtcggtttgacttttgtcatgaggagaactgaccagccctcatcattccccataaaaccacggacagcgtctgtgtgcgcatcttgagtcttcacacctgttgactcacacggcttttgctgatgacacggggctccagtacacagtctgataaggacttaacgtcctaacctcaattgtattaaatagcattggggaatagctaaacctttttaaaaaaatttattggattttcctccctgcttaaaagatttcaccagaaaaccttcatataaaaattcaggccctttttggacaatttttaaaatttgtatctttactagaacatgagaatctttttcccttggaagcttgaattataaatgtggtgtttggcctgcctcagcagcaccagttgactgctcgtgtgccagcggtgtggggaggacggggcaggacgctgcagctctctccagccctgttggcatcctcagtgcctgcaggcctctcgctgcctgttgggctgtctggggggtggccatttagggatcgtggggacggggtccaccccaagaagaaagaaaggcccgtccacaggcccggctctgggccacgtgccccggaagcaggtgtgtccagagtcagctgagggctctccccacaccacccagcaggcgctggtgctccttctgcctcatgggaccagtccagcttccagccgctctggctcgagggtggtctgaccacttccttctgagtgggcttctctgggagctctccagtggcactgctggacctgcccacgtttctgtaaaatcaggatacgtggctttagtaagcagaccaagcgcttcgtggcagggaaagcagcgtgcggggaagtcactgaaaagtgctgcctaaggaagtttggaaatagtccctgttccagattgccttgaattttaaaacattttgctttgggaaagtaggtcagcagcacctaagatcaaggatgcgttccattttcacacttcacagtcatgaaaactgagaagactgtcttcagcgtgaactaaagttcacaggcagatcactgatccagaacacttcaagaactcgtcaaacagctcgataagcctttttgactgtgtacatctgtaccgggaataacattcctaggctgaaatttccacaaagaatagaacctgtacccagttcttcaggctgatttccctgacctcttgggcatttgtatttgtagtaaagtattgcagagattcctaagtattttatagcagccatcaaaattggactttgtattgtttattcataaaagacacttggtaatagacttcagtgaactctgtatgaatgcagtagtgtgtgtgcaaaatccgcttcctgagcgtagggtgctgagctggcgctagggctcggttgtgaaatacagcgtagtcagcccttgcgctcagtgtagaaacccacgtctgtaaggtcggtcttcgtccatctgcttttttctgaaatacactaagagcagccacaaaactgtaacctcaaggaaaccataaagcttggagtgccttaatttttaaccagtttccaataaaacggtttactacctgcgtgtgtttagta

SEQ ID NO: 166261 - DNA, 2497 bp, Homo sapiens
  Payload ID: 12733
  Gene Symbol: PTTG1IP
  Gene Name: pituitary tumor-transforming 1 interacting protein
  ENST ID: ENST00000445724
  CDS Start-End: 288-716
atccgcgccgcgcaggcgcactgagcctcagccgctctcctcgctaccaggctcctttcctctatcgcgcaggcgcactgaacctcagccgcgccgggaggcgagcccgttggcgaggggcggggcagatggcgagggagcggggcgagctgctttttgaggctgcgcactcgcatggccccacctcgcaggtccacttccggcgccgcggctgttccgggcggagaccgcttgtgctggagtcggagttgtaacgctccactgactgatagagcgaccggccgaccatggcgcccggagtggcccgcgggccgacgccgtactggaggttgcgcctcggtggcgccgcgctgctcctgctgctcatcccggtggccgccgcgcaggagcctcccggagctgcttgttctcagaacacaaacaaaacctgtgaagagtgcctgaagaacgtctccgcctgtttaaagaagaaaacccgtatgctagatttgaaaacaactaaagcgctccagcacatcagtcccgacgcttcctgtgaggtgcacgctccgcagcccagcccagccgggagaccacgtggccattgcggtctcctgaccttggccagtgaacctgccagccttccaggacaggcggccggagagctgcccctgaaggacagtcctctcgtcttgcagactggtgaccttctattccctgttcatctctgtttctagatttagtcacttgaaataagaaatctttggggtttgggcttttttatactcttctcagtttgtgaaacgctaactgcacacgaagccgcctgacggcacccagcgctgtggctgtcattctcccagggcagaaccctgcgtttctctctgtccactaacaagcttcacacgcaacacagggaagtcggtttgacttttgtcatgaggagaactgaccagccctcatcattccccataaaaccacggacagcgtctgtgtgcgcatcttgagtcttcacacctgttgactcacacggcttttgctgatgacacggggctccagtacacagtctgataaggacttaacgtcctaacctcaattgtattaaatagcattggggaatagctaaacctttttaaaaaaatttattggattttcctccctgcttaaaagatttcaccagaaaaccttcatataaaaattcaggccctttttggacaatttttaaaatttgtatctttactagaacatgagaatctttttcccttggaagcttgaattataaatgtggtgtttggcctgcctcagcagcaccagttgactgctcgtgtgccagcggtgtggggaggacggggcaggacgctgcagctctctccagccctgttggcatcctcagtgcctgcaggcctctcgctgcctgttgggctgtctggggggtggccatttagggatcgtggggacggggtccaccccaagaagaaagaaaggcccgtccacaggcccggctctgggccacgtgccccggaagcaggtgtgtccagagtcagctgagggctctccccacaccacccagcaggcgctggtgctccttctgcctcatgggaccagtccagcttccagccgctctggctcgagggtggtctgaccacttccttctgagtgggcttctctgggagctctccagtggcactgctggacctgcccacgtttctgtaaaatcaggatacgtggctttagtaagcagaccaagcgcttcgtggcagggaaagcagcgtgcggggaagtcactgaaaagtgctgcctaaggaagtttggaaatagtccctgttccagattgccttgaattttaaaacattttgctttgggaaagtaggtcagcagcacctaagatcaaggatgcgttccattttcacacttcacagtcatgaaaactgagaagactgtcttcagcgtgaactaaagttcacaggcagatcactgatccagaacacttcaagaactcgtcaaacagctcgataagcctttttgactgtgtacatctgtaccgggaataacattcctaggctgaaatttccacaaagaatagaacctgtacccagttcttcaggctgatttccctgacctcttgggcatttgtatttgtagtaaagtattgcagagattcctaagtattttatagcagccatcaaaattggactttgtattgtttattcataaaagacacttggtaatagacttcagtgaactctgtatgaatgcagtagtgtgtgtgcaaaatccgcttcctgagcgtagggtgctgagctggcgctagggctcggttgtgaaatacagcgtagtcagcccttgcgctcagtgtagaaacccacgtctgtaaggtcggtcttcgtccatctgcttttttctgaaatacactaagagcagccacaaaactgtaacctcaaggaaaccataaagcttggagtgccttaatttttaaccagtttccaataaaacggtttactacctgcgtgtgtttagt

SEQ ID NO: 166262 - DNA, 691 bp, Homo sapiens
  Payload ID: 12734
  Gene Symbol: PTTG2
  Gene Name: pituitary tumor-transforming 2
  Uniprot ID: Q9NZH5
  ENST ID: ENST00000504686
  CDS Start-End: 1-576
atggctactctgatctacgttgataaggaaattggagaaccaggcacccgtgtggctgccaaggatgtgctgaagctggagtctagaccttcaatcaaagcattagatgggatatctcaagttttaacacgacgttttggcaaaacatacgatgctccatcagccttacctaaagctaccagaaaggctttgggcactgtcaacagagctacagaaaagtcagtaaagaccaatggacccagaaaacaaaaacagccaagcttttctgccaaaaagatgaccgagaagactgttaaaacaaaaagttctgttcctgcctcagatgacgcctatccagaaatagaaaaattctttcccttcaatcttctagactttgagagttttgacctgcctgaagagcgccagattgcacacctccccttgagtggagtgcctctcatgatccttgatgaggagggagagcttgaaaagctgtttcagctgggccccccttcacctgtgaaaatgccctctccaccatgggaatgcaatctgtttgcagtctccttcaagcattctgtcgaccctggatgttgaattgccagctgtttgctatgacatagatatttaaatttcttagtgctttggagtttgtgtgtacttgtattaataaagcattatttgtttaacaacataataaatacataaatat

SEQ ID NO: 166263 - DNA, 3897 bp, Homo sapiens
  Payload ID: 12735
  Gene Symbol: PIWIL1
  Gene Name: piwi-like RNA-mediated gene silencing 1
  Uniprot ID: Q96J94
  ENST ID: ENST00000245255
  CDS Start-End: 273-2858
gttactgggcgtatggcgtacagacacgaggccggcgcccgggaggcggtgttcatccgcccgggaaaagagcgcctgttgctcgctgcccgcgtgtccctggctctctcgggaacccagcgccgaaggcgaggtgggcgcgggccgaaggaggtcctgggaggtcggcggcgcggagggatctccgcgggagccgttggggctgttggcctcgggctgaggtgcaaggaccaggactagggcgagggcagcggtccaagaaatagaaaacaatgactgggagagcccgagccagagccagaggaagggcccgcggtcaggagacagcgcagctggtgggctccactgccagtcagcaacctggttatattcagcctaggcctcagccgccaccagcagagggggaattatttggccgtggacggcagagaggaacagcaggaggaacagccaagtcacaaggactccagatatctgctggatttcaggagttatcgttagcagagagaggaggtcgtcgtagagattttcatgatcttggtgtgaatacaaggcagaacctagaccatgttaaagaatcaaaaacaggttcttcaggcattatagtaaggttaagcactaaccatttccggctgacatcccgtccccagtgggccttatatcagtatcacattgactataacccactgatggaagccagaagactccgttcagctcttctttttcaacacgaagatctaattggaaagtgtcatgcttttgatggaacgatattatttttacctaaaagactacagcaaaaggttactgaagtttttagtaagacccggaatggagaggatgtgaggataacgatcactttaacaaatgaacttccacctacatcaccaacttgtttgcagttctataatattattttcaggaggcttttgaaaatcatgaatttgcaacaaattggacgaaattattataacccaaatgacccaattgatattccaagtcacaggttggtgatttggcctggcttcactacttccatccttcagtatgaaaacagcatcatgctctgcactgacgttagccataaagtccttcgaagtgagactgttttggatttcatgttcaacttttatcatcagacagaagaacataaatttcaagaacaagtttccaaagaactaataggtttagttgttcttaccaagtataacaataagacatacagagtggatgatattgactgggaccagaatcccaagagcacctttaagaaagccgacggctctgaagtcagcttcttagaatactacaggaagcaatacaaccaagagatcaccgacttgaagcagcctgtcttggtcagccagcccaagagaaggcggggccctggggggacactgccagggcctgccatgctcattcctgagctctgctatcttacaggtctaactgataaaatgcgtaatgattttaacgtgatgaaagacttagccgttcatacaagactaactccagagcaaaggcagcgtgaagtgggacgactcattgattacattcataaaaacgataatgttcaaagggagcttcgagactggggtttgagctttgattccaacttactgtccttctcaggaagaattttgcaaacagaaaagattcaccaaggtggaaaaacatttgattacaatccacaatttgcagattggtccaaagaaacaagaggtgcaccattaattagtgttaagccactagataactggctgttgatctatacgcgaagaaattatgaagcagccaattcattgatacaaaatctatttaaagttacaccagccatgggcatgcaaatgagaaaagcaataatgattgaagtggatgacagaactgaagcctacttaagagtcttacagcaaaaggtcacagcagacacccagatagttgtctgtctgttgtcaagtaatcggaaggacaaatacgatgctattaaaaaatacctgtgtacagattgccctaccccaagtcagtgtgtggtggcccgaaccttaggcaaacagcaaactgtcatggccattgctacaaagattgccctacagatgaactgcaagatgggaggagagctctggagggtggacatccccctgaagctcgtgatgatcgttggcatcgattgttaccatgacatgacagctgggcggaggtcaatcgcaggatttgttgccagcatcaatgaagggatgacccgctggttctcacgctgcatatttcaggatagaggacaggagctggtagatgggctcaaagtctgcctgcaagcggctctgagggcttggaatagctgcaatgagtacatgcccagccggatcatcgtgtaccgcgatggcgtaggagacggccagctgaaaacactggtgaactacgaagtgccacagtttttggattgtctaaaatccattggtagaggttacaaccctagactaacggtaattgtggtgaagaaaagagtgaacaccagattttttgctcagtctggaggaagacttcagaatccacttcctggaacagttattgatgtagaggttaccagaccagaatggtatgacttttttatcgtgagccaggctgtgagaagtggtagtgtttctcccacacattacaatgtcatctatgacaacagcggcctgaagccagaccacatacagcgcttgacctacaagctgtgccacatctattacaactggccaggtgtcattcgtgttcctgctccttgccagtacgcccacaagctggcttttcttgttggccagagtattcacagagagccaaatctgtcactgtcaaaccgcctttactacctctaacctgcagaagacgatgcagccgcttttctttttgaaatgactttgggatttttttaagcttttatttactttttttttaactgttatctttctggatgaaacttgggaaggggattaggagatctagcattttatttctagcattgctattcaccggcttccttattttatacgtaaaaattaagattttatattttatcttcttgtttctcatagatattttgtgagcatttttttgtttattttgaagaaatgtggataagatacttggtagtataaaacagactctctgagagtatttgaaatgtgtttggagatttacttaaacgtactttcaggagtgagcaagtcctacttataaacctatattaactttatttttgagatacctgttttgaatttaaaggagataagaggcgtaaagtaggatgctcactacaaccataggtggggtttcagctcatatcttaaagataaaaggtactattatataacctatacacaagatacaggagaaaatatgcttgatttttatttggcaggggggctaggttgtatgggagtaaaaaaaacattgaaaatttttaaattgtccaaagaaacattttaagactctttaacaaaaaaggccatgagtaaatctctatattaacattactatttattttgttttggaactgggacatgattctatttgttataaaataaaattgatgtgattgtcaccttatttgaataactgtaattcttgttttactgaaagtatgtgcgttttcttttcatttaatttttaaaagtgcatacaattccattcataaaagctaaattagcctgaccaacatggtgaaaccccatctctactaaaaatacaaaattagccagatgtggtgccaggaggctgaggcaggagaatcacttgaacctgagaggcggaggttgcagtgagcagagatcacgccactgcactccagcctgggcaacagagtgagactccgtctcaaaaaaaaaaaaaaaaaaaaaaaaaaaaaaaaaaaaaaaa

SEQ ID NO: 166264 - DNA, 879 bp, Homo sapiens
  Payload ID: 12735
  Gene Symbol: PIWIL1
  Gene Name: piwi-like RNA-mediated gene silencing 1
  ENST ID: ENST00000542723
  CDS Start-End: 362-879
atctccaaatgggaaagaaagaaccagccaccagcatcctaattctttcagcactttctcctcctaagtctgtttataataaataatccaaatgaaaaactaagtcttatattaaaataggttttcccctttggccctactgcagtgcccagtgcaaggtaagcaactgagtttgttgaatgtaggaatgttacattaaaaaaaactgtcattaaagattagaaggatacataataattgcctggggagcttacttttgaaactcaaagaagtttaaagtaacattgtagaaattatcaaatgcgattgcctccattgagtattgtcttcaagattgtttcctctccagaaatagaaaacaatgactgggagagcccgagccagagccagaggaagggcccgcggtcaggagacagcgcagctggtgggctccactgccagtcagcaacctggttatattcagcctaggcctcagccgccaccagcagagggggaattatttggccgtggacggcagagaggaacagcaggaggaacagccaagtcacaaggactccagatatctgctggatttcaggagttatcgttagcagagagaggaggtcgtcgtagagattttcatgatcttggtgtgaatacaaggcagaacctagaccatgttaaagaatcaaaaacaggttcttcaggcattatagtaaggttaagcactaaccatttccggctgacatcccgtccccagtgggccttatatcagtatcacattgactataacccactgatggaagccagaagactccgttcagctcttctttttcaacacgaagatctaattggaaagtgtcatgcttttgatggaacgatattatttttacctaaaag

SEQ ID NO: 166265 - DNA, 545 bp, Homo sapiens
  Payload ID: 12735
  Gene Symbol: PIWIL1
  Gene Name: piwi-like RNA-mediated gene silencing 1
  ENST ID: ENST00000539995
  CDS Start-End: 95-545
gtgcacggcgtggtcctgagctcagcgccggagggacgttaggtggaagcgtctttggcagagctggtagcgaatcggagagaaatagaaaacaatgactgggagagcccgagccagagccagaggaagggcccgcggtcaggagacagcgcagctggtgggctccactgccagtcagcaacctggttatattcagcctaggcctcagccgccaccagcagagggggaattatttggccgtggacggcagagaggaacagcaggaggaacagccaagtcacaaggactccagatatctgctggatttcaggagttatcgttagcagagagaggaggtcgtcgtagagattttcatgatcttggtgtgaatacaaggcagaacctagaccatgttaaagaatcaaaaacaggttcttcaggcattatagtaaggttaagcactaaccatttccggctgacatcccgtccccagtgggccttatatcagtatcacattgactataacccactgatggaagccagaagactccgttcagctcttcttt

SEQ ID NO: 166266 - DNA, 467 bp, Homo sapiens
  Payload ID: 12735
  Gene Symbol: PIWIL1
  Gene Name: piwi-like RNA-mediated gene silencing 1
  ENST ID: ENST00000539400
  CDS Start-End: 101-467
agcggtccaaggtgcggggccaggctgaggtgctaggtgtgcgggggccgggatgcgggggcggcggctgggggtccgggatgtggagaaatagaaaacaatgactgggagagcccgagccagagccagaggaagggcccgcggtcaggagacagcgcagctggtgggctccactgccagtcagcaacctggttatattcagcctaggcctcagccgccaccagcagagggggaattatttggccgtggacggcagagaggaacagcaggaggaacagccaagtcacaaggactccagatatctgctggatttcaggagttatcgttagcagagagaggaggtcgtcgtagagattttcatgatcttggtgtgaatacaaggcagaacctagaccatgttaaagaatcaaaaacaggttcttcaggcattatagtaaggttaagcactaaccatttccggctgacat

SEQ ID NO: 166267 - DNA, 571 bp, Homo sapiens
  Payload ID: 12735
  Gene Symbol: PIWIL1
  Gene Name: piwi-like RNA-mediated gene silencing 1
  ENST ID: ENST00000546060
  CDS Start-End: 77-571
gtgcaaggaccaggactagggcgagggcagcggtccaaggtgcggggccaggctgaggtgctagaaatagaaaacaatgactgggagagcccgagccagagccagaggaagggcccgcggtcaggagacagcgcagctggtgggctccactgccagtcagcaacctggttatattcagcctaggcctcagccgccaccagcagagggggaattatttggccgtggacggcagagaggaacagcaggaggaacagccaagtcacaaggactccagatatctgctggatttcaggagttatcgttagcagagagaggaggtcgtcgtagagattttcatgatcttggtgtgaatacaaggcagaacctagaccatgttaaagaatcaaaaacaggttcttcaggcattatagtaaggttaagcactaaccatttccggctgacatcccgtccccagtgggccttatatcagtatcacattgactataacccactgatggaagccagaagactccgttcagctcttctttttcaacacgaagatctaattggaaagtgtcatgcttttgatgga

SEQ ID NO: 166268 - DNA, 566 bp, Homo sapiens
  Payload ID: 12735
  Gene Symbol: PIWIL1
  Gene Name: piwi-like RNA-mediated gene silencing 1
  ENST ID: ENST00000535956
  CDS Start-End: 215-566
gttaggtggaagcgtctttggcagagctggtagcgaatcggagaggtgatttccagcgagtgtggttattggaagcacacacttgctttctgactttaagaattcaatatccagactgaggtggttttgaaactggaaggagataaagctgaaaaccagagttgtgctgggaaacctggacgtagagcgctgagccccccagaaatagaaaacaatgactgggagagcccgagccagagccagaggaagggcccgcggtcaggagacagcgcagctggtgggctccactgccagtcagcaacctggttatattcagcctaggcctcagccgccaccagcagagggggaattatttggccgtggacggcagagaggaacagcaggaggaacagccaagtcacaaggactccagatatctgctggatttcaggagttatcgttagcagagagaggaggtcgtcgtagagattttcatgatcttggtgtgaatacaaggcagaacctagaccatgttaaagaatcaaaaacaggttcttcaggcattatagtaaggttaagcactaacc

SEQ ID NO: 166269 - DNA, 3875 bp, Homo sapiens
  Payload ID: 12735
  Gene Symbol: PIWIL1
  Gene Name: piwi-like RNA-mediated gene silencing 1
  Uniprot ID: Q96J94
  ENST ID: ENST00000613226
  CDS Start-End: 273-2858
gttactgggcgtatggcgtacagacacgaggccggcgcccgggaggcggtgttcatccgcccgggaaaagagcgcctgttgctcgctgcccgcgtgtccctggctctctcgggaacccagcgccgaaggcgaggtgggcgcgggccgaaggaggtcctgggaggtcggcggcgcggagggatctccgcgggagccgttggggctgttggcctcgggctgaggtgcaaggaccaggactagggcgagggcagcggtccaagaaatagaaaacaatgactgggagagcccgagccagagccagaggaagggcccgcggtcaggagacagcgcagctggtgggctccactgccagtcagcaacctggttatattcagcctaggcctcagccgccaccagcagagggggaattatttggccgtggacggcagagaggaacagcaggaggaacagccaagtcacaaggactccagatatctgctggatttcaggagttatcgttagcagagagaggaggtcgtcgtagagattttcatgatcttggtgtgaatacaaggcagaacctagaccatgttaaagaatcaaaaacaggttcttcaggcattatagtaaggttaagcactaaccatttccggctgacatcccgtccccagtgggccttatatcagtatcacattgactataacccactgatggaagccagaagactccgttcagctcttctttttcaacacgaagatctaattggaaagtgtcatgcttttgatggaacgatattatttttacctaaaagactacagcaaaaggttactgaagtttttagtaagacccggaatggagaggatgtgaggataacgatcactttaacaaatgaacttccacctacatcaccaacttgtttgcagttctataatattattttcaggaggcttttgaaaatcatgaatttgcaacaaattggacgaaattattataacccaaatgacccaattgatattccaagtcacaggttggtgatttggcctggcttcactacttccatccttcagtatgaaaacagcatcatgctctgcactgacgttagccataaagtccttcgaagtgagactgttttggatttcatgttcaacttttatcatcagacagaagaacataaatttcaagaacaagtttccaaagaactaataggtttagttgttcttaccaagtataacaataagacatacagagtggatgatattgactgggaccagaatcccaagagcacctttaagaaagccgacggctctgaagtcagcttcttagaatactacaggaagcaatacaaccaagagatcaccgacttgaagcagcctgtcttggtcagccagcccaagagaaggcggggccctggggggacactgccagggcctgccatgctcattcctgagctctgctatcttacaggtctaactgataaaatgcgtaatgattttaacgtgatgaaagacttagccgttcatacaagactaactccagagcaaaggcagcgtgaagtgggacgactcattgattacattcataaaaacgataatgttcaaagggagcttcgagactggggtttgagctttgattccaacttactgtccttctcaggaagaattttgcaaacagaaaagattcaccaaggtggaaaaacatttgattacaatccacaatttgcagattggtccaaagaaacaagaggtgcaccattaattagtgttaagccactagataactggctgttgatctatacgcgaagaaattatgaagcagccaattcattgatacaaaatctatttaaagttacaccagccatgggcatgcaaatgagaaaagcaataatgattgaagtggatgacagaactgaagcctacttaagagtcttacagcaaaaggtcacagcagacacccagatagttgtctgtctgttgtcaagtaatcggaaggacaaatacgatgctattaaaaaatacctgtgtacagattgccctaccccaagtcagtgtgtggtggcccgaaccttaggcaaacagcaaactgtcatggccattgctacaaagattgccctacagatgaactgcaagatgggaggagagctctggagggtggacatccccctgaagctcgtgatgatcgttggcatcgattgttaccatgacatgacagctgggcggaggtcaatcgcaggatttgttgccagcatcaatgaagggatgacccgctggttctcacgctgcatatttcaggatagaggacaggagctggtagatgggctcaaagtctgcctgcaagcggctctgagggcttggaatagctgcaatgagtacatgcccagccggatcatcgtgtaccgcgatggcgtaggagacggccagctgaaaacactggtgaactacgaagtgccacagtttttggattgtctaaaatccattggtagaggttacaaccctagactaacggtaattgtggtgaagaaaagagtgaacaccagattttttgctcagtctggaggaagacttcagaatccacttcctggaacagttattgatgtagaggttaccagaccagaatggtatgacttttttatcgtgagccaggctgtgagaagtggtagtgtttctcccacacattacaatgtcatctatgacaacagcggcctgaagccagaccacatacagcgcttgacctacaagctgtgccacatctattacaactggccaggtgtcattcgtgttcctgctccttgccagtacgcccacaagctggcttttcttgttggccagagtattcacagagagccaaatctgtcactgtcaaaccgcctttactacctctaacctgcagaagacgatgcagccgcttttctttttgaaatgactttgggatttttttaagcttttatttactttttttttaactgttatctttctggatgaaacttgggaaggggattaggagatctagcattttatttctagcattgctattcaccggcttccttattttatacgtaaaaattaagattttatattttatcttcttgtttctcatagatattttgtgagcatttttttgtttattttgaagaaatgtggataagatacttggtagtataaaacagactctctgagagtatttgaaatgtgtttggagatttacttaaacgtactttcaggagtgagcaagtcctacttataaacctatattaactttatttttgagatacctgttttgaatttaaaggagataagaggcgtaaagtaggatgctcactacaaccataggtggggtttcagctcatatcttaaagataaaaggtactattatataacctatacacaagatacaggagaaaatatgcttgatttttatttggcaggggggctaggttgtatgggagtaaaaaaaacattgaaaatttttaaattgtccaaagaaacattttaagactctttaacaaaaaaggccatgagtaaatctctatattaacattactatttattttgttttggaactgggacatgattctatttgttataaaataaaattgatgtgattgtcaccttatttgaataactgtaattcttgttttactgaaagtatgtgcgtttccttttcatttaatttttaaaagtgcatacaattccattcataaaagctaaattagcctgaccaacatggtgaaaccccatctctactaaaaatacaaaattagccagatgtggtgccaggaggctgaggcaggagaatcacttgaacctgagaggcggaggttgcagtgagcagagatcacgccactgcactccagcctgggcaacagagtgagactccgtctcaaaaaaaaaaaaaaaaaa

SEQ ID NO: 166270 - DNA, 2579 bp, Homo sapiens
  Payload ID: 12735
  Gene Symbol: PIWIL1
  Gene Name: piwi-like RNA-mediated gene silencing 1
  Uniprot ID: Q96J94
  ENST ID: ENST00000632888
  CDS Start-End: 54-2543
aggtgcaaggaccaggactagggcgagggcagcggtccaagaaatagaaaacaatgactgggagagcccgagccagagccagaggaagggcccgcggtcaggagacagcgcagctggtgggctccactgccagtcagcaacctggttatattcagcctaggcctcagccgccaccagcagagggggaattatttggccgtggacggcagagaggaacagcaggaggaacagccaagtcacaaggactccagatatctgctggatttcaggagttatcgttagcagagagaggaggtcgtcgtagagattttcatgatcttggtgtgaatacaaggcagaacctagaccatgttaaagaatcaaaaacaggttcttcaggcattatagtaaggttaagcactaaccatttccggctgacatcccgtccccagtgggccttatatcagtatcacattgactataacccactgatggaagccagaagactccgttcagctcttctttttcaacacgaagatctaattggaaagtgtcatgcttttgatggaacgatattatttttacctaaaagactacagcaaaaggttactgaagtttttagtaagacccggaatggagaggatgtgaggataacgatcactttaacaaatgaacttccacctacatcaccaacttgtttgcagttctataatattattttcaggaggcttttgaaaatcatgaatttgcaacaaattggacgaaattattataacccaaatgacccaattgatattccaagtcacaggttggtgatttggcctggcttcactacttccatccttcagtatgaaaacagcatcatgctctgcactgacgttagccataaagtccttcgaagtgagactgttttggatttcatgttcaacttttatcatcagacagaagaacataaatttcaagaacaagtttccaaagaactaataggtttagttgttcttaccaagtataacaataagacatacagagtggatgatattgactgggaccagaatcccaagagcacctttaagaaagccgacggctctgaagtcagcttcttagaatactacaggaagcaatacaaccaagagatcaccgacttgaagcagcctgtcttggtcagccagcccaagagaaggcggggccctggggggacactgccagggcctgccatgctcattcctgagctctgctatcttacaggtctaactgataaaatgcgtaatgattttaacgtgatgaaagacttagccgttcatacaagactaactccagagcaaaggcagcgtgaagtgggacgactcattgattacattcataaaaacgataatgttcaaagggagcttcgagactggggtttgagctttgattccaacttactgtccttctcaggaagaattttgcaaacagaaaagattcaccaaggtggaaaaacatttgattacaatccacaatttgcagattggtccaaagaaacaagaggtgcaccattaattagtgttaagccactagataactggctgttgatctatacgcgaagaaattatgaagcagccaattcattgatacaaaatctatttaaagttacaccagccatgggcatgcaaatgagaaaagcaataatgattgaagtggatgacagaactgaagcctacttaagagtcttacagcaaaaggtcacagcagacacccagatagttgtctgtctgttgtcaagtaatcggaaggacaaatacgatgctattaaaaaatacctgtgtacagattgccctaccccaagtcagtgtgtggtggcccgaaccttaggcaaacagcaaactgtcatggccattgctacaaagattgccctacagatgaactgcaagatgggaggagagctctggagggtggacatccccctgaagctcgtgatgatcgttggcatcgattgttaccatgacatgacagctgggcggaggtcaatcgcaggatttgttgccagcatcaatgaagggatgacccgctggttctcacgctgcatatttcaggatagaggacaggagctggtagatgggctcaaagtctgcctgcaagcggctctgagggcttggaatagctgcaatgagtacatgcccagccggatcatcgtgtaccgcgatggcgtaggagacggccagctgaaaacactggtgaactacgaagtgccacagtttttggattgtctaaaatccattggtagaggttacaaccctagactaacggtaattgtggtgaagaaaagagtgaacaccagattttttgctcagtctggaggaagacttcagaatccacttcctggaacagttattgatgtagaggttaccagaccagaatggtatgacttttttatcgtgagccaggctgtgagaagtggtagtgtttctcccacacattacaatgtcatctatgacaacagcggcctgaagccagaccacatacagcgcttgacctacaagctgtgccacatctattacaactggccagtaagtgcttctacttgttgatgtttagcaaataaaggacattcacttttcaaaatg

SEQ ID NO: 166271 - DNA, 571 bp, Homo sapiens; identical to SEQ ID NO: 166267
  Payload ID: 12735
  Gene Symbol: PIWIL1
  Gene Name: piwi-like RNA-mediated gene silencing 1
  ENST ID: ENST00000634077
  CDS Start-End: 77-571

SEQ ID NO: 166272 - DNA, 467 bp, Homo sapiens; identical to SEQ ID NO: 166266
  Payload ID: 12735
  Gene Symbol: PIWIL1
  Gene Name: piwi-like RNA-mediated gene silencing 1
  ENST ID: ENST00000633272
  CDS Start-End: 101-467

SEQ ID NO: 166273 - DNA, 879 bp, Homo sapiens; identical to SEQ ID NO: 166264
  Payload ID: 12735
  Gene Symbol: PIWIL1
  Gene Name: piwi-like RNA-mediated gene silencing 1
  ENST ID: ENST00000633042
  CDS Start-End: 362-879

SEQ ID NO: 166274 - DNA, 566 bp, Homo sapiens; identical to SEQ ID NO: 166268
  Payload ID: 12735
  Gene Symbol: PIWIL1
  Gene Name: piwi-like RNA-mediated gene silencing 1
  ENST ID: ENST00000634115
  CDS Start-End: 215-566

SEQ ID NO: 166275 - DNA, 545 bp, Homo sapiens; identical to SEQ ID NO: 166265
  Payload ID: 12735
  Gene Symbol: PIWIL1
  Gene Name: piwi-like RNA-mediated gene silencing 1
  ENST ID: ENST00000633252
  CDS Start-End: 95-545

SEQ ID NO: 166276 - DNA, 5128 bp, Homo sapiens
  Payload ID: 12736
  Gene Symbol: PIWIL2
  Gene Name: piwi-like RNA-mediated gene silencing 2
  Uniprot ID: Q8TC59
  ENST ID: ENST00000356766
  CDS Start-End: 149-3070
gaaattggccctggagcatgtgggccccggggcgtgggttgagctcggtcttcccctgaggccgcgcggagctgggcgactggggcgaggactcgcgcacaggtaattaaccagaacaggatcgacacgtgttctctacagcccgtccatggatcctttccgaccatcgttcaggggccagtctcctatccacccatcccagtgccaggctgtacggatgccaggctgttggccacaagcttctaaacctttggacccagctctgggcaggggagcacctgcaggcagaggccatgtatttggaaagccagaggaaccaagcacacagagggggccagcacaaagggagtctgtgggtttggtctccatgttccgaggcctgggcattgaaacagtttctaagacccctctgaaacgggaaatgcttccatcaggtagaggcattttaggtcgaggcttgtctgctaatctggtacgcaaggacagggaggaactctctcccactttttgggatccaaaagtgttggcggctggggacagcaagatggcagagacctccgttggttggagtaggacgcttggaagagggagttcagatgcgtctttattaccactgggaagagcagcaggtggtatcagcagagaagtggacaagcctccctgtaccttcagcacaccgtcccggggtcccccgcagctgtcatcaccaccagctctgccccagtctcccctgcactctccagatcgccctctggtcctgactgtggaacacaaggaaaaagagcttattgtgaagcaaggatcaaaaggaacacctcagtctttgggactgaacctcgtcaaaatacagtgtcataatgaagcagtttatcaatatcatgtgactttcagccccaatgtggagtgcaaaagcatgaggttcggcatgttgaaggaccatcaagctgtcaccggcaacgtcactgcgtttgatggatctattctctatctgcctgttaagcttcaacaagttcttgagttaaaaagtcaaaggaaaacagacagtgctgaaatcagcattaagattcagatgacaaagatcctggagccctgctctgacctgtgcattcccttctacaatgttgttttccgtcgggtaatgaaacttttagatatgaagcttgtggggagaaacttttatgaccctacaagtgctatggtactacagcaacacagattgcagatctggccaggctatgcagctagcatccgaaggacagatggagggctcttcctgctagctgatgtctcccataaggtcattcggaatgactgtgtgctggatgtcatgcatgccatttatcagcagaataaagaacacttccaggatgagtgtactaagcttctggttggcaatattgttatcacccgatataacaatcgtacctatcgtattgatgatgtggattggaataagactccaaaggatagcttcacgatgtctgatgggaaagagatcacattcttggaatactacagcaaaaattatgggatcacagttaaggaagaggaccagccattgctgattcacaggcccagtgagagacaggataatcatgggatgctgctaaaaggggaaatcctgctgctgcctgagctttcttttatgaccggaatcccagagaagatgaagaaggacttcagagccatgaaggatttggctcagcaaatcaatctgagccccaagcaacaccatagtgctttggaatgcttgctgcaaagaattgcaaagaacgaggcagccaccaatgaactgatgcgttgggggctccgtctgcaaaaggatgtacataagattgaaggacgtgttctgccaatggaaagaattaacttaaaaaatacttcgtttatcacatctcaggaactaaactgggttaaggaagtaaccagagacccttccatcttgactatccccatgcatttctgggcacttttttacccaaagagagcaatggaccaggctcgagaactggtcaacatgttggagaagatagccggccccattggcatgcgtatgagcccaccggcctgggttgaactaaaggatgaccgaatagagacttatgtcagaaccattcaatccacgttaggagctgaggggaagatacagatggttgtttgcatcatcatgggcccacgtgatgatctctatggggccatcaagaagctgtgctgtgtgcagtccccagtgccctcccaggttgtcaatgttcgaaccattggtcagcccaccaggcttcggagtgtggcccagaagattttacttcagattaactgtaaattgggtggtgagctctggggagtggatattcctctgaaacagttaatggtgatcgggatggatgtttaccatgaccccagtagaggcatgcgctccgtggttggcttcgtggcaagcatcaatctcaccctcacaaaatggtattcccgggtggtgttccagatgccgcatcaggagattgtggacagcctgaagctatgcctcgtgggctccttaaaaaagttttatgaggtgaaccactgtctaccagagaagattgtggtgtaccgtgatggagtgtctgatggccaactgaagacagttgccaactatgagattcctcaactacagaagtgttttgaagcttttgagaattatcagcccaagatggtggtgtttgtagttcagaagaaaatcagtactaatctatatctggctgctcctcagaactttgtaactcccactcctggaactgtggtagatcatacaataacaagctgtgagtgggtggatttctatcttcttgcccatcatgtacggcagggctgtggcattcctacgcattatgtctgtgttctcaacaccgcaaacctgagccctgatcatatgcagaggctgactttcaaactgtgccacatgtactggaattggcctggcaccatcagagttccagctccttgcaagtatgcccacaagctagctttcctgtcaggacacatcttgcatcatgaaccagccatccagctgtgcgagaacctgttcttcctgtgactgcacagcttggagatgggctggtgagaagaaaggcggcctcagaactcagctgtgactcttgcagaatcaacagagactgaagtgggcttttgtgttataattttccctttctccaaccctgtagaataagatttctttcttgtcttttaaacctaatatcaccaagaagcaagtttctgagtaacagctgaaaatggccttgttgcctgtgtagagcaagttacggtggtactgccactctgcaggtggagcgggtgactctgggggaccattaagacctccagaccgggtgcggtggttcacacctgtaatccaagcactttgggaggccgaggcgggtggatcatgaggtcaggagatcaagaccatcctggccaacatggtgaaaccccgtctctactaaaatacaaaaaaattagccgggtgtggcggtgcacgcctgtagtcccagctactcaggaggctaaggcaggagaatcgcttgaacccgggaggtggaggttgcagtgagccgagatcacgccactgcactccagcctgttgacaaagcaagactctgtctcaaaaaaaaaaaaaaaaagccaacatgagctgcagaaaccagcagaagcagccattatacttctaagctgtgccaactaagtggttcccatttctggagccagagatgataattaagtcattgcaagttgcctgaagagaattactcaggcaactgggaaaggcagtggaaggtctgtgaagcaaagttttcaagtagatattgctattactggcaggtgtgcaaggcgtgtagtaaaatcagtttgtggcataggtcggcccttgctgactaaatcctctctggggattgaattgatgacgactgtgacttgagttggattcgaaaatggcttcccttggcctcttgaaagagtgcagatgaagccttttccgtggatttcagtaactttccagcataccatgacgatttcttccccaaatatacacatgctcttttgctctttgtgcctgatcttcagtaatttttagttttttaacaggcagaaaaaatctagcagctaggaaagttcaagttggggtgggagtttttagtgaacttttctcccaggtgtgtggcctttatttctatttatatatgtttgtaaatggaattaccccctttctcttgcaaaataaccgcttcctggctgttggctcactttgctggaatttttctgaatccaggttaagatttccagaagtcagctttggaaaacgtgacactcctaccaaagtccagatggttagaaagttatcacataccatgggtttcagtgtttttggaaacccgtttttttctggttttttttcccccctctccattttagaatcttctcccagtcccttcgggcctagttctgtctcatcttgctttattgggttttaaaaaccggtcttatttaagcttttctaatttgtatttatgtacttatttattttttggtatgatggcagggaggggacaaagcagaaataccccttttatatgacaatgtgtgagaaaagaaactttagcttaaaactccgtaaaatgtgctcacttcagcagcacatatactaaaattaaaatgatatagagaagattagcatatagaaaaaaagaaaaaagatttccttaaaacaagaaaaccaagaatgtttttggtttgttgcggtgcccagccgaggttgaggagggatgggtattgttggtgcactgctggtttcatttggagtgtgggacattagggtgagacaaggacctggaatttaaaaaccacagaatcaaacactgtgaaccactggtctctggctaagcagatcagttttctgattttccttggaagcgttttgaatttttctgttgaagttggatttcctaatactttttttctcttagataatcagaacaaatggttgaatacattataatacaaaaatttcttcactttttattcttggttttcttgcctcgtttttcggttttaatgccaaatgattgggtcatggggtgggaaataaaaacaactttgt

SEQ ID NO: 166277 - DNA, 3442 bp, Homo sapiens
  Payload ID: 12736
  Gene Symbol: PIWIL2
  Gene Name: piwi-like RNA-mediated gene silencing 2
  Uniprot ID: Q8TC59
  ENST ID: ENST00000454009
  CDS Start-End: 510-3431
attcgaggcccggcgccgcggccccaagaaggtgtccaggttggggcggcaggggaggccctccggaggcccaagtggacgtcttatttggcctgagagaggagatagaacccctggcagggctgtggctttggggaaaggtgcttttctcggggtggaaaggggatgggactcgccttcgggggccttgcttctggttaggcccgagtcgcgaggcctcagcgcggagcacgcacccagggatgcgagggaggcaggcccagcccgtcctgggttcgctccccattgaacctttcggacagccaagtatctgctacctgatcccagggggaaacccacactgggagagggccctctgggggagctacctgaatctatagaagtggtgctggaggttgagggaagcgtggacaaagaggaagattccagatgtcccttaagggaggccgtccagcgcttctgagtaattaaccagaacaggatcgacacgtgttctctacagcccgtccatggatcctttccgaccatcgttcaggggccagtctcctatccacccatcccagtgccaggctgtacggatgccaggctgttggccacaagcttctaaacctttggacccagctctgggcaggggagcacctgcaggcagaggccatgtatttggaaagccagaggaaccaagcacacagagggggccagcacaaagggagtctgtgggtttggtctccatgttccgaggcctgggcattgaaacagtttctaagacccctctgaaacgggaaatgcttccatcaggtagaggcattttaggtcgaggcttgtctgctaatctggtacgcaaggacagggaggaactctctcccactttttgggatccaaaagtgttggcggctggggacagcaagatggcagagacctccgttggttggagtaggacgcttggaagagggagttcagatgcgtctttattaccactgggaagagcagcaggtggtatcagcagagaagtggacaagcctccctgtaccttcagcacaccgtcccggggtcccccgcagctgtcatcaccaccagctctgccccagtctcccctgcactctccagatcgccctctggtcctgactgtggaacacaaggaaaaagagcttattgtgaagcaaggatcaaaaggaacacctcagtctttgggactgaacctcgtcaaaatacagtgtcataatgaagcagtttatcaatatcatgtgactttcagccccaatgtggagtgcaaaagcatgaggttcggcatgttgaaggaccatcaagctgtcaccggcaacgtcactgcgtttgatggatctattctctatctgcctgttaagcttcaacaagttcttgagttaaaaagtcaaaggaaaacagacagtgctgaaatcagcattaagattcagatgacaaagatcctggagccctgctctgacctgtgcattcccttctacaatgttgttttccgtcgggtaatgaaacttttagatatgaagcttgtggggagaaacttttatgaccctacaagtgctatggtactacagcaacacagattgcagatctggccaggctatgcagctagcatccgaaggacagatggagggctcttcctgctagctgatgtctcccataaggtcattcggaatgactgtgtgctggatgtcatgcatgccatttatcagcagaataaagaacacttccaggatgagtgtactaagcttctggttggcaatattgttatcacccgatataacaatcgtacctatcgtattgatgatgtggattggaataagactccaaaggatagcttcacgatgtctgatgggaaagagatcacattcttggaatactacagcaaaaattatgggatcacagttaaggaagaggaccagccattgctgattcacaggcccagtgagagacaggataatcatgggatgctgctaaaaggggaaatcctgctgctgcctgagctttcttttatgaccggaatcccagagaagatgaagaaggacttcagagccatgaaggatttggctcagcaaatcaatctgagccccaagcaacaccatagtgctttggaatgcttgctgcaaagaattgcaaagaacgaggcagccaccaatgaactgatgcgttgggggctccgtctgcaaaaggatgtacataagattgaaggacgtgttctgccaatggaaagaattaacttaaaaaatacttcgtttatcacatctcaggaactaaactgggttaaggaagtaaccagagacccttccatcttgactatccccatgcatttctgggcacttttttacccaaagagagcaatggaccaggctcgagaactggtcaacatgttggagaagatagccggccccattggcatgcgtatgagcccaccggcctgggttgaactaaaggatgaccgaatagagacttatgtcagaaccattcaatccacgttaggagctgaggggaagatacagatggttgtttgcatcatcatgggcccacgtgatgatctctatggggccatcaagaagctgtgctgtgtgcagtccccagtgccctcccaggttgtcaatgttcgaaccattggtcagcccaccaggcttcggagtgtggcccagaagattttacttcagattaactgtaaattgggtggtgagctctggggagtggatattcctctgaaacagttaatggtgatcgggatggatgtttaccatgaccccagtagaggcatgcgctccgtggttggcttcgtggcaagcatcaatctcaccctcacaaaatggtattcccgggtggtgttccagatgccgcatcaggagattgtggacagcctgaagctatgcctcgtgggctccttaaaaaagttttatgaggtgaaccactgtctaccagagaagattgtggtgtaccgtgatggagtgtctgatggccaactgaagacagttgccaactatgagattcctcaactacagaagtgttttgaagcttttgagaattatcagcccaagatggtggtgtttgtagttcagaagaaaatcagtactaatctatatctggctgctcctcagaactttgtaactcccactcctggaactgtggtagatcatacaataacaagctgtgagtgggtggatttctatcttcttgcccatcatgtacggcagggctgtggcattcctacgcattatgtctgtgttctcaacaccgcaaacctgagccctgatcatatgcagaggctgactttcaaactgtgccacatgtactggaattggcctggcaccatcagagttccagctccttgcaagtatgcccacaagctagctttcctgtcaggacacatcttgcatcatgaaccagccatccagctgtgcgagaacctgttcttcctgtgactgcacagctt

SEQ ID NO: 166278 - DNA, 3488 bp, Homo sapiens
  Payload ID: 12736
  Gene Symbol: PIWIL2
  Gene Name: piwi-like RNA-mediated gene silencing 2
  Uniprot ID: Q8TC59
  ENST ID: ENST00000521356
  CDS Start-End: 109-2922
gagctcggtcttcccctgaggccgcgcggagctgggcgactggggcgaggactcgcgcacaggtaattaaccagaacaggatcgacacgtgttctctacagcccgtccatggatcctttccgaccatcgttcaggggccagtctcctatccacccatcccagtgccaggctgtacggatgccaggctgttggccacaagcttctaaacctttggacccagctctgggcaggggagcacctgcaggcagaggccatgtatttggaaagccagaggaaccaagcacacagagggggccagcacaaagggagtctgtgggtttggtctccatgttccgaggcctgggcattgaaacagtttctaagacccctctgaaacgggaaatgcttccatcaggtagaggcattttaggtcgaggcttgtctgctaatctggtacgcaaggacagggaggaactctctcccactttttgggatccaaaagtgttggcggctggggacagcaagatggcagagacctccgttggttggagtaggacgcttggaagagggagttcagatgcgtctttattaccactgggaagagcagcaggtggtatcagcagagaagtggacaagcctccctgtaccttcagcacaccgtcccggggtcccccgcagctgtcatcaccaccagctctgccccagtctcccctgcactctccagatcgccctctggtcctgactgtggaacacaaggaaaaagagcttattgtgaagcaaggatcaaaaggaacacctcagtctttgggactgaacctcgtcaaaatacagtgtcataatgaagcagtttatcaatatcatgtgactttcagccccaatgtggagtgcaaaagcatgaggttcggcatgttgaaggaccatcaagctgtcaccggcaacgtcactgcgtttgatggatctattctctatctgcctgttaagcttcaacaagttcttgagttaaaaagtcaaaggaaaacagacagtgctgaaatcagcattaagattcagatgacaaagatcctggagccctgctctgacctgtgcattcccttctacaatgttgttttccgtcgggtaatgaaacttttagatatgaagcttgtggggagaaacttttatgaccctacaagtgctatggtactacagcaacacagattgcagatctggccaggctatgcagctagcatccgaaggacagatggagggctcttcctgctagctgatgtctcccataaggtcattcggaatgactgtgtgctggatgtcatgcatgccatttatcagcagaataaagaacacttccaggatgagtgtactaagcttctggttggcaatattgttatcacccgatataacaatcgtacctatcgtattgatgatgtggattggaataagactccaaaggatagcttcacgatgtctgatgggaaagagatcacattcttggaatactacagcaaaaattatgggatcacagttaaggaagaggaccagccattgctgattcacaggcccagtgagagacaggataatcatgggatgctgctaaaaggggaaatcctgctgctgcctgagctttcttttatgaccggaatcccagagaagatgaagaaggacttcagagccatgaaggatttggctcagcaaatcaatctgagccccaagcaacaccatagtgctttggaatgcttgctgcaaagaattgcaaagaacgaggcagccaccaatgaactgatgcgttgggggctccgtctgcaaaaggatgtacataagattgaaggacgtgttctgccaatggaaagaattaacttaaaaaatacttcgtttatcacatctcaggaactaaactgggttaaggaagtaaccagagacccttccatcttgactatccccatgcatttctgggcacttttttacccaaagagagcaatggaccaggctcgagaactggtcaacatgttggagaagatagccggccccattggcatgcgtatgagcccaccggcctgggttgaactaaaggatgaccgaatagagacttatgtcagaaccattcaatccacgttaggagctgaggggaagatacagatggttgtttgcatcatcatgggcccacgtgatgatctctatggggccatcaagaagctgtgctgtgtgcagtccccagtgccctcccaggttgtcaatgttcgaaccattggtcagcccaccaggcttcggagtgtggcccagaagattttacttcagattaactgtaaattgggtggtgagctctggggagtggatattcctctgaaacagttaatggtgatcgggatggatgtttaccatgaccccagtagaggcatgcgctccgtggttggcttcgtggcaagcatcaatctcaccctcacaaaatggtattcccgggtggtgttccagatgccgcatcaggagattgtggacagcctgaagctatgcctcgtgggctccttaaaaaagttttatgaggtgaaccactgtctaccagagaagattgtggtgtaccgtgatggagtgtctgatggccaactgaagacagttgccaactatgagattcctcaactacagaagtgttttgaagcttttgagaattatcagcccaagatggtggtgtttgtagttcagaagaaaatcagtactaatctatatctggctgctcctcagaactttgtaactcccactcctggaactgtggtagatcatacaataacaagctgtgagtggctgactttcaaactgtgccacatgtactggaattggcctggcaccatcagagttccagctccttgcaagtatgcccacaagctagctttcctgtcaggacacatcttgcatcatgaaccagccatccagctgtgcgagaacctgttcttcctgtgactgcacagcttggagatgggctggtgagaagaaaggcggcctcagaactcagctgtgactcttgcagaatcaacagagactgaagtgggcttttgtgttataattttccctttctccaaccctgtagaataagatttctttcttgtcttttaaacctaatatcaccaagaagcaagtttctgagtaacagctgaaaatggccttgttgcctgtgtagagcaagttacggtggtactgccactctgcaggtggagcgggtgactctgggggaccattaagacctccagaccgggtgcggtggttcacacctgtaatccaagcactttgggaggccgaggcgggtggatcatgaggtcaggagatcaagaccatcctggccaacatggtgaaaccccgtctctactaaaatacaaaaaaattagccgggtgtggcggtgcacgcctgtagtcccagctactcaggaggctaaggcaggagaatcgcttgaacccgggaggtggaggttgcagtgagccgagatcacgccactgcactccagcctgttgacaaagcaagactctgtctc

SEQ ID NO: 166279 - DNA, 2864 bp, Homo sapiens
  Payload ID: 12736
  Gene Symbol: PIWIL2
  Gene Name: piwi-like RNA-mediated gene silencing 2
  Uniprot ID: Q8TC59
  ENST ID: ENST00000611073
  CDS Start-End: 26-2839
gacacgtgttctctacagcccgtccatggatcctttccgaccatcgttcaggggccagtctcctatccacccatcccagtgccaggctgtacggatgccaggctgttggccacaagcttctaaacctttggacccagctctgggcaggggagcacctgcaggcagaggccatgtatttggaaagccagaggaaccaagcacacagagggggccagcacaaagggagtctgtgggtttggtctccatgttccgaggcctgggcattgaaacagtttctaagacccctctgaaacgggaaatgcttccatcaggtagaggcattttaggtcgaggcttgtctgctaatctggtacgcaaggacagggaggaactctctcccactttttgggatccaaaagtgttggcggctggggacagcaagatggcagagacctccgttggttggagtaggacgcttggaagagggagttcagatgcgtctttattaccactgggaagagcagcaggtggtatcagcagagaagtggacaagcctccctgtaccttcagcacaccgtcccggggtcccccgcagctgtcatcaccaccagctctgccccagtctcccctgcactctccagatcgccctctggtcctgactgtggaacacaaggaaaaagagcttattgtgaagcaaggatcaaaaggaacacctcagtctttgggactgaacctcgtcaaaatacagtgtcataatgaagcagtttatcaatatcatgtgactttcagccccaatgtggagtgcaaaagcatgaggttcggcatgttgaaggaccatcaagctgtcaccggcaacgtcactgcgtttgatggatctattctctatctgcctgttaagcttcaacaagttcttgagttaaaaagtcaaaggaaaacagacagtgctgaaatcagcattaagattcagatgacaaagatcctggagccctgctctgacctgtgcattcccttctacaatgttgttttccgtcgggtaatgaaacttttagatatgaagcttgtggggagaaacttttatgaccctacaagtgctatggtactacagcaacacagattgcagatctggccaggctatgcagctagcatccgaaggacagatggagggctcttcctgctagctgatgtctcccataaggtcattcggaatgactgtgtgctggatgtcatgcatgccatttatcagcagaataaagaacacttccaggatgagtgtactaagcttctggttggcaatattgttatcacccgatataacaatcgtacctatcgtattgatgatgtggattggaataagactccaaaggatagcttcacgatgtctgatgggaaagagatcacattcttggaatactacagcaaaaattatgggatcacagttaaggaagaggaccagccattgctgattcacaggcccagtgagagacaggataatcatgggatgctgctaaaaggggaaatcctgctgctgcctgagctttcttttatgaccggaatcccagagaagatgaagaaggacttcagagccatgaaggatttggctcagcaaatcaatctgagccccaagcaacaccatagtgctttggaatgcttgctgcaaagaattgcaaagaacgaggcagccaccaatgaactgatgcgttgggggctccgtctgcaaaaggatgtacataagattgaaggacgtgttctgccaatggaaagaattaacttaaaaaatacttcgtttatcacatctcaggaactaaactgggttaaggaagtaaccagagacccttccatcttgactatccccatgcatttctgggcacttttttacccaaagagagcaatggaccaggctcgagaactggtcaacatgttggagaagatagccggccccattggcatgcgtatgagcccaccggcctgggttgaactaaaggatgaccgaatagagacttatgtcagaaccattcaatccacgttaggagctgaggggaagatacagatggttgtttgcatcatcatgggcccacgtgatgatctctatggggccatcaagaagctgtgctgtgtgcagtccccagtgccctcccaggttgtcaatgttcgaaccattggtcagcccaccaggcttcggagtgtggcccagaagattttacttcagattaactgtaaattgggtggtgagctctggggagtggatattcctctgaaacagttaatggtgatcgggatggatgtttaccatgaccccagtagaggcatgcgctccgtggttggcttcgtggcaagcatcaatctcaccctcacaaaatggtattcccgggtggtgttccagatgccgcatcaggagattgtggacagcctgaagctatgcctcgtgggctccttaaaaaagttttatgaggtgaaccactgtctaccagagaagattgtggtgtaccgtgatggagtgtctgatggccaactgaagacagttgccaactatgagattcctcaactacagaagtgttttgaagcttttgagaattatcagcccaagatggtggtgtttgtagttcagaagaaaatcagtactaatctatatctggctgctcctcagaactttgtaactcccactcctggaactgtggtagatcatacaataacaagctgtgagtggctgactttcaaactgtgccacatgtactggaattggcctggcaccatcagagttccagctccttgcaagtatgcccacaagctagctttcctgtcaggacacatcttgcatcatgaaccagccatccagctgtgcgagaacctgttcttcctgtgactgcacagcttggagatgggctggt

SEQ ID NO: 166280 - DNA, 3504 bp, Homo sapiens
  Payload ID: 12737
  Gene Symbol: PIWIL3
  Gene Name: piwi-like RNA-mediated gene silencing 3
  Uniprot ID: Q7Z3Z3
  ENST ID: ENST00000332271
  CDS Start-End: 418-3066
tgctgcctcagcctcccgagtagctgggactacaggtgcccgccaccacgcccggctaattttttgtatttttagtagagatagggtttcactgtgttagccaggatggtctccatctcctgacctcatgatctacccgcctcagcctgccaaagtgctgggattacaggcgtgagccaccgcgcccggccaaagcggtttttaaagggaggatttggaaggcaaaagaggcagggggactgggaggtgtcaggtggtgtgaccccctccagtggcttgtcctgaattatttttccatctgtggaagtggccggcgtcatcatggctggaggaggtgcatggttcgtatcaggatctgactactgaagcttctaaggaaatatgtgaccagataaggtcatcaccttcaggaccacaatgcctggtagggcaaggactcgcgcccgaggcagagcccgccgcagggagagctaccaacaagaggcacctgggggacccagagcacctggatcagctacaacccaggagccccctcagttgcagtcgacaccccggccgctgcaggaggaagtcccagtggttagacctctgcagccaagagcagcaagaggaggagcaggaggaggagcacagtctcaaggggtgaaggaacctggacctgaggctgggttgcatacagcgcccttgcaggagagaaggattggtggagtttttcaagacctggtggtgaacaccaggcaagatatgaagcatgttaaagactcaaaaacaggttcagagggtacagtggtacagctactcgccaaccacttccgagtgatatctcgtcctcagtgggttgcatataaatacaacgttgactacaaaccagacatagaagatggaaatctccgtacaattttacttgatcaacatagaaggaaatttggagagcgccatatatttgatggaaactctttattattatctcggccactaaaagagcggagagtggaatggttgagcacaaccaaagacaaaaacatcgtgaagattacagttgagttttccaaagaactcacgcccacgtcgccagattgcctacgctattacaacattctctttagaagaactttcaagctgctggattttgaacaagttggtcgcaactattataccaaaaagaaggccattcagttataccgtcatggtaccagtttggaaatctggcttggttatgttacttctgttcttcaatacgaaaacagcattaccctctgtgccgatgtgagccacaaactgctccgaatagaaactgcttatgatttcataaagagaacatctgcccaggcccagacaggaaacatccgagaggaagtaactaataaattaattggatcaattgttctgacaaaatacaacaacaaaacctacagagtagatgatattgattggaagcagaatcctgaagacacatttaacaaatcagatggcagcaaaatcacctatatagactactacaggcagcaacataaagaaattgtcacagtgaagaaacagccacttttggtcagccagggcagatggaaaaagggcctaacgggtacacaacgtgaacctatcctgctgattcctcagctgtgccacatgacaggtctaacagatgaaatatgtaaagattatagcattgtgaaagaattggctaaacatacaagattgagtccaagaagaaggcatcatacattaaaagaattcatcaatactctacaagataataaaaaagtacgagagttacttcaactctgggatttgaaatttgataccaattttttgtccgtcccgggaagagttttgaaaaacgcaaacatcgtgcaaggcagaagaatggttaaagccaattcacaaggagactggtcaagagaaataagagaattacccttacttaatgcaatgccactacatagttggctcatactctatagcaggagcagtcacagagaagccatgtccttaaagggtcatctacagagtgtcacagcccccatgggcataactatgaaaccagcagaaatgattgaagtagatggtgatgctaactcctatatagacacattacggaaatatactagaccaacactgcagatgggaatgtcatgtttgctggttttcaaggtgatttgtatcctgcccaatgatgacaaacgtagatatgacagcataaaaagatacctatgtaccaaatgcccaattccaagccagtgtgtggtgaaaaagaccttagaaaaagtccaggcaaggaccatcgtcaccaagattgcccagcagatgaattgcaagatgggaggagccctctggaaggtggagacagacgtacaaagaacaatgttcgttggcattgattgtttccacgatatcgtaaatcgacagaaatcaatagcaggatttgttgcaagtaccaatgctgaattaacaaagtggtactctcaatgtgtcatccagaaaacaggagaagagcttgtgaaagagctggagatctgcttgaaagctgccctggatgtctggtgtaaaaacgaatcatcgatgccacattctgttattgtgtatcgggatggagtgggagatggtcagcttcaagcattgcttgaccatgaagcgaaaaagatgtcgacctacttaaaaaccatctctcctaacaatttcactctagctttcattgtggtgaagaaacgaataaacactagattttttcttaaacatggaagcaattttcaaaatccacctccaggaacagttattgatgtagagttgactaggaatgaatggtatgacttttttattgtgagtcagtctgtgcaagatgggactgttacccccactcattataacgtcatctatgacacgattggcttgagcccagatacagtacagcgtttaacatattgtctatgccacatgtattataatttgccaggcatcatccgagttccagcgccttgccactatgcccacaagctggcttacctcgtggggcagtccattcaccaggaaccgaatcgttccttgtcaactcgtctcttttacctttgacctgcagaagaagacctgatgtgctaatgaaaccacaacgtgtaagcctgtcttccttttgaagcaggatgtctgaaatattttcctaggtccatagcattaaattctcatcgtttttgattggacacaggagagattcagagtgatatgttctactctcaatactaccacagactgatttttccagagaggagaactgacagggtttggcttgcagtttccctttcaaatatgtgacagagatctcacagctgaacgtgactgaacattttccaccccaagcagggccactctaagaattgaaaagatggggcattcgtcacagagagagtacatctgtgaacaagtaaactctacttggaaaactacgtttactttatttttgaaacttttttttgttaaaggacaggaaaggaagacataaaagtaacaacactg

SEQ ID NO: 166281 - DNA, 3232 bp, Homo sapiens
  Payload ID: 12737
  Gene Symbol: PIWIL3
  Gene Name: piwi-like RNA-mediated gene silencing 3
  ENST ID: ENST00000533313
  CDS Start-End: 716-3010
ctgggaggtgtcaggtggtgtgaccccctccagtggcttgtcctgaattatttttccatctgtggaagtggccggcgtcatcatggctggaggaggtgcatggttcgtatcaggatctgactactgaagcttctaaggaaatatgtgaccagataaagttttgccgttgttgcccaggccagagtgcggtggcacaatctcgactcactgcaacctctctctccaggattcaagcgattcttctgcctcagcctcccaagtagctgggattacagggtcatcaccttcaggaccacaatgcctggtagggcaaggactcgcgcccgaggcagagcccgccgcagggagagctaccaacaagaggcacctgggggacccagagcacctggatcagctacagtgagccctgtaacgttgtttcctttctgcaagagatatgtgcctgtactgaaaagaacatagagttggttgttgagcgaagctagttcagacccaggagccccctcagttgcagtcgacaccccggccgctgcaggaggaagtcccagtggttagacctctgcagccaagagcagcaagaggaggagcaggaggaggagcacagtctcaaggggtgaaggaacctggacctgaggctgggttgcatacagcgcccttgcaggagagaaggattggtggagtttttcaagacctggtggtgaacaccaggcaagatatgaagcatgttaaagactcaaaaacaggttcagagggtacagtggtacagctactcgccaaccacttccgagtgatatctcgtcctcagtgggttgcatataaatacaacgttgactacaaaccagacatagaagatggaaatctccgtacaattttacttgatcaacatagaaggaaatttggagagcgccatatatttgatggaaactctttattattatctcggccactaaaagagcggagagtggaatggttgagcacaaccaaagacaaaaacatcgtgaagattacagttgagttttccaaagaactcacgcccacgtcgccagattgcctacgctattacaacattctctttagaagaactttcaagctgctggattttgaacaagttggtcgcaactattataccaaaaagaaggccattcagttataccgtcatggtaccagtttggaaatctggcttggttatgttacttctgttcttcaatacgaaaacagcattaccctctgtgccgatgtgagccacaaactgctccgaatagaaactgcttatgatttcataaagagaacatctgcccaggcccagacaggaaacatccgagaggaagtaactaataaattaattggatcaattgttctgacaaaatacaacaacaaaacctacagagtagatgatattgattggaagcagaatcctgaagacacatttaacaaatcagatggcagcaaaatcacctatatagactactacaggcagcaacataaagaaattgtcacagtgaagaaacagccacttttggtcagccagggcagatggaaaaagggcctaacgggtacacaacgtgaacctatcctgctgattcctcagctgtgccacatgacaggtctaacagatgaaatatgtaaagattatagcattgtgaaagaattggctaaacatacaagattgagtccaagaagaaggcatcatacattaaaagaattcatcaatactctacaagataataaaaaagtacgagagttacttcaactctgggatttgaaatttgataccaattttttgtccgtcccgggaagagttttgaaaaacgcaaacatcgtgcaaggcagaagaatggttaaagccaattcacaaggagactggtcaagagaaataagagaattacccttacttaatgcaatgccactacatagttggctcatactctatagcaggagcagtcacagagaagccatgtccttaaagggtcatctacagagtgtcacagcccccatgggcataactatgaaaccagcagaaatgattgaagtagatggtgatgctaactcctatatagacacattacggaaatatactagaccaacactgcagatggtgatttgtatcctgcccaatgatgacaaacgtagatatgacagcataaaaagatacctatgtaccaaatgcccaattccaagccagtgtgtggtgaaaaagaccttagaaaaagtccaggcaaggaccatcgtcaccaagattgcccagcagatgaattgcaagatgggaggagccctctggaaggtggagacagacgtacaaagaacaatgttcgttggcattgattgtttccacgatatcgtaaatcgacagaaatcaatagcaggatttgttgcaagtaccaatgctgaattaacaaagtggtactctcaatgtgtcatccagaaaacaggagaagagcttgtgaaagagctggagatctgcttgaaagctgccctggatgtctggtgtaaaaacgaatcatcgatgccacattctgttattgtgtatcgggatggagtgggagatggtcagcttcaagcattgcttgaccatgaagcgaaaaagatgtcgacctacttaaaaaccatctctcctaacaatttcactctagctttcattgtggtgaagaaacgaataaacactagattttttcttaaacatggaagcaattttcaaaatccacctccaggaacagttattgatgtagagttgactaggaatgaatggtatgacttttttattgtgagtcagtctgtgcaagatgggactgttacccccactcattataacgtcatctatgacacgattggcttgagcccagatacagtacagcgtttaacatattgtctatgccacatgtattataatttgccaggcatcatccgagttccagcgccttgccactatgcccacaagctggcttacctcgtggggcagtccattcaccaggaaccgaatcgttccttgtcaactcgtctcttttacctttgacctgcagaagaagacctgatgtgctaatgaaaccacaacgtgtaagcctgtcttccttttgaagcaggatgtctgaaatattttcctaggtccatagcattaaattctcatcgtttttgattggacacaggagagattcagagtgatatgttctactctcaatactaccacagactgatttttccagagaggagaactgacagggtttggcttgcagtttcc

SEQ ID NO: 166282 - DNA, 3105 bp, Homo sapiens
  Payload ID: 12737
  Gene Symbol: PIWIL3
  Gene Name: piwi-like RNA-mediated gene silencing 3
  ENST ID: ENST00000527701
  CDS Start-End: 589-2883
ctgggaggtgtcaggtggtgtgaccccctccagtggcttgtcctgaattatttttccatctgtggaagtggccggcgtcatcatggctggaggaggtgcatggttcgtatcaggatctgactactgaagcttctaaggaaatatgtgaccagataaggtcatcaccttcaggaccacaatgcctggtagggcaaggactcgcgcccgaggcagagcccgccgcagggagagctaccaacaagaggcacctgggggacccagagcacctggatcagctacagatccatagtggcgctgcggggccccatctgacaacctccagggggaccatatactgcatggaagtagcacgatgccttccagacccaggagccccctcagttgcagtcgacaccccggccgctgcaggaggaagtcccagtggttagacctctgcagccaagagcagcaagaggaggagcaggaggaggagcacagtctcaaggggtgaaggaacctggacctgaggctgggttgcatacagcgcccttgcaggagagaaggattggtggagtttttcaagacctggtggtgaacaccaggcaagatatgaagcatgttaaagactcaaaaacaggttcagagggtacagtggtacagctactcgccaaccacttccgagtgatatctcgtcctcagtgggttgcatataaatacaacgttgactacaaaccagacatagaagatggaaatctccgtacaattttacttgatcaacatagaaggaaatttggagagcgccatatatttgatggaaactctttattattatctcggccactaaaagagcggagagtggaatggttgagcacaaccaaagacaaaaacatcgtgaagattacagttgagttttccaaagaactcacgcccacgtcgccagattgcctacgctattacaacattctctttagaagaactttcaagctgctggattttgaacaagttggtcgcaactattataccaaaaagaaggccattcagttataccgtcatggtaccagtttggaaatctggcttggttatgttacttctgttcttcaatacgaaaacagcattaccctctgtgccgatgtgagccacaaactgctccgaatagaaactgcttatgatttcataaagagaacatctgcccaggcccagacaggaaacatccgagaggaagtaactaataaattaattggatcaattgttctgacaaaatacaacaacaaaacctacagagtagatgatattgattggaagcagaatcctgaagacacatttaacaaatcagatggcagcaaaatcacctatatagactactacaggcagcaacataaagaaattgtcacagtgaagaaacagccacttttggtcagccagggcagatggaaaaagggcctaacgggtacacaacgtgaacctatcctgctgattcctcagctgtgccacatgacaggtctaacagatgaaatatgtaaagattatagcattgtgaaagaattggctaaacatacaagattgagtccaagaagaaggcatcatacattaaaagaattcatcaatactctacaagataataaaaaagtacgagagttacttcaactctgggatttgaaatttgataccaattttttgtccgtcccgggaagagttttgaaaaacgcaaacatcgtgcaaggcagaagaatggttaaagccaattcacaaggagactggtcaagagaaataagagaattacccttacttaatgcaatgccactacatagttggctcatactctatagcaggagcagtcacagagaagccatgtccttaaagggtcatctacagagtgtcacagcccccatgggcataactatgaaaccagcagaaatgattgaagtagatggtgatgctaactcctatatagacacattacggaaatatactagaccaacactgcagatggtgatttgtatcctgcccaatgatgacaaacgtagatatgacagcataaaaagatacctatgtaccaaatgcccaattccaagccagtgtgtggtgaaaaagaccttagaaaaagtccaggcaaggaccatcgtcaccaagattgcccagcagatgaattgcaagatgggaggagccctctggaaggtggagacagacgtacaaagaacaatgttcgttggcattgattgtttccacgatatcgtaaatcgacagaaatcaatagcaggatttgttgcaagtaccaatgctgaattaacaaagtggtactctcaatgtgtcatccagaaaacaggagaagagcttgtgaaagagctggagatctgcttgaaagctgccctggatgtctggtgtaaaaacgaatcatcgatgccacattctgttattgtgtatcgggatggagtgggagatggtcagcttcaagcattgcttgaccatgaagcgaaaaagatgtcgacctacttaaaaaccatctctcctaacaatttcactctagctttcattgtggtgaagaaacgaataaacactagattttttcttaaacatggaagcaattttcaaaatccacctccaggaacagttattgatgtagagttgactaggaatgaatggtatgacttttttattgtgagtcagtctgtgcaagatgggactgttacccccactcattataacgtcatctatgacacgattggcttgagcccagatacagtacagcgtttaacatattgtctatgccacatgtattataatttgccaggcatcatccgagttccagcgccttgccactatgcccacaagctggcttacctcgtggggcagtccattcaccaggaaccgaatcgttccttgtcaactcgtctcttttacctttgacctgcagaagaagacctgatgtgctaatgaaaccacaacgtgtaagcctgtcttccttttgaagcaggatgtctgaaatattttcctaggtccatagcattaaattctcatcgtttttgattggacacaggagagattcagagtgatatgttctactctcaatactaccacagactgatttttccagagaggagaactgacagggtttggcttgcagtttcc

SEQ ID NO: 166283 - DNA, 3111 bp, Homo sapiens
  Payload ID: 12737
  Gene Symbol: PIWIL3
  Gene Name: piwi-like RNA-mediated gene silencing 3
  Uniprot ID: Q7Z3Z3
  ENST ID: ENST00000616349
  CDS Start-End: 25-2673
agggtcatcaccttcaggaccacaatgcctggtagggcaaggactcgcgcccgaggcagagcccgccgcagggagagctaccaacaagaggcacctgggggacccagagcacctggatcagctacaacccaggagccccctcagttgcagtcgacaccccggccgctgcaggaggaagtcccagtggttagacctctgcagccaagagcagcaagaggaggagcaggaggaggagcacagtctcaaggggtgaaggaacctggacctgaggctgggttgcatacagcgcccttgcaggagagaaggattggtggagtttttcaagacctggtggtgaacaccaggcaagatatgaagcatgttaaagactcaaaaacaggttcagagggtacagtggtacagctactcgccaaccacttccgagtgatatctcgtcctcagtgggttgcatataaatacaacgttgactacaaaccagacatagaagatggaaatctccgtacaattttacttgatcaacatagaaggaaatttggagagcgccatatatttgatggaaactctttattattatctcggccactaaaagagcggagagtggaatggttgagcacaaccaaagacaaaaacatcgtgaagattacagttgagttttccaaagaactcacgcccacgtcgccagattgcctacgctattacaacattctctttagaagaactttcaagctgctggattttgaacaagttggtcgcaactattataccaaaaagaaggccattcagttataccgtcatggtaccagtttggaaatctggcttggttatgttacttctgttcttcaatacgaaaacagcattaccctctgtgccgatgtgagccacaaactgctccgaatagaaactgcttatgatttcataaagagaacatctgcccaggcccagacaggaaacatccgagaggaagtaactaataaattaattggatcaattgttctgacaaaatacaacaacaaaacctacagagtagatgatattgattggaagcagaatcctgaagacacatttaacaaatcagatggcagcaaaatcacctatatagactactacaggcagcaacataaagaaattgtcacagtgaagaaacagccacttttggtcagccagggcagatggaaaaagggcctaacgggtacacaacgtgaacctatcctgctgattcctcagctgtgccacatgacaggtctaacagatgaaatatgtaaagattatagcattgtgaaagaattggctaaacatacaagattgagtccaagaagaaggcatcatacattaaaagaattcatcaatactctacaagataataaaaaagtacgagagttacttcaactctgggatttgaaatttgataccaattttttgtccgtcccgggaagagttttgaaaaacgcaaacatcgtgcaaggcagaagaatggttaaagccaattcacaaggagactggtcaagagaaataagagaattacccttacttaatgcaatgccactacatagttggctcatactctatagcaggagcagtcacagagaagccatgtccttaaagggtcatctacagagtgtcacagcccccatgggcataactatgaaaccagcagaaatgattgaagtagatggtgatgctaactcctatatagacacattacggaaatatactagaccaacactgcagatgggaatgtcatgtttgctggttttcaaggtgatttgtatcctgcccaatgatgacaaacgtagatatgacagcataaaaagatacctatgtaccaaatgcccaattccaagccagtgtgtggtgaaaaagaccttagaaaaagtccaggcaaggaccatcgtcaccaagattgcccagcagatgaattgcaagatgggaggagccctctggaaggtggagacagacgtacaaagaacaatgttcgttggcattgattgtttccacgatatcgtaaatcgacagaaatcaatagcaggatttgttgcaagtaccaatgctgaattaacaaagtggtactctcaatgtgtcatccagaaaacaggagaagagcttgtgaaagagctggagatctgcttgaaagctgccctggatgtctggtgtaaaaacgaatcatcgatgccacattctgttattgtgtatcgggatggagtgggagatggtcagcttcaagcattgcttgaccatgaagcgaaaaagatgtcgacctacttaaaaaccatctctcctaacaatttcactctagctttcattgtggtgaagaaacgaataaacactagattttttcttaaacatggaagcaattttcaaaatccacctccaggaacagttattgatgtagagttgactaggaatgaatggtatgacttttttattgtgagtcagtctgtgcaagatgggactgttacccccactcattataacgtcatctatgacacgattggcttgagcccagatacagtacagcgtttaacatattgtctatgccacatgtattataatttgccaggcatcatccgagttccagcgccttgccactatgcccacaagctggcttacctcgtggggcagtccattcaccaggaaccgaatcgttccttgtcaactcgtctcttttacctttgacctgcagaagaagacctgatgtgctaatgaaaccacaacgtgtaagcctgtcttccttttgaagcaggatgtctgaaatattttcctaggtccatagcattaaattctcatcgtttttgattggacacaggagagattcagagtgatatgttctactctcaatactaccacagactgatttttccagagaggagaactgacagggtttggcttgcagtttccctttcaaatatgtgacagagatctcacagctgaacgtgactgaacattttccaccccaagcagggccactctaagaattgaaaagatggggcattcgtcacagagagagtacatctgtgaacaagtaaactctacttggaaaactacgtttactttatttttgaaacttttttttgttaaaggacaggaaaggaagacataaaagtaacaacactg

SEQ ID NO: 166284 - DNA, 3199 bp, Homo sapiens
  Payload ID: 12738
  Gene Symbol: PIWIL4
  Gene Name: piwi-like RNA-mediated gene silencing 4
  Uniprot ID: Q7Z3Z4
  ENST ID: ENST00000299001
  CDS Start-End: 212-2770
gtgctcgcgccaacccctacgccccagcgcgccttctccacccacgcacgggcctcggacgcatttccagccccggcgttggttgtggatgctggacatccaccgcctccaggcagtttcgccgtcacaccgtcgccatctgtagccaaagcaaaacatatcctaactgagactttgcagctcttgtggccactctgggctcaccgggaacatgagtggaagagcccgagtgaaggccagaggcatcgcccgcagccccagtgccacagaagtggggcgcatccaagcctcgccattgcctagatctgttgatcttagtaacaatgaagcatcctctagcaatggcttcttgggaacaagcaggatctcaaccaacgataaatatgggatatcttctggtgatgctggaagtaccttcatggaaagaggtgtgaaaaacaaacaggactttatggatttgagtatctgtaccagagaaaaattggcacatgtgagaaattgtaaaacaggttccagtggaatacctgtgaaactggttacaaacctctttaacttagattttccccaagactggcagctataccagtaccatgtgacatatattccagatttagcatctagaaggctgagaattgctttactttatagtcatagtgaactttccaacaaagcaaaagcattcgacggtgccatcctttttctgtcacaaaagctagaagaaaaggtcacagagttgtcaagtgaaactcaaagaggtgagactataaagatgactatcaccctgaagagggagctgccatcaagttctcccgtgtgcatccaggtcttcaatatcatcttcagaaagatcctcaaaaagttgtccatgtaccaaattggacggaacttctataatccttcagagccaatggaaattccccagcacaaattatccctttggcctgggtttgccatttctgtgtcatattttgaaaggaagctcctgtttagtgctgatgtgagttacaaagtcctccggaatgagacggttctggaattcatgactgctctctgtcaaagaactggcttgtcctgtttcacccagacgtgtgagaagcagctaatagggctcattgtccttacaagatacaataacagaacctactccattgatgacattgactggtcagtgaagcccacacacacctttcagaagcgggatggcaccgagatcacctatgtggattactacaagcagcagtatgatattactgtatcggacctgaatcagcccatgcttgttagtctgttaaagaagaagagaaatgacaacagtgaggctcagctcgcccacctgatacctgagctctgctttctaacagggctgactgaccaggcaacatctgatttccagctgatgaaggctgtggctgaaaagacacgtctcagtccttcaggccggcagcagcgcctggccaggcttgtggacaacatccagaggaataccaatgctcgctttgaactagagacctggggactgcattttggaagccagatatctctgactggccggattgtgccttcagaaaaaatattaatgcaagaccacatatgtcaacctgtgtctgctgctgactggtccaaggatattcgaacttgcaagattttaaatgcacagtctttgaatacctggttgattttatgtagcgacagaactgaatatgttgccgagagctttctgaactgcttgagaagagttgcaggttccatgggatttaatgtggactaccccaaaatcataaaagtacaagaaaatccagctgcatttgttagagctatacagcaatatgttgatcctgatgttcagctggtaatgtgcattctgccttctaatcagaagacctattatgattccattaaaaaatatttgagctcagactgcccagtcccaagccaatgtgtgcttgctcggaccttgaataaacagggcatgatgatgagtatcgccaccaagatcgctatgcagatgacttgcaagctcggaggcgagctgtgggctgtggaaatacctttaaagtccctgatggtggtcggtattgatgtctgtaaagatgcactcagcaaggacgtgatggttgttggatgcgtggccagtgttaaccccagaatcaccaggtggttttcccgctgtatccttcagagaacaatgactgatgttgcagattgcttgaaagttttcatgactggagcactcaacaaatggtacaagtacaatcatgatttgccagcacggataattgtgtaccgtgctggtgtaggggatggtcagctgaaaacacttattgaatatgaagtcccacagctgctgagcagtgtggcagaatccagctcaaataccagctcaagactgtcggtgattgtggtcaggaagaagtgcatgccacgattctttaccgaaatgaaccgcactgtacagaaccccccacttggcactgttgtggattcagaagcaacacgtaacgaatggtatgacttttatctgatcagccaggtggcctgccggggaactgttagtcctacctactataatgtcatctatgatgacaacggcttgaagcccgaccatatgcagagacttacattcaaattgtgccacctgtactacaactggccgggcatagtcagtgtcccagcaccatgtcagtatgctcacaagctgacctttctggtggcacaaagcattcataaagaacccagtctggaattagccaaccatctcttctacctgtgatggcatgaactactggcatcactagatggacaatccaagaagaaattggtatactttgtgcaaatctgccataagctcaaggctgtgactggggaaaaagattgagcttagttttcatgtctaggaaaaaaagcaaaacaacttaatctgaaacagttttaaaaaatgtgtgttattttgttttaaagagttgtatgcttggggtaaattttcattgtcatatgtggaatttaaatataccatcatctacaaagaattccacagagttaaatatcttaagttaaacacttaaaataagtgtttgcgtgatattttgatgacagataaacagagtctaattcccaccccaaattttgctgaggttttcttaatgttgtagagcattttgtagagtggtttaaatagttgaaaataaagttcagaacatca

SEQ ID NO: 166285 - DNA, 3759 bp, Homo sapiens
  Payload ID: 12738
  Gene Symbol: PIWIL4
  Gene Name: piwi-like RNA-mediated gene silencing 4
  Uniprot ID: Q7Z3Z4
  ENST ID: ENST00000446230
  CDS Start-End: 528-2015
gtgttcggccggggcgggccggggcagccggtgcccgaaattgggctcctgcacacagtggcccgctacaagttctacctggctttcgagaactcgcagcacctggattatatcaccgagaagctctggcgcaacgcgttgctcgctggggcggtgccggtggtgctgggcccagaccgtgccaactacgagcgctttgtgccccgcggcgccttcatccacgtggacgacttcccaagtgcctcctccctggcctcgtacctgcttttcctcgaccgcaaccccgcggtctatcgccgctacttccactggcgccggagctacgctgtccacatcacctccttctgggacgagccttggtgccgggtgtgccaggctgtacagagggctggggaccggcccaagagcatacggaacttggccagctggttcgagcggtgaagccgcgctcccctggaagcgacccaggggaggccaagttgtcagctttttgatcctctactgtgcatctccttgactgccgcatcatgggacctagatctgttgatcttagtaacaatgaagcatcctctagcaatggcttcttgggaacaagcaggatctcaaccaacgataaatatgggatatcttctggtgatgctggaagtaccttcatggaaagaggtgtgaaaaacaaacaggactttatggatttgagtatctgtaccagagaaaaattggcacatgtgagaaattgtaaaacaggttccagtggaatacctgtgaaactggttacaaacctctttaacttagattttccccaagactggcagctataccagtaccatgtgacatatattccagatttagcatctagaaggctgagaattgctttactttatagtcatagtgaactttccaacaaagcaaaagcattcgacggtgccatcctttttctgtcacaaaagctagaagaaaaggtcacagagttgtcaagtgaaactcaaagaggtgagactataaagatgactatcaccctgaagagggagctgccatcaagttctcccgtgtgcatccaggtcttcaatatcatcttcagaaagatcctcaaaaagttgtccatgtaccaaattggacggaacttctataatccttcagagccaatggaaattccccagcacaaattatccctttggcctgggtttgccatttctgtgtcatattttgaaaggaagctcctgtttagtgctgatgtgagttacaaagtcctccggaatgagacggttctggaattcatgactgctctctgtcaaagaactggcttgtcctgtttcacccagacgtgtgagaagcagctaatagggctcattgtccttacaagatacaataacagaacctactccattgatgacattgactggtcagtgaagcccacacacacctttcagaagcgggatggcaccgagatcacctatgtggattactacaagcagcagtatgatattactgtatcggacctgaatcagcccatgcttgttagtctgttaaagaagaagagaaatgacaacagtgaggctcagctcgcccacctgatacctgagctctgctttctaacagggctgactgaccaggcaacatctgatttccagctgatgaaggctgtggctgaaaagacacgtctcagtccttcaggccggcagcagcgcctggccaggcttgtggacaacatccagaggaataccaatgctcgctttgaactagagacctggggactgcattttggaagccagatatctctgactggccggattgtgccttcagaaaaaatattaatgcaagaccacatatgtcaacctgtgtctgctgctgactggtccaaggatattcgaacttgcaagattttaaatgcacagtctttgaatacctggttgattttatgtagcgacagaactgaatatgttgccgagagctttctgaactgcttgagaagagttgcaggttccatgggatttaatgtggactaccccaaaatgtaatgtgcattctgccttctaatcagaagacctattatgattccattaaaaaatatttgagctcagactgcccagtcccaagccaatgtgtgcttgctcggaccttgaataaacagggcatgatgatgagtatcgccaccaagatcgctatgcagatgacttgcaagctcggaggcgagctgtgggctgtggaaatacctgtgcatagccaagtgaggattccttagagatctgaagaatgaagaatggaattcctcttcagattgctccagaccagaggcaagcgatagatacactgaccacactcccagaatctctttagccactggtgccccttccccaccccacaaaggatgatggttatcttggacggtagtgtttctcttaagataagtgtgtaccatattcttcctgccttctttaagtctctctcatttctggtttaataatctggctcacggatctcaatctcccttacacatagcttaactttaagaattcagtaactggagtctgtttttaaaaactttcctattaaaccattggtaggggaaatgatacctcatcccattaaatcatgacaaatttaattttatagttaaagtccctgatggtggtcggtattgatgtctgtaaagatgcactcagcaaggacgtgatggttgttggatgcgtggccagtgttaaccccagaatcaccaggtggttttcccgctgtatccttcagagaacaatgactgatgttgcagattgcttgaaagttttcatgactggagcactcaacaaatggtacaagtacaatcatgatttgccagcacggataattgtgtaccgtgctggtgtaggggatggtcagctgaaaacacttattgaatatgaagtcccacagctgctgagcagtgtggcagaatccagctcaaataccagctcaagactgtcggtgattgtggtcaggaagaagtgcatgccacgattctttaccgaaatgaaccgcactgtacagaaccccccacttggcactgttgtggattcagaagcaacacgtaacgaatggtatgacttttatctgatcagccaggtggcctgccggggaactgttagtcctacctactataatgtcatctatgatgacaacggcttgaagcccgaccatatgcagagacttacattcaaattgtgccacctgtactacaactggccgggcatagtcagtgtcccagcaccatgtcagtatgctcacaagctgacctttctggtggcacaaagcattcataaagaacccagtctggaattagccaaccatctcttctacctgtgatggcatgaactactggcatcactagatggacaatccaagaagaaattggtatactttgtgcaaatctgccataagctcaaggctgtgactggggaaaaagattgagcttagttttcatgtctaggaaaaaaagcaaaacaacttaatctgaaacagttttaaaaaatgtgtgttattttgttttaaagagttgtatgcttggggtaaattttcattgtcatatgtggaatttaaatataccatcatctacaaagaattccacagagttaaatatcttaagttaaacacttaaaataagtgtttgcgtgatattttgatgacagataaacagagtctaattcccaccccaaattttgctgaggttttcttaatgttgtagagcattttgtagagtggtttaaatagttgaaaataaagttcagaacatca

SEQ ID NO: 166286 - DNA, 831 bp, Homo sapiens
  Payload ID: 12738
  Gene Symbol: PIWIL4
  Gene Name: piwi-like RNA-mediated gene silencing 4
  ENST ID: ENST00000537419
  CDS Start-End: 99-710
gttatccattgttatattcttgcaaatataacccaaattatgtattgccctattttacagtggtctgaaatagcaaacccatttaaacactgcaatatatgggaatgttattttttgttggcattagaaaagtaattcttttcttactgacaccaaattctgcaggagcactcaacaaatggtacaagtacaatcatgatttgccagcacggataattgtgtaccgtgctggtgtaggggatggtcagctgaaaacacttattgaatatgaagtcccacagctgctgagcagtgtggcagaatccagctcaaataccagctcaagactgtcggtgattgtggtcaggaagaagtgcatgccacgattctttaccgaaatgaaccgcactgtacagaaccccccacttggcactgttgtggattcagaagcaacacgtaacgaatggtatgacttttatctgatcagccaggtggcctgccggggaactgttagtcctacctactataatgtcatctatgatgacaacggcttgaagcccgaccatatgcagagacttacattcaaattgtgccacctgtactacaactggccgggcatagtcagtgtcccagcaccatgtcagtatgctcacaagctgacctttctggtggcacaaagcattcataaagaacccagtctggaattagccaaccatctcttctacctgtgatggcatgaactactggcatcactagatggacaatccaagaagaaattggtatactttgtgcaaatctgccataagctcaaggctgtgactggggaaaaagattgagcttagttttcatgtc

SEQ ID NO: 166287 - DNA, 587 bp, Homo sapiens
  Payload ID: 12738
  Gene Symbol: PIWIL4
  Gene Name: piwi-like RNA-mediated gene silencing 4
  ENST ID: ENST00000545603
  CDS Start-End: 233-587
ctcctctctgttacgaagtagtgcgttatcttttctctcaagtttgagtctttccaaggtttcttctaacagttttctccttctagggatcttgtctgagtaagatattaaccctagatctgttgatcttagtaacaatgaagcatcctctagcaatggcttcttgggaacaagcaggatctcaaccaacgataaatatgggatatcttctggtgatgctggaagtaccttcatggaaagaggtgtgaaaaacaaacaggactttatggatttgagtatctgtaccagagaaaaattggcacatgtgagaaattgtaaaacaggttccagtggaatacctgtgaaactggttacaaacctctttaacttagattttccccaagactggcagctataccagtaccatgtgacatatattccagatttagcatctagaaggctgagaattgctttactttatagtcatagtgaactttccaacaaagcaaaagcattcgacggtgccatcctttttctgtcacaaaagctagaagaaaaggtcacagagttgtcaagtgaaactcaaagaggtgagactataaagatga

SEQ ID NO: 166288 - DNA, 1901 bp, Homo sapiens
  Payload ID: 12738
  Gene Symbol: PIWIL4
  Gene Name: piwi-like RNA-mediated gene silencing 4
  Uniprot ID: Q7Z3Z4
  ENST ID: ENST00000543336
  CDS Start-End: 271-1632
ctccctccctcaatccctccctccggcgggcgtcgctggcgggtggctaggcccaacggcaggaagccgacgctatcctccgttccgcggcgccgggtccgccttccgtctgttctagggcctgctcctgcgcggcagctgctttagaagcctagatctgttgatcttagtaacaatgaagcatcctctagcaatggcttcttgggaacaagcaggatctcaaccaacgataaatatgggatatcttctggtgatgctggaagtaccttcatggaaagaggtgtgaaaaacaaacaggactttatggatttgagtatctgtaccagagaaaaattggcacatgtgagaaattgtaaaacaggttccagtggaatacctgtgaaactggttacaaacctctttaacttagattttccccaagactggcagctataccagtaccatgtgacatatattccagatttagcatctagaaggctgagaattgctttactttatagtcatagtgaactttccaacaaagcaaaagcattcgacggtgccatcctttttctgtcacaaaagctagaagaaaaggtcacagagttgtcaagtgaaactcaaagaggtgagactataaagatgactatcaccctgaagagggagctgccatcaagttctcccgtgtgcatccaggtcttcaatatcatcttcagaaagatcctcaaaaagttgtccatgtaccaaattggacggaacttctataatccttcagagccaatggaaattccccagcacaaattatccctttggcctgggtttgccatttctgtgtcatattttgaaaggaagctcctgtttagtgctgatgtgagttacaaagtcctccggaatgagacggttctggaattcatgactgctctctgtcaaagaactggcttgtcctgtttcacccagacgtgtgagaagcagctaatagggctcattgtccttacaagatacaataacagaacctactccattgatgacattgactggtcagtgaagcccacacacacctttcagaagcgggatggcaccgagatcacctatgtggattactacaagcagcagtatgatattactgtatcggacctgaatcagcccatgcttgttagtctgttaaagaagaagagaaatgacaacagtgaggctcagctcgcccacctgatacctgagctctgctttctaacagggctgactgaccaggcaacatctgatttccagctgatgaaggctgtggctgaaaagacacgtctcagtccttcaggccggcagcagcgcctggccaggcttgtggacaacatccagaggaataccaatgctcgctttgaactagagacctggggactgcattttggaagccagatatctctgactggccggattgtgccttcagaaaaaatattaatgcaagaccacatatgtcaacctgtgtctgctgctgactggtccaaggatattcgaacttgcaagattttaaatgcacagtctttgaatacctggttgattttatgtagcgacagaactgaatatgttgccgagagctttctgaactgcttgagaagagttgcaggttccatgggatttaatgtggactaccccaaaatgtaatgtgcattctgccttctaatcagaagacctattatgattccattaaaaaatatttgagctcagactgcccagtcccaagccaatgtgtgcttgctcggaccttgaataaacagggcatgatgatgagtatcgccaccaagatcgctatgcagatgacttgcaagctcggaggcgagctgtgggctgtggaaatacctgtggttttcccgctgtatccttcagagaacaatgactgatgttgcagattgcttgaaagttttcatgactgg

SEQ ID NO: 166289 - DNA, 638 bp, Homo sapiens
  Payload ID: 12739
  Gene Symbol: PLAC8L1
  Gene Name: PLAC8-like 1
  Uniprot ID: A1L4L8
  ENST ID: ENST00000311450
  CDS Start-End: 59-592
ccagcttattgccaaagggaaaaaggatagcccaaaggacaagaaaacacttctcactatgaattggtttggaagtaacttcttcaggtgtcctgaggatctttccttactcaacatatactcacctctgttgtcacacatgtcatctgaagatgaacattttatttccaacttgagaggccatgtaccagccagcgctgtggtgaagcagcctgttcggggagccagtggcaggacgacaatcacagcaattgtccagactggcgggggctggagcaccggtctcttcagtgtctgcagagataggagaatttgtttctgtggtctattctgtcctatgtgtcttgagtgtgacatcgccaggcattatggagagtgtctttgttggccgttgttacctgggtccacctttgcactgagaattggcaccagggagagacataaaatacagggcacactgtgtgaagactggctggcggtgcactgctgttgggctttttccatctgccaggtggcccgggaactcaagatgaggacctcccaagtctatgaaatctgtgcagtcccaatgactaaggacaccctggtttgacagcaagataactcctcctccttactccccaacaccctcctctcaa

SEQ ID NO: 166290 - DNA, 621 bp, Homo sapiens
  Payload ID: 12739
  Gene Symbol: PLAC8L1
  Gene Name: PLAC8-like 1
  ENST ID: ENST00000512998
  CDS Start-End: 59-319
ccagcttattgccaaagggaaaaaggatagcccaaaggacaagaaaacacttctcactatgaattggtttggaagtaacttcttcaggtgtcctgaggatctttccttactcaacatatactcacctctgttgtcacacatgtcatctgaagatgaacattttatttccaacttgagaggccatgtaccagccagcgctgtggtgaagcagcctgttcggggagccagtggcaggacgacaatcacagcaattgtccagactggcgggggctggagcaccggtctcttcagtgtctgcagagataggagaattttgtgacatcgccaggcattatggagagtgtctttgttggccgttgttacctgggtccacctttgcactgagaattggcaccagggagagacataaaatacagattctggtcttgccctagggcacactgtgtgaagactggctggcggtgcactgctgttgggctttttccatctgccaggtggcccgggaactcaagatgaggacctcccaagtctatgaaatctgtgcagtcccaatgactaaggacaccctggtttgacagcaagataactcctcctccttactccccaacaccctcctctcaa

SEQ ID NO: 166291 - DNA, 1215 bp, Homo sapiens
  Payload ID: 12740
  Gene Symbol: PLET1
  Gene Name: placenta expressed transcript 1
  Uniprot ID: Q6UQ28
  ENST ID: ENST00000338832
  CDS Start-End: 272-895
aatgacaggcgtaaaagaaaaccatattcaggacattccctttcttgagcaaaactgcaatttgcaaaatcatcggtgacaggtaatggtgactggtgattcattcctggtgatgtcttgggccaaattccagaatccaatgtatattcagaaggggcagggagaagatctgcatgtatgacttcacccagaagccctggcatataaacaagaggtgagttgtcagtttcacccaattccaggcctagcactttccaaacagactgagaccatggcagtcttccatgacatgctgctgcagccactggggatgtttctgtgcctcagtctgcagctttcttctgccacctttataaggtacagtagcacctgcttcacctttgatgaatactacaccataaccctagacatcaaggccagttcacatatctacgaaagcaatgcagtctattctgtatttgttcccgtgaatgacagcgtctatgctgtggtcatgaaaaccttggacgagaacagtgactcagcgggcctctggcaaagagcggataaaaattgctacagcaactccacgtattacgtgaaagatcaatacatgacggtcttagaggcacagtggcaagctcctgaacctgagaacataactgaagtggagatacaagctttcactgtccagatcagagcgctgcctatactttctactctgaagctaagagaaaaactgtcaaccttagccttagctgccaagattccccagagctcagccttcaagcctttcttcatgattacacccaagagtatcagactcgaaggcttggccaaccaagtcttcagcagccccatcacagaggccatttatatcctgcttgcttttctcaccagcacacttctcttctaaagggaagccagggaaacaattgtttctgcctccactgcatcctcctacattcagttccaagctagtgctgggaaccgaatgtgtgtaaatgaaggctttacattctcaaatgtgcaactttgctgccacggcttcagaccaaaacaaagatctggaggcactcattggcaggcttgggtcacatagatgttcatctggatctttcaggacacatattacactttttgaaaatatttagaactggccggaacttagtcacctaggttctccctattggttgaacaggttggcagccaattccacagccaatctcaactttt

SEQ ID NO: 166292 - DNA, 1693 bp, Homo sapiens
  Payload ID: 12741
  Gene Symbol: PGF
  Gene Name: placental growth factor
  ENST ID: ENST00000238607
  CDS Start-End: 336-845
ggaggaaactgcatcgacggacggccgcccagctacgggaggacctggagtggcactgggcgcccgacggaccatccccgggacccgcctgcccctcggcgccccgccccgccgggccgctccccgtcgggttccccagccacagccttacctacgggctcctgactccgcaaggcttccagaagatgctcgaaccaccggccggggcctcggggcagcagtgagggaggcgtccagccccccactcagctcttctcctcctgtgccaggggctccccgggggatgagcatggtggttttccctcggagccccctggctcgggacgtctgagaagatgccggtcatgaggctgttcccttgcttcctgcagctcctggccgggctggcgctgcctgctgtgcccccccagtgggccttgtctgctgggaacggctcgtcagaggtggaagtggtacccttccaggaagtgtggggccgcagctactgccgggcgctggagaggctggtggacgtcgtgtccgagtaccccagcgaggtggagcacatgttcagcccatcctgtgtctccctgctgcgctgcaccggctgctgcggcgatgagaatctgcactgtgtgccggtggagacggccaatgtcaccatgcagctcctaaagatccgttctggggaccggccctcctacgtggagctgacgttctctcagcacgttcgctgcgaatgccggcctctgcgggagaagatgaagccggaaaggaggagacccaagggcagggggaagaggaggagagagaagcagagacccacagactgccacctgtgcggcgatgctgttccccggaggtaacccaccccttggaggagagagaccccgcacccggctcgtgtatttattaccgtcacactcttcagtgactcctgctggtacctgccctctatttattagccaactgtttccctgctgaatgcctcgctcccttcaagacgaggggcagggaaggacaggaccctcaggaattcagtgccttcaacaacgtgagagaaagagagaagccagccacagacccctgggagcttccgctttgaaagaagcaagacacgtggcctcgtgaggggcaagctaggccccagaggccctggaggtctccaggggcctgcagaaggaaagaagggggccctgctacctgttcttgggcctcaggctctgcacagacaagcagcccttgctttcggagctcctgtccaaagtagggatgcggatcctgctggggccgccacggcctggctggtgggaaggccggcagcgggcggaggggatccagccacttccccctcttcttctgaagatcagaacattcagctctggagaacagtggttgcctgggggcttttgccactccttgtcccccgtgatctcccctcacactttgccatttgcttgtactgggacattgttctttccggccaaggtgccaccaccctgccccccctaagagacacatacagagtgggccccgggctggagaaagagctgcctggatgagaaacagctcagccagtggggatgaggtcaccaggggaggagcctgtgcgtcccagctgaaggcagtggcaggggagcaggttccccaagggccctggcacccccacaagctgtccctgcagggccatctgactgccaagccagattctctt

SEQ ID NO: 166293 - DNA, 666 bp, Homo sapiens
  Payload ID: 12741
  Gene Symbol: PGF
  Gene Name: placental growth factor
  Uniprot ID: P49763
  ENST ID: ENST00000405431
  CDS Start-End: 1-666
atgccggtcatgaggctgttcccttgcttcctgcagctcctggccgggctggcgctgcctgctgtgcccccccagcagtgggccttgtctgctgggaacggctcgtcagaggtggaagtggtacccttccaggaagtgtggggccgcagctactgccgggcgctggagaggctggtggacgtcgtgtccgagtaccccagcgaggtggagcacatgttcagcccatcctgtgtctccctgctgcgctgcaccggctgctgcggcgatgagaatctgcactgtgtgccggtggagacggccaatgtcaccatgcagctcctaaagatccgttctggggaccggccctcctacgtggagctgacgttctctcagcacgttcgctgcgaatgccgccacagccctgggaggcagagcccagacatgcctggtgacttcagggctgatgctccctccttcctcccaccccgtcgctcactccccatgttgttccggatggagtggggctgtgccctgacaggcagccagtccgctgtctggccatcatctcctgtccctgaggaaattcccagaatgcaccctggaaggaacggaaaaaagcagcaaagaaagcctctgcgggagaagatgaagccggaaaggtgcggcgatgctgttccccggaggtaa

SEQ ID NO: 166294 - DNA, 1927 bp, Homo sapiens
  Payload ID: 12741
  Gene Symbol: PGF
  Gene Name: placental growth factor
  Uniprot ID: P49763
  ENST ID: ENST00000555567
  CDS Start-End: 543-1055
gtctggacctgccgagagcccctcgcacgcactgcgggctccggcgctgcgggctggccgggcgctgcgggctgaccgggcgctccgggaactcggctcgggaacctcgtctgcggtgggcggggccggcccggagccccgccccggctcagtccctgaaacccaggcgcggaccggctgcagtctcagaagggagctgctgtctgcggaggaaactgcatcgacggacggccgcccagctacgggaggacctggagtggcactgggcgcccgacggaccatccccgggacccgcctgcccctcggcgccccgccccgccgggccgctccccgtcgggttccccagccacagccttacctacgggctcctgactccgcaaggcttccagaagatgctcgaaccaccggccggggcctcggggcagcagtgagggaggcgtccagccccccactcagctcttctcctcctgtgccaggggctccccgggggatgagcatggtggttttccctcggagccccctggctcgggacgtctgagaagatgccggtcatgaggctgttcccttgcttcctgcagctcctggccgggctggcgctgcctgctgtgcccccccagcagtgggccttgtctgctgggaacggctcgtcagaggtggaagtggtacccttccaggaagtgtggggccgcagctactgccgggcgctggagaggctggtggacgtcgtgtccgagtaccccagcgaggtggagcacatgttcagcccatcctgtgtctccctgctgcgctgcaccggctgctgcggcgatgagaatctgcactgtgtgccggtggagacggccaatgtcaccatgcagctcctaaagatccgttctggggaccggccctcctacgtggagctgacgttctctcagcacgttcgctgcgaatgccggcctctgcgggagaagatgaagccggaaaggaggagacccaagggcagggggaagaggaggagagagaagcagagacccacagactgccacctgtgcggcgatgctgttccccggaggtaacccaccccttggaggagagagaccccgcacccggctcgtgtatttattaccgtcacactcttcagtgactcctgctggtacctgccctctatttattagccaactgtttccctgctgaatgcctcgctcccttcaagacgaggggcagggaaggacaggaccctcaggaattcagtgccttcaacaacgtgagagaaagagagaagccagccacagacccctgggagcttccgctttgaaagaagcaagacacgtggcctcgtgaggggcaagctaggccccagaggccctggaggtctccaggggcctgcagaaggaaagaagggggccctgctacctgttcttgggcctcaggctctgcacagacaagcagcccttgctttcggagctcctgtccaaagtagggatgcggatcctgctggggccgccacggcctggctggtgggaaggccggcagcgggcggaggggatccagccacttccccctcttcttctgaagatcagaacattcagctctggagaacagtggttgcctgggggcttttgccactccttgtcccccgtgatctcccctcacactttgccatttgcttgtactgggacattgttctttccggccaaggtgccaccaccctgccccccctaagagacacatacagagtgggccccgggctggagaaagagctgcctggatgagaaacagctcagccagtggggatgaggtcaccaggggaggagcctgtgcgtcccagctgaaggcagtggcaggggagcaggttccccaagggccctggcacccccacaagctgtccctgcagggccatctgactgccaagccagattctcttgaataaagtattctagtgtggaaa

SEQ ID NO: 166295 - DNA, 1699 bp, Homo sapiens
  Payload ID: 12741
  Gene Symbol: PGF
  Gene Name: placental growth factor
  Uniprot ID: P49763
  ENST ID: ENST00000553716
  CDS Start-End: 385-834
aaacccaggcgcggaccggctgcagtctcagaagggagctgctgtctgcggaggaaactgcatcgacggacggccgcccagctacgggaggacctggagtggcactgggcgcccgacggaccatccccgggacccgcctgcccctcggcgccccgccccgccgggccgctccccgtcgggttccccagccacagccttacctacgggctcctgactccgcaaggcttccagaagatgctcgaaccaccggccggggcctcggggcagcagtgagggaggcgtccagccccccactcagctcttctcctcctgtgccaggggctccccgggggatgagcatggtggttttccctcggagccccctggctcgggacgtctgagaagatgccggtcatgaggctgttcccttgcttcctgcagctcctggccgggctggcgctgcctgctgtgcccccccagcagtgggccttgtctgctgggaacggctcgtcagaggtggaagtggtacccttccaggaagtgtggggccgcagctactgccgggcgctggagaggctggtggacgtcgtgtccgagtaccccagcgaggtggagcacatgttcagcccatcctgtgtctccctgctgcgctgcaccggctgctgcggcgatgagaatctgcactgtgtgccggtggagacggccaatgtcaccatgcagctcctaaagatccgttctggggaccggccctcctacgtggagctgacgttctctcagcacgttcgctgcgaatgccggcctctgcgggagaagatgaagccggaaaggtgcggcgatgctgttccccggaggtaacccaccccttggaggagagagaccccgcacccggctcgtgtatttattaccgtcacactcttcagtgactcctgctggtacctgccctctatttattagccaactgtttccctgctgaatgcctcgctcccttcaagacgaggggcagggaaggacaggaccctcaggaattcagtgccttcaacaacgtgagagaaagagagaagccagccacagacccctgggagcttccgctttgaaagaagcaagacacgtggcctcgtgaggggcaagctaggccccagaggccctggaggtctccaggggcctgcagaaggaaagaagggggccctgctacctgttcttgggcctcaggctctgcacagacaagcagcccttgctttcggagctcctgtccaaagtagggatgcggatcctgctggggccgccacggcctggctggtgggaaggccggcagcgggcggaggggatccagccacttccccctcttcttctgaagatcagaacattcagctctggagaacagtggttgcctgggggcttttgccactccttgtcccccgtgatctcccctcacactttgccatttgcttgtactgggacattgttctttccggccaaggtgccaccaccctgccccccctaagagacacatacagagtgggccccgggctggagaaagagctgcctggatgagaaacagctcagccagtggggatgaggtcaccaggggaggagcctgtgcgtcccagctgaaggcagtggcaggggagcaggttccccaagggccctggcacccccacaagctgtccctgcagggccatctgactgccaagccagattctcttgaataaagtattctagt

SEQ ID NO: 166296 - DNA, 1131 bp, Homo sapiens
  Payload ID: 12742
  Gene Symbol: PLAC1
  Gene Name: placenta-specific 1
  Uniprot ID: Q9HBJ0
  ENST ID: ENST00000359237
  CDS Start-End: 287-925
atatatcagaccatcagaaggatttgtataaagagtgactctcctatgaaggtaaaggccacccctcttcagttccagtgactgagatacatttttccaatcctgggggcaaatacagacacagcaagttccttcttccctttggaaatttggcagctgccttcaccagtgagcacaaagccacatttcaaaggaaactgacaaattatccccagctgccagaagaagaaatcctcactggacggcttcctgtttcctgtggttcattatctgattggctgcagggatgaaagtttttaagttcataggactgatgatcctcctcacctctgcgttttcagccggttcaggacaaagtccaatgactgtgctgtgctccatagactggttcatggtcacagtgcaccccttcatgctaaacaacgatgtgtgtgtacactttcatgaactacacttgggcctgggttgccccccaaaccatgttcagccacacgcctaccagttcacctaccgtgttactgaatgtggcatcagggccaaagctgtctctcaggacatggttatctacagcactgagatacactactcttctaagggcacgccatctaagtttgtgatcccagtgtcatgtgctgccccccaaaagtccccatggctcaccaagccctgctccatgagagtagccagcaagagcagggccacagcccagaaggatgagaaatgctacgaggtgttcagcttgtcacagtccagtcaaaggcccaactgcgattgtccaccttgtgtcttcagtgaagaagagcatacccaggtcccttgtcaccaagcaggggctcaggaggctcaacctctgcagccatctcactttcttgatatttctgaggattggtctcttcacacagatgatatgattgggtccatgtgatcctcaggtttggggtctcctgaagatgctatttctagaattagtatatagtgtacaaatgtctgacaaataagtgctcttgtgaccctcatgtgagcacttttgagaaagagaaacctatagcaacttcatgaattaagcctttttctatatttttatattcatgtgtaaacaaaaaataaaataaaattctgatcgcataaaaa

SEQ ID NO: 166297 - DNA, 1447 bp, Homo sapiens
  Payload ID: 12743
  Gene Symbol: PLAC8
  Gene Name: placenta-specific 8
  Uniprot ID: Q9NZF1
  ENST ID: ENST00000311507
  CDS Start-End: 167-514
gcgtctgaaactgttctatgtactatgccctgcgatagaaacacagttacctctcccctttcacgtagttttcatttgtggtgagattctctcccaggccacaagacatttcctgctcggaaccttgtttactaatttccactgcttttaaggccctgcactgaaaatgcaagctcaggcgccggtggtcgttgtgacccaacctggagtcggtcccggtccggccccccagaactccaactggcagacaggcatgtgtgactgtttcagcgactgcggagtctgtctctgtggcacattttgtttcccgtgccttgggtgtcaagttgcagctgatatgaatgaatgctgtctgtgtggaacaagcgtcgcaatgaggactctctacaggacccgatatggcatccctggatctatttgtgatgactatatggcaactctttgctgtcctcattgtactctttgccaaatcaagagagatatcaacagaaggagagccatgcgtactttctaaaaactgatggtgaaaagctcttaccgaagcaacaaaattcagcagacacctcttcagcttgagttcttcaccatcttttgcaactgaaatatgatggatatgcttaagtacaactgatggcatgaaaaaaatcaaatttttgatttattataaatgaatgttgtccctgaacttagctaaatggtgcaacttagtttctccttgctttcatattatcgaattcgaatttcctggcttataaactttttaaattacatttgaaatataaaccaaatgaaatattttactgataagattcttcatgcttctttgctctccttaaaatgtctttttcactagttagttccaagggtcagtctcataattttgttcttatactttgatttcctttttctttttttttttttttaatagagttgggggatctttctttctttttttttttttttttttgagatagagtctcgctctgttgcccaggctggagtgcagtggcgtgatctcagctcactgcaacctccacctcctggatacaagcgattctgctgcctcagtctcccgagtagctgggattacaggttcccgccaccatgcccagctaatttttgtatttttagtagagacggggtttcaccatcttggtcaggctggtctcgaactcctgacctcgtgatccacctgcctcggcatcacaaaatgctgggattacaggcatgagccaccgcgtccagcctagagttgggggtctttctatgttgcccaggctggtcttgaactccgggcctctagcaagcctctcatctcagcctcccaaggtgctggaattacaggtgtgagccactgcaccatactttggtttcttagcaggagattttggttcacagtaacccagctctctttcatctaagaactttagatgagaaaaaaaaaaaa

SEQ ID NO: 166298 - DNA, 2253 bp, Homo sapiens
  Payload ID: 12743
  Gene Symbol: PLAC8
  Gene Name: placenta-specific 8
  Uniprot ID: Q9NZF1
  ENST ID: ENST00000426923
  CDS Start-End: 80-427
tctctcccaggccacaagacatttcctgctcggaaccttgtttactaatttccactgcttttaaggccctgcactgaaaatgcaagctcaggcgccggtggtcgttgtgacccaacctggagtcggtcccggtccggccccccagaactccaactggcagacaggcatgtgtgactgtttcagcgactgcggagtctgtctctgtggcacattttgtttcccgtgccttgggtgtcaagttgcagctgatatgaatgaatgctgtctgtgtggaacaagcgtcgcaatgaggactctctacaggacccgatatggcatccctggatctatttgtgatgactatatggcaactctttgctgtcctcattgtactctttgccaaatcaagagagatatcaacagaaggagagccatgcgtactttctaaaaactgatggtgagtcaatgcaaacatgcctctcagaacatgtgggtttttagaaatatcactaaagactttgtcaattatttgttgttttgaataattcagcaataactatttcttaagtctcctgaagtgctatcataatatcaagattggctttaattttcttcttatgaagaagatagctctatactttgaaaccatattttagtaaataaaggaatggtgaattttctaaacttctcagaattctggtgatctattaaggaagcacttaccacttgtaaaataccagagtatggtgagatacaaaagaattagaaaacatgttccctgctaagacaaacaagttgacaaaaggaattcgtaaataattataaaatagaagagtaaagaaaataacattctgtatgatatttggattgattgtggcataaagcatctatcatagcaaggtgaggttaaatagaaaactcctgttggagaagctgaactttgaaagaggtgaacatagaatttagaatgtttggaaatgttatatagaattaaccatctgaaattcaatcaagtcattttcaactaatttttctcaggactatctattgaggatgtagttaagtagaaatcaacatgacttactccatcccctgtagaatatatattaagtatgggaagaacacaatttttctactctttgtaatatccagtttccttcctgaagtgataaggactctgtatgggttaataaaaataactcttgggagatacgtaaaaaaatgttcatttacttagcaagtaatgtattaaggatctaggatcaagtatatattatcttagcaactaatgtatcaatgtatcaatatctaagactaggtaagatactgttaggtattgtagtagggttggggagcaagataaataagctagtccctctgtcattatagaatttatacgaaaaagggggattagacaaacccctaactaaaatgcagaattcaattaatgcctatagacaaagcggtattttatgttcagaggaggaaaagatcacatcttgtaagatgtataggtgaaagtttcttgaaagcagtgatttttaattctaaaggggaagtgcgtattagttctcaacaagaaacagatggcactcaaactgtgatagttcaaagatttaatgaagactaattataaaggtgtgggtggggcattgtagggagatgacaagggatggcataataacctgcctggcaacagccccagggaggagaagagggagcagtgacctgaatccttaaggagagagctgtgtgaagaggcctgccctgaaagaaacagtatcctctcaagagagggttgtgagcagcccgaggcaacccatagaactgaaaaagtaccctgacctcactttcggatgtccttctggttttcccattggctgaacccaccagaaaggcagagggcagcaaagtgtcacggtagtccgcaggtcgcttcccagggcacacagcaggatggtcaagggagtaagtaaatcagataggggcaaacagaggatcactgactcaagatgtggttttaattaatagaaatggaggctgagtgcagtggctcacacctgtgatcccagcactttgggaggccaaggcaagaggactgcttgaacccaggagttcaagaccagcctggggaacatgttgaaaccctgtctcttgaaaaaatacaaaaattagctaggtgtggtggtgcacgcctgtagtcccagatacttgggaggctgaggtgggaggatcacttgagcctgggaggtagaagctgcagtgagctatgat

SEQ ID NO: 166299 - DNA, 786 bp, Homo sapiens
  Payload ID: 12743
  Gene Symbol: PLAC8
  Gene Name: placenta-specific 8
  Uniprot ID: Q9NZF1
  ENST ID: ENST00000411416
  CDS Start-End: 146-493
gggtcccagagctgggctggcgggaggcgtaatccggcggggtgagggttgatcgaagagccccgcgcgcagctgccgctcacagccccttcccgagtgcagagcgggcagagaagtccactgcttttaaggccctgcactgaaaatgcaagctcaggcgccggtggtcgttgtgacccaacctggagtcggtcccggtccggccccccagaactccaactggcagacaggcatgtgtgactgtttcagcgactgcggagtctgtctctgtggcacattttgtttcccgtgccttgggtgtcaagttgcagctgatatgaatgaatgctgtctgtgtggaacaagcgtcgcaatgaggactctctacaggacccgatatggcatccctggatctatttgtgatgactatatggcaactctttgctgtcctcattgtactctttgccaaatcaagagagatatcaacagaaggagagccatgcgtactttctaaaaactgatggtgaaaagctcttaccgaagcaacaaaattcagcagacacctcttcagcttgagttcttcaccatcttttgcaactgaaatatgatggatatgcttaagtacaactgatggcatgaaaaaaatcaaatttttgatttattataaatgaatgttgtccctgaacttagctaaatggtgcaacttagtttctccttgctttcatattatcgaattcgaatttcctggcttataaactttttaaattacatttgaaatataaaccaaatgaaatattttactgataa

SEQ ID NO: 166300 - DNA, 1025 bp, Homo sapiens
  Payload ID: 12743
  Gene Symbol: PLAC8
  Gene Name: placenta-specific 8
  Uniprot ID: Q9NZF1
  ENST ID: ENST00000505406
  CDS Start-End: 503-850
atttacttctgtctgtatcaggaaacagaggcctgggtctagagacagggtcttggtgagggaaggactcaaaaccatgggatacagcatgaccgggcagcaccacagctgtggaaggagtttccctgcacaagttctcttctgttgtctgcctccatgtgagacatgcctttcaccttctgccatgattgtgaggcttccccagccacatggaactgaccaggaccagggtgaggcaaacaaggtccctacgggcacagaatttaagaaggcactcactcttgatgaaactggaggaccaaaattttaaactatgggatcagaaattcaaagactatgaataaaaatttcaaaagaaagaaatagtaataccaccaataagaagaataattaaaaaggtacaaagaaattggatgcaacattgtaaaaagagccatagtttggagctgagctgacatgagctaaaatcctagtccactgcttttaaggccctgcactgaaaatgcaagctcaggcgccggtggtcgttgtgacccaacctggagtcggtcccggtccggccccccagaactccaactggcagacaggcatgtgtgactgtttcagcgactgcggagtctgtctctgtggcacattttgtttcccgtgccttgggtgtcaagttgcagctgatatgaatgaatgctgtctgtgtggaacaagcgtcgcaatgaggactctctacaggacccgatatggcatccctggatctatttgtgatgactatatggcaactctttgctgtcctcattgtactctttgccaaatcaagagagatatcaacagaaggagagccatgcgtactttctaaaaactgatggtgaaaagctcttaccgaagcaacaaaattcagcagacacctcttcagcttgagttcttcaccatcttttgcaactgaaatatgatggatatgcttaagtacaactgatggcatgaaaaaaatcaaatttttgatttattataaatgaatgttgtccctgaactta

SEQ ID NO: 166301 - DNA, 489 bp, Homo sapiens
  Payload ID: 12743
  Gene Symbol: PLAC8
  Gene Name: placenta-specific 8
  ENST ID: ENST00000509973
  CDS Start-End: 125-301
agttttcatttgtggtgagattctctcccaggccacaagacatttcctgctcggaaccttgtttactaattgtctctgtggcacattttgtttcccgtgccttgggtgtcaagttgcagctgatatgaatgaatgctgtctgtgtggaacaagcgtcgcaatgaggactctctacaggacccgatatggcatccctggatctatttgtgatgactatatggcaactctttgctgtcctcattgtactctttgccaaatcaagagagatatcaacagaaggagagccatgcgtactttctaaaaactgatggtgaaaagctcttaccgaagcaacaaaattcagcagacacctcttcagcttgagttcttcaccatcttttgcaactgaaatatgatggatatgcttaagtacaactgatggcatgaaaaaaatcaaatttttgatttattataaatgaatgttgtccctgaacttagctaaatggtgca

SEQ ID NO: 166302 - DNA, 785 bp, Homo sapiens
  Payload ID: 12744
  Gene Symbol: PLAC9
  Gene Name: placenta-specific 9
  Uniprot ID: Q5JTB6
  ENST ID: ENST00000372263
  CDS Start-End: 43-336
gctgcgggcagacgcggcgctgcgctcggccaggccggcaccatgcggcccctgctctgcgcgctgaccggactggccctgctccgcgccgcgggctctttggccgctgccgaacccttcagccctccgcgaggagactcagctcagagcacagcgtgtgacagacacatggctgtgcaacgccgtctagatgtcatggaggagatggtagagaagaccgtggatcacctggggacagaggtgaaaggcctgctgggcctgctggaggagctggcctggaacctgcccccgggacccttcagccccgctcccgaccttctcggagatggcttctgagccctggagctggagcccagcagttggaggtggtgcacctgccaggcagcgcccacagaaccagccctgtcctctcgacttccttccttagcttcatgtgaaataaaagctattctggtctcctctgtgtctgctgacagagtaacccgtttaactacagcctcctctcactccacttccatgcctggaggaagcctgcaaccccctccaggctcagacctggggacacccccactcctgtcatttataggggcagatggagcaggggttgattcacacagatgggggccctttgagtggccttgcttctcaaaatgtggccataggtgaaaagcaaggggatcagggtctcaggacccacccagactgtttaatccaaatctgcattgcaatgagacccccagggattttatgtgtccattaaagtggtttgttgttgtttttaaaaa

SEQ ID NO: 166303 - DNA, 472 bp, Homo sapiens
  Payload ID: 12744
  Gene Symbol: PLAC9
  Gene Name: placenta-specific 9
  ENST ID: ENST00000372267
  CDS Start-End: 173-436
cacggggtgccgaggggcctctggagggggcgggttctctcgagccagaaagtccggagccgcccaggaattttggctcgaactgagtgcatttcctctcgggccggccgggtgcgatccgggaagggcggctgcgggcagacgcggcgctgcgctcggccaggccggcaccatgcggcccctgctctgcgcgctgaccggactggccctgctccgcgccgcgggctctttggccgctgccgaacccttcagccctccgcgaggagactcagctcagagcacagcgtgtgacagacacatggctgtgcaacgccgtctagatgtcatggaggagatggcttctgagccctggagctggagcccagcagttggaggtggtgcacctgccaggcagcgcccacagaaccagccctgtcctctcgacttccttccttagcttcatgtgaaataaaagctattctggtctcctctg

SEQ ID NO: 166304 - DNA, 534 bp, Homo sapiens
  Payload ID: 12744
  Gene Symbol: PLAC9
  Gene Name: placenta-specific 9
  ENST ID: ENST00000372270
  CDS Start-End: 213-380
gaatttctccgtctgaggctactatcttgctctggaggagggagtgagaactggatcactggttagcgtggtaactgttttggacaattgcatagccacagccaggaacacagaaggcagagaggcagccttgatctgcaagagctccagctgccgaacccttcagccctccgcgaggagactcagctcagagcacagcgtgtgacagacacatggctgtgcaacgccgtctagatgtcatggaggagatggtagagaagaccgtggatcacctggggacagaggtgaaaggcctgctgggcctgctggaggagctggcctggaacctgcccccgggacccttcagccccgctcccgaccttctcggagatggcttctgagccctggagctggagcccagcagttggaggtggtgcacctgccaggcagcgcccacagaaccagccctgtcctctcgacttccttccttagcttcatgtgaaataaaagctattctggtctcctctgtgtctgctgacagagtaacccgtttaa

SEQ ID NO: 166305 - DNA, 5447 bp, Homo sapiens
  Payload ID: 12745
  Gene Symbol: PKP1
  Gene Name: plakophilin 1
  Uniprot ID: Q13835
  ENST ID: ENST00000263946
  CDS Start-End: 252-2495
gggtggtgcagggcaggggtggtatatcctgtctgacggagggcgggcctcgccagtgccagagagggacgaaccagggtggaagcgccaggagcagctgcagggagccctcacgcggaccacgcactctatggccgtagggagccgctgagagcgagaagagcacgctcctgcccgcccgctgcaccgcacctcgcctcgcctctctgctctcctaggccccggccgcgcgccacccgcctcccgccaccatgaaccactcgccgctcaagaccgccttggcgtacgaatgcttccaggaccaggacaactccacgttggctttgccgtcggaccaaaagatgaaaacaggcacgtctggcaggcagcgcgtgcaggagcaggtgatgatgaccgtcaagcggcagaagtccaagtcttcccagtcgtccaccctgagccactccaatcgaggttccatgtatgatggcttggctgacaattacaactatgggaccaccagcaggagcagctactactccaagttccaggcagggaatggctcatggggatatccgatctacaatggaaccctcaagcgggagcctgacaacaggcgcttcagctcctacagccagatggagaactggagccggcactacccccggggcagctgtaacaccaccggcgcaggcagcgacatctgcttcatgcagaaaatcaaggcgagccgcagtgagcccgacctctactgtgacccacggggcaccctgcgcaagggcacgctgggcagcaagggccagaagaccacccagaaccgctacagcttttacagcacctgcagtggtcagaaggccataaagaagtgccctgtgcgcccgccctcttgtgcctccaagcaggaccctgtgtatatcccgcccatctcctgcaacaaggacctgtcctttggccactctagggccagctccaagatctgcagtgaggacatcgagtgcagtgggctgaccatccccaaggctgtgcagtacctgagctcccaggatgagaagtaccaggccattggggcctattacatccagcatacctgcttccaggatgaatctgccaagcaacaggtctatcagctgggaggcatctgcaagctggtggacctcctccgcagccccaaccagaacgtccagcaggccgcggcaggggccctgcgcaacctggtgttcaggagcaccaccaacaagctggagacccggaggcagaatgggatccgcgaggcagtcagcctcctgaggagaaccgggaacgccgagatccagaagcagctgactgggctgctctggaacctgtcttccactgacgagctgaaggaggaactcattgccgacgccctgcctgttctggccgaccgcgtcatcattcccttctctggctggtgcgatggcaatagcaacatgtcccgggaagtggtggaccctgaggtcttcttcaatgccacaggctgcttgagaaagagactgggcatgcgggagcttctggctcttgttccgcaaagggccactagtagcagggtgaacctgagctcggccgatgcaggccgccagaccatgcgtaactactcagggctcattgattccctcatggcctatgtccagaactgtgtagcggccagccgctgtgacgacaagtctgtggaaaactgcatgtgtgttctgcacaacctctcctaccgcctggacgccgaggtgcccacccgctaccgccagctggagtataacgcccgcaacgcctacaccgagaagtcctccactggctgcttcagcaacaagagcgacaagatgatgaacaacaactatgactgccccctgcctgaggaagagaccaaccccaagggcagcggctggttgtaccattcagatgccatccgcacctacctgaacctcatgggcaagagcaagaaagatgctaccctggaggcctgtgctggtgccctgcagaacctgacagccagcaaggggctgatgtccagtggcatgagccagttgattgggctgaaggaaaagggcctgccacaaattgcccgcctcctgcaatctggcaactctgatgtggtgcggtccggagcctccctcctgagcaacatgtcccgccaccctctgctgcacagagtgatggggaaccaggtgttcccggaggtgaccaggctcctcaccagccacactggcaataccagcaactccgaagacatcttgtcctcggcctgctacactgtgaggaacctgatggcctcgcagccacaactggccaagcagtacttctccagcagcatgctcaacaacatcatcaacctgtgccgaagcagtgcctcacccaaggccgcagaagctgcccggcttctcctgtctgacatgtggtccagcaaggaactgcagggtgtcctcagacagcaaggtttcgataggaacatgctgggaaccttagctggggccaacagcctcaggaacttcacctcccgattctaagaagagactgtccaagcaagttaggcttgcaggaagatatgacccagctgagaagccctcaggcctcgctggatggggttttctgtccatcctatgcagtatttgggaaagttcacaagaaactgagaagaaacctaaaaactgtggatagtggaaagatttttagattttttttttccttggggaaactggcaggcaatgggggttagggaggttggggcggtgggggctttcttgagttaaaggggcttatatgtgatgtcaatatttcttcctctgagaaatggtatatatatgtgtataatgtaagtgtgtgcatgcatgtgcgcgtgcatgtgtgtgtgtgtgagtgtcttaaagcataaccacaaactgcaaaaagctaggtaagctattttgttgcagctcataaggtggtgaaaaggactctcctgtgtttcttactcataggcaaggacaacatgtgctttttggtgagctgctcataattcctgaaatgtgtggtgccagggcaagggggccatcactgcagtcaggccctcagaggagtcctgcaggcttcctaccagtggtctccaggggtgcaggagtaactggggctgggccagcctccccacttacaaggctgctttccaggaagggaggtctggtgtatctcatgggagaatctggggtgtctgtaatgtcacccctccagcagcgccacaaggactgaggttgggtaggtgtggggttccagaggacagcaggacactctcgcatactttgccaaatgaggcctgctcagaggagtaggagctgaaagatggtgccttccaccctcttgggctgtgtgcccatcagagcaggctcagcctgcaaaggccctgcattcagaggtcttgtaatctacttgttgcaggagaaagaaggtaaaaaatgatttttttaagaaaagctattttattgcagctctttcccaagagctgttctgggaatggctggtcttcatattcccagtggagaggggaacaagtggggctgggcatatacctattccggcttctagtgggatggagttggggtatagaaattaaccaggaagatgtttccaccaagcctgctgtgagtcaattgagggagtgtttggggtcccaggagacttggacggggggagtttgggtagactaggaaaggaaagtgccatatcagggtaccggtaccggcaagctcacatctcagccaggggccatgccccacttcccctgaccccagctgtcttgtctccactctgtgaaacccacaggggatgtgataaacagggctattaggggtatcagccacgtcgagcccccagactctgtgcacttcagaccagcagcagcaggagggctcccgagggccttatgagaaaacctgtgtggacatcccttggtgtacactaagacagagcagagcccagcgctcccaagccttcctccttccagcttctacctccatgctagcattgctggtgttagagaggaattaacttcctggtctgtgcccttctctagaagaatataagatgctcctcctcctcaccccttctcagcctcctcccaagtcttcctcttctgcaccacccccgagtccaaacccacctcttgccccagcattcaggctggaaaacactgatgtggactcagtatgataactgagatgggggacgccagacatgtgaggacgctgtcctccgagaggtgtccccggctgttagccagctgtgctgtggtgctgtgggtctgtcataccctcccttgcttctgttcacactgggaggcccactcctggctcacctctccctctcagggacccacgtgggagcctggatccctggactgtcctgggcataggtttcaggggcctcctttgttgtcatcagaacccagaggaattcttctcctaaaaaatacgtatggcataccaatctgtgcggggcagtgtcctaagcacttagactacatcagggaagaacacagaccacatccctgtcctcatgcggcttatgttttctggaggaaagtggagacacaagtccttggctttagggctcccccggctgggggctgtgcagtccggtcagggcgggaggggaaatgcaccgctgcatgtgaaccttaccagcccaggcggatgccccttccccttagcactaccctggcctcctgcatcccctcgcctcatgttcctcccaccttcaaagaatgaagagccccatgggcccagcccctgccctgggaaccaggcagccttccagacctcaggggctgaggcagactattagggcagggctgactttggtgacactgcccattccctctcaggccagctcaggtcacccgggcctctgacccaggcctgtcactttgagaggggcaaaactgagaggggcttttcctagagaaagagaacaaggagcttgccaggcttcatgtagccgacacacgtctcaggattttaagtccacattggcctcacactaccagggccaatgcccaaaataaggagttccaatttggggccaaatgaggaaggacacagactctgccctgggatctcctgtgctagcggccaatgacaaatccagtcattggccaccagccacctctgcagtggggaccacactagcagccctgactccacactcctcctggggacccaagaggcagtgttgctgtctgcatgtccaccttggaatctggctgaactggctggcaggaccaagactgcggctggggtgggcagggaagggaagccgggggctgctgtgagggatcttggagcttccctgtagcccaccttccccttgcttcatgtttgtagaggaaccttgtgccggccaggcccagtttccttgtgtgatacactaatgtatttgctttttttggaaatagagaaaatcaataaattgctagtgtttctttgaacttt

SEQ ID NO: 166306 - DNA, 2244 bp, Homo sapiens
  Payload ID: 12745
  Gene Symbol: PKP1
  Gene Name: plakophilin 1
  Uniprot ID: Q13835
  ENST ID: ENST00000352845
  CDS Start-End: 1-2244
atgaaccactcgccgctcaagaccgccttggcgtacgaatgcttccaggaccaggacaactccacgttggctttgccgtcggaccaaaagatgaaaacaggcacgtctggcaggcagcgcgtgcaggagcaggtgatgatgaccgtcaagcggcagaagtccaagtcttcccagtcgtccaccctgagccactccaatcgaggttccatgtatgatggcttggctgacaattacaactatgggaccaccagcaggagcagctactactccaagttccaggcagggaatggctcatggggatatccgatctacaatggaaccctcaagcgggagcctgacaacaggcgcttcagctcctacagccagatggagaactggagccggcactacccccggggcagctgtaacaccaccggcgcaggcagcgacatctgcttcatgcagaaaatcaaggcgagccgcagtgagcccgacctctactgtgacccacggggcaccctgcgcaagggcacgctgggcagcaagggccagaagaccacccagaaccgctacagcttttacagcacctgcagtggtcagaaggccataaagaagtgccctgtgcgcccgccctcttgtgcctccaagcaggaccctgtgtatatcccgcccatctcctgcaacaaggacctgtcctttggccactctagggccagctccaagatctgcagtgaggacatcgagtgcagtgggctgaccatccccaaggctgtgcagtacctgagctcccaggatgagaagtaccaggccattggggcctattacatccagcatacctgcttccaggatgaatctgccaagcaacaggtctatcagctgggaggcatctgcaagctggtggacctcctccgcagccccaaccagaacgtccagcaggccgcggcaggggccctgcgcaacctggtgttcaggagcaccaccaacaagctggagacccggaggcagaatgggatccgcgaggcagtcagcctcctgaggagaaccgggaacgccgagatccagaagcagctgactgggctgctctggaacctgtcttccactgacgagctgaaggaggaactcattgccgacgccctgcctgttctggccgaccgcgtcatcattcccttctctggctggtgcgatggcaatagcaacatgtcccgggaagtggtggaccctgaggtcttcttcaatgccacaggctgcttgagaaagagactgggcatgcgggagcttctggctcttgttccgcaaagggccactagtagcagggtgaacctgagctcggccgatgcaggccgccagaccatgcgtaactactcagggctcattgattccctcatggcctatgtccagaactgtgtagcggccagccgctgtgacgacaagtctgtggaaaactgcatgtgtgttctgcacaacctctcctaccgcctggacgccgaggtgcccacccgctaccgccagctggagtataacgcccgcaacgcctacaccgagaagtcctccactggctgcttcagcaacaagagcgacaagatgatgaacaacaactatgactgccccctgcctgaggaagagaccaaccccaagggcagcggctggttgtaccattcagatgccatccgcacctacctgaacctcatgggcaagagcaagaaagatgctaccctggaggcctgtgctggtgccctgcagaacctgacagccagcaaggggctgatgtccagtggcatgagccagttgattgggctgaaggaaaagggcctgccacaaattgcccgcctcctgcaatctggcaactctgatgtggtgcggtccggagcctccctcctgagcaacatgtcccgccaccctctgctgcacagagtgatggggaaccaggtgttcccggaggtgaccaggctcctcaccagccacactggcaataccagcaactccgaagacatcttgtcctcggcctgctacactgtgaggaacctgatggcctcgcagccacaactggccaagcagtacttctccagcagcatgctcaacaacatcatcaacctgtgccgaagcagtgcctcacccaaggccgcagaagctgcccggcttctcctgtctgacatgtggtccagcaaggaactgcagggtgtcctcagacagcaaggtttcgataggaacatgctgggaaccttagctggggccaacagcctcaggaacttcacctcccgattctaa

SEQ ID NO: 166307 - DNA, 5384 bp, Homo sapiens
  Payload ID: 12745
  Gene Symbol: PKP1
  Gene Name: plakophilin 1
  Uniprot ID: Q13835
  ENST ID: ENST00000367324
  CDS Start-End: 252-2432
gggtggtgcagggcaggggtggtatatcctgtctgacggagggcgggcctcgccagtgccagagagggacgaaccagggtggaagcgccaggagcagctgcagggagccctcacgcggaccacgcactctatggccgtagggagccgctgagagcgagaagagcacgctcctgcccgcccgctgcaccgcacctcgcctcgcctctctgctctcctaggccccggccgcgcgccacccgcctcccgccaccatgaaccactcgccgctcaagaccgccttggcgtacgaatgcttccaggaccaggacaactccacgttggctttgccgtcggaccaaaagatgaaaacaggcacgtctggcaggcagcgcgtgcaggagcaggtgatgatgaccgtcaagcggcagaagtccaagtcttcccagtcgtccaccctgagccactccaatcgaggttccatgtatgatggcttggctgacaattacaactatgggaccaccagcaggagcagctactactccaagttccaggcagggaatggctcatggggatatccgatctacaatggaaccctcaagcgggagcctgacaacaggcgcttcagctcctacagccagatggagaactggagccggcactacccccggggcagctgtaacaccaccggcgcaggcagcgacatctgcttcatgcagaaaatcaaggcgagccgcagtgagcccgacctctactgtgacccacggggcaccctgcgcaagggcacgctgggcagcaagggccagaagaccacccagaaccgctacagcttttacagcacctgcagtggtcagaaggccataaagaagtgccctgtgcgcccgccctcttgtgcctccaagcaggaccctgtgtatatcccgcccatctcctgcaacaaggacctgtcctttggccactctagggccagctccaagatctgcagtgaggacatcgagtgcagtgggctgaccatccccaaggctgtgcagtacctgagctcccaggatgagaagtaccaggccattggggcctattacatccagcatacctgcttccaggatgaatctgccaagcaacaggtctatcagctgggaggcatctgcaagctggtggacctcctccgcagccccaaccagaacgtccagcaggccgcggcaggggccctgcgcaacctggtgttcaggagcaccaccaacaagctggagacccggaggcagaatgggatccgcgaggcagtcagcctcctgaggagaaccgggaacgccgagatccagaagcagctgactgggctgctctggaacctgtcttccactgacgagctgaaggaggaactcattgccgacgccctgcctgttctggccgaccgcgtcatcattcccttctctggctggtgcgatggcaatagcaacatgtcccgggaagtggtggaccctgaggtcttcttcaatgccacaggctgcttgaggaacctgagctcggccgatgcaggccgccagaccatgcgtaactactcagggctcattgattccctcatggcctatgtccagaactgtgtagcggccagccgctgtgacgacaagtctgtggaaaactgcatgtgtgttctgcacaacctctcctaccgcctggacgccgaggtgcccacccgctaccgccagctggagtataacgcccgcaacgcctacaccgagaagtcctccactggctgcttcagcaacaagagcgacaagatgatgaacaacaactatgactgccccctgcctgaggaagagaccaaccccaagggcagcggctggttgtaccattcagatgccatccgcacctacctgaacctcatgggcaagagcaagaaagatgctaccctggaggcctgtgctggtgccctgcagaacctgacagccagcaaggggctgatgtccagtggcatgagccagttgattgggctgaaggaaaagggcctgccacaaattgcccgcctcctgcaatctggcaactctgatgtggtgcggtccggagcctccctcctgagcaacatgtcccgccaccctctgctgcacagagtgatggggaaccaggtgttcccggaggtgaccaggctcctcaccagccacactggcaataccagcaactccgaagacatcttgtcctcggcctgctacactgtgaggaacctgatggcctcgcagccacaactggccaagcagtacttctccagcagcatgctcaacaacatcatcaacctgtgccgaagcagtgcctcacccaaggccgcagaagctgcccggcttctcctgtctgacatgtggtccagcaaggaactgcagggtgtcctcagacagcaaggtttcgataggaacatgctgggaaccttagctggggccaacagcctcaggaacttcacctcccgattctaagaagagactgtccaagcaagttaggcttgcaggaagatatgacccagctgagaagccctcaggcctcgctggatggggttttctgtccatcctatgcagtatttgggaaagttcacaagaaactgagaagaaacctaaaaactgtggatagtggaaagatttttagattttttttttccttggggaaactggcaggcaatgggggttagggaggttggggcggtgggggctttcttgagttaaaggggcttatatgtgatgtcaatatttcttcctctgagaaatggtatatatatgtgtataatgtaagtgtgtgcatgcatgtgcgcgtgcatgtgtgtgtgtgtgagtgtcttaaagcataaccacaaactgcaaaaagctaggtaagctattttgttgcagctcataaggtggtgaaaaggactctcctgtgtttcttactcataggcaaggacaacatgtgctttttggtgagctgctcataattcctgaaatgtgtggtgccagggcaagggggccatcactgcagtcaggccctcagaggagtcctgcaggcttcctaccagtggtctccaggggtgcaggagtaactggggctgggccagcctccccacttacaaggctgctttccaggaagggaggtctggtgtatctcatgggagaatctggggtgtctgtaatgtcacccctccagcagcgccacaaggactgaggttgggtaggtgtggggttccagaggacagcaggacactctcgcatactttgccaaatgaggcctgctcagaggagtaggagctgaaagatggtgccttccaccctcttgggctgtgtgcccatcagagcaggctcagcctgcaaaggccctgcattcagaggtcttgtaatctacttgttgcaggagaaagaaggtaaaaaatgatttttttaagaaaagctattttattgcagctctttcccaagagctgttctgggaatggctggtcttcatattcccagtggagaggggaacaagtggggctgggcatatacctattccggcttctagtgggatggagttggggtatagaaattaaccaggaagatgtttccaccaagcctgctgtgagtcaattgagggagtgtttggggtcccaggagacttggacggggggagtttgggtagactaggaaaggaaagtgccatatcagggtaccggtaccggcaagctcacatctcagccaggggccatgccccacttcccctgaccccagctgtcttgtctccactctgtgaaacccacaggggatgtgataaacagggctattaggggtatcagccacgtcgagcccccagactctgtgcacttcagaccagcagcagcaggagggctcccgagggccttatgagaaaacctgtgtggacatcccttggtgtacactaagacagagcagagcccagcgctcccaagccttcctccttccagcttctacctccatgctagcattgctggtgttagagaggaattaacttcctggtctgtgcccttctctagaagaatataagatgctcctcctcctcaccccttctcagcctcctcccaagtcttcctcttctgcaccacccccgagtccaaacccacctcttgccccagcattcaggctggaaaacactgatgtggactcagtatgataactgagatgggggacgccagacatgtgaggacgctgtcctccgagaggtgtccccggctgttagccagctgtgctgtggtgctgtgggtctgtcataccctcccttgcttctgttcacactgggaggcccactcctggctcacctctccctctcagggacccacgtgggagcctggatccctggactgtcctgggcataggtttcaggggcctcctttgttgtcatcagaacccagaggaattcttctcctaaaaaatacgtatggcataccaatctgtgcggggcagtgtcctaagcacttagactacatcagggaagaacacagaccacatccctgtcctcatgcggcttatgttttctggaggaaagtggagacacaagtccttggctttagggctcccccggctgggggctgtgcagtccggtcagggcgggaggggaaatgcaccgctgcatgtgaaccttaccagcccaggcggatgccccttccccttagcactaccctggcctcctgcatcccctcgcctcatgttcctcccaccttcaaagaatgaagagccccatgggcccagcccctgccctgggaaccaggcagccttccagacctcaggggctgaggcagactattagggcagggctgactttggtgacactgcccattccctctcaggccagctcaggtcacccgggcctctgacccaggcctgtcactttgagaggggcaaaactgagaggggcttttcctagagaaagagaacaaggagcttgccaggcttcatgtagccgacacacgtctcaggattttaagtccacattggcctcacactaccagggccaatgcccaaaataaggagttccaatttggggccaaatgaggaaggacacagactctgccctgggatctcctgtgctagcggccaatgacaaatccagtcattggccaccagccacctctgcagtggggaccacactagcagccctgactccacactcctcctggggacccaagaggcagtgttgctgtctgcatgtccaccttggaatctggctgaactggctggcaggaccaagactgcggctggggtgggcagggaagggaagccgggggctgctgtgagggatcttggagcttccctgtagcccaccttccccttgcttcatgtttgtagaggaaccttgtgccggccaggcccagtttccttgtgtgatacactaatgtatttgctttttttggaaatagagaaaatcaataaattgctagtgtttctttgaacttt

SEQ ID NO: 166308 - DNA, 2616 bp, Homo sapiens
  Payload ID: 12745
  Gene Symbol: PKP1
  Gene Name: plakophilin 1
  ENST ID: ENST00000622031
  CDS Start-End: 192-2369
agagagggacgaaccagggtggaagcgccaggagcagctgcagggagccctcacgcggaccacgcactctatggccgtagggagccgctgagagcgagaagagcacgctcctgcccgcccgctgcaccgcacctcgcctcgcctctctgctctcctaggccccggccgcgcgccacccgcctcccgccaccatgaaccactcgccgctcaagaccgccttggcgtacgaatgcttccaggaccaggacaactccacgttggctttgccgtcggaccaaaagatgaaaacaggcacgtctggcaggcagcgcgtgcaggagcaggtgatgatgaccgtcaagcggcagaagtccaagtcttcccagtcgtccaccctgagccactccaatcgaggttccatgtatgatggcttggctgacaattacaactatgggaccaccagcaggagcagctactactccaagttccaggcagggaatggctcatggggatatccgatctacaatggaaccctcaagcgggagcctgacaacaggcgcttcagctcctacagccagatggagaactggagccggcactacccccggggcagctgtaacaccaccggcgcaggcagcgacatctgcttcatgcagaaaatcaaggcgagccgcagtgagcccgacctctactgtgacccacggggcaccctgcgcaagggcacgctgggcagcaagggccagaagaccacccagaaccgctacagcttttacagcacctgcagtggtcagaaggccataaagaagtgccctgtgcgcccgccctcttgtgcctccaagcaggaccctgtgtatatccgccatctcctgcaacaagacctgtcctttggccactctagggccagctccaagatctgcagtgaggacatcgagtgcagtgggctgaccatccccaaggctgtgcagtacctgagctcccaggatgagaagtaccaggccattggggcctattacatccagcatacctgcttccaggatgaatctgccaagcaacaggtctatcagctgggaggcatctgcaagctggtggacctcctccgcagccccaaccagaacgtccagcaggccgcggcaggggccctgcgcaacctggtgttcaggagcaccaccaacaagctggagacccggaggcagaatgggatccgcgaggcagtcagcctcctgaggagaaccgggaacgccgagatccagaagcagctgactgggctgctctggaacctgtcttccactgacgagctgaaggaggaactcattgccgacgccctgcctgttctggccgaccgcgtcatcattcccttctctggctggtgcgatggcaatagcaacatgtcccgggaagtggtggaccctgaggtcttcttcaatgccacaggctgcttgaggaacctgagctcggccgatgcaggccgccagaccatgcgtaactactcagggctcattgattccctcatggcctatgtccagaactgtgtagcggccagccgctgtgacgacaagtctgtggaaaactgcatgtgtgttctgcacaacctctcctaccgcctggacgccgaggtgcccacccgctaccgccagctggagtataacgcccgcaacgcctacaccgagaagtcctccactggctgcttcagcaacaagagcgacaagatgatgaacaacaactatgactgccccctgcctgaggaagagaccaaccccaagggcagcggctggttgtaccattcagatgccatccgcacctacctgaacctcatgggcaagagcaagaaagatgctaccctggaggcctgtgctggtgccctgcagaacctgacagccagcaaggggctgatgtccagtggcatgagccagttgattgggctgaaggaaaagggcctgccacaaattgcccgcctcctgcaatctggcaactctgatgtggtgcggtccggagcctccctcctgagcaacatgtcccgccaccctctgctgcacagagtgatggggaaccaggtgttcccggaggtgaccaggctcctcaccagccacactggcaataccagcaactccgaagacatcttgtcctcggcctgctacactgtgaggaacctgatggcctcgcagccacaactggccaagcagtacttctccagcagcatgctcaacaacatcatcaacctgtgccgaagcagtgcctcacccaaggccgcagaagctgcccggcttctcctgtctgacatgtggtccagcaaggaactgcagggtgtcctcagacagcaaggtttcgataggaacatgctgggaaccttagctggggccaacagcctcaggaacttcacctcccgattctaagaagagactgtccaagcaagttaggcttgcaggaagatatgacccagctgagaagccctcaggcctcgctggatggggttttctgtccatcctatgcagtatttgggaaagttcacaagaaactgagaagaaacctaaaaactgtggatagtggaaagatttttagattttttttttccttggggaaactggcaggcaatgggggttagggaggttggggcggtgggggctttcttgagttaaaggg

SEQ ID NO: 166309 - DNA, 4241 bp, Homo sapiens
  Payload ID: 12746
  Gene Symbol: PKP2
  Gene Name: plakophilin 2
  Uniprot ID: Q99959
  ENST ID: ENST00000070846
  CDS Start-End: 26-2671
cagctcggtcgcccccaccggccccatggcagcccccggcgccccagctgagtacggctacatccggaccgtcctgggccagcagatcctgggacaactggacagctccagcctggcgctgccctccgaggccaagctgaagctggcggggagcagcggccgcggcggccagacagtcaagagcctgcggatccaggagcaggtgcagcagaccctcgcccggaagggccgcagctccgtgggcaacggaaatcttcaccgaaccagcagtgttcctgagtatgtctacaacctacacttggttgaaaatgattttgttggaggccgttcccctgttcctaaaacctatgacatgctaaaggctggcacaactgccacttatgaaggtcgctggggaagaggaacagcacagtacagctcccagaagtccgtggaagaaaggtccttgaggcatcctctgaggagactggagatttctcctgacagcagcccggagagggctcactacacgcacagcgattaccagtacagccagagaagccaggctgggcacaccctgcaccaccaagaaagcaggcgggccgccctcctagtgccaccgagatatgctcgttccgagatcgtgggggtcagccgtgctggcaccacaagcaggcagcgccactttgacacataccacagacagtaccagcatggctctgttagcgacaccgtttttgacagcatccctgccaacccggccctgctcacgtaccccaggccagggaccagccgcagcatgggcaacctcttggagaaggagaactacctgacggcagggctcactgtcgggcaggtcaggccgctggtgcccctgcagcccgtcactcagaacagggcttccaggtcctcctggcatcagagctccttccacagcacccgcacgctgagggaagctgggcccagtgtcgccgtggattccagcgggaggagagcgcacttgactgtcggccaggcggccgcagggggaagtgggaatctgctcactgagagaagcactttcactgactcccagctggggaatgcagacatggagatgactctggagcgagcagtgagtatgctcgaggcagaccacatgctgccatccaggatttctgctgcagctactttcatacagcacgagtgcttccagaaatctgaagctcggaagagggttaaccagcttcgtggcatcctcaagcttctgcagctcctaaaagttcagaatgaagacgttcagcgagctgtgtgtggggccttgagaaacttagtatttgaagacaatgacaacaaattggaggtggctgaactaaatggggtacctcggctgctccaggtgctgaagcaaaccagagacttggagactaaaaaacaaataacagaccatacagtcaatttaagaagtaggaatggctggccgggcgcggtggctcacgcctgtaatcccagcactttgggaggccaaggcgggcggatcacgaggtcaggagttcgagaccagcctgaccaacatggtttgctgtggaatttgtcatctaatgacaaactcaagaatctcatgataacagaagcattgcttacgctgacggagaatatcatcatccccttttctgggtggcctgaaggagactacccaaaagcaaatggtttgctcgattttgacatattctacaacgtcactggatgcctaagaaacatgagttctgctggcgctgatgggagaaaagcgatgagaagatgtgacggactcattgactcactggtccattatgtcagaggaaccattgcagattaccagccagatgacaaggccacggagaattgtgtgtgcattcttcataacctctcctaccagctggaggcagagctcccagagaaatattcccagaatatctatattcaaaaccggaatatccagactgacaacaacaaaagtattggatgttttggcagtcgaagcaggaaagtaaaagagcaataccaggacgtgccgatgccggaggaaaagagcaaccccaagggcgtggagtggctgtggcattccattgttataaggatgtatctgtccttgatcgccaaaagtgtccgcaactacacacaagaagcatccttaggagctctgcagaacctcacggccggaagtggaccaatgccgacatcagtggctcagacagttgtccagaaggaaagtggcctgcagcacacccgaaagatgctgcatgttggtgacccaagtgtgaaaaagacagccatctcgctgctgaggaatctgtcccggaatctttctctgcagaatgaaattgccaaagaaactctccctgatttggtttccatcattcctgacacagtcccgagtactgaccttctcattgaaactacagcctctgcctgttacacattgaacaacataatccaaaacagttaccagaatgcacgcgaccttctaaacaccgggggcatccagaaaattatggccattagtgcaggcgatgcctatgcctccaacaaagcaagtaaagctgcttccgtccttctgtattctctgtgggcacacacggaactgcatcatgcctacaagaaggctcagtttaagaagacagattttgtcaacagccggactgccaaagcctaccactcccttaaagactgaggaaaatgacaaagtattctcggctgcaaaaatccccaaaggaaaacacctatttttctactacccagcccaagaaacctcaaaagcatgccttgtttctatccttctctatttccgtggtcccctgaatccagaaaacaaatagaacataattttatgagtcttccagaagacctttgcaagtttgccaccagtagataccggccacaggctcgacaaatagtggtctttgttattagggcttatggtacatggcttcctggaatcaaaatgtgaattcatgtggaagggacattaatccaataaataaggaaagaagctgttgcattactgggattttaaaagtttgatttacatttatattccttttctggttcccatgttttgtcactcatgtgcacattgcttcgccattgggcctccagtgtattgttctgcagtgttgaaacagaatggaaatgacaagaaatatctgcagttatccaggagaaagtataatggcaaaattattggtttctttctttactttgtgcttgtttttatccccttgggttgtttttctctgatttttaaataaacttaagaaatttagattacagagtatgcatgactgtaagaaaaagaaattgagaggaagtgatcatagcaaattaaagaagtcttttcctcccagaacttaaagtaaaataaaaaataaataaataaataaaatcttttccacagagaaaggcaactgtgatgataaaatttaacgttcccccaaacactgagtcaatgagatttttctcaggagatactttacctataacaacgccgttaaatccaaatctcttctaaacgatggcattctatgtaatgcctttcctggacttttttggccactgccctggactagtgaaagaatggactctatctttatctgcaagaggaactaaggccttctctcagactgcctggccagcctggggcactgaaaatacggctcatgttaatgagttacattatcagccagcccagccttgcccaccatttaagaaatatcacagagccactagatctcatatgatcttcttcaagccattattttaactcaagaaaactctagagaagaaaagtgaagaagtcatgttgaagaagatgtaagaatgtgtcaagaccatccagaaatgatatgagaaatactgatattttaaatggttgacatcatccagcgaaatgaatctacattaaatgttgttttaactgcgctatgattaaaaccattcatatagagttagtctttacaactactattctgttatttttttttttaatctgacaacatttgtcctaagtaagataagcaaaaaaattcttcaactccttttggcaagaaaactgtaacagaaaataaattttgaatgtgtacttaagtctttattatatttgaagcaattttttttcaattttaaaagctgaatgaagacaacttaggttgctaacctagttcaaaatgaaattatttagataccaatttttaaaatactggagagaatttatatgtctttttccagagttctgatgataagca

SEQ ID NO: 166310 - DNA, 4302 bp, Homo sapiens
  Payload ID: 12746
  Gene Symbol: PKP2
  Gene Name: plakophilin 2
  Uniprot ID: Q99959
  ENST ID: ENST00000340811
  CDS Start-End: 110-2623
ggggccggactcgagcggggcggggctcgcgccagcgcccccagctccgtggcggcttcgcccgcgagtccagaggcaggcgagcagctcggtcgcccccaccggccccatggcagcccccggcgccccagctgagtacggctacatccggaccgtcctgggccagcagatcctgggacaactggacagctccagcctggcgctgccctccgaggccaagctgaagctggcggggagcagcggccgcggcggccagacagtcaagagcctgcggatccaggagcaggtgcagcagaccctcgcccggaagggccgcagctccgtgggcaacggaaatcttcaccgaaccagcagtgttcctgagtatgtctacaacctacacttggttgaaaatgattttgttggaggccgttcccctgttcctaaaacctatgacatgctaaaggctggcacaactgccacttatgaaggtcgctggggaagaggaacagcacagtacagctcccagaagtccgtggaagaaaggtccttgaggcatcctctgaggagactggagatttctcctgacagcagcccggagagggctcactacacgcacagcgattaccagtacagccagagaagccaggctgggcacaccctgcaccaccaagaaagcaggcgggccgccctcctagtgccaccgagatatgctcgttccgagatcgtgggggtcagccgtgctggcaccacaagcaggcagcgccactttgacacataccacagacagtaccagcatggctctgttagcgacaccgtttttgacagcatccctgccaacccggccctgctcacgtaccccaggccagggaccagccgcagcatgggcaacctcttggagaaggagaactacctgacggcagggctcactgtcgggcaggtcaggccgctggtgcccctgcagcccgtcactcagaacagggcttccaggtcctcctggcatcagagctccttccacagcacccgcacgctgagggaagctgggcccagtgtcgccgtggattccagcgggaggagagcgcacttgactgtcggccaggcggccgcagggggaagtgggaatctgctcactgagagaagcactttcactgactcccagctggggaatgcagacatggagatgactctggagcgagcagtgagtatgctcgaggcagaccacatgctgccatccaggatttctgctgcagctactttcatacagcacgagtgcttccagaaatctgaagctcggaagagggttaaccagcttcgtggcatcctcaagcttctgcagctcctaaaagttcagaatgaagacgttcagcgagctgtgtgtggggccttgagaaacttagtatttgaagacaatgacaacaaattggaggtggctgaactaaatggggtacctcggctgctccaggtgctgaagcaaaccagagacttggagactaaaaaacaaataacaggtttgctgtggaatttgtcatctaatgacaaactcaagaatctcatgataacagaagcattgcttacgctgacggagaatatcatcatccccttttctgggtggcctgaaggagactacccaaaagcaaatggtttgctcgattttgacatattctacaacgtcactggatgcctaagaaacatgagttctgctggcgctgatgggagaaaagcgatgagaagatgtgacggactcattgactcactggtccattatgtcagaggaaccattgcagattaccagccagatgacaaggccacggagaattgtgtgtgcattcttcataacctctcctaccagctggaggcagagctcccagagaaatattcccagaatatctatattcaaaaccggaatatccagactgacaacaacaaaagtattggatgttttggcagtcgaagcaggaaagtaaaagagcaataccaggacgtgccgatgccggaggaaaagagcaaccccaagggcgtggagtggctgtggcattccattgttataaggatgtatctgtccttgatcgccaaaagtgtccgcaactacacacaagaagcatccttaggagctctgcagaacctcacggccggaagtggaccaatgccgacatcagtggctcagacagttgtccagaaggaaagtggcctgcagcacacccgaaagatgctgcatgttggtgacccaagtgtgaaaaagacagccatctcgctgctgaggaatctgtcccggaatctttctctgcagaatgaaattgccaaagaaactctccctgatttggtttccatcattcctgacacagtcccgagtactgaccttctcattgaaactacagcctctgcctgttacacattgaacaacataatccaaaacagttaccagaatgcacgcgaccttctaaacaccgggggcatccagaaaattatggccattagtgcaggcgatgcctatgcctccaacaaagcaagtaaagctgcttccgtccttctgtattctctgtgggcacacacggaactgcatcatgcctacaagaaggctcagtttaagaagacagattttgtcaacagccggactgccaaagcctaccactcccttaaagactgaggaaaatgacaaagtattctcggctgcaaaaatccccaaaggaaaacacctatttttctactacccagcccaagaaacctcaaaagcatgccttgtttctatccttctctatttccgtggtcccctgaatccagaaaacaaatagaacataattttatgagtcttccagaagacctttgcaagtttgccaccagtagataccggccacaggctcgacaaatagtggtctttgttattagggcttatggtacatggcttcctggaatcaaaatgtgaattcatgtggaagggacattaatccaataaataaggaaagaagctgttgcattactgggattttaaaagtttgatttacatttatattccttttctggttcccatgttttgtcactcatgtgcacattgcttcgccattgggcctccagtgtattgttctgcagtgttgaaacagaatggaaatgacaagaaatatctgcagttatccaggagaaagtataatggcaaaattattggtttctttctttactttgtgcttgtttttatccccttgggttgtttttctctgatttttaaataaacttaagaaatttagattacagagtatgcatgactgtaagaaaaagaaattgagaggaagtgatcatagcaaattaaagaagtcttttcctcccagaacttaaagtaaaataaaaaataaataaataaataaaatcttttccacagagaaaggcaactgtgatgataaaatttaacgttcccccaaacactgagtcaatgagatttttctcaggagatactttacctataacaacgccgttaaatccaaatctcttctaaacgatggcattctatgtaatgcctttcctggacttttttggccactgccctggactagtgaaagaatggactctatctttatctgcaagaggaactaaggccttctctcagactgcctggccagcctggggcactgaaaatacggctcatgttaatgagttacattatcagccagcccagccttgcccaccatttaagaaatatcacagagccactagatctcatatgatcttcttcaagccattattttaactcaagaaaactctagagaagaaaagtgaagaagtcatgttgaagaagatgtaagaatgtgtcaagaccatccagaaatgatatgagaaatactgatattttaaatggttgacatcatccagcgaaatgaatctacattaaatgttgttttaactgcgctatgattaaaaccattcatatagagttagtctttacaactactattctgttatttttttttttaatctgacaacatttgtcctaagtaagataagcaaaaaaattcttcaactccttttggcaagaaaactgtaacagaaaataaattttgaatgtgtacttaagtctttattatatttgaagcaattttttttcaattttaaaagctgaatgaagacaacttaggttgctaacctagttcaaaatgaaattatttagataccaatttttaaaatactggagagaatttatatgtctttttccagagttctgatgataagcatttggagtgcatttattcctccagataataaatgtgtgttcagaactttttgtgttttttaaggcattaataaagccttcgataatattaaatacaaaatgagaccaaa

SEQ ID NO: 166311 - DNA, 2644 bp, Homo sapiens
  Payload ID: 12746
  Gene Symbol: PKP2
  Gene Name: plakophilin 2
  ENST ID: ENST00000613243
  CDS Start-End: 1-2475
atggcagcccccggcgccccagctgagtacggctacatccggaccgtcctgggccagcagatcctgggacaactggacagctccagcctggcgctgccctccgaggccaagctgaagctggcggggagcagcggccgcggcggccagacagtcaagagcctgcggatccaggagcaggtgcagcagaccctcgcccggaagggccgcagctccgtgggcaacggaaatcttcaccgaaccagcagtgttcctgagtatgtctacaacctacacttggttgaaaatgattttgttggaggccgttcccctgttcctaaaacctatgacatgctaaaggctggcacaactgccacttatgaaggtcgctggggaagaggaacagcacagtacagctcccagaagtccgtggaagaaaggtccttgaggcatcctctgaggagactggagatttctcctgacagcagcccggagagggctcactacacgcacagcgattaccagtacagccagagaagccaggctgggcacaccctgcaccaccaagaaagcaggcgggccgccctcctagtgccaccgagatatgctcgttccgagatcgtgggggtcagccgtgctggcaccacaagcaggcagcgccactttgacacataccacagacagtaccagcatggctctgttagcgacaccgtttttgacagcatccctgccaacccggccctgctcacgtaccccaggccagggaccagccgcagcatgggcaacctcttggagaaggagaactacctgacggcagggctcactgtcgggcaggtcaggccgctggtgcccctgcagcccgtcactcagaacagggcttccaggtcctcctggcatcagagctccttccacagcacccgcacgctgagggaagctgggcccagtgtcgccgtggattccagcgggaggagagcgcacttgactgtcggccaggcggccgcagggggaagtgggaatctgctcactgagagaagcactttcactgactcccagctggggaatgcagacatggagatgactctggagcgagcagtgagtatgctcgaggcagaccacatgctgccatccaggatttctgctgcagctactttcatacagcacgagtgcttccagaaatctgaagctcggaagagggttaaccagcttcgtggcatcctcaagcttctgcagctcctaaaagttcagaatgaagacgttcagcgagctgtgtgtggggccttgagaaacttagtatttgaagacaatgacaacaaattggaggtggctgaactaaatggggtacctcggctgctccaggtgctgaagcaaaccagagacttggagactaaaaaacaaataacagaccatacagtcaatttaagaagtaggaatggctggccgggcgcggtggctcacgcctgtaatcccagcactttgggaggccaaggcgggcggatcacgaggtcaggagttcgagaccagcctgaccaacatggtttgctgtggaatttgtcatctaatgacaaactcaagaatctcatgataacagaagcattgcttacgctgacggagaatatcatcatccccttttctgggtggcctgaaggagactacccaaaagcaaatggtttgctcgattttgacatattctacaacgtcactggatgcctaagaaacatgagttctgctggcgctgatgggagaaaagcgatgagaagatgtgacggactcattgactcactggtccattatgtcagaggaaccattgcagattaccagccagatgacaaggccacggagaattgtgtgtgcattcttcataacctctcctaccagctggaggcagagctcccagagaaatattcccagaatatctatattcaaaaccggaatatccagactgacaacaacaaaagtattggatgttttggcagtcgaagcaggaaagtaaaagagcaataccaggacgtgccgatgccggaggaaaagagcaaccccaagggcgtggagtggctgtggcattccattgttataaggatgtatctgtccttgatcgccaaaagtgtccgcaactacacacaagaagcatccttaggagctctgcagaacctcacggccggaagtggaccaatgccgacatcagtggctcagacagttgtccagaaggaaagtggcctgcagcacacccgaaagatgctgcatgttggtgacccaagtgtgaaaaagacagccatctcgctgctgaggaatctgtcccggaatctttctctgcagaatgaaattgccaaagaaactctccctgatttggtttccatcattcctgacacagtcccgagtactgaccttctcattgaaactacagcctctgcctgttacacattgaacaacataatccaaaacagttaccagaatgcacgcgaccttctaaaccgggggcatccagaaaattatggccattagtgcaggcgatgcctatgcctccaacaaagcaagtaaagctgcttccgtccttctgtattctctgtgggcacacacggaactgcatcatgcctacaagaaggctcagtttaagaagacagattttgtcaacagccggactgccaaagcctaccactcccttaaagactga

SEQ ID NO: 166312 - DNA, 1563 bp, Homo sapiens
  Payload ID: 12746
  Gene Symbol: PKP2
  Gene Name: plakophilin 2
  ENST ID: ENST00000546741
  CDS Start-End: 1-110
gcggccgcggcggccagacagtcaagagcctgcggatccaggagcaggtgcagcagaccctcgcccggaagggccgcagctccgtgggcaacggtccagtgctaaactgaaaccaaatcagcttcccctgcgtaggagacacaggaggcatattagatattctttcttatcctctgagaatggccagctaggaagagagcaagcagatacaactcttccataaatggagggaatggagccatgaacagaagaaaagggaatgttgctgagcatctactatgtgcctattccagaatcttcattatattcttgaaacaattgctgagatagatatgagaatccatctcacatatgaagtatgtgtctgtcagcaatggttggaaatttaatcccaactccacacataatctgttctttctacaaagtaatgcatcacctgtgtgatgaattcagcaagcatcaaatgagtatgttcttcatgccgggcgctgtgcaggtgctgaattaaacacaaagactctgcttgctttaaagcaaaaagtttgaagaaggaagccaaccgctagaaaaatacattaccaaataaaaagtagtaagtgacccaaaagaatggctaatatattatggagtttagaagtgtaaattggctgggcgcagtgactcatgcctgtaattgcagcactttgggaggccgaggcgggaggatcacctgaggtcgggagtttgagaccagcctgaccaacatggtaaaatcccatctctactaaaaatacaaaattagccgggcgtggtggcacatgccggtaatcccagctactcagctactcggaaggctgaggcaggagaatcgcttgaacccgggaggtagaagttgcagtgagcggagatctcgccattgcactccagcctgagcaacaagagcgaaacgccatctcaaaaaaaaaaaaaaaaaaaaaaaaagtaagttactcctggtggcaggaaattttgaaaagcttcctggaggtagatctcaaaaattcagtaggactggacatagggaggtgactggagaaagatcattctaggagggaacagaatgaatatttcacagttcacagagttgatatggtagaacaaagggcactatcttggtccttctgctataatgcttgggtcaactacttgactggctgttccaactaaggaacaaagcgtttgaaatattttgattgcaacagcagctttccagtaagctgaaatacactctgcagcctacacagaagtacaaatcagacagagagataaggcagcaaacaacacctacttactttaaagcctcagctttctaagactcaaaaaggaaatcagcttcaaaggaatttaacattagcatgccatgaaacaattaccaggggtggttcgtatgtattgtttaattaaacttctttgaaaaggtctgggggctcgtggtggttctgagtataatttttattatttccatgttactatcctgtctctcaagttgaaacagacaagcaattgttgaaacagtgctggtctggaaaaaatcctgtatcaaca

SEQ ID NO: 166313 - DNA, 2809 bp, Homo sapiens
  Payload ID: 12747
  Gene Symbol: PKP3
  Gene Name: plakophilin 3
  Uniprot ID: Q9Y446
  ENST ID: ENST00000331563
  CDS Start-End: 77-2470
ggcctcgagggacaggacgtgaagatagttgggtttggaggcggccgccaggcccaggcccggtggacctgccgccatgcaggacggtaacttcctgctgtcggccctgcagcctgaggccggcgtgtgctccctggcgctgccctctgacctgcagctggaccgccggggcgccgaggggccggaggccgagcggctgcgggcagcccgcgtccaggagcaggtccgcgcccgcctcttgcagctgggacagcagccgcggcacaacggggccgctgagcccgagcctgaggccgagactgccagaggcacatccagggggcagtaccacaccctgcaggctggcttcagctctcgctctcagggcctgagtggggacaagacctcgggcttccggcccatcgccaagccggcctacagcccagcctcctggtcctcccgctccgccgtggatctgagctgcagtcggaggctgagttcagcccacaacgggggcagcgcctttggggccgctgggtacgggggtgcccagcccacccctcccatgcccaccaggcccgtgtccttccatgagcgcggtggggttgggagccgggccgactatgacacactctccctgcgctcgctgcggctggggcccgggggcctggacgaccgctacagcctggtgtctgagcagctggagcccgcggccacctccacctacagggcctttgcgtacgagcgccaggccagctccagctccagccgggcaggggggctggactggcccgaggccactgaggtttccccgagccggaccatccgtgcccctgccgtgcggaccctgcagcgattccagagcagccaccggagccgcggggtaggcggggcagtgccgggggccgtcctggagccagtggctcgagcgccatctgtgcgcagcctcagcctcagcctggctgactcgggccacctgccggacgtgcatgggttcaacagctacggtagccaccgaaccctgcagagactcagcagcggttttgatgacattgacctgccctcagcagtcaagtacctcatggcttcagaccccaacctgcaggtgctgggagcggcctacatccagcacaagtgctacagcgatgcagccgccaagaagcaggcccgcagccttcaggccgtgcctaggctggtgaagctcttcaaccacgccaaccaggaagtgcagcgccatgccacaggtgccatgcgcaacctcatctacgacaacgctgacaacaagctggccctggtggaggagaacgggatcttcgagctgctgcggacactgcgggagcaggatgatgagcttcgcaaaaatgtcacagggatcctgtggaacctttcatccagcgaccacctgaaggaccgcctggccagagacacgctggagcagctcacagacctggtgttgagccccctgtcgggggctgggggtccccccctcatccagcagaacgcctcggaggcagagatcttctacaacgccaccggcttcctcaggaacctcagctcagcctctcaggccactcgccagaagatgcgggagtgccacgggctggtggacgccctggtcacctctatcaaccacgccctggacgcgggcaaatgcgaggacaagagcgtggagaacgcggtgtgcgtcctgcggaacctgtcctaccgcctctacgacgagatgccgccgtccgcgctgcagcggctggagggtcgcggccgcagggacctggcgggggcgccgccgggagaggtcgtgggctgcttcacgccgcagagccggcggctgcgcgagctgcccctcgccgccgatgcgctcaccttcgcggaggtgtccaaggaccccaagggcctcgagtggctgtggagcccccagatcgtggggctgtacaaccggctgctgcagcgctgcgagctcaaccggcacacgacggaggcggccgccggggcgctgcagaacatcacggcaggcgaccgcaggtgggcgggggtgctgagccgcctggccctggagcaggagcgtattctgaaccccctgctagaccgtgtcaggaccgccgaccaccaccagctgcgctcactgactggcctcatccgaaacctgtctcggaacgctaggaacaaggacgagatgtccacgaaggtggtgagccacctgatcgagaagctgccgggcagcgtgggtgagaagtcgcccccagccgaggtgctggtcaacatcatagctgtgctcaacaacctggtggtggccagccccatcgctgcccgagacctgctgtattttgacggactccgaaagctcatcttcatcaagaagaagcgggacagccccgacagtgagaagtcctcccgggcagcatccagcctcctggccaacctgtggcagtacaacaagctccaccgtgacttccgggcgaagggctatcggaaggaggacttcctgggcccataggtgaagccttctggaggagaaggtgacgtggcccagcgtccaagggacagactcagctccaggctgcttggcagcccagcctggaggagaaggctaatgacggaggggcccctcgctggggcccctgtgtgcatctttgagggtcctgggccaccaggaggggcagggtcttatagctggggacttggcttccgcagggcagggggtggggcagggctcaaggctgctctggtgtatggggtggtgacccagtcacattggcagaggtgggggttggctgtggcctggcagtatcttgggatagccagcactgggaataaagatggccatgaacagtca

SEQ ID NO: 166314 - DNA, 940 bp, Homo sapiens
  Payload ID: 12747
  Gene Symbol: PKP3
  Gene Name: plakophilin 3
  ENST ID: ENST00000528036
  CDS Start-End: 472-940
ctcagggctgggcaggcgtctgtcttcaggcggctctggcctgaggccggcgtgtgctccctggcgctgccctctgacctgcagctggaccgccggggcgccgaggggccggaggccgagcggctgcgggcagcccgcgtccaggagcaggtccgcgcccgcctcttgcagctgggacagcagccgcggcacaacggggccgctgagcccgagcctgaggccgagactgccagaggcacatccagggggcagtaccacaccctgcaggctggcttcagctctcgctctcagggcctgagtggggacaagacctcgggcttccggcccatcgccaagccggcctacagcccagcctcctggtcctcccgctccgccgtggatctgagctgcagtcggaggctgagttcagcccacaacgggggcagcgcctttggggccgctgggtacgggggtgcccagcccacccctcccatgcccaccaggcccgtgtccttccatgagcgcggtggggttgggagccgggccgactatgacacactctccctgcgctcgctgcggctggggcccgggggcctggacgaccgctacagcctggtgtctgagcagctggagcccgcggccacctccacctacagggcctttgcgtacgagcgccaggccagctccagctccagccgggcaggggggctggactggcccgaggccactgaggtttccccgagccggaccatccgtgcccctgccgtgcggaccctgcagcgattccagagcagccaccggagccgcggggtaggcggggcagtgccgggggccgtcctggagccagtggctcgagcgccatctgtgcgcagcctcagcctcagcctggctgactcgggccacctgccggacgtgcatgggttcaacagctacggtagccaccgaaccctgcagagactca

SEQ ID NO: 166315 - DNA, 756 bp, Homo sapiens
  Payload ID: 12747
  Gene Symbol: PKP3
  Gene Name: plakophilin 3
  ENST ID: ENST00000534401
  CDS Start-End: 15-756
gcgccgggccagggatggagtcctggacacctcggccgtcagcagtggcctctgggatgagctgggaggctggcgggatccggaccacgagccggcctgaggccggcgtgtgctccctggcgctgccctctgacctgcagctggaccgccggggcgccgaggggccggaggccgagcggctgcgggcagcccgcgtccaggagcaggtccgcgcccgcctcttgcagctgggacagcagccgcggcacaacggggccgctgagcccgagcctgaggccgagactgccagaggcacatccagggggcagtaccacaccctgcaggctggcttcagctctcgctctcagggcctgagtggggacaagacctcgggcttccggcccatcgccaagccggcctacagcccagcctcctggtcctcccgctccgccgtggatctgagctgcagtcggaggctgagttcagcccacaacgggggcagcgcctttggggccgctgggtacgggggtgcccagcccacccctcccatgcccaccaggcccgtgtccttccatgagcgcggtggggttgggagccgggccgactatgacacactctccctgcgctcgctgcggctggggcccgggggcctggacgaccgctacagcctggtgtctgagcagctggagcccgcggccacctccacctacagggcctttgcgtacgagcgccaggccagctccagctccagccgggcaggggggctggactggcccg

SEQ ID NO: 166316 - DNA, 1111 bp, Homo sapiens
  Payload ID: 12747
  Gene Symbol: PKP3
  Gene Name: plakophilin 3
  ENST ID: ENST00000533249
  CDS Start-End: 519-1111
cctggggtgcaggagcagtggtgccagggtcccagaagccagagagggttttggaggcctctgtagggggtgagggggtcctggggcctgaggccggcgtgtgctccctggcgctgccctctgacctgcagctggaccgccggggcgccgaggggccggaggccgagcggctgcgggcagcccgcgtccaggagcaggtccgcgcccgcctcttgcagctgggacagcagccgcggcacaacggggccgctgagcccgagcctgaggccgagactgccagaggcacatccagggggcagtaccacaccctgcaggctggcttcagctctcgctctcagggcctgagtggggacaagacctcgggcttccggcccatcgccaagccggcctacagcccagcctcctggtcctcccgctccgccgtggatctgagctgcagtcggaggctgagttcagcccacaacgggggcagcgcctttggggccgctgggtacgggggtgcccagcccacccctcccatgcccaccaggcccgtgtccttccatgagcgcggtggggttgggagccgggccgactatgacacactctccctgcgctcgctgcggctggggcccgggggcctggacgaccgctacagcctggtgtctgagcagctggagcccgcggccacctccacctacagggcctttgcgtacgagcgccaggccagctccagctccagccgggcaggggggctggactggcccgaggccactgaggtttccccgagccggaccatccgtgcccctgccgtgcggaccctgcagcgattccagagcagccaccggagccgcggggtaggcggggcagtgccgggggccgtcctggagccagtggctcgagcgccatctgtgcgcagcctcagcctcagcctggctgactcgggccacctgccggacgtgcatgggttcaacagctacggtagccaccgaaccctgcagagactcagcagcggttttgatgacattgacctgccctcagcagtcaagtacctcatggcttcagaccccaacctgcaggtgctgggagcggcctacatccagcacaagtgctacagcgatgcagccgccaa

SEQ ID NO: 166317 - DNA, 687 bp, Homo sapiens
  Payload ID: 12747
  Gene Symbol: PKP3
  Gene Name: plakophilin 3
  ENST ID: ENST00000531857
  CDS Start-End: 51-687
agttgggtttggaggcggccgccaggcccaggcccggtggacctgccgccatgcaggacggtaacttcctgctgtcggccctgcagcctgaggccgagactgccagaggcacatccagggggcagtaccacaccctgcaggctggcttcagctctcgctctcagggcctgagtggggacaagacctcgggcttccggcccatcgccaagccggcctacagcccagcctcctggtcctcccgctccgccgtggatctgagctgcagtcggaggctgagttcagcccacaacgggggcagcgcctttggggccgctgggtacgggggtgcccagcccacccctcccatgcccaccaggcccgtgtccttccatgagcgcggtggggttgggagccgggccgactatgacacactctccctgcgctcgctgcggctggggcccgggggcctggacgaccgctacagcctggtgtctgagcagctggagcccgcggccacctccacctacagggcctttgcgtacgagcgccaggccagctccagctccagccgggcaggggggctggactggcccgaggccactgaggtttccccgagccggaccatccgtgcccctgccgtgcggaccctgcagcgattccagagcagccaccggagccgcggggtaggcggggcagtgccgggggccg

SEQ ID NO: 166318 - DNA, 847 bp, Homo sapiens
  Payload ID: 12747
  Gene Symbol: PKP3
  Gene Name: plakophilin 3
  ENST ID: ENST00000527442
  CDS Start-End: 488-847
gcagtggtgccagggtcccagaagccagagagggttttggaggcctctgtaggggcctgaggccggcgtgtgctccctggcgctgccctctgacctgcagctggaccgccggggcgccgaggggccggaggccgagcggctgcgggcagcccgcgtccaggagcaggtccgcgcccgcctcttgcagctgggacagcagccgcggcacaacggggccgctgagcccgagcctgaggccgagactgccagaggcacatccagggggcagtaccacaccctgcaggctggcttcagctctcgctctcagggcctgagtggggacaagacctcgggcttccggcccatcgccaagccggcctacagcccagcctcctggtcctcccgctccgccgtggatctgagctgcagtcggaggctgagttcagcccacaacgggggcagcgcctttggggccgctgggtacgggggtgcccagcccacccctcccatgcccaccaggcccgtgtccttccatgagcgcggtggggttgggagccgggccgactatgacacactctccctgcgctcgctgcggctggggcccgggggcctggacgaccgctacagcctggtgtctgagcagctggagcccgcggccacctccacctacagggcctttgcgtacgagcgccaggccagctccagctccagccgggcaggggggctggactggcccgaggccactgaggtttccccgagccggaccatccgtgcccctgccgtgcggaccctgcagcgattccagagcagccaccggagccgcggggtaggcggggcagtgccgggggccgtcctggagccagtggct

SEQ ID NO: 166319 - DNA, 495 bp, Homo sapiens
  Payload ID: 12747
  Gene Symbol: PKP3
  Gene Name: plakophilin 3
  ENST ID: ENST00000525642
  CDS Start-End: 1-347
attttgacggactccgaaagctcatcttcatcaagaagaagcgggacagccccgacagtgagaagtcctcccgggcagcatccagcctcctggccaacctgtggcagtacaacaagctccaccgtgacttccgggcggtacgtttcccgagcccagggcaagcagggacccgggtgcagggcatgggacgccgggggagggtcagtgaagaggcccatgggaggatggagaccagggacccagagaggaagggtccgggccacacccagcacactgcaggagggacagcgggcagagggccacatgggcagacatgcaccctgaccttgggcctctctccactgtagaagggctatcggaaggaggacttcctgggcccataggtgaagccttctggaggagaaggtgacgtggcccagcgtccaagggacagactcagctccaggctgcttggcagcccagcctggaggagaaggctaatgacggaggggcccc

SEQ ID NO: 166320 - DNA, 5777 bp, Homo sapiens
  Payload ID: 12748
  Gene Symbol: PKP4
  Gene Name: plakophilin 4
  Uniprot ID: Q99569
  ENST ID: ENST00000389757
  CDS Start-End: 126-3575
ggggcgggcagccgcgccgccgcggcacttttttaattttttcgggtgccgcagcggcgacccctcggcgccgatgtccctgatccctggagcgacgacggccgctgcctaagctggaaagaggaatgccagctcctgagcaggcctcattggtggaggaggggcaaccacagacccgccaggaagctgcctccactggcccaggcatggaacccgagaccacagccaccactattctagcatccgtgaaggagcaggagcttcagtttcagcgactcacccgagaactggaagtggaaaggcagattgttgccagtcagctagaaagatgtaggcttggagcagaatcaccaagcatcgccagcaccagctcaactgagaagtcatttccttggagatcaacagacgtgccaaatactggtgtaagcaaacctagagtttctgacgctgtccagcccaacaactatctcatcaggacagagccagaacaaggaaccctctattcaccagaacagacatctctccatgaaagtgagggatcattgggtaactcaagaagttcaacacaaatgaattcttattccgacagtggataccaggaagcagggagtttccacaacagccagaacgtgagcaaggcagacaacagacagcagcattcattcataggatcaactaacaaccatgtggtgaggaattcaagagctgaaggacaaacactggttcagccatcagtagccaatcgggccatgagaagagttagttcagttccatctagagcacagtctccttcttatgttatcagcacaggcgtgtctccttcaagggggtctctgagaacttctctgggtagtggatttggctctccgtcagtgaccgacccccgacctctgaaccccagtgcatattcctccaccacattacctgctgcacgggcagcctctccgtactcacagagacccgcctccccaacagctatacggcggattgggtcagtcacctcccggcagacctccaatcccaacggaccaacccctcaataccaaaccaccgccagagtggggtccccactgaccctgacggatgcacagactcgagtagcttccccatcccaaggccaggtggggtcgtcgtcccccaaacgctcagggatgaccgccgtaccacagcatctgggaccttcactgcaaaggactgttcatgacatggagcaattcggacagcagcagtatgacatttatgagaggatggttccacccaggccagacagcctgacaggcttacggagttcctatgctagtcagcatagtcagcttgggcaagaccttcgttctgccgtgtctcccgacttgcacattactcctatatatgaggggaggacctattacagcccagtgtaccgcagcccaaaccatggaactgtggagctccaaggatcgcagacggcgttgtatcgcacaggttcagtaggtattggaaatctacaaaggacatccagccaacgaagtacccttacataccaaagaaataattatgctctgaacacaacagctacctacgcggagccctacaggcctatacaataccgagtgcaagagtgcaattataacaggcttcagcatgcagtgccggctgatgatggcaccacaagatccccatcaatagacagcattcagaaggaccccagggagtttgcctggcgtgatcctgagttgcctgaggtcattcacatgcttcagcaccagttcccatctgttcaggcaaatgcagcggcctacctgcagcacctgtgctttggtgacaacaaagtgaagatggaggtgtgtaggttagggggaatcaagcatctggttgaccttctggaccacagagttttggaagttcagaagaatgcttgtggtgcccttcgaaacctcgtttttggcaagtctacagatgaaaataaaatagcaatgaagaatgttggtgggatacctgccttgttgcgactgttgagaaaatctattgatgcagaagtaagggagcttgttacaggagttctttggaatttatcctcatgtgatgctgtaaaaatgacaatcattcgagatgctctctcaaccttaacaaacactgtgattgttccacattctggatggaataactcttcttttgatgatgatcataaaattaaatttcagacttcactagttctgcgtaacacgacaggttgcctaaggaacctcagctccgcgggggaagaagctcggaagcaaatgcggtcctgcgaggggctggtagactcactgttgtatgtgatccacacgtgtgtgaacacatccgattacgacagcaagacggtggagaactgcgtgtgcaccctgaggaacctgtcctatcggctggagctggaggtgccccaggcccggttactgggactgaacgaattggatgacttactaggaaaagagtctcccagcaaagactctgagccaagttgctgggggaagaagaagaaaaagaaaaagaggactccgcaagaagatcaatgggatggagttggtcctatcccaggactgtcgaagtcccccaaaggggttgagatgctgtggcacccatcggtggtaaaaccatatctgactcttctagcagaaagttccaacccagccaccttggaaggctctgcagggtctctccagaacctctctgctggcaactggaagtttgcagcatatatccgggcggccgtccgaaaagaaaaggggctccccatccttgtggagcttctgagaatggataacgatagagttgtttcttccgtggcaacagccttgaggaatatggcactagatgttcgcaacaaggagctcataggcaaatacgccatgcgagacctggtcaaccggctccccggcggcaatggccccagtgtcttgtctgatgagaccatggcagccatctgctgtgctctgcacgaggtcaccagcaaaaacatggagaacgcaaaagccctggccgactcaggaggcatagagaagctggtgaacataaccaaaggcaggggcgacagatcatctctgaaagtggtgaaggcagcagcccaggtcttgaatacattatggcaatatcgggacctccggagcatttataaaaaggatgggtggaatcagaaccattttattacacctgtgtcgacattggagcgagaccgattcaaatcacatccttccttgtctaccaccaaccaacagatgtcacccatcattcagtcaggctccagcaaaccttcaccaatttacatcagttcctattcctcaccagcaagagaacaaaatagacggctacagcatcaacagctgtattatagtcaagatgactccaacagaaagaactttgatgcatacagattgtatttgcagtctcctcatagctatgaagatccttattttgatgaccgagttcactttccagcttctactgattactcaacacagtatggactgaaatcgaccacaaattatgtagacttttattccactaaacgaccttcttatagagcagaacagtacccagggtccccagactcatgggtgtagcatcaagatgcccaacagaggaactctttctttctaaccttgttcagattgaggtgaaaagtccatcttgctgatttgatgattgaaatgtgaaagtgaagtggaaggaatgaatgaagtgtgttttttttttcttttttgaggaattatcagggaagtgaggaaatgtttgggagaggactttctaagctctatttaggtgttagatctaattacttatagattctgtagtctggtgaaggtgtgggtgacgtgatgagaggtttgagaaatgggtgaaatgaaatgggggatatgtaggtcaaatcaaattaaagatgatttttttaatgtgaataaagttatgttctgatagtttgtacagaaaaaataaaatggatgcccatgttttattgctattactaaatgtcaagattgtatgctattatgtcttgtaaatttcttttgttggtgtaaatatggaaatgccacattggttaagtgccatcatttgtaatgcaatgtgtcacttgaaaagagatttgaagaaactgacaacttcaaaaacaaatgagaagcccaaggaactgtgagcaattaaaagcaaaccgcgacaccctttgtctccaccacacatagtgtactttggaagcacaacgtccaggctggtaccgcagcgccatgcccattcctcgcctcattcataggacacttcactgccattttctattcacataaaagaaaaataaatgtggaaatttcatccttggaaatgtgttctctattctttttaaattttctgtatgtatatggaaaagcagatttaataaacacaaatctaactgcatgttggaaacagcttaaatatatccaactattttggacttttcctagttttatatatactttgtgagatggaccacaccaaagaattaagctatgaactttccttctctgacaatctaggtatttttatttcttggaatctatttcaaatctagtacccttcacagttttatcatgtttttctatatggcagcccggccataactaaattgatataactaaattgataccttttttaggcatcatttttaagaactcagtaacttcataagaacagtggttgggcatttatttggttggcaccaatataataaaacaaattctaaattatgatcttgttgagtaattcctggattaggaatggggtaggggaaagaagccccacagtagggtaggcagaggtccccatagcaccacacagcattacttgggagcttttctccatctgtggaggcaatgagggacaccaggcccaaagtctgaggccttctcaggtcttgcagtttccacccttcagtcctagctcctggatctttgttggtgtaaatatggaaatgccacattggttaagtgccatcatggaaaactaggaactagtttacctgtagctgtactaggaaaactaggaactaacgcccatggcaagtcaaacccagaagtgttgtcttagctcaatataccctgcaagtgtaatacaaatcgcagattaaaacatttgtacttatatttgtgagtatatggaaagacacccaagagaaaactgcgttttcttgccgaatggacagcagcccaagatgagcatccaaagtgaaatggaaataccagtgcgagcatgaaagttcctaagatctgcaagccgggagcccttctggggtgccttctgaagaacactcgagccagcttgcggagtcgactgcccagctactgagccctggctgcctcatacctggcggagctcagcagacagcccttgttagatggcagaggtcgccagatgttcctgaggaactggcatcaggacttctgggacgtaaccacttcagtttccaatcactgacttccctgaacctggtatcttcagatctgggttgaagctgaaggctcagttggggaatcaggaaaacaagggaatcggagccagcccaagccaactgacaataactttcttttagtgactgcattagtttggggtaatgctgtaacaggcagcatttcaaaaacggatccaaatttgggttgaaaataactcacctgggtctccaatcagacctaacagagccagaaagaggcctgtacacggggactgggcagaagatctaatgccgtttaagactcctcccttgagaccagagaaaagaaactgcagacacagcctga

SEQ ID NO: 166321 - DNA, 4443 bp, Homo sapiens
  Payload ID: 12748
  Gene Symbol: PKP4
  Gene Name: plakophilin 4
  Uniprot ID: Q99569
  ENST ID: ENST00000389759
  CDS Start-End: 113-3691
gcgccgccgcggcacttttttaattttttcgggtgccgcagcggcgacccctcggcgccgatgtccctgatccctggagcgacgacggccgctgcctaagctggaaagaggaatgccagctcctgagcaggcctcattggtggaggaggggcaaccacagacccgccaggaagctgcctccactggcccaggcatggaacccgagaccacagccaccactattctagcatccgtgaaggagcaggagcttcagtttcagcgactcacccgagaactggaagtggaaaggcagattgttgccagtcagctagaaagatgtaggcttggagcagaatcaccaagcatcgccagcaccagctcaactgagaagtcatttccttggagatcaacagacgtgccaaatactggtgtaagcaaacctagagtttctgacgctgtccagcccaacaactatctcatcaggacagagccagaacaaggaaccctctattcaccagaacagacatctctccatgaaagtgagggatcattgggtaactcaagaagttcaacacaaatgaattcttattccgacagtggataccaggaagcagggagtttccacaacagccagaacgtgagcaaggcagacaacagacagcagcattcattcataggatcaactaacaaccatgtggtgaggaattcaagagctgaaggacaaacactggttcagccatcagtagccaatcgggccatgagaagagttagttcagttccatctagagcacagtctccttcttatgttatcagcacaggcgtgtctccttcaagggggtctctgagaacttctctgggtagtggatttggctctccgtcagtgaccgacccccgacctctgaaccccagtgcatattcctccaccacattacctgctgcacgggcagcctctccgtactcacagagacccgcctccccaacagctatacggcggattgggtcagtcacctcccggcagacctccaatcccaacggaccaacccctcaataccaaaccaccgccagagtggggtccccactgaccctgacggatgcacagactcgagtagcttccccatcccaaggccaggtggggtcgtcgtcccccaaacgctcagggatgaccgccgtaccacagcatctgggaccttcactgcaaaggactgttcatgacatggagcaattcggacagcagcagtatgacatttatgagaggatggttccacccaggccagacagcctgacaggcttacggagttcctatgctagtcagcatagtcagcttgggcaagaccttcgttctgccgtgtctcccgacttgcacattactcctatatatgaggggaggacctattacagcccagtgtaccgcagcccaaaccatggaactgtggagctccaaggatcgcagacggcgttgtatcgcacaggttcagtaggtattggaaatctacaaaggacatccagccaacgaagtacccttacataccaaagaaataattatgctctgaacacaacagctacctacgcggagccctacaggcctatacaataccgagtgcaagagtgcaattataacaggcttcagcatgcagtgccggctgatgatggcaccacaagatccccatcaatagacagcattcagaaggaccccagggagtttgcctggcgtgatcctgagttgcctgaggtcattcacatgcttcagcaccagttcccatctgttcaggcaaatgcagcggcctacctgcagcacctgtgctttggtgacaacaaagtgaagatggaggtgtgtaggttagggggaatcaagcatctggttgaccttctggaccacagagttttggaagttcagaagaatgcttgtggtgcccttcgaaacctcgtttttggcaagtctacagatgaaaataaaatagcaatgaagaatgttggtgggatacctgccttgttgcgactgttgagaaaatctattgatgcagaagtaagggagcttgttacaggagttctttggaatttatcctcatgtgatgctgtaaaaatgacaatcattcgagatgctctctcaaccttaacaaacactgtgattgttccacattctggatggaataactcttcttttgatgatgatcataaaattaaatttcagacttcactagttctgcgtaacacgacaggttgcctaaggaacctcagctccgcgggggaagaagctcggaagcaaatgcggtcctgcgaggggctggtagactcactgttgtatgtgatccacacgtgtgtgaacacatccgattacgacagcaagacggtggagaactgcgtgtgcaccctgaggaacctgtcctatcggctggagctggaggtgccccaggcccggttactgggactgaacgaattggatgacttactaggaaaagagtctcccagcaaagactctgagccaagttgctgggggaagaagaagaaaaagaaaaagaggactccgcaagaagatcaatgggatggagttggtcctatcccaggactgtcgaagtcccccaaaggggttgagatgctgtggcacccatcggtggtaaaaccatatctgactcttctagcagaaagttccaacccagccaccttggaaggctctgcagggtctctccagaacctctctgctggcaactggaagtttgcagcatatatccgggcggccgtccgaaaagaaaaggggctccccatccttgtggagcttctgagaatggataacgatagagttgtttcttccgtggcaacagccttgaggaatatggcactagatgttcgcaacaaggagctcataggcaaatacgccatgcgagacctggtcaaccggctccccggcggcaatggccccagtgtcttgtctgatgagaccatggcagccatctgctgtgctctgcacgaggtcaccagcaaaaacatggagaacgcaaaagccctggccgactcaggaggcatagagaagctggtgaacataaccaaaggcaggggcgacagatcatctctgaaagtggtgaaggcagcagcccaggtcttgaatacattatggcaatatcgggacctccggagcatttataaaaaggatgggtggaatcagaaccattttattacacctgtgtcgacattggagcgagaccgattcaaatcacatccttccttgtctaccaccaaccaacagatgtcacccatcattcagtcagtcggcagcacctcttcctcaccagcactgttaggaatcagagaccctcgctctgaatacgataggacccagccacctatgcagtattacaatagccaaggggatgccacacataaaggcctgtaccctggctccagcaaaccttcaccaatttacatcagttcctattcctcaccagcaagagaacaaaatagacggctacagcatcaacagctgtattatagtcaagatgactccaacagaaagaactttgatgcatacagattgtatttgcagtctcctcatagctatgaagatccttattttgatgaccgagttcactttccagcttctactgattactcaacacagtatggactgaaatcgaccacaaattatgtagacttttattccactaaacgaccttcttatagagcagaacagtacccagggtccccagactcatgggtgtagcatcaagatgcccaacagaggaactctttctttctaaccttgttcagattgaggtgaaaagtccatcttgctgatttgatgattgaaatgtgaaagtgaagtggaaggaatgaatgaagtgtgttttttttttcttttttgaggaattatcagggaagtgaggaaatgtttgggagaggactttctaagctctatttaggtgttagatctaattacttatagattctgtagtctggtgaaggtgtgggtgacgtgatgagaggtttgagaaatgggtgaaatgaaatgggggatatgtaggtcaaatcaaattaaagatgatttttttaatgtgaataaagttatgttctgatagtttgtacagaaaaaataaaatggatgcccatgttttattgctattactaaatgtcaagattgtatgctattatgtcttgtaaatttcttttgttggtgtaaatatggaaatgccacattggttaagtgccatcatttgtaatgcaatgtgtcacttgaaaagagatttgaagaaactgacaacttcaaaaacaaatgagaagcccaaggaactgtgagcaattaaaagcaaaccgcgacaccctttgtctccaccacacatagtgtactttggaagcacaacgtccaggctggtaccgcagcgccatgcccattcctcgcctcattcataggacacttcactgccattttctattcacataaaagaaaaataaatgtggaaatttcatccttggaaa

SEQ ID NO: 166322 - DNA, 520 bp, Homo sapiens
  Payload ID: 12748
  Gene Symbol: PKP4
  Gene Name: plakophilin 4
  ENST ID: ENST00000457109
  CDS Start-End: 111-272
gccgccgcggcacttttttaattttttcgggtgccgcagcggcgacccctcggcgccgatgtccctgatccctggagcgacgacggccgctgcctaagctggaaagaggaatgccagctcctgagcaggcctcattggtggaggaggggcaaccacagacccgccaggaagctgcctccactggcccaggcatggaacccgagaccacagccaccactattctagcatccgtgaaggagcaggtgtttacatccctgagtacattgggatgactggcatgtagagccgctccaggtgccagtcagaatcggaacatgcaggatacttgtgcgtctgcaagagcttcagtttcagcgactcacccgagaactggaagtggaaaggcagattgttgccagtcagctagaaagatgtaggcttggagcagaatcaccaagcatcgccagcaccagctcaactgagaagtcatttccttggagatcaacagacgtgccaaatactggtgtaagcaaacctagag

SEQ ID NO: 166323 - DNA, 552 bp, Homo sapiens
  Payload ID: 12748
  Gene Symbol: PKP4
  Gene Name: plakophilin 4
  ENST ID: ENST00000411900
  CDS Start-End: 89-376
tttttcgggtgccgcagcggcgacccctcggcgccgatgtccctgatccctggagcgacgacggccgctgcctaagctggaaagaggaatgccagctcctgagcaggcctcattggtggaggaggggcaaccacagacccgccaggaagctgcctccactggcccaggcatggaacccgagaccacagccaccactattctagcatccgtgaaggagcaggagcttcagtttcagcgactcacccgagaactggaagtggaaaggcagattgttgccagtcagctagaaagatgtaggcttggagcagaatcaccaagcatcgccagcaccagtatcttgtgttactcatgggcaaaaaaacttcttagtgaatagaattctgtctgttgtttctgattgttggtatgaacattaaactattgggctgatcttgctggtttgaagcagctttctgaagtagctcaacagttgccacccccttgagcagtagctacaaagagacaagcttagaaatttgccttctatcagcaagagaccattgtgcgtaacta

SEQ ID NO: 166324 - DNA, 3099 bp, Homo sapiens
  Payload ID: 12748
  Gene Symbol: PKP4
  Gene Name: plakophilin 4
  ENST ID: ENST00000421462
  CDS Start-End: 859-1509
ttgcttttcccggcgattcctctccccggtctcccgtacgcgcagcgcacgacctctgcccacgctgggctgttcggattcagagctcccagccccgaacttgagcgccgcgctgagccctgctggacgccctcgcggcggcttccccgctgcctgccgccgcgcgccccaagtcgccctcgacaccactgggcgcccgccctcctcagcactcggggccggctgtctgtccttctagccccagatcctgcaccttggtcccctccccgtcttcccacgcccctgctgcccgcgcggtcttgcgtttgtccccgaagtcctgtactccttgccggtcctgcccacccctctgcctagtgcgcccctctctaccggccgcggatcctcacgctccacccctcccggctccccagcgccgagcctcgccgctgccctcctgcgccgccgcttcctcctctccctgccaggagttgaagcggagctgcggcacctccctggcggatctggtatccccgcccgctgccgaggctgccggccctctcccctggaccgctacccggagagcgagcggcggggccgggatttggctgcgtgttggctgagtgcgacacaccgcgagcgcgggcagtggaggtgccgcggcggccgtggccgctcggggcgcagcggtagtcaggtgtgtgtgtacagcgggggacgcgcgctgccggctcctgggctggcgacagattgtgcaggaatgcgaggaatgcaccaggggcagagtccacacagcccgccgcggctgccctagcgccttccctccccagctctcgccgcgcagccagaggtcaccggagcatcttcggagctggaggaatgccagctcctgagcaggcctcattggtggaggaggggcaaccacagacccgccaggaagctgcctccactggcccaggcatggaacccgagaccacagccaccactattctagcatccgtgaaggagcaggagcttcagtttcagcgactcacccgagaactggaagtggaaaggcagattgttgccagtcagctagaaagatgtaggcttggagcagaatcaccaagcatcgccagcaccagctcaactgagaagtcatttccttggagatcaacagacgtgccaaatactggtgtaagcaaacctagagtttctgacgctgtccagcccaacaactatctcatcaggacagagccagaacaaggaaccctctattcaccagaacagacatctctccatgaaagtgagggatcattgggtaactcaagaagttcaacacaaatgaattcttattccgacagtggataccaggaagcagggagtttccacaacagccagaacgtgagcaaggcagacaacagacagcagcattcattcataggatcaactaacaaccatgtggtgaggaattcaagagctgaaggacaaacactggttcagcacaggcgtgtctccttcaagggggtctctgagaacttctctgggtagtggatttggctctccgtcagtgaccgacccccgacctctgaaccccagtgcatattcctccaccacattacctgctgcacgggcagcctctccgtactcacagagacccgcctccccaacagctatacggcggattgggtcagtcacctcccggcagacctccaatcccaacggaccaacccctcaataccaaaccaccgccagagtggggtccccactgaccctgacggatgcacagactcgagtagcttccccatcccaaggccaggtggggtcgtcgtcccccaaacgctcagggatgaccgccgtaccacagcatctgggaccttcactgcaaaggactgttcatgacatggagcaattcggacagcagcagtatgacatttatgagaggatggttccacccaggccagacagcctgacaggcttacggagttcctatgctagtcagcatagtcagcttgggcaagaccttcgttctgccgtgtctcccgacttgcacattactcctatatatgaggggaggacctattacagcccagtgtaccgcagcccaaaccatggaactgtggagctccaaggatcgcagacggcgttgtatcgcacaggttcagtaggtattggaaatctacaaaggacatccagccaacgaagtacccttacataccaaagaaataattatgctctgaacacaacagctacctacgcggagccctacaggcctatacaataccgagtgcaagagtgcaattataacaggcttcagcatgcagtgccggctgatgatggcaccacaagatccccatcaatagacagcattcagaaggaccccagggagtttgcctggcgtgatcctgagttgcctgaggtcattcacatgcttcagcaccagttcccatctgttcaggcaaatgcagcggcctacctgcagcacctgtgctttggtgacaacaaagtgaagatggaggtgtgtaggttagggggaatcaagcatctggttgaccttctggaccacagagttttggaagttcagaagaatgcttgtggtgcccttcgaaacctcgtttttggcaagtctacagatgaaaataaaatagcaatgaagaatgttggtgggatacctgccttgttgcgactgttgagaaaatctattgatgcagaagtaagggagcttgttacaggagttctttggaatttatcctcatgtgatgctgtaaaaatgacaatcattcgagatgctctctcaaccttaacaaacactgtgattgttccacattctggatggaataactcttcttttgatgatgatcataaaattaaatttcagacttcactagttctgcgtaacacgacaggttgcctaaggaacctcagctccgcgggggaagaagctcggaagcaaatgcggtcctgcgaggggctggtagactcactgttgtatgtgatccacacgtgtgtgaacacatccgattacgacagcaagacggtggagaactgcgtgtgcaccctgaggaacctgtcctatcggctggagctggaggtgccccaggcccggttactgggactgaacgaattggatgacttactagg

SEQ ID NO: 166325 - DNA, 4134 bp, Homo sapiens
  Payload ID: 12748
  Gene Symbol: PKP4
  Gene Name: plakophilin 4
  ENST ID: ENST00000426248
  CDS Start-End: 261-911
tccggggctgagtccgcgtcgacgccggccgcggaggcggcaccatgggcaaggggtagaggggcaagttggccaccgccgccgccgggggtggtgggagagccgctccgggggcgggggccggtgggggagggaggggcgggcagccgcgccgccgcggcacttttttaattttttcgggtgccgcagcggcgacccctcggcgccgatgtccctgatccctggagcgacgacggccgctgcctaagctggaaagaggaatgccagctcctgagcaggcctcattggtggaggaggggcaaccacagacccgccaggaagctgcctccactggcccaggcatggaacccgagaccacagccaccactattctagcatccgtgaaggagcaggagcttcagtttcagcgactcacccgagaactggaagtggaaaggcagattgttgccagtcagctagaaagatgtaggcttggagcagaatcaccaagcatcgccagcaccagctcaactgagaagtcatttccttggagatcaacagacgtgccaaatactggtgtaagcaaacctagagtttctgacgctgtccagcccaacaactatctcatcaggacagagccagaacaaggaaccctctattcaccagaacagacatctctccatgaaagtgagggatcattgggtaactcaagaagttcaacacaaatgaattcttattccgacagtggataccaggaagcagggagtttccacaacagccagaacgtgagcaaggcagacaacagacagcagcattcattcataggatcaactaacaaccatgtggtgaggaattcaagagctgaaggacaaacactggttcagcacaggcgtgtctccttcaagggggtctctgagaacttctctgggtagtggatttggctctccgtcagtgaccgacccccgacctctgaaccccagtgcatattcctccaccacattacctgctgcacgggcagcctctccgtactcacagagacccgcctccccaacagctatacggcggattgggtcagtcacctcccggcagacctccaatcccaacggaccaacccctcaataccaaaccaccgccagagtggggtccccactgaccctgacggatgcacagactcgagtagcttccccatcccaaggccaggtggggtcgtcgtcccccaaacgctcagggatgaccgccgtaccacagcatctgggaccttcactgcaaaggactgttcatgacatggagcaattcggacagcagcagtatgacatttatgagaggatggttccacccaggccagacagcctgacaggcttacggagttcctatgctagtcagcatagtcagcttgggcaagaccttcgttctgccgtgtctcccgacttgcacattactcctatatatgaggggaggacctattacagcccagtgtaccgcagcccaaaccatggaactgtggagctccaaggatcgcagacggcgttgtatcgcacaggttcaggtattggaaatctacaaaggacatccagccaacgaagtacccttacataccaaagaaataattatgctctgaacacaacagctacctacgcggagccctacaggcctatacaataccgagtgcaagagtgcaattataacaggcttcagcatgcagtgccggctgatgatggcaccacaagatccccatcaatagacagcattcagaaggaccccagggagtttgcctggcgtgatcctgagttgcctgaggtcattcacatgcttcagcaccagttcccatctgttcaggcaaatgcagcggcctacctgcagcacctgtgctttggtgacaacaaagtgaagatggaggtgtgtaggttagggggaatcaagcatctggttgaccttctggaccacagagttttggaagttcagaagaatgcttgtggtgcccttcgaaacctcgtttttggcaagtctacagatgaaaataaaatagcaatgaagaatgttggtgggatacctgccttgttgcgactgttgagaaaatctattgatgcagaagtaagggagcttgttacaggagttctttggaatttatcctcatgtgatgctgtaaaaatgacaatcattcgagatgctctctcaaccttaacaaacactgtgattgttccacattctggatggaataactcttcttttgatgatgatcataaaattaaatttcagacttcactagttctgcgtaacacgacaggttgcctaaggaacctcagctccgcgggggaagaagctcggaagcaaatgcggtcctgcgaggggctggtagactcactgttgtatgtgatccacacgtgtgtgaacacatccgattacgacagcaagacggtggagaactgcgtgtgcaccctgaggaacctgtcctatcggctggagctggaggtgccccaggcccggttactgggactgaacgaattggatgacttactaggaaaagagtctcccagcaaagactctgagccaagttgctgggggaagaagaagaaaaagaaaaagaggactccgcaagaagatcaatgggatggagttggtcctatcccaggactgtcgaagtcccccaaaggggttgagatgctgtggcacccatcggtggtaaaaccatatctgactcttctagcagaaagttccaacccagccaccttggaaggctctgcagggtctctccagaacctctctgctggcaactggaagtttgcagcatatatccgggcggccgtccgaaaagaaaaggggctccccatccttgtggagcttctgagaatggataacgatagagttgtttcttccgtggcaacagccttgaggaatatggcactagatgttcgcaacaaggagctcataggcaaatacgccatgcgagacctggtcaaccggctccccggcggcaatggccccagtgtcttgtctgatgagaccatggcagccatctgctgtgctctgcacgaggtcaccagcaaaaacatggagaacgcaaaagccctggccgactcaggaggcatagagaagctggtgaacataaccaaaggcaggggcgacagatcatctctgaaagtggtgaaggcagcagcccaggtcttgaatacattatggcaatatcgggacctccggagcatttataaaaaggatgggtggaatcagaaccattttattacacctgtgtcgacattggagcgagaccgattcaaatcacatccttccttgtctaccaccaaccaacagatgtcacccatcattcagtcagtcggcagcacctcttcctcaccagcactgttaggaatcagagaccctcgctctgaatacgataggacccagccacctatgcagtattacaatagccaaggggatgccacacataaaggcctgtaccctggctccagcaaaccttcaccaatttacatcagttcctattcctcaccagcaagagaacaaaatagacggctacagcatcaacagctgtattatagtcaagatgactccaacagaaagaactttgatgcatacagattgtatttgcagtctcctcatagctatgaagatccttattttgatgaccgagttcactttccagcttctactgattactcaacacagtatggactgaaatcgaccacaaattatgtagacttttattccactaaacgaccttcttatagagcagaacagtacccagggtccccagactcatgggtgtagcatcaagatgcccaacagaggaactctttctttctaaccttgttcagattgaggtgaaaagtccatcttgctgatttgatgattgaaatgtgaaagtgaagtggaaggaatgaatgaagtgtgttttttttttcttttttgaggaattatcagggaagtgaggaaatgtttgggagaggactttctaagctctatttaggtgttagatctaattacttatagattctgtagtctggtgaaggtgtgggtgacgtgatgagaggtttgagaaatgggtgaaatgaaatgggggatatgtaggtcaaatcaaattaaagatgatttttttaatgtgaataaagttatgttctgatagtttgtacagaaaaaataaaa

SEQ ID NO: 166326 - DNA, 2359 bp, Homo sapiens
  Payload ID: 12748
  Gene Symbol: PKP4
  Gene Name: plakophilin 4
  ENST ID: ENST00000452162
  CDS Start-End: 92-232
aattttttcgggtgccgcagcggcgacccctcggcgccgatgtccctgatccctggagcgacgacggccgctgcctaagctggaaagaggaatgccagctcctgagcaggcctcattggtggaggaggggcaaccacagacccgccaggaagctgcctccactggcccaggcatggaacccgagaccacagccaccactattctagcatccgtgaaggagcagctcaactgagaagtcatttccttggagatcaacagacgtgccaaatactggtgtaagcaaacctagagtttctgacgctgtccagcccaacaactatctcatcaggacagagccagaacaaggaaccctctattcaccagaacagacatctctccatgaaagtgagggatcattgggtaactcaagaagttcaacacaaatgaattcttattccgacagtggataccaggaagcagggagtttccacaacagccagaacgtgagcaaggcagacaacagacagcagcattcattcataggatcaactaacaaccatgtggtgaggaattcaagagctgaaggacaaacactggttcagccatcagtagccaatcgggccatgagaagagttagttcagttccatctagagcacagtctccttcttatgttatcagcacaggcgtgtctccttcaagggggtctctgagaacttctctgggtagtggatttggctctccgtcagtgaccgacccccgacctctgaaccccagtgcatattcctccaccacattacctgctgcacgggcagcctctccgtactcacagagacccgcctccccaacagctatacggcggattgggtcagtcacctcccggcagacctccaatcccaacggaccaacccctcaataccaaaccaccgccagagtggggtccccactgaccctgacggatgcacagactcgagtagcttccccatcccaaggccaggtggggtcgtcgtcccccaaacgctcagggatgaccgccgtaccacagcatctgggaccttcactgcaaaggactgttcatgacatggagcaattcggacagcagcagtatgacatttatgagaggatggttccacccaggccagacagcctgacaggcttacggagttcctatgctagtcagcatagtcagcttgggcaagaccttcgttctgccgtgtctcccgacttgcacattactcctatatatgaggggaggacctattacagcccagtgtaccgcagcccaaaccatggaactgtggagctccaaggatcgcagacggcgttgtatcgcacaggttcagtaggtattggaaatctacaaaggacatccagccaacgaagtacccttacataccaaagaaataattatgctctgaacacaacagctacctacgcggagccctacaggcctatacaataccgagtgcaagagtgcaattataacaggcttcagcatgcagtgccggctgatgatggcaccacaagatccccatcaatagacagcattcagaaggaccccagggagtttgcctggcgtgatcctgagttgcctgaggtcattcacatgcttcagcaccagttcccatctgttcaggcaaatgcagcggcctacctgcagcacctgtgctttggtgacaacaaagtgaagatggaggtgtgtaggttagggggaatcaagcatctggttgaccttctggaccacagagttttggaagttcagaagaatgcttgtggtgcccttcgaaacctcgtttttggcaagtctacagatgaaaataaaatagcaatgaagaatgttggtgggatacctgccttgttgcgactgttgagaaaatctattgatgcagaagtaagggagcttgttacaggagttctttggaatttatcctcatgtgatgctgtaaaaatgacaatcattcgagatgctctctcaaccttaacaaacactgtgattgttccacattctggatggaataactcttcttttgatgatgatcataaaattaaatttcagacttcactagttctgcgtaacacgacaggttgcctaaggaacctcagctccgcgggggaagaagctcggaagcaaatgcggtcctgcgaggggctggtagactcactgttgtatgtgatccacacgtgtgtgaacacatccgattacgacagcaagacggtggagaactgcgtgtgcaccctgaggaacctgtcctatcggctggagctggaggtgccccaggcccggttactgggactgaacgaattggatgacttactaggaaaagagtctcccagcaaagactctgagccaagttgctgggggaagaagaagaaaaagaaaaa

SEQ ID NO: 166327 - DNA, 884 bp, Homo sapiens
  Payload ID: 12748
  Gene Symbol: PKP4
  Gene Name: plakophilin 4
  ENST ID: ENST00000481115
  CDS Start-End: 1-500
gatgtaggcttggagcagaatcaccaagcatcgccagcaccagctcaactgagaagtcatttccttggagatcaacagacgtgccaaatactggtgtaagcaaacctagagtttctgacgctgtccagcccaacaactatctcatcaggacagagccagaacaaggaaccctctattcaccagaacagacatctctccatgaaagtgagggatcattgggtaactcaagaagttcaacacaaatgaattcttattccgacagtggataccaggaagcagggagtttccacaacagccagaacgtgagcaaggcagacaacagacagcagcattcattcataggatcaactaacaaccatgtggtgaggaattcaagagctgaaggacaaacactggttcagctatacggcggattgggtcagtcacctcccggcagacctccaatcccaacggaccaacccctcaataccaaaccaccgccagagtggggtccccactgaccctgacggatgcacagactcgagtagcttccccatcccaaggccaggtggggtcgtcgtcccccaaacgctcagggatgaccgccgtaccacagcatctgggaccttcactgcaaaggactgttcatgacatggagcaattcggacagcagcagtatgacatttatgagaggatggttccacccaggccagacagcctgacaggcttacggagttcctatgctagtcagcatagtcagcttgggcaagaccttcgttctgccgtgtctcccgacttgcacattactcctatatatgaggggaggacctattacagcccagtgtaccgcagcccaaaccatggaactgtggagctccaaggatcgcagacggcgttgtatcgca

SEQ ID NO: 166328 - DNA, 3856 bp, Homo sapiens
  Payload ID: 12748
  Gene Symbol: PKP4
  Gene Name: plakophilin 4
  ENST ID: ENST00000628904
  CDS Start-End: 128-3754
gaggggcgggcagccgcgccgccgcggcacttttttaattttttcgggtgccgcagcggcgacccctcggcgccgatgtccctgatccctggagcgacgacggccgctgcctaagctggaaagaggaatgccagctcctgagcaggcctcattggtggaggaggggcaaccacagacccgccaggaagctgcctccactggcccaggcatggaacccgagaccacagccaccactattctagcatccgtgaaggagcaggagcttcagtttcagcgactcacccgagaactggaagtggaaaggcagattgttgccagtcagctagaaagatgtaggcttggagcagaatcaccaagcatcgccagcaccagctcaactgagaagtcatttccttggagatcaacagacgtgccaaatactggtgtaagcaaacctagagtttctgacgctgtccagcccaacaactatctcatcaggacagagccagaacaaggaaccctctattcaccagaacagacatctctccatgaaagtgagggatcattgggtaactcaagaagttcaacacaaatgaattcttattccgacagtggataccaggaagcagggagtttccacaacagccagaacgtgagcaaggcagacaacagacagcagcattcattcataggatcaactaacaaccatgtggtgaggaattcaagagctgaaggacaaacactggttcagccatcagtagccaatcgggccatgagaagagttagttcagttccatctagagcacagtctccttcttatgttatcagcacaggcgtgtctccttcaagggggtctctgagaacttctctgggtagtggatttggctctccgtcagtgaccgacccccgacctctgaaccccagtgcatattcctccaccacattacctgctgcacgggcagcctctccgtactcacagagacccgcctccccaacagctatacggcggattgggtcagtcacctcccggcagacctccaatcccaacggaccaacccctcaataccaaaccaccgccagagtggggtccccactgaccctgacggatgcacagactcgagtagcttccccatcccaaggccaggtggggtcgtcgtcccccaaacgctcagggatgaccgccgtaccacagcatctgggaccttcactgcaaaggactgttcatgacatggagcaattcggacagcagcagtatgacatttatgagaggatggttccacccaggccagacagcctgacaggcttacggagttcctatgctagtcagcatagtcagcttgggcaagaccttcgttctgccgtgtctcccgacttgcacattactcctatatatgaggggaggacctattacagcccagtgtaccgcagcccaaaccatggaactgtggagctccaaggatcgcagacggcgttgtatcgcacaggttcaggtattggaaatctacaaaggacatccagccaacgaagtacccttacataccaaagaaataattatgctctgaacacaacagctacctacgcggagccctacaggcctatacaataccgagtgcaagagtgcaattataacaggcttcagcatgcagtgccggctgatgatggcaccacaagatccccatcaatagacagcattcagaaggaccccagggagtttgcctggcgtgatcctgagttgcctgaggtcattcacatgcttcagcaccagttcccatctgttcaggcaaatgcagcggcctacctgcagcacctgtgctttggtgacaacaaagtgaagatggaggtgtgtaggttagggggaatcaagcatctggttgaccttctggaccacagagttttggaagttcagaagaatgcttgtggtgcccttcgaaacctcgtttttggcaagtctacagatgaaaataaaatagcaatgaagaatgttggtgggatacctgccttgttgcgactgttgagaaaatctattgatgcagaagtaagggagcttgttacaggagttctttggaatttatcctcatgtgatgctgtaaaaatgacaatcattcgagatgctctctcaaccttaacaaacactgtgattgttccacattctggatggaataactcttcttttgatgatgatcataaaattaaatttcagacttcactagttctgcgtaacacgacaggttgcctaaggaacctcagctccgcgggggaagaagctcggaagcaaatgcggtcctgcgaggggctggtagactcactgttgtatgtgatccacacgtgtgtgaacacatccgattacgacagcaagacggtggagaactgcgtgtgcaccctgaggaacctgtcctatcggctggagctggaggtgccccaggcccggttactgggactgaacgaattggatgacttactaggaaaagagtctcccagcaaagactctgagccaagttgctgggggaagaagaagaaaaagaaaaagaggactccgcaagaagatcaatgggatggagttggtcctatcccaggactgtcgaagtcccccaaaggggttgagatgctgtggcacccatcggtggtaaaaccatatctgactcttctagcagaaagttccaacccagccaccttggaaggctctgcagggtctctccagaacctctctgctggcaactggaagtttgcagcatatatccggggccgtccgaaaagaaaagggctccccatccttgtggagcttctgagaatggataacgatagagttgtttcttccgtggcaacagccttgaggaatatggcactagatgttcgcaacaaggagctcataggcaaatacgccatgcgagacctggtcaaccggctccccggcggcaatggccccagtgtcttgtctgatgagaccatggcagccatctgctgtgctctgcacgaggtcaccagcaaaaacatggagaacgcaaaagccctggccgactcaggaggcatagagaagctggtgaacataaccaaaggcaggggcgacagatcatctctgaaagtggtgaaggcagcagcccaggtcttgaatacattatggcaatatcgggacctccggagcatttataaaaaggatgggtggaatcagaaccattttattacacctgtgtcgacattggagcgagaccgattcaaatcacatccttccttgtctaccaccaaccaacagatgtcacccatcattcagtcagtcggcagcacctcttcctcaccagcactgttaggaatcagagaccctcgctctgaatacgataggacccagccacctatgcagtattacaatagccaaggggatgccacacataaaggcctgtaccctggctccagcaaaccttcaccaatttacatcagttcctattcctcaccagcaagagaacaaaatagacggctacagcatcaacagctgtattatagtcaagatgactccaacagaaagaactttgatgcatacagattgtatttgcagtctcctcatagctatgaagatccttattttgatgaccgagttcactttccagcttctactgattactcaacacagtatggactgaaatcgaccacaaattatgtagacttttattccactaaacgaccttcttatagagcagaacagtacccagggtccccagactcatgggtgcatcaagatgcccaacagaggaactctttctttctaaccttgttcagattgaggtgaaaagtccatcttgctgatttgatgattgaaatgtgaaagtgaagtggaaggaatgaatgaagtgtgttttttttttcttttttgaggaattatcagggaagt

SEQ ID NO: 166329 - DNA, 162 bp, Homo sapiens
  Payload ID: 12748
  Gene Symbol: PKP4
  Gene Name: plakophilin 4
  ENST ID: ENST00000629219
  CDS Start-End: 1-162
atgccagctcctgagcaggcctcattggtggaggaggggcaaccacagacccgccaggaagctgcctccactggcccaggcatggaacccgagaccacagccaccactattctagcatccgtgaaggagcaggtgtttacatccctgagtacattgggatga

SEQ ID NO: 166330 - DNA, 2305 bp, Homo sapiens
  Payload ID: 12749
  Gene Symbol: PLVAP
  Gene Name: plasmalemma vesicle associated protein
  Uniprot ID: Q9BX97
  ENST ID: ENST00000252590
  CDS Start-End: 63-1391
cgggggccagagcaggcctggtggtgagcagggacggtgcaccggacggcgggatcgagcaaatgggtctggccatggagcacggagggtcctacgctcgggcggggggcagctctcggggctgctggtattacctgcgctacttcttcctcttcgtctccctcatccaattcctcatcatcctggggctcgtgctcttcatggtctatggcaacgtgcacgtgagcacagagtccaacctgcaggccaccgagcgccgagccgagggcctatacagtcagctcctagggctcacggcctcccagtccaacttgaccaaggagctcaacttcaccacccgcgccaaggatgccatcatgcagatgtggctgaatgctcgccgcgacctggaccgcatcaatgccagcttccgccagtgccagggtgaccgggtcatctacacgaacaatcagaggtacatggctgccatcatcttgagtgagaagcaatgcagagatcaattcaaggacatgaacaagagctgcgatgccttgctcttcatgctgaatcagaaggtgaagacgctggaggtggagatagccaaggagaagaccatttgcactaaggataaggaaagcgtgctgctgaacaaacgcgtggcggaggaacagctggttgaatgcgtgaaaacccgggagctgcagcaccaagagcgccagctggccaaggagcaactgcaaaaggtgcaagccctctgcctgcccctggacaaggacaagtttgagatggaccttcgtaacctgtggagggactccattatcccacgcagcctggacaacctgggttacaacctctaccatcccctgggctcggaattggcctccatccgcagagcctgcgaccacatgcccagcctcatgagctccaaggtggaggagctggcccggagcctccgggcggatatcgaacgcgtggcccgcgagaactcagacctccaacgccagaagctggaagcccagcagggcctgcgggccagtcaggaggcgaaacagaaggtggagaaggaggctcaggcccgggaggccaagctccaagctgaatgctcccggcagacccagctagcgctggaggagaaggcggtgctgcggaaggaacgagacaacctggccaaggagctggaagagaagaagagggaggcggagcagctcaggatggagctggccatcagaaactcagccctggacacctgcatcaagaccaagtcgcagccgatgatgccagtgtcaaggcccatgggccctgtccccaacccccagcccatcgacccagctagcctggaggagttcaagaggaagatcctggagtcccagaggccccctgcaggcatccctgtagccccatccagtggctgaggaggctccaggcctgaggaccaagggatggcccgactcggcggtttgcggaggatgcagggatatgctcacagcgcccgacacaaccccctcccgccgcccccaaccacccagggccaccatcagacaactccctgcatgcaaacccctagtaccctctcacacccgcacccgcgcctcacgatccctcacccagagcacacggccgcggagatgacgtcacgcaagcaacggcgctgacgtcacatatcaccgtggtgatggcgtcacgtggccatgtagacgtcacgaagagatatagcgatggcgtcgtgcagatgcagcacgtcgcacacagacatggggaacttggcatgacgtcacaccgagatgcagcaacgacgtcacgggccatgtcgacgtcacacatattaatgtcacacagacgcggcgatggcatcacacagacggtgatgatgtcacacacagacacagtgacaacacacaccatgacaacgacacctatagatatggcaccaacatcacatgcacgcatgccctttcacacacactttctacccaattctcacctagtgtcacgttcccccgaccctggcacacgggccaaggtacccacaggatcccatcccctcccgcacagccctgggccccagcacctcccctcctccagcctcctggcctcccagccacttcctcacccccagtgcctggacccggaggtgagaacaggaagccattcacctccgctccttgagcgtgagtgtttccaggaccccctcggggccctgagccgggggtgagggtcacctgttgtcgggaggggagccactccttctcccccaactcccagccctgcctgtggcccgttgaaatgttggtggcacttaataaatattagtaaatccttcaaagac

SEQ ID NO: 166331 - DNA, 272 bp, Homo sapiens
  Payload ID: 12749
  Gene Symbol: PLVAP
  Gene Name: plasmalemma vesicle associated protein
  ENST ID: ENST00000595816
  CDS Start-End: 1-160
gagtgagaagcaatgcagagatcaattcaaggacatgaacaagagctgcgatgccttgctcttcatgctgaatcagaaggtgagaacaggaagccattcacctccgctccttgagcgtgagtgtttccaggaccccctcggggccctgagccgggggtgagggtcacctgttgtcgggaggggagccactccttctcccccaactcccagccctgcctgtggcccgttgaaatgttggtggcacttaataaatattagtaaatccttcaaag

SEQ ID NO: 166332 - DNA, 620 bp, Homo sapiens
  Payload ID: 12749
  Gene Symbol: PLVAP
  Gene Name: plasmalemma vesicle associated protein
  ENST ID: ENST00000599426
  CDS Start-End: 55-620
agagcaggcctggtggtgagcagggacggtgcaccggacggcgggatcgagcaaatgggtctggccatggagcacggagggtcctacgctcgggcggggggcagctctcggggctgctggtattacctgcgctacttcttcctcttcgtctccctcatccaattcctcatcatcctggggctcgtgctcttcatggtctatggcaacgtgcacgtgagcacagagtccaacctgcaggccaccgagcgccgagccgagggcctatacagtcagctcctagggctcacggcctcccagtccaacttgaccaaggagctcaacttcaccacccgcgccaaggatgccatcatgcagatgtggctgaatgctcgccgcgacctggaccgcatcaatgccagcttccgccagtgccagggtgaccgggtcatctacacgaacaatcagaggtacatggctgccatcatcttgagtgagaagcaatgcagagatcaattcaaggacatgaacaagagctgcgatgccttgctcttcatgctgaatcagaaggtgaagacgctggaggtggagatagccaagctccaagctgaatgctcccggcagacccagctagcgctggagga

SEQ ID NO: 166333 - DNA, 2741 bp, Homo sapiens
  Payload ID: 12750
  Gene Symbol: PLG
  Gene Name: plasminogen
  Uniprot ID: P00747
  ENST ID: ENST00000308192
  CDS Start-End: 64-2496
atgtaagtcaacaacatcctgggattgggacccactttctgggcactgctggccagtcccaaaatggaacataaggaagtggttcttctacttcttttatttctgaaatcaggtcaaggagagcctctggatgactatgtgaatacccagggggcttcactgttcagtgtcactaagaagcagctgggagcaggaagtatagaagaatgtgcagcaaaatgtgaggaggacgaagaattcacctgcagggcattccaatatcacagtaaagagcaacaatgtgtgataatggctgaaaacaggaagtcctccataatcattaggatgagagatgtagttttatttgaaaagaaagtgtatctctcagagtgcaagactgggaatggaaagaactacagagggacgatgtccaaaacaaaaaatggcatcacctgtcaaaaatggagttccacttctccccacagacctagattctcacctgctacacacccctcagagggactggaggagaactactgcaggaatccagacaacgatccgcaggggccctggtgctatactactgatccagaaaagagatatgactactgcgacattcttgagtgtgaagaggaatgtatgcattgcagtggagaaaactatgacggcaaaatttccaagaccatgtctggactggaatgccaggcctgggactctcagagcccacacgctcatggatacattccttccaaatttccaaacaagaacctgaagaagaattactgtcgtaaccccgatagggagctgcggccttggtgtttcaccaccgaccccaacaagcgctgggaactttgtgacatcccccgctgcacaacacctccaccatcttctggtcccacctaccagtgtctgaagggaacaggtgaaaactatcgcgggaatgtggctgttaccgtgtccgggcacacctgtcagcactggagtgcacagacccctcacacacataacaggacaccagaaaacttcccctgcaaaaatttggatgaaaactactgccgcaatcctgacggaaaaagggccccatggtgccatacaaccaacagccaagtgcggtgggagtactgtaagataccgtcctgtgactcctccccagtatccacggaacaattggctcccacagcaccacctgagctaacccctgtggtccaggactgctaccatggtgatggacagagctaccgaggcacatcctccaccaccaccacaggaaagaagtgtcagtcttggtcatctatgacaccacaccggcaccagaagaccccagaaaactacccaaatgctggcctgacaatgaactactgcaggaatccagatgccgataaaggcccctggtgttttaccacagaccccagcgtcaggtgggagtactgcaacctgaaaaaatgctcaggaacagaagcgagtgttgtagcacctccgcctgttgtcctgcttccagatgtagagactccttccgaagaagactgtatgtttgggaatgggaaaggataccgaggcaagagggcgaccactgttactgggacgccatgccaggactgggctgcccaggagccccatagacacagcattttcactccagagacaaatccacgggcgggtctggaaaaaaattactgccgtaaccctgatggtgatgtaggtggtccctggtgctacacgacaaatccaagaaaactttacgactactgtgatgtccctcagtgtgcggccccttcatttgattgtgggaagcctcaagtggagccgaagaaatgtcctggaagggttgtaggggggtgtgtggcccacccacattcctggccctggcaagtcagtcttagaacaaggtttggaatgcacttctgtggaggcaccttgatatccccagagtgggtgttgactgctgcccactgcttggagaagtccccaaggccttcatcctacaaggtcatcctgggtgcacaccaagaagtgaatctcgaaccgcatgttcaggaaatagaagtgtctaggctgttcttggagcccacacgaaaagatattgccttgctaaagctaagcagtcctgccgtcatcactgacaaagtaatcccagcttgtctgccatccccaaattatgtggtcgctgaccggaccgaatgtttcatcactggctggggagaaacccaaggtacttttggagctggccttctcaaggaagcccagctccctgtgattgagaataaagtgtgcaatcgctatgagtttctgaatggaagagtccaatccaccgaactctgtgctgggcatttggccggaggcactgacagttgccagggtgacagtggaggtcctctggtttgcttcgagaaggacaaatacattttacaaggagtcacttcttggggtcttggctgtgcacgccccaataagcctggtgtctatgttcgtgtttcaaggtttgttacttggattgagggagtgatgagaaataattaattggacgggagacagagtgacgcactgactcacctagaggctggaacgtgggtagggatttagcatgctggaaataactggcagtaatcaaacgaagacactgtccccagctaccagctacgccaaacctcggcattttttgtgttattttctgactgctggattctgtagtaaggtgacatagctatgacatttgttaaaaataaactctgtacttaactttgatttgagtaaattttggtttt

SEQ ID NO: 166334 - DNA, 1166 bp, Homo sapiens
  Payload ID: 12750
  Gene Symbol: PLG
  Gene Name: plasminogen
  ENST ID: ENST00000366924
  CDS Start-End: 68-478
tctcatgtaagtcaacaacatcctgggattgggacccactttctgggcactgctggccagtcccaaaatggaacataaggaagtggttcttctacttcttttatttctgaaatcaggtcaaggagagcctctggatgactatgtgaatacccagggggcttcactgttcagtgtcactaagaagcagctgggagcaggaagtatagaagaatgtgcagcaaaatgtgaggaggacgaagaattcacctgcagggcattccaatatcacagtaaagagcaacaatgtgtgataatggctgaaaacaggaagtcctccataatcattaggatgagagatgtagttttatttgaaaagaaagtgtatctctcagagtgcaagactgggaatggaaagaactacagagggacgatgtccaaaacaaaaaatggcatcacctgtcaaaaatggagttccacttctccccacagacctaggtaagacattccctttcatctttgtgttcatctactgtaaagttgtccctctgtgtctgtgagggattggttccaggacccctgtggctaccaaaatccatgcttctcaagtcccttatataaaatggtgcagtatttgcatataacctacataccttctcttgtataatccctaatataatgtaaatgctatttaatcgttgttatactgtattgtttttatttgtattatgttttattgtcatattgttattttctgtcatctttttcaagtcttttccatccacagttggttgaatttgtggatctggaacccatggatacagagggccaactgtatttaggataatttcatcacttttaattcaaaccacaatatgtgaataagcagatagaaagaatctttttgatgtcgatgttcaactatttttggcaccatagtagaacatggttgctttctattttttcttggatatggaggtttcttgaagacctagaacatagaagaatgcctagtttaaaaaaaatcaatgaaactatgagttttaggccaaatctgagaaaagatcaaagatgactatgtttgggactgaagtaagcatatcaggttagaactctcatcacatgttcgactcaaattgtggagcaaaagagtaaataagatataaaaatgaaaatgaagatacgtgaaa

SEQ ID NO: 166335 - DNA, 558 bp, Homo sapiens
  Payload ID: 12750
  Gene Symbol: PLG
  Gene Name: plasminogen
  ENST ID: ENST00000418964
  CDS Start-End: 60-558
aagtcaacaacatcctgggattgggacccactttctgggcactgctggccagtcccaaaatggaacataaggaagtggttcttctacttcttttatttctgaaatcaggtcaaggagagcctctggatgactatgtgaatacccagggggcttcactgttcagtgtcactaagaagcagctgggagcaggaagtatagaagaatgtgcagcaaaatgtgaggaggacgaagaattcacctgcaggtatttccattgtcgttgcacctacgcaggaatctgtaattcagatggcaaggcattccaatatcacagtaaagagcaacaatgtgtgataatggctgaaaacaggaagtcctccataatcattaggatgagagatgtagttttatttgaaaagaaagtgtatctctcagagtgcaagactgggaatggaaagaactacagagggacgatgtccaaaacaaaaaatggcatcacctgtcaaaaatggagttccacttctccccacagacctagattctcacctgctacacacccctcagagggactggaggaga

SEQ ID NO: 166336 - DNA, 2706 bp, Homo sapiens
  Payload ID: 12751
  Gene Symbol: PLAT
  Gene Name: plasminogen activator, tissue
  Uniprot ID: P00750
  ENST ID: ENST00000220809
  CDS Start-End: 258-1946
gaacttcctccccctgctttataaaaacaggcctgcctcagctccctcatggccctgtccactgagcatcctcccgccacacagaaacccgcccagccggggccaccgaccccaccccctgcctggaaacttaaaggaggccggagctgtggggagctcagagctgagatcctacaggagtccagggctggagagaaaacctctgcgaggaaagggaaggagcaagccgtgaatttaagggacgctgtgaagcaatcatggatgcaatgaagagagggctctgctgtgtgctgctgctgtgtggagcagtcttcgtttcgcccagccaggaaatccatgcccgattcagaagaggagccagatcttaccaagtgatctgcagagatgaaaaaacgcagatgatataccagcaacatcagtcatggctgcgccctgtgctcagaagcaaccgggtggaatattgctggtgcaacagtggcagggcacagtgccactcagtgcctgtcaaaagttgcagcgagccaaggtgtttcaacgggggcacctgccagcaggccctgtacttctcagatttcgtgtgccagtgccccgaaggatttgctgggaagtgctgtgaaatagataccagggccacgtgctacgaggaccagggcatcagctacaggggcacgtggagcacagcggagagtggcgccgagtgcaccaactggaacagcagcgcgttggcccagaagccctacagcgggcggaggccagacgccatcaggctgggcctggggaaccacaactactgcagaaacccagatcgagactcaaagccctggtgctacgtctttaaggcggggaagtacagctcagagttctgcagcacccctgcctgctctgagggaaacagtgactgctactttgggaatgggtcagcctaccgtggcacgcacagcctcaccgagtcgggtgcctcctgcctcccgtggaattccatgatcctgataggcaaggtttacacagcacagaaccccagtgcccaggcactgggcctgggcaaacataattactgccggaatcctgatggggatgccaagccctggtgccacgtgctgaagaaccgcaggctgacgtgggagtactgtgatgtgccctcctgctccacctgcggcctgagacagtacagccagcctcagtttcgcatcaaaggagggctcttcgccgacatcgcctcccacccctggcaggctgccatctttgccaagcacaggaggtcgcccggagagcggttcctgtgcgggggcatactcatcagctcctgctggattctctctgccgcccactgcttccaggagaggtttccgccccaccacctgacggtgatcttgggcagaacataccgggtggtccctggcgaggaggagcagaaatttgaagtcgaaaaatacattgtccataaggaattcgatgatgacacttacgacaatgacattgcgctgctgcagctgaaatcggattcgtcccgctgtgcccaggagagcagcgtggtccgcactgtgtgccttcccccggcggacctgcagctgccggactggacggagtgtgagctctccggctacggcaagcatgaggccttgtctcctttctattcggagcggctgaaggaggctcatgtcagactgtacccatccagccgctgcacatcacaacatttacttaacagaacagtcaccgacaacatgctgtgtgctggagacactcggagcggcgggccccaggcaaacttgcacgacgcctgccagggcgattcgggaggccccctggtgtgtctgaacgatggccgcatgactttggtgggcatcatcagctggggcctgggctgtggacagaaggatgtcccgggtgtgtacaccaaggttaccaactacctagactggattcgtgacaacatgcgaccgtgaccaggaacacccgactcctcaaaagcaaatgagatcccgcctcttcttcttcagaagacactgcaaaggcgcagtgcttctctacagacttctccagacccaccacaccgcagaagcgggacgagaccctacaggagagggaagagtgcattttcccagatacttcccattttggaagttttcaggacttggtctgatttcaggatactctgtcagatgggaagacatgaatgcacactagcctctccaggaatgcctcctccctgggcagaaagtggccatgccaccctgttttcagctaaagcccaacctcctgacctgtcaccgtgagcagctttggaaacaggaccacaaaaatgaaagcatgtctcaatagtaaaagataacaagatctttcaggaaagacggattgcattagaaatagacagtatatttatagtcacaagagcccagcagggcctcaaagttggggcaggctggctggcccgtcatgttcctcaaaagcacccttgacgtcaagtctccttcccctttccccactccctggctctcagaaggtattccttttgtgtacagtgtgtaaagtgtaaatcctttttctttataaactttagagtagcatgagagaattgtatcatttgaacaactaggcttcagcatatttatagcaatccatgttagtttttactttctgttgccacaaccctgttttatactgtacttaataaattcagatatatttttcacagtttttccaaaa

SEQ ID NO: 166337 - DNA, 2516 bp, Homo sapiens
  Payload ID: 12751
  Gene Symbol: PLAT
  Gene Name: plasminogen activator, tissue
  Uniprot ID: P00750
  ENST ID: ENST00000352041
  CDS Start-End: 210-1760
atggccctgtccactgagcatcctcccgccacacagaaacccgcccagccggggccaccgaccccaccccctgcctggaaacttaaaggaggccggagctgtggggagctcagagctgagatcctacaggagtccagggctggagagaaaacctctgcgaggaaagggaaggagcaagccgtgaatttaagggacgctgtgaagcaatcatggatgcaatgaagagagggctctgctgtgtgctgctgctgtgtggagcagtcttcgtttcgcccagccaggaaatccatgcccgattcagaagaggagccagatcttaccaaggttgcagcgagccaaggtgtttcaacgggggcacctgccagcaggccctgtacttctcagatttcgtgtgccagtgccccgaaggatttgctgggaagtgctgtgaaatagataccagggccacgtgctacgaggaccagggcatcagctacaggggcacgtggagcacagcggagagtggcgccgagtgcaccaactggaacagcagcgcgttggcccagaagccctacagcgggcggaggccagacgccatcaggctgggcctggggaaccacaactactgcagaaacccagatcgagactcaaagccctggtgctacgtctttaaggcggggaagtacagctcagagttctgcagcacccctgcctgctctgagggaaacagtgactgctactttgggaatgggtcagcctaccgtggcacgcacagcctcaccgagtcgggtgcctcctgcctcccgtggaattccatgatcctgataggcaaggtttacacagcacagaaccccagtgcccaggcactgggcctgggcaaacataattactgccggaatcctgatggggatgccaagccctggtgccacgtgctgaagaaccgcaggctgacgtgggagtactgtgatgtgccctcctgctccacctgcggcctgagacagtacagccagcctcagtttcgcatcaaaggagggctcttcgccgacatcgcctcccacccctggcaggctgccatctttgccaagcacaggaggtcgcccggagagcggttcctgtgcgggggcatactcatcagctcctgctggattctctctgccgcccactgcttccaggagaggtttccgccccaccacctgacggtgatcttgggcagaacataccgggtggtccctggcgaggaggagcagaaatttgaagtcgaaaaatacattgtccataaggaattcgatgatgacacttacgacaatgacattgcgctgctgcagctgaaatcggattcgtcccgctgtgcccaggagagcagcgtggtccgcactgtgtgccttcccccggcggacctgcagctgccggactggacggagtgtgagctctccggctacggcaagcatgaggccttgtctcctttctattcggagcggctgaaggaggctcatgtcagactgtacccatccagccgctgcacatcacaacatttacttaacagaacagtcaccgacaacatgctgtgtgctggagacactcggagcggcgggccccaggcaaacttgcacgacgcctgccagggcgattcgggaggccccctggtgtgtctgaacgatggccgcatgactttggtgggcatcatcagctggggcctgggctgtggacagaaggatgtcccgggtgtgtacaccaaggttaccaactacctagactggattcgtgacaacatgcgaccgtgaccaggaacacccgactcctcaaaagcaaatgagatcccgcctcttcttcttcagaagacactgcaaaggcgcagtgcttctctacagacttctccagacccaccacaccgcagaagcgggacgagaccctacaggagagggaagagtgcattttcccagatacttcccattttggaagttttcaggacttggtctgatttcaggatactctgtcagatgggaagacatgaatgcacactagcctctccaggaatgcctcctccctgggcagaaagtggccatgccaccctgttttcagctaaagcccaacctcctgacctgtcaccgtgagcagctttggaaacaggaccacaaaaatgaaagcatgtctcaatagtaaaagataacaagatctttcaggaaagacggattgcattagaaatagacagtatatttatagtcacaagagcccagcagggcctcaaagttggggcaggctggctggcccgtcatgttcctcaaaagcacccttgacgtcaagtctccttcccctttccccactccctggctctcagaaggtattccttttgtgtacagtgtgtaaagtgtaaatcctttttctttataaactttagagtagcatgagagaattgtatcatttgaacaactaggcttcagcatatttatagcaatccatgttagtttttactttctgttgccacaaccctgttttatactgtacttaataaattcagatatatttttcacagtttttcc

SEQ ID NO: 166338 - DNA, 2599 bp, Homo sapiens
  Payload ID: 12751
  Gene Symbol: PLAT
  Gene Name: plasminogen activator, tissue
  Uniprot ID: P00750
  ENST ID: ENST00000429089
  CDS Start-End: 151-1839
agagctgagatcctacaggagtccagggctggagagaaaacctctgcgaggaaagggaaggagcaagccgtgggagggagagaggaagggagggagggaagacgaaaacacgccgaggtcccagaatttaagggacgctgtgaagcaatcatggatgcaatgaagagagggctctgctgtgtgctgctgctgtgtggagcagtcttcgtttcgcccagccaggaaatccatgcccgattcagaagaggagccagatcttaccaagtgatctgcagagatgaaaaaacgcagatgatataccagcaacatcagtcatggctgcgccctgtgctcagaagcaaccgggtggaatattgctggtgcaacagtggcagggcacagtgccactcagtgcctgtcaaaagttgcagcgagccaaggtgtttcaacgggggcacctgccagcaggccctgtacttctcagatttcgtgtgccagtgccccgaaggatttgctgggaagtgctgtgaaatagataccagggccacgtgctacgaggaccagggcatcagctacaggggcacgtggagcacagcggagagtggcgccgagtgcaccaactggaacagcagcgcgttggcccagaagccctacagcgggcggaggccagacgccatcaggctgggcctggggaaccacaactactgcagaaacccagatcgagactcaaagccctggtgctacgtctttaaggcggggaagtacagctcagagttctgcagcacccctgcctgctctgagggaaacagtgactgctactttgggaatgggtcagcctaccgtggcacgcacagcctcaccgagtcgggtgcctcctgcctcccgtggaattccatgatcctgataggcaaggtttacacagcacagaaccccagtgcccaggcactgggcctgggcaaacataattactgccggaatcctgatggggatgccaagccctggtgccacgtgctgaagaaccgcaggctgacgtgggagtactgtgatgtgccctcctgctccacctgcggcctgagacagtacagccagcctcagtttcgcatcaaaggagggctcttcgccgacatcgcctcccacccctggcaggctgccatctttgccaagcacaggaggtcgcccggagagcggttcctgtgcgggggcatactcatcagctcctgctggattctctctgccgcccactgcttccaggagaggtttccgccccaccacctgacggtgatcttgggcagaacataccgggtggtccctggcgaggaggagcagaaatttgaagtcgaaaaatacattgtccataaggaattcgatgatgacacttacgacaatgacattgcgctgctgcagctgaaatcggattcgtcccgctgtgcccaggagagcagcgtggtccgcactgtgtgccttcccccggcggacctgcagctgccggactggacggagtgtgagctctccggctacggcaagcatgaggccttgtctcctttctattcggagcggctgaaggaggctcatgtcagactgtacccatccagccgctgcacatcacaacatttacttaacagaacagtcaccgacaacatgctgtgtgctggagacactcggagcggcgggccccaggcaaacttgcacgacgcctgccagggcgattcgggaggccccctggtgtgtctgaacgatggccgcatgactttggtgggcatcatcagctggggcctgggctgtggacagaaggatgtcccgggtgtgtacaccaaggttaccaactacctagactggattcgtgacaacatgcgaccgtgaccaggaacacccgactcctcaaaagcaaatgagatcccgcctcttcttcttcagaagacactgcaaaggcgcagtgcttctctacagacttctccagacccaccacaccgcagaagcgggacgagaccctacaggagagggaagagtgcattttcccagatacttcccattttggaagttttcaggacttggtctgatttcaggatactctgtcagatgggaagacatgaatgcacactagcctctccaggaatgcctcctccctgggcagaaagtggccatgccaccctgttttcagctaaagcccaacctcctgacctgtcaccgtgagcagctttggaaacaggaccacaaaaatgaaagcatgtctcaatagtaaaagataacaagatctttcaggaaagacggattgcattagaaatagacagtatatttatagtcacaagagcccagcagggcctcaaagttggggcaggctggctggcccgtcatgttcctcaaaagcacccttgacgtcaagtctccttcccctttccccactccctggctctcagaaggtattccttttgtgtacagtgtgtaaagtgtaaatcctttttctttataaactttagagtagcatgagagaattgtatcatttgaacaactaggcttcagcatatttatagcaatccatgttagtttttactttctgttgccacaaccctgttttatactgtacttaataaattcagatatatttttcacagtttttccaaaa

SEQ ID NO: 166339 - DNA, 1655 bp, Homo sapiens
  Payload ID: 12751
  Gene Symbol: PLAT
  Gene Name: plasminogen activator, tissue
  ENST ID: ENST00000429710
  CDS Start-End: 99-1409
agagctgagatcctacaggagtccagggctggagagaaaacctctgcgaggaaagggaaggagcaagccgtgaatttaagggacgctgtgaagcaatcatggatgcaatgaagagagggctctgctgtgtgctgctgctgtgtggagcagtcttcgtttcgcccagccaggaaatccatgcccgattcagaagaggagccagatcttaccaagtgatctgcagagatgaaaaaacgcagatgatataccagcaacatcagtcatggctgcgccctgtgctcagaagcaaccgggtggaatattgctggtgcaacagtggcagggcacagtgccactcagtgcctgtcaaaagaaacagtgactgctactttgggaatgggtcagcctaccgtggcacgcacagcctcaccgagtcgggtgcctcctgcctcccgtggaattccatgatcctgataggcaaggtttacacagcacagaaccccagtgcccaggcactgggcctgggcaaacataattactgccggaatcctgatggggatgccaagccctggtgccacgtgctgaagaaccgcaggctgacgtgggagtactgtgatgtgccctcctgctccacctgcggcctgagacagtacagccagcctcagtttcgcatcaaaggagggctcttcgccgacatcgcctcccacccctggcaggctgccatctttgccaagcacaggaggtcgcccggagagcggttcctgtgcgggggcatactcatcagctcctgctggattctctctgccgcccactgcttccaggagaggtttccgccccaccacctgacggtgatcttgggcagaacataccgggtggtccctggcgaggaggagcagaaatttgaagtcgaaaaatacattgtccataaggaattcgatgatgacacttacgacaatgacattgcgctgctgcagctgaaatcggattcgtcccgctgtgcccaggagagcagcgtggtccgcactgtgtgccttcccccggcggacctgcagctgccggactggacggagtgtgagctctccggctacggcaagcatgaggccttgtctcctttctattcggagcggctgaaggaggctcatgtcagactgtacccatccagccgctgcacatcacaacatttacttaacagaacagtcaccgacaacatgctgtgtgctggagacactcggagcggcgggccccaggcaaacttgcacgacgcctgccagggcgattcgggaggccccctggtgtgtctgaacgatggccgcatgactttggtgggcatcatcagctggggcctgggctgtggacagaaggatgtcccgggtgtgtacaccaaggttaccaactacctagactggattcgtgacaacatgcgaccgtgaccaggaacacccgactcctcaaaagcaaatgagatcccgcctcttcttcttcagaagacactgcaaaggcgcagtgcttctctacagacttctccagacccaccacaccgcagaagcgggacgagaccctacaggagagggaagagtgcattttcccagatacttcccattttggaagttttcaggacttggtctgatttcaggatactctgtcagatgggaagacatgaatgcacactagcctct

SEQ ID NO: 166340 - DNA, 670 bp, Homo sapiens
  Payload ID: 12751
  Gene Symbol: PLAT
  Gene Name: plasminogen activator, tissue
  ENST ID: ENST00000520523
  CDS Start-End: 135-670
aaaaaaaaaaaaggacatgctacagcatggatgcaccttgaagacatttgcaaagtgaaacaaaccagtcgcaaaagaagaaacactgtctcattccacttctaggataatttaagggacgctgtgaagcaatcatggatgcaatgaagagagggctctgctgtgtgctgctgctgtgtggagcagtcttcgtttcgcccagccaggaaatccatgcccgattcagaagaggagccagatcttaccaagtgatctgcagagatgaaaaaacgcagatgatataccagcaacatcagtcatggctgcgccctgtgctcagaagcaaccgggtggaatattgctggtgcaacagtggcagggcacagtgccactcagtgcctgtcaaaagttgcagcgagccaaggtgtttcaacgggggcacctgccagcaggccctgtacttctcagatttcgtgtgccagtgccccgaaggatttgctgggaagtgctgtgaaatagataccagggccacgtgctacgaggaccagggcatcagctacaggggcacgtggagcacagcggagagtggcgccgagtgcaccaactggaacagcagcgcgttggcccagaagccctacagcgggcggaggccagacgccatcaggctgggcctggggaaccacaactactg

SEQ ID NO: 166341 - DNA, 2030 bp, Homo sapiens
  Payload ID: 12751
  Gene Symbol: PLAT
  Gene Name: plasminogen activator, tissue
  ENST ID: ENST00000519510
  CDS Start-End: 99-1598
agagctgagatcctacaggagtccagggctggagagaaaacctctgcgaggaaagggaaggagcaagccgtgaatttaagggacgctgtgaagcaatcatggatgcaatgaagagagggctctgctgtgtgctgctgctgtgtggagcagtcttcgtttcgcccagccaggaaatccatgcccgattcagaagaggagccagatcttaccaagtgatctgcagagatgaaaaaacgcagatgatataccagcaacatcagtcatggctgcgccctgtgctcagaagcaaccgggtggaatattgctggtgcaacagtggcagggcacagtgccactcagtgcctgtcaaaagttgcagcgagccaaggtgtttcaacgggggcacctgccagcaggccctgtacttctcagatttcgtgtgccagtgccccgaaggatttgctgggaagtgctgtgaaatagactcaaagccctggtgctacgtctttaaggcggggaagtacagctcagagttctgcagcacccctgcctgctctgagggaaacagtgactgctactttgggaatgggtcagcctaccgtggcacgcacagcctcaccgagtcgggtgcctcctgcctcccgtggaattccatgatcctgataggcaaggtttacacagcacagaaccccagtgcccaggcactgggcctgggcaaacataattactgccggaatcctgatggggatgccaagccctggtgccacgtgctgaagaaccgcaggctgacgtgggagtactgtgatgtgccctcctgctccacctgcggcctgagacagtacagccagcctcagtttcgcatcaaaggagggctcttcgccgacatcgcctcccacccctggcaggctgccatctttgccaagcacaggaggtcgcccggagagcggttcctgtgcgggggcatactcatcagctcctgctggattctctctgccgcccactgcttccaggagaggtttccgccccaccacctgacggtgatcttgggcagaacataccgggtggtccctggcgaggaggagcagaaatttgaagtcgaaaaatacattgtccataaggaattcgatgatgacacttacgacaatgacattgcgctgctgcagctgaaatcggattcgtcccgctgtgcccaggagagcagcgtggtccgcactgtgtgccttcccccggcggacctgcagctgccggactggacggagtgtgagctctccggctacggcaagcatgaggccttgtctcctttctattcggagcggctgaaggaggctcatgtcagactgtacccatccagccgctgcacatcacaacatttacttaacagaacagtcaccgacaacatgctgtgtgctggagacactcggagcggcgggccccaggcaaacttgcacgacgcctgccagggcgattcgggaggccccctggtgtgtctgaacgatggccgcatgactttggtgggcatcatcagctggggcctgggctgtggacagaaggatgtcccgggtgtgtacaccaaggttaccaactacctagactggattcgtgacaacatgcgaccgtgaccaggaacacccgactcctcaaaagcaaatgagatcccgcctcttcttcttcagaagacactgcaaaggcgcagtgcttctctacagacttctccagacccaccacaccgcagaagcgggacgagaccctacaggagagggaagagtgcattttcccagatacttcccattttggaagttttcaggacttggtctgatttcaggatactctgtcagatgggaagacatgaatgcacactagcctctccaggaatgcctcctccctgggcagaaagtggccatgccaccctgttttcagctaaagcccaacctcctgacctgtcaccgtgagcagctttggaaacaggaccacaaaaatgaaagcatgtctcaatagtaaaagataacaagatctttcaggaaagacggattgcattagaaatagacagtata

SEQ ID NO: 166342 - DNA, 1613 bp, Homo sapiens
  Payload ID: 12751
  Gene Symbol: PLAT
  Gene Name: plasminogen activator, tissue
  ENST ID: ENST00000524009
  CDS Start-End: 99-1520
agagctgagatcctacaggagtccagggctggagagaaaacctctgcgaggaaagggaaggagcaagccgtgaatttaagggacgctgtgaagcaatcatggatgcaatgaagagagggctctgctgtgtgctgctgctgtgtggagcagtcttcgtttcgcccagccaggaaatccatgcccgattcagaagaggagccagatcttaccaagtgatctgcagagatgaaaaaacgcagatgatataccagcaacatcagtcatggctgcgccctgtgctcagaagcaaccgggtggaatattgctggtgcaacagtggcagggcacagtgccactcagtgcctgtcaaaagttgcagcgagccaaggtgtttcaacgggggcacctgccagcaggccctgtacttctcagatttcgtgtgccagtgccccgaaggatttgctgggaagtgctgtgaaataggaaacagtgactgctactttgggaatgggtcagcctaccgtggcacgcacagcctcaccgagtcgggtgcctcctgcctcccgtggaattccatgatcctgataggcaaggtttacacagcacagaaccccagtgcccaggcactgggcctgggcaaacataattactgccggaatcctgatggggatgccaagccctggtgccacgtgctgaagaaccgcaggctgacgtgggagtactgtgatgtgccctcctgctccacctgcggcctgagacagtacagccagcctcagtttcgcatcaaaggagggctcttcgccgacatcgcctcccacccctggcaggctgccatctttgccaagcacaggaggtcgcccggagagcggttcctgtgcgggggcatactcatcagctcctgctggattctctctgccgcccactgcttccaggagaggtttccgccccaccacctgacggtgatcttgggcagaacataccgggtggtccctggcgaggaggagcagaaatttgaagtcgaaaaatacattgtccataaggaattcgatgatgacacttacgacaatgacattgcgctgctgcagctgaaatcggattcgtcccgctgtgcccaggagagcagcgtggtccgcactgtgtgccttcccccggcggacctgcagctgccggactggacggagtgtgagctctccggctacggcaagcatgaggccttgtctcctttctattcggagcggctgaaggaggctcatgtcagactgtacccatccagccgctgcacatcacaacatttacttaacagaacagtcaccgacaacatgctgtgtgctggagacactcggagcggcgggccccaggcaaacttgcacgacgcctgccagggcgattcgggaggccccctggtgtgtctgaacgatggccgcatgactttggtgggcatcatcagctggggcctgggctgtggacagaaggatgtcccgggtgtgtacaccaaggttaccaactacctagactggattcgtgacaacatgcgaccgtgaccaggaacacccgactcctcaaaagcaaatgagatcccgcctcttcttcttcagaagacactgcaaaggcgcagtgcttctctacagacttct

SEQ ID NO: 166343 - DNA, 604 bp, Homo sapiens
  Payload ID: 12751
  Gene Symbol: PLAT
  Gene Name: plasminogen activator, tissue
  ENST ID: ENST00000521042
  CDS Start-End: 1-290
gatttgctgggaagtgctgtgaaatagataccagggccacgtgctacgaggaccagggcatcagctacaggggcacgtggagcacagcggagagtggcgccgagtgcaccaactggaacagcagcgcgttggcccagaagccctacagcgggcggaggccagacgccatcaggctgggcctggggaaccacaactactgcagaaccccagtgcccaggcactgggcctgggcaaacataattactgccggaatcctgatggggatgccaagccctggtgccacgtgctgaagaaccgcaggctgacgtgggagtactgtgatgtgccctcctgctccacctgcggcctgagacagtacagccagcctcagtttcgcatcaaaggagggctcttcgccgacatcgcctcccacccctggcaggctgccatctttgccaagcacaggaggtcgcccggagagcggttcctgtgcgggggcatactcatcagctcctgctggattctctctgccgcccactgcttccaggagaggtttccgccccaccacctgacggtgatcttgggcagaacataccgggtggtccctggcgaggaggagcagaaa

SEQ ID NO: 166344 - DNA, 549 bp, Homo sapiens
  Payload ID: 12751
  Gene Symbol: PLAT
  Gene Name: plasminogen activator, tissue
  ENST ID: ENST00000521694
  CDS Start-End: 78-549
agttttgagaaacaggaaatttgaggaaagctgagaaagagaagatctggaaatttaagggacgctgtgaagcaatcatggatgcaatgaagagagggctctgctgtgtgctgctgctgtgtggagcagtcttcgtttcgcccagccaggaaatccatgcccgattcagaagaggagccagatcttaccaagtgatctgcagagatgaaaaaacgcagatgatataccagcaacatcagtcatggctgcgccctgtgctcagaagcaaccgggtggaatattgctggtgcaacagtggcagggcacagtgccactcagtgcctgtcaaaagttgcagcgagccaaggtgtttcaacgggggcacctgccagcaggccctgtacttctcagatttcgtgtgccagtgccccgaaggatttgctgggaagtgctgtgaaatagataccagggccacgtgctacgaggaccagggcatcagctacaggggcacgtggagcacagcggagagtggcgccgagtgcaccaactggaacagcagcgcgttggccc

SEQ ID NO: 166345 - DNA, 2321 bp, Homo sapiens
  Payload ID: 12752
  Gene Symbol: PLAU
  Gene Name: plasminogen activator, urokinase
  Uniprot ID: P00749
  ENST ID: ENST00000372764
  CDS Start-End: 94-1389
gcccgggccagggtccacctgtccccgcagcgccggctcgcgccctcctgccgcagccaccgagccgccgtctagcgccccgacctcgccaccatgagagccctgctggcgcgcctgcttctctgcgtcctggtcgtgagcgactccaaaggcagcaatgaacttcatcaagttccatcgaactgtgactgtctaaatggaggaacatgtgtgtccaacaagtacttctccaacattcactggtgcaactgcccaaagaaattcggagggcagcactgtgaaatagataagtcaaaaacctgctatgaggggaatggtcacttttaccgaggaaaggccagcactgacaccatgggccggccctgcctgccctggaactctgccactgtccttcagcaaacgtaccatgcccacagatctgatgctcttcagctgggcctggggaaacataattactgcaggaacccagacaaccggaggcgaccctggtgctatgtgcaggtgggcctaaagctgcttgtccaagagtgcatggtgcatgactgcgcagatggaaaaaagccctcctctcctccagaagaattaaaatttcagtgtggccaaaagactctgaggccccgctttaagattattgggggagaattcaccaccatcgagaaccagccctggtttgcggccatctacaggaggcaccgggggggctctgtcacctacgtgtgtggaggcagcctcatcagcccttgctgggtgatcagcgccacacactgcttcattgattacccaaagaaggaggactacatcgtctacctgggtcgctcaaggcttaactccaacacgcaaggggagatgaagtttgaggtggaaaacctcatcctacacaaggactacagcgctgacacgcttgctcaccacaacgacattgccttgctgaagatccgttccaaggagggcaggtgtgcgcagccatcccggactatacagaccatctgcctgccctcgatgtataacgatccccagtttggcacaagctgtgagatcactggctttggaaaagagaattctaccgactatctctatccggagcagctgaaaatgactgttgtgaagctgatttcccaccgggagtgtcagcagccccactactacggctctgaagtcaccaccaaaatgctgtgtgctgctgacccacagtggaaaacagattcctgccagggagactcagggggacccctcgtctgttccctccaaggccgcatgactttgactggaattgtgagctggggccgtggatgtgccctgaaggacaagccaggcgtctacacgagagtctcacacttcttaccctggatccgcagtcacaccaaggaagagaatggcctggccctctgagggtccccagggaggaaacgggcaccacccgctttcttgctggttgtcatttttgcagtagagtcatctccatcagctgtaagaagagactgggaagataggctctgcacagatggatttgcctgtgccacccaccagggcgaacgacaatagctttaccctcaggcataggcctgggtgctggctgcccagacccctctggccaggatggaggggtggtcctgactcaacatgttactgaccagcaacttgtctttttctggactgaagcctgcaggagttaaaaagggcagggcatctcctgtgcatgggtgaagggagagccagctcccccgacggtgggcatttgtgaggcccatggttgagaaatgaataatttcccaattaggaagtgtaacagctgaggtctcttgagggagcttagccaatgtgggagcagcggtttggggagcagagacactaacgacttcagggcagggctctgatattccatgaatgtatcaggaaatatatatgtgtgtgtatgtttgcacacttgtgtgtgggctgtgagtgtaagtgtgagtaagagctggtgtctgattgttaagtctaaatatttccttaaactgtgtggactgtgatgccacacagagtggtctttctggagaggttataggtcactcctggggcctcttgggtcccccacgtgacagtgcctgggaatgtattattctgcagcatgacctgtgaccagcactgtctcagtttcactttcacatagatgtccctttcttggccagttatcccttccttttagcctagttcatccaatcctcactgggtggggtgaggaccactcctgtacactgaatatttatatttcactatttttatttatatttttgtaattttaaataaaagtgatcaataaaatgtgatttttctgatga

SEQ ID NO: 166346 - DNA, 2658 bp, Homo sapiens
  Payload ID: 12752
  Gene Symbol: PLAU
  Gene Name: plasminogen activator, urokinase
  ENST ID: ENST00000446342
  CDS Start-End: 483-1727
atatagagcaggcgccgcgggtcgcagcacagtgcggagaccgcagccccggagcccgggccagggtccacctgtccccgcagcgccggctcgcgccctcctgccgcagccaccgagccgccgtctagcgccccgacctcgccaccatgagagccctgctggcgcgcctgcttctctgcgtcctggtcgtgagcgactccaaagtgagtgcgctcttgctttgactgatgctgcccaaggacctctgatcagcaccaggggagaggaggggctgctcagggagctggggtcctccggattccatccacagcagggccagactctccccaggaaatgggacagggtggcagcggaggcttgagaaccacgggggttggcactggctggcaagggaggaagaggccgccgggactgccccagcctgcgggcatctggtagatgaagcttgcttgggtcaatccatttctcctggctggaaacccatggtcttccatttgagaactagatacgaacaggcgaactgtgactgtctaaatggaggaacatgtgtgtccaacaagtacttctccaacattcactggtgcaactgcccaaagaaattcggagggcagcactgtgaaatagataagtcaaaaacctgctatgaggggaatggtcacttttaccgaggaaaggccagcactgacaccatgggccggccctgcctgccctggaactctgccactgtccttcagcaaacgtaccatgcccacagatctgatgctcttcagctgggcctggggaaacataattactgcaggaacccagacaaccggaggcgaccctggtgctatgtgcaggtgggcctaaagctgcttgtccaagagtgcatggtgcatgactgcgcagatggaaaaaagccctcctctcctccagaagaattaaaatttcagtgtggccaaaagactctgaggccccgctttaagattattgggggagaattcaccaccatcgagaaccagccctggtttgcggccatctacaggaggcaccgggggggctctgtcacctacgtgtgtggaggcagcctcatcagcccttgctgggtgatcagcgccacacactgcttcattgattacccaaagaaggaggactacatcgtctacctgggtcgctcaaggcttaactccaacacgcaaggggagatgaagtttgaggtggaaaacctcatcctacacaaggactacagcgctgacacgcttgctcaccacaacgacattgccttgctgaagatccgttccaaggagggcaggtgtgcgcagccatcccggactatacagaccatctgcctgccctcgatgtataacgatccccagtttggcacaagctgtgagatcactggctttggaaaagagaattctaccgactatctctatccggagcagctgaaaatgactgttgtgaagctgatttcccaccgggagtgtcagcagccccactactacggctctgaagtcaccaccaaaatgctgtgtgctgctgacccacagtggaaaacagattcctgccagggagactcagggggacccctcgtctgttccctccaaggccgcatgactttgactggaattgtgagctggggccgtggatgtgccctgaaggacaagccaggcgtctacacgagagtctcacacttcttaccctggatccgcagtcacaccaaggaagagaatggcctggccctctgagggtccccagggaggaaacgggcaccacccgctttcttgctggttgtcatttttgcagtagagtcatctccatcagctgtaagaagagactgggaagataggctctgcacagatggatttgcctgtgccacccaccagggcgaacgacaatagctttaccctcaggcataggcctgggtgctggctgcccagacccctctggccaggatggaggggtggtcctgactcaacatgttactgaccagcaacttgtctttttctggactgaagcctgcaggagttaaaaagggcagggcatctcctgtgcatgggtgaagggagagccagctcccccgacggtgggcatttgtgaggcccatggttgagaaatgaataatttcccaattaggaagtgtaacagctgaggtctcttgagggagcttagccaatgtgggagcagcggtttggggagcagagacactaacgacttcagggcagggctctgatattccatgaatgtatcaggaaatatatatgtgtgtgtatgtttgcacacttgtgtgtgggctgtgagtgtaagtgtgagtaagagctggtgtctgattgttaagtctaaatatttccttaaactgtgtggactgtgatgccacacagagtggtctttctggagaggttataggtcactcctggggcctcttgggtcccccacgtgacagtgcctgggaatgtattattctgcagcatgacctgtgaccagcactgtctcagtttcactttcacatagatgtccctttcttggccagttatcccttccttttagcctagttcatccaatcctcactgggtggggtgaggaccactcctgtacactgaatatttatatttcactatttttatttatatttttgtaattttaaataaaagtgatcaataaaatgtgatttttctgatg

SEQ ID NO: 166347 - DNA, 468 bp, Homo sapiens
  Payload ID: 12752
  Gene Symbol: PLAU
  Gene Name: plasminogen activator, urokinase
  ENST ID: ENST00000481390
  CDS Start-End: 150-468
agcaatcagcatgacagcctccagccaagtaatctggagtcatgagagctgctaggggagcaacatgaatcatgacggtccctgggaatttcctgataactaacctgggagtttcgggagccgccgtctagcgccccgacctcgccaccatgagagccctgctggcgcgcctgcttctctgcgtcctggtcgtgagcgactccaaaggcagcaatgaacttcatcaagttccatcgaactgtgactgtctaaatggaggaacatgtgtgtccaacaagtacttctccaacattcactggtgcaactgcccaaagaaattcggagggcagcactgtgaaatagataagtcaaaaacctgctatgaggggaatggtcacttttaccgaggaaaggccagcactgacaccatgggccggccctgcctgccctggaactctgccactgtccttcagcaaacgtaccatgccc

SEQ ID NO: 166348 - DNA, 1610 bp, Homo sapiens
  Payload ID: 12753
  Gene Symbol: PLAUR
  Gene Name: plasminogen activator, urokinase receptor
  Uniprot ID: Q03405
  ENST ID: ENST00000221264
  CDS Start-End: 428-1300
cagtatccctcctgacaaaactaacaaaaatcctgttagccaaataatcagccacattcatatttaccgtcaaagtttttatcctcattttacagcagtggagagcgattgccccgggtcccacgttaggaagagagagaactgggatttgcacccaggcaatctggggacagagctgtgatcacaactccatgagtcagggccgagccagccccttcaccaccagccggccgcgccccgggaagggaagtttgtggcggaggaggttcgtacgggaggagggggaggcgcccacgcatctggggctgactcgctctttcgcaaaacgtctgggaggagtccctggggccacaaaactgcctccttcctgaggccagaaggagagaagacgtgcagggaccccgcgcacaggagctgccctcgcgacatgggtcacccgccgctgctgccgctgctgctgctgctccacacctgcgtcccagcctcttggggcctgcggtgcatgcagtgtaagaccaacggggattgccgtgtggaagagtgcgccctgggacaggacctctgcaggaccacgatcgtgcgcttgtgggaagaaggagaagagctggagctggtggagaaaagctgtacccactcagagaagaccaacaggaccctgagctatcggactggcttgaagatcaccagccttaccgaggttgtgtgtgggttagacttgtgcaaccagggcaactctggccgggctgtcacctattcccgaagccgttacctcgaatgcatttcctgtggctcatcagacatgagctgtgagaggggccggcaccagagcctgcagtgccgcagccctgaagaacagtgcctggatgtggtgacccactggatccaggaaggtgaagaagtcctggagcttgaaaatctgccgcagaatggccgccagtgttacagctgcaaggggaacagcacccatggatgctcctctgaagagactttcctcattgactgccgaggccccatgaatcaatgtctggtagccaccggcactcacgaaccgaaaaaccaaagctatatggtaagaggctgtgcaaccgcctcaatgtgccaacatgcccacctgggtgacgccttcagcatgaaccacattgatgtctcctgctgtactaaaagtggctgtaaccacccagacctggatgtccagtaccgcagtggggctgctcctcagcctggccctgcccatctcagcctcaccatcaccctgctaatgactgccagactgtggggaggcactctcctctggacctaaacctgaaatccccctctctgccctggctggatccgggggacccctttgcccttccctcggctcccagccctacagacttgctgtgtgacctcaggccagtgtgccgacctctctgggcctcagttttcccagctatgaaaacagctatctcacaaagttgtgtgaagcagaagagaaaagctggaggaaggccgtgggccaatgggagagctcttgttattattaatattgttgccgctgttgtgttgttgttattaattaatattcatattatttattttatacttacataaagattttgtaccagtgg

SEQ ID NO: 166349 - DNA, 1548 bp, Homo sapiens
  Payload ID: 12753
  Gene Symbol: PLAUR
  Gene Name: plasminogen activator, urokinase receptor
  Uniprot ID: Q03405
  ENST ID: ENST00000340093
  CDS Start-End: 231-1238
cagggccgagccagccccttcaccaccagccggccgcgccccgggaagggaagtttgtggcggaggaggttcgtacgggaggagggggaggcgcccacgcatctggggctgactcgctctttcgcaaaacgtctgggaggagtccctggggccacaaaactgcctccttcctgaggccagaaggagagaagacgtgcagggaccccgcgcacaggagctgccctcgcgacatgggtcacccgccgctgctgccgctgctgctgctgctccacacctgcgtcccagcctcttggggcctgcggtgcatgcagtgtaagaccaacggggattgccgtgtggaagagtgcgccctgggacaggacctctgcaggaccacgatcgtgcgcttgtgggaagaaggagaagagctggagctggtggagaaaagctgtacccactcagagaagaccaacaggaccctgagctatcggactggcttgaagatcaccagccttaccgaggttgtgtgtgggttagacttgtgcaaccagggcaactctggccgggctgtcacctattcccgaagccgttacctcgaatgcatttcctgtggctcatcagacatgagctgtgagaggggccggcaccagagcctgcagtgccgcagccctgaagaacagtgcctggatgtggtgacccactggatccaggaaggtgaagaagggcgtccaaaggatgaccgccacctccgtggctgtggctaccttcccggctgcccgggctccaatggtttccacaacaacgacaccttccacttcctgaaatgctgcaacaccaccaaatgcaacgagggcccaatcctggagcttgaaaatctgccgcagaatggccgccagtgttacagctgcaaggggaacagcacccatggatgctcctctgaagagactttcctcattgactgccgaggccccatgaatcaatgtctggtagccaccggcactcacgaaccgaaaaaccaaagctatatggtaagaggctgtgcaaccgcctcaatgtgccaacatgcccacctgggtgacgccttcagcatgaaccacattgatgtctcctgctgtactaaaagtggctgtaaccacccagacctggatgtccagtaccgcagtggggctgctcctcagcctggccctgcccatctcagcctcaccatcaccctgctaatgactgccagactgtggggaggcactctcctctggacctaaacctgaaatccccctctctgccctggctggatccgggggacccctttgcccttccctcggctcccagccctacagacttgctgtgtgacctcaggccagtgtgccgacctctctgggcctcagttttcccagctatgaaaacagctatctcacaaagttgtgtgaagcagaagagaaaagctggaggaaggccgtgggccaatgggagagctcttgttattattaatattgttgccgctgttgtgttgttgttattaattaatattcatattatttattttatacttacataaagattttgtaccagtgg

SEQ ID NO: 166350 - DNA, 1254 bp, Homo sapiens
  Payload ID: 12753
  Gene Symbol: PLAUR
  Gene Name: plasminogen activator, urokinase receptor
  Uniprot ID: Q03405
  ENST ID: ENST00000339082
  CDS Start-End: 47-892
agagaagacgtgcagggaccccgcgcacaggagctgccctcgcgacatgggtcacccgccgctgctgccgctgctgctgctgctccacacctgcgtcccagcctcttggggcctgcggtgcatgcagtgtaagaccaacggggattgccgtgtggaagagtgcgccctgggacaggacctctgcaggaccacgatcgtgcgcttgtgggaagaaggagaagagctggagctggtggagaaaagctgtacccactcagagaagaccaacaggaccctgagctatcggactggcttgaagatcaccagccttaccgaggttgtgtgtgggttagacttgtgcaaccagggcaactctggccgggctgtcacctattcccgaagccgttacctcgaatgcatttcctgtggctcatcagacatgagctgtgagaggggccggcaccagagcctgcagtgccgcagccctgaagaacagtgcctggatgtggtgacccactggatccaggaaggtgaagaagggcgtccaaaggatgaccgccacctccgtggctgtggctaccttcccggctgcccgggctccaatggtttccacaacaacgacaccttccacttcctgaaatgctgcaacaccaccaaatgcaacgagggcccaatcctggagcttgaaaatctgccgcagaatggccgccagtgttacagctgcaaggggaacagcacccatggatgctcctctgaagagactttcctcattgactgccgaggccccatgaatcaatgtctggtagccaccggcactcacgaacgctcactctggggaagctggttgccatgtaaaagtactactgccctgagaccaccatgctgtgaggaagcccaagctactcatgtataaatgccatgtggagatagagccccagatgtttcagccatctcagcccaggcaccagacaagtgggtgaagaagccaccttggacatgtagccccagcagatgtgatatagagaagaaacaggaaacttggctatattagtttcctagggctgcctgtgataaattattacaaactttataaactaacacattgtgtgcctatatcaaaacatcatggaaggacaggcacagtggctcatgcctgtagtcctagcactttgggagggtgagaaaggaagatctcttgagctcaggagttcaagatcagcctgggcaacacagtgagacctcatctccactaaaaataaaaaaaaattggctgga

SEQ ID NO: 166351 - DNA, 740 bp, Homo sapiens
  Payload ID: 12753
  Gene Symbol: PLAUR
  Gene Name: plasminogen activator, urokinase receptor
  ENST ID: ENST00000599546
  CDS Start-End: 505-740
cggagacagaacttcgcgggaaactagagtatctaacaatagaaactccggagggctgatggggccgggcctagaatttgggaataaattagtgggccgggagaggctctggagccgggtagaaccagggggagtgagtggagggatagttccattagggcactgggagtgacggtataacataaagatcgacgcgggtggggcaaggctagaacgtccccagcagaactggagaggcgtaatcgaccgagggccggtgcggtgagaaagacctaataggagcaggaatagaacgtactgatagagagggcggggatacgactgtcaggatatacgcctcacgaggacagaatgaaaggaaaaacgggccaaggcaggactttgggaaaggacttgtgggcagggatagaacgttcagttagtggggtggaggtagaacgtggacaacggacagactggaagtaccgccggccggaacccagcagaacatggacacgaatctgaatggacggggcctggagacttgcctcttggggcctgcggtgcatgcagtgtaagaccaacggggattgccgtgtggaagagtgcgccctgggacaggacctctgcaggaccacgatcgtgcgcttgtgggaagaaggagaagagctggagctggtggagaaaagctgtacccactcagagaagaccaacaggaccctgagctatcggactggcttgaagatcaccagccttaccga

SEQ ID NO: 166352 - DNA, 742 bp, Homo sapiens
  Payload ID: 12753
  Gene Symbol: PLAUR
  Gene Name: plasminogen activator, urokinase receptor
  ENST ID: ENST00000599892
  CDS Start-End: 65-742
ttggagagctggagggcggagacagaacttcgcgggaaactagacctcttggggcctgcggtgcatgcagtgtaagaccaacggggattgccgtgtggaagagtgcgccctgggacaggacctctgcaggaccacgatcgtgcgcttgtgggaagaaggagaagagctggagctggtggagaaaagctgtacccactcagagaagaccaacaggaccctgagctatcggactggcttgaagatcaccagccttaccgaggttgtgtgtgggttagacttgtgcaaccagggcaactctggccgggctgtcacctattcccgaagccgttacctcgaatgcatttcctgtggctcatcagacatgagctgtgagaggggccggcaccagagcctgcagtgccgcagccctgaagaacagtgcctggatgtggtgacccactggatccaggaaggtgaagaagggcgtccaaaggatgaccgccacctccgtggctgtggctaccttcccggctgcccgggctccaatggtttccacaacaacgacaccttccacttcctgaaatgctgcaacaccaccaaatgcaacgagggcccaatcctggagcttgaaaatctgccgcagaatggccgccagtgttacagctgcaaggggaacagcacccatggatgctcctctgaagagactttcctcattgactgccgaggccccatgaatcaatgtctggtagccaccggcactcac

SEQ ID NO: 166353 - DNA, 715 bp, Homo sapiens
  Payload ID: 12753
  Gene Symbol: PLAUR
  Gene Name: plasminogen activator, urokinase receptor
  ENST ID: ENST00000593447
  CDS Start-End: 1-401
gccgttacctcgaatgcatttcctgtggctcatcagacatgagctgtgagaggggccggcaccagagcctgcagtgccgcagccctgaagaacagtgcctggatgtggtgacccactggatccaggaaggtgaagaagggcgtccaaaggatgaccgccacctccgtggctgtggctaccttcccggctgcccgggctccaatggtttccacaacaacgacaccttccacttcctgaaatgctgcaacaccaccaaatgcaacgagggcccaatcctggagcttgaaaatctgccgcagaatggccgccagtgttacagctgcaaggggaacagcacccatggatgctcctctgaagagactttcctcattgactgccgaggcactctcctctggacctaaacctgaaatccccctctctgccctggctggatccgggggacccctttgcccttccctcggctcccagccctacagacttgctgtgtgacctcaggccagtgtgccgacctctctgggcctcagttttcccagctatgaaaacagctatctcacaaagttgtgtgaagcagaagagaaaagctggaggaaggccgtgggccaatgggagagctcttgttattattaatattgttgccgctgttgtgttgttgttattaattaatattcatattatttattttatacttacataaagattttgtaccagtggacaa

SEQ ID NO: 166354 - DNA, 679 bp, Homo sapiens
  Payload ID: 12753
  Gene Symbol: PLAUR
  Gene Name: plasminogen activator, urokinase receptor
  ENST ID: ENST00000602141
  CDS Start-End: 222-679
ggggccgggcctagaatttgggaataaattagtgggccgggagaggctctggagccgggtagaaccagggggagtgagtggagggatagttccattagggcactgggagtgacggtataacataaagatcgacgcgggtggggcaaggctagaacgtccccagcagaactggagaggcgtaatcgaccgagggccggtgcgcctcttggggcctgcggtgcatgcagtgtaagaccaacggggattgccgtgtggaagagtgcgccctgggacaggacctctgcaggaccacgatcgtgcgcttgtgggaagaaggagaagagctggagctggtggagaaaagctgtacccactcagagaagaccaacaggaccctgagctatcggactggcttgaagatcaccagccttaccgaggttgtgtgtgggttagacttgtgcaaccagggcaactctggccgggctgtcacctattcccgaagccgttacctcgaatgcatttcctgtggctcatcagacatgagctgtgagaggggccggcaccagagcctgcagtgccgcagccctgaagaacagtgcctggatgtggtgacccactggatccaggaaggtgaagaagggcgtccaaaggatgaccgccacctccgtggctgtggctaccttcccggctgcccgggctc

SEQ ID NO: 166355 - DNA, 842 bp, Homo sapiens
  Payload ID: 12753
  Gene Symbol: PLAUR
  Gene Name: plasminogen activator, urokinase receptor
  ENST ID: ENST00000597107
  CDS Start-End: 22-162
cacaggagctgccctcgcgacatgggtcacccgccgctgctgccgctgctgctgctgctccacacctgcgtcccagcctgggcgacagcgcgagactccatttcaaaaaaaaaaaaaagaaaaaagaaagaaaggagaaacttgaggcgctacaatctctgaaataacagaagtgtagaatttgggttccacagacaacctggctttttcccggagcgcacttgccaatctgctgctgtggaagggaaatagagcccagacggaaagagagtcgctagactgagaagacggaggttggagtttggggctgccagaatgtctggaagatgagagttaaaatcctggaatggatgggaccacagaaaagggagttcccaacctgcaaacaaatctccctcaagtcattggcaagctctacatgcacagggtgagagtccaagaaacttggaagagaaaaatagcaactgggaagctacaaaagcgaacaaggcttccagcagacatgtgatgctggggacacaggttgccaagctgaagaggccttggccgggctgtcacctattcccgaagccgttacctcgaatgcatttcctgtggctcatcagacatgagctgtgagaggggccggcaccagagcctgcagtgccgcagccctgaagaacagtgcctggatgtggtgacccactggatccaggaaggtgaagaagggcgtccaaaggatgaccgccacctccgtggctgtggctaccttcccggctgcccgggctccaatggtttccacaacaacgacaccttccacttcctgaaatgctgcaacaccaccaaatgcaacgagggcccaa

SEQ ID NO: 166356 - DNA, 555 bp, Homo sapiens
  Payload ID: 12753
  Gene Symbol: PLAUR
  Gene Name: plasminogen activator, urokinase receptor
  ENST ID: ENST00000593714
  CDS Start-End: 1-555
cctcttggggcctgcggtgcatgcagtgtaagaccaacggggattgccgtgtggaagagtgcgccctgggacaggacctctgcaggaccacgatcgtgcgcttgtgggaaggccgggctgtcacctattcccgaagccgttacctcgaatgcatttcctgtggctcatcagacatgagctgtgagaggggccggcaccagagcctgcagtgccgcagccctgaagaacagtgcctggatgtggtgacccactggatccaggaaggtgaagaagggcgtccaaaggatgaccgccacctccgtggctgtggctaccttcccggctgcccgggctccaatggtttccacaacaacgacaccttccacttcctgaaatgctgcaacaccaccaaatgcaacgagggcccaatcctggagcttgaaaatctgccgcagaatggccgccagtgttacagctgcaaggggaacagcacccatggatgctcctctgaagagactttcctcattgactgccgaggccccatgaatcaatgtctggtagccaccggcactcacg

SEQ ID NO: 166357 - DNA, 1205 bp, Homo sapiens
  Payload ID: 12753
  Gene Symbol: PLAUR
  Gene Name: plasminogen activator, urokinase receptor
  ENST ID: ENST00000601723
  CDS Start-End: 34-894
agggaccccgcgcacaggagctgccctcgcgacatgggtcacccgccgctgctgccgctgctgctgctgctccacacctgcgtcccagcctcttggggcctgcggtgcatgcagtgtaagaccaacggggattgccgtgtggaagagtgcgccctgggacaggacctctgcaggaccacgatcgtgcgcttgtgggaagaaggagaagagctggagctggtggagaaaagctgtacccactcagagaagaccaacaggaccctgagctatcggactggcttgaagatcaccagccttaccgaggttgtgtgtgggttagacttgtgcaaccagggcaactctggccgggctgtcacctattcccgaagccgttacctcgaatgcatttcctgtggctcatcagacatgagctgtgagaggggccggcaccagagcctgcagtgccgcagccctgaagaacagtgcctggatgtggtgacccactggatccaggaaggtgaagaagggcgtccaaaggatgaccgccacctccgtggctgtggctaccttcccggctgcccgggctccaatggtttccacaacaacgacaccttccacttcctgaaatgctgcaacaccaccaaatgcaacgagggcccaaaaccgaaaaaccaaagctatatggtaagaggctgtgcaaccgcctcaatgtgccaacatgcccacctgggtgacgccttcagcatgaaccacattgatgtctcctgctgtactaaaagtggctgtaaccacccagacctggatgtccagtaccgcagtggggctgctcctcagcctggccctgcccatctcagcctcaccatcaccctgctaatgactgccagactgtggggaggcactctcctctggacctaaacctgaaatccccctctctgccctggctggatccgggggacccctttgcccttccctcggctcccagccctacagacttgctgtgtgacctcaggccagtgtgccgacctctctgggcctcagttttcccagctatgaaaacagctatctcacaaagttgtgtgaagcagaagagaaaagctggaggaaggccgtgggccaatgggagagctcttgttattattaatattgttgccgctgttgtgttgttgttattaattaatattcatattatttattttatacttacataaagattttgtaccagtgga

SEQ ID NO: 166358 - DNA, 897 bp, Homo sapiens
  Payload ID: 12753
  Gene Symbol: PLAUR
  Gene Name: plasminogen activator, urokinase receptor
  ENST ID: ENST00000593939
  CDS Start-End: 441-897
cggagggctgatggggccgggcctagaatttgggaataaattagtgggccgggagaggctctggagccgggtagaaccagggggagtgagtggagggatagttccattagggcactgggagtgacggtataacataaagatcgacgcgggtggggcaaggctagaacgtccccagcagaactggagaggcgtaatcgaccgagggccggtgcggtgagaaagacctaataggagcaggaatagaacgtactgatagagagggcggggatacgactgtcaggatatacgcctcacgaggacagaatgaaaggaaaaacgggccaaggcaggactttgggaaaggacttgtgggcagggatagaacgttcagttagtggggtggaggtagaacgtggacaacggacagactggaagtaccgccggccggaacccagcagaacatggacacgaatctgaatggacggggcctggagacttggtcctcttggggcctgcggtgcatgcagtgtaagaccaacggggattgccgtgtggaagagtgcgccctgggacaggacctctgcaggaccacgatcgtgcgcttgtgggaagaaggagaagagctggagctggtggagaaaagctgtacccactcagagaagaccaacaggaccctgagctatcggactggcttgaagatcaccagccttaccgaggttgtgtgtgggttagacttgtgcaaccagggcaactctggccgggctgtcacctattcccgaagccgttacctcgaatgcatttcctgtggctcatcagacatgagctgtgagaggggccggcaccagagcctgcagtgccgcagccctgaagaacagtgcctggatgtggtgacccactggatccaggaaggtgaagaag

SEQ ID NO: 166359 - DNA, 607 bp, Homo sapiens
  Payload ID: 12753
  Gene Symbol: PLAUR
  Gene Name: plasminogen activator, urokinase receptor
  ENST ID: ENST00000595038
  CDS Start-End: 1-463
ctgtgagaggggccggcaccagagcctgcagtgccgcagccctgaagaacagtgcctggatgtggtgacccactggatccaggaaggtgaagaagggcgtccaaaggatgaccgccacctccgtggctgtggctaccttcccggctgcccgggctccaatggtttccacaacaacgacaccttccacttcctgaaatgctgcaacaccaccaaatgcaacgagggcccaatcctggagcttgaaaatctgccgcagaatggccgccagtgttacagctgcaaggggaacagcacccatggatgctcctctgaagagactttcctcattgactgccgaggccccatgaatcaatgtctggtagccaccggcactcacggatgtggacatttttgccatggaaaagtggaattccggctgggtgcggtggctgaagcttgtactctcagcactttgggaggctgaggccggaggatctcttgaggccaggagtttgagaccagcctgggcaacatagcaagacccccatctctacaaaaagaaaaatggaattctttggtggatttctcgtgggttgtggggatttgctgaagacatcttgggctttca

SEQ ID NO: 166360 - DNA, 932 bp, Homo sapiens
  Payload ID: 12754
  Gene Symbol: PLGRKT
  Gene Name: plasminogen receptor, C-terminal lysine transmembrane protein
  Uniprot ID: Q9HBL7
  ENST ID: ENST00000223864
  CDS Start-End: 223-666
gagcgaggcccggtccctgcagcgggcgaaaggagcccgggcctggaggtttgcgtaccggtcgcctggtcccggcaccagcgccgcccagtgtggtttcccataaggaagctcttcttcctgcttggcttccacctttaacccttccacctgggagcgtcctctaacacattcagactacaagtccagacccaggagagcaaggcccagaaagaggtcaaaatggggtttatattttcaaaatctatgaatgaaagcatgaaaaatcaaaaggagttcatgcttatgaatgctcgacttcagctggaaaggcagctcatcatgcagagtgaaatgagggaaagacaaatggccatgcagattgcgtggtctcgggaattcctcaaatattttggaactttttttggccttgcagccatctctttaacagctggagcgattaaaaaaaagaagccagccttcctggtcccgattgttccattaagctttatcctcacctaccagtatgacttgggctatggaacccttttagaaagaatgaaaggtgaagctgaggacatactggaaacagaaaagagtaaattgcagctgccaagaggaatgatcacttttgaaagcattgaaaaagccagaaaggaacagagtagattcttcatagacaaatgaaatcatgcttaccaatcaaatctcaaagcacagaattattgacttgaatcatggtttttacagttttttaaatgctcaagattttgatattatagattttattttaaaatattaaaatgcaagatagttttgagctattttaaaataaaatttataacattcaacacaaaatcatggaggtgctctaaataacttttagatttcctctctctgtgtgcattaccaatatctaagtgtaaaattaataaattgttttgaattcctgg

SEQ ID NO: 166361 - DNA, 1169 bp, Homo sapiens
  Payload ID: 12755
  Gene Symbol: PLGLB1
  Gene Name: plasminogen-like B1
  Uniprot ID: Q02325
  ENST ID: ENST00000355705
  CDS Start-End: 70-360
actctcatgtaagtcaacaacatcctgggattgggacacactttctgggcactgctggccagtcccaaaatggaacataaggaagtggttcttctacttcttttatttctgaaatcaggtcaaggagagcccctggatgactatgtgaatacccaggggccttcactgttcagtgtcactaagaagcagctgggggcaggaagcagagaagaatgtgcagcaaaatgtgaagaggacaaagaattcacctgcagggcattccaatatcacagtaaagagcaacaatgtgtgataatggctgaaaacaggaagtcctccataatcattaggatgagagatgcagttttatttgaaaagtaaatgtatctttcagagtgcaagactgggaatggaaagaactacagagggacgatgtccaaaacaaaaaatggcatcacctgtcaaaaatggagttccacttctccccgcaaacctaggtcagacttttcctttcatctttgtgttcatctactgtaaagtgtccgtctgtgtctgtgagggattggttccaggacccctgtggctaccaaaatccatgcttctcaagtcccttatgtaaaatggtgcagtatttgcatataacctacataccttctcttgtgcaatccctaatataatgtaaatgctatgtaatcgttgttatactgtattgtttttatttgtattatgttttattgtcatattgttattttctctcatctttttcaagtcttttccatccacagttggttgaatttgtggatgtggaacccatggatacagagggccaactgtatttaggataatttcatcacttttaattcaaaccagaatatgtgaataagcagacagaaagaatctttttgatgtcgatgttcaactatttttggcaccatagtagaacatggttgctttctattttttcttgggtatggaggtttcttgaagacctagaacatagaagaatgcctagttaaaaaaaaaaatcaatgaaactacgagttttaggccaaatctgagaaaagaccaaagatgactatgtttgggactgaagtaaacatatcaagttagaactctcatcacatgtttgactcaaattgtggagcaaaatagtaaataaaatataaaaatgaaaatgaagatacgtgaaa

SEQ ID NO: 166362 - DNA, 960 bp, Homo sapiens
  Payload ID: 12755
  Gene Symbol: PLGLB1
  Gene Name: plasminogen-like B1
  Uniprot ID: Q02325
  ENST ID: ENST00000409310
  CDS Start-End: 70-360
actctcatgtaagtcaacaacatcctgggattgggacacactttctgggcactgctggccagtcccaaaatggaacataaggaagtggttcttctacttcttttatttctgaaatcaggtcaaggagagcccctggatgactatgtgaatacccaggggccttcactgttcagtgtcactaagaagcagctgggggcaggaagcagagaagaatgtgcagcaaaatgtgaagaggacaaagaattcacctgcagggcattccaatatcacagtaaagagcaacaatgtgtgataatggctgaaaacaggaagtcctccataatcattaggatgagagatgcagttttatttgaaaagtaaaggctgcaatcaagatgttggcatggctggggtctcatctgaaggctggactggagaagaatctacttccaaacttatgtggtagttggaagaatttagttcctcaaggctgctaaactgatggcctgtgttccttgcctctgggatggtagcttgcttcaacaaagtgtgcaagcagagaagacagagagagtccgctagcaagatagaagccacaatctcttgtaatctatcatttttgctgtattctactggttaaaaataactcattaggttagcctactggctctcagggggaagagattatacaaaggcatgaatttctggaggagggaatgagggcaaagaactctgaaaagtttctcttccacaatctgaagaacttctagaaagtagaaggaagcaatattgcttagggatggacaacttggcactggttatgtgttccaagtgaggtaaccttgttcccaggaataaagagaaccagatgactgtaaacatttccctaaactgaaatgcactgttgtatgttcacctgaaatgaatggtgtaagctgaatatgagatttttgacaaaataaaaattttgctgtgttctca

SEQ ID NO: 166363 - DNA, 553 bp, Homo sapiens
  Payload ID: 12755
  Gene Symbol: PLGLB1
  Gene Name: plasminogen-like B1
  Uniprot ID: Q02325
  ENST ID: ENST00000409801
  CDS Start-End: 70-360
actctcatgtaagtcaacaacatcctgggattgggacacactttctgggcactgctggccagtcccaaaatggaacataaggaagtggttcttctacttcttttatttctgaaatcaggtcaaggagagcccctggatgactatgtgaatacccaggggccttcactgttcagtgtcactaagaagcagctgggggcaggaagcagagaagaatgtgcagcaaaatgtgaagaggacaaagaattcacctgcagggcattccaatatcacagtaaagagcaacaatgtgtgataatggctgaaaacaggaagtcctccataatcattaggatgagagatgcagttttatttgaaaagtaaatgtatctttcagagtgcaagactgggaatggaaagaactacagagggacgatgtccaaaacaaaaaatggcatcacctgtcaaaaatggagttccacttctccccgcaaacctagattctcacctgctacacacccctcagagggactggaggaatccagacaacgatgcgcaggggccctggtgctatact

SEQ ID NO: 166364 - DNA, 558 bp, Homo sapiens
  Payload ID: 12755
  Gene Symbol: PLGLB1
  Gene Name: plasminogen-like B1
  ENST ID: ENST00000409795
  CDS Start-End: 70-339
actctcatgtaagtcaacaacatcctgggattgggacacactttctgggcactgctggccagtcccaaaatggaacataaggaagtggttcttctacttcttttatttctgaaatcaggtcaaggagagcccctggatgactatgtgaatacccaggggccttcactgttcagtgtcactaagaagcagctgggggcaggaagcagagaagaatgtgcagcaaaatgtgaagaggacaaagaattcacctgcaggtattttcatcgtcgttgcacctacccagaaatctgtaattcagatgggcattccaatatcacagtaaagagcaacaatgtgtgataatggctgaaaacaggaagtcctccataatcattaggatgagagatgcagttttatttgaaaagtaaatgtatctttcagagtgcaagactgggaatggaaagaactacagagggacgatgtccaaaacaaaaaatggcatcacctgtcaaaaatggagttccacttctccccgcaaacctagattctcacctgctacacacccctcagagggactgg

SEQ ID NO: 166365 - DNA, 1173 bp, Homo sapiens
  Payload ID: 12756
  Gene Symbol: PLGLB2
  Gene Name: plasminogen-like B2
  Uniprot ID: Q02325
  ENST ID: ENST00000359481
  CDS Start-End: 68-358
tctcatgtaagtcaacaacatcctgggattgggacacactttctgggcactgctggccagtcccaaaatggaacataaggaagtggttcttctacttcttttatttctgaaatcaggtcaaggagagcccctggatgactatgtgaatacccaggggccttcactgttcagtgtcactaagaagcagctgggggcaggaagcagagaagaatgtgcagcaaaatgtgaagaggacaaagaattcacctgcagggcattccaatatcacagtaaagagcaacaatgtgtgataatggctgaaaacaggaagtcctccataatcattaggatgagagatgcagttttatttgaaaagtaaatgtatctttcagagtgcaagactgggaatggaaagaactacagagggacgatgtccaaaacaaaaaatggcatcacctgtcaaaaatggagttccacttctccccgcagacctaggtcagacttttcctttcatctttgtgttcatctactgtaaagtgtccgtctgtgtctgtgagggattggttccaggacccctgtggctaccaaaatccatgcttctcaagtcccttatgtaaaatggtgcagtatttgcatataacctacataccttctcttgtgcaatccctaatataatgtaaatgctatgtaatcgttgttatactgtattgtttttatttgtattatgttttattgtcatattgttattttctctcatctttttcaagtcttttccatccacagttggttgaatttgtggatgtggaacccatggatacagagggccaactgtatttaggataatttcatcacttttaattcaaaccagaatatgtgaataagcagacagaaagaatctttttgatgtcgatgttcaactatttttggcaccatagtagaacatggttgctttctattttttcttgggtatggaggtttcttgaagacctagaacatagaagaatgcctagttaaaaaaaaaaatcaatgaaactacgagttttaggccaaatctgagaaaagaccaaagatgactatgtttgggactgaagtaaacatatcaagttagaactctcatcacatgtttgactcaaattgtggagcaaaatagtaaataaaatataaaaatgaaaatgaagatacgtgaaattcaaa

SEQ ID NO: 166366 - DNA, 522 bp, Homo sapiens
  Payload ID: 12756
  Gene Symbol: PLGLB2
  Gene Name: plasminogen-like B2
  Uniprot ID: Q02325
  ENST ID: ENST00000410086
  CDS Start-End: 55-345
aacaacatcctgggattgggacacactttctgggcactgctggccagtcccaaaatggaacataaggaagtggttcttctacttcttttatttctgaaatcaggtcaaggagagcccctggatgactatgtgaatacccaggggccttcactgttcagtgtcactaagaagcagctgggggcaggaagcagagaagaatgtgcagcaaaatgtgaagaggacaaagaattcacctgcagggcattccaatatcacagtaaagagcaacaatgtgtgataatggctgaaaacaggaagtcctccataatcattaggatgagagatgcagttttatttgaaaagtaaatgtatctttcagagtgcaagactgggaatggaaagaactacagagggacgatgtccaaaacaaaaaatggcatcacctgtcaaaaatggagttccacttctccccgcagacctagattctcacctgctacacacccctcagagggactggaggaatccagacaacgatgcgcaggg

SEQ ID NO: 166367 - DNA, 1512 bp, Homo sapiens
  Payload ID: 12757
  Gene Symbol: PLLP
  Gene Name: plasmolipin
  Uniprot ID: Q9Y342
  ENST ID: ENST00000219207
  CDS Start-End: 148-696
caggctcccagccccgacgcctcctgcagcgcctggagccacacagggatccggagcctgggggaaaagcggcgcgggagccggcacccaccgctggaggggcggcgacggcggccgtagcgacctcgggaggcaagcggagccgccatggccgagttcccgtcgaaagttagcacgcggaccagcagtcctgcgcagggcgccgaagcctcggtgtcggcgctgcgcccggacctgggcttcgtgcgctcccgcctcggggcgctcatgctgctgcagctggtgctggggctgctggtgtgggcgctgattgcggacaccccgtaccacctgtatccggcctatggctgggtgatgttcgtcgctgtcttcctctggctggtgacaatcgtcctcttcaacctctacctgtttcagctgcacatgaagttgtacatggttccctggccactggtgttaatgatctttaacatcagcgccaccgttctctacatcaccgccttcatcgcctgctctgcggcagttgacctgacatccctgaggggcacccggccttataaccagcgcgcggctgcctcgttctttgcgtgtttggtgatgatcgcctatggagtgagtgccttcttcagctaccaggcctggcgaggagtaggcagcaatgcggccaccagtcagatggctggcggctatgcctaaaccacctgtgccacggccccctctggggctgaagccgccgctgggtcacagagcagggtcaccctgcaagcctgaagctggggagccctgcgtggagtcagcccaacagggactgcatttgctcctctctgcccgtcagacataagctctcacagcgctaaggaagcaggcccaggctggcaggcatctcggcttgcaggaggccaactgctgagacctcttctccatcccccttattcagtggaagatgacgggggatctgaggctgtgtctctgccttgtctttagaggacttcagcgtccaagactggggcccacccttctcaccagcactaaatgcactaacaaggactccagacctgcagccccagacccgccgtagtataagcctaacaagcaacacgtagcaccttagtctttgttccaggagagctgagcaagctggtgaaaccactctccttcctttaaacaccgtttcaaccaacctctccctggagccaacctgtaaaaagtgggttgattgctgacagcatggtcttccctccctgcatttcagacataccagttactgaaagcaaatcagttttaagtgatttctcagtgctgaaaagcctgtccaggtttccttccctttcccaagcctctctctgtaatactccctttgggcgaagctaacatcggtgcctccccgaccttgctgactaggcacatgggacgcaaaggagggagggaagcaaggccttgcctggcgagttgtcatgtggttggtggtgactgttttattttttttaataaaaataaagatgagagaaatta

SEQ ID NO: 166368 - DNA, 665 bp, Homo sapiens
  Payload ID: 12757
  Gene Symbol: PLLP
  Gene Name: plasmolipin
  ENST ID: ENST00000569059
  CDS Start-End: 133-507
gacgcctcctgcagcgcctggagccacacagggatccggagcctgggggaaaagcggcgcgggagccggcacccaccgctggaggggcggcgacggcggccgtagcgacctcgggaggcaagcggagccgccatggccgagttcccgtcgaaagttagcacgcggaccagcagtcctgcgcagggcgccgaagcctcggtgtcggcgctgcgcccggacctgggcttcgtgcgctcccgcctcggggcgctcatgctgctgcagctgttaatgatctttaacatcagcgccaccgttctctacatcaccgccttcatcgcctgctctgcggcagttgacctgacatccctgaggggcacccggccttataaccagcgcgcggctgcctcgttctttgcgtgtttggtgatgatcgcctatggagtgagtgccttcttcagctaccaggcctggcgaggagtaggcagcaatgcggccaccagtcagatggctggcggctatgcctaaaccacctgtgccacggccccctctggggctgaagccgccgctgggtcacagagcagggtcaccctgcaagcctgaagctggggagccctgcgtggagtcagcccaacagggactgcatttgctcctctctgcccgtcagacataagctctcacagcgc

SEQ ID NO: 166369 - DNA, 449 bp, Homo sapiens
  Payload ID: 12757
  Gene Symbol: PLLP
  Gene Name: plasmolipin
  ENST ID: ENST00000564018
  CDS Start-End: 176-449
atcgaagccagacagctgggctccagagttcatgctgttagccactacccatgctctgctgggatggtcaggcccatcctgccgtgtgggaacagcctgacaggtgctggggctgctggtgtgggcgctgattgcggacaccccgtaccacctgtatccggcctatggctgggtgatgttcgtcgctgtcttcctctggctggtgacaatcgtcctcttcaacctctacctgtttcagctgcacatgaagttgtacatggttccctggccactggtgttaatgatctttaacatcagcgccaccgttctctacatcaccgccttcatcgcctgctctgcggcagttgacctgacatccctgaggggcacccggccttataaccagcgcgcggctgcctcgttctttgcgtgtttggtgatgatcgcctatggagtgagtgccttcttca

SEQ ID NO: 166370 - DNA, 7578 bp, Homo sapiens
  Payload ID: 12757
  Gene Symbol: PLLP
  Gene Name: plasmolipin
  ENST ID: ENST00000613167
  CDS Start-End: 122-607
cagcgcctggagccacacagggatccggagcctgggggaaaagcggcgcgggagccggcacccaccgctggaggggcggcgacggcggccgtagcgacctcgggaggcaagcggagccgccatggccgagttcccgtcgaaagttagcacgcggaccagcagtcctgcgcagggcgccgaagcctcggtgtcggcgctgcgcccggacctgggcttcgtgcgctcccgcctcggggcgctcatgctgctgcagctggtgctggggctgctggtgtgggcgctgattgcggacaccccgtaccacctgtatccggcctatggctgggtgatgttcgtcgctgtcttcctctggctggtgacaatcgtcctcttcaacctctacctgtttcagctgcacatgaagttgtacatggttccctggccactggtgttaatgatctttaacatcagcgccaccgttctctacatcaccgccttcatcgcctgctctgcggcagttgacctgacatccctgaggggcacccggccttataaccagcgcgcggctgcctcggtgcttgtaacctccaggagacctcagcttgactgtagaagatgcctgctgtagggcagttcacgttctggagtcgttcagcaccacctgcgaactctttgaccggaggaaggctgcctatacttcctgcttgctgggtctggaacagtcctggtttatgctgtttgtgctggcataaatagaatagcacggccttttattctcacaagtgactcagtttgacaataacttagtcacccttgctttgggcaggttaggtgagcttactgaatcaaagatttcaacaatatcatctaccttgaaagtctgtgaagcttggaggtcatataatcaaggtggctggccatgctgcctgctcagagctggtagagacagcagaggaaagcagctgagtactcctgagcttatttttccaacaccacagaacaacgttctctgaacaataaggtaaaagcatttctaggtaccctctgtacccttttgttattttttatttttattttttggagaccgagtcttgctctagtgcccaggctggagtgcaatggcgcaatcttggctcactgcaatctccgccttctgggttcaagcaattctcctgcctcagcctcctgagtagctgagactacaggtgagcgccaccacgcccagctgattttttgtatttttagtagagatggggtttcaccatgttagccaggatggtcttgatctcctgacttcatgatccgcctgccttagcctcccaaagtgctgggattacaggtgtgagccaccacacctggccgattttttttttttttaagagacagggtcttgctctcttgcccaggttggagtacagtgccacaactacagctcactgcagccttgactgcccaggctcaagcaatcctcccacctcagcttcctcagtagcttggactacaagtgcaggccaccatgcccagctaatttttgtttttttttttttttgagatggagtctcactttgtcacccaggctggactgcagtggcgtgatctcggctcactgcaacctctgcctcccagattcaagcgattctcctgcctcagcctcccgagtaacggactacaggtgcgtgccaccatgcctggctaatgttttgtatttttagtagagacggggtttcaccgtgttagccaggatggtctcgatctcctgacctcgtgatccgcccgtctcggcctcccaaagtgctgggattaccagcgtgagccactgtgcccggctgatttttaaattttttgtagacattgggtctcgctatattgcttaggctggtcttaaactcccagcttcaagtgatcctcccatctcagcctcccaaagcgctgagattatcggcatgaaccaccacacttggccctggtataaatattaatagcatcactttttactctaaagtctcggagtttgaataataaattagtccttccaggagtaagttataagagtttggttttaaggaagggcaatacacttaaatgtaaaacaaaatcccaggcaagttagagagctcacccctcttatgtttccaacatgaatcaaaagcctgtttcaggggggacattaaaggcattcagtcaatgctaaggctcagcagtttgtgtgactactgcttcccactggggaggagtcctaagcaagaggactggggcttcctcaccccagggcaggtgggagccccatcaaaggtggcacctgacatcacagtctaagtgtctgaggatggagagacaggctgctagtttattttaaaagaaatcagaatgtctacttataatattaagtgacaacagacttgcctcctttttgctgagcagaaagggtgaaaaaaccagccaggcatggtggctcacacctgtgatcccagcactttgggaggtgggtgatcacctgaagtcaggagttcaagaccagcctgaccaacatggtgaaaccctgtctctactaaaaatacaaaaattagctgggcgtgtttgtggacacctataatcccggctgcttgggaggctgaggcagcagaatcactggaactcgggaggtggaggttgcagtgtgccgagatcgtgccattgcactccagcctgggcaacaaaagcaaaactccattcccaaaaaaaaaagaaaaaaaaaagggtgaaaaaccaatttgcctttatcatcgttttttcatcatttaatctctggacttgtccactggccttttctcaagtaggcaggctggtccacaggtcttagcaagtgctcccagcatgcctgggctgtggtggacctcccatttatagacaaagcaagggaaagcaagcccaggagaggtggcatttaaaaaaaaaaaaaaaagaccaaagcaataattaataaccttatggcagtggctacattaaagaaagaatacaactcattgagaatggtggttcttgcgaaacacctgaagttttactcatggtacaaaagtatttaataagtgacacatcagtacagaaacacagagcttgtagcttgtcctttaaaaccagaatggccaagtgaaaagtcagtacagattcttatttttactattaaaaaaaaaaaatcaaagggacacactgggaattgaactactatgctttttcttcgttctagagatgacatatatgttttctgataagtaatctaccacacattgcactaaaccaaagcatacaaacagccagtaaagctgtgctctacctgctactcatgctgggctggacagtggaacaccatcttggtaggagagattttgacaggaagaaactgcagagtccctacctaacccagagaaccttacaaactggtttatacacaaaggattttcagcaaacatgcaaacacactaacatgctataggaatatgttttagtctatttctagcacacagcatacattcataggtgcccagtaaaataggaatgaatgtcaatgtagaaagcatttttgccttcacagtactaacaaacacctaaaaagcacacagcatataatactttgatctttaagtggataatcatggaagttccaagatcacatccactaggttagcctgagtattcatctataaaaatattttttttttcaaaaataatgcttaaaagagacttctagaaacagtgggactacatcaggaccagaagacagtgacacaaggactgcaaatgttaagactaggagtagcttttcacatggagcttttatgtagaggacgtctccttctgttgattcctacagccgagacaagatgtgatcacaggagactccaaaatctcaaactgggcttgagtaacaccctagataaacatcaggaaccccactgaggctgaagtactgaaactgtggcccatgtgaaaaagaggtgcaagtgcacaaagattcatgcagagcctgctggaacagagggtggtggcggcgggttagtccacacttacacaccagcaggtatgctggggaagggccccccaggtggagtgcctgacatagggctcgctccagaggcgtctgactcagaagctcctgagagaggtgtctacttgaggtggggaggagtactatggttaatgaatacaagaaggtgtttcaggataaataggtccaggagggttaggtcattttggttttgacctattaatacttaacataaatgaagagttacataacagagtcagtctttccaagatgtgttctgtcatcatgagctgagcctattgggctggtgacatccagaatgatcccattcattggctggaggtaggacctagtgccgcagattgttctgggaagctggcagagaagatgatttgcacaatgaagtcaccactaagccactgcttaagtccagtcctcggccttctttttcctatatgagaaaacaaccaaaggaaggactagaaagagccctggcttggaatcttgcctctgacatggggaaggcagagctgaaggtgggaacgtggacctccagagtacataggaagggaacacaggttattggttattctgcatttctgctcaatactggcctgccctagtcttaattttttttaatattatttttaaagaggtagggtcttgctctgtcacccaggctggagtatagtggcttgatcacagctaactgctgcctggaattcctgggctcaagtggtcctcctgcctcagcctcctgagtagctaggactacaggtgtgcaccactacagctgactaacttttttatttttatttttgtagagacagggtcttgatatgtcacttaggctggtcttgaactcctgggctcaagtgattctcctgccttggcctcccaaagcgctggaattgtaagtatgagccactgtgtccagcctggccctggtcattcttaaaatgcactcttaaaatgtacctcccttcactggaaaacatttttctttctttctttttttttttttttgagataggggtcttgctatgttgcccaggctggagtgcagtggctattcacaggcaccactgctgtgtaatacagccccaaactcctaggctcaagtgattctcctgcctcagccttcgaagtagctgggactacaggcatgcacaaccacacccaacaccatttctttttcttttctttttttttttttgacacagggtctgactctgtcacccaggctggactgtagcagtacaatcacagctcacagcaatctcaaccttctgggctcaagcggtcctcccacccagcccccaaagtagctgactgggactacagatgcacaccagcacaccaagctaatttttgtatttttcatagagacagggttttgccatgttgccttggctggtctcaaactcctgagctcaagccatctgcctgcctcggcctcccaaagtgctgggattataggtgtgagttaccatgcccagtctcctatttttcttataaagagcttgcattatatgaaaagcaaggcagggccaggtgcggtggctcacgcctgtaatcccaacactttgggaggccgaggcggaccatgcttcaggagtttgagaccagcctggccaacatggtgaaaccctgtctctactaaaaatacaagaattagctgggcgtggtggcaggtgcctgtagtatcagctactcgggaggctgaggcaggagtattgcttgaacctggaaggcagaggttccagtgagccaagatggtgccactgcactccagcctgggtgacaagagcaaaactctgtctcaaaaaaaaaaataaataaaagaaaggcaaggcagaatgagacctgagacctgctttttcggttttgtccttctgattaggaactctaagttggtacctgggcttgtttcatgaaaacatgagaaggtcccagccacaacagaatagcagctcactcttctgatgcctcatcggccagtttgaagggagaatgatgggggaagcgtgggaggttcatgttcggtatttctacctggaattttctaagtggctcaaagtggctaaataaataggagtagtaacttactgctctgtagtccaaaaacatttctttaaaagccagaaaatctgtgaaggtgagcagcatgtcgaatatgtcaccagccacttcatccttatggtgcctgcaaacggaacagatggctgtttcgtgaatgaatgatgagacagtcctcaagattgctttcgtttttctttccaccaccccagccccaccccccgcattatttttgttttgtttttttagagactgggtcttgctctgtcacccaggcaggagtgcaggggtgcaattatagctcactgtagccttgaactgctgggctcaagggattctccagcctcagcctcctgagtagctaggcccacaggtatgcaacaccacacctgactaatttattttttgtagggtcggggcctcactatgtcacccaggctggtcttgaactcctgggctcaagtgatcctcctcccttggcctcccaaagcactgagaacacaagcgtgagccaatgcctgatcttttcaagatttcattaaaaggtttgagggcttcctccataggacctaaccaccaacggcatgcacaggaaaacaaacaaggagcgtcttttggtcagcctagggaaggaagaaagtgagaaaacaaaacaaaacacaaaaatcagtcaagctcaactcactgtaatgttgtggtgaaggctgccatgttgaactcaggaatccgctgcagcagctgttcttcaatgtatttttctaccaaagaaatctgcaacagtggaaaggattttggtgagaccatactttgggaaaacaagacttcttttcagaaagcctgcccagccctttctaaacatttcctgaggtctgtgtgccacaatctacactgagtgccaaggataccaaagaggaccaaaacacagctcctgtcctggagaagtactcagcctggtgtggaagagaagccttagctgataatggtgctgtaacagggtggatgctctgacacaggtggagacagtgagtagcacggtacccacacccacaacccagtgcaggatgcagtaagtgggggctttgcctcctgggtagagggcatctgtgtaacagaacatacggacatggaggcagtcacaggttccttctgggcaggtttgtttatgccatgcttctgtgttaagaaaataaagtcctggaggccaaaatggattcttagatgacagaatcccagggggctgttaagaggcctcagggtaaagtgtagagacccaagggtgacgagctgaggttcctgggttccagtcttggtttttccaccaaatagttagtgatcttggtctcagttttcacttttacttaatagtcatgcatatatgactggattatatagaagaaagaaagagtatgtgaaagcagaaaggtttgtcaaaagcatgcaaatgcaaggtatgaagaactcatgtactgtgattaaaagcaggattatgataagccaaa

SEQ ID NO: 166371 - DNA, 3755 bp, Homo sapiens
  Payload ID: 12758
  Gene Symbol: PLS1
  Gene Name: plastin 1
  Uniprot ID: Q14651
  ENST ID: ENST00000337777
  CDS Start-End: 214-2103
atcaagattaatatctgtagtaataggcagaacacttcagtgtggaattgcttcttttctttggtcaaacactaactttggcagaggatagacacagcttaggaagactgaattttaagtcttctgaattgtttttctggacttccaaatctcaagtgataagaccagcagaagcagatataaagacctgaagatagtcttttctgtccaaagatggaaaacagtactactaccatttctcgggaggagcttgaagaactacaagaggcatttaataaaatagatattgacaatagtgggtatgtcagtgactatgaacttcaagacctgtttaaggaagcaagccttcctctgcctggctacaaggtgcgcgagattgtggagaaaattctatcagttgctgacagcaacaaagatggcaaaatcagttttgaagagtttgtgtcactaatgcaagaattaaaaagcaaagatatcagcaaaacattccgaaaaataattaacaagagggaagggattactgctattggaggaacttcaactatttccagtgagggcacacagcattcttattcagaggaagaaaaagtggcttttgttaactggataaacaaagccctggagaatgaccctgactgtaagcatcttatacccatgaatcccaatgatgatagtcttttcaagtcacttgcagatggcatccttctttgcaaaatgatcaacttatctgaaccagatacaattgatgaaagagccatcaataagaaaaagctcacgccattcactatttctgaaaatttaaacctagctctgaattctgcctcagccattggttgtacagtggtcaacattggtgcatcagatctcaaagaaggaaaacctcacttggtcttgggacttctctggcagatcatcaaagttggcctttttgctgatattgagatttccaggaatgaagctctgattgcattgttaaatgaaggtgaggaactagaggagctgatgaagctttctcccgaggaattactgctgcgatgggtgaactaccatctgaccaatgcaggatggcataccatcagcaacttcagccaagacattaaggactcgagagcctattttcatctgcttaatcagattgcccctaaaggtggggaagatggacctgccattgccattgacctttcaggaattaatgagacaaatgacctgaagcgtgctggactcatgcttcaagaagcagataaactgggctgcaaacagtttgttactcctgcagatgtggtttcaggcaatcctaaacttaatttagcttttgtagctaatttgtttaacacatacccgtgcctgcacaagccgaataataatgacatcgatatgaatttactggaaggagagagcaaggaagagagaacatttcggaactggatgaattccttgggagtcaacccatacattaatcatttgtacagtgaccttgcagatgctttagtgatctttcagctctatgagatgatccgagtgccagtcaactggagccatgtcaacaaacctccttatcctgcccttggagggaacatgaagaagattgaaaactgtaactatgcagtggaacttgggaagaacaaggccaaattctccttggttggcattgctgggcaggacctaaatgaagggaattcaacacttaccctggcattggtatggcagctgatgagaaggtacacattgaatgtgttatcggatcttggagagggtgaaaaagtaaatgatgaaattataattaaatgggtcaatcagactcttaaaagtgcaaacaaaaagacttctatttccagcttcaaggataaatctataagcacaagtttacctgtcctagatttaatagatgccattgcaccaaatgcagttcgtcaagaaatgatcaggagagaaaacttatctgatgaggacaagctgaacaatgctaaatacgccatttcagttgctcgaaagatcggtgcccggatatatgcattacctgatgacctcgtagaagtgaaaccaaagatggttatgacggtgtttgcatgcttaatgggaaaaggactgaacagaataaaataatcatttcatatgattttctgccacattaaacatattgtatgcctcacagtttacaggattctgaaatgtagtgggtgtaaaaccagagattatttgtatgctcaaaatagttatatattcattaatgaattcaatatcctgttcatactagttagagctggtcagcctttttgggtaacacagttaatttaccaactgatacagataatagaatatattcataatcaagctgatacttcatgattaaattatttttgttgcttaaaagtcgtattagacaagactaaatcattcttttttatggttcaaaaaagatgaatacaaacgtttttgcaggttctgctgtgaaatgtggtttgatttttttggtgtgttaattttgatcataaatgcattcatactcataatccagtttaatccttttatttgcttcctccaactatttaaagtggtccaaaaacacttttctgtaagtttctatactgtctaaaaccttatggtgaccagaattgtttattaatatcaaacttttttatatatgagaactaattcttgaataaaccccaaagttcactctcttgtttaagtagcagcagctttttacttaaaatttaattttaactacattgatactttacacatcctagtttggtaacacagctttaactatgtcatgcaacatatatatgttggtaggatgttattagagagatatgtgtgcatatatatttttttgcacctgaatcacccagcttttcataagtggtatgtttaattggtcattcagccaaccatcagtattttccccccacaacatgtgtaacacttttcagtctgtggatatctgatacattaagatttctttttataagtattcattttgaatgtgcatatagttatttgaccccttccaaatacttgtagccaaacattggctagaacatcccaagatatgctgacactgtcctgttagcttcatattatacttgctagtttaggtctctatagaagccctatataatttagaatatgcccactgaatatctttaatagaaagtaacataaagctagtattcaatgtagagtattttcatatgtttttcacagcccgttacaaattggcaatgtttggttaatgtttgtattacttggaaatcgctacagcttggactatttttttctaaatttttagcattagtccatttctgctgctaacaattgaatccagaaatctactttctccatcttccactgttagtgccagtgagcaatactgttgtgcaacaaaaatgtcactttatctcagtgtgaatgagtagtctaaattccctttctaccattgatttaaatatatatattggtaagagagactgcccatgtgtttagaatagaattttttaaatgaaatgatcaacaggtggaatttgaaatatattcttctacaaaagagatttctttcccttttatattttgatgattgttttcttaagattaagatatgttcttgctcttttataagattatttaaattatgtttccctctgattttttttcaccattgtatttactaagttattggatttacatgaaatctggcactttagggtgttctttttctcacagagtatatttaataaaaatgctgtgtatat

SEQ ID NO: 166372 - DNA, 3706 bp, Homo sapiens
  Payload ID: 12758
  Gene Symbol: PLS1
  Gene Name: plastin 1
  Uniprot ID: Q14651
  ENST ID: ENST00000457734
  CDS Start-End: 160-2049
atgcgcagtggcgcgagcgcagcggctacgcgggcgcggagaggtagccgcagagtggacctgcaggtacttggatctccagtgggagctgccctctcgaaggcaggacagcggtggcggcagatataaagacctgaagatagtcttttctgtccaaagatggaaaacagtactactaccatttctcgggaggagcttgaagaactacaagaggcatttaataaaatagatattgacaatagtgggtatgtcagtgactatgaacttcaagacctgtttaaggaagcaagccttcctctgcctggctacaaggtgcgcgagattgtggagaaaattctatcagttgctgacagcaacaaagatggcaaaatcagttttgaagagtttgtgtcactaatgcaagaattaaaaagcaaagatatcagcaaaacattccgaaaaataattaacaagagggaagggattactgctattggaggaacttcaactatttccagtgagggcacacagcattcttattcagaggaagaaaaagtggcttttgttaactggataaacaaagccctggagaatgaccctgactgtaagcatcttatacccatgaatcccaatgatgatagtcttttcaagtcacttgcagatggcatccttctttgcaaaatgatcaacttatctgaaccagatacaattgatgaaagagccatcaataagaaaaagctcacgccattcactatttctgaaaatttaaacctagctctgaattctgcctcagccattggttgtacagtggtcaacattggtgcatcagatctcaaagaaggaaaacctcacttggtcttgggacttctctggcagatcatcaaagttggcctttttgctgatattgagatttccaggaatgaagctctgattgcattgttaaatgaaggtgaggaactagaggagctgatgaagctttctcccgaggaattactgctgcgatgggtgaactaccatctgaccaatgcaggatggcataccatcagcaacttcagccaagacattaaggactcgagagcctattttcatctgcttaatcagattgcccctaaaggtggggaagatggacctgccattgccattgacctttcaggaattaatgagacaaatgacctgaagcgtgctggactcatgcttcaagaagcagataaactgggctgcaaacagtttgttactcctgcagatgtggtttcaggcaatcctaaacttaatttagcttttgtagctaatttgtttaacacatacccgtgcctgcacaagccgaataataatgacatcgatatgaatttactggaaggagagagcaaggaagagagaacatttcggaactggatgaattccttgggagtcaacccatacattaatcatttgtacagtgaccttgcagatgctttagtgatctttcagctctatgagatgatccgagtgccagtcaactggagccatgtcaacaaacctccttatcctgcccttggagggaacatgaagaagattgaaaactgtaactatgcagtggaacttgggaagaacaaggccaaattctccttggttggcattgctgggcaggacctaaatgaagggaattcaacacttaccctggcattggtatggcagctgatgagaaggtacacattgaatgtgttatcggatcttggagagggtgaaaaagtaaatgatgaaattataattaaatgggtcaatcagactcttaaaagtgcaaacaaaaagacttctatttccagcttcaaggataaatctataagcacaagtttacctgtcctagatttaatagatgccattgcaccaaatgcagttcgtcaagaaatgatcaggagagaaaacttatctgatgaggacaagctgaacaatgctaaatacgccatttcagttgctcgaaagatcggtgcccggatatatgcattacctgatgacctcgtagaagtgaaaccaaagatggttatgacggtgtttgcatgcttaatgggaaaaggactgaacagaataaaataatcatttcatatgattttctgccacattaaacatattgtatgcctcacagtttacaggattctgaaatgtagtgggtgtaaaaccagagattatttgtatgctcaaaatagttatatattcattaatgaattcaatatcctgttcatactagttagagctggtcagcctttttgggtaacacagttaatttaccaactgatacagataatagaatatattcataatcaagctgatacttcatgattaaattatttttgttgcttaaaagtcgtattagacaagactaaatcattcttttttatggttcaaaaaagatgaatacaaacgtttttgcaggttctgctgtgaaatgtggtttgatttttttggtgtgttaattttgatcataaatgcattcatactcataatccagtttaatccttttatttgcttcctccaactatttaaagtggtccaaaaacacttttctgtaagtttctatactgtctaaaaccttatggtgaccagaattgtttattaatatcaaacttttttatatatgagaactaattcttgaataaaccccaaagttcactctcttgtttaagtagcagcagctttttacttaaaatttaattttaactacattgatactttacacatcctagtttggtaacacagctttaactatgtcatgcaacatatatatgttggtaggatgttattagagagatatgtgtgcatatatatttttttgcacctgaatcacccagcttttcataagtggtatgtttaattggtcattcagccaaccatcagtattttccccccacaacatgtgtaacacttttcagtctgtggatatctgatacattaagatttctttttataagtattcattttgaatgtgcatatagttatttgaccccttccaaatacttgtagccaaacattggctagaacatcccaagatatgctgacactgtcctgttagcttcatattatacttgctagtttaggtctctatagaagccctatataatttagaatatgcccactgaatatctttaatagaaagtaacataaagctagtattcaatgtagagtattttcatatgtttttcacagcccgttacaaattggcaatgtttggttaatgtttgtattacttggaaatcgctacagcttggactatttttttctaaatttttagcattagtccatttctgctgctaacaattgaatccagaaatctactttctccatcttccactgttagtgccagtgagcaatactgttgtgcaacaaaaatgtcactttatctcagtgtgaatgagtagtctaaattccctttctaccattgatttaaatatatatattggtaagagagactgcccatgtgtttagaatagaattttttaaatgaaatgatcaacaggtggaatttgaaatatattcttctacaaaagagatttctttcccttttatattttgatgattgttttcttaagattaagatatgttcttgctcttttataagattatttaaattatgtttccctctgattttttttcaccattgtatttactaagttattggatttacatgaaatctggcactttagggtgttctttttctcacagagtatatttaataaaaatgctgtgtatatagaaa

SEQ ID NO: 166373 - DNA, 580 bp, Homo sapiens
  Payload ID: 12758
  Gene Symbol: PLS1
  Gene Name: plastin 1
  ENST ID: ENST00000475296
  CDS Start-End: 222-580
gggcgcggagaggtagccgcagagtggacctgcaggtacttggatctccagtgggagctgccctctcgaaggcaggacagcggtggcggcagagacagagtctccctgtgttgcccaggctggtcttgaactcctggcctcaagcaatccacctgccttggcctcccaaagtgctgcaattacagatataaagacctgaagatagtcttttctgtccaaagatggaaaacagtactactaccatttctcgggaggagcttgaagaactacaagaggcatttaataaaatagatattgacaatagtgggtatgtcagtgactatgaacttcaagacctgtttaaggaagcaagccttcctctgcctggctacaaggtgcgcgagattgtggagaaaattctatcagttgctgacagcaacaaagatggcaaaatcagttttgaagagtttgtgtcactaatgcaagaattaaaaagcaaagatatcagcaaaacattccgaaaaataattaacaagagggaagggattactgctattggaggaacttcaactatttccagtgagggcacacagcattctta

SEQ ID NO: 166374 - DNA, 1038 bp, Homo sapiens
  Payload ID: 12758
  Gene Symbol: PLS1
  Gene Name: plastin 1
  ENST ID: ENST00000476044
  CDS Start-End: 240-1038
agagtggacctgcaggtacttggatctccagtgggagctgccctctcgaaggcaggacagcggtggcggcagatattgacaatagtgggtatgtcagtgactatgaacttcaagacctgtttaaggaagcaagccttcctctgcctggctacaaggtgcgcgagattgtggagaaaattctatcagttgctgacagcaacaaagatggcaaaatcagttttgaagagtttgtgtcactaatgcaagaattaaaaagcaaagatatcagcaaaacattccgaaaaataattaacaagagggaagggattactgctattggaggaacttcaactatttccagtgagggcacacagcattcttattcagaggaagaaaaagtggcttttgttaactggataaacaaagccctggagaatgaccctgactgtaagcatcttatacccatgaatcccaatgatgatagtcttttcaagtcacttgcagatggcatccttctttgcaaaatgatcaacttatctgaaccagatacaattgatgaaagagccatcaataagaaaaagctcacgccattcactatttctgaaaatttaaacctagctctgaattctgcctcagccattggttgtacagtggtcaacattggtgcatcagatctcaaagaaggaaaacctcacttggtcttgggacttctctggcagatcatcaaagttggcctttttgctgatattgagatttccaggaatgaagctctgattgcattgttaaatgaaggtgaggaactagaggagctgatgaagctttctcccgaggaattactgctgcgatgggtgaactaccatctgaccaatgcaggatggcataccatcagcaacttcagccaagacattaaggactcgagagcctattttcatctgcttaatcagattgcccctaaaggtggggaagatggacctgccattgccattgacctttcaggaattaatgagacaaatgacctgaagcgtgctggactcatgcttcaagaagcagataaactgg

SEQ ID NO: 166375 - DNA, 635 bp, Homo sapiens
  Payload ID: 12758
  Gene Symbol: PLS1
  Gene Name: plastin 1
  ENST ID: ENST00000497199
  CDS Start-End: 478-635
aataggcagaacacttcagtgtggaattgcttcttttctttggtcaaacactaactttggcagaggatagacacagcttaggaagactgaattttaagtcttctgaattgtttttctggacttccaaatctcaagtgataagaccagcagaagcagggaaggccagcgttggattgtgtaggttgcaaaatgcagtacctcagacttgcaactctgaaaagcactgtttgaaatctctgtaaagagtgaaaaacttcaagttttaaccaatgagtgttttagaggttaaagtttaaactctgacttggaagcacgctgggtaggactcctctgctcactcagactcaagttggatcatcagaatctctcttgtgttgctgtgaatgatttgcattgaaattcccagctagaactggaggaaagaggattacaaaccaggagatataaagacctgaagatagtcttttctgtccaaagatggaaaacagtactactaccatttctcgggaggagcttgaagaactacaagaggcatttaataaaatagatattgacaatagtgggtatgtcagtgactatgaacttcaagacctgtttaaggaagcaagccttcctctgcctggctacaaggtgcg

SEQ ID NO: 166376 - DNA, 2258 bp, Homo sapiens
  Payload ID: 12758
  Gene Symbol: PLS1
  Gene Name: plastin 1
  Uniprot ID: Q14651
  ENST ID: ENST00000497002
  CDS Start-End: 321-2210
aattctccataggaacactatcaagtctttttccataaaagtcagataaaagaaagatcacatttcttgatattctttgaagcaactttatttttattgtcatgcttcatcctgcccgaatactgccaagtctttctcaggcacctggaatctgctcctcagcctctgttgtcctgggtctaatgtagagcaaaaggctgagaggaagctcttctattctccatcatcggtcttcagtggctacctgggaaacaccccttggcttagtcggcagattctctccgatataaagacctgaagatagtcttttctgtccaaagatggaaaacagtactactaccatttctcgggaggagcttgaagaactacaagaggcatttaataaaatagatattgacaatagtgggtatgtcagtgactatgaacttcaagacctgtttaaggaagcaagccttcctctgcctggctacaaggtgcgcgagattgtggagaaaattctatcagttgctgacagcaacaaagatggcaaaatcagttttgaagagtttgtgtcactaatgcaagaattaaaaagcaaagatatcagcaaaacattccgaaaaataattaacaagagggaagggattactgctattggaggaacttcaactatttccagtgagggcacacagcattcttattcagaggaagaaaaagtggcttttgttaactggataaacaaagccctggagaatgaccctgactgtaagcatcttatacccatgaatcccaatgatgatagtcttttcaagtcacttgcagatggcatccttctttgcaaaatgatcaacttatctgaaccagatacaattgatgaaagagccatcaataagaaaaagctcacgccattcactatttctgaaaatttaaacctagctctgaattctgcctcagccattggttgtacagtggtcaacattggtgcatcagatctcaaagaaggaaaacctcacttggtcttgggacttctctggcagatcatcaaagttggcctttttgctgatattgagatttccaggaatgaagctctgattgcattgttaaatgaaggtgaggaactagaggagctgatgaagctttctcccgaggaattactgctgcgatgggtgaactaccatctgaccaatgcaggatggcataccatcagcaacttcagccaagacattaaggactcgagagcctattttcatctgcttaatcagattgcccctaaaggtggggaagatggacctgccattgccattgacctttcaggaattaatgagacaaatgacctgaagcgtgctggactcatgcttcaagaagcagataaactgggctgcaaacagtttgttactcctgcagatgtggtttcaggcaatcctaaacttaatttagcttttgtagctaatttgtttaacacatacccgtgcctgcacaagccgaataataatgacatcgatatgaatttactggaaggagagagcaaggaagagagaacatttcggaactggatgaattccttgggagtcaacccatacattaatcatttgtacagtgaccttgcagatgctttagtgatctttcagctctatgagatgatccgagtgccagtcaactggagccatgtcaacaaacctccttatcctgcccttggagggaacatgaagaagattgaaaactgtaactatgcagtggaacttgggaagaacaaggccaaattctccttggttggcattgctgggcaggacctaaatgaagggaattcaacacttaccctggcattggtatggcagctgatgagaaggtacacattgaatgtgttatcggatcttggagagggtgaaaaagtaaatgatgaaattataattaaatgggtcaatcagactcttaaaagtgcaaacaaaaagacttctatttccagcttcaaggataaatctataagcacaagtttacctgtcctagatttaatagatgccattgcaccaaatgcagttcgtcaagaaatgatcaggagagaaaacttatctgatgaggacaagctgaacaatgctaaatacgccatttcagttgctcgaaagatcggtgcccggatatatgcattacctgatgacctcgtagaagtgaaaccaaagatggttatgacggtgtttgcatgcttaatgggaaaaggactgaacagaataaaataatcatttcatatgattttctgccacattaaacatattgtatgcctcaca

SEQ ID NO: 166377 - DNA, 564 bp, Homo sapiens
  Payload ID: 12758
  Gene Symbol: PLS1
  Gene Name: plastin 1
  ENST ID: ENST00000464320
  CDS Start-End: 204-564
acttggatctccagtgggagctgccctctcgaaggcaggacagcggtggcggcagccacggtgttggatacacttgtatgaggcttcagctgtgctgcataaatttcttgaagaacctgtgagccagaagcaaaatttcaggacagggggcacacactgaacttgaaatataaagacctgaagatagtcttttctgtccaaagatggaaaacagtactactaccatttctcgggaggagcttgaagaactacaagaggcatttaataaaatagatattgacaatagtgggtatgtcagtgactatgaacttcaagacctgtttaaggaagcaagccttcctctgcctggctacaaggtgcgcgagattgtggagaaaattctatcagttgctgacagcaacaaagatggcaaaatcagttttgaagagtttgtgtcactaatgcaagaattaaaaagcaaagatatcagcaaaacattccgaaaaataattaacaagagggaagggattactgctattggaggaacttcaactatttccagtgagggcacacagcattcttatt

SEQ ID NO: 166378 - DNA, 567 bp, Homo sapiens
  Payload ID: 12758
  Gene Symbol: PLS1
  Gene Name: plastin 1
  ENST ID: ENST00000461644
  CDS Start-End: 405-567
agtggacctgcaggtacttggatctccagtgggagctgccctctcgaaggcaggacagcggtggcggcagccacggtgttggatacacttgtatgaggcttcagctgtgctgcataaatttcttgaagaacctgtgagccagaagcaaaatttcaggacagggggcacacactgaacttgaagaaacattttccaagatgctaaaagtatggcttctactcatttttcccaaaaactgaagtaaaatgctaaaaagaatccatgtcatctgccagatttccaaaggctgtttttgagttcttctctaagatgttttcctccataaatgtgtacagcattaaagaagcccctgcagcatcttggagataatataaagacctgaagatagtcttttctgtccaaagatggaaaacagtactactaccatttctcgggaggagcttgaagaactacaagaggcatttaataaaatagatattgacaatagtgggtatgtcagtgactatgaacttcaagacctgtttaaggaagcaagccttcctctgcctggctacaaggtgcgcgaga

SEQ ID NO: 166379 - DNA, 574 bp, Homo sapiens
  Payload ID: 12758
  Gene Symbol: PLS1
  Gene Name: plastin 1
  ENST ID: ENST00000495744
  CDS Start-End: 400-574
agccgcagagtggacctgcaggtacttggatctccagtgggagctgccctctcgaaggcaggacagcggtggcggcagggaaggccagcgttggattgtgtaggttgcaaaatgcagtacctcagacttgcaactctgaaaagcactgtttgaaatctctgtaaagagtgaaaaacttcaagttttaaccaatgagtgttttagaggttaaagtttaaactctgacttggaagcacgctgggtaggactcctctgctcactcagactcaagttggatcatcagaatctctcttgtgttgctgtgaatgatttgcattgaaattcccagctagaactggaggaaagaggattacaaaccaggagatataaagacctgaagatagtcttttctgtccaaagatggaaaacagtactactaccatttctcgggaggagcttgaagaactacaagaggcatttaataaaatagatattgacaatagtgggtatgtcagtgactatgaacttcaagacctgtttaaggaagcaagccttcctctgcctggctacaaggtgcgcgagattgtggagaaaa

SEQ ID NO: 166380 - DNA, 608 bp, Homo sapiens
  Payload ID: 12758
  Gene Symbol: PLS1
  Gene Name: plastin 1
  ENST ID: ENST00000483373
  CDS Start-End: 509-608
gcgggcgcggagaggtagccgcagagtggacctgcaggtacttggatctccagtgggagctgccctctcgaaggcaggacagcggtggcggcagagacagagtctccctgtgttgcccaggctggtcttgaactcctggcctcaagcaatccacctgccttggcctcccaaagtgctgcaattacagggaaggccagcgttggattgtgtaggttgcaaaatgcagtacctcagacttgcaactctgaaaagcactgtttgaaatctctgtaaagagtgaaaaacttcaagttttaaccaatgagtgttttagaggttaaagtttaaactctgacttggaagcacgctgggtaggactcctctgctcactcagactcaagttggatcatcagaatctctcttgtgttgctgtgaatgatttgcattgaaattcccagctagaactggaggaaagaggattacaaaccaggagatataaagacctgaagatagtcttttctgtccaaagatggaaaacagtactactaccatttctcgggaggagcttgaagaactacaagaggcatttaataaaatagatattgacaatagtgggtatgtcagtgact

SEQ ID NO: 166381 - DNA, 2277 bp, Homo sapiens
  Payload ID: 12759
  Gene Symbol: PLS3
  Gene Name: plastin 3
  Uniprot ID: P13797
  ENST ID: ENST00000289290
  CDS Start-End: 227-2080
agtcgggccagacccaggactctgcgactttacatctttaaatggatgagatggctaccactcagatttccaaagatgagcttgatgaactcaaagaggcctttgcaaaagttgatcgttctacctcgccacgttaaattatagcttcagtataagatgagaaggcatagcatgctatttgatttatcctttatcatcatataacatgccttacaattgagcagctatggaagatctcaacagcaacggattcatttgtgactatgaacttcatgagctcttcaaggaagctaatatgccattaccaggatataaagtgagagaaattattcagaaactcatgctggatggtgacaggaataaagatgggaaaataagttttgacgaatttgtttatatttttcaagaggtaaaaagtagtgatattgccaagaccttccgcaaagcaatcaacaggaaagaaggtatttgtgctctgggtggaacttcagagttgtccagcgaaggaacacagcattcttactcagaggaagaaaaatatgcttttgttaactggataaacaaagctttggaaaatgatcctgattgtagacatgttataccaatgaaccctaacaccgatgacctgttcaaagctgttggtgatggaattgtgctttgtaaaatgattaacctttcagttcctgataccattgatgaaagagcaatcaacaagaagaaacttacacccttcatcattcaggaaaacttgaacttggcactgaactctgcttctgccattgggtgtcatgttgtgaacattggtgcagaagatttgagggctgggaaacctcatctggttttgggactgctttggcagatcattaagatcggtttgttcgctgacattgaattaagcaggaatgaagccttggctgctttactccgagatggtgagactttggaggaacttatgaaattgtctccagaagagcttctgcttagatgggcaaactttcatttggaaaactcgggctggcaaaaaattaacaactttagtgctgacatcaagcttattgacttcagtaattcagtgaaggattccaaagcctatttccatcttctcaatcaaatcgcaccaaaaggacaaaaggaaggtgaaccacggatagatattaacatgtcaggtttcaatgaaacagatgatttgaagagagctgagagtatgcttcaacaagcagataaattaggttgcagacagtttgttacccctgctgatgttgtcagtggaaaccccaaactcaacttagctttcgtggctaacctgtttaataaatacccagcactaactaagccagagaaccaggatattgactggactctattagaaggagaaactcgtgaagaaagaaccttccgtaactggatgaactctcttggtgtcaatcctcacgtaaaccatctctatgctgacctgcaagatgccctggtaatcttacagttatatgaacgaattaaagttcctgttgactggagtaaggttaataaacctccatacccgaaactgggagccaacatgaaaaagctagaaaactgcaactatgctgttgaattagggaagcatcctgctaaattctccctggttggcattggagggcaagacctgaatgatgggaaccaaaccctgactttagctttagtctggcagctgatgagaagatataccctcaatgtcctggaagatcttggagatggtcagaaagccaatgacgacatcattgtgaactgggtgaacagaacgttgagtgaagctggaaaatcaacttccattcagagttttaaggacaagacgatcagctccagtttggcagttgtggatttaattgatgccatccagccaggctgtataaactatgaccttgtgaagagtggcaatctaacagaagatgacaagcacaataatgccaagtatgcagtgtcaatggctagaagaatcggagccagagtgtatgctctccctgaagaccttgtggaagtaaagcccaagatggtcatgactgtgtttgcatgtttgatgggcaggggaatgaagagagtgtaaaataaccaatctgaataaaacagccatgctcccaggtgcatgattcgcaggtcagctatttccaggtgaagtgcttatggcttaaggaactcttggccattcaaaggacttttcattttgattaacaggactagcttatcatgagagccctcaggggaaagggtttaagaaaaacaactcctctttcccatagtcag

SEQ ID NO: 166382 - DNA, 3280 bp, Homo sapiens
  Payload ID: 12759
  Gene Symbol: PLS3
  Gene Name: plastin 3
  Uniprot ID: P13797
  ENST ID: ENST00000355899
  CDS Start-End: 88-1980
aaagattccgaggtgcagaagttgtctgagtgggttggtcggcggcagtcgggccagacccaggactctgcgactttacatctttaaatggatgagatggctaccactcagatttccaaagatgagcttgatgaactcaaagaggcctttgcaaaagttgatctcaacagcaacggattcatttgtgactatgaacttcatgagctcttcaaggaagctaatatgccattaccaggatataaagtgagagaaattattcagaaactcatgctggatggtgacaggaataaagatgggaaaataagttttgacgaatttgtttatatttttcaagaggtaaaaagtagtgatattgccaagaccttccgcaaagcaatcaacaggaaagaaggtatttgtgctctgggtggaacttcagagttgtccagcgaaggaacacagcattcttactcagaggaagaaaaatatgcttttgttaactggataaacaaagctttggaaaatgatcctgattgtagacatgttataccaatgaaccctaacaccgatgacctgttcaaagctgttggtgatggaattgtgctttgtaaaatgattaacctttcagttcctgataccattgatgaaagagcaatcaacaagaagaaacttacacccttcatcattcaggaaaacttgaacttggcactgaactctgcttctgccattgggtgtcatgttgtgaacattggtgcagaagatttgagggctgggaaacctcatctggttttgggactgctttggcagatcattaagatcggtttgttcgctgacattgaattaagcaggaatgaagccttggctgctttactccgagatggtgagactttggaggaacttatgaaattgtctccagaagagcttctgcttagatgggcaaactttcatttggaaaactcgggctggcaaaaaattaacaactttagtgctgacatcaaggattccaaagcctatttccatcttctcaatcaaatcgcaccaaaaggacaaaaggaaggtgaaccacggatagatattaacatgtcaggtttcaatgaaacagatgatttgaagagagctgagagtatgcttcaacaagcagataaattaggttgcagacagtttgttacccctgctgatgttgtcagtggaaaccccaaactcaacttagctttcgtggctaacctgtttaataaatacccagcactaactaagccagagaaccaggatattgactggactctattagaaggagaaactcgtgaagaaagaaccttccgtaactggatgaactctcttggtgtcaatcctcacgtaaaccatctctatgctgacctgcaagatgccctggtaatcttacagttatatgaacgaattaaagttcctgttgactggagtaaggttaataaacctccatacccgaaactgggagccaacatgaaaaagctagaaaactgcaactatgctgttgaattagggaagcatcctgctaaattctccctggttggcattggagggcaagacctgaatgatgggaaccaaaccctgactttagctttagtctggcagctgatgagaagatataccctcaatgtcctggaagatcttggagatggtcagaaagccaatgacgacatcattgtgaactgggtgaacagaacgttgagtgaagctggaaaatcaacttccattcagagttttaaggacaagacgatcagctccagtttggcagttgtggatttaattgatgccatccagccaggctgtataaactatgaccttgtgaagagtggcaatctaacagaagatgacaagcacaataatgccaagtatgcagtgtcaatggctagaagaatcggagccagagtgtatgctctccctgaagaccttgtggaagtaaagcccaagatggtcatgactgtgtttgcatgtttgatgggcaggggaatgaagagagtgtaaaataaccaatctgaataaaacagccatgctcccaggtgcatgattcgcaggtcagctatttccaggtgaagtgcttatggcttaaggaactcttggccattcaaaggacttttcattttgattaacaggactagcttatcatgagagccctcaggggaaagggtttaagaaaaacaactcctctttcccatagtcagagttgaatttgtcaggcacgcctgaaatgtgctcatagccaaaacattttactctctcctcctagaatgctgcccttgacatttcccattgctgtatgttatttcttgctctgttatcttttgccctcttagaatgtccctctcttgggacttgcttagatgatgggatatgaatattattagacagtaattttgctttccatccagtatgctagttcttattcgagaactatggtcagagcgtatttggatatgagtatcctttgcttatctttgtagtactgaaaatttgccgaagtaactggctgtgcagaatgtaatagaagcttttcttattcttttattcttaagatcagtatctttttacagtattctttctacatgatccttttttgtacatttaagaatattttgattatattaaacaagactgctgattttgctactttttttaaggggtcttcaagtaagtaaaacatacatcgtagctagaagaaaaatgtaccttaaatttgcatcttccctctcatacccaagctgtaaacaattgaaatattttgtcttaaatcacttggttcaatacatgcttatttgttttaaaacctgtatcatcaaactctctctctaaatttaaaatgctgttgaatatgatacttttgaggagagagtgtgctcagaacttagacgggatttggtaggccaagtatgctaagtgtacaatatattttttaattttacacctgaaacaaagaaatgtggtcactaaaaataaaagtatatatgtaggaattaatgtactcttgctttgtcaagctgtttgctatagtttccaaggtattatgttactctaactctgaaaagtgatgtaatctggtagcaatgtagtagttcaaataaaggcatttacataataattagtctgttcttcatgcttttgtctcttaggaagtatgccaatgtttgtcaggatttttttctttttgtttttctgatgtattctgtaaaatggtgtttgttaaatttgagttttgggagctgaattagaggtactgaattaaggacagtacaaatgaagtaaaaaggttttctccaatttaccaaaa

SEQ ID NO: 166383 - DNA, 3150 bp, Homo sapiens
  Payload ID: 12759
  Gene Symbol: PLS3
  Gene Name: plastin 3
  ENST ID: ENST00000420625
  CDS Start-End: 1-1854
atgatagatctcaacagcaacggattcatttgtgactatgaacttcatgagctcttcaaggaagctaatatgccattaccaggatataaagtgagagaaattattcagaaactcatgctggatggtgacaggaataaagatgggaaaataagttttgacgaatttgtttatatttttcaagaggtaaaaagtagtgatattgccaagaccttccgcaaagcaatcaacaggaaagaaggtatttgtgctctgggtggaacttcagagttgtccagcgaaggaacacagcattcttactcagaggaagaaaaatatgcttttgttaactggataaacaaagctttggaaaatgatcctgattgtagacatgttataccaatgaaccctaacaccgatgacctgttcaaagctgttggtgatggaattgtgctttgtaaaatgattaacctttcagttcctgataccattgatgaaagagcaatcaacaagaagaaacttacacccttcatcattcaggaaaacttgaacttggcactgaactctgcttctgccattgggtgtcatgttgtgaacattggtgcagaagatttgagggctgggaaacctcatctggttttgggactgctttggcagatcattaagatcggtttgttcgctgacattgaattaagcaggaatgaagccttggctgctttactccgagatggtgagactttggaggaacttatgaaattgtctccagaagagcttctgcttagatgggcaaactttcatttggaaaactcgggctggcaaaaaattaacaactttagtgctgacatcaagcttattgacttcagtaattcagtgaaggattccaaagcctatttccatcttctcaatcaaatcgcaccaaaaggacaaaaggaaggtgaaccacggatagatattaacatgtcaggtttcaatgaaacagatgatttgaagagagctgagagtatgcttcaacaagcagataaattaggttgcagacagtttgttacccctgctgatgttgtcagtggaaaccccaaactcaacttagctttcgtggctaacctgtttaataaatacccagcactaactaagccagagaaccaggatattgactggactctattagaaggagaaactcgtgaagaaagaaccttccgtaactggatgaactctcttggtgtcaatcctcacgtaaaccatctctatgctgacctgcaagatgccctggtaatcttacagttatatgaacgaattaaagttcctgttgactggagtaaggttaataaacctccatacccgaaactgggagccaacatgaaaaagctagaaaactgcaactatgctgttgaattagggaagcatcctgctaaattctccctggttggcattggagggcaagacctgaatgatgggaaccaaaccctgactttagctttagtctggcagctgatgagaagatataccctcaatgtcctggaagatcttggagatggtcagaaagccaatgacgacatcattgtgaactgggtgaacagaacgttgagtgaagctggaaaatcaacttccattcagagttttaaggacaagacgatcagctccagtttggcagttgtggatttaattgatgccatccagccaggctgtataaactatgaccttgtgaagagtggcaatctaacagaagatgacaagcacaataatgccaagtatgcagtgtcaatggctagaagaatcggagccagagtgtatgctctccctgaagaccttgtggaagtaaagcccaagatggtcatgactgtgtttgcatgtttgatgggcaggggaatgaagagagtgtaaaataaccaatctgaataaaacagccatgctcccaggtgcatgattcgcaggtcagctatttccaggtgaagtgcttatggcttaaggaactcttggccattcaaaggacttttcattttgattaacaggactagcttatcatgagagccctcaggggaaagggtttaagaaaaacaactcctctttcccatagtcagagttgaatttgtcaggcacgcctgaaatgtgctcatagccaaaacattttactctctcctcctagaatgctgcccttgacatttcccattgctgtatgttatttcttgctctgttatcttttgccctcttagaatgtccctctcttgggacttgcttagatgatgggatatgaatattattagacagtaattttgctttccatccagtatgctagttcttattcgagaactatggtcagagcgtatttggatatgagtatcctttgcttatctttgtagtactgaaaatttgccgaagtaactggctgtgcagaatgtaatagaagcttttcttattcttttattcttaagatcagtatctttttacagtattctttctacatgatccttttttgtacatttaagaatattttgattatattaaacaagactgctgattttgctactttttttaaggggtcttcaagtaagtaaaacatacatcgtagctagaagaaaaatgtaccttaaatttgcatcttccctctcatacccaagctgtaaacaattgaaatattttgtcttaaatcacttggttcaatacatgcttatttgttttaaaacctgtatcatcaaactctctctctaaatttaaaatgctgttgaatatgatacttttgaggagagagtgtgctcagaacttagacgggatttggtaggccaagtatgctaagtgtacaatatattttttaattttacacctgaaacaaagaaatgtggtcactaaaaataaaagtatatatgtaggaattaatgtactcttgctttgtcaagctgtttgctatagtttccaaggtattatgttactctaactctgaaaagtgatgtaatctggtagcaatgtagtagttcaaataaaggcatttacataataattagtctgttcttcatgcttttgtctcttaggaagtatgccaatgtttgtcaggatttttttctttttgtttttctgatgtattctgtaaaatggtgtttgttaaatttgagttttgggagctgaattagaggtactgaattaaggacagtacaaatgaagtaaaaaggttttctccaatttacc

SEQ ID NO: 166384 - DNA, 568 bp, Homo sapiens
  Payload ID: 12759
  Gene Symbol: PLS3
  Gene Name: plastin 3
  ENST ID: ENST00000497870
  CDS Start-End: 1-568
tttcaagctgtgttttgtggagttgtccacacaacctgaattcatgttgactgattccaaagcctatttccatcttctcaatcaaatcgcaccaaaaggacaaaaggaaggtgaaccacggatagatattaacatgtcaggtttcaatgaaacagatgatttgaagagagctgagagtatgcttcaacaagcagataaattaggttgcagacagtttgttacccctgctgatgttgtcagtggaaaccccaaactcaacttagctttcgtggctaacctgtttaataaatacccagcactaactaagccagagaaccaggatattgactggactctattagaaggagaaactcgtgaagaaagaaccttccgtaactggatgaactctcttggtgtcaatcctcacgtaaaccatctctatgctgacctgcaagatgccctggtaatcttacagttatatgaacgaattaaagttcctgttgactggagtaaggttaataaacctccatacccgaaactgggagccaacatgaaaaagctagaaaactgcaactatgctgttgaatta

SEQ ID NO: 166385 - DNA, 2858 bp, Homo sapiens
  Payload ID: 12759
  Gene Symbol: PLS3
  Gene Name: plastin 3
  ENST ID: ENST00000481823
  CDS Start-End: 89-217
agattgctcttctgggcgtgggagaaggttctgtctatcagtgctgcgagaaaggaaagaaacaagtttgctctcagcggatctttaaatggatgagatggctaccactcagatttccaaagatgagcttgatgaactcaaagaggcctttgcaaaagttgtggagacggagtttcaccgtgttagccaggatggtctcgatctcctgacctcgtgatccgcccgtctcggcctcccaaagtgctgggattacagacgtgagccaccgcgcctggcctacacacatgtatttttaaaacgagagttgcagcaggggaaaaatgatggccaaactgctggaaattttgagtcagaaaaggactgataaacatttttgattgcctggtctcaccctctaaacttgtccagccttctgctgtacttgacctccatctttggaaatccactagtacagtgaattctaaagcagcaacctccagtctacccttagctggaactcattaaactgcctcttatatttgctgcagtgagctacctcaaaagatctcaacagcaacggattcatttgtgactatgaacttcatgagctcttcaaggaagctaatatgccattaccaggatataaagtgagagaaattattcagaaactcatgctggatggtgacaggaataaagatgggaaaataagttttgacgaatttgtttatatttttcaagaggtaaaaagtagtgatattgccaagaccttccgcaaagcaatcaacaggaaagaaggtatttgtgctctgggtggaacttcagagttgtccagcgaaggaacacagcattcttactcagaggaagaaaaatatgcttttgttaactggataaacaaagctttggaaaatgatcctgattgtagacatgttataccaatgaaccctaacaccgatgacctgttcaaagctgttggtgatggaattgtgctttgtaaaatgattaacctttcagttcctgataccattgatgaaagagcaatcaacaagaagaaacttacacccttcatcattcaggaaaacttgaacttggcactgaactctgcttctgccattgggtgtcatgttgtgaacattggtgcagaagatttgagggctgggaaacctcatctggttttgggactgctttggcagatcattaagatcggtttgttcgctgacattgaattaagcaggaatgaagccttggctgctttactccgagatggtgagactttggaggaacttatgaaattgtctccagaagagcttctgcttagatgggcaaactttcatttggaaaactcgggctggcaaaaaattaacaactttagtgctgacatcaaggattccaaagcctatttccatcttctcaatcaaatcgcaccaaaaggacaaaaggaaggtgaaccacggatagatattaacatgtcaggtttcaatgaaacagatgatttgaagagagctgagagtatgcttcaacaagcagataaattaggttgcagacagtttgttacccctgctgatgttgtcagtggaaaccccaaactcaacttagctttcgtggctaacctgtttaataaatacccagcactaactaagccagagaaccaggatattgactggactctattagaaggagaaactcgtgaagaaagaaccttccgtaactggatgaactctcttggtgtcaatcctcacgtaaaccatctctatgctgacctgcaagatgccctggtaatcttacagttatatgaacgaattaaagttcctgttgactggagtaaggttaataaacctccatacccgaaactgggagccaacatgaaaaagctagaaaactgcaactatgctgttgaattagggaagcatcctgctaaattctccctggttggcattggagggcaagacctgaatgatgggaaccaaaccctgactttagctttagtctggcagctgatgagaagatataccctcaatgtcctggaagatcttggagatggtcagaaagccaatgacgacatcattgtgaactgggtgaacagaacgttgagtgaagctggaaaatcaacttccattcagagttttaaggacaagacgatcagctccagtttggcagttgtggatttaattgatgccatccagccaggctgtataaactatgaccttgtgaagagtggcaatctaacagaagatgacaagcacaataatgccaagtatgcagtgtcaatggctagaagaatcggagccagagtgtatgctctccctgaagaccttgtggaagtaaagcccaagatggtcatgactgtgtttgcatgtttgatgggcaggggaatgaagagagtgtaaaataaccaatctgaataaaacagccatgctcccaggtgcatgattcgcaggtcagctatttccaggtgaagtgcttatggcttaaggaactcttggccattcaaaggacttttcattttgattaacaggactagcttatcatgagagccctcaggggaaagggtttaagaaaaacaactcctctttcccatagtcagagttgaatttgtcaggcacgcctgaaatgtgctcatagccaaaacattttactctctcctcctagaatgctgcccttgacatttcccattgctgtatgttatttcttgctctgttatcttttgccctcttagaatgtccctctcttgggacttgcttagatgatgggatatgaatattattagacagtaattttgctttccatccagtatgctagttcttattcgagaactatggtcagagcgtatttggatatgagtatcctttgcttatctttgtagtactgaaaatttgccgaag

SEQ ID NO: 166386 - DNA, 926 bp, Homo sapiens
  Payload ID: 12759
  Gene Symbol: PLS3
  Gene Name: plastin 3
  ENST ID: ENST00000489283
  CDS Start-End: 96-224
acagctgcaaagattccgaggtgcagaagttgtctgagtgggttggtcggcggcagtcgggccagacccaggactctgcgactttacatctttaaatggatgagatggctaccactcagatttccaaagatgagcttgatgaactcaaagaggcctttgcaaaagttgtggagacggagtttcaccgtgttagccaggatggtctcgatctcctgacctcgtgatccgcccgtctcggcctcccaaagtgctgggattacagacgtgagccaccgcgcctggcctacacacatgtatttttaaaacgagagttgcagcaggggaaaaatgatggccaaactgctggaaattttgagtcagaaaaggactgataaacatttttgattgcctggtctcaccctctaaacttgtccagccttctgctgtacttgacctccatctttggaaatccactagtacagtgaattctaaagcagcaacctccagtctacccttagctggaactcattaaactgcctcttatatttgctgcagtgagctacctcaaaagatctcaacagcaacggattcatttgtgactatgaacttcatgagctcttcaaggaagctaatatgccattaccaggatataaagtgagagaaattattcagaaactcatgctggatggtgacaggaataaagatgggaaaataagttttgacgaatttgtttatatttttcaagaggtaaaaagtagtgatattgccaagaccttccgcaaagcaatcaacaggaaagaaggtatttgtgctctgggtggaacttcagagttgtccagcgaaggaacacagcattcttactcagaggaagaaaaatatgcttttgttaactggataaacaaagctttggaaaatgatcctgattgtagacatgttataccaatgaa

SEQ ID NO: 166387 - DNA, 3037 bp, Homo sapiens
  Payload ID: 12759
  Gene Symbol: PLS3
  Gene Name: plastin 3
  Uniprot ID: P13797
  ENST ID: ENST00000539310
  CDS Start-End: 34-1926
aaagaaacaagtttgctctcagcggatctttaaatggatgagatggctaccactcagatttccaaagatgagcttgatgaactcaaagaggcctttgcaaaagttgatctcaacagcaacggattcatttgtgactatgaacttcatgagctcttcaaggaagctaatatgccattaccaggatataaagtgagagaaattattcagaaactcatgctggatggtgacaggaataaagatgggaaaataagttttgacgaatttgtttatatttttcaagaggtaaaaagtagtgatattgccaagaccttccgcaaagcaatcaacaggaaagaaggtatttgtgctctgggtggaacttcagagttgtccagcgaaggaacacagcattcttactcagaggaagaaaaatatgcttttgttaactggataaacaaagctttggaaaatgatcctgattgtagacatgttataccaatgaaccctaacaccgatgacctgttcaaagctgttggtgatggaattgtgctttgtaaaatgattaacctttcagttcctgataccattgatgaaagagcaatcaacaagaagaaacttacacccttcatcattcaggaaaacttgaacttggcactgaactctgcttctgccattgggtgtcatgttgtgaacattggtgcagaagatttgagggctgggaaacctcatctggttttgggactgctttggcagatcattaagatcggtttgttcgctgacattgaattaagcaggaatgaagccttggctgctttactccgagatggtgagactttggaggaacttatgaaattgtctccagaagagcttctgcttagatgggcaaactttcatttggaaaactcgggctggcaaaaaattaacaactttagtgctgacatcaaggattccaaagcctatttccatcttctcaatcaaatcgcaccaaaaggacaaaaggaaggtgaaccacggatagatattaacatgtcaggtttcaatgaaacagatgatttgaagagagctgagagtatgcttcaacaagcagataaattaggttgcagacagtttgttacccctgctgatgttgtcagtggaaaccccaaactcaacttagctttcgtggctaacctgtttaataaatacccagcactaactaagccagagaaccaggatattgactggactctattagaaggagaaactcgtgaagaaagaaccttccgtaactggatgaactctcttggtgtcaatcctcacgtaaaccatctctatgctgacctgcaagatgccctggtaatcttacagttatatgaacgaattaaagttcctgttgactggagtaaggttaataaacctccatacccgaaactgggagccaacatgaaaaagctagaaaactgcaactatgctgttgaattagggaagcatcctgctaaattctccctggttggcattggagggcaagacctgaatgatgggaaccaaaccctgactttagctttagtctggcagctgatgagaagatataccctcaatgtcctggaagatcttggagatggtcagaaagccaatgacgacatcattgtgaactgggtgaacagaacgttgagtgaagctggaaaatcaacttccattcagagttttaaggacaagacgatcagctccagtttggcagttgtggatttaattgatgccatccagccaggctgtataaactatgaccttgtgaagagtggcaatctaacagaagatgacaagcacaataatgccaagtatgcagtgtcaatggctagaagaatcggagccagagtgtatgctctccctgaagaccttgtggaagtaaagcccaagatggtcatgactgtgtttgcatgtttgatgggcaggggaatgaagagagtgtaaaataaccaatctgaataaaacagccatgctcccaggtgcatgattcgcaggtcagctatttccaggtgaagtgcttatggcttaaggaactcttggccattcaaaggacttttcattttgattaacaggactagcttatcatgagagccctcaggggaaagggtttaagaaaaacaactcctctttcccatagtcagagttgaatttgtcaggcacgcctgaaatgtgctcatagccaaaacattttactctctcctcctagaatgctgcccttgacatttcccattgctgtatgttatttcttgctctgttatcttttgccctcttagaatgtccctctcttgggacttgcttagatgatgggatatgaatattattagacagtaattttgctttccatccagtatgctagttcttattcgagaactatggtcagagcgtatttggatatgagtatcctttgcttatctttgtagtactgaaaatttgccgaagtaactggctgtgcagaatgtaatagaagcttttcttattcttttattcttaagatcagtatctttttacagtattctttctacatgatccttttttgtacatttaagaatattttgattatattaaacaagactgctgattttgctactttttttaaggggtcttcaagtaagtaaaacatacatcgtagctagaagaaaaatgtaccttaaatttgcatcttccctctcatacccaagctgtaaacaattgaaatattttgtcttaaatcacttggttcaatacatgcttatttgttttaaaacctgtatcatcaaactctctctctaaatttaaaatgctgttgaatatgatacttttgaggagagagtgtgctcagaacttagacgggatttggtaggccaagtatgctaagtgtacaatatattttttaattttacacctgaaacaaagaaatgtggtcactaaaaataaaagtatatatgtaggaattaatgtactcttgctttgtcaagctgtttgctatagtttccaaggtattatgttactctaactctgaaaagtgatgtaatctggtagcaatgtagtagttcaaataaaggcatttacataataa

SEQ ID NO: 166388 - DNA, 500 bp, Homo sapiens
  Payload ID: 12759
  Gene Symbol: PLS3
  Gene Name: plastin 3
  ENST ID: ENST00000473026
  CDS Start-End: 9-500
atctttaaatggatgagatggctaccactcagatttccaaagatgagcttgatgaactcaaagaggcctttgcaaaagttgatctcaacagcaacggattcatttgtgactatgaacttcatgagctcttcaaggaagctaatatgccattaccaggatataaagtgagagaaattattcagaaactcatgctggatggtgacaggaataaagatgggaaaataagttttgacgaatttgtttatttatggccaaagccttttgttttgaattctatgttcaataaggaagaaaaatatgcttttgttaactggataaacaaagctttggaaaatgatcctgattgtagacatgttataccaatgaaccctaacaccgatgacctgttcaaagctgttggtgatggaattgtgctttgtaaaatgattaacctttcagttcctgataccattgatgaaagagcaatcaacaagaagaaacttacacccttcatcattcag

SEQ ID NO: 166389 - DNA, 216 bp, Homo sapiens
  Payload ID: 12759
  Gene Symbol: PLS3
  Gene Name: plastin 3
  ENST ID: ENST00000626746
  CDS Start-End: 88-216
aaagattccgaggtgcagaagttgtctgagtgggttggtcggcggcagtcgggccagacccaggactctgcgactttacatctttaaatggatgagatggctaccactcagatttccaaagatgagcttgatgaactcaaagaggcctttgcaaaagttgtggagacggagtttcaccgtgttagccaggatggtctcgatctcctgacctcgtga

SEQ ID NO: 166390 - DNA, 2987 bp, Homo sapiens
  Payload ID: 12760
  Gene Symbol: PDGFC
  Gene Name: platelet derived growth factor C
  ENST ID: ENST00000274071
  CDS Start-End: 413-565
cgggcaacccttgagttttcgcctctgtcctgtcccccgaactgacaggtgctcccagcaacttgctggggacttctcgccgctcccccgcgtccccaccccctcattcctccctcgccttcacccccacccccaccacttcgccacagctcaggatttgtttaaaccttgggaaactggttcaggtccaggttttgctttgatccttttcaaaaactggagacacagaagagggctctaggaaaaagttttggatgggattatgtggaaactaccctgcgattctctgctgccagagcaggctcggcgcttccaccccagtgcagccttcccctggcggtggtgaaagagactcgggagtcgctgcttccaaagtgcccgccgtgagtgagctctcaccccagtcagccaaatgagcctcttcgggcttctcctgctgacatctgccctggccggccagagacaggggactcaggcggaatccaacctgagtagtaaattccagttttccagcaacaaggaacagaacggtaggaactatatccaagcatctggactggcatagaaaagaggagaaagaacatttaaaaggagtacaagatcctcagcatgagagaattattactgtgtctactaatggaagtattcacagcccaaggtttcctcatacttatccaagaaatacggtcttggtatggagattagtagcagtagaggaaaatgtatggatacaacttacgtttgatgaaagatttgggcttgaagacccagaagatgacatatgcaagtatgattttgtagaagttgaggaacccagtgatggaactatattagggcgctggtgtggttctggtactgtaccaggaaaacagatttctaaaggaaatcaaattaggataagatttgtatctgatgaatattttccttctgaaccagggttctgcatccactacaacattgtcatgccacaattcacagaagctgtgagtccttcagtgctacccccttcagctttgccactggacctgcttaataatgctataactgcctttagtaccttggaagaccttattcgatatcttgaaccagagagatggcagttggacttagaagatctatataggccaacttggcaacttcttggcaaggcttttgtttttggaagaaaatccagagtggtggatctgaaccttctaacagaggaggtaagattatacagctgcacacctcgtaacttctcagtgtccataagggaagaactaaagagaaccgataccattttctggccaggttgtctcctggttaaacgctgtggtgggaactgtgcctgttgtctccacaattgcaatgaatgtcaatgtgtcccaagcaaagttactaaaaaataccacgaggtccttcagttgagaccaaagaccggtgtcaggggattgcacaaatcactcaccgacgtggccctggagcaccatgaggagtgtgactgtgtgtgcagagggagcacaggaggatagccgcatcaccaccagcagctcttgcccagagctgtgcagtgcagtggctgattctattagagaacgtatgcgttatctccatccttaatctcagttgtttgcttcaaggacctttcatcttcaggatttacagtgcattctgaaagaggagacatcaaacagaattaggagttgtgcaacagctcttttgagaggaggcctaaaggacaggagaaaaggtcttcaatcgtggaaagaaaattaaatgttgtattaaatagatcaccagctagtttcagagttaccatgtacgtattccactagctgggttctgtatttcagttctttcgatacggcttagggtaatgtcagtacaggaaaaaaactgtgcaagtgagcacctgattccgttgccttgcttaactctaaagctccatgtcctgggcctaaaatcgtataaaatctggatttttttttttttttttgctcatattcacatatgtaaaccagaacattctatgtactacaaacctggtttttaaaaaggaactatgttgctatgaattaaacttgtgtcgtgctgataggacagactggatttttcatatttcttattaaaatttctgccatttagaagaagagaactacattcatggtttggaagagataaacctgaaaagaagagtggccttatcttcactttatcgataagtcagtttatttgtttcattgtgtacatttttatattctccttttgacattataactgttggcttttctaatcttgttaaatatatctatttttaccaaaggtatttaatattcttttttatgacaacttagatcaactatttttagcttggtaaatttttctaaacacaattgttatagccagaggaacaaagatgatataaaatattgttgctctgacaaaaatacatgtatttcattctcgtatggtgctagagttagattaatctgcattttaaaaaactgaattggaatagaattggtaagttgcaaagactttttgaaaataattaaattatcatatcttccattcctgttattggagatgaaaataaaaagcaacttatgaaagtagacattcagatccagccattactaacctattccttttttggggaaatctgagcctagctcagaaaaacataaagcaccttgaaaaagacttggcagcttcctgataaagcgtgctgtgctgtgcagtaggaacacatcctatttattgtgatgttgtggttttattatcttaaactctgttccatacacttgtataaatacatggatatttttatgtacagaagtatgtctcttaaccagttcacttattgtactctggcaatttaaaagaaaatcagtaaaatattttgcttgtaaaatgcttaatatcgtgcctaggttatgtggtgactatttgaatcaaaaatgtattgaatcatcaaataaaagaatgtggctattttggggagaaaa

SEQ ID NO: 166391 - DNA, 849 bp, Homo sapiens
  Payload ID: 12760
  Gene Symbol: PDGFC
  Gene Name: platelet derived growth factor C
  Uniprot ID: Q9NRA1
  ENST ID: ENST00000422544
  CDS Start-End: 1-849
atgagcctcttcgggcttctcctgctgacatctgccctggccggccagagacaggggactcaggcggaatccaacctgagtagtaaattccagttttccagcaacaaggaacagaacggagtacaagatcctcagcatgagagaattattactgtgtctactaatggaagtattcacagcccaaggtttcctcatacttatccaagaaatacggtcttggtatggagattagtagcagtagaggaaaatgtatggatacaacttacgtttgatgaaagatttgggcttgaagacccagaagatgacatatgcaagtatgattttgtagaagttgaggaacccagtgatggaactatattagggcgctggtgtggttctggtactgtaccaggaaaacagatttctaaaggaaatcaaattaggataagatttgtatctgatgaatattttccttctgaaccagggttctgcatccactacaacattgtcatgccacaattcacagaagctgtgagtccttcagtgctacccccttcagctttgccactggacctgcttaataatgctataactgcctttagtaccttggaagaccttattcgatatcttgaaccagagagatggcagttggacttagaagatctatataggccaacttggcaacttcttggcaaggcttttgtttttggaagaaaatccagagtggtggatctgaaccttctaacagaggaggtccttcagttgagaccaaagaccggtgtcaggggattgcacaaatcactcaccgacgtggccctggagcaccatgaggagtgtgactgtgtgtgcagagggagcacaggaggatag

SEQ ID NO: 166392 - DNA, 4165 bp, Homo sapiens
  Payload ID: 12760
  Gene Symbol: PDGFC
  Gene Name: platelet derived growth factor C
  Uniprot ID: Q9NRA1
  ENST ID: ENST00000502773
  CDS Start-End: 492-1529
gcccggagagccgcatctattggcagctttgttattgatcagaaactgctcgccgccgacttggcttccagtctggctgcgggcaacccttgagttttcgcctctgtcctgtcccccgaactgacaggtgctcccagcaacttgctggggacttctcgccgctcccccgcgtccccaccccctcattcctccctcgccttcacccccacccccaccacttcgccacagctcaggatttgtttaaaccttgggaaactggttcaggtccaggttttgctttgatccttttcaaaaactggagacacagaagagggctctaggaaaaagttttggatgggattatgtggaaactaccctgcgattctctgctgccagagcaggctcggcgcttccaccccagtgcagccttcccctggcggtggtgaaagagactcgggagtcgctgcttccaaagtgcccgccgtgagtgagctctcaccccagtcagccaaatgagcctcttcgggcttctcctgctgacatctgccctggccggccagagacaggggactcaggcggaatccaacctgagtagtaaattccagttttccagcaacaaggaacagaacggagtacaagatcctcagcatgagagaattattactgtgtctactaatggaagtattcacagcccaaggtttcctcatacttatccaagaaatacggtcttggtatggagattagtagcagtagaggaaaatgtatggatacaacttacgtttgatgaaagatttgggcttgaagacccagaagatgacatatgcaagtatgattttgtagaagttgaggaacccagtgatggaactatattagggcgctggtgtggttctggtactgtaccaggaaaacagatttctaaaggaaatcaaattaggataagatttgtatctgatgaatattttccttctgaaccagggttctgcatccactacaacattgtcatgccacaattcacagaagctgtgagtccttcagtgctacccccttcagctttgccactggacctgcttaataatgctataactgcctttagtaccttggaagaccttattcgatatcttgaaccagagagatggcagttggacttagaagatctatataggccaacttggcaacttcttggcaaggcttttgtttttggaagaaaatccagagtggtggatctgaaccttctaacagaggaggtaagattatacagctgcacacctcgtaacttctcagtgtccataagggaagaactaaagagaaccgataccattttctggccaggttgtctcctggttaaacgctgtggtgggaactgtgcctgttgtctccacaattgcaatgaatgtcaatgtgtcccaagcaaagttactaaaaaataccacgaggtccttcagttgagaccaaagaccggtgtcaggggattgcacaaatcactcaccgacgtggccctggagcaccatgaggagtgtgactgtgtgtgcagagggagcacaggaggatagccgcatcaccaccagcagctcttgcccagagctgtgcagtgcagtggctgattctattagagaacgtatgcgttatctccatccttaatctcagttgtttgcttcaaggacctttcatcttcaggatttacagtgcattctgaaagaggagacatcaaacagaattaggagttgtgcaacagctcttttgagaggaggcctaaaggacaggagaaaaggtcttcaatcgtggaaagaaaattaaatgttgtattaaatagatcaccagctagtttcagagttaccatgtacgtattccactagctgggttctgtatttcagttctttcgatacggcttagggtaatgtcagtacaggaaaaaaactgtgcaagtgagcacctgattccgttgccttgcttaactctaaagctccatgtcctgggcctaaaatcgtataaaatctggatttttttttttttttttgctcatattcacatatgtaaaccagaacattctatgtactacaaacctggtttttaaaaaggaactatgttgctatgaattaaacttgtgtcgtgctgataggacagactggatttttcatatttcttattaaaatttctgccatttagaagaagagaactacattcatggtttggaagagataaacctgaaaagaagagtggccttatcttcactttatcgataagtcagtttatttgtttcattgtgtacatttttatattctccttttgacattataactgttggcttttctaatcttgttaaatatatctatttttaccaaaggtatttaatattcttttttatgacaacttagatcaactatttttagcttggtaaatttttctaaacacaattgttatagccagaggaacaaagatgatataaaatattgttgctctgacaaaaatacatgtatttcattctcgtatggtgctagagttagattaatctgcattttaaaaaactgaattggaatagaattggtaagttgcaaagactttttgaaaataattaaattatcatatcttccattcctgttattggagatgaaaataaaaagcaacttatgaaagtagacattcagatccagccattactaacctattccttttttggggaaatctgagcctagctcagaaaaacataaagcaccttgaaaaagacttggcagcttcctgataaagcgtgctgtgctgtgcagtaggaacacatcctatttattgtgatgttgtggttttattatcttaaactctgttccatacacttgtataaatacatggatatttttatgtacagaagtatgtctcttaaccagttcacttattgtactctggcaatttaaaagaaaatcagtaaaatattttgcttgtaaaatgcttaatatcgtgcctaggttatgtggtgactatttgaatcaaaaatgtattgaatcatcaaataaaagaatgtggctattttggggagaaaattatgtgtgtgtgtgctcaagatttatttcttggactctgagaaaatgaaagataaaattttctgttatgattttcatttagcaaaagcatatgtcaattcaaaagacaaaaaaagggaagatacctgtgagccttctctgcctcttgtttccaatgcctttgagcaatggttttatttttcttactggtcttaatacagatttctggtaatttaagtttcacctgacttgaaagttgtatggtttatgaaatgcttggtgataggtggtatggtagtatgaaactggaaaaaaacttgcaggtttccactcatgtcttcattgtcactggcaactactaaatggggtgagcataaattgatttggtgcatggattattgtacattgcacacttcaagatatggttcctcagttccagacatagattcctattcagggctggtatcttcagcatcctttcctcagcctttcaacttggcagagatgtctagtgtccagggccttctgtcttcagactgctcttcaggcaagcacccttttcctgtgctttgacacctgcagttctgccctgcctccaactatgtggaaaacaaagaaacaaaatgagcctatgtgttctgtcttacttccttaccttttcctggttttgtcctatccatatagaggccaactagatatatggaatatgcaacgtagtaagtagttggcagtttacaactttcattagtatagtaaagactactaagtcttagtaaatagcctgtttaactgtgtttaatccattgtttcccatctttgaacgaaatatattttcccttttttaatatttattttttgtttacttataaaatcttgacagccagaagagatcataagggtagcagtcctcagttgccagtcggtgagtggttaccatgtgaggactaaccactttataatcacttactcatagatcgtcctgtgtattttactaaacacacacacacacacacacacacataaatagcacatgaccctaatttctgagaagtacagtaagtattgactgtattgaccacacaccgttttgtgtatgatatctgtttcaagcctttgtccttgagacatgggctgttttgcccagtgatgtttactaaaataaaagcaagccttaaatgtca

SEQ ID NO: 166393 - DNA, 1014 bp, Homo sapiens
  Payload ID: 12760
  Gene Symbol: PDGFC
  Gene Name: platelet derived growth factor C
  ENST ID: ENST00000506880
  CDS Start-End: 1-161
ttacgtttgatgaaagatttgggcttgaagacccagaagatgacatatgcaagtatgattttgtagaagttgaggaacccagtgatggaactatattagggcgctggtgtggttctgggttctgcatccactacaacattgtcatgccaaacctcccgtgagttgttcctggcaggcatttgtgtctgcatgccctgtctgctgcttaggctctttaaaagatttgtgtgatacttgtttggttacttgtgtgattcataatagcagattctcgttttggcaagagaaaactctcttctatgatgcagtatacttggcttctcacaaagcaattcacagaagctgtgagtccttcagtgctacccccttcagctttgccactggacctgcttaataatgctataactgcctttagtaccttggaagaccttattcgatatcttgaaccagagagatggcagttggacttagaagatctatataggccaacttggcaacttcttggcaaggcttttgtttttggaagaaaatccagagtggtggatctgaaccttctaacagaggaggtaagattatacagctgcacacctcgtaacttctcagtgtccataagggaagaactaaagagaaccgataccattttctggccaggttgtctcctggttaaacgctgtggtgggaactgtgcctgttgtctccacaattgcaatgaatgtcaatgtgtcccaagcaaagttactaaaaaataccacgaggtccttcagttgagaccaaagaccggtgtcaggggattgcacaaatcactcaccgacgtggccctggagcaccatgaggagtgtgactgtgtgtgcagagggagcacaggaggatagccgcatcaccaccagcagctcttgcccagagctgtgcagtgcagtggctgattctattagagaacgtatgcgttatctccatccttaatctcagttgtttgcttcaaggacctttcatcttcaggatttacagtgcattctg

SEQ ID NO: 166394 - DNA, 4052 bp, Homo sapiens
  Payload ID: 12761
  Gene Symbol: PDGFD
  Gene Name: platelet derived growth factor D
  Uniprot ID: Q9GZP0
  ENST ID: ENST00000302251
  CDS Start-End: 453-1547
ggcagagcaggtttaggcccggcctgggaaactggggagctgaggtgctcgcgccgccgctctgagcccgagtgcgcgcctctcaggggccgcggccggggctggagaacgctgctgctccgctcgcctgccccgctagattcggcgctgcccgccccctgcagcctgtgctgcagctgccggccaccggagggggcgaacaaacaaacgtcaacctgttgtttgtcccgtcaccatttatcagctcagcaccacaaggaagtgcggcacccacacgcgctcggaaagttcagcatgcaggaagtttggggagagctcggcgattagcacagcgacccgggccagcgcagggcgagcgcaggcggcgagagcgcagggcggcgcggcgtcggtcccgggagcagaacccggctttttcttggagcgacgctgtctctagtcgctgatcccaaatgcaccggctcatctttgtctacactctaatctgcgcaaacttttgcagctgtcgggacacttctgcaaccccgcagagcgcatccatcaaagctttgcgcaacgccaacctcaggcgagatgacttgtaccgaagagatgagaccatccaggtgaaaggaaacggctacgtgcagagtcctagattcccgaacagctaccccaggaacctgctcctgacatggcggcttcactctcaggagaatacacggatacagctagtgtttgacaatcagtttggattagaggaagcagaaaatgatatctgtaggtatgattttgtggaagttgaagatatatccgaaaccagtaccattattagaggacgatggtgtggacacaaggaagttcctccaaggataaaatcaagaacgaaccaaattaaaatcacattcaagtccgatgactactttgtggctaaacctggattcaagatttattattctttgctggaagatttccaacccgcagcagcttcagagaccaactgggaatctgtcacaagctctatttcaggggtatcctataactctccatcagtaacggatcccactctgattgcggatgctctggacaaaaaaattgcagaatttgatacagtggaagatctgctcaagtacttcaatccagagtcatggcaagaagatcttgagaatatgtatctggacacccctcggtatcgaggcaggtcataccatgaccggaagtcaaaagttgacctggataggctcaatgatgatgccaagcgttacagttgcactcccaggaattactcggtcaatataagagaagagctgaagttggccaatgtggtcttctttccacgttgcctcctcgtgcagcgctgtggaggaaattgtggctgtggaactgtcaactggaggtcctgcacatgcaattcagggaaaaccgtgaaaaagtatcatgaggtattacagtttgagcctggccacatcaagaggaggggtagagctaagaccatggctctagttgacatccagttggatcaccatgaacgatgtgattgtatctgcagctcaagaccacctcgataagagaatgtgcacatccttacattaagcctgaaagaacctttagtttaaggagggtgagataagagacccttttcctaccagcaaccaaacttactactagcctgcaatgcaatgaacacaagtggttgctgagtctcagccttgctttgttaatgccatggcaagtagaaaggtatatcatcaacttctatacctaagaatataggattgcatttaataatagtgtttgaggttatatatgcacaaacacacacagaaatatattcatgtctatgtgtatatagatcaaatgttttttttggtatatataaccaggtacaccagagcttacatatgtttgagttagactcttaaaatcctttgccaaaataagggatggtcaaatatatgaaacatgtctttagaaaatttaggagataaatttatttttaaattttgaaacacaaaacaattttgaatcttgctctcttaaagaaagcatcttgtatattaaaaatcaaaagatgaggctttcttacatatacatcttagttgattattaaaaaaggaaaaatatggtttccagagaaaaggccaatacctaagcattttttccatgagaagcactgcatacttacctatgtggactataataacctgtctccaaaaccatgccataataatataagtgctttagaaattaaatcattgtgttttttatgcattttgctgaggcatgcttattcatttaacacctatctcaaaaacttacttagaaggttttttattatagtcctacaaaagacaatgtataagctgtaacagaattttgaattgtttttctttgcaaaacccctccacaaaagcaaatcctttcaagaatggcatgggcattctgtatgaacctttccagatggtgttcagtgaaagatgtgggtagttgagaacttaaaaagtgaacattgaaacatcgacgtaactggaaattaggtgggatatttgataggatccatatctaataatggattcgaactctccaaactacaccaattaatttaatgtatcttgcttttgtgttcccgtctttttgaaatatagacatggatttataatggcattttatatttggcaggccatcatagattatttacaacctaaaagcttttgtgtatcaaaaaaatcacattttattaatgtaaatttctaatcgtatacttgctcactgttctgatttcctgtttctgaaccaagtaaaatcagtcctagaggctatggttcttaatctatggagcttgctttaagaagccagttgtcaattgtggtaacacaagtttggccctgctgtcctactgtttaatagaaaactgttttacattggttaatggtatttagagtaattttttctctctgcctcctttgtgtctgttttaaaggagactaactccaggagtaggaaatgattcatcatcctccaaagcaagaggcttaagagagaaacaccgaaattcagatagctcagggactgctaacagagaactacatttttcttattgccttgaaagttaaaaggaaagcagatttcttcagtgactttgtggtcctactaactacaaccagtttgggtgacagggctggtaaagtcccagtgttagatgagtgacctaaatatacttagatttctaagtatggtgctctcaggtccaagttcaactattcttaagcagtgcaattcttcccagttatttgagatgaaagatctctgcttattgaagatgtaccttctaaaactttcctaaaagtgtctgatgtttttactcaagaggggagtggtaaaattaaatactctattgttcaattctctaaaatcccagaacacaatcagaaatagctcaggcagacactaataattaagaacgctcttcctcttcataactgctttgcaagtttcctgtgaaaacatcagtttcctgtaccaaagtcaaaatgaacgttacatcactctaacctgaacagctcacaatgtagctgtaaatataaaaaatgagagtgttctacccagttttcaataaaccttccaggctgcaataaccagcaaggttttcagttaaagccctatctgcactttttatttattagctgaaatgtaagcaggcatattcactcacttttctttgcctttcctgagagttttattaaaacttctcccttggttacctgttatcttttgcacttctaacatgtagccaataaatctatttgatagccatcaaaggaataaaaagctggccgtacaaattacatttcaaaacaaaccctaataaatccacatttccgcatggctcattcacctggaataatgccttttattgaatatgttcttatagggcaaaacactttcataagtagagttttttatgttttttgtcatatcggtaacatgcagctttttcctctcatagcattttctatagcgaatgtaatatgcctcttatcttcatgaaaaataaatattgcttttgaacaaaa

SEQ ID NO: 166395 - DNA, 3801 bp, Homo sapiens
  Payload ID: 12761
  Gene Symbol: PDGFD
  Gene Name: platelet derived growth factor D
  Uniprot ID: Q9GZP0
  ENST ID: ENST00000393158
  CDS Start-End: 181-1293
acacgcgctcggaaagttcagcatgcaggaagtttggggagagctcggcgattagcacagcgacccgggccagcgcagggcgagcgcaggcggcgagagcgcagggcggcgcggcgtcggtcccgggagcagaacccggctttttcttggagcgacgctgtctctagtcgctgatcccaaatgcaccggctcatctttgtctacactctaatctgcgcaaacttttgcagctgtcgggacacttctgcaaccccgcagagcgcatccatcaaagctttgcgcaacgccaacctcaggcgagatgagagcaatcacctcacagacttgtaccgaagagatgagaccatccaggtgaaaggaaacggctacgtgcagagtcctagattcccgaacagctaccccaggaacctgctcctgacatggcggcttcactctcaggagaatacacggatacagctagtgtttgacaatcagtttggattagaggaagcagaaaatgatatctgtaggtatgattttgtggaagttgaagatatatccgaaaccagtaccattattagaggacgatggtgtggacacaaggaagttcctccaaggataaaatcaagaacgaaccaaattaaaatcacattcaagtccgatgactactttgtggctaaacctggattcaagatttattattctttgctggaagatttccaacccgcagcagcttcagagaccaactgggaatctgtcacaagctctatttcaggggtatcctataactctccatcagtaacggatcccactctgattgcggatgctctggacaaaaaaattgcagaatttgatacagtggaagatctgctcaagtacttcaatccagagtcatggcaagaagatcttgagaatatgtatctggacacccctcggtatcgaggcaggtcataccatgaccggaagtcaaaagttgacctggataggctcaatgatgatgccaagcgttacagttgcactcccaggaattactcggtcaatataagagaagagctgaagttggccaatgtggtcttctttccacgttgcctcctcgtgcagcgctgtggaggaaattgtggctgtggaactgtcaactggaggtcctgcacatgcaattcagggaaaaccgtgaaaaagtatcatgaggtattacagtttgagcctggccacatcaagaggaggggtagagctaagaccatggctctagttgacatccagttggatcaccatgaacgatgtgattgtatctgcagctcaagaccacctcgataagagaatgtgcacatccttacattaagcctgaaagaacctttagtttaaggagggtgagataagagacccttttcctaccagcaaccaaacttactactagcctgcaatgcaatgaacacaagtggttgctgagtctcagccttgctttgttaatgccatggcaagtagaaaggtatatcatcaacttctatacctaagaatataggattgcatttaataatagtgtttgaggttatatatgcacaaacacacacagaaatatattcatgtctatgtgtatatagatcaaatgttttttttggtatatataaccaggtacaccagagcttacatatgtttgagttagactcttaaaatcctttgccaaaataagggatggtcaaatatatgaaacatgtctttagaaaatttaggagataaatttatttttaaattttgaaacacaaaacaattttgaatcttgctctcttaaagaaagcatcttgtatattaaaaatcaaaagatgaggctttcttacatatacatcttagttgattattaaaaaaggaaaaatatggtttccagagaaaaggccaatacctaagcattttttccatgagaagcactgcatacttacctatgtggactataataacctgtctccaaaaccatgccataataatataagtgctttagaaattaaatcattgtgttttttatgcattttgctgaggcatgcttattcatttaacacctatctcaaaaacttacttagaaggttttttattatagtcctacaaaagacaatgtataagctgtaacagaattttgaattgtttttctttgcaaaacccctccacaaaagcaaatcctttcaagaatggcatgggcattctgtatgaacctttccagatggtgttcagtgaaagatgtgggtagttgagaacttaaaaagtgaacattgaaacatcgacgtaactggaaattaggtgggatatttgataggatccatatctaataatggattcgaactctccaaactacaccaattaatttaatgtatcttgcttttgtgttcccgtctttttgaaatatagacatggatttataatggcattttatatttggcaggccatcatagattatttacaacctaaaagcttttgtgtatcaaaaaaatcacattttattaatgtaaatttctaatcgtatacttgctcactgttctgatttcctgtttctgaaccaagtaaaatcagtcctagaggctatggttcttaatctatggagcttgctttaagaagccagttgtcaattgtggtaacacaagtttggccctgctgtcctactgtttaatagaaaactgttttacattggttaatggtatttagagtaattttttctctctgcctcctttgtgtctgttttaaaggagactaactccaggagtaggaaatgattcatcatcctccaaagcaagaggcttaagagagaaacaccgaaattcagatagctcagggactgctaacagagaactacatttttcttattgccttgaaagttaaaaggaaagcagatttcttcagtgactttgtggtcctactaactacaaccagtttgggtgacagggctggtaaagtcccagtgttagatgagtgacctaaatatacttagatttctaagtatggtgctctcaggtccaagttcaactattcttaagcagtgcaattcttcccagttatttgagatgaaagatctctgcttattgaagatgtaccttctaaaactttcctaaaagtgtctgatgtttttactcaagaggggagtggtaaaattaaatactctattgttcaattctctaaaatcccagaacacaatcagaaatagctcaggcagacactaataattaagaacgctcttcctcttcataactgctttgcaagtttcctgtgaaaacatcagtttcctgtaccaaagtcaaaatgaacgttacatcactctaacctgaacagctcacaatgtagctgtaaatataaaaaatgagagtgttctacccagttttcaataaaccttccaggctgcaataaccagcaaggttttcagttaaagccctatctgcactttttatttattagctgaaatgtaagcaggcatattcactcacttttctttgcctttcctgagagttttattaaaacttctcccttggttacctgttatcttttgcacttctaacatgtagccaataaatctatttgatagccatcaaaggaataaaaagctggccgtacaaattacatttcaaaacaaaccctaataaatccacatttccgcatggctcattcacctggaataatgccttttattgaatatgttcttatagggcaaaacactttcataagtagagttttttatgttttttgtcatatcggtaacatgcagctttttcctctcatagcattttctatagcgaatgtaatatgcctcttatcttcatgaaaaataaatattgcttttgaacaaaacta

SEQ ID NO: 166396 - DNA, 620 bp, Homo sapiens
  Payload ID: 12761
  Gene Symbol: PDGFD
  Gene Name: platelet derived growth factor D
  ENST ID: ENST00000529268
  CDS Start-End: 1-620
atctttgaggccgtaggagcccagggaacagtggtcctcgatgaggagtcgctccatgtggatgatctggatctcttcgacggggactctggactccgcttcgcagaggaccttgaagtttcggagctcaaagtcggggctgacctggagagagaaggtgacctcggagaggtccctccgcacgcagtacacgagagcaatcacctcacagacttgtaccgaagagatgagaccatccaggtgaaaggaaacggctacgtgcagagtcctagattcccgaacagctaccccaggaacctgctcctgacatggcggcttcactctcaggagaatacacggatacagctagtgtttgacaatcagtttggattagaggaagcagaaaatgatatctgtaggtatgattttgtggaagttgaagatatatccgaaaccagtaccattattagaggacgatggtgtggacacaaggaagttcctccaaggataaaatcaagaacgaaccaaattaaaatcacattcaagtccgatgactactttgtggctaaacctggattcaagatttattattctttgctggaagatttccaacccgcagcagcttcagagaccaactggga

SEQ ID NO: 166397 - DNA, 4866 bp, Homo sapiens
  Payload ID: 12762
  Gene Symbol: PEAR1
  Gene Name: platelet endothelial aggregation receptor 1
  Uniprot ID: Q5VY43
  ENST ID: ENST00000292357
  CDS Start-End: 117-3230
ggctcgaagtggggaccctcgccccgtcctcggctgtccagtcctcctcctcgcagaccccggcggttcctaccccaggccgcaggggagacggggccccaaggcaggcctctgcaatgtcaccgcctctgtgtcccctccttctcctggctgtgggcctgcggctggctggaactctcaaccccagtgatcccaatacctgcagcttctgggaaagcttcactaccaccaccaaggagtcccactcccgccccttcagcctgctcccctcagagccctgcgagcggccctgggagggcccccatacttgcccccagcccacggttgtataccggaccgtgtaccgtcaggtggtgaagacggaccaccgccagcgcctgcagtgctgccatggcttctatgagagcagggggttctgtgtcccgctctgtgcccaggagtgtgtccatggccgttgtgtggcacccaatcagtgccaatgtgtgccaggctggcggggcgacgactgttccagtgagtgtgccccaggaatgtgggggccacagtgtgacaagccctgcagctgcggcaacaacagctcgtgtgatcccaagagtggggtatgttcttgcccttctggtctgcagcccccgaactgccttcagccctgtacccctggctactatggccctgcctgccagttccgctgccagtgccatggggcaccctgcgatccccagactggagcctgcttctgccccgcagagagaactgggcccagctgtgacgtgtcctgttcccagggcacttctggcttcttctgccccagcacccattcttgccaaaatggaggtgtcttccaaaccccacagggctcctgcagctgcccccctggctggatgggcaccatctgctccctgccctgcccagagggctttcacggacccaactgctcccaggaatgtcgctgccacaacggcggcctctgtgaccgattcactgggcagtgccgctgcgctccgggttacactggggatcggtgccgggaggagtgcccggtgggccgctttgggcaggactgtgctgagacgtgcgactgcgccccggacgcccgttgcttcccggccaacggcgcatgtctgtgcgaacacggcttcactggggaccgctgcacggatcgcctctgccccgacggcttctacggtctcagctgccaggccccctgcacctgcgaccgggagcacagcctcagctgccacccgatgaacggggagtgctcctgcctgccgggctgggcgggcctccactgcaacgagagctgcccgcaggacacgcatgggccagggtgccaggagcactgtctctgcctgcacggtggcgtctgccaggctaccagcggcctctgtcagtgcgcgccgggttacacgggccctcactgtgctagtctttgtcctcctgacacctacggtgtcaactgttctgcacgctgctcatgtgaaaatgccatcgcctgctcacccatcgacggcgagtgcgtctgcaaggaaggttggcagcgtggtaactgctctgtgccctgcccacccggaacctggggcttcagttgcaatgccagctgccagtgtgcccatgaggcagtctgcagcccccaaactggagcctgtacctgcacccctgggtggcatggggcccactgccagctgccctgtccgaaggggcagtttggagaaggttgtgccagtcgctgtgactgtgaccactctgatggctgtgaccctgttcatggacgctgtcagtgccaggctggctggatgggtgcccgctgccacctgtcctgccctgagggcttatggggagtcaactgtagcaacacctgcacctgcaagaatgggggcacctgtctccctgagaatggcaactgcgtgtgtgcacccggattccggggcccctcctgccagagatcctgtcagcctggccgctatggcaaacgctgtgtgccctgcaagtgcgctaaccactccttctgccacccctcgaacgggacctgctactgcctggctggctggacaggccccgactgctcccagccatgccctccaggacactggggagaaaactgtgcccagacctgccaatgtcaccatggtgggacctgccatccccaggatgggagctgtatctgccccctaggctggactggacaccactgcttagaaggctgccctctggggacatttggtgctaactgctcccagccatgccagtgtggtcctggagaaaagtgccacccagagactggggcctgtgtatgtcccccagggcacagtggtgcaccttgcaggattggaatccaggagccctttactgtgatgccgaccactccagtagcgtataactcgctgggtgcagtgattggcattgcagtgctggggtcccttgtggtagccctggtggcactgttcattggctatcggcactggcaaaaaggcaaggagcaccaccacctggctgtggcttacagcagcgggcgcctggacggctccgagtatgtcatgccagatgtccctccgagctacagtcactactactccaaccccagctaccacaccctgtcgcagtgctccccaaaccccccaccccctaacaaggttccaggcccgctctttgccagcctgcagaaccctgagcggccaggtggggcccaagggcatgataaccacaccaccctgcctgctgactggaagcaccgccgggagccccctccagggcctctggacagggggagcagccgcctggaccgaagctacagctatagctacagcaatggcccaggcccattctacaataaagggctcatctctgaagaggagctcggggccagtgtggcttccctgagcagtgagaacccatatgccaccatccgggacctgcccagcttgccagggggcccccgggagagcagctacatggagatgaaaggccctccctcaggatctccccccaggcagcctcctcagttctgggacagccagaggcggcggcaaccccagccacagagagacagtggcacctacgagcagcccagccccctgatccatgaccgagactctgtgggctcccagccccctctgcctccgggcctaccccccggccactatgactcacccaagaacagccacatccctggacattatgacttgcctccagtacggcatcccccatcacctccacttcgacgccaggaccgttgaggagccaggatggtatggcagaggccagcacacctggctgttgctgctcaaggctggggacagagcctagtgtacccctgccaggagcagggagtggaccggcaggctgtgaacatgaacaacgcttaacagagcaagtgatgggagccttgttcctgggttctaccatgggagacgctgatcagcaggatgcctggctccctttcccaacccactgctcccaaggcctccagggccctgtgtacataaactggtgggttggaagttgctgggtaactctgatttcagacatgcgtgtggggtaccttttctgtgcatgctcagcctgggctctgtgcgtgtgtgtgtttctgtgattttagaagggtaccaggcacaggttctgtcctagggcacttaccatttagtagggagatggaaccaacccaattaactctagcaatagcctcctaactggcctcctccattgattcagtgaaccttccaatgcatggctcataatttcaaaatacaggctggttagttactccctacctgaaagccttcataggtgcctctttgctcttctgccagtatcaaaacttttgaaggccttaaaggccctgctttgcctggcccatctgtctctccagcctcaccttgaactgtgttcctgtcactgcacgccagtcacaccggcctctaggtcctcctgtaggccactcttctttctggcacagggacctgcacacctggagtgcccttcctcccccactcgcctgttcacccctgcttttcctttacacctcctcctcagggaagtgcccaccctccgtacatctttcacagccctgattgcagctgtgttcactcaccaggtacctgcagaaggcctacagggtgccaggcacttctttaatgtgttctttctttatgtgattatttgattaatctctgcctcccccactagactgtaagctccctgaaggcaagaatcctgtgcttatgctcaatattagctctcccttggcacagagtaggcactcaacaaatgctccccaaaaggctgagtggctgactgaattaagtaccagtgacatgcagtaactgctaagatagatgagccatctgtatgctctgacagttacagactgaataagttggagacttccctaaagggtggcatttccccagggtaacaacgcagagctcaggtgtgggaaggtgccaggggcaggggtgcagaggggctgaggctgaggggggtgcagaggctggagaaaggataacaggagagagtatacaggcatgccttgatttattgcacttcacaggtagcagaatttttaaagaaattgaaggttttgggacatatatgtgacagcaataggttaagaaaagcaaagcagagaaattgaagatttgtgtcaacactgctttaagcaaatctgttggcaccatttttccaatagcatgtgcccattttgggtctctacattgcattttggtaattgcttgcaatatttcaagcattttcattgttattatatgtgttatagtgatctgtgatcagtgatctttgatatattattgtaattgtttcggggcgccatgaaccgcacccatataacacggtaaacttaatcagcaaacgttg

SEQ ID NO: 166398 - DNA, 4970 bp, Homo sapiens
  Payload ID: 12762
  Gene Symbol: PEAR1
  Gene Name: platelet endothelial aggregation receptor 1
  Uniprot ID: Q5VY43
  ENST ID: ENST00000338302
  CDS Start-End: 226-3339
agtcaggctggggctcgaagtggggaccctcgccccgtcctcggctgtccagtcctcctcctcgcagaccccggcggttcctaccccaggccgcaggggagacggggccccaaggcaggcttcatatcctgaacgctgggatcccccaggacattccctggcccccaggccccaggtcccaggccccagggctgagctgtgggcaggccccacctggcctctgcaatgtcaccgcctctgtgtcccctccttctcctggctgtgggcctgcggctggctggaactctcaaccccagtgatcccaatacctgcagcttctgggaaagcttcactaccaccaccaaggagtcccactcccgccccttcagcctgctcccctcagagccctgcgagcggccctgggagggcccccatacttgcccccagcccacggttgtataccggaccgtgtaccgtcaggtggtgaagacggaccaccgccagcgcctgcagtgctgccatggcttctatgagagcagggggttctgtgtcccgctctgtgcccaggagtgtgtccatggccgttgtgtggcacccaatcagtgccaatgtgtgccaggctggcggggcgacgactgttccagtgagtgtgccccaggaatgtgggggccacagtgtgacaagccctgcagctgcggcaacaacagctcgtgtgatcccaagagtggggtatgttcttgcccttctggtctgcagcccccgaactgccttcagccctgtacccctggctactatggccctgcctgccagttccgctgccagtgccatggggcaccctgcgatccccagactggagcctgcttctgccccgcagagagaactgggcccagctgtgacgtgtcctgttcccagggcacttctggcttcttctgccccagcacccattcttgccaaaatggaggtgtcttccaaaccccacagggctcctgcagctgcccccctggctggatgggcaccatctgctccctgccctgcccagagggctttcacggacccaactgctcccaggaatgtcgctgccacaacggcggcctctgtgaccgattcactgggcagtgccgctgcgctccgggttacactggggatcggtgccgggaggagtgcccggtgggccgctttgggcaggactgtgctgagacgtgcgactgcgccccggacgcccgttgcttcccggccaacggcgcatgtctgtgcgaacacggcttcactggggaccgctgcacggatcgcctctgccccgacggcttctacggtctcagctgccaggccccctgcacctgcgaccgggagcacagcctcagctgccacccgatgaacggggagtgctcctgcctgccgggctgggcgggcctccactgcaacgagagctgcccgcaggacacgcatgggccagggtgccaggagcactgtctctgcctgcacggtggcgtctgccaggctaccagcggcctctgtcagtgcgcgccgggttacacgggccctcactgtgctagtctttgtcctcctgacacctacggtgtcaactgttctgcacgctgctcatgtgaaaatgccatcgcctgctcacccatcgacggcgagtgcgtctgcaaggaaggttggcagcgtggtaactgctctgtgccctgcccacccggaacctggggcttcagttgcaatgccagctgccagtgtgcccatgaggcagtctgcagcccccaaactggagcctgtacctgcacccctgggtggcatggggcccactgccagctgccctgtccgaaggggcagtttggagaaggttgtgccagtcgctgtgactgtgaccactctgatggctgtgaccctgttcatggacgctgtcagtgccaggctggctggatgggtgcccgctgccacctgtcctgccctgagggcttatggggagtcaactgtagcaacacctgcacctgcaagaatgggggcacctgtctccctgagaatggcaactgcgtgtgtgcacccggattccggggcccctcctgccagagatcctgtcagcctggccgctatggcaaacgctgtgtgccctgcaagtgcgctaaccactccttctgccacccctcgaacgggacctgctactgcctggctggctggacaggccccgactgctcccagccatgccctccaggacactggggagaaaactgtgcccagacctgccaatgtcaccatggtgggacctgccatccccaggatgggagctgtatctgccccctaggctggactggacaccactgcttagaaggctgccctctggggacatttggtgctaactgctcccagccatgccagtgtggtcctggagaaaagtgccacccagagactggggcctgtgtatgtcccccagggcacagtggtgcaccttgcaggattggaatccaggagccctttactgtgatgccgaccactccagtagcgtataactcgctgggtgcagtgattggcattgcagtgctggggtcccttgtggtagccctggtggcactgttcattggctatcggcactggcaaaaaggcaaggagcaccaccacctggctgtggcttacagcagcgggcgcctggacggctccgagtatgtcatgccagatgtccctccgagctacagtcactactactccaaccccagctaccacaccctgtcgcagtgctccccaaaccccccaccccctaacaaggttccaggcccgctctttgccagcctgcagaaccctgagcggccaggtggggcccaagggcatgataaccacaccaccctgcctgctgactggaagcaccgccgggagccccctccagggcctctggacagggggagcagccgcctggaccgaagctacagctatagctacagcaatggcccaggcccattctacaataaagggctcatctctgaagaggagctcggggccagtgtggcttccctgagcagtgagaacccatatgccaccatccgggacctgcccagcttgccagggggcccccgggagagcagctacatggagatgaaaggccctccctcaggatctccccccaggcagcctcctcagttctgggacagccagaggcggcggcaaccccagccacagagagacagtggcacctacgagcagcccagccccctgatccatgaccgagactctgtgggctcccagccccctctgcctccgggcctaccccccggccactatgactcacccaagaacagccacatccctggacattatgacttgcctccagtacggcatcccccatcacctccacttcgacgccaggaccgttgaggagccaggatggtatggcagaggccagcacacctggctgttgctgctcaaggctggggacagagcctagtgtacccctgccaggagcagggagtggaccggcaggctgtgaacatgaacaacgcttaacagagcaagtgatgggagccttgttcctgggttctaccatgggagacgctgatcagcaggatgcctggctccctttcccaacccactgctcccaaggcctccagggccctgtgtacataaactggtgggttggaagttgctgggtaactctgatttcagacatgcgtgtggggtaccttttctgtgcatgctcagcctgggctctgtgcgtgtgtgtgtttctgtgattttagaagggtaccaggcacaggttctgtcctagggcacttaccatttagtagggagatggaaccaacccaattaactctagcaatagcctcctaactggcctcctccattgattcagtgaaccttccaatgcatggctcataatttcaaaatacaggctggttagttactccctacctgaaagccttcataggtgcctctttgctcttctgccagtatcaaaacttttgaaggccttaaaggccctgctttgcctggcccatctgtctctccagcctcaccttgaactgtgttcctgtcactgcacgccagtcacaccggcctctaggtcctcctgtaggccactcttctttctggcacagggacctgcacacctggagtgcccttcctcccccactcgcctgttcacccctgcttttcctttacacctcctcctcagggaagtgcccaccctccgtacatctttcacagccctgattgcagctgtgttcactcaccaggtacctgcagaaggcctacagggtgccaggcacttctttaatgtgttctttctttatgtgattatttgattaatctctgcctcccccactagactgtaagctccctgaaggcaagaatcctgtgcttatgctcaatattagctctcccttggcacagagtaggcactcaacaaatgctccccaaaaggctgagtggctgactgaattaagtaccagtgacatgcagtaactgctaagatagatgagccatctgtatgctctgacagttacagactgaataagttggagacttccctaaagggtggcatttccccagggtaacaacgcagagctcaggtgtgggaaggtgccaggggcaggggtgcagaggggctgaggctgaggggggtgcagaggctggagaaaggataacaggagagagtatacaggcatgccttgatttattgcacttcacaggtagcagaatttttaaagaaattgaaggttttgggacatatatgtgacagcaataggttaagaaaagcaaagcagagaaattgaagatttgtgtcaacactgctttaagcaaatctgttggcaccatttttccaatagcatgtgcccattttgggtctctacattgcattttggtaattgcttgcaatatttcaagcattttcattgttattatatgtgttatagtgatctgtgatcagtgatctttgatatattattgtaattgtttcggggcgccatgaaccgcacccatataacacggtaaacttaatcagcaaa

SEQ ID NO: 166399 - DNA, 642 bp, Homo sapiens
  Payload ID: 12762
  Gene Symbol: PEAR1
  Gene Name: platelet endothelial aggregation receptor 1
  ENST ID: ENST00000455314
  CDS Start-End: 123-642
ggctggggctcgaagtggggaccctcgccccgtcctcggctgtccagtcctcctcctcgcagaccccggcggttcctaccccaggccgcaggggagacggggccccaaggcaggcctctgcaatgtcaccgcctctgtgtcccctccttctcctggctgtgggcctgcggctggctggaactctcaaccccagtgatcccaatacctgcagcttctgggaaagcttcactaccaccaccaaggagtcccactcccgccccttcagcctgctcccctcagagccctgcgagcggccctgggagggcccccatacttgcccccagcccacggttgtataccggaccgtgtaccgtcaggtggtgaagacggaccaccgccagcgcctgcagtgctgccatggcttctatgagagcagggggttctgtgtcccgctctgtgcccaggagtgtgtccatggccgttgtgtggcacccaatcagtgccaatgtgtgccaggctggcggggcgacgactgttccagtgagtgtgccccaggaatgtgggggccacagtgtgacaagccctgcagctgcggcaacaacagctcgtgtgatcccaagagtggggtatgttcttgcccttctggtctgcagcccccgaact

SEQ ID NO: 166400 - DNA, 688 bp, Homo sapiens
  Payload ID: 12762
  Gene Symbol: PEAR1
  Gene Name: platelet endothelial aggregation receptor 1
  ENST ID: ENST00000444016
  CDS Start-End: 150-383
cccgcctccccgccgctcccgcagtcaggctggggctcgaagtggggaccctcgccccgtcctcggctgtccagtcctcctcctcgcagaccccggcggttcctaccccaggccgcaggggagacggggccccaaggcaggcctctgcaatgtcaccgcctctgtgtcccctccttctcctggctgtgggcctgcggctggctggaactctcaaccccagtgatcccaatacctgcagcttctgggaaagcttcactaccaccaccaaggagtcccactcccgccccttcagcctgctcccctcagagccctgcgagcggccctgggagggcccccatacttgcccccagcccacaaactcagaggaaactcctggcttctagggattcattctgcatggtctgtgtcggggttgtataccggaccgtgtaccgtcaggtggtgaagacggaccaccgccagcgcctgcagtgctgccatggcttctatgagagcagggggttctgtgtcccgctctgtgcccaggagtgtgtccatggccgttgtgtggcacccaatcagtgccaatgtgtgccaggctggcggggcgacgactgttccagtgagtgtgccccaggaatgtgggggccacagtgtgacaagccctgcagctgcggcaacaacagctcgtgtgatcccaagagtgggg

SEQ ID NO: 166401 - DNA, 604 bp, Homo sapiens
  Payload ID: 12763
  Gene Symbol: PF4
  Gene Name: platelet factor 4
  Uniprot ID: P02776
  ENST ID: ENST00000296029
  CDS Start-End: 172-477
atcttagtttccgcaccgcagttcctcggtgtccacttcaggcttccggactggaaggacagccgggaataaaacgtgccggcgaggctcaggagtcattggccacagagacccagcccgagtttcccatcgcactgagcactgagatcctgctggaagctctgccgcagcatgagctccgcagccgggttctgcgcctcacgccccgggctgctgttcctggggttgctgctcctgccacttgtggtcgccttcgccagcgctgaagctgaagaagatggggacctgcagtgcctgtgtgtgaagaccacctcccaggtccgtcccaggcacatcaccagcctggaggtgatcaaggccggaccccactgccccactgcccaactgatagccacgctgaagaatggaaggaaaatttgcttggacctgcaagccccgctgtacaagaaaataattaagaaacttttggagagttagctactagctgcctacgtgtgtgcatttgctatatagcatacttcttttttccagtttcaatctaactgtgaaagaacttctgatatttgtgttatccttatgattttaaataaacaaaataaatcaa

SEQ ID NO: 166402 - DNA, 522 bp, Homo sapiens
  Payload ID: 12764
  Gene Symbol: PF4V1
  Gene Name: platelet factor 4 variant 1
  Uniprot ID: P10720
  ENST ID: ENST00000226524
  CDS Start-End: 175-489
tcttagctcctgcaccacagttcctcgctgtccaccccaggcttccggactggaaggacagtgggacagtgacgggggataaaagaagcctggtgaggccaggagtcactgcctgcagaaccccagcccgactttccctgcgcactgggatcctgctggaacctcagctgcaacatgagctccgcagccaggtcccgcctcacccgcgccacccgccaggagatgctgttcttggcgttgctgctcctgccagttgtggtcgccttcgccagagctgaagctgaagaagatggggacctgcagtgcctgtgtgtgaagaccacctcccaggtccgtcccaggcacatcaccagcctggaggtgatcaaggccggaccccactgccccactgcccaactcatagccacgctgaagaatgggaggaaaatttgcttggatctgcaagccctgctgtacaagaaaatcattaaggaacatttggagagttagctactagctgcctaagtgtgcactttcaatcta

SEQ ID NO: 166403 - DNA, 852 bp, Homo sapiens
  Payload ID: 12765
  Gene Symbol: PECAM1
  Gene Name: platelet/endothelial cell adhesion molecule 1
  ENST ID: ENST00000564866
  CDS Start-End: 162-852
gaggagagtggctgcccaaggtggggtttgtcttttgccgtctgagtggcccctgggatgcagggcgggtttctcaacggtgacttgtgggcagtgccttctgctgagcgagtcatggcccgaaggcagaactaactgtgcctgcagtcttcactctcaggatgcagccgaggtgggcccaaggggccacgatgtggcttggagtcctgctgacccttctgctctgttcaagccttgagggtcaagaaaactctttcacaatcaacagtgttgacatgaagagcctgccggactggacggtgcaaaatgggaagaacctgaccctgcagtgcttcgcggatgtcagcaccacctctcacgtcaagcctcagcaccagatgctgttctataaggatgacgtgctgttttacaacatctcctccatgaagagcacagagagttattttattcctgaagtccggatctatgactcagggacatataaatgtactgtgattgtgaacaacaaagagaaaaccactgcagagtaccaggtgttggtggaaggagtgcccagtcccagggtgacactggacaagaaagaggccatccaaggtgggatcgtgagggtcaactgttctgtcccagaggaaaaggccccaatacacttcacaattgaaaaacttgaactaaatgaaaaaatggtcaagctgaaaagagagaagaattctcgagaccagaattttgtgatactggaattccccgttgaggaacaggaccgcgttttatccttccgatgtcaagctaggatcatttctgggatccatatgcagacctcagaatctaccaagagtgaactggtcaccgtgacgg

SEQ ID NO: 166404 - DNA, 579 bp, Homo sapiens
  Payload ID: 12765
  Gene Symbol: PECAM1
  Gene Name: platelet/endothelial cell adhesion molecule 1
  ENST ID: ENST00000563523
  CDS Start-End: 29-579
tactctgtttccacatcactttaactccatgagcatcgaagcttctggaatcaacatgtttcttatgtttcttgcaggttcaagccttgagggtcaagaaaactctttcacaatcaacagtgttgacatgaagagcctgccggactggacggtgcaaaatgggaagaacctgaccctgcagtgcttcgcggatgtcagcaccacctctcacgtcaagcctcagcaccagatgctgttctataaggatgacgtgctgttttacaacatctcctccatgaagagcacagagagttattttattcctgaagtccggatctatgactcagggacatataaatgtactgtgattgtgaacaacaaagagaaaaccactgcagagtaccaggtgttggtggaaggagtgcccagtcccagggtgacactggacaagaaagaggccatccaaggtgggatcgtgagggtcaactgttctgtcccagaggaaaaggccccaatacacttcacaattgaaaaacttgaactaaatgaaaaaatggtcaagctgaaaagagagaagaattctcgagaccagaattttgt

SEQ ID NO: 166405 - DNA, 580 bp, Homo sapiens
  Payload ID: 12765
  Gene Symbol: PECAM1
  Gene Name: platelet/endothelial cell adhesion molecule 1
  ENST ID: ENST00000569967
  CDS Start-End: 177-580
tttttctgtgcagttaacgagtcgctatgtttcggatctgcgttacttccccggtatttgaaggcaggagcactgcagggcgggtttctcaacggtgacttgtgggcagtgccttctgctgagcgagtcatggcccgaaggcagaactaactgtgcctgcagtcttcactctcaggatgcagccgaggtgggcccaaggggccacgatgtggcttggagtcctgctgacccttctgctctgttcaagccttgagggtcaagaaaactctttcacaatcaacagtgttgacatgaagagcctgccggactggacggtgcaaaatgggaagaacctgaccctgcagtgcttcgcggatgtcagcaccacctctcacgtcaagcctcagcaccagatgctgttctataaggatgacgtgctgttttacaacatctcctccatgaagagcacagagagttattttattcctgaagtccggatctatgactcagggacatataaatgtactgtgattgtgaacaacaaagagaaaaccactgcagagtaccaggtgttggtggaaggagtgcccagtcccagggt

SEQ ID NO: 166406 - DNA, 6831 bp, Homo sapiens
  Payload ID: 12765
  Gene Symbol: PECAM1
  Gene Name: platelet/endothelial cell adhesion molecule 1
  ENST ID: ENST00000563924
  CDS Start-End: 214-2430
ccaggccccattgttcccggtttccagccatggctgccattacctgaccagcgccacagccggtctctctgcaggcgccgggagaagtgaccagagcaatttctgcttttcacagggcgggtttctcaacggtgacttgtgggcagtgccttctgctgagcgagtcatggcccgaaggcagaactaactgtgcctgcagtcttcactctcaggatgcagccgaggtgggcccaaggggccacgatgtggcttggagtcctgctgacccttctgctctgttcaagccttgagggtcaagaaaactctttcacaatcaacagtgttgacatgaagagcctgccggactggacggtgcaaaatgggaagaacctgaccctgcagtgcttcgcggatgtcagcaccacctctcacgtcaagcctcagcaccagatgctgttctataaggatgacgtgctgttttacaacatctcctccatgaagagcacagagagttattttattcctgaagtccggatctatgactcagggacatataaatgtactgtgattgtgaacaacaaagagaaaaccactgcagagtaccaggtgttggtggaaggagtgcccagtcccagggtgacactggacaagaaagaggccatccaaggtgggatcgtgagggtcaactgttctgtcccagaggaaaaggccccaatacacttcacaattgaaaaacttgaactaaatgaaaaaatggtcaagctgaaaagagagaagaattctcgagaccagaattttgtgatactggaattccccgttgaggaacaggaccgcgttttatccttccgatgtcaagctaggatcatttctgggatccatatgcagacctcagaatctaccaagagtgaactggtcaccgtgacggaatccttctctacacccaagttccacatcagccccaccggaatgatcatggaaggagctcagctccacattaagtgcaccattcaagtgactcacctggcccaggagtttccagaaatcataattcagaaggacaaggcgattgtggcccacaacagacatggcaacaaggctgtgtactcagtcatggccatggtggagcacagtggcaactacacgtgcaaagtggagtccagccgcatatccaaggtcagcagcatcgtggtcaacataacagaactattttccaagcccgaactggaatcttccttcacacatctggaccaaggtgaaagactgaacctgtcctgctccatcccaggagcacctccagccaacttcaccatccagaaggaagatacgattgtgtcacagactcaagatttcaccaagatagcctcaaagtcggacagtgggacgtatatctgcactgcaggtattgacaaagtggtcaagaaaagcaacacagtccagatagtcgtatgtgaaatgctctcccagcccaggatttcttatgatgcccagtttgaggtcataaaaggacagaccatcgaagtccgttgcgaatcgatcagtggaactttgcctatttcttaccaacttttaaaaacaagtaaagttttggagaatagtaccaagaactcaaatgatcctgcggtattcaaagacaaccccactgaagacgtcgaataccagtgtgttgcagataattgccattcccatgccaaaatgttaagtgaggttctgagggtgaaggtgatagccccggtggatgaggtccagatttctatcctgtcaagtaaggtggtggagtctggagaggacattgtgctgcaatgtgctgtgaatgaaggatctggtcccatcacctataagttttacagagaaaaagagggcaaacccttctatcaaatgacctcaaatgccacccaggcattttggaccaagcagaaggctagcaaggaacaggagggagagtattactgcacagccttcaacagagccaaccacgcctccagtgtccccagaagcaaaatactgacagtcagagtcattcttgccccatggaagaaaggacttattgcagtggttatcatcggagtgatcattgctctcttgatcattgcggccaaatgttattttctgaggaaagccaaggccaagcagatgccagtggaaatgtccaggccagcagtaccacttctgaactccaacaacgagaaaatgtcagatcccaatatggaagctaacagtcattacggtcacaatgacgatgtcagaaaccatgcaatgaaaccaataaatgataataaagagcctctgaactcagacgtgcagtacacggaagttcaagtgtcctcagctgagtctcacaaagatctaggaaagaaggacacagagacagtgtacagtgaagtccggaaagctgtccctgatgccgtggaaagcagatactctagaacggaaggctcccttgatggaacttagacagcaaggccagatgcacatccctggaaggacatccatgttccgagaagaacagataatccctgtatttcaagacctctgtgcacttatttatgaacctgccctgctcccacagaacacagcaattcctcaggctaagctgccggttcttaaatccatcctgctaagttaatgttgggtagaaagagatacagaggggctgttgaatttcccacataccctccttccaccaagttggaacatccttggaaattggaagagcacaagaggagatccagggcaaggccattgggatattctgaaacttgaatattttgttttgtgcagagataaagaccttttccatgcaccctcatacacagaaaccaattttcttttttatactcaatcatttctagcgcatggcctggttagaggctggttttttctcttttcctttggtccttcaaaggcttgtagttttggctagtccttgttctttggaaatacacagtgctgaccagacagcctccccctgtcccctctatgacctcgccctccacaaatgggaaaaccagactacttgggagcaccgcctgtgaaataccaacctgaagacaccgttcattcaggcaacgcacaaaacagaaaatgaaggtggaacaagcacagatgttcttcaactgtttttgtctacactctttctcttttcctctaccatgctgaaggctgaaagacaggaagatggtgccatcagcaaatattattcttaattgaaaacttgaaatgtgtatgtttcttactaatttttaaaaatgtattccttgccagggcaggcaaggtggctcacgcctgtaatcccagcacttcaggaggctgaggtgggcggatcacctgaggtcaggagtttgagaccagcctgatgaaaccctgtctctactaaaaatacaagaattagccgggcgtggtggcgcatgcctgtagtatcagctactcaagaggctgaggtgagattatcgcttgaacccaggaaacggaggttgtagtgagcggagatcgcgccactgcactccagcctgagtgacagagtgagaatccatctcaaaaaaaacaaaaaacaaaattgcttgctaaagaagtggtctcctgaggtcttaagacattcctgacagtgtcttgagtgggtgggagagaggctgctgtcattgcgctgtggaatttcacagatgagaaccacgcctagccaaaatcacttttcctgtttgcctcagtgacacagctgcagggaccctcgtggatgttgtattaaataaatttgacctttgctctttgcagatctgtgaaatgttgtcttctgaggggccacatgcatctatagtgctgaggactccttgggcctctgaagtcacagagagaaccgagcaggtctatgtttttgttttgttgttttgagacggagattcgctcttgttgcccgggctggactgcagcggcgcaacctctgctcactgcaacctccgcctcctgggttcaagcagttctcctgtctcagcctcccgagtagctgggattacaggcacatgtcaccacgcctggctaatttttgtatttttagtagagatggggtttcaccacgttggccaggctgatctcgaatgcctgacctttggtgatctgcccgccttgtcctcatgtgtgctccacaggcctttgggttgggattgcaggcgtgagccaccatgcccagcctagactcttttgacaatatgatgaaagctgttggttcctttccccaacacacacacaccgagttgtatcacgaaaatgtcatacaatttccaggttttctgagtggtgggctcagattgaggtcaaaggatcagacgacctctaacgaccttcatgtctctgttgatgatctggggacagccagatcccctgtgtccagggagttccttagtcccttgccaccaccagagaagggcaattgccacgggagctgcaaagaccctattcctactcctggtgccttacttatgcagcacgactgaattttttgttttgttttgttttgttgagacaggggcttgctctgttgcccaggctggagtgcagtggcacaacaatggctcaccgcagcctcgaacccctgggctcaagcgatcctcccatctcagcttcctgggtagctgggaccagaggcgtgagccgccatagctggctaatttttaattttttttttgcagagatgaggtttcaccatggtgcccaggctggtctcgaacttctgggctcaagtgatcctccctccttggcctcgcaaagtgctgggattgcaggcatgagccaccgcccccggcctgtggagcacacatgagtttaaaattactttcccttctgcctatatttccgaggaggaaacttcatgcgcagggatctttcttagtggatttaatggctaaaaggtctgtctgaatccaggacgctggctttagccttcctcggcagctgccgtaaccccggtgtctaaacctgaagcatcccaggagcacccactccaggagttttctcggccgcggaactcattagttagagcgccctcttgtgttctcatgtggtaatcggtcactgaaggacttaaaatggtccttagccaacacacagtaaaacttttccctcttctgaccccaagaggtcagccacccatttcatgagcatatactggtcgccccatcagcgttctctgattggctaactgaacccactccccgacctagactcaagacaggcgaagtgacgcttaggtcaacattcactcactaaagcaacgactgtcgggcgattttgtctcccgctggttttggaatggtgtctggagacatttttggttgtcacagctgggtgggtgtgctcccggcatctggtgggtagaaaccaagcatgctcctaaacatcctacaggcacagaaccgtctcccacgaccaagcatgatcaagtcccaaatgccaataatggccaggttgagaaactctgcacagaagcatccagttatttgtctgtttgctcaacaagcttgtgctcatcatgctctgtgttcctgacgctgtgctgggtgttggcggtgggaagattacaagagtcacatggcagctgtcctcctggaaggtacaacccagtagagatgcagactaacagagagccaattacaaagcagtgtgacaagcgtcatggtggaaaattaaaagctcaaacaagggcacatgggaggggcttccaacacagactttgggggatccaggaaggtctaagaggaaagtgggtctcaccaaagccttgaccataggcagagggtaccagtggaaaaggtggggtgaagaacattgaggacaaaaggaagaagtgcaggaaggccctgaggcaagggagtggggggtgccctggagggatggcagcagggcagtctgtcagacccaagtggcctccagccctagaagccaattagtcctcctcaaaaagctgtcactgtcccctaagaattgctgccaggctcccactggcctgactcagtctttgagagtcttaaggaggaggtctctgaaaggtacacaccaagaactctccccagcacagctgtttttaagactctccaccagcgtcattggcgtgttgggaagaaaccctctgccacagaggccagcttcagcctttgcctaacaccgcaagggcaaatggaaaggtaaacgggaaggagatgtctccccagcaggctatttgaggacagtcttccctgcagaagatctcaacctggggtccacagagtggaaatgttagagtagggagctaggcaaacatgagcaggacaggtgagggcccccacaggaatgtcaggctaccatcaggtgatggtcaggtggttgttaaactgtctctgtaaaataataattggttgcagccagctccaagcaaggacagtctctcaatagatacaaaacaccctgatctggtgatcagccgcttcccgataagatctcaggagctgggcaagcagcctggagcatgcgcaccaagaggcaaaatggcggaatttaaccagtatatgacctaccttcctctgggaacgcacgactggtaaggggaaaaatgcctcaagtgagcatgcgcgcaacttcagtaatcacactgtgcatgcgaccccttccaagtgctggcaggtcaccacatacgcggacagcctgctgcaagggaagaatcaggggagatgagacgtaaatcccagaactatgccaaatacataaaaccccaagttaagggtcaggcagggcacttagatctctcaagttgcctgcctgacccaagtgtagtgtacttccttttgttcctgctctaaaactttttaataaactctcactcctgctctaaaa

SEQ ID NO: 166407 - DNA, 821 bp, Homo sapiens
  Payload ID: 12766
  Gene Symbol: PAFAH1B2
  Gene Name: platelet-activating factor acetylhydrolase 1b, catalytic subunit 2 (30kDa)
  ENST ID: ENST00000304808
  CDS Start-End: 1-528
gctgctgctggtgctggggccggaggagggacgcgccggagcgggaccgacgggaccgagcgagcgaccgacgcgccacccgccgacgcctcagccgcttggggcccgcacggaccctctacttcagtcattgttgtctgggtaggaacaaataaccacgaaaatacagcagaagaagtagcaggtgggatcgaggccattgtacaacttatcaacacaaggcagccacaggccaaaatcattgtattgggtttgttacctcgaggtgagaaacccaatcctttgaggcaaaagaacgccaaggtgaaccaactcctcaaggtttcgctgccgaagcttgccaacgtgcagctcctggataccgacgggggttttgtgcactcggacggtgccatctcctgccacgacatgtttgattttctgcatctgacaggagggggctatgcaaagatctgcaaacccctgcatgaactgatcatgcagttgttggaggaaacacctgaggagaaacaaaccaccattgcctgactggctcttatcagtgttaatagcatctcagcttcctcagatcagttctatcactggcactacagaatccttctctttcttaaggcactttgcattgtagaatgttcctggatgttcatatctagtgtttgaaggggaggagggatttaaactggtcctgtacatagaaggtttgtttgacagaggagaaaaattagccaaggaagattgttgtttaaattcatttgaaaccagaaggggactttttagttgtatgtgtaacacattcattgaattattatcactgttttctt

SEQ ID NO: 166408 - DNA, 2517 bp, Homo sapiens
  Payload ID: 12766
  Gene Symbol: PAFAH1B2
  Gene Name: platelet-activating factor acetylhydrolase 1b, catalytic subunit 2 (30kDa)
  Uniprot ID: P68402
  ENST ID: ENST00000419197
  CDS Start-End: 143-541
agtggaggagctgctgctggtgctggggccggaggagggacgcgccggagcgggaccgacgggaccgagcgagcgaccgacgcgccacccgccgacgcctcagccgcttggggcccgcacggaccctctacttcagtgtagaatgagccaaggagactcaaacccagcagctattccgcatgcagcagaagatattcaaggagatgaccgatggatgtctcagcacaacagatttgttttggactgtaaagacaaagagcctgatgtactgttcgtgggagactccatggtgcagttaatgcagcaatatgagatatggcgagagcttttttccccacttcatgcactgaattttggaattgggggagatacaacaagacatgttttgtggagactaaagaatggagaactggagaatattaagcctaaggtcattgttgtctgggtaggaacaaataaccacgaaaatacagcagaagaagtagcaggtgggatcgaggccattgtacaacttatcaacacaaggcagccacaggcgtgagtcaccgcaccaggccatcttcaggtcattttaacaatacccctgagccacctgaagcttcctccctgtcctctcaccccaaacttcataaatcccctgtgacttaaaatggagctggactcatgggtccagcaagctcctcagctgtgtgttgaatggtcccatttctttggtccattcaacactcaggctcaggaagggtggtccacagggaaatataagtcaaataagccttatggccccaccctgaccgcttgagggccacggttagggttgagctctttgtatattatgccagggaatgcggtagctggacctgtgcacaaggccaggatcacatccctgaggccccgacatctcccctgtgtgctcacaagtctggctttgagacacaccactgcctttttttgctgactgctgcagccaacaaaaaggcattctctcccagtggacagacctcagaaaggacctattcataagtgcggggtagggcagagggactgaggaaagttctgcagacctgggaacagcaagaaaatgtgcagttgctgccctcccactctgtagacgcagggtcctgacgattcaaaagttaagtcttgagaccttgcaaaagggaaggatcccttcagagtttgcttggatggatttctctccagatattgccagcggaaagggagcaaacagaaatagtgatagtccacagttgtttggttccagagcagtggttctcaaacttcattgtgcatagcaagcttctggagtgccccgttaaattgcagttttctgggctccacctcccaagatgaattaagtgtgaagtaggactctggatgtgcgtttaaaacaggcgtagggtcacatcttgccccaaagttatgaggccaacttagagtagtggtgcttgcctgtaatccagctactcgagaggctgtggcagatcgcttgaagccaggagttcaagaccagcctgggcaatgtatcacgagtgtttcttaatgtttcagattatttactggcaagatgagcaggattaccatgaaagaaaagtccagatggactgaggaaatcctacactgattctccaaacttggcagctgactgcatggagggctcatgatgaagaaacctcttttgccatcctgaggattctctgattcatattcgcctagatgtgctggaaacagtactggaccaaggtgcaaacttgagtctagtgaggtactaatgggctgaagtttttctgagcgtcactttcctcatctgtataatgaggggttggccaaggaaacccataaggttatcttccagctgactttctaattggtgaaccctttggaaaaggggtgcagcttgcttctggtcttcatcctcaagtatgctgtgcttggacaggggccaaaactaattcctccactcaccatttgcccagcataactacaacagtacctggcacatcgtggatgcttattaaatatttattgcaggaatgagtaaatataactaactgatcataaggtaaaatagtcttcattggaacaaggctccagatagttgggcagggctgggagctgagactgctgcaatcctgccagctgagagaactctgacaaggcactgatctgggtggctttattaggatgtctgacagcttcagaggtggccacatttcttttcctttaaacatgtctaatttggccgggcgcagtggctcacgcctgtaatcccaacactttgggaagcctaggtgggtggatcactcgaggtcaggagttcgagatcagcctgaccaatatggtgaaaccccgctttactaaaaatacaagaaattagcagggtgtggtggcgggtgcctgtagtcccagctacttgggaggctgaggcaggagcatcgcctgaactcaggaggcggagattgcagtgagctgagatcacaccactgtactccagcatgggtgacagtgagactccatctc

SEQ ID NO: 166409 - DNA, 850 bp, Homo sapiens
  Payload ID: 12766
  Gene Symbol: PAFAH1B2
  Gene Name: platelet-activating factor acetylhydrolase 1b, catalytic subunit 2 (30kDa)
  Uniprot ID: P68402
  ENST ID: ENST00000530272
  CDS Start-End: 83-691
gggaccgagcgagcgaccgacgcgccacccgccgacgcctcagccgcttggggcccgcacggaccctctacttcagtgtagaatgagccaaggagactcaaacccagcagctattccgcatgcagcagaagatattcaaggagatgaccgatggatgtctcagcacaacagatttgttttggactgtaaagacaaagagcctgatgtactgttcgtgggagactccatggtgcagttaatgcagcaatatgagatatggcgagagcttttttccccacttcatgcactgaattttggaattgggggagatacaacaagacatgttttgtggagactaaagaatggagaactggagaatattaagcctaaggtcattgttgtctgggtaggaacaaataaccacgaaaatacagcagaagaagtagcaggtgggatcgaggccattgtacaacttatcaacacaaggcagccacaggccaaaatcattgtattgggtaaagcagccgcctccaaatactctatctcagagatagtgagactagaacaagggtcggttaactggtcgatcgggacctatcctgatgacacaccagcaactaccaggccagcaatattacaattatttactggcaagatgagcaggattaccatgaaagaaaagtccagatggactgaggaaatcctacactgattctccaaacttggcagctgactgcatggagggctcatgatgaagaaacctcttttgccatcctgaggattctctgattcatattcgcctagatgtgctggaaacagtactggaccaaggtgcaaacttgagtctagtgaggtactaatgggctgaagt

SEQ ID NO: 166410 - DNA, 1056 bp, Homo sapiens
  Payload ID: 12766
  Gene Symbol: PAFAH1B2
  Gene Name: platelet-activating factor acetylhydrolase 1b, catalytic subunit 2 (30kDa)
  Uniprot ID: P68402
  ENST ID: ENST00000529887
  CDS Start-End: 129-596
tgctggtgctggggccggaggagggacgcgccggagcgggaccgacgggaccgagcgagcgaccgacgcgccacccgccgacgcctcagccgcttggggcccgcacggaccctctacttcagtgtagaatgagccaaggagactcaaacccagcagctattccgcatgcagcagaagatattcaaggagatgaccgatggatgtctcagcacaacagatttgttttggactgtaaagacaaagagcctgatgtactgttcgtgggagactccatggtgcagttaatgcagcaatatgagatatggcgagagcttttttccccacttcatgcactgaattttggaattgggggagatacaacaagacatgttttgtggagactaaagaatggagaactggagaatattaagcctaaggtcattgttgtctgggtaggaacaaataaccacgaaaatacagcagaagaagtagcaggtgggatcgaggccattgtacaacttatcaacacaaggcagccacaggccaaaatcattgtattgattatttactggcaagatgagcaggattaccatgaaagaaaagtccagatggactgaggaaatcctacactgattctccaaacttggcagctgactgcatggagggctcatgatgaagaaacctcttttgccatcctgaggattctctgattcatattcgcctagatgtgctggaaacagtactggaccaaggtgcaaacttgagtctagtgaggtactaatgggctgaagtttttctgagcgtcactttcctcatctgtataatgaggggttggccaaggaaacccataaggttatcttccagctgactttctaattggtgaaccctttggaaaaggggtgcagcttgcttctggtcttcatcctcaagtatgctgtgcttggacaggggccaaaactaattcctccactcaccatttgcccagcataactacaacagtacctggcacatcgtggatgcttattaaatatttattgcaggaatgagtaaatataactaactgatcataaggtaaaa

SEQ ID NO: 166411 - DNA, 4198 bp, Homo sapiens
  Payload ID: 12766
  Gene Symbol: PAFAH1B2
  Gene Name: platelet-activating factor acetylhydrolase 1b, catalytic subunit 2 (30kDa)
  Uniprot ID: P68402
  ENST ID: ENST00000527958
  CDS Start-End: 160-849
gtggcaggggaaccggaagtggaggagctgctgctggtgctggggccggaggagggacgcgccggagcgggaccgacgggaccgagcgagcgaccgacgcgccacccgccgacgcctcagccgcttggggcccgcacggaccctctacttcagtgtagaatgagccaaggagactcaaacccagcagctattccgcatgcagcagaagatattcaaggagatgaccgatggatgtctcagcacaacagatttgttttggactgtaaagacaaagagcctgatgtactgttcgtgggagactccatggtgcagttaatgcagcaatatgagatatggcgagagcttttttccccacttcatgcactgaattttggaattgggggagatacaacaagacatgttttgtggagactaaagaatggagaactggagaatattaagcctaaggtcattgttgtctgggtaggaacaaataaccacgaaaatacagcagaagaagtagcaggtgggatcgaggccattgtacaacttatcaacacaaggcagccacaggccaaaatcattgtattgggtttgttacctcgaggtgagaaacccaatcctttgaggcaaaagaacgccaaggtgaaccaactcctcaaggtttcgctgccgaagcttgccaacgtgcagctcctggataccgacgggggttttgtgcactcggacggtgccatctcctgccacgacatgtttgattttctgcatctgacaggagggggctatgcaaagatctgcaaacccctgcatgaactgatcatgcagttgttggaggaaacacctgaggagaaacaaaccaccattgcctgactggctcttatcagtgttaatagcatctcagcttcctcagatcagttctatcactggcactacagaatccttctctttcttaaggcactttgcattgtagaatgttcctggatgttcatatctagtgtttgaaggggaggagggatttaaactggtcctgtacatagaaggtttgtttgacagaggagaaaaattagccaaggaagattgttgtttaaattcatttgaaaccagaaggggactttttagttgtatgtgtaacacattcattgaattattatcactgttttcttgggacaacatcaagcctaaatactgaacaatatgaagattcttttcttggcctttctgtggattatgtcatatataataattatcagaatcattctacttggctttaaaacatgttttctccaatttttttaaggttcataatttagccttttgtttttatgttgcttagattcttatgtatactgaatattttattaacatgtagcatcaggttgaacatgcttgtcattgatatatggaagatgctatagttagaagtgaatttgttctgctttcttaatcttttccatgcttagcagtgaaaaacaggttttgccccagtagagggattctttggagggtattattttttatgctgctgaatatcatgtctataatagacccgtgcatgcagcctttcctccttattccccttcatgcccccctttccccttcattccccccgccaccccgtttttttttttttttttttttttttggttcttgttgacattacaagcttttaacacatttttgacctaggagccctgttgctggaagtatagtctccagccagttactctcatgatagtactgctataaaactcattcttgtgtggtgttctgtgctatagattctgtgtattgctgttcatattcggagttctggttttgtttttcccttaaaacctgttaacagttttttttgggggtggggggattcagaactcttgtttcccattccatagcacctgacattatttcaagttttataatatcttaaggtgtatattttattttttttattggcttagttgttttttgttttgttttgtttgagatggagtttcactgttgcccaggctggggtgcaatggtgtgatcttggctcactgcagcctccacctcccgagttcaaatgattctcctgcctcagcttcctgagtagctgggattacaggtgcatgccaccatgcccggctaatttttatatttttattagagacgggatttcgccatgttaaccaggctggtctcgaactcctgacctcaggtgatctgcccgccttggcctcccaaagtgctgggattacaggcatgagccaccgtgcctggccttattggcttagtttttaaattatcctccaaaaattttgggcctttttctgtggggaaacaagtgaagctgctcttcagcatagacactacctttatcccatcattttagtaaaaactaggtttgtttcacttctgaggtgtcttattaatgtacttcatctgagaatttgttgatcttaatgttcgagctatataagaactgccattaaaaaaaatgggataatagatgattttatcagtatacctgtggaatatgtacaaactggatctatagatattttgaactggaccaggtgggtattgaagtaacccatcaaaatatgctctgcagtgattccgcttaatgtttaaattcagtaacgtacttgaaaggcaaatttcagtgcttttgtatgttggaggagggcttactgatgcgtgctaagaccgatttctgattgagggatgaaccttgggctcatttttttcttgtgaagtctctttctagaaaattttttggttttgttctttttaaaaaatacatacttttttgaatgtatcatgtcttcattaacaacagaaaatccacatggtgtttactaaacttgtttacgacattaaaaatttcctttttatttttagtagcccaggttgagtttttcacaagagatttttttcttagctgaggtatagttgtatagcaagaagaattaagccagatttttgtgtgtggaaagacagttttctatccacgtctttttctgtttgtcagaaggtgggagtatggtccaaataaatccattaggttactcctgcagcatgcgcttttagcttctctcttgactgaggatcaaatatccctttgtgagctggccctcagctcctttgctcatgtgtacaaacctcagatgttactacattttatatctaccagagctattcaagcaatagtatttgaaccactagccttttaaataaaattctgccccattactgatgtgcagatattgagttcactttcattttttgccagatttctttgcactactttaggtaaaaatagttaatctatttttctttgacatcctagtttgcgtcagtgacagaacttactgcttagtctttgtactttttaaaaaatctataaatttaatgcactgtccaagtgaaatgtcctagttgtcattgtgattaaggggccaactttccaggcagctagcagagatactattctcttcctctcccagcaaatttgtattccttcgcccacgcattcctgctatactagatggcagccagtgatggaactataaagatgtctgtggtcatatgttgaatgtggcagcttgaagatgtactgccacgggtgatctagggcaggctgtcttccagtccatgtgttctcggtcgccgtagacagcgctctggctaccaccgtgaggctacttgaactgtcaggggcatctgcctaaaccagaatcttttgtcagaaaccttaacccaacaaaacaaatcttgagtagctcatgcccggctcttaggaattttgtctgtttaaaaaaaaaaaaaaaaaaaaagtccaacttactttattttatttttttaacctagtcactgtttacaattgtatgctaaagcctgaaatattgtctgtgctgtggtgtatgagcattgccaactttatatttattgcagtgaagaagaaactaaaaatatatggaaatgaggagcatgtccaagctcctaaatccgtgtgggtgcatgtgggagaagtgagttagggcctcttgaaaggaggctttttggagaggggtcccccaggtttcttggtgttcctgcttggggatcactgctgctagctgactggacctccccattggaagtttgtgattttgctttggcaaagtttcattgactagtagaactcattctgttttagtgtatatttcaatataaatgtaaacattttgctcaattt

SEQ ID NO: 166412 - DNA, 1003 bp, Homo sapiens
  Payload ID: 12767
  Gene Symbol: PAFAH1B3
  Gene Name: platelet-activating factor acetylhydrolase 1b, catalytic subunit 3 (29kDa)
  Uniprot ID: Q15102
  ENST ID: ENST00000262890
  CDS Start-End: 263-958
cgggaagcgccgggcgagcccactgtgcggccgtcgtgggggaagcgaaggttcctgattccacctacctcctaagtgaaggcttccgtccctggagaggaggcggcgccctgtatcggccttcgtcctccgcgggtgtgctagcgttgggacggtcctttgttgccgcgaggggtaggagtgggcgtggcggagccagctccgttcggaacactcccgggccgacccgactcgctcatcctgcaggagctgcggcgccaagatgagtggagaggagaacccagccagcaagcccacgccggtgcaggacgtacagggcgacgggcgctggatgtccctgcaccatcggttcgtggctgacagcaaagataaggaacccgaagtcgtcttcatcggggactccttggtccagctcatgcaccagtgcgagatctggcgcgagctcttctctcctctgcatgcacttaactttggcattggtggtgacggcacacagcatgtactgtggcggctggagaatggggagctggaacacatccggcccaagattgtggtggtctgggtgggcaccaacaaccacggacacacagcagagcaggtgactggtggcatcaaggccattgtgcaactggtgaatgagcgacagccccaggcccgggttgtggtgctgggcctgcttccgcgaggccaacatcccaacccacttcgggagaagaaccgacaggtgaacgagctggtacgggcggcactggctggccaccctcgggcccacttcctagatgccgaccctggctttgtgcactcagatggcaccatcagccatcatgacatgtatgattacctgcatctgagccgcctgggctacacacctgtttgccgggctctgcactccctgcttctgcgtctgctggcccaagaccagggccaaggtgctcccctgctggagcccgcaccctaagcatcctgctgccttcccacaacattaaactctccttcctcagtg

SEQ ID NO: 166413 - DNA, 1098 bp, Homo sapiens
  Payload ID: 12767
  Gene Symbol: PAFAH1B3
  Gene Name: platelet-activating factor acetylhydrolase 1b, catalytic subunit 3 (29kDa)
  Uniprot ID: Q15102
  ENST ID: ENST00000538771
  CDS Start-End: 358-1053
tcactctgtacagcaaatggtttcttcccatttgctagacagagggctagattttccccgcccactctcgactcttcaggtagttcgcccctccccgtgaccggtgggtggtttctccctcctccccgcctcgggagctggatggtctcgcctctccctccccccaccccgtgccgggtgcgcggcctgggagtcagcggcccgagcgggaagcgccgggcgagcccactgtgcggccgtcgtgggggaagcgaaggttcctgattccacctacctcctaagtgaaggcttccgtccctggagaggaggcggcgccctgtatcggccttcgtcctccgcgggagctgcggcgccaagatgagtggagaggagaacccagccagcaagcccacgccggtgcaggacgtacagggcgacgggcgctggatgtccctgcaccatcggttcgtggctgacagcaaagataaggaacccgaagtcgtcttcatcggggactccttggtccagctcatgcaccagtgcgagatctggcgcgagctcttctctcctctgcatgcacttaactttggcattggtggtgacggcacacagcatgtactgtggcggctggagaatggggagctggaacacatccggcccaagattgtggtggtctgggtgggcaccaacaaccacggacacacagcagagcaggtgactggtggcatcaaggccattgtgcaactggtgaatgagcgacagccccaggcccgggttgtggtgctgggcctgcttccgcgaggccaacatcccaacccacttcgggagaagaaccgacaggtgaacgagctggtacgggcggcactggctggccaccctcgggcccacttcctagatgccgaccctggctttgtgcactcagatggcaccatcagccatcatgacatgtatgattacctgcatctgagccgcctgggctacacacctgtttgccgggctctgcactccctgcttctgcgtctgctggcccaagaccagggccaaggtgctcccctgctggagcccgcaccctaagcatcctgctgccttcccacaacattaaactctccttcctcagtg

SEQ ID NO: 166414 - DNA, 380 bp, Homo sapiens
  Payload ID: 12767
  Gene Symbol: PAFAH1B3
  Gene Name: platelet-activating factor acetylhydrolase 1b, catalytic subunit 3 (29kDa)
  ENST ID: ENST00000599778
  CDS Start-End: 96-380
gaacatgaccaggacgtttagcagggagtgagccccccacctggtcccagagaagagggagatctgagaagacactgaggagctgcggcgccaagatgagtggagaggagaacccagccagcaagcccacgccggtgcaggacgtacagggcgacgggcgctggatgtccctgcaccatcggttcgtggctgacagcaaagataaggaacccgaagtcgtcttcatcggggactccttggtccagctcatgcaccagtgcgagatctggcgcgagctcttctctcctctgcatgcacttaactttggcattggtggtgacggcacacagcatgtactgtggcggctggagaatggggagctggaacacatccggcccaag

SEQ ID NO: 166415 - DNA, 465 bp, Homo sapiens
  Payload ID: 12767
  Gene Symbol: PAFAH1B3
  Gene Name: platelet-activating factor acetylhydrolase 1b, catalytic subunit 3 (29kDa)
  ENST ID: ENST00000596265
  CDS Start-End: 47-465
gattttccccgcccactctcgactcttcaggagctgcggcgccaagatgagtggagaggagaacccagccagcaagcccacgccggtgcaggacgtacagggcgacgggcgctggatgtccctgcaccatcggttcgtggctgacagcaaagataaggaacccgaagtcgtcttcatcggggactccttggtccagctcatgcaccagtgcgagatctggcgcgagctcttctctcctctgcatgcacttaactttggcattggtggtgacggcacacagcatgtactgtggcggctggagaatggggagctggaacacatccggcccaagattgtggtggtctgggtgggcaccaacaaccacggacacacagcagagcaggtgactggtggcatcaaggccattgtgcaactgggcctgcttccgcgaggccaacatcccaacccacttcgggagaagaaccg

SEQ ID NO: 166416 - DNA, 649 bp, Homo sapiens
  Payload ID: 12767
  Gene Symbol: PAFAH1B3
  Gene Name: platelet-activating factor acetylhydrolase 1b, catalytic subunit 3 (29kDa)
  ENST ID: ENST00000594989
  CDS Start-End: 1-607
cccagccagcaagcccacgccggtgcaggacgtacagggcgacgggcgctggatgtccctgcaccatcggttcgtggctgacagcaaagataaggaacccgaagtcgtcttcatcggggactccttggtccagctcatgcaccagtgcgagatctggcgcgagctcttctctcctctgcatgcacttaactttggcattggtggtgacggcacacagcatgtactgtggcggctggagaatggggagctggaacacatccggcccaagattgtggtggtctgggtgggcaccaacaaccacggacacacagcagagcagggcctgcttccgcgaggccaacatcccaacccacttcgggagaagaaccgacaggtgaacgagctggtacgggcggcactggctggccaccctcgggcccacttcctagatgccgaccctggctttgtgcactcagatggcaccatcagccatcatgacatgtatgattacctgcatctgagccgcctgggctacacacctgtttgccgggctctgcactccctgcttctgcgtctgctggcccaagaccagggccaaggtgctcccctgctggagcccgcaccctaagcatcctgctgccttcccacaacattaaactctccttcctca

SEQ ID NO: 166417 - DNA, 646 bp, Homo sapiens
  Payload ID: 12767
  Gene Symbol: PAFAH1B3
  Gene Name: platelet-activating factor acetylhydrolase 1b, catalytic subunit 3 (29kDa)
  ENST ID: ENST00000601865
  CDS Start-End: 358-646
tcactctgtacagcaaatggtttcttcccatttgctagacagagggctagattttccccgcccactctcgactcttcaggtagttcgcccctccccgtgaccggtgggtggtttctccctcctccccgcctcgggagctggatggtctcgcctctccctccccccaccccgtgccgggtgcgcggcctgggagtcagcggcccgagcgggaagcgccgggcgagcccactgtgcggccgtcgtgggggaagcgaaggttcctgattccacctacctcctaagtgaaggcttccgtccctggagaggaggcggcgccctgtatcggccttcgtcctccgcgggagctgcggcgccaagatgagtggagaggagaacccagccagcaagcccacgccggtgcaggacgtacagggcgacgggcgctggatgtccctgcaccatcggttcgtggctgacagcaaagataaggaacccgaagtcgtcttcatcggggactccttggtccagctcatgcaccagtgcgagatctggcgcgagctcttctctcctctgcatgcacttaactttggcattggtggtgacggcacacagcatgtactgtggcggctggagaatggggagctggaacacatccggcccaagattg

SEQ ID NO: 166418 - DNA, 582 bp, Homo sapiens
  Payload ID: 12767
  Gene Symbol: PAFAH1B3
  Gene Name: platelet-activating factor acetylhydrolase 1b, catalytic subunit 3 (29kDa)
  ENST ID: ENST00000595530
  CDS Start-End: 89-582
gtacagcaaatggtttcttcccatttgctagacagagggctagattttccccgcccactctcgactcttcaggagctgcggcgccaagatgagtggagaggagaacccagccagcaagcccacgccggtgcaggacgtacagggcgacgggcgctggatgtccctgcaccatcggttcgtggctgacagcaaagataaggaacccgaagtcgtcttcatcggggactccttggtccagctcatgcaccagtgcgagatctggcgcgagctcttctctcctctgcatgcacttaactttggcattggtggtgacggcacacagcatgtactgtggcggctggagaatggggagctggaacacatccggcccaagattgtggtggtctgggtgggcaccaacaaccacggacacacagcagagcaggtgactggtggcatcaaggccattgtgcaactggtgaatgagcgacagccccaggcccgggttgtggtgctgggcctgcttccgcgaggccaacatcccaacccacttcgggagaagaaccgacaggtgaacgagctggtacgggcggcactggctgg

SEQ ID NO: 166419 - DNA, 5497 bp, Homo sapiens
  Payload ID: 12768
  Gene Symbol: PAFAH1B1
  Gene Name: platelet-activating factor acetylhydrolase 1b, regulatory subunit 1 (45kDa)
  Uniprot ID: P43034
  ENST ID: ENST00000397195
  CDS Start-End: 452-1684
gcgagaaggagaaggaggggagcgctcgggcgcgagcgagagaaaccgcgagcgccgagcttggactcgagccccggaacggctgaggagcccgcccgctcccctcccctccccctccccgggcccgggcccagcgcgccatcctcccccctccttccctccctccctccttcctccctcccctctccctccccctcccccgccggtggatgggagtgaaggacggaagaggccctgcggaggcggcggtgcagcgctccggtggaatgaatcttacttgttgaatatcttctggttactagttggattcatttgtgaaagaatcattttcccctgtgtggaagacacttagtggcatatttaaattataagtccacggatcaaaaagctttttgatttcccaaaggagggacataccactatatcagataagcttgacattacagccaagatggtgctgtcccagagacaacgagatgaactaaatcgagctatagcagattatcttcgttcaaatggctatgaagaggcatattcagtttttaaaaaggaagctgaattagatgtgaatgaagaattagataaaaagtatgctggtcttttggaaaaaaaatggacatctgttattagattacaaaagaaggttatggaattagaatcaaagctaaatgaagcaaaagaagaatttacgtcaggtggacctcttggtcagaaacgagacccaaaagaatggattccccgtccgccagaaaaatatgcattgagtggtcacaggagtccagtcactcgagtcattttccatcctgtgttcagtgttatggtctctgcttcagaggatgctacaattaaggtgtgggattatgagactggagattttgaacgaactcttaaaggacatacagactctgtacaggacatttcattcgaccacagcggcaagcttctggcttcctgttctgcagatatgaccattaaactatgggattttcagggctttgaatgcatcagaaccatgcacggccatgaccacaatgtttcttcagtagccatcatgcccaatggagatcatatagtgtctgcctcaagggataaaactataaaaatgtgggaagtgcaaactggctactgtgtgaagacattcacaggacacagagaatgggtacgtatggtacggccaaatcaagatggcactctgatagccagctgttccaatgaccagactgtgcgtgtatgggtcgtagcaacaaaggaatgcaaggctgagctccgagagcatgagcatgtggtagaatgcatttcctgggctccagaaagctcatattcctccatctctgaagcaacaggatctgagactaaaaaaagtggtaaacctgggccattcttgctgtctggatccagagacaagactattaagatgtgggatgtcagtactggcatgtgccttatgaccctcgtgggtcatgataactgggtacgtggagttctgttccattctggggggaagtttattttgagttgtgctgatgacaagaccctacgcgtatgggattacaagaacaagcgatgcatgaagaccctcaatgcgcatgaacactttgttacctccttggatttccacaagacggcaccctatgtcgtcactggcagcgtagatcaaacagtaaaagtgtgggagtgccgttgattgtgtctccttcggcccctcctccctcttttcctctggatgcactctgatgataccatggttaccccattgagctctgtttaaataaatattgtcctttcatgtaaattattctggatgtagattgagcttattaaatgttacacacaaagtattcatgcatggtgaatccaaattgtatactgtaaatttacatacgttgtctagaagtaccatagggtttaaaaacctgggctggcattggtcacaccaggcctaagaaggcagaagttgaatcaattgaactagggcactaaactgaatagttgacagtgtcattttatgttggattattaattcctgtttttctttctgctatctgttggtgcctgacttgatggcctcatttggggaaaagtggtggttattagggctttttctgaaatgtgtatctatgtaacatcacttaagtgtgcttaataaatcttctgtaaggattttagatgataaggctacaattcagaatcttctgaaccatctatgtaatgaatggggattatacattggaatttttgtcatgacacatttgccaaatcagtaggatatatttgttttggcagcctatcacgcagaggctagtggtatatttatgtaagaaaatgactgtaaatctcaagaaaaatctcagcagctaatagcaactcatttatttcattttggtcttaatgctttgtaaacaggtcaaaaaatactgtcatactctaagcttctattttccacactggacatacttctagttgtattctccatactattagactgtgtagtgatgtgacttccaagtagaatttaatctccccattgagtgtgtcatggtacaaatcactattcgtttttggtgttttttagggatgtgcaatgtgcattacataatgacagaaatactgagaaggttctgtgtgcccatttgaaaggagtgggaggaatacagcagtttgtttttcaacatgaatctgatattgatttaaactgtgtttcacttacaagttttaaaaaaatgacagggtttaatggagcgtgcataaaaatgtactgttttcaccttttgtttatatgtaaatgtttgtaagtatatgggcctatctgtaagtggataagtctgtatgtgtgtatcatacacatcaacctccatgtccttagtcctgggtttttgaaaaagtgctaaaacggacaagtagaataaatgttgctgtggaatgccatgctttagaacaaaccctttttgatcttaatgcttctgaaaactaggtctgactctggggatttttttccagccgaaggaaaatcacttccgttatgtccccctctaatttagccgctcgacattttacacaacccggatatgttgtatattttgacccaaagttacaggtaggtttaagagaatttttagccatgacttttggagcactattccattgtcagttattaataaagaattccattgcttagctaaccaacaggttttttttgtttccaagagagttatttgaaaagttaacagaacaatgagataacagtgacagtttaacaaagataaaattctgaactgcgttttattcatttgtgtactatgtgattttttaaatgtcccctttagtatttaatggaaaattggttcctgcaaaagacaaagggtgagagttagcgtcctgtagatacacacagagactaggccgtatattaactagaagcagctttatgtctagcttgtgtctttttgtttgtttgcttgtttgtttttagattcctgagagatgtctctggaagggaaagttttgagaactaatggctatttttgaggacaaaaattacatcttaagctaattccttaaatacatacagtaggtgaattttcaggacaatattgcctcacaaccctgcttacattgaaaagtctttttcccttagctcttctgactggatttttctacaaaaactatggaaaatatctttgttcttgtttgctgctattttctgtcctattttgagaaatataaatacatagaaatggtgcatcttaacatttgtttgtacatgtataaatgtcttgtattttaattcatttttagcatgaattgtttaagggtaagccacaacatctagaaatcactcatagatattgaacaataaaggagaatggtaccgatgcaggaggaagcaagcgtgtcttcccctgcagcacacagcgacttgcgttgacaaaggaggaggaaacgattactctgtaaacaaagttatccttacttgggagattgccacagcctgctgctgagttgagttaccagacatcctccatgtgagaagcagcgaacattgaatctcagggatggcccacaactgggtccacatgtaatgagccctgtttaataacgaaggggtgggggagagcagtccgtctacaacctggaatcagatttgcaaaatttcctgcactgctgtctgacactgtcctgttgatgccctttctgactgtgttctctgttttctctgtctgctgtctaaccctgtgccttgcctgggataaggacaatgatgaggttactggtttggattgtaagtagaggacttttattaattggtttagaggttcactgctgctttgtcactttctcaatcaaattggccacttaagaaataaagagctggtagaattgcatcctcagatgattattgactgtgtgtgtgtgtgaaaacagacattccagtgccacccaaatatatatctgtaacgtgcccaagaaatcctagctgcgctcttgagagtgcatgccatggagactggtttagacaccgcgtggagcctagttgcctgttgtcacggcatcttgcactttaggagactaagaccgtcctggttcgtctgtgtgtggtgtgaccaatggtgtgcccagagcactactctcaaaatcactagtgttagcaagtcgtcccgggctggggagcgttcgccgtagtctttggaagctttggctttagatttaccaagccccgcctccccgctgccagtgccctgctctcccgttcgcctctttctgtttctgtgtgaactttcccggtaatatcactcgttaaataggttttctttaaacttaattaaagaaaaactatttaaaggtaaaggatattttgttgacatcggtggctcgatcatccttaagcaactgaagttaaaattgttgaaggaaaaggcacttaaattggttactttcatgtccagctgtatataagtccagtgtgttcatctagatgacgcaaagaatctcctggtagagaagcgacatgtaaaaaactggtggaaaaaggttttggattttttttccagtggggtggggggagggcaagctggatttacaggtcacggctggactgaatgggcctttttatcttcccactgtatcatggaagtagctgcttgcttgtactgtccatccttcaggcatccctaaagctcactctgaagatgttagagacaaacacaaactcttcgagttaaagttgatcctgacactgacatgaaggcaagccttgatttcgtatgaacgttgctgaagtggtaattgaggaaaacagttccccagattgttaagagttcactgaagatattgacacaattttaaaaaatcagtaaaggaatgtatataatattgctctcgtgttttacagtaagatttgttgctctcagactgtgtaaaacaaaatttattcatgttttctgcatattaaaaaatcttattgtaccaactggtaaactattaaatgcctataaaacta

SEQ ID NO: 166420 - DNA, 661 bp, Homo sapiens
  Payload ID: 12768
  Gene Symbol: PAFAH1B1
  Gene Name: platelet-activating factor acetylhydrolase 1b, regulatory subunit 1 (45kDa)
  ENST ID: ENST00000570400
  CDS Start-End: 364-408
tgaaggacggaagaggccctgcggaggcggcggtgcagcgctccgagacagagtttctctctggcgcccagcctggagtatagtgccacaatcatggttcactgcagccttgacctcctgggctcaagcaaccctcctgcctctgccgcctgagtagctgggactgactataggtggaatgaatcttacttgttgaatatcttctggttactagttggattcatttgtgaaagaatcattttcccctgtgtggaagacacttagtggcatatttaaattataagtccacggatcaaaaagctttttgatttcccaaaggagggacataccactatatcagataagcttgacattacagccaagatggtgctgtcccagagacaacgagatgaactaatgaagaattagataaaaagtatgctggtcttttggaaaaaaaatggacatctgttattagattacaaaagaaggttatggaattagaatcaaagctaaatgaagcaaaagaagaatttacgtcaggtggacctcttggtcagaaacgagacccaaaagaatggattccccgtccgccagaaaaatatgcattgagtggtcacaggagtccagtcactcgagtcattttccatcctgtgttcagtgttatggtctctgcttcaga

SEQ ID NO: 166421 - DNA, 1021 bp, Homo sapiens
  Payload ID: 12768
  Gene Symbol: PAFAH1B1
  Gene Name: platelet-activating factor acetylhydrolase 1b, regulatory subunit 1 (45kDa)
  ENST ID: ENST00000574468
  CDS Start-End: 1-627
tctgcagatatgaccattaaactatgggattttcagggctttgaatgcatcagaaccatgcacggccatgaccacaatgtttcttcagtagccatcatgcccaatggagatcatatagtgtctgcctcaagggataaaactataaaaatgtgggaagtgcaaactggctactgtgtgaagacattcacaggacacagagaatgggtacgtatggtacggccaaatcaagatggcactctgatagccagctgttccaatgaccagactgtgcgtgtatgggtcgtagcaacaaaggaatgcaaggctgagctccgagagcatgagcatgtggtagaatgcatttcctgggctccagaaagctcatattcctccatctctgaagcaacaggatctgaggtgggtcatgataactgggtacgtggagttctgttccattctggggggaagtttattttgagttgtgctgatgacaagaccctacgcgtatgggattacaagaacaagcgatgcatgaagaccctcaatgcgcatgaacactttgttacctccttggatttccacaagacggcaccctatgtcgtcactggcagcgtagatcaaacagtaaaagtgtgggagtgccgttgattgtgtctccttcggcccctcctccctcttttcctctggatgcactctgatgataccatggttaccccattgagctctgtttaaataaatattgtcctttcatgtaaattattctggatgtagattgagcttattaaatgttacacacaaagtattcatgcatggtgaatccaaattgtatactgtaaatttacatacgttgtctagaagtaccatagggtttaaaaacctgggctggcattggtcacaccaggcctaagaaggcagaagttgaatcaattgaactagggcactaaactgaatagttgacagtgtcattttatgttggattattaattcctgtttttctttctgctatctgttggtgcctgacttgatggcctcatttggggaa

SEQ ID NO: 166422 - DNA, 557 bp, Homo sapiens
  Payload ID: 12768
  Gene Symbol: PAFAH1B1
  Gene Name: platelet-activating factor acetylhydrolase 1b, regulatory subunit 1 (45kDa)
  ENST ID: ENST00000576586
  CDS Start-End: 312-557
aggcagaaaggggcggtaggtggccgggccccgctgcctctcgcgcctcccggggcccgccacacacggtgccaacgggacgccgcggtcggccgcatgagcgcaaaagcagggcagcgaggtggaatgaatcttacttgttgaatatcttctggttactagttggattcatttgtgaaagaatcattttcccctgtgtggaagacacttagtggcatatttaaattataagtccacggatcaaaaagctttttgatttcccaaaggagggacataccactatatcagataagcttgacattacagccaagatggtgctgtcccagagacaacgagatgaactaaatcgagctatagcagattatcttcgttcaaatggctatgaagaggcatattcagtttttaaaaaggaagctgaattagatgtgaatgaagaattagataaaaagtatgctggtcttttggaaaaaaaatggacatctgttattagattacaaaagaaggttatggaattagaatcaaagctaaatgaagcaaaagaagaatttacgtcaggt

SEQ ID NO: 166423 - DNA, 3581 bp, Homo sapiens
  Payload ID: 12769
  Gene Symbol: PAFAH2
  Gene Name: platelet-activating factor acetylhydrolase 2, 40kDa
  Uniprot ID: Q99487
  ENST ID: ENST00000374282
  CDS Start-End: 181-1359
cgagaagtgcttccaagcgtccattttgagccttggaaactacgacgaccaaagggccacgggttcatgggtcgtttctcatttccgtcgagttaaacgtctggggctgcttctgaggaatcagcttgactggccagcaagttcagctccggcaagtcatttgattcacccggtgatgaaatgggggtcaaccagtctgtgggctttccacctgtcacaggaccccacctcgtaggctgtggggatgtgatggagggtcagaatctccaggggagcttctttcgactcttctacccctgccaaaaggcagaggagaccatggagcagcccctgtggattccccgctatgagtactgcactggcctggccgagtacctgcagtttaataagcgctgcgggggcttgctgttcaacctggcggtgggatcttgtcgcctgcctgttagctggaatggcccctttaagacaaaggactctggataccccttgatcatcttctcccatggcctaggagccttcaggactttgtattcagccttctgcatggagctggcctcacgtggctttgtggttgctgtgccagagcacagggaccggtcagcggcaaccacctatttctgcaagcaggccccagaagagaaccagcccaccaatgaatcgctgcaggaggaatggatccctttccgtcgagttgaggaaggggagaaggaatttcatgttcggaatccccaggtgcatcagcgggtaagcgagtgtttacgggtgttgaagatcctgcaagaggtcactgctgggcagactgtcttcaacatcttgcctggtggcttggatctgatgactttgaagggcaacattgacatgagccgtgtggctgtgatgggacattcatttggaggggccacagctattctggctttggccaaggagacccaatttcggtgtgcggtggctctggatgcttggatgtttcctctggaacgtgacttttaccccaaggcccgaggacctgtgttctttatcaatactgagaaattccagacaatggagagtgtcaatttgatgaagaagatatgtgcccagcatgaacagtctaggatcataaccgttcttggttctgttcatcggagtcaaactgactttgcttttgtgactggcaacttgattggtaaattcttctccactgaaacccgtgggagcctggacccctatgaagggcaggaggttatggtacgggccatgttggccttcctgcagaagcacctcgacctgaaagaagactataatcaatggaacaaccttattgaaggcattggaccgtcgctcaccccaggggccccccaccatctgtccagcctgtaggcacaactggccatttgtaaagtcacttcagccaagttttcatttgggagctacccaagggcacccatgagctcctatcaagaagtgatcaacgtgaccccttttcacagattgaaaggtgtaatcacactgctgcttggataactgggtactttgatcttagatttgatcttaaaatcactttgggactgggatcccttgctgattgacaaacagactttctgggaccttgatggagtggggaacaagcagtagagtgggactgggggagacccaggccccgggctgagcactgtgaggcctggatgtgaagactcagcccagcgaagctcattcccttacccccggccagtgctgctgcttcagtggaagagatgaagccaaaggacagaatgaaaatccctaccttcagagactctagcccagcccaacaccatctcttcctacctctcagccttctccctccccagggccacttgttgaagtctgagcactttatgtaaatttctaggtgtgagccgtgatcacattttctatttatttccaagtcttctcattgtatggaacatagtactacttatacttacagtagtaagttatacttgtgagcccacagagtggcagacagcatggctctcacagcacagggagaaaaactgaggtacacagaggtacctcagaagctctggatgtctttgggggttttgctaagtgtatcttgataggaaacaacaaaagcaggttgagatggggaagatgacagaacaacagtgttaaatggccatttgcacaggcctttgccacaacagagaagtagtttggtcagctaaaactcagctgcagcctggacagtagagcgagaccccatcttaaaaataaagaaggctgggcgtggtggctcatgcctgtaatcccaacactttgggaggccaaggcaggcagatcacttaaggccaggagttcaagaccacctggccaacatggtgaaaccccgtctctactaaaaatacaaaaaattagcctggcgtaatggcaggcgcctataatcccagctactcaggaggctgaagcagaagaatcacttgaacctaggaggcggaggttgcagtgagtcaagatcgcgccactgcactccagcctgggtgacagagcaagactctgtcttaaaaaaaaaaaaaagaaaaagaaaaatttaaaataaataaaatttaaaaacgcagaaggccactcccagagaggcctaggagtaccttggtcattttttcttgcctcaaatattataaacctccaacttgctcagaatcagggtgcttttattgtctgttttctggctctgaggcccttgccccaaatttaagtcagatacagactgaatttccattctgttctgtttataatatgaatgatattaatactcttgtttgcttaatgttatgttggaattttctgtttaatctgcagtagagcaagatggagagccatctggaattgacttccttctgtctttcttctgtgttcgcttactacttgggcccatgtgggaaaaaaactttaaaaggaaggaagtcttcttagggatccagttcaaagctatttgggggcatcaaactgaaactctcttctccactactcaagacttcgtgcctcagtccaagtaggtaagagcaaaagggaaatgcatctctacacaatggcccatggtcagggccaccagagcaagctgggcctagatctccacctgtcagtgactggccattctaagaggtgaaacagcagatcgttgaggctgtgagggaggatctttgaattcccatgagacatagcataagaagggtatcattaaagccctgggctctaaagttacagagcctggttttgagtcctggctccaccactgccaactgggtaaatttgagcaaatggtattctctttcttatctcagctcctgcgtttctaaaatgagggtctgcgttatgaatagttaggaggattaagtgagaggatgtataacccatgggttacttaaaagtatatttcctaccttccaaacatgagatttttctagttatagtttcttttctagcttgattgctttgtggtcagagaaaatgacccatatggtttccatccttcaaaatttgttgaaacttggttgttggcctagtatgagatcaatgttgtaaatgtgccatgtatgtttaaaaagactatatattctgaa

SEQ ID NO: 166424 - DNA, 2523 bp, Homo sapiens
  Payload ID: 12769
  Gene Symbol: PAFAH2
  Gene Name: platelet-activating factor acetylhydrolase 2, 40kDa
  Uniprot ID: Q99487
  ENST ID: ENST00000374284
  CDS Start-End: 126-1304
tgaggaatcagcttgactggcaacaggaagccgagaggaaaccagcaagcggctgctgttctgtgttcccccatccagccagcaagttcagctccggcaagtcatttgattcacccggtgatgaaatgggggtcaaccagtctgtgggctttccacctgtcacaggaccccacctcgtaggctgtggggatgtgatggagggtcagaatctccaggggagcttctttcgactcttctacccctgccaaaaggcagaggagaccatggagcagcccctgtggattccccgctatgagtactgcactggcctggccgagtacctgcagtttaataagcgctgcgggggcttgctgttcaacctggcggtgggatcttgtcgcctgcctgttagctggaatggcccctttaagacaaaggactctggataccccttgatcatcttctcccatggcctaggagccttcaggactttgtattcagccttctgcatggagctggcctcacgtggctttgtggttgctgtgccagagcacagggaccggtcagcggcaaccacctatttctgcaagcaggccccagaagagaaccagcccaccaatgaatcgctgcaggaggaatggatccctttccgtcgagttgaggaaggggagaaggaatttcatgttcggaatccccaggtgcatcagcgggtaagcgagtgtttacgggtgttgaagatcctgcaagaggtcactgctgggcagactgtcttcaacatcttgcctggtggcttggatctgatgactttgaagggcaacattgacatgagccgtgtggctgtgatgggacattcatttggaggggccacagctattctggctttggccaaggagacccaatttcggtgtgcggtggctctggatgcttggatgtttcctctggaacgtgacttttaccccaaggcccgaggacctgtgttctttatcaatactgagaaattccagacaatggagagtgtcaatttgatgaagaagatatgtgcccagcatgaacagtctaggatcataaccgttcttggttctgttcatcggagtcaaactgactttgcttttgtgactggcaacttgattggtaaattcttctccactgaaacccgtgggagcctggacccctatgaagggcaggaggttatggtacgggccatgttggccttcctgcagaagcacctcgacctgaaagaagactataatcaatggaacaaccttattgaaggcattggaccgtcgctcaccccaggggccccccaccatctgtccagcctgtaggcacaactggccatttgtaaagtcacttcagccaagttttcatttgggagctacccaagggcacccatgagctcctatcaagaagtgatcaacgtgaccccttttcacagattgaaaggtgtaatcacactgctgcttggataactgggtactttgatcttagatttgatcttaaaatcactttgggactgggatcccttgctgattgacaaacagactttctgggaccttgatggagtggggaacaagcagtagagtgggactgggggagacccaggccccgggctgagcactgtgaggcctggatgtgaagactcagcccagcgaagctcattcccttacccccggccagtgctgctgcttcagtggaagagatgaagccaaaggacagaatgaaaatccctaccttcagagactctagcccagcccaacaccatctcttcctacctctcagccttctccctccccagggccacttgttgaagtctgagcactttatgtaaatttctaggtgtgagccgtgatcacattttctatttatttccaagtcttctcattgtatggaacatagtactacttatacttacagtagtaagttatacttgtgagcccacagagtggcagacagcatggctctcacagcacagggagaaaaactgaggtacacagaggtacctcagaagctctggatgtctttgggggttttgctaagtgtatcttgataggaaacaacaaaagcaggttgagatggggaagatgacagaacaacagtgttaaatggccatttgcacaggcctttgccacaacagagaagtagtttggtcagctaaaactcagctgcagcctggacagtagagcgagaccccatcttaaaaataaagaaggctgggcgtggtggctcatgcctgtaatcccaacactttgggaggccaaggcaggcagatcacttaaggccaggagttcaagaccacctggccaacatggtgaaaccccgtctctactaaaaatacaaaaaattagcctggcgtaatggcaggcgcctataatcccagctactcaggaggctgaagcagaagaatcacttgaacctaggaggcggaggttgcagtgagtcaagatcgcgccactgcactccagcctgggtgacagagcaagactctgtcttaaaaaaaaaaaaaagaaaaagaaaaatttaaaataaataaaatttaaaaacgca

SEQ ID NO: 166425 - DNA, 778 bp, Homo sapiens
  Payload ID: 12769
  Gene Symbol: PAFAH2
  Gene Name: platelet-activating factor acetylhydrolase 2, 40kDa
  ENST ID: ENST00000439092
  CDS Start-End: 222-778
aagggtccccattccttctttccgatccgcgattaccctggactcgaagtcagcagacccggttctaggccagctctgcctctcaccctctgtgaccttgggcaaatcatacaactctgggactcagtttcttcctctctaaaacggagatgactgttgctccatcagtctcagccagcaagttcagctccggcaagtcatttgattcacccggtgatgaaatgggggtcaaccagtctgtgggctttccacctgtcacaggaccccacctcgtaggctgtggggatgtgatggagggtcagaatctccaggggagcttctttcgactcttctacccctgccaaaaggcagaggagaccatggagcagcccctgtggattccccgctatgagtactgcactggcctggccgagtacctgcagtttaataagcgctgcgggggcttgctgttcaacctggcggtgggatcttgtcgcctgcctgttagctggaatggcccctttaagacaaaggactctggataccccttgatcatcttctcccatggcctaggagccttcaggactttgtattcagccttctgcatggagctggcctcacgtggctttgtggttgctgtgccagagcacagatgtgtgtatttcagggaccggtcagcggcaaccacctatttctgcaagcaggccccagaagagaaccagcccaccaatgaatcgctgcaggaggaatggatccctttccgtcgagttgaggaaggggagaaggaatttcatgttcg

SEQ ID NO: 166426 - DNA, 748 bp, Homo sapiens
  Payload ID: 12769
  Gene Symbol: PAFAH2
  Gene Name: platelet-activating factor acetylhydrolase 2, 40kDa
  ENST ID: ENST00000441420
  CDS Start-End: 253-748
ggggctgcttctgaggaatcagcttgactggaagggtccccattccttctttccgatccgcgattaccctggactcgaagtcagcagacccggttctaggccagctctgcctctcaccctctgtgaccttgggcaaatcatacaactctgggactcagtttcttcctctctaaaacggagatgactgttgctccatcagtctcagccagcaagttcagctccggcaagtcatttgattcacccggtgatgaaatgggggtcaaccagtctgtgggctttccacctgtcacaggaccccacctcgtaggctgtggggatgtgatggagggtcagaatctccaggggagcttctttcgactcttctacccctgccaaaaggcagaggagaccatggagcagcccctgtggattccccgctatgagtactgcactggcctggccgagtacctgcagtttaataagcgctgcgggggcttgctgttcaacctggcggtgggatcttgtcgcctgcctgttagctggaatggcccctttaagacaaaggactctggataccccttgatcatcttctcccatggcctaggagccttcaggactttgtattcagccttctgcatggagctggcctcacgtggctttgtggttgctgtgccagagcacagggaccggtcagcggcaaccacctatttctgcaagcaggccccagaagagaaccagcccaccaatgaatcgctgcaggaggaatgga

SEQ ID NO: 166427 - DNA, 1539 bp, Homo sapiens
  Payload ID: 12770
  Gene Symbol: PTAFR
  Gene Name: platelet-activating factor receptor
  Uniprot ID: P25105
  ENST ID: ENST00000305392
  CDS Start-End: 191-1219
cctcctgtgcactcattacctgcttcctgagctccccgagaagtcatccaggacctccccgagaagccgtccaggaaacatgctctcaggggacccccatctgcctcagcctctttgtcactgcctggaccattgtccctgctgtttctcaggcaccaccaggaccagctgatcattccagcccacagcaatggagccacatgactcctcccacatggactctgagttccgatacactctcttcccgattgtttacagcatcatctttgtgctcggggtcattgctaatggctacgtgctgtgggtctttgcccgcctgtacccttgcaagaaattcaatgagataaagatcttcatggtgaacctcaccatggcggacatgctcttcttgatcaccctgccactttggattgtctactaccaaaaccagggcaactggatactccccaaattcctgtgcaacgtggctggctgccttttcttcatcaacacctactgctctgtggccttcctgggcgtcatcacttataaccgcttccaggcagtaactcggcccatcaagactgctcaggccaacacccgcaagcgtggcatctctttgtccttggtcatctgggtggccattgtgggagctgcatcctacttcctcatcctggactccaccaacacagtgcccgacagtgctggctcaggcaacgtcactcgctgctttgagcattacgagaagggcagcgtgccagtcctcatcatccacatcttcatcgtgttcagcttcttcctggtcttcctcatcatcctcttctgcaacctggtcatcatccgtaccttgctcatgcagccggtgcagcagcagcgcaacgctgaagtcaagcgccgggcgctgtggatggtgtgcacggtcttggcggtgttcatcatctgcttcgtgccccaccacgtggtgcagctgccctggacccttgctgagctgggcttccaggacagcaaattccaccaggccattaatgatgcacatcaggtcaccctctgcctccttagcaccaactgtgtcttagaccctgttatctactgtttcctcaccaagaagttccgcaagcacctcaccgaaaagttctacagcatgcgcagtagccggaaatgctcccgggccaccacggatacggtcactgaagtggttgtgccattcaaccagatccctggcaattccctcaaaaattagtccctgcttccaggcctgaagtcttctcctccatgaacatcatggactgagctgggggaagaagggatatctactgtggtctgggcaccacctctgtgggcactggtgggccattagatttggaggctacctcacctgggcagggatgatggcagagccaggctgttggaaaatccagaactcaaatgagccccttcatccgcctgtgggcgcatactacagtaactgtgactgatgactttatcctgagtcccttaatcttatggggccggaaggaatgtcagggccaggtgcagaccttgggggaagactttaaacca

SEQ ID NO: 166428 - DNA, 4491 bp, Homo sapiens
  Payload ID: 12770
  Gene Symbol: PTAFR
  Gene Name: platelet-activating factor receptor
  Uniprot ID: P25105
  ENST ID: ENST00000373857
  CDS Start-End: 636-1664
ggcacatgctcgctgtctgtgtcttgtcatctcgtcttttgtcttggatcttaccttgtctttgtccctgaatctccttgttcctctcatctctcccggtgtttacatctgtctttttccctgagcctcgctccctccatccattcctccgccctctcattttttttcccgactccctcctgcctcctccctttctcctttgattttcctggtccctcatctctcctccctcctctttctcactctcatgctccctttttcgctctcttgagtacatgcacttgctttctctctcttgcttttcctctttctcaccttagctcctggcctcgggcgctgtctacaccccaccccatccctcgctctttgagaagcctctgtgcagtgcccaggtcctggcggcccagcttggaagttcctgtggtaccccttgagaggccctagggccacagcatttcctcccaggggtgacttggtagtgatacgctctgtttcttcacttctgcaattgccagacagcatagaggctgaggctggggccaggacccagacagagacacacggtcactgcagctgaagccgctgcccctgctacaggcaccaccaggaccagctgatcattccagcccacagcaatggagccacatgactcctcccacatggactctgagttccgatacactctcttcccgattgtttacagcatcatctttgtgctcggggtcattgctaatggctacgtgctgtgggtctttgcccgcctgtacccttgcaagaaattcaatgagataaagatcttcatggtgaacctcaccatggcggacatgctcttcttgatcaccctgccactttggattgtctactaccaaaaccagggcaactggatactccccaaattcctgtgcaacgtggctggctgccttttcttcatcaacacctactgctctgtggccttcctgggcgtcatcacttataaccgcttccaggcagtaactcggcccatcaagactgctcaggccaacacccgcaagcgtggcatctctttgtccttggtcatctgggtggccattgtgggagctgcatcctacttcctcatcctggactccaccaacacagtgcccgacagtgctggctcaggcaacgtcactcgctgctttgagcattacgagaagggcagcgtgccagtcctcatcatccacatcttcatcgtgttcagcttcttcctggtcttcctcatcatcctcttctgcaacctggtcatcatccgtaccttgctcatgcagccggtgcagcagcagcgcaacgctgaagtcaagcgccgggcgctgtggatggtgtgcacggtcttggcggtgttcatcatctgcttcgtgccccaccacgtggtgcagctgccctggacccttgctgagctgggcttccaggacagcaaattccaccaggccattaatgatgcacatcaggtcaccctctgcctccttagcaccaactgtgtcttagaccctgttatctactgtttcctcaccaagaagttccgcaagcacctcaccgaaaagttctacagcatgcgcagtagccggaaatgctcccgggccaccacggatacggtcactgaagtggttgtgccattcaaccagatccctggcaattccctcaaaaattagtccctgcttccaggcctgaagtcttctcctccatgaacatcatggactgagctgggggaagaagggatatctactgtggtctgggcaccacctctgtgggcactggtgggccattagatttggaggctacctcacctgggcagggatgatggcagagccaggctgttggaaaatccagaactcaaatgagccccttcatccgcctgtgggcgcatactacagtaactgtgactgatgactttatcctgagtcccttaatcttatggggccggaaggaatgtcagggccaggtgcagaccttgggggaagactttaaaccacctagttctccccgatggggcatcggtctaaagctttgggggagtgggcgcagtggctcacacctgtaatcccagcactttgggaggccgaggtgggcagatcatgggtcaagagatcgagaccatcctggccaacattgtaaaaccccatctctactaaaacatacaaaaattagccgggcatggtggcacacgcctgtagtcccagctactcaggaggctgaggcaggagaatcgcttgaacctgggaggcagaggttgcagtgaacctagattgcaccattgcactctagcctggcaacagagcgagattccatctcaaaaaaaaaaaaaaaaaaaaaaaaaaagctttgggcaactactctcaagtgatagaggtagactgggttaggaaaggacactgccctcactgtatggcactaccttggggcagacttttgagctaagatgttgccatcctctctccaccctccggcacaaggtctttgtgacctttctcaggggaaggggcttgatggaaccttctctgactcatctggcaacctgtccctaatggtgaccaaagaagataaaacatgaacagaccaaaagctaggacaagagcttgcttcccaagacagacgtgtctgtctgcaaaggccttgcctctagtccagtcagctctgggggagtgggaaggagatgcccacctcctctttctgtctcaacaatagtccctaattaagtaccttctgtggggcagccacccactgagggtgggcaaaggccccttgaaagcaaaattggggctgggctcagtggctcatgcctataatcccagcactttgggaggccaaggcaggcagatcacctgaggtccggagttcgagaccagcctggccaacgtggtgaaacgccatctccactaagaatacaaaaatatggctcatgcctgtaatcccagtactttgggaggctgaggtgggccgatcatttgaagttaggagtttgagaccagcctgaccaatatggtaaaaccccgtctctactaaaaatacaaaaaaattagcctggcgtggtggcgcatgcctgtagtcccataggctgtagctactgggaggaggcggagcttgcagtgagccgagatcacgccactgctctccagcctgggcgacagagtgagactctgtgtcaaaaacaaacaaacaaacaaaaaaggcaaaattggagctgtccaggccaggacaccccgatgtccaggggcttccatacgaacaggcacatgggctgggaagtacatgaggcccctgggtagaagggtctgtcagttctctcctcccttgccctctgggagggtcctcctaacatagcttccaggaggtgggaggagcagttactgtcagcaggtgtcagccaggtgtcagcttctcctggggatctctagatgtctgcttgtgatttttggcaagtatatgcaaatgagcctcctctcctgccctgagacaagtatctgcagtgtgaacctggcagcctcagacccaaggggctcagaggaaacttctctggtttctagagctctgtgctccttcagagaagtcttccttccttccagtcagtgtccctgtgaagctgggatactcatttcctgtgtaccgggcaaacaccggattgctgattttgagaaatgcctctcgatggacctgtaacctgctggagtctgggatggtagctgtgggctggacttggctgatgggatgacccggtggctagtgcagcatcacacaagcctggttcaagtcttggctgtgtcatttcctgctgagggaccaggcactgaatttcctacctcttagggtcattacctatgaggttaaagctacctcatgggattgttatacgccactaatgttgaggcagacacctcttggcagggtgactgctcatcttagaccctccccttttctgcgaatttgggccccttgatcctctgatgggagctgaaaggatgagaggtgggcatctagatttagggaggctgttcaggctttgcaggtcccttacctgaacacatagaaaccctggagctgtgactgtgtccatgtgtgtgtgtttgtctgtgtgtgttgcgggggatgggcacctgcatgaatgtggtagagaaaatggctctgctcagagggaagatacgcatagcaaggcagggaccagaggaatcacaggcgcctggagagcagccgggcaccgcctccagggacctgccggcttccctcagtcctccaggggcccagcactcttcctttaggccctgtgagcgtcccttgtcaggatacattctctcattttgctgaagctgatttgattgggtgtctgtttctcgcagccaaaagagctctgaatgaggaaagtgcttctgtgctaactccccgcgtctcctgaatttcagtcattcatgtacccgcctcgaaatttttgcaatatctgtgtaccaactgtccatttacttaataaagaagttttctttaaattaa

SEQ ID NO: 166429 - DNA, 4191 bp, Homo sapiens
  Payload ID: 12770
  Gene Symbol: PTAFR
  Gene Name: platelet-activating factor receptor
  Uniprot ID: P25105
  ENST ID: ENST00000539896
  CDS Start-End: 336-1364
gctgctgctcattggagggtagagcagagtgagtcacacacctgtgcctgggcccgtcctctgcctcctgtgcactcattacctgcttcctgagctccccgagaagtcatccaggacctccccgagaagccgtccaggaaacatgctctcaggggacccccatctgcctcagcctctttgtcactgcctggaccattgtccctgctgtttctcagacagcatagaggctgaggctggggccaggacccagacagagacacacggtcactgcagctgaagccgctgcccctgctacaggcaccaccaggaccagctgatcattccagcccacagcaatggagccacatgactcctcccacatggactctgagttccgatacactctcttcccgattgtttacagcatcatctttgtgctcggggtcattgctaatggctacgtgctgtgggtctttgcccgcctgtacccttgcaagaaattcaatgagataaagatcttcatggtgaacctcaccatggcggacatgctcttcttgatcaccctgccactttggattgtctactaccaaaaccagggcaactggatactccccaaattcctgtgcaacgtggctggctgccttttcttcatcaacacctactgctctgtggccttcctgggcgtcatcacttataaccgcttccaggcagtaactcggcccatcaagactgctcaggccaacacccgcaagcgtggcatctctttgtccttggtcatctgggtggccattgtgggagctgcatcctacttcctcatcctggactccaccaacacagtgcccgacagtgctggctcaggcaacgtcactcgctgctttgagcattacgagaagggcagcgtgccagtcctcatcatccacatcttcatcgtgttcagcttcttcctggtcttcctcatcatcctcttctgcaacctggtcatcatccgtaccttgctcatgcagccggtgcagcagcagcgcaacgctgaagtcaagcgccgggcgctgtggatggtgtgcacggtcttggcggtgttcatcatctgcttcgtgccccaccacgtggtgcagctgccctggacccttgctgagctgggcttccaggacagcaaattccaccaggccattaatgatgcacatcaggtcaccctctgcctccttagcaccaactgtgtcttagaccctgttatctactgtttcctcaccaagaagttccgcaagcacctcaccgaaaagttctacagcatgcgcagtagccggaaatgctcccgggccaccacggatacggtcactgaagtggttgtgccattcaaccagatccctggcaattccctcaaaaattagtccctgcttccaggcctgaagtcttctcctccatgaacatcatggactgagctgggggaagaagggatatctactgtggtctgggcaccacctctgtgggcactggtgggccattagatttggaggctacctcacctgggcagggatgatggcagagccaggctgttggaaaatccagaactcaaatgagccccttcatccgcctgtgggcgcatactacagtaactgtgactgatgactttatcctgagtcccttaatcttatggggccggaaggaatgtcagggccaggtgcagaccttgggggaagactttaaaccacctagttctccccgatggggcatcggtctaaagctttgggggagtgggcgcagtggctcacacctgtaatcccagcactttgggaggccgaggtgggcagatcatgggtcaagagatcgagaccatcctggccaacattgtaaaaccccatctctactaaaacatacaaaaattagccgggcatggtggcacacgcctgtagtcccagctactcaggaggctgaggcaggagaatcgcttgaacctgggaggcagaggttgcagtgaacctagattgcaccattgcactctagcctggcaacagagcgagattccatctcaaaaaaaaaaaaaaaaaaaaaaaaaaagctttgggcaactactctcaagtgatagaggtagactgggttaggaaaggacactgccctcactgtatggcactaccttggggcagacttttgagctaagatgttgccatcctctctccaccctccggcacaaggtctttgtgacctttctcaggggaaggggcttgatggaaccttctctgactcatctggcaacctgtccctaatggtgaccaaagaagataaaacatgaacagaccaaaagctaggacaagagcttgcttcccaagacagacgtgtctgtctgcaaaggccttgcctctagtccagtcagctctgggggagtgggaaggagatgcccacctcctctttctgtctcaacaatagtccctaattaagtaccttctgtggggcagccacccactgagggtgggcaaaggccccttgaaagcaaaattggggctgggctcagtggctcatgcctataatcccagcactttgggaggccaaggcaggcagatcacctgaggtccggagttcgagaccagcctggccaacgtggtgaaacgccatctccactaagaatacaaaaatatggctcatgcctgtaatcccagtactttgggaggctgaggtgggccgatcatttgaagttaggagtttgagaccagcctgaccaatatggtaaaaccccgtctctactaaaaatacaaaaaaattagcctggcgtggtggcgcatgcctgtagtcccataggctgtagctactgggaggaggcggagcttgcagtgagccgagatcacgccactgctctccagcctgggcgacagagtgagactctgtgtcaaaaacaaacaaacaaacaaaaaaggcaaaattggagctgtccaggccaggacaccccgatgtccaggggcttccatacgaacaggcacatgggctgggaagtacatgaggcccctgggtagaagggtctgtcagttctctcctcccttgccctctgggagggtcctcctaacatagcttccaggaggtgggaggagcagttactgtcagcaggtgtcagccaggtgtcagcttctcctggggatctctagatgtctgcttgtgatttttggcaagtatatgcaaatgagcctcctctcctgccctgagacaagtatctgcagtgtgaacctggcagcctcagacccaaggggctcagaggaaacttctctggtttctagagctctgtgctccttcagagaagtcttccttccttccagtcagtgtccctgtgaagctgggatactcatttcctgtgtaccgggcaaacaccggattgctgattttgagaaatgcctctcgatggacctgtaacctgctggagtctgggatggtagctgtgggctggacttggctgatgggatgacccggtggctagtgcagcatcacacaagcctggttcaagtcttggctgtgtcatttcctgctgagggaccaggcactgaatttcctacctcttagggtcattacctatgaggttaaagctacctcatgggattgttatacgccactaatgttgaggcagacacctcttggcagggtgactgctcatcttagaccctccccttttctgcgaatttgggccccttgatcctctgatgggagctgaaaggatgagaggtgggcatctagatttagggaggctgttcaggctttgcaggtcccttacctgaacacatagaaaccctggagctgtgactgtgtccatgtgtgtgtgtttgtctgtgtgtgttgcgggggatgggcacctgcatgaatgtggtagagaaaatggctctgctcagagggaagatacgcatagcaaggcagggaccagaggaatcacaggcgcctggagagcagccgggcaccgcctccagggacctgccggcttccctcagtcctccaggggcccagcactcttcctttaggccctgtgagcgtcccttgtcaggatacattctctcattttgctgaagctgatttgattgggtgtctgtttctcgcagccaaaagagctctgaatgaggaaagtgcttctgtgctaactccccgcgtctcctgaatttcagtcattcatgtacccgcctcgaaatttttgcaatatctgtgtaccaactgtccatttacttaataaagaagttttctttaaattaa

SEQ ID NO: 166430 - DNA, 1308 bp, Homo sapiens
  Payload ID: 12771
  Gene Symbol: PDGFA
  Gene Name: platelet-derived growth factor alpha polypeptide
  Uniprot ID: P04085
  ENST ID: ENST00000354513
  CDS Start-End: 394-1029
tccgcaaatatgcagaattaccggccgggtcgctcctgaagccagcgcggggagcgagcgcggcggcggccagcaccgggaacgcaccgaggaagaagcccagcccccgccctccgccccttccgtccccaccccctacccggcggcccaggaggctccccgcgctgcgggcgcgcactccctgtttctcctcctcctggctggcgctgcctgcctctccgcactcactgctcgcgccgggcgcgctccgccagctccgtgctccccgcgccaccctcctccgggccgcgctccctaagggatggtactgaatttcgccgccacaggagaccggctggagcgcccgccccgcggcctcgcctctcctccgagcagccagcgcctcgggacgcgatgaggaccttggcttgcctgctgctcctcggctgcggatacctcgcccatgttctggccgaggaagccgagatcccccgcgaggtgatcgagaggctggcccgcagtcagatccacagcatccgggacctccagcgactcctggagatagactccgtagggagtgaggattctttggacaccagcctgagagctcacggggtccatgccactaagcatgtgcccgagaagcggcccctgcccattcggaggaagagaagcatcgaggaagctgtccccgctgtctgcaagaccaggacggtcatttacgagattcctcggagtcaggtcgaccccacgtccgccaacttcctgatctggcccccgtgcgtggaggtgaaacgctgcaccggctgctgcaacacgagcagtgtcaagtgccagccctcccgcgtccaccaccgcagcgtcaaggtggccaaggtggaatacgtcaggaagaagccaaaattaaaagaagtccaggtgaggttagaggagcatttggagtgcgcctgcgcgaccacaagcctgaatccggattatcgggaagaggacacgggaaggcctagggagtcaggtaaaaaacggaaaagaaaaaggttaaaacccacctaaagcagccaaccagatgtgaggtgaggatgagccgcagccctttcctgggacatggatgtacatggcgtgttacattcctgaacctactatgtacggtgctttattgccagtgtgcggtctttgttctcctccgtgaaaaactgtgtccgagaacactcgggagaacaaagagacagtgcacatttgtttaatgtgacatcaaagcaagtattgtagcactcggtgaagcagtaagaagcttccttgtcaaaaagagagagagagaaagagagagagaaa

SEQ ID NO: 166431 - DNA, 689 bp, Homo sapiens
  Payload ID: 12771
  Gene Symbol: PDGFA
  Gene Name: platelet-derived growth factor alpha polypeptide
  ENST ID: ENST00000400761
  CDS Start-End: 1-618
cagcgccaagctgcagccctcggttcccagtccccaagcccggcggggctcagggccggcgcagtcccgcccgcccgggcctgcttacaggaagccgagatcccccgcgaggtgatcgagaggctggcccgcagtcagatccacagcatccgggacctccagcgactcctggagatagactccgtagggagtgaggattctttggacaccagcctgagagctcacggggtccatgccactaagcatgtgcccgagaagcggcccctgcccattcggaggaagagaagcatcgaggaagctgtccccgctgtctgcaagaccaggacggtcatttacgagattcctcggagtcaggtcgaccccacgtccgccaacttcctgatctggcccccgtgcgtggaggtgaaacgctgcaccggctgctgcaacacgagcagtgtcaagtgccagccctcccgcgtccaccaccgcagcgtcaaggtggccaaggtggaatacgtcaggaagaagccaaaattaaaagaagtccaggtgaggttagaggagcatttggagtgcgcctgcgcgaccacaagcctgaatccggattatcgggaagaggacacggatgtgaggtgaggatgagccgcagccctttcctgggacatggatgtacatggcgtgttacattcctgaacctactatgtacg

SEQ ID NO: 166432 - DNA, 2305 bp, Homo sapiens
  Payload ID: 12771
  Gene Symbol: PDGFA
  Gene Name: platelet-derived growth factor alpha polypeptide
  Uniprot ID: P04085
  ENST ID: ENST00000402802
  CDS Start-End: 409-999
ttcttggggctgatgtccgcaaatatgcagaattaccggccgggtcgctcctgaagccagcgcggggagcgagcgcggcggcggccagcaccgggaacgcaccgaggaagaagcccagcccccgccctccgccccttccgtccccaccccctacccggcggcccaggaggctccccgcgctgcgggcgcgcactccctgtttctcctcctcctggctggcgctgcctgcctctccgcactcactgctcgcgccgggcgcgctccgccagctccgtgctccccgcgccaccctcctccgggccgcgctccctaagggatggtactgaatttcgccgccacaggagaccggctggagcgcccgccccgcggcctcgcctctcctccgagcagccagcgcctcgggacgcgatgaggaccttggcttgcctgctgctcctcggctgcggatacctcgcccatgttctggccgaggaagccgagatcccccgcgaggtgatcgagaggctggcccgcagtcagatccacagcatccgggacctccagcgactcctggagatagactccgtagggagtgaggattctttggacaccagcctgagagctcacggggtccatgccactaagcatgtgcccgagaagcggcccctgcccattcggaggaagagaagcatcgaggaagctgtccccgctgtctgcaagaccaggacggtcatttacgagattcctcggagtcaggtcgaccccacgtccgccaacttcctgatctggcccccgtgcgtggaggtgaaacgctgcaccggctgctgcaacacgagcagtgtcaagtgccagccctcccgcgtccaccaccgcagcgtcaaggtggccaaggtggaatacgtcaggaagaagccaaaattaaaagaagtccaggtgaggttagaggagcatttggagtgcgcctgcgcgaccacaagcctgaatccggattatcgggaagaggacacggatgtgaggtgaggatgagccgcagccctttcctgggacatggatgtacatggcgtgttacattcctgaacctactatgtacggtgctttattgccagtgtgcggtctttgttctcctccgtgaaaaactgtgtccgagaacactcgggagaacaaagagacagtgcacatttgtttaatgtgacatcaaagcaagtattgtagcactcggtgaagcagtaagaagcttccttgtcaaaaagagagagagagaaagagagagagaaaacaaaaccacaaatgacaaaaacaaaacggactcacaaaaatatctaaactcgatgagatggagggtcgccccgtgggatggaagtgcagaggtctcagcagactggatttctgtccgggtggtcacaggtgcttttttgccgaggatgcagagcctgctttgggaacgactccagaggggtgctggtgggctctgcaggggcccgcaggaagcaggaatgtcttggaaaccgccacgcgaactttagaaaccacacctcctcgctgtagtatttaagcccatacagaaaccttcctgagagccttaagtggtttttttttttgtttttgttttgttttttttttttttgtttttttttttttttttttacaccataaagtgattattaagctttcctttttactctttggctagctttttttttttttttttttttttaattatctcttggatgacatttacaccgataacacacaggctgctgtaactgtcaggacagtgcgacggtatttttcctagcaagatgcaaactaatgagatgtattaaaataaacatggtatacctacctatgcatcatttcctaaatgtttctggctttgtgtttctcccttaccctgctttatttgttaatttaagccattttgaaagaactatgcgtcaaccaatcgtacgccgtccctgcggcacctgccccagagcccgtttgtggctgagtgacaacttgttccccgcagtgcacacctagaatgctgtgttcccacgcggcacgtgagatgcattgccgcttctgtctgtgttgttggtgtgccctggtgccgtggtggcggtcactccctctgctgccagtgtttggacagaacccaaattctttatttttggtaagatattgtgctttacctgtattaacagaaatgtgtgtgtgtggtttgtttttttgtaaaggtgaagtttgtatgtttacctaatattacctgttttgtatacctgagagcctgctatgttctttttttgttgatccaaaattaaaaaaaaaaataccaccaacaaaa

SEQ ID NO: 166433 - DNA, 663 bp, Homo sapiens
  Payload ID: 12771
  Gene Symbol: PDGFA
  Gene Name: platelet-derived growth factor alpha polypeptide
  ENST ID: ENST00000405692
  CDS Start-End: 405-663
cggccggagcgccggggcgggggcggggaccggctctctggccctttttggcgcagcagctctgggcgctgcccgctgccgccgctggggcccgagagaggcgagccggcgacggcggcgcttctgcggcggcctcctccctccccacccggtgccgcaggattgcagctggcactggagggtgggcaagctcgagggaggggcgcggagccccggcgcggagccgggcgcggggctttgatggatttagctgcttgcgcgagcgcgtgtgtgctccctgccgcggcggcggcgcccgggccctgccgggtccgcacgaaccccgagcgcttccgaggagaccggctggagcgcccgccccgcggcctcgcctctcctccgagcagccagcgcctcgggacgcgatgaggaccttggcttgcctgctgctcctcggctgcggatacctcgcccatgttctggccgaggaagccgagatcccccgcgaggtgatcgagaggctggcccgcagtcagatccacagcatccgggacctccagcgactcctggagatagactccgtagggagtgaggattctttggacaccagcctgagagctcacggggtccatgccactaagcatgtgcccgagaagcggcccctgcccattcggaggaagagaa

SEQ ID NO: 166434 - DNA, 3497 bp, Homo sapiens
  Payload ID: 12772
  Gene Symbol: PDGFB
  Gene Name: platelet-derived growth factor beta polypeptide
  Uniprot ID: P01127
  ENST ID: ENST00000331163
  CDS Start-End: 789-1514
gcagctcgcagctcgcagcccgcagcccgcagaggacgcccagagcggcgagcgggcgggcagacggaccgacggactcgcgccgcgtccacctgtcggccgggcccagccgagcgcgcagcgggcacgccgcgcgcgcggagcagccgtgcccgccgcccgggccccgcgccagggcgcacacgctcccgcccccctacccggcccgggcgggagtttgcacctctccctgcccgggtgctcgagctgccgttgcaaagccaactttggaaaaagttttttgggggagacttgggccttgaggtgcccagctccgcgctttccgattttgggggcctttccagaaaatgttgcaaaaaagctaagccggcgggcagaggaaaacgcctgtagccggcgagtgaagacgaaccatcgactgccgtgttccttttcctcttggaggttggagtcccctgggcgcccccacacggctagacgcctcggctggttcgcgacgcagccccccggccgtggatgctcactcgggctcgggatccgcccaggtagcggcctcggacccaggtcctgcgcccaggtcctcccctgccccccagcgacggagccggggccgggggcggcggcgcccgggggccatgcgggtgagccgcggctgcagaggcctgagcgcctgatcgccgcggacccgagccgagcccacccccctccccagccccccaccctggccgcgggggcggcgcgctcgatctacgcgtccggggccccgcggggccgggcccggagtcggcatgaatcgctgctgggcgctcttcctgtctctctgctgctacctgcgtctggtcagcgccgagggggaccccattcccgaggagctttatgagatgctgagtgaccactcgatccgctcctttgatgatctccaacgcctgctgcacggagaccccggagaggaagatggggccgagttggacctgaacatgacccgctcccactctggaggcgagctggagagcttggctcgtggaagaaggagcctgggttccctgaccattgctgagccggccatgatcgccgagtgcaagacgcgcaccgaggtgttcgagatctcccggcgcctcatagaccgcaccaacgccaacttcctggtgtggccgccctgtgtggaggtgcagcgctgctccggctgctgcaacaaccgcaacgtgcagtgccgccccacccaggtgcagctgcgacctgtccaggtgagaaagatcgagattgtgcggaagaagccaatctttaagaaggccacggtgacgctggaagaccacctggcatgcaagtgtgagacagtggcagctgcacggcctgtgacccgaagcccggggggttcccaggagcagcgagccaaaacgccccaaactcgggtgaccattcggacggtgcgagtccgccggccccccaagggcaagcaccggaaattcaagcacacgcatgacaagacggcactgaaggagacccttggagcctaggggcatcggcaggagagtgtgtgggcagggttatttaatatggtatttgctgtattgcccccatggggtccttggagtgataatattgtttccctcgtccgtctgtctcgatgcctgattcggacggccaatggtgcttcccccacccctccacgtgtccgtccacccttccatcagcgggtctcctcccagcggcctccggcgtcttgcccagcagctcaagaagaaaaagaaggactgaactccatcgccatcttcttcccttaactccaagaacttgggataagagtgtgagagagactgatggggtcgctctttgggggaaacgggctccttcccctgcacctggcctgggccacacctgagcgctgtggactgtcctgaggagccctgaggacctctcagcatagcctgcctgatccctgaacccctggccagctctgaggggaggcacctccaggcaggccaggctgcctcggactccatggctaagaccacagacgggcacacagactggagaaaacccctcccacggtgcccaaacaccagtcacctcgtctccctggtgcctctgtgcacagtggcttcttttcgttttcgttttgaagacgtggactcctcttggtgggtgtggccagcacaccaagtggctgggtgccctctcaggtgggttagagatggagtttgctgttgaggtggctgtagatggtgacctgggtatcccctgcctcctgccaccccttcctccccacactccactctgattcacctcttcctctggttcctttcatctctctacctccaccctgcattttcctcttgtcctggcccttcagtctgctccaccaaggggctcttgaaccccttattaaggccccagatgatcccagtcactcctctctagggcagaagactagaggccagggcagcaagggacctgctcatcatattccaacccagccacgactgccatgtaaggttgtgcagggtgtgtactgcacaaggacattgtatgcagggagcactgttcacatcatagataaagctgatttgtatatttattatgacaatttctggcagatgtaggtaaagaggaaaaggatccttttcctaattcacacaaagactccttgtggactggctgtgcccctgatgcagcctgtggcttggagtggccaaataggagggagactgtggtaggggcagggaggcaacactgctgtccacatgacctccatttcccaaagtcctctgctccagcaactgcccttccaggtgggtgtgggacacctgggagaaggtctccaagggagggtgcagccctcttgcccgcacccctccctgcttgcacacttccccatctttgatccttctgagctccacctctggtggctcctcctaggaaaccagctcgtgggctgggaatgggggagagaagggaaaagatccccaagaccccctggggtgggatctgagctcccacctcccttcccacctactgcactttcccccttcccgccttccaaaacctgcttccttcagtttgtaaagtcggtgattatatttttgggggctttccttttattttttaaatgtaaaatttatttatattccgtatttaaagttgtaaaaaaaaataaccacaaaacaaaaccaaatgaatccgccggaggtctgtctgttggcatcgtgcgtgacaattaacctttctgccttggcaggatgtgccgacagcttgcggcgtgttcctctcactctgggagcctcaggcgtgatctcacacactggcgtgcacatacacacacacacacatacatgctcacacatgcgtgcacatacacgcaggcctgcaacttgggggaggcctctgtctggcgggaagaagagacacacaggctactctgttggtcttggtcctggcacagctcctgacacgtggacttgtgcgtgtctctggcagtgacgagagatgggtttctgcag

SEQ ID NO: 166435 - DNA, 1125 bp, Homo sapiens
  Payload ID: 12772
  Gene Symbol: PDGFB
  Gene Name: platelet-derived growth factor beta polypeptide
  Uniprot ID: P01127
  ENST ID: ENST00000381551
  CDS Start-End: 38-718
agagagagagagagactgactgagcaggaatggtgagatgtttatcatgggcctcggggaccccattcccgaggagctttatgagatgctgagtgaccactcgatccgctcctttgatgatctccaacgcctgctgcacggagaccccggagaggaagatggggccgagttggacctgaacatgacccgctcccactctggaggcgagctggagagcttggctcgtggaagaaggagcctgggttccctgaccattgctgagccggccatgatcgccgagtgcaagacgcgcaccgaggtgttcgagatctcccggcgcctcatagaccgcaccaacgccaacttcctggtgtggccgccctgtgtggaggtgcagcgctgctccggctgctgcaacaaccgcaacgtgcagtgccgccccacccaggtgcagctgcgacctgtccaggtgagaaagatcgagattgtgcggaagaagccaatctttaagaaggccacggtgacgctggaagaccacctggcatgcaagtgtgagacagtggcagctgcacggcctgtgacccgaagcccggggggttcccaggagcagcgagccaaaacgccccaaactcgggtgaccattcggacggtgcgagtccgccggccccccaagggcaagcaccggaaattcaagcacacgcatgacaagacggcactgaaggagacccttggagcctaggggcatcggcaggagagtgtgtgggcagggttatttaatatggtatttgctgtattgcccccatggggtccttggagtgataatattgtttccctcgtccgtctgtctcgatgcctgattcggacggccaatggtgcttcccccacccctccacgtgtccgtccacccttccatcagcgggtctcctcccagcggcctccggcgtcttgcccagcagctcaagaagaaaaagaaggactgaactccatcgccatcttcttcccttaactccaagaacttgggataagagtgtgagagagactgatggggtcgctctttgggggaaacgggctccttcccctgcacctggcctgggccacacctgagcgctgtggactgtcctgaggagccctgaggacctctcagca

SEQ ID NO: 166436 - DNA, 554 bp, Homo sapiens
  Payload ID: 12772
  Gene Symbol: PDGFB
  Gene Name: platelet-derived growth factor beta polypeptide
  ENST ID: ENST00000455790
  CDS Start-End: 122-554
aaaaacatctgagggagcgctggggtcggagccgtccccacccctcccagcctcacgtagccgtgagttggcaagtctacccggaatccagggggaccccattcccgaggagctttatgagatgctgagtgaccactcgatccgctcctttgatgatctccaacgcctgctgcacggagaccccggagaggaagatggggccgagttggacctgaacatgacccgctcccactctggaggcgagctggagagcttggctcgtggaagaaggagcctgggttccctgaccattgctgagccggccatgatcgccgagtgcaagacgcgcaccgaggtgttcgagatctcccggcgcctcatagaccgcaccaacgccaacttcctggtgtggccgccctgtgtggaggtgcagcgctgctccggctgctgcaacaaccgcaacgtgcagtgccgccccacccaggtgcagctgcgacctgtccaggtgagaaagatcgagattgtgcggaagaagccaatctttaagaaggccacggtgacgctggaagaccacc

SEQ ID NO: 166437 - DNA, 556 bp, Homo sapiens
  Payload ID: 12772
  Gene Symbol: PDGFB
  Gene Name: platelet-derived growth factor beta polypeptide
  ENST ID: ENST00000440375
  CDS Start-End: 149-556
acacttcttccgggaaagagtgaagggccccactgccctttgccatccagcttcctctggctttgctaatggccctagggggcaggagaccaactgctggaatcccagagccctggagggggaccccattcccgaggagctttatgagatgctgagtgaccactcgatccgctcctttgatgatctccaacgcctgctgcacggagaccccggagaggaagatggggccgagttggacctgaacatgacccgctcccactctggaggcgagctggagagcttggctcgtggaagaaggagcctgggttccctgaccattgctgagccggccatgatcgccgagtgcaagacgcgcaccgaggtgttcgagatctcccggcgcctcatagaccgcaccaacgccaacttcctggtgtggccgccctgtgtggaggtgcagcgctgctccggctgctgcaacaaccgcaacgtgcagtgccgccccacccaggtgcagctgcgacctgtccaggtgagaaagatcgagattgtgcggaagaagccaatctttaagaag

SEQ ID NO: 166438 - DNA, 6576 bp, Homo sapiens
  Payload ID: 12773
  Gene Symbol: PDGFRA
  Gene Name: platelet-derived growth factor receptor, alpha polypeptide
  Uniprot ID: P16234
  ENST ID: ENST00000257290
  CDS Start-End: 332-3601
aagagcaaaaagcgaaggcgcaatctggacactgggagattcggagcgcagggagtttgagagaaacttttattttgaagagaccaaggttgagggggggcttatttcctgacagctatttacttagagcaaatgattagttttagaaggatggactataacattgaatcaattacaaaacgcggtttttgagcccattactgttggagctacagggagagaaacagaggaggagactgcaagagatcattggaggccgtgggcacgctctttactccatgtgtgggacattcattgcggaataacatcggaggagaagtttcccagagctatggggacttcccatccggcgttcctggtcttaggctgtcttctcacagggctgagcctaatcctctgccagctttcattaccctctatccttccaaatgaaaatgaaaaggttgtgcagctgaattcatccttttctctgagatgctttggggagagtgaagtgagctggcagtaccccatgtctgaagaagagagctccgatgtggaaatcagaaatgaagaaaacaacagcggcctttttgtgacggtcttggaagtgagcagtgcctcggcggcccacacagggttgtacacttgctattacaaccacactcagacagaagagaatgagcttgaaggcaggcacatttacatctatgtgccagacccagatgtagcctttgtacctctaggaatgacggattatttagtcatcgtggaggatgatgattctgccattataccttgtcgcacaactgatcccgagactcctgtaaccttacacaacagtgagggggtggtacctgcctcctacgacagcagacagggctttaatgggaccttcactgtagggccctatatctgtgaggccaccgtcaaaggaaagaagttccagaccatcccatttaatgtttatgctttaaaagcaacatcagagctggatctagaaatggaagctcttaaaaccgtgtataagtcaggggaaacgattgtggtcacctgtgctgtttttaacaatgaggtggttgaccttcaatggacttaccctggagaagtgaaaggcaaaggcatcacaatgctggaagaaatcaaagtcccatccatcaaattggtgtacactttgacggtccccgaggccacggtgaaagacagtggagattacgaatgtgctgcccgccaggctaccagggaggtcaaagaaatgaagaaagtcactatttctgtccatgagaaaggtttcattgaaatcaaacccaccttcagccagttggaagctgtcaacctgcatgaagtcaaacattttgttgtagaggtgcgggcctacccacctcccaggatatcctggctgaaaaacaatctgactctgattgaaaatctcactgagatcaccactgatgtggaaaagattcaggaaataaggtatcgaagcaaattaaagctgatccgtgctaaggaagaagacagtggccattatactattgtagctcaaaatgaagatgctgtgaagagctatacttttgaactgttaactcaagttccttcatccattctggacttggtcgatgatcaccatggctcaactgggggacagacggtgaggtgcacagctgaaggcacgccgcttcctgatattgagtggatgatatgcaaagatattaagaaatgtaataatgaaacttcctggactattttggccaacaatgtctcaaacatcatcacggagatccactcccgagacaggagtaccgtggagggccgtgtgactttcgccaaagtggaggagaccatcgccgtgcgatgcctggctaagaatctccttggagctgagaaccgagagctgaagctggtggctcccaccctgcgttctgaactcacggtggctgctgcagtcctggtgctgttggtgattgtgatcatctcacttattgtcctggttgtcatttggaaacagaaaccgaggtatgaaattcgctggagggtcattgaatcaatcagcccagatggacatgaatatatttatgtggacccgatgcagctgccttatgactcaagatgggagtttccaagagatggactagtgcttggtcgggtcttggggtctggagcgtttgggaaggtggttgaaggaacagcctatggattaagccggtcccaacctgtcatgaaagttgcagtgaagatgctaaaacccacggccagatccagtgaaaaacaagctctcatgtctgaactgaagataatgactcacctggggccacatttgaacattgtaaacttgctgggagcctgcaccaagtcaggccccatttacatcatcacagagtattgcttctatggagatttggtcaactatttgcataagaatagggatagcttcctgagccaccacccagagaagccaaagaaagagctggatatctttggattgaaccctgctgatgaaagcacacggagctatgttattttatcttttgaaaacaatggtgactacatggacatgaagcaggctgatactacacagtatgtccccatgctagaaaggaaagaggtttctaaatattccgacatccagagatcactctatgatcgtccagcctcatataagaagaaatctatgttagactcagaagtcaaaaacctcctttcagatgataactcagaaggccttactttattggatttgttgagcttcacctatcaagttgcccgaggaatggagtttttggcttcaaaaaattgtgtccaccgtgatctggctgctcgcaacgtcctcctggcacaaggaaaaattgtgaagatctgtgactttggcctggccagagacatcatgcatgattcgaactatgtgtcgaaaggcagtacctttctgcccgtgaagtggatggctcctgagagcatctttgacaacctctacaccacactgagtgatgtctggtcttatggcattctgctctgggagatcttttcccttggtggcaccccttaccccggcatgatggtggattctactttctacaataagatcaagagtgggtaccggatggccaagcctgaccacgctaccagtgaagtctacgagatcatggtgaaatgctggaacagtgagccggagaagagaccctccttttaccacctgagtgagattgtggagaatctgctgcctggacaatataaaaagagttatgaaaaaattcacctggacttcctgaagagtgaccatcctgctgtggcacgcatgcgtgtggactcagacaatgcatacattggtgtcacctacaaaaacgaggaagacaagctgaaggactgggagggtggtctggatgagcagagactgagcgctgacagtggctacatcattcctctgcctgacattgaccctgtccctgaggaggaggacctgggcaagaggaacagacacagctcgcagacctctgaagagagtgccattgagacgggttccagcagttccaccttcatcaagagagaggacgagaccattgaagacatcgacatgatggatgacatcggcatagactcttcagacctggtggaagacagcttcctgtaactggcggattcgaggggttccttccacttctggggccacctctggatcccgttcagaaaaccactttattgcaatgcagaggttgagaggaggacttggttgatgtttaaagagaagttcccagccaagggcctcggggagcgttctaaatatgaatgaatgggatattttgaaatgaactttgtcagtgttgcctcttgcaatgcctcagtagcatctcagtggtgtgtgaagtttggagatagatggataagggaataataggccacagaaggtgaactttgtgcttcaaggacattggtgagagtccaacagacacaatttatactgcgacagaacttcagcattgtaattatgtaaataactctaaccaaggctgtgtttagattgtattaactatcttctttggacttctgaagagaccactcaatccatccatgtacttccctcttgaaacctgatgtcagctgctgttgaactttttaaagaagtgcatgaaaaaccatttttgaaccttaaaaggtactggtactatagcattttgctatcttttttagtgttaaagagataaagaataataattaaccaaccttgtttaatagatttgggtcatttagaagcctgacaactcattttcatattgtaatctatgtttataatactactactgttatcagtaatgctaaatgtgtaataatgtaacatgatttccctccagagaaagcacaatttaaaacaatccttactaagtaggtgatgagtttgacagtttttgacatttatattaaataacatgtttctctataaagtatggtaatagctttagtgaattaaatttagttgagcatagagaacaaagtaaaagtagtgttgtccaggaagtcagaatttttaactgtactgaataggttccccaatccatcgtattaaaaaacaattaactgccctctgaaataatgggattagaaacaaacaaaactcttaagtcctaaaagttctcaatgtagaggcataaacctgtgctgaacataacttctcatgtatattacccaatggaaaatataatgatcagcaaaaagactggatttgcagaagttttttttttttttttcttcatgcctgatgaaagctttggcgaccccaatatatgtattttttgaatctatgaacctgaaaagggtcagaaggatgcccagacatcagcctccttctttcaccccttaccccaaagagaaagagtttgaaactcgagaccataaagatattctttagtggaggctggatgtgcattagcctggatcctcagttctcaaatgtgtgtggcagccaggatgactagatcctgggtttccatccttgagattctgaagtatgaagtctgagggaaaccagagtctgtatttttctaaactccctggctgttctgatcggccagttttcggaaacactgacttaggtttcaggaagttgccatgggaaacaaataatttgaactttggaacagggttggcattcaaccacgcaggaagcctactatttaaatccttggcttcaggttagtgacatttaatgccatctagctagcaattgcgaccttaatttaactttccagtcttagctgaggctgagaaagctaaagtttggttttgacaggttttccaaaagtaaagatgctacttcccactgtatgggggagattgaactttccccgtctcccgtcttctgcctcccactccataccccgccaaggaaaggcatgtacaaaaattatgcaattcagtgttccaagtctctgtgtaaccagctcagtgttttggtggaaaaaacattttaagttttactgataatttgaggttagatgggaggatgaattgtcacatctatccacactgtcaaacaggttggtgtgggttcattggcattctttgcaatactgcttaattgctgataccatatgaatgaaacatgggctgtgattactgcaatcactgtgctatcggcagatgatgctttggaagatgcagaagcaataataaagtacttgactacctactggtgtaatctcaatgcaagccccaactttcttatccaactttttcatagtaagtgcgaagactgagccagattggccaattaaaaacgaaaacctgactaggttctgtagagccaattagacttgaaatacgtttgtgtttctagaatcacagctcaagcattctgtttatcgctcactctcccttgtacagccttattttgttggtgctttgcattttgatattgctgtgagccttgcatgacatcatgaggccggatgaaacttctcagtccagcagtttccagtcctaacaaatgctcccacctgaatttgtatatgactgcatttgtgtgtgtgtgtgtgttttcagcaaattccagatttgtttccttttggcctcctgcaaagtctccagaagaaaatttgccaatctttcctactttctatttttatgatgacaatcaaagccggcctgagaaacactatttgtgactttttaaacgattagtgatgtccttaaaatgtggtctgccaatctgtacaaaatggtcctatttttgtgaagagggacataagataaaatgatgttatacatcaatatgtatatatgtatttctatatagacttggagaatactgccaaaacatttatgacaagctgtatcactgccttcgtttatatttttttaactgtgataatccccacaggcacattaactgttgcacttttgaatgtccaaaatttatattttagaaataataaaaagaaagatacttacatgttcccaaaacaatggtgtggtgaatgtgtgagaaaaactaacttgatagggtctaccaatacaaaatgtattacgaatgcccctgttcatgtttttgttttaaaacgtgtaaatgaagatctttatatttcaataaatgatatataatttaaagttata

SEQ ID NO: 166439 - DNA, 2991 bp, Homo sapiens
  Payload ID: 12773
  Gene Symbol: PDGFRA
  Gene Name: platelet-derived growth factor receptor, alpha polypeptide
  Uniprot ID: P16234
  ENST ID: ENST00000509490
  CDS Start-End: 118-2349
gggagagaaacagaggaggagactgcaagagatcattggaggccgtgggcacgctctttactccatgtgtgggacattcattgcggaataacatcggaggagaagtttcccagagctatggggacttcccatccggcgttcctggtcttaggctgtcttctcacagggctgagcctaatcctctgccagctttcattaccctctatccttccaaatgaaaatgaaaaggttgtgcagctgaattcatccttttctctgagatgctttggggagagtgaagtgagctggcagtaccccatgtctgaagaagagagctccgatgtggaaatcagaaatgaagaaaacaacagcggcctttttgtgacggtcttggaagtgagcagtgcctcggcggcccacacagggttgtacacttgctattacaaccacactcagacagaagagaatgagcttgaaggcaggcacatttacatctatgtgccagacccagatgtagcctttgtacctctaggaatgacggattatttagtcatcgtggaggatgatgattctgccattataccttgtcgcacaactgatcccgagactcctgtaaccttacacaacagtgagggggtggtacctgcctcctacgacagcagacagggctttaatgggaccttcactgtagggccctatatctgtgaggccaccgtcaaaggaaagaagttccagaccatcccatttaatgtttatgctttaaaagcaacatcagagctggatctagaaatggaagctcttaaaaccgtgtataagtcaggggaaacgattgtggtcacctgtgctgtttttaacaatgaggtggttgaccttcaatggacttaccctggagaagtgaaaggcaaaggcatcacaatgctggaagaaatcaaagtcccatccatcaaattggtgtacactttgacggtccccgaggccacggtgaaagacagtggagattacgaatgtgctgcccgccaggctaccagggaggtcaaagaaatgaagaaagtcactatttctgtccatgagaaaggtttcattgaaatcaaacccaccttcagccagttggaagctgtcaacctgcatgaagtcaaacattttgttgtagaggtgcgggcctacccacctcccaggatatcctggctgaaaaacaatctgactctgattgaaaatctcactgagatcaccactgatgtggaaaagattcaggaaataaggtatcgaagcaaattaaagctgatccgtgctaaggaagaagacagtggccattatactattgtagctcaaaatgaagatgctgtgaagagctatacttttgaactgttaactcaagttccttcatccattctggacttggtcgatgatcaccatggctcaactgggggacagacggtgaggtgcacagctgaaggcacgccgcttcctgatattgagtggatgatatgcaaagatattaagaaatgtaataatgaaacttcctggactattttggccaacaatgtctcaaacatcatcacggagatccactcccgagacaggagtaccgtggagggccgtgtgactttcgccaaagtggaggagaccatcgccgtgcgatgcctggctaagaatctccttggagctgagaaccgagagctgaagctggtggctcccaccctgcgttctgaactcacggtggctgctgcagtcctggtgctgttggtgattgtgatcatctcacttattgtcctggttgtcatttggaaacagaaaccgaggtatgaaattcgctggagggtcattgaatcaatcagcccagatggacatgaatatatttatgtggacccgatgcagctgccttatgactcaagatgggagtttccaagagatggactagtgcttggtcgggtcttggggtctggagcgtttgggaaggtggttgaaggaacagcctatggattaagccggtcccaacctgtcatgaaagttgcagtgaagatgctaaaacccacggccagatccagtgaaaaacaagctctcatgtctgaactgaagataatgactcacctggggccacatttgaacattgtaaacttgctgggagcctgcaccaagtcaggccccatttacatcatcacagagtattgcttctatggagatttggtcaactatttgcataagaatagggatagcttcctgagccaccacccagagaagccaaagaaagagctggatatctttggattgaaccctgctgatgaaagcacacggagctctggccagggatgcttgagttctggaaccttgcaagaactgtctgtggatctccaagctcgaggtccttgctgaacctggacctataaatgacgtcaatgatagtgatccctactgcagaaatctacaagtggctataaagaactctgtagctatgttattttatcttttgaaaacaatggtgactacatggacatgaagcaggctgatactacacagtatgtccccatgctagaaaggaaagaggtttctaaatattccgacatccagagatcactctatgatcgtccagcctcatataagaagaaatctatgttaggctgggctggtggagttggcacgagatgtcagaggaacctgagtcatgctcaggcccaagccctgttggcaggcagaccactgctttctggccttccgtgactatctgaaaaaaatcgtgaatggctagagctactcttcacttgctgaacattttcaaaaagaattgagaacttctggattaaattgccttcttcctcgaaaaccctgggacccttccagatgggactaactggggaaagtggacaagttacaaacaaagaaactcaaaggaaagtcattggcactgatctctaagatgctatcacatgtgattggtggttgattttattaacaaattataagcaaagtactacaaaggtggctttaaaaagaaaataaagcaattcacagaaacta

SEQ ID NO: 166440 - DNA, 573 bp, Homo sapiens
  Payload ID: 12773
  Gene Symbol: PDGFRA
  Gene Name: platelet-derived growth factor receptor, alpha polypeptide
  ENST ID: ENST00000512522
  CDS Start-End: 111-573
gaggttggagccaagatggctgaataggaacagctccggtctacagctcccagcatcagcgatgcagaagatgggtgatttctgcatttccatctgagtttcccagagctatggggacttcccatccggcgttcctggtcttaggctgtcttctcacagggctgagcctaatcctctgccagctttcattaccctctatccttccaaatgaaaatgaaaaggttgtgcagctgaattcatccttttctctgagatgctttggggagagtgaagtgagctggcagtaccccatgtctgaagaagagagctccgatgtggaaatcagaaatgaagaaaacaacagcggcctttttgtgacggtcttggaagtgagcagtgcctcggcggcccacacagggttgtacacttgctattacaaccacactcagacagaagagaatgagcttgaaggcaggcacatttacatctatgtgccagacccagatgtagcctttgtacctctaggaatgacggattatttagtcatcgtggaggatgatgattctgccattataccttgtcgcacaactgatc

SEQ ID NO: 166441 - DNA, 580 bp, Homo sapiens
  Payload ID: 12773
  Gene Symbol: PDGFRA
  Gene Name: platelet-derived growth factor receptor, alpha polypeptide
  ENST ID: ENST00000512143
  CDS Start-End: 139-580
attactgttggagctacagggagagaaacagaggaggagactgcaagagatcattggaggccgtgggcacgctctttactccatgtgtgggacattcattgcggaataacatcggaggagaagagacggggttttgccatgctgcctagactggtcttgaactcctgggctcaaatgatctgcctgcctcagcttcccaagtttcccagagctatggggacttcccatccggcgttcctggtcttaggctgtcttctcacagggctgagcctaatcctctgccagctttcattaccctctatccttccaaatgaaaatgaaaaggttgtgcagctgaattcatccttttctctgagatgctttggggagagtgaagtgagctggcagtaccccatgtctgaagaagagagctccgatgtggaaatcagaaatgaagaaaacaacagcggcctttttgtgacggtcttggaagtgagcagtgcctcggcggcccacacagggttgtacacttgctattacaaccacactcagacagaagagaatgagcttgaaggcaggcacatttacatctatgtgccag

SEQ ID NO: 166442 - DNA, 2202 bp, Homo sapiens
  Payload ID: 12773
  Gene Symbol: PDGFRA
  Gene Name: platelet-derived growth factor receptor, alpha polypeptide
  Uniprot ID: P16234
  ENST ID: ENST00000508170
  CDS Start-End: 149-805
ggtttttgagcccattactgttggagctacagggagagaaacagaggaggagactgcaagagatcattggaggccgtgggcacgctctttactccatgtgtgggacattcattgcggaataacatcggaggagaagtttcccagagctatggggacttcccatccggcgttcctggtcttaggctgtcttctcacagggctgagcctaatcctctgccagctttcattaccctctatccttccaaatgaaaatgaaaaggttgtgcagctgaattcatccttttctctgagatgctttggggagagtgaagtgagctggcagtaccccatgtctgaagaagagagctccgatgtggaaatcagaaatgaagaaaacaacagcggcctttttgtgacggtcttggaagtgagcagtgcctcggcggcccacacagggttgtacacttgctattacaaccacactcagacagaagagaatgagcttgaaggcaggcacatttacatctatgtgccagacccagatgtagcctttgtacctctaggaatgacggattatttagtcatcgtggaggatgatgattctgccattataccttgtcgcacaactgatcccgagactcctgtaaccttacacaacagtgagggggtggtacctgcctcctacgacagcagacagggctttaatgggaccttcactgtagggccctatatctgtgaggccaccgtcaaaggaaagaagttccagaccatcccatttaatgtttatgctttaaaaggtacttgtatcatctccttccttctttaaataagagtaacaggcaaaatcataaggtgcgtgtaggatttttttttttttttaaatcatcatcactggtgatcctaaattctgatttggggatttaggaccccagctaatacaatgtctgtggctataataataagcttaaaattactaaaggccaaagcttgattacccatgcaagatttcatgtttcatcagttgacttcaaaatactgtaaggaattcttttcttacataagcctcttactttcattcacattcctgactatggcggccctaaaaacaaacatacacccagggggttagatgcctagattaattttagtaacttaagaaaagtgatttgaagaaagtagtttagacttcaaccctttgatgtccacagttagtacgcttggggaagtataatacatgctgaggtcaacagatatttcctgaacactatattacatggaggaatgggtagcagcaagagtacactgttttaaaatcagagcacagctaattttgtgccaggcactgtgctaggttctgggaaagtactgagaataactgaggagcagagtggaagagaagaagagaagaaacaattggatagaaacaaagtgtctagagcagtgtggatcagcaaatgttggttgattaaatgaataaatttattagtcaaggagattgtggacgagtataaccataactaacccactgctgaggaatgcggtgttctgtttgattggaatttatttttattgttattattttgtaattctgtattataactatatgcctaattgttgtacaccatctcacaatcaagccttgtgagattttccaaattttatcttgatcaaactggtttgcaaattatttttcagggttttcttaaaaaaaaaaaaaaaaacccaaactttataagatcctggctatcctgtggatttttaggcccttgtatttgttcttttttatagcaacatcagagctggatctagaaatggaagctcttaaaaccgtgtataagtcaggggaaacgattgtggtcacctgtgctgtttttaacaatgaggtggttgaccttcaatggacttaccctggagaagtggtaggtaccctcaaaacgtgcaatggcttggagcagagcaacagggctcagaagacctgcatttgagctcggtctgtcactgatgggcacatcactgagtttctctagaccttagcttcccacctctgggatgaacacatttgattaaatggcctttaggactccttgatcaatgggagagtttgaaatgatagttcctggaccaggcccttcagaatacataaagagtgtgccgtaagccttctttttcagaagtcagacagaaataggaaggttctctggctacaagatatcaaccaaaaaa

SEQ ID NO: 166443 - DNA, 586 bp, Homo sapiens
  Payload ID: 12773
  Gene Symbol: PDGFRA
  Gene Name: platelet-derived growth factor receptor, alpha polypeptide
  ENST ID: ENST00000503856
  CDS Start-End: 110-586
gacaggttttaaatgagtgttttcattcctcgcctgcggtttggcgggacagcgctgcagcccatggtgtggagcgcggctgggggaccagggggagtttcccagagctatggggacttcccatccggcgttcctggtcttaggctgtcttctcacagggctgagcctaatcctctgccagctttcattaccctctatccttccaaatgaaaatgaaaaggttgtgcagctgaattcatccttttctctgagatgctttggggagagtgaagtgagctggcagtaccccatgtctgaagaagagagctccgatgtggaaatcagaaatgaagaaaacaacagcggcctttttgtgacggtcttggaagtgagcagtgcctcggcggcccacacagggttgtacacttgctattacaaccacactcagacagaagagaatgagcttgaaggcaggcacatttacatctatgtgccagacccagatgtagcctttgtacctctaggaatgacggattatttagtcatcgtggaggatgatgattctgccattataccttgtcgcacaactgatcccgagactcctgta

SEQ ID NO: 166444 - DNA, 771 bp, Homo sapiens
  Payload ID: 12773
  Gene Symbol: PDGFRA
  Gene Name: platelet-derived growth factor receptor, alpha polypeptide
  ENST ID: ENST00000504461
  CDS Start-End: 298-771
catttggccctgagtgaagaagtcgtcgtcgcctcgcattccagcaactgggatttgaggaatttcgaaccgcacaccaaggggccctcattgtgctccgtggcccccgcccccgcctgtcttcccgcgccccctcctcggtggaatcatttctgcattgcccgggggctctgctttcgctcagttctggccgcaggcaggaagagaggaaaggtctccaggaaggtgccgaacttcttgtgaggaagttagggacgacttggaactggggaaacttgtttgcagtttcccagagctatggggacttcccatccggcgttcctggtcttaggctgtcttctcacagggctgagcctaatcctctgccagctttcattaccctctatccttccaaatgaaaatgaaaaggttgtgcagctgaattcatccttttctctgagatgctttggggagagtgaagtgagctggcagtaccccatgtctgaagaagagagctccgatgtggaaatcagaaatgaagaaaacaacagcggcctttttgtgacggtcttggaagtgagcagtgcctcggcggcccacacagggttgtacacttgctattacaaccacactcagacagaagagaatgagcttgaaggcaggcacatttacatctatgtgccagacccagatgtagcctttgtacctctaggaatgacggattatttagtcatcgtggaggatgatgattctgccattataccttgtcgcacaactgatcccgagactcct

SEQ ID NO: 166445 - DNA, 5717 bp, Homo sapiens
  Payload ID: 12774
  Gene Symbol: PDGFRB
  Gene Name: platelet-derived growth factor receptor, beta polypeptide
  Uniprot ID: P09619
  ENST ID: ENST00000261799
  CDS Start-End: 471-3791
gctcctgaggctgccagcagccagcagtgactgcccgccctatctgggacccaggatcgctctgtgagcaacttggagccagagaggagatcaacaaggaggaggagagagccggcccctcagccctgctgcccagcagcagcctgtgctcgccctgcccaacgcagacagccagacccagggcggcccctctggcggctctgctcctcccgaaggatgcttggggagtgaggcgaagctgggccgctcctctcccctacagcagcccccttcctccatccctctgttctcctgagccttcaggagcctgcaccagtcctgcctgtccttctactcagctgttacccactctgggaccagcagtctttctgataactgggagagggcagtaaggaggacttcctggagggggtgactgtccagagcctggaactgtgcccacaccagaagccatcagcagcaaggacaccatgcggcttccgggtgcgatgccagctctggccctcaaaggcgagctgctgttgctgtctctcctgttacttctggaaccacagatctctcagggcctggtcgtcacacccccggggccagagcttgtcctcaatgtctccagcaccttcgttctgacctgctcgggttcagctccggtggtgtgggaacggatgtcccaggagcccccacaggaaatggccaaggcccaggatggcaccttctccagcgtgctcacactgaccaacctcactgggctagacacgggagaatacttttgcacccacaatgactcccgtggactggagaccgatgagcggaaacggctctacatctttgtgccagatcccaccgtgggcttcctccctaatgatgccgaggaactattcatctttctcacggaaataactgagatcaccattccatgccgagtaacagacccacagctggtggtgacactgcacgagaagaaaggggacgttgcactgcctgtcccctatgatcaccaacgtggcttttctggtatctttgaggacagaagctacatctgcaaaaccaccattggggacagggaggtggattctgatgcctactatgtctacagactccaggtgtcatccatcaacgtctctgtgaacgcagtgcagactgtggtccgccagggtgagaacatcaccctcatgtgcattgtgatcgggaatgaggtggtcaacttcgagtggacatacccccgcaaagaaagtgggcggctggtggagccggtgactgacttcctcttggatatgccttaccacatccgctccatcctgcacatccccagtgccgagttagaagactcggggacctacacctgcaatgtgacggagagtgtgaatgaccatcaggatgaaaaggccatcaacatcaccgtggttgagagcggctacgtgcggctcctgggagaggtgggcacactacaatttgctgagctgcatcggagccggacactgcaggtagtgttcgaggcctacccaccgcccactgtcctgtggttcaaagacaaccgcaccctgggcgactccagcgctggcgaaatcgccctgtccacgcgcaacgtgtcggagacccggtatgtgtcagagctgacactggttcgcgtgaaggtggcagaggctggccactacaccatgcgggccttccatgaggatgctgaggtccagctctccttccagctacagatcaatgtccctgtccgagtgctggagctaagtgagagccaccctgacagtggggaacagacagtccgctgtcgtggccggggcatgccccagccgaacatcatctggtctgcctgcagagacctcaaaaggtgtccacgtgagctgccgcccacgctgctggggaacagttccgaagaggagagccagctggagactaacgtgacgtactgggaggaggagcaggagtttgaggtggtgagcacactgcgtctgcagcacgtggatcggccactgtcggtgcgctgcacgctgcgcaacgctgtgggccaggacacgcaggaggtcatcgtggtgccacactccttgccctttaaggtggtggtgatctcagccatcctggccctggtggtgctcaccatcatctcccttatcatcctcatcatgctttggcagaagaagccacgttacgagatccgatggaaggtgattgagtctgtgagctctgacggccatgagtacatctacgtggaccccatgcagctgccctatgactccacgtgggagctgccgcgggaccagcttgtgctgggacgcaccctcggctctggggcctttgggcaggtggtggaggccacggctcatggcctgagccattctcaggccacgatgaaagtggccgtcaagatgcttaaatccacagcccgcagcagtgagaagcaagcccttatgtcggagctgaagatcatgagtcaccttgggccccacctgaacgtggtcaacctgttgggggcctgcaccaaaggaggacccatctatatcatcactgagtactgccgctacggagacctggtggactacctgcaccgcaacaaacacaccttcctgcagcaccactccgacaagcgccgcccgcccagcgcggagctctacagcaatgctctgcccgttgggctccccctgcccagccatgtgtccttgaccggggagagcgacggtggctacatggacatgagcaaggacgagtcggtggactatgtgcccatgctggacatgaaaggagacgtcaaatatgcagacatcgagtcctccaactacatggccccttacgataactacgttccctctgcccctgagaggacctgccgagcaactttgatcaacgagtctccagtgctaagctacatggacctcgtgggcttcagctaccaggtggccaatggcatggagtttctggcctccaagaactgcgtccacagagacctggcggctaggaacgtgctcatctgtgaaggcaagctggtcaagatctgtgactttggcctggctcgagacatcatgcgggactcgaattacatctccaaaggcagcacctttttgcctttaaagtggatggctccggagagcatcttcaacagcctctacaccaccctgagcgacgtgtggtccttcgggatcctgctctgggagatcttcaccttgggtggcaccccttacccagagctgcccatgaacgagcagttctacaatgccatcaaacggggttaccgcatggcccagcctgcccatgcctccgacgagatctatgagatcatgcagaagtgctgggaagagaagtttgagattcggccccccttctcccagctggtgctgcttctcgagagactgttgggcgaaggttacaaaaagaagtaccagcaggtggatgaggagtttctgaggagtgaccacccagccatccttcggtcccaggcccgcttgcctgggttccatggcctccgatctcccctggacaccagctccgtcctctatactgccgtgcagcccaatgagggtgacaacgactatatcatccccctgcctgaccccaaacccgaggttgctgacgagggcccactggagggttcccccagcctagccagctccaccctgaatgaagtcaacacctcctcaaccatctcctgtgacagccccctggagccccaggacgaaccagagccagagccccagcttgagctccaggtggagccggagccagagctggaacagttgccggattcggggtgccctgcgcctcgggcggaagcagaggatagcttcctgtagggggctggcccctaccctgccctgcctgaagctccccccctgccagcacccagcatctcctggcctggcctgaccgggcttcctgtcagccaggctgcccttatcagctgtccccttctggaagctttctgctcctgacgtgttgtgccccaaaccctggggctggcttaggaggcaagaaaactgcaggggccgtgaccagccctctgcctccagggaggccaactgactctgagccagggttcccccagggaactcagttttcccatatgtaaaatgggaaagttaggcttgatgacccagaatctaggattctctccctggctgacaggtggggagaccgaatccctccctgggaagattcttggagttactgaggtggtaaattaacttttttctgttcagccagctacccctcaaggaatcatagctctctcctcgcacttttatccacccaggagctagggaagagaccctagcctccctggctgctggctgagctagggcctagccttgagcagtgttgcctcatccagaagaaagccagtctcctccctatgatgccagtccctgcgttccctggcccgagctggtctggggccattaggcagcctaattaatgctggaggctgagccaagtacaggacacccccagcctgcagcccttgcccagggcacttggagcacacgcagccatagcaagtgcctgtgtccctgtccttcaggcccatcagtcctggggctttttctttatcaccctcagtcttaatccatccaccagagtctagaaggccagacgggccccgcatctgtgatgagaatgtaaatgtgccagtgtggagtggccacgtgtgtgtgccagtatatggccctggctctgcattggacctgctatgaggctttggaggaatccctcaccctctctgggcctcagtttccccttcaaaaaatgaataagtcggacttattaactctgagtgccttgccagcactaacattctagagtattccaggtggttgcacatttgtccagatgaagcaaggccatataccctaaacttccatcctgggggtcagctgggctcctgggagattccagatcacacatcacactctggggactcaggaaccatgccccttccccaggcccccagcaagtctcaagaacacagctgcacaggccttgacttagagtgacagccggtgtcctggaaagcccccagcagctgccccagggacatgggaagaccacgggacctctttcactacccacgatgacctccgggggtatcctgggcaaaagggacaaagagggcaaatgagatcacctcctgcagcccaccactccagcacctgtgccgaggtctgcgtcgaagacagaatggacagtgaggacagttatgtcttgtaaaagacaagaagcttcagatgggtaccccaagaaggatgtgagaggtgggcgctttggaggtttgcccctcacccaccagctgccccatccctgaggcagcgctccatgggggtatggttttgtcactgcccagacctagcagtgacatctcattgtccccagcccagtgggcattggaggtgccaggggagtcagggttgtagccaagacgcccccgcacggggagggttgggaagggggtgcaggaagctcaacccctctgggcaccaaccctgcattgcaggttggcaccttacttccctgggatccccagagttggtccaaggagggagagtgggttctcaatacggtaccaaagatataatcacctaggtttacaaatatttttaggactcacgttaactcacatttatacagcagaaatgctattttgtatgctgttgagtttttctatctgtgtacttttttttaagggaaagattttaatattaaacctggtgcttctcactcacaga

SEQ ID NO: 166446 - DNA, 822 bp, Homo sapiens
  Payload ID: 12774
  Gene Symbol: PDGFRB
  Gene Name: platelet-derived growth factor receptor, beta polypeptide
  ENST ID: ENST00000517488
  CDS Start-End: 384-822
cgaagctgggccgctcctctcccctacagcagcccccttcctccatccctctgttctcctgagccttcaggagcctgcaccagtcctgcctgtccttctactcagctgttacccactctgggaccagcagtctttctgataactgggagagggcagtaaggaggacttcctggagggggtgactgtccagagcctggaactgtgcccacaccagaagccatcagcagcaaggcgagctgctgttgctgtctctcctgttacttctggaaccacagatctctcagggcctggtcgtcacacccccggggccagagcttgtcctcaatgtctccagcaccttcgttctgacctgctcgggttcagctccggtggtgtgggaacggatgtcccaggagcccccacaggaaatggccaaggcccaggatggcaccttctccagcgtgctcacactgaccaacctcactgggctagacacgggagaatacttttgcacccacaatgactcccgtggactggagaccgatgagcggaaacggctctacatctttgtgccagatcccaccgtgggcttcctccctaatgatgccgaggaactattcatctttctcacggaaataactgagatcaccattccatgccgagtaacagacccacagctggtggtgacactgcacgagaagaaaggggacgttgcactgcctgtcccctatgatcaccaacgtggcttttctggtatctttgaggacagaagctacatctgcaaaaccaccattggggacagggaggtggattctgatgcctactatgtctacagactccagg

SEQ ID NO: 166447 - DNA, 3860 bp, Homo sapiens
  Payload ID: 12774
  Gene Symbol: PDGFRB
  Gene Name: platelet-derived growth factor receptor, beta polypeptide
  ENST ID: ENST00000520579
  CDS Start-End: 470-1189
ctcctgaggctgccagcagccagcagtgactgcccgccctatctgggacccaggatcgctctgtgagcaacttggagccagagaggagatcaacaaggaggaggagagagccggcccctcagccctgctgcccagcagcagcctgtgctcgccctgcccaacgcagacagccagacccagggcggcccctctggcggctctgctcctcccgaaggatgcttggggagtgaggcgaagctgggccgctcctctcccctacagcagcccccttcctccatccctctgttctcctgagccttcaggagcctgcaccagtcctgcctgtccttctactcagctgttacccactctgggaccagcagtctttctgataactgggagagggcagtaaggaggacttcctggagggggtgactgtccagagcctggaactgtgcccacaccagaagccatcagcagcaaggacaccatgcggcttccgggtgcgatgccagctctggccctcaaaggcgagctgctgttgctgtctctcctgttacttctggaaccacagatctctcagggcctggtcgtcacacccccggggccagagcttgtcctcaatgtctccagcaccttcgttctgacctgctcgggttcagctccggtggtgtgggaacggatgtcccaggagcccccacaggaaatggccaaggcccaggatggcaccttctccagcgtgctcacactgaccaacctcactgggctagacacgggagaatacttttgcacccacaatgactcccgtggactggagaccgatgagcggaaacggctctacatctttgtgccagatcccaccgtgggcttcctccctaatgatgccgaggaactattcatctttctcacggaaataactgagatcaccattccatgccgagtaacagacccacagctggtggtgacactgcacgagaagaaaggggacgttgcactgcctgtcccctatgatcaccaacgtggcttttctggtatctttgaggacagaagctacatctgcaaaaccaccattggggacagggaggtggattctgatgcctactatgtctacagactccagggtgagccccctttctggcctgatgctcagcagagtgtcatccatcaacgtctctgtgaacgcagtgcagactgtggtccgccagggtgagaacatcaccctcatgtgcattgtgatcgggaatgaggtggtcaacttcgagtggacatacccccgcaaagaaagtgggcggctggtggagccggtgactgacttcctcttggatatgccttaccacatccgctccatcctgcacatccccagtgccgagttagaagactcggggacctacacctgcaatgtgacggagagtgtgaatgaccatcaggatgaaaaggccatcaacatcaccgtggttgagagcggctacgtgcggctcctgggagaggtgggcacactacaatttgctgagctgcatcggagccggacactgcaggtagtgttcgaggcctacccaccgcccactgtcctgtggttcaaagacaaccgcaccctgggcgactccagcgctggcgaaatcgccctgtccacgcgcaacgtgtcggagacccggtatgtgtcagagctgacactggttcgcgtgaaggtggcagaggctggccactacaccatgcgggccttccatgaggatgctgaggtccagctctccttccagctacagatcaatgtccctgtccgagtgctggagctaagtgagagccaccctgacagtggggaacagacagtccgctgtcgtggccggggcatgccccagccgaacatcatctggtctgcctgcagagacctcaaaaggtgtccacgtgagctgccgcccacgctgctggggaacagttccgaagaggagagccagctggagactaacgtgacgtactgggaggaggagcaggagtttgaggtggtgagcacactgcgtctgcagcacgtggatcggccactgtcggtgcgctgcacgctgcgcaacgctgtgggccaggacacgcaggaggtcatcgtggtgccacactccttgccctttaaggtggtggtgatctcagccatcctggccctggtggtgctcaccatcatctcccttatcatcctcatcatgctttggcagaagaagccacgttacgagatccgatggaaggtgattgagtctgtgagctctgacggccatgagtacatctacgtggaccccatgcagctgccctatgactccacgtgggagctgccgcgggaccagcttgtgctgggacgcaccctcggctctggggcctttgggcaggtggtggaggccacggctcatggcctgagccattctcaggccacgatgaaagtggccgtcaagatgcttaaatccacagcccgcagcagtgagaagcaagcccttatgtcggagctgaagatcatgagtcaccttgggccccacctgaacgtggtcaacctgttgggggcctgcaccaaaggaggacccatctatatcatcactgagtactgccgctacggagacctggtggactacctgcaccgcaacaaacacaccttcctgcagcaccactccgacaagcgccgcccgcccagcgcggagctctacagcaatgctctgcccgttgggctccccctgcccagccatgtgtccttgaccggggagagcgacggtggctacatggacatgagcaaggacgagtcggtggactatgtgcccatgctggacatgaaaggagacgtcaaatatgcagacatcgagtcctccaactacatggccccttacgataactacgttccctctgcccctgagaggacctgccgagcaactttgatcaacgagtctccagtgctaagctacatggacctcgtgggcttcagctaccaggtggccaatggcatggagtttctggcctccaagaactgcgtccacagagacctggcggctaggaacgtgctcatctgtgaaggcaagctggtcaagatctgtgactttggcctggctcgagacatcatgcgggactcgaattacatctccaaaggcagcacctttttgcctttaaagtggatggctccggagagcatcttcaacagcctctacaccaccctgagcgacgtgtggtccttcgggatcctgctctgggagatcttcaccttgggtggcaccccttacccagagctgcccatgaacgagcagttctacaatgccatcaaacggggttaccgcatggcccagcctgcccatgcctccgacgagatctatgagatcatgcagaagtgctgggaagagaagtttgagattcggccccccttctcccagctggtgctgcttctcgagagactgttgggcgaaggttacaaaaagaagtaccagcaggtggatgaggagtttctgaggagtgaccacccagccatccttcggtcccaggcccgcttgcctgggttccatggcctccgatctcccctggacaccagctccgtcctctatactgccgtgcagcccaatgagggtgacaacgactatatcatccccctgcctgaccccaaacccgaggttgctgacgagggcccactggagggttcccccagcctagccagctccaccctgaatgaagtcaacacctcctcaaccatctcctgtgacagccccctggagccccaggacgaaccagagccagagccccagcttgagctccaggtggagccggagccagagctggaacagttgccggattcggggtgccctgcgcctcgggcggaagcagaggatagcttcctgtagggggctggcccctaccctgccctgcctgaagctccc

SEQ ID NO: 166448 - DNA, 568 bp, Homo sapiens
  Payload ID: 12774
  Gene Symbol: PDGFRB
  Gene Name: platelet-derived growth factor receptor, beta polypeptide
  ENST ID: ENST00000517957
  CDS Start-End: 45-568
attggaactgtcacccggaggacaggctgtcagagctggacaccatgcggcttccgggtgcgatgccagctctggccctcaaaggcgagctgctgttgctgtctctcctgttacttctggaaccacagatctctcagggcctggtcgtcacacccccggggccagagcttgtcctcaatgtctccagcaccttcgttctgacctgctcgggttcagctccggtggtgtgggaacggatgtcccaggagcccccacaggaaatggccaaggcccaggatggcaccttctccagcgtgctcacactgaccaacctcactgggctagacacgggagaatacttttgcacccacaatgactcccgtggactggagaccgatgagcggaaacggctctacatctttgtgccagatcccaccgtgggcttcctccctaatgatgccgaggaactattcatctttctcacggaaataactgagatcaccattccatgccgagtaacagacccacagctggtggtgacactgcacgagaagaaaggggacgttgcactgcctgtcccctatgatca

SEQ ID NO: 166449 - DNA, 1901 bp, Homo sapiens
  Payload ID: 12775
  Gene Symbol: PDGFRL
  Gene Name: platelet-derived growth factor receptor-like
  Uniprot ID: Q15198
  ENST ID: ENST00000251630
  CDS Start-End: 442-1569
acttctgccttgttatcagaggagcgaggatgtggcctgtgtgccgcctaatcatgcctagaactgtctgcacctgctgatcttttgcttctgcgaactggctgcacctgctgttctcctgctcataccctagcccgtgcttaccctaattccctgttctcctgcctcaccaccagaggcccgggttgtctgcacagtctcattttccacgttattcctgtaatgaacccgtcctcccacccccaccagcagttacagggctgggtgcggagaccaactctggccagacacagaggagcagcaagaacccggggcaacggtcctaaaccgaatcctcccgcttcggcgtcccaggagcccgcccctcgcccgccgcctcccctgcgtccccgccccgcgcagccgccgcgctcctgcgctccgaggtccgaggttcccgagatgaaggtctggctgctgcttggtcttctgctggtgcacgaagcgctggaggatgttactggccaacaccttcccaagaacaagcgtccaaaagaaccaggagagaatagaatcaaacctaccaacaagaaggtgaagcccaaaattcctaaaatgaaggacagggactcagccaattcagcaccaaagacgcagtctatcatgatgcaagtgctggataaaggtcgcttccagaaacccgccgctaccctgagtctgctggcggggcaaactgtagagcttcgatgtaaagggagtagaattgggtggagctaccctgcgtatctggacacctttaaggattctcgcctcagcgtcaagcagaatgagcgctacggccagttgactctggtcaactccacctcggcagacacaggtgaattcagctgctgggtgcagctctgcagcggctacatctgcaggaaggacgaggccaaaacgggctccacctacatcttttttacagagaaaggagaactctttgtaccttctcccagctacttcgatgttgtctacttgaacccggacagacaggctgtggttccttgtcgggtgaccgtgctgtcggccaaagtcacgctccacagggaattcccagccaaggagatcccagccaatggaacggacattgtttatgacatgaagcggggctttgtgtatctgcaacctcattccgagcaccagggtgtggtttactgcagggcggaggccgggggcagatctcagatctccgtcaagtaccagctgctctatgtggcggttcccagtggccctccctcaacaaccatcttggcttcttcaaacaaagtgaaaagtggggacgacatcagtgtgctctgcactgtcctgggggagcccgatgtggaggtggagttcacctggatcttcccagggcagaaggatgaaaggcctgtgacgatccaagacacttggaggttgatccacagaggactgggacacaccacgagaatctcccagagtgtcattacagtggaagactttgagacgattgatgcaggatattacatttgcactgctcagaatcttcaaggacagaccacagtagctaccactgttgagttttcctgacttggaaaaggaaatgtaatgaacttatggaaagcccatttgtgtacacagtcagctttggggttccttttattagtgctttgccagaggctgatgtcaagcaccacaccccaaccccagcgtctcgtgagtccgacccagacatccaaactaaaaggaagtcatccagtctattcacagaagtgttaacttttctaacagaaagcatgattttgattgcttacctacatacgtgttcctagtttttatacatgtgtaaacaattttatataatcaatcatttctattaaatgagcacgtttttgtaaaaaataaaaagtgggataagtgtt

SEQ ID NO: 166450 - DNA, 1905 bp, Homo sapiens
  Payload ID: 12775
  Gene Symbol: PDGFRL
  Gene Name: platelet-derived growth factor receptor-like
  Uniprot ID: Q15198
  ENST ID: ENST00000541323
  CDS Start-End: 446-1573
acttctgccttgttatcagaggagcgaggatgtggcctgtgtgccgcctaatcatgcctagaactgtctgcacctgctgatcttttgcttctgcgaactggctgcacctgctgttctcctgctcataccctagcccgtgcttaccctaattccctgttctcctgcctcaccaccagaggcccgggttgtctgcacagtctcattttccacgttattcctgtaatgaacccgtcctcccacccccaccagcagttacagggctgggtgcggagaccaactctggccagacacagaggagcagcaagaacccggggcaacggtcctgtgaaaaccgaatcctcccgcttcggcgtcccaggagcccgcccctcgcccgccgcctcccctgcgtccccgccccgcgcagccgccgcgctcctgcgctccgaggtccgaggttcccgagatgaaggtctggctgctgcttggtcttctgctggtgcacgaagcgctggaggatgttactggccaacaccttcccaagaacaagcgtccaaaagaaccaggagagaatagaatcaaacctaccaacaagaaggtgaagcccaaaattcctaaaatgaaggacagggactcagccaattcagcaccaaagacgcagtctatcatgatgcaagtgctggataaaggtcgcttccagaaacccgccgctaccctgagtctgctggcggggcaaactgtagagcttcgatgtaaagggagtagaattgggtggagctaccctgcgtatctggacacctttaaggattctcgcctcagcgtcaagcagaatgagcgctacggccagttgactctggtcaactccacctcggcagacacaggtgaattcagctgctgggtgcagctctgcagcggctacatctgcaggaaggacgaggccaaaacgggctccacctacatcttttttacagagaaaggagaactctttgtaccttctcccagctacttcgatgttgtctacttgaacccggacagacaggctgtggttccttgtcgggtgaccgtgctgtcggccaaagtcacgctccacagggaattcccagccaaggagatcccagccaatggaacggacattgtttatgacatgaagcggggctttgtgtatctgcaacctcattccgagcaccagggtgtggtttactgcagggcggaggccgggggcagatctcagatctccgtcaagtaccagctgctctatgtggcggttcccagtggccctccctcaacaaccatcttggcttcttcaaacaaagtgaaaagtggggacgacatcagtgtgctctgcactgtcctgggggagcccgatgtggaggtggagttcacctggatcttcccagggcagaaggatgaaaggcctgtgacgatccaagacacttggaggttgatccacagaggactgggacacaccacgagaatctcccagagtgtcattacagtggaagactttgagacgattgatgcaggatattacatttgcactgctcagaatcttcaaggacagaccacagtagctaccactgttgagttttcctgacttggaaaaggaaatgtaatgaacttatggaaagcccatttgtgtacacagtcagctttggggttccttttattagtgctttgccagaggctgatgtcaagcaccacaccccaaccccagcgtctcgtgagtccgacccagacatccaaactaaaaggaagtcatccagtctattcacagaagtgttaacttttctaacagaaagcatgattttgattgcttacctacatacgtgttcctagtttttatacatgtgtaaacaattttatataatcaatcatttctattaaatgagcacgtttttgtaaaaaataaaaagtgggataagtgtt

SEQ ID NO: 166451 - DNA, 2869 bp, Homo sapiens
  Payload ID: 12776
  Gene Symbol: PLEK
  Gene Name: pleckstrin
  Uniprot ID: P08567
  ENST ID: ENST00000234313
  CDS Start-End: 180-1232
tgatcttccaacccagtgaggggaagaggatgtgatcatgcgaccgccagcagaagggaaattgtgaaagcgacctgctgtagaaaaggcggcccacagccacctcagcatgcagaggaggcccagctgctgagaggagttgcctgagagtgacctttgcatctgcctgtccagccagcatggaaccaaagcggatcagagagggctaccttgtgaagaaggggagcgtgttcaatacgtggaaacccatgtgggttgtattgttagaagatggaattgaattctataagaagaaaagtgacaacagccccaaaggaatgatcccgctgaaagggagcactctgactagcccttgtcaagactttggcaaaaggatgtttgtgtttaagatcactacgaccaaacagcaggaccacttcttccaggcagccttcctggaggagagagatgcctgggttcgggatatcaagaaggccattaaatgcattgaaggaggccagaaatttgccaggaaatctaccaggaggtccattcgactgccagaaaccattgacttaggtgccttatatttgtccatgaaagacactgaaaaaggaataaaagaactgaatctagagaaggacaagaagatttttaatcactgcttcacaggtaactgcgtcattgattggctggtatccaaccagtctgttaggaatcgccaggaaggcctcatgattgcttcatcgctgctcaatgaggggtatctgcagcctgctggagacatgtccaagagtgcagtggatggaactgctgaaaaccctttcctggacaaccctgatgccttctactactttccagacagtgggttcttctgtgaagagaattccagtgatgatgatgtgattctgaaagaagaattcagaggggtcattatcaagcagggatgtttactgaagcaggggcatagaaggaaaaactggaaagtgaggaagttcatcttgagagaagaccctgcctacctgcactactatgaccctgctggggcagaagatcccctgggagcaattcacttgagaggctgtgtggtgacttcagtggagagcaactcaaatggcaggaagagtgaggaagagaacctttttgagatcatcacagcagatgaagtgcactatttcttgcaagcagccacccccaaggagcgcacagagtggatcagagccatccagatggcctcccgaactgggaagtaaagagactcctgcattcctcctcccctcctgagggaagcccatggacaagctcagtccaggacctgtccacttctgtgacaaatcaacgggaaacagcccaggggtgggaagttttcatttgcaggggggtctgaatgtaactcaccatgtggtgtgcaaggttcccctgcattgtattgctcactgcagcccctctgcccctatccatgacccccaagcagatataacaagctgtgcagcctcagtaggctgcttgccctctccaggcctcagggcctcttctggaaaatgaagaaattcaactagtagattcctgaggtccccctagcttaaaaaaaaaaaaaatctgccccatgattctaacactcgcagtagtgatagtgtatctagttgttctgctggtgtccttccttggctaagtcttggccttcagttatcttcaaatgtaccagaacctgagccaacgcctccctgtgaaactgttgctgatctgtagtacagtaccaggaagaaacctcttttgttctctttagacatcttctacttgctcttggccttgagatcgtgtaacaaaatgaaggagggctctcttctttcttcctcatcctactcaaaaacttcccgagagcagtggtggttttgagggttttgacttctattacttttggcagcctggaaagttgtgtcttctgggaaagagacctggggaggccaggagtagctgagggtcctttctgtgcccttaaaccgcccagaggagccctattccactctggttttaggctgatctgagagggtctccctttgttcctttctggagcatttctctaacgtttattacaattaggagggggaccccacatctgtgagattctgtttcatttgaggtttacagaaaaaaaaaagtggccagatgtgttccccccatgggtgagaggcctgggcaactgcctggtgaatgtgtcttgcggcagctgcagcaagtggaggggctgaactactggccagctcactggatgatgggttaatacaacaactgcactgtaaggactcagagccacacagaacttctgagaggggctgttagcattgcgcagcatcttcagttctccagtaaatgatattgcgttcgtgcctcagctttaagcacaagtagcagcagctcctgcttgagttctgagggcatcatggccctatgattaaccagagtgatctaacctagactaaaattgggaacttatttgcaatttttgaccctgaccactaactagtgattcttctccaaaattgagaaagacagcacccattgaagcagatatgtgtgtgaaagtatatttttcaattccagatttttaattttaaggctccaggaaagaaaggagagtagaacatttttcctcattttatcaaatcctctcttgccctccctcaattcccctgtaacattcctgaagctgttcccactcccagatggttttatcaatagcctagaggtaaagaactgtctttttctctgattctttaataaattatctttatagaatatgcacaagtttttctacactcagtgttaaagtatttattaatgggaagtcaacttaatgttttgaaataaatatatgactctgtttaatgca

SEQ ID NO: 166452 - DNA, 1549 bp, Homo sapiens
  Payload ID: 12777
  Gene Symbol: PLEK2
  Gene Name: pleckstrin 2
  Uniprot ID: Q9NYT0
  ENST ID: ENST00000216446
  CDS Start-End: 142-1203
gcgccagggaggcgtcgccctgccgcgtcggagctgcttcctgggcgccgtgggcgcggactgcgcgggctgcgcgggtgccgaggagcgcgaggcgcggggaaggcgcacctggggtggccctggcgtgcgggcggcgacatggaggacggcgtgctcaaggagggcttcctggtcaagaggggccacattgtccacaactggaaggcgcgatggttcatccttcggcagaacacgctggtgtactacaagcttgaggggggtcggagagtgacccctcccaagggccggatcctcctggatggctgcaccatcacctgcccctgcctggagtatgaaaaccgaccgctcctcattaagctgaagactcaaacatccacggagtacttcctggaggcctgttctcgagaggagcgggatgcctgggcctttgagatcaccggggctattcatgcagggcagccggggaaggtccagcagctgcacagcctgagaaactccttcaagctgcccccgcacatcagcctgcatcgcattgtggacaagatgcacgatagcaacaccggaatccgttcaagccccaacatggagcagggaagcacctataaaaagaccttcctcggctcctccctggtggactggctcatctccaacagcttcacggccagccgtctggaggcggtgaccctggcctccatgctcatggaggagaacttcctcaggcctgtgggtgtccgaagcatgggagccattcgctctggggatctggccgagcagttcctggatgactccacagccctgtacacttttgctgagagctacaaaaagaagataagccccaaggaagaaattagcctgagcactgtggagttaagtggcacggtggtgaaacaaggctacctggccaagcagggacacaagaggaaaaactggaaggtgcgtcgctttgttctaaggaaggatccagctttcctgcattactatgacccttccaaagaagagaacaggccagtgggtgggttttctcttcgtggttcactcgtgtctgctctggaagataatggcgttcccactggggttaaagggaatgtccagggaaacctcttcaaagtgattactaaggatgacacacactattacattcaggccagcagcaaggctgagcgagccgagtggattgaagctatcaaaaagctaacatgacaaggacctgagggaaccaggattcctccctcctaccagatgacacagacaagagttcctggagaatgggagtgttaagacttttgacttctttgtaagttttgtactgctttggagagtgaatgctgccaagagttcctcagattacaaacagcagtggtgccatttccttccccatcttcatgttacaaacctggaaaggctagaacagccattaggcgtcagcatcttgacttttccccagcatcacaaacagccatttcctcgggcaccaaagtaggttccctttgttggaacaattacactggccatgccataatgttgaataaaactctcttcttatgag

SEQ ID NO: 166453 - DNA, 695 bp, Homo sapiens
  Payload ID: 12777
  Gene Symbol: PLEK2
  Gene Name: pleckstrin 2
  ENST ID: ENST00000556532
  CDS Start-End: 1-353
tggccgagcagttcctggatgactccacagccctgtacacttttgctgagagctacaaaaagaagataagccccaaggaagaaattagcctgagcactgtggagttaagtggcacggtggtgaaacaaggctacctggccaagcaggaagagaacaggccagtgggtgggttttctcttcgtggttcactcgtgtctgctctggaagataatggcgttcccactggggttaaagggaatgtccagggaaacctcttcaaagtgattactaaggatgacacacactattacattcaggccagcagcaaggctgagcgagccgagtggattgaagctatcaaaaagctaacatgacaaggacctgagggaaccaggattcctccctcctaccagatgacacagacaagagttcctggagaatgggagtgttaagacttttgacttctttgtaagttttgtactgctttggagagtgaatgctgccaagagttcctcagattacaaacagcagtggtgccatttccttccccatcttcatgttacaaacctggaaaggctagaacagccattaggcgtcagcatcttgacttttccccagcatcacaaacagccatttcctcgggcaccaaagtaggttccctttgttggaacaattacactggccatgccataatgttgaataaaactctcttctta

SEQ ID NO: 166454 - DNA, 612 bp, Homo sapiens
  Payload ID: 12777
  Gene Symbol: PLEK2
  Gene Name: pleckstrin 2
  ENST ID: ENST00000554395
  CDS Start-End: 1-612
aaccgaccgctcctcattaagctgaagactcaaacatccacggagtacttcctggaggcctgttctcgagaggagcgggatgcctgggcctttgagatcaccggggctattcatgcagggcagccggggaaggtccagcagctgcacagcctgagaaactccttcaagctgcccccgcacatcagcctgcatcgcattgtggacaagatgcacgatagcaacaccggaatccgttcaagccccaacatggagcagggaagcacctataaaaagaccttcctcggctcctccctggtggactggctcatctccaacagcttcacggccagccgtctggaggcggtgaccctggcctccatgctcatggaggagaacttcctcaggcctgtgggtgtccgaagcatgggagccattcgctctggggatctggccgagcagttcctggatgactccacagccctgtacacttttggacacaagaggaaaaactggaaggtgcgtcgctttgttctaaggaaggatccagctttcctgcattactatgacccttccaaagaagagaacaggccagtgggtgggttttctcttcgtggttcactcgtgtctgctctg

SEQ ID NO: 166455 - DNA, 736 bp, Homo sapiens
  Payload ID: 12777
  Gene Symbol: PLEK2
  Gene Name: pleckstrin 2
  ENST ID: ENST00000553387
  CDS Start-End: 13-246
gcgggcggcgacatggaggacggcgtgctcaaggagggcttcctggtcaagaggggccacattgtccacaactggaaggcgcgatggttcatccttcggcagaacacgctggtgtactacaagcttgaggggggtcggagagtgacccctcccaagggccggatcctcctggatggctgcaccatcacctgcccctgcctggagtatgaaaaccgaccgtcgcattgtggacaagatgcacgatagcaacaccggaatccgttcaagccccaacatggagcagggaagcacctataaaaagaccttcctcggctcctccctggtggactggctcatctccaacagcttcacggccagccgtctggaggcggtgaccctggcctccatgctcatggaggagaacttcctcaggcctgtgggtgtccgaagcatgggagccattcgctctggggatctggccgagcagttcctggatgactccacagccctgtacacttttgctgagagctacaaaaagaagataagccccaaggaagaaattagcctgagcactgtggagttaagtggcacggtggtgaaacaaggctacctggccaagcagggacacaagaggaaaaactggaaggtgcgtcgctttgttctaaggaaggatccagctttcctgcattactatgacccttccaaagaagagaacaggccagtgggtgggttttctcttcgtggttcactcgtgtct
